United States Patent Application Publication US 2014/0004565 A1 - sequence listing, part 129

SEQ ID NO: 3237838 - RNA, 19 nt, Artificial Sequence
  Description of Artificial Sequence: Synthetic oligonucleotide
guugcaggcaugcccaucg

SEQ ID NO: 3237839 - RNA, 19 nt, Artificial Sequence
  Description of Artificial Sequence: Synthetic oligonucleotide
cugauuggucuccaggugg

SEQ ID NO: 3237840 - RNA, 19 nt, Artificial Sequence
  Description of Artificial Sequence: Synthetic oligonucleotide
ucagagcacacgaaggcac

SEQ ID NO: 3237841 - RNA, 19 nt, Artificial Sequence
  Description of Artificial Sequence: Synthetic oligonucleotide
uccgugaacaccagggcug

SEQ ID NO: 3237842 - RNA, 19 nt, Artificial Sequence
  Description of Artificial Sequence: Synthetic oligonucleotide
agaaggaagcccuggagga

SEQ ID NO: 3237843 - RNA, 19 nt, Artificial Sequence
  Description of Artificial Sequence: Synthetic oligonucleotide
acuuuggguagcuucuguc

SEQ ID NO: 3237844 - RNA, 19 nt, Artificial Sequence
  Description of Artificial Sequence: Synthetic oligonucleotide
ucaugaugggccacuacga

SEQ ID NO: 3237845 - RNA, 19 nt, Artificial Sequence
  Description of Artificial Sequence: Synthetic oligonucleotide
ggcauguuacauuacagug

SEQ ID NO: 3237846 - RNA, 19 nt, Artificial Sequence
  Description of Artificial Sequence: Synthetic oligonucleotide
guugaguguguucucuagg

SEQ ID NO: 3237847 - RNA, 19 nt, Artificial Sequence
  Description of Artificial Sequence: Synthetic oligonucleotide
uucucuaggucaugauggg

SEQ ID NO: 3237848 - RNA, 19 nt, Artificial Sequence
  Description of Artificial Sequence: Synthetic oligonucleotide
agugagguccgugaacacc

SEQ ID NO: 3237849 - RNA, 19 nt, Artificial Sequence
  Description of Artificial Sequence: Synthetic oligonucleotide
agcacacgaaggcacaguc

SEQ ID NO: 3237850 - RNA, 19 nt, Artificial Sequence
  Description of Artificial Sequence: Synthetic oligonucleotide
uugccagugacaugguugc

SEQ ID NO: 3237851 - RNA, 19 nt, Artificial Sequence
  Description of Artificial Sequence: Synthetic oligonucleotide
gaugagaaggaagcccugg

SEQ ID NO: 3237852 - RNA, 19 nt, Artificial Sequence
  Description of Artificial Sequence: Synthetic oligonucleotide
cuuggucucgcaccggucg

SEQ ID NO: 3237853 - RNA, 19 nt, Artificial Sequence
  Description of Artificial Sequence: Synthetic oligonucleotide
acugcacuuggucucgcac

SEQ ID NO: 3237854 - RNA, 19 nt, Artificial Sequence
  Description of Artificial Sequence: Synthetic oligonucleotide
aguugaguguguucucuag

SEQ ID NO: 3237855 - RNA, 19 nt, Artificial Sequence
  Description of Artificial Sequence: Synthetic oligonucleotide
aguacacagggccuucauc

SEQ ID NO: 3237856 - RNA, 19 nt, Artificial Sequence
  Description of Artificial Sequence: Synthetic oligonucleotide
gaagcucccgcaaaggcgc

SEQ ID NO: 3237857 - RNA, 19 nt, Artificial Sequence
  Description of Artificial Sequence: Synthetic oligonucleotide
ugaugggccacuacgacuu

SEQ ID NO: 3237858 - RNA, 19 nt, Artificial Sequence
  Description of Artificial Sequence: Synthetic oligonucleotide
ugauuggucuccagguggc

SEQ ID NO: 3237859 - RNA, 19 nt, Artificial Sequence
  Description of Artificial Sequence: Synthetic oligonucleotide
ugggccacuacgacuuugg

SEQ ID NO: 3237860 - RNA, 19 nt, Artificial Sequence
  Description of Artificial Sequence: Synthetic oligonucleotide
uggugucaaaggaugagaa

SEQ ID NO: 3237861 - RNA, 19 nt, Artificial Sequence
  Description of Artificial Sequence: Synthetic oligonucleotide
cagucagagcacacgaagg

SEQ ID NO: 3237862 - RNA, 19 nt, Artificial Sequence
  Description of Artificial Sequence: Synthetic oligonucleotide
uacgacuuuggguagcuuc

SEQ ID NO: 3237863 - RNA, 19 nt, Artificial Sequence
  Description of Artificial Sequence: Synthetic oligonucleotide
cauuacugcacuuggucuc

SEQ ID NO: 3237864 - RNA, 19 nt, Artificial Sequence
  Description of Artificial Sequence: Synthetic oligonucleotide
uuggucuccagguggcagg

SEQ ID NO: 3237865 - RNA, 19 nt, Artificial Sequence
  Description of Artificial Sequence: Synthetic oligonucleotide
auccagcccgcauugcagc

SEQ ID NO: 3237866 - RNA, 19 nt, Artificial Sequence
  Description of Artificial Sequence: Synthetic oligonucleotide
ucuuccuuccaagcgugcg

SEQ ID NO: 3237867 - RNA, 19 nt, Artificial Sequence
  Description of Artificial Sequence: Synthetic oligonucleotide
auuacugcacuuggucucg

SEQ ID NO: 3237868 - RNA, 19 nt, Artificial Sequence
  Description of Artificial Sequence: Synthetic oligonucleotide
ugcccaucgcggcagggcg

SEQ ID NO: 3237869 - RNA, 19 nt, Artificial Sequence
  Description of Artificial Sequence: Synthetic oligonucleotide
acaguccucaccguaagug

SEQ ID NO: 3237870 - RNA, 19 nt, Artificial Sequence
  Description of Artificial Sequence: Synthetic oligonucleotide
uguguucucuaggucauga

SEQ ID NO: 3237871 - RNA, 19 nt, Artificial Sequence
  Description of Artificial Sequence: Synthetic oligonucleotide
agugccauuacugcacuug

SEQ ID NO: 3237872 - RNA, 19 nt, Artificial Sequence
  Description of Artificial Sequence: Synthetic oligonucleotide
uuccuuccaagcgugcgcg

SEQ ID NO: 3237873 - RNA, 19 nt, Artificial Sequence
  Description of Artificial Sequence: Synthetic oligonucleotide
guaagugccauuacugcac

SEQ ID NO: 3237874 - RNA, 19 nt, Artificial Sequence
  Description of Artificial Sequence: Synthetic oligonucleotide
gugccauuacugcacuugg

SEQ ID NO: 3237875 - RNA, 19 nt, Artificial Sequence
  Description of Artificial Sequence: Synthetic oligonucleotide
acagugagguccgugaaca

SEQ ID NO: 3237876 - RNA, 19 nt, Artificial Sequence
  Description of Artificial Sequence: Synthetic oligonucleotide
ugcagcgcguacauuugcc

SEQ ID NO: 3237877 - RNA, 19 nt, Artificial Sequence
  Description of Artificial Sequence: Synthetic oligonucleotide
agguccgugaacaccaggg

SEQ ID NO: 3237878 - RNA, 19 nt, Artificial Sequence
  Description of Artificial Sequence: Synthetic oligonucleotide
uccucgugacagcugcagg

SEQ ID NO: 3237879 - RNA, 19 nt, Artificial Sequence
  Description of Artificial Sequence: Synthetic oligonucleotide
caugauuccucgugacagc

SEQ ID NO: 3237880 - RNA, 19 nt, Artificial Sequence
  Description of Artificial Sequence: Synthetic oligonucleotide
agggccuucaucuguggug

SEQ ID NO: 3237881 - RNA, 19 nt, Artificial Sequence
  Description of Artificial Sequence: Synthetic oligonucleotide
uacagugagguccgugaac

SEQ ID NO: 3237882 - RNA, 19 nt, Artificial Sequence
  Description of Artificial Sequence: Synthetic oligonucleotide
uaagugccauuacugcacu

SEQ ID NO: 3237883 - RNA, 19 nt, Artificial Sequence
  Description of Artificial Sequence: Synthetic oligonucleotide
caguccucaccguaagugc

SEQ ID NO: 3237884 - RNA, 19 nt, Artificial Sequence
  Description of Artificial Sequence: Synthetic oligonucleotide
uucaugcugaugcggcuga

SEQ ID NO: 3237885 - RNA, 19 nt, Artificial Sequence
  Description of Artificial Sequence: Synthetic oligonucleotide
ucguggggcacgcaguaca

SEQ ID NO: 3237886 - RNA, 19 nt, Artificial Sequence
  Description of Artificial Sequence: Synthetic oligonucleotide
ugaguguguucucuagguc

SEQ ID NO: 3237887 - RNA, 19 nt, Artificial Sequence
  Description of Artificial Sequence: Synthetic oligonucleotide
accguaagugccauuacug

SEQ ID NO: 3237888 - RNA, 19 nt, Artificial Sequence
  Description of Artificial Sequence: Synthetic oligonucleotide
guuacauuacagugagguc

SEQ ID NO: 3237889 - RNA, 19 nt, Artificial Sequence
  Description of Artificial Sequence: Synthetic oligonucleotide
guacacagggccuucaucu

SEQ ID NO: 3237890 - RNA, 19 nt, Artificial Sequence
  Description of Artificial Sequence: Synthetic oligonucleotide
gacaugguugcaggcaugc

SEQ ID NO: 3237891 - RNA, 19 nt, Artificial Sequence
  Description of Artificial Sequence: Synthetic oligonucleotide
cuucuuccuuccaagcgug

SEQ ID NO: 3237892 - RNA, 19 nt, Artificial Sequence
  Description of Artificial Sequence: Synthetic oligonucleotide
cuuccuuccaagcgugcgc

SEQ ID NO: 3237893 - RNA, 19 nt, Artificial Sequence
  Description of Artificial Sequence: Synthetic oligonucleotide
aaggcgcugaggugccuuc

SEQ ID NO: 3237894 - RNA, 19 nt, Artificial Sequence
  Description of Artificial Sequence: Synthetic oligonucleotide
ugaacaccagggcugcaaa

SEQ ID NO: 3237895 - RNA, 19 nt, Artificial Sequence
  Description of Artificial Sequence: Synthetic oligonucleotide
uucggggcaacuucaugcu

SEQ ID NO: 3237896 - RNA, 19 nt, Artificial Sequence
  Description of Artificial Sequence: Synthetic oligonucleotide
aggaugagaaggaagcccu

SEQ ID NO: 3237897 - RNA, 19 nt, Artificial Sequence
  Description of Artificial Sequence: Synthetic oligonucleotide
gcaugauuccucgugacag

SEQ ID NO: 3237898 - RNA, 19 nt, Artificial Sequence
  Description of Artificial Sequence: Synthetic oligonucleotide
gauucggggcaacuucaug

SEQ ID NO: 3237899 - RNA, 19 nt, Artificial Sequence
  Description of Artificial Sequence: Synthetic oligonucleotide
gcagucagagcacacgaag

SEQ ID NO: 3237900 - RNA, 19 nt, Artificial Sequence
  Description of Artificial Sequence: Synthetic oligonucleotide
gccacuacgacuuugggua

SEQ ID NO: 3237901 - RNA, 19 nt, Artificial Sequence
  Description of Artificial Sequence: Synthetic oligonucleotide
ggugucaaaggaugagaag

SEQ ID NO: 3237902 - RNA, 19 nt, Artificial Sequence
  Description of Artificial Sequence: Synthetic oligonucleotide
uuugcgcugauuggucucc

SEQ ID NO: 3237903 - RNA, 19 nt, Artificial Sequence
  Description of Artificial Sequence: Synthetic oligonucleotide
uacacagggccuucaucug

SEQ ID NO: 3237904 - RNA, 19 nt, Artificial Sequence
  Description of Artificial Sequence: Synthetic oligonucleotide
gcaacuucaugcugaugcg

SEQ ID NO: 3237905 - RNA, 19 nt, Artificial Sequence
  Description of Artificial Sequence: Synthetic oligonucleotide
uggguagcuucugucugcg

SEQ ID NO: 3237906 - RNA, 19 nt, Artificial Sequence
  Description of Artificial Sequence: Synthetic oligonucleotide
uuccaggaaacugcaguug

SEQ ID NO: 3237907 - RNA, 19 nt, Artificial Sequence
  Description of Artificial Sequence: Synthetic oligonucleotide
agcagcgugagcagcgcgc

SEQ ID NO: 3237908 - RNA, 19 nt, Artificial Sequence
  Description of Artificial Sequence: Synthetic oligonucleotide
uccagcccgcauugcagcg

SEQ ID NO: 3237909 - RNA, 19 nt, Artificial Sequence
  Description of Artificial Sequence: Synthetic oligonucleotide
ugauuccucgugacagcug

SEQ ID NO: 3237910 - RNA, 19 nt, Artificial Sequence
  Description of Artificial Sequence: Synthetic oligonucleotide
ucucuaggucaugaugggc

SEQ ID NO: 3237911 - RNA, 19 nt, Artificial Sequence
  Description of Artificial Sequence: Synthetic oligonucleotide
uugcagcgcguacauuugc

SEQ ID NO: 3237912 - RNA, 19 nt, Artificial Sequence
  Description of Artificial Sequence: Synthetic oligonucleotide
gcacgcaguacacagggcc

SEQ ID NO: 3237913 - RNA, 19 nt, Artificial Sequence
  Description of Artificial Sequence: Synthetic oligonucleotide
gggcacgcaguacacaggg

SEQ ID NO: 3237914 - RNA, 19 nt, Artificial Sequence
  Description of Artificial Sequence: Synthetic oligonucleotide
ugacaugguugcaggcaug

SEQ ID NO: 3237915 - RNA, 19 nt, Artificial Sequence
  Description of Artificial Sequence: Synthetic oligonucleotide
auuggucuccagguggcag

SEQ ID NO: 3237916 - RNA, 19 nt, Artificial Sequence
  Description of Artificial Sequence: Synthetic oligonucleotide
accggucgccgauccagcc

SEQ ID NO: 3237917 - RNA, 19 nt, Artificial Sequence
  Description of Artificial Sequence: Synthetic oligonucleotide
gaaauuaugacaucagaag

SEQ ID NO: 3237918 - RNA, 19 nt, Artificial Sequence
  Description of Artificial Sequence: Synthetic oligonucleotide
aauaggccaagucugauuc

SEQ ID NO: 3237919 - RNA, 19 nt, Artificial Sequence
  Description of Artificial Sequence: Synthetic oligonucleotide
aggugaauaaaucaauugc

SEQ ID NO: 3237920 - RNA, 19 nt, Artificial Sequence
  Description of Artificial Sequence: Synthetic oligonucleotide
uuguuuacgagacagacca

SEQ ID NO: 3237921 - RNA, 19 nt, Artificial Sequence
  Description of Artificial Sequence: Synthetic oligonucleotide
gauucuuucacauagcuuc

SEQ ID NO: 3237922 - RNA, 19 nt, Artificial Sequence
  Description of Artificial Sequence: Synthetic oligonucleotide
cucauuguugcauagacgg

SEQ ID NO: 3237923 - RNA, 19 nt, Artificial Sequence
  Description of Artificial Sequence: Synthetic oligonucleotide
aaauuaugacaucagaaga

SEQ ID NO: 3237924 - RNA, 19 nt, Artificial Sequence
  Description of Artificial Sequence: Synthetic oligonucleotide
aaugacgggaacuacagca

SEQ ID NO: 3237925 - RNA, 19 nt, Artificial Sequence
  Description of Artificial Sequence: Synthetic oligonucleotide
acugaaauccaaaauaggc

SEQ ID NO: 3237926 - RNA, 19 nt, Artificial Sequence
  Description of Artificial Sequence: Synthetic oligonucleotide
acugacuuuccauagaagg

SEQ ID NO: 3237927 - RNA, 19 nt, Artificial Sequence
  Description of Artificial Sequence: Synthetic oligonucleotide
agaaacaucugauucacuc

SEQ ID NO: 3237928 - RNA, 19 nt, Artificial Sequence
  Description of Artificial Sequence: Synthetic oligonucleotide
ucugauucacuccagacug

SEQ ID NO: 3237929 - RNA, 19 nt, Artificial Sequence
  Description of Artificial Sequence: Synthetic oligonucleotide
aggacuuucuuacaacucc

SEQ ID NO: 3237930 - RNA, 19 nt, Artificial Sequence
  Description of Artificial Sequence: Synthetic oligonucleotide
aaaggcauaauucacugaa

SEQ ID NO: 3237931 - RNA, 19 nt, Artificial Sequence
  Description of Artificial Sequence: Synthetic oligonucleotide
cuuaaugaugcuauuuggg

SEQ ID NO: 3237932 - RNA, 19 nt, Artificial Sequence
  Description of Artificial Sequence: Synthetic oligonucleotide
uacgagacagaccagaaga

SEQ ID NO: 3237933 - RNA, 19 nt, Artificial Sequence
  Description of Artificial Sequence: Synthetic oligonucleotide
acaucaguuauugucaggc

SEQ ID NO: 3237934 - RNA, 19 nt, Artificial Sequence
  Description of Artificial Sequence: Synthetic oligonucleotide
uuuggcgaaacucguaagg

SEQ ID NO: 3237935 - RNA, 19 nt, Artificial Sequence
  Description of Artificial Sequence: Synthetic oligonucleotide
uucacugaaauccaaaaua

SEQ ID NO: 3237936 - RNA, 19 nt, Artificial Sequence
  Description of Artificial Sequence: Synthetic oligonucleotide
acagaagacuuaaugaugc

SEQ ID NO: 3237937 - RNA, 19 nt, Artificial Sequence
  Description of Artificial Sequence: Synthetic oligonucleotide
guugcauagacggugaugg

SEQ ID NO: 3237938 - RNA, 19 nt, Artificial Sequence
  Description of Artificial Sequence: Synthetic oligonucleotide
caggcaaugacuuccaggg

SEQ ID NO: 3237939 - RNA, 19 nt, Artificial Sequence
  Description of Artificial Sequence: Synthetic oligonucleotide
acuuaaugaugcuauuugg

SEQ ID NO: 3237940 - RNA, 19 nt, Artificial Sequence
  Description of Artificial Sequence: Synthetic oligonucleotide
auugcuucaacugacuuuc

SEQ ID NO: 3237941 - RNA, 19 nt, Artificial Sequence
  Description of Artificial Sequence: Synthetic oligonucleotide
gaaaaggcauaauucacug

SEQ ID NO: 3237942 - RNA, 19 nt, Artificial Sequence
  Description of Artificial Sequence: Synthetic oligonucleotide
augauacuggcccauuacc

SEQ ID NO: 3237943 - RNA, 19 nt, Artificial Sequence
  Description of Artificial Sequence: Synthetic oligonucleotide
gacuuaaugaugcuauuug

SEQ ID NO: 3237944 - RNA, 19 nt, Artificial Sequence
  Description of Artificial Sequence: Synthetic oligonucleotide
aauucacugaaauccaaaa

SEQ ID NO: 3237945 - RNA, 19 nt, Artificial Sequence
  Description of Artificial Sequence: Synthetic oligonucleotide
ugaauaaaucaauugcuuc

SEQ ID NO: 3237946 - RNA, 19 nt, Artificial Sequence
  Description of Artificial Sequence: Synthetic oligonucleotide
ucgacagaagacuuaauga

SEQ ID NO: 3237947 - RNA, 19 nt, Artificial Sequence
  Description of Artificial Sequence: Synthetic oligonucleotide
aaccgaaaaggcauaauuc

SEQ ID NO: 3237948 - RNA, 19 nt, Artificial Sequence
  Description of Artificial Sequence: Synthetic oligonucleotide
ucuuacaacuccuugcugu

SEQ ID NO: 3237949 - RNA, 19 nt, Artificial Sequence
  Description of Artificial Sequence: Synthetic oligonucleotide
accagaagaugauacuggc

SEQ ID NO: 3237950 - RNA, 19 nt, Artificial Sequence
  Description of Artificial Sequence: Synthetic oligonucleotide
gacuucuggagaaugacgg

SEQ ID NO: 3237951 - RNA, 19 nt, Artificial Sequence
  Description of Artificial Sequence: Synthetic oligonucleotide
aggauuuaccugccgaggc

SEQ ID NO: 3237952 - RNA, 19 nt, Artificial Sequence
  Description of Artificial Sequence: Synthetic oligonucleotide
aaaccgaaaaggcauaauu

SEQ ID NO: 3237953 - RNA, 19 nt, Artificial Sequence
  Description of Artificial Sequence: Synthetic oligonucleotide
uuauugucaggcaaugacu

SEQ ID NO: 3237954 - RNA, 19 nt, Artificial Sequence
  Description of Artificial Sequence: Synthetic oligonucleotide
gcauaauucacugaaaucc

SEQ ID NO: 3237955 - RNA, 19 nt, Artificial Sequence
  Description of Artificial Sequence: Synthetic oligonucleotide
gaggugaauaaaucaauug

SEQ ID NO: 3237956 - RNA, 19 nt, Artificial Sequence
  Description of Artificial Sequence: Synthetic oligonucleotide
uuugggaugcauuuccuug

SEQ ID NO: 3237957 - RNA, 19 nt, Artificial Sequence
  Description of Artificial Sequence: Synthetic oligonucleotide
gaaacaucugauucacucc

SEQ ID NO: 3237958 - RNA, 19 nt, Artificial Sequence
  Description of Artificial Sequence: Synthetic oligonucleotide
guuauugucaggcaaugac

SEQ ID NO: 3237959 - RNA, 19 nt, Artificial Sequence
  Description of Artificial Sequence: Synthetic oligonucleotide
uuacccuugaccuagccaa

SEQ ID NO: 3237960 - RNA, 19 nt, Artificial Sequence
  Description of Artificial Sequence: Synthetic oligonucleotide
uuucacauagcuuccugcc

SEQ ID NO: 3237961 - RNA, 19 nt, Artificial Sequence
  Description of Artificial Sequence: Synthetic oligonucleotide
uucucauuguugcauagac

SEQ ID NO: 3237962 - RNA, 19 nt, Artificial Sequence
  Description of Artificial Sequence: Synthetic oligonucleotide
cuauuugggaugcauuucc

SEQ ID NO: 3237963 - RNA, 19 nt, Artificial Sequence
  Description of Artificial Sequence: Synthetic oligonucleotide
ucaggcaaugacuuccagg

SEQ ID NO: 3237964 - RNA, 19 nt, Artificial Sequence
  Description of Artificial Sequence: Synthetic oligonucleotide
aaucgaagaaucuccuccu

SEQ ID NO: 3237965 - RNA, 19 nt, Artificial Sequence
  Description of Artificial Sequence: Synthetic oligonucleotide
cucguaaggacuuucuuac

SEQ ID NO: 3237966 - RNA, 19 nt, Artificial Sequence
  Description of Artificial Sequence: Synthetic oligonucleotide
aagucugauuccuguagag

SEQ ID NO: 3237967 - RNA, 19 nt, Artificial Sequence
  Description of Artificial Sequence: Synthetic oligonucleotide
uccauagaaggcuagacuu

SEQ ID NO: 3237968 - RNA, 19 nt, Artificial Sequence
  Description of Artificial Sequence: Synthetic oligonucleotide
cugacuuuccauagaaggc

SEQ ID NO: 3237969 - RNA, 19 nt, Artificial Sequence
  Description of Artificial Sequence: Synthetic oligonucleotide
accuuuauuuguuuacgag

SEQ ID NO: 3237970 - RNA, 19 nt, Artificial Sequence
  Description of Artificial Sequence: Synthetic oligonucleotide
uuacaggcagcacuggagc

SEQ ID NO: 3237971 - RNA, 19 nt, Artificial Sequence
  Description of Artificial Sequence: Synthetic oligonucleotide
gauucuagcccaaucgaag

SEQ ID NO: 3237972 - RNA, 19 nt, Artificial Sequence
  Description of Artificial Sequence: Synthetic oligonucleotide
aauugcuucaacugacuuu

SEQ ID NO: 3237973 - RNA, 19 nt, Artificial Sequence
  Description of Artificial Sequence: Synthetic oligonucleotide
gucucuuucccauuacagg

SEQ ID NO: 3237974 - RNA, 19 nt, Artificial Sequence
  Description of Artificial Sequence: Synthetic oligonucleotide
uagacuugccaaaggaaug

SEQ ID NO: 3237975 - RNA, 19 nt, Artificial Sequence
  Description of Artificial Sequence: Synthetic oligonucleotide
ugcauuuccuugcugcuug

SEQ ID NO: 3237976 - RNA, 19 nt, Artificial Sequence
  Description of Artificial Sequence: Synthetic oligonucleotide
aacuccuugcuguugugug

SEQ ID NO: 3237977 - RNA, 19 nt, Artificial Sequence
  Description of Artificial Sequence: Synthetic oligonucleotide
auccaaaauaggccaaguc

SEQ ID NO: 3237978 - RNA, 19 nt, Artificial Sequence
  Description of Artificial Sequence: Synthetic oligonucleotide
uauugucaggcaaugacuu

SEQ ID NO: 3237979 - RNA, 19 nt, Artificial Sequence
  Description of Artificial Sequence: Synthetic oligonucleotide
cucgacagaagacuuaaug

SEQ ID NO: 3237980 - RNA, 19 nt, Artificial Sequence
  Description of Artificial Sequence: Synthetic oligonucleotide
ucagaagauucuuucacau

SEQ ID NO: 3237981 - RNA, 19 nt, Artificial Sequence
  Description of Artificial Sequence: Synthetic oligonucleotide
aaggcagcuaggauuuacc

SEQ ID NO: 3237982 - RNA, 19 nt, Artificial Sequence
  Description of Artificial Sequence: Synthetic oligonucleotide
uugaucaauguuccaguga

SEQ ID NO: 3237983 - RNA, 19 nt, Artificial Sequence
  Description of Artificial Sequence: Synthetic oligonucleotide
agaaauuaugacaucagaa

SEQ ID NO: 3237984 - RNA, 19 nt, Artificial Sequence
  Description of Artificial Sequence: Synthetic oligonucleotide
ucuuucccauuacaggcag

SEQ ID NO: 3237985 - RNA, 19 nt, Artificial Sequence
  Description of Artificial Sequence: Synthetic oligonucleotide
uuccauagaaggcuagacu

SEQ ID NO: 3237986 - RNA, 19 nt, Artificial Sequence
  Description of Artificial Sequence: Synthetic oligonucleotide
uaauucacugaaauccaaa

SEQ ID NO: 3237987 - RNA, 19 nt, Artificial Sequence
  Description of Artificial Sequence: Synthetic oligonucleotide
gcagcuaggauuuaccugc

SEQ ID NO: 3237988 - RNA, 19 nt, Artificial Sequence
  Description of Artificial Sequence: Synthetic oligonucleotide
uuacgagacagaccagaag

SEQ ID NO: 3237989 - RNA, 19 nt, Artificial Sequence
  Description of Artificial Sequence: Synthetic oligonucleotide
gaugauacuggcccauuac

SEQ ID NO: 3237990 - RNA, 19 nt, Artificial Sequence
  Description of Artificial Sequence: Synthetic oligonucleotide
ucaguuauugucaggcaau

SEQ ID NO: 3237991 - RNA, 19 nt, Artificial Sequence
  Description of Artificial Sequence: Synthetic oligonucleotide
ucccaaaccgaaaaggcau

SEQ ID NO: 3237992 - RNA, 19 nt, Artificial Sequence
  Description of Artificial Sequence: Synthetic oligonucleotide
uagaaggcuagacuugcca

SEQ ID NO: 3237993 - RNA, 19 nt, Artificial Sequence
  Description of Artificial Sequence: Synthetic oligonucleotide
ucaggccugauucuagccc

SEQ ID NO: 3237994 - RNA, 19 nt, Artificial Sequence
  Description of Artificial Sequence: Synthetic oligonucleotide
auguugaucaauguuccag

SEQ ID NO: 3237995 - RNA, 19 nt, Artificial Sequence
  Description of Artificial Sequence: Synthetic oligonucleotide
ugacuuuccauagaaggcu

SEQ ID NO: 3237996 - RNA, 19 nt, Artificial Sequence
  Description of Artificial Sequence: Synthetic oligonucleotide
cuaggauuuaccugccgag

SEQ ID NO: 3237997 - RNA, 19 nt, Artificial Sequence
  Description of Artificial Sequence: Synthetic oligonucleotide
gaccagaagaugauacugg

SEQ ID NO: 3237998 - RNA, 19 nt, Artificial Sequence
  Description of Artificial Sequence: Synthetic oligonucleotide
aucugauucacuccagacu

SEQ ID NO: 3237999 - RNA, 19 nt, Artificial Sequence
  Description of Artificial Sequence: Synthetic oligonucleotide
acuuucuuacaacuccuug

SEQ ID NO: 3238000 - RNA, 19 nt, Artificial Sequence
  Description of Artificial Sequence: Synthetic oligonucleotide
gacagaagacuuaaugaug

SEQ ID NO: 3238001 - RNA, 19 nt, Artificial Sequence
  Description of Artificial Sequence: Synthetic oligonucleotide
ggaacuacagcaugggcag

SEQ ID NO: 3238002 - RNA, 19 nt, Artificial Sequence
  Description of Artificial Sequence: Synthetic oligonucleotide
aauguugaucaauguucca

SEQ ID NO: 3238003 - RNA, 19 nt, Artificial Sequence
  Description of Artificial Sequence: Synthetic oligonucleotide
uugggaugcauuuccuugc

SEQ ID NO: 3238004 - RNA, 19 nt, Artificial Sequence
  Description of Artificial Sequence: Synthetic oligonucleotide
aaggacuuucuuacaacuc

SEQ ID NO: 3238005 - RNA, 19 nt, Artificial Sequence
  Description of Artificial Sequence: Synthetic oligonucleotide
ucuuucacauagcuuccug

SEQ ID NO: 3238006 - RNA, 19 nt, Artificial Sequence
  Description of Artificial Sequence: Synthetic oligonucleotide
ugacaaggcagcuaggauu

SEQ ID NO: 3238007 - RNA, 19 nt, Artificial Sequence
  Description of Artificial Sequence: Synthetic oligonucleotide
cuugccaaaggaauguuga

SEQ ID NO: 3238008 - RNA, 19 nt, Artificial Sequence
  Description of Artificial Sequence: Synthetic oligonucleotide
aucagaagauucuuucaca

SEQ ID NO: 3238009 - RNA, 19 nt, Artificial Sequence
  Description of Artificial Sequence: Synthetic oligonucleotide
uacaacuccuugcuguugu

SEQ ID NO: 3238010 - RNA, 19 nt, Artificial Sequence
  Description of Artificial Sequence: Synthetic oligonucleotide
uuuacgagacagaccagaa

SEQ ID NO: 3238011 - RNA, 19 nt, Artificial Sequence
  Description of Artificial Sequence: Synthetic oligonucleotide
gggaacaucaguuauuguc

SEQ ID NO: 3238012 - RNA, 19 nt, Artificial Sequence
  Description of Artificial Sequence: Synthetic oligonucleotide
ucaacugacuuuccauaga

SEQ ID NO: 3238013 - RNA, 19 nt, Artificial Sequence
  Description of Artificial Sequence: Synthetic oligonucleotide
uuucccauuacaggcagca

SEQ ID NO: 3238014 - RNA, 19 nt, Artificial Sequence
  Description of Artificial Sequence: Synthetic oligonucleotide
aacuacagcaugggcagag

SEQ ID NO: 3238015 - RNA, 19 nt, Artificial Sequence
  Description of Artificial Sequence: Synthetic oligonucleotide
accagaaauuaugacauca

SEQ ID NO: 3238016 - RNA, 19 nt, Artificial Sequence
  Description of Artificial Sequence: Synthetic oligonucleotide
uuuuggcgaaacucguaag

SEQ ID NO: 3238017 - RNA, 19 nt, Artificial Sequence
  Description of Artificial Sequence: Synthetic oligonucleotide
gaagcugacaucuugagga

SEQ ID NO: 3238018 - RNA, 19 nt, Artificial Sequence
  Description of Artificial Sequence: Synthetic oligonucleotide
augguuuagagucucagug

SEQ ID NO: 3238019 - RNA, 19 nt, Artificial Sequence
  Description of Artificial Sequence: Synthetic oligonucleotide
ugcuuauuucuucagggcc

SEQ ID NO: 3238020 - RNA, 19 nt, Artificial Sequence
  Description of Artificial Sequence: Synthetic oligonucleotide
uccaguuauggccuugugg

SEQ ID NO: 3238021 - RNA, 19 nt, Artificial Sequence
  Description of Artificial Sequence: Synthetic oligonucleotide
auuucuucagggccggccc

SEQ ID NO: 3238022 - RNA, 19 nt, Artificial Sequence
  Description of Artificial Sequence: Synthetic oligonucleotide
uccugcacugcaaaguggg

SEQ ID NO: 3238023 - RNA, 19 nt, Artificial Sequence
  Description of Artificial Sequence: Synthetic oligonucleotide
ugaagcugacaucuugagg

SEQ ID NO: 3238024 - RNA, 19 nt, Artificial Sequence
  Description of Artificial Sequence: Synthetic oligonucleotide
agugggaggcagcacagcc

SEQ ID NO: 3238025 - RNA, 19 nt, Artificial Sequence
  Description of Artificial Sequence: Synthetic oligonucleotide
ucaucauccuuccucagcu

SEQ ID NO: 3238026 - RNA, 19 nt, Artificial Sequence
  Description of Artificial Sequence: Synthetic oligonucleotide
aaugccugcacuuguggcu

SEQ ID NO: 3238027 - RNA, 19 nt, Artificial Sequence
  Description of Artificial Sequence: Synthetic oligonucleotide
ugcacugcaaagugggagg

SEQ ID NO: 3238028 - RNA, 19 nt, Artificial Sequence
  Description of Artificial Sequence: Synthetic oligonucleotide
agagucucaguguugagca

SEQ ID NO: 3238029 - RNA, 19 nt, Artificial Sequence
  Description of Artificial Sequence: Synthetic oligonucleotide
uuuagagucucaguguuga

SEQ ID NO: 3238030 - RNA, 19 nt, Artificial Sequence
  Description of Artificial Sequence: Synthetic oligonucleotide
ggugcuuauuucuucaggg

SEQ ID NO: 3238031 - RNA, 19 nt, Artificial Sequence
  Description of Artificial Sequence: Synthetic oligonucleotide
ugaaugccugcacuugugg

SEQ ID NO: 3238032 - RNA, 19 nt, Artificial Sequence
  Description of Artificial Sequence: Synthetic oligonucleotide
aaucccugaaugccugcac

SEQ ID NO: 3238033 - RNA, 19 nt, Artificial Sequence
  Description of Artificial Sequence: Synthetic oligonucleotide
gggaugaugguuuagaguc

SEQ ID NO: 3238034 - RNA, 19 nt, Artificial Sequence
  Description of Artificial Sequence: Synthetic oligonucleotide
ccaguuauggccuuguggg

SEQ ID NO: 3238035 - RNA, 19 nt, Artificial Sequence
  Description of Artificial Sequence: Synthetic oligonucleotide
gaucagcugguccagcggg

SEQ ID NO: 3238036 - RNA, 19 nt, Artificial Sequence
  Description of Artificial Sequence: Synthetic oligonucleotide
agagcgggugaucagcugg

SEQ ID NO: 3238037 - RNA, 19 nt, Artificial Sequence
  Description of Artificial Sequence: Synthetic oligonucleotide
caugcaaucccugaaugcc

SEQ ID NO: 3238038 - RNA, 19 nt, Artificial Sequence
  Description of Artificial Sequence: Synthetic oligonucleotide
aggcagcacagccagagcg

SEQ ID NO: 3238039 - RNA, 19 nt, Artificial Sequence
  Description of Artificial Sequence: Synthetic oligonucleotide
aguuauggccuugugggac

SEQ ID NO: 3238040 - RNA, 19 nt, Artificial Sequence
  Description of Artificial Sequence: Synthetic oligonucleotide
ucaugcaaucccugaaugc

SEQ ID NO: 3238041 - RNA, 19 nt, Artificial Sequence
  Description of Artificial Sequence: Synthetic oligonucleotide
ucugcaguuccucccgccg

SEQ ID NO: 3238042 - RNA, 19 nt, Artificial Sequence
  Description of Artificial Sequence: Synthetic oligonucleotide
uuguggcuggcacugacgc

SEQ ID NO: 3238043 - RNA, 19 nt, Artificial Sequence
  Description of Artificial Sequence: Synthetic oligonucleotide
ugugcgcucaugcaauccc

SEQ ID NO: 3238044 - RNA, 19 nt, Artificial Sequence
  Description of Artificial Sequence: Synthetic oligonucleotide
uuccucaucauccuuccuc

SEQ ID NO: 3238045 - RNA, 19 nt, Artificial Sequence
  Description of Artificial Sequence: Synthetic oligonucleotide
ucaguguugagcacucgcu

SEQ ID NO: 3238046 - RNA, 19 nt, Artificial Sequence
  Description of Artificial Sequence: Synthetic oligonucleotide
gucggguccaguuauggcc

SEQ ID NO: 3238047 - RNA, 19 nt, Artificial Sequence
  Description of Artificial Sequence: Synthetic oligonucleotide
ugaucagcugguccagcgg

SEQ ID NO: 3238048 - RNA, 19 nt, Artificial Sequence
  Description of Artificial Sequence: Synthetic oligonucleotide
ugggaggcagcacagccag

SEQ ID NO: 3238049 - RNA, 19 nt, Artificial Sequence
  Description of Artificial Sequence: Synthetic oligonucleotide
ugcucuuuccuccucugca

SEQ ID NO: 3238050 - RNA, 19 nt, Artificial Sequence
  Description of Artificial Sequence: Synthetic oligonucleotide
cuugccagggucucucugg

SEQ ID NO: 3238051 - RNA, 19 nt, Artificial Sequence
  Description of Artificial Sequence: Synthetic oligonucleotide
aguguugagcacucgcuug

SEQ ID NO: 3238052 - RNA, 19 nt, Artificial Sequence
  Description of Artificial Sequence: Synthetic oligonucleotide
cucgcuugcucuuuccucc

SEQ ID NO: 3238053 - RNA, 19 nt, Artificial Sequence
  Description of Artificial Sequence: Synthetic oligonucleotide
gucuucuuccucaucaucc

SEQ ID NO: 3238054 - RNA, 19 nt, Artificial Sequence
  Description of Artificial Sequence: Synthetic oligonucleotide
gacugaagcugacaucuug

SEQ ID NO: 3238055 - RNA, 19 nt, Artificial Sequence
  Description of Artificial Sequence: Synthetic oligonucleotide
ugaugguuuagagucucag

SEQ ID NO: 3238056 - RNA, 19 nt, Artificial Sequence
  Description of Artificial Sequence: Synthetic oligonucleotide
uuucuucuugccagggucu

SEQ ID NO: 3238057 - RNA, 19 nt, Artificial Sequence
  Description of Artificial Sequence: Synthetic oligonucleotide
uccucaucauccuuccuca

SEQ ID NO: 3238058 - RNA, 19 nt, Artificial Sequence
  Description of Artificial Sequence: Synthetic oligonucleotide
guuucuucuugccaggguc

SEQ ID NO: 3238059 - RNA, 19 nt, Artificial Sequence
  Description of Artificial Sequence: Synthetic oligonucleotide
ugguuuagagucucagugu

SEQ ID NO: 3238060 - RNA, 19 nt, Artificial Sequence
  Description of Artificial Sequence: Synthetic oligonucleotide
uagagucucaguguugagc

SEQ ID NO: 3238061 - RNA, 19 nt, Artificial Sequence
  Description of Artificial Sequence: Synthetic oligonucleotide
uugagcacucgcuugcucu

SEQ ID NO: 3238062 - RNA, 19 nt, Artificial Sequence
  Description of Artificial Sequence: Synthetic oligonucleotide
ucuuccucaucauccuucc

SEQ ID NO: 3238063 - RNA, 19 nt, Artificial Sequence
  Description of Artificial Sequence: Synthetic oligonucleotide
uccucugcaguuccucccg

SEQ ID NO: 3238064 - RNA, 19 nt, Artificial Sequence
  Description of Artificial Sequence: Synthetic oligonucleotide
gaaugccugcacuuguggc

SEQ ID NO: 3238065 - RNA, 19 nt, Artificial Sequence
  Description of Artificial Sequence: Synthetic oligonucleotide
uggggaugaugguuuagag

SEQ ID NO: 3238066 - RNA, 19 nt, Artificial Sequence
  Description of Artificial Sequence: Synthetic oligonucleotide
uucuuccucaucauccuuc

SEQ ID NO: 3238067 - RNA, 19 nt, Artificial Sequence
  Description of Artificial Sequence: Synthetic oligonucleotide
ugcaaucccugaaugccug

SEQ ID NO: 3238068 - RNA, 19 nt, Artificial Sequence
  Description of Artificial Sequence: Synthetic oligonucleotide
acuccugcacugcaaagug

SEQ ID NO: 3238069 - RNA, 19 nt, Artificial Sequence
  Description of Artificial Sequence: Synthetic oligonucleotide
uucagggccggcccugugg

SEQ ID NO: 3238070 - RNA, 19 nt, Artificial Sequence
  Description of Artificial Sequence: Synthetic oligonucleotide
uauuucuucagggccggcc

SEQ ID NO: 3238071 - RNA, 19 nt, Artificial Sequence
  Description of Artificial Sequence: Synthetic oligonucleotide
ucuucuuccucaucauccu

SEQ ID NO: 3238072 - RNA, 19 nt, Artificial Sequence
  Description of Artificial Sequence: Synthetic oligonucleotide
acuuguggcuggcacugac

SEQ ID NO: 3238073 - RNA, 19 nt, Artificial Sequence
  Description of Artificial Sequence: Synthetic oligonucleotide
uuuccuccucugcaguucc

SEQ ID NO: 3238074 - RNA, 19 nt, Artificial Sequence
  Description of Artificial Sequence: Synthetic oligonucleotide
acugcaaagugggaggcag

SEQ ID NO: 3238075 - RNA, 19 nt, Artificial Sequence
  Description of Artificial Sequence: Synthetic oligonucleotide
ucucugggugcuuauuucu

SEQ ID NO: 3238076 - RNA, 19 nt, Artificial Sequence
  Description of Artificial Sequence: Synthetic oligonucleotide
cucaguguugagcacucgc

SEQ ID NO: 3238077 - RNA, 19 nt, Artificial Sequence
  Description of Artificial Sequence: Synthetic oligonucleotide
gugaucagcugguccagcg

SEQ ID NO: 3238078 - RNA, 19 nt, Artificial Sequence
  Description of Artificial Sequence: Synthetic oligonucleotide
ucagggccggcccuguggg

SEQ ID NO: 3238079 - RNA, 19 nt, Artificial Sequence
  Description of Artificial Sequence: Synthetic oligonucleotide
acucgcuugcucuuuccuc

SEQ ID NO: 3238080 - RNA, 19 nt, Artificial Sequence
  Description of Artificial Sequence: Synthetic oligonucleotide
cucaugcaaucccugaaug

SEQ ID NO: 3238081 - RNA, 19 nt, Artificial Sequence
  Description of Artificial Sequence: Synthetic oligonucleotide
cuuauuucuucagggccgg

SEQ ID NO: 3238082 - RNA, 19 nt, Artificial Sequence
  Description of Artificial Sequence: Synthetic oligonucleotide
cucaucauccuuccucagc

SEQ ID NO: 3238083 - RNA, 19 nt, Artificial Sequence
  Description of Artificial Sequence: Synthetic oligonucleotide
cugaagcugacaucuugag

SEQ ID NO: 3238084 - RNA, 19 nt, Artificial Sequence
  Description of Artificial Sequence: Synthetic oligonucleotide
gugcuuauuucuucagggc

SEQ ID NO: 3238085 - RNA, 19 nt, Artificial Sequence
  Description of Artificial Sequence: Synthetic oligonucleotide
aaagugggaggcagcacag

SEQ ID NO: 3238086 - RNA, 19 nt, Artificial Sequence
  Description of Artificial Sequence: Synthetic oligonucleotide
acugacgccaguccuggug

SEQ ID NO: 3238087 - RNA, 19 nt, Artificial Sequence
  Description of Artificial Sequence: Synthetic oligonucleotide
uugccagggucucucuggg

SEQ ID NO: 3238088 - RNA, 19 nt, Artificial Sequence
  Description of Artificial Sequence: Synthetic oligonucleotide
aucauccuuccucagcugu

SEQ ID NO: 3238089 - RNA, 19 nt, Artificial Sequence
  Description of Artificial Sequence: Synthetic oligonucleotide
cuuguggcuggcacugacg

SEQ ID NO: 3238090 - RNA, 19 nt, Artificial Sequence
  Description of Artificial Sequence: Synthetic oligonucleotide
gcuuauuucuucagggccg

SEQ ID NO: 3238091 - RNA, 19 nt, Artificial Sequence
  Description of Artificial Sequence: Synthetic oligonucleotide
caaagugggaggcagcaca

SEQ ID NO: 3238092 - RNA, 19 nt, Artificial Sequence
  Description of Artificial Sequence: Synthetic oligonucleotide
ucggguccaguuauggccu

SEQ ID NO: 3238093 - RNA, 19 nt, Artificial Sequence
  Description of Artificial Sequence: Synthetic oligonucleotide
ugcaaagugggaggcagca

SEQ ID NO: 3238094 - RNA, 19 nt, Artificial Sequence
  Description of Artificial Sequence: Synthetic oligonucleotide
gaugaugguuuagagucuc

SEQ ID NO: 3238095 - RNA, 19 nt, Artificial Sequence
  Description of Artificial Sequence: Synthetic oligonucleotide
ggccuugugggacugaagc

SEQ ID NO: 3238096 - RNA, 19 nt, Artificial Sequence
  Description of Artificial Sequence: Synthetic oligonucleotide
uuccucagcugucgggucc

SEQ ID NO: 3238097 - RNA, 19 nt, Artificial Sequence
  Description of Artificial Sequence: Synthetic oligonucleotide
uccuuccucagcugucggg

SEQ ID NO: 3238098 - RNA, 19 nt, Artificial Sequence
  Description of Artificial Sequence: Synthetic oligonucleotide
uuagagucucaguguugag

SEQ ID NO: 3238099 - RNA, 19 nt, Artificial Sequence
  Description of Artificial Sequence: Synthetic oligonucleotide
guguugagcacucgcuugc

SEQ ID NO: 3238100 - RNA, 19 nt, Artificial Sequence
  Description of Artificial Sequence: Synthetic oligonucleotide
aagugggaggcagcacagc

SEQ ID NO: 3238101 - RNA, 19 nt, Artificial Sequence
  Description of Artificial Sequence: Synthetic oligonucleotide
uggugcugggccaugcacu

SEQ ID NO: 3238102 - RNA, 19 nt, Artificial Sequence
  Description of Artificial Sequence: Synthetic oligonucleotide
cugacgccaguccuggugc

SEQ ID NO: 3238103 - RNA, 19 nt, Artificial Sequence
  Description of Artificial Sequence: Synthetic oligonucleotide
ucugggugcuuauuucuuc

SEQ ID NO: 3238104 - RNA, 19 nt, Artificial Sequence
  Description of Artificial Sequence: Synthetic oligonucleotide
ucucucugggugcuuauuu

SEQ ID NO: 3238105 - RNA, 19 nt, Artificial Sequence
  Description of Artificial Sequence: Synthetic oligonucleotide
ucagcugucggguccaguu

SEQ ID NO: 3238106 - RNA, 19 nt, Artificial Sequence
  Description of Artificial Sequence: Synthetic oligonucleotide
ugggugcuuauuucuucag

SEQ ID NO: 3238107 - RNA, 19 nt, Artificial Sequence
  Description of Artificial Sequence: Synthetic oligonucleotide
ugcacuccugcacugcaaa

SEQ ID NO: 3238108 - RNA, 19 nt, Artificial Sequence
  Description of Artificial Sequence: Synthetic oligonucleotide
ugcacuuguggcuggcacu

SEQ ID NO: 3238109 - RNA, 19 nt, Artificial Sequence
  Description of Artificial Sequence: Synthetic oligonucleotide
aagcugacaucuugaggaa

SEQ ID NO: 3238110 - RNA, 19 nt, Artificial Sequence
  Description of Artificial Sequence: Synthetic oligonucleotide
ucuugccagggucucucug

SEQ ID NO: 3238111 - RNA, 19 nt, Artificial Sequence
  Description of Artificial Sequence: Synthetic oligonucleotide
ugucggguccaguuauggc

SEQ ID NO: 3238112 - RNA, 19 nt, Artificial Sequence
  Description of Artificial Sequence: Synthetic oligonucleotide
ugcugggccaugcacuccu

SEQ ID NO: 3238113 - RNA, 19 nt, Artificial Sequence
  Description of Artificial Sequence: Synthetic oligonucleotide
uugcucuuuccuccucugc

SEQ ID NO: 3238114 - RNA, 19 nt, Artificial Sequence
  Description of Artificial Sequence: Synthetic oligonucleotide
agucucaguguugagcacu

SEQ ID NO: 3238115 - RNA, 19 nt, Artificial Sequence
  Description of Artificial Sequence: Synthetic oligonucleotide
acugaagcugacaucuuga

SEQ ID NO: 3238116 - RNA, 19 nt, Artificial Sequence
  Description of Artificial Sequence: Synthetic oligonucleotide
aucccugaaugccugcacu

SEQ ID NO: 3238117 - RNA, 19 nt, Artificial Sequence
  Description of Artificial Sequence: Synthetic oligonucleotide
aauauugagagcccugucg

SEQ ID NO: 3238118 - RNA, 19 nt, Artificial Sequence
  Description of Artificial Sequence: Synthetic oligonucleotide
guugaagugaaucagcugc

SEQ ID NO: 3238119 - RNA, 19 nt, Artificial Sequence
  Description of Artificial Sequence: Synthetic oligonucleotide
uugacaaagaggcugagga

SEQ ID NO: 3238120 - RNA, 19 nt, Artificial Sequence
  Description of Artificial Sequence: Synthetic oligonucleotide
aagaaaguaggcaucauuc

SEQ ID NO: 3238121 - RNA, 19 nt, Artificial Sequence
  Description of Artificial Sequence: Synthetic oligonucleotide
ugaucugguguucagagcc

SEQ ID NO: 3238122 - RNA, 19 nt, Artificial Sequence
  Description of Artificial Sequence: Synthetic oligonucleotide
agggagguaauauugagag

SEQ ID NO: 3238123 - RNA, 19 nt, Artificial Sequence
  Description of Artificial Sequence: Synthetic oligonucleotide
uaggugaugaagccgaagg

SEQ ID NO: 3238124 - RNA, 19 nt, Artificial Sequence
  Description of Artificial Sequence: Synthetic oligonucleotide
ugaggaaugaguuggagcu

SEQ ID NO: 3238125 - RNA, 19 nt, Artificial Sequence
  Description of Artificial Sequence: Synthetic oligonucleotide
aaugaguuggagcugccag

SEQ ID NO: 3238126 - RNA, 19 nt, Artificial Sequence
  Description of Artificial Sequence: Synthetic oligonucleotide
aagugaaucagcugcaccu

SEQ ID NO: 3238127 - RNA, 19 nt, Artificial Sequence
  Description of Artificial Sequence: Synthetic oligonucleotide
guaggcaucauucuuguag

SEQ ID NO: 3238128 - RNA, 19 nt, Artificial Sequence
  Description of Artificial Sequence: Synthetic oligonucleotide
uaggucuugaagaaaguag

SEQ ID NO: 3238129 - RNA, 19 nt, Artificial Sequence
  Description of Artificial Sequence: Synthetic oligonucleotide
ucgaugaggauccagguga

SEQ ID NO: 3238130 - RNA, 19 nt, Artificial Sequence
  Description of Artificial Sequence: Synthetic oligonucleotide
uuguaggagauucugguga

SEQ ID NO: 3238131 - RNA, 19 nt, Artificial Sequence
  Description of Artificial Sequence: Synthetic oligonucleotide
ugauaggugaugaagccga

SEQ ID NO: 3238132 - RNA, 19 nt, Artificial Sequence
  Description of Artificial Sequence: Synthetic oligonucleotide
auucccauagaguucuugg

SEQ ID NO: 3238133 - RNA, 19 nt, Artificial Sequence
  Description of Artificial Sequence: Synthetic oligonucleotide
agcacugagauucccauag

SEQ ID NO: 3238134 - RNA, 19 nt, Artificial Sequence
  Description of Artificial Sequence: Synthetic oligonucleotide
ucuugaagaaaguaggcau

SEQ ID NO: 3238135 - RNA, 19 nt, Artificial Sequence
  Description of Artificial Sequence: Synthetic oligonucleotide
agcagagaagcccuggugg

SEQ ID NO: 3238136 - RNA, 19 nt, Artificial Sequence
  Description of Artificial Sequence: Synthetic oligonucleotide
uaggcaucauucuuguagg

SEQ ID NO: 3238137 - RNA, 19 nt, Artificial Sequence
  Description of Artificial Sequence: Synthetic oligonucleotide
ggagguaauauugagagcc

SEQ ID NO: 3238138 - RNA, 19 nt, Artificial Sequence
  Description of Artificial Sequence: Synthetic oligonucleotide
aaagaggcugaggauggcc

SEQ ID NO: 3238139 - RNA, 19 nt, Artificial Sequence
  Description of Artificial Sequence: Synthetic oligonucleotide
ucuuguaggagauucuggu

SEQ ID NO: 3238140 - RNA, 19 nt, Artificial Sequence
  Description of Artificial Sequence: Synthetic oligonucleotide
aaaguaggcaucauucuug

SEQ ID NO: 3238141 - RNA, 19 nt, Artificial Sequence
  Description of Artificial Sequence: Synthetic oligonucleotide
ucuugguugaagugaauca

SEQ ID NO: 3238142 - RNA, 19 nt, Artificial Sequence
  Description of Artificial Sequence: Synthetic oligonucleotide
uucuuguaggagauucugg

SEQ ID NO: 3238143 - RNA, 19 nt, Artificial Sequence
  Description of Artificial Sequence: Synthetic oligonucleotide
guugaucugguguucagag

SEQ ID NO: 3238144 - RNA, 19 nt, Artificial Sequence
  Description of Artificial Sequence: Synthetic oligonucleotide
uaggagauucuggugaugg

SEQ ID NO: 3238145 - RNA, 19 nt, Artificial Sequence
  Description of Artificial Sequence: Synthetic oligonucleotide
uucagagccagucccaucu

SEQ ID NO: 3238146 - RNA, 19 nt, Artificial Sequence
  Description of Artificial Sequence: Synthetic oligonucleotide
auggccaggccauuggggc

SEQ ID NO: 3238147 - RNA, 19 nt, Artificial Sequence
  Description of Artificial Sequence: Synthetic oligonucleotide
gacaaagaggcugaggaug

SEQ ID NO: 3238148 - RNA, 19 nt, Artificial Sequence
  Description of Artificial Sequence: Synthetic oligonucleotide
ugcaccucagcagagaagc

SEQ ID NO: 3238149 - RNA, 19 nt, Artificial Sequence
  Description of Artificial Sequence: Synthetic oligonucleotide
augaguuggagcugccagc

SEQ ID NO: 3238150 - RNA, 19 nt, Artificial Sequence
  Description of Artificial Sequence: Synthetic oligonucleotide
gccacauugacaaagaggc

SEQ ID NO: 3238151 - RNA, 19 nt, Artificial Sequence
  Description of Artificial Sequence: Synthetic oligonucleotide
aguuggagcugccagccac

SEQ ID NO: 3238152 - RNA, 19 nt, Artificial Sequence
  Description of Artificial Sequence: Synthetic oligonucleotide
ucagcugcaccucagcaga

SEQ ID NO: 3238153 - RNA, 19 nt, Artificial Sequence
  Description of Artificial Sequence: Synthetic oligonucleotide
uugguugaagugaaucagc

SEQ ID NO: 3238154 - RNA, 19 nt, Artificial Sequence
  Description of Artificial Sequence: Synthetic oligonucleotide
auucuggugaugguguccc

SEQ ID NO: 3238155 - RNA, 19 nt, Artificial Sequence
  Description of Artificial Sequence: Synthetic oligonucleotide
aagccgaaggacucugggg

SEQ ID NO: 3238156 - RNA, 19 nt, Artificial Sequence
  Description of Artificial Sequence: Synthetic oligonucleotide
auauugagagcccugucga

SEQ ID NO: 3238157 - RNA, 19 nt, Artificial Sequence
  Description of Artificial Sequence: Synthetic oligonucleotide
acagucucagagcagggag

SEQ ID NO: 3238158 - RNA, 19 nt, Artificial Sequence
  Description of Artificial Sequence: Synthetic oligonucleotide
aggucuugaagaaaguagg

SEQ ID NO: 3238159 - RNA, 19 nt, Artificial Sequence
  Description of Artificial Sequence: Synthetic oligonucleotide
uugaggaggcgacugagga

SEQ ID NO: 3238160 - RNA, 19 nt, Artificial Sequence
  Description of Artificial Sequence: Synthetic oligonucleotide
gacucuggggaacaggagc

SEQ ID NO: 3238161 - RNA, 19 nt, Artificial Sequence
  Description of Artificial Sequence: Synthetic oligonucleotide
uagaguucuugguugaagu

SEQ ID NO: 3238162 - RNA, 19 nt, Artificial Sequence
  Description of Artificial Sequence: Synthetic oligonucleotide
gcugagagagcccugauag

SEQ ID NO: 3238163 - RNA, 19 nt, Artificial Sequence
  Description of Artificial Sequence: Synthetic oligonucleotide
aggaaugaguuggagcugc

SEQ ID NO: 3238164 - RNA, 19 nt, Artificial Sequence
  Description of Artificial Sequence: Synthetic oligonucleotide
ugguugaagugaaucagcu

SEQ ID NO: 3238165 - RNA, 19 nt, Artificial Sequence
  Description of Artificial Sequence: Synthetic oligonucleotide
aaucagcugcaccucagca

SEQ ID NO: 3238166 - RNA, 19 nt, Artificial Sequence
  Description of Artificial Sequence: Synthetic oligonucleotide
cacauugacaaagaggcug

SEQ ID NO: 3238167 - RNA, 19 nt, Artificial Sequence
  Description of Artificial Sequence: Synthetic oligonucleotide
cugucgaugaggauccagg

SEQ ID NO: 3238168 - RNA, 19 nt, Artificial Sequence
  Description of Artificial Sequence: Synthetic oligonucleotide
ggagcugccagccacauug

SEQ ID NO: 3238169 - RNA, 19 nt, Artificial Sequence
  Description of Artificial Sequence: Synthetic oligonucleotide
agaaaguaggcaucauucu

SEQ ID NO: 3238170 - RNA, 19 nt, Artificial Sequence
  Description of Artificial Sequence: Synthetic oligonucleotide
ucauucuuguaggagauuc

SEQ ID NO: 3238171 - RNA, 19 nt, Artificial Sequence
  Description of Artificial Sequence: Synthetic oligonucleotide
gaagccgaaggacucuggg

SEQ ID NO: 3238172 - RNA, 19 nt, Artificial Sequence
  Description of Artificial Sequence: Synthetic oligonucleotide
cugaggaaugaguuggagc

SEQ ID NO: 3238173 - RNA, 19 nt, Artificial Sequence
  Description of Artificial Sequence: Synthetic oligonucleotide
aaguaggcaucauucuugu

SEQ ID NO: 3238174 - RNA, 19 nt, Artificial Sequence
  Description of Artificial Sequence: Synthetic oligonucleotide
cuugaagaaaguaggcauc

SEQ ID NO: 3238175 - RNA, 19 nt, Artificial Sequence
  Description of Artificial Sequence: Synthetic oligonucleotide
gaagugaaucagcugcacc

SEQ ID NO: 3238176 - RNA, 19 nt, Artificial Sequence
  Description of Artificial Sequence: Synthetic oligonucleotide
cuugguugaagugaaucag

SEQ ID NO: 3238177 - RNA, 19 nt, Artificial Sequence
  Description of Artificial Sequence: Synthetic oligonucleotide
cuggagggagguaauauug

SEQ ID NO: 3238178 - RNA, 19 nt, Artificial Sequence
  Description of Artificial Sequence: Synthetic oligonucleotide
uugaagaaaguaggcauca

SEQ ID NO: 3238179 - RNA, 19 nt, Artificial Sequence
  Description of Artificial Sequence: Synthetic oligonucleotide
uugaagugaaucagcugca

SEQ ID NO: 3238180 - RNA, 19 nt, Artificial Sequence
  Description of Artificial Sequence: Synthetic oligonucleotide
ugagagagcccugauaggu

SEQ ID NO: 3238181 - RNA, 19 nt, Artificial Sequence
  Description of Artificial Sequence: Synthetic oligonucleotide
caggcuuaggucuugaaga

SEQ ID NO: 3238182 - RNA, 19 nt, Artificial Sequence
  Description of Artificial Sequence: Synthetic oligonucleotide
ugaaucagcugcaccucag

SEQ ID NO: 3238183 - RNA, 19 nt, Artificial Sequence
  Description of Artificial Sequence: Synthetic oligonucleotide
gugacagucucagagcagg

SEQ ID NO: 3238184 - RNA, 19 nt, Artificial Sequence
  Description of Artificial Sequence: Synthetic oligonucleotide
aucagcugcaccucagcag

SEQ ID NO: 3238185 - RNA, 19 nt, Artificial Sequence
  Description of Artificial Sequence: Synthetic oligonucleotide
aagcccuggugguugaucu

SEQ ID NO: 3238186 - RNA, 19 nt, Artificial Sequence
  Description of Artificial Sequence: Synthetic oligonucleotide
augaggauccaggugacag

SEQ ID NO: 3238187 - RNA, 19 nt, Artificial Sequence
  Description of Artificial Sequence: Synthetic oligonucleotide
ugagauucccauagaguuc

SEQ ID NO: 3238188 - RNA, 19 nt, Artificial Sequence
  Description of Artificial Sequence: Synthetic oligonucleotide
agaguucuugguugaagug

SEQ ID NO: 3238189 - RNA, 19 nt, Artificial Sequence
  Description of Artificial Sequence: Synthetic oligonucleotide
acaaagaggcugaggaugg

SEQ ID NO: 3238190 - RNA, 19 nt, Artificial Sequence
  Description of Artificial Sequence: Synthetic oligonucleotide
uugagagcccugucgauga

SEQ ID NO: 3238191 - RNA, 19 nt, Artificial Sequence
  Description of Artificial Sequence: Synthetic oligonucleotide
cacugagauucccauagag

SEQ ID NO: 3238192 - RNA, 19 nt, Artificial Sequence
  Description of Artificial Sequence: Synthetic oligonucleotide
gauggugucccgguugagg

SEQ ID NO: 3238193 - RNA, 19 nt, Artificial Sequence
  Description of Artificial Sequence: Synthetic oligonucleotide
ugaugaagccgaaggacuc

SEQ ID NO: 3238194 - RNA, 19 nt, Artificial Sequence
  Description of Artificial Sequence: Synthetic oligonucleotide
agccacauugacaaagagg

SEQ ID NO: 3238195 - RNA, 19 nt, Artificial Sequence
  Description of Artificial Sequence: Synthetic oligonucleotide
agccgaaggacucugggga

SEQ ID NO: 3238196 - RNA, 19 nt, Artificial Sequence
  Description of Artificial Sequence: Synthetic oligonucleotide
agccagucccaucucgagc

SEQ ID NO: 3238197 - RNA, 19 nt, Artificial Sequence
  Description of Artificial Sequence: Synthetic oligonucleotide
cuuguaggagauucuggug

SEQ ID NO: 3238198 - RNA, 19 nt, Artificial Sequence
  Description of Artificial Sequence: Synthetic oligonucleotide
ugaguuggagcugccagcc

SEQ ID NO: 3238199 - RNA, 19 nt, Artificial Sequence
  Description of Artificial Sequence: Synthetic oligonucleotide
auugacaaagaggcugagg

SEQ ID NO: 3238200 - RNA, 19 nt, Artificial Sequence
  Description of Artificial Sequence: Synthetic oligonucleotide
uggagggagguaauauuga

SEQ ID NO: 3238201 - RNA, 19 nt, Artificial Sequence
  Description of Artificial Sequence: Synthetic oligonucleotide
agcccugucgaugaggauc

SEQ ID NO: 3238202 - RNA, 19 nt, Artificial Sequence
  Description of Artificial Sequence: Synthetic oligonucleotide
uucuugguugaagugaauc

SEQ ID NO: 3238203 - RNA, 19 nt, Artificial Sequence
  Description of Artificial Sequence: Synthetic oligonucleotide
aggagcuccaggcuuaggu

SEQ ID NO: 3238204 - RNA, 19 nt, Artificial Sequence
  Description of Artificial Sequence: Synthetic oligonucleotide
auucuuguaggagauucug

SEQ ID NO: 3238205 - RNA, 19 nt, Artificial Sequence
  Description of Artificial Sequence: Synthetic oligonucleotide
aggugacagucucagagca

SEQ ID NO: 3238206 - RNA, 19 nt, Artificial Sequence
  Description of Artificial Sequence: Synthetic oligonucleotide
cugauaggugaugaagccg

SEQ ID NO: 3238207 - RNA, 19 nt, Artificial Sequence
  Description of Artificial Sequence: Synthetic oligonucleotide
gguguucagagccaguccc

SEQ ID NO: 3238208 - RNA, 19 nt, Artificial Sequence
  Description of Artificial Sequence: Synthetic oligonucleotide
ucuggugauggugucccgg

SEQ ID NO: 3238209 - RNA, 19 nt, Artificial Sequence
  Description of Artificial Sequence: Synthetic oligonucleotide
agucucagagcagggaggg

SEQ ID NO: 3238210 - RNA, 19 nt, Artificial Sequence
  Description of Artificial Sequence: Synthetic oligonucleotide
ugacagucucagagcaggg

SEQ ID NO: 3238211 - RNA, 19 nt, Artificial Sequence
  Description of Artificial Sequence: Synthetic oligonucleotide
auagaguucuugguugaag

SEQ ID NO: 3238212 - RNA, 19 nt, Artificial Sequence
  Description of Artificial Sequence: Synthetic oligonucleotide
uaauauugagagcccuguc

SEQ ID NO: 3238213 - RNA, 19 nt, Artificial Sequence
  Description of Artificial Sequence: Synthetic oligonucleotide
agagagcccugauagguga

SEQ ID NO: 3238214 - RNA, 19 nt, Artificial Sequence
  Description of Artificial Sequence: Synthetic oligonucleotide
ugaagccgaaggacucugg

SEQ ID NO: 3238215 - RNA, 19 nt, Artificial Sequence
  Description of Artificial Sequence: Synthetic oligonucleotide
uuaggucuugaagaaagua

SEQ ID NO: 3238216 - RNA, 19 nt, Artificial Sequence
  Description of Artificial Sequence: Synthetic oligonucleotide
aaggacucuggggaacagg

SEQ ID NO: 3238217 - RNA, 19 nt, Artificial Sequence
  Description of Artificial Sequence: Synthetic oligonucleotide
acagacuccauauagaagc

SEQ ID NO: 3238218 - RNA, 19 nt, Artificial Sequence
  Description of Artificial Sequence: Synthetic oligonucleotide
ucguagacaguuaugaugg

SEQ ID NO: 3238219 - RNA, 19 nt, Artificial Sequence
  Description of Artificial Sequence: Synthetic oligonucleotide
aaaggcaucacaugugggg

SEQ ID NO: 3238220 - RNA, 19 nt, Artificial Sequence
  Description of Artificial Sequence: Synthetic oligonucleotide
aaagcagccagucacccac

SEQ ID NO: 3238221 - RNA, 19 nt, Artificial Sequence
  Description of Artificial Sequence: Synthetic oligonucleotide
uugaagguggaacucaugg

SEQ ID NO: 3238222 - RNA, 19 nt, Artificial Sequence
  Description of Artificial Sequence: Synthetic oligonucleotide
uuggcuaugauguucacag

SEQ ID NO: 3238223 - RNA, 19 nt, Artificial Sequence
  Description of Artificial Sequence: Synthetic oligonucleotide
accauaauagcccucauug

SEQ ID NO: 3238224 - RNA, 19 nt, Artificial Sequence
  Description of Artificial Sequence: Synthetic oligonucleotide
ucaaaggcaucacaugugg

SEQ ID NO: 3238225 - RNA, 19 nt, Artificial Sequence
  Description of Artificial Sequence: Synthetic oligonucleotide
ucggaaggcaccauaauag

SEQ ID NO: 3238226 - RNA, 19 nt, Artificial Sequence
  Description of Artificial Sequence: Synthetic oligonucleotide
aggagauccugucaaaggc

SEQ ID NO: 3238227 - RNA, 19 nt, Artificial Sequence
  Description of Artificial Sequence: Synthetic oligonucleotide
auugagauaguaugccagc

SEQ ID NO: 3238228 - RNA, 19 nt, Artificial Sequence
  Description of Artificial Sequence: Synthetic oligonucleotide
acaguuaugauggggaagc

SEQ ID NO: 3238229 - RNA, 19 nt, Artificial Sequence
  Description of Artificial Sequence: Synthetic oligonucleotide
accuccuucaaggagaucc

SEQ ID NO: 3238230 - RNA, 19 nt, Artificial Sequence
  Description of Artificial Sequence: Synthetic oligonucleotide
aacuccuucaccacaaugg

SEQ ID NO: 3238231 - RNA, 19 nt, Artificial Sequence
  Description of Artificial Sequence: Synthetic oligonucleotide
gaagguggaacucauggag

SEQ ID NO: 3238232 - RNA, 19 nt, Artificial Sequence
  Description of Artificial Sequence: Synthetic oligonucleotide
uccaguguagccuucuugg

SEQ ID NO: 3238233 - RNA, 19 nt, Artificial Sequence
  Description of Artificial Sequence: Synthetic oligonucleotide
aaggagauccugucaaagg

SEQ ID NO: 3238234 - RNA, 19 nt, Artificial Sequence
  Description of Artificial Sequence: Synthetic oligonucleotide
cauaauagcccucauugag

SEQ ID NO: 3238235 - RNA, 19 nt, Artificial Sequence
  Description of Artificial Sequence: Synthetic oligonucleotide
ugucaaaggcaucacaugu

SEQ ID NO: 3238236 - RNA, 19 nt, Artificial Sequence
  Description of Artificial Sequence: Synthetic oligonucleotide
uagacaguuaugaugggga

SEQ ID NO: 3238237 - RNA, 19 nt, Artificial Sequence
  Description of Artificial Sequence: Synthetic oligonucleotide
aaaggcggggcuccgaggg

SEQ ID NO: 3238238 - RNA, 19 nt, Artificial Sequence
  Description of Artificial Sequence: Synthetic oligonucleotide
auagcccucauugagauag

SEQ ID NO: 3238239 - RNA, 19 nt, Artificial Sequence
  Description of Artificial Sequence: Synthetic oligonucleotide
aucguagacaguuaugaug

SEQ ID NO: 3238240 - RNA, 19 nt, Artificial Sequence
  Description of Artificial Sequence: Synthetic oligonucleotide
aaggcaucacauguggggc

SEQ ID NO: 3238241 - RNA, 19 nt, Artificial Sequence
  Description of Artificial Sequence: Synthetic oligonucleotide
cugaggaagauucggaagg

SEQ ID NO: 3238242 - RNA, 19 nt, Artificial Sequence
  Description of Artificial Sequence: Synthetic oligonucleotide
cauguggggccauagaggg

SEQ ID NO: 3238243 - RNA, 19 nt, Artificial Sequence
  Description of Artificial Sequence: Synthetic oligonucleotide
cauugagauaguaugccag

SEQ ID NO: 3238244 - RNA, 19 nt, Artificial Sequence
  Description of Artificial Sequence: Synthetic oligonucleotide
cagccagucacccacaucc

SEQ ID NO: 3238245 - RNA, 19 nt, Artificial Sequence
  Description of Artificial Sequence: Synthetic oligonucleotide
uccauauagaagcggccgg

SEQ ID NO: 3238246 - RNA, 19 nt, Artificial Sequence
  Description of Artificial Sequence: Synthetic oligonucleotide
auggggaagccguugaagg

SEQ ID NO: 3238247 - RNA, 19 nt, Artificial Sequence
  Description of Artificial Sequence: Synthetic oligonucleotide
agcugcaccuccuucaagg

SEQ ID NO: 3238248 - RNA, 19 nt, Artificial Sequence
  Description of Artificial Sequence: Synthetic oligonucleotide
uaugccagcuuccuguggc

SEQ ID NO: 3238249 - RNA, 19 nt, Artificial Sequence
  Description of Artificial Sequence: Synthetic oligonucleotide
uucaaggagauccugucaa

SEQ ID NO: 3238250 - RNA, 19 nt, Artificial Sequence
  Description of Artificial Sequence: Synthetic oligonucleotide
gaaggcaccauaauagccc

SEQ ID NO: 3238251 - RNA, 19 nt, Artificial Sequence
  Description of Artificial Sequence: Synthetic oligonucleotide
agccguugugcauacagac

SEQ ID NO: 3238252 - RNA, 19 nt, Artificial Sequence
  Description of Artificial Sequence: Synthetic oligonucleotide
aagguggaacucauggagc

SEQ ID NO: 3238253 - RNA, 19 nt, Artificial Sequence
  Description of Artificial Sequence: Synthetic oligonucleotide
auguucacagccguugugc

SEQ ID NO: 3238254 - RNA, 19 nt, Artificial Sequence
  Description of Artificial Sequence: Synthetic oligonucleotide
uaguaugccagcuuccugu

SEQ ID NO: 3238255 - RNA, 19 nt, Artificial Sequence
  Description of Artificial Sequence: Synthetic oligonucleotide
acucauggagcucuuguag

SEQ ID NO: 3238256 - RNA, 19 nt, Artificial Sequence
  Description of Artificial Sequence: Synthetic oligonucleotide
aagccguugaagguggaac

SEQ ID NO: 3238257 - RNA, 19 nt, Artificial Sequence
  Description of Artificial Sequence: Synthetic oligonucleotide
uccuucaccacaaugggua

SEQ ID NO: 3238258 - RNA, 19 nt, Artificial Sequence
  Description of Artificial Sequence: Synthetic oligonucleotide
ugcaccuccuucaaggaga

SEQ ID NO: 3238259 - RNA, 19 nt, Artificial Sequence
  Description of Artificial Sequence: Synthetic oligonucleotide
acuccuucaccacaauggg

SEQ ID NO: 3238260 - RNA, 19 nt, Artificial Sequence
  Description of Artificial Sequence: Synthetic oligonucleotide
gagauaguaugccagcuuc

SEQ ID NO: 3238261 - RNA, 19 nt, Artificial Sequence
  Description of Artificial Sequence: Synthetic oligonucleotide
accacaauggguauccugg

SEQ ID NO: 3238262 - RNA, 19 nt, Artificial Sequence
  Description of Artificial Sequence: Synthetic oligonucleotide
uacagacuccauauagaag

SEQ ID NO: 3238263 - RNA, 19 nt, Artificial Sequence
  Description of Artificial Sequence: Synthetic oligonucleotide
auggagcucuuguaggcgc

SEQ ID NO: 3238264 - RNA, 19 nt, Artificial Sequence
  Description of Artificial Sequence: Synthetic oligonucleotide
uucuuggcuaugauguuca

SEQ ID NO: 3238265 - RNA, 19 nt, Artificial Sequence
  Description of Artificial Sequence: Synthetic oligonucleotide
auacagacuccauauagaa

SEQ ID NO: 3238266 - RNA, 19 nt, Artificial Sequence
  Description of Artificial Sequence: Synthetic oligonucleotide
acagccguugugcauacag

SEQ ID NO: 3238267 - RNA, 19 nt, Artificial Sequence
  Description of Artificial Sequence: Synthetic oligonucleotide
ucauugagauaguaugcca

SEQ ID NO: 3238268 - RNA, 19 nt, Artificial Sequence
  Description of Artificial Sequence: Synthetic oligonucleotide
auggguauccuggagacag

SEQ ID NO: 3238269 - RNA, 19 nt, Artificial Sequence
  Description of Artificial Sequence: Synthetic oligonucleotide
acaauggguauccuggaga

SEQ ID NO: 3238270 - RNA, 19 nt, Artificial Sequence
  Description of Artificial Sequence: Synthetic oligonucleotide
cucauggagcucuuguagg

SEQ ID NO: 3238271 - RNA, 19 nt, Artificial Sequence
  Description of Artificial Sequence: Synthetic oligonucleotide
ugugcauacagacuccaua

SEQ ID NO: 3238272 - RNA, 19 nt, Artificial Sequence
  Description of Artificial Sequence: Synthetic oligonucleotide
uucaccacaauggguaucc

SEQ ID NO: 3238273 - RNA, 19 nt, Artificial Sequence
  Description of Artificial Sequence: Synthetic oligonucleotide
acaucguagacaguuauga

SEQ ID NO: 3238274 - RNA, 19 nt, Artificial Sequence
  Description of Artificial Sequence: Synthetic oligonucleotide
cucauugagauaguaugcc

SEQ ID NO: 3238275 - RNA, 19 nt, Artificial Sequence
  Description of Artificial Sequence: Synthetic oligonucleotide
ucauggagcucuuguaggc

SEQ ID NO: 3238276 - RNA, 19 nt, Artificial Sequence
  Description of Artificial Sequence: Synthetic oligonucleotide
uaauagcccucauugagau

SEQ ID NO: 3238277 - RNA, 19 nt, Artificial Sequence
  Description of Artificial Sequence: Synthetic oligonucleotide
cacauguggggccauagag

SEQ ID NO: 3238278 - RNA, 19 nt, Artificial Sequence
  Description of Artificial Sequence: Synthetic oligonucleotide
uauccuggagacaggcucc

SEQ ID NO: 3238279 - RNA, 19 nt, Artificial Sequence
  Description of Artificial Sequence: Synthetic oligonucleotide
uauagaagcggccgggcuc

SEQ ID NO: 3238280 - RNA, 19 nt, Artificial Sequence
  Description of Artificial Sequence: Synthetic oligonucleotide
gcauacagacuccauauag

SEQ ID NO: 3238281 - RNA, 19 nt, Artificial Sequence
  Description of Artificial Sequence: Synthetic oligonucleotide
aguuaugauggggaagccg

SEQ ID NO: 3238282 - RNA, 19 nt, Artificial Sequence
  Description of Artificial Sequence: Synthetic oligonucleotide
uucggaaggcaccauaaua

SEQ ID NO: 3238283 - RNA, 19 nt, Artificial Sequence
  Description of Artificial Sequence: Synthetic oligonucleotide
uguggggccauagagggug

SEQ ID NO: 3238284 - RNA, 19 nt, Artificial Sequence
  Description of Artificial Sequence: Synthetic oligonucleotide
aaggcaccauaauagcccu

SEQ ID NO: 3238285 - RNA, 19 nt, Artificial Sequence
  Description of Artificial Sequence: Synthetic oligonucleotide
gucacccacauccagcucc

SEQ ID NO: 3238286 - RNA, 19 nt, Artificial Sequence
  Description of Artificial Sequence: Synthetic oligonucleotide
gacuccauauagaagcggc

SEQ ID NO: 3238287 - RNA, 19 nt, Artificial Sequence
  Description of Artificial Sequence: Synthetic oligonucleotide
ggcuaugauguucacagcc

SEQ ID NO: 3238288 - RNA, 19 nt, Artificial Sequence
  Description of Artificial Sequence: Synthetic oligonucleotide
aggaagauucggaaggcac

SEQ ID NO: 3238289 - RNA, 19 nt, Artificial Sequence
  Description of Artificial Sequence: Synthetic oligonucleotide
guagacaguuaugaugggg

SEQ ID NO: 3238290 - RNA, 19 nt, Artificial Sequence
  Description of Artificial Sequence: Synthetic oligonucleotide
ugaagguggaacucaugga

SEQ ID NO: 3238291 - RNA, 19 nt, Artificial Sequence
  Description of Artificial Sequence: Synthetic oligonucleotide
aaaaggcggggcuccgagg

SEQ ID NO: 3238292 - RNA, 19 nt, Artificial Sequence
  Description of Artificial Sequence: Synthetic oligonucleotide
gagacaggcucccugagga

SEQ ID NO: 3238293 - RNA, 19 nt, Artificial Sequence
  Description of Artificial Sequence: Synthetic oligonucleotide
caauggguauccuggagac

SEQ ID NO: 3238294 - RNA, 19 nt, Artificial Sequence
  Description of Artificial Sequence: Synthetic oligonucleotide
guauccuggagacaggcuc

SEQ ID NO: 3238295 - RNA, 19 nt, Artificial Sequence
  Description of Artificial Sequence: Synthetic oligonucleotide
cuccauauagaagcggccg

SEQ ID NO: 3238296 - RNA, 19 nt, Artificial Sequence
  Description of Artificial Sequence: Synthetic oligonucleotide
gaggggaacuccuucacca

SEQ ID NO: 3238297 - RNA, 19 nt, Artificial Sequence
  Description of Artificial Sequence: Synthetic oligonucleotide
agauaguaugccagcuucc

SEQ ID NO: 3238298 - RNA, 19 nt, Artificial Sequence
  Description of Artificial Sequence: Synthetic oligonucleotide
aggcaucacauguggggcc

SEQ ID NO: 3238299 - RNA, 19 nt, Artificial Sequence
  Description of Artificial Sequence: Synthetic oligonucleotide
gauccugucaaaggcauca

SEQ ID NO: 3238300 - RNA, 19 nt, Artificial Sequence
  Description of Artificial Sequence: Synthetic oligonucleotide
ugacaucguagacaguuau

SEQ ID NO: 3238301 - RNA, 19 nt, Artificial Sequence
  Description of Artificial Sequence: Synthetic oligonucleotide
aaaagcagccagucaccca

SEQ ID NO: 3238302 - RNA, 19 nt, Artificial Sequence
  Description of Artificial Sequence: Synthetic oligonucleotide
cagacuccauauagaagcg

SEQ ID NO: 3238303 - RNA, 19 nt, Artificial Sequence
  Description of Artificial Sequence: Synthetic oligonucleotide
uccuucaaggagauccugu

SEQ ID NO: 3238304 - RNA, 19 nt, Artificial Sequence
  Description of Artificial Sequence: Synthetic oligonucleotide
gaacuccuucaccacaaug

SEQ ID NO: 3238305 - RNA, 19 nt, Artificial Sequence
  Description of Artificial Sequence: Synthetic oligonucleotide
gacaguuaugauggggaag

SEQ ID NO: 3238306 - RNA, 19 nt, Artificial Sequence
  Description of Artificial Sequence: Synthetic oligonucleotide
acuccauauagaagcggcc

SEQ ID NO: 3238307 - RNA, 19 nt, Artificial Sequence
  Description of Artificial Sequence: Synthetic oligonucleotide
caaaggcaucacauguggg

SEQ ID NO: 3238308 - RNA, 19 nt, Artificial Sequence
  Description of Artificial Sequence: Synthetic oligonucleotide
ucacccacauccagcuccg

SEQ ID NO: 3238309 - RNA, 19 nt, Artificial Sequence
  Description of Artificial Sequence: Synthetic oligonucleotide
acccacauccagcuccggc

SEQ ID NO: 3238310 - RNA, 19 nt, Artificial Sequence
  Description of Artificial Sequence: Synthetic oligonucleotide
augauguucacagccguug

SEQ ID NO: 3238311 - RNA, 19 nt, Artificial Sequence
  Description of Artificial Sequence: Synthetic oligonucleotide
gauguucacagccguugug

SEQ ID NO: 3238312 - RNA, 19 nt, Artificial Sequence
  Description of Artificial Sequence: Synthetic oligonucleotide
cauacagacuccauauaga

SEQ ID NO: 3238313 - RNA, 19 nt, Artificial Sequence
  Description of Artificial Sequence: Synthetic oligonucleotide
aguguagccuucuuggcua

SEQ ID NO: 3238314 - RNA, 19 nt, Artificial Sequence
  Description of Artificial Sequence: Synthetic oligonucleotide
gauggggaagccguugaag

SEQ ID NO: 3238315 - RNA, 19 nt, Artificial Sequence
  Description of Artificial Sequence: Synthetic oligonucleotide
aacucauggagcucuugua

SEQ ID NO: 3238316 - RNA, 19 nt, Artificial Sequence
  Description of Artificial Sequence: Synthetic oligonucleotide
acauguggggccauagagg

SEQ ID NO: 3238317 - RNA, 19 nt, Artificial Sequence
  Description of Artificial Sequence: Synthetic oligonucleotide
aauuucuggaaccagauca

SEQ ID NO: 3238318 - RNA, 19 nt, Artificial Sequence
  Description of Artificial Sequence: Synthetic oligonucleotide
aaccagaucaacaaaagcc

SEQ ID NO: 3238319 - RNA, 19 nt, Artificial Sequence
  Description of Artificial Sequence: Synthetic oligonucleotide
aacucuaccaguuggggcc

SEQ ID NO: 3238320 - RNA, 19 nt, Artificial Sequence
  Description of Artificial Sequence: Synthetic oligonucleotide
aaacucuaccaguuggggc

SEQ ID NO: 3238321 - RNA, 19 nt, Artificial Sequence
  Description of Artificial Sequence: Synthetic oligonucleotide
aaggaccuuggauagcugc

SEQ ID NO: 3238322 - RNA, 19 nt, Artificial Sequence
  Description of Artificial Sequence: Synthetic oligonucleotide
ucucaggauucucagaggg

SEQ ID NO: 3238323 - RNA, 19 nt, Artificial Sequence
  Description of Artificial Sequence: Synthetic oligonucleotide
ucucuuggaacccagagaa

SEQ ID NO: 3238324 - RNA, 19 nt, Artificial Sequence
  Description of Artificial Sequence: Synthetic oligonucleotide
uuggcuuaaagucauagau

SEQ ID NO: 3238325 - RNA, 19 nt, Artificial Sequence
  Description of Artificial Sequence: Synthetic oligonucleotide
cuugaugugaggaguaccg

SEQ ID NO: 3238326 - RNA, 19 nt, Artificial Sequence
  Description of Artificial Sequence: Synthetic oligonucleotide
ugagucaccaacaugggaa

SEQ ID NO: 3238327 - RNA, 19 nt, Artificial Sequence
  Description of Artificial Sequence: Synthetic oligonucleotide
gaaucauuugcguagccug

SEQ ID NO: 3238328 - RNA, 19 nt, Artificial Sequence
  Description of Artificial Sequence: Synthetic oligonucleotide
gauguguccagguggaucc

SEQ ID NO: 3238329 - RNA, 19 nt, Artificial Sequence
  Description of Artificial Sequence: Synthetic oligonucleotide
auagaucuccaccacgugg

SEQ ID NO: 3238330 - RNA, 19 nt, Artificial Sequence
  Description of Artificial Sequence: Synthetic oligonucleotide
gaaauccuuggcuagggcc

SEQ ID NO: 3238331 - RNA, 19 nt, Artificial Sequence
  Description of Artificial Sequence: Synthetic oligonucleotide
ucucagagggcucagaauc

SEQ ID NO: 3238332 - RNA, 19 nt, Artificial Sequence
  Description of Artificial Sequence: Synthetic oligonucleotide
cacauacaaaggcugaucg

SEQ ID NO: 3238333 - RNA, 19 nt, Artificial Sequence
  Description of Artificial Sequence: Synthetic oligonucleotide
uuguguuggagccccaagg

SEQ ID NO: 3238334 - RNA, 19 nt, Artificial Sequence
  Description of Artificial Sequence: Synthetic oligonucleotide
ccaugagucaccaacaugg

SEQ ID NO: 3238335 - RNA, 19 nt, Artificial Sequence
  Description of Artificial Sequence: Synthetic oligonucleotide
cuucucaggauucucagag

SEQ ID NO: 3238336 - RNA, 19 nt, Artificial Sequence
  Description of Artificial Sequence: Synthetic oligonucleotide
ucuucugugaaggaggaug

SEQ ID NO: 3238337 - RNA, 19 nt, Artificial Sequence
  Description of Artificial Sequence: Synthetic oligonucleotide
ucauagaucuccaccacgu

SEQ ID NO: 3238338 - RNA, 19 nt, Artificial Sequence
  Description of Artificial Sequence: Synthetic oligonucleotide
uuugagcuuggacagcuug

SEQ ID NO: 3238339 - RNA, 19 nt, Artificial Sequence
  Description of Artificial Sequence: Synthetic oligonucleotide
uguguuggagccccaaggc

SEQ ID NO: 3238340 - RNA, 19 nt, Artificial Sequence
  Description of Artificial Sequence: Synthetic oligonucleotide
gaucagguaccgcaggcgg

SEQ ID NO: 3238341 - RNA, 19 nt, Artificial Sequence
  Description of Artificial Sequence: Synthetic oligonucleotide
ucauuuucggccgaggaga

SEQ ID NO: 3238342 - RNA, 19 nt, Artificial Sequence
  Description of Artificial Sequence: Synthetic oligonucleotide
gaaccagaucaacaaaagc

SEQ ID NO: 3238343 - RNA, 19 nt, Artificial Sequence
  Description of Artificial Sequence: Synthetic oligonucleotide
ugaugugaggaguaccgag

SEQ ID NO: 3238344 - RNA, 19 nt, Artificial Sequence
  Description of Artificial Sequence: Synthetic oligonucleotide
uugagcuuggacagcuugg

SEQ ID NO: 3238345 - RNA, 19 nt, Artificial Sequence
  Description of Artificial Sequence: Synthetic oligonucleotide
uggaaccagaucaacaaaa

SEQ ID NO: 3238346 - RNA, 19 nt, Artificial Sequence
  Description of Artificial Sequence: Synthetic oligonucleotide
uggaucugggcucuucggg

SEQ ID NO: 3238347 - RNA, 19 nt, Artificial Sequence
  Description of Artificial Sequence: Synthetic oligonucleotide
uccccaacagagaagcugc

SEQ ID NO: 3238348 - RNA, 19 nt, Artificial Sequence
  Description of Artificial Sequence: Synthetic oligonucleotide
caaccgugaaucauuugcg

SEQ ID NO: 3238349 - RNA, 19 nt, Artificial Sequence
  Description of Artificial Sequence: Synthetic oligonucleotide
uguuggcuuaaagucauag

SEQ ID NO: 3238350 - RNA, 19 nt, Artificial Sequence
  Description of Artificial Sequence: Synthetic oligonucleotide
aacaaggggcuauccuugg

SEQ ID NO: 3238351 - RNA, 19 nt, Artificial Sequence
  Description of Artificial Sequence: Synthetic oligonucleotide
ugacagacgacuguucucc

SEQ ID NO: 3238352 - RNA, 19 nt, Artificial Sequence
  Description of Artificial Sequence: Synthetic oligonucleotide
acuggguacccugaugucc

SEQ ID NO: 3238353 - RNA, 19 nt, Artificial Sequence
  Description of Artificial Sequence: Synthetic oligonucleotide
accaguuggggccucuccc

SEQ ID NO: 3238354 - RNA, 19 nt, Artificial Sequence
  Description of Artificial Sequence: Synthetic oligonucleotide
uguugugccccacagcagu

SEQ ID NO: 3238355 - RNA, 19 nt, Artificial Sequence
  Description of Artificial Sequence: Synthetic oligonucleotide
ucuugguccaccaggcucu

SEQ ID NO: 3238356 - RNA, 19 nt, Artificial Sequence
  Description of Artificial Sequence: Synthetic oligonucleotide
ugcaccagcagacuccuac

SEQ ID NO: 3238357 - RNA, 19 nt, Artificial Sequence
  Description of Artificial Sequence: Synthetic oligonucleotide
ggcgacagggaccagaggg

SEQ ID NO: 3238358 - RNA, 19 nt, Artificial Sequence
  Description of Artificial Sequence: Synthetic oligonucleotide
uuuucggccgaggagagga

SEQ ID NO: 3238359 - RNA, 19 nt, Artificial Sequence
  Description of Artificial Sequence: Synthetic oligonucleotide
auccucucuaccucgaucu

SEQ ID NO: 3238360 - RNA, 19 nt, Artificial Sequence
  Description of Artificial Sequence: Synthetic oligonucleotide
aagauggcaggagacucgg

SEQ ID NO: 3238361 - RNA, 19 nt, Artificial Sequence
  Description of Artificial Sequence: Synthetic oligonucleotide
gucuguaaaggcgugagug

SEQ ID NO: 3238362 - RNA, 19 nt, Artificial Sequence
  Description of Artificial Sequence: Synthetic oligonucleotide
uugguucccugugugagcg

SEQ ID NO: 3238363 - RNA, 19 nt, Artificial Sequence
  Description of Artificial Sequence: Synthetic oligonucleotide
agugacagacgacuguucu

SEQ ID NO: 3238364 - RNA, 19 nt, Artificial Sequence
  Description of Artificial Sequence: Synthetic oligonucleotide
aaauccuuggcuagggccu

SEQ ID NO: 3238365 - RNA, 19 nt, Artificial Sequence
  Description of Artificial Sequence: Synthetic oligonucleotide
uuggcuagggccucagcag

SEQ ID NO: 3238366 - RNA, 19 nt, Artificial Sequence
  Description of Artificial Sequence: Synthetic oligonucleotide
gucuggugccucaagaugg

SEQ ID NO: 3238367 - RNA, 19 nt, Artificial Sequence
  Description of Artificial Sequence: Synthetic oligonucleotide
aaccgugaaucauuugcgu

SEQ ID NO: 3238368 - RNA, 19 nt, Artificial Sequence
  Description of Artificial Sequence: Synthetic oligonucleotide
acaccguccaagcagagaa

SEQ ID NO: 3238369 - RNA, 19 nt, Artificial Sequence
  Description of Artificial Sequence: Synthetic oligonucleotide
uuccuuacccaccuucucu

SEQ ID NO: 3238370 - RNA, 19 nt, Artificial Sequence
  Description of Artificial Sequence: Synthetic oligonucleotide
caagauggcaggagacucg

SEQ ID NO: 3238371 - RNA, 19 nt, Artificial Sequence
  Description of Artificial Sequence: Synthetic oligonucleotide
caacaaaagccuguugugc

SEQ ID NO: 3238372 - RNA, 19 nt, Artificial Sequence
  Description of Artificial Sequence: Synthetic oligonucleotide
cuugagcacggagaaaucc

SEQ ID NO: 3238373 - RNA, 19 nt, Artificial Sequence
  Description of Artificial Sequence: Synthetic oligonucleotide
gagaaauccuuggcuaggg

SEQ ID NO: 3238374 - RNA, 19 nt, Artificial Sequence
  Description of Artificial Sequence: Synthetic oligonucleotide
ugaaucauuugcguagccu

SEQ ID NO: 3238375 - RNA, 19 nt, Artificial Sequence
  Description of Artificial Sequence: Synthetic oligonucleotide
agcggacggaucuugagca

SEQ ID NO: 3238376 - RNA, 19 nt, Artificial Sequence
  Description of Artificial Sequence: Synthetic oligonucleotide
ccaaccgugaaucauuugc

SEQ ID NO: 3238377 - RNA, 19 nt, Artificial Sequence
  Description of Artificial Sequence: Synthetic oligonucleotide
aaaggcgugagugguguug

SEQ ID NO: 3238378 - RNA, 19 nt, Artificial Sequence
  Description of Artificial Sequence: Synthetic oligonucleotide
ucugugaaggaggaugugu

SEQ ID NO: 3238379 - RNA, 19 nt, Artificial Sequence
  Description of Artificial Sequence: Synthetic oligonucleotide
gguagcucuucugugaagg

SEQ ID NO: 3238380 - RNA, 19 nt, Artificial Sequence
  Description of Artificial Sequence: Synthetic oligonucleotide
caugagucaccaacauggg

SEQ ID NO: 3238381 - RNA, 19 nt, Artificial Sequence
  Description of Artificial Sequence: Synthetic oligonucleotide
accgcaggcggcuggagac

SEQ ID NO: 3238382 - RNA, 19 nt, Artificial Sequence
  Description of Artificial Sequence: Synthetic oligonucleotide
gauagcugcuucugcagca

SEQ ID NO: 3238383 - RNA, 19 nt, Artificial Sequence
  Description of Artificial Sequence: Synthetic oligonucleotide
ucugaacuggguacccuga

SEQ ID NO: 3238384 - RNA, 19 nt, Artificial Sequence
  Description of Artificial Sequence: Synthetic oligonucleotide
cuugaguguuggcuuaaag

SEQ ID NO: 3238385 - RNA, 19 nt, Artificial Sequence
  Description of Artificial Sequence: Synthetic oligonucleotide
aaggaggauguguccaggu

SEQ ID NO: 3238386 - RNA, 19 nt, Artificial Sequence
  Description of Artificial Sequence: Synthetic oligonucleotide
ucaagauggcaggagacuc

SEQ ID NO: 3238387 - RNA, 19 nt, Artificial Sequence
  Description of Artificial Sequence: Synthetic oligonucleotide
aucugaacuggguacccug

SEQ ID NO: 3238388 - RNA, 19 nt, Artificial Sequence
  Description of Artificial Sequence: Synthetic oligonucleotide
ggcuuaaagucauagaucu

SEQ ID NO: 3238389 - RNA, 19 nt, Artificial Sequence
  Description of Artificial Sequence: Synthetic oligonucleotide
agcaguuccagugggaaca

SEQ ID NO: 3238390 - RNA, 19 nt, Artificial Sequence
  Description of Artificial Sequence: Synthetic oligonucleotide
ucucaucuuccuuacccac

SEQ ID NO: 3238391 - RNA, 19 nt, Artificial Sequence
  Description of Artificial Sequence: Synthetic oligonucleotide
cauggagggugcuacuggc

SEQ ID NO: 3238392 - RNA, 19 nt, Artificial Sequence
  Description of Artificial Sequence: Synthetic oligonucleotide
gaacuggguacccugaugu

SEQ ID NO: 3238393 - RNA, 19 nt, Artificial Sequence
  Description of Artificial Sequence: Synthetic oligonucleotide
uguaggcucuucugaaacu

SEQ ID NO: 3238394 - RNA, 19 nt, Artificial Sequence
  Description of Artificial Sequence: Synthetic oligonucleotide
auccuugggucuguaaagg

SEQ ID NO: 3238395 - RNA, 19 nt, Artificial Sequence
  Description of Artificial Sequence: Synthetic oligonucleotide
cuggcagggaaagaugccg

SEQ ID NO: 3238396 - RNA, 19 nt, Artificial Sequence
  Description of Artificial Sequence: Synthetic oligonucleotide
gacagcuugguucccugug

SEQ ID NO: 3238397 - RNA, 19 nt, Artificial Sequence
  Description of Artificial Sequence: Synthetic oligonucleotide
acuggcucaucuugccuuc

SEQ ID NO: 3238398 - RNA, 19 nt, Artificial Sequence
  Description of Artificial Sequence: Synthetic oligonucleotide
gcucaucuugccuucgucg

SEQ ID NO: 3238399 - RNA, 19 nt, Artificial Sequence
  Description of Artificial Sequence: Synthetic oligonucleotide
aacccagagaagguggcca

SEQ ID NO: 3238400 - RNA, 19 nt, Artificial Sequence
  Description of Artificial Sequence: Synthetic oligonucleotide
uagcucuucugugaaggag

SEQ ID NO: 3238401 - RNA, 19 nt, Artificial Sequence
  Description of Artificial Sequence: Synthetic oligonucleotide
uccaagcagagaagggcca

SEQ ID NO: 3238402 - RNA, 19 nt, Artificial Sequence
  Description of Artificial Sequence: Synthetic oligonucleotide
gagaagguggccaacaggu

SEQ ID NO: 3238403 - RNA, 19 nt, Artificial Sequence
  Description of Artificial Sequence: Synthetic oligonucleotide
uucuguggaucagguaccg

SEQ ID NO: 3238404 - RNA, 19 nt, Artificial Sequence
  Description of Artificial Sequence: Synthetic oligonucleotide
ugggucuggugccucaaga

SEQ ID NO: 3238405 - RNA, 19 nt, Artificial Sequence
  Description of Artificial Sequence: Synthetic oligonucleotide
ucaccaacaugggaacucc

SEQ ID NO: 3238406 - RNA, 19 nt, Artificial Sequence
  Description of Artificial Sequence: Synthetic oligonucleotide
cucaggauucucagagggc

SEQ ID NO: 3238407 - RNA, 19 nt, Artificial Sequence
  Description of Artificial Sequence: Synthetic oligonucleotide
uuucugcuugccgacauuc

SEQ ID NO: 3238408 - RNA, 19 nt, Artificial Sequence
  Description of Artificial Sequence: Synthetic oligonucleotide
uggcuagggccucagcagc

SEQ ID NO: 3238409 - RNA, 19 nt, Artificial Sequence
  Description of Artificial Sequence: Synthetic oligonucleotide
cuguggaucagguaccgca

SEQ ID NO: 3238410 - RNA, 19 nt, Artificial Sequence
  Description of Artificial Sequence: Synthetic oligonucleotide
acggagaaauccuuggcua

SEQ ID NO: 3238411 - RNA, 19 nt, Artificial Sequence
  Description of Artificial Sequence: Synthetic oligonucleotide
uccuucgcuagcugcagga

SEQ ID NO: 3238412 - RNA, 19 nt, Artificial Sequence
  Description of Artificial Sequence: Synthetic oligonucleotide
gauggcagagccgcggcag

SEQ ID NO: 3238413 - RNA, 19 nt, Artificial Sequence
  Description of Artificial Sequence: Synthetic oligonucleotide
guuggcuuaaagucauaga

SEQ ID NO: 3238414 - RNA, 19 nt, Artificial Sequence
  Description of Artificial Sequence: Synthetic oligonucleotide
augagucaccaacauggga

SEQ ID NO: 3238415 - RNA, 19 nt, Artificial Sequence
  Description of Artificial Sequence: Synthetic oligonucleotide
aauccuuggcuagggccuc

SEQ ID NO: 3238416 - RNA, 19 nt, Artificial Sequence
  Description of Artificial Sequence: Synthetic oligonucleotide
ugcaaggcuuugagcuugg

SEQ ID NO: 3238417 - RNA, 19 nt, Artificial Sequence
  Description of Artificial Sequence: Synthetic oligonucleotide
aagauuuugauguagauca

SEQ ID NO: 3238418 - RNA, 19 nt, Artificial Sequence
  Description of Artificial Sequence: Synthetic oligonucleotide
aauggagucaauccaaugc

SEQ ID NO: 3238419 - RNA, 19 nt, Artificial Sequence
  Description of Artificial Sequence: Synthetic oligonucleotide
aagaaauugaaauauacca

SEQ ID NO: 3238420 - RNA, 19 nt, Artificial Sequence
  Description of Artificial Sequence: Synthetic oligonucleotide
aaauauaccauguagcuca

SEQ ID NO: 3238421 - RNA, 19 nt, Artificial Sequence
  Description of Artificial Sequence: Synthetic oligonucleotide
aaagaaauugaaauauacc

SEQ ID NO: 3238422 - RNA, 19 nt, Artificial Sequence
  Description of Artificial Sequence: Synthetic oligonucleotide
uauaccauguagcucaugg

SEQ ID NO: 3238423 - RNA, 19 nt, Artificial Sequence
  Description of Artificial Sequence: Synthetic oligonucleotide
aaugccaaaggcaaggacc

SEQ ID NO: 3238424 - RNA, 19 nt, Artificial Sequence
  Description of Artificial Sequence: Synthetic oligonucleotide
auugaaauauaccauguag

SEQ ID NO: 3238425 - RNA, 19 nt, Artificial Sequence
  Description of Artificial Sequence: Synthetic oligonucleotide
gaaauugaaauauaccaug

SEQ ID NO: 3238426 - RNA, 19 nt, Artificial Sequence
  Description of Artificial Sequence: Synthetic oligonucleotide
aaggcaaggacccagagga

SEQ ID NO: 3238427 - RNA, 19 nt, Artificial Sequence
  Description of Artificial Sequence: Synthetic oligonucleotide
uagaucaccaacauuauga

SEQ ID NO: 3238428 - RNA, 19 nt, Artificial Sequence
  Description of Artificial Sequence: Synthetic oligonucleotide
uugaaauauaccauguagc

SEQ ID NO: 3238429 - RNA, 19 nt, Artificial Sequence
  Description of Artificial Sequence: Synthetic oligonucleotide
accaugaagauuuugaugu

SEQ ID NO: 3238430 - RNA, 19 nt, Artificial Sequence
  Description of Artificial Sequence: Synthetic oligonucleotide
aaagagacacuucacagga

SEQ ID NO: 3238431 - RNA, 19 nt, Artificial Sequence
  Description of Artificial Sequence: Synthetic oligonucleotide
ugauccaucaguuccaugc

SEQ ID NO: 3238432 - RNA, 19 nt, Artificial Sequence
  Description of Artificial Sequence: Synthetic oligonucleotide
uuuacuauuccaacccagg

SEQ ID NO: 3238433 - RNA, 19 nt, Artificial Sequence
  Description of Artificial Sequence: Synthetic oligonucleotide
ugaaauauaccauguagcu

SEQ ID NO: 3238434 - RNA, 19 nt, Artificial Sequence
  Description of Artificial Sequence: Synthetic oligonucleotide
uuugauguagaucaccaac

SEQ ID NO: 3238435 - RNA, 19 nt, Artificial Sequence
  Description of Artificial Sequence: Synthetic oligonucleotide
ucaaagagacacuucacag

SEQ ID NO: 3238436 - RNA, 19 nt, Artificial Sequence
  Description of Artificial Sequence: Synthetic oligonucleotide
uuacaggccaccaugaaga

SEQ ID NO: 3238437 - RNA, 19 nt, Artificial Sequence
  Description of Artificial Sequence: Synthetic oligonucleotide
auggagucaauccaaugcc

SEQ ID NO: 3238438 - RNA, 19 nt, Artificial Sequence
  Description of Artificial Sequence: Synthetic oligonucleotide
uaccauguagcucaugggg

SEQ ID NO: 3238439 - RNA, 19 nt, Artificial Sequence
  Description of Artificial Sequence: Synthetic oligonucleotide
caaagaaauugaaauauac

SEQ ID NO: 3238440 - RNA, 19 nt, Artificial Sequence
  Description of Artificial Sequence: Synthetic oligonucleotide
aggacagcagcuuuuauuc

SEQ ID NO: 3238441 - RNA, 19 nt, Artificial Sequence
  Description of Artificial Sequence: Synthetic oligonucleotide
uucucaaagagacacuuca

SEQ ID NO: 3238442 - RNA, 19 nt, Artificial Sequence
  Description of Artificial Sequence: Synthetic oligonucleotide
agugaccaaacuuuuguac

SEQ ID NO: 3238443 - RNA, 19 nt, Artificial Sequence
  Description of Artificial Sequence: Synthetic oligonucleotide
cagaggacagcaaugaucc

SEQ ID NO: 3238444 - RNA, 19 nt, Artificial Sequence
  Description of Artificial Sequence: Synthetic oligonucleotide
accacauucucaaagagac

SEQ ID NO: 3238445 - RNA, 19 nt, Artificial Sequence
  Description of Artificial Sequence: Synthetic oligonucleotide
aacauuaugagcaguggag

SEQ ID NO: 3238446 - RNA, 19 nt, Artificial Sequence
  Description of Artificial Sequence: Synthetic oligonucleotide
uugauuacaggccaccaug

SEQ ID NO: 3238447 - RNA, 19 nt, Artificial Sequence
  Description of Artificial Sequence: Synthetic oligonucleotide
ugaaguugauuacaggcca

SEQ ID NO: 3238448 - RNA, 19 nt, Artificial Sequence
  Description of Artificial Sequence: Synthetic oligonucleotide
aaaggcaaggacccagagg

SEQ ID NO: 3238449 - RNA, 19 nt, Artificial Sequence
  Description of Artificial Sequence: Synthetic oligonucleotide
aucaccaacauuaugagca

SEQ ID NO: 3238450 - RNA, 19 nt, Artificial Sequence
  Description of Artificial Sequence: Synthetic oligonucleotide
uugauguagaucaccaaca

SEQ ID NO: 3238451 - RNA, 19 nt, Artificial Sequence
  Description of Artificial Sequence: Synthetic oligonucleotide
uuuauucgugauuccaucc

SEQ ID NO: 3238452 - RNA, 19 nt, Artificial Sequence
  Description of Artificial Sequence: Synthetic oligonucleotide
caaagagacacuucacagg

SEQ ID NO: 3238453 - RNA, 19 nt, Artificial Sequence
  Description of Artificial Sequence: Synthetic oligonucleotide
caaugaucccucuugcucg

SEQ ID NO: 3238454 - RNA, 19 nt, Artificial Sequence
  Description of Artificial Sequence: Synthetic oligonucleotide
uuauucgugauuccauccc

SEQ ID NO: 3238455 - RNA, 19 nt, Artificial Sequence
  Description of Artificial Sequence: Synthetic oligonucleotide
ugucuuuacuauuccaacc

SEQ ID NO: 3238456 - RNA, 19 nt, Artificial Sequence
  Description of Artificial Sequence: Synthetic oligonucleotide
cugaaguugauuacaggcc

SEQ ID NO: 3238457 - RNA, 19 nt, Artificial Sequence
  Description of Artificial Sequence: Synthetic oligonucleotide
gucuuuacuauuccaaccc

SEQ ID NO: 3238458 - RNA, 19 nt, Artificial Sequence
  Description of Artificial Sequence: Synthetic oligonucleotide
auuacaggccaccaugaag

SEQ ID NO: 3238459 - RNA, 19 nt, Artificial Sequence
  Description of Artificial Sequence: Synthetic oligonucleotide
aaguugauuacaggccacc

SEQ ID NO: 3238460 - RNA, 19 nt, Artificial Sequence
  Description of Artificial Sequence: Synthetic oligonucleotide
aaauugaaauauaccaugu

SEQ ID NO: 3238461 - RNA, 19 nt, Artificial Sequence
  Description of Artificial Sequence: Synthetic oligonucleotide
ucaauccaaugccaaaggc

SEQ ID NO: 3238462 - RNA, 19 nt, Artificial Sequence
  Description of Artificial Sequence: Synthetic oligonucleotide
acuauuccaacccaggaau

SEQ ID NO: 3238463 - RNA, 19 nt, Artificial Sequence
  Description of Artificial Sequence: Synthetic oligonucleotide
acagcaaugaucccucuug

SEQ ID NO: 3238464 - RNA, 19 nt, Artificial Sequence
  Description of Artificial Sequence: Synthetic oligonucleotide
aaugaucccucuugcucgg

SEQ ID NO: 3238465 - RNA, 19 nt, Artificial Sequence
  Description of Artificial Sequence: Synthetic oligonucleotide
aauugaaauauaccaugua

SEQ ID NO: 3238466 - RNA, 19 nt, Artificial Sequence
  Description of Artificial Sequence: Synthetic oligonucleotide
gcugaaguugauuacaggc

SEQ ID NO: 3238467 - RNA, 19 nt, Artificial Sequence
  Description of Artificial Sequence: Synthetic oligonucleotide
uccaaugccaaaggcaagg

SEQ ID NO: 3238468 - RNA, 19 nt, Artificial Sequence
  Description of Artificial Sequence: Synthetic oligonucleotide
cacauucucaaagagacac

SEQ ID NO: 3238469 - RNA, 19 nt, Artificial Sequence
  Description of Artificial Sequence: Synthetic oligonucleotide
agaucaccaacauuaugag

SEQ ID NO: 3238470 - RNA, 19 nt, Artificial Sequence
  Description of Artificial Sequence: Synthetic oligonucleotide
uauuccaacccaggaaugg

SEQ ID NO: 3238471 - RNA, 19 nt, Artificial Sequence
  Description of Artificial Sequence: Synthetic oligonucleotide
aauccaaugccaaaggcaa

SEQ ID NO: 3238472 - RNA, 19 nt, Artificial Sequence
  Description of Artificial Sequence: Synthetic oligonucleotide
uuacuauuccaacccagga

SEQ ID NO: 3238473 - RNA, 19 nt, Artificial Sequence
  Description of Artificial Sequence: Synthetic oligonucleotide
uauucgugauuccaucccc

SEQ ID NO: 3238474 - RNA, 19 nt, Artificial Sequence
  Description of Artificial Sequence: Synthetic oligonucleotide
gugaccaaacuuuuguacc

SEQ ID NO: 3238475 - RNA, 19 nt, Artificial Sequence
  Description of Artificial Sequence: Synthetic oligonucleotide
auguagaucaccaacauua

SEQ ID NO: 3238476 - RNA, 19 nt, Artificial Sequence
  Description of Artificial Sequence: Synthetic oligonucleotide
agagacacuucacaggaca

SEQ ID NO: 3238477 - RNA, 19 nt, Artificial Sequence
  Description of Artificial Sequence: Synthetic oligonucleotide
gacacacccaaagaaauug

SEQ ID NO: 3238478 - RNA, 19 nt, Artificial Sequence
  Description of Artificial Sequence: Synthetic oligonucleotide
aggaaggacacacccaaag

SEQ ID NO: 3238479 - RNA, 19 nt, Artificial Sequence
  Description of Artificial Sequence: Synthetic oligonucleotide
uuuuauucgugauuccauc

SEQ ID NO: 3238480 - RNA, 19 nt, Artificial Sequence
  Description of Artificial Sequence: Synthetic oligonucleotide
cuuuacuauuccaacccag

SEQ ID NO: 3238481 - RNA, 19 nt, Artificial Sequence
  Description of Artificial Sequence: Synthetic oligonucleotide
acauuaugagcaguggagg

SEQ ID NO: 3238482 - RNA, 19 nt, Artificial Sequence
  Description of Artificial Sequence: Synthetic oligonucleotide
gauccaucaguuccaugcg

SEQ ID NO: 3238483 - RNA, 19 nt, Artificial Sequence
  Description of Artificial Sequence: Synthetic oligonucleotide
gauuuugauguagaucacc

SEQ ID NO: 3238484 - RNA, 19 nt, Artificial Sequence
  Description of Artificial Sequence: Synthetic oligonucleotide
uuaugagcaguggaggaag

SEQ ID NO: 3238485 - RNA, 19 nt, Artificial Sequence
  Description of Artificial Sequence: Synthetic oligonucleotide
ucuuuacuauuccaaccca

SEQ ID NO: 3238486 - RNA, 19 nt, Artificial Sequence
  Description of Artificial Sequence: Synthetic oligonucleotide
uacuauuccaacccaggaa

SEQ ID NO: 3238487 - RNA, 19 nt, Artificial Sequence
  Description of Artificial Sequence: Synthetic oligonucleotide
gaaggacacacccaaagaa

SEQ ID NO: 3238488 - RNA, 19 nt, Artificial Sequence
  Description of Artificial Sequence: Synthetic oligonucleotide
gaagauuuugauguagauc

SEQ ID NO: 3238489 - RNA, 19 nt, Artificial Sequence
  Description of Artificial Sequence: Synthetic oligonucleotide
ugauuacaggccaccauga

SEQ ID NO: 3238490 - RNA, 19 nt, Artificial Sequence
  Description of Artificial Sequence: Synthetic oligonucleotide
gucaauccaaugccaaagg

SEQ ID NO: 3238491 - RNA, 19 nt, Artificial Sequence
  Description of Artificial Sequence: Synthetic oligonucleotide
augccaaaggcaaggaccc

SEQ ID NO: 3238492 - RNA, 19 nt, Artificial Sequence
  Description of Artificial Sequence: Synthetic oligonucleotide
agucaauccaaugccaaag

SEQ ID NO: 3238493 - RNA, 19 nt, Artificial Sequence
  Description of Artificial Sequence: Synthetic oligonucleotide
ugaccaaacuuuuguaccu

SEQ ID NO: 3238494 - RNA, 19 nt, Artificial Sequence
  Description of Artificial Sequence: Synthetic oligonucleotide
auaccauguagcucauggg

SEQ ID NO: 3238495 - RNA, 19 nt, Artificial Sequence
  Description of Artificial Sequence: Synthetic oligonucleotide
agcuuuuauucgugauucc

SEQ ID NO: 3238496 - RNA, 19 nt, Artificial Sequence
  Description of Artificial Sequence: Synthetic oligonucleotide
ucugugcaguugcuggugg

SEQ ID NO: 3238497 - RNA, 19 nt, Artificial Sequence
  Description of Artificial Sequence: Synthetic oligonucleotide
auccaucaguuccaugcgc

SEQ ID NO: 3238498 - RNA, 19 nt, Artificial Sequence
  Description of Artificial Sequence: Synthetic oligonucleotide
agaaauugaaauauaccau

SEQ ID NO: 3238499 - RNA, 19 nt, Artificial Sequence
  Description of Artificial Sequence: Synthetic oligonucleotide
uaugagcaguggaggaagg

SEQ ID NO: 3238500 - RNA, 19 nt, Artificial Sequence
  Description of Artificial Sequence: Synthetic oligonucleotide
gguucugugcaguugcugg

SEQ ID NO: 3238501 - RNA, 19 nt, Artificial Sequence
  Description of Artificial Sequence: Synthetic oligonucleotide
auuuugauguagaucacca

SEQ ID NO: 3238502 - RNA, 19 nt, Artificial Sequence
  Description of Artificial Sequence: Synthetic oligonucleotide
cacuucacaggacagcagc

SEQ ID NO: 3238503 - RNA, 19 nt, Artificial Sequence
  Description of Artificial Sequence: Synthetic oligonucleotide
gaucaccaacauuaugagc

SEQ ID NO: 3238504 - RNA, 19 nt, Artificial Sequence
  Description of Artificial Sequence: Synthetic oligonucleotide
ugaagauuuugauguagau

SEQ ID NO: 3238505 - RNA, 19 nt, Artificial Sequence
  Description of Artificial Sequence: Synthetic oligonucleotide
ugauguagaucaccaacau

SEQ ID NO: 3238506 - RNA, 19 nt, Artificial Sequence
  Description of Artificial Sequence: Synthetic oligonucleotide
uuccaacccaggaauggag

SEQ ID NO: 3238507 - RNA, 19 nt, Artificial Sequence
  Description of Artificial Sequence: Synthetic oligonucleotide
ucuugcucgggucccagug

SEQ ID NO: 3238508 - RNA, 19 nt, Artificial Sequence
  Description of Artificial Sequence: Synthetic oligonucleotide
caugaagauuuugauguag

SEQ ID NO: 3238509 - RNA, 19 nt, Artificial Sequence
  Description of Artificial Sequence: Synthetic oligonucleotide
uccaucaguuccaugcgcu

SEQ ID NO: 3238510 - RNA, 19 nt, Artificial Sequence
  Description of Artificial Sequence: Synthetic oligonucleotide
gaauggagucaauccaaug

SEQ ID NO: 3238511 - RNA, 19 nt, Artificial Sequence
  Description of Artificial Sequence: Synthetic oligonucleotide
gaaauauaccauguagcuc

SEQ ID NO: 3238512 - RNA, 19 nt, Artificial Sequence
  Description of Artificial Sequence: Synthetic oligonucleotide
caauccaaugccaaaggca

SEQ ID NO: 3238513 - RNA, 19 nt, Artificial Sequence
  Description of Artificial Sequence: Synthetic oligonucleotide
cugucuuuacuauuccaac

SEQ ID NO: 3238514 - RNA, 19 nt, Artificial Sequence
  Description of Artificial Sequence: Synthetic oligonucleotide
ucucaaagagacacuucac

SEQ ID NO: 3238515 - RNA, 19 nt, Artificial Sequence
  Description of Artificial Sequence: Synthetic oligonucleotide
uuccaugcgcugaaguuga

SEQ ID NO: 3238516 - RNA, 19 nt, Artificial Sequence
  Description of Artificial Sequence: Synthetic oligonucleotide
guggaggaaggacacaccc

SEQ ID NO: 3238517 - RNA, 19 nt, Artificial Sequence
  Description of Artificial Sequence: Synthetic oligonucleotide
acugagaagacucacaugg

SEQ ID NO: 3238518 - RNA, 19 nt, Artificial Sequence
  Description of Artificial Sequence: Synthetic oligonucleotide
aauucuuaaguuugguuuc

SEQ ID NO: 3238519 - RNA, 19 nt, Artificial Sequence
  Description of Artificial Sequence: Synthetic oligonucleotide
acaaauaaugacucuuucc

SEQ ID NO: 3238520 - RNA, 19 nt, Artificial Sequence
  Description of Artificial Sequence: Synthetic oligonucleotide
ugaagaauguaacugguca

SEQ ID NO: 3238521 - RNA, 19 nt, Artificial Sequence
  Description of Artificial Sequence: Synthetic oligonucleotide
uuuuaguuuaucacguucc

SEQ ID NO: 3238522 - RNA, 19 nt, Artificial Sequence
  Description of Artificial Sequence: Synthetic oligonucleotide
uucaugauuuccuaaagug

SEQ ID NO: 3238523 - RNA, 19 nt, Artificial Sequence
  Description of Artificial Sequence: Synthetic oligonucleotide
guacacaacauccugagag

SEQ ID NO: 3238524 - RNA, 19 nt, Artificial Sequence
  Description of Artificial Sequence: Synthetic oligonucleotide
ucauucagaagcuuaaucu

SEQ ID NO: 3238525 - RNA, 19 nt, Artificial Sequence
  Description of Artificial Sequence: Synthetic oligonucleotide
uuucaaaagaagaugccca

SEQ ID NO: 3238526 - RNA, 19 nt, Artificial Sequence
  Description of Artificial Sequence: Synthetic oligonucleotide
aagucugcaaaacugucag

SEQ ID NO: 3238527 - RNA, 19 nt, Artificial Sequence
  Description of Artificial Sequence: Synthetic oligonucleotide
ugaucuucggcaaacaacu

SEQ ID NO: 3238528 - RNA, 19 nt, Artificial Sequence
  Description of Artificial Sequence: Synthetic oligonucleotide
auuuccucccuuuuaacac

SEQ ID NO: 3238529 - RNA, 19 nt, Artificial Sequence
  Description of Artificial Sequence: Synthetic oligonucleotide
uaugagaaucuucagacuc

SEQ ID NO: 3238530 - RNA, 19 nt, Artificial Sequence
  Description of Artificial Sequence: Synthetic oligonucleotide
uaacgaaaaguucugaaaa

SEQ ID NO: 3238531 - RNA, 19 nt, Artificial Sequence
  Description of Artificial Sequence: Synthetic oligonucleotide
agauaaaucaugcuuuuca

SEQ ID NO: 3238532 - RNA, 19 nt, Artificial Sequence
  Description of Artificial Sequence: Synthetic oligonucleotide
uuggauuaagccaguauag

SEQ ID NO: 3238533 - RNA, 19 nt, Artificial Sequence
  Description of Artificial Sequence: Synthetic oligonucleotide
ucugagaucgguuucaaaa

SEQ ID NO: 3238534 - RNA, 19 nt, Artificial Sequence
  Description of Artificial Sequence: Synthetic oligonucleotide
gauuaagccaguauagucc

SEQ ID NO: 3238535 - RNA, 19 nt, Artificial Sequence
  Description of Artificial Sequence: Synthetic oligonucleotide
ugcccuaaaauucuuaagu

SEQ ID NO: 3238536 - RNA, 19 nt, Artificial Sequence
  Description of Artificial Sequence: Synthetic oligonucleotide
uuucguucugcucauaacu

SEQ ID NO: 3238537 - RNA, 19 nt, Artificial Sequence
  Description of Artificial Sequence: Synthetic oligonucleotide
ugaucaaguucacacauac

SEQ ID NO: 3238538 - RNA, 19 nt, Artificial Sequence
  Description of Artificial Sequence: Synthetic oligonucleotide
uccagcuggguucauaagg

SEQ ID NO: 3238539 - RNA, 19 nt, Artificial Sequence
  Description of Artificial Sequence: Synthetic oligonucleotide
ugucaaguuucccuaaaag

SEQ ID NO: 3238540 - RNA, 19 nt, Artificial Sequence
  Description of Artificial Sequence: Synthetic oligonucleotide
uaguuuaucacguuccugu

SEQ ID NO: 3238541 - RNA, 19 nt, Artificial Sequence
  Description of Artificial Sequence: Synthetic oligonucleotide
uauuaacagagaaauuaca

SEQ ID NO: 3238542 - RNA, 19 nt, Artificial Sequence
  Description of Artificial Sequence: Synthetic oligonucleotide
uuucaagucaugaacugac

SEQ ID NO: 3238543 - RNA, 19 nt, Artificial Sequence
  Description of Artificial Sequence: Synthetic oligonucleotide
acggaugagauucuguuuc

SEQ ID NO: 3238544 - RNA, 19 nt, Artificial Sequence
  Description of Artificial Sequence: Synthetic oligonucleotide
aaaacugucagcagggucu

SEQ ID NO: 3238545 - RNA, 19 nt, Artificial Sequence
  Description of Artificial Sequence: Synthetic oligonucleotide
uucuaaaagucauuaagaa

SEQ ID NO: 3238546 - RNA, 19 nt, Artificial Sequence
  Description of Artificial Sequence: Synthetic oligonucleotide
uuaaccgugacucuuuguc

SEQ ID NO: 3238547 - RNA, 19 nt, Artificial Sequence
  Description of Artificial Sequence: Synthetic oligonucleotide
ugcugauuuggucucaaag

SEQ ID NO: 3238548 - RNA, 19 nt, Artificial Sequence
  Description of Artificial Sequence: Synthetic oligonucleotide
uguucgagaaccaucugca

SEQ ID NO: 3238549 - RNA, 19 nt, Artificial Sequence
  Description of Artificial Sequence: Synthetic oligonucleotide
uccauuucuaaaaucaaua

SEQ ID NO: 3238550 - RNA, 19 nt, Artificial Sequence
  Description of Artificial Sequence: Synthetic oligonucleotide
caaauaaugacucuuucca

SEQ ID NO: 3238551 - RNA, 19 nt, Artificial Sequence
  Description of Artificial Sequence: Synthetic oligonucleotide
uuucuaauucagcagaaua

SEQ ID NO: 3238552 - RNA, 19 nt, Artificial Sequence
  Description of Artificial Sequence: Synthetic oligonucleotide
auucucaucuuuccuauag

SEQ ID NO: 3238553 - RNA, 19 nt, Artificial Sequence
  Description of Artificial Sequence: Synthetic oligonucleotide
ugaaccucauucugaaggg

SEQ ID NO: 3238554 - RNA, 19 nt, Artificial Sequence
  Description of Artificial Sequence: Synthetic oligonucleotide
uuaacgaaaaguucugaaa

SEQ ID NO: 3238555 - RNA, 19 nt, Artificial Sequence
  Description of Artificial Sequence: Synthetic oligonucleotide
aacaucugagaucgguuuc

SEQ ID NO: 3238556 - RNA, 19 nt, Artificial Sequence
  Description of Artificial Sequence: Synthetic oligonucleotide
cuuaaguuugguuucguuc

SEQ ID NO: 3238557 - RNA, 19 nt, Artificial Sequence
  Description of Artificial Sequence: Synthetic oligonucleotide
guaagaguuccucaaacug

SEQ ID NO: 3238558 - RNA, 19 nt, Artificial Sequence
  Description of Artificial Sequence: Synthetic oligonucleotide
agcauaggcgugcagcugc

SEQ ID NO: 3238559 - RNA, 19 nt, Artificial Sequence
  Description of Artificial Sequence: Synthetic oligonucleotide
ucuaaaagucauuaagaau

SEQ ID NO: 3238560 - RNA, 19 nt, Artificial Sequence
  Description of Artificial Sequence: Synthetic oligonucleotide
uuggaaguguucgagaacc

SEQ ID NO: 3238561 - RNA, 19 nt, Artificial Sequence
  Description of Artificial Sequence: Synthetic oligonucleotide
ucuuaagaggcucuccuga

SEQ ID NO: 3238562 - RNA, 19 nt, Artificial Sequence
  Description of Artificial Sequence: Synthetic oligonucleotide
uucuguaagucuugaagcc

SEQ ID NO: 3238563 - RNA, 19 nt, Artificial Sequence
  Description of Artificial Sequence: Synthetic oligonucleotide
acuaaguucaucaacuucu

SEQ ID NO: 3238564 - RNA, 19 nt, Artificial Sequence
  Description of Artificial Sequence: Synthetic oligonucleotide
uaagugcugaaccucauuc

SEQ ID NO: 3238565 - RNA, 19 nt, Artificial Sequence
  Description of Artificial Sequence: Synthetic oligonucleotide
gaguguuuuaaucauggca

SEQ ID NO: 3238566 - RNA, 19 nt, Artificial Sequence
  Description of Artificial Sequence: Synthetic oligonucleotide
acacauacgguguucauga

SEQ ID NO: 3238567 - RNA, 19 nt, Artificial Sequence
  Description of Artificial Sequence: Synthetic oligonucleotide
caacuacaaacaaauaaug

SEQ ID NO: 3238568 - RNA, 19 nt, Artificial Sequence
  Description of Artificial Sequence: Synthetic oligonucleotide
ugugaucaaguucacacau

SEQ ID NO: 3238569 - RNA, 19 nt, Artificial Sequence
  Description of Artificial Sequence: Synthetic oligonucleotide
ugcuuggagaccauguuca

SEQ ID NO: 3238570 - RNA, 19 nt, Artificial Sequence
  Description of Artificial Sequence: Synthetic oligonucleotide
ugucaaccaaaacuugugc

SEQ ID NO: 3238571 - RNA, 19 nt, Artificial Sequence
  Description of Artificial Sequence: Synthetic oligonucleotide
ugacaugaugucaaguuuc

SEQ ID NO: 3238572 - RNA, 19 nt, Artificial Sequence
  Description of Artificial Sequence: Synthetic oligonucleotide
ucccuuuuaacacccagga

SEQ ID NO: 3238573 - RNA, 19 nt, Artificial Sequence
  Description of Artificial Sequence: Synthetic oligonucleotide
gaaauccuggcaugaagag

SEQ ID NO: 3238574 - RNA, 19 nt, Artificial Sequence
  Description of Artificial Sequence: Synthetic oligonucleotide
uuagucucagcacuucaug

SEQ ID NO: 3238575 - RNA, 19 nt, Artificial Sequence
  Description of Artificial Sequence: Synthetic oligonucleotide
agagguuucucaugaggac

SEQ ID NO: 3238576 - RNA, 19 nt, Artificial Sequence
  Description of Artificial Sequence: Synthetic oligonucleotide
gcugauuuggucucaaagg

SEQ ID NO: 3238577 - RNA, 19 nt, Artificial Sequence
  Description of Artificial Sequence: Synthetic oligonucleotide
aguauaguccacuuguaau

SEQ ID NO: 3238578 - RNA, 19 nt, Artificial Sequence
  Description of Artificial Sequence: Synthetic oligonucleotide
auuaagccaguauagucca

SEQ ID NO: 3238579 - RNA, 19 nt, Artificial Sequence
  Description of Artificial Sequence: Synthetic oligonucleotide
aguguuuuaaucauggcau

SEQ ID NO: 3238580 - RNA, 19 nt, Artificial Sequence
  Description of Artificial Sequence: Synthetic oligonucleotide
auugaacacagacugcuga

SEQ ID NO: 3238581 - RNA, 19 nt, Artificial Sequence
  Description of Artificial Sequence: Synthetic oligonucleotide
auaaaucaugcuuuucacu

SEQ ID NO: 3238582 - RNA, 19 nt, Artificial Sequence
  Description of Artificial Sequence: Synthetic oligonucleotide
ucagaucuguccuucuucc

SEQ ID NO: 3238583 - RNA, 19 nt, Artificial Sequence
  Description of Artificial Sequence: Synthetic oligonucleotide
aucuuuggacaacugauca

SEQ ID NO: 3238584 - RNA, 19 nt, Artificial Sequence
  Description of Artificial Sequence: Synthetic oligonucleotide
uuucaguacaaggccagcg

SEQ ID NO: 3238585 - RNA, 19 nt, Artificial Sequence
  Description of Artificial Sequence: Synthetic oligonucleotide
cacuuuucgauccuccucc

SEQ ID NO: 3238586 - RNA, 19 nt, Artificial Sequence
  Description of Artificial Sequence: Synthetic oligonucleotide
ugcuaugcugaacuugugc

SEQ ID NO: 3238587 - RNA, 19 nt, Artificial Sequence
  Description of Artificial Sequence: Synthetic oligonucleotide
ugauuuggucucaaaggug

SEQ ID NO: 3238588 - RNA, 19 nt, Artificial Sequence
  Description of Artificial Sequence: Synthetic oligonucleotide
gaagaauguaacuggucac

SEQ ID NO: 3238589 - RNA, 19 nt, Artificial Sequence
  Description of Artificial Sequence: Synthetic oligonucleotide
aacggugugaacgugggga

SEQ ID NO: 3238590 - RNA, 19 nt, Artificial Sequence
  Description of Artificial Sequence: Synthetic oligonucleotide
acuuguuccugagagacag

SEQ ID NO: 3238591 - RNA, 19 nt, Artificial Sequence
  Description of Artificial Sequence: Synthetic oligonucleotide
cagcuauggacucugacag

SEQ ID NO: 3238592 - RNA, 19 nt, Artificial Sequence
  Description of Artificial Sequence: Synthetic oligonucleotide
acaacuacaaacaaauaau

SEQ ID NO: 3238593 - RNA, 19 nt, Artificial Sequence
  Description of Artificial Sequence: Synthetic oligonucleotide
ucgcguuagaggaugaaac

SEQ ID NO: 3238594 - RNA, 19 nt, Artificial Sequence
  Description of Artificial Sequence: Synthetic oligonucleotide
aauuacaacuacaaacaaa

SEQ ID NO: 3238595 - RNA, 19 nt, Artificial Sequence
  Description of Artificial Sequence: Synthetic oligonucleotide
aguuccugcccuaaaauuc

SEQ ID NO: 3238596 - RNA, 19 nt, Artificial Sequence
  Description of Artificial Sequence: Synthetic oligonucleotide
acucguguugcauauuuug

SEQ ID NO: 3238597 - RNA, 19 nt, Artificial Sequence
  Description of Artificial Sequence: Synthetic oligonucleotide
ucugaauaguuucuuuaaa

SEQ ID NO: 3238598 - RNA, 19 nt, Artificial Sequence
  Description of Artificial Sequence: Synthetic oligonucleotide
uccacuuuuccuucugugc

SEQ ID NO: 3238599 - RNA, 19 nt, Artificial Sequence
  Description of Artificial Sequence: Synthetic oligonucleotide
cauccagucauccaccgag

SEQ ID NO: 3238600 - RNA, 19 nt, Artificial Sequence
  Description of Artificial Sequence: Synthetic oligonucleotide
cuuaaguaaguuuuguaaa

SEQ ID NO: 3238601 - RNA, 19 nt, Artificial Sequence
  Description of Artificial Sequence: Synthetic oligonucleotide
cucguguugcauauuuugg

SEQ ID NO: 3238602 - RNA, 19 nt, Artificial Sequence
  Description of Artificial Sequence: Synthetic oligonucleotide
uuugcuucauccaaacguu

SEQ ID NO: 3238603 - RNA, 19 nt, Artificial Sequence
  Description of Artificial Sequence: Synthetic oligonucleotide
ucacguuccuguaagaguu

SEQ ID NO: 3238604 - RNA, 19 nt, Artificial Sequence
  Description of Artificial Sequence: Synthetic oligonucleotide
auuaacagagaaauuacaa

SEQ ID NO: 3238605 - RNA, 19 nt, Artificial Sequence
  Description of Artificial Sequence: Synthetic oligonucleotide
uuucgauccuccuccaagc

SEQ ID NO: 3238606 - RNA, 19 nt, Artificial Sequence
  Description of Artificial Sequence: Synthetic oligonucleotide
acaacauccugagagcagg

SEQ ID NO: 3238607 - RNA, 19 nt, Artificial Sequence
  Description of Artificial Sequence: Synthetic oligonucleotide
uaugcugaacuugugccag

SEQ ID NO: 3238608 - RNA, 19 nt, Artificial Sequence
  Description of Artificial Sequence: Synthetic oligonucleotide
ugcuggauaaucugaguga

SEQ ID NO: 3238609 - RNA, 19 nt, Artificial Sequence
  Description of Artificial Sequence: Synthetic oligonucleotide
ucagaauucucuuguugga

SEQ ID NO: 3238610 - RNA, 19 nt, Artificial Sequence
  Description of Artificial Sequence: Synthetic oligonucleotide
ucggcaaacaacuggucca

SEQ ID NO: 3238611 - RNA, 19 nt, Artificial Sequence
  Description of Artificial Sequence: Synthetic oligonucleotide
gacuuucuuccucaguuug

SEQ ID NO: 3238612 - RNA, 19 nt, Artificial Sequence
  Description of Artificial Sequence: Synthetic oligonucleotide
ucuauacuaaggcucugaa

SEQ ID NO: 3238613 - RNA, 19 nt, Artificial Sequence
  Description of Artificial Sequence: Synthetic oligonucleotide
aaggaacuauugaacacag

SEQ ID NO: 3238614 - RNA, 19 nt, Artificial Sequence
  Description of Artificial Sequence: Synthetic oligonucleotide
aacugagaagacucacaug

SEQ ID NO: 3238615 - RNA, 19 nt, Artificial Sequence
  Description of Artificial Sequence: Synthetic oligonucleotide
ucaugaacugacagcuuug

SEQ ID NO: 3238616 - RNA, 19 nt, Artificial Sequence
  Description of Artificial Sequence: Synthetic oligonucleotide
uuuccccuuuucaauuuag

SEQ ID NO: 3238617 - RNA, 19 nt, Artificial Sequence
  Description of Artificial Sequence: Synthetic oligonucleotide
uauaaauacagacacagcu

SEQ ID NO: 3238618 - RNA, 19 nt, Artificial Sequence
  Description of Artificial Sequence: Synthetic oligonucleotide
uucucuuuuguuaaaaggg

SEQ ID NO: 3238619 - RNA, 19 nt, Artificial Sequence
  Description of Artificial Sequence: Synthetic oligonucleotide
aaugcuggcagauaaggag

SEQ ID NO: 3238620 - RNA, 19 nt, Artificial Sequence
  Description of Artificial Sequence: Synthetic oligonucleotide
uacguauaaauacagacac

SEQ ID NO: 3238621 - RNA, 19 nt, Artificial Sequence
  Description of Artificial Sequence: Synthetic oligonucleotide
uguuaaaaggggaauagga

SEQ ID NO: 3238622 - RNA, 19 nt, Artificial Sequence
  Description of Artificial Sequence: Synthetic oligonucleotide
ucugcugugaacuugcuug

SEQ ID NO: 3238623 - RNA, 19 nt, Artificial Sequence
  Description of Artificial Sequence: Synthetic oligonucleotide
ucucuuuuguuaaaagggg

SEQ ID NO: 3238624 - RNA, 19 nt, Artificial Sequence
  Description of Artificial Sequence: Synthetic oligonucleotide
cauacguauaaauacagac

SEQ ID NO: 3238625 - RNA, 19 nt, Artificial Sequence
  Description of Artificial Sequence: Synthetic oligonucleotide
uaaauacagacacagcuac

SEQ ID NO: 3238626 - RNA, 19 nt, Artificial Sequence
  Description of Artificial Sequence: Synthetic oligonucleotide
aagugauucucugaaacac

SEQ ID NO: 3238627 - RNA, 19 nt, Artificial Sequence
  Description of Artificial Sequence: Synthetic oligonucleotide
uuugagucaaauccaugcg

SEQ ID NO: 3238628 - RNA, 19 nt, Artificial Sequence
  Description of Artificial Sequence: Synthetic oligonucleotide
uucucugaaacacuccagg

SEQ ID NO: 3238629 - RNA, 19 nt, Artificial Sequence
  Description of Artificial Sequence: Synthetic oligonucleotide
aacuagguugcuuuugaag

SEQ ID NO: 3238630 - RNA, 19 nt, Artificial Sequence
  Description of Artificial Sequence: Synthetic oligonucleotide
cuuucagaggccuugagac

SEQ ID NO: 3238631 - RNA, 19 nt, Artificial Sequence
  Description of Artificial Sequence: Synthetic oligonucleotide
aaccccagcaggcaggcgc

SEQ ID NO: 3238632 - RNA, 19 nt, Artificial Sequence
  Description of Artificial Sequence: Synthetic oligonucleotide
ugugggugcagacagagga

SEQ ID NO: 3238633 - RNA, 19 nt, Artificial Sequence
  Description of Artificial Sequence: Synthetic oligonucleotide
ugagucaaauccaugcgag

SEQ ID NO: 3238634 - RNA, 19 nt, Artificial Sequence
  Description of Artificial Sequence: Synthetic oligonucleotide
acuagguugcuuuugaaga

SEQ ID NO: 3238635 - RNA, 19 nt, Artificial Sequence
  Description of Artificial Sequence: Synthetic oligonucleotide
cuaguaggccccaagacag

SEQ ID NO: 3238636 - RNA, 19 nt, Artificial Sequence
  Description of Artificial Sequence: Synthetic oligonucleotide
ugaagagcgacauacguau

SEQ ID NO: 3238637 - RNA, 19 nt, Artificial Sequence
  Description of Artificial Sequence: Synthetic oligonucleotide
cauggugagggcaucaggg

SEQ ID NO: 3238638 - RNA, 19 nt, Artificial Sequence
  Description of Artificial Sequence: Synthetic oligonucleotide
uuuugaagagcgacauacg

SEQ ID NO: 3238639 - RNA, 19 nt, Artificial Sequence
  Description of Artificial Sequence: Synthetic oligonucleotide
acugcuuggucuccaaggc

SEQ ID NO: 3238640 - RNA, 19 nt, Artificial Sequence
  Description of Artificial Sequence: Synthetic oligonucleotide
uaggaaauggggaucaggu

SEQ ID NO: 3238641 - RNA, 19 nt, Artificial Sequence
  Description of Artificial Sequence: Synthetic oligonucleotide
cacgcguccaccauuagcg

SEQ ID NO: 3238642 - RNA, 19 nt, Artificial Sequence
  Description of Artificial Sequence: Synthetic oligonucleotide
aaacacuccaggugguggg

SEQ ID NO: 3238643 - RNA, 19 nt, Artificial Sequence
  Description of Artificial Sequence: Synthetic oligonucleotide
ucccauaauccuuugcagg

SEQ ID NO: 3238644 - RNA, 19 nt, Artificial Sequence
  Description of Artificial Sequence: Synthetic oligonucleotide
aucuaggccuaguaggccc

SEQ ID NO: 3238645 - RNA, 19 nt, Artificial Sequence
  Description of Artificial Sequence: Synthetic oligonucleotide
acucuaacaugcaaagucc

SEQ ID NO: 3238646 - RNA, 19 nt, Artificial Sequence
  Description of Artificial Sequence: Synthetic oligonucleotide
uucagaggccuugagacgg

SEQ ID NO: 3238647 - RNA, 19 nt, Artificial Sequence
  Description of Artificial Sequence: Synthetic oligonucleotide
cacucuaacaugcaaaguc

SEQ ID NO: 3238648 - RNA, 19 nt, Artificial Sequence
  Description of Artificial Sequence: Synthetic oligonucleotide
ugggaagaggggauggugg

SEQ ID NO: 3238649 - RNA, 19 nt, Artificial Sequence
  Description of Artificial Sequence: Synthetic oligonucleotide
gacugcuuggucuccaagg

SEQ ID NO: 3238650 - RNA, 19 nt, Artificial Sequence
  Description of Artificial Sequence: Synthetic oligonucleotide
uugagucaaauccaugcga

SEQ ID NO: 3238651 - RNA, 19 nt, Artificial Sequence
  Description of Artificial Sequence: Synthetic oligonucleotide
agaggcaugcaggaaaccc

SEQ ID NO: 3238652 - RNA, 19 nt, Artificial Sequence
  Description of Artificial Sequence: Synthetic oligonucleotide
acagagacauccucucccc

SEQ ID NO: 3238653 - RNA, 19 nt, Artificial Sequence
  Description of Artificial Sequence: Synthetic oligonucleotide
gacauacguauaaauacag

SEQ ID NO: 3238654 - RNA, 19 nt, Artificial Sequence
  Description of Artificial Sequence: Synthetic oligonucleotide
ugaaggggcccacagagac

SEQ ID NO: 3238655 - RNA, 19 nt, Artificial Sequence
  Description of Artificial Sequence: Synthetic oligonucleotide
cucacucuaacaugcaaag

SEQ ID NO: 3238656 - RNA, 19 nt, Artificial Sequence
  Description of Artificial Sequence: Synthetic oligonucleotide
ugcuuggucuccaaggcgc

SEQ ID NO: 3238657 - RNA, 19 nt, Artificial Sequence
  Description of Artificial Sequence: Synthetic oligonucleotide
uuguuaaaaggggaauagg

SEQ ID NO: 3238658 - RNA, 19 nt, Artificial Sequence
  Description of Artificial Sequence: Synthetic oligonucleotide
accguggaagcuuucagag

SEQ ID NO: 3238659 - RNA, 19 nt, Artificial Sequence
  Description of Artificial Sequence: Synthetic oligonucleotide
aggaaauagcaaugcuggc

SEQ ID NO: 3238660 - RNA, 19 nt, Artificial Sequence
  Description of Artificial Sequence: Synthetic oligonucleotide
ugugcaugcuggcacaaga

SEQ ID NO: 3238661 - RNA, 19 nt, Artificial Sequence
  Description of Artificial Sequence: Synthetic oligonucleotide
aacaugcaaaguccaguug

SEQ ID NO: 3238662 - RNA, 19 nt, Artificial Sequence
  Description of Artificial Sequence: Synthetic oligonucleotide
aagagcgacauacguauaa

SEQ ID NO: 3238663 - RNA, 19 nt, Artificial Sequence
  Description of Artificial Sequence: Synthetic oligonucleotide
uuucagaggccuugagacg

SEQ ID NO: 3238664 - RNA, 19 nt, Artificial Sequence
  Description of Artificial Sequence: Synthetic oligonucleotide
ggaaauggggaucagguac

SEQ ID NO: 3238665 - RNA, 19 nt, Artificial Sequence
  Description of Artificial Sequence: Synthetic oligonucleotide
ucagguaccccucggcucc

SEQ ID NO: 3238666 - RNA, 19 nt, Artificial Sequence
  Description of Artificial Sequence: Synthetic oligonucleotide
caagacaggagucaaccac

SEQ ID NO: 3238667 - RNA, 19 nt, Artificial Sequence
  Description of Artificial Sequence: Synthetic oligonucleotide
aaauccaugcgagcugggg

SEQ ID NO: 3238668 - RNA, 19 nt, Artificial Sequence
  Description of Artificial Sequence: Synthetic oligonucleotide
gggaucuaggccuaguagg

SEQ ID NO: 3238669 - RNA, 19 nt, Artificial Sequence
  Description of Artificial Sequence: Synthetic oligonucleotide
aaauggggaucagguaccc

SEQ ID NO: 3238670 - RNA, 19 nt, Artificial Sequence
  Description of Artificial Sequence: Synthetic oligonucleotide
cuagguugcuuuugaagag

SEQ ID NO: 3238671 - RNA, 19 nt, Artificial Sequence
  Description of Artificial Sequence: Synthetic oligonucleotide
auguguagaagaguccugg

SEQ ID NO: 3238672 - RNA, 19 nt, Artificial Sequence
  Description of Artificial Sequence: Synthetic oligonucleotide
agucaaccacaucucugcc

SEQ ID NO: 3238673 - RNA, 19 nt, Artificial Sequence
  Description of Artificial Sequence: Synthetic oligonucleotide
cuggguguugcgaagcugc

SEQ ID NO: 3238674 - RNA, 19 nt, Artificial Sequence
  Description of Artificial Sequence: Synthetic oligonucleotide
cacagagacauccucuccc

SEQ ID NO: 3238675 - RNA, 19 nt, Artificial Sequence
  Description of Artificial Sequence: Synthetic oligonucleotide
auacguauaaauacagaca

SEQ ID NO: 3238676 - RNA, 19 nt, Artificial Sequence
  Description of Artificial Sequence: Synthetic oligonucleotide
cauuggggaaguguggugg

SEQ ID NO: 3238677 - RNA, 19 nt, Artificial Sequence
  Description of Artificial Sequence: Synthetic oligonucleotide
uuuuguuaaaaggggaaua

SEQ ID NO: 3238678 - RNA, 19 nt, Artificial Sequence
  Description of Artificial Sequence: Synthetic oligonucleotide
aauagcaaugcuggcagau

SEQ ID NO: 3238679 - RNA, 19 nt, Artificial Sequence
  Description of Artificial Sequence: Synthetic oligonucleotide
gcgacauacguauaaauac

SEQ ID NO: 3238680 - RNA, 19 nt, Artificial Sequence
  Description of Artificial Sequence: Synthetic oligonucleotide
caugcaaaguccaguugcc

SEQ ID NO: 3238681 - RNA, 19 nt, Artificial Sequence
  Description of Artificial Sequence: Synthetic oligonucleotide
agucaaauccaugcgagcu

SEQ ID NO: 3238682 - RNA, 19 nt, Artificial Sequence
  Description of Artificial Sequence: Synthetic oligonucleotide
uuuugguuuggaauucuuu

SEQ ID NO: 3238683 - RNA, 19 nt, Artificial Sequence
  Description of Artificial Sequence: Synthetic oligonucleotide
guguagaagaguccuggag

SEQ ID NO: 3238684 - RNA, 19 nt, Artificial Sequence
  Description of Artificial Sequence: Synthetic oligonucleotide
gaaauggggaucagguacc

SEQ ID NO: 3238685 - RNA, 19 nt, Artificial Sequence
  Description of Artificial Sequence: Synthetic oligonucleotide
cucugaaacacuccaggug

SEQ ID NO: 3238686 - RNA, 19 nt, Artificial Sequence
  Description of Artificial Sequence: Synthetic oligonucleotide
uugcuuuugaagagcgaca

SEQ ID NO: 3238687 - RNA, 19 nt, Artificial Sequence
  Description of Artificial Sequence: Synthetic oligonucleotide
gcugcagucggccagcugg

SEQ ID NO: 3238688 - RNA, 19 nt, Artificial Sequence
  Description of Artificial Sequence: Synthetic oligonucleotide
ugaggcagggcccuuggga

SEQ ID NO: 3238689 - RNA, 19 nt, Artificial Sequence
  Description of Artificial Sequence: Synthetic oligonucleotide
gacacagcuacacgcacac

SEQ ID NO: 3238690 - RNA, 19 nt, Artificial Sequence
  Description of Artificial Sequence: Synthetic oligonucleotide
uacccaagccacuuuugag

SEQ ID NO: 3238691 - RNA, 19 nt, Artificial Sequence
  Description of Artificial Sequence: Synthetic oligonucleotide
guagaagaguccuggaguc

SEQ ID NO: 3238692 - RNA, 19 nt, Artificial Sequence
  Description of Artificial Sequence: Synthetic oligonucleotide
gaagcuuucagaggccuug

SEQ ID NO: 3238693 - RNA, 19 nt, Artificial Sequence
  Description of Artificial Sequence: Synthetic oligonucleotide
uccaguugccccauaacua

SEQ ID NO: 3238694 - RNA, 19 nt, Artificial Sequence
  Description of Artificial Sequence: Synthetic oligonucleotide
agaagaguccuggagucuc

SEQ ID NO: 3238695 - RNA, 19 nt, Artificial Sequence
  Description of Artificial Sequence: Synthetic oligonucleotide
acccaagccacuuuugagu

SEQ ID NO: 3238696 - RNA, 19 nt, Artificial Sequence
  Description of Artificial Sequence: Synthetic oligonucleotide
ugcaggaaauagcaaugcu

SEQ ID NO: 3238697 - RNA, 19 nt, Artificial Sequence
  Description of Artificial Sequence: Synthetic oligonucleotide
acggacauggcgccgccgc

SEQ ID NO: 3238698 - RNA, 19 nt, Artificial Sequence
  Description of Artificial Sequence: Synthetic oligonucleotide
uuggggcucacucuaacau

SEQ ID NO: 3238699 - RNA, 19 nt, Artificial Sequence
  Description of Artificial Sequence: Synthetic oligonucleotide
aguccaguugccccauaac

SEQ ID NO: 3238700 - RNA, 19 nt, Artificial Sequence
  Description of Artificial Sequence: Synthetic oligonucleotide
ucggcuccggggaagaggc

SEQ ID NO: 3238701 - RNA, 19 nt, Artificial Sequence
  Description of Artificial Sequence: Synthetic oligonucleotide
ugcaugcuggcacaagacu

SEQ ID NO: 3238702 - RNA, 19 nt, Artificial Sequence
  Description of Artificial Sequence: Synthetic oligonucleotide
cguauaaauacagacacag

SEQ ID NO: 3238703 - RNA, 19 nt, Artificial Sequence
  Description of Artificial Sequence: Synthetic oligonucleotide
uggcauuggggaagugugg

SEQ ID NO: 3238704 - RNA, 19 nt, Artificial Sequence
  Description of Artificial Sequence: Synthetic oligonucleotide
acauggugagggcaucagg

SEQ ID NO: 3238705 - RNA, 19 nt, Artificial Sequence
  Description of Artificial Sequence: Synthetic oligonucleotide
ucucucugccuccauggca

SEQ ID NO: 3238706 - RNA, 19 nt, Artificial Sequence
  Description of Artificial Sequence: Synthetic oligonucleotide
ucacgcguccaccauuagc

SEQ ID NO: 3238707 - RNA, 19 nt, Artificial Sequence
  Description of Artificial Sequence: Synthetic oligonucleotide
guuaaaaggggaauaggaa

SEQ ID NO: 3238708 - RNA, 19 nt, Artificial Sequence
  Description of Artificial Sequence: Synthetic oligonucleotide
gagucaaauccaugcgagc

SEQ ID NO: 3238709 - RNA, 19 nt, Artificial Sequence
  Description of Artificial Sequence: Synthetic oligonucleotide
cugugaacuugcuugcgug

SEQ ID NO: 3238710 - RNA, 19 nt, Artificial Sequence
  Description of Artificial Sequence: Synthetic oligonucleotide
augcuggcagauaaggagg

SEQ ID NO: 3238711 - RNA, 19 nt, Artificial Sequence
  Description of Artificial Sequence: Synthetic oligonucleotide
aggagguggagugaggcag

SEQ ID NO: 3238712 - RNA, 19 nt, Artificial Sequence
  Description of Artificial Sequence: Synthetic oligonucleotide
uacacgcacacaugcggag

SEQ ID NO: 3238713 - RNA, 19 nt, Artificial Sequence
  Description of Artificial Sequence: Synthetic oligonucleotide
cagcuacacgcacacaugc

SEQ ID NO: 3238714 - RNA, 19 nt, Artificial Sequence
  Description of Artificial Sequence: Synthetic oligonucleotide
uguguagaagaguccugga

SEQ ID NO: 3238715 - RNA, 19 nt, Artificial Sequence
  Description of Artificial Sequence: Synthetic oligonucleotide
uggagucucccauaauccu

SEQ ID NO: 3238716 - RNA, 19 nt, Artificial Sequence
  Description of Artificial Sequence: Synthetic oligonucleotide
auaaauacagacacagcua

SEQ ID NO: 3238717 - RNA, 19 nt, Artificial Sequence
  Description of Artificial Sequence: Synthetic oligonucleotide
aacauuuuaagauuuguac

SEQ ID NO: 3238718 - RNA, 19 nt, Artificial Sequence
  Description of Artificial Sequence: Synthetic oligonucleotide
auacaaaagaucuaggcac

SEQ ID NO: 3238719 - RNA, 19 nt, Artificial Sequence
  Description of Artificial Sequence: Synthetic oligonucleotide
ucuuugaugauccuuaaag

SEQ ID NO: 3238720 - RNA, 19 nt, Artificial Sequence
  Description of Artificial Sequence: Synthetic oligonucleotide
acauuuuaagauuuguacc

SEQ ID NO: 3238721 - RNA, 19 nt, Artificial Sequence
  Description of Artificial Sequence: Synthetic oligonucleotide
aacuucuaaaaucuuugcc

SEQ ID NO: 3238722 - RNA, 19 nt, Artificial Sequence
  Description of Artificial Sequence: Synthetic oligonucleotide
uccaguaugaauuauccgg

SEQ ID NO: 3238723 - RNA, 19 nt, Artificial Sequence
  Description of Artificial Sequence: Synthetic oligonucleotide
uuuucaaaaguucuuagug

SEQ ID NO: 3238724 - RNA, 19 nt, Artificial Sequence
  Description of Artificial Sequence: Synthetic oligonucleotide
auuuguaccauuucacucc

SEQ ID NO: 3238725 - RNA, 19 nt, Artificial Sequence
  Description of Artificial Sequence: Synthetic oligonucleotide
aauacaaaagaucuaggca

SEQ ID NO: 3238726 - RNA, 19 nt, Artificial Sequence
  Description of Artificial Sequence: Synthetic oligonucleotide
aaaagaucuaggcacaucu

SEQ ID NO: 3238727 - RNA, 19 nt, Artificial Sequence
  Description of Artificial Sequence: Synthetic oligonucleotide
acacuuguggcauuaaugc

SEQ ID NO: 3238728 - RNA, 19 nt, Artificial Sequence
  Description of Artificial Sequence: Synthetic oligonucleotide
uccaauaugaacuaccaug

SEQ ID NO: 3238729 - RNA, 19 nt, Artificial Sequence
  Description of Artificial Sequence: Synthetic oligonucleotide
acugguaauagcuuuuacc

SEQ ID NO: 3238730 - RNA, 19 nt, Artificial Sequence
  Description of Artificial Sequence: Synthetic oligonucleotide
uuugauguugcuuaagacc

SEQ ID NO: 3238731 - RNA, 19 nt, Artificial Sequence
  Description of Artificial Sequence: Synthetic oligonucleotide
uguagaacuucuaaaaucu

SEQ ID NO: 3238732 - RNA, 19 nt, Artificial Sequence
  Description of Artificial Sequence: Synthetic oligonucleotide
aauaugaacuaccaugugu

SEQ ID NO: 3238733 - RNA, 19 nt, Artificial Sequence
  Description of Artificial Sequence: Synthetic oligonucleotide
uuauccgguguuuagaacg

SEQ ID NO: 3238734 - RNA, 19 nt, Artificial Sequence
  Description of Artificial Sequence: Synthetic oligonucleotide
uuucacuccaauaugaacu

SEQ ID NO: 3238735 - RNA, 19 nt, Artificial Sequence
  Description of Artificial Sequence: Synthetic oligonucleotide
uuuaaugguaucaagcagu

SEQ ID NO: 3238736 - RNA, 19 nt, Artificial Sequence
  Description of Artificial Sequence: Synthetic oligonucleotide
uagugaauacaaaagaucu

SEQ ID NO: 3238737 - RNA, 19 nt, Artificial Sequence
  Description of Artificial Sequence: Synthetic oligonucleotide
aaaaguucuuagugaauac

SEQ ID NO: 3238738 - RNA, 19 nt, Artificial Sequence
  Description of Artificial Sequence: Synthetic oligonucleotide
gaauacaaaagaucuaggc

SEQ ID NO: 3238739 - RNA, 19 nt, Artificial Sequence
  Description of Artificial Sequence: Synthetic oligonucleotide
aaugaauucuuugaugauc

SEQ ID NO: 3238740 - RNA, 19 nt, Artificial Sequence
  Description of Artificial Sequence: Synthetic oligonucleotide
aauucuuugauguugcuua

SEQ ID NO: 3238741 - RNA, 19 nt, Artificial Sequence
  Description of Artificial Sequence: Synthetic oligonucleotide
aaugguaucaagcagugua

SEQ ID NO: 3238742 - RNA, 19 nt, Artificial Sequence
  Description of Artificial Sequence: Synthetic oligonucleotide
auucuuuacaccuguaggg

SEQ ID NO: 3238743 - RNA, 19 nt, Artificial Sequence
  Description of Artificial Sequence: Synthetic oligonucleotide
cauguguugagaaauauug

SEQ ID NO: 3238744 - RNA, 19 nt, Artificial Sequence
  Description of Artificial Sequence: Synthetic oligonucleotide
ucuuagugaauacaaaaga

SEQ ID NO: 3238745 - RNA, 19 nt, Artificial Sequence
  Description of Artificial Sequence: Synthetic oligonucleotide
agaauuaucaggucuuuuc

SEQ ID NO: 3238746 - RNA, 19 nt, Artificial Sequence
  Description of Artificial Sequence: Synthetic oligonucleotide
uugauguugcuuaagacca

SEQ ID NO: 3238747 - RNA, 19 nt, Artificial Sequence
  Description of Artificial Sequence: Synthetic oligonucleotide
aauauuggaaagcuuauua

SEQ ID NO: 3238748 - RNA, 19 nt, Artificial Sequence
  Description of Artificial Sequence: Synthetic oligonucleotide
agaaugaauucuuugauga

SEQ ID NO: 3238749 - RNA, 19 nt, Artificial Sequence
  Description of Artificial Sequence: Synthetic oligonucleotide
uucuuagugaauacaaaag

SEQ ID NO: 3238750 - RNA, 19 nt, Artificial Sequence
  Description of Artificial Sequence: Synthetic oligonucleotide
uuggaaagcuuauuaaagg

SEQ ID NO: 3238751 - RNA, 19 nt, Artificial Sequence
  Description of Artificial Sequence: Synthetic oligonucleotide
uggaaagcuuauuaaaggg

SEQ ID NO: 3238752 - RNA, 19 nt, Artificial Sequence
  Description of Artificial Sequence: Synthetic oligonucleotide
acuuguaacguuucucucc

SEQ ID NO: 3238753 - RNA, 19 nt, Artificial Sequence
  Description of Artificial Sequence: Synthetic oligonucleotide
uaagauuuguaccauuuca

SEQ ID NO: 3238754 - RNA, 19 nt, Artificial Sequence
  Description of Artificial Sequence: Synthetic oligonucleotide
acacuauucacacuugugg

SEQ ID NO: 3238755 - RNA, 19 nt, Artificial Sequence
  Description of Artificial Sequence: Synthetic oligonucleotide
aagaucuaggcacaucuuc

SEQ ID NO: 3238756 - RNA, 19 nt, Artificial Sequence
  Description of Artificial Sequence: Synthetic oligonucleotide
uucaugaacauuuuaagau

SEQ ID NO: 3238757 - RNA, 19 nt, Artificial Sequence
  Description of Artificial Sequence: Synthetic oligonucleotide
uuuuaaugguaucaagcag

SEQ ID NO: 3238758 - RNA, 19 nt, Artificial Sequence
  Description of Artificial Sequence: Synthetic oligonucleotide
uuauuaaaggguuuguaac

SEQ ID NO: 3238759 - RNA, 19 nt, Artificial Sequence
  Description of Artificial Sequence: Synthetic oligonucleotide
uguaacacuauucacacuu

SEQ ID NO: 3238760 - RNA, 19 nt, Artificial Sequence
  Description of Artificial Sequence: Synthetic oligonucleotide
aaugaauucuuugauguug

SEQ ID NO: 3238761 - RNA, 19 nt, Artificial Sequence
  Description of Artificial Sequence: Synthetic oligonucleotide
acuucuaaaaucuuugcca

SEQ ID NO: 3238762 - RNA, 19 nt, Artificial Sequence
  Description of Artificial Sequence: Synthetic oligonucleotide
auuucaugaacauuuuaag

SEQ ID NO: 3238763 - RNA, 19 nt, Artificial Sequence
  Description of Artificial Sequence: Synthetic oligonucleotide
aguaagaauuaucaggucu

SEQ ID NO: 3238764 - RNA, 19 nt, Artificial Sequence
  Description of Artificial Sequence: Synthetic oligonucleotide
uuuguaacacuauucacac

SEQ ID NO: 3238765 - RNA, 19 nt, Artificial Sequence
  Description of Artificial Sequence: Synthetic oligonucleotide
uuagugaauacaaaagauc

SEQ ID NO: 3238766 - RNA, 19 nt, Artificial Sequence
  Description of Artificial Sequence: Synthetic oligonucleotide
aauagcuuuuaccacauuu

SEQ ID NO: 3238767 - RNA, 19 nt, Artificial Sequence
  Description of Artificial Sequence: Synthetic oligonucleotide
uguguugagaaauauugga

SEQ ID NO: 3238768 - RNA, 19 nt, Artificial Sequence
  Description of Artificial Sequence: Synthetic oligonucleotide
augaauucuuugaugaucc

SEQ ID NO: 3238769 - RNA, 19 nt, Artificial Sequence
  Description of Artificial Sequence: Synthetic oligonucleotide
uauuaaaggguuuguaaca

SEQ ID NO: 3238770 - RNA, 19 nt, Artificial Sequence
  Description of Artificial Sequence: Synthetic oligonucleotide
ugaauacaaaagaucuagg

SEQ ID NO: 3238771 - RNA, 19 nt, Artificial Sequence
  Description of Artificial Sequence: Synthetic oligonucleotide
aagauuuguaccauuucac

SEQ ID NO: 3238772 - RNA, 19 nt, Artificial Sequence
  Description of Artificial Sequence: Synthetic oligonucleotide
uguaaacauuucaugaaca

SEQ ID NO: 3238773 - RNA, 19 nt, Artificial Sequence
  Description of Artificial Sequence: Synthetic oligonucleotide
uuucaugaacauuuuaaga

SEQ ID NO: 3238774 - RNA, 19 nt, Artificial Sequence
  Description of Artificial Sequence: Synthetic oligonucleotide
uuucaaaaguucuuaguga

SEQ ID NO: 3238775 - RNA, 19 nt, Artificial Sequence
  Description of Artificial Sequence: Synthetic oligonucleotide
ucuccaguaugaauuaucc

SEQ ID NO: 3238776 - RNA, 19 nt, Artificial Sequence
  Description of Artificial Sequence: Synthetic oligonucleotide
aaacauuucaugaacauuu

SEQ ID NO: 3238777 - RNA, 19 nt, Artificial Sequence
  Description of Artificial Sequence: Synthetic oligonucleotide
ugugguuucucucacaaau

SEQ ID NO: 3238778 - RNA, 19 nt, Artificial Sequence
  Description of Artificial Sequence: Synthetic oligonucleotide
cuuaagaccagaagacugg

SEQ ID NO: 3238779 - RNA, 19 nt, Artificial Sequence
  Description of Artificial Sequence: Synthetic oligonucleotide
guugcuuaagaccagaaga

SEQ ID NO: 3238780 - RNA, 19 nt, Artificial Sequence
  Description of Artificial Sequence: Synthetic oligonucleotide
guugagaaauauuggaaag

SEQ ID NO: 3238781 - RNA, 19 nt, Artificial Sequence
  Description of Artificial Sequence: Synthetic oligonucleotide
ucacaaaugaauucuuuga

SEQ ID NO: 3238782 - RNA, 19 nt, Artificial Sequence
  Description of Artificial Sequence: Synthetic oligonucleotide
auuucacuccaauaugaac

SEQ ID NO: 3238783 - RNA, 19 nt, Artificial Sequence
  Description of Artificial Sequence: Synthetic oligonucleotide
uaaaaucuuugccacauuc

SEQ ID NO: 3238784 - RNA, 19 nt, Artificial Sequence
  Description of Artificial Sequence: Synthetic oligonucleotide
cauucuuuacaccuguagg

SEQ ID NO: 3238785 - RNA, 19 nt, Artificial Sequence
  Description of Artificial Sequence: Synthetic oligonucleotide
aagaccagaagacugguaa

SEQ ID NO: 3238786 - RNA, 19 nt, Artificial Sequence
  Description of Artificial Sequence: Synthetic oligonucleotide
uuaaugcccaguaagaauu

SEQ ID NO: 3238787 - RNA, 19 nt, Artificial Sequence
  Description of Artificial Sequence: Synthetic oligonucleotide
uuugccacauucuuuacac

SEQ ID NO: 3238788 - RNA, 19 nt, Artificial Sequence
  Description of Artificial Sequence: Synthetic oligonucleotide
uguugagaaauauuggaaa

SEQ ID NO: 3238789 - RNA, 19 nt, Artificial Sequence
  Description of Artificial Sequence: Synthetic oligonucleotide
acuuguggcauuaaugccc

SEQ ID NO: 3238790 - RNA, 19 nt, Artificial Sequence
  Description of Artificial Sequence: Synthetic oligonucleotide
ugaacuaccauguguugag

SEQ ID NO: 3238791 - RNA, 19 nt, Artificial Sequence
  Description of Artificial Sequence: Synthetic oligonucleotide
ugcccaguaagaauuauca

SEQ ID NO: 3238792 - RNA, 19 nt, Artificial Sequence
  Description of Artificial Sequence: Synthetic oligonucleotide
ucuuugauguugcuuaaga

SEQ ID NO: 3238793 - RNA, 19 nt, Artificial Sequence
  Description of Artificial Sequence: Synthetic oligonucleotide
auuaaaggguuuguaacac

SEQ ID NO: 3238794 - RNA, 19 nt, Artificial Sequence
  Description of Artificial Sequence: Synthetic oligonucleotide
gugaauacaaaagaucuag

SEQ ID NO: 3238795 - RNA, 19 nt, Artificial Sequence
  Description of Artificial Sequence: Synthetic oligonucleotide
uccagaaugaauucuuuga

SEQ ID NO: 3238796 - RNA, 19 nt, Artificial Sequence
  Description of Artificial Sequence: Synthetic oligonucleotide
acaaaugaauucuuugaug

SEQ ID NO: 3238797 - RNA, 19 nt, Artificial Sequence
  Description of Artificial Sequence: Synthetic oligonucleotide
uuucucuccaguaugaauu

SEQ ID NO: 3238798 - RNA, 19 nt, Artificial Sequence
  Description of Artificial Sequence: Synthetic oligonucleotide
uuaaugguaucaagcagug

SEQ ID NO: 3238799 - RNA, 19 nt, Artificial Sequence
  Description of Artificial Sequence: Synthetic oligonucleotide
uucaaaaguucuuagugaa

SEQ ID NO: 3238800 - RNA, 19 nt, Artificial Sequence
  Description of Artificial Sequence: Synthetic oligonucleotide
ucuuuucaaaaguucuuag

SEQ ID NO: 3238801 - RNA, 19 nt, Artificial Sequence
  Description of Artificial Sequence: Synthetic oligonucleotide
cauuuuaagauuuguacca

SEQ ID NO: 3238802 - RNA, 19 nt, Artificial Sequence
  Description of Artificial Sequence: Synthetic oligonucleotide
uuugaugauccuuaaaguu

SEQ ID NO: 3238803 - RNA, 19 nt, Artificial Sequence
  Description of Artificial Sequence: Synthetic oligonucleotide
uauuggaaagcuuauuaaa

SEQ ID NO: 3238804 - RNA, 19 nt, Artificial Sequence
  Description of Artificial Sequence: Synthetic oligonucleotide
uuuaagauuuguaccauuu

SEQ ID NO: 3238805 - RNA, 19 nt, Artificial Sequence
  Description of Artificial Sequence: Synthetic oligonucleotide
aacguuucucuccaguaug

SEQ ID NO: 3238806 - RNA, 19 nt, Artificial Sequence
  Description of Artificial Sequence: Synthetic oligonucleotide
uaccauuucacuccaauau

SEQ ID NO: 3238807 - RNA, 19 nt, Artificial Sequence
  Description of Artificial Sequence: Synthetic oligonucleotide
aauuauccgguguuuagaa

SEQ ID NO: 3238808 - RNA, 19 nt, Artificial Sequence
  Description of Artificial Sequence: Synthetic oligonucleotide
ugagaaauauuggaaagcu

SEQ ID NO: 3238809 - RNA, 19 nt, Artificial Sequence
  Description of Artificial Sequence: Synthetic oligonucleotide
uuucucuccagaaugaauu

SEQ ID NO: 3238810 - RNA, 19 nt, Artificial Sequence
  Description of Artificial Sequence: Synthetic oligonucleotide
uagaacgugcuguagaacu

SEQ ID NO: 3238811 - RNA, 19 nt, Artificial Sequence
  Description of Artificial Sequence: Synthetic oligonucleotide
uugcuuaagaccagaagac

SEQ ID NO: 3238812 - RNA, 19 nt, Artificial Sequence
  Description of Artificial Sequence: Synthetic oligonucleotide
uguugcuuaagaccagaag

SEQ ID NO: 3238813 - RNA, 19 nt, Artificial Sequence
  Description of Artificial Sequence: Synthetic oligonucleotide
cuucuaaaaucuuugccac

SEQ ID NO: 3238814 - RNA, 19 nt, Artificial Sequence
  Description of Artificial Sequence: Synthetic oligonucleotide
ugaauuauccgguguuuag

SEQ ID NO: 3238815 - RNA, 19 nt, Artificial Sequence
  Description of Artificial Sequence: Synthetic oligonucleotide
gauuuguaccauuucacuc

SEQ ID NO: 3238816 - RNA, 19 nt, Artificial Sequence
  Description of Artificial Sequence: Synthetic oligonucleotide
aaaucuuugccacauucuu

SEQ ID NO: 3238817 - RNA, 19 nt, Artificial Sequence
  Description of Artificial Sequence: Synthetic oligonucleotide
uuuaaaacugaccuaaagg

SEQ ID NO: 3238818 - RNA, 19 nt, Artificial Sequence
  Description of Artificial Sequence: Synthetic oligonucleotide
aauugaaucaucuaugaga

SEQ ID NO: 3238819 - RNA, 19 nt, Artificial Sequence
  Description of Artificial Sequence: Synthetic oligonucleotide
uuuaugaugggugagauag

SEQ ID NO: 3238820 - RNA, 19 nt, Artificial Sequence
  Description of Artificial Sequence: Synthetic oligonucleotide
aauaagacgaccgaugcac

SEQ ID NO: 3238821 - RNA, 19 nt, Artificial Sequence
  Description of Artificial Sequence: Synthetic oligonucleotide
uuaauaaauacuauauuuc

SEQ ID NO: 3238822 - RNA, 19 nt, Artificial Sequence
  Description of Artificial Sequence: Synthetic oligonucleotide
ucucaaaagcuuauaaagg

SEQ ID NO: 3238823 - RNA, 19 nt, Artificial Sequence
  Description of Artificial Sequence: Synthetic oligonucleotide
aacacaugagacuguauac

SEQ ID NO: 3238824 - RNA, 19 nt, Artificial Sequence
  Description of Artificial Sequence: Synthetic oligonucleotide
augauagcaauuuauuaac

SEQ ID NO: 3238825 - RNA, 19 nt, Artificial Sequence
  Description of Artificial Sequence: Synthetic oligonucleotide
uacgguguaaaccauuugg

SEQ ID NO: 3238826 - RNA, 19 nt, Artificial Sequence
  Description of Artificial Sequence: Synthetic oligonucleotide
aaccgugcuaaccaagucc

SEQ ID NO: 3238827 - RNA, 19 nt, Artificial Sequence
  Description of Artificial Sequence: Synthetic oligonucleotide
auuuuauugguggugaagc

SEQ ID NO: 3238828 - RNA, 19 nt, Artificial Sequence
  Description of Artificial Sequence: Synthetic oligonucleotide
ucaaauucuggcuuauugg

SEQ ID NO: 3238829 - RNA, 19 nt, Artificial Sequence
  Description of Artificial Sequence: Synthetic oligonucleotide
acgauuuccguauggaucc

SEQ ID NO: 3238830 - RNA, 19 nt, Artificial Sequence
  Description of Artificial Sequence: Synthetic oligonucleotide
auaaaugacgucccugugc

SEQ ID NO: 3238831 - RNA, 19 nt, Artificial Sequence
  Description of Artificial Sequence: Synthetic oligonucleotide
aauuuauuaaccucagaaa

SEQ ID NO: 3238832 - RNA, 19 nt, Artificial Sequence
  Description of Artificial Sequence: Synthetic oligonucleotide
uuuuaaaacugaccuaaag

SEQ ID NO: 3238833 - RNA, 19 nt, Artificial Sequence
  Description of Artificial Sequence: Synthetic oligonucleotide
auuuauuaaccucagaaau

SEQ ID NO: 3238834 - RNA, 19 nt, Artificial Sequence
  Description of Artificial Sequence: Synthetic oligonucleotide
aguuccacaggauacugcc

SEQ ID NO: 3238835 - RNA, 19 nt, Artificial Sequence
  Description of Artificial Sequence: Synthetic oligonucleotide
gagacuguauaccaaaugc

SEQ ID NO: 3238836 - RNA, 19 nt, Artificial Sequence
  Description of Artificial Sequence: Synthetic oligonucleotide
uguucugacaccaugucug

SEQ ID NO: 3238837 - RNA, 19 nt, Artificial Sequence
  Description of Artificial Sequence: Synthetic oligonucleotide
auggggaauaucuugcacc

SEQ ID NO: 3238838 - RNA, 19 nt, Artificial Sequence
  Description of Artificial Sequence: Synthetic oligonucleotide
auuauguaacacaugagac

SEQ ID NO: 3238839 - RNA, 19 nt, Artificial Sequence
  Description of Artificial Sequence: Synthetic oligonucleotide
uauauuucuaaauggugug

SEQ ID NO: 3238840 - RNA, 19 nt, Artificial Sequence
  Description of Artificial Sequence: Synthetic oligonucleotide
aaagguauacauacauagc

SEQ ID NO: 3238841 - RNA, 19 nt, Artificial Sequence
  Description of Artificial Sequence: Synthetic oligonucleotide
ucuacuuuauaccaaccga

SEQ ID NO: 3238842 - RNA, 19 nt, Artificial Sequence
  Description of Artificial Sequence: Synthetic oligonucleotide
ugucaugguucaaugauag

SEQ ID NO: 3238843 - RNA, 19 nt, Artificial Sequence
  Description of Artificial Sequence: Synthetic oligonucleotide
aaugugcaccucuuuugcc

SEQ ID NO: 3238844 - RNA, 19 nt, Artificial Sequence
  Description of Artificial Sequence: Synthetic oligonucleotide
aaccauuuggucuucaaau

SEQ ID NO: 3238845 - RNA, 19 nt, Artificial Sequence
  Description of Artificial Sequence: Synthetic oligonucleotide
ugucuuaaccucauguuug

SEQ ID NO: 3238846 - RNA, 19 nt, Artificial Sequence
  Description of Artificial Sequence: Synthetic oligonucleotide
uauaacacuguuugcuccg

SEQ ID NO: 3238847 - RNA, 19 nt, Artificial Sequence
  Description of Artificial Sequence: Synthetic oligonucleotide
ucaugguucaaugauagca

SEQ ID NO: 3238848 - RNA, 19 nt, Artificial Sequence
  Description of Artificial Sequence: Synthetic oligonucleotide
aaauauacuaucuggucuu

SEQ ID NO: 3238849 - RNA, 19 nt, Artificial Sequence
  Description of Artificial Sequence: Synthetic oligonucleotide
caaauucuggcuuauuggc

SEQ ID NO: 3238850 - RNA, 19 nt, Artificial Sequence
  Description of Artificial Sequence: Synthetic oligonucleotide
gauauuuucuacaauuuuc

SEQ ID NO: 3238851 - RNA, 19 nt, Artificial Sequence
  Description of Artificial Sequence: Synthetic oligonucleotide
gaauaauuucaauuaauaa

SEQ ID NO: 3238852 - RNA, 19 nt, Artificial Sequence
  Description of Artificial Sequence: Synthetic oligonucleotide
aauuugaucucuuguugca

SEQ ID NO: 3238853 - RNA, 19 nt, Artificial Sequence
  Description of Artificial Sequence: Synthetic oligonucleotide
uuauuaaccucagaaauuc

SEQ ID NO: 3238854 - RNA, 19 nt, Artificial Sequence
  Description of Artificial Sequence: Synthetic oligonucleotide
aaagucaaauuagagauuu

SEQ ID NO: 3238855 - RNA, 19 nt, Artificial Sequence
  Description of Artificial Sequence: Synthetic oligonucleotide
uaauggguaauacauuuaa

SEQ ID NO: 3238856 - RNA, 19 nt, Artificial Sequence
  Description of Artificial Sequence: Synthetic oligonucleotide
uaaaccugcgucauuaaaa

SEQ ID NO: 3238857 - RNA, 19 nt, Artificial Sequence
  Description of Artificial Sequence: Synthetic oligonucleotide
uucuaaaugguguggaaac

SEQ ID NO: 3238858 - RNA, 19 nt, Artificial Sequence
  Description of Artificial Sequence: Synthetic oligonucleotide
uggugaagcaacucgaaug

SEQ ID NO: 3238859 - RNA, 19 nt, Artificial Sequence
  Description of Artificial Sequence: Synthetic oligonucleotide
acugacaaguauauaacac

SEQ ID NO: 3238860 - RNA, 19 nt, Artificial Sequence
  Description of Artificial Sequence: Synthetic oligonucleotide
uucuacaauuuucuccagg

SEQ ID NO: 3238861 - RNA, 19 nt, Artificial Sequence
  Description of Artificial Sequence: Synthetic oligonucleotide
guaucaaguguucugacac

SEQ ID NO: 3238862 - RNA, 19 nt, Artificial Sequence
  Description of Artificial Sequence: Synthetic oligonucleotide
ucuggaaccgugcuaacca

SEQ ID NO: 3238863 - RNA, 19 nt, Artificial Sequence
  Description of Artificial Sequence: Synthetic oligonucleotide
uuuauuaaccucagaaauu

SEQ ID NO: 3238864 - RNA, 19 nt, Artificial Sequence
  Description of Artificial Sequence: Synthetic oligonucleotide
cuguauaccaaaugcagac

SEQ ID NO: 3238865 - RNA, 19 nt, Artificial Sequence
  Description of Artificial Sequence: Synthetic oligonucleotide
ugaaccacuaccauucuau

SEQ ID NO: 3238866 - RNA, 19 nt, Artificial Sequence
  Description of Artificial Sequence: Synthetic oligonucleotide
cuuggaauuguaucaagug

SEQ ID NO: 3238867 - RNA, 19 nt, Artificial Sequence
  Description of Artificial Sequence: Synthetic oligonucleotide
uauaccaaccgaguaacag

SEQ ID NO: 3238868 - RNA, 19 nt, Artificial Sequence
  Description of Artificial Sequence: Synthetic oligonucleotide
uauggaaaccacuucugug

SEQ ID NO: 3238869 - RNA, 19 nt, Artificial Sequence
  Description of Artificial Sequence: Synthetic oligonucleotide
uaccuuacgguguaaacca

SEQ ID NO: 3238870 - RNA, 19 nt, Artificial Sequence
  Description of Artificial Sequence: Synthetic oligonucleotide
uaccaauccaguuccacag

SEQ ID NO: 3238871 - RNA, 19 nt, Artificial Sequence
  Description of Artificial Sequence: Synthetic oligonucleotide
acaauugaaucaucuauga

SEQ ID NO: 3238872 - RNA, 19 nt, Artificial Sequence
  Description of Artificial Sequence: Synthetic oligonucleotide
uaacacaugagacuguaua

SEQ ID NO: 3238873 - RNA, 19 nt, Artificial Sequence
  Description of Artificial Sequence: Synthetic oligonucleotide
acacaugagacuguauacc

SEQ ID NO: 3238874 - RNA, 19 nt, Artificial Sequence
  Description of Artificial Sequence: Synthetic oligonucleotide
gauucagaagacacgaccc

SEQ ID NO: 3238875 - RNA, 19 nt, Artificial Sequence
  Description of Artificial Sequence: Synthetic oligonucleotide
aaaccugcgucauuaaaau

SEQ ID NO: 3238876 - RNA, 19 nt, Artificial Sequence
  Description of Artificial Sequence: Synthetic oligonucleotide
uucaauuaauaaauacuau

SEQ ID NO: 3238877 - RNA, 19 nt, Artificial Sequence
  Description of Artificial Sequence: Synthetic oligonucleotide
gauaguauugccucucaca

SEQ ID NO: 3238878 - RNA, 19 nt, Artificial Sequence
  Description of Artificial Sequence: Synthetic oligonucleotide
ugaagcaaggauauuuuau

SEQ ID NO: 3238879 - RNA, 19 nt, Artificial Sequence
  Description of Artificial Sequence: Synthetic oligonucleotide
cacaauugaaucaucuaug

SEQ ID NO: 3238880 - RNA, 19 nt, Artificial Sequence
  Description of Artificial Sequence: Synthetic oligonucleotide
uauacuaucuggucuugca

SEQ ID NO: 3238881 - RNA, 19 nt, Artificial Sequence
  Description of Artificial Sequence: Synthetic oligonucleotide
aguccucuaaaccugcguc

SEQ ID NO: 3238882 - RNA, 19 nt, Artificial Sequence
  Description of Artificial Sequence: Synthetic oligonucleotide
auaguauugccucucacaa

SEQ ID NO: 3238883 - RNA, 19 nt, Artificial Sequence
  Description of Artificial Sequence: Synthetic oligonucleotide
uuuaaaguugucagacaac

SEQ ID NO: 3238884 - RNA, 19 nt, Artificial Sequence
  Description of Artificial Sequence: Synthetic oligonucleotide
auacauagcaggugguauc

SEQ ID NO: 3238885 - RNA, 19 nt, Artificial Sequence
  Description of Artificial Sequence: Synthetic oligonucleotide
ugucagacaacacaccaaa

SEQ ID NO: 3238886 - RNA, 19 nt, Artificial Sequence
  Description of Artificial Sequence: Synthetic oligonucleotide
aguauugccucucacaauu

SEQ ID NO: 3238887 - RNA, 19 nt, Artificial Sequence
  Description of Artificial Sequence: Synthetic oligonucleotide
agauguucaaauucuggcu

SEQ ID NO: 3238888 - RNA, 19 nt, Artificial Sequence
  Description of Artificial Sequence: Synthetic oligonucleotide
uaaaaucugucaugguuca

SEQ ID NO: 3238889 - RNA, 19 nt, Artificial Sequence
  Description of Artificial Sequence: Synthetic oligonucleotide
uuuaacauaagaggcuaca

SEQ ID NO: 3238890 - RNA, 19 nt, Artificial Sequence
  Description of Artificial Sequence: Synthetic oligonucleotide
agugaggcaagcuguacag

SEQ ID NO: 3238891 - RNA, 19 nt, Artificial Sequence
  Description of Artificial Sequence: Synthetic oligonucleotide
caaacaggaguuaguaagc

SEQ ID NO: 3238892 - RNA, 19 nt, Artificial Sequence
  Description of Artificial Sequence: Synthetic oligonucleotide
uauuuuauugguggugaag

SEQ ID NO: 3238893 - RNA, 19 nt, Artificial Sequence
  Description of Artificial Sequence: Synthetic oligonucleotide
ucccugugcauuauaagca

SEQ ID NO: 3238894 - RNA, 19 nt, Artificial Sequence
  Description of Artificial Sequence: Synthetic oligonucleotide
gaaugugcaccucuuuugc

SEQ ID NO: 3238895 - RNA, 19 nt, Artificial Sequence
  Description of Artificial Sequence: Synthetic oligonucleotide
agaccuuggaauuguauca

SEQ ID NO: 3238896 - RNA, 19 nt, Artificial Sequence
  Description of Artificial Sequence: Synthetic oligonucleotide
aguaacaguauggaaacca

SEQ ID NO: 3238897 - RNA, 19 nt, Artificial Sequence
  Description of Artificial Sequence: Synthetic oligonucleotide
uuuuaguaccuucccugag

SEQ ID NO: 3238898 - RNA, 19 nt, Artificial Sequence
  Description of Artificial Sequence: Synthetic oligonucleotide
cacacuuagcugcauaccc

SEQ ID NO: 3238899 - RNA, 19 nt, Artificial Sequence
  Description of Artificial Sequence: Synthetic oligonucleotide
augggugagauaguauugc

SEQ ID NO: 3238900 - RNA, 19 nt, Artificial Sequence
  Description of Artificial Sequence: Synthetic oligonucleotide
aguccuuccacugacaagu

SEQ ID NO: 3238901 - RNA, 19 nt, Artificial Sequence
  Description of Artificial Sequence: Synthetic oligonucleotide
auauuucuaaauggugugg

SEQ ID NO: 3238902 - RNA, 19 nt, Artificial Sequence
  Description of Artificial Sequence: Synthetic oligonucleotide
gucccugugcauuauaagc

SEQ ID NO: 3238903 - RNA, 19 nt, Artificial Sequence
  Description of Artificial Sequence: Synthetic oligonucleotide
ugcgucauuaaaaucuguc

SEQ ID NO: 3238904 - RNA, 19 nt, Artificial Sequence
  Description of Artificial Sequence: Synthetic oligonucleotide
aacucgaaugugcaccucu

SEQ ID NO: 3238905 - RNA, 19 nt, Artificial Sequence
  Description of Artificial Sequence: Synthetic oligonucleotide
uuugcuccgagguauucug

SEQ ID NO: 3238906 - RNA, 19 nt, Artificial Sequence
  Description of Artificial Sequence: Synthetic oligonucleotide
accucaguccucuaaaccu

SEQ ID NO: 3238907 - RNA, 19 nt, Artificial Sequence
  Description of Artificial Sequence: Synthetic oligonucleotide
uaaggccauuuuaaaacug

SEQ ID NO: 3238908 - RNA, 19 nt, Artificial Sequence
  Description of Artificial Sequence: Synthetic oligonucleotide
agauaguauugccucucac

SEQ ID NO: 3238909 - RNA, 19 nt, Artificial Sequence
  Description of Artificial Sequence: Synthetic oligonucleotide
cauucuaucuugaccugcc

SEQ ID NO: 3238910 - RNA, 19 nt, Artificial Sequence
  Description of Artificial Sequence: Synthetic oligonucleotide
aacuaaacacaaaagucaa

SEQ ID NO: 3238911 - RNA, 19 nt, Artificial Sequence
  Description of Artificial Sequence: Synthetic oligonucleotide
cuuuaaaguugucagacaa

SEQ ID NO: 3238912 - RNA, 19 nt, Artificial Sequence
  Description of Artificial Sequence: Synthetic oligonucleotide
ugaaauggccccagggcug

SEQ ID NO: 3238913 - RNA, 19 nt, Artificial Sequence
  Description of Artificial Sequence: Synthetic oligonucleotide
uggggaauaucuugcacca

SEQ ID NO: 3238914 - RNA, 19 nt, Artificial Sequence
  Description of Artificial Sequence: Synthetic oligonucleotide
uugucuuaaccucauguuu

SEQ ID NO: 3238915 - RNA, 19 nt, Artificial Sequence
  Description of Artificial Sequence: Synthetic oligonucleotide
aaccugcgucauuaaaauc

SEQ ID NO: 3238916 - RNA, 19 nt, Artificial Sequence
  Description of Artificial Sequence: Synthetic oligonucleotide
cuauauuucuaaauggugu

SEQ ID NO: 3238917 - RNA, 19 nt, Artificial Sequence
  Description of Artificial Sequence: Synthetic oligonucleotide
agcucgaugacguucagcg

SEQ ID NO: 3238918 - RNA, 19 nt, Artificial Sequence
  Description of Artificial Sequence: Synthetic oligonucleotide
ugcacauugagcucgauga

SEQ ID NO: 3238919 - RNA, 19 nt, Artificial Sequence
  Description of Artificial Sequence: Synthetic oligonucleotide
gaauacgucccacuuaccc

SEQ ID NO: 3238920 - RNA, 19 nt, Artificial Sequence
  Description of Artificial Sequence: Synthetic oligonucleotide
aauacgucccacuuacccu

SEQ ID NO: 3238921 - RNA, 19 nt, Artificial Sequence
  Description of Artificial Sequence: Synthetic oligonucleotide
gagaauacgucccacuuac

SEQ ID NO: 3238922 - RNA, 19 nt, Artificial Sequence
  Description of Artificial Sequence: Synthetic oligonucleotide
ugcuucuccaccaggacag

SEQ ID NO: 3238923 - RNA, 19 nt, Artificial Sequence
  Description of Artificial Sequence: Synthetic oligonucleotide
gaagagcucgugcacaucc

SEQ ID NO: 3238924 - RNA, 19 nt, Artificial Sequence
  Description of Artificial Sequence: Synthetic oligonucleotide
ucucguugagugcagcccg

SEQ ID NO: 3238925 - RNA, 19 nt, Artificial Sequence
  Description of Artificial Sequence: Synthetic oligonucleotide
ugcaagaagagcucgugca

SEQ ID NO: 3238926 - RNA, 19 nt, Artificial Sequence
  Description of Artificial Sequence: Synthetic oligonucleotide
cucucgaucucguugagug

SEQ ID NO: 3238927 - RNA, 19 nt, Artificial Sequence
  Description of Artificial Sequence: Synthetic oligonucleotide
augacguucagcguguccg

SEQ ID NO: 3238928 - RNA, 19 nt, Artificial Sequence
  Description of Artificial Sequence: Synthetic oligonucleotide
gaugcgacccuccagccgc

SEQ ID NO: 3238929 - RNA, 19 nt, Artificial Sequence
  Description of Artificial Sequence: Synthetic oligonucleotide
cuucacgucggccagcagg

SEQ ID NO: 3238930 - RNA, 19 nt, Artificial Sequence
  Description of Artificial Sequence: Synthetic oligonucleotide
uucucggagaauacguccc

SEQ ID NO: 3238931 - RNA, 19 nt, Artificial Sequence
  Description of Artificial Sequence: Synthetic oligonucleotide
guugagugcagcccgugcg

SEQ ID NO: 3238932 - RNA, 19 nt, Artificial Sequence
  Description of Artificial Sequence: Synthetic oligonucleotide
acagccaucugcaagaaga

SEQ ID NO: 3238933 - RNA, 19 nt, Artificial Sequence
  Description of Artificial Sequence: Synthetic oligonucleotide
uuacccugcucgaacaugu

SEQ ID NO: 3238934 - RNA, 19 nt, Artificial Sequence
  Description of Artificial Sequence: Synthetic oligonucleotide
cucgaugacguucagcgug

SEQ ID NO: 3238935 - RNA, 19 nt, Artificial Sequence
  Description of Artificial Sequence: Synthetic oligonucleotide
auugagcucgaugacguuc

SEQ ID NO: 3238936 - RNA, 19 nt, Artificial Sequence
  Description of Artificial Sequence: Synthetic oligonucleotide
ucacccguguagucgaggg

SEQ ID NO: 3238937 - RNA, 19 nt, Artificial Sequence
  Description of Artificial Sequence: Synthetic oligonucleotide
uugagcucgaugacguuca

SEQ ID NO: 3238938 - RNA, 19 nt, Artificial Sequence
  Description of Artificial Sequence: Synthetic oligonucleotide
auacgucccacuuacccug

SEQ ID NO: 3238939 - RNA, 19 nt, Artificial Sequence
  Description of Artificial Sequence: Synthetic oligonucleotide
guucucggagaauacgucc

SEQ ID NO: 3238940 - RNA, 19 nt, Artificial Sequence
  Description of Artificial Sequence: Synthetic oligonucleotide
ucgugcacaucccggaugc

SEQ ID NO: 3238941 - RNA, 19 nt, Artificial Sequence
  Description of Artificial Sequence: Synthetic oligonucleotide
acccugcucgaacaugucc

SEQ ID NO: 3238942 - RNA, 19 nt, Artificial Sequence
  Description of Artificial Sequence: Synthetic oligonucleotide
cuucugcacauugagcucg

SEQ ID NO: 3238943 - RNA, 19 nt, Artificial Sequence
  Description of Artificial Sequence: Synthetic oligonucleotide
aucucguugagugcagccc

SEQ ID NO: 3238944 - RNA, 19 nt, Artificial Sequence
  Description of Artificial Sequence: Synthetic oligonucleotide
aggacagccaucugcaaga

SEQ ID NO: 3238945 - RNA, 19 nt, Artificial Sequence
  Description of Artificial Sequence: Synthetic oligonucleotide
gucccacuuacccugcucg

SEQ ID NO: 3238946 - RNA, 19 nt, Artificial Sequence
  Description of Artificial Sequence: Synthetic oligonucleotide
ucggcucucgaucucguug

SEQ ID NO: 3238947 - RNA, 19 nt, Artificial Sequence
  Description of Artificial Sequence: Synthetic oligonucleotide
ucggccagcagguucucgg

SEQ ID NO: 3238948 - RNA, 19 nt, Artificial Sequence
  Description of Artificial Sequence: Synthetic oligonucleotide
uucacgucggccagcaggu

SEQ ID NO: 3238949 - RNA, 19 nt, Artificial Sequence
  Description of Artificial Sequence: Synthetic oligonucleotide
cacauugagcucgaugacg

SEQ ID NO: 3238950 - RNA, 19 nt, Artificial Sequence
  Description of Artificial Sequence: Synthetic oligonucleotide
aagaagagcucgugcacau

SEQ ID NO: 3238951 - RNA, 19 nt, Artificial Sequence
  Description of Artificial Sequence: Synthetic oligonucleotide
gaucucguugagugcagcc

SEQ ID NO: 3238952 - RNA, 19 nt, Artificial Sequence
  Description of Artificial Sequence: Synthetic oligonucleotide
agagcucgugcacaucccg

SEQ ID NO: 3238953 - RNA, 19 nt, Artificial Sequence
  Description of Artificial Sequence: Synthetic oligonucleotide
uagucgagggucuucugca

SEQ ID NO: 3238954 - RNA, 19 nt, Artificial Sequence
  Description of Artificial Sequence: Synthetic oligonucleotide
gucuucugcacauugagcu

SEQ ID NO: 3238955 - RNA, 19 nt, Artificial Sequence
  Description of Artificial Sequence: Synthetic oligonucleotide
guagucgagggucuucugc

SEQ ID NO: 3238956 - RNA, 19 nt, Artificial Sequence
  Description of Artificial Sequence: Synthetic oligonucleotide
uucuccaccaggacagcca

SEQ ID NO: 3238957 - RNA, 19 nt, Artificial Sequence
  Description of Artificial Sequence: Synthetic oligonucleotide
uugagugcagcccgugcgc

SEQ ID NO: 3238958 - RNA, 19 nt, Artificial Sequence
  Description of Artificial Sequence: Synthetic oligonucleotide
uccaccaggacagccaucu

SEQ ID NO: 3238959 - RNA, 19 nt, Artificial Sequence
  Description of Artificial Sequence: Synthetic oligonucleotide
aagagcucgugcacauccc

SEQ ID NO: 3238960 - RNA, 19 nt, Artificial Sequence
  Description of Artificial Sequence: Synthetic oligonucleotide
ugcacaucccggaugcgac

SEQ ID NO: 3238961 - RNA, 19 nt, Artificial Sequence
  Description of Artificial Sequence: Synthetic oligonucleotide
ucugcaagaagagcucgug

SEQ ID NO: 3238962 - RNA, 19 nt, Artificial Sequence
  Description of Artificial Sequence: Synthetic oligonucleotide
caccaggacagccaucugc

SEQ ID NO: 3238963 - RNA, 19 nt, Artificial Sequence
  Description of Artificial Sequence: Synthetic oligonucleotide
gagggucuucugcacauug

SEQ ID NO: 3238964 - RNA, 19 nt, Artificial Sequence
  Description of Artificial Sequence: Synthetic oligonucleotide
agucgagggucuucugcac

SEQ ID NO: 3238965 - RNA, 19 nt, Artificial Sequence
  Description of Artificial Sequence: Synthetic oligonucleotide
acccguguagucgaggguc

SEQ ID NO: 3238966 - RNA, 19 nt, Artificial Sequence
  Description of Artificial Sequence: Synthetic oligonucleotide
acauugagcucgaugacgu

SEQ ID NO: 3238967 - RNA, 19 nt, Artificial Sequence
  Description of Artificial Sequence: Synthetic oligonucleotide
gaugacguucagcgugucc

SEQ ID NO: 3238968 - RNA, 19 nt, Artificial Sequence
  Description of Artificial Sequence: Synthetic oligonucleotide
caggacagccaucugcaag

SEQ ID NO: 3238969 - RNA, 19 nt, Artificial Sequence
  Description of Artificial Sequence: Synthetic oligonucleotide
ucgaugacguucagcgugu

SEQ ID NO: 3238970 - RNA, 19 nt, Artificial Sequence
  Description of Artificial Sequence: Synthetic oligonucleotide
caucugcaagaagagcucg

SEQ ID NO: 3238971 - RNA, 19 nt, Artificial Sequence
  Description of Artificial Sequence: Synthetic oligonucleotide
ucucggagaauacguccca

SEQ ID NO: 3238972 - RNA, 19 nt, Artificial Sequence
  Description of Artificial Sequence: Synthetic oligonucleotide
cugcaagaagagcucgugc

SEQ ID NO: 3238973 - RNA, 19 nt, Artificial Sequence
  Description of Artificial Sequence: Synthetic oligonucleotide
agccaucugcaagaagagc

SEQ ID NO: 3238974 - RNA, 19 nt, Artificial Sequence
  Description of Artificial Sequence: Synthetic oligonucleotide
ucuucugcacauugagcuc

SEQ ID NO: 3238975 - RNA, 19 nt, Artificial Sequence
  Description of Artificial Sequence: Synthetic oligonucleotide
ucggagaauacgucccacu

SEQ ID NO: 3238976 - RNA, 19 nt, Artificial Sequence
  Description of Artificial Sequence: Synthetic oligonucleotide
ucucgaucucguugagugc

SEQ ID NO: 3238977 - RNA, 19 nt, Artificial Sequence
  Description of Artificial Sequence: Synthetic oligonucleotide
ucggugucggcucucgauc

SEQ ID NO: 3238978 - RNA, 19 nt, Artificial Sequence
  Description of Artificial Sequence: Synthetic oligonucleotide
gggucuucugcacauugag

SEQ ID NO: 3238979 - RNA, 19 nt, Artificial Sequence
  Description of Artificial Sequence: Synthetic oligonucleotide
cagccaucugcaagaagag

SEQ ID NO: 3238980 - RNA, 19 nt, Artificial Sequence
  Description of Artificial Sequence: Synthetic oligonucleotide
cagguucucggagaauacg

SEQ ID NO: 3238981 - RNA, 19 nt, Artificial Sequence
  Description of Artificial Sequence: Synthetic oligonucleotide
ucgaucucguugagugcag

SEQ ID NO: 3238982 - RNA, 19 nt, Artificial Sequence
  Description of Artificial Sequence: Synthetic oligonucleotide
agcccgugcgcccuucacg

SEQ ID NO: 3238983 - RNA, 19 nt, Artificial Sequence
  Description of Artificial Sequence: Synthetic oligonucleotide
ugacguucagcguguccgc

SEQ ID NO: 3238984 - RNA, 19 nt, Artificial Sequence
  Description of Artificial Sequence: Synthetic oligonucleotide
ucuccaccaggacagccau

SEQ ID NO: 3238985 - RNA, 19 nt, Artificial Sequence
  Description of Artificial Sequence: Synthetic oligonucleotide
cugcacauugagcucgaug

SEQ ID NO: 3238986 - RNA, 19 nt, Artificial Sequence
  Description of Artificial Sequence: Synthetic oligonucleotide
agaauacgucccacuuacc

SEQ ID NO: 3238987 - RNA, 19 nt, Artificial Sequence
  Description of Artificial Sequence: Synthetic oligonucleotide
uccgccugcuucuccacca

SEQ ID NO: 3238988 - RNA, 19 nt, Artificial Sequence
  Description of Artificial Sequence: Synthetic oligonucleotide
agguucucggagaauacgu

SEQ ID NO: 3238989 - RNA, 19 nt, Artificial Sequence
  Description of Artificial Sequence: Synthetic oligonucleotide
uguagucgagggucuucug

SEQ ID NO: 3238990 - RNA, 19 nt, Artificial Sequence
  Description of Artificial Sequence: Synthetic oligonucleotide
agcagguucucggagaaua

SEQ ID NO: 3238991 - RNA, 19 nt, Artificial Sequence
  Description of Artificial Sequence: Synthetic oligonucleotide
gacagccaucugcaagaag

SEQ ID NO: 3238992 - RNA, 19 nt, Artificial Sequence
  Description of Artificial Sequence: Synthetic oligonucleotide
ucgagggucuucugcacau

SEQ ID NO: 3238993 - RNA, 19 nt, Artificial Sequence
  Description of Artificial Sequence: Synthetic oligonucleotide
gagcucgugcacaucccgg

SEQ ID NO: 3238994 - RNA, 19 nt, Artificial Sequence
  Description of Artificial Sequence: Synthetic oligonucleotide
agcucgugcacaucccgga

SEQ ID NO: 3238995 - RNA, 19 nt, Artificial Sequence
  Description of Artificial Sequence: Synthetic oligonucleotide
accaggacagccaucugca

SEQ ID NO: 3238996 - RNA, 19 nt, Artificial Sequence
  Description of Artificial Sequence: Synthetic oligonucleotide
cucgaucucguugagugca

SEQ ID NO: 3238997 - RNA, 19 nt, Artificial Sequence
  Description of Artificial Sequence: Synthetic oligonucleotide
cuuacccugcucgaacaug

SEQ ID NO: 3238998 - RNA, 19 nt, Artificial Sequence
  Description of Artificial Sequence: Synthetic oligonucleotide
agcagcucucggugucggc

SEQ ID NO: 3238999 - RNA, 19 nt, Artificial Sequence
  Description of Artificial Sequence: Synthetic oligonucleotide
ugagcucgaugacguucag

SEQ ID NO: 3239000 - RNA, 19 nt, Artificial Sequence
  Description of Artificial Sequence: Synthetic oligonucleotide
agcguguccgccugcuucu

SEQ ID NO: 3239001 - RNA, 19 nt, Artificial Sequence
  Description of Artificial Sequence: Synthetic oligonucleotide
uucugcacauugagcucga

SEQ ID NO: 3239002 - RNA, 19 nt, Artificial Sequence
  Description of Artificial Sequence: Synthetic oligonucleotide
acccuccagccgcagcagc

SEQ ID NO: 3239003 - RNA, 19 nt, Artificial Sequence
  Description of Artificial Sequence: Synthetic oligonucleotide
cacaucccggaugcgaccc

SEQ ID NO: 3239004 - RNA, 19 nt, Artificial Sequence
  Description of Artificial Sequence: Synthetic oligonucleotide
cucgugcacaucccggaug

SEQ ID NO: 3239005 - RNA, 19 nt, Artificial Sequence
  Description of Artificial Sequence: Synthetic oligonucleotide
ugagugcagcccgugcgcc

SEQ ID NO: 3239006 - RNA, 19 nt, Artificial Sequence
  Description of Artificial Sequence: Synthetic oligonucleotide
uacgucccacuuacccugc

SEQ ID NO: 3239007 - RNA, 19 nt, Artificial Sequence
  Description of Artificial Sequence: Synthetic oligonucleotide
cuucuccaccaggacagcc

SEQ ID NO: 3239008 - RNA, 19 nt, Artificial Sequence
  Description of Artificial Sequence: Synthetic oligonucleotide
caagaagagcucgugcaca

SEQ ID NO: 3239009 - RNA, 19 nt, Artificial Sequence
  Description of Artificial Sequence: Synthetic oligonucleotide
acuuacccugcucgaacau

SEQ ID NO: 3239010 - RNA, 19 nt, Artificial Sequence
  Description of Artificial Sequence: Synthetic oligonucleotide
gcaagaagagcucgugcac

SEQ ID NO: 3239011 - RNA, 19 nt, Artificial Sequence
  Description of Artificial Sequence: Synthetic oligonucleotide
gugucggcucucgaucucg

SEQ ID NO: 3239012 - RNA, 19 nt, Artificial Sequence
  Description of Artificial Sequence: Synthetic oligonucleotide
ucccacuuacccugcucga

SEQ ID NO: 3239013 - RNA, 19 nt, Artificial Sequence
  Description of Artificial Sequence: Synthetic oligonucleotide
agaagagcucgugcacauc

SEQ ID NO: 3239014 - RNA, 19 nt, Artificial Sequence
  Description of Artificial Sequence: Synthetic oligonucleotide
cugcuucuccaccaggaca

SEQ ID NO: 3239015 - RNA, 19 nt, Artificial Sequence
  Description of Artificial Sequence: Synthetic oligonucleotide
cacuuacccugcucgaaca

SEQ ID NO: 3239016 - RNA, 19 nt, Artificial Sequence
  Description of Artificial Sequence: Synthetic oligonucleotide
acguucagcguguccgccu

SEQ ID NO: 3239017 - RNA, 19 nt, Artificial Sequence
  Description of Artificial Sequence: Synthetic oligonucleotide
aacugugacacauauaucc

SEQ ID NO: 3239018 - RNA, 19 nt, Artificial Sequence
  Description of Artificial Sequence: Synthetic oligonucleotide
aaauauaauaggcaccgag

SEQ ID NO: 3239019 - RNA, 19 nt, Artificial Sequence
  Description of Artificial Sequence: Synthetic oligonucleotide
gaaaauauaauaggcaccg

SEQ ID NO: 3239020 - RNA, 19 nt, Artificial Sequence
  Description of Artificial Sequence: Synthetic oligonucleotide
acauacaucgguuaucgcc

SEQ ID NO: 3239021 - RNA, 19 nt, Artificial Sequence
  Description of Artificial Sequence: Synthetic oligonucleotide
ucuggaaaauauaauaggc

SEQ ID NO: 3239022 - RNA, 19 nt, Artificial Sequence
  Description of Artificial Sequence: Synthetic oligonucleotide
auauaauaggcaccgaggg

SEQ ID NO: 3239023 - RNA, 19 nt, Artificial Sequence
  Description of Artificial Sequence: Synthetic oligonucleotide
aauauaauaggcaccgagg

SEQ ID NO: 3239024 - RNA, 19 nt, Artificial Sequence
  Description of Artificial Sequence: Synthetic oligonucleotide
uggaaaauauaauaggcac

SEQ ID NO: 3239025 - RNA, 19 nt, Artificial Sequence
  Description of Artificial Sequence: Synthetic oligonucleotide
uugaugacaguguugacag

SEQ ID NO: 3239026 - RNA, 19 nt, Artificial Sequence
  Description of Artificial Sequence: Synthetic oligonucleotide
aucuggaaaauauaauagg

SEQ ID NO: 3239027 - RNA, 19 nt, Artificial Sequence
  Description of Artificial Sequence: Synthetic oligonucleotide
ucuggaagaugucagcagg

SEQ ID NO: 3239028 - RNA, 19 nt, Artificial Sequence
  Description of Artificial Sequence: Synthetic oligonucleotide
gaacagaacguccugauac

SEQ ID NO: 3239029 - RNA, 19 nt, Artificial Sequence
  Description of Artificial Sequence: Synthetic oligonucleotide
agaaugggaacugugacac

SEQ ID NO: 3239030 - RNA, 19 nt, Artificial Sequence
  Description of Artificial Sequence: Synthetic oligonucleotide
gaucuggaaaauauaauag

SEQ ID NO: 3239031 - RNA, 19 nt, Artificial Sequence
  Description of Artificial Sequence: Synthetic oligonucleotide
aaacaagauggugaagggc

SEQ ID NO: 3239032 - RNA, 19 nt, Artificial Sequence
  Description of Artificial Sequence: Synthetic oligonucleotide
ucgguuaucgccaaucagc

SEQ ID NO: 3239033 - RNA, 19 nt, Artificial Sequence
  Description of Artificial Sequence: Synthetic oligonucleotide
ugucagaggccuuagcugg

SEQ ID NO: 3239034 - RNA, 19 nt, Artificial Sequence
  Description of Artificial Sequence: Synthetic oligonucleotide
acguccugauacuacaucc

SEQ ID NO: 3239035 - RNA, 19 nt, Artificial Sequence
  Description of Artificial Sequence: Synthetic oligonucleotide
uuuucagcagggcacauac

SEQ ID NO: 3239036 - RNA, 19 nt, Artificial Sequence
  Description of Artificial Sequence: Synthetic oligonucleotide
gaaacaagauggugaaggg

SEQ ID NO: 3239037 - RNA, 19 nt, Artificial Sequence
  Description of Artificial Sequence: Synthetic oligonucleotide
agugaucaucuccaagucc

SEQ ID NO: 3239038 - RNA, 19 nt, Artificial Sequence
  Description of Artificial Sequence: Synthetic oligonucleotide
uauugagccaggaaaggug

SEQ ID NO: 3239039 - RNA, 19 nt, Artificial Sequence
  Description of Artificial Sequence: Synthetic oligonucleotide
accaggguagcacugauag

SEQ ID NO: 3239040 - RNA, 19 nt, Artificial Sequence
  Description of Artificial Sequence: Synthetic oligonucleotide
gauacuacauccaucguac

SEQ ID NO: 3239041 - RNA, 19 nt, Artificial Sequence
  Description of Artificial Sequence: Synthetic oligonucleotide
aaguugaugacaguguuga

SEQ ID NO: 3239042 - RNA, 19 nt, Artificial Sequence
  Description of Artificial Sequence: Synthetic oligonucleotide
aacaagauggugaagggcu

SEQ ID NO: 3239043 - RNA, 19 nt, Artificial Sequence
  Description of Artificial Sequence: Synthetic oligonucleotide
acagugaucaucuccaagu

SEQ ID NO: 3239044 - RNA, 19 nt, Artificial Sequence
  Description of Artificial Sequence: Synthetic oligonucleotide
acugauaggcccuguuugc

SEQ ID NO: 3239045 - RNA, 19 nt, Artificial Sequence
  Description of Artificial Sequence: Synthetic oligonucleotide
agucggaucacggagcugc

SEQ ID NO: 3239046 - RNA, 19 nt, Artificial Sequence
  Description of Artificial Sequence: Synthetic oligonucleotide
aagggcuggucucugcagc

SEQ ID NO: 3239047 - RNA, 19 nt, Artificial Sequence
  Description of Artificial Sequence: Synthetic oligonucleotide
ucauugccagauuugaucu

SEQ ID NO: 3239048 - RNA, 19 nt, Artificial Sequence
  Description of Artificial Sequence: Synthetic oligonucleotide
uauauccgcagucggauca

SEQ ID NO: 3239049 - RNA, 19 nt, Artificial Sequence
  Description of Artificial Sequence: Synthetic oligonucleotide
aguguuuucagcagggcac

SEQ ID NO: 3239050 - RNA, 19 nt, Artificial Sequence
  Description of Artificial Sequence: Synthetic oligonucleotide
acuacauccaucguacccg

SEQ ID NO: 3239051 - RNA, 19 nt, Artificial Sequence
  Description of Artificial Sequence: Synthetic oligonucleotide
ugugacacauauauccgca

SEQ ID NO: 3239052 - RNA, 19 nt, Artificial Sequence
  Description of Artificial Sequence: Synthetic oligonucleotide
cagcagggcacauacaucg

SEQ ID NO: 3239053 - RNA, 19 nt, Artificial Sequence
  Description of Artificial Sequence: Synthetic oligonucleotide
ccugauacuacauccaucg

SEQ ID NO: 3239054 - RNA, 19 nt, Artificial Sequence
  Description of Artificial Sequence: Synthetic oligonucleotide
gaagaugucagcaggaaca

SEQ ID NO: 3239055 - RNA, 19 nt, Artificial Sequence
  Description of Artificial Sequence: Synthetic oligonucleotide
uccaaguccagcuggaugu

SEQ ID NO: 3239056 - RNA, 19 nt, Artificial Sequence
  Description of Artificial Sequence: Synthetic oligonucleotide
uacuacauccaucguaccc

SEQ ID NO: 3239057 - RNA, 19 nt, Artificial Sequence
  Description of Artificial Sequence: Synthetic oligonucleotide
aacguccugauacuacauc

SEQ ID NO: 3239058 - RNA, 19 nt, Artificial Sequence
  Description of Artificial Sequence: Synthetic oligonucleotide
agaggccuuagcuggaggc

SEQ ID NO: 3239059 - RNA, 19 nt, Artificial Sequence
  Description of Artificial Sequence: Synthetic oligonucleotide
gaaaggcagugucagaggc

SEQ ID NO: 3239060 - RNA, 19 nt, Artificial Sequence
  Description of Artificial Sequence: Synthetic oligonucleotide
gaugacaguguugacagug

SEQ ID NO: 3239061 - RNA, 19 nt, Artificial Sequence
  Description of Artificial Sequence: Synthetic oligonucleotide
ugauacuacauccaucgua

SEQ ID NO: 3239062 - RNA, 19 nt, Artificial Sequence
  Description of Artificial Sequence: Synthetic oligonucleotide
uagcuggaggcucagaaug

SEQ ID NO: 3239063 - RNA, 19 nt, Artificial Sequence
  Description of Artificial Sequence: Synthetic oligonucleotide
ucagaaugggaacugugac

SEQ ID NO: 3239064 - RNA, 19 nt, Artificial Sequence
  Description of Artificial Sequence: Synthetic oligonucleotide
cuuggugcuagugaaaggc

SEQ ID NO: 3239065 - RNA, 19 nt, Artificial Sequence
  Description of Artificial Sequence: Synthetic oligonucleotide
guuaucgccaaucagcaga

SEQ ID NO: 3239066 - RNA, 19 nt, Artificial Sequence
  Description of Artificial Sequence: Synthetic oligonucleotide
gaggguaacggguuguugc

SEQ ID NO: 3239067 - RNA, 19 nt, Artificial Sequence
  Description of Artificial Sequence: Synthetic oligonucleotide
gauauugagccaggaaagg

SEQ ID NO: 3239068 - RNA, 19 nt, Artificial Sequence
  Description of Artificial Sequence: Synthetic oligonucleotide
aaaggugcaguguccaccu

SEQ ID NO: 3239069 - RNA, 19 nt, Artificial Sequence
  Description of Artificial Sequence: Synthetic oligonucleotide
auugagccaggaaaggugc

SEQ ID NO: 3239070 - RNA, 19 nt, Artificial Sequence
  Description of Artificial Sequence: Synthetic oligonucleotide
caggguagcacugauaggc

SEQ ID NO: 3239071 - RNA, 19 nt, Artificial Sequence
  Description of Artificial Sequence: Synthetic oligonucleotide
agugucagaggccuuagcu

SEQ ID NO: 3239072 - RNA, 19 nt, Artificial Sequence
  Description of Artificial Sequence: Synthetic oligonucleotide
uucagcagggcacauacau

SEQ ID NO: 3239073 - RNA, 19 nt, Artificial Sequence
  Description of Artificial Sequence: Synthetic oligonucleotide
guugcuugcaucuggaaga

SEQ ID NO: 3239074 - RNA, 19 nt, Artificial Sequence
  Description of Artificial Sequence: Synthetic oligonucleotide
ucccgaggcccuuugaugg

SEQ ID NO: 3239075 - RNA, 19 nt, Artificial Sequence
  Description of Artificial Sequence: Synthetic oligonucleotide
uauaauaggcaccgagggu

SEQ ID NO: 3239076 - RNA, 19 nt, Artificial Sequence
  Description of Artificial Sequence: Synthetic oligonucleotide
cucauugccagauuugauc

SEQ ID NO: 3239077 - RNA, 19 nt, Artificial Sequence
  Description of Artificial Sequence: Synthetic oligonucleotide
ugcaguguccaccugcucu

SEQ ID NO: 3239078 - RNA, 19 nt, Artificial Sequence
  Description of Artificial Sequence: Synthetic oligonucleotide
aaugggaacugugacacau

SEQ ID NO: 3239079 - RNA, 19 nt, Artificial Sequence
  Description of Artificial Sequence: Synthetic oligonucleotide
auugccagauuugaucugg

SEQ ID NO: 3239080 - RNA, 19 nt, Artificial Sequence
  Description of Artificial Sequence: Synthetic oligonucleotide
cauguagaacucccgaccc

SEQ ID NO: 3239081 - RNA, 19 nt, Artificial Sequence
  Description of Artificial Sequence: Synthetic oligonucleotide
ugauaggcccuguuugccg

SEQ ID NO: 3239082 - RNA, 19 nt, Artificial Sequence
  Description of Artificial Sequence: Synthetic oligonucleotide
aacagaacguccugauacu

SEQ ID NO: 3239083 - RNA, 19 nt, Artificial Sequence
  Description of Artificial Sequence: Synthetic oligonucleotide
acucccgacccucauugcc

SEQ ID NO: 3239084 - RNA, 19 nt, Artificial Sequence
  Description of Artificial Sequence: Synthetic oligonucleotide
cuggaaaauauaauaggca

SEQ ID NO: 3239085 - RNA, 19 nt, Artificial Sequence
  Description of Artificial Sequence: Synthetic oligonucleotide
aggugcaguguccaccugc

SEQ ID NO: 3239086 - RNA, 19 nt, Artificial Sequence
  Description of Artificial Sequence: Synthetic oligonucleotide
uggugcuagugaaaggcag

SEQ ID NO: 3239087 - RNA, 19 nt, Artificial Sequence
  Description of Artificial Sequence: Synthetic oligonucleotide
gaacucccgacccucauug

SEQ ID NO: 3239088 - RNA, 19 nt, Artificial Sequence
  Description of Artificial Sequence: Synthetic oligonucleotide
uagugaaaggcagugucag

SEQ ID NO: 3239089 - RNA, 19 nt, Artificial Sequence
  Description of Artificial Sequence: Synthetic oligonucleotide
ugaaguugaugacaguguu

SEQ ID NO: 3239090 - RNA, 19 nt, Artificial Sequence
  Description of Artificial Sequence: Synthetic oligonucleotide
cauacaucgguuaucgcca

SEQ ID NO: 3239091 - RNA, 19 nt, Artificial Sequence
  Description of Artificial Sequence: Synthetic oligonucleotide
cacauauauccgcagucgg

SEQ ID NO: 3239092 - RNA, 19 nt, Artificial Sequence
  Description of Artificial Sequence: Synthetic oligonucleotide
aagaugucagcaggaacag

SEQ ID NO: 3239093 - RNA, 19 nt, Artificial Sequence
  Description of Artificial Sequence: Synthetic oligonucleotide
agaacguccugauacuaca

SEQ ID NO: 3239094 - RNA, 19 nt, Artificial Sequence
  Description of Artificial Sequence: Synthetic oligonucleotide
ugacacauauauccgcagu

SEQ ID NO: 3239095 - RNA, 19 nt, Artificial Sequence
  Description of Artificial Sequence: Synthetic oligonucleotide
auaauaggcaccgagggua

SEQ ID NO: 3239096 - RNA, 19 nt, Artificial Sequence
  Description of Artificial Sequence: Synthetic oligonucleotide
ucugcagccaguguuuuca

SEQ ID NO: 3239097 - RNA, 19 nt, Artificial Sequence
  Description of Artificial Sequence: Synthetic oligonucleotide
gaugucagcaggaacagaa

SEQ ID NO: 3239098 - RNA, 19 nt, Artificial Sequence
  Description of Artificial Sequence: Synthetic oligonucleotide
auucuugcugguuuccucu

SEQ ID NO: 3239099 - RNA, 19 nt, Artificial Sequence
  Description of Artificial Sequence: Synthetic oligonucleotide
auacuacauccaucguacc

SEQ ID NO: 3239100 - RNA, 19 nt, Artificial Sequence
  Description of Artificial Sequence: Synthetic oligonucleotide
gaaaggugcaguguccacc

SEQ ID NO: 3239101 - RNA, 19 nt, Artificial Sequence
  Description of Artificial Sequence: Synthetic oligonucleotide
gacagugaucaucuccaag

SEQ ID NO: 3239102 - RNA, 19 nt, Artificial Sequence
  Description of Artificial Sequence: Synthetic oligonucleotide
acugugacacauauauccg

SEQ ID NO: 3239103 - RNA, 19 nt, Artificial Sequence
  Description of Artificial Sequence: Synthetic oligonucleotide
ugucccuuggugcuaguga

SEQ ID NO: 3239104 - RNA, 19 nt, Artificial Sequence
  Description of Artificial Sequence: Synthetic oligonucleotide
cugugacacauauauccgc

SEQ ID NO: 3239105 - RNA, 19 nt, Artificial Sequence
  Description of Artificial Sequence: Synthetic oligonucleotide
ggaacugugacacauauau

SEQ ID NO: 3239106 - RNA, 19 nt, Artificial Sequence
  Description of Artificial Sequence: Synthetic oligonucleotide
aucuggaagaugucagcag

SEQ ID NO: 3239107 - RNA, 19 nt, Artificial Sequence
  Description of Artificial Sequence: Synthetic oligonucleotide
ucguacccgaaacaagaug

SEQ ID NO: 3239108 - RNA, 19 nt, Artificial Sequence
  Description of Artificial Sequence: Synthetic oligonucleotide
cugcucucauucuugcugg

SEQ ID NO: 3239109 - RNA, 19 nt, Artificial Sequence
  Description of Artificial Sequence: Synthetic oligonucleotide
ggaaaauauaauaggcacc

SEQ ID NO: 3239110 - RNA, 19 nt, Artificial Sequence
  Description of Artificial Sequence: Synthetic oligonucleotide
cguacccgaaacaagaugg

SEQ ID NO: 3239111 - RNA, 19 nt, Artificial Sequence
  Description of Artificial Sequence: Synthetic oligonucleotide
gauaggcccuguuugccgc

SEQ ID NO: 3239112 - RNA, 19 nt, Artificial Sequence
  Description of Artificial Sequence: Synthetic oligonucleotide
guugaugacaguguugaca

SEQ ID NO: 3239113 - RNA, 19 nt, Artificial Sequence
  Description of Artificial Sequence: Synthetic oligonucleotide
aacucccgacccucauugc

SEQ ID NO: 3239114 - RNA, 19 nt, Artificial Sequence
  Description of Artificial Sequence: Synthetic oligonucleotide
auauauccgcagucggauc

SEQ ID NO: 3239115 - RNA, 19 nt, Artificial Sequence
  Description of Artificial Sequence: Synthetic oligonucleotide
cacugauaggcccuguuug

SEQ ID NO: 3239116 - RNA, 19 nt, Artificial Sequence
  Description of Artificial Sequence: Synthetic oligonucleotide
caucguacccgaaacaaga

SEQ ID NO: 3239117 - RNA, 19 nt, Artificial Sequence
  Description of Artificial Sequence: Synthetic oligonucleotide
aauacuauaggcuuccaca

SEQ ID NO: 3239118 - RNA, 19 nt, Artificial Sequence
  Description of Artificial Sequence: Synthetic oligonucleotide
gacuuauucucacaaaggg

SEQ ID NO: 3239119 - RNA, 19 nt, Artificial Sequence
  Description of Artificial Sequence: Synthetic oligonucleotide
aaagcuuucauugcugggg

SEQ ID NO: 3239120 - RNA, 19 nt, Artificial Sequence
  Description of Artificial Sequence: Synthetic oligonucleotide
aacauaacucuugugaaag

SEQ ID NO: 3239121 - RNA, 19 nt, Artificial Sequence
  Description of Artificial Sequence: Synthetic oligonucleotide
cuugugaaagguuucagag

SEQ ID NO: 3239122 - RNA, 19 nt, Artificial Sequence
  Description of Artificial Sequence: Synthetic oligonucleotide
cuuacuucucacuucauug

SEQ ID NO: 3239123 - RNA, 19 nt, Artificial Sequence
  Description of Artificial Sequence: Synthetic oligonucleotide
agaacacaaguccuuacac

SEQ ID NO: 3239124 - RNA, 19 nt, Artificial Sequence
  Description of Artificial Sequence: Synthetic oligonucleotide
aauagagggccuguucucc

SEQ ID NO: 3239125 - RNA, 19 nt, Artificial Sequence
  Description of Artificial Sequence: Synthetic oligonucleotide
uguaauuaggcugacauuu

SEQ ID NO: 3239126 - RNA, 19 nt, Artificial Sequence
  Description of Artificial Sequence: Synthetic oligonucleotide
uagccaagaauacuauagg

SEQ ID NO: 3239127 - RNA, 19 nt, Artificial Sequence
  Description of Artificial Sequence: Synthetic oligonucleotide
uuccacaugccaaacaugu

SEQ ID NO: 3239128 - RNA, 19 nt, Artificial Sequence
  Description of Artificial Sequence: Synthetic oligonucleotide
caacccugcauucuuaucg

SEQ ID NO: 3239129 - RNA, 19 nt, Artificial Sequence
  Description of Artificial Sequence: Synthetic oligonucleotide
ugguccauaagcaccuugg

SEQ ID NO: 3239130 - RNA, 19 nt, Artificial Sequence
  Description of Artificial Sequence: Synthetic oligonucleotide
auagccaagaauacuauag

SEQ ID NO: 3239131 - RNA, 19 nt, Artificial Sequence
  Description of Artificial Sequence: Synthetic oligonucleotide
uuauucucacaaagggagg

SEQ ID NO: 3239132 - RNA, 19 nt, Artificial Sequence
  Description of Artificial Sequence: Synthetic oligonucleotide
aacugcuuaccuucugcac

SEQ ID NO: 3239133 - RNA, 19 nt, Artificial Sequence
  Description of Artificial Sequence: Synthetic oligonucleotide
ucucacuucauugacauuc

SEQ ID NO: 3239134 - RNA, 19 nt, Artificial Sequence
  Description of Artificial Sequence: Synthetic oligonucleotide
agcacuguagcugacacuc

SEQ ID NO: 3239135 - RNA, 19 nt, Artificial Sequence
  Description of Artificial Sequence: Synthetic oligonucleotide
agucuguaaacucucggag

SEQ ID NO: 3239136 - RNA, 19 nt, Artificial Sequence
  Description of Artificial Sequence: Synthetic oligonucleotide
uaguuauuguugcagcuca

SEQ ID NO: 3239137 - RNA, 19 nt, Artificial Sequence
  Description of Artificial Sequence: Synthetic oligonucleotide
ugaaagguuucagagcuag

SEQ ID NO: 3239138 - RNA, 19 nt, Artificial Sequence
  Description of Artificial Sequence: Synthetic oligonucleotide
uuauuguugcagcucaccu

SEQ ID NO: 3239139 - RNA, 19 nt, Artificial Sequence
  Description of Artificial Sequence: Synthetic oligonucleotide
acagccugcaacuugguca

SEQ ID NO: 3239140 - RNA, 19 nt, Artificial Sequence
  Description of Artificial Sequence: Synthetic oligonucleotide
ucccguuuaguuauuguug

SEQ ID NO: 3239141 - RNA, 19 nt, Artificial Sequence
  Description of Artificial Sequence: Synthetic oligonucleotide
aaccgaagcaucucguucu

SEQ ID NO: 3239142 - RNA, 19 nt, Artificial Sequence
  Description of Artificial Sequence: Synthetic oligonucleotide
aggauucgccaccacaucg

SEQ ID NO: 3239143 - RNA, 19 nt, Artificial Sequence
  Description of Artificial Sequence: Synthetic oligonucleotide
aagcaccuuggacuuauuc

SEQ ID NO: 3239144 - RNA, 19 nt, Artificial Sequence
  Description of Artificial Sequence: Synthetic oligonucleotide
aaacucucggaguucuuug

SEQ ID NO: 3239145 - RNA, 19 nt, Artificial Sequence
  Description of Artificial Sequence: Synthetic oligonucleotide
auuaggcugacauuuaauu

SEQ ID NO: 3239146 - RNA, 19 nt, Artificial Sequence
  Description of Artificial Sequence: Synthetic oligonucleotide
aagcaucucguucugggca

SEQ ID NO: 3239147 - RNA, 19 nt, Artificial Sequence
  Description of Artificial Sequence: Synthetic oligonucleotide
ucucggaguucuuuguggg

SEQ ID NO: 3239148 - RNA, 19 nt, Artificial Sequence
  Description of Artificial Sequence: Synthetic oligonucleotide
uuacuucucacuucauuga

SEQ ID NO: 3239149 - RNA, 19 nt, Artificial Sequence
  Description of Artificial Sequence: Synthetic oligonucleotide
aggaagcugucauugcugg

SEQ ID NO: 3239150 - RNA, 19 nt, Artificial Sequence
  Description of Artificial Sequence: Synthetic oligonucleotide
gucucugugaggcucaggc

SEQ ID NO: 3239151 - RNA, 19 nt, Artificial Sequence
  Description of Artificial Sequence: Synthetic oligonucleotide
gaagcugucauugcuggcc

SEQ ID NO: 3239152 - RNA, 19 nt, Artificial Sequence
  Description of Artificial Sequence: Synthetic oligonucleotide
acuggcgcugcucucauag

SEQ ID NO: 3239153 - RNA, 19 nt, Artificial Sequence
  Description of Artificial Sequence: Synthetic oligonucleotide
ugaggcaaagaggaugggg

SEQ ID NO: 3239154 - RNA, 19 nt, Artificial Sequence
  Description of Artificial Sequence: Synthetic oligonucleotide
agcaccuuggacuuauucu

SEQ ID NO: 3239155 - RNA, 19 nt, Artificial Sequence
  Description of Artificial Sequence: Synthetic oligonucleotide
agcgccugcacugaaaccg

SEQ ID NO: 3239156 - RNA, 19 nt, Artificial Sequence
  Description of Artificial Sequence: Synthetic oligonucleotide
aguaaguucuccugauucu

SEQ ID NO: 3239157 - RNA, 19 nt, Artificial Sequence
  Description of Artificial Sequence: Synthetic oligonucleotide
aacucccauaagccuuucc

SEQ ID NO: 3239158 - RNA, 19 nt, Artificial Sequence
  Description of Artificial Sequence: Synthetic oligonucleotide
acugcuuaccuucugcacu

SEQ ID NO: 3239159 - RNA, 19 nt, Artificial Sequence
  Description of Artificial Sequence: Synthetic oligonucleotide
uaauuacaaggaacccagg

SEQ ID NO: 3239160 - RNA, 19 nt, Artificial Sequence
  Description of Artificial Sequence: Synthetic oligonucleotide
uuugugggccucuagcugu

SEQ ID NO: 3239161 - RNA, 19 nt, Artificial Sequence
  Description of Artificial Sequence: Synthetic oligonucleotide
uucgccaccacaucgugga

SEQ ID NO: 3239162 - RNA, 19 nt, Artificial Sequence
  Description of Artificial Sequence: Synthetic oligonucleotide
auuacaaggaacccagguu

SEQ ID NO: 3239163 - RNA, 19 nt, Artificial Sequence
  Description of Artificial Sequence: Synthetic oligonucleotide
cagguucuuacacaggcag

SEQ ID NO: 3239164 - RNA, 19 nt, Artificial Sequence
  Description of Artificial Sequence: Synthetic oligonucleotide
uguucugcccaaaggugag

SEQ ID NO: 3239165 - RNA, 19 nt, Artificial Sequence
  Description of Artificial Sequence: Synthetic oligonucleotide
acauaacucuugugaaagg

SEQ ID NO: 3239166 - RNA, 19 nt, Artificial Sequence
  Description of Artificial Sequence: Synthetic oligonucleotide
cacaaagggaggauuuuag

SEQ ID NO: 3239167 - RNA, 19 nt, Artificial Sequence
  Description of Artificial Sequence: Synthetic oligonucleotide
uauucucacaaagggagga

SEQ ID NO: 3239168 - RNA, 19 nt, Artificial Sequence
  Description of Artificial Sequence: Synthetic oligonucleotide
agagcuggaaguccugcuc

SEQ ID NO: 3239169 - RNA, 19 nt, Artificial Sequence
  Description of Artificial Sequence: Synthetic oligonucleotide
gaauacuauaggcuuccac

SEQ ID NO: 3239170 - RNA, 19 nt, Artificial Sequence
  Description of Artificial Sequence: Synthetic oligonucleotide
ugauaggccucauugcaac

SEQ ID NO: 3239171 - RNA, 19 nt, Artificial Sequence
  Description of Artificial Sequence: Synthetic oligonucleotide
uaacauaacucuugugaaa

SEQ ID NO: 3239172 - RNA, 19 nt, Artificial Sequence
  Description of Artificial Sequence: Synthetic oligonucleotide
uacacuuggucuucaugcc

SEQ ID NO: 3239173 - RNA, 19 nt, Artificial Sequence
  Description of Artificial Sequence: Synthetic oligonucleotide
auacuauaggcuuccacau

SEQ ID NO: 3239174 - RNA, 19 nt, Artificial Sequence
  Description of Artificial Sequence: Synthetic oligonucleotide
cuuguggucgcauguuggg

SEQ ID NO: 3239175 - RNA, 19 nt, Artificial Sequence
  Description of Artificial Sequence: Synthetic oligonucleotide
uuaccuucugcacuugcuc

SEQ ID NO: 3239176 - RNA, 19 nt, Artificial Sequence
  Description of Artificial Sequence: Synthetic oligonucleotide
cuaacauaacucuugugaa

SEQ ID NO: 3239177 - RNA, 19 nt, Artificial Sequence
  Description of Artificial Sequence: Synthetic oligonucleotide
uagcagugcuaccauagcu

SEQ ID NO: 3239178 - RNA, 19 nt, Artificial Sequence
  Description of Artificial Sequence: Synthetic oligonucleotide
cauaggucuugcaacuuug

SEQ ID NO: 3239179 - RNA, 19 nt, Artificial Sequence
  Description of Artificial Sequence: Synthetic oligonucleotide
ucacgugucuccucuagcu

SEQ ID NO: 3239180 - RNA, 19 nt, Artificial Sequence
  Description of Artificial Sequence: Synthetic oligonucleotide
uuaguuauuguugcagcuc

SEQ ID NO: 3239181 - RNA, 19 nt, Artificial Sequence
  Description of Artificial Sequence: Synthetic oligonucleotide
aacacuuguguugcuggag

SEQ ID NO: 3239182 - RNA, 19 nt, Artificial Sequence
  Description of Artificial Sequence: Synthetic oligonucleotide
agccacagcugcgauagcc

SEQ ID NO: 3239183 - RNA, 19 nt, Artificial Sequence
  Description of Artificial Sequence: Synthetic oligonucleotide
ucuuccaacucagaacaca

SEQ ID NO: 3239184 - RNA, 19 nt, Artificial Sequence
  Description of Artificial Sequence: Synthetic oligonucleotide
cugacuggugucauauagc

SEQ ID NO: 3239185 - RNA, 19 nt, Artificial Sequence
  Description of Artificial Sequence: Synthetic oligonucleotide
uauagcaccugcagagccu

SEQ ID NO: 3239186 - RNA, 19 nt, Artificial Sequence
  Description of Artificial Sequence: Synthetic oligonucleotide
ugucgcucugggaagcugc

SEQ ID NO: 3239187 - RNA, 19 nt, Artificial Sequence
  Description of Artificial Sequence: Synthetic oligonucleotide
uccuuucccguuuaguuau

SEQ ID NO: 3239188 - RNA, 19 nt, Artificial Sequence
  Description of Artificial Sequence: Synthetic oligonucleotide
agcagugcuaccauagcuc

SEQ ID NO: 3239189 - RNA, 19 nt, Artificial Sequence
  Description of Artificial Sequence: Synthetic oligonucleotide
aacucucggaguucuuugu

SEQ ID NO: 3239190 - RNA, 19 nt, Artificial Sequence
  Description of Artificial Sequence: Synthetic oligonucleotide
ugagcuaauagagggccug

SEQ ID NO: 3239191 - RNA, 19 nt, Artificial Sequence
  Description of Artificial Sequence: Synthetic oligonucleotide
uuaucagcuuucucugcug

SEQ ID NO: 3239192 - RNA, 19 nt, Artificial Sequence
  Description of Artificial Sequence: Synthetic oligonucleotide
uuuccagucugaguggcug

SEQ ID NO: 3239193 - RNA, 19 nt, Artificial Sequence
  Description of Artificial Sequence: Synthetic oligonucleotide
uacaaggaacccagguucu

SEQ ID NO: 3239194 - RNA, 19 nt, Artificial Sequence
  Description of Artificial Sequence: Synthetic oligonucleotide
ucucacaaagggaggauuu

SEQ ID NO: 3239195 - RNA, 19 nt, Artificial Sequence
  Description of Artificial Sequence: Synthetic oligonucleotide
uauuucuuccaugcagagc

SEQ ID NO: 3239196 - RNA, 19 nt, Artificial Sequence
  Description of Artificial Sequence: Synthetic oligonucleotide
ugucauaacuccuguuaaa

SEQ ID NO: 3239197 - RNA, 19 nt, Artificial Sequence
  Description of Artificial Sequence: Synthetic oligonucleotide
uagucugcaguucuuugau

SEQ ID NO: 3239198 - RNA, 19 nt, Artificial Sequence
  Description of Artificial Sequence: Synthetic oligonucleotide
uguccugaggauucgccac

SEQ ID NO: 3239199 - RNA, 19 nt, Artificial Sequence
  Description of Artificial Sequence: Synthetic oligonucleotide
ggugcuugcucauggacag

SEQ ID NO: 3239200 - RNA, 19 nt, Artificial Sequence
  Description of Artificial Sequence: Synthetic oligonucleotide
uucccguuuaguuauuguu

SEQ ID NO: 3239201 - RNA, 19 nt, Artificial Sequence
  Description of Artificial Sequence: Synthetic oligonucleotide
uacauucuugccccuggcu

SEQ ID NO: 3239202 - RNA, 19 nt, Artificial Sequence
  Description of Artificial Sequence: Synthetic oligonucleotide
aaguucuccugauucuuua

SEQ ID NO: 3239203 - RNA, 19 nt, Artificial Sequence
  Description of Artificial Sequence: Synthetic oligonucleotide
gggaaugugagccugugca

SEQ ID NO: 3239204 - RNA, 19 nt, Artificial Sequence
  Description of Artificial Sequence: Synthetic oligonucleotide
ggacuuauucucacaaagg

SEQ ID NO: 3239205 - RNA, 19 nt, Artificial Sequence
  Description of Artificial Sequence: Synthetic oligonucleotide
gcaacacuuguguugcugg

SEQ ID NO: 3239206 - RNA, 19 nt, Artificial Sequence
  Description of Artificial Sequence: Synthetic oligonucleotide
cucauggcagcgcagcuug

SEQ ID NO: 3239207 - RNA, 19 nt, Artificial Sequence
  Description of Artificial Sequence: Synthetic oligonucleotide
uauuguugcagcucaccuu

SEQ ID NO: 3239208 - RNA, 19 nt, Artificial Sequence
  Description of Artificial Sequence: Synthetic oligonucleotide
aagcugucauugcuggccu

SEQ ID NO: 3239209 - RNA, 19 nt, Artificial Sequence
  Description of Artificial Sequence: Synthetic oligonucleotide
gucauauagcaccugcaga

SEQ ID NO: 3239210 - RNA, 19 nt, Artificial Sequence
  Description of Artificial Sequence: Synthetic oligonucleotide
gcucuuccaacucagaaca

SEQ ID NO: 3239211 - RNA, 19 nt, Artificial Sequence
  Description of Artificial Sequence: Synthetic oligonucleotide
uagagcagcugcaucucac

SEQ ID NO: 3239212 - RNA, 19 nt, Artificial Sequence
  Description of Artificial Sequence: Synthetic oligonucleotide
uuucccguuuaguuauugu

SEQ ID NO: 3239213 - RNA, 19 nt, Artificial Sequence
  Description of Artificial Sequence: Synthetic oligonucleotide
uucaacuccuucucacagu

SEQ ID NO: 3239214 - RNA, 19 nt, Artificial Sequence
  Description of Artificial Sequence: Synthetic oligonucleotide
uaggcuuccacaugccaaa

SEQ ID NO: 3239215 - RNA, 19 nt, Artificial Sequence
  Description of Artificial Sequence: Synthetic oligonucleotide
auugcaacuggcgcugcuc

SEQ ID NO: 3239216 - RNA, 19 nt, Artificial Sequence
  Description of Artificial Sequence: Synthetic oligonucleotide
ucugggaagcugcaggcuu

SEQ ID NO: 3239217 - RNA, 19 nt, Artificial Sequence
  Description of Artificial Sequence: Synthetic oligonucleotide
uuaaaguaaagcaaaaugg

SEQ ID NO: 3239218 - RNA, 19 nt, Artificial Sequence
  Description of Artificial Sequence: Synthetic oligonucleotide
gaucauacagcacagaacg

SEQ ID NO: 3239219 - RNA, 19 nt, Artificial Sequence
  Description of Artificial Sequence: Synthetic oligonucleotide
aauguagccaauaacaaac

SEQ ID NO: 3239220 - RNA, 19 nt, Artificial Sequence
  Description of Artificial Sequence: Synthetic oligonucleotide
aauccuaacagaauguagc

SEQ ID NO: 3239221 - RNA, 19 nt, Artificial Sequence
  Description of Artificial Sequence: Synthetic oligonucleotide
uuagaaaucucucagggca

SEQ ID NO: 3239222 - RNA, 19 nt, Artificial Sequence
  Description of Artificial Sequence: Synthetic oligonucleotide
aauaacaaacaguacgaag

SEQ ID NO: 3239223 - RNA, 19 nt, Artificial Sequence
  Description of Artificial Sequence: Synthetic oligonucleotide
aacaguacgaagaucauac

SEQ ID NO: 3239224 - RNA, 19 nt, Artificial Sequence
  Description of Artificial Sequence: Synthetic oligonucleotide
aacagguuaaaguaaagca

SEQ ID NO: 3239225 - RNA, 19 nt, Artificial Sequence
  Description of Artificial Sequence: Synthetic oligonucleotide
aaucauggaagguuggcac

SEQ ID NO: 3239226 - RNA, 19 nt, Artificial Sequence
  Description of Artificial Sequence: Synthetic oligonucleotide
guuaaaguaaagcaaaaug

SEQ ID NO: 3239227 - RNA, 19 nt, Artificial Sequence
  Description of Artificial Sequence: Synthetic oligonucleotide
uguagccuaagaaucaugg

SEQ ID NO: 3239228 - RNA, 19 nt, Artificial Sequence
  Description of Artificial Sequence: Synthetic oligonucleotide
uaaaguaaagcaaaauggu

SEQ ID NO: 3239229 - RNA, 19 nt, Artificial Sequence
  Description of Artificial Sequence: Synthetic oligonucleotide
aagccaagaauccuaacag

SEQ ID NO: 3239230 - RNA, 19 nt, Artificial Sequence
  Description of Artificial Sequence: Synthetic oligonucleotide
aauugcauuuccaaguagg

SEQ ID NO: 3239231 - RNA, 19 nt, Artificial Sequence
  Description of Artificial Sequence: Synthetic oligonucleotide
aauggucuuguucucauug

SEQ ID NO: 3239232 - RNA, 19 nt, Artificial Sequence
  Description of Artificial Sequence: Synthetic oligonucleotide
agcaaaauggucuuguucu

SEQ ID NO: 3239233 - RNA, 19 nt, Artificial Sequence
  Description of Artificial Sequence: Synthetic oligonucleotide
aaaguaaagcaaaaugguc

SEQ ID NO: 3239234 - RNA, 19 nt, Artificial Sequence
  Description of Artificial Sequence: Synthetic oligonucleotide
aagcaaaauggucuuguuc

SEQ ID NO: 3239235 - RNA, 19 nt, Artificial Sequence
  Description of Artificial Sequence: Synthetic oligonucleotide
aguacgaagaucauacagc

SEQ ID NO: 3239236 - RNA, 19 nt, Artificial Sequence
  Description of Artificial Sequence: Synthetic oligonucleotide
uaagaaucauggaagguug

SEQ ID NO: 3239237 - RNA, 19 nt, Artificial Sequence
  Description of Artificial Sequence: Synthetic oligonucleotide
uagguuagaaaucucucag

SEQ ID NO: 3239238 - RNA, 19 nt, Artificial Sequence
  Description of Artificial Sequence: Synthetic oligonucleotide
aaguaaagcaaaauggucu

SEQ ID NO: 3239239 - RNA, 19 nt, Artificial Sequence
  Description of Artificial Sequence: Synthetic oligonucleotide
gccaauaacaaacaguacg

SEQ ID NO: 3239240 - RNA, 19 nt, Artificial Sequence
  Description of Artificial Sequence: Synthetic oligonucleotide
aagguuggcacaucugaac

SEQ ID NO: 3239241 - RNA, 19 nt, Artificial Sequence
  Description of Artificial Sequence: Synthetic oligonucleotide
uagccaauaacaaacagua

SEQ ID NO: 3239242 - RNA, 19 nt, Artificial Sequence
  Description of Artificial Sequence: Synthetic oligonucleotide
auccuaacagaauguagcc

SEQ ID NO: 3239243 - RNA, 19 nt, Artificial Sequence
  Description of Artificial Sequence: Synthetic oligonucleotide
acagaauguagccaauaac

SEQ ID NO: 3239244 - RNA, 19 nt, Artificial Sequence
  Description of Artificial Sequence: Synthetic oligonucleotide
acgaagaucauacagcaca

SEQ ID NO: 3239245 - RNA, 19 nt, Artificial Sequence
  Description of Artificial Sequence: Synthetic oligonucleotide
auaacaaacaguacgaaga

SEQ ID NO: 3239246 - RNA, 19 nt, Artificial Sequence
  Description of Artificial Sequence: Synthetic oligonucleotide
caagaauccuaacagaaug

SEQ ID NO: 3239247 - RNA, 19 nt, Artificial Sequence
  Description of Artificial Sequence: Synthetic oligonucleotide
aagaucauacagcacagaa

SEQ ID NO: 3239248 - RNA, 19 nt, Artificial Sequence
  Description of Artificial Sequence: Synthetic oligonucleotide
aaucucucagggcacuugg

SEQ ID NO: 3239249 - RNA, 19 nt, Artificial Sequence
  Description of Artificial Sequence: Synthetic oligonucleotide
ugcauuuccaaguagguua

SEQ ID NO: 3239250 - RNA, 19 nt, Artificial Sequence
  Description of Artificial Sequence: Synthetic oligonucleotide
acaaacaguacgaagauca

SEQ ID NO: 3239251 - RNA, 19 nt, Artificial Sequence
  Description of Artificial Sequence: Synthetic oligonucleotide
uuccaaguagguuagaaau

SEQ ID NO: 3239252 - RNA, 19 nt, Artificial Sequence
  Description of Artificial Sequence: Synthetic oligonucleotide
acaaaagugucccuggcug

SEQ ID NO: 3239253 - RNA, 19 nt, Artificial Sequence
  Description of Artificial Sequence: Synthetic oligonucleotide
gguuagaaaucucucaggg

SEQ ID NO: 3239254 - RNA, 19 nt, Artificial Sequence
  Description of Artificial Sequence: Synthetic oligonucleotide
cagaauguagccaauaaca

SEQ ID NO: 3239255 - RNA, 19 nt, Artificial Sequence
  Description of Artificial Sequence: Synthetic oligonucleotide
uguaguggggcacuguagc

SEQ ID NO: 3239256 - RNA, 19 nt, Artificial Sequence
  Description of Artificial Sequence: Synthetic oligonucleotide
cauacagcacagaacgucg

SEQ ID NO: 3239257 - RNA, 19 nt, Artificial Sequence
  Description of Artificial Sequence: Synthetic oligonucleotide
uguagccaauaacaaacag

SEQ ID NO: 3239258 - RNA, 19 nt, Artificial Sequence
  Description of Artificial Sequence: Synthetic oligonucleotide
uagccuaagaaucauggaa

SEQ ID NO: 3239259 - RNA, 19 nt, Artificial Sequence
  Description of Artificial Sequence: Synthetic oligonucleotide
aaaauugcauuuccaagua

SEQ ID NO: 3239260 - RNA, 19 nt, Artificial Sequence
  Description of Artificial Sequence: Synthetic oligonucleotide
aaauugcauuuccaaguag

SEQ ID NO: 3239261 - RNA, 19 nt, Artificial Sequence
  Description of Artificial Sequence: Synthetic oligonucleotide
uguaggauaggccacucuc

SEQ ID NO: 3239262 - RNA, 19 nt, Artificial Sequence
  Description of Artificial Sequence: Synthetic oligonucleotide
aacagaauguagccaauaa

SEQ ID NO: 3239263 - RNA, 19 nt, Artificial Sequence
  Description of Artificial Sequence: Synthetic oligonucleotide
uguguccaagccaagaauc

SEQ ID NO: 3239264 - RNA, 19 nt, Artificial Sequence
  Description of Artificial Sequence: Synthetic oligonucleotide
uggucuugcagaacuggcg

SEQ ID NO: 3239265 - RNA, 19 nt, Artificial Sequence
  Description of Artificial Sequence: Synthetic oligonucleotide
gaacagguuaaaguaaagc

SEQ ID NO: 3239266 - RNA, 19 nt, Artificial Sequence
  Description of Artificial Sequence: Synthetic oligonucleotide
uggucuuguucucauuggg

SEQ ID NO: 3239267 - RNA, 19 nt, Artificial Sequence
  Description of Artificial Sequence: Synthetic oligonucleotide
aucugaacagguuaaagua

SEQ ID NO: 3239268 - RNA, 19 nt, Artificial Sequence
  Description of Artificial Sequence: Synthetic oligonucleotide
ucugaacagguuaaaguaa

SEQ ID NO: 3239269 - RNA, 19 nt, Artificial Sequence
  Description of Artificial Sequence: Synthetic oligonucleotide
ugaacagguuaaaguaaag

SEQ ID NO: 3239270 - RNA, 19 nt, Artificial Sequence
  Description of Artificial Sequence: Synthetic oligonucleotide
aaaauggucuuguucucau

SEQ ID NO: 3239271 - RNA, 19 nt, Artificial Sequence
  Description of Artificial Sequence: Synthetic oligonucleotide
agguuagaaaucucucagg

SEQ ID NO: 3239272 - RNA, 19 nt, Artificial Sequence
  Description of Artificial Sequence: Synthetic oligonucleotide
caguacgaagaucauacag

SEQ ID NO: 3239273 - RNA, 19 nt, Artificial Sequence
  Description of Artificial Sequence: Synthetic oligonucleotide
ucucucagggcacuuggag

SEQ ID NO: 3239274 - RNA, 19 nt, Artificial Sequence
  Description of Artificial Sequence: Synthetic oligonucleotide
agaaucauggaagguuggc

SEQ ID NO: 3239275 - RNA, 19 nt, Artificial Sequence
  Description of Artificial Sequence: Synthetic oligonucleotide
aacaaacaguacgaagauc

SEQ ID NO: 3239276 - RNA, 19 nt, Artificial Sequence
  Description of Artificial Sequence: Synthetic oligonucleotide
uaacaaacaguacgaagau

SEQ ID NO: 3239277 - RNA, 19 nt, Artificial Sequence
  Description of Artificial Sequence: Synthetic oligonucleotide
aaguagguuagaaaucucu

SEQ ID NO: 3239278 - RNA, 19 nt, Artificial Sequence
  Description of Artificial Sequence: Synthetic oligonucleotide
uaaagcaaaauggucuugu

SEQ ID NO: 3239279 - RNA, 19 nt, Artificial Sequence
  Description of Artificial Sequence: Synthetic oligonucleotide
agaucauacagcacagaac

SEQ ID NO: 3239280 - RNA, 19 nt, Artificial Sequence
  Description of Artificial Sequence: Synthetic oligonucleotide
guuagaaaucucucagggc

SEQ ID NO: 3239281 - RNA, 19 nt, Artificial Sequence
  Description of Artificial Sequence: Synthetic oligonucleotide
gaauccuaacagaauguag

SEQ ID NO: 3239282 - RNA, 19 nt, Artificial Sequence
  Description of Artificial Sequence: Synthetic oligonucleotide
ucucagggcacuuggagac

SEQ ID NO: 3239283 - RNA, 19 nt, Artificial Sequence
  Description of Artificial Sequence: Synthetic oligonucleotide
cuggcugucuguaggauag

SEQ ID NO: 3239284 - RNA, 19 nt, Artificial Sequence
  Description of Artificial Sequence: Synthetic oligonucleotide
aaaagugucccuggcuguc

SEQ ID NO: 3239285 - RNA, 19 nt, Artificial Sequence
  Description of Artificial Sequence: Synthetic oligonucleotide
aguagguuagaaaucucuc

SEQ ID NO: 3239286 - RNA, 19 nt, Artificial Sequence
  Description of Artificial Sequence: Synthetic oligonucleotide
agaacuggcgauaguauuc

SEQ ID NO: 3239287 - RNA, 19 nt, Artificial Sequence
  Description of Artificial Sequence: Synthetic oligonucleotide
guacgaagaucauacagca

SEQ ID NO: 3239288 - RNA, 19 nt, Artificial Sequence
  Description of Artificial Sequence: Synthetic oligonucleotide
aacuggcgauaguauuccc

SEQ ID NO: 3239289 - RNA, 19 nt, Artificial Sequence
  Description of Artificial Sequence: Synthetic oligonucleotide
uuuccaaguagguuagaaa

SEQ ID NO: 3239290 - RNA, 19 nt, Artificial Sequence
  Description of Artificial Sequence: Synthetic oligonucleotide
auaguauucccagugauuu

SEQ ID NO: 3239291 - RNA, 19 nt, Artificial Sequence
  Description of Artificial Sequence: Synthetic oligonucleotide
aguaaagcaaaauggucuu

SEQ ID NO: 3239292 - RNA, 19 nt, Artificial Sequence
  Description of Artificial Sequence: Synthetic oligonucleotide
ggauaggccacucuccugg

SEQ ID NO: 3239293 - RNA, 19 nt, Artificial Sequence
  Description of Artificial Sequence: Synthetic oligonucleotide
uccaaguagguuagaaauc

SEQ ID NO: 3239294 - RNA, 19 nt, Artificial Sequence
  Description of Artificial Sequence: Synthetic oligonucleotide
gucaccauguguccaagcc

SEQ ID NO: 3239295 - RNA, 19 nt, Artificial Sequence
  Description of Artificial Sequence: Synthetic oligonucleotide
cuggcgauaguauucccag

SEQ ID NO: 3239296 - RNA, 19 nt, Artificial Sequence
  Description of Artificial Sequence: Synthetic oligonucleotide
auggucuuguucucauugg

SEQ ID NO: 3239297 - RNA, 19 nt, Artificial Sequence
  Description of Artificial Sequence: Synthetic oligonucleotide
gaauguagccaauaacaaa

SEQ ID NO: 3239298 - RNA, 19 nt, Artificial Sequence
  Description of Artificial Sequence: Synthetic oligonucleotide
uucccuucuggccacaaaa

SEQ ID NO: 3239299 - RNA, 19 nt, Artificial Sequence
  Description of Artificial Sequence: Synthetic oligonucleotide
aagaauccuaacagaaugu

SEQ ID NO: 3239300 - RNA, 19 nt, Artificial Sequence
  Description of Artificial Sequence: Synthetic oligonucleotide
agccuaagaaucauggaag

SEQ ID NO: 3239301 - RNA, 19 nt, Artificial Sequence
  Description of Artificial Sequence: Synthetic oligonucleotide
guagguuagaaaucucuca

SEQ ID NO: 3239302 - RNA, 19 nt, Artificial Sequence
  Description of Artificial Sequence: Synthetic oligonucleotide
ucauacagcacagaacguc

SEQ ID NO: 3239303 - RNA, 19 nt, Artificial Sequence
  Description of Artificial Sequence: Synthetic oligonucleotide
ucaccauguguccaagcca

SEQ ID NO: 3239304 - RNA, 19 nt, Artificial Sequence
  Description of Artificial Sequence: Synthetic oligonucleotide
aagaaucauggaagguugg

SEQ ID NO: 3239305 - RNA, 19 nt, Artificial Sequence
  Description of Artificial Sequence: Synthetic oligonucleotide
cugucuguaggauaggcca

SEQ ID NO: 3239306 - RNA, 19 nt, Artificial Sequence
  Description of Artificial Sequence: Synthetic oligonucleotide
caagccaagaauccuaaca

SEQ ID NO: 3239307 - RNA, 19 nt, Artificial Sequence
  Description of Artificial Sequence: Synthetic oligonucleotide
guuggcacaucugaacagg

SEQ ID NO: 3239308 - RNA, 19 nt, Artificial Sequence
  Description of Artificial Sequence: Synthetic oligonucleotide
uaggauaggccacucuccu

SEQ ID NO: 3239309 - RNA, 19 nt, Artificial Sequence
  Description of Artificial Sequence: Synthetic oligonucleotide
uagaaaucucucagggcac

SEQ ID NO: 3239310 - RNA, 19 nt, Artificial Sequence
  Description of Artificial Sequence: Synthetic oligonucleotide
cagguuaaaguaaagcaaa

SEQ ID NO: 3239311 - RNA, 19 nt, Artificial Sequence
  Description of Artificial Sequence: Synthetic oligonucleotide
acagguuaaaguaaagcaa

SEQ ID NO: 3239312 - RNA, 19 nt, Artificial Sequence
  Description of Artificial Sequence: Synthetic oligonucleotide
ucccuucuggccacaaaag

SEQ ID NO: 3239313 - RNA, 19 nt, Artificial Sequence
  Description of Artificial Sequence: Synthetic oligonucleotide
agguuggcacaucugaaca

SEQ ID NO: 3239314 - RNA, 19 nt, Artificial Sequence
  Description of Artificial Sequence: Synthetic oligonucleotide
ucuccuggggucaccaugu

SEQ ID NO: 3239315 - RNA, 19 nt, Artificial Sequence
  Description of Artificial Sequence: Synthetic oligonucleotide
aaagcaaaauggucuuguu

SEQ ID NO: 3239316 - RNA, 19 nt, Artificial Sequence
  Description of Artificial Sequence: Synthetic oligonucleotide
ucuggccacaaaagugucc

SEQ ID NO: 3239317 - RNA, 19 nt, Artificial Sequence
  Description of Artificial Sequence: Synthetic oligonucleotide
uacaauuugaaccagacgc

SEQ ID NO: 3239318 - RNA, 19 nt, Artificial Sequence
  Description of Artificial Sequence: Synthetic oligonucleotide
uguacuaacuccaucagcu

SEQ ID NO: 3239319 - RNA, 19 nt, Artificial Sequence
  Description of Artificial Sequence: Synthetic oligonucleotide
uuuaggguacgacagggcg

SEQ ID NO: 3239320 - RNA, 19 nt, Artificial Sequence
  Description of Artificial Sequence: Synthetic oligonucleotide
ugugcuucagguuagccag

SEQ ID NO: 3239321 - RNA, 19 nt, Artificial Sequence
  Description of Artificial Sequence: Synthetic oligonucleotide
cugggcuacaauuugaacc

SEQ ID NO: 3239322 - RNA, 19 nt, Artificial Sequence
  Description of Artificial Sequence: Synthetic oligonucleotide
cuucagguuagccagagcc

SEQ ID NO: 3239323 - RNA, 19 nt, Artificial Sequence
  Description of Artificial Sequence: Synthetic oligonucleotide
aaagucugcagccugcucu

SEQ ID NO: 3239324 - RNA, 19 nt, Artificial Sequence
  Description of Artificial Sequence: Synthetic oligonucleotide
augacucugcaucagcacc

SEQ ID NO: 3239325 - RNA, 19 nt, Artificial Sequence
  Description of Artificial Sequence: Synthetic oligonucleotide
acaguccuggaacagcugc

SEQ ID NO: 3239326 - RNA, 19 nt, Artificial Sequence
  Description of Artificial Sequence: Synthetic oligonucleotide
ugggcuacaauuugaacca

SEQ ID NO: 3239327 - RNA, 19 nt, Artificial Sequence
  Description of Artificial Sequence: Synthetic oligonucleotide
ucuuuaggguacgacaggg

SEQ ID NO: 3239328 - RNA, 19 nt, Artificial Sequence
  Description of Artificial Sequence: Synthetic oligonucleotide
aaccagacgcuguacuaac

SEQ ID NO: 3239329 - RNA, 19 nt, Artificial Sequence
  Description of Artificial Sequence: Synthetic oligonucleotide
uuggaggcuguucaucugg

SEQ ID NO: 3239330 - RNA, 19 nt, Artificial Sequence
  Description of Artificial Sequence: Synthetic oligonucleotide
aacuccaucagcuguugcu

SEQ ID NO: 3239331 - RNA, 19 nt, Artificial Sequence
  Description of Artificial Sequence: Synthetic oligonucleotide
ugcagauugugcuucaggu

SEQ ID NO: 3239332 - RNA, 19 nt, Artificial Sequence
  Description of Artificial Sequence: Synthetic oligonucleotide
uugucuuggaggcuguuca

SEQ ID NO: 3239333 - RNA, 19 nt, Artificial Sequence
  Description of Artificial Sequence: Synthetic oligonucleotide
uagcucaugacucugcauc

SEQ ID NO: 3239334 - RNA, 19 nt, Artificial Sequence
  Description of Artificial Sequence: Synthetic oligonucleotide
uacgacagggcgcuggucc

SEQ ID NO: 3239335 - RNA, 19 nt, Artificial Sequence
  Description of Artificial Sequence: Synthetic oligonucleotide
ucaugacucugcaucagca

SEQ ID NO: 3239336 - RNA, 19 nt, Artificial Sequence
  Description of Artificial Sequence: Synthetic oligonucleotide
uuagccagagccccggucu

SEQ ID NO: 3239337 - RNA, 19 nt, Artificial Sequence
  Description of Artificial Sequence: Synthetic oligonucleotide
ugcuuggggagucuuuagg

SEQ ID NO: 3239338 - RNA, 19 nt, Artificial Sequence
  Description of Artificial Sequence: Synthetic oligonucleotide
uacuaacuccaucagcugu

SEQ ID NO: 3239339 - RNA, 19 nt, Artificial Sequence
  Description of Artificial Sequence: Synthetic oligonucleotide
ugugcuuccaaagucugca

SEQ ID NO: 3239340 - RNA, 19 nt, Artificial Sequence
  Description of Artificial Sequence: Synthetic oligonucleotide
ggaauugcugaccagggcc

SEQ ID NO: 3239341 - RNA, 19 nt, Artificial Sequence
  Description of Artificial Sequence: Synthetic oligonucleotide
cuacaauuugaaccagacg

SEQ ID NO: 3239342 - RNA, 19 nt, Artificial Sequence
  Description of Artificial Sequence: Synthetic oligonucleotide
aagucugcagccugcucuc

SEQ ID NO: 3239343 - RNA, 19 nt, Artificial Sequence
  Description of Artificial Sequence: Synthetic oligonucleotide
gaggcuguucaucugggcc

SEQ ID NO: 3239344 - RNA, 19 nt, Artificial Sequence
  Description of Artificial Sequence: Synthetic oligonucleotide
uccuggaacagcugcuugg

SEQ ID NO: 3239345 - RNA, 19 nt, Artificial Sequence
  Description of Artificial Sequence: Synthetic oligonucleotide
uuaggguacgacagggcgc

SEQ ID NO: 3239346 - RNA, 19 nt, Artificial Sequence
  Description of Artificial Sequence: Synthetic oligonucleotide
uucagguuagccagagccc

SEQ ID NO: 3239347 - RNA, 19 nt, Artificial Sequence
  Description of Artificial Sequence: Synthetic oligonucleotide
uggaacagcugcuugggga

SEQ ID NO: 3239348 - RNA, 19 nt, Artificial Sequence
  Description of Artificial Sequence: Synthetic oligonucleotide
gagucuuuaggguacgaca

SEQ ID NO: 3239349 - RNA, 19 nt, Artificial Sequence
  Description of Artificial Sequence: Synthetic oligonucleotide
uugugcuucagguuagcca

SEQ ID NO: 3239350 - RNA, 19 nt, Artificial Sequence
  Description of Artificial Sequence: Synthetic oligonucleotide
ucuuggaggcuguucaucu

SEQ ID NO: 3239351 - RNA, 19 nt, Artificial Sequence
  Description of Artificial Sequence: Synthetic oligonucleotide
gaucucugcacaguccugg

SEQ ID NO: 3239352 - RNA, 19 nt, Artificial Sequence
  Description of Artificial Sequence: Synthetic oligonucleotide
ggucugguggccuaggagg

SEQ ID NO: 3239353 - RNA, 19 nt, Artificial Sequence
  Description of Artificial Sequence: Synthetic oligonucleotide
acucuguagccgcuguagc

SEQ ID NO: 3239354 - RNA, 19 nt, Artificial Sequence
  Description of Artificial Sequence: Synthetic oligonucleotide
guucaucugggccuggugc

SEQ ID NO: 3239355 - RNA, 19 nt, Artificial Sequence
  Description of Artificial Sequence: Synthetic oligonucleotide
uguagcucaugacucugca

SEQ ID NO: 3239356 - RNA, 19 nt, Artificial Sequence
  Description of Artificial Sequence: Synthetic oligonucleotide
agucuuuaggguacgacag

SEQ ID NO: 3239357 - RNA, 19 nt, Artificial Sequence
  Description of Artificial Sequence: Synthetic oligonucleotide
cuggaauugcugaccaggg

SEQ ID NO: 3239358 - RNA, 19 nt, Artificial Sequence
  Description of Artificial Sequence: Synthetic oligonucleotide
ugcuuccaaagucugcagc

SEQ ID NO: 3239359 - RNA, 19 nt, Artificial Sequence
  Description of Artificial Sequence: Synthetic oligonucleotide
uugaaccagacgcuguacu

SEQ ID NO: 3239360 - RNA, 19 nt, Artificial Sequence
  Description of Artificial Sequence: Synthetic oligonucleotide
ucagguuagccagagcccc

SEQ ID NO: 3239361 - RNA, 19 nt, Artificial Sequence
  Description of Artificial Sequence: Synthetic oligonucleotide
ugcugugcuuccaaagucu

SEQ ID NO: 3239362 - RNA, 19 nt, Artificial Sequence
  Description of Artificial Sequence: Synthetic oligonucleotide
ucccucuugucuuggaggc

SEQ ID NO: 3239363 - RNA, 19 nt, Artificial Sequence
  Description of Artificial Sequence: Synthetic oligonucleotide
ugacucugcaucagcaccu

SEQ ID NO: 3239364 - RNA, 19 nt, Artificial Sequence
  Description of Artificial Sequence: Synthetic oligonucleotide
uguugcgacucuguagccg

SEQ ID NO: 3239365 - RNA, 19 nt, Artificial Sequence
  Description of Artificial Sequence: Synthetic oligonucleotide
auugugcuucagguuagcc

SEQ ID NO: 3239366 - RNA, 19 nt, Artificial Sequence
  Description of Artificial Sequence: Synthetic oligonucleotide
uccaaagucugcagccugc

SEQ ID NO: 3239367 - RNA, 19 nt, Artificial Sequence
  Description of Artificial Sequence: Synthetic oligonucleotide
cucccucuugucuuggagg

SEQ ID NO: 3239368 - RNA, 19 nt, Artificial Sequence
  Description of Artificial Sequence: Synthetic oligonucleotide
ucugcacaguccuggaaca

SEQ ID NO: 3239369 - RNA, 19 nt, Artificial Sequence
  Description of Artificial Sequence: Synthetic oligonucleotide
ugcaguugcucccucuugu

SEQ ID NO: 3239370 - RNA, 19 nt, Artificial Sequence
  Description of Artificial Sequence: Synthetic oligonucleotide
guugcgacucuguagccgc

SEQ ID NO: 3239371 - RNA, 19 nt, Artificial Sequence
  Description of Artificial Sequence: Synthetic oligonucleotide
ucuccagugcccuguugcg

SEQ ID NO: 3239372 - RNA, 19 nt, Artificial Sequence
  Description of Artificial Sequence: Synthetic oligonucleotide
cucuccagugcccuguugc

SEQ ID NO: 3239373 - RNA, 19 nt, Artificial Sequence
  Description of Artificial Sequence: Synthetic oligonucleotide
aauuugaaccagacgcugu

SEQ ID NO: 3239374 - RNA, 19 nt, Artificial Sequence
  Description of Artificial Sequence: Synthetic oligonucleotide
uuccaaagucugcagccug

SEQ ID NO: 3239375 - RNA, 19 nt, Artificial Sequence
  Description of Artificial Sequence: Synthetic oligonucleotide
uggaauugcugaccagggc

SEQ ID NO: 3239376 - RNA, 19 nt, Artificial Sequence
  Description of Artificial Sequence: Synthetic oligonucleotide
cucugcacaguccuggaac

SEQ ID NO: 3239377 - RNA, 19 nt, Artificial Sequence
  Description of Artificial Sequence: Synthetic oligonucleotide
cuguacuaacuccaucagc

SEQ ID NO: 3239378 - RNA, 19 nt, Artificial Sequence
  Description of Artificial Sequence: Synthetic oligonucleotide
uggaggcuguucaucuggg

SEQ ID NO: 3239379 - RNA, 19 nt, Artificial Sequence
  Description of Artificial Sequence: Synthetic oligonucleotide
cuuuaggguacgacagggc

SEQ ID NO: 3239380 - RNA, 19 nt, Artificial Sequence
  Description of Artificial Sequence: Synthetic oligonucleotide
cagacgcuguacuaacucc

SEQ ID NO: 3239381 - RNA, 19 nt, Artificial Sequence
  Description of Artificial Sequence: Synthetic oligonucleotide
ugcugcugcagggagcugg

SEQ ID NO: 3239382 - RNA, 19 nt, Artificial Sequence
  Description of Artificial Sequence: Synthetic oligonucleotide
gcuuggggagucuuuaggg

SEQ ID NO: 3239383 - RNA, 19 nt, Artificial Sequence
  Description of Artificial Sequence: Synthetic oligonucleotide
ccuguugcgacucuguagc

SEQ ID NO: 3239384 - RNA, 19 nt, Artificial Sequence
  Description of Artificial Sequence: Synthetic oligonucleotide
uggugcugugcuuccaaag

SEQ ID NO: 3239385 - RNA, 19 nt, Artificial Sequence
  Description of Artificial Sequence: Synthetic oligonucleotide
gucuuuaggguacgacagg

SEQ ID NO: 3239386 - RNA, 19 nt, Artificial Sequence
  Description of Artificial Sequence: Synthetic oligonucleotide
gacucuguagccgcuguag

SEQ ID NO: 3239387 - RNA, 19 nt, Artificial Sequence
  Description of Artificial Sequence: Synthetic oligonucleotide
agggccugcagauugugcu

SEQ ID NO: 3239388 - RNA, 19 nt, Artificial Sequence
  Description of Artificial Sequence: Synthetic oligonucleotide
uaggaggcucugcaguugc

SEQ ID NO: 3239389 - RNA, 19 nt, Artificial Sequence
  Description of Artificial Sequence: Synthetic oligonucleotide
gaggcucugcaguugcucc

SEQ ID NO: 3239390 - RNA, 19 nt, Artificial Sequence
  Description of Artificial Sequence: Synthetic oligonucleotide
uucaucugggccuggugcu

SEQ ID NO: 3239391 - RNA, 19 nt, Artificial Sequence
  Description of Artificial Sequence: Synthetic oligonucleotide
gaccagggccugcagauug

SEQ ID NO: 3239392 - RNA, 19 nt, Artificial Sequence
  Description of Artificial Sequence: Synthetic oligonucleotide
uggggagucuuuaggguac

SEQ ID NO: 3239393 - RNA, 19 nt, Artificial Sequence
  Description of Artificial Sequence: Synthetic oligonucleotide
uguucaucugggccuggug

SEQ ID NO: 3239394 - RNA, 19 nt, Artificial Sequence
  Description of Artificial Sequence: Synthetic oligonucleotide
aggcucugcaguugcuccc

SEQ ID NO: 3239395 - RNA, 19 nt, Artificial Sequence
  Description of Artificial Sequence: Synthetic oligonucleotide
caugacucugcaucagcac

SEQ ID NO: 3239396 - RNA, 19 nt, Artificial Sequence
  Description of Artificial Sequence: Synthetic oligonucleotide
acaauuugaaccagacgcu

SEQ ID NO: 3239397 - RNA, 19 nt, Artificial Sequence
  Description of Artificial Sequence: Synthetic oligonucleotide
gcuuccaaagucugcagcc

SEQ ID NO: 3239398 - RNA, 19 nt, Artificial Sequence
  Description of Artificial Sequence: Synthetic oligonucleotide
aacagcugcuuggggaguc

SEQ ID NO: 3239399 - RNA, 19 nt, Artificial Sequence
  Description of Artificial Sequence: Synthetic oligonucleotide
caauuugaaccagacgcug

SEQ ID NO: 3239400 - RNA, 19 nt, Artificial Sequence
  Description of Artificial Sequence: Synthetic oligonucleotide
ggaacagcugcuuggggag

SEQ ID NO: 3239401 - RNA, 19 nt, Artificial Sequence
  Description of Artificial Sequence: Synthetic oligonucleotide
cucaugacucugcaucagc

SEQ ID NO: 3239402 - RNA, 19 nt, Artificial Sequence
  Description of Artificial Sequence: Synthetic oligonucleotide
auuugaaccagacgcugua

SEQ ID NO: 3239403 - RNA, 19 nt, Artificial Sequence
  Description of Artificial Sequence: Synthetic oligonucleotide
gcuggaauugcugaccagg

SEQ ID NO: 3239404 - RNA, 19 nt, Artificial Sequence
  Description of Artificial Sequence: Synthetic oligonucleotide
agagccccggucugguggc

SEQ ID NO: 3239405 - RNA, 19 nt, Artificial Sequence
  Description of Artificial Sequence: Synthetic oligonucleotide
cugcagauugugcuucagg

SEQ ID NO: 3239406 - RNA, 19 nt, Artificial Sequence
  Description of Artificial Sequence: Synthetic oligonucleotide
uggccuaggaggcucugca

SEQ ID NO: 3239407 - RNA, 19 nt, Artificial Sequence
  Description of Artificial Sequence: Synthetic oligonucleotide
ucugcagccugcucuccag

SEQ ID NO: 3239408 - RNA, 19 nt, Artificial Sequence
  Description of Artificial Sequence: Synthetic oligonucleotide
ugaaccagacgcuguacua

SEQ ID NO: 3239409 - RNA, 19 nt, Artificial Sequence
  Description of Artificial Sequence: Synthetic oligonucleotide
aggcuguucaucugggccu

SEQ ID NO: 3239410 - RNA, 19 nt, Artificial Sequence
  Description of Artificial Sequence: Synthetic oligonucleotide
uuggggagucuuuagggua

SEQ ID NO: 3239411 - RNA, 19 nt, Artificial Sequence
  Description of Artificial Sequence: Synthetic oligonucleotide
agcucaugacucugcauca

SEQ ID NO: 3239412 - RNA, 19 nt, Artificial Sequence
  Description of Artificial Sequence: Synthetic oligonucleotide
ugcugcugcugcugcaggg

SEQ ID NO: 3239413 - RNA, 19 nt, Artificial Sequence
  Description of Artificial Sequence: Synthetic oligonucleotide
uccagugcccuguugcgac

SEQ ID NO: 3239414 - RNA, 19 nt, Artificial Sequence
  Description of Artificial Sequence: Synthetic oligonucleotide
cagauugugcuucagguua

SEQ ID NO: 3239415 - RNA, 19 nt, Artificial Sequence
  Description of Artificial Sequence: Synthetic oligonucleotide
ucuguagccgcuguagcuc

SEQ ID NO: 3239416 - RNA, 19 nt, Artificial Sequence
  Description of Artificial Sequence: Synthetic oligonucleotide
agggagcuggaauugcuga

SEQ ID NO: 3239417 - RNA, 19 nt, Artificial Sequence
  Description of Artificial Sequence: Synthetic oligonucleotide
aacauguagaaguugaagg

SEQ ID NO: 3239418 - RNA, 19 nt, Artificial Sequence
  Description of Artificial Sequence: Synthetic oligonucleotide
aagccuuuuguacauaugc

SEQ ID NO: 3239419 - RNA, 19 nt, Artificial Sequence
  Description of Artificial Sequence: Synthetic oligonucleotide
aagucuuuguuguauauac

SEQ ID NO: 3239420 - RNA, 19 nt, Artificial Sequence
  Description of Artificial Sequence: Synthetic oligonucleotide
uauaccaucaucaguauag

SEQ ID NO: 3239421 - RNA, 19 nt, Artificial Sequence
  Description of Artificial Sequence: Synthetic oligonucleotide
cucauugugguaaugaucc

SEQ ID NO: 3239422 - RNA, 19 nt, Artificial Sequence
  Description of Artificial Sequence: Synthetic oligonucleotide
aauaugaccccuugaaaag

SEQ ID NO: 3239423 - RNA, 19 nt, Artificial Sequence
  Description of Artificial Sequence: Synthetic oligonucleotide
uuuauauucuucaugugga

SEQ ID NO: 3239424 - RNA, 19 nt, Artificial Sequence
  Description of Artificial Sequence: Synthetic oligonucleotide
agaaguugaaggaaaaucc

SEQ ID NO: 3239425 - RNA, 19 nt, Artificial Sequence
  Description of Artificial Sequence: Synthetic oligonucleotide
ucggucuugaauaugaccc

SEQ ID NO: 3239426 - RNA, 19 nt, Artificial Sequence
  Description of Artificial Sequence: Synthetic oligonucleotide
cugucaaugaugaauaggc

SEQ ID NO: 3239427 - RNA, 19 nt, Artificial Sequence
  Description of Artificial Sequence: Synthetic oligonucleotide
uauaugacugucaaugaug

SEQ ID NO: 3239428 - RNA, 19 nt, Artificial Sequence
  Description of Artificial Sequence: Synthetic oligonucleotide
uuauccauauaguaggacc

SEQ ID NO: 3239429 - RNA, 19 nt, Artificial Sequence
  Description of Artificial Sequence: Synthetic oligonucleotide
agggcuuuuaccuugaaug

SEQ ID NO: 3239430 - RNA, 19 nt, Artificial Sequence
  Description of Artificial Sequence: Synthetic oligonucleotide
uuuguuguauauaccauca

SEQ ID NO: 3239431 - RNA, 19 nt, Artificial Sequence
  Description of Artificial Sequence: Synthetic oligonucleotide
ucuuucaucagcaucugug

SEQ ID NO: 3239432 - RNA, 19 nt, Artificial Sequence
  Description of Artificial Sequence: Synthetic oligonucleotide
auauucuucauguggacag

SEQ ID NO: 3239433 - RNA, 19 nt, Artificial Sequence
  Description of Artificial Sequence: Synthetic oligonucleotide
ugaugaauaggcaaucugu

SEQ ID NO: 3239434 - RNA, 19 nt, Artificial Sequence
  Description of Artificial Sequence: Synthetic oligonucleotide
uauccauauaguaggaccc

SEQ ID NO: 3239435 - RNA, 19 nt, Artificial Sequence
  Description of Artificial Sequence: Synthetic oligonucleotide
aucaguauagggcuuuuac

SEQ ID NO: 3239436 - RNA, 19 nt, Artificial Sequence
  Description of Artificial Sequence: Synthetic oligonucleotide
aauauaugacugucaauga

SEQ ID NO: 3239437 - RNA, 19 nt, Artificial Sequence
  Description of Artificial Sequence: Synthetic oligonucleotide
accaucaucaguauagggc

SEQ ID NO: 3239438 - RNA, 19 nt, Artificial Sequence
  Description of Artificial Sequence: Synthetic oligonucleotide
ucauagcugguuacgacgg

SEQ ID NO: 3239439 - RNA, 19 nt, Artificial Sequence
  Description of Artificial Sequence: Synthetic oligonucleotide
uugaauaugaccccuugaa

SEQ ID NO: 3239440 - RNA, 19 nt, Artificial Sequence
  Description of Artificial Sequence: Synthetic oligonucleotide
ugucaaaagucuuuguugu

SEQ ID NO: 3239441 - RNA, 19 nt, Artificial Sequence
  Description of Artificial Sequence: Synthetic oligonucleotide
uuguacauaugccauauau

SEQ ID NO: 3239442 - RNA, 19 nt, Artificial Sequence
  Description of Artificial Sequence: Synthetic oligonucleotide
gaaguugaaggaaaauccg

SEQ ID NO: 3239443 - RNA, 19 nt, Artificial Sequence
  Description of Artificial Sequence: Synthetic oligonucleotide
augguagucucauaaagug

SEQ ID NO: 3239444 - RNA, 19 nt, Artificial Sequence
  Description of Artificial Sequence: Synthetic oligonucleotide
gaauaugaccccuugaaaa

SEQ ID NO: 3239445 - RNA, 19 nt, Artificial Sequence
  Description of Artificial Sequence: Synthetic oligonucleotide
agucucauaaaguguguac

SEQ ID NO: 3239446 - RNA, 19 nt, Artificial Sequence
  Description of Artificial Sequence: Synthetic oligonucleotide
agaugguagucucauaaag

SEQ ID NO: 3239447 - RNA, 19 nt, Artificial Sequence
  Description of Artificial Sequence: Synthetic oligonucleotide
uguggaucuccaaaguugc

SEQ ID NO: 3239448 - RNA, 19 nt, Artificial Sequence
  Description of Artificial Sequence: Synthetic oligonucleotide
ucaaugaugaauaggcaau

SEQ ID NO: 3239449 - RNA, 19 nt, Artificial Sequence
  Description of Artificial Sequence: Synthetic oligonucleotide
cuuucaucagcaucugugg

SEQ ID NO: 3239450 - RNA, 19 nt, Artificial Sequence
  Description of Artificial Sequence: Synthetic oligonucleotide
aaaguuggugccaccaugg

SEQ ID NO: 3239451 - RNA, 19 nt, Artificial Sequence
  Description of Artificial Sequence: Synthetic oligonucleotide
aaguguguacccaaaggac

SEQ ID NO: 3239452 - RNA, 19 nt, Artificial Sequence
  Description of Artificial Sequence: Synthetic oligonucleotide
ucaguauagggcuuuuacc

SEQ ID NO: 3239453 - RNA, 19 nt, Artificial Sequence
  Description of Artificial Sequence: Synthetic oligonucleotide
auuugagaucuucauaugu

SEQ ID NO: 3239454 - RNA, 19 nt, Artificial Sequence
  Description of Artificial Sequence: Synthetic oligonucleotide
ucucauaaaguguguaccc

SEQ ID NO: 3239455 - RNA, 19 nt, Artificial Sequence
  Description of Artificial Sequence: Synthetic oligonucleotide
ucuucauguggacaguggc

SEQ ID NO: 3239456 - RNA, 19 nt, Artificial Sequence
  Description of Artificial Sequence: Synthetic oligonucleotide
aaagaggcggccuccacug

SEQ ID NO: 3239457 - RNA, 19 nt, Artificial Sequence
  Description of Artificial Sequence: Synthetic oligonucleotide
uuguauauaccaucaucag

SEQ ID NO: 3239458 - RNA, 19 nt, Artificial Sequence
  Description of Artificial Sequence: Synthetic oligonucleotide
guugaaggaaaauccgagg

SEQ ID NO: 3239459 - RNA, 19 nt, Artificial Sequence
  Description of Artificial Sequence: Synthetic oligonucleotide
gucauagcugguuacgacg

SEQ ID NO: 3239460 - RNA, 19 nt, Artificial Sequence
  Description of Artificial Sequence: Synthetic oligonucleotide
uccaaaguugcggagagcc

SEQ ID NO: 3239461 - RNA, 19 nt, Artificial Sequence
  Description of Artificial Sequence: Synthetic oligonucleotide
ugagaucuucauauguuug

SEQ ID NO: 3239462 - RNA, 19 nt, Artificial Sequence
  Description of Artificial Sequence: Synthetic oligonucleotide
guuguauauaccaucauca

SEQ ID NO: 3239463 - RNA, 19 nt, Artificial Sequence
  Description of Artificial Sequence: Synthetic oligonucleotide
cugagcuccaccuaugaag

SEQ ID NO: 3239464 - RNA, 19 nt, Artificial Sequence
  Description of Artificial Sequence: Synthetic oligonucleotide
accaugugaagacugagcu

SEQ ID NO: 3239465 - RNA, 19 nt, Artificial Sequence
  Description of Artificial Sequence: Synthetic oligonucleotide
aauccgaggaggaacaucu

SEQ ID NO: 3239466 - RNA, 19 nt, Artificial Sequence
  Description of Artificial Sequence: Synthetic oligonucleotide
aaccaugugaagacugagc

SEQ ID NO: 3239467 - RNA, 19 nt, Artificial Sequence
  Description of Artificial Sequence: Synthetic oligonucleotide
uaugaccccuugaaaagag

SEQ ID NO: 3239468 - RNA, 19 nt, Artificial Sequence
  Description of Artificial Sequence: Synthetic oligonucleotide
gucaugaaauauaugacug

SEQ ID NO: 3239469 - RNA, 19 nt, Artificial Sequence
  Description of Artificial Sequence: Synthetic oligonucleotide
ucugcagucaugagcagcu

SEQ ID NO: 3239470 - RNA, 19 nt, Artificial Sequence
  Description of Artificial Sequence: Synthetic oligonucleotide
uuuaccuugaauggauuug

SEQ ID NO: 3239471 - RNA, 19 nt, Artificial Sequence
  Description of Artificial Sequence: Synthetic oligonucleotide
uuugagaucuucauauguu

SEQ ID NO: 3239472 - RNA, 19 nt, Artificial Sequence
  Description of Artificial Sequence: Synthetic oligonucleotide
gucuuuguuguauauacca

SEQ ID NO: 3239473 - RNA, 19 nt, Artificial Sequence
  Description of Artificial Sequence: Synthetic oligonucleotide
uuuuauccauauaguagga

SEQ ID NO: 3239474 - RNA, 19 nt, Artificial Sequence
  Description of Artificial Sequence: Synthetic oligonucleotide
ugacacuaaagccuuuugu

SEQ ID NO: 3239475 - RNA, 19 nt, Artificial Sequence
  Description of Artificial Sequence: Synthetic oligonucleotide
aaaagucuuuguuguauau

SEQ ID NO: 3239476 - RNA, 19 nt, Artificial Sequence
  Description of Artificial Sequence: Synthetic oligonucleotide
ugacugucaaugaugaaua

SEQ ID NO: 3239477 - RNA, 19 nt, Artificial Sequence
  Description of Artificial Sequence: Synthetic oligonucleotide
uccuauguaguuguugucc

SEQ ID NO: 3239478 - RNA, 19 nt, Artificial Sequence
  Description of Artificial Sequence: Synthetic oligonucleotide
uucuucauguggacagugg

SEQ ID NO: 3239479 - RNA, 19 nt, Artificial Sequence
  Description of Artificial Sequence: Synthetic oligonucleotide
gauaaccaugugaagacug

SEQ ID NO: 3239480 - RNA, 19 nt, Artificial Sequence
  Description of Artificial Sequence: Synthetic oligonucleotide
agucauagcugguuacgac

SEQ ID NO: 3239481 - RNA, 19 nt, Artificial Sequence
  Description of Artificial Sequence: Synthetic oligonucleotide
ucacugaucccucuugaca

SEQ ID NO: 3239482 - RNA, 19 nt, Artificial Sequence
  Description of Artificial Sequence: Synthetic oligonucleotide
gaacauguagaaguugaag

SEQ ID NO: 3239483 - RNA, 19 nt, Artificial Sequence
  Description of Artificial Sequence: Synthetic oligonucleotide
acuccuauguaguuguugu

SEQ ID NO: 3239484 - RNA, 19 nt, Artificial Sequence
  Description of Artificial Sequence: Synthetic oligonucleotide
auuggcuuggcagacuugg

SEQ ID NO: 3239485 - RNA, 19 nt, Artificial Sequence
  Description of Artificial Sequence: Synthetic oligonucleotide
ucuugaauaugaccccuug

SEQ ID NO: 3239486 - RNA, 19 nt, Artificial Sequence
  Description of Artificial Sequence: Synthetic oligonucleotide
cauucagaccaucaucugc

SEQ ID NO: 3239487 - RNA, 19 nt, Artificial Sequence
  Description of Artificial Sequence: Synthetic oligonucleotide
ugaauaugaccccuugaaa

SEQ ID NO: 3239488 - RNA, 19 nt, Artificial Sequence
  Description of Artificial Sequence: Synthetic oligonucleotide
augaugaauaggcaaucug

SEQ ID NO: 3239489 - RNA, 19 nt, Artificial Sequence
  Description of Artificial Sequence: Synthetic oligonucleotide
ccuaugaagccaaaguugg

SEQ ID NO: 3239490 - RNA, 19 nt, Artificial Sequence
  Description of Artificial Sequence: Synthetic oligonucleotide
acugucaaugaugaauagg

SEQ ID NO: 3239491 - RNA, 19 nt, Artificial Sequence
  Description of Artificial Sequence: Synthetic oligonucleotide
ugugguaaugauccaggac

SEQ ID NO: 3239492 - RNA, 19 nt, Artificial Sequence
  Description of Artificial Sequence: Synthetic oligonucleotide
uguacauaugccauauauu

SEQ ID NO: 3239493 - RNA, 19 nt, Artificial Sequence
  Description of Artificial Sequence: Synthetic oligonucleotide
ucacauucagaccaucauc

SEQ ID NO: 3239494 - RNA, 19 nt, Artificial Sequence
  Description of Artificial Sequence: Synthetic oligonucleotide
cagaccaucaucugcaguc

SEQ ID NO: 3239495 - RNA, 19 nt, Artificial Sequence
  Description of Artificial Sequence: Synthetic oligonucleotide
aaugaugaauaggcaaucu

SEQ ID NO: 3239496 - RNA, 19 nt, Artificial Sequence
  Description of Artificial Sequence: Synthetic oligonucleotide
uauauucuucauguggaca

SEQ ID NO: 3239497 - RNA, 19 nt, Artificial Sequence
  Description of Artificial Sequence: Synthetic oligonucleotide
aauggauuugagaucuuca

SEQ ID NO: 3239498 - RNA, 19 nt, Artificial Sequence
  Description of Artificial Sequence: Synthetic oligonucleotide
ucuuuauauucuucaugug

SEQ ID NO: 3239499 - RNA, 19 nt, Artificial Sequence
  Description of Artificial Sequence: Synthetic oligonucleotide
ugucaaugaugaauaggca

SEQ ID NO: 3239500 - RNA, 19 nt, Artificial Sequence
  Description of Artificial Sequence: Synthetic oligonucleotide
aguugaaggaaaauccgag

SEQ ID NO: 3239501 - RNA, 19 nt, Artificial Sequence
  Description of Artificial Sequence: Synthetic oligonucleotide
gauuugagaucuucauaug

SEQ ID NO: 3239502 - RNA, 19 nt, Artificial Sequence
  Description of Artificial Sequence: Synthetic oligonucleotide
uaccaucaucaguauaggg

SEQ ID NO: 3239503 - RNA, 19 nt, Artificial Sequence
  Description of Artificial Sequence: Synthetic oligonucleotide
gacacuaaagccuuuugua

SEQ ID NO: 3239504 - RNA, 19 nt, Artificial Sequence
  Description of Artificial Sequence: Synthetic oligonucleotide
auauaugacugucaaugau

SEQ ID NO: 3239505 - RNA, 19 nt, Artificial Sequence
  Description of Artificial Sequence: Synthetic oligonucleotide
aaugauccaggacuccuau

SEQ ID NO: 3239506 - RNA, 19 nt, Artificial Sequence
  Description of Artificial Sequence: Synthetic oligonucleotide
uuuucaaguggcccuuucu

SEQ ID NO: 3239507 - RNA, 19 nt, Artificial Sequence
  Description of Artificial Sequence: Synthetic oligonucleotide
cacugaucccucuugacac

SEQ ID NO: 3239508 - RNA, 19 nt, Artificial Sequence
  Description of Artificial Sequence: Synthetic oligonucleotide
cuucauguggacaguggcc

SEQ ID NO: 3239509 - RNA, 19 nt, Artificial Sequence
  Description of Artificial Sequence: Synthetic oligonucleotide
gugguaaugauccaggacu

SEQ ID NO: 3239510 - RNA, 19 nt, Artificial Sequence
  Description of Artificial Sequence: Synthetic oligonucleotide
uucauguggacaguggcca

SEQ ID NO: 3239511 - RNA, 19 nt, Artificial Sequence
  Description of Artificial Sequence: Synthetic oligonucleotide
augaauaggcaaucuguca

SEQ ID NO: 3239512 - RNA, 19 nt, Artificial Sequence
  Description of Artificial Sequence: Synthetic oligonucleotide
caucuguggaucuccaaag

SEQ ID NO: 3239513 - RNA, 19 nt, Artificial Sequence
  Description of Artificial Sequence: Synthetic oligonucleotide
uuucaucagcaucugugga

SEQ ID NO: 3239514 - RNA, 19 nt, Artificial Sequence
  Description of Artificial Sequence: Synthetic oligonucleotide
aaauccgaggaggaacauc

SEQ ID NO: 3239515 - RNA, 19 nt, Artificial Sequence
  Description of Artificial Sequence: Synthetic oligonucleotide
uucaaguggcccuuucuca

SEQ ID NO: 3239516 - RNA, 19 nt, Artificial Sequence
  Description of Artificial Sequence: Synthetic oligonucleotide
caaucugucagcagugcac

SEQ ID NO: 3239517 - RNA, 19 nt, Artificial Sequence
  Description of Artificial Sequence: Synthetic oligonucleotide
auuauuauuauuuuagagg

SEQ ID NO: 3239518 - RNA, 19 nt, Artificial Sequence
  Description of Artificial Sequence: Synthetic oligonucleotide
uauuuaaucacauuuagca

SEQ ID NO: 3239519 - RNA, 19 nt, Artificial Sequence
  Description of Artificial Sequence: Synthetic oligonucleotide
aauuauuauuauuuuagag

SEQ ID NO: 3239520 - RNA, 19 nt, Artificial Sequence
  Description of Artificial Sequence: Synthetic oligonucleotide
aaaauucuuagacauguuc

SEQ ID NO: 3239521 - RNA, 19 nt, Artificial Sequence
  Description of Artificial Sequence: Synthetic oligonucleotide
uuauuauuauuuuagaggu

SEQ ID NO: 3239522 - RNA, 19 nt, Artificial Sequence
  Description of Artificial Sequence: Synthetic oligonucleotide
uuuagcaaaauucuuagac

SEQ ID NO: 3239523 - RNA, 19 nt, Artificial Sequence
  Description of Artificial Sequence: Synthetic oligonucleotide
acucuuugagguuauaugc

SEQ ID NO: 3239524 - RNA, 19 nt, Artificial Sequence
  Description of Artificial Sequence: Synthetic oligonucleotide
cagaauaacaguaugguag

SEQ ID NO: 3239525 - RNA, 19 nt, Artificial Sequence
  Description of Artificial Sequence: Synthetic oligonucleotide
auuuuagagguauaggcac

SEQ ID NO: 3239526 - RNA, 19 nt, Artificial Sequence
  Description of Artificial Sequence: Synthetic oligonucleotide
guauauaacagagaggugg

SEQ ID NO: 3239527 - RNA, 19 nt, Artificial Sequence
  Description of Artificial Sequence: Synthetic oligonucleotide
gauaaaauauggucaaucc

SEQ ID NO: 3239528 - RNA, 19 nt, Artificial Sequence
  Description of Artificial Sequence: Synthetic oligonucleotide
auaauuauuauuauuuuag

SEQ ID NO: 3239529 - RNA, 19 nt, Artificial Sequence
  Description of Artificial Sequence: Synthetic oligonucleotide
aaagagucaagaguuaggg

SEQ ID NO: 3239530 - RNA, 19 nt, Artificial Sequence
  Description of Artificial Sequence: Synthetic oligonucleotide
aaacagaaacucuuugagg

SEQ ID NO: 3239531 - RNA, 19 nt, Artificial Sequence
  Description of Artificial Sequence: Synthetic oligonucleotide
aauauggucaauccuucag

SEQ ID NO: 3239532 - RNA, 19 nt, Artificial Sequence
  Description of Artificial Sequence: Synthetic oligonucleotide
aagaguuagggcaugauuc

SEQ ID NO: 3239533 - RNA, 19 nt, Artificial Sequence
  Description of Artificial Sequence: Synthetic oligonucleotide
aauaauuauuauuauuuua

SEQ ID NO: 3239534 - RNA, 19 nt, Artificial Sequence
  Description of Artificial Sequence: Synthetic oligonucleotide
ucucagaauaacaguaugg

SEQ ID NO: 3239535 - RNA, 19 nt, Artificial Sequence
  Description of Artificial Sequence: Synthetic oligonucleotide
aguauuuaaucacauuuag

SEQ ID NO: 3239536 - RNA, 19 nt, Artificial Sequence
  Description of Artificial Sequence: Synthetic oligonucleotide
aagacaugauaaaauaugg

SEQ ID NO: 3239537 - RNA, 19 nt, Artificial Sequence
  Description of Artificial Sequence: Synthetic oligonucleotide
aucacauuuagcaaaauuc

SEQ ID NO: 3239538 - RNA, 19 nt, Artificial Sequence
  Description of Artificial Sequence: Synthetic oligonucleotide
uuuugguuguaacaggaag

SEQ ID NO: 3239539 - RNA, 19 nt, Artificial Sequence
  Description of Artificial Sequence: Synthetic oligonucleotide
gacaugauaaaauaugguc

SEQ ID NO: 3239540 - RNA, 19 nt, Artificial Sequence
  Description of Artificial Sequence: Synthetic oligonucleotide
uaaaauauggucaauccuu

SEQ ID NO: 3239541 - RNA, 19 nt, Artificial Sequence
  Description of Artificial Sequence: Synthetic oligonucleotide
uggcguauauaacagagag

SEQ ID NO: 3239542 - RNA, 19 nt, Artificial Sequence
  Description of Artificial Sequence: Synthetic oligonucleotide
uauauuuuggaguauuuaa

SEQ ID NO: 3239543 - RNA, 19 nt, Artificial Sequence
  Description of Artificial Sequence: Synthetic oligonucleotide
acauuuuagguaucagugc

SEQ ID NO: 3239544 - RNA, 19 nt, Artificial Sequence
  Description of Artificial Sequence: Synthetic oligonucleotide
agagucaagaguuagggca

SEQ ID NO: 3239545 - RNA, 19 nt, Artificial Sequence
  Description of Artificial Sequence: Synthetic oligonucleotide
uuuuguuuguuuuaggcaa

SEQ ID NO: 3239546 - RNA, 19 nt, Artificial Sequence
  Description of Artificial Sequence: Synthetic oligonucleotide
uguggcguauauaacagag

SEQ ID NO: 3239547 - RNA, 19 nt, Artificial Sequence
  Description of Artificial Sequence: Synthetic oligonucleotide
guuauaugccuucaaagag

SEQ ID NO: 3239548 - RNA, 19 nt, Artificial Sequence
  Description of Artificial Sequence: Synthetic oligonucleotide
uauuauuuuagagguauag

SEQ ID NO: 3239549 - RNA, 19 nt, Artificial Sequence
  Description of Artificial Sequence: Synthetic oligonucleotide
aacucuuugagguuauaug

SEQ ID NO: 3239550 - RNA, 19 nt, Artificial Sequence
  Description of Artificial Sequence: Synthetic oligonucleotide
ucacauuuagcaaaauucu

SEQ ID NO: 3239551 - RNA, 19 nt, Artificial Sequence
  Description of Artificial Sequence: Synthetic oligonucleotide
gaagacaugauaaaauaug

SEQ ID NO: 3239552 - RNA, 19 nt, Artificial Sequence
  Description of Artificial Sequence: Synthetic oligonucleotide
aagagucaagaguuagggc

SEQ ID NO: 3239553 - RNA, 19 nt, Artificial Sequence
  Description of Artificial Sequence: Synthetic oligonucleotide
gucuguuugagucacaagc

SEQ ID NO: 3239554 - RNA, 19 nt, Artificial Sequence
  Description of Artificial Sequence: Synthetic oligonucleotide
gacauuuuagguaucagug

SEQ ID NO: 3239555 - RNA, 19 nt, Artificial Sequence
  Description of Artificial Sequence: Synthetic oligonucleotide
acaaccucaccugagaggc

SEQ ID NO: 3239556 - RNA, 19 nt, Artificial Sequence
  Description of Artificial Sequence: Synthetic oligonucleotide
auacuuguugcuuagaaaa

SEQ ID NO: 3239557 - RNA, 19 nt, Artificial Sequence
  Description of Artificial Sequence: Synthetic oligonucleotide
uuugguuguaacaggaaga

SEQ ID NO: 3239558 - RNA, 19 nt, Artificial Sequence
  Description of Artificial Sequence: Synthetic oligonucleotide
aauccuucaggauacucug

SEQ ID NO: 3239559 - RNA, 19 nt, Artificial Sequence
  Description of Artificial Sequence: Synthetic oligonucleotide
uuagcaaaauucuuagaca

SEQ ID NO: 3239560 - RNA, 19 nt, Artificial Sequence
  Description of Artificial Sequence: Synthetic oligonucleotide
uccuaauuuguuuuguuug

SEQ ID NO: 3239561 - RNA, 19 nt, Artificial Sequence
  Description of Artificial Sequence: Synthetic oligonucleotide
cauuuagcaaaauucuuag

SEQ ID NO: 3239562 - RNA, 19 nt, Artificial Sequence
  Description of Artificial Sequence: Synthetic oligonucleotide
ugauucuauauuuuggagu

SEQ ID NO: 3239563 - RNA, 19 nt, Artificial Sequence
  Description of Artificial Sequence: Synthetic oligonucleotide
aaauucuuagacauguucu

SEQ ID NO: 3239564 - RNA, 19 nt, Artificial Sequence
  Description of Artificial Sequence: Synthetic oligonucleotide
uuuuagagguauaggcacg

SEQ ID NO: 3239565 - RNA, 19 nt, Artificial Sequence
  Description of Artificial Sequence: Synthetic oligonucleotide
uuuggaguauuuaaucaca

SEQ ID NO: 3239566 - RNA, 19 nt, Artificial Sequence
  Description of Artificial Sequence: Synthetic oligonucleotide
uaauuauuauuauuuuaga

SEQ ID NO: 3239567 - RNA, 19 nt, Artificial Sequence
  Description of Artificial Sequence: Synthetic oligonucleotide
uuauaugccuucaaagagu

SEQ ID NO: 3239568 - RNA, 19 nt, Artificial Sequence
  Description of Artificial Sequence: Synthetic oligonucleotide
uauuuuggaguauuuaauc

SEQ ID NO: 3239569 - RNA, 19 nt, Artificial Sequence
  Description of Artificial Sequence: Synthetic oligonucleotide
aaaauauggucaauccuuc

SEQ ID NO: 3239570 - RNA, 19 nt, Artificial Sequence
  Description of Artificial Sequence: Synthetic oligonucleotide
auaaaauauggucaauccu

SEQ ID NO: 3239571 - RNA, 19 nt, Artificial Sequence
  Description of Artificial Sequence: Synthetic oligonucleotide
agagauguggcguauauaa

SEQ ID NO: 3239572 - RNA, 19 nt, Artificial Sequence
  Description of Artificial Sequence: Synthetic oligonucleotide
uuuuggaguauuuaaucac

SEQ ID NO: 3239573 - RNA, 19 nt, Artificial Sequence
  Description of Artificial Sequence: Synthetic oligonucleotide
auauggucaauccuucagg

SEQ ID NO: 3239574 - RNA, 19 nt, Artificial Sequence
  Description of Artificial Sequence: Synthetic oligonucleotide
cuugcuaacaggaugucug

SEQ ID NO: 3239575 - RNA, 19 nt, Artificial Sequence
  Description of Artificial Sequence: Synthetic oligonucleotide
uaacaggaagacaugauaa

SEQ ID NO: 3239576 - RNA, 19 nt, Artificial Sequence
  Description of Artificial Sequence: Synthetic oligonucleotide
auuuuggaguauuuaauca

SEQ ID NO: 3239577 - RNA, 19 nt, Artificial Sequence
  Description of Artificial Sequence: Synthetic oligonucleotide
uuauggacauuuuagguau

SEQ ID NO: 3239578 - RNA, 19 nt, Artificial Sequence
  Description of Artificial Sequence: Synthetic oligonucleotide
uaggcacguacucuuaugg

SEQ ID NO: 3239579 - RNA, 19 nt, Artificial Sequence
  Description of Artificial Sequence: Synthetic oligonucleotide
uggaggauauacuuguugc

SEQ ID NO: 3239580 - RNA, 19 nt, Artificial Sequence
  Description of Artificial Sequence: Synthetic oligonucleotide
ucuuauggacauuuuaggu

SEQ ID NO: 3239581 - RNA, 19 nt, Artificial Sequence
  Description of Artificial Sequence: Synthetic oligonucleotide
agguuauaugccuucaaag

SEQ ID NO: 3239582 - RNA, 19 nt, Artificial Sequence
  Description of Artificial Sequence: Synthetic oligonucleotide
auuauuauuuuagagguau

SEQ ID NO: 3239583 - RNA, 19 nt, Artificial Sequence
  Description of Artificial Sequence: Synthetic oligonucleotide
cucuuauggacauuuuagg

SEQ ID NO: 3239584 - RNA, 19 nt, Artificial Sequence
  Description of Artificial Sequence: Synthetic oligonucleotide
uggaauucucagaauaaca

SEQ ID NO: 3239585 - RNA, 19 nt, Artificial Sequence
  Description of Artificial Sequence: Synthetic oligonucleotide
aacaguaugguaguuauua

SEQ ID NO: 3239586 - RNA, 19 nt, Artificial Sequence
  Description of Artificial Sequence: Synthetic oligonucleotide
ugugcaucuugcuaacagg

SEQ ID NO: 3239587 - RNA, 19 nt, Artificial Sequence
  Description of Artificial Sequence: Synthetic oligonucleotide
agauguggcguauauaaca

SEQ ID NO: 3239588 - RNA, 19 nt, Artificial Sequence
  Description of Artificial Sequence: Synthetic oligonucleotide
ugaccagacaaccucaccu

SEQ ID NO: 3239589 - RNA, 19 nt, Artificial Sequence
  Description of Artificial Sequence: Synthetic oligonucleotide
uauauaacagagagguggu

SEQ ID NO: 3239590 - RNA, 19 nt, Artificial Sequence
  Description of Artificial Sequence: Synthetic oligonucleotide
uagcaaaauucuuagacau

SEQ ID NO: 3239591 - RNA, 19 nt, Artificial Sequence
  Description of Artificial Sequence: Synthetic oligonucleotide
cuaagggacuguuuggagg

SEQ ID NO: 3239592 - RNA, 19 nt, Artificial Sequence
  Description of Artificial Sequence: Synthetic oligonucleotide
caaguuagaaucuggggac

SEQ ID NO: 3239593 - RNA, 19 nt, Artificial Sequence
  Description of Artificial Sequence: Synthetic oligonucleotide
uuaaucacauuuagcaaaa

SEQ ID NO: 3239594 - RNA, 19 nt, Artificial Sequence
  Description of Artificial Sequence: Synthetic oligonucleotide
aaucacauuuagcaaaauu

SEQ ID NO: 3239595 - RNA, 19 nt, Artificial Sequence
  Description of Artificial Sequence: Synthetic oligonucleotide
uauuaauaauuauuauuau

SEQ ID NO: 3239596 - RNA, 19 nt, Artificial Sequence
  Description of Artificial Sequence: Synthetic oligonucleotide
ugccaaguuagaaucuggg

SEQ ID NO: 3239597 - RNA, 19 nt, Artificial Sequence
  Description of Artificial Sequence: Synthetic oligonucleotide
ucuguuugagucacaagcu

SEQ ID NO: 3239598 - RNA, 19 nt, Artificial Sequence
  Description of Artificial Sequence: Synthetic oligonucleotide
uguuuggaggauauacuug

SEQ ID NO: 3239599 - RNA, 19 nt, Artificial Sequence
  Description of Artificial Sequence: Synthetic oligonucleotide
aauucucagaauaacagua

SEQ ID NO: 3239600 - RNA, 19 nt, Artificial Sequence
  Description of Artificial Sequence: Synthetic oligonucleotide
uauaugccuucaaagaguc

SEQ ID NO: 3239601 - RNA, 19 nt, Artificial Sequence
  Description of Artificial Sequence: Synthetic oligonucleotide
acaugauaaaauaugguca

SEQ ID NO: 3239602 - RNA, 19 nt, Artificial Sequence
  Description of Artificial Sequence: Synthetic oligonucleotide
uucucagaauaacaguaug

SEQ ID NO: 3239603 - RNA, 19 nt, Artificial Sequence
  Description of Artificial Sequence: Synthetic oligonucleotide
augauucuauauuuuggag

SEQ ID NO: 3239604 - RNA, 19 nt, Artificial Sequence
  Description of Artificial Sequence: Synthetic oligonucleotide
auaacaguaugguaguuau

SEQ ID NO: 3239605 - RNA, 19 nt, Artificial Sequence
  Description of Artificial Sequence: Synthetic oligonucleotide
agaauaacaguaugguagu

SEQ ID NO: 3239606 - RNA, 19 nt, Artificial Sequence
  Description of Artificial Sequence: Synthetic oligonucleotide
ugauaaaauauggucaauc

SEQ ID NO: 3239607 - RNA, 19 nt, Artificial Sequence
  Description of Artificial Sequence: Synthetic oligonucleotide
ucaaagagucaagaguuag

SEQ ID NO: 3239608 - RNA, 19 nt, Artificial Sequence
  Description of Artificial Sequence: Synthetic oligonucleotide
uuggaggauauacuuguug

SEQ ID NO: 3239609 - RNA, 19 nt, Artificial Sequence
  Description of Artificial Sequence: Synthetic oligonucleotide
uagguaucagugcagagau

SEQ ID NO: 3239610 - RNA, 19 nt, Artificial Sequence
  Description of Artificial Sequence: Synthetic oligonucleotide
accugagaggcucagaugu

SEQ ID NO: 3239611 - RNA, 19 nt, Artificial Sequence
  Description of Artificial Sequence: Synthetic oligonucleotide
uauaacagagagguggucu

SEQ ID NO: 3239612 - RNA, 19 nt, Artificial Sequence
  Description of Artificial Sequence: Synthetic oligonucleotide
uaagggacuguuuggagga

SEQ ID NO: 3239613 - RNA, 19 nt, Artificial Sequence
  Description of Artificial Sequence: Synthetic oligonucleotide
uucuggaauucucagaaua

SEQ ID NO: 3239614 - RNA, 19 nt, Artificial Sequence
  Description of Artificial Sequence: Synthetic oligonucleotide
aguuauuauuauuauuaau

SEQ ID NO: 3239615 - RNA, 19 nt, Artificial Sequence
  Description of Artificial Sequence: Synthetic oligonucleotide
uaugccuucaaagagucaa

SEQ ID NO: 3239616 - RNA, 19 nt, Artificial Sequence
  Description of Artificial Sequence: Synthetic oligonucleotide
uauggucaauccuucagga

SEQ ID NO: 3239617 - RNA, 19 nt, Artificial Sequence
  Description of Artificial Sequence: Synthetic oligonucleotide
aacaggaucccacuguccc

SEQ ID NO: 3239618 - RNA, 19 nt, Artificial Sequence
  Description of Artificial Sequence: Synthetic oligonucleotide
ucguuauuaaacaggaucc

SEQ ID NO: 3239619 - RNA, 19 nt, Artificial Sequence
  Description of Artificial Sequence: Synthetic oligonucleotide
uccuuguccacaaugauug

SEQ ID NO: 3239620 - RNA, 19 nt, Artificial Sequence
  Description of Artificial Sequence: Synthetic oligonucleotide
uccacaaugauugaggggc

SEQ ID NO: 3239621 - RNA, 19 nt, Artificial Sequence
  Description of Artificial Sequence: Synthetic oligonucleotide
uugaggggcacauagauga

SEQ ID NO: 3239622 - RNA, 19 nt, Artificial Sequence
  Description of Artificial Sequence: Synthetic oligonucleotide
aacugguugaugaaguugg

SEQ ID NO: 3239623 - RNA, 19 nt, Artificial Sequence
  Description of Artificial Sequence: Synthetic oligonucleotide
uuguccacaaugauugagg

SEQ ID NO: 3239624 - RNA, 19 nt, Artificial Sequence
  Description of Artificial Sequence: Synthetic oligonucleotide
aaugucuuucucuauaguu

SEQ ID NO: 3239625 - RNA, 19 nt, Artificial Sequence
  Description of Artificial Sequence: Synthetic oligonucleotide
uuauuaaacaggaucccac

SEQ ID NO: 3239626 - RNA, 19 nt, Artificial Sequence
  Description of Artificial Sequence: Synthetic oligonucleotide
guugaugauggccagugcg

SEQ ID NO: 3239627 - RNA, 19 nt, Artificial Sequence
  Description of Artificial Sequence: Synthetic oligonucleotide
cucguuauuaaacaggauc

SEQ ID NO: 3239628 - RNA, 19 nt, Artificial Sequence
  Description of Artificial Sequence: Synthetic oligonucleotide
auagccaaaccacagguug

SEQ ID NO: 3239629 - RNA, 19 nt, Artificial Sequence
  Description of Artificial Sequence: Synthetic oligonucleotide
augauugaggggcacauag

SEQ ID NO: 3239630 - RNA, 19 nt, Artificial Sequence
  Description of Artificial Sequence: Synthetic oligonucleotide
ugguugaugaaguugggug

SEQ ID NO: 3239631 - RNA, 19 nt, Artificial Sequence
  Description of Artificial Sequence: Synthetic oligonucleotide
ugugguguugggcaaaagc

SEQ ID NO: 3239632 - RNA, 19 nt, Artificial Sequence
  Description of Artificial Sequence: Synthetic oligonucleotide
uugaugauggccagugcgg

SEQ ID NO: 3239633 - RNA, 19 nt, Artificial Sequence
  Description of Artificial Sequence: Synthetic oligonucleotide
ucuauaguugugguguugg

SEQ ID NO: 3239634 - RNA, 19 nt, Artificial Sequence
  Description of Artificial Sequence: Synthetic oligonucleotide
cacagguuguugaugaugg

SEQ ID NO: 3239635 - RNA, 19 nt, Artificial Sequence
  Description of Artificial Sequence: Synthetic oligonucleotide
caucucguuauuaaacagg

SEQ ID NO: 3239636 - RNA, 19 nt, Artificial Sequence
  Description of Artificial Sequence: Synthetic oligonucleotide
uuaaacaggaucccacugu

SEQ ID NO: 3239637 - RNA, 19 nt, Artificial Sequence
  Description of Artificial Sequence: Synthetic oligonucleotide
uucucuauaguuguggugu

SEQ ID NO: 3239638 - RNA, 19 nt, Artificial Sequence
  Description of Artificial Sequence: Synthetic oligonucleotide
ucuuucucuauaguugugg

SEQ ID NO: 3239639 - RNA, 19 nt, Artificial Sequence
  Description of Artificial Sequence: Synthetic oligonucleotide
ucaaugucuuucucuauag

SEQ ID NO: 3239640 - RNA, 19 nt, Artificial Sequence
  Description of Artificial Sequence: Synthetic oligonucleotide
auaguugugguguugggca

SEQ ID NO: 3239641 - RNA, 19 nt, Artificial Sequence
  Description of Artificial Sequence: Synthetic oligonucleotide
uguccacaaugauugaggg

SEQ ID NO: 3239642 - RNA, 19 nt, Artificial Sequence
  Description of Artificial Sequence: Synthetic oligonucleotide
aaaguggcugcuucccugg

SEQ ID NO: 3239643 - RNA, 19 nt, Artificial Sequence
  Description of Artificial Sequence: Synthetic oligonucleotide
gcugaagucauccaucucg

SEQ ID NO: 3239644 - RNA, 19 nt, Artificial Sequence
  Description of Artificial Sequence: Synthetic oligonucleotide
ucauagccaaaccacaggu

SEQ ID NO: 3239645 - RNA, 19 nt, Artificial Sequence
  Description of Artificial Sequence: Synthetic oligonucleotide
gauguggugaucugcgucc

SEQ ID NO: 3239646 - RNA, 19 nt, Artificial Sequence
  Description of Artificial Sequence: Synthetic oligonucleotide
acauagaugaaaguggcug

SEQ ID NO: 3239647 - RNA, 19 nt, Artificial Sequence
  Description of Artificial Sequence: Synthetic oligonucleotide
aguugggugagcugaaguc

SEQ ID NO: 3239648 - RNA, 19 nt, Artificial Sequence
  Description of Artificial Sequence: Synthetic oligonucleotide
gacugaugaaguuggcugg

SEQ ID NO: 3239649 - RNA, 19 nt, Artificial Sequence
  Description of Artificial Sequence: Synthetic oligonucleotide
aaccacagguuguugauga

SEQ ID NO: 3239650 - RNA, 19 nt, Artificial Sequence
  Description of Artificial Sequence: Synthetic oligonucleotide
aaaagcugguugugcaguc

SEQ ID NO: 3239651 - RNA, 19 nt, Artificial Sequence
  Description of Artificial Sequence: Synthetic oligonucleotide
aagucauccaucucguuau

SEQ ID NO: 3239652 - RNA, 19 nt, Artificial Sequence
  Description of Artificial Sequence: Synthetic oligonucleotide
ugaaguuggcuggugaggg

SEQ ID NO: 3239653 - RNA, 19 nt, Artificial Sequence
  Description of Artificial Sequence: Synthetic oligonucleotide
gaugaaguuggcuggugag

SEQ ID NO: 3239654 - RNA, 19 nt, Artificial Sequence
  Description of Artificial Sequence: Synthetic oligonucleotide
ucuuccacugcucucuuca

SEQ ID NO: 3239655 - RNA, 19 nt, Artificial Sequence
  Description of Artificial Sequence: Synthetic oligonucleotide
cucucuucacgucauagcc

SEQ ID NO: 3239656 - RNA, 19 nt, Artificial Sequence
  Description of Artificial Sequence: Synthetic oligonucleotide
gagaaaggaccuuggagcc

SEQ ID NO: 3239657 - RNA, 19 nt, Artificial Sequence
  Description of Artificial Sequence: Synthetic oligonucleotide
agaugaaaguggcugcuuc

SEQ ID NO: 3239658 - RNA, 19 nt, Artificial Sequence
  Description of Artificial Sequence: Synthetic oligonucleotide
cauagaugaaaguggcugc

SEQ ID NO: 3239659 - RNA, 19 nt, Artificial Sequence
  Description of Artificial Sequence: Synthetic oligonucleotide
uauuaaacaggaucccacu

SEQ ID NO: 3239660 - RNA, 19 nt, Artificial Sequence
  Description of Artificial Sequence: Synthetic oligonucleotide
uccaucucguuauuaaaca

SEQ ID NO: 3239661 - RNA, 19 nt, Artificial Sequence
  Description of Artificial Sequence: Synthetic oligonucleotide
auuaaacaggaucccacug

SEQ ID NO: 3239662 - RNA, 19 nt, Artificial Sequence
  Description of Artificial Sequence: Synthetic oligonucleotide
ugucuuucucuauaguugu

SEQ ID NO: 3239663 - RNA, 19 nt, Artificial Sequence
  Description of Artificial Sequence: Synthetic oligonucleotide
aagcugguugugcagucgg

SEQ ID NO: 3239664 - RNA, 19 nt, Artificial Sequence
  Description of Artificial Sequence: Synthetic oligonucleotide
gaccuuggagccaaaauag

SEQ ID NO: 3239665 - RNA, 19 nt, Artificial Sequence
  Description of Artificial Sequence: Synthetic oligonucleotide
gaugaaaguggcugcuucc

SEQ ID NO: 3239666 - RNA, 19 nt, Artificial Sequence
  Description of Artificial Sequence: Synthetic oligonucleotide
aaacugguugaugaaguug

SEQ ID NO: 3239667 - RNA, 19 nt, Artificial Sequence
  Description of Artificial Sequence: Synthetic oligonucleotide
ucacgucauagccaaacca

SEQ ID NO: 3239668 - RNA, 19 nt, Artificial Sequence
  Description of Artificial Sequence: Synthetic oligonucleotide
acugucccgagaaaggacc

SEQ ID NO: 3239669 - RNA, 19 nt, Artificial Sequence
  Description of Artificial Sequence: Synthetic oligonucleotide
uauaguugugguguugggc

SEQ ID NO: 3239670 - RNA, 19 nt, Artificial Sequence
  Description of Artificial Sequence: Synthetic oligonucleotide
uaaacaggaucccacuguc

SEQ ID NO: 3239671 - RNA, 19 nt, Artificial Sequence
  Description of Artificial Sequence: Synthetic oligonucleotide
ugguguugggcaaaagcug

SEQ ID NO: 3239672 - RNA, 19 nt, Artificial Sequence
  Description of Artificial Sequence: Synthetic oligonucleotide
augaaaguggcugcuuccc

SEQ ID NO: 3239673 - RNA, 19 nt, Artificial Sequence
  Description of Artificial Sequence: Synthetic oligonucleotide
cacgucauagccaaaccac

SEQ ID NO: 3239674 - RNA, 19 nt, Artificial Sequence
  Description of Artificial Sequence: Synthetic oligonucleotide
auccaucucguuauuaaac

SEQ ID NO: 3239675 - RNA, 19 nt, Artificial Sequence
  Description of Artificial Sequence: Synthetic oligonucleotide
ugaugaaguuggcugguga

SEQ ID NO: 3239676 - RNA, 19 nt, Artificial Sequence
  Description of Artificial Sequence: Synthetic oligonucleotide
uuucucuauaguuguggug

SEQ ID NO: 3239677 - RNA, 19 nt, Artificial Sequence
  Description of Artificial Sequence: Synthetic oligonucleotide
aaguugggugagcugaagu

SEQ ID NO: 3239678 - RNA, 19 nt, Artificial Sequence
  Description of Artificial Sequence: Synthetic oligonucleotide
ucauccaucucguuauuaa

SEQ ID NO: 3239679 - RNA, 19 nt, Artificial Sequence
  Description of Artificial Sequence: Synthetic oligonucleotide
gucauagccaaaccacagg

SEQ ID NO: 3239680 - RNA, 19 nt, Artificial Sequence
  Description of Artificial Sequence: Synthetic oligonucleotide
ucugcgucccucccgaggc

SEQ ID NO: 3239681 - RNA, 19 nt, Artificial Sequence
  Description of Artificial Sequence: Synthetic oligonucleotide
ugagcugaagucauccauc

SEQ ID NO: 3239682 - RNA, 19 nt, Artificial Sequence
  Description of Artificial Sequence: Synthetic oligonucleotide
aaacaggaucccacugucc

SEQ ID NO: 3239683 - RNA, 19 nt, Artificial Sequence
  Description of Artificial Sequence: Synthetic oligonucleotide
uuccacugcucucuucacg

SEQ ID NO: 3239684 - RNA, 19 nt, Artificial Sequence
  Description of Artificial Sequence: Synthetic oligonucleotide
ggcacauagaugaaagugg

SEQ ID NO: 3239685 - RNA, 19 nt, Artificial Sequence
  Description of Artificial Sequence: Synthetic oligonucleotide
gaaaguggcugcuucccug

SEQ ID NO: 3239686 - RNA, 19 nt, Artificial Sequence
  Description of Artificial Sequence: Synthetic oligonucleotide
uucacgucauagccaaacc

SEQ ID NO: 3239687 - RNA, 19 nt, Artificial Sequence
  Description of Artificial Sequence: Synthetic oligonucleotide
uugggcaaaagcugguugu

SEQ ID NO: 3239688 - RNA, 19 nt, Artificial Sequence
  Description of Artificial Sequence: Synthetic oligonucleotide
augucuuucucuauaguug

SEQ ID NO: 3239689 - RNA, 19 nt, Artificial Sequence
  Description of Artificial Sequence: Synthetic oligonucleotide
uuguugaugauggccagug

SEQ ID NO: 3239690 - RNA, 19 nt, Artificial Sequence
  Description of Artificial Sequence: Synthetic oligonucleotide
augaaguugggugagcuga

SEQ ID NO: 3239691 - RNA, 19 nt, Artificial Sequence
  Description of Artificial Sequence: Synthetic oligonucleotide
uccacugcucucuucacgu

SEQ ID NO: 3239692 - RNA, 19 nt, Artificial Sequence
  Description of Artificial Sequence: Synthetic oligonucleotide
accccaaacugguugauga

SEQ ID NO: 3239693 - RNA, 19 nt, Artificial Sequence
  Description of Artificial Sequence: Synthetic oligonucleotide
ggacugaugaaguuggcug

SEQ ID NO: 3239694 - RNA, 19 nt, Artificial Sequence
  Description of Artificial Sequence: Synthetic oligonucleotide
ucucuucacgucauagcca

SEQ ID NO: 3239695 - RNA, 19 nt, Artificial Sequence
  Description of Artificial Sequence: Synthetic oligonucleotide
aaagcugguugugcagucg

SEQ ID NO: 3239696 - RNA, 19 nt, Artificial Sequence
  Description of Artificial Sequence: Synthetic oligonucleotide
gaagucauccaucucguua

SEQ ID NO: 3239697 - RNA, 19 nt, Artificial Sequence
  Description of Artificial Sequence: Synthetic oligonucleotide
cgagaaaggaccuuggagc

SEQ ID NO: 3239698 - RNA, 19 nt, Artificial Sequence
  Description of Artificial Sequence: Synthetic oligonucleotide
augauggccagugcggugg

SEQ ID NO: 3239699 - RNA, 19 nt, Artificial Sequence
  Description of Artificial Sequence: Synthetic oligonucleotide
gaugaaguugggugagcug

SEQ ID NO: 3239700 - RNA, 19 nt, Artificial Sequence
  Description of Artificial Sequence: Synthetic oligonucleotide
accagcugcaccuugccgu

SEQ ID NO: 3239701 - RNA, 19 nt, Artificial Sequence
  Description of Artificial Sequence: Synthetic oligonucleotide
ugaucugcgucccucccga

SEQ ID NO: 3239702 - RNA, 19 nt, Artificial Sequence
  Description of Artificial Sequence: Synthetic oligonucleotide
acagguuguugaugauggc

SEQ ID NO: 3239703 - RNA, 19 nt, Artificial Sequence
  Description of Artificial Sequence: Synthetic oligonucleotide
aucucguuauuaaacagga

SEQ ID NO: 3239704 - RNA, 19 nt, Artificial Sequence
  Description of Artificial Sequence: Synthetic oligonucleotide
cagguuguugaugauggcc

SEQ ID NO: 3239705 - RNA, 19 nt, Artificial Sequence
  Description of Artificial Sequence: Synthetic oligonucleotide
cuauaguugugguguuggg

SEQ ID NO: 3239706 - RNA, 19 nt, Artificial Sequence
  Description of Artificial Sequence: Synthetic oligonucleotide
uucccuggacugaugaagu

SEQ ID NO: 3239707 - RNA, 19 nt, Artificial Sequence
  Description of Artificial Sequence: Synthetic oligonucleotide
ugauugaggggcacauaga

SEQ ID NO: 3239708 - RNA, 19 nt, Artificial Sequence
  Description of Artificial Sequence: Synthetic oligonucleotide
augaaguuggcuggugagg

SEQ ID NO: 3239709 - RNA, 19 nt, Artificial Sequence
  Description of Artificial Sequence: Synthetic oligonucleotide
ugcuucccuggacugauga

SEQ ID NO: 3239710 - RNA, 19 nt, Artificial Sequence
  Description of Artificial Sequence: Synthetic oligonucleotide
gaaguuggcuggugagggg

SEQ ID NO: 3239711 - RNA, 19 nt, Artificial Sequence
  Description of Artificial Sequence: Synthetic oligonucleotide
guugggcaaaagcugguug

SEQ ID NO: 3239712 - RNA, 19 nt, Artificial Sequence
  Description of Artificial Sequence: Synthetic oligonucleotide
cuucccuggacugaugaag

SEQ ID NO: 3239713 - RNA, 19 nt, Artificial Sequence
  Description of Artificial Sequence: Synthetic oligonucleotide
ugaugaaguugggugagcu

SEQ ID NO: 3239714 - RNA, 19 nt, Artificial Sequence
  Description of Artificial Sequence: Synthetic oligonucleotide
guuauuaaacaggauccca

SEQ ID NO: 3239715 - RNA, 19 nt, Artificial Sequence
  Description of Artificial Sequence: Synthetic oligonucleotide
guugaugaaguugggugag

SEQ ID NO: 3239716 - RNA, 19 nt, Artificial Sequence
  Description of Artificial Sequence: Synthetic oligonucleotide
cuuguccacaaugauugag

SEQ ID NO: 3239717 - RNA, 19 nt, Artificial Sequence
  Description of Artificial Sequence: Synthetic oligonucleotide
aaauuauuggacucggugc

SEQ ID NO: 3239718 - RNA, 19 nt, Artificial Sequence
  Description of Artificial Sequence: Synthetic oligonucleotide
aauuauuggacucggugcc

SEQ ID NO: 3239719 - RNA, 19 nt, Artificial Sequence
  Description of Artificial Sequence: Synthetic oligonucleotide
aauaucucaccauagagug

SEQ ID NO: 3239720 - RNA, 19 nt, Artificial Sequence
  Description of Artificial Sequence: Synthetic oligonucleotide
auuuauaauguccuuggcc

SEQ ID NO: 3239721 - RNA, 19 nt, Artificial Sequence
  Description of Artificial Sequence: Synthetic oligonucleotide
uuuauaauguccuuggccu

SEQ ID NO: 3239722 - RNA, 19 nt, Artificial Sequence
  Description of Artificial Sequence: Synthetic oligonucleotide
uggauuacuaaauuauugg

SEQ ID NO: 3239723 - RNA, 19 nt, Artificial Sequence
  Description of Artificial Sequence: Synthetic oligonucleotide
uaaauuauuggacucggug

SEQ ID NO: 3239724 - RNA, 19 nt, Artificial Sequence
  Description of Artificial Sequence: Synthetic oligonucleotide
auuacuaaauuauuggacu

SEQ ID NO: 3239725 - RNA, 19 nt, Artificial Sequence
  Description of Artificial Sequence: Synthetic oligonucleotide
gaaauaucucaccauagag

SEQ ID NO: 3239726 - RNA, 19 nt, Artificial Sequence
  Description of Artificial Sequence: Synthetic oligonucleotide
uuguaguccauauagaccu

SEQ ID NO: 3239727 - RNA, 19 nt, Artificial Sequence
  Description of Artificial Sequence: Synthetic oligonucleotide
gaagaugauguccugaggc

SEQ ID NO: 3239728 - RNA, 19 nt, Artificial Sequence
  Description of Artificial Sequence: Synthetic oligonucleotide
cuuccugccacauaggagc

SEQ ID NO: 3239729 - RNA, 19 nt, Artificial Sequence
  Description of Artificial Sequence: Synthetic oligonucleotide
uguuuguggaaauaucuca

SEQ ID NO: 3239730 - RNA, 19 nt, Artificial Sequence
  Description of Artificial Sequence: Synthetic oligonucleotide
auguccuuggccuuccugc

SEQ ID NO: 3239731 - RNA, 19 nt, Artificial Sequence
  Description of Artificial Sequence: Synthetic oligonucleotide
gauuacuaaauuauuggac

SEQ ID NO: 3239732 - RNA, 19 nt, Artificial Sequence
  Description of Artificial Sequence: Synthetic oligonucleotide
ucugucacagccuggauga

SEQ ID NO: 3239733 - RNA, 19 nt, Artificial Sequence
  Description of Artificial Sequence: Synthetic oligonucleotide
uccauauagaccuuccugu

SEQ ID NO: 3239734 - RNA, 19 nt, Artificial Sequence
  Description of Artificial Sequence: Synthetic oligonucleotide
aaauaucucaccauagagu

SEQ ID NO: 3239735 - RNA, 19 nt, Artificial Sequence
  Description of Artificial Sequence: Synthetic oligonucleotide
uacuaaauuauuggacucg

SEQ ID NO: 3239736 - RNA, 19 nt, Artificial Sequence
  Description of Artificial Sequence: Synthetic oligonucleotide
uggaaauaucucaccauag

SEQ ID NO: 3239737 - RNA, 19 nt, Artificial Sequence
  Description of Artificial Sequence: Synthetic oligonucleotide
agaccuuccugucuggugg

SEQ ID NO: 3239738 - RNA, 19 nt, Artificial Sequence
  Description of Artificial Sequence: Synthetic oligonucleotide
uuguggaaauaucucacca

SEQ ID NO: 3239739 - RNA, 19 nt, Artificial Sequence
  Description of Artificial Sequence: Synthetic oligonucleotide
auauagaccuuccugucug

SEQ ID NO: 3239740 - RNA, 19 nt, Artificial Sequence
  Description of Artificial Sequence: Synthetic oligonucleotide
uuuguggaaauaucucacc

SEQ ID NO: 3239741 - RNA, 19 nt, Artificial Sequence
  Description of Artificial Sequence: Synthetic oligonucleotide
agcugcauuuauaaugucc

SEQ ID NO: 3239742 - RNA, 19 nt, Artificial Sequence
  Description of Artificial Sequence: Synthetic oligonucleotide
acuaaauuauuggacucgg

SEQ ID NO: 3239743 - RNA, 19 nt, Artificial Sequence
  Description of Artificial Sequence: Synthetic oligonucleotide
aagaugauguccugaggcu

SEQ ID NO: 3239744 - RNA, 19 nt, Artificial Sequence
  Description of Artificial Sequence: Synthetic oligonucleotide
ugaagaugauguccugagg

SEQ ID NO: 3239745 - RNA, 19 nt, Artificial Sequence
  Description of Artificial Sequence: Synthetic oligonucleotide
uaucucaccauagagugga

SEQ ID NO: 3239746 - RNA, 19 nt, Artificial Sequence
  Description of Artificial Sequence: Synthetic oligonucleotide
ugcauuuauaauguccuug

SEQ ID NO: 3239747 - RNA, 19 nt, Artificial Sequence
  Description of Artificial Sequence: Synthetic oligonucleotide
uuacuaaauuauuggacuc

SEQ ID NO: 3239748 - RNA, 19 nt, Artificial Sequence
  Description of Artificial Sequence: Synthetic oligonucleotide
gcauuuauaauguccuugg

SEQ ID NO: 3239749 - RNA, 19 nt, Artificial Sequence
  Description of Artificial Sequence: Synthetic oligonucleotide
uggccuuccugccacauag

SEQ ID NO: 3239750 - RNA, 19 nt, Artificial Sequence
  Description of Artificial Sequence: Synthetic oligonucleotide
ggcguuguaguccauauag

SEQ ID NO: 3239751 - RNA, 19 nt, Artificial Sequence
  Description of Artificial Sequence: Synthetic oligonucleotide
augacugcaggcuccagag

SEQ ID NO: 3239752 - RNA, 19 nt, Artificial Sequence
  Description of Artificial Sequence: Synthetic oligonucleotide
aucuuggccacgcucuccc

SEQ ID NO: 3239753 - RNA, 19 nt, Artificial Sequence
  Description of Artificial Sequence: Synthetic oligonucleotide
gugaagaugauguccugag

SEQ ID NO: 3239754 - RNA, 19 nt, Artificial Sequence
  Description of Artificial Sequence: Synthetic oligonucleotide
guggauuacuaaauuauug

SEQ ID NO: 3239755 - RNA, 19 nt, Artificial Sequence
  Description of Artificial Sequence: Synthetic oligonucleotide
gauguccugaggcuucccg

SEQ ID NO: 3239756 - RNA, 19 nt, Artificial Sequence
  Description of Artificial Sequence: Synthetic oligonucleotide
uccuucauggccucuguca

SEQ ID NO: 3239757 - RNA, 19 nt, Artificial Sequence
  Description of Artificial Sequence: Synthetic oligonucleotide
auguccugaggcuucccgc

SEQ ID NO: 3239758 - RNA, 19 nt, Artificial Sequence
  Description of Artificial Sequence: Synthetic oligonucleotide
guuguaguccauauagacc

SEQ ID NO: 3239759 - RNA, 19 nt, Artificial Sequence
  Description of Artificial Sequence: Synthetic oligonucleotide
guccauauagaccuuccug

SEQ ID NO: 3239760 - RNA, 19 nt, Artificial Sequence
  Description of Artificial Sequence: Synthetic oligonucleotide
aauguccuuggccuuccug

SEQ ID NO: 3239761 - RNA, 19 nt, Artificial Sequence
  Description of Artificial Sequence: Synthetic oligonucleotide
uucauggccucugucacag

SEQ ID NO: 3239762 - RNA, 19 nt, Artificial Sequence
  Description of Artificial Sequence: Synthetic oligonucleotide
cauagaguggauuacuaaa

SEQ ID NO: 3239763 - RNA, 19 nt, Artificial Sequence
  Description of Artificial Sequence: Synthetic oligonucleotide
uguggaaauaucucaccau

SEQ ID NO: 3239764 - RNA, 19 nt, Artificial Sequence
  Description of Artificial Sequence: Synthetic oligonucleotide
agaguggauuacuaaauua

SEQ ID NO: 3239765 - RNA, 19 nt, Artificial Sequence
  Description of Artificial Sequence: Synthetic oligonucleotide
auuauuggacucggugccc

SEQ ID NO: 3239766 - RNA, 19 nt, Artificial Sequence
  Description of Artificial Sequence: Synthetic oligonucleotide
uauagaccuuccugucugg

SEQ ID NO: 3239767 - RNA, 19 nt, Artificial Sequence
  Description of Artificial Sequence: Synthetic oligonucleotide
ugugguggcguuguagucc

SEQ ID NO: 3239768 - RNA, 19 nt, Artificial Sequence
  Description of Artificial Sequence: Synthetic oligonucleotide
cauuuauaauguccuuggc

SEQ ID NO: 3239769 - RNA, 19 nt, Artificial Sequence
  Description of Artificial Sequence: Synthetic oligonucleotide
uaguccauauagaccuucc

SEQ ID NO: 3239770 - RNA, 19 nt, Artificial Sequence
  Description of Artificial Sequence: Synthetic oligonucleotide
ugaggcuucccgccuauca

SEQ ID NO: 3239771 - RNA, 19 nt, Artificial Sequence
  Description of Artificial Sequence: Synthetic oligonucleotide
cauggccucugucacagcc

SEQ ID NO: 3239772 - RNA, 19 nt, Artificial Sequence
  Description of Artificial Sequence: Synthetic oligonucleotide
ggaagugaagaugaugucc

SEQ ID NO: 3239773 - RNA, 19 nt, Artificial Sequence
  Description of Artificial Sequence: Synthetic oligonucleotide
cuguuuguggaaauaucuc

SEQ ID NO: 3239774 - RNA, 19 nt, Artificial Sequence
  Description of Artificial Sequence: Synthetic oligonucleotide
uaucaucuuggccacgcuc

SEQ ID NO: 3239775 - RNA, 19 nt, Artificial Sequence
  Description of Artificial Sequence: Synthetic oligonucleotide
ggauuacuaaauuauugga

SEQ ID NO: 3239776 - RNA, 19 nt, Artificial Sequence
  Description of Artificial Sequence: Synthetic oligonucleotide
guuuguggaaauaucucac

SEQ ID NO: 3239777 - RNA, 19 nt, Artificial Sequence
  Description of Artificial Sequence: Synthetic oligonucleotide
uucccgccuaucaucuugg

SEQ ID NO: 3239778 - RNA, 19 nt, Artificial Sequence
  Description of Artificial Sequence: Synthetic oligonucleotide
uagaguggauuacuaaauu

SEQ ID NO: 3239779 - RNA, 19 nt, Artificial Sequence
  Description of Artificial Sequence: Synthetic oligonucleotide
auaauguccuuggccuucc

SEQ ID NO: 3239780 - RNA, 19 nt, Artificial Sequence
  Description of Artificial Sequence: Synthetic oligonucleotide
uguccugaggcuucccgcc

SEQ ID NO: 3239781 - RNA, 19 nt, Artificial Sequence
  Description of Artificial Sequence: Synthetic oligonucleotide
aagugaagaugauguccug

SEQ ID NO: 3239782 - RNA, 19 nt, Artificial Sequence
  Description of Artificial Sequence: Synthetic oligonucleotide
agccuggaugacugcaggc

SEQ ID NO: 3239783 - RNA, 19 nt, Artificial Sequence
  Description of Artificial Sequence: Synthetic oligonucleotide
ugcuguuuguggaaauauc

SEQ ID NO: 3239784 - RNA, 19 nt, Artificial Sequence
  Description of Artificial Sequence: Synthetic oligonucleotide
uauaauguccuuggccuuc

SEQ ID NO: 3239785 - RNA, 19 nt, Artificial Sequence
  Description of Artificial Sequence: Synthetic oligonucleotide
gaugacugcaggcuccaga

SEQ ID NO: 3239786 - RNA, 19 nt, Artificial Sequence
  Description of Artificial Sequence: Synthetic oligonucleotide
cucugucacagccuggaug

SEQ ID NO: 3239787 - RNA, 19 nt, Artificial Sequence
  Description of Artificial Sequence: Synthetic oligonucleotide
cuggaugacugcaggcucc

SEQ ID NO: 3239788 - RNA, 19 nt, Artificial Sequence
  Description of Artificial Sequence: Synthetic oligonucleotide
auagaguggauuacuaaau

SEQ ID NO: 3239789 - RNA, 19 nt, Artificial Sequence
  Description of Artificial Sequence: Synthetic oligonucleotide
ucccgagcugcauuuauaa

SEQ ID NO: 3239790 - RNA, 19 nt, Artificial Sequence
  Description of Artificial Sequence: Synthetic oligonucleotide
gaagugaagaugauguccu

SEQ ID NO: 3239791 - RNA, 19 nt, Artificial Sequence
  Description of Artificial Sequence: Synthetic oligonucleotide
uuauuggacucggugcccc

SEQ ID NO: 3239792 - RNA, 19 nt, Artificial Sequence
  Description of Artificial Sequence: Synthetic oligonucleotide
ccgagcugcauuuauaaug

SEQ ID NO: 3239793 - RNA, 19 nt, Artificial Sequence
  Description of Artificial Sequence: Synthetic oligonucleotide
ggaaauaucucaccauaga

SEQ ID NO: 3239794 - RNA, 19 nt, Artificial Sequence
  Description of Artificial Sequence: Synthetic oligonucleotide
uagaccuuccugucuggug

SEQ ID NO: 3239795 - RNA, 19 nt, Artificial Sequence
  Description of Artificial Sequence: Synthetic oligonucleotide
uguccuuggccuuccugcc

SEQ ID NO: 3239796 - RNA, 19 nt, Artificial Sequence
  Description of Artificial Sequence: Synthetic oligonucleotide
gccacauaggagcugcugg

SEQ ID NO: 3239797 - RNA, 19 nt, Artificial Sequence
  Description of Artificial Sequence: Synthetic oligonucleotide
aggcuucccgccuaucauc

SEQ ID NO: 3239798 - RNA, 19 nt, Artificial Sequence
  Description of Artificial Sequence: Synthetic oligonucleotide
agugaagaugauguccuga

SEQ ID NO: 3239799 - RNA, 19 nt, Artificial Sequence
  Description of Artificial Sequence: Synthetic oligonucleotide
guggaaauaucucaccaua

SEQ ID NO: 3239800 - RNA, 19 nt, Artificial Sequence
  Description of Artificial Sequence: Synthetic oligonucleotide
cucaccauagaguggauua

SEQ ID NO: 3239801 - RNA, 19 nt, Artificial Sequence
  Description of Artificial Sequence: Synthetic oligonucleotide
ugacugcaggcuccagagg

SEQ ID NO: 3239802 - RNA, 19 nt, Artificial Sequence
  Description of Artificial Sequence: Synthetic oligonucleotide
aguccauauagaccuuccu

SEQ ID NO: 3239803 - RNA, 19 nt, Artificial Sequence
  Description of Artificial Sequence: Synthetic oligonucleotide
aucaucuuggccacgcucu

SEQ ID NO: 3239804 - RNA, 19 nt, Artificial Sequence
  Description of Artificial Sequence: Synthetic oligonucleotide
gucacagccuggaugacug

SEQ ID NO: 3239805 - RNA, 19 nt, Artificial Sequence
  Description of Artificial Sequence: Synthetic oligonucleotide
gucuggugggcucuccgcg

SEQ ID NO: 3239806 - RNA, 19 nt, Artificial Sequence
  Description of Artificial Sequence: Synthetic oligonucleotide
acauaggagcugcuggggu

SEQ ID NO: 3239807 - RNA, 19 nt, Artificial Sequence
  Description of Artificial Sequence: Synthetic oligonucleotide
uuauaauguccuuggccuu

SEQ ID NO: 3239808 - RNA, 19 nt, Artificial Sequence
  Description of Artificial Sequence: Synthetic oligonucleotide
uggccucugucacagccug

SEQ ID NO: 3239809 - RNA, 19 nt, Artificial Sequence
  Description of Artificial Sequence: Synthetic oligonucleotide
auaucucaccauagagugg

SEQ ID NO: 3239810 - RNA, 19 nt, Artificial Sequence
  Description of Artificial Sequence: Synthetic oligonucleotide
cuucccgccuaucaucuug

SEQ ID NO: 3239811 - RNA, 19 nt, Artificial Sequence
  Description of Artificial Sequence: Synthetic oligonucleotide
cuccgcaccgcguccaucc

SEQ ID NO: 3239812 - RNA, 19 nt, Artificial Sequence
  Description of Artificial Sequence: Synthetic oligonucleotide
cagggucugcuguuugugg

SEQ ID NO: 3239813 - RNA, 19 nt, Artificial Sequence
  Description of Artificial Sequence: Synthetic oligonucleotide
gaugauguccugaggcuuc

SEQ ID NO: 3239814 - RNA, 19 nt, Artificial Sequence
  Description of Artificial Sequence: Synthetic oligonucleotide
uccuuggccuuccugccac

SEQ ID NO: 3239815 - RNA, 19 nt, Artificial Sequence
  Description of Artificial Sequence: Synthetic oligonucleotide
ugucuggugggcucuccgc

SEQ ID NO: 3239816 - RNA, 19 nt, Artificial Sequence
  Description of Artificial Sequence: Synthetic oligonucleotide
gaguggauuacuaaauuau

SEQ ID NO: 3239817 - RNA, 19 nt, Artificial Sequence
  Description of Artificial Sequence: Synthetic oligonucleotide
agcaauaauagacucaggc

SEQ ID NO: 3239818 - RNA, 19 nt, Artificial Sequence
  Description of Artificial Sequence: Synthetic oligonucleotide
aaauuugauagcaacuggc

SEQ ID NO: 3239819 - RNA, 19 nt, Artificial Sequence
  Description of Artificial Sequence: Synthetic oligonucleotide
acaaaagugauuuucaaga

SEQ ID NO: 3239820 - RNA, 19 nt, Artificial Sequence
  Description of Artificial Sequence: Synthetic oligonucleotide
aauccaguuucccauauag

SEQ ID NO: 3239821 - RNA, 19 nt, Artificial Sequence
  Description of Artificial Sequence: Synthetic oligonucleotide
uauacaaugacugagcaac

SEQ ID NO: 3239822 - RNA, 19 nt, Artificial Sequence
  Description of Artificial Sequence: Synthetic oligonucleotide
aacauguaggccuugaaga

SEQ ID NO: 3239823 - RNA, 19 nt, Artificial Sequence
  Description of Artificial Sequence: Synthetic oligonucleotide
uacaaauugacugugaaga

SEQ ID NO: 3239824 - RNA, 19 nt, Artificial Sequence
  Description of Artificial Sequence: Synthetic oligonucleotide
gaaacaguaaucugucucg

SEQ ID NO: 3239825 - RNA, 19 nt, Artificial Sequence
  Description of Artificial Sequence: Synthetic oligonucleotide
ugaagaaagucugaggugg

SEQ ID NO: 3239826 - RNA, 19 nt, Artificial Sequence
  Description of Artificial Sequence: Synthetic oligonucleotide
uaaauuugauagcaacugg

SEQ ID NO: 3239827 - RNA, 19 nt, Artificial Sequence
  Description of Artificial Sequence: Synthetic oligonucleotide
uuauauauugcuuaguguu

SEQ ID NO: 3239828 - RNA, 19 nt, Artificial Sequence
  Description of Artificial Sequence: Synthetic oligonucleotide
uaauauaaauuugauagca

SEQ ID NO: 3239829 - RNA, 19 nt, Artificial Sequence
  Description of Artificial Sequence: Synthetic oligonucleotide
uuaguguggagaauagccg

SEQ ID NO: 3239830 - RNA, 19 nt, Artificial Sequence
  Description of Artificial Sequence: Synthetic oligonucleotide
aaauaucagaccugcaugu

SEQ ID NO: 3239831 - RNA, 19 nt, Artificial Sequence
  Description of Artificial Sequence: Synthetic oligonucleotide
ucuauuuacaaagugauuu

SEQ ID NO: 3239832 - RNA, 19 nt, Artificial Sequence
  Description of Artificial Sequence: Synthetic oligonucleotide
uuuauacaaugacugagca

SEQ ID NO: 3239833 - RNA, 19 nt, Artificial Sequence
  Description of Artificial Sequence: Synthetic oligonucleotide
uaagaaaaccuuuugaauu

SEQ ID NO: 3239834 - RNA, 19 nt, Artificial Sequence
  Description of Artificial Sequence: Synthetic oligonucleotide
uuugggaugaguuugccgu

SEQ ID NO: 3239835 - RNA, 19 nt, Artificial Sequence
  Description of Artificial Sequence: Synthetic oligonucleotide
uacaucuccuuauauauug

SEQ ID NO: 3239836 - RNA, 19 nt, Artificial Sequence
  Description of Artificial Sequence: Synthetic oligonucleotide
uacaaagugauuuggguga

SEQ ID NO: 3239837 - RNA, 19 nt, Artificial Sequence
  Description of Artificial Sequence: Synthetic oligonucleotide
uguuuauacaaugacugag

SEQ ID NO: 3239838 - RNA, 19 nt, Artificial Sequence
  Description of Artificial Sequence: Synthetic oligonucleotide
uuacaaagugauuugggug

SEQ ID NO: 3239839 - RNA, 19 nt, Artificial Sequence
  Description of Artificial Sequence: Synthetic oligonucleotide
aaagucaugagcaaccaug

SEQ ID NO: 3239840 - RNA, 19 nt, Artificial Sequence
  Description of Artificial Sequence: Synthetic oligonucleotide
uuuacaaagugauuugggu

SEQ ID NO: 3239841 - RNA, 19 nt, Artificial Sequence
  Description of Artificial Sequence: Synthetic oligonucleotide
agacccucuauuuacaaag

SEQ ID NO: 3239842 - RNA, 19 nt, Artificial Sequence
  Description of Artificial Sequence: Synthetic oligonucleotide
uauuuacaaagugauuugg

SEQ ID NO: 3239843 - RNA, 19 nt, Artificial Sequence
  Description of Artificial Sequence: Synthetic oligonucleotide
agugauuugggugaaaaug

SEQ ID NO: 3239844 - RNA, 19 nt, Artificial Sequence
  Description of Artificial Sequence: Synthetic oligonucleotide
ugucaucugaaucauuucu

SEQ ID NO: 3239845 - RNA, 19 nt, Artificial Sequence
  Description of Artificial Sequence: Synthetic oligonucleotide
aauagacucaggcaccaca

SEQ ID NO: 3239846 - RNA, 19 nt, Artificial Sequence
  Description of Artificial Sequence: Synthetic oligonucleotide
aaaccuuuugaauuagaaa

SEQ ID NO: 3239847 - RNA, 19 nt, Artificial Sequence
  Description of Artificial Sequence: Synthetic oligonucleotide
uaauauaagaaaaccuuuu

SEQ ID NO: 3239848 - RNA, 19 nt, Artificial Sequence
  Description of Artificial Sequence: Synthetic oligonucleotide
aaccaaacgguccucccuc

SEQ ID NO: 3239849 - RNA, 19 nt, Artificial Sequence
  Description of Artificial Sequence: Synthetic oligonucleotide
uuugauagcaacuggcaau

SEQ ID NO: 3239850 - RNA, 19 nt, Artificial Sequence
  Description of Artificial Sequence: Synthetic oligonucleotide
ugugucguuggucuuuggg

SEQ ID NO: 3239851 - RNA, 19 nt, Artificial Sequence
  Description of Artificial Sequence: Synthetic oligonucleotide
uugacugugaagaggaaaa

SEQ ID NO: 3239852 - RNA, 19 nt, Artificial Sequence
  Description of Artificial Sequence: Synthetic oligonucleotide
aacauaagcaccugagcaa

SEQ ID NO: 3239853 - RNA, 19 nt, Artificial Sequence
  Description of Artificial Sequence: Synthetic oligonucleotide
ugacgguaaagucaugagc

SEQ ID NO: 3239854 - RNA, 19 nt, Artificial Sequence
  Description of Artificial Sequence: Synthetic oligonucleotide
aucccuucaugaccgaugc

SEQ ID NO: 3239855 - RNA, 19 nt, Artificial Sequence
  Description of Artificial Sequence: Synthetic oligonucleotide
aaguaugccaugccaucgg

SEQ ID NO: 3239856 - RNA, 19 nt, Artificial Sequence
  Description of Artificial Sequence: Synthetic oligonucleotide
agagugauuuuauauauua

SEQ ID NO: 3239857 - RNA, 19 nt, Artificial Sequence
  Description of Artificial Sequence: Synthetic oligonucleotide
caaauaucagaccugcaug

SEQ ID NO: 3239858 - RNA, 19 nt, Artificial Sequence
  Description of Artificial Sequence: Synthetic oligonucleotide
uuuggggaaacaguaaucu

SEQ ID NO: 3239859 - RNA, 19 nt, Artificial Sequence
  Description of Artificial Sequence: Synthetic oligonucleotide
agcuguagucucuagcgac

SEQ ID NO: 3239860 - RNA, 19 nt, Artificial Sequence
  Description of Artificial Sequence: Synthetic oligonucleotide
ugaauccaaaccaaacggu

SEQ ID NO: 3239861 - RNA, 19 nt, Artificial Sequence
  Description of Artificial Sequence: Synthetic oligonucleotide
ugccucaacccuuugauga

SEQ ID NO: 3239862 - RNA, 19 nt, Artificial Sequence
  Description of Artificial Sequence: Synthetic oligonucleotide
aaucaggauuugaagaaag

SEQ ID NO: 3239863 - RNA, 19 nt, Artificial Sequence
  Description of Artificial Sequence: Synthetic oligonucleotide
cucaccauguccugaaggg

SEQ ID NO: 3239864 - RNA, 19 nt, Artificial Sequence
  Description of Artificial Sequence: Synthetic oligonucleotide
cuauuuacaaagugauuug

SEQ ID NO: 3239865 - RNA, 19 nt, Artificial Sequence
  Description of Artificial Sequence: Synthetic oligonucleotide
aaucauuucuugcaaggua

SEQ ID NO: 3239866 - RNA, 19 nt, Artificial Sequence
  Description of Artificial Sequence: Synthetic oligonucleotide
cuugcuagcagaaccaguc

SEQ ID NO: 3239867 - RNA, 19 nt, Artificial Sequence
  Description of Artificial Sequence: Synthetic oligonucleotide
gacgguaaagucaugagca

SEQ ID NO: 3239868 - RNA, 19 nt, Artificial Sequence
  Description of Artificial Sequence: Synthetic oligonucleotide
uggagaauagccgaugccc

SEQ ID NO: 3239869 - RNA, 19 nt, Artificial Sequence
  Description of Artificial Sequence: Synthetic oligonucleotide
gaguuugccguguuuauac

SEQ ID NO: 3239870 - RNA, 19 nt, Artificial Sequence
  Description of Artificial Sequence: Synthetic oligonucleotide
ucuccuuauauauugcuua

SEQ ID NO: 3239871 - RNA, 19 nt, Artificial Sequence
  Description of Artificial Sequence: Synthetic oligonucleotide
auuuacaaagugauuuggg

SEQ ID NO: 3239872 - RNA, 19 nt, Artificial Sequence
  Description of Artificial Sequence: Synthetic oligonucleotide
accccaaggguacaucucc

SEQ ID NO: 3239873 - RNA, 19 nt, Artificial Sequence
  Description of Artificial Sequence: Synthetic oligonucleotide
uuugacgguaaagucauga

SEQ ID NO: 3239874 - RNA, 19 nt, Artificial Sequence
  Description of Artificial Sequence: Synthetic oligonucleotide
aacccagagaugaacacag

SEQ ID NO: 3239875 - RNA, 19 nt, Artificial Sequence
  Description of Artificial Sequence: Synthetic oligonucleotide
uguggagaauagccgaugc

SEQ ID NO: 3239876 - RNA, 19 nt, Artificial Sequence
  Description of Artificial Sequence: Synthetic oligonucleotide
acauguaggccuugaagag

SEQ ID NO: 3239877 - RNA, 19 nt, Artificial Sequence
  Description of Artificial Sequence: Synthetic oligonucleotide
ugcacaaacuucuuggcau

SEQ ID NO: 3239878 - RNA, 19 nt, Artificial Sequence
  Description of Artificial Sequence: Synthetic oligonucleotide
uuccccaguaauauaagaa

SEQ ID NO: 3239879 - RNA, 19 nt, Artificial Sequence
  Description of Artificial Sequence: Synthetic oligonucleotide
accacuacaaauugacugu

SEQ ID NO: 3239880 - RNA, 19 nt, Artificial Sequence
  Description of Artificial Sequence: Synthetic oligonucleotide
aauaucagaccugcauguc

SEQ ID NO: 3239881 - RNA, 19 nt, Artificial Sequence
  Description of Artificial Sequence: Synthetic oligonucleotide
guuuauacaaugacugagc

SEQ ID NO: 3239882 - RNA, 19 nt, Artificial Sequence
  Description of Artificial Sequence: Synthetic oligonucleotide
caacccuuugaugauaucc

SEQ ID NO: 3239883 - RNA, 19 nt, Artificial Sequence
  Description of Artificial Sequence: Synthetic oligonucleotide
aauguuggcuggcccuugg

SEQ ID NO: 3239884 - RNA, 19 nt, Artificial Sequence
  Description of Artificial Sequence: Synthetic oligonucleotide
gugaaucccuucaugaccg

SEQ ID NO: 3239885 - RNA, 19 nt, Artificial Sequence
  Description of Artificial Sequence: Synthetic oligonucleotide
auagccgaugccccaaggg

SEQ ID NO: 3239886 - RNA, 19 nt, Artificial Sequence
  Description of Artificial Sequence: Synthetic oligonucleotide
gaggcggaccacaugaugg

SEQ ID NO: 3239887 - RNA, 19 nt, Artificial Sequence
  Description of Artificial Sequence: Synthetic oligonucleotide
uuuggucuuccacacacuc

SEQ ID NO: 3239888 - RNA, 19 nt, Artificial Sequence
  Description of Artificial Sequence: Synthetic oligonucleotide
aaaccaaacgguccucccu

SEQ ID NO: 3239889 - RNA, 19 nt, Artificial Sequence
  Description of Artificial Sequence: Synthetic oligonucleotide
uugacgguaaagucaugag

SEQ ID NO: 3239890 - RNA, 19 nt, Artificial Sequence
  Description of Artificial Sequence: Synthetic oligonucleotide
uuacaaaagugauuuucaa

SEQ ID NO: 3239891 - RNA, 19 nt, Artificial Sequence
  Description of Artificial Sequence: Synthetic oligonucleotide
aagguaggggaggacggcc

SEQ ID NO: 3239892 - RNA, 19 nt, Artificial Sequence
  Description of Artificial Sequence: Synthetic oligonucleotide
aauuccugcuaguguagca

SEQ ID NO: 3239893 - RNA, 19 nt, Artificial Sequence
  Description of Artificial Sequence: Synthetic oligonucleotide
uggacacuaccccaaggag

SEQ ID NO: 3239894 - RNA, 19 nt, Artificial Sequence
  Description of Artificial Sequence: Synthetic oligonucleotide
uccccaguaauauaagaaa

SEQ ID NO: 3239895 - RNA, 19 nt, Artificial Sequence
  Description of Artificial Sequence: Synthetic oligonucleotide
ugauuugggugaaaaugac

SEQ ID NO: 3239896 - RNA, 19 nt, Artificial Sequence
  Description of Artificial Sequence: Synthetic oligonucleotide
uuuuggggaaacaguaauc

SEQ ID NO: 3239897 - RNA, 19 nt, Artificial Sequence
  Description of Artificial Sequence: Synthetic oligonucleotide
gagaccaacagccacccca

SEQ ID NO: 3239898 - RNA, 19 nt, Artificial Sequence
  Description of Artificial Sequence: Synthetic oligonucleotide
ucugccucaacccuuugau

SEQ ID NO: 3239899 - RNA, 19 nt, Artificial Sequence
  Description of Artificial Sequence: Synthetic oligonucleotide
ucguugaggaacucaauuc

SEQ ID NO: 3239900 - RNA, 19 nt, Artificial Sequence
  Description of Artificial Sequence: Synthetic oligonucleotide
gcaagaaacauccagucca

SEQ ID NO: 3239901 - RNA, 19 nt, Artificial Sequence
  Description of Artificial Sequence: Synthetic oligonucleotide
uugaugaauccaaaccaaa

SEQ ID NO: 3239902 - RNA, 19 nt, Artificial Sequence
  Description of Artificial Sequence: Synthetic oligonucleotide
aauuucgagcugccagguc

SEQ ID NO: 3239903 - RNA, 19 nt, Artificial Sequence
  Description of Artificial Sequence: Synthetic oligonucleotide
uguagcaucugaccacuac

SEQ ID NO: 3239904 - RNA, 19 nt, Artificial Sequence
  Description of Artificial Sequence: Synthetic oligonucleotide
auugacagucuucacugca

SEQ ID NO: 3239905 - RNA, 19 nt, Artificial Sequence
  Description of Artificial Sequence: Synthetic oligonucleotide
auagacucaggcaccacac

SEQ ID NO: 3239906 - RNA, 19 nt, Artificial Sequence
  Description of Artificial Sequence: Synthetic oligonucleotide
ugaggaacucaauucguuc

SEQ ID NO: 3239907 - RNA, 19 nt, Artificial Sequence
  Description of Artificial Sequence: Synthetic oligonucleotide
uuuccccaguaauauaaga

SEQ ID NO: 3239908 - RNA, 19 nt, Artificial Sequence
  Description of Artificial Sequence: Synthetic oligonucleotide
uguucucaaaguccaucug

SEQ ID NO: 3239909 - RNA, 19 nt, Artificial Sequence
  Description of Artificial Sequence: Synthetic oligonucleotide
uuauacaaugacugagcaa

SEQ ID NO: 3239910 - RNA, 19 nt, Artificial Sequence
  Description of Artificial Sequence: Synthetic oligonucleotide
agcugagguacacaagcag

SEQ ID NO: 3239911 - RNA, 19 nt, Artificial Sequence
  Description of Artificial Sequence: Synthetic oligonucleotide
aaagacccucuauuuacaa

SEQ ID NO: 3239912 - RNA, 19 nt, Artificial Sequence
  Description of Artificial Sequence: Synthetic oligonucleotide
aguccaucugugucguugg

SEQ ID NO: 3239913 - RNA, 19 nt, Artificial Sequence
  Description of Artificial Sequence: Synthetic oligonucleotide
auuuucaagagugauuuua

SEQ ID NO: 3239914 - RNA, 19 nt, Artificial Sequence
  Description of Artificial Sequence: Synthetic oligonucleotide
agcaccugagcaauaauag

SEQ ID NO: 3239915 - RNA, 19 nt, Artificial Sequence
  Description of Artificial Sequence: Synthetic oligonucleotide
uuugccguguuuauacaau

SEQ ID NO: 3239916 - RNA, 19 nt, Artificial Sequence
  Description of Artificial Sequence: Synthetic oligonucleotide
uccucgucauuccaaaguc

SEQ ID NO: 3239917 - RNA, 19 nt, Artificial Sequence
  Description of Artificial Sequence: Synthetic oligonucleotide
aauguuguggaauagaagg

SEQ ID NO: 3239918 - RNA, 19 nt, Artificial Sequence
  Description of Artificial Sequence: Synthetic oligonucleotide
ucuacaauaguguaaguca

SEQ ID NO: 3239919 - RNA, 19 nt, Artificial Sequence
  Description of Artificial Sequence: Synthetic oligonucleotide
aagcuuaggugugagaucc

SEQ ID NO: 3239920 - RNA, 19 nt, Artificial Sequence
  Description of Artificial Sequence: Synthetic oligonucleotide
aguauccgaaguuaguacc

SEQ ID NO: 3239921 - RNA, 19 nt, Artificial Sequence
  Description of Artificial Sequence: Synthetic oligonucleotide
aauagcagcgucacaagcc

SEQ ID NO: 3239922 - RNA, 19 nt, Artificial Sequence
  Description of Artificial Sequence: Synthetic oligonucleotide
agugcuauugaggauaggc

SEQ ID NO: 3239923 - RNA, 19 nt, Artificial Sequence
  Description of Artificial Sequence: Synthetic oligonucleotide
ugggccaaaaucuauagug

SEQ ID NO: 3239924 - RNA, 19 nt, Artificial Sequence
  Description of Artificial Sequence: Synthetic oligonucleotide
uguugguucuacaauagug

SEQ ID NO: 3239925 - RNA, 19 nt, Artificial Sequence
  Description of Artificial Sequence: Synthetic oligonucleotide
ucuaccaaacagcagaagu

SEQ ID NO: 3239926 - RNA, 19 nt, Artificial Sequence
  Description of Artificial Sequence: Synthetic oligonucleotide
ucuagcuccagcaauguga

SEQ ID NO: 3239927 - RNA, 19 nt, Artificial Sequence
  Description of Artificial Sequence: Synthetic oligonucleotide
ucugagaggaaauagguau

SEQ ID NO: 3239928 - RNA, 19 nt, Artificial Sequence
  Description of Artificial Sequence: Synthetic oligonucleotide
aaaggucaaaggcaaaacu

SEQ ID NO: 3239929 - RNA, 19 nt, Artificial Sequence
  Description of Artificial Sequence: Synthetic oligonucleotide
gaagauucuggucauguug

SEQ ID NO: 3239930 - RNA, 19 nt, Artificial Sequence
  Description of Artificial Sequence: Synthetic oligonucleotide
aacauagcggaagggaccc

SEQ ID NO: 3239931 - RNA, 19 nt, Artificial Sequence
  Description of Artificial Sequence: Synthetic oligonucleotide
auaugggugcaucauaguc

SEQ ID NO: 3239932 - RNA, 19 nt, Artificial Sequence
  Description of Artificial Sequence: Synthetic oligonucleotide
aaacauagcggaagggacc

SEQ ID NO: 3239933 - RNA, 19 nt, Artificial Sequence
  Description of Artificial Sequence: Synthetic oligonucleotide
aaaagcuuaggugugagau

SEQ ID NO: 3239934 - RNA, 19 nt, Artificial Sequence
  Description of Artificial Sequence: Synthetic oligonucleotide
agucagauagguccgguac

SEQ ID NO: 3239935 - RNA, 19 nt, Artificial Sequence
  Description of Artificial Sequence: Synthetic oligonucleotide
uguuguggaauagaaggcg

SEQ ID NO: 3239936 - RNA, 19 nt, Artificial Sequence
  Description of Artificial Sequence: Synthetic oligonucleotide
aaagcuuaggugugagauc

SEQ ID NO: 3239937 - RNA, 19 nt, Artificial Sequence
  Description of Artificial Sequence: Synthetic oligonucleotide
aaguuuggcaagaaaauug

SEQ ID NO: 3239938 - RNA, 19 nt, Artificial Sequence
  Description of Artificial Sequence: Synthetic oligonucleotide
uugccuaacacugaaaugu

SEQ ID NO: 3239939 - RNA, 19 nt, Artificial Sequence
  Description of Artificial Sequence: Synthetic oligonucleotide
guuaguaccuccaugaaac

SEQ ID NO: 3239940 - RNA, 19 nt, Artificial Sequence
  Description of Artificial Sequence: Synthetic oligonucleotide
  modified_base (4)..(4): a, c, u, g, unknown or other
ucgnguuucaaauuccgcu

SEQ ID NO: 3239941 - RNA, 19 nt, Artificial Sequence
  Description of Artificial Sequence: Synthetic oligonucleotide
uaaaguuuggcaagaaaau

SEQ ID NO: 3239942 - RNA, 19 nt, Artificial Sequence
  Description of Artificial Sequence: Synthetic oligonucleotide
uagccuuugauuauuuaug

SEQ ID NO: 3239943 - RNA, 19 nt, Artificial Sequence
  Description of Artificial Sequence: Synthetic oligonucleotide
gaagucuuggcacguauag

SEQ ID NO: 3239944 - RNA, 19 nt, Artificial Sequence
  Description of Artificial Sequence: Synthetic oligonucleotide
auuuccuggaacuugcuga

SEQ ID NO: 3239945 - RNA, 19 nt, Artificial Sequence
  Description of Artificial Sequence: Synthetic oligonucleotide
ugaaccuuguguuucugag

SEQ ID NO: 3239946 - RNA, 19 nt, Artificial Sequence
  Description of Artificial Sequence: Synthetic oligonucleotide
agccuuugauuauuuaugg

SEQ ID NO: 3239947 - RNA, 19 nt, Artificial Sequence
  Description of Artificial Sequence: Synthetic oligonucleotide
gacugccagaaacauagcg

SEQ ID NO: 3239948 - RNA, 19 nt, Artificial Sequence
  Description of Artificial Sequence: Synthetic oligonucleotide
gaaucugucaugcagccga

SEQ ID NO: 3239949 - RNA, 19 nt, Artificial Sequence
  Description of Artificial Sequence: Synthetic oligonucleotide
aaggucaaaggcaaaacug

SEQ ID NO: 3239950 - RNA, 19 nt, Artificial Sequence
  Description of Artificial Sequence: Synthetic oligonucleotide
ucaaauuccgcuccagaac

SEQ ID NO: 3239951 - RNA, 19 nt, Artificial Sequence
  Description of Artificial Sequence: Synthetic oligonucleotide
uccagguucauagucagag

SEQ ID NO: 3239952 - RNA, 19 nt, Artificial Sequence
  Description of Artificial Sequence: Synthetic oligonucleotide
accggcccaaguuaaaccc

SEQ ID NO: 3239953 - RNA, 19 nt, Artificial Sequence
  Description of Artificial Sequence: Synthetic oligonucleotide
cuacaauaguguaagucag

SEQ ID NO: 3239954 - RNA, 19 nt, Artificial Sequence
  Description of Artificial Sequence: Synthetic oligonucleotide
uccacuacgaaggagcgag

SEQ ID NO: 3239955 - RNA, 19 nt, Artificial Sequence
  Description of Artificial Sequence: Synthetic oligonucleotide
aauuuccuggaacuugcug

SEQ ID NO: 3239956 - RNA, 19 nt, Artificial Sequence
  Description of Artificial Sequence: Synthetic oligonucleotide
caagaucucccaaaguacc

SEQ ID NO: 3239957 - RNA, 19 nt, Artificial Sequence
  Description of Artificial Sequence: Synthetic oligonucleotide
uggaacuugcugaugacac

SEQ ID NO: 3239958 - RNA, 19 nt, Artificial Sequence
  Description of Artificial Sequence: Synthetic oligonucleotide
aaaggauccugcccuaugu

SEQ ID NO: 3239959 - RNA, 19 nt, Artificial Sequence
  Description of Artificial Sequence: Synthetic oligonucleotide
gaaauagguauauccccag

SEQ ID NO: 3239960 - RNA, 19 nt, Artificial Sequence
  Description of Artificial Sequence: Synthetic oligonucleotide
uguuugucgaucuaccaaa

SEQ ID NO: 3239961 - RNA, 19 nt, Artificial Sequence
  Description of Artificial Sequence: Synthetic oligonucleotide
  modified_base (17)..(17): a, c, u, g, unknown or other
ugucaaauauaguucgngu

SEQ ID NO: 3239962 - RNA, 19 nt, Artificial Sequence
  Description of Artificial Sequence: Synthetic oligonucleotide
auaguacucagaguucacc

SEQ ID NO: 3239963 - RNA, 19 nt, Artificial Sequence
  Description of Artificial Sequence: Synthetic oligonucleotide
ugguauagagucccuguag

SEQ ID NO: 3239964 - RNA, 19 nt, Artificial Sequence
  Description of Artificial Sequence: Synthetic oligonucleotide
aaaauuggauuuggggcuc

SEQ ID NO: 3239965 - RNA, 19 nt, Artificial Sequence
  Description of Artificial Sequence: Synthetic oligonucleotide
uaggaaagacagcaaauuc

SEQ ID NO: 3239966 - RNA, 19 nt, Artificial Sequence
  Description of Artificial Sequence: Synthetic oligonucleotide
auuguaucuguacuuacau

SEQ ID NO: 3239967 - RNA, 19 nt, Artificial Sequence
  Description of Artificial Sequence: Synthetic oligonucleotide
agagcaagaucucccaaag

SEQ ID NO: 3239968 - RNA, 19 nt, Artificial Sequence
  Description of Artificial Sequence: Synthetic oligonucleotide
uauuuggcacccagaaugc

SEQ ID NO: 3239969 - RNA, 19 nt, Artificial Sequence
  Description of Artificial Sequence: Synthetic oligonucleotide
agcaagaucucccaaagua

SEQ ID NO: 3239970 - RNA, 19 nt, Artificial Sequence
  Description of Artificial Sequence: Synthetic oligonucleotide
uucaaauuccgcuccagaa

SEQ ID NO: 3239971 - RNA, 19 nt, Artificial Sequence
  Description of Artificial Sequence: Synthetic oligonucleotide
  modified_base (8)..(8): a, c, u, g, unknown or other
uaguucgnguuucaaauuc

SEQ ID NO: 3239972 - RNA, 19 nt, Artificial Sequence
  Description of Artificial Sequence: Synthetic oligonucleotide
uugcuagacugccagaaac

SEQ ID NO: 3239973 - RNA, 19 nt, Artificial Sequence
  Description of Artificial Sequence: Synthetic oligonucleotide
uuucagugcccacuuaacu

SEQ ID NO: 3239974 - RNA, 19 nt, Artificial Sequence
  Description of Artificial Sequence: Synthetic oligonucleotide
  modified_base (2)..(2): a, c, u, g, unknown or other
gnguuucaaauuccgcucc

SEQ ID NO: 3239975 - RNA, 19 nt, Artificial Sequence
  Description of Artificial Sequence: Synthetic oligonucleotide
guauagagucccuguaggg

SEQ ID NO: 3239976 - RNA, 19 nt, Artificial Sequence
  Description of Artificial Sequence: Synthetic oligonucleotide
aauuguaucuguacuuaca

SEQ ID NO: 3239977 - RNA, 19 nt, Artificial Sequence
  Description of Artificial Sequence: Synthetic oligonucleotide
uuucaaauuccgcuccaga

SEQ ID NO: 3239978 - RNA, 19 nt, Artificial Sequence
  Description of Artificial Sequence: Synthetic oligonucleotide
guugauccauacuuggccc

SEQ ID NO: 3239979 - RNA, 19 nt, Artificial Sequence
  Description of Artificial Sequence: Synthetic oligonucleotide
uggaauagaaggcgggcca

SEQ ID NO: 3239980 - RNA, 19 nt, Artificial Sequence
  Description of Artificial Sequence: Synthetic oligonucleotide
agauagguccgguacagca

SEQ ID NO: 3239981 - RNA, 19 nt, Artificial Sequence
  Description of Artificial Sequence: Synthetic oligonucleotide
auccgaaguuaguaccucc

SEQ ID NO: 3239982 - RNA, 19 nt, Artificial Sequence
  Description of Artificial Sequence: Synthetic oligonucleotide
gguucuacaauaguguaag

SEQ ID NO: 3239983 - RNA, 19 nt, Artificial Sequence
  Description of Artificial Sequence: Synthetic oligonucleotide
gauuuggggcucaugaggc

SEQ ID NO: 3239984 - RNA, 19 nt, Artificial Sequence
  Description of Artificial Sequence: Synthetic oligonucleotide
auguuguggaauagaaggc

SEQ ID NO: 3239985 - RNA, 19 nt, Artificial Sequence
  Description of Artificial Sequence: Synthetic oligonucleotide
gaaacauagcggaagggac

SEQ ID NO: 3239986 - RNA, 19 nt, Artificial Sequence
  Description of Artificial Sequence: Synthetic oligonucleotide
  modified_base (14)..(14): a, c, u, g, unknown or other
caaauauaguucgnguuuc

SEQ ID NO: 3239987 - RNA, 19 nt, Artificial Sequence
  Description of Artificial Sequence: Synthetic oligonucleotide
cauagucagagguccaagc

SEQ ID NO: 3239988 - RNA, 19 nt, Artificial Sequence
  Description of Artificial Sequence: Synthetic oligonucleotide
auagucagagguccaagcu

SEQ ID NO: 3239989 - RNA, 19 nt, Artificial Sequence
  Description of Artificial Sequence: Synthetic oligonucleotide
aaaguuuggcaagaaaauu

SEQ ID NO: 3239990 - RNA, 19 nt, Artificial Sequence
  Description of Artificial Sequence: Synthetic oligonucleotide
cauaaagccaugguccugc

SEQ ID NO: 3239991 - RNA, 19 nt, Artificial Sequence
  Description of Artificial Sequence: Synthetic oligonucleotide
gcuauugccgaacuggucc

SEQ ID NO: 3239992 - RNA, 19 nt, Artificial Sequence
  Description of Artificial Sequence: Synthetic oligonucleotide
cucgucagcaccauuccag

SEQ ID NO: 3239993 - RNA, 19 nt, Artificial Sequence
  Description of Artificial Sequence: Synthetic oligonucleotide
uacaauaguguaagucaga

SEQ ID NO: 3239994 - RNA, 19 nt, Artificial Sequence
  Description of Artificial Sequence: Synthetic oligonucleotide
uaugucccagauucaagug

SEQ ID NO: 3239995 - RNA, 19 nt, Artificial Sequence
  Description of Artificial Sequence: Synthetic oligonucleotide
cacuuaacuccauugguuc

SEQ ID NO: 3239996 - RNA, 19 nt, Artificial Sequence
  Description of Artificial Sequence: Synthetic oligonucleotide
uuugucgaucuaccaaaca

SEQ ID NO: 3239997 - RNA, 19 nt, Artificial Sequence
  Description of Artificial Sequence: Synthetic oligonucleotide
gauacagaaauguguccca

SEQ ID NO: 3239998 - RNA, 19 nt, Artificial Sequence
  Description of Artificial Sequence: Synthetic oligonucleotide
uaccaaacagcagaagucu

SEQ ID NO: 3239999 - RNA, 19 nt, Artificial Sequence
  Description of Artificial Sequence: Synthetic oligonucleotide
ucaaaggucaaaggcaaaa

SEQ ID NO: 3240000 - RNA, 19 nt, Artificial Sequence
  Description of Artificial Sequence: Synthetic oligonucleotide
aagucuuggcacguauagg

SEQ ID NO: 3240001 - RNA, 19 nt, Artificial Sequence
  Description of Artificial Sequence: Synthetic oligonucleotide
cuauauccagcuuggcccc

SEQ ID NO: 3240002 - RNA, 19 nt, Artificial Sequence
  Description of Artificial Sequence: Synthetic oligonucleotide
auggagugauucuggcccc

SEQ ID NO: 3240003 - RNA, 19 nt, Artificial Sequence
  Description of Artificial Sequence: Synthetic oligonucleotide
cauguugucagcugggcca

SEQ ID NO: 3240004 - RNA, 19 nt, Artificial Sequence
  Description of Artificial Sequence: Synthetic oligonucleotide
agccgauccacuacgaagg

SEQ ID NO: 3240005 - RNA, 19 nt, Artificial Sequence
  Description of Artificial Sequence: Synthetic oligonucleotide
acagccucaaaggucaaag

SEQ ID NO: 3240006 - RNA, 19 nt, Artificial Sequence
  Description of Artificial Sequence: Synthetic oligonucleotide
aaagugcuauugaggauag

SEQ ID NO: 3240007 - RNA, 19 nt, Artificial Sequence
  Description of Artificial Sequence: Synthetic oligonucleotide
aguuaguaccuccaugaaa

SEQ ID NO: 3240008 - RNA, 19 nt, Artificial Sequence
  Description of Artificial Sequence: Synthetic oligonucleotide
gaagggaccccguucagga

SEQ ID NO: 3240009 - RNA, 19 nt, Artificial Sequence
  Description of Artificial Sequence: Synthetic oligonucleotide
caauagcagcgucacaagc

SEQ ID NO: 3240010 - RNA, 19 nt, Artificial Sequence
  Description of Artificial Sequence: Synthetic oligonucleotide
cucagaguucaccaauggc

SEQ ID NO: 3240011 - RNA, 19 nt, Artificial Sequence
  Description of Artificial Sequence: Synthetic oligonucleotide
ugguucuacaauaguguaa

SEQ ID NO: 3240012 - RNA, 19 nt, Artificial Sequence
  Description of Artificial Sequence: Synthetic oligonucleotide
gugcuauugaggauaggcg

SEQ ID NO: 3240013 - RNA, 19 nt, Artificial Sequence
  Description of Artificial Sequence: Synthetic oligonucleotide
aaaguacccgcgguacgcg

SEQ ID NO: 3240014 - RNA, 19 nt, Artificial Sequence
  Description of Artificial Sequence: Synthetic oligonucleotide
uuuucuaguccuugggcua

SEQ ID NO: 3240015 - RNA, 19 nt, Artificial Sequence
  Description of Artificial Sequence: Synthetic oligonucleotide
aagcuugaggcugugcucu

SEQ ID NO: 3240016 - RNA, 19 nt, Artificial Sequence
  Description of Artificial Sequence: Synthetic oligonucleotide
caguaguccagccagccug

SEQ ID NO: 3240017 - RNA, 19 nt, Artificial Sequence
  Description of Artificial Sequence: Synthetic oligonucleotide
aaaaccuugaguucuaugg

SEQ ID NO: 3240018 - RNA, 19 nt, Artificial Sequence
  Description of Artificial Sequence: Synthetic oligonucleotide
aauucuuucaggucagggc

SEQ ID NO: 3240019 - RNA, 19 nt, Artificial Sequence
  Description of Artificial Sequence: Synthetic oligonucleotide
auauucgugguauagcccc

SEQ ID NO: 3240020 - RNA, 19 nt, Artificial Sequence
  Description of Artificial Sequence: Synthetic oligonucleotide
agaaauuucuuacuguuuc

SEQ ID NO: 3240021 - RNA, 19 nt, Artificial Sequence
  Description of Artificial Sequence: Synthetic oligonucleotide
acaaccuuggcucaucucc

SEQ ID NO: 3240022 - RNA, 19 nt, Artificial Sequence
  Description of Artificial Sequence: Synthetic oligonucleotide
gauagaaacuggcagaagc

SEQ ID NO: 3240023 - RNA, 19 nt, Artificial Sequence
  Description of Artificial Sequence: Synthetic oligonucleotide
agaggaguucauuuuaugc

SEQ ID NO: 3240024 - RNA, 19 nt, Artificial Sequence
  Description of Artificial Sequence: Synthetic oligonucleotide
acucuuagaaauuucuuac

SEQ ID NO: 3240025 - RNA, 19 nt, Artificial Sequence
  Description of Artificial Sequence: Synthetic oligonucleotide
acauuuaaaaucuguguuc

SEQ ID NO: 3240026 - RNA, 19 nt, Artificial Sequence
  Description of Artificial Sequence: Synthetic oligonucleotide
gaauauucgugguauagcc

SEQ ID NO: 3240027 - RNA, 19 nt, Artificial Sequence
  Description of Artificial Sequence: Synthetic oligonucleotide
caaugcaucuguaauagcc

SEQ ID NO: 3240028 - RNA, 19 nt, Artificial Sequence
  Description of Artificial Sequence: Synthetic oligonucleotide
gucagaaaaggauagaaac

SEQ ID NO: 3240029 - RNA, 19 nt, Artificial Sequence
  Description of Artificial Sequence: Synthetic oligonucleotide
aaccuugaguucuauggac

SEQ ID NO: 3240030 - RNA, 19 nt, Artificial Sequence
  Description of Artificial Sequence: Synthetic oligonucleotide
cauauaguucucaugauuc

SEQ ID NO: 3240031 - RNA, 19 nt, Artificial Sequence
  Description of Artificial Sequence: Synthetic oligonucleotide
uuucuauccaaaaggccgg

SEQ ID NO: 3240032 - RNA, 19 nt, Artificial Sequence
  Description of Artificial Sequence: Synthetic oligonucleotide
gaggaguucauuuuaugcc

SEQ ID NO: 3240033 - RNA, 19 nt, Artificial Sequence
  Description of Artificial Sequence: Synthetic oligonucleotide
aaggccggagcccuuauac

SEQ ID NO: 3240034 - RNA, 19 nt, Artificial Sequence
  Description of Artificial Sequence: Synthetic oligonucleotide
aauauucgugguauagccc

SEQ ID NO: 3240035 - RNA, 19 nt, Artificial Sequence
  Description of Artificial Sequence: Synthetic oligonucleotide
aaugcaucuguaauagccg

SEQ ID NO: 3240036 - RNA, 19 nt, Artificial Sequence
  Description of Artificial Sequence: Synthetic oligonucleotide
aguuuaauauuccuaguga

SEQ ID NO: 3240037 - RNA, 19 nt, Artificial Sequence
  Description of Artificial Sequence: Synthetic oligonucleotide
uauccaaaaggccggagcc

SEQ ID NO: 3240038 - RNA, 19 nt, Artificial Sequence
  Description of Artificial Sequence: Synthetic oligonucleotide
ucagauuugaagucucugc

SEQ ID NO: 3240039 - RNA, 19 nt, Artificial Sequence
  Description of Artificial Sequence: Synthetic oligonucleotide
gauguuguauuccuugccc

SEQ ID NO: 3240040 - RNA, 19 nt, Artificial Sequence
  Description of Artificial Sequence: Synthetic oligonucleotide
aaugucgcaaugcaucugu

SEQ ID NO: 3240041 - RNA, 19 nt, Artificial Sequence
  Description of Artificial Sequence: Synthetic oligonucleotide
gacagaugagauuugcgag

SEQ ID NO: 3240042 - RNA, 19 nt, Artificial Sequence
  Description of Artificial Sequence: Synthetic oligonucleotide
acagguucgccuuccagcc

SEQ ID NO: 3240043 - RNA, 19 nt, Artificial Sequence
  Description of Artificial Sequence: Synthetic oligonucleotide
cacacaaugguguuggaag

SEQ ID NO: 3240044 - RNA, 19 nt, Artificial Sequence
  Description of Artificial Sequence: Synthetic oligonucleotide
uacuguuucuauccaaaag

SEQ ID NO: 3240045 - RNA, 19 nt, Artificial Sequence
  Description of Artificial Sequence: Synthetic oligonucleotide
agaugcaucaguucccagg

SEQ ID NO: 3240046 - RNA, 19 nt, Artificial Sequence
  Description of Artificial Sequence: Synthetic oligonucleotide
uguguuggcuaucaguaug

SEQ ID NO: 3240047 - RNA, 19 nt, Artificial Sequence
  Description of Artificial Sequence: Synthetic oligonucleotide
uguuucuauccaaaaggcc

SEQ ID NO: 3240048 - RNA, 19 nt, Artificial Sequence
  Description of Artificial Sequence: Synthetic oligonucleotide
uuagaaauuucuuacuguu

SEQ ID NO: 3240049 - RNA, 19 nt, Artificial Sequence
  Description of Artificial Sequence: Synthetic oligonucleotide
ucugaaugaggccacuuca

SEQ ID NO: 3240050 - RNA, 19 nt, Artificial Sequence
  Description of Artificial Sequence: Synthetic oligonucleotide
ugugcuguuagccauccac

SEQ ID NO: 3240051 - RNA, 19 nt, Artificial Sequence
  Description of Artificial Sequence: Synthetic oligonucleotide
gacacuuccauauaguucu

SEQ ID NO: 3240052 - RNA, 19 nt, Artificial Sequence
  Description of Artificial Sequence: Synthetic oligonucleotide
ucauuuuaugccaggucag

SEQ ID NO: 3240053 - RNA, 19 nt, Artificial Sequence
  Description of Artificial Sequence: Synthetic oligonucleotide
acggagauuaaauugugcu

SEQ ID NO: 3240054 - RNA, 19 nt, Artificial Sequence
  Description of Artificial Sequence: Synthetic oligonucleotide
aaaccuugaguucuaugga

SEQ ID NO: 3240055 - RNA, 19 nt, Artificial Sequence
  Description of Artificial Sequence: Synthetic oligonucleotide
ucuuggguaggccacggag

SEQ ID NO: 3240056 - RNA, 19 nt, Artificial Sequence
  Description of Artificial Sequence: Synthetic oligonucleotide
uaggggagaaauaaucaca

SEQ ID NO: 3240057 - RNA, 19 nt, Artificial Sequence
  Description of Artificial Sequence: Synthetic oligonucleotide
uugcacgggacuaucagcc

SEQ ID NO: 3240058 - RNA, 19 nt, Artificial Sequence
  Description of Artificial Sequence: Synthetic oligonucleotide
uccuccauggauguguugg

SEQ ID NO: 3240059 - RNA, 19 nt, Artificial Sequence
  Description of Artificial Sequence: Synthetic oligonucleotide
aucagugacacuuccauau

SEQ ID NO: 3240060 - RNA, 19 nt, Artificial Sequence
  Description of Artificial Sequence: Synthetic oligonucleotide
caugauucucugaauauuc

SEQ ID NO: 3240061 - RNA, 19 nt, Artificial Sequence
  Description of Artificial Sequence: Synthetic oligonucleotide
aggguggcauccuucaccc

SEQ ID NO: 3240062 - RNA, 19 nt, Artificial Sequence
  Description of Artificial Sequence: Synthetic oligonucleotide
aaucacagggaugguuucc

SEQ ID NO: 3240063 - RNA, 19 nt, Artificial Sequence
  Description of Artificial Sequence: Synthetic oligonucleotide
aguccuucugcacugcagg

SEQ ID NO: 3240064 - RNA, 19 nt, Artificial Sequence
  Description of Artificial Sequence: Synthetic oligonucleotide
agugacugaacacuccuug

SEQ ID NO: 3240065 - RNA, 19 nt, Artificial Sequence
  Description of Artificial Sequence: Synthetic oligonucleotide
uauggagugacugaacacu

SEQ ID NO: 3240066 - RNA, 19 nt, Artificial Sequence
  Description of Artificial Sequence: Synthetic oligonucleotide
aaaaggauagaaacuggca

SEQ ID NO: 3240067 - RNA, 19 nt, Artificial Sequence
  Description of Artificial Sequence: Synthetic oligonucleotide
uucagagggcaccucagag

SEQ ID NO: 3240068 - RNA, 19 nt, Artificial Sequence
  Description of Artificial Sequence: Synthetic oligonucleotide
gcauccuucacccacaacc

SEQ ID NO: 3240069 - RNA, 19 nt, Artificial Sequence
  Description of Artificial Sequence: Synthetic oligonucleotide
ucucaugauucucugaaua

SEQ ID NO: 3240070 - RNA, 19 nt, Artificial Sequence
  Description of Artificial Sequence: Synthetic oligonucleotide
ucacccacaaccuuggcuc

SEQ ID NO: 3240071 - RNA, 19 nt, Artificial Sequence
  Description of Artificial Sequence: Synthetic oligonucleotide
gcgaguaggagauaagugg

SEQ ID NO: 3240072 - RNA, 19 nt, Artificial Sequence
  Description of Artificial Sequence: Synthetic oligonucleotide
uauggacauuuccucacag

SEQ ID NO: 3240073 - RNA, 19 nt, Artificial Sequence
  Description of Artificial Sequence: Synthetic oligonucleotide
ugaauauucgugguauagc

SEQ ID NO: 3240074 - RNA, 19 nt, Artificial Sequence
  Description of Artificial Sequence: Synthetic oligonucleotide
ugcgaguaggagauaagug

SEQ ID NO: 3240075 - RNA, 19 nt, Artificial Sequence
  Description of Artificial Sequence: Synthetic oligonucleotide
gaugcauuucugaaugugc

SEQ ID NO: 3240076 - RNA, 19 nt, Artificial Sequence
  Description of Artificial Sequence: Synthetic oligonucleotide
ggacuaucagccuugaccc

SEQ ID NO: 3240077 - RNA, 19 nt, Artificial Sequence
  Description of Artificial Sequence: Synthetic oligonucleotide
cugguauugucucuagggg

SEQ ID NO: 3240078 - RNA, 19 nt, Artificial Sequence
  Description of Artificial Sequence: Synthetic oligonucleotide
gaauucuuucaggucaggg

SEQ ID NO: 3240079 - RNA, 19 nt, Artificial Sequence
  Description of Artificial Sequence: Synthetic oligonucleotide
ugcaucaguucccaggaac

SEQ ID NO: 3240080 - RNA, 19 nt, Artificial Sequence
  Description of Artificial Sequence: Synthetic oligonucleotide
ugcaaauguagguaccaga

SEQ ID NO: 3240081 - RNA, 19 nt, Artificial Sequence
  Description of Artificial Sequence: Synthetic oligonucleotide
ugguauugucucuagggga

SEQ ID NO: 3240082 - RNA, 19 nt, Artificial Sequence
  Description of Artificial Sequence: Synthetic oligonucleotide
cugaauucagauuugaagu

SEQ ID NO: 3240083 - RNA, 19 nt, Artificial Sequence
  Description of Artificial Sequence: Synthetic oligonucleotide
ugauucucugaauauucgu

SEQ ID NO: 3240084 - RNA, 19 nt, Artificial Sequence
  Description of Artificial Sequence: Synthetic oligonucleotide
gaugcaucaguucccagga

SEQ ID NO: 3240085 - RNA, 19 nt, Artificial Sequence
  Description of Artificial Sequence: Synthetic oligonucleotide
uuuguuggggaugaauucu

SEQ ID NO: 3240086 - RNA, 19 nt, Artificial Sequence
  Description of Artificial Sequence: Synthetic oligonucleotide
ugaaugaggccacuucaga

SEQ ID NO: 3240087 - RNA, 19 nt, Artificial Sequence
  Description of Artificial Sequence: Synthetic oligonucleotide
cuauccaaaaggccggagc

SEQ ID NO: 3240088 - RNA, 19 nt, Artificial Sequence
  Description of Artificial Sequence: Synthetic oligonucleotide
uccuucacccacaaccuug

SEQ ID NO: 3240089 - RNA, 19 nt, Artificial Sequence
  Description of Artificial Sequence: Synthetic oligonucleotide
cucuaggggagaaauaauc

SEQ ID NO: 3240090 - RNA, 19 nt, Artificial Sequence
  Description of Artificial Sequence: Synthetic oligonucleotide
acagaugagauuugcgagu

SEQ ID NO: 3240091 - RNA, 19 nt, Artificial Sequence
  Description of Artificial Sequence: Synthetic oligonucleotide
agugagaugcauuucugaa

SEQ ID NO: 3240092 - RNA, 19 nt, Artificial Sequence
  Description of Artificial Sequence: Synthetic oligonucleotide
aacccagaggguggcaucc

SEQ ID NO: 3240093 - RNA, 19 nt, Artificial Sequence
  Description of Artificial Sequence: Synthetic oligonucleotide
ugguauagccccucgguca

SEQ ID NO: 3240094 - RNA, 19 nt, Artificial Sequence
  Description of Artificial Sequence: Synthetic oligonucleotide
accacugcaccuuuccauc

SEQ ID NO: 3240095 - RNA, 19 nt, Artificial Sequence
  Description of Artificial Sequence: Synthetic oligonucleotide
ucuugugacuggaucaaaa

SEQ ID NO: 3240096 - RNA, 19 nt, Artificial Sequence
  Description of Artificial Sequence: Synthetic oligonucleotide
aauaaucacagggaugguu

SEQ ID NO: 3240097 - RNA, 19 nt, Artificial Sequence
  Description of Artificial Sequence: Synthetic oligonucleotide
auauaguucucaugauucu

SEQ ID NO: 3240098 - RNA, 19 nt, Artificial Sequence
  Description of Artificial Sequence: Synthetic oligonucleotide
agauuugaagucucugcca

SEQ ID NO: 3240099 - RNA, 19 nt, Artificial Sequence
  Description of Artificial Sequence: Synthetic oligonucleotide
aguaugugugucccgucuc

SEQ ID NO: 3240100 - RNA, 19 nt, Artificial Sequence
  Description of Artificial Sequence: Synthetic oligonucleotide
uucgacacggaguuuaaua

SEQ ID NO: 3240101 - RNA, 19 nt, Artificial Sequence
  Description of Artificial Sequence: Synthetic oligonucleotide
uuugcgaguaggagauaag

SEQ ID NO: 3240102 - RNA, 19 nt, Artificial Sequence
  Description of Artificial Sequence: Synthetic oligonucleotide
cugaauauucgugguauag

SEQ ID NO: 3240103 - RNA, 19 nt, Artificial Sequence
  Description of Artificial Sequence: Synthetic oligonucleotide
uccaucagcuuuguugggg

SEQ ID NO: 3240104 - RNA, 19 nt, Artificial Sequence
  Description of Artificial Sequence: Synthetic oligonucleotide
cuaucaguauguguguccc

SEQ ID NO: 3240105 - RNA, 19 nt, Artificial Sequence
  Description of Artificial Sequence: Synthetic oligonucleotide
gacacggaguuuaauauuc

SEQ ID NO: 3240106 - RNA, 19 nt, Artificial Sequence
  Description of Artificial Sequence: Synthetic oligonucleotide
aucaguucccaggaacacc

SEQ ID NO: 3240107 - RNA, 19 nt, Artificial Sequence
  Description of Artificial Sequence: Synthetic oligonucleotide
gauguguuggcuaucagua

SEQ ID NO: 3240108 - RNA, 19 nt, Artificial Sequence
  Description of Artificial Sequence: Synthetic oligonucleotide
aggggagaaauaaucacag

SEQ ID NO: 3240109 - RNA, 19 nt, Artificial Sequence
  Description of Artificial Sequence: Synthetic oligonucleotide
uugaguucuauggacauuu

SEQ ID NO: 3240110 - RNA, 19 nt, Artificial Sequence
  Description of Artificial Sequence: Synthetic oligonucleotide
gagacagaugagauuugcg

SEQ ID NO: 3240111 - RNA, 19 nt, Artificial Sequence
  Description of Artificial Sequence: Synthetic oligonucleotide
ugagacagaugagauuugc

SEQ ID NO: 3240112 - RNA, 19 nt, Artificial Sequence
  Description of Artificial Sequence: Synthetic oligonucleotide
aguaggagauaaguggcag

SEQ ID NO: 3240113 - RNA, 19 nt, Artificial Sequence
  Description of Artificial Sequence: Synthetic oligonucleotide
ugcuucuucgacacggagu

SEQ ID NO: 3240114 - RNA, 19 nt, Artificial Sequence
  Description of Artificial Sequence: Synthetic oligonucleotide
cauuuaaaaucuguguuca

SEQ ID NO: 3240115 - RNA, 19 nt, Artificial Sequence
  Description of Artificial Sequence: Synthetic oligonucleotide
aucuccugggaucagcuga

SEQ ID NO: 3240116 - RNA, 19 nt, Artificial Sequence
  Description of Artificial Sequence: Synthetic oligonucleotide
cccaggaacaccuugcacg

SEQ ID NO: 3240117 - RNA, 19 nt, Artificial Sequence
  Description of Artificial Sequence: Synthetic oligonucleotide
uuaggcgaagcccacauag

SEQ ID NO: 3240118 - RNA, 19 nt, Artificial Sequence
  Description of Artificial Sequence: Synthetic oligonucleotide
ugagucuuuauguucagug

SEQ ID NO: 3240119 - RNA, 19 nt, Artificial Sequence
  Description of Artificial Sequence: Synthetic oligonucleotide
agucuuuauguucaguguc

SEQ ID NO: 3240120 - RNA, 19 nt, Artificial Sequence
  Description of Artificial Sequence: Synthetic oligonucleotide
uccacuagugacccaaucc

SEQ ID NO: 3240121 - RNA, 19 nt, Artificial Sequence
  Description of Artificial Sequence: Synthetic oligonucleotide
acuggauuaggcgaagccc

SEQ ID NO: 3240122 - RNA, 19 nt, Artificial Sequence
  Description of Artificial Sequence: Synthetic oligonucleotide
acccaauccacucugaagu

SEQ ID NO: 3240123 - RNA, 19 nt, Artificial Sequence
  Description of Artificial Sequence: Synthetic oligonucleotide
uuuauguucaguguccccu

SEQ ID NO: 3240124 - RNA, 19 nt, Artificial Sequence
  Description of Artificial Sequence: Synthetic oligonucleotide
aggcgaagcccacauaggc

SEQ ID NO: 3240125 - RNA, 19 nt, Artificial Sequence
  Description of Artificial Sequence: Synthetic oligonucleotide
uucaguguccccuugugcu

SEQ ID NO: 3240126 - RNA, 19 nt, Artificial Sequence
  Description of Artificial Sequence: Synthetic oligonucleotide
ugugcugcuccacuaguga

SEQ ID NO: 3240127 - RNA, 19 nt, Artificial Sequence
  Description of Artificial Sequence: Synthetic oligonucleotide
uuaaagggaggcuggguaa

SEQ ID NO: 3240128 - RNA, 19 nt, Artificial Sequence
  Description of Artificial Sequence: Synthetic oligonucleotide
uguucaguguccccuugug

SEQ ID NO: 3240129 - RNA, 19 nt, Artificial Sequence
  Description of Artificial Sequence: Synthetic oligonucleotide
gacccaauccacucugaag

SEQ ID NO: 3240130 - RNA, 19 nt, Artificial Sequence
  Description of Artificial Sequence: Synthetic oligonucleotide
agugacccaauccacucug

SEQ ID NO: 3240131 - RNA, 19 nt, Artificial Sequence
  Description of Artificial Sequence: Synthetic oligonucleotide
ucuuuauguucaguguccc

SEQ ID NO: 3240132 - RNA, 19 nt, Artificial Sequence
  Description of Artificial Sequence: Synthetic oligonucleotide
ugcugcuccacuagugacc

SEQ ID NO: 3240133 - RNA, 19 nt, Artificial Sequence
  Description of Artificial Sequence: Synthetic oligonucleotide
uggguaauuguagauugga

SEQ ID NO: 3240134 - RNA, 19 nt, Artificial Sequence
  Description of Artificial Sequence: Synthetic oligonucleotide
uaggcgaagcccacauagg

SEQ ID NO: 3240135 - RNA, 19 nt, Artificial Sequence
  Description of Artificial Sequence: Synthetic oligonucleotide
ucacugagucuuuauguuc

SEQ ID NO: 3240136 - RNA, 19 nt, Artificial Sequence
  Description of Artificial Sequence: Synthetic oligonucleotide
gcuggguaauuguagauug

SEQ ID NO: 3240137 - RNA, 19 nt, Artificial Sequence
  Description of Artificial Sequence: Synthetic oligonucleotide
cccacauaggccuuaaggc

SEQ ID NO: 3240138 - RNA, 19 nt, Artificial Sequence
  Description of Artificial Sequence: Synthetic oligonucleotide
uuuucccuggcuuccuccc

SEQ ID NO: 3240139 - RNA, 19 nt, Artificial Sequence
  Description of Artificial Sequence: Synthetic oligonucleotide
cuagugacccaauccacuc

SEQ ID NO: 3240140 - RNA, 19 nt, Artificial Sequence
  Description of Artificial Sequence: Synthetic oligonucleotide
cuuuauguucagugucccc

SEQ ID NO: 3240141 - RNA, 19 nt, Artificial Sequence
  Description of Artificial Sequence: Synthetic oligonucleotide
gucuuuauguucagugucc

SEQ ID NO: 3240142 - RNA, 19 nt, Artificial Sequence
  Description of Artificial Sequence: Synthetic oligonucleotide
cuggguaauuguagauugg

SEQ ID NO: 3240143 - RNA, 19 nt, Artificial Sequence
  Description of Artificial Sequence: Synthetic oligonucleotide
uugugcugcuccacuagug

SEQ ID NO: 3240144 - RNA, 19 nt, Artificial Sequence
  Description of Artificial Sequence: Synthetic oligonucleotide
gcccacauaggccuuaagg

SEQ ID NO: 3240145 - RNA, 19 nt, Artificial Sequence
  Description of Artificial Sequence: Synthetic oligonucleotide
aucacugagucuuuauguu

SEQ ID NO: 3240146 - RNA, 19 nt, Artificial Sequence
  Description of Artificial Sequence: Synthetic oligonucleotide
cacuggauuaggcgaagcc

SEQ ID NO: 3240147 - RNA, 19 nt, Artificial Sequence
  Description of Artificial Sequence: Synthetic oligonucleotide
cuggauuaggcgaagccca

SEQ ID NO: 3240148 - RNA, 19 nt, Artificial Sequence
  Description of Artificial Sequence: Synthetic oligonucleotide
uauguucaguguccccuug

SEQ ID NO: 3240149 - RNA, 19 nt, Artificial Sequence
  Description of Artificial Sequence: Synthetic oligonucleotide
uuccucccagcugacaggg

SEQ ID NO: 3240150 - RNA, 19 nt, Artificial Sequence
  Description of Artificial Sequence: Synthetic oligonucleotide
guuaaagggaggcugggua

SEQ ID NO: 3240151 - RNA, 19 nt, Artificial Sequence
  Description of Artificial Sequence: Synthetic oligonucleotide
cacugagucuuuauguuca

SEQ ID NO: 3240152 - RNA, 19 nt, Artificial Sequence
  Description of Artificial Sequence: Synthetic oligonucleotide
ucaguguccccuugugcug

SEQ ID NO: 3240153 - RNA, 19 nt, Artificial Sequence
  Description of Artificial Sequence: Synthetic oligonucleotide
gaggcuggguaauuguaga

SEQ ID NO: 3240154 - RNA, 19 nt, Artificial Sequence
  Description of Artificial Sequence: Synthetic oligonucleotide
acugagucuuuauguucag

SEQ ID NO: 3240155 - RNA, 19 nt, Artificial Sequence
  Description of Artificial Sequence: Synthetic oligonucleotide
guucaguguccccuugugc

SEQ ID NO: 3240156 - RNA, 19 nt, Artificial Sequence
  Description of Artificial Sequence: Synthetic oligonucleotide
cuuccucccagcugacagg

SEQ ID NO: 3240157 - RNA, 19 nt, Artificial Sequence
  Description of Artificial Sequence: Synthetic oligonucleotide
uucccuggcuuccucccag

SEQ ID NO: 3240158 - RNA, 19 nt, Artificial Sequence
  Description of Artificial Sequence: Synthetic oligonucleotide
cacuagugacccaauccac

SEQ ID NO: 3240159 - RNA, 19 nt, Artificial Sequence
  Description of Artificial Sequence: Synthetic oligonucleotide
uagugacccaauccacucu

SEQ ID NO: 3240160 - RNA, 19 nt, Artificial Sequence
  Description of Artificial Sequence: Synthetic oligonucleotide
aagggaggcuggguaauug

SEQ ID NO: 3240161 - RNA, 19 nt, Artificial Sequence
  Description of Artificial Sequence: Synthetic oligonucleotide
ugacccaauccacucugaa

SEQ ID NO: 3240162 - RNA, 19 nt, Artificial Sequence
  Description of Artificial Sequence: Synthetic oligonucleotide
cuggcuuccucccagcuga

SEQ ID NO: 3240163 - RNA, 19 nt, Artificial Sequence
  Description of Artificial Sequence: Synthetic oligonucleotide
acuagugacccaauccacu

SEQ ID NO: 3240164 - RNA, 19 nt, Artificial Sequence
  Description of Artificial Sequence: Synthetic oligonucleotide
gagucuuuauguucagugu

SEQ ID NO: 3240165 - RNA, 19 nt, Artificial Sequence
  Description of Artificial Sequence: Synthetic oligonucleotide
caucacugagucuuuaugu

SEQ ID NO: 3240166 - RNA, 19 nt, Artificial Sequence
  Description of Artificial Sequence: Synthetic oligonucleotide
gcuuccucccagcugacag

SEQ ID NO: 3240167 - RNA, 19 nt, Artificial Sequence
  Description of Artificial Sequence: Synthetic oligonucleotide
uggauuaggcgaagcccac

SEQ ID NO: 3240168 - RNA, 19 nt, Artificial Sequence
  Description of Artificial Sequence: Synthetic oligonucleotide
uuauguucaguguccccuu

SEQ ID NO: 3240169 - RNA, 19 nt, Artificial Sequence
  Description of Artificial Sequence: Synthetic oligonucleotide
ugcuccacuagugacccaa

SEQ ID NO: 3240170 - RNA, 19 nt, Artificial Sequence
  Description of Artificial Sequence: Synthetic oligonucleotide
ggccucacuggauuaggcg

SEQ ID NO: 3240171 - RNA, 19 nt, Artificial Sequence
  Description of Artificial Sequence: Synthetic oligonucleotide
gaggccucacuggauuagg

SEQ ID NO: 3240172 - RNA, 19 nt, Artificial Sequence
  Description of Artificial Sequence: Synthetic oligonucleotide
auguucaguguccccuugu

SEQ ID NO: 3240173 - RNA, 19 nt, Artificial Sequence
  Description of Artificial Sequence: Synthetic oligonucleotide
agggaggcuggguaauugu

SEQ ID NO: 3240174 - RNA, 19 nt, Artificial Sequence
  Description of Artificial Sequence: Synthetic oligonucleotide
gcagaggaggccucacugg

SEQ ID NO: 3240175 - RNA, 19 nt, Artificial Sequence
  Description of Artificial Sequence: Synthetic oligonucleotide
uuucccuggcuuccuccca

SEQ ID NO: 3240176 - RNA, 19 nt, Artificial Sequence
  Description of Artificial Sequence: Synthetic oligonucleotide
ggcagaggaggccucacug

SEQ ID NO: 3240177 - RNA, 19 nt, Artificial Sequence
  Description of Artificial Sequence: Synthetic oligonucleotide
gauuaggcgaagcccacau

SEQ ID NO: 3240178 - RNA, 19 nt, Artificial Sequence
  Description of Artificial Sequence: Synthetic oligonucleotide
aggccucacuggauuaggc

SEQ ID NO: 3240179 - RNA, 19 nt, Artificial Sequence
  Description of Artificial Sequence: Synthetic oligonucleotide
uaaagggaggcuggguaau

SEQ ID NO: 3240180 - RNA, 19 nt, Artificial Sequence
  Description of Artificial Sequence: Synthetic oligonucleotide
ggaggcuggguaauuguag

SEQ ID NO: 3240181 - RNA, 19 nt, Artificial Sequence
  Description of Artificial Sequence: Synthetic oligonucleotide
ucacuggauuaggcgaagc

SEQ ID NO: 3240182 - RNA, 19 nt, Artificial Sequence
  Description of Artificial Sequence: Synthetic oligonucleotide
gugcugcuccacuagugac

SEQ ID NO: 3240183 - RNA, 19 nt, Artificial Sequence
  Description of Artificial Sequence: Synthetic oligonucleotide
aggcuggguaauuguagau

SEQ ID NO: 3240184 - RNA, 19 nt, Artificial Sequence
  Description of Artificial Sequence: Synthetic oligonucleotide
ccacauaggccuuaaggca

SEQ ID NO: 3240185 - RNA, 19 nt, Artificial Sequence
  Description of Artificial Sequence: Synthetic oligonucleotide
gccucacuggauuaggcga

SEQ ID NO: 3240186 - RNA, 19 nt, Artificial Sequence
  Description of Artificial Sequence: Synthetic oligonucleotide
cagaggaggccucacugga

SEQ ID NO: 3240187 - RNA, 19 nt, Artificial Sequence
  Description of Artificial Sequence: Synthetic oligonucleotide
uccucccagcugacagggg

SEQ ID NO: 3240188 - RNA, 19 nt, Artificial Sequence
  Description of Artificial Sequence: Synthetic oligonucleotide
cuccacuagugacccaauc

SEQ ID NO: 3240189 - RNA, 19 nt, Artificial Sequence
  Description of Artificial Sequence: Synthetic oligonucleotide
gcugcuccacuagugaccc

SEQ ID NO: 3240190 - RNA, 19 nt, Artificial Sequence
  Description of Artificial Sequence: Synthetic oligonucleotide
caguguccccuugugcugc

SEQ ID NO: 3240191 - RNA, 19 nt, Artificial Sequence
  Description of Artificial Sequence: Synthetic oligonucleotide
ccacuagugacccaaucca

SEQ ID NO: 3240192 - RNA, 19 nt, Artificial Sequence
  Description of Artificial Sequence: Synthetic oligonucleotide
auuaggcgaagcccacaua

SEQ ID NO: 3240193 - RNA, 19 nt, Artificial Sequence
  Description of Artificial Sequence: Synthetic oligonucleotide
aaagggaggcuggguaauu

SEQ ID NO: 3240194 - RNA, 19 nt, Artificial Sequence
  Description of Artificial Sequence: Synthetic oligonucleotide
cucacuggauuaggcgaag

SEQ ID NO: 3240195 - RNA, 19 nt, Artificial Sequence
  Description of Artificial Sequence: Synthetic oligonucleotide
ggcgaagcccacauaggcc

SEQ ID NO: 3240196 - RNA, 19 nt, Artificial Sequence
  Description of Artificial Sequence: Synthetic oligonucleotide
auagucugucugggaauga

SEQ ID NO: 3240197 - RNA, 19 nt, Artificial Sequence
  Description of Artificial Sequence: Synthetic oligonucleotide
ccuugugcugcuccacuag

SEQ ID NO: 3240198 - RNA, 19 nt, Artificial Sequence
  Description of Artificial Sequence: Synthetic oligonucleotide
caauccacucugaaguuuu

SEQ ID NO: 3240199 - RNA, 19 nt, Artificial Sequence
  Description of Artificial Sequence: Synthetic oligonucleotide
agcccacauaggccuuaag

SEQ ID NO: 3240200 - RNA, 19 nt, Artificial Sequence
  Description of Artificial Sequence: Synthetic oligonucleotide
ucccuggcuuccucccagc

SEQ ID NO: 3240201 - RNA, 19 nt, Artificial Sequence
  Description of Artificial Sequence: Synthetic oligonucleotide
aggaggccucacuggauua

SEQ ID NO: 3240202 - RNA, 19 nt, Artificial Sequence
  Description of Artificial Sequence: Synthetic oligonucleotide
gcgaagcccacauaggccu

SEQ ID NO: 3240203 - RNA, 19 nt, Artificial Sequence
  Description of Artificial Sequence: Synthetic oligonucleotide
gaggaggccucacuggauu

SEQ ID NO: 3240204 - RNA, 19 nt, Artificial Sequence
  Description of Artificial Sequence: Synthetic oligonucleotide
ggaggccucacuggauuag

SEQ ID NO: 3240205 - RNA, 19 nt, Artificial Sequence
  Description of Artificial Sequence: Synthetic oligonucleotide
aagcccacauaggccuuaa

SEQ ID NO: 3240206 - RNA, 19 nt, Artificial Sequence
  Description of Artificial Sequence: Synthetic oligonucleotide
cuugugcugcuccacuagu

SEQ ID NO: 3240207 - RNA, 19 nt, Artificial Sequence
  Description of Artificial Sequence: Synthetic oligonucleotide
uggcuuccucccagcugac

SEQ ID NO: 3240208 - RNA, 19 nt, Artificial Sequence
  Description of Artificial Sequence: Synthetic oligonucleotide
agaggaggccucacuggau

SEQ ID NO: 3240209 - RNA, 19 nt, Artificial Sequence
  Description of Artificial Sequence: Synthetic oligonucleotide
gaagcccacauaggccuua

SEQ ID NO: 3240210 - RNA, 19 nt, Artificial Sequence
  Description of Artificial Sequence: Synthetic oligonucleotide
ccuggcuuccucccagcug

SEQ ID NO: 3240211 - RNA, 19 nt, Artificial Sequence
  Description of Artificial Sequence: Synthetic oligonucleotide
gugacccaauccacucuga

SEQ ID NO: 3240212 - RNA, 19 nt, Artificial Sequence
  Description of Artificial Sequence: Synthetic oligonucleotide
aggggcagaggaggccuca

SEQ ID NO: 3240213 - RNA, 19 nt, Artificial Sequence
  Description of Artificial Sequence: Synthetic oligonucleotide
ggauuaggcgaagcccaca

SEQ ID NO: 3240214 - RNA, 19 nt, Artificial Sequence
  Description of Artificial Sequence: Synthetic oligonucleotide
ccucacuggauuaggcgaa

SEQ ID NO: 3240215 - RNA, 19 nt, Artificial Sequence
  Description of Artificial Sequence: Synthetic oligonucleotide
gguuaaagggaggcugggu

SEQ ID NO: 3240216 - RNA, 19 nt, Artificial Sequence
  Description of Artificial Sequence: Synthetic oligonucleotide
cugagucuuuauguucagu

SEQ ID NO: 3240217 - RNA, 19 nt, Artificial Sequence
  Description of Artificial Sequence: Synthetic oligonucleotide
aaauaauaagcaugcagcc

SEQ ID NO: 3240218 - RNA, 19 nt, Artificial Sequence
  Description of Artificial Sequence: Synthetic oligonucleotide
cuauagaauacuaauaugg

SEQ ID NO: 3240219 - RNA, 19 nt, Artificial Sequence
  Description of Artificial Sequence: Synthetic oligonucleotide
gaaguaguuaguuacaacg

SEQ ID NO: 3240220 - RNA, 19 nt, Artificial Sequence
  Description of Artificial Sequence: Synthetic oligonucleotide
aauacaguuauuuacaaaa

SEQ ID NO: 3240221 - RNA, 19 nt, Artificial Sequence
  Description of Artificial Sequence: Synthetic oligonucleotide
aaaauguauggauaauccc

SEQ ID NO: 3240222 - RNA, 19 nt, Artificial Sequence
  Description of Artificial Sequence: Synthetic oligonucleotide
aaaacaaaccugcuugggc

SEQ ID NO: 3240223 - RNA, 19 nt, Artificial Sequence
  Description of Artificial Sequence: Synthetic oligonucleotide
aguaucaaaauguuuuggc

SEQ ID NO: 3240224 - RNA, 19 nt, Artificial Sequence
  Description of Artificial Sequence: Synthetic oligonucleotide
uuuaaaauccacaauguaa

SEQ ID NO: 3240225 - RNA, 19 nt, Artificial Sequence
  Description of Artificial Sequence: Synthetic oligonucleotide
uuaucauccauacuuuugg

SEQ ID NO: 3240226 - RNA, 19 nt, Artificial Sequence
  Description of Artificial Sequence: Synthetic oligonucleotide
cauuuuaaaauccacaaug

SEQ ID NO: 3240227 - RNA, 19 nt, Artificial Sequence
  Description of Artificial Sequence: Synthetic oligonucleotide
agcucauuggcuuagaguc

SEQ ID NO: 3240228 - RNA, 19 nt, Artificial Sequence
  Description of Artificial Sequence: Synthetic oligonucleotide
aaaauccacaauguaaucg

SEQ ID NO: 3240229 - RNA, 19 nt, Artificial Sequence
  Description of Artificial Sequence: Synthetic oligonucleotide
ucauccauacuuuuggugg

SEQ ID NO: 3240230 - RNA, 19 nt, Artificial Sequence
  Description of Artificial Sequence: Synthetic oligonucleotide
aauaauaagcaugcagccc

SEQ ID NO: 3240231 - RNA, 19 nt, Artificial Sequence
  Description of Artificial Sequence: Synthetic oligonucleotide
uguaguaucaaaauguuuu

SEQ ID NO: 3240232 - RNA, 19 nt, Artificial Sequence
  Description of Artificial Sequence: Synthetic oligonucleotide
aauacuuacaugcucucug

SEQ ID NO: 3240233 - RNA, 19 nt, Artificial Sequence
  Description of Artificial Sequence: Synthetic oligonucleotide
uacaaaaccacucuagcug

SEQ ID NO: 3240234 - RNA, 19 nt, Artificial Sequence
  Description of Artificial Sequence: Synthetic oligonucleotide
uuaaaauccacaauguaau

SEQ ID NO: 3240235 - RNA, 19 nt, Artificial Sequence
  Description of Artificial Sequence: Synthetic oligonucleotide
aaauguacaaugcuguagu

SEQ ID NO: 3240236 - RNA, 19 nt, Artificial Sequence
  Description of Artificial Sequence: Synthetic oligonucleotide
uuauauauuuacaaaaguu

SEQ ID NO: 3240237 - RNA, 19 nt, Artificial Sequence
  Description of Artificial Sequence: Synthetic oligonucleotide
aaucguguggguuaccagg

SEQ ID NO: 3240238 - RNA, 19 nt, Artificial Sequence
  Description of Artificial Sequence: Synthetic oligonucleotide
uacagaaccguacagaagu

SEQ ID NO: 3240239 - RNA, 19 nt, Artificial Sequence
  Description of Artificial Sequence: Synthetic oligonucleotide
uuucaaauguacaaugcug

SEQ ID NO: 3240240 - RNA, 19 nt, Artificial Sequence
  Description of Artificial Sequence: Synthetic oligonucleotide
agcaaauuaucauccauac

SEQ ID NO: 3240241 - RNA, 19 nt, Artificial Sequence
  Description of Artificial Sequence: Synthetic oligonucleotide
aaagaucuggaaaggaacc

SEQ ID NO: 3240242 - RNA, 19 nt, Artificial Sequence
  Description of Artificial Sequence: Synthetic oligonucleotide
uagaauacuaauaugguuu

SEQ ID NO: 3240243 - RNA, 19 nt, Artificial Sequence
  Description of Artificial Sequence: Synthetic oligonucleotide
aguuacaacgacaagguac

SEQ ID NO: 3240244 - RNA, 19 nt, Artificial Sequence
  Description of Artificial Sequence: Synthetic oligonucleotide
uuaguuacaacgacaaggu

SEQ ID NO: 3240245 - RNA, 19 nt, Artificial Sequence
  Description of Artificial Sequence: Synthetic oligonucleotide
agcugugcaaacuuguagc

SEQ ID NO: 3240246 - RNA, 19 nt, Artificial Sequence
  Description of Artificial Sequence: Synthetic oligonucleotide
uuacaaaaguuccucagug

SEQ ID NO: 3240247 - RNA, 19 nt, Artificial Sequence
  Description of Artificial Sequence: Synthetic oligonucleotide
ugcuguaguaucaaaaugu

SEQ ID NO: 3240248 - RNA, 19 nt, Artificial Sequence
  Description of Artificial Sequence: Synthetic oligonucleotide
aaacaaaccugcuugggcu

SEQ ID NO: 3240249 - RNA, 19 nt, Artificial Sequence
  Description of Artificial Sequence: Synthetic oligonucleotide
cugggcaauacuuacaugc

SEQ ID NO: 3240250 - RNA, 19 nt, Artificial Sequence
  Description of Artificial Sequence: Synthetic oligonucleotide
auaauaagcaugcagcccu

SEQ ID NO: 3240251 - RNA, 19 nt, Artificial Sequence
  Description of Artificial Sequence: Synthetic oligonucleotide
uucaaauguacaaugcugu

SEQ ID NO: 3240252 - RNA, 19 nt, Artificial Sequence
  Description of Artificial Sequence: Synthetic oligonucleotide
ugcuauagaauacuaauau

SEQ ID NO: 3240253 - RNA, 19 nt, Artificial Sequence
  Description of Artificial Sequence: Synthetic oligonucleotide
aguaguuaguuacaacgac

SEQ ID NO: 3240254 - RNA, 19 nt, Artificial Sequence
  Description of Artificial Sequence: Synthetic oligonucleotide
uauagaauacuaauauggu

SEQ ID NO: 3240255 - RNA, 19 nt, Artificial Sequence
  Description of Artificial Sequence: Synthetic oligonucleotide
aauacuaauaugguuuucu

SEQ ID NO: 3240256 - RNA, 19 nt, Artificial Sequence
  Description of Artificial Sequence: Synthetic oligonucleotide
ucagaaugcccucagagcu

SEQ ID NO: 3240257 - RNA, 19 nt, Artificial Sequence
  Description of Artificial Sequence: Synthetic oligonucleotide
uacauuuuaaaauccacaa

SEQ ID NO: 3240258 - RNA, 19 nt, Artificial Sequence
  Description of Artificial Sequence: Synthetic oligonucleotide
cuguguuauacaaauacag

SEQ ID NO: 3240259 - RNA, 19 nt, Artificial Sequence
  Description of Artificial Sequence: Synthetic oligonucleotide
gaaaugaaagcuaagaaaa

SEQ ID NO: 3240260 - RNA, 19 nt, Artificial Sequence
  Description of Artificial Sequence: Synthetic oligonucleotide
ugucuauuuauauuuauau

SEQ ID NO: 3240261 - RNA, 19 nt, Artificial Sequence
  Description of Artificial Sequence: Synthetic oligonucleotide
aagaguuuugcugaauuuc

SEQ ID NO: 3240262 - RNA, 19 nt, Artificial Sequence
  Description of Artificial Sequence: Synthetic oligonucleotide
uggauaaucccauuugugc

SEQ ID NO: 3240263 - RNA, 19 nt, Artificial Sequence
  Description of Artificial Sequence: Synthetic oligonucleotide
cuaggaaguaguuaguuac

SEQ ID NO: 3240264 - RNA, 19 nt, Artificial Sequence
  Description of Artificial Sequence: Synthetic oligonucleotide
aaauguauggauaauccca

SEQ ID NO: 3240265 - RNA, 19 nt, Artificial Sequence
  Description of Artificial Sequence: Synthetic oligonucleotide
ugaauuucuuccuacgggc

SEQ ID NO: 3240266 - RNA, 19 nt, Artificial Sequence
  Description of Artificial Sequence: Synthetic oligonucleotide
aaugcuguaguaucaaaau

SEQ ID NO: 3240267 - RNA, 19 nt, Artificial Sequence
  Description of Artificial Sequence: Synthetic oligonucleotide
uguuauacaaauacaguua

SEQ ID NO: 3240268 - RNA, 19 nt, Artificial Sequence
  Description of Artificial Sequence: Synthetic oligonucleotide
aaaacuacucugugugcgg

SEQ ID NO: 3240269 - RNA, 19 nt, Artificial Sequence
  Description of Artificial Sequence: Synthetic oligonucleotide
acuaauaugguuuucuuuu

SEQ ID NO: 3240270 - RNA, 19 nt, Artificial Sequence
  Description of Artificial Sequence: Synthetic oligonucleotide
uguguagaagcucauuggc

SEQ ID NO: 3240271 - RNA, 19 nt, Artificial Sequence
  Description of Artificial Sequence: Synthetic oligonucleotide
uauacaaauacaguuauuu

SEQ ID NO: 3240272 - RNA, 19 nt, Artificial Sequence
  Description of Artificial Sequence: Synthetic oligonucleotide
uuagagucuagcaugcuac

SEQ ID NO: 3240273 - RNA, 19 nt, Artificial Sequence
  Description of Artificial Sequence: Synthetic oligonucleotide
gaaaacuacucugugugcg

SEQ ID NO: 3240274 - RNA, 19 nt, Artificial Sequence
  Description of Artificial Sequence: Synthetic oligonucleotide
uguguuauacaaauacagu

SEQ ID NO: 3240275 - RNA, 19 nt, Artificial Sequence
  Description of Artificial Sequence: Synthetic oligonucleotide
auauuuacaaaaguuccuc

SEQ ID NO: 3240276 - RNA, 19 nt, Artificial Sequence
  Description of Artificial Sequence: Synthetic oligonucleotide
uugaugucuauuuauauuu

SEQ ID NO: 3240277 - RNA, 19 nt, Artificial Sequence
  Description of Artificial Sequence: Synthetic oligonucleotide
ucccaauagacgcuuagag

SEQ ID NO: 3240278 - RNA, 19 nt, Artificial Sequence
  Description of Artificial Sequence: Synthetic oligonucleotide
uacuuucaaauguacaaug

SEQ ID NO: 3240279 - RNA, 19 nt, Artificial Sequence
  Description of Artificial Sequence: Synthetic oligonucleotide
aauguaaucguguggguua

SEQ ID NO: 3240280 - RNA, 19 nt, Artificial Sequence
  Description of Artificial Sequence: Synthetic oligonucleotide
cacaauguaaucguguggg

SEQ ID NO: 3240281 - RNA, 19 nt, Artificial Sequence
  Description of Artificial Sequence: Synthetic oligonucleotide
aaggaaaugaaagcuaaga

SEQ ID NO: 3240282 - RNA, 19 nt, Artificial Sequence
  Description of Artificial Sequence: Synthetic oligonucleotide
uuccucaguguacagaacc

SEQ ID NO: 3240283 - RNA, 19 nt, Artificial Sequence
  Description of Artificial Sequence: Synthetic oligonucleotide
aguuuugccaagucuccgc

SEQ ID NO: 3240284 - RNA, 19 nt, Artificial Sequence
  Description of Artificial Sequence: Synthetic oligonucleotide
gauaaucccauuugugccc

SEQ ID NO: 3240285 - RNA, 19 nt, Artificial Sequence
  Description of Artificial Sequence: Synthetic oligonucleotide
ucugugugcggucacauac

SEQ ID NO: 3240286 - RNA, 19 nt, Artificial Sequence
  Description of Artificial Sequence: Synthetic oligonucleotide
acugcuauagaauacuaau

SEQ ID NO: 3240287 - RNA, 19 nt, Artificial Sequence
  Description of Artificial Sequence: Synthetic oligonucleotide
agagcaagaguuuugcuga

SEQ ID NO: 3240288 - RNA, 19 nt, Artificial Sequence
  Description of Artificial Sequence: Synthetic oligonucleotide
aaaaccacucuagcugugc

SEQ ID NO: 3240289 - RNA, 19 nt, Artificial Sequence
  Description of Artificial Sequence: Synthetic oligonucleotide
uacauguuacucagaaugc

SEQ ID NO: 3240290 - RNA, 19 nt, Artificial Sequence
  Description of Artificial Sequence: Synthetic oligonucleotide
acuuucaaauguacaaugc

SEQ ID NO: 3240291 - RNA, 19 nt, Artificial Sequence
  Description of Artificial Sequence: Synthetic oligonucleotide
uaguuaguuacaacgacaa

SEQ ID NO: 3240292 - RNA, 19 nt, Artificial Sequence
  Description of Artificial Sequence: Synthetic oligonucleotide
uuugugcccaucccaauag

SEQ ID NO: 3240293 - RNA, 19 nt, Artificial Sequence
  Description of Artificial Sequence: Synthetic oligonucleotide
uuaguuuugccaagucucc

SEQ ID NO: 3240294 - RNA, 19 nt, Artificial Sequence
  Description of Artificial Sequence: Synthetic oligonucleotide
cugaauuucuuccuacggg

SEQ ID NO: 3240295 - RNA, 19 nt, Artificial Sequence
  Description of Artificial Sequence: Synthetic oligonucleotide
uuacaaaaccacucuagcu

SEQ ID NO: 3240296 - RNA, 19 nt, Artificial Sequence
  Description of Artificial Sequence: Synthetic oligonucleotide
agagcugagacccugggca

SEQ ID NO: 3240297 - RNA, 19 nt, Artificial Sequence
  Description of Artificial Sequence: Synthetic oligonucleotide
uacuuuugguggcagagca

SEQ ID NO: 3240298 - RNA, 19 nt, Artificial Sequence
  Description of Artificial Sequence: Synthetic oligonucleotide
ugugcaaacuuguagcuuc

SEQ ID NO: 3240299 - RNA, 19 nt, Artificial Sequence
  Description of Artificial Sequence: Synthetic oligonucleotide
uauuuacaaaaguuccuca

SEQ ID NO: 3240300 - RNA, 19 nt, Artificial Sequence
  Description of Artificial Sequence: Synthetic oligonucleotide
agaaaacugcuauagaaua

SEQ ID NO: 3240301 - RNA, 19 nt, Artificial Sequence
  Description of Artificial Sequence: Synthetic oligonucleotide
uccuguauguuacauggcu

SEQ ID NO: 3240302 - RNA, 19 nt, Artificial Sequence
  Description of Artificial Sequence: Synthetic oligonucleotide
acauguuacucagaaugcc

SEQ ID NO: 3240303 - RNA, 19 nt, Artificial Sequence
  Description of Artificial Sequence: Synthetic oligonucleotide
uccacaauguaaucgugug

SEQ ID NO: 3240304 - RNA, 19 nt, Artificial Sequence
  Description of Artificial Sequence: Synthetic oligonucleotide
uuugaugucuauuuauauu

SEQ ID NO: 3240305 - RNA, 19 nt, Artificial Sequence
  Description of Artificial Sequence: Synthetic oligonucleotide
uggcuuagagucuagcaug

SEQ ID NO: 3240306 - RNA, 19 nt, Artificial Sequence
  Description of Artificial Sequence: Synthetic oligonucleotide
aacuuguagcuucuuaaaa

SEQ ID NO: 3240307 - RNA, 19 nt, Artificial Sequence
  Description of Artificial Sequence: Synthetic oligonucleotide
aaacuuguagcuucuuaaa

SEQ ID NO: 3240308 - RNA, 19 nt, Artificial Sequence
  Description of Artificial Sequence: Synthetic oligonucleotide
uuacaguccuguauguuac

SEQ ID NO: 3240309 - RNA, 19 nt, Artificial Sequence
  Description of Artificial Sequence: Synthetic oligonucleotide
uguauggauaaucccauuu

SEQ ID NO: 3240310 - RNA, 19 nt, Artificial Sequence
  Description of Artificial Sequence: Synthetic oligonucleotide
cuguguagaagcucauugg

SEQ ID NO: 3240311 - RNA, 19 nt, Artificial Sequence
  Description of Artificial Sequence: Synthetic oligonucleotide
guaguaucaaaauguuuug

SEQ ID NO: 3240312 - RNA, 19 nt, Artificial Sequence
  Description of Artificial Sequence: Synthetic oligonucleotide
auagaauacuaauaugguu

SEQ ID NO: 3240313 - RNA, 19 nt, Artificial Sequence
  Description of Artificial Sequence: Synthetic oligonucleotide
ucucugacuaggaaguagu

SEQ ID NO: 3240314 - RNA, 19 nt, Artificial Sequence
  Description of Artificial Sequence: Synthetic oligonucleotide
uugggcuagcaaauuauca

SEQ ID NO: 3240315 - RNA, 19 nt, Artificial Sequence
  Description of Artificial Sequence: Synthetic oligonucleotide
uagcugugcaaacuuguag

SEQ ID NO: 3240316 - RNA, 19 nt, Artificial Sequence
  Description of Artificial Sequence: Synthetic oligonucleotide
aagcucauuggcuuagagu

SEQ ID NO: 3240317 - RNA, 19 nt, Artificial Sequence
  Description of Artificial Sequence: Synthetic oligonucleotide
gaagaauuagcuuaaacag

SEQ ID NO: 3240318 - RNA, 19 nt, Artificial Sequence
  Description of Artificial Sequence: Synthetic oligonucleotide
uuaaacaggaucaagaccu

SEQ ID NO: 3240319 - RNA, 19 nt, Artificial Sequence
  Description of Artificial Sequence: Synthetic oligonucleotide
aaaauacucucauucagac

SEQ ID NO: 3240320 - RNA, 19 nt, Artificial Sequence
  Description of Artificial Sequence: Synthetic oligonucleotide
uauaaucccaguuauuugg

SEQ ID NO: 3240321 - RNA, 19 nt, Artificial Sequence
  Description of Artificial Sequence: Synthetic oligonucleotide
uguaaagauggccagaggc

SEQ ID NO: 3240322 - RNA, 19 nt, Artificial Sequence
  Description of Artificial Sequence: Synthetic oligonucleotide
aguuauuauaugcugaaag

SEQ ID NO: 3240323 - RNA, 19 nt, Artificial Sequence
  Description of Artificial Sequence: Synthetic oligonucleotide
aaccuuuuaauuuuggagu

SEQ ID NO: 3240324 - RNA, 19 nt, Artificial Sequence
  Description of Artificial Sequence: Synthetic oligonucleotide
uaaccuuuuaauuuuggag

SEQ ID NO: 3240325 - RNA, 19 nt, Artificial Sequence
  Description of Artificial Sequence: Synthetic oligonucleotide
ucugaaaacuucaaugacc

SEQ ID NO: 3240326 - RNA, 19 nt, Artificial Sequence
  Description of Artificial Sequence: Synthetic oligonucleotide
uaucuuauugacuaacgag

SEQ ID NO: 3240327 - RNA, 19 nt, Artificial Sequence
  Description of Artificial Sequence: Synthetic oligonucleotide
ucuaggauguuuuauauuc

SEQ ID NO: 3240328 - RNA, 19 nt, Artificial Sequence
  Description of Artificial Sequence: Synthetic oligonucleotide
aaugagaaagacccagcgg

SEQ ID NO: 3240329 - RNA, 19 nt, Artificial Sequence
  Description of Artificial Sequence: Synthetic oligonucleotide
cauuuagaaacgcaaauag

SEQ ID NO: 3240330 - RNA, 19 nt, Artificial Sequence
  Description of Artificial Sequence: Synthetic oligonucleotide
agaaaucccaagcaaugcc

SEQ ID NO: 3240331 - RNA, 19 nt, Artificial Sequence
  Description of Artificial Sequence: Synthetic oligonucleotide
aagaguuaaguuuuaauuu

SEQ ID NO: 3240332 - RNA, 19 nt, Artificial Sequence
  Description of Artificial Sequence: Synthetic oligonucleotide
aauguucaaauguuuauau

SEQ ID NO: 3240333 - RNA, 19 nt, Artificial Sequence
  Description of Artificial Sequence: Synthetic oligonucleotide
aacgcaaauagcugauuac

SEQ ID NO: 3240334 - RNA, 19 nt, Artificial Sequence
  Description of Artificial Sequence: Synthetic oligonucleotide
uuaucaaguggacugaaac

SEQ ID NO: 3240335 - RNA, 19 nt, Artificial Sequence
  Description of Artificial Sequence: Synthetic oligonucleotide
aaggaaagcuauucuaaag

SEQ ID NO: 3240336 - RNA, 19 nt, Artificial Sequence
  Description of Artificial Sequence: Synthetic oligonucleotide
agauuuaauuaaaauacac

SEQ ID NO: 3240337 - RNA, 19 nt, Artificial Sequence
  Description of Artificial Sequence: Synthetic oligonucleotide
aaugccccaauacacuaac

SEQ ID NO: 3240338 - RNA, 19 nt, Artificial Sequence
  Description of Artificial Sequence: Synthetic oligonucleotide
acuugaaauguucaaaugu

SEQ ID NO: 3240339 - RNA, 19 nt, Artificial Sequence
  Description of Artificial Sequence: Synthetic oligonucleotide
acuuugagugcccugcucc

SEQ ID NO: 3240340 - RNA, 19 nt, Artificial Sequence
  Description of Artificial Sequence: Synthetic oligonucleotide
uaagaguuaaguuuuaauu

SEQ ID NO: 3240341 - RNA, 19 nt, Artificial Sequence
  Description of Artificial Sequence: Synthetic oligonucleotide
gaaugagaaagacccagcg

SEQ ID NO: 3240342 - RNA, 19 nt, Artificial Sequence
  Description of Artificial Sequence: Synthetic oligonucleotide
acauaagggagccaguuuc

SEQ ID NO: 3240343 - RNA, 19 nt, Artificial Sequence
  Description of Artificial Sequence: Synthetic oligonucleotide
aguucuaacuccucuaaag

SEQ ID NO: 3240344 - RNA, 19 nt, Artificial Sequence
  Description of Artificial Sequence: Synthetic oligonucleotide
cucauucagacuuugagug

SEQ ID NO: 3240345 - RNA, 19 nt, Artificial Sequence
  Description of Artificial Sequence: Synthetic oligonucleotide
uccucuaaagaacucauac

SEQ ID NO: 3240346 - RNA, 19 nt, Artificial Sequence
  Description of Artificial Sequence: Synthetic oligonucleotide
ucuagcuauaaaagaacag

SEQ ID NO: 3240347 - RNA, 19 nt, Artificial Sequence
  Description of Artificial Sequence: Synthetic oligonucleotide
aaagaacaguauuucaaga

SEQ ID NO: 3240348 - RNA, 19 nt, Artificial Sequence
  Description of Artificial Sequence: Synthetic oligonucleotide
aguuauuugggagacagag

SEQ ID NO: 3240349 - RNA, 19 nt, Artificial Sequence
  Description of Artificial Sequence: Synthetic oligonucleotide
uguauucagaguuuuacaa

SEQ ID NO: 3240350 - RNA, 19 nt, Artificial Sequence
  Description of Artificial Sequence: Synthetic oligonucleotide
ucgaaaaugaaggacaaga

SEQ ID NO: 3240351 - RNA, 19 nt, Artificial Sequence
  Description of Artificial Sequence: Synthetic oligonucleotide
aagaacaguauuucaagaa

SEQ ID NO: 3240352 - RNA, 19 nt, Artificial Sequence
  Description of Artificial Sequence: Synthetic oligonucleotide
uuaucuuauugacuaacga

SEQ ID NO: 3240353 - RNA, 19 nt, Artificial Sequence
  Description of Artificial Sequence: Synthetic oligonucleotide
agacagaagacuuggaaug

SEQ ID NO: 3240354 - RNA, 19 nt, Artificial Sequence
  Description of Artificial Sequence: Synthetic oligonucleotide
auaacacggucauuagugc

SEQ ID NO: 3240355 - RNA, 19 nt, Artificial Sequence
  Description of Artificial Sequence: Synthetic oligonucleotide
aaaaguuuguggaauguug

SEQ ID NO: 3240356 - RNA, 19 nt, Artificial Sequence
  Description of Artificial Sequence: Synthetic oligonucleotide
aagacagaagacuuggaau

SEQ ID NO: 3240357 - RNA, 19 nt, Artificial Sequence
  Description of Artificial Sequence: Synthetic oligonucleotide
uggugcaaacuaaagaaug

SEQ ID NO: 3240358 - RNA, 19 nt, Artificial Sequence
  Description of Artificial Sequence: Synthetic oligonucleotide
gacuuguguagucagacug

SEQ ID NO: 3240359 - RNA, 19 nt, Artificial Sequence
  Description of Artificial Sequence: Synthetic oligonucleotide
uucuagcuauaaaagaaca

SEQ ID NO: 3240360 - RNA, 19 nt, Artificial Sequence
  Description of Artificial Sequence: Synthetic oligonucleotide
cuuaaacaggaucaagacc

SEQ ID NO: 3240361 - RNA, 19 nt, Artificial Sequence
  Description of Artificial Sequence: Synthetic oligonucleotide
acacacuuaagcuuagcag

SEQ ID NO: 3240362 - RNA, 19 nt, Artificial Sequence
  Description of Artificial Sequence: Synthetic oligonucleotide
ucuaaagaacucauaccug

SEQ ID NO: 3240363 - RNA, 19 nt, Artificial Sequence
  Description of Artificial Sequence: Synthetic oligonucleotide
guaauuggaggacugucgg

SEQ ID NO: 3240364 - RNA, 19 nt, Artificial Sequence
  Description of Artificial Sequence: Synthetic oligonucleotide
uaaauuuagaaaugauuau

SEQ ID NO: 3240365 - RNA, 19 nt, Artificial Sequence
  Description of Artificial Sequence: Synthetic oligonucleotide
uuguacaguaauuggagga

SEQ ID NO: 3240366 - RNA, 19 nt, Artificial Sequence
  Description of Artificial Sequence: Synthetic oligonucleotide
cauaguaugugcaugagaa

SEQ ID NO: 3240367 - RNA, 19 nt, Artificial Sequence
  Description of Artificial Sequence: Synthetic oligonucleotide
cugauuacaguucuaacuc

SEQ ID NO: 3240368 - RNA, 19 nt, Artificial Sequence
  Description of Artificial Sequence: Synthetic oligonucleotide
aagcugaugagaaauaaga

SEQ ID NO: 3240369 - RNA, 19 nt, Artificial Sequence
  Description of Artificial Sequence: Synthetic oligonucleotide
  modified_base (5)..(5): a, c, u, g, unknown or other
aaacncuaggauccaaagu

SEQ ID NO: 3240370 - RNA, 19 nt, Artificial Sequence
  Description of Artificial Sequence: Synthetic oligonucleotide
agcaaugccaacuaccaca

SEQ ID NO: 3240371 - RNA, 19 nt, Artificial Sequence
  Description of Artificial Sequence: Synthetic oligonucleotide
aaaucccaagcaaugcccc

SEQ ID NO: 3240372 - RNA, 19 nt, Artificial Sequence
  Description of Artificial Sequence: Synthetic oligonucleotide
uaacacauaagggagccag

SEQ ID NO: 3240373 - RNA, 19 nt, Artificial Sequence
  Description of Artificial Sequence: Synthetic oligonucleotide
uuaaucaaaugcuuccuaa

SEQ ID NO: 3240374 - RNA, 19 nt, Artificial Sequence
  Description of Artificial Sequence: Synthetic oligonucleotide
  modified_base (7)..(7): a, c, u, g, unknown or other
uaaaacncuaggauccaaa

SEQ ID NO: 3240375 - RNA, 19 nt, Artificial Sequence
  Description of Artificial Sequence: Synthetic oligonucleotide
uuaacucccacaaaauuuu

SEQ ID NO: 3240376 - RNA, 19 nt, Artificial Sequence
  Description of Artificial Sequence: Synthetic oligonucleotide
uaaguuauuauaugcugaa

SEQ ID NO: 3240377 - RNA, 19 nt, Artificial Sequence
  Description of Artificial Sequence: Synthetic oligonucleotide
acuugagcagcauaguaug

SEQ ID NO: 3240378 - RNA, 19 nt, Artificial Sequence
  Description of Artificial Sequence: Synthetic oligonucleotide
uuagacaugcauaaccuuu

SEQ ID NO: 3240379 - RNA, 19 nt, Artificial Sequence
  Description of Artificial Sequence: Synthetic oligonucleotide
ugaaauauguuugucuggu

SEQ ID NO: 3240380 - RNA, 19 nt, Artificial Sequence
  Description of Artificial Sequence: Synthetic oligonucleotide
ucuaauuuauguggguucc

SEQ ID NO: 3240381 - RNA, 19 nt, Artificial Sequence
  Description of Artificial Sequence: Synthetic oligonucleotide
cuggaaagcaccaacaaga

SEQ ID NO: 3240382 - RNA, 19 nt, Artificial Sequence
  Description of Artificial Sequence: Synthetic oligonucleotide
ugauuuaaauauauagcuu

SEQ ID NO: 3240383 - RNA, 19 nt, Artificial Sequence
  Description of Artificial Sequence: Synthetic oligonucleotide
cagaaauaaaaucuauuuc

SEQ ID NO: 3240384 - RNA, 19 nt, Artificial Sequence
  Description of Artificial Sequence: Synthetic oligonucleotide
uuaagcuuagcagaguggu

SEQ ID NO: 3240385 - RNA, 19 nt, Artificial Sequence
  Description of Artificial Sequence: Synthetic oligonucleotide
uuuguuuuccggauuugcu

SEQ ID NO: 3240386 - RNA, 19 nt, Artificial Sequence
  Description of Artificial Sequence: Synthetic oligonucleotide
uuaagaguuaaguuuuaau

SEQ ID NO: 3240387 - RNA, 19 nt, Artificial Sequence
  Description of Artificial Sequence: Synthetic oligonucleotide
uguagcuacaugaaugaua

SEQ ID NO: 3240388 - RNA, 19 nt, Artificial Sequence
  Description of Artificial Sequence: Synthetic oligonucleotide
auuaucuuauugacuaacg

SEQ ID NO: 3240389 - RNA, 19 nt, Artificial Sequence
  Description of Artificial Sequence: Synthetic oligonucleotide
agaguuaaguuuuaauuua

SEQ ID NO: 3240390 - RNA, 19 nt, Artificial Sequence
  Description of Artificial Sequence: Synthetic oligonucleotide
aaacgcaaauagcugauua

SEQ ID NO: 3240391 - RNA, 19 nt, Artificial Sequence
  Description of Artificial Sequence: Synthetic oligonucleotide
uagcuauaaaagaacagua

SEQ ID NO: 3240392 - RNA, 19 nt, Artificial Sequence
  Description of Artificial Sequence: Synthetic oligonucleotide
cuggagauggccgaggugg

SEQ ID NO: 3240393 - RNA, 19 nt, Artificial Sequence
  Description of Artificial Sequence: Synthetic oligonucleotide
auguaaggcaaacacagau

SEQ ID NO: 3240394 - RNA, 19 nt, Artificial Sequence
  Description of Artificial Sequence: Synthetic oligonucleotide
ucuguaccauucuaggaug

SEQ ID NO: 3240395 - RNA, 19 nt, Artificial Sequence
  Description of Artificial Sequence: Synthetic oligonucleotide
aucuuauugacuaacgagu

SEQ ID NO: 3240396 - RNA, 19 nt, Artificial Sequence
  Description of Artificial Sequence: Synthetic oligonucleotide
ugggaguuucaaauagcgg

SEQ ID NO: 3240397 - RNA, 19 nt, Artificial Sequence
  Description of Artificial Sequence: Synthetic oligonucleotide
ugauuacaguucuaacucc

SEQ ID NO: 3240398 - RNA, 19 nt, Artificial Sequence
  Description of Artificial Sequence: Synthetic oligonucleotide
ggauguuuuauauuccaag

SEQ ID NO: 3240399 - RNA, 19 nt, Artificial Sequence
  Description of Artificial Sequence: Synthetic oligonucleotide
agagugugcgaaucuugcc

SEQ ID NO: 3240400 - RNA, 19 nt, Artificial Sequence
  Description of Artificial Sequence: Synthetic oligonucleotide
ucccacaaaauuuucucca

SEQ ID NO: 3240401 - RNA, 19 nt, Artificial Sequence
  Description of Artificial Sequence: Synthetic oligonucleotide
ugucggagggcacagaguc

SEQ ID NO: 3240402 - RNA, 19 nt, Artificial Sequence
  Description of Artificial Sequence: Synthetic oligonucleotide
gacuugaaauguucaaaug

SEQ ID NO: 3240403 - RNA, 19 nt, Artificial Sequence
  Description of Artificial Sequence: Synthetic oligonucleotide
cuuccuaaauuuagaaaug

SEQ ID NO: 3240404 - RNA, 19 nt, Artificial Sequence
  Description of Artificial Sequence: Synthetic oligonucleotide
aagaaugaauuauuaucuu

SEQ ID NO: 3240405 - RNA, 19 nt, Artificial Sequence
  Description of Artificial Sequence: Synthetic oligonucleotide
uaucaggaaaagaauguua

SEQ ID NO: 3240406 - RNA, 19 nt, Artificial Sequence
  Description of Artificial Sequence: Synthetic oligonucleotide
uaggauguuuuauauucca

SEQ ID NO: 3240407 - RNA, 19 nt, Artificial Sequence
  Description of Artificial Sequence: Synthetic oligonucleotide
ugaacagcacagaaauaca

SEQ ID NO: 3240408 - RNA, 19 nt, Artificial Sequence
  Description of Artificial Sequence: Synthetic oligonucleotide
uucuaaggaaagcuauucu

SEQ ID NO: 3240409 - RNA, 19 nt, Artificial Sequence
  Description of Artificial Sequence: Synthetic oligonucleotide
cacgcaaugccauguaagg

SEQ ID NO: 3240410 - RNA, 19 nt, Artificial Sequence
  Description of Artificial Sequence: Synthetic oligonucleotide
cacacuuaagcuuagcaga

SEQ ID NO: 3240411 - RNA, 19 nt, Artificial Sequence
  Description of Artificial Sequence: Synthetic oligonucleotide
gaaaucccaagcaaugccc

SEQ ID NO: 3240412 - RNA, 19 nt, Artificial Sequence
  Description of Artificial Sequence: Synthetic oligonucleotide
uucuuuguuucugaaaagu

SEQ ID NO: 3240413 - RNA, 19 nt, Artificial Sequence
  Description of Artificial Sequence: Synthetic oligonucleotide
agaaugaauuauuaucuua

SEQ ID NO: 3240414 - RNA, 19 nt, Artificial Sequence
  Description of Artificial Sequence: Synthetic oligonucleotide
uguuaacucccacaaaauu

SEQ ID NO: 3240415 - RNA, 19 nt, Artificial Sequence
  Description of Artificial Sequence: Synthetic oligonucleotide
agguuaaacacugaugaca

SEQ ID NO: 3240416 - RNA, 19 nt, Artificial Sequence
  Description of Artificial Sequence: Synthetic oligonucleotide
ugugucgaaaaugaaggac

SEQ ID NO: 3240417 - RNA, 19 nt, Artificial Sequence
  Description of Artificial Sequence: Synthetic oligonucleotide
acuaauuucguacagcagc

SEQ ID NO: 3240418 - RNA, 19 nt, Artificial Sequence
  Description of Artificial Sequence: Synthetic oligonucleotide
aaaugaauuguuuugggag

SEQ ID NO: 3240419 - RNA, 19 nt, Artificial Sequence
  Description of Artificial Sequence: Synthetic oligonucleotide
aaagccaucacuaauuucg

SEQ ID NO: 3240420 - RNA, 19 nt, Artificial Sequence
  Description of Artificial Sequence: Synthetic oligonucleotide
aaauuagguagccauuccc

SEQ ID NO: 3240421 - RNA, 19 nt, Artificial Sequence
  Description of Artificial Sequence: Synthetic oligonucleotide
aaucuauauucacugugcc

SEQ ID NO: 3240422 - RNA, 19 nt, Artificial Sequence
  Description of Artificial Sequence: Synthetic oligonucleotide
aagguuuaacucuuagacc

SEQ ID NO: 3240423 - RNA, 19 nt, Artificial Sequence
  Description of Artificial Sequence: Synthetic oligonucleotide
aagaauucucaucauuucg

SEQ ID NO: 3240424 - RNA, 19 nt, Artificial Sequence
  Description of Artificial Sequence: Synthetic oligonucleotide
aucaauaacauauacacaa

SEQ ID NO: 3240425 - RNA, 19 nt, Artificial Sequence
  Description of Artificial Sequence: Synthetic oligonucleotide
uauaguaguucgaucaacg

SEQ ID NO: 3240426 - RNA, 19 nt, Artificial Sequence
  Description of Artificial Sequence: Synthetic oligonucleotide
uugauaauaccuaauugag

SEQ ID NO: 3240427 - RNA, 19 nt, Artificial Sequence
  Description of Artificial Sequence: Synthetic oligonucleotide
cuagucuaaauuaauauac

SEQ ID NO: 3240428 - RNA, 19 nt, Artificial Sequence
  Description of Artificial Sequence: Synthetic oligonucleotide
aaucuugaagaacaacacg

SEQ ID NO: 3240429 - RNA, 19 nt, Artificial Sequence
  Description of Artificial Sequence: Synthetic oligonucleotide
uuaaaaggacacaggaugg

SEQ ID NO: 3240430 - RNA, 19 nt, Artificial Sequence
  Description of Artificial Sequence: Synthetic oligonucleotide
uaacacauugaaaacaggc

SEQ ID NO: 3240431 - RNA, 19 nt, Artificial Sequence
  Description of Artificial Sequence: Synthetic oligonucleotide
ucaacgauagauaauugug

SEQ ID NO: 3240432 - RNA, 19 nt, Artificial Sequence
  Description of Artificial Sequence: Synthetic oligonucleotide
aaaaucuugaagaacaaca

SEQ ID NO: 3240433 - RNA, 19 nt, Artificial Sequence
  Description of Artificial Sequence: Synthetic oligonucleotide
aucauuucgaaacaauuuc

SEQ ID NO: 3240434 - RNA, 19 nt, Artificial Sequence
  Description of Artificial Sequence: Synthetic oligonucleotide
aaauucugucuuuauuuac

SEQ ID NO: 3240435 - RNA, 19 nt, Artificial Sequence
  Description of Artificial Sequence: Synthetic oligonucleotide
uuuaccuucaauauauuuc

SEQ ID NO: 3240436 - RNA, 19 nt, Artificial Sequence
  Description of Artificial Sequence: Synthetic oligonucleotide
uuacaaaauguucugauaa

SEQ ID NO: 3240437 - RNA, 19 nt, Artificial Sequence
  Description of Artificial Sequence: Synthetic oligonucleotide
uucauuaaaagccaucacu

SEQ ID NO: 3240438 - RNA, 19 nt, Artificial Sequence
  Description of Artificial Sequence: Synthetic oligonucleotide
aaaucuugaagaacaacac

SEQ ID NO: 3240439 - RNA, 19 nt, Artificial Sequence
  Description of Artificial Sequence: Synthetic oligonucleotide
aguuagcucacauccaacc

SEQ ID NO: 3240440 - RNA, 19 nt, Artificial Sequence
  Description of Artificial Sequence: Synthetic oligonucleotide
acuacuccuagcuuuaaac

SEQ ID NO: 3240441 - RNA, 19 nt, Artificial Sequence
  Description of Artificial Sequence: Synthetic oligonucleotide
uuacucaagauauacugag

SEQ ID NO: 3240442 - RNA, 19 nt, Artificial Sequence
  Description of Artificial Sequence: Synthetic oligonucleotide
uauuuuagggacuaaucug

SEQ ID NO: 3240443 - RNA, 19 nt, Artificial Sequence
  Description of Artificial Sequence: Synthetic oligonucleotide
ucuauauucacugugccug

SEQ ID NO: 3240444 - RNA, 19 nt, Artificial Sequence
  Description of Artificial Sequence: Synthetic oligonucleotide
aaaaugaauuguuuuggga

SEQ ID NO: 3240445 - RNA, 19 nt, Artificial Sequence
  Description of Artificial Sequence: Synthetic oligonucleotide
gaaaauacuucucuaccag

SEQ ID NO: 3240446 - RNA, 19 nt, Artificial Sequence
  Description of Artificial Sequence: Synthetic oligonucleotide
guugauaauaccuaauuga

SEQ ID NO: 3240447 - RNA, 19 nt, Artificial Sequence
  Description of Artificial Sequence: Synthetic oligonucleotide
auacuuaacauuauugaac

SEQ ID NO: 3240448 - RNA, 19 nt, Artificial Sequence
  Description of Artificial Sequence: Synthetic oligonucleotide
auauuuuagggacuaaucu

SEQ ID NO: 3240449 - RNA, 19 nt, Artificial Sequence
  Description of Artificial Sequence: Synthetic oligonucleotide
uacuaugagaauuuucgag

SEQ ID NO: 3240450 - RNA, 19 nt, Artificial Sequence
  Description of Artificial Sequence: Synthetic oligonucleotide
uugucagagagucacagug

SEQ ID NO: 3240451 - RNA, 19 nt, Artificial Sequence
  Description of Artificial Sequence: Synthetic oligonucleotide
aguaaaaucuugaagaaca

SEQ ID NO: 3240452 - RNA, 19 nt, Artificial Sequence
  Description of Artificial Sequence: Synthetic oligonucleotide
uuugacuuacauuacaaau

SEQ ID NO: 3240453 - RNA, 19 nt, Artificial Sequence
  Description of Artificial Sequence: Synthetic oligonucleotide
ucuuccacgacacacuuca

SEQ ID NO: 3240454 - RNA, 19 nt, Artificial Sequence
  Description of Artificial Sequence: Synthetic oligonucleotide
acaaaguuuaauaagccuc

SEQ ID NO: 3240455 - RNA, 19 nt, Artificial Sequence
  Description of Artificial Sequence: Synthetic oligonucleotide
uauagggacuucuaaaaca

SEQ ID NO: 3240456 - RNA, 19 nt, Artificial Sequence
  Description of Artificial Sequence: Synthetic oligonucleotide
uaucugaugaacuucuucu

SEQ ID NO: 3240457 - RNA, 19 nt, Artificial Sequence
  Description of Artificial Sequence: Synthetic oligonucleotide
ucauuaaaagccaucacua

SEQ ID NO: 3240458 - RNA, 19 nt, Artificial Sequence
  Description of Artificial Sequence: Synthetic oligonucleotide
caucauucucaaaugaugc

SEQ ID NO: 3240459 - RNA, 19 nt, Artificial Sequence
  Description of Artificial Sequence: Synthetic oligonucleotide
caaaguuuaauaagccucc

SEQ ID NO: 3240460 - RNA, 19 nt, Artificial Sequence
  Description of Artificial Sequence: Synthetic oligonucleotide
aacugcuucuguuucaaug

SEQ ID NO: 3240461 - RNA, 19 nt, Artificial Sequence
  Description of Artificial Sequence: Synthetic oligonucleotide
aauucucgaggaguaaggc

SEQ ID NO: 3240462 - RNA, 19 nt, Artificial Sequence
  Description of Artificial Sequence: Synthetic oligonucleotide
ucagaugaagaaaacauuu

SEQ ID NO: 3240463 - RNA, 19 nt, Artificial Sequence
  Description of Artificial Sequence: Synthetic oligonucleotide
augaccacggauuccaugg

SEQ ID NO: 3240464 - RNA, 19 nt, Artificial Sequence
  Description of Artificial Sequence: Synthetic oligonucleotide
aauaacacaaaaguacuaa

SEQ ID NO: 3240465 - RNA, 19 nt, Artificial Sequence
  Description of Artificial Sequence: Synthetic oligonucleotide
cuuauguaagguuuaacuc

SEQ ID NO: 3240466 - RNA, 19 nt, Artificial Sequence
  Description of Artificial Sequence: Synthetic oligonucleotide
cuguauugcacauuuacug

SEQ ID NO: 3240467 - RNA, 19 nt, Artificial Sequence
  Description of Artificial Sequence: Synthetic oligonucleotide
acucaacaaacuuuccagc

SEQ ID NO: 3240468 - RNA, 19 nt, Artificial Sequence
  Description of Artificial Sequence: Synthetic oligonucleotide
aguugauaauaccuaauug

SEQ ID NO: 3240469 - RNA, 19 nt, Artificial Sequence
  Description of Artificial Sequence: Synthetic oligonucleotide
gauaaaacuccacagguaa

SEQ ID NO: 3240470 - RNA, 19 nt, Artificial Sequence
  Description of Artificial Sequence: Synthetic oligonucleotide
gacguaacaaaauggauga

SEQ ID NO: 3240471 - RNA, 19 nt, Artificial Sequence
  Description of Artificial Sequence: Synthetic oligonucleotide
auaaauuagguagccauuc

SEQ ID NO: 3240472 - RNA, 19 nt, Artificial Sequence
  Description of Artificial Sequence: Synthetic oligonucleotide
uauguucuaaaugucguag

SEQ ID NO: 3240473 - RNA, 19 nt, Artificial Sequence
  Description of Artificial Sequence: Synthetic oligonucleotide
uuuacugaagucgaucugc

SEQ ID NO: 3240474 - RNA, 19 nt, Artificial Sequence
  Description of Artificial Sequence: Synthetic oligonucleotide
guaaacuuuggcuggauug

SEQ ID NO: 3240475 - RNA, 19 nt, Artificial Sequence
  Description of Artificial Sequence: Synthetic oligonucleotide
uaagauaggguaacacucc

SEQ ID NO: 3240476 - RNA, 19 nt, Artificial Sequence
  Description of Artificial Sequence: Synthetic oligonucleotide
aguacagagacuuuguuuu

SEQ ID NO: 3240477 - RNA, 19 nt, Artificial Sequence
  Description of Artificial Sequence: Synthetic oligonucleotide
aagcuugauguuugcaaac

SEQ ID NO: 3240478 - RNA, 19 nt, Artificial Sequence
  Description of Artificial Sequence: Synthetic oligonucleotide
uucccugcuaaaauuauca

SEQ ID NO: 3240479 - RNA, 19 nt, Artificial Sequence
  Description of Artificial Sequence: Synthetic oligonucleotide
aucauuuacauccauggau

SEQ ID NO: 3240480 - RNA, 19 nt, Artificial Sequence
  Description of Artificial Sequence: Synthetic oligonucleotide
uugguuuccaguccaaaug

SEQ ID NO: 3240481 - RNA, 19 nt, Artificial Sequence
  Description of Artificial Sequence: Synthetic oligonucleotide
cuuuacacccagcaaauag

SEQ ID NO: 3240482 - RNA, 19 nt, Artificial Sequence
  Description of Artificial Sequence: Synthetic oligonucleotide
uagucuaaauuaauauacc

SEQ ID NO: 3240483 - RNA, 19 nt, Artificial Sequence
  Description of Artificial Sequence: Synthetic oligonucleotide
uaaacuuuggcuggauugg

SEQ ID NO: 3240484 - RNA, 19 nt, Artificial Sequence
  Description of Artificial Sequence: Synthetic oligonucleotide
aacgauagauaauugugaa

SEQ ID NO: 3240485 - RNA, 19 nt, Artificial Sequence
  Description of Artificial Sequence: Synthetic oligonucleotide
uguauugcacauuuacuga

SEQ ID NO: 3240486 - RNA, 19 nt, Artificial Sequence
  Description of Artificial Sequence: Synthetic oligonucleotide
uaaacaaguguacuggaau

SEQ ID NO: 3240487 - RNA, 19 nt, Artificial Sequence
  Description of Artificial Sequence: Synthetic oligonucleotide
auucguauauuauuuaaaa

SEQ ID NO: 3240488 - RNA, 19 nt, Artificial Sequence
  Description of Artificial Sequence: Synthetic oligonucleotide
uguugaacauccauagcca

SEQ ID NO: 3240489 - RNA, 19 nt, Artificial Sequence
  Description of Artificial Sequence: Synthetic oligonucleotide
auauugguaauguuuagaa

SEQ ID NO: 3240490 - RNA, 19 nt, Artificial Sequence
  Description of Artificial Sequence: Synthetic oligonucleotide
aaaauacuucucuaccaga

SEQ ID NO: 3240491 - RNA, 19 nt, Artificial Sequence
  Description of Artificial Sequence: Synthetic oligonucleotide
caagcgucuguccugaugg

SEQ ID NO: 3240492 - RNA, 19 nt, Artificial Sequence
  Description of Artificial Sequence: Synthetic oligonucleotide
aauccauucaccaugguua

SEQ ID NO: 3240493 - RNA, 19 nt, Artificial Sequence
  Description of Artificial Sequence: Synthetic oligonucleotide
uggacaauacaacauguuc

SEQ ID NO: 3240494 - RNA, 19 nt, Artificial Sequence
  Description of Artificial Sequence: Synthetic oligonucleotide
uacgcauugagacaugcgu

SEQ ID NO: 3240495 - RNA, 19 nt, Artificial Sequence
  Description of Artificial Sequence: Synthetic oligonucleotide
aaguuauaguaucauguaa

SEQ ID NO: 3240496 - RNA, 19 nt, Artificial Sequence
  Description of Artificial Sequence: Synthetic oligonucleotide
aaagcuugauguuugcaaa

SEQ ID NO: 3240497 - RNA, 19 nt, Artificial Sequence
  Description of Artificial Sequence: Synthetic oligonucleotide
ucuagucuaaauuaauaua

SEQ ID NO: 3240498 - RNA, 19 nt, Artificial Sequence
  Description of Artificial Sequence: Synthetic oligonucleotide
auaacugcagcaaugacca

SEQ ID NO: 3240499 - RNA, 19 nt, Artificial Sequence
  Description of Artificial Sequence: Synthetic oligonucleotide
ucacaaaagauaccauggc

SEQ ID NO: 3240500 - RNA, 19 nt, Artificial Sequence
  Description of Artificial Sequence: Synthetic oligonucleotide
ccucauagcagcaaaaucc

SEQ ID NO: 3240501 - RNA, 19 nt, Artificial Sequence
  Description of Artificial Sequence: Synthetic oligonucleotide
ucacccacugguuugguag

SEQ ID NO: 3240502 - RNA, 19 nt, Artificial Sequence
  Description of Artificial Sequence: Synthetic oligonucleotide
uaaauuagguagccauucc

SEQ ID NO: 3240503 - RNA, 19 nt, Artificial Sequence
  Description of Artificial Sequence: Synthetic oligonucleotide
ugucagagagucacagugg

SEQ ID NO: 3240504 - RNA, 19 nt, Artificial Sequence
  Description of Artificial Sequence: Synthetic oligonucleotide
ucaacaaacuuuccagcca

SEQ ID NO: 3240505 - RNA, 19 nt, Artificial Sequence
  Description of Artificial Sequence: Synthetic oligonucleotide
aggagucugcauuuucucc

SEQ ID NO: 3240506 - RNA, 19 nt, Artificial Sequence
  Description of Artificial Sequence: Synthetic oligonucleotide
uuauagggacuucuaaaac

SEQ ID NO: 3240507 - RNA, 19 nt, Artificial Sequence
  Description of Artificial Sequence: Synthetic oligonucleotide
auaauuuacagcaucaaua

SEQ ID NO: 3240508 - RNA, 19 nt, Artificial Sequence
  Description of Artificial Sequence: Synthetic oligonucleotide
uauugcacauuuacugaag

SEQ ID NO: 3240509 - RNA, 19 nt, Artificial Sequence
  Description of Artificial Sequence: Synthetic oligonucleotide
uuagcucacauccaaccac

SEQ ID NO: 3240510 - RNA, 19 nt, Artificial Sequence
  Description of Artificial Sequence: Synthetic oligonucleotide
auuuaagcaagccuagaaa

SEQ ID NO: 3240511 - RNA, 19 nt, Artificial Sequence
  Description of Artificial Sequence: Synthetic oligonucleotide
cuagcuugcuaagauaggg

SEQ ID NO: 3240512 - RNA, 19 nt, Artificial Sequence
  Description of Artificial Sequence: Synthetic oligonucleotide
ugguacaacugauaacugc

SEQ ID NO: 3240513 - RNA, 19 nt, Artificial Sequence
  Description of Artificial Sequence: Synthetic oligonucleotide
acuaauacaugauaccaua

SEQ ID NO: 3240514 - RNA, 19 nt, Artificial Sequence
  Description of Artificial Sequence: Synthetic oligonucleotide
uuagcggcagcacuacucc

SEQ ID NO: 3240515 - RNA, 19 nt, Artificial Sequence
  Description of Artificial Sequence: Synthetic oligonucleotide
augacauaaacaaguguac

SEQ ID NO: 3240516 - RNA, 19 nt, Artificial Sequence
  Description of Artificial Sequence: Synthetic oligonucleotide
cagaaucacacgauccucg

SEQ ID NO: 3240517 - RNA, 19 nt, Artificial Sequence
  Description of Artificial Sequence: Synthetic oligonucleotide
agaaauuacaauuuuaggc

SEQ ID NO: 3240518 - RNA, 19 nt, Artificial Sequence
  Description of Artificial Sequence: Synthetic oligonucleotide
aguacuuuuauuuaacacc

SEQ ID NO: 3240519 - RNA, 19 nt, Artificial Sequence
  Description of Artificial Sequence: Synthetic oligonucleotide
uuuuauuuaacaccaaagc

SEQ ID NO: 3240520 - RNA, 19 nt, Artificial Sequence
  Description of Artificial Sequence: Synthetic oligonucleotide
aaaauuuuaagaaaucuag

SEQ ID NO: 3240521 - RNA, 19 nt, Artificial Sequence
  Description of Artificial Sequence: Synthetic oligonucleotide
auuuuaagaaaucuaguac

SEQ ID NO: 3240522 - RNA, 19 nt, Artificial Sequence
  Description of Artificial Sequence: Synthetic oligonucleotide
uaaauauaugagaagggcg

SEQ ID NO: 3240523 - RNA, 19 nt, Artificial Sequence
  Description of Artificial Sequence: Synthetic oligonucleotide
acaaacacaauagacaugc

SEQ ID NO: 3240524 - RNA, 19 nt, Artificial Sequence
  Description of Artificial Sequence: Synthetic oligonucleotide
uacaauuuuaggcagauac

SEQ ID NO: 3240525 - RNA, 19 nt, Artificial Sequence
  Description of Artificial Sequence: Synthetic oligonucleotide
uuuauuuaacaccaaagca

SEQ ID NO: 3240526 - RNA, 19 nt, Artificial Sequence
  Description of Artificial Sequence: Synthetic oligonucleotide
uuuaaauauaugagaaggg

SEQ ID NO: 3240527 - RNA, 19 nt, Artificial Sequence
  Description of Artificial Sequence: Synthetic oligonucleotide
uuuaggacaaacacaauag

SEQ ID NO: 3240528 - RNA, 19 nt, Artificial Sequence
  Description of Artificial Sequence: Synthetic oligonucleotide
aaauguuucuuuuaggaca

SEQ ID NO: 3240529 - RNA, 19 nt, Artificial Sequence
  Description of Artificial Sequence: Synthetic oligonucleotide
cuuuaaauauaugagaagg

SEQ ID NO: 3240530 - RNA, 19 nt, Artificial Sequence
  Description of Artificial Sequence: Synthetic oligonucleotide
aaaucuaguacuuuuauuu

SEQ ID NO: 3240531 - RNA, 19 nt, Artificial Sequence
  Description of Artificial Sequence: Synthetic oligonucleotide
uguuauaucacuucuggcc

SEQ ID NO: 3240532 - RNA, 19 nt, Artificial Sequence
  Description of Artificial Sequence: Synthetic oligonucleotide
auguaaaccacccuuacac

SEQ ID NO: 3240533 - RNA, 19 nt, Artificial Sequence
  Description of Artificial Sequence: Synthetic oligonucleotide
uuugcuuuaauuuauuacu

SEQ ID NO: 3240534 - RNA, 19 nt, Artificial Sequence
  Description of Artificial Sequence: Synthetic oligonucleotide
uuauuuaacaccaaagcaa

SEQ ID NO: 3240535 - RNA, 19 nt, Artificial Sequence
  Description of Artificial Sequence: Synthetic oligonucleotide
gaaauuacaauuuuaggca

SEQ ID NO: 3240536 - RNA, 19 nt, Artificial Sequence
  Description of Artificial Sequence: Synthetic oligonucleotide
  modified_base (2)..(2): a, c, u, g, unknown or other
unuuuauuuauuauuauua

SEQ ID NO: 3240537 - RNA, 19 nt, Artificial Sequence
  Description of Artificial Sequence: Synthetic oligonucleotide
uuuuaagaaaucuaguacu

SEQ ID NO: 3240538 - RNA, 19 nt, Artificial Sequence
  Description of Artificial Sequence: Synthetic oligonucleotide
aauuuuaagaaaucuagua

SEQ ID NO: 3240539 - RNA, 19 nt, Artificial Sequence
  Description of Artificial Sequence: Synthetic oligonucleotide
ucuuuuaggacaaacacaa

SEQ ID NO: 3240540 - RNA, 19 nt, Artificial Sequence
  Description of Artificial Sequence: Synthetic oligonucleotide
  modified_base (5)..(5): a, c, u, g, unknown or other
uuuunuuuauuuauuauua

SEQ ID NO: 3240541 - RNA, 19 nt, Artificial Sequence
  Description of Artificial Sequence: Synthetic oligonucleotide
agauacaaaacuauguagc

SEQ ID NO: 3240542 - RNA, 19 nt, Artificial Sequence
  Description of Artificial Sequence: Synthetic oligonucleotide
aaauuacaauuuuaggcag

SEQ ID NO: 3240543 - RNA, 19 nt, Artificial Sequence
  Description of Artificial Sequence: Synthetic oligonucleotide
uguagcaucccacaagagg

SEQ ID NO: 3240544 - RNA, 19 nt, Artificial Sequence
  Description of Artificial Sequence: Synthetic oligonucleotide
ugaaauguuucuuuuagga

SEQ ID NO: 3240545 - RNA, 19 nt, Artificial Sequence
  Description of Artificial Sequence: Synthetic oligonucleotide
uuucuuuuaggacaaacac

SEQ ID NO: 3240546 - RNA, 19 nt, Artificial Sequence
  Description of Artificial Sequence: Synthetic oligonucleotide
aaaacuauguagcauccca

SEQ ID NO: 3240547 - RNA, 19 nt, Artificial Sequence
  Description of Artificial Sequence: Synthetic oligonucleotide
aauaauggcaccugcuuug

SEQ ID NO: 3240548 - RNA, 19 nt, Artificial Sequence
  Description of Artificial Sequence: Synthetic oligonucleotide
agagaauugaauccacggc

SEQ ID NO: 3240549 - RNA, 19 nt, Artificial Sequence
  Description of Artificial Sequence: Synthetic oligonucleotide
caugcuuuaaauauaugag

SEQ ID NO: 3240550 - RNA, 19 nt, Artificial Sequence
  Description of Artificial Sequence: Synthetic oligonucleotide
uuaaauauaugagaagggc

SEQ ID NO: 3240551 - RNA, 19 nt, Artificial Sequence
  Description of Artificial Sequence: Synthetic oligonucleotide
cuuuuauuuaacaccaaag

SEQ ID NO: 3240552 - RNA, 19 nt, Artificial Sequence
  Description of Artificial Sequence: Synthetic oligonucleotide
gagaaauuacaauuuuagg

SEQ ID NO: 3240553 - RNA, 19 nt, Artificial Sequence
  Description of Artificial Sequence: Synthetic oligonucleotide
aaacacagagcacauuuag

SEQ ID NO: 3240554 - RNA, 19 nt, Artificial Sequence
  Description of Artificial Sequence: Synthetic oligonucleotide
aauugaauccacggcaggc

SEQ ID NO: 3240555 - RNA, 19 nt, Artificial Sequence
  Description of Artificial Sequence: Synthetic oligonucleotide
cuaucuuaaacacagagca

SEQ ID NO: 3240556 - RNA, 19 nt, Artificial Sequence
  Description of Artificial Sequence: Synthetic oligonucleotide
uaagcagagaauugaaucc

SEQ ID NO: 3240557 - RNA, 19 nt, Artificial Sequence
  Description of Artificial Sequence: Synthetic oligonucleotide
uacacaagguguuauauca

SEQ ID NO: 3240558 - RNA, 19 nt, Artificial Sequence
  Description of Artificial Sequence: Synthetic oligonucleotide
auaggggagaucuacagag

SEQ ID NO: 3240559 - RNA, 19 nt, Artificial Sequence
  Description of Artificial Sequence: Synthetic oligonucleotide
acaugcuuuaaauauauga

SEQ ID NO: 3240560 - RNA, 19 nt, Artificial Sequence
  Description of Artificial Sequence: Synthetic oligonucleotide
uuaagcagagaauugaauc

SEQ ID NO: 3240561 - RNA, 19 nt, Artificial Sequence
  Description of Artificial Sequence: Synthetic oligonucleotide
auagacaugcuuuaaauau

SEQ ID NO: 3240562 - RNA, 19 nt, Artificial Sequence
  Description of Artificial Sequence: Synthetic oligonucleotide
ugcuuuaaauauaugagaa

SEQ ID NO: 3240563 - RNA, 19 nt, Artificial Sequence
  Description of Artificial Sequence: Synthetic oligonucleotide
uuuuaggacaaacacaaua

SEQ ID NO: 3240564 - RNA, 19 nt, Artificial Sequence
  Description of Artificial Sequence: Synthetic oligonucleotide
aacaccaaagcaaacauca

SEQ ID NO: 3240565 - RNA, 19 nt, Artificial Sequence
  Description of Artificial Sequence: Synthetic oligonucleotide
uuuugcuuuaauuuauuac

SEQ ID NO: 3240566 - RNA, 19 nt, Artificial Sequence
  Description of Artificial Sequence: Synthetic oligonucleotide
uuuauagucaggguuacug

SEQ ID NO: 3240567 - RNA, 19 nt, Artificial Sequence
  Description of Artificial Sequence: Synthetic oligonucleotide
uuaaacacagagcacauuu

SEQ ID NO: 3240568 - RNA, 19 nt, Artificial Sequence
  Description of Artificial Sequence: Synthetic oligonucleotide
guugaaauguuucuuuuag

SEQ ID NO: 3240569 - RNA, 19 nt, Artificial Sequence
  Description of Artificial Sequence: Synthetic oligonucleotide
uauuuaacaccaaagcaaa

SEQ ID NO: 3240570 - RNA, 19 nt, Artificial Sequence
  Description of Artificial Sequence: Synthetic oligonucleotide
aaauauaugagaagggcga

SEQ ID NO: 3240571 - RNA, 19 nt, Artificial Sequence
  Description of Artificial Sequence: Synthetic oligonucleotide
uuuaggcagauacaaaacu

SEQ ID NO: 3240572 - RNA, 19 nt, Artificial Sequence
  Description of Artificial Sequence: Synthetic oligonucleotide
uauguagcaucccacaaga

SEQ ID NO: 3240573 - RNA, 19 nt, Artificial Sequence
  Description of Artificial Sequence: Synthetic oligonucleotide
uuuaacaccaaagcaaaca

SEQ ID NO: 3240574 - RNA, 19 nt, Artificial Sequence
  Description of Artificial Sequence: Synthetic oligonucleotide
agagaaauuacaauuuuag

SEQ ID NO: 3240575 - RNA, 19 nt, Artificial Sequence
  Description of Artificial Sequence: Synthetic oligonucleotide
uacaaaacuauguagcauc

SEQ ID NO: 3240576 - RNA, 19 nt, Artificial Sequence
  Description of Artificial Sequence: Synthetic oligonucleotide
auuuuaggcagauacaaaa

SEQ ID NO: 3240577 - RNA, 19 nt, Artificial Sequence
  Description of Artificial Sequence: Synthetic oligonucleotide
aaaccacccuuacacaagg

SEQ ID NO: 3240578 - RNA, 19 nt, Artificial Sequence
  Description of Artificial Sequence: Synthetic oligonucleotide
aaagcaaacaucaaguguu

SEQ ID NO: 3240579 - RNA, 19 nt, Artificial Sequence
  Description of Artificial Sequence: Synthetic oligonucleotide
uucuuuuaggacaaacaca

SEQ ID NO: 3240580 - RNA, 19 nt, Artificial Sequence
  Description of Artificial Sequence: Synthetic oligonucleotide
aauauaugagaagggcgac

SEQ ID NO: 3240581 - RNA, 19 nt, Artificial Sequence
  Description of Artificial Sequence: Synthetic oligonucleotide
uaggacaaacacaauagac

SEQ ID NO: 3240582 - RNA, 19 nt, Artificial Sequence
  Description of Artificial Sequence: Synthetic oligonucleotide
guagcaucccacaagaggg

SEQ ID NO: 3240583 - RNA, 19 nt, Artificial Sequence
  Description of Artificial Sequence: Synthetic oligonucleotide
agaagggcgacauguaaac

SEQ ID NO: 3240584 - RNA, 19 nt, Artificial Sequence
  Description of Artificial Sequence: Synthetic oligonucleotide
aaaauaauggcaccugcuu

SEQ ID NO: 3240585 - RNA, 19 nt, Artificial Sequence
  Description of Artificial Sequence: Synthetic oligonucleotide
auucauuggugacaccacc

SEQ ID NO: 3240586 - RNA, 19 nt, Artificial Sequence
  Description of Artificial Sequence: Synthetic oligonucleotide
  modified_base (3)..(3): a, c, u, g, unknown or other
uunuuuauuuauuauuauu

SEQ ID NO: 3240587 - RNA, 19 nt, Artificial Sequence
  Description of Artificial Sequence: Synthetic oligonucleotide
uugaaauguuucuuuuagg

SEQ ID NO: 3240588 - RNA, 19 nt, Artificial Sequence
  Description of Artificial Sequence: Synthetic oligonucleotide
ucuaguacuuuuauuuaac

SEQ ID NO: 3240589 - RNA, 19 nt, Artificial Sequence
  Description of Artificial Sequence: Synthetic oligonucleotide
gauacaaaacuauguagca

SEQ ID NO: 3240590 - RNA, 19 nt, Artificial Sequence
  Description of Artificial Sequence: Synthetic oligonucleotide
aauagacaugcuuuaaaua

SEQ ID NO: 3240591 - RNA, 19 nt, Artificial Sequence
  Description of Artificial Sequence: Synthetic oligonucleotide
  modified_base (4)..(4): a, c, u, g, unknown or other
uuunuuuauuuauuauuau

SEQ ID NO: 3240592 - RNA, 19 nt, Artificial Sequence
  Description of Artificial Sequence: Synthetic oligonucleotide
gagaauugaauccacggca

SEQ ID NO: 3240593 - RNA, 19 nt, Artificial Sequence
  Description of Artificial Sequence: Synthetic oligonucleotide
aagggcgacauguaaacca

SEQ ID NO: 3240594 - RNA, 19 nt, Artificial Sequence
  Description of Artificial Sequence: Synthetic oligonucleotide
gaaauguuucuuuuaggac

SEQ ID NO: 3240595 - RNA, 19 nt, Artificial Sequence
  Description of Artificial Sequence: Synthetic oligonucleotide
cagagaauugaauccacgg

SEQ ID NO: 3240596 - RNA, 19 nt, Artificial Sequence
  Description of Artificial Sequence: Synthetic oligonucleotide
uauagucaggguuacugcc

SEQ ID NO: 3240597 - RNA, 19 nt, Artificial Sequence
  Description of Artificial Sequence: Synthetic oligonucleotide
cagauacaaaacuauguag

SEQ ID NO: 3240598 - RNA, 19 nt, Artificial Sequence
  Description of Artificial Sequence: Synthetic oligonucleotide
uuaacaccaaagcaaacau

SEQ ID NO: 3240599 - RNA, 19 nt, Artificial Sequence
  Description of Artificial Sequence: Synthetic oligonucleotide
aagguguuauaucacuucu

SEQ ID NO: 3240600 - RNA, 19 nt, Artificial Sequence
  Description of Artificial Sequence: Synthetic oligonucleotide
agcacauuuaguugaaaug

SEQ ID NO: 3240601 - RNA, 19 nt, Artificial Sequence
  Description of Artificial Sequence: Synthetic oligonucleotide
uuuuaggcagauacaaaac

SEQ ID NO: 3240602 - RNA, 19 nt, Artificial Sequence
  Description of Artificial Sequence: Synthetic oligonucleotide
uaugagaagggcgacaugu

SEQ ID NO: 3240603 - RNA, 19 nt, Artificial Sequence
  Description of Artificial Sequence: Synthetic oligonucleotide
agaucuacagagaaauuac

SEQ ID NO: 3240604 - RNA, 19 nt, Artificial Sequence
  Description of Artificial Sequence: Synthetic oligonucleotide
auuuaguugaaauguuucu

SEQ ID NO: 3240605 - RNA, 19 nt, Artificial Sequence
  Description of Artificial Sequence: Synthetic oligonucleotide
gguguuauaucacuucugg

SEQ ID NO: 3240606 - RNA, 19 nt, Artificial Sequence
  Description of Artificial Sequence: Synthetic oligonucleotide
aaauuuuaagaaaucuagu

SEQ ID NO: 3240607 - RNA, 19 nt, Artificial Sequence
  Description of Artificial Sequence: Synthetic oligonucleotide
aaacacaauagacaugcuu

SEQ ID NO: 3240608 - RNA, 19 nt, Artificial Sequence
  Description of Artificial Sequence: Synthetic oligonucleotide
uuuaagaaaucuaguacuu

SEQ ID NO: 3240609 - RNA, 19 nt, Artificial Sequence
  Description of Artificial Sequence: Synthetic oligonucleotide
augcuuuaaauauaugaga

SEQ ID NO: 3240610 - RNA, 19 nt, Artificial Sequence
  Description of Artificial Sequence: Synthetic oligonucleotide
ucuacagagaaauuacaau

SEQ ID NO: 3240611 - RNA, 19 nt, Artificial Sequence
  Description of Artificial Sequence: Synthetic oligonucleotide
gagccuaucuuaaacacag

SEQ ID NO: 3240612 - RNA, 19 nt, Artificial Sequence
  Description of Artificial Sequence: Synthetic oligonucleotide
uaguacuuuuauuuaacac

SEQ ID NO: 3240613 - RNA, 19 nt, Artificial Sequence
  Description of Artificial Sequence: Synthetic oligonucleotide
aacacaauagacaugcuuu

SEQ ID NO: 3240614 - RNA, 19 nt, Artificial Sequence
  Description of Artificial Sequence: Synthetic oligonucleotide
uuaggacaaacacaauaga

SEQ ID NO: 3240615 - RNA, 19 nt, Artificial Sequence
  Description of Artificial Sequence: Synthetic oligonucleotide
cauuuaguugaaauguuuc

SEQ ID NO: 3240616 - RNA, 19 nt, Artificial Sequence
  Description of Artificial Sequence: Synthetic oligonucleotide
ugcaacagaggcuacaguc

SEQ ID NO: 3240617 - RNA, 19 nt, Artificial Sequence
  Description of Artificial Sequence: Synthetic oligonucleotide
aacaacuccauuuauagac

SEQ ID NO: 3240618 - RNA, 19 nt, Artificial Sequence
  Description of Artificial Sequence: Synthetic oligonucleotide
aauauagacagguucaucu

SEQ ID NO: 3240619 - RNA, 19 nt, Artificial Sequence
  Description of Artificial Sequence: Synthetic oligonucleotide
aaaagucgcagauaagagc

SEQ ID NO: 3240620 - RNA, 19 nt, Artificial Sequence
  Description of Artificial Sequence: Synthetic oligonucleotide
aaaaucauugcuuucuaag

SEQ ID NO: 3240621 - RNA, 19 nt, Artificial Sequence
  Description of Artificial Sequence: Synthetic oligonucleotide
uaaauugccauaaacaacu

SEQ ID NO: 3240622 - RNA, 19 nt, Artificial Sequence
  Description of Artificial Sequence: Synthetic oligonucleotide
aaauagagaccuguaaucc

SEQ ID NO: 3240623 - RNA, 19 nt, Artificial Sequence
  Description of Artificial Sequence: Synthetic oligonucleotide
aauaaaaugcuaccaacug

SEQ ID NO: 3240624 - RNA, 19 nt, Artificial Sequence
  Description of Artificial Sequence: Synthetic oligonucleotide
aauauggcuaaaccuuugc

SEQ ID NO: 3240625 - RNA, 19 nt, Artificial Sequence
  Description of Artificial Sequence: Synthetic oligonucleotide
uccuuuucuaucuagaccc

SEQ ID NO: 3240626 - RNA, 19 nt, Artificial Sequence
  Description of Artificial Sequence: Synthetic oligonucleotide
ucuaaaaccaaagagaaaa

SEQ ID NO: 3240627 - RNA, 19 nt, Artificial Sequence
  Description of Artificial Sequence: Synthetic oligonucleotide
cauaucuaaaaccaaagag

SEQ ID NO: 3240628 - RNA, 19 nt, Artificial Sequence
  Description of Artificial Sequence: Synthetic oligonucleotide
aauugccauaaacaacucc

SEQ ID NO: 3240629 - RNA, 19 nt, Artificial Sequence
  Description of Artificial Sequence: Synthetic oligonucleotide
uauaugaguaucuuuggag

SEQ ID NO: 3240630 - RNA, 19 nt, Artificial Sequence
  Description of Artificial Sequence: Synthetic oligonucleotide
ucuugucuaagcaaaaccc

SEQ ID NO: 3240631 - RNA, 19 nt, Artificial Sequence
  Description of Artificial Sequence: Synthetic oligonucleotide
acaaucuacagacaagaac

SEQ ID NO: 3240632 - RNA, 19 nt, Artificial Sequence
  Description of Artificial Sequence: Synthetic oligonucleotide
agaacuuuagcuucugaac

SEQ ID NO: 3240633 - RNA, 19 nt, Artificial Sequence
  Description of Artificial Sequence: Synthetic oligonucleotide
uguaauucuccuuuuacug

SEQ ID NO: 3240634 - RNA, 19 nt, Artificial Sequence
  Description of Artificial Sequence: Synthetic oligonucleotide
auuaaauugccauaaacaa

SEQ ID NO: 3240635 - RNA, 19 nt, Artificial Sequence
  Description of Artificial Sequence: Synthetic oligonucleotide
aagguuaucauaucuaaaa

SEQ ID NO: 3240636 - RNA, 19 nt, Artificial Sequence
  Description of Artificial Sequence: Synthetic oligonucleotide
ucuugaguaagauuuacca

SEQ ID NO: 3240637 - RNA, 19 nt, Artificial Sequence
  Description of Artificial Sequence: Synthetic oligonucleotide
cacugaaccauuaaaacag

SEQ ID NO: 3240638 - RNA, 19 nt, Artificial Sequence
  Description of Artificial Sequence: Synthetic oligonucleotide
gauagaaccaaucauacua

SEQ ID NO: 3240639 - RNA, 19 nt, Artificial Sequence
  Description of Artificial Sequence: Synthetic oligonucleotide
ucaucugugacuguaaaag

SEQ ID NO: 3240640 - RNA, 19 nt, Artificial Sequence
  Description of Artificial Sequence: Synthetic oligonucleotide
agaaaugagagccgacucc

SEQ ID NO: 3240641 - RNA, 19 nt, Artificial Sequence
  Description of Artificial Sequence: Synthetic oligonucleotide
auauuggacacucagguca

SEQ ID NO: 3240642 - RNA, 19 nt, Artificial Sequence
  Description of Artificial Sequence: Synthetic oligonucleotide
aagaugcucuuccugcucc

SEQ ID NO: 3240643 - RNA, 19 nt, Artificial Sequence
  Description of Artificial Sequence: Synthetic oligonucleotide
ucauacuagaguauuauau

SEQ ID NO: 3240644 - RNA, 19 nt, Artificial Sequence
  Description of Artificial Sequence: Synthetic oligonucleotide
cauuuauagacaaauaaca

SEQ ID NO: 3240645 - RNA, 19 nt, Artificial Sequence
  Description of Artificial Sequence: Synthetic oligonucleotide
aaagccacucgcucaaugg

SEQ ID NO: 3240646 - RNA, 19 nt, Artificial Sequence
  Description of Artificial Sequence: Synthetic oligonucleotide
uuaaauugccauaaacaac

SEQ ID NO: 3240647 - RNA, 19 nt, Artificial Sequence
  Description of Artificial Sequence: Synthetic oligonucleotide
ugaaccuaagugaugaaac

SEQ ID NO: 3240648 - RNA, 19 nt, Artificial Sequence
  Description of Artificial Sequence: Synthetic oligonucleotide
uuugcuucuuuaauuacca

SEQ ID NO: 3240649 - RNA, 19 nt, Artificial Sequence
  Description of Artificial Sequence: Synthetic oligonucleotide
agaguauuauauuauaaaa

SEQ ID NO: 3240650 - RNA, 19 nt, Artificial Sequence
  Description of Artificial Sequence: Synthetic oligonucleotide
gucacuagaggcuaaggcg

SEQ ID NO: 3240651 - RNA, 19 nt, Artificial Sequence
  Description of Artificial Sequence: Synthetic oligonucleotide
uaagcucuugcaacaaugg

SEQ ID NO: 3240652 - RNA, 19 nt, Artificial Sequence
  Description of Artificial Sequence: Synthetic oligonucleotide
uaaaagacaucacugcacu

SEQ ID NO: 3240653 - RNA, 19 nt, Artificial Sequence
  Description of Artificial Sequence: Synthetic oligonucleotide
uguuauuccuucaugugga

SEQ ID NO: 3240654 - RNA, 19 nt, Artificial Sequence
  Description of Artificial Sequence: Synthetic oligonucleotide
cacuuauuaauuuacugug

SEQ ID NO: 3240655 - RNA, 19 nt, Artificial Sequence
  Description of Artificial Sequence: Synthetic oligonucleotide
agguuaucauaucuaaaac

SEQ ID NO: 3240656 - RNA, 19 nt, Artificial Sequence
  Description of Artificial Sequence: Synthetic oligonucleotide
uaucauaucuaaaaccaaa

SEQ ID NO: 3240657 - RNA, 19 nt, Artificial Sequence
  Description of Artificial Sequence: Synthetic oligonucleotide
ugagccaggguucacagug

SEQ ID NO: 3240658 - RNA, 19 nt, Artificial Sequence
  Description of Artificial Sequence: Synthetic oligonucleotide
agacccauggcuccaaggc

SEQ ID NO: 3240659 - RNA, 19 nt, Artificial Sequence
  Description of Artificial Sequence: Synthetic oligonucleotide
ucauaucuaaaaccaaaga

SEQ ID NO: 3240660 - RNA, 19 nt, Artificial Sequence
  Description of Artificial Sequence: Synthetic oligonucleotide
uagaguauuauauuauaaa

SEQ ID NO: 3240661 - RNA, 19 nt, Artificial Sequence
  Description of Artificial Sequence: Synthetic oligonucleotide
uacaauaaaaugcuaccaa

SEQ ID NO: 3240662 - RNA, 19 nt, Artificial Sequence
  Description of Artificial Sequence: Synthetic oligonucleotide
agugaccgucacuagaggc

SEQ ID NO: 3240663 - RNA, 19 nt, Artificial Sequence
  Description of Artificial Sequence: Synthetic oligonucleotide
guaacaucuuuccaucugg

SEQ ID NO: 3240664 - RNA, 19 nt, Artificial Sequence
  Description of Artificial Sequence: Synthetic oligonucleotide
acaaauuacugguaauuug

SEQ ID NO: 3240665 - RNA, 19 nt, Artificial Sequence
  Description of Artificial Sequence: Synthetic oligonucleotide
uaugaugcaugaaucguca

SEQ ID NO: 3240666 - RNA, 19 nt, Artificial Sequence
  Description of Artificial Sequence: Synthetic oligonucleotide
auagguaugaugcaugaau

SEQ ID NO: 3240667 - RNA, 19 nt, Artificial Sequence
  Description of Artificial Sequence: Synthetic oligonucleotide
gaaacacucuuauuuacac

SEQ ID NO: 3240668 - RNA, 19 nt, Artificial Sequence
  Description of Artificial Sequence: Synthetic oligonucleotide
auuacugcccaauuuccuc

SEQ ID NO: 3240669 - RNA, 19 nt, Artificial Sequence
  Description of Artificial Sequence: Synthetic oligonucleotide
auaugaguaucuuuggagu

SEQ ID NO: 3240670 - RNA, 19 nt, Artificial Sequence
  Description of Artificial Sequence: Synthetic oligonucleotide
uguccuugcaaucucuuug

SEQ ID NO: 3240671 - RNA, 19 nt, Artificial Sequence
  Description of Artificial Sequence: Synthetic oligonucleotide
uuuguaagcucuugcaaca

SEQ ID NO: 3240672 - RNA, 19 nt, Artificial Sequence
  Description of Artificial Sequence: Synthetic oligonucleotide
uugaguaagauuuaccauu

SEQ ID NO: 3240673 - RNA, 19 nt, Artificial Sequence
  Description of Artificial Sequence: Synthetic oligonucleotide
gagaaugguauuaaauugc

SEQ ID NO: 3240674 - RNA, 19 nt, Artificial Sequence
  Description of Artificial Sequence: Synthetic oligonucleotide
aauaaacaauuguucucug

SEQ ID NO: 3240675 - RNA, 19 nt, Artificial Sequence
  Description of Artificial Sequence: Synthetic oligonucleotide
cuuuguaagcucuugcaac

SEQ ID NO: 3240676 - RNA, 19 nt, Artificial Sequence
  Description of Artificial Sequence: Synthetic oligonucleotide
ucacuagaggcuaaggcga

SEQ ID NO: 3240677 - RNA, 19 nt, Artificial Sequence
  Description of Artificial Sequence: Synthetic oligonucleotide
acccaaaucagauuaccag

SEQ ID NO: 3240678 - RNA, 19 nt, Artificial Sequence
  Description of Artificial Sequence: Synthetic oligonucleotide
ucauuacugcccaauuucc

SEQ ID NO: 3240679 - RNA, 19 nt, Artificial Sequence
  Description of Artificial Sequence: Synthetic oligonucleotide
uuugccuucuguccagggg

SEQ ID NO: 3240680 - RNA, 19 nt, Artificial Sequence
  Description of Artificial Sequence: Synthetic oligonucleotide
aaaagauggacuugaccau

SEQ ID NO: 3240681 - RNA, 19 nt, Artificial Sequence
  Description of Artificial Sequence: Synthetic oligonucleotide
guaaaucacaaccauuuuc

SEQ ID NO: 3240682 - RNA, 19 nt, Artificial Sequence
  Description of Artificial Sequence: Synthetic oligonucleotide
cagauuaccaguuaguaaa

SEQ ID NO: 3240683 - RNA, 19 nt, Artificial Sequence
  Description of Artificial Sequence: Synthetic oligonucleotide
auauaccauauauuggaca

SEQ ID NO: 3240684 - RNA, 19 nt, Artificial Sequence
  Description of Artificial Sequence: Synthetic oligonucleotide
auuaguaauuuaaauaaaa

SEQ ID NO: 3240685 - RNA, 19 nt, Artificial Sequence
  Description of Artificial Sequence: Synthetic oligonucleotide
agaaggacuggaaagcugg

SEQ ID NO: 3240686 - RNA, 19 nt, Artificial Sequence
  Description of Artificial Sequence: Synthetic oligonucleotide
ucaguauuagcucacucuu

SEQ ID NO: 3240687 - RNA, 19 nt, Artificial Sequence
  Description of Artificial Sequence: Synthetic oligonucleotide
uugaauuuuguuauuccuu

SEQ ID NO: 3240688 - RNA, 19 nt, Artificial Sequence
  Description of Artificial Sequence: Synthetic oligonucleotide
cuccaaaacccauaguuug

SEQ ID NO: 3240689 - RNA, 19 nt, Artificial Sequence
  Description of Artificial Sequence: Synthetic oligonucleotide
agaaggucguccuuccuuc

SEQ ID NO: 3240690 - RNA, 19 nt, Artificial Sequence
  Description of Artificial Sequence: Synthetic oligonucleotide
aguaacaucuuuccaucug

SEQ ID NO: 3240691 - RNA, 19 nt, Artificial Sequence
  Description of Artificial Sequence: Synthetic oligonucleotide
ucauuaggucugaugguag

SEQ ID NO: 3240692 - RNA, 19 nt, Artificial Sequence
  Description of Artificial Sequence: Synthetic oligonucleotide
ugcaugaaucgucagcaca

SEQ ID NO: 3240693 - RNA, 19 nt, Artificial Sequence
  Description of Artificial Sequence: Synthetic oligonucleotide
uguaacuugugugaugaga

SEQ ID NO: 3240694 - RNA, 19 nt, Artificial Sequence
  Description of Artificial Sequence: Synthetic oligonucleotide
cuaucuagacccauggcuc

SEQ ID NO: 3240695 - RNA, 19 nt, Artificial Sequence
  Description of Artificial Sequence: Synthetic oligonucleotide
uucgucuucaucccaauua

SEQ ID NO: 3240696 - RNA, 19 nt, Artificial Sequence
  Description of Artificial Sequence: Synthetic oligonucleotide
auacuagaguauuauauua

SEQ ID NO: 3240697 - RNA, 19 nt, Artificial Sequence
  Description of Artificial Sequence: Synthetic oligonucleotide
gaugcaugaaucgucagca

SEQ ID NO: 3240698 - RNA, 19 nt, Artificial Sequence
  Description of Artificial Sequence: Synthetic oligonucleotide
aucuauacacggauaauuc

SEQ ID NO: 3240699 - RNA, 19 nt, Artificial Sequence
  Description of Artificial Sequence: Synthetic oligonucleotide
acuucuuuggucuccaaaa

SEQ ID NO: 3240700 - RNA, 19 nt, Artificial Sequence
  Description of Artificial Sequence: Synthetic oligonucleotide
gacauuaaguaaccgguca

SEQ ID NO: 3240701 - RNA, 19 nt, Artificial Sequence
  Description of Artificial Sequence: Synthetic oligonucleotide
ugaaucgucagcacacacu

SEQ ID NO: 3240702 - RNA, 19 nt, Artificial Sequence
  Description of Artificial Sequence: Synthetic oligonucleotide
aacucccucauccuuuuca

SEQ ID NO: 3240703 - RNA, 19 nt, Artificial Sequence
  Description of Artificial Sequence: Synthetic oligonucleotide
aucucuguccuccccauuc

SEQ ID NO: 3240704 - RNA, 19 nt, Artificial Sequence
  Description of Artificial Sequence: Synthetic oligonucleotide
guauugugcaauuugaagu

SEQ ID NO: 3240705 - RNA, 19 nt, Artificial Sequence
  Description of Artificial Sequence: Synthetic oligonucleotide
uaacuugacaggcucuucu

SEQ ID NO: 3240706 - RNA, 19 nt, Artificial Sequence
  Description of Artificial Sequence: Synthetic oligonucleotide
aaucacaaccauuuucauu

SEQ ID NO: 3240707 - RNA, 19 nt, Artificial Sequence
  Description of Artificial Sequence: Synthetic oligonucleotide
auuaauuuacuguguaauu

SEQ ID NO: 3240708 - RNA, 19 nt, Artificial Sequence
  Description of Artificial Sequence: Synthetic oligonucleotide
aagcacuccaaauauccaa

SEQ ID NO: 3240709 - RNA, 19 nt, Artificial Sequence
  Description of Artificial Sequence: Synthetic oligonucleotide
ucuugaugccacuguaugc

SEQ ID NO: 3240710 - RNA, 19 nt, Artificial Sequence
  Description of Artificial Sequence: Synthetic oligonucleotide
auauagacagguucaucug

SEQ ID NO: 3240711 - RNA, 19 nt, Artificial Sequence
  Description of Artificial Sequence: Synthetic oligonucleotide
uuagguuuauauuccuagu

SEQ ID NO: 3240712 - RNA, 19 nt, Artificial Sequence
  Description of Artificial Sequence: Synthetic oligonucleotide
ucagauuaccaguuaguaa

SEQ ID NO: 3240713 - RNA, 19 nt, Artificial Sequence
  Description of Artificial Sequence: Synthetic oligonucleotide
uacuguguaauucuccuuu

SEQ ID NO: 3240714 - RNA, 19 nt, Artificial Sequence
  Description of Artificial Sequence: Synthetic oligonucleotide
uaauauggcuaaaccuuug

SEQ ID NO: 3240715 - RNA, 19 nt, Artificial Sequence
  Description of Artificial Sequence: Synthetic oligonucleotide
aaugguaggcugaaaccag

SEQ ID NO: 3240716 - RNA, 19 nt, Artificial Sequence
  Description of Artificial Sequence: Synthetic oligonucleotide
aagaagacguuaaauuacu

SEQ ID NO: 3240717 - RNA, 19 nt, Artificial Sequence
  Description of Artificial Sequence: Synthetic oligonucleotide
aucuguauaauguacauuc

SEQ ID NO: 3240718 - RNA, 19 nt, Artificial Sequence
  Description of Artificial Sequence: Synthetic oligonucleotide
gauauaaaggaacaaaaug

SEQ ID NO: 3240719 - RNA, 19 nt, Artificial Sequence
  Description of Artificial Sequence: Synthetic oligonucleotide
uucacaauuacacuaaucu

SEQ ID NO: 3240720 - RNA, 19 nt, Artificial Sequence
  Description of Artificial Sequence: Synthetic oligonucleotide
ugagugaaggcuaaaaucc

SEQ ID NO: 3240721 - RNA, 19 nt, Artificial Sequence
  Description of Artificial Sequence: Synthetic oligonucleotide
uguaccugcaguaagguag

SEQ ID NO: 3240722 - RNA, 19 nt, Artificial Sequence
  Description of Artificial Sequence: Synthetic oligonucleotide
aaauuuuauguacacauau

SEQ ID NO: 3240723 - RNA, 19 nt, Artificial Sequence
  Description of Artificial Sequence: Synthetic oligonucleotide
aauguauagaacauuucac

SEQ ID NO: 3240724 - RNA, 19 nt, Artificial Sequence
  Description of Artificial Sequence: Synthetic oligonucleotide
uguacauucaauauagaaa

SEQ ID NO: 3240725 - RNA, 19 nt, Artificial Sequence
  Description of Artificial Sequence: Synthetic oligonucleotide
aacuuuaagagguauggga

SEQ ID NO: 3240726 - RNA, 19 nt, Artificial Sequence
  Description of Artificial Sequence: Synthetic oligonucleotide
cuuucucaaaacaugauac

SEQ ID NO: 3240727 - RNA, 19 nt, Artificial Sequence
  Description of Artificial Sequence: Synthetic oligonucleotide
gaacaagucauguuucugg

SEQ ID NO: 3240728 - RNA, 19 nt, Artificial Sequence
  Description of Artificial Sequence: Synthetic oligonucleotide
auuauugauuagcuuuucc

SEQ ID NO: 3240729 - RNA, 19 nt, Artificial Sequence
  Description of Artificial Sequence: Synthetic oligonucleotide
ugauacuccagaaucacug

SEQ ID NO: 3240730 - RNA, 19 nt, Artificial Sequence
  Description of Artificial Sequence: Synthetic oligonucleotide
aaaccuaguauacaucaug

SEQ ID NO: 3240731 - RNA, 19 nt, Artificial Sequence
  Description of Artificial Sequence: Synthetic oligonucleotide
ucucaaaacaugauacucc

SEQ ID NO: 3240732 - RNA, 19 nt, Artificial Sequence
  Description of Artificial Sequence: Synthetic oligonucleotide
ucuuaagucauagucauca

SEQ ID NO: 3240733 - RNA, 19 nt, Artificial Sequence
  Description of Artificial Sequence: Synthetic oligonucleotide
agcuuuauauauuugauaa

SEQ ID NO: 3240734 - RNA, 19 nt, Artificial Sequence
  Description of Artificial Sequence: Synthetic oligonucleotide
uguuucaacauguuggcug

SEQ ID NO: 3240735 - RNA, 19 nt, Artificial Sequence
  Description of Artificial Sequence: Synthetic oligonucleotide
uucacagucuuguaaacag

SEQ ID NO: 3240736 - RNA, 19 nt, Artificial Sequence
  Description of Artificial Sequence: Synthetic oligonucleotide
uauaauguacauucaauau

SEQ ID NO: 3240737 - RNA, 19 nt, Artificial Sequence
  Description of Artificial Sequence: Synthetic oligonucleotide
uuacauacaucaagaaaag

SEQ ID NO: 3240738 - RNA, 19 nt, Artificial Sequence
  Description of Artificial Sequence: Synthetic oligonucleotide
gaaagcuuuauauauuuga

SEQ ID NO: 3240739 - RNA, 19 nt, Artificial Sequence
  Description of Artificial Sequence: Synthetic oligonucleotide
uuauugauuagcuuuuccu

SEQ ID NO: 3240740 - RNA, 19 nt, Artificial Sequence
  Description of Artificial Sequence: Synthetic oligonucleotide
aacuuugggaagauggccc

SEQ ID NO: 3240741 - RNA, 19 nt, Artificial Sequence
  Description of Artificial Sequence: Synthetic oligonucleotide
uugaagagagaagagaagc

SEQ ID NO: 3240742 - RNA, 19 nt, Artificial Sequence
  Description of Artificial Sequence: Synthetic oligonucleotide
aggaauaacacugucauga

SEQ ID NO: 3240743 - RNA, 19 nt, Artificial Sequence
  Description of Artificial Sequence: Synthetic oligonucleotide
acacuaaucucuuacauaa

SEQ ID NO: 3240744 - RNA, 19 nt, Artificial Sequence
  Description of Artificial Sequence: Synthetic oligonucleotide
guuaguuaaugauugagga

SEQ ID NO: 3240745 - RNA, 19 nt, Artificial Sequence
  Description of Artificial Sequence: Synthetic oligonucleotide
uuugaagagagaagagaag

SEQ ID NO: 3240746 - RNA, 19 nt, Artificial Sequence
  Description of Artificial Sequence: Synthetic oligonucleotide
aacauuucacaauuacacu

SEQ ID NO: 3240747 - RNA, 19 nt, Artificial Sequence
  Description of Artificial Sequence: Synthetic oligonucleotide
auugauuagcuuuuccuug

SEQ ID NO: 3240748 - RNA, 19 nt, Artificial Sequence
  Description of Artificial Sequence: Synthetic oligonucleotide
acuaaucucuuacauaaca

SEQ ID NO: 3240749 - RNA, 19 nt, Artificial Sequence
  Description of Artificial Sequence: Synthetic oligonucleotide
auguauagaacauuucaca

SEQ ID NO: 3240750 - RNA, 19 nt, Artificial Sequence
  Description of Artificial Sequence: Synthetic oligonucleotide
aaaacaugauacuccagaa

SEQ ID NO: 3240751 - RNA, 19 nt, Artificial Sequence
  Description of Artificial Sequence: Synthetic oligonucleotide
aagauguaccugcaguaag

SEQ ID NO: 3240752 - RNA, 19 nt, Artificial Sequence
  Description of Artificial Sequence: Synthetic oligonucleotide
gagaguuaguuaaugauug

SEQ ID NO: 3240753 - RNA, 19 nt, Artificial Sequence
  Description of Artificial Sequence: Synthetic oligonucleotide
gaugaagccugucauacac

SEQ ID NO: 3240754 - RNA, 19 nt, Artificial Sequence
  Description of Artificial Sequence: Synthetic oligonucleotide
ugcuguuauggcauuauug

SEQ ID NO: 3240755 - RNA, 19 nt, Artificial Sequence
  Description of Artificial Sequence: Synthetic oligonucleotide
ugucauacacaccauugug

SEQ ID NO: 3240756 - RNA, 19 nt, Artificial Sequence
  Description of Artificial Sequence: Synthetic oligonucleotide
ugauucaucgccuggagaa

SEQ ID NO: 3240757 - RNA, 19 nt, Artificial Sequence
  Description of Artificial Sequence: Synthetic oligonucleotide
ucgguuaauugcuucacag

SEQ ID NO: 3240758 - RNA, 19 nt, Artificial Sequence
  Description of Artificial Sequence: Synthetic oligonucleotide
ggaacauucgguuaauugc

SEQ ID NO: 3240759 - RNA, 19 nt, Artificial Sequence
  Description of Artificial Sequence: Synthetic oligonucleotide
ugggacuugaucccgagca

SEQ ID NO: 3240760 - RNA, 19 nt, Artificial Sequence
  Description of Artificial Sequence: Synthetic oligonucleotide
ugugcuacuaacucauucu

SEQ ID NO: 3240761 - RNA, 19 nt, Artificial Sequence
  Description of Artificial Sequence: Synthetic oligonucleotide
ugcaugggacacauaaggg

SEQ ID NO: 3240762 - RNA, 19 nt, Artificial Sequence
  Description of Artificial Sequence: Synthetic oligonucleotide
gguuaauugcuucacaggc

SEQ ID NO: 3240763 - RNA, 19 nt, Artificial Sequence
  Description of Artificial Sequence: Synthetic oligonucleotide
agaacuucuuugaagagag

SEQ ID NO: 3240764 - RNA, 19 nt, Artificial Sequence
  Description of Artificial Sequence: Synthetic oligonucleotide
aggaacaaaaugugcuuac

SEQ ID NO: 3240765 - RNA, 19 nt, Artificial Sequence
  Description of Artificial Sequence: Synthetic oligonucleotide
uguuugagagucagaaaug

SEQ ID NO: 3240766 - RNA, 19 nt, Artificial Sequence
  Description of Artificial Sequence: Synthetic oligonucleotide
uuuccuuguuuucugagaa

SEQ ID NO: 3240767 - RNA, 19 nt, Artificial Sequence
  Description of Artificial Sequence: Synthetic oligonucleotide
cuuaguggcagcaggacug

SEQ ID NO: 3240768 - RNA, 19 nt, Artificial Sequence
  Description of Artificial Sequence: Synthetic oligonucleotide
auagccaagguccccugcc

SEQ ID NO: 3240769 - RNA, 19 nt, Artificial Sequence
  Description of Artificial Sequence: Synthetic oligonucleotide
aacaagucauguuucuggu

SEQ ID NO: 3240770 - RNA, 19 nt, Artificial Sequence
  Description of Artificial Sequence: Synthetic oligonucleotide
aaaggaacaaaaugugcuu

SEQ ID NO: 3240771 - RNA, 19 nt, Artificial Sequence
  Description of Artificial Sequence: Synthetic oligonucleotide
uugaucccgagcaacagga

SEQ ID NO: 3240772 - RNA, 19 nt, Artificial Sequence
  Description of Artificial Sequence: Synthetic oligonucleotide
aacuucuuugaagagagaa

SEQ ID NO: 3240773 - RNA, 19 nt, Artificial Sequence
  Description of Artificial Sequence: Synthetic oligonucleotide
acuaggaagaaaguauguc

SEQ ID NO: 3240774 - RNA, 19 nt, Artificial Sequence
  Description of Artificial Sequence: Synthetic oligonucleotide
caaucugggccuuaguggc

SEQ ID NO: 3240775 - RNA, 19 nt, Artificial Sequence
  Description of Artificial Sequence: Synthetic oligonucleotide
ucagagaguuaguuaauga

SEQ ID NO: 3240776 - RNA, 19 nt, Artificial Sequence
  Description of Artificial Sequence: Synthetic oligonucleotide
uauugauuagcuuuuccuu

SEQ ID NO: 3240777 - RNA, 19 nt, Artificial Sequence
  Description of Artificial Sequence: Synthetic oligonucleotide
uacccauggaggcugaccc

SEQ ID NO: 3240778 - RNA, 19 nt, Artificial Sequence
  Description of Artificial Sequence: Synthetic oligonucleotide
uuugaagcaacaacaucuc

SEQ ID NO: 3240779 - RNA, 19 nt, Artificial Sequence
  Description of Artificial Sequence: Synthetic oligonucleotide
gcacaaagcauaucgacgg

SEQ ID NO: 3240780 - RNA, 19 nt, Artificial Sequence
  Description of Artificial Sequence: Synthetic oligonucleotide
uuuugcacaagcuccuugu

SEQ ID NO: 3240781 - RNA, 19 nt, Artificial Sequence
  Description of Artificial Sequence: Synthetic oligonucleotide
uggccgaugaagauguacc

SEQ ID NO: 3240782 - RNA, 19 nt, Artificial Sequence
  Description of Artificial Sequence: Synthetic oligonucleotide
aagcuuuauauauuugaua

SEQ ID NO: 3240783 - RNA, 19 nt, Artificial Sequence
  Description of Artificial Sequence: Synthetic oligonucleotide
caaaacaugauacuccaga

SEQ ID NO: 3240784 - RNA, 19 nt, Artificial Sequence
  Description of Artificial Sequence: Synthetic oligonucleotide
agagucagaaaugaacaag

SEQ ID NO: 3240785 - RNA, 19 nt, Artificial Sequence
  Description of Artificial Sequence: Synthetic oligonucleotide
gaccaaacaaacauuauaa

SEQ ID NO: 3240786 - RNA, 19 nt, Artificial Sequence
  Description of Artificial Sequence: Synthetic oligonucleotide
ugaagccugucauacacac

SEQ ID NO: 3240787 - RNA, 19 nt, Artificial Sequence
  Description of Artificial Sequence: Synthetic oligonucleotide
uuaguuaaugauugaggau

SEQ ID NO: 3240788 - RNA, 19 nt, Artificial Sequence
  Description of Artificial Sequence: Synthetic oligonucleotide
gagaagcuuuguuagcugc

SEQ ID NO: 3240789 - RNA, 19 nt, Artificial Sequence
  Description of Artificial Sequence: Synthetic oligonucleotide
auuagcuuuuccuuguuuu

SEQ ID NO: 3240790 - RNA, 19 nt, Artificial Sequence
  Description of Artificial Sequence: Synthetic oligonucleotide
aaaugugcuuacauacauc

SEQ ID NO: 3240791 - RNA, 19 nt, Artificial Sequence
  Description of Artificial Sequence: Synthetic oligonucleotide
uucucaaaacaugauacuc

SEQ ID NO: 3240792 - RNA, 19 nt, Artificial Sequence
  Description of Artificial Sequence: Synthetic oligonucleotide
uacaccuucaagcaacuuu

SEQ ID NO: 3240793 - RNA, 19 nt, Artificial Sequence
  Description of Artificial Sequence: Synthetic oligonucleotide
uguucuccaaacugcagac

SEQ ID NO: 3240794 - RNA, 19 nt, Artificial Sequence
  Description of Artificial Sequence: Synthetic oligonucleotide
uggauaacccgaauagcac

SEQ ID NO: 3240795 - RNA, 19 nt, Artificial Sequence
  Description of Artificial Sequence: Synthetic oligonucleotide
agaccaacaguaucugcuc

SEQ ID NO: 3240796 - RNA, 19 nt, Artificial Sequence
  Description of Artificial Sequence: Synthetic oligonucleotide
gaagguuagacauggccga

SEQ ID NO: 3240797 - RNA, 19 nt, Artificial Sequence
  Description of Artificial Sequence: Synthetic oligonucleotide
gaggcuacaagccuccuca

SEQ ID NO: 3240798 - RNA, 19 nt, Artificial Sequence
  Description of Artificial Sequence: Synthetic oligonucleotide
aaccuaguauacaucauga

SEQ ID NO: 3240799 - RNA, 19 nt, Artificial Sequence
  Description of Artificial Sequence: Synthetic oligonucleotide
ucaaaacaugauacuccag

SEQ ID NO: 3240800 - RNA, 19 nt, Artificial Sequence
  Description of Artificial Sequence: Synthetic oligonucleotide
gcaacuuuaagagguaugg

SEQ ID NO: 3240801 - RNA, 19 nt, Artificial Sequence
  Description of Artificial Sequence: Synthetic oligonucleotide
ggaagguuagacauggccg

SEQ ID NO: 3240802 - RNA, 19 nt, Artificial Sequence
  Description of Artificial Sequence: Synthetic oligonucleotide
uugauuagcuuuuccuugu

SEQ ID NO: 3240803 - RNA, 19 nt, Artificial Sequence
  Description of Artificial Sequence: Synthetic oligonucleotide
acauucgguuaauugcuuc

SEQ ID NO: 3240804 - RNA, 19 nt, Artificial Sequence
  Description of Artificial Sequence: Synthetic oligonucleotide
cagauauaaaggaacaaaa

SEQ ID NO: 3240805 - RNA, 19 nt, Artificial Sequence
  Description of Artificial Sequence: Synthetic oligonucleotide
aauguggacgcagcacugg

SEQ ID NO: 3240806 - RNA, 19 nt, Artificial Sequence
  Description of Artificial Sequence: Synthetic oligonucleotide
ucccuuuauuuuaaaauuu

SEQ ID NO: 3240807 - RNA, 19 nt, Artificial Sequence
  Description of Artificial Sequence: Synthetic oligonucleotide
caucaguggaccaaugguc

SEQ ID NO: 3240808 - RNA, 19 nt, Artificial Sequence
  Description of Artificial Sequence: Synthetic oligonucleotide
ggaaaccuaguauacauca

SEQ ID NO: 3240809 - RNA, 19 nt, Artificial Sequence
  Description of Artificial Sequence: Synthetic oligonucleotide
ugaucuguauaauguacau

SEQ ID NO: 3240810 - RNA, 19 nt, Artificial Sequence
  Description of Artificial Sequence: Synthetic oligonucleotide
ucucaaguucugcauuuga

SEQ ID NO: 3240811 - RNA, 19 nt, Artificial Sequence
  Description of Artificial Sequence: Synthetic oligonucleotide
auggauaacccgaauagca

SEQ ID NO: 3240812 - RNA, 19 nt, Artificial Sequence
  Description of Artificial Sequence: Synthetic oligonucleotide
cucaaaacaugauacucca

SEQ ID NO: 3240813 - RNA, 19 nt, Artificial Sequence
  Description of Artificial Sequence: Synthetic oligonucleotide
agagcuuucacuaccuuca

SEQ ID NO: 3240814 - RNA, 19 nt, Artificial Sequence
  Description of Artificial Sequence: Synthetic oligonucleotide
gucauacacaccauugugc

SEQ ID NO: 3240815 - RNA, 19 nt, Artificial Sequence
  Description of Artificial Sequence: Synthetic oligonucleotide
cuugaucccgagcaacagg

SEQ ID NO: 3240816 - RNA, 19 nt, Artificial Sequence
  Description of Artificial Sequence: Synthetic oligonucleotide
cucucagagaguuaguuaa

SEQ ID NO: 3240817 - RNA, 19 nt, Artificial Sequence
  Description of Artificial Sequence: Synthetic oligonucleotide
uuggagaugaccuucaucg

SEQ ID NO: 3240818 - RNA, 19 nt, Artificial Sequence
  Description of Artificial Sequence: Synthetic oligonucleotide
cuuuacauuacacuccugg

SEQ ID NO: 3240819 - RNA, 19 nt, Artificial Sequence
  Description of Artificial Sequence: Synthetic oligonucleotide
ugaugguucaagaucacag

SEQ ID NO: 3240820 - RNA, 19 nt, Artificial Sequence
  Description of Artificial Sequence: Synthetic oligonucleotide
uacauuacacuccugguug

SEQ ID NO: 3240821 - RNA, 19 nt, Artificial Sequence
  Description of Artificial Sequence: Synthetic oligonucleotide
uuguacaugaccucggugc

SEQ ID NO: 3240822 - RNA, 19 nt, Artificial Sequence
  Description of Artificial Sequence: Synthetic oligonucleotide
agcagaacaagcugggagc

SEQ ID NO: 3240823 - RNA, 19 nt, Artificial Sequence
  Description of Artificial Sequence: Synthetic oligonucleotide
ugaccagacacauugccgg

SEQ ID NO: 3240824 - RNA, 19 nt, Artificial Sequence
  Description of Artificial Sequence: Synthetic oligonucleotide
uguguuauugcuuguaccu

SEQ ID NO: 3240825 - RNA, 19 nt, Artificial Sequence
  Description of Artificial Sequence: Synthetic oligonucleotide
uccugugagagguucaugg

SEQ ID NO: 3240826 - RNA, 19 nt, Artificial Sequence
  Description of Artificial Sequence: Synthetic oligonucleotide
gaugguucaagaucacagg

SEQ ID NO: 3240827 - RNA, 19 nt, Artificial Sequence
  Description of Artificial Sequence: Synthetic oligonucleotide
ucaggaggcaggcaaaucc

SEQ ID NO: 3240828 - RNA, 19 nt, Artificial Sequence
  Description of Artificial Sequence: Synthetic oligonucleotide
agucaguacccacuguucc

SEQ ID NO: 3240829 - RNA, 19 nt, Artificial Sequence
  Description of Artificial Sequence: Synthetic oligonucleotide
aaccauaccucauauccug

SEQ ID NO: 3240830 - RNA, 19 nt, Artificial Sequence
  Description of Artificial Sequence: Synthetic oligonucleotide
auuguacccaaccauaccu

SEQ ID NO: 3240831 - RNA, 19 nt, Artificial Sequence
  Description of Artificial Sequence: Synthetic oligonucleotide
uguaccuguggauucaccc

SEQ ID NO: 3240832 - RNA, 19 nt, Artificial Sequence
  Description of Artificial Sequence: Synthetic oligonucleotide
agagguucauggcaugacc

SEQ ID NO: 3240833 - RNA, 19 nt, Artificial Sequence
  Description of Artificial Sequence: Synthetic oligonucleotide
acuguguuauugcuuguac

SEQ ID NO: 3240834 - RNA, 19 nt, Artificial Sequence
  Description of Artificial Sequence: Synthetic oligonucleotide
uauugcuuguaccugugga

SEQ ID NO: 3240835 - RNA, 19 nt, Artificial Sequence
  Description of Artificial Sequence: Synthetic oligonucleotide
ucucuuguacaugaccucg

SEQ ID NO: 3240836 - RNA, 19 nt, Artificial Sequence
  Description of Artificial Sequence: Synthetic oligonucleotide
uguggauucaccccagccu

SEQ ID NO: 3240837 - RNA, 19 nt, Artificial Sequence
  Description of Artificial Sequence: Synthetic oligonucleotide
uuuacauuacacuccuggu

SEQ ID NO: 3240838 - RNA, 19 nt, Artificial Sequence
  Description of Artificial Sequence: Synthetic oligonucleotide
gagcagaacaagcugggag

SEQ ID NO: 3240839 - RNA, 19 nt, Artificial Sequence
  Description of Artificial Sequence: Synthetic oligonucleotide
acaucucacucucuuguac

SEQ ID NO: 3240840 - RNA, 19 nt, Artificial Sequence
  Description of Artificial Sequence: Synthetic oligonucleotide
agaugaccuucaucgaggc

SEQ ID NO: 3240841 - RNA, 19 nt, Artificial Sequence
  Description of Artificial Sequence: Synthetic oligonucleotide
ccaaccauaccucauaucc

SEQ ID NO: 3240842 - RNA, 19 nt, Artificial Sequence
  Description of Artificial Sequence: Synthetic oligonucleotide
aauccgggccacgugaugg

SEQ ID NO: 3240843 - RNA, 19 nt, Artificial Sequence
  Description of Artificial Sequence: Synthetic oligonucleotide
ucaucgaggccacaugcag

SEQ ID NO: 3240844 - RNA, 19 nt, Artificial Sequence
  Description of Artificial Sequence: Synthetic oligonucleotide
ugguugauuguacccaacc

SEQ ID NO: 3240845 - RNA, 19 nt, Artificial Sequence
  Description of Artificial Sequence: Synthetic oligonucleotide
ggcaugaccagacacauug

SEQ ID NO: 3240846 - RNA, 19 nt, Artificial Sequence
  Description of Artificial Sequence: Synthetic oligonucleotide
uguuauugcuuguaccugu

SEQ ID NO: 3240847 - RNA, 19 nt, Artificial Sequence
  Description of Artificial Sequence: Synthetic oligonucleotide
ugcuuuacauuacacuccu

SEQ ID NO: 3240848 - RNA, 19 nt, Artificial Sequence
  Description of Artificial Sequence: Synthetic oligonucleotide
uuauugcuuguaccugugg

SEQ ID NO: 3240849 - RNA, 19 nt, Artificial Sequence
  Description of Artificial Sequence: Synthetic oligonucleotide
caagcugggagccugcagg

SEQ ID NO: 3240850 - RNA, 19 nt, Artificial Sequence
  Description of Artificial Sequence: Synthetic oligonucleotide
ugauuguacccaaccauac

SEQ ID NO: 3240851 - RNA, 19 nt, Artificial Sequence
  Description of Artificial Sequence: Synthetic oligonucleotide
gagaugaccuucaucgagg

SEQ ID NO: 3240852 - RNA, 19 nt, Artificial Sequence
  Description of Artificial Sequence: Synthetic oligonucleotide
uccugguuggagaugaccu

SEQ ID NO: 3240853 - RNA, 19 nt, Artificial Sequence
  Description of Artificial Sequence: Synthetic oligonucleotide
uuacauuacacuccugguu

SEQ ID NO: 3240854 - RNA, 19 nt, Artificial Sequence
  Description of Artificial Sequence: Synthetic oligonucleotide
ggugcuuuacauuacacuc

SEQ ID NO: 3240855 - RNA, 19 nt, Artificial Sequence
  Description of Artificial Sequence: Synthetic oligonucleotide
uugauuguacccaaccaua

SEQ ID NO: 3240856 - RNA, 19 nt, Artificial Sequence
  Description of Artificial Sequence: Synthetic oligonucleotide
augaccuucaucgaggcca

SEQ ID NO: 3240857 - RNA, 19 nt, Artificial Sequence
  Description of Artificial Sequence: Synthetic oligonucleotide
gauuguacccaaccauacc

SEQ ID NO: 3240858 - RNA, 19 nt, Artificial Sequence
  Description of Artificial Sequence: Synthetic oligonucleotide
caaucucacacuugguccc

SEQ ID NO: 3240859 - RNA, 19 nt, Artificial Sequence
  Description of Artificial Sequence: Synthetic oligonucleotide
cuucaucgaggccacaugc

SEQ ID NO: 3240860 - RNA, 19 nt, Artificial Sequence
  Description of Artificial Sequence: Synthetic oligonucleotide
aggcaggcaaauccgggcc

SEQ ID NO: 3240861 - RNA, 19 nt, Artificial Sequence
  Description of Artificial Sequence: Synthetic oligonucleotide
augguucaagaucacaggu

SEQ ID NO: 3240862 - RNA, 19 nt, Artificial Sequence
  Description of Artificial Sequence: Synthetic oligonucleotide
ucauggcaugaccagacac

SEQ ID NO: 3240863 - RNA, 19 nt, Artificial Sequence
  Description of Artificial Sequence: Synthetic oligonucleotide
ugcagguccgcacacugcc

SEQ ID NO: 3240864 - RNA, 19 nt, Artificial Sequence
  Description of Artificial Sequence: Synthetic oligonucleotide
uucaagaucacaggucucu

SEQ ID NO: 3240865 - RNA, 19 nt, Artificial Sequence
  Description of Artificial Sequence: Synthetic oligonucleotide
cacuguuccuucacuaggg

SEQ ID NO: 3240866 - RNA, 19 nt, Artificial Sequence
  Description of Artificial Sequence: Synthetic oligonucleotide
ucacacuuggucccuggag

SEQ ID NO: 3240867 - RNA, 19 nt, Artificial Sequence
  Description of Artificial Sequence: Synthetic oligonucleotide
cacugagacccuuugcagg

SEQ ID NO: 3240868 - RNA, 19 nt, Artificial Sequence
  Description of Artificial Sequence: Synthetic oligonucleotide
uguacaugaccucggugcu

SEQ ID NO: 3240869 - RNA, 19 nt, Artificial Sequence
  Description of Artificial Sequence: Synthetic oligonucleotide
uugccgggcagucaguacc

SEQ ID NO: 3240870 - RNA, 19 nt, Artificial Sequence
  Description of Artificial Sequence: Synthetic oligonucleotide
uguacccaaccauaccuca

SEQ ID NO: 3240871 - RNA, 19 nt, Artificial Sequence
  Description of Artificial Sequence: Synthetic oligonucleotide
uggagguaccacauacugc

SEQ ID NO: 3240872 - RNA, 19 nt, Artificial Sequence
  Description of Artificial Sequence: Synthetic oligonucleotide
acauuacacuccugguugg

SEQ ID NO: 3240873 - RNA, 19 nt, Artificial Sequence
  Description of Artificial Sequence: Synthetic oligonucleotide
gaucacaggucucuccagc

SEQ ID NO: 3240874 - RNA, 19 nt, Artificial Sequence
  Description of Artificial Sequence: Synthetic oligonucleotide
ugcaggacuguguuauugc

SEQ ID NO: 3240875 - RNA, 19 nt, Artificial Sequence
  Description of Artificial Sequence: Synthetic oligonucleotide
uuacacuccugguuggaga

SEQ ID NO: 3240876 - RNA, 19 nt, Artificial Sequence
  Description of Artificial Sequence: Synthetic oligonucleotide
gcaaucucacacuuggucc

SEQ ID NO: 3240877 - RNA, 19 nt, Artificial Sequence
  Description of Artificial Sequence: Synthetic oligonucleotide
acugagacccuuugcaggu

SEQ ID NO: 3240878 - RNA, 19 nt, Artificial Sequence
  Description of Artificial Sequence: Synthetic oligonucleotide
uaccuguggauucacccca

SEQ ID NO: 3240879 - RNA, 19 nt, Artificial Sequence
  Description of Artificial Sequence: Synthetic oligonucleotide
cacgugaugguucaagauc

SEQ ID NO: 3240880 - RNA, 19 nt, Artificial Sequence
  Description of Artificial Sequence: Synthetic oligonucleotide
guucugguugauuguaccc

SEQ ID NO: 3240881 - RNA, 19 nt, Artificial Sequence
  Description of Artificial Sequence: Synthetic oligonucleotide
agucccucggugcacaucu

SEQ ID NO: 3240882 - RNA, 19 nt, Artificial Sequence
  Description of Artificial Sequence: Synthetic oligonucleotide
ccugcaaucucacacuugg

SEQ ID NO: 3240883 - RNA, 19 nt, Artificial Sequence
  Description of Artificial Sequence: Synthetic oligonucleotide
ugguucaagaucacagguc

SEQ ID NO: 3240884 - RNA, 19 nt, Artificial Sequence
  Description of Artificial Sequence: Synthetic oligonucleotide
guggauucaccccagccug

SEQ ID NO: 3240885 - RNA, 19 nt, Artificial Sequence
  Description of Artificial Sequence: Synthetic oligonucleotide
auugcuuguaccuguggau

SEQ ID NO: 3240886 - RNA, 19 nt, Artificial Sequence
  Description of Artificial Sequence: Synthetic oligonucleotide
uguggggaccagcaguccc

SEQ ID NO: 3240887 - RNA, 19 nt, Artificial Sequence
  Description of Artificial Sequence: Synthetic oligonucleotide
cacauacugcucaggaggc

SEQ ID NO: 3240888 - RNA, 19 nt, Artificial Sequence
  Description of Artificial Sequence: Synthetic oligonucleotide
cucacaagccccugugggg

SEQ ID NO: 3240889 - RNA, 19 nt, Artificial Sequence
  Description of Artificial Sequence: Synthetic oligonucleotide
ggucucuccagcuugagca

SEQ ID NO: 3240890 - RNA, 19 nt, Artificial Sequence
  Description of Artificial Sequence: Synthetic oligonucleotide
caagaucacaggucucucc

SEQ ID NO: 3240891 - RNA, 19 nt, Artificial Sequence
  Description of Artificial Sequence: Synthetic oligonucleotide
cacauugccgggcagucag

SEQ ID NO: 3240892 - RNA, 19 nt, Artificial Sequence
  Description of Artificial Sequence: Synthetic oligonucleotide
caggaggcaggcaaauccg

SEQ ID NO: 3240893 - RNA, 19 nt, Artificial Sequence
  Description of Artificial Sequence: Synthetic oligonucleotide
uucaucgaggccacaugca

SEQ ID NO: 3240894 - RNA, 19 nt, Artificial Sequence
  Description of Artificial Sequence: Synthetic oligonucleotide
ucuuguacaugaccucggu

SEQ ID NO: 3240895 - RNA, 19 nt, Artificial Sequence
  Description of Artificial Sequence: Synthetic oligonucleotide
aucgaggccacaugcagga

SEQ ID NO: 3240896 - RNA, 19 nt, Artificial Sequence
  Description of Artificial Sequence: Synthetic oligonucleotide
acucucuuguacaugaccu

SEQ ID NO: 3240897 - RNA, 19 nt, Artificial Sequence
  Description of Artificial Sequence: Synthetic oligonucleotide
aggucucuccagcuugagc

SEQ ID NO: 3240898 - RNA, 19 nt, Artificial Sequence
  Description of Artificial Sequence: Synthetic oligonucleotide
cagcuugagcagaacaagc

SEQ ID NO: 3240899 - RNA, 19 nt, Artificial Sequence
  Description of Artificial Sequence: Synthetic oligonucleotide
acuuggucccuggagguac

SEQ ID NO: 3240900 - RNA, 19 nt, Artificial Sequence
  Description of Artificial Sequence: Synthetic oligonucleotide
ggagaugaccuucaucgag

SEQ ID NO: 3240901 - RNA, 19 nt, Artificial Sequence
  Description of Artificial Sequence: Synthetic oligonucleotide
augaccagacacauugccg

SEQ ID NO: 3240902 - RNA, 19 nt, Artificial Sequence
  Description of Artificial Sequence: Synthetic oligonucleotide
cacucucuuguacaugacc

SEQ ID NO: 3240903 - RNA, 19 nt, Artificial Sequence
  Description of Artificial Sequence: Synthetic oligonucleotide
cucacucucuuguacauga

SEQ ID NO: 3240904 - RNA, 19 nt, Artificial Sequence
  Description of Artificial Sequence: Synthetic oligonucleotide
cucuuguacaugaccucgg

SEQ ID NO: 3240905 - RNA, 19 nt, Artificial Sequence
  Description of Artificial Sequence: Synthetic oligonucleotide
ugcagguuugccucuccag

SEQ ID NO: 3240906 - RNA, 19 nt, Artificial Sequence
  Description of Artificial Sequence: Synthetic oligonucleotide
uagucacccucacaagccc

SEQ ID NO: 3240907 - RNA, 19 nt, Artificial Sequence
  Description of Artificial Sequence: Synthetic oligonucleotide
agguucauggcaugaccag

SEQ ID NO: 3240908 - RNA, 19 nt, Artificial Sequence
  Description of Artificial Sequence: Synthetic oligonucleotide
guaccuguggauucacccc

SEQ ID NO: 3240909 - RNA, 19 nt, Artificial Sequence
  Description of Artificial Sequence: Synthetic oligonucleotide
caucgaggccacaugcagg

SEQ ID NO: 3240910 - RNA, 19 nt, Artificial Sequence
  Description of Artificial Sequence: Synthetic oligonucleotide
gaggcaggcaaauccgggc

SEQ ID NO: 3240911 - RNA, 19 nt, Artificial Sequence
  Description of Artificial Sequence: Synthetic oligonucleotide
agguaccacauacugcuca

SEQ ID NO: 3240912 - RNA, 19 nt, Artificial Sequence
  Description of Artificial Sequence: Synthetic oligonucleotide
guagucacccucacaagcc

SEQ ID NO: 3240913 - RNA, 19 nt, Artificial Sequence
  Description of Artificial Sequence: Synthetic oligonucleotide
accucggugcuuuacauua

SEQ ID NO: 3240914 - RNA, 19 nt, Artificial Sequence
  Description of Artificial Sequence: Synthetic oligonucleotide
ucugguugauuguacccaa

SEQ ID NO: 3240915 - RNA, 19 nt, Artificial Sequence
  Description of Artificial Sequence: Synthetic oligonucleotide
acgugaugguucaagauca

SEQ ID NO: 3240916 - RNA, 19 nt, Artificial Sequence
  Description of Artificial Sequence: Synthetic oligonucleotide
cauacugcucaggaggcag

SEQ ID NO: 3240917 - RNA, 19 nt, Artificial Sequence
  Description of Artificial Sequence: Synthetic oligonucleotide
caaaguaagaccaugcugg

SEQ ID NO: 3240918 - RNA, 19 nt, Artificial Sequence
  Description of Artificial Sequence: Synthetic oligonucleotide
agagaugggaaaccgaggc

SEQ ID NO: 3240919 - RNA, 19 nt, Artificial Sequence
  Description of Artificial Sequence: Synthetic oligonucleotide
ucucuguugagguaaaagg

SEQ ID NO: 3240920 - RNA, 19 nt, Artificial Sequence
  Description of Artificial Sequence: Synthetic oligonucleotide
cugaacuccaucuacagcc

SEQ ID NO: 3240921 - RNA, 19 nt, Artificial Sequence
  Description of Artificial Sequence: Synthetic oligonucleotide
agugagcugggucugagcc

SEQ ID NO: 3240922 - RNA, 19 nt, Artificial Sequence
  Description of Artificial Sequence: Synthetic oligonucleotide
ucuguugagguaaaaggag

SEQ ID NO: 3240923 - RNA, 19 nt, Artificial Sequence
  Description of Artificial Sequence: Synthetic oligonucleotide
agucagauuauccuggcuc

SEQ ID NO: 3240924 - RNA, 19 nt, Artificial Sequence
  Description of Artificial Sequence: Synthetic oligonucleotide
gaucccaucaaagugagcc

SEQ ID NO: 3240925 - RNA, 19 nt, Artificial Sequence
  Description of Artificial Sequence: Synthetic oligonucleotide
uaaaaggagaagaugggcu

SEQ ID NO: 3240926 - RNA, 19 nt, Artificial Sequence
  Description of Artificial Sequence: Synthetic oligonucleotide
aagugagccaaaguaagac

SEQ ID NO: 3240927 - RNA, 19 nt, Artificial Sequence
  Description of Artificial Sequence: Synthetic oligonucleotide
agguaaaaggagaagaugg

SEQ ID NO: 3240928 - RNA, 19 nt, Artificial Sequence
  Description of Artificial Sequence: Synthetic oligonucleotide
uccaucuacagccagagau

SEQ ID NO: 3240929 - RNA, 19 nt, Artificial Sequence
  Description of Artificial Sequence: Synthetic oligonucleotide
aguaagaccaugcuggacu

SEQ ID NO: 3240930 - RNA, 19 nt, Artificial Sequence
  Description of Artificial Sequence: Synthetic oligonucleotide
agugagccaaaguaagacc

SEQ ID NO: 3240931 - RNA, 19 nt, Artificial Sequence
  Description of Artificial Sequence: Synthetic oligonucleotide
gauagucagauuauccugg

SEQ ID NO: 3240932 - RNA, 19 nt, Artificial Sequence
  Description of Artificial Sequence: Synthetic oligonucleotide
aucaaagugagccaaagua

SEQ ID NO: 3240933 - RNA, 19 nt, Artificial Sequence
  Description of Artificial Sequence: Synthetic oligonucleotide
aaacgucacagagacaccg

SEQ ID NO: 3240934 - RNA, 19 nt, Artificial Sequence
  Description of Artificial Sequence: Synthetic oligonucleotide
ucaaagugagccaaaguaa

SEQ ID NO: 3240935 - RNA, 19 nt, Artificial Sequence
  Description of Artificial Sequence: Synthetic oligonucleotide
agaugggaaaccgaggccc

SEQ ID NO: 3240936 - RNA, 19 nt, Artificial Sequence
  Description of Artificial Sequence: Synthetic oligonucleotide
caaagugagccaaaguaag

SEQ ID NO: 3240937 - RNA, 19 nt, Artificial Sequence
  Description of Artificial Sequence: Synthetic oligonucleotide
uccuccaucagacccuucg

SEQ ID NO: 3240938 - RNA, 19 nt, Artificial Sequence
  Description of Artificial Sequence: Synthetic oligonucleotide
aagaccaugcuggacuccc

SEQ ID NO: 3240939 - RNA, 19 nt, Artificial Sequence
  Description of Artificial Sequence: Synthetic oligonucleotide
aaaccgaggcccaggaucc

SEQ ID NO: 3240940 - RNA, 19 nt, Artificial Sequence
  Description of Artificial Sequence: Synthetic oligonucleotide
uugagguaaaaggagaaga

SEQ ID NO: 3240941 - RNA, 19 nt, Artificial Sequence
  Description of Artificial Sequence: Synthetic oligonucleotide
uccaucagacccuucggcg

SEQ ID NO: 3240942 - RNA, 19 nt, Artificial Sequence
  Description of Artificial Sequence: Synthetic oligonucleotide
auagucagauuauccuggc

SEQ ID NO: 3240943 - RNA, 19 nt, Artificial Sequence
  Description of Artificial Sequence: Synthetic oligonucleotide
caggauuccggucagacug

SEQ ID NO: 3240944 - RNA, 19 nt, Artificial Sequence
  Description of Artificial Sequence: Synthetic oligonucleotide
agagacaccgcggauuucc

SEQ ID NO: 3240945 - RNA, 19 nt, Artificial Sequence
  Description of Artificial Sequence: Synthetic oligonucleotide
aaaaggagaagaugggcuu

SEQ ID NO: 3240946 - RNA, 19 nt, Artificial Sequence
  Description of Artificial Sequence: Synthetic oligonucleotide
cuccaaacgucacagagac

SEQ ID NO: 3240947 - RNA, 19 nt, Artificial Sequence
  Description of Artificial Sequence: Synthetic oligonucleotide
gaaaccgaggcccaggauc

SEQ ID NO: 3240948 - RNA, 19 nt, Artificial Sequence
  Description of Artificial Sequence: Synthetic oligonucleotide
ugagguaaaaggagaagau

SEQ ID NO: 3240949 - RNA, 19 nt, Artificial Sequence
  Description of Artificial Sequence: Synthetic oligonucleotide
ucuacagccagagauggga

SEQ ID NO: 3240950 - RNA, 19 nt, Artificial Sequence
  Description of Artificial Sequence: Synthetic oligonucleotide
gaagaugggcuucugcagc

SEQ ID NO: 3240951 - RNA, 19 nt, Artificial Sequence
  Description of Artificial Sequence: Synthetic oligonucleotide
uguugagguaaaaggagaa

SEQ ID NO: 3240952 - RNA, 19 nt, Artificial Sequence
  Description of Artificial Sequence: Synthetic oligonucleotide
gagaagaugggcuucugca

SEQ ID NO: 3240953 - RNA, 19 nt, Artificial Sequence
  Description of Artificial Sequence: Synthetic oligonucleotide
gacaccgcggauuuccccg

SEQ ID NO: 3240954 - RNA, 19 nt, Artificial Sequence
  Description of Artificial Sequence: Synthetic oligonucleotide
aaaggagaagaugggcuuc

SEQ ID NO: 3240955 - RNA, 19 nt, Artificial Sequence
  Description of Artificial Sequence: Synthetic oligonucleotide
aaaguaagaccaugcugga

SEQ ID NO: 3240956 - RNA, 19 nt, Artificial Sequence
  Description of Artificial Sequence: Synthetic oligonucleotide
agaagaugggcuucugcag

SEQ ID NO: 3240957 - RNA, 19 nt, Artificial Sequence
  Description of Artificial Sequence: Synthetic oligonucleotide
uuccccgauagucagauua

SEQ ID NO: 3240958 - RNA, 19 nt, Artificial Sequence
  Description of Artificial Sequence: Synthetic oligonucleotide
cucuccaaacgucacagag

SEQ ID NO: 3240959 - RNA, 19 nt, Artificial Sequence
  Description of Artificial Sequence: Synthetic oligonucleotide
auuauccuggcucaggauu

SEQ ID NO: 3240960 - RNA, 19 nt, Artificial Sequence
  Description of Artificial Sequence: Synthetic oligonucleotide
ucuccaaacgucacagaga

SEQ ID NO: 3240961 - RNA, 19 nt, Artificial Sequence
  Description of Artificial Sequence: Synthetic oligonucleotide
guaaaaggagaagaugggc

SEQ ID NO: 3240962 - RNA, 19 nt, Artificial Sequence
  Description of Artificial Sequence: Synthetic oligonucleotide
uccaccauugcguccagug

SEQ ID NO: 3240963 - RNA, 19 nt, Artificial Sequence
  Description of Artificial Sequence: Synthetic oligonucleotide
ggucagacugcccagaccc

SEQ ID NO: 3240964 - RNA, 19 nt, Artificial Sequence
  Description of Artificial Sequence: Synthetic oligonucleotide
gagguaaaaggagaagaug

SEQ ID NO: 3240965 - RNA, 19 nt, Artificial Sequence
  Description of Artificial Sequence: Synthetic oligonucleotide
auuccggucagacugccca

SEQ ID NO: 3240966 - RNA, 19 nt, Artificial Sequence
  Description of Artificial Sequence: Synthetic oligonucleotide
agauuauccuggcucagga

SEQ ID NO: 3240967 - RNA, 19 nt, Artificial Sequence
  Description of Artificial Sequence: Synthetic oligonucleotide
agccaaaguaagaccaugc

SEQ ID NO: 3240968 - RNA, 19 nt, Artificial Sequence
  Description of Artificial Sequence: Synthetic oligonucleotide
uuauccuggcucaggauuc

SEQ ID NO: 3240969 - RNA, 19 nt, Artificial Sequence
  Description of Artificial Sequence: Synthetic oligonucleotide
acagccagagaugggaaac

SEQ ID NO: 3240970 - RNA, 19 nt, Artificial Sequence
  Description of Artificial Sequence: Synthetic oligonucleotide
aaguaagaccaugcuggac

SEQ ID NO: 3240971 - RNA, 19 nt, Artificial Sequence
  Description of Artificial Sequence: Synthetic oligonucleotide
cucuguugagguaaaagga

SEQ ID NO: 3240972 - RNA, 19 nt, Artificial Sequence
  Description of Artificial Sequence: Synthetic oligonucleotide
caucuacagccagagaugg

SEQ ID NO: 3240973 - RNA, 19 nt, Artificial Sequence
  Description of Artificial Sequence: Synthetic oligonucleotide
aagaugggcuucugcagca

SEQ ID NO: 3240974 - RNA, 19 nt, Artificial Sequence
  Description of Artificial Sequence: Synthetic oligonucleotide
aacgucacagagacaccgc

SEQ ID NO: 3240975 - RNA, 19 nt, Artificial Sequence
  Description of Artificial Sequence: Synthetic oligonucleotide
cacagagccucuccaaacg

SEQ ID NO: 3240976 - RNA, 19 nt, Artificial Sequence
  Description of Artificial Sequence: Synthetic oligonucleotide
acucccacagagccucucc

SEQ ID NO: 3240977 - RNA, 19 nt, Artificial Sequence
  Description of Artificial Sequence: Synthetic oligonucleotide
augcuggacucccacagag

SEQ ID NO: 3240978 - RNA, 19 nt, Artificial Sequence
  Description of Artificial Sequence: Synthetic oligonucleotide
ccaaacgucacagagacac

SEQ ID NO: 3240979 - RNA, 19 nt, Artificial Sequence
  Description of Artificial Sequence: Synthetic oligonucleotide
uggcucaggauuccgguca

SEQ ID NO: 3240980 - RNA, 19 nt, Artificial Sequence
  Description of Artificial Sequence: Synthetic oligonucleotide
uggaggcugaacuccaucu

SEQ ID NO: 3240981 - RNA, 19 nt, Artificial Sequence
  Description of Artificial Sequence: Synthetic oligonucleotide
acgucacagagacaccgcg

SEQ ID NO: 3240982 - RNA, 19 nt, Artificial Sequence
  Description of Artificial Sequence: Synthetic oligonucleotide
gguaaaaggagaagauggg

SEQ ID NO: 3240983 - RNA, 19 nt, Artificial Sequence
  Description of Artificial Sequence: Synthetic oligonucleotide
ugaacuccaucuacagcca

SEQ ID NO: 3240984 - RNA, 19 nt, Artificial Sequence
  Description of Artificial Sequence: Synthetic oligonucleotide
cauugcguccaguggaggc

SEQ ID NO: 3240985 - RNA, 19 nt, Artificial Sequence
  Description of Artificial Sequence: Synthetic oligonucleotide
gaggcugaacuccaucuac

SEQ ID NO: 3240986 - RNA, 19 nt, Artificial Sequence
  Description of Artificial Sequence: Synthetic oligonucleotide
aaagugagccaaaguaaga

SEQ ID NO: 3240987 - RNA, 19 nt, Artificial Sequence
  Description of Artificial Sequence: Synthetic oligonucleotide
ugagcugggucugagcccc

SEQ ID NO: 3240988 - RNA, 19 nt, Artificial Sequence
  Description of Artificial Sequence: Synthetic oligonucleotide
gagaugggaaaccgaggcc

SEQ ID NO: 3240989 - RNA, 19 nt, Artificial Sequence
  Description of Artificial Sequence: Synthetic oligonucleotide
uucggcgucucuguugagg

SEQ ID NO: 3240990 - RNA, 19 nt, Artificial Sequence
  Description of Artificial Sequence: Synthetic oligonucleotide
guugagguaaaaggagaag

SEQ ID NO: 3240991 - RNA, 19 nt, Artificial Sequence
  Description of Artificial Sequence: Synthetic oligonucleotide
cagagaugggaaaccgagg

SEQ ID NO: 3240992 - RNA, 19 nt, Artificial Sequence
  Description of Artificial Sequence: Synthetic oligonucleotide
agacaccgcggauuucccc

SEQ ID NO: 3240993 - RNA, 19 nt, Artificial Sequence
  Description of Artificial Sequence: Synthetic oligonucleotide
uccuggcucaggauuccgg

SEQ ID NO: 3240994 - RNA, 19 nt, Artificial Sequence
  Description of Artificial Sequence: Synthetic oligonucleotide
gucucuguugagguaaaag

SEQ ID NO: 3240995 - RNA, 19 nt, Artificial Sequence
  Description of Artificial Sequence: Synthetic oligonucleotide
acuccaucuacagccagag

SEQ ID NO: 3240996 - RNA, 19 nt, Artificial Sequence
  Description of Artificial Sequence: Synthetic oligonucleotide
gucagauuauccuggcuca

SEQ ID NO: 3240997 - RNA, 19 nt, Artificial Sequence
  Description of Artificial Sequence: Synthetic oligonucleotide
gugagccaaaguaagacca

SEQ ID NO: 3240998 - RNA, 19 nt, Artificial Sequence
  Description of Artificial Sequence: Synthetic oligonucleotide
caggaucccaucaaaguga

SEQ ID NO: 3240999 - RNA, 19 nt, Artificial Sequence
  Description of Artificial Sequence: Synthetic oligonucleotide
cuguugagguaaaaggaga

SEQ ID NO: 3241000 - RNA, 19 nt, Artificial Sequence
  Description of Artificial Sequence: Synthetic oligonucleotide
ccagagaugggaaaccgag

SEQ ID NO: 3241001 - RNA, 19 nt, Artificial Sequence
  Description of Artificial Sequence: Synthetic oligonucleotide
augggcuucugcagcagcc

SEQ ID NO: 3241002 - RNA, 19 nt, Artificial Sequence
  Description of Artificial Sequence: Synthetic oligonucleotide
gcuggacucccacagagcc

SEQ ID NO: 3241003 - RNA, 19 nt, Artificial Sequence
  Description of Artificial Sequence: Synthetic oligonucleotide
cuccaucagacccuucggc

SEQ ID NO: 3241004 - RNA, 19 nt, Artificial Sequence
  Description of Artificial Sequence: Synthetic oligonucleotide
uucugcagcagccccugcu

SEQ ID NO: 3241005 - RNA, 19 nt, Artificial Sequence
  Description of Artificial Sequence: Synthetic oligonucleotide
agcucuccuccaucagacc

SEQ ID NO: 3241006 - RNA, 19 nt, Artificial Sequence
  Description of Artificial Sequence: Synthetic oligonucleotide
gaacuccaucuacagccag

SEQ ID NO: 3241007 - RNA, 19 nt, Artificial Sequence
  Description of Artificial Sequence: Synthetic oligonucleotide
ugagccaaaguaagaccau

SEQ ID NO: 3241008 - RNA, 19 nt, Artificial Sequence
  Description of Artificial Sequence: Synthetic oligonucleotide
ugcuccaccauugcgucca

SEQ ID NO: 3241009 - RNA, 19 nt, Artificial Sequence
  Description of Artificial Sequence: Synthetic oligonucleotide
ucggcgucucuguugaggu

SEQ ID NO: 3241010 - RNA, 19 nt, Artificial Sequence
  Description of Artificial Sequence: Synthetic oligonucleotide
aaggagaagaugggcuucu

SEQ ID NO: 3241011 - RNA, 19 nt, Artificial Sequence
  Description of Artificial Sequence: Synthetic oligonucleotide
ucaggauuccggucagacu

SEQ ID NO: 3241012 - RNA, 19 nt, Artificial Sequence
  Description of Artificial Sequence: Synthetic oligonucleotide
ccaaaguaagaccaugcug

SEQ ID NO: 3241013 - RNA, 19 nt, Artificial Sequence
  Description of Artificial Sequence: Synthetic oligonucleotide
ggauuuccccgauagucag

SEQ ID NO: 3241014 - RNA, 19 nt, Artificial Sequence
  Description of Artificial Sequence: Synthetic oligonucleotide
cagcucuccuccaucagac

SEQ ID NO: 3241015 - RNA, 19 nt, Artificial Sequence
  Description of Artificial Sequence: Synthetic oligonucleotide
ucugcagcagccccugcuc

SEQ ID NO: 3241016 - RNA, 19 nt, Artificial Sequence
  Description of Artificial Sequence: Synthetic oligonucleotide
ucagauuauccuggcucag

SEQ ID NO: 3241017 - RNA, 19 nt, Artificial Sequence
  Description of Artificial Sequence: Synthetic oligonucleotide
auaauaaauaaauaaauga

SEQ ID NO: 3241018 - RNA, 19 nt, Artificial Sequence
  Description of Artificial Sequence: Synthetic oligonucleotide
aauaaaugaaucuuuaaaa

SEQ ID NO: 3241019 - RNA, 19 nt, Artificial Sequence
  Description of Artificial Sequence: Synthetic oligonucleotide
uaauaaauaaauaaaugaa

SEQ ID NO: 3241020 - RNA, 19 nt, Artificial Sequence
  Description of Artificial Sequence: Synthetic oligonucleotide
aaauaaaugaaucuuuaaa

SEQ ID NO: 3241021 - RNA, 19 nt, Artificial Sequence
  Description of Artificial Sequence: Synthetic oligonucleotide
auaaauaaauaaaugaauc

SEQ ID NO: 3241022 - RNA, 19 nt, Artificial Sequence
  Description of Artificial Sequence: Synthetic oligonucleotide
uaaauaaauaaaugaaucu

SEQ ID NO: 3241023 - RNA, 19 nt, Artificial Sequence
  Description of Artificial Sequence: Synthetic oligonucleotide
uacauaauaaauaaauaaa

SEQ ID NO: 3241024 - RNA, 19 nt, Artificial Sequence
  Description of Artificial Sequence: Synthetic oligonucleotide
cauaauaaauaaauaaaug

SEQ ID NO: 3241025 - RNA, 19 nt, Artificial Sequence
  Description of Artificial Sequence: Synthetic oligonucleotide
auacauaauaaauaaauaa

SEQ ID NO: 3241026 - RNA, 19 nt, Artificial Sequence
  Description of Artificial Sequence: Synthetic oligonucleotide
auucccagcaaccacaugg

SEQ ID NO: 3241027 - RNA, 19 nt, Artificial Sequence
  Description of Artificial Sequence: Synthetic oligonucleotide
aauaaauaaauaaaugaau

SEQ ID NO: 3241028 - RNA, 19 nt, Artificial Sequence
  Description of Artificial Sequence: Synthetic oligonucleotide
aaauaaauaaaugaaucuu

SEQ ID NO: 3241029 - RNA, 19 nt, Artificial Sequence
  Description of Artificial Sequence: Synthetic oligonucleotide
ucuguuaugagaucuggug

SEQ ID NO: 3241030 - RNA, 19 nt, Artificial Sequence
  Description of Artificial Sequence: Synthetic oligonucleotide
uauacauaauaaauaaaua

SEQ ID NO: 3241031 - RNA, 19 nt, Artificial Sequence
  Description of Artificial Sequence: Synthetic oligonucleotide
uguuaugagaucuggugcc

SEQ ID NO: 3241032 - RNA, 19 nt, Artificial Sequence
  Description of Artificial Sequence: Synthetic oligonucleotide
aauaaauaaaugaaucuuu

SEQ ID NO: 3241033 - RNA, 19 nt, Artificial Sequence
  Description of Artificial Sequence: Synthetic oligonucleotide
acaaccaucuguuaugaga

SEQ ID NO: 3241034 - RNA, 19 nt, Artificial Sequence
  Description of Artificial Sequence: Synthetic oligonucleotide
agguuaagagcacugacug

SEQ ID NO: 3241035 - RNA, 19 nt, Artificial Sequence
  Description of Artificial Sequence: Synthetic oligonucleotide
ucaauucccagcaaccaca

SEQ ID NO: 3241036 - RNA, 19 nt, Artificial Sequence
  Description of Artificial Sequence: Synthetic oligonucleotide
uguauacauaauaaauaaa

SEQ ID NO: 3241037 - RNA, 19 nt, Artificial Sequence
  Description of Artificial Sequence: Synthetic oligonucleotide
agagguuaagagcacugac

SEQ ID NO: 3241038 - RNA, 19 nt, Artificial Sequence
  Description of Artificial Sequence: Synthetic oligonucleotide
cacaugguggcucacaacc

SEQ ID NO: 3241039 - RNA, 19 nt, Artificial Sequence
  Description of Artificial Sequence: Synthetic oligonucleotide
ugugcaggcaugcaugcag

SEQ ID NO: 3241040 - RNA, 19 nt, Artificial Sequence
  Description of Artificial Sequence: Synthetic oligonucleotide
uaaauaaaugaaucuuuaa

SEQ ID NO: 3241041 - RNA, 19 nt, Artificial Sequence
  Description of Artificial Sequence: Synthetic oligonucleotide
acauaauaaauaaauaaau

SEQ ID NO: 3241042 - RNA, 19 nt, Artificial Sequence
  Description of Artificial Sequence: Synthetic oligonucleotide
agguccugaguucaauucc

SEQ ID NO: 3241043 - RNA, 19 nt, Artificial Sequence
  Description of Artificial Sequence: Synthetic oligonucleotide
aguucaauucccagcaacc

SEQ ID NO: 3241044 - RNA, 19 nt, Artificial Sequence
  Description of Artificial Sequence: Synthetic oligonucleotide
aacacuguauacauaauaa

SEQ ID NO: 3241045 - RNA, 19 nt, Artificial Sequence
  Description of Artificial Sequence: Synthetic oligonucleotide
caugcaugcagacagaaca

SEQ ID NO: 3241046 - RNA, 19 nt, Artificial Sequence
  Description of Artificial Sequence: Synthetic oligonucleotide
cuguuaugagaucuggugc

SEQ ID NO: 3241047 - RNA, 19 nt, Artificial Sequence
  Description of Artificial Sequence: Synthetic oligonucleotide
cuguauacauaauaaauaa

SEQ ID NO: 3241048 - RNA, 19 nt, Artificial Sequence
  Description of Artificial Sequence: Synthetic oligonucleotide
caggcaugcaugcagacag

SEQ ID NO: 3241049 - RNA, 19 nt, Artificial Sequence
  Description of Artificial Sequence: Synthetic oligonucleotide
acugcucuuccagaggucc

SEQ ID NO: 3241050 - RNA, 19 nt, Artificial Sequence
  Description of Artificial Sequence: Synthetic oligonucleotide
auaggggcuggagagaugg

SEQ ID NO: 3241051 - RNA, 19 nt, Artificial Sequence
  Description of Artificial Sequence: Synthetic oligonucleotide
ucagagguuaagagcacug

SEQ ID NO: 3241052 - RNA, 19 nt, Artificial Sequence
  Description of Artificial Sequence: Synthetic oligonucleotide
uucaauucccagcaaccac

SEQ ID NO: 3241053 - RNA, 19 nt, Artificial Sequence
  Description of Artificial Sequence: Synthetic oligonucleotide
auggcucagagguuaagag

SEQ ID NO: 3241054 - RNA, 19 nt, Artificial Sequence
  Description of Artificial Sequence: Synthetic oligonucleotide
acugacugcucuuccagag

SEQ ID NO: 3241055 - RNA, 19 nt, Artificial Sequence
  Description of Artificial Sequence: Synthetic oligonucleotide
guauacauaauaaauaaau

SEQ ID NO: 3241056 - RNA, 19 nt, Artificial Sequence
  Description of Artificial Sequence: Synthetic oligonucleotide
cucacaaccaucuguuaug

SEQ ID NO: 3241057 - RNA, 19 nt, Artificial Sequence
  Description of Artificial Sequence: Synthetic oligonucleotide
ugacugcucuuccagaggu

SEQ ID NO: 3241058 - RNA, 19 nt, Artificial Sequence
  Description of Artificial Sequence: Synthetic oligonucleotide
gaguucaauucccagcaac

SEQ ID NO: 3241059 - RNA, 19 nt, Artificial Sequence
  Description of Artificial Sequence: Synthetic oligonucleotide
acuguauacauaauaaaua

SEQ ID NO: 3241060 - RNA, 19 nt, Artificial Sequence
  Description of Artificial Sequence: Synthetic oligonucleotide
cagaacacuguauacauaa

SEQ ID NO: 3241061 - RNA, 19 nt, Artificial Sequence
  Description of Artificial Sequence: Synthetic oligonucleotide
gaacacuguauacauaaua

SEQ ID NO: 3241062 - RNA, 19 nt, Artificial Sequence
  Description of Artificial Sequence: Synthetic oligonucleotide
uggugugcaggcaugcaug

SEQ ID NO: 3241063 - RNA, 19 nt, Artificial Sequence
  Description of Artificial Sequence: Synthetic oligonucleotide
uggcucagagguuaagagc

SEQ ID NO: 3241064 - RNA, 19 nt, Artificial Sequence
  Description of Artificial Sequence: Synthetic oligonucleotide
aaccaucuguuaugagauc

SEQ ID NO: 3241065 - RNA, 19 nt, Artificial Sequence
  Description of Artificial Sequence: Synthetic oligonucleotide
auaaauaaaugaaucuuua

SEQ ID NO: 3241066 - RNA, 19 nt, Artificial Sequence
  Description of Artificial Sequence: Synthetic oligonucleotide
uggagagauggcucagagg

SEQ ID NO: 3241067 - RNA, 19 nt, Artificial Sequence
  Description of Artificial Sequence: Synthetic oligonucleotide
acacuguauacauaauaaa

SEQ ID NO: 3241068 - RNA, 19 nt, Artificial Sequence
  Description of Artificial Sequence: Synthetic oligonucleotide
cugaguucaauucccagca

SEQ ID NO: 3241069 - RNA, 19 nt, Artificial Sequence
  Description of Artificial Sequence: Synthetic oligonucleotide
ucuucuggugugcaggcau

SEQ ID NO: 3241070 - RNA, 19 nt, Artificial Sequence
  Description of Artificial Sequence: Synthetic oligonucleotide
ggagagauggcucagaggu

SEQ ID NO: 3241071 - RNA, 19 nt, Artificial Sequence
  Description of Artificial Sequence: Synthetic oligonucleotide
agacagaacacuguauaca

SEQ ID NO: 3241072 - RNA, 19 nt, Artificial Sequence
  Description of Artificial Sequence: Synthetic oligonucleotide
uaagagcacugacugcucu

SEQ ID NO: 3241073 - RNA, 19 nt, Artificial Sequence
  Description of Artificial Sequence: Synthetic oligonucleotide
cagacagaacacuguauac

SEQ ID NO: 3241074 - RNA, 19 nt, Artificial Sequence
  Description of Artificial Sequence: Synthetic oligonucleotide
agaucuggugcccucuucu

SEQ ID NO: 3241075 - RNA, 19 nt, Artificial Sequence
  Description of Artificial Sequence: Synthetic oligonucleotide
aucuggugcccucuucugg

SEQ ID NO: 3241076 - RNA, 19 nt, Artificial Sequence
  Description of Artificial Sequence: Synthetic oligonucleotide
accaucuguuaugagaucu

SEQ ID NO: 3241077 - RNA, 19 nt, Artificial Sequence
  Description of Artificial Sequence: Synthetic oligonucleotide
caucuguuaugagaucugg

SEQ ID NO: 3241078 - RNA, 19 nt, Artificial Sequence
  Description of Artificial Sequence: Synthetic oligonucleotide
ucuuccagagguccugagu

SEQ ID NO: 3241079 - RNA, 19 nt, Artificial Sequence
  Description of Artificial Sequence: Synthetic oligonucleotide
uccugaguucaauucccag

SEQ ID NO: 3241080 - RNA, 19 nt, Artificial Sequence
  Description of Artificial Sequence: Synthetic oligonucleotide
ugguggcucacaaccaucu

SEQ ID NO: 3241081 - RNA, 19 nt, Artificial Sequence
  Description of Artificial Sequence: Synthetic oligonucleotide
gagguccugaguucaauuc

SEQ ID NO: 3241082 - RNA, 19 nt, Artificial Sequence
  Description of Artificial Sequence: Synthetic oligonucleotide
ucuggugcccucuucuggu

SEQ ID NO: 3241083 - RNA, 19 nt, Artificial Sequence
  Description of Artificial Sequence: Synthetic oligonucleotide
gacagaacacuguauacau

SEQ ID NO: 3241084 - RNA, 19 nt, Artificial Sequence
  Description of Artificial Sequence: Synthetic oligonucleotide
guuaagagcacugacugcu

SEQ ID NO: 3241085 - RNA, 19 nt, Artificial Sequence
  Description of Artificial Sequence: Synthetic oligonucleotide
ucacaaccaucuguuauga

SEQ ID NO: 3241086 - RNA, 19 nt, Artificial Sequence
  Description of Artificial Sequence: Synthetic oligonucleotide
cacuguauacauaauaaau

SEQ ID NO: 3241087 - RNA, 19 nt, Artificial Sequence
  Description of Artificial Sequence: Synthetic oligonucleotide
cuggagagauggcucagag

SEQ ID NO: 3241088 - RNA, 19 nt, Artificial Sequence
  Description of Artificial Sequence: Synthetic oligonucleotide
augcaugcagacagaacac

SEQ ID NO: 3241089 - RNA, 19 nt, Artificial Sequence
  Description of Artificial Sequence: Synthetic oligonucleotide
uucccagcaaccacauggu

SEQ ID NO: 3241090 - RNA, 19 nt, Artificial Sequence
  Description of Artificial Sequence: Synthetic oligonucleotide
agagcacugacugcucuuc

SEQ ID NO: 3241091 - RNA, 19 nt, Artificial Sequence
  Description of Artificial Sequence: Synthetic oligonucleotide
ccagcaaccacaugguggc

SEQ ID NO: 3241092 - RNA, 19 nt, Artificial Sequence
  Description of Artificial Sequence: Synthetic oligonucleotide
uggcucacaaccaucuguu

SEQ ID NO: 3241093 - RNA, 19 nt, Artificial Sequence
  Description of Artificial Sequence: Synthetic oligonucleotide
ccugaguucaauucccagc

SEQ ID NO: 3241094 - RNA, 19 nt, Artificial Sequence
  Description of Artificial Sequence: Synthetic oligonucleotide
uuaagagcacugacugcuc

SEQ ID NO: 3241095 - RNA, 19 nt, Artificial Sequence
  Description of Artificial Sequence: Synthetic oligonucleotide
ugcagacagaacacuguau

SEQ ID NO: 3241096 - RNA, 19 nt, Artificial Sequence
  Description of Artificial Sequence: Synthetic oligonucleotide
cccagcaaccacauggugg

SEQ ID NO: 3241097 - RNA, 19 nt, Artificial Sequence
  Description of Artificial Sequence: Synthetic oligonucleotide
gauggcucagagguuaaga

SEQ ID NO: 3241098 - RNA, 19 nt, Artificial Sequence
  Description of Artificial Sequence: Synthetic oligonucleotide
aauucccagcaaccacaug

SEQ ID NO: 3241099 - RNA, 19 nt, Artificial Sequence
  Description of Artificial Sequence: Synthetic oligonucleotide
cugacugcucuuccagagg

SEQ ID NO: 3241100 - RNA, 19 nt, Artificial Sequence
  Description of Artificial Sequence: Synthetic oligonucleotide
uccagagguccugaguuca

SEQ ID NO: 3241101 - RNA, 19 nt, Artificial Sequence
  Description of Artificial Sequence: Synthetic oligonucleotide
agcaaccacaugguggcuc

SEQ ID NO: 3241102 - RNA, 19 nt, Artificial Sequence
  Description of Artificial Sequence: Synthetic oligonucleotide
gaucuggugcccucuucug

SEQ ID NO: 3241103 - RNA, 19 nt, Artificial Sequence
  Description of Artificial Sequence: Synthetic oligonucleotide
uaugagaucuggugcccuc

SEQ ID NO: 3241104 - RNA, 19 nt, Artificial Sequence
  Description of Artificial Sequence: Synthetic oligonucleotide
guuaugagaucuggugccc

SEQ ID NO: 3241105 - RNA, 19 nt, Artificial Sequence
  Description of Artificial Sequence: Synthetic oligonucleotide
ggcucagagguuaagagca

SEQ ID NO: 3241106 - RNA, 19 nt, Artificial Sequence
  Description of Artificial Sequence: Synthetic oligonucleotide
agagauggcucagagguua

SEQ ID NO: 3241107 - RNA, 19 nt, Artificial Sequence
  Description of Artificial Sequence: Synthetic oligonucleotide
aagagcacugacugcucuu

SEQ ID NO: 3241108 - RNA, 19 nt, Artificial Sequence
  Description of Artificial Sequence: Synthetic oligonucleotide
ugcaugcagacagaacacu

SEQ ID NO: 3241109 - RNA, 19 nt, Artificial Sequence
  Description of Artificial Sequence: Synthetic oligonucleotide
agcacugacugcucuucca

SEQ ID NO: 3241110 - RNA, 19 nt, Artificial Sequence
  Description of Artificial Sequence: Synthetic oligonucleotide
augcagacagaacacugua

SEQ ID NO: 3241111 - RNA, 19 nt, Artificial Sequence
  Description of Artificial Sequence: Synthetic oligonucleotide
ugaguucaauucccagcaa

SEQ ID NO: 3241112 - RNA, 19 nt, Artificial Sequence
  Description of Artificial Sequence: Synthetic oligonucleotide
guucaauucccagcaacca

SEQ ID NO: 3241113 - RNA, 19 nt, Artificial Sequence
  Description of Artificial Sequence: Synthetic oligonucleotide
caaccaucuguuaugagau

SEQ ID NO: 3241114 - RNA, 19 nt, Artificial Sequence
  Description of Artificial Sequence: Synthetic oligonucleotide
uuaugagaucuggugcccu

SEQ ID NO: 3241115 - RNA, 19 nt, Artificial Sequence
  Description of Artificial Sequence: Synthetic oligonucleotide
gguuaagagcacugacugc

SEQ ID NO: 3241116 - RNA, 19 nt, Artificial Sequence
  Description of Artificial Sequence: Synthetic oligonucleotide
accacaugguggcucacaa

SEQ ID NO: 3241117 - RNA, 19 nt, Artificial Sequence
  Description of Artificial Sequence: Synthetic oligonucleotide
uuggauaucaaauacauca

SEQ ID NO: 3241118 - RNA, 19 nt, Artificial Sequence
  Description of Artificial Sequence: Synthetic oligonucleotide
agauaaggaguuuagaggc

SEQ ID NO: 3241119 - RNA, 19 nt, Artificial Sequence
  Description of Artificial Sequence: Synthetic oligonucleotide
uuaacaaguacccauuugg

SEQ ID NO: 3241120 - RNA, 19 nt, Artificial Sequence
  Description of Artificial Sequence: Synthetic oligonucleotide
uuuuacuauaacaagaacu

SEQ ID NO: 3241121 - RNA, 19 nt, Artificial Sequence
  Description of Artificial Sequence: Synthetic oligonucleotide
uacuuauugaccaacauca

SEQ ID NO: 3241122 - RNA, 19 nt, Artificial Sequence
  Description of Artificial Sequence: Synthetic oligonucleotide
gagucaauaaaauaggagc

SEQ ID NO: 3241123 - RNA, 19 nt, Artificial Sequence
  Description of Artificial Sequence: Synthetic oligonucleotide
aaaauuguuccuauaaaac

SEQ ID NO: 3241124 - RNA, 19 nt, Artificial Sequence
  Description of Artificial Sequence: Synthetic oligonucleotide
aaauuuguaguccaggggu

SEQ ID NO: 3241125 - RNA, 19 nt, Artificial Sequence
  Description of Artificial Sequence: Synthetic oligonucleotide
aaauuguuccuauaaaaca

SEQ ID NO: 3241126 - RNA, 19 nt, Artificial Sequence
  Description of Artificial Sequence: Synthetic oligonucleotide
agaauccagguuuuaaugc

SEQ ID NO: 3241127 - RNA, 19 nt, Artificial Sequence
  Description of Artificial Sequence: Synthetic oligonucleotide
ugcauuuguaaucacaaug

SEQ ID NO: 3241128 - RNA, 19 nt, Artificial Sequence
  Description of Artificial Sequence: Synthetic oligonucleotide
uuaaucauacccuuucucc

SEQ ID NO: 3241129 - RNA, 19 nt, Artificial Sequence
  Description of Artificial Sequence: Synthetic oligonucleotide
acauuuggauaucaaauac

SEQ ID NO: 3241130 - RNA, 19 nt, Artificial Sequence
  Description of Artificial Sequence: Synthetic oligonucleotide
uuuacaguaaucacuguga

SEQ ID NO: 3241131 - RNA, 19 nt, Artificial Sequence
  Description of Artificial Sequence: Synthetic oligonucleotide
ucaguaaauacuauuuuac

SEQ ID NO: 3241132 - RNA, 19 nt, Artificial Sequence
  Description of Artificial Sequence: Synthetic oligonucleotide
aaaguaaacgaccuugggu

SEQ ID NO: 3241133 - RNA, 19 nt, Artificial Sequence
  Description of Artificial Sequence: Synthetic oligonucleotide
uaaauuuguaguccagggg

SEQ ID NO: 3241134 - RNA, 19 nt, Artificial Sequence
  Description of Artificial Sequence: Synthetic oligonucleotide
ugagucaauaaaauaggag

SEQ ID NO: 3241135 - RNA, 19 nt, Artificial Sequence
  Description of Artificial Sequence: Synthetic oligonucleotide
ugagcaaacuccuuaauca

SEQ ID NO: 3241136 - RNA, 19 nt, Artificial Sequence
  Description of Artificial Sequence: Synthetic oligonucleotide
uuaaacauuaaagugauuu

SEQ ID NO: 3241137 - RNA, 19 nt, Artificial Sequence
  Description of Artificial Sequence: Synthetic oligonucleotide
agucaauaaaauaggagcc

SEQ ID NO: 3241138 - RNA, 19 nt, Artificial Sequence
  Description of Artificial Sequence: Synthetic oligonucleotide
aacaaguacccauuugguc

SEQ ID NO: 3241139 - RNA, 19 nt, Artificial Sequence
  Description of Artificial Sequence: Synthetic oligonucleotide
auuuauauaaaaugauaca

SEQ ID NO: 3241140 - RNA, 19 nt, Artificial Sequence
  Description of Artificial Sequence: Synthetic oligonucleotide
aaguaaacgaccuuggguu

SEQ ID NO: 3241141 - RNA, 19 nt, Artificial Sequence
  Description of Artificial Sequence: Synthetic oligonucleotide
uguauguauacuuauugac

SEQ ID NO: 3241142 - RNA, 19 nt, Artificial Sequence
  Description of Artificial Sequence: Synthetic oligonucleotide
agcuguuauaaaaugaagc

SEQ ID NO: 3241143 - RNA, 19 nt, Artificial Sequence
  Description of Artificial Sequence: Synthetic oligonucleotide
gaggcuuaaccuuuggugg

SEQ ID NO: 3241144 - RNA, 19 nt, Artificial Sequence
  Description of Artificial Sequence: Synthetic oligonucleotide
aaggccaaacccuugcaac

SEQ ID NO: 3241145 - RNA, 19 nt, Artificial Sequence
  Description of Artificial Sequence: Synthetic oligonucleotide
auacuuauugaccaacauc

SEQ ID NO: 3241146 - RNA, 19 nt, Artificial Sequence
  Description of Artificial Sequence: Synthetic oligonucleotide
gaacuguuaaacauuaaag

SEQ ID NO: 3241147 - RNA, 19 nt, Artificial Sequence
  Description of Artificial Sequence: Synthetic oligonucleotide
uuuguagagaaucuuguaa

SEQ ID NO: 3241148 - RNA, 19 nt, Artificial Sequence
  Description of Artificial Sequence: Synthetic oligonucleotide
uauuagauaaggaguuuag

SEQ ID NO: 3241149 - RNA, 19 nt, Artificial Sequence
  Description of Artificial Sequence: Synthetic oligonucleotide
ugcugauucuccuagagga

SEQ ID NO: 3241150 - RNA, 19 nt, Artificial Sequence
  Description of Artificial Sequence: Synthetic oligonucleotide
aaugugagaagaauccagg

SEQ ID NO: 3241151 - RNA, 19 nt, Artificial Sequence
  Description of Artificial Sequence: Synthetic oligonucleotide
caguauaacacucaaauga

SEQ ID NO: 3241152 - RNA, 19 nt, Artificial Sequence
  Description of Artificial Sequence: Synthetic oligonucleotide
uguuaaacauuaaagugau

SEQ ID NO: 3241153 - RNA, 19 nt, Artificial Sequence
  Description of Artificial Sequence: Synthetic oligonucleotide
uagaggaccacguauaaac

SEQ ID NO: 3241154 - RNA, 19 nt, Artificial Sequence
  Description of Artificial Sequence: Synthetic oligonucleotide
agguauaaugaaccaaugg

SEQ ID NO: 3241155 - RNA, 19 nt, Artificial Sequence
  Description of Artificial Sequence: Synthetic oligonucleotide
uauugaccaacaucaauag

SEQ ID NO: 3241156 - RNA, 19 nt, Artificial Sequence
  Description of Artificial Sequence: Synthetic oligonucleotide
aacgaccuuggguucaggc

SEQ ID NO: 3241157 - RNA, 19 nt, Artificial Sequence
  Description of Artificial Sequence: Synthetic oligonucleotide
ugaaccaauggauaguaac

SEQ ID NO: 3241158 - RNA, 19 nt, Artificial Sequence
  Description of Artificial Sequence: Synthetic oligonucleotide
acguauaaaccaaagaguc

SEQ ID NO: 3241159 - RNA, 19 nt, Artificial Sequence
  Description of Artificial Sequence: Synthetic oligonucleotide
aaacccuugcaacagaaau

SEQ ID NO: 3241160 - RNA, 19 nt, Artificial Sequence
  Description of Artificial Sequence: Synthetic oligonucleotide
aguauaacacucaaaugac

SEQ ID NO: 3241161 - RNA, 19 nt, Artificial Sequence
  Description of Artificial Sequence: Synthetic oligonucleotide
cucggaauugcaauggugc

SEQ ID NO: 3241162 - RNA, 19 nt, Artificial Sequence
  Description of Artificial Sequence: Synthetic oligonucleotide
acccuugcaacagaaaucc

SEQ ID NO: 3241163 - RNA, 19 nt, Artificial Sequence
  Description of Artificial Sequence: Synthetic oligonucleotide
uuacaguaaucacugugag

SEQ ID NO: 3241164 - RNA, 19 nt, Artificial Sequence
  Description of Artificial Sequence: Synthetic oligonucleotide
uaaucauguucuuuucuag

SEQ ID NO: 3241165 - RNA, 19 nt, Artificial Sequence
  Description of Artificial Sequence: Synthetic oligonucleotide
cuguuaaacauuaaaguga

SEQ ID NO: 3241166 - RNA, 19 nt, Artificial Sequence
  Description of Artificial Sequence: Synthetic oligonucleotide
agaacuguuaaacauuaaa

SEQ ID NO: 3241167 - RNA, 19 nt, Artificial Sequence
  Description of Artificial Sequence: Synthetic oligonucleotide
cuguuauaaaaugaagccg

SEQ ID NO: 3241168 - RNA, 19 nt, Artificial Sequence
  Description of Artificial Sequence: Synthetic oligonucleotide
ucuggcuugggaaauguga

SEQ ID NO: 3241169 - RNA, 19 nt, Artificial Sequence
  Description of Artificial Sequence: Synthetic oligonucleotide
cuucccaaggauauaagug

SEQ ID NO: 3241170 - RNA, 19 nt, Artificial Sequence
  Description of Artificial Sequence: Synthetic oligonucleotide
aaugaggacugucucccag

SEQ ID NO: 3241171 - RNA, 19 nt, Artificial Sequence
  Description of Artificial Sequence: Synthetic oligonucleotide
gguauaaugaaccaaugga

SEQ ID NO: 3241172 - RNA, 19 nt, Artificial Sequence
  Description of Artificial Sequence: Synthetic oligonucleotide
uacuauaacaagaacuguu

SEQ ID NO: 3241173 - RNA, 19 nt, Artificial Sequence
  Description of Artificial Sequence: Synthetic oligonucleotide
aaagcuguuauaaaaugaa

SEQ ID NO: 3241174 - RNA, 19 nt, Artificial Sequence
  Description of Artificial Sequence: Synthetic oligonucleotide
uuaaucauguucuuuucua

SEQ ID NO: 3241175 - RNA, 19 nt, Artificial Sequence
  Description of Artificial Sequence: Synthetic oligonucleotide
uuaaugaagguuccauccu

SEQ ID NO: 3241176 - RNA, 19 nt, Artificial Sequence
  Description of Artificial Sequence: Synthetic oligonucleotide
guauguauacuuauugacc

SEQ ID NO: 3241177 - RNA, 19 nt, Artificial Sequence
  Description of Artificial Sequence: Synthetic oligonucleotide
gaaccaauggauaguaacc

SEQ ID NO: 3241178 - RNA, 19 nt, Artificial Sequence
  Description of Artificial Sequence: Synthetic oligonucleotide
guaccagccagguuuaucc

SEQ ID NO: 3241179 - RNA, 19 nt, Artificial Sequence
  Description of Artificial Sequence: Synthetic oligonucleotide
ugcaacagaaaucccaguc

SEQ ID NO: 3241180 - RNA, 19 nt, Artificial Sequence
  Description of Artificial Sequence: Synthetic oligonucleotide
gaauacaagguauaaugaa

SEQ ID NO: 3241181 - RNA, 19 nt, Artificial Sequence
  Description of Artificial Sequence: Synthetic oligonucleotide
acacucaaaugacauuugg

SEQ ID NO: 3241182 - RNA, 19 nt, Artificial Sequence
  Description of Artificial Sequence: Synthetic oligonucleotide
uauagugaugagcugggaa

SEQ ID NO: 3241183 - RNA, 19 nt, Artificial Sequence
  Description of Artificial Sequence: Synthetic oligonucleotide
auuaacaaguacccauuug

SEQ ID NO: 3241184 - RNA, 19 nt, Artificial Sequence
  Description of Artificial Sequence: Synthetic oligonucleotide
ugugagaaacuggugauca

SEQ ID NO: 3241185 - RNA, 19 nt, Artificial Sequence
  Description of Artificial Sequence: Synthetic oligonucleotide
ucucccaguuacuauagug

SEQ ID NO: 3241186 - RNA, 19 nt, Artificial Sequence
  Description of Artificial Sequence: Synthetic oligonucleotide
acaucaauagaaaauauua

SEQ ID NO: 3241187 - RNA, 19 nt, Artificial Sequence
  Description of Artificial Sequence: Synthetic oligonucleotide
ucuggcgucagagugagca

SEQ ID NO: 3241188 - RNA, 19 nt, Artificial Sequence
  Description of Artificial Sequence: Synthetic oligonucleotide
cauucccucgucuugagac

SEQ ID NO: 3241189 - RNA, 19 nt, Artificial Sequence
  Description of Artificial Sequence: Synthetic oligonucleotide
aauauuaaucauguucuuu

SEQ ID NO: 3241190 - RNA, 19 nt, Artificial Sequence
  Description of Artificial Sequence: Synthetic oligonucleotide
guuacuauagugaugagcu

SEQ ID NO: 3241191 - RNA, 19 nt, Artificial Sequence
  Description of Artificial Sequence: Synthetic oligonucleotide
uggauaucaaauacaucac

SEQ ID NO: 3241192 - RNA, 19 nt, Artificial Sequence
  Description of Artificial Sequence: Synthetic oligonucleotide
uuuacugucugugucuuga

SEQ ID NO: 3241193 - RNA, 19 nt, Artificial Sequence
  Description of Artificial Sequence: Synthetic oligonucleotide
auagugaugagcugggaaa

SEQ ID NO: 3241194 - RNA, 19 nt, Artificial Sequence
  Description of Artificial Sequence: Synthetic oligonucleotide
ccacguauaaaccaaagag

SEQ ID NO: 3241195 - RNA, 19 nt, Artificial Sequence
  Description of Artificial Sequence: Synthetic oligonucleotide
uccuuaaucauacccuuuc

SEQ ID NO: 3241196 - RNA, 19 nt, Artificial Sequence
  Description of Artificial Sequence: Synthetic oligonucleotide
ucgagaaugaggacugucu

SEQ ID NO: 3241197 - RNA, 19 nt, Artificial Sequence
  Description of Artificial Sequence: Synthetic oligonucleotide
uauacuuauugaccaacau

SEQ ID NO: 3241198 - RNA, 19 nt, Artificial Sequence
  Description of Artificial Sequence: Synthetic oligonucleotide
aggcuuaaccuuugguggc

SEQ ID NO: 3241199 - RNA, 19 nt, Artificial Sequence
  Description of Artificial Sequence: Synthetic oligonucleotide
uaacaaguacccauuuggu

SEQ ID NO: 3241200 - RNA, 19 nt, Artificial Sequence
  Description of Artificial Sequence: Synthetic oligonucleotide
gccagguuuauccagagag

SEQ ID NO: 3241201 - RNA, 19 nt, Artificial Sequence
  Description of Artificial Sequence: Synthetic oligonucleotide
aggcucugcuucuucagcc

SEQ ID NO: 3241202 - RNA, 19 nt, Artificial Sequence
  Description of Artificial Sequence: Synthetic oligonucleotide
uacccuuucuccuugacua

SEQ ID NO: 3241203 - RNA, 19 nt, Artificial Sequence
  Description of Artificial Sequence: Synthetic oligonucleotide
cagaagcucauagaggugg

SEQ ID NO: 3241204 - RNA, 19 nt, Artificial Sequence
  Description of Artificial Sequence: Synthetic oligonucleotide
ucaaggucgaagcccacca

SEQ ID NO: 3241205 - RNA, 19 nt, Artificial Sequence
  Description of Artificial Sequence: Synthetic oligonucleotide
aguaaacgaccuuggguuc

SEQ ID NO: 3241206 - RNA, 19 nt, Artificial Sequence
  Description of Artificial Sequence: Synthetic oligonucleotide
gaauccagguuuuaaugca

SEQ ID NO: 3241207 - RNA, 19 nt, Artificial Sequence
  Description of Artificial Sequence: Synthetic oligonucleotide
aacccuugcaacagaaauc

SEQ ID NO: 3241208 - RNA, 19 nt, Artificial Sequence
  Description of Artificial Sequence: Synthetic oligonucleotide
uaggugcugauucuccuag

SEQ ID NO: 3241209 - RNA, 19 nt, Artificial Sequence
  Description of Artificial Sequence: Synthetic oligonucleotide
uucuuuucuaguuuagguu

SEQ ID NO: 3241210 - RNA, 19 nt, Artificial Sequence
  Description of Artificial Sequence: Synthetic oligonucleotide
uuuccucucuucuccagag

SEQ ID NO: 3241211 - RNA, 19 nt, Artificial Sequence
  Description of Artificial Sequence: Synthetic oligonucleotide
cagguuuauccagagaggg

SEQ ID NO: 3241212 - RNA, 19 nt, Artificial Sequence
  Description of Artificial Sequence: Synthetic oligonucleotide
cuguuuguagagaaucuug

SEQ ID NO: 3241213 - RNA, 19 nt, Artificial Sequence
  Description of Artificial Sequence: Synthetic oligonucleotide
uuguuccuauaaaacaccu

SEQ ID NO: 3241214 - RNA, 19 nt, Artificial Sequence
  Description of Artificial Sequence: Synthetic oligonucleotide
ucccaaggauauaagugcc

SEQ ID NO: 3241215 - RNA, 19 nt, Artificial Sequence
  Description of Artificial Sequence: Synthetic oligonucleotide
auuuggauaucaaauacau

SEQ ID NO: 3241216 - RNA, 19 nt, Artificial Sequence
  Description of Artificial Sequence: Synthetic oligonucleotide
uuagaggcuuaaccuuugg

SEQ ID NO: 3241217 - RNA, 19 nt, Artificial Sequence
  Description of Artificial Sequence: Synthetic oligonucleotide
aauguuauaguauuucccc

SEQ ID NO: 3241218 - RNA, 19 nt, Artificial Sequence
  Description of Artificial Sequence: Synthetic oligonucleotide
aagacaaagacuucuaacc

SEQ ID NO: 3241219 - RNA, 19 nt, Artificial Sequence
  Description of Artificial Sequence: Synthetic oligonucleotide
aauaugcugaguucaaggc

SEQ ID NO: 3241220 - RNA, 19 nt, Artificial Sequence
  Description of Artificial Sequence: Synthetic oligonucleotide
uguaaauugaaguuaaugu

SEQ ID NO: 3241221 - RNA, 19 nt, Artificial Sequence
  Description of Artificial Sequence: Synthetic oligonucleotide
aaagacuucuaaccaaccc

SEQ ID NO: 3241222 - RNA, 19 nt, Artificial Sequence
  Description of Artificial Sequence: Synthetic oligonucleotide
aauauucuccuccuugagc

SEQ ID NO: 3241223 - RNA, 19 nt, Artificial Sequence
  Description of Artificial Sequence: Synthetic oligonucleotide
ucaacuuccucacagagca

SEQ ID NO: 3241224 - RNA, 19 nt, Artificial Sequence
  Description of Artificial Sequence: Synthetic oligonucleotide
auaguauuuccccuguucc

SEQ ID NO: 3241225 - RNA, 19 nt, Artificial Sequence
  Description of Artificial Sequence: Synthetic oligonucleotide
aaagccaccgacucaaagg

SEQ ID NO: 3241226 - RNA, 19 nt, Artificial Sequence
  Description of Artificial Sequence: Synthetic oligonucleotide
uccgacgugaggaagaugg

SEQ ID NO: 3241227 - RNA, 19 nt, Artificial Sequence
  Description of Artificial Sequence: Synthetic oligonucleotide
aaauccaaaauauucuccu

SEQ ID NO: 3241228 - RNA, 19 nt, Artificial Sequence
  Description of Artificial Sequence: Synthetic oligonucleotide
auccaaaauauucuccucc

SEQ ID NO: 3241229 - RNA, 19 nt, Artificial Sequence
  Description of Artificial Sequence: Synthetic oligonucleotide
aaggcuuugaccacgaagg

SEQ ID NO: 3241230 - RNA, 19 nt, Artificial Sequence
  Description of Artificial Sequence: Synthetic oligonucleotide
auugaaguuaauguuauag

SEQ ID NO: 3241231 - RNA, 19 nt, Artificial Sequence
  Description of Artificial Sequence: Synthetic oligonucleotide
uggauucccauguaaaugg

SEQ ID NO: 3241232 - RNA, 19 nt, Artificial Sequence
  Description of Artificial Sequence: Synthetic oligonucleotide
uaauguuauaguauuuccc

SEQ ID NO: 3241233 - RNA, 19 nt, Artificial Sequence
  Description of Artificial Sequence: Synthetic oligonucleotide
uuaauguuauaguauuucc

SEQ ID NO: 3241234 - RNA, 19 nt, Artificial Sequence
  Description of Artificial Sequence: Synthetic oligonucleotide
ugucacaaggcuuugacca

SEQ ID NO: 3241235 - RNA, 19 nt, Artificial Sequence
  Description of Artificial Sequence: Synthetic oligonucleotide
uaaauugaaguuaauguua

SEQ ID NO: 3241236 - RNA, 19 nt, Artificial Sequence
  Description of Artificial Sequence: Synthetic oligonucleotide
acaaauccaaaauauucuc

SEQ ID NO: 3241237 - RNA, 19 nt, Artificial Sequence
  Description of Artificial Sequence: Synthetic oligonucleotide
auaugcugaguucaaggcc

SEQ ID NO: 3241238 - RNA, 19 nt, Artificial Sequence
  Description of Artificial Sequence: Synthetic oligonucleotide
uaugcugaguucaaggccc

SEQ ID NO: 3241239 - RNA, 19 nt, Artificial Sequence
  Description of Artificial Sequence: Synthetic oligonucleotide
aagacuucuaaccaacccu

SEQ ID NO: 3241240 - RNA, 19 nt, Artificial Sequence
  Description of Artificial Sequence: Synthetic oligonucleotide
aacaggaagggccucuugg

SEQ ID NO: 3241241 - RNA, 19 nt, Artificial Sequence
  Description of Artificial Sequence: Synthetic oligonucleotide
acugggguuauauugcuac

SEQ ID NO: 3241242 - RNA, 19 nt, Artificial Sequence
  Description of Artificial Sequence: Synthetic oligonucleotide
ugugguaaaacaggaaggg

SEQ ID NO: 3241243 - RNA, 19 nt, Artificial Sequence
  Description of Artificial Sequence: Synthetic oligonucleotide
agagacucuggauacuugc

SEQ ID NO: 3241244 - RNA, 19 nt, Artificial Sequence
  Description of Artificial Sequence: Synthetic oligonucleotide
uauauugcuacuccgugga

SEQ ID NO: 3241245 - RNA, 19 nt, Artificial Sequence
  Description of Artificial Sequence: Synthetic oligonucleotide
uuauauugcuacuccgugg

SEQ ID NO: 3241246 - RNA, 19 nt, Artificial Sequence
  Description of Artificial Sequence: Synthetic oligonucleotide
ugaaguuaauguuauagua

SEQ ID NO: 3241247 - RNA, 19 nt, Artificial Sequence
  Description of Artificial Sequence: Synthetic oligonucleotide
uuguacaaauccaaaauau

SEQ ID NO: 3241248 - RNA, 19 nt, Artificial Sequence
  Description of Artificial Sequence: Synthetic oligonucleotide
aaguuaauguuauaguauu

SEQ ID NO: 3241249 - RNA, 19 nt, Artificial Sequence
  Description of Artificial Sequence: Synthetic oligonucleotide
auauucuccuccuugagcu

SEQ ID NO: 3241250 - RNA, 19 nt, Artificial Sequence
  Description of Artificial Sequence: Synthetic oligonucleotide
caacccucuaccaauaugc

SEQ ID NO: 3241251 - RNA, 19 nt, Artificial Sequence
  Description of Artificial Sequence: Synthetic oligonucleotide
ucuaccaauaugcugaguu

SEQ ID NO: 3241252 - RNA, 19 nt, Artificial Sequence
  Description of Artificial Sequence: Synthetic oligonucleotide
caauaugcugaguucaagg

SEQ ID NO: 3241253 - RNA, 19 nt, Artificial Sequence
  Description of Artificial Sequence: Synthetic oligonucleotide
aaagguagacguucuacca

SEQ ID NO: 3241254 - RNA, 19 nt, Artificial Sequence
  Description of Artificial Sequence: Synthetic oligonucleotide
uuuuaagacaaagacuucu

SEQ ID NO: 3241255 - RNA, 19 nt, Artificial Sequence
  Description of Artificial Sequence: Synthetic oligonucleotide
aaauauucuccuccuugag

SEQ ID NO: 3241256 - RNA, 19 nt, Artificial Sequence
  Description of Artificial Sequence: Synthetic oligonucleotide
uuguaaauugaaguuaaug

SEQ ID NO: 3241257 - RNA, 19 nt, Artificial Sequence
  Description of Artificial Sequence: Synthetic oligonucleotide
uaagacaaagacuucuaac

SEQ ID NO: 3241258 - RNA, 19 nt, Artificial Sequence
  Description of Artificial Sequence: Synthetic oligonucleotide
aaucccuuuguccugcuca

SEQ ID NO: 3241259 - RNA, 19 nt, Artificial Sequence
  Description of Artificial Sequence: Synthetic oligonucleotide
ucugggugugguaaaacag

SEQ ID NO: 3241260 - RNA, 19 nt, Artificial Sequence
  Description of Artificial Sequence: Synthetic oligonucleotide
caaauccaaaauauucucc

SEQ ID NO: 3241261 - RNA, 19 nt, Artificial Sequence
  Description of Artificial Sequence: Synthetic oligonucleotide
aaaugggaaucccuuuguc

SEQ ID NO: 3241262 - RNA, 19 nt, Artificial Sequence
  Description of Artificial Sequence: Synthetic oligonucleotide
acugucacaaggcuuugac

SEQ ID NO: 3241263 - RNA, 19 nt, Artificial Sequence
  Description of Artificial Sequence: Synthetic oligonucleotide
caaaauauucuccuccuug

SEQ ID NO: 3241264 - RNA, 19 nt, Artificial Sequence
  Description of Artificial Sequence: Synthetic oligonucleotide
uugaaguuaauguuauagu

SEQ ID NO: 3241265 - RNA, 19 nt, Artificial Sequence
  Description of Artificial Sequence: Synthetic oligonucleotide
uauaguauuuccccuguuc

SEQ ID NO: 3241266 - RNA, 19 nt, Artificial Sequence
  Description of Artificial Sequence: Synthetic oligonucleotide
aagguagacguucuaccag

SEQ ID NO: 3241267 - RNA, 19 nt, Artificial Sequence
  Description of Artificial Sequence: Synthetic oligonucleotide
uagacguucuaccagucug

SEQ ID NO: 3241268 - RNA, 19 nt, Artificial Sequence
  Description of Artificial Sequence: Synthetic oligonucleotide
cauggaaggacagcgaugg

SEQ ID NO: 3241269 - RNA, 19 nt, Artificial Sequence
  Description of Artificial Sequence: Synthetic oligonucleotide
agagcaugcacuugucugg

SEQ ID NO: 3241270 - RNA, 19 nt, Artificial Sequence
  Description of Artificial Sequence: Synthetic oligonucleotide
cuugcauggaaggacagcg

SEQ ID NO: 3241271 - RNA, 19 nt, Artificial Sequence
  Description of Artificial Sequence: Synthetic oligonucleotide
uggauacuugcauggaagg

SEQ ID NO: 3241272 - RNA, 19 nt, Artificial Sequence
  Description of Artificial Sequence: Synthetic oligonucleotide
uuggaggaggcgaugaagc

SEQ ID NO: 3241273 - RNA, 19 nt, Artificial Sequence
  Description of Artificial Sequence: Synthetic oligonucleotide
caaagguagacguucuacc

SEQ ID NO: 3241274 - RNA, 19 nt, Artificial Sequence
  Description of Artificial Sequence: Synthetic oligonucleotide
ggugugguaaaacaggaag

SEQ ID NO: 3241275 - RNA, 19 nt, Artificial Sequence
  Description of Artificial Sequence: Synthetic oligonucleotide
uaguauuuccccuguuccg

SEQ ID NO: 3241276 - RNA, 19 nt, Artificial Sequence
  Description of Artificial Sequence: Synthetic oligonucleotide
guacaaauccaaaauauuc

SEQ ID NO: 3241277 - RNA, 19 nt, Artificial Sequence
  Description of Artificial Sequence: Synthetic oligonucleotide
uauuuguaaauugaaguua

SEQ ID NO: 3241278 - RNA, 19 nt, Artificial Sequence
  Description of Artificial Sequence: Synthetic oligonucleotide
gauacuugcauggaaggac

SEQ ID NO: 3241279 - RNA, 19 nt, Artificial Sequence
  Description of Artificial Sequence: Synthetic oligonucleotide
aagccaccgacucaaaggu

SEQ ID NO: 3241280 - RNA, 19 nt, Artificial Sequence
  Description of Artificial Sequence: Synthetic oligonucleotide
aguucaaggcccuauuugu

SEQ ID NO: 3241281 - RNA, 19 nt, Artificial Sequence
  Description of Artificial Sequence: Synthetic oligonucleotide
gaggcgaugaagcugccag

SEQ ID NO: 3241282 - RNA, 19 nt, Artificial Sequence
  Description of Artificial Sequence: Synthetic oligonucleotide
uccaagucagaaaucuccc

SEQ ID NO: 3241283 - RNA, 19 nt, Artificial Sequence
  Description of Artificial Sequence: Synthetic oligonucleotide
uguacaaauccaaaauauu

SEQ ID NO: 3241284 - RNA, 19 nt, Artificial Sequence
  Description of Artificial Sequence: Synthetic oligonucleotide
guuauauugcuacuccgug

SEQ ID NO: 3241285 - RNA, 19 nt, Artificial Sequence
  Description of Artificial Sequence: Synthetic oligonucleotide
uuaagacaaagacuucuaa

SEQ ID NO: 3241286 - RNA, 19 nt, Artificial Sequence
  Description of Artificial Sequence: Synthetic oligonucleotide
uucuaaccaacccucuacc

SEQ ID NO: 3241287 - RNA, 19 nt, Artificial Sequence
  Description of Artificial Sequence: Synthetic oligonucleotide
acaaagacuucuaaccaac

SEQ ID NO: 3241288 - RNA, 19 nt, Artificial Sequence
  Description of Artificial Sequence: Synthetic oligonucleotide
agacaaagacuucuaacca

SEQ ID NO: 3241289 - RNA, 19 nt, Artificial Sequence
  Description of Artificial Sequence: Synthetic oligonucleotide
uccuccuugagcugcaaag

SEQ ID NO: 3241290 - RNA, 19 nt, Artificial Sequence
  Description of Artificial Sequence: Synthetic oligonucleotide
uuuaagacaaagacuucua

SEQ ID NO: 3241291 - RNA, 19 nt, Artificial Sequence
  Description of Artificial Sequence: Synthetic oligonucleotide
guaaaugggaaucccuuug

SEQ ID NO: 3241292 - RNA, 19 nt, Artificial Sequence
  Description of Artificial Sequence: Synthetic oligonucleotide
cuggauacuugcauggaag

SEQ ID NO: 3241293 - RNA, 19 nt, Artificial Sequence
  Description of Artificial Sequence: Synthetic oligonucleotide
aaauugaaguuaauguuau

SEQ ID NO: 3241294 - RNA, 19 nt, Artificial Sequence
  Description of Artificial Sequence: Synthetic oligonucleotide
accacgaaggauccacacc

SEQ ID NO: 3241295 - RNA, 19 nt, Artificial Sequence
  Description of Artificial Sequence: Synthetic oligonucleotide
guuaauguuauaguauuuc

SEQ ID NO: 3241296 - RNA, 19 nt, Artificial Sequence
  Description of Artificial Sequence: Synthetic oligonucleotide
acgaaggauccacaccugc

SEQ ID NO: 3241297 - RNA, 19 nt, Artificial Sequence
  Description of Artificial Sequence: Synthetic oligonucleotide
uaaaugggaaucccuuugu

SEQ ID NO: 3241298 - RNA, 19 nt, Artificial Sequence
  Description of Artificial Sequence: Synthetic oligonucleotide
gaguucaaggcccuauuug

SEQ ID NO: 3241299 - RNA, 19 nt, Artificial Sequence
  Description of Artificial Sequence: Synthetic oligonucleotide
auugcuacuccguggaacu

SEQ ID NO: 3241300 - RNA, 19 nt, Artificial Sequence
  Description of Artificial Sequence: Synthetic oligonucleotide
cucaagagacucuggauac

SEQ ID NO: 3241301 - RNA, 19 nt, Artificial Sequence
  Description of Artificial Sequence: Synthetic oligonucleotide
uccaaaauauucuccuccu

SEQ ID NO: 3241302 - RNA, 19 nt, Artificial Sequence
  Description of Artificial Sequence: Synthetic oligonucleotide
ggugacugggguuauauug

SEQ ID NO: 3241303 - RNA, 19 nt, Artificial Sequence
  Description of Artificial Sequence: Synthetic oligonucleotide
ucacagagcaugcacuugu

SEQ ID NO: 3241304 - RNA, 19 nt, Artificial Sequence
  Description of Artificial Sequence: Synthetic oligonucleotide
gaaggauccacaccugcug

SEQ ID NO: 3241305 - RNA, 19 nt, Artificial Sequence
  Description of Artificial Sequence: Synthetic oligonucleotide
aacuuccucacagagcaug

SEQ ID NO: 3241306 - RNA, 19 nt, Artificial Sequence
  Description of Artificial Sequence: Synthetic oligonucleotide
ugagcugcaaagugggcug

SEQ ID NO: 3241307 - RNA, 19 nt, Artificial Sequence
  Description of Artificial Sequence: Synthetic oligonucleotide
gugugguaaaacaggaagg

SEQ ID NO: 3241308 - RNA, 19 nt, Artificial Sequence
  Description of Artificial Sequence: Synthetic oligonucleotide
cuucuaaccaacccucuac

SEQ ID NO: 3241309 - RNA, 19 nt, Artificial Sequence
  Description of Artificial Sequence: Synthetic oligonucleotide
ucaaagguagacguucuac

SEQ ID NO: 3241310 - RNA, 19 nt, Artificial Sequence
  Description of Artificial Sequence: Synthetic oligonucleotide
uaccaauaugcugaguuca

SEQ ID NO: 3241311 - RNA, 19 nt, Artificial Sequence
  Description of Artificial Sequence: Synthetic oligonucleotide
cuguccaucaacuuccuca

SEQ ID NO: 3241312 - RNA, 19 nt, Artificial Sequence
  Description of Artificial Sequence: Synthetic oligonucleotide
caaggcuuugaccacgaag

SEQ ID NO: 3241313 - RNA, 19 nt, Artificial Sequence
  Description of Artificial Sequence: Synthetic oligonucleotide
caucaacuuccucacagag

SEQ ID NO: 3241314 - RNA, 19 nt, Artificial Sequence
  Description of Artificial Sequence: Synthetic oligonucleotide
ugggugugguaaaacagga

SEQ ID NO: 3241315 - RNA, 19 nt, Artificial Sequence
  Description of Artificial Sequence: Synthetic oligonucleotide
ugguuguacaaauccaaaa

SEQ ID NO: 3241316 - RNA, 19 nt, Artificial Sequence
  Description of Artificial Sequence: Synthetic oligonucleotide
ucuggauucuggauuccca

SEQ ID NO: 3241317 - RNA, 19 nt, Artificial Sequence
  Description of Artificial Sequence: Synthetic oligonucleotide
aauuauuuuauuccagaag

SEQ ID NO: 3241318 - RNA, 19 nt, Artificial Sequence
  Description of Artificial Sequence: Synthetic oligonucleotide
auuauuuuauuccagaaga

SEQ ID NO: 3241319 - RNA, 19 nt, Artificial Sequence
  Description of Artificial Sequence: Synthetic oligonucleotide
uucuaaauuauuuuauucc

SEQ ID NO: 3241320 - RNA, 19 nt, Artificial Sequence
  Description of Artificial Sequence: Synthetic oligonucleotide
ucuaaauuauuuuauucca

SEQ ID NO: 3241321 - RNA, 19 nt, Artificial Sequence
  Description of Artificial Sequence: Synthetic oligonucleotide
uauuuuauuccagaagagg

SEQ ID NO: 3241322 - RNA, 19 nt, Artificial Sequence
  Description of Artificial Sequence: Synthetic oligonucleotide
auuuuauuccagaagaggg

SEQ ID NO: 3241323 - RNA, 19 nt, Artificial Sequence
  Description of Artificial Sequence: Synthetic oligonucleotide
uuauggaugguugugagcc

SEQ ID NO: 3241324 - RNA, 19 nt, Artificial Sequence
  Description of Artificial Sequence: Synthetic oligonucleotide
uaaauuauuuuauuccaga

SEQ ID NO: 3241325 - RNA, 19 nt, Artificial Sequence
  Description of Artificial Sequence: Synthetic oligonucleotide
uuuuauuccagaagagggc

SEQ ID NO: 3241326 - RNA, 19 nt, Artificial Sequence
  Description of Artificial Sequence: Synthetic oligonucleotide
uuauuuuauuccagaagag

SEQ ID NO: 3241327 - RNA, 19 nt, Artificial Sequence
  Description of Artificial Sequence: Synthetic oligonucleotide
uuuuguuucuaaauuauuu

SEQ ID NO: 3241328 - RNA, 19 nt, Artificial Sequence
  Description of Artificial Sequence: Synthetic oligonucleotide
uuucuaaauuauuuuauuc

SEQ ID NO: 3241329 - RNA, 19 nt, Artificial Sequence
  Description of Artificial Sequence: Synthetic oligonucleotide
aaauuauuuuauuccagaa

SEQ ID NO: 3241330 - RNA, 19 nt, Artificial Sequence
  Description of Artificial Sequence: Synthetic oligonucleotide
cuaaauuauuuuauuccag

SEQ ID NO: 3241331 - RNA, 19 nt, Artificial Sequence
  Description of Artificial Sequence: Synthetic oligonucleotide
gggaauugaacuuaggacc

SEQ ID NO: 3241332 - RNA, 19 nt, Artificial Sequence
  Description of Artificial Sequence: Synthetic oligonucleotide
uggaagagcagucagugcu

SEQ ID NO: 3241333 - RNA, 19 nt, Artificial Sequence
  Description of Artificial Sequence: Synthetic oligonucleotide
uguuucuaaauuauuuuau

SEQ ID NO: 3241334 - RNA, 19 nt, Artificial Sequence
  Description of Artificial Sequence: Synthetic oligonucleotide
ugggaauugaacuuaggac

SEQ ID NO: 3241335 - RNA, 19 nt, Artificial Sequence
  Description of Artificial Sequence: Synthetic oligonucleotide
ugaacuuaggaccucugga

SEQ ID NO: 3241336 - RNA, 19 nt, Artificial Sequence
  Description of Artificial Sequence: Synthetic oligonucleotide
aacuuaggaccucuggaag

SEQ ID NO: 3241337 - RNA, 19 nt, Artificial Sequence
  Description of Artificial Sequence: Synthetic oligonucleotide
auuauggaugguugugagc

SEQ ID NO: 3241338 - RNA, 19 nt, Artificial Sequence
  Description of Artificial Sequence: Synthetic oligonucleotide
uugaacuuaggaccucugg

SEQ ID NO: 3241339 - RNA, 19 nt, Artificial Sequence
  Description of Artificial Sequence: Synthetic oligonucleotide
guugugagccaucaugugg

SEQ ID NO: 3241340 - RNA, 19 nt, Artificial Sequence
  Description of Artificial Sequence: Synthetic oligonucleotide
uuuguuucuaaauuauuuu

SEQ ID NO: 3241341 - RNA, 19 nt, Artificial Sequence
  Description of Artificial Sequence: Synthetic oligonucleotide
ugcucuuaaccgcugagcc

SEQ ID NO: 3241342 - RNA, 19 nt, Artificial Sequence
  Description of Artificial Sequence: Synthetic oligonucleotide
agaagagggcaccagaucu

SEQ ID NO: 3241343 - RNA, 19 nt, Artificial Sequence
  Description of Artificial Sequence: Synthetic oligonucleotide
agucagugcucuuaaccgc

SEQ ID NO: 3241344 - RNA, 19 nt, Artificial Sequence
  Description of Artificial Sequence: Synthetic oligonucleotide
ugagccaucaugugguugc

SEQ ID NO: 3241345 - RNA, 19 nt, Artificial Sequence
  Description of Artificial Sequence: Synthetic oligonucleotide
uuuauuccagaagagggca

SEQ ID NO: 3241346 - RNA, 19 nt, Artificial Sequence
  Description of Artificial Sequence: Synthetic oligonucleotide
cagucagugcucuuaaccg

SEQ ID NO: 3241347 - RNA, 19 nt, Artificial Sequence
  Description of Artificial Sequence: Synthetic oligonucleotide
augguugugagccaucaug

SEQ ID NO: 3241348 - RNA, 19 nt, Artificial Sequence
  Description of Artificial Sequence: Synthetic oligonucleotide
cagaucucauuauggaugg

SEQ ID NO: 3241349 - RNA, 19 nt, Artificial Sequence
  Description of Artificial Sequence: Synthetic oligonucleotide
uuguuucuaaauuauuuua

SEQ ID NO: 3241350 - RNA, 19 nt, Artificial Sequence
  Description of Artificial Sequence: Synthetic oligonucleotide
uugugagccaucauguggu

SEQ ID NO: 3241351 - RNA, 19 nt, Artificial Sequence
  Description of Artificial Sequence: Synthetic oligonucleotide
ucuggaagagcagucagug

SEQ ID NO: 3241352 - RNA, 19 nt, Artificial Sequence
  Description of Artificial Sequence: Synthetic oligonucleotide
ugguugugagccaucaugu

SEQ ID NO: 3241353 - RNA, 19 nt, Artificial Sequence
  Description of Artificial Sequence: Synthetic oligonucleotide
ugagccaucucuccagccc

SEQ ID NO: 3241354 - RNA, 19 nt, Artificial Sequence
  Description of Artificial Sequence: Synthetic oligonucleotide
cauuauggaugguugugag

SEQ ID NO: 3241355 - RNA, 19 nt, Artificial Sequence
  Description of Artificial Sequence: Synthetic oligonucleotide
aauugaacuuaggaccucu

SEQ ID NO: 3241356 - RNA, 19 nt, Artificial Sequence
  Description of Artificial Sequence: Synthetic oligonucleotide
uaggaccucuggaagagca

SEQ ID NO: 3241357 - RNA, 19 nt, Artificial Sequence
  Description of Artificial Sequence: Synthetic oligonucleotide
ucauuauggaugguuguga

SEQ ID NO: 3241358 - RNA, 19 nt, Artificial Sequence
  Description of Artificial Sequence: Synthetic oligonucleotide
ucucauuauggaugguugu

SEQ ID NO: 3241359 - RNA, 19 nt, Artificial Sequence
  Description of Artificial Sequence: Synthetic oligonucleotide
gaacuuaggaccucuggaa

SEQ ID NO: 3241360 - RNA, 19 nt, Artificial Sequence
  Description of Artificial Sequence: Synthetic oligonucleotide
uaaccgcugagccaucucu

SEQ ID NO: 3241361 - RNA, 19 nt, Artificial Sequence
  Description of Artificial Sequence: Synthetic oligonucleotide
acuuaggaccucuggaaga

SEQ ID NO: 3241362 - RNA, 19 nt, Artificial Sequence
  Description of Artificial Sequence: Synthetic oligonucleotide
uauuccagaagagggcacc

SEQ ID NO: 3241363 - RNA, 19 nt, Artificial Sequence
  Description of Artificial Sequence: Synthetic oligonucleotide
accgcugagccaucucucc

SEQ ID NO: 3241364 - RNA, 19 nt, Artificial Sequence
  Description of Artificial Sequence: Synthetic oligonucleotide
uccagaagagggcaccaga

SEQ ID NO: 3241365 - RNA, 19 nt, Artificial Sequence
  Description of Artificial Sequence: Synthetic oligonucleotide
cugggaauugaacuuagga

SEQ ID NO: 3241366 - RNA, 19 nt, Artificial Sequence
  Description of Artificial Sequence: Synthetic oligonucleotide
ccagaucucauuauggaug

SEQ ID NO: 3241367 - RNA, 19 nt, Artificial Sequence
  Description of Artificial Sequence: Synthetic oligonucleotide
ugcugggaauugaacuuag

SEQ ID NO: 3241368 - RNA, 19 nt, Artificial Sequence
  Description of Artificial Sequence: Synthetic oligonucleotide
cuuaggaccucuggaagag

SEQ ID NO: 3241369 - RNA, 19 nt, Artificial Sequence
  Description of Artificial Sequence: Synthetic oligonucleotide
agugcucuuaaccgcugag

SEQ ID NO: 3241370 - RNA, 19 nt, Artificial Sequence
  Description of Artificial Sequence: Synthetic oligonucleotide
uuauuccagaagagggcac

SEQ ID NO: 3241371 - RNA, 19 nt, Artificial Sequence
  Description of Artificial Sequence: Synthetic oligonucleotide
aucucauuauggaugguug

SEQ ID NO: 3241372 - RNA, 19 nt, Artificial Sequence
  Description of Artificial Sequence: Synthetic oligonucleotide
gccaucaugugguugcugg

SEQ ID NO: 3241373 - RNA, 19 nt, Artificial Sequence
  Description of Artificial Sequence: Synthetic oligonucleotide
gcagucagugcucuuaacc

SEQ ID NO: 3241374 - RNA, 19 nt, Artificial Sequence
  Description of Artificial Sequence: Synthetic oligonucleotide
accagaucucauuauggau

SEQ ID NO: 3241375 - RNA, 19 nt, Artificial Sequence
  Description of Artificial Sequence: Synthetic oligonucleotide
cucauuauggaugguugug

SEQ ID NO: 3241376 - RNA, 19 nt, Artificial Sequence
  Description of Artificial Sequence: Synthetic oligonucleotide
aagagggcaccagaucuca

SEQ ID NO: 3241377 - RNA, 19 nt, Artificial Sequence
  Description of Artificial Sequence: Synthetic oligonucleotide
agcagucagugcucuuaac

SEQ ID NO: 3241378 - RNA, 19 nt, Artificial Sequence
  Description of Artificial Sequence: Synthetic oligonucleotide
ugguugcugggaauugaac

SEQ ID NO: 3241379 - RNA, 19 nt, Artificial Sequence
  Description of Artificial Sequence: Synthetic oligonucleotide
uauggaugguugugagcca

SEQ ID NO: 3241380 - RNA, 19 nt, Artificial Sequence
  Description of Artificial Sequence: Synthetic oligonucleotide
ugugguugcugggaauuga

SEQ ID NO: 3241381 - RNA, 19 nt, Artificial Sequence
  Description of Artificial Sequence: Synthetic oligonucleotide
aaccgcugagccaucucuc

SEQ ID NO: 3241382 - RNA, 19 nt, Artificial Sequence
  Description of Artificial Sequence: Synthetic oligonucleotide
cuggaagagcagucagugc

SEQ ID NO: 3241383 - RNA, 19 nt, Artificial Sequence
  Description of Artificial Sequence: Synthetic oligonucleotide
ucagugcucuuaaccgcug

SEQ ID NO: 3241384 - RNA, 19 nt, Artificial Sequence
  Description of Artificial Sequence: Synthetic oligonucleotide
guuucuaaauuauuuuauu

SEQ ID NO: 3241385 - RNA, 19 nt, Artificial Sequence
  Description of Artificial Sequence: Synthetic oligonucleotide
aucaugugguugcugggaa

SEQ ID NO: 3241386 - RNA, 19 nt, Artificial Sequence
  Description of Artificial Sequence: Synthetic oligonucleotide
ggcaccagaucucauuaug

SEQ ID NO: 3241387 - RNA, 19 nt, Artificial Sequence
  Description of Artificial Sequence: Synthetic oligonucleotide
caccagaucucauuaugga

SEQ ID NO: 3241388 - RNA, 19 nt, Artificial Sequence
  Description of Artificial Sequence: Synthetic oligonucleotide
gcaccagaucucauuaugg

SEQ ID NO: 3241389 - RNA, 19 nt, Artificial Sequence
  Description of Artificial Sequence: Synthetic oligonucleotide
uuaaccgcugagccaucuc

SEQ ID NO: 3241390 - RNA, 19 nt, Artificial Sequence
  Description of Artificial Sequence: Synthetic oligonucleotide
agggcaccagaucucauua

SEQ ID NO: 3241391 - RNA, 19 nt, Artificial Sequence
  Description of Artificial Sequence: Synthetic oligonucleotide
gguugcugggaauugaacu

SEQ ID NO: 3241392 - RNA, 19 nt, Artificial Sequence
  Description of Artificial Sequence: Synthetic oligonucleotide
cagaagagggcaccagauc

SEQ ID NO: 3241393 - RNA, 19 nt, Artificial Sequence
  Description of Artificial Sequence: Synthetic oligonucleotide
uuccagaagagggcaccag

SEQ ID NO: 3241394 - RNA, 19 nt, Artificial Sequence
  Description of Artificial Sequence: Synthetic oligonucleotide
cugagccaucucuccagcc

SEQ ID NO: 3241395 - RNA, 19 nt, Artificial Sequence
  Description of Artificial Sequence: Synthetic oligonucleotide
ucaugugguugcugggaau

SEQ ID NO: 3241396 - RNA, 19 nt, Artificial Sequence
  Description of Artificial Sequence: Synthetic oligonucleotide
gaagagggcaccagaucuc

SEQ ID NO: 3241397 - RNA, 19 nt, Artificial Sequence
  Description of Artificial Sequence: Synthetic oligonucleotide
auugaacuuaggaccucug

SEQ ID NO: 3241398 - RNA, 19 nt, Artificial Sequence
  Description of Artificial Sequence: Synthetic oligonucleotide
guugcugggaauugaacuu

SEQ ID NO: 3241399 - RNA, 19 nt, Artificial Sequence
  Description of Artificial Sequence: Synthetic oligonucleotide
gugcucuuaaccgcugagc

SEQ ID NO: 3241400 - RNA, 19 nt, Artificial Sequence
  Description of Artificial Sequence: Synthetic oligonucleotide
uuaggaccucuggaagagc

SEQ ID NO: 3241401 - RNA, 19 nt, Artificial Sequence
  Description of Artificial Sequence: Synthetic oligonucleotide
uugcugggaauugaacuua

SEQ ID NO: 3241402 - RNA, 19 nt, Artificial Sequence
  Description of Artificial Sequence: Synthetic oligonucleotide
agagcagucagugcucuua

SEQ ID NO: 3241403 - RNA, 19 nt, Artificial Sequence
  Description of Artificial Sequence: Synthetic oligonucleotide
gguugugagccaucaugug

SEQ ID NO: 3241404 - RNA, 19 nt, Artificial Sequence
  Description of Artificial Sequence: Synthetic oligonucleotide
gaauugaacuuaggaccuc

SEQ ID NO: 3241405 - RNA, 19 nt, Artificial Sequence
  Description of Artificial Sequence: Synthetic oligonucleotide
gaucucauuauggaugguu

SEQ ID NO: 3241406 - RNA, 19 nt, Artificial Sequence
  Description of Artificial Sequence: Synthetic oligonucleotide
auuccagaagagggcacca

SEQ ID NO: 3241407 - RNA, 19 nt, Artificial Sequence
  Description of Artificial Sequence: Synthetic oligonucleotide
uggaugguugugagccauc

SEQ ID NO: 3241408 - RNA, 19 nt, Artificial Sequence
  Description of Artificial Sequence: Synthetic oligonucleotide
accucuggaagagcaguca

SEQ ID NO: 3241409 - RNA, 19 nt, Artificial Sequence
  Description of Artificial Sequence: Synthetic oligonucleotide
gagcagucagugcucuuaa

SEQ ID NO: 3241410 - RNA, 19 nt, Artificial Sequence
  Description of Artificial Sequence: Synthetic oligonucleotide
caucaugugguugcuggga

SEQ ID NO: 3241411 - RNA, 19 nt, Artificial Sequence
  Description of Artificial Sequence: Synthetic oligonucleotide
auggaugguugugagccau

SEQ ID NO: 3241412 - RNA, 19 nt, Artificial Sequence
  Description of Artificial Sequence: Synthetic oligonucleotide
ggaauugaacuuaggaccu

SEQ ID NO: 3241413 - RNA, 19 nt, Artificial Sequence
  Description of Artificial Sequence: Synthetic oligonucleotide
augugguugcugggaauug

SEQ ID NO: 3241414 - RNA, 19 nt, Artificial Sequence
  Description of Artificial Sequence: Synthetic oligonucleotide
ccaucaugugguugcuggg

SEQ ID NO: 3241415 - RNA, 19 nt, Artificial Sequence
  Description of Artificial Sequence: Synthetic oligonucleotide
aagagcagucagugcucuu

SEQ ID NO: 3241416 - RNA, 19 nt, Artificial Sequence
  Description of Artificial Sequence: Synthetic oligonucleotide
gaccucuggaagagcaguc

SEQ ID NO: 3241417 - RNA, 19 nt, Artificial Sequence
  Description of Artificial Sequence: Synthetic oligonucleotide
agcauguccacauucaccg

SEQ ID NO: 3241418 - RNA, 19 nt, Artificial Sequence
  Description of Artificial Sequence: Synthetic oligonucleotide
cauagcaugcguaugaagc

SEQ ID NO: 3241419 - RNA, 19 nt, Artificial Sequence
  Description of Artificial Sequence: Synthetic oligonucleotide
ugcacuaaaagcaugucca

SEQ ID NO: 3241420 - RNA, 19 nt, Artificial Sequence
  Description of Artificial Sequence: Synthetic oligonucleotide
acauucaccgcacacauag

SEQ ID NO: 3241421 - RNA, 19 nt, Artificial Sequence
  Description of Artificial Sequence: Synthetic oligonucleotide
auagcaugcguaugaagcc

SEQ ID NO: 3241422 - RNA, 19 nt, Artificial Sequence
  Description of Artificial Sequence: Synthetic oligonucleotide
aaagcauguccacauucac

SEQ ID NO: 3241423 - RNA, 19 nt, Artificial Sequence
  Description of Artificial Sequence: Synthetic oligonucleotide
acugaaagggcuucucgcc

SEQ ID NO: 3241424 - RNA, 19 nt, Artificial Sequence
  Description of Artificial Sequence: Synthetic oligonucleotide
aagcccuucccgcacacgc

SEQ ID NO: 3241425 - RNA, 19 nt, Artificial Sequence
  Description of Artificial Sequence: Synthetic oligonucleotide
acacauaggguuucucucc

SEQ ID NO: 3241426 - RNA, 19 nt, Artificial Sequence
  Description of Artificial Sequence: Synthetic oligonucleotide
acuuguagggcuucauccc

SEQ ID NO: 3241427 - RNA, 19 nt, Artificial Sequence
  Description of Artificial Sequence: Synthetic oligonucleotide
uggacaaaggccuugccgc

SEQ ID NO: 3241428 - RNA, 19 nt, Artificial Sequence
  Description of Artificial Sequence: Synthetic oligonucleotide
accugcgugcacuaaaagc

SEQ ID NO: 3241429 - RNA, 19 nt, Artificial Sequence
  Description of Artificial Sequence: Synthetic oligonucleotide
auucaccgcacacauaggg

SEQ ID NO: 3241430 - RNA, 19 nt, Artificial Sequence
  Description of Artificial Sequence: Synthetic oligonucleotide
uaaaagcauguccacauuc

SEQ ID NO: 3241431 - RNA, 19 nt, Artificial Sequence
  Description of Artificial Sequence: Synthetic oligonucleotide
aaggcuuugccacacucug

SEQ ID NO: 3241432 - RNA, 19 nt, Artificial Sequence
  Description of Artificial Sequence: Synthetic oligonucleotide
acuaaaagcauguccacau

SEQ ID NO: 3241433 - RNA, 19 nt, Artificial Sequence
  Description of Artificial Sequence: Synthetic oligonucleotide
augcguaugaagcccuucc

SEQ ID NO: 3241434 - RNA, 19 nt, Artificial Sequence
  Description of Artificial Sequence: Synthetic oligonucleotide
aagcauguccacauucacc

SEQ ID NO: 3241435 - RNA, 19 nt, Artificial Sequence
  Description of Artificial Sequence: Synthetic oligonucleotide
cacuuguagggcuucaucc

SEQ ID NO: 3241436 - RNA, 19 nt, Artificial Sequence
  Description of Artificial Sequence: Synthetic oligonucleotide
acucugugcacugaaaggg

SEQ ID NO: 3241437 - RNA, 19 nt, Artificial Sequence
  Description of Artificial Sequence: Synthetic oligonucleotide
uggaucagagaccugcgug

SEQ ID NO: 3241438 - RNA, 19 nt, Artificial Sequence
  Description of Artificial Sequence: Synthetic oligonucleotide
aggcugaaggcuuugccac

SEQ ID NO: 3241439 - RNA, 19 nt, Artificial Sequence
  Description of Artificial Sequence: Synthetic oligonucleotide
acacucugugcacugaaag

SEQ ID NO: 3241440 - RNA, 19 nt, Artificial Sequence
  Description of Artificial Sequence: Synthetic oligonucleotide
uguguggauucucucgugc

SEQ ID NO: 3241441 - RNA, 19 nt, Artificial Sequence
  Description of Artificial Sequence: Synthetic oligonucleotide
aaaagcauguccacauuca

SEQ ID NO: 3241442 - RNA, 19 nt, Artificial Sequence
  Description of Artificial Sequence: Synthetic oligonucleotide
acucauagcaugcguauga

SEQ ID NO: 3241443 - RNA, 19 nt, Artificial Sequence
  Description of Artificial Sequence: Synthetic oligonucleotide
gaugaggugcgagugcugg

SEQ ID NO: 3241444 - RNA, 19 nt, Artificial Sequence
  Description of Artificial Sequence: Synthetic oligonucleotide
cuggacaaaggccuugccg

SEQ ID NO: 3241445 - RNA, 19 nt, Artificial Sequence
  Description of Artificial Sequence: Synthetic oligonucleotide
uaggguuucucuccggugu

SEQ ID NO: 3241446 - RNA, 19 nt, Artificial Sequence
  Description of Artificial Sequence: Synthetic oligonucleotide
ugcuggaucagagaccugc

SEQ ID NO: 3241447 - RNA, 19 nt, Artificial Sequence
  Description of Artificial Sequence: Synthetic oligonucleotide
uguggauucucucgugcug

SEQ ID NO: 3241448 - RNA, 19 nt, Artificial Sequence
  Description of Artificial Sequence: Synthetic oligonucleotide
uccgguguggacucucugg

SEQ ID NO: 3241449 - RNA, 19 nt, Artificial Sequence
  Description of Artificial Sequence: Synthetic oligonucleotide
cacucugugcacugaaagg

SEQ ID NO: 3241450 - RNA, 19 nt, Artificial Sequence
  Description of Artificial Sequence: Synthetic oligonucleotide
uugcuuucaggcugaaggc

SEQ ID NO: 3241451 - RNA, 19 nt, Artificial Sequence
  Description of Artificial Sequence: Synthetic oligonucleotide
ucauagcaugcguaugaag

SEQ ID NO: 3241452 - RNA, 19 nt, Artificial Sequence
  Description of Artificial Sequence: Synthetic oligonucleotide
gugcacuaaaagcaugucc

SEQ ID NO: 3241453 - RNA, 19 nt, Artificial Sequence
  Description of Artificial Sequence: Synthetic oligonucleotide
cacugaaagggcuucucgc

SEQ ID NO: 3241454 - RNA, 19 nt, Artificial Sequence
  Description of Artificial Sequence: Synthetic oligonucleotide
ucaggcugaaggcuuugcc

SEQ ID NO: 3241455 - RNA, 19 nt, Artificial Sequence
  Description of Artificial Sequence: Synthetic oligonucleotide
cucgugcuggaucagagac

SEQ ID NO: 3241456 - RNA, 19 nt, Artificial Sequence
  Description of Artificial Sequence: Synthetic oligonucleotide
gauucucucgugcuggauc

SEQ ID NO: 3241457 - RNA, 19 nt, Artificial Sequence
  Description of Artificial Sequence: Synthetic oligonucleotide
cuuguagggcuucaucccc

SEQ ID NO: 3241458 - RNA, 19 nt, Artificial Sequence
  Description of Artificial Sequence: Synthetic oligonucleotide
auucucucgugcuggauca

SEQ ID NO: 3241459 - RNA, 19 nt, Artificial Sequence
  Description of Artificial Sequence: Synthetic oligonucleotide
ucugugcacugaaagggcu

SEQ ID NO: 3241460 - RNA, 19 nt, Artificial Sequence
  Description of Artificial Sequence: Synthetic oligonucleotide
ugcguaugaagcccuuccc

SEQ ID NO: 3241461 - RNA, 19 nt, Artificial Sequence
  Description of Artificial Sequence: Synthetic oligonucleotide
cacacauaggguuucucuc

SEQ ID NO: 3241462 - RNA, 19 nt, Artificial Sequence
  Description of Artificial Sequence: Synthetic oligonucleotide
uucaccgcacacauagggu

SEQ ID NO: 3241463 - RNA, 19 nt, Artificial Sequence
  Description of Artificial Sequence: Synthetic oligonucleotide
uaugaagcccuucccgcac

SEQ ID NO: 3241464 - RNA, 19 nt, Artificial Sequence
  Description of Artificial Sequence: Synthetic oligonucleotide
ugaaggcuuugccacacuc

SEQ ID NO: 3241465 - RNA, 19 nt, Artificial Sequence
  Description of Artificial Sequence: Synthetic oligonucleotide
ugaaagggcuucucgccug

SEQ ID NO: 3241466 - RNA, 19 nt, Artificial Sequence
  Description of Artificial Sequence: Synthetic oligonucleotide
uccacauucaccgcacaca

SEQ ID NO: 3241467 - RNA, 19 nt, Artificial Sequence
  Description of Artificial Sequence: Synthetic oligonucleotide
cacauaggguuucucuccg

SEQ ID NO: 3241468 - RNA, 19 nt, Artificial Sequence
  Description of Artificial Sequence: Synthetic oligonucleotide
gacucucuggugcuggaug

SEQ ID NO: 3241469 - RNA, 19 nt, Artificial Sequence
  Description of Artificial Sequence: Synthetic oligonucleotide
ugcgagugcuggacaaagg

SEQ ID NO: 3241470 - RNA, 19 nt, Artificial Sequence
  Description of Artificial Sequence: Synthetic oligonucleotide
uuugccacacucugugcac

SEQ ID NO: 3241471 - RNA, 19 nt, Artificial Sequence
  Description of Artificial Sequence: Synthetic oligonucleotide
uuucucuccgguguggacu

SEQ ID NO: 3241472 - RNA, 19 nt, Artificial Sequence
  Description of Artificial Sequence: Synthetic oligonucleotide
uggugcuggaugaggugcg

SEQ ID NO: 3241473 - RNA, 19 nt, Artificial Sequence
  Description of Artificial Sequence: Synthetic oligonucleotide
cucugugcacugaaagggc

SEQ ID NO: 3241474 - RNA, 19 nt, Artificial Sequence
  Description of Artificial Sequence: Synthetic oligonucleotide
guggauucucucgugcugg

SEQ ID NO: 3241475 - RNA, 19 nt, Artificial Sequence
  Description of Artificial Sequence: Synthetic oligonucleotide
gguguggacucucuggugc

SEQ ID NO: 3241476 - RNA, 19 nt, Artificial Sequence
  Description of Artificial Sequence: Synthetic oligonucleotide
ugcgugcacuaaaagcaug

SEQ ID NO: 3241477 - RNA, 19 nt, Artificial Sequence
  Description of Artificial Sequence: Synthetic oligonucleotide
ggaucagagaccugcgugc

SEQ ID NO: 3241478 - RNA, 19 nt, Artificial Sequence
  Description of Artificial Sequence: Synthetic oligonucleotide
auaggguuucucuccggug

SEQ ID NO: 3241479 - RNA, 19 nt, Artificial Sequence
  Description of Artificial Sequence: Synthetic oligonucleotide
ucagagaccugcgugcacu

SEQ ID NO: 3241480 - RNA, 19 nt, Artificial Sequence
  Description of Artificial Sequence: Synthetic oligonucleotide
acacgccgcacuuguaggg

SEQ ID NO: 3241481 - RNA, 19 nt, Artificial Sequence
  Description of Artificial Sequence: Synthetic oligonucleotide
ucucuggugcuggaugagg

SEQ ID NO: 3241482 - RNA, 19 nt, Artificial Sequence
  Description of Artificial Sequence: Synthetic oligonucleotide
ucaccgcacacauaggguu

SEQ ID NO: 3241483 - RNA, 19 nt, Artificial Sequence
  Description of Artificial Sequence: Synthetic oligonucleotide
uagcaugcguaugaagccc

SEQ ID NO: 3241484 - RNA, 19 nt, Artificial Sequence
  Description of Artificial Sequence: Synthetic oligonucleotide
ucgugcuggaucagagacc

SEQ ID NO: 3241485 - RNA, 19 nt, Artificial Sequence
  Description of Artificial Sequence: Synthetic oligonucleotide
ucuggugcuggaugaggug

SEQ ID NO: 3241486 - RNA, 19 nt, Artificial Sequence
  Description of Artificial Sequence: Synthetic oligonucleotide
cucucgugcuggaucagag

SEQ ID NO: 3241487 - RNA, 19 nt, Artificial Sequence
  Description of Artificial Sequence: Synthetic oligonucleotide
aaggccuugccgcacucau

SEQ ID NO: 3241488 - RNA, 19 nt, Artificial Sequence
  Description of Artificial Sequence: Synthetic oligonucleotide
acucucuggugcuggauga

SEQ ID NO: 3241489 - RNA, 19 nt, Artificial Sequence
  Description of Artificial Sequence: Synthetic oligonucleotide
acauaggguuucucuccgg

SEQ ID NO: 3241490 - RNA, 19 nt, Artificial Sequence
  Description of Artificial Sequence: Synthetic oligonucleotide
cuuugccacacucugugca

SEQ ID NO: 3241491 - RNA, 19 nt, Artificial Sequence
  Description of Artificial Sequence: Synthetic oligonucleotide
aagggcuucucgccugugu

SEQ ID NO: 3241492 - RNA, 19 nt, Artificial Sequence
  Description of Artificial Sequence: Synthetic oligonucleotide
ggccuugccgcacucauag

SEQ ID NO: 3241493 - RNA, 19 nt, Artificial Sequence
  Description of Artificial Sequence: Synthetic oligonucleotide
cacacgccgcacuuguagg

SEQ ID NO: 3241494 - RNA, 19 nt, Artificial Sequence
  Description of Artificial Sequence: Synthetic oligonucleotide
ugccgcacucauagcaugc

SEQ ID NO: 3241495 - RNA, 19 nt, Artificial Sequence
  Description of Artificial Sequence: Synthetic oligonucleotide
uggaugaggugcgagugcu

SEQ ID NO: 3241496 - RNA, 19 nt, Artificial Sequence
  Description of Artificial Sequence: Synthetic oligonucleotide
cuggugcuggaugaggugc

SEQ ID NO: 3241497 - RNA, 19 nt, Artificial Sequence
  Description of Artificial Sequence: Synthetic oligonucleotide
aucagagaccugcgugcac

SEQ ID NO: 3241498 - RNA, 19 nt, Artificial Sequence
  Description of Artificial Sequence: Synthetic oligonucleotide
ccugcgugcacuaaaagca

SEQ ID NO: 3241499 - RNA, 19 nt, Artificial Sequence
  Description of Artificial Sequence: Synthetic oligonucleotide
agggcuucucgccugugug

SEQ ID NO: 3241500 - RNA, 19 nt, Artificial Sequence
  Description of Artificial Sequence: Synthetic oligonucleotide
ugcuggaugaggugcgagu

SEQ ID NO: 3241501 - RNA, 19 nt, Artificial Sequence
  Description of Artificial Sequence: Synthetic oligonucleotide
gcguaugaagcccuucccg

SEQ ID NO: 3241502 - RNA, 19 nt, Artificial Sequence
  Description of Artificial Sequence: Synthetic oligonucleotide
ggcuuugccacacucugug

SEQ ID NO: 3241503 - RNA, 19 nt, Artificial Sequence
  Description of Artificial Sequence: Synthetic oligonucleotide
ugcuuucaggcugaaggcu

SEQ ID NO: 3241504 - RNA, 19 nt, Artificial Sequence
  Description of Artificial Sequence: Synthetic oligonucleotide
cauucaccgcacacauagg

SEQ ID NO: 3241505 - RNA, 19 nt, Artificial Sequence
  Description of Artificial Sequence: Synthetic oligonucleotide
cauguccacauucaccgca

SEQ ID NO: 3241506 - RNA, 19 nt, Artificial Sequence
  Description of Artificial Sequence: Synthetic oligonucleotide
ugaggugcgagugcuggac

SEQ ID NO: 3241507 - RNA, 19 nt, Artificial Sequence
  Description of Artificial Sequence: Synthetic oligonucleotide
gccuguguggauucucucg

SEQ ID NO: 3241508 - RNA, 19 nt, Artificial Sequence
  Description of Artificial Sequence: Synthetic oligonucleotide
uugccgcacucauagcaug

SEQ ID NO: 3241509 - RNA, 19 nt, Artificial Sequence
  Description of Artificial Sequence: Synthetic oligonucleotide
gaccugcgugcacuaaaag

SEQ ID NO: 3241510 - RNA, 19 nt, Artificial Sequence
  Description of Artificial Sequence: Synthetic oligonucleotide
gcgagugcuggacaaaggc

SEQ ID NO: 3241511 - RNA, 19 nt, Artificial Sequence
  Description of Artificial Sequence: Synthetic oligonucleotide
ucucgugcuggaucagaga

SEQ ID NO: 3241512 - RNA, 19 nt, Artificial Sequence
  Description of Artificial Sequence: Synthetic oligonucleotide
guaugaagcccuucccgca

SEQ ID NO: 3241513 - RNA, 19 nt, Artificial Sequence
  Description of Artificial Sequence: Synthetic oligonucleotide
auguccacauucaccgcac

SEQ ID NO: 3241514 - RNA, 19 nt, Artificial Sequence
  Description of Artificial Sequence: Synthetic oligonucleotide
gcacugaaagggcuucucg

SEQ ID NO: 3241515 - RNA, 19 nt, Artificial Sequence
  Description of Artificial Sequence: Synthetic oligonucleotide
ugugcacugaaagggcuuc

SEQ ID NO: 3241516 - RNA, 19 nt, Artificial Sequence
  Description of Artificial Sequence: Synthetic oligonucleotide
ucgccuguguggauucucu

SEQ ID NO: 3241517 - RNA, 19 nt, Artificial Sequence
  Description of Artificial Sequence: Synthetic oligonucleotide
aauagaggaagccacaucc

SEQ ID NO: 3241518 - RNA, 19 nt, Artificial Sequence
  Description of Artificial Sequence: Synthetic oligonucleotide
aaagaaucauauuugcaug

SEQ ID NO: 3241519 - RNA, 19 nt, Artificial Sequence
  Description of Artificial Sequence: Synthetic oligonucleotide
guacuaacaagugugaugg

SEQ ID NO: 3241520 - RNA, 19 nt, Artificial Sequence
  Description of Artificial Sequence: Synthetic oligonucleotide
ucguacacagguuagauga

SEQ ID NO: 3241521 - RNA, 19 nt, Artificial Sequence
  Description of Artificial Sequence: Synthetic oligonucleotide
ugcacaaauugacugauca

SEQ ID NO: 3241522 - RNA, 19 nt, Artificial Sequence
  Description of Artificial Sequence: Synthetic oligonucleotide
ugcaauaacaccccggggu

SEQ ID NO: 3241523 - RNA, 19 nt, Artificial Sequence
  Description of Artificial Sequence: Synthetic oligonucleotide
uucacaaauaucaccugag

SEQ ID NO: 3241524 - RNA, 19 nt, Artificial Sequence
  Description of Artificial Sequence: Synthetic oligonucleotide
aagaaucauauuugcauga

SEQ ID NO: 3241525 - RNA, 19 nt, Artificial Sequence
  Description of Artificial Sequence: Synthetic oligonucleotide
aaguuaguuucauuuguug

SEQ ID NO: 3241526 - RNA, 19 nt, Artificial Sequence
  Description of Artificial Sequence: Synthetic oligonucleotide
uguuccuacgacaacguca

SEQ ID NO: 3241527 - RNA, 19 nt, Artificial Sequence
  Description of Artificial Sequence: Synthetic oligonucleotide
guaaauuagcaccauugcc

SEQ ID NO: 3241528 - RNA, 19 nt, Artificial Sequence
  Description of Artificial Sequence: Synthetic oligonucleotide
ucacaaauaucaccugagg

SEQ ID NO: 3241529 - RNA, 19 nt, Artificial Sequence
  Description of Artificial Sequence: Synthetic oligonucleotide
agcuaaguaagaucucccc

SEQ ID NO: 3241530 - RNA, 19 nt, Artificial Sequence
  Description of Artificial Sequence: Synthetic oligonucleotide
uuaccgguaaguuaguuuc

SEQ ID NO: 3241531 - RNA, 19 nt, Artificial Sequence
  Description of Artificial Sequence: Synthetic oligonucleotide
aacaugacagcaauggucu

SEQ ID NO: 3241532 - RNA, 19 nt, Artificial Sequence
  Description of Artificial Sequence: Synthetic oligonucleotide
cucacuaauugaaacacug

SEQ ID NO: 3241533 - RNA, 19 nt, Artificial Sequence
  Description of Artificial Sequence: Synthetic oligonucleotide
aagucuggcuuguugcugg

SEQ ID NO: 3241534 - RNA, 19 nt, Artificial Sequence
  Description of Artificial Sequence: Synthetic oligonucleotide
aaucgaaaagcuggagggc

SEQ ID NO: 3241535 - RNA, 19 nt, Artificial Sequence
  Description of Artificial Sequence: Synthetic oligonucleotide
ucagauuuauuucguacac

SEQ ID NO: 3241536 - RNA, 19 nt, Artificial Sequence
  Description of Artificial Sequence: Synthetic oligonucleotide
gaaagacaagauuaggaca

SEQ ID NO: 3241537 - RNA, 19 nt, Artificial Sequence
  Description of Artificial Sequence: Synthetic oligonucleotide
aauucacaggaaccccagc

SEQ ID NO: 3241538 - RNA, 19 nt, Artificial Sequence
  Description of Artificial Sequence: Synthetic oligonucleotide
cuaacaagugugauggcag

SEQ ID NO: 3241539 - RNA, 19 nt, Artificial Sequence
  Description of Artificial Sequence: Synthetic oligonucleotide
uugaagagaguuaggauuc

SEQ ID NO: 3241540 - RNA, 19 nt, Artificial Sequence
  Description of Artificial Sequence: Synthetic oligonucleotide
aagguuucuuugaagagag

SEQ ID NO: 3241541 - RNA, 19 nt, Artificial Sequence
  Description of Artificial Sequence: Synthetic oligonucleotide
uggaguguucacuaacacg

SEQ ID NO: 3241542 - RNA, 19 nt, Artificial Sequence
  Description of Artificial Sequence: Synthetic oligonucleotide
aguauuaccagaaacacuu

SEQ ID NO: 3241543 - RNA, 19 nt, Artificial Sequence
  Description of Artificial Sequence: Synthetic oligonucleotide
aacucccuuagacucauug

SEQ ID NO: 3241544 - RNA, 19 nt, Artificial Sequence
  Description of Artificial Sequence: Synthetic oligonucleotide
ugucaauggaaauuucuga

SEQ ID NO: 3241545 - RNA, 19 nt, Artificial Sequence
  Description of Artificial Sequence: Synthetic oligonucleotide
ucaccuguccuucacuggg

SEQ ID NO: 3241546 - RNA, 19 nt, Artificial Sequence
  Description of Artificial Sequence: Synthetic oligonucleotide
cuccugguaaauuagcacc

SEQ ID NO: 3241547 - RNA, 19 nt, Artificial Sequence
  Description of Artificial Sequence: Synthetic oligonucleotide
acugagcucacccacacug

SEQ ID NO: 3241548 - RNA, 19 nt, Artificial Sequence
  Description of Artificial Sequence: Synthetic oligonucleotide
agguuagaugacuuuguac

SEQ ID NO: 3241549 - RNA, 19 nt, Artificial Sequence
  Description of Artificial Sequence: Synthetic oligonucleotide
ucaauggaaauuucugaca

SEQ ID NO: 3241550 - RNA, 19 nt, Artificial Sequence
  Description of Artificial Sequence: Synthetic oligonucleotide
aguuaguuucauuuguuga

SEQ ID NO: 3241551 - RNA, 19 nt, Artificial Sequence
  Description of Artificial Sequence: Synthetic oligonucleotide
ucugucaccuaacaugaca

SEQ ID NO: 3241552 - RNA, 19 nt, Artificial Sequence
  Description of Artificial Sequence: Synthetic oligonucleotide
aauugacugaucaugucug

SEQ ID NO: 3241553 - RNA, 19 nt, Artificial Sequence
  Description of Artificial Sequence: Synthetic oligonucleotide
uuccuaaaaccuuggaggc

SEQ ID NO: 3241554 - RNA, 19 nt, Artificial Sequence
  Description of Artificial Sequence: Synthetic oligonucleotide
aauggucucagcaagcgcu

SEQ ID NO: 3241555 - RNA, 19 nt, Artificial Sequence
  Description of Artificial Sequence: Synthetic oligonucleotide
uuauuucguacacagguua

SEQ ID NO: 3241556 - RNA, 19 nt, Artificial Sequence
  Description of Artificial Sequence: Synthetic oligonucleotide
acuguuauccagguccucc

SEQ ID NO: 3241557 - RNA, 19 nt, Artificial Sequence
  Description of Artificial Sequence: Synthetic oligonucleotide
ugucagauuuauuucguac

SEQ ID NO: 3241558 - RNA, 19 nt, Artificial Sequence
  Description of Artificial Sequence: Synthetic oligonucleotide
aaagccuucagcugcuccu

SEQ ID NO: 3241559 - RNA, 19 nt, Artificial Sequence
  Description of Artificial Sequence: Synthetic oligonucleotide
acucauuggaccaugacug

SEQ ID NO: 3241560 - RNA, 19 nt, Artificial Sequence
  Description of Artificial Sequence: Synthetic oligonucleotide
agguaucucaaguagauuu

SEQ ID NO: 3241561 - RNA, 19 nt, Artificial Sequence
  Description of Artificial Sequence: Synthetic oligonucleotide
gucaauggaaauuucugac

SEQ ID NO: 3241562 - RNA, 19 nt, Artificial Sequence
  Description of Artificial Sequence: Synthetic oligonucleotide
ugucugaauucacaggaac

SEQ ID NO: 3241563 - RNA, 19 nt, Artificial Sequence
  Description of Artificial Sequence: Synthetic oligonucleotide
ucggacagcugcaauaaca

SEQ ID NO: 3241564 - RNA, 19 nt, Artificial Sequence
  Description of Artificial Sequence: Synthetic oligonucleotide
cuugcugugaaauuaguaa

SEQ ID NO: 3241565 - RNA, 19 nt, Artificial Sequence
  Description of Artificial Sequence: Synthetic oligonucleotide
ggaaagacaagauuaggac

SEQ ID NO: 3241566 - RNA, 19 nt, Artificial Sequence
  Description of Artificial Sequence: Synthetic oligonucleotide
gaggagguguguuaaccgg

SEQ ID NO: 3241567 - RNA, 19 nt, Artificial Sequence
  Description of Artificial Sequence: Synthetic oligonucleotide
cacuaauugaaacacuguc

SEQ ID NO: 3241568 - RNA, 19 nt, Artificial Sequence
  Description of Artificial Sequence: Synthetic oligonucleotide
uugaaacacugucaucaag

SEQ ID NO: 3241569 - RNA, 19 nt, Artificial Sequence
  Description of Artificial Sequence: Synthetic oligonucleotide
uguugugaaagugaacugu

SEQ ID NO: 3241570 - RNA, 19 nt, Artificial Sequence
  Description of Artificial Sequence: Synthetic oligonucleotide
aagauuaggacagggcugu

SEQ ID NO: 3241571 - RNA, 19 nt, Artificial Sequence
  Description of Artificial Sequence: Synthetic oligonucleotide
augacuuuguacuggcuug

SEQ ID NO: 3241572 - RNA, 19 nt, Artificial Sequence
  Description of Artificial Sequence: Synthetic oligonucleotide
auucacaggaaccccagca

SEQ ID NO: 3241573 - RNA, 19 nt, Artificial Sequence
  Description of Artificial Sequence: Synthetic oligonucleotide
aggacagggcuguaacucc

SEQ ID NO: 3241574 - RNA, 19 nt, Artificial Sequence
  Description of Artificial Sequence: Synthetic oligonucleotide
agauacaaguccccauuuc

SEQ ID NO: 3241575 - RNA, 19 nt, Artificial Sequence
  Description of Artificial Sequence: Synthetic oligonucleotide
uucuuugccucucugucac

SEQ ID NO: 3241576 - RNA, 19 nt, Artificial Sequence
  Description of Artificial Sequence: Synthetic oligonucleotide
ugauaacuucaacuuguca

SEQ ID NO: 3241577 - RNA, 19 nt, Artificial Sequence
  Description of Artificial Sequence: Synthetic oligonucleotide
uaaccgggguaacuguugg

SEQ ID NO: 3241578 - RNA, 19 nt, Artificial Sequence
  Description of Artificial Sequence: Synthetic oligonucleotide
ugcggcacacagauggacg

SEQ ID NO: 3241579 - RNA, 19 nt, Artificial Sequence
  Description of Artificial Sequence: Synthetic oligonucleotide
acucccuuagacucauugg

SEQ ID NO: 3241580 - RNA, 19 nt, Artificial Sequence
  Description of Artificial Sequence: Synthetic oligonucleotide
acuaauugaaacacuguca

SEQ ID NO: 3241581 - RNA, 19 nt, Artificial Sequence
  Description of Artificial Sequence: Synthetic oligonucleotide
uccugguaaauuagcacca

SEQ ID NO: 3241582 - RNA, 19 nt, Artificial Sequence
  Description of Artificial Sequence: Synthetic oligonucleotide
aauccucgagguuugcaga

SEQ ID NO: 3241583 - RNA, 19 nt, Artificial Sequence
  Description of Artificial Sequence: Synthetic oligonucleotide
uguaacuccaacucccuua

SEQ ID NO: 3241584 - RNA, 19 nt, Artificial Sequence
  Description of Artificial Sequence: Synthetic oligonucleotide
guuaguuucauuuguugaa

SEQ ID NO: 3241585 - RNA, 19 nt, Artificial Sequence
  Description of Artificial Sequence: Synthetic oligonucleotide
aacuuguuuaaugucuggu

SEQ ID NO: 3241586 - RNA, 19 nt, Artificial Sequence
  Description of Artificial Sequence: Synthetic oligonucleotide
ucacuaauugaaacacugu

SEQ ID NO: 3241587 - RNA, 19 nt, Artificial Sequence
  Description of Artificial Sequence: Synthetic oligonucleotide
gguaaauuagcaccauugc

SEQ ID NO: 3241588 - RNA, 19 nt, Artificial Sequence
  Description of Artificial Sequence: Synthetic oligonucleotide
uuaaccgggguaacuguug

SEQ ID NO: 3241589 - RNA, 19 nt, Artificial Sequence
  Description of Artificial Sequence: Synthetic oligonucleotide
uuuauuucguacacagguu

SEQ ID NO: 3241590 - RNA, 19 nt, Artificial Sequence
  Description of Artificial Sequence: Synthetic oligonucleotide
guaacuccaacucccuuag

SEQ ID NO: 3241591 - RNA, 19 nt, Artificial Sequence
  Description of Artificial Sequence: Synthetic oligonucleotide
auuucaagggcaucaugca

SEQ ID NO: 3241592 - RNA, 19 nt, Artificial Sequence
  Description of Artificial Sequence: Synthetic oligonucleotide
caauccucgagguuugcag

SEQ ID NO: 3241593 - RNA, 19 nt, Artificial Sequence
  Description of Artificial Sequence: Synthetic oligonucleotide
uauuaccagaaacacuuuu

SEQ ID NO: 3241594 - RNA, 19 nt, Artificial Sequence
  Description of Artificial Sequence: Synthetic oligonucleotide
acuaacacgugcuccugag

SEQ ID NO: 3241595 - RNA, 19 nt, Artificial Sequence
  Description of Artificial Sequence: Synthetic oligonucleotide
auuaccagaaacacuuuug

SEQ ID NO: 3241596 - RNA, 19 nt, Artificial Sequence
  Description of Artificial Sequence: Synthetic oligonucleotide
gguacuaacaagugugaug

SEQ ID NO: 3241597 - RNA, 19 nt, Artificial Sequence
  Description of Artificial Sequence: Synthetic oligonucleotide
gguaaguuaguuucauuug

SEQ ID NO: 3241598 - RNA, 19 nt, Artificial Sequence
  Description of Artificial Sequence: Synthetic oligonucleotide
gugaaauuaguaauuccug

SEQ ID NO: 3241599 - RNA, 19 nt, Artificial Sequence
  Description of Artificial Sequence: Synthetic oligonucleotide
guuccuacgacaacgucag

SEQ ID NO: 3241600 - RNA, 19 nt, Artificial Sequence
  Description of Artificial Sequence: Synthetic oligonucleotide
guuugcagagggcagaguc

SEQ ID NO: 3241601 - RNA, 19 nt, Artificial Sequence
  Description of Artificial Sequence: Synthetic oligonucleotide
ugcuccugguaaauuagca

SEQ ID NO: 3241602 - RNA, 19 nt, Artificial Sequence
  Description of Artificial Sequence: Synthetic oligonucleotide
ucauuuguugaaguauuac

SEQ ID NO: 3241603 - RNA, 19 nt, Artificial Sequence
  Description of Artificial Sequence: Synthetic oligonucleotide
cuaucuaagguuucuuuga

SEQ ID NO: 3241604 - RNA, 19 nt, Artificial Sequence
  Description of Artificial Sequence: Synthetic oligonucleotide
aagagaguuaggauucucu

SEQ ID NO: 3241605 - RNA, 19 nt, Artificial Sequence
  Description of Artificial Sequence: Synthetic oligonucleotide
acuaacaagugugauggca

SEQ ID NO: 3241606 - RNA, 19 nt, Artificial Sequence
  Description of Artificial Sequence: Synthetic oligonucleotide
cugucguuuacguucauca

SEQ ID NO: 3241607 - RNA, 19 nt, Artificial Sequence
  Description of Artificial Sequence: Synthetic oligonucleotide
uucgguacauauuucuuua

SEQ ID NO: 3241608 - RNA, 19 nt, Artificial Sequence
  Description of Artificial Sequence: Synthetic oligonucleotide
gggguacaaacucuuaccg

SEQ ID NO: 3241609 - RNA, 19 nt, Artificial Sequence
  Description of Artificial Sequence: Synthetic oligonucleotide
uaaguaagaucuccccuuc

SEQ ID NO: 3241610 - RNA, 19 nt, Artificial Sequence
  Description of Artificial Sequence: Synthetic oligonucleotide
uguguguuaugggaaagac

SEQ ID NO: 3241611 - RNA, 19 nt, Artificial Sequence
  Description of Artificial Sequence: Synthetic oligonucleotide
uuccauuucaagggcauca

SEQ ID NO: 3241612 - RNA, 19 nt, Artificial Sequence
  Description of Artificial Sequence: Synthetic oligonucleotide
uaacuguugggguacuaac

SEQ ID NO: 3241613 - RNA, 19 nt, Artificial Sequence
  Description of Artificial Sequence: Synthetic oligonucleotide
acuguugggguacuaacaa

SEQ ID NO: 3241614 - RNA, 19 nt, Artificial Sequence
  Description of Artificial Sequence: Synthetic oligonucleotide
uuggggucagcacuucugc

SEQ ID NO: 3241615 - RNA, 19 nt, Artificial Sequence
  Description of Artificial Sequence: Synthetic oligonucleotide
uuuguugccauguguguua

SEQ ID NO: 3241616 - RNA, 19 nt, Artificial Sequence
  Description of Artificial Sequence: Synthetic oligonucleotide
uucguacacagguuagaug

SEQ ID NO: 3241617 - RNA, 19 nt, Artificial Sequence
  Description of Artificial Sequence: Synthetic oligonucleotide
aaauggauuguucugaugg

SEQ ID NO: 3241618 - RNA, 19 nt, Artificial Sequence
  Description of Artificial Sequence: Synthetic oligonucleotide
uuuauuguagauuucugcg

SEQ ID NO: 3241619 - RNA, 19 nt, Artificial Sequence
  Description of Artificial Sequence: Synthetic oligonucleotide
gauuauauauuuuagaaaa

SEQ ID NO: 3241620 - RNA, 19 nt, Artificial Sequence
  Description of Artificial Sequence: Synthetic oligonucleotide
aaugaugccacucauacau

SEQ ID NO: 3241621 - RNA, 19 nt, Artificial Sequence
  Description of Artificial Sequence: Synthetic oligonucleotide
acacuuaggaaccacauac

SEQ ID NO: 3241622 - RNA, 19 nt, Artificial Sequence
  Description of Artificial Sequence: Synthetic oligonucleotide
aagcugauuauuuauuagg

SEQ ID NO: 3241623 - RNA, 19 nt, Artificial Sequence
  Description of Artificial Sequence: Synthetic oligonucleotide
auuaguaucgauucauuag

SEQ ID NO: 3241624 - RNA, 19 nt, Artificial Sequence
  Description of Artificial Sequence: Synthetic oligonucleotide
ugaaugaugccacucauac

SEQ ID NO: 3241625 - RNA, 19 nt, Artificial Sequence
  Description of Artificial Sequence: Synthetic oligonucleotide
agaauguucuuccuguugg

SEQ ID NO: 3241626 - RNA, 19 nt, Artificial Sequence
  Description of Artificial Sequence: Synthetic oligonucleotide
gauugcaggacugacaagg

SEQ ID NO: 3241627 - RNA, 19 nt, Artificial Sequence
  Description of Artificial Sequence: Synthetic oligonucleotide
uuaguaucgauucauuagu

SEQ ID NO: 3241628 - RNA, 19 nt, Artificial Sequence
  Description of Artificial Sequence: Synthetic oligonucleotide
acuauuauuaaaguuacca

SEQ ID NO: 3241629 - RNA, 19 nt, Artificial Sequence
  Description of Artificial Sequence: Synthetic oligonucleotide
cugauuauuuauuaggcac

SEQ ID NO: 3241630 - RNA, 19 nt, Artificial Sequence
  Description of Artificial Sequence: Synthetic oligonucleotide
auaaauuaggaguucugag

SEQ ID NO: 3241631 - RNA, 19 nt, Artificial Sequence
  Description of Artificial Sequence: Synthetic oligonucleotide
uuacaagaaagcuuaauaa

SEQ ID NO: 3241632 - RNA, 19 nt, Artificial Sequence
  Description of Artificial Sequence: Synthetic oligonucleotide
ggauuuuacaaguucaggg

SEQ ID NO: 3241633 - RNA, 19 nt, Artificial Sequence
  Description of Artificial Sequence: Synthetic oligonucleotide
cuagacaucacaucugacc

SEQ ID NO: 3241634 - RNA, 19 nt, Artificial Sequence
  Description of Artificial Sequence: Synthetic oligonucleotide
uauacauaucauaaauugu

SEQ ID NO: 3241635 - RNA, 19 nt, Artificial Sequence
  Description of Artificial Sequence: Synthetic oligonucleotide
uguggauuuuacaaguuca

SEQ ID NO: 3241636 - RNA, 19 nt, Artificial Sequence
  Description of Artificial Sequence: Synthetic oligonucleotide
ucugccuaugucuagaaga

SEQ ID NO: 3241637 - RNA, 19 nt, Artificial Sequence
  Description of Artificial Sequence: Synthetic oligonucleotide
auuagcaauggguaucacg

SEQ ID NO: 3241638 - RNA, 19 nt, Artificial Sequence
  Description of Artificial Sequence: Synthetic oligonucleotide
uugaauggcacucugguau

SEQ ID NO: 3241639 - RNA, 19 nt, Artificial Sequence
  Description of Artificial Sequence: Synthetic oligonucleotide
aggggucucacauuugucc

SEQ ID NO: 3241640 - RNA, 19 nt, Artificial Sequence
  Description of Artificial Sequence: Synthetic oligonucleotide
aaugagcauuaauuccagc

SEQ ID NO: 3241641 - RNA, 19 nt, Artificial Sequence
  Description of Artificial Sequence: Synthetic oligonucleotide
gguucuaagacacuguuag

SEQ ID NO: 3241642 - RNA, 19 nt, Artificial Sequence
  Description of Artificial Sequence: Synthetic oligonucleotide
ucuuguuuagaguaucggc

SEQ ID NO: 3241643 - RNA, 19 nt, Artificial Sequence
  Description of Artificial Sequence: Synthetic oligonucleotide
cauguuggaaguuucacug

SEQ ID NO: 3241644 - RNA, 19 nt, Artificial Sequence
  Description of Artificial Sequence: Synthetic oligonucleotide
uuaggaaccacauacugau

SEQ ID NO: 3241645 - RNA, 19 nt, Artificial Sequence
  Description of Artificial Sequence: Synthetic oligonucleotide
uucuaagacacuguuaggc

SEQ ID NO: 3241646 - RNA, 19 nt, Artificial Sequence
  Description of Artificial Sequence: Synthetic oligonucleotide
ugucgaagcacaacgaugu

SEQ ID NO: 3241647 - RNA, 19 nt, Artificial Sequence
  Description of Artificial Sequence: Synthetic oligonucleotide
guuagcagaccucugauug

SEQ ID NO: 3241648 - RNA, 19 nt, Artificial Sequence
  Description of Artificial Sequence: Synthetic oligonucleotide
cugaggguuugauagaugg

SEQ ID NO: 3241649 - RNA, 19 nt, Artificial Sequence
  Description of Artificial Sequence: Synthetic oligonucleotide
cuauuauuaaaguuaccac

SEQ ID NO: 3241650 - RNA, 19 nt, Artificial Sequence
  Description of Artificial Sequence: Synthetic oligonucleotide
uagauggacauguuggaag

SEQ ID NO: 3241651 - RNA, 19 nt, Artificial Sequence
  Description of Artificial Sequence: Synthetic oligonucleotide
uaauaaugauuauauauuu

SEQ ID NO: 3241652 - RNA, 19 nt, Artificial Sequence
  Description of Artificial Sequence: Synthetic oligonucleotide
uguacugccaaacguauuc

SEQ ID NO: 3241653 - RNA, 19 nt, Artificial Sequence
  Description of Artificial Sequence: Synthetic oligonucleotide
acuauucuuguuuagagua

SEQ ID NO: 3241654 - RNA, 19 nt, Artificial Sequence
  Description of Artificial Sequence: Synthetic oligonucleotide
guuguuucaacagaaauca

SEQ ID NO: 3241655 - RNA, 19 nt, Artificial Sequence
  Description of Artificial Sequence: Synthetic oligonucleotide
auacugaucagcagggucc

SEQ ID NO: 3241656 - RNA, 19 nt, Artificial Sequence
  Description of Artificial Sequence: Synthetic oligonucleotide
agcugauuauuuauuaggc

SEQ ID NO: 3241657 - RNA, 19 nt, Artificial Sequence
  Description of Artificial Sequence: Synthetic oligonucleotide
gaaucugggcacuagaauc

SEQ ID NO: 3241658 - RNA, 19 nt, Artificial Sequence
  Description of Artificial Sequence: Synthetic oligonucleotide
uugguaagcacucugugaa

SEQ ID NO: 3241659 - RNA, 19 nt, Artificial Sequence
  Description of Artificial Sequence: Synthetic oligonucleotide
uuuuaaggacuucuucaag

SEQ ID NO: 3241660 - RNA, 19 nt, Artificial Sequence
  Description of Artificial Sequence: Synthetic oligonucleotide
ucuccugaaaacacuuagg

SEQ ID NO: 3241661 - RNA, 19 nt, Artificial Sequence
  Description of Artificial Sequence: Synthetic oligonucleotide
agugucaggacucauggca

SEQ ID NO: 3241662 - RNA, 19 nt, Artificial Sequence
  Description of Artificial Sequence: Synthetic oligonucleotide
uguuuagaguaucggcugg

SEQ ID NO: 3241663 - RNA, 19 nt, Artificial Sequence
  Description of Artificial Sequence: Synthetic oligonucleotide
uacaagaaagcuuaauaau

SEQ ID NO: 3241664 - RNA, 19 nt, Artificial Sequence
  Description of Artificial Sequence: Synthetic oligonucleotide
aacuauucuuguuuagagu

SEQ ID NO: 3241665 - RNA, 19 nt, Artificial Sequence
  Description of Artificial Sequence: Synthetic oligonucleotide
ugaccagaaagaauguucu

SEQ ID NO: 3241666 - RNA, 19 nt, Artificial Sequence
  Description of Artificial Sequence: Synthetic oligonucleotide
uaucacgagauauuuacaa

SEQ ID NO: 3241667 - RNA, 19 nt, Artificial Sequence
  Description of Artificial Sequence: Synthetic oligonucleotide
acaagaaagcuuaauaaug

SEQ ID NO: 3241668 - RNA, 19 nt, Artificial Sequence
  Description of Artificial Sequence: Synthetic oligonucleotide
uauugcuguagcuuggaga

SEQ ID NO: 3241669 - RNA, 19 nt, Artificial Sequence
  Description of Artificial Sequence: Synthetic oligonucleotide
uaucgauucauuaguauuu

SEQ ID NO: 3241670 - RNA, 19 nt, Artificial Sequence
  Description of Artificial Sequence: Synthetic oligonucleotide
cacuuauuaguaucgauuc

SEQ ID NO: 3241671 - RNA, 19 nt, Artificial Sequence
  Description of Artificial Sequence: Synthetic oligonucleotide
uuauuguagauuucugcgu

SEQ ID NO: 3241672 - RNA, 19 nt, Artificial Sequence
  Description of Artificial Sequence: Synthetic oligonucleotide
cuagaauccccacucuucg

SEQ ID NO: 3241673 - RNA, 19 nt, Artificial Sequence
  Description of Artificial Sequence: Synthetic oligonucleotide
acuuaggaaccacauacug

SEQ ID NO: 3241674 - RNA, 19 nt, Artificial Sequence
  Description of Artificial Sequence: Synthetic oligonucleotide
uuguuuagaguaucggcug

SEQ ID NO: 3241675 - RNA, 19 nt, Artificial Sequence
  Description of Artificial Sequence: Synthetic oligonucleotide
gguaucacgagauauuuac

SEQ ID NO: 3241676 - RNA, 19 nt, Artificial Sequence
  Description of Artificial Sequence: Synthetic oligonucleotide
uauagcuaguguuagccuc

SEQ ID NO: 3241677 - RNA, 19 nt, Artificial Sequence
  Description of Artificial Sequence: Synthetic oligonucleotide
ucuaagacacuguuaggcu

SEQ ID NO: 3241678 - RNA, 19 nt, Artificial Sequence
  Description of Artificial Sequence: Synthetic oligonucleotide
aggacugacaaggagguuc

SEQ ID NO: 3241679 - RNA, 19 nt, Artificial Sequence
  Description of Artificial Sequence: Synthetic oligonucleotide
augacuauuauuaaaguua

SEQ ID NO: 3241680 - RNA, 19 nt, Artificial Sequence
  Description of Artificial Sequence: Synthetic oligonucleotide
uggauuuuacaaguucagg

SEQ ID NO: 3241681 - RNA, 19 nt, Artificial Sequence
  Description of Artificial Sequence: Synthetic oligonucleotide
ugcucguuccuacuugagg

SEQ ID NO: 3241682 - RNA, 19 nt, Artificial Sequence
  Description of Artificial Sequence: Synthetic oligonucleotide
uauuaguaucgauucauua

SEQ ID NO: 3241683 - RNA, 19 nt, Artificial Sequence
  Description of Artificial Sequence: Synthetic oligonucleotide
gauaaccuccuaaagccag

SEQ ID NO: 3241684 - RNA, 19 nt, Artificial Sequence
  Description of Artificial Sequence: Synthetic oligonucleotide
uucuucaagguucccacac

SEQ ID NO: 3241685 - RNA, 19 nt, Artificial Sequence
  Description of Artificial Sequence: Synthetic oligonucleotide
uccucugaucugcaaagag

SEQ ID NO: 3241686 - RNA, 19 nt, Artificial Sequence
  Description of Artificial Sequence: Synthetic oligonucleotide
ggagauaaagcuccaaaug

SEQ ID NO: 3241687 - RNA, 19 nt, Artificial Sequence
  Description of Artificial Sequence: Synthetic oligonucleotide
ugaaaccuucucuaggagu

SEQ ID NO: 3241688 - RNA, 19 nt, Artificial Sequence
  Description of Artificial Sequence: Synthetic oligonucleotide
agcuuaauaaugauuauau

SEQ ID NO: 3241689 - RNA, 19 nt, Artificial Sequence
  Description of Artificial Sequence: Synthetic oligonucleotide
cuugcaguaaaacgccccg

SEQ ID NO: 3241690 - RNA, 19 nt, Artificial Sequence
  Description of Artificial Sequence: Synthetic oligonucleotide
cugaccagaaagaauguuc

SEQ ID NO: 3241691 - RNA, 19 nt, Artificial Sequence
  Description of Artificial Sequence: Synthetic oligonucleotide
uaaaacgccccguggcugg

SEQ ID NO: 3241692 - RNA, 19 nt, Artificial Sequence
  Description of Artificial Sequence: Synthetic oligonucleotide
aaauccuuagcugggauua

SEQ ID NO: 3241693 - RNA, 19 nt, Artificial Sequence
  Description of Artificial Sequence: Synthetic oligonucleotide
gguagaauggcauauucuc

SEQ ID NO: 3241694 - RNA, 19 nt, Artificial Sequence
  Description of Artificial Sequence: Synthetic oligonucleotide
aguucugaguuagauguuc

SEQ ID NO: 3241695 - RNA, 19 nt, Artificial Sequence
  Description of Artificial Sequence: Synthetic oligonucleotide
aagguucccacacuccugu

SEQ ID NO: 3241696 - RNA, 19 nt, Artificial Sequence
  Description of Artificial Sequence: Synthetic oligonucleotide
aguuaccacagcuauucca

SEQ ID NO: 3241697 - RNA, 19 nt, Artificial Sequence
  Description of Artificial Sequence: Synthetic oligonucleotide
uuagaauguggccuccagu

SEQ ID NO: 3241698 - RNA, 19 nt, Artificial Sequence
  Description of Artificial Sequence: Synthetic oligonucleotide
ugguagaauggcauauucu

SEQ ID NO: 3241699 - RNA, 19 nt, Artificial Sequence
  Description of Artificial Sequence: Synthetic oligonucleotide
gcucguuccuacuugaggg

SEQ ID NO: 3241700 - RNA, 19 nt, Artificial Sequence
  Description of Artificial Sequence: Synthetic oligonucleotide
cucuccugaaaacacuuag

SEQ ID NO: 3241701 - RNA, 19 nt, Artificial Sequence
  Description of Artificial Sequence: Synthetic oligonucleotide
acauguuggaaguuucacu

SEQ ID NO: 3241702 - RNA, 19 nt, Artificial Sequence
  Description of Artificial Sequence: Synthetic oligonucleotide
cucugguauucacugagcc

SEQ ID NO: 3241703 - RNA, 19 nt, Artificial Sequence
  Description of Artificial Sequence: Synthetic oligonucleotide
guggcuacgugucuucugg

SEQ ID NO: 3241704 - RNA, 19 nt, Artificial Sequence
  Description of Artificial Sequence: Synthetic oligonucleotide
auuuaagcaagcugauuau

SEQ ID NO: 3241705 - RNA, 19 nt, Artificial Sequence
  Description of Artificial Sequence: Synthetic oligonucleotide
uugcaaauggauuguucug

SEQ ID NO: 3241706 - RNA, 19 nt, Artificial Sequence
  Description of Artificial Sequence: Synthetic oligonucleotide
ucaacuaaagagguaggaa

SEQ ID NO: 3241707 - RNA, 19 nt, Artificial Sequence
  Description of Artificial Sequence: Synthetic oligonucleotide
ugucuagaagaaucugccc

SEQ ID NO: 3241708 - RNA, 19 nt, Artificial Sequence
  Description of Artificial Sequence: Synthetic oligonucleotide
cuaagacacuguuaggcuc

SEQ ID NO: 3241709 - RNA, 19 nt, Artificial Sequence
  Description of Artificial Sequence: Synthetic oligonucleotide
uucucuaaagugucaggac

SEQ ID NO: 3241710 - RNA, 19 nt, Artificial Sequence
  Description of Artificial Sequence: Synthetic oligonucleotide
gaauggcauauucucugag

SEQ ID NO: 3241711 - RNA, 19 nt, Artificial Sequence
  Description of Artificial Sequence: Synthetic oligonucleotide
acuagaauccccacucuuc

SEQ ID NO: 3241712 - RNA, 19 nt, Artificial Sequence
  Description of Artificial Sequence: Synthetic oligonucleotide
agacucuucccaauucugc

SEQ ID NO: 3241713 - RNA, 19 nt, Artificial Sequence
  Description of Artificial Sequence: Synthetic oligonucleotide
uucaucugcggacucugug

SEQ ID NO: 3241714 - RNA, 19 nt, Artificial Sequence
  Description of Artificial Sequence: Synthetic oligonucleotide
uugcauaaaguccucuuuu

SEQ ID NO: 3241715 - RNA, 19 nt, Artificial Sequence
  Description of Artificial Sequence: Synthetic oligonucleotide
ucgcgagugguucuaagac

SEQ ID NO: 3241716 - RNA, 19 nt, Artificial Sequence
  Description of Artificial Sequence: Synthetic oligonucleotide
auuugccuugaauuacaag

SEQ ID NO: 3241717 - RNA, 19 nt, Artificial Sequence
  Description of Artificial Sequence: Synthetic oligonucleotide
uuuacuuuuacucacaggu

SEQ ID NO: 3241718 - RNA, 19 nt, Artificial Sequence
  Description of Artificial Sequence: Synthetic oligonucleotide
aaacacuuuacuuuuacuc

SEQ ID NO: 3241719 - RNA, 19 nt, Artificial Sequence
  Description of Artificial Sequence: Synthetic oligonucleotide
aguugauugaugcacaggc

SEQ ID NO: 3241720 - RNA, 19 nt, Artificial Sequence
  Description of Artificial Sequence: Synthetic oligonucleotide
uaaccuauaaaacagggga

SEQ ID NO: 3241721 - RNA, 19 nt, Artificial Sequence
  Description of Artificial Sequence: Synthetic oligonucleotide
uuuaaccuauaaaacaggg

SEQ ID NO: 3241722 - RNA, 19 nt, Artificial Sequence
  Description of Artificial Sequence: Synthetic oligonucleotide
gaugauuuaagcuucagca

SEQ ID NO: 3241723 - RNA, 19 nt, Artificial Sequence
  Description of Artificial Sequence: Synthetic oligonucleotide
uuuacaaguugauugaugc

SEQ ID NO: 3241724 - RNA, 19 nt, Artificial Sequence
  Description of Artificial Sequence: Synthetic oligonucleotide
uuuaagaugauuuaagcuu

SEQ ID NO: 3241725 - RNA, 19 nt, Artificial Sequence
  Description of Artificial Sequence: Synthetic oligonucleotide
agaaacuuagcauacaacu

SEQ ID NO: 3241726 - RNA, 19 nt, Artificial Sequence
  Description of Artificial Sequence: Synthetic oligonucleotide
agcauuuuaaccuauaaaa

SEQ ID NO: 3241727 - RNA, 19 nt, Artificial Sequence
  Description of Artificial Sequence: Synthetic oligonucleotide
aaagcaagcugcuuaauca

SEQ ID NO: 3241728 - RNA, 19 nt, Artificial Sequence
  Description of Artificial Sequence: Synthetic oligonucleotide
uaaaacaggggaaagcaag

SEQ ID NO: 3241729 - RNA, 19 nt, Artificial Sequence
  Description of Artificial Sequence: Synthetic oligonucleotide
cauaagauauccaggaggg

SEQ ID NO: 3241730 - RNA, 19 nt, Artificial Sequence
  Description of Artificial Sequence: Synthetic oligonucleotide
uuuaauggaagcagcacag

SEQ ID NO: 3241731 - RNA, 19 nt, Artificial Sequence
  Description of Artificial Sequence: Synthetic oligonucleotide
uuagcauacaacuuuuaag

SEQ ID NO: 3241732 - RNA, 19 nt, Artificial Sequence
  Description of Artificial Sequence: Synthetic oligonucleotide
uagcauacaacuuuuaaga

SEQ ID NO: 3241733 - RNA, 19 nt, Artificial Sequence
  Description of Artificial Sequence: Synthetic oligonucleotide
uuuuaaccuauaaaacagg

SEQ ID NO: 3241734 - RNA, 19 nt, Artificial Sequence
  Description of Artificial Sequence: Synthetic oligonucleotide
uuuuaagaugauuuaagcu

SEQ ID NO: 3241735 - RNA, 19 nt, Artificial Sequence
  Description of Artificial Sequence: Synthetic oligonucleotide
uuaaccuauaaaacagggg

SEQ ID NO: 3241736 - RNA, 19 nt, Artificial Sequence
  Description of Artificial Sequence: Synthetic oligonucleotide
aacacuuuacuuuuacuca

SEQ ID NO: 3241737 - RNA, 19 nt, Artificial Sequence
  Description of Artificial Sequence: Synthetic oligonucleotide
uacaacauccuuuacaagu

SEQ ID NO: 3241738 - RNA, 19 nt, Artificial Sequence
  Description of Artificial Sequence: Synthetic oligonucleotide
agcacauacacacacgcac

SEQ ID NO: 3241739 - RNA, 19 nt, Artificial Sequence
  Description of Artificial Sequence: Synthetic oligonucleotide
aagcugcuuaaucaggagc

SEQ ID NO: 3241740 - RNA, 19 nt, Artificial Sequence
  Description of Artificial Sequence: Synthetic oligonucleotide
aagcuucagcauuuuaacc

SEQ ID NO: 3241741 - RNA, 19 nt, Artificial Sequence
  Description of Artificial Sequence: Synthetic oligonucleotide
cuuuuaagaugauuuaagc

SEQ ID NO: 3241742 - RNA, 19 nt, Artificial Sequence
  Description of Artificial Sequence: Synthetic oligonucleotide
auccuuuacaaguugauug

SEQ ID NO: 3241743 - RNA, 19 nt, Artificial Sequence
  Description of Artificial Sequence: Synthetic oligonucleotide
agaugauuuaagcuucagc

SEQ ID NO: 3241744 - RNA, 19 nt, Artificial Sequence
  Description of Artificial Sequence: Synthetic oligonucleotide
acagcacauacacacacgc

SEQ ID NO: 3241745 - RNA, 19 nt, Artificial Sequence
  Description of Artificial Sequence: Synthetic oligonucleotide
cauacaacuuuuaagauga

SEQ ID NO: 3241746 - RNA, 19 nt, Artificial Sequence
  Description of Artificial Sequence: Synthetic oligonucleotide
uauaaaacaggggaaagca

SEQ ID NO: 3241747 - RNA, 19 nt, Artificial Sequence
  Description of Artificial Sequence: Synthetic oligonucleotide
auuuuaaccuauaaaacag

SEQ ID NO: 3241748 - RNA, 19 nt, Artificial Sequence
  Description of Artificial Sequence: Synthetic oligonucleotide
agcagcacagcacauacac

SEQ ID NO: 3241749 - RNA, 19 nt, Artificial Sequence
  Description of Artificial Sequence: Synthetic oligonucleotide
ucauauuuaauggaagcag

SEQ ID NO: 3241750 - RNA, 19 nt, Artificial Sequence
  Description of Artificial Sequence: Synthetic oligonucleotide
auuacaacauccuuuacaa

SEQ ID NO: 3241751 - RNA, 19 nt, Artificial Sequence
  Description of Artificial Sequence: Synthetic oligonucleotide
uuaagcuucagcauuuuaa

SEQ ID NO: 3241752 - RNA, 19 nt, Artificial Sequence
  Description of Artificial Sequence: Synthetic oligonucleotide
uuggccucauauuuaaugg

SEQ ID NO: 3241753 - RNA, 19 nt, Artificial Sequence
  Description of Artificial Sequence: Synthetic oligonucleotide
aagucaaacacuuuacuuu

SEQ ID NO: 3241754 - RNA, 19 nt, Artificial Sequence
  Description of Artificial Sequence: Synthetic oligonucleotide
gauuccaugagauuacaac

SEQ ID NO: 3241755 - RNA, 19 nt, Artificial Sequence
  Description of Artificial Sequence: Synthetic oligonucleotide
uuaggaaaggccuuuuggc

SEQ ID NO: 3241756 - RNA, 19 nt, Artificial Sequence
  Description of Artificial Sequence: Synthetic oligonucleotide
uuaagaugauuuaagcuuc

SEQ ID NO: 3241757 - RNA, 19 nt, Artificial Sequence
  Description of Artificial Sequence: Synthetic oligonucleotide
acaggcauaagauauccag

SEQ ID NO: 3241758 - RNA, 19 nt, Artificial Sequence
  Description of Artificial Sequence: Synthetic oligonucleotide
cauauuuaauggaagcagc

SEQ ID NO: 3241759 - RNA, 19 nt, Artificial Sequence
  Description of Artificial Sequence: Synthetic oligonucleotide
uacuuuuacucacaggucu

SEQ ID NO: 3241760 - RNA, 19 nt, Artificial Sequence
  Description of Artificial Sequence: Synthetic oligonucleotide
aaaacaggggaaagcaagc

SEQ ID NO: 3241761 - RNA, 19 nt, Artificial Sequence
  Description of Artificial Sequence: Synthetic oligonucleotide
aaacuuagcauacaacuuu

SEQ ID NO: 3241762 - RNA, 19 nt, Artificial Sequence
  Description of Artificial Sequence: Synthetic oligonucleotide
uuuggccucauauuuaaug

SEQ ID NO: 3241763 - RNA, 19 nt, Artificial Sequence
  Description of Artificial Sequence: Synthetic oligonucleotide
ucuuaugauuccaugagau

SEQ ID NO: 3241764 - RNA, 19 nt, Artificial Sequence
  Description of Artificial Sequence: Synthetic oligonucleotide
cauuuuaaccuauaaaaca

SEQ ID NO: 3241765 - RNA, 19 nt, Artificial Sequence
  Description of Artificial Sequence: Synthetic oligonucleotide
auuuaauggaagcagcaca

SEQ ID NO: 3241766 - RNA, 19 nt, Artificial Sequence
  Description of Artificial Sequence: Synthetic oligonucleotide
auuccaugagauuacaaca

SEQ ID NO: 3241767 - RNA, 19 nt, Artificial Sequence
  Description of Artificial Sequence: Synthetic oligonucleotide
gauuacaacauccuuuaca

SEQ ID NO: 3241768 - RNA, 19 nt, Artificial Sequence
  Description of Artificial Sequence: Synthetic oligonucleotide
guuaggaaaggccuuuugg

SEQ ID NO: 3241769 - RNA, 19 nt, Artificial Sequence
  Description of Artificial Sequence: Synthetic oligonucleotide
acacuuuacuuuuacucac

SEQ ID NO: 3241770 - RNA, 19 nt, Artificial Sequence
  Description of Artificial Sequence: Synthetic oligonucleotide
aaucaggagcuucuuauga

SEQ ID NO: 3241771 - RNA, 19 nt, Artificial Sequence
  Description of Artificial Sequence: Synthetic oligonucleotide
uuaaucaggagcuucuuau

SEQ ID NO: 3241772 - RNA, 19 nt, Artificial Sequence
  Description of Artificial Sequence: Synthetic oligonucleotide
aauggaagcagcacagcac

SEQ ID NO: 3241773 - RNA, 19 nt, Artificial Sequence
  Description of Artificial Sequence: Synthetic oligonucleotide
ugagauuacaacauccuuu

SEQ ID NO: 3241774 - RNA, 19 nt, Artificial Sequence
  Description of Artificial Sequence: Synthetic oligonucleotide
agcuucagcauuuuaaccu

SEQ ID NO: 3241775 - RNA, 19 nt, Artificial Sequence
  Description of Artificial Sequence: Synthetic oligonucleotide
uuaugauuccaugagauua

SEQ ID NO: 3241776 - RNA, 19 nt, Artificial Sequence
  Description of Artificial Sequence: Synthetic oligonucleotide
uaagauauccaggagggga

SEQ ID NO: 3241777 - RNA, 19 nt, Artificial Sequence
  Description of Artificial Sequence: Synthetic oligonucleotide
aagcaagcugcuuaaucag

SEQ ID NO: 3241778 - RNA, 19 nt, Artificial Sequence
  Description of Artificial Sequence: Synthetic oligonucleotide
uaauggaagcagcacagca

SEQ ID NO: 3241779 - RNA, 19 nt, Artificial Sequence
  Description of Artificial Sequence: Synthetic oligonucleotide
uaagcuucagcauuuuaac

SEQ ID NO: 3241780 - RNA, 19 nt, Artificial Sequence
  Description of Artificial Sequence: Synthetic oligonucleotide
cuucuuaugauuccaugag

SEQ ID NO: 3241781 - RNA, 19 nt, Artificial Sequence
  Description of Artificial Sequence: Synthetic oligonucleotide
uacaaguugauugaugcac

SEQ ID NO: 3241782 - RNA, 19 nt, Artificial Sequence
  Description of Artificial Sequence: Synthetic oligonucleotide
ugauuuaagcuucagcauu

SEQ ID NO: 3241783 - RNA, 19 nt, Artificial Sequence
  Description of Artificial Sequence: Synthetic oligonucleotide
uaugauuccaugagauuac

SEQ ID NO: 3241784 - RNA, 19 nt, Artificial Sequence
  Description of Artificial Sequence: Synthetic oligonucleotide
gcauaagauauccaggagg

SEQ ID NO: 3241785 - RNA, 19 nt, Artificial Sequence
  Description of Artificial Sequence: Synthetic oligonucleotide
ucaaacacuuuacuuuuac

SEQ ID NO: 3241786 - RNA, 19 nt, Artificial Sequence
  Description of Artificial Sequence: Synthetic oligonucleotide
acaggggaaagcaagcugc

SEQ ID NO: 3241787 - RNA, 19 nt, Artificial Sequence
  Description of Artificial Sequence: Synthetic oligonucleotide
uugauugaugcacaggcau

SEQ ID NO: 3241788 - RNA, 19 nt, Artificial Sequence
  Description of Artificial Sequence: Synthetic oligonucleotide
acuuuuaagaugauuuaag

SEQ ID NO: 3241789 - RNA, 19 nt, Artificial Sequence
  Description of Artificial Sequence: Synthetic oligonucleotide
uaggaaaggccuuuuggcc

SEQ ID NO: 3241790 - RNA, 19 nt, Artificial Sequence
  Description of Artificial Sequence: Synthetic oligonucleotide
acaacuuuuaagaugauuu

SEQ ID NO: 3241791 - RNA, 19 nt, Artificial Sequence
  Description of Artificial Sequence: Synthetic oligonucleotide
ucuugccagaaacuuagca

SEQ ID NO: 3241792 - RNA, 19 nt, Artificial Sequence
  Description of Artificial Sequence: Synthetic oligonucleotide
ugaugcacaggcauaagau

SEQ ID NO: 3241793 - RNA, 19 nt, Artificial Sequence
  Description of Artificial Sequence: Synthetic oligonucleotide
aacaggggaaagcaagcug

SEQ ID NO: 3241794 - RNA, 19 nt, Artificial Sequence
  Description of Artificial Sequence: Synthetic oligonucleotide
uuacucacaggucuugcca

SEQ ID NO: 3241795 - RNA, 19 nt, Artificial Sequence
  Description of Artificial Sequence: Synthetic oligonucleotide
uccuuuacaaguugauuga

SEQ ID NO: 3241796 - RNA, 19 nt, Artificial Sequence
  Description of Artificial Sequence: Synthetic oligonucleotide
uucuuaugauuccaugaga

SEQ ID NO: 3241797 - RNA, 19 nt, Artificial Sequence
  Description of Artificial Sequence: Synthetic oligonucleotide
cagcacagcacauacacac

SEQ ID NO: 3241798 - RNA, 19 nt, Artificial Sequence
  Description of Artificial Sequence: Synthetic oligonucleotide
aaccucaucagguuaggaa

SEQ ID NO: 3241799 - RNA, 19 nt, Artificial Sequence
  Description of Artificial Sequence: Synthetic oligonucleotide
aggcauaagauauccagga

SEQ ID NO: 3241800 - RNA, 19 nt, Artificial Sequence
  Description of Artificial Sequence: Synthetic oligonucleotide
gaggggaucaucgggaggg

SEQ ID NO: 3241801 - RNA, 19 nt, Artificial Sequence
  Description of Artificial Sequence: Synthetic oligonucleotide
uugaugcacaggcauaaga

SEQ ID NO: 3241802 - RNA, 19 nt, Artificial Sequence
  Description of Artificial Sequence: Synthetic oligonucleotide
aacuuuuaagaugauuuaa

SEQ ID NO: 3241803 - RNA, 19 nt, Artificial Sequence
  Description of Artificial Sequence: Synthetic oligonucleotide
ucgggagggaaccucauca

SEQ ID NO: 3241804 - RNA, 19 nt, Artificial Sequence
  Description of Artificial Sequence: Synthetic oligonucleotide
gaagcagcacagcacauac

SEQ ID NO: 3241805 - RNA, 19 nt, Artificial Sequence
  Description of Artificial Sequence: Synthetic oligonucleotide
acuuuacuuuuacucacag

SEQ ID NO: 3241806 - RNA, 19 nt, Artificial Sequence
  Description of Artificial Sequence: Synthetic oligonucleotide
cuauaaaacaggggaaagc

SEQ ID NO: 3241807 - RNA, 19 nt, Artificial Sequence
  Description of Artificial Sequence: Synthetic oligonucleotide
caucagguuaggaaaggcc

SEQ ID NO: 3241808 - RNA, 19 nt, Artificial Sequence
  Description of Artificial Sequence: Synthetic oligonucleotide
cuuuacuuuuacucacagg

SEQ ID NO: 3241809 - RNA, 19 nt, Artificial Sequence
  Description of Artificial Sequence: Synthetic oligonucleotide
uuuacucacaggucuugcc

SEQ ID NO: 3241810 - RNA, 19 nt, Artificial Sequence
  Description of Artificial Sequence: Synthetic oligonucleotide
aggagcuucuuaugauucc

SEQ ID NO: 3241811 - RNA, 19 nt, Artificial Sequence
  Description of Artificial Sequence: Synthetic oligonucleotide
ucagcauuuuaaccuauaa

SEQ ID NO: 3241812 - RNA, 19 nt, Artificial Sequence
  Description of Artificial Sequence: Synthetic oligonucleotide
caggcauaagauauccagg

SEQ ID NO: 3241813 - RNA, 19 nt, Artificial Sequence
  Description of Artificial Sequence: Synthetic oligonucleotide
gaaagcaagcugcuuaauc

SEQ ID NO: 3241814 - RNA, 19 nt, Artificial Sequence
  Description of Artificial Sequence: Synthetic oligonucleotide
cuuuacaaguugauugaug

SEQ ID NO: 3241815 - RNA, 19 nt, Artificial Sequence
  Description of Artificial Sequence: Synthetic oligonucleotide
uuccaugagauuacaacau

SEQ ID NO: 3241816 - RNA, 19 nt, Artificial Sequence
  Description of Artificial Sequence: Synthetic oligonucleotide
uugccagaaacuuagcaua

SEQ ID NO: 3241817 - RNA, 19 nt, Artificial Sequence
  Description of Artificial Sequence: Synthetic oligonucleotide
aaaauauuuaaucaaaacg

SEQ ID NO: 3241818 - RNA, 19 nt, Artificial Sequence
  Description of Artificial Sequence: Synthetic oligonucleotide
aaauuauacuuuuauaccc

SEQ ID NO: 3241819 - RNA, 19 nt, Artificial Sequence
  Description of Artificial Sequence: Synthetic oligonucleotide
aaauagaaaagaaacaugc

SEQ ID NO: 3241820 - RNA, 19 nt, Artificial Sequence
  Description of Artificial Sequence: Synthetic oligonucleotide
aauaaaaugaaauugcuuu

SEQ ID NO: 3241821 - RNA, 19 nt, Artificial Sequence
  Description of Artificial Sequence: Synthetic oligonucleotide
aaugaaauugcuuuugaag

SEQ ID NO: 3241822 - RNA, 19 nt, Artificial Sequence
  Description of Artificial Sequence: Synthetic oligonucleotide
ucaaauuauacuuuuauac

SEQ ID NO: 3241823 - RNA, 19 nt, Artificial Sequence
  Description of Artificial Sequence: Synthetic oligonucleotide
aaucaaaacguuuagaaau

SEQ ID NO: 3241824 - RNA, 19 nt, Artificial Sequence
  Description of Artificial Sequence: Synthetic oligonucleotide
uuuucagacuacuagaggg

SEQ ID NO: 3241825 - RNA, 19 nt, Artificial Sequence
  Description of Artificial Sequence: Synthetic oligonucleotide
aaugagaaacaguuuagac

SEQ ID NO: 3241826 - RNA, 19 nt, Artificial Sequence
  Description of Artificial Sequence: Synthetic oligonucleotide
aaauauuuaaucaaaacgu

SEQ ID NO: 3241827 - RNA, 19 nt, Artificial Sequence
  Description of Artificial Sequence: Synthetic oligonucleotide
auuauagcaaaauaaaaug

SEQ ID NO: 3241828 - RNA, 19 nt, Artificial Sequence
  Description of Artificial Sequence: Synthetic oligonucleotide
ugagaaacaguuuagacug

SEQ ID NO: 3241829 - RNA, 19 nt, Artificial Sequence
  Description of Artificial Sequence: Synthetic oligonucleotide
aaucaaaugaaaaugucac

SEQ ID NO: 3241830 - RNA, 19 nt, Artificial Sequence
  Description of Artificial Sequence: Synthetic oligonucleotide
aaaagaaacaugcuuagga

SEQ ID NO: 3241831 - RNA, 19 nt, Artificial Sequence
  Description of Artificial Sequence: Synthetic oligonucleotide
uuaacaaagaaauauuucu

SEQ ID NO: 3241832 - RNA, 19 nt, Artificial Sequence
  Description of Artificial Sequence: Synthetic oligonucleotide
agaaauauuucuuguaugg

SEQ ID NO: 3241833 - RNA, 19 nt, Artificial Sequence
  Description of Artificial Sequence: Synthetic oligonucleotide
caaaauaaaaugaaauugc

SEQ ID NO: 3241834 - RNA, 19 nt, Artificial Sequence
  Description of Artificial Sequence: Synthetic oligonucleotide
acauugacaguguauaucc

SEQ ID NO: 3241835 - RNA, 19 nt, Artificial Sequence
  Description of Artificial Sequence: Synthetic oligonucleotide
uuagaaauacagaagauaa

SEQ ID NO: 3241836 - RNA, 19 nt, Artificial Sequence
  Description of Artificial Sequence: Synthetic oligonucleotide
aaauacagaagauaaauua

SEQ ID NO: 3241837 - RNA, 19 nt, Artificial Sequence
  Description of Artificial Sequence: Synthetic oligonucleotide
aaaacguuuagaaauacag

SEQ ID NO: 3241838 - RNA, 19 nt, Artificial Sequence
  Description of Artificial Sequence: Synthetic oligonucleotide
ugaagugagagucugaaca

SEQ ID NO: 3241839 - RNA, 19 nt, Artificial Sequence
  Description of Artificial Sequence: Synthetic oligonucleotide
caaacuaucaaucaaauga

SEQ ID NO: 3241840 - RNA, 19 nt, Artificial Sequence
  Description of Artificial Sequence: Synthetic oligonucleotide
cuuaggaucuuauauaacc

SEQ ID NO: 3241841 - RNA, 19 nt, Artificial Sequence
  Description of Artificial Sequence: Synthetic oligonucleotide
aacaaagaaauauuucuug

SEQ ID NO: 3241842 - RNA, 19 nt, Artificial Sequence
  Description of Artificial Sequence: Synthetic oligonucleotide
uaaauuauagcaaaauaaa

SEQ ID NO: 3241843 - RNA, 19 nt, Artificial Sequence
  Description of Artificial Sequence: Synthetic oligonucleotide
aacguuuagaaauacagaa

SEQ ID NO: 3241844 - RNA, 19 nt, Artificial Sequence
  Description of Artificial Sequence: Synthetic oligonucleotide
aaaagguuaacaaagaaau

SEQ ID NO: 3241845 - RNA, 19 nt, Artificial Sequence
  Description of Artificial Sequence: Synthetic oligonucleotide
uauauaaccaguucaguug

SEQ ID NO: 3241846 - RNA, 19 nt, Artificial Sequence
  Description of Artificial Sequence: Synthetic oligonucleotide
ucuuauauaaccaguucag

SEQ ID NO: 3241847 - RNA, 19 nt, Artificial Sequence
  Description of Artificial Sequence: Synthetic oligonucleotide
uuauagcaaaauaaaauga

SEQ ID NO: 3241848 - RNA, 19 nt, Artificial Sequence
  Description of Artificial Sequence: Synthetic oligonucleotide
uuaaucaaaacguuuagaa

SEQ ID NO: 3241849 - RNA, 19 nt, Artificial Sequence
  Description of Artificial Sequence: Synthetic oligonucleotide
aaaagaugagucuacaaaa

SEQ ID NO: 3241850 - RNA, 19 nt, Artificial Sequence
  Description of Artificial Sequence: Synthetic oligonucleotide
aauaccuccagaaugaaug

SEQ ID NO: 3241851 - RNA, 19 nt, Artificial Sequence
  Description of Artificial Sequence: Synthetic oligonucleotide
aagaaacaugcuuaggauc

SEQ ID NO: 3241852 - RNA, 19 nt, Artificial Sequence
  Description of Artificial Sequence: Synthetic oligonucleotide
caaauuauacuuuuauacc

SEQ ID NO: 3241853 - RNA, 19 nt, Artificial Sequence
  Description of Artificial Sequence: Synthetic oligonucleotide
aaaauuugcagaaaaugag

SEQ ID NO: 3241854 - RNA, 19 nt, Artificial Sequence
  Description of Artificial Sequence: Synthetic oligonucleotide
aaagaaauauuucuuguau

SEQ ID NO: 3241855 - RNA, 19 nt, Artificial Sequence
  Description of Artificial Sequence: Synthetic oligonucleotide
uguauauccuuauagaaaa

SEQ ID NO: 3241856 - RNA, 19 nt, Artificial Sequence
  Description of Artificial Sequence: Synthetic oligonucleotide
acagaagauaaauuauagc

SEQ ID NO: 3241857 - RNA, 19 nt, Artificial Sequence
  Description of Artificial Sequence: Synthetic oligonucleotide
aauuauagcaaaauaaaau

SEQ ID NO: 3241858 - RNA, 19 nt, Artificial Sequence
  Description of Artificial Sequence: Synthetic oligonucleotide
uaaaauauuuaaucaaaac

SEQ ID NO: 3241859 - RNA, 19 nt, Artificial Sequence
  Description of Artificial Sequence: Synthetic oligonucleotide
uacagaagauaaauuauag

SEQ ID NO: 3241860 - RNA, 19 nt, Artificial Sequence
  Description of Artificial Sequence: Synthetic oligonucleotide
agagucugaacauugacag

SEQ ID NO: 3241861 - RNA, 19 nt, Artificial Sequence
  Description of Artificial Sequence: Synthetic oligonucleotide
uauguaaagcaccaaaagu

SEQ ID NO: 3241862 - RNA, 19 nt, Artificial Sequence
  Description of Artificial Sequence: Synthetic oligonucleotide
uuugcagaaaaugagaaac

SEQ ID NO: 3241863 - RNA, 19 nt, Artificial Sequence
  Description of Artificial Sequence: Synthetic oligonucleotide
uauagcaaaauaaaaugaa

SEQ ID NO: 3241864 - RNA, 19 nt, Artificial Sequence
  Description of Artificial Sequence: Synthetic oligonucleotide
ugagucuacaaaauuaaga

SEQ ID NO: 3241865 - RNA, 19 nt, Artificial Sequence
  Description of Artificial Sequence: Synthetic oligonucleotide
uauacuuuuauacccaguc

SEQ ID NO: 3241866 - RNA, 19 nt, Artificial Sequence
  Description of Artificial Sequence: Synthetic oligonucleotide
aaaugaaaaugucacuuca

SEQ ID NO: 3241867 - RNA, 19 nt, Artificial Sequence
  Description of Artificial Sequence: Synthetic oligonucleotide
auagaaaagguuaacaaag

SEQ ID NO: 3241868 - RNA, 19 nt, Artificial Sequence
  Description of Artificial Sequence: Synthetic oligonucleotide
uugguaaaauauuuaauca

SEQ ID NO: 3241869 - RNA, 19 nt, Artificial Sequence
  Description of Artificial Sequence: Synthetic oligonucleotide
cagaagauaaauuauagca

SEQ ID NO: 3241870 - RNA, 19 nt, Artificial Sequence
  Description of Artificial Sequence: Synthetic oligonucleotide
uaaaagaugagucuacaaa

SEQ ID NO: 3241871 - RNA, 19 nt, Artificial Sequence
  Description of Artificial Sequence: Synthetic oligonucleotide
uauauccuuauagaaaagg

SEQ ID NO: 3241872 - RNA, 19 nt, Artificial Sequence
  Description of Artificial Sequence: Synthetic oligonucleotide
guugguaaaauauuuaauc

SEQ ID NO: 3241873 - RNA, 19 nt, Artificial Sequence
  Description of Artificial Sequence: Synthetic oligonucleotide
augaaauugcuuuugaagu

SEQ ID NO: 3241874 - RNA, 19 nt, Artificial Sequence
  Description of Artificial Sequence: Synthetic oligonucleotide
uauuuaaucaaaacguuua

SEQ ID NO: 3241875 - RNA, 19 nt, Artificial Sequence
  Description of Artificial Sequence: Synthetic oligonucleotide
aagaaauauuucuuguaug

SEQ ID NO: 3241876 - RNA, 19 nt, Artificial Sequence
  Description of Artificial Sequence: Synthetic oligonucleotide
uaucaaucaaaugaaaaug

SEQ ID NO: 3241877 - RNA, 19 nt, Artificial Sequence
  Description of Artificial Sequence: Synthetic oligonucleotide
uguaaagcaccaaaaguug

SEQ ID NO: 3241878 - RNA, 19 nt, Artificial Sequence
  Description of Artificial Sequence: Synthetic oligonucleotide
aagguuaacaaagaaauau

SEQ ID NO: 3241879 - RNA, 19 nt, Artificial Sequence
  Description of Artificial Sequence: Synthetic oligonucleotide
uuauagaaaagguuaacaa

SEQ ID NO: 3241880 - RNA, 19 nt, Artificial Sequence
  Description of Artificial Sequence: Synthetic oligonucleotide
auauaaccaguucaguugg

SEQ ID NO: 3241881 - RNA, 19 nt, Artificial Sequence
  Description of Artificial Sequence: Synthetic oligonucleotide
uuguccuuguaaaagauga

SEQ ID NO: 3241882 - RNA, 19 nt, Artificial Sequence
  Description of Artificial Sequence: Synthetic oligonucleotide
acaguguauauccuuauag

SEQ ID NO: 3241883 - RNA, 19 nt, Artificial Sequence
  Description of Artificial Sequence: Synthetic oligonucleotide
aaaaugucacuucacuaug

SEQ ID NO: 3241884 - RNA, 19 nt, Artificial Sequence
  Description of Artificial Sequence: Synthetic oligonucleotide
uauagaaaagguuaacaaa

SEQ ID NO: 3241885 - RNA, 19 nt, Artificial Sequence
  Description of Artificial Sequence: Synthetic oligonucleotide
auaaauuauagcaaaauaa

SEQ ID NO: 3241886 - RNA, 19 nt, Artificial Sequence
  Description of Artificial Sequence: Synthetic oligonucleotide
uagaaaagaaacaugcuua

SEQ ID NO: 3241887 - RNA, 19 nt, Artificial Sequence
  Description of Artificial Sequence: Synthetic oligonucleotide
uuucaaauuauacuuuuau

SEQ ID NO: 3241888 - RNA, 19 nt, Artificial Sequence
  Description of Artificial Sequence: Synthetic oligonucleotide
aaauauuucuuguauggua

SEQ ID NO: 3241889 - RNA, 19 nt, Artificial Sequence
  Description of Artificial Sequence: Synthetic oligonucleotide
gaaaaugagaaacaguuua

SEQ ID NO: 3241890 - RNA, 19 nt, Artificial Sequence
  Description of Artificial Sequence: Synthetic oligonucleotide
uagcaaaauaaaaugaaau

SEQ ID NO: 3241891 - RNA, 19 nt, Artificial Sequence
  Description of Artificial Sequence: Synthetic oligonucleotide
auugcuuuugaagugagag

SEQ ID NO: 3241892 - RNA, 19 nt, Artificial Sequence
  Description of Artificial Sequence: Synthetic oligonucleotide
aaagaaacaugcuuaggau

SEQ ID NO: 3241893 - RNA, 19 nt, Artificial Sequence
  Description of Artificial Sequence: Synthetic oligonucleotide
aaaauaaaaugaaauugcu

SEQ ID NO: 3241894 - RNA, 19 nt, Artificial Sequence
  Description of Artificial Sequence: Synthetic oligonucleotide
uuuauacccagucaaacua

SEQ ID NO: 3241895 - RNA, 19 nt, Artificial Sequence
  Description of Artificial Sequence: Synthetic oligonucleotide
aacauugacaguguauauc

SEQ ID NO: 3241896 - RNA, 19 nt, Artificial Sequence
  Description of Artificial Sequence: Synthetic oligonucleotide
augagaaacaguuuagacu

SEQ ID NO: 3241897 - RNA, 19 nt, Artificial Sequence
  Description of Artificial Sequence: Synthetic oligonucleotide
aaaaugaaauugcuuuuga

SEQ ID NO: 3241898 - RNA, 19 nt, Artificial Sequence
  Description of Artificial Sequence: Synthetic oligonucleotide
agaaaagaaacaugcuuag

SEQ ID NO: 3241899 - RNA, 19 nt, Artificial Sequence
  Description of Artificial Sequence: Synthetic oligonucleotide
uuccaauaccuccagaaug

SEQ ID NO: 3241900 - RNA, 19 nt, Artificial Sequence
  Description of Artificial Sequence: Synthetic oligonucleotide
aucuuauauaaccaguuca

SEQ ID NO: 3241901 - RNA, 19 nt, Artificial Sequence
  Description of Artificial Sequence: Synthetic oligonucleotide
aacaguuuagacuggaauu

SEQ ID NO: 3241902 - RNA, 19 nt, Artificial Sequence
  Description of Artificial Sequence: Synthetic oligonucleotide
uuaggaucuuauauaacca

SEQ ID NO: 3241903 - RNA, 19 nt, Artificial Sequence
  Description of Artificial Sequence: Synthetic oligonucleotide
auuuaaucaaaacguuuag

SEQ ID NO: 3241904 - RNA, 19 nt, Artificial Sequence
  Description of Artificial Sequence: Synthetic oligonucleotide
ugucacuucacuauguaaa

SEQ ID NO: 3241905 - RNA, 19 nt, Artificial Sequence
  Description of Artificial Sequence: Synthetic oligonucleotide
gagucuacaaaauuaagaa

SEQ ID NO: 3241906 - RNA, 19 nt, Artificial Sequence
  Description of Artificial Sequence: Synthetic oligonucleotide
gaagauaaauuauagcaaa

SEQ ID NO: 3241907 - RNA, 19 nt, Artificial Sequence
  Description of Artificial Sequence: Synthetic oligonucleotide
aaugaaaaugucacuucac

SEQ ID NO: 3241908 - RNA, 19 nt, Artificial Sequence
  Description of Artificial Sequence: Synthetic oligonucleotide
uacuuuuauacccagucaa

SEQ ID NO: 3241909 - RNA, 19 nt, Artificial Sequence
  Description of Artificial Sequence: Synthetic oligonucleotide
uucacuauguaaagcacca

SEQ ID NO: 3241910 - RNA, 19 nt, Artificial Sequence
  Description of Artificial Sequence: Synthetic oligonucleotide
aaacaguuuagacuggaau

SEQ ID NO: 3241911 - RNA, 19 nt, Artificial Sequence
  Description of Artificial Sequence: Synthetic oligonucleotide
auagaaaagaaacaugcuu

SEQ ID NO: 3241912 - RNA, 19 nt, Artificial Sequence
  Description of Artificial Sequence: Synthetic oligonucleotide
ugaaauugcuuuugaagug

SEQ ID NO: 3241913 - RNA, 19 nt, Artificial Sequence
  Description of Artificial Sequence: Synthetic oligonucleotide
aaaaugagaaacaguuuag

SEQ ID NO: 3241914 - RNA, 19 nt, Artificial Sequence
  Description of Artificial Sequence: Synthetic oligonucleotide
uuuuccaauaccuccagaa

SEQ ID NO: 3241915 - RNA, 19 nt, Artificial Sequence
  Description of Artificial Sequence: Synthetic oligonucleotide
gauaaauuauagcaaaaua

SEQ ID NO: 3241916 - RNA, 19 nt, Artificial Sequence
  Description of Artificial Sequence: Synthetic oligonucleotide
uuuuauacccagucaaacu

SEQ ID NO: 3241917 - RNA, 19 nt, Artificial Sequence
  Description of Artificial Sequence: Synthetic oligonucleotide
ugcuucuagauuuucaggg

SEQ ID NO: 3241918 - RNA, 19 nt, Artificial Sequence
  Description of Artificial Sequence: Synthetic oligonucleotide
aauguuggugugcagaaug

SEQ ID NO: 3241919 - RNA, 19 nt, Artificial Sequence
  Description of Artificial Sequence: Synthetic oligonucleotide
agcuguguccacuagggcc

SEQ ID NO: 3241920 - RNA, 19 nt, Artificial Sequence
  Description of Artificial Sequence: Synthetic oligonucleotide
auuccauggugccugauac

SEQ ID NO: 3241921 - RNA, 19 nt, Artificial Sequence
  Description of Artificial Sequence: Synthetic oligonucleotide
aauugacuugcaguggccc

SEQ ID NO: 3241922 - RNA, 19 nt, Artificial Sequence
  Description of Artificial Sequence: Synthetic oligonucleotide
ucugcuucuagauuuucag

SEQ ID NO: 3241923 - RNA, 19 nt, Artificial Sequence
  Description of Artificial Sequence: Synthetic oligonucleotide
ugcagaaugaguugguggc

SEQ ID NO: 3241924 - RNA, 19 nt, Artificial Sequence
  Description of Artificial Sequence: Synthetic oligonucleotide
uucagggcuagcaugaaga

SEQ ID NO: 3241925 - RNA, 19 nt, Artificial Sequence
  Description of Artificial Sequence: Synthetic oligonucleotide
cuuuccucaauccuugugc

SEQ ID NO: 3241926 - RNA, 19 nt, Artificial Sequence
  Description of Artificial Sequence: Synthetic oligonucleotide
uuaaauguuggugugcaga

SEQ ID NO: 3241927 - RNA, 19 nt, Artificial Sequence
  Description of Artificial Sequence: Synthetic oligonucleotide
gauuuucagggcuagcaug

SEQ ID NO: 3241928 - RNA, 19 nt, Artificial Sequence
  Description of Artificial Sequence: Synthetic oligonucleotide
auugacuugcaguggcccc

SEQ ID NO: 3241929 - RNA, 19 nt, Artificial Sequence
  Description of Artificial Sequence: Synthetic oligonucleotide
aaacauuccauggugccug

SEQ ID NO: 3241930 - RNA, 19 nt, Artificial Sequence
  Description of Artificial Sequence: Synthetic oligonucleotide
uccauggugccugauaccg

SEQ ID NO: 3241931 - RNA, 19 nt, Artificial Sequence
  Description of Artificial Sequence: Synthetic oligonucleotide
ugcaccuccgcucccaggg

SEQ ID NO: 3241932 - RNA, 19 nt, Artificial Sequence
  Description of Artificial Sequence: Synthetic oligonucleotide
augguuacuguuucggcag

SEQ ID NO: 3241933 - RNA, 19 nt, Artificial Sequence
  Description of Artificial Sequence: Synthetic oligonucleotide
aauccuugugccugcagcu

SEQ ID NO: 3241934 - RNA, 19 nt, Artificial Sequence
  Description of Artificial Sequence: Synthetic oligonucleotide
aagagcaguagucagcauu

SEQ ID NO: 3241935 - RNA, 19 nt, Artificial Sequence
  Description of Artificial Sequence: Synthetic oligonucleotide
ucagucguuccaaagcucu

SEQ ID NO: 3241936 - RNA, 19 nt, Artificial Sequence
  Description of Artificial Sequence: Synthetic oligonucleotide
caugaagagcaguagucag

SEQ ID NO: 3241937 - RNA, 19 nt, Artificial Sequence
  Description of Artificial Sequence: Synthetic oligonucleotide
agcuuugcaccuccgcucc

SEQ ID NO: 3241938 - RNA, 19 nt, Artificial Sequence
  Description of Artificial Sequence: Synthetic oligonucleotide
uagauuuucagggcuagca

SEQ ID NO: 3241939 - RNA, 19 nt, Artificial Sequence
  Description of Artificial Sequence: Synthetic oligonucleotide
uuuccucaauccuugugcc

SEQ ID NO: 3241940 - RNA, 19 nt, Artificial Sequence
  Description of Artificial Sequence: Synthetic oligonucleotide
aagcucugcuucuagauuu

SEQ ID NO: 3241941 - RNA, 19 nt, Artificial Sequence
  Description of Artificial Sequence: Synthetic oligonucleotide
uaaauguuggugugcagaa

SEQ ID NO: 3241942 - RNA, 19 nt, Artificial Sequence
  Description of Artificial Sequence: Synthetic oligonucleotide
ugaagagcaguagucagca

SEQ ID NO: 3241943 - RNA, 19 nt, Artificial Sequence
  Description of Artificial Sequence: Synthetic oligonucleotide
uuggugugcagaaugaguu

SEQ ID NO: 3241944 - RNA, 19 nt, Artificial Sequence
  Description of Artificial Sequence: Synthetic oligonucleotide
uggcaaacauuccauggug

SEQ ID NO: 3241945 - RNA, 19 nt, Artificial Sequence
  Description of Artificial Sequence: Synthetic oligonucleotide
gugcagaaugaguuggugg

SEQ ID NO: 3241946 - RNA, 19 nt, Artificial Sequence
  Description of Artificial Sequence: Synthetic oligonucleotide
ugaguugguggcccaauug

SEQ ID NO: 3241947 - RNA, 19 nt, Artificial Sequence
  Description of Artificial Sequence: Synthetic oligonucleotide
ugugccugcagcuuugcac

SEQ ID NO: 3241948 - RNA, 19 nt, Artificial Sequence
  Description of Artificial Sequence: Synthetic oligonucleotide
agggcuagcaugaagagca

SEQ ID NO: 3241949 - RNA, 19 nt, Artificial Sequence
  Description of Artificial Sequence: Synthetic oligonucleotide
uguuuaaauguuggugugc

SEQ ID NO: 3241950 - RNA, 19 nt, Artificial Sequence
  Description of Artificial Sequence: Synthetic oligonucleotide
uuuaaauguuggugugcag

SEQ ID NO: 3241951 - RNA, 19 nt, Artificial Sequence
  Description of Artificial Sequence: Synthetic oligonucleotide
agcaugaagagcaguaguc

SEQ ID NO: 3241952 - RNA, 19 nt, Artificial Sequence
  Description of Artificial Sequence: Synthetic oligonucleotide
augaagagcaguagucagc

SEQ ID NO: 3241953 - RNA, 19 nt, Artificial Sequence
  Description of Artificial Sequence: Synthetic oligonucleotide
ucuuuccucaauccuugug

SEQ ID NO: 3241954 - RNA, 19 nt, Artificial Sequence
  Description of Artificial Sequence: Synthetic oligonucleotide
caguagucagcauuucuag

SEQ ID NO: 3241955 - RNA, 19 nt, Artificial Sequence
  Description of Artificial Sequence: Synthetic oligonucleotide
cauggugccugauaccgcc

SEQ ID NO: 3241956 - RNA, 19 nt, Artificial Sequence
  Description of Artificial Sequence: Synthetic oligonucleotide
accucaugguuacuguuuc

SEQ ID NO: 3241957 - RNA, 19 nt, Artificial Sequence
  Description of Artificial Sequence: Synthetic oligonucleotide
agucguuccaaagcucugc

SEQ ID NO: 3241958 - RNA, 19 nt, Artificial Sequence
  Description of Artificial Sequence: Synthetic oligonucleotide
ucuagauuuucagggcuag

SEQ ID NO: 3241959 - RNA, 19 nt, Artificial Sequence
  Description of Artificial Sequence: Synthetic oligonucleotide
cucaugguuacuguuucgg

SEQ ID NO: 3241960 - RNA, 19 nt, Artificial Sequence
  Description of Artificial Sequence: Synthetic oligonucleotide
uucggcagcucucucuucc

SEQ ID NO: 3241961 - RNA, 19 nt, Artificial Sequence
  Description of Artificial Sequence: Synthetic oligonucleotide
uuucagggcuagcaugaag

SEQ ID NO: 3241962 - RNA, 19 nt, Artificial Sequence
  Description of Artificial Sequence: Synthetic oligonucleotide
cuuccucuuuccucaaucc

SEQ ID NO: 3241963 - RNA, 19 nt, Artificial Sequence
  Description of Artificial Sequence: Synthetic oligonucleotide
uuacuguuucggcagcucu

SEQ ID NO: 3241964 - RNA, 19 nt, Artificial Sequence
  Description of Artificial Sequence: Synthetic oligonucleotide
uagcaugaagagcaguagu

SEQ ID NO: 3241965 - RNA, 19 nt, Artificial Sequence
  Description of Artificial Sequence: Synthetic oligonucleotide
caauccuugugccugcagc

SEQ ID NO: 3241966 - RNA, 19 nt, Artificial Sequence
  Description of Artificial Sequence: Synthetic oligonucleotide
ugcaguggccccuugcacc

SEQ ID NO: 3241967 - RNA, 19 nt, Artificial Sequence
  Description of Artificial Sequence: Synthetic oligonucleotide
ucaugguuacuguuucggc

SEQ ID NO: 3241968 - RNA, 19 nt, Artificial Sequence
  Description of Artificial Sequence: Synthetic oligonucleotide
acuugcaguggccccuugc

SEQ ID NO: 3241969 - RNA, 19 nt, Artificial Sequence
  Description of Artificial Sequence: Synthetic oligonucleotide
acuagggccugacccagcg

SEQ ID NO: 3241970 - RNA, 19 nt, Artificial Sequence
  Description of Artificial Sequence: Synthetic oligonucleotide
aaagcucugcuucuagauu

SEQ ID NO: 3241971 - RNA, 19 nt, Artificial Sequence
  Description of Artificial Sequence: Synthetic oligonucleotide
cuguuuaaauguuggugug

SEQ ID NO: 3241972 - RNA, 19 nt, Artificial Sequence
  Description of Artificial Sequence: Synthetic oligonucleotide
cugcuucuagauuuucagg

SEQ ID NO: 3241973 - RNA, 19 nt, Artificial Sequence
  Description of Artificial Sequence: Synthetic oligonucleotide
uccaaagcucugcuucuag

SEQ ID NO: 3241974 - RNA, 19 nt, Artificial Sequence
  Description of Artificial Sequence: Synthetic oligonucleotide
guccacuagggccugaccc

SEQ ID NO: 3241975 - RNA, 19 nt, Artificial Sequence
  Description of Artificial Sequence: Synthetic oligonucleotide
uccucaauccuugugccug

SEQ ID NO: 3241976 - RNA, 19 nt, Artificial Sequence
  Description of Artificial Sequence: Synthetic oligonucleotide
ucagggcuagcaugaagag

SEQ ID NO: 3241977 - RNA, 19 nt, Artificial Sequence
  Description of Artificial Sequence: Synthetic oligonucleotide
ucuuccuuccucuuuccuc

SEQ ID NO: 3241978 - RNA, 19 nt, Artificial Sequence
  Description of Artificial Sequence: Synthetic oligonucleotide
uagucagcauuucuaguuc

SEQ ID NO: 3241979 - RNA, 19 nt, Artificial Sequence
  Description of Artificial Sequence: Synthetic oligonucleotide
acaggccuggcaaacauuc

SEQ ID NO: 3241980 - RNA, 19 nt, Artificial Sequence
  Description of Artificial Sequence: Synthetic oligonucleotide
guuuaaauguuggugugca

SEQ ID NO: 3241981 - RNA, 19 nt, Artificial Sequence
  Description of Artificial Sequence: Synthetic oligonucleotide
gaguugguggcccaauuga

SEQ ID NO: 3241982 - RNA, 19 nt, Artificial Sequence
  Description of Artificial Sequence: Synthetic oligonucleotide
uguuucggcagcucucucu

SEQ ID NO: 3241983 - RNA, 19 nt, Artificial Sequence
  Description of Artificial Sequence: Synthetic oligonucleotide
aguagucagcauuucuagu

SEQ ID NO: 3241984 - RNA, 19 nt, Artificial Sequence
  Description of Artificial Sequence: Synthetic oligonucleotide
gugccugcagcuuugcacc

SEQ ID NO: 3241985 - RNA, 19 nt, Artificial Sequence
  Description of Artificial Sequence: Synthetic oligonucleotide
auuuucagggcuagcauga

SEQ ID NO: 3241986 - RNA, 19 nt, Artificial Sequence
  Description of Artificial Sequence: Synthetic oligonucleotide
caugguuacuguuucggca

SEQ ID NO: 3241987 - RNA, 19 nt, Artificial Sequence
  Description of Artificial Sequence: Synthetic oligonucleotide
uuccucuuuccucaauccu

SEQ ID NO: 3241988 - RNA, 19 nt, Artificial Sequence
  Description of Artificial Sequence: Synthetic oligonucleotide
uccucuuuccucaauccuu

SEQ ID NO: 3241989 - RNA, 19 nt, Artificial Sequence
  Description of Artificial Sequence: Synthetic oligonucleotide
accgccggcagcugugucc

SEQ ID NO: 3241990 - RNA, 19 nt, Artificial Sequence
  Description of Artificial Sequence: Synthetic oligonucleotide
agauuuucagggcuagcau

SEQ ID NO: 3241991 - RNA, 19 nt, Artificial Sequence
  Description of Artificial Sequence: Synthetic oligonucleotide
augggaacaggccuggcaa

SEQ ID NO: 3241992 - RNA, 19 nt, Artificial Sequence
  Description of Artificial Sequence: Synthetic oligonucleotide
uguuggugugcagaaugag

SEQ ID NO: 3241993 - RNA, 19 nt, Artificial Sequence
  Description of Artificial Sequence: Synthetic oligonucleotide
uucuagauuuucagggcua

SEQ ID NO: 3241994 - RNA, 19 nt, Artificial Sequence
  Description of Artificial Sequence: Synthetic oligonucleotide
uccacuagggccugaccca

SEQ ID NO: 3241995 - RNA, 19 nt, Artificial Sequence
  Description of Artificial Sequence: Synthetic oligonucleotide
agcaguagucagcauuucu

SEQ ID NO: 3241996 - RNA, 19 nt, Artificial Sequence
  Description of Artificial Sequence: Synthetic oligonucleotide
cuuccuuccucuuuccuca

SEQ ID NO: 3241997 - RNA, 19 nt, Artificial Sequence
  Description of Artificial Sequence: Synthetic oligonucleotide
ggugugcagaaugaguugg

SEQ ID NO: 3241998 - RNA, 19 nt, Artificial Sequence
  Description of Artificial Sequence: Synthetic oligonucleotide
cuagcaugaagagcaguag

SEQ ID NO: 3241999 - RNA, 19 nt, Artificial Sequence
  Description of Artificial Sequence: Synthetic oligonucleotide
caauugacuugcaguggcc

SEQ ID NO: 3242000 - RNA, 19 nt, Artificial Sequence
  Description of Artificial Sequence: Synthetic oligonucleotide
ugugcagaaugaguuggug

SEQ ID NO: 3242001 - RNA, 19 nt, Artificial Sequence
  Description of Artificial Sequence: Synthetic oligonucleotide
uggugccugauaccgccgg

SEQ ID NO: 3242002 - RNA, 19 nt, Artificial Sequence
  Description of Artificial Sequence: Synthetic oligonucleotide
agucagcauuucuaguuca

SEQ ID NO: 3242003 - RNA, 19 nt, Artificial Sequence
  Description of Artificial Sequence: Synthetic oligonucleotide
aguugguggcccaauugac

SEQ ID NO: 3242004 - RNA, 19 nt, Artificial Sequence
  Description of Artificial Sequence: Synthetic oligonucleotide
gaugggaacaggccuggca

SEQ ID NO: 3242005 - RNA, 19 nt, Artificial Sequence
  Description of Artificial Sequence: Synthetic oligonucleotide
uagggccugacccagcguc

SEQ ID NO: 3242006 - RNA, 19 nt, Artificial Sequence
  Description of Artificial Sequence: Synthetic oligonucleotide
uggugugcagaaugaguug

SEQ ID NO: 3242007 - RNA, 19 nt, Artificial Sequence
  Description of Artificial Sequence: Synthetic oligonucleotide
uugguggcccaauugacuu

SEQ ID NO: 3242008 - RNA, 19 nt, Artificial Sequence
  Description of Artificial Sequence: Synthetic oligonucleotide
ucaauccuugugccugcag

SEQ ID NO: 3242009 - RNA, 19 nt, Artificial Sequence
  Description of Artificial Sequence: Synthetic oligonucleotide
ccuggcaaacauuccaugg

SEQ ID NO: 3242010 - RNA, 19 nt, Artificial Sequence
  Description of Artificial Sequence: Synthetic oligonucleotide
agcgucagucguuccaaag

SEQ ID NO: 3242011 - RNA, 19 nt, Artificial Sequence
  Description of Artificial Sequence: Synthetic oligonucleotide
ugcagcuuugcaccuccgc

SEQ ID NO: 3242012 - RNA, 19 nt, Artificial Sequence
  Description of Artificial Sequence: Synthetic oligonucleotide
agcucucucuuccuuccuc

SEQ ID NO: 3242013 - RNA, 19 nt, Artificial Sequence
  Description of Artificial Sequence: Synthetic oligonucleotide
gcaaacauuccauggugcc

SEQ ID NO: 3242014 - RNA, 19 nt, Artificial Sequence
  Description of Artificial Sequence: Synthetic oligonucleotide
cagaaugaguugguggccc

SEQ ID NO: 3242015 - RNA, 19 nt, Artificial Sequence
  Description of Artificial Sequence: Synthetic oligonucleotide
uggcccaauugacuugcag

SEQ ID NO: 3242016 - RNA, 19 nt, Artificial Sequence
  Description of Artificial Sequence: Synthetic oligonucleotide
aggccuggcaaacauucca

SEQ ID NO: 3242017 - RNA, 19 nt, Artificial Sequence
  Description of Artificial Sequence: Synthetic oligonucleotide
aauagcuugauuuuauugc

SEQ ID NO: 3242018 - RNA, 19 nt, Artificial Sequence
  Description of Artificial Sequence: Synthetic oligonucleotide
auaagaaauuucuagauac

SEQ ID NO: 3242019 - RNA, 19 nt, Artificial Sequence
  Description of Artificial Sequence: Synthetic oligonucleotide
uguaaaaucauacagauuu

SEQ ID NO: 3242020 - RNA, 19 nt, Artificial Sequence
  Description of Artificial Sequence: Synthetic oligonucleotide
uuaguauuuauuaugaugu

SEQ ID NO: 3242021 - RNA, 19 nt, Artificial Sequence
  Description of Artificial Sequence: Synthetic oligonucleotide
aaaucauacagauuuuagg

SEQ ID NO: 3242022 - RNA, 19 nt, Artificial Sequence
  Description of Artificial Sequence: Synthetic oligonucleotide
uuaaguguagaauugagug

SEQ ID NO: 3242023 - RNA, 19 nt, Artificial Sequence
  Description of Artificial Sequence: Synthetic oligonucleotide
aaucauacagauuuuagga

SEQ ID NO: 3242024 - RNA, 19 nt, Artificial Sequence
  Description of Artificial Sequence: Synthetic oligonucleotide
aaaauuuaaguguagaauu

SEQ ID NO: 3242025 - RNA, 19 nt, Artificial Sequence
  Description of Artificial Sequence: Synthetic oligonucleotide
ucaaaguucaugaaaguag

SEQ ID NO: 3242026 - RNA, 19 nt, Artificial Sequence
  Description of Artificial Sequence: Synthetic oligonucleotide
uuuaguauuuauuaugaug

SEQ ID NO: 3242027 - RNA, 19 nt, Artificial Sequence
  Description of Artificial Sequence: Synthetic oligonucleotide
  modified_base (7)..(7): a, c, u, g, unknown or other
uuucaanacaacucggucc

SEQ ID NO: 3242028 - RNA, 19 nt, Artificial Sequence
  Description of Artificial Sequence: Synthetic oligonucleotide
aagaauuuaguauuuauua

SEQ ID NO: 3242029 - RNA, 19 nt, Artificial Sequence
  Description of Artificial Sequence: Synthetic oligonucleotide
aauugagugaucuuucucu

SEQ ID NO: 3242030 - RNA, 19 nt, Artificial Sequence
  Description of Artificial Sequence: Synthetic oligonucleotide
gaugcaaucuaauagcuug

SEQ ID NO: 3242031 - RNA, 19 nt, Artificial Sequence
  Description of Artificial Sequence: Synthetic oligonucleotide
caacauaucuuaaauauag

SEQ ID NO: 3242032 - RNA, 19 nt, Artificial Sequence
  Description of Artificial Sequence: Synthetic oligonucleotide
uuuuaauacagaaauaauu

SEQ ID NO: 3242033 - RNA, 19 nt, Artificial Sequence
  Description of Artificial Sequence: Synthetic oligonucleotide
gaauuuaguauuuauuaug

SEQ ID NO: 3242034 - RNA, 19 nt, Artificial Sequence
  Description of Artificial Sequence: Synthetic oligonucleotide
auggaugcaaucuaauagc

SEQ ID NO: 3242035 - RNA, 19 nt, Artificial Sequence
  Description of Artificial Sequence: Synthetic oligonucleotide
ucagaugucaagcagaaaa

SEQ ID NO: 3242036 - RNA, 19 nt, Artificial Sequence
  Description of Artificial Sequence: Synthetic oligonucleotide
gauuuuaggauccaccugc

SEQ ID NO: 3242037 - RNA, 19 nt, Artificial Sequence
  Description of Artificial Sequence: Synthetic oligonucleotide
uccaauaaagcaauggaug

SEQ ID NO: 3242038 - RNA, 19 nt, Artificial Sequence
  Description of Artificial Sequence: Synthetic oligonucleotide
acuauuaagaauuuaguau

SEQ ID NO: 3242039 - RNA, 19 nt, Artificial Sequence
  Description of Artificial Sequence: Synthetic oligonucleotide
auaagaguaggaaugauac

SEQ ID NO: 3242040 - RNA, 19 nt, Artificial Sequence
  Description of Artificial Sequence: Synthetic oligonucleotide
augauguuuauacauacag

SEQ ID NO: 3242041 - RNA, 19 nt, Artificial Sequence
  Description of Artificial Sequence: Synthetic oligonucleotide
uauacuugaaaauagucau

SEQ ID NO: 3242042 - RNA, 19 nt, Artificial Sequence
  Description of Artificial Sequence: Synthetic oligonucleotide
uuuaaacacauuugaauug

SEQ ID NO: 3242043 - RNA, 19 nt, Artificial Sequence
  Description of Artificial Sequence: Synthetic oligonucleotide
  modified_base (6)..(6): a, c, u, g, unknown or other
uucaanacaacucgguccc

SEQ ID NO: 3242044 - RNA, 19 nt, Artificial Sequence
  Description of Artificial Sequence: Synthetic oligonucleotide
acaucauugacauuuuauc

SEQ ID NO: 3242045 - RNA, 19 nt, Artificial Sequence
  Description of Artificial Sequence: Synthetic oligonucleotide
uagguuauagauaaaagua

SEQ ID NO: 3242046 - RNA, 19 nt, Artificial Sequence
  Description of Artificial Sequence: Synthetic oligonucleotide
aaaaugaugcucaauaagu

SEQ ID NO: 3242047 - RNA, 19 nt, Artificial Sequence
  Description of Artificial Sequence: Synthetic oligonucleotide
auuugcauaucauugcuag

SEQ ID NO: 3242048 - RNA, 19 nt, Artificial Sequence
  Description of Artificial Sequence: Synthetic oligonucleotide
aaggauguuauuuuauacu

SEQ ID NO: 3242049 - RNA, 19 nt, Artificial Sequence
  Description of Artificial Sequence: Synthetic oligonucleotide
aagaguaggaaugauacca

SEQ ID NO: 3242050 - RNA, 19 nt, Artificial Sequence
  Description of Artificial Sequence: Synthetic oligonucleotide
uuuccaauaaagcaaugga

SEQ ID NO: 3242051 - RNA, 19 nt, Artificial Sequence
  Description of Artificial Sequence: Synthetic oligonucleotide
aacuauuaagaauuuagua

SEQ ID NO: 3242052 - RNA, 19 nt, Artificial Sequence
  Description of Artificial Sequence: Synthetic oligonucleotide
uagauguauauuuauguca

SEQ ID NO: 3242053 - RNA, 19 nt, Artificial Sequence
  Description of Artificial Sequence: Synthetic oligonucleotide
uguaaugacauuucacagc

SEQ ID NO: 3242054 - RNA, 19 nt, Artificial Sequence
  Description of Artificial Sequence: Synthetic oligonucleotide
uguguaaaaucauacagau

SEQ ID NO: 3242055 - RNA, 19 nt, Artificial Sequence
  Description of Artificial Sequence: Synthetic oligonucleotide
aaacacucugaacaaacug

SEQ ID NO: 3242056 - RNA, 19 nt, Artificial Sequence
  Description of Artificial Sequence: Synthetic oligonucleotide
ugaucuuucucuauuacaa

SEQ ID NO: 3242057 - RNA, 19 nt, Artificial Sequence
  Description of Artificial Sequence: Synthetic oligonucleotide
aauggauaagaguaggaau

SEQ ID NO: 3242058 - RNA, 19 nt, Artificial Sequence
  Description of Artificial Sequence: Synthetic oligonucleotide
gaugauuucuacaugaaca

SEQ ID NO: 3242059 - RNA, 19 nt, Artificial Sequence
  Description of Artificial Sequence: Synthetic oligonucleotide
cauuuuaucauuuuaaaua

SEQ ID NO: 3242060 - RNA, 19 nt, Artificial Sequence
  Description of Artificial Sequence: Synthetic oligonucleotide
aagaaucuucgucaugagg

SEQ ID NO: 3242061 - RNA, 19 nt, Artificial Sequence
  Description of Artificial Sequence: Synthetic oligonucleotide
auuacaaaagcuugauaag

SEQ ID NO: 3242062 - RNA, 19 nt, Artificial Sequence
  Description of Artificial Sequence: Synthetic oligonucleotide
ucucuauuacaaaagcuug

SEQ ID NO: 3242063 - RNA, 19 nt, Artificial Sequence
  Description of Artificial Sequence: Synthetic oligonucleotide
uaaaccagcaaugucaucu

SEQ ID NO: 3242064 - RNA, 19 nt, Artificial Sequence
  Description of Artificial Sequence: Synthetic oligonucleotide
uuucuagauaccauaguca

SEQ ID NO: 3242065 - RNA, 19 nt, Artificial Sequence
  Description of Artificial Sequence: Synthetic oligonucleotide
acauuucacagcuaaaucu

SEQ ID NO: 3242066 - RNA, 19 nt, Artificial Sequence
  Description of Artificial Sequence: Synthetic oligonucleotide
cauaauuggcacaucauug

SEQ ID NO: 3242067 - RNA, 19 nt, Artificial Sequence
  Description of Artificial Sequence: Synthetic oligonucleotide
uucacuuuggagaacuuca

SEQ ID NO: 3242068 - RNA, 19 nt, Artificial Sequence
  Description of Artificial Sequence: Synthetic oligonucleotide
aaagcaauggaugcaaucu

SEQ ID NO: 3242069 - RNA, 19 nt, Artificial Sequence
  Description of Artificial Sequence: Synthetic oligonucleotide
  modified_base (2)..(2): a, c, u, g, unknown or other
anacaacucggucccaagg

SEQ ID NO: 3242070 - RNA, 19 nt, Artificial Sequence
  Description of Artificial Sequence: Synthetic oligonucleotide
aaaaccaggggaaauuggg

SEQ ID NO: 3242071 - RNA, 19 nt, Artificial Sequence
  Description of Artificial Sequence: Synthetic oligonucleotide
ucaauuagcacuagguuau

SEQ ID NO: 3242072 - RNA, 19 nt, Artificial Sequence
  Description of Artificial Sequence: Synthetic oligonucleotide
uaauagcuugauuuuauug

SEQ ID NO: 3242073 - RNA, 19 nt, Artificial Sequence
  Description of Artificial Sequence: Synthetic oligonucleotide
uugauuuuauugcacauau

SEQ ID NO: 3242074 - RNA, 19 nt, Artificial Sequence
  Description of Artificial Sequence: Synthetic oligonucleotide
aaacugaguauucaaaguu

SEQ ID NO: 3242075 - RNA, 19 nt, Artificial Sequence
  Description of Artificial Sequence: Synthetic oligonucleotide
augaauuuauuauacuuga

SEQ ID NO: 3242076 - RNA, 19 nt, Artificial Sequence
  Description of Artificial Sequence: Synthetic oligonucleotide
auuuauuauacuugaaaau

SEQ ID NO: 3242077 - RNA, 19 nt, Artificial Sequence
  Description of Artificial Sequence: Synthetic oligonucleotide
gaauuuauuauacuugaaa

SEQ ID NO: 3242078 - RNA, 19 nt, Artificial Sequence
  Description of Artificial Sequence: Synthetic oligonucleotide
aauguguaaugacauuuca

SEQ ID NO: 3242079 - RNA, 19 nt, Artificial Sequence
  Description of Artificial Sequence: Synthetic oligonucleotide
uucucuauuacaaaagcuu

SEQ ID NO: 3242080 - RNA, 19 nt, Artificial Sequence
  Description of Artificial Sequence: Synthetic oligonucleotide
aaucucaauuagcacuagg

SEQ ID NO: 3242081 - RNA, 19 nt, Artificial Sequence
  Description of Artificial Sequence: Synthetic oligonucleotide
aaauuuaaguguagaauug

SEQ ID NO: 3242082 - RNA, 19 nt, Artificial Sequence
  Description of Artificial Sequence: Synthetic oligonucleotide
uuggagaacuucaaaauaa

SEQ ID NO: 3242083 - RNA, 19 nt, Artificial Sequence
  Description of Artificial Sequence: Synthetic oligonucleotide
cauacagauuuuaggaucc

SEQ ID NO: 3242084 - RNA, 19 nt, Artificial Sequence
  Description of Artificial Sequence: Synthetic oligonucleotide
uaagaaauuucuagauacc

SEQ ID NO: 3242085 - RNA, 19 nt, Artificial Sequence
  Description of Artificial Sequence: Synthetic oligonucleotide
ugaauugaugauuucuaca

SEQ ID NO: 3242086 - RNA, 19 nt, Artificial Sequence
  Description of Artificial Sequence: Synthetic oligonucleotide
aagaaauuucuagauacca

SEQ ID NO: 3242087 - RNA, 19 nt, Artificial Sequence
  Description of Artificial Sequence: Synthetic oligonucleotide
uuuauuugaucagauguca

SEQ ID NO: 3242088 - RNA, 19 nt, Artificial Sequence
  Description of Artificial Sequence: Synthetic oligonucleotide
aauugaugauuucuacaug

SEQ ID NO: 3242089 - RNA, 19 nt, Artificial Sequence
  Description of Artificial Sequence: Synthetic oligonucleotide
uaagaauuuaguauuuauu

SEQ ID NO: 3242090 - RNA, 19 nt, Artificial Sequence
  Description of Artificial Sequence: Synthetic oligonucleotide
  modified_base (8)..(8): a, c, u, g, unknown or other
uuuucaanacaacucgguc

SEQ ID NO: 3242091 - RNA, 19 nt, Artificial Sequence
  Description of Artificial Sequence: Synthetic oligonucleotide
gaaggauguuauuuuauac

SEQ ID NO: 3242092 - RNA, 19 nt, Artificial Sequence
  Description of Artificial Sequence: Synthetic oligonucleotide
aauuucuagauaccauagu

SEQ ID NO: 3242093 - RNA, 19 nt, Artificial Sequence
  Description of Artificial Sequence: Synthetic oligonucleotide
aaagcuucucucuuuuacu

SEQ ID NO: 3242094 - RNA, 19 nt, Artificial Sequence
  Description of Artificial Sequence: Synthetic oligonucleotide
ucauacagauuuuaggauc

SEQ ID NO: 3242095 - RNA, 19 nt, Artificial Sequence
  Description of Artificial Sequence: Synthetic oligonucleotide
uacccuguaaaccaguuuc

SEQ ID NO: 3242096 - RNA, 19 nt, Artificial Sequence
  Description of Artificial Sequence: Synthetic oligonucleotide
ugaucagaugucaagcaga

SEQ ID NO: 3242097 - RNA, 19 nt, Artificial Sequence
  Description of Artificial Sequence: Synthetic oligonucleotide
aauuuaaguguagaauuga

SEQ ID NO: 3242098 - RNA, 19 nt, Artificial Sequence
  Description of Artificial Sequence: Synthetic oligonucleotide
uuuaggauccaccugccuc

SEQ ID NO: 3242099 - RNA, 19 nt, Artificial Sequence
  Description of Artificial Sequence: Synthetic oligonucleotide
gauuuuauugcacauauuu

SEQ ID NO: 3242100 - RNA, 19 nt, Artificial Sequence
  Description of Artificial Sequence: Synthetic oligonucleotide
agauguacccuguaaacca

SEQ ID NO: 3242101 - RNA, 19 nt, Artificial Sequence
  Description of Artificial Sequence: Synthetic oligonucleotide
gauaccaugaauuuauuau

SEQ ID NO: 3242102 - RNA, 19 nt, Artificial Sequence
  Description of Artificial Sequence: Synthetic oligonucleotide
uggaaugucucagugaaug

SEQ ID NO: 3242103 - RNA, 19 nt, Artificial Sequence
  Description of Artificial Sequence: Synthetic oligonucleotide
aauuggggcguagauguac

SEQ ID NO: 3242104 - RNA, 19 nt, Artificial Sequence
  Description of Artificial Sequence: Synthetic oligonucleotide
gaaauuggggcguagaugu

SEQ ID NO: 3242105 - RNA, 19 nt, Artificial Sequence
  Description of Artificial Sequence: Synthetic oligonucleotide
uucuagauaccauagucaa

SEQ ID NO: 3242106 - RNA, 19 nt, Artificial Sequence
  Description of Artificial Sequence: Synthetic oligonucleotide
uaaaccaguuucuagcuaa

SEQ ID NO: 3242107 - RNA, 19 nt, Artificial Sequence
  Description of Artificial Sequence: Synthetic oligonucleotide
uuugaucagaugucaagca

SEQ ID NO: 3242108 - RNA, 19 nt, Artificial Sequence
  Description of Artificial Sequence: Synthetic oligonucleotide
auaauuggcacaucauuga

SEQ ID NO: 3242109 - RNA, 19 nt, Artificial Sequence
  Description of Artificial Sequence: Synthetic oligonucleotide
agauaccauagucaaauca

SEQ ID NO: 3242110 - RNA, 19 nt, Artificial Sequence
  Description of Artificial Sequence: Synthetic oligonucleotide
ugaguauucaaaguucaug

SEQ ID NO: 3242111 - RNA, 19 nt, Artificial Sequence
  Description of Artificial Sequence: Synthetic oligonucleotide
uaaguguagaauugaguga

SEQ ID NO: 3242112 - RNA, 19 nt, Artificial Sequence
  Description of Artificial Sequence: Synthetic oligonucleotide
ugaggcacaaccaaacauc

SEQ ID NO: 3242113 - RNA, 19 nt, Artificial Sequence
  Description of Artificial Sequence: Synthetic oligonucleotide
uuuggagaacuucaaaaua

SEQ ID NO: 3242114 - RNA, 19 nt, Artificial Sequence
  Description of Artificial Sequence: Synthetic oligonucleotide
  modified_base (3)..(3): a, c, u, g, unknown or other
aanacaacucggucccaag

SEQ ID NO: 3242115 - RNA, 19 nt, Artificial Sequence
  Description of Artificial Sequence: Synthetic oligonucleotide
accaguuucuagcuaaaag

SEQ ID NO: 3242116 - RNA, 19 nt, Artificial Sequence
  Description of Artificial Sequence: Synthetic oligonucleotide
ucauuugcauaucauugcu

SEQ ID NO: 3242117 - RNA, 19 nt, Artificial Sequence
  Description of Artificial Sequence: Synthetic oligonucleotide
aaaaccuuaguguugaagc

SEQ ID NO: 3242118 - RNA, 19 nt, Artificial Sequence
  Description of Artificial Sequence: Synthetic oligonucleotide
aaacaaauagucuauggcg

SEQ ID NO: 3242119 - RNA, 19 nt, Artificial Sequence
  Description of Artificial Sequence: Synthetic oligonucleotide
agaaguagagcucaggacc

SEQ ID NO: 3242120 - RNA, 19 nt, Artificial Sequence
  Description of Artificial Sequence: Synthetic oligonucleotide
aacaauauuuccaacaaac

SEQ ID NO: 3242121 - RNA, 19 nt, Artificial Sequence
  Description of Artificial Sequence: Synthetic oligonucleotide
auuuccaacaaacaaauag

SEQ ID NO: 3242122 - RNA, 19 nt, Artificial Sequence
  Description of Artificial Sequence: Synthetic oligonucleotide
ucuucaaucaaacaugcag

SEQ ID NO: 3242123 - RNA, 19 nt, Artificial Sequence
  Description of Artificial Sequence: Synthetic oligonucleotide
uuuaugggaacccagaaga

SEQ ID NO: 3242124 - RNA, 19 nt, Artificial Sequence
  Description of Artificial Sequence: Synthetic oligonucleotide
aaaccuuaguguugaagcc

SEQ ID NO: 3242125 - RNA, 19 nt, Artificial Sequence
  Description of Artificial Sequence: Synthetic oligonucleotide
caaucaaacaugcaguugg

SEQ ID NO: 3242126 - RNA, 19 nt, Artificial Sequence
  Description of Artificial Sequence: Synthetic oligonucleotide
uggaccaaggcauugaugc

SEQ ID NO: 3242127 - RNA, 19 nt, Artificial Sequence
  Description of Artificial Sequence: Synthetic oligonucleotide
accaggaacaaucccaacc

SEQ ID NO: 3242128 - RNA, 19 nt, Artificial Sequence
  Description of Artificial Sequence: Synthetic oligonucleotide
caaacaugcaguuggaacc

SEQ ID NO: 3242129 - RNA, 19 nt, Artificial Sequence
  Description of Artificial Sequence: Synthetic oligonucleotide
acguguaaacaauauuucc

SEQ ID NO: 3242130 - RNA, 19 nt, Artificial Sequence
  Description of Artificial Sequence: Synthetic oligonucleotide
uuuccaacaaacaaauagu

SEQ ID NO: 3242131 - RNA, 19 nt, Artificial Sequence
  Description of Artificial Sequence: Synthetic oligonucleotide
aagauucccagagugaagg

SEQ ID NO: 3242132 - RNA, 19 nt, Artificial Sequence
  Description of Artificial Sequence: Synthetic oligonucleotide
uuucagacaaaccguaacc

SEQ ID NO: 3242133 - RNA, 19 nt, Artificial Sequence
  Description of Artificial Sequence: Synthetic oligonucleotide
uaaacaauauuuccaacaa

SEQ ID NO: 3242134 - RNA, 19 nt, Artificial Sequence
  Description of Artificial Sequence: Synthetic oligonucleotide
acaagagucgccaucaggc

SEQ ID NO: 3242135 - RNA, 19 nt, Artificial Sequence
  Description of Artificial Sequence: Synthetic oligonucleotide
aggugacugaauuuagucc

SEQ ID NO: 3242136 - RNA, 19 nt, Artificial Sequence
  Description of Artificial Sequence: Synthetic oligonucleotide
caaacaaauagucuauggc

SEQ ID NO: 3242137 - RNA, 19 nt, Artificial Sequence
  Description of Artificial Sequence: Synthetic oligonucleotide
uuuuaugggaacccagaag

SEQ ID NO: 3242138 - RNA, 19 nt, Artificial Sequence
  Description of Artificial Sequence: Synthetic oligonucleotide
acaaaccguaaccacaacg

SEQ ID NO: 3242139 - RNA, 19 nt, Artificial Sequence
  Description of Artificial Sequence: Synthetic oligonucleotide
ugcaguuggaaccaggaac

SEQ ID NO: 3242140 - RNA, 19 nt, Artificial Sequence
  Description of Artificial Sequence: Synthetic oligonucleotide
guaaacaauauuuccaaca

SEQ ID NO: 3242141 - RNA, 19 nt, Artificial Sequence
  Description of Artificial Sequence: Synthetic oligonucleotide
ucaaacaugcaguuggaac

SEQ ID NO: 3242142 - RNA, 19 nt, Artificial Sequence
  Description of Artificial Sequence: Synthetic oligonucleotide
ugacguacaagaccucucg

SEQ ID NO: 3242143 - RNA, 19 nt, Artificial Sequence
  Description of Artificial Sequence: Synthetic oligonucleotide
aauagucuauggcgugacc

SEQ ID NO: 3242144 - RNA, 19 nt, Artificial Sequence
  Description of Artificial Sequence: Synthetic oligonucleotide
agcucaggaccauaguugc

SEQ ID NO: 3242145 - RNA, 19 nt, Artificial Sequence
  Description of Artificial Sequence: Synthetic oligonucleotide
aagggcggcaacaagaguc

SEQ ID NO: 3242146 - RNA, 19 nt, Artificial Sequence
  Description of Artificial Sequence: Synthetic oligonucleotide
uauggcgugaccauuggcu

SEQ ID NO: 3242147 - RNA, 19 nt, Artificial Sequence
  Description of Artificial Sequence: Synthetic oligonucleotide
auuuaguccacgcuguugu

SEQ ID NO: 3242148 - RNA, 19 nt, Artificial Sequence
  Description of Artificial Sequence: Synthetic oligonucleotide
agcaauuuuaugggaaccc

SEQ ID NO: 3242149 - RNA, 19 nt, Artificial Sequence
  Description of Artificial Sequence: Synthetic oligonucleotide
uguggaaaccucagcaugc

SEQ ID NO: 3242150 - RNA, 19 nt, Artificial Sequence
  Description of Artificial Sequence: Synthetic oligonucleotide
ugaauuuaguccacgcugu

SEQ ID NO: 3242151 - RNA, 19 nt, Artificial Sequence
  Description of Artificial Sequence: Synthetic oligonucleotide
aaccguaaccacaacguac

SEQ ID NO: 3242152 - RNA, 19 nt, Artificial Sequence
  Description of Artificial Sequence: Synthetic oligonucleotide
aacaaauagucuauggcgu

SEQ ID NO: 3242153 - RNA, 19 nt, Artificial Sequence
  Description of Artificial Sequence: Synthetic oligonucleotide
ucuccugacguacaagacc

SEQ ID NO: 3242154 - RNA, 19 nt, Artificial Sequence
  Description of Artificial Sequence: Synthetic oligonucleotide
uccaacaaacaaauagucu

SEQ ID NO: 3242155 - RNA, 19 nt, Artificial Sequence
  Description of Artificial Sequence: Synthetic oligonucleotide
uucugggugauuuuguaga

SEQ ID NO: 3242156 - RNA, 19 nt, Artificial Sequence
  Description of Artificial Sequence: Synthetic oligonucleotide
ccagcuuucagacaaaccg

SEQ ID NO: 3242157 - RNA, 19 nt, Artificial Sequence
  Description of Artificial Sequence: Synthetic oligonucleotide
caucuucaaucaaacaugc

SEQ ID NO: 3242158 - RNA, 19 nt, Artificial Sequence
  Description of Artificial Sequence: Synthetic oligonucleotide
uaguguugaagccuucugc

SEQ ID NO: 3242159 - RNA, 19 nt, Artificial Sequence
  Description of Artificial Sequence: Synthetic oligonucleotide
uuccaacaaacaaauaguc

SEQ ID NO: 3242160 - RNA, 19 nt, Artificial Sequence
  Description of Artificial Sequence: Synthetic oligonucleotide
aaauagucuauggcgugac

SEQ ID NO: 3242161 - RNA, 19 nt, Artificial Sequence
  Description of Artificial Sequence: Synthetic oligonucleotide
uucaugucaggagcgaugg

SEQ ID NO: 3242162 - RNA, 19 nt, Artificial Sequence
  Description of Artificial Sequence: Synthetic oligonucleotide
ugggugauuuuguagagcu

SEQ ID NO: 3242163 - RNA, 19 nt, Artificial Sequence
  Description of Artificial Sequence: Synthetic oligonucleotide
gauuuuguagagcugugga

SEQ ID NO: 3242164 - RNA, 19 nt, Artificial Sequence
  Description of Artificial Sequence: Synthetic oligonucleotide
uacguguaaacaauauuuc

SEQ ID NO: 3242165 - RNA, 19 nt, Artificial Sequence
  Description of Artificial Sequence: Synthetic oligonucleotide
uuuuguagagcuguggaaa

SEQ ID NO: 3242166 - RNA, 19 nt, Artificial Sequence
  Description of Artificial Sequence: Synthetic oligonucleotide
cagaugguugaguagacac

SEQ ID NO: 3242167 - RNA, 19 nt, Artificial Sequence
  Description of Artificial Sequence: Synthetic oligonucleotide
aucacaucuucaaucaaac

SEQ ID NO: 3242168 - RNA, 19 nt, Artificial Sequence
  Description of Artificial Sequence: Synthetic oligonucleotide
aguguugaagccuucugca

SEQ ID NO: 3242169 - RNA, 19 nt, Artificial Sequence
  Description of Artificial Sequence: Synthetic oligonucleotide
uccaaaccagcuuucagac

SEQ ID NO: 3242170 - RNA, 19 nt, Artificial Sequence
  Description of Artificial Sequence: Synthetic oligonucleotide
aauuuuaugggaacccaga

SEQ ID NO: 3242171 - RNA, 19 nt, Artificial Sequence
  Description of Artificial Sequence: Synthetic oligonucleotide
aaacaauauuuccaacaaa

SEQ ID NO: 3242172 - RNA, 19 nt, Artificial Sequence
  Description of Artificial Sequence: Synthetic oligonucleotide
acaacguacguguaaacaa

SEQ ID NO: 3242173 - RNA, 19 nt, Artificial Sequence
  Description of Artificial Sequence: Synthetic oligonucleotide
uuucaugucaggagcgaug

SEQ ID NO: 3242174 - RNA, 19 nt, Artificial Sequence
  Description of Artificial Sequence: Synthetic oligonucleotide
ugauuuuguagagcugugg

SEQ ID NO: 3242175 - RNA, 19 nt, Artificial Sequence
  Description of Artificial Sequence: Synthetic oligonucleotide
ucagcaugcucuccugacg

SEQ ID NO: 3242176 - RNA, 19 nt, Artificial Sequence
  Description of Artificial Sequence: Synthetic oligonucleotide
uuaguguugaagccuucug

SEQ ID NO: 3242177 - RNA, 19 nt, Artificial Sequence
  Description of Artificial Sequence: Synthetic oligonucleotide
gucgccaucaggcuguuag

SEQ ID NO: 3242178 - RNA, 19 nt, Artificial Sequence
  Description of Artificial Sequence: Synthetic oligonucleotide
cucgaagauucccagagug

SEQ ID NO: 3242179 - RNA, 19 nt, Artificial Sequence
  Description of Artificial Sequence: Synthetic oligonucleotide
cucucgaagauucccagag

SEQ ID NO: 3242180 - RNA, 19 nt, Artificial Sequence
  Description of Artificial Sequence: Synthetic oligonucleotide
aagagucgccaucaggcug

SEQ ID NO: 3242181 - RNA, 19 nt, Artificial Sequence
  Description of Artificial Sequence: Synthetic oligonucleotide
ugaccauuggcuagcggag

SEQ ID NO: 3242182 - RNA, 19 nt, Artificial Sequence
  Description of Artificial Sequence: Synthetic oligonucleotide
caugucaggagcgaugggg

SEQ ID NO: 3242183 - RNA, 19 nt, Artificial Sequence
  Description of Artificial Sequence: Synthetic oligonucleotide
acugaauuuaguccacgcu

SEQ ID NO: 3242184 - RNA, 19 nt, Artificial Sequence
  Description of Artificial Sequence: Synthetic oligonucleotide
cuuucagacaaaccguaac

SEQ ID NO: 3242185 - RNA, 19 nt, Artificial Sequence
  Description of Artificial Sequence: Synthetic oligonucleotide
accccagaaaaccuuagug

SEQ ID NO: 3242186 - RNA, 19 nt, Artificial Sequence
  Description of Artificial Sequence: Synthetic oligonucleotide
aauuuaguccacgcuguug

SEQ ID NO: 3242187 - RNA, 19 nt, Artificial Sequence
  Description of Artificial Sequence: Synthetic oligonucleotide
uuuguagagcuguggaaac

SEQ ID NO: 3242188 - RNA, 19 nt, Artificial Sequence
  Description of Artificial Sequence: Synthetic oligonucleotide
ucaggagcgauggggaugg

SEQ ID NO: 3242189 - RNA, 19 nt, Artificial Sequence
  Description of Artificial Sequence: Synthetic oligonucleotide
acaaauagucuauggcgug

SEQ ID NO: 3242190 - RNA, 19 nt, Artificial Sequence
  Description of Artificial Sequence: Synthetic oligonucleotide
gacugaauuuaguccacgc

SEQ ID NO: 3242191 - RNA, 19 nt, Artificial Sequence
  Description of Artificial Sequence: Synthetic oligonucleotide
agcaugcuuccccacaccg

SEQ ID NO: 3242192 - RNA, 19 nt, Artificial Sequence
  Description of Artificial Sequence: Synthetic oligonucleotide
ucuauggcgugaccauugg

SEQ ID NO: 3242193 - RNA, 19 nt, Artificial Sequence
  Description of Artificial Sequence: Synthetic oligonucleotide
uucagacaaaccguaacca

SEQ ID NO: 3242194 - RNA, 19 nt, Artificial Sequence
  Description of Artificial Sequence: Synthetic oligonucleotide
ucagacaaaccguaaccac

SEQ ID NO: 3242195 - RNA, 19 nt, Artificial Sequence
  Description of Artificial Sequence: Synthetic oligonucleotide
uccagcaauuuuaugggaa

SEQ ID NO: 3242196 - RNA, 19 nt, Artificial Sequence
  Description of Artificial Sequence: Synthetic oligonucleotide
ucuccaaaccagcuuucag

SEQ ID NO: 3242197 - RNA, 19 nt, Artificial Sequence
  Description of Artificial Sequence: Synthetic oligonucleotide
caagaccucucgaagauuc

SEQ ID NO: 3242198 - RNA, 19 nt, Artificial Sequence
  Description of Artificial Sequence: Synthetic oligonucleotide
auauuuccaacaaacaaau

SEQ ID NO: 3242199 - RNA, 19 nt, Artificial Sequence
  Description of Artificial Sequence: Synthetic oligonucleotide
acccagaagaggaugaggg

SEQ ID NO: 3242200 - RNA, 19 nt, Artificial Sequence
  Description of Artificial Sequence: Synthetic oligonucleotide
gaugguugaguagacacca

SEQ ID NO: 3242201 - RNA, 19 nt, Artificial Sequence
  Description of Artificial Sequence: Synthetic oligonucleotide
uuggaaccaggaacaaucc

SEQ ID NO: 3242202 - RNA, 19 nt, Artificial Sequence
  Description of Artificial Sequence: Synthetic oligonucleotide
auucccagagugaagggcg

SEQ ID NO: 3242203 - RNA, 19 nt, Artificial Sequence
  Description of Artificial Sequence: Synthetic oligonucleotide
guaaccacaacguacgugu

SEQ ID NO: 3242204 - RNA, 19 nt, Artificial Sequence
  Description of Artificial Sequence: Synthetic oligonucleotide
ucugggugauuuuguagag

SEQ ID NO: 3242205 - RNA, 19 nt, Artificial Sequence
  Description of Artificial Sequence: Synthetic oligonucleotide
caugcuuccccacaccgcc

SEQ ID NO: 3242206 - RNA, 19 nt, Artificial Sequence
  Description of Artificial Sequence: Synthetic oligonucleotide
accguaaccacaacguacg

SEQ ID NO: 3242207 - RNA, 19 nt, Artificial Sequence
  Description of Artificial Sequence: Synthetic oligonucleotide
agaugguugaguagacacc

SEQ ID NO: 3242208 - RNA, 19 nt, Artificial Sequence
  Description of Artificial Sequence: Synthetic oligonucleotide
ugcccuuucaugucaggag

SEQ ID NO: 3242209 - RNA, 19 nt, Artificial Sequence
  Description of Artificial Sequence: Synthetic oligonucleotide
aguaucgugcuccagcaau

SEQ ID NO: 3242210 - RNA, 19 nt, Artificial Sequence
  Description of Artificial Sequence: Synthetic oligonucleotide
uucaaucaaacaugcaguu

SEQ ID NO: 3242211 - RNA, 19 nt, Artificial Sequence
  Description of Artificial Sequence: Synthetic oligonucleotide
uacaagaccucucgaagau

SEQ ID NO: 3242212 - RNA, 19 nt, Artificial Sequence
  Description of Artificial Sequence: Synthetic oligonucleotide
caaaccagcuuucagacaa

SEQ ID NO: 3242213 - RNA, 19 nt, Artificial Sequence
  Description of Artificial Sequence: Synthetic oligonucleotide
ggugacugaauuuagucca

SEQ ID NO: 3242214 - RNA, 19 nt, Artificial Sequence
  Description of Artificial Sequence: Synthetic oligonucleotide
auuuuaugggaacccagaa

SEQ ID NO: 3242215 - RNA, 19 nt, Artificial Sequence
  Description of Artificial Sequence: Synthetic oligonucleotide
aaccagcuuucagacaaac

SEQ ID NO: 3242216 - RNA, 19 nt, Artificial Sequence
  Description of Artificial Sequence: Synthetic oligonucleotide
uugucuccaaaccagcuuu

SEQ ID NO: 3242217 - RNA, 19 nt, Artificial Sequence
  Description of Artificial Sequence: Synthetic oligonucleotide
uuaauuaucccuguaauug

SEQ ID NO: 3242218 - RNA, 19 nt, Artificial Sequence
  Description of Artificial Sequence: Synthetic oligonucleotide
aagucagagaaucaauagg

SEQ ID NO: 3242219 - RNA, 19 nt, Artificial Sequence
  Description of Artificial Sequence: Synthetic oligonucleotide
acaauucuugcccuguagc

SEQ ID NO: 3242220 - RNA, 19 nt, Artificial Sequence
  Description of Artificial Sequence: Synthetic oligonucleotide
gaaucaauagggguggugg

SEQ ID NO: 3242221 - RNA, 19 nt, Artificial Sequence
  Description of Artificial Sequence: Synthetic oligonucleotide
gaagucagagaaucaauag

SEQ ID NO: 3242222 - RNA, 19 nt, Artificial Sequence
  Description of Artificial Sequence: Synthetic oligonucleotide
agucagagaaucaauaggg

SEQ ID NO: 3242223 - RNA, 19 nt, Artificial Sequence
  Description of Artificial Sequence: Synthetic oligonucleotide
uucuucuuaauuaucccug

SEQ ID NO: 3242224 - RNA, 19 nt, Artificial Sequence
  Description of Artificial Sequence: Synthetic oligonucleotide
ucuucagccuccauauugg

SEQ ID NO: 3242225 - RNA, 19 nt, Artificial Sequence
  Description of Artificial Sequence: Synthetic oligonucleotide
ucagccuccauauugggug

SEQ ID NO: 3242226 - RNA, 19 nt, Artificial Sequence
  Description of Artificial Sequence: Synthetic oligonucleotide
augcccacaauucuugccc

SEQ ID NO: 3242227 - RNA, 19 nt, Artificial Sequence
  Description of Artificial Sequence: Synthetic oligonucleotide
agcauugcaugaccgaccc

SEQ ID NO: 3242228 - RNA, 19 nt, Artificial Sequence
  Description of Artificial Sequence: Synthetic oligonucleotide
ucuuaauuaucccuguaau

SEQ ID NO: 3242229 - RNA, 19 nt, Artificial Sequence
  Description of Artificial Sequence: Synthetic oligonucleotide
uuaucccuguaauugauga

SEQ ID NO: 3242230 - RNA, 19 nt, Artificial Sequence
  Description of Artificial Sequence: Synthetic oligonucleotide
aagucuuccuuacugcuca

SEQ ID NO: 3242231 - RNA, 19 nt, Artificial Sequence
  Description of Artificial Sequence: Synthetic oligonucleotide
ucagagaaucaauaggggu

SEQ ID NO: 3242232 - RNA, 19 nt, Artificial Sequence
  Description of Artificial Sequence: Synthetic oligonucleotide
uucuuaauuaucccuguaa

SEQ ID NO: 3242233 - RNA, 19 nt, Artificial Sequence
  Description of Artificial Sequence: Synthetic oligonucleotide
cagagaaucaauaggggug

SEQ ID NO: 3242234 - RNA, 19 nt, Artificial Sequence
  Description of Artificial Sequence: Synthetic oligonucleotide
uaauuaucccuguaauuga

SEQ ID NO: 3242235 - RNA, 19 nt, Artificial Sequence
  Description of Artificial Sequence: Synthetic oligonucleotide
aauugaugagggaagcaag

SEQ ID NO: 3242236 - RNA, 19 nt, Artificial Sequence
  Description of Artificial Sequence: Synthetic oligonucleotide
auugaugagggaagcaagc

SEQ ID NO: 3242237 - RNA, 19 nt, Artificial Sequence
  Description of Artificial Sequence: Synthetic oligonucleotide
ucccuguaauugaugaggg

SEQ ID NO: 3242238 - RNA, 19 nt, Artificial Sequence
  Description of Artificial Sequence: Synthetic oligonucleotide
agagaaucaauaggggugg

SEQ ID NO: 3242239 - RNA, 19 nt, Artificial Sequence
  Description of Artificial Sequence: Synthetic oligonucleotide
ucuuccuuacugcucagca

SEQ ID NO: 3242240 - RNA, 19 nt, Artificial Sequence
  Description of Artificial Sequence: Synthetic oligonucleotide
uagccaggcaagaugaccc

SEQ ID NO: 3242241 - RNA, 19 nt, Artificial Sequence
  Description of Artificial Sequence: Synthetic oligonucleotide
aucccuguaauugaugagg

SEQ ID NO: 3242242 - RNA, 19 nt, Artificial Sequence
  Description of Artificial Sequence: Synthetic oligonucleotide
uguaauugaugagggaagc

SEQ ID NO: 3242243 - RNA, 19 nt, Artificial Sequence
  Description of Artificial Sequence: Synthetic oligonucleotide
cuguaauugaugagggaag

SEQ ID NO: 3242244 - RNA, 19 nt, Artificial Sequence
  Description of Artificial Sequence: Synthetic oligonucleotide
caauucuugcccuguagcc

SEQ ID NO: 3242245 - RNA, 19 nt, Artificial Sequence
  Description of Artificial Sequence: Synthetic oligonucleotide
auucuugcccuguagccag

SEQ ID NO: 3242246 - RNA, 19 nt, Artificial Sequence
  Description of Artificial Sequence: Synthetic oligonucleotide
cauugcaugaccgacccag

SEQ ID NO: 3242247 - RNA, 19 nt, Artificial Sequence
  Description of Artificial Sequence: Synthetic oligonucleotide
uaauugaugagggaagcaa

SEQ ID NO: 3242248 - RNA, 19 nt, Artificial Sequence
  Description of Artificial Sequence: Synthetic oligonucleotide
aaucaauaggggugguggu

SEQ ID NO: 3242249 - RNA, 19 nt, Artificial Sequence
  Description of Artificial Sequence: Synthetic oligonucleotide
aauucuugcccuguagcca

SEQ ID NO: 3242250 - RNA, 19 nt, Artificial Sequence
  Description of Artificial Sequence: Synthetic oligonucleotide
gucuucagccuccauauug

SEQ ID NO: 3242251 - RNA, 19 nt, Artificial Sequence
  Description of Artificial Sequence: Synthetic oligonucleotide
uacugcucagcauugcaug

SEQ ID NO: 3242252 - RNA, 19 nt, Artificial Sequence
  Description of Artificial Sequence: Synthetic oligonucleotide
ucuucuuaauuaucccugu

SEQ ID NO: 3242253 - RNA, 19 nt, Artificial Sequence
  Description of Artificial Sequence: Synthetic oligonucleotide
uuccuuacugcucagcauu

SEQ ID NO: 3242254 - RNA, 19 nt, Artificial Sequence
  Description of Artificial Sequence: Synthetic oligonucleotide
ugaccgacccagcuaaggc

SEQ ID NO: 3242255 - RNA, 19 nt, Artificial Sequence
  Description of Artificial Sequence: Synthetic oligonucleotide
gaugcccacaauucuugcc

SEQ ID NO: 3242256 - RNA, 19 nt, Artificial Sequence
  Description of Artificial Sequence: Synthetic oligonucleotide
uaucccuguaauugaugag

SEQ ID NO: 3242257 - RNA, 19 nt, Artificial Sequence
  Description of Artificial Sequence: Synthetic oligonucleotide
uggucuucagccuccauau

SEQ ID NO: 3242258 - RNA, 19 nt, Artificial Sequence
  Description of Artificial Sequence: Synthetic oligonucleotide
gucagagaaucaauagggg

SEQ ID NO: 3242259 - RNA, 19 nt, Artificial Sequence
  Description of Artificial Sequence: Synthetic oligonucleotide
ugcucagcauugcaugacc

SEQ ID NO: 3242260 - RNA, 19 nt, Artificial Sequence
  Description of Artificial Sequence: Synthetic oligonucleotide
ucaauaggggugguggucu

SEQ ID NO: 3242261 - RNA, 19 nt, Artificial Sequence
  Description of Artificial Sequence: Synthetic oligonucleotide
uggggcuucuucuuaauua

SEQ ID NO: 3242262 - RNA, 19 nt, Artificial Sequence
  Description of Artificial Sequence: Synthetic oligonucleotide
aagaugaccccaagucuuc

SEQ ID NO: 3242263 - RNA, 19 nt, Artificial Sequence
  Description of Artificial Sequence: Synthetic oligonucleotide
auuggguggggcuucuucu

SEQ ID NO: 3242264 - RNA, 19 nt, Artificial Sequence
  Description of Artificial Sequence: Synthetic oligonucleotide
ucagcauugcaugaccgac

SEQ ID NO: 3242265 - RNA, 19 nt, Artificial Sequence
  Description of Artificial Sequence: Synthetic oligonucleotide
ugcccuguagccaggcaag

SEQ ID NO: 3242266 - RNA, 19 nt, Artificial Sequence
  Description of Artificial Sequence: Synthetic oligonucleotide
uuacugcucagcauugcau

SEQ ID NO: 3242267 - RNA, 19 nt, Artificial Sequence
  Description of Artificial Sequence: Synthetic oligonucleotide
aauuaucccuguaauugau

SEQ ID NO: 3242268 - RNA, 19 nt, Artificial Sequence
  Description of Artificial Sequence: Synthetic oligonucleotide
aggggugguggucuucagc

SEQ ID NO: 3242269 - RNA, 19 nt, Artificial Sequence
  Description of Artificial Sequence: Synthetic oligonucleotide
ggcaagaugaccccaaguc

SEQ ID NO: 3242270 - RNA, 19 nt, Artificial Sequence
  Description of Artificial Sequence: Synthetic oligonucleotide
gaccgacccagcuaaggcc

SEQ ID NO: 3242271 - RNA, 19 nt, Artificial Sequence
  Description of Artificial Sequence: Synthetic oligonucleotide
aucaauagggguggugguc

SEQ ID NO: 3242272 - RNA, 19 nt, Artificial Sequence
  Description of Artificial Sequence: Synthetic oligonucleotide
accgacccagcuaaggccc

SEQ ID NO: 3242273 - RNA, 19 nt, Artificial Sequence
  Description of Artificial Sequence: Synthetic oligonucleotide
uauuggguggggcuucuuc

SEQ ID NO: 3242274 - RNA, 19 nt, Artificial Sequence
  Description of Artificial Sequence: Synthetic oligonucleotide
uccuuacugcucagcauug

SEQ ID NO: 3242275 - RNA, 19 nt, Artificial Sequence
  Description of Artificial Sequence: Synthetic oligonucleotide
uucagccuccauauugggu

SEQ ID NO: 3242276 - RNA, 19 nt, Artificial Sequence
  Description of Artificial Sequence: Synthetic oligonucleotide
agccaggcaagaugacccc

SEQ ID NO: 3242277 - RNA, 19 nt, Artificial Sequence
  Description of Artificial Sequence: Synthetic oligonucleotide
cacaauucuugcccuguag

SEQ ID NO: 3242278 - RNA, 19 nt, Artificial Sequence
  Description of Artificial Sequence: Synthetic oligonucleotide
caggggagaagucagagaa

SEQ ID NO: 3242279 - RNA, 19 nt, Artificial Sequence
  Description of Artificial Sequence: Synthetic oligonucleotide
uugcccuguagccaggcaa

SEQ ID NO: 3242280 - RNA, 19 nt, Artificial Sequence
  Description of Artificial Sequence: Synthetic oligonucleotide
ggcuucuucuuaauuaucc

SEQ ID NO: 3242281 - RNA, 19 nt, Artificial Sequence
  Description of Artificial Sequence: Synthetic oligonucleotide
cuguagccaggcaagauga

SEQ ID NO: 3242282 - RNA, 19 nt, Artificial Sequence
  Description of Artificial Sequence: Synthetic oligonucleotide
aauaggggugguggucuuc

SEQ ID NO: 3242283 - RNA, 19 nt, Artificial Sequence
  Description of Artificial Sequence: Synthetic oligonucleotide
cuucagccuccauauuggg

SEQ ID NO: 3242284 - RNA, 19 nt, Artificial Sequence
  Description of Artificial Sequence: Synthetic oligonucleotide
acugcucagcauugcauga

SEQ ID NO: 3242285 - RNA, 19 nt, Artificial Sequence
  Description of Artificial Sequence: Synthetic oligonucleotide
agaugaccccaagucuucc

SEQ ID NO: 3242286 - RNA, 19 nt, Artificial Sequence
  Description of Artificial Sequence: Synthetic oligonucleotide
ggggugguggucuucagcc

SEQ ID NO: 3242287 - RNA, 19 nt, Artificial Sequence
  Description of Artificial Sequence: Synthetic oligonucleotide
ugaugcccacaauucuugc

SEQ ID NO: 3242288 - RNA, 19 nt, Artificial Sequence
  Description of Artificial Sequence: Synthetic oligonucleotide
uugcaugaccgacccagcu

SEQ ID NO: 3242289 - RNA, 19 nt, Artificial Sequence
  Description of Artificial Sequence: Synthetic oligonucleotide
caagucuuccuuacugcuc

SEQ ID NO: 3242290 - RNA, 19 nt, Artificial Sequence
  Description of Artificial Sequence: Synthetic oligonucleotide
agaagucagagaaucaaua

SEQ ID NO: 3242291 - RNA, 19 nt, Artificial Sequence
  Description of Artificial Sequence: Synthetic oligonucleotide
cagcauugcaugaccgacc

SEQ ID NO: 3242292 - RNA, 19 nt, Artificial Sequence
  Description of Artificial Sequence: Synthetic oligonucleotide
gcuucuucuuaauuauccc

SEQ ID NO: 3242293 - RNA, 19 nt, Artificial Sequence
  Description of Artificial Sequence: Synthetic oligonucleotide
guagccaggcaagaugacc

SEQ ID NO: 3242294 - RNA, 19 nt, Artificial Sequence
  Description of Artificial Sequence: Synthetic oligonucleotide
auugcaugaccgacccagc

SEQ ID NO: 3242295 - RNA, 19 nt, Artificial Sequence
  Description of Artificial Sequence: Synthetic oligonucleotide
ugcaugaccgacccagcua

SEQ ID NO: 3242296 - RNA, 19 nt, Artificial Sequence
  Description of Artificial Sequence: Synthetic oligonucleotide
augaccgacccagcuaagg

SEQ ID NO: 3242297 - RNA, 19 nt, Artificial Sequence
  Description of Artificial Sequence: Synthetic oligonucleotide
auuaucccuguaauugaug

SEQ ID NO: 3242298 - RNA, 19 nt, Artificial Sequence
  Description of Artificial Sequence: Synthetic oligonucleotide
agaaucaauagggguggug

SEQ ID NO: 3242299 - RNA, 19 nt, Artificial Sequence
  Description of Artificial Sequence: Synthetic oligonucleotide
cuucuucuuaauuaucccu

SEQ ID NO: 3242300 - RNA, 19 nt, Artificial Sequence
  Description of Artificial Sequence: Synthetic oligonucleotide
cuuacugcucagcauugca

SEQ ID NO: 3242301 - RNA, 19 nt, Artificial Sequence
  Description of Artificial Sequence: Synthetic oligonucleotide
augaugcccacaauucuug

SEQ ID NO: 3242302 - RNA, 19 nt, Artificial Sequence
  Description of Artificial Sequence: Synthetic oligonucleotide
gaccccaagucuuccuuac

SEQ ID NO: 3242303 - RNA, 19 nt, Artificial Sequence
  Description of Artificial Sequence: Synthetic oligonucleotide
uguagccaggcaagaugac

SEQ ID NO: 3242304 - RNA, 19 nt, Artificial Sequence
  Description of Artificial Sequence: Synthetic oligonucleotide
guaauugaugagggaagca

SEQ ID NO: 3242305 - RNA, 19 nt, Artificial Sequence
  Description of Artificial Sequence: Synthetic oligonucleotide
aggcaagaugaccccaagu

SEQ ID NO: 3242306 - RNA, 19 nt, Artificial Sequence
  Description of Artificial Sequence: Synthetic oligonucleotide
cagccuccauauugggugg

SEQ ID NO: 3242307 - RNA, 19 nt, Artificial Sequence
  Description of Artificial Sequence: Synthetic oligonucleotide
ccagcuaaggcccgguggg

SEQ ID NO: 3242308 - RNA, 19 nt, Artificial Sequence
  Description of Artificial Sequence: Synthetic oligonucleotide
uucuugcccuguagccagg

SEQ ID NO: 3242309 - RNA, 19 nt, Artificial Sequence
  Description of Artificial Sequence: Synthetic oligonucleotide
cuuaauuaucccuguaauu

SEQ ID NO: 3242310 - RNA, 19 nt, Artificial Sequence
  Description of Artificial Sequence: Synthetic oligonucleotide
ugcccacaauucuugcccu

SEQ ID NO: 3242311 - RNA, 19 nt, Artificial Sequence
  Description of Artificial Sequence: Synthetic oligonucleotide
uccauauuggguggggcuu

SEQ ID NO: 3242312 - RNA, 19 nt, Artificial Sequence
  Description of Artificial Sequence: Synthetic oligonucleotide
ggggagaagucagagaauc

SEQ ID NO: 3242313 - RNA, 19 nt, Artificial Sequence
  Description of Artificial Sequence: Synthetic oligonucleotide
auaggggugguggucuuca

SEQ ID NO: 3242314 - RNA, 19 nt, Artificial Sequence
  Description of Artificial Sequence: Synthetic oligonucleotide
cccaugaugcccacaauuc

SEQ ID NO: 3242315 - RNA, 19 nt, Artificial Sequence
  Description of Artificial Sequence: Synthetic oligonucleotide
cucggagccccgcucacac

SEQ ID NO: 3242316 - RNA, 19 nt, Artificial Sequence
  Description of Artificial Sequence: Synthetic oligonucleotide
ccuguagccaggcaagaug

SEQ ID NO: 3242317 - RNA, 19 nt, Artificial Sequence
  Description of Artificial Sequence: Synthetic oligonucleotide
aacaaggacauuuuccucc

SEQ ID NO: 3242318 - RNA, 19 nt, Artificial Sequence
  Description of Artificial Sequence: Synthetic oligonucleotide
aacaaaauuguguacaucu

SEQ ID NO: 3242319 - RNA, 19 nt, Artificial Sequence
  Description of Artificial Sequence: Synthetic oligonucleotide
auuguguacaucuugcagc

SEQ ID NO: 3242320 - RNA, 19 nt, Artificial Sequence
  Description of Artificial Sequence: Synthetic oligonucleotide
aucaucuuuacauacaaag

SEQ ID NO: 3242321 - RNA, 19 nt, Artificial Sequence
  Description of Artificial Sequence: Synthetic oligonucleotide
aaaauuguguacaucuugc

SEQ ID NO: 3242322 - RNA, 19 nt, Artificial Sequence
  Description of Artificial Sequence: Synthetic oligonucleotide
aaagacuucagagaggauc

SEQ ID NO: 3242323 - RNA, 19 nt, Artificial Sequence
  Description of Artificial Sequence: Synthetic oligonucleotide
aguuguauuucacugacag

SEQ ID NO: 3242324 - RNA, 19 nt, Artificial Sequence
  Description of Artificial Sequence: Synthetic oligonucleotide
auacaaagacuucagagag

SEQ ID NO: 3242325 - RNA, 19 nt, Artificial Sequence
  Description of Artificial Sequence: Synthetic oligonucleotide
acauacaaagacuucagag

SEQ ID NO: 3242326 - RNA, 19 nt, Artificial Sequence
  Description of Artificial Sequence: Synthetic oligonucleotide
aauuguguacaucuugcag

SEQ ID NO: 3242327 - RNA, 19 nt, Artificial Sequence
  Description of Artificial Sequence: Synthetic oligonucleotide
uuuuccuccuucuuggugg

SEQ ID NO: 3242328 - RNA, 19 nt, Artificial Sequence
  Description of Artificial Sequence: Synthetic oligonucleotide
aagaagacaaagugccagc

SEQ ID NO: 3242329 - RNA, 19 nt, Artificial Sequence
  Description of Artificial Sequence: Synthetic oligonucleotide
uuagccauggcuuuugcag

SEQ ID NO: 3242330 - RNA, 19 nt, Artificial Sequence
  Description of Artificial Sequence: Synthetic oligonucleotide
uuguauuucacugacagcu

SEQ ID NO: 3242331 - RNA, 19 nt, Artificial Sequence
  Description of Artificial Sequence: Synthetic oligonucleotide
uccaaggcuaacaaaauug

SEQ ID NO: 3242332 - RNA, 19 nt, Artificial Sequence
  Description of Artificial Sequence: Synthetic oligonucleotide
aagacuucagagaggaucc

SEQ ID NO: 3242333 - RNA, 19 nt, Artificial Sequence
  Description of Artificial Sequence: Synthetic oligonucleotide
uuuacauacaaagacuuca

SEQ ID NO: 3242334 - RNA, 19 nt, Artificial Sequence
  Description of Artificial Sequence: Synthetic oligonucleotide
uggguaagaagacaaagug

SEQ ID NO: 3242335 - RNA, 19 nt, Artificial Sequence
  Description of Artificial Sequence: Synthetic oligonucleotide
ucagagaggauccuuuagg

SEQ ID NO: 3242336 - RNA, 19 nt, Artificial Sequence
  Description of Artificial Sequence: Synthetic oligonucleotide
aagacaaagugccagcaug

SEQ ID NO: 3242337 - RNA, 19 nt, Artificial Sequence
  Description of Artificial Sequence: Synthetic oligonucleotide
cauaaguuguauuucacug

SEQ ID NO: 3242338 - RNA, 19 nt, Artificial Sequence
  Description of Artificial Sequence: Synthetic oligonucleotide
caucuuuacauacaaagac

SEQ ID NO: 3242339 - RNA, 19 nt, Artificial Sequence
  Description of Artificial Sequence: Synthetic oligonucleotide
ucaacaaggacauuuuccu

SEQ ID NO: 3242340 - RNA, 19 nt, Artificial Sequence
  Description of Artificial Sequence: Synthetic oligonucleotide
agccauuugaacuccaagg

SEQ ID NO: 3242341 - RNA, 19 nt, Artificial Sequence
  Description of Artificial Sequence: Synthetic oligonucleotide
acauuuuccuccuucuugg

SEQ ID NO: 3242342 - RNA, 19 nt, Artificial Sequence
  Description of Artificial Sequence: Synthetic oligonucleotide
acaucuugcagcuucuuuc

SEQ ID NO: 3242343 - RNA, 19 nt, Artificial Sequence
  Description of Artificial Sequence: Synthetic oligonucleotide
agugccagcaugaugaucg

SEQ ID NO: 3242344 - RNA, 19 nt, Artificial Sequence
  Description of Artificial Sequence: Synthetic oligonucleotide
aaggacauuuuccuccuuc

SEQ ID NO: 3242345 - RNA, 19 nt, Artificial Sequence
  Description of Artificial Sequence: Synthetic oligonucleotide
aucaacaaggacauuuucc

SEQ ID NO: 3242346 - RNA, 19 nt, Artificial Sequence
  Description of Artificial Sequence: Synthetic oligonucleotide
ucaucuuuacauacaaaga

SEQ ID NO: 3242347 - RNA, 19 nt, Artificial Sequence
  Description of Artificial Sequence: Synthetic oligonucleotide
uuacauacaaagacuucag

SEQ ID NO: 3242348 - RNA, 19 nt, Artificial Sequence
  Description of Artificial Sequence: Synthetic oligonucleotide
caaagugccagcaugauga

SEQ ID NO: 3242349 - RNA, 19 nt, Artificial Sequence
  Description of Artificial Sequence: Synthetic oligonucleotide
agacaucaucuuuacauac

SEQ ID NO: 3242350 - RNA, 19 nt, Artificial Sequence
  Description of Artificial Sequence: Synthetic oligonucleotide
uaaguuguauuucacugac

SEQ ID NO: 3242351 - RNA, 19 nt, Artificial Sequence
  Description of Artificial Sequence: Synthetic oligonucleotide
uaagaagacaaagugccag

SEQ ID NO: 3242352 - RNA, 19 nt, Artificial Sequence
  Description of Artificial Sequence: Synthetic oligonucleotide
aaggcuaacaaaauugugu

SEQ ID NO: 3242353 - RNA, 19 nt, Artificial Sequence
  Description of Artificial Sequence: Synthetic oligonucleotide
ucuuuacauacaaagacuu

SEQ ID NO: 3242354 - RNA, 19 nt, Artificial Sequence
  Description of Artificial Sequence: Synthetic oligonucleotide
uuuggguaagaagacaaag

SEQ ID NO: 3242355 - RNA, 19 nt, Artificial Sequence
  Description of Artificial Sequence: Synthetic oligonucleotide
ugcagcuucuuucucagcc

SEQ ID NO: 3242356 - RNA, 19 nt, Artificial Sequence
  Description of Artificial Sequence: Synthetic oligonucleotide
ucugguaacuacugucucg

SEQ ID NO: 3242357 - RNA, 19 nt, Artificial Sequence
  Description of Artificial Sequence: Synthetic oligonucleotide
acagcucucuucuuaauag

SEQ ID NO: 3242358 - RNA, 19 nt, Artificial Sequence
  Description of Artificial Sequence: Synthetic oligonucleotide
gguaagaagacaaagugcc

SEQ ID NO: 3242359 - RNA, 19 nt, Artificial Sequence
  Description of Artificial Sequence: Synthetic oligonucleotide
uguuuggguaagaagacaa

SEQ ID NO: 3242360 - RNA, 19 nt, Artificial Sequence
  Description of Artificial Sequence: Synthetic oligonucleotide
uuugcagacaucaucuuua

SEQ ID NO: 3242361 - RNA, 19 nt, Artificial Sequence
  Description of Artificial Sequence: Synthetic oligonucleotide
gacauuuuccuccuucuug

SEQ ID NO: 3242362 - RNA, 19 nt, Artificial Sequence
  Description of Artificial Sequence: Synthetic oligonucleotide
gaugaucguuacuuuagcc

SEQ ID NO: 3242363 - RNA, 19 nt, Artificial Sequence
  Description of Artificial Sequence: Synthetic oligonucleotide
aacuggugcuguauuaagc

SEQ ID NO: 3242364 - RNA, 19 nt, Artificial Sequence
  Description of Artificial Sequence: Synthetic oligonucleotide
uucuuucucagccauugca

SEQ ID NO: 3242365 - RNA, 19 nt, Artificial Sequence
  Description of Artificial Sequence: Synthetic oligonucleotide
aaauuguguacaucuugca

SEQ ID NO: 3242366 - RNA, 19 nt, Artificial Sequence
  Description of Artificial Sequence: Synthetic oligonucleotide
augaucguuacuuuagcca

SEQ ID NO: 3242367 - RNA, 19 nt, Artificial Sequence
  Description of Artificial Sequence: Synthetic oligonucleotide
uuuaggagugccaccaacu

SEQ ID NO: 3242368 - RNA, 19 nt, Artificial Sequence
  Description of Artificial Sequence: Synthetic oligonucleotide
uagguuucccaucuguuug

SEQ ID NO: 3242369 - RNA, 19 nt, Artificial Sequence
  Description of Artificial Sequence: Synthetic oligonucleotide
uuggguaagaagacaaagu

SEQ ID NO: 3242370 - RNA, 19 nt, Artificial Sequence
  Description of Artificial Sequence: Synthetic oligonucleotide
caaaauuguguacaucuug

SEQ ID NO: 3242371 - RNA, 19 nt, Artificial Sequence
  Description of Artificial Sequence: Synthetic oligonucleotide
cauugcauccucuccauag

SEQ ID NO: 3242372 - RNA, 19 nt, Artificial Sequence
  Description of Artificial Sequence: Synthetic oligonucleotide
uacaaagacuucagagagg

SEQ ID NO: 3242373 - RNA, 19 nt, Artificial Sequence
  Description of Artificial Sequence: Synthetic oligonucleotide
cauacaaagacuucagaga

SEQ ID NO: 3242374 - RNA, 19 nt, Artificial Sequence
  Description of Artificial Sequence: Synthetic oligonucleotide
auaaguuguauuucacuga

SEQ ID NO: 3242375 - RNA, 19 nt, Artificial Sequence
  Description of Artificial Sequence: Synthetic oligonucleotide
uaauagguuucccaucugu

SEQ ID NO: 3242376 - RNA, 19 nt, Artificial Sequence
  Description of Artificial Sequence: Synthetic oligonucleotide
auagaggccagguguuugc

SEQ ID NO: 3242377 - RNA, 19 nt, Artificial Sequence
  Description of Artificial Sequence: Synthetic oligonucleotide
aucuguuuggguaagaaga

SEQ ID NO: 3242378 - RNA, 19 nt, Artificial Sequence
  Description of Artificial Sequence: Synthetic oligonucleotide
uucuuaauagguuucccau

SEQ ID NO: 3242379 - RNA, 19 nt, Artificial Sequence
  Description of Artificial Sequence: Synthetic oligonucleotide
aacuccaaggcuaacaaaa

SEQ ID NO: 3242380 - RNA, 19 nt, Artificial Sequence
  Description of Artificial Sequence: Synthetic oligonucleotide
ucuguuuggguaagaagac

SEQ ID NO: 3242381 - RNA, 19 nt, Artificial Sequence
  Description of Artificial Sequence: Synthetic oligonucleotide
uuucucagccauugcaucc

SEQ ID NO: 3242382 - RNA, 19 nt, Artificial Sequence
  Description of Artificial Sequence: Synthetic oligonucleotide
acuggugcuguauuaagcu

SEQ ID NO: 3242383 - RNA, 19 nt, Artificial Sequence
  Description of Artificial Sequence: Synthetic oligonucleotide
acaaagacuucagagagga

SEQ ID NO: 3242384 - RNA, 19 nt, Artificial Sequence
  Description of Artificial Sequence: Synthetic oligonucleotide
ugaacuccaaggcuaacaa

SEQ ID NO: 3242385 - RNA, 19 nt, Artificial Sequence
  Description of Artificial Sequence: Synthetic oligonucleotide
uuaggagugccaccaacug

SEQ ID NO: 3242386 - RNA, 19 nt, Artificial Sequence
  Description of Artificial Sequence: Synthetic oligonucleotide
uucagagaggauccuuuag

SEQ ID NO: 3242387 - RNA, 19 nt, Artificial Sequence
  Description of Artificial Sequence: Synthetic oligonucleotide
uaggagugccaccaacugg

SEQ ID NO: 3242388 - RNA, 19 nt, Artificial Sequence
  Description of Artificial Sequence: Synthetic oligonucleotide
ugaugaucguuacuuuagc

SEQ ID NO: 3242389 - RNA, 19 nt, Artificial Sequence
  Description of Artificial Sequence: Synthetic oligonucleotide
ugaucguuacuuuagccau

SEQ ID NO: 3242390 - RNA, 19 nt, Artificial Sequence
  Description of Artificial Sequence: Synthetic oligonucleotide
ugcauccucuccauagagg

SEQ ID NO: 3242391 - RNA, 19 nt, Artificial Sequence
  Description of Artificial Sequence: Synthetic oligonucleotide
guaacuacugucucgggca

SEQ ID NO: 3242392 - RNA, 19 nt, Artificial Sequence
  Description of Artificial Sequence: Synthetic oligonucleotide
uuucccaucuguuugggua

SEQ ID NO: 3242393 - RNA, 19 nt, Artificial Sequence
  Description of Artificial Sequence: Synthetic oligonucleotide
uuguguacaucuugcagcu

SEQ ID NO: 3242394 - RNA, 19 nt, Artificial Sequence
  Description of Artificial Sequence: Synthetic oligonucleotide
uugugcauaaguuguauuu

SEQ ID NO: 3242395 - RNA, 19 nt, Artificial Sequence
  Description of Artificial Sequence: Synthetic oligonucleotide
uacauacaaagacuucaga

SEQ ID NO: 3242396 - RNA, 19 nt, Artificial Sequence
  Description of Artificial Sequence: Synthetic oligonucleotide
ucacugacagcucucuucu

SEQ ID NO: 3242397 - RNA, 19 nt, Artificial Sequence
  Description of Artificial Sequence: Synthetic oligonucleotide
acuacugucucgggcagcc

SEQ ID NO: 3242398 - RNA, 19 nt, Artificial Sequence
  Description of Artificial Sequence: Synthetic oligonucleotide
auggcuuuugcagacauca

SEQ ID NO: 3242399 - RNA, 19 nt, Artificial Sequence
  Description of Artificial Sequence: Synthetic oligonucleotide
agugccaccaacuggugcu

SEQ ID NO: 3242400 - RNA, 19 nt, Artificial Sequence
  Description of Artificial Sequence: Synthetic oligonucleotide
ucuugcagcuucuuucuca

SEQ ID NO: 3242401 - RNA, 19 nt, Artificial Sequence
  Description of Artificial Sequence: Synthetic oligonucleotide
agagaggauccuuuaggag

SEQ ID NO: 3242402 - RNA, 19 nt, Artificial Sequence
  Description of Artificial Sequence: Synthetic oligonucleotide
ucuuucucagccauugcau

SEQ ID NO: 3242403 - RNA, 19 nt, Artificial Sequence
  Description of Artificial Sequence: Synthetic oligonucleotide
ugcauaaguuguauuucac

SEQ ID NO: 3242404 - RNA, 19 nt, Artificial Sequence
  Description of Artificial Sequence: Synthetic oligonucleotide
uucacugacagcucucuuc

SEQ ID NO: 3242405 - RNA, 19 nt, Artificial Sequence
  Description of Artificial Sequence: Synthetic oligonucleotide
acaucaucuuuacauacaa

SEQ ID NO: 3242406 - RNA, 19 nt, Artificial Sequence
  Description of Artificial Sequence: Synthetic oligonucleotide
ucuuaauagguuucccauc

SEQ ID NO: 3242407 - RNA, 19 nt, Artificial Sequence
  Description of Artificial Sequence: Synthetic oligonucleotide
ucgggcagccauuugaacu

SEQ ID NO: 3242408 - RNA, 19 nt, Artificial Sequence
  Description of Artificial Sequence: Synthetic oligonucleotide
uugcauccucuccauagag

SEQ ID NO: 3242409 - RNA, 19 nt, Artificial Sequence
  Description of Artificial Sequence: Synthetic oligonucleotide
uuuugcagacaucaucuuu

SEQ ID NO: 3242410 - RNA, 19 nt, Artificial Sequence
  Description of Artificial Sequence: Synthetic oligonucleotide
cugguaacuacugucucgg

SEQ ID NO: 3242411 - RNA, 19 nt, Artificial Sequence
  Description of Artificial Sequence: Synthetic oligonucleotide
caucuguuuggguaagaag

SEQ ID NO: 3242412 - RNA, 19 nt, Artificial Sequence
  Description of Artificial Sequence: Synthetic oligonucleotide
cuugcagcuucuuucucag

SEQ ID NO: 3242413 - RNA, 19 nt, Artificial Sequence
  Description of Artificial Sequence: Synthetic oligonucleotide
aucguuacuuuagccaugg

SEQ ID NO: 3242414 - RNA, 19 nt, Artificial Sequence
  Description of Artificial Sequence: Synthetic oligonucleotide
cagguguuugcccagguug

SEQ ID NO: 3242415 - RNA, 19 nt, Artificial Sequence
  Description of Artificial Sequence: Synthetic oligonucleotide
gagaggauccuuuaggagu

SEQ ID NO: 3242416 - RNA, 19 nt, Artificial Sequence
  Description of Artificial Sequence: Synthetic oligonucleotide
aucuuuacauacaaagacu

SEQ ID NO: 3242417 - RNA, 19 nt, Artificial Sequence
  Description of Artificial Sequence: Synthetic oligonucleotide
ugucauggaaacuugagcc

SEQ ID NO: 3242418 - RNA, 19 nt, Artificial Sequence
  Description of Artificial Sequence: Synthetic oligonucleotide
ugaacgaugacccuuggca

SEQ ID NO: 3242419 - RNA, 19 nt, Artificial Sequence
  Description of Artificial Sequence: Synthetic oligonucleotide
ucuggaaacucugucaugg

SEQ ID NO: 3242420 - RNA, 19 nt, Artificial Sequence
  Description of Artificial Sequence: Synthetic oligonucleotide
ugacccuuggcaaugaccu

SEQ ID NO: 3242421 - RNA, 19 nt, Artificial Sequence
  Description of Artificial Sequence: Synthetic oligonucleotide
aaugaccugggccaccauc

SEQ ID NO: 3242422 - RNA, 19 nt, Artificial Sequence
  Description of Artificial Sequence: Synthetic oligonucleotide
uuggcaaugaccugggcca

SEQ ID NO: 3242423 - RNA, 19 nt, Artificial Sequence
  Description of Artificial Sequence: Synthetic oligonucleotide
uuucccuucaaagucagug

SEQ ID NO: 3242424 - RNA, 19 nt, Artificial Sequence
  Description of Artificial Sequence: Synthetic oligonucleotide
ucugucauggaaacuugag

SEQ ID NO: 3242425 - RNA, 19 nt, Artificial Sequence
  Description of Artificial Sequence: Synthetic oligonucleotide
uguccuacagagcggagag

SEQ ID NO: 3242426 - RNA, 19 nt, Artificial Sequence
  Description of Artificial Sequence: Synthetic oligonucleotide
aaagucaguggcaacuggg

SEQ ID NO: 3242427 - RNA, 19 nt, Artificial Sequence
  Description of Artificial Sequence: Synthetic oligonucleotide
gaaacucugucauggaaac

SEQ ID NO: 3242428 - RNA, 19 nt, Artificial Sequence
  Description of Artificial Sequence: Synthetic oligonucleotide
agugucuggaaacucuguc

SEQ ID NO: 3242429 - RNA, 19 nt, Artificial Sequence
  Description of Artificial Sequence: Synthetic oligonucleotide
agucaguggcaacugggcc

SEQ ID NO: 3242430 - RNA, 19 nt, Artificial Sequence
  Description of Artificial Sequence: Synthetic oligonucleotide
uucccuucaaagucagugg

SEQ ID NO: 3242431 - RNA, 19 nt, Artificial Sequence
  Description of Artificial Sequence: Synthetic oligonucleotide
cuuggcaaugaccugggcc

SEQ ID NO: 3242432 - RNA, 19 nt, Artificial Sequence
  Description of Artificial Sequence: Synthetic oligonucleotide
aagucaguggcaacugggc

SEQ ID NO: 3242433 - RNA, 19 nt, Artificial Sequence
  Description of Artificial Sequence: Synthetic oligonucleotide
ugggcucuguccuacagag

SEQ ID NO: 3242434 - RNA, 19 nt, Artificial Sequence
  Description of Artificial Sequence: Synthetic oligonucleotide
ggcucuguccuacagagcg

SEQ ID NO: 3242435 - RNA, 19 nt, Artificial Sequence
  Description of Artificial Sequence: Synthetic oligonucleotide
uacaagucccggaaguagc

SEQ ID NO: 3242436 - RNA, 19 nt, Artificial Sequence
  Description of Artificial Sequence: Synthetic oligonucleotide
uucaaagucaguggcaacu

SEQ ID NO: 3242437 - RNA, 19 nt, Artificial Sequence
  Description of Artificial Sequence: Synthetic oligonucleotide
ugggccaccauccccgugg

SEQ ID NO: 3242438 - RNA, 19 nt, Artificial Sequence
  Description of Artificial Sequence: Synthetic oligonucleotide
agggucagugucuggaaac

SEQ ID NO: 3242439 - RNA, 19 nt, Artificial Sequence
  Description of Artificial Sequence: Synthetic oligonucleotide
aacucugucauggaaacuu

SEQ ID NO: 3242440 - RNA, 19 nt, Artificial Sequence
  Description of Artificial Sequence: Synthetic oligonucleotide
ucccuucaaagucaguggc

SEQ ID NO: 3242441 - RNA, 19 nt, Artificial Sequence
  Description of Artificial Sequence: Synthetic oligonucleotide
ucauggaaacuugagccag

SEQ ID NO: 3242442 - RNA, 19 nt, Artificial Sequence
  Description of Artificial Sequence: Synthetic oligonucleotide
aggaguuucccuucaaagu

SEQ ID NO: 3242443 - RNA, 19 nt, Artificial Sequence
  Description of Artificial Sequence: Synthetic oligonucleotide
aacuugagccaggaguuuc

SEQ ID NO: 3242444 - RNA, 19 nt, Artificial Sequence
  Description of Artificial Sequence: Synthetic oligonucleotide
caggaguuucccuucaaag

SEQ ID NO: 3242445 - RNA, 19 nt, Artificial Sequence
  Description of Artificial Sequence: Synthetic oligonucleotide
ugucuggaaacucugucau

SEQ ID NO: 3242446 - RNA, 19 nt, Artificial Sequence
  Description of Artificial Sequence: Synthetic oligonucleotide
ucagugucuggaaacucug

SEQ ID NO: 3242447 - RNA, 19 nt, Artificial Sequence
  Description of Artificial Sequence: Synthetic oligonucleotide
cugucauggaaacuugagc

SEQ ID NO: 3242448 - RNA, 19 nt, Artificial Sequence
  Description of Artificial Sequence: Synthetic oligonucleotide
augaccugggccaccaucc

SEQ ID NO: 3242449 - RNA, 19 nt, Artificial Sequence
  Description of Artificial Sequence: Synthetic oligonucleotide
agagcggagagcucccugg

SEQ ID NO: 3242450 - RNA, 19 nt, Artificial Sequence
  Description of Artificial Sequence: Synthetic oligonucleotide
aacugggccuggcuccacc

SEQ ID NO: 3242451 - RNA, 19 nt, Artificial Sequence
  Description of Artificial Sequence: Synthetic oligonucleotide
uccuacagagcggagagcu

SEQ ID NO: 3242452 - RNA, 19 nt, Artificial Sequence
  Description of Artificial Sequence: Synthetic oligonucleotide
ucggaguggggucugguga

SEQ ID NO: 3242453 - RNA, 19 nt, Artificial Sequence
  Description of Artificial Sequence: Synthetic oligonucleotide
ucugucuucggaguggggu

SEQ ID NO: 3242454 - RNA, 19 nt, Artificial Sequence
  Description of Artificial Sequence: Synthetic oligonucleotide
auccccgugggcucugucc

SEQ ID NO: 3242455 - RNA, 19 nt, Artificial Sequence
  Description of Artificial Sequence: Synthetic oligonucleotide
uggaaacucugucauggaa

SEQ ID NO: 3242456 - RNA, 19 nt, Artificial Sequence
  Description of Artificial Sequence: Synthetic oligonucleotide
aacgaugacccuuggcaau

SEQ ID NO: 3242457 - RNA, 19 nt, Artificial Sequence
  Description of Artificial Sequence: Synthetic oligonucleotide
uggugaacgaugacccuug

SEQ ID NO: 3242458 - RNA, 19 nt, Artificial Sequence
  Description of Artificial Sequence: Synthetic oligonucleotide
aagucccggaaguagccca

SEQ ID NO: 3242459 - RNA, 19 nt, Artificial Sequence
  Description of Artificial Sequence: Synthetic oligonucleotide
agcccagagugucaggguc

SEQ ID NO: 3242460 - RNA, 19 nt, Artificial Sequence
  Description of Artificial Sequence: Synthetic oligonucleotide
gucuggugaacgaugaccc

SEQ ID NO: 3242461 - RNA, 19 nt, Artificial Sequence
  Description of Artificial Sequence: Synthetic oligonucleotide
augacccuuggcaaugacc

SEQ ID NO: 3242462 - RNA, 19 nt, Artificial Sequence
  Description of Artificial Sequence: Synthetic oligonucleotide
cuacagagcggagagcucc

SEQ ID NO: 3242463 - RNA, 19 nt, Artificial Sequence
  Description of Artificial Sequence: Synthetic oligonucleotide
ggaguuucccuucaaaguc

SEQ ID NO: 3242464 - RNA, 19 nt, Artificial Sequence
  Description of Artificial Sequence: Synthetic oligonucleotide
guagcccagagugucaggg

SEQ ID NO: 3242465 - RNA, 19 nt, Artificial Sequence
  Description of Artificial Sequence: Synthetic oligonucleotide
acaagucccggaaguagcc

SEQ ID NO: 3242466 - RNA, 19 nt, Artificial Sequence
  Description of Artificial Sequence: Synthetic oligonucleotide
ucaaagucaguggcaacug

SEQ ID NO: 3242467 - RNA, 19 nt, Artificial Sequence
  Description of Artificial Sequence: Synthetic oligonucleotide
aaguagcccagagugucag

SEQ ID NO: 3242468 - RNA, 19 nt, Artificial Sequence
  Description of Artificial Sequence: Synthetic oligonucleotide
caaagucaguggcaacugg

SEQ ID NO: 3242469 - RNA, 19 nt, Artificial Sequence
  Description of Artificial Sequence: Synthetic oligonucleotide
agguacaagucccggaagu

SEQ ID NO: 3242470 - RNA, 19 nt, Artificial Sequence
  Description of Artificial Sequence: Synthetic oligonucleotide
ggaaacuugagccaggagu

SEQ ID NO: 3242471 - RNA, 19 nt, Artificial Sequence
  Description of Artificial Sequence: Synthetic oligonucleotide
ugagccaggaguuucccuu

SEQ ID NO: 3242472 - RNA, 19 nt, Artificial Sequence
  Description of Artificial Sequence: Synthetic oligonucleotide
cagagugucagggucagug

SEQ ID NO: 3242473 - RNA, 19 nt, Artificial Sequence
  Description of Artificial Sequence: Synthetic oligonucleotide
cauggaaacuugagccagg

SEQ ID NO: 3242474 - RNA, 19 nt, Artificial Sequence
  Description of Artificial Sequence: Synthetic oligonucleotide
acuugagccaggaguuucc

SEQ ID NO: 3242475 - RNA, 19 nt, Artificial Sequence
  Description of Artificial Sequence: Synthetic oligonucleotide
uuggucugucuucggagug

SEQ ID NO: 3242476 - RNA, 19 nt, Artificial Sequence
  Description of Artificial Sequence: Synthetic oligonucleotide
acccuuggcaaugaccugg

SEQ ID NO: 3242477 - RNA, 19 nt, Artificial Sequence
  Description of Artificial Sequence: Synthetic oligonucleotide
uggggucuggugaacgaug

SEQ ID NO: 3242478 - RNA, 19 nt, Artificial Sequence
  Description of Artificial Sequence: Synthetic oligonucleotide
guacaagucccggaaguag

SEQ ID NO: 3242479 - RNA, 19 nt, Artificial Sequence
  Description of Artificial Sequence: Synthetic oligonucleotide
uggaaacuugagccaggag

SEQ ID NO: 3242480 - RNA, 19 nt, Artificial Sequence
  Description of Artificial Sequence: Synthetic oligonucleotide
gucauggaaacuugagcca

SEQ ID NO: 3242481 - RNA, 19 nt, Artificial Sequence
  Description of Artificial Sequence: Synthetic oligonucleotide
ccggaaguagcccagagug

SEQ ID NO: 3242482 - RNA, 19 nt, Artificial Sequence
  Description of Artificial Sequence: Synthetic oligonucleotide
gaacgaugacccuuggcaa

SEQ ID NO: 3242483 - RNA, 19 nt, Artificial Sequence
  Description of Artificial Sequence: Synthetic oligonucleotide
gaggcuggcagguacaagu

SEQ ID NO: 3242484 - RNA, 19 nt, Artificial Sequence
  Description of Artificial Sequence: Synthetic oligonucleotide
gugucuggaaacucuguca

SEQ ID NO: 3242485 - RNA, 19 nt, Artificial Sequence
  Description of Artificial Sequence: Synthetic oligonucleotide
uggucugucuucggagugg

SEQ ID NO: 3242486 - RNA, 19 nt, Artificial Sequence
  Description of Artificial Sequence: Synthetic oligonucleotide
gagugucagggucaguguc

SEQ ID NO: 3242487 - RNA, 19 nt, Artificial Sequence
  Description of Artificial Sequence: Synthetic oligonucleotide
gagcguuggucugucuucg

SEQ ID NO: 3242488 - RNA, 19 nt, Artificial Sequence
  Description of Artificial Sequence: Synthetic oligonucleotide
cuggcagguacaagucccg

SEQ ID NO: 3242489 - RNA, 19 nt, Artificial Sequence
  Description of Artificial Sequence: Synthetic oligonucleotide
ucaguggcaacugggccug

SEQ ID NO: 3242490 - RNA, 19 nt, Artificial Sequence
  Description of Artificial Sequence: Synthetic oligonucleotide
uucggaguggggucuggug

SEQ ID NO: 3242491 - RNA, 19 nt, Artificial Sequence
  Description of Artificial Sequence: Synthetic oligonucleotide
agagugucagggucagugu

SEQ ID NO: 3242492 - RNA, 19 nt, Artificial Sequence
  Description of Artificial Sequence: Synthetic oligonucleotide
ugggagguagcgagcguug

SEQ ID NO: 3242493 - RNA, 19 nt, Artificial Sequence
  Description of Artificial Sequence: Synthetic oligonucleotide
uacagagcggagagcuccc

SEQ ID NO: 3242494 - RNA, 19 nt, Artificial Sequence
  Description of Artificial Sequence: Synthetic oligonucleotide
ggucuggugaacgaugacc

SEQ ID NO: 3242495 - RNA, 19 nt, Artificial Sequence
  Description of Artificial Sequence: Synthetic oligonucleotide
ucccggaaguagcccagag

SEQ ID NO: 3242496 - RNA, 19 nt, Artificial Sequence
  Description of Artificial Sequence: Synthetic oligonucleotide
cuucaaagucaguggcaac

SEQ ID NO: 3242497 - RNA, 19 nt, Artificial Sequence
  Description of Artificial Sequence: Synthetic oligonucleotide
aguagcccagagugucagg

SEQ ID NO: 3242498 - RNA, 19 nt, Artificial Sequence
  Description of Artificial Sequence: Synthetic oligonucleotide
gaguuucccuucaaaguca

SEQ ID NO: 3242499 - RNA, 19 nt, Artificial Sequence
  Description of Artificial Sequence: Synthetic oligonucleotide
gaaacuugagccaggaguu

SEQ ID NO: 3242500 - RNA, 19 nt, Artificial Sequence
  Description of Artificial Sequence: Synthetic oligonucleotide
aguuucccuucaaagucag

SEQ ID NO: 3242501 - RNA, 19 nt, Artificial Sequence
  Description of Artificial Sequence: Synthetic oligonucleotide
uccccgugggcucuguccu

SEQ ID NO: 3242502 - RNA, 19 nt, Artificial Sequence
  Description of Artificial Sequence: Synthetic oligonucleotide
aaacucugucauggaaacu

SEQ ID NO: 3242503 - RNA, 19 nt, Artificial Sequence
  Description of Artificial Sequence: Synthetic oligonucleotide
ucuggugaacgaugacccu

SEQ ID NO: 3242504 - RNA, 19 nt, Artificial Sequence
  Description of Artificial Sequence: Synthetic oligonucleotide
gaguggggucuggugaacg

SEQ ID NO: 3242505 - RNA, 19 nt, Artificial Sequence
  Description of Artificial Sequence: Synthetic oligonucleotide
ucuguccuacagagcggag

SEQ ID NO: 3242506 - RNA, 19 nt, Artificial Sequence
  Description of Artificial Sequence: Synthetic oligonucleotide
gagguagcgagcguugguc

SEQ ID NO: 3242507 - RNA, 19 nt, Artificial Sequence
  Description of Artificial Sequence: Synthetic oligonucleotide
accugggccaccauccccg

SEQ ID NO: 3242508 - RNA, 19 nt, Artificial Sequence
  Description of Artificial Sequence: Synthetic oligonucleotide
gugaacgaugacccuuggc

SEQ ID NO: 3242509 - RNA, 19 nt, Artificial Sequence
  Description of Artificial Sequence: Synthetic oligonucleotide
agguagcgagcguuggucu

SEQ ID NO: 3242510 - RNA, 19 nt, Artificial Sequence
  Description of Artificial Sequence: Synthetic oligonucleotide
uggcaacugggccuggcuc

SEQ ID NO: 3242511 - RNA, 19 nt, Artificial Sequence
  Description of Artificial Sequence: Synthetic oligonucleotide
cugucuucggagugggguc

SEQ ID NO: 3242512 - RNA, 19 nt, Artificial Sequence
  Description of Artificial Sequence: Synthetic oligonucleotide
aguggggucuggugaacga

SEQ ID NO: 3242513 - RNA, 19 nt, Artificial Sequence
  Description of Artificial Sequence: Synthetic oligonucleotide
gagagcucccuggaggcug

SEQ ID NO: 3242514 - RNA, 19 nt, Artificial Sequence
  Description of Artificial Sequence: Synthetic oligonucleotide
gcggagagcucccuggagg

SEQ ID NO: 3242515 - RNA, 19 nt, Artificial Sequence
  Description of Artificial Sequence: Synthetic oligonucleotide
ugaccugggccaccauccc

SEQ ID NO: 3242516 - RNA, 19 nt, Artificial Sequence
  Description of Artificial Sequence: Synthetic oligonucleotide
cucccuggaggcuggcagg

SEQ ID NO: 3242517 - RNA, 19 nt, Artificial Sequence
  Description of Artificial Sequence: Synthetic oligonucleotide
uaauaaaagaaacauagaa

SEQ ID NO: 3242518 - RNA, 19 nt, Artificial Sequence
  Description of Artificial Sequence: Synthetic oligonucleotide
ucugaaauuucaaaagugg

SEQ ID NO: 3242519 - RNA, 19 nt, Artificial Sequence
  Description of Artificial Sequence: Synthetic oligonucleotide
uaagucacagaacacaacg

SEQ ID NO: 3242520 - RNA, 19 nt, Artificial Sequence
  Description of Artificial Sequence: Synthetic oligonucleotide
aaagauauaacuccuugcu

SEQ ID NO: 3242521 - RNA, 19 nt, Artificial Sequence
  Description of Artificial Sequence: Synthetic oligonucleotide
ugaaauuucaaaaguggag

SEQ ID NO: 3242522 - RNA, 19 nt, Artificial Sequence
  Description of Artificial Sequence: Synthetic oligonucleotide
agauauaacuccuugcuuc

SEQ ID NO: 3242523 - RNA, 19 nt, Artificial Sequence
  Description of Artificial Sequence: Synthetic oligonucleotide
agaaacauagaagauauuc

SEQ ID NO: 3242524 - RNA, 19 nt, Artificial Sequence
  Description of Artificial Sequence: Synthetic oligonucleotide
gaagauauucuccacagug

SEQ ID NO: 3242525 - RNA, 19 nt, Artificial Sequence
  Description of Artificial Sequence: Synthetic oligonucleotide
uuaguuggcucuaauauug

SEQ ID NO: 3242526 - RNA, 19 nt, Artificial Sequence
  Description of Artificial Sequence: Synthetic oligonucleotide
acaaacucaaaauaggaca

SEQ ID NO: 3242527 - RNA, 19 nt, Artificial Sequence
  Description of Artificial Sequence: Synthetic oligonucleotide
uguacauuguagaugagcu

SEQ ID NO: 3242528 - RNA, 19 nt, Artificial Sequence
  Description of Artificial Sequence: Synthetic oligonucleotide
ucaaaauaggacacugggg

SEQ ID NO: 3242529 - RNA, 19 nt, Artificial Sequence
  Description of Artificial Sequence: Synthetic oligonucleotide
cauaucagaguuuaacugc

SEQ ID NO: 3242530 - RNA, 19 nt, Artificial Sequence
  Description of Artificial Sequence: Synthetic oligonucleotide
aaaagcucauaucagaguu

SEQ ID NO: 3242531 - RNA, 19 nt, Artificial Sequence
  Description of Artificial Sequence: Synthetic oligonucleotide
uuagcaugcauguccagcg

SEQ ID NO: 3242532 - RNA, 19 nt, Artificial Sequence
  Description of Artificial Sequence: Synthetic oligonucleotide
aauauuggcagucugucuu

SEQ ID NO: 3242533 - RNA, 19 nt, Artificial Sequence
  Description of Artificial Sequence: Synthetic oligonucleotide
aaaaccaggaacugggcgu

SEQ ID NO: 3242534 - RNA, 19 nt, Artificial Sequence
  Description of Artificial Sequence: Synthetic oligonucleotide
aagauauucuccacagugc

SEQ ID NO: 3242535 - RNA, 19 nt, Artificial Sequence
  Description of Artificial Sequence: Synthetic oligonucleotide
ugcuguacauuguagauga

SEQ ID NO: 3242536 - RNA, 19 nt, Artificial Sequence
  Description of Artificial Sequence: Synthetic oligonucleotide
ucccuuauaauaaaagaaa

SEQ ID NO: 3242537 - RNA, 19 nt, Artificial Sequence
  Description of Artificial Sequence: Synthetic oligonucleotide
uuggcucuaauauuggcag

SEQ ID NO: 3242538 - RNA, 19 nt, Artificial Sequence
  Description of Artificial Sequence: Synthetic oligonucleotide
ucuuccacccaauucaggc

SEQ ID NO: 3242539 - RNA, 19 nt, Artificial Sequence
  Description of Artificial Sequence: Synthetic oligonucleotide
uuugggucaaccacaaacu

SEQ ID NO: 3242540 - RNA, 19 nt, Artificial Sequence
  Description of Artificial Sequence: Synthetic oligonucleotide
ugaucauagccucugaaau

SEQ ID NO: 3242541 - RNA, 19 nt, Artificial Sequence
  Description of Artificial Sequence: Synthetic oligonucleotide
guuugggucaaccacaaac

SEQ ID NO: 3242542 - RNA, 19 nt, Artificial Sequence
  Description of Artificial Sequence: Synthetic oligonucleotide
gauauaacuccuugcuucc

SEQ ID NO: 3242543 - RNA, 19 nt, Artificial Sequence
  Description of Artificial Sequence: Synthetic oligonucleotide
cuuuacccagaucagaggc

SEQ ID NO: 3242544 - RNA, 19 nt, Artificial Sequence
  Description of Artificial Sequence: Synthetic oligonucleotide
aaugaguuugggucaacca

SEQ ID NO: 3242545 - RNA, 19 nt, Artificial Sequence
  Description of Artificial Sequence: Synthetic oligonucleotide
aguagguuugcagcaaucc

SEQ ID NO: 3242546 - RNA, 19 nt, Artificial Sequence
  Description of Artificial Sequence: Synthetic oligonucleotide
auuagcaugcauguccagc

SEQ ID NO: 3242547 - RNA, 19 nt, Artificial Sequence
  Description of Artificial Sequence: Synthetic oligonucleotide
auaacuccuugcuuccugc

SEQ ID NO: 3242548 - RNA, 19 nt, Artificial Sequence
  Description of Artificial Sequence: Synthetic oligonucleotide
aaaaguggagacaauauuu

SEQ ID NO: 3242549 - RNA, 19 nt, Artificial Sequence
  Description of Artificial Sequence: Synthetic oligonucleotide
aggaacagggaucacuuuc

SEQ ID NO: 3242550 - RNA, 19 nt, Artificial Sequence
  Description of Artificial Sequence: Synthetic oligonucleotide
aucgggguacuuuugaaag

SEQ ID NO: 3242551 - RNA, 19 nt, Artificial Sequence
  Description of Artificial Sequence: Synthetic oligonucleotide
ucugguucugcucacgcca

SEQ ID NO: 3242552 - RNA, 19 nt, Artificial Sequence
  Description of Artificial Sequence: Synthetic oligonucleotide
ucuuguaaacucaaagaua

SEQ ID NO: 3242553 - RNA, 19 nt, Artificial Sequence
  Description of Artificial Sequence: Synthetic oligonucleotide
cagaucagaggccaaaacc

SEQ ID NO: 3242554 - RNA, 19 nt, Artificial Sequence
  Description of Artificial Sequence: Synthetic oligonucleotide
uacuuuugaaaguagguuu

SEQ ID NO: 3242555 - RNA, 19 nt, Artificial Sequence
  Description of Artificial Sequence: Synthetic oligonucleotide
aacagggaucacuuucuuc

SEQ ID NO: 3242556 - RNA, 19 nt, Artificial Sequence
  Description of Artificial Sequence: Synthetic oligonucleotide
uucaggcccacaaacacca

SEQ ID NO: 3242557 - RNA, 19 nt, Artificial Sequence
  Description of Artificial Sequence: Synthetic oligonucleotide
uuugcagcaaucccaagau

SEQ ID NO: 3242558 - RNA, 19 nt, Artificial Sequence
  Description of Artificial Sequence: Synthetic oligonucleotide
agucacagaacacaacgug

SEQ ID NO: 3242559 - RNA, 19 nt, Artificial Sequence
  Description of Artificial Sequence: Synthetic oligonucleotide
ucgucagagcaacaguccg

SEQ ID NO: 3242560 - RNA, 19 nt, Artificial Sequence
  Description of Artificial Sequence: Synthetic oligonucleotide
uuugccuuuucuuuaccca

SEQ ID NO: 3242561 - RNA, 19 nt, Artificial Sequence
  Description of Artificial Sequence: Synthetic oligonucleotide
aucgcagucgcucagcucu

SEQ ID NO: 3242562 - RNA, 19 nt, Artificial Sequence
  Description of Artificial Sequence: Synthetic oligonucleotide
ucuuuacccagaucagagg

SEQ ID NO: 3242563 - RNA, 19 nt, Artificial Sequence
  Description of Artificial Sequence: Synthetic oligonucleotide
ugauuagcaugcaugucca

SEQ ID NO: 3242564 - RNA, 19 nt, Artificial Sequence
  Description of Artificial Sequence: Synthetic oligonucleotide
cacaaacucaaaauaggac

SEQ ID NO: 3242565 - RNA, 19 nt, Artificial Sequence
  Description of Artificial Sequence: Synthetic oligonucleotide
caaaaccaggaacugggcg

SEQ ID NO: 3242566 - RNA, 19 nt, Artificial Sequence
  Description of Artificial Sequence: Synthetic oligonucleotide
uauaacuccuugcuuccug

SEQ ID NO: 3242567 - RNA, 19 nt, Artificial Sequence
  Description of Artificial Sequence: Synthetic oligonucleotide
auggugucaucgcagucgc

SEQ ID NO: 3242568 - RNA, 19 nt, Artificial Sequence
  Description of Artificial Sequence: Synthetic oligonucleotide
aguuuaacugcuuugccuu

SEQ ID NO: 3242569 - RNA, 19 nt, Artificial Sequence
  Description of Artificial Sequence: Synthetic oligonucleotide
uuuacccagaucagaggcc

SEQ ID NO: 3242570 - RNA, 19 nt, Artificial Sequence
  Description of Artificial Sequence: Synthetic oligonucleotide
uccacugccagcuccagga

SEQ ID NO: 3242571 - RNA, 19 nt, Artificial Sequence
  Description of Artificial Sequence: Synthetic oligonucleotide
uuccacccaauucaggccc

SEQ ID NO: 3242572 - RNA, 19 nt, Artificial Sequence
  Description of Artificial Sequence: Synthetic oligonucleotide
cuuauaauaaaagaaacau

SEQ ID NO: 3242573 - RNA, 19 nt, Artificial Sequence
  Description of Artificial Sequence: Synthetic oligonucleotide
accacaaacucaaaauagg

SEQ ID NO: 3242574 - RNA, 19 nt, Artificial Sequence
  Description of Artificial Sequence: Synthetic oligonucleotide
uugaucauagccucugaaa

SEQ ID NO: 3242575 - RNA, 19 nt, Artificial Sequence
  Description of Artificial Sequence: Synthetic oligonucleotide
ugcgagagaaugaguuugg

SEQ ID NO: 3242576 - RNA, 19 nt, Artificial Sequence
  Description of Artificial Sequence: Synthetic oligonucleotide
agcgcauccaggauguugc

SEQ ID NO: 3242577 - RNA, 19 nt, Artificial Sequence
  Description of Artificial Sequence: Synthetic oligonucleotide
aagauauaacuccuugcuu

SEQ ID NO: 3242578 - RNA, 19 nt, Artificial Sequence
  Description of Artificial Sequence: Synthetic oligonucleotide
uuugaucauagccucugaa

SEQ ID NO: 3242579 - RNA, 19 nt, Artificial Sequence
  Description of Artificial Sequence: Synthetic oligonucleotide
uccugauuagcaugcaugu

SEQ ID NO: 3242580 - RNA, 19 nt, Artificial Sequence
  Description of Artificial Sequence: Synthetic oligonucleotide
gaacugggcgucaagggcg

SEQ ID NO: 3242581 - RNA, 19 nt, Artificial Sequence
  Description of Artificial Sequence: Synthetic oligonucleotide
uccugccauaggaacaggg

SEQ ID NO: 3242582 - RNA, 19 nt, Artificial Sequence
  Description of Artificial Sequence: Synthetic oligonucleotide
caaaauaggacacuggggu

SEQ ID NO: 3242583 - RNA, 19 nt, Artificial Sequence
  Description of Artificial Sequence: Synthetic oligonucleotide
aaucuuuagcaugaguuuu

SEQ ID NO: 3242584 - RNA, 19 nt, Artificial Sequence
  Description of Artificial Sequence: Synthetic oligonucleotide
cugaaauuucaaaagugga

SEQ ID NO: 3242585 - RNA, 19 nt, Artificial Sequence
  Description of Artificial Sequence: Synthetic oligonucleotide
aaaauaggacacuggggua

SEQ ID NO: 3242586 - RNA, 19 nt, Artificial Sequence
  Description of Artificial Sequence: Synthetic oligonucleotide
agaucagaggccaaaacca

SEQ ID NO: 3242587 - RNA, 19 nt, Artificial Sequence
  Description of Artificial Sequence: Synthetic oligonucleotide
cagagcaacaguccgggcc

SEQ ID NO: 3242588 - RNA, 19 nt, Artificial Sequence
  Description of Artificial Sequence: Synthetic oligonucleotide
ugagcugucgguacugccu

SEQ ID NO: 3242589 - RNA, 19 nt, Artificial Sequence
  Description of Artificial Sequence: Synthetic oligonucleotide
acauuggcuuccuccaggg

SEQ ID NO: 3242590 - RNA, 19 nt, Artificial Sequence
  Description of Artificial Sequence: Synthetic oligonucleotide
aaacaccaacaguaaguca

SEQ ID NO: 3242591 - RNA, 19 nt, Artificial Sequence
  Description of Artificial Sequence: Synthetic oligonucleotide
cugguuaacguuaguuggc

SEQ ID NO: 3242592 - RNA, 19 nt, Artificial Sequence
  Description of Artificial Sequence: Synthetic oligonucleotide
uuuucugucgucuccugau

SEQ ID NO: 3242593 - RNA, 19 nt, Artificial Sequence
  Description of Artificial Sequence: Synthetic oligonucleotide
ucuguccacugccagcucc

SEQ ID NO: 3242594 - RNA, 19 nt, Artificial Sequence
  Description of Artificial Sequence: Synthetic oligonucleotide
aggagguccgggugcaugc

SEQ ID NO: 3242595 - RNA, 19 nt, Artificial Sequence
  Description of Artificial Sequence: Synthetic oligonucleotide
aaaguagguuugcagcaau

SEQ ID NO: 3242596 - RNA, 19 nt, Artificial Sequence
  Description of Artificial Sequence: Synthetic oligonucleotide
aaaccaggaacugggcguc

SEQ ID NO: 3242597 - RNA, 19 nt, Artificial Sequence
  Description of Artificial Sequence: Synthetic oligonucleotide
cuugcuuccugccauagga

SEQ ID NO: 3242598 - RNA, 19 nt, Artificial Sequence
  Description of Artificial Sequence: Synthetic oligonucleotide
cauagaagauauucuccac

SEQ ID NO: 3242599 - RNA, 19 nt, Artificial Sequence
  Description of Artificial Sequence: Synthetic oligonucleotide
gauguugcuuccuucugca

SEQ ID NO: 3242600 - RNA, 19 nt, Artificial Sequence
  Description of Artificial Sequence: Synthetic oligonucleotide
acuuuugaaaguagguuug

SEQ ID NO: 3242601 - RNA, 19 nt, Artificial Sequence
  Description of Artificial Sequence: Synthetic oligonucleotide
cuaauauuggcagucuguc

SEQ ID NO: 3242602 - RNA, 19 nt, Artificial Sequence
  Description of Artificial Sequence: Synthetic oligonucleotide
cuguacauuguagaugagc

SEQ ID NO: 3242603 - RNA, 19 nt, Artificial Sequence
  Description of Artificial Sequence: Synthetic oligonucleotide
gggaucacuuucuucaucc

SEQ ID NO: 3242604 - RNA, 19 nt, Artificial Sequence
  Description of Artificial Sequence: Synthetic oligonucleotide
uaauauuggcagucugucu

SEQ ID NO: 3242605 - RNA, 19 nt, Artificial Sequence
  Description of Artificial Sequence: Synthetic oligonucleotide
guuugcagcaaucccaaga

SEQ ID NO: 3242606 - RNA, 19 nt, Artificial Sequence
  Description of Artificial Sequence: Synthetic oligonucleotide
cacgccaucaaacagcaca

SEQ ID NO: 3242607 - RNA, 19 nt, Artificial Sequence
  Description of Artificial Sequence: Synthetic oligonucleotide
aauaggacacugggguauc

SEQ ID NO: 3242608 - RNA, 19 nt, Artificial Sequence
  Description of Artificial Sequence: Synthetic oligonucleotide
auucaggcccacaaacacc

SEQ ID NO: 3242609 - RNA, 19 nt, Artificial Sequence
  Description of Artificial Sequence: Synthetic oligonucleotide
aucccuuauaauaaaagaa

SEQ ID NO: 3242610 - RNA, 19 nt, Artificial Sequence
  Description of Artificial Sequence: Synthetic oligonucleotide
aggacacugggguaucggg

SEQ ID NO: 3242611 - RNA, 19 nt, Artificial Sequence
  Description of Artificial Sequence: Synthetic oligonucleotide
ugccauaggaacagggauc

SEQ ID NO: 3242612 - RNA, 19 nt, Artificial Sequence
  Description of Artificial Sequence: Synthetic oligonucleotide
agcacauuggcuuccucca

SEQ ID NO: 3242613 - RNA, 19 nt, Artificial Sequence
  Description of Artificial Sequence: Synthetic oligonucleotide
cagcacauuggcuuccucc

SEQ ID NO: 3242614 - RNA, 19 nt, Artificial Sequence
  Description of Artificial Sequence: Synthetic oligonucleotide
ugucgucuccugauuagca

SEQ ID NO: 3242615 - RNA, 19 nt, Artificial Sequence
  Description of Artificial Sequence: Synthetic oligonucleotide
uggcagucugucuugguca

SEQ ID NO: 3242616 - RNA, 19 nt, Artificial Sequence
  Description of Artificial Sequence: Synthetic oligonucleotide
caaacaccaacaguaaguc

SEQ ID NO: 3242617 - RNA, 19 nt, Artificial Sequence
  Description of Artificial Sequence: Synthetic oligonucleotide
aaagaaacaagcuugcagu

SEQ ID NO: 3242618 - RNA, 19 nt, Artificial Sequence
  Description of Artificial Sequence: Synthetic oligonucleotide
uccaguucaggcaaggugg

SEQ ID NO: 3242619 - RNA, 19 nt, Artificial Sequence
  Description of Artificial Sequence: Synthetic oligonucleotide
accuuguagaugcagaugg

SEQ ID NO: 3242620 - RNA, 19 nt, Artificial Sequence
  Description of Artificial Sequence: Synthetic oligonucleotide
aguuuggccuuccacaggc

SEQ ID NO: 3242621 - RNA, 19 nt, Artificial Sequence
  Description of Artificial Sequence: Synthetic oligonucleotide
aagucucgaaacugguucc

SEQ ID NO: 3242622 - RNA, 19 nt, Artificial Sequence
  Description of Artificial Sequence: Synthetic oligonucleotide
ucucgaagcugacugaagg

SEQ ID NO: 3242623 - RNA, 19 nt, Artificial Sequence
  Description of Artificial Sequence: Synthetic oligonucleotide
gacaaggcguccuagagcc

SEQ ID NO: 3242624 - RNA, 19 nt, Artificial Sequence
  Description of Artificial Sequence: Synthetic oligonucleotide
aagaaacaagcuugcaguc

SEQ ID NO: 3242625 - RNA, 19 nt, Artificial Sequence
  Description of Artificial Sequence: Synthetic oligonucleotide
guaguugccuuccaggugg

SEQ ID NO: 3242626 - RNA, 19 nt, Artificial Sequence
  Description of Artificial Sequence: Synthetic oligonucleotide
aagguggucaugaacuugc

SEQ ID NO: 3242627 - RNA, 19 nt, Artificial Sequence
  Description of Artificial Sequence: Synthetic oligonucleotide
cuugcagucggccaggucc

SEQ ID NO: 3242628 - RNA, 19 nt, Artificial Sequence
  Description of Artificial Sequence: Synthetic oligonucleotide
uggguugagacguagguug

SEQ ID NO: 3242629 - RNA, 19 nt, Artificial Sequence
  Description of Artificial Sequence: Synthetic oligonucleotide
gauggggaaagaaacaagc

SEQ ID NO: 3242630 - RNA, 19 nt, Artificial Sequence
  Description of Artificial Sequence: Synthetic oligonucleotide
gaagucucgaaacugguuc

SEQ ID NO: 3242631 - RNA, 19 nt, Artificial Sequence
  Description of Artificial Sequence: Synthetic oligonucleotide
uaucucauucuccuccagg

SEQ ID NO: 3242632 - RNA, 19 nt, Artificial Sequence
  Description of Artificial Sequence: Synthetic oligonucleotide
agggagugcguccuaaggc

SEQ ID NO: 3242633 - RNA, 19 nt, Artificial Sequence
  Description of Artificial Sequence: Synthetic oligonucleotide
uccacuaucucauucuccu

SEQ ID NO: 3242634 - RNA, 19 nt, Artificial Sequence
  Description of Artificial Sequence: Synthetic oligonucleotide
aaacuugaugaguggcggg

SEQ ID NO: 3242635 - RNA, 19 nt, Artificial Sequence
  Description of Artificial Sequence: Synthetic oligonucleotide
agguccaagguaucggagc

SEQ ID NO: 3242636 - RNA, 19 nt, Artificial Sequence
  Description of Artificial Sequence: Synthetic oligonucleotide
gagguaguugccuuccagg

SEQ ID NO: 3242637 - RNA, 19 nt, Artificial Sequence
  Description of Artificial Sequence: Synthetic oligonucleotide
ucacaaaggggucugugca

SEQ ID NO: 3242638 - RNA, 19 nt, Artificial Sequence
  Description of Artificial Sequence: Synthetic oligonucleotide
aggcaaggugguuagcugc

SEQ ID NO: 3242639 - RNA, 19 nt, Artificial Sequence
  Description of Artificial Sequence: Synthetic oligonucleotide
gacuugaguucauuguuag

SEQ ID NO: 3242640 - RNA, 19 nt, Artificial Sequence
  Description of Artificial Sequence: Synthetic oligonucleotide
aacuugaugaguggcgggg

SEQ ID NO: 3242641 - RNA, 19 nt, Artificial Sequence
  Description of Artificial Sequence: Synthetic oligonucleotide
ucagcaugcagacgugggg

SEQ ID NO: 3242642 - RNA, 19 nt, Artificial Sequence
  Description of Artificial Sequence: Synthetic oligonucleotide
aggccgguagccuuugucc

SEQ ID NO: 3242643 - RNA, 19 nt, Artificial Sequence
  Description of Artificial Sequence: Synthetic oligonucleotide
uccacugucucguugacuc

SEQ ID NO: 3242644 - RNA, 19 nt, Artificial Sequence
  Description of Artificial Sequence: Synthetic oligonucleotide
augaggaggaucuggucgg

SEQ ID NO: 3242645 - RNA, 19 nt, Artificial Sequence
  Description of Artificial Sequence: Synthetic oligonucleotide
acguagguugaugacacgc

SEQ ID NO: 3242646 - RNA, 19 nt, Artificial Sequence
  Description of Artificial Sequence: Synthetic oligonucleotide
augaacuugcuggugaggg

SEQ ID NO: 3242647 - RNA, 19 nt, Artificial Sequence
  Description of Artificial Sequence: Synthetic oligonucleotide
acuugaguucauuguuagc

SEQ ID NO: 3242648 - RNA, 19 nt, Artificial Sequence
  Description of Artificial Sequence: Synthetic oligonucleotide
uucauuggggaggcgaugg

SEQ ID NO: 3242649 - RNA, 19 nt, Artificial Sequence
  Description of Artificial Sequence: Synthetic oligonucleotide
uugagacguagguugauga

SEQ ID NO: 3242650 - RNA, 19 nt, Artificial Sequence
  Description of Artificial Sequence: Synthetic oligonucleotide
gaugacgcgcaccucggcg

SEQ ID NO: 3242651 - RNA, 19 nt, Artificial Sequence
  Description of Artificial Sequence: Synthetic oligonucleotide
ugcaacucuggccacggcc

SEQ ID NO: 3242652 - RNA, 19 nt, Artificial Sequence
  Description of Artificial Sequence: Synthetic oligonucleotide
uuccgggacaggucgaugg

SEQ ID NO: 3242653 - RNA, 19 nt, Artificial Sequence
  Description of Artificial Sequence: Synthetic oligonucleotide
uagggagugcguccuaagg

SEQ ID NO: 3242654 - RNA, 19 nt, Artificial Sequence
  Description of Artificial Sequence: Synthetic oligonucleotide
cuuguagaugcagaugggg

SEQ ID NO: 3242655 - RNA, 19 nt, Artificial Sequence
  Description of Artificial Sequence: Synthetic oligonucleotide
uagccuuugucccuugccc

SEQ ID NO: 3242656 - RNA, 19 nt, Artificial Sequence
  Description of Artificial Sequence: Synthetic oligonucleotide
caaacuugaugaguggcgg

SEQ ID NO: 3242657 - RNA, 19 nt, Artificial Sequence
  Description of Artificial Sequence: Synthetic oligonucleotide
gucucguugacucuccuug

SEQ ID NO: 3242658 - RNA, 19 nt, Artificial Sequence
  Description of Artificial Sequence: Synthetic oligonucleotide
uggggaaagaaacaagcuu

SEQ ID NO: 3242659 - RNA, 19 nt, Artificial Sequence
  Description of Artificial Sequence: Synthetic oligonucleotide
aaguuuggccuuccacagg

SEQ ID NO: 3242660 - RNA, 19 nt, Artificial Sequence
  Description of Artificial Sequence: Synthetic oligonucleotide
agacguagguugaugacac

SEQ ID NO: 3242661 - RNA, 19 nt, Artificial Sequence
  Description of Artificial Sequence: Synthetic oligonucleotide
ucccacuuuacgcugugug

SEQ ID NO: 3242662 - RNA, 19 nt, Artificial Sequence
  Description of Artificial Sequence: Synthetic oligonucleotide
augacgcgcaccucggcgc

SEQ ID NO: 3242663 - RNA, 19 nt, Artificial Sequence
  Description of Artificial Sequence: Synthetic oligonucleotide
caucccucccacuuuacgc

SEQ ID NO: 3242664 - RNA, 19 nt, Artificial Sequence
  Description of Artificial Sequence: Synthetic oligonucleotide
uggagacaugagcauauca

SEQ ID NO: 3242665 - RNA, 19 nt, Artificial Sequence
  Description of Artificial Sequence: Synthetic oligonucleotide
ucugugcagcgacaaggcg

SEQ ID NO: 3242666 - RNA, 19 nt, Artificial Sequence
  Description of Artificial Sequence: Synthetic oligonucleotide
cucacaaaggggucugugc

SEQ ID NO: 3242667 - RNA, 19 nt, Artificial Sequence
  Description of Artificial Sequence: Synthetic oligonucleotide
cugguuccgggacaggucg

SEQ ID NO: 3242668 - RNA, 19 nt, Artificial Sequence
  Description of Artificial Sequence: Synthetic oligonucleotide
aaggugguuagcugcucug

SEQ ID NO: 3242669 - RNA, 19 nt, Artificial Sequence
  Description of Artificial Sequence: Synthetic oligonucleotide
aggcacauccacuaucuca

SEQ ID NO: 3242670 - RNA, 19 nt, Artificial Sequence
  Description of Artificial Sequence: Synthetic oligonucleotide
ucucagguuggcaggccgg

SEQ ID NO: 3242671 - RNA, 19 nt, Artificial Sequence
  Description of Artificial Sequence: Synthetic oligonucleotide
gagggacuugaguucauug

SEQ ID NO: 3242672 - RNA, 19 nt, Artificial Sequence
  Description of Artificial Sequence: Synthetic oligonucleotide
ugugcagcgacaaggcguc

SEQ ID NO: 3242673 - RNA, 19 nt, Artificial Sequence
  Description of Artificial Sequence: Synthetic oligonucleotide
ugguuagcugcucugggaa

SEQ ID NO: 3242674 - RNA, 19 nt, Artificial Sequence
  Description of Artificial Sequence: Synthetic oligonucleotide
auuguuagccagugugaug

SEQ ID NO: 3242675 - RNA, 19 nt, Artificial Sequence
  Description of Artificial Sequence: Synthetic oligonucleotide
agggacuugaguucauugu

SEQ ID NO: 3242676 - RNA, 19 nt, Artificial Sequence
  Description of Artificial Sequence: Synthetic oligonucleotide
aaggcggaguggccugugc

SEQ ID NO: 3242677 - RNA, 19 nt, Artificial Sequence
  Description of Artificial Sequence: Synthetic oligonucleotide
ucuggccacggccucaccc

SEQ ID NO: 3242678 - RNA, 19 nt, Artificial Sequence
  Description of Artificial Sequence: Synthetic oligonucleotide
acuuuacgcuguguggccc

SEQ ID NO: 3242679 - RNA, 19 nt, Artificial Sequence
  Description of Artificial Sequence: Synthetic oligonucleotide
aguucauuguuagccagug

SEQ ID NO: 3242680 - RNA, 19 nt, Artificial Sequence
  Description of Artificial Sequence: Synthetic oligonucleotide
auggagguaguugccuucc

SEQ ID NO: 3242681 - RNA, 19 nt, Artificial Sequence
  Description of Artificial Sequence: Synthetic oligonucleotide
cuugaugaguggcggggcg

SEQ ID NO: 3242682 - RNA, 19 nt, Artificial Sequence
  Description of Artificial Sequence: Synthetic oligonucleotide
uccacaggcacauccacua

SEQ ID NO: 3242683 - RNA, 19 nt, Artificial Sequence
  Description of Artificial Sequence: Synthetic oligonucleotide
gaacuugcuggugagggac

SEQ ID NO: 3242684 - RNA, 19 nt, Artificial Sequence
  Description of Artificial Sequence: Synthetic oligonucleotide
ugagacguagguugaugac

SEQ ID NO: 3242685 - RNA, 19 nt, Artificial Sequence
  Description of Artificial Sequence: Synthetic oligonucleotide
uggucuccaguucaggcaa

SEQ ID NO: 3242686 - RNA, 19 nt, Artificial Sequence
  Description of Artificial Sequence: Synthetic oligonucleotide
ugcccgggugagcauaggg

SEQ ID NO: 3242687 - RNA, 19 nt, Artificial Sequence
  Description of Artificial Sequence: Synthetic oligonucleotide
uggucggagacguuccuca

SEQ ID NO: 3242688 - RNA, 19 nt, Artificial Sequence
  Description of Artificial Sequence: Synthetic oligonucleotide
acuugaugaguggcggggc

SEQ ID NO: 3242689 - RNA, 19 nt, Artificial Sequence
  Description of Artificial Sequence: Synthetic oligonucleotide
guucaggcaaggugguuag

SEQ ID NO: 3242690 - RNA, 19 nt, Artificial Sequence
  Description of Artificial Sequence: Synthetic oligonucleotide
uggccugugcauccucugg

SEQ ID NO: 3242691 - RNA, 19 nt, Artificial Sequence
  Description of Artificial Sequence: Synthetic oligonucleotide
aucggagccgcuuuccacu

SEQ ID NO: 3242692 - RNA, 19 nt, Artificial Sequence
  Description of Artificial Sequence: Synthetic oligonucleotide
cuuagcuucaucccuccca

SEQ ID NO: 3242693 - RNA, 19 nt, Artificial Sequence
  Description of Artificial Sequence: Synthetic oligonucleotide
uccaagguaucggagccgc

SEQ ID NO: 3242694 - RNA, 19 nt, Artificial Sequence
  Description of Artificial Sequence: Synthetic oligonucleotide
ugcguccuaaggcggagug

SEQ ID NO: 3242695 - RNA, 19 nt, Artificial Sequence
  Description of Artificial Sequence: Synthetic oligonucleotide
guagccuuugucccuugcc

SEQ ID NO: 3242696 - RNA, 19 nt, Artificial Sequence
  Description of Artificial Sequence: Synthetic oligonucleotide
gucgauggccuugaggugc

SEQ ID NO: 3242697 - RNA, 19 nt, Artificial Sequence
  Description of Artificial Sequence: Synthetic oligonucleotide
aucccucccacuuuacgcu

SEQ ID NO: 3242698 - RNA, 19 nt, Artificial Sequence
  Description of Artificial Sequence: Synthetic oligonucleotide
gauggagguaguugccuuc

SEQ ID NO: 3242699 - RNA, 19 nt, Artificial Sequence
  Description of Artificial Sequence: Synthetic oligonucleotide
ggcgaugacgcgcaccucg

SEQ ID NO: 3242700 - RNA, 19 nt, Artificial Sequence
  Description of Artificial Sequence: Synthetic oligonucleotide
gaagguggucaugaacuug

SEQ ID NO: 3242701 - RNA, 19 nt, Artificial Sequence
  Description of Artificial Sequence: Synthetic oligonucleotide
cacuuuacgcuguguggcc

SEQ ID NO: 3242702 - RNA, 19 nt, Artificial Sequence
  Description of Artificial Sequence: Synthetic oligonucleotide
auagggagugcguccuaag

SEQ ID NO: 3242703 - RNA, 19 nt, Artificial Sequence
  Description of Artificial Sequence: Synthetic oligonucleotide
cuugcaacucuggccacgg

SEQ ID NO: 3242704 - RNA, 19 nt, Artificial Sequence
  Description of Artificial Sequence: Synthetic oligonucleotide
cucucagguuggcaggccg

SEQ ID NO: 3242705 - RNA, 19 nt, Artificial Sequence
  Description of Artificial Sequence: Synthetic oligonucleotide
caccucggcgcucaguggg

SEQ ID NO: 3242706 - RNA, 19 nt, Artificial Sequence
  Description of Artificial Sequence: Synthetic oligonucleotide
gcauaucaaacuugaugag

SEQ ID NO: 3242707 - RNA, 19 nt, Artificial Sequence
  Description of Artificial Sequence: Synthetic oligonucleotide
agcagucacgcucccucgg

SEQ ID NO: 3242708 - RNA, 19 nt, Artificial Sequence
  Description of Artificial Sequence: Synthetic oligonucleotide
gaucuggucggagacguuc

SEQ ID NO: 3242709 - RNA, 19 nt, Artificial Sequence
  Description of Artificial Sequence: Synthetic oligonucleotide
agucucgaaacugguuccg

SEQ ID NO: 3242710 - RNA, 19 nt, Artificial Sequence
  Description of Artificial Sequence: Synthetic oligonucleotide
ugacacgcagagcuggcau

SEQ ID NO: 3242711 - RNA, 19 nt, Artificial Sequence
  Description of Artificial Sequence: Synthetic oligonucleotide
guugccuuccagguggagc

SEQ ID NO: 3242712 - RNA, 19 nt, Artificial Sequence
  Description of Artificial Sequence: Synthetic oligonucleotide
agagcccugagcccagcag

SEQ ID NO: 3242713 - RNA, 19 nt, Artificial Sequence
  Description of Artificial Sequence: Synthetic oligonucleotide
uaucggagccgcuuuccac

SEQ ID NO: 3242714 - RNA, 19 nt, Artificial Sequence
  Description of Artificial Sequence: Synthetic oligonucleotide
cguccuagagcccugagcc

SEQ ID NO: 3242715 - RNA, 19 nt, Artificial Sequence
  Description of Artificial Sequence: Synthetic oligonucleotide
agccgcuuuccacugucuc

SEQ ID NO: 3242716 - RNA, 19 nt, Artificial Sequence
  Description of Artificial Sequence: Synthetic oligonucleotide
ucaguggguugagacguag

SEQ ID NO: 3242717 - RNA, 19 nt, Artificial Sequence
  Description of Artificial Sequence: Synthetic oligonucleotide
acaucacugaucuugaggc

SEQ ID NO: 3242718 - RNA, 19 nt, Artificial Sequence
  Description of Artificial Sequence: Synthetic oligonucleotide
uggaaauucccgcagaccg

SEQ ID NO: 3242719 - RNA, 19 nt, Artificial Sequence
  Description of Artificial Sequence: Synthetic oligonucleotide
aaguggugaaggcugacgc

SEQ ID NO: 3242720 - RNA, 19 nt, Artificial Sequence
  Description of Artificial Sequence: Synthetic oligonucleotide
aucgucuugacuuaguucu

SEQ ID NO: 3242721 - RNA, 19 nt, Artificial Sequence
  Description of Artificial Sequence: Synthetic oligonucleotide
ucuaaaagccgcucguugg

SEQ ID NO: 3242722 - RNA, 19 nt, Artificial Sequence
  Description of Artificial Sequence: Synthetic oligonucleotide
uagucuacucgcuuuagcg

SEQ ID NO: 3242723 - RNA, 19 nt, Artificial Sequence
  Description of Artificial Sequence: Synthetic oligonucleotide
uguacagaaguggugaagg

SEQ ID NO: 3242724 - RNA, 19 nt, Artificial Sequence
  Description of Artificial Sequence: Synthetic oligonucleotide
gaucugagcagacagcucc

SEQ ID NO: 3242725 - RNA, 19 nt, Artificial Sequence
  Description of Artificial Sequence: Synthetic oligonucleotide
guagccaugguucucgugg

SEQ ID NO: 3242726 - RNA, 19 nt, Artificial Sequence
  Description of Artificial Sequence: Synthetic oligonucleotide
caggucacacucuauaucg

SEQ ID NO: 3242727 - RNA, 19 nt, Artificial Sequence
  Description of Artificial Sequence: Synthetic oligonucleotide
guagcuggagcccucaugg

SEQ ID NO: 3242728 - RNA, 19 nt, Artificial Sequence
  Description of Artificial Sequence: Synthetic oligonucleotide
agucuacucgcuuuagcgc

SEQ ID NO: 3242729 - RNA, 19 nt, Artificial Sequence
  Description of Artificial Sequence: Synthetic oligonucleotide
uagguagcggaucugagca

SEQ ID NO: 3242730 - RNA, 19 nt, Artificial Sequence
  Description of Artificial Sequence: Synthetic oligonucleotide
ugacaauccuuccuggaag

SEQ ID NO: 3242731 - RNA, 19 nt, Artificial Sequence
  Description of Artificial Sequence: Synthetic oligonucleotide
uuggacaguuccaggaugg

SEQ ID NO: 3242732 - RNA, 19 nt, Artificial Sequence
  Description of Artificial Sequence: Synthetic oligonucleotide
gacaguuccaggauggccg

SEQ ID NO: 3242733 - RNA, 19 nt, Artificial Sequence
  Description of Artificial Sequence: Synthetic oligonucleotide
uggaagaguagcuggagcc

SEQ ID NO: 3242734 - RNA, 19 nt, Artificial Sequence
  Description of Artificial Sequence: Synthetic oligonucleotide
auagucuacucgcuuuagc

SEQ ID NO: 3242735 - RNA, 19 nt, Artificial Sequence
  Description of Artificial Sequence: Synthetic oligonucleotide
cucgauguccuccagggcg

SEQ ID NO: 3242736 - RNA, 19 nt, Artificial Sequence
  Description of Artificial Sequence: Synthetic oligonucleotide
cuugacuuaguucuccagc

SEQ ID NO: 3242737 - RNA, 19 nt, Artificial Sequence
  Description of Artificial Sequence: Synthetic oligonucleotide
acagguucguaccacauca

SEQ ID NO: 3242738 - RNA, 19 nt, Artificial Sequence
  Description of Artificial Sequence: Synthetic oligonucleotide
uugacuuaguucuccagca

SEQ ID NO: 3242739 - RNA, 19 nt, Artificial Sequence
  Description of Artificial Sequence: Synthetic oligonucleotide
uaccacaucacugaucuug

SEQ ID NO: 3242740 - RNA, 19 nt, Artificial Sequence
  Description of Artificial Sequence: Synthetic oligonucleotide
auuugacaauccuuccugg

SEQ ID NO: 3242741 - RNA, 19 nt, Artificial Sequence
  Description of Artificial Sequence: Synthetic oligonucleotide
uuccuggaagaguagcugg

SEQ ID NO: 3242742 - RNA, 19 nt, Artificial Sequence
  Description of Artificial Sequence: Synthetic oligonucleotide
agcaucuguucacagguuc

SEQ ID NO: 3242743 - RNA, 19 nt, Artificial Sequence
  Description of Artificial Sequence: Synthetic oligonucleotide
cauuugacaauccuuccug

SEQ ID NO: 3242744 - RNA, 19 nt, Artificial Sequence
  Description of Artificial Sequence: Synthetic oligonucleotide
uuagguagcggaucugagc

SEQ ID NO: 3242745 - RNA, 19 nt, Artificial Sequence
  Description of Artificial Sequence: Synthetic oligonucleotide
cacaucacugaucuugagg

SEQ ID NO: 3242746 - RNA, 19 nt, Artificial Sequence
  Description of Artificial Sequence: Synthetic oligonucleotide
aguggugaaggcugacgcc

SEQ ID NO: 3242747 - RNA, 19 nt, Artificial Sequence
  Description of Artificial Sequence: Synthetic oligonucleotide
uguccuguggccaccuggg

SEQ ID NO: 3242748 - RNA, 19 nt, Artificial Sequence
  Description of Artificial Sequence: Synthetic oligonucleotide
uucgccaggcuguagguag

SEQ ID NO: 3242749 - RNA, 19 nt, Artificial Sequence
  Description of Artificial Sequence: Synthetic oligonucleotide
agcggaucugagcagacag

SEQ ID NO: 3242750 - RNA, 19 nt, Artificial Sequence
  Description of Artificial Sequence: Synthetic oligonucleotide
uuuuccuuggacaguucca

SEQ ID NO: 3242751 - RNA, 19 nt, Artificial Sequence
  Description of Artificial Sequence: Synthetic oligonucleotide
uuuccuuggacaguuccag

SEQ ID NO: 3242752 - RNA, 19 nt, Artificial Sequence
  Description of Artificial Sequence: Synthetic oligonucleotide
aucacugaucuugaggcgg

SEQ ID NO: 3242753 - RNA, 19 nt, Artificial Sequence
  Description of Artificial Sequence: Synthetic oligonucleotide
uccagcaucuguucacagg

SEQ ID NO: 3242754 - RNA, 19 nt, Artificial Sequence
  Description of Artificial Sequence: Synthetic oligonucleotide
ucuguucacagguucguac

SEQ ID NO: 3242755 - RNA, 19 nt, Artificial Sequence
  Description of Artificial Sequence: Synthetic oligonucleotide
ucguucgccaggcuguagg

SEQ ID NO: 3242756 - RNA, 19 nt, Artificial Sequence
  Description of Artificial Sequence: Synthetic oligonucleotide
gauggcgccgauuucgcgc

SEQ ID NO: 3242757 - RNA, 19 nt, Artificial Sequence
  Description of Artificial Sequence: Synthetic oligonucleotide
uucucguggaaauucccgc

SEQ ID NO: 3242758 - RNA, 19 nt, Artificial Sequence
  Description of Artificial Sequence: Synthetic oligonucleotide
cuguagguagccaugguuc

SEQ ID NO: 3242759 - RNA, 19 nt, Artificial Sequence
  Description of Artificial Sequence: Synthetic oligonucleotide
uugacaauccuuccuggaa

SEQ ID NO: 3242760 - RNA, 19 nt, Artificial Sequence
  Description of Artificial Sequence: Synthetic oligonucleotide
ugcuguacagaagugguga

SEQ ID NO: 3242761 - RNA, 19 nt, Artificial Sequence
  Description of Artificial Sequence: Synthetic oligonucleotide
gaggauggcgccgauuucg

SEQ ID NO: 3242762 - RNA, 19 nt, Artificial Sequence
  Description of Artificial Sequence: Synthetic oligonucleotide
aguucuccagcaucuguuc

SEQ ID NO: 3242763 - RNA, 19 nt, Artificial Sequence
  Description of Artificial Sequence: Synthetic oligonucleotide
uuugacaauccuuccugga

SEQ ID NO: 3242764 - RNA, 19 nt, Artificial Sequence
  Description of Artificial Sequence: Synthetic oligonucleotide
gucuacucgcuuuagcgcc

SEQ ID NO: 3242765 - RNA, 19 nt, Artificial Sequence
  Description of Artificial Sequence: Synthetic oligonucleotide
ucacugaucuugaggcggg

SEQ ID NO: 3242766 - RNA, 19 nt, Artificial Sequence
  Description of Artificial Sequence: Synthetic oligonucleotide
ugaaggcugacgccugccg

SEQ ID NO: 3242767 - RNA, 19 nt, Artificial Sequence
  Description of Artificial Sequence: Synthetic oligonucleotide
uuaguucuccagcaucugu

SEQ ID NO: 3242768 - RNA, 19 nt, Artificial Sequence
  Description of Artificial Sequence: Synthetic oligonucleotide
uagguagccaugguucucg

SEQ ID NO: 3242769 - RNA, 19 nt, Artificial Sequence
  Description of Artificial Sequence: Synthetic oligonucleotide
uccuuggacaguuccagga

SEQ ID NO: 3242770 - RNA, 19 nt, Artificial Sequence
  Description of Artificial Sequence: Synthetic oligonucleotide
ucuugacuuaguucuccag

SEQ ID NO: 3242771 - RNA, 19 nt, Artificial Sequence
  Description of Artificial Sequence: Synthetic oligonucleotide
cuguucacagguucguacc

SEQ ID NO: 3242772 - RNA, 19 nt, Artificial Sequence
  Description of Artificial Sequence: Synthetic oligonucleotide
ucuugaggcgggcauaguc

SEQ ID NO: 3242773 - RNA, 19 nt, Artificial Sequence
  Description of Artificial Sequence: Synthetic oligonucleotide
aauccuuccuggaagagua

SEQ ID NO: 3242774 - RNA, 19 nt, Artificial Sequence
  Description of Artificial Sequence: Synthetic oligonucleotide
agcuggagcccucaugggg

SEQ ID NO: 3242775 - RNA, 19 nt, Artificial Sequence
  Description of Artificial Sequence: Synthetic oligonucleotide
augguucucguggaaauuc

SEQ ID NO: 3242776 - RNA, 19 nt, Artificial Sequence
  Description of Artificial Sequence: Synthetic oligonucleotide
uguucacagguucguacca

SEQ ID NO: 3242777 - RNA, 19 nt, Artificial Sequence
  Description of Artificial Sequence: Synthetic oligonucleotide
acagaaguggugaaggcug

SEQ ID NO: 3242778 - RNA, 19 nt, Artificial Sequence
  Description of Artificial Sequence: Synthetic oligonucleotide
gaaggcugacgccugccgg

SEQ ID NO: 3242779 - RNA, 19 nt, Artificial Sequence
  Description of Artificial Sequence: Synthetic oligonucleotide
ugagcagacagcuccgccu

SEQ ID NO: 3242780 - RNA, 19 nt, Artificial Sequence
  Description of Artificial Sequence: Synthetic oligonucleotide
gaaguggugaaggcugacg

SEQ ID NO: 3242781 - RNA, 19 nt, Artificial Sequence
  Description of Artificial Sequence: Synthetic oligonucleotide
uguagguagccaugguucu

SEQ ID NO: 3242782 - RNA, 19 nt, Artificial Sequence
  Description of Artificial Sequence: Synthetic oligonucleotide
cucuauaucgucuugacuu

SEQ ID NO: 3242783 - RNA, 19 nt, Artificial Sequence
  Description of Artificial Sequence: Synthetic oligonucleotide
uggguuagguagcggaucu

SEQ ID NO: 3242784 - RNA, 19 nt, Artificial Sequence
  Description of Artificial Sequence: Synthetic oligonucleotide
gauuucgcgcucgaugucc

SEQ ID NO: 3242785 - RNA, 19 nt, Artificial Sequence
  Description of Artificial Sequence: Synthetic oligonucleotide
gacuuaguucuccagcauc

SEQ ID NO: 3242786 - RNA, 19 nt, Artificial Sequence
  Description of Artificial Sequence: Synthetic oligonucleotide
uauaucgucuugacuuagu

SEQ ID NO: 3242787 - RNA, 19 nt, Artificial Sequence
  Description of Artificial Sequence: Synthetic oligonucleotide
guucguaccacaucacuga

SEQ ID NO: 3242788 - RNA, 19 nt, Artificial Sequence
  Description of Artificial Sequence: Synthetic oligonucleotide
uuuagcgccauuugacaau

SEQ ID NO: 3242789 - RNA, 19 nt, Artificial Sequence
  Description of Artificial Sequence: Synthetic oligonucleotide
uaucgucuugacuuaguuc

SEQ ID NO: 3242790 - RNA, 19 nt, Artificial Sequence
  Description of Artificial Sequence: Synthetic oligonucleotide
gucuaaaagccgcucguug

SEQ ID NO: 3242791 - RNA, 19 nt, Artificial Sequence
  Description of Artificial Sequence: Synthetic oligonucleotide
ucuauaucgucuugacuua

SEQ ID NO: 3242792 - RNA, 19 nt, Artificial Sequence
  Description of Artificial Sequence: Synthetic oligonucleotide
uacagaaguggugaaggcu

SEQ ID NO: 3242793 - RNA, 19 nt, Artificial Sequence
  Description of Artificial Sequence: Synthetic oligonucleotide
ugguucucguggaaauucc

SEQ ID NO: 3242794 - RNA, 19 nt, Artificial Sequence
  Description of Artificial Sequence: Synthetic oligonucleotide
acgccugccggucuaaaag

SEQ ID NO: 3242795 - RNA, 19 nt, Artificial Sequence
  Description of Artificial Sequence: Synthetic oligonucleotide
uggaggauggcgccgauuu

SEQ ID NO: 3242796 - RNA, 19 nt, Artificial Sequence
  Description of Artificial Sequence: Synthetic oligonucleotide
guucucguggaaauucccg

SEQ ID NO: 3242797 - RNA, 19 nt, Artificial Sequence
  Description of Artificial Sequence: Synthetic oligonucleotide
ucucguggaaauucccgca

SEQ ID NO: 3242798 - RNA, 19 nt, Artificial Sequence
  Description of Artificial Sequence: Synthetic oligonucleotide
ucgcuuuagcgccauuuga

SEQ ID NO: 3242799 - RNA, 19 nt, Artificial Sequence
  Description of Artificial Sequence: Synthetic oligonucleotide
caucacugaucuugaggcg

SEQ ID NO: 3242800 - RNA, 19 nt, Artificial Sequence
  Description of Artificial Sequence: Synthetic oligonucleotide
ucauggggcuguccugugg

SEQ ID NO: 3242801 - RNA, 19 nt, Artificial Sequence
  Description of Artificial Sequence: Synthetic oligonucleotide
uucacagguucguaccaca

SEQ ID NO: 3242802 - RNA, 19 nt, Artificial Sequence
  Description of Artificial Sequence: Synthetic oligonucleotide
uucuccagcaucuguucac

SEQ ID NO: 3242803 - RNA, 19 nt, Artificial Sequence
  Description of Artificial Sequence: Synthetic oligonucleotide
cuuggacaguuccaggaug

SEQ ID NO: 3242804 - RNA, 19 nt, Artificial Sequence
  Description of Artificial Sequence: Synthetic oligonucleotide
ucgauguccuccagggcgc

SEQ ID NO: 3242805 - RNA, 19 nt, Artificial Sequence
  Description of Artificial Sequence: Synthetic oligonucleotide
uuccuuggacaguuccagg

SEQ ID NO: 3242806 - RNA, 19 nt, Artificial Sequence
  Description of Artificial Sequence: Synthetic oligonucleotide
uaguucuccagcaucuguu

SEQ ID NO: 3242807 - RNA, 19 nt, Artificial Sequence
  Description of Artificial Sequence: Synthetic oligonucleotide
ugcguucuggaggauggcg

SEQ ID NO: 3242808 - RNA, 19 nt, Artificial Sequence
  Description of Artificial Sequence: Synthetic oligonucleotide
cuggaagaguagcuggagc

SEQ ID NO: 3242809 - RNA, 19 nt, Artificial Sequence
  Description of Artificial Sequence: Synthetic oligonucleotide
gacaauccuuccuggaaga

SEQ ID NO: 3242810 - RNA, 19 nt, Artificial Sequence
  Description of Artificial Sequence: Synthetic oligonucleotide
aguagcuggagcccucaug

SEQ ID NO: 3242811 - RNA, 19 nt, Artificial Sequence
  Description of Artificial Sequence: Synthetic oligonucleotide
aaaagccgcucguugguuu

SEQ ID NO: 3242812 - RNA, 19 nt, Artificial Sequence
  Description of Artificial Sequence: Synthetic oligonucleotide
acucuauaucgucuugacu

SEQ ID NO: 3242813 - RNA, 19 nt, Artificial Sequence
  Description of Artificial Sequence: Synthetic oligonucleotide
aaggcugacgccugccggu

SEQ ID NO: 3242814 - RNA, 19 nt, Artificial Sequence
  Description of Artificial Sequence: Synthetic oligonucleotide
uccuggaagaguagcugga

SEQ ID NO: 3242815 - RNA, 19 nt, Artificial Sequence
  Description of Artificial Sequence: Synthetic oligonucleotide
acgugcuguacagaagugg

SEQ ID NO: 3242816 - RNA, 19 nt, Artificial Sequence
  Description of Artificial Sequence: Synthetic oligonucleotide
acuuaguucuccagcaucu

SEQ ID NO: 3242817 - RNA, 19 nt, Artificial Sequence
  Description of Artificial Sequence: Synthetic oligonucleotide
ugcaaugucacauuguugu

SEQ ID NO: 3242818 - RNA, 19 nt, Artificial Sequence
  Description of Artificial Sequence: Synthetic oligonucleotide
uuguuguucucuaggaugg

SEQ ID NO: 3242819 - RNA, 19 nt, Artificial Sequence
  Description of Artificial Sequence: Synthetic oligonucleotide
aaugucacauuguuguucu

SEQ ID NO: 3242820 - RNA, 19 nt, Artificial Sequence
  Description of Artificial Sequence: Synthetic oligonucleotide
augaucucuuuccuuagcc

SEQ ID NO: 3242821 - RNA, 19 nt, Artificial Sequence
  Description of Artificial Sequence: Synthetic oligonucleotide
auuguuguucucuaggaug

SEQ ID NO: 3242822 - RNA, 19 nt, Artificial Sequence
  Description of Artificial Sequence: Synthetic oligonucleotide
ugcugagucacccaggaca

SEQ ID NO: 3242823 - RNA, 19 nt, Artificial Sequence
  Description of Artificial Sequence: Synthetic oligonucleotide
uacaguuuauccuggauac

SEQ ID NO: 3242824 - RNA, 19 nt, Artificial Sequence
  Description of Artificial Sequence: Synthetic oligonucleotide
auucuccugaagcagcugc

SEQ ID NO: 3242825 - RNA, 19 nt, Artificial Sequence
  Description of Artificial Sequence: Synthetic oligonucleotide
cuagccaugaucucuuggg

SEQ ID NO: 3242826 - RNA, 19 nt, Artificial Sequence
  Description of Artificial Sequence: Synthetic oligonucleotide
uccuggauaccuuugagcu

SEQ ID NO: 3242827 - RNA, 19 nt, Artificial Sequence
  Description of Artificial Sequence: Synthetic oligonucleotide
ucuaggauggcccgccugg

SEQ ID NO: 3242828 - RNA, 19 nt, Artificial Sequence
  Description of Artificial Sequence: Synthetic oligonucleotide
uggguguucuccaacaucu

SEQ ID NO: 3242829 - RNA, 19 nt, Artificial Sequence
  Description of Artificial Sequence: Synthetic oligonucleotide
auccuggauaccuuugagc

SEQ ID NO: 3242830 - RNA, 19 nt, Artificial Sequence
  Description of Artificial Sequence: Synthetic oligonucleotide
uucuccaacaucuccaccu

SEQ ID NO: 3242831 - RNA, 19 nt, Artificial Sequence
  Description of Artificial Sequence: Synthetic oligonucleotide
gaucucuuuccuuagccug

SEQ ID NO: 3242832 - RNA, 19 nt, Artificial Sequence
  Description of Artificial Sequence: Synthetic oligonucleotide
gaagucaguggccaccagg

SEQ ID NO: 3242833 - RNA, 19 nt, Artificial Sequence
  Description of Artificial Sequence: Synthetic oligonucleotide
ucccacaucugguuggugg

SEQ ID NO: 3242834 - RNA, 19 nt, Artificial Sequence
  Description of Artificial Sequence: Synthetic oligonucleotide
uuguucucuaggauggccc

SEQ ID NO: 3242835 - RNA, 19 nt, Artificial Sequence
  Description of Artificial Sequence: Synthetic oligonucleotide
cacauuguuguucucuagg

SEQ ID NO: 3242836 - RNA, 19 nt, Artificial Sequence
  Description of Artificial Sequence: Synthetic oligonucleotide
ucuagccaugaucucuugg

SEQ ID NO: 3242837 - RNA, 19 nt, Artificial Sequence
  Description of Artificial Sequence: Synthetic oligonucleotide
gauaccuuugagcugcuca

SEQ ID NO: 3242838 - RNA, 19 nt, Artificial Sequence
  Description of Artificial Sequence: Synthetic oligonucleotide
aacaucuccaccugcuggu

SEQ ID NO: 3242839 - RNA, 19 nt, Artificial Sequence
  Description of Artificial Sequence: Synthetic oligonucleotide
uuuauccuggauaccuuug

SEQ ID NO: 3242840 - RNA, 19 nt, Artificial Sequence
  Description of Artificial Sequence: Synthetic oligonucleotide
uguucucuaggauggcccg

SEQ ID NO: 3242841 - RNA, 19 nt, Artificial Sequence
  Description of Artificial Sequence: Synthetic oligonucleotide
uuugagcugcucauucucc

SEQ ID NO: 3242842 - RNA, 19 nt, Artificial Sequence
  Description of Artificial Sequence: Synthetic oligonucleotide
agucacccaggacagcugc

SEQ ID NO: 3242843 - RNA, 19 nt, Artificial Sequence
  Description of Artificial Sequence: Synthetic oligonucleotide
gaagcagcugcacaccuug

SEQ ID NO: 3242844 - RNA, 19 nt, Artificial Sequence
  Description of Artificial Sequence: Synthetic oligonucleotide
cuggauaccuuugagcugc

SEQ ID NO: 3242845 - RNA, 19 nt, Artificial Sequence
  Description of Artificial Sequence: Synthetic oligonucleotide
uuauccuggauaccuuuga

SEQ ID NO: 3242846 - RNA, 19 nt, Artificial Sequence
  Description of Artificial Sequence: Synthetic oligonucleotide
uauccuggauaccuuugag

SEQ ID NO: 3242847 - RNA, 19 nt, Artificial Sequence
  Description of Artificial Sequence: Synthetic oligonucleotide
ucaguggccaccagguuca

SEQ ID NO: 3242848 - RNA, 19 nt, Artificial Sequence
  Description of Artificial Sequence: Synthetic oligonucleotide
ugcucauucuccugaagca

SEQ ID NO: 3242849 - RNA, 19 nt, Artificial Sequence
  Description of Artificial Sequence: Synthetic oligonucleotide
accuuugagcugcucauuc

SEQ ID NO: 3242850 - RNA, 19 nt, Artificial Sequence
  Description of Artificial Sequence: Synthetic oligonucleotide
acauuguuguucucuagga

SEQ ID NO: 3242851 - RNA, 19 nt, Artificial Sequence
  Description of Artificial Sequence: Synthetic oligonucleotide
cugcucauucuccugaagc

SEQ ID NO: 3242852 - RNA, 19 nt, Artificial Sequence
  Description of Artificial Sequence: Synthetic oligonucleotide
uggaugaucucuuuccuua

SEQ ID NO: 3242853 - RNA, 19 nt, Artificial Sequence
  Description of Artificial Sequence: Synthetic oligonucleotide
cucauucuccugaagcagc

SEQ ID NO: 3242854 - RNA, 19 nt, Artificial Sequence
  Description of Artificial Sequence: Synthetic oligonucleotide
uucacacgcuggaugaucu

SEQ ID NO: 3242855 - RNA, 19 nt, Artificial Sequence
  Description of Artificial Sequence: Synthetic oligonucleotide
ucuuggguguucuccaaca

SEQ ID NO: 3242856 - RNA, 19 nt, Artificial Sequence
  Description of Artificial Sequence: Synthetic oligonucleotide
caacaucuccaccugcugg

SEQ ID NO: 3242857 - RNA, 19 nt, Artificial Sequence
  Description of Artificial Sequence: Synthetic oligonucleotide
ugcugguacaguuuauccu

SEQ ID NO: 3242858 - RNA, 19 nt, Artificial Sequence
  Description of Artificial Sequence: Synthetic oligonucleotide
uccaacaucuccaccugcu

SEQ ID NO: 3242859 - RNA, 19 nt, Artificial Sequence
  Description of Artificial Sequence: Synthetic oligonucleotide
uugguggccaccuuucgga

SEQ ID NO: 3242860 - RNA, 19 nt, Artificial Sequence
  Description of Artificial Sequence: Synthetic oligonucleotide
acaccuugcugagucaccc

SEQ ID NO: 3242861 - RNA, 19 nt, Artificial Sequence
  Description of Artificial Sequence: Synthetic oligonucleotide
gaugaucucuuuccuuagc

SEQ ID NO: 3242862 - RNA, 19 nt, Artificial Sequence
  Description of Artificial Sequence: Synthetic oligonucleotide
uucugauggccucugcugu

SEQ ID NO: 3242863 - RNA, 19 nt, Artificial Sequence
  Description of Artificial Sequence: Synthetic oligonucleotide
uccugaagcagcugcacac

SEQ ID NO: 3242864 - RNA, 19 nt, Artificial Sequence
  Description of Artificial Sequence: Synthetic oligonucleotide
ugaucucuuuccuuagccu

SEQ ID NO: 3242865 - RNA, 19 nt, Artificial Sequence
  Description of Artificial Sequence: Synthetic oligonucleotide
ugucacauuguuguucucu

SEQ ID NO: 3242866 - RNA, 19 nt, Artificial Sequence
  Description of Artificial Sequence: Synthetic oligonucleotide
gaucucuuggguguucucc

SEQ ID NO: 3242867 - RNA, 19 nt, Artificial Sequence
  Description of Artificial Sequence: Synthetic oligonucleotide
cuucugauggccucugcug

SEQ ID NO: 3242868 - RNA, 19 nt, Artificial Sequence
  Description of Artificial Sequence: Synthetic oligonucleotide
cugcugguacaguuuaucc

SEQ ID NO: 3242869 - RNA, 19 nt, Artificial Sequence
  Description of Artificial Sequence: Synthetic oligonucleotide
gcugguacaguuuauccug

SEQ ID NO: 3242870 - RNA, 19 nt, Artificial Sequence
  Description of Artificial Sequence: Synthetic oligonucleotide
ucugcuguuucuagccaug

SEQ ID NO: 3242871 - RNA, 19 nt, Artificial Sequence
  Description of Artificial Sequence: Synthetic oligonucleotide
ucauucuccugaagcagcu

SEQ ID NO: 3242872 - RNA, 19 nt, Artificial Sequence
  Description of Artificial Sequence: Synthetic oligonucleotide
ucacauuguuguucucuag

SEQ ID NO: 3242873 - RNA, 19 nt, Artificial Sequence
  Description of Artificial Sequence: Synthetic oligonucleotide
guggccaccagguucacac

SEQ ID NO: 3242874 - RNA, 19 nt, Artificial Sequence
  Description of Artificial Sequence: Synthetic oligonucleotide
cuuucggaagucaguggcc

SEQ ID NO: 3242875 - RNA, 19 nt, Artificial Sequence
  Description of Artificial Sequence: Synthetic oligonucleotide
aagucaguggccaccaggu

SEQ ID NO: 3242876 - RNA, 19 nt, Artificial Sequence
  Description of Artificial Sequence: Synthetic oligonucleotide
ucuccaacaucuccaccug

SEQ ID NO: 3242877 - RNA, 19 nt, Artificial Sequence
  Description of Artificial Sequence: Synthetic oligonucleotide
uguucuccaacaucuccac

SEQ ID NO: 3242878 - RNA, 19 nt, Artificial Sequence
  Description of Artificial Sequence: Synthetic oligonucleotide
guugguggccaccuuucgg

SEQ ID NO: 3242879 - RNA, 19 nt, Artificial Sequence
  Description of Artificial Sequence: Synthetic oligonucleotide
aggacagcugcaaugucac

SEQ ID NO: 3242880 - RNA, 19 nt, Artificial Sequence
  Description of Artificial Sequence: Synthetic oligonucleotide
ugagucacccaggacagcu

SEQ ID NO: 3242881 - RNA, 19 nt, Artificial Sequence
  Description of Artificial Sequence: Synthetic oligonucleotide
uuucuagccaugaucucuu

SEQ ID NO: 3242882 - RNA, 19 nt, Artificial Sequence
  Description of Artificial Sequence: Synthetic oligonucleotide
agguucacacgcuggauga

SEQ ID NO: 3242883 - RNA, 19 nt, Artificial Sequence
  Description of Artificial Sequence: Synthetic oligonucleotide
uuucggaagucaguggcca

SEQ ID NO: 3242884 - RNA, 19 nt, Artificial Sequence
  Description of Artificial Sequence: Synthetic oligonucleotide
cuuugagcugcucauucuc

SEQ ID NO: 3242885 - RNA, 19 nt, Artificial Sequence
  Description of Artificial Sequence: Synthetic oligonucleotide
ugucucccacaucugguug

SEQ ID NO: 3242886 - RNA, 19 nt, Artificial Sequence
  Description of Artificial Sequence: Synthetic oligonucleotide
agccaugaucucuugggug

SEQ ID NO: 3242887 - RNA, 19 nt, Artificial Sequence
  Description of Artificial Sequence: Synthetic oligonucleotide
acaguuuauccuggauacc

SEQ ID NO: 3242888 - RNA, 19 nt, Artificial Sequence
  Description of Artificial Sequence: Synthetic oligonucleotide
auaccuuugagcugcucau

SEQ ID NO: 3242889 - RNA, 19 nt, Artificial Sequence
  Description of Artificial Sequence: Synthetic oligonucleotide
cugguacaguuuauccugg

SEQ ID NO: 3242890 - RNA, 19 nt, Artificial Sequence
  Description of Artificial Sequence: Synthetic oligonucleotide
guacaguuuauccuggaua

SEQ ID NO: 3242891 - RNA, 19 nt, Artificial Sequence
  Description of Artificial Sequence: Synthetic oligonucleotide
accuugcugagucacccag

SEQ ID NO: 3242892 - RNA, 19 nt, Artificial Sequence
  Description of Artificial Sequence: Synthetic oligonucleotide
gguugucucccacaucugg

SEQ ID NO: 3242893 - RNA, 19 nt, Artificial Sequence
  Description of Artificial Sequence: Synthetic oligonucleotide
gucucccacaucugguugg

SEQ ID NO: 3242894 - RNA, 19 nt, Artificial Sequence
  Description of Artificial Sequence: Synthetic oligonucleotide
accuuucggaagucagugg

SEQ ID NO: 3242895 - RNA, 19 nt, Artificial Sequence
  Description of Artificial Sequence: Synthetic oligonucleotide
cuguuucuagccaugaucu

SEQ ID NO: 3242896 - RNA, 19 nt, Artificial Sequence
  Description of Artificial Sequence: Synthetic oligonucleotide
uuggguguucuccaacauc

SEQ ID NO: 3242897 - RNA, 19 nt, Artificial Sequence
  Description of Artificial Sequence: Synthetic oligonucleotide
uugagcugcucauucuccu

SEQ ID NO: 3242898 - RNA, 19 nt, Artificial Sequence
  Description of Artificial Sequence: Synthetic oligonucleotide
aucucuuggguguucucca

SEQ ID NO: 3242899 - RNA, 19 nt, Artificial Sequence
  Description of Artificial Sequence: Synthetic oligonucleotide
uucuccugaagcagcugca

SEQ ID NO: 3242900 - RNA, 19 nt, Artificial Sequence
  Description of Artificial Sequence: Synthetic oligonucleotide
aggauggcccgccugguug

SEQ ID NO: 3242901 - RNA, 19 nt, Artificial Sequence
  Description of Artificial Sequence: Synthetic oligonucleotide
uagccaugaucucuugggu

SEQ ID NO: 3242902 - RNA, 19 nt, Artificial Sequence
  Description of Artificial Sequence: Synthetic oligonucleotide
gucaguggccaccagguuc

SEQ ID NO: 3242903 - RNA, 19 nt, Artificial Sequence
  Description of Artificial Sequence: Synthetic oligonucleotide
gguguucuccaacaucucc

SEQ ID NO: 3242904 - RNA, 19 nt, Artificial Sequence
  Description of Artificial Sequence: Synthetic oligonucleotide
caaugucacauuguuguuc

SEQ ID NO: 3242905 - RNA, 19 nt, Artificial Sequence
  Description of Artificial Sequence: Synthetic oligonucleotide
gcuguuucuagccaugauc

SEQ ID NO: 3242906 - RNA, 19 nt, Artificial Sequence
  Description of Artificial Sequence: Synthetic oligonucleotide
ugagcugcucauucuccug

SEQ ID NO: 3242907 - RNA, 19 nt, Artificial Sequence
  Description of Artificial Sequence: Synthetic oligonucleotide
cagguucacacgcuggaug

SEQ ID NO: 3242908 - RNA, 19 nt, Artificial Sequence
  Description of Artificial Sequence: Synthetic oligonucleotide
ccuuucggaagucaguggc

SEQ ID NO: 3242909 - RNA, 19 nt, Artificial Sequence
  Description of Artificial Sequence: Synthetic oligonucleotide
guuguucucuaggauggcc

SEQ ID NO: 3242910 - RNA, 19 nt, Artificial Sequence
  Description of Artificial Sequence: Synthetic oligonucleotide
acccaggacagcugcaaug

SEQ ID NO: 3242911 - RNA, 19 nt, Artificial Sequence
  Description of Artificial Sequence: Synthetic oligonucleotide
uucucuaggauggcccgcc

SEQ ID NO: 3242912 - RNA, 19 nt, Artificial Sequence
  Description of Artificial Sequence: Synthetic oligonucleotide
cugcaaugucacauuguug

SEQ ID NO: 3242913 - RNA, 19 nt, Artificial Sequence
  Description of Artificial Sequence: Synthetic oligonucleotide
cugcacaccuugcugaguc

SEQ ID NO: 3242914 - RNA, 19 nt, Artificial Sequence
  Description of Artificial Sequence: Synthetic oligonucleotide
accagguucacacgcugga

SEQ ID NO: 3242915 - RNA, 19 nt, Artificial Sequence
  Description of Artificial Sequence: Synthetic oligonucleotide
acgcuggaugaucucuuuc

SEQ ID NO: 3242916 - RNA, 19 nt, Artificial Sequence
  Description of Artificial Sequence: Synthetic oligonucleotide
acaucugguugguggccac

SEQ ID NO: 3242917 - RNA, 19 nt, Artificial Sequence
  Description of Artificial Sequence: Synthetic oligonucleotide
aauacuaaguuucaguguc

SEQ ID NO: 3242918 - RNA, 19 nt, Artificial Sequence
  Description of Artificial Sequence: Synthetic oligonucleotide
uauacauuaauuaaaaguc

SEQ ID NO: 3242919 - RNA, 19 nt, Artificial Sequence
  Description of Artificial Sequence: Synthetic oligonucleotide
uauacauucauguugaacu

SEQ ID NO: 3242920 - RNA, 19 nt, Artificial Sequence
  Description of Artificial Sequence: Synthetic oligonucleotide
uucuuuaucuuuaaugugg

SEQ ID NO: 3242921 - RNA, 19 nt, Artificial Sequence
  Description of Artificial Sequence: Synthetic oligonucleotide
uuaauuaaaagucuaacau

SEQ ID NO: 3242922 - RNA, 19 nt, Artificial Sequence
  Description of Artificial Sequence: Synthetic oligonucleotide
auaucuaaaagaaacaugg

SEQ ID NO: 3242923 - RNA, 19 nt, Artificial Sequence
  Description of Artificial Sequence: Synthetic oligonucleotide
ucuaaaagaaacauggaac

SEQ ID NO: 3242924 - RNA, 19 nt, Artificial Sequence
  Description of Artificial Sequence: Synthetic oligonucleotide
ucaaaauuaaauauauaca

SEQ ID NO: 3242925 - RNA, 19 nt, Artificial Sequence
  Description of Artificial Sequence: Synthetic oligonucleotide
auauccuauguuuauauac

SEQ ID NO: 3242926 - RNA, 19 nt, Artificial Sequence
  Description of Artificial Sequence: Synthetic oligonucleotide
aaaagucuaacauauauua

SEQ ID NO: 3242927 - RNA, 19 nt, Artificial Sequence
  Description of Artificial Sequence: Synthetic oligonucleotide
uuaguauacauaaauggca

SEQ ID NO: 3242928 - RNA, 19 nt, Artificial Sequence
  Description of Artificial Sequence: Synthetic oligonucleotide
  modified_base (6)..(6): a, c, u, g, unknown or other
uuuucnguccuuuaaaucu

SEQ ID NO: 3242929 - RNA, 19 nt, Artificial Sequence
  Description of Artificial Sequence: Synthetic oligonucleotide
uuuuauuccaacaaguuuu

SEQ ID NO: 3242930 - RNA, 19 nt, Artificial Sequence
  Description of Artificial Sequence: Synthetic oligonucleotide
agaaacauggaacaugguc

SEQ ID NO: 3242931 - RNA, 19 nt, Artificial Sequence
  Description of Artificial Sequence: Synthetic oligonucleotide
aaagauauaucuaaaagaa

SEQ ID NO: 3242932 - RNA, 19 nt, Artificial Sequence
  Description of Artificial Sequence: Synthetic oligonucleotide
ugaauacuaaguuucagug

SEQ ID NO: 3242933 - RNA, 19 nt, Artificial Sequence
  Description of Artificial Sequence: Synthetic oligonucleotide
auugcuuacaguuccaguc

SEQ ID NO: 3242934 - RNA, 19 nt, Artificial Sequence
  Description of Artificial Sequence: Synthetic oligonucleotide
auugcuucaacuugcgagc

SEQ ID NO: 3242935 - RNA, 19 nt, Artificial Sequence
  Description of Artificial Sequence: Synthetic oligonucleotide
uguauaaacggguagguac

SEQ ID NO: 3242936 - RNA, 19 nt, Artificial Sequence
  Description of Artificial Sequence: Synthetic oligonucleotide
auuaauuaaaagucuaaca

SEQ ID NO: 3242937 - RNA, 19 nt, Artificial Sequence
  Description of Artificial Sequence: Synthetic oligonucleotide
ugaauuucuaucuuuaaaa

SEQ ID NO: 3242938 - RNA, 19 nt, Artificial Sequence
  Description of Artificial Sequence: Synthetic oligonucleotide
uuuaucuuuaauguggcag

SEQ ID NO: 3242939 - RNA, 19 nt, Artificial Sequence
  Description of Artificial Sequence: Synthetic oligonucleotide
uguuauacauucauguuga

SEQ ID NO: 3242940 - RNA, 19 nt, Artificial Sequence
  Description of Artificial Sequence: Synthetic oligonucleotide
aagaaauugcuucaacuug

SEQ ID NO: 3242941 - RNA, 19 nt, Artificial Sequence
  Description of Artificial Sequence: Synthetic oligonucleotide
uauaucuaaaagaaacaug

SEQ ID NO: 3242942 - RNA, 19 nt, Artificial Sequence
  Description of Artificial Sequence: Synthetic oligonucleotide
agauacguguuauacauuc

SEQ ID NO: 3242943 - RNA, 19 nt, Artificial Sequence
  Description of Artificial Sequence: Synthetic oligonucleotide
ugugcuaugcucuuuacug

SEQ ID NO: 3242944 - RNA, 19 nt, Artificial Sequence
  Description of Artificial Sequence: Synthetic oligonucleotide
uuaucuucaaaauauacuu

SEQ ID NO: 3242945 - RNA, 19 nt, Artificial Sequence
  Description of Artificial Sequence: Synthetic oligonucleotide
uucauguugaacuacauuu

SEQ ID NO: 3242946 - RNA, 19 nt, Artificial Sequence
  Description of Artificial Sequence: Synthetic oligonucleotide
uacaguuccagucauuuug

SEQ ID NO: 3242947 - RNA, 19 nt, Artificial Sequence
  Description of Artificial Sequence: Synthetic oligonucleotide
uuaagaaauugcuucaacu

SEQ ID NO: 3242948 - RNA, 19 nt, Artificial Sequence
  Description of Artificial Sequence: Synthetic oligonucleotide
gaauucuucacugauauuc

SEQ ID NO: 3242949 - RNA, 19 nt, Artificial Sequence
  Description of Artificial Sequence: Synthetic oligonucleotide
aagucuaacauauauuauu

SEQ ID NO: 3242950 - RNA, 19 nt, Artificial Sequence
  Description of Artificial Sequence: Synthetic oligonucleotide
uugauaucugucuuaagug

SEQ ID NO: 3242951 - RNA, 19 nt, Artificial Sequence
  Description of Artificial Sequence: Synthetic oligonucleotide
ucaaaauuuuauuccaaca

SEQ ID NO: 3242952 - RNA, 19 nt, Artificial Sequence
  Description of Artificial Sequence: Synthetic oligonucleotide
uauacauaaauggcaauag

SEQ ID NO: 3242953 - RNA, 19 nt, Artificial Sequence
  Description of Artificial Sequence: Synthetic oligonucleotide
acuaagugaauuucuaucu

SEQ ID NO: 3242954 - RNA, 19 nt, Artificial Sequence
  Description of Artificial Sequence: Synthetic oligonucleotide
uaaauggcaauagugacug

SEQ ID NO: 3242955 - RNA, 19 nt, Artificial Sequence
  Description of Artificial Sequence: Synthetic oligonucleotide
aaauuuuauuccaacaagu

SEQ ID NO: 3242956 - RNA, 19 nt, Artificial Sequence
  Description of Artificial Sequence: Synthetic oligonucleotide
ugaagcaaugucaaaauua

SEQ ID NO: 3242957 - RNA, 19 nt, Artificial Sequence
  Description of Artificial Sequence: Synthetic oligonucleotide
ugauaucugucuuaagugc

SEQ ID NO: 3242958 - RNA, 19 nt, Artificial Sequence
  Description of Artificial Sequence: Synthetic oligonucleotide
augacuaguuuucaugaac

SEQ ID NO: 3242959 - RNA, 19 nt, Artificial Sequence
  Description of Artificial Sequence: Synthetic oligonucleotide
uccuuuaaaucuuuucucc

SEQ ID NO: 3242960 - RNA, 19 nt, Artificial Sequence
  Description of Artificial Sequence: Synthetic oligonucleotide
aguuucagugucuuuggac

SEQ ID NO: 3242961 - RNA, 19 nt, Artificial Sequence
  Description of Artificial Sequence: Synthetic oligonucleotide
uaaacggguagguacuugg

SEQ ID NO: 3242962 - RNA, 19 nt, Artificial Sequence
  Description of Artificial Sequence: Synthetic oligonucleotide
ccuuaguauacauaaaugg

SEQ ID NO: 3242963 - RNA, 19 nt, Artificial Sequence
  Description of Artificial Sequence: Synthetic oligonucleotide
  modified_base (19)..(19): a, c, u, g, unknown or other
acauggaucauucuuuucn

SEQ ID NO: 3242964 - RNA, 19 nt, Artificial Sequence
  Description of Artificial Sequence: Synthetic oligonucleotide
ucaucacccauaaucacgc

SEQ ID NO: 3242965 - RNA, 19 nt, Artificial Sequence
  Description of Artificial Sequence: Synthetic oligonucleotide
uuggagguugcaaauaaca

SEQ ID NO: 3242966 - RNA, 19 nt, Artificial Sequence
  Description of Artificial Sequence: Synthetic oligonucleotide
uauccuauguuuauauacu

SEQ ID NO: 3242967 - RNA, 19 nt, Artificial Sequence
  Description of Artificial Sequence: Synthetic oligonucleotide
uaauuaaaagucuaacaua

SEQ ID NO: 3242968 - RNA, 19 nt, Artificial Sequence
  Description of Artificial Sequence: Synthetic oligonucleotide
ucuuuaucuuuaauguggc

SEQ ID NO: 3242969 - RNA, 19 nt, Artificial Sequence
  Description of Artificial Sequence: Synthetic oligonucleotide
ucauuauuugggcaauugc

SEQ ID NO: 3242970 - RNA, 19 nt, Artificial Sequence
  Description of Artificial Sequence: Synthetic oligonucleotide
aaacauggaacauggucug

SEQ ID NO: 3242971 - RNA, 19 nt, Artificial Sequence
  Description of Artificial Sequence: Synthetic oligonucleotide
cauaaauggcaauagugac

SEQ ID NO: 3242972 - RNA, 19 nt, Artificial Sequence
  Description of Artificial Sequence: Synthetic oligonucleotide
uuuaauguggcagucagau

SEQ ID NO: 3242973 - RNA, 19 nt, Artificial Sequence
  Description of Artificial Sequence: Synthetic oligonucleotide
auagugacugaauacuaag

SEQ ID NO: 3242974 - RNA, 19 nt, Artificial Sequence
  Description of Artificial Sequence: Synthetic oligonucleotide
guguuauacauucauguug

SEQ ID NO: 3242975 - RNA, 19 nt, Artificial Sequence
  Description of Artificial Sequence: Synthetic oligonucleotide
ucccaaauugaaaauucag

SEQ ID NO: 3242976 - RNA, 19 nt, Artificial Sequence
  Description of Artificial Sequence: Synthetic oligonucleotide
cugauauucauuuuaagaa

SEQ ID NO: 3242977 - RNA, 19 nt, Artificial Sequence
  Description of Artificial Sequence: Synthetic oligonucleotide
aucuaaaagaaacauggaa

SEQ ID NO: 3242978 - RNA, 19 nt, Artificial Sequence
  Description of Artificial Sequence: Synthetic oligonucleotide
uucaaaauuuuauuccaac

SEQ ID NO: 3242979 - RNA, 19 nt, Artificial Sequence
  Description of Artificial Sequence: Synthetic oligonucleotide
auaaucacgcccaggaccc

SEQ ID NO: 3242980 - RNA, 19 nt, Artificial Sequence
  Description of Artificial Sequence: Synthetic oligonucleotide
aacuacauuucuugauauc

SEQ ID NO: 3242981 - RNA, 19 nt, Artificial Sequence
  Description of Artificial Sequence: Synthetic oligonucleotide
ugggacugaagcaggagcg

SEQ ID NO: 3242982 - RNA, 19 nt, Artificial Sequence
  Description of Artificial Sequence: Synthetic oligonucleotide
ugaugacugggacugaagc

SEQ ID NO: 3242983 - RNA, 19 nt, Artificial Sequence
  Description of Artificial Sequence: Synthetic oligonucleotide
auugaaaauucaguuacag

SEQ ID NO: 3242984 - RNA, 19 nt, Artificial Sequence
  Description of Artificial Sequence: Synthetic oligonucleotide
auuucagcuccucaaaaug

SEQ ID NO: 3242985 - RNA, 19 nt, Artificial Sequence
  Description of Artificial Sequence: Synthetic oligonucleotide
uuaucuuuaauguggcagu

SEQ ID NO: 3242986 - RNA, 19 nt, Artificial Sequence
  Description of Artificial Sequence: Synthetic oligonucleotide
uaagaaauugcuucaacuu

SEQ ID NO: 3242987 - RNA, 19 nt, Artificial Sequence
  Description of Artificial Sequence: Synthetic oligonucleotide
acguguuauacauucaugu

SEQ ID NO: 3242988 - RNA, 19 nt, Artificial Sequence
  Description of Artificial Sequence: Synthetic oligonucleotide
aaaagaugugcuaugcucu

SEQ ID NO: 3242989 - RNA, 19 nt, Artificial Sequence
  Description of Artificial Sequence: Synthetic oligonucleotide
uacauuaauuaaaagucua

SEQ ID NO: 3242990 - RNA, 19 nt, Artificial Sequence
  Description of Artificial Sequence: Synthetic oligonucleotide
aaaagcagcuuccuuugca

SEQ ID NO: 3242991 - RNA, 19 nt, Artificial Sequence
  Description of Artificial Sequence: Synthetic oligonucleotide
uugcaaauaacauauccua

SEQ ID NO: 3242992 - RNA, 19 nt, Artificial Sequence
  Description of Artificial Sequence: Synthetic oligonucleotide
caaaauuaaauauauacau

SEQ ID NO: 3242993 - RNA, 19 nt, Artificial Sequence
  Description of Artificial Sequence: Synthetic oligonucleotide
gacuaagugaauuucuauc

SEQ ID NO: 3242994 - RNA, 19 nt, Artificial Sequence
  Description of Artificial Sequence: Synthetic oligonucleotide
ugaacuacauuucuugaua

SEQ ID NO: 3242995 - RNA, 19 nt, Artificial Sequence
  Description of Artificial Sequence: Synthetic oligonucleotide
agugucuuuggacuaagug

SEQ ID NO: 3242996 - RNA, 19 nt, Artificial Sequence
  Description of Artificial Sequence: Synthetic oligonucleotide
acuguuagcaaguggauau

SEQ ID NO: 3242997 - RNA, 19 nt, Artificial Sequence
  Description of Artificial Sequence: Synthetic oligonucleotide
cuaaguuucagugucuuug

SEQ ID NO: 3242998 - RNA, 19 nt, Artificial Sequence
  Description of Artificial Sequence: Synthetic oligonucleotide
uccuauguuuauauacugc

SEQ ID NO: 3242999 - RNA, 19 nt, Artificial Sequence
  Description of Artificial Sequence: Synthetic oligonucleotide
ucaaaauauacuucccaaa

SEQ ID NO: 3243000 - RNA, 19 nt, Artificial Sequence
  Description of Artificial Sequence: Synthetic oligonucleotide
cucauugugguuuucccag

SEQ ID NO: 3243001 - RNA, 19 nt, Artificial Sequence
  Description of Artificial Sequence: Synthetic oligonucleotide
cuuuaggaaacauggauca

SEQ ID NO: 3243002 - RNA, 19 nt, Artificial Sequence
  Description of Artificial Sequence: Synthetic oligonucleotide
  modified_base (16)..(16): a, c, u, g, unknown or other
uggaucauucuuuucnguc

SEQ ID NO: 3243003 - RNA, 19 nt, Artificial Sequence
  Description of Artificial Sequence: Synthetic oligonucleotide
cuaguuuucaugaacaaua

SEQ ID NO: 3243004 - RNA, 19 nt, Artificial Sequence
  Description of Artificial Sequence: Synthetic oligonucleotide
uggauauugaauucuucac

SEQ ID NO: 3243005 - RNA, 19 nt, Artificial Sequence
  Description of Artificial Sequence: Synthetic oligonucleotide
ugaagauacguguuauaca

SEQ ID NO: 3243006 - RNA, 19 nt, Artificial Sequence
  Description of Artificial Sequence: Synthetic oligonucleotide
aauguauaaacggguaggu

SEQ ID NO: 3243007 - RNA, 19 nt, Artificial Sequence
  Description of Artificial Sequence: Synthetic oligonucleotide
gauauaucuaaaagaaaca

SEQ ID NO: 3243008 - RNA, 19 nt, Artificial Sequence
  Description of Artificial Sequence: Synthetic oligonucleotide
cuuaagcuuuucuugcugc

SEQ ID NO: 3243009 - RNA, 19 nt, Artificial Sequence
  Description of Artificial Sequence: Synthetic oligonucleotide
aggaauuccaaagauauau

SEQ ID NO: 3243010 - RNA, 19 nt, Artificial Sequence
  Description of Artificial Sequence: Synthetic oligonucleotide
uuugagauaugacuaguuu

SEQ ID NO: 3243011 - RNA, 19 nt, Artificial Sequence
  Description of Artificial Sequence: Synthetic oligonucleotide
ugggcaauugcuuacaguu

SEQ ID NO: 3243012 - RNA, 19 nt, Artificial Sequence
  Description of Artificial Sequence: Synthetic oligonucleotide
cauuaauuaaaagucuaac

SEQ ID NO: 3243013 - RNA, 19 nt, Artificial Sequence
  Description of Artificial Sequence: Synthetic oligonucleotide
ucuuuacugaagauacgug

SEQ ID NO: 3243014 - RNA, 19 nt, Artificial Sequence
  Description of Artificial Sequence: Synthetic oligonucleotide
aauauccucauugugguuu

SEQ ID NO: 3243015 - RNA, 19 nt, Artificial Sequence
  Description of Artificial Sequence: Synthetic oligonucleotide
ugccuugggaaacuguuag

SEQ ID NO: 3243016 - RNA, 19 nt, Artificial Sequence
  Description of Artificial Sequence: Synthetic oligonucleotide
gauaucugucuuaagugcc

SEQ ID NO: 3243017 - RNA, 19 nt, Artificial Sequence
  Description of Artificial Sequence: Synthetic oligonucleotide
aaugucuuuaauuucacac

SEQ ID NO: 3243018 - RNA, 19 nt, Artificial Sequence
  Description of Artificial Sequence: Synthetic oligonucleotide
auaacauaugaauaggacc

SEQ ID NO: 3243019 - RNA, 19 nt, Artificial Sequence
  Description of Artificial Sequence: Synthetic oligonucleotide
aauaccaaauccuuuauga

SEQ ID NO: 3243020 - RNA, 19 nt, Artificial Sequence
  Description of Artificial Sequence: Synthetic oligonucleotide
aaagacaccaauccagggc

SEQ ID NO: 3243021 - RNA, 19 nt, Artificial Sequence
  Description of Artificial Sequence: Synthetic oligonucleotide
uaacauaugaauaggacca

SEQ ID NO: 3243022 - RNA, 19 nt, Artificial Sequence
  Description of Artificial Sequence: Synthetic oligonucleotide
uuugaaauauauauguaca

SEQ ID NO: 3243023 - RNA, 19 nt, Artificial Sequence
  Description of Artificial Sequence: Synthetic oligonucleotide
uuacuguugaguaacaagc

SEQ ID NO: 3243024 - RNA, 19 nt, Artificial Sequence
  Description of Artificial Sequence: Synthetic oligonucleotide
aauuagucuccuuauagug

SEQ ID NO: 3243025 - RNA, 19 nt, Artificial Sequence
  Description of Artificial Sequence: Synthetic oligonucleotide
uauaacacuaaucuccugc

SEQ ID NO: 3243026 - RNA, 19 nt, Artificial Sequence
  Description of Artificial Sequence: Synthetic oligonucleotide
aauaacauaugaauaggac

SEQ ID NO: 3243027 - RNA, 19 nt, Artificial Sequence
  Description of Artificial Sequence: Synthetic oligonucleotide
ucuacuuacguccuaauac

SEQ ID NO: 3243028 - RNA, 19 nt, Artificial Sequence
  Description of Artificial Sequence: Synthetic oligonucleotide
uaauauaccaccuuauacu

SEQ ID NO: 3243029 - RNA, 19 nt, Artificial Sequence
  Description of Artificial Sequence: Synthetic oligonucleotide
aaaaugaaggacuuccaug

SEQ ID NO: 3243030 - RNA, 19 nt, Artificial Sequence
  Description of Artificial Sequence: Synthetic oligonucleotide
aacgugaagaaacaccaag

SEQ ID NO: 3243031 - RNA, 19 nt, Artificial Sequence
  Description of Artificial Sequence: Synthetic oligonucleotide
auaacacuaaucuccugcc

SEQ ID NO: 3243032 - RNA, 19 nt, Artificial Sequence
  Description of Artificial Sequence: Synthetic oligonucleotide
uacaguuggcauuuaaagg

SEQ ID NO: 3243033 - RNA, 19 nt, Artificial Sequence
  Description of Artificial Sequence: Synthetic oligonucleotide
aguaaagcaugccagaugu

SEQ ID NO: 3243034 - RNA, 19 nt, Artificial Sequence
  Description of Artificial Sequence: Synthetic oligonucleotide
uuuaaaacccaacaucuaa

SEQ ID NO: 3243035 - RNA, 19 nt, Artificial Sequence
  Description of Artificial Sequence: Synthetic oligonucleotide
uauauuuauguacuuuuac

SEQ ID NO: 3243036 - RNA, 19 nt, Artificial Sequence
  Description of Artificial Sequence: Synthetic oligonucleotide
uuccaaguugaccaguugg

SEQ ID NO: 3243037 - RNA, 19 nt, Artificial Sequence
  Description of Artificial Sequence: Synthetic oligonucleotide
uaauuucacacaaugaaua

SEQ ID NO: 3243038 - RNA, 19 nt, Artificial Sequence
  Description of Artificial Sequence: Synthetic oligonucleotide
auuacuguugaguaacaag

SEQ ID NO: 3243039 - RNA, 19 nt, Artificial Sequence
  Description of Artificial Sequence: Synthetic oligonucleotide
uacgguauguuacaguuug

SEQ ID NO: 3243040 - RNA, 19 nt, Artificial Sequence
  Description of Artificial Sequence: Synthetic oligonucleotide
uacugugcuaaccugaucu

SEQ ID NO: 3243041 - RNA, 19 nt, Artificial Sequence
  Description of Artificial Sequence: Synthetic oligonucleotide
uuacauaaugaguaggacu

SEQ ID NO: 3243042 - RNA, 19 nt, Artificial Sequence
  Description of Artificial Sequence: Synthetic oligonucleotide
uguuucguggaaagaaacg

SEQ ID NO: 3243043 - RNA, 19 nt, Artificial Sequence
  Description of Artificial Sequence: Synthetic oligonucleotide
ucuccuuauaguguaagcg

SEQ ID NO: 3243044 - RNA, 19 nt, Artificial Sequence
  Description of Artificial Sequence: Synthetic oligonucleotide
ucugguagcgaagacaccg

SEQ ID NO: 3243045 - RNA, 19 nt, Artificial Sequence
  Description of Artificial Sequence: Synthetic oligonucleotide
uccuuauaguguaagcggg

SEQ ID NO: 3243046 - RNA, 19 nt, Artificial Sequence
  Description of Artificial Sequence: Synthetic oligonucleotide
uuagacaguucccagguca

SEQ ID NO: 3243047 - RNA, 19 nt, Artificial Sequence
  Description of Artificial Sequence: Synthetic oligonucleotide
agaaacgugaagaaacacc

SEQ ID NO: 3243048 - RNA, 19 nt, Artificial Sequence
  Description of Artificial Sequence: Synthetic oligonucleotide
acugugaugacauuaucug

SEQ ID NO: 3243049 - RNA, 19 nt, Artificial Sequence
  Description of Artificial Sequence: Synthetic oligonucleotide
uuaauuucacacaaugaau

SEQ ID NO: 3243050 - RNA, 19 nt, Artificial Sequence
  Description of Artificial Sequence: Synthetic oligonucleotide
ugcgacauaacacuuaaau

SEQ ID NO: 3243051 - RNA, 19 nt, Artificial Sequence
  Description of Artificial Sequence: Synthetic oligonucleotide
aauauaccaccuuauacua

SEQ ID NO: 3243052 - RNA, 19 nt, Artificial Sequence
  Description of Artificial Sequence: Synthetic oligonucleotide
aagacaccaauccagggca

SEQ ID NO: 3243053 - RNA, 19 nt, Artificial Sequence
  Description of Artificial Sequence: Synthetic oligonucleotide
uugaagacucaucaguacc

SEQ ID NO: 3243054 - RNA, 19 nt, Artificial Sequence
  Description of Artificial Sequence: Synthetic oligonucleotide
uuucccuucuaucugaccu

SEQ ID NO: 3243055 - RNA, 19 nt, Artificial Sequence
  Description of Artificial Sequence: Synthetic oligonucleotide
cuacaguuggcauuuaaag

SEQ ID NO: 3243056 - RNA, 19 nt, Artificial Sequence
  Description of Artificial Sequence: Synthetic oligonucleotide
aaaauccugcgacauaaca

SEQ ID NO: 3243057 - RNA, 19 nt, Artificial Sequence
  Description of Artificial Sequence: Synthetic oligonucleotide
cgacauaacacuuaaaugg

SEQ ID NO: 3243058 - RNA, 19 nt, Artificial Sequence
  Description of Artificial Sequence: Synthetic oligonucleotide
auugaagacucaucaguac

SEQ ID NO: 3243059 - RNA, 19 nt, Artificial Sequence
  Description of Artificial Sequence: Synthetic oligonucleotide
uuuugacugccauugaaca

SEQ ID NO: 3243060 - RNA, 19 nt, Artificial Sequence
  Description of Artificial Sequence: Synthetic oligonucleotide
acauucuaaaaugaaggac

SEQ ID NO: 3243061 - RNA, 19 nt, Artificial Sequence
  Description of Artificial Sequence: Synthetic oligonucleotide
ucuauauuuauguacuuuu

SEQ ID NO: 3243062 - RNA, 19 nt, Artificial Sequence
  Description of Artificial Sequence: Synthetic oligonucleotide
aaggacuuguaagacaauc

SEQ ID NO: 3243063 - RNA, 19 nt, Artificial Sequence
  Description of Artificial Sequence: Synthetic oligonucleotide
gagagcaugacaguaaagc

SEQ ID NO: 3243064 - RNA, 19 nt, Artificial Sequence
  Description of Artificial Sequence: Synthetic oligonucleotide
cuauauucaauaaaauaca

SEQ ID NO: 3243065 - RNA, 19 nt, Artificial Sequence
  Description of Artificial Sequence: Synthetic oligonucleotide
aguguaagcggguuucuac

SEQ ID NO: 3243066 - RNA, 19 nt, Artificial Sequence
  Description of Artificial Sequence: Synthetic oligonucleotide
uuugcaucuagguuuuacc

SEQ ID NO: 3243067 - RNA, 19 nt, Artificial Sequence
  Description of Artificial Sequence: Synthetic oligonucleotide
cucaucaguaccuccaagg

SEQ ID NO: 3243068 - RNA, 19 nt, Artificial Sequence
  Description of Artificial Sequence: Synthetic oligonucleotide
cuccuuauaguguaagcgg

SEQ ID NO: 3243069 - RNA, 19 nt, Artificial Sequence
  Description of Artificial Sequence: Synthetic oligonucleotide
uacgauaggguaguguugg

SEQ ID NO: 3243070 - RNA, 19 nt, Artificial Sequence
  Description of Artificial Sequence: Synthetic oligonucleotide
uuuaugaucugcuuauaau

SEQ ID NO: 3243071 - RNA, 19 nt, Artificial Sequence
  Description of Artificial Sequence: Synthetic oligonucleotide
acuuuagacaguucccagg

SEQ ID NO: 3243072 - RNA, 19 nt, Artificial Sequence
  Description of Artificial Sequence: Synthetic oligonucleotide
cuuauacuauaauucugcc

SEQ ID NO: 3243073 - RNA, 19 nt, Artificial Sequence
  Description of Artificial Sequence: Synthetic oligonucleotide
uugugauacgauaggguag

SEQ ID NO: 3243074 - RNA, 19 nt, Artificial Sequence
  Description of Artificial Sequence: Synthetic oligonucleotide
aagugacugaguccaacag

SEQ ID NO: 3243075 - RNA, 19 nt, Artificial Sequence
  Description of Artificial Sequence: Synthetic oligonucleotide
gaaacgugaagaaacacca

SEQ ID NO: 3243076 - RNA, 19 nt, Artificial Sequence
  Description of Artificial Sequence: Synthetic oligonucleotide
augacaguaaagcaugcca

SEQ ID NO: 3243077 - RNA, 19 nt, Artificial Sequence
  Description of Artificial Sequence: Synthetic oligonucleotide
aagaccaugggagagcaug

SEQ ID NO: 3243078 - RNA, 19 nt, Artificial Sequence
  Description of Artificial Sequence: Synthetic oligonucleotide
uugaaauauauauguacau

SEQ ID NO: 3243079 - RNA, 19 nt, Artificial Sequence
  Description of Artificial Sequence: Synthetic oligonucleotide
aaauacaccccacaagcuu

SEQ ID NO: 3243080 - RNA, 19 nt, Artificial Sequence
  Description of Artificial Sequence: Synthetic oligonucleotide
gaaagacaccaauccaggg

SEQ ID NO: 3243081 - RNA, 19 nt, Artificial Sequence
  Description of Artificial Sequence: Synthetic oligonucleotide
uacuguugaguaacaagcc

SEQ ID NO: 3243082 - RNA, 19 nt, Artificial Sequence
  Description of Artificial Sequence: Synthetic oligonucleotide
auugugauacgauagggua

SEQ ID NO: 3243083 - RNA, 19 nt, Artificial Sequence
  Description of Artificial Sequence: Synthetic oligonucleotide
uuucguggaaagaaacgug

SEQ ID NO: 3243084 - RNA, 19 nt, Artificial Sequence
  Description of Artificial Sequence: Synthetic oligonucleotide
ugcauuuauuauuauuuaa

SEQ ID NO: 3243085 - RNA, 19 nt, Artificial Sequence
  Description of Artificial Sequence: Synthetic oligonucleotide
uccaaguugaccaguuggc

SEQ ID NO: 3243086 - RNA, 19 nt, Artificial Sequence
  Description of Artificial Sequence: Synthetic oligonucleotide
ucaucaguaccuccaagga

SEQ ID NO: 3243087 - RNA, 19 nt, Artificial Sequence
  Description of Artificial Sequence: Synthetic oligonucleotide
agguuuuaccuucucaucu

SEQ ID NO: 3243088 - RNA, 19 nt, Artificial Sequence
  Description of Artificial Sequence: Synthetic oligonucleotide
uuaucuucuguuccucuca

SEQ ID NO: 3243089 - RNA, 19 nt, Artificial Sequence
  Description of Artificial Sequence: Synthetic oligonucleotide
ucugaggaaguuuaucuuc

SEQ ID NO: 3243090 - RNA, 19 nt, Artificial Sequence
  Description of Artificial Sequence: Synthetic oligonucleotide
ugcagaacacuaauuuuga

SEQ ID NO: 3243091 - RNA, 19 nt, Artificial Sequence
  Description of Artificial Sequence: Synthetic oligonucleotide
uacgccucaaaugacagca

SEQ ID NO: 3243092 - RNA, 19 nt, Artificial Sequence
  Description of Artificial Sequence: Synthetic oligonucleotide
uugacugccauugaacaug

SEQ ID NO: 3243093 - RNA, 19 nt, Artificial Sequence
  Description of Artificial Sequence: Synthetic oligonucleotide
acuauaauucugccaccac

SEQ ID NO: 3243094 - RNA, 19 nt, Artificial Sequence
  Description of Artificial Sequence: Synthetic oligonucleotide
acaccgagcauucuuuuag

SEQ ID NO: 3243095 - RNA, 19 nt, Artificial Sequence
  Description of Artificial Sequence: Synthetic oligonucleotide
uguuccucucauuugagau

SEQ ID NO: 3243096 - RNA, 19 nt, Artificial Sequence
  Description of Artificial Sequence: Synthetic oligonucleotide
ugaacauggccucccacug

SEQ ID NO: 3243097 - RNA, 19 nt, Artificial Sequence
  Description of Artificial Sequence: Synthetic oligonucleotide
ccuuauacuauaauucugc

SEQ ID NO: 3243098 - RNA, 19 nt, Artificial Sequence
  Description of Artificial Sequence: Synthetic oligonucleotide
accuccaaggagcuuuugc

SEQ ID NO: 3243099 - RNA, 19 nt, Artificial Sequence
  Description of Artificial Sequence: Synthetic oligonucleotide
guagcgaagacaccgagca

SEQ ID NO: 3243100 - RNA, 19 nt, Artificial Sequence
  Description of Artificial Sequence: Synthetic oligonucleotide
uaucuguauagacuuuaga

SEQ ID NO: 3243101 - RNA, 19 nt, Artificial Sequence
  Description of Artificial Sequence: Synthetic oligonucleotide
agaugcuacgguauguuac

SEQ ID NO: 3243102 - RNA, 19 nt, Artificial Sequence
  Description of Artificial Sequence: Synthetic oligonucleotide
aaauccuuuaugaucugcu

SEQ ID NO: 3243103 - RNA, 19 nt, Artificial Sequence
  Description of Artificial Sequence: Synthetic oligonucleotide
ugacugccauugaacaugg

SEQ ID NO: 3243104 - RNA, 19 nt, Artificial Sequence
  Description of Artificial Sequence: Synthetic oligonucleotide
ugcuuauaauauaccaccu

SEQ ID NO: 3243105 - RNA, 19 nt, Artificial Sequence
  Description of Artificial Sequence: Synthetic oligonucleotide
acuaaucuccugccagccc

SEQ ID NO: 3243106 - RNA, 19 nt, Artificial Sequence
  Description of Artificial Sequence: Synthetic oligonucleotide
gcauuuauuauuauuuaag

SEQ ID NO: 3243107 - RNA, 19 nt, Artificial Sequence
  Description of Artificial Sequence: Synthetic oligonucleotide
uuuaccuucucaucucuaa

SEQ ID NO: 3243108 - RNA, 19 nt, Artificial Sequence
  Description of Artificial Sequence: Synthetic oligonucleotide
uucucaucucuaauuaguc

SEQ ID NO: 3243109 - RNA, 19 nt, Artificial Sequence
  Description of Artificial Sequence: Synthetic oligonucleotide
uuagaaacacgaggcagag

SEQ ID NO: 3243110 - RNA, 19 nt, Artificial Sequence
  Description of Artificial Sequence: Synthetic oligonucleotide
cuuauaauauaccaccuua

SEQ ID NO: 3243111 - RNA, 19 nt, Artificial Sequence
  Description of Artificial Sequence: Synthetic oligonucleotide
gaccauugugauacgauag

SEQ ID NO: 3243112 - RNA, 19 nt, Artificial Sequence
  Description of Artificial Sequence: Synthetic oligonucleotide
aggcauuuuggcuccugcc

SEQ ID NO: 3243113 - RNA, 19 nt, Artificial Sequence
  Description of Artificial Sequence: Synthetic oligonucleotide
auagucaccuuugcuaggg

SEQ ID NO: 3243114 - RNA, 19 nt, Artificial Sequence
  Description of Artificial Sequence: Synthetic oligonucleotide
uauaguguaagcggguuuc

SEQ ID NO: 3243115 - RNA, 19 nt, Artificial Sequence
  Description of Artificial Sequence: Synthetic oligonucleotide
ugugauacgauaggguagu

SEQ ID NO: 3243116 - RNA, 19 nt, Artificial Sequence
  Description of Artificial Sequence: Synthetic oligonucleotide
ucauuugagaugagggguc

SEQ ID NO: 3243117 - RNA, 19 nt, Artificial Sequence
  Description of Artificial Sequence: Synthetic oligonucleotide
auauuaaugaaacugccac

SEQ ID NO: 3243118 - RNA, 19 nt, Artificial Sequence
  Description of Artificial Sequence: Synthetic oligonucleotide
aggaagaaugcacaaaugc

SEQ ID NO: 3243119 - RNA, 19 nt, Artificial Sequence
  Description of Artificial Sequence: Synthetic oligonucleotide
uuaugagccaauaagucag

SEQ ID NO: 3243120 - RNA, 19 nt, Artificial Sequence
  Description of Artificial Sequence: Synthetic oligonucleotide
gaaacugucauuuugccac

SEQ ID NO: 3243121 - RNA, 19 nt, Artificial Sequence
  Description of Artificial Sequence: Synthetic oligonucleotide
uuuuccauugcuauuacca

SEQ ID NO: 3243122 - RNA, 19 nt, Artificial Sequence
  Description of Artificial Sequence: Synthetic oligonucleotide
aauaagucagccaaugagg

SEQ ID NO: 3243123 - RNA, 19 nt, Artificial Sequence
  Description of Artificial Sequence: Synthetic oligonucleotide
auuaugauccuuuuacuuc

SEQ ID NO: 3243124 - RNA, 19 nt, Artificial Sequence
  Description of Artificial Sequence: Synthetic oligonucleotide
cauauuaugauccuuuuac

SEQ ID NO: 3243125 - RNA, 19 nt, Artificial Sequence
  Description of Artificial Sequence: Synthetic oligonucleotide
aaauaggauacauauuaug

SEQ ID NO: 3243126 - RNA, 19 nt, Artificial Sequence
  Description of Artificial Sequence: Synthetic oligonucleotide
aauugagucuacaaagccc

SEQ ID NO: 3243127 - RNA, 19 nt, Artificial Sequence
  Description of Artificial Sequence: Synthetic oligonucleotide
uuaagcgaguacuugagag

SEQ ID NO: 3243128 - RNA, 19 nt, Artificial Sequence
  Description of Artificial Sequence: Synthetic oligonucleotide
aauaggauacauauuauga

SEQ ID NO: 3243129 - RNA, 19 nt, Artificial Sequence
  Description of Artificial Sequence: Synthetic oligonucleotide
ugucucaagucgaugaagg

SEQ ID NO: 3243130 - RNA, 19 nt, Artificial Sequence
  Description of Artificial Sequence: Synthetic oligonucleotide
aaucccauugaaugaagag

SEQ ID NO: 3243131 - RNA, 19 nt, Artificial Sequence
  Description of Artificial Sequence: Synthetic oligonucleotide
aggauacauauuaugaucc

SEQ ID NO: 3243132 - RNA, 19 nt, Artificial Sequence
  Description of Artificial Sequence: Synthetic oligonucleotide
uuagacuauauuaaugaaa

SEQ ID NO: 3243133 - RNA, 19 nt, Artificial Sequence
  Description of Artificial Sequence: Synthetic oligonucleotide
agugucaaucaauuucugc

SEQ ID NO: 3243134 - RNA, 19 nt, Artificial Sequence
  Description of Artificial Sequence: Synthetic oligonucleotide
uugagagcaaauaggauac

SEQ ID NO: 3243135 - RNA, 19 nt, Artificial Sequence
  Description of Artificial Sequence: Synthetic oligonucleotide
ucaguuuucuauuaguauc

SEQ ID NO: 3243136 - RNA, 19 nt, Artificial Sequence
  Description of Artificial Sequence: Synthetic oligonucleotide
ugguauaguacauagguau

SEQ ID NO: 3243137 - RNA, 19 nt, Artificial Sequence
  Description of Artificial Sequence: Synthetic oligonucleotide
caauaagucagccaaugag

SEQ ID NO: 3243138 - RNA, 19 nt, Artificial Sequence
  Description of Artificial Sequence: Synthetic oligonucleotide
caugaaucguccauguucc

SEQ ID NO: 3243139 - RNA, 19 nt, Artificial Sequence
  Description of Artificial Sequence: Synthetic oligonucleotide
ugggcuacggcaaaugucc

SEQ ID NO: 3243140 - RNA, 19 nt, Artificial Sequence
  Description of Artificial Sequence: Synthetic oligonucleotide
uggauauccuaaacuaagg

SEQ ID NO: 3243141 - RNA, 19 nt, Artificial Sequence
  Description of Artificial Sequence: Synthetic oligonucleotide
auaagucagccaaugaggc

SEQ ID NO: 3243142 - RNA, 19 nt, Artificial Sequence
  Description of Artificial Sequence: Synthetic oligonucleotide
ugaggaagaaugcacaaau

SEQ ID NO: 3243143 - RNA, 19 nt, Artificial Sequence
  Description of Artificial Sequence: Synthetic oligonucleotide
auagggaaagguuauguga

SEQ ID NO: 3243144 - RNA, 19 nt, Artificial Sequence
  Description of Artificial Sequence: Synthetic oligonucleotide
uccuaugcacuuaagcgag

SEQ ID NO: 3243145 - RNA, 19 nt, Artificial Sequence
  Description of Artificial Sequence: Synthetic oligonucleotide
uuaugugaauacuguacag

SEQ ID NO: 3243146 - RNA, 19 nt, Artificial Sequence
  Description of Artificial Sequence: Synthetic oligonucleotide
uacccacugaauuuguggg

SEQ ID NO: 3243147 - RNA, 19 nt, Artificial Sequence
  Description of Artificial Sequence: Synthetic oligonucleotide
uauucuugcggcuaguauc

SEQ ID NO: 3243148 - RNA, 19 nt, Artificial Sequence
  Description of Artificial Sequence: Synthetic oligonucleotide
uuucuauuaguauccguca

SEQ ID NO: 3243149 - RNA, 19 nt, Artificial Sequence
  Description of Artificial Sequence: Synthetic oligonucleotide
uccaauaguugucucaagu

SEQ ID NO: 3243150 - RNA, 19 nt, Artificial Sequence
  Description of Artificial Sequence: Synthetic oligonucleotide
uaggauacauauuaugauc

SEQ ID NO: 3243151 - RNA, 19 nt, Artificial Sequence
  Description of Artificial Sequence: Synthetic oligonucleotide
cuuugugggcccaaggccg

SEQ ID NO: 3243152 - RNA, 19 nt, Artificial Sequence
  Description of Artificial Sequence: Synthetic oligonucleotide
ucucuuacuauagggaaag

SEQ ID NO: 3243153 - RNA, 19 nt, Artificial Sequence
  Description of Artificial Sequence: Synthetic oligonucleotide
aaggccgacauucaggaau

SEQ ID NO: 3243154 - RNA, 19 nt, Artificial Sequence
  Description of Artificial Sequence: Synthetic oligonucleotide
uuuccauugcuauuaccag

SEQ ID NO: 3243155 - RNA, 19 nt, Artificial Sequence
  Description of Artificial Sequence: Synthetic oligonucleotide
ucuauuaguauccgucacu

SEQ ID NO: 3243156 - RNA, 19 nt, Artificial Sequence
  Description of Artificial Sequence: Synthetic oligonucleotide
ggucagagcagucacaggg

SEQ ID NO: 3243157 - RNA, 19 nt, Artificial Sequence
  Description of Artificial Sequence: Synthetic oligonucleotide
cacagugucaaucaauuuc

SEQ ID NO: 3243158 - RNA, 19 nt, Artificial Sequence
  Description of Artificial Sequence: Synthetic oligonucleotide
agauggauauccuaaacua

SEQ ID NO: 3243159 - RNA, 19 nt, Artificial Sequence
  Description of Artificial Sequence: Synthetic oligonucleotide
ucaugauugcggaugcgag

SEQ ID NO: 3243160 - RNA, 19 nt, Artificial Sequence
  Description of Artificial Sequence: Synthetic oligonucleotide
augggguccaaagugaaac

SEQ ID NO: 3243161 - RNA, 19 nt, Artificial Sequence
  Description of Artificial Sequence: Synthetic oligonucleotide
acuuaugagccaauaaguc

SEQ ID NO: 3243162 - RNA, 19 nt, Artificial Sequence
  Description of Artificial Sequence: Synthetic oligonucleotide
gguuagacuauauuaauga

SEQ ID NO: 3243163 - RNA, 19 nt, Artificial Sequence
  Description of Artificial Sequence: Synthetic oligonucleotide
agcguguccucccaguggc

SEQ ID NO: 3243164 - RNA, 19 nt, Artificial Sequence
  Description of Artificial Sequence: Synthetic oligonucleotide
auuaccaguuccuugcccu

SEQ ID NO: 3243165 - RNA, 19 nt, Artificial Sequence
  Description of Artificial Sequence: Synthetic oligonucleotide
augaaacugccaccuaugg

SEQ ID NO: 3243166 - RNA, 19 nt, Artificial Sequence
  Description of Artificial Sequence: Synthetic oligonucleotide
ucucaagucgaugaaggcc

SEQ ID NO: 3243167 - RNA, 19 nt, Artificial Sequence
  Description of Artificial Sequence: Synthetic oligonucleotide
agucacaggguucacccgg

SEQ ID NO: 3243168 - RNA, 19 nt, Artificial Sequence
  Description of Artificial Sequence: Synthetic oligonucleotide
ucguccauguuccucacca

SEQ ID NO: 3243169 - RNA, 19 nt, Artificial Sequence
  Description of Artificial Sequence: Synthetic oligonucleotide
uaagcgaguacuugagagc

SEQ ID NO: 3243170 - RNA, 19 nt, Artificial Sequence
  Description of Artificial Sequence: Synthetic oligonucleotide
ucaguaauugagucuacaa

SEQ ID NO: 3243171 - RNA, 19 nt, Artificial Sequence
  Description of Artificial Sequence: Synthetic oligonucleotide
ggaccaaucccauugaaug

SEQ ID NO: 3243172 - RNA, 19 nt, Artificial Sequence
  Description of Artificial Sequence: Synthetic oligonucleotide
cagccuaagauccacggcc

SEQ ID NO: 3243173 - RNA, 19 nt, Artificial Sequence
  Description of Artificial Sequence: Synthetic oligonucleotide
cuuaugagccaauaaguca

SEQ ID NO: 3243174 - RNA, 19 nt, Artificial Sequence
  Description of Artificial Sequence: Synthetic oligonucleotide
accuaugggguccaaagug

SEQ ID NO: 3243175 - RNA, 19 nt, Artificial Sequence
  Description of Artificial Sequence: Synthetic oligonucleotide
cuuugguauaguacauagg

SEQ ID NO: 3243176 - RNA, 19 nt, Artificial Sequence
  Description of Artificial Sequence: Synthetic oligonucleotide
ugaagagguccaauaguug

SEQ ID NO: 3243177 - RNA, 19 nt, Artificial Sequence
  Description of Artificial Sequence: Synthetic oligonucleotide
uuuguggggccuuggauug

SEQ ID NO: 3243178 - RNA, 19 nt, Artificial Sequence
  Description of Artificial Sequence: Synthetic oligonucleotide
cuugagagcaaauaggaua

SEQ ID NO: 3243179 - RNA, 19 nt, Artificial Sequence
  Description of Artificial Sequence: Synthetic oligonucleotide
aaugaaacugccaccuaug

SEQ ID NO: 3243180 - RNA, 19 nt, Artificial Sequence
  Description of Artificial Sequence: Synthetic oligonucleotide
uuggguuguccauagucag

SEQ ID NO: 3243181 - RNA, 19 nt, Artificial Sequence
  Description of Artificial Sequence: Synthetic oligonucleotide
aauuuguggggccuuggau

SEQ ID NO: 3243182 - RNA, 19 nt, Artificial Sequence
  Description of Artificial Sequence: Synthetic oligonucleotide
acagaccugagcgugggcc

SEQ ID NO: 3243183 - RNA, 19 nt, Artificial Sequence
  Description of Artificial Sequence: Synthetic oligonucleotide
uguuguagccgacacugcu

SEQ ID NO: 3243184 - RNA, 19 nt, Artificial Sequence
  Description of Artificial Sequence: Synthetic oligonucleotide
auggauauccuaaacuaag

SEQ ID NO: 3243185 - RNA, 19 nt, Artificial Sequence
  Description of Artificial Sequence: Synthetic oligonucleotide
auugagucuacaaagcccu

SEQ ID NO: 3243186 - RNA, 19 nt, Artificial Sequence
  Description of Artificial Sequence: Synthetic oligonucleotide
uucuauuaguauccgucac

SEQ ID NO: 3243187 - RNA, 19 nt, Artificial Sequence
  Description of Artificial Sequence: Synthetic oligonucleotide
gaaucguccauguuccuca

SEQ ID NO: 3243188 - RNA, 19 nt, Artificial Sequence
  Description of Artificial Sequence: Synthetic oligonucleotide
aagcgaguacuugagagca

SEQ ID NO: 3243189 - RNA, 19 nt, Artificial Sequence
  Description of Artificial Sequence: Synthetic oligonucleotide
ugcugaugaguccucggag

SEQ ID NO: 3243190 - RNA, 19 nt, Artificial Sequence
  Description of Artificial Sequence: Synthetic oligonucleotide
uauuaccaguuccuugccc

SEQ ID NO: 3243191 - RNA, 19 nt, Artificial Sequence
  Description of Artificial Sequence: Synthetic oligonucleotide
cucuccuaugcacuuaagc

SEQ ID NO: 3243192 - RNA, 19 nt, Artificial Sequence
  Description of Artificial Sequence: Synthetic oligonucleotide
ucaagcagggucagagcag

SEQ ID NO: 3243193 - RNA, 19 nt, Artificial Sequence
  Description of Artificial Sequence: Synthetic oligonucleotide
caaauguccuuugugggcc

SEQ ID NO: 3243194 - RNA, 19 nt, Artificial Sequence
  Description of Artificial Sequence: Synthetic oligonucleotide
uggcaguaaauauuucucu

SEQ ID NO: 3243195 - RNA, 19 nt, Artificial Sequence
  Description of Artificial Sequence: Synthetic oligonucleotide
gaugcgaguuucuaacuuc

SEQ ID NO: 3243196 - RNA, 19 nt, Artificial Sequence
  Description of Artificial Sequence: Synthetic oligonucleotide
auguuccucaccaucauag

SEQ ID NO: 3243197 - RNA, 19 nt, Artificial Sequence
  Description of Artificial Sequence: Synthetic oligonucleotide
cucaagucgaugaaggcca

SEQ ID NO: 3243198 - RNA, 19 nt, Artificial Sequence
  Description of Artificial Sequence: Synthetic oligonucleotide
cucagccuaagauccacgg

SEQ ID NO: 3243199 - RNA, 19 nt, Artificial Sequence
  Description of Artificial Sequence: Synthetic oligonucleotide
agcgaguaccccucacucc

SEQ ID NO: 3243200 - RNA, 19 nt, Artificial Sequence
  Description of Artificial Sequence: Synthetic oligonucleotide
aaaauacauaugcucucuu

SEQ ID NO: 3243201 - RNA, 19 nt, Artificial Sequence
  Description of Artificial Sequence: Synthetic oligonucleotide
gaaugcacaaaugcagggc

SEQ ID NO: 3243202 - RNA, 19 nt, Artificial Sequence
  Description of Artificial Sequence: Synthetic oligonucleotide
acuagguacccacugaauu

SEQ ID NO: 3243203 - RNA, 19 nt, Artificial Sequence
  Description of Artificial Sequence: Synthetic oligonucleotide
aagagguccaauaguuguc

SEQ ID NO: 3243204 - RNA, 19 nt, Artificial Sequence
  Description of Artificial Sequence: Synthetic oligonucleotide
acuuucagcaguucaguaa

SEQ ID NO: 3243205 - RNA, 19 nt, Artificial Sequence
  Description of Artificial Sequence: Synthetic oligonucleotide
aaucguccauguuccucac

SEQ ID NO: 3243206 - RNA, 19 nt, Artificial Sequence
  Description of Artificial Sequence: Synthetic oligonucleotide
gucaaucaauuucugcuug

SEQ ID NO: 3243207 - RNA, 19 nt, Artificial Sequence
  Description of Artificial Sequence: Synthetic oligonucleotide
gaagagguccaauaguugu

SEQ ID NO: 3243208 - RNA, 19 nt, Artificial Sequence
  Description of Artificial Sequence: Synthetic oligonucleotide
auuuguggggccuuggauu

SEQ ID NO: 3243209 - RNA, 19 nt, Artificial Sequence
  Description of Artificial Sequence: Synthetic oligonucleotide
auugcuauuaccaguuccu

SEQ ID NO: 3243210 - RNA, 19 nt, Artificial Sequence
  Description of Artificial Sequence: Synthetic oligonucleotide
uuauucuugcggcuaguau

SEQ ID NO: 3243211 - RNA, 19 nt, Artificial Sequence
  Description of Artificial Sequence: Synthetic oligonucleotide
gugucaaucaauuucugcu

SEQ ID NO: 3243212 - RNA, 19 nt, Artificial Sequence
  Description of Artificial Sequence: Synthetic oligonucleotide
auuuugccacacgacacac

SEQ ID NO: 3243213 - RNA, 19 nt, Artificial Sequence
  Description of Artificial Sequence: Synthetic oligonucleotide
ucagccuaagauccacggc

SEQ ID NO: 3243214 - RNA, 19 nt, Artificial Sequence
  Description of Artificial Sequence: Synthetic oligonucleotide
ugucaaucaauuucugcuu

SEQ ID NO: 3243215 - RNA, 19 nt, Artificial Sequence
  Description of Artificial Sequence: Synthetic oligonucleotide
cagcuaacuaccucucucc

SEQ ID NO: 3243216 - RNA, 19 nt, Artificial Sequence
  Description of Artificial Sequence: Synthetic oligonucleotide
cauugaaugaagaggucca

SEQ ID NO: 3243217 - RNA, 19 nt, Artificial Sequence
  Description of Artificial Sequence: Synthetic oligonucleotide
uuuaccaacacacagaaca

SEQ ID NO: 3243218 - RNA, 19 nt, Artificial Sequence
  Description of Artificial Sequence: Synthetic oligonucleotide
ugugacauaguaaugagcg

SEQ ID NO: 3243219 - RNA, 19 nt, Artificial Sequence
  Description of Artificial Sequence: Synthetic oligonucleotide
ugugguaugaaucauguag

SEQ ID NO: 3243220 - RNA, 19 nt, Artificial Sequence
  Description of Artificial Sequence: Synthetic oligonucleotide
aaucaugacauuccaaaac

SEQ ID NO: 3243221 - RNA, 19 nt, Artificial Sequence
  Description of Artificial Sequence: Synthetic oligonucleotide
aauucuguccuguuaagac

SEQ ID NO: 3243222 - RNA, 19 nt, Artificial Sequence
  Description of Artificial Sequence: Synthetic oligonucleotide
ucauucagaacacaaauag

SEQ ID NO: 3243223 - RNA, 19 nt, Artificial Sequence
  Description of Artificial Sequence: Synthetic oligonucleotide
aaggcuuuccaacaguugc

SEQ ID NO: 3243224 - RNA, 19 nt, Artificial Sequence
  Description of Artificial Sequence: Synthetic oligonucleotide
uugacaauugcuuaaaggc

SEQ ID NO: 3243225 - RNA, 19 nt, Artificial Sequence
  Description of Artificial Sequence: Synthetic oligonucleotide
auaaauuucauuuuggaau

SEQ ID NO: 3243226 - RNA, 19 nt, Artificial Sequence
  Description of Artificial Sequence: Synthetic oligonucleotide
aaucauguagucuauguug

SEQ ID NO: 3243227 - RNA, 19 nt, Artificial Sequence
  Description of Artificial Sequence: Synthetic oligonucleotide
uguuauguaaaacugcacc

SEQ ID NO: 3243228 - RNA, 19 nt, Artificial Sequence
  Description of Artificial Sequence: Synthetic oligonucleotide
uaaaaugaacuucaaguag

SEQ ID NO: 3243229 - RNA, 19 nt, Artificial Sequence
  Description of Artificial Sequence: Synthetic oligonucleotide
aucaugacauuccaaaacc

SEQ ID NO: 3243230 - RNA, 19 nt, Artificial Sequence
  Description of Artificial Sequence: Synthetic oligonucleotide
aaauagggcauccccaccc

SEQ ID NO: 3243231 - RNA, 19 nt, Artificial Sequence
  Description of Artificial Sequence: Synthetic oligonucleotide
uuuggaauacacuaguaag

SEQ ID NO: 3243232 - RNA, 19 nt, Artificial Sequence
  Description of Artificial Sequence: Synthetic oligonucleotide
aauuagaucccacauaaaa

SEQ ID NO: 3243233 - RNA, 19 nt, Artificial Sequence
  Description of Artificial Sequence: Synthetic oligonucleotide
acacuaguaagcuaggaac

SEQ ID NO: 3243234 - RNA, 19 nt, Artificial Sequence
  Description of Artificial Sequence: Synthetic oligonucleotide
aacaaaaugauuucccaca

SEQ ID NO: 3243235 - RNA, 19 nt, Artificial Sequence
  Description of Artificial Sequence: Synthetic oligonucleotide
uccugugugaauuagaaga

SEQ ID NO: 3243236 - RNA, 19 nt, Artificial Sequence
  Description of Artificial Sequence: Synthetic oligonucleotide
uuagaucccacauaaaaug

SEQ ID NO: 3243237 - RNA, 19 nt, Artificial Sequence
  Description of Artificial Sequence: Synthetic oligonucleotide
acagaacacacauaaggcc

SEQ ID NO: 3243238 - RNA, 19 nt, Artificial Sequence
  Description of Artificial Sequence: Synthetic oligonucleotide
uguuuuacaaaugauuucc

SEQ ID NO: 3243239 - RNA, 19 nt, Artificial Sequence
  Description of Artificial Sequence: Synthetic oligonucleotide
  modified_base (2)..(2): a, c, u, g, unknown or other
anaucaagacauuuacaag

SEQ ID NO: 3243240 - RNA, 19 nt, Artificial Sequence
  Description of Artificial Sequence: Synthetic oligonucleotide
auucagaacacaaauaggg

SEQ ID NO: 3243241 - RNA, 19 nt, Artificial Sequence
  Description of Artificial Sequence: Synthetic oligonucleotide
ugugugaauuagaagaugc

SEQ ID NO: 3243242 - RNA, 19 nt, Artificial Sequence
  Description of Artificial Sequence: Synthetic oligonucleotide
ucuauguugaauucugucc

SEQ ID NO: 3243243 - RNA, 19 nt, Artificial Sequence
  Description of Artificial Sequence: Synthetic oligonucleotide
augaacuucaaguagauaa

SEQ ID NO: 3243244 - RNA, 19 nt, Artificial Sequence
  Description of Artificial Sequence: Synthetic oligonucleotide
auaaugugauuucaguugg

SEQ ID NO: 3243245 - RNA, 19 nt, Artificial Sequence
  Description of Artificial Sequence: Synthetic oligonucleotide
gaauacacuaguaagcuag

SEQ ID NO: 3243246 - RNA, 19 nt, Artificial Sequence
  Description of Artificial Sequence: Synthetic oligonucleotide
ugagauguuuuacaaauga

SEQ ID NO: 3243247 - RNA, 19 nt, Artificial Sequence
  Description of Artificial Sequence: Synthetic oligonucleotide
uucaaguagauaaauaaau

SEQ ID NO: 3243248 - RNA, 19 nt, Artificial Sequence
  Description of Artificial Sequence: Synthetic oligonucleotide
ugugauuucaguugggaug

SEQ ID NO: 3243249 - RNA, 19 nt, Artificial Sequence
  Description of Artificial Sequence: Synthetic oligonucleotide
  modified_base (13)..(13): a, c, u, g, unknown or other
aaugauuucccanaucaag

SEQ ID NO: 3243250 - RNA, 19 nt, Artificial Sequence
  Description of Artificial Sequence: Synthetic oligonucleotide
uuugauaaugugauuucag

SEQ ID NO: 3243251 - RNA, 19 nt, Artificial Sequence
  Description of Artificial Sequence: Synthetic oligonucleotide
uuugcaaggcuucucaacc

SEQ ID NO: 3243252 - RNA, 19 nt, Artificial Sequence
  Description of Artificial Sequence: Synthetic oligonucleotide
  modified_base (10)..(10): a, c, u, g, unknown or other
  modified_base (19)..(19): a, c, u, g, unknown or other
auaauuaacngcuucccan

SEQ ID NO: 3243253 - RNA, 19 nt, Artificial Sequence
  Description of Artificial Sequence: Synthetic oligonucleotide
ucagauggagaacaaaaug

SEQ ID NO: 3243254 - RNA, 19 nt, Artificial Sequence
  Description of Artificial Sequence: Synthetic oligonucleotide
uguggauuugauaauguga

SEQ ID NO: 3243255 - RNA, 19 nt, Artificial Sequence
  Description of Artificial Sequence: Synthetic oligonucleotide
uucauuuuggaauacacua

SEQ ID NO: 3243256 - RNA, 19 nt, Artificial Sequence
  Description of Artificial Sequence: Synthetic oligonucleotide
aacccuguuauguaaaacu

SEQ ID NO: 3243257 - RNA, 19 nt, Artificial Sequence
  Description of Artificial Sequence: Synthetic oligonucleotide
guugacaauugcuuaaagg

SEQ ID NO: 3243258 - RNA, 19 nt, Artificial Sequence
  Description of Artificial Sequence: Synthetic oligonucleotide
  modified_base (14)..(14): a, c, u, g, unknown or other
auggauaauuaacngcuuc

SEQ ID NO: 3243259 - RNA, 19 nt, Artificial Sequence
  Description of Artificial Sequence: Synthetic oligonucleotide
ugaauuagaagaugcaccu

SEQ ID NO: 3243260 - RNA, 19 nt, Artificial Sequence
  Description of Artificial Sequence: Synthetic oligonucleotide
ugaucugugacauaguaau

SEQ ID NO: 3243261 - RNA, 19 nt, Artificial Sequence
  Description of Artificial Sequence: Synthetic oligonucleotide
acuucaaguagauaaauaa

SEQ ID NO: 3243262 - RNA, 19 nt, Artificial Sequence
  Description of Artificial Sequence: Synthetic oligonucleotide
acacaaauagggcaucccc

SEQ ID NO: 3243263 - RNA, 19 nt, Artificial Sequence
  Description of Artificial Sequence: Synthetic oligonucleotide
auucuguccuguuaagacc

SEQ ID NO: 3243264 - RNA, 19 nt, Artificial Sequence
  Description of Artificial Sequence: Synthetic oligonucleotide
cauaaaaugaacuucaagu

SEQ ID NO: 3243265 - RNA, 19 nt, Artificial Sequence
  Description of Artificial Sequence: Synthetic oligonucleotide
uucucuaguacaaaaggcu

SEQ ID NO: 3243266 - RNA, 19 nt, Artificial Sequence
  Description of Artificial Sequence: Synthetic oligonucleotide
acucauuucucaguaaacc

SEQ ID NO: 3243267 - RNA, 19 nt, Artificial Sequence
  Description of Artificial Sequence: Synthetic oligonucleotide
  modified_base (13)..(13): a, c, u, g, unknown or other
uggauaauuaacngcuucc

SEQ ID NO: 3243268 - RNA, 19 nt, Artificial Sequence
  Description of Artificial Sequence: Synthetic oligonucleotide
ugacaauugcuuaaaggcc

SEQ ID NO: 3243269 - RNA, 19 nt, Artificial Sequence
  Description of Artificial Sequence: Synthetic oligonucleotide
ucauuuuggaauacacuag

SEQ ID NO: 3243270 - RNA, 19 nt, Artificial Sequence
  Description of Artificial Sequence: Synthetic oligonucleotide
  modified_base (19)..(19): a, c, u, g, unknown or other
uuuacaaaugauuucccan

SEQ ID NO: 3243271 - RNA, 19 nt, Artificial Sequence
  Description of Artificial Sequence: Synthetic oligonucleotide
  modified_base (6)..(6): a, c, u, g, unknown or other
  modified_base (15)..(15): a, c, u, g, unknown or other
uuaacngcuucccanaguc

SEQ ID NO: 3243272 - RNA, 19 nt, Artificial Sequence
  Description of Artificial Sequence: Synthetic oligonucleotide
  modified_base (19)..(19): a, c, u, g, unknown or other
uugggauggauaauuaacn

SEQ ID NO: 3243273 - RNA, 19 nt, Artificial Sequence
  Description of Artificial Sequence: Synthetic oligonucleotide
uuuuggaauacacuaguaa

SEQ ID NO: 3243274 - RNA, 19 nt, Artificial Sequence
  Description of Artificial Sequence: Synthetic oligonucleotide
  modified_base (8)..(8): a, c, u, g, unknown or other
  modified_base (17)..(17): a, c, u, g, unknown or other
aauuaacngcuucccanag

SEQ ID NO: 3243275 - RNA, 19 nt, Artificial Sequence
  Description of Artificial Sequence: Synthetic oligonucleotide
aagacauuuacaaggcuuc

SEQ ID NO: 3243276 - RNA, 19 nt, Artificial Sequence
  Description of Artificial Sequence: Synthetic oligonucleotide
aguugcugcauuuguaagg

SEQ ID NO: 3243277 - RNA, 19 nt, Artificial Sequence
  Description of Artificial Sequence: Synthetic oligonucleotide
acaaauagggcauccccac

SEQ ID NO: 3243278 - RNA, 19 nt, Artificial Sequence
  Description of Artificial Sequence: Synthetic oligonucleotide
uccuguguggauuugauaa

SEQ ID NO: 3243279 - RNA, 19 nt, Artificial Sequence
  Description of Artificial Sequence: Synthetic oligonucleotide
uucagaacacaaauagggc

SEQ ID NO: 3243280 - RNA, 19 nt, Artificial Sequence
  Description of Artificial Sequence: Synthetic oligonucleotide
  modified_base (3)..(3): a, c, u, g, unknown or other
canaucaagacauuuacaa

SEQ ID NO: 3243281 - RNA, 19 nt, Artificial Sequence
  Description of Artificial Sequence: Synthetic oligonucleotide
acauaaaaugaacuucaag

SEQ ID NO: 3243282 - RNA, 19 nt, Artificial Sequence
  Description of Artificial Sequence: Synthetic oligonucleotide
uucuguccuguuaagaccc

SEQ ID NO: 3243283 - RNA, 19 nt, Artificial Sequence
  Description of Artificial Sequence: Synthetic oligonucleotide
uaaauuucauuuuggaaua

SEQ ID NO: 3243284 - RNA, 19 nt, Artificial Sequence
  Description of Artificial Sequence: Synthetic oligonucleotide
  modified_base (16)..(16): a, c, u, g, unknown or other
acaaaugauuucccanauc

SEQ ID NO: 3243285 - RNA, 19 nt, Artificial Sequence
  Description of Artificial Sequence: Synthetic oligonucleotide
uuuuacaaaugauuuccca

SEQ ID NO: 3243286 - RNA, 19 nt, Artificial Sequence
  Description of Artificial Sequence: Synthetic oligonucleotide
ugcuuaaaggccuuuuacc

SEQ ID NO: 3243287 - RNA, 19 nt, Artificial Sequence
  Description of Artificial Sequence: Synthetic oligonucleotide
auuucauuuuggaauacac

SEQ ID NO: 3243288 - RNA, 19 nt, Artificial Sequence
  Description of Artificial Sequence: Synthetic oligonucleotide
cuucucuaguacaaaaggc

SEQ ID NO: 3243289 - RNA, 19 nt, Artificial Sequence
  Description of Artificial Sequence: Synthetic oligonucleotide
  modified_base (18)..(18): a, c, u, g, unknown or other
uuacaaaugauuucccana

SEQ ID NO: 3243290 - RNA, 19 nt, Artificial Sequence
  Description of Artificial Sequence: Synthetic oligonucleotide
auuugcaaggcuucucaac

SEQ ID NO: 3243291 - RNA, 19 nt, Artificial Sequence
  Description of Artificial Sequence: Synthetic oligonucleotide
uuucauuuuggaauacacu

SEQ ID NO: 3243292 - RNA, 19 nt, Artificial Sequence
  Description of Artificial Sequence: Synthetic oligonucleotide
ugaaucauguagucuaugu

SEQ ID NO: 3243293 - RNA, 19 nt, Artificial Sequence
  Description of Artificial Sequence: Synthetic oligonucleotide
aagcuaggaacucauuucu

SEQ ID NO: 3243294 - RNA, 19 nt, Artificial Sequence
  Description of Artificial Sequence: Synthetic oligonucleotide
agaagaugcaccuucaguu

SEQ ID NO: 3243295 - RNA, 19 nt, Artificial Sequence
  Description of Artificial Sequence: Synthetic oligonucleotide
uauguaaaacugcaccugu

SEQ ID NO: 3243296 - RNA, 19 nt, Artificial Sequence
  Description of Artificial Sequence: Synthetic oligonucleotide
  modified_base (4)..(4): a, c, u, g, unknown or other
  modified_base (13)..(13): a, c, u, g, unknown or other
aacngcuucccanagucag

SEQ ID NO: 3243297 - RNA, 19 nt, Artificial Sequence
  Description of Artificial Sequence: Synthetic oligonucleotide
cauucagaacacaaauagg

SEQ ID NO: 3243298 - RNA, 19 nt, Artificial Sequence
  Description of Artificial Sequence: Synthetic oligonucleotide
uugauaaugugauuucagu

SEQ ID NO: 3243299 - RNA, 19 nt, Artificial Sequence
  Description of Artificial Sequence: Synthetic oligonucleotide
uagucuauguugaauucug

SEQ ID NO: 3243300 - RNA, 19 nt, Artificial Sequence
  Description of Artificial Sequence: Synthetic oligonucleotide
ucaguugagauguuuuaca

SEQ ID NO: 3243301 - RNA, 19 nt, Artificial Sequence
  Description of Artificial Sequence: Synthetic oligonucleotide
uuaaaggccuuuuaccaac

SEQ ID NO: 3243302 - RNA, 19 nt, Artificial Sequence
  Description of Artificial Sequence: Synthetic oligonucleotide
gaacaaaaugauuucccac

SEQ ID NO: 3243303 - RNA, 19 nt, Artificial Sequence
  Description of Artificial Sequence: Synthetic oligonucleotide
agaacaaaaugauuuccca

SEQ ID NO: 3243304 - RNA, 19 nt, Artificial Sequence
  Description of Artificial Sequence: Synthetic oligonucleotide
ucaguaaacccuguuaugu

SEQ ID NO: 3243305 - RNA, 19 nt, Artificial Sequence
  Description of Artificial Sequence: Synthetic oligonucleotide
uuucaugucugcucaaugu

SEQ ID NO: 3243306 - RNA, 19 nt, Artificial Sequence
  Description of Artificial Sequence: Synthetic oligonucleotide
ugugaauuagaagaugcac

SEQ ID NO: 3243307 - RNA, 19 nt, Artificial Sequence
  Description of Artificial Sequence: Synthetic oligonucleotide
  modified_base (7)..(7): a, c, u, g, unknown or other
  modified_base (16)..(16): a, c, u, g, unknown or other
auuaacngcuucccanagu

SEQ ID NO: 3243308 - RNA, 19 nt, Artificial Sequence
  Description of Artificial Sequence: Synthetic oligonucleotide
ugcugcauuuguaaggucu

SEQ ID NO: 3243309 - RNA, 19 nt, Artificial Sequence
  Description of Artificial Sequence: Synthetic oligonucleotide
  modified_base (11)..(11): a, c, u, g, unknown or other
ugauuucccanaucaagac

SEQ ID NO: 3243310 - RNA, 19 nt, Artificial Sequence
  Description of Artificial Sequence: Synthetic oligonucleotide
gugaauucgagaaugugcc

SEQ ID NO: 3243311 - RNA, 19 nt, Artificial Sequence
  Description of Artificial Sequence: Synthetic oligonucleotide
uaagcuaggaacucauuuc

SEQ ID NO: 3243312 - RNA, 19 nt, Artificial Sequence
  Description of Artificial Sequence: Synthetic oligonucleotide
uuuucaugucugcucaaug

SEQ ID NO: 3243313 - RNA, 19 nt, Artificial Sequence
  Description of Artificial Sequence: Synthetic oligonucleotide
gagaacaaaaugauuuccc

SEQ ID NO: 3243314 - RNA, 19 nt, Artificial Sequence
  Description of Artificial Sequence: Synthetic oligonucleotide
uguggaauuagaucccaca

SEQ ID NO: 3243315 - RNA, 19 nt, Artificial Sequence
  Description of Artificial Sequence: Synthetic oligonucleotide
uucccaaucaugacauucc

SEQ ID NO: 3243316 - RNA, 19 nt, Artificial Sequence
  Description of Artificial Sequence: Synthetic oligonucleotide
uagauaaauaaauuucauu

SEQ ID NO: 3243317 - RNA, 19 nt, Artificial Sequence
  Description of Artificial Sequence: Synthetic oligonucleotide
aaaauuaacauucagaggg

SEQ ID NO: 3243318 - RNA, 19 nt, Artificial Sequence
  Description of Artificial Sequence: Synthetic oligonucleotide
gauaaaauaagauacuuug

SEQ ID NO: 3243319 - RNA, 19 nt, Artificial Sequence
  Description of Artificial Sequence: Synthetic oligonucleotide
uuuaguaucguuuagcaag

SEQ ID NO: 3243320 - RNA, 19 nt, Artificial Sequence
  Description of Artificial Sequence: Synthetic oligonucleotide
aaucuaagguucuuuaggc

SEQ ID NO: 3243321 - RNA, 19 nt, Artificial Sequence
  Description of Artificial Sequence: Synthetic oligonucleotide
uuuggaauuaugaacaaag

SEQ ID NO: 3243322 - RNA, 19 nt, Artificial Sequence
  Description of Artificial Sequence: Synthetic oligonucleotide
aaccaauucacauuaaaag

SEQ ID NO: 3243323 - RNA, 19 nt, Artificial Sequence
  Description of Artificial Sequence: Synthetic oligonucleotide
aagaccugauuuuaaaagc

SEQ ID NO: 3243324 - RNA, 19 nt, Artificial Sequence
  Description of Artificial Sequence: Synthetic oligonucleotide
aaaguugugauguguaaac

SEQ ID NO: 3243325 - RNA, 19 nt, Artificial Sequence
  Description of Artificial Sequence: Synthetic oligonucleotide
ugcuguaagaaaauggugg

SEQ ID NO: 3243326 - RNA, 19 nt, Artificial Sequence
  Description of Artificial Sequence: Synthetic oligonucleotide
uuaucaaauauaaaacugc

SEQ ID NO: 3243327 - RNA, 19 nt, Artificial Sequence
  Description of Artificial Sequence: Synthetic oligonucleotide
uaaaauaagauacuuugga

SEQ ID NO: 3243328 - RNA, 19 nt, Artificial Sequence
  Description of Artificial Sequence: Synthetic oligonucleotide
aagacuacagagaagagac

SEQ ID NO: 3243329 - RNA, 19 nt, Artificial Sequence
  Description of Artificial Sequence: Synthetic oligonucleotide
aacacaacaaccccgagug

SEQ ID NO: 3243330 - RNA, 19 nt, Artificial Sequence
  Description of Artificial Sequence: Synthetic oligonucleotide
aaacacauguuccagaugu

SEQ ID NO: 3243331 - RNA, 19 nt, Artificial Sequence
  Description of Artificial Sequence: Synthetic oligonucleotide
aacgcuuacacacuuccgc

SEQ ID NO: 3243332 - RNA, 19 nt, Artificial Sequence
  Description of Artificial Sequence: Synthetic oligonucleotide
ugaaaguucaauaauaaua

SEQ ID NO: 3243333 - RNA, 19 nt, Artificial Sequence
  Description of Artificial Sequence: Synthetic oligonucleotide
agguagauuucuuuaaugc

SEQ ID NO: 3243334 - RNA, 19 nt, Artificial Sequence
  Description of Artificial Sequence: Synthetic oligonucleotide
gaaauuuaaacauaaugca

SEQ ID NO: 3243335 - RNA, 19 nt, Artificial Sequence
  Description of Artificial Sequence: Synthetic oligonucleotide
uguucaccaaauuuuaacg

SEQ ID NO: 3243336 - RNA, 19 nt, Artificial Sequence
  Description of Artificial Sequence: Synthetic oligonucleotide
uuaaaagaagcuaugggcu

SEQ ID NO: 3243337 - RNA, 19 nt, Artificial Sequence
  Description of Artificial Sequence: Synthetic oligonucleotide
aaaaugguggcgcuacgcc

SEQ ID NO: 3243338 - RNA, 19 nt, Artificial Sequence
  Description of Artificial Sequence: Synthetic oligonucleotide
gaugaugagauucuuuccg

SEQ ID NO: 3243339 - RNA, 19 nt, Artificial Sequence
  Description of Artificial Sequence: Synthetic oligonucleotide
uuuaaugaaaguucaauaa

SEQ ID NO: 3243340 - RNA, 19 nt, Artificial Sequence
  Description of Artificial Sequence: Synthetic oligonucleotide
uuauaaaaucugaagaccu

SEQ ID NO: 3243341 - RNA, 19 nt, Artificial Sequence
  Description of Artificial Sequence: Synthetic oligonucleotide
uguugcuguaagaaaaugg

SEQ ID NO: 3243342 - RNA, 19 nt, Artificial Sequence
  Description of Artificial Sequence: Synthetic oligonucleotide
uacuuuggaauuaugaaca

SEQ ID NO: 3243343 - RNA, 19 nt, Artificial Sequence
  Description of Artificial Sequence: Synthetic oligonucleotide
uuauguacauccaacgaag

SEQ ID NO: 3243344 - RNA, 19 nt, Artificial Sequence
  Description of Artificial Sequence: Synthetic oligonucleotide
uaucccaacauucucaggc

SEQ ID NO: 3243345 - RNA, 19 nt, Artificial Sequence
  Description of Artificial Sequence: Synthetic oligonucleotide
gaaaguucaauaauaauac

SEQ ID NO: 3243346 - RNA, 19 nt, Artificial Sequence
  Description of Artificial Sequence: Synthetic oligonucleotide
ucuuuauguacauccaacg

SEQ ID NO: 3243347 - RNA, 19 nt, Artificial Sequence
  Description of Artificial Sequence: Synthetic oligonucleotide
aacaccgaaauuuaaacau

SEQ ID NO: 3243348 - RNA, 19 nt, Artificial Sequence
  Description of Artificial Sequence: Synthetic oligonucleotide
gaagaccugauuuuaaaag

SEQ ID NO: 3243349 - RNA, 19 nt, Artificial Sequence
  Description of Artificial Sequence: Synthetic oligonucleotide
uggaauuaugaacaaagug

SEQ ID NO: 3243350 - RNA, 19 nt, Artificial Sequence
  Description of Artificial Sequence: Synthetic oligonucleotide
augaacaaaguguggaagc

SEQ ID NO: 3243351 - RNA, 19 nt, Artificial Sequence
  Description of Artificial Sequence: Synthetic oligonucleotide
aaauggucaggucaauuuc

SEQ ID NO: 3243352 - RNA, 19 nt, Artificial Sequence
  Description of Artificial Sequence: Synthetic oligonucleotide
aagaggucaucacaggaac

SEQ ID NO: 3243353 - RNA, 19 nt, Artificial Sequence
  Description of Artificial Sequence: Synthetic oligonucleotide
guuuauaaaaucugaagac

SEQ ID NO: 3243354 - RNA, 19 nt, Artificial Sequence
  Description of Artificial Sequence: Synthetic oligonucleotide
uuccguauaaaacagcaca

SEQ ID NO: 3243355 - RNA, 19 nt, Artificial Sequence
  Description of Artificial Sequence: Synthetic oligonucleotide
uaucaaauauaaaacugca

SEQ ID NO: 3243356 - RNA, 19 nt, Artificial Sequence
  Description of Artificial Sequence: Synthetic oligonucleotide
uugagggucauuuauauuc

SEQ ID NO: 3243357 - RNA, 19 nt, Artificial Sequence
  Description of Artificial Sequence: Synthetic oligonucleotide
cauuuaaaacaauuugagg

SEQ ID NO: 3243358 - RNA, 19 nt, Artificial Sequence
  Description of Artificial Sequence: Synthetic oligonucleotide
gguucuuuaggcuucaugg

SEQ ID NO: 3243359 - RNA, 19 nt, Artificial Sequence
  Description of Artificial Sequence: Synthetic oligonucleotide
uuuauguacauccaacgaa

SEQ ID NO: 3243360 - RNA, 19 nt, Artificial Sequence
  Description of Artificial Sequence: Synthetic oligonucleotide
aauuaacauucagaggggc

SEQ ID NO: 3243361 - RNA, 19 nt, Artificial Sequence
  Description of Artificial Sequence: Synthetic oligonucleotide
auacauucauaucacuuac

SEQ ID NO: 3243362 - RNA, 19 nt, Artificial Sequence
  Description of Artificial Sequence: Synthetic oligonucleotide
aaacaguccuaucaauuuc

SEQ ID NO: 3243363 - RNA, 19 nt, Artificial Sequence
  Description of Artificial Sequence: Synthetic oligonucleotide
uucgagaacacaacaaccc

SEQ ID NO: 3243364 - RNA, 19 nt, Artificial Sequence
  Description of Artificial Sequence: Synthetic oligonucleotide
aguugugauguguaaacgg

SEQ ID NO: 3243365 - RNA, 19 nt, Artificial Sequence
  Description of Artificial Sequence: Synthetic oligonucleotide
gaauuaugaacaaagugug

SEQ ID NO: 3243366 - RNA, 19 nt, Artificial Sequence
  Description of Artificial Sequence: Synthetic oligonucleotide
uagacuuacgagcugaaga

SEQ ID NO: 3243367 - RNA, 19 nt, Artificial Sequence
  Description of Artificial Sequence: Synthetic oligonucleotide
uugacacagacuuuuacgc

SEQ ID NO: 3243368 - RNA, 19 nt, Artificial Sequence
  Description of Artificial Sequence: Synthetic oligonucleotide
uaauacaugaauguugcug

SEQ ID NO: 3243369 - RNA, 19 nt, Artificial Sequence
  Description of Artificial Sequence: Synthetic oligonucleotide
uaaaauguccucuccacca

SEQ ID NO: 3243370 - RNA, 19 nt, Artificial Sequence
  Description of Artificial Sequence: Synthetic oligonucleotide
aucacaggaacgcuuacac

SEQ ID NO: 3243371 - RNA, 19 nt, Artificial Sequence
  Description of Artificial Sequence: Synthetic oligonucleotide
aaaagcucagacaauuuag

SEQ ID NO: 3243372 - RNA, 19 nt, Artificial Sequence
  Description of Artificial Sequence: Synthetic oligonucleotide
uguaagaaaaugguggcgc

SEQ ID NO: 3243373 - RNA, 19 nt, Artificial Sequence
  Description of Artificial Sequence: Synthetic oligonucleotide
accaauucacauuaaaaga

SEQ ID NO: 3243374 - RNA, 19 nt, Artificial Sequence
  Description of Artificial Sequence: Synthetic oligonucleotide
uccaaaagcuauuuaacac

SEQ ID NO: 3243375 - RNA, 19 nt, Artificial Sequence
  Description of Artificial Sequence: Synthetic oligonucleotide
aagaaaaugguggcgcuac

SEQ ID NO: 3243376 - RNA, 19 nt, Artificial Sequence
  Description of Artificial Sequence: Synthetic oligonucleotide
aaacaccgaaauuuaaaca

SEQ ID NO: 3243377 - RNA, 19 nt, Artificial Sequence
  Description of Artificial Sequence: Synthetic oligonucleotide
gauuucuuuaaugcuaucc

SEQ ID NO: 3243378 - RNA, 19 nt, Artificial Sequence
  Description of Artificial Sequence: Synthetic oligonucleotide
agaugaugagauucuuucc

SEQ ID NO: 3243379 - RNA, 19 nt, Artificial Sequence
  Description of Artificial Sequence: Synthetic oligonucleotide
ucacauuaaaagaagcuau

SEQ ID NO: 3243380 - RNA, 19 nt, Artificial Sequence
  Description of Artificial Sequence: Synthetic oligonucleotide
uauaaaaucugaagaccug

SEQ ID NO: 3243381 - RNA, 19 nt, Artificial Sequence
  Description of Artificial Sequence: Synthetic oligonucleotide
cacaauuaccuauacauuc

SEQ ID NO: 3243382 - RNA, 19 nt, Artificial Sequence
  Description of Artificial Sequence: Synthetic oligonucleotide
aaguguggaagcuacauuu

SEQ ID NO: 3243383 - RNA, 19 nt, Artificial Sequence
  Description of Artificial Sequence: Synthetic oligonucleotide
acauuuaaaacaauuugag

SEQ ID NO: 3243384 - RNA, 19 nt, Artificial Sequence
  Description of Artificial Sequence: Synthetic oligonucleotide
ugugauguguaaacggcag

SEQ ID NO: 3243385 - RNA, 19 nt, Artificial Sequence
  Description of Artificial Sequence: Synthetic oligonucleotide
uaucguuuagcaagugggg

SEQ ID NO: 3243386 - RNA, 19 nt, Artificial Sequence
  Description of Artificial Sequence: Synthetic oligonucleotide
guaucguuuagcaaguggg

SEQ ID NO: 3243387 - RNA, 19 nt, Artificial Sequence
  Description of Artificial Sequence: Synthetic oligonucleotide
uuuacgcucaguaaucuaa

SEQ ID NO: 3243388 - RNA, 19 nt, Artificial Sequence
  Description of Artificial Sequence: Synthetic oligonucleotide
uuauaaauggucaggucaa

SEQ ID NO: 3243389 - RNA, 19 nt, Artificial Sequence
  Description of Artificial Sequence: Synthetic oligonucleotide
aguuuuauaaauggucagg

SEQ ID NO: 3243390 - RNA, 19 nt, Artificial Sequence
  Description of Artificial Sequence: Synthetic oligonucleotide
aguaucguuuagcaagugg

SEQ ID NO: 3243391 - RNA, 19 nt, Artificial Sequence
  Description of Artificial Sequence: Synthetic oligonucleotide
aucacuuaccaacuuauca

SEQ ID NO: 3243392 - RNA, 19 nt, Artificial Sequence
  Description of Artificial Sequence: Synthetic oligonucleotide
gagaugaugagauucuuuc

SEQ ID NO: 3243393 - RNA, 19 nt, Artificial Sequence
  Description of Artificial Sequence: Synthetic oligonucleotide
uguacauccaacgaagaac

SEQ ID NO: 3243394 - RNA, 19 nt, Artificial Sequence
  Description of Artificial Sequence: Synthetic oligonucleotide
aaaguauucgagaacacaa

SEQ ID NO: 3243395 - RNA, 19 nt, Artificial Sequence
  Description of Artificial Sequence: Synthetic oligonucleotide
cacaggaacgcuuacacac

SEQ ID NO: 3243396 - RNA, 19 nt, Artificial Sequence
  Description of Artificial Sequence: Synthetic oligonucleotide
auuaugaacaaagugugga

SEQ ID NO: 3243397 - RNA, 19 nt, Artificial Sequence
  Description of Artificial Sequence: Synthetic oligonucleotide
aauuaugaacaaagugugg

SEQ ID NO: 3243398 - RNA, 19 nt, Artificial Sequence
  Description of Artificial Sequence: Synthetic oligonucleotide
uaacacugauaaaauaaga

SEQ ID NO: 3243399 - RNA, 19 nt, Artificial Sequence
  Description of Artificial Sequence: Synthetic oligonucleotide
aaauuaacauucagagggg

SEQ ID NO: 3243400 - RNA, 19 nt, Artificial Sequence
  Description of Artificial Sequence: Synthetic oligonucleotide
ucugccaugcuucacuagc

SEQ ID NO: 3243401 - RNA, 19 nt, Artificial Sequence
  Description of Artificial Sequence: Synthetic oligonucleotide
uguccaaaagcuauuuaac

SEQ ID NO: 3243402 - RNA, 19 nt, Artificial Sequence
  Description of Artificial Sequence: Synthetic oligonucleotide
auuaaugaugaaaguauuc

SEQ ID NO: 3243403 - RNA, 19 nt, Artificial Sequence
  Description of Artificial Sequence: Synthetic oligonucleotide
uaugaacaaaguguggaag

SEQ ID NO: 3243404 - RNA, 19 nt, Artificial Sequence
  Description of Artificial Sequence: Synthetic oligonucleotide
ugaugaaaguauucgagaa

SEQ ID NO: 3243405 - RNA, 19 nt, Artificial Sequence
  Description of Artificial Sequence: Synthetic oligonucleotide
auucgagaacacaacaacc

SEQ ID NO: 3243406 - RNA, 19 nt, Artificial Sequence
  Description of Artificial Sequence: Synthetic oligonucleotide
caauucacauuaaaagaag

SEQ ID NO: 3243407 - RNA, 19 nt, Artificial Sequence
  Description of Artificial Sequence: Synthetic oligonucleotide
cuauuuaacacugauaaaa

SEQ ID NO: 3243408 - RNA, 19 nt, Artificial Sequence
  Description of Artificial Sequence: Synthetic oligonucleotide
uuaacauucagaggggcug

SEQ ID NO: 3243409 - RNA, 19 nt, Artificial Sequence
  Description of Artificial Sequence: Synthetic oligonucleotide
aguauucgagaacacaaca

SEQ ID NO: 3243410 - RNA, 19 nt, Artificial Sequence
  Description of Artificial Sequence: Synthetic oligonucleotide
uuuaaaagcucagacaauu

SEQ ID NO: 3243411 - RNA, 19 nt, Artificial Sequence
  Description of Artificial Sequence: Synthetic oligonucleotide
uaugaccugaccugacugg

SEQ ID NO: 3243412 - RNA, 19 nt, Artificial Sequence
  Description of Artificial Sequence: Synthetic oligonucleotide
acaugaauguugcuguaag

SEQ ID NO: 3243413 - RNA, 19 nt, Artificial Sequence
  Description of Artificial Sequence: Synthetic oligonucleotide
aaguauucgagaacacaac

SEQ ID NO: 3243414 - RNA, 19 nt, Artificial Sequence
  Description of Artificial Sequence: Synthetic oligonucleotide
augugagaugaugagauuc

SEQ ID NO: 3243415 - RNA, 19 nt, Artificial Sequence
  Description of Artificial Sequence: Synthetic oligonucleotide
auggauuaaaauaauacau

SEQ ID NO: 3243416 - RNA, 19 nt, Artificial Sequence
  Description of Artificial Sequence: Synthetic oligonucleotide
aaguugugauguguaaacg

SEQ ID NO: 3243417 - RNA, 19 nt, Artificial Sequence
  Description of Artificial Sequence: Synthetic oligonucleotide
uuauuuuggagacaguggg

SEQ ID NO: 3243418 - RNA, 19 nt, Artificial Sequence
  Description of Artificial Sequence: Synthetic oligonucleotide
aaaacucaagugcaggggc

SEQ ID NO: 3243419 - RNA, 19 nt, Artificial Sequence
  Description of Artificial Sequence: Synthetic oligonucleotide
uuuauuuuggagacagugg

SEQ ID NO: 3243420 - RNA, 19 nt, Artificial Sequence
  Description of Artificial Sequence: Synthetic oligonucleotide
ugagguagcuucaagacag

SEQ ID NO: 3243421 - RNA, 19 nt, Artificial Sequence
  Description of Artificial Sequence: Synthetic oligonucleotide
ugcaccaaaggucaggugg

SEQ ID NO: 3243422 - RNA, 19 nt, Artificial Sequence
  Description of Artificial Sequence: Synthetic oligonucleotide
aguaaggugacuuugguga

SEQ ID NO: 3243423 - RNA, 19 nt, Artificial Sequence
  Description of Artificial Sequence: Synthetic oligonucleotide
aacccuuuauuuuggagac

SEQ ID NO: 3243424 - RNA, 19 nt, Artificial Sequence
  Description of Artificial Sequence: Synthetic oligonucleotide
cucaaagucagaaucaaag

SEQ ID NO: 3243425 - RNA, 19 nt, Artificial Sequence
  Description of Artificial Sequence: Synthetic oligonucleotide
uuuugcaccgagauguugg

SEQ ID NO: 3243426 - RNA, 19 nt, Artificial Sequence
  Description of Artificial Sequence: Synthetic oligonucleotide
accuuuaauagauuagcgg

SEQ ID NO: 3243427 - RNA, 19 nt, Artificial Sequence
  Description of Artificial Sequence: Synthetic oligonucleotide
auggcuuugggcuuucugc

SEQ ID NO: 3243428 - RNA, 19 nt, Artificial Sequence
  Description of Artificial Sequence: Synthetic oligonucleotide
uuugugguaaaccuuuucu

SEQ ID NO: 3243429 - RNA, 19 nt, Artificial Sequence
  Description of Artificial Sequence: Synthetic oligonucleotide
aucaaagguaauugcagac

SEQ ID NO: 3243430 - RNA, 19 nt, Artificial Sequence
  Description of Artificial Sequence: Synthetic oligonucleotide
auccucuuuaggcaggucc

SEQ ID NO: 3243431 - RNA, 19 nt, Artificial Sequence
  Description of Artificial Sequence: Synthetic oligonucleotide
auagauuagcggcugcacc

SEQ ID NO: 3243432 - RNA, 19 nt, Artificial Sequence
  Description of Artificial Sequence: Synthetic oligonucleotide
aaucaaagguaauugcaga

SEQ ID NO: 3243433 - RNA, 19 nt, Artificial Sequence
  Description of Artificial Sequence: Synthetic oligonucleotide
uaccuuuaauagauuagcg

SEQ ID NO: 3243434 - RNA, 19 nt, Artificial Sequence
  Description of Artificial Sequence: Synthetic oligonucleotide
agcucuucuguuuucaggg

SEQ ID NO: 3243435 - RNA, 19 nt, Artificial Sequence
  Description of Artificial Sequence: Synthetic oligonucleotide
agaaaacucaagugcaggg

SEQ ID NO: 3243436 - RNA, 19 nt, Artificial Sequence
  Description of Artificial Sequence: Synthetic oligonucleotide
ugguauauagcucuucugu

SEQ ID NO: 3243437 - RNA, 19 nt, Artificial Sequence
  Description of Artificial Sequence: Synthetic oligonucleotide
uaacccuuuauuuuggaga

SEQ ID NO: 3243438 - RNA, 19 nt, Artificial Sequence
  Description of Artificial Sequence: Synthetic oligonucleotide
ucagaaucaaagguaauug

SEQ ID NO: 3243439 - RNA, 19 nt, Artificial Sequence
  Description of Artificial Sequence: Synthetic oligonucleotide
uuaccuuuaauagauuagc

SEQ ID NO: 3243440 - RNA, 19 nt, Artificial Sequence
  Description of Artificial Sequence: Synthetic oligonucleotide
ugcuuuugcaccgagaugu

SEQ ID NO: 3243441 - RNA, 19 nt, Artificial Sequence
  Description of Artificial Sequence: Synthetic oligonucleotide
uucucagaaaacucaagug

SEQ ID NO: 3243442 - RNA, 19 nt, Artificial Sequence
  Description of Artificial Sequence: Synthetic oligonucleotide
gaaucaaagguaauugcag

SEQ ID NO: 3243443 - RNA, 19 nt, Artificial Sequence
  Description of Artificial Sequence: Synthetic oligonucleotide
uauuuuggagacagugggg

SEQ ID NO: 3243444 - RNA, 19 nt, Artificial Sequence
  Description of Artificial Sequence: Synthetic oligonucleotide
uccaaguccaucuuggccu

SEQ ID NO: 3243445 - RNA, 19 nt, Artificial Sequence
  Description of Artificial Sequence: Synthetic oligonucleotide
ucugcgaugcgucucagca

SEQ ID NO: 3243446 - RNA, 19 nt, Artificial Sequence
  Description of Artificial Sequence: Synthetic oligonucleotide
aauugcucagcaugcgguc

SEQ ID NO: 3243447 - RNA, 19 nt, Artificial Sequence
  Description of Artificial Sequence: Synthetic oligonucleotide
ucaggugguauauagcucu

SEQ ID NO: 3243448 - RNA, 19 nt, Artificial Sequence
  Description of Artificial Sequence: Synthetic oligonucleotide
aaccuuuucuuuuguuuuc

SEQ ID NO: 3243449 - RNA, 19 nt, Artificial Sequence
  Description of Artificial Sequence: Synthetic oligonucleotide
ccuuuaauagauuagcggc

SEQ ID NO: 3243450 - RNA, 19 nt, Artificial Sequence
  Description of Artificial Sequence: Synthetic oligonucleotide
cuuuauuuuggagacagug

SEQ ID NO: 3243451 - RNA, 19 nt, Artificial Sequence
  Description of Artificial Sequence: Synthetic oligonucleotide
ucggagaugcuccuggucc

SEQ ID NO: 3243452 - RNA, 19 nt, Artificial Sequence
  Description of Artificial Sequence: Synthetic oligonucleotide
uuuaauagauuagcggcug

SEQ ID NO: 3243453 - RNA, 19 nt, Artificial Sequence
  Description of Artificial Sequence: Synthetic oligonucleotide
uuagcggcugcaccaaagg

SEQ ID NO: 3243454 - RNA, 19 nt, Artificial Sequence
  Description of Artificial Sequence: Synthetic oligonucleotide
aggggauucggcuugacca

SEQ ID NO: 3243455 - RNA, 19 nt, Artificial Sequence
  Description of Artificial Sequence: Synthetic oligonucleotide
aaacucaagugcaggggcc

SEQ ID NO: 3243456 - RNA, 19 nt, Artificial Sequence
  Description of Artificial Sequence: Synthetic oligonucleotide
gaagcagauggcuuugggc

SEQ ID NO: 3243457 - RNA, 19 nt, Artificial Sequence
  Description of Artificial Sequence: Synthetic oligonucleotide
cagaaucaaagguaauugc

SEQ ID NO: 3243458 - RNA, 19 nt, Artificial Sequence
  Description of Artificial Sequence: Synthetic oligonucleotide
augaauccucuuuaggcag

SEQ ID NO: 3243459 - RNA, 19 nt, Artificial Sequence
  Description of Artificial Sequence: Synthetic oligonucleotide
uuucaggaccuucagggcu

SEQ ID NO: 3243460 - RNA, 19 nt, Artificial Sequence
  Description of Artificial Sequence: Synthetic oligonucleotide
uagauuagcggcugcacca

SEQ ID NO: 3243461 - RNA, 19 nt, Artificial Sequence
  Description of Artificial Sequence: Synthetic oligonucleotide
ugcgaugcgucucagcagc

SEQ ID NO: 3243462 - RNA, 19 nt, Artificial Sequence
  Description of Artificial Sequence: Synthetic oligonucleotide
ugaagcagauggcuuuggg

SEQ ID NO: 3243463 - RNA, 19 nt, Artificial Sequence
  Description of Artificial Sequence: Synthetic oligonucleotide
uacugagguagcuucaaga

SEQ ID NO: 3243464 - RNA, 19 nt, Artificial Sequence
  Description of Artificial Sequence: Synthetic oligonucleotide
uauauagcucuucuguuuu

SEQ ID NO: 3243465 - RNA, 19 nt, Artificial Sequence
  Description of Artificial Sequence: Synthetic oligonucleotide
auugcagacagacugucau

SEQ ID NO: 3243466 - RNA, 19 nt, Artificial Sequence
  Description of Artificial Sequence: Synthetic oligonucleotide
uuggaggaggagcugacca

SEQ ID NO: 3243467 - RNA, 19 nt, Artificial Sequence
  Description of Artificial Sequence: Synthetic oligonucleotide
cuuguucucagaaaacuca

SEQ ID NO: 3243468 - RNA, 19 nt, Artificial Sequence
  Description of Artificial Sequence: Synthetic oligonucleotide
uggcuuugggcuuucugcg

SEQ ID NO: 3243469 - RNA, 19 nt, Artificial Sequence
  Description of Artificial Sequence: Synthetic oligonucleotide
uuaauagauuagcggcugc

SEQ ID NO: 3243470 - RNA, 19 nt, Artificial Sequence
  Description of Artificial Sequence: Synthetic oligonucleotide
aguaguaaggugacuuugg

SEQ ID NO: 3243471 - RNA, 19 nt, Artificial Sequence
  Description of Artificial Sequence: Synthetic oligonucleotide
auaguggcggcgcugcgcg

SEQ ID NO: 3243472 - RNA, 19 nt, Artificial Sequence
  Description of Artificial Sequence: Synthetic oligonucleotide
gaugcgucucagcagccgg

SEQ ID NO: 3243473 - RNA, 19 nt, Artificial Sequence
  Description of Artificial Sequence: Synthetic oligonucleotide
uguuuucgucucaaaguca

SEQ ID NO: 3243474 - RNA, 19 nt, Artificial Sequence
  Description of Artificial Sequence: Synthetic oligonucleotide
uguggggucaaggauauuc

SEQ ID NO: 3243475 - RNA, 19 nt, Artificial Sequence
  Description of Artificial Sequence: Synthetic oligonucleotide
uccucggagaugcuccugg

SEQ ID NO: 3243476 - RNA, 19 nt, Artificial Sequence
  Description of Artificial Sequence: Synthetic oligonucleotide
uugaccucacugcucacug

SEQ ID NO: 3243477 - RNA, 19 nt, Artificial Sequence
  Description of Artificial Sequence: Synthetic oligonucleotide
cagcaugcgguccaggucc

SEQ ID NO: 3243478 - RNA, 19 nt, Artificial Sequence
  Description of Artificial Sequence: Synthetic oligonucleotide
uucugcggaacucacuuuc

SEQ ID NO: 3243479 - RNA, 19 nt, Artificial Sequence
  Description of Artificial Sequence: Synthetic oligonucleotide
ugcagacagacugucaucu

SEQ ID NO: 3243480 - RNA, 19 nt, Artificial Sequence
  Description of Artificial Sequence: Synthetic oligonucleotide
ugugccugcaguacgcuuc

SEQ ID NO: 3243481 - RNA, 19 nt, Artificial Sequence
  Description of Artificial Sequence: Synthetic oligonucleotide
ugcuucgagguucccagcc

SEQ ID NO: 3243482 - RNA, 19 nt, Artificial Sequence
  Description of Artificial Sequence: Synthetic oligonucleotide
auugcucagcaugcggucc

SEQ ID NO: 3243483 - RNA, 19 nt, Artificial Sequence
  Description of Artificial Sequence: Synthetic oligonucleotide
uauagcucuucuguuuuca

SEQ ID NO: 3243484 - RNA, 19 nt, Artificial Sequence
  Description of Artificial Sequence: Synthetic oligonucleotide
auauagcucuucuguuuuc

SEQ ID NO: 3243485 - RNA, 19 nt, Artificial Sequence
  Description of Artificial Sequence: Synthetic oligonucleotide
agguuuaccuuuaauagau

SEQ ID NO: 3243486 - RNA, 19 nt, Artificial Sequence
  Description of Artificial Sequence: Synthetic oligonucleotide
aacucugcgaugcgucuca

SEQ ID NO: 3243487 - RNA, 19 nt, Artificial Sequence
  Description of Artificial Sequence: Synthetic oligonucleotide
gaccucacugcucacuggc

SEQ ID NO: 3243488 - RNA, 19 nt, Artificial Sequence
  Description of Artificial Sequence: Synthetic oligonucleotide
uucggcuugaccagcucug

SEQ ID NO: 3243489 - RNA, 19 nt, Artificial Sequence
  Description of Artificial Sequence: Synthetic oligonucleotide
cugcucagaggcaugcucc

SEQ ID NO: 3243490 - RNA, 19 nt, Artificial Sequence
  Description of Artificial Sequence: Synthetic oligonucleotide
gaguaguaaggugacuuug

SEQ ID NO: 3243491 - RNA, 19 nt, Artificial Sequence
  Description of Artificial Sequence: Synthetic oligonucleotide
agcuuauucaucuccucau

SEQ ID NO: 3243492 - RNA, 19 nt, Artificial Sequence
  Description of Artificial Sequence: Synthetic oligonucleotide
accuuuucuuuuguuuucg

SEQ ID NO: 3243493 - RNA, 19 nt, Artificial Sequence
  Description of Artificial Sequence: Synthetic oligonucleotide
gacagacugucaucucccg

SEQ ID NO: 3243494 - RNA, 19 nt, Artificial Sequence
  Description of Artificial Sequence: Synthetic oligonucleotide
uugugguaaaccuuuucuu

SEQ ID NO: 3243495 - RNA, 19 nt, Artificial Sequence
  Description of Artificial Sequence: Synthetic oligonucleotide
cagacugucaucucccguc

SEQ ID NO: 3243496 - RNA, 19 nt, Artificial Sequence
  Description of Artificial Sequence: Synthetic oligonucleotide
ugcccuggcucauaguggc

SEQ ID NO: 3243497 - RNA, 19 nt, Artificial Sequence
  Description of Artificial Sequence: Synthetic oligonucleotide
auagcucuucuguuuucag

SEQ ID NO: 3243498 - RNA, 19 nt, Artificial Sequence
  Description of Artificial Sequence: Synthetic oligonucleotide
uggaguaguaaggugacuu

SEQ ID NO: 3243499 - RNA, 19 nt, Artificial Sequence
  Description of Artificial Sequence: Synthetic oligonucleotide
ugcaguacgcuucgcuccc

SEQ ID NO: 3243500 - RNA, 19 nt, Artificial Sequence
  Description of Artificial Sequence: Synthetic oligonucleotide
uccgaggcuagauccgcgg

SEQ ID NO: 3243501 - RNA, 19 nt, Artificial Sequence
  Description of Artificial Sequence: Synthetic oligonucleotide
ucuguggggucaaggauau

SEQ ID NO: 3243502 - RNA, 19 nt, Artificial Sequence
  Description of Artificial Sequence: Synthetic oligonucleotide
cuccucaucuuucuccagc

SEQ ID NO: 3243503 - RNA, 19 nt, Artificial Sequence
  Description of Artificial Sequence: Synthetic oligonucleotide
guuuucaggggcuuguucu

SEQ ID NO: 3243504 - RNA, 19 nt, Artificial Sequence
  Description of Artificial Sequence: Synthetic oligonucleotide
auucggcuugaccagcucu

SEQ ID NO: 3243505 - RNA, 19 nt, Artificial Sequence
  Description of Artificial Sequence: Synthetic oligonucleotide
cuuuaauagauuagcggcu

SEQ ID NO: 3243506 - RNA, 19 nt, Artificial Sequence
  Description of Artificial Sequence: Synthetic oligonucleotide
uccucaccgugcuucgagg

SEQ ID NO: 3243507 - RNA, 19 nt, Artificial Sequence
  Description of Artificial Sequence: Synthetic oligonucleotide
ggaacucacuuucuuuucc

SEQ ID NO: 3243508 - RNA, 19 nt, Artificial Sequence
  Description of Artificial Sequence: Synthetic oligonucleotide
ugcacaggugcuccugucu

SEQ ID NO: 3243509 - RNA, 19 nt, Artificial Sequence
  Description of Artificial Sequence: Synthetic oligonucleotide
uggggucaaggauauucug

SEQ ID NO: 3243510 - RNA, 19 nt, Artificial Sequence
  Description of Artificial Sequence: Synthetic oligonucleotide
ucuccaaguccaucuuggc

SEQ ID NO: 3243511 - RNA, 19 nt, Artificial Sequence
  Description of Artificial Sequence: Synthetic oligonucleotide
gagaccgccaugaugucac

SEQ ID NO: 3243512 - RNA, 19 nt, Artificial Sequence
  Description of Artificial Sequence: Synthetic oligonucleotide
ucugaagcagauggcuuug

SEQ ID NO: 3243513 - RNA, 19 nt, Artificial Sequence
  Description of Artificial Sequence: Synthetic oligonucleotide
uuuucgucucaaagucaga

SEQ ID NO: 3243514 - RNA, 19 nt, Artificial Sequence
  Description of Artificial Sequence: Synthetic oligonucleotide
ugaccucacugcucacugg

SEQ ID NO: 3243515 - RNA, 19 nt, Artificial Sequence
  Description of Artificial Sequence: Synthetic oligonucleotide
ucugcggaacucacuuucu

SEQ ID NO: 3243516 - RNA, 19 nt, Artificial Sequence
  Description of Artificial Sequence: Synthetic oligonucleotide
agauccgcggugcccuggc

SEQ ID NO: 3243517 - RNA, 19 nt, Artificial Sequence
  Description of Artificial Sequence: Synthetic oligonucleotide
agaaacaugauguaguagg

SEQ ID NO: 3243518 - RNA, 19 nt, Artificial Sequence
  Description of Artificial Sequence: Synthetic oligonucleotide
uaaacaguaaucauuguag

SEQ ID NO: 3243519 - RNA, 19 nt, Artificial Sequence
  Description of Artificial Sequence: Synthetic oligonucleotide
aaggauuagcuccacaagc

SEQ ID NO: 3243520 - RNA, 19 nt, Artificial Sequence
  Description of Artificial Sequence: Synthetic oligonucleotide
auaaucacgaagcagcagc

SEQ ID NO: 3243521 - RNA, 19 nt, Artificial Sequence
  Description of Artificial Sequence: Synthetic oligonucleotide
aacaugauguaguaggcac

SEQ ID NO: 3243522 - RNA, 19 nt, Artificial Sequence
  Description of Artificial Sequence: Synthetic oligonucleotide
augugaaaggauuagcucc

SEQ ID NO: 3243523 - RNA, 19 nt, Artificial Sequence
  Description of Artificial Sequence: Synthetic oligonucleotide
acuuguucagguuugaggg

SEQ ID NO: 3243524 - RNA, 19 nt, Artificial Sequence
  Description of Artificial Sequence: Synthetic oligonucleotide
agcaaugaugugcauaucc

SEQ ID NO: 3243525 - RNA, 19 nt, Artificial Sequence
  Description of Artificial Sequence: Synthetic oligonucleotide
cucauaaucacgaagcagc

SEQ ID NO: 3243526 - RNA, 19 nt, Artificial Sequence
  Description of Artificial Sequence: Synthetic oligonucleotide
aacaguaaucauuguaggg

SEQ ID NO: 3243527 - RNA, 19 nt, Artificial Sequence
  Description of Artificial Sequence: Synthetic oligonucleotide
caagcuuccaucaagacug

SEQ ID NO: 3243528 - RNA, 19 nt, Artificial Sequence
  Description of Artificial Sequence: Synthetic oligonucleotide
uuguuucuuaucuaguugg

SEQ ID NO: 3243529 - RNA, 19 nt, Artificial Sequence
  Description of Artificial Sequence: Synthetic oligonucleotide
aaacaguaaucauuguagg

SEQ ID NO: 3243530 - RNA, 19 nt, Artificial Sequence
  Description of Artificial Sequence: Synthetic oligonucleotide
uuucuuaucuaguuggcag

SEQ ID NO: 3243531 - RNA, 19 nt, Artificial Sequence
  Description of Artificial Sequence: Synthetic oligonucleotide
guuagaauagacuuguuca

SEQ ID NO: 3243532 - RNA, 19 nt, Artificial Sequence
  Description of Artificial Sequence: Synthetic oligonucleotide
uuaucuaguuggcaggagg

SEQ ID NO: 3243533 - RNA, 19 nt, Artificial Sequence
  Description of Artificial Sequence: Synthetic oligonucleotide
uccaaguucaccaggaucu

SEQ ID NO: 3243534 - RNA, 19 nt, Artificial Sequence
  Description of Artificial Sequence: Synthetic oligonucleotide
uauacuggcugcuuauugg

SEQ ID NO: 3243535 - RNA, 19 nt, Artificial Sequence
  Description of Artificial Sequence: Synthetic oligonucleotide
uuagaauagacuuguucag

SEQ ID NO: 3243536 - RNA, 19 nt, Artificial Sequence
  Description of Artificial Sequence: Synthetic oligonucleotide
gaucucauaaucacgaagc

SEQ ID NO: 3243537 - RNA, 19 nt, Artificial Sequence
  Description of Artificial Sequence: Synthetic oligonucleotide
aaaggauuagcuccacaag

SEQ ID NO: 3243538 - RNA, 19 nt, Artificial Sequence
  Description of Artificial Sequence: Synthetic oligonucleotide
ugcauauccaaguucacca

SEQ ID NO: 3243539 - RNA, 19 nt, Artificial Sequence
  Description of Artificial Sequence: Synthetic oligonucleotide
cuguaaacaguaaucauug

SEQ ID NO: 3243540 - RNA, 19 nt, Artificial Sequence
  Description of Artificial Sequence: Synthetic oligonucleotide
acuuccaagaaacaugaug

SEQ ID NO: 3243541 - RNA, 19 nt, Artificial Sequence
  Description of Artificial Sequence: Synthetic oligonucleotide
gacuuguucagguuugagg

SEQ ID NO: 3243542 - RNA, 19 nt, Artificial Sequence
  Description of Artificial Sequence: Synthetic oligonucleotide
aauagacuuguucagguuu

SEQ ID NO: 3243543 - RNA, 19 nt, Artificial Sequence
  Description of Artificial Sequence: Synthetic oligonucleotide
acugcuguauacuggcugc

SEQ ID NO: 3243544 - RNA, 19 nt, Artificial Sequence
  Description of Artificial Sequence: Synthetic oligonucleotide
cuuauugggguuagaauag

SEQ ID NO: 3243545 - RNA, 19 nt, Artificial Sequence
  Description of Artificial Sequence: Synthetic oligonucleotide
uccacaagcaaugaugugc

SEQ ID NO: 3243546 - RNA, 19 nt, Artificial Sequence
  Description of Artificial Sequence: Synthetic oligonucleotide
uucaccaggaucugcagag

SEQ ID NO: 3243547 - RNA, 19 nt, Artificial Sequence
  Description of Artificial Sequence: Synthetic oligonucleotide
aaugaugugcauauccaag

SEQ ID NO: 3243548 - RNA, 19 nt, Artificial Sequence
  Description of Artificial Sequence: Synthetic oligonucleotide
uucuuaucuaguuggcagg

SEQ ID NO: 3243549 - RNA, 19 nt, Artificial Sequence
  Description of Artificial Sequence: Synthetic oligonucleotide
ucacgaagcagcagcaggg

SEQ ID NO: 3243550 - RNA, 19 nt, Artificial Sequence
  Description of Artificial Sequence: Synthetic oligonucleotide
uguagggaucucauaauca

SEQ ID NO: 3243551 - RNA, 19 nt, Artificial Sequence
  Description of Artificial Sequence: Synthetic oligonucleotide
auuccuguuggcuguaaac

SEQ ID NO: 3243552 - RNA, 19 nt, Artificial Sequence
  Description of Artificial Sequence: Synthetic oligonucleotide
ugugaaaggauuagcucca

SEQ ID NO: 3243553 - RNA, 19 nt, Artificial Sequence
  Description of Artificial Sequence: Synthetic oligonucleotide
agaauagacuuguucaggu

SEQ ID NO: 3243554 - RNA, 19 nt, Artificial Sequence
  Description of Artificial Sequence: Synthetic oligonucleotide
uagggaucucauaaucacg

SEQ ID NO: 3243555 - RNA, 19 nt, Artificial Sequence
  Description of Artificial Sequence: Synthetic oligonucleotide
gaaaggauuagcuccacaa

SEQ ID NO: 3243556 - RNA, 19 nt, Artificial Sequence
  Description of Artificial Sequence: Synthetic oligonucleotide
uagaauagacuuguucagg

SEQ ID NO: 3243557 - RNA, 19 nt, Artificial Sequence
  Description of Artificial Sequence: Synthetic oligonucleotide
uccaagaaacaugauguag

SEQ ID NO: 3243558 - RNA, 19 nt, Artificial Sequence
  Description of Artificial Sequence: Synthetic oligonucleotide
acaguaaucauuguaggga

SEQ ID NO: 3243559 - RNA, 19 nt, Artificial Sequence
  Description of Artificial Sequence: Synthetic oligonucleotide
uuggcuguaaacaguaauc

SEQ ID NO: 3243560 - RNA, 19 nt, Artificial Sequence
  Description of Artificial Sequence: Synthetic oligonucleotide
gaugugaaaggauuagcuc

SEQ ID NO: 3243561 - RNA, 19 nt, Artificial Sequence
  Description of Artificial Sequence: Synthetic oligonucleotide
aucacgaagcagcagcagg

SEQ ID NO: 3243562 - RNA, 19 nt, Artificial Sequence
  Description of Artificial Sequence: Synthetic oligonucleotide
uaucuaguuggcaggagga

SEQ ID NO: 3243563 - RNA, 19 nt, Artificial Sequence
  Description of Artificial Sequence: Synthetic oligonucleotide
auacuggcugcuuauuggg

SEQ ID NO: 3243564 - RNA, 19 nt, Artificial Sequence
  Description of Artificial Sequence: Synthetic oligonucleotide
uccaucaagacuggggagg

SEQ ID NO: 3243565 - RNA, 19 nt, Artificial Sequence
  Description of Artificial Sequence: Synthetic oligonucleotide
uugggguuagaauagacuu

SEQ ID NO: 3243566 - RNA, 19 nt, Artificial Sequence
  Description of Artificial Sequence: Synthetic oligonucleotide
ugauguaguaggcacugcu

SEQ ID NO: 3243567 - RNA, 19 nt, Artificial Sequence
  Description of Artificial Sequence: Synthetic oligonucleotide
guuugagggaugugaaagg

SEQ ID NO: 3243568 - RNA, 19 nt, Artificial Sequence
  Description of Artificial Sequence: Synthetic oligonucleotide
auccaaguucaccaggauc

SEQ ID NO: 3243569 - RNA, 19 nt, Artificial Sequence
  Description of Artificial Sequence: Synthetic oligonucleotide
ucauaaucacgaagcagca

SEQ ID NO: 3243570 - RNA, 19 nt, Artificial Sequence
  Description of Artificial Sequence: Synthetic oligonucleotide
ucagguuugagggauguga

SEQ ID NO: 3243571 - RNA, 19 nt, Artificial Sequence
  Description of Artificial Sequence: Synthetic oligonucleotide
uguuucuuaucuaguuggc

SEQ ID NO: 3243572 - RNA, 19 nt, Artificial Sequence
  Description of Artificial Sequence: Synthetic oligonucleotide
cuuccaagaaacaugaugu

SEQ ID NO: 3243573 - RNA, 19 nt, Artificial Sequence
  Description of Artificial Sequence: Synthetic oligonucleotide
aagaaacaugauguaguag

SEQ ID NO: 3243574 - RNA, 19 nt, Artificial Sequence
  Description of Artificial Sequence: Synthetic oligonucleotide
ucucauaaucacgaagcag

SEQ ID NO: 3243575 - RNA, 19 nt, Artificial Sequence
  Description of Artificial Sequence: Synthetic oligonucleotide
uccuguuggcuguaaacag

SEQ ID NO: 3243576 - RNA, 19 nt, Artificial Sequence
  Description of Artificial Sequence: Synthetic oligonucleotide
aaucauuguagggaucuca

SEQ ID NO: 3243577 - RNA, 19 nt, Artificial Sequence
  Description of Artificial Sequence: Synthetic oligonucleotide
augaugugcauauccaagu

SEQ ID NO: 3243578 - RNA, 19 nt, Artificial Sequence
  Description of Artificial Sequence: Synthetic oligonucleotide
cauauccaaguucaccagg

SEQ ID NO: 3243579 - RNA, 19 nt, Artificial Sequence
  Description of Artificial Sequence: Synthetic oligonucleotide
uuccaauuccuguuggcug

SEQ ID NO: 3243580 - RNA, 19 nt, Artificial Sequence
  Description of Artificial Sequence: Synthetic oligonucleotide
gaaacaugauguaguaggc

SEQ ID NO: 3243581 - RNA, 19 nt, Artificial Sequence
  Description of Artificial Sequence: Synthetic oligonucleotide
guagggaucucauaaucac

SEQ ID NO: 3243582 - RNA, 19 nt, Artificial Sequence
  Description of Artificial Sequence: Synthetic oligonucleotide
ugagggaugugaaaggauu

SEQ ID NO: 3243583 - RNA, 19 nt, Artificial Sequence
  Description of Artificial Sequence: Synthetic oligonucleotide
uuguagggaucucauaauc

SEQ ID NO: 3243584 - RNA, 19 nt, Artificial Sequence
  Description of Artificial Sequence: Synthetic oligonucleotide
ugggguuagaauagacuug

SEQ ID NO: 3243585 - RNA, 19 nt, Artificial Sequence
  Description of Artificial Sequence: Synthetic oligonucleotide
uaaucacgaagcagcagca

SEQ ID NO: 3243586 - RNA, 19 nt, Artificial Sequence
  Description of Artificial Sequence: Synthetic oligonucleotide
gaacuuccaagaaacauga

SEQ ID NO: 3243587 - RNA, 19 nt, Artificial Sequence
  Description of Artificial Sequence: Synthetic oligonucleotide
uauugggguuagaauagac

SEQ ID NO: 3243588 - RNA, 19 nt, Artificial Sequence
  Description of Artificial Sequence: Synthetic oligonucleotide
uuugagggaugugaaagga

SEQ ID NO: 3243589 - RNA, 19 nt, Artificial Sequence
  Description of Artificial Sequence: Synthetic oligonucleotide
aguaggcacugcuguauac

SEQ ID NO: 3243590 - RNA, 19 nt, Artificial Sequence
  Description of Artificial Sequence: Synthetic oligonucleotide
gaugugcauauccaaguuc

SEQ ID NO: 3243591 - RNA, 19 nt, Artificial Sequence
  Description of Artificial Sequence: Synthetic oligonucleotide
guaaacaguaaucauugua

SEQ ID NO: 3243592 - RNA, 19 nt, Artificial Sequence
  Description of Artificial Sequence: Synthetic oligonucleotide
aaacaugauguaguaggca

SEQ ID NO: 3243593 - RNA, 19 nt, Artificial Sequence
  Description of Artificial Sequence: Synthetic oligonucleotide
auuagcuccacaagcaaug

SEQ ID NO: 3243594 - RNA, 19 nt, Artificial Sequence
  Description of Artificial Sequence: Synthetic oligonucleotide
uagccaagcuuccaucaag

SEQ ID NO: 3243595 - RNA, 19 nt, Artificial Sequence
  Description of Artificial Sequence: Synthetic oligonucleotide
auguaguaggcacugcugu

SEQ ID NO: 3243596 - RNA, 19 nt, Artificial Sequence
  Description of Artificial Sequence: Synthetic oligonucleotide
cauuguagggaucucauaa

SEQ ID NO: 3243597 - RNA, 19 nt, Artificial Sequence
  Description of Artificial Sequence: Synthetic oligonucleotide
uggcuguaaacaguaauca

SEQ ID NO: 3243598 - RNA, 19 nt, Artificial Sequence
  Description of Artificial Sequence: Synthetic oligonucleotide
uccaauuccuguuggcugu

SEQ ID NO: 3243599 - RNA, 19 nt, Artificial Sequence
  Description of Artificial Sequence: Synthetic oligonucleotide
guauacuggcugcuuauug

SEQ ID NO: 3243600 - RNA, 19 nt, Artificial Sequence
  Description of Artificial Sequence: Synthetic oligonucleotide
uuccuguuggcuguaaaca

SEQ ID NO: 3243601 - RNA, 19 nt, Artificial Sequence
  Description of Artificial Sequence: Synthetic oligonucleotide
gguuugagggaugugaaag

SEQ ID NO: 3243602 - RNA, 19 nt, Artificial Sequence
  Description of Artificial Sequence: Synthetic oligonucleotide
uacuggcugcuuauugggg

SEQ ID NO: 3243603 - RNA, 19 nt, Artificial Sequence
  Description of Artificial Sequence: Synthetic oligonucleotide
ggaucucauaaucacgaag

SEQ ID NO: 3243604 - RNA, 19 nt, Artificial Sequence
  Description of Artificial Sequence: Synthetic oligonucleotide
uaggcacugcuguauacug

SEQ ID NO: 3243605 - RNA, 19 nt, Artificial Sequence
  Description of Artificial Sequence: Synthetic oligonucleotide
augugcauauccaaguuca

SEQ ID NO: 3243606 - RNA, 19 nt, Artificial Sequence
  Description of Artificial Sequence: Synthetic oligonucleotide
gauguaguaggcacugcug

SEQ ID NO: 3243607 - RNA, 19 nt, Artificial Sequence
  Description of Artificial Sequence: Synthetic oligonucleotide
ugaaaggauuagcuccaca

SEQ ID NO: 3243608 - RNA, 19 nt, Artificial Sequence
  Description of Artificial Sequence: Synthetic oligonucleotide
gguuagaauagacuuguuc

SEQ ID NO: 3243609 - RNA, 19 nt, Artificial Sequence
  Description of Artificial Sequence: Synthetic oligonucleotide
cuuccaucaagacugggga

SEQ ID NO: 3243610 - RNA, 19 nt, Artificial Sequence
  Description of Artificial Sequence: Synthetic oligonucleotide
agaggcuuccaauuccugu

SEQ ID NO: 3243611 - RNA, 19 nt, Artificial Sequence
  Description of Artificial Sequence: Synthetic oligonucleotide
uguaaacaguaaucauugu

SEQ ID NO: 3243612 - RNA, 19 nt, Artificial Sequence
  Description of Artificial Sequence: Synthetic oligonucleotide
aucucauaaucacgaagca

SEQ ID NO: 3243613 - RNA, 19 nt, Artificial Sequence
  Description of Artificial Sequence: Synthetic oligonucleotide
ucuuaucuaguuggcagga

SEQ ID NO: 3243614 - RNA, 19 nt, Artificial Sequence
  Description of Artificial Sequence: Synthetic oligonucleotide
ucugcagagaggcuuccaa

SEQ ID NO: 3243615 - RNA, 19 nt, Artificial Sequence
  Description of Artificial Sequence: Synthetic oligonucleotide
ggaacuuccaagaaacaug

SEQ ID NO: 3243616 - RNA, 19 nt, Artificial Sequence
  Description of Artificial Sequence: Synthetic oligonucleotide
aaguucaccaggaucugca

SEQ ID NO: 3243617 - RNA, 19 nt, Artificial Sequence
  Description of Artificial Sequence: Synthetic oligonucleotide
aacagauacaccuccaagg

SEQ ID NO: 3243618 - RNA, 19 nt, Artificial Sequence
  Description of Artificial Sequence: Synthetic oligonucleotide
uacagauaaugucugaugg

SEQ ID NO: 3243619 - RNA, 19 nt, Artificial Sequence
  Description of Artificial Sequence: Synthetic oligonucleotide
uaauaguugguucaguucu

SEQ ID NO: 3243620 - RNA, 19 nt, Artificial Sequence
  Description of Artificial Sequence: Synthetic oligonucleotide
agacgaaaaucuuugcugc

SEQ ID NO: 3243621 - RNA, 19 nt, Artificial Sequence
  Description of Artificial Sequence: Synthetic oligonucleotide
uucuuuggaaagcugagag

SEQ ID NO: 3243622 - RNA, 19 nt, Artificial Sequence
  Description of Artificial Sequence: Synthetic oligonucleotide
acagauacaccuccaaggc

SEQ ID NO: 3243623 - RNA, 19 nt, Artificial Sequence
  Description of Artificial Sequence: Synthetic oligonucleotide
ucugaugugggacagagaa

SEQ ID NO: 3243624 - RNA, 19 nt, Artificial Sequence
  Description of Artificial Sequence: Synthetic oligonucleotide
aaaucuuugcugcagggcu

SEQ ID NO: 3243625 - RNA, 19 nt, Artificial Sequence
  Description of Artificial Sequence: Synthetic oligonucleotide
aaaaucuuugcugcagggc

SEQ ID NO: 3243626 - RNA, 19 nt, Artificial Sequence
  Description of Artificial Sequence: Synthetic oligonucleotide
uugucuacaggucucaaca

SEQ ID NO: 3243627 - RNA, 19 nt, Artificial Sequence
  Description of Artificial Sequence: Synthetic oligonucleotide
cuuuggaaagcugagagcc

SEQ ID NO: 3243628 - RNA, 19 nt, Artificial Sequence
  Description of Artificial Sequence: Synthetic oligonucleotide
aaacagauacaccuccaag

SEQ ID NO: 3243629 - RNA, 19 nt, Artificial Sequence
  Description of Artificial Sequence: Synthetic oligonucleotide
aguugguucaguucuacag

SEQ ID NO: 3243630 - RNA, 19 nt, Artificial Sequence
  Description of Artificial Sequence: Synthetic oligonucleotide
auugccauugugcugcugg

SEQ ID NO: 3243631 - RNA, 19 nt, Artificial Sequence
  Description of Artificial Sequence: Synthetic oligonucleotide
uucaguucuacagauaaug

SEQ ID NO: 3243632 - RNA, 19 nt, Artificial Sequence
  Description of Artificial Sequence: Synthetic oligonucleotide
uuuucuuuggaaagcugag

SEQ ID NO: 3243633 - RNA, 19 nt, Artificial Sequence
  Description of Artificial Sequence: Synthetic oligonucleotide
uuugcugcagggcuguccg

SEQ ID NO: 3243634 - RNA, 19 nt, Artificial Sequence
  Description of Artificial Sequence: Synthetic oligonucleotide
aaagcugugcugcucagca

SEQ ID NO: 3243635 - RNA, 19 nt, Artificial Sequence
  Description of Artificial Sequence: Synthetic oligonucleotide
ucuacaggucucaacaucu

SEQ ID NO: 3243636 - RNA, 19 nt, Artificial Sequence
  Description of Artificial Sequence: Synthetic oligonucleotide
gaaaaucuuugcugcaggg

SEQ ID NO: 3243637 - RNA, 19 nt, Artificial Sequence
  Description of Artificial Sequence: Synthetic oligonucleotide
cucaacaucuguuucuggg

SEQ ID NO: 3243638 - RNA, 19 nt, Artificial Sequence
  Description of Artificial Sequence: Synthetic oligonucleotide
caaauugccauugugcugc

SEQ ID NO: 3243639 - RNA, 19 nt, Artificial Sequence
  Description of Artificial Sequence: Synthetic oligonucleotide
uguuucugggucuuuaugu

SEQ ID NO: 3243640 - RNA, 19 nt, Artificial Sequence
  Description of Artificial Sequence: Synthetic oligonucleotide
cuuuauguccuuauggcuc

SEQ ID NO: 3243641 - RNA, 19 nt, Artificial Sequence
  Description of Artificial Sequence: Synthetic oligonucleotide
ucaaccaaagcugugcugc

SEQ ID NO: 3243642 - RNA, 19 nt, Artificial Sequence
  Description of Artificial Sequence: Synthetic oligonucleotide
aaagcugagagccuuuaau

SEQ ID NO: 3243643 - RNA, 19 nt, Artificial Sequence
  Description of Artificial Sequence: Synthetic oligonucleotide
ugcaaauugccauugugcu

SEQ ID NO: 3243644 - RNA, 19 nt, Artificial Sequence
  Description of Artificial Sequence: Synthetic oligonucleotide
ugaugugggacagagaaac

SEQ ID NO: 3243645 - RNA, 19 nt, Artificial Sequence
  Description of Artificial Sequence: Synthetic oligonucleotide
gagaaacagauacaccucc

SEQ ID NO: 3243646 - RNA, 19 nt, Artificial Sequence
  Description of Artificial Sequence: Synthetic oligonucleotide
aguucuacagauaaugucu

SEQ ID NO: 3243647 - RNA, 19 nt, Artificial Sequence
  Description of Artificial Sequence: Synthetic oligonucleotide
uuuaauaguugguucaguu

SEQ ID NO: 3243648 - RNA, 19 nt, Artificial Sequence
  Description of Artificial Sequence: Synthetic oligonucleotide
cugcaaauugccauugugc

SEQ ID NO: 3243649 - RNA, 19 nt, Artificial Sequence
  Description of Artificial Sequence: Synthetic oligonucleotide
ugauggaccugcaaauugc

SEQ ID NO: 3243650 - RNA, 19 nt, Artificial Sequence
  Description of Artificial Sequence: Synthetic oligonucleotide
gucuuuauguccuuauggc

SEQ ID NO: 3243651 - RNA, 19 nt, Artificial Sequence
  Description of Artificial Sequence: Synthetic oligonucleotide
gacagagaaacagauacac

SEQ ID NO: 3243652 - RNA, 19 nt, Artificial Sequence
  Description of Artificial Sequence: Synthetic oligonucleotide
cagacgaaaaucuuugcug

SEQ ID NO: 3243653 - RNA, 19 nt, Artificial Sequence
  Description of Artificial Sequence: Synthetic oligonucleotide
uuaauaguugguucaguuc

SEQ ID NO: 3243654 - RNA, 19 nt, Artificial Sequence
  Description of Artificial Sequence: Synthetic oligonucleotide
ggucuuuauguccuuaugg

SEQ ID NO: 3243655 - RNA, 19 nt, Artificial Sequence
  Description of Artificial Sequence: Synthetic oligonucleotide
agcugagagccuuuaauag

SEQ ID NO: 3243656 - RNA, 19 nt, Artificial Sequence
  Description of Artificial Sequence: Synthetic oligonucleotide
ucuuuauguccuuauggcu

SEQ ID NO: 3243657 - RNA, 19 nt, Artificial Sequence
  Description of Artificial Sequence: Synthetic oligonucleotide
uccagaagcucaaccaaag

SEQ ID NO: 3243658 - RNA, 19 nt, Artificial Sequence
  Description of Artificial Sequence: Synthetic oligonucleotide
gagagccuuuaauaguugg

SEQ ID NO: 3243659 - RNA, 19 nt, Artificial Sequence
  Description of Artificial Sequence: Synthetic oligonucleotide
gggacagagaaacagauac

SEQ ID NO: 3243660 - RNA, 19 nt, Artificial Sequence
  Description of Artificial Sequence: Synthetic oligonucleotide
uuuauguccuuauggcuca

SEQ ID NO: 3243661 - RNA, 19 nt, Artificial Sequence
  Description of Artificial Sequence: Synthetic oligonucleotide
ucagcaguacagcagcagc

SEQ ID NO: 3243662 - RNA, 19 nt, Artificial Sequence
  Description of Artificial Sequence: Synthetic oligonucleotide
cagagcaugucuugaaggg

SEQ ID NO: 3243663 - RNA, 19 nt, Artificial Sequence
  Description of Artificial Sequence: Synthetic oligonucleotide
uucuccagaagcucaacca

SEQ ID NO: 3243664 - RNA, 19 nt, Artificial Sequence
  Description of Artificial Sequence: Synthetic oligonucleotide
ugugcugcugggcagagaa

SEQ ID NO: 3243665 - RNA, 19 nt, Artificial Sequence
  Description of Artificial Sequence: Synthetic oligonucleotide
ucaguucuacagauaaugu

SEQ ID NO: 3243666 - RNA, 19 nt, Artificial Sequence
  Description of Artificial Sequence: Synthetic oligonucleotide
agccuuuaauaguugguuc

SEQ ID NO: 3243667 - RNA, 19 nt, Artificial Sequence
  Description of Artificial Sequence: Synthetic oligonucleotide
gauaaugucugauggaccu

SEQ ID NO: 3243668 - RNA, 19 nt, Artificial Sequence
  Description of Artificial Sequence: Synthetic oligonucleotide
ugcucagcaguacagcagc

SEQ ID NO: 3243669 - RNA, 19 nt, Artificial Sequence
  Description of Artificial Sequence: Synthetic oligonucleotide
agauacaccuccaaggcag

SEQ ID NO: 3243670 - RNA, 19 nt, Artificial Sequence
  Description of Artificial Sequence: Synthetic oligonucleotide
caacaucuucuccagaagc

SEQ ID NO: 3243671 - RNA, 19 nt, Artificial Sequence
  Description of Artificial Sequence: Synthetic oligonucleotide
ugucugauggaccugcaaa

SEQ ID NO: 3243672 - RNA, 19 nt, Artificial Sequence
  Description of Artificial Sequence: Synthetic oligonucleotide
agcucaaccaaagcugugc

SEQ ID NO: 3243673 - RNA, 19 nt, Artificial Sequence
  Description of Artificial Sequence: Synthetic oligonucleotide
ugcugggcagagaaggagg

SEQ ID NO: 3243674 - RNA, 19 nt, Artificial Sequence
  Description of Artificial Sequence: Synthetic oligonucleotide
agauaaugucugauggacc

SEQ ID NO: 3243675 - RNA, 19 nt, Artificial Sequence
  Description of Artificial Sequence: Synthetic oligonucleotide
ugugggacagagaaacaga

SEQ ID NO: 3243676 - RNA, 19 nt, Artificial Sequence
  Description of Artificial Sequence: Synthetic oligonucleotide
agaagcucaaccaaagcug

SEQ ID NO: 3243677 - RNA, 19 nt, Artificial Sequence
  Description of Artificial Sequence: Synthetic oligonucleotide
ugcugcugggcagagaagg

SEQ ID NO: 3243678 - RNA, 19 nt, Artificial Sequence
  Description of Artificial Sequence: Synthetic oligonucleotide
ucuuuggaaagcugagagc

SEQ ID NO: 3243679 - RNA, 19 nt, Artificial Sequence
  Description of Artificial Sequence: Synthetic oligonucleotide
uuucugggucuuuaugucc

SEQ ID NO: 3243680 - RNA, 19 nt, Artificial Sequence
  Description of Artificial Sequence: Synthetic oligonucleotide
cuacagauaaugucugaug

SEQ ID NO: 3243681 - RNA, 19 nt, Artificial Sequence
  Description of Artificial Sequence: Synthetic oligonucleotide
agcaguggaguccugggag

SEQ ID NO: 3243682 - RNA, 19 nt, Artificial Sequence
  Description of Artificial Sequence: Synthetic oligonucleotide
aagcugagagccuuuaaua

SEQ ID NO: 3243683 - RNA, 19 nt, Artificial Sequence
  Description of Artificial Sequence: Synthetic oligonucleotide
ucaacaucuguuucugggu

SEQ ID NO: 3243684 - RNA, 19 nt, Artificial Sequence
  Description of Artificial Sequence: Synthetic oligonucleotide
auguccuuauggcucaguc

SEQ ID NO: 3243685 - RNA, 19 nt, Artificial Sequence
  Description of Artificial Sequence: Synthetic oligonucleotide
aacaucuguuucugggucu

SEQ ID NO: 3243686 - RNA, 19 nt, Artificial Sequence
  Description of Artificial Sequence: Synthetic oligonucleotide
cagauaaugucugauggac

SEQ ID NO: 3243687 - RNA, 19 nt, Artificial Sequence
  Description of Artificial Sequence: Synthetic oligonucleotide
accaaggcagacgaaaauc

SEQ ID NO: 3243688 - RNA, 19 nt, Artificial Sequence
  Description of Artificial Sequence: Synthetic oligonucleotide
ucucugaugugggacagag

SEQ ID NO: 3243689 - RNA, 19 nt, Artificial Sequence
  Description of Artificial Sequence: Synthetic oligonucleotide
guccuuauggcucagucuc

SEQ ID NO: 3243690 - RNA, 19 nt, Artificial Sequence
  Description of Artificial Sequence: Synthetic oligonucleotide
agagcagagcaguggaguc

SEQ ID NO: 3243691 - RNA, 19 nt, Artificial Sequence
  Description of Artificial Sequence: Synthetic oligonucleotide
cagagaaacagauacaccu

SEQ ID NO: 3243692 - RNA, 19 nt, Artificial Sequence
  Description of Artificial Sequence: Synthetic oligonucleotide
acagagaaacagauacacc

SEQ ID NO: 3243693 - RNA, 19 nt, Artificial Sequence
  Description of Artificial Sequence: Synthetic oligonucleotide
guaggauggcagcugacag

SEQ ID NO: 3243694 - RNA, 19 nt, Artificial Sequence
  Description of Artificial Sequence: Synthetic oligonucleotide
uaaugucugauggaccugc

SEQ ID NO: 3243695 - RNA, 19 nt, Artificial Sequence
  Description of Artificial Sequence: Synthetic oligonucleotide
ugugcugcucagcaguaca

SEQ ID NO: 3243696 - RNA, 19 nt, Artificial Sequence
  Description of Artificial Sequence: Synthetic oligonucleotide
aacaucuucuccagaagcu

SEQ ID NO: 3243697 - RNA, 19 nt, Artificial Sequence
  Description of Artificial Sequence: Synthetic oligonucleotide
uccaaggcagagcaugucu

SEQ ID NO: 3243698 - RNA, 19 nt, Artificial Sequence
  Description of Artificial Sequence: Synthetic oligonucleotide
uucugggucuuuauguccu

SEQ ID NO: 3243699 - RNA, 19 nt, Artificial Sequence
  Description of Artificial Sequence: Synthetic oligonucleotide
agggccaacaucuucucca

SEQ ID NO: 3243700 - RNA, 19 nt, Artificial Sequence
  Description of Artificial Sequence: Synthetic oligonucleotide
acagauaaugucugaugga

SEQ ID NO: 3243701 - RNA, 19 nt, Artificial Sequence
  Description of Artificial Sequence: Synthetic oligonucleotide
uauggcucagucucugaug

SEQ ID NO: 3243702 - RNA, 19 nt, Artificial Sequence
  Description of Artificial Sequence: Synthetic oligonucleotide
auggcucagucucugaugu

SEQ ID NO: 3243703 - RNA, 19 nt, Artificial Sequence
  Description of Artificial Sequence: Synthetic oligonucleotide
acaccuccaaggcagagca

SEQ ID NO: 3243704 - RNA, 19 nt, Artificial Sequence
  Description of Artificial Sequence: Synthetic oligonucleotide
uuugucuacaggucucaac

SEQ ID NO: 3243705 - RNA, 19 nt, Artificial Sequence
  Description of Artificial Sequence: Synthetic oligonucleotide
caguucuacagauaauguc

SEQ ID NO: 3243706 - RNA, 19 nt, Artificial Sequence
  Description of Artificial Sequence: Synthetic oligonucleotide
ucuccagaagcucaaccaa

SEQ ID NO: 3243707 - RNA, 19 nt, Artificial Sequence
  Description of Artificial Sequence: Synthetic oligonucleotide
agagcaguggaguccuggg

SEQ ID NO: 3243708 - RNA, 19 nt, Artificial Sequence
  Description of Artificial Sequence: Synthetic oligonucleotide
agagaaacagauacaccuc

SEQ ID NO: 3243709 - RNA, 19 nt, Artificial Sequence
  Description of Artificial Sequence: Synthetic oligonucleotide
aaggaggcagcgagcagcc

SEQ ID NO: 3243710 - RNA, 19 nt, Artificial Sequence
  Description of Artificial Sequence: Synthetic oligonucleotide
ucuacagauaaugucugau

SEQ ID NO: 3243711 - RNA, 19 nt, Artificial Sequence
  Description of Artificial Sequence: Synthetic oligonucleotide
uggaccugcaaauugccau

SEQ ID NO: 3243712 - RNA, 19 nt, Artificial Sequence
  Description of Artificial Sequence: Synthetic oligonucleotide
aauuugucuacaggucuca

SEQ ID NO: 3243713 - RNA, 19 nt, Artificial Sequence
  Description of Artificial Sequence: Synthetic oligonucleotide
augugggacagagaaacag

SEQ ID NO: 3243714 - RNA, 19 nt, Artificial Sequence
  Description of Artificial Sequence: Synthetic oligonucleotide
aggucucaacaucuguuuc

SEQ ID NO: 3243715 - RNA, 19 nt, Artificial Sequence
  Description of Artificial Sequence: Synthetic oligonucleotide
ggaaggugcaccaaggcag

SEQ ID NO: 3243716 - RNA, 19 nt, Artificial Sequence
  Description of Artificial Sequence: Synthetic oligonucleotide
ugggcagagaaggaggcag

SEQ ID NO: 3243717 - RNA, 19 nt, Artificial Sequence
  Description of Artificial Sequence: Synthetic oligonucleotide
auugaaauugaacaaaugc

SEQ ID NO: 3243718 - RNA, 19 nt, Artificial Sequence
  Description of Artificial Sequence: Synthetic oligonucleotide
acuaaaacaauguuaaagc

SEQ ID NO: 3243719 - RNA, 19 nt, Artificial Sequence
  Description of Artificial Sequence: Synthetic oligonucleotide
agaaauaggaaguucaagc

SEQ ID NO: 3243720 - RNA, 19 nt, Artificial Sequence
  Description of Artificial Sequence: Synthetic oligonucleotide
auuaaggauauuuaaaacg

SEQ ID NO: 3243721 - RNA, 19 nt, Artificial Sequence
  Description of Artificial Sequence: Synthetic oligonucleotide
aauuaaggauauuuaaaac

SEQ ID NO: 3243722 - RNA, 19 nt, Artificial Sequence
  Description of Artificial Sequence: Synthetic oligonucleotide
aauuaaucccuuuuacagc

SEQ ID NO: 3243723 - RNA, 19 nt, Artificial Sequence
  Description of Artificial Sequence: Synthetic oligonucleotide
aauacugugguugagcagc

SEQ ID NO: 3243724 - RNA, 19 nt, Artificial Sequence
  Description of Artificial Sequence: Synthetic oligonucleotide
ugaucuaaaauaaaugagc

SEQ ID NO: 3243725 - RNA, 19 nt, Artificial Sequence
  Description of Artificial Sequence: Synthetic oligonucleotide
guaaauauagccaaagugg

SEQ ID NO: 3243726 - RNA, 19 nt, Artificial Sequence
  Description of Artificial Sequence: Synthetic oligonucleotide
aaaucaauuacacaauaca

SEQ ID NO: 3243727 - RNA, 19 nt, Artificial Sequence
  Description of Artificial Sequence: Synthetic oligonucleotide
aauguaauuauuuccauau

SEQ ID NO: 3243728 - RNA, 19 nt, Artificial Sequence
  Description of Artificial Sequence: Synthetic oligonucleotide
uaaaauguaauuauuucca

SEQ ID NO: 3243729 - RNA, 19 nt, Artificial Sequence
  Description of Artificial Sequence: Synthetic oligonucleotide
uaaaacgauauucacuugg

SEQ ID NO: 3243730 - RNA, 19 nt, Artificial Sequence
  Description of Artificial Sequence: Synthetic oligonucleotide
uuaaaguuaauuaaggaua

SEQ ID NO: 3243731 - RNA, 19 nt, Artificial Sequence
  Description of Artificial Sequence: Synthetic oligonucleotide
uuaaggauauuuaaaacga

SEQ ID NO: 3243732 - RNA, 19 nt, Artificial Sequence
  Description of Artificial Sequence: Synthetic oligonucleotide
aauguuaaagccaggauuc

SEQ ID NO: 3243733 - RNA, 19 nt, Artificial Sequence
  Description of Artificial Sequence: Synthetic oligonucleotide
uugaaaguagaaauuacag

SEQ ID NO: 3243734 - RNA, 19 nt, Artificial Sequence
  Description of Artificial Sequence: Synthetic oligonucleotide
aaucaauuacacaauacac

SEQ ID NO: 3243735 - RNA, 19 nt, Artificial Sequence
  Description of Artificial Sequence: Synthetic oligonucleotide
uuuucuuacuaaaacaaug

SEQ ID NO: 3243736 - RNA, 19 nt, Artificial Sequence
  Description of Artificial Sequence: Synthetic oligonucleotide
uuuaaaacgauauucacuu

SEQ ID NO: 3243737 - RNA, 19 nt, Artificial Sequence
  Description of Artificial Sequence: Synthetic oligonucleotide
ugaaaguagaaauuacagg

SEQ ID NO: 3243738 - RNA, 19 nt, Artificial Sequence
  Description of Artificial Sequence: Synthetic oligonucleotide
uuuaaaguuaauuaaggau

SEQ ID NO: 3243739 - RNA, 19 nt, Artificial Sequence
  Description of Artificial Sequence: Synthetic oligonucleotide
ugguaaaucaauuacacaa

SEQ ID NO: 3243740 - RNA, 19 nt, Artificial Sequence
  Description of Artificial Sequence: Synthetic oligonucleotide
aaaacaauguuaaagccag

SEQ ID NO: 3243741 - RNA, 19 nt, Artificial Sequence
  Description of Artificial Sequence: Synthetic oligonucleotide
gauauuuaaaacgauauuc

SEQ ID NO: 3243742 - RNA, 19 nt, Artificial Sequence
  Description of Artificial Sequence: Synthetic oligonucleotide
uuucauaaaauacuguggu

SEQ ID NO: 3243743 - RNA, 19 nt, Artificial Sequence
  Description of Artificial Sequence: Synthetic oligonucleotide
cuuuuauugaaauugaaca

SEQ ID NO: 3243744 - RNA, 19 nt, Artificial Sequence
  Description of Artificial Sequence: Synthetic oligonucleotide
guaaaauguaauuauuucc

SEQ ID NO: 3243745 - RNA, 19 nt, Artificial Sequence
  Description of Artificial Sequence: Synthetic oligonucleotide
ugagcauuuguuuuaagag

SEQ ID NO: 3243746 - RNA, 19 nt, Artificial Sequence
  Description of Artificial Sequence: Synthetic oligonucleotide
uaaaacaauguuaaagcca

SEQ ID NO: 3243747 - RNA, 19 nt, Artificial Sequence
  Description of Artificial Sequence: Synthetic oligonucleotide
aaaauaaaugagcauuugu

SEQ ID NO: 3243748 - RNA, 19 nt, Artificial Sequence
  Description of Artificial Sequence: Synthetic oligonucleotide
uacuaaaacaauguuaaag

SEQ ID NO: 3243749 - RNA, 19 nt, Artificial Sequence
  Description of Artificial Sequence: Synthetic oligonucleotide
uaauuaaggauauuuaaaa

SEQ ID NO: 3243750 - RNA, 19 nt, Artificial Sequence
  Description of Artificial Sequence: Synthetic oligonucleotide
cauuuuaaaguuaauuaag

SEQ ID NO: 3243751 - RNA, 19 nt, Artificial Sequence
  Description of Artificial Sequence: Synthetic oligonucleotide
acaauacacaaugaaaccc

SEQ ID NO: 3243752 - RNA, 19 nt, Artificial Sequence
  Description of Artificial Sequence: Synthetic oligonucleotide
uguaauuauuuccauauau

SEQ ID NO: 3243753 - RNA, 19 nt, Artificial Sequence
  Description of Artificial Sequence: Synthetic oligonucleotide
acgauauucacuuggauug

SEQ ID NO: 3243754 - RNA, 19 nt, Artificial Sequence
  Description of Artificial Sequence: Synthetic oligonucleotide
auacugguaaaucaauuac

SEQ ID NO: 3243755 - RNA, 19 nt, Artificial Sequence
  Description of Artificial Sequence: Synthetic oligonucleotide
uaaauauagccaaagugga

SEQ ID NO: 3243756 - RNA, 19 nt, Artificial Sequence
  Description of Artificial Sequence: Synthetic oligonucleotide
gaaaguagaaauuacaggu

SEQ ID NO: 3243757 - RNA, 19 nt, Artificial Sequence
  Description of Artificial Sequence: Synthetic oligonucleotide
cuuucauaaaauacugugg

SEQ ID NO: 3243758 - RNA, 19 nt, Artificial Sequence
  Description of Artificial Sequence: Synthetic oligonucleotide
uacauuuuaaaguuaauua

SEQ ID NO: 3243759 - RNA, 19 nt, Artificial Sequence
  Description of Artificial Sequence: Synthetic oligonucleotide
auagcuaaguuacacuugg

SEQ ID NO: 3243760 - RNA, 19 nt, Artificial Sequence
  Description of Artificial Sequence: Synthetic oligonucleotide
ucauaaaauacugugguug

SEQ ID NO: 3243761 - RNA, 19 nt, Artificial Sequence
  Description of Artificial Sequence: Synthetic oligonucleotide
uuaugaaaaucacaguaca

SEQ ID NO: 3243762 - RNA, 19 nt, Artificial Sequence
  Description of Artificial Sequence: Synthetic oligonucleotide
aauaaaugagcauuuguuu

SEQ ID NO: 3243763 - RNA, 19 nt, Artificial Sequence
  Description of Artificial Sequence: Synthetic oligonucleotide
uuacaggucaacauuagga

SEQ ID NO: 3243764 - RNA, 19 nt, Artificial Sequence
  Description of Artificial Sequence: Synthetic oligonucleotide
uuuuaaaguuaauuaagga

SEQ ID NO: 3243765 - RNA, 19 nt, Artificial Sequence
  Description of Artificial Sequence: Synthetic oligonucleotide
aaaauauacacaguaggcu

SEQ ID NO: 3243766 - RNA, 19 nt, Artificial Sequence
  Description of Artificial Sequence: Synthetic oligonucleotide
ucuuuuauugaaauugaac

SEQ ID NO: 3243767 - RNA, 19 nt, Artificial Sequence
  Description of Artificial Sequence: Synthetic oligonucleotide
acacaauacacaaugaaac

SEQ ID NO: 3243768 - RNA, 19 nt, Artificial Sequence
  Description of Artificial Sequence: Synthetic oligonucleotide
agcuacaccauucagaaca

SEQ ID NO: 3243769 - RNA, 19 nt, Artificial Sequence
  Description of Artificial Sequence: Synthetic oligonucleotide
aaaauacugugguugagca

SEQ ID NO: 3243770 - RNA, 19 nt, Artificial Sequence
  Description of Artificial Sequence: Synthetic oligonucleotide
auucaaaccacguagcucu

SEQ ID NO: 3243771 - RNA, 19 nt, Artificial Sequence
  Description of Artificial Sequence: Synthetic oligonucleotide
aaugagagcagaaauagga

SEQ ID NO: 3243772 - RNA, 19 nt, Artificial Sequence
  Description of Artificial Sequence: Synthetic oligonucleotide
agcuaaguuacacuugggc

SEQ ID NO: 3243773 - RNA, 19 nt, Artificial Sequence
  Description of Artificial Sequence: Synthetic oligonucleotide
aaguagaaauuacagguca

SEQ ID NO: 3243774 - RNA, 19 nt, Artificial Sequence
  Description of Artificial Sequence: Synthetic oligonucleotide
uuaguuggcacacuuauuc

SEQ ID NO: 3243775 - RNA, 19 nt, Artificial Sequence
  Description of Artificial Sequence: Synthetic oligonucleotide
guuuuaagaggauauacug

SEQ ID NO: 3243776 - RNA, 19 nt, Artificial Sequence
  Description of Artificial Sequence: Synthetic oligonucleotide
uguaaaauguaauuauuuc

SEQ ID NO: 3243777 - RNA, 19 nt, Artificial Sequence
  Description of Artificial Sequence: Synthetic oligonucleotide
uauucacuuggauugaaag

SEQ ID NO: 3243778 - RNA, 19 nt, Artificial Sequence
  Description of Artificial Sequence: Synthetic oligonucleotide
uacacuugggcacuuaaag

SEQ ID NO: 3243779 - RNA, 19 nt, Artificial Sequence
  Description of Artificial Sequence: Synthetic oligonucleotide
auuuuaaaguuaauuaagg

SEQ ID NO: 3243780 - RNA, 19 nt, Artificial Sequence
  Description of Artificial Sequence: Synthetic oligonucleotide
ucuaaaauaaaugagcauu

SEQ ID NO: 3243781 - RNA, 19 nt, Artificial Sequence
  Description of Artificial Sequence: Synthetic oligonucleotide
guuacagcuacaaugagag

SEQ ID NO: 3243782 - RNA, 19 nt, Artificial Sequence
  Description of Artificial Sequence: Synthetic oligonucleotide
aaauauacacaguaggcua

SEQ ID NO: 3243783 - RNA, 19 nt, Artificial Sequence
  Description of Artificial Sequence: Synthetic oligonucleotide
cuugaucuaaaauaaauga

SEQ ID NO: 3243784 - RNA, 19 nt, Artificial Sequence
  Description of Artificial Sequence: Synthetic oligonucleotide
uuuaaaauuaaucccuuuu

SEQ ID NO: 3243785 - RNA, 19 nt, Artificial Sequence
  Description of Artificial Sequence: Synthetic oligonucleotide
gagcauuuguuuuaagagg

SEQ ID NO: 3243786 - RNA, 19 nt, Artificial Sequence
  Description of Artificial Sequence: Synthetic oligonucleotide
uuuuauugaaauugaacaa

SEQ ID NO: 3243787 - RNA, 19 nt, Artificial Sequence
  Description of Artificial Sequence: Synthetic oligonucleotide
auuaaucccuuuuacagca

SEQ ID NO: 3243788 - RNA, 19 nt, Artificial Sequence
  Description of Artificial Sequence: Synthetic oligonucleotide
aaaaucacaguacaauuuu

SEQ ID NO: 3243789 - RNA, 19 nt, Artificial Sequence
  Description of Artificial Sequence: Synthetic oligonucleotide
uguuuuaagaggauauacu

SEQ ID NO: 3243790 - RNA, 19 nt, Artificial Sequence
  Description of Artificial Sequence: Synthetic oligonucleotide
uuggauugaaaguagaaau

SEQ ID NO: 3243791 - RNA, 19 nt, Artificial Sequence
  Description of Artificial Sequence: Synthetic oligonucleotide
acauuuuaaaguuaauuaa

SEQ ID NO: 3243792 - RNA, 19 nt, Artificial Sequence
  Description of Artificial Sequence: Synthetic oligonucleotide
uaaagucacacguaaauau

SEQ ID NO: 3243793 - RNA, 19 nt, Artificial Sequence
  Description of Artificial Sequence: Synthetic oligonucleotide
uaaaucaauuacacaauac

SEQ ID NO: 3243794 - RNA, 19 nt, Artificial Sequence
  Description of Artificial Sequence: Synthetic oligonucleotide
uaauuauuuccauauauuu

SEQ ID NO: 3243795 - RNA, 19 nt, Artificial Sequence
  Description of Artificial Sequence: Synthetic oligonucleotide
caauacacaaugaaacccc

SEQ ID NO: 3243796 - RNA, 19 nt, Artificial Sequence
  Description of Artificial Sequence: Synthetic oligonucleotide
uauuuaaaacgauauucac

SEQ ID NO: 3243797 - RNA, 19 nt, Artificial Sequence
  Description of Artificial Sequence: Synthetic oligonucleotide
aauauagccaaaguggaaa

SEQ ID NO: 3243798 - RNA, 19 nt, Artificial Sequence
  Description of Artificial Sequence: Synthetic oligonucleotide
aaaguagaaauuacagguc

SEQ ID NO: 3243799 - RNA, 19 nt, Artificial Sequence
  Description of Artificial Sequence: Synthetic oligonucleotide
uacacaauacacaaugaaa

SEQ ID NO: 3243800 - RNA, 19 nt, Artificial Sequence
  Description of Artificial Sequence: Synthetic oligonucleotide
uaaaguuaauuaaggauau

SEQ ID NO: 3243801 - RNA, 19 nt, Artificial Sequence
  Description of Artificial Sequence: Synthetic oligonucleotide
aggaaguucaagcuaaucu

SEQ ID NO: 3243802 - RNA, 19 nt, Artificial Sequence
  Description of Artificial Sequence: Synthetic oligonucleotide
uacacaguaggcuaacuug

SEQ ID NO: 3243803 - RNA, 19 nt, Artificial Sequence
  Description of Artificial Sequence: Synthetic oligonucleotide
aacgauauucacuuggauu

SEQ ID NO: 3243804 - RNA, 19 nt, Artificial Sequence
  Description of Artificial Sequence: Synthetic oligonucleotide
aguucaagcuaaucugagc

SEQ ID NO: 3243805 - RNA, 19 nt, Artificial Sequence
  Description of Artificial Sequence: Synthetic oligonucleotide
uuuuaguuggcacacuuau

SEQ ID NO: 3243806 - RNA, 19 nt, Artificial Sequence
  Description of Artificial Sequence: Synthetic oligonucleotide
acugguaaaucaauuacac

SEQ ID NO: 3243807 - RNA, 19 nt, Artificial Sequence
  Description of Artificial Sequence: Synthetic oligonucleotide
uuuuacagcacauguaaaa

SEQ ID NO: 3243808 - RNA, 19 nt, Artificial Sequence
  Description of Artificial Sequence: Synthetic oligonucleotide
acaaugagagcagaaauag

SEQ ID NO: 3243809 - RNA, 19 nt, Artificial Sequence
  Description of Artificial Sequence: Synthetic oligonucleotide
aaauaaaugagcauuuguu

SEQ ID NO: 3243810 - RNA, 19 nt, Artificial Sequence
  Description of Artificial Sequence: Synthetic oligonucleotide
ucacacguaaauauagcca

SEQ ID NO: 3243811 - RNA, 19 nt, Artificial Sequence
  Description of Artificial Sequence: Synthetic oligonucleotide
uaagaggauauacugguaa

SEQ ID NO: 3243812 - RNA, 19 nt, Artificial Sequence
  Description of Artificial Sequence: Synthetic oligonucleotide
cacacuuauucuuuuauug

SEQ ID NO: 3243813 - RNA, 19 nt, Artificial Sequence
  Description of Artificial Sequence: Synthetic oligonucleotide
ugucuguugaguaagcaaa

SEQ ID NO: 3243814 - RNA, 19 nt, Artificial Sequence
  Description of Artificial Sequence: Synthetic oligonucleotide
aaguuaauuaaggauauuu

SEQ ID NO: 3243815 - RNA, 19 nt, Artificial Sequence
  Description of Artificial Sequence: Synthetic oligonucleotide
acauguaaaauguaauuau

SEQ ID NO: 3243816 - RNA, 19 nt, Artificial Sequence
  Description of Artificial Sequence: Synthetic oligonucleotide
ugagcuacaccauucagaa

SEQ ID NO: 3243817 - RNA, 19 nt, Artificial Sequence
  Description of Artificial Sequence: Synthetic oligonucleotide
uaggagaacacucauagag

SEQ ID NO: 3243818 - RNA, 19 nt, Artificial Sequence
  Description of Artificial Sequence: Synthetic oligonucleotide
auugggcacacucagauac

SEQ ID NO: 3243819 - RNA, 19 nt, Artificial Sequence
  Description of Artificial Sequence: Synthetic oligonucleotide
guuaggagaacacucauag

SEQ ID NO: 3243820 - RNA, 19 nt, Artificial Sequence
  Description of Artificial Sequence: Synthetic oligonucleotide
ucagauacccauaucagca

SEQ ID NO: 3243821 - RNA, 19 nt, Artificial Sequence
  Description of Artificial Sequence: Synthetic oligonucleotide
aaggauucgcucuuuucgc

SEQ ID NO: 3243822 - RNA, 19 nt, Artificial Sequence
  Description of Artificial Sequence: Synthetic oligonucleotide
agcaguucaguucuggccc

SEQ ID NO: 3243823 - RNA, 19 nt, Artificial Sequence
  Description of Artificial Sequence: Synthetic oligonucleotide
guguaaauuguccucaggg

SEQ ID NO: 3243824 - RNA, 19 nt, Artificial Sequence
  Description of Artificial Sequence: Synthetic oligonucleotide
guugaaucgguacagguag

SEQ ID NO: 3243825 - RNA, 19 nt, Artificial Sequence
  Description of Artificial Sequence: Synthetic oligonucleotide
uuugcauccaugcaaacau

SEQ ID NO: 3243826 - RNA, 19 nt, Artificial Sequence
  Description of Artificial Sequence: Synthetic oligonucleotide
agaacacucauagagacag

SEQ ID NO: 3243827 - RNA, 19 nt, Artificial Sequence
  Description of Artificial Sequence: Synthetic oligonucleotide
ugcauugucaucaggugag

SEQ ID NO: 3243828 - RNA, 19 nt, Artificial Sequence
  Description of Artificial Sequence: Synthetic oligonucleotide
guaaauuguccucagggcc

SEQ ID NO: 3243829 - RNA, 19 nt, Artificial Sequence
  Description of Artificial Sequence: Synthetic oligonucleotide
uguaaauuguccucagggc

SEQ ID NO: 3243830 - RNA, 19 nt, Artificial Sequence
  Description of Artificial Sequence: Synthetic oligonucleotide
uaggaaauguccucguggg

SEQ ID NO: 3243831 - RNA, 19 nt, Artificial Sequence
  Description of Artificial Sequence: Synthetic oligonucleotide
uaaagugucgcuugcauuc

SEQ ID NO: 3243832 - RNA, 19 nt, Artificial Sequence
  Description of Artificial Sequence: Synthetic oligonucleotide
auuccgaugucaucuuucc

SEQ ID NO: 3243833 - RNA, 19 nt, Artificial Sequence
  Description of Artificial Sequence: Synthetic oligonucleotide
gaauucuucuuccagggac

SEQ ID NO: 3243834 - RNA, 19 nt, Artificial Sequence
  Description of Artificial Sequence: Synthetic oligonucleotide
uccaugcaaacauugagca

SEQ ID NO: 3243835 - RNA, 19 nt, Artificial Sequence
  Description of Artificial Sequence: Synthetic oligonucleotide
aggaauucuucuuccaggg

SEQ ID NO: 3243836 - RNA, 19 nt, Artificial Sequence
  Description of Artificial Sequence: Synthetic oligonucleotide
guaggaaauguccucgugg

SEQ ID NO: 3243837 - RNA, 19 nt, Artificial Sequence
  Description of Artificial Sequence: Synthetic oligonucleotide
acauugagcaguucaguuc

SEQ ID NO: 3243838 - RNA, 19 nt, Artificial Sequence
  Description of Artificial Sequence: Synthetic oligonucleotide
aguggucccaguugaaucg

SEQ ID NO: 3243839 - RNA, 19 nt, Artificial Sequence
  Description of Artificial Sequence: Synthetic oligonucleotide
aaucgguacagguaggaaa

SEQ ID NO: 3243840 - RNA, 19 nt, Artificial Sequence
  Description of Artificial Sequence: Synthetic oligonucleotide
acagcaggaauucuucuuc

SEQ ID NO: 3243841 - RNA, 19 nt, Artificial Sequence
  Description of Artificial Sequence: Synthetic oligonucleotide
uuuucgccagcucuggucc

SEQ ID NO: 3243842 - RNA, 19 nt, Artificial Sequence
  Description of Artificial Sequence: Synthetic oligonucleotide
uuuguggugcuuugcaucc

SEQ ID NO: 3243843 - RNA, 19 nt, Artificial Sequence
  Description of Artificial Sequence: Synthetic oligonucleotide
uaaauuguccucagggccu

SEQ ID NO: 3243844 - RNA, 19 nt, Artificial Sequence
  Description of Artificial Sequence: Synthetic oligonucleotide
uguguaaauuguccucagg

SEQ ID NO: 3243845 - RNA, 19 nt, Artificial Sequence
  Description of Artificial Sequence: Synthetic oligonucleotide
caucuuuccacaguggucc

SEQ ID NO: 3243846 - RNA, 19 nt, Artificial Sequence
  Description of Artificial Sequence: Synthetic oligonucleotide
caaacauugagcaguucag

SEQ ID NO: 3243847 - RNA, 19 nt, Artificial Sequence
  Description of Artificial Sequence: Synthetic oligonucleotide
uccgaugucaucuuuccac

SEQ ID NO: 3243848 - RNA, 19 nt, Artificial Sequence
  Description of Artificial Sequence: Synthetic oligonucleotide
auccaugcaaacauugagc

SEQ ID NO: 3243849 - RNA, 19 nt, Artificial Sequence
  Description of Artificial Sequence: Synthetic oligonucleotide
ugcauccaugcaaacauug

SEQ ID NO: 3243850 - RNA, 19 nt, Artificial Sequence
  Description of Artificial Sequence: Synthetic oligonucleotide
cuugauugggcacacucag

SEQ ID NO: 3243851 - RNA, 19 nt, Artificial Sequence
  Description of Artificial Sequence: Synthetic oligonucleotide
auagagacagguauccugg

SEQ ID NO: 3243852 - RNA, 19 nt, Artificial Sequence
  Description of Artificial Sequence: Synthetic oligonucleotide
cugguuguguaaauugucc

SEQ ID NO: 3243853 - RNA, 19 nt, Artificial Sequence
  Description of Artificial Sequence: Synthetic oligonucleotide
cauagagacagguauccug

SEQ ID NO: 3243854 - RNA, 19 nt, Artificial Sequence
  Description of Artificial Sequence: Synthetic oligonucleotide
accugcugaauccaggguc

SEQ ID NO: 3243855 - RNA, 19 nt, Artificial Sequence
  Description of Artificial Sequence: Synthetic oligonucleotide
aacauugagcaguucaguu

SEQ ID NO: 3243856 - RNA, 19 nt, Artificial Sequence
  Description of Artificial Sequence: Synthetic oligonucleotide
aaagugucgcuugcauucc

SEQ ID NO: 3243857 - RNA, 19 nt, Artificial Sequence
  Description of Artificial Sequence: Synthetic oligonucleotide
ugauugggcacacucagau

SEQ ID NO: 3243858 - RNA, 19 nt, Artificial Sequence
  Description of Artificial Sequence: Synthetic oligonucleotide
caggaauucuucuuccagg

SEQ ID NO: 3243859 - RNA, 19 nt, Artificial Sequence
  Description of Artificial Sequence: Synthetic oligonucleotide
aacacucauagagacaggu

SEQ ID NO: 3243860 - RNA, 19 nt, Artificial Sequence
  Description of Artificial Sequence: Synthetic oligonucleotide
cucagauacccauaucagc

SEQ ID NO: 3243861 - RNA, 19 nt, Artificial Sequence
  Description of Artificial Sequence: Synthetic oligonucleotide
acagguauccuggauaaag

SEQ ID NO: 3243862 - RNA, 19 nt, Artificial Sequence
  Description of Artificial Sequence: Synthetic oligonucleotide
uacagguaggaaauguccu

SEQ ID NO: 3243863 - RNA, 19 nt, Artificial Sequence
  Description of Artificial Sequence: Synthetic oligonucleotide
aacugcauugucaucaggu

SEQ ID NO: 3243864 - RNA, 19 nt, Artificial Sequence
  Description of Artificial Sequence: Synthetic oligonucleotide
agauacccauaucagcagg

SEQ ID NO: 3243865 - RNA, 19 nt, Artificial Sequence
  Description of Artificial Sequence: Synthetic oligonucleotide
aggauucgcucuuuucgcc

SEQ ID NO: 3243866 - RNA, 19 nt, Artificial Sequence
  Description of Artificial Sequence: Synthetic oligonucleotide
augucaucuuuccacagug

SEQ ID NO: 3243867 - RNA, 19 nt, Artificial Sequence
  Description of Artificial Sequence: Synthetic oligonucleotide
ucuugauugggcacacuca

SEQ ID NO: 3243868 - RNA, 19 nt, Artificial Sequence
  Description of Artificial Sequence: Synthetic oligonucleotide
uauccuggauaaagugucg

SEQ ID NO: 3243869 - RNA, 19 nt, Artificial Sequence
  Description of Artificial Sequence: Synthetic oligonucleotide
acagguaggaaauguccuc

SEQ ID NO: 3243870 - RNA, 19 nt, Artificial Sequence
  Description of Artificial Sequence: Synthetic oligonucleotide
cauccaugcaaacauugag

SEQ ID NO: 3243871 - RNA, 19 nt, Artificial Sequence
  Description of Artificial Sequence: Synthetic oligonucleotide
guguugguggaacagcagg

SEQ ID NO: 3243872 - RNA, 19 nt, Artificial Sequence
  Description of Artificial Sequence: Synthetic oligonucleotide
aggagcagcaacugcauug

SEQ ID NO: 3243873 - RNA, 19 nt, Artificial Sequence
  Description of Artificial Sequence: Synthetic oligonucleotide
uguugguggaacagcagga

SEQ ID NO: 3243874 - RNA, 19 nt, Artificial Sequence
  Description of Artificial Sequence: Synthetic oligonucleotide
uucuuuguggugcuuugca

SEQ ID NO: 3243875 - RNA, 19 nt, Artificial Sequence
  Description of Artificial Sequence: Synthetic oligonucleotide
auugucaucaggugagcca

SEQ ID NO: 3243876 - RNA, 19 nt, Artificial Sequence
  Description of Artificial Sequence: Synthetic oligonucleotide
ugucaucuuuccacagugg

SEQ ID NO: 3243877 - RNA, 19 nt, Artificial Sequence
  Description of Artificial Sequence: Synthetic oligonucleotide
uuguguugguggaacagca

SEQ ID NO: 3243878 - RNA, 19 nt, Artificial Sequence
  Description of Artificial Sequence: Synthetic oligonucleotide
cucauagagacagguaucc

SEQ ID NO: 3243879 - RNA, 19 nt, Artificial Sequence
  Description of Artificial Sequence: Synthetic oligonucleotide
agcaacugcauugucauca

SEQ ID NO: 3243880 - RNA, 19 nt, Artificial Sequence
  Description of Artificial Sequence: Synthetic oligonucleotide
ucuuccagggacugcacug

SEQ ID NO: 3243881 - RNA, 19 nt, Artificial Sequence
  Description of Artificial Sequence: Synthetic oligonucleotide
gagcaguucaguucuggcc

SEQ ID NO: 3243882 - RNA, 19 nt, Artificial Sequence
  Description of Artificial Sequence: Synthetic oligonucleotide
uuuucuuuguggugcuuug

SEQ ID NO: 3243883 - RNA, 19 nt, Artificial Sequence
  Description of Artificial Sequence: Synthetic oligonucleotide
uugcauuccgaugucaucu

SEQ ID NO: 3243884 - RNA, 19 nt, Artificial Sequence
  Description of Artificial Sequence: Synthetic oligonucleotide
aguagcucuugauugggca

SEQ ID NO: 3243885 - RNA, 19 nt, Artificial Sequence
  Description of Artificial Sequence: Synthetic oligonucleotide
cacucagauacccauauca

SEQ ID NO: 3243886 - RNA, 19 nt, Artificial Sequence
  Description of Artificial Sequence: Synthetic oligonucleotide
uccacaguggucccaguug

SEQ ID NO: 3243887 - RNA, 19 nt, Artificial Sequence
  Description of Artificial Sequence: Synthetic oligonucleotide
uggugcuuugcauccaugc

SEQ ID NO: 3243888 - RNA, 19 nt, Artificial Sequence
  Description of Artificial Sequence: Synthetic oligonucleotide
agguauccuggauaaagug

SEQ ID NO: 3243889 - RNA, 19 nt, Artificial Sequence
  Description of Artificial Sequence: Synthetic oligonucleotide
ucaguucuggcccgaguag

SEQ ID NO: 3243890 - RNA, 19 nt, Artificial Sequence
  Description of Artificial Sequence: Synthetic oligonucleotide
uggauaaagugucgcuugc

SEQ ID NO: 3243891 - RNA, 19 nt, Artificial Sequence
  Description of Artificial Sequence: Synthetic oligonucleotide
acugcauugucaucaggug

SEQ ID NO: 3243892 - RNA, 19 nt, Artificial Sequence
  Description of Artificial Sequence: Synthetic oligonucleotide
ucuucuuccagggacugca

SEQ ID NO: 3243893 - RNA, 19 nt, Artificial Sequence
  Description of Artificial Sequence: Synthetic oligonucleotide
cuggauaaagugucgcuug

SEQ ID NO: 3243894 - RNA, 19 nt, Artificial Sequence
  Description of Artificial Sequence: Synthetic oligonucleotide
ugguuguguaaauuguccu

SEQ ID NO: 3243895 - RNA, 19 nt, Artificial Sequence
  Description of Artificial Sequence: Synthetic oligonucleotide
cuuuguggugcuuugcauc

SEQ ID NO: 3243896 - RNA, 19 nt, Artificial Sequence
  Description of Artificial Sequence: Synthetic oligonucleotide
aaguuaggagaacacucau

SEQ ID NO: 3243897 - RNA, 19 nt, Artificial Sequence
  Description of Artificial Sequence: Synthetic oligonucleotide
aggaaauguccucgugggc

SEQ ID NO: 3243898 - RNA, 19 nt, Artificial Sequence
  Description of Artificial Sequence: Synthetic oligonucleotide
uugaaucgguacagguagg

SEQ ID NO: 3243899 - RNA, 19 nt, Artificial Sequence
  Description of Artificial Sequence: Synthetic oligonucleotide
aaacauugagcaguucagu

SEQ ID NO: 3243900 - RNA, 19 nt, Artificial Sequence
  Description of Artificial Sequence: Synthetic oligonucleotide
uggcuuuucuuuguggugc

SEQ ID NO: 3243901 - RNA, 19 nt, Artificial Sequence
  Description of Artificial Sequence: Synthetic oligonucleotide
uucaguucuggcccgagua

SEQ ID NO: 3243902 - RNA, 19 nt, Artificial Sequence
  Description of Artificial Sequence: Synthetic oligonucleotide
aacagcaggaauucuucuu

SEQ ID NO: 3243903 - RNA, 19 nt, Artificial Sequence
  Description of Artificial Sequence: Synthetic oligonucleotide
uccaccugcugaauccagg

SEQ ID NO: 3243904 - RNA, 19 nt, Artificial Sequence
  Description of Artificial Sequence: Synthetic oligonucleotide
aauucuucuuccagggacu

SEQ ID NO: 3243905 - RNA, 19 nt, Artificial Sequence
  Description of Artificial Sequence: Synthetic oligonucleotide
uguguugguggaacagcag

SEQ ID NO: 3243906 - RNA, 19 nt, Artificial Sequence
  Description of Artificial Sequence: Synthetic oligonucleotide
guacagguaggaaaugucc

SEQ ID NO: 3243907 - RNA, 19 nt, Artificial Sequence
  Description of Artificial Sequence: Synthetic oligonucleotide
ggagaacacucauagagac

SEQ ID NO: 3243908 - RNA, 19 nt, Artificial Sequence
  Description of Artificial Sequence: Synthetic oligonucleotide
aauccagggucccaaguua

SEQ ID NO: 3243909 - RNA, 19 nt, Artificial Sequence
  Description of Artificial Sequence: Synthetic oligonucleotide
ugcuuugcauccaugcaaa

SEQ ID NO: 3243910 - RNA, 19 nt, Artificial Sequence
  Description of Artificial Sequence: Synthetic oligonucleotide
ucccaguugaaucgguaca

SEQ ID NO: 3243911 - RNA, 19 nt, Artificial Sequence
  Description of Artificial Sequence: Synthetic oligonucleotide
uacccauaucagcaggagc

SEQ ID NO: 3243912 - RNA, 19 nt, Artificial Sequence
  Description of Artificial Sequence: Synthetic oligonucleotide
ucaucuuuccacagugguc

SEQ ID NO: 3243913 - RNA, 19 nt, Artificial Sequence
  Description of Artificial Sequence: Synthetic oligonucleotide
aagugucgcuugcauuccg

SEQ ID NO: 3243914 - RNA, 19 nt, Artificial Sequence
  Description of Artificial Sequence: Synthetic oligonucleotide
ugagcaguucaguucuggc

SEQ ID NO: 3243915 - RNA, 19 nt, Artificial Sequence
  Description of Artificial Sequence: Synthetic oligonucleotide
acccauaucagcaggagca

SEQ ID NO: 3243916 - RNA, 19 nt, Artificial Sequence
  Description of Artificial Sequence: Synthetic oligonucleotide
uuguguaaauuguccucag

SEQ ID NO: 3243917 - RNA, 19 nt, Artificial Sequence
  Description of Artificial Sequence: Synthetic oligonucleotide
aauauuaaacaguaauugc

SEQ ID NO: 3243918 - RNA, 19 nt, Artificial Sequence
  Description of Artificial Sequence: Synthetic oligonucleotide
auuguuaugaauaagaaug

SEQ ID NO: 3243919 - RNA, 19 nt, Artificial Sequence
  Description of Artificial Sequence: Synthetic oligonucleotide
aaauauuaaacaguaauug

SEQ ID NO: 3243920 - RNA, 19 nt, Artificial Sequence
  Description of Artificial Sequence: Synthetic oligonucleotide
aaauauaaugcaucuuugg

SEQ ID NO: 3243921 - RNA, 19 nt, Artificial Sequence
  Description of Artificial Sequence: Synthetic oligonucleotide
aucaagaccaagcacaggc

SEQ ID NO: 3243922 - RNA, 19 nt, Artificial Sequence
  Description of Artificial Sequence: Synthetic oligonucleotide
uuaugaauaagaauggcca

SEQ ID NO: 3243923 - RNA, 19 nt, Artificial Sequence
  Description of Artificial Sequence: Synthetic oligonucleotide
auauuuaaccuuuaucugg

SEQ ID NO: 3243924 - RNA, 19 nt, Artificial Sequence
  Description of Artificial Sequence: Synthetic oligonucleotide
aguaauugcagauagcaag

SEQ ID NO: 3243925 - RNA, 19 nt, Artificial Sequence
  Description of Artificial Sequence: Synthetic oligonucleotide
accaacuucacuuuauacc

SEQ ID NO: 3243926 - RNA, 19 nt, Artificial Sequence
  Description of Artificial Sequence: Synthetic oligonucleotide
uauuaaacaguaauugcag

SEQ ID NO: 3243927 - RNA, 19 nt, Artificial Sequence
  Description of Artificial Sequence: Synthetic oligonucleotide
aauauaaugcaucuuugga

SEQ ID NO: 3243928 - RNA, 19 nt, Artificial Sequence
  Description of Artificial Sequence: Synthetic oligonucleotide
cauuuuaaaacccaggaac

SEQ ID NO: 3243929 - RNA, 19 nt, Artificial Sequence
  Description of Artificial Sequence: Synthetic oligonucleotide
aaacaguaauugcagauag

SEQ ID NO: 3243930 - RNA, 19 nt, Artificial Sequence
  Description of Artificial Sequence: Synthetic oligonucleotide
uuuucuauacaccaacuca

SEQ ID NO: 3243931 - RNA, 19 nt, Artificial Sequence
  Description of Artificial Sequence: Synthetic oligonucleotide
uuucuauacaccaacucag

SEQ ID NO: 3243932 - RNA, 19 nt, Artificial Sequence
  Description of Artificial Sequence: Synthetic oligonucleotide
aagaggagcacauaaauau

SEQ ID NO: 3243933 - RNA, 19 nt, Artificial Sequence
  Description of Artificial Sequence: Synthetic oligonucleotide
aaaacagcaguccacugag

SEQ ID NO: 3243934 - RNA, 19 nt, Artificial Sequence
  Description of Artificial Sequence: Synthetic oligonucleotide
aaacccaggaacuuccugg

SEQ ID NO: 3243935 - RNA, 19 nt, Artificial Sequence
  Description of Artificial Sequence: Synthetic oligonucleotide
aacuucucaaaccaaacca

SEQ ID NO: 3243936 - RNA, 19 nt, Artificial Sequence
  Description of Artificial Sequence: Synthetic oligonucleotide
uuaaccuuuaucuggaaca

SEQ ID NO: 3243937 - RNA, 19 nt, Artificial Sequence
  Description of Artificial Sequence: Synthetic oligonucleotide
auauaaugcaucuuuggag

SEQ ID NO: 3243938 - RNA, 19 nt, Artificial Sequence
  Description of Artificial Sequence: Synthetic oligonucleotide
uauaaugcaucuuuggaga

SEQ ID NO: 3243939 - RNA, 19 nt, Artificial Sequence
  Description of Artificial Sequence: Synthetic oligonucleotide
uuguuaugaauaagaaugg

SEQ ID NO: 3243940 - RNA, 19 nt, Artificial Sequence
  Description of Artificial Sequence: Synthetic oligonucleotide
agaauugccaucauuauuc

SEQ ID NO: 3243941 - RNA, 19 nt, Artificial Sequence
  Description of Artificial Sequence: Synthetic oligonucleotide
uuauaaagaguuauuauuu

SEQ ID NO: 3243942 - RNA, 19 nt, Artificial Sequence
  Description of Artificial Sequence: Synthetic oligonucleotide
auaaauauaaugcaucuuu

SEQ ID NO: 3243943 - RNA, 19 nt, Artificial Sequence
  Description of Artificial Sequence: Synthetic oligonucleotide
ucaagaauugccaucauua

SEQ ID NO: 3243944 - RNA, 19 nt, Artificial Sequence
  Description of Artificial Sequence: Synthetic oligonucleotide
uauauuuaaccuuuaucug

SEQ ID NO: 3243945 - RNA, 19 nt, Artificial Sequence
  Description of Artificial Sequence: Synthetic oligonucleotide
uucaucagaugcaucaggg

SEQ ID NO: 3243946 - RNA, 19 nt, Artificial Sequence
  Description of Artificial Sequence: Synthetic oligonucleotide
uuuucaauuuccuacuucu

SEQ ID NO: 3243947 - RNA, 19 nt, Artificial Sequence
  Description of Artificial Sequence: Synthetic oligonucleotide
uuuaucuggaacaugguau

SEQ ID NO: 3243948 - RNA, 19 nt, Artificial Sequence
  Description of Artificial Sequence: Synthetic oligonucleotide
cuuuauaccguaucagugg

SEQ ID NO: 3243949 - RNA, 19 nt, Artificial Sequence
  Description of Artificial Sequence: Synthetic oligonucleotide
auaaggucuguguagauug

SEQ ID NO: 3243950 - RNA, 19 nt, Artificial Sequence
  Description of Artificial Sequence: Synthetic oligonucleotide
uaaauauaaugcaucuuug

SEQ ID NO: 3243951 - RNA, 19 nt, Artificial Sequence
  Description of Artificial Sequence: Synthetic oligonucleotide
aagucaacuucucaaacca

SEQ ID NO: 3243952 - RNA, 19 nt, Artificial Sequence
  Description of Artificial Sequence: Synthetic oligonucleotide
uauacaccaacucaguuuc

SEQ ID NO: 3243953 - RNA, 19 nt, Artificial Sequence
  Description of Artificial Sequence: Synthetic oligonucleotide
gagcacauaaauauaaugc

SEQ ID NO: 3243954 - RNA, 19 nt, Artificial Sequence
  Description of Artificial Sequence: Synthetic oligonucleotide
ugucauuuuaaaacccagg

SEQ ID NO: 3243955 - RNA, 19 nt, Artificial Sequence
  Description of Artificial Sequence: Synthetic oligonucleotide
auuauucuagccuauauuu

SEQ ID NO: 3243956 - RNA, 19 nt, Artificial Sequence
  Description of Artificial Sequence: Synthetic oligonucleotide
aaccaacuucacuuuauac

SEQ ID NO: 3243957 - RNA, 19 nt, Artificial Sequence
  Description of Artificial Sequence: Synthetic oligonucleotide
ucaguuucaagaauugcca

SEQ ID NO: 3243958 - RNA, 19 nt, Artificial Sequence
  Description of Artificial Sequence: Synthetic oligonucleotide
uuaaaacccaggaacuucc

SEQ ID NO: 3243959 - RNA, 19 nt, Artificial Sequence
  Description of Artificial Sequence: Synthetic oligonucleotide
aucaguggcacauaaaaca

SEQ ID NO: 3243960 - RNA, 19 nt, Artificial Sequence
  Description of Artificial Sequence: Synthetic oligonucleotide
cucaguuucaagaauugcc

SEQ ID NO: 3243961 - RNA, 19 nt, Artificial Sequence
  Description of Artificial Sequence: Synthetic oligonucleotide
cuauauuuaaccuuuaucu

SEQ ID NO: 3243962 - RNA, 19 nt, Artificial Sequence
  Description of Artificial Sequence: Synthetic oligonucleotide
uucaauuuccuacuucuug

SEQ ID NO: 3243963 - RNA, 19 nt, Artificial Sequence
  Description of Artificial Sequence: Synthetic oligonucleotide
auuuucuauacaccaacuc

SEQ ID NO: 3243964 - RNA, 19 nt, Artificial Sequence
  Description of Artificial Sequence: Synthetic oligonucleotide
aaccaaaccaacuucacuu

SEQ ID NO: 3243965 - RNA, 19 nt, Artificial Sequence
  Description of Artificial Sequence: Synthetic oligonucleotide
acugagaaggaagaggagc

SEQ ID NO: 3243966 - RNA, 19 nt, Artificial Sequence
  Description of Artificial Sequence: Synthetic oligonucleotide
uauuuaaccuuuaucugga

SEQ ID NO: 3243967 - RNA, 19 nt, Artificial Sequence
  Description of Artificial Sequence: Synthetic oligonucleotide
uuuauaccguaucaguggc

SEQ ID NO: 3243968 - RNA, 19 nt, Artificial Sequence
  Description of Artificial Sequence: Synthetic oligonucleotide
ucaaaccaaaccaacuuca

SEQ ID NO: 3243969 - RNA, 19 nt, Artificial Sequence
  Description of Artificial Sequence: Synthetic oligonucleotide
uuugucauuuuaaaaccca

SEQ ID NO: 3243970 - RNA, 19 nt, Artificial Sequence
  Description of Artificial Sequence: Synthetic oligonucleotide
ucaguggcacauaaaacag

SEQ ID NO: 3243971 - RNA, 19 nt, Artificial Sequence
  Description of Artificial Sequence: Synthetic oligonucleotide
uucacuuuauaccguauca

SEQ ID NO: 3243972 - RNA, 19 nt, Artificial Sequence
  Description of Artificial Sequence: Synthetic oligonucleotide
acauaaauauaaugcaucu

SEQ ID NO: 3243973 - RNA, 19 nt, Artificial Sequence
  Description of Artificial Sequence: Synthetic oligonucleotide
agcacauaaauauaaugca

SEQ ID NO: 3243974 - RNA, 19 nt, Artificial Sequence
  Description of Artificial Sequence: Synthetic oligonucleotide
auugccaucauuauucuag

SEQ ID NO: 3243975 - RNA, 19 nt, Artificial Sequence
  Description of Artificial Sequence: Synthetic oligonucleotide
uuucaucagaugcaucagg

SEQ ID NO: 3243976 - RNA, 19 nt, Artificial Sequence
  Description of Artificial Sequence: Synthetic oligonucleotide
acaugguaugguuauaaag

SEQ ID NO: 3243977 - RNA, 19 nt, Artificial Sequence
  Description of Artificial Sequence: Synthetic oligonucleotide
agggaugcaaauauuaaac

SEQ ID NO: 3243978 - RNA, 19 nt, Artificial Sequence
  Description of Artificial Sequence: Synthetic oligonucleotide
uuaaacaguaauugcagau

SEQ ID NO: 3243979 - RNA, 19 nt, Artificial Sequence
  Description of Artificial Sequence: Synthetic oligonucleotide
uaaaacagcaguccacuga

SEQ ID NO: 3243980 - RNA, 19 nt, Artificial Sequence
  Description of Artificial Sequence: Synthetic oligonucleotide
caugguaugguuauaaaga

SEQ ID NO: 3243981 - RNA, 19 nt, Artificial Sequence
  Description of Artificial Sequence: Synthetic oligonucleotide
auauuaaacaguaauugca

SEQ ID NO: 3243982 - RNA, 19 nt, Artificial Sequence
  Description of Artificial Sequence: Synthetic oligonucleotide
guuaugaauaagaauggcc

SEQ ID NO: 3243983 - RNA, 19 nt, Artificial Sequence
  Description of Artificial Sequence: Synthetic oligonucleotide
aguuucaagaauugccauc

SEQ ID NO: 3243984 - RNA, 19 nt, Artificial Sequence
  Description of Artificial Sequence: Synthetic oligonucleotide
augguaugguuauaaagag

SEQ ID NO: 3243985 - RNA, 19 nt, Artificial Sequence
  Description of Artificial Sequence: Synthetic oligonucleotide
cacauaaauauaaugcauc

SEQ ID NO: 3243986 - RNA, 19 nt, Artificial Sequence
  Description of Artificial Sequence: Synthetic oligonucleotide
ucaauuuccuacuucuugu

SEQ ID NO: 3243987 - RNA, 19 nt, Artificial Sequence
  Description of Artificial Sequence: Synthetic oligonucleotide
aauugcagauagcaaguca

SEQ ID NO: 3243988 - RNA, 19 nt, Artificial Sequence
  Description of Artificial Sequence: Synthetic oligonucleotide
uauucuagccuauauuuaa

SEQ ID NO: 3243989 - RNA, 19 nt, Artificial Sequence
  Description of Artificial Sequence: Synthetic oligonucleotide
uggcacauaaaacagcagu

SEQ ID NO: 3243990 - RNA, 19 nt, Artificial Sequence
  Description of Artificial Sequence: Synthetic oligonucleotide
aucuuuggagacuugacca

SEQ ID NO: 3243991 - RNA, 19 nt, Artificial Sequence
  Description of Artificial Sequence: Synthetic oligonucleotide
cuggguauuuucuauacac

SEQ ID NO: 3243992 - RNA, 19 nt, Artificial Sequence
  Description of Artificial Sequence: Synthetic oligonucleotide
uugucauuuuaaaacccag

SEQ ID NO: 3243993 - RNA, 19 nt, Artificial Sequence
  Description of Artificial Sequence: Synthetic oligonucleotide
cuuugucauuuuaaaaccc

SEQ ID NO: 3243994 - RNA, 19 nt, Artificial Sequence
  Description of Artificial Sequence: Synthetic oligonucleotide
uuaucuggaacaugguaug

SEQ ID NO: 3243995 - RNA, 19 nt, Artificial Sequence
  Description of Artificial Sequence: Synthetic oligonucleotide
aaggaagaggagcacauaa

SEQ ID NO: 3243996 - RNA, 19 nt, Artificial Sequence
  Description of Artificial Sequence: Synthetic oligonucleotide
uuuaaccuuuaucuggaac

SEQ ID NO: 3243997 - RNA, 19 nt, Artificial Sequence
  Description of Artificial Sequence: Synthetic oligonucleotide
uuuggagacuugaccaggg

SEQ ID NO: 3243998 - RNA, 19 nt, Artificial Sequence
  Description of Artificial Sequence: Synthetic oligonucleotide
accuuuaucuggaacaugg

SEQ ID NO: 3243999 - RNA, 19 nt, Artificial Sequence
  Description of Artificial Sequence: Synthetic oligonucleotide
accaagcacaggcugaugg

SEQ ID NO: 3244000 - RNA, 19 nt, Artificial Sequence
  Description of Artificial Sequence: Synthetic oligonucleotide
ucauuuuaaaacccaggaa

SEQ ID NO: 3244001 - RNA, 19 nt, Artificial Sequence
  Description of Artificial Sequence: Synthetic oligonucleotide
ccaacuucacuuuauaccg

SEQ ID NO: 3244002 - RNA, 19 nt, Artificial Sequence
  Description of Artificial Sequence: Synthetic oligonucleotide
uugaccaggggaaucaaga

SEQ ID NO: 3244003 - RNA, 19 nt, Artificial Sequence
  Description of Artificial Sequence: Synthetic oligonucleotide
acaguaauugcagauagca

SEQ ID NO: 3244004 - RNA, 19 nt, Artificial Sequence
  Description of Artificial Sequence: Synthetic oligonucleotide
aaaccaaaccaacuucacu

SEQ ID NO: 3244005 - RNA, 19 nt, Artificial Sequence
  Description of Artificial Sequence: Synthetic oligonucleotide
uucuagccuauauuuaacc

SEQ ID NO: 3244006 - RNA, 19 nt, Artificial Sequence
  Description of Artificial Sequence: Synthetic oligonucleotide
ggaugcaaauauuaaacag

SEQ ID NO: 3244007 - RNA, 19 nt, Artificial Sequence
  Description of Artificial Sequence: Synthetic oligonucleotide
caagucaacuucucaaacc

SEQ ID NO: 3244008 - RNA, 19 nt, Artificial Sequence
  Description of Artificial Sequence: Synthetic oligonucleotide
guauuuucuauacaccaac

SEQ ID NO: 3244009 - RNA, 19 nt, Artificial Sequence
  Description of Artificial Sequence: Synthetic oligonucleotide
auaaugcaucuuuggagac

SEQ ID NO: 3244010 - RNA, 19 nt, Artificial Sequence
  Description of Artificial Sequence: Synthetic oligonucleotide
aauuuccuacuucuuguga

SEQ ID NO: 3244011 - RNA, 19 nt, Artificial Sequence
  Description of Artificial Sequence: Synthetic oligonucleotide
gucauuuuaaaacccagga

SEQ ID NO: 3244012 - RNA, 19 nt, Artificial Sequence
  Description of Artificial Sequence: Synthetic oligonucleotide
uaugguuauaaagaguuau

SEQ ID NO: 3244013 - RNA, 19 nt, Artificial Sequence
  Description of Artificial Sequence: Synthetic oligonucleotide
uauuuucuauacaccaacu

SEQ ID NO: 3244014 - RNA, 19 nt, Artificial Sequence
  Description of Artificial Sequence: Synthetic oligonucleotide
uccacugagaaggaagagg

SEQ ID NO: 3244015 - RNA, 19 nt, Artificial Sequence
  Description of Artificial Sequence: Synthetic oligonucleotide
aacccaggaacuuccuggg

SEQ ID NO: 3244016 - RNA, 19 nt, Artificial Sequence
  Description of Artificial Sequence: Synthetic oligonucleotide
aaaacaccuuauaaggucu

SEQ ID NO: 3244017 - RNA, 19 nt, Artificial Sequence
  Description of Artificial Sequence: Synthetic oligonucleotide
uauuauuuaauaaauguga

SEQ ID NO: 3244018 - RNA, 19 nt, Artificial Sequence
  Description of Artificial Sequence: Synthetic oligonucleotide
uuuaucauaacucuuagaa

SEQ ID NO: 3244019 - RNA, 19 nt, Artificial Sequence
  Description of Artificial Sequence: Synthetic oligonucleotide
aaugaaaagauaaaacaac

SEQ ID NO: 3244020 - RNA, 19 nt, Artificial Sequence
  Description of Artificial Sequence: Synthetic oligonucleotide
uuuuguaaaccauagacug

SEQ ID NO: 3244021 - RNA, 19 nt, Artificial Sequence
  Description of Artificial Sequence: Synthetic oligonucleotide
acaauuuaggaguaaaagg

SEQ ID NO: 3244022 - RNA, 19 nt, Artificial Sequence
  Description of Artificial Sequence: Synthetic oligonucleotide
ugauccuuuaguaagacug

SEQ ID NO: 3244023 - RNA, 19 nt, Artificial Sequence
  Description of Artificial Sequence: Synthetic oligonucleotide
aacaugaacagacaauguc

SEQ ID NO: 3244024 - RNA, 19 nt, Artificial Sequence
  Description of Artificial Sequence: Synthetic oligonucleotide
aaugagauggcaaaggguc

SEQ ID NO: 3244025 - RNA, 19 nt, Artificial Sequence
  Description of Artificial Sequence: Synthetic oligonucleotide
uaucauaacucuuagaauc

SEQ ID NO: 3244026 - RNA, 19 nt, Artificial Sequence
  Description of Artificial Sequence: Synthetic oligonucleotide
aaacgcagaaaacaugaac

SEQ ID NO: 3244027 - RNA, 19 nt, Artificial Sequence
  Description of Artificial Sequence: Synthetic oligonucleotide
aaagaugggcauuuguuuc

SEQ ID NO: 3244028 - RNA, 19 nt, Artificial Sequence
  Description of Artificial Sequence: Synthetic oligonucleotide
auacucuacauacuguucc

SEQ ID NO: 3244029 - RNA, 19 nt, Artificial Sequence
  Description of Artificial Sequence: Synthetic oligonucleotide
acuucugugguauuuacac

SEQ ID NO: 3244030 - RNA, 19 nt, Artificial Sequence
  Description of Artificial Sequence: Synthetic oligonucleotide
cuuaguaagaggaggaagg

SEQ ID NO: 3244031 - RNA, 19 nt, Artificial Sequence
  Description of Artificial Sequence: Synthetic oligonucleotide
aacaauuuaggaguaaaag

SEQ ID NO: 3244032 - RNA, 19 nt, Artificial Sequence
  Description of Artificial Sequence: Synthetic oligonucleotide
acuaucagcaacuuuugac

SEQ ID NO: 3244033 - RNA, 19 nt, Artificial Sequence
  Description of Artificial Sequence: Synthetic oligonucleotide
auucuugccauauuccugc

SEQ ID NO: 3244034 - RNA, 19 nt, Artificial Sequence
  Description of Artificial Sequence: Synthetic oligonucleotide
cauacacaaauuuacagag

SEQ ID NO: 3244035 - RNA, 19 nt, Artificial Sequence
  Description of Artificial Sequence: Synthetic oligonucleotide
uugacuaucaagaaucuuc

SEQ ID NO: 3244036 - RNA, 19 nt, Artificial Sequence
  Description of Artificial Sequence: Synthetic oligonucleotide
cuagaucuuauaaagcggg

SEQ ID NO: 3244037 - RNA, 19 nt, Artificial Sequence
  Description of Artificial Sequence: Synthetic oligonucleotide
acaaggaugaaaugacacc

SEQ ID NO: 3244038 - RNA, 19 nt, Artificial Sequence
  Description of Artificial Sequence: Synthetic oligonucleotide
auguguaucguccugguuc

SEQ ID NO: 3244039 - RNA, 19 nt, Artificial Sequence
  Description of Artificial Sequence: Synthetic oligonucleotide
agagaacagacaaagaugg

SEQ ID NO: 3244040 - RNA, 19 nt, Artificial Sequence
  Description of Artificial Sequence: Synthetic oligonucleotide
aaaggaaaagacacagacc

SEQ ID NO: 3244041 - RNA, 19 nt, Artificial Sequence
  Description of Artificial Sequence: Synthetic oligonucleotide
uaaaugugaagccaugugu

SEQ ID NO: 3244042 - RNA, 19 nt, Artificial Sequence
  Description of Artificial Sequence: Synthetic oligonucleotide
aauaaaguuuuacuucacu

SEQ ID NO: 3244043 - RNA, 19 nt, Artificial Sequence
  Description of Artificial Sequence: Synthetic oligonucleotide
ucagacuguggauacaagg

SEQ ID NO: 3244044 - RNA, 19 nt, Artificial Sequence
  Description of Artificial Sequence: Synthetic oligonucleotide
ugaauuuucagugaacugu

SEQ ID NO: 3244045 - RNA, 19 nt, Artificial Sequence
  Description of Artificial Sequence: Synthetic oligonucleotide
uagacuaucagcaacuuuu

SEQ ID NO: 3244046 - RNA, 19 nt, Artificial Sequence
  Description of Artificial Sequence: Synthetic oligonucleotide
uacuuauugauauauacuu

SEQ ID NO: 3244047 - RNA, 19 nt, Artificial Sequence
  Description of Artificial Sequence: Synthetic oligonucleotide
uuccguauagcuuaguaga

SEQ ID NO: 3244048 - RNA, 19 nt, Artificial Sequence
  Description of Artificial Sequence: Synthetic oligonucleotide
aaauuuacagaggucaacu

SEQ ID NO: 3244049 - RNA, 19 nt, Artificial Sequence
  Description of Artificial Sequence: Synthetic oligonucleotide
aacuuugauaacaauuuag

SEQ ID NO: 3244050 - RNA, 19 nt, Artificial Sequence
  Description of Artificial Sequence: Synthetic oligonucleotide
aggaugaaaugacaccucc

SEQ ID NO: 3244051 - RNA, 19 nt, Artificial Sequence
  Description of Artificial Sequence: Synthetic oligonucleotide
aacuguguauaucuagcag

SEQ ID NO: 3244052 - RNA, 19 nt, Artificial Sequence
  Description of Artificial Sequence: Synthetic oligonucleotide
ugacuaucaagaaucuucc

SEQ ID NO: 3244053 - RNA, 19 nt, Artificial Sequence
  Description of Artificial Sequence: Synthetic oligonucleotide
caugucacaaaggugaucc

SEQ ID NO: 3244054 - RNA, 19 nt, Artificial Sequence
  Description of Artificial Sequence: Synthetic oligonucleotide
guaaaugugcuccugagca

SEQ ID NO: 3244055 - RNA, 19 nt, Artificial Sequence
  Description of Artificial Sequence: Synthetic oligonucleotide
uacaaggaugaaaugacac

SEQ ID NO: 3244056 - RNA, 19 nt, Artificial Sequence
  Description of Artificial Sequence: Synthetic oligonucleotide
uuugccaguauuuuaucug

SEQ ID NO: 3244057 - RNA, 19 nt, Artificial Sequence
  Description of Artificial Sequence: Synthetic oligonucleotide
uuaguagacuaucagcaac

SEQ ID NO: 3244058 - RNA, 19 nt, Artificial Sequence
  Description of Artificial Sequence: Synthetic oligonucleotide
uagaauccaaguuaauggc

SEQ ID NO: 3244059 - RNA, 19 nt, Artificial Sequence
  Description of Artificial Sequence: Synthetic oligonucleotide
ugaaaugacaccucccgug

SEQ ID NO: 3244060 - RNA, 19 nt, Artificial Sequence
  Description of Artificial Sequence: Synthetic oligonucleotide
augggcauuuguuucagac

SEQ ID NO: 3244061 - RNA, 19 nt, Artificial Sequence
  Description of Artificial Sequence: Synthetic oligonucleotide
acauacacaaauuuacaga

SEQ ID NO: 3244062 - RNA, 19 nt, Artificial Sequence
  Description of Artificial Sequence: Synthetic oligonucleotide
uuuucuucguaucauccga

SEQ ID NO: 3244063 - RNA, 19 nt, Artificial Sequence
  Description of Artificial Sequence: Synthetic oligonucleotide
aguaaaagguguuuucuca

SEQ ID NO: 3244064 - RNA, 19 nt, Artificial Sequence
  Description of Artificial Sequence: Synthetic oligonucleotide
aacaaggcuuguuaaccuc

SEQ ID NO: 3244065 - RNA, 19 nt, Artificial Sequence
  Description of Artificial Sequence: Synthetic oligonucleotide
uuuuaaucgaugucugucu

SEQ ID NO: 3244066 - RNA, 19 nt, Artificial Sequence
  Description of Artificial Sequence: Synthetic oligonucleotide
uggucuaacauccucggcu

SEQ ID NO: 3244067 - RNA, 19 nt, Artificial Sequence
  Description of Artificial Sequence: Synthetic oligonucleotide
ucggaugucauuuuguaaa

SEQ ID NO: 3244068 - RNA, 19 nt, Artificial Sequence
  Description of Artificial Sequence: Synthetic oligonucleotide
gauacaaggaugaaaugac

SEQ ID NO: 3244069 - RNA, 19 nt, Artificial Sequence
  Description of Artificial Sequence: Synthetic oligonucleotide
ucaugcaacaaucuugguc

SEQ ID NO: 3244070 - RNA, 19 nt, Artificial Sequence
  Description of Artificial Sequence: Synthetic oligonucleotide
acuguguauaucuagcaga

SEQ ID NO: 3244071 - RNA, 19 nt, Artificial Sequence
  Description of Artificial Sequence: Synthetic oligonucleotide
aacucuuagaauccaaguu

SEQ ID NO: 3244072 - RNA, 19 nt, Artificial Sequence
  Description of Artificial Sequence: Synthetic oligonucleotide
ugaacaaggcuuguuaacc

SEQ ID NO: 3244073 - RNA, 19 nt, Artificial Sequence
  Description of Artificial Sequence: Synthetic oligonucleotide
agagauuuccccuuucucu

SEQ ID NO: 3244074 - RNA, 19 nt, Artificial Sequence
  Description of Artificial Sequence: Synthetic oligonucleotide
uucucauuuaaauauggua

SEQ ID NO: 3244075 - RNA, 19 nt, Artificial Sequence
  Description of Artificial Sequence: Synthetic oligonucleotide
uaagacugaacaaggcuug

SEQ ID NO: 3244076 - RNA, 19 nt, Artificial Sequence
  Description of Artificial Sequence: Synthetic oligonucleotide
ugccuuaaugugcacacag

SEQ ID NO: 3244077 - RNA, 19 nt, Artificial Sequence
  Description of Artificial Sequence: Synthetic oligonucleotide
cuugccauauuccugcacc

SEQ ID NO: 3244078 - RNA, 19 nt, Artificial Sequence
  Description of Artificial Sequence: Synthetic oligonucleotide
uucagguggcacaagaaac

SEQ ID NO: 3244079 - RNA, 19 nt, Artificial Sequence
  Description of Artificial Sequence: Synthetic oligonucleotide
ucauccgacagccaggggu

SEQ ID NO: 3244080 - RNA, 19 nt, Artificial Sequence
  Description of Artificial Sequence: Synthetic oligonucleotide
guauuuuaucuguuggugc

SEQ ID NO: 3244081 - RNA, 19 nt, Artificial Sequence
  Description of Artificial Sequence: Synthetic oligonucleotide
aucgaugucugucuaacug

SEQ ID NO: 3244082 - RNA, 19 nt, Artificial Sequence
  Description of Artificial Sequence: Synthetic oligonucleotide
auaaaguuuuacuucacuu

SEQ ID NO: 3244083 - RNA, 19 nt, Artificial Sequence
  Description of Artificial Sequence: Synthetic oligonucleotide
uuuguaaaccauagacuga

SEQ ID NO: 3244084 - RNA, 19 nt, Artificial Sequence
  Description of Artificial Sequence: Synthetic oligonucleotide
cuuuucuucguaucauccg

SEQ ID NO: 3244085 - RNA, 19 nt, Artificial Sequence
  Description of Artificial Sequence: Synthetic oligonucleotide
ugugaagccauguguauac

SEQ ID NO: 3244086 - RNA, 19 nt, Artificial Sequence
  Description of Artificial Sequence: Synthetic oligonucleotide
uuaguaagaggaggaaggg

SEQ ID NO: 3244087 - RNA, 19 nt, Artificial Sequence
  Description of Artificial Sequence: Synthetic oligonucleotide
uaauaaaugugaagccaug

SEQ ID NO: 3244088 - RNA, 19 nt, Artificial Sequence
  Description of Artificial Sequence: Synthetic oligonucleotide
uuaaccucuuggaugugag

SEQ ID NO: 3244089 - RNA, 19 nt, Artificial Sequence
  Description of Artificial Sequence: Synthetic oligonucleotide
auaaacgcagaaaacauga

SEQ ID NO: 3244090 - RNA, 19 nt, Artificial Sequence
  Description of Artificial Sequence: Synthetic oligonucleotide
aaacgggucauacucuaca

SEQ ID NO: 3244091 - RNA, 19 nt, Artificial Sequence
  Description of Artificial Sequence: Synthetic oligonucleotide
uuuucagugaacuguguau

SEQ ID NO: 3244092 - RNA, 19 nt, Artificial Sequence
  Description of Artificial Sequence: Synthetic oligonucleotide
uucugugguauuuacacau

SEQ ID NO: 3244093 - RNA, 19 nt, Artificial Sequence
  Description of Artificial Sequence: Synthetic oligonucleotide
agugagucgcucuucauca

SEQ ID NO: 3244094 - RNA, 19 nt, Artificial Sequence
  Description of Artificial Sequence: Synthetic oligonucleotide
cagagaacagacaaagaug

SEQ ID NO: 3244095 - RNA, 19 nt, Artificial Sequence
  Description of Artificial Sequence: Synthetic oligonucleotide
caauuuaggaguaaaaggu

SEQ ID NO: 3244096 - RNA, 19 nt, Artificial Sequence
  Description of Artificial Sequence: Synthetic oligonucleotide
uuguaaaccauagacugac

SEQ ID NO: 3244097 - RNA, 19 nt, Artificial Sequence
  Description of Artificial Sequence: Synthetic oligonucleotide
gaggguacuucucggauag

SEQ ID NO: 3244098 - RNA, 19 nt, Artificial Sequence
  Description of Artificial Sequence: Synthetic oligonucleotide
uaguagacuaucagcaacu

SEQ ID NO: 3244099 - RNA, 19 nt, Artificial Sequence
  Description of Artificial Sequence: Synthetic oligonucleotide
uuuacaauucuuccaguuu

SEQ ID NO: 3244100 - RNA, 19 nt, Artificial Sequence
  Description of Artificial Sequence: Synthetic oligonucleotide
guuccguauagcuuaguag

SEQ ID NO: 3244101 - RNA, 19 nt, Artificial Sequence
  Description of Artificial Sequence: Synthetic oligonucleotide
uacucuacauacuguuccg

SEQ ID NO: 3244102 - RNA, 19 nt, Artificial Sequence
  Description of Artificial Sequence: Synthetic oligonucleotide
uagcuuaguagacuaucag

SEQ ID NO: 3244103 - RNA, 19 nt, Artificial Sequence
  Description of Artificial Sequence: Synthetic oligonucleotide
augaaaagauaaaacaaca

SEQ ID NO: 3244104 - RNA, 19 nt, Artificial Sequence
  Description of Artificial Sequence: Synthetic oligonucleotide
uguguaucguccugguucc

SEQ ID NO: 3244105 - RNA, 19 nt, Artificial Sequence
  Description of Artificial Sequence: Synthetic oligonucleotide
caucuucaaauguguaucg

SEQ ID NO: 3244106 - RNA, 19 nt, Artificial Sequence
  Description of Artificial Sequence: Synthetic oligonucleotide
ugcaucuuuuaaugaaaag

SEQ ID NO: 3244107 - RNA, 19 nt, Artificial Sequence
  Description of Artificial Sequence: Synthetic oligonucleotide
acuagaucuuauaaagcgg

SEQ ID NO: 3244108 - RNA, 19 nt, Artificial Sequence
  Description of Artificial Sequence: Synthetic oligonucleotide
uuaucauaacucuuagaau

SEQ ID NO: 3244109 - RNA, 19 nt, Artificial Sequence
  Description of Artificial Sequence: Synthetic oligonucleotide
uacauacuguuccguauag

SEQ ID NO: 3244110 - RNA, 19 nt, Artificial Sequence
  Description of Artificial Sequence: Synthetic oligonucleotide
acuaucaagaaucuuccuu

SEQ ID NO: 3244111 - RNA, 19 nt, Artificial Sequence
  Description of Artificial Sequence: Synthetic oligonucleotide
gaauuuucagugaacugug

SEQ ID NO: 3244112 - RNA, 19 nt, Artificial Sequence
  Description of Artificial Sequence: Synthetic oligonucleotide
uaacucuuagaauccaagu

SEQ ID NO: 3244113 - RNA, 19 nt, Artificial Sequence
  Description of Artificial Sequence: Synthetic oligonucleotide
uuuuaucauaacucuuaga

SEQ ID NO: 3244114 - RNA, 19 nt, Artificial Sequence
  Description of Artificial Sequence: Synthetic oligonucleotide
aagaugggcauuuguuuca

SEQ ID NO: 3244115 - RNA, 19 nt, Artificial Sequence
  Description of Artificial Sequence: Synthetic oligonucleotide
caugcaacaaucuuggucu

SEQ ID NO: 3244116 - RNA, 19 nt, Artificial Sequence
  Description of Artificial Sequence: Synthetic oligonucleotide
acagacccagcuuaguaag

SEQ ID NO: 3244117 - RNA, 19 nt, Artificial Sequence
  Description of Artificial Sequence: Synthetic oligonucleotide
aauguuugcauacauaccc

SEQ ID NO: 3244118 - RNA, 19 nt, Artificial Sequence
  Description of Artificial Sequence: Synthetic oligonucleotide
aaaauguuugcauacauac

SEQ ID NO: 3244119 - RNA, 19 nt, Artificial Sequence
  Description of Artificial Sequence: Synthetic oligonucleotide
uguaguaagauuuuaaacg

SEQ ID NO: 3244120 - RNA, 19 nt, Artificial Sequence
  Description of Artificial Sequence: Synthetic oligonucleotide
aguauuuguacuuaguucc

SEQ ID NO: 3244121 - RNA, 19 nt, Artificial Sequence
  Description of Artificial Sequence: Synthetic oligonucleotide
uuuuaaacguuuaaggugc

SEQ ID NO: 3244122 - RNA, 19 nt, Artificial Sequence
  Description of Artificial Sequence: Synthetic oligonucleotide
ucuagcaauauucuuagag

SEQ ID NO: 3244123 - RNA, 19 nt, Artificial Sequence
  Description of Artificial Sequence: Synthetic oligonucleotide
aauuaccuuucucaggacc

SEQ ID NO: 3244124 - RNA, 19 nt, Artificial Sequence
  Description of Artificial Sequence: Synthetic oligonucleotide
uucacauccauccugaagc

SEQ ID NO: 3244125 - RNA, 19 nt, Artificial Sequence
  Description of Artificial Sequence: Synthetic oligonucleotide
aucaagaccacugugaggc

SEQ ID NO: 3244126 - RNA, 19 nt, Artificial Sequence
  Description of Artificial Sequence: Synthetic oligonucleotide
acaaauacugcucauauca

SEQ ID NO: 3244127 - RNA, 19 nt, Artificial Sequence
  Description of Artificial Sequence: Synthetic oligonucleotide
uauucuuagagucaucaag

SEQ ID NO: 3244128 - RNA, 19 nt, Artificial Sequence
  Description of Artificial Sequence: Synthetic oligonucleotide
auuauugucaauuugguuu

SEQ ID NO: 3244129 - RNA, 19 nt, Artificial Sequence
  Description of Artificial Sequence: Synthetic oligonucleotide
acaacaauuacuuuaacaa

SEQ ID NO: 3244130 - RNA, 19 nt, Artificial Sequence
  Description of Artificial Sequence: Synthetic oligonucleotide
ucaauuaccuuucucagga

SEQ ID NO: 3244131 - RNA, 19 nt, Artificial Sequence
  Description of Artificial Sequence: Synthetic oligonucleotide
aauuccuuugacuuucauc

SEQ ID NO: 3244132 - RNA, 19 nt, Artificial Sequence
  Description of Artificial Sequence: Synthetic oligonucleotide
cuuagagucaucaagacca

SEQ ID NO: 3244133 - RNA, 19 nt, Artificial Sequence
  Description of Artificial Sequence: Synthetic oligonucleotide
ugacaaagaacucagugug

SEQ ID NO: 3244134 - RNA, 19 nt, Artificial Sequence
  Description of Artificial Sequence: Synthetic oligonucleotide
uguaacuguaguaagauuu

SEQ ID NO: 3244135 - RNA, 19 nt, Artificial Sequence
  Description of Artificial Sequence: Synthetic oligonucleotide
ugauucgaaguucacaucc

SEQ ID NO: 3244136 - RNA, 19 nt, Artificial Sequence
  Description of Artificial Sequence: Synthetic oligonucleotide
aaaagcagcuauuuccuag

SEQ ID NO: 3244137 - RNA, 19 nt, Artificial Sequence
  Description of Artificial Sequence: Synthetic oligonucleotide
aagauuuuaaacguuuaag

SEQ ID NO: 3244138 - RNA, 19 nt, Artificial Sequence
  Description of Artificial Sequence: Synthetic oligonucleotide
gaagaugacacacucauca

SEQ ID NO: 3244139 - RNA, 19 nt, Artificial Sequence
  Description of Artificial Sequence: Synthetic oligonucleotide
aaugauacaacaauuacuu

SEQ ID NO: 3244140 - RNA, 19 nt, Artificial Sequence
  Description of Artificial Sequence: Synthetic oligonucleotide
uacuuuaacaaauacugcu

SEQ ID NO: 3244141 - RNA, 19 nt, Artificial Sequence
  Description of Artificial Sequence: Synthetic oligonucleotide
aaccuuauaaaaguuuccg

SEQ ID NO: 3244142 - RNA, 19 nt, Artificial Sequence
  Description of Artificial Sequence: Synthetic oligonucleotide
uuacucauaucccaggagc

SEQ ID NO: 3244143 - RNA, 19 nt, Artificial Sequence
  Description of Artificial Sequence: Synthetic oligonucleotide
gacuuucgaauauugaucc

SEQ ID NO: 3244144 - RNA, 19 nt, Artificial Sequence
  Description of Artificial Sequence: Synthetic oligonucleotide
ucgaaguucacauccaucc

SEQ ID NO: 3244145 - RNA, 19 nt, Artificial Sequence
  Description of Artificial Sequence: Synthetic oligonucleotide
uguacuuaguuccuaauuc

SEQ ID NO: 3244146 - RNA, 19 nt, Artificial Sequence
  Description of Artificial Sequence: Synthetic oligonucleotide
uuugguuuggcuucuagga

SEQ ID NO: 3244147 - RNA, 19 nt, Artificial Sequence
  Description of Artificial Sequence: Synthetic oligonucleotide
aauuacuuuaacaaauacu

SEQ ID NO: 3244148 - RNA, 19 nt, Artificial Sequence
  Description of Artificial Sequence: Synthetic oligonucleotide
uauucuagcaauauucuua

SEQ ID NO: 3244149 - RNA, 19 nt, Artificial Sequence
  Description of Artificial Sequence: Synthetic oligonucleotide
aagaacuuacucauauccc

SEQ ID NO: 3244150 - RNA, 19 nt, Artificial Sequence
  Description of Artificial Sequence: Synthetic oligonucleotide
uacaacaauuacuuuaaca

SEQ ID NO: 3244151 - RNA, 19 nt, Artificial Sequence
  Description of Artificial Sequence: Synthetic oligonucleotide
cuuucauccacucaauuac

SEQ ID NO: 3244152 - RNA, 19 nt, Artificial Sequence
  Description of Artificial Sequence: Synthetic oligonucleotide
uuauaaaaguuuccguaug

SEQ ID NO: 3244153 - RNA, 19 nt, Artificial Sequence
  Description of Artificial Sequence: Synthetic oligonucleotide
ucugcuacuucuuuguagc

SEQ ID NO: 3244154 - RNA, 19 nt, Artificial Sequence
  Description of Artificial Sequence: Synthetic oligonucleotide
aaauguuugcauacauacc

SEQ ID NO: 3244155 - RNA, 19 nt, Artificial Sequence
  Description of Artificial Sequence: Synthetic oligonucleotide
acuaguucaggucaguuca

SEQ ID NO: 3244156 - RNA, 19 nt, Artificial Sequence
  Description of Artificial Sequence: Synthetic oligonucleotide
uuauugucaauuugguuug

SEQ ID NO: 3244157 - RNA, 19 nt, Artificial Sequence
  Description of Artificial Sequence: Synthetic oligonucleotide
auucuagcaauauucuuag

SEQ ID NO: 3244158 - RNA, 19 nt, Artificial Sequence
  Description of Artificial Sequence: Synthetic oligonucleotide
agcauuauugucaauuugg

SEQ ID NO: 3244159 - RNA, 19 nt, Artificial Sequence
  Description of Artificial Sequence: Synthetic oligonucleotide
uguucaagaacuuacucau

SEQ ID NO: 3244160 - RNA, 19 nt, Artificial Sequence
  Description of Artificial Sequence: Synthetic oligonucleotide
uuaauaugcaguauuugua

SEQ ID NO: 3244161 - RNA, 19 nt, Artificial Sequence
  Description of Artificial Sequence: Synthetic oligonucleotide
ucuuuguagcaaucgaucc

SEQ ID NO: 3244162 - RNA, 19 nt, Artificial Sequence
  Description of Artificial Sequence: Synthetic oligonucleotide
auaucaaaagugcugguga

SEQ ID NO: 3244163 - RNA, 19 nt, Artificial Sequence
  Description of Artificial Sequence: Synthetic oligonucleotide
cauuuguggagcuggagcg

SEQ ID NO: 3244164 - RNA, 19 nt, Artificial Sequence
  Description of Artificial Sequence: Synthetic oligonucleotide
ucaucaagaccacugugag

SEQ ID NO: 3244165 - RNA, 19 nt, Artificial Sequence
  Description of Artificial Sequence: Synthetic oligonucleotide
uuuucauugauucgaaguu

SEQ ID NO: 3244166 - RNA, 19 nt, Artificial Sequence
  Description of Artificial Sequence: Synthetic oligonucleotide
aacuuacucauaucccagg

SEQ ID NO: 3244167 - RNA, 19 nt, Artificial Sequence
  Description of Artificial Sequence: Synthetic oligonucleotide
aaaaguuuccguaugacuu

SEQ ID NO: 3244168 - RNA, 19 nt, Artificial Sequence
  Description of Artificial Sequence: Synthetic oligonucleotide
uucaagaacuuacucauau

SEQ ID NO: 3244169 - RNA, 19 nt, Artificial Sequence
  Description of Artificial Sequence: Synthetic oligonucleotide
agaugacacacucaucaac

SEQ ID NO: 3244170 - RNA, 19 nt, Artificial Sequence
  Description of Artificial Sequence: Synthetic oligonucleotide
ucuguuaauaugcaguauu

SEQ ID NO: 3244171 - RNA, 19 nt, Artificial Sequence
  Description of Artificial Sequence: Synthetic oligonucleotide
cucauaucaaaagugcugg

SEQ ID NO: 3244172 - RNA, 19 nt, Artificial Sequence
  Description of Artificial Sequence: Synthetic oligonucleotide
uuuguagcaaucgauccag

SEQ ID NO: 3244173 - RNA, 19 nt, Artificial Sequence
  Description of Artificial Sequence: Synthetic oligonucleotide
agaacuuacucauauccca

SEQ ID NO: 3244174 - RNA, 19 nt, Artificial Sequence
  Description of Artificial Sequence: Synthetic oligonucleotide
uauuugagccugcugagcu

SEQ ID NO: 3244175 - RNA, 19 nt, Artificial Sequence
  Description of Artificial Sequence: Synthetic oligonucleotide
uaaaaguuuccguaugacu

SEQ ID NO: 3244176 - RNA, 19 nt, Artificial Sequence
  Description of Artificial Sequence: Synthetic oligonucleotide
ugacuuucgaauauugauc

SEQ ID NO: 3244177 - RNA, 19 nt, Artificial Sequence
  Description of Artificial Sequence: Synthetic oligonucleotide
uaagauuuuaaacguuuaa

SEQ ID NO: 3244178 - RNA, 19 nt, Artificial Sequence
  Description of Artificial Sequence: Synthetic oligonucleotide
ucaacuguccuccauguau

SEQ ID NO: 3244179 - RNA, 19 nt, Artificial Sequence
  Description of Artificial Sequence: Synthetic oligonucleotide
cuguaguaagauuuuaaac

SEQ ID NO: 3244180 - RNA, 19 nt, Artificial Sequence
  Description of Artificial Sequence: Synthetic oligonucleotide
auguucaagaacuuacuca

SEQ ID NO: 3244181 - RNA, 19 nt, Artificial Sequence
  Description of Artificial Sequence: Synthetic oligonucleotide
uaaacguuuaaggugcuug

SEQ ID NO: 3244182 - RNA, 19 nt, Artificial Sequence
  Description of Artificial Sequence: Synthetic oligonucleotide
uagcaauauucuuagaguc

SEQ ID NO: 3244183 - RNA, 19 nt, Artificial Sequence
  Description of Artificial Sequence: Synthetic oligonucleotide
uuaaggugcuugaugguug

SEQ ID NO: 3244184 - RNA, 19 nt, Artificial Sequence
  Description of Artificial Sequence: Synthetic oligonucleotide
aauuugguuuggcuucuag

SEQ ID NO: 3244185 - RNA, 19 nt, Artificial Sequence
  Description of Artificial Sequence: Synthetic oligonucleotide
aaagaacucaguguguccu

SEQ ID NO: 3244186 - RNA, 19 nt, Artificial Sequence
  Description of Artificial Sequence: Synthetic oligonucleotide
ugaugguugacuaguucag

SEQ ID NO: 3244187 - RNA, 19 nt, Artificial Sequence
  Description of Artificial Sequence: Synthetic oligonucleotide
augacuuucgaauauugau

SEQ ID NO: 3244188 - RNA, 19 nt, Artificial Sequence
  Description of Artificial Sequence: Synthetic oligonucleotide
aaagcagcuauuuccuagu

SEQ ID NO: 3244189 - RNA, 19 nt, Artificial Sequence
  Description of Artificial Sequence: Synthetic oligonucleotide
uuccguaugacuuucgaau

SEQ ID NO: 3244190 - RNA, 19 nt, Artificial Sequence
  Description of Artificial Sequence: Synthetic oligonucleotide
gaaguucacauccauccug

SEQ ID NO: 3244191 - RNA, 19 nt, Artificial Sequence
  Description of Artificial Sequence: Synthetic oligonucleotide
aguuccuaauuccuuugac

SEQ ID NO: 3244192 - RNA, 19 nt, Artificial Sequence
  Description of Artificial Sequence: Synthetic oligonucleotide
uaugacuuucgaauauuga

SEQ ID NO: 3244193 - RNA, 19 nt, Artificial Sequence
  Description of Artificial Sequence: Synthetic oligonucleotide
ucaucaacuguccuccaug

SEQ ID NO: 3244194 - RNA, 19 nt, Artificial Sequence
  Description of Artificial Sequence: Synthetic oligonucleotide
uucuuuguagcaaucgauc

SEQ ID NO: 3244195 - RNA, 19 nt, Artificial Sequence
  Description of Artificial Sequence: Synthetic oligonucleotide
uaucuguaacuguaguaag

SEQ ID NO: 3244196 - RNA, 19 nt, Artificial Sequence
  Description of Artificial Sequence: Synthetic oligonucleotide
uucuaggaaccuuauaaaa

SEQ ID NO: 3244197 - RNA, 19 nt, Artificial Sequence
  Description of Artificial Sequence: Synthetic oligonucleotide
aggaagaugacacacucau

SEQ ID NO: 3244198 - RNA, 19 nt, Artificial Sequence
  Description of Artificial Sequence: Synthetic oligonucleotide
acaaagaacucaguguguc

SEQ ID NO: 3244199 - RNA, 19 nt, Artificial Sequence
  Description of Artificial Sequence: Synthetic oligonucleotide
uaucccaggagccaucugu

SEQ ID NO: 3244200 - RNA, 19 nt, Artificial Sequence
  Description of Artificial Sequence: Synthetic oligonucleotide
uacucauaucccaggagcc

SEQ ID NO: 3244201 - RNA, 19 nt, Artificial Sequence
  Description of Artificial Sequence: Synthetic oligonucleotide
acuguaguaagauuuuaaa

SEQ ID NO: 3244202 - RNA, 19 nt, Artificial Sequence
  Description of Artificial Sequence: Synthetic oligonucleotide
uccauccugaagcauacga

SEQ ID NO: 3244203 - RNA, 19 nt, Artificial Sequence
  Description of Artificial Sequence: Synthetic oligonucleotide
aggucaguucaucugcuac

SEQ ID NO: 3244204 - RNA, 19 nt, Artificial Sequence
  Description of Artificial Sequence: Synthetic oligonucleotide
uuccuaauuccuuugacuu

SEQ ID NO: 3244205 - RNA, 19 nt, Artificial Sequence
  Description of Artificial Sequence: Synthetic oligonucleotide
uacugcucauaucaaaagu

SEQ ID NO: 3244206 - RNA, 19 nt, Artificial Sequence
  Description of Artificial Sequence: Synthetic oligonucleotide
gauguucaagaacuuacuc

SEQ ID NO: 3244207 - RNA, 19 nt, Artificial Sequence
  Description of Artificial Sequence: Synthetic oligonucleotide
uacuucuuuguagcaaucg

SEQ ID NO: 3244208 - RNA, 19 nt, Artificial Sequence
  Description of Artificial Sequence: Synthetic oligonucleotide
uguuaauaugcaguauuug

SEQ ID NO: 3244209 - RNA, 19 nt, Artificial Sequence
  Description of Artificial Sequence: Synthetic oligonucleotide
auacugcucauaucaaaag

SEQ ID NO: 3244210 - RNA, 19 nt, Artificial Sequence
  Description of Artificial Sequence: Synthetic oligonucleotide
gauacaacaauuacuuuaa

SEQ ID NO: 3244211 - RNA, 19 nt, Artificial Sequence
  Description of Artificial Sequence: Synthetic oligonucleotide
uuucgaauauugauccacu

SEQ ID NO: 3244212 - RNA, 19 nt, Artificial Sequence
  Description of Artificial Sequence: Synthetic oligonucleotide
guuaauaugcaguauuugu

SEQ ID NO: 3244213 - RNA, 19 nt, Artificial Sequence
  Description of Artificial Sequence: Synthetic oligonucleotide
acacucaucaacuguccuc

SEQ ID NO: 3244214 - RNA, 19 nt, Artificial Sequence
  Description of Artificial Sequence: Synthetic oligonucleotide
uacuuaguuccuaauuccu

SEQ ID NO: 3244215 - RNA, 19 nt, Artificial Sequence
  Description of Artificial Sequence: Synthetic oligonucleotide
uuaguuccuaauuccuuug

SEQ ID NO: 3244216 - RNA, 19 nt, Artificial Sequence
  Description of Artificial Sequence: Synthetic oligonucleotide
cauccugaagcauacgaac

SEQ ID NO: 3244217 - RNA, 19 nt, Artificial Sequence
  Description of Artificial Sequence: Synthetic oligonucleotide
aaggccuugccacacgcag

SEQ ID NO: 3244218 - RNA, 19 nt, Artificial Sequence
  Description of Artificial Sequence: Synthetic oligonucleotide
agcuguagcccuuucgagg

SEQ ID NO: 3244219 - RNA, 19 nt, Artificial Sequence
  Description of Artificial Sequence: Synthetic oligonucleotide
cuuucgaggacccggcucg

SEQ ID NO: 3244220 - RNA, 19 nt, Artificial Sequence
  Description of Artificial Sequence: Synthetic oligonucleotide
uccuccuccagcugcaccg

SEQ ID NO: 3244221 - RNA, 19 nt, Artificial Sequence
  Description of Artificial Sequence: Synthetic oligonucleotide
agcgcuuaaaggccuugcc

SEQ ID NO: 3244222 - RNA, 19 nt, Artificial Sequence
  Description of Artificial Sequence: Synthetic oligonucleotide
acuccgggcagcuguagcc

SEQ ID NO: 3244223 - RNA, 19 nt, Artificial Sequence
  Description of Artificial Sequence: Synthetic oligonucleotide
uuaaaggccuugccacacg

SEQ ID NO: 3244224 - RNA, 19 nt, Artificial Sequence
  Description of Artificial Sequence: Synthetic oligonucleotide
agguuccuccuccagcugc

SEQ ID NO: 3244225 - RNA, 19 nt, Artificial Sequence
  Description of Artificial Sequence: Synthetic oligonucleotide
uggagcucagugcaggcgc

SEQ ID NO: 3244226 - RNA, 19 nt, Artificial Sequence
  Description of Artificial Sequence: Synthetic oligonucleotide
uaaaggccuugccacacgc

SEQ ID NO: 3244227 - RNA, 19 nt, Artificial Sequence
  Description of Artificial Sequence: Synthetic oligonucleotide
acguaaagggcuugagguc

SEQ ID NO: 3244228 - RNA, 19 nt, Artificial Sequence
  Description of Artificial Sequence: Synthetic oligonucleotide
cacgugcugagccagcucg

SEQ ID NO: 3244229 - RNA, 19 nt, Artificial Sequence
  Description of Artificial Sequence: Synthetic oligonucleotide
uggcuggagcgcuuaaagg

SEQ ID NO: 3244230 - RNA, 19 nt, Artificial Sequence
  Description of Artificial Sequence: Synthetic oligonucleotide
aagcgccgagggcagagcg

SEQ ID NO: 3244231 - RNA, 19 nt, Artificial Sequence
  Description of Artificial Sequence: Synthetic oligonucleotide
uguggggugggccggcgcg

SEQ ID NO: 3244232 - RNA, 19 nt, Artificial Sequence
  Description of Artificial Sequence: Synthetic oligonucleotide
aagacccgcgcgcacuccg

SEQ ID NO: 3244233 - RNA, 19 nt, Artificial Sequence
  Description of Artificial Sequence: Synthetic oligonucleotide
agggcuugagguccgagug

SEQ ID NO: 3244234 - RNA, 19 nt, Artificial Sequence
  Description of Artificial Sequence: Synthetic oligonucleotide
ggcuggagcgcuuaaaggc

SEQ ID NO: 3244235 - RNA, 19 nt, Artificial Sequence
  Description of Artificial Sequence: Synthetic oligonucleotide
aagggcuugagguccgagu

SEQ ID NO: 3244236 - RNA, 19 nt, Artificial Sequence
  Description of Artificial Sequence: Synthetic oligonucleotide
acgcagcgcacguaaaggg

SEQ ID NO: 3244237 - RNA, 19 nt, Artificial Sequence
  Description of Artificial Sequence: Synthetic oligonucleotide
ugcugagccagcucggcug

SEQ ID NO: 3244238 - RNA, 19 nt, Artificial Sequence
  Description of Artificial Sequence: Synthetic oligonucleotide
ucggcugcguccuggaagc

SEQ ID NO: 3244239 - RNA, 19 nt, Artificial Sequence
  Description of Artificial Sequence: Synthetic oligonucleotide
uggcucugcagccgcaggg

SEQ ID NO: 3244240 - RNA, 19 nt, Artificial Sequence
  Description of Artificial Sequence: Synthetic oligonucleotide
ucagugcaggcgcacgugc

SEQ ID NO: 3244241 - RNA, 19 nt, Artificial Sequence
  Description of Artificial Sequence: Synthetic oligonucleotide
guggcuggagcgcuuaaag

SEQ ID NO: 3244242 - RNA, 19 nt, Artificial Sequence
  Description of Artificial Sequence: Synthetic oligonucleotide
cuggcaaagacccgcgcgc

SEQ ID NO: 3244243 - RNA, 19 nt, Artificial Sequence
  Description of Artificial Sequence: Synthetic oligonucleotide
cacguaaagggcuugaggu

SEQ ID NO: 3244244 - RNA, 19 nt, Artificial Sequence
  Description of Artificial Sequence: Synthetic oligonucleotide
agguccgagugcgacacgc

SEQ ID NO: 3244245 - RNA, 19 nt, Artificial Sequence
  Description of Artificial Sequence: Synthetic oligonucleotide
ucgaggacccggcucgucc

SEQ ID NO: 3244246 - RNA, 19 nt, Artificial Sequence
  Description of Artificial Sequence: Synthetic oligonucleotide
cacgcgguggcucugcagc

SEQ ID NO: 3244247 - RNA, 19 nt, Artificial Sequence
  Description of Artificial Sequence: Synthetic oligonucleotide
acacgcagcgcacguaaag

SEQ ID NO: 3244248 - RNA, 19 nt, Artificial Sequence
  Description of Artificial Sequence: Synthetic oligonucleotide
agggccccgagguuccucc

SEQ ID NO: 3244249 - RNA, 19 nt, Artificial Sequence
  Description of Artificial Sequence: Synthetic oligonucleotide
cuuaaaggccuugccacac

SEQ ID NO: 3244250 - RNA, 19 nt, Artificial Sequence
  Description of Artificial Sequence: Synthetic oligonucleotide
uguagcccuuucgaggacc

SEQ ID NO: 3244251 - RNA, 19 nt, Artificial Sequence
  Description of Artificial Sequence: Synthetic oligonucleotide
aaagacccgcgcgcacucc

SEQ ID NO: 3244252 - RNA, 19 nt, Artificial Sequence
  Description of Artificial Sequence: Synthetic oligonucleotide
agagcgggcaggugugggg

SEQ ID NO: 3244253 - RNA, 19 nt, Artificial Sequence
  Description of Artificial Sequence: Synthetic oligonucleotide
ugagguccgagugcgacac

SEQ ID NO: 3244254 - RNA, 19 nt, Artificial Sequence
  Description of Artificial Sequence: Synthetic oligonucleotide
cucggcugcguccuggaag

SEQ ID NO: 3244255 - RNA, 19 nt, Artificial Sequence
  Description of Artificial Sequence: Synthetic oligonucleotide
guccuggaagcgccgaggg

SEQ ID NO: 3244256 - RNA, 19 nt, Artificial Sequence
  Description of Artificial Sequence: Synthetic oligonucleotide
cacgcagcgcacguaaagg

SEQ ID NO: 3244257 - RNA, 19 nt, Artificial Sequence
  Description of Artificial Sequence: Synthetic oligonucleotide
gcacguaaagggcuugagg

SEQ ID NO: 3244258 - RNA, 19 nt, Artificial Sequence
  Description of Artificial Sequence: Synthetic oligonucleotide
guccgagugcgacacgcgg

SEQ ID NO: 3244259 - RNA, 19 nt, Artificial Sequence
  Description of Artificial Sequence: Synthetic oligonucleotide
agccagcucggcugcgucc

SEQ ID NO: 3244260 - RNA, 19 nt, Artificial Sequence
  Description of Artificial Sequence: Synthetic oligonucleotide
ggccuugccacacgcagcg

SEQ ID NO: 3244261 - RNA, 19 nt, Artificial Sequence
  Description of Artificial Sequence: Synthetic oligonucleotide
gcuggcaaagacccgcgcg

SEQ ID NO: 3244262 - RNA, 19 nt, Artificial Sequence
  Description of Artificial Sequence: Synthetic oligonucleotide
agcccuuucgaggacccgg

SEQ ID NO: 3244263 - RNA, 19 nt, Artificial Sequence
  Description of Artificial Sequence: Synthetic oligonucleotide
cuugagguccgagugcgac

SEQ ID NO: 3244264 - RNA, 19 nt, Artificial Sequence
  Description of Artificial Sequence: Synthetic oligonucleotide
uccgagugcgacacgcggu

SEQ ID NO: 3244265 - RNA, 19 nt, Artificial Sequence
  Description of Artificial Sequence: Synthetic oligonucleotide
uugagguccgagugcgaca

SEQ ID NO: 3244266 - RNA, 19 nt, Artificial Sequence
  Description of Artificial Sequence: Synthetic oligonucleotide
agugcaggcgcacgugcug

SEQ ID NO: 3244267 - RNA, 19 nt, Artificial Sequence
  Description of Artificial Sequence: Synthetic oligonucleotide
guaaagggcuugagguccg

SEQ ID NO: 3244268 - RNA, 19 nt, Artificial Sequence
  Description of Artificial Sequence: Synthetic oligonucleotide
aaagggcuugagguccgag

SEQ ID NO: 3244269 - RNA, 19 nt, Artificial Sequence
  Description of Artificial Sequence: Synthetic oligonucleotide
gagugcgacacgcgguggc

SEQ ID NO: 3244270 - RNA, 19 nt, Artificial Sequence
  Description of Artificial Sequence: Synthetic oligonucleotide
uggcgcgacagguggcugg

SEQ ID NO: 3244271 - RNA, 19 nt, Artificial Sequence
  Description of Artificial Sequence: Synthetic oligonucleotide
cuugccacacgcagcgcac

SEQ ID NO: 3244272 - RNA, 19 nt, Artificial Sequence
  Description of Artificial Sequence: Synthetic oligonucleotide
caggcgcacgugcugagcc

SEQ ID NO: 3244273 - RNA, 19 nt, Artificial Sequence
  Description of Artificial Sequence: Synthetic oligonucleotide
acgcgguggcucugcagcc

SEQ ID NO: 3244274 - RNA, 19 nt, Artificial Sequence
  Description of Artificial Sequence: Synthetic oligonucleotide
cagcuguagcccuuucgag

SEQ ID NO: 3244275 - RNA, 19 nt, Artificial Sequence
  Description of Artificial Sequence: Synthetic oligonucleotide
gcgacagguggcuggagcg

SEQ ID NO: 3244276 - RNA, 19 nt, Artificial Sequence
  Description of Artificial Sequence: Synthetic oligonucleotide
uuccuccuccagcugcacc

SEQ ID NO: 3244277 - RNA, 19 nt, Artificial Sequence
  Description of Artificial Sequence: Synthetic oligonucleotide
uccuccagcugcaccgugu

SEQ ID NO: 3244278 - RNA, 19 nt, Artificial Sequence
  Description of Artificial Sequence: Synthetic oligonucleotide
aggcggguggagcucagug

SEQ ID NO: 3244279 - RNA, 19 nt, Artificial Sequence
  Description of Artificial Sequence: Synthetic oligonucleotide
ggcuugagguccgagugcg

SEQ ID NO: 3244280 - RNA, 19 nt, Artificial Sequence
  Description of Artificial Sequence: Synthetic oligonucleotide
uccuggaagcgccgagggc

SEQ ID NO: 3244281 - RNA, 19 nt, Artificial Sequence
  Description of Artificial Sequence: Synthetic oligonucleotide
gcuguagcccuuucgagga

SEQ ID NO: 3244282 - RNA, 19 nt, Artificial Sequence
  Description of Artificial Sequence: Synthetic oligonucleotide
ggcagcuguagcccuuucg

SEQ ID NO: 3244283 - RNA, 19 nt, Artificial Sequence
  Description of Artificial Sequence: Synthetic oligonucleotide
gcagguguggggugggccg

SEQ ID NO: 3244284 - RNA, 19 nt, Artificial Sequence
  Description of Artificial Sequence: Synthetic oligonucleotide
guggagcucagugcaggcg

SEQ ID NO: 3244285 - RNA, 19 nt, Artificial Sequence
  Description of Artificial Sequence: Synthetic oligonucleotide
ugcgacacgcgguggcucu

SEQ ID NO: 3244286 - RNA, 19 nt, Artificial Sequence
  Description of Artificial Sequence: Synthetic oligonucleotide
cguaaagggcuugaggucc

SEQ ID NO: 3244287 - RNA, 19 nt, Artificial Sequence
  Description of Artificial Sequence: Synthetic oligonucleotide
gcagcuguagcccuuucga

SEQ ID NO: 3244288 - RNA, 19 nt, Artificial Sequence
  Description of Artificial Sequence: Synthetic oligonucleotide
cuggaagcgccgagggcag

SEQ ID NO: 3244289 - RNA, 19 nt, Artificial Sequence
  Description of Artificial Sequence: Synthetic oligonucleotide
cgcuuaaaggccuugccac

SEQ ID NO: 3244290 - RNA, 19 nt, Artificial Sequence
  Description of Artificial Sequence: Synthetic oligonucleotide
aggccuugccacacgcagc

SEQ ID NO: 3244291 - RNA, 19 nt, Artificial Sequence
  Description of Artificial Sequence: Synthetic oligonucleotide
gaggacccggcucgucccg

SEQ ID NO: 3244292 - RNA, 19 nt, Artificial Sequence
  Description of Artificial Sequence: Synthetic oligonucleotide
uugccacacgcagcgcacg

SEQ ID NO: 3244293 - RNA, 19 nt, Artificial Sequence
  Description of Artificial Sequence: Synthetic oligonucleotide
aaaggccuugccacacgca

SEQ ID NO: 3244294 - RNA, 19 nt, Artificial Sequence
  Description of Artificial Sequence: Synthetic oligonucleotide
gagcgcuuaaaggccuugc

SEQ ID NO: 3244295 - RNA, 19 nt, Artificial Sequence
  Description of Artificial Sequence: Synthetic oligonucleotide
agcucagugcaggcgcacg

SEQ ID NO: 3244296 - RNA, 19 nt, Artificial Sequence
  Description of Artificial Sequence: Synthetic oligonucleotide
gcuggagcgcuuaaaggcc

SEQ ID NO: 3244297 - RNA, 19 nt, Artificial Sequence
  Description of Artificial Sequence: Synthetic oligonucleotide
ugccacacgcagcgcacgu

SEQ ID NO: 3244298 - RNA, 19 nt, Artificial Sequence
  Description of Artificial Sequence: Synthetic oligonucleotide
gcgguggcgcgacaggugg

SEQ ID NO: 3244299 - RNA, 19 nt, Artificial Sequence
  Description of Artificial Sequence: Synthetic oligonucleotide
ugcaggcgcacgugcugag

SEQ ID NO: 3244300 - RNA, 19 nt, Artificial Sequence
  Description of Artificial Sequence: Synthetic oligonucleotide
guggcucugcagccgcagg

SEQ ID NO: 3244301 - RNA, 19 nt, Artificial Sequence
  Description of Artificial Sequence: Synthetic oligonucleotide
uggguggcgcgguggcgcg

SEQ ID NO: 3244302 - RNA, 19 nt, Artificial Sequence
  Description of Artificial Sequence: Synthetic oligonucleotide
guagcccuuucgaggaccc

SEQ ID NO: 3244303 - RNA, 19 nt, Artificial Sequence
  Description of Artificial Sequence: Synthetic oligonucleotide
acccgcgcgcacuccgggc

SEQ ID NO: 3244304 - RNA, 19 nt, Artificial Sequence
  Description of Artificial Sequence: Synthetic oligonucleotide
caaagacccgcgcgcacuc

SEQ ID NO: 3244305 - RNA, 19 nt, Artificial Sequence
  Description of Artificial Sequence: Synthetic oligonucleotide
gagguuccuccuccagcug

SEQ ID NO: 3244306 - RNA, 19 nt, Artificial Sequence
  Description of Artificial Sequence: Synthetic oligonucleotide
gacccgcgcgcacuccggg

SEQ ID NO: 3244307 - RNA, 19 nt, Artificial Sequence
  Description of Artificial Sequence: Synthetic oligonucleotide
uggcaaagacccgcgcgca

SEQ ID NO: 3244308 - RNA, 19 nt, Artificial Sequence
  Description of Artificial Sequence: Synthetic oligonucleotide
cacuccgggcagcuguagc

SEQ ID NO: 3244309 - RNA, 19 nt, Artificial Sequence
  Description of Artificial Sequence: Synthetic oligonucleotide
acacgcgguggcucugcag

SEQ ID NO: 3244310 - RNA, 19 nt, Artificial Sequence
  Description of Artificial Sequence: Synthetic oligonucleotide
gcuuaaaggccuugccaca

SEQ ID NO: 3244311 - RNA, 19 nt, Artificial Sequence
  Description of Artificial Sequence: Synthetic oligonucleotide
ggcggguggagcucagugc

SEQ ID NO: 3244312 - RNA, 19 nt, Artificial Sequence
  Description of Artificial Sequence: Synthetic oligonucleotide
gguggagcucagugcaggc

SEQ ID NO: 3244313 - RNA, 19 nt, Artificial Sequence
  Description of Artificial Sequence: Synthetic oligonucleotide
uggccucgcgcugcggagg

SEQ ID NO: 3244314 - RNA, 19 nt, Artificial Sequence
  Description of Artificial Sequence: Synthetic oligonucleotide
cuccgggcagcuguagccc

SEQ ID NO: 3244315 - RNA, 19 nt, Artificial Sequence
  Description of Artificial Sequence: Synthetic oligonucleotide
uccgggcagcuguagcccu

SEQ ID NO: 3244316 - RNA, 19 nt, Artificial Sequence
  Description of Artificial Sequence: Synthetic oligonucleotide
gcgcuuaaaggccuugcca

SEQ ID NO: 3244317 - RNA, 19 nt, Artificial Sequence
  Description of Artificial Sequence: Synthetic oligonucleotide
aagauggucacaaagaugu

SEQ ID NO: 3244318 - RNA, 19 nt, Artificial Sequence
  Description of Artificial Sequence: Synthetic oligonucleotide
ugaacacagagguaaaagg

SEQ ID NO: 3244319 - RNA, 19 nt, Artificial Sequence
  Description of Artificial Sequence: Synthetic oligonucleotide
caaagagucacuugcaagg

SEQ ID NO: 3244320 - RNA, 19 nt, Artificial Sequence
  Description of Artificial Sequence: Synthetic oligonucleotide
uccaaagauggucacaaag

SEQ ID NO: 3244321 - RNA, 19 nt, Artificial Sequence
  Description of Artificial Sequence: Synthetic oligonucleotide
agugucuccaggaagaagc

SEQ ID NO: 3244322 - RNA, 19 nt, Artificial Sequence
  Description of Artificial Sequence: Synthetic oligonucleotide
agagguaaaagguguggcc

SEQ ID NO: 3244323 - RNA, 19 nt, Artificial Sequence
  Description of Artificial Sequence: Synthetic oligonucleotide
uucaguucccucuugcccg

SEQ ID NO: 3244324 - RNA, 19 nt, Artificial Sequence
  Description of Artificial Sequence: Synthetic oligonucleotide
ucugaugaguaccaguucu

SEQ ID NO: 3244325 - RNA, 19 nt, Artificial Sequence
  Description of Artificial Sequence: Synthetic oligonucleotide
ucuagugucuccaggaaga

SEQ ID NO: 3244326 - RNA, 19 nt, Artificial Sequence
  Description of Artificial Sequence: Synthetic oligonucleotide
augaguaccaguucucagg

SEQ ID NO: 3244327 - RNA, 19 nt, Artificial Sequence
  Description of Artificial Sequence: Synthetic oligonucleotide
aguguuggugacuuccacc

SEQ ID NO: 3244328 - RNA, 19 nt, Artificial Sequence
  Description of Artificial Sequence: Synthetic oligonucleotide
uuagcuccaaagaugguca

SEQ ID NO: 3244329 - RNA, 19 nt, Artificial Sequence
  Description of Artificial Sequence: Synthetic oligonucleotide
uucuccaccagccagccug

SEQ ID NO: 3244330 - RNA, 19 nt, Artificial Sequence
  Description of Artificial Sequence: Synthetic oligonucleotide
auuagcuccaaagaugguc

SEQ ID NO: 3244331 - RNA, 19 nt, Artificial Sequence
  Description of Artificial Sequence: Synthetic oligonucleotide
augaucucguacuugacug

SEQ ID NO: 3244332 - RNA, 19 nt, Artificial Sequence
  Description of Artificial Sequence: Synthetic oligonucleotide
cauuuucuguuucaguucc

SEQ ID NO: 3244333 - RNA, 19 nt, Artificial Sequence
  Description of Artificial Sequence: Synthetic oligonucleotide
aguaccaguucucaggucu

SEQ ID NO: 3244334 - RNA, 19 nt, Artificial Sequence
  Description of Artificial Sequence: Synthetic oligonucleotide
uuucaguucccucuugccc

SEQ ID NO: 3244335 - RNA, 19 nt, Artificial Sequence
  Description of Artificial Sequence: Synthetic oligonucleotide
gaugggaagagaucucucc

SEQ ID NO: 3244336 - RNA, 19 nt, Artificial Sequence
  Description of Artificial Sequence: Synthetic oligonucleotide
acaaagagucacuugcaag

SEQ ID NO: 3244337 - RNA, 19 nt, Artificial Sequence
  Description of Artificial Sequence: Synthetic oligonucleotide
auagccgcugccaucaugc

SEQ ID NO: 3244338 - RNA, 19 nt, Artificial Sequence
  Description of Artificial Sequence: Synthetic oligonucleotide
agagucacuugcaaggagc

SEQ ID NO: 3244339 - RNA, 19 nt, Artificial Sequence
  Description of Artificial Sequence: Synthetic oligonucleotide
aacacagagguaaaaggug

SEQ ID NO: 3244340 - RNA, 19 nt, Artificial Sequence
  Description of Artificial Sequence: Synthetic oligonucleotide
uucuagugucuccaggaag

SEQ ID NO: 3244341 - RNA, 19 nt, Artificial Sequence
  Description of Artificial Sequence: Synthetic oligonucleotide
aucuuagacagaugggaag

SEQ ID NO: 3244342 - RNA, 19 nt, Artificial Sequence
  Description of Artificial Sequence: Synthetic oligonucleotide
uagacagaugggaagagau

SEQ ID NO: 3244343 - RNA, 19 nt, Artificial Sequence
  Description of Artificial Sequence: Synthetic oligonucleotide
agugcugccacgcucgaag

SEQ ID NO: 3244344 - RNA, 19 nt, Artificial Sequence
  Description of Artificial Sequence: Synthetic oligonucleotide
uguuucaguucccucuugc

SEQ ID NO: 3244345 - RNA, 19 nt, Artificial Sequence
  Description of Artificial Sequence: Synthetic oligonucleotide
aguucuagugucuccagga

SEQ ID NO: 3244346 - RNA, 19 nt, Artificial Sequence
  Description of Artificial Sequence: Synthetic oligonucleotide
uccaccuucuccaccagcc

SEQ ID NO: 3244347 - RNA, 19 nt, Artificial Sequence
  Description of Artificial Sequence: Synthetic oligonucleotide
auggucacaaagauguugg

SEQ ID NO: 3244348 - RNA, 19 nt, Artificial Sequence
  Description of Artificial Sequence: Synthetic oligonucleotide
aguaauagccgcugccauc

SEQ ID NO: 3244349 - RNA, 19 nt, Artificial Sequence
  Description of Artificial Sequence: Synthetic oligonucleotide
uugucuagccaccugccgc

SEQ ID NO: 3244350 - RNA, 19 nt, Artificial Sequence
  Description of Artificial Sequence: Synthetic oligonucleotide
aguucucaggucugaggcc

SEQ ID NO: 3244351 - RNA, 19 nt, Artificial Sequence
  Description of Artificial Sequence: Synthetic oligonucleotide
uacuugacugguaccaggc

SEQ ID NO: 3244352 - RNA, 19 nt, Artificial Sequence
  Description of Artificial Sequence: Synthetic oligonucleotide
ugaguaccaguucucaggu

SEQ ID NO: 3244353 - RNA, 19 nt, Artificial Sequence
  Description of Artificial Sequence: Synthetic oligonucleotide
ucuuagacagaugggaaga

SEQ ID NO: 3244354 - RNA, 19 nt, Artificial Sequence
  Description of Artificial Sequence: Synthetic oligonucleotide
caguucucaggucugaggc

SEQ ID NO: 3244355 - RNA, 19 nt, Artificial Sequence
  Description of Artificial Sequence: Synthetic oligonucleotide
ucucguacuugacugguac

SEQ ID NO: 3244356 - RNA, 19 nt, Artificial Sequence
  Description of Artificial Sequence: Synthetic oligonucleotide
aagagucacuugcaaggag

SEQ ID NO: 3244357 - RNA, 19 nt, Artificial Sequence
  Description of Artificial Sequence: Synthetic oligonucleotide
gacuugucuagccaccugc

SEQ ID NO: 3244358 - RNA, 19 nt, Artificial Sequence
  Description of Artificial Sequence: Synthetic oligonucleotide
agauguuggcguccgugcc

SEQ ID NO: 3244359 - RNA, 19 nt, Artificial Sequence
  Description of Artificial Sequence: Synthetic oligonucleotide
gaugaguaccaguucucag

SEQ ID NO: 3244360 - RNA, 19 nt, Artificial Sequence
  Description of Artificial Sequence: Synthetic oligonucleotide
gauggucacaaagauguug

SEQ ID NO: 3244361 - RNA, 19 nt, Artificial Sequence
  Description of Artificial Sequence: Synthetic oligonucleotide
ucaugcuccagccggaccu

SEQ ID NO: 3244362 - RNA, 19 nt, Artificial Sequence
  Description of Artificial Sequence: Synthetic oligonucleotide
aggaagaagcggucagugc

SEQ ID NO: 3244363 - RNA, 19 nt, Artificial Sequence
  Description of Artificial Sequence: Synthetic oligonucleotide
ucacuugcaaggagcagcc

SEQ ID NO: 3244364 - RNA, 19 nt, Artificial Sequence
  Description of Artificial Sequence: Synthetic oligonucleotide
ugaucucguacuugacugg

SEQ ID NO: 3244365 - RNA, 19 nt, Artificial Sequence
  Description of Artificial Sequence: Synthetic oligonucleotide
ccauuagcuccaaagaugg

SEQ ID NO: 3244366 - RNA, 19 nt, Artificial Sequence
  Description of Artificial Sequence: Synthetic oligonucleotide
uguggccagagcaucuuag

SEQ ID NO: 3244367 - RNA, 19 nt, Artificial Sequence
  Description of Artificial Sequence: Synthetic oligonucleotide
agagguugcgcauuuucug

SEQ ID NO: 3244368 - RNA, 19 nt, Artificial Sequence
  Description of Artificial Sequence: Synthetic oligonucleotide
uugacugguaccaggcucu

SEQ ID NO: 3244369 - RNA, 19 nt, Artificial Sequence
  Description of Artificial Sequence: Synthetic oligonucleotide
uccccauuagcuccaaaga

SEQ ID NO: 3244370 - RNA, 19 nt, Artificial Sequence
  Description of Artificial Sequence: Synthetic oligonucleotide
acgaugaucucguacuuga

SEQ ID NO: 3244371 - RNA, 19 nt, Artificial Sequence
  Description of Artificial Sequence: Synthetic oligonucleotide
aagaagcggucagugcugc

SEQ ID NO: 3244372 - RNA, 19 nt, Artificial Sequence
  Description of Artificial Sequence: Synthetic oligonucleotide
uccaggaagaagcggucag

SEQ ID NO: 3244373 - RNA, 19 nt, Artificial Sequence
  Description of Artificial Sequence: Synthetic oligonucleotide
ugggaagagaucucuccag

SEQ ID NO: 3244374 - RNA, 19 nt, Artificial Sequence
  Description of Artificial Sequence: Synthetic oligonucleotide
ugaguaauagccgcugcca

SEQ ID NO: 3244375 - RNA, 19 nt, Artificial Sequence
  Description of Artificial Sequence: Synthetic oligonucleotide
guccccauuagcuccaaag

SEQ ID NO: 3244376 - RNA, 19 nt, Artificial Sequence
  Description of Artificial Sequence: Synthetic oligonucleotide
uggaggucuugggagaugg

SEQ ID NO: 3244377 - RNA, 19 nt, Artificial Sequence
  Description of Artificial Sequence: Synthetic oligonucleotide
gccagagcaucuuagacag

SEQ ID NO: 3244378 - RNA, 19 nt, Artificial Sequence
  Description of Artificial Sequence: Synthetic oligonucleotide
uaaaagguguggccagagc

SEQ ID NO: 3244379 - RNA, 19 nt, Artificial Sequence
  Description of Artificial Sequence: Synthetic oligonucleotide
guacuugacugguaccagg

SEQ ID NO: 3244380 - RNA, 19 nt, Artificial Sequence
  Description of Artificial Sequence: Synthetic oligonucleotide
uccaggugaguccaucccc

SEQ ID NO: 3244381 - RNA, 19 nt, Artificial Sequence
  Description of Artificial Sequence: Synthetic oligonucleotide
aguugaagaugguggccac

SEQ ID NO: 3244382 - RNA, 19 nt, Artificial Sequence
  Description of Artificial Sequence: Synthetic oligonucleotide
acagagguaaaaggugugg

SEQ ID NO: 3244383 - RNA, 19 nt, Artificial Sequence
  Description of Artificial Sequence: Synthetic oligonucleotide
guucucaggucugaggccg

SEQ ID NO: 3244384 - RNA, 19 nt, Artificial Sequence
  Description of Artificial Sequence: Synthetic oligonucleotide
aaagagucacuugcaagga

SEQ ID NO: 3244385 - RNA, 19 nt, Artificial Sequence
  Description of Artificial Sequence: Synthetic oligonucleotide
gaagagguugcgcauuuuc

SEQ ID NO: 3244386 - RNA, 19 nt, Artificial Sequence
  Description of Artificial Sequence: Synthetic oligonucleotide
aauagccgcugccaucaug

SEQ ID NO: 3244387 - RNA, 19 nt, Artificial Sequence
  Description of Artificial Sequence: Synthetic oligonucleotide
ugggagauggcugaugaac

SEQ ID NO: 3244388 - RNA, 19 nt, Artificial Sequence
  Description of Artificial Sequence: Synthetic oligonucleotide
cugaguaauagccgcugcc

SEQ ID NO: 3244389 - RNA, 19 nt, Artificial Sequence
  Description of Artificial Sequence: Synthetic oligonucleotide
agguaaaagguguggccag

SEQ ID NO: 3244390 - RNA, 19 nt, Artificial Sequence
  Description of Artificial Sequence: Synthetic oligonucleotide
acaaagauguuggcguccg

SEQ ID NO: 3244391 - RNA, 19 nt, Artificial Sequence
  Description of Artificial Sequence: Synthetic oligonucleotide
gucacuugcaaggagcagc

SEQ ID NO: 3244392 - RNA, 19 nt, Artificial Sequence
  Description of Artificial Sequence: Synthetic oligonucleotide
ucguacuugacugguacca

SEQ ID NO: 3244393 - RNA, 19 nt, Artificial Sequence
  Description of Artificial Sequence: Synthetic oligonucleotide
gucacaaagauguuggcgu

SEQ ID NO: 3244394 - RNA, 19 nt, Artificial Sequence
  Description of Artificial Sequence: Synthetic oligonucleotide
agaucucuccaggugaguc

SEQ ID NO: 3244395 - RNA, 19 nt, Artificial Sequence
  Description of Artificial Sequence: Synthetic oligonucleotide
aggucugaggccguagccc

SEQ ID NO: 3244396 - RNA, 19 nt, Artificial Sequence
  Description of Artificial Sequence: Synthetic oligonucleotide
cuugacugguaccaggcuc

SEQ ID NO: 3244397 - RNA, 19 nt, Artificial Sequence
  Description of Artificial Sequence: Synthetic oligonucleotide
agcucucccaguucuagug

SEQ ID NO: 3244398 - RNA, 19 nt, Artificial Sequence
  Description of Artificial Sequence: Synthetic oligonucleotide
aagguguggccagagcauc

SEQ ID NO: 3244399 - RNA, 19 nt, Artificial Sequence
  Description of Artificial Sequence: Synthetic oligonucleotide
cugaugaacacagagguaa

SEQ ID NO: 3244400 - RNA, 19 nt, Artificial Sequence
  Description of Artificial Sequence: Synthetic oligonucleotide
guuucaguucccucuugcc

SEQ ID NO: 3244401 - RNA, 19 nt, Artificial Sequence
  Description of Artificial Sequence: Synthetic oligonucleotide
acuccagugcuaguguugg

SEQ ID NO: 3244402 - RNA, 19 nt, Artificial Sequence
  Description of Artificial Sequence: Synthetic oligonucleotide
guagccccagcccuggagg

SEQ ID NO: 3244403 - RNA, 19 nt, Artificial Sequence
  Description of Artificial Sequence: Synthetic oligonucleotide
uccagugcuaguguuggug

SEQ ID NO: 3244404 - RNA, 19 nt, Artificial Sequence
  Description of Artificial Sequence: Synthetic oligonucleotide
ugaugaguaccaguucuca

SEQ ID NO: 3244405 - RNA, 19 nt, Artificial Sequence
  Description of Artificial Sequence: Synthetic oligonucleotide
gccaucaugcuccagccgg

SEQ ID NO: 3244406 - RNA, 19 nt, Artificial Sequence
  Description of Artificial Sequence: Synthetic oligonucleotide
aagagguugcgcauuuucu

SEQ ID NO: 3244407 - RNA, 19 nt, Artificial Sequence
  Description of Artificial Sequence: Synthetic oligonucleotide
cagccugaguaauagccgc

SEQ ID NO: 3244408 - RNA, 19 nt, Artificial Sequence
  Description of Artificial Sequence: Synthetic oligonucleotide
ugucuagccaccugccgca

SEQ ID NO: 3244409 - RNA, 19 nt, Artificial Sequence
  Description of Artificial Sequence: Synthetic oligonucleotide
ucuccaggugaguccaucc

SEQ ID NO: 3244410 - RNA, 19 nt, Artificial Sequence
  Description of Artificial Sequence: Synthetic oligonucleotide
cuugucuagccaccugccg

SEQ ID NO: 3244411 - RNA, 19 nt, Artificial Sequence
  Description of Artificial Sequence: Synthetic oligonucleotide
uggccagagcaucuuagac

SEQ ID NO: 3244412 - RNA, 19 nt, Artificial Sequence
  Description of Artificial Sequence: Synthetic oligonucleotide
uuagacagaugggaagaga

SEQ ID NO: 3244413 - RNA, 19 nt, Artificial Sequence
  Description of Artificial Sequence: Synthetic oligonucleotide
ggucacaaagauguuggcg

SEQ ID NO: 3244414 - RNA, 19 nt, Artificial Sequence
  Description of Artificial Sequence: Synthetic oligonucleotide
guuggugacuuccaccuuc

SEQ ID NO: 3244415 - RNA, 19 nt, Artificial Sequence
  Description of Artificial Sequence: Synthetic oligonucleotide
acuugucuagccaccugcc

SEQ ID NO: 3244416 - RNA, 19 nt, Artificial Sequence
  Description of Artificial Sequence: Synthetic oligonucleotide
gaugaucucguacuugacu

SEQ ID NO: 3244417 - RNA, 19 nt, Artificial Sequence
  Description of Artificial Sequence: Synthetic oligonucleotide
aauauacaaaucuugauuc

SEQ ID NO: 3244418 - RNA, 19 nt, Artificial Sequence
  Description of Artificial Sequence: Synthetic oligonucleotide
aaaucuauaccauuuaguc

SEQ ID NO: 3244419 - RNA, 19 nt, Artificial Sequence
  Description of Artificial Sequence: Synthetic oligonucleotide
ugaagaacaaucacuaugg

SEQ ID NO: 3244420 - RNA, 19 nt, Artificial Sequence
  Description of Artificial Sequence: Synthetic oligonucleotide
auuacuuauauacagauga

SEQ ID NO: 3244421 - RNA, 19 nt, Artificial Sequence
  Description of Artificial Sequence: Synthetic oligonucleotide
aaucuauaccauuuagucc

SEQ ID NO: 3244422 - RNA, 19 nt, Artificial Sequence
  Description of Artificial Sequence: Synthetic oligonucleotide
cauagaaaagauuaaauag

SEQ ID NO: 3244423 - RNA, 19 nt, Artificial Sequence
  Description of Artificial Sequence: Synthetic oligonucleotide
gucaauauuacuuauauac

SEQ ID NO: 3244424 - RNA, 19 nt, Artificial Sequence
  Description of Artificial Sequence: Synthetic oligonucleotide
auagaaaagauuaaauagc

SEQ ID NO: 3244425 - RNA, 19 nt, Artificial Sequence
  Description of Artificial Sequence: Synthetic oligonucleotide
aauuacugccuauugcccc

SEQ ID NO: 3244426 - RNA, 19 nt, Artificial Sequence
  Description of Artificial Sequence: Synthetic oligonucleotide
uuaauuacugccuauugcc

SEQ ID NO: 3244427 - RNA, 19 nt, Artificial Sequence
  Description of Artificial Sequence: Synthetic oligonucleotide
gaaaagauuaaauagcaca

SEQ ID NO: 3244428 - RNA, 19 nt, Artificial Sequence
  Description of Artificial Sequence: Synthetic oligonucleotide
uugucaaauauacaaaucu

SEQ ID NO: 3244429 - RNA, 19 nt, Artificial Sequence
  Description of Artificial Sequence: Synthetic oligonucleotide
aaauauacaaaucuugauu

SEQ ID NO: 3244430 - RNA, 19 nt, Artificial Sequence
  Description of Artificial Sequence: Synthetic oligonucleotide
aaaauuaugucacugucaa

SEQ ID NO: 3244431 - RNA, 19 nt, Artificial Sequence
  Description of Artificial Sequence: Synthetic oligonucleotide
acacuaacaaaucuauacc

SEQ ID NO: 3244432 - RNA, 19 nt, Artificial Sequence
  Description of Artificial Sequence: Synthetic oligonucleotide
ucaaauauacaaaucuuga

SEQ ID NO: 3244433 - RNA, 19 nt, Artificial Sequence
  Description of Artificial Sequence: Synthetic oligonucleotide
aucuauaccauuuagucca

SEQ ID NO: 3244434 - RNA, 19 nt, Artificial Sequence
  Description of Artificial Sequence: Synthetic oligonucleotide
uuuaauuacugccuauugc

SEQ ID NO: 3244435 - RNA, 19 nt, Artificial Sequence
  Description of Artificial Sequence: Synthetic oligonucleotide
uagaaaagauuaaauagca

SEQ ID NO: 3244436 - RNA, 19 nt, Artificial Sequence
  Description of Artificial Sequence: Synthetic oligonucleotide
caauauuacuuauauacag

SEQ ID NO: 3244437 - RNA, 19 nt, Artificial Sequence
  Description of Artificial Sequence: Synthetic oligonucleotide
aaaaucuucaugccauguc

SEQ ID NO: 3244438 - RNA, 19 nt, Artificial Sequence
  Description of Artificial Sequence: Synthetic oligonucleotide
uagaacuugucaaauauac

SEQ ID NO: 3244439 - RNA, 19 nt, Artificial Sequence
  Description of Artificial Sequence: Synthetic oligonucleotide
ucacacauagaaaagauua

SEQ ID NO: 3244440 - RNA, 19 nt, Artificial Sequence
  Description of Artificial Sequence: Synthetic oligonucleotide
acaaaucuugauucaauac

SEQ ID NO: 3244441 - RNA, 19 nt, Artificial Sequence
  Description of Artificial Sequence: Synthetic oligonucleotide
uuuagaacuugucaaauau

SEQ ID NO: 3244442 - RNA, 19 nt, Artificial Sequence
  Description of Artificial Sequence: Synthetic oligonucleotide
acaaaauuaugucacuguc

SEQ ID NO: 3244443 - RNA, 19 nt, Artificial Sequence
  Description of Artificial Sequence: Synthetic oligonucleotide
aaaucuucaugccauguca

SEQ ID NO: 3244444 - RNA, 19 nt, Artificial Sequence
  Description of Artificial Sequence: Synthetic oligonucleotide
aauuaugucacugucaaua

SEQ ID NO: 3244445 - RNA, 19 nt, Artificial Sequence
  Description of Artificial Sequence: Synthetic oligonucleotide
cacacuaacaaaucuauac

SEQ ID NO: 3244446 - RNA, 19 nt, Artificial Sequence
  Description of Artificial Sequence: Synthetic oligonucleotide
ucaauauuacuuauauaca

SEQ ID NO: 3244447 - RNA, 19 nt, Artificial Sequence
  Description of Artificial Sequence: Synthetic oligonucleotide
acuauggcauuuuagaacu

SEQ ID NO: 3244448 - RNA, 19 nt, Artificial Sequence
  Description of Artificial Sequence: Synthetic oligonucleotide
uuuuaauuacugccuauug

SEQ ID NO: 3244449 - RNA, 19 nt, Artificial Sequence
  Description of Artificial Sequence: Synthetic oligonucleotide
gaacuugucaaauauacaa

SEQ ID NO: 3244450 - RNA, 19 nt, Artificial Sequence
  Description of Artificial Sequence: Synthetic oligonucleotide
aagaacaaucacuauggca

SEQ ID NO: 3244451 - RNA, 19 nt, Artificial Sequence
  Description of Artificial Sequence: Synthetic oligonucleotide
uaugucacugucaauauua

SEQ ID NO: 3244452 - RNA, 19 nt, Artificial Sequence
  Description of Artificial Sequence: Synthetic oligonucleotide
aagauuaaauagcacaauu

SEQ ID NO: 3244453 - RNA, 19 nt, Artificial Sequence
  Description of Artificial Sequence: Synthetic oligonucleotide
caugccaugucacacauag

SEQ ID NO: 3244454 - RNA, 19 nt, Artificial Sequence
  Description of Artificial Sequence: Synthetic oligonucleotide
uccauacaaaauuauguca

SEQ ID NO: 3244455 - RNA, 19 nt, Artificial Sequence
  Description of Artificial Sequence: Synthetic oligonucleotide
aaaagauuaaauagcacaa

SEQ ID NO: 3244456 - RNA, 19 nt, Artificial Sequence
  Description of Artificial Sequence: Synthetic oligonucleotide
ugccaugucacacauagaa

SEQ ID NO: 3244457 - RNA, 19 nt, Artificial Sequence
  Description of Artificial Sequence: Synthetic oligonucleotide
uaccauuuaguccauacaa

SEQ ID NO: 3244458 - RNA, 19 nt, Artificial Sequence
  Description of Artificial Sequence: Synthetic oligonucleotide
auuuaguccauacaaaauu

SEQ ID NO: 3244459 - RNA, 19 nt, Artificial Sequence
  Description of Artificial Sequence: Synthetic oligonucleotide
auauuacuuauauacagau

SEQ ID NO: 3244460 - RNA, 19 nt, Artificial Sequence
  Description of Artificial Sequence: Synthetic oligonucleotide
aucacuauggcauuuuaga

SEQ ID NO: 3244461 - RNA, 19 nt, Artificial Sequence
  Description of Artificial Sequence: Synthetic oligonucleotide
agaacaaucacuauggcau

SEQ ID NO: 3244462 - RNA, 19 nt, Artificial Sequence
  Description of Artificial Sequence: Synthetic oligonucleotide
acaaaucuauaccauuuag

SEQ ID NO: 3244463 - RNA, 19 nt, Artificial Sequence
  Description of Artificial Sequence: Synthetic oligonucleotide
aauauuacuuauauacaga

SEQ ID NO: 3244464 - RNA, 19 nt, Artificial Sequence
  Description of Artificial Sequence: Synthetic oligonucleotide
acauagaaaagauuaaaua

SEQ ID NO: 3244465 - RNA, 19 nt, Artificial Sequence
  Description of Artificial Sequence: Synthetic oligonucleotide
uauuacuuauauacagaug

SEQ ID NO: 3244466 - RNA, 19 nt, Artificial Sequence
  Description of Artificial Sequence: Synthetic oligonucleotide
uuuaguccauacaaaauua

SEQ ID NO: 3244467 - RNA, 19 nt, Artificial Sequence
  Description of Artificial Sequence: Synthetic oligonucleotide
cugaagaacaaucacuaug

SEQ ID NO: 3244468 - RNA, 19 nt, Artificial Sequence
  Description of Artificial Sequence: Synthetic oligonucleotide
uauaccauuuaguccauac

SEQ ID NO: 3244469 - RNA, 19 nt, Artificial Sequence
  Description of Artificial Sequence: Synthetic oligonucleotide
uacaaaauuaugucacugu

SEQ ID NO: 3244470 - RNA, 19 nt, Artificial Sequence
  Description of Artificial Sequence: Synthetic oligonucleotide
uaauuacugccuauugccc

SEQ ID NO: 3244471 - RNA, 19 nt, Artificial Sequence
  Description of Artificial Sequence: Synthetic oligonucleotide
uaacaaaucuauaccauuu

SEQ ID NO: 3244472 - RNA, 19 nt, Artificial Sequence
  Description of Artificial Sequence: Synthetic oligonucleotide
uaguccauacaaaauuaug

SEQ ID NO: 3244473 - RNA, 19 nt, Artificial Sequence
  Description of Artificial Sequence: Synthetic oligonucleotide
aaaucuugauucaauacaa

SEQ ID NO: 3244474 - RNA, 19 nt, Artificial Sequence
  Description of Artificial Sequence: Synthetic oligonucleotide
acuugucaaauauacaaau

SEQ ID NO: 3244475 - RNA, 19 nt, Artificial Sequence
  Description of Artificial Sequence: Synthetic oligonucleotide
gucaaauauacaaaucuug

SEQ ID NO: 3244476 - RNA, 19 nt, Artificial Sequence
  Description of Artificial Sequence: Synthetic oligonucleotide
caaaucuugauucaauaca

SEQ ID NO: 3244477 - RNA, 19 nt, Artificial Sequence
  Description of Artificial Sequence: Synthetic oligonucleotide
ugucaaauauacaaaucuu

SEQ ID NO: 3244478 - RNA, 19 nt, Artificial Sequence
  Description of Artificial Sequence: Synthetic oligonucleotide
aaucuucaugccaugucac

SEQ ID NO: 3244479 - RNA, 19 nt, Artificial Sequence
  Description of Artificial Sequence: Synthetic oligonucleotide
uacuuauauacagaugaca

SEQ ID NO: 3244480 - RNA, 19 nt, Artificial Sequence
  Description of Artificial Sequence: Synthetic oligonucleotide
cacuauggcauuuuagaac

SEQ ID NO: 3244481 - RNA, 19 nt, Artificial Sequence
  Description of Artificial Sequence: Synthetic oligonucleotide
aguccauacaaaauuaugu

SEQ ID NO: 3244482 - RNA, 19 nt, Artificial Sequence
  Description of Artificial Sequence: Synthetic oligonucleotide
aucuugauucaauacaaaa

SEQ ID NO: 3244483 - RNA, 19 nt, Artificial Sequence
  Description of Artificial Sequence: Synthetic oligonucleotide
uuacuuauauacagaugac

SEQ ID NO: 3244484 - RNA, 19 nt, Artificial Sequence
  Description of Artificial Sequence: Synthetic oligonucleotide
agaaaagauuaaauagcac

SEQ ID NO: 3244485 - RNA, 19 nt, Artificial Sequence
  Description of Artificial Sequence: Synthetic oligonucleotide
ucuuagugguggcugaaga

SEQ ID NO: 3244486 - RNA, 19 nt, Artificial Sequence
  Description of Artificial Sequence: Synthetic oligonucleotide
cuugucaaauauacaaauc

SEQ ID NO: 3244487 - RNA, 19 nt, Artificial Sequence
  Description of Artificial Sequence: Synthetic oligonucleotide
ugucacacauagaaaagau

SEQ ID NO: 3244488 - RNA, 19 nt, Artificial Sequence
  Description of Artificial Sequence: Synthetic oligonucleotide
aacaaaucuauaccauuua

SEQ ID NO: 3244489 - RNA, 19 nt, Artificial Sequence
  Description of Artificial Sequence: Synthetic oligonucleotide
ugccuauugccccugacac

SEQ ID NO: 3244490 - RNA, 19 nt, Artificial Sequence
  Description of Artificial Sequence: Synthetic oligonucleotide
gauuaaauagcacaauuuu

SEQ ID NO: 3244491 - RNA, 19 nt, Artificial Sequence
  Description of Artificial Sequence: Synthetic oligonucleotide
acuuauauacagaugacaa

SEQ ID NO: 3244492 - RNA, 19 nt, Artificial Sequence
  Description of Artificial Sequence: Synthetic oligonucleotide
auauacaaaucuugauuca

SEQ ID NO: 3244493 - RNA, 19 nt, Artificial Sequence
  Description of Artificial Sequence: Synthetic oligonucleotide
aaucacuauggcauuuuag

SEQ ID NO: 3244494 - RNA, 19 nt, Artificial Sequence
  Description of Artificial Sequence: Synthetic oligonucleotide
caugucacacauagaaaag

SEQ ID NO: 3244495 - RNA, 19 nt, Artificial Sequence
  Description of Artificial Sequence: Synthetic oligonucleotide
uggcugaagaacaaucacu

SEQ ID NO: 3244496 - RNA, 19 nt, Artificial Sequence
  Description of Artificial Sequence: Synthetic oligonucleotide
uacaaaucuugauucaaua

SEQ ID NO: 3244497 - RNA, 19 nt, Artificial Sequence
  Description of Artificial Sequence: Synthetic oligonucleotide
ugacacacuaacaaaucua

SEQ ID NO: 3244498 - RNA, 19 nt, Artificial Sequence
  Description of Artificial Sequence: Synthetic oligonucleotide
aaagauuaaauagcacaau

SEQ ID NO: 3244499 - RNA, 19 nt, Artificial Sequence
  Description of Artificial Sequence: Synthetic oligonucleotide
auacaaaauuaugucacug

SEQ ID NO: 3244500 - RNA, 19 nt, Artificial Sequence
  Description of Artificial Sequence: Synthetic oligonucleotide
uauacaaaucuugauucaa

SEQ ID NO: 3244501 - RNA, 19 nt, Artificial Sequence
  Description of Artificial Sequence: Synthetic oligonucleotide
uuaguccauacaaaauuau

SEQ ID NO: 3244502 - RNA, 19 nt, Artificial Sequence
  Description of Artificial Sequence: Synthetic oligonucleotide
cacuaacaaaucuauacca

SEQ ID NO: 3244503 - RNA, 19 nt, Artificial Sequence
  Description of Artificial Sequence: Synthetic oligonucleotide
guccauacaaaauuauguc

SEQ ID NO: 3244504 - RNA, 19 nt, Artificial Sequence
  Description of Artificial Sequence: Synthetic oligonucleotide
uauggcauuuuagaacuug

SEQ ID NO: 3244505 - RNA, 19 nt, Artificial Sequence
  Description of Artificial Sequence: Synthetic oligonucleotide
uuuuagaacuugucaaaua

SEQ ID NO: 3244506 - RNA, 19 nt, Artificial Sequence
  Description of Artificial Sequence: Synthetic oligonucleotide
uuagaacuugucaaauaua

SEQ ID NO: 3244507 - RNA, 19 nt, Artificial Sequence
  Description of Artificial Sequence: Synthetic oligonucleotide
ucacuauggcauuuuagaa

SEQ ID NO: 3244508 - RNA, 19 nt, Artificial Sequence
  Description of Artificial Sequence: Synthetic oligonucleotide
uuagugguggcugaagaac

SEQ ID NO: 3244509 - RNA, 19 nt, Artificial Sequence
  Description of Artificial Sequence: Synthetic oligonucleotide
caaaauuaugucacuguca

SEQ ID NO: 3244510 - RNA, 19 nt, Artificial Sequence
  Description of Artificial Sequence: Synthetic oligonucleotide
ccauacaaaauuaugucac

SEQ ID NO: 3244511 - RNA, 19 nt, Artificial Sequence
  Description of Artificial Sequence: Synthetic oligonucleotide
gaagaacaaucacuauggc

SEQ ID NO: 3244512 - RNA, 19 nt, Artificial Sequence
  Description of Artificial Sequence: Synthetic oligonucleotide
uagugguggcugaagaaca

SEQ ID NO: 3244513 - RNA, 19 nt, Artificial Sequence
  Description of Artificial Sequence: Synthetic oligonucleotide
auuaugucacugucaauau

SEQ ID NO: 3244514 - RNA, 19 nt, Artificial Sequence
  Description of Artificial Sequence: Synthetic oligonucleotide
auaccauuuaguccauaca

SEQ ID NO: 3244515 - RNA, 19 nt, Artificial Sequence
  Description of Artificial Sequence: Synthetic oligonucleotide
ucacugucaauauuacuua

SEQ ID NO: 3244516 - RNA, 19 nt, Artificial Sequence
  Description of Artificial Sequence: Synthetic oligonucleotide
aacuugucaaauauacaaa

SEQ ID NO: 3244517 - RNA, 19 nt, Artificial Sequence
  Description of Artificial Sequence: Synthetic oligonucleotide
agagaagacaugcacaucc

SEQ ID NO: 3244518 - RNA, 19 nt, Artificial Sequence
  Description of Artificial Sequence: Synthetic oligonucleotide
ucuguauuagaguucaucc

SEQ ID NO: 3244519 - RNA, 19 nt, Artificial Sequence
  Description of Artificial Sequence: Synthetic oligonucleotide
uuagaguucauccaccuca

SEQ ID NO: 3244520 - RNA, 19 nt, Artificial Sequence
  Description of Artificial Sequence: Synthetic oligonucleotide
acucaaaugagauguggcc

SEQ ID NO: 3244521 - RNA, 19 nt, Artificial Sequence
  Description of Artificial Sequence: Synthetic oligonucleotide
aagacaugcacauccauca

SEQ ID NO: 3244522 - RNA, 19 nt, Artificial Sequence
  Description of Artificial Sequence: Synthetic oligonucleotide
ugcaaagggaaucuggucc

SEQ ID NO: 3244523 - RNA, 19 nt, Artificial Sequence
  Description of Artificial Sequence: Synthetic oligonucleotide
uguauuagaguucauccac

SEQ ID NO: 3244524 - RNA, 19 nt, Artificial Sequence
  Description of Artificial Sequence: Synthetic oligonucleotide
agugcaucuacugucaggc

SEQ ID NO: 3244525 - RNA, 19 nt, Artificial Sequence
  Description of Artificial Sequence: Synthetic oligonucleotide
augcacauccaucagcucc

SEQ ID NO: 3244526 - RNA, 19 nt, Artificial Sequence
  Description of Artificial Sequence: Synthetic oligonucleotide
guuggaaccacugagggcg

SEQ ID NO: 3244527 - RNA, 19 nt, Artificial Sequence
  Description of Artificial Sequence: Synthetic oligonucleotide
acaaacucaaaugagaugu

SEQ ID NO: 3244528 - RNA, 19 nt, Artificial Sequence
  Description of Artificial Sequence: Synthetic oligonucleotide
aggagugggaaccaguagc

SEQ ID NO: 3244529 - RNA, 19 nt, Artificial Sequence
  Description of Artificial Sequence: Synthetic oligonucleotide
aucugguccaguuggaacc

SEQ ID NO: 3244530 - RNA, 19 nt, Artificial Sequence
  Description of Artificial Sequence: Synthetic oligonucleotide
aaucugguccaguuggaac

SEQ ID NO: 3244531 - RNA, 19 nt, Artificial Sequence
  Description of Artificial Sequence: Synthetic oligonucleotide
uugaaguacccacagaacu

SEQ ID NO: 3244532 - RNA, 19 nt, Artificial Sequence
  Description of Artificial Sequence: Synthetic oligonucleotide
ugauccuggaacuugaagu

SEQ ID NO: 3244533 - RNA, 19 nt, Artificial Sequence
  Description of Artificial Sequence: Synthetic oligonucleotide
ugagauguggcccaccuug

SEQ ID NO: 3244534 - RNA, 19 nt, Artificial Sequence
  Description of Artificial Sequence: Synthetic oligonucleotide
aacucaaaugagauguggc

SEQ ID NO: 3244535 - RNA, 19 nt, Artificial Sequence
  Description of Artificial Sequence: Synthetic oligonucleotide
aacccacaaacucaaauga

SEQ ID NO: 3244536 - RNA, 19 nt, Artificial Sequence
  Description of Artificial Sequence: Synthetic oligonucleotide
aagccccucuucuucaugc

SEQ ID NO: 3244537 - RNA, 19 nt, Artificial Sequence
  Description of Artificial Sequence: Synthetic oligonucleotide
uccaguuggaaccacugag

SEQ ID NO: 3244538 - RNA, 19 nt, Artificial Sequence
  Description of Artificial Sequence: Synthetic oligonucleotide
aaacucaaaugagaugugg

SEQ ID NO: 3244539 - RNA, 19 nt, Artificial Sequence
  Description of Artificial Sequence: Synthetic oligonucleotide
cuguguagcaaccugagug

SEQ ID NO: 3244540 - RNA, 19 nt, Artificial Sequence
  Description of Artificial Sequence: Synthetic oligonucleotide
acuugaaguacccacagaa

SEQ ID NO: 3244541 - RNA, 19 nt, Artificial Sequence
  Description of Artificial Sequence: Synthetic oligonucleotide
acucucuuccugcagcucc

SEQ ID NO: 3244542 - RNA, 19 nt, Artificial Sequence
  Description of Artificial Sequence: Synthetic oligonucleotide
aaugagauguggcccaccu

SEQ ID NO: 3244543 - RNA, 19 nt, Artificial Sequence
  Description of Artificial Sequence: Synthetic oligonucleotide
uuagcuccguccucaaugg

SEQ ID NO: 3244544 - RNA, 19 nt, Artificial Sequence
  Description of Artificial Sequence: Synthetic oligonucleotide
ugucaggccacucucuucc

SEQ ID NO: 3244545 - RNA, 19 nt, Artificial Sequence
  Description of Artificial Sequence: Synthetic oligonucleotide
gaacuucuucuucugaagc

SEQ ID NO: 3244546 - RNA, 19 nt, Artificial Sequence
  Description of Artificial Sequence: Synthetic oligonucleotide
ucaaaugagauguggccca

SEQ ID NO: 3244547 - RNA, 19 nt, Artificial Sequence
  Description of Artificial Sequence: Synthetic oligonucleotide
uuucgucacucucuguggg

SEQ ID NO: 3244548 - RNA, 19 nt, Artificial Sequence
  Description of Artificial Sequence: Synthetic oligonucleotide
ucugcaaagggaaucuggu

SEQ ID NO: 3244549 - RNA, 19 nt, Artificial Sequence
  Description of Artificial Sequence: Synthetic oligonucleotide
ugcaucuacugucaggcca

SEQ ID NO: 3244550 - RNA, 19 nt, Artificial Sequence
  Description of Artificial Sequence: Synthetic oligonucleotide
uggaacuugaaguacccac

SEQ ID NO: 3244551 - RNA, 19 nt, Artificial Sequence
  Description of Artificial Sequence: Synthetic oligonucleotide
gucaguagagaagacaugc

SEQ ID NO: 3244552 - RNA, 19 nt, Artificial Sequence
  Description of Artificial Sequence: Synthetic oligonucleotide
uuggacugacaccuugugg

SEQ ID NO: 3244553 - RNA, 19 nt, Artificial Sequence
  Description of Artificial Sequence: Synthetic oligonucleotide
uguagcaaccugagugugg

SEQ ID NO: 3244554 - RNA, 19 nt, Artificial Sequence
  Description of Artificial Sequence: Synthetic oligonucleotide
aguuggaaccacugagggc

SEQ ID NO: 3244555 - RNA, 19 nt, Artificial Sequence
  Description of Artificial Sequence: Synthetic oligonucleotide
accaguagcugucaucagg

SEQ ID NO: 3244556 - RNA, 19 nt, Artificial Sequence
  Description of Artificial Sequence: Synthetic oligonucleotide
gaacuugaaguacccacag

SEQ ID NO: 3244557 - RNA, 19 nt, Artificial Sequence
  Description of Artificial Sequence: Synthetic oligonucleotide
cuuagcuccguccucaaug

SEQ ID NO: 3244558 - RNA, 19 nt, Artificial Sequence
  Description of Artificial Sequence: Synthetic oligonucleotide
auuucgucacucucugugg

SEQ ID NO: 3244559 - RNA, 19 nt, Artificial Sequence
  Description of Artificial Sequence: Synthetic oligonucleotide
ugaagcaggagugggaacc

SEQ ID NO: 3244560 - RNA, 19 nt, Artificial Sequence
  Description of Artificial Sequence: Synthetic oligonucleotide
cauuucgucacucucugug

SEQ ID NO: 3244561 - RNA, 19 nt, Artificial Sequence
  Description of Artificial Sequence: Synthetic oligonucleotide
uguguagcaaccugagugu

SEQ ID NO: 3244562 - RNA, 19 nt, Artificial Sequence
  Description of Artificial Sequence: Synthetic oligonucleotide
uauuagaguucauccaccu

SEQ ID NO: 3244563 - RNA, 19 nt, Artificial Sequence
  Description of Artificial Sequence: Synthetic oligonucleotide
cauuccagcggccagcacc

SEQ ID NO: 3244564 - RNA, 19 nt, Artificial Sequence
  Description of Artificial Sequence: Synthetic oligonucleotide
cucaaaugagauguggccc

SEQ ID NO: 3244565 - RNA, 19 nt, Artificial Sequence
  Description of Artificial Sequence: Synthetic oligonucleotide
uccuggaacuugaaguacc

SEQ ID NO: 3244566 - RNA, 19 nt, Artificial Sequence
  Description of Artificial Sequence: Synthetic oligonucleotide
auuagaguucauccaccuc

SEQ ID NO: 3244567 - RNA, 19 nt, Artificial Sequence
  Description of Artificial Sequence: Synthetic oligonucleotide
gacaugcacauccaucagc

SEQ ID NO: 3244568 - RNA, 19 nt, Artificial Sequence
  Description of Artificial Sequence: Synthetic oligonucleotide
aagcgaguagucaaggaug

SEQ ID NO: 3244569 - RNA, 19 nt, Artificial Sequence
  Description of Artificial Sequence: Synthetic oligonucleotide
ucaucaggccacaugucug

SEQ ID NO: 3244570 - RNA, 19 nt, Artificial Sequence
  Description of Artificial Sequence: Synthetic oligonucleotide
gggaaucugguccaguugg

SEQ ID NO: 3244571 - RNA, 19 nt, Artificial Sequence
  Description of Artificial Sequence: Synthetic oligonucleotide
gaaccaguagcugucauca

SEQ ID NO: 3244572 - RNA, 19 nt, Artificial Sequence
  Description of Artificial Sequence: Synthetic oligonucleotide
gaguucauccaccucacga

SEQ ID NO: 3244573 - RNA, 19 nt, Artificial Sequence
  Description of Artificial Sequence: Synthetic oligonucleotide
acugagggcgcauuucguc

SEQ ID NO: 3244574 - RNA, 19 nt, Artificial Sequence
  Description of Artificial Sequence: Synthetic oligonucleotide
ucuucugaagcaggagugg

SEQ ID NO: 3244575 - RNA, 19 nt, Artificial Sequence
  Description of Artificial Sequence: Synthetic oligonucleotide
ucaguagagaagacaugca

SEQ ID NO: 3244576 - RNA, 19 nt, Artificial Sequence
  Description of Artificial Sequence: Synthetic oligonucleotide
ugaaguacccacagaacuu

SEQ ID NO: 3244577 - RNA, 19 nt, Artificial Sequence
  Description of Artificial Sequence: Synthetic oligonucleotide
aguagcugucaucaggcca

SEQ ID NO: 3244578 - RNA, 19 nt, Artificial Sequence
  Description of Artificial Sequence: Synthetic oligonucleotide
auguggcccaccuugagca

SEQ ID NO: 3244579 - RNA, 19 nt, Artificial Sequence
  Description of Artificial Sequence: Synthetic oligonucleotide
agcaccaaagccccucuuc

SEQ ID NO: 3244580 - RNA, 19 nt, Artificial Sequence
  Description of Artificial Sequence: Synthetic oligonucleotide
cuugaaguacccacagaac

SEQ ID NO: 3244581 - RNA, 19 nt, Artificial Sequence
  Description of Artificial Sequence: Synthetic oligonucleotide
uucauccaccucacgaagc

SEQ ID NO: 3244582 - RNA, 19 nt, Artificial Sequence
  Description of Artificial Sequence: Synthetic oligonucleotide
caguagagaagacaugcac

SEQ ID NO: 3244583 - RNA, 19 nt, Artificial Sequence
  Description of Artificial Sequence: Synthetic oligonucleotide
uucuucuucugaagcagga

SEQ ID NO: 3244584 - RNA, 19 nt, Artificial Sequence
  Description of Artificial Sequence: Synthetic oligonucleotide
agaccucuguauuagaguu

SEQ ID NO: 3244585 - RNA, 19 nt, Artificial Sequence
  Description of Artificial Sequence: Synthetic oligonucleotide
aaaugagauguggcccacc

SEQ ID NO: 3244586 - RNA, 19 nt, Artificial Sequence
  Description of Artificial Sequence: Synthetic oligonucleotide
uucuucaugcccagcagaa

SEQ ID NO: 3244587 - RNA, 19 nt, Artificial Sequence
  Description of Artificial Sequence: Synthetic oligonucleotide
cacauggucaguagagaag

SEQ ID NO: 3244588 - RNA, 19 nt, Artificial Sequence
  Description of Artificial Sequence: Synthetic oligonucleotide
aguagagaagacaugcaca

SEQ ID NO: 3244589 - RNA, 19 nt, Artificial Sequence
  Description of Artificial Sequence: Synthetic oligonucleotide
acauggucaguagagaaga

SEQ ID NO: 3244590 - RNA, 19 nt, Artificial Sequence
  Description of Artificial Sequence: Synthetic oligonucleotide
aguucauccaccucacgaa

SEQ ID NO: 3244591 - RNA, 19 nt, Artificial Sequence
  Description of Artificial Sequence: Synthetic oligonucleotide
gauguggcccaccuugagc

SEQ ID NO: 3244592 - RNA, 19 nt, Artificial Sequence
  Description of Artificial Sequence: Synthetic oligonucleotide
accugaguguggcuggaac

SEQ ID NO: 3244593 - RNA, 19 nt, Artificial Sequence
  Description of Artificial Sequence: Synthetic oligonucleotide
ucacgaagcgaguagucaa

SEQ ID NO: 3244594 - RNA, 19 nt, Artificial Sequence
  Description of Artificial Sequence: Synthetic oligonucleotide
cuuguggcuguguagcaac

SEQ ID NO: 3244595 - RNA, 19 nt, Artificial Sequence
  Description of Artificial Sequence: Synthetic oligonucleotide
cacaaacucaaaugagaug

SEQ ID NO: 3244596 - RNA, 19 nt, Artificial Sequence
  Description of Artificial Sequence: Synthetic oligonucleotide
aacuugaaguacccacaga

SEQ ID NO: 3244597 - RNA, 19 nt, Artificial Sequence
  Description of Artificial Sequence: Synthetic oligonucleotide
aagggaaucugguccaguu

SEQ ID NO: 3244598 - RNA, 19 nt, Artificial Sequence
  Description of Artificial Sequence: Synthetic oligonucleotide
cagcagaacucgcugaggc

SEQ ID NO: 3244599 - RNA, 19 nt, Artificial Sequence
  Description of Artificial Sequence: Synthetic oligonucleotide
gaagacaugcacauccauc

SEQ ID NO: 3244600 - RNA, 19 nt, Artificial Sequence
  Description of Artificial Sequence: Synthetic oligonucleotide
ucuuccugcagcucccucu

SEQ ID NO: 3244601 - RNA, 19 nt, Artificial Sequence
  Description of Artificial Sequence: Synthetic oligonucleotide
guucauccaccucacgaag

SEQ ID NO: 3244602 - RNA, 19 nt, Artificial Sequence
  Description of Artificial Sequence: Synthetic oligonucleotide
cuccucggaacccacaaac

SEQ ID NO: 3244603 - RNA, 19 nt, Artificial Sequence
  Description of Artificial Sequence: Synthetic oligonucleotide
ucgucacucucugugggcg

SEQ ID NO: 3244604 - RNA, 19 nt, Artificial Sequence
  Description of Artificial Sequence: Synthetic oligonucleotide
caucaggccacaugucugc

SEQ ID NO: 3244605 - RNA, 19 nt, Artificial Sequence
  Description of Artificial Sequence: Synthetic oligonucleotide
agcgaguagucaaggaugg

SEQ ID NO: 3244606 - RNA, 19 nt, Artificial Sequence
  Description of Artificial Sequence: Synthetic oligonucleotide
ucggaacccacaaacucaa

SEQ ID NO: 3244607 - RNA, 19 nt, Artificial Sequence
  Description of Artificial Sequence: Synthetic oligonucleotide
uagucaaggaugguguccu

SEQ ID NO: 3244608 - RNA, 19 nt, Artificial Sequence
  Description of Artificial Sequence: Synthetic oligonucleotide
guauuagaguucauccacc

SEQ ID NO: 3244609 - RNA, 19 nt, Artificial Sequence
  Description of Artificial Sequence: Synthetic oligonucleotide
gucugcaaagggaaucugg

SEQ ID NO: 3244610 - RNA, 19 nt, Artificial Sequence
  Description of Artificial Sequence: Synthetic oligonucleotide
guagcaaccugaguguggc

SEQ ID NO: 3244611 - RNA, 19 nt, Artificial Sequence
  Description of Artificial Sequence: Synthetic oligonucleotide
uccugauccuggaacuuga

SEQ ID NO: 3244612 - RNA, 19 nt, Artificial Sequence
  Description of Artificial Sequence: Synthetic oligonucleotide
uguagagccuggaggcgcc

SEQ ID NO: 3244613 - RNA, 19 nt, Artificial Sequence
  Description of Artificial Sequence: Synthetic oligonucleotide
ccuuccugcacuuugcccc

SEQ ID NO: 3244614 - RNA, 19 nt, Artificial Sequence
  Description of Artificial Sequence: Synthetic oligonucleotide
cuguauuagaguucaucca

SEQ ID NO: 3244615 - RNA, 19 nt, Artificial Sequence
  Description of Artificial Sequence: Synthetic oligonucleotide
gaaguacccacagaacuuc

SEQ ID NO: 3244616 - RNA, 19 nt, Artificial Sequence
  Description of Artificial Sequence: Synthetic oligonucleotide
ucaugcccagcagaacucg

SEQ ID NO: 3244617 - RNA, 19 nt, Artificial Sequence
  Description of Artificial Sequence: Synthetic oligonucleotide
aaauguuaaaaguaaaacg

SEQ ID NO: 3244618 - RNA, 19 nt, Artificial Sequence
  Description of Artificial Sequence: Synthetic oligonucleotide
aauguuaaaaguaaaacgg

SEQ ID NO: 3244619 - RNA, 19 nt, Artificial Sequence
  Description of Artificial Sequence: Synthetic oligonucleotide
augacaaauaaauauacuc

SEQ ID NO: 3244620 - RNA, 19 nt, Artificial Sequence
  Description of Artificial Sequence: Synthetic oligonucleotide
aaauauacucccauuaggc

SEQ ID NO: 3244621 - RNA, 19 nt, Artificial Sequence
  Description of Artificial Sequence: Synthetic oligonucleotide
uuaaaaguaaaacggauac

SEQ ID NO: 3244622 - RNA, 19 nt, Artificial Sequence
  Description of Artificial Sequence: Synthetic oligonucleotide
ugacaaauaaauauacucc

SEQ ID NO: 3244623 - RNA, 19 nt, Artificial Sequence
  Description of Artificial Sequence: Synthetic oligonucleotide
uaaauauacucccauuagg

SEQ ID NO: 3244624 - RNA, 19 nt, Artificial Sequence
  Description of Artificial Sequence: Synthetic oligonucleotide
aaaacggauacuucugugg

SEQ ID NO: 3244625 - RNA, 19 nt, Artificial Sequence
  Description of Artificial Sequence: Synthetic oligonucleotide
gacaaauaaauauacuccc

SEQ ID NO: 3244626 - RNA, 19 nt, Artificial Sequence
  Description of Artificial Sequence: Synthetic oligonucleotide
aauaaauauacucccauua

SEQ ID NO: 3244627 - RNA, 19 nt, Artificial Sequence
  Description of Artificial Sequence: Synthetic oligonucleotide
gaaacuugaggucaaaggc

SEQ ID NO: 3244628 - RNA, 19 nt, Artificial Sequence
  Description of Artificial Sequence: Synthetic oligonucleotide
agagaaaugauggacaagg

SEQ ID NO: 3244629 - RNA, 19 nt, Artificial Sequence
  Description of Artificial Sequence: Synthetic oligonucleotide
aaaauguuuccaaagcacg

SEQ ID NO: 3244630 - RNA, 19 nt, Artificial Sequence
  Description of Artificial Sequence: Synthetic oligonucleotide
aaguaaaacggauacuucu

SEQ ID NO: 3244631 - RNA, 19 nt, Artificial Sequence
  Description of Artificial Sequence: Synthetic oligonucleotide
auauuuguuguacucuccc

SEQ ID NO: 3244632 - RNA, 19 nt, Artificial Sequence
  Description of Artificial Sequence: Synthetic oligonucleotide
agaaaugauggacaaggcg

SEQ ID NO: 3244633 - RNA, 19 nt, Artificial Sequence
  Description of Artificial Sequence: Synthetic oligonucleotide
uucucaaaagaugaaaucc

SEQ ID NO: 3244634 - RNA, 19 nt, Artificial Sequence
  Description of Artificial Sequence: Synthetic oligonucleotide
ucucaaaagaugaaauccc

SEQ ID NO: 3244635 - RNA, 19 nt, Artificial Sequence
  Description of Artificial Sequence: Synthetic oligonucleotide
auaaauauacucccauuag

SEQ ID NO: 3244636 - RNA, 19 nt, Artificial Sequence
  Description of Artificial Sequence: Synthetic oligonucleotide
aaaaguaaaacggauacuu

SEQ ID NO: 3244637 - RNA, 19 nt, Artificial Sequence
  Description of Artificial Sequence: Synthetic oligonucleotide
gaaauguuaaaaguaaaac

SEQ ID NO: 3244638 - RNA, 19 nt, Artificial Sequence
  Description of Artificial Sequence: Synthetic oligonucleotide
ucagaaauguuaaaaguaa

SEQ ID NO: 3244639 - RNA, 19 nt, Artificial Sequence
  Description of Artificial Sequence: Synthetic oligonucleotide
acaaugagcacucuccuuc

SEQ ID NO: 3244640 - RNA, 19 nt, Artificial Sequence
  Description of Artificial Sequence: Synthetic oligonucleotide
auauacucccauuaggcag

SEQ ID NO: 3244641 - RNA, 19 nt, Artificial Sequence
  Description of Artificial Sequence: Synthetic oligonucleotide
auuuguuguacucuccccg

SEQ ID NO: 3244642 - RNA, 19 nt, Artificial Sequence
  Description of Artificial Sequence: Synthetic oligonucleotide
aagacucucuggaugaugc

SEQ ID NO: 3244643 - RNA, 19 nt, Artificial Sequence
  Description of Artificial Sequence: Synthetic oligonucleotide
aauauacucccauuaggca

SEQ ID NO: 3244644 - RNA, 19 nt, Artificial Sequence
  Description of Artificial Sequence: Synthetic oligonucleotide
uccgaugacaaauaaauau

SEQ ID NO: 3244645 - RNA, 19 nt, Artificial Sequence
  Description of Artificial Sequence: Synthetic oligonucleotide
uauggucgcauacaaauga

SEQ ID NO: 3244646 - RNA, 19 nt, Artificial Sequence
  Description of Artificial Sequence: Synthetic oligonucleotide
uguauggucgcauacaaau

SEQ ID NO: 3244647 - RNA, 19 nt, Artificial Sequence
  Description of Artificial Sequence: Synthetic oligonucleotide
acacaacccacacaaagac

SEQ ID NO: 3244648 - RNA, 19 nt, Artificial Sequence
  Description of Artificial Sequence: Synthetic oligonucleotide
acagaauggccagagaccc

SEQ ID NO: 3244649 - RNA, 19 nt, Artificial Sequence
  Description of Artificial Sequence: Synthetic oligonucleotide
uguuaaaaguaaaacggau

SEQ ID NO: 3244650 - RNA, 19 nt, Artificial Sequence
  Description of Artificial Sequence: Synthetic oligonucleotide
gaugaugcuugccaagagg

SEQ ID NO: 3244651 - RNA, 19 nt, Artificial Sequence
  Description of Artificial Sequence: Synthetic oligonucleotide
ugaacugacaaugagcacu

SEQ ID NO: 3244652 - RNA, 19 nt, Artificial Sequence
  Description of Artificial Sequence: Synthetic oligonucleotide
uuguucucagaccugaugu

SEQ ID NO: 3244653 - RNA, 19 nt, Artificial Sequence
  Description of Artificial Sequence: Synthetic oligonucleotide
ucuguggacagaauggcca

SEQ ID NO: 3244654 - RNA, 19 nt, Artificial Sequence
  Description of Artificial Sequence: Synthetic oligonucleotide
cagcacagagaaaugaugg

SEQ ID NO: 3244655 - RNA, 19 nt, Artificial Sequence
  Description of Artificial Sequence: Synthetic oligonucleotide
cugacaaugagcacucucc

SEQ ID NO: 3244656 - RNA, 19 nt, Artificial Sequence
  Description of Artificial Sequence: Synthetic oligonucleotide
caugaacugacaaugagca

SEQ ID NO: 3244657 - RNA, 19 nt, Artificial Sequence
  Description of Artificial Sequence: Synthetic oligonucleotide
agacacaacccacacaaag

SEQ ID NO: 3244658 - RNA, 19 nt, Artificial Sequence
  Description of Artificial Sequence: Synthetic oligonucleotide
aaacggauacuucugugga

SEQ ID NO: 3244659 - RNA, 19 nt, Artificial Sequence
  Description of Artificial Sequence: Synthetic oligonucleotide
aaggcgugcagcuuguucu

SEQ ID NO: 3244660 - RNA, 19 nt, Artificial Sequence
  Description of Artificial Sequence: Synthetic oligonucleotide
aaaguaaaacggauacuuc

SEQ ID NO: 3244661 - RNA, 19 nt, Artificial Sequence
  Description of Artificial Sequence: Synthetic oligonucleotide
aaauaaauauacucccauu

SEQ ID NO: 3244662 - RNA, 19 nt, Artificial Sequence
  Description of Artificial Sequence: Synthetic oligonucleotide
uacuucuguggacagaaug

SEQ ID NO: 3244663 - RNA, 19 nt, Artificial Sequence
  Description of Artificial Sequence: Synthetic oligonucleotide
acaacccacacaaagacuc

SEQ ID NO: 3244664 - RNA, 19 nt, Artificial Sequence
  Description of Artificial Sequence: Synthetic oligonucleotide
ucucagaccugauguaugg

SEQ ID NO: 3244665 - RNA, 19 nt, Artificial Sequence
  Description of Artificial Sequence: Synthetic oligonucleotide
aaagcacgugacugcagac

SEQ ID NO: 3244666 - RNA, 19 nt, Artificial Sequence
  Description of Artificial Sequence: Synthetic oligonucleotide
aacggauacuucuguggac

SEQ ID NO: 3244667 - RNA, 19 nt, Artificial Sequence
  Description of Artificial Sequence: Synthetic oligonucleotide
uuuccaaagcacgugacug

SEQ ID NO: 3244668 - RNA, 19 nt, Artificial Sequence
  Description of Artificial Sequence: Synthetic oligonucleotide
caaaagaugaaaucccauc

SEQ ID NO: 3244669 - RNA, 19 nt, Artificial Sequence
  Description of Artificial Sequence: Synthetic oligonucleotide
aacuugaggucaaaggcuc

SEQ ID NO: 3244670 - RNA, 19 nt, Artificial Sequence
  Description of Artificial Sequence: Synthetic oligonucleotide
aauguuuccaaagcacgug

SEQ ID NO: 3244671 - RNA, 19 nt, Artificial Sequence
  Description of Artificial Sequence: Synthetic oligonucleotide
aaugauggacaaggcgugc

SEQ ID NO: 3244672 - RNA, 19 nt, Artificial Sequence
  Description of Artificial Sequence: Synthetic oligonucleotide
agcacgugacugcagacac

SEQ ID NO: 3244673 - RNA, 19 nt, Artificial Sequence
  Description of Artificial Sequence: Synthetic oligonucleotide
acaaagacucucuggauga

SEQ ID NO: 3244674 - RNA, 19 nt, Artificial Sequence
  Description of Artificial Sequence: Synthetic oligonucleotide
acucccauuaggcagucag

SEQ ID NO: 3244675 - RNA, 19 nt, Artificial Sequence
  Description of Artificial Sequence: Synthetic oligonucleotide
uauacucccauuaggcagu

SEQ ID NO: 3244676 - RNA, 19 nt, Artificial Sequence
  Description of Artificial Sequence: Synthetic oligonucleotide
aggucaaaggcuccgauga

SEQ ID NO: 3244677 - RNA, 19 nt, Artificial Sequence
  Description of Artificial Sequence: Synthetic oligonucleotide
ucgcauacaaaugacaaaa

SEQ ID NO: 3244678 - RNA, 19 nt, Artificial Sequence
  Description of Artificial Sequence: Synthetic oligonucleotide
uaaaacggauacuucugug

SEQ ID NO: 3244679 - RNA, 19 nt, Artificial Sequence
  Description of Artificial Sequence: Synthetic oligonucleotide
acugacaaugagcacucuc

SEQ ID NO: 3244680 - RNA, 19 nt, Artificial Sequence
  Description of Artificial Sequence: Synthetic oligonucleotide
acuucuguggacagaaugg

SEQ ID NO: 3244681 - RNA, 19 nt, Artificial Sequence
  Description of Artificial Sequence: Synthetic oligonucleotide
cagaccugauguauggucg

SEQ ID NO: 3244682 - RNA, 19 nt, Artificial Sequence
  Description of Artificial Sequence: Synthetic oligonucleotide
ugagcacucuccuuccacg

SEQ ID NO: 3244683 - RNA, 19 nt, Artificial Sequence
  Description of Artificial Sequence: Synthetic oligonucleotide
aaacuugaggucaaaggcu

SEQ ID NO: 3244684 - RNA, 19 nt, Artificial Sequence
  Description of Artificial Sequence: Synthetic oligonucleotide
uauuuguuguacucucccc

SEQ ID NO: 3244685 - RNA, 19 nt, Artificial Sequence
  Description of Artificial Sequence: Synthetic oligonucleotide
aagagguucucaaaagaug

SEQ ID NO: 3244686 - RNA, 19 nt, Artificial Sequence
  Description of Artificial Sequence: Synthetic oligonucleotide
gaaaugauggacaaggcgu

SEQ ID NO: 3244687 - RNA, 19 nt, Artificial Sequence
  Description of Artificial Sequence: Synthetic oligonucleotide
uuaggcagucagcacagca

SEQ ID NO: 3244688 - RNA, 19 nt, Artificial Sequence
  Description of Artificial Sequence: Synthetic oligonucleotide
ucaaaagaugaaaucccau

SEQ ID NO: 3244689 - RNA, 19 nt, Artificial Sequence
  Description of Artificial Sequence: Synthetic oligonucleotide
aaaggcuccgaugacaaau

SEQ ID NO: 3244690 - RNA, 19 nt, Artificial Sequence
  Description of Artificial Sequence: Synthetic oligonucleotide
uccagcgucagaaauguua

SEQ ID NO: 3244691 - RNA, 19 nt, Artificial Sequence
  Description of Artificial Sequence: Synthetic oligonucleotide
cauauuuguuguacucucc

SEQ ID NO: 3244692 - RNA, 19 nt, Artificial Sequence
  Description of Artificial Sequence: Synthetic oligonucleotide
agaccugauguauggucgc

SEQ ID NO: 3244693 - RNA, 19 nt, Artificial Sequence
  Description of Artificial Sequence: Synthetic oligonucleotide
ucaaaggcuccgaugacaa

SEQ ID NO: 3244694 - RNA, 19 nt, Artificial Sequence
  Description of Artificial Sequence: Synthetic oligonucleotide
aaauguuuccaaagcacgu

SEQ ID NO: 3244695 - RNA, 19 nt, Artificial Sequence
  Description of Artificial Sequence: Synthetic oligonucleotide
aaaugauggacaaggcgug

SEQ ID NO: 3244696 - RNA, 19 nt, Artificial Sequence
  Description of Artificial Sequence: Synthetic oligonucleotide
cacaaagacucucuggaug

SEQ ID NO: 3244697 - RNA, 19 nt, Artificial Sequence
  Description of Artificial Sequence: Synthetic oligonucleotide
agagguucucaaaagauga

SEQ ID NO: 3244698 - RNA, 19 nt, Artificial Sequence
  Description of Artificial Sequence: Synthetic oligonucleotide
gucagcacagcacagagaa

SEQ ID NO: 3244699 - RNA, 19 nt, Artificial Sequence
  Description of Artificial Sequence: Synthetic oligonucleotide
uuuguuguacucuccccga

SEQ ID NO: 3244700 - RNA, 19 nt, Artificial Sequence
  Description of Artificial Sequence: Synthetic oligonucleotide
ucuccccgaaacuugaggu

SEQ ID NO: 3244701 - RNA, 19 nt, Artificial Sequence
  Description of Artificial Sequence: Synthetic oligonucleotide
agaaauguuaaaaguaaaa

SEQ ID NO: 3244702 - RNA, 19 nt, Artificial Sequence
  Description of Artificial Sequence: Synthetic oligonucleotide
guucucaaaagaugaaauc

SEQ ID NO: 3244703 - RNA, 19 nt, Artificial Sequence
  Description of Artificial Sequence: Synthetic oligonucleotide
gacagaauggccagagacc

SEQ ID NO: 3244704 - RNA, 19 nt, Artificial Sequence
  Description of Artificial Sequence: Synthetic oligonucleotide
uaaaaguaaaacggauacu

SEQ ID NO: 3244705 - RNA, 19 nt, Artificial Sequence
  Description of Artificial Sequence: Synthetic oligonucleotide
cauuaggcagucagcacag

SEQ ID NO: 3244706 - RNA, 19 nt, Artificial Sequence
  Description of Artificial Sequence: Synthetic oligonucleotide
uuuccagcgucagaaaugu

SEQ ID NO: 3244707 - RNA, 19 nt, Artificial Sequence
  Description of Artificial Sequence: Synthetic oligonucleotide
aguaaaacggauacuucug

SEQ ID NO: 3244708 - RNA, 19 nt, Artificial Sequence
  Description of Artificial Sequence: Synthetic oligonucleotide
ugacaaugagcacucuccu

SEQ ID NO: 3244709 - RNA, 19 nt, Artificial Sequence
  Description of Artificial Sequence: Synthetic oligonucleotide
uucucagaccugauguaug

SEQ ID NO: 3244710 - RNA, 19 nt, Artificial Sequence
  Description of Artificial Sequence: Synthetic oligonucleotide
uucuguggacagaauggcc

SEQ ID NO: 3244711 - RNA, 19 nt, Artificial Sequence
  Description of Artificial Sequence: Synthetic oligonucleotide
ugccaagagguucucaaaa

SEQ ID NO: 3244712 - RNA, 19 nt, Artificial Sequence
  Description of Artificial Sequence: Synthetic oligonucleotide
gauguauggucgcauacaa

SEQ ID NO: 3244713 - RNA, 19 nt, Artificial Sequence
  Description of Artificial Sequence: Synthetic oligonucleotide
ugauggacaaggcgugcag

SEQ ID NO: 3244714 - RNA, 19 nt, Artificial Sequence
  Description of Artificial Sequence: Synthetic oligonucleotide
ucagaccugauguaugguc

SEQ ID NO: 3244715 - RNA, 19 nt, Artificial Sequence
  Description of Artificial Sequence: Synthetic oligonucleotide
cacacaaagacucucugga

SEQ ID NO: 3244716 - RNA, 19 nt, Artificial Sequence
  Description of Artificial Sequence: Synthetic oligonucleotide
augagcacucuccuuccac

SEQ ID NO: 3244717 - RNA, 19 nt, Artificial Sequence
  Description of Artificial Sequence: Synthetic oligonucleotide
aauguuaucaagcagaaac

SEQ ID NO: 3244718 - RNA, 19 nt, Artificial Sequence
  Description of Artificial Sequence: Synthetic oligonucleotide
aaauguaauauacuuaugc

SEQ ID NO: 3244719 - RNA, 19 nt, Artificial Sequence
  Description of Artificial Sequence: Synthetic oligonucleotide
acaaacaugauauaaaagc

SEQ ID NO: 3244720 - RNA, 19 nt, Artificial Sequence
  Description of Artificial Sequence: Synthetic oligonucleotide
auauaauuuagauuuaagg

SEQ ID NO: 3244721 - RNA, 19 nt, Artificial Sequence
  Description of Artificial Sequence: Synthetic oligonucleotide
uugauuacaacacagaacu

SEQ ID NO: 3244722 - RNA, 19 nt, Artificial Sequence
  Description of Artificial Sequence: Synthetic oligonucleotide
aaagcaacaacaaauuugc

SEQ ID NO: 3244723 - RNA, 19 nt, Artificial Sequence
  Description of Artificial Sequence: Synthetic oligonucleotide
uauaauuuagauuuaaggu

SEQ ID NO: 3244724 - RNA, 19 nt, Artificial Sequence
  Description of Artificial Sequence: Synthetic oligonucleotide
agcaaauagucacagaacc

SEQ ID NO: 3244725 - RNA, 19 nt, Artificial Sequence
  Description of Artificial Sequence: Synthetic oligonucleotide
uaauacuuuggucagagag

SEQ ID NO: 3244726 - RNA, 19 nt, Artificial Sequence
  Description of Artificial Sequence: Synthetic oligonucleotide
gaucugacaacucagaaag

SEQ ID NO: 3244727 - RNA, 19 nt, Artificial Sequence
  Description of Artificial Sequence: Synthetic oligonucleotide
uaacacaguauaaugaggg

SEQ ID NO: 3244728 - RNA, 19 nt, Artificial Sequence
  Description of Artificial Sequence: Synthetic oligonucleotide
acaaacagcaaauagucac

SEQ ID NO: 3244729 - RNA, 19 nt, Artificial Sequence
  Description of Artificial Sequence: Synthetic oligonucleotide
cuuaguaucauguauguac

SEQ ID NO: 3244730 - RNA, 19 nt, Artificial Sequence
  Description of Artificial Sequence: Synthetic oligonucleotide
agagcguagauacugaugg

SEQ ID NO: 3244731 - RNA, 19 nt, Artificial Sequence
  Description of Artificial Sequence: Synthetic oligonucleotide
augauauaaaagcuaaaac

SEQ ID NO: 3244732 - RNA, 19 nt, Artificial Sequence
  Description of Artificial Sequence: Synthetic oligonucleotide
aauguaauauacuuaugca

SEQ ID NO: 3244733 - RNA, 19 nt, Artificial Sequence
  Description of Artificial Sequence: Synthetic oligonucleotide
uuagcuuugcauuuguggg

SEQ ID NO: 3244734 - RNA, 19 nt, Artificial Sequence
  Description of Artificial Sequence: Synthetic oligonucleotide
cauauuaccacuauagaug

SEQ ID NO: 3244735 - RNA, 19 nt, Artificial Sequence
  Description of Artificial Sequence: Synthetic oligonucleotide
uguaauauacuuaugcauc

SEQ ID NO: 3244736 - RNA, 19 nt, Artificial Sequence
  Description of Artificial Sequence: Synthetic oligonucleotide
agagauaguauaguaaggc

SEQ ID NO: 3244737 - RNA, 19 nt, Artificial Sequence
  Description of Artificial Sequence: Synthetic oligonucleotide
ugaucuuauacauuuaacu

SEQ ID NO: 3244738 - RNA, 19 nt, Artificial Sequence
  Description of Artificial Sequence: Synthetic oligonucleotide
aauacuuuggucagagagc

SEQ ID NO: 3244739 - RNA, 19 nt, Artificial Sequence
  Description of Artificial Sequence: Synthetic oligonucleotide
aagcaguuaaaauaaauaa

SEQ ID NO: 3244740 - RNA, 19 nt, Artificial Sequence
  Description of Artificial Sequence: Synthetic oligonucleotide
aagguaacgucacagaacu

SEQ ID NO: 3244741 - RNA, 19 nt, Artificial Sequence
  Description of Artificial Sequence: Synthetic oligonucleotide
aauacuuacagaaauuuga

SEQ ID NO: 3244742 - RNA, 19 nt, Artificial Sequence
  Description of Artificial Sequence: Synthetic oligonucleotide
uuaacuguuggacaugacc

SEQ ID NO: 3244743 - RNA, 19 nt, Artificial Sequence
  Description of Artificial Sequence: Synthetic oligonucleotide
aaauuuaguaaugucacca

SEQ ID NO: 3244744 - RNA, 19 nt, Artificial Sequence
  Description of Artificial Sequence: Synthetic oligonucleotide
uuuaguaaugucaccaaca

SEQ ID NO: 3244745 - RNA, 19 nt, Artificial Sequence
  Description of Artificial Sequence: Synthetic oligonucleotide
uuaugcaucuuacagauau

SEQ ID NO: 3244746 - RNA, 19 nt, Artificial Sequence
  Description of Artificial Sequence: Synthetic oligonucleotide
uugaacaauaguuuucuag

SEQ ID NO: 3244747 - RNA, 19 nt, Artificial Sequence
  Description of Artificial Sequence: Synthetic oligonucleotide
aaauaucuggaucugacaa

SEQ ID NO: 3244748 - RNA, 19 nt, Artificial Sequence
  Description of Artificial Sequence: Synthetic oligonucleotide
ugaacaauaguuuucuaga

SEQ ID NO: 3244749 - RNA, 19 nt, Artificial Sequence
  Description of Artificial Sequence: Synthetic oligonucleotide
uccaauguuaucaagcaga

SEQ ID NO: 3244750 - RNA, 19 nt, Artificial Sequence
  Description of Artificial Sequence: Synthetic oligonucleotide
auucaacuaccuucgaucc

SEQ ID NO: 3244751 - RNA, 19 nt, Artificial Sequence
  Description of Artificial Sequence: Synthetic oligonucleotide
gacuucaacagucugaaug

SEQ ID NO: 3244752 - RNA, 19 nt, Artificial Sequence
  Description of Artificial Sequence: Synthetic oligonucleotide
agauucaagguccaauccc

SEQ ID NO: 3244753 - RNA, 19 nt, Artificial Sequence
  Description of Artificial Sequence: Synthetic oligonucleotide
uguacaucaaggcacauuc

SEQ ID NO: 3244754 - RNA, 19 nt, Artificial Sequence
  Description of Artificial Sequence: Synthetic oligonucleotide
agaaaagaaauuuaguaau

SEQ ID NO: 3244755 - RNA, 19 nt, Artificial Sequence
  Description of Artificial Sequence: Synthetic oligonucleotide
aacacaguauaaugagggc

SEQ ID NO: 3244756 - RNA, 19 nt, Artificial Sequence
  Description of Artificial Sequence: Synthetic oligonucleotide
uacaaguucauguuuagac

SEQ ID NO: 3244757 - RNA, 19 nt, Artificial Sequence
  Description of Artificial Sequence: Synthetic oligonucleotide
ugaaugaauauaauuuaga

SEQ ID NO: 3244758 - RNA, 19 nt, Artificial Sequence
  Description of Artificial Sequence: Synthetic oligonucleotide
uaguuauuuucaaauaucu

SEQ ID NO: 3244759 - RNA, 19 nt, Artificial Sequence
  Description of Artificial Sequence: Synthetic oligonucleotide
uuauaguccaauguuauca

SEQ ID NO: 3244760 - RNA, 19 nt, Artificial Sequence
  Description of Artificial Sequence: Synthetic oligonucleotide
uaauuuuacacuugaagaa

SEQ ID NO: 3244761 - RNA, 19 nt, Artificial Sequence
  Description of Artificial Sequence: Synthetic oligonucleotide
uuuaauaacaguacucuuu

SEQ ID NO: 3244762 - RNA, 19 nt, Artificial Sequence
  Description of Artificial Sequence: Synthetic oligonucleotide
aaauaagucaaguaucaua

SEQ ID NO: 3244763 - RNA, 19 nt, Artificial Sequence
  Description of Artificial Sequence: Synthetic oligonucleotide
cuaacaguuauauagcauc

SEQ ID NO: 3244764 - RNA, 19 nt, Artificial Sequence
  Description of Artificial Sequence: Synthetic oligonucleotide
ucucuguucauuuagcugu

SEQ ID NO: 3244765 - RNA, 19 nt, Artificial Sequence
  Description of Artificial Sequence: Synthetic oligonucleotide
uaucuaacaguuauauagc

SEQ ID NO: 3244766 - RNA, 19 nt, Artificial Sequence
  Description of Artificial Sequence: Synthetic oligonucleotide
uuuacauauaaucucuuua

SEQ ID NO: 3244767 - RNA, 19 nt, Artificial Sequence
  Description of Artificial Sequence: Synthetic oligonucleotide
ucaauuaacaagguaacgu

SEQ ID NO: 3244768 - RNA, 19 nt, Artificial Sequence
  Description of Artificial Sequence: Synthetic oligonucleotide
uuagcuguuucaaaacugc

SEQ ID NO: 3244769 - RNA, 19 nt, Artificial Sequence
  Description of Artificial Sequence: Synthetic oligonucleotide
aauauaauuuagauuuaag

SEQ ID NO: 3244770 - RNA, 19 nt, Artificial Sequence
  Description of Artificial Sequence: Synthetic oligonucleotide
uucauguuuagacacuggc

SEQ ID NO: 3244771 - RNA, 19 nt, Artificial Sequence
  Description of Artificial Sequence: Synthetic oligonucleotide
uuauuuacauauuucugac

SEQ ID NO: 3244772 - RNA, 19 nt, Artificial Sequence
  Description of Artificial Sequence: Synthetic oligonucleotide
auuuaguaaugucaccaac

SEQ ID NO: 3244773 - RNA, 19 nt, Artificial Sequence
  Description of Artificial Sequence: Synthetic oligonucleotide
aaauggaacauaaaagaca

SEQ ID NO: 3244774 - RNA, 19 nt, Artificial Sequence
  Description of Artificial Sequence: Synthetic oligonucleotide
gauucaacuaccuucgauc

SEQ ID NO: 3244775 - RNA, 19 nt, Artificial Sequence
  Description of Artificial Sequence: Synthetic oligonucleotide
aauggaacauaaaagacaa

SEQ ID NO: 3244776 - RNA, 19 nt, Artificial Sequence
  Description of Artificial Sequence: Synthetic oligonucleotide
gaugcugacagcauguucc

SEQ ID NO: 3244777 - RNA, 19 nt, Artificial Sequence
  Description of Artificial Sequence: Synthetic oligonucleotide
aagaacguuuaaccacucc

SEQ ID NO: 3244778 - RNA, 19 nt, Artificial Sequence
  Description of Artificial Sequence: Synthetic oligonucleotide
accaaacuuaacuucuucg

SEQ ID NO: 3244779 - RNA, 19 nt, Artificial Sequence
  Description of Artificial Sequence: Synthetic oligonucleotide
uauauagcauccauauuac

SEQ ID NO: 3244780 - RNA, 19 nt, Artificial Sequence
  Description of Artificial Sequence: Synthetic oligonucleotide
acauaccaaacuuaacuuc

SEQ ID NO: 3244781 - RNA, 19 nt, Artificial Sequence
  Description of Artificial Sequence: Synthetic oligonucleotide
uaguccaauguuaucaagc

SEQ ID NO: 3244782 - RNA, 19 nt, Artificial Sequence
  Description of Artificial Sequence: Synthetic oligonucleotide
uccuacagaacucauuggc

SEQ ID NO: 3244783 - RNA, 19 nt, Artificial Sequence
  Description of Artificial Sequence: Synthetic oligonucleotide
acagcaaauagucacagaa

SEQ ID NO: 3244784 - RNA, 19 nt, Artificial Sequence
  Description of Artificial Sequence: Synthetic oligonucleotide
agaaacuucccaucaacag

SEQ ID NO: 3244785 - RNA, 19 nt, Artificial Sequence
  Description of Artificial Sequence: Synthetic oligonucleotide
aguaaaguggaauaagcau

SEQ ID NO: 3244786 - RNA, 19 nt, Artificial Sequence
  Description of Artificial Sequence: Synthetic oligonucleotide
uaugaucuuauacauuuaa

SEQ ID NO: 3244787 - RNA, 19 nt, Artificial Sequence
  Description of Artificial Sequence: Synthetic oligonucleotide
uuaauaacaguacucuuuu

SEQ ID NO: 3244788 - RNA, 19 nt, Artificial Sequence
  Description of Artificial Sequence: Synthetic oligonucleotide
uauuuauaguccaauguua

SEQ ID NO: 3244789 - RNA, 19 nt, Artificial Sequence
  Description of Artificial Sequence: Synthetic oligonucleotide
uacuccuuaaccuuacagc

SEQ ID NO: 3244790 - RNA, 19 nt, Artificial Sequence
  Description of Artificial Sequence: Synthetic oligonucleotide
auauuaccacuauagaugu

SEQ ID NO: 3244791 - RNA, 19 nt, Artificial Sequence
  Description of Artificial Sequence: Synthetic oligonucleotide
cuugauuacaacacagaac

SEQ ID NO: 3244792 - RNA, 19 nt, Artificial Sequence
  Description of Artificial Sequence: Synthetic oligonucleotide
acuaccuucgauccaacag

SEQ ID NO: 3244793 - RNA, 19 nt, Artificial Sequence
  Description of Artificial Sequence: Synthetic oligonucleotide
gaaguaaaguggaauaagc

SEQ ID NO: 3244794 - RNA, 19 nt, Artificial Sequence
  Description of Artificial Sequence: Synthetic oligonucleotide
auauucacuguuuugcuga

SEQ ID NO: 3244795 - RNA, 19 nt, Artificial Sequence
  Description of Artificial Sequence: Synthetic oligonucleotide
gagaagaacguuuaaccac

SEQ ID NO: 3244796 - RNA, 19 nt, Artificial Sequence
  Description of Artificial Sequence: Synthetic oligonucleotide
aaacuugauuacaacacag

SEQ ID NO: 3244797 - RNA, 19 nt, Artificial Sequence
  Description of Artificial Sequence: Synthetic oligonucleotide
gcuucaagaacuuccaugg

SEQ ID NO: 3244798 - RNA, 19 nt, Artificial Sequence
  Description of Artificial Sequence: Synthetic oligonucleotide
auaagcuguaaacgcgugc

SEQ ID NO: 3244799 - RNA, 19 nt, Artificial Sequence
  Description of Artificial Sequence: Synthetic oligonucleotide
uggaauaagcaucuuagua

SEQ ID NO: 3244800 - RNA, 19 nt, Artificial Sequence
  Description of Artificial Sequence: Synthetic oligonucleotide
aguggaauaagcaucuuag

SEQ ID NO: 3244801 - RNA, 19 nt, Artificial Sequence
  Description of Artificial Sequence: Synthetic oligonucleotide
aauuugcaaaugcacacau

SEQ ID NO: 3244802 - RNA, 19 nt, Artificial Sequence
  Description of Artificial Sequence: Synthetic oligonucleotide
uacauuuaacuaaauuuaa

SEQ ID NO: 3244803 - RNA, 19 nt, Artificial Sequence
  Description of Artificial Sequence: Synthetic oligonucleotide
uucaacaaauuuaaacaaa

SEQ ID NO: 3244804 - RNA, 19 nt, Artificial Sequence
  Description of Artificial Sequence: Synthetic oligonucleotide
uauaaacauuaauucauaa

SEQ ID NO: 3244805 - RNA, 19 nt, Artificial Sequence
  Description of Artificial Sequence: Synthetic oligonucleotide
caucuuaguaucauguaug

SEQ ID NO: 3244806 - RNA, 19 nt, Artificial Sequence
  Description of Artificial Sequence: Synthetic oligonucleotide
gaucuuauacauuuaacua

SEQ ID NO: 3244807 - RNA, 19 nt, Artificial Sequence
  Description of Artificial Sequence: Synthetic oligonucleotide
ugaaguaaaguggaauaag

SEQ ID NO: 3244808 - RNA, 19 nt, Artificial Sequence
  Description of Artificial Sequence: Synthetic oligonucleotide
gauuacaacacagaacuca

SEQ ID NO: 3244809 - RNA, 19 nt, Artificial Sequence
  Description of Artificial Sequence: Synthetic oligonucleotide
auauagcauccauauuacc

SEQ ID NO: 3244810 - RNA, 19 nt, Artificial Sequence
  Description of Artificial Sequence: Synthetic oligonucleotide
aauuuuacacuugaagaaa

SEQ ID NO: 3244811 - RNA, 19 nt, Artificial Sequence
  Description of Artificial Sequence: Synthetic oligonucleotide
auguaauauacuuaugcau

SEQ ID NO: 3244812 - RNA, 19 nt, Artificial Sequence
  Description of Artificial Sequence: Synthetic oligonucleotide
gcaguuaagaugcugacag

SEQ ID NO: 3244813 - RNA, 19 nt, Artificial Sequence
  Description of Artificial Sequence: Synthetic oligonucleotide
uucaauuaacaagguaacg

SEQ ID NO: 3244814 - RNA, 19 nt, Artificial Sequence
  Description of Artificial Sequence: Synthetic oligonucleotide
aauuuaguaaugucaccaa

SEQ ID NO: 3244815 - RNA, 19 nt, Artificial Sequence
  Description of Artificial Sequence: Synthetic oligonucleotide
cuucaauuaacaagguaac

SEQ ID NO: 3244816 - RNA, 19 nt, Artificial Sequence
  Description of Artificial Sequence: Synthetic oligonucleotide
uucguuaacuuguucauuc

SEQ ID NO: 3244817 - RNA, 19 nt, Artificial Sequence
  Description of Artificial Sequence: Synthetic oligonucleotide
aacuccucgacauucccgc

SEQ ID NO: 3244818 - RNA, 19 nt, Artificial Sequence
  Description of Artificial Sequence: Synthetic oligonucleotide
aaugucucugaucacuccg

SEQ ID NO: 3244819 - RNA, 19 nt, Artificial Sequence
  Description of Artificial Sequence: Synthetic oligonucleotide
ugcuuagucaaaauaaucu

SEQ ID NO: 3244820 - RNA, 19 nt, Artificial Sequence
  Description of Artificial Sequence: Synthetic oligonucleotide
aaaauaaucuguucuccca

SEQ ID NO: 3244821 - RNA, 19 nt, Artificial Sequence
  Description of Artificial Sequence: Synthetic oligonucleotide
aaucuguucucccaaaaga

SEQ ID NO: 3244822 - RNA, 19 nt, Artificial Sequence
  Description of Artificial Sequence: Synthetic oligonucleotide
agucaaaauaaucuguucu

SEQ ID NO: 3244823 - RNA, 19 nt, Artificial Sequence
  Description of Artificial Sequence: Synthetic oligonucleotide
ucuguucucccaaaagacg

SEQ ID NO: 3244824 - RNA, 19 nt, Artificial Sequence
  Description of Artificial Sequence: Synthetic oligonucleotide
acaucuucucucuuucugc

SEQ ID NO: 3244825 - RNA, 19 nt, Artificial Sequence
  Description of Artificial Sequence: Synthetic oligonucleotide
aacaucuucucucuuucug

SEQ ID NO: 3244826 - RNA, 19 nt, Artificial Sequence
  Description of Artificial Sequence: Synthetic oligonucleotide
ucuuucugcuucaaguugc

SEQ ID NO: 3244827 - RNA, 19 nt, Artificial Sequence
  Description of Artificial Sequence: Synthetic oligonucleotide
uguuuugagauccucuuuc

SEQ ID NO: 3244828 - RNA, 19 nt, Artificial Sequence
  Description of Artificial Sequence: Synthetic oligonucleotide
uaaucuguucucccaaaag

SEQ ID NO: 3244829 - RNA, 19 nt, Artificial Sequence
  Description of Artificial Sequence: Synthetic oligonucleotide
ucugcuucaaguugcuuag

SEQ ID NO: 3244830 - RNA, 19 nt, Artificial Sequence
  Description of Artificial Sequence: Synthetic oligonucleotide
ucaaaauaaucuguucucc

SEQ ID NO: 3244831 - RNA, 19 nt, Artificial Sequence
  Description of Artificial Sequence: Synthetic oligonucleotide
caaaauaaucuguucuccc

SEQ ID NO: 3244832 - RNA, 19 nt, Artificial Sequence
  Description of Artificial Sequence: Synthetic oligonucleotide
uuagucaaaauaaucuguu

SEQ ID NO: 3244833 - RNA, 19 nt, Artificial Sequence
  Description of Artificial Sequence: Synthetic oligonucleotide
aaauaaucuguucucccaa

SEQ ID NO: 3244834 - RNA, 19 nt, Artificial Sequence
  Description of Artificial Sequence: Synthetic oligonucleotide
cuuuccaacaucuucucuc

SEQ ID NO: 3244835 - RNA, 19 nt, Artificial Sequence
  Description of Artificial Sequence: Synthetic oligonucleotide
ucucugaucacuccgucac

SEQ ID NO: 3244836 - RNA, 19 nt, Artificial Sequence
  Description of Artificial Sequence: Synthetic oligonucleotide
cucucaaugucucugauca

SEQ ID NO: 3244837 - RNA, 19 nt, Artificial Sequence
  Description of Artificial Sequence: Synthetic oligonucleotide
uuugagauccucuuuccaa

SEQ ID NO: 3244838 - RNA, 19 nt, Artificial Sequence
  Description of Artificial Sequence: Synthetic oligonucleotide
aagacgaauguuuucuuuu

SEQ ID NO: 3244839 - RNA, 19 nt, Artificial Sequence
  Description of Artificial Sequence: Synthetic oligonucleotide
gucagcagcaccgagaggc

SEQ ID NO: 3244840 - RNA, 19 nt, Artificial Sequence
  Description of Artificial Sequence: Synthetic oligonucleotide
ucucccaaaagacgaaugu

SEQ ID NO: 3244841 - RNA, 19 nt, Artificial Sequence
  Description of Artificial Sequence: Synthetic oligonucleotide
gucaaaauaaucuguucuc

SEQ ID NO: 3244842 - RNA, 19 nt, Artificial Sequence
  Description of Artificial Sequence: Synthetic oligonucleotide
ugaucacuccgucacgaag

SEQ ID NO: 3244843 - RNA, 19 nt, Artificial Sequence
  Description of Artificial Sequence: Synthetic oligonucleotide
aucuguucucccaaaagac

SEQ ID NO: 3244844 - RNA, 19 nt, Artificial Sequence
  Description of Artificial Sequence: Synthetic oligonucleotide
aaguugcuuagucaaaaua

SEQ ID NO: 3244845 - RNA, 19 nt, Artificial Sequence
  Description of Artificial Sequence: Synthetic oligonucleotide
aauaaucuguucucccaaa

SEQ ID NO: 3244846 - RNA, 19 nt, Artificial Sequence
  Description of Artificial Sequence: Synthetic oligonucleotide
uugcuuagucaaaauaauc

SEQ ID NO: 3244847 - RNA, 19 nt, Artificial Sequence
  Description of Artificial Sequence: Synthetic oligonucleotide
uuuugagauccucuuucca

SEQ ID NO: 3244848 - RNA, 19 nt, Artificial Sequence
  Description of Artificial Sequence: Synthetic oligonucleotide
aaagacgaauguuuucuuu

SEQ ID NO: 3244849 - RNA, 19 nt, Artificial Sequence
  Description of Artificial Sequence: Synthetic oligonucleotide
gucacgaagccucugccgg

SEQ ID NO: 3244850 - RNA, 19 nt, Artificial Sequence
  Description of Artificial Sequence: Synthetic oligonucleotide
ucgacauucccgcucccgg

SEQ ID NO: 3244851 - RNA, 19 nt, Artificial Sequence
  Description of Artificial Sequence: Synthetic oligonucleotide
gauucugccucucaauguc

SEQ ID NO: 3244852 - RNA, 19 nt, Artificial Sequence
  Description of Artificial Sequence: Synthetic oligonucleotide
ucccaaaagacgaauguuu

SEQ ID NO: 3244853 - RNA, 19 nt, Artificial Sequence
  Description of Artificial Sequence: Synthetic oligonucleotide
ucuucucucuuucugcuuc

SEQ ID NO: 3244854 - RNA, 19 nt, Artificial Sequence
  Description of Artificial Sequence: Synthetic oligonucleotide
aucacuccgucacgaagcc

SEQ ID NO: 3244855 - RNA, 19 nt, Artificial Sequence
  Description of Artificial Sequence: Synthetic oligonucleotide
uuuccaacaucuucucucu

SEQ ID NO: 3244856 - RNA, 19 nt, Artificial Sequence
  Description of Artificial Sequence: Synthetic oligonucleotide
aguugcuuagucaaaauaa

SEQ ID NO: 3244857 - RNA, 19 nt, Artificial Sequence
  Description of Artificial Sequence: Synthetic oligonucleotide
uccucuuuccaacaucuuc

SEQ ID NO: 3244858 - RNA, 19 nt, Artificial Sequence
  Description of Artificial Sequence: Synthetic oligonucleotide
uucugcuucaaguugcuua

SEQ ID NO: 3244859 - RNA, 19 nt, Artificial Sequence
  Description of Artificial Sequence: Synthetic oligonucleotide
gaucacuccgucacgaagc

SEQ ID NO: 3244860 - RNA, 19 nt, Artificial Sequence
  Description of Artificial Sequence: Synthetic oligonucleotide
uugagauccucuuuccaac

SEQ ID NO: 3244861 - RNA, 19 nt, Artificial Sequence
  Description of Artificial Sequence: Synthetic oligonucleotide
accgccuucgaacuccucg

SEQ ID NO: 3244862 - RNA, 19 nt, Artificial Sequence
  Description of Artificial Sequence: Synthetic oligonucleotide
uucagaugcacgccggcca

SEQ ID NO: 3244863 - RNA, 19 nt, Artificial Sequence
  Description of Artificial Sequence: Synthetic oligonucleotide
agauccucuuuccaacauc

SEQ ID NO: 3244864 - RNA, 19 nt, Artificial Sequence
  Description of Artificial Sequence: Synthetic oligonucleotide
uucucccaaaagacgaaug

SEQ ID NO: 3244865 - RNA, 19 nt, Artificial Sequence
  Description of Artificial Sequence: Synthetic oligonucleotide
guuuugagauccucuuucc

SEQ ID NO: 3244866 - RNA, 19 nt, Artificial Sequence
  Description of Artificial Sequence: Synthetic oligonucleotide
ucaaugucucugaucacuc

SEQ ID NO: 3244867 - RNA, 19 nt, Artificial Sequence
  Description of Artificial Sequence: Synthetic oligonucleotide
gcuuagucaaaauaaucug

SEQ ID NO: 3244868 - RNA, 19 nt, Artificial Sequence
  Description of Artificial Sequence: Synthetic oligonucleotide
aaaagacgaauguuuucuu

SEQ ID NO: 3244869 - RNA, 19 nt, Artificial Sequence
  Description of Artificial Sequence: Synthetic oligonucleotide
ugauucugccucucaaugu

SEQ ID NO: 3244870 - RNA, 19 nt, Artificial Sequence
  Description of Artificial Sequence: Synthetic oligonucleotide
cugauucugccucucaaug

SEQ ID NO: 3244871 - RNA, 19 nt, Artificial Sequence
  Description of Artificial Sequence: Synthetic oligonucleotide
cuucaaguugcuuagucaa

SEQ ID NO: 3244872 - RNA, 19 nt, Artificial Sequence
  Description of Artificial Sequence: Synthetic oligonucleotide
uagucaaaauaaucuguuc

SEQ ID NO: 3244873 - RNA, 19 nt, Artificial Sequence
  Description of Artificial Sequence: Synthetic oligonucleotide
aguguuuugagauccucuu

SEQ ID NO: 3244874 - RNA, 19 nt, Artificial Sequence
  Description of Artificial Sequence: Synthetic oligonucleotide
ucaaguugcuuagucaaaa

SEQ ID NO: 3244875 - RNA, 19 nt, Artificial Sequence
  Description of Artificial Sequence: Synthetic oligonucleotide
ugcuucaaguugcuuaguc

SEQ ID NO: 3244876 - RNA, 19 nt, Artificial Sequence
  Description of Artificial Sequence: Synthetic oligonucleotide
ugcuucagaugcacgccgg

SEQ ID NO: 3244877 - RNA, 19 nt, Artificial Sequence
  Description of Artificial Sequence: Synthetic oligonucleotide
ucucuuucugcuucaaguu

SEQ ID NO: 3244878 - RNA, 19 nt, Artificial Sequence
  Description of Artificial Sequence: Synthetic oligonucleotide
aaguguuuugagauccucu

SEQ ID NO: 3244879 - RNA, 19 nt, Artificial Sequence
  Description of Artificial Sequence: Synthetic oligonucleotide
cuuagucaaaauaaucugu

SEQ ID NO: 3244880 - RNA, 19 nt, Artificial Sequence
  Description of Artificial Sequence: Synthetic oligonucleotide
ugagauccucuuuccaaca

SEQ ID NO: 3244881 - RNA, 19 nt, Artificial Sequence
  Description of Artificial Sequence: Synthetic oligonucleotide
uccucgacauucccgcucc

SEQ ID NO: 3244882 - RNA, 19 nt, Artificial Sequence
  Description of Artificial Sequence: Synthetic oligonucleotide
ucucucuuucugcuucaag

SEQ ID NO: 3244883 - RNA, 19 nt, Artificial Sequence
  Description of Artificial Sequence: Synthetic oligonucleotide
cuguucucccaaaagacga

SEQ ID NO: 3244884 - RNA, 19 nt, Artificial Sequence
  Description of Artificial Sequence: Synthetic oligonucleotide
uucugauucugccucucaa

SEQ ID NO: 3244885 - RNA, 19 nt, Artificial Sequence
  Description of Artificial Sequence: Synthetic oligonucleotide
agcaccgccuucgaacucc

SEQ ID NO: 3244886 - RNA, 19 nt, Artificial Sequence
  Description of Artificial Sequence: Synthetic oligonucleotide
ucugauucugccucucaau

SEQ ID NO: 3244887 - RNA, 19 nt, Artificial Sequence
  Description of Artificial Sequence: Synthetic oligonucleotide
ucugaucacuccgucacga

SEQ ID NO: 3244888 - RNA, 19 nt, Artificial Sequence
  Description of Artificial Sequence: Synthetic oligonucleotide
auaaucuguucucccaaaa

SEQ ID NO: 3244889 - RNA, 19 nt, Artificial Sequence
  Description of Artificial Sequence: Synthetic oligonucleotide
cucuuucugcuucaaguug

SEQ ID NO: 3244890 - RNA, 19 nt, Artificial Sequence
  Description of Artificial Sequence: Synthetic oligonucleotide
cacuccgucacgaagccuc

SEQ ID NO: 3244891 - RNA, 19 nt, Artificial Sequence
  Description of Artificial Sequence: Synthetic oligonucleotide
ucuuuccaacaucuucucu

SEQ ID NO: 3244892 - RNA, 19 nt, Artificial Sequence
  Description of Artificial Sequence: Synthetic oligonucleotide
uccgucacgaagccucugc

SEQ ID NO: 3244893 - RNA, 19 nt, Artificial Sequence
  Description of Artificial Sequence: Synthetic oligonucleotide
uucaaguugcuuagucaaa

SEQ ID NO: 3244894 - RNA, 19 nt, Artificial Sequence
  Description of Artificial Sequence: Synthetic oligonucleotide
gaacuccucgacauucccg

SEQ ID NO: 3244895 - RNA, 19 nt, Artificial Sequence
  Description of Artificial Sequence: Synthetic oligonucleotide
uuucugauucugccucuca

SEQ ID NO: 3244896 - RNA, 19 nt, Artificial Sequence
  Description of Artificial Sequence: Synthetic oligonucleotide
ucgaacuccucgacauucc

SEQ ID NO: 3244897 - RNA, 19 nt, Artificial Sequence
  Description of Artificial Sequence: Synthetic oligonucleotide
uucgaacuccucgacauuc

SEQ ID NO: 3244898 - RNA, 19 nt, Artificial Sequence
  Description of Artificial Sequence: Synthetic oligonucleotide
cugccgcugcuucagaugc

SEQ ID NO: 3244899 - RNA, 19 nt, Artificial Sequence
  Description of Artificial Sequence: Synthetic oligonucleotide
uccaacaucuucucucuuu

SEQ ID NO: 3244900 - RNA, 19 nt, Artificial Sequence
  Description of Artificial Sequence: Synthetic oligonucleotide
gacauucccgcucccggcc

SEQ ID NO: 3244901 - RNA, 19 nt, Artificial Sequence
  Description of Artificial Sequence: Synthetic oligonucleotide
caaugucucugaucacucc

SEQ ID NO: 3244902 - RNA, 19 nt, Artificial Sequence
  Description of Artificial Sequence: Synthetic oligonucleotide
uguucucccaaaagacgaa

SEQ ID NO: 3244903 - RNA, 19 nt, Artificial Sequence
  Description of Artificial Sequence: Synthetic oligonucleotide
ucaaguguuuugagauccu

SEQ ID NO: 3244904 - RNA, 19 nt, Artificial Sequence
  Description of Artificial Sequence: Synthetic oligonucleotide
cugcuucagaugcacgccg

SEQ ID NO: 3244905 - RNA, 19 nt, Artificial Sequence
  Description of Artificial Sequence: Synthetic oligonucleotide
caccgagaggcccagcacc

SEQ ID NO: 3244906 - RNA, 19 nt, Artificial Sequence
  Description of Artificial Sequence: Synthetic oligonucleotide
ugcacgccggccaccgugg

SEQ ID NO: 3244907 - RNA, 19 nt, Artificial Sequence
  Description of Artificial Sequence: Synthetic oligonucleotide
ucagaugcacgccggccac

SEQ ID NO: 3244908 - RNA, 19 nt, Artificial Sequence
  Description of Artificial Sequence: Synthetic oligonucleotide
caaaagacgaauguuuucu

SEQ ID NO: 3244909 - RNA, 19 nt, Artificial Sequence
  Description of Artificial Sequence: Synthetic oligonucleotide
cucucuuucugcuucaagu

SEQ ID NO: 3244910 - RNA, 19 nt, Artificial Sequence
  Description of Artificial Sequence: Synthetic oligonucleotide
ucagcagcaccgagaggcc

SEQ ID NO: 3244911 - RNA, 19 nt, Artificial Sequence
  Description of Artificial Sequence: Synthetic oligonucleotide
aagccucugccgguccugc

SEQ ID NO: 3244912 - RNA, 19 nt, Artificial Sequence
  Description of Artificial Sequence: Synthetic oligonucleotide
agcaccgagaggcccagca

SEQ ID NO: 3244913 - RNA, 19 nt, Artificial Sequence
  Description of Artificial Sequence: Synthetic oligonucleotide
uucugccucucaaugucuc

SEQ ID NO: 3244914 - RNA, 19 nt, Artificial Sequence
  Description of Artificial Sequence: Synthetic oligonucleotide
ugucucugaucacuccguc

SEQ ID NO: 3244915 - RNA, 19 nt, Artificial Sequence
  Description of Artificial Sequence: Synthetic oligonucleotide
gauccucuuuccaacaucu

SEQ ID NO: 3244916 - RNA, 19 nt, Artificial Sequence
  Description of Artificial Sequence: Synthetic oligonucleotide
cucuuuccaacaucuucuc

SEQ ID NO: 3244917 - RNA, 19 nt, Artificial Sequence
  Description of Artificial Sequence: Synthetic oligonucleotide
uuaaagaugaucucguagg

SEQ ID NO: 3244918 - RNA, 19 nt, Artificial Sequence
  Description of Artificial Sequence: Synthetic oligonucleotide
aaucuuaaagaugaucucg

SEQ ID NO: 3244919 - RNA, 19 nt, Artificial Sequence
  Description of Artificial Sequence: Synthetic oligonucleotide
aaguaccucucauacaggc

SEQ ID NO: 3244920 - RNA, 19 nt, Artificial Sequence
  Description of Artificial Sequence: Synthetic oligonucleotide
gaugcaaacacugagcuag

SEQ ID NO: 3244921 - RNA, 19 nt, Artificial Sequence
  Description of Artificial Sequence: Synthetic oligonucleotide
aagaugaucucguaggucu

SEQ ID NO: 3244922 - RNA, 19 nt, Artificial Sequence
  Description of Artificial Sequence: Synthetic oligonucleotide
acaggaacaagucuuuggc

SEQ ID NO: 3244923 - RNA, 19 nt, Artificial Sequence
  Description of Artificial Sequence: Synthetic oligonucleotide
ucuuuggccagccauuugg

SEQ ID NO: 3244924 - RNA, 19 nt, Artificial Sequence
  Description of Artificial Sequence: Synthetic oligonucleotide
ucucauacaggccaagcag

SEQ ID NO: 3244925 - RNA, 19 nt, Artificial Sequence
  Description of Artificial Sequence: Synthetic oligonucleotide
uuuaggugcacaccacugg

SEQ ID NO: 3244926 - RNA, 19 nt, Artificial Sequence
  Description of Artificial Sequence: Synthetic oligonucleotide
acaaucuuaaagaugaucu

SEQ ID NO: 3244927 - RNA, 19 nt, Artificial Sequence
  Description of Artificial Sequence: Synthetic oligonucleotide
cuuaaagaugaucucguag

SEQ ID NO: 3244928 - RNA, 19 nt, Artificial Sequence
  Description of Artificial Sequence: Synthetic oligonucleotide
accaggaaggccuggaggc

SEQ ID NO: 3244929 - RNA, 19 nt, Artificial Sequence
  Description of Artificial Sequence: Synthetic oligonucleotide
uuaggugcacaccacuggg

SEQ ID NO: 3244930 - RNA, 19 nt, Artificial Sequence
  Description of Artificial Sequence: Synthetic oligonucleotide
ggaaguaccucucauacag

SEQ ID NO: 3244931 - RNA, 19 nt, Artificial Sequence
  Description of Artificial Sequence: Synthetic oligonucleotide
uacaggaacaagucuuugg

SEQ ID NO: 3244932 - RNA, 19 nt, Artificial Sequence
  Description of Artificial Sequence: Synthetic oligonucleotide
auacaggccaagcagcacg

SEQ ID NO: 3244933 - RNA, 19 nt, Artificial Sequence
  Description of Artificial Sequence: Synthetic oligonucleotide
ugagcuagccucuugcuga

SEQ ID NO: 3244934 - RNA, 19 nt, Artificial Sequence
  Description of Artificial Sequence: Synthetic oligonucleotide
gaggaaguaccucucauac

SEQ ID NO: 3244935 - RNA, 19 nt, Artificial Sequence
  Description of Artificial Sequence: Synthetic oligonucleotide
aaagaugaucucguagguc

SEQ ID NO: 3244936 - RNA, 19 nt, Artificial Sequence
  Description of Artificial Sequence: Synthetic oligonucleotide
ugcagugggaggaaguacc

SEQ ID NO: 3244937 - RNA, 19 nt, Artificial Sequence
  Description of Artificial Sequence: Synthetic oligonucleotide
aggaacaagucuuuggcca

SEQ ID NO: 3244938 - RNA, 19 nt, Artificial Sequence
  Description of Artificial Sequence: Synthetic oligonucleotide
caaacacugagcuagccuc

SEQ ID NO: 3244939 - RNA, 19 nt, Artificial Sequence
  Description of Artificial Sequence: Synthetic oligonucleotide
gaucucguaggucucuagg

SEQ ID NO: 3244940 - RNA, 19 nt, Artificial Sequence
  Description of Artificial Sequence: Synthetic oligonucleotide
aucucguaggucucuaggg

SEQ ID NO: 3244941 - RNA, 19 nt, Artificial Sequence
  Description of Artificial Sequence: Synthetic oligonucleotide
uuggccagccauuuggucc

SEQ ID NO: 3244942 - RNA, 19 nt, Artificial Sequence
  Description of Artificial Sequence: Synthetic oligonucleotide
uaaagaugaucucguaggu

SEQ ID NO: 3244943 - RNA, 19 nt, Artificial Sequence
  Description of Artificial Sequence: Synthetic oligonucleotide
agagcccuccuccaggccc

SEQ ID NO: 3244944 - RNA, 19 nt, Artificial Sequence
  Description of Artificial Sequence: Synthetic oligonucleotide
aggaugcaaacacugagcu

SEQ ID NO: 3244945 - RNA, 19 nt, Artificial Sequence
  Description of Artificial Sequence: Synthetic oligonucleotide
aacaagucuuuggccagcc

SEQ ID NO: 3244946 - RNA, 19 nt, Artificial Sequence
  Description of Artificial Sequence: Synthetic oligonucleotide
ucucguaggucucuagggc

SEQ ID NO: 3244947 - RNA, 19 nt, Artificial Sequence
  Description of Artificial Sequence: Synthetic oligonucleotide
cucauacaggccaagcagc

SEQ ID NO: 3244948 - RNA, 19 nt, Artificial Sequence
  Description of Artificial Sequence: Synthetic oligonucleotide
gaucucagagcccuccucc

SEQ ID NO: 3244949 - RNA, 19 nt, Artificial Sequence
  Description of Artificial Sequence: Synthetic oligonucleotide
aggggaaacaggccgcagc

SEQ ID NO: 3244950 - RNA, 19 nt, Artificial Sequence
  Description of Artificial Sequence: Synthetic oligonucleotide
agugggaggaaguaccucu

SEQ ID NO: 3244951 - RNA, 19 nt, Artificial Sequence
  Description of Artificial Sequence: Synthetic oligonucleotide
cucuagggccuuuaggugc

SEQ ID NO: 3244952 - RNA, 19 nt, Artificial Sequence
  Description of Artificial Sequence: Synthetic oligonucleotide
gacauggcggcauaggcca

SEQ ID NO: 3244953 - RNA, 19 nt, Artificial Sequence
  Description of Artificial Sequence: Synthetic oligonucleotide
caggaggggaaacaggccg

SEQ ID NO: 3244954 - RNA, 19 nt, Artificial Sequence
  Description of Artificial Sequence: Synthetic oligonucleotide
cucuugcugauaaggagcc

SEQ ID NO: 3244955 - RNA, 19 nt, Artificial Sequence
  Description of Artificial Sequence: Synthetic oligonucleotide
ucauacaggccaagcagca

SEQ ID NO: 3244956 - RNA, 19 nt, Artificial Sequence
  Description of Artificial Sequence: Synthetic oligonucleotide
uagccucuugcugauaagg

SEQ ID NO: 3244957 - RNA, 19 nt, Artificial Sequence
  Description of Artificial Sequence: Synthetic oligonucleotide
uacaggccaagcagcacgg

SEQ ID NO: 3244958 - RNA, 19 nt, Artificial Sequence
  Description of Artificial Sequence: Synthetic oligonucleotide
caggaugcaaacacugagc

SEQ ID NO: 3244959 - RNA, 19 nt, Artificial Sequence
  Description of Artificial Sequence: Synthetic oligonucleotide
aaggccuggaggcugggca

SEQ ID NO: 3244960 - RNA, 19 nt, Artificial Sequence
  Description of Artificial Sequence: Synthetic oligonucleotide
cuuuaggugcacaccacug

SEQ ID NO: 3244961 - RNA, 19 nt, Artificial Sequence
  Description of Artificial Sequence: Synthetic oligonucleotide
guccccacaaucuuaaaga

SEQ ID NO: 3244962 - RNA, 19 nt, Artificial Sequence
  Description of Artificial Sequence: Synthetic oligonucleotide
guaccucucauacaggcca

SEQ ID NO: 3244963 - RNA, 19 nt, Artificial Sequence
  Description of Artificial Sequence: Synthetic oligonucleotide
agggccuuuaggugcacac

SEQ ID NO: 3244964 - RNA, 19 nt, Artificial Sequence
  Description of Artificial Sequence: Synthetic oligonucleotide
cucguaggucucuagggcc

SEQ ID NO: 3244965 - RNA, 19 nt, Artificial Sequence
  Description of Artificial Sequence: Synthetic oligonucleotide
caaucuuaaagaugaucuc

SEQ ID NO: 3244966 - RNA, 19 nt, Artificial Sequence
  Description of Artificial Sequence: Synthetic oligonucleotide
aaacaggccgcagcuguac

SEQ ID NO: 3244967 - RNA, 19 nt, Artificial Sequence
  Description of Artificial Sequence: Synthetic oligonucleotide
ucucuagggccuuuaggug

SEQ ID NO: 3244968 - RNA, 19 nt, Artificial Sequence
  Description of Artificial Sequence: Synthetic oligonucleotide
uguacaggaacaagucuuu

SEQ ID NO: 3244969 - RNA, 19 nt, Artificial Sequence
  Description of Artificial Sequence: Synthetic oligonucleotide
cccacaaucuuaaagauga

SEQ ID NO: 3244970 - RNA, 19 nt, Artificial Sequence
  Description of Artificial Sequence: Synthetic oligonucleotide
aguaccucucauacaggcc

SEQ ID NO: 3244971 - RNA, 19 nt, Artificial Sequence
  Description of Artificial Sequence: Synthetic oligonucleotide
ggcggcauaggccaggagg

SEQ ID NO: 3244972 - RNA, 19 nt, Artificial Sequence
  Description of Artificial Sequence: Synthetic oligonucleotide
agcagcacgggccgcaccg

SEQ ID NO: 3244973 - RNA, 19 nt, Artificial Sequence
  Description of Artificial Sequence: Synthetic oligonucleotide
caggaacaagucuuuggcc

SEQ ID NO: 3244974 - RNA, 19 nt, Artificial Sequence
  Description of Artificial Sequence: Synthetic oligonucleotide
agcuguacaggaacaaguc

SEQ ID NO: 3244975 - RNA, 19 nt, Artificial Sequence
  Description of Artificial Sequence: Synthetic oligonucleotide
ucuagggccuuuaggugca

SEQ ID NO: 3244976 - RNA, 19 nt, Artificial Sequence
  Description of Artificial Sequence: Synthetic oligonucleotide
cagggcaggaugcaaacac

SEQ ID NO: 3244977 - RNA, 19 nt, Artificial Sequence
  Description of Artificial Sequence: Synthetic oligonucleotide
agaucucagagcccuccuc

SEQ ID NO: 3244978 - RNA, 19 nt, Artificial Sequence
  Description of Artificial Sequence: Synthetic oligonucleotide
aggccaagcagcacgggcc

SEQ ID NO: 3244979 - RNA, 19 nt, Artificial Sequence
  Description of Artificial Sequence: Synthetic oligonucleotide
aucuuaaagaugaucucgu

SEQ ID NO: 3244980 - RNA, 19 nt, Artificial Sequence
  Description of Artificial Sequence: Synthetic oligonucleotide
uuugguccccacaaucuua

SEQ ID NO: 3244981 - RNA, 19 nt, Artificial Sequence
  Description of Artificial Sequence: Synthetic oligonucleotide
cacaaucuuaaagaugauc

SEQ ID NO: 3244982 - RNA, 19 nt, Artificial Sequence
  Description of Artificial Sequence: Synthetic oligonucleotide
cacugagcuagccucuugc

SEQ ID NO: 3244983 - RNA, 19 nt, Artificial Sequence
  Description of Artificial Sequence: Synthetic oligonucleotide
gcaggaugcaaacacugag

SEQ ID NO: 3244984 - RNA, 19 nt, Artificial Sequence
  Description of Artificial Sequence: Synthetic oligonucleotide
gucucuagggccuuuaggu

SEQ ID NO: 3244985 - RNA, 19 nt, Artificial Sequence
  Description of Artificial Sequence: Synthetic oligonucleotide
ucuuaaagaugaucucgua

SEQ ID NO: 3244986 - RNA, 19 nt, Artificial Sequence
  Description of Artificial Sequence: Synthetic oligonucleotide
uggccagccauuugguccc

SEQ ID NO: 3244987 - RNA, 19 nt, Artificial Sequence
  Description of Artificial Sequence: Synthetic oligonucleotide
ucucagagcccuccuccag

SEQ ID NO: 3244988 - RNA, 19 nt, Artificial Sequence
  Description of Artificial Sequence: Synthetic oligonucleotide
gaaguaccucucauacagg

SEQ ID NO: 3244989 - RNA, 19 nt, Artificial Sequence
  Description of Artificial Sequence: Synthetic oligonucleotide
uugguccccacaaucuuaa

SEQ ID NO: 3244990 - RNA, 19 nt, Artificial Sequence
  Description of Artificial Sequence: Synthetic oligonucleotide
gguccccacaaucuuaaag

SEQ ID NO: 3244991 - RNA, 19 nt, Artificial Sequence
  Description of Artificial Sequence: Synthetic oligonucleotide
ccucuugcugauaaggagc

SEQ ID NO: 3244992 - RNA, 19 nt, Artificial Sequence
  Description of Artificial Sequence: Synthetic oligonucleotide
ucguaggucucuagggccu

SEQ ID NO: 3244993 - RNA, 19 nt, Artificial Sequence
  Description of Artificial Sequence: Synthetic oligonucleotide
uaggugcacaccacugggc

SEQ ID NO: 3244994 - RNA, 19 nt, Artificial Sequence
  Description of Artificial Sequence: Synthetic oligonucleotide
caccaggaaggccuggagg

SEQ ID NO: 3244995 - RNA, 19 nt, Artificial Sequence
  Description of Artificial Sequence: Synthetic oligonucleotide
ugaucucguaggucucuag

SEQ ID NO: 3244996 - RNA, 19 nt, Artificial Sequence
  Description of Artificial Sequence: Synthetic oligonucleotide
ucagagcccuccuccaggc

SEQ ID NO: 3244997 - RNA, 19 nt, Artificial Sequence
  Description of Artificial Sequence: Synthetic oligonucleotide
aggugcacaccacugggca

SEQ ID NO: 3244998 - RNA, 19 nt, Artificial Sequence
  Description of Artificial Sequence: Synthetic oligonucleotide
aggagcagcuucugcagug

SEQ ID NO: 3244999 - RNA, 19 nt, Artificial Sequence
  Description of Artificial Sequence: Synthetic oligonucleotide
cucagagcccuccuccagg

SEQ ID NO: 3245000 - RNA, 19 nt, Artificial Sequence
  Description of Artificial Sequence: Synthetic oligonucleotide
aagcagcacgggccgcacc

SEQ ID NO: 3245001 - RNA, 19 nt, Artificial Sequence
  Description of Artificial Sequence: Synthetic oligonucleotide
uucugcagugggaggaagu

SEQ ID NO: 3245002 - RNA, 19 nt, Artificial Sequence
  Description of Artificial Sequence: Synthetic oligonucleotide
agccauuugguccccacaa

SEQ ID NO: 3245003 - RNA, 19 nt, Artificial Sequence
  Description of Artificial Sequence: Synthetic oligonucleotide
uggaggcugggcaggagca

SEQ ID NO: 3245004 - RNA, 19 nt, Artificial Sequence
  Description of Artificial Sequence: Synthetic oligonucleotide
uccccacaaucuuaaagau

SEQ ID NO: 3245005 - RNA, 19 nt, Artificial Sequence
  Description of Artificial Sequence: Synthetic oligonucleotide
ggaacaagucuuuggccag

SEQ ID NO: 3245006 - RNA, 19 nt, Artificial Sequence
  Description of Artificial Sequence: Synthetic oligonucleotide
acugggcagggcaggaugc

SEQ ID NO: 3245007 - RNA, 19 nt, Artificial Sequence
  Description of Artificial Sequence: Synthetic oligonucleotide
ugggaggaaguaccucuca

SEQ ID NO: 3245008 - RNA, 19 nt, Artificial Sequence
  Description of Artificial Sequence: Synthetic oligonucleotide
aggaaguaccucucauaca

SEQ ID NO: 3245009 - RNA, 19 nt, Artificial Sequence
  Description of Artificial Sequence: Synthetic oligonucleotide
cugagcuagccucuugcug

SEQ ID NO: 3245010 - RNA, 19 nt, Artificial Sequence
  Description of Artificial Sequence: Synthetic oligonucleotide
ggucucuagggccuuuagg

SEQ ID NO: 3245011 - RNA, 19 nt, Artificial Sequence
  Description of Artificial Sequence: Synthetic oligonucleotide
aaacacugagcuagccucu

SEQ ID NO: 3245012 - RNA, 19 nt, Artificial Sequence
  Description of Artificial Sequence: Synthetic oligonucleotide
agcaggcccaccaggaagg

SEQ ID NO: 3245013 - RNA, 19 nt, Artificial Sequence
  Description of Artificial Sequence: Synthetic oligonucleotide
auuugguccccacaaucuu

SEQ ID NO: 3245014 - RNA, 19 nt, Artificial Sequence
  Description of Artificial Sequence: Synthetic oligonucleotide
acugagcuagccucuugcu

SEQ ID NO: 3245015 - RNA, 19 nt, Artificial Sequence
  Description of Artificial Sequence: Synthetic oligonucleotide
acaggccgcagcuguacag

SEQ ID NO: 3245016 - RNA, 19 nt, Artificial Sequence
  Description of Artificial Sequence: Synthetic oligonucleotide
aggaggggaaacaggccgc

SEQ ID NO: 3245017 - RNA, 19 nt, Artificial Sequence
  Description of Artificial Sequence: Synthetic oligonucleotide
aauuucucaacuuggcugc

SEQ ID NO: 3245018 - RNA, 19 nt, Artificial Sequence
  Description of Artificial Sequence: Synthetic oligonucleotide
aaaaucuuguucucuacac

SEQ ID NO: 3245019 - RNA, 19 nt, Artificial Sequence
  Description of Artificial Sequence: Synthetic oligonucleotide
aaauuucucaacuuggcug

SEQ ID NO: 3245020 - RNA, 19 nt, Artificial Sequence
  Description of Artificial Sequence: Synthetic oligonucleotide
uuaaccuccaccaugaagu

SEQ ID NO: 3245021 - RNA, 19 nt, Artificial Sequence
  Description of Artificial Sequence: Synthetic oligonucleotide
uagaagagcaaccaaauca

SEQ ID NO: 3245022 - RNA, 19 nt, Artificial Sequence
  Description of Artificial Sequence: Synthetic oligonucleotide
agaaugaaaaucuuguucu

SEQ ID NO: 3245023 - RNA, 19 nt, Artificial Sequence
  Description of Artificial Sequence: Synthetic oligonucleotide
uuaaggaugccaccaaagg

SEQ ID NO: 3245024 - RNA, 19 nt, Artificial Sequence
  Description of Artificial Sequence: Synthetic oligonucleotide
gauuccaggaaucaggaug

SEQ ID NO: 3245025 - RNA, 19 nt, Artificial Sequence
  Description of Artificial Sequence: Synthetic oligonucleotide
ugaugaaucuaccaggcug

SEQ ID NO: 3245026 - RNA, 19 nt, Artificial Sequence
  Description of Artificial Sequence: Synthetic oligonucleotide
aauguuucuauacauguuu

SEQ ID NO: 3245027 - RNA, 19 nt, Artificial Sequence
  Description of Artificial Sequence: Synthetic oligonucleotide
aagagcaaccaaaucagcc

SEQ ID NO: 3245028 - RNA, 19 nt, Artificial Sequence
  Description of Artificial Sequence: Synthetic oligonucleotide
aaacagaaauuucucaacu

SEQ ID NO: 3245029 - RNA, 19 nt, Artificial Sequence
  Description of Artificial Sequence: Synthetic oligonucleotide
aaccaaaucagccauuggu

SEQ ID NO: 3245030 - RNA, 19 nt, Artificial Sequence
  Description of Artificial Sequence: Synthetic oligonucleotide
ugaaguagcaguucccacg

SEQ ID NO: 3245031 - RNA, 19 nt, Artificial Sequence
  Description of Artificial Sequence: Synthetic oligonucleotide
ucaauguuucuauacaugu

SEQ ID NO: 3245032 - RNA, 19 nt, Artificial Sequence
  Description of Artificial Sequence: Synthetic oligonucleotide
uuguucucuacacuuaacc

SEQ ID NO: 3245033 - RNA, 19 nt, Artificial Sequence
  Description of Artificial Sequence: Synthetic oligonucleotide
uuugaucauagauuccagg

SEQ ID NO: 3245034 - RNA, 19 nt, Artificial Sequence
  Description of Artificial Sequence: Synthetic oligonucleotide
uucucuacacuuaaccucc

SEQ ID NO: 3245035 - RNA, 19 nt, Artificial Sequence
  Description of Artificial Sequence: Synthetic oligonucleotide
accaugaaguagcaguucc

SEQ ID NO: 3245036 - RNA, 19 nt, Artificial Sequence
  Description of Artificial Sequence: Synthetic oligonucleotide
aaggaugccaccaaagguc

SEQ ID NO: 3245037 - RNA, 19 nt, Artificial Sequence
  Description of Artificial Sequence: Synthetic oligonucleotide
uugaucauagauuccagga

SEQ ID NO: 3245038 - RNA, 19 nt, Artificial Sequence
  Description of Artificial Sequence: Synthetic oligonucleotide
acagaaauuucucaacuug

SEQ ID NO: 3245039 - RNA, 19 nt, Artificial Sequence
  Description of Artificial Sequence: Synthetic oligonucleotide
uguaagaggggccauuuga

SEQ ID NO: 3245040 - RNA, 19 nt, Artificial Sequence
  Description of Artificial Sequence: Synthetic oligonucleotide
ucaaacagaaauuucucaa

SEQ ID NO: 3245041 - RNA, 19 nt, Artificial Sequence
  Description of Artificial Sequence: Synthetic oligonucleotide
cagaaauuucucaacuugg

SEQ ID NO: 3245042 - RNA, 19 nt, Artificial Sequence
  Description of Artificial Sequence: Synthetic oligonucleotide
aagaggggccauuugauca

SEQ ID NO: 3245043 - RNA, 19 nt, Artificial Sequence
  Description of Artificial Sequence: Synthetic oligonucleotide
cauugguucguuaaggaug

SEQ ID NO: 3245044 - RNA, 19 nt, Artificial Sequence
  Description of Artificial Sequence: Synthetic oligonucleotide
gaaguagcaguucccacgg

SEQ ID NO: 3245045 - RNA, 19 nt, Artificial Sequence
  Description of Artificial Sequence: Synthetic oligonucleotide
uccaccaugaaguagcagu

SEQ ID NO: 3245046 - RNA, 19 nt, Artificial Sequence
  Description of Artificial Sequence: Synthetic oligonucleotide
aaucuuguucucuacacuu

SEQ ID NO: 3245047 - RNA, 19 nt, Artificial Sequence
  Description of Artificial Sequence: Synthetic oligonucleotide
ucuacacuuaaccuccacc

SEQ ID NO: 3245048 - RNA, 19 nt, Artificial Sequence
  Description of Artificial Sequence: Synthetic oligonucleotide
auugguucguuaaggaugc

SEQ ID NO: 3245049 - RNA, 19 nt, Artificial Sequence
  Description of Artificial Sequence: Synthetic oligonucleotide
agaaauuucucaacuuggc

SEQ ID NO: 3245050 - RNA, 19 nt, Artificial Sequence
  Description of Artificial Sequence: Synthetic oligonucleotide
aacuuggcugcucuucugg

SEQ ID NO: 3245051 - RNA, 19 nt, Artificial Sequence
  Description of Artificial Sequence: Synthetic oligonucleotide
ucaggauguggccugauga

SEQ ID NO: 3245052 - RNA, 19 nt, Artificial Sequence
  Description of Artificial Sequence: Synthetic oligonucleotide
uuccuccucuguaagaggg

SEQ ID NO: 3245053 - RNA, 19 nt, Artificial Sequence
  Description of Artificial Sequence: Synthetic oligonucleotide
auagauuccaggaaucagg

SEQ ID NO: 3245054 - RNA, 19 nt, Artificial Sequence
  Description of Artificial Sequence: Synthetic oligonucleotide
aaaucuuguucucuacacu

SEQ ID NO: 3245055 - RNA, 19 nt, Artificial Sequence
  Description of Artificial Sequence: Synthetic oligonucleotide
uaaggaugccaccaaaggu

SEQ ID NO: 3245056 - RNA, 19 nt, Artificial Sequence
  Description of Artificial Sequence: Synthetic oligonucleotide
aaugaaaaucuuguucucu

SEQ ID NO: 3245057 - RNA, 19 nt, Artificial Sequence
  Description of Artificial Sequence: Synthetic oligonucleotide
uaucaaacagaaauuucuc

SEQ ID NO: 3245058 - RNA, 19 nt, Artificial Sequence
  Description of Artificial Sequence: Synthetic oligonucleotide
uuuuccuccucuguaagag

SEQ ID NO: 3245059 - RNA, 19 nt, Artificial Sequence
  Description of Artificial Sequence: Synthetic oligonucleotide
cagaaugaaaaucuuguuc

SEQ ID NO: 3245060 - RNA, 19 nt, Artificial Sequence
  Description of Artificial Sequence: Synthetic oligonucleotide
cuugguaucaaacagaaau

SEQ ID NO: 3245061 - RNA, 19 nt, Artificial Sequence
  Description of Artificial Sequence: Synthetic oligonucleotide
uauucuuccauguccagau

SEQ ID NO: 3245062 - RNA, 19 nt, Artificial Sequence
  Description of Artificial Sequence: Synthetic oligonucleotide
caaaucagccauugguucg

SEQ ID NO: 3245063 - RNA, 19 nt, Artificial Sequence
  Description of Artificial Sequence: Synthetic oligonucleotide
agaucaauguuucuauaca

SEQ ID NO: 3245064 - RNA, 19 nt, Artificial Sequence
  Description of Artificial Sequence: Synthetic oligonucleotide
uguucucuacacuuaaccu

SEQ ID NO: 3245065 - RNA, 19 nt, Artificial Sequence
  Description of Artificial Sequence: Synthetic oligonucleotide
uucuuccauguccagauca

SEQ ID NO: 3245066 - RNA, 19 nt, Artificial Sequence
  Description of Artificial Sequence: Synthetic oligonucleotide
cugguauucuuccaugucc

SEQ ID NO: 3245067 - RNA, 19 nt, Artificial Sequence
  Description of Artificial Sequence: Synthetic oligonucleotide
gaugaaucuaccaggcugc

SEQ ID NO: 3245068 - RNA, 19 nt, Artificial Sequence
  Description of Artificial Sequence: Synthetic oligonucleotide
caaacagaaauuucucaac

SEQ ID NO: 3245069 - RNA, 19 nt, Artificial Sequence
  Description of Artificial Sequence: Synthetic oligonucleotide
aucaaacagaaauuucuca

SEQ ID NO: 3245070 - RNA, 19 nt, Artificial Sequence
  Description of Artificial Sequence: Synthetic oligonucleotide
agaagagcaaccaaaucag

SEQ ID NO: 3245071 - RNA, 19 nt, Artificial Sequence
  Description of Artificial Sequence: Synthetic oligonucleotide
agagcaaccaaaucagcca

SEQ ID NO: 3245072 - RNA, 19 nt, Artificial Sequence
  Description of Artificial Sequence: Synthetic oligonucleotide
uagauuccaggaaucagga

SEQ ID NO: 3245073 - RNA, 19 nt, Artificial Sequence
  Description of Artificial Sequence: Synthetic oligonucleotide
uccauguccagaucaaugu

SEQ ID NO: 3245074 - RNA, 19 nt, Artificial Sequence
  Description of Artificial Sequence: Synthetic oligonucleotide
ugaucauagauuccaggaa

SEQ ID NO: 3245075 - RNA, 19 nt, Artificial Sequence
  Description of Artificial Sequence: Synthetic oligonucleotide
cagaucaauguuucuauac

SEQ ID NO: 3245076 - RNA, 19 nt, Artificial Sequence
  Description of Artificial Sequence: Synthetic oligonucleotide
uuccauguccagaucaaug

SEQ ID NO: 3245077 - RNA, 19 nt, Artificial Sequence
  Description of Artificial Sequence: Synthetic oligonucleotide
accuccaccaugaaguagc

SEQ ID NO: 3245078 - RNA, 19 nt, Artificial Sequence
  Description of Artificial Sequence: Synthetic oligonucleotide
aacagaaauuucucaacuu

SEQ ID NO: 3245079 - RNA, 19 nt, Artificial Sequence
  Description of Artificial Sequence: Synthetic oligonucleotide
aaaggucccagaaugaaaa

SEQ ID NO: 3245080 - RNA, 19 nt, Artificial Sequence
  Description of Artificial Sequence: Synthetic oligonucleotide
ugguauucuuccaugucca

SEQ ID NO: 3245081 - RNA, 19 nt, Artificial Sequence
  Description of Artificial Sequence: Synthetic oligonucleotide
uaccaggcugccuagaaga

SEQ ID NO: 3245082 - RNA, 19 nt, Artificial Sequence
  Description of Artificial Sequence: Synthetic oligonucleotide
gaaaaucuuguucucuaca

SEQ ID NO: 3245083 - RNA, 19 nt, Artificial Sequence
  Description of Artificial Sequence: Synthetic oligonucleotide
ucccagaaugaaaaucuug

SEQ ID NO: 3245084 - RNA, 19 nt, Artificial Sequence
  Description of Artificial Sequence: Synthetic oligonucleotide
guucucuacacuuaaccuc

SEQ ID NO: 3245085 - RNA, 19 nt, Artificial Sequence
  Description of Artificial Sequence: Synthetic oligonucleotide
ugaaaaucuuguucucuac

SEQ ID NO: 3245086 - RNA, 19 nt, Artificial Sequence
  Description of Artificial Sequence: Synthetic oligonucleotide
cuuaaccuccaccaugaag

SEQ ID NO: 3245087 - RNA, 19 nt, Artificial Sequence
  Description of Artificial Sequence: Synthetic oligonucleotide
augaaguagcaguucccac

SEQ ID NO: 3245088 - RNA, 19 nt, Artificial Sequence
  Description of Artificial Sequence: Synthetic oligonucleotide
caccaaaggucccagaaug

SEQ ID NO: 3245089 - RNA, 19 nt, Artificial Sequence
  Description of Artificial Sequence: Synthetic oligonucleotide
acacuuaaccuccaccaug

SEQ ID NO: 3245090 - RNA, 19 nt, Artificial Sequence
  Description of Artificial Sequence: Synthetic oligonucleotide
cuacacuuaaccuccacca

SEQ ID NO: 3245091 - RNA, 19 nt, Artificial Sequence
  Description of Artificial Sequence: Synthetic oligonucleotide
uugguaucaaacagaaauu

SEQ ID NO: 3245092 - RNA, 19 nt, Artificial Sequence
  Description of Artificial Sequence: Synthetic oligonucleotide
uucguuaaggaugccacca

SEQ ID NO: 3245093 - RNA, 19 nt, Artificial Sequence
  Description of Artificial Sequence: Synthetic oligonucleotide
ucuuguucucuacacuuaa

SEQ ID NO: 3245094 - RNA, 19 nt, Artificial Sequence
  Description of Artificial Sequence: Synthetic oligonucleotide
ucuucugguauucuuccau

SEQ ID NO: 3245095 - RNA, 19 nt, Artificial Sequence
  Description of Artificial Sequence: Synthetic oligonucleotide
ucagccauugguucguuaa

SEQ ID NO: 3245096 - RNA, 19 nt, Artificial Sequence
  Description of Artificial Sequence: Synthetic oligonucleotide
uccagaucaauguuucuau

SEQ ID NO: 3245097 - RNA, 19 nt, Artificial Sequence
  Description of Artificial Sequence: Synthetic oligonucleotide
gaaucuaccaggcugccua

SEQ ID NO: 3245098 - RNA, 19 nt, Artificial Sequence
  Description of Artificial Sequence: Synthetic oligonucleotide
ucaacuuggcugcucuucu

SEQ ID NO: 3245099 - RNA, 19 nt, Artificial Sequence
  Description of Artificial Sequence: Synthetic oligonucleotide
guuaaggaugccaccaaag

SEQ ID NO: 3245100 - RNA, 19 nt, Artificial Sequence
  Description of Artificial Sequence: Synthetic oligonucleotide
uguggccugaugaaucuac

SEQ ID NO: 3245101 - RNA, 19 nt, Artificial Sequence
  Description of Artificial Sequence: Synthetic oligonucleotide
gccauuugaucauagauuc

SEQ ID NO: 3245102 - RNA, 19 nt, Artificial Sequence
  Description of Artificial Sequence: Synthetic oligonucleotide
uucucaacuuggcugcucu

SEQ ID NO: 3245103 - RNA, 19 nt, Artificial Sequence
  Description of Artificial Sequence: Synthetic oligonucleotide
uuuccuccucuguaagagg

SEQ ID NO: 3245104 - RNA, 19 nt, Artificial Sequence
  Description of Artificial Sequence: Synthetic oligonucleotide
cauuugaucauagauucca

SEQ ID NO: 3245105 - RNA, 19 nt, Artificial Sequence
  Description of Artificial Sequence: Synthetic oligonucleotide
gaaugaaaaucuuguucuc

SEQ ID NO: 3245106 - RNA, 19 nt, Artificial Sequence
  Description of Artificial Sequence: Synthetic oligonucleotide
ucauagauuccaggaauca

SEQ ID NO: 3245107 - RNA, 19 nt, Artificial Sequence
  Description of Artificial Sequence: Synthetic oligonucleotide
aguagcaguucccacgggu

SEQ ID NO: 3245108 - RNA, 19 nt, Artificial Sequence
  Description of Artificial Sequence: Synthetic oligonucleotide
aaucuaccaggcugccuag

SEQ ID NO: 3245109 - RNA, 19 nt, Artificial Sequence
  Description of Artificial Sequence: Synthetic oligonucleotide
augaaaaucuuguucucua

SEQ ID NO: 3245110 - RNA, 19 nt, Artificial Sequence
  Description of Artificial Sequence: Synthetic oligonucleotide
guaucaaacagaaauuucu

SEQ ID NO: 3245111 - RNA, 19 nt, Artificial Sequence
  Description of Artificial Sequence: Synthetic oligonucleotide
aucauagauuccaggaauc

SEQ ID NO: 3245112 - RNA, 19 nt, Artificial Sequence
  Description of Artificial Sequence: Synthetic oligonucleotide
ugcucuucugguauucuuc

SEQ ID NO: 3245113 - RNA, 19 nt, Artificial Sequence
  Description of Artificial Sequence: Synthetic oligonucleotide
aggaugccaccaaaggucc

SEQ ID NO: 3245114 - RNA, 19 nt, Artificial Sequence
  Description of Artificial Sequence: Synthetic oligonucleotide
ucugguauucuuccauguc

SEQ ID NO: 3245115 - RNA, 19 nt, Artificial Sequence
  Description of Artificial Sequence: Synthetic oligonucleotide
ccaggaaucaggauguggc

SEQ ID NO: 3245116 - RNA, 19 nt, Artificial Sequence
  Description of Artificial Sequence: Synthetic oligonucleotide
aucaauguuucuauacaug

SEQ ID NO: 3245117 - RNA, 19 nt, Artificial Sequence
  Description of Artificial Sequence: Synthetic oligonucleotide
uacaauagaagccugguag

SEQ ID NO: 3245118 - RNA, 19 nt, Artificial Sequence
  Description of Artificial Sequence: Synthetic oligonucleotide
aauaaaacuuuucaacuug

SEQ ID NO: 3245119 - RNA, 19 nt, Artificial Sequence
  Description of Artificial Sequence: Synthetic oligonucleotide
aauacuaggagcauuguag

SEQ ID NO: 3245120 - RNA, 19 nt, Artificial Sequence
  Description of Artificial Sequence: Synthetic oligonucleotide
uaucuucacaauaugaaag

SEQ ID NO: 3245121 - RNA, 19 nt, Artificial Sequence
  Description of Artificial Sequence: Synthetic oligonucleotide
aaugcagguagauaucuuc

SEQ ID NO: 3245122 - RNA, 19 nt, Artificial Sequence
  Description of Artificial Sequence: Synthetic oligonucleotide
ugucuuaaauauaacuggg

SEQ ID NO: 3245123 - RNA, 19 nt, Artificial Sequence
  Description of Artificial Sequence: Synthetic oligonucleotide
aguaagaagauuuuccuug

SEQ ID NO: 3245124 - RNA, 19 nt, Artificial Sequence
  Description of Artificial Sequence: Synthetic oligonucleotide
aucauuagucuauucauac

SEQ ID NO: 3245125 - RNA, 19 nt, Artificial Sequence
  Description of Artificial Sequence: Synthetic oligonucleotide
ucagucuuuuccaaaauag

SEQ ID NO: 3245126 - RNA, 19 nt, Artificial Sequence
  Description of Artificial Sequence: Synthetic oligonucleotide
auagacguagagaagaugc

SEQ ID NO: 3245127 - RNA, 19 nt, Artificial Sequence
  Description of Artificial Sequence: Synthetic oligonucleotide
ugaaaugacagaauucuca

SEQ ID NO: 3245128 - RNA, 19 nt, Artificial Sequence
  Description of Artificial Sequence: Synthetic oligonucleotide
aaaacuuuucaacuugaug

SEQ ID NO: 3245129 - RNA, 19 nt, Artificial Sequence
  Description of Artificial Sequence: Synthetic oligonucleotide
acaauaugaaaguaacuuc

SEQ ID NO: 3245130 - RNA, 19 nt, Artificial Sequence
  Description of Artificial Sequence: Synthetic oligonucleotide
uaaaagcauaucuugagca

SEQ ID NO: 3245131 - RNA, 19 nt, Artificial Sequence
  Description of Artificial Sequence: Synthetic oligonucleotide
ugaugaacaaagucuauag

SEQ ID NO: 3245132 - RNA, 19 nt, Artificial Sequence
  Description of Artificial Sequence: Synthetic oligonucleotide
gaauccuuaaugaaaagcc

SEQ ID NO: 3245133 - RNA, 19 nt, Artificial Sequence
  Description of Artificial Sequence: Synthetic oligonucleotide
acagcauccuguuugaggg

SEQ ID NO: 3245134 - RNA, 19 nt, Artificial Sequence
  Description of Artificial Sequence: Synthetic oligonucleotide
uacaucuccauaaucaaca

SEQ ID NO: 3245135 - RNA, 19 nt, Artificial Sequence
  Description of Artificial Sequence: Synthetic oligonucleotide
aaauacaaugcggagaaug

SEQ ID NO: 3245136 - RNA, 19 nt, Artificial Sequence
  Description of Artificial Sequence: Synthetic oligonucleotide
uuauccaauagggaaaggg

SEQ ID NO: 3245137 - RNA, 19 nt, Artificial Sequence
  Description of Artificial Sequence: Synthetic oligonucleotide
aaaguaaauccagugcugg

SEQ ID NO: 3245138 - RNA, 19 nt, Artificial Sequence
  Description of Artificial Sequence: Synthetic oligonucleotide
acuaaagucuccuuuaaga

SEQ ID NO: 3245139 - RNA, 19 nt, Artificial Sequence
  Description of Artificial Sequence: Synthetic oligonucleotide
auagauuugugcuugagau

SEQ ID NO: 3245140 - RNA, 19 nt, Artificial Sequence
  Description of Artificial Sequence: Synthetic oligonucleotide
ucguaauucuugaagaaca

SEQ ID NO: 3245141 - RNA, 19 nt, Artificial Sequence
  Description of Artificial Sequence: Synthetic oligonucleotide
aaaugugggagacgguugg

SEQ ID NO: 3245142 - RNA, 19 nt, Artificial Sequence
  Description of Artificial Sequence: Synthetic oligonucleotide
aaguaaauccagugcuggc

SEQ ID NO: 3245143 - RNA, 19 nt, Artificial Sequence
  Description of Artificial Sequence: Synthetic oligonucleotide
ugaaugaggugguagagug

SEQ ID NO: 3245144 - RNA, 19 nt, Artificial Sequence
  Description of Artificial Sequence: Synthetic oligonucleotide
caggagauuuugaagaugg

SEQ ID NO: 3245145 - RNA, 19 nt, Artificial Sequence
  Description of Artificial Sequence: Synthetic oligonucleotide
uugaggguccuucagaagc

SEQ ID NO: 3245146 - RNA, 19 nt, Artificial Sequence
  Description of Artificial Sequence: Synthetic oligonucleotide
cuugcuuugggucucagag

SEQ ID NO: 3245147 - RNA, 19 nt, Artificial Sequence
  Description of Artificial Sequence: Synthetic oligonucleotide
aucugcuaggaucaaaggg

SEQ ID NO: 3245148 - RNA, 19 nt, Artificial Sequence
  Description of Artificial Sequence: Synthetic oligonucleotide
aauauaacugggaugaaaa

SEQ ID NO: 3245149 - RNA, 19 nt, Artificial Sequence
  Description of Artificial Sequence: Synthetic oligonucleotide
cuugucuagaaucuuauuc

SEQ ID NO: 3245150 - RNA, 19 nt, Artificial Sequence
  Description of Artificial Sequence: Synthetic oligonucleotide
ucuacugaggccuggaugu

SEQ ID NO: 3245151 - RNA, 19 nt, Artificial Sequence
  Description of Artificial Sequence: Synthetic oligonucleotide
aucuacuguguccagcugc

SEQ ID NO: 3245152 - RNA, 19 nt, Artificial Sequence
  Description of Artificial Sequence: Synthetic oligonucleotide
uucugaucaaugaugucag

SEQ ID NO: 3245153 - RNA, 19 nt, Artificial Sequence
  Description of Artificial Sequence: Synthetic oligonucleotide
uggugagucguuuacagug

SEQ ID NO: 3245154 - RNA, 19 nt, Artificial Sequence
  Description of Artificial Sequence: Synthetic oligonucleotide
gaagaacauacauaguuca

SEQ ID NO: 3245155 - RNA, 19 nt, Artificial Sequence
  Description of Artificial Sequence: Synthetic oligonucleotide
aaucugcuaggaucaaagg

SEQ ID NO: 3245156 - RNA, 19 nt, Artificial Sequence
  Description of Artificial Sequence: Synthetic oligonucleotide
uauuuguuuguugagaaaa

SEQ ID NO: 3245157 - RNA, 19 nt, Artificial Sequence
  Description of Artificial Sequence: Synthetic oligonucleotide
augaacaaagucuauaguu

SEQ ID NO: 3245158 - RNA, 19 nt, Artificial Sequence
  Description of Artificial Sequence: Synthetic oligonucleotide
ugugcuuuuguauucuucu

SEQ ID NO: 3245159 - RNA, 19 nt, Artificial Sequence
  Description of Artificial Sequence: Synthetic oligonucleotide
uugagcuggauacaggcug

SEQ ID NO: 3245160 - RNA, 19 nt, Artificial Sequence
  Description of Artificial Sequence: Synthetic oligonucleotide
uaggucgugcuccagacag

SEQ ID NO: 3245161 - RNA, 19 nt, Artificial Sequence
  Description of Artificial Sequence: Synthetic oligonucleotide
uccgugauguaaauaauac

SEQ ID NO: 3245162 - RNA, 19 nt, Artificial Sequence
  Description of Artificial Sequence: Synthetic oligonucleotide
acaguagaggaugaagugc

SEQ ID NO: 3245163 - RNA, 19 nt, Artificial Sequence
  Description of Artificial Sequence: Synthetic oligonucleotide
uauaacugggaugaaaagu

SEQ ID NO: 3245164 - RNA, 19 nt, Artificial Sequence
  Description of Artificial Sequence: Synthetic oligonucleotide
cucaaguugauaagcauug

SEQ ID NO: 3245165 - RNA, 19 nt, Artificial Sequence
  Description of Artificial Sequence: Synthetic oligonucleotide
augauuaguaauccugaag

SEQ ID NO: 3245166 - RNA, 19 nt, Artificial Sequence
  Description of Artificial Sequence: Synthetic oligonucleotide
uccacuacagcguauuuac

SEQ ID NO: 3245167 - RNA, 19 nt, Artificial Sequence
  Description of Artificial Sequence: Synthetic oligonucleotide
gaucgucuugcucaguggg

SEQ ID NO: 3245168 - RNA, 19 nt, Artificial Sequence
  Description of Artificial Sequence: Synthetic oligonucleotide
ucguugagcagaaugauua

SEQ ID NO: 3245169 - RNA, 19 nt, Artificial Sequence
  Description of Artificial Sequence: Synthetic oligonucleotide
uuauuaacuuggugagucg

SEQ ID NO: 3245170 - RNA, 19 nt, Artificial Sequence
  Description of Artificial Sequence: Synthetic oligonucleotide
aaaagcauaucuugagcaa

SEQ ID NO: 3245171 - RNA, 19 nt, Artificial Sequence
  Description of Artificial Sequence: Synthetic oligonucleotide
ucaugauucuccccuaucu

SEQ ID NO: 3245172 - RNA, 19 nt, Artificial Sequence
  Description of Artificial Sequence: Synthetic oligonucleotide
ucaauccacaagcuaaugu

SEQ ID NO: 3245173 - RNA, 19 nt, Artificial Sequence
  Description of Artificial Sequence: Synthetic oligonucleotide
aauagaucuacacggccau

SEQ ID NO: 3245174 - RNA, 19 nt, Artificial Sequence
  Description of Artificial Sequence: Synthetic oligonucleotide
uaauugcugagcaaaguaa

SEQ ID NO: 3245175 - RNA, 19 nt, Artificial Sequence
  Description of Artificial Sequence: Synthetic oligonucleotide
ugcaagaaaagucccacuc

SEQ ID NO: 3245176 - RNA, 19 nt, Artificial Sequence
  Description of Artificial Sequence: Synthetic oligonucleotide
guauuuacucaccagguca

SEQ ID NO: 3245177 - RNA, 19 nt, Artificial Sequence
  Description of Artificial Sequence: Synthetic oligonucleotide
aguauucugaucaaugaug

SEQ ID NO: 3245178 - RNA, 19 nt, Artificial Sequence
  Description of Artificial Sequence: Synthetic oligonucleotide
aauacaaugcggagaauga

SEQ ID NO: 3245179 - RNA, 19 nt, Artificial Sequence
  Description of Artificial Sequence: Synthetic oligonucleotide
auauaacugggaugaaaag

SEQ ID NO: 3245180 - RNA, 19 nt, Artificial Sequence
  Description of Artificial Sequence: Synthetic oligonucleotide
agcuguucaaucaccaagc

SEQ ID NO: 3245181 - RNA, 19 nt, Artificial Sequence
  Description of Artificial Sequence: Synthetic oligonucleotide
gacaguagaggaugaagug

SEQ ID NO: 3245182 - RNA, 19 nt, Artificial Sequence
  Description of Artificial Sequence: Synthetic oligonucleotide
ucggaugagaguauggcuc

SEQ ID NO: 3245183 - RNA, 19 nt, Artificial Sequence
  Description of Artificial Sequence: Synthetic oligonucleotide
cuguuuaaauucuuccaag

SEQ ID NO: 3245184 - RNA, 19 nt, Artificial Sequence
  Description of Artificial Sequence: Synthetic oligonucleotide
cuugucaauacaguucucc

SEQ ID NO: 3245185 - RNA, 19 nt, Artificial Sequence
  Description of Artificial Sequence: Synthetic oligonucleotide
uauccuggggagaaggaug

SEQ ID NO: 3245186 - RNA, 19 nt, Artificial Sequence
  Description of Artificial Sequence: Synthetic oligonucleotide
uugagcagaaugauuagua

SEQ ID NO: 3245187 - RNA, 19 nt, Artificial Sequence
  Description of Artificial Sequence: Synthetic oligonucleotide
ucauguaauuguugcaaca

SEQ ID NO: 3245188 - RNA, 19 nt, Artificial Sequence
  Description of Artificial Sequence: Synthetic oligonucleotide
guuauuaacuuggugaguc

SEQ ID NO: 3245189 - RNA, 19 nt, Artificial Sequence
  Description of Artificial Sequence: Synthetic oligonucleotide
gaugagguggcccuguuuc

SEQ ID NO: 3245190 - RNA, 19 nt, Artificial Sequence
  Description of Artificial Sequence: Synthetic oligonucleotide
ucauuaaacucaucuuucu

SEQ ID NO: 3245191 - RNA, 19 nt, Artificial Sequence
  Description of Artificial Sequence: Synthetic oligonucleotide
uaggccucggcuacaauag

SEQ ID NO: 3245192 - RNA, 19 nt, Artificial Sequence
  Description of Artificial Sequence: Synthetic oligonucleotide
auagggaaagggcugcauc

SEQ ID NO: 3245193 - RNA, 19 nt, Artificial Sequence
  Description of Artificial Sequence: Synthetic oligonucleotide
cagaauacuaggagcauug

SEQ ID NO: 3245194 - RNA, 19 nt, Artificial Sequence
  Description of Artificial Sequence: Synthetic oligonucleotide
cuauucauacagauccagc

SEQ ID NO: 3245195 - RNA, 19 nt, Artificial Sequence
  Description of Artificial Sequence: Synthetic oligonucleotide
ucuccuauugcuagugugu

SEQ ID NO: 3245196 - RNA, 19 nt, Artificial Sequence
  Description of Artificial Sequence: Synthetic oligonucleotide
gauagauuugugcuugaga

SEQ ID NO: 3245197 - RNA, 19 nt, Artificial Sequence
  Description of Artificial Sequence: Synthetic oligonucleotide
aaaguaacuucuucagguu

SEQ ID NO: 3245198 - RNA, 19 nt, Artificial Sequence
  Description of Artificial Sequence: Synthetic oligonucleotide
agcugugugucaauaaugg

SEQ ID NO: 3245199 - RNA, 19 nt, Artificial Sequence
  Description of Artificial Sequence: Synthetic oligonucleotide
ucuuuucuggaacuccaca

SEQ ID NO: 3245200 - RNA, 19 nt, Artificial Sequence
  Description of Artificial Sequence: Synthetic oligonucleotide
uugagaaaagacaguguaa

SEQ ID NO: 3245201 - RNA, 19 nt, Artificial Sequence
  Description of Artificial Sequence: Synthetic oligonucleotide
agccuaauguacucagaac

SEQ ID NO: 3245202 - RNA, 19 nt, Artificial Sequence
  Description of Artificial Sequence: Synthetic oligonucleotide
auaucagagggcagaauac

SEQ ID NO: 3245203 - RNA, 19 nt, Artificial Sequence
  Description of Artificial Sequence: Synthetic oligonucleotide
uuuggugcuggucauuaaa

SEQ ID NO: 3245204 - RNA, 19 nt, Artificial Sequence
  Description of Artificial Sequence: Synthetic oligonucleotide
aucacuuguugguagagaa

SEQ ID NO: 3245205 - RNA, 19 nt, Artificial Sequence
  Description of Artificial Sequence: Synthetic oligonucleotide
gaugcaagaaaagucccac

SEQ ID NO: 3245206 - RNA, 19 nt, Artificial Sequence
  Description of Artificial Sequence: Synthetic oligonucleotide
gagucacuuucucuaauug

SEQ ID NO: 3245207 - RNA, 19 nt, Artificial Sequence
  Description of Artificial Sequence: Synthetic oligonucleotide
acaauagaagccugguaga

SEQ ID NO: 3245208 - RNA, 19 nt, Artificial Sequence
  Description of Artificial Sequence: Synthetic oligonucleotide
gucaauacaguucuccaga

SEQ ID NO: 3245209 - RNA, 19 nt, Artificial Sequence
  Description of Artificial Sequence: Synthetic oligonucleotide
ucuagagcguguauaggaa

SEQ ID NO: 3245210 - RNA, 19 nt, Artificial Sequence
  Description of Artificial Sequence: Synthetic oligonucleotide
caaacugucaaacaccaaa

SEQ ID NO: 3245211 - RNA, 19 nt, Artificial Sequence
  Description of Artificial Sequence: Synthetic oligonucleotide
aagugcgagugaaaauccc

SEQ ID NO: 3245212 - RNA, 19 nt, Artificial Sequence
  Description of Artificial Sequence: Synthetic oligonucleotide
uguguucugaccaguguuc

SEQ ID NO: 3245213 - RNA, 19 nt, Artificial Sequence
  Description of Artificial Sequence: Synthetic oligonucleotide
aaaagugaugaugcagcug

SEQ ID NO: 3245214 - RNA, 19 nt, Artificial Sequence
  Description of Artificial Sequence: Synthetic oligonucleotide
auacuaggagcauuguagu

SEQ ID NO: 3245215 - RNA, 19 nt, Artificial Sequence
  Description of Artificial Sequence: Synthetic oligonucleotide
cauaauucagacguuccac

SEQ ID NO: 3245216 - RNA, 19 nt, Artificial Sequence
  Description of Artificial Sequence: Synthetic oligonucleotide
agugugagcaacagauggc

SEQ ID NO: 3245217 - RNA, 19 nt, Artificial Sequence
  Description of Artificial Sequence: Synthetic oligonucleotide
uuucuuuucuuuuaaaccc

SEQ ID NO: 3245218 - RNA, 19 nt, Artificial Sequence
  Description of Artificial Sequence: Synthetic oligonucleotide
uucuuuuaaacccugcuug

SEQ ID NO: 3245219 - RNA, 19 nt, Artificial Sequence
  Description of Artificial Sequence: Synthetic oligonucleotide
cuuucuuuucuuuuaaacc

SEQ ID NO: 3245220 - RNA, 19 nt, Artificial Sequence
  Description of Artificial Sequence: Synthetic oligonucleotide
acuuguacacaauuucugc

SEQ ID NO: 3245221 - RNA, 19 nt, Artificial Sequence
  Description of Artificial Sequence: Synthetic oligonucleotide
gaguccaccauguugaugc

SEQ ID NO: 3245222 - RNA, 19 nt, Artificial Sequence
  Description of Artificial Sequence: Synthetic oligonucleotide
uugaaauccagcuucucag

SEQ ID NO: 3245223 - RNA, 19 nt, Artificial Sequence
  Description of Artificial Sequence: Synthetic oligonucleotide
guuucaaucuucuuauucc

SEQ ID NO: 3245224 - RNA, 19 nt, Artificial Sequence
  Description of Artificial Sequence: Synthetic oligonucleotide
accauguugaugcugcccc

SEQ ID NO: 3245225 - RNA, 19 nt, Artificial Sequence
  Description of Artificial Sequence: Synthetic oligonucleotide
ugauauuauccaaggaacc

SEQ ID NO: 3245226 - RNA, 19 nt, Artificial Sequence
  Description of Artificial Sequence: Synthetic oligonucleotide
uuggcauucucucggaagg

SEQ ID NO: 3245227 - RNA, 19 nt, Artificial Sequence
  Description of Artificial Sequence: Synthetic oligonucleotide
cacaauuucugcuccaugg

SEQ ID NO: 3245228 - RNA, 19 nt, Artificial Sequence
  Description of Artificial Sequence: Synthetic oligonucleotide
uuuuaaacccugcuuggcc

SEQ ID NO: 3245229 - RNA, 19 nt, Artificial Sequence
  Description of Artificial Sequence: Synthetic oligonucleotide
ucuuauucccuccuccagg

SEQ ID NO: 3245230 - RNA, 19 nt, Artificial Sequence
  Description of Artificial Sequence: Synthetic oligonucleotide
ucuuuuaaacccugcuugg

SEQ ID NO: 3245231 - RNA, 19 nt, Artificial Sequence
  Description of Artificial Sequence: Synthetic oligonucleotide
ucuuucuuuucuuuuaaac

SEQ ID NO: 3245232 - RNA, 19 nt, Artificial Sequence
  Description of Artificial Sequence: Synthetic oligonucleotide
uuauccaaggaaccaaucu

SEQ ID NO: 3245233 - RNA, 19 nt, Artificial Sequence
  Description of Artificial Sequence: Synthetic oligonucleotide
agaagcggacacuucaucg

SEQ ID NO: 3245234 - RNA, 19 nt, Artificial Sequence
  Description of Artificial Sequence: Synthetic oligonucleotide
uuuucuuuuaaacccugcu

SEQ ID NO: 3245235 - RNA, 19 nt, Artificial Sequence
  Description of Artificial Sequence: Synthetic oligonucleotide
uuucaaucuucuuauuccc

SEQ ID NO: 3245236 - RNA, 19 nt, Artificial Sequence
  Description of Artificial Sequence: Synthetic oligonucleotide
uguacacaauuucugcucc

SEQ ID NO: 3245237 - RNA, 19 nt, Artificial Sequence
  Description of Artificial Sequence: Synthetic oligonucleotide
aauccagcuucucagauuu

SEQ ID NO: 3245238 - RNA, 19 nt, Artificial Sequence
  Description of Artificial Sequence: Synthetic oligonucleotide
aagcggacacuucaucggc

SEQ ID NO: 3245239 - RNA, 19 nt, Artificial Sequence
  Description of Artificial Sequence: Synthetic oligonucleotide
ucuucuuauucccuccucc

SEQ ID NO: 3245240 - RNA, 19 nt, Artificial Sequence
  Description of Artificial Sequence: Synthetic oligonucleotide
ugggugauauuauccaagg

SEQ ID NO: 3245241 - RNA, 19 nt, Artificial Sequence
  Description of Artificial Sequence: Synthetic oligonucleotide
uccaaggaaccaaucuucg

SEQ ID NO: 3245242 - RNA, 19 nt, Artificial Sequence
  Description of Artificial Sequence: Synthetic oligonucleotide
uuuaaacccugcuuggcca

SEQ ID NO: 3245243 - RNA, 19 nt, Artificial Sequence
  Description of Artificial Sequence: Synthetic oligonucleotide
gaagcggacacuucaucgg

SEQ ID NO: 3245244 - RNA, 19 nt, Artificial Sequence
  Description of Artificial Sequence: Synthetic oligonucleotide
uuuggcauucucucggaag

SEQ ID NO: 3245245 - RNA, 19 nt, Artificial Sequence
  Description of Artificial Sequence: Synthetic oligonucleotide
aaggaaccaaucuucgacu

SEQ ID NO: 3245246 - RNA, 19 nt, Artificial Sequence
  Description of Artificial Sequence: Synthetic oligonucleotide
gacucuguccuugaaaucc

SEQ ID NO: 3245247 - RNA, 19 nt, Artificial Sequence
  Description of Artificial Sequence: Synthetic oligonucleotide
ugacuuguacacaauuucu

SEQ ID NO: 3245248 - RNA, 19 nt, Artificial Sequence
  Description of Artificial Sequence: Synthetic oligonucleotide
ucugucuuggcuuuggcau

SEQ ID NO: 3245249 - RNA, 19 nt, Artificial Sequence
  Description of Artificial Sequence: Synthetic oligonucleotide
uccaccauguugaugcugc

SEQ ID NO: 3245250 - RNA, 19 nt, Artificial Sequence
  Description of Artificial Sequence: Synthetic oligonucleotide
aagaagcggacacuucauc

SEQ ID NO: 3245251 - RNA, 19 nt, Artificial Sequence
  Description of Artificial Sequence: Synthetic oligonucleotide
cuuauucccuccuccaggg

SEQ ID NO: 3245252 - RNA, 19 nt, Artificial Sequence
  Description of Artificial Sequence: Synthetic oligonucleotide
caaggaaccaaucuucgac

SEQ ID NO: 3245253 - RNA, 19 nt, Artificial Sequence
  Description of Artificial Sequence: Synthetic oligonucleotide
cacuucaucggcuagugug

SEQ ID NO: 3245254 - RNA, 19 nt, Artificial Sequence
  Description of Artificial Sequence: Synthetic oligonucleotide
uucgacuggacucuguccu

SEQ ID NO: 3245255 - RNA, 19 nt, Artificial Sequence
  Description of Artificial Sequence: Synthetic oligonucleotide
aauuucugcuccauggucu

SEQ ID NO: 3245256 - RNA, 19 nt, Artificial Sequence
  Description of Artificial Sequence: Synthetic oligonucleotide
uucuuuucuuuuaaacccu

SEQ ID NO: 3245257 - RNA, 19 nt, Artificial Sequence
  Description of Artificial Sequence: Synthetic oligonucleotide
gauauuauccaaggaacca

SEQ ID NO: 3245258 - RNA, 19 nt, Artificial Sequence
  Description of Artificial Sequence: Synthetic oligonucleotide
uuucuuuuaaacccugcuu

SEQ ID NO: 3245259 - RNA, 19 nt, Artificial Sequence
  Description of Artificial Sequence: Synthetic oligonucleotide
gugauauuauccaaggaac

SEQ ID NO: 3245260 - RNA, 19 nt, Artificial Sequence
  Description of Artificial Sequence: Synthetic oligonucleotide
ucuuuucuuuuaaacccug

SEQ ID NO: 3245261 - RNA, 19 nt, Artificial Sequence
  Description of Artificial Sequence: Synthetic oligonucleotide
gacaugggugauauuaucc

SEQ ID NO: 3245262 - RNA, 19 nt, Artificial Sequence
  Description of Artificial Sequence: Synthetic oligonucleotide
uuuucuuucuuuucuuuua

SEQ ID NO: 3245263 - RNA, 19 nt, Artificial Sequence
  Description of Artificial Sequence: Synthetic oligonucleotide
uauccaaggaaccaaucuu

SEQ ID NO: 3245264 - RNA, 19 nt, Artificial Sequence
  Description of Artificial Sequence: Synthetic oligonucleotide
uggguuucaaucuucuuau

SEQ ID NO: 3245265 - RNA, 19 nt, Artificial Sequence
  Description of Artificial Sequence: Synthetic oligonucleotide
ugaggugacguggagaugu

SEQ ID NO: 3245266 - RNA, 19 nt, Artificial Sequence
  Description of Artificial Sequence: Synthetic oligonucleotide
gagauguguccccagacac

SEQ ID NO: 3245267 - RNA, 19 nt, Artificial Sequence
  Description of Artificial Sequence: Synthetic oligonucleotide
uucuuauucccuccuccag

SEQ ID NO: 3245268 - RNA, 19 nt, Artificial Sequence
  Description of Artificial Sequence: Synthetic oligonucleotide
ggugauauuauccaaggaa

SEQ ID NO: 3245269 - RNA, 19 nt, Artificial Sequence
  Description of Artificial Sequence: Synthetic oligonucleotide
ucaaucuucuuauucccuc

SEQ ID NO: 3245270 - RNA, 19 nt, Artificial Sequence
  Description of Artificial Sequence: Synthetic oligonucleotide
uguggugaguccaccaugu

SEQ ID NO: 3245271 - RNA, 19 nt, Artificial Sequence
  Description of Artificial Sequence: Synthetic oligonucleotide
uuucuuucuuuucuuuuaa

SEQ ID NO: 3245272 - RNA, 19 nt, Artificial Sequence
  Description of Artificial Sequence: Synthetic oligonucleotide
uggugaguccaccauguug

SEQ ID NO: 3245273 - RNA, 19 nt, Artificial Sequence
  Description of Artificial Sequence: Synthetic oligonucleotide
aaucuucuuauucccuccu

SEQ ID NO: 3245274 - RNA, 19 nt, Artificial Sequence
  Description of Artificial Sequence: Synthetic oligonucleotide
uccuccagggacaugggug

SEQ ID NO: 3245275 - RNA, 19 nt, Artificial Sequence
  Description of Artificial Sequence: Synthetic oligonucleotide
uuguacacaauuucugcuc

SEQ ID NO: 3245276 - RNA, 19 nt, Artificial Sequence
  Description of Artificial Sequence: Synthetic oligonucleotide
acaugggugauauuaucca

SEQ ID NO: 3245277 - RNA, 19 nt, Artificial Sequence
  Description of Artificial Sequence: Synthetic oligonucleotide
uauuauccaaggaaccaau

SEQ ID NO: 3245278 - RNA, 19 nt, Artificial Sequence
  Description of Artificial Sequence: Synthetic oligonucleotide
uguugaugcugccccgugg

SEQ ID NO: 3245279 - RNA, 19 nt, Artificial Sequence
  Description of Artificial Sequence: Synthetic oligonucleotide
uggacucuguccuugaaau

SEQ ID NO: 3245280 - RNA, 19 nt, Artificial Sequence
  Description of Artificial Sequence: Synthetic oligonucleotide
uauucccuccuccagggac

SEQ ID NO: 3245281 - RNA, 19 nt, Artificial Sequence
  Description of Artificial Sequence: Synthetic oligonucleotide
uuggcuuuggcauucucuc

SEQ ID NO: 3245282 - RNA, 19 nt, Artificial Sequence
  Description of Artificial Sequence: Synthetic oligonucleotide
ugcuuggccaaagaagcgg

SEQ ID NO: 3245283 - RNA, 19 nt, Artificial Sequence
  Description of Artificial Sequence: Synthetic oligonucleotide
gugacuuguacacaauuuc

SEQ ID NO: 3245284 - RNA, 19 nt, Artificial Sequence
  Description of Artificial Sequence: Synthetic oligonucleotide
caaucuucuuauucccucc

SEQ ID NO: 3245285 - RNA, 19 nt, Artificial Sequence
  Description of Artificial Sequence: Synthetic oligonucleotide
uucaaucuucuuauucccu

SEQ ID NO: 3245286 - RNA, 19 nt, Artificial Sequence
  Description of Artificial Sequence: Synthetic oligonucleotide
cuuuucuuuuaaacccugc

SEQ ID NO: 3245287 - RNA, 19 nt, Artificial Sequence
  Description of Artificial Sequence: Synthetic oligonucleotide
gacuuguacacaauuucug

SEQ ID NO: 3245288 - RNA, 19 nt, Artificial Sequence
  Description of Artificial Sequence: Synthetic oligonucleotide
ugaaauccagcuucucaga

SEQ ID NO: 3245289 - RNA, 19 nt, Artificial Sequence
  Description of Artificial Sequence: Synthetic oligonucleotide
guccuugaaauccagcuuc

SEQ ID NO: 3245290 - RNA, 19 nt, Artificial Sequence
  Description of Artificial Sequence: Synthetic oligonucleotide
auccaaggaaccaaucuuc

SEQ ID NO: 3245291 - RNA, 19 nt, Artificial Sequence
  Description of Artificial Sequence: Synthetic oligonucleotide
uggccaaagaagcggacac

SEQ ID NO: 3245292 - RNA, 19 nt, Artificial Sequence
  Description of Artificial Sequence: Synthetic oligonucleotide
acaauuucugcuccauggu

SEQ ID NO: 3245293 - RNA, 19 nt, Artificial Sequence
  Description of Artificial Sequence: Synthetic oligonucleotide
uaguguggcaagcuguggu

SEQ ID NO: 3245294 - RNA, 19 nt, Artificial Sequence
  Description of Artificial Sequence: Synthetic oligonucleotide
uccauggucugucuuggcu

SEQ ID NO: 3245295 - RNA, 19 nt, Artificial Sequence
  Description of Artificial Sequence: Synthetic oligonucleotide
ccugcuuggccaaagaagc

SEQ ID NO: 3245296 - RNA, 19 nt, Artificial Sequence
  Description of Artificial Sequence: Synthetic oligonucleotide
ucuguccuugaaauccagc

SEQ ID NO: 3245297 - RNA, 19 nt, Artificial Sequence
  Description of Artificial Sequence: Synthetic oligonucleotide
uguguccccagacaccaca

SEQ ID NO: 3245298 - RNA, 19 nt, Artificial Sequence
  Description of Artificial Sequence: Synthetic oligonucleotide
cuugaaauccagcuucuca

SEQ ID NO: 3245299 - RNA, 19 nt, Artificial Sequence
  Description of Artificial Sequence: Synthetic oligonucleotide
caaagaagcggacacuuca

SEQ ID NO: 3245300 - RNA, 19 nt, Artificial Sequence
  Description of Artificial Sequence: Synthetic oligonucleotide
cagcuuguggguuucaauc

SEQ ID NO: 3245301 - RNA, 19 nt, Artificial Sequence
  Description of Artificial Sequence: Synthetic oligonucleotide
acaggugacuuguacacaa

SEQ ID NO: 3245302 - RNA, 19 nt, Artificial Sequence
  Description of Artificial Sequence: Synthetic oligonucleotide
guggaggacacauugcuga

SEQ ID NO: 3245303 - RNA, 19 nt, Artificial Sequence
  Description of Artificial Sequence: Synthetic oligonucleotide
acuucaucggcuagugugg

SEQ ID NO: 3245304 - RNA, 19 nt, Artificial Sequence
  Description of Artificial Sequence: Synthetic oligonucleotide
cauugcugaggugacgugg

SEQ ID NO: 3245305 - RNA, 19 nt, Artificial Sequence
  Description of Artificial Sequence: Synthetic oligonucleotide
aaauccagcuucucagauu

SEQ ID NO: 3245306 - RNA, 19 nt, Artificial Sequence
  Description of Artificial Sequence: Synthetic oligonucleotide
agcuuguggguuucaaucu

SEQ ID NO: 3245307 - RNA, 19 nt, Artificial Sequence
  Description of Artificial Sequence: Synthetic oligonucleotide
ugcuccauggucugucuug

SEQ ID NO: 3245308 - RNA, 19 nt, Artificial Sequence
  Description of Artificial Sequence: Synthetic oligonucleotide
aggaaccaaucuucgacug

SEQ ID NO: 3245309 - RNA, 19 nt, Artificial Sequence
  Description of Artificial Sequence: Synthetic oligonucleotide
ugaugcugccccguggagg

SEQ ID NO: 3245310 - RNA, 19 nt, Artificial Sequence
  Description of Artificial Sequence: Synthetic oligonucleotide
ucuucgacuggacucuguc

SEQ ID NO: 3245311 - RNA, 19 nt, Artificial Sequence
  Description of Artificial Sequence: Synthetic oligonucleotide
accacaggugacuuguaca

SEQ ID NO: 3245312 - RNA, 19 nt, Artificial Sequence
  Description of Artificial Sequence: Synthetic oligonucleotide
ucggaaggucagcuugugg

SEQ ID NO: 3245313 - RNA, 19 nt, Artificial Sequence
  Description of Artificial Sequence: Synthetic oligonucleotide
aguguggcaagcuguggug

SEQ ID NO: 3245314 - RNA, 19 nt, Artificial Sequence
  Description of Artificial Sequence: Synthetic oligonucleotide
cuuuuaaacccugcuuggc

SEQ ID NO: 3245315 - RNA, 19 nt, Artificial Sequence
  Description of Artificial Sequence: Synthetic oligonucleotide
gguuucaaucuucuuauuc

SEQ ID NO: 3245316 - RNA, 19 nt, Artificial Sequence
  Description of Artificial Sequence: Synthetic oligonucleotide
auuucugcuccauggucug

SEQ ID NO: 3245317 - RNA, 19 nt, Artificial Sequence
  Description of Artificial Sequence: Synthetic oligonucleotide
aagaguuagcaucagcucc

SEQ ID NO: 3245318 - RNA, 19 nt, Artificial Sequence
  Description of Artificial Sequence: Synthetic oligonucleotide
aaacucccgaacuagcugg

SEQ ID NO: 3245319 - RNA, 19 nt, Artificial Sequence
  Description of Artificial Sequence: Synthetic oligonucleotide
uggcacaucacccauaagc

SEQ ID NO: 3245320 - RNA, 19 nt, Artificial Sequence
  Description of Artificial Sequence: Synthetic oligonucleotide
aaagucagcaggucgccgg

SEQ ID NO: 3245321 - RNA, 19 nt, Artificial Sequence
  Description of Artificial Sequence: Synthetic oligonucleotide
uacguuaucaaaagaauua

SEQ ID NO: 3245322 - RNA, 19 nt, Artificial Sequence
  Description of Artificial Sequence: Synthetic oligonucleotide
aagaaaccgcagcaggcgc

SEQ ID NO: 3245323 - RNA, 19 nt, Artificial Sequence
  Description of Artificial Sequence: Synthetic oligonucleotide
ugagcaaagaaaccgcagc

SEQ ID NO: 3245324 - RNA, 19 nt, Artificial Sequence
  Description of Artificial Sequence: Synthetic oligonucleotide
uuuagggccucuacgacag

SEQ ID NO: 3245325 - RNA, 19 nt, Artificial Sequence
  Description of Artificial Sequence: Synthetic oligonucleotide
gacgggaaaggucagcucg

SEQ ID NO: 3245326 - RNA, 19 nt, Artificial Sequence
  Description of Artificial Sequence: Synthetic oligonucleotide
caaggaaaacucuucacag

SEQ ID NO: 3245327 - RNA, 19 nt, Artificial Sequence
  Description of Artificial Sequence: Synthetic oligonucleotide
ucaaagacgaccaguggca

SEQ ID NO: 3245328 - RNA, 19 nt, Artificial Sequence
  Description of Artificial Sequence: Synthetic oligonucleotide
gaaagcagaugucguaagg

SEQ ID NO: 3245329 - RNA, 19 nt, Artificial Sequence
  Description of Artificial Sequence: Synthetic oligonucleotide
cucaaagacgaccaguggc

SEQ ID NO: 3245330 - RNA, 19 nt, Artificial Sequence
  Description of Artificial Sequence: Synthetic oligonucleotide
ucuccaauggacugugcgg

SEQ ID NO: 3245331 - RNA, 19 nt, Artificial Sequence
  Description of Artificial Sequence: Synthetic oligonucleotide
uuacguuaucaaaagaauu

SEQ ID NO: 3245332 - RNA, 19 nt, Artificial Sequence
  Description of Artificial Sequence: Synthetic oligonucleotide
ugaaccaugccauuucccu

SEQ ID NO: 3245333 - RNA, 19 nt, Artificial Sequence
  Description of Artificial Sequence: Synthetic oligonucleotide
gagacaucagauucuggag

SEQ ID NO: 3245334 - RNA, 19 nt, Artificial Sequence
  Description of Artificial Sequence: Synthetic oligonucleotide
gguagcugggaccagacgg

SEQ ID NO: 3245335 - RNA, 19 nt, Artificial Sequence
  Description of Artificial Sequence: Synthetic oligonucleotide
uccaagacccuuuacuucu

SEQ ID NO: 3245336 - RNA, 19 nt, Artificial Sequence
  Description of Artificial Sequence: Synthetic oligonucleotide
ugggacagagacuccaggg

SEQ ID NO: 3245337 - RNA, 19 nt, Artificial Sequence
  Description of Artificial Sequence: Synthetic oligonucleotide
gaugucguaagguccagac

SEQ ID NO: 3245338 - RNA, 19 nt, Artificial Sequence
  Description of Artificial Sequence: Synthetic oligonucleotide
ugaccgaccguccaagacc

SEQ ID NO: 3245339 - RNA, 19 nt, Artificial Sequence
  Description of Artificial Sequence: Synthetic oligonucleotide
ucauaguauugaguggugg

SEQ ID NO: 3245340 - RNA, 19 nt, Artificial Sequence
  Description of Artificial Sequence: Synthetic oligonucleotide
caaagaaaccgcagcaggc

SEQ ID NO: 3245341 - RNA, 19 nt, Artificial Sequence
  Description of Artificial Sequence: Synthetic oligonucleotide
aaccaugccauuucccucu

SEQ ID NO: 3245342 - RNA, 19 nt, Artificial Sequence
  Description of Artificial Sequence: Synthetic oligonucleotide
ucucaaagacgaccagugg

SEQ ID NO: 3245343 - RNA, 19 nt, Artificial Sequence
  Description of Artificial Sequence: Synthetic oligonucleotide
uucccuucggcucugccag

SEQ ID NO: 3245344 - RNA, 19 nt, Artificial Sequence
  Description of Artificial Sequence: Synthetic oligonucleotide
uuuuagggccucuacgaca

SEQ ID NO: 3245345 - RNA, 19 nt, Artificial Sequence
  Description of Artificial Sequence: Synthetic oligonucleotide
agcagaugucguaaggucc

SEQ ID NO: 3245346 - RNA, 19 nt, Artificial Sequence
  Description of Artificial Sequence: Synthetic oligonucleotide
uuagcaucagcuccugaac

SEQ ID NO: 3245347 - RNA, 19 nt, Artificial Sequence
  Description of Artificial Sequence: Synthetic oligonucleotide
ucugagcaaagaaaccgca

SEQ ID NO: 3245348 - RNA, 19 nt, Artificial Sequence
  Description of Artificial Sequence: Synthetic oligonucleotide
ugaaacucccgaacuagcu

SEQ ID NO: 3245349 - RNA, 19 nt, Artificial Sequence
  Description of Artificial Sequence: Synthetic oligonucleotide
ucuguuaggcuuugggaca

SEQ ID NO: 3245350 - RNA, 19 nt, Artificial Sequence
  Description of Artificial Sequence: Synthetic oligonucleotide
gaaugccgggcuuaggugc

SEQ ID NO: 3245351 - RNA, 19 nt, Artificial Sequence
  Description of Artificial Sequence: Synthetic oligonucleotide
aagacgaccaguggcauca

SEQ ID NO: 3245352 - RNA, 19 nt, Artificial Sequence
  Description of Artificial Sequence: Synthetic oligonucleotide
cucucaaagacgaccagug

SEQ ID NO: 3245353 - RNA, 19 nt, Artificial Sequence
  Description of Artificial Sequence: Synthetic oligonucleotide
aaagacgaccaguggcauc

SEQ ID NO: 3245354 - RNA, 19 nt, Artificial Sequence
  Description of Artificial Sequence: Synthetic oligonucleotide
cugaaguccgcacacgcgg

SEQ ID NO: 3245355 - RNA, 19 nt, Artificial Sequence
  Description of Artificial Sequence: Synthetic oligonucleotide
ucggauugggaacagcacu

SEQ ID NO: 3245356 - RNA, 19 nt, Artificial Sequence
  Description of Artificial Sequence: Synthetic oligonucleotide
caugguucauaguauugag

SEQ ID NO: 3245357 - RNA, 19 nt, Artificial Sequence
  Description of Artificial Sequence: Synthetic oligonucleotide
uuggcgggcagccacacug

SEQ ID NO: 3245358 - RNA, 19 nt, Artificial Sequence
  Description of Artificial Sequence: Synthetic oligonucleotide
agaugcaagagacgggcag

SEQ ID NO: 3245359 - RNA, 19 nt, Artificial Sequence
  Description of Artificial Sequence: Synthetic oligonucleotide
acagcuggucccuuggcgg

SEQ ID NO: 3245360 - RNA, 19 nt, Artificial Sequence
  Description of Artificial Sequence: Synthetic oligonucleotide
aucaaaagaauuaaauuua

SEQ ID NO: 3245361 - RNA, 19 nt, Artificial Sequence
  Description of Artificial Sequence: Synthetic oligonucleotide
ugcgacagagacaucagau

SEQ ID NO: 3245362 - RNA, 19 nt, Artificial Sequence
  Description of Artificial Sequence: Synthetic oligonucleotide
acugugacgcauccagugg

SEQ ID NO: 3245363 - RNA, 19 nt, Artificial Sequence
  Description of Artificial Sequence: Synthetic oligonucleotide
uugaagaguuagcaucagc

SEQ ID NO: 3245364 - RNA, 19 nt, Artificial Sequence
  Description of Artificial Sequence: Synthetic oligonucleotide
ucacccauaagcaccuugu

SEQ ID NO: 3245365 - RNA, 19 nt, Artificial Sequence
  Description of Artificial Sequence: Synthetic oligonucleotide
agcucagagaccuugccgu

SEQ ID NO: 3245366 - RNA, 19 nt, Artificial Sequence
  Description of Artificial Sequence: Synthetic oligonucleotide
ugccaggcaggcaugggcg

SEQ ID NO: 3245367 - RNA, 19 nt, Artificial Sequence
  Description of Artificial Sequence: Synthetic oligonucleotide
gaaaggucagcucgagcag

SEQ ID NO: 3245368 - RNA, 19 nt, Artificial Sequence
  Description of Artificial Sequence: Synthetic oligonucleotide
ggaaaggucagcucgagca

SEQ ID NO: 3245369 - RNA, 19 nt, Artificial Sequence
  Description of Artificial Sequence: Synthetic oligonucleotide
acaugugcgacagagacau

SEQ ID NO: 3245370 - RNA, 19 nt, Artificial Sequence
  Description of Artificial Sequence: Synthetic oligonucleotide
cucuccaauggacugugcg

SEQ ID NO: 3245371 - RNA, 19 nt, Artificial Sequence
  Description of Artificial Sequence: Synthetic oligonucleotide
gagacgggcagccuggagc

SEQ ID NO: 3245372 - RNA, 19 nt, Artificial Sequence
  Description of Artificial Sequence: Synthetic oligonucleotide
ucccgaacuagcuggcugg

SEQ ID NO: 3245373 - RNA, 19 nt, Artificial Sequence
  Description of Artificial Sequence: Synthetic oligonucleotide
cuagcaucuagcgggagcc

SEQ ID NO: 3245374 - RNA, 19 nt, Artificial Sequence
  Description of Artificial Sequence: Synthetic oligonucleotide
aagacccuuuacuucuucu

SEQ ID NO: 3245375 - RNA, 19 nt, Artificial Sequence
  Description of Artificial Sequence: Synthetic oligonucleotide
cuccguaccccaaagucag

SEQ ID NO: 3245376 - RNA, 19 nt, Artificial Sequence
  Description of Artificial Sequence: Synthetic oligonucleotide
aacaugguucauaguauug

SEQ ID NO: 3245377 - RNA, 19 nt, Artificial Sequence
  Description of Artificial Sequence: Synthetic oligonucleotide
aaggucagcucgagcagcc

SEQ ID NO: 3245378 - RNA, 19 nt, Artificial Sequence
  Description of Artificial Sequence: Synthetic oligonucleotide
ugugcgacagagacaucag

SEQ ID NO: 3245379 - RNA, 19 nt, Artificial Sequence
  Description of Artificial Sequence: Synthetic oligonucleotide
ugcccggucaccccagugg

SEQ ID NO: 3245380 - RNA, 19 nt, Artificial Sequence
  Description of Artificial Sequence: Synthetic oligonucleotide
caguggaaagcagaugucg

SEQ ID NO: 3245381 - RNA, 19 nt, Artificial Sequence
  Description of Artificial Sequence: Synthetic oligonucleotide
uuuuguccccucuccaaug

SEQ ID NO: 3245382 - RNA, 19 nt, Artificial Sequence
  Description of Artificial Sequence: Synthetic oligonucleotide
guuaucaaaagaauuaaau

SEQ ID NO: 3245383 - RNA, 19 nt, Artificial Sequence
  Description of Artificial Sequence: Synthetic oligonucleotide
gguucauaguauugagugg

SEQ ID NO: 3245384 - RNA, 19 nt, Artificial Sequence
  Description of Artificial Sequence: Synthetic oligonucleotide
gucagaaguccucggauug

SEQ ID NO: 3245385 - RNA, 19 nt, Artificial Sequence
  Description of Artificial Sequence: Synthetic oligonucleotide
aucggggcagugcaacgcc

SEQ ID NO: 3245386 - RNA, 19 nt, Artificial Sequence
  Description of Artificial Sequence: Synthetic oligonucleotide
gagcaaagaaaccgcagca

SEQ ID NO: 3245387 - RNA, 19 nt, Artificial Sequence
  Description of Artificial Sequence: Synthetic oligonucleotide
guuagcaucagcuccugaa

SEQ ID NO: 3245388 - RNA, 19 nt, Artificial Sequence
  Description of Artificial Sequence: Synthetic oligonucleotide
cucuccacagcucccagag

SEQ ID NO: 3245389 - RNA, 19 nt, Artificial Sequence
  Description of Artificial Sequence: Synthetic oligonucleotide
cugugacgcauccaguggg

SEQ ID NO: 3245390 - RNA, 19 nt, Artificial Sequence
  Description of Artificial Sequence: Synthetic oligonucleotide
agaccuugccgugaaacuc

SEQ ID NO: 3245391 - RNA, 19 nt, Artificial Sequence
  Description of Artificial Sequence: Synthetic oligonucleotide
guuuccgccgccgagcgcg

SEQ ID NO: 3245392 - RNA, 19 nt, Artificial Sequence
  Description of Artificial Sequence: Synthetic oligonucleotide
gauugggaacagcacugcc

SEQ ID NO: 3245393 - RNA, 19 nt, Artificial Sequence
  Description of Artificial Sequence: Synthetic oligonucleotide
cacgggucuaggaaggccc

SEQ ID NO: 3245394 - RNA, 19 nt, Artificial Sequence
  Description of Artificial Sequence: Synthetic oligonucleotide
uugggaacagcacugccuu

SEQ ID NO: 3245395 - RNA, 19 nt, Artificial Sequence
  Description of Artificial Sequence: Synthetic oligonucleotide
cugagcaaagaaaccgcag

SEQ ID NO: 3245396 - RNA, 19 nt, Artificial Sequence
  Description of Artificial Sequence: Synthetic oligonucleotide
uagcgggagccgcagaugc

SEQ ID NO: 3245397 - RNA, 19 nt, Artificial Sequence
  Description of Artificial Sequence: Synthetic oligonucleotide
aacucuucacagugacucu

SEQ ID NO: 3245398 - RNA, 19 nt, Artificial Sequence
  Description of Artificial Sequence: Synthetic oligonucleotide
acugugcggggcuagcauc

SEQ ID NO: 3245399 - RNA, 19 nt, Artificial Sequence
  Description of Artificial Sequence: Synthetic oligonucleotide
acaugguucauaguauuga

SEQ ID NO: 3245400 - RNA, 19 nt, Artificial Sequence
  Description of Artificial Sequence: Synthetic oligonucleotide
gaaggcagcagcucagaga

SEQ ID NO: 3245401 - RNA, 19 nt, Artificial Sequence
  Description of Artificial Sequence: Synthetic oligonucleotide
agcaaagaaaccgcagcag

SEQ ID NO: 3245402 - RNA, 19 nt, Artificial Sequence
  Description of Artificial Sequence: Synthetic oligonucleotide
ucuggagucagaaguccuc

SEQ ID NO: 3245403 - RNA, 19 nt, Artificial Sequence
  Description of Artificial Sequence: Synthetic oligonucleotide
augugcgacagagacauca

SEQ ID NO: 3245404 - RNA, 19 nt, Artificial Sequence
  Description of Artificial Sequence: Synthetic oligonucleotide
augcaagagacgggcagcc

SEQ ID NO: 3245405 - RNA, 19 nt, Artificial Sequence
  Description of Artificial Sequence: Synthetic oligonucleotide
aggaauuccuccucugcgu

SEQ ID NO: 3245406 - RNA, 19 nt, Artificial Sequence
  Description of Artificial Sequence: Synthetic oligonucleotide
cacugugacgcauccagug

SEQ ID NO: 3245407 - RNA, 19 nt, Artificial Sequence
  Description of Artificial Sequence: Synthetic oligonucleotide
gaccaguggcaucagcacc

SEQ ID NO: 3245408 - RNA, 19 nt, Artificial Sequence
  Description of Artificial Sequence: Synthetic oligonucleotide
aguauugaguggugggcgu

SEQ ID NO: 3245409 - RNA, 19 nt, Artificial Sequence
  Description of Artificial Sequence: Synthetic oligonucleotide
gaugcaagagacgggcagc

SEQ ID NO: 3245410 - RNA, 19 nt, Artificial Sequence
  Description of Artificial Sequence: Synthetic oligonucleotide
cauuucccucuuuuguccc

SEQ ID NO: 3245411 - RNA, 19 nt, Artificial Sequence
  Description of Artificial Sequence: Synthetic oligonucleotide
uaggugccaaggaaaacuc

SEQ ID NO: 3245412 - RNA, 19 nt, Artificial Sequence
  Description of Artificial Sequence: Synthetic oligonucleotide
ugacgcauccaguggggag

SEQ ID NO: 3245413 - RNA, 19 nt, Artificial Sequence
  Description of Artificial Sequence: Synthetic oligonucleotide
uccaauggacugugcgggg

SEQ ID NO: 3245414 - RNA, 19 nt, Artificial Sequence
  Description of Artificial Sequence: Synthetic oligonucleotide
gaacuagcuggcuggccag

SEQ ID NO: 3245415 - RNA, 19 nt, Artificial Sequence
  Description of Artificial Sequence: Synthetic oligonucleotide
cacagcgcccugaaguccg

SEQ ID NO: 3245416 - RNA, 19 nt, Artificial Sequence
  Description of Artificial Sequence: Synthetic oligonucleotide
acucuucacagugacucuc

SEQ ID NO: 3245417 - RNA, 19 nt, Artificial Sequence
  Description of Artificial Sequence: Synthetic oligonucleotide
uguuaaacaaucacuguag

SEQ ID NO: 3245418 - RNA, 19 nt, Artificial Sequence
  Description of Artificial Sequence: Synthetic oligonucleotide
ugagauaaaguauaguaga

SEQ ID NO: 3245419 - RNA, 19 nt, Artificial Sequence
  Description of Artificial Sequence: Synthetic oligonucleotide
uuuaaacagucuuaaauac

SEQ ID NO: 3245420 - RNA, 19 nt, Artificial Sequence
  Description of Artificial Sequence: Synthetic oligonucleotide
auuuuaaacagucuuaaau

SEQ ID NO: 3245421 - RNA, 19 nt, Artificial Sequence
  Description of Artificial Sequence: Synthetic oligonucleotide
uuuuaaacagucuuaaaua

SEQ ID NO: 3245422 - RNA, 19 nt, Artificial Sequence
  Description of Artificial Sequence: Synthetic oligonucleotide
uaugacuuaagaauucuga

SEQ ID NO: 3245423 - RNA, 19 nt, Artificial Sequence
  Description of Artificial Sequence: Synthetic oligonucleotide
cugggaauguuuuagaaag

SEQ ID NO: 3245424 - RNA, 19 nt, Artificial Sequence
  Description of Artificial Sequence: Synthetic oligonucleotide
cuugagaacuguaugacag

SEQ ID NO: 3245425 - RNA, 19 nt, Artificial Sequence
  Description of Artificial Sequence: Synthetic oligonucleotide
uaauauugaaauccuguca

SEQ ID NO: 3245426 - RNA, 19 nt, Artificial Sequence
  Description of Artificial Sequence: Synthetic oligonucleotide
aacagucuuaaauacaaau

SEQ ID NO: 3245427 - RNA, 19 nt, Artificial Sequence
  Description of Artificial Sequence: Synthetic oligonucleotide
cucuuauuggaauaguuag

SEQ ID NO: 3245428 - RNA, 19 nt, Artificial Sequence
  Description of Artificial Sequence: Synthetic oligonucleotide
cauccaaucuuuuacagac

SEQ ID NO: 3245429 - RNA, 19 nt, Artificial Sequence
  Description of Artificial Sequence: Synthetic oligonucleotide
uccaaggccacacugagca

SEQ ID NO: 3245430 - RNA, 19 nt, Artificial Sequence
  Description of Artificial Sequence: Synthetic oligonucleotide
ugagaaaagcuccauuuug

SEQ ID NO: 3245431 - RNA, 19 nt, Artificial Sequence
  Description of Artificial Sequence: Synthetic oligonucleotide
auaauuuagacaccgccug

SEQ ID NO: 3245432 - RNA, 19 nt, Artificial Sequence
  Description of Artificial Sequence: Synthetic oligonucleotide
aaaauaauuuagacaccgc

SEQ ID NO: 3245433 - RNA, 19 nt, Artificial Sequence
  Description of Artificial Sequence: Synthetic oligonucleotide
uuaagaauucugaaucucu

SEQ ID NO: 3245434 - RNA, 19 nt, Artificial Sequence
  Description of Artificial Sequence: Synthetic oligonucleotide
uggauaaagaaagucacgc

SEQ ID NO: 3245435 - RNA, 19 nt, Artificial Sequence
  Description of Artificial Sequence: Synthetic oligonucleotide
aaauccugucagcuggggc

SEQ ID NO: 3245436 - RNA, 19 nt, Artificial Sequence
  Description of Artificial Sequence: Synthetic oligonucleotide
uuaaacagucuuaaauaca

SEQ ID NO: 3245437 - RNA, 19 nt, Artificial Sequence
  Description of Artificial Sequence: Synthetic oligonucleotide
uuucgauuuauaauuuugu

SEQ ID NO: 3245438 - RNA, 19 nt, Artificial Sequence
  Description of Artificial Sequence: Synthetic oligonucleotide
aaauuguucuggacgaugg

SEQ ID NO: 3245439 - RNA, 19 nt, Artificial Sequence
  Description of Artificial Sequence: Synthetic oligonucleotide
aauaauuuagacaccgccu

SEQ ID NO: 3245440 - RNA, 19 nt, Artificial Sequence
  Description of Artificial Sequence: Synthetic oligonucleotide
ucgauuuauaauuuuguuc

SEQ ID NO: 3245441 - RNA, 19 nt, Artificial Sequence
  Description of Artificial Sequence: Synthetic oligonucleotide
aagauaagucaggaauucc

SEQ ID NO: 3245442 - RNA, 19 nt, Artificial Sequence
  Description of Artificial Sequence: Synthetic oligonucleotide
gauaaaguauaguagauau

SEQ ID NO: 3245443 - RNA, 19 nt, Artificial Sequence
  Description of Artificial Sequence: Synthetic oligonucleotide
gguuacauuuuccacaggg

SEQ ID NO: 3245444 - RNA, 19 nt, Artificial Sequence
  Description of Artificial Sequence: Synthetic oligonucleotide
uggaauaguuagcugguag

SEQ ID NO: 3245445 - RNA, 19 nt, Artificial Sequence
  Description of Artificial Sequence: Synthetic oligonucleotide
agugguuacauuuuccaca

SEQ ID NO: 3245446 - RNA, 19 nt, Artificial Sequence
  Description of Artificial Sequence: Synthetic oligonucleotide
uguguaaggggauggaggc

SEQ ID NO: 3245447 - RNA, 19 nt, Artificial Sequence
  Description of Artificial Sequence: Synthetic oligonucleotide
agaaagucacgcuugggag

SEQ ID NO: 3245448 - RNA, 19 nt, Artificial Sequence
  Description of Artificial Sequence: Synthetic oligonucleotide
uauugaguaguucaaguuu

SEQ ID NO: 3245449 - RNA, 19 nt, Artificial Sequence
  Description of Artificial Sequence: Synthetic oligonucleotide
gacaccucaauauucccag

SEQ ID NO: 3245450 - RNA, 19 nt, Artificial Sequence
  Description of Artificial Sequence: Synthetic oligonucleotide
uuuagaaaggucacugcuc

SEQ ID NO: 3245451 - RNA, 19 nt, Artificial Sequence
  Description of Artificial Sequence: Synthetic oligonucleotide
ucuccuugaguguuuauca

SEQ ID NO: 3245452 - RNA, 19 nt, Artificial Sequence
  Description of Artificial Sequence: Synthetic oligonucleotide
aguugaccaagucauaaca

SEQ ID NO: 3245453 - RNA, 19 nt, Artificial Sequence
  Description of Artificial Sequence: Synthetic oligonucleotide
ucaggaauuccucuugaga

SEQ ID NO: 3245454 - RNA, 19 nt, Artificial Sequence
  Description of Artificial Sequence: Synthetic oligonucleotide
cuguggcucaauaaggucc

SEQ ID NO: 3245455 - RNA, 19 nt, Artificial Sequence
  Description of Artificial Sequence: Synthetic oligonucleotide
gaaacgacauugcucauca

SEQ ID NO: 3245456 - RNA, 19 nt, Artificial Sequence
  Description of Artificial Sequence: Synthetic oligonucleotide
aaauuaucuuaauggucca

SEQ ID NO: 3245457 - RNA, 19 nt, Artificial Sequence
  Description of Artificial Sequence: Synthetic oligonucleotide
aaguaccacggccugaaug

SEQ ID NO: 3245458 - RNA, 19 nt, Artificial Sequence
  Description of Artificial Sequence: Synthetic oligonucleotide
gcauagaacaauccgaugc

SEQ ID NO: 3245459 - RNA, 19 nt, Artificial Sequence
  Description of Artificial Sequence: Synthetic oligonucleotide
acggccugaauguuuagac

SEQ ID NO: 3245460 - RNA, 19 nt, Artificial Sequence
  Description of Artificial Sequence: Synthetic oligonucleotide
aguaccacggccugaaugu

SEQ ID NO: 3245461 - RNA, 19 nt, Artificial Sequence
  Description of Artificial Sequence: Synthetic oligonucleotide
ugccugaccaguauaggag

SEQ ID NO: 3245462 - RNA, 19 nt, Artificial Sequence
  Description of Artificial Sequence: Synthetic oligonucleotide
gugagauaaaguauaguag

SEQ ID NO: 3245463 - RNA, 19 nt, Artificial Sequence
  Description of Artificial Sequence: Synthetic oligonucleotide
uagaacaauccgaugcuug

SEQ ID NO: 3245464 - RNA, 19 nt, Artificial Sequence
  Description of Artificial Sequence: Synthetic oligonucleotide
uuugagcuaugacuuaaga

SEQ ID NO: 3245465 - RNA, 19 nt, Artificial Sequence
  Description of Artificial Sequence: Synthetic oligonucleotide
uuuggaguacauucagacc

SEQ ID NO: 3245466 - RNA, 19 nt, Artificial Sequence
  Description of Artificial Sequence: Synthetic oligonucleotide
gaaagaacaccaacguucc

SEQ ID NO: 3245467 - RNA, 19 nt, Artificial Sequence
  Description of Artificial Sequence: Synthetic oligonucleotide
ucaagauaagucaggaauu

SEQ ID NO: 3245468 - RNA, 19 nt, Artificial Sequence
  Description of Artificial Sequence: Synthetic oligonucleotide
acuaguuuucuggacaguc

SEQ ID NO: 3245469 - RNA, 19 nt, Artificial Sequence
  Description of Artificial Sequence: Synthetic oligonucleotide
uacauuuuccacaggguaa

SEQ ID NO: 3245470 - RNA, 19 nt, Artificial Sequence
  Description of Artificial Sequence: Synthetic oligonucleotide
auggaguugucauccaauc

SEQ ID NO: 3245471 - RNA, 19 nt, Artificial Sequence
  Description of Artificial Sequence: Synthetic oligonucleotide
cuggauaaagaaagucacg

SEQ ID NO: 3245472 - RNA, 19 nt, Artificial Sequence
  Description of Artificial Sequence: Synthetic oligonucleotide
acacaaaauuuguauugag

SEQ ID NO: 3245473 - RNA, 19 nt, Artificial Sequence
  Description of Artificial Sequence: Synthetic oligonucleotide
uuuugagcuaugacuuaag

SEQ ID NO: 3245474 - RNA, 19 nt, Artificial Sequence
  Description of Artificial Sequence: Synthetic oligonucleotide
gugguuacauuuuccacag

SEQ ID NO: 3245475 - RNA, 19 nt, Artificial Sequence
  Description of Artificial Sequence: Synthetic oligonucleotide
uaauuuagacaccgccugc

SEQ ID NO: 3245476 - RNA, 19 nt, Artificial Sequence
  Description of Artificial Sequence: Synthetic oligonucleotide
aauaguuagcugguagugu

SEQ ID NO: 3245477 - RNA, 19 nt, Artificial Sequence
  Description of Artificial Sequence: Synthetic oligonucleotide
accaacguuccacaggaag

SEQ ID NO: 3245478 - RNA, 19 nt, Artificial Sequence
  Description of Artificial Sequence: Synthetic oligonucleotide
uagguuuacucgaaagaac

SEQ ID NO: 3245479 - RNA, 19 nt, Artificial Sequence
  Description of Artificial Sequence: Synthetic oligonucleotide
ucagaugguccaauccucc

SEQ ID NO: 3245480 - RNA, 19 nt, Artificial Sequence
  Description of Artificial Sequence: Synthetic oligonucleotide
agugucauugcuaagucca

SEQ ID NO: 3245481 - RNA, 19 nt, Artificial Sequence
  Description of Artificial Sequence: Synthetic oligonucleotide
caauccgaugcuugaaucc

SEQ ID NO: 3245482 - RNA, 19 nt, Artificial Sequence
  Description of Artificial Sequence: Synthetic oligonucleotide
guugcuuuugcugaggcac

SEQ ID NO: 3245483 - RNA, 19 nt, Artificial Sequence
  Description of Artificial Sequence: Synthetic oligonucleotide
guuuacucgaaagaacacc

SEQ ID NO: 3245484 - RNA, 19 nt, Artificial Sequence
  Description of Artificial Sequence: Synthetic oligonucleotide
uccgaugcuugaauccugg

SEQ ID NO: 3245485 - RNA, 19 nt, Artificial Sequence
  Description of Artificial Sequence: Synthetic oligonucleotide
aacaauccgaugcuugaau

SEQ ID NO: 3245486 - RNA, 19 nt, Artificial Sequence
  Description of Artificial Sequence: Synthetic oligonucleotide
uugacucucucagaucugg

SEQ ID NO: 3245487 - RNA, 19 nt, Artificial Sequence
  Description of Artificial Sequence: Synthetic oligonucleotide
uaguuuucuggacagucaa

SEQ ID NO: 3245488 - RNA, 19 nt, Artificial Sequence
  Description of Artificial Sequence: Synthetic oligonucleotide
ugaaauccugucagcuggg

SEQ ID NO: 3245489 - RNA, 19 nt, Artificial Sequence
  Description of Artificial Sequence: Synthetic oligonucleotide
uguggcucaauaaggucca

SEQ ID NO: 3245490 - RNA, 19 nt, Artificial Sequence
  Description of Artificial Sequence: Synthetic oligonucleotide
uuagacaccgccugcugug

SEQ ID NO: 3245491 - RNA, 19 nt, Artificial Sequence
  Description of Artificial Sequence: Synthetic oligonucleotide
uaagaauucugaaucucuu

SEQ ID NO: 3245492 - RNA, 19 nt, Artificial Sequence
  Description of Artificial Sequence: Synthetic oligonucleotide
ucauccaaucuuuuacaga

SEQ ID NO: 3245493 - RNA, 19 nt, Artificial Sequence
  Description of Artificial Sequence: Synthetic oligonucleotide
uuagcugguaguguucaag

SEQ ID NO: 3245494 - RNA, 19 nt, Artificial Sequence
  Description of Artificial Sequence: Synthetic oligonucleotide
uuaucauccuucacaguaa

SEQ ID NO: 3245495 - RNA, 19 nt, Artificial Sequence
  Description of Artificial Sequence: Synthetic oligonucleotide
uuauaauuuuguucuuaaa

SEQ ID NO: 3245496 - RNA, 19 nt, Artificial Sequence
  Description of Artificial Sequence: Synthetic oligonucleotide
uuuucagguggcuuacugu

SEQ ID NO: 3245497 - RNA, 19 nt, Artificial Sequence
  Description of Artificial Sequence: Synthetic oligonucleotide
agaacaauccgaugcuuga

SEQ ID NO: 3245498 - RNA, 19 nt, Artificial Sequence
  Description of Artificial Sequence: Synthetic oligonucleotide
uuuagacaccgccugcugu

SEQ ID NO: 3245499 - RNA, 19 nt, Artificial Sequence
  Description of Artificial Sequence: Synthetic oligonucleotide
uucgauuuauaauuuuguu

SEQ ID NO: 3245500 - RNA, 19 nt, Artificial Sequence
  Description of Artificial Sequence: Synthetic oligonucleotide
aauccgaugcuugaauccu

SEQ ID NO: 3245501 - RNA, 19 nt, Artificial Sequence
  Description of Artificial Sequence: Synthetic oligonucleotide
agcggaugcgagcaggagg

SEQ ID NO: 3245502 - RNA, 19 nt, Artificial Sequence
  Description of Artificial Sequence: Synthetic oligonucleotide
uucuccauaggccggugug

SEQ ID NO: 3245503 - RNA, 19 nt, Artificial Sequence
  Description of Artificial Sequence: Synthetic oligonucleotide
gaaauuguucuggacgaug

SEQ ID NO: 3245504 - RNA, 19 nt, Artificial Sequence
  Description of Artificial Sequence: Synthetic oligonucleotide
ugaaagugcuugccauagg

SEQ ID NO: 3245505 - RNA, 19 nt, Artificial Sequence
  Description of Artificial Sequence: Synthetic oligonucleotide
cagagcacagcccuugugc

SEQ ID NO: 3245506 - RNA, 19 nt, Artificial Sequence
  Description of Artificial Sequence: Synthetic oligonucleotide
gccguaacuaguuuucugg

SEQ ID NO: 3245507 - RNA, 19 nt, Artificial Sequence
  Description of Artificial Sequence: Synthetic oligonucleotide
cauacaccugaccuggggc

SEQ ID NO: 3245508 - RNA, 19 nt, Artificial Sequence
  Description of Artificial Sequence: Synthetic oligonucleotide
auaguuagcugguaguguu

SEQ ID NO: 3245509 - RNA, 19 nt, Artificial Sequence
  Description of Artificial Sequence: Synthetic oligonucleotide
cuaugacuuaagaauucug

SEQ ID NO: 3245510 - RNA, 19 nt, Artificial Sequence
  Description of Artificial Sequence: Synthetic oligonucleotide
gguaaugcuuguguaaggg

SEQ ID NO: 3245511 - RNA, 19 nt, Artificial Sequence
  Description of Artificial Sequence: Synthetic oligonucleotide
agauaagucaggaauuccu

SEQ ID NO: 3245512 - RNA, 19 nt, Artificial Sequence
  Description of Artificial Sequence: Synthetic oligonucleotide
ucagugucauugcuaaguc

SEQ ID NO: 3245513 - RNA, 19 nt, Artificial Sequence
  Description of Artificial Sequence: Synthetic oligonucleotide
uucgcauuugcuguccaag

SEQ ID NO: 3245514 - RNA, 19 nt, Artificial Sequence
  Description of Artificial Sequence: Synthetic oligonucleotide
aaugaaccauucagguggg

SEQ ID NO: 3245515 - RNA, 19 nt, Artificial Sequence
  Description of Artificial Sequence: Synthetic oligonucleotide
ugaccaguauaggagagac

SEQ ID NO: 3245516 - RNA, 19 nt, Artificial Sequence
  Description of Artificial Sequence: Synthetic oligonucleotide
agguuuacucgaaagaaca

SEQ ID NO: 3245517 - RNA, 19 nt, Artificial Sequence
  Description of Artificial Sequence: Synthetic oligonucleotide
agaguaauuaauuacagag

SEQ ID NO: 3245518 - RNA, 19 nt, Artificial Sequence
  Description of Artificial Sequence: Synthetic oligonucleotide
aacaagaguaauuaauuac

SEQ ID NO: 3245519 - RNA, 19 nt, Artificial Sequence
  Description of Artificial Sequence: Synthetic oligonucleotide
aauaugauucuuuaaagcu

SEQ ID NO: 3245520 - RNA, 19 nt, Artificial Sequence
  Description of Artificial Sequence: Synthetic oligonucleotide
aauucugaugacucuaugc

SEQ ID NO: 3245521 - RNA, 19 nt, Artificial Sequence
  Description of Artificial Sequence: Synthetic oligonucleotide
uuaucaauggagaugaagc

SEQ ID NO: 3245522 - RNA, 19 nt, Artificial Sequence
  Description of Artificial Sequence: Synthetic oligonucleotide
augacaauuaacuggagac

SEQ ID NO: 3245523 - RNA, 19 nt, Artificial Sequence
  Description of Artificial Sequence: Synthetic oligonucleotide
aguaauuaaguucacaaug

SEQ ID NO: 3245524 - RNA, 19 nt, Artificial Sequence
  Description of Artificial Sequence: Synthetic oligonucleotide
aguaauuaauuacagaggu

SEQ ID NO: 3245525 - RNA, 19 nt, Artificial Sequence
  Description of Artificial Sequence: Synthetic oligonucleotide
agugaguaaauccaucccc

SEQ ID NO: 3245526 - RNA, 19 nt, Artificial Sequence
  Description of Artificial Sequence: Synthetic oligonucleotide
uuucucuccacaaaauugg

SEQ ID NO: 3245527 - RNA, 19 nt, Artificial Sequence
  Description of Artificial Sequence: Synthetic oligonucleotide
uaauuaauuacagaggucu

SEQ ID NO: 3245528 - RNA, 19 nt, Artificial Sequence
  Description of Artificial Sequence: Synthetic oligonucleotide
  modified_base (6)..(6): a, c, u, g, unknown or other
uuggcnuucaguaauuaag

SEQ ID NO: 3245529 - RNA, 19 nt, Artificial Sequence
  Description of Artificial Sequence: Synthetic oligonucleotide
ugauguaucguccagccca

SEQ ID NO: 3245530 - RNA, 19 nt, Artificial Sequence
  Description of Artificial Sequence: Synthetic oligonucleotide
cuaucaaauuauaacauug

SEQ ID NO: 3245531 - RNA, 19 nt, Artificial Sequence
  Description of Artificial Sequence: Synthetic oligonucleotide
gauucuuuaaagcuuccag

SEQ ID NO: 3245532 - RNA, 19 nt, Artificial Sequence
  Description of Artificial Sequence: Synthetic oligonucleotide
aauaccuccacuucuggca

SEQ ID NO: 3245533 - RNA, 19 nt, Artificial Sequence
  Description of Artificial Sequence: Synthetic oligonucleotide
uagcuaucaaauuauaaca

SEQ ID NO: 3245534 - RNA, 19 nt, Artificial Sequence
  Description of Artificial Sequence: Synthetic oligonucleotide
aauuacagaggucuguaga

SEQ ID NO: 3245535 - RNA, 19 nt, Artificial Sequence
  Description of Artificial Sequence: Synthetic oligonucleotide
uaucaauggagaugaagcg

SEQ ID NO: 3245536 - RNA, 19 nt, Artificial Sequence
  Description of Artificial Sequence: Synthetic oligonucleotide
ugauuaucaauggagauga

SEQ ID NO: 3245537 - RNA, 19 nt, Artificial Sequence
  Description of Artificial Sequence: Synthetic oligonucleotide
ucaguaauuaaguucacaa

SEQ ID NO: 3245538 - RNA, 19 nt, Artificial Sequence
  Description of Artificial Sequence: Synthetic oligonucleotide
ucugaugacucuaugcugc

SEQ ID NO: 3245539 - RNA, 19 nt, Artificial Sequence
  Description of Artificial Sequence: Synthetic oligonucleotide
ucaaauuauaacauuguuu

SEQ ID NO: 3245540 - RNA, 19 nt, Artificial Sequence
  Description of Artificial Sequence: Synthetic oligonucleotide
aaugacaauuaacuggaga

SEQ ID NO: 3245541 - RNA, 19 nt, Artificial Sequence
  Description of Artificial Sequence: Synthetic oligonucleotide
guagcuaucaaauuauaac

SEQ ID NO: 3245542 - RNA, 19 nt, Artificial Sequence
  Description of Artificial Sequence: Synthetic oligonucleotide
ugaagagucaucuggccgg

SEQ ID NO: 3245543 - RNA, 19 nt, Artificial Sequence
  Description of Artificial Sequence: Synthetic oligonucleotide
cuucugauuaucaauggag

SEQ ID NO: 3245544 - RNA, 19 nt, Artificial Sequence
  Description of Artificial Sequence: Synthetic oligonucleotide
gaggugaagagucaucugg

SEQ ID NO: 3245545 - RNA, 19 nt, Artificial Sequence
  Description of Artificial Sequence: Synthetic oligonucleotide
  modified_base (2)..(2): a, c, u, g, unknown or other
cnuucaguaauuaaguuca

SEQ ID NO: 3245546 - RNA, 19 nt, Artificial Sequence
  Description of Artificial Sequence: Synthetic oligonucleotide
uacuucauaaaagaggccc

SEQ ID NO: 3245547 - RNA, 19 nt, Artificial Sequence
  Description of Artificial Sequence: Synthetic oligonucleotide
uucuuuaaagcuuccagga

SEQ ID NO: 3245548 - RNA, 19 nt, Artificial Sequence
  Description of Artificial Sequence: Synthetic oligonucleotide
aaauuggaaaacaagagua

SEQ ID NO: 3245549 - RNA, 19 nt, Artificial Sequence
  Description of Artificial Sequence: Synthetic oligonucleotide
ucaauggagaugaagcgca

SEQ ID NO: 3245550 - RNA, 19 nt, Artificial Sequence
  Description of Artificial Sequence: Synthetic oligonucleotide
uaucaaauuauaacauugu

SEQ ID NO: 3245551 - RNA, 19 nt, Artificial Sequence
  Description of Artificial Sequence: Synthetic oligonucleotide
gaguaauuaauuacagagg

SEQ ID NO: 3245552 - RNA, 19 nt, Artificial Sequence
  Description of Artificial Sequence: Synthetic oligonucleotide
cacaaaauuggaaaacaag

SEQ ID NO: 3245553 - RNA, 19 nt, Artificial Sequence
  Description of Artificial Sequence: Synthetic oligonucleotide
auggagaugaagcgcacgc

SEQ ID NO: 3245554 - RNA, 19 nt, Artificial Sequence
  Description of Artificial Sequence: Synthetic oligonucleotide
agaacauagacccuaaaua

SEQ ID NO: 3245555 - RNA, 19 nt, Artificial Sequence
  Description of Artificial Sequence: Synthetic oligonucleotide
ucaauguagaaaacaagaa

SEQ ID NO: 3245556 - RNA, 19 nt, Artificial Sequence
  Description of Artificial Sequence: Synthetic oligonucleotide
caauguagaaaacaagaac

SEQ ID NO: 3245557 - RNA, 19 nt, Artificial Sequence
  Description of Artificial Sequence: Synthetic oligonucleotide
aagaguaauuaauuacaga

SEQ ID NO: 3245558 - RNA, 19 nt, Artificial Sequence
  Description of Artificial Sequence: Synthetic oligonucleotide
uuugguagcaaccggcuga

SEQ ID NO: 3245559 - RNA, 19 nt, Artificial Sequence
  Description of Artificial Sequence: Synthetic oligonucleotide
auucugaugacucuaugcu

SEQ ID NO: 3245560 - RNA, 19 nt, Artificial Sequence
  Description of Artificial Sequence: Synthetic oligonucleotide
aaacaagaguaauuaauua

SEQ ID NO: 3245561 - RNA, 19 nt, Artificial Sequence
  Description of Artificial Sequence: Synthetic oligonucleotide
uguaucguccagcccaugg

SEQ ID NO: 3245562 - RNA, 19 nt, Artificial Sequence
  Description of Artificial Sequence: Synthetic oligonucleotide
uagaaaacaagaacauaga

SEQ ID NO: 3245563 - RNA, 19 nt, Artificial Sequence
  Description of Artificial Sequence: Synthetic oligonucleotide
aaaacaagaguaauuaauu

SEQ ID NO: 3245564 - RNA, 19 nt, Artificial Sequence
  Description of Artificial Sequence: Synthetic oligonucleotide
caagaguaauuaauuacag

SEQ ID NO: 3245565 - RNA, 19 nt, Artificial Sequence
  Description of Artificial Sequence: Synthetic oligonucleotide
aucaauggagaugaagcgc

SEQ ID NO: 3245566 - RNA, 19 nt, Artificial Sequence
  Description of Artificial Sequence: Synthetic oligonucleotide
ugugaauaccuccacuucu

SEQ ID NO: 3245567 - RNA, 19 nt, Artificial Sequence
  Description of Artificial Sequence: Synthetic oligonucleotide
augguuuccaguugcuggc

SEQ ID NO: 3245568 - RNA, 19 nt, Artificial Sequence
  Description of Artificial Sequence: Synthetic oligonucleotide
uaugcugcgcuucugauua

SEQ ID NO: 3245569 - RNA, 19 nt, Artificial Sequence
  Description of Artificial Sequence: Synthetic oligonucleotide
ccuacuucauaaaagaggc

SEQ ID NO: 3245570 - RNA, 19 nt, Artificial Sequence
  Description of Artificial Sequence: Synthetic oligonucleotide
gggacaucaaucuucaugc

SEQ ID NO: 3245571 - RNA, 19 nt, Artificial Sequence
  Description of Artificial Sequence: Synthetic oligonucleotide
aauuucucuccacaaaauu

SEQ ID NO: 3245572 - RNA, 19 nt, Artificial Sequence
  Description of Artificial Sequence: Synthetic oligonucleotide
aaauaccccaagucaaugu

SEQ ID NO: 3245573 - RNA, 19 nt, Artificial Sequence
  Description of Artificial Sequence: Synthetic oligonucleotide
uuccaaguaauuucucucc

SEQ ID NO: 3245574 - RNA, 19 nt, Artificial Sequence
  Description of Artificial Sequence: Synthetic oligonucleotide
caugccuacuucauaaaag

SEQ ID NO: 3245575 - RNA, 19 nt, Artificial Sequence
  Description of Artificial Sequence: Synthetic oligonucleotide
gaaggguugaggugaagag

SEQ ID NO: 3245576 - RNA, 19 nt, Artificial Sequence
  Description of Artificial Sequence: Synthetic oligonucleotide
auuaucaauggagaugaag

SEQ ID NO: 3245577 - RNA, 19 nt, Artificial Sequence
  Description of Artificial Sequence: Synthetic oligonucleotide
aguaaauccauccccgcca

SEQ ID NO: 3245578 - RNA, 19 nt, Artificial Sequence
  Description of Artificial Sequence: Synthetic oligonucleotide
agaggaguagcucacagau

SEQ ID NO: 3245579 - RNA, 19 nt, Artificial Sequence
  Description of Artificial Sequence: Synthetic oligonucleotide
  modified_base (5)..(5): a, c, u, g, unknown or other
uggcnuucaguaauuaagu

SEQ ID NO: 3245580 - RNA, 19 nt, Artificial Sequence
  Description of Artificial Sequence: Synthetic oligonucleotide
uguaacuccgaaugggaca

SEQ ID NO: 3245581 - RNA, 19 nt, Artificial Sequence
  Description of Artificial Sequence: Synthetic oligonucleotide
uguguaacuccgaauggga

SEQ ID NO: 3245582 - RNA, 19 nt, Artificial Sequence
  Description of Artificial Sequence: Synthetic oligonucleotide
auggaccaaauucugauga

SEQ ID NO: 3245583 - RNA, 19 nt, Artificial Sequence
  Description of Artificial Sequence: Synthetic oligonucleotide
guuuauaaccugugaauac

SEQ ID NO: 3245584 - RNA, 19 nt, Artificial Sequence
  Description of Artificial Sequence: Synthetic oligonucleotide
uaauuaaguucacaauguc

SEQ ID NO: 3245585 - RNA, 19 nt, Artificial Sequence
  Description of Artificial Sequence: Synthetic oligonucleotide
acaagaguaauuaauuaca

SEQ ID NO: 3245586 - RNA, 19 nt, Artificial Sequence
  Description of Artificial Sequence: Synthetic oligonucleotide
ugaauaccuccacuucugg

SEQ ID NO: 3245587 - RNA, 19 nt, Artificial Sequence
  Description of Artificial Sequence: Synthetic oligonucleotide
gucaauguagaaaacaaga

SEQ ID NO: 3245588 - RNA, 19 nt, Artificial Sequence
  Description of Artificial Sequence: Synthetic oligonucleotide
cauaaaagaggcccagggc

SEQ ID NO: 3245589 - RNA, 19 nt, Artificial Sequence
  Description of Artificial Sequence: Synthetic oligonucleotide
aauaccccaagucaaugua

SEQ ID NO: 3245590 - RNA, 19 nt, Artificial Sequence
  Description of Artificial Sequence: Synthetic oligonucleotide
aaaauaccccaagucaaug

SEQ ID NO: 3245591 - RNA, 19 nt, Artificial Sequence
  Description of Artificial Sequence: Synthetic oligonucleotide
uuuauuauggugguagcua

SEQ ID NO: 3245592 - RNA, 19 nt, Artificial Sequence
  Description of Artificial Sequence: Synthetic oligonucleotide
auuucucuccacaaaauug

SEQ ID NO: 3245593 - RNA, 19 nt, Artificial Sequence
  Description of Artificial Sequence: Synthetic oligonucleotide
uguggaucaccagggaugg

SEQ ID NO: 3245594 - RNA, 19 nt, Artificial Sequence
  Description of Artificial Sequence: Synthetic oligonucleotide
auuacagaggucuguagaa

SEQ ID NO: 3245595 - RNA, 19 nt, Artificial Sequence
  Description of Artificial Sequence: Synthetic oligonucleotide
  modified_base (7)..(7): a, c, u, g, unknown or other
uuuggcnuucaguaauuaa

SEQ ID NO: 3245596 - RNA, 19 nt, Artificial Sequence
  Description of Artificial Sequence: Synthetic oligonucleotide
aauggagaugaagcgcacg

SEQ ID NO: 3245597 - RNA, 19 nt, Artificial Sequence
  Description of Artificial Sequence: Synthetic oligonucleotide
ugccuacuucauaaaagag

SEQ ID NO: 3245598 - RNA, 19 nt, Artificial Sequence
  Description of Artificial Sequence: Synthetic oligonucleotide
aaccugugaauaccuccac

SEQ ID NO: 3245599 - RNA, 19 nt, Artificial Sequence
  Description of Artificial Sequence: Synthetic oligonucleotide
aacaagaacauagacccua

SEQ ID NO: 3245600 - RNA, 19 nt, Artificial Sequence
  Description of Artificial Sequence: Synthetic oligonucleotide
uuggaaaacaagaguaauu

SEQ ID NO: 3245601 - RNA, 19 nt, Artificial Sequence
  Description of Artificial Sequence: Synthetic oligonucleotide
guaauuucucuccacaaaa

SEQ ID NO: 3245602 - RNA, 19 nt, Artificial Sequence
  Description of Artificial Sequence: Synthetic oligonucleotide
cuccauguguguaacuccg

SEQ ID NO: 3245603 - RNA, 19 nt, Artificial Sequence
  Description of Artificial Sequence: Synthetic oligonucleotide
uuauuauggugguagcuau

SEQ ID NO: 3245604 - RNA, 19 nt, Artificial Sequence
  Description of Artificial Sequence: Synthetic oligonucleotide
gaacauagacccuaaauau

SEQ ID NO: 3245605 - RNA, 19 nt, Artificial Sequence
  Description of Artificial Sequence: Synthetic oligonucleotide
aucaaauuauaacauuguu

SEQ ID NO: 3245606 - RNA, 19 nt, Artificial Sequence
  Description of Artificial Sequence: Synthetic oligonucleotide
aauuaauuacagaggucug

SEQ ID NO: 3245607 - RNA, 19 nt, Artificial Sequence
  Description of Artificial Sequence: Synthetic oligonucleotide
acaucuuccucccugugcu

SEQ ID NO: 3245608 - RNA, 19 nt, Artificial Sequence
  Description of Artificial Sequence: Synthetic oligonucleotide
acauagacccuaaauauga

SEQ ID NO: 3245609 - RNA, 19 nt, Artificial Sequence
  Description of Artificial Sequence: Synthetic oligonucleotide
gagugaguaaauccauccc

SEQ ID NO: 3245610 - RNA, 19 nt, Artificial Sequence
  Description of Artificial Sequence: Synthetic oligonucleotide
uccaaguaauuucucucca

SEQ ID NO: 3245611 - RNA, 19 nt, Artificial Sequence
  Description of Artificial Sequence: Synthetic oligonucleotide
uucugaugacucuaugcug

SEQ ID NO: 3245612 - RNA, 19 nt, Artificial Sequence
  Description of Artificial Sequence: Synthetic oligonucleotide
gugaguaaauccauccccg

SEQ ID NO: 3245613 - RNA, 19 nt, Artificial Sequence
  Description of Artificial Sequence: Synthetic oligonucleotide
gaguaaauccauccccgcc

SEQ ID NO: 3245614 - RNA, 19 nt, Artificial Sequence
  Description of Artificial Sequence: Synthetic oligonucleotide
gauggaccaaauucugaug

SEQ ID NO: 3245615 - RNA, 19 nt, Artificial Sequence
  Description of Artificial Sequence: Synthetic oligonucleotide
uuacuggugauguaucguc

SEQ ID NO: 3245616 - RNA, 19 nt, Artificial Sequence
  Description of Artificial Sequence: Synthetic oligonucleotide
aaguuggagugaguaaauc

SEQ ID NO: 3245617 - RNA, 19 nt, Artificial Sequence
  Description of Artificial Sequence: Synthetic oligonucleotide
aaaacaaucaaacaaaaua

SEQ ID NO: 3245618 - RNA, 19 nt, Artificial Sequence
  Description of Artificial Sequence: Synthetic oligonucleotide
aaucaaacaaaauagcagu

SEQ ID NO: 3245619 - RNA, 19 nt, Artificial Sequence
  Description of Artificial Sequence: Synthetic oligonucleotide
aaacaaucaaacaaaauag

SEQ ID NO: 3245620 - RNA, 19 nt, Artificial Sequence
  Description of Artificial Sequence: Synthetic oligonucleotide
aucuuuagaacacugacuc

SEQ ID NO: 3245621 - RNA, 19 nt, Artificial Sequence
  Description of Artificial Sequence: Synthetic oligonucleotide
auucuuacaauccuuaaag

SEQ ID NO: 3245622 - RNA, 19 nt, Artificial Sequence
  Description of Artificial Sequence: Synthetic oligonucleotide
ucuaagacguuuuaaaccc

SEQ ID NO: 3245623 - RNA, 19 nt, Artificial Sequence
  Description of Artificial Sequence: Synthetic oligonucleotide
uucaagaucauccucagcu

SEQ ID NO: 3245624 - RNA, 19 nt, Artificial Sequence
  Description of Artificial Sequence: Synthetic oligonucleotide
agaacacugacucuaagac

SEQ ID NO: 3245625 - RNA, 19 nt, Artificial Sequence
  Description of Artificial Sequence: Synthetic oligonucleotide
aucucugugaguucaaggc

SEQ ID NO: 3245626 - RNA, 19 nt, Artificial Sequence
  Description of Artificial Sequence: Synthetic oligonucleotide
aacaaucaaacaaaauagc

SEQ ID NO: 3245627 - RNA, 19 nt, Artificial Sequence
  Description of Artificial Sequence: Synthetic oligonucleotide
ugcauagugaguuugaggu

SEQ ID NO: 3245628 - RNA, 19 nt, Artificial Sequence
  Description of Artificial Sequence: Synthetic oligonucleotide
uucaauucccgccagcugg

SEQ ID NO: 3245629 - RNA, 19 nt, Artificial Sequence
  Description of Artificial Sequence: Synthetic oligonucleotide
aacaaaauagcagucaccu

SEQ ID NO: 3245630 - RNA, 19 nt, Artificial Sequence
  Description of Artificial Sequence: Synthetic oligonucleotide
caaucaaacaaaauagcag

SEQ ID NO: 3245631 - RNA, 19 nt, Artificial Sequence
  Description of Artificial Sequence: Synthetic oligonucleotide
aauguuaaugaccuucaga

SEQ ID NO: 3245632 - RNA, 19 nt, Artificial Sequence
  Description of Artificial Sequence: Synthetic oligonucleotide
uagguaauguuaaugaccu

SEQ ID NO: 3245633 - RNA, 19 nt, Artificial Sequence
  Description of Artificial Sequence: Synthetic oligonucleotide
uugcauaaucuuuagaaca

SEQ ID NO: 3245634 - RNA, 19 nt, Artificial Sequence
  Description of Artificial Sequence: Synthetic oligonucleotide
guuaaugaccuucagauga

SEQ ID NO: 3245635 - RNA, 19 nt, Artificial Sequence
  Description of Artificial Sequence: Synthetic oligonucleotide
caaaauagcagucaccuug

SEQ ID NO: 3245636 - RNA, 19 nt, Artificial Sequence
  Description of Artificial Sequence: Synthetic oligonucleotide
auguuaaugaccuucagau

SEQ ID NO: 3245637 - RNA, 19 nt, Artificial Sequence
  Description of Artificial Sequence: Synthetic oligonucleotide
ucuuacaauccuuaaagcu

SEQ ID NO: 3245638 - RNA, 19 nt, Artificial Sequence
  Description of Artificial Sequence: Synthetic oligonucleotide
uaaucuuuagaacacugac

SEQ ID NO: 3245639 - RNA, 19 nt, Artificial Sequence
  Description of Artificial Sequence: Synthetic oligonucleotide
uuugagguuagccuggaca

SEQ ID NO: 3245640 - RNA, 19 nt, Artificial Sequence
  Description of Artificial Sequence: Synthetic oligonucleotide
agaugagaaaggcaagggc

SEQ ID NO: 3245641 - RNA, 19 nt, Artificial Sequence
  Description of Artificial Sequence: Synthetic oligonucleotide
aaucccagcacucgggagg

SEQ ID NO: 3245642 - RNA, 19 nt, Artificial Sequence
  Description of Artificial Sequence: Synthetic oligonucleotide
aagcuuugcauuccucugc

SEQ ID NO: 3245643 - RNA, 19 nt, Artificial Sequence
  Description of Artificial Sequence: Synthetic oligonucleotide
acucuaagacguuuuaaac

SEQ ID NO: 3245644 - RNA, 19 nt, Artificial Sequence
  Description of Artificial Sequence: Synthetic oligonucleotide
aauccuuaaagcuuugcau

SEQ ID NO: 3245645 - RNA, 19 nt, Artificial Sequence
  Description of Artificial Sequence: Synthetic oligonucleotide
aguagguaauguuaaugac

SEQ ID NO: 3245646 - RNA, 19 nt, Artificial Sequence
  Description of Artificial Sequence: Synthetic oligonucleotide
cucuaagacguuuuaaacc

SEQ ID NO: 3245647 - RNA, 19 nt, Artificial Sequence
  Description of Artificial Sequence: Synthetic oligonucleotide
uuuaaucccagcacucggg

SEQ ID NO: 3245648 - RNA, 19 nt, Artificial Sequence
  Description of Artificial Sequence: Synthetic oligonucleotide
aaacaaaauagcagucacc

SEQ ID NO: 3245649 - RNA, 19 nt, Artificial Sequence
  Description of Artificial Sequence: Synthetic oligonucleotide
aaggcccugaauucaauuc

SEQ ID NO: 3245650 - RNA, 19 nt, Artificial Sequence
  Description of Artificial Sequence: Synthetic oligonucleotide
aaaccagaggaucaggagu

SEQ ID NO: 3245651 - RNA, 19 nt, Artificial Sequence
  Description of Artificial Sequence: Synthetic oligonucleotide
ugaccuucagaugagaaag

SEQ ID NO: 3245652 - RNA, 19 nt, Artificial Sequence
  Description of Artificial Sequence: Synthetic oligonucleotide
aacacugacucuaagacgu

SEQ ID NO: 3245653 - RNA, 19 nt, Artificial Sequence
  Description of Artificial Sequence: Synthetic oligonucleotide
agggagaauucuuacaauc

SEQ ID NO: 3245654 - RNA, 19 nt, Artificial Sequence
  Description of Artificial Sequence: Synthetic oligonucleotide
aauucuuacaauccuuaaa

SEQ ID NO: 3245655 - RNA, 19 nt, Artificial Sequence
  Description of Artificial Sequence: Synthetic oligonucleotide
ugaguuugagguuagccug

SEQ ID NO: 3245656 - RNA, 19 nt, Artificial Sequence
  Description of Artificial Sequence: Synthetic oligonucleotide
acguuuuaaacccugugag

SEQ ID NO: 3245657 - RNA, 19 nt, Artificial Sequence
  Description of Artificial Sequence: Synthetic oligonucleotide
caggaguucaagaucaucc

SEQ ID NO: 3245658 - RNA, 19 nt, Artificial Sequence
  Description of Artificial Sequence: Synthetic oligonucleotide
ucuugcuuggagcagggag

SEQ ID NO: 3245659 - RNA, 19 nt, Artificial Sequence
  Description of Artificial Sequence: Synthetic oligonucleotide
ucuacagaguucuggacag

SEQ ID NO: 3245660 - RNA, 19 nt, Artificial Sequence
  Description of Artificial Sequence: Synthetic oligonucleotide
uucaaggccagccuggucu

SEQ ID NO: 3245661 - RNA, 19 nt, Artificial Sequence
  Description of Artificial Sequence: Synthetic oligonucleotide
aaagcuuugcauuccucug

SEQ ID NO: 3245662 - RNA, 19 nt, Artificial Sequence
  Description of Artificial Sequence: Synthetic oligonucleotide
aaaauagcagucaccuugg

SEQ ID NO: 3245663 - RNA, 19 nt, Artificial Sequence
  Description of Artificial Sequence: Synthetic oligonucleotide
ugcauaaucuuuagaacac

SEQ ID NO: 3245664 - RNA, 19 nt, Artificial Sequence
  Description of Artificial Sequence: Synthetic oligonucleotide
agugaguuugagguuagcc

SEQ ID NO: 3245665 - RNA, 19 nt, Artificial Sequence
  Description of Artificial Sequence: Synthetic oligonucleotide
acaccuuuaaucccagcac

SEQ ID NO: 3245666 - RNA, 19 nt, Artificial Sequence
  Description of Artificial Sequence: Synthetic oligonucleotide
gaacacugacucuaagacg

SEQ ID NO: 3245667 - RNA, 19 nt, Artificial Sequence
  Description of Artificial Sequence: Synthetic oligonucleotide
uuuaaacccugugaguagg

SEQ ID NO: 3245668 - RNA, 19 nt, Artificial Sequence
  Description of Artificial Sequence: Synthetic oligonucleotide
uaaagcuuugcauuccucu

SEQ ID NO: 3245669 - RNA, 19 nt, Artificial Sequence
  Description of Artificial Sequence: Synthetic oligonucleotide
ucagaugagaaaggcaagg

SEQ ID NO: 3245670 - RNA, 19 nt, Artificial Sequence
  Description of Artificial Sequence: Synthetic oligonucleotide
gaguagguaauguuaauga

SEQ ID NO: 3245671 - RNA, 19 nt, Artificial Sequence
  Description of Artificial Sequence: Synthetic oligonucleotide
auagcagucaccuuggcuu

SEQ ID NO: 3245672 - RNA, 19 nt, Artificial Sequence
  Description of Artificial Sequence: Synthetic oligonucleotide
uuuuaaacccugugaguag

SEQ ID NO: 3245673 - RNA, 19 nt, Artificial Sequence
  Description of Artificial Sequence: Synthetic oligonucleotide
ugugaguagguaauguuaa

SEQ ID NO: 3245674 - RNA, 19 nt, Artificial Sequence
  Description of Artificial Sequence: Synthetic oligonucleotide
aauagcagucaccuuggcu

SEQ ID NO: 3245675 - RNA, 19 nt, Artificial Sequence
  Description of Artificial Sequence: Synthetic oligonucleotide
aggcccugaauucaauucc

SEQ ID NO: 3245676 - RNA, 19 nt, Artificial Sequence
  Description of Artificial Sequence: Synthetic oligonucleotide
cuugcauaaucuuuagaac

SEQ ID NO: 3245677 - RNA, 19 nt, Artificial Sequence
  Description of Artificial Sequence: Synthetic oligonucleotide
uuaaugaccuucagaugag

SEQ ID NO: 3245678 - RNA, 19 nt, Artificial Sequence
  Description of Artificial Sequence: Synthetic oligonucleotide
gaucucugugaguucaagg

SEQ ID NO: 3245679 - RNA, 19 nt, Artificial Sequence
  Description of Artificial Sequence: Synthetic oligonucleotide
caaacaaaauagcagucac

SEQ ID NO: 3245680 - RNA, 19 nt, Artificial Sequence
  Description of Artificial Sequence: Synthetic oligonucleotide
ucaaacaaaauagcaguca

SEQ ID NO: 3245681 - RNA, 19 nt, Artificial Sequence
  Description of Artificial Sequence: Synthetic oligonucleotide
cauaaucuuuagaacacug

SEQ ID NO: 3245682 - RNA, 19 nt, Artificial Sequence
  Description of Artificial Sequence: Synthetic oligonucleotide
cuuugcauuccucugcugc

SEQ ID NO: 3245683 - RNA, 19 nt, Artificial Sequence
  Description of Artificial Sequence: Synthetic oligonucleotide
guagguaauguuaaugacc

SEQ ID NO: 3245684 - RNA, 19 nt, Artificial Sequence
  Description of Artificial Sequence: Synthetic oligonucleotide
aaauagcagucaccuuggc

SEQ ID NO: 3245685 - RNA, 19 nt, Artificial Sequence
  Description of Artificial Sequence: Synthetic oligonucleotide
gaaaccagaggaucaggag

SEQ ID NO: 3245686 - RNA, 19 nt, Artificial Sequence
  Description of Artificial Sequence: Synthetic oligonucleotide
cucugcugcaugaacaugc

SEQ ID NO: 3245687 - RNA, 19 nt, Artificial Sequence
  Description of Artificial Sequence: Synthetic oligonucleotide
uagaacacugacucuaaga

SEQ ID NO: 3245688 - RNA, 19 nt, Artificial Sequence
  Description of Artificial Sequence: Synthetic oligonucleotide
uucuuacaauccuuaaagc

SEQ ID NO: 3245689 - RNA, 19 nt, Artificial Sequence
  Description of Artificial Sequence: Synthetic oligonucleotide
aauucaauucccgccagcu

SEQ ID NO: 3245690 - RNA, 19 nt, Artificial Sequence
  Description of Artificial Sequence: Synthetic oligonucleotide
ugaguagguaauguuaaug

SEQ ID NO: 3245691 - RNA, 19 nt, Artificial Sequence
  Description of Artificial Sequence: Synthetic oligonucleotide
uaagacguuuuaaacccug

SEQ ID NO: 3245692 - RNA, 19 nt, Artificial Sequence
  Description of Artificial Sequence: Synthetic oligonucleotide
acaaucaaacaaaauagca

SEQ ID NO: 3245693 - RNA, 19 nt, Artificial Sequence
  Description of Artificial Sequence: Synthetic oligonucleotide
uugagguuagccuggacac

SEQ ID NO: 3245694 - RNA, 19 nt, Artificial Sequence
  Description of Artificial Sequence: Synthetic oligonucleotide
ucucugugaguucaaggcc

SEQ ID NO: 3245695 - RNA, 19 nt, Artificial Sequence
  Description of Artificial Sequence: Synthetic oligonucleotide
uccucagcugcauagugag

SEQ ID NO: 3245696 - RNA, 19 nt, Artificial Sequence
  Description of Artificial Sequence: Synthetic oligonucleotide
aaucuuuagaacacugacu

SEQ ID NO: 3245697 - RNA, 19 nt, Artificial Sequence
  Description of Artificial Sequence: Synthetic oligonucleotide
uuacaauccuuaaagcuuu

SEQ ID NO: 3245698 - RNA, 19 nt, Artificial Sequence
  Description of Artificial Sequence: Synthetic oligonucleotide
aucauccucagcugcauag

SEQ ID NO: 3245699 - RNA, 19 nt, Artificial Sequence
  Description of Artificial Sequence: Synthetic oligonucleotide
cuucagaugagaaaggcaa

SEQ ID NO: 3245700 - RNA, 19 nt, Artificial Sequence
  Description of Artificial Sequence: Synthetic oligonucleotide
gacguuuuaaacccuguga

SEQ ID NO: 3245701 - RNA, 19 nt, Artificial Sequence
  Description of Artificial Sequence: Synthetic oligonucleotide
ugaguucaaggccagccug

SEQ ID NO: 3245702 - RNA, 19 nt, Artificial Sequence
  Description of Artificial Sequence: Synthetic oligonucleotide
cuuuaaucccagcacucgg

SEQ ID NO: 3245703 - RNA, 19 nt, Artificial Sequence
  Description of Artificial Sequence: Synthetic oligonucleotide
uucagaugagaaaggcaag

SEQ ID NO: 3245704 - RNA, 19 nt, Artificial Sequence
  Description of Artificial Sequence: Synthetic oligonucleotide
ugugaguucaaggccagcc

SEQ ID NO: 3245705 - RNA, 19 nt, Artificial Sequence
  Description of Artificial Sequence: Synthetic oligonucleotide
uguuaaugaccuucagaug

SEQ ID NO: 3245706 - RNA, 19 nt, Artificial Sequence
  Description of Artificial Sequence: Synthetic oligonucleotide
uaauguuaaugaccuucag

SEQ ID NO: 3245707 - RNA, 19 nt, Artificial Sequence
  Description of Artificial Sequence: Synthetic oligonucleotide
gaucaggaguucaagauca

SEQ ID NO: 3245708 - RNA, 19 nt, Artificial Sequence
  Description of Artificial Sequence: Synthetic oligonucleotide
aaacccugugaguagguaa

SEQ ID NO: 3245709 - RNA, 19 nt, Artificial Sequence
  Description of Artificial Sequence: Synthetic oligonucleotide
accuucagaugagaaaggc

SEQ ID NO: 3245710 - RNA, 19 nt, Artificial Sequence
  Description of Artificial Sequence: Synthetic oligonucleotide
uggcgcacaccuuuaaucc

SEQ ID NO: 3245711 - RNA, 19 nt, Artificial Sequence
  Description of Artificial Sequence: Synthetic oligonucleotide
augaacaugccuugcauaa

SEQ ID NO: 3245712 - RNA, 19 nt, Artificial Sequence
  Description of Artificial Sequence: Synthetic oligonucleotide
uuagaacacugacucuaag

SEQ ID NO: 3245713 - RNA, 19 nt, Artificial Sequence
  Description of Artificial Sequence: Synthetic oligonucleotide
ugaauucaauucccgccag

SEQ ID NO: 3245714 - RNA, 19 nt, Artificial Sequence
  Description of Artificial Sequence: Synthetic oligonucleotide
acugguagagcacuugccu

SEQ ID NO: 3245715 - RNA, 19 nt, Artificial Sequence
  Description of Artificial Sequence: Synthetic oligonucleotide
ucaagaucauccucagcug

SEQ ID NO: 3245716 - RNA, 19 nt, Artificial Sequence
  Description of Artificial Sequence: Synthetic oligonucleotide
gacucuaagacguuuuaaa

SEQ ID NO: 3245717 - RNA, 19 nt, Artificial Sequence
  Description of Artificial Sequence: Synthetic oligonucleotide
agagcagucugccagaugg

SEQ ID NO: 3245718 - RNA, 19 nt, Artificial Sequence
  Description of Artificial Sequence: Synthetic oligonucleotide
accaguaucgcccuauccc

SEQ ID NO: 3245719 - RNA, 19 nt, Artificial Sequence
  Description of Artificial Sequence: Synthetic oligonucleotide
ugacucacagucuaggagc

SEQ ID NO: 3245720 - RNA, 19 nt, Artificial Sequence
  Description of Artificial Sequence: Synthetic oligonucleotide
aggucuacacccucuaccc

SEQ ID NO: 3245721 - RNA, 19 nt, Artificial Sequence
  Description of Artificial Sequence: Synthetic oligonucleotide
uacugagucaucauggccu

SEQ ID NO: 3245722 - RNA, 19 nt, Artificial Sequence
  Description of Artificial Sequence: Synthetic oligonucleotide
ucagcaugcacucagcaaa

SEQ ID NO: 3245723 - RNA, 19 nt, Artificial Sequence
  Description of Artificial Sequence: Synthetic oligonucleotide
agaaggacgagcaagaaga

SEQ ID NO: 3245724 - RNA, 19 nt, Artificial Sequence
  Description of Artificial Sequence: Synthetic oligonucleotide
  modified_base (8)..(8): a, c, u, g, unknown or other
gaagaggnggggcaggagg

SEQ ID NO: 3245725 - RNA, 19 nt, Artificial Sequence
  Description of Artificial Sequence: Synthetic oligonucleotide
aagaccaacgcacaccagu

SEQ ID NO: 3245726 - RNA, 19 nt, Artificial Sequence
  Description of Artificial Sequence: Synthetic oligonucleotide
aaggacauggcaagaaggg

SEQ ID NO: 3245727 - RNA, 19 nt, Artificial Sequence
  Description of Artificial Sequence: Synthetic oligonucleotide
  modified_base (7)..(7): a, c, u, g, unknown or other
aagaggnggggcaggaggc

SEQ ID NO: 3245728 - RNA, 19 nt, Artificial Sequence
  Description of Artificial Sequence: Synthetic oligonucleotide
cagcugauguaccagagcg

SEQ ID NO: 3245729 - RNA, 19 nt, Artificial Sequence
  Description of Artificial Sequence: Synthetic oligonucleotide
uguaccaccugcuuuuggc

SEQ ID NO: 3245730 - RNA, 19 nt, Artificial Sequence
  Description of Artificial Sequence: Synthetic oligonucleotide
accaggaucucauugugag

SEQ ID NO: 3245731 - RNA, 19 nt, Artificial Sequence
  Description of Artificial Sequence: Synthetic oligonucleotide
aacgcacaccaguaucgcc

SEQ ID NO: 3245732 - RNA, 19 nt, Artificial Sequence
  Description of Artificial Sequence: Synthetic oligonucleotide
ucaaggacauggcaagaag

SEQ ID NO: 3245733 - RNA, 19 nt, Artificial Sequence
  Description of Artificial Sequence: Synthetic oligonucleotide
accaccaugagcugggcuc

SEQ ID NO: 3245734 - RNA, 19 nt, Artificial Sequence
  Description of Artificial Sequence: Synthetic oligonucleotide
agaucaccucuucaugugc

SEQ ID NO: 3245735 - RNA, 19 nt, Artificial Sequence
  Description of Artificial Sequence: Synthetic oligonucleotide
aagaucaccucuucaugug

SEQ ID NO: 3245736 - RNA, 19 nt, Artificial Sequence
  Description of Artificial Sequence: Synthetic oligonucleotide
gugaagagcagucugccag

SEQ ID NO: 3245737 - RNA, 19 nt, Artificial Sequence
  Description of Artificial Sequence: Synthetic oligonucleotide
auugugagcagcugugaag

SEQ ID NO: 3245738 - RNA, 19 nt, Artificial Sequence
  Description of Artificial Sequence: Synthetic oligonucleotide
cuucaugugcaccaagacc

SEQ ID NO: 3245739 - RNA, 19 nt, Artificial Sequence
  Description of Artificial Sequence: Synthetic oligonucleotide
uacacagguguacugaguc

SEQ ID NO: 3245740 - RNA, 19 nt, Artificial Sequence
  Description of Artificial Sequence: Synthetic oligonucleotide
ucuaggagccucagcaugc

SEQ ID NO: 3245741 - RNA, 19 nt, Artificial Sequence
  Description of Artificial Sequence: Synthetic oligonucleotide
aucauggccuucaaagucc

SEQ ID NO: 3245742 - RNA, 19 nt, Artificial Sequence
  Description of Artificial Sequence: Synthetic oligonucleotide
uaggccacugaugagggcg

SEQ ID NO: 3245743 - RNA, 19 nt, Artificial Sequence
  Description of Artificial Sequence: Synthetic oligonucleotide
agaaguucacagcgguccc

SEQ ID NO: 3245744 - RNA, 19 nt, Artificial Sequence
  Description of Artificial Sequence: Synthetic oligonucleotide
agcucaaccacuccagaag

SEQ ID NO: 3245745 - RNA, 19 nt, Artificial Sequence
  Description of Artificial Sequence: Synthetic oligonucleotide
ugcaggaaagcucaaccac

SEQ ID NO: 3245746 - RNA, 19 nt, Artificial Sequence
  Description of Artificial Sequence: Synthetic oligonucleotide
uagaagaucaccucuucau

SEQ ID NO: 3245747 - RNA, 19 nt, Artificial Sequence
  Description of Artificial Sequence: Synthetic oligonucleotide
uguacugagucaucauggc

SEQ ID NO: 3245748 - RNA, 19 nt, Artificial Sequence
  Description of Artificial Sequence: Synthetic oligonucleotide
gagacuguagaagaucacc

SEQ ID NO: 3245749 - RNA, 19 nt, Artificial Sequence
  Description of Artificial Sequence: Synthetic oligonucleotide
agaagaucaccucuucaug

SEQ ID NO: 3245750 - RNA, 19 nt, Artificial Sequence
  Description of Artificial Sequence: Synthetic oligonucleotide
guguacugagucaucaugg

SEQ ID NO: 3245751 - RNA, 19 nt, Artificial Sequence
  Description of Artificial Sequence: Synthetic oligonucleotide
ugauguaccagagcgugcc

SEQ ID NO: 3245752 - RNA, 19 nt, Artificial Sequence
  Description of Artificial Sequence: Synthetic oligonucleotide
ucuucaugugcaccaagac

SEQ ID NO: 3245753 - RNA, 19 nt, Artificial Sequence
  Description of Artificial Sequence: Synthetic oligonucleotide
ugugcaccaagaccaacgc

SEQ ID NO: 3245754 - RNA, 19 nt, Artificial Sequence
  Description of Artificial Sequence: Synthetic oligonucleotide
gaggcccagacacugaccc

SEQ ID NO: 3245755 - RNA, 19 nt, Artificial Sequence
  Description of Artificial Sequence: Synthetic oligonucleotide
ugucuucuguaccaccugc

SEQ ID NO: 3245756 - RNA, 19 nt, Artificial Sequence
  Description of Artificial Sequence: Synthetic oligonucleotide
uaucccaagggcagaagga

SEQ ID NO: 3245757 - RNA, 19 nt, Artificial Sequence
  Description of Artificial Sequence: Synthetic oligonucleotide
  modified_base (19)..(19): a, c, u, g, unknown or other
aggacgagcaagaagaggn

SEQ ID NO: 3245758 - RNA, 19 nt, Artificial Sequence
  Description of Artificial Sequence: Synthetic oligonucleotide
cagaaguucacagcggucc

SEQ ID NO: 3245759 - RNA, 19 nt, Artificial Sequence
  Description of Artificial Sequence: Synthetic oligonucleotide
uucacagcggucccggagc

SEQ ID NO: 3245760 - RNA, 19 nt, Artificial Sequence
  Description of Artificial Sequence: Synthetic oligonucleotide
aucgcccuaucccaagggc

SEQ ID NO: 3245761 - RNA, 19 nt, Artificial Sequence
  Description of Artificial Sequence: Synthetic oligonucleotide
uugugagcagcugugaaga

SEQ ID NO: 3245762 - RNA, 19 nt, Artificial Sequence
  Description of Artificial Sequence: Synthetic oligonucleotide
accaagaccaacgcacacc

SEQ ID NO: 3245763 - RNA, 19 nt, Artificial Sequence
  Description of Artificial Sequence: Synthetic oligonucleotide
gaaagcucaaccacuccag

SEQ ID NO: 3245764 - RNA, 19 nt, Artificial Sequence
  Description of Artificial Sequence: Synthetic oligonucleotide
gauggggugaaccuacaca

SEQ ID NO: 3245765 - RNA, 19 nt, Artificial Sequence
  Description of Artificial Sequence: Synthetic oligonucleotide
auggccuucaaaguccugg

SEQ ID NO: 3245766 - RNA, 19 nt, Artificial Sequence
  Description of Artificial Sequence: Synthetic oligonucleotide
ucccaagggcagaaggacg

SEQ ID NO: 3245767 - RNA, 19 nt, Artificial Sequence
  Description of Artificial Sequence: Synthetic oligonucleotide
uaucgcccuaucccaaggg

SEQ ID NO: 3245768 - RNA, 19 nt, Artificial Sequence
  Description of Artificial Sequence: Synthetic oligonucleotide
uaccccuaggucuccauag

SEQ ID NO: 3245769 - RNA, 19 nt, Artificial Sequence
  Description of Artificial Sequence: Synthetic oligonucleotide
ucuccauaggccacugaug

SEQ ID NO: 3245770 - RNA, 19 nt, Artificial Sequence
  Description of Artificial Sequence: Synthetic oligonucleotide
cugacucacagucuaggag

SEQ ID NO: 3245771 - RNA, 19 nt, Artificial Sequence
  Description of Artificial Sequence: Synthetic oligonucleotide
gaggccuagagccucugag

SEQ ID NO: 3245772 - RNA, 19 nt, Artificial Sequence
  Description of Artificial Sequence: Synthetic oligonucleotide
aaagcucaaccacuccaga

SEQ ID NO: 3245773 - RNA, 19 nt, Artificial Sequence
  Description of Artificial Sequence: Synthetic oligonucleotide
acgcacaccaguaucgccc

SEQ ID NO: 3245774 - RNA, 19 nt, Artificial Sequence
  Description of Artificial Sequence: Synthetic oligonucleotide
aggacauggcaagaagggc

SEQ ID NO: 3245775 - RNA, 19 nt, Artificial Sequence
  Description of Artificial Sequence: Synthetic oligonucleotide
aaguucacagcggucccgg

SEQ ID NO: 3245776 - RNA, 19 nt, Artificial Sequence
  Description of Artificial Sequence: Synthetic oligonucleotide
uuuuggcggagacuguaga

SEQ ID NO: 3245777 - RNA, 19 nt, Artificial Sequence
  Description of Artificial Sequence: Synthetic oligonucleotide
caucauggccuucaaaguc

SEQ ID NO: 3245778 - RNA, 19 nt, Artificial Sequence
  Description of Artificial Sequence: Synthetic oligonucleotide
caggucuacacccucuacc

SEQ ID NO: 3245779 - RNA, 19 nt, Artificial Sequence
  Description of Artificial Sequence: Synthetic oligonucleotide
  modified_base (17)..(17): a, c, u, g, unknown or other
gacgagcaagaagaggngg

SEQ ID NO: 3245780 - RNA, 19 nt, Artificial Sequence
  Description of Artificial Sequence: Synthetic oligonucleotide
acagucuaggagccucagc

SEQ ID NO: 3245781 - RNA, 19 nt, Artificial Sequence
  Description of Artificial Sequence: Synthetic oligonucleotide
caugcacucagcaaagcca

SEQ ID NO: 3245782 - RNA, 19 nt, Artificial Sequence
  Description of Artificial Sequence: Synthetic oligonucleotide
uuggcggagacuguagaag

SEQ ID NO: 3245783 - RNA, 19 nt, Artificial Sequence
  Description of Artificial Sequence: Synthetic oligonucleotide
ggugcaggaaagcucaacc

SEQ ID NO: 3245784 - RNA, 19 nt, Artificial Sequence
  Description of Artificial Sequence: Synthetic oligonucleotide
guaccaccugcuuuuggcg

SEQ ID NO: 3245785 - RNA, 19 nt, Artificial Sequence
  Description of Artificial Sequence: Synthetic oligonucleotide
agauggggugaaccuacac

SEQ ID NO: 3245786 - RNA, 19 nt, Artificial Sequence
  Description of Artificial Sequence: Synthetic oligonucleotide
uggccuucaaaguccuggg

SEQ ID NO: 3245787 - RNA, 19 nt, Artificial Sequence
  Description of Artificial Sequence: Synthetic oligonucleotide
ugaaccuacacagguguac

SEQ ID NO: 3245788 - RNA, 19 nt, Artificial Sequence
  Description of Artificial Sequence: Synthetic oligonucleotide
agcugugaagagcagucug

SEQ ID NO: 3245789 - RNA, 19 nt, Artificial Sequence
  Description of Artificial Sequence: Synthetic oligonucleotide
cagucuaggagccucagca

SEQ ID NO: 3245790 - RNA, 19 nt, Artificial Sequence
  Description of Artificial Sequence: Synthetic oligonucleotide
augugcaccaagaccaacg

SEQ ID NO: 3245791 - RNA, 19 nt, Artificial Sequence
  Description of Artificial Sequence: Synthetic oligonucleotide
aggccuagagccucugagg

SEQ ID NO: 3245792 - RNA, 19 nt, Artificial Sequence
  Description of Artificial Sequence: Synthetic oligonucleotide
aaccuacacagguguacug

SEQ ID NO: 3245793 - RNA, 19 nt, Artificial Sequence
  Description of Artificial Sequence: Synthetic oligonucleotide
aagcucaaccacuccagaa

SEQ ID NO: 3245794 - RNA, 19 nt, Artificial Sequence
  Description of Artificial Sequence: Synthetic oligonucleotide
uucuguaccaccugcuuuu

SEQ ID NO: 3245795 - RNA, 19 nt, Artificial Sequence
  Description of Artificial Sequence: Synthetic oligonucleotide
gaagaucaccucuucaugu

SEQ ID NO: 3245796 - RNA, 19 nt, Artificial Sequence
  Description of Artificial Sequence: Synthetic oligonucleotide
aucaccucuucaugugcac

SEQ ID NO: 3245797 - RNA, 19 nt, Artificial Sequence
  Description of Artificial Sequence: Synthetic oligonucleotide
aucccaagggcagaaggac

SEQ ID NO: 3245798 - RNA, 19 nt, Artificial Sequence
  Description of Artificial Sequence: Synthetic oligonucleotide
ugagucaucauggccuuca

SEQ ID NO: 3245799 - RNA, 19 nt, Artificial Sequence
  Description of Artificial Sequence: Synthetic oligonucleotide
ugcuagugcccucugucca

SEQ ID NO: 3245800 - RNA, 19 nt, Artificial Sequence
  Description of Artificial Sequence: Synthetic oligonucleotide
cauggcaagaagggcagcg

SEQ ID NO: 3245801 - RNA, 19 nt, Artificial Sequence
  Description of Artificial Sequence: Synthetic oligonucleotide
guacugagucaucauggcc

SEQ ID NO: 3245802 - RNA, 19 nt, Artificial Sequence
  Description of Artificial Sequence: Synthetic oligonucleotide
  modified_base (10)..(10): a, c, u, g, unknown or other
aagaagaggnggggcagga

SEQ ID NO: 3245803 - RNA, 19 nt, Artificial Sequence
  Description of Artificial Sequence: Synthetic oligonucleotide
ugagguggcaggugcagga

SEQ ID NO: 3245804 - RNA, 19 nt, Artificial Sequence
  Description of Artificial Sequence: Synthetic oligonucleotide
cugcuuuuggcggagacug

SEQ ID NO: 3245805 - RNA, 19 nt, Artificial Sequence
  Description of Artificial Sequence: Synthetic oligonucleotide
uguaccagagcgugccagc

SEQ ID NO: 3245806 - RNA, 19 nt, Artificial Sequence
  Description of Artificial Sequence: Synthetic oligonucleotide
gacuguagaagaucaccuc

SEQ ID NO: 3245807 - RNA, 19 nt, Artificial Sequence
  Description of Artificial Sequence: Synthetic oligonucleotide
cacuccagaaguucacagc

SEQ ID NO: 3245808 - RNA, 19 nt, Artificial Sequence
  Description of Artificial Sequence: Synthetic oligonucleotide
cagaaggacgagcaagaag

SEQ ID NO: 3245809 - RNA, 19 nt, Artificial Sequence
  Description of Artificial Sequence: Synthetic oligonucleotide
ucaaccacuccagaaguuc

SEQ ID NO: 3245810 - RNA, 19 nt, Artificial Sequence
  Description of Artificial Sequence: Synthetic oligonucleotide
acccucuaccccuaggucu

SEQ ID NO: 3245811 - RNA, 19 nt, Artificial Sequence
  Description of Artificial Sequence: Synthetic oligonucleotide
ugaagagcagucugccaga

SEQ ID NO: 3245812 - RNA, 19 nt, Artificial Sequence
  Description of Artificial Sequence: Synthetic oligonucleotide
acacugacccgcugauccc

SEQ ID NO: 3245813 - RNA, 19 nt, Artificial Sequence
  Description of Artificial Sequence: Synthetic oligonucleotide
cagucccugacucacaguc

SEQ ID NO: 3245814 - RNA, 19 nt, Artificial Sequence
  Description of Artificial Sequence: Synthetic oligonucleotide
augagcugggcuccugggg

SEQ ID NO: 3245815 - RNA, 19 nt, Artificial Sequence
  Description of Artificial Sequence: Synthetic oligonucleotide
gguguacugagucaucaug

SEQ ID NO: 3245816 - RNA, 19 nt, Artificial Sequence
  Description of Artificial Sequence: Synthetic oligonucleotide
aguaucgcccuaucccaag

SEQ ID NO: 3245817 - RNA, 19 nt, Artificial Sequence
  Description of Artificial Sequence: Synthetic oligonucleotide
uaaaagaagaagaagagga

SEQ ID NO: 3245818 - RNA, 19 nt, Artificial Sequence
  Description of Artificial Sequence: Synthetic oligonucleotide
aaagaagauggccaggccc

SEQ ID NO: 3245819 - RNA, 19 nt, Artificial Sequence
  Description of Artificial Sequence: Synthetic oligonucleotide
aaaagcaccagaaagaaag

SEQ ID NO: 3245820 - RNA, 19 nt, Artificial Sequence
  Description of Artificial Sequence: Synthetic oligonucleotide
aaggagaauauguaagagc

SEQ ID NO: 3245821 - RNA, 19 nt, Artificial Sequence
  Description of Artificial Sequence: Synthetic oligonucleotide
auauguaagagccaaaugu

SEQ ID NO: 3245822 - RNA, 19 nt, Artificial Sequence
  Description of Artificial Sequence: Synthetic oligonucleotide
uugcucaacacaaucaugg

SEQ ID NO: 3245823 - RNA, 19 nt, Artificial Sequence
  Description of Artificial Sequence: Synthetic oligonucleotide
aggagaauauguaagagcc

SEQ ID NO: 3245824 - RNA, 19 nt, Artificial Sequence
  Description of Artificial Sequence: Synthetic oligonucleotide
ugauauuuagcucuucgag

SEQ ID NO: 3245825 - RNA, 19 nt, Artificial Sequence
  Description of Artificial Sequence: Synthetic oligonucleotide
aaagaaagaugagacaagg

SEQ ID NO: 3245826 - RNA, 19 nt, Artificial Sequence
  Description of Artificial Sequence: Synthetic oligonucleotide
aaagaugagacaaggcugc

SEQ ID NO: 3245827 - RNA, 19 nt, Artificial Sequence
  Description of Artificial Sequence: Synthetic oligonucleotide
ugugauauuuagcucuucg

SEQ ID NO: 3245828 - RNA, 19 nt, Artificial Sequence
  Description of Artificial Sequence: Synthetic oligonucleotide
agaagauggaguucaagac

SEQ ID NO: 3245829 - RNA, 19 nt, Artificial Sequence
  Description of Artificial Sequence: Synthetic oligonucleotide
gaagauggaguucaagacg

SEQ ID NO: 3245830 - RNA, 19 nt, Artificial Sequence
  Description of Artificial Sequence: Synthetic oligonucleotide
agaaagaugagacaaggcu

SEQ ID NO: 3245831 - RNA, 19 nt, Artificial Sequence
  Description of Artificial Sequence: Synthetic oligonucleotide
acuguugcaaagaagaugg

SEQ ID NO: 3245832 - RNA, 19 nt, Artificial Sequence
  Description of Artificial Sequence: Synthetic oligonucleotide
cauaaaagaagaagaagag

SEQ ID NO: 3245833 - RNA, 19 nt, Artificial Sequence
  Description of Artificial Sequence: Synthetic oligonucleotide
aacauaaaagaagaagaag

SEQ ID NO: 3245834 - RNA, 19 nt, Artificial Sequence
  Description of Artificial Sequence: Synthetic oligonucleotide
aaagaagaagaagaggaag

SEQ ID NO: 3245835 - RNA, 19 nt, Artificial Sequence
  Description of Artificial Sequence: Synthetic oligonucleotide
aagaagaagaggaagagga

SEQ ID NO: 3245836 - RNA, 19 nt, Artificial Sequence
  Description of Artificial Sequence: Synthetic oligonucleotide
auauuuagcucuucgagug

SEQ ID NO: 3245837 - RNA, 19 nt, Artificial Sequence
  Description of Artificial Sequence: Synthetic oligonucleotide
aauauguaagagccaaaug

SEQ ID NO: 3245838 - RNA, 19 nt, Artificial Sequence
  Description of Artificial Sequence: Synthetic oligonucleotide
ugagcauuuaauacaaaac

SEQ ID NO: 3245839 - RNA, 19 nt, Artificial Sequence
  Description of Artificial Sequence: Synthetic oligonucleotide
uccaacauaaaagaagaag

SEQ ID NO: 3245840 - RNA, 19 nt, Artificial Sequence
  Description of Artificial Sequence: Synthetic oligonucleotide
aagauggaguucaagacgg

SEQ ID NO: 3245841 - RNA, 19 nt, Artificial Sequence
  Description of Artificial Sequence: Synthetic oligonucleotide
acauaaaagaagaagaaga

SEQ ID NO: 3245842 - RNA, 19 nt, Artificial Sequence
  Description of Artificial Sequence: Synthetic oligonucleotide
ucuucgagugcucugagca

SEQ ID NO: 3245843 - RNA, 19 nt, Artificial Sequence
  Description of Artificial Sequence: Synthetic oligonucleotide
auaaaagaagaagaagagg

SEQ ID NO: 3245844 - RNA, 19 nt, Artificial Sequence
  Description of Artificial Sequence: Synthetic oligonucleotide
cucaacacaaucaugguuc

SEQ ID NO: 3245845 - RNA, 19 nt, Artificial Sequence
  Description of Artificial Sequence: Synthetic oligonucleotide
uucacuuucuuccaugcca

SEQ ID NO: 3245846 - RNA, 19 nt, Artificial Sequence
  Description of Artificial Sequence: Synthetic oligonucleotide
aggaagaggagacagagca

SEQ ID NO: 3245847 - RNA, 19 nt, Artificial Sequence
  Description of Artificial Sequence: Synthetic oligonucleotide
aagaagaggaagaggagac

SEQ ID NO: 3245848 - RNA, 19 nt, Artificial Sequence
  Description of Artificial Sequence: Synthetic oligonucleotide
aagaagauggccaggcccc

SEQ ID NO: 3245849 - RNA, 19 nt, Artificial Sequence
  Description of Artificial Sequence: Synthetic oligonucleotide
aacacaaucaugguuccag

SEQ ID NO: 3245850 - RNA, 19 nt, Artificial Sequence
  Description of Artificial Sequence: Synthetic oligonucleotide
uauguaagagccaaauguc

SEQ ID NO: 3245851 - RNA, 19 nt, Artificial Sequence
  Description of Artificial Sequence: Synthetic oligonucleotide
uucuuccaugccaacaugg

SEQ ID NO: 3245852 - RNA, 19 nt, Artificial Sequence
  Description of Artificial Sequence: Synthetic oligonucleotide
uuccaugccaacaugggug

SEQ ID NO: 3245853 - RNA, 19 nt, Artificial Sequence
  Description of Artificial Sequence: Synthetic oligonucleotide
gaagaggagacagagcagg

SEQ ID NO: 3245854 - RNA, 19 nt, Artificial Sequence
  Description of Artificial Sequence: Synthetic oligonucleotide
aagaaagaugagacaaggc

SEQ ID NO: 3245855 - RNA, 19 nt, Artificial Sequence
  Description of Artificial Sequence: Synthetic oligonucleotide
agagccaaaugucaccucg

SEQ ID NO: 3245856 - RNA, 19 nt, Artificial Sequence
  Description of Artificial Sequence: Synthetic oligonucleotide
gaaagaugagacaaggcug

SEQ ID NO: 3245857 - RNA, 19 nt, Artificial Sequence
  Description of Artificial Sequence: Synthetic oligonucleotide
agaaagaaagaugagacaa

SEQ ID NO: 3245858 - RNA, 19 nt, Artificial Sequence
  Description of Artificial Sequence: Synthetic oligonucleotide
uguaagagccaaaugucac

SEQ ID NO: 3245859 - RNA, 19 nt, Artificial Sequence
  Description of Artificial Sequence: Synthetic oligonucleotide
uugagcauuuaauacaaaa

SEQ ID NO: 3245860 - RNA, 19 nt, Artificial Sequence
  Description of Artificial Sequence: Synthetic oligonucleotide
ucuuccaugccaacauggg

SEQ ID NO: 3245861 - RNA, 19 nt, Artificial Sequence
  Description of Artificial Sequence: Synthetic oligonucleotide
aagauggccaggccccugc

SEQ ID NO: 3245862 - RNA, 19 nt, Artificial Sequence
  Description of Artificial Sequence: Synthetic oligonucleotide
aagaagaagaagaggaaga

SEQ ID NO: 3245863 - RNA, 19 nt, Artificial Sequence
  Description of Artificial Sequence: Synthetic oligonucleotide
gaagaggaagaggagacag

SEQ ID NO: 3245864 - RNA, 19 nt, Artificial Sequence
  Description of Artificial Sequence: Synthetic oligonucleotide
caugguuccaggcuguagg

SEQ ID NO: 3245865 - RNA, 19 nt, Artificial Sequence
  Description of Artificial Sequence: Synthetic oligonucleotide
gaagaagaagaggaagagg

SEQ ID NO: 3245866 - RNA, 19 nt, Artificial Sequence
  Description of Artificial Sequence: Synthetic oligonucleotide
cucggcuccaacauaaaag

SEQ ID NO: 3245867 - RNA, 19 nt, Artificial Sequence
  Description of Artificial Sequence: Synthetic oligonucleotide
ucggcuccaacauaaaaga

SEQ ID NO: 3245868 - RNA, 19 nt, Artificial Sequence
  Description of Artificial Sequence: Synthetic oligonucleotide
uguugcaaagaagauggcc

SEQ ID NO: 3245869 - RNA, 19 nt, Artificial Sequence
  Description of Artificial Sequence: Synthetic oligonucleotide
gaggagacagagcagggcc

SEQ ID NO: 3245870 - RNA, 19 nt, Artificial Sequence
  Description of Artificial Sequence: Synthetic oligonucleotide
gaaggagaauauguaagag

SEQ ID NO: 3245871 - RNA, 19 nt, Artificial Sequence
  Description of Artificial Sequence: Synthetic oligonucleotide
gauguugcucaacacaauc

SEQ ID NO: 3245872 - RNA, 19 nt, Artificial Sequence
  Description of Artificial Sequence: Synthetic oligonucleotide
aguucaagacggcugcuuc

SEQ ID NO: 3245873 - RNA, 19 nt, Artificial Sequence
  Description of Artificial Sequence: Synthetic oligonucleotide
uggaguucaagacggcugc

SEQ ID NO: 3245874 - RNA, 19 nt, Artificial Sequence
  Description of Artificial Sequence: Synthetic oligonucleotide
gagugcucugagcagaugc

SEQ ID NO: 3245875 - RNA, 19 nt, Artificial Sequence
  Description of Artificial Sequence: Synthetic oligonucleotide
ucugccuugagcauuuaau

SEQ ID NO: 3245876 - RNA, 19 nt, Artificial Sequence
  Description of Artificial Sequence: Synthetic oligonucleotide
uguugcucaacacaaucau

SEQ ID NO: 3245877 - RNA, 19 nt, Artificial Sequence
  Description of Artificial Sequence: Synthetic oligonucleotide
gaaagaaagaugagacaag

SEQ ID NO: 3245878 - RNA, 19 nt, Artificial Sequence
  Description of Artificial Sequence: Synthetic oligonucleotide
acaaucaugguuccaggcu

SEQ ID NO: 3245879 - RNA, 19 nt, Artificial Sequence
  Description of Artificial Sequence: Synthetic oligonucleotide
gaugagacaaggcugccga

SEQ ID NO: 3245880 - RNA, 19 nt, Artificial Sequence
  Description of Artificial Sequence: Synthetic oligonucleotide
aggacuguugcaaagaaga

SEQ ID NO: 3245881 - RNA, 19 nt, Artificial Sequence
  Description of Artificial Sequence: Synthetic oligonucleotide
agaagaagaagaggaagag

SEQ ID NO: 3245882 - RNA, 19 nt, Artificial Sequence
  Description of Artificial Sequence: Synthetic oligonucleotide
agaggaagaggagacagag

SEQ ID NO: 3245883 - RNA, 19 nt, Artificial Sequence
  Description of Artificial Sequence: Synthetic oligonucleotide
ccagaaagaaagaugagac

SEQ ID NO: 3245884 - RNA, 19 nt, Artificial Sequence
  Description of Artificial Sequence: Synthetic oligonucleotide
uccaugccaacaugggugg

SEQ ID NO: 3245885 - RNA, 19 nt, Artificial Sequence
  Description of Artificial Sequence: Synthetic oligonucleotide
uugcaaagaagauggccag

SEQ ID NO: 3245886 - RNA, 19 nt, Artificial Sequence
  Description of Artificial Sequence: Synthetic oligonucleotide
ugccuugagcauuuaauac

SEQ ID NO: 3245887 - RNA, 19 nt, Artificial Sequence
  Description of Artificial Sequence: Synthetic oligonucleotide
guaagagccaaaugucacc

SEQ ID NO: 3245888 - RNA, 19 nt, Artificial Sequence
  Description of Artificial Sequence: Synthetic oligonucleotide
guugcaaagaagauggcca

SEQ ID NO: 3245889 - RNA, 19 nt, Artificial Sequence
  Description of Artificial Sequence: Synthetic oligonucleotide
gauauuuagcucuucgagu

SEQ ID NO: 3245890 - RNA, 19 nt, Artificial Sequence
  Description of Artificial Sequence: Synthetic oligonucleotide
agccaaaugucaccucggc

SEQ ID NO: 3245891 - RNA, 19 nt, Artificial Sequence
  Description of Artificial Sequence: Synthetic oligonucleotide
cugcaggcagcaaaggucc

SEQ ID NO: 3245892 - RNA, 19 nt, Artificial Sequence
  Description of Artificial Sequence: Synthetic oligonucleotide
aaggcugccgauguugcuc

SEQ ID NO: 3245893 - RNA, 19 nt, Artificial Sequence
  Description of Artificial Sequence: Synthetic oligonucleotide
uauuuagcucuucgagugc

SEQ ID NO: 3245894 - RNA, 19 nt, Artificial Sequence
  Description of Artificial Sequence: Synthetic oligonucleotide
aaaagaagaagaagaggaa

SEQ ID NO: 3245895 - RNA, 19 nt, Artificial Sequence
  Description of Artificial Sequence: Synthetic oligonucleotide
ccaacauaaaagaagaaga

SEQ ID NO: 3245896 - RNA, 19 nt, Artificial Sequence
  Description of Artificial Sequence: Synthetic oligonucleotide
cagaagauggaguucaaga

SEQ ID NO: 3245897 - RNA, 19 nt, Artificial Sequence
  Description of Artificial Sequence: Synthetic oligonucleotide
gaagaagaggaagaggaga

SEQ ID NO: 3245898 - RNA, 19 nt, Artificial Sequence
  Description of Artificial Sequence: Synthetic oligonucleotide
ucaacacaaucaugguucc

SEQ ID NO: 3245899 - RNA, 19 nt, Artificial Sequence
  Description of Artificial Sequence: Synthetic oligonucleotide
gacuguugcaaagaagaug

SEQ ID NO: 3245900 - RNA, 19 nt, Artificial Sequence
  Description of Artificial Sequence: Synthetic oligonucleotide
uaggacuguugcaaagaag

SEQ ID NO: 3245901 - RNA, 19 nt, Artificial Sequence
  Description of Artificial Sequence: Synthetic oligonucleotide
caggcuguaggacuguugc

SEQ ID NO: 3245902 - RNA, 19 nt, Artificial Sequence
  Description of Artificial Sequence: Synthetic oligonucleotide
accagaaagaaagaugaga

SEQ ID NO: 3245903 - RNA, 19 nt, Artificial Sequence
  Description of Artificial Sequence: Synthetic oligonucleotide
caaucaugguuccaggcug

SEQ ID NO: 3245904 - RNA, 19 nt, Artificial Sequence
  Description of Artificial Sequence: Synthetic oligonucleotide
gagaauauguaagagccaa

SEQ ID NO: 3245905 - RNA, 19 nt, Artificial Sequence
  Description of Artificial Sequence: Synthetic oligonucleotide
uaagagccaaaugucaccu

SEQ ID NO: 3245906 - RNA, 19 nt, Artificial Sequence
  Description of Artificial Sequence: Synthetic oligonucleotide
acacaaucaugguuccagg

SEQ ID NO: 3245907 - RNA, 19 nt, Artificial Sequence
  Description of Artificial Sequence: Synthetic oligonucleotide
ucugagcagaugcugugga

SEQ ID NO: 3245908 - RNA, 19 nt, Artificial Sequence
  Description of Artificial Sequence: Synthetic oligonucleotide
aagaugagacaaggcugcc

SEQ ID NO: 3245909 - RNA, 19 nt, Artificial Sequence
  Description of Artificial Sequence: Synthetic oligonucleotide
ugggugguggcgaaggaga

SEQ ID NO: 3245910 - RNA, 19 nt, Artificial Sequence
  Description of Artificial Sequence: Synthetic oligonucleotide
caacauaaaagaagaagaa

SEQ ID NO: 3245911 - RNA, 19 nt, Artificial Sequence
  Description of Artificial Sequence: Synthetic oligonucleotide
uguaggacuguugcaaaga

SEQ ID NO: 3245912 - RNA, 19 nt, Artificial Sequence
  Description of Artificial Sequence: Synthetic oligonucleotide
cacaaucaugguuccaggc

SEQ ID NO: 3245913 - RNA, 19 nt, Artificial Sequence
  Description of Artificial Sequence: Synthetic oligonucleotide
ucacuuucuuccaugccaa

SEQ ID NO: 3245914 - RNA, 19 nt, Artificial Sequence
  Description of Artificial Sequence: Synthetic oligonucleotide
caaaugucaccucggcucc

SEQ ID NO: 3245915 - RNA, 19 nt, Artificial Sequence
  Description of Artificial Sequence: Synthetic oligonucleotide
ggcugcuucacuuucuucc

SEQ ID NO: 3245916 - RNA, 19 nt, Artificial Sequence
  Description of Artificial Sequence: Synthetic oligonucleotide
aagagccaaaugucaccuc

SEQ ID NO: 3245917 - RNA, 19 nt, Artificial Sequence
  Description of Artificial Sequence: Synthetic oligonucleotide
aaaauguucaauuucaaag

SEQ ID NO: 3245918 - RNA, 19 nt, Artificial Sequence
  Description of Artificial Sequence: Synthetic oligonucleotide
uauacaaucaaauagacgu

SEQ ID NO: 3245919 - RNA, 19 nt, Artificial Sequence
  Description of Artificial Sequence: Synthetic oligonucleotide
aaugaaacaauacauugag

SEQ ID NO: 3245920 - RNA, 19 nt, Artificial Sequence
  Description of Artificial Sequence: Synthetic oligonucleotide
uaaacugugacuuuaaagc

SEQ ID NO: 3245921 - RNA, 19 nt, Artificial Sequence
  Description of Artificial Sequence: Synthetic oligonucleotide
uuuaaugucaccuagcugu

SEQ ID NO: 3245922 - RNA, 19 nt, Artificial Sequence
  Description of Artificial Sequence: Synthetic oligonucleotide
uugauuucaauauagacca

SEQ ID NO: 3245923 - RNA, 19 nt, Artificial Sequence
  Description of Artificial Sequence: Synthetic oligonucleotide
aaucaaagcauaaauacac

SEQ ID NO: 3245924 - RNA, 19 nt, Artificial Sequence
  Description of Artificial Sequence: Synthetic oligonucleotide
aaauuaguaguaaugaaac

SEQ ID NO: 3245925 - RNA, 19 nt, Artificial Sequence
  Description of Artificial Sequence: Synthetic oligonucleotide
agcauaaauacacaaacac

SEQ ID NO: 3245926 - RNA, 19 nt, Artificial Sequence
  Description of Artificial Sequence: Synthetic oligonucleotide
aaacugugacuuuaaagcc

SEQ ID NO: 3245927 - RNA, 19 nt, Artificial Sequence
  Description of Artificial Sequence: Synthetic oligonucleotide
aagacuacuguagugaacc

SEQ ID NO: 3245928 - RNA, 19 nt, Artificial Sequence
  Description of Artificial Sequence: Synthetic oligonucleotide
guuacuaugaaucaaagca

SEQ ID NO: 3245929 - RNA, 19 nt, Artificial Sequence
  Description of Artificial Sequence: Synthetic oligonucleotide
uucaauuucaaagagaaca

SEQ ID NO: 3245930 - RNA, 19 nt, Artificial Sequence
  Description of Artificial Sequence: Synthetic oligonucleotide
aauaagauuuauucaauga

SEQ ID NO: 3245931 - RNA, 19 nt, Artificial Sequence
  Description of Artificial Sequence: Synthetic oligonucleotide
uauuaaauuaguaguaaug

SEQ ID NO: 3245932 - RNA, 19 nt, Artificial Sequence
  Description of Artificial Sequence: Synthetic oligonucleotide
ugaaucaaagcauaaauac

SEQ ID NO: 3245933 - RNA, 19 nt, Artificial Sequence
  Description of Artificial Sequence: Synthetic oligonucleotide
uucaauauagaccaagugu

SEQ ID NO: 3245934 - RNA, 19 nt, Artificial Sequence
  Description of Artificial Sequence: Synthetic oligonucleotide
aguaacaccugguaguucc

SEQ ID NO: 3245935 - RNA, 19 nt, Artificial Sequence
  Description of Artificial Sequence: Synthetic oligonucleotide
uacuauuugacuuugaaau

SEQ ID NO: 3245936 - RNA, 19 nt, Artificial Sequence
  Description of Artificial Sequence: Synthetic oligonucleotide
aagauuuauucaaugaugg

SEQ ID NO: 3245937 - RNA, 19 nt, Artificial Sequence
  Description of Artificial Sequence: Synthetic oligonucleotide
acagcauucagguaggugg

SEQ ID NO: 3245938 - RNA, 19 nt, Artificial Sequence
  Description of Artificial Sequence: Synthetic oligonucleotide
ugucaauuacuaauaaagg

SEQ ID NO: 3245939 - RNA, 19 nt, Artificial Sequence
  Description of Artificial Sequence: Synthetic oligonucleotide
ugagaaguuacuaugaauc

SEQ ID NO: 3245940 - RNA, 19 nt, Artificial Sequence
  Description of Artificial Sequence: Synthetic oligonucleotide
ucaauuacuaauaaagguc

SEQ ID NO: 3245941 - RNA, 19 nt, Artificial Sequence
  Description of Artificial Sequence: Synthetic oligonucleotide
aaucaaauagacguacagc

SEQ ID NO: 3245942 - RNA, 19 nt, Artificial Sequence
  Description of Artificial Sequence: Synthetic oligonucleotide
aauguucaauuucaaagag

SEQ ID NO: 3245943 - RNA, 19 nt, Artificial Sequence
  Description of Artificial Sequence: Synthetic oligonucleotide
acuaauaaaggucaaauau

SEQ ID NO: 3245944 - RNA, 19 nt, Artificial Sequence
  Description of Artificial Sequence: Synthetic oligonucleotide
uuaaaguaacaccugguag

SEQ ID NO: 3245945 - RNA, 19 nt, Artificial Sequence
  Description of Artificial Sequence: Synthetic oligonucleotide
aucaaagaaaccuuuaaug

SEQ ID NO: 3245946 - RNA, 19 nt, Artificial Sequence
  Description of Artificial Sequence: Synthetic oligonucleotide
aaaucaauuccauaacaug

SEQ ID NO: 3245947 - RNA, 19 nt, Artificial Sequence
  Description of Artificial Sequence: Synthetic oligonucleotide
aauguucauucacacacac

SEQ ID NO: 3245948 - RNA, 19 nt, Artificial Sequence
  Description of Artificial Sequence: Synthetic oligonucleotide
gauuuaaaguaacaccugg

SEQ ID NO: 3245949 - RNA, 19 nt, Artificial Sequence
  Description of Artificial Sequence: Synthetic oligonucleotide
ucaauauagaccaaguguc

SEQ ID NO: 3245950 - RNA, 19 nt, Artificial Sequence
  Description of Artificial Sequence: Synthetic oligonucleotide
aauauacaaucaaauagac

SEQ ID NO: 3245951 - RNA, 19 nt, Artificial Sequence
  Description of Artificial Sequence: Synthetic oligonucleotide
uaagauuuauucaaugaug

SEQ ID NO: 3245952 - RNA, 19 nt, Artificial Sequence
  Description of Artificial Sequence: Synthetic oligonucleotide
uucuacauaaaaccuaugc

SEQ ID NO: 3245953 - RNA, 19 nt, Artificial Sequence
  Description of Artificial Sequence: Synthetic oligonucleotide
uaaauuaguaguaaugaaa

SEQ ID NO: 3245954 - RNA, 19 nt, Artificial Sequence
  Description of Artificial Sequence: Synthetic oligonucleotide
aaauaagauuuauucaaug

SEQ ID NO: 3245955 - RNA, 19 nt, Artificial Sequence
  Description of Artificial Sequence: Synthetic oligonucleotide
uuucuaaagauggagaaag

SEQ ID NO: 3245956 - RNA, 19 nt, Artificial Sequence
  Description of Artificial Sequence: Synthetic oligonucleotide
aacaugagaaguuacuaug

SEQ ID NO: 3245957 - RNA, 19 nt, Artificial Sequence
  Description of Artificial Sequence: Synthetic oligonucleotide
ucaaauauaaacugugacu

SEQ ID NO: 3245958 - RNA, 19 nt, Artificial Sequence
  Description of Artificial Sequence: Synthetic oligonucleotide
agcauauuaaauuaguagu

SEQ ID NO: 3245959 - RNA, 19 nt, Artificial Sequence
  Description of Artificial Sequence: Synthetic oligonucleotide
uagcauauuaaauuaguag

SEQ ID NO: 3245960 - RNA, 19 nt, Artificial Sequence
  Description of Artificial Sequence: Synthetic oligonucleotide
guaaugaaacaauacauug

SEQ ID NO: 3245961 - RNA, 19 nt, Artificial Sequence
  Description of Artificial Sequence: Synthetic oligonucleotide
ucaauuucaaagagaacag

SEQ ID NO: 3245962 - RNA, 19 nt, Artificial Sequence
  Description of Artificial Sequence: Synthetic oligonucleotide
uacauaaaaccuaugcuug

SEQ ID NO: 3245963 - RNA, 19 nt, Artificial Sequence
  Description of Artificial Sequence: Synthetic oligonucleotide
ugacuuugaaauaagauuu

SEQ ID NO: 3245964 - RNA, 19 nt, Artificial Sequence
  Description of Artificial Sequence: Synthetic oligonucleotide
aguuacuaugaaucaaagc

SEQ ID NO: 3245965 - RNA, 19 nt, Artificial Sequence
  Description of Artificial Sequence: Synthetic oligonucleotide
aguuccuuccaacauacac

SEQ ID NO: 3245966 - RNA, 19 nt, Artificial Sequence
  Description of Artificial Sequence: Synthetic oligonucleotide
ucuacauaaaaccuaugcu

SEQ ID NO: 3245967 - RNA, 19 nt, Artificial Sequence
  Description of Artificial Sequence: Synthetic oligonucleotide
uuguguucaaugcaaauca

SEQ ID NO: 3245968 - RNA, 19 nt, Artificial Sequence
  Description of Artificial Sequence: Synthetic oligonucleotide
aauguggaacuuuaccuag

SEQ ID NO: 3245969 - RNA, 19 nt, Artificial Sequence
  Description of Artificial Sequence: Synthetic oligonucleotide
augucaauuacuaauaaag

SEQ ID NO: 3245970 - RNA, 19 nt, Artificial Sequence
  Description of Artificial Sequence: Synthetic oligonucleotide
uguguuauggccucacagg

SEQ ID NO: 3245971 - RNA, 19 nt, Artificial Sequence
  Description of Artificial Sequence: Synthetic oligonucleotide
aauauagaccaaguguccg

SEQ ID NO: 3245972 - RNA, 19 nt, Artificial Sequence
  Description of Artificial Sequence: Synthetic oligonucleotide
auuaaauuaguaguaauga

SEQ ID NO: 3245973 - RNA, 19 nt, Artificial Sequence
  Description of Artificial Sequence: Synthetic oligonucleotide
uaaaguaacaccugguagu

SEQ ID NO: 3245974 - RNA, 19 nt, Artificial Sequence
  Description of Artificial Sequence: Synthetic oligonucleotide
aaaaccuaugcuugauuuc

SEQ ID NO: 3245975 - RNA, 19 nt, Artificial Sequence
  Description of Artificial Sequence: Synthetic oligonucleotide
uaaugaaacaauacauuga

SEQ ID NO: 3245976 - RNA, 19 nt, Artificial Sequence
  Description of Artificial Sequence: Synthetic oligonucleotide
gauuccaauccauaguugc

SEQ ID NO: 3245977 - RNA, 19 nt, Artificial Sequence
  Description of Artificial Sequence: Synthetic oligonucleotide
uggaacuuuaccuagaguu

SEQ ID NO: 3245978 - RNA, 19 nt, Artificial Sequence
  Description of Artificial Sequence: Synthetic oligonucleotide
auacauugaggauuuaaag

SEQ ID NO: 3245979 - RNA, 19 nt, Artificial Sequence
  Description of Artificial Sequence: Synthetic oligonucleotide
uacauugaggauuuaaagu

SEQ ID NO: 3245980 - RNA, 19 nt, Artificial Sequence
  Description of Artificial Sequence: Synthetic oligonucleotide
uaguaaugaaacaauacau

SEQ ID NO: 3245981 - RNA, 19 nt, Artificial Sequence
  Description of Artificial Sequence: Synthetic oligonucleotide
acguacagcauucagguag

SEQ ID NO: 3245982 - RNA, 19 nt, Artificial Sequence
  Description of Artificial Sequence: Synthetic oligonucleotide
uuugacuuugaaauaagau

SEQ ID NO: 3245983 - RNA, 19 nt, Artificial Sequence
  Description of Artificial Sequence: Synthetic oligonucleotide
agauuuauucaaugauggc

SEQ ID NO: 3245984 - RNA, 19 nt, Artificial Sequence
  Description of Artificial Sequence: Synthetic oligonucleotide
acaauguggaacuuuaccu

SEQ ID NO: 3245985 - RNA, 19 nt, Artificial Sequence
  Description of Artificial Sequence: Synthetic oligonucleotide
auaagauuuauucaaugau

SEQ ID NO: 3245986 - RNA, 19 nt, Artificial Sequence
  Description of Artificial Sequence: Synthetic oligonucleotide
uugacuuugaaauaagauu

SEQ ID NO: 3245987 - RNA, 19 nt, Artificial Sequence
  Description of Artificial Sequence: Synthetic oligonucleotide
guaguaaugaaacaauaca

SEQ ID NO: 3245988 - RNA, 19 nt, Artificial Sequence
  Description of Artificial Sequence: Synthetic oligonucleotide
uuuaaaguaacaccuggua

SEQ ID NO: 3245989 - RNA, 19 nt, Artificial Sequence
  Description of Artificial Sequence: Synthetic oligonucleotide
caauauacaaucaaauaga

SEQ ID NO: 3245990 - RNA, 19 nt, Artificial Sequence
  Description of Artificial Sequence: Synthetic oligonucleotide
aacauacacauaaauaaca

SEQ ID NO: 3245991 - RNA, 19 nt, Artificial Sequence
  Description of Artificial Sequence: Synthetic oligonucleotide
ucugaggucuucuuguucc

SEQ ID NO: 3245992 - RNA, 19 nt, Artificial Sequence
  Description of Artificial Sequence: Synthetic oligonucleotide
aaccuuuaaugucaccuag

SEQ ID NO: 3245993 - RNA, 19 nt, Artificial Sequence
  Description of Artificial Sequence: Synthetic oligonucleotide
uuuaccuagaguuuagcau

SEQ ID NO: 3245994 - RNA, 19 nt, Artificial Sequence
  Description of Artificial Sequence: Synthetic oligonucleotide
uuaaauuaguaguaaugaa

SEQ ID NO: 3245995 - RNA, 19 nt, Artificial Sequence
  Description of Artificial Sequence: Synthetic oligonucleotide
ggaauguucauucacacac

SEQ ID NO: 3245996 - RNA, 19 nt, Artificial Sequence
  Description of Artificial Sequence: Synthetic oligonucleotide
ucuaaagauggagaaagug

SEQ ID NO: 3245997 - RNA, 19 nt, Artificial Sequence
  Description of Artificial Sequence: Synthetic oligonucleotide
acauugaggauuuaaagua

SEQ ID NO: 3245998 - RNA, 19 nt, Artificial Sequence
  Description of Artificial Sequence: Synthetic oligonucleotide
aaauagacguacagcauuc

SEQ ID NO: 3245999 - RNA, 19 nt, Artificial Sequence
  Description of Artificial Sequence: Synthetic oligonucleotide
guuaucaagacuacuguag

SEQ ID NO: 3246000 - RNA, 19 nt, Artificial Sequence
  Description of Artificial Sequence: Synthetic oligonucleotide
aaacaauacauugaggauu

SEQ ID NO: 3246001 - RNA, 19 nt, Artificial Sequence
  Description of Artificial Sequence: Synthetic oligonucleotide
uagaguuuagcauauuaaa

SEQ ID NO: 3246002 - RNA, 19 nt, Artificial Sequence
  Description of Artificial Sequence: Synthetic oligonucleotide
uuacaguuuguguucaaug

SEQ ID NO: 3246003 - RNA, 19 nt, Artificial Sequence
  Description of Artificial Sequence: Synthetic oligonucleotide
ucaaugcaaaucaauucca

SEQ ID NO: 3246004 - RNA, 19 nt, Artificial Sequence
  Description of Artificial Sequence: Synthetic oligonucleotide
uuacuaugaaucaaagcau

SEQ ID NO: 3246005 - RNA, 19 nt, Artificial Sequence
  Description of Artificial Sequence: Synthetic oligonucleotide
uccaacauacacauaaaua

SEQ ID NO: 3246006 - RNA, 19 nt, Artificial Sequence
  Description of Artificial Sequence: Synthetic oligonucleotide
gagaaagugacucugguua

SEQ ID NO: 3246007 - RNA, 19 nt, Artificial Sequence
  Description of Artificial Sequence: Synthetic oligonucleotide
aaaccuaugcuugauuuca

SEQ ID NO: 3246008 - RNA, 19 nt, Artificial Sequence
  Description of Artificial Sequence: Synthetic oligonucleotide
cuaaagauggagaaaguga

SEQ ID NO: 3246009 - RNA, 19 nt, Artificial Sequence
  Description of Artificial Sequence: Synthetic oligonucleotide
agacguacagcauucaggu

SEQ ID NO: 3246010 - RNA, 19 nt, Artificial Sequence
  Description of Artificial Sequence: Synthetic oligonucleotide
aguuuagcauauuaaauua

SEQ ID NO: 3246011 - RNA, 19 nt, Artificial Sequence
  Description of Artificial Sequence: Synthetic oligonucleotide
uguggaacuuuaccuagag

SEQ ID NO: 3246012 - RNA, 19 nt, Artificial Sequence
  Description of Artificial Sequence: Synthetic oligonucleotide
aauacauugaggauuuaaa

SEQ ID NO: 3246013 - RNA, 19 nt, Artificial Sequence
  Description of Artificial Sequence: Synthetic oligonucleotide
ucaccuagcuguguuaugg

SEQ ID NO: 3246014 - RNA, 19 nt, Artificial Sequence
  Description of Artificial Sequence: Synthetic oligonucleotide
uuaccuagaguuuagcaua

SEQ ID NO: 3246015 - RNA, 19 nt, Artificial Sequence
  Description of Artificial Sequence: Synthetic oligonucleotide
acuacuguagugaaccugg

SEQ ID NO: 3246016 - RNA, 19 nt, Artificial Sequence
  Description of Artificial Sequence: Synthetic oligonucleotide
uuacuaauaaaggucaaau

SEQ ID NO: 3246017 - RNA, 19 nt, Artificial Sequence
  Description of Artificial Sequence: Synthetic oligonucleotide
ugcuacagcauccagagcu

SEQ ID NO: 3246018 - RNA, 19 nt, Artificial Sequence
  Description of Artificial Sequence: Synthetic oligonucleotide
ucugaagucuuccucaccc

SEQ ID NO: 3246019 - RNA, 19 nt, Artificial Sequence
  Description of Artificial Sequence: Synthetic oligonucleotide
gaugucagcaucugagugg

SEQ ID NO: 3246020 - RNA, 19 nt, Artificial Sequence
  Description of Artificial Sequence: Synthetic oligonucleotide
acugcuacagcauccagag

SEQ ID NO: 3246021 - RNA, 19 nt, Artificial Sequence
  Description of Artificial Sequence: Synthetic oligonucleotide
acagccaccggacuguugg

SEQ ID NO: 3246022 - RNA, 19 nt, Artificial Sequence
  Description of Artificial Sequence: Synthetic oligonucleotide
ugaagucuuccucacccgg

SEQ ID NO: 3246023 - RNA, 19 nt, Artificial Sequence
  Description of Artificial Sequence: Synthetic oligonucleotide
agagccaggguagagaggg

SEQ ID NO: 3246024 - RNA, 19 nt, Artificial Sequence
  Description of Artificial Sequence: Synthetic oligonucleotide
agagagggcagaugcaugg

SEQ ID NO: 3246025 - RNA, 19 nt, Artificial Sequence
  Description of Artificial Sequence: Synthetic oligonucleotide
ugcaacaguugucugaagu

SEQ ID NO: 3246026 - RNA, 19 nt, Artificial Sequence
  Description of Artificial Sequence: Synthetic oligonucleotide
uccagagcugugacgaugg

SEQ ID NO: 3246027 - RNA, 19 nt, Artificial Sequence
  Description of Artificial Sequence: Synthetic oligonucleotide
gacgaagagaucugcgagg

SEQ ID NO: 3246028 - RNA, 19 nt, Artificial Sequence
  Description of Artificial Sequence: Synthetic oligonucleotide
uuagcaacagccaccggac

SEQ ID NO: 3246029 - RNA, 19 nt, Artificial Sequence
  Description of Artificial Sequence: Synthetic oligonucleotide
uugucugaagucuuccuca

SEQ ID NO: 3246030 - RNA, 19 nt, Artificial Sequence
  Description of Artificial Sequence: Synthetic oligonucleotide
aaggaggagagccagggua

SEQ ID NO: 3246031 - RNA, 19 nt, Artificial Sequence
  Description of Artificial Sequence: Synthetic oligonucleotide
agaugucagcaucugagug

SEQ ID NO: 3246032 - RNA, 19 nt, Artificial Sequence
  Description of Artificial Sequence: Synthetic oligonucleotide
guuagcaacagccaccgga

SEQ ID NO: 3246033 - RNA, 19 nt, Artificial Sequence
  Description of Artificial Sequence: Synthetic oligonucleotide
acgaagagaucugcgaggc

SEQ ID NO: 3246034 - RNA, 19 nt, Artificial Sequence
  Description of Artificial Sequence: Synthetic oligonucleotide
ucugcgaggccuguggugg

SEQ ID NO: 3246035 - RNA, 19 nt, Artificial Sequence
  Description of Artificial Sequence: Synthetic oligonucleotide
agaugcauggggcagucug

SEQ ID NO: 3246036 - RNA, 19 nt, Artificial Sequence
  Description of Artificial Sequence: Synthetic oligonucleotide
agaucugcgaggccugugg

SEQ ID NO: 3246037 - RNA, 19 nt, Artificial Sequence
  Description of Artificial Sequence: Synthetic oligonucleotide
uucacaggagaugucagca

SEQ ID NO: 3246038 - RNA, 19 nt, Artificial Sequence
  Description of Artificial Sequence: Synthetic oligonucleotide
uuucacaggagaugucagc

SEQ ID NO: 3246039 - RNA, 19 nt, Artificial Sequence
  Description of Artificial Sequence: Synthetic oligonucleotide
uuggcuacugccacagcug

SEQ ID NO: 3246040 - RNA, 19 nt, Artificial Sequence
  Description of Artificial Sequence: Synthetic oligonucleotide
acccggguuagcaacagcc

SEQ ID NO: 3246041 - RNA, 19 nt, Artificial Sequence
  Description of Artificial Sequence: Synthetic oligonucleotide
augucagcaucugaguggg

SEQ ID NO: 3246042 - RNA, 19 nt, Artificial Sequence
  Description of Artificial Sequence: Synthetic oligonucleotide
agagggcagaugcaugggg

SEQ ID NO: 3246043 - RNA, 19 nt, Artificial Sequence
  Description of Artificial Sequence: Synthetic oligonucleotide
ucagcaucugagugggcag

SEQ ID NO: 3246044 - RNA, 19 nt, Artificial Sequence
  Description of Artificial Sequence: Synthetic oligonucleotide
agagcugugacgauggcga

SEQ ID NO: 3246045 - RNA, 19 nt, Artificial Sequence
  Description of Artificial Sequence: Synthetic oligonucleotide
ggagaugucagcaucugag

SEQ ID NO: 3246046 - RNA, 19 nt, Artificial Sequence
  Description of Artificial Sequence: Synthetic oligonucleotide
ugccacagcagccacugcu

SEQ ID NO: 3246047 - RNA, 19 nt, Artificial Sequence
  Description of Artificial Sequence: Synthetic oligonucleotide
ugugacgauggcgacgaag

SEQ ID NO: 3246048 - RNA, 19 nt, Artificial Sequence
  Description of Artificial Sequence: Synthetic oligonucleotide
aagucuuccucacccgggu

SEQ ID NO: 3246049 - RNA, 19 nt, Artificial Sequence
  Description of Artificial Sequence: Synthetic oligonucleotide
agcaacagccaccggacug

SEQ ID NO: 3246050 - RNA, 19 nt, Artificial Sequence
  Description of Artificial Sequence: Synthetic oligonucleotide
uccugcaacaguugucuga

SEQ ID NO: 3246051 - RNA, 19 nt, Artificial Sequence
  Description of Artificial Sequence: Synthetic oligonucleotide
gaagucuuccucacccggg

SEQ ID NO: 3246052 - RNA, 19 nt, Artificial Sequence
  Description of Artificial Sequence: Synthetic oligonucleotide
ggguagagagggcagaugc

SEQ ID NO: 3246053 - RNA, 19 nt, Artificial Sequence
  Description of Artificial Sequence: Synthetic oligonucleotide
agcauccagagcugugacg

SEQ ID NO: 3246054 - RNA, 19 nt, Artificial Sequence
  Description of Artificial Sequence: Synthetic oligonucleotide
cauggcuuccuccugcaac

SEQ ID NO: 3246055 - RNA, 19 nt, Artificial Sequence
  Description of Artificial Sequence: Synthetic oligonucleotide
guugucugaagucuuccuc

SEQ ID NO: 3246056 - RNA, 19 nt, Artificial Sequence
  Description of Artificial Sequence: Synthetic oligonucleotide
cagggcaaggaggagagcc

SEQ ID NO: 3246057 - RNA, 19 nt, Artificial Sequence
  Description of Artificial Sequence: Synthetic oligonucleotide
auggcuuccuccugcaaca

SEQ ID NO: 3246058 - RNA, 19 nt, Artificial Sequence
  Description of Artificial Sequence: Synthetic oligonucleotide
uagagagggcagaugcaug

SEQ ID NO: 3246059 - RNA, 19 nt, Artificial Sequence
  Description of Artificial Sequence: Synthetic oligonucleotide
uggcuacugccacagcugc

SEQ ID NO: 3246060 - RNA, 19 nt, Artificial Sequence
  Description of Artificial Sequence: Synthetic oligonucleotide
gauggcgacgaagagaucu

SEQ ID NO: 3246061 - RNA, 19 nt, Artificial Sequence
  Description of Artificial Sequence: Synthetic oligonucleotide
cugaagucuuccucacccg

SEQ ID NO: 3246062 - RNA, 19 nt, Artificial Sequence
  Description of Artificial Sequence: Synthetic oligonucleotide
ggagagccaggguagagag

SEQ ID NO: 3246063 - RNA, 19 nt, Artificial Sequence
  Description of Artificial Sequence: Synthetic oligonucleotide
aguugucugaagucuuccu

SEQ ID NO: 3246064 - RNA, 19 nt, Artificial Sequence
  Description of Artificial Sequence: Synthetic oligonucleotide
uggggcagucugcugagca

SEQ ID NO: 3246065 - RNA, 19 nt, Artificial Sequence
  Description of Artificial Sequence: Synthetic oligonucleotide
ugacgauggcgacgaagag

SEQ ID NO: 3246066 - RNA, 19 nt, Artificial Sequence
  Description of Artificial Sequence: Synthetic oligonucleotide
ugucugaagucuuccucac

SEQ ID NO: 3246067 - RNA, 19 nt, Artificial Sequence
  Description of Artificial Sequence: Synthetic oligonucleotide
gaagagaucugcgaggccu

SEQ ID NO: 3246068 - RNA, 19 nt, Artificial Sequence
  Description of Artificial Sequence: Synthetic oligonucleotide
gacuguuggcuacugccac

SEQ ID NO: 3246069 - RNA, 19 nt, Artificial Sequence
  Description of Artificial Sequence: Synthetic oligonucleotide
uacagcauccagagcugug

SEQ ID NO: 3246070 - RNA, 19 nt, Artificial Sequence
  Description of Artificial Sequence: Synthetic oligonucleotide
acgauggcgacgaagagau

SEQ ID NO: 3246071 - RNA, 19 nt, Artificial Sequence
  Description of Artificial Sequence: Synthetic oligonucleotide
ugagcauggcuuccuccug

SEQ ID NO: 3246072 - RNA, 19 nt, Artificial Sequence
  Description of Artificial Sequence: Synthetic oligonucleotide
cacaggagaugucagcauc

SEQ ID NO: 3246073 - RNA, 19 nt, Artificial Sequence
  Description of Artificial Sequence: Synthetic oligonucleotide
gagcauggcuuccuccugc

SEQ ID NO: 3246074 - RNA, 19 nt, Artificial Sequence
  Description of Artificial Sequence: Synthetic oligonucleotide
uuccuccugcaacaguugu

SEQ ID NO: 3246075 - RNA, 19 nt, Artificial Sequence
  Description of Artificial Sequence: Synthetic oligonucleotide
agugggcagggcaaggagg

SEQ ID NO: 3246076 - RNA, 19 nt, Artificial Sequence
  Description of Artificial Sequence: Synthetic oligonucleotide
gagugggcagggcaaggag

SEQ ID NO: 3246077 - RNA, 19 nt, Artificial Sequence
  Description of Artificial Sequence: Synthetic oligonucleotide
gaugcauggggcagucugc

SEQ ID NO: 3246078 - RNA, 19 nt, Artificial Sequence
  Description of Artificial Sequence: Synthetic oligonucleotide
ugccaccacugcuacagca

SEQ ID NO: 3246079 - RNA, 19 nt, Artificial Sequence
  Description of Artificial Sequence: Synthetic oligonucleotide
gagggcagaugcauggggc

SEQ ID NO: 3246080 - RNA, 19 nt, Artificial Sequence
  Description of Artificial Sequence: Synthetic oligonucleotide
ucuuccucacccggguuag

SEQ ID NO: 3246081 - RNA, 19 nt, Artificial Sequence
  Description of Artificial Sequence: Synthetic oligonucleotide
gugacgauggcgacgaaga

SEQ ID NO: 3246082 - RNA, 19 nt, Artificial Sequence
  Description of Artificial Sequence: Synthetic oligonucleotide
agccacugcugccacagcu

SEQ ID NO: 3246083 - RNA, 19 nt, Artificial Sequence
  Description of Artificial Sequence: Synthetic oligonucleotide
acaguugucugaagucuuc

SEQ ID NO: 3246084 - RNA, 19 nt, Artificial Sequence
  Description of Artificial Sequence: Synthetic oligonucleotide
cagagcugugacgauggcg

SEQ ID NO: 3246085 - RNA, 19 nt, Artificial Sequence
  Description of Artificial Sequence: Synthetic oligonucleotide
caccacugcuacagcaucc

SEQ ID NO: 3246086 - RNA, 19 nt, Artificial Sequence
  Description of Artificial Sequence: Synthetic oligonucleotide
ucugagugggcagggcaag

SEQ ID NO: 3246087 - RNA, 19 nt, Artificial Sequence
  Description of Artificial Sequence: Synthetic oligonucleotide
acugcugccacagcugcug

SEQ ID NO: 3246088 - RNA, 19 nt, Artificial Sequence
  Description of Artificial Sequence: Synthetic oligonucleotide
acagcauccagagcuguga

SEQ ID NO: 3246089 - RNA, 19 nt, Artificial Sequence
  Description of Artificial Sequence: Synthetic oligonucleotide
gacgauggcgacgaagaga

SEQ ID NO: 3246090 - RNA, 19 nt, Artificial Sequence
  Description of Artificial Sequence: Synthetic oligonucleotide
guuggcuacugccacagcu

SEQ ID NO: 3246091 - RNA, 19 nt, Artificial Sequence
  Description of Artificial Sequence: Synthetic oligonucleotide
ucugcugagcauggcuucc

SEQ ID NO: 3246092 - RNA, 19 nt, Artificial Sequence
  Description of Artificial Sequence: Synthetic oligonucleotide
aagagaucugcgaggccug

SEQ ID NO: 3246093 - RNA, 19 nt, Artificial Sequence
  Description of Artificial Sequence: Synthetic oligonucleotide
gcaacaguugucugaaguc

SEQ ID NO: 3246094 - RNA, 19 nt, Artificial Sequence
  Description of Artificial Sequence: Synthetic oligonucleotide
gcugccaccacugcuacag

SEQ ID NO: 3246095 - RNA, 19 nt, Artificial Sequence
  Description of Artificial Sequence: Synthetic oligonucleotide
ggguuagcaacagccaccg

SEQ ID NO: 3246096 - RNA, 19 nt, Artificial Sequence
  Description of Artificial Sequence: Synthetic oligonucleotide
aggaggagagccaggguag

SEQ ID NO: 3246097 - RNA, 19 nt, Artificial Sequence
  Description of Artificial Sequence: Synthetic oligonucleotide
aacaguugucugaagucuu

SEQ ID NO: 3246098 - RNA, 19 nt, Artificial Sequence
  Description of Artificial Sequence: Synthetic oligonucleotide
agggcagaugcauggggca

SEQ ID NO: 3246099 - RNA, 19 nt, Artificial Sequence
  Description of Artificial Sequence: Synthetic oligonucleotide
aggagaugucagcaucuga

SEQ ID NO: 3246100 - RNA, 19 nt, Artificial Sequence
  Description of Artificial Sequence: Synthetic oligonucleotide
gucagcaucugagugggca

SEQ ID NO: 3246101 - RNA, 19 nt, Artificial Sequence
  Description of Artificial Sequence: Synthetic oligonucleotide
acuguuggcuacugccaca

SEQ ID NO: 3246102 - RNA, 19 nt, Artificial Sequence
  Description of Artificial Sequence: Synthetic oligonucleotide
gcaaggaggagagccaggg

SEQ ID NO: 3246103 - RNA, 19 nt, Artificial Sequence
  Description of Artificial Sequence: Synthetic oligonucleotide
acagcugcugccaccacug

SEQ ID NO: 3246104 - RNA, 19 nt, Artificial Sequence
  Description of Artificial Sequence: Synthetic oligonucleotide
gagagggcagaugcauggg

SEQ ID NO: 3246105 - RNA, 19 nt, Artificial Sequence
  Description of Artificial Sequence: Synthetic oligonucleotide
cuguuggcuacugccacag

SEQ ID NO: 3246106 - RNA, 19 nt, Artificial Sequence
  Description of Artificial Sequence: Synthetic oligonucleotide
acugcugccacagcagcca

SEQ ID NO: 3246107 - RNA, 19 nt, Artificial Sequence
  Description of Artificial Sequence: Synthetic oligonucleotide
uccuccugcaacaguuguc

SEQ ID NO: 3246108 - RNA, 19 nt, Artificial Sequence
  Description of Artificial Sequence: Synthetic oligonucleotide
cauggggcagucugcugag

SEQ ID NO: 3246109 - RNA, 19 nt, Artificial Sequence
  Description of Artificial Sequence: Synthetic oligonucleotide
ucacaggagaugucagcau

SEQ ID NO: 3246110 - RNA, 19 nt, Artificial Sequence
  Description of Artificial Sequence: Synthetic oligonucleotide
cacugcuacagcauccaga

SEQ ID NO: 3246111 - RNA, 19 nt, Artificial Sequence
  Description of Artificial Sequence: Synthetic oligonucleotide
caguugucugaagucuucc

SEQ ID NO: 3246112 - RNA, 19 nt, Artificial Sequence
  Description of Artificial Sequence: Synthetic oligonucleotide
agcaucugagugggcaggg

SEQ ID NO: 3246113 - RNA, 19 nt, Artificial Sequence
  Description of Artificial Sequence: Synthetic oligonucleotide
aucugcgaggccuguggug

SEQ ID NO: 3246114 - RNA, 19 nt, Artificial Sequence
  Description of Artificial Sequence: Synthetic oligonucleotide
acagcagccacugcugcca

SEQ ID NO: 3246115 - RNA, 19 nt, Artificial Sequence
  Description of Artificial Sequence: Synthetic oligonucleotide
agcugugacgauggcgacg

SEQ ID NO: 3246116 - RNA, 19 nt, Artificial Sequence
  Description of Artificial Sequence: Synthetic oligonucleotide
cuuccuccugcaacaguug

SEQ ID NO: 3246117 - RNA, 19 nt, Artificial Sequence
  Description of Artificial Sequence: Synthetic oligonucleotide
uaaucaacagcacacagga

SEQ ID NO: 3246118 - RNA, 19 nt, Artificial Sequence
  Description of Artificial Sequence: Synthetic oligonucleotide
auuuguuacuucuucauag

SEQ ID NO: 3246119 - RNA, 19 nt, Artificial Sequence
  Description of Artificial Sequence: Synthetic oligonucleotide
aaacucccaaaccaggcgc

SEQ ID NO: 3246120 - RNA, 19 nt, Artificial Sequence
  Description of Artificial Sequence: Synthetic oligonucleotide
agacauauacuguagcugg

SEQ ID NO: 3246121 - RNA, 19 nt, Artificial Sequence
  Description of Artificial Sequence: Synthetic oligonucleotide
augaaguuggcauugaugu

SEQ ID NO: 3246122 - RNA, 19 nt, Artificial Sequence
  Description of Artificial Sequence: Synthetic oligonucleotide
ugauguaaucuccaugucc

SEQ ID NO: 3246123 - RNA, 19 nt, Artificial Sequence
  Description of Artificial Sequence: Synthetic oligonucleotide
aucaacagcacacaggaca

SEQ ID NO: 3246124 - RNA, 19 nt, Artificial Sequence
  Description of Artificial Sequence: Synthetic oligonucleotide
aauguaaccuggagggucc

SEQ ID NO: 3246125 - RNA, 19 nt, Artificial Sequence
  Description of Artificial Sequence: Synthetic oligonucleotide
uguguugcgauguaggccu

SEQ ID NO: 3246126 - RNA, 19 nt, Artificial Sequence
  Description of Artificial Sequence: Synthetic oligonucleotide
uugauccgcaggaacaugg

SEQ ID NO: 3246127 - RNA, 19 nt, Artificial Sequence
  Description of Artificial Sequence: Synthetic oligonucleotide
guagcuggcgcacacagcg

SEQ ID NO: 3246128 - RNA, 19 nt, Artificial Sequence
  Description of Artificial Sequence: Synthetic oligonucleotide
ugagcgggagaauagcugg

SEQ ID NO: 3246129 - RNA, 19 nt, Artificial Sequence
  Description of Artificial Sequence: Synthetic oligonucleotide
gagaaugugaucaggacug

SEQ ID NO: 3246130 - RNA, 19 nt, Artificial Sequence
  Description of Artificial Sequence: Synthetic oligonucleotide
caggccaagacauauacug

SEQ ID NO: 3246131 - RNA, 19 nt, Artificial Sequence
  Description of Artificial Sequence: Synthetic oligonucleotide
aagacauauacuguagcug

SEQ ID NO: 3246132 - RNA, 19 nt, Artificial Sequence
  Description of Artificial Sequence: Synthetic oligonucleotide
gaaacucccaaaccaggcg

SEQ ID NO: 3246133 - RNA, 19 nt, Artificial Sequence
  Description of Artificial Sequence: Synthetic oligonucleotide
cacguaaucaacagcacac

SEQ ID NO: 3246134 - RNA, 19 nt, Artificial Sequence
  Description of Artificial Sequence: Synthetic oligonucleotide
ucuggaauguaaccuggag

SEQ ID NO: 3246135 - RNA, 19 nt, Artificial Sequence
  Description of Artificial Sequence: Synthetic oligonucleotide
aaaggcccaaucugcagag

SEQ ID NO: 3246136 - RNA, 19 nt, Artificial Sequence
  Description of Artificial Sequence: Synthetic oligonucleotide
ucgaagaggcugaaauugg

SEQ ID NO: 3246137 - RNA, 19 nt, Artificial Sequence
  Description of Artificial Sequence: Synthetic oligonucleotide
augugaucaggacugcugg

SEQ ID NO: 3246138 - RNA, 19 nt, Artificial Sequence
  Description of Artificial Sequence: Synthetic oligonucleotide
uuugucagggugaugcaga

SEQ ID NO: 3246139 - RNA, 19 nt, Artificial Sequence
  Description of Artificial Sequence: Synthetic oligonucleotide
uaagugucggccaugggaa

SEQ ID NO: 3246140 - RNA, 19 nt, Artificial Sequence
  Description of Artificial Sequence: Synthetic oligonucleotide
aucaccuucacccgaaacu

SEQ ID NO: 3246141 - RNA, 19 nt, Artificial Sequence
  Description of Artificial Sequence: Synthetic oligonucleotide
ucacguaaucaacagcaca

SEQ ID NO: 3246142 - RNA, 19 nt, Artificial Sequence
  Description of Artificial Sequence: Synthetic oligonucleotide
aaugcgcaaguugaagccg

SEQ ID NO: 3246143 - RNA, 19 nt, Artificial Sequence
  Description of Artificial Sequence: Synthetic oligonucleotide
uguugguacaggaaccugu

SEQ ID NO: 3246144 - RNA, 19 nt, Artificial Sequence
  Description of Artificial Sequence: Synthetic oligonucleotide
agcccucacacccuugucc

SEQ ID NO: 3246145 - RNA, 19 nt, Artificial Sequence
  Description of Artificial Sequence: Synthetic oligonucleotide
acuggugucuccuuuguca

SEQ ID NO: 3246146 - RNA, 19 nt, Artificial Sequence
  Description of Artificial Sequence: Synthetic oligonucleotide
ucuugacaggccaucagga

SEQ ID NO: 3246147 - RNA, 19 nt, Artificial Sequence
  Description of Artificial Sequence: Synthetic oligonucleotide
ucaacagcacacaggacac

SEQ ID NO: 3246148 - RNA, 19 nt, Artificial Sequence
  Description of Artificial Sequence: Synthetic oligonucleotide
cuggcuguagauuggggcg

SEQ ID NO: 3246149 - RNA, 19 nt, Artificial Sequence
  Description of Artificial Sequence: Synthetic oligonucleotide
uuucacacuucuuccgucc

SEQ ID NO: 3246150 - RNA, 19 nt, Artificial Sequence
  Description of Artificial Sequence: Synthetic oligonucleotide
caaugcgcaaguugaagcc

SEQ ID NO: 3246151 - RNA, 19 nt, Artificial Sequence
  Description of Artificial Sequence: Synthetic oligonucleotide
acugcugggaaccccgugg

SEQ ID NO: 3246152 - RNA, 19 nt, Artificial Sequence
  Description of Artificial Sequence: Synthetic oligonucleotide
ucugucucuugacaggcca

SEQ ID NO: 3246153 - RNA, 19 nt, Artificial Sequence
  Description of Artificial Sequence: Synthetic oligonucleotide
gaucccguggcccuuuggg

SEQ ID NO: 3246154 - RNA, 19 nt, Artificial Sequence
  Description of Artificial Sequence: Synthetic oligonucleotide
aacagaguaugaggcaggg

SEQ ID NO: 3246155 - RNA, 19 nt, Artificial Sequence
  Description of Artificial Sequence: Synthetic oligonucleotide
gagaaccccgccuggaggg

SEQ ID NO: 3246156 - RNA, 19 nt, Artificial Sequence
  Description of Artificial Sequence: Synthetic oligonucleotide
auaggcaucaggcccggag

SEQ ID NO: 3246157 - RNA, 19 nt, Artificial Sequence
  Description of Artificial Sequence: Synthetic oligonucleotide
uugacaggccaucaggauc

SEQ ID NO: 3246158 - RNA, 19 nt, Artificial Sequence
  Description of Artificial Sequence: Synthetic oligonucleotide
uccuuggagacgaugggcu

SEQ ID NO: 3246159 - RNA, 19 nt, Artificial Sequence
  Description of Artificial Sequence: Synthetic oligonucleotide
ucacccgaaacucccaaac

SEQ ID NO: 3246160 - RNA, 19 nt, Artificial Sequence
  Description of Artificial Sequence: Synthetic oligonucleotide
agaaguccaacagaguaug

SEQ ID NO: 3246161 - RNA, 19 nt, Artificial Sequence
  Description of Artificial Sequence: Synthetic oligonucleotide
aacauggccgggugguguc

SEQ ID NO: 3246162 - RNA, 19 nt, Artificial Sequence
  Description of Artificial Sequence: Synthetic oligonucleotide
ugugaucaggacugcuggg

SEQ ID NO: 3246163 - RNA, 19 nt, Artificial Sequence
  Description of Artificial Sequence: Synthetic oligonucleotide
accgagaugcuccugagaa

SEQ ID NO: 3246164 - RNA, 19 nt, Artificial Sequence
  Description of Artificial Sequence: Synthetic oligonucleotide
uuccgcaucucaaggacca

SEQ ID NO: 3246165 - RNA, 19 nt, Artificial Sequence
  Description of Artificial Sequence: Synthetic oligonucleotide
aacagcacacaggacaccu

SEQ ID NO: 3246166 - RNA, 19 nt, Artificial Sequence
  Description of Artificial Sequence: Synthetic oligonucleotide
aacucccaaaccaggcgcc

SEQ ID NO: 3246167 - RNA, 19 nt, Artificial Sequence
  Description of Artificial Sequence: Synthetic oligonucleotide
gaauagcugggccacugug

SEQ ID NO: 3246168 - RNA, 19 nt, Artificial Sequence
  Description of Artificial Sequence: Synthetic oligonucleotide
auauacuguagcuggcgca

SEQ ID NO: 3246169 - RNA, 19 nt, Artificial Sequence
  Description of Artificial Sequence: Synthetic oligonucleotide
uuuccgcaucucaaggacc

SEQ ID NO: 3246170 - RNA, 19 nt, Artificial Sequence
  Description of Artificial Sequence: Synthetic oligonucleotide
acccgaaacucccaaacca

SEQ ID NO: 3246171 - RNA, 19 nt, Artificial Sequence
  Description of Artificial Sequence: Synthetic oligonucleotide
gaaaggcccaaucugcaga

SEQ ID NO: 3246172 - RNA, 19 nt, Artificial Sequence
  Description of Artificial Sequence: Synthetic oligonucleotide
gaggcugaaauuggguggg

SEQ ID NO: 3246173 - RNA, 19 nt, Artificial Sequence
  Description of Artificial Sequence: Synthetic oligonucleotide
uauacuguagcuggcgcac

SEQ ID NO: 3246174 - RNA, 19 nt, Artificial Sequence
  Description of Artificial Sequence: Synthetic oligonucleotide
ucugcgcuccauuuguuac

SEQ ID NO: 3246175 - RNA, 19 nt, Artificial Sequence
  Description of Artificial Sequence: Synthetic oligonucleotide
agaaaggcccaaucugcag

SEQ ID NO: 3246176 - RNA, 19 nt, Artificial Sequence
  Description of Artificial Sequence: Synthetic oligonucleotide
gucaggccaagacauauac

SEQ ID NO: 3246177 - RNA, 19 nt, Artificial Sequence
  Description of Artificial Sequence: Synthetic oligonucleotide
guccaacagaguaugaggc

SEQ ID NO: 3246178 - RNA, 19 nt, Artificial Sequence
  Description of Artificial Sequence: Synthetic oligonucleotide
uucacuggugucuccuuug

SEQ ID NO: 3246179 - RNA, 19 nt, Artificial Sequence
  Description of Artificial Sequence: Synthetic oligonucleotide
ugccucacguaaucaacag

SEQ ID NO: 3246180 - RNA, 19 nt, Artificial Sequence
  Description of Artificial Sequence: Synthetic oligonucleotide
gaugucugcauucacuggu

SEQ ID NO: 3246181 - RNA, 19 nt, Artificial Sequence
  Description of Artificial Sequence: Synthetic oligonucleotide
uccaaugcgcaaguugaag

SEQ ID NO: 3246182 - RNA, 19 nt, Artificial Sequence
  Description of Artificial Sequence: Synthetic oligonucleotide
guuuccgcaucucaaggac

SEQ ID NO: 3246183 - RNA, 19 nt, Artificial Sequence
  Description of Artificial Sequence: Synthetic oligonucleotide
guagauuggggcguccgcg

SEQ ID NO: 3246184 - RNA, 19 nt, Artificial Sequence
  Description of Artificial Sequence: Synthetic oligonucleotide
ugcaguggacacagagggg

SEQ ID NO: 3246185 - RNA, 19 nt, Artificial Sequence
  Description of Artificial Sequence: Synthetic oligonucleotide
gggauguggacagacaggg

SEQ ID NO: 3246186 - RNA, 19 nt, Artificial Sequence
  Description of Artificial Sequence: Synthetic oligonucleotide
ugggccacuguguugguac

SEQ ID NO: 3246187 - RNA, 19 nt, Artificial Sequence
  Description of Artificial Sequence: Synthetic oligonucleotide
caggacaccuguucguccg

SEQ ID NO: 3246188 - RNA, 19 nt, Artificial Sequence
  Description of Artificial Sequence: Synthetic oligonucleotide
aaucaacagcacacaggac

SEQ ID NO: 3246189 - RNA, 19 nt, Artificial Sequence
  Description of Artificial Sequence: Synthetic oligonucleotide
gauccgcaggaacauggcc

SEQ ID NO: 3246190 - RNA, 19 nt, Artificial Sequence
  Description of Artificial Sequence: Synthetic oligonucleotide
cugucugcaccgcagcagg

SEQ ID NO: 3246191 - RNA, 19 nt, Artificial Sequence
  Description of Artificial Sequence: Synthetic oligonucleotide
guuuugauccgcaggaaca

SEQ ID NO: 3246192 - RNA, 19 nt, Artificial Sequence
  Description of Artificial Sequence: Synthetic oligonucleotide
agcuggcgcacacagcggg

SEQ ID NO: 3246193 - RNA, 19 nt, Artificial Sequence
  Description of Artificial Sequence: Synthetic oligonucleotide
agaaugugaucaggacugc

SEQ ID NO: 3246194 - RNA, 19 nt, Artificial Sequence
  Description of Artificial Sequence: Synthetic oligonucleotide
gugagaaugugaucaggac

SEQ ID NO: 3246195 - RNA, 19 nt, Artificial Sequence
  Description of Artificial Sequence: Synthetic oligonucleotide
auggugagaaugugaucag

SEQ ID NO: 3246196 - RNA, 19 nt, Artificial Sequence
  Description of Artificial Sequence: Synthetic oligonucleotide
uugauguaaucuccauguc

SEQ ID NO: 3246197 - RNA, 19 nt, Artificial Sequence
  Description of Artificial Sequence: Synthetic oligonucleotide
gagggcgggauguggacag

SEQ ID NO: 3246198 - RNA, 19 nt, Artificial Sequence
  Description of Artificial Sequence: Synthetic oligonucleotide
aguugaagccgagggcacc

SEQ ID NO: 3246199 - RNA, 19 nt, Artificial Sequence
  Description of Artificial Sequence: Synthetic oligonucleotide
ucugugccccggaugaagu

SEQ ID NO: 3246200 - RNA, 19 nt, Artificial Sequence
  Description of Artificial Sequence: Synthetic oligonucleotide
cuccauuuguuacuucuuc

SEQ ID NO: 3246201 - RNA, 19 nt, Artificial Sequence
  Description of Artificial Sequence: Synthetic oligonucleotide
aagugucggccaugggaag

SEQ ID NO: 3246202 - RNA, 19 nt, Artificial Sequence
  Description of Artificial Sequence: Synthetic oligonucleotide
uagauuggggcguccgcgc

SEQ ID NO: 3246203 - RNA, 19 nt, Artificial Sequence
  Description of Artificial Sequence: Synthetic oligonucleotide
ccaaugcgcaaguugaagc

SEQ ID NO: 3246204 - RNA, 19 nt, Artificial Sequence
  Description of Artificial Sequence: Synthetic oligonucleotide
cugagcgggagaauagcug

SEQ ID NO: 3246205 - RNA, 19 nt, Artificial Sequence
  Description of Artificial Sequence: Synthetic oligonucleotide
aaauugggugggauugucu

SEQ ID NO: 3246206 - RNA, 19 nt, Artificial Sequence
  Description of Artificial Sequence: Synthetic oligonucleotide
ucaggccaagacauauacu

SEQ ID NO: 3246207 - RNA, 19 nt, Artificial Sequence
  Description of Artificial Sequence: Synthetic oligonucleotide
ugaggcagggguccuugug

SEQ ID NO: 3246208 - RNA, 19 nt, Artificial Sequence
  Description of Artificial Sequence: Synthetic oligonucleotide
acgcuucugcaccacggcg

SEQ ID NO: 3246209 - RNA, 19 nt, Artificial Sequence
  Description of Artificial Sequence: Synthetic oligonucleotide
cacacccuuguccacuccg

SEQ ID NO: 3246210 - RNA, 19 nt, Artificial Sequence
  Description of Artificial Sequence: Synthetic oligonucleotide
cucggugugugccaccggc

SEQ ID NO: 3246211 - RNA, 19 nt, Artificial Sequence
  Description of Artificial Sequence: Synthetic oligonucleotide
uguagcuggcgcacacagc

SEQ ID NO: 3246212 - RNA, 19 nt, Artificial Sequence
  Description of Artificial Sequence: Synthetic oligonucleotide
cucacguaaucaacagcac

SEQ ID NO: 3246213 - RNA, 19 nt, Artificial Sequence
  Description of Artificial Sequence: Synthetic oligonucleotide
ccucacguaaucaacagca

SEQ ID NO: 3246214 - RNA, 19 nt, Artificial Sequence
  Description of Artificial Sequence: Synthetic oligonucleotide
auuggggcguccgcgcugc

SEQ ID NO: 3246215 - RNA, 19 nt, Artificial Sequence
  Description of Artificial Sequence: Synthetic oligonucleotide
ugugccccggaugaaguug

SEQ ID NO: 3246216 - RNA, 19 nt, Artificial Sequence
  Description of Artificial Sequence: Synthetic oligonucleotide
uccgcagccggcacugcag

SEQ ID NO: 3246217 - RNA, 19 nt, Artificial Sequence
  Description of Artificial Sequence: Synthetic oligonucleotide
ugaauggugacaaagauug

SEQ ID NO: 3246218 - RNA, 19 nt, Artificial Sequence
  Description of Artificial Sequence: Synthetic oligonucleotide
aagccagcgauucucaacc

SEQ ID NO: 3246219 - RNA, 19 nt, Artificial Sequence
  Description of Artificial Sequence: Synthetic oligonucleotide
uauugugugcgguagaggg

SEQ ID NO: 3246220 - RNA, 19 nt, Artificial Sequence
  Description of Artificial Sequence: Synthetic oligonucleotide
aaagauugcggugaugagc

SEQ ID NO: 3246221 - RNA, 19 nt, Artificial Sequence
  Description of Artificial Sequence: Synthetic oligonucleotide
aauggugacaaagauugcg

SEQ ID NO: 3246222 - RNA, 19 nt, Artificial Sequence
  Description of Artificial Sequence: Synthetic oligonucleotide
aaagcggauguggagaugg

SEQ ID NO: 3246223 - RNA, 19 nt, Artificial Sequence
  Description of Artificial Sequence: Synthetic oligonucleotide
ucuguugacguccuuuuag

SEQ ID NO: 3246224 - RNA, 19 nt, Artificial Sequence
  Description of Artificial Sequence: Synthetic oligonucleotide
ucgaugaacacgcgcaugg

SEQ ID NO: 3246225 - RNA, 19 nt, Artificial Sequence
  Description of Artificial Sequence: Synthetic oligonucleotide
gagcagauagccuaucagg

SEQ ID NO: 3246226 - RNA, 19 nt, Artificial Sequence
  Description of Artificial Sequence: Synthetic oligonucleotide
ugcggugaugagcagauag

SEQ ID NO: 3246227 - RNA, 19 nt, Artificial Sequence
  Description of Artificial Sequence: Synthetic oligonucleotide
agauguuacucccaaccgg

SEQ ID NO: 3246228 - RNA, 19 nt, Artificial Sequence
  Description of Artificial Sequence: Synthetic oligonucleotide
cacucaacuggguaaagcg

SEQ ID NO: 3246229 - RNA, 19 nt, Artificial Sequence
  Description of Artificial Sequence: Synthetic oligonucleotide
uccuuuuagguauugugug

SEQ ID NO: 3246230 - RNA, 19 nt, Artificial Sequence
  Description of Artificial Sequence: Synthetic oligonucleotide
gagauguuacucccaaccg

SEQ ID NO: 3246231 - RNA, 19 nt, Artificial Sequence
  Description of Artificial Sequence: Synthetic oligonucleotide
gacaugaauggugacaaag

SEQ ID NO: 3246232 - RNA, 19 nt, Artificial Sequence
  Description of Artificial Sequence: Synthetic oligonucleotide
agcacugcgagucucgggg

SEQ ID NO: 3246233 - RNA, 19 nt, Artificial Sequence
  Description of Artificial Sequence: Synthetic oligonucleotide
ugagcagauagccuaucag

SEQ ID NO: 3246234 - RNA, 19 nt, Artificial Sequence
  Description of Artificial Sequence: Synthetic oligonucleotide
aguaauagaugccccgguc

SEQ ID NO: 3246235 - RNA, 19 nt, Artificial Sequence
  Description of Artificial Sequence: Synthetic oligonucleotide
aacuggguaaagcggaugu

SEQ ID NO: 3246236 - RNA, 19 nt, Artificial Sequence
  Description of Artificial Sequence: Synthetic oligonucleotide
aagauugcggugaugagca

SEQ ID NO: 3246237 - RNA, 19 nt, Artificial Sequence
  Description of Artificial Sequence: Synthetic oligonucleotide
acaaagauugcggugauga

SEQ ID NO: 3246238 - RNA, 19 nt, Artificial Sequence
  Description of Artificial Sequence: Synthetic oligonucleotide
cuuuuagguauugugugcg

SEQ ID NO: 3246239 - RNA, 19 nt, Artificial Sequence
  Description of Artificial Sequence: Synthetic oligonucleotide
guuacucccaaccggaagc

SEQ ID NO: 3246240 - RNA, 19 nt, Artificial Sequence
  Description of Artificial Sequence: Synthetic oligonucleotide
agcaguaauagaugccccg

SEQ ID NO: 3246241 - RNA, 19 nt, Artificial Sequence
  Description of Artificial Sequence: Synthetic oligonucleotide
aucagggugagcuccacag

SEQ ID NO: 3246242 - RNA, 19 nt, Artificial Sequence
  Description of Artificial Sequence: Synthetic oligonucleotide
gagaugguugccguggucg

SEQ ID NO: 3246243 - RNA, 19 nt, Artificial Sequence
  Description of Artificial Sequence: Synthetic oligonucleotide
auucucaacccuugccgcc

SEQ ID NO: 3246244 - RNA, 19 nt, Artificial Sequence
  Description of Artificial Sequence: Synthetic oligonucleotide
uugacguccuuuuagguau

SEQ ID NO: 3246245 - RNA, 19 nt, Artificial Sequence
  Description of Artificial Sequence: Synthetic oligonucleotide
uuuuagguauugugugcgg

SEQ ID NO: 3246246 - RNA, 19 nt, Artificial Sequence
  Description of Artificial Sequence: Synthetic oligonucleotide
uggucgaugaacacgcgca

SEQ ID NO: 3246247 - RNA, 19 nt, Artificial Sequence
  Description of Artificial Sequence: Synthetic oligonucleotide
uagccuaucagggugagcu

SEQ ID NO: 3246248 - RNA, 19 nt, Artificial Sequence
  Description of Artificial Sequence: Synthetic oligonucleotide
gauucucaacccuugccgc

SEQ ID NO: 3246249 - RNA, 19 nt, Artificial Sequence
  Description of Artificial Sequence: Synthetic oligonucleotide
uguuacucccaaccggaag

SEQ ID NO: 3246250 - RNA, 19 nt, Artificial Sequence
  Description of Artificial Sequence: Synthetic oligonucleotide
agcagauagccuaucaggg

SEQ ID NO: 3246251 - RNA, 19 nt, Artificial Sequence
  Description of Artificial Sequence: Synthetic oligonucleotide
uaauagaugccccggucac

SEQ ID NO: 3246252 - RNA, 19 nt, Artificial Sequence
  Description of Artificial Sequence: Synthetic oligonucleotide
ugagagugaggcuggguag

SEQ ID NO: 3246253 - RNA, 19 nt, Artificial Sequence
  Description of Artificial Sequence: Synthetic oligonucleotide
gauguggagaugguugccg

SEQ ID NO: 3246254 - RNA, 19 nt, Artificial Sequence
  Description of Artificial Sequence: Synthetic oligonucleotide
ugaacacgcgcauggaucu

SEQ ID NO: 3246255 - RNA, 19 nt, Artificial Sequence
  Description of Artificial Sequence: Synthetic oligonucleotide
cuguugacguccuuuuagg

SEQ ID NO: 3246256 - RNA, 19 nt, Artificial Sequence
  Description of Artificial Sequence: Synthetic oligonucleotide
agugaggcuggguagcguc

SEQ ID NO: 3246257 - RNA, 19 nt, Artificial Sequence
  Description of Artificial Sequence: Synthetic oligonucleotide
gagucucggggucugagag

SEQ ID NO: 3246258 - RNA, 19 nt, Artificial Sequence
  Description of Artificial Sequence: Synthetic oligonucleotide
agcuccacagcacugcgag

SEQ ID NO: 3246259 - RNA, 19 nt, Artificial Sequence
  Description of Artificial Sequence: Synthetic oligonucleotide
cagauagccuaucagggug

SEQ ID NO: 3246260 - RNA, 19 nt, Artificial Sequence
  Description of Artificial Sequence: Synthetic oligonucleotide
cauggaucuguugacgucc

SEQ ID NO: 3246261 - RNA, 19 nt, Artificial Sequence
  Description of Artificial Sequence: Synthetic oligonucleotide
agcgauucucaacccuugc

SEQ ID NO: 3246262 - RNA, 19 nt, Artificial Sequence
  Description of Artificial Sequence: Synthetic oligonucleotide
auggugacaaagauugcgg

SEQ ID NO: 3246263 - RNA, 19 nt, Artificial Sequence
  Description of Artificial Sequence: Synthetic oligonucleotide
cuggguaaagcggaugugg

SEQ ID NO: 3246264 - RNA, 19 nt, Artificial Sequence
  Description of Artificial Sequence: Synthetic oligonucleotide
ugagcuccacagcacugcg

SEQ ID NO: 3246265 - RNA, 19 nt, Artificial Sequence
  Description of Artificial Sequence: Synthetic oligonucleotide
augaacacgcgcauggauc

SEQ ID NO: 3246266 - RNA, 19 nt, Artificial Sequence
  Description of Artificial Sequence: Synthetic oligonucleotide
uccucgagauguuacuccc

SEQ ID NO: 3246267 - RNA, 19 nt, Artificial Sequence
  Description of Artificial Sequence: Synthetic oligonucleotide
auagaugccccggucacuc

SEQ ID NO: 3246268 - RNA, 19 nt, Artificial Sequence
  Description of Artificial Sequence: Synthetic oligonucleotide
guaauagaugccccgguca

SEQ ID NO: 3246269 - RNA, 19 nt, Artificial Sequence
  Description of Artificial Sequence: Synthetic oligonucleotide
gauguuacucccaaccgga

SEQ ID NO: 3246270 - RNA, 19 nt, Artificial Sequence
  Description of Artificial Sequence: Synthetic oligonucleotide
aaccggaagccagcgauuc

SEQ ID NO: 3246271 - RNA, 19 nt, Artificial Sequence
  Description of Artificial Sequence: Synthetic oligonucleotide
uugugugcgguagaggggc

SEQ ID NO: 3246272 - RNA, 19 nt, Artificial Sequence
  Description of Artificial Sequence: Synthetic oligonucleotide
uggguaaagcggaugugga

SEQ ID NO: 3246273 - RNA, 19 nt, Artificial Sequence
  Description of Artificial Sequence: Synthetic oligonucleotide
uagguauugugugcgguag

SEQ ID NO: 3246274 - RNA, 19 nt, Artificial Sequence
  Description of Artificial Sequence: Synthetic oligonucleotide
aacccuugccgccagcagu

SEQ ID NO: 3246275 - RNA, 19 nt, Artificial Sequence
  Description of Artificial Sequence: Synthetic oligonucleotide
gaagccagcgauucucaac

SEQ ID NO: 3246276 - RNA, 19 nt, Artificial Sequence
  Description of Artificial Sequence: Synthetic oligonucleotide
uguugacguccuuuuaggu

SEQ ID NO: 3246277 - RNA, 19 nt, Artificial Sequence
  Description of Artificial Sequence: Synthetic oligonucleotide
acucaacuggguaaagcgg

SEQ ID NO: 3246278 - RNA, 19 nt, Artificial Sequence
  Description of Artificial Sequence: Synthetic oligonucleotide
uuuagguauugugugcggu

SEQ ID NO: 3246279 - RNA, 19 nt, Artificial Sequence
  Description of Artificial Sequence: Synthetic oligonucleotide
agcaccgacagacaugaau

SEQ ID NO: 3246280 - RNA, 19 nt, Artificial Sequence
  Description of Artificial Sequence: Synthetic oligonucleotide
acagcaccgacagacauga

SEQ ID NO: 3246281 - RNA, 19 nt, Artificial Sequence
  Description of Artificial Sequence: Synthetic oligonucleotide
gugacaaagauugcgguga

SEQ ID NO: 3246282 - RNA, 19 nt, Artificial Sequence
  Description of Artificial Sequence: Synthetic oligonucleotide
uugccguggucgaugaaca

SEQ ID NO: 3246283 - RNA, 19 nt, Artificial Sequence
  Description of Artificial Sequence: Synthetic oligonucleotide
uggugacaaagauugcggu

SEQ ID NO: 3246284 - RNA, 19 nt, Artificial Sequence
  Description of Artificial Sequence: Synthetic oligonucleotide
acagacaugaauggugaca

SEQ ID NO: 3246285 - RNA, 19 nt, Artificial Sequence
  Description of Artificial Sequence: Synthetic oligonucleotide
uuagguauugugugcggua

SEQ ID NO: 3246286 - RNA, 19 nt, Artificial Sequence
  Description of Artificial Sequence: Synthetic oligonucleotide
gugaugagcagauagccua

SEQ ID NO: 3246287 - RNA, 19 nt, Artificial Sequence
  Description of Artificial Sequence: Synthetic oligonucleotide
cucaacuggguaaagcgga

SEQ ID NO: 3246288 - RNA, 19 nt, Artificial Sequence
  Description of Artificial Sequence: Synthetic oligonucleotide
caccgacagacaugaaugg

SEQ ID NO: 3246289 - RNA, 19 nt, Artificial Sequence
  Description of Artificial Sequence: Synthetic oligonucleotide
ucacucaacuggguaaagc

SEQ ID NO: 3246290 - RNA, 19 nt, Artificial Sequence
  Description of Artificial Sequence: Synthetic oligonucleotide
acgcgcauggaucuguuga

SEQ ID NO: 3246291 - RNA, 19 nt, Artificial Sequence
  Description of Artificial Sequence: Synthetic oligonucleotide
acaugaauggugacaaaga

SEQ ID NO: 3246292 - RNA, 19 nt, Artificial Sequence
  Description of Artificial Sequence: Synthetic oligonucleotide
caaagauugcggugaugag

SEQ ID NO: 3246293 - RNA, 19 nt, Artificial Sequence
  Description of Artificial Sequence: Synthetic oligonucleotide
guggagaugguugccgugg

SEQ ID NO: 3246294 - RNA, 19 nt, Artificial Sequence
  Description of Artificial Sequence: Synthetic oligonucleotide
ggugacaaagauugcggug

SEQ ID NO: 3246295 - RNA, 19 nt, Artificial Sequence
  Description of Artificial Sequence: Synthetic oligonucleotide
augagcagauagccuauca

SEQ ID NO: 3246296 - RNA, 19 nt, Artificial Sequence
  Description of Artificial Sequence: Synthetic oligonucleotide
ucagggugagcuccacagc

SEQ ID NO: 3246297 - RNA, 19 nt, Artificial Sequence
  Description of Artificial Sequence: Synthetic oligonucleotide
guccucgagauguuacucc

SEQ ID NO: 3246298 - RNA, 19 nt, Artificial Sequence
  Description of Artificial Sequence: Synthetic oligonucleotide
ugugcgguagaggggcugg

SEQ ID NO: 3246299 - RNA, 19 nt, Artificial Sequence
  Description of Artificial Sequence: Synthetic oligonucleotide
ugaugagcagauagccuau

SEQ ID NO: 3246300 - RNA, 19 nt, Artificial Sequence
  Description of Artificial Sequence: Synthetic oligonucleotide
aacagcaccgacagacaug

SEQ ID NO: 3246301 - RNA, 19 nt, Artificial Sequence
  Description of Artificial Sequence: Synthetic oligonucleotide
uggguagcguccucgagau

SEQ ID NO: 3246302 - RNA, 19 nt, Artificial Sequence
  Description of Artificial Sequence: Synthetic oligonucleotide
uguggagaugguugccgug

SEQ ID NO: 3246303 - RNA, 19 nt, Artificial Sequence
  Description of Artificial Sequence: Synthetic oligonucleotide
cgagauguuacucccaacc

SEQ ID NO: 3246304 - RNA, 19 nt, Artificial Sequence
  Description of Artificial Sequence: Synthetic oligonucleotide
auugugugcgguagagggg

SEQ ID NO: 3246305 - RNA, 19 nt, Artificial Sequence
  Description of Artificial Sequence: Synthetic oligonucleotide
aauagaugccccggucacu

SEQ ID NO: 3246306 - RNA, 19 nt, Artificial Sequence
  Description of Artificial Sequence: Synthetic oligonucleotide
cagcaguaauagaugcccc

SEQ ID NO: 3246307 - RNA, 19 nt, Artificial Sequence
  Description of Artificial Sequence: Synthetic oligonucleotide
guugacguccuuuuaggua

SEQ ID NO: 3246308 - RNA, 19 nt, Artificial Sequence
  Description of Artificial Sequence: Synthetic oligonucleotide
guugccguggucgaugaac

SEQ ID NO: 3246309 - RNA, 19 nt, Artificial Sequence
  Description of Artificial Sequence: Synthetic oligonucleotide
cacagcacugcgagucucg

SEQ ID NO: 3246310 - RNA, 19 nt, Artificial Sequence
  Description of Artificial Sequence: Synthetic oligonucleotide
guauugugugcgguagagg

SEQ ID NO: 3246311 - RNA, 19 nt, Artificial Sequence
  Description of Artificial Sequence: Synthetic oligonucleotide
agccagcgauucucaaccc

SEQ ID NO: 3246312 - RNA, 19 nt, Artificial Sequence
  Description of Artificial Sequence: Synthetic oligonucleotide
ucaacuggguaaagcggau

SEQ ID NO: 3246313 - RNA, 19 nt, Artificial Sequence
  Description of Artificial Sequence: Synthetic oligonucleotide
uuacucccaaccggaagcc

SEQ ID NO: 3246314 - RNA, 19 nt, Artificial Sequence
  Description of Artificial Sequence: Synthetic oligonucleotide
ccagcaguaauagaugccc

SEQ ID NO: 3246315 - RNA, 19 nt, Artificial Sequence
  Description of Artificial Sequence: Synthetic oligonucleotide
ccuuuuagguauugugugc

SEQ ID NO: 3246316 - RNA, 19 nt, Artificial Sequence
  Description of Artificial Sequence: Synthetic oligonucleotide
guggucgaugaacacgcgc

SEQ ID NO: 3246317 - RNA, 19 nt, Artificial Sequence
  Description of Artificial Sequence: Synthetic oligonucleotide
acaucauucauuuuaaugc

SEQ ID NO: 3246318 - RNA, 19 nt, Artificial Sequence
  Description of Artificial Sequence: Synthetic oligonucleotide
ugaauaauuuuaaagaacc

SEQ ID NO: 3246319 - RNA, 19 nt, Artificial Sequence
  Description of Artificial Sequence: Synthetic oligonucleotide
aaagaaaauagccacugcg

SEQ ID NO: 3246320 - RNA, 19 nt, Artificial Sequence
  Description of Artificial Sequence: Synthetic oligonucleotide
aagacgaauaguuauguac

SEQ ID NO: 3246321 - RNA, 19 nt, Artificial Sequence
  Description of Artificial Sequence: Synthetic oligonucleotide
gacuauacaauauauauug

SEQ ID NO: 3246322 - RNA, 19 nt, Artificial Sequence
  Description of Artificial Sequence: Synthetic oligonucleotide
agacaaauaaaccacaauc

SEQ ID NO: 3246323 - RNA, 19 nt, Artificial Sequence
  Description of Artificial Sequence: Synthetic oligonucleotide
aaauuugacucaugggucc

SEQ ID NO: 3246324 - RNA, 19 nt, Artificial Sequence
  Description of Artificial Sequence: Synthetic oligonucleotide
aaugagaaaacauauuaga

SEQ ID NO: 3246325 - RNA, 19 nt, Artificial Sequence
  Description of Artificial Sequence: Synthetic oligonucleotide
aauaguuauguacuaugac

SEQ ID NO: 3246326 - RNA, 19 nt, Artificial Sequence
  Description of Artificial Sequence: Synthetic oligonucleotide
uucuaaaacagccuuauug

SEQ ID NO: 3246327 - RNA, 19 nt, Artificial Sequence
  Description of Artificial Sequence: Synthetic oligonucleotide
uauuaaauuguuucaaaag

SEQ ID NO: 3246328 - RNA, 19 nt, Artificial Sequence
  Description of Artificial Sequence: Synthetic oligonucleotide
ugaaauuuuguacacaagu

SEQ ID NO: 3246329 - RNA, 19 nt, Artificial Sequence
  Description of Artificial Sequence: Synthetic oligonucleotide
uauaagucgaacuucacca

SEQ ID NO: 3246330 - RNA, 19 nt, Artificial Sequence
  Description of Artificial Sequence: Synthetic oligonucleotide
aaguuuagagucuaaaagu

SEQ ID NO: 3246331 - RNA, 19 nt, Artificial Sequence
  Description of Artificial Sequence: Synthetic oligonucleotide
uuagacaaucuuauuauag

SEQ ID NO: 3246332 - RNA, 19 nt, Artificial Sequence
  Description of Artificial Sequence: Synthetic oligonucleotide
uuuugaaugaugcauccag

SEQ ID NO: 3246333 - RNA, 19 nt, Artificial Sequence
  Description of Artificial Sequence: Synthetic oligonucleotide
uuuauguucugucacagca

SEQ ID NO: 3246334 - RNA, 19 nt, Artificial Sequence
  Description of Artificial Sequence: Synthetic oligonucleotide
aaucuuauuauagauaagu

SEQ ID NO: 3246335 - RNA, 19 nt, Artificial Sequence
  Description of Artificial Sequence: Synthetic oligonucleotide
uauuccauguuuuagauau

SEQ ID NO: 3246336 - RNA, 19 nt, Artificial Sequence
  Description of Artificial Sequence: Synthetic oligonucleotide
cuuauuuuaguuucuuugg

SEQ ID NO: 3246337 - RNA, 19 nt, Artificial Sequence
  Description of Artificial Sequence: Synthetic oligonucleotide
augaauuauauccaagauc

SEQ ID NO: 3246338 - RNA, 19 nt, Artificial Sequence
  Description of Artificial Sequence: Synthetic oligonucleotide
uguacuaugacaucuggca

SEQ ID NO: 3246339 - RNA, 19 nt, Artificial Sequence
  Description of Artificial Sequence: Synthetic oligonucleotide
uccuuuaugaaugacaacc

SEQ ID NO: 3246340 - RNA, 19 nt, Artificial Sequence
  Description of Artificial Sequence: Synthetic oligonucleotide
auuuuaaugcuuuucacca

SEQ ID NO: 3246341 - RNA, 19 nt, Artificial Sequence
  Description of Artificial Sequence: Synthetic oligonucleotide
ugagugaguaugaagaggc

SEQ ID NO: 3246342 - RNA, 19 nt, Artificial Sequence
  Description of Artificial Sequence: Synthetic oligonucleotide
uuuauuuccacaauuuaaa

SEQ ID NO: 3246343 - RNA, 19 nt, Artificial Sequence
  Description of Artificial Sequence: Synthetic oligonucleotide
  modified_base (5)..(5): a, c, u, g, unknown or other
ucuanaaccuuuuaaaaua

SEQ ID NO: 3246344 - RNA, 19 nt, Artificial Sequence
  Description of Artificial Sequence: Synthetic oligonucleotide
aaaacaagaaugcuuccug

SEQ ID NO: 3246345 - RNA, 19 nt, Artificial Sequence
  Description of Artificial Sequence: Synthetic oligonucleotide
aacggcuuguauuaaauug

SEQ ID NO: 3246346 - RNA, 19 nt, Artificial Sequence
  Description of Artificial Sequence: Synthetic oligonucleotide
aguguugaaaacuucccac

SEQ ID NO: 3246347 - RNA, 19 nt, Artificial Sequence
  Description of Artificial Sequence: Synthetic oligonucleotide
ugaauauuuaaaauaguau

SEQ ID NO: 3246348 - RNA, 19 nt, Artificial Sequence
  Description of Artificial Sequence: Synthetic oligonucleotide
uauagcuguacuguaaugg

SEQ ID NO: 3246349 - RNA, 19 nt, Artificial Sequence
  Description of Artificial Sequence: Synthetic oligonucleotide
ugaacuaaaauccguggcc

SEQ ID NO: 3246350 - RNA, 19 nt, Artificial Sequence
  Description of Artificial Sequence: Synthetic oligonucleotide
ucauucauugcuaagucca

SEQ ID NO: 3246351 - RNA, 19 nt, Artificial Sequence
  Description of Artificial Sequence: Synthetic oligonucleotide
  modified_base (14)..(14): a, c, u, g, unknown or other
uaaguaugaucuanaaccu

SEQ ID NO: 3246352 - RNA, 19 nt, Artificial Sequence
  Description of Artificial Sequence: Synthetic oligonucleotide
aguaugaagaggcugaacu

SEQ ID NO: 3246353 - RNA, 19 nt, Artificial Sequence
  Description of Artificial Sequence: Synthetic oligonucleotide
uaugagaaauugcucaaag

SEQ ID NO: 3246354 - RNA, 19 nt, Artificial Sequence
  Description of Artificial Sequence: Synthetic oligonucleotide
aaacaagaaugcuuccugg

SEQ ID NO: 3246355 - RNA, 19 nt, Artificial Sequence
  Description of Artificial Sequence: Synthetic oligonucleotide
uacauuuuagacuccauga

SEQ ID NO: 3246356 - RNA, 19 nt, Artificial Sequence
  Description of Artificial Sequence: Synthetic oligonucleotide
cauacacaaaauaacauuc

SEQ ID NO: 3246357 - RNA, 19 nt, Artificial Sequence
  Description of Artificial Sequence: Synthetic oligonucleotide
gagaaaacauauuagacaa

SEQ ID NO: 3246358 - RNA, 19 nt, Artificial Sequence
  Description of Artificial Sequence: Synthetic oligonucleotide
uguaauacccguaagugau

SEQ ID NO: 3246359 - RNA, 19 nt, Artificial Sequence
  Description of Artificial Sequence: Synthetic oligonucleotide
uuauucaguguauucauca

SEQ ID NO: 3246360 - RNA, 19 nt, Artificial Sequence
  Description of Artificial Sequence: Synthetic oligonucleotide
ugaaaagacaugaauaauu

SEQ ID NO: 3246361 - RNA, 19 nt, Artificial Sequence
  Description of Artificial Sequence: Synthetic oligonucleotide
aaugaauuauauccaagau

SEQ ID NO: 3246362 - RNA, 19 nt, Artificial Sequence
  Description of Artificial Sequence: Synthetic oligonucleotide
aaaauacauuuuaaaaguc

SEQ ID NO: 3246363 - RNA, 19 nt, Artificial Sequence
  Description of Artificial Sequence: Synthetic oligonucleotide
aguaguguugaaaacuucc

SEQ ID NO: 3246364 - RNA, 19 nt, Artificial Sequence
  Description of Artificial Sequence: Synthetic oligonucleotide
uuugaaggcagcuuguucu

SEQ ID NO: 3246365 - RNA, 19 nt, Artificial Sequence
  Description of Artificial Sequence: Synthetic oligonucleotide
uaugggaaauucuuucugg

SEQ ID NO: 3246366 - RNA, 19 nt, Artificial Sequence
  Description of Artificial Sequence: Synthetic oligonucleotide
aguguuacuuuguacacag

SEQ ID NO: 3246367 - RNA, 19 nt, Artificial Sequence
  Description of Artificial Sequence: Synthetic oligonucleotide
uauucagagacagaaaaca

SEQ ID NO: 3246368 - RNA, 19 nt, Artificial Sequence
  Description of Artificial Sequence: Synthetic oligonucleotide
uuuaucgcugacaaaagaa

SEQ ID NO: 3246369 - RNA, 19 nt, Artificial Sequence
  Description of Artificial Sequence: Synthetic oligonucleotide
uugaucuuagaaauaauau

SEQ ID NO: 3246370 - RNA, 19 nt, Artificial Sequence
  Description of Artificial Sequence: Synthetic oligonucleotide
uccaggucaagcaucaugc

SEQ ID NO: 3246371 - RNA, 19 nt, Artificial Sequence
  Description of Artificial Sequence: Synthetic oligonucleotide
uaauauuucucuauauaaa

SEQ ID NO: 3246372 - RNA, 19 nt, Artificial Sequence
  Description of Artificial Sequence: Synthetic oligonucleotide
aguagauguacccucuuuc

SEQ ID NO: 3246373 - RNA, 19 nt, Artificial Sequence
  Description of Artificial Sequence: Synthetic oligonucleotide
auagaagaauaccucuucg

SEQ ID NO: 3246374 - RNA, 19 nt, Artificial Sequence
  Description of Artificial Sequence: Synthetic oligonucleotide
auauuagacaaucuuauua

SEQ ID NO: 3246375 - RNA, 19 nt, Artificial Sequence
  Description of Artificial Sequence: Synthetic oligonucleotide
aauaguauguacauacaca

SEQ ID NO: 3246376 - RNA, 19 nt, Artificial Sequence
  Description of Artificial Sequence: Synthetic oligonucleotide
gaucuuagaaauaauauaa

SEQ ID NO: 3246377 - RNA, 19 nt, Artificial Sequence
  Description of Artificial Sequence: Synthetic oligonucleotide
ucugugauaaguguggaug

SEQ ID NO: 3246378 - RNA, 19 nt, Artificial Sequence
  Description of Artificial Sequence: Synthetic oligonucleotide
acacuaaugcuucugucac

SEQ ID NO: 3246379 - RNA, 19 nt, Artificial Sequence
  Description of Artificial Sequence: Synthetic oligonucleotide
acugaaaagacaugaauaa

SEQ ID NO: 3246380 - RNA, 19 nt, Artificial Sequence
  Description of Artificial Sequence: Synthetic oligonucleotide
aacauaaacagaacuaaga

SEQ ID NO: 3246381 - RNA, 19 nt, Artificial Sequence
  Description of Artificial Sequence: Synthetic oligonucleotide
ucauaaagaucaaaguauc

SEQ ID NO: 3246382 - RNA, 19 nt, Artificial Sequence
  Description of Artificial Sequence: Synthetic oligonucleotide
uauguauaguucuacauuu

SEQ ID NO: 3246383 - RNA, 19 nt, Artificial Sequence
  Description of Artificial Sequence: Synthetic oligonucleotide
cuucaaagcucuuuuaaac

SEQ ID NO: 3246384 - RNA, 19 nt, Artificial Sequence
  Description of Artificial Sequence: Synthetic oligonucleotide
aagguaagguucuccaaag

SEQ ID NO: 3246385 - RNA, 19 nt, Artificial Sequence
  Description of Artificial Sequence: Synthetic oligonucleotide
gauuaaaagcaggagaaac

SEQ ID NO: 3246386 - RNA, 19 nt, Artificial Sequence
  Description of Artificial Sequence: Synthetic oligonucleotide
uaucguguagugauaacug

SEQ ID NO: 3246387 - RNA, 19 nt, Artificial Sequence
  Description of Artificial Sequence: Synthetic oligonucleotide
augggaaauucuuucuggc

SEQ ID NO: 3246388 - RNA, 19 nt, Artificial Sequence
  Description of Artificial Sequence: Synthetic oligonucleotide
aacauaauaagagucuuaa

SEQ ID NO: 3246389 - RNA, 19 nt, Artificial Sequence
  Description of Artificial Sequence: Synthetic oligonucleotide
aagugauugcauugggguc

SEQ ID NO: 3246390 - RNA, 19 nt, Artificial Sequence
  Description of Artificial Sequence: Synthetic oligonucleotide
cuauuggccacaauuuucc

SEQ ID NO: 3246391 - RNA, 19 nt, Artificial Sequence
  Description of Artificial Sequence: Synthetic oligonucleotide
ugaacaugggagaagggcu

SEQ ID NO: 3246392 - RNA, 19 nt, Artificial Sequence
  Description of Artificial Sequence: Synthetic oligonucleotide
gacaaaagaacacuccuca

SEQ ID NO: 3246393 - RNA, 19 nt, Artificial Sequence
  Description of Artificial Sequence: Synthetic oligonucleotide
ugauccuuauuuuaguuuc

SEQ ID NO: 3246394 - RNA, 19 nt, Artificial Sequence
  Description of Artificial Sequence: Synthetic oligonucleotide
aguuauguguacucuugac

SEQ ID NO: 3246395 - RNA, 19 nt, Artificial Sequence
  Description of Artificial Sequence: Synthetic oligonucleotide
aacugugugacuccuaaaa

SEQ ID NO: 3246396 - RNA, 19 nt, Artificial Sequence
  Description of Artificial Sequence: Synthetic oligonucleotide
agacuugcaucuuuaucgc

SEQ ID NO: 3246397 - RNA, 19 nt, Artificial Sequence
  Description of Artificial Sequence: Synthetic oligonucleotide
uagacaaucuuauuauaga

SEQ ID NO: 3246398 - RNA, 19 nt, Artificial Sequence
  Description of Artificial Sequence: Synthetic oligonucleotide
cacuagugagcacagaggg

SEQ ID NO: 3246399 - RNA, 19 nt, Artificial Sequence
  Description of Artificial Sequence: Synthetic oligonucleotide
uuaucgcugacaaaagaac

SEQ ID NO: 3246400 - RNA, 19 nt, Artificial Sequence
  Description of Artificial Sequence: Synthetic oligonucleotide
acauuuuagacuccaugag

SEQ ID NO: 3246401 - RNA, 19 nt, Artificial Sequence
  Description of Artificial Sequence: Synthetic oligonucleotide
ucaauccauuuacaaaugc

SEQ ID NO: 3246402 - RNA, 19 nt, Artificial Sequence
  Description of Artificial Sequence: Synthetic oligonucleotide
agggccaagauucugaagu

SEQ ID NO: 3246403 - RNA, 19 nt, Artificial Sequence
  Description of Artificial Sequence: Synthetic oligonucleotide
aucaaaguaucuugaauca

SEQ ID NO: 3246404 - RNA, 19 nt, Artificial Sequence
  Description of Artificial Sequence: Synthetic oligonucleotide
uucaaagcucuuuuaaacu

SEQ ID NO: 3246405 - RNA, 19 nt, Artificial Sequence
  Description of Artificial Sequence: Synthetic oligonucleotide
cauuuuagacuccaugagc

SEQ ID NO: 3246406 - RNA, 19 nt, Artificial Sequence
  Description of Artificial Sequence: Synthetic oligonucleotide
augaaugacaaccuuugca

SEQ ID NO: 3246407 - RNA, 19 nt, Artificial Sequence
  Description of Artificial Sequence: Synthetic oligonucleotide
cuauaagucgaacuucacc

SEQ ID NO: 3246408 - RNA, 19 nt, Artificial Sequence
  Description of Artificial Sequence: Synthetic oligonucleotide
cucuuuccuaacaucaucc

SEQ ID NO: 3246409 - RNA, 19 nt, Artificial Sequence
  Description of Artificial Sequence: Synthetic oligonucleotide
uaucgcugacaaaagaaca

SEQ ID NO: 3246410 - RNA, 19 nt, Artificial Sequence
  Description of Artificial Sequence: Synthetic oligonucleotide
gaugcauccaguucuauaa

SEQ ID NO: 3246411 - RNA, 19 nt, Artificial Sequence
  Description of Artificial Sequence: Synthetic oligonucleotide
uauugucugauuauguaua

SEQ ID NO: 3246412 - RNA, 19 nt, Artificial Sequence
  Description of Artificial Sequence: Synthetic oligonucleotide
uguauuaaauuguuucaaa

SEQ ID NO: 3246413 - RNA, 19 nt, Artificial Sequence
  Description of Artificial Sequence: Synthetic oligonucleotide
auacauacuauuaacagaa

SEQ ID NO: 3246414 - RNA, 19 nt, Artificial Sequence
  Description of Artificial Sequence: Synthetic oligonucleotide
uuauugucugauuauguau

SEQ ID NO: 3246415 - RNA, 19 nt, Artificial Sequence
  Description of Artificial Sequence: Synthetic oligonucleotide
aguucuauaagucgaacuu

SEQ ID NO: 3246416 - RNA, 19 nt, Artificial Sequence
  Description of Artificial Sequence: Synthetic oligonucleotide
ugagagaucucucugugau

SEQ ID NO: 3246417 - RNA, 19 nt, Artificial Sequence
  Description of Artificial Sequence: Synthetic oligonucleotide
ugagcuaggauucugauag

SEQ ID NO: 3246418 - RNA, 19 nt, Artificial Sequence
  Description of Artificial Sequence: Synthetic oligonucleotide
caaaccaugaaauacaagc

SEQ ID NO: 3246419 - RNA, 19 nt, Artificial Sequence
  Description of Artificial Sequence: Synthetic oligonucleotide
aauacaagccucuugucgg

SEQ ID NO: 3246420 - RNA, 19 nt, Artificial Sequence
  Description of Artificial Sequence: Synthetic oligonucleotide
aauauuggaaacccucacc

SEQ ID NO: 3246421 - RNA, 19 nt, Artificial Sequence
  Description of Artificial Sequence: Synthetic oligonucleotide
agaaguggaagguacaugc

SEQ ID NO: 3246422 - RNA, 19 nt, Artificial Sequence
  Description of Artificial Sequence: Synthetic oligonucleotide
aaauacaagccucuugucg

SEQ ID NO: 3246423 - RNA, 19 nt, Artificial Sequence
  Description of Artificial Sequence: Synthetic oligonucleotide
aagccauauaucuuggccc

SEQ ID NO: 3246424 - RNA, 19 nt, Artificial Sequence
  Description of Artificial Sequence: Synthetic oligonucleotide
aagauguuguuggagaugc

SEQ ID NO: 3246425 - RNA, 19 nt, Artificial Sequence
  Description of Artificial Sequence: Synthetic oligonucleotide
uuuuacacuuaucacacag

SEQ ID NO: 3246426 - RNA, 19 nt, Artificial Sequence
  Description of Artificial Sequence: Synthetic oligonucleotide
uauaguaagaauucgggcu

SEQ ID NO: 3246427 - RNA, 19 nt, Artificial Sequence
  Description of Artificial Sequence: Synthetic oligonucleotide
auuaaaacguaacuggaag

SEQ ID NO: 3246428 - RNA, 19 nt, Artificial Sequence
  Description of Artificial Sequence: Synthetic oligonucleotide
uucucuucuuauuaaaacg

SEQ ID NO: 3246429 - RNA, 19 nt, Artificial Sequence
  Description of Artificial Sequence: Synthetic oligonucleotide
aaacggaagaaguggaagg

SEQ ID NO: 3246430 - RNA, 19 nt, Artificial Sequence
  Description of Artificial Sequence: Synthetic oligonucleotide
aaucucacuuccuuuagag

SEQ ID NO: 3246431 - RNA, 19 nt, Artificial Sequence
  Description of Artificial Sequence: Synthetic oligonucleotide
aaauuugacagcauguuca

SEQ ID NO: 3246432 - RNA, 19 nt, Artificial Sequence
  Description of Artificial Sequence: Synthetic oligonucleotide
aagaauucgggcuggccac

SEQ ID NO: 3246433 - RNA, 19 nt, Artificial Sequence
  Description of Artificial Sequence: Synthetic oligonucleotide
aagaagaggaaacggaaga

SEQ ID NO: 3246434 - RNA, 19 nt, Artificial Sequence
  Description of Artificial Sequence: Synthetic oligonucleotide
uucaaggaauuacugaggc

SEQ ID NO: 3246435 - RNA, 19 nt, Artificial Sequence
  Description of Artificial Sequence: Synthetic oligonucleotide
aagguacaugcauacugcc

SEQ ID NO: 3246436 - RNA, 19 nt, Artificial Sequence
  Description of Artificial Sequence: Synthetic oligonucleotide
cauucauuauugaaguggg

SEQ ID NO: 3246437 - RNA, 19 nt, Artificial Sequence
  Description of Artificial Sequence: Synthetic oligonucleotide
guaacuggaaguuuucuag

SEQ ID NO: 3246438 - RNA, 19 nt, Artificial Sequence
  Description of Artificial Sequence: Synthetic oligonucleotide
uugugaaagagcaaggaaa

SEQ ID NO: 3246439 - RNA, 19 nt, Artificial Sequence
  Description of Artificial Sequence: Synthetic oligonucleotide
uuuacacuuaucacacagg

SEQ ID NO: 3246440 - RNA, 19 nt, Artificial Sequence
  Description of Artificial Sequence: Synthetic oligonucleotide
uaauuuuccgaggaggagg

SEQ ID NO: 3246441 - RNA, 19 nt, Artificial Sequence
  Description of Artificial Sequence: Synthetic oligonucleotide
aaccaugaaauacaagccu

SEQ ID NO: 3246442 - RNA, 19 nt, Artificial Sequence
  Description of Artificial Sequence: Synthetic oligonucleotide
gaaguuuucuagaaagggg

SEQ ID NO: 3246443 - RNA, 19 nt, Artificial Sequence
  Description of Artificial Sequence: Synthetic oligonucleotide
uuaaacgcacucgaggugg

SEQ ID NO: 3246444 - RNA, 19 nt, Artificial Sequence
  Description of Artificial Sequence: Synthetic oligonucleotide
gagaaaauuugacagcaug

SEQ ID NO: 3246445 - RNA, 19 nt, Artificial Sequence
  Description of Artificial Sequence: Synthetic oligonucleotide
aauuuuccgaggaggaggc

SEQ ID NO: 3246446 - RNA, 19 nt, Artificial Sequence
  Description of Artificial Sequence: Synthetic oligonucleotide
uaagaauucgggcuggcca

SEQ ID NO: 3246447 - RNA, 19 nt, Artificial Sequence
  Description of Artificial Sequence: Synthetic oligonucleotide
uuuugcgugauccauguuc

SEQ ID NO: 3246448 - RNA, 19 nt, Artificial Sequence
  Description of Artificial Sequence: Synthetic oligonucleotide
cuuccuuugaagaagagga

SEQ ID NO: 3246449 - RNA, 19 nt, Artificial Sequence
  Description of Artificial Sequence: Synthetic oligonucleotide
auauuggaaacccucacca

SEQ ID NO: 3246450 - RNA, 19 nt, Artificial Sequence
  Description of Artificial Sequence: Synthetic oligonucleotide
uuucuugguacuuaacuga

SEQ ID NO: 3246451 - RNA, 19 nt, Artificial Sequence
  Description of Artificial Sequence: Synthetic oligonucleotide
uacacuaucauuucuccgu

SEQ ID NO: 3246452 - RNA, 19 nt, Artificial Sequence
  Description of Artificial Sequence: Synthetic oligonucleotide
gaugcaaaccaugaaauac

SEQ ID NO: 3246453 - RNA, 19 nt, Artificial Sequence
  Description of Artificial Sequence: Synthetic oligonucleotide
cuucauaccuagaagaguc

SEQ ID NO: 3246454 - RNA, 19 nt, Artificial Sequence
  Description of Artificial Sequence: Synthetic oligonucleotide
auugauugguuauaugugu

SEQ ID NO: 3246455 - RNA, 19 nt, Artificial Sequence
  Description of Artificial Sequence: Synthetic oligonucleotide
augguuuuagauuucaaaa

SEQ ID NO: 3246456 - RNA, 19 nt, Artificial Sequence
  Description of Artificial Sequence: Synthetic oligonucleotide
uaucuuggcccaaacaaug

SEQ ID NO: 3246457 - RNA, 19 nt, Artificial Sequence
  Description of Artificial Sequence: Synthetic oligonucleotide
ugguuuuagauuucaaaac

SEQ ID NO: 3246458 - RNA, 19 nt, Artificial Sequence
  Description of Artificial Sequence: Synthetic oligonucleotide
ugauccauguucuugcucu

SEQ ID NO: 3246459 - RNA, 19 nt, Artificial Sequence
  Description of Artificial Sequence: Synthetic oligonucleotide
agaguugugaaagagcaag

SEQ ID NO: 3246460 - RNA, 19 nt, Artificial Sequence
  Description of Artificial Sequence: Synthetic oligonucleotide
auuuucaaggaauuacuga

SEQ ID NO: 3246461 - RNA, 19 nt, Artificial Sequence
  Description of Artificial Sequence: Synthetic oligonucleotide
aguuauaguaagaauucgg

SEQ ID NO: 3246462 - RNA, 19 nt, Artificial Sequence
  Description of Artificial Sequence: Synthetic oligonucleotide
uauuaaaacguaacuggaa

SEQ ID NO: 3246463 - RNA, 19 nt, Artificial Sequence
  Description of Artificial Sequence: Synthetic oligonucleotide
uacaguagcuacacuauca

SEQ ID NO: 3246464 - RNA, 19 nt, Artificial Sequence
  Description of Artificial Sequence: Synthetic oligonucleotide
auagcgacgugugaaaugg

SEQ ID NO: 3246465 - RNA, 19 nt, Artificial Sequence
  Description of Artificial Sequence: Synthetic oligonucleotide
ucacguuucaaacuguguc

SEQ ID NO: 3246466 - RNA, 19 nt, Artificial Sequence
  Description of Artificial Sequence: Synthetic oligonucleotide
uuaaaacguaacuggaagu

SEQ ID NO: 3246467 - RNA, 19 nt, Artificial Sequence
  Description of Artificial Sequence: Synthetic oligonucleotide
ugggaagccauauaucuug

SEQ ID NO: 3246468 - RNA, 19 nt, Artificial Sequence
  Description of Artificial Sequence: Synthetic oligonucleotide
ucagggaagagucauuuuc

SEQ ID NO: 3246469 - RNA, 19 nt, Artificial Sequence
  Description of Artificial Sequence: Synthetic oligonucleotide
uccccuacacauauggucc

SEQ ID NO: 3246470 - RNA, 19 nt, Artificial Sequence
  Description of Artificial Sequence: Synthetic oligonucleotide
cuaauuuccuucuuuucug

SEQ ID NO: 3246471 - RNA, 19 nt, Artificial Sequence
  Description of Artificial Sequence: Synthetic oligonucleotide
uuuuggaaaagauuuucau

SEQ ID NO: 3246472 - RNA, 19 nt, Artificial Sequence
  Description of Artificial Sequence: Synthetic oligonucleotide
uuggaaacccucaccacag

SEQ ID NO: 3246473 - RNA, 19 nt, Artificial Sequence
  Description of Artificial Sequence: Synthetic oligonucleotide
ucauuauugaaguggguuc

SEQ ID NO: 3246474 - RNA, 19 nt, Artificial Sequence
  Description of Artificial Sequence: Synthetic oligonucleotide
uucuugguacuuaacugag

SEQ ID NO: 3246475 - RNA, 19 nt, Artificial Sequence
  Description of Artificial Sequence: Synthetic oligonucleotide
auguucacguuucaaacug

SEQ ID NO: 3246476 - RNA, 19 nt, Artificial Sequence
  Description of Artificial Sequence: Synthetic oligonucleotide
aaagcccgcacuucagggg

SEQ ID NO: 3246477 - RNA, 19 nt, Artificial Sequence
  Description of Artificial Sequence: Synthetic oligonucleotide
aauuuucaauacuucccga

SEQ ID NO: 3246478 - RNA, 19 nt, Artificial Sequence
  Description of Artificial Sequence: Synthetic oligonucleotide
ugauugguuauaugugucc

SEQ ID NO: 3246479 - RNA, 19 nt, Artificial Sequence
  Description of Artificial Sequence: Synthetic oligonucleotide
aaucgcauucauuauugaa

SEQ ID NO: 3246480 - RNA, 19 nt, Artificial Sequence
  Description of Artificial Sequence: Synthetic oligonucleotide
ugugauacauuuagagacu

SEQ ID NO: 3246481 - RNA, 19 nt, Artificial Sequence
  Description of Artificial Sequence: Synthetic oligonucleotide
ugaaagagcaaggaaagau

SEQ ID NO: 3246482 - RNA, 19 nt, Artificial Sequence
  Description of Artificial Sequence: Synthetic oligonucleotide
uuuaaacgcacucgaggug

SEQ ID NO: 3246483 - RNA, 19 nt, Artificial Sequence
  Description of Artificial Sequence: Synthetic oligonucleotide
uuuuaagcuucuuagucua

SEQ ID NO: 3246484 - RNA, 19 nt, Artificial Sequence
  Description of Artificial Sequence: Synthetic oligonucleotide
uuggagaugcaaaccauga

SEQ ID NO: 3246485 - RNA, 19 nt, Artificial Sequence
  Description of Artificial Sequence: Synthetic oligonucleotide
cuuggcccaaacaaugucc

SEQ ID NO: 3246486 - RNA, 19 nt, Artificial Sequence
  Description of Artificial Sequence: Synthetic oligonucleotide
agcaauauuggaaacccuc

SEQ ID NO: 3246487 - RNA, 19 nt, Artificial Sequence
  Description of Artificial Sequence: Synthetic oligonucleotide
gagucauuuucuucguucc

SEQ ID NO: 3246488 - RNA, 19 nt, Artificial Sequence
  Description of Artificial Sequence: Synthetic oligonucleotide
guuccuguaccuuuguggc

SEQ ID NO: 3246489 - RNA, 19 nt, Artificial Sequence
  Description of Artificial Sequence: Synthetic oligonucleotide
gaaaagauuuucauuuuca

SEQ ID NO: 3246490 - RNA, 19 nt, Artificial Sequence
  Description of Artificial Sequence: Synthetic oligonucleotide
cauuuucaaggaauuacug

SEQ ID NO: 3246491 - RNA, 19 nt, Artificial Sequence
  Description of Artificial Sequence: Synthetic oligonucleotide
ggaaaugauuccuaacuag

SEQ ID NO: 3246492 - RNA, 19 nt, Artificial Sequence
  Description of Artificial Sequence: Synthetic oligonucleotide
aaaccugcugagcgggugg

SEQ ID NO: 3246493 - RNA, 19 nt, Artificial Sequence
  Description of Artificial Sequence: Synthetic oligonucleotide
cuuuugacguguuugccug

SEQ ID NO: 3246494 - RNA, 19 nt, Artificial Sequence
  Description of Artificial Sequence: Synthetic oligonucleotide
ugagguauugauugguuau

SEQ ID NO: 3246495 - RNA, 19 nt, Artificial Sequence
  Description of Artificial Sequence: Synthetic oligonucleotide
gaagaagaggaaacggaag

SEQ ID NO: 3246496 - RNA, 19 nt, Artificial Sequence
  Description of Artificial Sequence: Synthetic oligonucleotide
uggcuauauaaguauaaaa

SEQ ID NO: 3246497 - RNA, 19 nt, Artificial Sequence
  Description of Artificial Sequence: Synthetic oligonucleotide
gauugguuauauguguccc

SEQ ID NO: 3246498 - RNA, 19 nt, Artificial Sequence
  Description of Artificial Sequence: Synthetic oligonucleotide
uacuuaacugagcuuuuga

SEQ ID NO: 3246499 - RNA, 19 nt, Artificial Sequence
  Description of Artificial Sequence: Synthetic oligonucleotide
aaguggaagguacaugcau

SEQ ID NO: 3246500 - RNA, 19 nt, Artificial Sequence
  Description of Artificial Sequence: Synthetic oligonucleotide
aacuggaaguuuucuagaa

SEQ ID NO: 3246501 - RNA, 19 nt, Artificial Sequence
  Description of Artificial Sequence: Synthetic oligonucleotide
uccgaauuuucuccagucc

SEQ ID NO: 3246502 - RNA, 19 nt, Artificial Sequence
  Description of Artificial Sequence: Synthetic oligonucleotide
ugccugagcagaaacuuug

SEQ ID NO: 3246503 - RNA, 19 nt, Artificial Sequence
  Description of Artificial Sequence: Synthetic oligonucleotide
acacauaugguccugccau

SEQ ID NO: 3246504 - RNA, 19 nt, Artificial Sequence
  Description of Artificial Sequence: Synthetic oligonucleotide
aaaucucacuuccuuuaga

SEQ ID NO: 3246505 - RNA, 19 nt, Artificial Sequence
  Description of Artificial Sequence: Synthetic oligonucleotide
uucauuauugaaguggguu

SEQ ID NO: 3246506 - RNA, 19 nt, Artificial Sequence
  Description of Artificial Sequence: Synthetic oligonucleotide
cuuaauuuuccgaggagga

SEQ ID NO: 3246507 - RNA, 19 nt, Artificial Sequence
  Description of Artificial Sequence: Synthetic oligonucleotide
uuaauuuuccgaggaggag

SEQ ID NO: 3246508 - RNA, 19 nt, Artificial Sequence
  Description of Artificial Sequence: Synthetic oligonucleotide
aguagcuacacuaucauuu

SEQ ID NO: 3246509 - RNA, 19 nt, Artificial Sequence
  Description of Artificial Sequence: Synthetic oligonucleotide
ggaagguacaugcauacug

SEQ ID NO: 3246510 - RNA, 19 nt, Artificial Sequence
  Description of Artificial Sequence: Synthetic oligonucleotide
agaaaauuugacagcaugu

SEQ ID NO: 3246511 - RNA, 19 nt, Artificial Sequence
  Description of Artificial Sequence: Synthetic oligonucleotide
ucccuaucaacuuuauggu

SEQ ID NO: 3246512 - RNA, 19 nt, Artificial Sequence
  Description of Artificial Sequence: Synthetic oligonucleotide
uugucgggcuuaaaggacc

SEQ ID NO: 3246513 - RNA, 19 nt, Artificial Sequence
  Description of Artificial Sequence: Synthetic oligonucleotide
uggaaaugauuccuaacua

SEQ ID NO: 3246514 - RNA, 19 nt, Artificial Sequence
  Description of Artificial Sequence: Synthetic oligonucleotide
ucuuuucugcaacaacacu

SEQ ID NO: 3246515 - RNA, 19 nt, Artificial Sequence
  Description of Artificial Sequence: Synthetic oligonucleotide
uugauugguuauauguguc

SEQ ID NO: 3246516 - RNA, 19 nt, Artificial Sequence
  Description of Artificial Sequence: Synthetic oligonucleotide
auacagacccuuucucuuc

SEQ ID NO: 3246517 - RNA, 19 nt, Artificial Sequence
  Description of Artificial Sequence: Synthetic oligonucleotide
uaauauaauagcaucagcc

SEQ ID NO: 3246518 - RNA, 19 nt, Artificial Sequence
  Description of Artificial Sequence: Synthetic oligonucleotide
aacccuucagaguaguucc

SEQ ID NO: 3246519 - RNA, 19 nt, Artificial Sequence
  Description of Artificial Sequence: Synthetic oligonucleotide
uuuuagaugauuccugucc

SEQ ID NO: 3246520 - RNA, 19 nt, Artificial Sequence
  Description of Artificial Sequence: Synthetic oligonucleotide
uuagcauaagucaacacug

SEQ ID NO: 3246521 - RNA, 19 nt, Artificial Sequence
  Description of Artificial Sequence: Synthetic oligonucleotide
ugagcugccaacaaacugg

SEQ ID NO: 3246522 - RNA, 19 nt, Artificial Sequence
  Description of Artificial Sequence: Synthetic oligonucleotide
acuguauucauguccaugg

SEQ ID NO: 3246523 - RNA, 19 nt, Artificial Sequence
  Description of Artificial Sequence: Synthetic oligonucleotide
acugagaacaaccuugagg

SEQ ID NO: 3246524 - RNA, 19 nt, Artificial Sequence
  Description of Artificial Sequence: Synthetic oligonucleotide
aauguuagcugacagugca

SEQ ID NO: 3246525 - RNA, 19 nt, Artificial Sequence
  Description of Artificial Sequence: Synthetic oligonucleotide
gaaaugaugucaaagcucc

SEQ ID NO: 3246526 - RNA, 19 nt, Artificial Sequence
  Description of Artificial Sequence: Synthetic oligonucleotide
uguaauccaggaaagacac

SEQ ID NO: 3246527 - RNA, 19 nt, Artificial Sequence
  Description of Artificial Sequence: Synthetic oligonucleotide
gauaauauugcugugucug

SEQ ID NO: 3246528 - RNA, 19 nt, Artificial Sequence
  Description of Artificial Sequence: Synthetic oligonucleotide
  modified_base (10)..(10): a, c, u, g, unknown or other
gaggcuaucnccuucacuc

SEQ ID NO: 3246529 - RNA, 19 nt, Artificial Sequence
  Description of Artificial Sequence: Synthetic oligonucleotide
aauauugcugugucugaac

SEQ ID NO: 3246530 - RNA, 19 nt, Artificial Sequence
  Description of Artificial Sequence: Synthetic oligonucleotide
uaggguaagcguuagaggc

SEQ ID NO: 3246531 - RNA, 19 nt, Artificial Sequence
  Description of Artificial Sequence: Synthetic oligonucleotide
aaacguggucuuuagaaug

SEQ ID NO: 3246532 - RNA, 19 nt, Artificial Sequence
  Description of Artificial Sequence: Synthetic oligonucleotide
aagcguuagaggcaggagg

SEQ ID NO: 3246533 - RNA, 19 nt, Artificial Sequence
  Description of Artificial Sequence: Synthetic oligonucleotide
uuuggauuaacauugccau

SEQ ID NO: 3246534 - RNA, 19 nt, Artificial Sequence
  Description of Artificial Sequence: Synthetic oligonucleotide
ucgguuaucauguaagaca

SEQ ID NO: 3246535 - RNA, 19 nt, Artificial Sequence
  Description of Artificial Sequence: Synthetic oligonucleotide
auguccaggagauggaggc

SEQ ID NO: 3246536 - RNA, 19 nt, Artificial Sequence
  Description of Artificial Sequence: Synthetic oligonucleotide
uagcuuuuguccaacaggc

SEQ ID NO: 3246537 - RNA, 19 nt, Artificial Sequence
  Description of Artificial Sequence: Synthetic oligonucleotide
cugagaacaaccuugagga

SEQ ID NO: 3246538 - RNA, 19 nt, Artificial Sequence
  Description of Artificial Sequence: Synthetic oligonucleotide
  modified_base (4)..(4): a, c, u, g, unknown or other
aucnccuucacucuccaag

SEQ ID NO: 3246539 - RNA, 19 nt, Artificial Sequence
  Description of Artificial Sequence: Synthetic oligonucleotide
aguggcaggggauauguac

SEQ ID NO: 3246540 - RNA, 19 nt, Artificial Sequence
  Description of Artificial Sequence: Synthetic oligonucleotide
ugucuguucccuaaguuug

SEQ ID NO: 3246541 - RNA, 19 nt, Artificial Sequence
  Description of Artificial Sequence: Synthetic oligonucleotide
gauaagauccucaaacgug

SEQ ID NO: 3246542 - RNA, 19 nt, Artificial Sequence
  Description of Artificial Sequence: Synthetic oligonucleotide
uguguuugagccaaaaguu

SEQ ID NO: 3246543 - RNA, 19 nt, Artificial Sequence
  Description of Artificial Sequence: Synthetic oligonucleotide
uccaauaggagcucccggg

SEQ ID NO: 3246544 - RNA, 19 nt, Artificial Sequence
  Description of Artificial Sequence: Synthetic oligonucleotide
gacgguuaacccuucagag

SEQ ID NO: 3246545 - RNA, 19 nt, Artificial Sequence
  Description of Artificial Sequence: Synthetic oligonucleotide
acaauauuuggcugguuag

SEQ ID NO: 3246546 - RNA, 19 nt, Artificial Sequence
  Description of Artificial Sequence: Synthetic oligonucleotide
agggcuuuuagaugauucc

SEQ ID NO: 3246547 - RNA, 19 nt, Artificial Sequence
  Description of Artificial Sequence: Synthetic oligonucleotide
cauucgguuaucauguaag

SEQ ID NO: 3246548 - RNA, 19 nt, Artificial Sequence
  Description of Artificial Sequence: Synthetic oligonucleotide
ucaaucagauccugaagag

SEQ ID NO: 3246549 - RNA, 19 nt, Artificial Sequence
  Description of Artificial Sequence: Synthetic oligonucleotide
auaagauccucaaacgugg

SEQ ID NO: 3246550 - RNA, 19 nt, Artificial Sequence
  Description of Artificial Sequence: Synthetic oligonucleotide
ugcagaaaugaugucaaag

SEQ ID NO: 3246551 - RNA, 19 nt, Artificial Sequence
  Description of Artificial Sequence: Synthetic oligonucleotide
uugaccaagagguugcugu

SEQ ID NO: 3246552 - RNA, 19 nt, Artificial Sequence
  Description of Artificial Sequence: Synthetic oligonucleotide
gauugcuaccaucuuguag

SEQ ID NO: 3246553 - RNA, 19 nt, Artificial Sequence
  Description of Artificial Sequence: Synthetic oligonucleotide
agaaaugaugucaaagcuc

SEQ ID NO: 3246554 - RNA, 19 nt, Artificial Sequence
  Description of Artificial Sequence: Synthetic oligonucleotide
cuaauauaauagcaucagc

SEQ ID NO: 3246555 - RNA, 19 nt, Artificial Sequence
  Description of Artificial Sequence: Synthetic oligonucleotide
aauagguuucuugguaauc

SEQ ID NO: 3246556 - RNA, 19 nt, Artificial Sequence
  Description of Artificial Sequence: Synthetic oligonucleotide
auggaaacgugcuaaugag

SEQ ID NO: 3246557 - RNA, 19 nt, Artificial Sequence
  Description of Artificial Sequence: Synthetic oligonucleotide
gacgauguggguguggacg

SEQ ID NO: 3246558 - RNA, 19 nt, Artificial Sequence
  Description of Artificial Sequence: Synthetic oligonucleotide
uauguccaggagauggagg

SEQ ID NO: 3246559 - RNA, 19 nt, Artificial Sequence
  Description of Artificial Sequence: Synthetic oligonucleotide
gguguuuggauuaacauug

SEQ ID NO: 3246560 - RNA, 19 nt, Artificial Sequence
  Description of Artificial Sequence: Synthetic oligonucleotide
aacagaggcacgcuugugu

SEQ ID NO: 3246561 - RNA, 19 nt, Artificial Sequence
  Description of Artificial Sequence: Synthetic oligonucleotide
gauguaaugggaacaggag

SEQ ID NO: 3246562 - RNA, 19 nt, Artificial Sequence
  Description of Artificial Sequence: Synthetic oligonucleotide
gagaacaaccuugaggacc

SEQ ID NO: 3246563 - RNA, 19 nt, Artificial Sequence
  Description of Artificial Sequence: Synthetic oligonucleotide
aagggcuuuuagaugauuc

SEQ ID NO: 3246564 - RNA, 19 nt, Artificial Sequence
  Description of Artificial Sequence: Synthetic oligonucleotide
uggggaaagugucuguucc

SEQ ID NO: 3246565 - RNA, 19 nt, Artificial Sequence
  Description of Artificial Sequence: Synthetic oligonucleotide
uuccaguucuucaucacca

SEQ ID NO: 3246566 - RNA, 19 nt, Artificial Sequence
  Description of Artificial Sequence: Synthetic oligonucleotide
uguuccgaaggaauacugc

SEQ ID NO: 3246567 - RNA, 19 nt, Artificial Sequence
  Description of Artificial Sequence: Synthetic oligonucleotide
ggcuguagaauucaucugg

SEQ ID NO: 3246568 - RNA, 19 nt, Artificial Sequence
  Description of Artificial Sequence: Synthetic oligonucleotide
augacaacuuucucaauca

SEQ ID NO: 3246569 - RNA, 19 nt, Artificial Sequence
  Description of Artificial Sequence: Synthetic oligonucleotide
aauaggagcucccggggcu

SEQ ID NO: 3246570 - RNA, 19 nt, Artificial Sequence
  Description of Artificial Sequence: Synthetic oligonucleotide
aagucaacacugcagcuaa

SEQ ID NO: 3246571 - RNA, 19 nt, Artificial Sequence
  Description of Artificial Sequence: Synthetic oligonucleotide
ggaaacgugcuaaugaggg

SEQ ID NO: 3246572 - RNA, 19 nt, Artificial Sequence
  Description of Artificial Sequence: Synthetic oligonucleotide
uguccaacaggcaaccagu

SEQ ID NO: 3246573 - RNA, 19 nt, Artificial Sequence
  Description of Artificial Sequence: Synthetic oligonucleotide
auaauagcaucagccauuc

SEQ ID NO: 3246574 - RNA, 19 nt, Artificial Sequence
  Description of Artificial Sequence: Synthetic oligonucleotide
augucaaagcuccugggug

SEQ ID NO: 3246575 - RNA, 19 nt, Artificial Sequence
  Description of Artificial Sequence: Synthetic oligonucleotide
agaaagaugguggcaugcc

SEQ ID NO: 3246576 - RNA, 19 nt, Artificial Sequence
  Description of Artificial Sequence: Synthetic oligonucleotide
agcugcacaauauuuggcu

SEQ ID NO: 3246577 - RNA, 19 nt, Artificial Sequence
  Description of Artificial Sequence: Synthetic oligonucleotide
uucaucaccacagcgguga

SEQ ID NO: 3246578 - RNA, 19 nt, Artificial Sequence
  Description of Artificial Sequence: Synthetic oligonucleotide
uggaaggacgcuccagagg

SEQ ID NO: 3246579 - RNA, 19 nt, Artificial Sequence
  Description of Artificial Sequence: Synthetic oligonucleotide
uuccaauaggagcucccgg

SEQ ID NO: 3246580 - RNA, 19 nt, Artificial Sequence
  Description of Artificial Sequence: Synthetic oligonucleotide
ggucuuuagaaugaggugc

SEQ ID NO: 3246581 - RNA, 19 nt, Artificial Sequence
  Description of Artificial Sequence: Synthetic oligonucleotide
aaugcuguguaggccauug

SEQ ID NO: 3246582 - RNA, 19 nt, Artificial Sequence
  Description of Artificial Sequence: Synthetic oligonucleotide
aaagaugguggcaugccug

SEQ ID NO: 3246583 - RNA, 19 nt, Artificial Sequence
  Description of Artificial Sequence: Synthetic oligonucleotide
uucucagacgcccagcuua

SEQ ID NO: 3246584 - RNA, 19 nt, Artificial Sequence
  Description of Artificial Sequence: Synthetic oligonucleotide
aguaggaaguggcagggga

SEQ ID NO: 3246585 - RNA, 19 nt, Artificial Sequence
  Description of Artificial Sequence: Synthetic oligonucleotide
uguugucaggcagaaacgc

SEQ ID NO: 3246586 - RNA, 19 nt, Artificial Sequence
  Description of Artificial Sequence: Synthetic oligonucleotide
aggugaggaggcuugcugg

SEQ ID NO: 3246587 - RNA, 19 nt, Artificial Sequence
  Description of Artificial Sequence: Synthetic oligonucleotide
uguuagcugacagugcagc

SEQ ID NO: 3246588 - RNA, 19 nt, Artificial Sequence
  Description of Artificial Sequence: Synthetic oligonucleotide
gcuauggcuaauauaauag

SEQ ID NO: 3246589 - RNA, 19 nt, Artificial Sequence
  Description of Artificial Sequence: Synthetic oligonucleotide
uagcauaagucaacacugc

SEQ ID NO: 3246590 - RNA, 19 nt, Artificial Sequence
  Description of Artificial Sequence: Synthetic oligonucleotide
ugcuauggcuaauauaaua

SEQ ID NO: 3246591 - RNA, 19 nt, Artificial Sequence
  Description of Artificial Sequence: Synthetic oligonucleotide
acagaggcacgcuuguguc

SEQ ID NO: 3246592 - RNA, 19 nt, Artificial Sequence
  Description of Artificial Sequence: Synthetic oligonucleotide
auagguuucuugguaaucu

SEQ ID NO: 3246593 - RNA, 19 nt, Artificial Sequence
  Description of Artificial Sequence: Synthetic oligonucleotide
auccugaagagacaaggga

SEQ ID NO: 3246594 - RNA, 19 nt, Artificial Sequence
  Description of Artificial Sequence: Synthetic oligonucleotide
uuacuggccugacugagaa

SEQ ID NO: 3246595 - RNA, 19 nt, Artificial Sequence
  Description of Artificial Sequence: Synthetic oligonucleotide
gacgcaggcagcucacugg

SEQ ID NO: 3246596 - RNA, 19 nt, Artificial Sequence
  Description of Artificial Sequence: Synthetic oligonucleotide
uguucucagacgcccagcu

SEQ ID NO: 3246597 - RNA, 19 nt, Artificial Sequence
  Description of Artificial Sequence: Synthetic oligonucleotide
auaauauugcugugucuga

SEQ ID NO: 3246598 - RNA, 19 nt, Artificial Sequence
  Description of Artificial Sequence: Synthetic oligonucleotide
uauuuggcugguuaguguu

SEQ ID NO: 3246599 - RNA, 19 nt, Artificial Sequence
  Description of Artificial Sequence: Synthetic oligonucleotide
augaaugcggacgucucac

SEQ ID NO: 3246600 - RNA, 19 nt, Artificial Sequence
  Description of Artificial Sequence: Synthetic oligonucleotide
uggacgguuaacccuucag

SEQ ID NO: 3246601 - RNA, 19 nt, Artificial Sequence
  Description of Artificial Sequence: Synthetic oligonucleotide
aaguggcaauguuagcuga

SEQ ID NO: 3246602 - RNA, 19 nt, Artificial Sequence
  Description of Artificial Sequence: Synthetic oligonucleotide
ggagaaguggcaauguuag

SEQ ID NO: 3246603 - RNA, 19 nt, Artificial Sequence
  Description of Artificial Sequence: Synthetic oligonucleotide
gcuaauauaauagcaucag

SEQ ID NO: 3246604 - RNA, 19 nt, Artificial Sequence
  Description of Artificial Sequence: Synthetic oligonucleotide
aagcagcagaguuggaggu

SEQ ID NO: 3246605 - RNA, 19 nt, Artificial Sequence
  Description of Artificial Sequence: Synthetic oligonucleotide
acuauuugcagaaaaucau

SEQ ID NO: 3246606 - RNA, 19 nt, Artificial Sequence
  Description of Artificial Sequence: Synthetic oligonucleotide
auauuuggcugguuagugu

SEQ ID NO: 3246607 - RNA, 19 nt, Artificial Sequence
  Description of Artificial Sequence: Synthetic oligonucleotide
auucccugcacaaauauaa

SEQ ID NO: 3246608 - RNA, 19 nt, Artificial Sequence
  Description of Artificial Sequence: Synthetic oligonucleotide
uaaggugguagcugguugu

SEQ ID NO: 3246609 - RNA, 19 nt, Artificial Sequence
  Description of Artificial Sequence: Synthetic oligonucleotide
uuggugauguaaugggaac

SEQ ID NO: 3246610 - RNA, 19 nt, Artificial Sequence
  Description of Artificial Sequence: Synthetic oligonucleotide
acgauguggguguggacgg

SEQ ID NO: 3246611 - RNA, 19 nt, Artificial Sequence
  Description of Artificial Sequence: Synthetic oligonucleotide
cucgcaaugcuguguaggc

SEQ ID NO: 3246612 - RNA, 19 nt, Artificial Sequence
  Description of Artificial Sequence: Synthetic oligonucleotide
agcauaagucaacacugca

SEQ ID NO: 3246613 - RNA, 19 nt, Artificial Sequence
  Description of Artificial Sequence: Synthetic oligonucleotide
ggaggcaugaaguucucag

SEQ ID NO: 3246614 - RNA, 19 nt, Artificial Sequence
  Description of Artificial Sequence: Synthetic oligonucleotide
accggcaugaaugcggacg

SEQ ID NO: 3246615 - RNA, 19 nt, Artificial Sequence
  Description of Artificial Sequence: Synthetic oligonucleotide
ugacucaucuucucagcca

SEQ ID NO: 3246616 - RNA, 19 nt, Artificial Sequence
  Description of Artificial Sequence: Synthetic oligonucleotide
aaugaggugcucaucugga

SEQ ID NO: 3246617 - RNA, 19 nt, Artificial Sequence
  Description of Artificial Sequence: Synthetic oligonucleotide
uuauaagugaugcaaacag

SEQ ID NO: 3246618 - RNA, 19 nt, Artificial Sequence
  Description of Artificial Sequence: Synthetic oligonucleotide
uguaacaugauccucauaa

SEQ ID NO: 3246619 - RNA, 19 nt, Artificial Sequence
  Description of Artificial Sequence: Synthetic oligonucleotide
uuaaauaugccgcucaccc

SEQ ID NO: 3246620 - RNA, 19 nt, Artificial Sequence
  Description of Artificial Sequence: Synthetic oligonucleotide
acaugauccucauaaaggc

SEQ ID NO: 3246621 - RNA, 19 nt, Artificial Sequence
  Description of Artificial Sequence: Synthetic oligonucleotide
cucucuaugaugcugaugc

SEQ ID NO: 3246622 - RNA, 19 nt, Artificial Sequence
  Description of Artificial Sequence: Synthetic oligonucleotide
cuaaauaagccuuguagcc

SEQ ID NO: 3246623 - RNA, 19 nt, Artificial Sequence
  Description of Artificial Sequence: Synthetic oligonucleotide
aauugcugagaccauuggg

SEQ ID NO: 3246624 - RNA, 19 nt, Artificial Sequence
  Description of Artificial Sequence: Synthetic oligonucleotide
ugaacuacagagcaggaac

SEQ ID NO: 3246625 - RNA, 19 nt, Artificial Sequence
  Description of Artificial Sequence: Synthetic oligonucleotide
aaagggcugggccugacac

SEQ ID NO: 3246626 - RNA, 19 nt, Artificial Sequence
  Description of Artificial Sequence: Synthetic oligonucleotide
uagaacaacagucacggcu

SEQ ID NO: 3246627 - RNA, 19 nt, Artificial Sequence
  Description of Artificial Sequence: Synthetic oligonucleotide
uucaaggugaggcugguag

SEQ ID NO: 3246628 - RNA, 19 nt, Artificial Sequence
  Description of Artificial Sequence: Synthetic oligonucleotide
aagcaggaagucuucaagg

SEQ ID NO: 3246629 - RNA, 19 nt, Artificial Sequence
  Description of Artificial Sequence: Synthetic oligonucleotide
agggcuaugauuccagagc

SEQ ID NO: 3246630 - RNA, 19 nt, Artificial Sequence
  Description of Artificial Sequence: Synthetic oligonucleotide
auaagugaugcaaacaggg

SEQ ID NO: 3246631 - RNA, 19 nt, Artificial Sequence
  Description of Artificial Sequence: Synthetic oligonucleotide
cuccuuauuacagugaagg

SEQ ID NO: 3246632 - RNA, 19 nt, Artificial Sequence
  Description of Artificial Sequence: Synthetic oligonucleotide
agugacacaagggaguggc

SEQ ID NO: 3246633 - RNA, 19 nt, Artificial Sequence
  Description of Artificial Sequence: Synthetic oligonucleotide
aaauaugccgcucacccaa

SEQ ID NO: 3246634 - RNA, 19 nt, Artificial Sequence
  Description of Artificial Sequence: Synthetic oligonucleotide
ucuuguugggaaaacccag

SEQ ID NO: 3246635 - RNA, 19 nt, Artificial Sequence
  Description of Artificial Sequence: Synthetic oligonucleotide
ucauuaaauaugccgcuca

SEQ ID NO: 3246636 - RNA, 19 nt, Artificial Sequence
  Description of Artificial Sequence: Synthetic oligonucleotide
uuugaagaggaagugggag

SEQ ID NO: 3246637 - RNA, 19 nt, Artificial Sequence
  Description of Artificial Sequence: Synthetic oligonucleotide
uucucaucuguucucuagg

SEQ ID NO: 3246638 - RNA, 19 nt, Artificial Sequence
  Description of Artificial Sequence: Synthetic oligonucleotide
cuagcacucaacaugcccc

SEQ ID NO: 3246639 - RNA, 19 nt, Artificial Sequence
  Description of Artificial Sequence: Synthetic oligonucleotide
uugaaguugaugcgaagca

SEQ ID NO: 3246640 - RNA, 19 nt, Artificial Sequence
  Description of Artificial Sequence: Synthetic oligonucleotide
ugaauugcugagaccauug

SEQ ID NO: 3246641 - RNA, 19 nt, Artificial Sequence
  Description of Artificial Sequence: Synthetic oligonucleotide
agggaguggcuacagaugg

SEQ ID NO: 3246642 - RNA, 19 nt, Artificial Sequence
  Description of Artificial Sequence: Synthetic oligonucleotide
gaagcaggaagucuucaag

SEQ ID NO: 3246643 - RNA, 19 nt, Artificial Sequence
  Description of Artificial Sequence: Synthetic oligonucleotide
aaagccacuuuuccagguc

SEQ ID NO: 3246644 - RNA, 19 nt, Artificial Sequence
  Description of Artificial Sequence: Synthetic oligonucleotide
ggcuaaauaagccuuguag

SEQ ID NO: 3246645 - RNA, 19 nt, Artificial Sequence
  Description of Artificial Sequence: Synthetic oligonucleotide
uuggucacuuugaagagga

SEQ ID NO: 3246646 - RNA, 19 nt, Artificial Sequence
  Description of Artificial Sequence: Synthetic oligonucleotide
ugaaggggaggccacaggc

SEQ ID NO: 3246647 - RNA, 19 nt, Artificial Sequence
  Description of Artificial Sequence: Synthetic oligonucleotide
uggagucuccuuauuacag

SEQ ID NO: 3246648 - RNA, 19 nt, Artificial Sequence
  Description of Artificial Sequence: Synthetic oligonucleotide
auggcagagaucuccaguc

SEQ ID NO: 3246649 - RNA, 19 nt, Artificial Sequence
  Description of Artificial Sequence: Synthetic oligonucleotide
cacucauuggcacucaagc

SEQ ID NO: 3246650 - RNA, 19 nt, Artificial Sequence
  Description of Artificial Sequence: Synthetic oligonucleotide
agcuagagcguguagaaca

SEQ ID NO: 3246651 - RNA, 19 nt, Artificial Sequence
  Description of Artificial Sequence: Synthetic oligonucleotide
gcuaaauaagccuuguagc

SEQ ID NO: 3246652 - RNA, 19 nt, Artificial Sequence
  Description of Artificial Sequence: Synthetic oligonucleotide
uuuagcaguacugcccugg

SEQ ID NO: 3246653 - RNA, 19 nt, Artificial Sequence
  Description of Artificial Sequence: Synthetic oligonucleotide
cugaaaauggagacuuugc

SEQ ID NO: 3246654 - RNA, 19 nt, Artificial Sequence
  Description of Artificial Sequence: Synthetic oligonucleotide
uggccuagcacucaacaug

SEQ ID NO: 3246655 - RNA, 19 nt, Artificial Sequence
  Description of Artificial Sequence: Synthetic oligonucleotide
uaggacugcugcaugagug

SEQ ID NO: 3246656 - RNA, 19 nt, Artificial Sequence
  Description of Artificial Sequence: Synthetic oligonucleotide
uucuuguugggaaaaccca

SEQ ID NO: 3246657 - RNA, 19 nt, Artificial Sequence
  Description of Artificial Sequence: Synthetic oligonucleotide
cuaaggaacuacauugcac

SEQ ID NO: 3246658 - RNA, 19 nt, Artificial Sequence
  Description of Artificial Sequence: Synthetic oligonucleotide
ugcagucucaugcuuauaa

SEQ ID NO: 3246659 - RNA, 19 nt, Artificial Sequence
  Description of Artificial Sequence: Synthetic oligonucleotide
uagagcguguagaacaaca

SEQ ID NO: 3246660 - RNA, 19 nt, Artificial Sequence
  Description of Artificial Sequence: Synthetic oligonucleotide
auggagacuuugccgaggc

SEQ ID NO: 3246661 - RNA, 19 nt, Artificial Sequence
  Description of Artificial Sequence: Synthetic oligonucleotide
accaacaaccccaaguacg

SEQ ID NO: 3246662 - RNA, 19 nt, Artificial Sequence
  Description of Artificial Sequence: Synthetic oligonucleotide
ugagcaguguuccuacagc

SEQ ID NO: 3246663 - RNA, 19 nt, Artificial Sequence
  Description of Artificial Sequence: Synthetic oligonucleotide
ugugcaugauggcagagau

SEQ ID NO: 3246664 - RNA, 19 nt, Artificial Sequence
  Description of Artificial Sequence: Synthetic oligonucleotide
gauuccagagcccgucugg

SEQ ID NO: 3246665 - RNA, 19 nt, Artificial Sequence
  Description of Artificial Sequence: Synthetic oligonucleotide
gaauugcugagaccauugg

SEQ ID NO: 3246666 - RNA, 19 nt, Artificial Sequence
  Description of Artificial Sequence: Synthetic oligonucleotide
aaauggagacuuugccgag

SEQ ID NO: 3246667 - RNA, 19 nt, Artificial Sequence
  Description of Artificial Sequence: Synthetic oligonucleotide
cacugaacuacagagcagg

SEQ ID NO: 3246668 - RNA, 19 nt, Artificial Sequence
  Description of Artificial Sequence: Synthetic oligonucleotide
agaccauugggaucccuac

SEQ ID NO: 3246669 - RNA, 19 nt, Artificial Sequence
  Description of Artificial Sequence: Synthetic oligonucleotide
agcucuuugcacucauugg

SEQ ID NO: 3246670 - RNA, 19 nt, Artificial Sequence
  Description of Artificial Sequence: Synthetic oligonucleotide
cugccuggcaggcagaacg

SEQ ID NO: 3246671 - RNA, 19 nt, Artificial Sequence
  Description of Artificial Sequence: Synthetic oligonucleotide
guugaaguugaugcgaagc

SEQ ID NO: 3246672 - RNA, 19 nt, Artificial Sequence
  Description of Artificial Sequence: Synthetic oligonucleotide
uauuacagugaaggggagg

SEQ ID NO: 3246673 - RNA, 19 nt, Artificial Sequence
  Description of Artificial Sequence: Synthetic oligonucleotide
ugaaguugaugcgaagcag

SEQ ID NO: 3246674 - RNA, 19 nt, Artificial Sequence
  Description of Artificial Sequence: Synthetic oligonucleotide
caugauccucauaaaggcc

SEQ ID NO: 3246675 - RNA, 19 nt, Artificial Sequence
  Description of Artificial Sequence: Synthetic oligonucleotide
aaggagaaggaggauguug

SEQ ID NO: 3246676 - RNA, 19 nt, Artificial Sequence
  Description of Artificial Sequence: Synthetic oligonucleotide
aaugcagucucaugcuuau

SEQ ID NO: 3246677 - RNA, 19 nt, Artificial Sequence
  Description of Artificial Sequence: Synthetic oligonucleotide
gagucuccuuauuacagug

SEQ ID NO: 3246678 - RNA, 19 nt, Artificial Sequence
  Description of Artificial Sequence: Synthetic oligonucleotide
uggcuucggaacuugagca

SEQ ID NO: 3246679 - RNA, 19 nt, Artificial Sequence
  Description of Artificial Sequence: Synthetic oligonucleotide
ccugacaccugcuaaaucc

SEQ ID NO: 3246680 - RNA, 19 nt, Artificial Sequence
  Description of Artificial Sequence: Synthetic oligonucleotide
uugaagaggaagugggagu

SEQ ID NO: 3246681 - RNA, 19 nt, Artificial Sequence
  Description of Artificial Sequence: Synthetic oligonucleotide
guagccacgguucaccagc

SEQ ID NO: 3246682 - RNA, 19 nt, Artificial Sequence
  Description of Artificial Sequence: Synthetic oligonucleotide
aauggagacuuugccgagg

SEQ ID NO: 3246683 - RNA, 19 nt, Artificial Sequence
  Description of Artificial Sequence: Synthetic oligonucleotide
ucucaugccaccccucucu

SEQ ID NO: 3246684 - RNA, 19 nt, Artificial Sequence
  Description of Artificial Sequence: Synthetic oligonucleotide
uacagauggcccugaauug

SEQ ID NO: 3246685 - RNA, 19 nt, Artificial Sequence
  Description of Artificial Sequence: Synthetic oligonucleotide
uauugugucccugggagga

SEQ ID NO: 3246686 - RNA, 19 nt, Artificial Sequence
  Description of Artificial Sequence: Synthetic oligonucleotide
uuauuacagugaaggggag

SEQ ID NO: 3246687 - RNA, 19 nt, Artificial Sequence
  Description of Artificial Sequence: Synthetic oligonucleotide
uguucuuguugggaaaacc

SEQ ID NO: 3246688 - RNA, 19 nt, Artificial Sequence
  Description of Artificial Sequence: Synthetic oligonucleotide
ugcuuauaagugaugcaaa

SEQ ID NO: 3246689 - RNA, 19 nt, Artificial Sequence
  Description of Artificial Sequence: Synthetic oligonucleotide
augagcaguguuccuacag

SEQ ID NO: 3246690 - RNA, 19 nt, Artificial Sequence
  Description of Artificial Sequence: Synthetic oligonucleotide
agaacaacagucacggcug

SEQ ID NO: 3246691 - RNA, 19 nt, Artificial Sequence
  Description of Artificial Sequence: Synthetic oligonucleotide
uagaccacugggaaaccug

SEQ ID NO: 3246692 - RNA, 19 nt, Artificial Sequence
  Description of Artificial Sequence: Synthetic oligonucleotide
gaugagcuggcuucggaac

SEQ ID NO: 3246693 - RNA, 19 nt, Artificial Sequence
  Description of Artificial Sequence: Synthetic oligonucleotide
aaaucccaggccucuaaau

SEQ ID NO: 3246694 - RNA, 19 nt, Artificial Sequence
  Description of Artificial Sequence: Synthetic oligonucleotide
uguccuggcuccuuggcca

SEQ ID NO: 3246695 - RNA, 19 nt, Artificial Sequence
  Description of Artificial Sequence: Synthetic oligonucleotide
ccagcuagggcuaugauuc

SEQ ID NO: 3246696 - RNA, 19 nt, Artificial Sequence
  Description of Artificial Sequence: Synthetic oligonucleotide
agaaugccauugaagcugc

SEQ ID NO: 3246697 - RNA, 19 nt, Artificial Sequence
  Description of Artificial Sequence: Synthetic oligonucleotide
acaccugcuaaaucccagg

SEQ ID NO: 3246698 - RNA, 19 nt, Artificial Sequence
  Description of Artificial Sequence: Synthetic oligonucleotide
ucuccuuauuacagugaag

SEQ ID NO: 3246699 - RNA, 19 nt, Artificial Sequence
  Description of Artificial Sequence: Synthetic oligonucleotide
uaaauaugccgcucaccca

SEQ ID NO: 3246700 - RNA, 19 nt, Artificial Sequence
  Description of Artificial Sequence: Synthetic oligonucleotide
uccagagcccgucuggaca

SEQ ID NO: 3246701 - RNA, 19 nt, Artificial Sequence
  Description of Artificial Sequence: Synthetic oligonucleotide
caggaagucuucaagguga

SEQ ID NO: 3246702 - RNA, 19 nt, Artificial Sequence
  Description of Artificial Sequence: Synthetic oligonucleotide
uaagccuuguagccuguug

SEQ ID NO: 3246703 - RNA, 19 nt, Artificial Sequence
  Description of Artificial Sequence: Synthetic oligonucleotide
ucggaacuugagcaccagg

SEQ ID NO: 3246704 - RNA, 19 nt, Artificial Sequence
  Description of Artificial Sequence: Synthetic oligonucleotide
uuaggguccccuguccugg

SEQ ID NO: 3246705 - RNA, 19 nt, Artificial Sequence
  Description of Artificial Sequence: Synthetic oligonucleotide
aaguuggggugcucagcac

SEQ ID NO: 3246706 - RNA, 19 nt, Artificial Sequence
  Description of Artificial Sequence: Synthetic oligonucleotide
aguacagguaggcagcuuu

SEQ ID NO: 3246707 - RNA, 19 nt, Artificial Sequence
  Description of Artificial Sequence: Synthetic oligonucleotide
aagaugcuauggaugaugu

SEQ ID NO: 3246708 - RNA, 19 nt, Artificial Sequence
  Description of Artificial Sequence: Synthetic oligonucleotide
gugggaguaguacuugaag

SEQ ID NO: 3246709 - RNA, 19 nt, Artificial Sequence
  Description of Artificial Sequence: Synthetic oligonucleotide
uugaugcgaagcaggaagu

SEQ ID NO: 3246710 - RNA, 19 nt, Artificial Sequence
  Description of Artificial Sequence: Synthetic oligonucleotide
uacguccuaaggaacuaca

SEQ ID NO: 3246711 - RNA, 19 nt, Artificial Sequence
  Description of Artificial Sequence: Synthetic oligonucleotide
acaccaacaaccccaagua

SEQ ID NO: 3246712 - RNA, 19 nt, Artificial Sequence
  Description of Artificial Sequence: Synthetic oligonucleotide
ggaugcagcaccgugagcc

SEQ ID NO: 3246713 - RNA, 19 nt, Artificial Sequence
  Description of Artificial Sequence: Synthetic oligonucleotide
cugacaccugcuaaauccc

SEQ ID NO: 3246714 - RNA, 19 nt, Artificial Sequence
  Description of Artificial Sequence: Synthetic oligonucleotide
aacuugagcaccaggcuga

SEQ ID NO: 3246715 - RNA, 19 nt, Artificial Sequence
  Description of Artificial Sequence: Synthetic oligonucleotide
gaacccacagcucuuugca

SEQ ID NO: 3246716 - RNA, 19 nt, Artificial Sequence
  Description of Artificial Sequence: Synthetic oligonucleotide
acacccaggguccccaagg

SEQ ID NO: 3246717 - RNA, 19 nt, Artificial Sequence
  Description of Artificial Sequence: Synthetic oligonucleotide
gugagguugguccacacgg

SEQ ID NO: 3246718 - RNA, 19 nt, Artificial Sequence
  Description of Artificial Sequence: Synthetic oligonucleotide
ucuugaaccacacccgcac

SEQ ID NO: 3246719 - RNA, 19 nt, Artificial Sequence
  Description of Artificial Sequence: Synthetic oligonucleotide
gaagguggccuccagcucc

SEQ ID NO: 3246720 - RNA, 19 nt, Artificial Sequence
  Description of Artificial Sequence: Synthetic oligonucleotide
uucuucuucagcgagccgu

SEQ ID NO: 3246721 - RNA, 19 nt, Artificial Sequence
  Description of Artificial Sequence: Synthetic oligonucleotide
uugaaccacacccgcacgc

SEQ ID NO: 3246722 - RNA, 19 nt, Artificial Sequence
  Description of Artificial Sequence: Synthetic oligonucleotide
uggaagguggccuccagcu

SEQ ID NO: 3246723 - RNA, 19 nt, Artificial Sequence
  Description of Artificial Sequence: Synthetic oligonucleotide
uagcgguuccucuggaagg

SEQ ID NO: 3246724 - RNA, 19 nt, Artificial Sequence
  Description of Artificial Sequence: Synthetic oligonucleotide
acggcgaucucuucgcgcg

SEQ ID NO: 3246725 - RNA, 19 nt, Artificial Sequence
  Description of Artificial Sequence: Synthetic oligonucleotide
aagugcgugcgcugucgcc

SEQ ID NO: 3246726 - RNA, 19 nt, Artificial Sequence
  Description of Artificial Sequence: Synthetic oligonucleotide
gagguugguccacacggcg

SEQ ID NO: 3246727 - RNA, 19 nt, Artificial Sequence
  Description of Artificial Sequence: Synthetic oligonucleotide
guagcgguuccucuggaag

SEQ ID NO: 3246728 - RNA, 19 nt, Artificial Sequence
  Description of Artificial Sequence: Synthetic oligonucleotide
uucgcgcgugcucaugucg

SEQ ID NO: 3246729 - RNA, 19 nt, Artificial Sequence
  Description of Artificial Sequence: Synthetic oligonucleotide
ugcuggcuggugaagugcg

SEQ ID NO: 3246730 - RNA, 19 nt, Artificial Sequence
  Description of Artificial Sequence: Synthetic oligonucleotide
gaggccgaggccuucuccg

SEQ ID NO: 3246731 - RNA, 19 nt, Artificial Sequence
  Description of Artificial Sequence: Synthetic oligonucleotide
gcggucuugaaccacaccc

SEQ ID NO: 3246732 - RNA, 19 nt, Artificial Sequence
  Description of Artificial Sequence: Synthetic oligonucleotide
ucccgcuuccgccacuugg

SEQ ID NO: 3246733 - RNA, 19 nt, Artificial Sequence
  Description of Artificial Sequence: Synthetic oligonucleotide
agcuccugcagcugcuggc

SEQ ID NO: 3246734 - RNA, 19 nt, Artificial Sequence
  Description of Artificial Sequence: Synthetic oligonucleotide
ugaagugcgugcgcugucg

SEQ ID NO: 3246735 - RNA, 19 nt, Artificial Sequence
  Description of Artificial Sequence: Synthetic oligonucleotide
ugaaccacacccgcacgcg

SEQ ID NO: 3246736 - RNA, 19 nt, Artificial Sequence
  Description of Artificial Sequence: Synthetic oligonucleotide
ugagguugguccacacggc

SEQ ID NO: 3246737 - RNA, 19 nt, Artificial Sequence
  Description of Artificial Sequence: Synthetic oligonucleotide
ucagcgagccguccucggg

SEQ ID NO: 3246738 - RNA, 19 nt, Artificial Sequence
  Description of Artificial Sequence: Synthetic oligonucleotide
ugcuucuucuucagcgagc

SEQ ID NO: 3246739 - RNA, 19 nt, Artificial Sequence
  Description of Artificial Sequence: Synthetic oligonucleotide
ucgcgcgugcucaugucgg

SEQ ID NO: 3246740 - RNA, 19 nt, Artificial Sequence
  Description of Artificial Sequence: Synthetic oligonucleotide
agugcgugcgcugucgccg

SEQ ID NO: 3246741 - RNA, 19 nt, Artificial Sequence
  Description of Artificial Sequence: Synthetic oligonucleotide
acacagcuccgccugcugg

SEQ ID NO: 3246742 - RNA, 19 nt, Artificial Sequence
  Description of Artificial Sequence: Synthetic oligonucleotide
uccugcagcugcuggcugg

SEQ ID NO: 3246743 - RNA, 19 nt, Artificial Sequence
  Description of Artificial Sequence: Synthetic oligonucleotide
cuugaaccacacccgcacg

SEQ ID NO: 3246744 - RNA, 19 nt, Artificial Sequence
  Description of Artificial Sequence: Synthetic oligonucleotide
cacacggcgaucucuucgc

SEQ ID NO: 3246745 - RNA, 19 nt, Artificial Sequence
  Description of Artificial Sequence: Synthetic oligonucleotide
ucuucgcgcgugcucaugu

SEQ ID NO: 3246746 - RNA, 19 nt, Artificial Sequence
  Description of Artificial Sequence: Synthetic oligonucleotide
gaaccacacccgcacgcgg

SEQ ID NO: 3246747 - RNA, 19 nt, Artificial Sequence
  Description of Artificial Sequence: Synthetic oligonucleotide
agcuccgccugcuggcugc

SEQ ID NO: 3246748 - RNA, 19 nt, Artificial Sequence
  Description of Artificial Sequence: Synthetic oligonucleotide
ugcagcugcuggcugguga

SEQ ID NO: 3246749 - RNA, 19 nt, Artificial Sequence
  Description of Artificial Sequence: Synthetic oligonucleotide
aagccgcccuuacacagcu

SEQ ID NO: 3246750 - RNA, 19 nt, Artificial Sequence
  Description of Artificial Sequence: Synthetic oligonucleotide
ucuucuucagcgagccguc

SEQ ID NO: 3246751 - RNA, 19 nt, Artificial Sequence
  Description of Artificial Sequence: Synthetic oligonucleotide
uucuucagcgagccguccu

SEQ ID NO: 3246752 - RNA, 19 nt, Artificial Sequence
  Description of Artificial Sequence: Synthetic oligonucleotide
gcuuccgccacuuggcgcg

SEQ ID NO: 3246753 - RNA, 19 nt, Artificial Sequence
  Description of Artificial Sequence: Synthetic oligonucleotide
ucuucagcgagccguccuc

SEQ ID NO: 3246754 - RNA, 19 nt, Artificial Sequence
  Description of Artificial Sequence: Synthetic oligonucleotide
aaccacacccgcacgcggg

SEQ ID NO: 3246755 - RNA, 19 nt, Artificial Sequence
  Description of Artificial Sequence: Synthetic oligonucleotide
ucuggaagguggccuccag

SEQ ID NO: 3246756 - RNA, 19 nt, Artificial Sequence
  Description of Artificial Sequence: Synthetic oligonucleotide
ggcgcggcggucuugaacc

SEQ ID NO: 3246757 - RNA, 19 nt, Artificial Sequence
  Description of Artificial Sequence: Synthetic oligonucleotide
accacacccgcacgcgggc

SEQ ID NO: 3246758 - RNA, 19 nt, Artificial Sequence
  Description of Artificial Sequence: Synthetic oligonucleotide
augucgggguagcgguucc

SEQ ID NO: 3246759 - RNA, 19 nt, Artificial Sequence
  Description of Artificial Sequence: Synthetic oligonucleotide
cugcuucuucuucagcgag

SEQ ID NO: 3246760 - RNA, 19 nt, Artificial Sequence
  Description of Artificial Sequence: Synthetic oligonucleotide
uucagcgagccguccucgg

SEQ ID NO: 3246761 - RNA, 19 nt, Artificial Sequence
  Description of Artificial Sequence: Synthetic oligonucleotide
uggcuggugaagugcgugc

SEQ ID NO: 3246762 - RNA, 19 nt, Artificial Sequence
  Description of Artificial Sequence: Synthetic oligonucleotide
gccucggugagguuggucc

SEQ ID NO: 3246763 - RNA, 19 nt, Artificial Sequence
  Description of Artificial Sequence: Synthetic oligonucleotide
ggugagguugguccacacg

SEQ ID NO: 3246764 - RNA, 19 nt, Artificial Sequence
  Description of Artificial Sequence: Synthetic oligonucleotide
aucucuucgcgcgugcuca

SEQ ID NO: 3246765 - RNA, 19 nt, Artificial Sequence
  Description of Artificial Sequence: Synthetic oligonucleotide
gaagugcgugcgcugucgc

SEQ ID NO: 3246766 - RNA, 19 nt, Artificial Sequence
  Description of Artificial Sequence: Synthetic oligonucleotide
ggucuugaaccacacccgc

SEQ ID NO: 3246767 - RNA, 19 nt, Artificial Sequence
  Description of Artificial Sequence: Synthetic oligonucleotide
cuuacacagcuccgccugc

SEQ ID NO: 3246768 - RNA, 19 nt, Artificial Sequence
  Description of Artificial Sequence: Synthetic oligonucleotide
uugguccacacggcgaucu

SEQ ID NO: 3246769 - RNA, 19 nt, Artificial Sequence
  Description of Artificial Sequence: Synthetic oligonucleotide
cacagcuccgccugcuggc

SEQ ID NO: 3246770 - RNA, 19 nt, Artificial Sequence
  Description of Artificial Sequence: Synthetic oligonucleotide
uacacagcuccgccugcug

SEQ ID NO: 3246771 - RNA, 19 nt, Artificial Sequence
  Description of Artificial Sequence: Synthetic oligonucleotide
cuggaagguggccuccagc

SEQ ID NO: 3246772 - RNA, 19 nt, Artificial Sequence
  Description of Artificial Sequence: Synthetic oligonucleotide
uuccucuggaagguggccu

SEQ ID NO: 3246773 - RNA, 19 nt, Artificial Sequence
  Description of Artificial Sequence: Synthetic oligonucleotide
cagcgagccguccucgggg

SEQ ID NO: 3246774 - RNA, 19 nt, Artificial Sequence
  Description of Artificial Sequence: Synthetic oligonucleotide
gaucucuucgcgcgugcuc

SEQ ID NO: 3246775 - RNA, 19 nt, Artificial Sequence
  Description of Artificial Sequence: Synthetic oligonucleotide
cgcugcuucuucuucagcg

SEQ ID NO: 3246776 - RNA, 19 nt, Artificial Sequence
  Description of Artificial Sequence: Synthetic oligonucleotide
uggugaagugcgugcgcug

SEQ ID NO: 3246777 - RNA, 19 nt, Artificial Sequence
  Description of Artificial Sequence: Synthetic oligonucleotide
gcuucuucuucagcgagcc

SEQ ID NO: 3246778 - RNA, 19 nt, Artificial Sequence
  Description of Artificial Sequence: Synthetic oligonucleotide
cacggcgaucucuucgcgc

SEQ ID NO: 3246779 - RNA, 19 nt, Artificial Sequence
  Description of Artificial Sequence: Synthetic oligonucleotide
uccgccacuuggcgcggcg

SEQ ID NO: 3246780 - RNA, 19 nt, Artificial Sequence
  Description of Artificial Sequence: Synthetic oligonucleotide
acacggcgaucucuucgcg

SEQ ID NO: 3246781 - RNA, 19 nt, Artificial Sequence
  Description of Artificial Sequence: Synthetic oligonucleotide
uggccuccagcuccugcag

SEQ ID NO: 3246782 - RNA, 19 nt, Artificial Sequence
  Description of Artificial Sequence: Synthetic oligonucleotide
uccucuggaagguggccuc

SEQ ID NO: 3246783 - RNA, 19 nt, Artificial Sequence
  Description of Artificial Sequence: Synthetic oligonucleotide
ugcgcucccgcuuccgcca

SEQ ID NO: 3246784 - RNA, 19 nt, Artificial Sequence
  Description of Artificial Sequence: Synthetic oligonucleotide
gaagccgcccuuacacagc

SEQ ID NO: 3246785 - RNA, 19 nt, Artificial Sequence
  Description of Artificial Sequence: Synthetic oligonucleotide
cuccagcuccugcagcugc

SEQ ID NO: 3246786 - RNA, 19 nt, Artificial Sequence
  Description of Artificial Sequence: Synthetic oligonucleotide
cuucagcgagccguccucg

SEQ ID NO: 3246787 - RNA, 19 nt, Artificial Sequence
  Description of Artificial Sequence: Synthetic oligonucleotide
gccgcccuuacacagcucc

SEQ ID NO: 3246788 - RNA, 19 nt, Artificial Sequence
  Description of Artificial Sequence: Synthetic oligonucleotide
ugcucaugucgggguagcg

SEQ ID NO: 3246789 - RNA, 19 nt, Artificial Sequence
  Description of Artificial Sequence: Synthetic oligonucleotide
cuucuucuucagcgagccg

SEQ ID NO: 3246790 - RNA, 19 nt, Artificial Sequence
  Description of Artificial Sequence: Synthetic oligonucleotide
uccagcuccugcagcugcu

SEQ ID NO: 3246791 - RNA, 19 nt, Artificial Sequence
  Description of Artificial Sequence: Synthetic oligonucleotide
gggguagcgguuccucugg

SEQ ID NO: 3246792 - RNA, 19 nt, Artificial Sequence
  Description of Artificial Sequence: Synthetic oligonucleotide
uuacacagcuccgccugcu

SEQ ID NO: 3246793 - RNA, 19 nt, Artificial Sequence
  Description of Artificial Sequence: Synthetic oligonucleotide
ccuuacacagcuccgccug

SEQ ID NO: 3246794 - RNA, 19 nt, Artificial Sequence
  Description of Artificial Sequence: Synthetic oligonucleotide
uccgccugcuggcugcgcu

SEQ ID NO: 3246795 - RNA, 19 nt, Artificial Sequence
  Description of Artificial Sequence: Synthetic oligonucleotide
cugcuggcuggugaagugc

SEQ ID NO: 3246796 - RNA, 19 nt, Artificial Sequence
  Description of Artificial Sequence: Synthetic oligonucleotide
ucgggguagcgguuccucu

SEQ ID NO: 3246797 - RNA, 19 nt, Artificial Sequence
  Description of Artificial Sequence: Synthetic oligonucleotide
gcucaugucgggguagcgg

SEQ ID NO: 3246798 - RNA, 19 nt, Artificial Sequence
  Description of Artificial Sequence: Synthetic oligonucleotide
guggccuccagcuccugca

SEQ ID NO: 3246799 - RNA, 19 nt, Artificial Sequence
  Description of Artificial Sequence: Synthetic oligonucleotide
cuggcuggugaagugcgug

SEQ ID NO: 3246800 - RNA, 19 nt, Artificial Sequence
  Description of Artificial Sequence: Synthetic oligonucleotide
cugcgcucccgcuuccgcc

SEQ ID NO: 3246801 - RNA, 19 nt, Artificial Sequence
  Description of Artificial Sequence: Synthetic oligonucleotide
agcgguuccucuggaaggu

SEQ ID NO: 3246802 - RNA, 19 nt, Artificial Sequence
  Description of Artificial Sequence: Synthetic oligonucleotide
cucaugucgggguagcggu

SEQ ID NO: 3246803 - RNA, 19 nt, Artificial Sequence
  Description of Artificial Sequence: Synthetic oligonucleotide
uggcgcggcggucuugaac

SEQ ID NO: 3246804 - RNA, 19 nt, Artificial Sequence
  Description of Artificial Sequence: Synthetic oligonucleotide
ccacacggcgaucucuucg

SEQ ID NO: 3246805 - RNA, 19 nt, Artificial Sequence
  Description of Artificial Sequence: Synthetic oligonucleotide
ugucgccgcugcuucuucu

SEQ ID NO: 3246806 - RNA, 19 nt, Artificial Sequence
  Description of Artificial Sequence: Synthetic oligonucleotide
cagcuccugcagcugcugg

SEQ ID NO: 3246807 - RNA, 19 nt, Artificial Sequence
  Description of Artificial Sequence: Synthetic oligonucleotide
caugucgggguagcgguuc

SEQ ID NO: 3246808 - RNA, 19 nt, Artificial Sequence
  Description of Artificial Sequence: Synthetic oligonucleotide
guuccucuggaagguggcc

SEQ ID NO: 3246809 - RNA, 19 nt, Artificial Sequence
  Description of Artificial Sequence: Synthetic oligonucleotide
cuggcugcgcucccgcuuc

SEQ ID NO: 3246810 - RNA, 19 nt, Artificial Sequence
  Description of Artificial Sequence: Synthetic oligonucleotide
ggcuggugaagugcgugcg

SEQ ID NO: 3246811 - RNA, 19 nt, Artificial Sequence
  Description of Artificial Sequence: Synthetic oligonucleotide
agcugcuggcuggugaagu

SEQ ID NO: 3246812 - RNA, 19 nt, Artificial Sequence
  Description of Artificial Sequence: Synthetic oligonucleotide
cggucuugaaccacacccg

SEQ ID NO: 3246813 - RNA, 19 nt, Artificial Sequence
  Description of Artificial Sequence: Synthetic oligonucleotide
gcugcuucuucuucagcga

SEQ ID NO: 3246814 - RNA, 19 nt, Artificial Sequence
  Description of Artificial Sequence: Synthetic oligonucleotide
cuucuucagcgagccgucc

SEQ ID NO: 3246815 - RNA, 19 nt, Artificial Sequence
  Description of Artificial Sequence: Synthetic oligonucleotide
ucaugucgggguagcgguu

SEQ ID NO: 3246816 - RNA, 19 nt, Artificial Sequence
  Description of Artificial Sequence: Synthetic oligonucleotide
ucggugagguugguccaca

SEQ ID NO: 3246817 - RNA, 19 nt, Artificial Sequence
  Description of Artificial Sequence: Synthetic oligonucleotide
ugaguaauaauaaugagag

SEQ ID NO: 3246818 - RNA, 19 nt, Artificial Sequence
  Description of Artificial Sequence: Synthetic oligonucleotide
ucaaauacaaacaaucacc

SEQ ID NO: 3246819 - RNA, 19 nt, Artificial Sequence
  Description of Artificial Sequence: Synthetic oligonucleotide
aagauauauauauauuuuc

SEQ ID NO: 3246820 - RNA, 19 nt, Artificial Sequence
  Description of Artificial Sequence: Synthetic oligonucleotide
aaugagagcauucccaugg

SEQ ID NO: 3246821 - RNA, 19 nt, Artificial Sequence
  Description of Artificial Sequence: Synthetic oligonucleotide
ugauaauacauucaaacug

SEQ ID NO: 3246822 - RNA, 19 nt, Artificial Sequence
  Description of Artificial Sequence: Synthetic oligonucleotide
auauuuuauaguuagagca

SEQ ID NO: 3246823 - RNA, 19 nt, Artificial Sequence
  Description of Artificial Sequence: Synthetic oligonucleotide
aguagcaauuaucauaugc

SEQ ID NO: 3246824 - RNA, 19 nt, Artificial Sequence
  Description of Artificial Sequence: Synthetic oligonucleotide
uucaauaugugcuuuauug

SEQ ID NO: 3246825 - RNA, 19 nt, Artificial Sequence
  Description of Artificial Sequence: Synthetic oligonucleotide
ucagcuauaaaguaggucu

SEQ ID NO: 3246826 - RNA, 19 nt, Artificial Sequence
  Description of Artificial Sequence: Synthetic oligonucleotide
aauggggaaacuuccaaac

SEQ ID NO: 3246827 - RNA, 19 nt, Artificial Sequence
  Description of Artificial Sequence: Synthetic oligonucleotide
gaaacuuccaaacuuguag

SEQ ID NO: 3246828 - RNA, 19 nt, Artificial Sequence
  Description of Artificial Sequence: Synthetic oligonucleotide
aacuugaagauauauauau

SEQ ID NO: 3246829 - RNA, 19 nt, Artificial Sequence
  Description of Artificial Sequence: Synthetic oligonucleotide
aauacauucaaacuguauu

SEQ ID NO: 3246830 - RNA, 19 nt, Artificial Sequence
  Description of Artificial Sequence: Synthetic oligonucleotide
aauaaaucgcuuugcucgc

SEQ ID NO: 3246831 - RNA, 19 nt, Artificial Sequence
  Description of Artificial Sequence: Synthetic oligonucleotide
uacauugccaacuugaaga

SEQ ID NO: 3246832 - RNA, 19 nt, Artificial Sequence
  Description of Artificial Sequence: Synthetic oligonucleotide
uuauaguuagagcacuugg

SEQ ID NO: 3246833 - RNA, 19 nt, Artificial Sequence
  Description of Artificial Sequence: Synthetic oligonucleotide
cacagauauacauauauag

SEQ ID NO: 3246834 - RNA, 19 nt, Artificial Sequence
  Description of Artificial Sequence: Synthetic oligonucleotide
auaauaaugagagcauucc

SEQ ID NO: 3246835 - RNA, 19 nt, Artificial Sequence
  Description of Artificial Sequence: Synthetic oligonucleotide
ugaaucacaagauuugccc

SEQ ID NO: 3246836 - RNA, 19 nt, Artificial Sequence
  Description of Artificial Sequence: Synthetic oligonucleotide
uaagcauauauguagauau

SEQ ID NO: 3246837 - RNA, 19 nt, Artificial Sequence
  Description of Artificial Sequence: Synthetic oligonucleotide
uaauucagcuauaaaguag

SEQ ID NO: 3246838 - RNA, 19 nt, Artificial Sequence
  Description of Artificial Sequence: Synthetic oligonucleotide
guaaguauagaucaugcug

SEQ ID NO: 3246839 - RNA, 19 nt, Artificial Sequence
  Description of Artificial Sequence: Synthetic oligonucleotide
aacacaugaaaacaacucu

SEQ ID NO: 3246840 - RNA, 19 nt, Artificial Sequence
  Description of Artificial Sequence: Synthetic oligonucleotide
caaacuuguagagagaacg

SEQ ID NO: 3246841 - RNA, 19 nt, Artificial Sequence
  Description of Artificial Sequence: Synthetic oligonucleotide
uauuaaggaaaacacagau

SEQ ID NO: 3246842 - RNA, 19 nt, Artificial Sequence
  Description of Artificial Sequence: Synthetic oligonucleotide
acauaaaggagaaacacac

SEQ ID NO: 3246843 - RNA, 19 nt, Artificial Sequence
  Description of Artificial Sequence: Synthetic oligonucleotide
uaugcuuuaugacucacug

SEQ ID NO: 3246844 - RNA, 19 nt, Artificial Sequence
  Description of Artificial Sequence: Synthetic oligonucleotide
uagcauuuguuaaauaaag

SEQ ID NO: 3246845 - RNA, 19 nt, Artificial Sequence
  Description of Artificial Sequence: Synthetic oligonucleotide
ugaagauauauauauauuu

SEQ ID NO: 3246846 - RNA, 19 nt, Artificial Sequence
  Description of Artificial Sequence: Synthetic oligonucleotide
uauagcacauauauaauaa

SEQ ID NO: 3246847 - RNA, 19 nt, Artificial Sequence
  Description of Artificial Sequence: Synthetic oligonucleotide
guucguaugauauacaaca

SEQ ID NO: 3246848 - RNA, 19 nt, Artificial Sequence
  Description of Artificial Sequence: Synthetic oligonucleotide
uaauuuauuuuacaauugu

SEQ ID NO: 3246849 - RNA, 19 nt, Artificial Sequence
  Description of Artificial Sequence: Synthetic oligonucleotide
uauacaguucguaugauau

SEQ ID NO: 3246850 - RNA, 19 nt, Artificial Sequence
  Description of Artificial Sequence: Synthetic oligonucleotide
ggaaauaaaaccauaaagc

SEQ ID NO: 3246851 - RNA, 19 nt, Artificial Sequence
  Description of Artificial Sequence: Synthetic oligonucleotide
aaguaucucacacaguacu

SEQ ID NO: 3246852 - RNA, 19 nt, Artificial Sequence
  Description of Artificial Sequence: Synthetic oligonucleotide
ugcugaguaauaauaauga

SEQ ID NO: 3246853 - RNA, 19 nt, Artificial Sequence
  Description of Artificial Sequence: Synthetic oligonucleotide
caugaagacauuugaaugc

SEQ ID NO: 3246854 - RNA, 19 nt, Artificial Sequence
  Description of Artificial Sequence: Synthetic oligonucleotide
ugggcauaugauauuaagg

SEQ ID NO: 3246855 - RNA, 19 nt, Artificial Sequence
  Description of Artificial Sequence: Synthetic oligonucleotide
acaguaguuucauuauucc

SEQ ID NO: 3246856 - RNA, 19 nt, Artificial Sequence
  Description of Artificial Sequence: Synthetic oligonucleotide
gcuauauacauuuagaaca

SEQ ID NO: 3246857 - RNA, 19 nt, Artificial Sequence
  Description of Artificial Sequence: Synthetic oligonucleotide
guaaaugaagucucaaaag

SEQ ID NO: 3246858 - RNA, 19 nt, Artificial Sequence
  Description of Artificial Sequence: Synthetic oligonucleotide
acaaacaaucaccuuuacc

SEQ ID NO: 3246859 - RNA, 19 nt, Artificial Sequence
  Description of Artificial Sequence: Synthetic oligonucleotide
aaaucuguuacugguuccc

SEQ ID NO: 3246860 - RNA, 19 nt, Artificial Sequence
  Description of Artificial Sequence: Synthetic oligonucleotide
uacggcauaagcuucaucu

SEQ ID NO: 3246861 - RNA, 19 nt, Artificial Sequence
  Description of Artificial Sequence: Synthetic oligonucleotide
uuacaauaaacacaugaaa

SEQ ID NO: 3246862 - RNA, 19 nt, Artificial Sequence
  Description of Artificial Sequence: Synthetic oligonucleotide
uuuaaauacauugccaacu

SEQ ID NO: 3246863 - RNA, 19 nt, Artificial Sequence
  Description of Artificial Sequence: Synthetic oligonucleotide
acgcaauuuaaauacauug

SEQ ID NO: 3246864 - RNA, 19 nt, Artificial Sequence
  Description of Artificial Sequence: Synthetic oligonucleotide
aguaaaugaagucucaaaa

SEQ ID NO: 3246865 - RNA, 19 nt, Artificial Sequence
  Description of Artificial Sequence: Synthetic oligonucleotide
aaguaauuuaauuuauuuu

SEQ ID NO: 3246866 - RNA, 19 nt, Artificial Sequence
  Description of Artificial Sequence: Synthetic oligonucleotide
cacaugaucacucucagug

SEQ ID NO: 3246867 - RNA, 19 nt, Artificial Sequence
  Description of Artificial Sequence: Synthetic oligonucleotide
uacacagauauacauauau

SEQ ID NO: 3246868 - RNA, 19 nt, Artificial Sequence
  Description of Artificial Sequence: Synthetic oligonucleotide
acagauauacauauauagc

SEQ ID NO: 3246869 - RNA, 19 nt, Artificial Sequence
  Description of Artificial Sequence: Synthetic oligonucleotide
aaagauuugaacauacuaa

SEQ ID NO: 3246870 - RNA, 19 nt, Artificial Sequence
  Description of Artificial Sequence: Synthetic oligonucleotide
aauaaugagagcauuccca

SEQ ID NO: 3246871 - RNA, 19 nt, Artificial Sequence
  Description of Artificial Sequence: Synthetic oligonucleotide
aacaaaaguaguuuucuuu

SEQ ID NO: 3246872 - RNA, 19 nt, Artificial Sequence
  Description of Artificial Sequence: Synthetic oligonucleotide
uguuggaucuuguaaaaca

SEQ ID NO: 3246873 - RNA, 19 nt, Artificial Sequence
  Description of Artificial Sequence: Synthetic oligonucleotide
acaagcaaaacacacacau

SEQ ID NO: 3246874 - RNA, 19 nt, Artificial Sequence
  Description of Artificial Sequence: Synthetic oligonucleotide
gaacauacuaaucucuuac

SEQ ID NO: 3246875 - RNA, 19 nt, Artificial Sequence
  Description of Artificial Sequence: Synthetic oligonucleotide
uucuaaaucuccagaagca

SEQ ID NO: 3246876 - RNA, 19 nt, Artificial Sequence
  Description of Artificial Sequence: Synthetic oligonucleotide
uuaacugauuucauucuug

SEQ ID NO: 3246877 - RNA, 19 nt, Artificial Sequence
  Description of Artificial Sequence: Synthetic oligonucleotide
acauaguaugcuuuaugac

SEQ ID NO: 3246878 - RNA, 19 nt, Artificial Sequence
  Description of Artificial Sequence: Synthetic oligonucleotide
aaacuuccaaacuuguaga

SEQ ID NO: 3246879 - RNA, 19 nt, Artificial Sequence
  Description of Artificial Sequence: Synthetic oligonucleotide
aaucaugaaaaggaaauaa

SEQ ID NO: 3246880 - RNA, 19 nt, Artificial Sequence
  Description of Artificial Sequence: Synthetic oligonucleotide
uaauaaugagagcauuccc

SEQ ID NO: 3246881 - RNA, 19 nt, Artificial Sequence
  Description of Artificial Sequence: Synthetic oligonucleotide
auauauauauauuuucuuu

SEQ ID NO: 3246882 - RNA, 19 nt, Artificial Sequence
  Description of Artificial Sequence: Synthetic oligonucleotide
ugcuacauaaaggagaaac

SEQ ID NO: 3246883 - RNA, 19 nt, Artificial Sequence
  Description of Artificial Sequence: Synthetic oligonucleotide
agauauuuccuuuaacagu

SEQ ID NO: 3246884 - RNA, 19 nt, Artificial Sequence
  Description of Artificial Sequence: Synthetic oligonucleotide
ugcuauauacauuuagaac

SEQ ID NO: 3246885 - RNA, 19 nt, Artificial Sequence
  Description of Artificial Sequence: Synthetic oligonucleotide
gacguuaaaaggcacuacc

SEQ ID NO: 3246886 - RNA, 19 nt, Artificial Sequence
  Description of Artificial Sequence: Synthetic oligonucleotide
auaaggauguuaauuuccc

SEQ ID NO: 3246887 - RNA, 19 nt, Artificial Sequence
  Description of Artificial Sequence: Synthetic oligonucleotide
ugguaaguauagaucaugc

SEQ ID NO: 3246888 - RNA, 19 nt, Artificial Sequence
  Description of Artificial Sequence: Synthetic oligonucleotide
ucuacucgugucaauagca

SEQ ID NO: 3246889 - RNA, 19 nt, Artificial Sequence
  Description of Artificial Sequence: Synthetic oligonucleotide
aacuuccaaacuuguagag

SEQ ID NO: 3246890 - RNA, 19 nt, Artificial Sequence
  Description of Artificial Sequence: Synthetic oligonucleotide
aaccuugguauacugauaa

SEQ ID NO: 3246891 - RNA, 19 nt, Artificial Sequence
  Description of Artificial Sequence: Synthetic oligonucleotide
aagacgucagcauaacaca

SEQ ID NO: 3246892 - RNA, 19 nt, Artificial Sequence
  Description of Artificial Sequence: Synthetic oligonucleotide
aguuucagaagacaaacaa

SEQ ID NO: 3246893 - RNA, 19 nt, Artificial Sequence
  Description of Artificial Sequence: Synthetic oligonucleotide
uagcaauuaucauaugcag

SEQ ID NO: 3246894 - RNA, 19 nt, Artificial Sequence
  Description of Artificial Sequence: Synthetic oligonucleotide
ugugggcugaaucacaaga

SEQ ID NO: 3246895 - RNA, 19 nt, Artificial Sequence
  Description of Artificial Sequence: Synthetic oligonucleotide
auaguaugcuuuaugacuc

SEQ ID NO: 3246896 - RNA, 19 nt, Artificial Sequence
  Description of Artificial Sequence: Synthetic oligonucleotide
uaacaguagauauacaguu

SEQ ID NO: 3246897 - RNA, 19 nt, Artificial Sequence
  Description of Artificial Sequence: Synthetic oligonucleotide
aguaguuucauuauuccug

SEQ ID NO: 3246898 - RNA, 19 nt, Artificial Sequence
  Description of Artificial Sequence: Synthetic oligonucleotide
ugauugguaaguauagauc

SEQ ID NO: 3246899 - RNA, 19 nt, Artificial Sequence
  Description of Artificial Sequence: Synthetic oligonucleotide
uuacuauuacgcuaggaaa

SEQ ID NO: 3246900 - RNA, 19 nt, Artificial Sequence
  Description of Artificial Sequence: Synthetic oligonucleotide
aacauacuaaucucuuacu

SEQ ID NO: 3246901 - RNA, 19 nt, Artificial Sequence
  Description of Artificial Sequence: Synthetic oligonucleotide
acagggaacaguguugacc

SEQ ID NO: 3246902 - RNA, 19 nt, Artificial Sequence
  Description of Artificial Sequence: Synthetic oligonucleotide
uaaagcugugggcauauga

SEQ ID NO: 3246903 - RNA, 19 nt, Artificial Sequence
  Description of Artificial Sequence: Synthetic oligonucleotide
uugaccagaaugaaccuac

SEQ ID NO: 3246904 - RNA, 19 nt, Artificial Sequence
  Description of Artificial Sequence: Synthetic oligonucleotide
uggaguuuguuuaucaaau

SEQ ID NO: 3246905 - RNA, 19 nt, Artificial Sequence
  Description of Artificial Sequence: Synthetic oligonucleotide
ucguaugauauacaacaca

SEQ ID NO: 3246906 - RNA, 19 nt, Artificial Sequence
  Description of Artificial Sequence: Synthetic oligonucleotide
cugaguaauaauaaugaga

SEQ ID NO: 3246907 - RNA, 19 nt, Artificial Sequence
  Description of Artificial Sequence: Synthetic oligonucleotide
uaguccuuacaauaaacac

SEQ ID NO: 3246908 - RNA, 19 nt, Artificial Sequence
  Description of Artificial Sequence: Synthetic oligonucleotide
agcgcuaaauaccuuuaac

SEQ ID NO: 3246909 - RNA, 19 nt, Artificial Sequence
  Description of Artificial Sequence: Synthetic oligonucleotide
auuaaugaugagugcacug

SEQ ID NO: 3246910 - RNA, 19 nt, Artificial Sequence
  Description of Artificial Sequence: Synthetic oligonucleotide
uggaaagauuugaacauac

SEQ ID NO: 3246911 - RNA, 19 nt, Artificial Sequence
  Description of Artificial Sequence: Synthetic oligonucleotide
uuaaaaccuugguauacug

SEQ ID NO: 3246912 - RNA, 19 nt, Artificial Sequence
  Description of Artificial Sequence: Synthetic oligonucleotide
guuuugauccuucaauaug

SEQ ID NO: 3246913 - RNA, 19 nt, Artificial Sequence
  Description of Artificial Sequence: Synthetic oligonucleotide
uauuacgcuaggaaagaac

SEQ ID NO: 3246914 - RNA, 19 nt, Artificial Sequence
  Description of Artificial Sequence: Synthetic oligonucleotide
agauauauauauauuuucu

SEQ ID NO: 3246915 - RNA, 19 nt, Artificial Sequence
  Description of Artificial Sequence: Synthetic oligonucleotide
aacugauugguaaguauag

SEQ ID NO: 3246916 - RNA, 19 nt, Artificial Sequence
  Description of Artificial Sequence: Synthetic oligonucleotide
agucagaauauuuuauagu

SEQ ID NO: 3246917 - RNA, 19 nt, Artificial Sequence
  Description of Artificial Sequence: Synthetic oligonucleotide
aaucaaaucauuccaaggc

SEQ ID NO: 3246918 - RNA, 19 nt, Artificial Sequence
  Description of Artificial Sequence: Synthetic oligonucleotide
uggacuuuagcaaagaucc

SEQ ID NO: 3246919 - RNA, 19 nt, Artificial Sequence
  Description of Artificial Sequence: Synthetic oligonucleotide
guaguuaucaaauuucugg

SEQ ID NO: 3246920 - RNA, 19 nt, Artificial Sequence
  Description of Artificial Sequence: Synthetic oligonucleotide
uuaacuuuuauuuuagucu

SEQ ID NO: 3246921 - RNA, 19 nt, Artificial Sequence
  Description of Artificial Sequence: Synthetic oligonucleotide
uucaaaagugaauacaugc

SEQ ID NO: 3246922 - RNA, 19 nt, Artificial Sequence
  Description of Artificial Sequence: Synthetic oligonucleotide
auacaugccagucaccugc

SEQ ID NO: 3246923 - RNA, 19 nt, Artificial Sequence
  Description of Artificial Sequence: Synthetic oligonucleotide
uuuauuuuagucuauucaa

SEQ ID NO: 3246924 - RNA, 19 nt, Artificial Sequence
  Description of Artificial Sequence: Synthetic oligonucleotide
agauucuugaaucuuuugg

SEQ ID NO: 3246925 - RNA, 19 nt, Artificial Sequence
  Description of Artificial Sequence: Synthetic oligonucleotide
uauucaaacaugaauguuc

SEQ ID NO: 3246926 - RNA, 19 nt, Artificial Sequence
  Description of Artificial Sequence: Synthetic oligonucleotide
aaucugcacaucuuuuacc

SEQ ID NO: 3246927 - RNA, 19 nt, Artificial Sequence
  Description of Artificial Sequence: Synthetic oligonucleotide
uccuuguuugaucaaaggg

SEQ ID NO: 3246928 - RNA, 19 nt, Artificial Sequence
  Description of Artificial Sequence: Synthetic oligonucleotide
ucaaaagugaauacaugcc

SEQ ID NO: 3246929 - RNA, 19 nt, Artificial Sequence
  Description of Artificial Sequence: Synthetic oligonucleotide
uuuuagucuauucaaacau

SEQ ID NO: 3246930 - RNA, 19 nt, Artificial Sequence
  Description of Artificial Sequence: Synthetic oligonucleotide
uaugagguaaugaaaccag

SEQ ID NO: 3246931 - RNA, 19 nt, Artificial Sequence
  Description of Artificial Sequence: Synthetic oligonucleotide
uuucuuagaaguuggauaa

SEQ ID NO: 3246932 - RNA, 19 nt, Artificial Sequence
  Description of Artificial Sequence: Synthetic oligonucleotide
acaucuuuuaccuagggau

SEQ ID NO: 3246933 - RNA, 19 nt, Artificial Sequence
  Description of Artificial Sequence: Synthetic oligonucleotide
uguuugaucaaagggaaag

SEQ ID NO: 3246934 - RNA, 19 nt, Artificial Sequence
  Description of Artificial Sequence: Synthetic oligonucleotide
aaauugcuuagccaaguug

SEQ ID NO: 3246935 - RNA, 19 nt, Artificial Sequence
  Description of Artificial Sequence: Synthetic oligonucleotide
ucaaauuucuggaaaucug

SEQ ID NO: 3246936 - RNA, 19 nt, Artificial Sequence
  Description of Artificial Sequence: Synthetic oligonucleotide
auucuugaaucuuuuggac

SEQ ID NO: 3246937 - RNA, 19 nt, Artificial Sequence
  Description of Artificial Sequence: Synthetic oligonucleotide
cuuaacuuuuauuuuaguc

SEQ ID NO: 3246938 - RNA, 19 nt, Artificial Sequence
  Description of Artificial Sequence: Synthetic oligonucleotide
aacaccaguaauccagggg

SEQ ID NO: 3246939 - RNA, 19 nt, Artificial Sequence
  Description of Artificial Sequence: Synthetic oligonucleotide
uauuuuagucuauucaaac

SEQ ID NO: 3246940 - RNA, 19 nt, Artificial Sequence
  Description of Artificial Sequence: Synthetic oligonucleotide
caaauuucuggaaaucugc

SEQ ID NO: 3246941 - RNA, 19 nt, Artificial Sequence
  Description of Artificial Sequence: Synthetic oligonucleotide
ucaaucaaaucauuccaag

SEQ ID NO: 3246942 - RNA, 19 nt, Artificial Sequence
  Description of Artificial Sequence: Synthetic oligonucleotide
ucuaucaaucaaaucauuc

SEQ ID NO: 3246943 - RNA, 19 nt, Artificial Sequence
  Description of Artificial Sequence: Synthetic oligonucleotide
uguucaguaguuaucaaau

SEQ ID NO: 3246944 - RNA, 19 nt, Artificial Sequence
  Description of Artificial Sequence: Synthetic oligonucleotide
gucuauucaaacaugaaug

SEQ ID NO: 3246945 - RNA, 19 nt, Artificial Sequence
  Description of Artificial Sequence: Synthetic oligonucleotide
aggucuuuagaauuccugg

SEQ ID NO: 3246946 - RNA, 19 nt, Artificial Sequence
  Description of Artificial Sequence: Synthetic oligonucleotide
accaagcagaauuuucucc

SEQ ID NO: 3246947 - RNA, 19 nt, Artificial Sequence
  Description of Artificial Sequence: Synthetic oligonucleotide
uucuuaacuuuuauuuuag

SEQ ID NO: 3246948 - RNA, 19 nt, Artificial Sequence
  Description of Artificial Sequence: Synthetic oligonucleotide
aaacaugaauguucaguag

SEQ ID NO: 3246949 - RNA, 19 nt, Artificial Sequence
  Description of Artificial Sequence: Synthetic oligonucleotide
caaguuggcauccugcucg

SEQ ID NO: 3246950 - RNA, 19 nt, Artificial Sequence
  Description of Artificial Sequence: Synthetic oligonucleotide
aaaagugaauacaugccag

SEQ ID NO: 3246951 - RNA, 19 nt, Artificial Sequence
  Description of Artificial Sequence: Synthetic oligonucleotide
ucuauucaaacaugaaugu

SEQ ID NO: 3246952 - RNA, 19 nt, Artificial Sequence
  Description of Artificial Sequence: Synthetic oligonucleotide
aguuggauaaucucaucuc

SEQ ID NO: 3246953 - RNA, 19 nt, Artificial Sequence
  Description of Artificial Sequence: Synthetic oligonucleotide
caaucaaaucauuccaagg

SEQ ID NO: 3246954 - RNA, 19 nt, Artificial Sequence
  Description of Artificial Sequence: Synthetic oligonucleotide
gauucuugaaucuuuugga

SEQ ID NO: 3246955 - RNA, 19 nt, Artificial Sequence
  Description of Artificial Sequence: Synthetic oligonucleotide
caaccaacugaguaguucg

SEQ ID NO: 3246956 - RNA, 19 nt, Artificial Sequence
  Description of Artificial Sequence: Synthetic oligonucleotide
auuuuagucuauucaaaca

SEQ ID NO: 3246957 - RNA, 19 nt, Artificial Sequence
  Description of Artificial Sequence: Synthetic oligonucleotide
uaguuaucaaauuucugga

SEQ ID NO: 3246958 - RNA, 19 nt, Artificial Sequence
  Description of Artificial Sequence: Synthetic oligonucleotide
gaaucuuuuggacuuuagc

SEQ ID NO: 3246959 - RNA, 19 nt, Artificial Sequence
  Description of Artificial Sequence: Synthetic oligonucleotide
ucaaacaugaauguucagu

SEQ ID NO: 3246960 - RNA, 19 nt, Artificial Sequence
  Description of Artificial Sequence: Synthetic oligonucleotide
agguaaugaaaccaguucu

SEQ ID NO: 3246961 - RNA, 19 nt, Artificial Sequence
  Description of Artificial Sequence: Synthetic oligonucleotide
uuucaaaagugaauacaug

SEQ ID NO: 3246962 - RNA, 19 nt, Artificial Sequence
  Description of Artificial Sequence: Synthetic oligonucleotide
ucuuuagaauuccuggcca

SEQ ID NO: 3246963 - RNA, 19 nt, Artificial Sequence
  Description of Artificial Sequence: Synthetic oligonucleotide
uuauuuuagucuauucaaa

SEQ ID NO: 3246964 - RNA, 19 nt, Artificial Sequence
  Description of Artificial Sequence: Synthetic oligonucleotide
aaagugaauacaugccagu

SEQ ID NO: 3246965 - RNA, 19 nt, Artificial Sequence
  Description of Artificial Sequence: Synthetic oligonucleotide
uuaugagguaaugaaacca

SEQ ID NO: 3246966 - RNA, 19 nt, Artificial Sequence
  Description of Artificial Sequence: Synthetic oligonucleotide
ugauguuagcauaacuugu

SEQ ID NO: 3246967 - RNA, 19 nt, Artificial Sequence
  Description of Artificial Sequence: Synthetic oligonucleotide
uaacuuuuauuuuagucua

SEQ ID NO: 3246968 - RNA, 19 nt, Artificial Sequence
  Description of Artificial Sequence: Synthetic oligonucleotide
ugaacaccaguaauccagg

SEQ ID NO: 3246969 - RNA, 19 nt, Artificial Sequence
  Description of Artificial Sequence: Synthetic oligonucleotide
uaccuagggauccugaugu

SEQ ID NO: 3246970 - RNA, 19 nt, Artificial Sequence
  Description of Artificial Sequence: Synthetic oligonucleotide
agucuauucaaacaugaau

SEQ ID NO: 3246971 - RNA, 19 nt, Artificial Sequence
  Description of Artificial Sequence: Synthetic oligonucleotide
cugauguuagcauaacuug

SEQ ID NO: 3246972 - RNA, 19 nt, Artificial Sequence
  Description of Artificial Sequence: Synthetic oligonucleotide
uuucaagaaacuuugccuu

SEQ ID NO: 3246973 - RNA, 19 nt, Artificial Sequence
  Description of Artificial Sequence: Synthetic oligonucleotide
aucuuuuaccuagggaucc

SEQ ID NO: 3246974 - RNA, 19 nt, Artificial Sequence
  Description of Artificial Sequence: Synthetic oligonucleotide
aagugaauacaugccaguc

SEQ ID NO: 3246975 - RNA, 19 nt, Artificial Sequence
  Description of Artificial Sequence: Synthetic oligonucleotide
guuagcauaacuuguuuca

SEQ ID NO: 3246976 - RNA, 19 nt, Artificial Sequence
  Description of Artificial Sequence: Synthetic oligonucleotide
uacauggacgccccgagcc

SEQ ID NO: 3246977 - RNA, 19 nt, Artificial Sequence
  Description of Artificial Sequence: Synthetic oligonucleotide
uuaucaaauuucuggaaau

SEQ ID NO: 3246978 - RNA, 19 nt, Artificial Sequence
  Description of Artificial Sequence: Synthetic oligonucleotide
uuagaaguuggauaaucuc

SEQ ID NO: 3246979 - RNA, 19 nt, Artificial Sequence
  Description of Artificial Sequence: Synthetic oligonucleotide
aucaaaucauuccaaggcu

SEQ ID NO: 3246980 - RNA, 19 nt, Artificial Sequence
  Description of Artificial Sequence: Synthetic oligonucleotide
auaacuuguuucaaaagug

SEQ ID NO: 3246981 - RNA, 19 nt, Artificial Sequence
  Description of Artificial Sequence: Synthetic oligonucleotide
ucuuucaaaauucucucuu

SEQ ID NO: 3246982 - RNA, 19 nt, Artificial Sequence
  Description of Artificial Sequence: Synthetic oligonucleotide
aacugaguaguucggcgag

SEQ ID NO: 3246983 - RNA, 19 nt, Artificial Sequence
  Description of Artificial Sequence: Synthetic oligonucleotide
gaaacuuugccuucucuuc

SEQ ID NO: 3246984 - RNA, 19 nt, Artificial Sequence
  Description of Artificial Sequence: Synthetic oligonucleotide
auucuuaacuuuuauuuua

SEQ ID NO: 3246985 - RNA, 19 nt, Artificial Sequence
  Description of Artificial Sequence: Synthetic oligonucleotide
agaacugcuuuugugcccc

SEQ ID NO: 3246986 - RNA, 19 nt, Artificial Sequence
  Description of Artificial Sequence: Synthetic oligonucleotide
ccaucuaucaaucaaauca

SEQ ID NO: 3246987 - RNA, 19 nt, Artificial Sequence
  Description of Artificial Sequence: Synthetic oligonucleotide
ucagccaaccaacugagua

SEQ ID NO: 3246988 - RNA, 19 nt, Artificial Sequence
  Description of Artificial Sequence: Synthetic oligonucleotide
ugaauguucaguaguuauc

SEQ ID NO: 3246989 - RNA, 19 nt, Artificial Sequence
  Description of Artificial Sequence: Synthetic oligonucleotide
ucuuuuggacuuuagcaaa

SEQ ID NO: 3246990 - RNA, 19 nt, Artificial Sequence
  Description of Artificial Sequence: Synthetic oligonucleotide
ucucaucucucuuuuggcc

SEQ ID NO: 3246991 - RNA, 19 nt, Artificial Sequence
  Description of Artificial Sequence: Synthetic oligonucleotide
gaauguucaguaguuauca

SEQ ID NO: 3246992 - RNA, 19 nt, Artificial Sequence
  Description of Artificial Sequence: Synthetic oligonucleotide
uggucagccaaccaacuga

SEQ ID NO: 3246993 - RNA, 19 nt, Artificial Sequence
  Description of Artificial Sequence: Synthetic oligonucleotide
gugaauacaugccagucac

SEQ ID NO: 3246994 - RNA, 19 nt, Artificial Sequence
  Description of Artificial Sequence: Synthetic oligonucleotide
gugaacaccaguaauccag

SEQ ID NO: 3246995 - RNA, 19 nt, Artificial Sequence
  Description of Artificial Sequence: Synthetic oligonucleotide
uuuuggccuuucaagaaac

SEQ ID NO: 3246996 - RNA, 19 nt, Artificial Sequence
  Description of Artificial Sequence: Synthetic oligonucleotide
cuagggauccugauguuag

SEQ ID NO: 3246997 - RNA, 19 nt, Artificial Sequence
  Description of Artificial Sequence: Synthetic oligonucleotide
uauucuuaacuuuuauuuu

SEQ ID NO: 3246998 - RNA, 19 nt, Artificial Sequence
  Description of Artificial Sequence: Synthetic oligonucleotide
aauucucucuucucuuugu

SEQ ID NO: 3246999 - RNA, 19 nt, Artificial Sequence
  Description of Artificial Sequence: Synthetic oligonucleotide
gagguaaugaaaccaguuc

SEQ ID NO: 3247000 - RNA, 19 nt, Artificial Sequence
  Description of Artificial Sequence: Synthetic oligonucleotide
aucuuuuggacuuuagcaa

SEQ ID NO: 3247001 - RNA, 19 nt, Artificial Sequence
  Description of Artificial Sequence: Synthetic oligonucleotide
aaggcuuugacuucuucuu

SEQ ID NO: 3247002 - RNA, 19 nt, Artificial Sequence
  Description of Artificial Sequence: Synthetic oligonucleotide
aucauuccaaggcuuugac

SEQ ID NO: 3247003 - RNA, 19 nt, Artificial Sequence
  Description of Artificial Sequence: Synthetic oligonucleotide
agugacucaggacgcuucc

SEQ ID NO: 3247004 - RNA, 19 nt, Artificial Sequence
  Description of Artificial Sequence: Synthetic oligonucleotide
ucucuuuguuucuuagaag

SEQ ID NO: 3247005 - RNA, 19 nt, Artificial Sequence
  Description of Artificial Sequence: Synthetic oligonucleotide
ucuccauagugacucagga

SEQ ID NO: 3247006 - RNA, 19 nt, Artificial Sequence
  Description of Artificial Sequence: Synthetic oligonucleotide
aggggagcagauuucgugg

SEQ ID NO: 3247007 - RNA, 19 nt, Artificial Sequence
  Description of Artificial Sequence: Synthetic oligonucleotide
gucuuuagaauuccuggcc

SEQ ID NO: 3247008 - RNA, 19 nt, Artificial Sequence
  Description of Artificial Sequence: Synthetic oligonucleotide
agugaauacaugccaguca

SEQ ID NO: 3247009 - RNA, 19 nt, Artificial Sequence
  Description of Artificial Sequence: Synthetic oligonucleotide
agcauaacuuguuucaaaa

SEQ ID NO: 3247010 - RNA, 19 nt, Artificial Sequence
  Description of Artificial Sequence: Synthetic oligonucleotide
cugcacaucuuuuaccuag

SEQ ID NO: 3247011 - RNA, 19 nt, Artificial Sequence
  Description of Artificial Sequence: Synthetic oligonucleotide
gauacauggacgccccgag

SEQ ID NO: 3247012 - RNA, 19 nt, Artificial Sequence
  Description of Artificial Sequence: Synthetic oligonucleotide
aauacaugccagucaccug

SEQ ID NO: 3247013 - RNA, 19 nt, Artificial Sequence
  Description of Artificial Sequence: Synthetic oligonucleotide
guauucuuaacuuuuauuu

SEQ ID NO: 3247014 - RNA, 19 nt, Artificial Sequence
  Description of Artificial Sequence: Synthetic oligonucleotide
uucuguauucuuaacuuuu

SEQ ID NO: 3247015 - RNA, 19 nt, Artificial Sequence
  Description of Artificial Sequence: Synthetic oligonucleotide
aaaauucucucuucucuuu

SEQ ID NO: 3247016 - RNA, 19 nt, Artificial Sequence
  Description of Artificial Sequence: Synthetic oligonucleotide
uuaccuagggauccugaug

SEQ ID NO: 3247017 - RNA, 19 nt, Artificial Sequence
  Description of Artificial Sequence: Synthetic oligonucleotide
aaugaauucaaucuuguag

SEQ ID NO: 3247018 - RNA, 19 nt, Artificial Sequence
  Description of Artificial Sequence: Synthetic oligonucleotide
aagguucucauucaaagcc

SEQ ID NO: 3247019 - RNA, 19 nt, Artificial Sequence
  Description of Artificial Sequence: Synthetic oligonucleotide
aggauaugaaaauagcucc

SEQ ID NO: 3247020 - RNA, 19 nt, Artificial Sequence
  Description of Artificial Sequence: Synthetic oligonucleotide
augaauucaaucuuguagg

SEQ ID NO: 3247021 - RNA, 19 nt, Artificial Sequence
  Description of Artificial Sequence: Synthetic oligonucleotide
aaucaaucgguagaaaucg

SEQ ID NO: 3247022 - RNA, 19 nt, Artificial Sequence
  Description of Artificial Sequence: Synthetic oligonucleotide
agugcccgaacuuauaacc

SEQ ID NO: 3247023 - RNA, 19 nt, Artificial Sequence
  Description of Artificial Sequence: Synthetic oligonucleotide
uguaaaguguucuuggagc

SEQ ID NO: 3247024 - RNA, 19 nt, Artificial Sequence
  Description of Artificial Sequence: Synthetic oligonucleotide
ugugcugauaucacaaagg

SEQ ID NO: 3247025 - RNA, 19 nt, Artificial Sequence
  Description of Artificial Sequence: Synthetic oligonucleotide
aaauccuugucucuucagg

SEQ ID NO: 3247026 - RNA, 19 nt, Artificial Sequence
  Description of Artificial Sequence: Synthetic oligonucleotide
gaagaagauggccacaggg

SEQ ID NO: 3247027 - RNA, 19 nt, Artificial Sequence
  Description of Artificial Sequence: Synthetic oligonucleotide
auguaggugauuuugauga

SEQ ID NO: 3247028 - RNA, 19 nt, Artificial Sequence
  Description of Artificial Sequence: Synthetic oligonucleotide
ugaagguucucauucaaag

SEQ ID NO: 3247029 - RNA, 19 nt, Artificial Sequence
  Description of Artificial Sequence: Synthetic oligonucleotide
uguacaaugaggaaugaau

SEQ ID NO: 3247030 - RNA, 19 nt, Artificial Sequence
  Description of Artificial Sequence: Synthetic oligonucleotide
uuguuugcaauauacuuag

SEQ ID NO: 3247031 - RNA, 19 nt, Artificial Sequence
  Description of Artificial Sequence: Synthetic oligonucleotide
aaugucacacccuccauug

SEQ ID NO: 3247032 - RNA, 19 nt, Artificial Sequence
  Description of Artificial Sequence: Synthetic oligonucleotide
ugauaaaugccucgaagcc

SEQ ID NO: 3247033 - RNA, 19 nt, Artificial Sequence
  Description of Artificial Sequence: Synthetic oligonucleotide
uuuacucacgucauucagg

SEQ ID NO: 3247034 - RNA, 19 nt, Artificial Sequence
  Description of Artificial Sequence: Synthetic oligonucleotide
aaaucgcucaccuccuggc

SEQ ID NO: 3247035 - RNA, 19 nt, Artificial Sequence
  Description of Artificial Sequence: Synthetic oligonucleotide
aaagccuuguccuguugcc

SEQ ID NO: 3247036 - RNA, 19 nt, Artificial Sequence
  Description of Artificial Sequence: Synthetic oligonucleotide
uaggauaugaaaauagcuc

SEQ ID NO: 3247037 - RNA, 19 nt, Artificial Sequence
  Description of Artificial Sequence: Synthetic oligonucleotide
uauaaccuccuccaaaagc

SEQ ID NO: 3247038 - RNA, 19 nt, Artificial Sequence
  Description of Artificial Sequence: Synthetic oligonucleotide
ugaugagaaccuuagcccg

SEQ ID NO: 3247039 - RNA, 19 nt, Artificial Sequence
  Description of Artificial Sequence: Synthetic oligonucleotide
uugaugagaaccuuagccc

SEQ ID NO: 3247040 - RNA, 19 nt, Artificial Sequence
  Description of Artificial Sequence: Synthetic oligonucleotide
ugaggaaugaauccguaca

SEQ ID NO: 3247041 - RNA, 19 nt, Artificial Sequence
  Description of Artificial Sequence: Synthetic oligonucleotide
ucaaguagcgccauggccu

SEQ ID NO: 3247042 - RNA, 19 nt, Artificial Sequence
  Description of Artificial Sequence: Synthetic oligonucleotide
aaguguuugcuccaggugu

SEQ ID NO: 3247043 - RNA, 19 nt, Artificial Sequence
  Description of Artificial Sequence: Synthetic oligonucleotide
cuuaggauaugaaaauagc

SEQ ID NO: 3247044 - RNA, 19 nt, Artificial Sequence
  Description of Artificial Sequence: Synthetic oligonucleotide
guagaaaucggccaucgcc

SEQ ID NO: 3247045 - RNA, 19 nt, Artificial Sequence
  Description of Artificial Sequence: Synthetic oligonucleotide
aaagauccucuuucugagc

SEQ ID NO: 3247046 - RNA, 19 nt, Artificial Sequence
  Description of Artificial Sequence: Synthetic oligonucleotide
  modified_base (5)..(5): a, c, u, g, unknown or other
uuuancucuccuacuaugu

SEQ ID NO: 3247047 - RNA, 19 nt, Artificial Sequence
  Description of Artificial Sequence: Synthetic oligonucleotide
uauuguuugcaauauacuu

SEQ ID NO: 3247048 - RNA, 19 nt, Artificial Sequence
  Description of Artificial Sequence: Synthetic oligonucleotide
ucauucaaagccuuguccu

SEQ ID NO: 3247049 - RNA, 19 nt, Artificial Sequence
  Description of Artificial Sequence: Synthetic oligonucleotide
uaugaaaauagcuccuugu

SEQ ID NO: 3247050 - RNA, 19 nt, Artificial Sequence
  Description of Artificial Sequence: Synthetic oligonucleotide
aaucuuguagggcaucuca

SEQ ID NO: 3247051 - RNA, 19 nt, Artificial Sequence
  Description of Artificial Sequence: Synthetic oligonucleotide
uuacucacgucauucaggc

SEQ ID NO: 3247052 - RNA, 19 nt, Artificial Sequence
  Description of Artificial Sequence: Synthetic oligonucleotide
gaacguauccugcauaaug

SEQ ID NO: 3247053 - RNA, 19 nt, Artificial Sequence
  Description of Artificial Sequence: Synthetic oligonucleotide
aaacaaggagggcaccugg

SEQ ID NO: 3247054 - RNA, 19 nt, Artificial Sequence
  Description of Artificial Sequence: Synthetic oligonucleotide
aauagcuccuuguaaccug

SEQ ID NO: 3247055 - RNA, 19 nt, Artificial Sequence
  Description of Artificial Sequence: Synthetic oligonucleotide
cuuggaugaaugcacacag

SEQ ID NO: 3247056 - RNA, 19 nt, Artificial Sequence
  Description of Artificial Sequence: Synthetic oligonucleotide
uuauuguuugcaauauacu

SEQ ID NO: 3247057 - RNA, 19 nt, Artificial Sequence
  Description of Artificial Sequence: Synthetic oligonucleotide
ucacagugaagacauccgg

SEQ ID NO: 3247058 - RNA, 19 nt, Artificial Sequence
  Description of Artificial Sequence: Synthetic oligonucleotide
ggugauuuugaugagaacc

SEQ ID NO: 3247059 - RNA, 19 nt, Artificial Sequence
  Description of Artificial Sequence: Synthetic oligonucleotide
uucacagagacagaguggc

SEQ ID NO: 3247060 - RNA, 19 nt, Artificial Sequence
  Description of Artificial Sequence: Synthetic oligonucleotide
caaacugcauaauauuuac

SEQ ID NO: 3247061 - RNA, 19 nt, Artificial Sequence
  Description of Artificial Sequence: Synthetic oligonucleotide
uccugguccaucaaguagc

SEQ ID NO: 3247062 - RNA, 19 nt, Artificial Sequence
  Description of Artificial Sequence: Synthetic oligonucleotide
ucaauggacauagccaggg

SEQ ID NO: 3247063 - RNA, 19 nt, Artificial Sequence
  Description of Artificial Sequence: Synthetic oligonucleotide
gugcugauaucacaaaggg

SEQ ID NO: 3247064 - RNA, 19 nt, Artificial Sequence
  Description of Artificial Sequence: Synthetic oligonucleotide
auuguaugaaauuccuucu

SEQ ID NO: 3247065 - RNA, 19 nt, Artificial Sequence
  Description of Artificial Sequence: Synthetic oligonucleotide
ggcugauuuuacuagaagg

SEQ ID NO: 3247066 - RNA, 19 nt, Artificial Sequence
  Description of Artificial Sequence: Synthetic oligonucleotide
ugcugauaucacaaagggg

SEQ ID NO: 3247067 - RNA, 19 nt, Artificial Sequence
  Description of Artificial Sequence: Synthetic oligonucleotide
auaaaugccucgaagccac

SEQ ID NO: 3247068 - RNA, 19 nt, Artificial Sequence
  Description of Artificial Sequence: Synthetic oligonucleotide
gagaacaccgucuucauaa

SEQ ID NO: 3247069 - RNA, 19 nt, Artificial Sequence
  Description of Artificial Sequence: Synthetic oligonucleotide
gagucggucauuaugaaac

SEQ ID NO: 3247070 - RNA, 19 nt, Artificial Sequence
  Description of Artificial Sequence: Synthetic oligonucleotide
  modified_base (4)..(4): a, c, u, g, unknown or other
uuancucuccuacuaugug

SEQ ID NO: 3247071 - RNA, 19 nt, Artificial Sequence
  Description of Artificial Sequence: Synthetic oligonucleotide
uuagguuaacgucuucuga

SEQ ID NO: 3247072 - RNA, 19 nt, Artificial Sequence
  Description of Artificial Sequence: Synthetic oligonucleotide
acaccauuguaugaaauuc

SEQ ID NO: 3247073 - RNA, 19 nt, Artificial Sequence
  Description of Artificial Sequence: Synthetic oligonucleotide
acuuaggauaugaaaauag

SEQ ID NO: 3247074 - RNA, 19 nt, Artificial Sequence
  Description of Artificial Sequence: Synthetic oligonucleotide
aauccguacacgaggaguc

SEQ ID NO: 3247075 - RNA, 19 nt, Artificial Sequence
  Description of Artificial Sequence: Synthetic oligonucleotide
gcugguuucauugucaugg

SEQ ID NO: 3247076 - RNA, 19 nt, Artificial Sequence
  Description of Artificial Sequence: Synthetic oligonucleotide
gaagguucucauucaaagc

SEQ ID NO: 3247077 - RNA, 19 nt, Artificial Sequence
  Description of Artificial Sequence: Synthetic oligonucleotide
augaggaaugaauccguac

SEQ ID NO: 3247078 - RNA, 19 nt, Artificial Sequence
  Description of Artificial Sequence: Synthetic oligonucleotide
uguucuuggagcagaaauc

SEQ ID NO: 3247079 - RNA, 19 nt, Artificial Sequence
  Description of Artificial Sequence: Synthetic oligonucleotide
caaucgguagaaaucggcc

SEQ ID NO: 3247080 - RNA, 19 nt, Artificial Sequence
  Description of Artificial Sequence: Synthetic oligonucleotide
ucauucaggcuuaugcugu

SEQ ID NO: 3247081 - RNA, 19 nt, Artificial Sequence
  Description of Artificial Sequence: Synthetic oligonucleotide
ucuguggccaucuuauugu

SEQ ID NO: 3247082 - RNA, 19 nt, Artificial Sequence
  Description of Artificial Sequence: Synthetic oligonucleotide
uccauugucacuggaaaug

SEQ ID NO: 3247083 - RNA, 19 nt, Artificial Sequence
  Description of Artificial Sequence: Synthetic oligonucleotide
uuucagacgcuaauugugu

SEQ ID NO: 3247084 - RNA, 19 nt, Artificial Sequence
  Description of Artificial Sequence: Synthetic oligonucleotide
auguguuucccguugauaa

SEQ ID NO: 3247085 - RNA, 19 nt, Artificial Sequence
  Description of Artificial Sequence: Synthetic oligonucleotide
uuguccuguugccagggcg

SEQ ID NO: 3247086 - RNA, 19 nt, Artificial Sequence
  Description of Artificial Sequence: Synthetic oligonucleotide
aauucuguggccaucuuau

SEQ ID NO: 3247087 - RNA, 19 nt, Artificial Sequence
  Description of Artificial Sequence: Synthetic oligonucleotide
cuguguacaaugaggaaug

SEQ ID NO: 3247088 - RNA, 19 nt, Artificial Sequence
  Description of Artificial Sequence: Synthetic oligonucleotide
uggaaaugaauucaaucuu

SEQ ID NO: 3247089 - RNA, 19 nt, Artificial Sequence
  Description of Artificial Sequence: Synthetic oligonucleotide
aauauucacuugcgcuuuc

SEQ ID NO: 3247090 - RNA, 19 nt, Artificial Sequence
  Description of Artificial Sequence: Synthetic oligonucleotide
  modified_base (6)..(6): a, c, u, g, unknown or other
cuuuancucuccuacuaug

SEQ ID NO: 3247091 - RNA, 19 nt, Artificial Sequence
  Description of Artificial Sequence: Synthetic oligonucleotide
acgcuaauuguguugcuuc

SEQ ID NO: 3247092 - RNA, 19 nt, Artificial Sequence
  Description of Artificial Sequence: Synthetic oligonucleotide
uuauaaccuccuccaaaag

SEQ ID NO: 3247093 - RNA, 19 nt, Artificial Sequence
  Description of Artificial Sequence: Synthetic oligonucleotide
  modified_base (3)..(3): a, c, u, g, unknown or other
uancucuccuacuaugugu

SEQ ID NO: 3247094 - RNA, 19 nt, Artificial Sequence
  Description of Artificial Sequence: Synthetic oligonucleotide
cuaauuguguugcuucagc

SEQ ID NO: 3247095 - RNA, 19 nt, Artificial Sequence
  Description of Artificial Sequence: Synthetic oligonucleotide
gaaucaaucgguagaaauc

SEQ ID NO: 3247096 - RNA, 19 nt, Artificial Sequence
  Description of Artificial Sequence: Synthetic oligonucleotide
augcucauaauauucacuu

SEQ ID NO: 3247097 - RNA, 19 nt, Artificial Sequence
  Description of Artificial Sequence: Synthetic oligonucleotide
uuuugaugagaaccuuagc

SEQ ID NO: 3247098 - RNA, 19 nt, Artificial Sequence
  Description of Artificial Sequence: Synthetic oligonucleotide
agcgccauggccuuggcug

SEQ ID NO: 3247099 - RNA, 19 nt, Artificial Sequence
  Description of Artificial Sequence: Synthetic oligonucleotide
uacuauguguuucccguug

SEQ ID NO: 3247100 - RNA, 19 nt, Artificial Sequence
  Description of Artificial Sequence: Synthetic oligonucleotide
aagcguacagggcaacuug

SEQ ID NO: 3247101 - RNA, 19 nt, Artificial Sequence
  Description of Artificial Sequence: Synthetic oligonucleotide
aacguauccugcauaauga

SEQ ID NO: 3247102 - RNA, 19 nt, Artificial Sequence
  Description of Artificial Sequence: Synthetic oligonucleotide
auaaccuccuccaaaagca

SEQ ID NO: 3247103 - RNA, 19 nt, Artificial Sequence
  Description of Artificial Sequence: Synthetic oligonucleotide
cacuguauccugaagguuc

SEQ ID NO: 3247104 - RNA, 19 nt, Artificial Sequence
  Description of Artificial Sequence: Synthetic oligonucleotide
uaaugcucauaauauucac

SEQ ID NO: 3247105 - RNA, 19 nt, Artificial Sequence
  Description of Artificial Sequence: Synthetic oligonucleotide
aaugcucauaauauucacu

SEQ ID NO: 3247106 - RNA, 19 nt, Artificial Sequence
  Description of Artificial Sequence: Synthetic oligonucleotide
aacgucuucugaugccggg

SEQ ID NO: 3247107 - RNA, 19 nt, Artificial Sequence
  Description of Artificial Sequence: Synthetic oligonucleotide
guucuuggagcagaaaucc

SEQ ID NO: 3247108 - RNA, 19 nt, Artificial Sequence
  Description of Artificial Sequence: Synthetic oligonucleotide
ucuccuacuauguguuucc

SEQ ID NO: 3247109 - RNA, 19 nt, Artificial Sequence
  Description of Artificial Sequence: Synthetic oligonucleotide
uccaccaaaucgcucaccu

SEQ ID NO: 3247110 - RNA, 19 nt, Artificial Sequence
  Description of Artificial Sequence: Synthetic oligonucleotide
uagguuaacgucuucugau

SEQ ID NO: 3247111 - RNA, 19 nt, Artificial Sequence
  Description of Artificial Sequence: Synthetic oligonucleotide
caccauuguaugaaauucc

SEQ ID NO: 3247112 - RNA, 19 nt, Artificial Sequence
  Description of Artificial Sequence: Synthetic oligonucleotide
ucagacgcuaauuguguug

SEQ ID NO: 3247113 - RNA, 19 nt, Artificial Sequence
  Description of Artificial Sequence: Synthetic oligonucleotide
guacagggcaacuugcuug

SEQ ID NO: 3247114 - RNA, 19 nt, Artificial Sequence
  Description of Artificial Sequence: Synthetic oligonucleotide
uauucacuugcgcuuucag

SEQ ID NO: 3247115 - RNA, 19 nt, Artificial Sequence
  Description of Artificial Sequence: Synthetic oligonucleotide
auaaugaauucuguggcca

SEQ ID NO: 3247116 - RNA, 19 nt, Artificial Sequence
  Description of Artificial Sequence: Synthetic oligonucleotide
cauaauauucacuugcgcu

SEQ ID NO: 3247117 - RNA, 19 nt, Artificial Sequence
  Description of Artificial Sequence: Synthetic oligonucleotide
aacacgaugaugucaaagc

SEQ ID NO: 3247118 - RNA, 19 nt, Artificial Sequence
  Description of Artificial Sequence: Synthetic oligonucleotide
uaugacgucacauaguacg

SEQ ID NO: 3247119 - RNA, 19 nt, Artificial Sequence
  Description of Artificial Sequence: Synthetic oligonucleotide
acugccauauccuggaagc

SEQ ID NO: 3247120 - RNA, 19 nt, Artificial Sequence
  Description of Artificial Sequence: Synthetic oligonucleotide
  modified_base (4)..(4): a, c, u, g, unknown or other
auancuuuucuucaugcag

SEQ ID NO: 3247121 - RNA, 19 nt, Artificial Sequence
  Description of Artificial Sequence: Synthetic oligonucleotide
  modified_base (10)..(10): a, c, u, g, unknown or other
guaguaauancuuuucuuc

SEQ ID NO: 3247122 - RNA, 19 nt, Artificial Sequence
  Description of Artificial Sequence: Synthetic oligonucleotide
augaugucaaagcggaugc

SEQ ID NO: 3247123 - RNA, 19 nt, Artificial Sequence
  Description of Artificial Sequence: Synthetic oligonucleotide
uucccaaacacgaugaugu

SEQ ID NO: 3247124 - RNA, 19 nt, Artificial Sequence
  Description of Artificial Sequence: Synthetic oligonucleotide
uucguuaccagugaggucc

SEQ ID NO: 3247125 - RNA, 19 nt, Artificial Sequence
  Description of Artificial Sequence: Synthetic oligonucleotide
ugaaguuguagccaggaga

SEQ ID NO: 3247126 - RNA, 19 nt, Artificial Sequence
  Description of Artificial Sequence: Synthetic oligonucleotide
auauccuggaagcugugcc

SEQ ID NO: 3247127 - RNA, 19 nt, Artificial Sequence
  Description of Artificial Sequence: Synthetic oligonucleotide
  modified_base (6)..(6): a, c, u, g, unknown or other
uaauancuuuucuucaugc

SEQ ID NO: 3247128 - RNA, 19 nt, Artificial Sequence
  Description of Artificial Sequence: Synthetic oligonucleotide
  modified_base (5)..(5): a, c, u, g, unknown or other
aauancuuuucuucaugca

SEQ ID NO: 3247129 - RNA, 19 nt, Artificial Sequence
  Description of Artificial Sequence: Synthetic oligonucleotide
uucuucaugcaguagagga

SEQ ID NO: 3247130 - RNA, 19 nt, Artificial Sequence
  Description of Artificial Sequence: Synthetic oligonucleotide
uuuucuucaugcaguagag

SEQ ID NO: 3247131 - RNA, 19 nt, Artificial Sequence
  Description of Artificial Sequence: Synthetic oligonucleotide
ugaaggaauaccugggcag

SEQ ID NO: 3247132 - RNA, 19 nt, Artificial Sequence
  Description of Artificial Sequence: Synthetic oligonucleotide
uguaguacuuggcaaaccu

SEQ ID NO: 3247133 - RNA, 19 nt, Artificial Sequence
  Description of Artificial Sequence: Synthetic oligonucleotide
uacuuggcaaaccugaagu

SEQ ID NO: 3247134 - RNA, 19 nt, Artificial Sequence
  Description of Artificial Sequence: Synthetic oligonucleotide
gaugaugucaaacuuccca

SEQ ID NO: 3247135 - RNA, 19 nt, Artificial Sequence
  Description of Artificial Sequence: Synthetic oligonucleotide
  modified_base (3)..(3): a, c, u, g, unknown or other
uancuuuucuucaugcagu

SEQ ID NO: 3247136 - RNA, 19 nt, Artificial Sequence
  Description of Artificial Sequence: Synthetic oligonucleotide
aguagugccaagccagagc

SEQ ID NO: 3247137 - RNA, 19 nt, Artificial Sequence
  Description of Artificial Sequence: Synthetic oligonucleotide
acauaguacggucgcaccc

SEQ ID NO: 3247138 - RNA, 19 nt, Artificial Sequence
  Description of Artificial Sequence: Synthetic oligonucleotide
cacgauuuugccgagacgg

SEQ ID NO: 3247139 - RNA, 19 nt, Artificial Sequence
  Description of Artificial Sequence: Synthetic oligonucleotide
caaaccugaaguuguagcc

SEQ ID NO: 3247140 - RNA, 19 nt, Artificial Sequence
  Description of Artificial Sequence: Synthetic oligonucleotide
augaugucaaacuucccag

SEQ ID NO: 3247141 - RNA, 19 nt, Artificial Sequence
  Description of Artificial Sequence: Synthetic oligonucleotide
gaugagugugcgcuguucg

SEQ ID NO: 3247142 - RNA, 19 nt, Artificial Sequence
  Description of Artificial Sequence: Synthetic oligonucleotide
gaugucaaacuucccagcc

SEQ ID NO: 3247143 - RNA, 19 nt, Artificial Sequence
  Description of Artificial Sequence: Synthetic oligonucleotide
uaguacuuggcaaaccuga

SEQ ID NO: 3247144 - RNA, 19 nt, Artificial Sequence
  Description of Artificial Sequence: Synthetic oligonucleotide
ucccacuugaccuggaugc

SEQ ID NO: 3247145 - RNA, 19 nt, Artificial Sequence
  Description of Artificial Sequence: Synthetic oligonucleotide
accuggaugcccaugaugc

SEQ ID NO: 3247146 - RNA, 19 nt, Artificial Sequence
  Description of Artificial Sequence: Synthetic oligonucleotide
acacgaugaugucaaagcg

SEQ ID NO: 3247147 - RNA, 19 nt, Artificial Sequence
  Description of Artificial Sequence: Synthetic oligonucleotide
gaagcugugcccugcaucc

SEQ ID NO: 3247148 - RNA, 19 nt, Artificial Sequence
  Description of Artificial Sequence: Synthetic oligonucleotide
aguuguagccaggagacac

SEQ ID NO: 3247149 - RNA, 19 nt, Artificial Sequence
  Description of Artificial Sequence: Synthetic oligonucleotide
gaugucaaagcggaugccg

SEQ ID NO: 3247150 - RNA, 19 nt, Artificial Sequence
  Description of Artificial Sequence: Synthetic oligonucleotide
aauguugaucaugguaggg

SEQ ID NO: 3247151 - RNA, 19 nt, Artificial Sequence
  Description of Artificial Sequence: Synthetic oligonucleotide
gaugaugucaaagcggaug

SEQ ID NO: 3247152 - RNA, 19 nt, Artificial Sequence
  Description of Artificial Sequence: Synthetic oligonucleotide
uaccugggcaggcagaggg

SEQ ID NO: 3247153 - RNA, 19 nt, Artificial Sequence
  Description of Artificial Sequence: Synthetic oligonucleotide
  modified_base (9)..(9): a, c, u, g, unknown or other
uaguaauancuuuucuuca

SEQ ID NO: 3247154 - RNA, 19 nt, Artificial Sequence
  Description of Artificial Sequence: Synthetic oligonucleotide
uaugccuugaugagugugc

SEQ ID NO: 3247155 - RNA, 19 nt, Artificial Sequence
  Description of Artificial Sequence: Synthetic oligonucleotide
aaccugaaguuguagccag

SEQ ID NO: 3247156 - RNA, 19 nt, Artificial Sequence
  Description of Artificial Sequence: Synthetic oligonucleotide
aaagcggaugccguaugcc

SEQ ID NO: 3247157 - RNA, 19 nt, Artificial Sequence
  Description of Artificial Sequence: Synthetic oligonucleotide
ucccucaacugccauaucc

SEQ ID NO: 3247158 - RNA, 19 nt, Artificial Sequence
  Description of Artificial Sequence: Synthetic oligonucleotide
guagugccaagccagagcc

SEQ ID NO: 3247159 - RNA, 19 nt, Artificial Sequence
  Description of Artificial Sequence: Synthetic oligonucleotide
  modified_base (7)..(7): a, c, u, g, unknown or other
guaauancuuuucuucaug

SEQ ID NO: 3247160 - RNA, 19 nt, Artificial Sequence
  Description of Artificial Sequence: Synthetic oligonucleotide
ccaauguugaucaugguag

SEQ ID NO: 3247161 - RNA, 19 nt, Artificial Sequence
  Description of Artificial Sequence: Synthetic oligonucleotide
aaacacgaugaugucaaag

SEQ ID NO: 3247162 - RNA, 19 nt, Artificial Sequence
  Description of Artificial Sequence: Synthetic oligonucleotide
gaaguuguagccaggagac

SEQ ID NO: 3247163 - RNA, 19 nt, Artificial Sequence
  Description of Artificial Sequence: Synthetic oligonucleotide
uccuccacgauuuugccga

SEQ ID NO: 3247164 - RNA, 19 nt, Artificial Sequence
  Description of Artificial Sequence: Synthetic oligonucleotide
cacgaugaugucaaagcgg

SEQ ID NO: 3247165 - RNA, 19 nt, Artificial Sequence
  Description of Artificial Sequence: Synthetic oligonucleotide
aacugccauauccuggaag

SEQ ID NO: 3247166 - RNA, 19 nt, Artificial Sequence
  Description of Artificial Sequence: Synthetic oligonucleotide
uugccgagacggaauaugg

SEQ ID NO: 3247167 - RNA, 19 nt, Artificial Sequence
  Description of Artificial Sequence: Synthetic oligonucleotide
uuggcaaaccugaaguugu

SEQ ID NO: 3247168 - RNA, 19 nt, Artificial Sequence
  Description of Artificial Sequence: Synthetic oligonucleotide
gagccaauguugaucaugg

SEQ ID NO: 3247169 - RNA, 19 nt, Artificial Sequence
  Description of Artificial Sequence: Synthetic oligonucleotide
  modified_base (8)..(8): a, c, u, g, unknown or other
aguaauancuuuucuucau

SEQ ID NO: 3247170 - RNA, 19 nt, Artificial Sequence
  Description of Artificial Sequence: Synthetic oligonucleotide
gugucaaggcgccugaagg

SEQ ID NO: 3247171 - RNA, 19 nt, Artificial Sequence
  Description of Artificial Sequence: Synthetic oligonucleotide
ucaacugccauauccugga

SEQ ID NO: 3247172 - RNA, 19 nt, Artificial Sequence
  Description of Artificial Sequence: Synthetic oligonucleotide
caagccagagccaauguug

SEQ ID NO: 3247173 - RNA, 19 nt, Artificial Sequence
  Description of Artificial Sequence: Synthetic oligonucleotide
acuaugacgucacauagua

SEQ ID NO: 3247174 - RNA, 19 nt, Artificial Sequence
  Description of Artificial Sequence: Synthetic oligonucleotide
uugaucaugguagggauga

SEQ ID NO: 3247175 - RNA, 19 nt, Artificial Sequence
  Description of Artificial Sequence: Synthetic oligonucleotide
guagccaggagacacguug

SEQ ID NO: 3247176 - RNA, 19 nt, Artificial Sequence
  Description of Artificial Sequence: Synthetic oligonucleotide
cacguugugcuccaggucc

SEQ ID NO: 3247177 - RNA, 19 nt, Artificial Sequence
  Description of Artificial Sequence: Synthetic oligonucleotide
uguucguuaccagugaggu

SEQ ID NO: 3247178 - RNA, 19 nt, Artificial Sequence
  Description of Artificial Sequence: Synthetic oligonucleotide
aauaccugggcaggcagag

SEQ ID NO: 3247179 - RNA, 19 nt, Artificial Sequence
  Description of Artificial Sequence: Synthetic oligonucleotide
cuuuucuucaugcaguaga

SEQ ID NO: 3247180 - RNA, 19 nt, Artificial Sequence
  Description of Artificial Sequence: Synthetic oligonucleotide
accagugagguccuuguag

SEQ ID NO: 3247181 - RNA, 19 nt, Artificial Sequence
  Description of Artificial Sequence: Synthetic oligonucleotide
ucuucaugcaguagaggac

SEQ ID NO: 3247182 - RNA, 19 nt, Artificial Sequence
  Description of Artificial Sequence: Synthetic oligonucleotide
cucaacugccauauccugg

SEQ ID NO: 3247183 - RNA, 19 nt, Artificial Sequence
  Description of Artificial Sequence: Synthetic oligonucleotide
agguccuuguaguacuugg

SEQ ID NO: 3247184 - RNA, 19 nt, Artificial Sequence
  Description of Artificial Sequence: Synthetic oligonucleotide
aaacuucccagccuuccca

SEQ ID NO: 3247185 - RNA, 19 nt, Artificial Sequence
  Description of Artificial Sequence: Synthetic oligonucleotide
gaaggaauaccugggcagg

SEQ ID NO: 3247186 - RNA, 19 nt, Artificial Sequence
  Description of Artificial Sequence: Synthetic oligonucleotide
aaggaauaccugggcaggc

SEQ ID NO: 3247187 - RNA, 19 nt, Artificial Sequence
  Description of Artificial Sequence: Synthetic oligonucleotide
ugcaguagaggacuaugac

SEQ ID NO: 3247188 - RNA, 19 nt, Artificial Sequence
  Description of Artificial Sequence: Synthetic oligonucleotide
agugagguccuuguaguac

SEQ ID NO: 3247189 - RNA, 19 nt, Artificial Sequence
  Description of Artificial Sequence: Synthetic oligonucleotide
gcaguagaggacuaugacg

SEQ ID NO: 3247190 - RNA, 19 nt, Artificial Sequence
  Description of Artificial Sequence: Synthetic oligonucleotide
guugcagucccacuugacc

SEQ ID NO: 3247191 - RNA, 19 nt, Artificial Sequence
  Description of Artificial Sequence: Synthetic oligonucleotide
augccguaugccuugauga

SEQ ID NO: 3247192 - RNA, 19 nt, Artificial Sequence
  Description of Artificial Sequence: Synthetic oligonucleotide
uugaccuggaugcccauga

SEQ ID NO: 3247193 - RNA, 19 nt, Artificial Sequence
  Description of Artificial Sequence: Synthetic oligonucleotide
caauguugaucaugguagg

SEQ ID NO: 3247194 - RNA, 19 nt, Artificial Sequence
  Description of Artificial Sequence: Synthetic oligonucleotide
uugcagucccacuugaccu

SEQ ID NO: 3247195 - RNA, 19 nt, Artificial Sequence
  Description of Artificial Sequence: Synthetic oligonucleotide
ugaugucaaacuucccagc

SEQ ID NO: 3247196 - RNA, 19 nt, Artificial Sequence
  Description of Artificial Sequence: Synthetic oligonucleotide
aagguugcagucccacuug

SEQ ID NO: 3247197 - RNA, 19 nt, Artificial Sequence
  Description of Artificial Sequence: Synthetic oligonucleotide
uguugaucaugguagggau

SEQ ID NO: 3247198 - RNA, 19 nt, Artificial Sequence
  Description of Artificial Sequence: Synthetic oligonucleotide
aaaccugaaguuguagcca

SEQ ID NO: 3247199 - RNA, 19 nt, Artificial Sequence
  Description of Artificial Sequence: Synthetic oligonucleotide
gaugccguaugccuugaug

SEQ ID NO: 3247200 - RNA, 19 nt, Artificial Sequence
  Description of Artificial Sequence: Synthetic oligonucleotide
uccacgauuuugccgagac

SEQ ID NO: 3247201 - RNA, 19 nt, Artificial Sequence
  Description of Artificial Sequence: Synthetic oligonucleotide
  modified_base (2)..(2): a, c, u, g, unknown or other
ancuuuucuucaugcagua

SEQ ID NO: 3247202 - RNA, 19 nt, Artificial Sequence
  Description of Artificial Sequence: Synthetic oligonucleotide
uauccuggaagcugugccc

SEQ ID NO: 3247203 - RNA, 19 nt, Artificial Sequence
  Description of Artificial Sequence: Synthetic oligonucleotide
ugucaaacuucccagccuu

SEQ ID NO: 3247204 - RNA, 19 nt, Artificial Sequence
  Description of Artificial Sequence: Synthetic oligonucleotide
ucugucaagguugcagucc

SEQ ID NO: 3247205 - RNA, 19 nt, Artificial Sequence
  Description of Artificial Sequence: Synthetic oligonucleotide
ugaugccucccucaacugc

SEQ ID NO: 3247206 - RNA, 19 nt, Artificial Sequence
  Description of Artificial Sequence: Synthetic oligonucleotide
aagcggaugccguaugccu

SEQ ID NO: 3247207 - RNA, 19 nt, Artificial Sequence
  Description of Artificial Sequence: Synthetic oligonucleotide
uuugccgagacggaauaug

SEQ ID NO: 3247208 - RNA, 19 nt, Artificial Sequence
  Description of Artificial Sequence: Synthetic oligonucleotide
aucaugguagggaugaugu

SEQ ID NO: 3247209 - RNA, 19 nt, Artificial Sequence
  Description of Artificial Sequence: Synthetic oligonucleotide
aggagacacguugugcucc

SEQ ID NO: 3247210 - RNA, 19 nt, Artificial Sequence
  Description of Artificial Sequence: Synthetic oligonucleotide
uuucuucaugcaguagagg

SEQ ID NO: 3247211 - RNA, 19 nt, Artificial Sequence
  Description of Artificial Sequence: Synthetic oligonucleotide
cuguucguuaccagugagg

SEQ ID NO: 3247212 - RNA, 19 nt, Artificial Sequence
  Description of Artificial Sequence: Synthetic oligonucleotide
ugccgagacggaauauggg

SEQ ID NO: 3247213 - RNA, 19 nt, Artificial Sequence
  Description of Artificial Sequence: Synthetic oligonucleotide
ugucaaggcgccugaagga

SEQ ID NO: 3247214 - RNA, 19 nt, Artificial Sequence
  Description of Artificial Sequence: Synthetic oligonucleotide
uagaggacuaugacgucac

SEQ ID NO: 3247215 - RNA, 19 nt, Artificial Sequence
  Description of Artificial Sequence: Synthetic oligonucleotide
ggacuaugacgucacauag

SEQ ID NO: 3247216 - RNA, 19 nt, Artificial Sequence
  Description of Artificial Sequence: Synthetic oligonucleotide
cuuggcaaaccugaaguug

SEQ ID NO: 3247217 - RNA, 19 nt, Artificial Sequence
  Description of Artificial Sequence: Synthetic oligonucleotide
aauuuugucacauugggug

SEQ ID NO: 3247218 - RNA, 19 nt, Artificial Sequence
  Description of Artificial Sequence: Synthetic oligonucleotide
uauauuauuagccacaagu

SEQ ID NO: 3247219 - RNA, 19 nt, Artificial Sequence
  Description of Artificial Sequence: Synthetic oligonucleotide
uucauaacuucuuugaucg

SEQ ID NO: 3247220 - RNA, 19 nt, Artificial Sequence
  Description of Artificial Sequence: Synthetic oligonucleotide
aacccaagcagcuacagcc

SEQ ID NO: 3247221 - RNA, 19 nt, Artificial Sequence
  Description of Artificial Sequence: Synthetic oligonucleotide
auuuauuauauuauuagcc

SEQ ID NO: 3247222 - RNA, 19 nt, Artificial Sequence
  Description of Artificial Sequence: Synthetic oligonucleotide
aaugaguugaauuuuguca

SEQ ID NO: 3247223 - RNA, 19 nt, Artificial Sequence
  Description of Artificial Sequence: Synthetic oligonucleotide
ugauuuauuauauuauuag

SEQ ID NO: 3247224 - RNA, 19 nt, Artificial Sequence
  Description of Artificial Sequence: Synthetic oligonucleotide
ugaauuuugucacauuggg

SEQ ID NO: 3247225 - RNA, 19 nt, Artificial Sequence
  Description of Artificial Sequence: Synthetic oligonucleotide
uuuauuauauuauuagcca

SEQ ID NO: 3247226 - RNA, 19 nt, Artificial Sequence
  Description of Artificial Sequence: Synthetic oligonucleotide
cuuugaaugauaauggaag

SEQ ID NO: 3247227 - RNA, 19 nt, Artificial Sequence
  Description of Artificial Sequence: Synthetic oligonucleotide
ugugcuauguaccacuugg

SEQ ID NO: 3247228 - RNA, 19 nt, Artificial Sequence
  Description of Artificial Sequence: Synthetic oligonucleotide
uggaaaauaacuccaagga

SEQ ID NO: 3247229 - RNA, 19 nt, Artificial Sequence
  Description of Artificial Sequence: Synthetic oligonucleotide
gauuuauuauauuauuagc

SEQ ID NO: 3247230 - RNA, 19 nt, Artificial Sequence
  Description of Artificial Sequence: Synthetic oligonucleotide
augaguugaauuuugucac

SEQ ID NO: 3247231 - RNA, 19 nt, Artificial Sequence
  Description of Artificial Sequence: Synthetic oligonucleotide
guauagauaacccaagcag

SEQ ID NO: 3247232 - RNA, 19 nt, Artificial Sequence
  Description of Artificial Sequence: Synthetic oligonucleotide
uuuaucagaucuaaaaguc

SEQ ID NO: 3247233 - RNA, 19 nt, Artificial Sequence
  Description of Artificial Sequence: Synthetic oligonucleotide
aaaugaguugaauuuuguc

SEQ ID NO: 3247234 - RNA, 19 nt, Artificial Sequence
  Description of Artificial Sequence: Synthetic oligonucleotide
aaagaacuaaaugcugucc

SEQ ID NO: 3247235 - RNA, 19 nt, Artificial Sequence
  Description of Artificial Sequence: Synthetic oligonucleotide
gaaauauucuagacgaugg

SEQ ID NO: 3247236 - RNA, 19 nt, Artificial Sequence
  Description of Artificial Sequence: Synthetic oligonucleotide
auuuaucagaucuaaaagu

SEQ ID NO: 3247237 - RNA, 19 nt, Artificial Sequence
  Description of Artificial Sequence: Synthetic oligonucleotide
uauuauauuauuagccaca

SEQ ID NO: 3247238 - RNA, 19 nt, Artificial Sequence
  Description of Artificial Sequence: Synthetic oligonucleotide
aacauuucuucuuccagag

SEQ ID NO: 3247239 - RNA, 19 nt, Artificial Sequence
  Description of Artificial Sequence: Synthetic oligonucleotide
ucugcauauaugcugacug

SEQ ID NO: 3247240 - RNA, 19 nt, Artificial Sequence
  Description of Artificial Sequence: Synthetic oligonucleotide
ugauuuaucagaucuaaaa

SEQ ID NO: 3247241 - RNA, 19 nt, Artificial Sequence
  Description of Artificial Sequence: Synthetic oligonucleotide
uugaauuuugucacauugg

SEQ ID NO: 3247242 - RNA, 19 nt, Artificial Sequence
  Description of Artificial Sequence: Synthetic oligonucleotide
aaacugaaaggcuugaaau

SEQ ID NO: 3247243 - RNA, 19 nt, Artificial Sequence
  Description of Artificial Sequence: Synthetic oligonucleotide
agaguaaaagaacuaaaug

SEQ ID NO: 3247244 - RNA, 19 nt, Artificial Sequence
  Description of Artificial Sequence: Synthetic oligonucleotide
uauuauuagccacaagucu

SEQ ID NO: 3247245 - RNA, 19 nt, Artificial Sequence
  Description of Artificial Sequence: Synthetic oligonucleotide
uauuucugcauauaugcug

SEQ ID NO: 3247246 - RNA, 19 nt, Artificial Sequence
  Description of Artificial Sequence: Synthetic oligonucleotide
aaaagcuaugccuucccag

SEQ ID NO: 3247247 - RNA, 19 nt, Artificial Sequence
  Description of Artificial Sequence: Synthetic oligonucleotide
uuucauuuaugugagagga

SEQ ID NO: 3247248 - RNA, 19 nt, Artificial Sequence
  Description of Artificial Sequence: Synthetic oligonucleotide
cauaauugcagcaaacaug

SEQ ID NO: 3247249 - RNA, 19 nt, Artificial Sequence
  Description of Artificial Sequence: Synthetic oligonucleotide
uguuucauuuaugugagag

SEQ ID NO: 3247250 - RNA, 19 nt, Artificial Sequence
  Description of Artificial Sequence: Synthetic oligonucleotide
cauguuacuagucuuauuc

SEQ ID NO: 3247251 - RNA, 19 nt, Artificial Sequence
  Description of Artificial Sequence: Synthetic oligonucleotide
uguggcacaggguacaggg

SEQ ID NO: 3247252 - RNA, 19 nt, Artificial Sequence
  Description of Artificial Sequence: Synthetic oligonucleotide
aagaacuaaaugcugucca

SEQ ID NO: 3247253 - RNA, 19 nt, Artificial Sequence
  Description of Artificial Sequence: Synthetic oligonucleotide
uuauuauauuauuagccac

SEQ ID NO: 3247254 - RNA, 19 nt, Artificial Sequence
  Description of Artificial Sequence: Synthetic oligonucleotide
uagacgauggaaaucaggu

SEQ ID NO: 3247255 - RNA, 19 nt, Artificial Sequence
  Description of Artificial Sequence: Synthetic oligonucleotide
aauugcagcaaacauguua

SEQ ID NO: 3247256 - RNA, 19 nt, Artificial Sequence
  Description of Artificial Sequence: Synthetic oligonucleotide
aaacauuucuucuuccaga

SEQ ID NO: 3247257 - RNA, 19 nt, Artificial Sequence
  Description of Artificial Sequence: Synthetic oligonucleotide
ucugguauagauaacccaa

SEQ ID NO: 3247258 - RNA, 19 nt, Artificial Sequence
  Description of Artificial Sequence: Synthetic oligonucleotide
uccauguggacaaaguuca

SEQ ID NO: 3247259 - RNA, 19 nt, Artificial Sequence
  Description of Artificial Sequence: Synthetic oligonucleotide
agauaacccaagcagcuac

SEQ ID NO: 3247260 - RNA, 19 nt, Artificial Sequence
  Description of Artificial Sequence: Synthetic oligonucleotide
uucaacuucuaaauacugc

SEQ ID NO: 3247261 - RNA, 19 nt, Artificial Sequence
  Description of Artificial Sequence: Synthetic oligonucleotide
uucuuugaucguuugaccc

SEQ ID NO: 3247262 - RNA, 19 nt, Artificial Sequence
  Description of Artificial Sequence: Synthetic oligonucleotide
gaauugauuuaucagaucu

SEQ ID NO: 3247263 - RNA, 19 nt, Artificial Sequence
  Description of Artificial Sequence: Synthetic oligonucleotide
uuauugauggguggaaacg

SEQ ID NO: 3247264 - RNA, 19 nt, Artificial Sequence
  Description of Artificial Sequence: Synthetic oligonucleotide
ucuaaaagucuucugguau

SEQ ID NO: 3247265 - RNA, 19 nt, Artificial Sequence
  Description of Artificial Sequence: Synthetic oligonucleotide
aagaaaagcuaugccuucc

SEQ ID NO: 3247266 - RNA, 19 nt, Artificial Sequence
  Description of Artificial Sequence: Synthetic oligonucleotide
cauguuucauuuaugugag

SEQ ID NO: 3247267 - RNA, 19 nt, Artificial Sequence
  Description of Artificial Sequence: Synthetic oligonucleotide
auaauugcagcaaacaugu

SEQ ID NO: 3247268 - RNA, 19 nt, Artificial Sequence
  Description of Artificial Sequence: Synthetic oligonucleotide
uugauuuauuauauuauua

SEQ ID NO: 3247269 - RNA, 19 nt, Artificial Sequence
  Description of Artificial Sequence: Synthetic oligonucleotide
uaugugagaggaacuauug

SEQ ID NO: 3247270 - RNA, 19 nt, Artificial Sequence
  Description of Artificial Sequence: Synthetic oligonucleotide
ucuauuugaucuguggugc

SEQ ID NO: 3247271 - RNA, 19 nt, Artificial Sequence
  Description of Artificial Sequence: Synthetic oligonucleotide
aacgcuauuauuucugcau

SEQ ID NO: 3247272 - RNA, 19 nt, Artificial Sequence
  Description of Artificial Sequence: Synthetic oligonucleotide
agcugugucuauuugaucu

SEQ ID NO: 3247273 - RNA, 19 nt, Artificial Sequence
  Description of Artificial Sequence: Synthetic oligonucleotide
ucuuccagagaguaaaaga

SEQ ID NO: 3247274 - RNA, 19 nt, Artificial Sequence
  Description of Artificial Sequence: Synthetic oligonucleotide
aaagcuaugccuucccagu

SEQ ID NO: 3247275 - RNA, 19 nt, Artificial Sequence
  Description of Artificial Sequence: Synthetic oligonucleotide
auauuauuagccacaaguc

SEQ ID NO: 3247276 - RNA, 19 nt, Artificial Sequence
  Description of Artificial Sequence: Synthetic oligonucleotide
uuuuccaaacauuucuucu

SEQ ID NO: 3247277 - RNA, 19 nt, Artificial Sequence
  Description of Artificial Sequence: Synthetic oligonucleotide
auuuugucacauugggugg

SEQ ID NO: 3247278 - RNA, 19 nt, Artificial Sequence
  Description of Artificial Sequence: Synthetic oligonucleotide
uggaaaguguuccaugagc

SEQ ID NO: 3247279 - RNA, 19 nt, Artificial Sequence
  Description of Artificial Sequence: Synthetic oligonucleotide
ugaauggcaaaugaguuga

SEQ ID NO: 3247280 - RNA, 19 nt, Artificial Sequence
  Description of Artificial Sequence: Synthetic oligonucleotide
ugagcaccugaaaauaaag

SEQ ID NO: 3247281 - RNA, 19 nt, Artificial Sequence
  Description of Artificial Sequence: Synthetic oligonucleotide
aaggcuugaaauauucuag

SEQ ID NO: 3247282 - RNA, 19 nt, Artificial Sequence
  Description of Artificial Sequence: Synthetic oligonucleotide
acaaaguucaacuucuaaa

SEQ ID NO: 3247283 - RNA, 19 nt, Artificial Sequence
  Description of Artificial Sequence: Synthetic oligonucleotide
uguugguggaacauucugc

SEQ ID NO: 3247284 - RNA, 19 nt, Artificial Sequence
  Description of Artificial Sequence: Synthetic oligonucleotide
uucuagacgauggaaauca

SEQ ID NO: 3247285 - RNA, 19 nt, Artificial Sequence
  Description of Artificial Sequence: Synthetic oligonucleotide
aaaauaacuccaaggaaga

SEQ ID NO: 3247286 - RNA, 19 nt, Artificial Sequence
  Description of Artificial Sequence: Synthetic oligonucleotide
uucuucuccaagcagugug

SEQ ID NO: 3247287 - RNA, 19 nt, Artificial Sequence
  Description of Artificial Sequence: Synthetic oligonucleotide
uggacaaaguucaacuucu

SEQ ID NO: 3247288 - RNA, 19 nt, Artificial Sequence
  Description of Artificial Sequence: Synthetic oligonucleotide
ugaacacuuugaaugauaa

SEQ ID NO: 3247289 - RNA, 19 nt, Artificial Sequence
  Description of Artificial Sequence: Synthetic oligonucleotide
ucauuuaugugagaggaac

SEQ ID NO: 3247290 - RNA, 19 nt, Artificial Sequence
  Description of Artificial Sequence: Synthetic oligonucleotide
aacauucugcagcuguguc

SEQ ID NO: 3247291 - RNA, 19 nt, Artificial Sequence
  Description of Artificial Sequence: Synthetic oligonucleotide
cuagucuuauucuggaaag

SEQ ID NO: 3247292 - RNA, 19 nt, Artificial Sequence
  Description of Artificial Sequence: Synthetic oligonucleotide
guuucauuuaugugagagg

SEQ ID NO: 3247293 - RNA, 19 nt, Artificial Sequence
  Description of Artificial Sequence: Synthetic oligonucleotide
ugucuauuugaucuguggu

SEQ ID NO: 3247294 - RNA, 19 nt, Artificial Sequence
  Description of Artificial Sequence: Synthetic oligonucleotide
ugugagaggaacuauugau

SEQ ID NO: 3247295 - RNA, 19 nt, Artificial Sequence
  Description of Artificial Sequence: Synthetic oligonucleotide
auuauuagccacaagucug

SEQ ID NO: 3247296 - RNA, 19 nt, Artificial Sequence
  Description of Artificial Sequence: Synthetic oligonucleotide
agucuucugguauagauaa

SEQ ID NO: 3247297 - RNA, 19 nt, Artificial Sequence
  Description of Artificial Sequence: Synthetic oligonucleotide
aauaacuccaaggaagaaa

SEQ ID NO: 3247298 - RNA, 19 nt, Artificial Sequence
  Description of Artificial Sequence: Synthetic oligonucleotide
guuacuagucuuauucugg

SEQ ID NO: 3247299 - RNA, 19 nt, Artificial Sequence
  Description of Artificial Sequence: Synthetic oligonucleotide
ugaucuguggugcaguuuc

SEQ ID NO: 3247300 - RNA, 19 nt, Artificial Sequence
  Description of Artificial Sequence: Synthetic oligonucleotide
uuauuagccacaagucuga

SEQ ID NO: 3247301 - RNA, 19 nt, Artificial Sequence
  Description of Artificial Sequence: Synthetic oligonucleotide
gaacuauugauuuauuaua

SEQ ID NO: 3247302 - RNA, 19 nt, Artificial Sequence
  Description of Artificial Sequence: Synthetic oligonucleotide
aauauucuagacgauggaa

SEQ ID NO: 3247303 - RNA, 19 nt, Artificial Sequence
  Description of Artificial Sequence: Synthetic oligonucleotide
ucuuauucuggaaaguguu

SEQ ID NO: 3247304 - RNA, 19 nt, Artificial Sequence
  Description of Artificial Sequence: Synthetic oligonucleotide
auguggacaaaguucaacu

SEQ ID NO: 3247305 - RNA, 19 nt, Artificial Sequence
  Description of Artificial Sequence: Synthetic oligonucleotide
uucaugcuguggcacaggg

SEQ ID NO: 3247306 - RNA, 19 nt, Artificial Sequence
  Description of Artificial Sequence: Synthetic oligonucleotide
uaucagaucuaaaagucuu

SEQ ID NO: 3247307 - RNA, 19 nt, Artificial Sequence
  Description of Artificial Sequence: Synthetic oligonucleotide
ucguuugacccaugaaugg

SEQ ID NO: 3247308 - RNA, 19 nt, Artificial Sequence
  Description of Artificial Sequence: Synthetic oligonucleotide
auuggguggaaaauaacuc

SEQ ID NO: 3247309 - RNA, 19 nt, Artificial Sequence
  Description of Artificial Sequence: Synthetic oligonucleotide
uugcaguucaugcuguggc

SEQ ID NO: 3247310 - RNA, 19 nt, Artificial Sequence
  Description of Artificial Sequence: Synthetic oligonucleotide
ugguauagauaacccaagc

SEQ ID NO: 3247311 - RNA, 19 nt, Artificial Sequence
  Description of Artificial Sequence: Synthetic oligonucleotide
cuuguugcaguucaugcug

SEQ ID NO: 3247312 - RNA, 19 nt, Artificial Sequence
  Description of Artificial Sequence: Synthetic oligonucleotide
aacuauugauuuauuauau

SEQ ID NO: 3247313 - RNA, 19 nt, Artificial Sequence
  Description of Artificial Sequence: Synthetic oligonucleotide
augaauggcaaaugaguug

SEQ ID NO: 3247314 - RNA, 19 nt, Artificial Sequence
  Description of Artificial Sequence: Synthetic oligonucleotide
gaaacgcuauuauuucugc

SEQ ID NO: 3247315 - RNA, 19 nt, Artificial Sequence
  Description of Artificial Sequence: Synthetic oligonucleotide
cuagacgauggaaaucagg

SEQ ID NO: 3247316 - RNA, 19 nt, Artificial Sequence
  Description of Artificial Sequence: Synthetic oligonucleotide
acuagucuuauucuggaaa

SEQ ID NO: 3247317 - RNA, 19 nt, Artificial Sequence
  Description of Artificial Sequence: Synthetic oligonucleotide
cacaaaauuggaaagaagc

SEQ ID NO: 3247318 - RNA, 19 nt, Artificial Sequence
  Description of Artificial Sequence: Synthetic oligonucleotide
aaggcaaggaaacauccac

SEQ ID NO: 3247319 - RNA, 19 nt, Artificial Sequence
  Description of Artificial Sequence: Synthetic oligonucleotide
guugaugacaucuggaucc

SEQ ID NO: 3247320 - RNA, 19 nt, Artificial Sequence
  Description of Artificial Sequence: Synthetic oligonucleotide
uacgcaaccaaucugggcc

SEQ ID NO: 3247321 - RNA, 19 nt, Artificial Sequence
  Description of Artificial Sequence: Synthetic oligonucleotide
cuuuacgcaaccaaucugg

SEQ ID NO: 3247322 - RNA, 19 nt, Artificial Sequence
  Description of Artificial Sequence: Synthetic oligonucleotide
augcacgaaaacuuuacgc

SEQ ID NO: 3247323 - RNA, 19 nt, Artificial Sequence
  Description of Artificial Sequence: Synthetic oligonucleotide
uuucugacuacaccgaagc

SEQ ID NO: 3247324 - RNA, 19 nt, Artificial Sequence
  Description of Artificial Sequence: Synthetic oligonucleotide
acuacaccgaagcagagag

SEQ ID NO: 3247325 - RNA, 19 nt, Artificial Sequence
  Description of Artificial Sequence: Synthetic oligonucleotide
gcuauuucugacuacaccg

SEQ ID NO: 3247326 - RNA, 19 nt, Artificial Sequence
  Description of Artificial Sequence: Synthetic oligonucleotide
auuucuguucccucgcccc

SEQ ID NO: 3247327 - RNA, 19 nt, Artificial Sequence
  Description of Artificial Sequence: Synthetic oligonucleotide
agcuauuucugacuacacc

SEQ ID NO: 3247328 - RNA, 19 nt, Artificial Sequence
  Description of Artificial Sequence: Synthetic oligonucleotide
ugcacgaaaacuuuacgca

SEQ ID NO: 3247329 - RNA, 19 nt, Artificial Sequence
  Description of Artificial Sequence: Synthetic oligonucleotide
aacuuuacgcaaccaaucu

SEQ ID NO: 3247330 - RNA, 19 nt, Artificial Sequence
  Description of Artificial Sequence: Synthetic oligonucleotide
uauucuaugggcagagcug

SEQ ID NO: 3247331 - RNA, 19 nt, Artificial Sequence
  Description of Artificial Sequence: Synthetic oligonucleotide
aaacuuuacgcaaccaauc

SEQ ID NO: 3247332 - RNA, 19 nt, Artificial Sequence
  Description of Artificial Sequence: Synthetic oligonucleotide
acgacuuucccugugagac

SEQ ID NO: 3247333 - RNA, 19 nt, Artificial Sequence
  Description of Artificial Sequence: Synthetic oligonucleotide
acgaaaacuuuacgcaacc

SEQ ID NO: 3247334 - RNA, 19 nt, Artificial Sequence
  Description of Artificial Sequence: Synthetic oligonucleotide
aaccacgagccguaggucg

SEQ ID NO: 3247335 - RNA, 19 nt, Artificial Sequence
  Description of Artificial Sequence: Synthetic oligonucleotide
aaacauccacgacuuuccc

SEQ ID NO: 3247336 - RNA, 19 nt, Artificial Sequence
  Description of Artificial Sequence: Synthetic oligonucleotide
ucucucgugaaccacgagc

SEQ ID NO: 3247337 - RNA, 19 nt, Artificial Sequence
  Description of Artificial Sequence: Synthetic oligonucleotide
ucugacuacaccgaagcag

SEQ ID NO: 3247338 - RNA, 19 nt, Artificial Sequence
  Description of Artificial Sequence: Synthetic oligonucleotide
auuggaaagaagccuuagg

SEQ ID NO: 3247339 - RNA, 19 nt, Artificial Sequence
  Description of Artificial Sequence: Synthetic oligonucleotide
auauucuaugggcagagcu

SEQ ID NO: 3247340 - RNA, 19 nt, Artificial Sequence
  Description of Artificial Sequence: Synthetic oligonucleotide
agcacacaaaauuggaaag

SEQ ID NO: 3247341 - RNA, 19 nt, Artificial Sequence
  Description of Artificial Sequence: Synthetic oligonucleotide
uguacagcggaccaugcac

SEQ ID NO: 3247342 - RNA, 19 nt, Artificial Sequence
  Description of Artificial Sequence: Synthetic oligonucleotide
ugaaccacgagccguaggu

SEQ ID NO: 3247343 - RNA, 19 nt, Artificial Sequence
  Description of Artificial Sequence: Synthetic oligonucleotide
acauccacgacuuucccug

SEQ ID NO: 3247344 - RNA, 19 nt, Artificial Sequence
  Description of Artificial Sequence: Synthetic oligonucleotide
cuucauuucuguucccucg

SEQ ID NO: 3247345 - RNA, 19 nt, Artificial Sequence
  Description of Artificial Sequence: Synthetic oligonucleotide
uuuacgcaaccaaucuggg

SEQ ID NO: 3247346 - RNA, 19 nt, Artificial Sequence
  Description of Artificial Sequence: Synthetic oligonucleotide
cuuaggggacuguacagcg

SEQ ID NO: 3247347 - RNA, 19 nt, Artificial Sequence
  Description of Artificial Sequence: Synthetic oligonucleotide
accaaucugggccuuguac

SEQ ID NO: 3247348 - RNA, 19 nt, Artificial Sequence
  Description of Artificial Sequence: Synthetic oligonucleotide
aaaacuuuacgcaaccaau

SEQ ID NO: 3247349 - RNA, 19 nt, Artificial Sequence
  Description of Artificial Sequence: Synthetic oligonucleotide
aagcagagagcacacaaaa

SEQ ID NO: 3247350 - RNA, 19 nt, Artificial Sequence
  Description of Artificial Sequence: Synthetic oligonucleotide
aacgccauguucacguggc

SEQ ID NO: 3247351 - RNA, 19 nt, Artificial Sequence
  Description of Artificial Sequence: Synthetic oligonucleotide
aaaauuggaaagaagccuu

SEQ ID NO: 3247352 - RNA, 19 nt, Artificial Sequence
  Description of Artificial Sequence: Synthetic oligonucleotide
cucucgugaaccacgagcc

SEQ ID NO: 3247353 - RNA, 19 nt, Artificial Sequence
  Description of Artificial Sequence: Synthetic oligonucleotide
uacaccgaagcagagagca

SEQ ID NO: 3247354 - RNA, 19 nt, Artificial Sequence
  Description of Artificial Sequence: Synthetic oligonucleotide
gaaacauccacgacuuucc

SEQ ID NO: 3247355 - RNA, 19 nt, Artificial Sequence
  Description of Artificial Sequence: Synthetic oligonucleotide
guucacguggccacgaucg

SEQ ID NO: 3247356 - RNA, 19 nt, Artificial Sequence
  Description of Artificial Sequence: Synthetic oligonucleotide
cagagagcacacaaaauug

SEQ ID NO: 3247357 - RNA, 19 nt, Artificial Sequence
  Description of Artificial Sequence: Synthetic oligonucleotide
aauuggaaagaagccuuag

SEQ ID NO: 3247358 - RNA, 19 nt, Artificial Sequence
  Description of Artificial Sequence: Synthetic oligonucleotide
agcgcucuugugcagcucc

SEQ ID NO: 3247359 - RNA, 19 nt, Artificial Sequence
  Description of Artificial Sequence: Synthetic oligonucleotide
uuugguccggcuucucucg

SEQ ID NO: 3247360 - RNA, 19 nt, Artificial Sequence
  Description of Artificial Sequence: Synthetic oligonucleotide
uguugaugacaucuggauc

SEQ ID NO: 3247361 - RNA, 19 nt, Artificial Sequence
  Description of Artificial Sequence: Synthetic oligonucleotide
uucauuucuguucccucgc

SEQ ID NO: 3247362 - RNA, 19 nt, Artificial Sequence
  Description of Artificial Sequence: Synthetic oligonucleotide
gguuccacagacuugguug

SEQ ID NO: 3247363 - RNA, 19 nt, Artificial Sequence
  Description of Artificial Sequence: Synthetic oligonucleotide
ucuuuggguucucaugggc

SEQ ID NO: 3247364 - RNA, 19 nt, Artificial Sequence
  Description of Artificial Sequence: Synthetic oligonucleotide
uucccugugagacacggaa

SEQ ID NO: 3247365 - RNA, 19 nt, Artificial Sequence
  Description of Artificial Sequence: Synthetic oligonucleotide
uugguuggcuuguuucugg

SEQ ID NO: 3247366 - RNA, 19 nt, Artificial Sequence
  Description of Artificial Sequence: Synthetic oligonucleotide
guuccacagacuugguugg

SEQ ID NO: 3247367 - RNA, 19 nt, Artificial Sequence
  Description of Artificial Sequence: Synthetic oligonucleotide
gagcacacaaaauuggaaa

SEQ ID NO: 3247368 - RNA, 19 nt, Artificial Sequence
  Description of Artificial Sequence: Synthetic oligonucleotide
caugcacgaaaacuuuacg

SEQ ID NO: 3247369 - RNA, 19 nt, Artificial Sequence
  Description of Artificial Sequence: Synthetic oligonucleotide
acuuuacgcaaccaaucug

SEQ ID NO: 3247370 - RNA, 19 nt, Artificial Sequence
  Description of Artificial Sequence: Synthetic oligonucleotide
aacauccacgacuuucccu

SEQ ID NO: 3247371 - RNA, 19 nt, Artificial Sequence
  Description of Artificial Sequence: Synthetic oligonucleotide
uuaggggacuguacagcgg

SEQ ID NO: 3247372 - RNA, 19 nt, Artificial Sequence
  Description of Artificial Sequence: Synthetic oligonucleotide
gagacaccagcagaggagg

SEQ ID NO: 3247373 - RNA, 19 nt, Artificial Sequence
  Description of Artificial Sequence: Synthetic oligonucleotide
uaggggacuguacagcgga

SEQ ID NO: 3247374 - RNA, 19 nt, Artificial Sequence
  Description of Artificial Sequence: Synthetic oligonucleotide
uuuggguucucaugggcac

SEQ ID NO: 3247375 - RNA, 19 nt, Artificial Sequence
  Description of Artificial Sequence: Synthetic oligonucleotide
cuuguuucuggagccagcg

SEQ ID NO: 3247376 - RNA, 19 nt, Artificial Sequence
  Description of Artificial Sequence: Synthetic oligonucleotide
uauuucugacuacaccgaa

SEQ ID NO: 3247377 - RNA, 19 nt, Artificial Sequence
  Description of Artificial Sequence: Synthetic oligonucleotide
gaacgccauguucacgugg

SEQ ID NO: 3247378 - RNA, 19 nt, Artificial Sequence
  Description of Artificial Sequence: Synthetic oligonucleotide
gacuugguuggcuuguuuc

SEQ ID NO: 3247379 - RNA, 19 nt, Artificial Sequence
  Description of Artificial Sequence: Synthetic oligonucleotide
gaaagaagccuuaggggac

SEQ ID NO: 3247380 - RNA, 19 nt, Artificial Sequence
  Description of Artificial Sequence: Synthetic oligonucleotide
uuuugguccggcuucucuc

SEQ ID NO: 3247381 - RNA, 19 nt, Artificial Sequence
  Description of Artificial Sequence: Synthetic oligonucleotide
uuacgcaaccaaucugggc

SEQ ID NO: 3247382 - RNA, 19 nt, Artificial Sequence
  Description of Artificial Sequence: Synthetic oligonucleotide
uaggucggguuccacagac

SEQ ID NO: 3247383 - RNA, 19 nt, Artificial Sequence
  Description of Artificial Sequence: Synthetic oligonucleotide
ucucgugaaccacgagccg

SEQ ID NO: 3247384 - RNA, 19 nt, Artificial Sequence
  Description of Artificial Sequence: Synthetic oligonucleotide
uccuccuccaccaccgggc

SEQ ID NO: 3247385 - RNA, 19 nt, Artificial Sequence
  Description of Artificial Sequence: Synthetic oligonucleotide
cucuugugcagcuccgggg

SEQ ID NO: 3247386 - RNA, 19 nt, Artificial Sequence
  Description of Artificial Sequence: Synthetic oligonucleotide
ucauuucuguucccucgcc

SEQ ID NO: 3247387 - RNA, 19 nt, Artificial Sequence
  Description of Artificial Sequence: Synthetic oligonucleotide
uuugccgaguggcucgagc

SEQ ID NO: 3247388 - RNA, 19 nt, Artificial Sequence
  Description of Artificial Sequence: Synthetic oligonucleotide
cugacuacaccgaagcaga

SEQ ID NO: 3247389 - RNA, 19 nt, Artificial Sequence
  Description of Artificial Sequence: Synthetic oligonucleotide
auucuaugggcagagcugu

SEQ ID NO: 3247390 - RNA, 19 nt, Artificial Sequence
  Description of Artificial Sequence: Synthetic oligonucleotide
aaagaagccuuaggggacu

SEQ ID NO: 3247391 - RNA, 19 nt, Artificial Sequence
  Description of Artificial Sequence: Synthetic oligonucleotide
accagcagaggaggcaucc

SEQ ID NO: 3247392 - RNA, 19 nt, Artificial Sequence
  Description of Artificial Sequence: Synthetic oligonucleotide
gagaacgccauguucacgu

SEQ ID NO: 3247393 - RNA, 19 nt, Artificial Sequence
  Description of Artificial Sequence: Synthetic oligonucleotide
cauuucuguucccucgccc

SEQ ID NO: 3247394 - RNA, 19 nt, Artificial Sequence
  Description of Artificial Sequence: Synthetic oligonucleotide
cuuucccugugagacacgg

SEQ ID NO: 3247395 - RNA, 19 nt, Artificial Sequence
  Description of Artificial Sequence: Synthetic oligonucleotide
caaggaaacauccacgacu

SEQ ID NO: 3247396 - RNA, 19 nt, Artificial Sequence
  Description of Artificial Sequence: Synthetic oligonucleotide
caaucugggccuuguacug

SEQ ID NO: 3247397 - RNA, 19 nt, Artificial Sequence
  Description of Artificial Sequence: Synthetic oligonucleotide
aagccuuaggggacuguac

SEQ ID NO: 3247398 - RNA, 19 nt, Artificial Sequence
  Description of Artificial Sequence: Synthetic oligonucleotide
agccuuaggggacuguaca

SEQ ID NO: 3247399 - RNA, 19 nt, Artificial Sequence
  Description of Artificial Sequence: Synthetic oligonucleotide
cacguggccacgaucggcc

SEQ ID NO: 3247400 - RNA, 19 nt, Artificial Sequence
  Description of Artificial Sequence: Synthetic oligonucleotide
gacuuucccugugagacac

SEQ ID NO: 3247401 - RNA, 19 nt, Artificial Sequence
  Description of Artificial Sequence: Synthetic oligonucleotide
uugccgaguggcucgagca

SEQ ID NO: 3247402 - RNA, 19 nt, Artificial Sequence
  Description of Artificial Sequence: Synthetic oligonucleotide
auuucugacuacaccgaag

SEQ ID NO: 3247403 - RNA, 19 nt, Artificial Sequence
  Description of Artificial Sequence: Synthetic oligonucleotide
ucuguucccucgccccucg

SEQ ID NO: 3247404 - RNA, 19 nt, Artificial Sequence
  Description of Artificial Sequence: Synthetic oligonucleotide
acacggaagcagcuauuuc

SEQ ID NO: 3247405 - RNA, 19 nt, Artificial Sequence
  Description of Artificial Sequence: Synthetic oligonucleotide
gacuguacagcggaccaug

SEQ ID NO: 3247406 - RNA, 19 nt, Artificial Sequence
  Description of Artificial Sequence: Synthetic oligonucleotide
uccacgacuuucccuguga

SEQ ID NO: 3247407 - RNA, 19 nt, Artificial Sequence
  Description of Artificial Sequence: Synthetic oligonucleotide
cuauuucugacuacaccga

SEQ ID NO: 3247408 - RNA, 19 nt, Artificial Sequence
  Description of Artificial Sequence: Synthetic oligonucleotide
uucugacuacaccgaagca

SEQ ID NO: 3247409 - RNA, 19 nt, Artificial Sequence
  Description of Artificial Sequence: Synthetic oligonucleotide
ucccucgccccucgaaugg

SEQ ID NO: 3247410 - RNA, 19 nt, Artificial Sequence
  Description of Artificial Sequence: Synthetic oligonucleotide
agagcuguguugaugacau

SEQ ID NO: 3247411 - RNA, 19 nt, Artificial Sequence
  Description of Artificial Sequence: Synthetic oligonucleotide
cuuuggguucucaugggca

SEQ ID NO: 3247412 - RNA, 19 nt, Artificial Sequence
  Description of Artificial Sequence: Synthetic oligonucleotide
guacagcggaccaugcacg

SEQ ID NO: 3247413 - RNA, 19 nt, Artificial Sequence
  Description of Artificial Sequence: Synthetic oligonucleotide
cucgaaugggccaugucca

SEQ ID NO: 3247414 - RNA, 19 nt, Artificial Sequence
  Description of Artificial Sequence: Synthetic oligonucleotide
aggcaaggaaacauccacg

SEQ ID NO: 3247415 - RNA, 19 nt, Artificial Sequence
  Description of Artificial Sequence: Synthetic oligonucleotide
cugagagaacgccauguuc

SEQ ID NO: 3247416 - RNA, 19 nt, Artificial Sequence
  Description of Artificial Sequence: Synthetic oligonucleotide
ugacuacaccgaagcagag

SEQ ID NO: 3247417 - RNA, 19 nt, Artificial Sequence
  Description of Artificial Sequence: Synthetic oligonucleotide
acuguugaaauaucgacac

SEQ ID NO: 3247418 - RNA, 19 nt, Artificial Sequence
  Description of Artificial Sequence: Synthetic oligonucleotide
uccaacaccacacaggaag

SEQ ID NO: 3247419 - RNA, 19 nt, Artificial Sequence
  Description of Artificial Sequence: Synthetic oligonucleotide
ugaaauaucgacacuggcc

SEQ ID NO: 3247420 - RNA, 19 nt, Artificial Sequence
  Description of Artificial Sequence: Synthetic oligonucleotide
caagaaacuauucugcucg

SEQ ID NO: 3247421 - RNA, 19 nt, Artificial Sequence
  Description of Artificial Sequence: Synthetic oligonucleotide
gagagauuagccaagauac

SEQ ID NO: 3247422 - RNA, 19 nt, Artificial Sequence
  Description of Artificial Sequence: Synthetic oligonucleotide
gaaauaucgacacuggcca

SEQ ID NO: 3247423 - RNA, 19 nt, Artificial Sequence
  Description of Artificial Sequence: Synthetic oligonucleotide
uguugaaauaucgacacug

SEQ ID NO: 3247424 - RNA, 19 nt, Artificial Sequence
  Description of Artificial Sequence: Synthetic oligonucleotide
gaacuguugaaauaucgac

SEQ ID NO: 3247425 - RNA, 19 nt, Artificial Sequence
  Description of Artificial Sequence: Synthetic oligonucleotide
aagaaacuauucugcucgc

SEQ ID NO: 3247426 - RNA, 19 nt, Artificial Sequence
  Description of Artificial Sequence: Synthetic oligonucleotide
ucgacacuggccaagaaac

SEQ ID NO: 3247427 - RNA, 19 nt, Artificial Sequence
  Description of Artificial Sequence: Synthetic oligonucleotide
ucaaacagccuccacugcc

SEQ ID NO: 3247428 - RNA, 19 nt, Artificial Sequence
  Description of Artificial Sequence: Synthetic oligonucleotide
ugucaaacagccuccacug

SEQ ID NO: 3247429 - RNA, 19 nt, Artificial Sequence
  Description of Artificial Sequence: Synthetic oligonucleotide
uccagggugucaaacagcc

SEQ ID NO: 3247430 - RNA, 19 nt, Artificial Sequence
  Description of Artificial Sequence: Synthetic oligonucleotide
acaggaagagagauuagcc

SEQ ID NO: 3247431 - RNA, 19 nt, Artificial Sequence
  Description of Artificial Sequence: Synthetic oligonucleotide
ucgccauuaguucaugugc

SEQ ID NO: 3247432 - RNA, 19 nt, Artificial Sequence
  Description of Artificial Sequence: Synthetic oligonucleotide
aaucgguccaacaccacac

SEQ ID NO: 3247433 - RNA, 19 nt, Artificial Sequence
  Description of Artificial Sequence: Synthetic oligonucleotide
uugaaauaucgacacuggc

SEQ ID NO: 3247434 - RNA, 19 nt, Artificial Sequence
  Description of Artificial Sequence: Synthetic oligonucleotide
ugucccaaggaacuguuga

SEQ ID NO: 3247435 - RNA, 19 nt, Artificial Sequence
  Description of Artificial Sequence: Synthetic oligonucleotide
ucuccagggugucaaacag

SEQ ID NO: 3247436 - RNA, 19 nt, Artificial Sequence
  Description of Artificial Sequence: Synthetic oligonucleotide
aauaucgacacuggccaag

SEQ ID NO: 3247437 - RNA, 19 nt, Artificial Sequence
  Description of Artificial Sequence: Synthetic oligonucleotide
aacuguugaaauaucgaca

SEQ ID NO: 3247438 - RNA, 19 nt, Artificial Sequence
  Description of Artificial Sequence: Synthetic oligonucleotide
uggccaagaaacuauucug

SEQ ID NO: 3247439 - RNA, 19 nt, Artificial Sequence
  Description of Artificial Sequence: Synthetic oligonucleotide
agagagauuagccaagaua

SEQ ID NO: 3247440 - RNA, 19 nt, Artificial Sequence
  Description of Artificial Sequence: Synthetic oligonucleotide
uuaguucaugugccguucg

SEQ ID NO: 3247441 - RNA, 19 nt, Artificial Sequence
  Description of Artificial Sequence: Synthetic oligonucleotide
gaaacuauucugcucgcca

SEQ ID NO: 3247442 - RNA, 19 nt, Artificial Sequence
  Description of Artificial Sequence: Synthetic oligonucleotide
uggaaucgguccaacacca

SEQ ID NO: 3247443 - RNA, 19 nt, Artificial Sequence
  Description of Artificial Sequence: Synthetic oligonucleotide
guugaaauaucgacacugg

SEQ ID NO: 3247444 - RNA, 19 nt, Artificial Sequence
  Description of Artificial Sequence: Synthetic oligonucleotide
aggaagagagauuagccaa

SEQ ID NO: 3247445 - RNA, 19 nt, Artificial Sequence
  Description of Artificial Sequence: Synthetic oligonucleotide
aggaacuguugaaauaucg

SEQ ID NO: 3247446 - RNA, 19 nt, Artificial Sequence
  Description of Artificial Sequence: Synthetic oligonucleotide
ucugcucgccauuaguuca

SEQ ID NO: 3247447 - RNA, 19 nt, Artificial Sequence
  Description of Artificial Sequence: Synthetic oligonucleotide
aaacuauucugcucgccau

SEQ ID NO: 3247448 - RNA, 19 nt, Artificial Sequence
  Description of Artificial Sequence: Synthetic oligonucleotide
ugugccguucgucuccagg

SEQ ID NO: 3247449 - RNA, 19 nt, Artificial Sequence
  Description of Artificial Sequence: Synthetic oligonucleotide
agauuagccaagauaccac

SEQ ID NO: 3247450 - RNA, 19 nt, Artificial Sequence
  Description of Artificial Sequence: Synthetic oligonucleotide
gagauuagccaagauacca

SEQ ID NO: 3247451 - RNA, 19 nt, Artificial Sequence
  Description of Artificial Sequence: Synthetic oligonucleotide
uauucugcucgccauuagu

SEQ ID NO: 3247452 - RNA, 19 nt, Artificial Sequence
  Description of Artificial Sequence: Synthetic oligonucleotide
cuggaaucgguccaacacc

SEQ ID NO: 3247453 - RNA, 19 nt, Artificial Sequence
  Description of Artificial Sequence: Synthetic oligonucleotide
agaaacuauucugcucgcc

SEQ ID NO: 3247454 - RNA, 19 nt, Artificial Sequence
  Description of Artificial Sequence: Synthetic oligonucleotide
auuaguucaugugccguuc

SEQ ID NO: 3247455 - RNA, 19 nt, Artificial Sequence
  Description of Artificial Sequence: Synthetic oligonucleotide
ucaugugccguucgucucc

SEQ ID NO: 3247456 - RNA, 19 nt, Artificial Sequence
  Description of Artificial Sequence: Synthetic oligonucleotide
agagauuagccaagauacc

SEQ ID NO: 3247457 - RNA, 19 nt, Artificial Sequence
  Description of Artificial Sequence: Synthetic oligonucleotide
ugucugugucccaaggaac

SEQ ID NO: 3247458 - RNA, 19 nt, Artificial Sequence
  Description of Artificial Sequence: Synthetic oligonucleotide
cagggugucaaacagccuc

SEQ ID NO: 3247459 - RNA, 19 nt, Artificial Sequence
  Description of Artificial Sequence: Synthetic oligonucleotide
cacaggaagagagauuagc

SEQ ID NO: 3247460 - RNA, 19 nt, Artificial Sequence
  Description of Artificial Sequence: Synthetic oligonucleotide
aacagccuccacugccugg

SEQ ID NO: 3247461 - RNA, 19 nt, Artificial Sequence
  Description of Artificial Sequence: Synthetic oligonucleotide
cucgccauuaguucaugug

SEQ ID NO: 3247462 - RNA, 19 nt, Artificial Sequence
  Description of Artificial Sequence: Synthetic oligonucleotide
acaccacacaggaagagag

SEQ ID NO: 3247463 - RNA, 19 nt, Artificial Sequence
  Description of Artificial Sequence: Synthetic oligonucleotide
gugccguucgucuccaggg

SEQ ID NO: 3247464 - RNA, 19 nt, Artificial Sequence
  Description of Artificial Sequence: Synthetic oligonucleotide
ucgguccaacaccacacag

SEQ ID NO: 3247465 - RNA, 19 nt, Artificial Sequence
  Description of Artificial Sequence: Synthetic oligonucleotide
aaggaacuguugaaauauc

SEQ ID NO: 3247466 - RNA, 19 nt, Artificial Sequence
  Description of Artificial Sequence: Synthetic oligonucleotide
gaaucgguccaacaccaca

SEQ ID NO: 3247467 - RNA, 19 nt, Artificial Sequence
  Description of Artificial Sequence: Synthetic oligonucleotide
aacaccacacaggaagaga

SEQ ID NO: 3247468 - RNA, 19 nt, Artificial Sequence
  Description of Artificial Sequence: Synthetic oligonucleotide
aguucaugugccguucguc

SEQ ID NO: 3247469 - RNA, 19 nt, Artificial Sequence
  Description of Artificial Sequence: Synthetic oligonucleotide
aaauaucgacacuggccaa

SEQ ID NO: 3247470 - RNA, 19 nt, Artificial Sequence
  Description of Artificial Sequence: Synthetic oligonucleotide
aagagagauuagccaagau

SEQ ID NO: 3247471 - RNA, 19 nt, Artificial Sequence
  Description of Artificial Sequence: Synthetic oligonucleotide
aucgacacuggccaagaaa

SEQ ID NO: 3247472 - RNA, 19 nt, Artificial Sequence
  Description of Artificial Sequence: Synthetic oligonucleotide
caggaagagagauuagcca

SEQ ID NO: 3247473 - RNA, 19 nt, Artificial Sequence
  Description of Artificial Sequence: Synthetic oligonucleotide
agggugucaaacagccucc

SEQ ID NO: 3247474 - RNA, 19 nt, Artificial Sequence
  Description of Artificial Sequence: Synthetic oligonucleotide
uccacugccuggaaucggu

SEQ ID NO: 3247475 - RNA, 19 nt, Artificial Sequence
  Description of Artificial Sequence: Synthetic oligonucleotide
aaacagccuccacugccug

SEQ ID NO: 3247476 - RNA, 19 nt, Artificial Sequence
  Description of Artificial Sequence: Synthetic oligonucleotide
uucugcucgccauuaguuc

SEQ ID NO: 3247477 - RNA, 19 nt, Artificial Sequence
  Description of Artificial Sequence: Synthetic oligonucleotide
aacuauucugcucgccauu

SEQ ID NO: 3247478 - RNA, 19 nt, Artificial Sequence
  Description of Artificial Sequence: Synthetic oligonucleotide
acugccuggaaucggucca

SEQ ID NO: 3247479 - RNA, 19 nt, Artificial Sequence
  Description of Artificial Sequence: Synthetic oligonucleotide
gguccaacaccacacagga

SEQ ID NO: 3247480 - RNA, 19 nt, Artificial Sequence
  Description of Artificial Sequence: Synthetic oligonucleotide
cacacaggaagagagauua

SEQ ID NO: 3247481 - RNA, 19 nt, Artificial Sequence
  Description of Artificial Sequence: Synthetic oligonucleotide
gaagagagauuagccaaga

SEQ ID NO: 3247482 - RNA, 19 nt, Artificial Sequence
  Description of Artificial Sequence: Synthetic oligonucleotide
uaguucaugugccguucgu

SEQ ID NO: 3247483 - RNA, 19 nt, Artificial Sequence
  Description of Artificial Sequence: Synthetic oligonucleotide
cacugccuggaaucggucc

SEQ ID NO: 3247484 - RNA, 19 nt, Artificial Sequence
  Description of Artificial Sequence: Synthetic oligonucleotide
uucaugugccguucgucuc

SEQ ID NO: 3247485 - RNA, 19 nt, Artificial Sequence
  Description of Artificial Sequence: Synthetic oligonucleotide
accacacaggaagagagau

SEQ ID NO: 3247486 - RNA, 19 nt, Artificial Sequence
  Description of Artificial Sequence: Synthetic oligonucleotide
ucugugucccaaggaacug

SEQ ID NO: 3247487 - RNA, 19 nt, Artificial Sequence
  Description of Artificial Sequence: Synthetic oligonucleotide
cuccagggugucaaacagc

SEQ ID NO: 3247488 - RNA, 19 nt, Artificial Sequence
  Description of Artificial Sequence: Synthetic oligonucleotide
acuggccaagaaacuauuc

SEQ ID NO: 3247489 - RNA, 19 nt, Artificial Sequence
  Description of Artificial Sequence: Synthetic oligonucleotide
ugugucccaaggaacuguu

SEQ ID NO: 3247490 - RNA, 19 nt, Artificial Sequence
  Description of Artificial Sequence: Synthetic oligonucleotide
ggccaagaaacuauucugc

SEQ ID NO: 3247491 - RNA, 19 nt, Artificial Sequence
  Description of Artificial Sequence: Synthetic oligonucleotide
gccauuaguucaugugccg

SEQ ID NO: 3247492 - RNA, 19 nt, Artificial Sequence
  Description of Artificial Sequence: Synthetic oligonucleotide
gugucaaacagccuccacu

SEQ ID NO: 3247493 - RNA, 19 nt, Artificial Sequence
  Description of Artificial Sequence: Synthetic oligonucleotide
ccuggaaucgguccaacac

SEQ ID NO: 3247494 - RNA, 19 nt, Artificial Sequence
  Description of Artificial Sequence: Synthetic oligonucleotide
ucccaaggaacuguugaaa

SEQ ID NO: 3247495 - RNA, 19 nt, Artificial Sequence
  Description of Artificial Sequence: Synthetic oligonucleotide
ggaagagagauuagccaag

SEQ ID NO: 3247496 - RNA, 19 nt, Artificial Sequence
  Description of Artificial Sequence: Synthetic oligonucleotide
cuauucugcucgccauuag

SEQ ID NO: 3247497 - RNA, 19 nt, Artificial Sequence
  Description of Artificial Sequence: Synthetic oligonucleotide
uucgucuccagggugucaa

SEQ ID NO: 3247498 - RNA, 19 nt, Artificial Sequence
  Description of Artificial Sequence: Synthetic oligonucleotide
guucaugugccguucgucu

SEQ ID NO: 3247499 - RNA, 19 nt, Artificial Sequence
  Description of Artificial Sequence: Synthetic oligonucleotide
gucaaacagccuccacugc

SEQ ID NO: 3247500 - RNA, 19 nt, Artificial Sequence
  Description of Artificial Sequence: Synthetic oligonucleotide
ggaacuguugaaauaucga

SEQ ID NO: 3247501 - RNA, 19 nt, Artificial Sequence
  Description of Artificial Sequence: Synthetic oligonucleotide
gacacuggccaagaaacua

SEQ ID NO: 3247502 - RNA, 19 nt, Artificial Sequence
  Description of Artificial Sequence: Synthetic oligonucleotide
gucuccagggugucaaaca

SEQ ID NO: 3247503 - RNA, 19 nt, Artificial Sequence
  Description of Artificial Sequence: Synthetic oligonucleotide
aucgguccaacaccacaca

SEQ ID NO: 3247504 - RNA, 19 nt, Artificial Sequence
  Description of Artificial Sequence: Synthetic oligonucleotide
auaucgacacuggccaaga

SEQ ID NO: 3247505 - RNA, 19 nt, Artificial Sequence
  Description of Artificial Sequence: Synthetic oligonucleotide
ccaagaaacuauucugcuc

SEQ ID NO: 3247506 - RNA, 19 nt, Artificial Sequence
  Description of Artificial Sequence: Synthetic oligonucleotide
caaggaacuguugaaauau

SEQ ID NO: 3247507 - RNA, 19 nt, Artificial Sequence
  Description of Artificial Sequence: Synthetic oligonucleotide
caacaccacacaggaagag

SEQ ID NO: 3247508 - RNA, 19 nt, Artificial Sequence
  Description of Artificial Sequence: Synthetic oligonucleotide
cuggccaagaaacuauucu

SEQ ID NO: 3247509 - RNA, 19 nt, Artificial Sequence
  Description of Artificial Sequence: Synthetic oligonucleotide
ugccguucgucuccagggu

SEQ ID NO: 3247510 - RNA, 19 nt, Artificial Sequence
  Description of Artificial Sequence: Synthetic oligonucleotide
auucugcucgccauuaguu

SEQ ID NO: 3247511 - RNA, 19 nt, Artificial Sequence
  Description of Artificial Sequence: Synthetic oligonucleotide
acuauucugcucgccauua

SEQ ID NO: 3247512 - RNA, 19 nt, Artificial Sequence
  Description of Artificial Sequence: Synthetic oligonucleotide
uaucgacacuggccaagaa

SEQ ID NO: 3247513 - RNA, 19 nt, Artificial Sequence
  Description of Artificial Sequence: Synthetic oligonucleotide
acagccuccacugccugga

SEQ ID NO: 3247514 - RNA, 19 nt, Artificial Sequence
  Description of Artificial Sequence: Synthetic oligonucleotide
acacuggccaagaaacuau

SEQ ID NO: 3247515 - RNA, 19 nt, Artificial Sequence
  Description of Artificial Sequence: Synthetic oligonucleotide
gucccaaggaacuguugaa

SEQ ID NO: 3247516 - RNA, 19 nt, Artificial Sequence
  Description of Artificial Sequence: Synthetic oligonucleotide
cgccauuaguucaugugcc

SEQ ID NO: 3247517 - RNA, 19 nt, Artificial Sequence
  Description of Artificial Sequence: Synthetic oligonucleotide
caauugucggcauugaugg

SEQ ID NO: 3247518 - RNA, 19 nt, Artificial Sequence
  Description of Artificial Sequence: Synthetic oligonucleotide
uagucuguggcgcugaugg

SEQ ID NO: 3247519 - RNA, 19 nt, Artificial Sequence
  Description of Artificial Sequence: Synthetic oligonucleotide
uaguccagcgcccugagcg

SEQ ID NO: 3247520 - RNA, 19 nt, Artificial Sequence
  Description of Artificial Sequence: Synthetic oligonucleotide
  modified_base (17)..(17): a, c, u, g, unknown or other
uucuccuggacaaacgngg

SEQ ID NO: 3247521 - RNA, 19 nt, Artificial Sequence
  Description of Artificial Sequence: Synthetic oligonucleotide
aacucgaaauucugcaggg

SEQ ID NO: 3247522 - RNA, 19 nt, Artificial Sequence
  Description of Artificial Sequence: Synthetic oligonucleotide
gaacucgaaauucugcagg

SEQ ID NO: 3247523 - RNA, 19 nt, Artificial Sequence
  Description of Artificial Sequence: Synthetic oligonucleotide
  modified_base (7)..(7): a, c, u, g, unknown or other
caaacgnggguguagguag

SEQ ID NO: 3247524 - RNA, 19 nt, Artificial Sequence
  Description of Artificial Sequence: Synthetic oligonucleotide
gagaugagcgaggagaggg

SEQ ID NO: 3247525 - RNA, 19 nt, Artificial Sequence
  Description of Artificial Sequence: Synthetic oligonucleotide
gaagggagcauugucauug

SEQ ID NO: 3247526 - RNA, 19 nt, Artificial Sequence
  Description of Artificial Sequence: Synthetic oligonucleotide
  modified_base (16)..(16): a, c, u, g, unknown or other
ucuccuggacaaacgnggg

SEQ ID NO: 3247527 - RNA, 19 nt, Artificial Sequence
  Description of Artificial Sequence: Synthetic oligonucleotide
ugagucuguagucuguggc

SEQ ID NO: 3247528 - RNA, 19 nt, Artificial Sequence
  Description of Artificial Sequence: Synthetic oligonucleotide
ucggcauugauggagauga

SEQ ID NO: 3247529 - RNA, 19 nt, Artificial Sequence
  Description of Artificial Sequence: Synthetic oligonucleotide
agcauugucauuggcgucc

SEQ ID NO: 3247530 - RNA, 19 nt, Artificial Sequence
  Description of Artificial Sequence: Synthetic oligonucleotide
gucauuggcguccagcacg

SEQ ID NO: 3247531 - RNA, 19 nt, Artificial Sequence
  Description of Artificial Sequence: Synthetic oligonucleotide
auugucauuggcguccagc

SEQ ID NO: 3247532 - RNA, 19 nt, Artificial Sequence
  Description of Artificial Sequence: Synthetic oligonucleotide
auuggcguccagcacgagc

SEQ ID NO: 3247533 - RNA, 19 nt, Artificial Sequence
  Description of Artificial Sequence: Synthetic oligonucleotide
acagcugcccaauugucgg

SEQ ID NO: 3247534 - RNA, 19 nt, Artificial Sequence
  Description of Artificial Sequence: Synthetic oligonucleotide
cugauggugccuaugugcg

SEQ ID NO: 3247535 - RNA, 19 nt, Artificial Sequence
  Description of Artificial Sequence: Synthetic oligonucleotide
auugauggagaugagcgag

SEQ ID NO: 3247536 - RNA, 19 nt, Artificial Sequence
  Description of Artificial Sequence: Synthetic oligonucleotide
gagucuguagucuguggcg

SEQ ID NO: 3247537 - RNA, 19 nt, Artificial Sequence
  Description of Artificial Sequence: Synthetic oligonucleotide
  modified_base (19)..(19): a, c, u, g, unknown or other
uguucuccuggacaaacgn

SEQ ID NO: 3247538 - RNA, 19 nt, Artificial Sequence
  Description of Artificial Sequence: Synthetic oligonucleotide
uuggcguccagcacgagca

SEQ ID NO: 3247539 - RNA, 19 nt, Artificial Sequence
  Description of Artificial Sequence: Synthetic oligonucleotide
ugauggugggcauuggagc

SEQ ID NO: 3247540 - RNA, 19 nt, Artificial Sequence
  Description of Artificial Sequence: Synthetic oligonucleotide
gauggugggcauuggagcc

SEQ ID NO: 3247541 - RNA, 19 nt, Artificial Sequence
  Description of Artificial Sequence: Synthetic oligonucleotide
uucugcaguggguagagca

SEQ ID NO: 3247542 - RNA, 19 nt, Artificial Sequence
  Description of Artificial Sequence: Synthetic oligonucleotide
ucugcagggucucauaguc

SEQ ID NO: 3247543 - RNA, 19 nt, Artificial Sequence
  Description of Artificial Sequence: Synthetic oligonucleotide
ucgaaauucugcagggucu

SEQ ID NO: 3247544 - RNA, 19 nt, Artificial Sequence
  Description of Artificial Sequence: Synthetic oligonucleotide
aguggguagagcacgaagg

SEQ ID NO: 3247545 - RNA, 19 nt, Artificial Sequence
  Description of Artificial Sequence: Synthetic oligonucleotide
  modified_base (14)..(14): a, c, u, g, unknown or other
uccuggacaaacgngggug

SEQ ID NO: 3247546 - RNA, 19 nt, Artificial Sequence
  Description of Artificial Sequence: Synthetic oligonucleotide
guagguuuguggugaaggg

SEQ ID NO: 3247547 - RNA, 19 nt, Artificial Sequence
  Description of Artificial Sequence: Synthetic oligonucleotide
uggagaugagcgaggagag

SEQ ID NO: 3247548 - RNA, 19 nt, Artificial Sequence
  Description of Artificial Sequence: Synthetic oligonucleotide
uugauggagaugagcgagg

SEQ ID NO: 3247549 - RNA, 19 nt, Artificial Sequence
  Description of Artificial Sequence: Synthetic oligonucleotide
aacagcugcccaauugucg

SEQ ID NO: 3247550 - RNA, 19 nt, Artificial Sequence
  Description of Artificial Sequence: Synthetic oligonucleotide
uugucauuggcguccagca

SEQ ID NO: 3247551 - RNA, 19 nt, Artificial Sequence
  Description of Artificial Sequence: Synthetic oligonucleotide
gcauugauggagaugagcg

SEQ ID NO: 3247552 - RNA, 19 nt, Artificial Sequence
  Description of Artificial Sequence: Synthetic oligonucleotide
ugcagggucucauagucca

SEQ ID NO: 3247553 - RNA, 19 nt, Artificial Sequence
  Description of Artificial Sequence: Synthetic oligonucleotide
auugucggcauugauggag

SEQ ID NO: 3247554 - RNA, 19 nt, Artificial Sequence
  Description of Artificial Sequence: Synthetic oligonucleotide
uuguucuccuggacaaacg

SEQ ID NO: 3247555 - RNA, 19 nt, Artificial Sequence
  Description of Artificial Sequence: Synthetic oligonucleotide
agguuuguggugaagggcg

SEQ ID NO: 3247556 - RNA, 19 nt, Artificial Sequence
  Description of Artificial Sequence: Synthetic oligonucleotide
uguagguagguuuguggug

SEQ ID NO: 3247557 - RNA, 19 nt, Artificial Sequence
  Description of Artificial Sequence: Synthetic oligonucleotide
auggagaugagcgaggaga

SEQ ID NO: 3247558 - RNA, 19 nt, Artificial Sequence
  Description of Artificial Sequence: Synthetic oligonucleotide
auucugcagggucucauag

SEQ ID NO: 3247559 - RNA, 19 nt, Artificial Sequence
  Description of Artificial Sequence: Synthetic oligonucleotide
agucuguagucuguggcgc

SEQ ID NO: 3247560 - RNA, 19 nt, Artificial Sequence
  Description of Artificial Sequence: Synthetic oligonucleotide
ucuguggcgcugauggugc

SEQ ID NO: 3247561 - RNA, 19 nt, Artificial Sequence
  Description of Artificial Sequence: Synthetic oligonucleotide
aagggagcauugucauugg

SEQ ID NO: 3247562 - RNA, 19 nt, Artificial Sequence
  Description of Artificial Sequence: Synthetic oligonucleotide
ggucucauaguccagcgcc

SEQ ID NO: 3247563 - RNA, 19 nt, Artificial Sequence
  Description of Artificial Sequence: Synthetic oligonucleotide
uccagcacgagcacgcgca

SEQ ID NO: 3247564 - RNA, 19 nt, Artificial Sequence
  Description of Artificial Sequence: Synthetic oligonucleotide
guggguagagcacgaaggg

SEQ ID NO: 3247565 - RNA, 19 nt, Artificial Sequence
  Description of Artificial Sequence: Synthetic oligonucleotide
gauggugccuaugugcgag

SEQ ID NO: 3247566 - RNA, 19 nt, Artificial Sequence
  Description of Artificial Sequence: Synthetic oligonucleotide
gguguagguagguuugugg

SEQ ID NO: 3247567 - RNA, 19 nt, Artificial Sequence
  Description of Artificial Sequence: Synthetic oligonucleotide
gguagguuuguggugaagg

SEQ ID NO: 3247568 - RNA, 19 nt, Artificial Sequence
  Description of Artificial Sequence: Synthetic oligonucleotide
gugccuaugugcgagggcg

SEQ ID NO: 3247569 - RNA, 19 nt, Artificial Sequence
  Description of Artificial Sequence: Synthetic oligonucleotide
cucgaaauucugcaggguc

SEQ ID NO: 3247570 - RNA, 19 nt, Artificial Sequence
  Description of Artificial Sequence: Synthetic oligonucleotide
aaccuuggucuguggcgcc

SEQ ID NO: 3247571 - RNA, 19 nt, Artificial Sequence
  Description of Artificial Sequence: Synthetic oligonucleotide
ucgugggugggcagcagcg

SEQ ID NO: 3247572 - RNA, 19 nt, Artificial Sequence
  Description of Artificial Sequence: Synthetic oligonucleotide
uuuguggugaagggcgggg

SEQ ID NO: 3247573 - RNA, 19 nt, Artificial Sequence
  Description of Artificial Sequence: Synthetic oligonucleotide
ucugcaguggguagagcac

SEQ ID NO: 3247574 - RNA, 19 nt, Artificial Sequence
  Description of Artificial Sequence: Synthetic oligonucleotide
uggagccugagucuguagu

SEQ ID NO: 3247575 - RNA, 19 nt, Artificial Sequence
  Description of Artificial Sequence: Synthetic oligonucleotide
uggucuguggcgcccacgc

SEQ ID NO: 3247576 - RNA, 19 nt, Artificial Sequence
  Description of Artificial Sequence: Synthetic oligonucleotide
agcgccuggcugcugagcg

SEQ ID NO: 3247577 - RNA, 19 nt, Artificial Sequence
  Description of Artificial Sequence: Synthetic oligonucleotide
gucuguggcgcccacgcgg

SEQ ID NO: 3247578 - RNA, 19 nt, Artificial Sequence
  Description of Artificial Sequence: Synthetic oligonucleotide
gcugauggugccuaugugc

SEQ ID NO: 3247579 - RNA, 19 nt, Artificial Sequence
  Description of Artificial Sequence: Synthetic oligonucleotide
agcgaguaggugauggugg

SEQ ID NO: 3247580 - RNA, 19 nt, Artificial Sequence
  Description of Artificial Sequence: Synthetic oligonucleotide
agggucucauaguccagcg

SEQ ID NO: 3247581 - RNA, 19 nt, Artificial Sequence
  Description of Artificial Sequence: Synthetic oligonucleotide
uagguuuguggugaagggc

SEQ ID NO: 3247582 - RNA, 19 nt, Artificial Sequence
  Description of Artificial Sequence: Synthetic oligonucleotide
agcagcgaguaggugaugg

SEQ ID NO: 3247583 - RNA, 19 nt, Artificial Sequence
  Description of Artificial Sequence: Synthetic oligonucleotide
gaaccuuggucuguggcgc

SEQ ID NO: 3247584 - RNA, 19 nt, Artificial Sequence
  Description of Artificial Sequence: Synthetic oligonucleotide
gugggcagcagcgaguagg

SEQ ID NO: 3247585 - RNA, 19 nt, Artificial Sequence
  Description of Artificial Sequence: Synthetic oligonucleotide
ucauuggcguccagcacga

SEQ ID NO: 3247586 - RNA, 19 nt, Artificial Sequence
  Description of Artificial Sequence: Synthetic oligonucleotide
aguccagcgcccugagcgc

SEQ ID NO: 3247587 - RNA, 19 nt, Artificial Sequence
  Description of Artificial Sequence: Synthetic oligonucleotide
uugucggcauugauggaga

SEQ ID NO: 3247588 - RNA, 19 nt, Artificial Sequence
  Description of Artificial Sequence: Synthetic oligonucleotide
  modified_base (10)..(10): a, c, u, g, unknown or other
ggacaaacgnggguguagg

SEQ ID NO: 3247589 - RNA, 19 nt, Artificial Sequence
  Description of Artificial Sequence: Synthetic oligonucleotide
aauucugcagggucucaua

SEQ ID NO: 3247590 - RNA, 19 nt, Artificial Sequence
  Description of Artificial Sequence: Synthetic oligonucleotide
  modified_base (11)..(11): a, c, u, g, unknown or other
uggacaaacgnggguguag

SEQ ID NO: 3247591 - RNA, 19 nt, Artificial Sequence
  Description of Artificial Sequence: Synthetic oligonucleotide
agacgcguucugcaguggg

SEQ ID NO: 3247592 - RNA, 19 nt, Artificial Sequence
  Description of Artificial Sequence: Synthetic oligonucleotide
ccaauugucggcauugaug

SEQ ID NO: 3247593 - RNA, 19 nt, Artificial Sequence
  Description of Artificial Sequence: Synthetic oligonucleotide
agggagcauugucauuggc

SEQ ID NO: 3247594 - RNA, 19 nt, Artificial Sequence
  Description of Artificial Sequence: Synthetic oligonucleotide
ggaacucgaaauucugcag

SEQ ID NO: 3247595 - RNA, 19 nt, Artificial Sequence
  Description of Artificial Sequence: Synthetic oligonucleotide
gugauggugggcauuggag

SEQ ID NO: 3247596 - RNA, 19 nt, Artificial Sequence
  Description of Artificial Sequence: Synthetic oligonucleotide
  modified_base (2)..(2): a, c, u, g, unknown or other
gnggguguagguagguuug

SEQ ID NO: 3247597 - RNA, 19 nt, Artificial Sequence
  Description of Artificial Sequence: Synthetic oligonucleotide
ugagcgcaggcgaaccuug

SEQ ID NO: 3247598 - RNA, 19 nt, Artificial Sequence
  Description of Artificial Sequence: Synthetic oligonucleotide
gaugagcgaggagagggcc

SEQ ID NO: 3247599 - RNA, 19 nt, Artificial Sequence
  Description of Artificial Sequence: Synthetic oligonucleotide
gggagcauugucauuggcg

SEQ ID NO: 3247600 - RNA, 19 nt, Artificial Sequence
  Description of Artificial Sequence: Synthetic oligonucleotide
gauggagaugagcgaggag

SEQ ID NO: 3247601 - RNA, 19 nt, Artificial Sequence
  Description of Artificial Sequence: Synthetic oligonucleotide
guagguagguuugugguga

SEQ ID NO: 3247602 - RNA, 19 nt, Artificial Sequence
  Description of Artificial Sequence: Synthetic oligonucleotide
cacgaagggagcauuguca

SEQ ID NO: 3247603 - RNA, 19 nt, Artificial Sequence
  Description of Artificial Sequence: Synthetic oligonucleotide
  modified_base (6)..(6): a, c, u, g, unknown or other
aaacgnggguguagguagg

SEQ ID NO: 3247604 - RNA, 19 nt, Artificial Sequence
  Description of Artificial Sequence: Synthetic oligonucleotide
aauugucggcauugaugga

SEQ ID NO: 3247605 - RNA, 19 nt, Artificial Sequence
  Description of Artificial Sequence: Synthetic oligonucleotide
agaugagcgaggagagggc

SEQ ID NO: 3247606 - RNA, 19 nt, Artificial Sequence
  Description of Artificial Sequence: Synthetic oligonucleotide
agcacgagcacgcgcacca

SEQ ID NO: 3247607 - RNA, 19 nt, Artificial Sequence
  Description of Artificial Sequence: Synthetic oligonucleotide
auaguccagcgcccugagc

SEQ ID NO: 3247608 - RNA, 19 nt, Artificial Sequence
  Description of Artificial Sequence: Synthetic oligonucleotide
cugagucuguagucugugg

SEQ ID NO: 3247609 - RNA, 19 nt, Artificial Sequence
  Description of Artificial Sequence: Synthetic oligonucleotide
aaauucugcagggucucau

SEQ ID NO: 3247610 - RNA, 19 nt, Artificial Sequence
  Description of Artificial Sequence: Synthetic oligonucleotide
uaggugauggugggcauug

SEQ ID NO: 3247611 - RNA, 19 nt, Artificial Sequence
  Description of Artificial Sequence: Synthetic oligonucleotide
ggguagagcacgaagggag

SEQ ID NO: 3247612 - RNA, 19 nt, Artificial Sequence
  Description of Artificial Sequence: Synthetic oligonucleotide
ugauggagaugagcgagga

SEQ ID NO: 3247613 - RNA, 19 nt, Artificial Sequence
  Description of Artificial Sequence: Synthetic oligonucleotide
ggggcuguuguucuccugg

SEQ ID NO: 3247614 - RNA, 19 nt, Artificial Sequence
  Description of Artificial Sequence: Synthetic oligonucleotide
gaguaggugauggugggca

SEQ ID NO: 3247615 - RNA, 19 nt, Artificial Sequence
  Description of Artificial Sequence: Synthetic oligonucleotide
ugcccaauugucggcauug

SEQ ID NO: 3247616 - RNA, 19 nt, Artificial Sequence
  Description of Artificial Sequence: Synthetic oligonucleotide
acgaagggagcauugucau

SEQ ID NO: 3247617 - RNA, 19 nt, Artificial Sequence
  Description of Artificial Sequence: Synthetic oligonucleotide
uucuucaggaaauagaugg

SEQ ID NO: 3247618 - RNA, 19 nt, Artificial Sequence
  Description of Artificial Sequence: Synthetic oligonucleotide
acaaaucaggauuugagcc

SEQ ID NO: 3247619 - RNA, 19 nt, Artificial Sequence
  Description of Artificial Sequence: Synthetic oligonucleotide
agugacaauggcuacagcc

SEQ ID NO: 3247620 - RNA, 19 nt, Artificial Sequence
  Description of Artificial Sequence: Synthetic oligonucleotide
ugaaaauugaugaaauuca

SEQ ID NO: 3247621 - RNA, 19 nt, Artificial Sequence
  Description of Artificial Sequence: Synthetic oligonucleotide
aaugaccagguauuuacac

SEQ ID NO: 3247622 - RNA, 19 nt, Artificial Sequence
  Description of Artificial Sequence: Synthetic oligonucleotide
uguucuguugaugugaugg

SEQ ID NO: 3247623 - RNA, 19 nt, Artificial Sequence
  Description of Artificial Sequence: Synthetic oligonucleotide
auuaaaaggcccaagaauc

SEQ ID NO: 3247624 - RNA, 19 nt, Artificial Sequence
  Description of Artificial Sequence: Synthetic oligonucleotide
auaaacaugaagucucugg

SEQ ID NO: 3247625 - RNA, 19 nt, Artificial Sequence
  Description of Artificial Sequence: Synthetic oligonucleotide
aauugaugaaauucacuag

SEQ ID NO: 3247626 - RNA, 19 nt, Artificial Sequence
  Description of Artificial Sequence: Synthetic oligonucleotide
aauguugucauagcugagc

SEQ ID NO: 3247627 - RNA, 19 nt, Artificial Sequence
  Description of Artificial Sequence: Synthetic oligonucleotide
aauagauggaagcauucug

SEQ ID NO: 3247628 - RNA, 19 nt, Artificial Sequence
  Description of Artificial Sequence: Synthetic oligonucleotide
ugaugaaauucacuagugg

SEQ ID NO: 3247629 - RNA, 19 nt, Artificial Sequence
  Description of Artificial Sequence: Synthetic oligonucleotide
cuggcaaucauugauaagg

SEQ ID NO: 3247630 - RNA, 19 nt, Artificial Sequence
  Description of Artificial Sequence: Synthetic oligonucleotide
caaucauugauaaggacag

SEQ ID NO: 3247631 - RNA, 19 nt, Artificial Sequence
  Description of Artificial Sequence: Synthetic oligonucleotide
uauuuacacauacacauaa

SEQ ID NO: 3247632 - RNA, 19 nt, Artificial Sequence
  Description of Artificial Sequence: Synthetic oligonucleotide
aaaauggcaucuuuccaag

SEQ ID NO: 3247633 - RNA, 19 nt, Artificial Sequence
  Description of Artificial Sequence: Synthetic oligonucleotide
aggauuugagccuugaucu

SEQ ID NO: 3247634 - RNA, 19 nt, Artificial Sequence
  Description of Artificial Sequence: Synthetic oligonucleotide
gaugaaauucacuagugga

SEQ ID NO: 3247635 - RNA, 19 nt, Artificial Sequence
  Description of Artificial Sequence: Synthetic oligonucleotide
auugaugaaauucacuagu

SEQ ID NO: 3247636 - RNA, 19 nt, Artificial Sequence
  Description of Artificial Sequence: Synthetic oligonucleotide
ucaggaaauagauggaagc

SEQ ID NO: 3247637 - RNA, 19 nt, Artificial Sequence
  Description of Artificial Sequence: Synthetic oligonucleotide
uugguuucuagauaggcug

SEQ ID NO: 3247638 - RNA, 19 nt, Artificial Sequence
  Description of Artificial Sequence: Synthetic oligonucleotide
auacacauaaacaugaagu

SEQ ID NO: 3247639 - RNA, 19 nt, Artificial Sequence
  Description of Artificial Sequence: Synthetic oligonucleotide
aacaugaagucucugguaa

SEQ ID NO: 3247640 - RNA, 19 nt, Artificial Sequence
  Description of Artificial Sequence: Synthetic oligonucleotide
uaaacaugaagucucuggu

SEQ ID NO: 3247641 - RNA, 19 nt, Artificial Sequence
  Description of Artificial Sequence: Synthetic oligonucleotide
auguugucauagcugagcc

SEQ ID NO: 3247642 - RNA, 19 nt, Artificial Sequence
  Description of Artificial Sequence: Synthetic oligonucleotide
gacaaaucaggauuugagc

SEQ ID NO: 3247643 - RNA, 19 nt, Artificial Sequence
  Description of Artificial Sequence: Synthetic oligonucleotide
ucucugguaaguaauggca

SEQ ID NO: 3247644 - RNA, 19 nt, Artificial Sequence
  Description of Artificial Sequence: Synthetic oligonucleotide
aauggcuacagcccaaccu

SEQ ID NO: 3247645 - RNA, 19 nt, Artificial Sequence
  Description of Artificial Sequence: Synthetic oligonucleotide
uggcaucuuuccaagaggg

SEQ ID NO: 3247646 - RNA, 19 nt, Artificial Sequence
  Description of Artificial Sequence: Synthetic oligonucleotide
aucauugauaaggacaggg

SEQ ID NO: 3247647 - RNA, 19 nt, Artificial Sequence
  Description of Artificial Sequence: Synthetic oligonucleotide
uucaggaaauagauggaag

SEQ ID NO: 3247648 - RNA, 19 nt, Artificial Sequence
  Description of Artificial Sequence: Synthetic oligonucleotide
gguaacugaaaauugauga

SEQ ID NO: 3247649 - RNA, 19 nt, Artificial Sequence
  Description of Artificial Sequence: Synthetic oligonucleotide
cacauaaacaugaagucuc

SEQ ID NO: 3247650 - RNA, 19 nt, Artificial Sequence
  Description of Artificial Sequence: Synthetic oligonucleotide
ucacuaguggacaaaucag

SEQ ID NO: 3247651 - RNA, 19 nt, Artificial Sequence
  Description of Artificial Sequence: Synthetic oligonucleotide
cugaaaauugaugaaauuc

SEQ ID NO: 3247652 - RNA, 19 nt, Artificial Sequence
  Description of Artificial Sequence: Synthetic oligonucleotide
cagguauuuacacauacac

SEQ ID NO: 3247653 - RNA, 19 nt, Artificial Sequence
  Description of Artificial Sequence: Synthetic oligonucleotide
ucauagcugagccauuucc

SEQ ID NO: 3247654 - RNA, 19 nt, Artificial Sequence
  Description of Artificial Sequence: Synthetic oligonucleotide
agagaacuacccuggaugg

SEQ ID NO: 3247655 - RNA, 19 nt, Artificial Sequence
  Description of Artificial Sequence: Synthetic oligonucleotide
ugaugguaacugaaaauug

SEQ ID NO: 3247656 - RNA, 19 nt, Artificial Sequence
  Description of Artificial Sequence: Synthetic oligonucleotide
gauggguccacccaaagga

SEQ ID NO: 3247657 - RNA, 19 nt, Artificial Sequence
  Description of Artificial Sequence: Synthetic oligonucleotide
cuugaucugggguagacug

SEQ ID NO: 3247658 - RNA, 19 nt, Artificial Sequence
  Description of Artificial Sequence: Synthetic oligonucleotide
gucaaaauggcaucuuucc

SEQ ID NO: 3247659 - RNA, 19 nt, Artificial Sequence
  Description of Artificial Sequence: Synthetic oligonucleotide
accagguauuuacacauac

SEQ ID NO: 3247660 - RNA, 19 nt, Artificial Sequence
  Description of Artificial Sequence: Synthetic oligonucleotide
uacacauaaacaugaaguc

SEQ ID NO: 3247661 - RNA, 19 nt, Artificial Sequence
  Description of Artificial Sequence: Synthetic oligonucleotide
uuugguuucuagauaggcu

SEQ ID NO: 3247662 - RNA, 19 nt, Artificial Sequence
  Description of Artificial Sequence: Synthetic oligonucleotide
uuguccagagguauggcag

SEQ ID NO: 3247663 - RNA, 19 nt, Artificial Sequence
  Description of Artificial Sequence: Synthetic oligonucleotide
aaggaugccagguucuuca

SEQ ID NO: 3247664 - RNA, 19 nt, Artificial Sequence
  Description of Artificial Sequence: Synthetic oligonucleotide
uuaaaaggcccaagaaucu

SEQ ID NO: 3247665 - RNA, 19 nt, Artificial Sequence
  Description of Artificial Sequence: Synthetic oligonucleotide
uccacagagaacuacccug

SEQ ID NO: 3247666 - RNA, 19 nt, Artificial Sequence
  Description of Artificial Sequence: Synthetic oligonucleotide
uaggcugccucauuaaaag

SEQ ID NO: 3247667 - RNA, 19 nt, Artificial Sequence
  Description of Artificial Sequence: Synthetic oligonucleotide
ucauuaaaaggcccaagaa

SEQ ID NO: 3247668 - RNA, 19 nt, Artificial Sequence
  Description of Artificial Sequence: Synthetic oligonucleotide
ugggaaugcagguuaaggc

SEQ ID NO: 3247669 - RNA, 19 nt, Artificial Sequence
  Description of Artificial Sequence: Synthetic oligonucleotide
auagauggaagcauucugg

SEQ ID NO: 3247670 - RNA, 19 nt, Artificial Sequence
  Description of Artificial Sequence: Synthetic oligonucleotide
auggcuacagcccaaccuc

SEQ ID NO: 3247671 - RNA, 19 nt, Artificial Sequence
  Description of Artificial Sequence: Synthetic oligonucleotide
ucugggaauguugucauag

SEQ ID NO: 3247672 - RNA, 19 nt, Artificial Sequence
  Description of Artificial Sequence: Synthetic oligonucleotide
gauggaagcauucuggcaa

SEQ ID NO: 3247673 - RNA, 19 nt, Artificial Sequence
  Description of Artificial Sequence: Synthetic oligonucleotide
aaccugucaaaauggcauc

SEQ ID NO: 3247674 - RNA, 19 nt, Artificial Sequence
  Description of Artificial Sequence: Synthetic oligonucleotide
ucaaaauggcaucuuucca

SEQ ID NO: 3247675 - RNA, 19 nt, Artificial Sequence
  Description of Artificial Sequence: Synthetic oligonucleotide
ugaaauucacuaguggaca

SEQ ID NO: 3247676 - RNA, 19 nt, Artificial Sequence
  Description of Artificial Sequence: Synthetic oligonucleotide
cauacacauaaacaugaag

SEQ ID NO: 3247677 - RNA, 19 nt, Artificial Sequence
  Description of Artificial Sequence: Synthetic oligonucleotide
aaaucuucugggaauguug

SEQ ID NO: 3247678 - RNA, 19 nt, Artificial Sequence
  Description of Artificial Sequence: Synthetic oligonucleotide
uuuuguucuguugauguga

SEQ ID NO: 3247679 - RNA, 19 nt, Artificial Sequence
  Description of Artificial Sequence: Synthetic oligonucleotide
cacuaguggacaaaucagg

SEQ ID NO: 3247680 - RNA, 19 nt, Artificial Sequence
  Description of Artificial Sequence: Synthetic oligonucleotide
gauuugagccuugaucugg

SEQ ID NO: 3247681 - RNA, 19 nt, Artificial Sequence
  Description of Artificial Sequence: Synthetic oligonucleotide
guugaugugaugguaacug

SEQ ID NO: 3247682 - RNA, 19 nt, Artificial Sequence
  Description of Artificial Sequence: Synthetic oligonucleotide
aaucucagguuguggaucu

SEQ ID NO: 3247683 - RNA, 19 nt, Artificial Sequence
  Description of Artificial Sequence: Synthetic oligonucleotide
aacuacccuggaugggucc

SEQ ID NO: 3247684 - RNA, 19 nt, Artificial Sequence
  Description of Artificial Sequence: Synthetic oligonucleotide
uaguggacaaaucaggauu

SEQ ID NO: 3247685 - RNA, 19 nt, Artificial Sequence
  Description of Artificial Sequence: Synthetic oligonucleotide
ucuguugaugugaugguaa

SEQ ID NO: 3247686 - RNA, 19 nt, Artificial Sequence
  Description of Artificial Sequence: Synthetic oligonucleotide
cagagaacuacccuggaug

SEQ ID NO: 3247687 - RNA, 19 nt, Artificial Sequence
  Description of Artificial Sequence: Synthetic oligonucleotide
aaauagauggaagcauucu

SEQ ID NO: 3247688 - RNA, 19 nt, Artificial Sequence
  Description of Artificial Sequence: Synthetic oligonucleotide
ugucaaaauggcaucuuuc

SEQ ID NO: 3247689 - RNA, 19 nt, Artificial Sequence
  Description of Artificial Sequence: Synthetic oligonucleotide
caauacucucuccacagag

SEQ ID NO: 3247690 - RNA, 19 nt, Artificial Sequence
  Description of Artificial Sequence: Synthetic oligonucleotide
ucuucugggaauguuguca

SEQ ID NO: 3247691 - RNA, 19 nt, Artificial Sequence
  Description of Artificial Sequence: Synthetic oligonucleotide
ugaccagguauuuacacau

SEQ ID NO: 3247692 - RNA, 19 nt, Artificial Sequence
  Description of Artificial Sequence: Synthetic oligonucleotide
cacauacacauaaacauga

SEQ ID NO: 3247693 - RNA, 19 nt, Artificial Sequence
  Description of Artificial Sequence: Synthetic oligonucleotide
uagauggaagcauucuggc

SEQ ID NO: 3247694 - RNA, 19 nt, Artificial Sequence
  Description of Artificial Sequence: Synthetic oligonucleotide
uaacugaaaauugaugaaa

SEQ ID NO: 3247695 - RNA, 19 nt, Artificial Sequence
  Description of Artificial Sequence: Synthetic oligonucleotide
auggcaucuuuccaagagg

SEQ ID NO: 3247696 - RNA, 19 nt, Artificial Sequence
  Description of Artificial Sequence: Synthetic oligonucleotide
ugggaauguugucauagcu

SEQ ID NO: 3247697 - RNA, 19 nt, Artificial Sequence
  Description of Artificial Sequence: Synthetic oligonucleotide
ucuuccacuuguccagagg

SEQ ID NO: 3247698 - RNA, 19 nt, Artificial Sequence
  Description of Artificial Sequence: Synthetic oligonucleotide
uccaagaggggucaaugac

SEQ ID NO: 3247699 - RNA, 19 nt, Artificial Sequence
  Description of Artificial Sequence: Synthetic oligonucleotide
ugugaugguaacugaaaau

SEQ ID NO: 3247700 - RNA, 19 nt, Artificial Sequence
  Description of Artificial Sequence: Synthetic oligonucleotide
acucucuccacagagaacu

SEQ ID NO: 3247701 - RNA, 19 nt, Artificial Sequence
  Description of Artificial Sequence: Synthetic oligonucleotide
ggugaugguagccaggaag

SEQ ID NO: 3247702 - RNA, 19 nt, Artificial Sequence
  Description of Artificial Sequence: Synthetic oligonucleotide
guagccaggaagcuuucgg

SEQ ID NO: 3247703 - RNA, 19 nt, Artificial Sequence
  Description of Artificial Sequence: Synthetic oligonucleotide
aacugaaaauugaugaaau

SEQ ID NO: 3247704 - RNA, 19 nt, Artificial Sequence
  Description of Artificial Sequence: Synthetic oligonucleotide
gguauuuacacauacacau

SEQ ID NO: 3247705 - RNA, 19 nt, Artificial Sequence
  Description of Artificial Sequence: Synthetic oligonucleotide
auugauaaggacaggguga

SEQ ID NO: 3247706 - RNA, 19 nt, Artificial Sequence
  Description of Artificial Sequence: Synthetic oligonucleotide
gaugguaacugaaaauuga

SEQ ID NO: 3247707 - RNA, 19 nt, Artificial Sequence
  Description of Artificial Sequence: Synthetic oligonucleotide
uaaggccugagugacaaug

SEQ ID NO: 3247708 - RNA, 19 nt, Artificial Sequence
  Description of Artificial Sequence: Synthetic oligonucleotide
ugagugacaauggcuacag

SEQ ID NO: 3247709 - RNA, 19 nt, Artificial Sequence
  Description of Artificial Sequence: Synthetic oligonucleotide
agaggggucaaugaccagg

SEQ ID NO: 3247710 - RNA, 19 nt, Artificial Sequence
  Description of Artificial Sequence: Synthetic oligonucleotide
ucuucaggaaauagaugga

SEQ ID NO: 3247711 - RNA, 19 nt, Artificial Sequence
  Description of Artificial Sequence: Synthetic oligonucleotide
ugaugugaugguaacugaa

SEQ ID NO: 3247712 - RNA, 19 nt, Artificial Sequence
  Description of Artificial Sequence: Synthetic oligonucleotide
uugaucugggguagacugg

SEQ ID NO: 3247713 - RNA, 19 nt, Artificial Sequence
  Description of Artificial Sequence: Synthetic oligonucleotide
ugacaauggcuacagccca

SEQ ID NO: 3247714 - RNA, 19 nt, Artificial Sequence
  Description of Artificial Sequence: Synthetic oligonucleotide
cauuuccuguauuucuucc

SEQ ID NO: 3247715 - RNA, 19 nt, Artificial Sequence
  Description of Artificial Sequence: Synthetic oligonucleotide
ggcuccaaaaucuucuggg

SEQ ID NO: 3247716 - RNA, 19 nt, Artificial Sequence
  Description of Artificial Sequence: Synthetic oligonucleotide
auagcugagccauuuccug

SEQ ID NO: 3247717 - RNA, 19 nt, Artificial Sequence
  Description of Artificial Sequence: Synthetic oligonucleotide
aauaucauuggacuggugc

SEQ ID NO: 3247718 - RNA, 19 nt, Artificial Sequence
  Description of Artificial Sequence: Synthetic oligonucleotide
aauauuuagggcuuguagg

SEQ ID NO: 3247719 - RNA, 19 nt, Artificial Sequence
  Description of Artificial Sequence: Synthetic oligonucleotide
acacaagagagccaaaugc

SEQ ID NO: 3247720 - RNA, 19 nt, Artificial Sequence
  Description of Artificial Sequence: Synthetic oligonucleotide
aguaggugaauauuuaggg

SEQ ID NO: 3247721 - RNA, 19 nt, Artificial Sequence
  Description of Artificial Sequence: Synthetic oligonucleotide
gaugacaugguacaguucc

SEQ ID NO: 3247722 - RNA, 19 nt, Artificial Sequence
  Description of Artificial Sequence: Synthetic oligonucleotide
aauacuugggagaaguagg

SEQ ID NO: 3247723 - RNA, 19 nt, Artificial Sequence
  Description of Artificial Sequence: Synthetic oligonucleotide
gaauauuuagggcuuguag

SEQ ID NO: 3247724 - RNA, 19 nt, Artificial Sequence
  Description of Artificial Sequence: Synthetic oligonucleotide
uaguaggugaguaaccagg

SEQ ID NO: 3247725 - RNA, 19 nt, Artificial Sequence
  Description of Artificial Sequence: Synthetic oligonucleotide
uuguaggugaguauuuggg

SEQ ID NO: 3247726 - RNA, 19 nt, Artificial Sequence
  Description of Artificial Sequence: Synthetic oligonucleotide
auaucauuggacuggugcg

SEQ ID NO: 3247727 - RNA, 19 nt, Artificial Sequence
  Description of Artificial Sequence: Synthetic oligonucleotide
uaggugaauauuuagggcu

SEQ ID NO: 3247728 - RNA, 19 nt, Artificial Sequence
  Description of Artificial Sequence: Synthetic oligonucleotide
aguauuuuggugugguagg

SEQ ID NO: 3247729 - RNA, 19 nt, Artificial Sequence
  Description of Artificial Sequence: Synthetic oligonucleotide
uccacaauaucauuggacu

SEQ ID NO: 3247730 - RNA, 19 nt, Artificial Sequence
  Description of Artificial Sequence: Synthetic oligonucleotide
aaggagaugacaugguaca

SEQ ID NO: 3247731 - RNA, 19 nt, Artificial Sequence
  Description of Artificial Sequence: Synthetic oligonucleotide
gauaauugacauaggaacc

SEQ ID NO: 3247732 - RNA, 19 nt, Artificial Sequence
  Description of Artificial Sequence: Synthetic oligonucleotide
auaauugacauaggaaccg

SEQ ID NO: 3247733 - RNA, 19 nt, Artificial Sequence
  Description of Artificial Sequence: Synthetic oligonucleotide
agugauggccaucaagugg

SEQ ID NO: 3247734 - RNA, 19 nt, Artificial Sequence
  Description of Artificial Sequence: Synthetic oligonucleotide
ugauaaucuucuuuuguug

SEQ ID NO: 3247735 - RNA, 19 nt, Artificial Sequence
  Description of Artificial Sequence: Synthetic oligonucleotide
aaagaucuccacaauauca

SEQ ID NO: 3247736 - RNA, 19 nt, Artificial Sequence
  Description of Artificial Sequence: Synthetic oligonucleotide
ucuugcagggccuugaacu

SEQ ID NO: 3247737 - RNA, 19 nt, Artificial Sequence
  Description of Artificial Sequence: Synthetic oligonucleotide
gaaguaggugaauauuuag

SEQ ID NO: 3247738 - RNA, 19 nt, Artificial Sequence
  Description of Artificial Sequence: Synthetic oligonucleotide
auauuuagggcuuguaggu

SEQ ID NO: 3247739 - RNA, 19 nt, Artificial Sequence
  Description of Artificial Sequence: Synthetic oligonucleotide
augccgauaauugacauag

SEQ ID NO: 3247740 - RNA, 19 nt, Artificial Sequence
  Description of Artificial Sequence: Synthetic oligonucleotide
aucuccacaauaucauugg

SEQ ID NO: 3247741 - RNA, 19 nt, Artificial Sequence
  Description of Artificial Sequence: Synthetic oligonucleotide
gucaaaggagaugacaugg

SEQ ID NO: 3247742 - RNA, 19 nt, Artificial Sequence
  Description of Artificial Sequence: Synthetic oligonucleotide
gaauacuugggagaaguag

SEQ ID NO: 3247743 - RNA, 19 nt, Artificial Sequence
  Description of Artificial Sequence: Synthetic oligonucleotide
uaggugaguaaccagggga

SEQ ID NO: 3247744 - RNA, 19 nt, Artificial Sequence
  Description of Artificial Sequence: Synthetic oligonucleotide
uuugggagagguuggggcg

SEQ ID NO: 3247745 - RNA, 19 nt, Artificial Sequence
  Description of Artificial Sequence: Synthetic oligonucleotide
cuaagcacccgcaucaggc

SEQ ID NO: 3247746 - RNA, 19 nt, Artificial Sequence
  Description of Artificial Sequence: Synthetic oligonucleotide
auaaucuucuuuuguuguc

SEQ ID NO: 3247747 - RNA, 19 nt, Artificial Sequence
  Description of Artificial Sequence: Synthetic oligonucleotide
uggacuggugcgcacaggg

SEQ ID NO: 3247748 - RNA, 19 nt, Artificial Sequence
  Description of Artificial Sequence: Synthetic oligonucleotide
caucaaguggccucgacag

SEQ ID NO: 3247749 - RNA, 19 nt, Artificial Sequence
  Description of Artificial Sequence: Synthetic oligonucleotide
gaguacuugggagaggugg

SEQ ID NO: 3247750 - RNA, 19 nt, Artificial Sequence
  Description of Artificial Sequence: Synthetic oligonucleotide
uuggcgaguauuuuggugu

SEQ ID NO: 3247751 - RNA, 19 nt, Artificial Sequence
  Description of Artificial Sequence: Synthetic oligonucleotide
gaguauuugggagagguug

SEQ ID NO: 3247752 - RNA, 19 nt, Artificial Sequence
  Description of Artificial Sequence: Synthetic oligonucleotide
guaggugaguauuugggag

SEQ ID NO: 3247753 - RNA, 19 nt, Artificial Sequence
  Description of Artificial Sequence: Synthetic oligonucleotide
cacaauaucauuggacugg

SEQ ID NO: 3247754 - RNA, 19 nt, Artificial Sequence
  Description of Artificial Sequence: Synthetic oligonucleotide
uggguaggagaauacuugg

SEQ ID NO: 3247755 - RNA, 19 nt, Artificial Sequence
  Description of Artificial Sequence: Synthetic oligonucleotide
aaucuucuuuuguugucag

SEQ ID NO: 3247756 - RNA, 19 nt, Artificial Sequence
  Description of Artificial Sequence: Synthetic oligonucleotide
guaaguggagcccuugggg

SEQ ID NO: 3247757 - RNA, 19 nt, Artificial Sequence
  Description of Artificial Sequence: Synthetic oligonucleotide
uacaguucccgcuccaggg

SEQ ID NO: 3247758 - RNA, 19 nt, Artificial Sequence
  Description of Artificial Sequence: Synthetic oligonucleotide
cugucaucagggcugaugg

SEQ ID NO: 3247759 - RNA, 19 nt, Artificial Sequence
  Description of Artificial Sequence: Synthetic oligonucleotide
gagguugggguguagacug

SEQ ID NO: 3247760 - RNA, 19 nt, Artificial Sequence
  Description of Artificial Sequence: Synthetic oligonucleotide
cuuguaggugaguauuugg

SEQ ID NO: 3247761 - RNA, 19 nt, Artificial Sequence
  Description of Artificial Sequence: Synthetic oligonucleotide
guaggagaauacuugggag

SEQ ID NO: 3247762 - RNA, 19 nt, Artificial Sequence
  Description of Artificial Sequence: Synthetic oligonucleotide
ugggguguagacuggagag

SEQ ID NO: 3247763 - RNA, 19 nt, Artificial Sequence
  Description of Artificial Sequence: Synthetic oligonucleotide
acuugggagaaguagguga

SEQ ID NO: 3247764 - RNA, 19 nt, Artificial Sequence
  Description of Artificial Sequence: Synthetic oligonucleotide
gaguauguaggagagguug

SEQ ID NO: 3247765 - RNA, 19 nt, Artificial Sequence
  Description of Artificial Sequence: Synthetic oligonucleotide
aguaaguggagcccuuggg

SEQ ID NO: 3247766 - RNA, 19 nt, Artificial Sequence
  Description of Artificial Sequence: Synthetic oligonucleotide
ccaucagucuccaagaucc

SEQ ID NO: 3247767 - RNA, 19 nt, Artificial Sequence
  Description of Artificial Sequence: Synthetic oligonucleotide
uucuuuuguugucagucug

SEQ ID NO: 3247768 - RNA, 19 nt, Artificial Sequence
  Description of Artificial Sequence: Synthetic oligonucleotide
auuuuggugugguagguga

SEQ ID NO: 3247769 - RNA, 19 nt, Artificial Sequence
  Description of Artificial Sequence: Synthetic oligonucleotide
auaggaaccgucaaaggag

SEQ ID NO: 3247770 - RNA, 19 nt, Artificial Sequence
  Description of Artificial Sequence: Synthetic oligonucleotide
ucuucuuuuguugucaguc

SEQ ID NO: 3247771 - RNA, 19 nt, Artificial Sequence
  Description of Artificial Sequence: Synthetic oligonucleotide
cacaccaucagucuccaag

SEQ ID NO: 3247772 - RNA, 19 nt, Artificial Sequence
  Description of Artificial Sequence: Synthetic oligonucleotide
uaggagaauacuugggaga

SEQ ID NO: 3247773 - RNA, 19 nt, Artificial Sequence
  Description of Artificial Sequence: Synthetic oligonucleotide
uguaggugaguauuuggga

SEQ ID NO: 3247774 - RNA, 19 nt, Artificial Sequence
  Description of Artificial Sequence: Synthetic oligonucleotide
guaggugaauauuuagggc

SEQ ID NO: 3247775 - RNA, 19 nt, Artificial Sequence
  Description of Artificial Sequence: Synthetic oligonucleotide
uuggcgaguauguaggaga

SEQ ID NO: 3247776 - RNA, 19 nt, Artificial Sequence
  Description of Artificial Sequence: Synthetic oligonucleotide
gagguuggcgaguauguag

SEQ ID NO: 3247777 - RNA, 19 nt, Artificial Sequence
  Description of Artificial Sequence: Synthetic oligonucleotide
uaaagaucuccacaauauc

SEQ ID NO: 3247778 - RNA, 19 nt, Artificial Sequence
  Description of Artificial Sequence: Synthetic oligonucleotide
ugaugauaaucuucuuuug

SEQ ID NO: 3247779 - RNA, 19 nt, Artificial Sequence
  Description of Artificial Sequence: Synthetic oligonucleotide
auuuagggcuuguagguga

SEQ ID NO: 3247780 - RNA, 19 nt, Artificial Sequence
  Description of Artificial Sequence: Synthetic oligonucleotide
cgauaauugacauaggaac

SEQ ID NO: 3247781 - RNA, 19 nt, Artificial Sequence
  Description of Artificial Sequence: Synthetic oligonucleotide
auccuucucgcuaagcacc

SEQ ID NO: 3247782 - RNA, 19 nt, Artificial Sequence
  Description of Artificial Sequence: Synthetic oligonucleotide
aaaugccgauaauugacau

SEQ ID NO: 3247783 - RNA, 19 nt, Artificial Sequence
  Description of Artificial Sequence: Synthetic oligonucleotide
acauaggaaccgucaaagg

SEQ ID NO: 3247784 - RNA, 19 nt, Artificial Sequence
  Description of Artificial Sequence: Synthetic oligonucleotide
ucagucuccaagauccacu

SEQ ID NO: 3247785 - RNA, 19 nt, Artificial Sequence
  Description of Artificial Sequence: Synthetic oligonucleotide
uaaucuucuuuuguuguca

SEQ ID NO: 3247786 - RNA, 19 nt, Artificial Sequence
  Description of Artificial Sequence: Synthetic oligonucleotide
aauugacauaggaaccguc

SEQ ID NO: 3247787 - RNA, 19 nt, Artificial Sequence
  Description of Artificial Sequence: Synthetic oligonucleotide
auggccaucaaguggccuc

SEQ ID NO: 3247788 - RNA, 19 nt, Artificial Sequence
  Description of Artificial Sequence: Synthetic oligonucleotide
ucgcuaagcacccgcauca

SEQ ID NO: 3247789 - RNA, 19 nt, Artificial Sequence
  Description of Artificial Sequence: Synthetic oligonucleotide
accguaaagaucuccacaa

SEQ ID NO: 3247790 - RNA, 19 nt, Artificial Sequence
  Description of Artificial Sequence: Synthetic oligonucleotide
cuccacaauaucauuggac

SEQ ID NO: 3247791 - RNA, 19 nt, Artificial Sequence
  Description of Artificial Sequence: Synthetic oligonucleotide
gaaccgucaaaggagauga

SEQ ID NO: 3247792 - RNA, 19 nt, Artificial Sequence
  Description of Artificial Sequence: Synthetic oligonucleotide
gauaaucuucuuuuguugu

SEQ ID NO: 3247793 - RNA, 19 nt, Artificial Sequence
  Description of Artificial Sequence: Synthetic oligonucleotide
cuggguaggagaauacuug

SEQ ID NO: 3247794 - RNA, 19 nt, Artificial Sequence
  Description of Artificial Sequence: Synthetic oligonucleotide
cauaggaaccgucaaagga

SEQ ID NO: 3247795 - RNA, 19 nt, Artificial Sequence
  Description of Artificial Sequence: Synthetic oligonucleotide
uuccgcacagccucaaugc

SEQ ID NO: 3247796 - RNA, 19 nt, Artificial Sequence
  Description of Artificial Sequence: Synthetic oligonucleotide
uggugggugaguacuuggg

SEQ ID NO: 3247797 - RNA, 19 nt, Artificial Sequence
  Description of Artificial Sequence: Synthetic oligonucleotide
accaucagucuccaagauc

SEQ ID NO: 3247798 - RNA, 19 nt, Artificial Sequence
  Description of Artificial Sequence: Synthetic oligonucleotide
uuuuggugugguaggugag

SEQ ID NO: 3247799 - RNA, 19 nt, Artificial Sequence
  Description of Artificial Sequence: Synthetic oligonucleotide
uuuagggcuuguaggugag

SEQ ID NO: 3247800 - RNA, 19 nt, Artificial Sequence
  Description of Artificial Sequence: Synthetic oligonucleotide
gagguuggcgaguauuuug

SEQ ID NO: 3247801 - RNA, 19 nt, Artificial Sequence
  Description of Artificial Sequence: Synthetic oligonucleotide
acaguucccgcuccagggc

SEQ ID NO: 3247802 - RNA, 19 nt, Artificial Sequence
  Description of Artificial Sequence: Synthetic oligonucleotide
gugauggccaucaaguggc

SEQ ID NO: 3247803 - RNA, 19 nt, Artificial Sequence
  Description of Artificial Sequence: Synthetic oligonucleotide
uaggugaguauuugggaga

SEQ ID NO: 3247804 - RNA, 19 nt, Artificial Sequence
  Description of Artificial Sequence: Synthetic oligonucleotide
uccaagauccacucuugca

SEQ ID NO: 3247805 - RNA, 19 nt, Artificial Sequence
  Description of Artificial Sequence: Synthetic oligonucleotide
gaguaaguggagcccuugg

SEQ ID NO: 3247806 - RNA, 19 nt, Artificial Sequence
  Description of Artificial Sequence: Synthetic oligonucleotide
uaggaaccgucaaaggaga

SEQ ID NO: 3247807 - RNA, 19 nt, Artificial Sequence
  Description of Artificial Sequence: Synthetic oligonucleotide
aguauuugggagagguugg

SEQ ID NO: 3247808 - RNA, 19 nt, Artificial Sequence
  Description of Artificial Sequence: Synthetic oligonucleotide
aaugcccagcaccguaaag

SEQ ID NO: 3247809 - RNA, 19 nt, Artificial Sequence
  Description of Artificial Sequence: Synthetic oligonucleotide
gauccacucuugcagggcc

SEQ ID NO: 3247810 - RNA, 19 nt, Artificial Sequence
  Description of Artificial Sequence: Synthetic oligonucleotide
aagaucuccacaauaucau

SEQ ID NO: 3247811 - RNA, 19 nt, Artificial Sequence
  Description of Artificial Sequence: Synthetic oligonucleotide
ugucacacaagagagccaa

SEQ ID NO: 3247812 - RNA, 19 nt, Artificial Sequence
  Description of Artificial Sequence: Synthetic oligonucleotide
gugggugaguacuugggag

SEQ ID NO: 3247813 - RNA, 19 nt, Artificial Sequence
  Description of Artificial Sequence: Synthetic oligonucleotide
uggcgaguauguaggagag

SEQ ID NO: 3247814 - RNA, 19 nt, Artificial Sequence
  Description of Artificial Sequence: Synthetic oligonucleotide
uugggguguagacuggaga

SEQ ID NO: 3247815 - RNA, 19 nt, Artificial Sequence
  Description of Artificial Sequence: Synthetic oligonucleotide
aagcacccgcaucaggcuc

SEQ ID NO: 3247816 - RNA, 19 nt, Artificial Sequence
  Description of Artificial Sequence: Synthetic oligonucleotide
cuaguaggugaguaaccag

SEQ ID NO: 3247817 - RNA, 19 nt, Artificial Sequence
  Description of Artificial Sequence: Synthetic oligonucleotide
ugcauuaugcuuuucaacc

SEQ ID NO: 3247818 - RNA, 19 nt, Artificial Sequence
  Description of Artificial Sequence: Synthetic oligonucleotide
uucucuuccucccacaccg

SEQ ID NO: 3247819 - RNA, 19 nt, Artificial Sequence
  Description of Artificial Sequence: Synthetic oligonucleotide
aauucauucaggcccauga

SEQ ID NO: 3247820 - RNA, 19 nt, Artificial Sequence
  Description of Artificial Sequence: Synthetic oligonucleotide
aauuucaucuuccauuccu

SEQ ID NO: 3247821 - RNA, 19 nt, Artificial Sequence
  Description of Artificial Sequence: Synthetic oligonucleotide
uuuucaaauuucaucuucc

SEQ ID NO: 3247822 - RNA, 19 nt, Artificial Sequence
  Description of Artificial Sequence: Synthetic oligonucleotide
uguaucuuucuucauccgg

SEQ ID NO: 3247823 - RNA, 19 nt, Artificial Sequence
  Description of Artificial Sequence: Synthetic oligonucleotide
ucuguaucuuucuucaucc

SEQ ID NO: 3247824 - RNA, 19 nt, Artificial Sequence
  Description of Artificial Sequence: Synthetic oligonucleotide
aauucuucgaaggucaugu

SEQ ID NO: 3247825 - RNA, 19 nt, Artificial Sequence
  Description of Artificial Sequence: Synthetic oligonucleotide
uucuucgaaggucaugucg

SEQ ID NO: 3247826 - RNA, 19 nt, Artificial Sequence
  Description of Artificial Sequence: Synthetic oligonucleotide
ucaaauuucaucuuccauu

SEQ ID NO: 3247827 - RNA, 19 nt, Artificial Sequence
  Description of Artificial Sequence: Synthetic oligonucleotide
aaauuucaucuuccauucc

SEQ ID NO: 3247828 - RNA, 19 nt, Artificial Sequence
  Description of Artificial Sequence: Synthetic oligonucleotide
ucuucgaaggucaugucgc

SEQ ID NO: 3247829 - RNA, 19 nt, Artificial Sequence
  Description of Artificial Sequence: Synthetic oligonucleotide
ucauucaggcccaugaaga

SEQ ID NO: 3247830 - RNA, 19 nt, Artificial Sequence
  Description of Artificial Sequence: Synthetic oligonucleotide
ucuucuguaucuuucuuca

SEQ ID NO: 3247831 - RNA, 19 nt, Artificial Sequence
  Description of Artificial Sequence: Synthetic oligonucleotide
gcugaauucauucaggccc

SEQ ID NO: 3247832 - RNA, 19 nt, Artificial Sequence
  Description of Artificial Sequence: Synthetic oligonucleotide
ucuuucuucauccgggcug

SEQ ID NO: 3247833 - RNA, 19 nt, Artificial Sequence
  Description of Artificial Sequence: Synthetic oligonucleotide
uucauucaggcccaugaag

SEQ ID NO: 3247834 - RNA, 19 nt, Artificial Sequence
  Description of Artificial Sequence: Synthetic oligonucleotide
uucaggcccaugaagaagc

SEQ ID NO: 3247835 - RNA, 19 nt, Artificial Sequence
  Description of Artificial Sequence: Synthetic oligonucleotide
cauucagcauccaaacugg

SEQ ID NO: 3247836 - RNA, 19 nt, Artificial Sequence
  Description of Artificial Sequence: Synthetic oligonucleotide
caaauuucaucuuccauuc

SEQ ID NO: 3247837 - RNA, 19 nt, Artificial Sequence
  Description of Artificial Sequence: Synthetic oligonucleotide
auuccucccauucagcauc

SEQ ID NO: 3247838 - RNA, 19 nt, Artificial Sequence
  Description of Artificial Sequence: Synthetic oligonucleotide
uuccugaauucuucgaagg

SEQ ID NO: 3247839 - RNA, 19 nt, Artificial Sequence
  Description of Artificial Sequence: Synthetic oligonucleotide
ucagcauccaaacugggau

SEQ ID NO: 3247840 - RNA, 19 nt, Artificial Sequence
  Description of Artificial Sequence: Synthetic oligonucleotide
agcacauuuuccugaauuc

SEQ ID NO: 3247841 - RNA, 19 nt, Artificial Sequence
  Description of Artificial Sequence: Synthetic oligonucleotide
uuuccugaauucuucgaag

SEQ ID NO: 3247842 - RNA, 19 nt, Artificial Sequence
  Description of Artificial Sequence: Synthetic oligonucleotide
ugucgcugaauucauucag

SEQ ID NO: 3247843 - RNA, 19 nt, Artificial Sequence
  Description of Artificial Sequence: Synthetic oligonucleotide
uuuuccugaauucuucgaa

SEQ ID NO: 3247844 - RNA, 19 nt, Artificial Sequence
  Description of Artificial Sequence: Synthetic oligonucleotide
ucaucuuccauuccuccca

SEQ ID NO: 3247845 - RNA, 19 nt, Artificial Sequence
  Description of Artificial Sequence: Synthetic oligonucleotide
aagaagcuggucuugcccu

SEQ ID NO: 3247846 - RNA, 19 nt, Artificial Sequence
  Description of Artificial Sequence: Synthetic oligonucleotide
uuccauuccucccauucag

SEQ ID NO: 3247847 - RNA, 19 nt, Artificial Sequence
  Description of Artificial Sequence: Synthetic oligonucleotide
ugauagagcagcugaggcc

SEQ ID NO: 3247848 - RNA, 19 nt, Artificial Sequence
  Description of Artificial Sequence: Synthetic oligonucleotide
gaagaagcuggucuugccc

SEQ ID NO: 3247849 - RNA, 19 nt, Artificial Sequence
  Description of Artificial Sequence: Synthetic oligonucleotide
aaggucaugucgcugaauu

SEQ ID NO: 3247850 - RNA, 19 nt, Artificial Sequence
  Description of Artificial Sequence: Synthetic oligonucleotide
cauuuuccugaauucuucg

SEQ ID NO: 3247851 - RNA, 19 nt, Artificial Sequence
  Description of Artificial Sequence: Synthetic oligonucleotide
gaucaggugauagagcagc

SEQ ID NO: 3247852 - RNA, 19 nt, Artificial Sequence
  Description of Artificial Sequence: Synthetic oligonucleotide
guaucuuucuucauccggg

SEQ ID NO: 3247853 - RNA, 19 nt, Artificial Sequence
  Description of Artificial Sequence: Synthetic oligonucleotide
ucuucauccgggcuguaug

SEQ ID NO: 3247854 - RNA, 19 nt, Artificial Sequence
  Description of Artificial Sequence: Synthetic oligonucleotide
uuucaaauuucaucuucca

SEQ ID NO: 3247855 - RNA, 19 nt, Artificial Sequence
  Description of Artificial Sequence: Synthetic oligonucleotide
uucuguaucuuucuucauc

SEQ ID NO: 3247856 - RNA, 19 nt, Artificial Sequence
  Description of Artificial Sequence: Synthetic oligonucleotide
ucuuccauuccucccauuc

SEQ ID NO: 3247857 - RNA, 19 nt, Artificial Sequence
  Description of Artificial Sequence: Synthetic oligonucleotide
uuucaucuuccauuccucc

SEQ ID NO: 3247858 - RNA, 19 nt, Artificial Sequence
  Description of Artificial Sequence: Synthetic oligonucleotide
uucaaauuucaucuuccau

SEQ ID NO: 3247859 - RNA, 19 nt, Artificial Sequence
  Description of Artificial Sequence: Synthetic oligonucleotide
gauagagcagcugaggcca

SEQ ID NO: 3247860 - RNA, 19 nt, Artificial Sequence
  Description of Artificial Sequence: Synthetic oligonucleotide
cucguacucugcauuaugc

SEQ ID NO: 3247861 - RNA, 19 nt, Artificial Sequence
  Description of Artificial Sequence: Synthetic oligonucleotide
ucugcauuaugcuuuucaa

SEQ ID NO: 3247862 - RNA, 19 nt, Artificial Sequence
  Description of Artificial Sequence: Synthetic oligonucleotide
caugucgcugaauucauuc

SEQ ID NO: 3247863 - RNA, 19 nt, Artificial Sequence
  Description of Artificial Sequence: Synthetic oligonucleotide
uuccacagcacauuuuccu

SEQ ID NO: 3247864 - RNA, 19 nt, Artificial Sequence
  Description of Artificial Sequence: Synthetic oligonucleotide
uucaucuuccauuccuccc

SEQ ID NO: 3247865 - RNA, 19 nt, Artificial Sequence
  Description of Artificial Sequence: Synthetic oligonucleotide
gugauagagcagcugaggc

SEQ ID NO: 3247866 - RNA, 19 nt, Artificial Sequence
  Description of Artificial Sequence: Synthetic oligonucleotide
ucgaaggucaugucgcuga

SEQ ID NO: 3247867 - RNA, 19 nt, Artificial Sequence
  Description of Artificial Sequence: Synthetic oligonucleotide
ucgcugaauucauucaggc

SEQ ID NO: 3247868 - RNA, 19 nt, Artificial Sequence
  Description of Artificial Sequence: Synthetic oligonucleotide
uucagcauccaaacuggga

SEQ ID NO: 3247869 - RNA, 19 nt, Artificial Sequence
  Description of Artificial Sequence: Synthetic oligonucleotide
cugaauucuucgaagguca

SEQ ID NO: 3247870 - RNA, 19 nt, Artificial Sequence
  Description of Artificial Sequence: Synthetic oligonucleotide
augaagaagcuggucuugc

SEQ ID NO: 3247871 - RNA, 19 nt, Artificial Sequence
  Description of Artificial Sequence: Synthetic oligonucleotide
aggcccaugaagaagcugg

SEQ ID NO: 3247872 - RNA, 19 nt, Artificial Sequence
  Description of Artificial Sequence: Synthetic oligonucleotide
uuuucuucucuuccuccca

SEQ ID NO: 3247873 - RNA, 19 nt, Artificial Sequence
  Description of Artificial Sequence: Synthetic oligonucleotide
uaucuuucuucauccgggc

SEQ ID NO: 3247874 - RNA, 19 nt, Artificial Sequence
  Description of Artificial Sequence: Synthetic oligonucleotide
acauuuuccugaauucuuc

SEQ ID NO: 3247875 - RNA, 19 nt, Artificial Sequence
  Description of Artificial Sequence: Synthetic oligonucleotide
ucccauucagcauccaaac

SEQ ID NO: 3247876 - RNA, 19 nt, Artificial Sequence
  Description of Artificial Sequence: Synthetic oligonucleotide
uccacagcacauuuuccug

SEQ ID NO: 3247877 - RNA, 19 nt, Artificial Sequence
  Description of Artificial Sequence: Synthetic oligonucleotide
uccugaauucuucgaaggu

SEQ ID NO: 3247878 - RNA, 19 nt, Artificial Sequence
  Description of Artificial Sequence: Synthetic oligonucleotide
auuuuccugaauucuucga

SEQ ID NO: 3247879 - RNA, 19 nt, Artificial Sequence
  Description of Artificial Sequence: Synthetic oligonucleotide
gcugaggccauucucaagc

SEQ ID NO: 3247880 - RNA, 19 nt, Artificial Sequence
  Description of Artificial Sequence: Synthetic oligonucleotide
auuucaucuuccauuccuc

SEQ ID NO: 3247881 - RNA, 19 nt, Artificial Sequence
  Description of Artificial Sequence: Synthetic oligonucleotide
cugcauuaugcuuuucaac

SEQ ID NO: 3247882 - RNA, 19 nt, Artificial Sequence
  Description of Artificial Sequence: Synthetic oligonucleotide
aacugggaucaggugauag

SEQ ID NO: 3247883 - RNA, 19 nt, Artificial Sequence
  Description of Artificial Sequence: Synthetic oligonucleotide
ugaagaagcuggucuugcc

SEQ ID NO: 3247884 - RNA, 19 nt, Artificial Sequence
  Description of Artificial Sequence: Synthetic oligonucleotide
cugggaucaggugauagag

SEQ ID NO: 3247885 - RNA, 19 nt, Artificial Sequence
  Description of Artificial Sequence: Synthetic oligonucleotide
agcagcugaggccauucuc

SEQ ID NO: 3247886 - RNA, 19 nt, Artificial Sequence
  Description of Artificial Sequence: Synthetic oligonucleotide
ucuucucuuccucccacac

SEQ ID NO: 3247887 - RNA, 19 nt, Artificial Sequence
  Description of Artificial Sequence: Synthetic oligonucleotide
ccauucagcauccaaacug

SEQ ID NO: 3247888 - RNA, 19 nt, Artificial Sequence
  Description of Artificial Sequence: Synthetic oligonucleotide
uuucuucucuuccucccac

SEQ ID NO: 3247889 - RNA, 19 nt, Artificial Sequence
  Description of Artificial Sequence: Synthetic oligonucleotide
ugaggccauucucaagcag

SEQ ID NO: 3247890 - RNA, 19 nt, Artificial Sequence
  Description of Artificial Sequence: Synthetic oligonucleotide
ucguacucugcauuaugcu

SEQ ID NO: 3247891 - RNA, 19 nt, Artificial Sequence
  Description of Artificial Sequence: Synthetic oligonucleotide
uccaaacugggaucaggug

SEQ ID NO: 3247892 - RNA, 19 nt, Artificial Sequence
  Description of Artificial Sequence: Synthetic oligonucleotide
ugggaucaggugauagagc

SEQ ID NO: 3247893 - RNA, 19 nt, Artificial Sequence
  Description of Artificial Sequence: Synthetic oligonucleotide
aggucaugucgcugaauuc

SEQ ID NO: 3247894 - RNA, 19 nt, Artificial Sequence
  Description of Artificial Sequence: Synthetic oligonucleotide
cuguaucuuucuucauccg

SEQ ID NO: 3247895 - RNA, 19 nt, Artificial Sequence
  Description of Artificial Sequence: Synthetic oligonucleotide
gggaucaggugauagagca

SEQ ID NO: 3247896 - RNA, 19 nt, Artificial Sequence
  Description of Artificial Sequence: Synthetic oligonucleotide
ucccacaccggucuucugu

SEQ ID NO: 3247897 - RNA, 19 nt, Artificial Sequence
  Description of Artificial Sequence: Synthetic oligonucleotide
uccauuccucccauucagc

SEQ ID NO: 3247898 - RNA, 19 nt, Artificial Sequence
  Description of Artificial Sequence: Synthetic oligonucleotide
acugggaucaggugauaga

SEQ ID NO: 3247899 - RNA, 19 nt, Artificial Sequence
  Description of Artificial Sequence: Synthetic oligonucleotide
gucuucuguaucuuucuuc

SEQ ID NO: 3247900 - RNA, 19 nt, Artificial Sequence
  Description of Artificial Sequence: Synthetic oligonucleotide
auucuucgaaggucauguc

SEQ ID NO: 3247901 - RNA, 19 nt, Artificial Sequence
  Description of Artificial Sequence: Synthetic oligonucleotide
gucgcugaauucauucagg

SEQ ID NO: 3247902 - RNA, 19 nt, Artificial Sequence
  Description of Artificial Sequence: Synthetic oligonucleotide
auucaggcccaugaagaag

SEQ ID NO: 3247903 - RNA, 19 nt, Artificial Sequence
  Description of Artificial Sequence: Synthetic oligonucleotide
acaccggucuucuguaucu

SEQ ID NO: 3247904 - RNA, 19 nt, Artificial Sequence
  Description of Artificial Sequence: Synthetic oligonucleotide
cauccaaacugggaucagg

SEQ ID NO: 3247905 - RNA, 19 nt, Artificial Sequence
  Description of Artificial Sequence: Synthetic oligonucleotide
augucgcugaauucauuca

SEQ ID NO: 3247906 - RNA, 19 nt, Artificial Sequence
  Description of Artificial Sequence: Synthetic oligonucleotide
caggugauagagcagcuga

SEQ ID NO: 3247907 - RNA, 19 nt, Artificial Sequence
  Description of Artificial Sequence: Synthetic oligonucleotide
gcuggucuugcccugcucg

SEQ ID NO: 3247908 - RNA, 19 nt, Artificial Sequence
  Description of Artificial Sequence: Synthetic oligonucleotide
gaauucuucgaaggucaug

SEQ ID NO: 3247909 - RNA, 19 nt, Artificial Sequence
  Description of Artificial Sequence: Synthetic oligonucleotide
ggugauagagcagcugagg

SEQ ID NO: 3247910 - RNA, 19 nt, Artificial Sequence
  Description of Artificial Sequence: Synthetic oligonucleotide
uuaugcuuuucaaccuuuu

SEQ ID NO: 3247911 - RNA, 19 nt, Artificial Sequence
  Description of Artificial Sequence: Synthetic oligonucleotide
auucauucaggcccaugaa

SEQ ID NO: 3247912 - RNA, 19 nt, Artificial Sequence
  Description of Artificial Sequence: Synthetic oligonucleotide
agcauccaaacugggauca

SEQ ID NO: 3247913 - RNA, 19 nt, Artificial Sequence
  Description of Artificial Sequence: Synthetic oligonucleotide
cucugcauuaugcuuuuca

SEQ ID NO: 3247914 - RNA, 19 nt, Artificial Sequence
  Description of Artificial Sequence: Synthetic oligonucleotide
ucaggugauagagcagcug

SEQ ID NO: 3247915 - RNA, 19 nt, Artificial Sequence
  Description of Artificial Sequence: Synthetic oligonucleotide
cuucucuuccucccacacc

SEQ ID NO: 3247916 - RNA, 19 nt, Artificial Sequence
  Description of Artificial Sequence: Synthetic oligonucleotide
ugaauucuucgaaggucau

SEQ ID NO: 3247917 - RNA, 19 nt, Artificial Sequence
  Description of Artificial Sequence: Synthetic oligonucleotide
gaugguuucauucagcugc

SEQ ID NO: 3247918 - RNA, 19 nt, Artificial Sequence
  Description of Artificial Sequence: Synthetic oligonucleotide
uccucauuguaguugaugg

SEQ ID NO: 3247919 - RNA, 19 nt, Artificial Sequence
  Description of Artificial Sequence: Synthetic oligonucleotide
gaacuucucagccagguag

SEQ ID NO: 3247920 - RNA, 19 nt, Artificial Sequence
  Description of Artificial Sequence: Synthetic oligonucleotide
auaauguccugccaggcgg

SEQ ID NO: 3247921 - RNA, 19 nt, Artificial Sequence
  Description of Artificial Sequence: Synthetic oligonucleotide
aagcauaauguccugccag

SEQ ID NO: 3247922 - RNA, 19 nt, Artificial Sequence
  Description of Artificial Sequence: Synthetic oligonucleotide
uucucagccagguagagca

SEQ ID NO: 3247923 - RNA, 19 nt, Artificial Sequence
  Description of Artificial Sequence: Synthetic oligonucleotide
ggugauaugagugaugugg

SEQ ID NO: 3247924 - RNA, 19 nt, Artificial Sequence
  Description of Artificial Sequence: Synthetic oligonucleotide
aggaaugccacccacagca

SEQ ID NO: 3247925 - RNA, 19 nt, Artificial Sequence
  Description of Artificial Sequence: Synthetic oligonucleotide
gguuguacaggccacaugg

SEQ ID NO: 3247926 - RNA, 19 nt, Artificial Sequence
  Description of Artificial Sequence: Synthetic oligonucleotide
uuguaugugguguuggugc

SEQ ID NO: 3247927 - RNA, 19 nt, Artificial Sequence
  Description of Artificial Sequence: Synthetic oligonucleotide
cuuuguauacuccucugcg

SEQ ID NO: 3247928 - RNA, 19 nt, Artificial Sequence
  Description of Artificial Sequence: Synthetic oligonucleotide
uccgaacugaaauucacag

SEQ ID NO: 3247929 - RNA, 19 nt, Artificial Sequence
  Description of Artificial Sequence: Synthetic oligonucleotide
uggagaagaagguaagugc

SEQ ID NO: 3247930 - RNA, 19 nt, Artificial Sequence
  Description of Artificial Sequence: Synthetic oligonucleotide
uaaaucagcaccggcauag

SEQ ID NO: 3247931 - RNA, 19 nt, Artificial Sequence
  Description of Artificial Sequence: Synthetic oligonucleotide
auguugacuccuccgagcc

SEQ ID NO: 3247932 - RNA, 19 nt, Artificial Sequence
  Description of Artificial Sequence: Synthetic oligonucleotide
ugugauguugacuccuccg

SEQ ID NO: 3247933 - RNA, 19 nt, Artificial Sequence
  Description of Artificial Sequence: Synthetic oligonucleotide
aagucccuucuccagugcc

SEQ ID NO: 3247934 - RNA, 19 nt, Artificial Sequence
  Description of Artificial Sequence: Synthetic oligonucleotide
uccacgcugacccacuugg

SEQ ID NO: 3247935 - RNA, 19 nt, Artificial Sequence
  Description of Artificial Sequence: Synthetic oligonucleotide
agugccaacagcuggaaga

SEQ ID NO: 3247936 - RNA, 19 nt, Artificial Sequence
  Description of Artificial Sequence: Synthetic oligonucleotide
aucacauuggccagcagcc

SEQ ID NO: 3247937 - RNA, 19 nt, Artificial Sequence
  Description of Artificial Sequence: Synthetic oligonucleotide
guagcucucacccaggcgc

SEQ ID NO: 3247938 - RNA, 19 nt, Artificial Sequence
  Description of Artificial Sequence: Synthetic oligonucleotide
gaagguaagugccaacagc

SEQ ID NO: 3247939 - RNA, 19 nt, Artificial Sequence
  Description of Artificial Sequence: Synthetic oligonucleotide
auggcugaagcauaauguc

SEQ ID NO: 3247940 - RNA, 19 nt, Artificial Sequence
  Description of Artificial Sequence: Synthetic oligonucleotide
aaucagcaccggcauagac

SEQ ID NO: 3247941 - RNA, 19 nt, Artificial Sequence
  Description of Artificial Sequence: Synthetic oligonucleotide
auagacaacaucacauugg

SEQ ID NO: 3247942 - RNA, 19 nt, Artificial Sequence
  Description of Artificial Sequence: Synthetic oligonucleotide
gugagugugauguugacuc

SEQ ID NO: 3247943 - RNA, 19 nt, Artificial Sequence
  Description of Artificial Sequence: Synthetic oligonucleotide
aaugccacccacagcaugg

SEQ ID NO: 3247944 - RNA, 19 nt, Artificial Sequence
  Description of Artificial Sequence: Synthetic oligonucleotide
acccacuugggacugaagg

SEQ ID NO: 3247945 - RNA, 19 nt, Artificial Sequence
  Description of Artificial Sequence: Synthetic oligonucleotide
ugacuuggcccacagacca

SEQ ID NO: 3247946 - RNA, 19 nt, Artificial Sequence
  Description of Artificial Sequence: Synthetic oligonucleotide
aagguaagugccaacagcu

SEQ ID NO: 3247947 - RNA, 19 nt, Artificial Sequence
  Description of Artificial Sequence: Synthetic oligonucleotide
guggccauggagaagaagg

SEQ ID NO: 3247948 - RNA, 19 nt, Artificial Sequence
  Description of Artificial Sequence: Synthetic oligonucleotide
guaguugaugguuucauuc

SEQ ID NO: 3247949 - RNA, 19 nt, Artificial Sequence
  Description of Artificial Sequence: Synthetic oligonucleotide
uguacaggccacaugggcu

SEQ ID NO: 3247950 - RNA, 19 nt, Artificial Sequence
  Description of Artificial Sequence: Synthetic oligonucleotide
aacuccucauuguaguuga

SEQ ID NO: 3247951 - RNA, 19 nt, Artificial Sequence
  Description of Artificial Sequence: Synthetic oligonucleotide
agcauaauguccugccagg

SEQ ID NO: 3247952 - RNA, 19 nt, Artificial Sequence
  Description of Artificial Sequence: Synthetic oligonucleotide
aagaagguaagugccaaca

SEQ ID NO: 3247953 - RNA, 19 nt, Artificial Sequence
  Description of Artificial Sequence: Synthetic oligonucleotide
aaggcuuuguauguggugu

SEQ ID NO: 3247954 - RNA, 19 nt, Artificial Sequence
  Description of Artificial Sequence: Synthetic oligonucleotide
caucacauuggccagcagc

SEQ ID NO: 3247955 - RNA, 19 nt, Artificial Sequence
  Description of Artificial Sequence: Synthetic oligonucleotide
agaggaaugccacccacag

SEQ ID NO: 3247956 - RNA, 19 nt, Artificial Sequence
  Description of Artificial Sequence: Synthetic oligonucleotide
cauagacaacaucacauug

SEQ ID NO: 3247957 - RNA, 19 nt, Artificial Sequence
  Description of Artificial Sequence: Synthetic oligonucleotide
guuggugcugacuuggccc

SEQ ID NO: 3247958 - RNA, 19 nt, Artificial Sequence
  Description of Artificial Sequence: Synthetic oligonucleotide
uggcugaagcauaaugucc

SEQ ID NO: 3247959 - RNA, 19 nt, Artificial Sequence
  Description of Artificial Sequence: Synthetic oligonucleotide
aguugaugguuucauucag

SEQ ID NO: 3247960 - RNA, 19 nt, Artificial Sequence
  Description of Artificial Sequence: Synthetic oligonucleotide
uuguacaggccacaugggc

SEQ ID NO: 3247961 - RNA, 19 nt, Artificial Sequence
  Description of Artificial Sequence: Synthetic oligonucleotide
ucagcaccggcauagacaa

SEQ ID NO: 3247962 - RNA, 19 nt, Artificial Sequence
  Description of Artificial Sequence: Synthetic oligonucleotide
uguagucccacguccacgc

SEQ ID NO: 3247963 - RNA, 19 nt, Artificial Sequence
  Description of Artificial Sequence: Synthetic oligonucleotide
uaguugaugguuucauuca

SEQ ID NO: 3247964 - RNA, 19 nt, Artificial Sequence
  Description of Artificial Sequence: Synthetic oligonucleotide
gauguugacuccuccgagc

SEQ ID NO: 3247965 - RNA, 19 nt, Artificial Sequence
  Description of Artificial Sequence: Synthetic oligonucleotide
ugauguugacuccuccgag

SEQ ID NO: 3247966 - RNA, 19 nt, Artificial Sequence
  Description of Artificial Sequence: Synthetic oligonucleotide
gguaagugccaacagcugg

SEQ ID NO: 3247967 - RNA, 19 nt, Artificial Sequence
  Description of Artificial Sequence: Synthetic oligonucleotide
agugccuuuguauacuccu

SEQ ID NO: 3247968 - RNA, 19 nt, Artificial Sequence
  Description of Artificial Sequence: Synthetic oligonucleotide
acaacaucacauuggccag

SEQ ID NO: 3247969 - RNA, 19 nt, Artificial Sequence
  Description of Artificial Sequence: Synthetic oligonucleotide
uuuguauacuccucugcgu

SEQ ID NO: 3247970 - RNA, 19 nt, Artificial Sequence
  Description of Artificial Sequence: Synthetic oligonucleotide
agagcacugggucuggaag

SEQ ID NO: 3247971 - RNA, 19 nt, Artificial Sequence
  Description of Artificial Sequence: Synthetic oligonucleotide
ucagcugcugcacuggggu

SEQ ID NO: 3247972 - RNA, 19 nt, Artificial Sequence
  Description of Artificial Sequence: Synthetic oligonucleotide
cauaauguccugccaggcg

SEQ ID NO: 3247973 - RNA, 19 nt, Artificial Sequence
  Description of Artificial Sequence: Synthetic oligonucleotide
uguauacuccucugcguag

SEQ ID NO: 3247974 - RNA, 19 nt, Artificial Sequence
  Description of Artificial Sequence: Synthetic oligonucleotide
agaagguaagugccaacag

SEQ ID NO: 3247975 - RNA, 19 nt, Artificial Sequence
  Description of Artificial Sequence: Synthetic oligonucleotide
agugauguggccauggaga

SEQ ID NO: 3247976 - RNA, 19 nt, Artificial Sequence
  Description of Artificial Sequence: Synthetic oligonucleotide
cucugcguagcucucaccc

SEQ ID NO: 3247977 - RNA, 19 nt, Artificial Sequence
  Description of Artificial Sequence: Synthetic oligonucleotide
uuguauacuccucugcgua

SEQ ID NO: 3247978 - RNA, 19 nt, Artificial Sequence
  Description of Artificial Sequence: Synthetic oligonucleotide
gauguggccauggagaaga

SEQ ID NO: 3247979 - RNA, 19 nt, Artificial Sequence
  Description of Artificial Sequence: Synthetic oligonucleotide
uggcccacagaccacuccg

SEQ ID NO: 3247980 - RNA, 19 nt, Artificial Sequence
  Description of Artificial Sequence: Synthetic oligonucleotide
ugauaugagugauguggcc

SEQ ID NO: 3247981 - RNA, 19 nt, Artificial Sequence
  Description of Artificial Sequence: Synthetic oligonucleotide
cugaaggcuuuguaugugg

SEQ ID NO: 3247982 - RNA, 19 nt, Artificial Sequence
  Description of Artificial Sequence: Synthetic oligonucleotide
gauaugagugauguggcca

SEQ ID NO: 3247983 - RNA, 19 nt, Artificial Sequence
  Description of Artificial Sequence: Synthetic oligonucleotide
auggagaagaagguaagug

SEQ ID NO: 3247984 - RNA, 19 nt, Artificial Sequence
  Description of Artificial Sequence: Synthetic oligonucleotide
acgcugacccacuugggac

SEQ ID NO: 3247985 - RNA, 19 nt, Artificial Sequence
  Description of Artificial Sequence: Synthetic oligonucleotide
uuuguaugugguguuggug

SEQ ID NO: 3247986 - RNA, 19 nt, Artificial Sequence
  Description of Artificial Sequence: Synthetic oligonucleotide
cuggaagaggccaguagcc

SEQ ID NO: 3247987 - RNA, 19 nt, Artificial Sequence
  Description of Artificial Sequence: Synthetic oligonucleotide
guuucauucagcugcugca

SEQ ID NO: 3247988 - RNA, 19 nt, Artificial Sequence
  Description of Artificial Sequence: Synthetic oligonucleotide
gagugauguggccauggag

SEQ ID NO: 3247989 - RNA, 19 nt, Artificial Sequence
  Description of Artificial Sequence: Synthetic oligonucleotide
accggcauagacaacauca

SEQ ID NO: 3247990 - RNA, 19 nt, Artificial Sequence
  Description of Artificial Sequence: Synthetic oligonucleotide
uguuggugcugacuuggcc

SEQ ID NO: 3247991 - RNA, 19 nt, Artificial Sequence
  Description of Artificial Sequence: Synthetic oligonucleotide
ucauucagcugcugcacug

SEQ ID NO: 3247992 - RNA, 19 nt, Artificial Sequence
  Description of Artificial Sequence: Synthetic oligonucleotide
ucuggaagucccuucucca

SEQ ID NO: 3247993 - RNA, 19 nt, Artificial Sequence
  Description of Artificial Sequence: Synthetic oligonucleotide
uacuccucugcguagcucu

SEQ ID NO: 3247994 - RNA, 19 nt, Artificial Sequence
  Description of Artificial Sequence: Synthetic oligonucleotide
ugccuuuguauacuccucu

SEQ ID NO: 3247995 - RNA, 19 nt, Artificial Sequence
  Description of Artificial Sequence: Synthetic oligonucleotide
gaaggcuuuguauguggug

SEQ ID NO: 3247996 - RNA, 19 nt, Artificial Sequence
  Description of Artificial Sequence: Synthetic oligonucleotide
ucauuguaguugaugguuu

SEQ ID NO: 3247997 - RNA, 19 nt, Artificial Sequence
  Description of Artificial Sequence: Synthetic oligonucleotide
gcugacuuggcccacagac

SEQ ID NO: 3247998 - RNA, 19 nt, Artificial Sequence
  Description of Artificial Sequence: Synthetic oligonucleotide
ggagaagaagguaagugcc

SEQ ID NO: 3247999 - RNA, 19 nt, Artificial Sequence
  Description of Artificial Sequence: Synthetic oligonucleotide
agggugauaugagugaugu

SEQ ID NO: 3248000 - RNA, 19 nt, Artificial Sequence
  Description of Artificial Sequence: Synthetic oligonucleotide
uucuccagugccuuuguau

SEQ ID NO: 3248001 - RNA, 19 nt, Artificial Sequence
  Description of Artificial Sequence: Synthetic oligonucleotide
ugaaggcuuuguauguggu

SEQ ID NO: 3248002 - RNA, 19 nt, Artificial Sequence
  Description of Artificial Sequence: Synthetic oligonucleotide
ugaugguuucauucagcug

SEQ ID NO: 3248003 - RNA, 19 nt, Artificial Sequence
  Description of Artificial Sequence: Synthetic oligonucleotide
gacagggugauaugaguga

SEQ ID NO: 3248004 - RNA, 19 nt, Artificial Sequence
  Description of Artificial Sequence: Synthetic oligonucleotide
ucuccagugccuuuguaua

SEQ ID NO: 3248005 - RNA, 19 nt, Artificial Sequence
  Description of Artificial Sequence: Synthetic oligonucleotide
ggacugaaggcuuuguaug

SEQ ID NO: 3248006 - RNA, 19 nt, Artificial Sequence
  Description of Artificial Sequence: Synthetic oligonucleotide
uguaugugguguuggugcu

SEQ ID NO: 3248007 - RNA, 19 nt, Artificial Sequence
  Description of Artificial Sequence: Synthetic oligonucleotide
ugccaggcgguacugguug

SEQ ID NO: 3248008 - RNA, 19 nt, Artificial Sequence
  Description of Artificial Sequence: Synthetic oligonucleotide
auaugagugauguggccau

SEQ ID NO: 3248009 - RNA, 19 nt, Artificial Sequence
  Description of Artificial Sequence: Synthetic oligonucleotide
agcugcugcacuggggucc

SEQ ID NO: 3248010 - RNA, 19 nt, Artificial Sequence
  Description of Artificial Sequence: Synthetic oligonucleotide
uccgagcccaaucuguagu

SEQ ID NO: 3248011 - RNA, 19 nt, Artificial Sequence
  Description of Artificial Sequence: Synthetic oligonucleotide
acuggggucccugugagug

SEQ ID NO: 3248012 - RNA, 19 nt, Artificial Sequence
  Description of Artificial Sequence: Synthetic oligonucleotide
agccagguagagcacuggg

SEQ ID NO: 3248013 - RNA, 19 nt, Artificial Sequence
  Description of Artificial Sequence: Synthetic oligonucleotide
aacaucacauuggccagca

SEQ ID NO: 3248014 - RNA, 19 nt, Artificial Sequence
  Description of Artificial Sequence: Synthetic oligonucleotide
uggaagucccuucuccagu

SEQ ID NO: 3248015 - RNA, 19 nt, Artificial Sequence
  Description of Artificial Sequence: Synthetic oligonucleotide
gagcccaaucuguaguccc

SEQ ID NO: 3248016 - RNA, 19 nt, Artificial Sequence
  Description of Artificial Sequence: Synthetic oligonucleotide
gugauaugagugauguggc

SEQ ID NO: 3248017 - RNA, 19 nt, Artificial Sequence
  Description of Artificial Sequence: Synthetic oligonucleotide
uucaucuugacuaaucugg

SEQ ID NO: 3248018 - RNA, 19 nt, Artificial Sequence
  Description of Artificial Sequence: Synthetic oligonucleotide
aguccucagacucugaucc

SEQ ID NO: 3248019 - RNA, 19 nt, Artificial Sequence
  Description of Artificial Sequence: Synthetic oligonucleotide
aagauuauucuucuuaaga

SEQ ID NO: 3248020 - RNA, 19 nt, Artificial Sequence
  Description of Artificial Sequence: Synthetic oligonucleotide
aagucuccuugucagaugc

SEQ ID NO: 3248021 - RNA, 19 nt, Artificial Sequence
  Description of Artificial Sequence: Synthetic oligonucleotide
uaaucuggaaguaacgaag

SEQ ID NO: 3248022 - RNA, 19 nt, Artificial Sequence
  Description of Artificial Sequence: Synthetic oligonucleotide
cuggaaguaacgaaguucg

SEQ ID NO: 3248023 - RNA, 19 nt, Artificial Sequence
  Description of Artificial Sequence: Synthetic oligonucleotide
ugguaagauauucaaauac

SEQ ID NO: 3248024 - RNA, 19 nt, Artificial Sequence
  Description of Artificial Sequence: Synthetic oligonucleotide
uaagauauuucuugguaag

SEQ ID NO: 3248025 - RNA, 19 nt, Artificial Sequence
  Description of Artificial Sequence: Synthetic oligonucleotide
gaugcaaccacacgaagcc

SEQ ID NO: 3248026 - RNA, 19 nt, Artificial Sequence
  Description of Artificial Sequence: Synthetic oligonucleotide
uucuuaagauauuucuugg

SEQ ID NO: 3248027 - RNA, 19 nt, Artificial Sequence
  Description of Artificial Sequence: Synthetic oligonucleotide
cuucuuaagauauuucuug

SEQ ID NO: 3248028 - RNA, 19 nt, Artificial Sequence
  Description of Artificial Sequence: Synthetic oligonucleotide
uccaucuucaucuugacua

SEQ ID NO: 3248029 - RNA, 19 nt, Artificial Sequence
  Description of Artificial Sequence: Synthetic oligonucleotide
uucuucuuaagauauuucu

SEQ ID NO: 3248030 - RNA, 19 nt, Artificial Sequence
  Description of Artificial Sequence: Synthetic oligonucleotide
aucuugacuaaucuggaag

SEQ ID NO: 3248031 - RNA, 19 nt, Artificial Sequence
  Description of Artificial Sequence: Synthetic oligonucleotide
aaguucguaagucuccuug

SEQ ID NO: 3248032 - RNA, 19 nt, Artificial Sequence
  Description of Artificial Sequence: Synthetic oligonucleotide
uuaagauauuucuugguaa

SEQ ID NO: 3248033 - RNA, 19 nt, Artificial Sequence
  Description of Artificial Sequence: Synthetic oligonucleotide
auuucuugguaagauauuc

SEQ ID NO: 3248034 - RNA, 19 nt, Artificial Sequence
  Description of Artificial Sequence: Synthetic oligonucleotide
agauuauucuucuuaagau

SEQ ID NO: 3248035 - RNA, 19 nt, Artificial Sequence
  Description of Artificial Sequence: Synthetic oligonucleotide
aagccaaucacgaagauua

SEQ ID NO: 3248036 - RNA, 19 nt, Artificial Sequence
  Description of Artificial Sequence: Synthetic oligonucleotide
ucuucaucuugacuaaucu

SEQ ID NO: 3248037 - RNA, 19 nt, Artificial Sequence
  Description of Artificial Sequence: Synthetic oligonucleotide
ugauccaucuucaucuuga

SEQ ID NO: 3248038 - RNA, 19 nt, Artificial Sequence
  Description of Artificial Sequence: Synthetic oligonucleotide
gaagauuauucuucuuaag

SEQ ID NO: 3248039 - RNA, 19 nt, Artificial Sequence
  Description of Artificial Sequence: Synthetic oligonucleotide
gaaguaacgaaguucguaa

SEQ ID NO: 3248040 - RNA, 19 nt, Artificial Sequence
  Description of Artificial Sequence: Synthetic oligonucleotide
ucguaagucuccuugucag

SEQ ID NO: 3248041 - RNA, 19 nt, Artificial Sequence
  Description of Artificial Sequence: Synthetic oligonucleotide
aucacgaagauuauucuuc

SEQ ID NO: 3248042 - RNA, 19 nt, Artificial Sequence
  Description of Artificial Sequence: Synthetic oligonucleotide
ugacuaaucuggaaguaac

SEQ ID NO: 3248043 - RNA, 19 nt, Artificial Sequence
  Description of Artificial Sequence: Synthetic oligonucleotide
ucuugacuaaucuggaagu

SEQ ID NO: 3248044 - RNA, 19 nt, Artificial Sequence
  Description of Artificial Sequence: Synthetic oligonucleotide
aaguaacgaaguucguaag

SEQ ID NO: 3248045 - RNA, 19 nt, Artificial Sequence
  Description of Artificial Sequence: Synthetic oligonucleotide
aacgaaguucguaagucuc

SEQ ID NO: 3248046 - RNA, 19 nt, Artificial Sequence
  Description of Artificial Sequence: Synthetic oligonucleotide
uuucuugguaagauauuca

SEQ ID NO: 3248047 - RNA, 19 nt, Artificial Sequence
  Description of Artificial Sequence: Synthetic oligonucleotide
aaccacacgaagccaauca

SEQ ID NO: 3248048 - RNA, 19 nt, Artificial Sequence
  Description of Artificial Sequence: Synthetic oligonucleotide
agaugcaaccacacgaagc

SEQ ID NO: 3248049 - RNA, 19 nt, Artificial Sequence
  Description of Artificial Sequence: Synthetic oligonucleotide
ucuuaagauauuucuuggu

SEQ ID NO: 3248050 - RNA, 19 nt, Artificial Sequence
  Description of Artificial Sequence: Synthetic oligonucleotide
uaagauauucaaauaccuu

SEQ ID NO: 3248051 - RNA, 19 nt, Artificial Sequence
  Description of Artificial Sequence: Synthetic oligonucleotide
auuauucuucuuaagauau

SEQ ID NO: 3248052 - RNA, 19 nt, Artificial Sequence
  Description of Artificial Sequence: Synthetic oligonucleotide
aaucacgaagauuauucuu

SEQ ID NO: 3248053 - RNA, 19 nt, Artificial Sequence
  Description of Artificial Sequence: Synthetic oligonucleotide
gauuauucuucuuaagaua

SEQ ID NO: 3248054 - RNA, 19 nt, Artificial Sequence
  Description of Artificial Sequence: Synthetic oligonucleotide
ucuucuuaagauauuucuu

SEQ ID NO: 3248055 - RNA, 19 nt, Artificial Sequence
  Description of Artificial Sequence: Synthetic oligonucleotide
uucuugguaagauauucaa

SEQ ID NO: 3248056 - RNA, 19 nt, Artificial Sequence
  Description of Artificial Sequence: Synthetic oligonucleotide
cacgaagccaaucacgaag

SEQ ID NO: 3248057 - RNA, 19 nt, Artificial Sequence
  Description of Artificial Sequence: Synthetic oligonucleotide
ugucagaugcaaccacacg

SEQ ID NO: 3248058 - RNA, 19 nt, Artificial Sequence
  Description of Artificial Sequence: Synthetic oligonucleotide
aauuaguccucagacucug

SEQ ID NO: 3248059 - RNA, 19 nt, Artificial Sequence
  Description of Artificial Sequence: Synthetic oligonucleotide
acucugauccaucuucauc

SEQ ID NO: 3248060 - RNA, 19 nt, Artificial Sequence
  Description of Artificial Sequence: Synthetic oligonucleotide
gucagaugcaaccacacga

SEQ ID NO: 3248061 - RNA, 19 nt, Artificial Sequence
  Description of Artificial Sequence: Synthetic oligonucleotide
cuccuugucagaugcaacc

SEQ ID NO: 3248062 - RNA, 19 nt, Artificial Sequence
  Description of Artificial Sequence: Synthetic oligonucleotide
aguaacgaaguucguaagu

SEQ ID NO: 3248063 - RNA, 19 nt, Artificial Sequence
  Description of Artificial Sequence: Synthetic oligonucleotide
auauuucuugguaagauau

SEQ ID NO: 3248064 - RNA, 19 nt, Artificial Sequence
  Description of Artificial Sequence: Synthetic oligonucleotide
uucguaagucuccuuguca

SEQ ID NO: 3248065 - RNA, 19 nt, Artificial Sequence
  Description of Artificial Sequence: Synthetic oligonucleotide
ucaucuugacuaaucugga

SEQ ID NO: 3248066 - RNA, 19 nt, Artificial Sequence
  Description of Artificial Sequence: Synthetic oligonucleotide
gguaagauauucaaauacc

SEQ ID NO: 3248067 - RNA, 19 nt, Artificial Sequence
  Description of Artificial Sequence: Synthetic oligonucleotide
gacuaaucuggaaguaacg

SEQ ID NO: 3248068 - RNA, 19 nt, Artificial Sequence
  Description of Artificial Sequence: Synthetic oligonucleotide
ucagaugcaaccacacgaa

SEQ ID NO: 3248069 - RNA, 19 nt, Artificial Sequence
  Description of Artificial Sequence: Synthetic oligonucleotide
ucuugguaagauauucaaa

SEQ ID NO: 3248070 - RNA, 19 nt, Artificial Sequence
  Description of Artificial Sequence: Synthetic oligonucleotide
ucuggaaguaacgaaguuc

SEQ ID NO: 3248071 - RNA, 19 nt, Artificial Sequence
  Description of Artificial Sequence: Synthetic oligonucleotide
acgaagauuauucuucuua

SEQ ID NO: 3248072 - RNA, 19 nt, Artificial Sequence
  Description of Artificial Sequence: Synthetic oligonucleotide
cuugguaagauauucaaau

SEQ ID NO: 3248073 - RNA, 19 nt, Artificial Sequence
  Description of Artificial Sequence: Synthetic oligonucleotide
uauucuucuuaagauauuu

SEQ ID NO: 3248074 - RNA, 19 nt, Artificial Sequence
  Description of Artificial Sequence: Synthetic oligonucleotide
accacacgaagccaaucac

SEQ ID NO: 3248075 - RNA, 19 nt, Artificial Sequence
  Description of Artificial Sequence: Synthetic oligonucleotide
acuaaucuggaaguaacga

SEQ ID NO: 3248076 - RNA, 19 nt, Artificial Sequence
  Description of Artificial Sequence: Synthetic oligonucleotide
uaacgaaguucguaagucu

SEQ ID NO: 3248077 - RNA, 19 nt, Artificial Sequence
  Description of Artificial Sequence: Synthetic oligonucleotide
cuucaucuugacuaaucug

SEQ ID NO: 3248078 - RNA, 19 nt, Artificial Sequence
  Description of Artificial Sequence: Synthetic oligonucleotide
aaucuggaaguaacgaagu

SEQ ID NO: 3248079 - RNA, 19 nt, Artificial Sequence
  Description of Artificial Sequence: Synthetic oligonucleotide
aagauauuucuugguaaga

SEQ ID NO: 3248080 - RNA, 19 nt, Artificial Sequence
  Description of Artificial Sequence: Synthetic oligonucleotide
gauauuucuugguaagaua

SEQ ID NO: 3248081 - RNA, 19 nt, Artificial Sequence
  Description of Artificial Sequence: Synthetic oligonucleotide
ucacgaagauuauucuucu

SEQ ID NO: 3248082 - RNA, 19 nt, Artificial Sequence
  Description of Artificial Sequence: Synthetic oligonucleotide
ccaaucacgaagauuauuc

SEQ ID NO: 3248083 - RNA, 19 nt, Artificial Sequence
  Description of Artificial Sequence: Synthetic oligonucleotide
uugucagaugcaaccacac

SEQ ID NO: 3248084 - RNA, 19 nt, Artificial Sequence
  Description of Artificial Sequence: Synthetic oligonucleotide
cuuaagauauuucuuggua

SEQ ID NO: 3248085 - RNA, 19 nt, Artificial Sequence
  Description of Artificial Sequence: Synthetic oligonucleotide
uugguaagauauucaaaua

SEQ ID NO: 3248086 - RNA, 19 nt, Artificial Sequence
  Description of Artificial Sequence: Synthetic oligonucleotide
acgaaguucguaagucucc

SEQ ID NO: 3248087 - RNA, 19 nt, Artificial Sequence
  Description of Artificial Sequence: Synthetic oligonucleotide
cagacucugauccaucuuc

SEQ ID NO: 3248088 - RNA, 19 nt, Artificial Sequence
  Description of Artificial Sequence: Synthetic oligonucleotide
ugcaaccacacgaagccaa

SEQ ID NO: 3248089 - RNA, 19 nt, Artificial Sequence
  Description of Artificial Sequence: Synthetic oligonucleotide
uuaguccucagacucugau

SEQ ID NO: 3248090 - RNA, 19 nt, Artificial Sequence
  Description of Artificial Sequence: Synthetic oligonucleotide
agauauuucuugguaagau

SEQ ID NO: 3248091 - RNA, 19 nt, Artificial Sequence
  Description of Artificial Sequence: Synthetic oligonucleotide
auucuucuuaagauauuuc

SEQ ID NO: 3248092 - RNA, 19 nt, Artificial Sequence
  Description of Artificial Sequence: Synthetic oligonucleotide
guaacgaaguucguaaguc

SEQ ID NO: 3248093 - RNA, 19 nt, Artificial Sequence
  Description of Artificial Sequence: Synthetic oligonucleotide
ccaauuaguccucagacuc

SEQ ID NO: 3248094 - RNA, 19 nt, Artificial Sequence
  Description of Artificial Sequence: Synthetic oligonucleotide
aguucguaagucuccuugu

SEQ ID NO: 3248095 - RNA, 19 nt, Artificial Sequence
  Description of Artificial Sequence: Synthetic oligonucleotide
cucugauccaucuucaucu

SEQ ID NO: 3248096 - RNA, 19 nt, Artificial Sequence
  Description of Artificial Sequence: Synthetic oligonucleotide
cuaaucuggaaguaacgaa

SEQ ID NO: 3248097 - RNA, 19 nt, Artificial Sequence
  Description of Artificial Sequence: Synthetic oligonucleotide
uugacuaaucuggaaguaa

SEQ ID NO: 3248098 - RNA, 19 nt, Artificial Sequence
  Description of Artificial Sequence: Synthetic oligonucleotide
aucuucaucuugacuaauc

SEQ ID NO: 3248099 - RNA, 19 nt, Artificial Sequence
  Description of Artificial Sequence: Synthetic oligonucleotide
uauuucuugguaagauauu

SEQ ID NO: 3248100 - RNA, 19 nt, Artificial Sequence
  Description of Artificial Sequence: Synthetic oligonucleotide
cacacgaagccaaucacga

SEQ ID NO: 3248101 - RNA, 19 nt, Artificial Sequence
  Description of Artificial Sequence: Synthetic oligonucleotide
uaagucuccuugucagaug

SEQ ID NO: 3248102 - RNA, 19 nt, Artificial Sequence
  Description of Artificial Sequence: Synthetic oligonucleotide
guaagauauucaaauaccu

SEQ ID NO: 3248103 - RNA, 19 nt, Artificial Sequence
  Description of Artificial Sequence: Synthetic oligonucleotide
ucuccuugucagaugcaac

SEQ ID NO: 3248104 - RNA, 19 nt, Artificial Sequence
  Description of Artificial Sequence: Synthetic oligonucleotide
cuugucagaugcaaccaca

SEQ ID NO: 3248105 - RNA, 19 nt, Artificial Sequence
  Description of Artificial Sequence: Synthetic oligonucleotide
ggccaauuaguccucagac

SEQ ID NO: 3248106 - RNA, 19 nt, Artificial Sequence
  Description of Artificial Sequence: Synthetic oligonucleotide
uuauucuucuuaagauauu

SEQ ID NO: 3248107 - RNA, 19 nt, Artificial Sequence
  Description of Artificial Sequence: Synthetic oligonucleotide
gauccaucuucaucuugac

SEQ ID NO: 3248108 - RNA, 19 nt, Artificial Sequence
  Description of Artificial Sequence: Synthetic oligonucleotide
aggccaauuaguccucaga

SEQ ID NO: 3248109 - RNA, 19 nt, Artificial Sequence
  Description of Artificial Sequence: Synthetic oligonucleotide
uccuugucagaugcaacca

SEQ ID NO: 3248110 - RNA, 19 nt, Artificial Sequence
  Description of Artificial Sequence: Synthetic oligonucleotide
uaguccucagacucugauc

SEQ ID NO: 3248111 - RNA, 19 nt, Artificial Sequence
  Description of Artificial Sequence: Synthetic oligonucleotide
auccaucuucaucuugacu

SEQ ID NO: 3248112 - RNA, 19 nt, Artificial Sequence
  Description of Artificial Sequence: Synthetic oligonucleotide
ccacacgaagccaaucacg

SEQ ID NO: 3248113 - RNA, 19 nt, Artificial Sequence
  Description of Artificial Sequence: Synthetic oligonucleotide
cagaugcaaccacacgaag

SEQ ID NO: 3248114 - RNA, 19 nt, Artificial Sequence
  Description of Artificial Sequence: Synthetic oligonucleotide
uggaaguaacgaaguucgu

SEQ ID NO: 3248115 - RNA, 19 nt, Artificial Sequence
  Description of Artificial Sequence: Synthetic oligonucleotide
guucguaagucuccuuguc

SEQ ID NO: 3248116 - RNA, 19 nt, Artificial Sequence
  Description of Artificial Sequence: Synthetic oligonucleotide
acgaagccaaucacgaaga

SEQ ID NO: 3248117 - RNA, 19 nt, Artificial Sequence
  Description of Artificial Sequence: Synthetic oligonucleotide
aaauuuucauuucuuaacc

SEQ ID NO: 3248118 - RNA, 19 nt, Artificial Sequence
  Description of Artificial Sequence: Synthetic oligonucleotide
cuuguaauaaaucaaacug

SEQ ID NO: 3248119 - RNA, 19 nt, Artificial Sequence
  Description of Artificial Sequence: Synthetic oligonucleotide
ucuauuggcauaauaacag

SEQ ID NO: 3248120 - RNA, 19 nt, Artificial Sequence
  Description of Artificial Sequence: Synthetic oligonucleotide
uuuucuuaaaacuuucuag

SEQ ID NO: 3248121 - RNA, 19 nt, Artificial Sequence
  Description of Artificial Sequence: Synthetic oligonucleotide
ucuagaauaggauacaugu

SEQ ID NO: 3248122 - RNA, 19 nt, Artificial Sequence
  Description of Artificial Sequence: Synthetic oligonucleotide
ugugcuuaggcacauaucc

SEQ ID NO: 3248123 - RNA, 19 nt, Artificial Sequence
  Description of Artificial Sequence: Synthetic oligonucleotide
aaucaaacugcauuuuggg

SEQ ID NO: 3248124 - RNA, 19 nt, Artificial Sequence
  Description of Artificial Sequence: Synthetic oligonucleotide
uguaauaaaucaaacugca

SEQ ID NO: 3248125 - RNA, 19 nt, Artificial Sequence
  Description of Artificial Sequence: Synthetic oligonucleotide
uuucauuucuuaaccaugg

SEQ ID NO: 3248126 - RNA, 19 nt, Artificial Sequence
  Description of Artificial Sequence: Synthetic oligonucleotide
aauaaaucaaacugcauuu

SEQ ID NO: 3248127 - RNA, 19 nt, Artificial Sequence
  Description of Artificial Sequence: Synthetic oligonucleotide
acaagaaacaauucuauug

SEQ ID NO: 3248128 - RNA, 19 nt, Artificial Sequence
  Description of Artificial Sequence: Synthetic oligonucleotide
ucaaacaagaaacaauucu

SEQ ID NO: 3248129 - RNA, 19 nt, Artificial Sequence
  Description of Artificial Sequence: Synthetic oligonucleotide
ucaaaugcuucauagaucu

SEQ ID NO: 3248130 - RNA, 19 nt, Artificial Sequence
  Description of Artificial Sequence: Synthetic oligonucleotide
uuguaauaaaucaaacugc

SEQ ID NO: 3248131 - RNA, 19 nt, Artificial Sequence
  Description of Artificial Sequence: Synthetic oligonucleotide
aacagagauugcuagacag

SEQ ID NO: 3248132 - RNA, 19 nt, Artificial Sequence
  Description of Artificial Sequence: Synthetic oligonucleotide
aagaaacaauucuauuggc

SEQ ID NO: 3248133 - RNA, 19 nt, Artificial Sequence
  Description of Artificial Sequence: Synthetic oligonucleotide
ugguuauucacacagaauc

SEQ ID NO: 3248134 - RNA, 19 nt, Artificial Sequence
  Description of Artificial Sequence: Synthetic oligonucleotide
caagaaacaauucuauugg

SEQ ID NO: 3248135 - RNA, 19 nt, Artificial Sequence
  Description of Artificial Sequence: Synthetic oligonucleotide
gauacauguuuucaaaugc

SEQ ID NO: 3248136 - RNA, 19 nt, Artificial Sequence
  Description of Artificial Sequence: Synthetic oligonucleotide
auucuauuggcauaauaac

SEQ ID NO: 3248137 - RNA, 19 nt, Artificial Sequence
  Description of Artificial Sequence: Synthetic oligonucleotide
uuucuuaaaacuuucuaga

SEQ ID NO: 3248138 - RNA, 19 nt, Artificial Sequence
  Description of Artificial Sequence: Synthetic oligonucleotide
cuucauagaucucugaacg

SEQ ID NO: 3248139 - RNA, 19 nt, Artificial Sequence
  Description of Artificial Sequence: Synthetic oligonucleotide
aacccaaugacacacucag

SEQ ID NO: 3248140 - RNA, 19 nt, Artificial Sequence
  Description of Artificial Sequence: Synthetic oligonucleotide
uaauaaaucaaacugcauu

SEQ ID NO: 3248141 - RNA, 19 nt, Artificial Sequence
  Description of Artificial Sequence: Synthetic oligonucleotide
gaaauuuucauuucuuaac

SEQ ID NO: 3248142 - RNA, 19 nt, Artificial Sequence
  Description of Artificial Sequence: Synthetic oligonucleotide
uuaaccaugguuauucaca

SEQ ID NO: 3248143 - RNA, 19 nt, Artificial Sequence
  Description of Artificial Sequence: Synthetic oligonucleotide
ucaaacugcauuuugggcu

SEQ ID NO: 3248144 - RNA, 19 nt, Artificial Sequence
  Description of Artificial Sequence: Synthetic oligonucleotide
aaaacuuucuagaauagga

SEQ ID NO: 3248145 - RNA, 19 nt, Artificial Sequence
  Description of Artificial Sequence: Synthetic oligonucleotide
uuucaaaugcuucauagau

SEQ ID NO: 3248146 - RNA, 19 nt, Artificial Sequence
  Description of Artificial Sequence: Synthetic oligonucleotide
uugcuagacagcaugagag

SEQ ID NO: 3248147 - RNA, 19 nt, Artificial Sequence
  Description of Artificial Sequence: Synthetic oligonucleotide
uauuggcauaauaacagag

SEQ ID NO: 3248148 - RNA, 19 nt, Artificial Sequence
  Description of Artificial Sequence: Synthetic oligonucleotide
uaauaacagagauugcuag

SEQ ID NO: 3248149 - RNA, 19 nt, Artificial Sequence
  Description of Artificial Sequence: Synthetic oligonucleotide
aauucuauuggcauaauaa

SEQ ID NO: 3248150 - RNA, 19 nt, Artificial Sequence
  Description of Artificial Sequence: Synthetic oligonucleotide
guuuucaaaugcuucauag

SEQ ID NO: 3248151 - RNA, 19 nt, Artificial Sequence
  Description of Artificial Sequence: Synthetic oligonucleotide
aaaucaaacugcauuuugg

SEQ ID NO: 3248152 - RNA, 19 nt, Artificial Sequence
  Description of Artificial Sequence: Synthetic oligonucleotide
aaaacccaaugacacacuc

SEQ ID NO: 3248153 - RNA, 19 nt, Artificial Sequence
  Description of Artificial Sequence: Synthetic oligonucleotide
aaagcauuacaauaugaaa

SEQ ID NO: 3248154 - RNA, 19 nt, Artificial Sequence
  Description of Artificial Sequence: Synthetic oligonucleotide
aagaaacccacucuuucuc

SEQ ID NO: 3248155 - RNA, 19 nt, Artificial Sequence
  Description of Artificial Sequence: Synthetic oligonucleotide
uucuauuggcauaauaaca

SEQ ID NO: 3248156 - RNA, 19 nt, Artificial Sequence
  Description of Artificial Sequence: Synthetic oligonucleotide
uuaaaacuuucuagaauag

SEQ ID NO: 3248157 - RNA, 19 nt, Artificial Sequence
  Description of Artificial Sequence: Synthetic oligonucleotide
uuuucauuucuuaaccaug

SEQ ID NO: 3248158 - RNA, 19 nt, Artificial Sequence
  Description of Artificial Sequence: Synthetic oligonucleotide
accaugguuauucacacag

SEQ ID NO: 3248159 - RNA, 19 nt, Artificial Sequence
  Description of Artificial Sequence: Synthetic oligonucleotide
aauuuucauuucuuaacca

SEQ ID NO: 3248160 - RNA, 19 nt, Artificial Sequence
  Description of Artificial Sequence: Synthetic oligonucleotide
ugggcuacccaacagaccc

SEQ ID NO: 3248161 - RNA, 19 nt, Artificial Sequence
  Description of Artificial Sequence: Synthetic oligonucleotide
aucaccuuguaauaaauca

SEQ ID NO: 3248162 - RNA, 19 nt, Artificial Sequence
  Description of Artificial Sequence: Synthetic oligonucleotide
aucaaacugcauuuugggc

SEQ ID NO: 3248163 - RNA, 19 nt, Artificial Sequence
  Description of Artificial Sequence: Synthetic oligonucleotide
augagagacuucuacaguc

SEQ ID NO: 3248164 - RNA, 19 nt, Artificial Sequence
  Description of Artificial Sequence: Synthetic oligonucleotide
ggcauaauaacagagauug

SEQ ID NO: 3248165 - RNA, 19 nt, Artificial Sequence
  Description of Artificial Sequence: Synthetic oligonucleotide
uagaauaggauacauguuu

SEQ ID NO: 3248166 - RNA, 19 nt, Artificial Sequence
  Description of Artificial Sequence: Synthetic oligonucleotide
aguaagaaauuuucauuuc

SEQ ID NO: 3248167 - RNA, 19 nt, Artificial Sequence
  Description of Artificial Sequence: Synthetic oligonucleotide
auaacagagauugcuagac

SEQ ID NO: 3248168 - RNA, 19 nt, Artificial Sequence
  Description of Artificial Sequence: Synthetic oligonucleotide
uaaaucaaacugcauuuug

SEQ ID NO: 3248169 - RNA, 19 nt, Artificial Sequence
  Description of Artificial Sequence: Synthetic oligonucleotide
aaucaaacaagaaacaauu

SEQ ID NO: 3248170 - RNA, 19 nt, Artificial Sequence
  Description of Artificial Sequence: Synthetic oligonucleotide
acuuucuagaauaggauac

SEQ ID NO: 3248171 - RNA, 19 nt, Artificial Sequence
  Description of Artificial Sequence: Synthetic oligonucleotide
agaagaaacccacucuuuc

SEQ ID NO: 3248172 - RNA, 19 nt, Artificial Sequence
  Description of Artificial Sequence: Synthetic oligonucleotide
uauucacacagaaucaccu

SEQ ID NO: 3248173 - RNA, 19 nt, Artificial Sequence
  Description of Artificial Sequence: Synthetic oligonucleotide
aauaacagagauugcuaga

SEQ ID NO: 3248174 - RNA, 19 nt, Artificial Sequence
  Description of Artificial Sequence: Synthetic oligonucleotide
aagcauuacaauaugaaaa

SEQ ID NO: 3248175 - RNA, 19 nt, Artificial Sequence
  Description of Artificial Sequence: Synthetic oligonucleotide
aaaugcuucauagaucucu

SEQ ID NO: 3248176 - RNA, 19 nt, Artificial Sequence
  Description of Artificial Sequence: Synthetic oligonucleotide
ucauguguagaagaaaccc

SEQ ID NO: 3248177 - RNA, 19 nt, Artificial Sequence
  Description of Artificial Sequence: Synthetic oligonucleotide
aaacccacucuuucucugc

SEQ ID NO: 3248178 - RNA, 19 nt, Artificial Sequence
  Description of Artificial Sequence: Synthetic oligonucleotide
aaaaucaaacaagaaacaa

SEQ ID NO: 3248179 - RNA, 19 nt, Artificial Sequence
  Description of Artificial Sequence: Synthetic oligonucleotide
cuuaaaacuuucuagaaua

SEQ ID NO: 3248180 - RNA, 19 nt, Artificial Sequence
  Description of Artificial Sequence: Synthetic oligonucleotide
uaaaacuuucuagaauagg

SEQ ID NO: 3248181 - RNA, 19 nt, Artificial Sequence
  Description of Artificial Sequence: Synthetic oligonucleotide
acucagguuuucuuaaaac

SEQ ID NO: 3248182 - RNA, 19 nt, Artificial Sequence
  Description of Artificial Sequence: Synthetic oligonucleotide
agucauguguagaagaaac

SEQ ID NO: 3248183 - RNA, 19 nt, Artificial Sequence
  Description of Artificial Sequence: Synthetic oligonucleotide
aauaggauacauguuuuca

SEQ ID NO: 3248184 - RNA, 19 nt, Artificial Sequence
  Description of Artificial Sequence: Synthetic oligonucleotide
uguagaagaaacccacucu

SEQ ID NO: 3248185 - RNA, 19 nt, Artificial Sequence
  Description of Artificial Sequence: Synthetic oligonucleotide
uuauucacacagaaucacc

SEQ ID NO: 3248186 - RNA, 19 nt, Artificial Sequence
  Description of Artificial Sequence: Synthetic oligonucleotide
uucacacagaaucaccuug

SEQ ID NO: 3248187 - RNA, 19 nt, Artificial Sequence
  Description of Artificial Sequence: Synthetic oligonucleotide
gagauugcuagacagcaug

SEQ ID NO: 3248188 - RNA, 19 nt, Artificial Sequence
  Description of Artificial Sequence: Synthetic oligonucleotide
ucuuaaaacuuucuagaau

SEQ ID NO: 3248189 - RNA, 19 nt, Artificial Sequence
  Description of Artificial Sequence: Synthetic oligonucleotide
uguuuccaaaaucaagaca

SEQ ID NO: 3248190 - RNA, 19 nt, Artificial Sequence
  Description of Artificial Sequence: Synthetic oligonucleotide
uuggcauaauaacagagau

SEQ ID NO: 3248191 - RNA, 19 nt, Artificial Sequence
  Description of Artificial Sequence: Synthetic oligonucleotide
uauccaaagcauuacaaua

SEQ ID NO: 3248192 - RNA, 19 nt, Artificial Sequence
  Description of Artificial Sequence: Synthetic oligonucleotide
agaaauuuucauuucuuaa

SEQ ID NO: 3248193 - RNA, 19 nt, Artificial Sequence
  Description of Artificial Sequence: Synthetic oligonucleotide
aagaaauuuucauuucuua

SEQ ID NO: 3248194 - RNA, 19 nt, Artificial Sequence
  Description of Artificial Sequence: Synthetic oligonucleotide
aaaucaaacaagaaacaau

SEQ ID NO: 3248195 - RNA, 19 nt, Artificial Sequence
  Description of Artificial Sequence: Synthetic oligonucleotide
guuuccaaaaucaagacaa

SEQ ID NO: 3248196 - RNA, 19 nt, Artificial Sequence
  Description of Artificial Sequence: Synthetic oligonucleotide
uuaggcacauauccaaagc

SEQ ID NO: 3248197 - RNA, 19 nt, Artificial Sequence
  Description of Artificial Sequence: Synthetic oligonucleotide
uuuucaaaugcuucauaga

SEQ ID NO: 3248198 - RNA, 19 nt, Artificial Sequence
  Description of Artificial Sequence: Synthetic oligonucleotide
aacuuucuagaauaggaua

SEQ ID NO: 3248199 - RNA, 19 nt, Artificial Sequence
  Description of Artificial Sequence: Synthetic oligonucleotide
ucuacagucauguguagaa

SEQ ID NO: 3248200 - RNA, 19 nt, Artificial Sequence
  Description of Artificial Sequence: Synthetic oligonucleotide
ucagguuuucuuaaaacuu

SEQ ID NO: 3248201 - RNA, 19 nt, Artificial Sequence
  Description of Artificial Sequence: Synthetic oligonucleotide
ucucugaacgcucuuuggc

SEQ ID NO: 3248202 - RNA, 19 nt, Artificial Sequence
  Description of Artificial Sequence: Synthetic oligonucleotide
uaggcacauauccaaagca

SEQ ID NO: 3248203 - RNA, 19 nt, Artificial Sequence
  Description of Artificial Sequence: Synthetic oligonucleotide
auuuucauuucuuaaccau

SEQ ID NO: 3248204 - RNA, 19 nt, Artificial Sequence
  Description of Artificial Sequence: Synthetic oligonucleotide
uucuagaauaggauacaug

SEQ ID NO: 3248205 - RNA, 19 nt, Artificial Sequence
  Description of Artificial Sequence: Synthetic oligonucleotide
uuuugggcuacccaacaga

SEQ ID NO: 3248206 - RNA, 19 nt, Artificial Sequence
  Description of Artificial Sequence: Synthetic oligonucleotide
aacaauucuauuggcauaa

SEQ ID NO: 3248207 - RNA, 19 nt, Artificial Sequence
  Description of Artificial Sequence: Synthetic oligonucleotide
uacagucauguguagaaga

SEQ ID NO: 3248208 - RNA, 19 nt, Artificial Sequence
  Description of Artificial Sequence: Synthetic oligonucleotide
aaucaccuuguaauaaauc

SEQ ID NO: 3248209 - RNA, 19 nt, Artificial Sequence
  Description of Artificial Sequence: Synthetic oligonucleotide
uucuuaaccaugguuauuc

SEQ ID NO: 3248210 - RNA, 19 nt, Artificial Sequence
  Description of Artificial Sequence: Synthetic oligonucleotide
uucuuaaaacuuucuagaa

SEQ ID NO: 3248211 - RNA, 19 nt, Artificial Sequence
  Description of Artificial Sequence: Synthetic oligonucleotide
uaagaaauuuucauuucuu

SEQ ID NO: 3248212 - RNA, 19 nt, Artificial Sequence
  Description of Artificial Sequence: Synthetic oligonucleotide
uccaaagcauuacaauaug

SEQ ID NO: 3248213 - RNA, 19 nt, Artificial Sequence
  Description of Artificial Sequence: Synthetic oligonucleotide
ugcauuuugggcuacccaa

SEQ ID NO: 3248214 - RNA, 19 nt, Artificial Sequence
  Description of Artificial Sequence: Synthetic oligonucleotide
cauuucuuaaccaugguua

SEQ ID NO: 3248215 - RNA, 19 nt, Artificial Sequence
  Description of Artificial Sequence: Synthetic oligonucleotide
aacaagaaacaauucuauu

SEQ ID NO: 3248216 - RNA, 19 nt, Artificial Sequence
  Description of Artificial Sequence: Synthetic oligonucleotide
uucucugcugugcuuaggc

SEQ ID NO: 3248217 - RNA, 19 nt, Artificial Sequence
  Description of Artificial Sequence: Synthetic oligonucleotide
agaaggauugcauugagcc

SEQ ID NO: 3248218 - RNA, 19 nt, Artificial Sequence
  Description of Artificial Sequence: Synthetic oligonucleotide
aagaaucccucacagaagg

SEQ ID NO: 3248219 - RNA, 19 nt, Artificial Sequence
  Description of Artificial Sequence: Synthetic oligonucleotide
ucagucaccagaaagacuc

SEQ ID NO: 3248220 - RNA, 19 nt, Artificial Sequence
  Description of Artificial Sequence: Synthetic oligonucleotide
aaaagccacugcuucagac

SEQ ID NO: 3248221 - RNA, 19 nt, Artificial Sequence
  Description of Artificial Sequence: Synthetic oligonucleotide
aacacacacuccuuucugc

SEQ ID NO: 3248222 - RNA, 19 nt, Artificial Sequence
  Description of Artificial Sequence: Synthetic oligonucleotide
aaagacucaggccauugag

SEQ ID NO: 3248223 - RNA, 19 nt, Artificial Sequence
  Description of Artificial Sequence: Synthetic oligonucleotide
uuucucagucaccagaaag

SEQ ID NO: 3248224 - RNA, 19 nt, Artificial Sequence
  Description of Artificial Sequence: Synthetic oligonucleotide
ucagacaaacuguagaaga

SEQ ID NO: 3248225 - RNA, 19 nt, Artificial Sequence
  Description of Artificial Sequence: Synthetic oligonucleotide
uuuacuuucucagucacca

SEQ ID NO: 3248226 - RNA, 19 nt, Artificial Sequence
  Description of Artificial Sequence: Synthetic oligonucleotide
gagaagauugucuucuucc

SEQ ID NO: 3248227 - RNA, 19 nt, Artificial Sequence
  Description of Artificial Sequence: Synthetic oligonucleotide
auugagaacacacacuccu

SEQ ID NO: 3248228 - RNA, 19 nt, Artificial Sequence
  Description of Artificial Sequence: Synthetic oligonucleotide
accagaaagacucaggcca

SEQ ID NO: 3248229 - RNA, 19 nt, Artificial Sequence
  Description of Artificial Sequence: Synthetic oligonucleotide
aaggauugcauugagccag

SEQ ID NO: 3248230 - RNA, 19 nt, Artificial Sequence
  Description of Artificial Sequence: Synthetic oligonucleotide
auugcauugagccaguaaa

SEQ ID NO: 3248231 - RNA, 19 nt, Artificial Sequence
  Description of Artificial Sequence: Synthetic oligonucleotide
ucaccagaaagacucaggc

SEQ ID NO: 3248232 - RNA, 19 nt, Artificial Sequence
  Description of Artificial Sequence: Synthetic oligonucleotide
uuuugcaguauucuccucu

SEQ ID NO: 3248233 - RNA, 19 nt, Artificial Sequence
  Description of Artificial Sequence: Synthetic oligonucleotide
uucucagucaccagaaaga

SEQ ID NO: 3248234 - RNA, 19 nt, Artificial Sequence
  Description of Artificial Sequence: Synthetic oligonucleotide
uccuuucugcuucugagag

SEQ ID NO: 3248235 - RNA, 19 nt, Artificial Sequence
  Description of Artificial Sequence: Synthetic oligonucleotide
gucaaagaaucccucacag

SEQ ID NO: 3248236 - RNA, 19 nt, Artificial Sequence
  Description of Artificial Sequence: Synthetic oligonucleotide
aaagccacugcuucagaca

SEQ ID NO: 3248237 - RNA, 19 nt, Artificial Sequence
  Description of Artificial Sequence: Synthetic oligonucleotide
ucacagaaggauugcauug

SEQ ID NO: 3248238 - RNA, 19 nt, Artificial Sequence
  Description of Artificial Sequence: Synthetic oligonucleotide
acuguagaagagaagauug

SEQ ID NO: 3248239 - RNA, 19 nt, Artificial Sequence
  Description of Artificial Sequence: Synthetic oligonucleotide
aagauugucuucuuccuuu

SEQ ID NO: 3248240 - RNA, 19 nt, Artificial Sequence
  Description of Artificial Sequence: Synthetic oligonucleotide
agaagagaagauugucuuc

SEQ ID NO: 3248241 - RNA, 19 nt, Artificial Sequence
  Description of Artificial Sequence: Synthetic oligonucleotide
ugagaguccacugcaaaag

SEQ ID NO: 3248242 - RNA, 19 nt, Artificial Sequence
  Description of Artificial Sequence: Synthetic oligonucleotide
uacuuucucagucaccaga

SEQ ID NO: 3248243 - RNA, 19 nt, Artificial Sequence
  Description of Artificial Sequence: Synthetic oligonucleotide
caaacuguagaagagaaga

SEQ ID NO: 3248244 - RNA, 19 nt, Artificial Sequence
  Description of Artificial Sequence: Synthetic oligonucleotide
caaagaaucccucacagaa

SEQ ID NO: 3248245 - RNA, 19 nt, Artificial Sequence
  Description of Artificial Sequence: Synthetic oligonucleotide
agagaagauugucuucuuc

SEQ ID NO: 3248246 - RNA, 19 nt, Artificial Sequence
  Description of Artificial Sequence: Synthetic oligonucleotide
cacugcuucagacaaacug

SEQ ID NO: 3248247 - RNA, 19 nt, Artificial Sequence
  Description of Artificial Sequence: Synthetic oligonucleotide
uagaagagaagauugucuu

SEQ ID NO: 3248248 - RNA, 19 nt, Artificial Sequence
  Description of Artificial Sequence: Synthetic oligonucleotide
acuccuuucugcuucugag

SEQ ID NO: 3248249 - RNA, 19 nt, Artificial Sequence
  Description of Artificial Sequence: Synthetic oligonucleotide
cagacaaacuguagaagag

SEQ ID NO: 3248250 - RNA, 19 nt, Artificial Sequence
  Description of Artificial Sequence: Synthetic oligonucleotide
acacacuccuuucugcuuc

SEQ ID NO: 3248251 - RNA, 19 nt, Artificial Sequence
  Description of Artificial Sequence: Synthetic oligonucleotide
uucuccucuggucaaagaa

SEQ ID NO: 3248252 - RNA, 19 nt, Artificial Sequence
  Description of Artificial Sequence: Synthetic oligonucleotide
aaagaaucccucacagaag

SEQ ID NO: 3248253 - RNA, 19 nt, Artificial Sequence
  Description of Artificial Sequence: Synthetic oligonucleotide
acucaggccauugagaaca

SEQ ID NO: 3248254 - RNA, 19 nt, Artificial Sequence
  Description of Artificial Sequence: Synthetic oligonucleotide
ugcaguauucuccucuggu

SEQ ID NO: 3248255 - RNA, 19 nt, Artificial Sequence
  Description of Artificial Sequence: Synthetic oligonucleotide
uucagacaaacuguagaag

SEQ ID NO: 3248256 - RNA, 19 nt, Artificial Sequence
  Description of Artificial Sequence: Synthetic oligonucleotide
uuugcaguauucuccucug

SEQ ID NO: 3248257 - RNA, 19 nt, Artificial Sequence
  Description of Artificial Sequence: Synthetic oligonucleotide
agaagauugucuucuuccu

SEQ ID NO: 3248258 - RNA, 19 nt, Artificial Sequence
  Description of Artificial Sequence: Synthetic oligonucleotide
agaguccacugcaaaagcc

SEQ ID NO: 3248259 - RNA, 19 nt, Artificial Sequence
  Description of Artificial Sequence: Synthetic oligonucleotide
cuuucugcuucugagaguc

SEQ ID NO: 3248260 - RNA, 19 nt, Artificial Sequence
  Description of Artificial Sequence: Synthetic oligonucleotide
uguagaagagaagauuguc

SEQ ID NO: 3248261 - RNA, 19 nt, Artificial Sequence
  Description of Artificial Sequence: Synthetic oligonucleotide
uggucaaagaaucccucac

SEQ ID NO: 3248262 - RNA, 19 nt, Artificial Sequence
  Description of Artificial Sequence: Synthetic oligonucleotide
caggccauugagaacacac

SEQ ID NO: 3248263 - RNA, 19 nt, Artificial Sequence
  Description of Artificial Sequence: Synthetic oligonucleotide
ucaaagaaucccucacaga

SEQ ID NO: 3248264 - RNA, 19 nt, Artificial Sequence
  Description of Artificial Sequence: Synthetic oligonucleotide
aagccacugcuucagacaa

SEQ ID NO: 3248265 - RNA, 19 nt, Artificial Sequence
  Description of Artificial Sequence: Synthetic oligonucleotide
aacuguagaagagaagauu

SEQ ID NO: 3248266 - RNA, 19 nt, Artificial Sequence
  Description of Artificial Sequence: Synthetic oligonucleotide
agaacacacacuccuuucu

SEQ ID NO: 3248267 - RNA, 19 nt, Artificial Sequence
  Description of Artificial Sequence: Synthetic oligonucleotide
agacucaggccauugagaa

SEQ ID NO: 3248268 - RNA, 19 nt, Artificial Sequence
  Description of Artificial Sequence: Synthetic oligonucleotide
auuuacuuucucagucacc

SEQ ID NO: 3248269 - RNA, 19 nt, Artificial Sequence
  Description of Artificial Sequence: Synthetic oligonucleotide
gaacacacacuccuuucug

SEQ ID NO: 3248270 - RNA, 19 nt, Artificial Sequence
  Description of Artificial Sequence: Synthetic oligonucleotide
cauugagccaguaaaaccu

SEQ ID NO: 3248271 - RNA, 19 nt, Artificial Sequence
  Description of Artificial Sequence: Synthetic oligonucleotide
uccacugcaaaagccacug

SEQ ID NO: 3248272 - RNA, 19 nt, Artificial Sequence
  Description of Artificial Sequence: Synthetic oligonucleotide
ugcuucagacaaacuguag

SEQ ID NO: 3248273 - RNA, 19 nt, Artificial Sequence
  Description of Artificial Sequence: Synthetic oligonucleotide
acagaaggauugcauugag

SEQ ID NO: 3248274 - RNA, 19 nt, Artificial Sequence
  Description of Artificial Sequence: Synthetic oligonucleotide
ucugagaguccacugcaaa

SEQ ID NO: 3248275 - RNA, 19 nt, Artificial Sequence
  Description of Artificial Sequence: Synthetic oligonucleotide
ugagaacacacacuccuuu

SEQ ID NO: 3248276 - RNA, 19 nt, Artificial Sequence
  Description of Artificial Sequence: Synthetic oligonucleotide
ugcauugagccaguaaaac

SEQ ID NO: 3248277 - RNA, 19 nt, Artificial Sequence
  Description of Artificial Sequence: Synthetic oligonucleotide
gagaguccacugcaaaagc

SEQ ID NO: 3248278 - RNA, 19 nt, Artificial Sequence
  Description of Artificial Sequence: Synthetic oligonucleotide
ugcaaaagccacugcuuca

SEQ ID NO: 3248279 - RNA, 19 nt, Artificial Sequence
  Description of Artificial Sequence: Synthetic oligonucleotide
acugcuucagacaaacugu

SEQ ID NO: 3248280 - RNA, 19 nt, Artificial Sequence
  Description of Artificial Sequence: Synthetic oligonucleotide
cauugagaacacacacucc

SEQ ID NO: 3248281 - RNA, 19 nt, Artificial Sequence
  Description of Artificial Sequence: Synthetic oligonucleotide
ucuccucuggucaaagaau

SEQ ID NO: 3248282 - RNA, 19 nt, Artificial Sequence
  Description of Artificial Sequence: Synthetic oligonucleotide
ucuggucaaagaaucccuc

SEQ ID NO: 3248283 - RNA, 19 nt, Artificial Sequence
  Description of Artificial Sequence: Synthetic oligonucleotide
ucucagucaccagaaagac

SEQ ID NO: 3248284 - RNA, 19 nt, Artificial Sequence
  Description of Artificial Sequence: Synthetic oligonucleotide
uugcauugagccaguaaaa

SEQ ID NO: 3248285 - RNA, 19 nt, Artificial Sequence
  Description of Artificial Sequence: Synthetic oligonucleotide
cuucagacaaacuguagaa

SEQ ID NO: 3248286 - RNA, 19 nt, Artificial Sequence
  Description of Artificial Sequence: Synthetic oligonucleotide
uugcaguauucuccucugg

SEQ ID NO: 3248287 - RNA, 19 nt, Artificial Sequence
  Description of Artificial Sequence: Synthetic oligonucleotide
gaagagaagauugucuucu

SEQ ID NO: 3248288 - RNA, 19 nt, Artificial Sequence
  Description of Artificial Sequence: Synthetic oligonucleotide
gaaggauugcauugagcca

SEQ ID NO: 3248289 - RNA, 19 nt, Artificial Sequence
  Description of Artificial Sequence: Synthetic oligonucleotide
uccucuggucaaagaaucc

SEQ ID NO: 3248290 - RNA, 19 nt, Artificial Sequence
  Description of Artificial Sequence: Synthetic oligonucleotide
cuccucuggucaaagaauc

SEQ ID NO: 3248291 - RNA, 19 nt, Artificial Sequence
  Description of Artificial Sequence: Synthetic oligonucleotide
gacaaacuguagaagagaa

SEQ ID NO: 3248292 - RNA, 19 nt, Artificial Sequence
  Description of Artificial Sequence: Synthetic oligonucleotide
cagaaggauugcauugagc

SEQ ID NO: 3248293 - RNA, 19 nt, Artificial Sequence
  Description of Artificial Sequence: Synthetic oligonucleotide
gcauugagccaguaaaacc

SEQ ID NO: 3248294 - RNA, 19 nt, Artificial Sequence
  Description of Artificial Sequence: Synthetic oligonucleotide
aagacucaggccauugaga

SEQ ID NO: 3248295 - RNA, 19 nt, Artificial Sequence
  Description of Artificial Sequence: Synthetic oligonucleotide
caccagaaagacucaggcc

SEQ ID NO: 3248296 - RNA, 19 nt, Artificial Sequence
  Description of Artificial Sequence: Synthetic oligonucleotide
gagaacacacacuccuuuc

SEQ ID NO: 3248297 - RNA, 19 nt, Artificial Sequence
  Description of Artificial Sequence: Synthetic oligonucleotide
agacaaacuguagaagaga

SEQ ID NO: 3248298 - RNA, 19 nt, Artificial Sequence
  Description of Artificial Sequence: Synthetic oligonucleotide
acacacacuccuuucugcu

SEQ ID NO: 3248299 - RNA, 19 nt, Artificial Sequence
  Description of Artificial Sequence: Synthetic oligonucleotide
ccauugagaacacacacuc

SEQ ID NO: 3248300 - RNA, 19 nt, Artificial Sequence
  Description of Artificial Sequence: Synthetic oligonucleotide
uuacuuucucagucaccag

SEQ ID NO: 3248301 - RNA, 19 nt, Artificial Sequence
  Description of Artificial Sequence: Synthetic oligonucleotide
uucugcuucugagagucca

SEQ ID NO: 3248302 - RNA, 19 nt, Artificial Sequence
  Description of Artificial Sequence: Synthetic oligonucleotide
aaacuguagaagagaagau

SEQ ID NO: 3248303 - RNA, 19 nt, Artificial Sequence
  Description of Artificial Sequence: Synthetic oligonucleotide
uauucuccucuggucaaag

SEQ ID NO: 3248304 - RNA, 19 nt, Artificial Sequence
  Description of Artificial Sequence: Synthetic oligonucleotide
cugcaaaagccacugcuuc

SEQ ID NO: 3248305 - RNA, 19 nt, Artificial Sequence
  Description of Artificial Sequence: Synthetic oligonucleotide
aguccacugcaaaagccac

SEQ ID NO: 3248306 - RNA, 19 nt, Artificial Sequence
  Description of Artificial Sequence: Synthetic oligonucleotide
caguauucuccucugguca

SEQ ID NO: 3248307 - RNA, 19 nt, Artificial Sequence
  Description of Artificial Sequence: Synthetic oligonucleotide
ugcuucugagaguccacug

SEQ ID NO: 3248308 - RNA, 19 nt, Artificial Sequence
  Description of Artificial Sequence: Synthetic oligonucleotide
gaaagacucaggccauuga

SEQ ID NO: 3248309 - RNA, 19 nt, Artificial Sequence
  Description of Artificial Sequence: Synthetic oligonucleotide
gucaccagaaagacucagg

SEQ ID NO: 3248310 - RNA, 19 nt, Artificial Sequence
  Description of Artificial Sequence: Synthetic oligonucleotide
aguauucuccucuggucaa

SEQ ID NO: 3248311 - RNA, 19 nt, Artificial Sequence
  Description of Artificial Sequence: Synthetic oligonucleotide
acaaacuguagaagagaag

SEQ ID NO: 3248312 - RNA, 19 nt, Artificial Sequence
  Description of Artificial Sequence: Synthetic oligonucleotide
agaaagacucaggccauug

SEQ ID NO: 3248313 - RNA, 19 nt, Artificial Sequence
  Description of Artificial Sequence: Synthetic oligonucleotide
gcuucagacaaacuguaga

SEQ ID NO: 3248314 - RNA, 19 nt, Artificial Sequence
  Description of Artificial Sequence: Synthetic oligonucleotide
gauugcauugagccaguaa

SEQ ID NO: 3248315 - RNA, 19 nt, Artificial Sequence
  Description of Artificial Sequence: Synthetic oligonucleotide
gaguccacugcaaaagcca

SEQ ID NO: 3248316 - RNA, 19 nt, Artificial Sequence
  Description of Artificial Sequence: Synthetic oligonucleotide
ucugcuucugagaguccac

SEQ ID NO: 3248317 - RNA, 19 nt, Artificial Sequence
  Description of Artificial Sequence: Synthetic oligonucleotide
aaaucuuucucugugaagg

SEQ ID NO: 3248318 - RNA, 19 nt, Artificial Sequence
  Description of Artificial Sequence: Synthetic oligonucleotide
guuguauaugcucugaggg

SEQ ID NO: 3248319 - RNA, 19 nt, Artificial Sequence
  Description of Artificial Sequence: Synthetic oligonucleotide
aacaugaucacuccccagg

SEQ ID NO: 3248320 - RNA, 19 nt, Artificial Sequence
  Description of Artificial Sequence: Synthetic oligonucleotide
agcauuaucaacaugauca

SEQ ID NO: 3248321 - RNA, 19 nt, Artificial Sequence
  Description of Artificial Sequence: Synthetic oligonucleotide
ggagucuuuaaauagaggg

SEQ ID NO: 3248322 - RNA, 19 nt, Artificial Sequence
  Description of Artificial Sequence: Synthetic oligonucleotide
agucuuuaaauagaggggc

SEQ ID NO: 3248323 - RNA, 19 nt, Artificial Sequence
  Description of Artificial Sequence: Synthetic oligonucleotide
auuccuuucgcuuauugag

SEQ ID NO: 3248324 - RNA, 19 nt, Artificial Sequence
  Description of Artificial Sequence: Synthetic oligonucleotide
auuaucaacaugaucacuc

SEQ ID NO: 3248325 - RNA, 19 nt, Artificial Sequence
  Description of Artificial Sequence: Synthetic oligonucleotide
augaucacuccccaggcgc

SEQ ID NO: 3248326 - RNA, 19 nt, Artificial Sequence
  Description of Artificial Sequence: Synthetic oligonucleotide
gaugggugggacuagacug

SEQ ID NO: 3248327 - RNA, 19 nt, Artificial Sequence
  Description of Artificial Sequence: Synthetic oligonucleotide
acaguuguagcugacuugc

SEQ ID NO: 3248328 - RNA, 19 nt, Artificial Sequence
  Description of Artificial Sequence: Synthetic oligonucleotide
aaauaucccgagcauuauc

SEQ ID NO: 3248329 - RNA, 19 nt, Artificial Sequence
  Description of Artificial Sequence: Synthetic oligonucleotide
aaaaucuuucucugugaag

SEQ ID NO: 3248330 - RNA, 19 nt, Artificial Sequence
  Description of Artificial Sequence: Synthetic oligonucleotide
guuguagcugacuugcucg

SEQ ID NO: 3248331 - RNA, 19 nt, Artificial Sequence
  Description of Artificial Sequence: Synthetic oligonucleotide
ugagcgaggagcagaagcg

SEQ ID NO: 3248332 - RNA, 19 nt, Artificial Sequence
  Description of Artificial Sequence: Synthetic oligonucleotide
cuuauugagccgaacuugg

SEQ ID NO: 3248333 - RNA, 19 nt, Artificial Sequence
  Description of Artificial Sequence: Synthetic oligonucleotide
aaucuuucucugugaaggg

SEQ ID NO: 3248334 - RNA, 19 nt, Artificial Sequence
  Description of Artificial Sequence: Synthetic oligonucleotide
caauuaacacagcagagug

SEQ ID NO: 3248335 - RNA, 19 nt, Artificial Sequence
  Description of Artificial Sequence: Synthetic oligonucleotide
uccucaauuaacacagcag

SEQ ID NO: 3248336 - RNA, 19 nt, Artificial Sequence
  Description of Artificial Sequence: Synthetic oligonucleotide
uguauaugcucugagggcc

SEQ ID NO: 3248337 - RNA, 19 nt, Artificial Sequence
  Description of Artificial Sequence: Synthetic oligonucleotide
aauaucccgagcauuauca

SEQ ID NO: 3248338 - RNA, 19 nt, Artificial Sequence
  Description of Artificial Sequence: Synthetic oligonucleotide
aucaacaugaucacucccc

SEQ ID NO: 3248339 - RNA, 19 nt, Artificial Sequence
  Description of Artificial Sequence: Synthetic oligonucleotide
uaaauagaggggcggggcg

SEQ ID NO: 3248340 - RNA, 19 nt, Artificial Sequence
  Description of Artificial Sequence: Synthetic oligonucleotide
aacguccucaauuaacaca

SEQ ID NO: 3248341 - RNA, 19 nt, Artificial Sequence
  Description of Artificial Sequence: Synthetic oligonucleotide
ucuuuaaauagaggggcgg

SEQ ID NO: 3248342 - RNA, 19 nt, Artificial Sequence
  Description of Artificial Sequence: Synthetic oligonucleotide
auugagccgaacuuggcag

SEQ ID NO: 3248343 - RNA, 19 nt, Artificial Sequence
  Description of Artificial Sequence: Synthetic oligonucleotide
gagucuuuaaauagagggg

SEQ ID NO: 3248344 - RNA, 19 nt, Artificial Sequence
  Description of Artificial Sequence: Synthetic oligonucleotide
aauuaacacagcagagugg

SEQ ID NO: 3248345 - RNA, 19 nt, Artificial Sequence
  Description of Artificial Sequence: Synthetic oligonucleotide
uacagguuguauaugcucu

SEQ ID NO: 3248346 - RNA, 19 nt, Artificial Sequence
  Description of Artificial Sequence: Synthetic oligonucleotide
gaugaaacaguuguagcug

SEQ ID NO: 3248347 - RNA, 19 nt, Artificial Sequence
  Description of Artificial Sequence: Synthetic oligonucleotide
acaugaucacuccccaggc

SEQ ID NO: 3248348 - RNA, 19 nt, Artificial Sequence
  Description of Artificial Sequence: Synthetic oligonucleotide
cugaggagucuuuaaauag

SEQ ID NO: 3248349 - RNA, 19 nt, Artificial Sequence
  Description of Artificial Sequence: Synthetic oligonucleotide
uuaucaacaugaucacucc

SEQ ID NO: 3248350 - RNA, 19 nt, Artificial Sequence
  Description of Artificial Sequence: Synthetic oligonucleotide
agcagaagcggcgagaggg

SEQ ID NO: 3248351 - RNA, 19 nt, Artificial Sequence
  Description of Artificial Sequence: Synthetic oligonucleotide
ugaggagucuuuaaauaga

SEQ ID NO: 3248352 - RNA, 19 nt, Artificial Sequence
  Description of Artificial Sequence: Synthetic oligonucleotide
auuaacacagcagagugga

SEQ ID NO: 3248353 - RNA, 19 nt, Artificial Sequence
  Description of Artificial Sequence: Synthetic oligonucleotide
uauugagccgaacuuggca

SEQ ID NO: 3248354 - RNA, 19 nt, Artificial Sequence
  Description of Artificial Sequence: Synthetic oligonucleotide
ucguacagguuguauaugc

SEQ ID NO: 3248355 - RNA, 19 nt, Artificial Sequence
  Description of Artificial Sequence: Synthetic oligonucleotide
ucaauuaacacagcagagu

SEQ ID NO: 3248356 - RNA, 19 nt, Artificial Sequence
  Description of Artificial Sequence: Synthetic oligonucleotide
gaagccuccgagaaggagg

SEQ ID NO: 3248357 - RNA, 19 nt, Artificial Sequence
  Description of Artificial Sequence: Synthetic oligonucleotide
cucaauuaacacagcagag

SEQ ID NO: 3248358 - RNA, 19 nt, Artificial Sequence
  Description of Artificial Sequence: Synthetic oligonucleotide
aguuguagcugacuugcuc

SEQ ID NO: 3248359 - RNA, 19 nt, Artificial Sequence
  Description of Artificial Sequence: Synthetic oligonucleotide
uuguauaugcucugagggc

SEQ ID NO: 3248360 - RNA, 19 nt, Artificial Sequence
  Description of Artificial Sequence: Synthetic oligonucleotide
aaacaguuguagcugacuu

SEQ ID NO: 3248361 - RNA, 19 nt, Artificial Sequence
  Description of Artificial Sequence: Synthetic oligonucleotide
acuuggcagaaggagaagc

SEQ ID NO: 3248362 - RNA, 19 nt, Artificial Sequence
  Description of Artificial Sequence: Synthetic oligonucleotide
gagaaggagguagaggccg

SEQ ID NO: 3248363 - RNA, 19 nt, Artificial Sequence
  Description of Artificial Sequence: Synthetic oligonucleotide
  modified_base (2)..(2): a, c, u, g, unknown or other
anaggagggagagagcgcu

SEQ ID NO: 3248364 - RNA, 19 nt, Artificial Sequence
  Description of Artificial Sequence: Synthetic oligonucleotide
uauuccuuucgcuuauuga

SEQ ID NO: 3248365 - RNA, 19 nt, Artificial Sequence
  Description of Artificial Sequence: Synthetic oligonucleotide
  modified_base (4)..(4): a, c, u, g, unknown or other
gganaggagggagagagcg

SEQ ID NO: 3248366 - RNA, 19 nt, Artificial Sequence
  Description of Artificial Sequence: Synthetic oligonucleotide
aaggagaagccuccgagaa

SEQ ID NO: 3248367 - RNA, 19 nt, Artificial Sequence
  Description of Artificial Sequence: Synthetic oligonucleotide
gaggacgccagaugggugg

SEQ ID NO: 3248368 - RNA, 19 nt, Artificial Sequence
  Description of Artificial Sequence: Synthetic oligonucleotide
ucaacaugaucacucccca

SEQ ID NO: 3248369 - RNA, 19 nt, Artificial Sequence
  Description of Artificial Sequence: Synthetic oligonucleotide
uuaaauagaggggcggggc

SEQ ID NO: 3248370 - RNA, 19 nt, Artificial Sequence
  Description of Artificial Sequence: Synthetic oligonucleotide
uaucaacaugaucacuccc

SEQ ID NO: 3248371 - RNA, 19 nt, Artificial Sequence
  Description of Artificial Sequence: Synthetic oligonucleotide
ucuuucucugugaagggaa

SEQ ID NO: 3248372 - RNA, 19 nt, Artificial Sequence
  Description of Artificial Sequence: Synthetic oligonucleotide
uccuuucgcuuauugagcc

SEQ ID NO: 3248373 - RNA, 19 nt, Artificial Sequence
  Description of Artificial Sequence: Synthetic oligonucleotide
aacacagcagaguggacau

SEQ ID NO: 3248374 - RNA, 19 nt, Artificial Sequence
  Description of Artificial Sequence: Synthetic oligonucleotide
uuccuuucgcuuauugagc

SEQ ID NO: 3248375 - RNA, 19 nt, Artificial Sequence
  Description of Artificial Sequence: Synthetic oligonucleotide
aaauagaggggcggggcgg

SEQ ID NO: 3248376 - RNA, 19 nt, Artificial Sequence
  Description of Artificial Sequence: Synthetic oligonucleotide
aggcccacagcacaggagg

SEQ ID NO: 3248377 - RNA, 19 nt, Artificial Sequence
  Description of Artificial Sequence: Synthetic oligonucleotide
cuuggcagaaggagaagcc

SEQ ID NO: 3248378 - RNA, 19 nt, Artificial Sequence
  Description of Artificial Sequence: Synthetic oligonucleotide
acguccucaauuaacacag

SEQ ID NO: 3248379 - RNA, 19 nt, Artificial Sequence
  Description of Artificial Sequence: Synthetic oligonucleotide
agccgaacuuggcagaagg

SEQ ID NO: 3248380 - RNA, 19 nt, Artificial Sequence
  Description of Artificial Sequence: Synthetic oligonucleotide
gacuugcucguacagguug

SEQ ID NO: 3248381 - RNA, 19 nt, Artificial Sequence
  Description of Artificial Sequence: Synthetic oligonucleotide
gaggagucuuuaaauagag

SEQ ID NO: 3248382 - RNA, 19 nt, Artificial Sequence
  Description of Artificial Sequence: Synthetic oligonucleotide
gguuguauaugcucugagg

SEQ ID NO: 3248383 - RNA, 19 nt, Artificial Sequence
  Description of Artificial Sequence: Synthetic oligonucleotide
cugagcgaggagcagaagc

SEQ ID NO: 3248384 - RNA, 19 nt, Artificial Sequence
  Description of Artificial Sequence: Synthetic oligonucleotide
aagggaacguccucaauua

SEQ ID NO: 3248385 - RNA, 19 nt, Artificial Sequence
  Description of Artificial Sequence: Synthetic oligonucleotide
ucugugaagggaacguccu

SEQ ID NO: 3248386 - RNA, 19 nt, Artificial Sequence
  Description of Artificial Sequence: Synthetic oligonucleotide
cucugugaagggaacgucc

SEQ ID NO: 3248387 - RNA, 19 nt, Artificial Sequence
  Description of Artificial Sequence: Synthetic oligonucleotide
ucgcuuauugagccgaacu

SEQ ID NO: 3248388 - RNA, 19 nt, Artificial Sequence
  Description of Artificial Sequence: Synthetic oligonucleotide
acuagacuggggcugagga

SEQ ID NO: 3248389 - RNA, 19 nt, Artificial Sequence
  Description of Artificial Sequence: Synthetic oligonucleotide
ugugaagggaacguccuca

SEQ ID NO: 3248390 - RNA, 19 nt, Artificial Sequence
  Description of Artificial Sequence: Synthetic oligonucleotide
ggagaagccuccgagaagg

SEQ ID NO: 3248391 - RNA, 19 nt, Artificial Sequence
  Description of Artificial Sequence: Synthetic oligonucleotide
uuucucugugaagggaacg

SEQ ID NO: 3248392 - RNA, 19 nt, Artificial Sequence
  Description of Artificial Sequence: Synthetic oligonucleotide
gacucggucccagaggacg

SEQ ID NO: 3248393 - RNA, 19 nt, Artificial Sequence
  Description of Artificial Sequence: Synthetic oligonucleotide
uuauugagccgaacuuggc

SEQ ID NO: 3248394 - RNA, 19 nt, Artificial Sequence
  Description of Artificial Sequence: Synthetic oligonucleotide
ugaggacgaugccacaggc

SEQ ID NO: 3248395 - RNA, 19 nt, Artificial Sequence
  Description of Artificial Sequence: Synthetic oligonucleotide
ccgagaaggagguagaggc

SEQ ID NO: 3248396 - RNA, 19 nt, Artificial Sequence
  Description of Artificial Sequence: Synthetic oligonucleotide
gacgccauggaggagggag

SEQ ID NO: 3248397 - RNA, 19 nt, Artificial Sequence
  Description of Artificial Sequence: Synthetic oligonucleotide
acaggcggccagcuuaggc

SEQ ID NO: 3248398 - RNA, 19 nt, Artificial Sequence
  Description of Artificial Sequence: Synthetic oligonucleotide
augaaacaguuguagcuga

SEQ ID NO: 3248399 - RNA, 19 nt, Artificial Sequence
  Description of Artificial Sequence: Synthetic oligonucleotide
uagacuggggcugaggagu

SEQ ID NO: 3248400 - RNA, 19 nt, Artificial Sequence
  Description of Artificial Sequence: Synthetic oligonucleotide
gucuuuaaauagaggggcg

SEQ ID NO: 3248401 - RNA, 19 nt, Artificial Sequence
  Description of Artificial Sequence: Synthetic oligonucleotide
aggcggccagcuuaggccc

SEQ ID NO: 3248402 - RNA, 19 nt, Artificial Sequence
  Description of Artificial Sequence: Synthetic oligonucleotide
aauagaggggcggggcggg

SEQ ID NO: 3248403 - RNA, 19 nt, Artificial Sequence
  Description of Artificial Sequence: Synthetic oligonucleotide
uaucccgagcauuaucaac

SEQ ID NO: 3248404 - RNA, 19 nt, Artificial Sequence
  Description of Artificial Sequence: Synthetic oligonucleotide
uccgagaaggagguagagg

SEQ ID NO: 3248405 - RNA, 19 nt, Artificial Sequence
  Description of Artificial Sequence: Synthetic oligonucleotide
agguuguauaugcucugag

SEQ ID NO: 3248406 - RNA, 19 nt, Artificial Sequence
  Description of Artificial Sequence: Synthetic oligonucleotide
uuugcagggccagggaugc

SEQ ID NO: 3248407 - RNA, 19 nt, Artificial Sequence
  Description of Artificial Sequence: Synthetic oligonucleotide
agggagagcaccgggcugc

SEQ ID NO: 3248408 - RNA, 19 nt, Artificial Sequence
  Description of Artificial Sequence: Synthetic oligonucleotide
ggugggacuagacuggggc

SEQ ID NO: 3248409 - RNA, 19 nt, Artificial Sequence
  Description of Artificial Sequence: Synthetic oligonucleotide
ugaaacaguuguagcugac

SEQ ID NO: 3248410 - RNA, 19 nt, Artificial Sequence
  Description of Artificial Sequence: Synthetic oligonucleotide
gaagcggcgagagggagcc

SEQ ID NO: 3248411 - RNA, 19 nt, Artificial Sequence
  Description of Artificial Sequence: Synthetic oligonucleotide
agaugggugggacuagacu

SEQ ID NO: 3248412 - RNA, 19 nt, Artificial Sequence
  Description of Artificial Sequence: Synthetic oligonucleotide
guacagguuguauaugcuc

SEQ ID NO: 3248413 - RNA, 19 nt, Artificial Sequence
  Description of Artificial Sequence: Synthetic oligonucleotide
uccccaggcgcugaggacg

SEQ ID NO: 3248414 - RNA, 19 nt, Artificial Sequence
  Description of Artificial Sequence: Synthetic oligonucleotide
guauuccuuucgcuuauug

SEQ ID NO: 3248415 - RNA, 19 nt, Artificial Sequence
  Description of Artificial Sequence: Synthetic oligonucleotide
caggcggccagcuuaggcc

SEQ ID NO: 3248416 - RNA, 19 nt, Artificial Sequence
  Description of Artificial Sequence: Synthetic oligonucleotide
agggacgccauggaggagg

SEQ ID NO: 3248417 - RNA, 19 nt, Artificial Sequence
  Description of Artificial Sequence: Synthetic oligonucleotide
ggaaauaugagcuugaagg

SEQ ID NO: 3248418 - RNA, 19 nt, Artificial Sequence
  Description of Artificial Sequence: Synthetic oligonucleotide
uacaaauguauuaaagucg

SEQ ID NO: 3248419 - RNA, 19 nt, Artificial Sequence
  Description of Artificial Sequence: Synthetic oligonucleotide
aaauguauuaaagucguac

SEQ ID NO: 3248420 - RNA, 19 nt, Artificial Sequence
  Description of Artificial Sequence: Synthetic oligonucleotide
auagcaugcacacaggggc

SEQ ID NO: 3248421 - RNA, 19 nt, Artificial Sequence
  Description of Artificial Sequence: Synthetic oligonucleotide
aguauagaaauacacuugg

SEQ ID NO: 3248422 - RNA, 19 nt, Artificial Sequence
  Description of Artificial Sequence: Synthetic oligonucleotide
acaaauagcaugcacacag

SEQ ID NO: 3248423 - RNA, 19 nt, Artificial Sequence
  Description of Artificial Sequence: Synthetic oligonucleotide
aaccuaauagacaucagcc

SEQ ID NO: 3248424 - RNA, 19 nt, Artificial Sequence
  Description of Artificial Sequence: Synthetic oligonucleotide
acauaaguacauuagacag

SEQ ID NO: 3248425 - RNA, 19 nt, Artificial Sequence
  Description of Artificial Sequence: Synthetic oligonucleotide
uauagaaauacacuuggug

SEQ ID NO: 3248426 - RNA, 19 nt, Artificial Sequence
  Description of Artificial Sequence: Synthetic oligonucleotide
aaacauaaguacauuagac

SEQ ID NO: 3248427 - RNA, 19 nt, Artificial Sequence
  Description of Artificial Sequence: Synthetic oligonucleotide
ucaagagcuacaaauagca

SEQ ID NO: 3248428 - RNA, 19 nt, Artificial Sequence
  Description of Artificial Sequence: Synthetic oligonucleotide
gaaauaugagcuugaaggg

SEQ ID NO: 3248429 - RNA, 19 nt, Artificial Sequence
  Description of Artificial Sequence: Synthetic oligonucleotide
uuggugaccaaccuaauag

SEQ ID NO: 3248430 - RNA, 19 nt, Artificial Sequence
  Description of Artificial Sequence: Synthetic oligonucleotide
aacauaaguacauuagaca

SEQ ID NO: 3248431 - RNA, 19 nt, Artificial Sequence
  Description of Artificial Sequence: Synthetic oligonucleotide
aagagcuacaaauagcaug

SEQ ID NO: 3248432 - RNA, 19 nt, Artificial Sequence
  Description of Artificial Sequence: Synthetic oligonucleotide
aauguauuaaagucguaca

SEQ ID NO: 3248433 - RNA, 19 nt, Artificial Sequence
  Description of Artificial Sequence: Synthetic oligonucleotide
aagucguacauacauacug

SEQ ID NO: 3248434 - RNA, 19 nt, Artificial Sequence
  Description of Artificial Sequence: Synthetic oligonucleotide
aaauagcaugcacacaggg

SEQ ID NO: 3248435 - RNA, 19 nt, Artificial Sequence
  Description of Artificial Sequence: Synthetic oligonucleotide
auagaaauacacuugguga

SEQ ID NO: 3248436 - RNA, 19 nt, Artificial Sequence
  Description of Artificial Sequence: Synthetic oligonucleotide
cauacugucaggaugacac

SEQ ID NO: 3248437 - RNA, 19 nt, Artificial Sequence
  Description of Artificial Sequence: Synthetic oligonucleotide
uacuaacacaguaucaggg

SEQ ID NO: 3248438 - RNA, 19 nt, Artificial Sequence
  Description of Artificial Sequence: Synthetic oligonucleotide
aacgcuaaccaaucucugc

SEQ ID NO: 3248439 - RNA, 19 nt, Artificial Sequence
  Description of Artificial Sequence: Synthetic oligonucleotide
agagcuacaaauagcaugc

SEQ ID NO: 3248440 - RNA, 19 nt, Artificial Sequence
  Description of Artificial Sequence: Synthetic oligonucleotide
auuaaagucguacauacau

SEQ ID NO: 3248441 - RNA, 19 nt, Artificial Sequence
  Description of Artificial Sequence: Synthetic oligonucleotide
auagaauuuucugacagac

SEQ ID NO: 3248442 - RNA, 19 nt, Artificial Sequence
  Description of Artificial Sequence: Synthetic oligonucleotide
cuacaaauguauuaaaguc

SEQ ID NO: 3248443 - RNA, 19 nt, Artificial Sequence
  Description of Artificial Sequence: Synthetic oligonucleotide
aaauaugagcuugaagggg

SEQ ID NO: 3248444 - RNA, 19 nt, Artificial Sequence
  Description of Artificial Sequence: Synthetic oligonucleotide
aaacacacaugagaaaacg

SEQ ID NO: 3248445 - RNA, 19 nt, Artificial Sequence
  Description of Artificial Sequence: Synthetic oligonucleotide
aaguacauuagacagguua

SEQ ID NO: 3248446 - RNA, 19 nt, Artificial Sequence
  Description of Artificial Sequence: Synthetic oligonucleotide
acauagaauuuucugacag

SEQ ID NO: 3248447 - RNA, 19 nt, Artificial Sequence
  Description of Artificial Sequence: Synthetic oligonucleotide
uaaagucguacauacauac

SEQ ID NO: 3248448 - RNA, 19 nt, Artificial Sequence
  Description of Artificial Sequence: Synthetic oligonucleotide
uaaaagcugacacaauuga

SEQ ID NO: 3248449 - RNA, 19 nt, Artificial Sequence
  Description of Artificial Sequence: Synthetic oligonucleotide
ugcuacaaauguauuaaag

SEQ ID NO: 3248450 - RNA, 19 nt, Artificial Sequence
  Description of Artificial Sequence: Synthetic oligonucleotide
uuagacagguuacuucucg

SEQ ID NO: 3248451 - RNA, 19 nt, Artificial Sequence
  Description of Artificial Sequence: Synthetic oligonucleotide
acaguacuaacacaguauc

SEQ ID NO: 3248452 - RNA, 19 nt, Artificial Sequence
  Description of Artificial Sequence: Synthetic oligonucleotide
uuucacagaguauagaaau

SEQ ID NO: 3248453 - RNA, 19 nt, Artificial Sequence
  Description of Artificial Sequence: Synthetic oligonucleotide
guauuaaagucguacauac

SEQ ID NO: 3248454 - RNA, 19 nt, Artificial Sequence
  Description of Artificial Sequence: Synthetic oligonucleotide
agaauuuucugacagacua

SEQ ID NO: 3248455 - RNA, 19 nt, Artificial Sequence
  Description of Artificial Sequence: Synthetic oligonucleotide
ucucaaacacacaugagaa

SEQ ID NO: 3248456 - RNA, 19 nt, Artificial Sequence
  Description of Artificial Sequence: Synthetic oligonucleotide
aauugagaaggcuugggaa

SEQ ID NO: 3248457 - RNA, 19 nt, Artificial Sequence
  Description of Artificial Sequence: Synthetic oligonucleotide
uuaguaaaagcugacacaa

SEQ ID NO: 3248458 - RNA, 19 nt, Artificial Sequence
  Description of Artificial Sequence: Synthetic oligonucleotide
agaguauagaaauacacuu

SEQ ID NO: 3248459 - RNA, 19 nt, Artificial Sequence
  Description of Artificial Sequence: Synthetic oligonucleotide
aguacuaacacaguaucag

SEQ ID NO: 3248460 - RNA, 19 nt, Artificial Sequence
  Description of Artificial Sequence: Synthetic oligonucleotide
acagaguauagaaauacac

SEQ ID NO: 3248461 - RNA, 19 nt, Artificial Sequence
  Description of Artificial Sequence: Synthetic oligonucleotide
ugagaaaacgcuaaccaau

SEQ ID NO: 3248462 - RNA, 19 nt, Artificial Sequence
  Description of Artificial Sequence: Synthetic oligonucleotide
cauaaguacauuagacagg

SEQ ID NO: 3248463 - RNA, 19 nt, Artificial Sequence
  Description of Artificial Sequence: Synthetic oligonucleotide
uuuucuuucacagaguaua

SEQ ID NO: 3248464 - RNA, 19 nt, Artificial Sequence
  Description of Artificial Sequence: Synthetic oligonucleotide
ucuuucacagaguauagaa

SEQ ID NO: 3248465 - RNA, 19 nt, Artificial Sequence
  Description of Artificial Sequence: Synthetic oligonucleotide
aggcuugggaaauaugagc

SEQ ID NO: 3248466 - RNA, 19 nt, Artificial Sequence
  Description of Artificial Sequence: Synthetic oligonucleotide
uagaaauacacuuggugac

SEQ ID NO: 3248467 - RNA, 19 nt, Artificial Sequence
  Description of Artificial Sequence: Synthetic oligonucleotide
aauacacuuggugaccaac

SEQ ID NO: 3248468 - RNA, 19 nt, Artificial Sequence
  Description of Artificial Sequence: Synthetic oligonucleotide
aacacacaugagaaaacgc

SEQ ID NO: 3248469 - RNA, 19 nt, Artificial Sequence
  Description of Artificial Sequence: Synthetic oligonucleotide
gaugacaccaaacauaagu

SEQ ID NO: 3248470 - RNA, 19 nt, Artificial Sequence
  Description of Artificial Sequence: Synthetic oligonucleotide
auagacaucagccuucccu

SEQ ID NO: 3248471 - RNA, 19 nt, Artificial Sequence
  Description of Artificial Sequence: Synthetic oligonucleotide
acauuagacagguuacuuc

SEQ ID NO: 3248472 - RNA, 19 nt, Artificial Sequence
  Description of Artificial Sequence: Synthetic oligonucleotide
ucaaacacacaugagaaaa

SEQ ID NO: 3248473 - RNA, 19 nt, Artificial Sequence
  Description of Artificial Sequence: Synthetic oligonucleotide
gcugacacaauugagaagg

SEQ ID NO: 3248474 - RNA, 19 nt, Artificial Sequence
  Description of Artificial Sequence: Synthetic oligonucleotide
cauacauacugucaggaug

SEQ ID NO: 3248475 - RNA, 19 nt, Artificial Sequence
  Description of Artificial Sequence: Synthetic oligonucleotide
ucugcugcuacaaauguau

SEQ ID NO: 3248476 - RNA, 19 nt, Artificial Sequence
  Description of Artificial Sequence: Synthetic oligonucleotide
aaagcugacacaauugaga

SEQ ID NO: 3248477 - RNA, 19 nt, Artificial Sequence
  Description of Artificial Sequence: Synthetic oligonucleotide
aauagcaugcacacagggg

SEQ ID NO: 3248478 - RNA, 19 nt, Artificial Sequence
  Description of Artificial Sequence: Synthetic oligonucleotide
ugaccaaccuaauagacau

SEQ ID NO: 3248479 - RNA, 19 nt, Artificial Sequence
  Description of Artificial Sequence: Synthetic oligonucleotide
aguacauuagacagguuac

SEQ ID NO: 3248480 - RNA, 19 nt, Artificial Sequence
  Description of Artificial Sequence: Synthetic oligonucleotide
aaaacgcuaaccaaucucu

SEQ ID NO: 3248481 - RNA, 19 nt, Artificial Sequence
  Description of Artificial Sequence: Synthetic oligonucleotide
uacuucucgggguacauag

SEQ ID NO: 3248482 - RNA, 19 nt, Artificial Sequence
  Description of Artificial Sequence: Synthetic oligonucleotide
guacauagaauuuucugac

SEQ ID NO: 3248483 - RNA, 19 nt, Artificial Sequence
  Description of Artificial Sequence: Synthetic oligonucleotide
aguaucagggucaagagcu

SEQ ID NO: 3248484 - RNA, 19 nt, Artificial Sequence
  Description of Artificial Sequence: Synthetic oligonucleotide
acaugagaaaacgcuaacc

SEQ ID NO: 3248485 - RNA, 19 nt, Artificial Sequence
  Description of Artificial Sequence: Synthetic oligonucleotide
cuacaaauagcaugcacac

SEQ ID NO: 3248486 - RNA, 19 nt, Artificial Sequence
  Description of Artificial Sequence: Synthetic oligonucleotide
auaaguacauuagacaggu

SEQ ID NO: 3248487 - RNA, 19 nt, Artificial Sequence
  Description of Artificial Sequence: Synthetic oligonucleotide
agaaauacacuuggugacc

SEQ ID NO: 3248488 - RNA, 19 nt, Artificial Sequence
  Description of Artificial Sequence: Synthetic oligonucleotide
aguaaaagcugacacaauu

SEQ ID NO: 3248489 - RNA, 19 nt, Artificial Sequence
  Description of Artificial Sequence: Synthetic oligonucleotide
uuucuuucacagaguauag

SEQ ID NO: 3248490 - RNA, 19 nt, Artificial Sequence
  Description of Artificial Sequence: Synthetic oligonucleotide
aaccaaucucugcugcuac

SEQ ID NO: 3248491 - RNA, 19 nt, Artificial Sequence
  Description of Artificial Sequence: Synthetic oligonucleotide
aauaugagcuugaaggggu

SEQ ID NO: 3248492 - RNA, 19 nt, Artificial Sequence
  Description of Artificial Sequence: Synthetic oligonucleotide
uuuucugacagacuauuuu

SEQ ID NO: 3248493 - RNA, 19 nt, Artificial Sequence
  Description of Artificial Sequence: Synthetic oligonucleotide
ucagccuucccucucaaac

SEQ ID NO: 3248494 - RNA, 19 nt, Artificial Sequence
  Description of Artificial Sequence: Synthetic oligonucleotide
caaccuaauagacaucagc

SEQ ID NO: 3248495 - RNA, 19 nt, Artificial Sequence
  Description of Artificial Sequence: Synthetic oligonucleotide
gacagguuacuucucgggg

SEQ ID NO: 3248496 - RNA, 19 nt, Artificial Sequence
  Description of Artificial Sequence: Synthetic oligonucleotide
aagcugacacaauugagaa

SEQ ID NO: 3248497 - RNA, 19 nt, Artificial Sequence
  Description of Artificial Sequence: Synthetic oligonucleotide
aaucucugcugcuacaaau

SEQ ID NO: 3248498 - RNA, 19 nt, Artificial Sequence
  Description of Artificial Sequence: Synthetic oligonucleotide
uaacacaguaucaggguca

SEQ ID NO: 3248499 - RNA, 19 nt, Artificial Sequence
  Description of Artificial Sequence: Synthetic oligonucleotide
gaaaacgcuaaccaaucuc

SEQ ID NO: 3248500 - RNA, 19 nt, Artificial Sequence
  Description of Artificial Sequence: Synthetic oligonucleotide
agggucaagagcuacaaau

SEQ ID NO: 3248501 - RNA, 19 nt, Artificial Sequence
  Description of Artificial Sequence: Synthetic oligonucleotide
agcuacaaauagcaugcac

SEQ ID NO: 3248502 - RNA, 19 nt, Artificial Sequence
  Description of Artificial Sequence: Synthetic oligonucleotide
ucacagaguauagaaauac

SEQ ID NO: 3248503 - RNA, 19 nt, Artificial Sequence
  Description of Artificial Sequence: Synthetic oligonucleotide
guacuaacacaguaucagg

SEQ ID NO: 3248504 - RNA, 19 nt, Artificial Sequence
  Description of Artificial Sequence: Synthetic oligonucleotide
aaaagcugacacaauugag

SEQ ID NO: 3248505 - RNA, 19 nt, Artificial Sequence
  Description of Artificial Sequence: Synthetic oligonucleotide
aaggggucacaguacuaac

SEQ ID NO: 3248506 - RNA, 19 nt, Artificial Sequence
  Description of Artificial Sequence: Synthetic oligonucleotide
agcagagccucaaagaggg

SEQ ID NO: 3248507 - RNA, 19 nt, Artificial Sequence
  Description of Artificial Sequence: Synthetic oligonucleotide
caugagaaaacgcuaacca

SEQ ID NO: 3248508 - RNA, 19 nt, Artificial Sequence
  Description of Artificial Sequence: Synthetic oligonucleotide
gaaggcuugggaaauauga

SEQ ID NO: 3248509 - RNA, 19 nt, Artificial Sequence
  Description of Artificial Sequence: Synthetic oligonucleotide
aauagacaucagccuuccc

SEQ ID NO: 3248510 - RNA, 19 nt, Artificial Sequence
  Description of Artificial Sequence: Synthetic oligonucleotide
gguacauagaauuuucuga

SEQ ID NO: 3248511 - RNA, 19 nt, Artificial Sequence
  Description of Artificial Sequence: Synthetic oligonucleotide
acaaauguauuaaagucgu

SEQ ID NO: 3248512 - RNA, 19 nt, Artificial Sequence
  Description of Artificial Sequence: Synthetic oligonucleotide
ugacaccaaacauaaguac

SEQ ID NO: 3248513 - RNA, 19 nt, Artificial Sequence
  Description of Artificial Sequence: Synthetic oligonucleotide
agacagguuacuucucggg

SEQ ID NO: 3248514 - RNA, 19 nt, Artificial Sequence
  Description of Artificial Sequence: Synthetic oligonucleotide
acuaacacaguaucagggu

SEQ ID NO: 3248515 - RNA, 19 nt, Artificial Sequence
  Description of Artificial Sequence: Synthetic oligonucleotide
gaguauagaaauacacuug

SEQ ID NO: 3248516 - RNA, 19 nt, Artificial Sequence
  Description of Artificial Sequence: Synthetic oligonucleotide
acaguaucagggucaagag

SEQ ID NO: 3248517 - RNA, 19 nt, Artificial Sequence
  Description of Artificial Sequence: Synthetic oligonucleotide
aagcccauaauauuuauac

SEQ ID NO: 3248518 - RNA, 19 nt, Artificial Sequence
  Description of Artificial Sequence: Synthetic oligonucleotide
aacacuuuucaucugaggg

SEQ ID NO: 3248519 - RNA, 19 nt, Artificial Sequence
  Description of Artificial Sequence: Synthetic oligonucleotide
auaauauuuauacuuacuc

SEQ ID NO: 3248520 - RNA, 19 nt, Artificial Sequence
  Description of Artificial Sequence: Synthetic oligonucleotide
ucugcuuugauuuucauga

SEQ ID NO: 3248521 - RNA, 19 nt, Artificial Sequence
  Description of Artificial Sequence: Synthetic oligonucleotide
uuuaaaaccacuacuugag

SEQ ID NO: 3248522 - RNA, 19 nt, Artificial Sequence
  Description of Artificial Sequence: Synthetic oligonucleotide
aaccuaaacacuuuucauc

SEQ ID NO: 3248523 - RNA, 19 nt, Artificial Sequence
  Description of Artificial Sequence: Synthetic oligonucleotide
uuuauuucugcuuugauuu

SEQ ID NO: 3248524 - RNA, 19 nt, Artificial Sequence
  Description of Artificial Sequence: Synthetic oligonucleotide
uuuuaaaaccacuacuuga

SEQ ID NO: 3248525 - RNA, 19 nt, Artificial Sequence
  Description of Artificial Sequence: Synthetic oligonucleotide
uucuuugucacugugauca

SEQ ID NO: 3248526 - RNA, 19 nt, Artificial Sequence
  Description of Artificial Sequence: Synthetic oligonucleotide
uaaaccuaaacacuuuuca

SEQ ID NO: 3248527 - RNA, 19 nt, Artificial Sequence
  Description of Artificial Sequence: Synthetic oligonucleotide
uaauauuuauacuuacuca

SEQ ID NO: 3248528 - RNA, 19 nt, Artificial Sequence
  Description of Artificial Sequence: Synthetic oligonucleotide
aauucugcuuauuuucauc

SEQ ID NO: 3248529 - RNA, 19 nt, Artificial Sequence
  Description of Artificial Sequence: Synthetic oligonucleotide
acuacuauuucuuauuugu

SEQ ID NO: 3248530 - RNA, 19 nt, Artificial Sequence
  Description of Artificial Sequence: Synthetic oligonucleotide
auuuucuuggucucuacgg

SEQ ID NO: 3248531 - RNA, 19 nt, Artificial Sequence
  Description of Artificial Sequence: Synthetic oligonucleotide
ugcuguuaaaccuaaacac

SEQ ID NO: 3248532 - RNA, 19 nt, Artificial Sequence
  Description of Artificial Sequence: Synthetic oligonucleotide
auugucaaaagacaggaga

SEQ ID NO: 3248533 - RNA, 19 nt, Artificial Sequence
  Description of Artificial Sequence: Synthetic oligonucleotide
uucauugucaaaagacagg

SEQ ID NO: 3248534 - RNA, 19 nt, Artificial Sequence
  Description of Artificial Sequence: Synthetic oligonucleotide
ugauucucccaucagcugg

SEQ ID NO: 3248535 - RNA, 19 nt, Artificial Sequence
  Description of Artificial Sequence: Synthetic oligonucleotide
aaaaccacuacuugaggcu

SEQ ID NO: 3248536 - RNA, 19 nt, Artificial Sequence
  Description of Artificial Sequence: Synthetic oligonucleotide
uuucuauacaugauucucc

SEQ ID NO: 3248537 - RNA, 19 nt, Artificial Sequence
  Description of Artificial Sequence: Synthetic oligonucleotide
ugugaguucuuucuaacug

SEQ ID NO: 3248538 - RNA, 19 nt, Artificial Sequence
  Description of Artificial Sequence: Synthetic oligonucleotide
acaugauucucccaucagc

SEQ ID NO: 3248539 - RNA, 19 nt, Artificial Sequence
  Description of Artificial Sequence: Synthetic oligonucleotide
ucuucaucugcuuuggcag

SEQ ID NO: 3248540 - RNA, 19 nt, Artificial Sequence
  Description of Artificial Sequence: Synthetic oligonucleotide
uauuuauacuuacucauuc

SEQ ID NO: 3248541 - RNA, 19 nt, Artificial Sequence
  Description of Artificial Sequence: Synthetic oligonucleotide
ucuucauugucaaaagaca

SEQ ID NO: 3248542 - RNA, 19 nt, Artificial Sequence
  Description of Artificial Sequence: Synthetic oligonucleotide
uguuuuaaaaccacuacuu

SEQ ID NO: 3248543 - RNA, 19 nt, Artificial Sequence
  Description of Artificial Sequence: Synthetic oligonucleotide
uaaaaccacuacuugaggc

SEQ ID NO: 3248544 - RNA, 19 nt, Artificial Sequence
  Description of Artificial Sequence: Synthetic oligonucleotide
uacuuacucauucucaucu

SEQ ID NO: 3248545 - RNA, 19 nt, Artificial Sequence
  Description of Artificial Sequence: Synthetic oligonucleotide
uuuauacuuacucauucuc

SEQ ID NO: 3248546 - RNA, 19 nt, Artificial Sequence
  Description of Artificial Sequence: Synthetic oligonucleotide
uugcuguuaaaccuaaaca

SEQ ID NO: 3248547 - RNA, 19 nt, Artificial Sequence
  Description of Artificial Sequence: Synthetic oligonucleotide
uuauacuuacucauucuca

SEQ ID NO: 3248548 - RNA, 19 nt, Artificial Sequence
  Description of Artificial Sequence: Synthetic oligonucleotide
ugaggcuggauuuucuugg

SEQ ID NO: 3248549 - RNA, 19 nt, Artificial Sequence
  Description of Artificial Sequence: Synthetic oligonucleotide
cuuucuaacugaauucugc

SEQ ID NO: 3248550 - RNA, 19 nt, Artificial Sequence
  Description of Artificial Sequence: Synthetic oligonucleotide
cuucauugucaaaagacag

SEQ ID NO: 3248551 - RNA, 19 nt, Artificial Sequence
  Description of Artificial Sequence: Synthetic oligonucleotide
ucuaacugaauucugcuua

SEQ ID NO: 3248552 - RNA, 19 nt, Artificial Sequence
  Description of Artificial Sequence: Synthetic oligonucleotide
aaacacuuuucaucugagg

SEQ ID NO: 3248553 - RNA, 19 nt, Artificial Sequence
  Description of Artificial Sequence: Synthetic oligonucleotide
ucucccaucagcuggaggc

SEQ ID NO: 3248554 - RNA, 19 nt, Artificial Sequence
  Description of Artificial Sequence: Synthetic oligonucleotide
uuucaugacuucuucagcu

SEQ ID NO: 3248555 - RNA, 19 nt, Artificial Sequence
  Description of Artificial Sequence: Synthetic oligonucleotide
uuugucacugugaucacca

SEQ ID NO: 3248556 - RNA, 19 nt, Artificial Sequence
  Description of Artificial Sequence: Synthetic oligonucleotide
aaagacaggagacuacuau

SEQ ID NO: 3248557 - RNA, 19 nt, Artificial Sequence
  Description of Artificial Sequence: Synthetic oligonucleotide
ugaagguaggccaagccca

SEQ ID NO: 3248558 - RNA, 19 nt, Artificial Sequence
  Description of Artificial Sequence: Synthetic oligonucleotide
uugucaaaagacaggagac

SEQ ID NO: 3248559 - RNA, 19 nt, Artificial Sequence
  Description of Artificial Sequence: Synthetic oligonucleotide
gucacugugaucaccaucg

SEQ ID NO: 3248560 - RNA, 19 nt, Artificial Sequence
  Description of Artificial Sequence: Synthetic oligonucleotide
accuaaacacuuuucaucu

SEQ ID NO: 3248561 - RNA, 19 nt, Artificial Sequence
  Description of Artificial Sequence: Synthetic oligonucleotide
gauuuucuuggucucuacg

SEQ ID NO: 3248562 - RNA, 19 nt, Artificial Sequence
  Description of Artificial Sequence: Synthetic oligonucleotide
uucuuggucucuacggugg

SEQ ID NO: 3248563 - RNA, 19 nt, Artificial Sequence
  Description of Artificial Sequence: Synthetic oligonucleotide
ucauugucaaaagacagga

SEQ ID NO: 3248564 - RNA, 19 nt, Artificial Sequence
  Description of Artificial Sequence: Synthetic oligonucleotide
aguucuuucuaacugaauu

SEQ ID NO: 3248565 - RNA, 19 nt, Artificial Sequence
  Description of Artificial Sequence: Synthetic oligonucleotide
ugaauucugcuuauuuuca

SEQ ID NO: 3248566 - RNA, 19 nt, Artificial Sequence
  Description of Artificial Sequence: Synthetic oligonucleotide
acguacgacaccugguucc

SEQ ID NO: 3248567 - RNA, 19 nt, Artificial Sequence
  Description of Artificial Sequence: Synthetic oligonucleotide
uuuucaugacuucuucagc

SEQ ID NO: 3248568 - RNA, 19 nt, Artificial Sequence
  Description of Artificial Sequence: Synthetic oligonucleotide
uuaacuggcuuucuauaca

SEQ ID NO: 3248569 - RNA, 19 nt, Artificial Sequence
  Description of Artificial Sequence: Synthetic oligonucleotide
auucugcuuauuuucauca

SEQ ID NO: 3248570 - RNA, 19 nt, Artificial Sequence
  Description of Artificial Sequence: Synthetic oligonucleotide
aaaccuaaacacuuuucau

SEQ ID NO: 3248571 - RNA, 19 nt, Artificial Sequence
  Description of Artificial Sequence: Synthetic oligonucleotide
cuugcuguuaaaccuaaac

SEQ ID NO: 3248572 - RNA, 19 nt, Artificial Sequence
  Description of Artificial Sequence: Synthetic oligonucleotide
uuugauuuucaugacuucu

SEQ ID NO: 3248573 - RNA, 19 nt, Artificial Sequence
  Description of Artificial Sequence: Synthetic oligonucleotide
ucuucuuugucacugugau

SEQ ID NO: 3248574 - RNA, 19 nt, Artificial Sequence
  Description of Artificial Sequence: Synthetic oligonucleotide
uauacuuacucauucucau

SEQ ID NO: 3248575 - RNA, 19 nt, Artificial Sequence
  Description of Artificial Sequence: Synthetic oligonucleotide
cuugaagcgggccaggaag

SEQ ID NO: 3248576 - RNA, 19 nt, Artificial Sequence
  Description of Artificial Sequence: Synthetic oligonucleotide
uuucuaacugaauucugcu

SEQ ID NO: 3248577 - RNA, 19 nt, Artificial Sequence
  Description of Artificial Sequence: Synthetic oligonucleotide
auuuauacuuacucauucu

SEQ ID NO: 3248578 - RNA, 19 nt, Artificial Sequence
  Description of Artificial Sequence: Synthetic oligonucleotide
uuuggcagccuuuauuucu

SEQ ID NO: 3248579 - RNA, 19 nt, Artificial Sequence
  Description of Artificial Sequence: Synthetic oligonucleotide
uucuucaucugcuuuggca

SEQ ID NO: 3248580 - RNA, 19 nt, Artificial Sequence
  Description of Artificial Sequence: Synthetic oligonucleotide
uuacucauucucaucuuca

SEQ ID NO: 3248581 - RNA, 19 nt, Artificial Sequence
  Description of Artificial Sequence: Synthetic oligonucleotide
acuggcuuucuauacauga

SEQ ID NO: 3248582 - RNA, 19 nt, Artificial Sequence
  Description of Artificial Sequence: Synthetic oligonucleotide
cuuaacuggcuuucuauac

SEQ ID NO: 3248583 - RNA, 19 nt, Artificial Sequence
  Description of Artificial Sequence: Synthetic oligonucleotide
uuaaaccuaaacacuuuuc

SEQ ID NO: 3248584 - RNA, 19 nt, Artificial Sequence
  Description of Artificial Sequence: Synthetic oligonucleotide
cugagggacgcuuaacugg

SEQ ID NO: 3248585 - RNA, 19 nt, Artificial Sequence
  Description of Artificial Sequence: Synthetic oligonucleotide
uuuucuuggucucuacggu

SEQ ID NO: 3248586 - RNA, 19 nt, Artificial Sequence
  Description of Artificial Sequence: Synthetic oligonucleotide
acugugaucaccaucguca

SEQ ID NO: 3248587 - RNA, 19 nt, Artificial Sequence
  Description of Artificial Sequence: Synthetic oligonucleotide
uuugguagcuugcuguuaa

SEQ ID NO: 3248588 - RNA, 19 nt, Artificial Sequence
  Description of Artificial Sequence: Synthetic oligonucleotide
ugagggacgcuuaacuggc

SEQ ID NO: 3248589 - RNA, 19 nt, Artificial Sequence
  Description of Artificial Sequence: Synthetic oligonucleotide
gaggaaggcagggugaagg

SEQ ID NO: 3248590 - RNA, 19 nt, Artificial Sequence
  Description of Artificial Sequence: Synthetic oligonucleotide
gaaggcagggugaagguag

SEQ ID NO: 3248591 - RNA, 19 nt, Artificial Sequence
  Description of Artificial Sequence: Synthetic oligonucleotide
uuuugugaguucuuucuaa

SEQ ID NO: 3248592 - RNA, 19 nt, Artificial Sequence
  Description of Artificial Sequence: Synthetic oligonucleotide
gucaucagggagcugaggc

SEQ ID NO: 3248593 - RNA, 19 nt, Artificial Sequence
  Description of Artificial Sequence: Synthetic oligonucleotide
uucuuucuaacugaauucu

SEQ ID NO: 3248594 - RNA, 19 nt, Artificial Sequence
  Description of Artificial Sequence: Synthetic oligonucleotide
ucuuucuaacugaauucug

SEQ ID NO: 3248595 - RNA, 19 nt, Artificial Sequence
  Description of Artificial Sequence: Synthetic oligonucleotide
ucaaaagacaggagacuac

SEQ ID NO: 3248596 - RNA, 19 nt, Artificial Sequence
  Description of Artificial Sequence: Synthetic oligonucleotide
ucugcuuauuuucaucauc

SEQ ID NO: 3248597 - RNA, 19 nt, Artificial Sequence
  Description of Artificial Sequence: Synthetic oligonucleotide
ucucccuguuuuaaaacca

SEQ ID NO: 3248598 - RNA, 19 nt, Artificial Sequence
  Description of Artificial Sequence: Synthetic oligonucleotide
uuugugaguucuuucuaac

SEQ ID NO: 3248599 - RNA, 19 nt, Artificial Sequence
  Description of Artificial Sequence: Synthetic oligonucleotide
uugaagcgggccaggaagg

SEQ ID NO: 3248600 - RNA, 19 nt, Artificial Sequence
  Description of Artificial Sequence: Synthetic oligonucleotide
guucuuucuaacugaauuc

SEQ ID NO: 3248601 - RNA, 19 nt, Artificial Sequence
  Description of Artificial Sequence: Synthetic oligonucleotide
uucugcuuugauuuucaug

SEQ ID NO: 3248602 - RNA, 19 nt, Artificial Sequence
  Description of Artificial Sequence: Synthetic oligonucleotide
acuucuucagcuguuaggu

SEQ ID NO: 3248603 - RNA, 19 nt, Artificial Sequence
  Description of Artificial Sequence: Synthetic oligonucleotide
auacuuacucauucucauc

SEQ ID NO: 3248604 - RNA, 19 nt, Artificial Sequence
  Description of Artificial Sequence: Synthetic oligonucleotide
acacuuuucaucugaggga

SEQ ID NO: 3248605 - RNA, 19 nt, Artificial Sequence
  Description of Artificial Sequence: Synthetic oligonucleotide
aagacaggagacuacuauu

SEQ ID NO: 3248606 - RNA, 19 nt, Artificial Sequence
  Description of Artificial Sequence: Synthetic oligonucleotide
uaggccaagcccauaauau

SEQ ID NO: 3248607 - RNA, 19 nt, Artificial Sequence
  Description of Artificial Sequence: Synthetic oligonucleotide
ucugagggacgcuuaacug

SEQ ID NO: 3248608 - RNA, 19 nt, Artificial Sequence
  Description of Artificial Sequence: Synthetic oligonucleotide
uuucuuggucucuacggug

SEQ ID NO: 3248609 - RNA, 19 nt, Artificial Sequence
  Description of Artificial Sequence: Synthetic oligonucleotide
ugcuuugauuuucaugacu

SEQ ID NO: 3248610 - RNA, 19 nt, Artificial Sequence
  Description of Artificial Sequence: Synthetic oligonucleotide
gacuacuauuucuuauuug

SEQ ID NO: 3248611 - RNA, 19 nt, Artificial Sequence
  Description of Artificial Sequence: Synthetic oligonucleotide
accaucgucaucagggagc

SEQ ID NO: 3248612 - RNA, 19 nt, Artificial Sequence
  Description of Artificial Sequence: Synthetic oligonucleotide
cuuucuauacaugauucuc

SEQ ID NO: 3248613 - RNA, 19 nt, Artificial Sequence
  Description of Artificial Sequence: Synthetic oligonucleotide
uguuaggucucccuguuuu

SEQ ID NO: 3248614 - RNA, 19 nt, Artificial Sequence
  Description of Artificial Sequence: Synthetic oligonucleotide
acaggagacuacuauuucu

SEQ ID NO: 3248615 - RNA, 19 nt, Artificial Sequence
  Description of Artificial Sequence: Synthetic oligonucleotide
uacaugauucucccaucag

SEQ ID NO: 3248616 - RNA, 19 nt, Artificial Sequence
  Description of Artificial Sequence: Synthetic oligonucleotide
gugaagguaggccaagccc

SEQ ID NO: 3248617 - RNA, 19 nt, Artificial Sequence
  Description of Artificial Sequence: Synthetic oligonucleotide
aauguuggaaaauagaaac

SEQ ID NO: 3248618 - RNA, 19 nt, Artificial Sequence
  Description of Artificial Sequence: Synthetic oligonucleotide
aacauguaaagauagacuc

SEQ ID NO: 3248619 - RNA, 19 nt, Artificial Sequence
  Description of Artificial Sequence: Synthetic oligonucleotide
ugaauuggaaacaaaaggg

SEQ ID NO: 3248620 - RNA, 19 nt, Artificial Sequence
  Description of Artificial Sequence: Synthetic oligonucleotide
uauaauuuaauauuuaagu

SEQ ID NO: 3248621 - RNA, 19 nt, Artificial Sequence
  Description of Artificial Sequence: Synthetic oligonucleotide
auauauauauauuauauug

SEQ ID NO: 3248622 - RNA, 19 nt, Artificial Sequence
  Description of Artificial Sequence: Synthetic oligonucleotide
uauauugugagacauauac

SEQ ID NO: 3248623 - RNA, 19 nt, Artificial Sequence
  Description of Artificial Sequence: Synthetic oligonucleotide
aacuagaaaacuauuaacc

SEQ ID NO: 3248624 - RNA, 19 nt, Artificial Sequence
  Description of Artificial Sequence: Synthetic oligonucleotide
ucaacugugucuaauaggg

SEQ ID NO: 3248625 - RNA, 19 nt, Artificial Sequence
  Description of Artificial Sequence: Synthetic oligonucleotide
aaaguguacccuuuguagc

SEQ ID NO: 3248626 - RNA, 19 nt, Artificial Sequence
  Description of Artificial Sequence: Synthetic oligonucleotide
aacuauuaaccacuaaaac

SEQ ID NO: 3248627 - RNA, 19 nt, Artificial Sequence
  Description of Artificial Sequence: Synthetic oligonucleotide
ugugcuguagaaaugaugc

SEQ ID NO: 3248628 - RNA, 19 nt, Artificial Sequence
  Description of Artificial Sequence: Synthetic oligonucleotide
auauauuauauugugagac

SEQ ID NO: 3248629 - RNA, 19 nt, Artificial Sequence
  Description of Artificial Sequence: Synthetic oligonucleotide
aaguaucuaauuuacaugu

SEQ ID NO: 3248630 - RNA, 19 nt, Artificial Sequence
  Description of Artificial Sequence: Synthetic oligonucleotide
uauagauauauauauauau

SEQ ID NO: 3248631 - RNA, 19 nt, Artificial Sequence
  Description of Artificial Sequence: Synthetic oligonucleotide
uguguguugaauuaaaggu

SEQ ID NO: 3248632 - RNA, 19 nt, Artificial Sequence
  Description of Artificial Sequence: Synthetic oligonucleotide
acuauuaaccacuaaaaca

SEQ ID NO: 3248633 - RNA, 19 nt, Artificial Sequence
  Description of Artificial Sequence: Synthetic oligonucleotide
uauauauauauuauauugu

SEQ ID NO: 3248634 - RNA, 19 nt, Artificial Sequence
  Description of Artificial Sequence: Synthetic oligonucleotide
uaauuuaauauuuaaguau

SEQ ID NO: 3248635 - RNA, 19 nt, Artificial Sequence
  Description of Artificial Sequence: Synthetic oligonucleotide
aauuaaagguauucuaucu

SEQ ID NO: 3248636 - RNA, 19 nt, Artificial Sequence
  Description of Artificial Sequence: Synthetic oligonucleotide
aacugugucuaauaggguc

SEQ ID NO: 3248637 - RNA, 19 nt, Artificial Sequence
  Description of Artificial Sequence: Synthetic oligonucleotide
cugaauuggaaacaaaagg

SEQ ID NO: 3248638 - RNA, 19 nt, Artificial Sequence
  Description of Artificial Sequence: Synthetic oligonucleotide
uguauagauauauauauau

SEQ ID NO: 3248639 - RNA, 19 nt, Artificial Sequence
  Description of Artificial Sequence: Synthetic oligonucleotide
uguaaagauagacucacug

SEQ ID NO: 3248640 - RNA, 19 nt, Artificial Sequence
  Description of Artificial Sequence: Synthetic oligonucleotide
auauauauauuauauugug

SEQ ID NO: 3248641 - RNA, 19 nt, Artificial Sequence
  Description of Artificial Sequence: Synthetic oligonucleotide
guaaccuucaucuggauag

SEQ ID NO: 3248642 - RNA, 19 nt, Artificial Sequence
  Description of Artificial Sequence: Synthetic oligonucleotide
uuaaguaucuaauuuacau

SEQ ID NO: 3248643 - RNA, 19 nt, Artificial Sequence
  Description of Artificial Sequence: Synthetic oligonucleotide
uguaaaagaguauccauug

SEQ ID NO: 3248644 - RNA, 19 nt, Artificial Sequence
  Description of Artificial Sequence: Synthetic oligonucleotide
ucacugaagaaucugagga

SEQ ID NO: 3248645 - RNA, 19 nt, Artificial Sequence
  Description of Artificial Sequence: Synthetic oligonucleotide
uauugugagacauauacuc

SEQ ID NO: 3248646 - RNA, 19 nt, Artificial Sequence
  Description of Artificial Sequence: Synthetic oligonucleotide
uuaaccacuaaaacaauac

SEQ ID NO: 3248647 - RNA, 19 nt, Artificial Sequence
  Description of Artificial Sequence: Synthetic oligonucleotide
uuaauauuuaaguaucuaa

SEQ ID NO: 3248648 - RNA, 19 nt, Artificial Sequence
  Description of Artificial Sequence: Synthetic oligonucleotide
auauuuggcucauuaaagg

SEQ ID NO: 3248649 - RNA, 19 nt, Artificial Sequence
  Description of Artificial Sequence: Synthetic oligonucleotide
uauuucuuccuuuagacaa

SEQ ID NO: 3248650 - RNA, 19 nt, Artificial Sequence
  Description of Artificial Sequence: Synthetic oligonucleotide
uagaaaacuauuaaccacu

SEQ ID NO: 3248651 - RNA, 19 nt, Artificial Sequence
  Description of Artificial Sequence: Synthetic oligonucleotide
ucauugagccucaauaucc

SEQ ID NO: 3248652 - RNA, 19 nt, Artificial Sequence
  Description of Artificial Sequence: Synthetic oligonucleotide
uaaacugcaacuagaaaac

SEQ ID NO: 3248653 - RNA, 19 nt, Artificial Sequence
  Description of Artificial Sequence: Synthetic oligonucleotide
uagauauauauauauauua

SEQ ID NO: 3248654 - RNA, 19 nt, Artificial Sequence
  Description of Artificial Sequence: Synthetic oligonucleotide
agguauucuaucuacugac

SEQ ID NO: 3248655 - RNA, 19 nt, Artificial Sequence
  Description of Artificial Sequence: Synthetic oligonucleotide
ucuugguucgguuucauug

SEQ ID NO: 3248656 - RNA, 19 nt, Artificial Sequence
  Description of Artificial Sequence: Synthetic oligonucleotide
agaguauccauuguaauuc

SEQ ID NO: 3248657 - RNA, 19 nt, Artificial Sequence
  Description of Artificial Sequence: Synthetic oligonucleotide
acaacccaaacauuuauag

SEQ ID NO: 3248658 - RNA, 19 nt, Artificial Sequence
  Description of Artificial Sequence: Synthetic oligonucleotide
aagauauacauauuacaaa

SEQ ID NO: 3248659 - RNA, 19 nt, Artificial Sequence
  Description of Artificial Sequence: Synthetic oligonucleotide
uaaguaucuaauuuacaug

SEQ ID NO: 3248660 - RNA, 19 nt, Artificial Sequence
  Description of Artificial Sequence: Synthetic oligonucleotide
augaguaacauguaaagau

SEQ ID NO: 3248661 - RNA, 19 nt, Artificial Sequence
  Description of Artificial Sequence: Synthetic oligonucleotide
auuuaaguaucuaauuuac

SEQ ID NO: 3248662 - RNA, 19 nt, Artificial Sequence
  Description of Artificial Sequence: Synthetic oligonucleotide
uuuggcucauuaaaggaag

SEQ ID NO: 3248663 - RNA, 19 nt, Artificial Sequence
  Description of Artificial Sequence: Synthetic oligonucleotide
acuagaaaacuauuaacca

SEQ ID NO: 3248664 - RNA, 19 nt, Artificial Sequence
  Description of Artificial Sequence: Synthetic oligonucleotide
uuaaagguauucuaucuac

SEQ ID NO: 3248665 - RNA, 19 nt, Artificial Sequence
  Description of Artificial Sequence: Synthetic oligonucleotide
cauauuuggcucauuaaag

SEQ ID NO: 3248666 - RNA, 19 nt, Artificial Sequence
  Description of Artificial Sequence: Synthetic oligonucleotide
auaauuuaauauuuaagua

SEQ ID NO: 3248667 - RNA, 19 nt, Artificial Sequence
  Description of Artificial Sequence: Synthetic oligonucleotide
uggagugucuacaacauga

SEQ ID NO: 3248668 - RNA, 19 nt, Artificial Sequence
  Description of Artificial Sequence: Synthetic oligonucleotide
uguaauucauuaaagugua

SEQ ID NO: 3248669 - RNA, 19 nt, Artificial Sequence
  Description of Artificial Sequence: Synthetic oligonucleotide
uccauuguaauucauuaaa

SEQ ID NO: 3248670 - RNA, 19 nt, Artificial Sequence
  Description of Artificial Sequence: Synthetic oligonucleotide
uuuauaggaaagcaaucac

SEQ ID NO: 3248671 - RNA, 19 nt, Artificial Sequence
  Description of Artificial Sequence: Synthetic oligonucleotide
ugcuguuccaguuucaucu

SEQ ID NO: 3248672 - RNA, 19 nt, Artificial Sequence
  Description of Artificial Sequence: Synthetic oligonucleotide
acaagauauacauauuaca

SEQ ID NO: 3248673 - RNA, 19 nt, Artificial Sequence
  Description of Artificial Sequence: Synthetic oligonucleotide
uaacauguaaagauagacu

SEQ ID NO: 3248674 - RNA, 19 nt, Artificial Sequence
  Description of Artificial Sequence: Synthetic oligonucleotide
agugucuacaacaugacag

SEQ ID NO: 3248675 - RNA, 19 nt, Artificial Sequence
  Description of Artificial Sequence: Synthetic oligonucleotide
uaauuuacaugugacaaga

SEQ ID NO: 3248676 - RNA, 19 nt, Artificial Sequence
  Description of Artificial Sequence: Synthetic oligonucleotide
uaucuaauuuacaugugac

SEQ ID NO: 3248677 - RNA, 19 nt, Artificial Sequence
  Description of Artificial Sequence: Synthetic oligonucleotide
uucaacugugucuaauagg

SEQ ID NO: 3248678 - RNA, 19 nt, Artificial Sequence
  Description of Artificial Sequence: Synthetic oligonucleotide
auauuuaaguaucuaauuu

SEQ ID NO: 3248679 - RNA, 19 nt, Artificial Sequence
  Description of Artificial Sequence: Synthetic oligonucleotide
auauauauauauauuauau

SEQ ID NO: 3248680 - RNA, 19 nt, Artificial Sequence
  Description of Artificial Sequence: Synthetic oligonucleotide
acuauaauuuaauauuuaa

SEQ ID NO: 3248681 - RNA, 19 nt, Artificial Sequence
  Description of Artificial Sequence: Synthetic oligonucleotide
cuguguguugaauuaaagg

SEQ ID NO: 3248682 - RNA, 19 nt, Artificial Sequence
  Description of Artificial Sequence: Synthetic oligonucleotide
aaacauuuauaggaaagca

SEQ ID NO: 3248683 - RNA, 19 nt, Artificial Sequence
  Description of Artificial Sequence: Synthetic oligonucleotide
uguguugaauuaaagguau

SEQ ID NO: 3248684 - RNA, 19 nt, Artificial Sequence
  Description of Artificial Sequence: Synthetic oligonucleotide
aagauagacucacugucug

SEQ ID NO: 3248685 - RNA, 19 nt, Artificial Sequence
  Description of Artificial Sequence: Synthetic oligonucleotide
gauauauauauauauuaua

SEQ ID NO: 3248686 - RNA, 19 nt, Artificial Sequence
  Description of Artificial Sequence: Synthetic oligonucleotide
uguaauucaccccagcuuu

SEQ ID NO: 3248687 - RNA, 19 nt, Artificial Sequence
  Description of Artificial Sequence: Synthetic oligonucleotide
ugacaagauauacauauua

SEQ ID NO: 3248688 - RNA, 19 nt, Artificial Sequence
  Description of Artificial Sequence: Synthetic oligonucleotide
uuaaaggaagcguccauug

SEQ ID NO: 3248689 - RNA, 19 nt, Artificial Sequence
  Description of Artificial Sequence: Synthetic oligonucleotide
uauauauauauauuauauu

SEQ ID NO: 3248690 - RNA, 19 nt, Artificial Sequence
  Description of Artificial Sequence: Synthetic oligonucleotide
uuuaaguaucuaauuuaca

SEQ ID NO: 3248691 - RNA, 19 nt, Artificial Sequence
  Description of Artificial Sequence: Synthetic oligonucleotide
uauuuggcucauuaaagga

SEQ ID NO: 3248692 - RNA, 19 nt, Artificial Sequence
  Description of Artificial Sequence: Synthetic oligonucleotide
uuuuggaaggugcugagau

SEQ ID NO: 3248693 - RNA, 19 nt, Artificial Sequence
  Description of Artificial Sequence: Synthetic oligonucleotide
agacauauacuccugugug

SEQ ID NO: 3248694 - RNA, 19 nt, Artificial Sequence
  Description of Artificial Sequence: Synthetic oligonucleotide
acugacaacugccugaacu

SEQ ID NO: 3248695 - RNA, 19 nt, Artificial Sequence
  Description of Artificial Sequence: Synthetic oligonucleotide
uagacucugaauuggaaac

SEQ ID NO: 3248696 - RNA, 19 nt, Artificial Sequence
  Description of Artificial Sequence: Synthetic oligonucleotide
auuuauaggaaagcaauca

SEQ ID NO: 3248697 - RNA, 19 nt, Artificial Sequence
  Description of Artificial Sequence: Synthetic oligonucleotide
augacagucucuugguucg

SEQ ID NO: 3248698 - RNA, 19 nt, Artificial Sequence
  Description of Artificial Sequence: Synthetic oligonucleotide
uagacaaucacugaagaau

SEQ ID NO: 3248699 - RNA, 19 nt, Artificial Sequence
  Description of Artificial Sequence: Synthetic oligonucleotide
uggauagaccugcagagug

SEQ ID NO: 3248700 - RNA, 19 nt, Artificial Sequence
  Description of Artificial Sequence: Synthetic oligonucleotide
caacaugacagucucuugg

SEQ ID NO: 3248701 - RNA, 19 nt, Artificial Sequence
  Description of Artificial Sequence: Synthetic oligonucleotide
aagaguauccauuguaauu

SEQ ID NO: 3248702 - RNA, 19 nt, Artificial Sequence
  Description of Artificial Sequence: Synthetic oligonucleotide
aguuucaucuccucaagcu

SEQ ID NO: 3248703 - RNA, 19 nt, Artificial Sequence
  Description of Artificial Sequence: Synthetic oligonucleotide
cuaauuuacaugugacaag

SEQ ID NO: 3248704 - RNA, 19 nt, Artificial Sequence
  Description of Artificial Sequence: Synthetic oligonucleotide
gacaugguaaccuucaucu

SEQ ID NO: 3248705 - RNA, 19 nt, Artificial Sequence
  Description of Artificial Sequence: Synthetic oligonucleotide
ucaauucugcugaauguug

SEQ ID NO: 3248706 - RNA, 19 nt, Artificial Sequence
  Description of Artificial Sequence: Synthetic oligonucleotide
auugugagacauauacucc

SEQ ID NO: 3248707 - RNA, 19 nt, Artificial Sequence
  Description of Artificial Sequence: Synthetic oligonucleotide
caagauauacauauuacaa

SEQ ID NO: 3248708 - RNA, 19 nt, Artificial Sequence
  Description of Artificial Sequence: Synthetic oligonucleotide
uauccauuguaauucauua

SEQ ID NO: 3248709 - RNA, 19 nt, Artificial Sequence
  Description of Artificial Sequence: Synthetic oligonucleotide
ucuacugacaacugccuga

SEQ ID NO: 3248710 - RNA, 19 nt, Artificial Sequence
  Description of Artificial Sequence: Synthetic oligonucleotide
uuggaaaauagaaacuuuu

SEQ ID NO: 3248711 - RNA, 19 nt, Artificial Sequence
  Description of Artificial Sequence: Synthetic oligonucleotide
aaagaguauccauuguaau

SEQ ID NO: 3248712 - RNA, 19 nt, Artificial Sequence
  Description of Artificial Sequence: Synthetic oligonucleotide
caacuagaaaacuauuaac

SEQ ID NO: 3248713 - RNA, 19 nt, Artificial Sequence
  Description of Artificial Sequence: Synthetic oligonucleotide
auuauauugugagacauau

SEQ ID NO: 3248714 - RNA, 19 nt, Artificial Sequence
  Description of Artificial Sequence: Synthetic oligonucleotide
ugaugcuugcucuugucag

SEQ ID NO: 3248715 - RNA, 19 nt, Artificial Sequence
  Description of Artificial Sequence: Synthetic oligonucleotide
cucauuaaaggaagcgucc

SEQ ID NO: 3248716 - RNA, 19 nt, Artificial Sequence
  Description of Artificial Sequence: Synthetic oligonucleotide
uucuggagugucuacaaca

SEQ ID NO: 3248717 - RNA, 19 nt, Artificial Sequence
  Description of Artificial Sequence: Synthetic oligonucleotide
uagaacuucacccagaugu

SEQ ID NO: 3248718 - RNA, 19 nt, Artificial Sequence
  Description of Artificial Sequence: Synthetic oligonucleotide
ucuacagagacccagguag

SEQ ID NO: 3248719 - RNA, 19 nt, Artificial Sequence
  Description of Artificial Sequence: Synthetic oligonucleotide
uugaguuucaccauaacug

SEQ ID NO: 3248720 - RNA, 19 nt, Artificial Sequence
  Description of Artificial Sequence: Synthetic oligonucleotide
aaggcuuggggauugaggg

SEQ ID NO: 3248721 - RNA, 19 nt, Artificial Sequence
  Description of Artificial Sequence: Synthetic oligonucleotide
aaacucaucgcgaacaccc

SEQ ID NO: 3248722 - RNA, 19 nt, Artificial Sequence
  Description of Artificial Sequence: Synthetic oligonucleotide
cauguagccaucuacagag

SEQ ID NO: 3248723 - RNA, 19 nt, Artificial Sequence
  Description of Artificial Sequence: Synthetic oligonucleotide
ugaguuucaccauaacugg

SEQ ID NO: 3248724 - RNA, 19 nt, Artificial Sequence
  Description of Artificial Sequence: Synthetic oligonucleotide
accuuauuagaacuucacc

SEQ ID NO: 3248725 - RNA, 19 nt, Artificial Sequence
  Description of Artificial Sequence: Synthetic oligonucleotide
uuugcaagcugcauguuca

SEQ ID NO: 3248726 - RNA, 19 nt, Artificial Sequence
  Description of Artificial Sequence: Synthetic oligonucleotide
uuauuagaacuucacccag

SEQ ID NO: 3248727 - RNA, 19 nt, Artificial Sequence
  Description of Artificial Sequence: Synthetic oligonucleotide
ccuuauuagaacuucaccc

SEQ ID NO: 3248728 - RNA, 19 nt, Artificial Sequence
  Description of Artificial Sequence: Synthetic oligonucleotide
auugaggaaaggcuugggg

SEQ ID NO: 3248729 - RNA, 19 nt, Artificial Sequence
  Description of Artificial Sequence: Synthetic oligonucleotide
uuccguauuugcaagcugc

SEQ ID NO: 3248730 - RNA, 19 nt, Artificial Sequence
  Description of Artificial Sequence: Synthetic oligonucleotide
uguucauguagccaucuac

SEQ ID NO: 3248731 - RNA, 19 nt, Artificial Sequence
  Description of Artificial Sequence: Synthetic oligonucleotide
uauucuuccguauuugcaa

SEQ ID NO: 3248732 - RNA, 19 nt, Artificial Sequence
  Description of Artificial Sequence: Synthetic oligonucleotide
uugaggaaaggcuugggga

SEQ ID NO: 3248733 - RNA, 19 nt, Artificial Sequence
  Description of Artificial Sequence: Synthetic oligonucleotide
auuugcaagcugcauguuc

SEQ ID NO: 3248734 - RNA, 19 nt, Artificial Sequence
  Description of Artificial Sequence: Synthetic oligonucleotide
uguauucuuccguauuugc

SEQ ID NO: 3248735 - RNA, 19 nt, Artificial Sequence
  Description of Artificial Sequence: Synthetic oligonucleotide
cuuauuagaacuucaccca

SEQ ID NO: 3248736 - RNA, 19 nt, Artificial Sequence
  Description of Artificial Sequence: Synthetic oligonucleotide
uucauguagccaucuacag

SEQ ID NO: 3248737 - RNA, 19 nt, Artificial Sequence
  Description of Artificial Sequence: Synthetic oligonucleotide
uagccaucuacagagaccc

SEQ ID NO: 3248738 - RNA, 19 nt, Artificial Sequence
  Description of Artificial Sequence: Synthetic oligonucleotide
ugcauguucauguagccau

SEQ ID NO: 3248739 - RNA, 19 nt, Artificial Sequence
  Description of Artificial Sequence: Synthetic oligonucleotide
cagauguccagacaacgcg

SEQ ID NO: 3248740 - RNA, 19 nt, Artificial Sequence
  Description of Artificial Sequence: Synthetic oligonucleotide
aaaggcuuggggauugagg

SEQ ID NO: 3248741 - RNA, 19 nt, Artificial Sequence
  Description of Artificial Sequence: Synthetic oligonucleotide
uuaccuuauuagaacuuca

SEQ ID NO: 3248742 - RNA, 19 nt, Artificial Sequence
  Description of Artificial Sequence: Synthetic oligonucleotide
uauguauucuuccguauuu

SEQ ID NO: 3248743 - RNA, 19 nt, Artificial Sequence
  Description of Artificial Sequence: Synthetic oligonucleotide
uauauucccauuccccacu

SEQ ID NO: 3248744 - RNA, 19 nt, Artificial Sequence
  Description of Artificial Sequence: Synthetic oligonucleotide
acuggcuuuccugucaggc

SEQ ID NO: 3248745 - RNA, 19 nt, Artificial Sequence
  Description of Artificial Sequence: Synthetic oligonucleotide
ucauguagccaucuacaga

SEQ ID NO: 3248746 - RNA, 19 nt, Artificial Sequence
  Description of Artificial Sequence: Synthetic oligonucleotide
uguagccaucuacagagac

SEQ ID NO: 3248747 - RNA, 19 nt, Artificial Sequence
  Description of Artificial Sequence: Synthetic oligonucleotide
uauuagaacuucacccaga

SEQ ID NO: 3248748 - RNA, 19 nt, Artificial Sequence
  Description of Artificial Sequence: Synthetic oligonucleotide
cuuauauucccauucccca

SEQ ID NO: 3248749 - RNA, 19 nt, Artificial Sequence
  Description of Artificial Sequence: Synthetic oligonucleotide
uuuaccuuauuagaacuuc

SEQ ID NO: 3248750 - RNA, 19 nt, Artificial Sequence
  Description of Artificial Sequence: Synthetic oligonucleotide
uuauauucccauuccccac

SEQ ID NO: 3248751 - RNA, 19 nt, Artificial Sequence
  Description of Artificial Sequence: Synthetic oligonucleotide
uaccuuauuagaacuucac

SEQ ID NO: 3248752 - RNA, 19 nt, Artificial Sequence
  Description of Artificial Sequence: Synthetic oligonucleotide
agcugcauguucauguagc

SEQ ID NO: 3248753 - RNA, 19 nt, Artificial Sequence
  Description of Artificial Sequence: Synthetic oligonucleotide
auucuuccguauuugcaag

SEQ ID NO: 3248754 - RNA, 19 nt, Artificial Sequence
  Description of Artificial Sequence: Synthetic oligonucleotide
uccugucaggccauugagg

SEQ ID NO: 3248755 - RNA, 19 nt, Artificial Sequence
  Description of Artificial Sequence: Synthetic oligonucleotide
auuagaacuucacccagau

SEQ ID NO: 3248756 - RNA, 19 nt, Artificial Sequence
  Description of Artificial Sequence: Synthetic oligonucleotide
accauaacuggcuuuccug

SEQ ID NO: 3248757 - RNA, 19 nt, Artificial Sequence
  Description of Artificial Sequence: Synthetic oligonucleotide
aucgcgaacaccccgcgag

SEQ ID NO: 3248758 - RNA, 19 nt, Artificial Sequence
  Description of Artificial Sequence: Synthetic oligonucleotide
uuuccugucaggccauuga

SEQ ID NO: 3248759 - RNA, 19 nt, Artificial Sequence
  Description of Artificial Sequence: Synthetic oligonucleotide
cagguagccccuuauauuc

SEQ ID NO: 3248760 - RNA, 19 nt, Artificial Sequence
  Description of Artificial Sequence: Synthetic oligonucleotide
ugaggaaaggcuuggggau

SEQ ID NO: 3248761 - RNA, 19 nt, Artificial Sequence
  Description of Artificial Sequence: Synthetic oligonucleotide
uggcuuuccugucaggcca

SEQ ID NO: 3248762 - RNA, 19 nt, Artificial Sequence
  Description of Artificial Sequence: Synthetic oligonucleotide
uuccugucaggccauugag

SEQ ID NO: 3248763 - RNA, 19 nt, Artificial Sequence
  Description of Artificial Sequence: Synthetic oligonucleotide
aagcugcauguucauguag

SEQ ID NO: 3248764 - RNA, 19 nt, Artificial Sequence
  Description of Artificial Sequence: Synthetic oligonucleotide
uuuuaccuuauuagaacuu

SEQ ID NO: 3248765 - RNA, 19 nt, Artificial Sequence
  Description of Artificial Sequence: Synthetic oligonucleotide
agauguccagacaacgcgc

SEQ ID NO: 3248766 - RNA, 19 nt, Artificial Sequence
  Description of Artificial Sequence: Synthetic oligonucleotide
auucccauuccccacuuga

SEQ ID NO: 3248767 - RNA, 19 nt, Artificial Sequence
  Description of Artificial Sequence: Synthetic oligonucleotide
auaacuggcuuuccuguca

SEQ ID NO: 3248768 - RNA, 19 nt, Artificial Sequence
  Description of Artificial Sequence: Synthetic oligonucleotide
acuugaguuucaccauaac

SEQ ID NO: 3248769 - RNA, 19 nt, Artificial Sequence
  Description of Artificial Sequence: Synthetic oligonucleotide
uaacuggcuuuccugucag

SEQ ID NO: 3248770 - RNA, 19 nt, Artificial Sequence
  Description of Artificial Sequence: Synthetic oligonucleotide
ugucaggccauugaggaaa

SEQ ID NO: 3248771 - RNA, 19 nt, Artificial Sequence
  Description of Artificial Sequence: Synthetic oligonucleotide
ucuauguauucuuccguau

SEQ ID NO: 3248772 - RNA, 19 nt, Artificial Sequence
  Description of Artificial Sequence: Synthetic oligonucleotide
ccuuauauucccauucccc

SEQ ID NO: 3248773 - RNA, 19 nt, Artificial Sequence
  Description of Artificial Sequence: Synthetic oligonucleotide
acucaucgcgaacaccccg

SEQ ID NO: 3248774 - RNA, 19 nt, Artificial Sequence
  Description of Artificial Sequence: Synthetic oligonucleotide
acagagacccagguagccc

SEQ ID NO: 3248775 - RNA, 19 nt, Artificial Sequence
  Description of Artificial Sequence: Synthetic oligonucleotide
aacucaucgcgaacacccc

SEQ ID NO: 3248776 - RNA, 19 nt, Artificial Sequence
  Description of Artificial Sequence: Synthetic oligonucleotide
uucaccauaacuggcuuuc

SEQ ID NO: 3248777 - RNA, 19 nt, Artificial Sequence
  Description of Artificial Sequence: Synthetic oligonucleotide
uucccauuccccacuugag

SEQ ID NO: 3248778 - RNA, 19 nt, Artificial Sequence
  Description of Artificial Sequence: Synthetic oligonucleotide
uuagaacuucacccagaug

SEQ ID NO: 3248779 - RNA, 19 nt, Artificial Sequence
  Description of Artificial Sequence: Synthetic oligonucleotide
ugcaagccccucgugaccg

SEQ ID NO: 3248780 - RNA, 19 nt, Artificial Sequence
  Description of Artificial Sequence: Synthetic oligonucleotide
cuagccgccgaccucgccg

SEQ ID NO: 3248781 - RNA, 19 nt, Artificial Sequence
  Description of Artificial Sequence: Synthetic oligonucleotide
cagagacccagguagcccc

SEQ ID NO: 3248782 - RNA, 19 nt, Artificial Sequence
  Description of Artificial Sequence: Synthetic oligonucleotide
aucuauguauucuuccgua

SEQ ID NO: 3248783 - RNA, 19 nt, Artificial Sequence
  Description of Artificial Sequence: Synthetic oligonucleotide
guauuugcaagcugcaugu

SEQ ID NO: 3248784 - RNA, 19 nt, Artificial Sequence
  Description of Artificial Sequence: Synthetic oligonucleotide
aguuucaccauaacuggcu

SEQ ID NO: 3248785 - RNA, 19 nt, Artificial Sequence
  Description of Artificial Sequence: Synthetic oligonucleotide
uccguauuugcaagcugca

SEQ ID NO: 3248786 - RNA, 19 nt, Artificial Sequence
  Description of Artificial Sequence: Synthetic oligonucleotide
ccaucuauguauucuuccg

SEQ ID NO: 3248787 - RNA, 19 nt, Artificial Sequence
  Description of Artificial Sequence: Synthetic oligonucleotide
ucaucgcgaacaccccgcg

SEQ ID NO: 3248788 - RNA, 19 nt, Artificial Sequence
  Description of Artificial Sequence: Synthetic oligonucleotide
uucuuccguauuugcaagc

SEQ ID NO: 3248789 - RNA, 19 nt, Artificial Sequence
  Description of Artificial Sequence: Synthetic oligonucleotide
caggccauugaggaaaggc

SEQ ID NO: 3248790 - RNA, 19 nt, Artificial Sequence
  Description of Artificial Sequence: Synthetic oligonucleotide
uucacccagauguccagac

SEQ ID NO: 3248791 - RNA, 19 nt, Artificial Sequence
  Description of Artificial Sequence: Synthetic oligonucleotide
uaaacucaucgcgaacacc

SEQ ID NO: 3248792 - RNA, 19 nt, Artificial Sequence
  Description of Artificial Sequence: Synthetic oligonucleotide
gauguccagacaacgcgcc

SEQ ID NO: 3248793 - RNA, 19 nt, Artificial Sequence
  Description of Artificial Sequence: Synthetic oligonucleotide
ucccauuccccacuugagu

SEQ ID NO: 3248794 - RNA, 19 nt, Artificial Sequence
  Description of Artificial Sequence: Synthetic oligonucleotide
guaaacucaucgcgaacac

SEQ ID NO: 3248795 - RNA, 19 nt, Artificial Sequence
  Description of Artificial Sequence: Synthetic oligonucleotide
ucuuccguauuugcaagcu

SEQ ID NO: 3248796 - RNA, 19 nt, Artificial Sequence
  Description of Artificial Sequence: Synthetic oligonucleotide
guucauguagccaucuaca

SEQ ID NO: 3248797 - RNA, 19 nt, Artificial Sequence
  Description of Artificial Sequence: Synthetic oligonucleotide
aacuucacccagaugucca

SEQ ID NO: 3248798 - RNA, 19 nt, Artificial Sequence
  Description of Artificial Sequence: Synthetic oligonucleotide
cucaucgcgaacaccccgc

SEQ ID NO: 3248799 - RNA, 19 nt, Artificial Sequence
  Description of Artificial Sequence: Synthetic oligonucleotide
gaacuucacccagaugucc

SEQ ID NO: 3248800 - RNA, 19 nt, Artificial Sequence
  Description of Artificial Sequence: Synthetic oligonucleotide
cuacagagacccagguagc

SEQ ID NO: 3248801 - RNA, 19 nt, Artificial Sequence
  Description of Artificial Sequence: Synthetic oligonucleotide
agaacuucacccagauguc

SEQ ID NO: 3248802 - RNA, 19 nt, Artificial Sequence
  Description of Artificial Sequence: Synthetic oligonucleotide
cuugaguuucaccauaacu

SEQ ID NO: 3248803 - RNA, 19 nt, Artificial Sequence
  Description of Artificial Sequence: Synthetic oligonucleotide
aacuggcuuuccugucagg

SEQ ID NO: 3248804 - RNA, 19 nt, Artificial Sequence
  Description of Artificial Sequence: Synthetic oligonucleotide
cuggcuuuccugucaggcc

SEQ ID NO: 3248805 - RNA, 19 nt, Artificial Sequence
  Description of Artificial Sequence: Synthetic oligonucleotide
acuucacccagauguccag

SEQ ID NO: 3248806 - RNA, 19 nt, Artificial Sequence
  Description of Artificial Sequence: Synthetic oligonucleotide
gaguuucaccauaacuggc

SEQ ID NO: 3248807 - RNA, 19 nt, Artificial Sequence
  Description of Artificial Sequence: Synthetic oligonucleotide
auguauucuuccguauuug

SEQ ID NO: 3248808 - RNA, 19 nt, Artificial Sequence
  Description of Artificial Sequence: Synthetic oligonucleotide
gguaaacucaucgcgaaca

SEQ ID NO: 3248809 - RNA, 19 nt, Artificial Sequence
  Description of Artificial Sequence: Synthetic oligonucleotide
guagccaucuacagagacc

SEQ ID NO: 3248810 - RNA, 19 nt, Artificial Sequence
  Description of Artificial Sequence: Synthetic oligonucleotide
uacagagacccagguagcc

SEQ ID NO: 3248811 - RNA, 19 nt, Artificial Sequence
  Description of Artificial Sequence: Synthetic oligonucleotide
cauaacuggcuuuccuguc

SEQ ID NO: 3248812 - RNA, 19 nt, Artificial Sequence
  Description of Artificial Sequence: Synthetic oligonucleotide
aggcuuggggauugagggg

SEQ ID NO: 3248813 - RNA, 19 nt, Artificial Sequence
  Description of Artificial Sequence: Synthetic oligonucleotide
guauucuuccguauuugca

SEQ ID NO: 3248814 - RNA, 19 nt, Artificial Sequence
  Description of Artificial Sequence: Synthetic oligonucleotide
gccaucuauguauucuucc

SEQ ID NO: 3248815 - RNA, 19 nt, Artificial Sequence
  Description of Artificial Sequence: Synthetic oligonucleotide
ucacccagauguccagaca

SEQ ID NO: 3248816 - RNA, 19 nt, Artificial Sequence
  Description of Artificial Sequence: Synthetic oligonucleotide
aacaccccgcgagcgcugc

SEQ ID NO: 3248817 - RNA, 19 nt, Artificial Sequence
  Description of Artificial Sequence: Synthetic oligonucleotide
ucagacaggaccaugaggc

SEQ ID NO: 3248818 - RNA, 19 nt, Artificial Sequence
  Description of Artificial Sequence: Synthetic oligonucleotide
aacacuuauaguugccagc

SEQ ID NO: 3248819 - RNA, 19 nt, Artificial Sequence
  Description of Artificial Sequence: Synthetic oligonucleotide
caugcuauugcauagucag

SEQ ID NO: 3248820 - RNA, 19 nt, Artificial Sequence
  Description of Artificial Sequence: Synthetic oligonucleotide
ugcauuugaaaccacaccu

SEQ ID NO: 3248821 - RNA, 19 nt, Artificial Sequence
  Description of Artificial Sequence: Synthetic oligonucleotide
uuagccagagaacagaagu

SEQ ID NO: 3248822 - RNA, 19 nt, Artificial Sequence
  Description of Artificial Sequence: Synthetic oligonucleotide
caaacauuguccuugaauc

SEQ ID NO: 3248823 - RNA, 19 nt, Artificial Sequence
  Description of Artificial Sequence: Synthetic oligonucleotide
uuguccuugaaucuuuggg

SEQ ID NO: 3248824 - RNA, 19 nt, Artificial Sequence
  Description of Artificial Sequence: Synthetic oligonucleotide
agagaguugaaaaugaaag

SEQ ID NO: 3248825 - RNA, 19 nt, Artificial Sequence
  Description of Artificial Sequence: Synthetic oligonucleotide
uucugcuucagacaggacc

SEQ ID NO: 3248826 - RNA, 19 nt, Artificial Sequence
  Description of Artificial Sequence: Synthetic oligonucleotide
aaugcauuugaaaccacac

SEQ ID NO: 3248827 - RNA, 19 nt, Artificial Sequence
  Description of Artificial Sequence: Synthetic oligonucleotide
ugacaggccuucuagaagg

SEQ ID NO: 3248828 - RNA, 19 nt, Artificial Sequence
  Description of Artificial Sequence: Synthetic oligonucleotide
auagucaggaagcuuuagc

SEQ ID NO: 3248829 - RNA, 19 nt, Artificial Sequence
  Description of Artificial Sequence: Synthetic oligonucleotide
gaucaaugcauuugaaacc

SEQ ID NO: 3248830 - RNA, 19 nt, Artificial Sequence
  Description of Artificial Sequence: Synthetic oligonucleotide
agugggguguauuuggccc

SEQ ID NO: 3248831 - RNA, 19 nt, Artificial Sequence
  Description of Artificial Sequence: Synthetic oligonucleotide
cuugauacuacagaaguag

SEQ ID NO: 3248832 - RNA, 19 nt, Artificial Sequence
  Description of Artificial Sequence: Synthetic oligonucleotide
ucauggugaaggcagagug

SEQ ID NO: 3248833 - RNA, 19 nt, Artificial Sequence
  Description of Artificial Sequence: Synthetic oligonucleotide
uagacuuucugcuucagac

SEQ ID NO: 3248834 - RNA, 19 nt, Artificial Sequence
  Description of Artificial Sequence: Synthetic oligonucleotide
aaguagaugguagacuuuc

SEQ ID NO: 3248835 - RNA, 19 nt, Artificial Sequence
  Description of Artificial Sequence: Synthetic oligonucleotide
ucuuacaccuauugggagg

SEQ ID NO: 3248836 - RNA, 19 nt, Artificial Sequence
  Description of Artificial Sequence: Synthetic oligonucleotide
uagucaggaagcuuuagcc

SEQ ID NO: 3248837 - RNA, 19 nt, Artificial Sequence
  Description of Artificial Sequence: Synthetic oligonucleotide
augcauuugaaaccacacc

SEQ ID NO: 3248838 - RNA, 19 nt, Artificial Sequence
  Description of Artificial Sequence: Synthetic oligonucleotide
aagucuugauacuacagaa

SEQ ID NO: 3248839 - RNA, 19 nt, Artificial Sequence
  Description of Artificial Sequence: Synthetic oligonucleotide
uguccuugaaucuuugggc

SEQ ID NO: 3248840 - RNA, 19 nt, Artificial Sequence
  Description of Artificial Sequence: Synthetic oligonucleotide
ucugcuucagacaggacca

SEQ ID NO: 3248841 - RNA, 19 nt, Artificial Sequence
  Description of Artificial Sequence: Synthetic oligonucleotide
gauacuacagaaguagaug

SEQ ID NO: 3248842 - RNA, 19 nt, Artificial Sequence
  Description of Artificial Sequence: Synthetic oligonucleotide
gauucagcaucaaacauug

SEQ ID NO: 3248843 - RNA, 19 nt, Artificial Sequence
  Description of Artificial Sequence: Synthetic oligonucleotide
cuauuuguaucuuuaccag

SEQ ID NO: 3248844 - RNA, 19 nt, Artificial Sequence
  Description of Artificial Sequence: Synthetic oligonucleotide
ugaaaugccagggagucag

SEQ ID NO: 3248845 - RNA, 19 nt, Artificial Sequence
  Description of Artificial Sequence: Synthetic oligonucleotide
ucaaacauuguccuugaau

SEQ ID NO: 3248846 - RNA, 19 nt, Artificial Sequence
  Description of Artificial Sequence: Synthetic oligonucleotide
ugaaucuuugggcacuugc

SEQ ID NO: 3248847 - RNA, 19 nt, Artificial Sequence
  Description of Artificial Sequence: Synthetic oligonucleotide
ggaucaaugcauuugaaac

SEQ ID NO: 3248848 - RNA, 19 nt, Artificial Sequence
  Description of Artificial Sequence: Synthetic oligonucleotide
aaacauuguccuugaaucu

SEQ ID NO: 3248849 - RNA, 19 nt, Artificial Sequence
  Description of Artificial Sequence: Synthetic oligonucleotide
aaucuuugggcacuugcca

SEQ ID NO: 3248850 - RNA, 19 nt, Artificial Sequence
  Description of Artificial Sequence: Synthetic oligonucleotide
aaggcagaguuucccacac

SEQ ID NO: 3248851 - RNA, 19 nt, Artificial Sequence
  Description of Artificial Sequence: Synthetic oligonucleotide
uucagacaggaccaugagg

SEQ ID NO: 3248852 - RNA, 19 nt, Artificial Sequence
  Description of Artificial Sequence: Synthetic oligonucleotide
uguaucuuuaccagagggu

SEQ ID NO: 3248853 - RNA, 19 nt, Artificial Sequence
  Description of Artificial Sequence: Synthetic oligonucleotide
auuuguaucuuuaccagag

SEQ ID NO: 3248854 - RNA, 19 nt, Artificial Sequence
  Description of Artificial Sequence: Synthetic oligonucleotide
agaaucacacucugguuuc

SEQ ID NO: 3248855 - RNA, 19 nt, Artificial Sequence
  Description of Artificial Sequence: Synthetic oligonucleotide
guaacuaccagagaguuga

SEQ ID NO: 3248856 - RNA, 19 nt, Artificial Sequence
  Description of Artificial Sequence: Synthetic oligonucleotide
aagggaagaagguacugga

SEQ ID NO: 3248857 - RNA, 19 nt, Artificial Sequence
  Description of Artificial Sequence: Synthetic oligonucleotide
uugccagucagaaucacac

SEQ ID NO: 3248858 - RNA, 19 nt, Artificial Sequence
  Description of Artificial Sequence: Synthetic oligonucleotide
uauaguugccagcacacuc

SEQ ID NO: 3248859 - RNA, 19 nt, Artificial Sequence
  Description of Artificial Sequence: Synthetic oligonucleotide
acuaccagagaguugaaaa

SEQ ID NO: 3248860 - RNA, 19 nt, Artificial Sequence
  Description of Artificial Sequence: Synthetic oligonucleotide
cuuauaguugccagcacac

SEQ ID NO: 3248861 - RNA, 19 nt, Artificial Sequence
  Description of Artificial Sequence: Synthetic oligonucleotide
uuugccuccuuccacaguc

SEQ ID NO: 3248862 - RNA, 19 nt, Artificial Sequence
  Description of Artificial Sequence: Synthetic oligonucleotide
cuggacuucauggugaagg

SEQ ID NO: 3248863 - RNA, 19 nt, Artificial Sequence
  Description of Artificial Sequence: Synthetic oligonucleotide
agaaguagaugguagacuu

SEQ ID NO: 3248864 - RNA, 19 nt, Artificial Sequence
  Description of Artificial Sequence: Synthetic oligonucleotide
agaguugaaaaugaaagaa

SEQ ID NO: 3248865 - RNA, 19 nt, Artificial Sequence
  Description of Artificial Sequence: Synthetic oligonucleotide
ugcauagucaggaagcuuu

SEQ ID NO: 3248866 - RNA, 19 nt, Artificial Sequence
  Description of Artificial Sequence: Synthetic oligonucleotide
aagaggaucaaugcauuug

SEQ ID NO: 3248867 - RNA, 19 nt, Artificial Sequence
  Description of Artificial Sequence: Synthetic oligonucleotide
gacuucauggugaaggcag

SEQ ID NO: 3248868 - RNA, 19 nt, Artificial Sequence
  Description of Artificial Sequence: Synthetic oligonucleotide
acuuauaguugccagcaca

SEQ ID NO: 3248869 - RNA, 19 nt, Artificial Sequence
  Description of Artificial Sequence: Synthetic oligonucleotide
augguagacuuucugcuuc

SEQ ID NO: 3248870 - RNA, 19 nt, Artificial Sequence
  Description of Artificial Sequence: Synthetic oligonucleotide
ugauacuacagaaguagau

SEQ ID NO: 3248871 - RNA, 19 nt, Artificial Sequence
  Description of Artificial Sequence: Synthetic oligonucleotide
aggcaacacuuauaguugc

SEQ ID NO: 3248872 - RNA, 19 nt, Artificial Sequence
  Description of Artificial Sequence: Synthetic oligonucleotide
cuacagaaguagaugguag

SEQ ID NO: 3248873 - RNA, 19 nt, Artificial Sequence
  Description of Artificial Sequence: Synthetic oligonucleotide
cacuauuuguaucuuuacc

SEQ ID NO: 3248874 - RNA, 19 nt, Artificial Sequence
  Description of Artificial Sequence: Synthetic oligonucleotide
agaaggcagaguuucccac

SEQ ID NO: 3248875 - RNA, 19 nt, Artificial Sequence
  Description of Artificial Sequence: Synthetic oligonucleotide
agguccagagcacacacag

SEQ ID NO: 3248876 - RNA, 19 nt, Artificial Sequence
  Description of Artificial Sequence: Synthetic oligonucleotide
ugcuauugcauagucagga

SEQ ID NO: 3248877 - RNA, 19 nt, Artificial Sequence
  Description of Artificial Sequence: Synthetic oligonucleotide
gucaggaagcuuuagccag

SEQ ID NO: 3248878 - RNA, 19 nt, Artificial Sequence
  Description of Artificial Sequence: Synthetic oligonucleotide
agaggaucaaugcauuuga

SEQ ID NO: 3248879 - RNA, 19 nt, Artificial Sequence
  Description of Artificial Sequence: Synthetic oligonucleotide
gagaguugaaaaugaaaga

SEQ ID NO: 3248880 - RNA, 19 nt, Artificial Sequence
  Description of Artificial Sequence: Synthetic oligonucleotide
ucgaccucacugcagugcg

SEQ ID NO: 3248881 - RNA, 19 nt, Artificial Sequence
  Description of Artificial Sequence: Synthetic oligonucleotide
guaucuuuaccagagggug

SEQ ID NO: 3248882 - RNA, 19 nt, Artificial Sequence
  Description of Artificial Sequence: Synthetic oligonucleotide
ugccugaaaugccagggag

SEQ ID NO: 3248883 - RNA, 19 nt, Artificial Sequence
  Description of Artificial Sequence: Synthetic oligonucleotide
cuauugcauagucaggaag

SEQ ID NO: 3248884 - RNA, 19 nt, Artificial Sequence
  Description of Artificial Sequence: Synthetic oligonucleotide
uugacaggccuucuagaag

SEQ ID NO: 3248885 - RNA, 19 nt, Artificial Sequence
  Description of Artificial Sequence: Synthetic oligonucleotide
cugaugagcagucccaagc

SEQ ID NO: 3248886 - RNA, 19 nt, Artificial Sequence
  Description of Artificial Sequence: Synthetic oligonucleotide
ucuuugggcacuugccagg

SEQ ID NO: 3248887 - RNA, 19 nt, Artificial Sequence
  Description of Artificial Sequence: Synthetic oligonucleotide
gaggauucagcaucaaaca

SEQ ID NO: 3248888 - RNA, 19 nt, Artificial Sequence
  Description of Artificial Sequence: Synthetic oligonucleotide
ugaugagcagucccaagca

SEQ ID NO: 3248889 - RNA, 19 nt, Artificial Sequence
  Description of Artificial Sequence: Synthetic oligonucleotide
uguauuuggccccucccac

SEQ ID NO: 3248890 - RNA, 19 nt, Artificial Sequence
  Description of Artificial Sequence: Synthetic oligonucleotide
uugauacuacagaaguaga

SEQ ID NO: 3248891 - RNA, 19 nt, Artificial Sequence
  Description of Artificial Sequence: Synthetic oligonucleotide
uuauuucccgggcauugcc

SEQ ID NO: 3248892 - RNA, 19 nt, Artificial Sequence
  Description of Artificial Sequence: Synthetic oligonucleotide
aucaaugcauuugaaacca

SEQ ID NO: 3248893 - RNA, 19 nt, Artificial Sequence
  Description of Artificial Sequence: Synthetic oligonucleotide
cucacugcagugcggaugg

SEQ ID NO: 3248894 - RNA, 19 nt, Artificial Sequence
  Description of Artificial Sequence: Synthetic oligonucleotide
aaggagcaccaugaaaggg

SEQ ID NO: 3248895 - RNA, 19 nt, Artificial Sequence
  Description of Artificial Sequence: Synthetic oligonucleotide
auaguugccagcacacucg

SEQ ID NO: 3248896 - RNA, 19 nt, Artificial Sequence
  Description of Artificial Sequence: Synthetic oligonucleotide
aaugccagggagucaggcu

SEQ ID NO: 3248897 - RNA, 19 nt, Artificial Sequence
  Description of Artificial Sequence: Synthetic oligonucleotide
gaaucuuugggcacuugcc

SEQ ID NO: 3248898 - RNA, 19 nt, Artificial Sequence
  Description of Artificial Sequence: Synthetic oligonucleotide
uaccagagaguugaaaaug

SEQ ID NO: 3248899 - RNA, 19 nt, Artificial Sequence
  Description of Artificial Sequence: Synthetic oligonucleotide
uucagagcugccugaaaug

SEQ ID NO: 3248900 - RNA, 19 nt, Artificial Sequence
  Description of Artificial Sequence: Synthetic oligonucleotide
auuguccuugaaucuuugg

SEQ ID NO: 3248901 - RNA, 19 nt, Artificial Sequence
  Description of Artificial Sequence: Synthetic oligonucleotide
cagagaaggagguccagag

SEQ ID NO: 3248902 - RNA, 19 nt, Artificial Sequence
  Description of Artificial Sequence: Synthetic oligonucleotide
cauggugaaggcagagugg

SEQ ID NO: 3248903 - RNA, 19 nt, Artificial Sequence
  Description of Artificial Sequence: Synthetic oligonucleotide
ggaagcuuuagccagagaa

SEQ ID NO: 3248904 - RNA, 19 nt, Artificial Sequence
  Description of Artificial Sequence: Synthetic oligonucleotide
ucagagcugccugaaaugc

SEQ ID NO: 3248905 - RNA, 19 nt, Artificial Sequence
  Description of Artificial Sequence: Synthetic oligonucleotide
aucuuugggcacuugccag

SEQ ID NO: 3248906 - RNA, 19 nt, Artificial Sequence
  Description of Artificial Sequence: Synthetic oligonucleotide
cucgccaucccucuuacac

SEQ ID NO: 3248907 - RNA, 19 nt, Artificial Sequence
  Description of Artificial Sequence: Synthetic oligonucleotide
ucuuauuucccgggcauug

SEQ ID NO: 3248908 - RNA, 19 nt, Artificial Sequence
  Description of Artificial Sequence: Synthetic oligonucleotide
caacacuuauaguugccag

SEQ ID NO: 3248909 - RNA, 19 nt, Artificial Sequence
  Description of Artificial Sequence: Synthetic oligonucleotide
agcaccucuuauuucccgg

SEQ ID NO: 3248910 - RNA, 19 nt, Artificial Sequence
  Description of Artificial Sequence: Synthetic oligonucleotide
caaggagcaccaugaaagg

SEQ ID NO: 3248911 - RNA, 19 nt, Artificial Sequence
  Description of Artificial Sequence: Synthetic oligonucleotide
caggcaccacuuuugauag

SEQ ID NO: 3248912 - RNA, 19 nt, Artificial Sequence
  Description of Artificial Sequence: Synthetic oligonucleotide
agucaggaagcuuuagcca

SEQ ID NO: 3248913 - RNA, 19 nt, Artificial Sequence
  Description of Artificial Sequence: Synthetic oligonucleotide
ucacuauuuguaucuuuac

SEQ ID NO: 3248914 - RNA, 19 nt, Artificial Sequence
  Description of Artificial Sequence: Synthetic oligonucleotide
uacuacagaaguagauggu

SEQ ID NO: 3248915 - RNA, 19 nt, Artificial Sequence
  Description of Artificial Sequence: Synthetic oligonucleotide
guccagagcacacacagca

SEQ ID NO: 3248916 - RNA, 19 nt, Artificial Sequence
  Description of Artificial Sequence: Synthetic oligonucleotide
uaucuuuaccagagggugu

SEQ ID NO: 3248917 - RNA, 19 nt, Artificial Sequence
  Description of Artificial Sequence: Synthetic oligonucleotide
acuuacauuaaauacaucg

SEQ ID NO: 3248918 - RNA, 19 nt, Artificial Sequence
  Description of Artificial Sequence: Synthetic oligonucleotide
agaacaagaacccucaagc

SEQ ID NO: 3248919 - RNA, 19 nt, Artificial Sequence
  Description of Artificial Sequence: Synthetic oligonucleotide
uaaaaugugaucaaaagaa

SEQ ID NO: 3248920 - RNA, 19 nt, Artificial Sequence
  Description of Artificial Sequence: Synthetic oligonucleotide
aauacaucgauaaaucagc

SEQ ID NO: 3248921 - RNA, 19 nt, Artificial Sequence
  Description of Artificial Sequence: Synthetic oligonucleotide
uuuacuuacauuaaauaca

SEQ ID NO: 3248922 - RNA, 19 nt, Artificial Sequence
  Description of Artificial Sequence: Synthetic oligonucleotide
aacaagaacccucaagccc

SEQ ID NO: 3248923 - RNA, 19 nt, Artificial Sequence
  Description of Artificial Sequence: Synthetic oligonucleotide
aagauaaugggagaggugg

SEQ ID NO: 3248924 - RNA, 19 nt, Artificial Sequence
  Description of Artificial Sequence: Synthetic oligonucleotide
uuuuacuuacauuaaauac

SEQ ID NO: 3248925 - RNA, 19 nt, Artificial Sequence
  Description of Artificial Sequence: Synthetic oligonucleotide
uuauguugaaaggagaggg

SEQ ID NO: 3248926 - RNA, 19 nt, Artificial Sequence
  Description of Artificial Sequence: Synthetic oligonucleotide
aauacuguuccuaagggag

SEQ ID NO: 3248927 - RNA, 19 nt, Artificial Sequence
  Description of Artificial Sequence: Synthetic oligonucleotide
uuaaauacaucgauaaauc

SEQ ID NO: 3248928 - RNA, 19 nt, Artificial Sequence
  Description of Artificial Sequence: Synthetic oligonucleotide
aaauacaucgauaaaucag

SEQ ID NO: 3248929 - RNA, 19 nt, Artificial Sequence
  Description of Artificial Sequence: Synthetic oligonucleotide
uguuauguugaaaggagag

SEQ ID NO: 3248930 - RNA, 19 nt, Artificial Sequence
  Description of Artificial Sequence: Synthetic oligonucleotide
aacagagcucaacugaagg

SEQ ID NO: 3248931 - RNA, 19 nt, Artificial Sequence
  Description of Artificial Sequence: Synthetic oligonucleotide
acgauuguuauguugaaag

SEQ ID NO: 3248932 - RNA, 19 nt, Artificial Sequence
  Description of Artificial Sequence: Synthetic oligonucleotide
uggggagagaacaagaacc

SEQ ID NO: 3248933 - RNA, 19 nt, Artificial Sequence
  Description of Artificial Sequence: Synthetic oligonucleotide
aaggcaaaugcuuucuuag

SEQ ID NO: 3248934 - RNA, 19 nt, Artificial Sequence
  Description of Artificial Sequence: Synthetic oligonucleotide
agcaguugcauucuguuac

SEQ ID NO: 3248935 - RNA, 19 nt, Artificial Sequence
  Description of Artificial Sequence: Synthetic oligonucleotide
aagaagaaaagccuaggga

SEQ ID NO: 3248936 - RNA, 19 nt, Artificial Sequence
  Description of Artificial Sequence: Synthetic oligonucleotide
aaaggagagggaaagaaag

SEQ ID NO: 3248937 - RNA, 19 nt, Artificial Sequence
  Description of Artificial Sequence: Synthetic oligonucleotide
gaagaagaaaagccuaggg

SEQ ID NO: 3248938 - RNA, 19 nt, Artificial Sequence
  Description of Artificial Sequence: Synthetic oligonucleotide
cauucuguuaccacgauug

SEQ ID NO: 3248939 - RNA, 19 nt, Artificial Sequence
  Description of Artificial Sequence: Synthetic oligonucleotide
acaucgauaaaucagcagu

SEQ ID NO: 3248940 - RNA, 19 nt, Artificial Sequence
  Description of Artificial Sequence: Synthetic oligonucleotide
agaagaaaagccuagggaa

SEQ ID NO: 3248941 - RNA, 19 nt, Artificial Sequence
  Description of Artificial Sequence: Synthetic oligonucleotide
acauuaaauacaucgauaa

SEQ ID NO: 3248942 - RNA, 19 nt, Artificial Sequence
  Description of Artificial Sequence: Synthetic oligonucleotide
auuaaauacaucgauaaau

SEQ ID NO: 3248943 - RNA, 19 nt, Artificial Sequence
  Description of Artificial Sequence: Synthetic oligonucleotide
uaggcaauaaaacauuuuc

SEQ ID NO: 3248944 - RNA, 19 nt, Artificial Sequence
  Description of Artificial Sequence: Synthetic oligonucleotide
aagaaaggcaaaugcuuuc

SEQ ID NO: 3248945 - RNA, 19 nt, Artificial Sequence
  Description of Artificial Sequence: Synthetic oligonucleotide
guugcauucuguuaccacg

SEQ ID NO: 3248946 - RNA, 19 nt, Artificial Sequence
  Description of Artificial Sequence: Synthetic oligonucleotide
uuacuuacauuaaauacau

SEQ ID NO: 3248947 - RNA, 19 nt, Artificial Sequence
  Description of Artificial Sequence: Synthetic oligonucleotide
ucaacugaaggcagaagag

SEQ ID NO: 3248948 - RNA, 19 nt, Artificial Sequence
  Description of Artificial Sequence: Synthetic oligonucleotide
aauaaaacauuuucacuuu

SEQ ID NO: 3248949 - RNA, 19 nt, Artificial Sequence
  Description of Artificial Sequence: Synthetic oligonucleotide
uuacauuaaauacaucgau

SEQ ID NO: 3248950 - RNA, 19 nt, Artificial Sequence
  Description of Artificial Sequence: Synthetic oligonucleotide
aaaagauaaugggagaggu

SEQ ID NO: 3248951 - RNA, 19 nt, Artificial Sequence
  Description of Artificial Sequence: Synthetic oligonucleotide
uaaaucagcaguugcauuc

SEQ ID NO: 3248952 - RNA, 19 nt, Artificial Sequence
  Description of Artificial Sequence: Synthetic oligonucleotide
acagagcucaacugaaggc

SEQ ID NO: 3248953 - RNA, 19 nt, Artificial Sequence
  Description of Artificial Sequence: Synthetic oligonucleotide
uaaauacaucgauaaauca

SEQ ID NO: 3248954 - RNA, 19 nt, Artificial Sequence
  Description of Artificial Sequence: Synthetic oligonucleotide
ucuguuaccacgauuguua

SEQ ID NO: 3248955 - RNA, 19 nt, Artificial Sequence
  Description of Artificial Sequence: Synthetic oligonucleotide
agggaaaugguuucccagc

SEQ ID NO: 3248956 - RNA, 19 nt, Artificial Sequence
  Description of Artificial Sequence: Synthetic oligonucleotide
aaggcagaagagcugguag

SEQ ID NO: 3248957 - RNA, 19 nt, Artificial Sequence
  Description of Artificial Sequence: Synthetic oligonucleotide
gaaaugguuucccagcccc

SEQ ID NO: 3248958 - RNA, 19 nt, Artificial Sequence
  Description of Artificial Sequence: Synthetic oligonucleotide
ucgauaaaucagcaguugc

SEQ ID NO: 3248959 - RNA, 19 nt, Artificial Sequence
  Description of Artificial Sequence: Synthetic oligonucleotide
aggagagggaaagaaaggc

SEQ ID NO: 3248960 - RNA, 19 nt, Artificial Sequence
  Description of Artificial Sequence: Synthetic oligonucleotide
agcagcugggcccaggagc

SEQ ID NO: 3248961 - RNA, 19 nt, Artificial Sequence
  Description of Artificial Sequence: Synthetic oligonucleotide
auuguuauguugaaaggag

SEQ ID NO: 3248962 - RNA, 19 nt, Artificial Sequence
  Description of Artificial Sequence: Synthetic oligonucleotide
gaaaagccuagggaaaugg

SEQ ID NO: 3248963 - RNA, 19 nt, Artificial Sequence
  Description of Artificial Sequence: Synthetic oligonucleotide
cuaaaaugugaucaaaaga

SEQ ID NO: 3248964 - RNA, 19 nt, Artificial Sequence
  Description of Artificial Sequence: Synthetic oligonucleotide
uacauuaaauacaucgaua

SEQ ID NO: 3248965 - RNA, 19 nt, Artificial Sequence
  Description of Artificial Sequence: Synthetic oligonucleotide
gagaacaagaacccucaag

SEQ ID NO: 3248966 - RNA, 19 nt, Artificial Sequence
  Description of Artificial Sequence: Synthetic oligonucleotide
aaaugugaucaaaagaaaa

SEQ ID NO: 3248967 - RNA, 19 nt, Artificial Sequence
  Description of Artificial Sequence: Synthetic oligonucleotide
gauuguuauguugaaagga

SEQ ID NO: 3248968 - RNA, 19 nt, Artificial Sequence
  Description of Artificial Sequence: Synthetic oligonucleotide
cuuacauuaaauacaucga

SEQ ID NO: 3248969 - RNA, 19 nt, Artificial Sequence
  Description of Artificial Sequence: Synthetic oligonucleotide
ggcaauaaaacauuuucac

SEQ ID NO: 3248970 - RNA, 19 nt, Artificial Sequence
  Description of Artificial Sequence: Synthetic oligonucleotide
gaacaagaacccucaagcc

SEQ ID NO: 3248971 - RNA, 19 nt, Artificial Sequence
  Description of Artificial Sequence: Synthetic oligonucleotide
guugaaaggagagggaaag

SEQ ID NO: 3248972 - RNA, 19 nt, Artificial Sequence
  Description of Artificial Sequence: Synthetic oligonucleotide
agggaggaagaagaaaagc

SEQ ID NO: 3248973 - RNA, 19 nt, Artificial Sequence
  Description of Artificial Sequence: Synthetic oligonucleotide
cuaaggccaauacuguucc

SEQ ID NO: 3248974 - RNA, 19 nt, Artificial Sequence
  Description of Artificial Sequence: Synthetic oligonucleotide
aguugcauucuguuaccac

SEQ ID NO: 3248975 - RNA, 19 nt, Artificial Sequence
  Description of Artificial Sequence: Synthetic oligonucleotide
uuguuauguugaaaggaga

SEQ ID NO: 3248976 - RNA, 19 nt, Artificial Sequence
  Description of Artificial Sequence: Synthetic oligonucleotide
gggaaagaaaggcaaaugc

SEQ ID NO: 3248977 - RNA, 19 nt, Artificial Sequence
  Description of Artificial Sequence: Synthetic oligonucleotide
gauaaugggagaggugggg

SEQ ID NO: 3248978 - RNA, 19 nt, Artificial Sequence
  Description of Artificial Sequence: Synthetic oligonucleotide
uacaucgauaaaucagcag

SEQ ID NO: 3248979 - RNA, 19 nt, Artificial Sequence
  Description of Artificial Sequence: Synthetic oligonucleotide
guuauguugaaaggagagg

SEQ ID NO: 3248980 - RNA, 19 nt, Artificial Sequence
  Description of Artificial Sequence: Synthetic oligonucleotide
uguuccuaagggagggagg

SEQ ID NO: 3248981 - RNA, 19 nt, Artificial Sequence
  Description of Artificial Sequence: Synthetic oligonucleotide
uauguugaaaggagaggga

SEQ ID NO: 3248982 - RNA, 19 nt, Artificial Sequence
  Description of Artificial Sequence: Synthetic oligonucleotide
uagggaaaugguuucccag

SEQ ID NO: 3248983 - RNA, 19 nt, Artificial Sequence
  Description of Artificial Sequence: Synthetic oligonucleotide
aaaggcaaaugcuuucuua

SEQ ID NO: 3248984 - RNA, 19 nt, Artificial Sequence
  Description of Artificial Sequence: Synthetic oligonucleotide
aacugaaggcagaagagcu

SEQ ID NO: 3248985 - RNA, 19 nt, Artificial Sequence
  Description of Artificial Sequence: Synthetic oligonucleotide
gaacccucaagcccaacag

SEQ ID NO: 3248986 - RNA, 19 nt, Artificial Sequence
  Description of Artificial Sequence: Synthetic oligonucleotide
aaggagagggaaagaaagg

SEQ ID NO: 3248987 - RNA, 19 nt, Artificial Sequence
  Description of Artificial Sequence: Synthetic oligonucleotide
ugaaaggagagggaaagaa

SEQ ID NO: 3248988 - RNA, 19 nt, Artificial Sequence
  Description of Artificial Sequence: Synthetic oligonucleotide
ggagcuaaggccaauacug

SEQ ID NO: 3248989 - RNA, 19 nt, Artificial Sequence
  Description of Artificial Sequence: Synthetic oligonucleotide
aaaaugugaucaaaagaaa

SEQ ID NO: 3248990 - RNA, 19 nt, Artificial Sequence
  Description of Artificial Sequence: Synthetic oligonucleotide
ccuaaaaugugaucaaaag

SEQ ID NO: 3248991 - RNA, 19 nt, Artificial Sequence
  Description of Artificial Sequence: Synthetic oligonucleotide
caauaaaacauuuucacuu

SEQ ID NO: 3248992 - RNA, 19 nt, Artificial Sequence
  Description of Artificial Sequence: Synthetic oligonucleotide
gaaggagggaggaagaaga

SEQ ID NO: 3248993 - RNA, 19 nt, Artificial Sequence
  Description of Artificial Sequence: Synthetic oligonucleotide
uugcauucuguuaccacga

SEQ ID NO: 3248994 - RNA, 19 nt, Artificial Sequence
  Description of Artificial Sequence: Synthetic oligonucleotide
aaagaaaggcaaaugcuuu

SEQ ID NO: 3248995 - RNA, 19 nt, Artificial Sequence
  Description of Artificial Sequence: Synthetic oligonucleotide
cucaacugaaggcagaaga

SEQ ID NO: 3248996 - RNA, 19 nt, Artificial Sequence
  Description of Artificial Sequence: Synthetic oligonucleotide
aggcaaaugcuuucuuagg

SEQ ID NO: 3248997 - RNA, 19 nt, Artificial Sequence
  Description of Artificial Sequence: Synthetic oligonucleotide
uuucccagccccuaggcaa

SEQ ID NO: 3248998 - RNA, 19 nt, Artificial Sequence
  Description of Artificial Sequence: Synthetic oligonucleotide
uacuguuccuaagggaggg

SEQ ID NO: 3248999 - RNA, 19 nt, Artificial Sequence
  Description of Artificial Sequence: Synthetic oligonucleotide
uaaugggagagguggggag

SEQ ID NO: 3249000 - RNA, 19 nt, Artificial Sequence
  Description of Artificial Sequence: Synthetic oligonucleotide
aggcagaagagcugguagg

SEQ ID NO: 3249001 - RNA, 19 nt, Artificial Sequence
  Description of Artificial Sequence: Synthetic oligonucleotide
gccaauacuguuccuaagg

SEQ ID NO: 3249002 - RNA, 19 nt, Artificial Sequence
  Description of Artificial Sequence: Synthetic oligonucleotide
uguugaaaggagagggaaa

SEQ ID NO: 3249003 - RNA, 19 nt, Artificial Sequence
  Description of Artificial Sequence: Synthetic oligonucleotide
cugaaggcagaagagcugg

SEQ ID NO: 3249004 - RNA, 19 nt, Artificial Sequence
  Description of Artificial Sequence: Synthetic oligonucleotide
aaagauaaugggagaggug

SEQ ID NO: 3249005 - RNA, 19 nt, Artificial Sequence
  Description of Artificial Sequence: Synthetic oligonucleotide
guuaccacgauuguuaugu

SEQ ID NO: 3249006 - RNA, 19 nt, Artificial Sequence
  Description of Artificial Sequence: Synthetic oligonucleotide
aagagcugguaggaguagg

SEQ ID NO: 3249007 - RNA, 19 nt, Artificial Sequence
  Description of Artificial Sequence: Synthetic oligonucleotide
ucaagcccaacagagcuca

SEQ ID NO: 3249008 - RNA, 19 nt, Artificial Sequence
  Description of Artificial Sequence: Synthetic oligonucleotide
aagggagggaggcagggaa

SEQ ID NO: 3249009 - RNA, 19 nt, Artificial Sequence
  Description of Artificial Sequence: Synthetic oligonucleotide
aagaaaagccuagggaaau

SEQ ID NO: 3249010 - RNA, 19 nt, Artificial Sequence
  Description of Artificial Sequence: Synthetic oligonucleotide
acaagaacccucaagccca

SEQ ID NO: 3249011 - RNA, 19 nt, Artificial Sequence
  Description of Artificial Sequence: Synthetic oligonucleotide
aaaucagcaguugcauucu

SEQ ID NO: 3249012 - RNA, 19 nt, Artificial Sequence
  Description of Artificial Sequence: Synthetic oligonucleotide
uaccacgauuguuauguug

SEQ ID NO: 3249013 - RNA, 19 nt, Artificial Sequence
  Description of Artificial Sequence: Synthetic oligonucleotide
gggaggaagaagaaaagcc

SEQ ID NO: 3249014 - RNA, 19 nt, Artificial Sequence
  Description of Artificial Sequence: Synthetic oligonucleotide
aaaugcuuucuuaggaaaa

SEQ ID NO: 3249015 - RNA, 19 nt, Artificial Sequence
  Description of Artificial Sequence: Synthetic oligonucleotide
uccuaagggagggaggcag

SEQ ID NO: 3249016 - RNA, 19 nt, Artificial Sequence
  Description of Artificial Sequence: Synthetic oligonucleotide
accacgauuguuauguuga

SEQ ID NO: 3249017 - RNA, 19 nt, Artificial Sequence
  Description of Artificial Sequence: Synthetic oligonucleotide
aaugguuucacuuccagcc

SEQ ID NO: 3249018 - RNA, 19 nt, Artificial Sequence
  Description of Artificial Sequence: Synthetic oligonucleotide
aaauaagugauuuauuucu

SEQ ID NO: 3249019 - RNA, 19 nt, Artificial Sequence
  Description of Artificial Sequence: Synthetic oligonucleotide
uuuucucugaauuucagcg

SEQ ID NO: 3249020 - RNA, 19 nt, Artificial Sequence
  Description of Artificial Sequence: Synthetic oligonucleotide
aauaagauaaacauagcag

SEQ ID NO: 3249021 - RNA, 19 nt, Artificial Sequence
  Description of Artificial Sequence: Synthetic oligonucleotide
  modified_base (2)..(2): a, c, u, g, unknown or other
unuaaaaucaagagcaugu

SEQ ID NO: 3249022 - RNA, 19 nt, Artificial Sequence
  Description of Artificial Sequence: Synthetic oligonucleotide
auuuuauagacuucaauag

SEQ ID NO: 3249023 - RNA, 19 nt, Artificial Sequence
  Description of Artificial Sequence: Synthetic oligonucleotide
uggauaaucaacuuucucc

SEQ ID NO: 3249024 - RNA, 19 nt, Artificial Sequence
  Description of Artificial Sequence: Synthetic oligonucleotide
aaaauaucagcucucagaa

SEQ ID NO: 3249025 - RNA, 19 nt, Artificial Sequence
  Description of Artificial Sequence: Synthetic oligonucleotide
aaggcaaauccucagacag

SEQ ID NO: 3249026 - RNA, 19 nt, Artificial Sequence
  Description of Artificial Sequence: Synthetic oligonucleotide
uauucuuccuuucagaaac

SEQ ID NO: 3249027 - RNA, 19 nt, Artificial Sequence
  Description of Artificial Sequence: Synthetic oligonucleotide
acuucaauagcacaggaag

SEQ ID NO: 3249028 - RNA, 19 nt, Artificial Sequence
  Description of Artificial Sequence: Synthetic oligonucleotide
uauuuuauagacuucaaua

SEQ ID NO: 3249029 - RNA, 19 nt, Artificial Sequence
  Description of Artificial Sequence: Synthetic oligonucleotide
aaacauagcaggguaaugg

SEQ ID NO: 3249030 - RNA, 19 nt, Artificial Sequence
  Description of Artificial Sequence: Synthetic oligonucleotide
uuuuccuucauugaaauga

SEQ ID NO: 3249031 - RNA, 19 nt, Artificial Sequence
  Description of Artificial Sequence: Synthetic oligonucleotide
aaaacaacaucguaggaau

SEQ ID NO: 3249032 - RNA, 19 nt, Artificial Sequence
  Description of Artificial Sequence: Synthetic oligonucleotide
  modified_base (11)..(11): a, c, u, g, unknown or other
gaaaugaugunuaaaauca

SEQ ID NO: 3249033 - RNA, 19 nt, Artificial Sequence
  Description of Artificial Sequence: Synthetic oligonucleotide
auuugaaagacauucauua

SEQ ID NO: 3249034 - RNA, 19 nt, Artificial Sequence
  Description of Artificial Sequence: Synthetic oligonucleotide
ugaguaacuagaaacacuc

SEQ ID NO: 3249035 - RNA, 19 nt, Artificial Sequence
  Description of Artificial Sequence: Synthetic oligonucleotide
gaaucuucgagaauaagag

SEQ ID NO: 3249036 - RNA, 19 nt, Artificial Sequence
  Description of Artificial Sequence: Synthetic oligonucleotide
uagaauaaggcacagcccu

SEQ ID NO: 3249037 - RNA, 19 nt, Artificial Sequence
  Description of Artificial Sequence: Synthetic oligonucleotide
uauaccaacaggauacuug

SEQ ID NO: 3249038 - RNA, 19 nt, Artificial Sequence
  Description of Artificial Sequence: Synthetic oligonucleotide
aguguaauaaucuuuccgu

SEQ ID NO: 3249039 - RNA, 19 nt, Artificial Sequence
  Description of Artificial Sequence: Synthetic oligonucleotide
acaagaggucauuuuaccc

SEQ ID NO: 3249040 - RNA, 19 nt, Artificial Sequence
  Description of Artificial Sequence: Synthetic oligonucleotide
auaaggcaaauccucagac

SEQ ID NO: 3249041 - RNA, 19 nt, Artificial Sequence
  Description of Artificial Sequence: Synthetic oligonucleotide
auaccaacaggauacuugg

SEQ ID NO: 3249042 - RNA, 19 nt, Artificial Sequence
  Description of Artificial Sequence: Synthetic oligonucleotide
cuaaguguuaguuucguug

SEQ ID NO: 3249043 - RNA, 19 nt, Artificial Sequence
  Description of Artificial Sequence: Synthetic oligonucleotide
gauccugaagauuagggug

SEQ ID NO: 3249044 - RNA, 19 nt, Artificial Sequence
  Description of Artificial Sequence: Synthetic oligonucleotide
ucuccauuauuuuauagac

SEQ ID NO: 3249045 - RNA, 19 nt, Artificial Sequence
  Description of Artificial Sequence: Synthetic oligonucleotide
aagugauuuauuucuugag

SEQ ID NO: 3249046 - RNA, 19 nt, Artificial Sequence
  Description of Artificial Sequence: Synthetic oligonucleotide
auuaggguggaugacagcg

SEQ ID NO: 3249047 - RNA, 19 nt, Artificial Sequence
  Description of Artificial Sequence: Synthetic oligonucleotide
gugguugaguauuugaggg

SEQ ID NO: 3249048 - RNA, 19 nt, Artificial Sequence
  Description of Artificial Sequence: Synthetic oligonucleotide
aaagacauucauuaauuua

SEQ ID NO: 3249049 - RNA, 19 nt, Artificial Sequence
  Description of Artificial Sequence: Synthetic oligonucleotide
aguaacuagaaacacuccu

SEQ ID NO: 3249050 - RNA, 19 nt, Artificial Sequence
  Description of Artificial Sequence: Synthetic oligonucleotide
aagacauucauuaauuuau

SEQ ID NO: 3249051 - RNA, 19 nt, Artificial Sequence
  Description of Artificial Sequence: Synthetic oligonucleotide
ucugauuucugcaauucac

SEQ ID NO: 3249052 - RNA, 19 nt, Artificial Sequence
  Description of Artificial Sequence: Synthetic oligonucleotide
ugaagauuaggguggauga

SEQ ID NO: 3249053 - RNA, 19 nt, Artificial Sequence
  Description of Artificial Sequence: Synthetic oligonucleotide
aaauaucagcucucagaac

SEQ ID NO: 3249054 - RNA, 19 nt, Artificial Sequence
  Description of Artificial Sequence: Synthetic oligonucleotide
aaaaucaagagcauguuua

SEQ ID NO: 3249055 - RNA, 19 nt, Artificial Sequence
  Description of Artificial Sequence: Synthetic oligonucleotide
uucguucacaaacaccggg

SEQ ID NO: 3249056 - RNA, 19 nt, Artificial Sequence
  Description of Artificial Sequence: Synthetic oligonucleotide
uugaaagacauucauuaau

SEQ ID NO: 3249057 - RNA, 19 nt, Artificial Sequence
  Description of Artificial Sequence: Synthetic oligonucleotide
uuugguccaaaauaucagc

SEQ ID NO: 3249058 - RNA, 19 nt, Artificial Sequence
  Description of Artificial Sequence: Synthetic oligonucleotide
aaacacuccugucaguuca

SEQ ID NO: 3249059 - RNA, 19 nt, Artificial Sequence
  Description of Artificial Sequence: Synthetic oligonucleotide
ugcacuaaguguuaguuuc

SEQ ID NO: 3249060 - RNA, 19 nt, Artificial Sequence
  Description of Artificial Sequence: Synthetic oligonucleotide
ucuuccuuucagaaacugg

SEQ ID NO: 3249061 - RNA, 19 nt, Artificial Sequence
  Description of Artificial Sequence: Synthetic oligonucleotide
uaauaugcggcuucguuca

SEQ ID NO: 3249062 - RNA, 19 nt, Artificial Sequence
  Description of Artificial Sequence: Synthetic oligonucleotide
ugauuuauuucuugagccc

SEQ ID NO: 3249063 - RNA, 19 nt, Artificial Sequence
  Description of Artificial Sequence: Synthetic oligonucleotide
ugaaagacauucauuaauu

SEQ ID NO: 3249064 - RNA, 19 nt, Artificial Sequence
  Description of Artificial Sequence: Synthetic oligonucleotide
cauagcaggguaauggagc

SEQ ID NO: 3249065 - RNA, 19 nt, Artificial Sequence
  Description of Artificial Sequence: Synthetic oligonucleotide
aacuucuauaccaacagga

SEQ ID NO: 3249066 - RNA, 19 nt, Artificial Sequence
  Description of Artificial Sequence: Synthetic oligonucleotide
uuacccaguagucuggucu

SEQ ID NO: 3249067 - RNA, 19 nt, Artificial Sequence
  Description of Artificial Sequence: Synthetic oligonucleotide
uuugagggaaggaugcuca

SEQ ID NO: 3249068 - RNA, 19 nt, Artificial Sequence
  Description of Artificial Sequence: Synthetic oligonucleotide
caguguaauaaucuuuccg

SEQ ID NO: 3249069 - RNA, 19 nt, Artificial Sequence
  Description of Artificial Sequence: Synthetic oligonucleotide
cuucaauagcacaggaagg

SEQ ID NO: 3249070 - RNA, 19 nt, Artificial Sequence
  Description of Artificial Sequence: Synthetic oligonucleotide
ucuucgagaauaagagugc

SEQ ID NO: 3249071 - RNA, 19 nt, Artificial Sequence
  Description of Artificial Sequence: Synthetic oligonucleotide
caauaagauaaacauagca

SEQ ID NO: 3249072 - RNA, 19 nt, Artificial Sequence
  Description of Artificial Sequence: Synthetic oligonucleotide
aguucauuuccgugagucc

SEQ ID NO: 3249073 - RNA, 19 nt, Artificial Sequence
  Description of Artificial Sequence: Synthetic oligonucleotide
uaaggcacagcccugcucu

SEQ ID NO: 3249074 - RNA, 19 nt, Artificial Sequence
  Description of Artificial Sequence: Synthetic oligonucleotide
uccacuuucauuccuugga

SEQ ID NO: 3249075 - RNA, 19 nt, Artificial Sequence
  Description of Artificial Sequence: Synthetic oligonucleotide
cauuuuacccaguagucug

SEQ ID NO: 3249076 - RNA, 19 nt, Artificial Sequence
  Description of Artificial Sequence: Synthetic oligonucleotide
uaaguguuaguuucguugu

SEQ ID NO: 3249077 - RNA, 19 nt, Artificial Sequence
  Description of Artificial Sequence: Synthetic oligonucleotide
aagagacacaaacacggga

SEQ ID NO: 3249078 - RNA, 19 nt, Artificial Sequence
  Description of Artificial Sequence: Synthetic oligonucleotide
agugaguaacuagaaacac

SEQ ID NO: 3249079 - RNA, 19 nt, Artificial Sequence
  Description of Artificial Sequence: Synthetic oligonucleotide
aucuucgagaauaagagug

SEQ ID NO: 3249080 - RNA, 19 nt, Artificial Sequence
  Description of Artificial Sequence: Synthetic oligonucleotide
cacuucuccacuuucauuc

SEQ ID NO: 3249081 - RNA, 19 nt, Artificial Sequence
  Description of Artificial Sequence: Synthetic oligonucleotide
aacauagcaggguaaugga

SEQ ID NO: 3249082 - RNA, 19 nt, Artificial Sequence
  Description of Artificial Sequence: Synthetic oligonucleotide
cuagaaacacuccugucag

SEQ ID NO: 3249083 - RNA, 19 nt, Artificial Sequence
  Description of Artificial Sequence: Synthetic oligonucleotide
auaagugauuuauuucuug

SEQ ID NO: 3249084 - RNA, 19 nt, Artificial Sequence
  Description of Artificial Sequence: Synthetic oligonucleotide
auagacuucaauagcacag

SEQ ID NO: 3249085 - RNA, 19 nt, Artificial Sequence
  Description of Artificial Sequence: Synthetic oligonucleotide
aagguuuucaagguuaaaa

SEQ ID NO: 3249086 - RNA, 19 nt, Artificial Sequence
  Description of Artificial Sequence: Synthetic oligonucleotide
uucaauagcacaggaagga

SEQ ID NO: 3249087 - RNA, 19 nt, Artificial Sequence
  Description of Artificial Sequence: Synthetic oligonucleotide
aaucuucgagaauaagagu

SEQ ID NO: 3249088 - RNA, 19 nt, Artificial Sequence
  Description of Artificial Sequence: Synthetic oligonucleotide
uagagguucacaagacucc

SEQ ID NO: 3249089 - RNA, 19 nt, Artificial Sequence
  Description of Artificial Sequence: Synthetic oligonucleotide
ugaaugguuucacuuccag

SEQ ID NO: 3249090 - RNA, 19 nt, Artificial Sequence
  Description of Artificial Sequence: Synthetic oligonucleotide
guaucuggcacacuucucc

SEQ ID NO: 3249091 - RNA, 19 nt, Artificial Sequence
  Description of Artificial Sequence: Synthetic oligonucleotide
ugcggcuucguucacaaac

SEQ ID NO: 3249092 - RNA, 19 nt, Artificial Sequence
  Description of Artificial Sequence: Synthetic oligonucleotide
ucuuuagccagugaguaac

SEQ ID NO: 3249093 - RNA, 19 nt, Artificial Sequence
  Description of Artificial Sequence: Synthetic oligonucleotide
agaauaagagugcaaccca

SEQ ID NO: 3249094 - RNA, 19 nt, Artificial Sequence
  Description of Artificial Sequence: Synthetic oligonucleotide
uuucauaauaugcggcuuc

SEQ ID NO: 3249095 - RNA, 19 nt, Artificial Sequence
  Description of Artificial Sequence: Synthetic oligonucleotide
cuagaauaaggcacagccc

SEQ ID NO: 3249096 - RNA, 19 nt, Artificial Sequence
  Description of Artificial Sequence: Synthetic oligonucleotide
ucgagaauaagagugcaac

SEQ ID NO: 3249097 - RNA, 19 nt, Artificial Sequence
  Description of Artificial Sequence: Synthetic oligonucleotide
cuuuucucugaauuucagc

SEQ ID NO: 3249098 - RNA, 19 nt, Artificial Sequence
  Description of Artificial Sequence: Synthetic oligonucleotide
cauuugguccaaaauauca

SEQ ID NO: 3249099 - RNA, 19 nt, Artificial Sequence
  Description of Artificial Sequence: Synthetic oligonucleotide
acuuucauuccuuggauaa

SEQ ID NO: 3249100 - RNA, 19 nt, Artificial Sequence
  Description of Artificial Sequence: Synthetic oligonucleotide
aacacgauucaggucacag

SEQ ID NO: 3249101 - RNA, 19 nt, Artificial Sequence
  Description of Artificial Sequence: Synthetic oligonucleotide
cuuugcuaagguuuucaag

SEQ ID NO: 3249102 - RNA, 19 nt, Artificial Sequence
  Description of Artificial Sequence: Synthetic oligonucleotide
auugcacgguccuagaggu

SEQ ID NO: 3249103 - RNA, 19 nt, Artificial Sequence
  Description of Artificial Sequence: Synthetic oligonucleotide
auaagagugcaacccaugu

SEQ ID NO: 3249104 - RNA, 19 nt, Artificial Sequence
  Description of Artificial Sequence: Synthetic oligonucleotide
uccaaagauagcaaucuuu

SEQ ID NO: 3249105 - RNA, 19 nt, Artificial Sequence
  Description of Artificial Sequence: Synthetic oligonucleotide
aagauuaggguggaugaca

SEQ ID NO: 3249106 - RNA, 19 nt, Artificial Sequence
  Description of Artificial Sequence: Synthetic oligonucleotide
uuugaaagacauucauuaa

SEQ ID NO: 3249107 - RNA, 19 nt, Artificial Sequence
  Description of Artificial Sequence: Synthetic oligonucleotide
uagacuucaauagcacagg

SEQ ID NO: 3249108 - RNA, 19 nt, Artificial Sequence
  Description of Artificial Sequence: Synthetic oligonucleotide
accaacaggauacuuggca

SEQ ID NO: 3249109 - RNA, 19 nt, Artificial Sequence
  Description of Artificial Sequence: Synthetic oligonucleotide
aaguguuaguuucguuguc

SEQ ID NO: 3249110 - RNA, 19 nt, Artificial Sequence
  Description of Artificial Sequence: Synthetic oligonucleotide
acuucuccacuuucauucc

SEQ ID NO: 3249111 - RNA, 19 nt, Artificial Sequence
  Description of Artificial Sequence: Synthetic oligonucleotide
uaaucaacuuucuccauua

SEQ ID NO: 3249112 - RNA, 19 nt, Artificial Sequence
  Description of Artificial Sequence: Synthetic oligonucleotide
gguaauggagccaaggaag

SEQ ID NO: 3249113 - RNA, 19 nt, Artificial Sequence
  Description of Artificial Sequence: Synthetic oligonucleotide
gacauucauuaauuuauuc

SEQ ID NO: 3249114 - RNA, 19 nt, Artificial Sequence
  Description of Artificial Sequence: Synthetic oligonucleotide
uccuuucagaaacuggccu

SEQ ID NO: 3249115 - RNA, 19 nt, Artificial Sequence
  Description of Artificial Sequence: Synthetic oligonucleotide
aguaguguugugaagguca

SEQ ID NO: 3249116 - RNA, 19 nt, Artificial Sequence
  Description of Artificial Sequence: Synthetic oligonucleotide
gaaugguuucacuuccagc

SEQ ID NO: 3249117 - RNA, 19 nt, Artificial Sequence
  Description of Artificial Sequence: Synthetic oligonucleotide
aauauauuuauuuaaugug

SEQ ID NO: 3249118 - RNA, 19 nt, Artificial Sequence
  Description of Artificial Sequence: Synthetic oligonucleotide
aaauauauuuauuuaaugu

SEQ ID NO: 3249119 - RNA, 19 nt, Artificial Sequence
  Description of Artificial Sequence: Synthetic oligonucleotide
auuuauuuaauguguaugg

SEQ ID NO: 3249120 - RNA, 19 nt, Artificial Sequence
  Description of Artificial Sequence: Synthetic oligonucleotide
aaauacagagacuuuauug

SEQ ID NO: 3249121 - RNA, 19 nt, Artificial Sequence
  Description of Artificial Sequence: Synthetic oligonucleotide
aaaacuguccucuagaaaa

SEQ ID NO: 3249122 - RNA, 19 nt, Artificial Sequence
  Description of Artificial Sequence: Synthetic oligonucleotide
aaaauauauuuauuuaaug

SEQ ID NO: 3249123 - RNA, 19 nt, Artificial Sequence
  Description of Artificial Sequence: Synthetic oligonucleotide
aauacagagacuuuauugu

SEQ ID NO: 3249124 - RNA, 19 nt, Artificial Sequence
  Description of Artificial Sequence: Synthetic oligonucleotide
uuuauuguuguauaaaacu

SEQ ID NO: 3249125 - RNA, 19 nt, Artificial Sequence
  Description of Artificial Sequence: Synthetic oligonucleotide
uauuuaauguguaugggug

SEQ ID NO: 3249126 - RNA, 19 nt, Artificial Sequence
  Description of Artificial Sequence: Synthetic oligonucleotide
uguuguauaaaacuguccu

SEQ ID NO: 3249127 - RNA, 19 nt, Artificial Sequence
  Description of Artificial Sequence: Synthetic oligonucleotide
uuauuguuguauaaaacug

SEQ ID NO: 3249128 - RNA, 19 nt, Artificial Sequence
  Description of Artificial Sequence: Synthetic oligonucleotide
uauaugucuguacacaagc

SEQ ID NO: 3249129 - RNA, 19 nt, Artificial Sequence
  Description of Artificial Sequence: Synthetic oligonucleotide
uugccuuaaauacagagac

SEQ ID NO: 3249130 - RNA, 19 nt, Artificial Sequence
  Description of Artificial Sequence: Synthetic oligonucleotide
uuuguauguauauaugucu

SEQ ID NO: 3249131 - RNA, 19 nt, Artificial Sequence
  Description of Artificial Sequence: Synthetic oligonucleotide
uggaguuacaguuugugag

SEQ ID NO: 3249132 - RNA, 19 nt, Artificial Sequence
  Description of Artificial Sequence: Synthetic oligonucleotide
agaaaauauauuuauuuaa

SEQ ID NO: 3249133 - RNA, 19 nt, Artificial Sequence
  Description of Artificial Sequence: Synthetic oligonucleotide
caugcaaugcccauggagg

SEQ ID NO: 3249134 - RNA, 19 nt, Artificial Sequence
  Description of Artificial Sequence: Synthetic oligonucleotide
uauaaaacuguccucuaga

SEQ ID NO: 3249135 - RNA, 19 nt, Artificial Sequence
  Description of Artificial Sequence: Synthetic oligonucleotide
uauuuauuuaauguguaug

SEQ ID NO: 3249136 - RNA, 19 nt, Artificial Sequence
  Description of Artificial Sequence: Synthetic oligonucleotide
uuuauuuaauguguauggg

SEQ ID NO: 3249137 - RNA, 19 nt, Artificial Sequence
  Description of Artificial Sequence: Synthetic oligonucleotide
uauuguuguauaaaacugu

SEQ ID NO: 3249138 - RNA, 19 nt, Artificial Sequence
  Description of Artificial Sequence: Synthetic oligonucleotide
uuauuuaauguguaugggu

SEQ ID NO: 3249139 - RNA, 19 nt, Artificial Sequence
  Description of Artificial Sequence: Synthetic oligonucleotide
uacacaagcaugcaaugcc

SEQ ID NO: 3249140 - RNA, 19 nt, Artificial Sequence
  Description of Artificial Sequence: Synthetic oligonucleotide
uuuuguauguauauauguc

SEQ ID NO: 3249141 - RNA, 19 nt, Artificial Sequence
  Description of Artificial Sequence: Synthetic oligonucleotide
uuguauguauauaugucug

SEQ ID NO: 3249142 - RNA, 19 nt, Artificial Sequence
  Description of Artificial Sequence: Synthetic oligonucleotide
aagcaugcaaugcccaugg

SEQ ID NO: 3249143 - RNA, 19 nt, Artificial Sequence
  Description of Artificial Sequence: Synthetic oligonucleotide
uccucuagaaaauauauuu

SEQ ID NO: 3249144 - RNA, 19 nt, Artificial Sequence
  Description of Artificial Sequence: Synthetic oligonucleotide
uguuuuguauguauauaug

SEQ ID NO: 3249145 - RNA, 19 nt, Artificial Sequence
  Description of Artificial Sequence: Synthetic oligonucleotide
uauauuuauuuaaugugua

SEQ ID NO: 3249146 - RNA, 19 nt, Artificial Sequence
  Description of Artificial Sequence: Synthetic oligonucleotide
cuuuauuguuguauaaaac

SEQ ID NO: 3249147 - RNA, 19 nt, Artificial Sequence
  Description of Artificial Sequence: Synthetic oligonucleotide
uagaaaauauauuuauuua

SEQ ID NO: 3249148 - RNA, 19 nt, Artificial Sequence
  Description of Artificial Sequence: Synthetic oligonucleotide
ugucuguacacaagcaugc

SEQ ID NO: 3249149 - RNA, 19 nt, Artificial Sequence
  Description of Artificial Sequence: Synthetic oligonucleotide
auguauauaugucuguaca

SEQ ID NO: 3249150 - RNA, 19 nt, Artificial Sequence
  Description of Artificial Sequence: Synthetic oligonucleotide
uuguauaaaacuguccucu

SEQ ID NO: 3249151 - RNA, 19 nt, Artificial Sequence
  Description of Artificial Sequence: Synthetic oligonucleotide
uguauauaugucuguacac

SEQ ID NO: 3249152 - RNA, 19 nt, Artificial Sequence
  Description of Artificial Sequence: Synthetic oligonucleotide
auauauuuauuuaaugugu

SEQ ID NO: 3249153 - RNA, 19 nt, Artificial Sequence
  Description of Artificial Sequence: Synthetic oligonucleotide
uuaaauacagagacuuuau

SEQ ID NO: 3249154 - RNA, 19 nt, Artificial Sequence
  Description of Artificial Sequence: Synthetic oligonucleotide
uacagagacuuuauuguug

SEQ ID NO: 3249155 - RNA, 19 nt, Artificial Sequence
  Description of Artificial Sequence: Synthetic oligonucleotide
acuuuauuguuguauaaaa

SEQ ID NO: 3249156 - RNA, 19 nt, Artificial Sequence
  Description of Artificial Sequence: Synthetic oligonucleotide
uauauaugucuguacacaa

SEQ ID NO: 3249157 - RNA, 19 nt, Artificial Sequence
  Description of Artificial Sequence: Synthetic oligonucleotide
uguccucuagaaaauauau

SEQ ID NO: 3249158 - RNA, 19 nt, Artificial Sequence
  Description of Artificial Sequence: Synthetic oligonucleotide
uauguauauaugucuguac

SEQ ID NO: 3249159 - RNA, 19 nt, Artificial Sequence
  Description of Artificial Sequence: Synthetic oligonucleotide
uguauggguguuuuguaug

SEQ ID NO: 3249160 - RNA, 19 nt, Artificial Sequence
  Description of Artificial Sequence: Synthetic oligonucleotide
uuguuguauaaaacugucc

SEQ ID NO: 3249161 - RNA, 19 nt, Artificial Sequence
  Description of Artificial Sequence: Synthetic oligonucleotide
auuguuguauaaaacuguc

SEQ ID NO: 3249162 - RNA, 19 nt, Artificial Sequence
  Description of Artificial Sequence: Synthetic oligonucleotide
ucuagaaaauauauuuauu

SEQ ID NO: 3249163 - RNA, 19 nt, Artificial Sequence
  Description of Artificial Sequence: Synthetic oligonucleotide
uaugucuguacacaagcau

SEQ ID NO: 3249164 - RNA, 19 nt, Artificial Sequence
  Description of Artificial Sequence: Synthetic oligonucleotide
uguauguauauaugucugu

SEQ ID NO: 3249165 - RNA, 19 nt, Artificial Sequence
  Description of Artificial Sequence: Synthetic oligonucleotide
auuuaauguguaugggugu

SEQ ID NO: 3249166 - RNA, 19 nt, Artificial Sequence
  Description of Artificial Sequence: Synthetic oligonucleotide
guauaaaacuguccucuag

SEQ ID NO: 3249167 - RNA, 19 nt, Artificial Sequence
  Description of Artificial Sequence: Synthetic oligonucleotide
uguacacaagcaugcaaug

SEQ ID NO: 3249168 - RNA, 19 nt, Artificial Sequence
  Description of Artificial Sequence: Synthetic oligonucleotide
aggaacuggaguuacaguu

SEQ ID NO: 3249169 - RNA, 19 nt, Artificial Sequence
  Description of Artificial Sequence: Synthetic oligonucleotide
acagagacuuuauuguugu

SEQ ID NO: 3249170 - RNA, 19 nt, Artificial Sequence
  Description of Artificial Sequence: Synthetic oligonucleotide
auauuuauuuaauguguau

SEQ ID NO: 3249171 - RNA, 19 nt, Artificial Sequence
  Description of Artificial Sequence: Synthetic oligonucleotide
uacaguuugugagucacca

SEQ ID NO: 3249172 - RNA, 19 nt, Artificial Sequence
  Description of Artificial Sequence: Synthetic oligonucleotide
uaaaacuguccucuagaaa

SEQ ID NO: 3249173 - RNA, 19 nt, Artificial Sequence
  Description of Artificial Sequence: Synthetic oligonucleotide
auaaaacuguccucuagaa

SEQ ID NO: 3249174 - RNA, 19 nt, Artificial Sequence
  Description of Artificial Sequence: Synthetic oligonucleotide
gaacuggaguuacaguuug

SEQ ID NO: 3249175 - RNA, 19 nt, Artificial Sequence
  Description of Artificial Sequence: Synthetic oligonucleotide
caguuugugagucaccaug

SEQ ID NO: 3249176 - RNA, 19 nt, Artificial Sequence
  Description of Artificial Sequence: Synthetic oligonucleotide
cuagaaaauauauuuauuu

SEQ ID NO: 3249177 - RNA, 19 nt, Artificial Sequence
  Description of Artificial Sequence: Synthetic oligonucleotide
aauguguauggguguuuug

SEQ ID NO: 3249178 - RNA, 19 nt, Artificial Sequence
  Description of Artificial Sequence: Synthetic oligonucleotide
guuuuguauguauauaugu

SEQ ID NO: 3249179 - RNA, 19 nt, Artificial Sequence
  Description of Artificial Sequence: Synthetic oligonucleotide
ucuguacacaagcaugcaa

SEQ ID NO: 3249180 - RNA, 19 nt, Artificial Sequence
  Description of Artificial Sequence: Synthetic oligonucleotide
uaaauacagagacuuuauu

SEQ ID NO: 3249181 - RNA, 19 nt, Artificial Sequence
  Description of Artificial Sequence: Synthetic oligonucleotide
acacaagcaugcaaugccc

SEQ ID NO: 3249182 - RNA, 19 nt, Artificial Sequence
  Description of Artificial Sequence: Synthetic oligonucleotide
gaaaauauauuuauuuaau

SEQ ID NO: 3249183 - RNA, 19 nt, Artificial Sequence
  Description of Artificial Sequence: Synthetic oligonucleotide
guuguauaaaacuguccuc

SEQ ID NO: 3249184 - RNA, 19 nt, Artificial Sequence
  Description of Artificial Sequence: Synthetic oligonucleotide
guauauaugucuguacaca

SEQ ID NO: 3249185 - RNA, 19 nt, Artificial Sequence
  Description of Artificial Sequence: Synthetic oligonucleotide
agagacuuuauuguuguau

SEQ ID NO: 3249186 - RNA, 19 nt, Artificial Sequence
  Description of Artificial Sequence: Synthetic oligonucleotide
guuacaguuugugagucac

SEQ ID NO: 3249187 - RNA, 19 nt, Artificial Sequence
  Description of Artificial Sequence: Synthetic oligonucleotide
gagacuuuauuguuguaua

SEQ ID NO: 3249188 - RNA, 19 nt, Artificial Sequence
  Description of Artificial Sequence: Synthetic oligonucleotide
cuuaaauacagagacuuua

SEQ ID NO: 3249189 - RNA, 19 nt, Artificial Sequence
  Description of Artificial Sequence: Synthetic oligonucleotide
auauaugucuguacacaag

SEQ ID NO: 3249190 - RNA, 19 nt, Artificial Sequence
  Description of Artificial Sequence: Synthetic oligonucleotide
uuacaguuugugagucacc

SEQ ID NO: 3249191 - RNA, 19 nt, Artificial Sequence
  Description of Artificial Sequence: Synthetic oligonucleotide
augucuguacacaagcaug

SEQ ID NO: 3249192 - RNA, 19 nt, Artificial Sequence
  Description of Artificial Sequence: Synthetic oligonucleotide
acuggaguuacaguuugug

SEQ ID NO: 3249193 - RNA, 19 nt, Artificial Sequence
  Description of Artificial Sequence: Synthetic oligonucleotide
auguguauggguguuuugu

SEQ ID NO: 3249194 - RNA, 19 nt, Artificial Sequence
  Description of Artificial Sequence: Synthetic oligonucleotide
uguauaaaacuguccucua

SEQ ID NO: 3249195 - RNA, 19 nt, Artificial Sequence
  Description of Artificial Sequence: Synthetic oligonucleotide
agacuuuauuguuguauaa

SEQ ID NO: 3249196 - RNA, 19 nt, Artificial Sequence
  Description of Artificial Sequence: Synthetic oligonucleotide
uuuaauguguauggguguu

SEQ ID NO: 3249197 - RNA, 19 nt, Artificial Sequence
  Description of Artificial Sequence: Synthetic oligonucleotide
auacagagacuuuauuguu

SEQ ID NO: 3249198 - RNA, 19 nt, Artificial Sequence
  Description of Artificial Sequence: Synthetic oligonucleotide
uguguauggguguuuugua

SEQ ID NO: 3249199 - RNA, 19 nt, Artificial Sequence
  Description of Artificial Sequence: Synthetic oligonucleotide
ugccuuaaauacagagacu

SEQ ID NO: 3249200 - RNA, 19 nt, Artificial Sequence
  Description of Artificial Sequence: Synthetic oligonucleotide
gacuuuauuguuguauaaa

SEQ ID NO: 3249201 - RNA, 19 nt, Artificial Sequence
  Description of Artificial Sequence: Synthetic oligonucleotide
auggaggaacuggaguuac

SEQ ID NO: 3249202 - RNA, 19 nt, Artificial Sequence
  Description of Artificial Sequence: Synthetic oligonucleotide
ugcccauggaggaacugga

SEQ ID NO: 3249203 - RNA, 19 nt, Artificial Sequence
  Description of Artificial Sequence: Synthetic oligonucleotide
cucuagaaaauauauuuau

SEQ ID NO: 3249204 - RNA, 19 nt, Artificial Sequence
  Description of Artificial Sequence: Synthetic oligonucleotide
guacacaagcaugcaaugc

SEQ ID NO: 3249205 - RNA, 19 nt, Artificial Sequence
  Description of Artificial Sequence: Synthetic oligonucleotide
guguuuuguauguauauau

SEQ ID NO: 3249206 - RNA, 19 nt, Artificial Sequence
  Description of Artificial Sequence: Synthetic oligonucleotide
auggguguuuuguauguau

SEQ ID NO: 3249207 - RNA, 19 nt, Artificial Sequence
  Description of Artificial Sequence: Synthetic oligonucleotide
gcaugcaaugcccauggag

SEQ ID NO: 3249208 - RNA, 19 nt, Artificial Sequence
  Description of Artificial Sequence: Synthetic oligonucleotide
augcccauggaggaacugg

SEQ ID NO: 3249209 - RNA, 19 nt, Artificial Sequence
  Description of Artificial Sequence: Synthetic oligonucleotide
uggguguuuuguauguaua

SEQ ID NO: 3249210 - RNA, 19 nt, Artificial Sequence
  Description of Artificial Sequence: Synthetic oligonucleotide
augcaaugcccauggagga

SEQ ID NO: 3249211 - RNA, 19 nt, Artificial Sequence
  Description of Artificial Sequence: Synthetic oligonucleotide
aguuacaguuugugaguca

SEQ ID NO: 3249212 - RNA, 19 nt, Artificial Sequence
  Description of Artificial Sequence: Synthetic oligonucleotide
ggaggaacuggaguuacag

SEQ ID NO: 3249213 - RNA, 19 nt, Artificial Sequence
  Description of Artificial Sequence: Synthetic oligonucleotide
aaacuguccucuagaaaau

SEQ ID NO: 3249214 - RNA, 19 nt, Artificial Sequence
  Description of Artificial Sequence: Synthetic oligonucleotide
gaguuacaguuugugaguc

SEQ ID NO: 3249215 - RNA, 19 nt, Artificial Sequence
  Description of Artificial Sequence: Synthetic oligonucleotide
uaauguguauggguguuuu

SEQ ID NO: 3249216 - RNA, 19 nt, Artificial Sequence
  Description of Artificial Sequence: Synthetic oligonucleotide
auaugucuguacacaagca

SEQ ID NO: 3249217 - RNA, 19 nt, Artificial Sequence
  Description of Artificial Sequence: Synthetic oligonucleotide
auuuuguucaaacacaggc

SEQ ID NO: 3249218 - RNA, 19 nt, Artificial Sequence
  Description of Artificial Sequence: Synthetic oligonucleotide
auacauuuuguucaaacac

SEQ ID NO: 3249219 - RNA, 19 nt, Artificial Sequence
  Description of Artificial Sequence: Synthetic oligonucleotide
uuuguucaaacacaggcag

SEQ ID NO: 3249220 - RNA, 19 nt, Artificial Sequence
  Description of Artificial Sequence: Synthetic oligonucleotide
cuggaaagcacugaaaucg

SEQ ID NO: 3249221 - RNA, 19 nt, Artificial Sequence
  Description of Artificial Sequence: Synthetic oligonucleotide
uacagguagguucuggagg

SEQ ID NO: 3249222 - RNA, 19 nt, Artificial Sequence
  Description of Artificial Sequence: Synthetic oligonucleotide
ucauugggcacucggaagg

SEQ ID NO: 3249223 - RNA, 19 nt, Artificial Sequence
  Description of Artificial Sequence: Synthetic oligonucleotide
uacauuuuguucaaacaca

SEQ ID NO: 3249224 - RNA, 19 nt, Artificial Sequence
  Description of Artificial Sequence: Synthetic oligonucleotide
uuuuguucaaacacaggca

SEQ ID NO: 3249225 - RNA, 19 nt, Artificial Sequence
  Description of Artificial Sequence: Synthetic oligonucleotide
aaagcacugaaaucgugug

SEQ ID NO: 3249226 - RNA, 19 nt, Artificial Sequence
  Description of Artificial Sequence: Synthetic oligonucleotide
aaacacaggcagcugauca

SEQ ID NO: 3249227 - RNA, 19 nt, Artificial Sequence
  Description of Artificial Sequence: Synthetic oligonucleotide
agacgguacagguagguuc

SEQ ID NO: 3249228 - RNA, 19 nt, Artificial Sequence
  Description of Artificial Sequence: Synthetic oligonucleotide
gaagucauugggcacucgg

SEQ ID NO: 3249229 - RNA, 19 nt, Artificial Sequence
  Description of Artificial Sequence: Synthetic oligonucleotide
aaaucgugugucccgauga

SEQ ID NO: 3249230 - RNA, 19 nt, Artificial Sequence
  Description of Artificial Sequence: Synthetic oligonucleotide
uucaaacacaggcagcuga

SEQ ID NO: 3249231 - RNA, 19 nt, Artificial Sequence
  Description of Artificial Sequence: Synthetic oligonucleotide
acagccuguggccagacgg

SEQ ID NO: 3249232 - RNA, 19 nt, Artificial Sequence
  Description of Artificial Sequence: Synthetic oligonucleotide
ugcacggcgagcauggaag

SEQ ID NO: 3249233 - RNA, 19 nt, Artificial Sequence
  Description of Artificial Sequence: Synthetic oligonucleotide
auggcagccacauccaggg

SEQ ID NO: 3249234 - RNA, 19 nt, Artificial Sequence
  Description of Artificial Sequence: Synthetic oligonucleotide
gagcauggaagucauuggg

SEQ ID NO: 3249235 - RNA, 19 nt, Artificial Sequence
  Description of Artificial Sequence: Synthetic oligonucleotide
acugaaaucgugugucccg

SEQ ID NO: 3249236 - RNA, 19 nt, Artificial Sequence
  Description of Artificial Sequence: Synthetic oligonucleotide
acuggaaagcacugaaauc

SEQ ID NO: 3249237 - RNA, 19 nt, Artificial Sequence
  Description of Artificial Sequence: Synthetic oligonucleotide
agcugaucaggccagugac

SEQ ID NO: 3249238 - RNA, 19 nt, Artificial Sequence
  Description of Artificial Sequence: Synthetic oligonucleotide
aacacaggcagcugaucag

SEQ ID NO: 3249239 - RNA, 19 nt, Artificial Sequence
  Description of Artificial Sequence: Synthetic oligonucleotide
cugcauggcagccacaucc

SEQ ID NO: 3249240 - RNA, 19 nt, Artificial Sequence
  Description of Artificial Sequence: Synthetic oligonucleotide
gaucaggccagugacagcc

SEQ ID NO: 3249241 - RNA, 19 nt, Artificial Sequence
  Description of Artificial Sequence: Synthetic oligonucleotide
uguucaaacacaggcagcu

SEQ ID NO: 3249242 - RNA, 19 nt, Artificial Sequence
  Description of Artificial Sequence: Synthetic oligonucleotide
agcacugaaaucguguguc

SEQ ID NO: 3249243 - RNA, 19 nt, Artificial Sequence
  Description of Artificial Sequence: Synthetic oligonucleotide
acauuuuguucaaacacag

SEQ ID NO: 3249244 - RNA, 19 nt, Artificial Sequence
  Description of Artificial Sequence: Synthetic oligonucleotide
acauccagggacuuugucu

SEQ ID NO: 3249245 - RNA, 19 nt, Artificial Sequence
  Description of Artificial Sequence: Synthetic oligonucleotide
cauccagggacuuugucug

SEQ ID NO: 3249246 - RNA, 19 nt, Artificial Sequence
  Description of Artificial Sequence: Synthetic oligonucleotide
cauacauuuuguucaaaca

SEQ ID NO: 3249247 - RNA, 19 nt, Artificial Sequence
  Description of Artificial Sequence: Synthetic oligonucleotide
ucgugugucccgaugaggu

SEQ ID NO: 3249248 - RNA, 19 nt, Artificial Sequence
  Description of Artificial Sequence: Synthetic oligonucleotide
aaucgugugucccgaugag

SEQ ID NO: 3249249 - RNA, 19 nt, Artificial Sequence
  Description of Artificial Sequence: Synthetic oligonucleotide
cauuuuguucaaacacagg

SEQ ID NO: 3249250 - RNA, 19 nt, Artificial Sequence
  Description of Artificial Sequence: Synthetic oligonucleotide
agcauggaagucauugggc

SEQ ID NO: 3249251 - RNA, 19 nt, Artificial Sequence
  Description of Artificial Sequence: Synthetic oligonucleotide
gagcccagcauacauuuug

SEQ ID NO: 3249252 - RNA, 19 nt, Artificial Sequence
  Description of Artificial Sequence: Synthetic oligonucleotide
aguacuuguggcugggcug

SEQ ID NO: 3249253 - RNA, 19 nt, Artificial Sequence
  Description of Artificial Sequence: Synthetic oligonucleotide
acagguagguucuggaggu

SEQ ID NO: 3249254 - RNA, 19 nt, Artificial Sequence
  Description of Artificial Sequence: Synthetic oligonucleotide
acaggcagcugaucaggcc

SEQ ID NO: 3249255 - RNA, 19 nt, Artificial Sequence
  Description of Artificial Sequence: Synthetic oligonucleotide
ugggcugccagcagacugg

SEQ ID NO: 3249256 - RNA, 19 nt, Artificial Sequence
  Description of Artificial Sequence: Synthetic oligonucleotide
ucugcagagcccagcauac

SEQ ID NO: 3249257 - RNA, 19 nt, Artificial Sequence
  Description of Artificial Sequence: Synthetic oligonucleotide
uuguucaaacacaggcagc

SEQ ID NO: 3249258 - RNA, 19 nt, Artificial Sequence
  Description of Artificial Sequence: Synthetic oligonucleotide
agggacuuugucugcagag

SEQ ID NO: 3249259 - RNA, 19 nt, Artificial Sequence
  Description of Artificial Sequence: Synthetic oligonucleotide
uucuggagguggcugcacg

SEQ ID NO: 3249260 - RNA, 19 nt, Artificial Sequence
  Description of Artificial Sequence: Synthetic oligonucleotide
ugggcagccuccugcaugg

SEQ ID NO: 3249261 - RNA, 19 nt, Artificial Sequence
  Description of Artificial Sequence: Synthetic oligonucleotide
ucuggagguggcugcacgg

SEQ ID NO: 3249262 - RNA, 19 nt, Artificial Sequence
  Description of Artificial Sequence: Synthetic oligonucleotide
agguucuggagguggcugc

SEQ ID NO: 3249263 - RNA, 19 nt, Artificial Sequence
  Description of Artificial Sequence: Synthetic oligonucleotide
gaaaucgugugucccgaug

SEQ ID NO: 3249264 - RNA, 19 nt, Artificial Sequence
  Description of Artificial Sequence: Synthetic oligonucleotide
aagcacugaaaucgugugu

SEQ ID NO: 3249265 - RNA, 19 nt, Artificial Sequence
  Description of Artificial Sequence: Synthetic oligonucleotide
cauggcagccacauccagg

SEQ ID NO: 3249266 - RNA, 19 nt, Artificial Sequence
  Description of Artificial Sequence: Synthetic oligonucleotide
uugucugcagagcccagca

SEQ ID NO: 3249267 - RNA, 19 nt, Artificial Sequence
  Description of Artificial Sequence: Synthetic oligonucleotide
uggaaagcacugaaaucgu

SEQ ID NO: 3249268 - RNA, 19 nt, Artificial Sequence
  Description of Artificial Sequence: Synthetic oligonucleotide
cugaucaggccagugacag

SEQ ID NO: 3249269 - RNA, 19 nt, Artificial Sequence
  Description of Artificial Sequence: Synthetic oligonucleotide
ucaaacacaggcagcugau

SEQ ID NO: 3249270 - RNA, 19 nt, Artificial Sequence
  Description of Artificial Sequence: Synthetic oligonucleotide
guacagguagguucuggag

SEQ ID NO: 3249271 - RNA, 19 nt, Artificial Sequence
  Description of Artificial Sequence: Synthetic oligonucleotide
uggagguggcugcacggcg

SEQ ID NO: 3249272 - RNA, 19 nt, Artificial Sequence
  Description of Artificial Sequence: Synthetic oligonucleotide
acucggaaggccuucagua

SEQ ID NO: 3249273 - RNA, 19 nt, Artificial Sequence
  Description of Artificial Sequence: Synthetic oligonucleotide
gucauugggcacucggaag

SEQ ID NO: 3249274 - RNA, 19 nt, Artificial Sequence
  Description of Artificial Sequence: Synthetic oligonucleotide
ugcagagcccagcauacau

SEQ ID NO: 3249275 - RNA, 19 nt, Artificial Sequence
  Description of Artificial Sequence: Synthetic oligonucleotide
cugccagcagacuggaaag

SEQ ID NO: 3249276 - RNA, 19 nt, Artificial Sequence
  Description of Artificial Sequence: Synthetic oligonucleotide
agucauugggcacucggaa

SEQ ID NO: 3249277 - RNA, 19 nt, Artificial Sequence
  Description of Artificial Sequence: Synthetic oligonucleotide
gcauacauuuuguucaaac

SEQ ID NO: 3249278 - RNA, 19 nt, Artificial Sequence
  Description of Artificial Sequence: Synthetic oligonucleotide
gacuggaaagcacugaaau

SEQ ID NO: 3249279 - RNA, 19 nt, Artificial Sequence
  Description of Artificial Sequence: Synthetic oligonucleotide
cauggaagucauugggcac

SEQ ID NO: 3249280 - RNA, 19 nt, Artificial Sequence
  Description of Artificial Sequence: Synthetic oligonucleotide
ccagcauacauuuuguuca

SEQ ID NO: 3249281 - RNA, 19 nt, Artificial Sequence
  Description of Artificial Sequence: Synthetic oligonucleotide
ggccagacgguacagguag

SEQ ID NO: 3249282 - RNA, 19 nt, Artificial Sequence
  Description of Artificial Sequence: Synthetic oligonucleotide
ggacuuugucugcagagcc

SEQ ID NO: 3249283 - RNA, 19 nt, Artificial Sequence
  Description of Artificial Sequence: Synthetic oligonucleotide
acacaggcagcugaucagg

SEQ ID NO: 3249284 - RNA, 19 nt, Artificial Sequence
  Description of Artificial Sequence: Synthetic oligonucleotide
uugggcacucggaaggccu

SEQ ID NO: 3249285 - RNA, 19 nt, Artificial Sequence
  Description of Artificial Sequence: Synthetic oligonucleotide
ugaggugcugggcagccuc

SEQ ID NO: 3249286 - RNA, 19 nt, Artificial Sequence
  Description of Artificial Sequence: Synthetic oligonucleotide
agugacagccuguggccag

SEQ ID NO: 3249287 - RNA, 19 nt, Artificial Sequence
  Description of Artificial Sequence: Synthetic oligonucleotide
agguagguucuggaggugg

SEQ ID NO: 3249288 - RNA, 19 nt, Artificial Sequence
  Description of Artificial Sequence: Synthetic oligonucleotide
ugcauggcagccacaucca

SEQ ID NO: 3249289 - RNA, 19 nt, Artificial Sequence
  Description of Artificial Sequence: Synthetic oligonucleotide
uuugucugcagagcccagc

SEQ ID NO: 3249290 - RNA, 19 nt, Artificial Sequence
  Description of Artificial Sequence: Synthetic oligonucleotide
ugucccgaugaggugcugg

SEQ ID NO: 3249291 - RNA, 19 nt, Artificial Sequence
  Description of Artificial Sequence: Synthetic oligonucleotide
acuuugucugcagagccca

SEQ ID NO: 3249292 - RNA, 19 nt, Artificial Sequence
  Description of Artificial Sequence: Synthetic oligonucleotide
auccagggacuuugucugc

SEQ ID NO: 3249293 - RNA, 19 nt, Artificial Sequence
  Description of Artificial Sequence: Synthetic oligonucleotide
auugggcacucggaaggcc

SEQ ID NO: 3249294 - RNA, 19 nt, Artificial Sequence
  Description of Artificial Sequence: Synthetic oligonucleotide
auggaagucauugggcacu

SEQ ID NO: 3249295 - RNA, 19 nt, Artificial Sequence
  Description of Artificial Sequence: Synthetic oligonucleotide
gaaagcacugaaaucgugu

SEQ ID NO: 3249296 - RNA, 19 nt, Artificial Sequence
  Description of Artificial Sequence: Synthetic oligonucleotide
gccagugacagccuguggc

SEQ ID NO: 3249297 - RNA, 19 nt, Artificial Sequence
  Description of Artificial Sequence: Synthetic oligonucleotide
aagucauugggcacucgga

SEQ ID NO: 3249298 - RNA, 19 nt, Artificial Sequence
  Description of Artificial Sequence: Synthetic oligonucleotide
ucaggccagugacagccug

SEQ ID NO: 3249299 - RNA, 19 nt, Artificial Sequence
  Description of Artificial Sequence: Synthetic oligonucleotide
cucggaaggccuucaguac

SEQ ID NO: 3249300 - RNA, 19 nt, Artificial Sequence
  Description of Artificial Sequence: Synthetic oligonucleotide
cacugaaaucguguguccc

SEQ ID NO: 3249301 - RNA, 19 nt, Artificial Sequence
  Description of Artificial Sequence: Synthetic oligonucleotide
gacuuugucugcagagccc

SEQ ID NO: 3249302 - RNA, 19 nt, Artificial Sequence
  Description of Artificial Sequence: Synthetic oligonucleotide
gucccgaugaggugcuggg

SEQ ID NO: 3249303 - RNA, 19 nt, Artificial Sequence
  Description of Artificial Sequence: Synthetic oligonucleotide
uguggccagacgguacagg

SEQ ID NO: 3249304 - RNA, 19 nt, Artificial Sequence
  Description of Artificial Sequence: Synthetic oligonucleotide
guacuuguggcugggcugc

SEQ ID NO: 3249305 - RNA, 19 nt, Artificial Sequence
  Description of Artificial Sequence: Synthetic oligonucleotide
cuuguggcugggcugccag

SEQ ID NO: 3249306 - RNA, 19 nt, Artificial Sequence
  Description of Artificial Sequence: Synthetic oligonucleotide
uagguucuggagguggcug

SEQ ID NO: 3249307 - RNA, 19 nt, Artificial Sequence
  Description of Artificial Sequence: Synthetic oligonucleotide
gugugucccgaugaggugc

SEQ ID NO: 3249308 - RNA, 19 nt, Artificial Sequence
  Description of Artificial Sequence: Synthetic oligonucleotide
aucgugugucccgaugagg

SEQ ID NO: 3249309 - RNA, 19 nt, Artificial Sequence
  Description of Artificial Sequence: Synthetic oligonucleotide
ugugucccgaugaggugcu

SEQ ID NO: 3249310 - RNA, 19 nt, Artificial Sequence
  Description of Artificial Sequence: Synthetic oligonucleotide
gaugaggugcugggcagcc

SEQ ID NO: 3249311 - RNA, 19 nt, Artificial Sequence
  Description of Artificial Sequence: Synthetic oligonucleotide
uguggcugggcugccagca

SEQ ID NO: 3249312 - RNA, 19 nt, Artificial Sequence
  Description of Artificial Sequence: Synthetic oligonucleotide
gcauggaagucauugggca

SEQ ID NO: 3249313 - RNA, 19 nt, Artificial Sequence
  Description of Artificial Sequence: Synthetic oligonucleotide
cugggcugccagcagacug

SEQ ID NO: 3249314 - RNA, 19 nt, Artificial Sequence
  Description of Artificial Sequence: Synthetic oligonucleotide
gcgagcauggaagucauug

SEQ ID NO: 3249315 - RNA, 19 nt, Artificial Sequence
  Description of Artificial Sequence: Synthetic oligonucleotide
cacaggcagcugaucaggc

SEQ ID NO: 3249316 - RNA, 19 nt, Artificial Sequence
  Description of Artificial Sequence: Synthetic oligonucleotide
acaguacuuguggcugggc

SEQ ID NO: 3249317 - RNA, 19 nt, Artificial Sequence
  Description of Artificial Sequence: Synthetic oligonucleotide
auuaauggcucucacaucc

SEQ ID NO: 3249318 - RNA, 19 nt, Artificial Sequence
  Description of Artificial Sequence: Synthetic oligonucleotide
aaucuuaggagagagaagg

SEQ ID NO: 3249319 - RNA, 19 nt, Artificial Sequence
  Description of Artificial Sequence: Synthetic oligonucleotide
cagauuuuauauuaggugg

SEQ ID NO: 3249320 - RNA, 19 nt, Artificial Sequence
  Description of Artificial Sequence: Synthetic oligonucleotide
aaauucugaaucuuaggag

SEQ ID NO: 3249321 - RNA, 19 nt, Artificial Sequence
  Description of Artificial Sequence: Synthetic oligonucleotide
ucuaggaccauuuuguugc

SEQ ID NO: 3249322 - RNA, 19 nt, Artificial Sequence
  Description of Artificial Sequence: Synthetic oligonucleotide
accucuaugguuuuggugg

SEQ ID NO: 3249323 - RNA, 19 nt, Artificial Sequence
  Description of Artificial Sequence: Synthetic oligonucleotide
agaaauccaacccaccagc

SEQ ID NO: 3249324 - RNA, 19 nt, Artificial Sequence
  Description of Artificial Sequence: Synthetic oligonucleotide
uuuuauauuagguggagaa

SEQ ID NO: 3249325 - RNA, 19 nt, Artificial Sequence
  Description of Artificial Sequence: Synthetic oligonucleotide
uggaguauuuccaagaaaa

SEQ ID NO: 3249326 - RNA, 19 nt, Artificial Sequence
  Description of Artificial Sequence: Synthetic oligonucleotide
gucguaagcagucaggugg

SEQ ID NO: 3249327 - RNA, 19 nt, Artificial Sequence
  Description of Artificial Sequence: Synthetic oligonucleotide
ucuguccccacauuaaugg

SEQ ID NO: 3249328 - RNA, 19 nt, Artificial Sequence
  Description of Artificial Sequence: Synthetic oligonucleotide
guaacugacaaucacagca

SEQ ID NO: 3249329 - RNA, 19 nt, Artificial Sequence
  Description of Artificial Sequence: Synthetic oligonucleotide
aaugacgaugacaugaaag

SEQ ID NO: 3249330 - RNA, 19 nt, Artificial Sequence
  Description of Artificial Sequence: Synthetic oligonucleotide
agcaaacagaaauccaacc

SEQ ID NO: 3249331 - RNA, 19 nt, Artificial Sequence
  Description of Artificial Sequence: Synthetic oligonucleotide
ucugccaauuccaugagug

SEQ ID NO: 3249332 - RNA, 19 nt, Artificial Sequence
  Description of Artificial Sequence: Synthetic oligonucleotide
aguauuuccaagaaaaucu

SEQ ID NO: 3249333 - RNA, 19 nt, Artificial Sequence
  Description of Artificial Sequence: Synthetic oligonucleotide
ugucugaccacgcagggag

SEQ ID NO: 3249334 - RNA, 19 nt, Artificial Sequence
  Description of Artificial Sequence: Synthetic oligonucleotide
uuuguaucugccaauucca

SEQ ID NO: 3249335 - RNA, 19 nt, Artificial Sequence
  Description of Artificial Sequence: Synthetic oligonucleotide
aaaucucugcaaauguggc

SEQ ID NO: 3249336 - RNA, 19 nt, Artificial Sequence
  Description of Artificial Sequence: Synthetic oligonucleotide
agugguaacugacaaucac

SEQ ID NO: 3249337 - RNA, 19 nt, Artificial Sequence
  Description of Artificial Sequence: Synthetic oligonucleotide
aacagcagauuuuauauua

SEQ ID NO: 3249338 - RNA, 19 nt, Artificial Sequence
  Description of Artificial Sequence: Synthetic oligonucleotide
aagaaaaucucugcaaaug

SEQ ID NO: 3249339 - RNA, 19 nt, Artificial Sequence
  Description of Artificial Sequence: Synthetic oligonucleotide
acauuaauggcucucacau

SEQ ID NO: 3249340 - RNA, 19 nt, Artificial Sequence
  Description of Artificial Sequence: Synthetic oligonucleotide
aacgguaucuuuccacagg

SEQ ID NO: 3249341 - RNA, 19 nt, Artificial Sequence
  Description of Artificial Sequence: Synthetic oligonucleotide
acgguaucuuuccacaggc

SEQ ID NO: 3249342 - RNA, 19 nt, Artificial Sequence
  Description of Artificial Sequence: Synthetic oligonucleotide
auugcgcuggaguauuucc

SEQ ID NO: 3249343 - RNA, 19 nt, Artificial Sequence
  Description of Artificial Sequence: Synthetic oligonucleotide
agccgcaucaccucuaugg

SEQ ID NO: 3249344 - RNA, 19 nt, Artificial Sequence
  Description of Artificial Sequence: Synthetic oligonucleotide
agguggauauuuaagacac

SEQ ID NO: 3249345 - RNA, 19 nt, Artificial Sequence
  Description of Artificial Sequence: Synthetic oligonucleotide
uauauuagguggagaauac

SEQ ID NO: 3249346 - RNA, 19 nt, Artificial Sequence
  Description of Artificial Sequence: Synthetic oligonucleotide
agaaaaucucugcaaaugu

SEQ ID NO: 3249347 - RNA, 19 nt, Artificial Sequence
  Description of Artificial Sequence: Synthetic oligonucleotide
aagguuaagugguaacuga

SEQ ID NO: 3249348 - RNA, 19 nt, Artificial Sequence
  Description of Artificial Sequence: Synthetic oligonucleotide
uucugccagagucaugucg

SEQ ID NO: 3249349 - RNA, 19 nt, Artificial Sequence
  Description of Artificial Sequence: Synthetic oligonucleotide
augucacagacucuggagg

SEQ ID NO: 3249350 - RNA, 19 nt, Artificial Sequence
  Description of Artificial Sequence: Synthetic oligonucleotide
uuauauuagguggagaaua

SEQ ID NO: 3249351 - RNA, 19 nt, Artificial Sequence
  Description of Artificial Sequence: Synthetic oligonucleotide
ucauucuugguuacugcag

SEQ ID NO: 3249352 - RNA, 19 nt, Artificial Sequence
  Description of Artificial Sequence: Synthetic oligonucleotide
agagagaaggcuugcuugg

SEQ ID NO: 3249353 - RNA, 19 nt, Artificial Sequence
  Description of Artificial Sequence: Synthetic oligonucleotide
auucuuccaguucuggccg

SEQ ID NO: 3249354 - RNA, 19 nt, Artificial Sequence
  Description of Artificial Sequence: Synthetic oligonucleotide
uuuaagguuaagugguaac

SEQ ID NO: 3249355 - RNA, 19 nt, Artificial Sequence
  Description of Artificial Sequence: Synthetic oligonucleotide
uggagaauaccccagguuu

SEQ ID NO: 3249356 - RNA, 19 nt, Artificial Sequence
  Description of Artificial Sequence: Synthetic oligonucleotide
ucagcagaauaccaccugc

SEQ ID NO: 3249357 - RNA, 19 nt, Artificial Sequence
  Description of Artificial Sequence: Synthetic oligonucleotide
uauuuaagacaccguauuc

SEQ ID NO: 3249358 - RNA, 19 nt, Artificial Sequence
  Description of Artificial Sequence: Synthetic oligonucleotide
ugcuuucuucuucugaggc

SEQ ID NO: 3249359 - RNA, 19 nt, Artificial Sequence
  Description of Artificial Sequence: Synthetic oligonucleotide
ucugguagccgcaucaccu

SEQ ID NO: 3249360 - RNA, 19 nt, Artificial Sequence
  Description of Artificial Sequence: Synthetic oligonucleotide
guaucugccaauuccauga

SEQ ID NO: 3249361 - RNA, 19 nt, Artificial Sequence
  Description of Artificial Sequence: Synthetic oligonucleotide
gagaaugacgaugacauga

SEQ ID NO: 3249362 - RNA, 19 nt, Artificial Sequence
  Description of Artificial Sequence: Synthetic oligonucleotide
auauuuaagacaccguauu

SEQ ID NO: 3249363 - RNA, 19 nt, Artificial Sequence
  Description of Artificial Sequence: Synthetic oligonucleotide
uuaagguuaagugguaacu

SEQ ID NO: 3249364 - RNA, 19 nt, Artificial Sequence
  Description of Artificial Sequence: Synthetic oligonucleotide
uuggaaacgguaucuuucc

SEQ ID NO: 3249365 - RNA, 19 nt, Artificial Sequence
  Description of Artificial Sequence: Synthetic oligonucleotide
aaguguuuguaucugccaa

SEQ ID NO: 3249366 - RNA, 19 nt, Artificial Sequence
  Description of Artificial Sequence: Synthetic oligonucleotide
cuaugucugaccacgcagg

SEQ ID NO: 3249367 - RNA, 19 nt, Artificial Sequence
  Description of Artificial Sequence: Synthetic oligonucleotide
uuuaagacaccguauucau

SEQ ID NO: 3249368 - RNA, 19 nt, Artificial Sequence
  Description of Artificial Sequence: Synthetic oligonucleotide
uaugucugaccacgcaggg

SEQ ID NO: 3249369 - RNA, 19 nt, Artificial Sequence
  Description of Artificial Sequence: Synthetic oligonucleotide
ucucggagaaugacgauga

SEQ ID NO: 3249370 - RNA, 19 nt, Artificial Sequence
  Description of Artificial Sequence: Synthetic oligonucleotide
guuacugcagcuucugagc

SEQ ID NO: 3249371 - RNA, 19 nt, Artificial Sequence
  Description of Artificial Sequence: Synthetic oligonucleotide
aacagaaauccaacccacc

SEQ ID NO: 3249372 - RNA, 19 nt, Artificial Sequence
  Description of Artificial Sequence: Synthetic oligonucleotide
aaacgguaucuuuccacag

SEQ ID NO: 3249373 - RNA, 19 nt, Artificial Sequence
  Description of Artificial Sequence: Synthetic oligonucleotide
auuuaagacaccguauuca

SEQ ID NO: 3249374 - RNA, 19 nt, Artificial Sequence
  Description of Artificial Sequence: Synthetic oligonucleotide
aaggcuugcuuggaaacgg

SEQ ID NO: 3249375 - RNA, 19 nt, Artificial Sequence
  Description of Artificial Sequence: Synthetic oligonucleotide
uucauaaucuguccccaca

SEQ ID NO: 3249376 - RNA, 19 nt, Artificial Sequence
  Description of Artificial Sequence: Synthetic oligonucleotide
accaaguguuuguaucugc

SEQ ID NO: 3249377 - RNA, 19 nt, Artificial Sequence
  Description of Artificial Sequence: Synthetic oligonucleotide
aauggcucucacauccacc

SEQ ID NO: 3249378 - RNA, 19 nt, Artificial Sequence
  Description of Artificial Sequence: Synthetic oligonucleotide
gauuuuauauuagguggag

SEQ ID NO: 3249379 - RNA, 19 nt, Artificial Sequence
  Description of Artificial Sequence: Synthetic oligonucleotide
ucauucuccugcuaugucu

SEQ ID NO: 3249380 - RNA, 19 nt, Artificial Sequence
  Description of Artificial Sequence: Synthetic oligonucleotide
ucaacuuggccaacaauuc

SEQ ID NO: 3249381 - RNA, 19 nt, Artificial Sequence
  Description of Artificial Sequence: Synthetic oligonucleotide
gacgaugacaugaaagggc

SEQ ID NO: 3249382 - RNA, 19 nt, Artificial Sequence
  Description of Artificial Sequence: Synthetic oligonucleotide
ucuggccgagcuuugaacc

SEQ ID NO: 3249383 - RNA, 19 nt, Artificial Sequence
  Description of Artificial Sequence: Synthetic oligonucleotide
gcagauuuuauauuaggug

SEQ ID NO: 3249384 - RNA, 19 nt, Artificial Sequence
  Description of Artificial Sequence: Synthetic oligonucleotide
uuugaaccuucccuugaag

SEQ ID NO: 3249385 - RNA, 19 nt, Artificial Sequence
  Description of Artificial Sequence: Synthetic oligonucleotide
auauuagguggagaauacc

SEQ ID NO: 3249386 - RNA, 19 nt, Artificial Sequence
  Description of Artificial Sequence: Synthetic oligonucleotide
ugccaauuccaugaguggg

SEQ ID NO: 3249387 - RNA, 19 nt, Artificial Sequence
  Description of Artificial Sequence: Synthetic oligonucleotide
uccaagaaaaucucugcaa

SEQ ID NO: 3249388 - RNA, 19 nt, Artificial Sequence
  Description of Artificial Sequence: Synthetic oligonucleotide
aaucacagcaugucacaga

SEQ ID NO: 3249389 - RNA, 19 nt, Artificial Sequence
  Description of Artificial Sequence: Synthetic oligonucleotide
uucaccaaguguuuguauc

SEQ ID NO: 3249390 - RNA, 19 nt, Artificial Sequence
  Description of Artificial Sequence: Synthetic oligonucleotide
uugaaccuucccuugaagu

SEQ ID NO: 3249391 - RNA, 19 nt, Artificial Sequence
  Description of Artificial Sequence: Synthetic oligonucleotide
aaauccaacccaccagcca

SEQ ID NO: 3249392 - RNA, 19 nt, Artificial Sequence
  Description of Artificial Sequence: Synthetic oligonucleotide
aacugacaaucacagcaug

SEQ ID NO: 3249393 - RNA, 19 nt, Artificial Sequence
  Description of Artificial Sequence: Synthetic oligonucleotide
ucuagcacuuucaccaagu

SEQ ID NO: 3249394 - RNA, 19 nt, Artificial Sequence
  Description of Artificial Sequence: Synthetic oligonucleotide
gaguauuuccaagaaaauc

SEQ ID NO: 3249395 - RNA, 19 nt, Artificial Sequence
  Description of Artificial Sequence: Synthetic oligonucleotide
ugaaccuucccuugaaguc

SEQ ID NO: 3249396 - RNA, 19 nt, Artificial Sequence
  Description of Artificial Sequence: Synthetic oligonucleotide
ugucacagacucuggaggc

SEQ ID NO: 3249397 - RNA, 19 nt, Artificial Sequence
  Description of Artificial Sequence: Synthetic oligonucleotide
cagaccgcugaucugaacc

SEQ ID NO: 3249398 - RNA, 19 nt, Artificial Sequence
  Description of Artificial Sequence: Synthetic oligonucleotide
caacccaccagccacgacc

SEQ ID NO: 3249399 - RNA, 19 nt, Artificial Sequence
  Description of Artificial Sequence: Synthetic oligonucleotide
cauucuugguuacugcagc

SEQ ID NO: 3249400 - RNA, 19 nt, Artificial Sequence
  Description of Artificial Sequence: Synthetic oligonucleotide
auuuuguugccuuggucug

SEQ ID NO: 3249401 - RNA, 19 nt, Artificial Sequence
  Description of Artificial Sequence: Synthetic oligonucleotide
uuggccaacaauucuucca

SEQ ID NO: 3249402 - RNA, 19 nt, Artificial Sequence
  Description of Artificial Sequence: Synthetic oligonucleotide
caugucacagacucuggag

SEQ ID NO: 3249403 - RNA, 19 nt, Artificial Sequence
  Description of Artificial Sequence: Synthetic oligonucleotide
accguauucauaaucuguc

SEQ ID NO: 3249404 - RNA, 19 nt, Artificial Sequence
  Description of Artificial Sequence: Synthetic oligonucleotide
auucauaaucuguccccac

SEQ ID NO: 3249405 - RNA, 19 nt, Artificial Sequence
  Description of Artificial Sequence: Synthetic oligonucleotide
ugaaccacucgcucauggg

SEQ ID NO: 3249406 - RNA, 19 nt, Artificial Sequence
  Description of Artificial Sequence: Synthetic oligonucleotide
gcaaauguggcacucagac

SEQ ID NO: 3249407 - RNA, 19 nt, Artificial Sequence
  Description of Artificial Sequence: Synthetic oligonucleotide
ucaccaaguguuuguaucu

SEQ ID NO: 3249408 - RNA, 19 nt, Artificial Sequence
  Description of Artificial Sequence: Synthetic oligonucleotide
gguaucuuuccacaggccc

SEQ ID NO: 3249409 - RNA, 19 nt, Artificial Sequence
  Description of Artificial Sequence: Synthetic oligonucleotide
uccucuacuuugauggaga

SEQ ID NO: 3249410 - RNA, 19 nt, Artificial Sequence
  Description of Artificial Sequence: Synthetic oligonucleotide
uuacugcagcuucugagca

SEQ ID NO: 3249411 - RNA, 19 nt, Artificial Sequence
  Description of Artificial Sequence: Synthetic oligonucleotide
agcacuuucaccaaguguu

SEQ ID NO: 3249412 - RNA, 19 nt, Artificial Sequence
  Description of Artificial Sequence: Synthetic oligonucleotide
gucagguggauauuuaaga

SEQ ID NO: 3249413 - RNA, 19 nt, Artificial Sequence
  Description of Artificial Sequence: Synthetic oligonucleotide
aauuccaugagugggcuuu

SEQ ID NO: 3249414 - RNA, 19 nt, Artificial Sequence
  Description of Artificial Sequence: Synthetic oligonucleotide
gacaaucacagcaugucac

SEQ ID NO: 3249415 - RNA, 19 nt, Artificial Sequence
  Description of Artificial Sequence: Synthetic oligonucleotide
uaaucuguccccacauuaa

SEQ ID NO: 3249416 - RNA, 19 nt, Artificial Sequence
  Description of Artificial Sequence: Synthetic oligonucleotide
ugcucccucacugacaacc

SEQ ID NO: 3249417 - RNA, 19 nt, Artificial Sequence
  Description of Artificial Sequence: Synthetic oligonucleotide
aauuucauguucuuuaucg

SEQ ID NO: 3249418 - RNA, 19 nt, Artificial Sequence
  Description of Artificial Sequence: Synthetic oligonucleotide
aaggaaggaauccagagcc

SEQ ID NO: 3249419 - RNA, 19 nt, Artificial Sequence
  Description of Artificial Sequence: Synthetic oligonucleotide
aagguuugcagacucaugc

SEQ ID NO: 3249420 - RNA, 19 nt, Artificial Sequence
  Description of Artificial Sequence: Synthetic oligonucleotide
uaaaacagcauacugagca

SEQ ID NO: 3249421 - RNA, 19 nt, Artificial Sequence
  Description of Artificial Sequence: Synthetic oligonucleotide
ucagcaaagaggcugaacc

SEQ ID NO: 3249422 - RNA, 19 nt, Artificial Sequence
  Description of Artificial Sequence: Synthetic oligonucleotide
uaaaaguugugaaggaagg

SEQ ID NO: 3249423 - RNA, 19 nt, Artificial Sequence
  Description of Artificial Sequence: Synthetic oligonucleotide
gaauccagagccuagcugg

SEQ ID NO: 3249424 - RNA, 19 nt, Artificial Sequence
  Description of Artificial Sequence: Synthetic oligonucleotide
ucauguuuuggucuaaaag

SEQ ID NO: 3249425 - RNA, 19 nt, Artificial Sequence
  Description of Artificial Sequence: Synthetic oligonucleotide
aaguuagacuucugcaagc

SEQ ID NO: 3249426 - RNA, 19 nt, Artificial Sequence
  Description of Artificial Sequence: Synthetic oligonucleotide
cuaaaaguugugaaggaag

SEQ ID NO: 3249427 - RNA, 19 nt, Artificial Sequence
  Description of Artificial Sequence: Synthetic oligonucleotide
uuucccaacagcaucagga

SEQ ID NO: 3249428 - RNA, 19 nt, Artificial Sequence
  Description of Artificial Sequence: Synthetic oligonucleotide
gaagaucucauucaacagc

SEQ ID NO: 3249429 - RNA, 19 nt, Artificial Sequence
  Description of Artificial Sequence: Synthetic oligonucleotide
ucaggauuugauaaggggu

SEQ ID NO: 3249430 - RNA, 19 nt, Artificial Sequence
  Description of Artificial Sequence: Synthetic oligonucleotide
uuugauaaggggucgaggu

SEQ ID NO: 3249431 - RNA, 19 nt, Artificial Sequence
  Description of Artificial Sequence: Synthetic oligonucleotide
ucgaggucagcaaagaggc

SEQ ID NO: 3249432 - RNA, 19 nt, Artificial Sequence
  Description of Artificial Sequence: Synthetic oligonucleotide
aagaggcugaaccaggcag

SEQ ID NO: 3249433 - RNA, 19 nt, Artificial Sequence
  Description of Artificial Sequence: Synthetic oligonucleotide
ugaaggaaggaauccagag

SEQ ID NO: 3249434 - RNA, 19 nt, Artificial Sequence
  Description of Artificial Sequence: Synthetic oligonucleotide
aucaggauuugauaagggg

SEQ ID NO: 3249435 - RNA, 19 nt, Artificial Sequence
  Description of Artificial Sequence: Synthetic oligonucleotide
ucggucaucuccaaacacg

SEQ ID NO: 3249436 - RNA, 19 nt, Artificial Sequence
  Description of Artificial Sequence: Synthetic oligonucleotide
gaaccaggcagucaggucc

SEQ ID NO: 3249437 - RNA, 19 nt, Artificial Sequence
  Description of Artificial Sequence: Synthetic oligonucleotide
uuagacuucugcaagcccu

SEQ ID NO: 3249438 - RNA, 19 nt, Artificial Sequence
  Description of Artificial Sequence: Synthetic oligonucleotide
ugugaaggaaggaauccag

SEQ ID NO: 3249439 - RNA, 19 nt, Artificial Sequence
  Description of Artificial Sequence: Synthetic oligonucleotide
auuucauguucuuuaucgg

SEQ ID NO: 3249440 - RNA, 19 nt, Artificial Sequence
  Description of Artificial Sequence: Synthetic oligonucleotide
agaucuuucauguuuuggu

SEQ ID NO: 3249441 - RNA, 19 nt, Artificial Sequence
  Description of Artificial Sequence: Synthetic oligonucleotide
aacacggcagcccacucuc

SEQ ID NO: 3249442 - RNA, 19 nt, Artificial Sequence
  Description of Artificial Sequence: Synthetic oligonucleotide
aacucuccuucauccaggc

SEQ ID NO: 3249443 - RNA, 19 nt, Artificial Sequence
  Description of Artificial Sequence: Synthetic oligonucleotide
ucauucaacagcagcaggu

SEQ ID NO: 3249444 - RNA, 19 nt, Artificial Sequence
  Description of Artificial Sequence: Synthetic oligonucleotide
ugaagaucucauucaacag

SEQ ID NO: 3249445 - RNA, 19 nt, Artificial Sequence
  Description of Artificial Sequence: Synthetic oligonucleotide
uggucuaaaaguugugaag

SEQ ID NO: 3249446 - RNA, 19 nt, Artificial Sequence
  Description of Artificial Sequence: Synthetic oligonucleotide
ugaacucuccuucauccag

SEQ ID NO: 3249447 - RNA, 19 nt, Artificial Sequence
  Description of Artificial Sequence: Synthetic oligonucleotide
uacugagcaaguuagacuu

SEQ ID NO: 3249448 - RNA, 19 nt, Artificial Sequence
  Description of Artificial Sequence: Synthetic oligonucleotide
uguuuuggucuaaaaguug

SEQ ID NO: 3249449 - RNA, 19 nt, Artificial Sequence
  Description of Artificial Sequence: Synthetic oligonucleotide
uugaagagaggccuggaga

SEQ ID NO: 3249450 - RNA, 19 nt, Artificial Sequence
  Description of Artificial Sequence: Synthetic oligonucleotide
caugcauugagcaauuuca

SEQ ID NO: 3249451 - RNA, 19 nt, Artificial Sequence
  Description of Artificial Sequence: Synthetic oligonucleotide
gaucucauucaacagcagc

SEQ ID NO: 3249452 - RNA, 19 nt, Artificial Sequence
  Description of Artificial Sequence: Synthetic oligonucleotide
gaaggaaggaauccagagc

SEQ ID NO: 3249453 - RNA, 19 nt, Artificial Sequence
  Description of Artificial Sequence: Synthetic oligonucleotide
uuugcagacucaugcauug

SEQ ID NO: 3249454 - RNA, 19 nt, Artificial Sequence
  Description of Artificial Sequence: Synthetic oligonucleotide
aaaguugugaaggaaggaa

SEQ ID NO: 3249455 - RNA, 19 nt, Artificial Sequence
  Description of Artificial Sequence: Synthetic oligonucleotide
ucaucuccaaacacggcag

SEQ ID NO: 3249456 - RNA, 19 nt, Artificial Sequence
  Description of Artificial Sequence: Synthetic oligonucleotide
uuucauguucuuuaucggu

SEQ ID NO: 3249457 - RNA, 19 nt, Artificial Sequence
  Description of Artificial Sequence: Synthetic oligonucleotide
aguuagacuucugcaagcc

SEQ ID NO: 3249458 - RNA, 19 nt, Artificial Sequence
  Description of Artificial Sequence: Synthetic oligonucleotide
aaggaauccagagccuagc

SEQ ID NO: 3249459 - RNA, 19 nt, Artificial Sequence
  Description of Artificial Sequence: Synthetic oligonucleotide
aagaucucauucaacagca

SEQ ID NO: 3249460 - RNA, 19 nt, Artificial Sequence
  Description of Artificial Sequence: Synthetic oligonucleotide
ggucuaaaaguugugaagg

SEQ ID NO: 3249461 - RNA, 19 nt, Artificial Sequence
  Description of Artificial Sequence: Synthetic oligonucleotide
caaguuagacuucugcaag

SEQ ID NO: 3249462 - RNA, 19 nt, Artificial Sequence
  Description of Artificial Sequence: Synthetic oligonucleotide
cugaagaucucauucaaca

SEQ ID NO: 3249463 - RNA, 19 nt, Artificial Sequence
  Description of Artificial Sequence: Synthetic oligonucleotide
agcaauuucauguucuuua

SEQ ID NO: 3249464 - RNA, 19 nt, Artificial Sequence
  Description of Artificial Sequence: Synthetic oligonucleotide
agcaggucauccuugucac

SEQ ID NO: 3249465 - RNA, 19 nt, Artificial Sequence
  Description of Artificial Sequence: Synthetic oligonucleotide
ugcagacucaugcauugag

SEQ ID NO: 3249466 - RNA, 19 nt, Artificial Sequence
  Description of Artificial Sequence: Synthetic oligonucleotide
agcaaguuagacuucugca

SEQ ID NO: 3249467 - RNA, 19 nt, Artificial Sequence
  Description of Artificial Sequence: Synthetic oligonucleotide
uuuggucuaaaaguuguga

SEQ ID NO: 3249468 - RNA, 19 nt, Artificial Sequence
  Description of Artificial Sequence: Synthetic oligonucleotide
uuaaaacagcauacugagc

SEQ ID NO: 3249469 - RNA, 19 nt, Artificial Sequence
  Description of Artificial Sequence: Synthetic oligonucleotide
cauguuuuggucuaaaagu

SEQ ID NO: 3249470 - RNA, 19 nt, Artificial Sequence
  Description of Artificial Sequence: Synthetic oligonucleotide
aaacagcauacugagcaag

SEQ ID NO: 3249471 - RNA, 19 nt, Artificial Sequence
  Description of Artificial Sequence: Synthetic oligonucleotide
ugauaaggggucgagguca

SEQ ID NO: 3249472 - RNA, 19 nt, Artificial Sequence
  Description of Artificial Sequence: Synthetic oligonucleotide
gagggcucccuguugaagg

SEQ ID NO: 3249473 - RNA, 19 nt, Artificial Sequence
  Description of Artificial Sequence: Synthetic oligonucleotide
ugaagagaggccuggagau

SEQ ID NO: 3249474 - RNA, 19 nt, Artificial Sequence
  Description of Artificial Sequence: Synthetic oligonucleotide
agcauacugagcaaguuag

SEQ ID NO: 3249475 - RNA, 19 nt, Artificial Sequence
  Description of Artificial Sequence: Synthetic oligonucleotide
uucugcaagcccuggauca

SEQ ID NO: 3249476 - RNA, 19 nt, Artificial Sequence
  Description of Artificial Sequence: Synthetic oligonucleotide
gucgaggucagcaaagagg

SEQ ID NO: 3249477 - RNA, 19 nt, Artificial Sequence
  Description of Artificial Sequence: Synthetic oligonucleotide
aggcagucagguccgaggc

SEQ ID NO: 3249478 - RNA, 19 nt, Artificial Sequence
  Description of Artificial Sequence: Synthetic oligonucleotide
gaucuuucauguuuugguc

SEQ ID NO: 3249479 - RNA, 19 nt, Artificial Sequence
  Description of Artificial Sequence: Synthetic oligonucleotide
uagucggucaucuccaaac

SEQ ID NO: 3249480 - RNA, 19 nt, Artificial Sequence
  Description of Artificial Sequence: Synthetic oligonucleotide
gagcaaguuagacuucugc

SEQ ID NO: 3249481 - RNA, 19 nt, Artificial Sequence
  Description of Artificial Sequence: Synthetic oligonucleotide
auacugagcaaguuagacu

SEQ ID NO: 3249482 - RNA, 19 nt, Artificial Sequence
  Description of Artificial Sequence: Synthetic oligonucleotide
ucaugcauugagcaauuuc

SEQ ID NO: 3249483 - RNA, 19 nt, Artificial Sequence
  Description of Artificial Sequence: Synthetic oligonucleotide
uuuuggucuaaaaguugug

SEQ ID NO: 3249484 - RNA, 19 nt, Artificial Sequence
  Description of Artificial Sequence: Synthetic oligonucleotide
aucuuucauguuuuggucu

SEQ ID NO: 3249485 - RNA, 19 nt, Artificial Sequence
  Description of Artificial Sequence: Synthetic oligonucleotide
uuggucuaaaaguugugaa

SEQ ID NO: 3249486 - RNA, 19 nt, Artificial Sequence
  Description of Artificial Sequence: Synthetic oligonucleotide
agcaucaggauuugauaag

SEQ ID NO: 3249487 - RNA, 19 nt, Artificial Sequence
  Description of Artificial Sequence: Synthetic oligonucleotide
ugcauugagcaauuucaug

SEQ ID NO: 3249488 - RNA, 19 nt, Artificial Sequence
  Description of Artificial Sequence: Synthetic oligonucleotide
aaaacagcauacugagcaa

SEQ ID NO: 3249489 - RNA, 19 nt, Artificial Sequence
  Description of Artificial Sequence: Synthetic oligonucleotide
uccgaggcagccuuggcag

SEQ ID NO: 3249490 - RNA, 19 nt, Artificial Sequence
  Description of Artificial Sequence: Synthetic oligonucleotide
gagaucuuucauguuuugg

SEQ ID NO: 3249491 - RNA, 19 nt, Artificial Sequence
  Description of Artificial Sequence: Synthetic oligonucleotide
caagcccuggaucaggugc

SEQ ID NO: 3249492 - RNA, 19 nt, Artificial Sequence
  Description of Artificial Sequence: Synthetic oligonucleotide
aaaaguugugaaggaagga

SEQ ID NO: 3249493 - RNA, 19 nt, Artificial Sequence
  Description of Artificial Sequence: Synthetic oligonucleotide
caggauuugauaagggguc

SEQ ID NO: 3249494 - RNA, 19 nt, Artificial Sequence
  Description of Artificial Sequence: Synthetic oligonucleotide
uuuucccaacagcaucagg

SEQ ID NO: 3249495 - RNA, 19 nt, Artificial Sequence
  Description of Artificial Sequence: Synthetic oligonucleotide
uucauguucuuuaucgguu

SEQ ID NO: 3249496 - RNA, 19 nt, Artificial Sequence
  Description of Artificial Sequence: Synthetic oligonucleotide
ucuaaaaguugugaaggaa

SEQ ID NO: 3249497 - RNA, 19 nt, Artificial Sequence
  Description of Artificial Sequence: Synthetic oligonucleotide
gaggucagcaaagaggcug

SEQ ID NO: 3249498 - RNA, 19 nt, Artificial Sequence
  Description of Artificial Sequence: Synthetic oligonucleotide
caucaggauuugauaaggg

SEQ ID NO: 3249499 - RNA, 19 nt, Artificial Sequence
  Description of Artificial Sequence: Synthetic oligonucleotide
aguugugaaggaaggaauc

SEQ ID NO: 3249500 - RNA, 19 nt, Artificial Sequence
  Description of Artificial Sequence: Synthetic oligonucleotide
aagagaggccuggagaucu

SEQ ID NO: 3249501 - RNA, 19 nt, Artificial Sequence
  Description of Artificial Sequence: Synthetic oligonucleotide
cauacugagcaaguuagac

SEQ ID NO: 3249502 - RNA, 19 nt, Artificial Sequence
  Description of Artificial Sequence: Synthetic oligonucleotide
gucaucuccaaacacggca

SEQ ID NO: 3249503 - RNA, 19 nt, Artificial Sequence
  Description of Artificial Sequence: Synthetic oligonucleotide
auuugauaaggggucgagg

SEQ ID NO: 3249504 - RNA, 19 nt, Artificial Sequence
  Description of Artificial Sequence: Synthetic oligonucleotide
ucucccugggccccuacgg

SEQ ID NO: 3249505 - RNA, 19 nt, Artificial Sequence
  Description of Artificial Sequence: Synthetic oligonucleotide
uucaacagcagcaggucau

SEQ ID NO: 3249506 - RNA, 19 nt, Artificial Sequence
  Description of Artificial Sequence: Synthetic oligonucleotide
aaagaggcugaaccaggca

SEQ ID NO: 3249507 - RNA, 19 nt, Artificial Sequence
  Description of Artificial Sequence: Synthetic oligonucleotide
aacagcagcaggucauccu

SEQ ID NO: 3249508 - RNA, 19 nt, Artificial Sequence
  Description of Artificial Sequence: Synthetic oligonucleotide
ugcuggcuccuuuagucgg

SEQ ID NO: 3249509 - RNA, 19 nt, Artificial Sequence
  Description of Artificial Sequence: Synthetic oligonucleotide
cuguugaagguuugcagac

SEQ ID NO: 3249510 - RNA, 19 nt, Artificial Sequence
  Description of Artificial Sequence: Synthetic oligonucleotide
cuucauccaggcaggaagc

SEQ ID NO: 3249511 - RNA, 19 nt, Artificial Sequence
  Description of Artificial Sequence: Synthetic oligonucleotide
ucuggggucccugcuaugg

SEQ ID NO: 3249512 - RNA, 19 nt, Artificial Sequence
  Description of Artificial Sequence: Synthetic oligonucleotide
aacagcaucaggauuugau

SEQ ID NO: 3249513 - RNA, 19 nt, Artificial Sequence
  Description of Artificial Sequence: Synthetic oligonucleotide
gauuugauaaggggucgag

SEQ ID NO: 3249514 - RNA, 19 nt, Artificial Sequence
  Description of Artificial Sequence: Synthetic oligonucleotide
cuuggcaggcucuugaaga

SEQ ID NO: 3249515 - RNA, 19 nt, Artificial Sequence
  Description of Artificial Sequence: Synthetic oligonucleotide
guugugaaggaaggaaucc

SEQ ID NO: 3249516 - RNA, 19 nt, Artificial Sequence
  Description of Artificial Sequence: Synthetic oligonucleotide
caaagaggcugaaccaggc

SEQ ID NO: 3249517 - RNA, 19 nt, Artificial Sequence
  Description of Artificial Sequence: Synthetic oligonucleotide
aauagaauagcuuuaaucu

SEQ ID NO: 3249518 - RNA, 19 nt, Artificial Sequence
  Description of Artificial Sequence: Synthetic oligonucleotide
aauuccaucaccauucugg

SEQ ID NO: 3249519 - RNA, 19 nt, Artificial Sequence
  Description of Artificial Sequence: Synthetic oligonucleotide
uaaucuguuacuaugaaau

SEQ ID NO: 3249520 - RNA, 19 nt, Artificial Sequence
  Description of Artificial Sequence: Synthetic oligonucleotide
uuuaucugauucaagaugu

SEQ ID NO: 3249521 - RNA, 19 nt, Artificial Sequence
  Description of Artificial Sequence: Synthetic oligonucleotide
cuuaauuucagcuugcauc

SEQ ID NO: 3249522 - RNA, 19 nt, Artificial Sequence
  Description of Artificial Sequence: Synthetic oligonucleotide
aaagccaccugcuccagcc

SEQ ID NO: 3249523 - RNA, 19 nt, Artificial Sequence
  Description of Artificial Sequence: Synthetic oligonucleotide
ucuucgaagguacugagcc

SEQ ID NO: 3249524 - RNA, 19 nt, Artificial Sequence
  Description of Artificial Sequence: Synthetic oligonucleotide
cuuucaagggauuucaacc

SEQ ID NO: 3249525 - RNA, 19 nt, Artificial Sequence
  Description of Artificial Sequence: Synthetic oligonucleotide
aacauguguuccuugaaag

SEQ ID NO: 3249526 - RNA, 19 nt, Artificial Sequence
  Description of Artificial Sequence: Synthetic oligonucleotide
aaacacuucuccucugacc

SEQ ID NO: 3249527 - RNA, 19 nt, Artificial Sequence
  Description of Artificial Sequence: Synthetic oligonucleotide
uuaauuucagcuugcaucu

SEQ ID NO: 3249528 - RNA, 19 nt, Artificial Sequence
  Description of Artificial Sequence: Synthetic oligonucleotide
uuucaagggauuucaaccg

SEQ ID NO: 3249529 - RNA, 19 nt, Artificial Sequence
  Description of Artificial Sequence: Synthetic oligonucleotide
uguuacuaugaaaugaggu

SEQ ID NO: 3249530 - RNA, 19 nt, Artificial Sequence
  Description of Artificial Sequence: Synthetic oligonucleotide
ucagcuugcaucuucagcu

SEQ ID NO: 3249531 - RNA, 19 nt, Artificial Sequence
  Description of Artificial Sequence: Synthetic oligonucleotide
aucauggugccuuucaagg

SEQ ID NO: 3249532 - RNA, 19 nt, Artificial Sequence
  Description of Artificial Sequence: Synthetic oligonucleotide
aaacucugcuuucucgggc

SEQ ID NO: 3249533 - RNA, 19 nt, Artificial Sequence
  Description of Artificial Sequence: Synthetic oligonucleotide
aacucugcuuucucgggcc

SEQ ID NO: 3249534 - RNA, 19 nt, Artificial Sequence
  Description of Artificial Sequence: Synthetic oligonucleotide
cuuccuuucccgaucaugg

SEQ ID NO: 3249535 - RNA, 19 nt, Artificial Sequence
  Description of Artificial Sequence: Synthetic oligonucleotide
uacgcuuaauuucagcuug

SEQ ID NO: 3249536 - RNA, 19 nt, Artificial Sequence
  Description of Artificial Sequence: Synthetic oligonucleotide
guuuucaucguugauacgc

SEQ ID NO: 3249537 - RNA, 19 nt, Artificial Sequence
  Description of Artificial Sequence: Synthetic oligonucleotide
auagaauagcuuuaaucug

SEQ ID NO: 3249538 - RNA, 19 nt, Artificial Sequence
  Description of Artificial Sequence: Synthetic oligonucleotide
uuaucuuucucccuccgga

SEQ ID NO: 3249539 - RNA, 19 nt, Artificial Sequence
  Description of Artificial Sequence: Synthetic oligonucleotide
uacuaugaaaugagguuag

SEQ ID NO: 3249540 - RNA, 19 nt, Artificial Sequence
  Description of Artificial Sequence: Synthetic oligonucleotide
uccucucgaacucaucucg

SEQ ID NO: 3249541 - RNA, 19 nt, Artificial Sequence
  Description of Artificial Sequence: Synthetic oligonucleotide
uuagcagcaacuguggaug

SEQ ID NO: 3249542 - RNA, 19 nt, Artificial Sequence
  Description of Artificial Sequence: Synthetic oligonucleotide
auagcuuuaaucuguuacu

SEQ ID NO: 3249543 - RNA, 19 nt, Artificial Sequence
  Description of Artificial Sequence: Synthetic oligonucleotide
uuccuugaaagccaccugc

SEQ ID NO: 3249544 - RNA, 19 nt, Artificial Sequence
  Description of Artificial Sequence: Synthetic oligonucleotide
ucauuaaugcguucgcggc

SEQ ID NO: 3249545 - RNA, 19 nt, Artificial Sequence
  Description of Artificial Sequence: Synthetic oligonucleotide
uucaagggauuucaaccgg

SEQ ID NO: 3249546 - RNA, 19 nt, Artificial Sequence
  Description of Artificial Sequence: Synthetic oligonucleotide
uccucuaucuccaucuucu

SEQ ID NO: 3249547 - RNA, 19 nt, Artificial Sequence
  Description of Artificial Sequence: Synthetic oligonucleotide
ucauuuucacagaaguggu

SEQ ID NO: 3249548 - RNA, 19 nt, Artificial Sequence
  Description of Artificial Sequence: Synthetic oligonucleotide
aucucauccaaacacuucu

SEQ ID NO: 3249549 - RNA, 19 nt, Artificial Sequence
  Description of Artificial Sequence: Synthetic oligonucleotide
uagcuuuuccucuaucucc

SEQ ID NO: 3249550 - RNA, 19 nt, Artificial Sequence
  Description of Artificial Sequence: Synthetic oligonucleotide
uccauauacgccagcaucu

SEQ ID NO: 3249551 - RNA, 19 nt, Artificial Sequence
  Description of Artificial Sequence: Synthetic oligonucleotide
ugcaucuucagcuuuuccu

SEQ ID NO: 3249552 - RNA, 19 nt, Artificial Sequence
  Description of Artificial Sequence: Synthetic oligonucleotide
uucgaagguacugagccgg

SEQ ID NO: 3249553 - RNA, 19 nt, Artificial Sequence
  Description of Artificial Sequence: Synthetic oligonucleotide
aaagcccauaacaucuccc

SEQ ID NO: 3249554 - RNA, 19 nt, Artificial Sequence
  Description of Artificial Sequence: Synthetic oligonucleotide
aacuucuccuucucaaucu

SEQ ID NO: 3249555 - RNA, 19 nt, Artificial Sequence
  Description of Artificial Sequence: Synthetic oligonucleotide
augucauuaaugcguucgc

SEQ ID NO: 3249556 - RNA, 19 nt, Artificial Sequence
  Description of Artificial Sequence: Synthetic oligonucleotide
auuaaugcguucgcggcgc

SEQ ID NO: 3249557 - RNA, 19 nt, Artificial Sequence
  Description of Artificial Sequence: Synthetic oligonucleotide
ucuucugcgccauucacga

SEQ ID NO: 3249558 - RNA, 19 nt, Artificial Sequence
  Description of Artificial Sequence: Synthetic oligonucleotide
uuuaaucuguuacuaugaa

SEQ ID NO: 3249559 - RNA, 19 nt, Artificial Sequence
  Description of Artificial Sequence: Synthetic oligonucleotide
aaaauagaauagcuuuaau

SEQ ID NO: 3249560 - RNA, 19 nt, Artificial Sequence
  Description of Artificial Sequence: Synthetic oligonucleotide
ucugcaaccuccugguugc

SEQ ID NO: 3249561 - RNA, 19 nt, Artificial Sequence
  Description of Artificial Sequence: Synthetic oligonucleotide
uuacuaugaaaugagguua

SEQ ID NO: 3249562 - RNA, 19 nt, Artificial Sequence
  Description of Artificial Sequence: Synthetic oligonucleotide
uuaaucuguuacuaugaaa

SEQ ID NO: 3249563 - RNA, 19 nt, Artificial Sequence
  Description of Artificial Sequence: Synthetic oligonucleotide
gaucauggugccuuucaag

SEQ ID NO: 3249564 - RNA, 19 nt, Artificial Sequence
  Description of Artificial Sequence: Synthetic oligonucleotide
ugcccgguaaucuugggcc

SEQ ID NO: 3249565 - RNA, 19 nt, Artificial Sequence
  Description of Artificial Sequence: Synthetic oligonucleotide
aucucggucccguugcacc

SEQ ID NO: 3249566 - RNA, 19 nt, Artificial Sequence
  Description of Artificial Sequence: Synthetic oligonucleotide
ucauggugccuuucaaggg

SEQ ID NO: 3249567 - RNA, 19 nt, Artificial Sequence
  Description of Artificial Sequence: Synthetic oligonucleotide
gauacgcuuaauuucagcu

SEQ ID NO: 3249568 - RNA, 19 nt, Artificial Sequence
  Description of Artificial Sequence: Synthetic oligonucleotide
aaugagguuagcagcaacu

SEQ ID NO: 3249569 - RNA, 19 nt, Artificial Sequence
  Description of Artificial Sequence: Synthetic oligonucleotide
uucagcuugcaucuucagc

SEQ ID NO: 3249570 - RNA, 19 nt, Artificial Sequence
  Description of Artificial Sequence: Synthetic oligonucleotide
ugaacggccaacauguguu

SEQ ID NO: 3249571 - RNA, 19 nt, Artificial Sequence
  Description of Artificial Sequence: Synthetic oligonucleotide
aauucagcgaucgcuccuc

SEQ ID NO: 3249572 - RNA, 19 nt, Artificial Sequence
  Description of Artificial Sequence: Synthetic oligonucleotide
gagguuagcagcaacugug

SEQ ID NO: 3249573 - RNA, 19 nt, Artificial Sequence
  Description of Artificial Sequence: Synthetic oligonucleotide
ucugugcccucccaaagcc

SEQ ID NO: 3249574 - RNA, 19 nt, Artificial Sequence
  Description of Artificial Sequence: Synthetic oligonucleotide
cucucucugagcccgaagg

SEQ ID NO: 3249575 - RNA, 19 nt, Artificial Sequence
  Description of Artificial Sequence: Synthetic oligonucleotide
uuuucaucguugauacgcu

SEQ ID NO: 3249576 - RNA, 19 nt, Artificial Sequence
  Description of Artificial Sequence: Synthetic oligonucleotide
uaucugauucaagaugugc

SEQ ID NO: 3249577 - RNA, 19 nt, Artificial Sequence
  Description of Artificial Sequence: Synthetic oligonucleotide
aagggauuucaaccggucu

SEQ ID NO: 3249578 - RNA, 19 nt, Artificial Sequence
  Description of Artificial Sequence: Synthetic oligonucleotide
cauuaaugcguucgcggcg

SEQ ID NO: 3249579 - RNA, 19 nt, Artificial Sequence
  Description of Artificial Sequence: Synthetic oligonucleotide
aucugcaaccuccugguug

SEQ ID NO: 3249580 - RNA, 19 nt, Artificial Sequence
  Description of Artificial Sequence: Synthetic oligonucleotide
cuguuacuaugaaaugagg

SEQ ID NO: 3249581 - RNA, 19 nt, Artificial Sequence
  Description of Artificial Sequence: Synthetic oligonucleotide
uguuccuugaaagccaccu

SEQ ID NO: 3249582 - RNA, 19 nt, Artificial Sequence
  Description of Artificial Sequence: Synthetic oligonucleotide
uuuugcuucuugaugucau

SEQ ID NO: 3249583 - RNA, 19 nt, Artificial Sequence
  Description of Artificial Sequence: Synthetic oligonucleotide
acaucuccccuucauuuuc

SEQ ID NO: 3249584 - RNA, 19 nt, Artificial Sequence
  Description of Artificial Sequence: Synthetic oligonucleotide
ucguugauacgcuuaauuu

SEQ ID NO: 3249585 - RNA, 19 nt, Artificial Sequence
  Description of Artificial Sequence: Synthetic oligonucleotide
acugagccgguucugcacg

SEQ ID NO: 3249586 - RNA, 19 nt, Artificial Sequence
  Description of Artificial Sequence: Synthetic oligonucleotide
ugagguuagcagcaacugu

SEQ ID NO: 3249587 - RNA, 19 nt, Artificial Sequence
  Description of Artificial Sequence: Synthetic oligonucleotide
ugauacgcuuaauuucagc

SEQ ID NO: 3249588 - RNA, 19 nt, Artificial Sequence
  Description of Artificial Sequence: Synthetic oligonucleotide
ucggaauucagcgaucgcu

SEQ ID NO: 3249589 - RNA, 19 nt, Artificial Sequence
  Description of Artificial Sequence: Synthetic oligonucleotide
uaacaucuccccuucauuu

SEQ ID NO: 3249590 - RNA, 19 nt, Artificial Sequence
  Description of Artificial Sequence: Synthetic oligonucleotide
auacgccagcaucugcucc

SEQ ID NO: 3249591 - RNA, 19 nt, Artificial Sequence
  Description of Artificial Sequence: Synthetic oligonucleotide
aacggccaacauguguucc

SEQ ID NO: 3249592 - RNA, 19 nt, Artificial Sequence
  Description of Artificial Sequence: Synthetic oligonucleotide
caaacucugcuuucucggg

SEQ ID NO: 3249593 - RNA, 19 nt, Artificial Sequence
  Description of Artificial Sequence: Synthetic oligonucleotide
uccaacuucuccuucucaa

SEQ ID NO: 3249594 - RNA, 19 nt, Artificial Sequence
  Description of Artificial Sequence: Synthetic oligonucleotide
acuaugaaaugagguuagc

SEQ ID NO: 3249595 - RNA, 19 nt, Artificial Sequence
  Description of Artificial Sequence: Synthetic oligonucleotide
ugugcccucccaaagccca

SEQ ID NO: 3249596 - RNA, 19 nt, Artificial Sequence
  Description of Artificial Sequence: Synthetic oligonucleotide
cuccauauacgccagcauc

SEQ ID NO: 3249597 - RNA, 19 nt, Artificial Sequence
  Description of Artificial Sequence: Synthetic oligonucleotide
accugaacggccaacaugu

SEQ ID NO: 3249598 - RNA, 19 nt, Artificial Sequence
  Description of Artificial Sequence: Synthetic oligonucleotide
aucaccauucuggucugcc

SEQ ID NO: 3249599 - RNA, 19 nt, Artificial Sequence
  Description of Artificial Sequence: Synthetic oligonucleotide
ucuuggugaauuccaucac

SEQ ID NO: 3249600 - RNA, 19 nt, Artificial Sequence
  Description of Artificial Sequence: Synthetic oligonucleotide
auuccaucaccauucuggu

SEQ ID NO: 3249601 - RNA, 19 nt, Artificial Sequence
  Description of Artificial Sequence: Synthetic oligonucleotide
gaagguacugagccgguuc

SEQ ID NO: 3249602 - RNA, 19 nt, Artificial Sequence
  Description of Artificial Sequence: Synthetic oligonucleotide
uugcgcuugucccgcaagg

SEQ ID NO: 3249603 - RNA, 19 nt, Artificial Sequence
  Description of Artificial Sequence: Synthetic oligonucleotide
uuggcaugcuguagggacc

SEQ ID NO: 3249604 - RNA, 19 nt, Artificial Sequence
  Description of Artificial Sequence: Synthetic oligonucleotide
ugcaaauccuccuccugga

SEQ ID NO: 3249605 - RNA, 19 nt, Artificial Sequence
  Description of Artificial Sequence: Synthetic oligonucleotide
ucucugagcccgaaggauc

SEQ ID NO: 3249606 - RNA, 19 nt, Artificial Sequence
  Description of Artificial Sequence: Synthetic oligonucleotide
ucugcgccauucacgaucu

SEQ ID NO: 3249607 - RNA, 19 nt, Artificial Sequence
  Description of Artificial Sequence: Synthetic oligonucleotide
ucaucucauccaaacacuu

SEQ ID NO: 3249608 - RNA, 19 nt, Artificial Sequence
  Description of Artificial Sequence: Synthetic oligonucleotide
cuucgaagguacugagccg

SEQ ID NO: 3249609 - RNA, 19 nt, Artificial Sequence
  Description of Artificial Sequence: Synthetic oligonucleotide
gaaggauccucucgaacuc

SEQ ID NO: 3249610 - RNA, 19 nt, Artificial Sequence
  Description of Artificial Sequence: Synthetic oligonucleotide
guuacuaugaaaugagguu

SEQ ID NO: 3249611 - RNA, 19 nt, Artificial Sequence
  Description of Artificial Sequence: Synthetic oligonucleotide
cugcauggcccucaggcgg

SEQ ID NO: 3249612 - RNA, 19 nt, Artificial Sequence
  Description of Artificial Sequence: Synthetic oligonucleotide
auccucucgaacucaucuc

SEQ ID NO: 3249613 - RNA, 19 nt, Artificial Sequence
  Description of Artificial Sequence: Synthetic oligonucleotide
ucuucuuggugaauuccau

SEQ ID NO: 3249614 - RNA, 19 nt, Artificial Sequence
  Description of Artificial Sequence: Synthetic oligonucleotide
aacaucuccccuucauuuu

SEQ ID NO: 3249615 - RNA, 19 nt, Artificial Sequence
  Description of Artificial Sequence: Synthetic oligonucleotide
ccauucacgaucugcaacc

SEQ ID NO: 3249616 - RNA, 19 nt, Artificial Sequence
  Description of Artificial Sequence: Synthetic oligonucleotide
ucuucuucuuggugaauuc

SEQ ID NO: 3249617 - RNA, 19 nt, Artificial Sequence
  Description of Artificial Sequence: Synthetic oligonucleotide
uaaaauauaaguuacaaca

SEQ ID NO: 3249618 - RNA, 19 nt, Artificial Sequence
  Description of Artificial Sequence: Synthetic oligonucleotide
aagacagaaaucuucaucc

SEQ ID NO: 3249619 - RNA, 19 nt, Artificial Sequence
  Description of Artificial Sequence: Synthetic oligonucleotide
aauguuaucauuugucucc

SEQ ID NO: 3249620 - RNA, 19 nt, Artificial Sequence
  Description of Artificial Sequence: Synthetic oligonucleotide
uaaguuacaacacaaaacc

SEQ ID NO: 3249621 - RNA, 19 nt, Artificial Sequence
  Description of Artificial Sequence: Synthetic oligonucleotide
auuacugauauucugaaac

SEQ ID NO: 3249622 - RNA, 19 nt, Artificial Sequence
  Description of Artificial Sequence: Synthetic oligonucleotide
cuuaauaacaaucugaaug

SEQ ID NO: 3249623 - RNA, 19 nt, Artificial Sequence
  Description of Artificial Sequence: Synthetic oligonucleotide
uuaacucuaguacagaaag

SEQ ID NO: 3249624 - RNA, 19 nt, Artificial Sequence
  Description of Artificial Sequence: Synthetic oligonucleotide
aaggugguuaaucacaugg

SEQ ID NO: 3249625 - RNA, 19 nt, Artificial Sequence
  Description of Artificial Sequence: Synthetic oligonucleotide
aaucacauggacuuuacug

SEQ ID NO: 3249626 - RNA, 19 nt, Artificial Sequence
  Description of Artificial Sequence: Synthetic oligonucleotide
uagacauuaaaauauaagu

SEQ ID NO: 3249627 - RNA, 19 nt, Artificial Sequence
  Description of Artificial Sequence: Synthetic oligonucleotide
auuuugauugucuauuugg

SEQ ID NO: 3249628 - RNA, 19 nt, Artificial Sequence
  Description of Artificial Sequence: Synthetic oligonucleotide
uuagacauuaaaauauaag

SEQ ID NO: 3249629 - RNA, 19 nt, Artificial Sequence
  Description of Artificial Sequence: Synthetic oligonucleotide
uuaauaacaaucugaaugu

SEQ ID NO: 3249630 - RNA, 19 nt, Artificial Sequence
  Description of Artificial Sequence: Synthetic oligonucleotide
uuuacugucccucaucggg

SEQ ID NO: 3249631 - RNA, 19 nt, Artificial Sequence
  Description of Artificial Sequence: Synthetic oligonucleotide
aaaauauaaguuacaacac

SEQ ID NO: 3249632 - RNA, 19 nt, Artificial Sequence
  Description of Artificial Sequence: Synthetic oligonucleotide
uuaacauuagacauuaaaa

SEQ ID NO: 3249633 - RNA, 19 nt, Artificial Sequence
  Description of Artificial Sequence: Synthetic oligonucleotide
aucgggaucauuuugauug

SEQ ID NO: 3249634 - RNA, 19 nt, Artificial Sequence
  Description of Artificial Sequence: Synthetic oligonucleotide
agaacaugaaacuuuguuc

SEQ ID NO: 3249635 - RNA, 19 nt, Artificial Sequence
  Description of Artificial Sequence: Synthetic oligonucleotide
auugacagagcuuuggcac

SEQ ID NO: 3249636 - RNA, 19 nt, Artificial Sequence
  Description of Artificial Sequence: Synthetic oligonucleotide
aaauauaaguuacaacaca

SEQ ID NO: 3249637 - RNA, 19 nt, Artificial Sequence
  Description of Artificial Sequence: Synthetic oligonucleotide
ucuucauccacuaaagaca

SEQ ID NO: 3249638 - RNA, 19 nt, Artificial Sequence
  Description of Artificial Sequence: Synthetic oligonucleotide
uuagacaaguucaacagca

SEQ ID NO: 3249639 - RNA, 19 nt, Artificial Sequence
  Description of Artificial Sequence: Synthetic oligonucleotide
uguuagacaaguucaacag

SEQ ID NO: 3249640 - RNA, 19 nt, Artificial Sequence
  Description of Artificial Sequence: Synthetic oligonucleotide
uucacaauauuacugauau

SEQ ID NO: 3249641 - RNA, 19 nt, Artificial Sequence
  Description of Artificial Sequence: Synthetic oligonucleotide
ucuauuuggauuugcagcc

SEQ ID NO: 3249642 - RNA, 19 nt, Artificial Sequence
  Description of Artificial Sequence: Synthetic oligonucleotide
uccucuauguuaaagagac

SEQ ID NO: 3249643 - RNA, 19 nt, Artificial Sequence
  Description of Artificial Sequence: Synthetic oligonucleotide
uuugcagccguuuagcuag

SEQ ID NO: 3249644 - RNA, 19 nt, Artificial Sequence
  Description of Artificial Sequence: Synthetic oligonucleotide
uucugaaacaucuuaauaa

SEQ ID NO: 3249645 - RNA, 19 nt, Artificial Sequence
  Description of Artificial Sequence: Synthetic oligonucleotide
ugaaacaucuuaauaacaa

SEQ ID NO: 3249646 - RNA, 19 nt, Artificial Sequence
  Description of Artificial Sequence: Synthetic oligonucleotide
auaaguuacaacacaaaac

SEQ ID NO: 3249647 - RNA, 19 nt, Artificial Sequence
  Description of Artificial Sequence: Synthetic oligonucleotide
acaacacaaaaccagacug

SEQ ID NO: 3249648 - RNA, 19 nt, Artificial Sequence
  Description of Artificial Sequence: Synthetic oligonucleotide
aauauugacagagcuuugg

SEQ ID NO: 3249649 - RNA, 19 nt, Artificial Sequence
  Description of Artificial Sequence: Synthetic oligonucleotide
uucaacagcauuuucagaa

SEQ ID NO: 3249650 - RNA, 19 nt, Artificial Sequence
  Description of Artificial Sequence: Synthetic oligonucleotide
uaacauuagacauuaaaau

SEQ ID NO: 3249651 - RNA, 19 nt, Artificial Sequence
  Description of Artificial Sequence: Synthetic oligonucleotide
cacaauauuacugauauuc

SEQ ID NO: 3249652 - RNA, 19 nt, Artificial Sequence
  Description of Artificial Sequence: Synthetic oligonucleotide
aggauuguuagacaaguuc

SEQ ID NO: 3249653 - RNA, 19 nt, Artificial Sequence
  Description of Artificial Sequence: Synthetic oligonucleotide
ucacaaguuaacauuagac

SEQ ID NO: 3249654 - RNA, 19 nt, Artificial Sequence
  Description of Artificial Sequence: Synthetic oligonucleotide
acauuaaaauauaaguuac

SEQ ID NO: 3249655 - RNA, 19 nt, Artificial Sequence
  Description of Artificial Sequence: Synthetic oligonucleotide
aaaaccagacugugaacac

SEQ ID NO: 3249656 - RNA, 19 nt, Artificial Sequence
  Description of Artificial Sequence: Synthetic oligonucleotide
aauauuacugauauucuga

SEQ ID NO: 3249657 - RNA, 19 nt, Artificial Sequence
  Description of Artificial Sequence: Synthetic oligonucleotide
cauuuucagaacaugaaac

SEQ ID NO: 3249658 - RNA, 19 nt, Artificial Sequence
  Description of Artificial Sequence: Synthetic oligonucleotide
gacauuaaaauauaaguua

SEQ ID NO: 3249659 - RNA, 19 nt, Artificial Sequence
  Description of Artificial Sequence: Synthetic oligonucleotide
aacaccaaagcacuauuug

SEQ ID NO: 3249660 - RNA, 19 nt, Artificial Sequence
  Description of Artificial Sequence: Synthetic oligonucleotide
acaaguuaacauuagacau

SEQ ID NO: 3249661 - RNA, 19 nt, Artificial Sequence
  Description of Artificial Sequence: Synthetic oligonucleotide
cucuauguuaaagagaccc

SEQ ID NO: 3249662 - RNA, 19 nt, Artificial Sequence
  Description of Artificial Sequence: Synthetic oligonucleotide
auauugacagagcuuuggc

SEQ ID NO: 3249663 - RNA, 19 nt, Artificial Sequence
  Description of Artificial Sequence: Synthetic oligonucleotide
ucugaaacaucuuaauaac

SEQ ID NO: 3249664 - RNA, 19 nt, Artificial Sequence
  Description of Artificial Sequence: Synthetic oligonucleotide
ucuucaaacucauggaaug

SEQ ID NO: 3249665 - RNA, 19 nt, Artificial Sequence
  Description of Artificial Sequence: Synthetic oligonucleotide
aguucaacagcauuuucag

SEQ ID NO: 3249666 - RNA, 19 nt, Artificial Sequence
  Description of Artificial Sequence: Synthetic oligonucleotide
uuuugauugucuauuugga

SEQ ID NO: 3249667 - RNA, 19 nt, Artificial Sequence
  Description of Artificial Sequence: Synthetic oligonucleotide
ugaauguuaucauuugucu

SEQ ID NO: 3249668 - RNA, 19 nt, Artificial Sequence
  Description of Artificial Sequence: Synthetic oligonucleotide
uuuagcuaguucuucaaac

SEQ ID NO: 3249669 - RNA, 19 nt, Artificial Sequence
  Description of Artificial Sequence: Synthetic oligonucleotide
acuuuacugucccucaucg

SEQ ID NO: 3249670 - RNA, 19 nt, Artificial Sequence
  Description of Artificial Sequence: Synthetic oligonucleotide
aacaucuuaauaacaaucu

SEQ ID NO: 3249671 - RNA, 19 nt, Artificial Sequence
  Description of Artificial Sequence: Synthetic oligonucleotide
uaaagagacccacaaauau

SEQ ID NO: 3249672 - RNA, 19 nt, Artificial Sequence
  Description of Artificial Sequence: Synthetic oligonucleotide
acuuuguucuugcauugcc

SEQ ID NO: 3249673 - RNA, 19 nt, Artificial Sequence
  Description of Artificial Sequence: Synthetic oligonucleotide
ucauccacuaaagacauug

SEQ ID NO: 3249674 - RNA, 19 nt, Artificial Sequence
  Description of Artificial Sequence: Synthetic oligonucleotide
gucuauuuggauuugcagc

SEQ ID NO: 3249675 - RNA, 19 nt, Artificial Sequence
  Description of Artificial Sequence: Synthetic oligonucleotide
aauauaaguuacaacacaa

SEQ ID NO: 3249676 - RNA, 19 nt, Artificial Sequence
  Description of Artificial Sequence: Synthetic oligonucleotide
uuguuagacaaguucaaca

SEQ ID NO: 3249677 - RNA, 19 nt, Artificial Sequence
  Description of Artificial Sequence: Synthetic oligonucleotide
cucuuugggaacauaaggc

SEQ ID NO: 3249678 - RNA, 19 nt, Artificial Sequence
  Description of Artificial Sequence: Synthetic oligonucleotide
aagaguuucacaaguuaac

SEQ ID NO: 3249679 - RNA, 19 nt, Artificial Sequence
  Description of Artificial Sequence: Synthetic oligonucleotide
aaacgaguggcucaagaca

SEQ ID NO: 3249680 - RNA, 19 nt, Artificial Sequence
  Description of Artificial Sequence: Synthetic oligonucleotide
uucagaacaugaaacuuug

SEQ ID NO: 3249681 - RNA, 19 nt, Artificial Sequence
  Description of Artificial Sequence: Synthetic oligonucleotide
auuuucagaacaugaaacu

SEQ ID NO: 3249682 - RNA, 19 nt, Artificial Sequence
  Description of Artificial Sequence: Synthetic oligonucleotide
ugugguuaacucuaguaca

SEQ ID NO: 3249683 - RNA, 19 nt, Artificial Sequence
  Description of Artificial Sequence: Synthetic oligonucleotide
acaccaaagcacuauuugg

SEQ ID NO: 3249684 - RNA, 19 nt, Artificial Sequence
  Description of Artificial Sequence: Synthetic oligonucleotide
agacugugaacaccaaagc

SEQ ID NO: 3249685 - RNA, 19 nt, Artificial Sequence
  Description of Artificial Sequence: Synthetic oligonucleotide
uuugggaacauaaggcuga

SEQ ID NO: 3249686 - RNA, 19 nt, Artificial Sequence
  Description of Artificial Sequence: Synthetic oligonucleotide
ucuccucuauguuaaagag

SEQ ID NO: 3249687 - RNA, 19 nt, Artificial Sequence
  Description of Artificial Sequence: Synthetic oligonucleotide
aagagacccacaaauauug

SEQ ID NO: 3249688 - RNA, 19 nt, Artificial Sequence
  Description of Artificial Sequence: Synthetic oligonucleotide
aaaucuucauccacuaaag

SEQ ID NO: 3249689 - RNA, 19 nt, Artificial Sequence
  Description of Artificial Sequence: Synthetic oligonucleotide
aaacuuuguucuugcauug

SEQ ID NO: 3249690 - RNA, 19 nt, Artificial Sequence
  Description of Artificial Sequence: Synthetic oligonucleotide
gaaaucuucauccacuaaa

SEQ ID NO: 3249691 - RNA, 19 nt, Artificial Sequence
  Description of Artificial Sequence: Synthetic oligonucleotide
aguuacaacacaaaaccag

SEQ ID NO: 3249692 - RNA, 19 nt, Artificial Sequence
  Description of Artificial Sequence: Synthetic oligonucleotide
cagacugugaacaccaaag

SEQ ID NO: 3249693 - RNA, 19 nt, Artificial Sequence
  Description of Artificial Sequence: Synthetic oligonucleotide
ugucuauuuggauuugcag

SEQ ID NO: 3249694 - RNA, 19 nt, Artificial Sequence
  Description of Artificial Sequence: Synthetic oligonucleotide
gacccacaaauauugacag

SEQ ID NO: 3249695 - RNA, 19 nt, Artificial Sequence
  Description of Artificial Sequence: Synthetic oligonucleotide
acuauuuggggcucuuugg

SEQ ID NO: 3249696 - RNA, 19 nt, Artificial Sequence
  Description of Artificial Sequence: Synthetic oligonucleotide
ucauuugucuccucuaugu

SEQ ID NO: 3249697 - RNA, 19 nt, Artificial Sequence
  Description of Artificial Sequence: Synthetic oligonucleotide
aaaccagacugugaacacc

SEQ ID NO: 3249698 - RNA, 19 nt, Artificial Sequence
  Description of Artificial Sequence: Synthetic oligonucleotide
uuuguucuugcauugccug

SEQ ID NO: 3249699 - RNA, 19 nt, Artificial Sequence
  Description of Artificial Sequence: Synthetic oligonucleotide
aucacauggacuuuacugu

SEQ ID NO: 3249700 - RNA, 19 nt, Artificial Sequence
  Description of Artificial Sequence: Synthetic oligonucleotide
agagcuuuggcacugaaua

SEQ ID NO: 3249701 - RNA, 19 nt, Artificial Sequence
  Description of Artificial Sequence: Synthetic oligonucleotide
aguggcucaagacagaaau

SEQ ID NO: 3249702 - RNA, 19 nt, Artificial Sequence
  Description of Artificial Sequence: Synthetic oligonucleotide
uccacuaaagacauugcuc

SEQ ID NO: 3249703 - RNA, 19 nt, Artificial Sequence
  Description of Artificial Sequence: Synthetic oligonucleotide
caccaaagcacuauuuggg

SEQ ID NO: 3249704 - RNA, 19 nt, Artificial Sequence
  Description of Artificial Sequence: Synthetic oligonucleotide
uuugucuccucuauguuaa

SEQ ID NO: 3249705 - RNA, 19 nt, Artificial Sequence
  Description of Artificial Sequence: Synthetic oligonucleotide
uuagcuaguucuucaaacu

SEQ ID NO: 3249706 - RNA, 19 nt, Artificial Sequence
  Description of Artificial Sequence: Synthetic oligonucleotide
uacaacacaaaaccagacu

SEQ ID NO: 3249707 - RNA, 19 nt, Artificial Sequence
  Description of Artificial Sequence: Synthetic oligonucleotide
gaacaugaaacuuuguucu

SEQ ID NO: 3249708 - RNA, 19 nt, Artificial Sequence
  Description of Artificial Sequence: Synthetic oligonucleotide
ugguuaaucacauggacuu

SEQ ID NO: 3249709 - RNA, 19 nt, Artificial Sequence
  Description of Artificial Sequence: Synthetic oligonucleotide
uaacucuaguacagaaagg

SEQ ID NO: 3249710 - RNA, 19 nt, Artificial Sequence
  Description of Artificial Sequence: Synthetic oligonucleotide
ugaaacuuuguucuugcau

SEQ ID NO: 3249711 - RNA, 19 nt, Artificial Sequence
  Description of Artificial Sequence: Synthetic oligonucleotide
caauauuacugauauucug

SEQ ID NO: 3249712 - RNA, 19 nt, Artificial Sequence
  Description of Artificial Sequence: Synthetic oligonucleotide
guuaacauuagacauuaaa

SEQ ID NO: 3249713 - RNA, 19 nt, Artificial Sequence
  Description of Artificial Sequence: Synthetic oligonucleotide
uggaaggugguuaaucaca

SEQ ID NO: 3249714 - RNA, 19 nt, Artificial Sequence
  Description of Artificial Sequence: Synthetic oligonucleotide
acaacaagaguuucacaag

SEQ ID NO: 3249715 - RNA, 19 nt, Artificial Sequence
  Description of Artificial Sequence: Synthetic oligonucleotide
cugaauguuaucauuuguc

SEQ ID NO: 3249716 - RNA, 19 nt, Artificial Sequence
  Description of Artificial Sequence: Synthetic oligonucleotide
uauguuaaagagacccaca

SEQ ID NO: 3249717 - RNA, 19 nt, Artificial Sequence
  Description of Artificial Sequence: Synthetic oligonucleotide
aauaguuucaguuugaaaa

SEQ ID NO: 3249718 - RNA, 19 nt, Artificial Sequence
  Description of Artificial Sequence: Synthetic oligonucleotide
acaagaaucaaucaaaauc

SEQ ID NO: 3249719 - RNA, 19 nt, Artificial Sequence
  Description of Artificial Sequence: Synthetic oligonucleotide
aauccaaccauuaacaacc

SEQ ID NO: 3249720 - RNA, 19 nt, Artificial Sequence
  Description of Artificial Sequence: Synthetic oligonucleotide
ugaacaauuacaauaaaug

SEQ ID NO: 3249721 - RNA, 19 nt, Artificial Sequence
  Description of Artificial Sequence: Synthetic oligonucleotide
uuuauaaccaguuuaaagu

SEQ ID NO: 3249722 - RNA, 19 nt, Artificial Sequence
  Description of Artificial Sequence: Synthetic oligonucleotide
uacauaagcacuuacacag

SEQ ID NO: 3249723 - RNA, 19 nt, Artificial Sequence
  Description of Artificial Sequence: Synthetic oligonucleotide
uguaauuauauaaauauau

SEQ ID NO: 3249724 - RNA, 19 nt, Artificial Sequence
  Description of Artificial Sequence: Synthetic oligonucleotide
auuguaauuauauaaauau

SEQ ID NO: 3249725 - RNA, 19 nt, Artificial Sequence
  Description of Artificial Sequence: Synthetic oligonucleotide
uuuuauaaccaguuuaaag

SEQ ID NO: 3249726 - RNA, 19 nt, Artificial Sequence
  Description of Artificial Sequence: Synthetic oligonucleotide
agaacauuaauucgaaagg

SEQ ID NO: 3249727 - RNA, 19 nt, Artificial Sequence
  Description of Artificial Sequence: Synthetic oligonucleotide
uucaguuugaaaaucucgg

SEQ ID NO: 3249728 - RNA, 19 nt, Artificial Sequence
  Description of Artificial Sequence: Synthetic oligonucleotide
ucacauacuaguaacauac

SEQ ID NO: 3249729 - RNA, 19 nt, Artificial Sequence
  Description of Artificial Sequence: Synthetic oligonucleotide
guuguuacaagcuucaagc

SEQ ID NO: 3249730 - RNA, 19 nt, Artificial Sequence
  Description of Artificial Sequence: Synthetic oligonucleotide
ucuaucaucacauacuagu

SEQ ID NO: 3249731 - RNA, 19 nt, Artificial Sequence
  Description of Artificial Sequence: Synthetic oligonucleotide
aaucaaucaaaaucuccac

SEQ ID NO: 3249732 - RNA, 19 nt, Artificial Sequence
  Description of Artificial Sequence: Synthetic oligonucleotide
ucaaguacaagaaucaauc

SEQ ID NO: 3249733 - RNA, 19 nt, Artificial Sequence
  Description of Artificial Sequence: Synthetic oligonucleotide
uuauuuucuacauagacuu

SEQ ID NO: 3249734 - RNA, 19 nt, Artificial Sequence
  Description of Artificial Sequence: Synthetic oligonucleotide
acaauuacaauaaauguuc

SEQ ID NO: 3249735 - RNA, 19 nt, Artificial Sequence
  Description of Artificial Sequence: Synthetic oligonucleotide
aauucgaaaggacucacug

SEQ ID NO: 3249736 - RNA, 19 nt, Artificial Sequence
  Description of Artificial Sequence: Synthetic oligonucleotide
uuucaguuugaaaaucucg

SEQ ID NO: 3249737 - RNA, 19 nt, Artificial Sequence
  Description of Artificial Sequence: Synthetic oligonucleotide
aaacaaagguucuggcucc

SEQ ID NO: 3249738 - RNA, 19 nt, Artificial Sequence
  Description of Artificial Sequence: Synthetic oligonucleotide
uuaccuaaaugccuaauag

SEQ ID NO: 3249739 - RNA, 19 nt, Artificial Sequence
  Description of Artificial Sequence: Synthetic oligonucleotide
auauucuaucaucacauac

SEQ ID NO: 3249740 - RNA, 19 nt, Artificial Sequence
  Description of Artificial Sequence: Synthetic oligonucleotide
ucaaaauccaaccauuaac

SEQ ID NO: 3249741 - RNA, 19 nt, Artificial Sequence
  Description of Artificial Sequence: Synthetic oligonucleotide
uaaauauucauacaaucau

SEQ ID NO: 3249742 - RNA, 19 nt, Artificial Sequence
  Description of Artificial Sequence: Synthetic oligonucleotide
auuacaauaaauguuccuc

SEQ ID NO: 3249743 - RNA, 19 nt, Artificial Sequence
  Description of Artificial Sequence: Synthetic oligonucleotide
ucuuugaacaauuacaaua

SEQ ID NO: 3249744 - RNA, 19 nt, Artificial Sequence
  Description of Artificial Sequence: Synthetic oligonucleotide
uacacuuucacuugcgccg

SEQ ID NO: 3249745 - RNA, 19 nt, Artificial Sequence
  Description of Artificial Sequence: Synthetic oligonucleotide
ugauuuucccaccaaauca

SEQ ID NO: 3249746 - RNA, 19 nt, Artificial Sequence
  Description of Artificial Sequence: Synthetic oligonucleotide
gagcacuuuaccuaaaugc

SEQ ID NO: 3249747 - RNA, 19 nt, Artificial Sequence
  Description of Artificial Sequence: Synthetic oligonucleotide
uaaauguuccucaaguaca

SEQ ID NO: 3249748 - RNA, 19 nt, Artificial Sequence
  Description of Artificial Sequence: Synthetic oligonucleotide
aaauuguaauuauauaaau

SEQ ID NO: 3249749 - RNA, 19 nt, Artificial Sequence
  Description of Artificial Sequence: Synthetic oligonucleotide
uauucuaucaucacauacu

SEQ ID NO: 3249750 - RNA, 19 nt, Artificial Sequence
  Description of Artificial Sequence: Synthetic oligonucleotide
uucuacauagacuuaacga

SEQ ID NO: 3249751 - RNA, 19 nt, Artificial Sequence
  Description of Artificial Sequence: Synthetic oligonucleotide
ucuacauagacuuaacgaa

SEQ ID NO: 3249752 - RNA, 19 nt, Artificial Sequence
  Description of Artificial Sequence: Synthetic oligonucleotide
uuaacaaccauauucuauc

SEQ ID NO: 3249753 - RNA, 19 nt, Artificial Sequence
  Description of Artificial Sequence: Synthetic oligonucleotide
ugaacugcugaauuaaccc

SEQ ID NO: 3249754 - RNA, 19 nt, Artificial Sequence
  Description of Artificial Sequence: Synthetic oligonucleotide
ucugcaaguacacaggaac

SEQ ID NO: 3249755 - RNA, 19 nt, Artificial Sequence
  Description of Artificial Sequence: Synthetic oligonucleotide
uuuaaaguuuugauuuucc

SEQ ID NO: 3249756 - RNA, 19 nt, Artificial Sequence
  Description of Artificial Sequence: Synthetic oligonucleotide
acaaccauauucuaucauc

SEQ ID NO: 3249757 - RNA, 19 nt, Artificial Sequence
  Description of Artificial Sequence: Synthetic oligonucleotide
ucaaauauugaacgugcag

SEQ ID NO: 3249758 - RNA, 19 nt, Artificial Sequence
  Description of Artificial Sequence: Synthetic oligonucleotide
caaauauugaacgugcagg

SEQ ID NO: 3249759 - RNA, 19 nt, Artificial Sequence
  Description of Artificial Sequence: Synthetic oligonucleotide
uuaacgaaacccuaucuca

SEQ ID NO: 3249760 - RNA, 19 nt, Artificial Sequence
  Description of Artificial Sequence: Synthetic oligonucleotide
acaagcuucaagcauaugu

SEQ ID NO: 3249761 - RNA, 19 nt, Artificial Sequence
  Description of Artificial Sequence: Synthetic oligonucleotide
aaaauuguaauuauauaaa

SEQ ID NO: 3249762 - RNA, 19 nt, Artificial Sequence
  Description of Artificial Sequence: Synthetic oligonucleotide
aaguuuugauuuucccacc

SEQ ID NO: 3249763 - RNA, 19 nt, Artificial Sequence
  Description of Artificial Sequence: Synthetic oligonucleotide
uacaaucauauacuuauac

SEQ ID NO: 3249764 - RNA, 19 nt, Artificial Sequence
  Description of Artificial Sequence: Synthetic oligonucleotide
aauauugaacgugcaggcc

SEQ ID NO: 3249765 - RNA, 19 nt, Artificial Sequence
  Description of Artificial Sequence: Synthetic oligonucleotide
aauuacaauaaauguuccu

SEQ ID NO: 3249766 - RNA, 19 nt, Artificial Sequence
  Description of Artificial Sequence: Synthetic oligonucleotide
uaacccauucuuuagggag

SEQ ID NO: 3249767 - RNA, 19 nt, Artificial Sequence
  Description of Artificial Sequence: Synthetic oligonucleotide
uguuguuacaagcuucaag

SEQ ID NO: 3249768 - RNA, 19 nt, Artificial Sequence
  Description of Artificial Sequence: Synthetic oligonucleotide
acuaguaacauaccacauc

SEQ ID NO: 3249769 - RNA, 19 nt, Artificial Sequence
  Description of Artificial Sequence: Synthetic oligonucleotide
aucucuuuagcuuauauuu

SEQ ID NO: 3249770 - RNA, 19 nt, Artificial Sequence
  Description of Artificial Sequence: Synthetic oligonucleotide
aagaaaggucauucuauag

SEQ ID NO: 3249771 - RNA, 19 nt, Artificial Sequence
  Description of Artificial Sequence: Synthetic oligonucleotide
aguaacauaccacaucucu

SEQ ID NO: 3249772 - RNA, 19 nt, Artificial Sequence
  Description of Artificial Sequence: Synthetic oligonucleotide
aacaguuucccaugauuuc

SEQ ID NO: 3249773 - RNA, 19 nt, Artificial Sequence
  Description of Artificial Sequence: Synthetic oligonucleotide
uuuuccuacacuuucacuu

SEQ ID NO: 3249774 - RNA, 19 nt, Artificial Sequence
  Description of Artificial Sequence: Synthetic oligonucleotide
cuaaaugccuaauaguuuc

SEQ ID NO: 3249775 - RNA, 19 nt, Artificial Sequence
  Description of Artificial Sequence: Synthetic oligonucleotide
uuaaaguuuugauuuuccc

SEQ ID NO: 3249776 - RNA, 19 nt, Artificial Sequence
  Description of Artificial Sequence: Synthetic oligonucleotide
cauacuaguaacauaccac

SEQ ID NO: 3249777 - RNA, 19 nt, Artificial Sequence
  Description of Artificial Sequence: Synthetic oligonucleotide
uuacaauaaauguuccuca

SEQ ID NO: 3249778 - RNA, 19 nt, Artificial Sequence
  Description of Artificial Sequence: Synthetic oligonucleotide
auacuaguaacauaccaca

SEQ ID NO: 3249779 - RNA, 19 nt, Artificial Sequence
  Description of Artificial Sequence: Synthetic oligonucleotide
agaaucaaucaaaaucucc

SEQ ID NO: 3249780 - RNA, 19 nt, Artificial Sequence
  Description of Artificial Sequence: Synthetic oligonucleotide
aucauauacuuauacauaa

SEQ ID NO: 3249781 - RNA, 19 nt, Artificial Sequence
  Description of Artificial Sequence: Synthetic oligonucleotide
agcacuuuaccuaaaugcc

SEQ ID NO: 3249782 - RNA, 19 nt, Artificial Sequence
  Description of Artificial Sequence: Synthetic oligonucleotide
aaccauauucuaucaucac

SEQ ID NO: 3249783 - RNA, 19 nt, Artificial Sequence
  Description of Artificial Sequence: Synthetic oligonucleotide
uugaacaauuacaauaaau

SEQ ID NO: 3249784 - RNA, 19 nt, Artificial Sequence
  Description of Artificial Sequence: Synthetic oligonucleotide
uugaaaaucucggaaacca

SEQ ID NO: 3249785 - RNA, 19 nt, Artificial Sequence
  Description of Artificial Sequence: Synthetic oligonucleotide
aagagagcaaucugcaagu

SEQ ID NO: 3249786 - RNA, 19 nt, Artificial Sequence
  Description of Artificial Sequence: Synthetic oligonucleotide
agaaaggucauucuauaga

SEQ ID NO: 3249787 - RNA, 19 nt, Artificial Sequence
  Description of Artificial Sequence: Synthetic oligonucleotide
aacauagugaccgccaucu

SEQ ID NO: 3249788 - RNA, 19 nt, Artificial Sequence
  Description of Artificial Sequence: Synthetic oligonucleotide
cauuaauucgaaaggacuc

SEQ ID NO: 3249789 - RNA, 19 nt, Artificial Sequence
  Description of Artificial Sequence: Synthetic oligonucleotide
uucgaaaggacucacugaa

SEQ ID NO: 3249790 - RNA, 19 nt, Artificial Sequence
  Description of Artificial Sequence: Synthetic oligonucleotide
auaaauauucauacaauca

SEQ ID NO: 3249791 - RNA, 19 nt, Artificial Sequence
  Description of Artificial Sequence: Synthetic oligonucleotide
gaaucaaucaaaaucucca

SEQ ID NO: 3249792 - RNA, 19 nt, Artificial Sequence
  Description of Artificial Sequence: Synthetic oligonucleotide
cauaacccauucuuuaggg

SEQ ID NO: 3249793 - RNA, 19 nt, Artificial Sequence
  Description of Artificial Sequence: Synthetic oligonucleotide
caaacaaagguucuggcuc

SEQ ID NO: 3249794 - RNA, 19 nt, Artificial Sequence
  Description of Artificial Sequence: Synthetic oligonucleotide
uccuugaggagauacauaa

SEQ ID NO: 3249795 - RNA, 19 nt, Artificial Sequence
  Description of Artificial Sequence: Synthetic oligonucleotide
acaguuucccaugauuucc

SEQ ID NO: 3249796 - RNA, 19 nt, Artificial Sequence
  Description of Artificial Sequence: Synthetic oligonucleotide
acacuugcugaacugguac

SEQ ID NO: 3249797 - RNA, 19 nt, Artificial Sequence
  Description of Artificial Sequence: Synthetic oligonucleotide
auauugaacgugcaggccu

SEQ ID NO: 3249798 - RNA, 19 nt, Artificial Sequence
  Description of Artificial Sequence: Synthetic oligonucleotide
agcaauuccuccaccaucc

SEQ ID NO: 3249799 - RNA, 19 nt, Artificial Sequence
  Description of Artificial Sequence: Synthetic oligonucleotide
cauagacuuaacgaaaccc

SEQ ID NO: 3249800 - RNA, 19 nt, Artificial Sequence
  Description of Artificial Sequence: Synthetic oligonucleotide
ugaggagauacauaaccca

SEQ ID NO: 3249801 - RNA, 19 nt, Artificial Sequence
  Description of Artificial Sequence: Synthetic oligonucleotide
aaagaucucuaugagucug

SEQ ID NO: 3249802 - RNA, 19 nt, Artificial Sequence
  Description of Artificial Sequence: Synthetic oligonucleotide
gaaacacuugcugaacugg

SEQ ID NO: 3249803 - RNA, 19 nt, Artificial Sequence
  Description of Artificial Sequence: Synthetic oligonucleotide
uuauaaccaguuuaaaguu

SEQ ID NO: 3249804 - RNA, 19 nt, Artificial Sequence
  Description of Artificial Sequence: Synthetic oligonucleotide
accaaacaaagguucuggc

SEQ ID NO: 3249805 - RNA, 19 nt, Artificial Sequence
  Description of Artificial Sequence: Synthetic oligonucleotide
ugaaaauuguaauuauaua

SEQ ID NO: 3249806 - RNA, 19 nt, Artificial Sequence
  Description of Artificial Sequence: Synthetic oligonucleotide
aauuguaauuauauaaaua

SEQ ID NO: 3249807 - RNA, 19 nt, Artificial Sequence
  Description of Artificial Sequence: Synthetic oligonucleotide
acaauaaauguuccucaag

SEQ ID NO: 3249808 - RNA, 19 nt, Artificial Sequence
  Description of Artificial Sequence: Synthetic oligonucleotide
aguuugaaaaucucggaaa

SEQ ID NO: 3249809 - RNA, 19 nt, Artificial Sequence
  Description of Artificial Sequence: Synthetic oligonucleotide
uuuaccuaaaugccuaaua

SEQ ID NO: 3249810 - RNA, 19 nt, Artificial Sequence
  Description of Artificial Sequence: Synthetic oligonucleotide
agcacuuacacagacuuag

SEQ ID NO: 3249811 - RNA, 19 nt, Artificial Sequence
  Description of Artificial Sequence: Synthetic oligonucleotide
aaaagaucucuaugagucu

SEQ ID NO: 3249812 - RNA, 19 nt, Artificial Sequence
  Description of Artificial Sequence: Synthetic oligonucleotide
aaacauagugaccgccauc

SEQ ID NO: 3249813 - RNA, 19 nt, Artificial Sequence
  Description of Artificial Sequence: Synthetic oligonucleotide
aaucugcaaguacacagga

SEQ ID NO: 3249814 - RNA, 19 nt, Artificial Sequence
  Description of Artificial Sequence: Synthetic oligonucleotide
uaacaguuucccaugauuu

SEQ ID NO: 3249815 - RNA, 19 nt, Artificial Sequence
  Description of Artificial Sequence: Synthetic oligonucleotide
uugauuuucccaccaaauc

SEQ ID NO: 3249816 - RNA, 19 nt, Artificial Sequence
  Description of Artificial Sequence: Synthetic oligonucleotide
uuguaauuauauaaauaua

SEQ ID NO: 3249817 - RNA, 19 nt, Artificial Sequence
  Description of Artificial Sequence: Synthetic oligonucleotide
uaaauuucccucaaaauag

SEQ ID NO: 3249818 - RNA, 19 nt, Artificial Sequence
  Description of Artificial Sequence: Synthetic oligonucleotide
aaaccaaugugccagcugc

SEQ ID NO: 3249819 - RNA, 19 nt, Artificial Sequence
  Description of Artificial Sequence: Synthetic oligonucleotide
ugaaaauaaagucagauua

SEQ ID NO: 3249820 - RNA, 19 nt, Artificial Sequence
  Description of Artificial Sequence: Synthetic oligonucleotide
aauaaaaccaaugugccag

SEQ ID NO: 3249821 - RNA, 19 nt, Artificial Sequence
  Description of Artificial Sequence: Synthetic oligonucleotide
aaucguaggaaugaggagc

SEQ ID NO: 3249822 - RNA, 19 nt, Artificial Sequence
  Description of Artificial Sequence: Synthetic oligonucleotide
aaugggaccaaguacauca

SEQ ID NO: 3249823 - RNA, 19 nt, Artificial Sequence
  Description of Artificial Sequence: Synthetic oligonucleotide
aaaaugcugaggcaggugg

SEQ ID NO: 3249824 - RNA, 19 nt, Artificial Sequence
  Description of Artificial Sequence: Synthetic oligonucleotide
aaauaccacaagcagagag

SEQ ID NO: 3249825 - RNA, 19 nt, Artificial Sequence
  Description of Artificial Sequence: Synthetic oligonucleotide
uaucugaaaauaaagucag

SEQ ID NO: 3249826 - RNA, 19 nt, Artificial Sequence
  Description of Artificial Sequence: Synthetic oligonucleotide
ucagucacaauccauaaug

SEQ ID NO: 3249827 - RNA, 19 nt, Artificial Sequence
  Description of Artificial Sequence: Synthetic oligonucleotide
aauccaaugaacacauucc

SEQ ID NO: 3249828 - RNA, 19 nt, Artificial Sequence
  Description of Artificial Sequence: Synthetic oligonucleotide
auaacaaccacaauuacuc

SEQ ID NO: 3249829 - RNA, 19 nt, Artificial Sequence
  Description of Artificial Sequence: Synthetic oligonucleotide
aaguuuaccaauccaauga

SEQ ID NO: 3249830 - RNA, 19 nt, Artificial Sequence
  Description of Artificial Sequence: Synthetic oligonucleotide
gaaacugccaagcagauca

SEQ ID NO: 3249831 - RNA, 19 nt, Artificial Sequence
  Description of Artificial Sequence: Synthetic oligonucleotide
cacaagaaagauaacaacc

SEQ ID NO: 3249832 - RNA, 19 nt, Artificial Sequence
  Description of Artificial Sequence: Synthetic oligonucleotide
aaguacaucaggucaaaag

SEQ ID NO: 3249833 - RNA, 19 nt, Artificial Sequence
  Description of Artificial Sequence: Synthetic oligonucleotide
uuaacagcaauaaccuugg

SEQ ID NO: 3249834 - RNA, 19 nt, Artificial Sequence
  Description of Artificial Sequence: Synthetic oligonucleotide
gaaaacacaagaaagauaa

SEQ ID NO: 3249835 - RNA, 19 nt, Artificial Sequence
  Description of Artificial Sequence: Synthetic oligonucleotide
aauacaacagcauuuucau

SEQ ID NO: 3249836 - RNA, 19 nt, Artificial Sequence
  Description of Artificial Sequence: Synthetic oligonucleotide
aaauaaaaggaacaaugau

SEQ ID NO: 3249837 - RNA, 19 nt, Artificial Sequence
  Description of Artificial Sequence: Synthetic oligonucleotide
uggacuguaagaaucguag

SEQ ID NO: 3249838 - RNA, 19 nt, Artificial Sequence
  Description of Artificial Sequence: Synthetic oligonucleotide
aauaccacaagcagagagc

SEQ ID NO: 3249839 - RNA, 19 nt, Artificial Sequence
  Description of Artificial Sequence: Synthetic oligonucleotide
aaaguuuaccaauccaaug

SEQ ID NO: 3249840 - RNA, 19 nt, Artificial Sequence
  Description of Artificial Sequence: Synthetic oligonucleotide
uaugguugcaucaacaaau

SEQ ID NO: 3249841 - RNA, 19 nt, Artificial Sequence
  Description of Artificial Sequence: Synthetic oligonucleotide
aagugggcaauuuugagga

SEQ ID NO: 3249842 - RNA, 19 nt, Artificial Sequence
  Description of Artificial Sequence: Synthetic oligonucleotide
aaaagaaugaggaaauaca

SEQ ID NO: 3249843 - RNA, 19 nt, Artificial Sequence
  Description of Artificial Sequence: Synthetic oligonucleotide
uucaaccagaggaaaaggg

SEQ ID NO: 3249844 - RNA, 19 nt, Artificial Sequence
  Description of Artificial Sequence: Synthetic oligonucleotide
aaaauaaaaggaacaauga

SEQ ID NO: 3249845 - RNA, 19 nt, Artificial Sequence
  Description of Artificial Sequence: Synthetic oligonucleotide
auccaaugaacacauuccc

SEQ ID NO: 3249846 - RNA, 19 nt, Artificial Sequence
  Description of Artificial Sequence: Synthetic oligonucleotide
ugguucuugacccagucag

SEQ ID NO: 3249847 - RNA, 19 nt, Artificial Sequence
  Description of Artificial Sequence: Synthetic oligonucleotide
acacaagaaagauaacaac

SEQ ID NO: 3249848 - RNA, 19 nt, Artificial Sequence
  Description of Artificial Sequence: Synthetic oligonucleotide
aauggaucagagcauuuug

SEQ ID NO: 3249849 - RNA, 19 nt, Artificial Sequence
  Description of Artificial Sequence: Synthetic oligonucleotide
aagcaauuaggguuuuaac

SEQ ID NO: 3249850 - RNA, 19 nt, Artificial Sequence
  Description of Artificial Sequence: Synthetic oligonucleotide
agcaauuaggguuuuaaca

SEQ ID NO: 3249851 - RNA, 19 nt, Artificial Sequence
  Description of Artificial Sequence: Synthetic oligonucleotide
aaauacaacagcauuuuca

SEQ ID NO: 3249852 - RNA, 19 nt, Artificial Sequence
  Description of Artificial Sequence: Synthetic oligonucleotide
aaaccauguagacaguuga

SEQ ID NO: 3249853 - RNA, 19 nt, Artificial Sequence
  Description of Artificial Sequence: Synthetic oligonucleotide
uuguaucugaaaauaaagu

SEQ ID NO: 3249854 - RNA, 19 nt, Artificial Sequence
  Description of Artificial Sequence: Synthetic oligonucleotide
gguuuuaacagcaauaacc

SEQ ID NO: 3249855 - RNA, 19 nt, Artificial Sequence
  Description of Artificial Sequence: Synthetic oligonucleotide
ugcaucaacaaauaccaca

SEQ ID NO: 3249856 - RNA, 19 nt, Artificial Sequence
  Description of Artificial Sequence: Synthetic oligonucleotide
agucagauuacuucuagug

SEQ ID NO: 3249857 - RNA, 19 nt, Artificial Sequence
  Description of Artificial Sequence: Synthetic oligonucleotide
aaaauaaagucagauuacu

SEQ ID NO: 3249858 - RNA, 19 nt, Artificial Sequence
  Description of Artificial Sequence: Synthetic oligonucleotide
uguaagaaucguaggaaug

SEQ ID NO: 3249859 - RNA, 19 nt, Artificial Sequence
  Description of Artificial Sequence: Synthetic oligonucleotide
aauaaccuugguuguaucu

SEQ ID NO: 3249860 - RNA, 19 nt, Artificial Sequence
  Description of Artificial Sequence: Synthetic oligonucleotide
aaauaaaaccaaugugcca

SEQ ID NO: 3249861 - RNA, 19 nt, Artificial Sequence
  Description of Artificial Sequence: Synthetic oligonucleotide
acaaauaccacaagcagag

SEQ ID NO: 3249862 - RNA, 19 nt, Artificial Sequence
  Description of Artificial Sequence: Synthetic oligonucleotide
ucuggaaacugccaagcag

SEQ ID NO: 3249863 - RNA, 19 nt, Artificial Sequence
  Description of Artificial Sequence: Synthetic oligonucleotide
ucacaauccauaauggauc

SEQ ID NO: 3249864 - RNA, 19 nt, Artificial Sequence
  Description of Artificial Sequence: Synthetic oligonucleotide
aagugcuucaagcaguaga

SEQ ID NO: 3249865 - RNA, 19 nt, Artificial Sequence
  Description of Artificial Sequence: Synthetic oligonucleotide
aguugaucagucacaaucc

SEQ ID NO: 3249866 - RNA, 19 nt, Artificial Sequence
  Description of Artificial Sequence: Synthetic oligonucleotide
gauuuucugguucuugacc

SEQ ID NO: 3249867 - RNA, 19 nt, Artificial Sequence
  Description of Artificial Sequence: Synthetic oligonucleotide
guuguaucugaaaauaaag

SEQ ID NO: 3249868 - RNA, 19 nt, Artificial Sequence
  Description of Artificial Sequence: Synthetic oligonucleotide
caggucaaaagcaauuagg

SEQ ID NO: 3249869 - RNA, 19 nt, Artificial Sequence
  Description of Artificial Sequence: Synthetic oligonucleotide
uagaaaaugcugaggcagg

SEQ ID NO: 3249870 - RNA, 19 nt, Artificial Sequence
  Description of Artificial Sequence: Synthetic oligonucleotide
uucccaagcauuccagugg

SEQ ID NO: 3249871 - RNA, 19 nt, Artificial Sequence
  Description of Artificial Sequence: Synthetic oligonucleotide
ugaggaaguagaaaaugcu

SEQ ID NO: 3249872 - RNA, 19 nt, Artificial Sequence
  Description of Artificial Sequence: Synthetic oligonucleotide
aagaaaacacaagaaagau

SEQ ID NO: 3249873 - RNA, 19 nt, Artificial Sequence
  Description of Artificial Sequence: Synthetic oligonucleotide
ucagauuacuucuagugau

SEQ ID NO: 3249874 - RNA, 19 nt, Artificial Sequence
  Description of Artificial Sequence: Synthetic oligonucleotide
uaggaagugcuucaagcag

SEQ ID NO: 3249875 - RNA, 19 nt, Artificial Sequence
  Description of Artificial Sequence: Synthetic oligonucleotide
caguugaucagucacaauc

SEQ ID NO: 3249876 - RNA, 19 nt, Artificial Sequence
  Description of Artificial Sequence: Synthetic oligonucleotide
aggucaaaagcaauuaggg

SEQ ID NO: 3249877 - RNA, 19 nt, Artificial Sequence
  Description of Artificial Sequence: Synthetic oligonucleotide
uguaaauuucccucaaaau

SEQ ID NO: 3249878 - RNA, 19 nt, Artificial Sequence
  Description of Artificial Sequence: Synthetic oligonucleotide
auuacuucuagugauuaug

SEQ ID NO: 3249879 - RNA, 19 nt, Artificial Sequence
  Description of Artificial Sequence: Synthetic oligonucleotide
guugcaucaacaaauacca

SEQ ID NO: 3249880 - RNA, 19 nt, Artificial Sequence
  Description of Artificial Sequence: Synthetic oligonucleotide
ucagaaaaguuuaccaauc

SEQ ID NO: 3249881 - RNA, 19 nt, Artificial Sequence
  Description of Artificial Sequence: Synthetic oligonucleotide
ucaaaagcaauuaggguuu

SEQ ID NO: 3249882 - RNA, 19 nt, Artificial Sequence
  Description of Artificial Sequence: Synthetic oligonucleotide
ucaggucaaaagcaauuag

SEQ ID NO: 3249883 - RNA, 19 nt, Artificial Sequence
  Description of Artificial Sequence: Synthetic oligonucleotide
auccauaauggaucagagc

SEQ ID NO: 3249884 - RNA, 19 nt, Artificial Sequence
  Description of Artificial Sequence: Synthetic oligonucleotide
aagauaacaaccacaauua

SEQ ID NO: 3249885 - RNA, 19 nt, Artificial Sequence
  Description of Artificial Sequence: Synthetic oligonucleotide
agauaacaaccacaauuac

SEQ ID NO: 3249886 - RNA, 19 nt, Artificial Sequence
  Description of Artificial Sequence: Synthetic oligonucleotide
uuaccaguaucauauacau

SEQ ID NO: 3249887 - RNA, 19 nt, Artificial Sequence
  Description of Artificial Sequence: Synthetic oligonucleotide
aaugaugccagggacacaa

SEQ ID NO: 3249888 - RNA, 19 nt, Artificial Sequence
  Description of Artificial Sequence: Synthetic oligonucleotide
ugauuauguaaauuucccu

SEQ ID NO: 3249889 - RNA, 19 nt, Artificial Sequence
  Description of Artificial Sequence: Synthetic oligonucleotide
aaguugaugaaggugauuu

SEQ ID NO: 3249890 - RNA, 19 nt, Artificial Sequence
  Description of Artificial Sequence: Synthetic oligonucleotide
uuacuucuagugauuaugu

SEQ ID NO: 3249891 - RNA, 19 nt, Artificial Sequence
  Description of Artificial Sequence: Synthetic oligonucleotide
aaauuucccucaaaauagg

SEQ ID NO: 3249892 - RNA, 19 nt, Artificial Sequence
  Description of Artificial Sequence: Synthetic oligonucleotide
aacaaccacaauuacucau

SEQ ID NO: 3249893 - RNA, 19 nt, Artificial Sequence
  Description of Artificial Sequence: Synthetic oligonucleotide
augaaggugauuuucuggu

SEQ ID NO: 3249894 - RNA, 19 nt, Artificial Sequence
  Description of Artificial Sequence: Synthetic oligonucleotide
caauccaaugaacacauuc

SEQ ID NO: 3249895 - RNA, 19 nt, Artificial Sequence
  Description of Artificial Sequence: Synthetic oligonucleotide
gaaugaggaaauacaacag

SEQ ID NO: 3249896 - RNA, 19 nt, Artificial Sequence
  Description of Artificial Sequence: Synthetic oligonucleotide
agaaaaguuuaccaaucca

SEQ ID NO: 3249897 - RNA, 19 nt, Artificial Sequence
  Description of Artificial Sequence: Synthetic oligonucleotide
ugcuggacuguaagaaucg

SEQ ID NO: 3249898 - RNA, 19 nt, Artificial Sequence
  Description of Artificial Sequence: Synthetic oligonucleotide
ugaucagucacaauccaua

SEQ ID NO: 3249899 - RNA, 19 nt, Artificial Sequence
  Description of Artificial Sequence: Synthetic oligonucleotide
aauccauaauggaucagag

SEQ ID NO: 3249900 - RNA, 19 nt, Artificial Sequence
  Description of Artificial Sequence: Synthetic oligonucleotide
auaggaagugcuucaagca

SEQ ID NO: 3249901 - RNA, 19 nt, Artificial Sequence
  Description of Artificial Sequence: Synthetic oligonucleotide
aauuaggguuuuaacagca

SEQ ID NO: 3249902 - RNA, 19 nt, Artificial Sequence
  Description of Artificial Sequence: Synthetic oligonucleotide
auguaaauuucccucaaaa

SEQ ID NO: 3249903 - RNA, 19 nt, Artificial Sequence
  Description of Artificial Sequence: Synthetic oligonucleotide
uuaccaauccaaugaacac

SEQ ID NO: 3249904 - RNA, 19 nt, Artificial Sequence
  Description of Artificial Sequence: Synthetic oligonucleotide
acaaugaugccagggacac

SEQ ID NO: 3249905 - RNA, 19 nt, Artificial Sequence
  Description of Artificial Sequence: Synthetic oligonucleotide
gacuguaagaaucguagga

SEQ ID NO: 3249906 - RNA, 19 nt, Artificial Sequence
  Description of Artificial Sequence: Synthetic oligonucleotide
aauuacucauucuccacuu

SEQ ID NO: 3249907 - RNA, 19 nt, Artificial Sequence
  Description of Artificial Sequence: Synthetic oligonucleotide
cuagaaucuucagagcugg

SEQ ID NO: 3249908 - RNA, 19 nt, Artificial Sequence
  Description of Artificial Sequence: Synthetic oligonucleotide
gaaaaguuuaccaauccaa

SEQ ID NO: 3249909 - RNA, 19 nt, Artificial Sequence
  Description of Artificial Sequence: Synthetic oligonucleotide
aaagcaauuaggguuuuaa

SEQ ID NO: 3249910 - RNA, 19 nt, Artificial Sequence
  Description of Artificial Sequence: Synthetic oligonucleotide
cuacuuguaguaugguugc

SEQ ID NO: 3249911 - RNA, 19 nt, Artificial Sequence
  Description of Artificial Sequence: Synthetic oligonucleotide
uuuugaggaaguagaaaau

SEQ ID NO: 3249912 - RNA, 19 nt, Artificial Sequence
  Description of Artificial Sequence: Synthetic oligonucleotide
aagaaucguaggaaugagg

SEQ ID NO: 3249913 - RNA, 19 nt, Artificial Sequence
  Description of Artificial Sequence: Synthetic oligonucleotide
agaaucguaggaaugagga

SEQ ID NO: 3249914 - RNA, 19 nt, Artificial Sequence
  Description of Artificial Sequence: Synthetic oligonucleotide
acaagaaagauaacaacca

SEQ ID NO: 3249915 - RNA, 19 nt, Artificial Sequence
  Description of Artificial Sequence: Synthetic oligonucleotide
caauuaggguuuuaacagc

SEQ ID NO: 3249916 - RNA, 19 nt, Artificial Sequence
  Description of Artificial Sequence: Synthetic oligonucleotide
aggaugaaguugaugaagg

SEQ ID NO: 3249917 - RNA, 19 nt, Artificial Sequence
  Description of Artificial Sequence: Synthetic oligonucleotide
aagacaaggcaauaagugc

SEQ ID NO: 3249918 - RNA, 19 nt, Artificial Sequence
  Description of Artificial Sequence: Synthetic oligonucleotide
agugauauagcauacuguc

SEQ ID NO: 3249919 - RNA, 19 nt, Artificial Sequence
  Description of Artificial Sequence: Synthetic oligonucleotide
aagguaacagcacauacag

SEQ ID NO: 3249920 - RNA, 19 nt, Artificial Sequence
  Description of Artificial Sequence: Synthetic oligonucleotide
aauacacacagcgugagcg

SEQ ID NO: 3249921 - RNA, 19 nt, Artificial Sequence
  Description of Artificial Sequence: Synthetic oligonucleotide
aaggcaauaagugccagcc

SEQ ID NO: 3249922 - RNA, 19 nt, Artificial Sequence
  Description of Artificial Sequence: Synthetic oligonucleotide
gguaacagcacauacaggg

SEQ ID NO: 3249923 - RNA, 19 nt, Artificial Sequence
  Description of Artificial Sequence: Synthetic oligonucleotide
ugauauagcauacugucug

SEQ ID NO: 3249924 - RNA, 19 nt, Artificial Sequence
  Description of Artificial Sequence: Synthetic oligonucleotide
ucaugguugaacauguccc

SEQ ID NO: 3249925 - RNA, 19 nt, Artificial Sequence
  Description of Artificial Sequence: Synthetic oligonucleotide
aaagacaaggcaauaagug

SEQ ID NO: 3249926 - RNA, 19 nt, Artificial Sequence
  Description of Artificial Sequence: Synthetic oligonucleotide
agugauaacaggcucgaag

SEQ ID NO: 3249927 - RNA, 19 nt, Artificial Sequence
  Description of Artificial Sequence: Synthetic oligonucleotide
gugauaacaggcucgaagg

SEQ ID NO: 3249928 - RNA, 19 nt, Artificial Sequence
  Description of Artificial Sequence: Synthetic oligonucleotide
agaaagacaaggcaauaag

SEQ ID NO: 3249929 - RNA, 19 nt, Artificial Sequence
  Description of Artificial Sequence: Synthetic oligonucleotide
gauacaaguucucacagca

SEQ ID NO: 3249930 - RNA, 19 nt, Artificial Sequence
  Description of Artificial Sequence: Synthetic oligonucleotide
agacaaggcaauaagugcc

SEQ ID NO: 3249931 - RNA, 19 nt, Artificial Sequence
  Description of Artificial Sequence: Synthetic oligonucleotide
gaggcaaaacuucucgucg

SEQ ID NO: 3249932 - RNA, 19 nt, Artificial Sequence
  Description of Artificial Sequence: Synthetic oligonucleotide
uaacagcacauacagggag

SEQ ID NO: 3249933 - RNA, 19 nt, Artificial Sequence
  Description of Artificial Sequence: Synthetic oligonucleotide
ugcacaucacuccacagug

SEQ ID NO: 3249934 - RNA, 19 nt, Artificial Sequence
  Description of Artificial Sequence: Synthetic oligonucleotide
ugugcuucccgccacagca

SEQ ID NO: 3249935 - RNA, 19 nt, Artificial Sequence
  Description of Artificial Sequence: Synthetic oligonucleotide
ucucacagcaucaggagca

SEQ ID NO: 3249936 - RNA, 19 nt, Artificial Sequence
  Description of Artificial Sequence: Synthetic oligonucleotide
aucaggagcauccuggcag

SEQ ID NO: 3249937 - RNA, 19 nt, Artificial Sequence
  Description of Artificial Sequence: Synthetic oligonucleotide
acauacagcucacacggcg

SEQ ID NO: 3249938 - RNA, 19 nt, Artificial Sequence
  Description of Artificial Sequence: Synthetic oligonucleotide
acagugauauagcauacug

SEQ ID NO: 3249939 - RNA, 19 nt, Artificial Sequence
  Description of Artificial Sequence: Synthetic oligonucleotide
ugauaacaggcucgaaggg

SEQ ID NO: 3249940 - RNA, 19 nt, Artificial Sequence
  Description of Artificial Sequence: Synthetic oligonucleotide
gauaacaggcucgaagggg

SEQ ID NO: 3249941 - RNA, 19 nt, Artificial Sequence
  Description of Artificial Sequence: Synthetic oligonucleotide
agcaccugcacaucacucc

SEQ ID NO: 3249942 - RNA, 19 nt, Artificial Sequence
  Description of Artificial Sequence: Synthetic oligonucleotide
uacaaguucucacagcauc

SEQ ID NO: 3249943 - RNA, 19 nt, Artificial Sequence
  Description of Artificial Sequence: Synthetic oligonucleotide
auaagugccagccaccgga

SEQ ID NO: 3249944 - RNA, 19 nt, Artificial Sequence
  Description of Artificial Sequence: Synthetic oligonucleotide
aaacgcgagucacacugcg

SEQ ID NO: 3249945 - RNA, 19 nt, Artificial Sequence
  Description of Artificial Sequence: Synthetic oligonucleotide
accacauacagcucacacg

SEQ ID NO: 3249946 - RNA, 19 nt, Artificial Sequence
  Description of Artificial Sequence: Synthetic oligonucleotide
agugccagccaccggaggc

SEQ ID NO: 3249947 - RNA, 19 nt, Artificial Sequence
  Description of Artificial Sequence: Synthetic oligonucleotide
cacacugcggcuuuugugc

SEQ ID NO: 3249948 - RNA, 19 nt, Artificial Sequence
  Description of Artificial Sequence: Synthetic oligonucleotide
aacagcacauacagggagc

SEQ ID NO: 3249949 - RNA, 19 nt, Artificial Sequence
  Description of Artificial Sequence: Synthetic oligonucleotide
acgcgagucacacugcggc

SEQ ID NO: 3249950 - RNA, 19 nt, Artificial Sequence
  Description of Artificial Sequence: Synthetic oligonucleotide
aaguucucacagcaucagg

SEQ ID NO: 3249951 - RNA, 19 nt, Artificial Sequence
  Description of Artificial Sequence: Synthetic oligonucleotide
uugaacaugucccugcaau

SEQ ID NO: 3249952 - RNA, 19 nt, Artificial Sequence
  Description of Artificial Sequence: Synthetic oligonucleotide
ugucgcacgagcaaggguc

SEQ ID NO: 3249953 - RNA, 19 nt, Artificial Sequence
  Description of Artificial Sequence: Synthetic oligonucleotide
gauauagcauacugucugc

SEQ ID NO: 3249954 - RNA, 19 nt, Artificial Sequence
  Description of Artificial Sequence: Synthetic oligonucleotide
cacagcaucaggagcaucc

SEQ ID NO: 3249955 - RNA, 19 nt, Artificial Sequence
  Description of Artificial Sequence: Synthetic oligonucleotide
cucaugguugaacaugucc

SEQ ID NO: 3249956 - RNA, 19 nt, Artificial Sequence
  Description of Artificial Sequence: Synthetic oligonucleotide
cauacagugauauagcaua

SEQ ID NO: 3249957 - RNA, 19 nt, Artificial Sequence
  Description of Artificial Sequence: Synthetic oligonucleotide
cacagugauaacaggcucg

SEQ ID NO: 3249958 - RNA, 19 nt, Artificial Sequence
  Description of Artificial Sequence: Synthetic oligonucleotide
aauaagugccagccaccgg

SEQ ID NO: 3249959 - RNA, 19 nt, Artificial Sequence
  Description of Artificial Sequence: Synthetic oligonucleotide
gucccugcaauacacacag

SEQ ID NO: 3249960 - RNA, 19 nt, Artificial Sequence
  Description of Artificial Sequence: Synthetic oligonucleotide
aggcaaaacuucucgucgc

SEQ ID NO: 3249961 - RNA, 19 nt, Artificial Sequence
  Description of Artificial Sequence: Synthetic oligonucleotide
cuccacagugauaacaggc

SEQ ID NO: 3249962 - RNA, 19 nt, Artificial Sequence
  Description of Artificial Sequence: Synthetic oligonucleotide
ggagccaagaaagacaagg

SEQ ID NO: 3249963 - RNA, 19 nt, Artificial Sequence
  Description of Artificial Sequence: Synthetic oligonucleotide
caaaacuucucgucgcuag

SEQ ID NO: 3249964 - RNA, 19 nt, Artificial Sequence
  Description of Artificial Sequence: Synthetic oligonucleotide
auacacacagcgugagcgc

SEQ ID NO: 3249965 - RNA, 19 nt, Artificial Sequence
  Description of Artificial Sequence: Synthetic oligonucleotide
uccacagugauaacaggcu

SEQ ID NO: 3249966 - RNA, 19 nt, Artificial Sequence
  Description of Artificial Sequence: Synthetic oligonucleotide
auagcauacugucugcaca

SEQ ID NO: 3249967 - RNA, 19 nt, Artificial Sequence
  Description of Artificial Sequence: Synthetic oligonucleotide
augucccugcaauacacac

SEQ ID NO: 3249968 - RNA, 19 nt, Artificial Sequence
  Description of Artificial Sequence: Synthetic oligonucleotide
ggaaacgcgagucacacug

SEQ ID NO: 3249969 - RNA, 19 nt, Artificial Sequence
  Description of Artificial Sequence: Synthetic oligonucleotide
auacagggagccaagaaag

SEQ ID NO: 3249970 - RNA, 19 nt, Artificial Sequence
  Description of Artificial Sequence: Synthetic oligonucleotide
uucuccucaugguugaaca

SEQ ID NO: 3249971 - RNA, 19 nt, Artificial Sequence
  Description of Artificial Sequence: Synthetic oligonucleotide
ccacauacagcucacacgg

SEQ ID NO: 3249972 - RNA, 19 nt, Artificial Sequence
  Description of Artificial Sequence: Synthetic oligonucleotide
uucucacagcaucaggagc

SEQ ID NO: 3249973 - RNA, 19 nt, Artificial Sequence
  Description of Artificial Sequence: Synthetic oligonucleotide
gacauacagugauauagca

SEQ ID NO: 3249974 - RNA, 19 nt, Artificial Sequence
  Description of Artificial Sequence: Synthetic oligonucleotide
gucugcacaccacauacag

SEQ ID NO: 3249975 - RNA, 19 nt, Artificial Sequence
  Description of Artificial Sequence: Synthetic oligonucleotide
aacaugucccugcaauaca

SEQ ID NO: 3249976 - RNA, 19 nt, Artificial Sequence
  Description of Artificial Sequence: Synthetic oligonucleotide
aagaaagacaaggcaauaa

SEQ ID NO: 3249977 - RNA, 19 nt, Artificial Sequence
  Description of Artificial Sequence: Synthetic oligonucleotide
cacuccacagugauaacag

SEQ ID NO: 3249978 - RNA, 19 nt, Artificial Sequence
  Description of Artificial Sequence: Synthetic oligonucleotide
cuucucgucgcuagugucg

SEQ ID NO: 3249979 - RNA, 19 nt, Artificial Sequence
  Description of Artificial Sequence: Synthetic oligonucleotide
uccucaugguugaacaugu

SEQ ID NO: 3249980 - RNA, 19 nt, Artificial Sequence
  Description of Artificial Sequence: Synthetic oligonucleotide
cauacagcucacacggcgg

SEQ ID NO: 3249981 - RNA, 19 nt, Artificial Sequence
  Description of Artificial Sequence: Synthetic oligonucleotide
acagcacauacagggagcc

SEQ ID NO: 3249982 - RNA, 19 nt, Artificial Sequence
  Description of Artificial Sequence: Synthetic oligonucleotide
aaaacuucucgucgcuagu

SEQ ID NO: 3249983 - RNA, 19 nt, Artificial Sequence
  Description of Artificial Sequence: Synthetic oligonucleotide
uauagcauacugucugcac

SEQ ID NO: 3249984 - RNA, 19 nt, Artificial Sequence
  Description of Artificial Sequence: Synthetic oligonucleotide
acagggagccaagaaagac

SEQ ID NO: 3249985 - RNA, 19 nt, Artificial Sequence
  Description of Artificial Sequence: Synthetic oligonucleotide
agcaucaggagcauccugg

SEQ ID NO: 3249986 - RNA, 19 nt, Artificial Sequence
  Description of Artificial Sequence: Synthetic oligonucleotide
cugucugcacaccacauac

SEQ ID NO: 3249987 - RNA, 19 nt, Artificial Sequence
  Description of Artificial Sequence: Synthetic oligonucleotide
agccaagaaagacaaggca

SEQ ID NO: 3249988 - RNA, 19 nt, Artificial Sequence
  Description of Artificial Sequence: Synthetic oligonucleotide
ucacacggcggauacaagu

SEQ ID NO: 3249989 - RNA, 19 nt, Artificial Sequence
  Description of Artificial Sequence: Synthetic oligonucleotide
aacuucucgucgcuagugu

SEQ ID NO: 3249990 - RNA, 19 nt, Artificial Sequence
  Description of Artificial Sequence: Synthetic oligonucleotide
ugguugaacaugucccugc

SEQ ID NO: 3249991 - RNA, 19 nt, Artificial Sequence
  Description of Artificial Sequence: Synthetic oligonucleotide
gaaggggaagguaacagca

SEQ ID NO: 3249992 - RNA, 19 nt, Artificial Sequence
  Description of Artificial Sequence: Synthetic oligonucleotide
guucucacagcaucaggag

SEQ ID NO: 3249993 - RNA, 19 nt, Artificial Sequence
  Description of Artificial Sequence: Synthetic oligonucleotide
gaagguaacagcacauaca

SEQ ID NO: 3249994 - RNA, 19 nt, Artificial Sequence
  Description of Artificial Sequence: Synthetic oligonucleotide
caauaagugccagccaccg

SEQ ID NO: 3249995 - RNA, 19 nt, Artificial Sequence
  Description of Artificial Sequence: Synthetic oligonucleotide
uagugucgcacgagcaagg

SEQ ID NO: 3249996 - RNA, 19 nt, Artificial Sequence
  Description of Artificial Sequence: Synthetic oligonucleotide
aaacuucucgucgcuagug

SEQ ID NO: 3249997 - RNA, 19 nt, Artificial Sequence
  Description of Artificial Sequence: Synthetic oligonucleotide
uagcauacugucugcacac

SEQ ID NO: 3249998 - RNA, 19 nt, Artificial Sequence
  Description of Artificial Sequence: Synthetic oligonucleotide
acuucucgucgcuaguguc

SEQ ID NO: 3249999 - RNA, 19 nt, Artificial Sequence
  Description of Artificial Sequence: Synthetic oligonucleotide
ucgaaggggaagguaacag

SEQ ID NO: 3250000 - RNA, 19 nt, Artificial Sequence
  Description of Artificial Sequence: Synthetic oligonucleotide
aaggggaagguaacagcac

SEQ ID NO: 3250001 - RNA, 19 nt, Artificial Sequence
  Description of Artificial Sequence: Synthetic oligonucleotide
gaacaugucccugcaauac

SEQ ID NO: 3250002 - RNA, 19 nt, Artificial Sequence
  Description of Artificial Sequence: Synthetic oligonucleotide
aguucucacagcaucagga

SEQ ID NO: 3250003 - RNA, 19 nt, Artificial Sequence
  Description of Artificial Sequence: Synthetic oligonucleotide
agcauccuggcaguggccc

SEQ ID NO: 3250004 - RNA, 19 nt, Artificial Sequence
  Description of Artificial Sequence: Synthetic oligonucleotide
acaugucccugcaauacac

SEQ ID NO: 3250005 - RNA, 19 nt, Artificial Sequence
  Description of Artificial Sequence: Synthetic oligonucleotide
ucugcacaccacauacagc

SEQ ID NO: 3250006 - RNA, 19 nt, Artificial Sequence
  Description of Artificial Sequence: Synthetic oligonucleotide
cauacugucugcacaccac

SEQ ID NO: 3250007 - RNA, 19 nt, Artificial Sequence
  Description of Artificial Sequence: Synthetic oligonucleotide
auacagugauauagcauac

SEQ ID NO: 3250008 - RNA, 19 nt, Artificial Sequence
  Description of Artificial Sequence: Synthetic oligonucleotide
ugucccugcaauacacaca

SEQ ID NO: 3250009 - RNA, 19 nt, Artificial Sequence
  Description of Artificial Sequence: Synthetic oligonucleotide
ucacuccacagugauaaca

SEQ ID NO: 3250010 - RNA, 19 nt, Artificial Sequence
  Description of Artificial Sequence: Synthetic oligonucleotide
ucacacugcggcuuuugug

SEQ ID NO: 3250011 - RNA, 19 nt, Artificial Sequence
  Description of Artificial Sequence: Synthetic oligonucleotide
cccugcaauacacacagcg

SEQ ID NO: 3250012 - RNA, 19 nt, Artificial Sequence
  Description of Artificial Sequence: Synthetic oligonucleotide
acagcgugagcgcucgccg

SEQ ID NO: 3250013 - RNA, 19 nt, Artificial Sequence
  Description of Artificial Sequence: Synthetic oligonucleotide
acuccacagugauaacagg

SEQ ID NO: 3250014 - RNA, 19 nt, Artificial Sequence
  Description of Artificial Sequence: Synthetic oligonucleotide
ggcaauaagugccagccac

SEQ ID NO: 3250015 - RNA, 19 nt, Artificial Sequence
  Description of Artificial Sequence: Synthetic oligonucleotide
gagccaagaaagacaaggc

SEQ ID NO: 3250016 - RNA, 19 nt, Artificial Sequence
  Description of Artificial Sequence: Synthetic oligonucleotide
aagcggggaaacgcgaguc

SEQ ID NO: 3250017 - RNA, 19 nt, Artificial Sequence
  Description of Artificial Sequence: Synthetic oligonucleotide
aaaacgaauauauaaaacc

SEQ ID NO: 3250018 - RNA, 19 nt, Artificial Sequence
  Description of Artificial Sequence: Synthetic oligonucleotide
auaagaaucaaauuaauac

SEQ ID NO: 3250019 - RNA, 19 nt, Artificial Sequence
  Description of Artificial Sequence: Synthetic oligonucleotide
aaauucaagauacaccacc

SEQ ID NO: 3250020 - RNA, 19 nt, Artificial Sequence
  Description of Artificial Sequence: Synthetic oligonucleotide
aaaguacagaaccaguucc

SEQ ID NO: 3250021 - RNA, 19 nt, Artificial Sequence
  Description of Artificial Sequence: Synthetic oligonucleotide
uaauaauacagaauuaaag

SEQ ID NO: 3250022 - RNA, 19 nt, Artificial Sequence
  Description of Artificial Sequence: Synthetic oligonucleotide
aaugaacaaacagaaaacc

SEQ ID NO: 3250023 - RNA, 19 nt, Artificial Sequence
  Description of Artificial Sequence: Synthetic oligonucleotide
aagacaauggcagagaggg

SEQ ID NO: 3250024 - RNA, 19 nt, Artificial Sequence
  Description of Artificial Sequence: Synthetic oligonucleotide
ucaaauucaagauacacca

SEQ ID NO: 3250025 - RNA, 19 nt, Artificial Sequence
  Description of Artificial Sequence: Synthetic oligonucleotide
ugcacagugaaaaugaaag

SEQ ID NO: 3250026 - RNA, 19 nt, Artificial Sequence
  Description of Artificial Sequence: Synthetic oligonucleotide
cuaagguucaguuaaacag

SEQ ID NO: 3250027 - RNA, 19 nt, Artificial Sequence
  Description of Artificial Sequence: Synthetic oligonucleotide
aggaguuuaaaacuuuucc

SEQ ID NO: 3250028 - RNA, 19 nt, Artificial Sequence
  Description of Artificial Sequence: Synthetic oligonucleotide
ugaaaugaaacucugcuac

SEQ ID NO: 3250029 - RNA, 19 nt, Artificial Sequence
  Description of Artificial Sequence: Synthetic oligonucleotide
agguaaaggaauucaaugc

SEQ ID NO: 3250030 - RNA, 19 nt, Artificial Sequence
  Description of Artificial Sequence: Synthetic oligonucleotide
aagguaaaggaauucaaug

SEQ ID NO: 3250031 - RNA, 19 nt, Artificial Sequence
  Description of Artificial Sequence: Synthetic oligonucleotide
auaaaguauaucuaaauaa

SEQ ID NO: 3250032 - RNA, 19 nt, Artificial Sequence
  Description of Artificial Sequence: Synthetic oligonucleotide
ugacagugaagcaaaaggg

SEQ ID NO: 3250033 - RNA, 19 nt, Artificial Sequence
  Description of Artificial Sequence: Synthetic oligonucleotide
auugcauuuacugacuugc

SEQ ID NO: 3250034 - RNA, 19 nt, Artificial Sequence
  Description of Artificial Sequence: Synthetic oligonucleotide
uaagguucaguuaaacagg

SEQ ID NO: 3250035 - RNA, 19 nt, Artificial Sequence
  Description of Artificial Sequence: Synthetic oligonucleotide
uaagaaucaaauuaauacu

SEQ ID NO: 3250036 - RNA, 19 nt, Artificial Sequence
  Description of Artificial Sequence: Synthetic oligonucleotide
augggaaggaguuuaaaac

SEQ ID NO: 3250037 - RNA, 19 nt, Artificial Sequence
  Description of Artificial Sequence: Synthetic oligonucleotide
ugagcauauaaauaaaggu

SEQ ID NO: 3250038 - RNA, 19 nt, Artificial Sequence
  Description of Artificial Sequence: Synthetic oligonucleotide
acuacuauacaucauaaaa

SEQ ID NO: 3250039 - RNA, 19 nt, Artificial Sequence
  Description of Artificial Sequence: Synthetic oligonucleotide
uugacuguaguacaugcag

SEQ ID NO: 3250040 - RNA, 19 nt, Artificial Sequence
  Description of Artificial Sequence: Synthetic oligonucleotide
agagacaaaugcuagaaga

SEQ ID NO: 3250041 - RNA, 19 nt, Artificial Sequence
  Description of Artificial Sequence: Synthetic oligonucleotide
aagaugacauuagaacugc

SEQ ID NO: 3250042 - RNA, 19 nt, Artificial Sequence
  Description of Artificial Sequence: Synthetic oligonucleotide
auuuccuugacuguaguac

SEQ ID NO: 3250043 - RNA, 19 nt, Artificial Sequence
  Description of Artificial Sequence: Synthetic oligonucleotide
ugucguuaggacuaacugg

SEQ ID NO: 3250044 - RNA, 19 nt, Artificial Sequence
  Description of Artificial Sequence: Synthetic oligonucleotide
aaacgaauauauaaaacca

SEQ ID NO: 3250045 - RNA, 19 nt, Artificial Sequence
  Description of Artificial Sequence: Synthetic oligonucleotide
gaucauugcauuuacugac

SEQ ID NO: 3250046 - RNA, 19 nt, Artificial Sequence
  Description of Artificial Sequence: Synthetic oligonucleotide
acugugaaacaagauaacc

SEQ ID NO: 3250047 - RNA, 19 nt, Artificial Sequence
  Description of Artificial Sequence: Synthetic oligonucleotide
cugugaaacaagauaaccc

SEQ ID NO: 3250048 - RNA, 19 nt, Artificial Sequence
  Description of Artificial Sequence: Synthetic oligonucleotide
agaaccacagaauucacca

SEQ ID NO: 3250049 - RNA, 19 nt, Artificial Sequence
  Description of Artificial Sequence: Synthetic oligonucleotide
acuucuaccgaugucgugc

SEQ ID NO: 3250050 - RNA, 19 nt, Artificial Sequence
  Description of Artificial Sequence: Synthetic oligonucleotide
acuaacuggaauuauuaca

SEQ ID NO: 3250051 - RNA, 19 nt, Artificial Sequence
  Description of Artificial Sequence: Synthetic oligonucleotide
aaugggaaggaguuuaaaa

SEQ ID NO: 3250052 - RNA, 19 nt, Artificial Sequence
  Description of Artificial Sequence: Synthetic oligonucleotide
ugaaaucccacuaacccac

SEQ ID NO: 3250053 - RNA, 19 nt, Artificial Sequence
  Description of Artificial Sequence: Synthetic oligonucleotide
aucaccuuuccauugggcg

SEQ ID NO: 3250054 - RNA, 19 nt, Artificial Sequence
  Description of Artificial Sequence: Synthetic oligonucleotide
aaacacuauauacaacaga

SEQ ID NO: 3250055 - RNA, 19 nt, Artificial Sequence
  Description of Artificial Sequence: Synthetic oligonucleotide
cuuacaaaagacauaagaa

SEQ ID NO: 3250056 - RNA, 19 nt, Artificial Sequence
  Description of Artificial Sequence: Synthetic oligonucleotide
uacacuggauguuucaaag

SEQ ID NO: 3250057 - RNA, 19 nt, Artificial Sequence
  Description of Artificial Sequence: Synthetic oligonucleotide
gugaucauugcauuuacug

SEQ ID NO: 3250058 - RNA, 19 nt, Artificial Sequence
  Description of Artificial Sequence: Synthetic oligonucleotide
acacagagggaacagcccc

SEQ ID NO: 3250059 - RNA, 19 nt, Artificial Sequence
  Description of Artificial Sequence: Synthetic oligonucleotide
gacaaaugcuagaagaacc

SEQ ID NO: 3250060 - RNA, 19 nt, Artificial Sequence
  Description of Artificial Sequence: Synthetic oligonucleotide
uccguaaucagcugggacc

SEQ ID NO: 3250061 - RNA, 19 nt, Artificial Sequence
  Description of Artificial Sequence: Synthetic oligonucleotide
gacauuagaacugcuaaug

SEQ ID NO: 3250062 - RNA, 19 nt, Artificial Sequence
  Description of Artificial Sequence: Synthetic oligonucleotide
aguauaucuaaauaaugua

SEQ ID NO: 3250063 - RNA, 19 nt, Artificial Sequence
  Description of Artificial Sequence: Synthetic oligonucleotide
uggaaugcuuucaauuucc

SEQ ID NO: 3250064 - RNA, 19 nt, Artificial Sequence
  Description of Artificial Sequence: Synthetic oligonucleotide
uuuaaaacuuuuccuaauu

SEQ ID NO: 3250065 - RNA, 19 nt, Artificial Sequence
  Description of Artificial Sequence: Synthetic oligonucleotide
aagaaccacagaauucacc

SEQ ID NO: 3250066 - RNA, 19 nt, Artificial Sequence
  Description of Artificial Sequence: Synthetic oligonucleotide
gugacuucuaccgaugucg

SEQ ID NO: 3250067 - RNA, 19 nt, Artificial Sequence
  Description of Artificial Sequence: Synthetic oligonucleotide
guugcuaaggcacaggaga

SEQ ID NO: 3250068 - RNA, 19 nt, Artificial Sequence
  Description of Artificial Sequence: Synthetic oligonucleotide
ugggaaggaguuuaaaacu

SEQ ID NO: 3250069 - RNA, 19 nt, Artificial Sequence
  Description of Artificial Sequence: Synthetic oligonucleotide
gagaacaaugaaugggaag

SEQ ID NO: 3250070 - RNA, 19 nt, Artificial Sequence
  Description of Artificial Sequence: Synthetic oligonucleotide
uauuuugguucuauggauc

SEQ ID NO: 3250071 - RNA, 19 nt, Artificial Sequence
  Description of Artificial Sequence: Synthetic oligonucleotide
cauccuuuguucauucucc

SEQ ID NO: 3250072 - RNA, 19 nt, Artificial Sequence
  Description of Artificial Sequence: Synthetic oligonucleotide
agcauauaaauaaagguaa

SEQ ID NO: 3250073 - RNA, 19 nt, Artificial Sequence
  Description of Artificial Sequence: Synthetic oligonucleotide
augaguaauuauuucgcca

SEQ ID NO: 3250074 - RNA, 19 nt, Artificial Sequence
  Description of Artificial Sequence: Synthetic oligonucleotide
uuagagacaaaugcuagaa

SEQ ID NO: 3250075 - RNA, 19 nt, Artificial Sequence
  Description of Artificial Sequence: Synthetic oligonucleotide
acucugagaacaaugaaug

SEQ ID NO: 3250076 - RNA, 19 nt, Artificial Sequence
  Description of Artificial Sequence: Synthetic oligonucleotide
uuacugaaaucccacuaac

SEQ ID NO: 3250077 - RNA, 19 nt, Artificial Sequence
  Description of Artificial Sequence: Synthetic oligonucleotide
uggucugcaaccauccuga

SEQ ID NO: 3250078 - RNA, 19 nt, Artificial Sequence
  Description of Artificial Sequence: Synthetic oligonucleotide
gccaugaguaauuauuucg

SEQ ID NO: 3250079 - RNA, 19 nt, Artificial Sequence
  Description of Artificial Sequence: Synthetic oligonucleotide
uugauuuccuugacuguag

SEQ ID NO: 3250080 - RNA, 19 nt, Artificial Sequence
  Description of Artificial Sequence: Synthetic oligonucleotide
aaggaguuuaaaacuuuuc

SEQ ID NO: 3250081 - RNA, 19 nt, Artificial Sequence
  Description of Artificial Sequence: Synthetic oligonucleotide
aauucaagauacaccacca

SEQ ID NO: 3250082 - RNA, 19 nt, Artificial Sequence
  Description of Artificial Sequence: Synthetic oligonucleotide
aaagcccacagguacugug

SEQ ID NO: 3250083 - RNA, 19 nt, Artificial Sequence
  Description of Artificial Sequence: Synthetic oligonucleotide
guauuuucuauuugcuggc

SEQ ID NO: 3250084 - RNA, 19 nt, Artificial Sequence
  Description of Artificial Sequence: Synthetic oligonucleotide
aaagacaauggcagagagg

SEQ ID NO: 3250085 - RNA, 19 nt, Artificial Sequence
  Description of Artificial Sequence: Synthetic oligonucleotide
agauuagccucugaugugg

SEQ ID NO: 3250086 - RNA, 19 nt, Artificial Sequence
  Description of Artificial Sequence: Synthetic oligonucleotide
augucguuaggacuaacug

SEQ ID NO: 3250087 - RNA, 19 nt, Artificial Sequence
  Description of Artificial Sequence: Synthetic oligonucleotide
aaggaauucaaugcuuuga

SEQ ID NO: 3250088 - RNA, 19 nt, Artificial Sequence
  Description of Artificial Sequence: Synthetic oligonucleotide
uucagugaaacggugggug

SEQ ID NO: 3250089 - RNA, 19 nt, Artificial Sequence
  Description of Artificial Sequence: Synthetic oligonucleotide
uagagacaaaugcuagaag

SEQ ID NO: 3250090 - RNA, 19 nt, Artificial Sequence
  Description of Artificial Sequence: Synthetic oligonucleotide
cauugggcggacaauuucc

SEQ ID NO: 3250091 - RNA, 19 nt, Artificial Sequence
  Description of Artificial Sequence: Synthetic oligonucleotide
uaaagaacgcguuuauuuu

SEQ ID NO: 3250092 - RNA, 19 nt, Artificial Sequence
  Description of Artificial Sequence: Synthetic oligonucleotide
acaugcaguauuauuuugg

SEQ ID NO: 3250093 - RNA, 19 nt, Artificial Sequence
  Description of Artificial Sequence: Synthetic oligonucleotide
ucacgugugacuucucagc

SEQ ID NO: 3250094 - RNA, 19 nt, Artificial Sequence
  Description of Artificial Sequence: Synthetic oligonucleotide
gauauuacugagaguguug

SEQ ID NO: 3250095 - RNA, 19 nt, Artificial Sequence
  Description of Artificial Sequence: Synthetic oligonucleotide
gguggcaugacagugaagc

SEQ ID NO: 3250096 - RNA, 19 nt, Artificial Sequence
  Description of Artificial Sequence: Synthetic oligonucleotide
acagugaagcaaaaggguc

SEQ ID NO: 3250097 - RNA, 19 nt, Artificial Sequence
  Description of Artificial Sequence: Synthetic oligonucleotide
acagaauuaaagaacgcgu

SEQ ID NO: 3250098 - RNA, 19 nt, Artificial Sequence
  Description of Artificial Sequence: Synthetic oligonucleotide
guaauuauuucgccauuug

SEQ ID NO: 3250099 - RNA, 19 nt, Artificial Sequence
  Description of Artificial Sequence: Synthetic oligonucleotide
ucacaaguuuaaauaggac

SEQ ID NO: 3250100 - RNA, 19 nt, Artificial Sequence
  Description of Artificial Sequence: Synthetic oligonucleotide
uagugacaagacuuccugg

SEQ ID NO: 3250101 - RNA, 19 nt, Artificial Sequence
  Description of Artificial Sequence: Synthetic oligonucleotide
aacgaauauauaaaaccau

SEQ ID NO: 3250102 - RNA, 19 nt, Artificial Sequence
  Description of Artificial Sequence: Synthetic oligonucleotide
gagcauauaaauaaaggua

SEQ ID NO: 3250103 - RNA, 19 nt, Artificial Sequence
  Description of Artificial Sequence: Synthetic oligonucleotide
acauuagaacugcuaaugu

SEQ ID NO: 3250104 - RNA, 19 nt, Artificial Sequence
  Description of Artificial Sequence: Synthetic oligonucleotide
ugcuaaugucguuaggacu

SEQ ID NO: 3250105 - RNA, 19 nt, Artificial Sequence
  Description of Artificial Sequence: Synthetic oligonucleotide
uuuugccccaacccuacug

SEQ ID NO: 3250106 - RNA, 19 nt, Artificial Sequence
  Description of Artificial Sequence: Synthetic oligonucleotide
gaaguuugguuucagugaa

SEQ ID NO: 3250107 - RNA, 19 nt, Artificial Sequence
  Description of Artificial Sequence: Synthetic oligonucleotide
gacuaacuggaauuauuac

SEQ ID NO: 3250108 - RNA, 19 nt, Artificial Sequence
  Description of Artificial Sequence: Synthetic oligonucleotide
aaugucguuaggacuaacu

SEQ ID NO: 3250109 - RNA, 19 nt, Artificial Sequence
  Description of Artificial Sequence: Synthetic oligonucleotide
cauaaaguauaucuaaaua

SEQ ID NO: 3250110 - RNA, 19 nt, Artificial Sequence
  Description of Artificial Sequence: Synthetic oligonucleotide
uucuggaaugcuuucaauu

SEQ ID NO: 3250111 - RNA, 19 nt, Artificial Sequence
  Description of Artificial Sequence: Synthetic oligonucleotide
uauauacaacagagguugc

SEQ ID NO: 3250112 - RNA, 19 nt, Artificial Sequence
  Description of Artificial Sequence: Synthetic oligonucleotide
uucccauauuuugugauca

SEQ ID NO: 3250113 - RNA, 19 nt, Artificial Sequence
  Description of Artificial Sequence: Synthetic oligonucleotide
gaugucgugcaauagcaaa

SEQ ID NO: 3250114 - RNA, 19 nt, Artificial Sequence
  Description of Artificial Sequence: Synthetic oligonucleotide
uauuguucucacuuacaaa

SEQ ID NO: 3250115 - RNA, 19 nt, Artificial Sequence
  Description of Artificial Sequence: Synthetic oligonucleotide
aggaauucaaugcuuugaa

SEQ ID NO: 3250116 - RNA, 19 nt, Artificial Sequence
  Description of Artificial Sequence: Synthetic oligonucleotide
acucacucucagcauaaag

SEQ ID NO: 3250117 - RNA, 19 nt, Artificial Sequence
  Description of Artificial Sequence: Synthetic oligonucleotide
uaauacauagucauuaucc

SEQ ID NO: 3250118 - RNA, 19 nt, Artificial Sequence
  Description of Artificial Sequence: Synthetic oligonucleotide
aaucccuuaaccuacguuc

SEQ ID NO: 3250119 - RNA, 19 nt, Artificial Sequence
  Description of Artificial Sequence: Synthetic oligonucleotide
auagucauuauccuuauag

SEQ ID NO: 3250120 - RNA, 19 nt, Artificial Sequence
  Description of Artificial Sequence: Synthetic oligonucleotide
agaacuagaaacuuguaag

SEQ ID NO: 3250121 - RNA, 19 nt, Artificial Sequence
  Description of Artificial Sequence: Synthetic oligonucleotide
aaguugcuaaccuaaauag

SEQ ID NO: 3250122 - RNA, 19 nt, Artificial Sequence
  Description of Artificial Sequence: Synthetic oligonucleotide
cuuguaaguauuauuaaag

SEQ ID NO: 3250123 - RNA, 19 nt, Artificial Sequence
  Description of Artificial Sequence: Synthetic oligonucleotide
ucuuuauuuagauauaaaa

SEQ ID NO: 3250124 - RNA, 19 nt, Artificial Sequence
  Description of Artificial Sequence: Synthetic oligonucleotide
aaaaccucaauuaaaguug

SEQ ID NO: 3250125 - RNA, 19 nt, Artificial Sequence
  Description of Artificial Sequence: Synthetic oligonucleotide
aaagguacaguacaucuca

SEQ ID NO: 3250126 - RNA, 19 nt, Artificial Sequence
  Description of Artificial Sequence: Synthetic oligonucleotide
uauagcaauuacuacaaca

SEQ ID NO: 3250127 - RNA, 19 nt, Artificial Sequence
  Description of Artificial Sequence: Synthetic oligonucleotide
aauacauagucauuauccu

SEQ ID NO: 3250128 - RNA, 19 nt, Artificial Sequence
  Description of Artificial Sequence: Synthetic oligonucleotide
aaccuaaauagcaaccugc

SEQ ID NO: 3250129 - RNA, 19 nt, Artificial Sequence
  Description of Artificial Sequence: Synthetic oligonucleotide
auagcaaccugcuuauuac

SEQ ID NO: 3250130 - RNA, 19 nt, Artificial Sequence
  Description of Artificial Sequence: Synthetic oligonucleotide
aaaguugcuaaccuaaaua

SEQ ID NO: 3250131 - RNA, 19 nt, Artificial Sequence
  Description of Artificial Sequence: Synthetic oligonucleotide
guucgugagaacuagaaac

SEQ ID NO: 3250132 - RNA, 19 nt, Artificial Sequence
  Description of Artificial Sequence: Synthetic oligonucleotide
uaaguauuauuaaaguaaa

SEQ ID NO: 3250133 - RNA, 19 nt, Artificial Sequence
  Description of Artificial Sequence: Synthetic oligonucleotide
gaugucuuuauuuagauau

SEQ ID NO: 3250134 - RNA, 19 nt, Artificial Sequence
  Description of Artificial Sequence: Synthetic oligonucleotide
ucaauuaaaguugcuaacc

SEQ ID NO: 3250135 - RNA, 19 nt, Artificial Sequence
  Description of Artificial Sequence: Synthetic oligonucleotide
uuacaggaauuauuuaucc

SEQ ID NO: 3250136 - RNA, 19 nt, Artificial Sequence
  Description of Artificial Sequence: Synthetic oligonucleotide
auagcaauuacuacaacag

SEQ ID NO: 3250137 - RNA, 19 nt, Artificial Sequence
  Description of Artificial Sequence: Synthetic oligonucleotide
aaaccucaauuaaaguugc

SEQ ID NO: 3250138 - RNA, 19 nt, Artificial Sequence
  Description of Artificial Sequence: Synthetic oligonucleotide
agucauuauccuuauagca

SEQ ID NO: 3250139 - RNA, 19 nt, Artificial Sequence
  Description of Artificial Sequence: Synthetic oligonucleotide
uauccuuauagcaauuacu

SEQ ID NO: 3250140 - RNA, 19 nt, Artificial Sequence
  Description of Artificial Sequence: Synthetic oligonucleotide
uguaaguauuauuaaagua

SEQ ID NO: 3250141 - RNA, 19 nt, Artificial Sequence
  Description of Artificial Sequence: Synthetic oligonucleotide
gaauuauuuauccaacuaa

SEQ ID NO: 3250142 - RNA, 19 nt, Artificial Sequence
  Description of Artificial Sequence: Synthetic oligonucleotide
ucaagaugucuuuauuuag

SEQ ID NO: 3250143 - RNA, 19 nt, Artificial Sequence
  Description of Artificial Sequence: Synthetic oligonucleotide
aaacuuguaaguauuauua

SEQ ID NO: 3250144 - RNA, 19 nt, Artificial Sequence
  Description of Artificial Sequence: Synthetic oligonucleotide
uacaguacaucucaugcac

SEQ ID NO: 3250145 - RNA, 19 nt, Artificial Sequence
  Description of Artificial Sequence: Synthetic oligonucleotide
uuguaaguauuauuaaagu

SEQ ID NO: 3250146 - RNA, 19 nt, Artificial Sequence
  Description of Artificial Sequence: Synthetic oligonucleotide
uacauagucauuauccuua

SEQ ID NO: 3250147 - RNA, 19 nt, Artificial Sequence
  Description of Artificial Sequence: Synthetic oligonucleotide
acuuacaggaauuauuuau

SEQ ID NO: 3250148 - RNA, 19 nt, Artificial Sequence
  Description of Artificial Sequence: Synthetic oligonucleotide
aauagcaaccugcuuauua

SEQ ID NO: 3250149 - RNA, 19 nt, Artificial Sequence
  Description of Artificial Sequence: Synthetic oligonucleotide
aauuauuuauccaacuaaa

SEQ ID NO: 3250150 - RNA, 19 nt, Artificial Sequence
  Description of Artificial Sequence: Synthetic oligonucleotide
guaaguauuauuaaaguaa

SEQ ID NO: 3250151 - RNA, 19 nt, Artificial Sequence
  Description of Artificial Sequence: Synthetic oligonucleotide
uagcaauuacuacaacagg

SEQ ID NO: 3250152 - RNA, 19 nt, Artificial Sequence
  Description of Artificial Sequence: Synthetic oligonucleotide
aauuacuacaacaggagau

SEQ ID NO: 3250153 - RNA, 19 nt, Artificial Sequence
  Description of Artificial Sequence: Synthetic oligonucleotide
acaggaauuauuuauccaa

SEQ ID NO: 3250154 - RNA, 19 nt, Artificial Sequence
  Description of Artificial Sequence: Synthetic oligonucleotide
uacaucucaugcaccaggg

SEQ ID NO: 3250155 - RNA, 19 nt, Artificial Sequence
  Description of Artificial Sequence: Synthetic oligonucleotide
cuuacaggaauuauuuauc

SEQ ID NO: 3250156 - RNA, 19 nt, Artificial Sequence
  Description of Artificial Sequence: Synthetic oligonucleotide
aauuaaaguugcuaaccua

SEQ ID NO: 3250157 - RNA, 19 nt, Artificial Sequence
  Description of Artificial Sequence: Synthetic oligonucleotide
aaaagguacaguacaucuc

SEQ ID NO: 3250158 - RNA, 19 nt, Artificial Sequence
  Description of Artificial Sequence: Synthetic oligonucleotide
aagaugucuuuauuuagau

SEQ ID NO: 3250159 - RNA, 19 nt, Artificial Sequence
  Description of Artificial Sequence: Synthetic oligonucleotide
uucgugagaacuagaaacu

SEQ ID NO: 3250160 - RNA, 19 nt, Artificial Sequence
  Description of Artificial Sequence: Synthetic oligonucleotide
uagucauuauccuuauagc

SEQ ID NO: 3250161 - RNA, 19 nt, Artificial Sequence
  Description of Artificial Sequence: Synthetic oligonucleotide
uuauccuuauagcaauuac

SEQ ID NO: 3250162 - RNA, 19 nt, Artificial Sequence
  Description of Artificial Sequence: Synthetic oligonucleotide
uucaagaugucuuuauuua

SEQ ID NO: 3250163 - RNA, 19 nt, Artificial Sequence
  Description of Artificial Sequence: Synthetic oligonucleotide
gguacaguacaucucaugc

SEQ ID NO: 3250164 - RNA, 19 nt, Artificial Sequence
  Description of Artificial Sequence: Synthetic oligonucleotide
aaacuuacaggaauuauuu

SEQ ID NO: 3250165 - RNA, 19 nt, Artificial Sequence
  Description of Artificial Sequence: Synthetic oligonucleotide
aacuuguaaguauuauuaa

SEQ ID NO: 3250166 - RNA, 19 nt, Artificial Sequence
  Description of Artificial Sequence: Synthetic oligonucleotide
uaaccuaaauagcaaccug

SEQ ID NO: 3250167 - RNA, 19 nt, Artificial Sequence
  Description of Artificial Sequence: Synthetic oligonucleotide
acuagaaacuuguaaguau

SEQ ID NO: 3250168 - RNA, 19 nt, Artificial Sequence
  Description of Artificial Sequence: Synthetic oligonucleotide
cuaaauagcaaccugcuua

SEQ ID NO: 3250169 - RNA, 19 nt, Artificial Sequence
  Description of Artificial Sequence: Synthetic oligonucleotide
aaaacuuacaggaauuauu

SEQ ID NO: 3250170 - RNA, 19 nt, Artificial Sequence
  Description of Artificial Sequence: Synthetic oligonucleotide
uuucaagaugucuuuauuu

SEQ ID NO: 3250171 - RNA, 19 nt, Artificial Sequence
  Description of Artificial Sequence: Synthetic oligonucleotide
cagggugacuaauacauag

SEQ ID NO: 3250172 - RNA, 19 nt, Artificial Sequence
  Description of Artificial Sequence: Synthetic oligonucleotide
ucauuauccuuauagcaau

SEQ ID NO: 3250173 - RNA, 19 nt, Artificial Sequence
  Description of Artificial Sequence: Synthetic oligonucleotide
acuuguaaguauuauuaaa

SEQ ID NO: 3250174 - RNA, 19 nt, Artificial Sequence
  Description of Artificial Sequence: Synthetic oligonucleotide
guugcuaaccuaaauagca

SEQ ID NO: 3250175 - RNA, 19 nt, Artificial Sequence
  Description of Artificial Sequence: Synthetic oligonucleotide
cucaauuaaaguugcuaac

SEQ ID NO: 3250176 - RNA, 19 nt, Artificial Sequence
  Description of Artificial Sequence: Synthetic oligonucleotide
uaaauagcaaccugcuuau

SEQ ID NO: 3250177 - RNA, 19 nt, Artificial Sequence
  Description of Artificial Sequence: Synthetic oligonucleotide
aguugcuaaccuaaauagc

SEQ ID NO: 3250178 - RNA, 19 nt, Artificial Sequence
  Description of Artificial Sequence: Synthetic oligonucleotide
uuaaccuacguucgugaga

SEQ ID NO: 3250179 - RNA, 19 nt, Artificial Sequence
  Description of Artificial Sequence: Synthetic oligonucleotide
cuuauagcaauuacuacaa

SEQ ID NO: 3250180 - RNA, 19 nt, Artificial Sequence
  Description of Artificial Sequence: Synthetic oligonucleotide
acuacaacaggagauaaaa

SEQ ID NO: 3250181 - RNA, 19 nt, Artificial Sequence
  Description of Artificial Sequence: Synthetic oligonucleotide
guacaucucaugcaccagg

SEQ ID NO: 3250182 - RNA, 19 nt, Artificial Sequence
  Description of Artificial Sequence: Synthetic oligonucleotide
auuaaaguugcuaaccuaa

SEQ ID NO: 3250183 - RNA, 19 nt, Artificial Sequence
  Description of Artificial Sequence: Synthetic oligonucleotide
agcaauuacuacaacagga

SEQ ID NO: 3250184 - RNA, 19 nt, Artificial Sequence
  Description of Artificial Sequence: Synthetic oligonucleotide
gagaacuagaaacuuguaa

SEQ ID NO: 3250185 - RNA, 19 nt, Artificial Sequence
  Description of Artificial Sequence: Synthetic oligonucleotide
uaaaguugcuaaccuaaau

SEQ ID NO: 3250186 - RNA, 19 nt, Artificial Sequence
  Description of Artificial Sequence: Synthetic oligonucleotide
uacaggaauuauuuaucca

SEQ ID NO: 3250187 - RNA, 19 nt, Artificial Sequence
  Description of Artificial Sequence: Synthetic oligonucleotide
aggaauuauuuauccaacu

SEQ ID NO: 3250188 - RNA, 19 nt, Artificial Sequence
  Description of Artificial Sequence: Synthetic oligonucleotide
ugcuaaccuaaauagcaac

SEQ ID NO: 3250189 - RNA, 19 nt, Artificial Sequence
  Description of Artificial Sequence: Synthetic oligonucleotide
uaaccuacguucgugagaa

SEQ ID NO: 3250190 - RNA, 19 nt, Artificial Sequence
  Description of Artificial Sequence: Synthetic oligonucleotide
caucucaugcaccagggug

SEQ ID NO: 3250191 - RNA, 19 nt, Artificial Sequence
  Description of Artificial Sequence: Synthetic oligonucleotide
uagcaaccugcuuauuacg

SEQ ID NO: 3250192 - RNA, 19 nt, Artificial Sequence
  Description of Artificial Sequence: Synthetic oligonucleotide
uuaaaguugcuaaccuaaa

SEQ ID NO: 3250193 - RNA, 19 nt, Artificial Sequence
  Description of Artificial Sequence: Synthetic oligonucleotide
cuaauacauagucauuauc

SEQ ID NO: 3250194 - RNA, 19 nt, Artificial Sequence
  Description of Artificial Sequence: Synthetic oligonucleotide
ugucuuuauuuagauauaa

SEQ ID NO: 3250195 - RNA, 19 nt, Artificial Sequence
  Description of Artificial Sequence: Synthetic oligonucleotide
agcaaccugcuuauuacgc

SEQ ID NO: 3250196 - RNA, 19 nt, Artificial Sequence
  Description of Artificial Sequence: Synthetic oligonucleotide
caggaauuauuuauccaac

SEQ ID NO: 3250197 - RNA, 19 nt, Artificial Sequence
  Description of Artificial Sequence: Synthetic oligonucleotide
acuaauacauagucauuau

SEQ ID NO: 3250198 - RNA, 19 nt, Artificial Sequence
  Description of Artificial Sequence: Synthetic oligonucleotide
gacuaauacauagucauua

SEQ ID NO: 3250199 - RNA, 19 nt, Artificial Sequence
  Description of Artificial Sequence: Synthetic oligonucleotide
uccuuauagcaauuacuac

SEQ ID NO: 3250200 - RNA, 19 nt, Artificial Sequence
  Description of Artificial Sequence: Synthetic oligonucleotide
aacuagaaacuuguaagua

SEQ ID NO: 3250201 - RNA, 19 nt, Artificial Sequence
  Description of Artificial Sequence: Synthetic oligonucleotide
gugacuaauacauagucau

SEQ ID NO: 3250202 - RNA, 19 nt, Artificial Sequence
  Description of Artificial Sequence: Synthetic oligonucleotide
aaaaucccuuaaccuacgu

SEQ ID NO: 3250203 - RNA, 19 nt, Artificial Sequence
  Description of Artificial Sequence: Synthetic oligonucleotide
aaaucccuuaaccuacguu

SEQ ID NO: 3250204 - RNA, 19 nt, Artificial Sequence
  Description of Artificial Sequence: Synthetic oligonucleotide
cuuaaccuacguucgugag

SEQ ID NO: 3250205 - RNA, 19 nt, Artificial Sequence
  Description of Artificial Sequence: Synthetic oligonucleotide
caagaugucuuuauuuaga

SEQ ID NO: 3250206 - RNA, 19 nt, Artificial Sequence
  Description of Artificial Sequence: Synthetic oligonucleotide
gaacuagaaacuuguaagu

SEQ ID NO: 3250207 - RNA, 19 nt, Artificial Sequence
  Description of Artificial Sequence: Synthetic oligonucleotide
uugcuaaccuaaauagcaa

SEQ ID NO: 3250208 - RNA, 19 nt, Artificial Sequence
  Description of Artificial Sequence: Synthetic oligonucleotide
aacuuacaggaauuauuua

SEQ ID NO: 3250209 - RNA, 19 nt, Artificial Sequence
  Description of Artificial Sequence: Synthetic oligonucleotide
ccuuauagcaauuacuaca

SEQ ID NO: 3250210 - RNA, 19 nt, Artificial Sequence
  Description of Artificial Sequence: Synthetic oligonucleotide
uagaaacuuguaaguauua

SEQ ID NO: 3250211 - RNA, 19 nt, Artificial Sequence
  Description of Artificial Sequence: Synthetic oligonucleotide
uuauagcaauuacuacaac

SEQ ID NO: 3250212 - RNA, 19 nt, Artificial Sequence
  Description of Artificial Sequence: Synthetic oligonucleotide
auacauagucauuauccuu

SEQ ID NO: 3250213 - RNA, 19 nt, Artificial Sequence
  Description of Artificial Sequence: Synthetic oligonucleotide
auuucaagaugucuuuauu

SEQ ID NO: 3250214 - RNA, 19 nt, Artificial Sequence
  Description of Artificial Sequence: Synthetic oligonucleotide
accagggugacuaauacau

SEQ ID NO: 3250215 - RNA, 19 nt, Artificial Sequence
  Description of Artificial Sequence: Synthetic oligonucleotide
ucaugcaccagggugacua

SEQ ID NO: 3250216 - RNA, 19 nt, Artificial Sequence
  Description of Artificial Sequence: Synthetic oligonucleotide
auuauuuauccaacuaaaa

SEQ ID NO: 3250217 - RNA, 19 nt, Artificial Sequence
  Description of Artificial Sequence: Synthetic oligonucleotide
aguuuuaaguaguagaagc

SEQ ID NO: 3250218 - RNA, 19 nt, Artificial Sequence
  Description of Artificial Sequence: Synthetic oligonucleotide
ucuguaauuaaucugaagu

SEQ ID NO: 3250219 - RNA, 19 nt, Artificial Sequence
  Description of Artificial Sequence: Synthetic oligonucleotide
auauuguccaccucgaugc

SEQ ID NO: 3250220 - RNA, 19 nt, Artificial Sequence
  Description of Artificial Sequence: Synthetic oligonucleotide
aaguaguagaagcaguagc

SEQ ID NO: 3250221 - RNA, 19 nt, Artificial Sequence
  Description of Artificial Sequence: Synthetic oligonucleotide
uauaaauuaugcuugcucc

SEQ ID NO: 3250222 - RNA, 19 nt, Artificial Sequence
  Description of Artificial Sequence: Synthetic oligonucleotide
agcacaauacaucugauag

SEQ ID NO: 3250223 - RNA, 19 nt, Artificial Sequence
  Description of Artificial Sequence: Synthetic oligonucleotide
aaucugaaguuuuaaguag

SEQ ID NO: 3250224 - RNA, 19 nt, Artificial Sequence
  Description of Artificial Sequence: Synthetic oligonucleotide
ugaaguuuuaaguaguaga

SEQ ID NO: 3250225 - RNA, 19 nt, Artificial Sequence
  Description of Artificial Sequence: Synthetic oligonucleotide
uauauuuuaaucucucugu

SEQ ID NO: 3250226 - RNA, 19 nt, Artificial Sequence
  Description of Artificial Sequence: Synthetic oligonucleotide
ucugauaguguugauaagg

SEQ ID NO: 3250227 - RNA, 19 nt, Artificial Sequence
  Description of Artificial Sequence: Synthetic oligonucleotide
caauuauaaauuaugcuug

SEQ ID NO: 3250228 - RNA, 19 nt, Artificial Sequence
  Description of Artificial Sequence: Synthetic oligonucleotide
auauauuuuaaucucucug

SEQ ID NO: 3250229 - RNA, 19 nt, Artificial Sequence
  Description of Artificial Sequence: Synthetic oligonucleotide
auggccacaugauugagcc

SEQ ID NO: 3250230 - RNA, 19 nt, Artificial Sequence
  Description of Artificial Sequence: Synthetic oligonucleotide
aaaucuggcacugcuaugg

SEQ ID NO: 3250231 - RNA, 19 nt, Artificial Sequence
  Description of Artificial Sequence: Synthetic oligonucleotide
uguccauauauuuuaaucu

SEQ ID NO: 3250232 - RNA, 19 nt, Artificial Sequence
  Description of Artificial Sequence: Synthetic oligonucleotide
auguccauauauuuuaauc

SEQ ID NO: 3250233 - RNA, 19 nt, Artificial Sequence
  Description of Artificial Sequence: Synthetic oligonucleotide
agaacaucccuauaaaaug

SEQ ID NO: 3250234 - RNA, 19 nt, Artificial Sequence
  Description of Artificial Sequence: Synthetic oligonucleotide
uuauaaauuaugcuugcuc

SEQ ID NO: 3250235 - RNA, 19 nt, Artificial Sequence
  Description of Artificial Sequence: Synthetic oligonucleotide
ugacgaaaacaacagauac

SEQ ID NO: 3250236 - RNA, 19 nt, Artificial Sequence
  Description of Artificial Sequence: Synthetic oligonucleotide
ucaauuaagugucucacaa

SEQ ID NO: 3250237 - RNA, 19 nt, Artificial Sequence
  Description of Artificial Sequence: Synthetic oligonucleotide
uauauuguccaccucgaug

SEQ ID NO: 3250238 - RNA, 19 nt, Artificial Sequence
  Description of Artificial Sequence: Synthetic oligonucleotide
aucacucagacuucgaauc

SEQ ID NO: 3250239 - RNA, 19 nt, Artificial Sequence
  Description of Artificial Sequence: Synthetic oligonucleotide
uuuuaaguaguagaagcag

SEQ ID NO: 3250240 - RNA, 19 nt, Artificial Sequence
  Description of Artificial Sequence: Synthetic oligonucleotide
aauuuuggcuucaucacuc

SEQ ID NO: 3250241 - RNA, 19 nt, Artificial Sequence
  Description of Artificial Sequence: Synthetic oligonucleotide
uguugauaaggcuuguuca

SEQ ID NO: 3250242 - RNA, 19 nt, Artificial Sequence
  Description of Artificial Sequence: Synthetic oligonucleotide
ucuauaagaaccccgccac

SEQ ID NO: 3250243 - RNA, 19 nt, Artificial Sequence
  Description of Artificial Sequence: Synthetic oligonucleotide
uagaacaucccuauaaaau

SEQ ID NO: 3250244 - RNA, 19 nt, Artificial Sequence
  Description of Artificial Sequence: Synthetic oligonucleotide
aguagcacaauacaucuga

SEQ ID NO: 3250245 - RNA, 19 nt, Artificial Sequence
  Description of Artificial Sequence: Synthetic oligonucleotide
ucaaauccaucacagcugc

SEQ ID NO: 3250246 - RNA, 19 nt, Artificial Sequence
  Description of Artificial Sequence: Synthetic oligonucleotide
acaacuggaguuuggacuc

SEQ ID NO: 3250247 - RNA, 19 nt, Artificial Sequence
  Description of Artificial Sequence: Synthetic oligonucleotide
cacagcugcauuuauauug

SEQ ID NO: 3250248 - RNA, 19 nt, Artificial Sequence
  Description of Artificial Sequence: Synthetic oligonucleotide
uuuaaguaguagaagcagu

SEQ ID NO: 3250249 - RNA, 19 nt, Artificial Sequence
  Description of Artificial Sequence: Synthetic oligonucleotide
auuuuaaucucucuguaau

SEQ ID NO: 3250250 - RNA, 19 nt, Artificial Sequence
  Description of Artificial Sequence: Synthetic oligonucleotide
uucaaauccaucacagcug

SEQ ID NO: 3250251 - RNA, 19 nt, Artificial Sequence
  Description of Artificial Sequence: Synthetic oligonucleotide
uucaggucaauuaaguguc

SEQ ID NO: 3250252 - RNA, 19 nt, Artificial Sequence
  Description of Artificial Sequence: Synthetic oligonucleotide
uaaucugaaguuuuaagua

SEQ ID NO: 3250253 - RNA, 19 nt, Artificial Sequence
  Description of Artificial Sequence: Synthetic oligonucleotide
aaaaucacggguuucccau

SEQ ID NO: 3250254 - RNA, 19 nt, Artificial Sequence
  Description of Artificial Sequence: Synthetic oligonucleotide
aguucuauaagaaccccgc

SEQ ID NO: 3250255 - RNA, 19 nt, Artificial Sequence
  Description of Artificial Sequence: Synthetic oligonucleotide
ugcaacaugaugcauuccu

SEQ ID NO: 3250256 - RNA, 19 nt, Artificial Sequence
  Description of Artificial Sequence: Synthetic oligonucleotide
ugcuauggccacaugauug

SEQ ID NO: 3250257 - RNA, 19 nt, Artificial Sequence
  Description of Artificial Sequence: Synthetic oligonucleotide
uucuauaagaaccccgcca

SEQ ID NO: 3250258 - RNA, 19 nt, Artificial Sequence
  Description of Artificial Sequence: Synthetic oligonucleotide
uuaagugucucacaauuau

SEQ ID NO: 3250259 - RNA, 19 nt, Artificial Sequence
  Description of Artificial Sequence: Synthetic oligonucleotide
uugggauggaggaaaauca

SEQ ID NO: 3250260 - RNA, 19 nt, Artificial Sequence
  Description of Artificial Sequence: Synthetic oligonucleotide
uuuacauguccauauauuu

SEQ ID NO: 3250261 - RNA, 19 nt, Artificial Sequence
  Description of Artificial Sequence: Synthetic oligonucleotide
uuaugcuugcuccaguucu

SEQ ID NO: 3250262 - RNA, 19 nt, Artificial Sequence
  Description of Artificial Sequence: Synthetic oligonucleotide
ugucucacaauuauaaauu

SEQ ID NO: 3250263 - RNA, 19 nt, Artificial Sequence
  Description of Artificial Sequence: Synthetic oligonucleotide
aacaucccuauaaaaugcc

SEQ ID NO: 3250264 - RNA, 19 nt, Artificial Sequence
  Description of Artificial Sequence: Synthetic oligonucleotide
uuuauauuguccaccucga

SEQ ID NO: 3250265 - RNA, 19 nt, Artificial Sequence
  Description of Artificial Sequence: Synthetic oligonucleotide
acugucacuucccaguggg

SEQ ID NO: 3250266 - RNA, 19 nt, Artificial Sequence
  Description of Artificial Sequence: Synthetic oligonucleotide
uccaguucuauaagaaccc

SEQ ID NO: 3250267 - RNA, 19 nt, Artificial Sequence
  Description of Artificial Sequence: Synthetic oligonucleotide
aaguuuuaaguaguagaag

SEQ ID NO: 3250268 - RNA, 19 nt, Artificial Sequence
  Description of Artificial Sequence: Synthetic oligonucleotide
guugauaaggcuuguucag

SEQ ID NO: 3250269 - RNA, 19 nt, Artificial Sequence
  Description of Artificial Sequence: Synthetic oligonucleotide
uccauauauuuuaaucucu

SEQ ID NO: 3250270 - RNA, 19 nt, Artificial Sequence
  Description of Artificial Sequence: Synthetic oligonucleotide
aggaaaaucacggguuucc

SEQ ID NO: 3250271 - RNA, 19 nt, Artificial Sequence
  Description of Artificial Sequence: Synthetic oligonucleotide
cugauaguguugauaaggc

SEQ ID NO: 3250272 - RNA, 19 nt, Artificial Sequence
  Description of Artificial Sequence: Synthetic oligonucleotide
cacaauacaucugauagug

SEQ ID NO: 3250273 - RNA, 19 nt, Artificial Sequence
  Description of Artificial Sequence: Synthetic oligonucleotide
aaugccgaggccuuuucca

SEQ ID NO: 3250274 - RNA, 19 nt, Artificial Sequence
  Description of Artificial Sequence: Synthetic oligonucleotide
aaucuggcacugcuauggc

SEQ ID NO: 3250275 - RNA, 19 nt, Artificial Sequence
  Description of Artificial Sequence: Synthetic oligonucleotide
uacauguccauauauuuua

SEQ ID NO: 3250276 - RNA, 19 nt, Artificial Sequence
  Description of Artificial Sequence: Synthetic oligonucleotide
uauaagaaccccgccacag

SEQ ID NO: 3250277 - RNA, 19 nt, Artificial Sequence
  Description of Artificial Sequence: Synthetic oligonucleotide
uuuuacauguccauauauu

SEQ ID NO: 3250278 - RNA, 19 nt, Artificial Sequence
  Description of Artificial Sequence: Synthetic oligonucleotide
uuuggcuucaucacucaga

SEQ ID NO: 3250279 - RNA, 19 nt, Artificial Sequence
  Description of Artificial Sequence: Synthetic oligonucleotide
aacaugaugcauuccucca

SEQ ID NO: 3250280 - RNA, 19 nt, Artificial Sequence
  Description of Artificial Sequence: Synthetic oligonucleotide
cuugguguuucccagguug

SEQ ID NO: 3250281 - RNA, 19 nt, Artificial Sequence
  Description of Artificial Sequence: Synthetic oligonucleotide
uuggcuucaucacucagac

SEQ ID NO: 3250282 - RNA, 19 nt, Artificial Sequence
  Description of Artificial Sequence: Synthetic oligonucleotide
auaaauuaugcuugcucca

SEQ ID NO: 3250283 - RNA, 19 nt, Artificial Sequence
  Description of Artificial Sequence: Synthetic oligonucleotide
aauacaucugauaguguug

SEQ ID NO: 3250284 - RNA, 19 nt, Artificial Sequence
  Description of Artificial Sequence: Synthetic oligonucleotide
uguucaggucaauuaagug

SEQ ID NO: 3250285 - RNA, 19 nt, Artificial Sequence
  Description of Artificial Sequence: Synthetic oligonucleotide
uuuaaucucucuguaauua

SEQ ID NO: 3250286 - RNA, 19 nt, Artificial Sequence
  Description of Artificial Sequence: Synthetic oligonucleotide
ugcauuuauauuguccacc

SEQ ID NO: 3250287 - RNA, 19 nt, Artificial Sequence
  Description of Artificial Sequence: Synthetic oligonucleotide
uggaguuuggacucuggag

SEQ ID NO: 3250288 - RNA, 19 nt, Artificial Sequence
  Description of Artificial Sequence: Synthetic oligonucleotide
auaaggcuuguucagguca

SEQ ID NO: 3250289 - RNA, 19 nt, Artificial Sequence
  Description of Artificial Sequence: Synthetic oligonucleotide
gaagcaguagcacaauaca

SEQ ID NO: 3250290 - RNA, 19 nt, Artificial Sequence
  Description of Artificial Sequence: Synthetic oligonucleotide
ucucucuguaauuaaucug

SEQ ID NO: 3250291 - RNA, 19 nt, Artificial Sequence
  Description of Artificial Sequence: Synthetic oligonucleotide
aacagauacuccauguucu

SEQ ID NO: 3250292 - RNA, 19 nt, Artificial Sequence
  Description of Artificial Sequence: Synthetic oligonucleotide
uguaauuaaucugaaguuu

SEQ ID NO: 3250293 - RNA, 19 nt, Artificial Sequence
  Description of Artificial Sequence: Synthetic oligonucleotide
gaacaucccuauaaaaugc

SEQ ID NO: 3250294 - RNA, 19 nt, Artificial Sequence
  Description of Artificial Sequence: Synthetic oligonucleotide
uauuuuaaucucucuguaa

SEQ ID NO: 3250295 - RNA, 19 nt, Artificial Sequence
  Description of Artificial Sequence: Synthetic oligonucleotide
cucucuguaauuaaucuga

SEQ ID NO: 3250296 - RNA, 19 nt, Artificial Sequence
  Description of Artificial Sequence: Synthetic oligonucleotide
aucccuauaaaaugccgag

SEQ ID NO: 3250297 - RNA, 19 nt, Artificial Sequence
  Description of Artificial Sequence: Synthetic oligonucleotide
gaagccugcgauuggacug

SEQ ID NO: 3250298 - RNA, 19 nt, Artificial Sequence
  Description of Artificial Sequence: Synthetic oligonucleotide
gaaguuuuaaguaguagaa

SEQ ID NO: 3250299 - RNA, 19 nt, Artificial Sequence
  Description of Artificial Sequence: Synthetic oligonucleotide
gaugcaacaugaugcauuc

SEQ ID NO: 3250300 - RNA, 19 nt, Artificial Sequence
  Description of Artificial Sequence: Synthetic oligonucleotide
cuuguucaggucaauuaag

SEQ ID NO: 3250301 - RNA, 19 nt, Artificial Sequence
  Description of Artificial Sequence: Synthetic oligonucleotide
caacaugaugcauuccucc

SEQ ID NO: 3250302 - RNA, 19 nt, Artificial Sequence
  Description of Artificial Sequence: Synthetic oligonucleotide
aaaaugccgaggccuuuuc

SEQ ID NO: 3250303 - RNA, 19 nt, Artificial Sequence
  Description of Artificial Sequence: Synthetic oligonucleotide
aauuaugcuugcuccaguu

SEQ ID NO: 3250304 - RNA, 19 nt, Artificial Sequence
  Description of Artificial Sequence: Synthetic oligonucleotide
aagcaguuccaucuuggug

SEQ ID NO: 3250305 - RNA, 19 nt, Artificial Sequence
  Description of Artificial Sequence: Synthetic oligonucleotide
ugccuuacuuaccugggcc

SEQ ID NO: 3250306 - RNA, 19 nt, Artificial Sequence
  Description of Artificial Sequence: Synthetic oligonucleotide
aucucucuguaauuaaucu

SEQ ID NO: 3250307 - RNA, 19 nt, Artificial Sequence
  Description of Artificial Sequence: Synthetic oligonucleotide
aagugucucacaauuauaa

SEQ ID NO: 3250308 - RNA, 19 nt, Artificial Sequence
  Description of Artificial Sequence: Synthetic oligonucleotide
uugauaaggcuuguucagg

SEQ ID NO: 3250309 - RNA, 19 nt, Artificial Sequence
  Description of Artificial Sequence: Synthetic oligonucleotide
uaguagaagcaguagcaca

SEQ ID NO: 3250310 - RNA, 19 nt, Artificial Sequence
  Description of Artificial Sequence: Synthetic oligonucleotide
aaauuaugcuugcuccagu

SEQ ID NO: 3250311 - RNA, 19 nt, Artificial Sequence
  Description of Artificial Sequence: Synthetic oligonucleotide
uacuccauguucuggaagu

SEQ ID NO: 3250312 - RNA, 19 nt, Artificial Sequence
  Description of Artificial Sequence: Synthetic oligonucleotide
uuugggauggaggaaaauc

SEQ ID NO: 3250313 - RNA, 19 nt, Artificial Sequence
  Description of Artificial Sequence: Synthetic oligonucleotide
uccacacaggaccugacac

SEQ ID NO: 3250314 - RNA, 19 nt, Artificial Sequence
  Description of Artificial Sequence: Synthetic oligonucleotide
agcaguagcacaauacauc

SEQ ID NO: 3250315 - RNA, 19 nt, Artificial Sequence
  Description of Artificial Sequence: Synthetic oligonucleotide
uaaguaguagaagcaguag

SEQ ID NO: 3250316 - RNA, 19 nt, Artificial Sequence
  Description of Artificial Sequence: Synthetic oligonucleotide
auggaggaaaaucacgggu

SEQ ID NO: 3250317 - RNA, 19 nt, Artificial Sequence
  Description of Artificial Sequence: Synthetic oligonucleotide
uuuuauuauggaaagguac

SEQ ID NO: 3250318 - RNA, 19 nt, Artificial Sequence
  Description of Artificial Sequence: Synthetic oligonucleotide
aaauuuaggcuacuggcuc

SEQ ID NO: 3250319 - RNA, 19 nt, Artificial Sequence
  Description of Artificial Sequence: Synthetic oligonucleotide
acgauuagggccuuggugc

SEQ ID NO: 3250320 - RNA, 19 nt, Artificial Sequence
  Description of Artificial Sequence: Synthetic oligonucleotide
uuuauuauggaaagguaca

SEQ ID NO: 3250321 - RNA, 19 nt, Artificial Sequence
  Description of Artificial Sequence: Synthetic oligonucleotide
aauucaauucaaugugaac

SEQ ID NO: 3250322 - RNA, 19 nt, Artificial Sequence
  Description of Artificial Sequence: Synthetic oligonucleotide
aaucccuggacucaguguc

SEQ ID NO: 3250323 - RNA, 19 nt, Artificial Sequence
  Description of Artificial Sequence: Synthetic oligonucleotide
guaaauuuaggcuacuggc

SEQ ID NO: 3250324 - RNA, 19 nt, Artificial Sequence
  Description of Artificial Sequence: Synthetic oligonucleotide
ugcaaauaggcauagcuug

SEQ ID NO: 3250325 - RNA, 19 nt, Artificial Sequence
  Description of Artificial Sequence: Synthetic oligonucleotide
cacuccauagaacagacgg

SEQ ID NO: 3250326 - RNA, 19 nt, Artificial Sequence
  Description of Artificial Sequence: Synthetic oligonucleotide
ugaucaagcgaggagaagg

SEQ ID NO: 3250327 - RNA, 19 nt, Artificial Sequence
  Description of Artificial Sequence: Synthetic oligonucleotide
gaacagacggcucaugagg

SEQ ID NO: 3250328 - RNA, 19 nt, Artificial Sequence
  Description of Artificial Sequence: Synthetic oligonucleotide
uaaauuuaggcuacuggcu

SEQ ID NO: 3250329 - RNA, 19 nt, Artificial Sequence
  Description of Artificial Sequence: Synthetic oligonucleotide
aauaauucucaugggguuc

SEQ ID NO: 3250330 - RNA, 19 nt, Artificial Sequence
  Description of Artificial Sequence: Synthetic oligonucleotide
auuuaugggccucaggcag

SEQ ID NO: 3250331 - RNA, 19 nt, Artificial Sequence
  Description of Artificial Sequence: Synthetic oligonucleotide
agggcugucucacugaagg

SEQ ID NO: 3250332 - RNA, 19 nt, Artificial Sequence
  Description of Artificial Sequence: Synthetic oligonucleotide
ucugaaggguacuggaagg

SEQ ID NO: 3250333 - RNA, 19 nt, Artificial Sequence
  Description of Artificial Sequence: Synthetic oligonucleotide
guaaacaaaggguagugac

SEQ ID NO: 3250334 - RNA, 19 nt, Artificial Sequence
  Description of Artificial Sequence: Synthetic oligonucleotide
cucucaguaggacaaacgg

SEQ ID NO: 3250335 - RNA, 19 nt, Artificial Sequence
  Description of Artificial Sequence: Synthetic oligonucleotide
gguaaauuuaggcuacugg

SEQ ID NO: 3250336 - RNA, 19 nt, Artificial Sequence
  Description of Artificial Sequence: Synthetic oligonucleotide
aaauaauucucaugggguu

SEQ ID NO: 3250337 - RNA, 19 nt, Artificial Sequence
  Description of Artificial Sequence: Synthetic oligonucleotide
caggcugugaucaagcgag

SEQ ID NO: 3250338 - RNA, 19 nt, Artificial Sequence
  Description of Artificial Sequence: Synthetic oligonucleotide
ucugcuuuccgauaccucu

SEQ ID NO: 3250339 - RNA, 19 nt, Artificial Sequence
  Description of Artificial Sequence: Synthetic oligonucleotide
guaccgagcucucugaagg

SEQ ID NO: 3250340 - RNA, 19 nt, Artificial Sequence
  Description of Artificial Sequence: Synthetic oligonucleotide
ucggaauaugcucauugcc

SEQ ID NO: 3250341 - RNA, 19 nt, Artificial Sequence
  Description of Artificial Sequence: Synthetic oligonucleotide
cucugaaucuuccagacuc

SEQ ID NO: 3250342 - RNA, 19 nt, Artificial Sequence
  Description of Artificial Sequence: Synthetic oligonucleotide
aaagagcuccauuuuauua

SEQ ID NO: 3250343 - RNA, 19 nt, Artificial Sequence
  Description of Artificial Sequence: Synthetic oligonucleotide
uucuuucgggucaagauuc

SEQ ID NO: 3250344 - RNA, 19 nt, Artificial Sequence
  Description of Artificial Sequence: Synthetic oligonucleotide
aauaugcucauugcccuuc

SEQ ID NO: 3250345 - RNA, 19 nt, Artificial Sequence
  Description of Artificial Sequence: Synthetic oligonucleotide
aauaggcauagcuuguaaa

SEQ ID NO: 3250346 - RNA, 19 nt, Artificial Sequence
  Description of Artificial Sequence: Synthetic oligonucleotide
aauuuaggcuacuggcucu

SEQ ID NO: 3250347 - RNA, 19 nt, Artificial Sequence
  Description of Artificial Sequence: Synthetic oligonucleotide
aggaucuucugguaggaag

SEQ ID NO: 3250348 - RNA, 19 nt, Artificial Sequence
  Description of Artificial Sequence: Synthetic oligonucleotide
uccgauaccucuuuucucu

SEQ ID NO: 3250349 - RNA, 19 nt, Artificial Sequence
  Description of Artificial Sequence: Synthetic oligonucleotide
agucggaauaugcucauug

SEQ ID NO: 3250350 - RNA, 19 nt, Artificial Sequence
  Description of Artificial Sequence: Synthetic oligonucleotide
ugaggcacaguaauacuga

SEQ ID NO: 3250351 - RNA, 19 nt, Artificial Sequence
  Description of Artificial Sequence: Synthetic oligonucleotide
gagguaugugcccaaacug

SEQ ID NO: 3250352 - RNA, 19 nt, Artificial Sequence
  Description of Artificial Sequence: Synthetic oligonucleotide
ugggagauggucaccgccg

SEQ ID NO: 3250353 - RNA, 19 nt, Artificial Sequence
  Description of Artificial Sequence: Synthetic oligonucleotide
uuuucucuugggacugugg

SEQ ID NO: 3250354 - RNA, 19 nt, Artificial Sequence
  Description of Artificial Sequence: Synthetic oligonucleotide
ugaaaagagcuccauuuua

SEQ ID NO: 3250355 - RNA, 19 nt, Artificial Sequence
  Description of Artificial Sequence: Synthetic oligonucleotide
aaucuuccagacuccagga

SEQ ID NO: 3250356 - RNA, 19 nt, Artificial Sequence
  Description of Artificial Sequence: Synthetic oligonucleotide
gaguucaggguccauuucc

SEQ ID NO: 3250357 - RNA, 19 nt, Artificial Sequence
  Description of Artificial Sequence: Synthetic oligonucleotide
ucgucaucaggcugggucg

SEQ ID NO: 3250358 - RNA, 19 nt, Artificial Sequence
  Description of Artificial Sequence: Synthetic oligonucleotide
uagggguaaauuuaggcua

SEQ ID NO: 3250359 - RNA, 19 nt, Artificial Sequence
  Description of Artificial Sequence: Synthetic oligonucleotide
gaaagccacauaaucuccg

SEQ ID NO: 3250360 - RNA, 19 nt, Artificial Sequence
  Description of Artificial Sequence: Synthetic oligonucleotide
aaggguagugaccugggaa

SEQ ID NO: 3250361 - RNA, 19 nt, Artificial Sequence
  Description of Artificial Sequence: Synthetic oligonucleotide
aaaaggggugaccuugggu

SEQ ID NO: 3250362 - RNA, 19 nt, Artificial Sequence
  Description of Artificial Sequence: Synthetic oligonucleotide
acauaaucuccgcagguca

SEQ ID NO: 3250363 - RNA, 19 nt, Artificial Sequence
  Description of Artificial Sequence: Synthetic oligonucleotide
ggcacaguaauacugagca

SEQ ID NO: 3250364 - RNA, 19 nt, Artificial Sequence
  Description of Artificial Sequence: Synthetic oligonucleotide
agccacauaaucuccgcag

SEQ ID NO: 3250365 - RNA, 19 nt, Artificial Sequence
  Description of Artificial Sequence: Synthetic oligonucleotide
uagugaccugggaaaaggg

SEQ ID NO: 3250366 - RNA, 19 nt, Artificial Sequence
  Description of Artificial Sequence: Synthetic oligonucleotide
aacggagggugguggauuc

SEQ ID NO: 3250367 - RNA, 19 nt, Artificial Sequence
  Description of Artificial Sequence: Synthetic oligonucleotide
ucugaaucuuccagacucc

SEQ ID NO: 3250368 - RNA, 19 nt, Artificial Sequence
  Description of Artificial Sequence: Synthetic oligonucleotide
aaaccaggcaauuggugaa

SEQ ID NO: 3250369 - RNA, 19 nt, Artificial Sequence
  Description of Artificial Sequence: Synthetic oligonucleotide
cauagcuuguaaaccuggg

SEQ ID NO: 3250370 - RNA, 19 nt, Artificial Sequence
  Description of Artificial Sequence: Synthetic oligonucleotide
cugaggcacaguaauacug

SEQ ID NO: 3250371 - RNA, 19 nt, Artificial Sequence
  Description of Artificial Sequence: Synthetic oligonucleotide
uguaucaagcucuguuucu

SEQ ID NO: 3250372 - RNA, 19 nt, Artificial Sequence
  Description of Artificial Sequence: Synthetic oligonucleotide
ugaaucuuccagacuccag

SEQ ID NO: 3250373 - RNA, 19 nt, Artificial Sequence
  Description of Artificial Sequence: Synthetic oligonucleotide
uccgcuaguaccgagcucu

SEQ ID NO: 3250374 - RNA, 19 nt, Artificial Sequence
  Description of Artificial Sequence: Synthetic oligonucleotide
guuucucuggagaugcugg

SEQ ID NO: 3250375 - RNA, 19 nt, Artificial Sequence
  Description of Artificial Sequence: Synthetic oligonucleotide
uucucgagccuucccagag

SEQ ID NO: 3250376 - RNA, 19 nt, Artificial Sequence
  Description of Artificial Sequence: Synthetic oligonucleotide
uucaggguccauuuccagc

SEQ ID NO: 3250377 - RNA, 19 nt, Artificial Sequence
  Description of Artificial Sequence: Synthetic oligonucleotide
guagugaccugggaaaagg

SEQ ID NO: 3250378 - RNA, 19 nt, Artificial Sequence
  Description of Artificial Sequence: Synthetic oligonucleotide
cacacugcaauucaauuca

SEQ ID NO: 3250379 - RNA, 19 nt, Artificial Sequence
  Description of Artificial Sequence: Synthetic oligonucleotide
auaugcucauugcccuucc

SEQ ID NO: 3250380 - RNA, 19 nt, Artificial Sequence
  Description of Artificial Sequence: Synthetic oligonucleotide
aacaggaugggaaaagcaa

SEQ ID NO: 3250381 - RNA, 19 nt, Artificial Sequence
  Description of Artificial Sequence: Synthetic oligonucleotide
cuucuggucaccagacucc

SEQ ID NO: 3250382 - RNA, 19 nt, Artificial Sequence
  Description of Artificial Sequence: Synthetic oligonucleotide
aacucaggucucuggcuuc

SEQ ID NO: 3250383 - RNA, 19 nt, Artificial Sequence
  Description of Artificial Sequence: Synthetic oligonucleotide
agguaugugcccaaacugg

SEQ ID NO: 3250384 - RNA, 19 nt, Artificial Sequence
  Description of Artificial Sequence: Synthetic oligonucleotide
uccauuuccagcccucagu

SEQ ID NO: 3250385 - RNA, 19 nt, Artificial Sequence
  Description of Artificial Sequence: Synthetic oligonucleotide
caaacugggagauggucac

SEQ ID NO: 3250386 - RNA, 19 nt, Artificial Sequence
  Description of Artificial Sequence: Synthetic oligonucleotide
auagcuuguaaaccuggga

SEQ ID NO: 3250387 - RNA, 19 nt, Artificial Sequence
  Description of Artificial Sequence: Synthetic oligonucleotide
gagggugguggauuccucg

SEQ ID NO: 3250388 - RNA, 19 nt, Artificial Sequence
  Description of Artificial Sequence: Synthetic oligonucleotide
gaagucugcaaauaggcau

SEQ ID NO: 3250389 - RNA, 19 nt, Artificial Sequence
  Description of Artificial Sequence: Synthetic oligonucleotide
agagcuccauuuuauuaug

SEQ ID NO: 3250390 - RNA, 19 nt, Artificial Sequence
  Description of Artificial Sequence: Synthetic oligonucleotide
ugugaucaagcgaggagaa

SEQ ID NO: 3250391 - RNA, 19 nt, Artificial Sequence
  Description of Artificial Sequence: Synthetic oligonucleotide
acuuugagaggcgggaccg

SEQ ID NO: 3250392 - RNA, 19 nt, Artificial Sequence
  Description of Artificial Sequence: Synthetic oligonucleotide
ucagccuccacaccagacu

SEQ ID NO: 3250393 - RNA, 19 nt, Artificial Sequence
  Description of Artificial Sequence: Synthetic oligonucleotide
ugagcuguuugugaugucu

SEQ ID NO: 3250394 - RNA, 19 nt, Artificial Sequence
  Description of Artificial Sequence: Synthetic oligonucleotide
gacuuugagaggcgggacc

SEQ ID NO: 3250395 - RNA, 19 nt, Artificial Sequence
  Description of Artificial Sequence: Synthetic oligonucleotide
acagggaggggugaggcac

SEQ ID NO: 3250396 - RNA, 19 nt, Artificial Sequence
  Description of Artificial Sequence: Synthetic oligonucleotide
ucaugaggggauccccggg

SEQ ID NO: 3250397 - RNA, 19 nt, Artificial Sequence
  Description of Artificial Sequence: Synthetic oligonucleotide
ggacuugccaaucucagac

SEQ ID NO: 3250398 - RNA, 19 nt, Artificial Sequence
  Description of Artificial Sequence: Synthetic oligonucleotide
ugaagguguguccgcugcg

SEQ ID NO: 3250399 - RNA, 19 nt, Artificial Sequence
  Description of Artificial Sequence: Synthetic oligonucleotide
ucagcaguuggguaccgcu

SEQ ID NO: 3250400 - RNA, 19 nt, Artificial Sequence
  Description of Artificial Sequence: Synthetic oligonucleotide
ucuccucuggaguuucucc

SEQ ID NO: 3250401 - RNA, 19 nt, Artificial Sequence
  Description of Artificial Sequence: Synthetic oligonucleotide
agagguucugcugagcucu

SEQ ID NO: 3250402 - RNA, 19 nt, Artificial Sequence
  Description of Artificial Sequence: Synthetic oligonucleotide
acuccauagaacagacggc

SEQ ID NO: 3250403 - RNA, 19 nt, Artificial Sequence
  Description of Artificial Sequence: Synthetic oligonucleotide
ugggacuuugagaggcggg

SEQ ID NO: 3250404 - RNA, 19 nt, Artificial Sequence
  Description of Artificial Sequence: Synthetic oligonucleotide
uccauuucugagccucugc

SEQ ID NO: 3250405 - RNA, 19 nt, Artificial Sequence
  Description of Artificial Sequence: Synthetic oligonucleotide
uggacucagugucucuucc

SEQ ID NO: 3250406 - RNA, 19 nt, Artificial Sequence
  Description of Artificial Sequence: Synthetic oligonucleotide
ugagacggagguacgcccc

SEQ ID NO: 3250407 - RNA, 19 nt, Artificial Sequence
  Description of Artificial Sequence: Synthetic oligonucleotide
uaggaagagguaugugccc

SEQ ID NO: 3250408 - RNA, 19 nt, Artificial Sequence
  Description of Artificial Sequence: Synthetic oligonucleotide
gagaaggaacuguaaacaa

SEQ ID NO: 3250409 - RNA, 19 nt, Artificial Sequence
  Description of Artificial Sequence: Synthetic oligonucleotide
aacaaaccaggcaauuggu

SEQ ID NO: 3250410 - RNA, 19 nt, Artificial Sequence
  Description of Artificial Sequence: Synthetic oligonucleotide
caaaggguagugaccuggg

SEQ ID NO: 3250411 - RNA, 19 nt, Artificial Sequence
  Description of Artificial Sequence: Synthetic oligonucleotide
uuguaaaccugggacuuug

SEQ ID NO: 3250412 - RNA, 19 nt, Artificial Sequence
  Description of Artificial Sequence: Synthetic oligonucleotide
aaacugggagauggucacc

SEQ ID NO: 3250413 - RNA, 19 nt, Artificial Sequence
  Description of Artificial Sequence: Synthetic oligonucleotide
agacgcccguucucgagcc

SEQ ID NO: 3250414 - RNA, 19 nt, Artificial Sequence
  Description of Artificial Sequence: Synthetic oligonucleotide
uguuucucuggagaugcug

SEQ ID NO: 3250415 - RNA, 19 nt, Artificial Sequence
  Description of Artificial Sequence: Synthetic oligonucleotide
cacgauuagggccuuggug

SEQ ID NO: 3250416 - RNA, 19 nt, Artificial Sequence
  Description of Artificial Sequence: Synthetic oligonucleotide
ugacagugaaggugugucc

SEQ ID NO: 3250417 - RNA, 19 nt, Artificial Sequence
  Description of Artificial Sequence: Synthetic oligonucleotide
aauacuaagacucucaaac

SEQ ID NO: 3250418 - RNA, 19 nt, Artificial Sequence
  Description of Artificial Sequence: Synthetic oligonucleotide
aaagaagccaaucugaagc

SEQ ID NO: 3250419 - RNA, 19 nt, Artificial Sequence
  Description of Artificial Sequence: Synthetic oligonucleotide
aauaucagaaucuuaauga

SEQ ID NO: 3250420 - RNA, 19 nt, Artificial Sequence
  Description of Artificial Sequence: Synthetic oligonucleotide
uuuaccauuguacauagag

SEQ ID NO: 3250421 - RNA, 19 nt, Artificial Sequence
  Description of Artificial Sequence: Synthetic oligonucleotide
auuaucaacaauucauugc

SEQ ID NO: 3250422 - RNA, 19 nt, Artificial Sequence
  Description of Artificial Sequence: Synthetic oligonucleotide
auuucuaucaacuucacga

SEQ ID NO: 3250423 - RNA, 19 nt, Artificial Sequence
  Description of Artificial Sequence: Synthetic oligonucleotide
uuaauuaugacuuggcaug

SEQ ID NO: 3250424 - RNA, 19 nt, Artificial Sequence
  Description of Artificial Sequence: Synthetic oligonucleotide
cuuaucaauacuauuuugg

SEQ ID NO: 3250425 - RNA, 19 nt, Artificial Sequence
  Description of Artificial Sequence: Synthetic oligonucleotide
aauggauuaaagcuccagg

SEQ ID NO: 3250426 - RNA, 19 nt, Artificial Sequence
  Description of Artificial Sequence: Synthetic oligonucleotide
uuaucaacaauucauugca

SEQ ID NO: 3250427 - RNA, 19 nt, Artificial Sequence
  Description of Artificial Sequence: Synthetic oligonucleotide
uccaguuuaacaaaggugu

SEQ ID NO: 3250428 - RNA, 19 nt, Artificial Sequence
  Description of Artificial Sequence: Synthetic oligonucleotide
uuuacgugcaaauuugagg

SEQ ID NO: 3250429 - RNA, 19 nt, Artificial Sequence
  Description of Artificial Sequence: Synthetic oligonucleotide
agcaauuagucauuuaugg

SEQ ID NO: 3250430 - RNA, 19 nt, Artificial Sequence
  Description of Artificial Sequence: Synthetic oligonucleotide
uuuauuauucuguacaggu

SEQ ID NO: 3250431 - RNA, 19 nt, Artificial Sequence
  Description of Artificial Sequence: Synthetic oligonucleotide
aacaacauagaauguuuac

SEQ ID NO: 3250432 - RNA, 19 nt, Artificial Sequence
  Description of Artificial Sequence: Synthetic oligonucleotide
uuauggagcauaaauagca

SEQ ID NO: 3250433 - RNA, 19 nt, Artificial Sequence
  Description of Artificial Sequence: Synthetic oligonucleotide
uacuauaacauuuugccug

SEQ ID NO: 3250434 - RNA, 19 nt, Artificial Sequence
  Description of Artificial Sequence: Synthetic oligonucleotide
uuacgugcaaauuugaggc

SEQ ID NO: 3250435 - RNA, 19 nt, Artificial Sequence
  Description of Artificial Sequence: Synthetic oligonucleotide
auacuguucauguacuucc

SEQ ID NO: 3250436 - RNA, 19 nt, Artificial Sequence
  Description of Artificial Sequence: Synthetic oligonucleotide
uuaucauuuaccauuguac

SEQ ID NO: 3250437 - RNA, 19 nt, Artificial Sequence
  Description of Artificial Sequence: Synthetic oligonucleotide
acuuauggagcauaaauag

SEQ ID NO: 3250438 - RNA, 19 nt, Artificial Sequence
  Description of Artificial Sequence: Synthetic oligonucleotide
cauuauagaagcaaaaguc

SEQ ID NO: 3250439 - RNA, 19 nt, Artificial Sequence
  Description of Artificial Sequence: Synthetic oligonucleotide
aacaauuaugugcaaacug

SEQ ID NO: 3250440 - RNA, 19 nt, Artificial Sequence
  Description of Artificial Sequence: Synthetic oligonucleotide
ucucuaacauuauagaagc

SEQ ID NO: 3250441 - RNA, 19 nt, Artificial Sequence
  Description of Artificial Sequence: Synthetic oligonucleotide
uacauagagaauaaacugc

SEQ ID NO: 3250442 - RNA, 19 nt, Artificial Sequence
  Description of Artificial Sequence: Synthetic oligonucleotide
uauaaaagcucuaaucaca

SEQ ID NO: 3250443 - RNA, 19 nt, Artificial Sequence
  Description of Artificial Sequence: Synthetic oligonucleotide
aauuuaauuaugacuuggc

SEQ ID NO: 3250444 - RNA, 19 nt, Artificial Sequence
  Description of Artificial Sequence: Synthetic oligonucleotide
gaguuuauagcacagaaca

SEQ ID NO: 3250445 - RNA, 19 nt, Artificial Sequence
  Description of Artificial Sequence: Synthetic oligonucleotide
uauggaagccguaagauac

SEQ ID NO: 3250446 - RNA, 19 nt, Artificial Sequence
  Description of Artificial Sequence: Synthetic oligonucleotide
ucaucugugaaccucagga

SEQ ID NO: 3250447 - RNA, 19 nt, Artificial Sequence
  Description of Artificial Sequence: Synthetic oligonucleotide
uccgaaacgcaaaugacgg

SEQ ID NO: 3250448 - RNA, 19 nt, Artificial Sequence
  Description of Artificial Sequence: Synthetic oligonucleotide
ugagaauucuacuuaauac

SEQ ID NO: 3250449 - RNA, 19 nt, Artificial Sequence
  Description of Artificial Sequence: Synthetic oligonucleotide
guaacuaaaacaucgcacc

SEQ ID NO: 3250450 - RNA, 19 nt, Artificial Sequence
  Description of Artificial Sequence: Synthetic oligonucleotide
uaaaacaucgcaccaagga

SEQ ID NO: 3250451 - RNA, 19 nt, Artificial Sequence
  Description of Artificial Sequence: Synthetic oligonucleotide
acaauuaugugcaaacugc

SEQ ID NO: 3250452 - RNA, 19 nt, Artificial Sequence
  Description of Artificial Sequence: Synthetic oligonucleotide
guuacaguaaauuaucaac

SEQ ID NO: 3250453 - RNA, 19 nt, Artificial Sequence
  Description of Artificial Sequence: Synthetic oligonucleotide
aaugaggaauaguacagug

SEQ ID NO: 3250454 - RNA, 19 nt, Artificial Sequence
  Description of Artificial Sequence: Synthetic oligonucleotide
uguaacuaaaacaucgcac

SEQ ID NO: 3250455 - RNA, 19 nt, Artificial Sequence
  Description of Artificial Sequence: Synthetic oligonucleotide
agaguuuaucuacagaaag

SEQ ID NO: 3250456 - RNA, 19 nt, Artificial Sequence
  Description of Artificial Sequence: Synthetic oligonucleotide
uuuaauuaugacuuggcau

SEQ ID NO: 3250457 - RNA, 19 nt, Artificial Sequence
  Description of Artificial Sequence: Synthetic oligonucleotide
uaaagcuccagguaaacug

SEQ ID NO: 3250458 - RNA, 19 nt, Artificial Sequence
  Description of Artificial Sequence: Synthetic oligonucleotide
uaucagaaucuuaaugagg

SEQ ID NO: 3250459 - RNA, 19 nt, Artificial Sequence
  Description of Artificial Sequence: Synthetic oligonucleotide
ucuaaaauuuaauguaaca

SEQ ID NO: 3250460 - RNA, 19 nt, Artificial Sequence
  Description of Artificial Sequence: Synthetic oligonucleotide
aauguacuauaacaaggag

SEQ ID NO: 3250461 - RNA, 19 nt, Artificial Sequence
  Description of Artificial Sequence: Synthetic oligonucleotide
ugaggaauaguacagugac

SEQ ID NO: 3250462 - RNA, 19 nt, Artificial Sequence
  Description of Artificial Sequence: Synthetic oligonucleotide
uagacuaccaaguauaaau

SEQ ID NO: 3250463 - RNA, 19 nt, Artificial Sequence
  Description of Artificial Sequence: Synthetic oligonucleotide
uacuauaacaaggaguuag

SEQ ID NO: 3250464 - RNA, 19 nt, Artificial Sequence
  Description of Artificial Sequence: Synthetic oligonucleotide
aacuauagacugcaaacug

SEQ ID NO: 3250465 - RNA, 19 nt, Artificial Sequence
  Description of Artificial Sequence: Synthetic oligonucleotide
aaaacaacuauagacugca

SEQ ID NO: 3250466 - RNA, 19 nt, Artificial Sequence
  Description of Artificial Sequence: Synthetic oligonucleotide
uuccgaaacgcaaaugacg

SEQ ID NO: 3250467 - RNA, 19 nt, Artificial Sequence
  Description of Artificial Sequence: Synthetic oligonucleotide
uaaagaguuauaauauacu

SEQ ID NO: 3250468 - RNA, 19 nt, Artificial Sequence
  Description of Artificial Sequence: Synthetic oligonucleotide
ugugacaucauaaacuaau

SEQ ID NO: 3250469 - RNA, 19 nt, Artificial Sequence
  Description of Artificial Sequence: Synthetic oligonucleotide
ucuaaucacauguagacua

SEQ ID NO: 3250470 - RNA, 19 nt, Artificial Sequence
  Description of Artificial Sequence: Synthetic oligonucleotide
acuaugucauuucuuguac

SEQ ID NO: 3250471 - RNA, 19 nt, Artificial Sequence
  Description of Artificial Sequence: Synthetic oligonucleotide
agauauccuguucagaaag

SEQ ID NO: 3250472 - RNA, 19 nt, Artificial Sequence
  Description of Artificial Sequence: Synthetic oligonucleotide
aaacuaauauaacucccug

SEQ ID NO: 3250473 - RNA, 19 nt, Artificial Sequence
  Description of Artificial Sequence: Synthetic oligonucleotide
uaucauuuaccauuguaca

SEQ ID NO: 3250474 - RNA, 19 nt, Artificial Sequence
  Description of Artificial Sequence: Synthetic oligonucleotide
aagcaaaagucuuauauuu

SEQ ID NO: 3250475 - RNA, 19 nt, Artificial Sequence
  Description of Artificial Sequence: Synthetic oligonucleotide
acauuauagaagcaaaagu

SEQ ID NO: 3250476 - RNA, 19 nt, Artificial Sequence
  Description of Artificial Sequence: Synthetic oligonucleotide
uuaucaauacuauuuugga

SEQ ID NO: 3250477 - RNA, 19 nt, Artificial Sequence
  Description of Artificial Sequence: Synthetic oligonucleotide
aaacauacaauguacuaua

SEQ ID NO: 3250478 - RNA, 19 nt, Artificial Sequence
  Description of Artificial Sequence: Synthetic oligonucleotide
caaguuuagccuuauuucc

SEQ ID NO: 3250479 - RNA, 19 nt, Artificial Sequence
  Description of Artificial Sequence: Synthetic oligonucleotide
uguuggguuuuaaaagugg

SEQ ID NO: 3250480 - RNA, 19 nt, Artificial Sequence
  Description of Artificial Sequence: Synthetic oligonucleotide
acugcuuuaacuuaucaau

SEQ ID NO: 3250481 - RNA, 19 nt, Artificial Sequence
  Description of Artificial Sequence: Synthetic oligonucleotide
aauuugaggccuucauuuc

SEQ ID NO: 3250482 - RNA, 19 nt, Artificial Sequence
  Description of Artificial Sequence: Synthetic oligonucleotide
uagaaaacugaauacugug

SEQ ID NO: 3250483 - RNA, 19 nt, Artificial Sequence
  Description of Artificial Sequence: Synthetic oligonucleotide
agguuuauuauucuguaca

SEQ ID NO: 3250484 - RNA, 19 nt, Artificial Sequence
  Description of Artificial Sequence: Synthetic oligonucleotide
auaucagaaucuuaaugag

SEQ ID NO: 3250485 - RNA, 19 nt, Artificial Sequence
  Description of Artificial Sequence: Synthetic oligonucleotide
ucacauguagacuaccaag

SEQ ID NO: 3250486 - RNA, 19 nt, Artificial Sequence
  Description of Artificial Sequence: Synthetic oligonucleotide
ucaacguaaauuaaauaau

SEQ ID NO: 3250487 - RNA, 19 nt, Artificial Sequence
  Description of Artificial Sequence: Synthetic oligonucleotide
gucaacguaaauuaaauaa

SEQ ID NO: 3250488 - RNA, 19 nt, Artificial Sequence
  Description of Artificial Sequence: Synthetic oligonucleotide
uuuaauguaacaugaccaa

SEQ ID NO: 3250489 - RNA, 19 nt, Artificial Sequence
  Description of Artificial Sequence: Synthetic oligonucleotide
aaaauguacauaaaucuaa

SEQ ID NO: 3250490 - RNA, 19 nt, Artificial Sequence
  Description of Artificial Sequence: Synthetic oligonucleotide
accuucaaaacacagaaau

SEQ ID NO: 3250491 - RNA, 19 nt, Artificial Sequence
  Description of Artificial Sequence: Synthetic oligonucleotide
aaaacaucgcaccaaggau

SEQ ID NO: 3250492 - RNA, 19 nt, Artificial Sequence
  Description of Artificial Sequence: Synthetic oligonucleotide
aaaggcacacugaacaccg

SEQ ID NO: 3250493 - RNA, 19 nt, Artificial Sequence
  Description of Artificial Sequence: Synthetic oligonucleotide
acuaaaacaucgcaccaag

SEQ ID NO: 3250494 - RNA, 19 nt, Artificial Sequence
  Description of Artificial Sequence: Synthetic oligonucleotide
gauacagauagucauuaca

SEQ ID NO: 3250495 - RNA, 19 nt, Artificial Sequence
  Description of Artificial Sequence: Synthetic oligonucleotide
uagucauuacacaagcuac

SEQ ID NO: 3250496 - RNA, 19 nt, Artificial Sequence
  Description of Artificial Sequence: Synthetic oligonucleotide
aauagcacuuccccaccac

SEQ ID NO: 3250497 - RNA, 19 nt, Artificial Sequence
  Description of Artificial Sequence: Synthetic oligonucleotide
aacuaauauaacucccugu

SEQ ID NO: 3250498 - RNA, 19 nt, Artificial Sequence
  Description of Artificial Sequence: Synthetic oligonucleotide
cuuuguuauuccucaaggg

SEQ ID NO: 3250499 - RNA, 19 nt, Artificial Sequence
  Description of Artificial Sequence: Synthetic oligonucleotide
uaccaaguauaaaugaagu

SEQ ID NO: 3250500 - RNA, 19 nt, Artificial Sequence
  Description of Artificial Sequence: Synthetic oligonucleotide
uacuauuuuggaagcauca

SEQ ID NO: 3250501 - RNA, 19 nt, Artificial Sequence
  Description of Artificial Sequence: Synthetic oligonucleotide
agcaguuaagaguuuaucu

SEQ ID NO: 3250502 - RNA, 19 nt, Artificial Sequence
  Description of Artificial Sequence: Synthetic oligonucleotide
ucuaucaacuucacgauuu

SEQ ID NO: 3250503 - RNA, 19 nt, Artificial Sequence
  Description of Artificial Sequence: Synthetic oligonucleotide
aguuuaacaaaggugucuc

SEQ ID NO: 3250504 - RNA, 19 nt, Artificial Sequence
  Description of Artificial Sequence: Synthetic oligonucleotide
ugcaaguuuagccuuauuu

SEQ ID NO: 3250505 - RNA, 19 nt, Artificial Sequence
  Description of Artificial Sequence: Synthetic oligonucleotide
gacaucauaaacuaauaua

SEQ ID NO: 3250506 - RNA, 19 nt, Artificial Sequence
  Description of Artificial Sequence: Synthetic oligonucleotide
aacccacuaauacacauau

SEQ ID NO: 3250507 - RNA, 19 nt, Artificial Sequence
  Description of Artificial Sequence: Synthetic oligonucleotide
aagcucuaaucacauguag

SEQ ID NO: 3250508 - RNA, 19 nt, Artificial Sequence
  Description of Artificial Sequence: Synthetic oligonucleotide
aguauuaaagaguuauaau

SEQ ID NO: 3250509 - RNA, 19 nt, Artificial Sequence
  Description of Artificial Sequence: Synthetic oligonucleotide
uuaucauuuaguguuuucu

SEQ ID NO: 3250510 - RNA, 19 nt, Artificial Sequence
  Description of Artificial Sequence: Synthetic oligonucleotide
aaagauguuauuaucugau

SEQ ID NO: 3250511 - RNA, 19 nt, Artificial Sequence
  Description of Artificial Sequence: Synthetic oligonucleotide
cuuauggagcauaaauagc

SEQ ID NO: 3250512 - RNA, 19 nt, Artificial Sequence
  Description of Artificial Sequence: Synthetic oligonucleotide
uuaauacuaagacucucaa

SEQ ID NO: 3250513 - RNA, 19 nt, Artificial Sequence
  Description of Artificial Sequence: Synthetic oligonucleotide
uuauaaguguauugugagc

SEQ ID NO: 3250514 - RNA, 19 nt, Artificial Sequence
  Description of Artificial Sequence: Synthetic oligonucleotide
ugcuuuaacuuaucaauac

SEQ ID NO: 3250515 - RNA, 19 nt, Artificial Sequence
  Description of Artificial Sequence: Synthetic oligonucleotide
auagucauuacacaagcua

SEQ ID NO: 3250516 - RNA, 19 nt, Artificial Sequence
  Description of Artificial Sequence: Synthetic oligonucleotide
uuaucaauuuuauuuccaa

SEQ ID NO: 3250517 - RNA, 19 nt, Artificial Sequence
  Description of Artificial Sequence: Synthetic oligonucleotide
uuaucaaagaaaaucuugg

SEQ ID NO: 3250518 - RNA, 19 nt, Artificial Sequence
  Description of Artificial Sequence: Synthetic oligonucleotide
uugcauuucauccagaucu

SEQ ID NO: 3250519 - RNA, 19 nt, Artificial Sequence
  Description of Artificial Sequence: Synthetic oligonucleotide
uuuaucaaagaaaaucuug

SEQ ID NO: 3250520 - RNA, 19 nt, Artificial Sequence
  Description of Artificial Sequence: Synthetic oligonucleotide
aaaaucuuggcuucuuuuc

SEQ ID NO: 3250521 - RNA, 19 nt, Artificial Sequence
  Description of Artificial Sequence: Synthetic oligonucleotide
aagaagaaguuccagcagg

SEQ ID NO: 3250522 - RNA, 19 nt, Artificial Sequence
  Description of Artificial Sequence: Synthetic oligonucleotide
aacuucuucacauugggca

SEQ ID NO: 3250523 - RNA, 19 nt, Artificial Sequence
  Description of Artificial Sequence: Synthetic oligonucleotide
caaacgaagaagaaguucc

SEQ ID NO: 3250524 - RNA, 19 nt, Artificial Sequence
  Description of Artificial Sequence: Synthetic oligonucleotide
ucuuuuaucaaagaaaauc

SEQ ID NO: 3250525 - RNA, 19 nt, Artificial Sequence
  Description of Artificial Sequence: Synthetic oligonucleotide
aauggcucuggucugcacc

SEQ ID NO: 3250526 - RNA, 19 nt, Artificial Sequence
  Description of Artificial Sequence: Synthetic oligonucleotide
ugaauguccacccugguca

SEQ ID NO: 3250527 - RNA, 19 nt, Artificial Sequence
  Description of Artificial Sequence: Synthetic oligonucleotide
ugucuuuuaucaaagaaaa

SEQ ID NO: 3250528 - RNA, 19 nt, Artificial Sequence
  Description of Artificial Sequence: Synthetic oligonucleotide
uuccaaacgaagaagaagu

SEQ ID NO: 3250529 - RNA, 19 nt, Artificial Sequence
  Description of Artificial Sequence: Synthetic oligonucleotide
aacaagguagucuugucca

SEQ ID NO: 3250530 - RNA, 19 nt, Artificial Sequence
  Description of Artificial Sequence: Synthetic oligonucleotide
ucaaagaaaaucuuggcuu

SEQ ID NO: 3250531 - RNA, 19 nt, Artificial Sequence
  Description of Artificial Sequence: Synthetic oligonucleotide
acgaagaagaaguuccagc

SEQ ID NO: 3250532 - RNA, 19 nt, Artificial Sequence
  Description of Artificial Sequence: Synthetic oligonucleotide
ucaaaggcaggcaaguacc

SEQ ID NO: 3250533 - RNA, 19 nt, Artificial Sequence
  Description of Artificial Sequence: Synthetic oligonucleotide
auaccuuccgcauacaugu

SEQ ID NO: 3250534 - RNA, 19 nt, Artificial Sequence
  Description of Artificial Sequence: Synthetic oligonucleotide
aagguagucuuguccaugg

SEQ ID NO: 3250535 - RNA, 19 nt, Artificial Sequence
  Description of Artificial Sequence: Synthetic oligonucleotide
aagaaguuccagcagguga

SEQ ID NO: 3250536 - RNA, 19 nt, Artificial Sequence
  Description of Artificial Sequence: Synthetic oligonucleotide
uucagcaggggaaaagggg

SEQ ID NO: 3250537 - RNA, 19 nt, Artificial Sequence
  Description of Artificial Sequence: Synthetic oligonucleotide
aucaaagaaaaucuuggcu

SEQ ID NO: 3250538 - RNA, 19 nt, Artificial Sequence
  Description of Artificial Sequence: Synthetic oligonucleotide
ugccaauugcauuucaucc

SEQ ID NO: 3250539 - RNA, 19 nt, Artificial Sequence
  Description of Artificial Sequence: Synthetic oligonucleotide
aggagaauggcucuggucu

SEQ ID NO: 3250540 - RNA, 19 nt, Artificial Sequence
  Description of Artificial Sequence: Synthetic oligonucleotide
aaugagggcucucuccuuc

SEQ ID NO: 3250541 - RNA, 19 nt, Artificial Sequence
  Description of Artificial Sequence: Synthetic oligonucleotide
aaaucuuggcuucuuuucu

SEQ ID NO: 3250542 - RNA, 19 nt, Artificial Sequence
  Description of Artificial Sequence: Synthetic oligonucleotide
uaucaaagaaaaucuuggc

SEQ ID NO: 3250543 - RNA, 19 nt, Artificial Sequence
  Description of Artificial Sequence: Synthetic oligonucleotide
gggaaaaggggccagaagg

SEQ ID NO: 3250544 - RNA, 19 nt, Artificial Sequence
  Description of Artificial Sequence: Synthetic oligonucleotide
aauugcauuucauccagau

SEQ ID NO: 3250545 - RNA, 19 nt, Artificial Sequence
  Description of Artificial Sequence: Synthetic oligonucleotide
auacaugucaaugagggcu

SEQ ID NO: 3250546 - RNA, 19 nt, Artificial Sequence
  Description of Artificial Sequence: Synthetic oligonucleotide
uauaccuuccgcauacaug

SEQ ID NO: 3250547 - RNA, 19 nt, Artificial Sequence
  Description of Artificial Sequence: Synthetic oligonucleotide
ucagcaggggaaaaggggc

SEQ ID NO: 3250548 - RNA, 19 nt, Artificial Sequence
  Description of Artificial Sequence: Synthetic oligonucleotide
uucaaaggcaggcaaguac

SEQ ID NO: 3250549 - RNA, 19 nt, Artificial Sequence
  Description of Artificial Sequence: Synthetic oligonucleotide
uucacauugggcagguugc

SEQ ID NO: 3250550 - RNA, 19 nt, Artificial Sequence
  Description of Artificial Sequence: Synthetic oligonucleotide
auguccuucccauagagga

SEQ ID NO: 3250551 - RNA, 19 nt, Artificial Sequence
  Description of Artificial Sequence: Synthetic oligonucleotide
uucccauagaggagaaugg

SEQ ID NO: 3250552 - RNA, 19 nt, Artificial Sequence
  Description of Artificial Sequence: Synthetic oligonucleotide
agcaggugaauguccaccc

SEQ ID NO: 3250553 - RNA, 19 nt, Artificial Sequence
  Description of Artificial Sequence: Synthetic oligonucleotide
gagucaaucucuuccaaac

SEQ ID NO: 3250554 - RNA, 19 nt, Artificial Sequence
  Description of Artificial Sequence: Synthetic oligonucleotide
ucauguccuucccauagag

SEQ ID NO: 3250555 - RNA, 19 nt, Artificial Sequence
  Description of Artificial Sequence: Synthetic oligonucleotide
cuuuuaucaaagaaaaucu

SEQ ID NO: 3250556 - RNA, 19 nt, Artificial Sequence
  Description of Artificial Sequence: Synthetic oligonucleotide
uuuuaucaaagaaaaucuu

SEQ ID NO: 3250557 - RNA, 19 nt, Artificial Sequence
  Description of Artificial Sequence: Synthetic oligonucleotide
auccagaucugcuauaccu

SEQ ID NO: 3250558 - RNA, 19 nt, Artificial Sequence
  Description of Artificial Sequence: Synthetic oligonucleotide
gaagaagaaguuccagcag

SEQ ID NO: 3250559 - RNA, 19 nt, Artificial Sequence
  Description of Artificial Sequence: Synthetic oligonucleotide
ucaaugagggcucucuccu

SEQ ID NO: 3250560 - RNA, 19 nt, Artificial Sequence
  Description of Artificial Sequence: Synthetic oligonucleotide
agucaaucucuuccaaacg

SEQ ID NO: 3250561 - RNA, 19 nt, Artificial Sequence
  Description of Artificial Sequence: Synthetic oligonucleotide
gcauacaugucaaugaggg

SEQ ID NO: 3250562 - RNA, 19 nt, Artificial Sequence
  Description of Artificial Sequence: Synthetic oligonucleotide
auugcauuucauccagauc

SEQ ID NO: 3250563 - RNA, 19 nt, Artificial Sequence
  Description of Artificial Sequence: Synthetic oligonucleotide
uucucuggcugccagguug

SEQ ID NO: 3250564 - RNA, 19 nt, Artificial Sequence
  Description of Artificial Sequence: Synthetic oligonucleotide
agaucugcuauaccuuccg

SEQ ID NO: 3250565 - RNA, 19 nt, Artificial Sequence
  Description of Artificial Sequence: Synthetic oligonucleotide
uuguccauggcucuucaac

SEQ ID NO: 3250566 - RNA, 19 nt, Artificial Sequence
  Description of Artificial Sequence: Synthetic oligonucleotide
uuccugucuuuuaucaaag

SEQ ID NO: 3250567 - RNA, 19 nt, Artificial Sequence
  Description of Artificial Sequence: Synthetic oligonucleotide
uccgcauacaugucaauga

SEQ ID NO: 3250568 - RNA, 19 nt, Artificial Sequence
  Description of Artificial Sequence: Synthetic oligonucleotide
cugagucugcucuucaggg

SEQ ID NO: 3250569 - RNA, 19 nt, Artificial Sequence
  Description of Artificial Sequence: Synthetic oligonucleotide
acuucuucacauugggcag

SEQ ID NO: 3250570 - RNA, 19 nt, Artificial Sequence
  Description of Artificial Sequence: Synthetic oligonucleotide
caaagaaaaucuuggcuuc

SEQ ID NO: 3250571 - RNA, 19 nt, Artificial Sequence
  Description of Artificial Sequence: Synthetic oligonucleotide
ugcuauaccuuccgcauac

SEQ ID NO: 3250572 - RNA, 19 nt, Artificial Sequence
  Description of Artificial Sequence: Synthetic oligonucleotide
cuucauguccuucccauag

SEQ ID NO: 3250573 - RNA, 19 nt, Artificial Sequence
  Description of Artificial Sequence: Synthetic oligonucleotide
cuggcugccagguuggagg

SEQ ID NO: 3250574 - RNA, 19 nt, Artificial Sequence
  Description of Artificial Sequence: Synthetic oligonucleotide
gaggaacuucuucacauug

SEQ ID NO: 3250575 - RNA, 19 nt, Artificial Sequence
  Description of Artificial Sequence: Synthetic oligonucleotide
cuucacauugggcagguug

SEQ ID NO: 3250576 - RNA, 19 nt, Artificial Sequence
  Description of Artificial Sequence: Synthetic oligonucleotide
aaggcaggcaaguaccggu

SEQ ID NO: 3250577 - RNA, 19 nt, Artificial Sequence
  Description of Artificial Sequence: Synthetic oligonucleotide
uuugguuccugucuuuuau

SEQ ID NO: 3250578 - RNA, 19 nt, Artificial Sequence
  Description of Artificial Sequence: Synthetic oligonucleotide
cuucccauagaggagaaug

SEQ ID NO: 3250579 - RNA, 19 nt, Artificial Sequence
  Description of Artificial Sequence: Synthetic oligonucleotide
uguccauggcucuucaaca

SEQ ID NO: 3250580 - RNA, 19 nt, Artificial Sequence
  Description of Artificial Sequence: Synthetic oligonucleotide
caacaagguagucuugucc

SEQ ID NO: 3250581 - RNA, 19 nt, Artificial Sequence
  Description of Artificial Sequence: Synthetic oligonucleotide
gagucugcucuucagggcc

SEQ ID NO: 3250582 - RNA, 19 nt, Artificial Sequence
  Description of Artificial Sequence: Synthetic oligonucleotide
ggaacuucuucacauuggg

SEQ ID NO: 3250583 - RNA, 19 nt, Artificial Sequence
  Description of Artificial Sequence: Synthetic oligonucleotide
ucaaucucuuccaaacgaa

SEQ ID NO: 3250584 - RNA, 19 nt, Artificial Sequence
  Description of Artificial Sequence: Synthetic oligonucleotide
uuuucaaaggcaggcaagu

SEQ ID NO: 3250585 - RNA, 19 nt, Artificial Sequence
  Description of Artificial Sequence: Synthetic oligonucleotide
aacgaagaagaaguuccag

SEQ ID NO: 3250586 - RNA, 19 nt, Artificial Sequence
  Description of Artificial Sequence: Synthetic oligonucleotide
cuuccaaacgaagaagaag

SEQ ID NO: 3250587 - RNA, 19 nt, Artificial Sequence
  Description of Artificial Sequence: Synthetic oligonucleotide
aaucucuuccaaacgaaga

SEQ ID NO: 3250588 - RNA, 19 nt, Artificial Sequence
  Description of Artificial Sequence: Synthetic oligonucleotide
uuucauccagaucugcuau

SEQ ID NO: 3250589 - RNA, 19 nt, Artificial Sequence
  Description of Artificial Sequence: Synthetic oligonucleotide
aguuccagcaggugaaugu

SEQ ID NO: 3250590 - RNA, 19 nt, Artificial Sequence
  Description of Artificial Sequence: Synthetic oligonucleotide
uucagggccuucagcaggg

SEQ ID NO: 3250591 - RNA, 19 nt, Artificial Sequence
  Description of Artificial Sequence: Synthetic oligonucleotide
aaaggggccagaaggcugg

SEQ ID NO: 3250592 - RNA, 19 nt, Artificial Sequence
  Description of Artificial Sequence: Synthetic oligonucleotide
ucugcuauaccuuccgcau

SEQ ID NO: 3250593 - RNA, 19 nt, Artificial Sequence
  Description of Artificial Sequence: Synthetic oligonucleotide
ugguuccugucuuuuauca

SEQ ID NO: 3250594 - RNA, 19 nt, Artificial Sequence
  Description of Artificial Sequence: Synthetic oligonucleotide
ucucuuccaaacgaagaag

SEQ ID NO: 3250595 - RNA, 19 nt, Artificial Sequence
  Description of Artificial Sequence: Synthetic oligonucleotide
caaucucuuccaaacgaag

SEQ ID NO: 3250596 - RNA, 19 nt, Artificial Sequence
  Description of Artificial Sequence: Synthetic oligonucleotide
uggaggaacuucuucacau

SEQ ID NO: 3250597 - RNA, 19 nt, Artificial Sequence
  Description of Artificial Sequence: Synthetic oligonucleotide
cuucagcaggggaaaaggg

SEQ ID NO: 3250598 - RNA, 19 nt, Artificial Sequence
  Description of Artificial Sequence: Synthetic oligonucleotide
cagccgguugccaacaagg

SEQ ID NO: 3250599 - RNA, 19 nt, Artificial Sequence
  Description of Artificial Sequence: Synthetic oligonucleotide
cugucuuuuaucaaagaaa

SEQ ID NO: 3250600 - RNA, 19 nt, Artificial Sequence
  Description of Artificial Sequence: Synthetic oligonucleotide
uuggcuucuuuucuaucug

SEQ ID NO: 3250601 - RNA, 19 nt, Artificial Sequence
  Description of Artificial Sequence: Synthetic oligonucleotide
ucuggucugcaccaguuuc

SEQ ID NO: 3250602 - RNA, 19 nt, Artificial Sequence
  Description of Artificial Sequence: Synthetic oligonucleotide
uggcuucuuuucuaucugg

SEQ ID NO: 3250603 - RNA, 19 nt, Artificial Sequence
  Description of Artificial Sequence: Synthetic oligonucleotide
aucucuuccaaacgaagaa

SEQ ID NO: 3250604 - RNA, 19 nt, Artificial Sequence
  Description of Artificial Sequence: Synthetic oligonucleotide
aaaggcaggcaaguaccgg

SEQ ID NO: 3250605 - RNA, 19 nt, Artificial Sequence
  Description of Artificial Sequence: Synthetic oligonucleotide
gucaaucucuuccaaacga

SEQ ID NO: 3250606 - RNA, 19 nt, Artificial Sequence
  Description of Artificial Sequence: Synthetic oligonucleotide
ucuuccaaacgaagaagaa

SEQ ID NO: 3250607 - RNA, 19 nt, Artificial Sequence
  Description of Artificial Sequence: Synthetic oligonucleotide
uguccuucccauagaggag

SEQ ID NO: 3250608 - RNA, 19 nt, Artificial Sequence
  Description of Artificial Sequence: Synthetic oligonucleotide
cucuccuucauguccuucc

SEQ ID NO: 3250609 - RNA, 19 nt, Artificial Sequence
  Description of Artificial Sequence: Synthetic oligonucleotide
aucugcuauaccuuccgca

SEQ ID NO: 3250610 - RNA, 19 nt, Artificial Sequence
  Description of Artificial Sequence: Synthetic oligonucleotide
aaagaaaaucuuggcuucu

SEQ ID NO: 3250611 - RNA, 19 nt, Artificial Sequence
  Description of Artificial Sequence: Synthetic oligonucleotide
gucaaugagggcucucucc

SEQ ID NO: 3250612 - RNA, 19 nt, Artificial Sequence
  Description of Artificial Sequence: Synthetic oligonucleotide
gaaggcuggagucaaucuc

SEQ ID NO: 3250613 - RNA, 19 nt, Artificial Sequence
  Description of Artificial Sequence: Synthetic oligonucleotide
ucucuggcugccagguugg

SEQ ID NO: 3250614 - RNA, 19 nt, Artificial Sequence
  Description of Artificial Sequence: Synthetic oligonucleotide
ugcauuucauccagaucug

SEQ ID NO: 3250615 - RNA, 19 nt, Artificial Sequence
  Description of Artificial Sequence: Synthetic oligonucleotide
gcuggagucaaucucuucc

SEQ ID NO: 3250616 - RNA, 19 nt, Artificial Sequence
  Description of Artificial Sequence: Synthetic oligonucleotide
auuucauccagaucugcua

SEQ ID NO: 3250617 - RNA, 19 nt, Artificial Sequence
  Description of Artificial Sequence: Synthetic oligonucleotide
aaacuaagcuuucuggucc

SEQ ID NO: 3250618 - RNA, 19 nt, Artificial Sequence
  Description of Artificial Sequence: Synthetic oligonucleotide
aaaagaauauauuggaaug

SEQ ID NO: 3250619 - RNA, 19 nt, Artificial Sequence
  Description of Artificial Sequence: Synthetic oligonucleotide
aaugauuauguguuguguc

SEQ ID NO: 3250620 - RNA, 19 nt, Artificial Sequence
  Description of Artificial Sequence: Synthetic oligonucleotide
gucagaauuacauaaacag

SEQ ID NO: 3250621 - RNA, 19 nt, Artificial Sequence
  Description of Artificial Sequence: Synthetic oligonucleotide
aauuacauaaacagaugcc

SEQ ID NO: 3250622 - RNA, 19 nt, Artificial Sequence
  Description of Artificial Sequence: Synthetic oligonucleotide
aagucagaauuacauaaac

SEQ ID NO: 3250623 - RNA, 19 nt, Artificial Sequence
  Description of Artificial Sequence: Synthetic oligonucleotide
aaauauugagucccaauug

SEQ ID NO: 3250624 - RNA, 19 nt, Artificial Sequence
  Description of Artificial Sequence: Synthetic oligonucleotide
aauauugagucccaauugu

SEQ ID NO: 3250625 - RNA, 19 nt, Artificial Sequence
  Description of Artificial Sequence: Synthetic oligonucleotide
aaaauauugagucccaauu

SEQ ID NO: 3250626 - RNA, 19 nt, Artificial Sequence
  Description of Artificial Sequence: Synthetic oligonucleotide
guucagagcaaccagaugc

SEQ ID NO: 3250627 - RNA, 19 nt, Artificial Sequence
  Description of Artificial Sequence: Synthetic oligonucleotide
agcacuggaaaucagcucg

SEQ ID NO: 3250628 - RNA, 19 nt, Artificial Sequence
  Description of Artificial Sequence: Synthetic oligonucleotide
acaauuggaaggcugaauc

SEQ ID NO: 3250629 - RNA, 19 nt, Artificial Sequence
  Description of Artificial Sequence: Synthetic oligonucleotide
ugccaaaugacuuucuggg

SEQ ID NO: 3250630 - RNA, 19 nt, Artificial Sequence
  Description of Artificial Sequence: Synthetic oligonucleotide
guacuuauccacaagacgg

SEQ ID NO: 3250631 - RNA, 19 nt, Artificial Sequence
  Description of Artificial Sequence: Synthetic oligonucleotide
uaugauuggguaaacuaag

SEQ ID NO: 3250632 - RNA, 19 nt, Artificial Sequence
  Description of Artificial Sequence: Synthetic oligonucleotide
agaaggaucggucaucacg

SEQ ID NO: 3250633 - RNA, 19 nt, Artificial Sequence
  Description of Artificial Sequence: Synthetic oligonucleotide
ucauaauuggcacuuaaaa

SEQ ID NO: 3250634 - RNA, 19 nt, Artificial Sequence
  Description of Artificial Sequence: Synthetic oligonucleotide
uuuucuagagucuugacuu

SEQ ID NO: 3250635 - RNA, 19 nt, Artificial Sequence
  Description of Artificial Sequence: Synthetic oligonucleotide
uacauaaacagaugccacg

SEQ ID NO: 3250636 - RNA, 19 nt, Artificial Sequence
  Description of Artificial Sequence: Synthetic oligonucleotide
aucaccagaaaauauugag

SEQ ID NO: 3250637 - RNA, 19 nt, Artificial Sequence
  Description of Artificial Sequence: Synthetic oligonucleotide
uguguugugucuuuucuag

SEQ ID NO: 3250638 - RNA, 19 nt, Artificial Sequence
  Description of Artificial Sequence: Synthetic oligonucleotide
gaaagucagaauuacauaa

SEQ ID NO: 3250639 - RNA, 19 nt, Artificial Sequence
  Description of Artificial Sequence: Synthetic oligonucleotide
uguggagagauccugcaag

SEQ ID NO: 3250640 - RNA, 19 nt, Artificial Sequence
  Description of Artificial Sequence: Synthetic oligonucleotide
agagucuugacuuucccag

SEQ ID NO: 3250641 - RNA, 19 nt, Artificial Sequence
  Description of Artificial Sequence: Synthetic oligonucleotide
uguugugucuuuucuagag

SEQ ID NO: 3250642 - RNA, 19 nt, Artificial Sequence
  Description of Artificial Sequence: Synthetic oligonucleotide
aauuggaaggcugaaucuc

SEQ ID NO: 3250643 - RNA, 19 nt, Artificial Sequence
  Description of Artificial Sequence: Synthetic oligonucleotide
uuauccacaagacggacac

SEQ ID NO: 3250644 - RNA, 19 nt, Artificial Sequence
  Description of Artificial Sequence: Synthetic oligonucleotide
aaccagaugcagaacaggc

SEQ ID NO: 3250645 - RNA, 19 nt, Artificial Sequence
  Description of Artificial Sequence: Synthetic oligonucleotide
gagguucacaauuggaagg

SEQ ID NO: 3250646 - RNA, 19 nt, Artificial Sequence
  Description of Artificial Sequence: Synthetic oligonucleotide
auaaacagaugccacgcuc

SEQ ID NO: 3250647 - RNA, 19 nt, Artificial Sequence
  Description of Artificial Sequence: Synthetic oligonucleotide
accagaaaauauugagucc

SEQ ID NO: 3250648 - RNA, 19 nt, Artificial Sequence
  Description of Artificial Sequence: Synthetic oligonucleotide
agcuuucugguccagaauc

SEQ ID NO: 3250649 - RNA, 19 nt, Artificial Sequence
  Description of Artificial Sequence: Synthetic oligonucleotide
aaagaauauauuggaaugu

SEQ ID NO: 3250650 - RNA, 19 nt, Artificial Sequence
  Description of Artificial Sequence: Synthetic oligonucleotide
acauaaacagaugccacgc

SEQ ID NO: 3250651 - RNA, 19 nt, Artificial Sequence
  Description of Artificial Sequence: Synthetic oligonucleotide
ugagguucacaauuggaag

SEQ ID NO: 3250652 - RNA, 19 nt, Artificial Sequence
  Description of Artificial Sequence: Synthetic oligonucleotide
guuacugccaugucugugg

SEQ ID NO: 3250653 - RNA, 19 nt, Artificial Sequence
  Description of Artificial Sequence: Synthetic oligonucleotide
auuacauaaacagaugcca

SEQ ID NO: 3250654 - RNA, 19 nt, Artificial Sequence
  Description of Artificial Sequence: Synthetic oligonucleotide
aagaauauauuggaaugug

SEQ ID NO: 3250655 - RNA, 19 nt, Artificial Sequence
  Description of Artificial Sequence: Synthetic oligonucleotide
auauauuggaaugugggug

SEQ ID NO: 3250656 - RNA, 19 nt, Artificial Sequence
  Description of Artificial Sequence: Synthetic oligonucleotide
uggaaaucagcucggaugu

SEQ ID NO: 3250657 - RNA, 19 nt, Artificial Sequence
  Description of Artificial Sequence: Synthetic oligonucleotide
gguaaacuaagcuuucugg

SEQ ID NO: 3250658 - RNA, 19 nt, Artificial Sequence
  Description of Artificial Sequence: Synthetic oligonucleotide
ucaguggggaggcaaaucc

SEQ ID NO: 3250659 - RNA, 19 nt, Artificial Sequence
  Description of Artificial Sequence: Synthetic oligonucleotide
ucugcuuuccucacaacug

SEQ ID NO: 3250660 - RNA, 19 nt, Artificial Sequence
  Description of Artificial Sequence: Synthetic oligonucleotide
uauauuggaaugugggugu

SEQ ID NO: 3250661 - RNA, 19 nt, Artificial Sequence
  Description of Artificial Sequence: Synthetic oligonucleotide
caccagaaaauauugaguc

SEQ ID NO: 3250662 - RNA, 19 nt, Artificial Sequence
  Description of Artificial Sequence: Synthetic oligonucleotide
uugagguucacaauuggaa

SEQ ID NO: 3250663 - RNA, 19 nt, Artificial Sequence
  Description of Artificial Sequence: Synthetic oligonucleotide
uaaacagaugccacgcuca

SEQ ID NO: 3250664 - RNA, 19 nt, Artificial Sequence
  Description of Artificial Sequence: Synthetic oligonucleotide
ugauuggguaaacuaagcu

SEQ ID NO: 3250665 - RNA, 19 nt, Artificial Sequence
  Description of Artificial Sequence: Synthetic oligonucleotide
uuacauaaacagaugccac

SEQ ID NO: 3250666 - RNA, 19 nt, Artificial Sequence
  Description of Artificial Sequence: Synthetic oligonucleotide
aaucucucugcuuuccuca

SEQ ID NO: 3250667 - RNA, 19 nt, Artificial Sequence
  Description of Artificial Sequence: Synthetic oligonucleotide
aggcaaaucccguuacugc

SEQ ID NO: 3250668 - RNA, 19 nt, Artificial Sequence
  Description of Artificial Sequence: Synthetic oligonucleotide
ucaccagaaaauauugagu

SEQ ID NO: 3250669 - RNA, 19 nt, Artificial Sequence
  Description of Artificial Sequence: Synthetic oligonucleotide
acagaugccacgcucaacu

SEQ ID NO: 3250670 - RNA, 19 nt, Artificial Sequence
  Description of Artificial Sequence: Synthetic oligonucleotide
uucacaauuggaaggcuga

SEQ ID NO: 3250671 - RNA, 19 nt, Artificial Sequence
  Description of Artificial Sequence: Synthetic oligonucleotide
aagacggacaccucggggu

SEQ ID NO: 3250672 - RNA, 19 nt, Artificial Sequence
  Description of Artificial Sequence: Synthetic oligonucleotide
uauguguugugucuuuucu

SEQ ID NO: 3250673 - RNA, 19 nt, Artificial Sequence
  Description of Artificial Sequence: Synthetic oligonucleotide
augccaaaugacuuucugg

SEQ ID NO: 3250674 - RNA, 19 nt, Artificial Sequence
  Description of Artificial Sequence: Synthetic oligonucleotide
uucccagaaagucagaauu

SEQ ID NO: 3250675 - RNA, 19 nt, Artificial Sequence
  Description of Artificial Sequence: Synthetic oligonucleotide
uucugguccagaaucuucc

SEQ ID NO: 3250676 - RNA, 19 nt, Artificial Sequence
  Description of Artificial Sequence: Synthetic oligonucleotide
cuucacaguacuuauccac

SEQ ID NO: 3250677 - RNA, 19 nt, Artificial Sequence
  Description of Artificial Sequence: Synthetic oligonucleotide
uaaacuaagcuuucugguc

SEQ ID NO: 3250678 - RNA, 19 nt, Artificial Sequence
  Description of Artificial Sequence: Synthetic oligonucleotide
uguguucagagcaaccaga

SEQ ID NO: 3250679 - RNA, 19 nt, Artificial Sequence
  Description of Artificial Sequence: Synthetic oligonucleotide
gagagauccugcaaguggg

SEQ ID NO: 3250680 - RNA, 19 nt, Artificial Sequence
  Description of Artificial Sequence: Synthetic oligonucleotide
agaauauauuggaaugugg

SEQ ID NO: 3250681 - RNA, 19 nt, Artificial Sequence
  Description of Artificial Sequence: Synthetic oligonucleotide
agguucacaauuggaaggc

SEQ ID NO: 3250682 - RNA, 19 nt, Artificial Sequence
  Description of Artificial Sequence: Synthetic oligonucleotide
aagcacuggaaaucagcuc

SEQ ID NO: 3250683 - RNA, 19 nt, Artificial Sequence
  Description of Artificial Sequence: Synthetic oligonucleotide
guugaacugaccuccauca

SEQ ID NO: 3250684 - RNA, 19 nt, Artificial Sequence
  Description of Artificial Sequence: Synthetic oligonucleotide
uuggauccaugccaaauga

SEQ ID NO: 3250685 - RNA, 19 nt, Artificial Sequence
  Description of Artificial Sequence: Synthetic oligonucleotide
ugacuuucccagaaaguca

SEQ ID NO: 3250686 - RNA, 19 nt, Artificial Sequence
  Description of Artificial Sequence: Synthetic oligonucleotide
uauugagucccaauuguua

SEQ ID NO: 3250687 - RNA, 19 nt, Artificial Sequence
  Description of Artificial Sequence: Synthetic oligonucleotide
aagcucugaagguggacag

SEQ ID NO: 3250688 - RNA, 19 nt, Artificial Sequence
  Description of Artificial Sequence: Synthetic oligonucleotide
guaaugauuauguguugug

SEQ ID NO: 3250689 - RNA, 19 nt, Artificial Sequence
  Description of Artificial Sequence: Synthetic oligonucleotide
ucuagagucuugacuuucc

SEQ ID NO: 3250690 - RNA, 19 nt, Artificial Sequence
  Description of Artificial Sequence: Synthetic oligonucleotide
caaaugacuuucuggggcc

SEQ ID NO: 3250691 - RNA, 19 nt, Artificial Sequence
  Description of Artificial Sequence: Synthetic oligonucleotide
ucggccaucaaaagaauau

SEQ ID NO: 3250692 - RNA, 19 nt, Artificial Sequence
  Description of Artificial Sequence: Synthetic oligonucleotide
agagcaaccagaugcagaa

SEQ ID NO: 3250693 - RNA, 19 nt, Artificial Sequence
  Description of Artificial Sequence: Synthetic oligonucleotide
uccaucaccagaaaauauu

SEQ ID NO: 3250694 - RNA, 19 nt, Artificial Sequence
  Description of Artificial Sequence: Synthetic oligonucleotide
aacuguggagagauccugc

SEQ ID NO: 3250695 - RNA, 19 nt, Artificial Sequence
  Description of Artificial Sequence: Synthetic oligonucleotide
acaccucgggguuggaucc

SEQ ID NO: 3250696 - RNA, 19 nt, Artificial Sequence
  Description of Artificial Sequence: Synthetic oligonucleotide
gaaaucagcucggaugucc

SEQ ID NO: 3250697 - RNA, 19 nt, Artificial Sequence
  Description of Artificial Sequence: Synthetic oligonucleotide
aaggcugaaucucucugcu

SEQ ID NO: 3250698 - RNA, 19 nt, Artificial Sequence
  Description of Artificial Sequence: Synthetic oligonucleotide
uugugucuuuucuagaguc

SEQ ID NO: 3250699 - RNA, 19 nt, Artificial Sequence
  Description of Artificial Sequence: Synthetic oligonucleotide
acuuucuggggccaagaag

SEQ ID NO: 3250700 - RNA, 19 nt, Artificial Sequence
  Description of Artificial Sequence: Synthetic oligonucleotide
gaaggcugaaucucucugc

SEQ ID NO: 3250701 - RNA, 19 nt, Artificial Sequence
  Description of Artificial Sequence: Synthetic oligonucleotide
cacaacuguggagagaucc

SEQ ID NO: 3250702 - RNA, 19 nt, Artificial Sequence
  Description of Artificial Sequence: Synthetic oligonucleotide
auugagucccaauuguuaa

SEQ ID NO: 3250703 - RNA, 19 nt, Artificial Sequence
  Description of Artificial Sequence: Synthetic oligonucleotide
uaaugauuauguguugugu

SEQ ID NO: 3250704 - RNA, 19 nt, Artificial Sequence
  Description of Artificial Sequence: Synthetic oligonucleotide
gacuuucccagaaagucag

SEQ ID NO: 3250705 - RNA, 19 nt, Artificial Sequence
  Description of Artificial Sequence: Synthetic oligonucleotide
aaucccguuacugccaugu

SEQ ID NO: 3250706 - RNA, 19 nt, Artificial Sequence
  Description of Artificial Sequence: Synthetic oligonucleotide
uucagagcaaccagaugca

SEQ ID NO: 3250707 - RNA, 19 nt, Artificial Sequence
  Description of Artificial Sequence: Synthetic oligonucleotide
uacuuauccacaagacgga

SEQ ID NO: 3250708 - RNA, 19 nt, Artificial Sequence
  Description of Artificial Sequence: Synthetic oligonucleotide
acaggccucucauaauugg

SEQ ID NO: 3250709 - RNA, 19 nt, Artificial Sequence
  Description of Artificial Sequence: Synthetic oligonucleotide
ugacaggaaagcucugaag

SEQ ID NO: 3250710 - RNA, 19 nt, Artificial Sequence
  Description of Artificial Sequence: Synthetic oligonucleotide
ggagagauccugcaagugg

SEQ ID NO: 3250711 - RNA, 19 nt, Artificial Sequence
  Description of Artificial Sequence: Synthetic oligonucleotide
augauuggguaaacuaagc

SEQ ID NO: 3250712 - RNA, 19 nt, Artificial Sequence
  Description of Artificial Sequence: Synthetic oligonucleotide
acagcaguccugcugcccg

SEQ ID NO: 3250713 - RNA, 19 nt, Artificial Sequence
  Description of Artificial Sequence: Synthetic oligonucleotide
ugggaugacaggaaagcuc

SEQ ID NO: 3250714 - RNA, 19 nt, Artificial Sequence
  Description of Artificial Sequence: Synthetic oligonucleotide
ugcaagugggaugacagga

SEQ ID NO: 3250715 - RNA, 19 nt, Artificial Sequence
  Description of Artificial Sequence: Synthetic oligonucleotide
ugugucuuuucuagagucu

SEQ ID NO: 3250716 - RNA, 19 nt, Artificial Sequence
  Description of Artificial Sequence: Synthetic oligonucleotide
ucucauaauuggcacuuaa

SEQ ID NO: 3250717 - RNA, 19 nt, Artificial Sequence
  Description of Artificial Sequence: Synthetic oligonucleotide
cauaguaagacuaagauac

SEQ ID NO: 3250718 - RNA, 19 nt, Artificial Sequence
  Description of Artificial Sequence: Synthetic oligonucleotide
aagugaaugcugcagaucc

SEQ ID NO: 3250719 - RNA, 19 nt, Artificial Sequence
  Description of Artificial Sequence: Synthetic oligonucleotide
aguauuuauaaccacaggg

SEQ ID NO: 3250720 - RNA, 19 nt, Artificial Sequence
  Description of Artificial Sequence: Synthetic oligonucleotide
auagaaaggaaacacacac

SEQ ID NO: 3250721 - RNA, 19 nt, Artificial Sequence
  Description of Artificial Sequence: Synthetic oligonucleotide
aagacuacauuauaacugg

SEQ ID NO: 3250722 - RNA, 19 nt, Artificial Sequence
  Description of Artificial Sequence: Synthetic oligonucleotide
auuaaugacaaagaguagc

SEQ ID NO: 3250723 - RNA, 19 nt, Artificial Sequence
  Description of Artificial Sequence: Synthetic oligonucleotide
uaauagaaggaaaacacag

SEQ ID NO: 3250724 - RNA, 19 nt, Artificial Sequence
  Description of Artificial Sequence: Synthetic oligonucleotide
aaaucuaaagcaaggagac

SEQ ID NO: 3250725 - RNA, 19 nt, Artificial Sequence
  Description of Artificial Sequence: Synthetic oligonucleotide
uuaaagauagaaaggaaac

SEQ ID NO: 3250726 - RNA, 19 nt, Artificial Sequence
  Description of Artificial Sequence: Synthetic oligonucleotide
ugaaauguaaaauguaucu

SEQ ID NO: 3250727 - RNA, 19 nt, Artificial Sequence
  Description of Artificial Sequence: Synthetic oligonucleotide
aaaaguacauaguaagacu

SEQ ID NO: 3250728 - RNA, 19 nt, Artificial Sequence
  Description of Artificial Sequence: Synthetic oligonucleotide
ucuaaagaugacaauggag

SEQ ID NO: 3250729 - RNA, 19 nt, Artificial Sequence
  Description of Artificial Sequence: Synthetic oligonucleotide
uugguuuaaacacacacac

SEQ ID NO: 3250730 - RNA, 19 nt, Artificial Sequence
  Description of Artificial Sequence: Synthetic oligonucleotide
uacaauacccaacaugucc

SEQ ID NO: 3250731 - RNA, 19 nt, Artificial Sequence
  Description of Artificial Sequence: Synthetic oligonucleotide
uuccaaaugacucacuuca

SEQ ID NO: 3250732 - RNA, 19 nt, Artificial Sequence
  Description of Artificial Sequence: Synthetic oligonucleotide
aaaauuggucaugagcagc

SEQ ID NO: 3250733 - RNA, 19 nt, Artificial Sequence
  Description of Artificial Sequence: Synthetic oligonucleotide
aaauguaucuuuuauuuua

SEQ ID NO: 3250734 - RNA, 19 nt, Artificial Sequence
  Description of Artificial Sequence: Synthetic oligonucleotide
uaaacaaggaggcuguuug

SEQ ID NO: 3250735 - RNA, 19 nt, Artificial Sequence
  Description of Artificial Sequence: Synthetic oligonucleotide
auagaaggaaaacacagug

SEQ ID NO: 3250736 - RNA, 19 nt, Artificial Sequence
  Description of Artificial Sequence: Synthetic oligonucleotide
uuuacuucuguuuaauaga

SEQ ID NO: 3250737 - RNA, 19 nt, Artificial Sequence
  Description of Artificial Sequence: Synthetic oligonucleotide
uuugcaacaaccacuucag

SEQ ID NO: 3250738 - RNA, 19 nt, Artificial Sequence
  Description of Artificial Sequence: Synthetic oligonucleotide
aacaccaagaguaaaaggu

SEQ ID NO: 3250739 - RNA, 19 nt, Artificial Sequence
  Description of Artificial Sequence: Synthetic oligonucleotide
uuaauagaaggaaaacaca

SEQ ID NO: 3250740 - RNA, 19 nt, Artificial Sequence
  Description of Artificial Sequence: Synthetic oligonucleotide
aaugugaacaacaauuuga

SEQ ID NO: 3250741 - RNA, 19 nt, Artificial Sequence
  Description of Artificial Sequence: Synthetic oligonucleotide
uauaauacuccaaugugaa

SEQ ID NO: 3250742 - RNA, 19 nt, Artificial Sequence
  Description of Artificial Sequence: Synthetic oligonucleotide
ugacaauggaggcaaaucc

SEQ ID NO: 3250743 - RNA, 19 nt, Artificial Sequence
  Description of Artificial Sequence: Synthetic oligonucleotide
uaagucaugaacucuuugc

SEQ ID NO: 3250744 - RNA, 19 nt, Artificial Sequence
  Description of Artificial Sequence: Synthetic oligonucleotide
uacauaguaagacuaagau

SEQ ID NO: 3250745 - RNA, 19 nt, Artificial Sequence
  Description of Artificial Sequence: Synthetic oligonucleotide
aaguauuuauaaccacagg

SEQ ID NO: 3250746 - RNA, 19 nt, Artificial Sequence
  Description of Artificial Sequence: Synthetic oligonucleotide
ugcugauugaagaaaauuc

SEQ ID NO: 3250747 - RNA, 19 nt, Artificial Sequence
  Description of Artificial Sequence: Synthetic oligonucleotide
aagacuaagauaccaaguu

SEQ ID NO: 3250748 - RNA, 19 nt, Artificial Sequence
  Description of Artificial Sequence: Synthetic oligonucleotide
caaguauuuauaaccacag

SEQ ID NO: 3250749 - RNA, 19 nt, Artificial Sequence
  Description of Artificial Sequence: Synthetic oligonucleotide
ggaaacacacacuaggacg

SEQ ID NO: 3250750 - RNA, 19 nt, Artificial Sequence
  Description of Artificial Sequence: Synthetic oligonucleotide
gauugaagaaaauuccuuc

SEQ ID NO: 3250751 - RNA, 19 nt, Artificial Sequence
  Description of Artificial Sequence: Synthetic oligonucleotide
aaacaaggaggcuguuugc

SEQ ID NO: 3250752 - RNA, 19 nt, Artificial Sequence
  Description of Artificial Sequence: Synthetic oligonucleotide
uuuauaaccacaggguuca

SEQ ID NO: 3250753 - RNA, 19 nt, Artificial Sequence
  Description of Artificial Sequence: Synthetic oligonucleotide
agugguauuaaaauugguc

SEQ ID NO: 3250754 - RNA, 19 nt, Artificial Sequence
  Description of Artificial Sequence: Synthetic oligonucleotide
acuuagauaucauugugcu

SEQ ID NO: 3250755 - RNA, 19 nt, Artificial Sequence
  Description of Artificial Sequence: Synthetic oligonucleotide
cugguaaauaguuguaagg

SEQ ID NO: 3250756 - RNA, 19 nt, Artificial Sequence
  Description of Artificial Sequence: Synthetic oligonucleotide
uauuuuccaggccuuaggc

SEQ ID NO: 3250757 - RNA, 19 nt, Artificial Sequence
  Description of Artificial Sequence: Synthetic oligonucleotide
caucaaauaagacuuuuac

SEQ ID NO: 3250758 - RNA, 19 nt, Artificial Sequence
  Description of Artificial Sequence: Synthetic oligonucleotide
gaaaucuaaagcaaggaga

SEQ ID NO: 3250759 - RNA, 19 nt, Artificial Sequence
  Description of Artificial Sequence: Synthetic oligonucleotide
uuuauauauaauacuccaa

SEQ ID NO: 3250760 - RNA, 19 nt, Artificial Sequence
  Description of Artificial Sequence: Synthetic oligonucleotide
aagucaugaacucuuugcu

SEQ ID NO: 3250761 - RNA, 19 nt, Artificial Sequence
  Description of Artificial Sequence: Synthetic oligonucleotide
uucagugaaacccacucac

SEQ ID NO: 3250762 - RNA, 19 nt, Artificial Sequence
  Description of Artificial Sequence: Synthetic oligonucleotide
uaggccucaaauuauauau

SEQ ID NO: 3250763 - RNA, 19 nt, Artificial Sequence
  Description of Artificial Sequence: Synthetic oligonucleotide
ucaaagaaagccaggcccc

SEQ ID NO: 3250764 - RNA, 19 nt, Artificial Sequence
  Description of Artificial Sequence: Synthetic oligonucleotide
ugcucaauguguuauuuug

SEQ ID NO: 3250765 - RNA, 19 nt, Artificial Sequence
  Description of Artificial Sequence: Synthetic oligonucleotide
guaagacuaagauaccaag

SEQ ID NO: 3250766 - RNA, 19 nt, Artificial Sequence
  Description of Artificial Sequence: Synthetic oligonucleotide
ugguaaauaguuguaagga

SEQ ID NO: 3250767 - RNA, 19 nt, Artificial Sequence
  Description of Artificial Sequence: Synthetic oligonucleotide
aggaaacacacacuaggac

SEQ ID NO: 3250768 - RNA, 19 nt, Artificial Sequence
  Description of Artificial Sequence: Synthetic oligonucleotide
acaaagaguagcucagguc

SEQ ID NO: 3250769 - RNA, 19 nt, Artificial Sequence
  Description of Artificial Sequence: Synthetic oligonucleotide
uaaaauuggucaugagcag

SEQ ID NO: 3250770 - RNA, 19 nt, Artificial Sequence
  Description of Artificial Sequence: Synthetic oligonucleotide
accaaagucugccuucggc

SEQ ID NO: 3250771 - RNA, 19 nt, Artificial Sequence
  Description of Artificial Sequence: Synthetic oligonucleotide
uacuccaaugugaacaaca

SEQ ID NO: 3250772 - RNA, 19 nt, Artificial Sequence
  Description of Artificial Sequence: Synthetic oligonucleotide
auauuuuccaggccuuagg

SEQ ID NO: 3250773 - RNA, 19 nt, Artificial Sequence
  Description of Artificial Sequence: Synthetic oligonucleotide
cucuuugcuuacaauaccc

SEQ ID NO: 3250774 - RNA, 19 nt, Artificial Sequence
  Description of Artificial Sequence: Synthetic oligonucleotide
ugccuugguaucuuaaaag

SEQ ID NO: 3250775 - RNA, 19 nt, Artificial Sequence
  Description of Artificial Sequence: Synthetic oligonucleotide
uuacuucuguuuaauagaa

SEQ ID NO: 3250776 - RNA, 19 nt, Artificial Sequence
  Description of Artificial Sequence: Synthetic oligonucleotide
cacuuagauaucauugugc

SEQ ID NO: 3250777 - RNA, 19 nt, Artificial Sequence
  Description of Artificial Sequence: Synthetic oligonucleotide
uuuugcugauugaagaaaa

SEQ ID NO: 3250778 - RNA, 19 nt, Artificial Sequence
  Description of Artificial Sequence: Synthetic oligonucleotide
acuagcauagaaauguaag

SEQ ID NO: 3250779 - RNA, 19 nt, Artificial Sequence
  Description of Artificial Sequence: Synthetic oligonucleotide
aaggaaugugugcucaaug

SEQ ID NO: 3250780 - RNA, 19 nt, Artificial Sequence
  Description of Artificial Sequence: Synthetic oligonucleotide
gcaaacuuaaauuaaugac

SEQ ID NO: 3250781 - RNA, 19 nt, Artificial Sequence
  Description of Artificial Sequence: Synthetic oligonucleotide
aauauuuuccaggccuuag

SEQ ID NO: 3250782 - RNA, 19 nt, Artificial Sequence
  Description of Artificial Sequence: Synthetic oligonucleotide
uuauaacuggauaggaaau

SEQ ID NO: 3250783 - RNA, 19 nt, Artificial Sequence
  Description of Artificial Sequence: Synthetic oligonucleotide
uaaaagcugugcauguaug

SEQ ID NO: 3250784 - RNA, 19 nt, Artificial Sequence
  Description of Artificial Sequence: Synthetic oligonucleotide
acuucagcucuauuuacag

SEQ ID NO: 3250785 - RNA, 19 nt, Artificial Sequence
  Description of Artificial Sequence: Synthetic oligonucleotide
aguauccccuuucuucugc

SEQ ID NO: 3250786 - RNA, 19 nt, Artificial Sequence
  Description of Artificial Sequence: Synthetic oligonucleotide
acuaggacgagucuggaaa

SEQ ID NO: 3250787 - RNA, 19 nt, Artificial Sequence
  Description of Artificial Sequence: Synthetic oligonucleotide
uaaguguacacacuaccaa

SEQ ID NO: 3250788 - RNA, 19 nt, Artificial Sequence
  Description of Artificial Sequence: Synthetic oligonucleotide
gacacuugcuuacuggccc

SEQ ID NO: 3250789 - RNA, 19 nt, Artificial Sequence
  Description of Artificial Sequence: Synthetic oligonucleotide
gauuacaggagugacuuac

SEQ ID NO: 3250790 - RNA, 19 nt, Artificial Sequence
  Description of Artificial Sequence: Synthetic oligonucleotide
uucuaaagaugacaaugga

SEQ ID NO: 3250791 - RNA, 19 nt, Artificial Sequence
  Description of Artificial Sequence: Synthetic oligonucleotide
uguaagauuacaggaguga

SEQ ID NO: 3250792 - RNA, 19 nt, Artificial Sequence
  Description of Artificial Sequence: Synthetic oligonucleotide
guaguauuccaaccaaacc

SEQ ID NO: 3250793 - RNA, 19 nt, Artificial Sequence
  Description of Artificial Sequence: Synthetic oligonucleotide
auaauacuccaaugugaac

SEQ ID NO: 3250794 - RNA, 19 nt, Artificial Sequence
  Description of Artificial Sequence: Synthetic oligonucleotide
agacuaagauaccaaguug

SEQ ID NO: 3250795 - RNA, 19 nt, Artificial Sequence
  Description of Artificial Sequence: Synthetic oligonucleotide
ugaguauuuuaaaucuuuc

SEQ ID NO: 3250796 - RNA, 19 nt, Artificial Sequence
  Description of Artificial Sequence: Synthetic oligonucleotide
uguuauuuugcugauugaa

SEQ ID NO: 3250797 - RNA, 19 nt, Artificial Sequence
  Description of Artificial Sequence: Synthetic oligonucleotide
aaagugaaugcugcagauc

SEQ ID NO: 3250798 - RNA, 19 nt, Artificial Sequence
  Description of Artificial Sequence: Synthetic oligonucleotide
guuauuuugcugauugaag

SEQ ID NO: 3250799 - RNA, 19 nt, Artificial Sequence
  Description of Artificial Sequence: Synthetic oligonucleotide
ugauugaagaaaauuccuu

SEQ ID NO: 3250800 - RNA, 19 nt, Artificial Sequence
  Description of Artificial Sequence: Synthetic oligonucleotide
acuacauuauaacuggaua

SEQ ID NO: 3250801 - RNA, 19 nt, Artificial Sequence
  Description of Artificial Sequence: Synthetic oligonucleotide
gagacuguaguuacaauac

SEQ ID NO: 3250802 - RNA, 19 nt, Artificial Sequence
  Description of Artificial Sequence: Synthetic oligonucleotide
auauaauacuccaauguga

SEQ ID NO: 3250803 - RNA, 19 nt, Artificial Sequence
  Description of Artificial Sequence: Synthetic oligonucleotide
gauggaggugaguugauga

SEQ ID NO: 3250804 - RNA, 19 nt, Artificial Sequence
  Description of Artificial Sequence: Synthetic oligonucleotide
aauuaaugacaaagaguag

SEQ ID NO: 3250805 - RNA, 19 nt, Artificial Sequence
  Description of Artificial Sequence: Synthetic oligonucleotide
ucaggguugcccuaacacc

SEQ ID NO: 3250806 - RNA, 19 nt, Artificial Sequence
  Description of Artificial Sequence: Synthetic oligonucleotide
aaauaguuguaaggaaugu

SEQ ID NO: 3250807 - RNA, 19 nt, Artificial Sequence
  Description of Artificial Sequence: Synthetic oligonucleotide
gaacgcuaaguguacacac

SEQ ID NO: 3250808 - RNA, 19 nt, Artificial Sequence
  Description of Artificial Sequence: Synthetic oligonucleotide
aacaacaauuugaugaaau

SEQ ID NO: 3250809 - RNA, 19 nt, Artificial Sequence
  Description of Artificial Sequence: Synthetic oligonucleotide
aaauacuuuacgauguauu

SEQ ID NO: 3250810 - RNA, 19 nt, Artificial Sequence
  Description of Artificial Sequence: Synthetic oligonucleotide
auuccuuccuacaaugggg

SEQ ID NO: 3250811 - RNA, 19 nt, Artificial Sequence
  Description of Artificial Sequence: Synthetic oligonucleotide
aggaaugugugcucaaugu

SEQ ID NO: 3250812 - RNA, 19 nt, Artificial Sequence
  Description of Artificial Sequence: Synthetic oligonucleotide
gacuguaguuacaauacug

SEQ ID NO: 3250813 - RNA, 19 nt, Artificial Sequence
  Description of Artificial Sequence: Synthetic oligonucleotide
guuuauuuagaaucucauc

SEQ ID NO: 3250814 - RNA, 19 nt, Artificial Sequence
  Description of Artificial Sequence: Synthetic oligonucleotide
ucuagaugguccauacagu

SEQ ID NO: 3250815 - RNA, 19 nt, Artificial Sequence
  Description of Artificial Sequence: Synthetic oligonucleotide
aaauuggucaugagcagca

SEQ ID NO: 3250816 - RNA, 19 nt, Artificial Sequence
  Description of Artificial Sequence: Synthetic oligonucleotide
ucacacacaaguauuuaua

SEQ ID NO: 3250817 - RNA, 19 nt, Artificial Sequence
  Description of Artificial Sequence: Synthetic oligonucleotide
aaucacaagauucauaaag

SEQ ID NO: 3250818 - RNA, 19 nt, Artificial Sequence
  Description of Artificial Sequence: Synthetic oligonucleotide
aacaugaugaugcuguuuc

SEQ ID NO: 3250819 - RNA, 19 nt, Artificial Sequence
  Description of Artificial Sequence: Synthetic oligonucleotide
uuucuuaugaaaauguaca

SEQ ID NO: 3250820 - RNA, 19 nt, Artificial Sequence
  Description of Artificial Sequence: Synthetic oligonucleotide
ucauaaagggaucaaagcc

SEQ ID NO: 3250821 - RNA, 19 nt, Artificial Sequence
  Description of Artificial Sequence: Synthetic oligonucleotide
aaugauaacuucuugucca

SEQ ID NO: 3250822 - RNA, 19 nt, Artificial Sequence
  Description of Artificial Sequence: Synthetic oligonucleotide
augaaaauguacaugaccc

SEQ ID NO: 3250823 - RNA, 19 nt, Artificial Sequence
  Description of Artificial Sequence: Synthetic oligonucleotide
uuuaacuucaaugauaacu

SEQ ID NO: 3250824 - RNA, 19 nt, Artificial Sequence
  Description of Artificial Sequence: Synthetic oligonucleotide
uaugaaaauguacaugacc

SEQ ID NO: 3250825 - RNA, 19 nt, Artificial Sequence
  Description of Artificial Sequence: Synthetic oligonucleotide
ucuaacaugaugaugcugu

SEQ ID NO: 3250826 - RNA, 19 nt, Artificial Sequence
  Description of Artificial Sequence: Synthetic oligonucleotide
ucaaucacaagauucauaa

SEQ ID NO: 3250827 - RNA, 19 nt, Artificial Sequence
  Description of Artificial Sequence: Synthetic oligonucleotide
aauuucuucacguucggga

SEQ ID NO: 3250828 - RNA, 19 nt, Artificial Sequence
  Description of Artificial Sequence: Synthetic oligonucleotide
aucacaaagguuuauuuag

SEQ ID NO: 3250829 - RNA, 19 nt, Artificial Sequence
  Description of Artificial Sequence: Synthetic oligonucleotide
aauuauacaccccagucaa

SEQ ID NO: 3250830 - RNA, 19 nt, Artificial Sequence
  Description of Artificial Sequence: Synthetic oligonucleotide
acaugacccaauuauacac

SEQ ID NO: 3250831 - RNA, 19 nt, Artificial Sequence
  Description of Artificial Sequence: Synthetic oligonucleotide
cauaaagggaucaaagccc

SEQ ID NO: 3250832 - RNA, 19 nt, Artificial Sequence
  Description of Artificial Sequence: Synthetic oligonucleotide
cuuaugaaaauguacauga

SEQ ID NO: 3250833 - RNA, 19 nt, Artificial Sequence
  Description of Artificial Sequence: Synthetic oligonucleotide
ucuguuguccacuaguugc

SEQ ID NO: 3250834 - RNA, 19 nt, Artificial Sequence
  Description of Artificial Sequence: Synthetic oligonucleotide
ucacaagauucauaaaggg

SEQ ID NO: 3250835 - RNA, 19 nt, Artificial Sequence
  Description of Artificial Sequence: Synthetic oligonucleotide
uuaacuucaaugauaacuu

SEQ ID NO: 3250836 - RNA, 19 nt, Artificial Sequence
  Description of Artificial Sequence: Synthetic oligonucleotide
uuguccauaaauuucuuca

SEQ ID NO: 3250837 - RNA, 19 nt, Artificial Sequence
  Description of Artificial Sequence: Synthetic oligonucleotide
acacucaucaaucacaaga

SEQ ID NO: 3250838 - RNA, 19 nt, Artificial Sequence
  Description of Artificial Sequence: Synthetic oligonucleotide
aaaaguuucuuaugaaaau

SEQ ID NO: 3250839 - RNA, 19 nt, Artificial Sequence
  Description of Artificial Sequence: Synthetic oligonucleotide
ucaucaaucacaagauuca

SEQ ID NO: 3250840 - RNA, 19 nt, Artificial Sequence
  Description of Artificial Sequence: Synthetic oligonucleotide
uucauaaagggaucaaagc

SEQ ID NO: 3250841 - RNA, 19 nt, Artificial Sequence
  Description of Artificial Sequence: Synthetic oligonucleotide
aaaguuucuuaugaaaaug

SEQ ID NO: 3250842 - RNA, 19 nt, Artificial Sequence
  Description of Artificial Sequence: Synthetic oligonucleotide
auaaauuucuucacguucg

SEQ ID NO: 3250843 - RNA, 19 nt, Artificial Sequence
  Description of Artificial Sequence: Synthetic oligonucleotide
aaggcuucuaacaugauga

SEQ ID NO: 3250844 - RNA, 19 nt, Artificial Sequence
  Description of Artificial Sequence: Synthetic oligonucleotide
uucaaugauaacuucuugu

SEQ ID NO: 3250845 - RNA, 19 nt, Artificial Sequence
  Description of Artificial Sequence: Synthetic oligonucleotide
augacccaauuauacaccc

SEQ ID NO: 3250846 - RNA, 19 nt, Artificial Sequence
  Description of Artificial Sequence: Synthetic oligonucleotide
agucaaacaguccuuuggg

SEQ ID NO: 3250847 - RNA, 19 nt, Artificial Sequence
  Description of Artificial Sequence: Synthetic oligonucleotide
ucaaugauaacuucuuguc

SEQ ID NO: 3250848 - RNA, 19 nt, Artificial Sequence
  Description of Artificial Sequence: Synthetic oligonucleotide
ucugccaccauuuaacuuc

SEQ ID NO: 3250849 - RNA, 19 nt, Artificial Sequence
  Description of Artificial Sequence: Synthetic oligonucleotide
cucaucaaucacaagauuc

SEQ ID NO: 3250850 - RNA, 19 nt, Artificial Sequence
  Description of Artificial Sequence: Synthetic oligonucleotide
uucuuguccauaaauuucu

SEQ ID NO: 3250851 - RNA, 19 nt, Artificial Sequence
  Description of Artificial Sequence: Synthetic oligonucleotide
aaggaugugaacuccucug

SEQ ID NO: 3250852 - RNA, 19 nt, Artificial Sequence
  Description of Artificial Sequence: Synthetic oligonucleotide
uauucuguuguccacuagu

SEQ ID NO: 3250853 - RNA, 19 nt, Artificial Sequence
  Description of Artificial Sequence: Synthetic oligonucleotide
aacuccucugcugagcagc

SEQ ID NO: 3250854 - RNA, 19 nt, Artificial Sequence
  Description of Artificial Sequence: Synthetic oligonucleotide
uccauaaauuucuucacgu

SEQ ID NO: 3250855 - RNA, 19 nt, Artificial Sequence
  Description of Artificial Sequence: Synthetic oligonucleotide
ucaaacaguccuuugggga

SEQ ID NO: 3250856 - RNA, 19 nt, Artificial Sequence
  Description of Artificial Sequence: Synthetic oligonucleotide
ucguaugaccaccaugccg

SEQ ID NO: 3250857 - RNA, 19 nt, Artificial Sequence
  Description of Artificial Sequence: Synthetic oligonucleotide
auaaagggaucaaagcccc

SEQ ID NO: 3250858 - RNA, 19 nt, Artificial Sequence
  Description of Artificial Sequence: Synthetic oligonucleotide
cauaaauuucuucacguuc

SEQ ID NO: 3250859 - RNA, 19 nt, Artificial Sequence
  Description of Artificial Sequence: Synthetic oligonucleotide
ugaugaugcuguuuccucg

SEQ ID NO: 3250860 - RNA, 19 nt, Artificial Sequence
  Description of Artificial Sequence: Synthetic oligonucleotide
uaaauuucuucacguucgg

SEQ ID NO: 3250861 - RNA, 19 nt, Artificial Sequence
  Description of Artificial Sequence: Synthetic oligonucleotide
ucuuaugaaaauguacaug

SEQ ID NO: 3250862 - RNA, 19 nt, Artificial Sequence
  Description of Artificial Sequence: Synthetic oligonucleotide
aucacaagauucauaaagg

SEQ ID NO: 3250863 - RNA, 19 nt, Artificial Sequence
  Description of Artificial Sequence: Synthetic oligonucleotide
auguacaugacccaauuau

SEQ ID NO: 3250864 - RNA, 19 nt, Artificial Sequence
  Description of Artificial Sequence: Synthetic oligonucleotide
uccaaggcuucuaacauga

SEQ ID NO: 3250865 - RNA, 19 nt, Artificial Sequence
  Description of Artificial Sequence: Synthetic oligonucleotide
auuucuucacguucgggag

SEQ ID NO: 3250866 - RNA, 19 nt, Artificial Sequence
  Description of Artificial Sequence: Synthetic oligonucleotide
gauguuauucuguugucca

SEQ ID NO: 3250867 - RNA, 19 nt, Artificial Sequence
  Description of Artificial Sequence: Synthetic oligonucleotide
uguucagacucuuuccaag

SEQ ID NO: 3250868 - RNA, 19 nt, Artificial Sequence
  Description of Artificial Sequence: Synthetic oligonucleotide
cuaguugccaucuccacac

SEQ ID NO: 3250869 - RNA, 19 nt, Artificial Sequence
  Description of Artificial Sequence: Synthetic oligonucleotide
aggaugugaacuccucugc

SEQ ID NO: 3250870 - RNA, 19 nt, Artificial Sequence
  Description of Artificial Sequence: Synthetic oligonucleotide
gcuucuaacaugaugaugc

SEQ ID NO: 3250871 - RNA, 19 nt, Artificial Sequence
  Description of Artificial Sequence: Synthetic oligonucleotide
acaagauucauaaagggau

SEQ ID NO: 3250872 - RNA, 19 nt, Artificial Sequence
  Description of Artificial Sequence: Synthetic oligonucleotide
auucauaaagggaucaaag

SEQ ID NO: 3250873 - RNA, 19 nt, Artificial Sequence
  Description of Artificial Sequence: Synthetic oligonucleotide
uucacguucgggagggugg

SEQ ID NO: 3250874 - RNA, 19 nt, Artificial Sequence
  Description of Artificial Sequence: Synthetic oligonucleotide
auacaccccagucaaacag

SEQ ID NO: 3250875 - RNA, 19 nt, Artificial Sequence
  Description of Artificial Sequence: Synthetic oligonucleotide
ucacaaagguuuauuuagc

SEQ ID NO: 3250876 - RNA, 19 nt, Artificial Sequence
  Description of Artificial Sequence: Synthetic oligonucleotide
aaguuucuuaugaaaaugu

SEQ ID NO: 3250877 - RNA, 19 nt, Artificial Sequence
  Description of Artificial Sequence: Synthetic oligonucleotide
cauuuaacuucaaugauaa

SEQ ID NO: 3250878 - RNA, 19 nt, Artificial Sequence
  Description of Artificial Sequence: Synthetic oligonucleotide
auuccuuguacgugucugc

SEQ ID NO: 3250879 - RNA, 19 nt, Artificial Sequence
  Description of Artificial Sequence: Synthetic oligonucleotide
uccacuaguugccaucucc

SEQ ID NO: 3250880 - RNA, 19 nt, Artificial Sequence
  Description of Artificial Sequence: Synthetic oligonucleotide
caaugauaacuucuugucc

SEQ ID NO: 3250881 - RNA, 19 nt, Artificial Sequence
  Description of Artificial Sequence: Synthetic oligonucleotide
ugaaaauguacaugaccca

SEQ ID NO: 3250882 - RNA, 19 nt, Artificial Sequence
  Description of Artificial Sequence: Synthetic oligonucleotide
cauuguucagacucuuucc

SEQ ID NO: 3250883 - RNA, 19 nt, Artificial Sequence
  Description of Artificial Sequence: Synthetic oligonucleotide
guccauaaauuucuucacg

SEQ ID NO: 3250884 - RNA, 19 nt, Artificial Sequence
  Description of Artificial Sequence: Synthetic oligonucleotide
augaccaccaugccgaugu

SEQ ID NO: 3250885 - RNA, 19 nt, Artificial Sequence
  Description of Artificial Sequence: Synthetic oligonucleotide
uuucuucacguucgggagg

SEQ ID NO: 3250886 - RNA, 19 nt, Artificial Sequence
  Description of Artificial Sequence: Synthetic oligonucleotide
aaauguacaugacccaauu

SEQ ID NO: 3250887 - RNA, 19 nt, Artificial Sequence
  Description of Artificial Sequence: Synthetic oligonucleotide
caaagguuuauuuagcaaa

SEQ ID NO: 3250888 - RNA, 19 nt, Artificial Sequence
  Description of Artificial Sequence: Synthetic oligonucleotide
auuguucagacucuuucca

SEQ ID NO: 3250889 - RNA, 19 nt, Artificial Sequence
  Description of Artificial Sequence: Synthetic oligonucleotide
aacuucaaugauaacuucu

SEQ ID NO: 3250890 - RNA, 19 nt, Artificial Sequence
  Description of Artificial Sequence: Synthetic oligonucleotide
uuaugaaaauguacaugac

SEQ ID NO: 3250891 - RNA, 19 nt, Artificial Sequence
  Description of Artificial Sequence: Synthetic oligonucleotide
guuucuuaugaaaauguac

SEQ ID NO: 3250892 - RNA, 19 nt, Artificial Sequence
  Description of Artificial Sequence: Synthetic oligonucleotide
gaugcuguuuccucguaug

SEQ ID NO: 3250893 - RNA, 19 nt, Artificial Sequence
  Description of Artificial Sequence: Synthetic oligonucleotide
augaugaugcuguuuccuc

SEQ ID NO: 3250894 - RNA, 19 nt, Artificial Sequence
  Description of Artificial Sequence: Synthetic oligonucleotide
uuauacaccccagucaaac

SEQ ID NO: 3250895 - RNA, 19 nt, Artificial Sequence
  Description of Artificial Sequence: Synthetic oligonucleotide
uuuccaaggcuucuaacau

SEQ ID NO: 3250896 - RNA, 19 nt, Artificial Sequence
  Description of Artificial Sequence: Synthetic oligonucleotide
caccauuuaacuucaauga

SEQ ID NO: 3250897 - RNA, 19 nt, Artificial Sequence
  Description of Artificial Sequence: Synthetic oligonucleotide
cuucuuguccauaaauuuc

SEQ ID NO: 3250898 - RNA, 19 nt, Artificial Sequence
  Description of Artificial Sequence: Synthetic oligonucleotide
uaacuucuuguccauaaau

SEQ ID NO: 3250899 - RNA, 19 nt, Artificial Sequence
  Description of Artificial Sequence: Synthetic oligonucleotide
uacaugacccaauuauaca

SEQ ID NO: 3250900 - RNA, 19 nt, Artificial Sequence
  Description of Artificial Sequence: Synthetic oligonucleotide
gauaacuucuuguccauaa

SEQ ID NO: 3250901 - RNA, 19 nt, Artificial Sequence
  Description of Artificial Sequence: Synthetic oligonucleotide
cagucaaacaguccuuugg

SEQ ID NO: 3250902 - RNA, 19 nt, Artificial Sequence
  Description of Artificial Sequence: Synthetic oligonucleotide
guucagacucuuuccaagg

SEQ ID NO: 3250903 - RNA, 19 nt, Artificial Sequence
  Description of Artificial Sequence: Synthetic oligonucleotide
aaauuucuucacguucggg

SEQ ID NO: 3250904 - RNA, 19 nt, Artificial Sequence
  Description of Artificial Sequence: Synthetic oligonucleotide
uaguauuccuuguacgugu

SEQ ID NO: 3250905 - RNA, 19 nt, Artificial Sequence
  Description of Artificial Sequence: Synthetic oligonucleotide
aagauucauaaagggauca

SEQ ID NO: 3250906 - RNA, 19 nt, Artificial Sequence
  Description of Artificial Sequence: Synthetic oligonucleotide
uaucacaaagguuuauuua

SEQ ID NO: 3250907 - RNA, 19 nt, Artificial Sequence
  Description of Artificial Sequence: Synthetic oligonucleotide
caugacccaauuauacacc

SEQ ID NO: 3250908 - RNA, 19 nt, Artificial Sequence
  Description of Artificial Sequence: Synthetic oligonucleotide
uguacaugacccaauuaua

SEQ ID NO: 3250909 - RNA, 19 nt, Artificial Sequence
  Description of Artificial Sequence: Synthetic oligonucleotide
acaugaugaugcuguuucc

SEQ ID NO: 3250910 - RNA, 19 nt, Artificial Sequence
  Description of Artificial Sequence: Synthetic oligonucleotide
gaugugaacuccucugcug

SEQ ID NO: 3250911 - RNA, 19 nt, Artificial Sequence
  Description of Artificial Sequence: Synthetic oligonucleotide
acuucuuguccauaaauuu

SEQ ID NO: 3250912 - RNA, 19 nt, Artificial Sequence
  Description of Artificial Sequence: Synthetic oligonucleotide
uguccauaaauuucuucac

SEQ ID NO: 3250913 - RNA, 19 nt, Artificial Sequence
  Description of Artificial Sequence: Synthetic oligonucleotide
ugaacuccucugcugagca

SEQ ID NO: 3250914 - RNA, 19 nt, Artificial Sequence
  Description of Artificial Sequence: Synthetic oligonucleotide
uucuuaugaaaauguacau

SEQ ID NO: 3250915 - RNA, 19 nt, Artificial Sequence
  Description of Artificial Sequence: Synthetic oligonucleotide
auguuauucuguuguccac

SEQ ID NO: 3250916 - RNA, 19 nt, Artificial Sequence
  Description of Artificial Sequence: Synthetic oligonucleotide
uucagacucuuuccaaggc

SEQ ID NO: 3250917 - RNA, 19 nt, Artificial Sequence
  Description of Artificial Sequence: Synthetic oligonucleotide
aaucaauauacuuuggugc

SEQ ID NO: 3250918 - RNA, 19 nt, Artificial Sequence
  Description of Artificial Sequence: Synthetic oligonucleotide
aacccacucauuuagaucc

SEQ ID NO: 3250919 - RNA, 19 nt, Artificial Sequence
  Description of Artificial Sequence: Synthetic oligonucleotide
aauacacccacacagcucc

SEQ ID NO: 3250920 - RNA, 19 nt, Artificial Sequence
  Description of Artificial Sequence: Synthetic oligonucleotide
uaaaaguuuuagaagaucg

SEQ ID NO: 3250921 - RNA, 19 nt, Artificial Sequence
  Description of Artificial Sequence: Synthetic oligonucleotide
aaguuuuacacuuacagug

SEQ ID NO: 3250922 - RNA, 19 nt, Artificial Sequence
  Description of Artificial Sequence: Synthetic oligonucleotide
uauucaaaagagaaaaggg

SEQ ID NO: 3250923 - RNA, 19 nt, Artificial Sequence
  Description of Artificial Sequence: Synthetic oligonucleotide
aauaaacacuauucuaucc

SEQ ID NO: 3250924 - RNA, 19 nt, Artificial Sequence
  Description of Artificial Sequence: Synthetic oligonucleotide
aagcauauugauuugauug

SEQ ID NO: 3250925 - RNA, 19 nt, Artificial Sequence
  Description of Artificial Sequence: Synthetic oligonucleotide
ucuucugucaauaagguug

SEQ ID NO: 3250926 - RNA, 19 nt, Artificial Sequence
  Description of Artificial Sequence: Synthetic oligonucleotide
uauacuuuggugcagagca

SEQ ID NO: 3250927 - RNA, 19 nt, Artificial Sequence
  Description of Artificial Sequence: Synthetic oligonucleotide
auaaacacuauucuauccc

SEQ ID NO: 3250928 - RNA, 19 nt, Artificial Sequence
  Description of Artificial Sequence: Synthetic oligonucleotide
agacaaauaauccagauaa

SEQ ID NO: 3250929 - RNA, 19 nt, Artificial Sequence
  Description of Artificial Sequence: Synthetic oligonucleotide
gauacucauauuuuggucc

SEQ ID NO: 3250930 - RNA, 19 nt, Artificial Sequence
  Description of Artificial Sequence: Synthetic oligonucleotide
auuuuauauauucaaaaga

SEQ ID NO: 3250931 - RNA, 19 nt, Artificial Sequence
  Description of Artificial Sequence: Synthetic oligonucleotide
auuucaauaucacagauau

SEQ ID NO: 3250932 - RNA, 19 nt, Artificial Sequence
  Description of Artificial Sequence: Synthetic oligonucleotide
aaaguuuuagaagaucgac

SEQ ID NO: 3250933 - RNA, 19 nt, Artificial Sequence
  Description of Artificial Sequence: Synthetic oligonucleotide
auugagaugugcuuccucc

SEQ ID NO: 3250934 - RNA, 19 nt, Artificial Sequence
  Description of Artificial Sequence: Synthetic oligonucleotide
uuacauuucaacauccuca

SEQ ID NO: 3250935 - RNA, 19 nt, Artificial Sequence
  Description of Artificial Sequence: Synthetic oligonucleotide
uucucuagcaacaaaauau

SEQ ID NO: 3250936 - RNA, 19 nt, Artificial Sequence
  Description of Artificial Sequence: Synthetic oligonucleotide
aagagcuuucucuagcaac

SEQ ID NO: 3250937 - RNA, 19 nt, Artificial Sequence
  Description of Artificial Sequence: Synthetic oligonucleotide
auuaagagcuuucucuagc

SEQ ID NO: 3250938 - RNA, 19 nt, Artificial Sequence
  Description of Artificial Sequence: Synthetic oligonucleotide
uaaagagccguuuucaccc

SEQ ID NO: 3250939 - RNA, 19 nt, Artificial Sequence
  Description of Artificial Sequence: Synthetic oligonucleotide
uaaaacaggacuuucuaga

SEQ ID NO: 3250940 - RNA, 19 nt, Artificial Sequence
  Description of Artificial Sequence: Synthetic oligonucleotide
ugauuucccaaacuaaugc

SEQ ID NO: 3250941 - RNA, 19 nt, Artificial Sequence
  Description of Artificial Sequence: Synthetic oligonucleotide
gagcauaaacucuaaagag

SEQ ID NO: 3250942 - RNA, 19 nt, Artificial Sequence
  Description of Artificial Sequence: Synthetic oligonucleotide
caucagguaaucaauauac

SEQ ID NO: 3250943 - RNA, 19 nt, Artificial Sequence
  Description of Artificial Sequence: Synthetic oligonucleotide
aaugcaauaguuauuacau

SEQ ID NO: 3250944 - RNA, 19 nt, Artificial Sequence
  Description of Artificial Sequence: Synthetic oligonucleotide
ucuguaaguaauaaacacu

SEQ ID NO: 3250945 - RNA, 19 nt, Artificial Sequence
  Description of Artificial Sequence: Synthetic oligonucleotide
auaaaugugagcauaaacu

SEQ ID NO: 3250946 - RNA, 19 nt, Artificial Sequence
  Description of Artificial Sequence: Synthetic oligonucleotide
caaaagcccaaauacaccc

SEQ ID NO: 3250947 - RNA, 19 nt, Artificial Sequence
  Description of Artificial Sequence: Synthetic oligonucleotide
acucauuuagauccucucc

SEQ ID NO: 3250948 - RNA, 19 nt, Artificial Sequence
  Description of Artificial Sequence: Synthetic oligonucleotide
aauaagguugaacuccuga

SEQ ID NO: 3250949 - RNA, 19 nt, Artificial Sequence
  Description of Artificial Sequence: Synthetic oligonucleotide
aaagcccaaauacacccac

SEQ ID NO: 3250950 - RNA, 19 nt, Artificial Sequence
  Description of Artificial Sequence: Synthetic oligonucleotide
augugcuuccuccugaagc

SEQ ID NO: 3250951 - RNA, 19 nt, Artificial Sequence
  Description of Artificial Sequence: Synthetic oligonucleotide
gauaaaugugagcauaaac

SEQ ID NO: 3250952 - RNA, 19 nt, Artificial Sequence
  Description of Artificial Sequence: Synthetic oligonucleotide
uuuuagaagaucgacuacc

SEQ ID NO: 3250953 - RNA, 19 nt, Artificial Sequence
  Description of Artificial Sequence: Synthetic oligonucleotide
aaaauguuggugauaaaug

SEQ ID NO: 3250954 - RNA, 19 nt, Artificial Sequence
  Description of Artificial Sequence: Synthetic oligonucleotide
uaaaugugagcauaaacuc

SEQ ID NO: 3250955 - RNA, 19 nt, Artificial Sequence
  Description of Artificial Sequence: Synthetic oligonucleotide
uuaaaacaggacuuucuag

SEQ ID NO: 3250956 - RNA, 19 nt, Artificial Sequence
  Description of Artificial Sequence: Synthetic oligonucleotide
gauauuaagagcuuucucu

SEQ ID NO: 3250957 - RNA, 19 nt, Artificial Sequence
  Description of Artificial Sequence: Synthetic oligonucleotide
uaguuauuacauuucaaca

SEQ ID NO: 3250958 - RNA, 19 nt, Artificial Sequence
  Description of Artificial Sequence: Synthetic oligonucleotide
agcauaaacucuaaagagc

SEQ ID NO: 3250959 - RNA, 19 nt, Artificial Sequence
  Description of Artificial Sequence: Synthetic oligonucleotide
uuaacugcaacccacucau

SEQ ID NO: 3250960 - RNA, 19 nt, Artificial Sequence
  Description of Artificial Sequence: Synthetic oligonucleotide
uuuuauguuuguuccaucu

SEQ ID NO: 3250961 - RNA, 19 nt, Artificial Sequence
  Description of Artificial Sequence: Synthetic oligonucleotide
acaguguuaacugcaaccc

SEQ ID NO: 3250962 - RNA, 19 nt, Artificial Sequence
  Description of Artificial Sequence: Synthetic oligonucleotide
uguuuuaagaguucauacu

SEQ ID NO: 3250963 - RNA, 19 nt, Artificial Sequence
  Description of Artificial Sequence: Synthetic oligonucleotide
aacaggacuuucuagaauu

SEQ ID NO: 3250964 - RNA, 19 nt, Artificial Sequence
  Description of Artificial Sequence: Synthetic oligonucleotide
uaacaaaagcccaaauaca

SEQ ID NO: 3250965 - RNA, 19 nt, Artificial Sequence
  Description of Artificial Sequence: Synthetic oligonucleotide
uggcuuaaaaguuuuagaa

SEQ ID NO: 3250966 - RNA, 19 nt, Artificial Sequence
  Description of Artificial Sequence: Synthetic oligonucleotide
uugaaagauguauugagau

SEQ ID NO: 3250967 - RNA, 19 nt, Artificial Sequence
  Description of Artificial Sequence: Synthetic oligonucleotide
agaagaucgacuaccaaac

SEQ ID NO: 3250968 - RNA, 19 nt, Artificial Sequence
  Description of Artificial Sequence: Synthetic oligonucleotide
ucuagcaacaaaauaugau

SEQ ID NO: 3250969 - RNA, 19 nt, Artificial Sequence
  Description of Artificial Sequence: Synthetic oligonucleotide
uuuggcuuaaaaguuuuag

SEQ ID NO: 3250970 - RNA, 19 nt, Artificial Sequence
  Description of Artificial Sequence: Synthetic oligonucleotide
ugaaaugcaauaguuauua

SEQ ID NO: 3250971 - RNA, 19 nt, Artificial Sequence
  Description of Artificial Sequence: Synthetic oligonucleotide
cauauuuugguccagcuga

SEQ ID NO: 3250972 - RNA, 19 nt, Artificial Sequence
  Description of Artificial Sequence: Synthetic oligonucleotide
cucauuuagauccucuccc

SEQ ID NO: 3250973 - RNA, 19 nt, Artificial Sequence
  Description of Artificial Sequence: Synthetic oligonucleotide
guucauacuggugagaacc

SEQ ID NO: 3250974 - RNA, 19 nt, Artificial Sequence
  Description of Artificial Sequence: Synthetic oligonucleotide
uuuagaagaucgacuacca

SEQ ID NO: 3250975 - RNA, 19 nt, Artificial Sequence
  Description of Artificial Sequence: Synthetic oligonucleotide
agauauuaagagcuuucuc

SEQ ID NO: 3250976 - RNA, 19 nt, Artificial Sequence
  Description of Artificial Sequence: Synthetic oligonucleotide
ugcaauaguuauuacauuu

SEQ ID NO: 3250977 - RNA, 19 nt, Artificial Sequence
  Description of Artificial Sequence: Synthetic oligonucleotide
accaaagacaaauaaucca

SEQ ID NO: 3250978 - RNA, 19 nt, Artificial Sequence
  Description of Artificial Sequence: Synthetic oligonucleotide
uugcuaggaaaccucacag

SEQ ID NO: 3250979 - RNA, 19 nt, Artificial Sequence
  Description of Artificial Sequence: Synthetic oligonucleotide
guacagaagucugugaugg

SEQ ID NO: 3250980 - RNA, 19 nt, Artificial Sequence
  Description of Artificial Sequence: Synthetic oligonucleotide
uguauugagaugugcuucc

SEQ ID NO: 3250981 - RNA, 19 nt, Artificial Sequence
  Description of Artificial Sequence: Synthetic oligonucleotide
uagaagaucgacuaccaaa

SEQ ID NO: 3250982 - RNA, 19 nt, Artificial Sequence
  Description of Artificial Sequence: Synthetic oligonucleotide
ugaaagauguauugagaug

SEQ ID NO: 3250983 - RNA, 19 nt, Artificial Sequence
  Description of Artificial Sequence: Synthetic oligonucleotide
aaaauccacaguguuaacu

SEQ ID NO: 3250984 - RNA, 19 nt, Artificial Sequence
  Description of Artificial Sequence: Synthetic oligonucleotide
aagucuauauauaaccuga

SEQ ID NO: 3250985 - RNA, 19 nt, Artificial Sequence
  Description of Artificial Sequence: Synthetic oligonucleotide
aauauacuuuggugcagag

SEQ ID NO: 3250986 - RNA, 19 nt, Artificial Sequence
  Description of Artificial Sequence: Synthetic oligonucleotide
aucaauauacuuuggugca

SEQ ID NO: 3250987 - RNA, 19 nt, Artificial Sequence
  Description of Artificial Sequence: Synthetic oligonucleotide
uugauuucccaaacuaaug

SEQ ID NO: 3250988 - RNA, 19 nt, Artificial Sequence
  Description of Artificial Sequence: Synthetic oligonucleotide
aguuuuacacuuacagugc

SEQ ID NO: 3250989 - RNA, 19 nt, Artificial Sequence
  Description of Artificial Sequence: Synthetic oligonucleotide
uaucccaggguuuuaaaac

SEQ ID NO: 3250990 - RNA, 19 nt, Artificial Sequence
  Description of Artificial Sequence: Synthetic oligonucleotide
aaaacaggacuuucuagaa

SEQ ID NO: 3250991 - RNA, 19 nt, Artificial Sequence
  Description of Artificial Sequence: Synthetic oligonucleotide
ucuagaauuugacucccca

SEQ ID NO: 3250992 - RNA, 19 nt, Artificial Sequence
  Description of Artificial Sequence: Synthetic oligonucleotide
uuugaggugaguuucucaa

SEQ ID NO: 3250993 - RNA, 19 nt, Artificial Sequence
  Description of Artificial Sequence: Synthetic oligonucleotide
gagaaaagggaacccaagc

SEQ ID NO: 3250994 - RNA, 19 nt, Artificial Sequence
  Description of Artificial Sequence: Synthetic oligonucleotide
uuauccuuuuaucuguccu

SEQ ID NO: 3250995 - RNA, 19 nt, Artificial Sequence
  Description of Artificial Sequence: Synthetic oligonucleotide
aaaagggaacccaagcaag

SEQ ID NO: 3250996 - RNA, 19 nt, Artificial Sequence
  Description of Artificial Sequence: Synthetic oligonucleotide
agaagucugugaugguucc

SEQ ID NO: 3250997 - RNA, 19 nt, Artificial Sequence
  Description of Artificial Sequence: Synthetic oligonucleotide
ggcaagucuauauauaacc

SEQ ID NO: 3250998 - RNA, 19 nt, Artificial Sequence
  Description of Artificial Sequence: Synthetic oligonucleotide
cuaaagagccguuuucacc

SEQ ID NO: 3250999 - RNA, 19 nt, Artificial Sequence
  Description of Artificial Sequence: Synthetic oligonucleotide
acccagcuggucuugaacc

SEQ ID NO: 3251000 - RNA, 19 nt, Artificial Sequence
  Description of Artificial Sequence: Synthetic oligonucleotide
uauuaagagcuuucucuag

SEQ ID NO: 3251001 - RNA, 19 nt, Artificial Sequence
  Description of Artificial Sequence: Synthetic oligonucleotide
uaaacacuauucuauccca

SEQ ID NO: 3251002 - RNA, 19 nt, Artificial Sequence
  Description of Artificial Sequence: Synthetic oligonucleotide
agugauacucauauuuugg

SEQ ID NO: 3251003 - RNA, 19 nt, Artificial Sequence
  Description of Artificial Sequence: Synthetic oligonucleotide
gcuuaaaaguuuuagaaga

SEQ ID NO: 3251004 - RNA, 19 nt, Artificial Sequence
  Description of Artificial Sequence: Synthetic oligonucleotide
aaagucuguaaguaauaaa

SEQ ID NO: 3251005 - RNA, 19 nt, Artificial Sequence
  Description of Artificial Sequence: Synthetic oligonucleotide
acuuacagugcacuuaaca

SEQ ID NO: 3251006 - RNA, 19 nt, Artificial Sequence
  Description of Artificial Sequence: Synthetic oligonucleotide
gccguuuucacccagcugg

SEQ ID NO: 3251007 - RNA, 19 nt, Artificial Sequence
  Description of Artificial Sequence: Synthetic oligonucleotide
uuucccaaacuaaugccug

SEQ ID NO: 3251008 - RNA, 19 nt, Artificial Sequence
  Description of Artificial Sequence: Synthetic oligonucleotide
uuggcuuaaaaguuuuaga

SEQ ID NO: 3251009 - RNA, 19 nt, Artificial Sequence
  Description of Artificial Sequence: Synthetic oligonucleotide
uaagguugaacuccugaac

SEQ ID NO: 3251010 - RNA, 19 nt, Artificial Sequence
  Description of Artificial Sequence: Synthetic oligonucleotide
agcauauugauuugauuga

SEQ ID NO: 3251011 - RNA, 19 nt, Artificial Sequence
  Description of Artificial Sequence: Synthetic oligonucleotide
gaaagauguauugagaugu

SEQ ID NO: 3251012 - RNA, 19 nt, Artificial Sequence
  Description of Artificial Sequence: Synthetic oligonucleotide
uucugcauguuuuaagagu

SEQ ID NO: 3251013 - RNA, 19 nt, Artificial Sequence
  Description of Artificial Sequence: Synthetic oligonucleotide
agcccaaauacacccacac

SEQ ID NO: 3251014 - RNA, 19 nt, Artificial Sequence
  Description of Artificial Sequence: Synthetic oligonucleotide
auguuuguuccaucugccc

SEQ ID NO: 3251015 - RNA, 19 nt, Artificial Sequence
  Description of Artificial Sequence: Synthetic oligonucleotide
caagucuauauauaaccug

SEQ ID NO: 3251016 - RNA, 19 nt, Artificial Sequence
  Description of Artificial Sequence: Synthetic oligonucleotide
uuuggugcagagcacuuga

SEQ ID NO: 3251017 - RNA, 19 nt, Artificial Sequence
  Description of Artificial Sequence: Synthetic oligonucleotide
aauaagacgaaucagaauc

SEQ ID NO: 3251018 - RNA, 19 nt, Artificial Sequence
  Description of Artificial Sequence: Synthetic oligonucleotide
aaugaauagagucaacuuc

SEQ ID NO: 3251019 - RNA, 19 nt, Artificial Sequence
  Description of Artificial Sequence: Synthetic oligonucleotide
aauaauggauaauaagacg

SEQ ID NO: 3251020 - RNA, 19 nt, Artificial Sequence
  Description of Artificial Sequence: Synthetic oligonucleotide
gaaucuuuagcucugagag

SEQ ID NO: 3251021 - RNA, 19 nt, Artificial Sequence
  Description of Artificial Sequence: Synthetic oligonucleotide
uaaguauucuccuaaaugc

SEQ ID NO: 3251022 - RNA, 19 nt, Artificial Sequence
  Description of Artificial Sequence: Synthetic oligonucleotide
uccgaaaggaauaucaucc

SEQ ID NO: 3251023 - RNA, 19 nt, Artificial Sequence
  Description of Artificial Sequence: Synthetic oligonucleotide
uccaacaucuauaggagcg

SEQ ID NO: 3251024 - RNA, 19 nt, Artificial Sequence
  Description of Artificial Sequence: Synthetic oligonucleotide
acagugaguuauuaaaccc

SEQ ID NO: 3251025 - RNA, 19 nt, Artificial Sequence
  Description of Artificial Sequence: Synthetic oligonucleotide
gauggaauaguguuggaag

SEQ ID NO: 3251026 - RNA, 19 nt, Artificial Sequence
  Description of Artificial Sequence: Synthetic oligonucleotide
aggaauaucauccaaugug

SEQ ID NO: 3251027 - RNA, 19 nt, Artificial Sequence
  Description of Artificial Sequence: Synthetic oligonucleotide
auugcuaggacucaaguca

SEQ ID NO: 3251028 - RNA, 19 nt, Artificial Sequence
  Description of Artificial Sequence: Synthetic oligonucleotide
uggauaauaagacgaauca

SEQ ID NO: 3251029 - RNA, 19 nt, Artificial Sequence
  Description of Artificial Sequence: Synthetic oligonucleotide
acauacaagaguuuuaaga

SEQ ID NO: 3251030 - RNA, 19 nt, Artificial Sequence
  Description of Artificial Sequence: Synthetic oligonucleotide
aaugugaaacacaucauag

SEQ ID NO: 3251031 - RNA, 19 nt, Artificial Sequence
  Description of Artificial Sequence: Synthetic oligonucleotide
gaacauaccaauaaccgag

SEQ ID NO: 3251032 - RNA, 19 nt, Artificial Sequence
  Description of Artificial Sequence: Synthetic oligonucleotide
uauguuguacgacucugcg

SEQ ID NO: 3251033 - RNA, 19 nt, Artificial Sequence
  Description of Artificial Sequence: Synthetic oligonucleotide
ucauaaacaacuuccuucu

SEQ ID NO: 3251034 - RNA, 19 nt, Artificial Sequence
  Description of Artificial Sequence: Synthetic oligonucleotide
guaaguauucuccuaaaug

SEQ ID NO: 3251035 - RNA, 19 nt, Artificial Sequence
  Description of Artificial Sequence: Synthetic oligonucleotide
aguguuggaagucuguguc

SEQ ID NO: 3251036 - RNA, 19 nt, Artificial Sequence
  Description of Artificial Sequence: Synthetic oligonucleotide
aaaucuucuuucagaaggc

SEQ ID NO: 3251037 - RNA, 19 nt, Artificial Sequence
  Description of Artificial Sequence: Synthetic oligonucleotide
uguauggucaaaagcagcu

SEQ ID NO: 3251038 - RNA, 19 nt, Artificial Sequence
  Description of Artificial Sequence: Synthetic oligonucleotide
aauuccgaaaggaauauca

SEQ ID NO: 3251039 - RNA, 19 nt, Artificial Sequence
  Description of Artificial Sequence: Synthetic oligonucleotide
auaauggauaauaagacga

SEQ ID NO: 3251040 - RNA, 19 nt, Artificial Sequence
  Description of Artificial Sequence: Synthetic oligonucleotide
uuagaaaccacgauuccaa

SEQ ID NO: 3251041 - RNA, 19 nt, Artificial Sequence
  Description of Artificial Sequence: Synthetic oligonucleotide
guaacugugaucuagagau

SEQ ID NO: 3251042 - RNA, 19 nt, Artificial Sequence
  Description of Artificial Sequence: Synthetic oligonucleotide
gacaaaugcccacauauac

SEQ ID NO: 3251043 - RNA, 19 nt, Artificial Sequence
  Description of Artificial Sequence: Synthetic oligonucleotide
gagagaaacacuucacgcc

SEQ ID NO: 3251044 - RNA, 19 nt, Artificial Sequence
  Description of Artificial Sequence: Synthetic oligonucleotide
cauuucuucugauauuccg

SEQ ID NO: 3251045 - RNA, 19 nt, Artificial Sequence
  Description of Artificial Sequence: Synthetic oligonucleotide
acgaaucagaaucacagug

SEQ ID NO: 3251046 - RNA, 19 nt, Artificial Sequence
  Description of Artificial Sequence: Synthetic oligonucleotide
agcgaaguaaguauucucc

SEQ ID NO: 3251047 - RNA, 19 nt, Artificial Sequence
  Description of Artificial Sequence: Synthetic oligonucleotide
gagucaacuucucagauuc

SEQ ID NO: 3251048 - RNA, 19 nt, Artificial Sequence
  Description of Artificial Sequence: Synthetic oligonucleotide
auagcuauguuguacgacu

SEQ ID NO: 3251049 - RNA, 19 nt, Artificial Sequence
  Description of Artificial Sequence: Synthetic oligonucleotide
uguuuuggggcauagcugu

SEQ ID NO: 3251050 - RNA, 19 nt, Artificial Sequence
  Description of Artificial Sequence: Synthetic oligonucleotide
auagacagcugcaagcugc

SEQ ID NO: 3251051 - RNA, 19 nt, Artificial Sequence
  Description of Artificial Sequence: Synthetic oligonucleotide
auaaacaacuuccuucucu

SEQ ID NO: 3251052 - RNA, 19 nt, Artificial Sequence
  Description of Artificial Sequence: Synthetic oligonucleotide
agaaccucgccucuggcac

SEQ ID NO: 3251053 - RNA, 19 nt, Artificial Sequence
  Description of Artificial Sequence: Synthetic oligonucleotide
auaccaauaaccgagcuga

SEQ ID NO: 3251054 - RNA, 19 nt, Artificial Sequence
  Description of Artificial Sequence: Synthetic oligonucleotide
caagcuuccaggaucuugg

SEQ ID NO: 3251055 - RNA, 19 nt, Artificial Sequence
  Description of Artificial Sequence: Synthetic oligonucleotide
ucaacauauucauuuagau

SEQ ID NO: 3251056 - RNA, 19 nt, Artificial Sequence
  Description of Artificial Sequence: Synthetic oligonucleotide
agaacaagcgagcucuuuc

SEQ ID NO: 3251057 - RNA, 19 nt, Artificial Sequence
  Description of Artificial Sequence: Synthetic oligonucleotide
ugaacauaccaauaaccga

SEQ ID NO: 3251058 - RNA, 19 nt, Artificial Sequence
  Description of Artificial Sequence: Synthetic oligonucleotide
uuuagcucugagagaauag

SEQ ID NO: 3251059 - RNA, 19 nt, Artificial Sequence
  Description of Artificial Sequence: Synthetic oligonucleotide
ucagaaggcuauaacagaa

SEQ ID NO: 3251060 - RNA, 19 nt, Artificial Sequence
  Description of Artificial Sequence: Synthetic oligonucleotide
caaguugccgacaaaugcc

SEQ ID NO: 3251061 - RNA, 19 nt, Artificial Sequence
  Description of Artificial Sequence: Synthetic oligonucleotide
acuaauggcugacugggag

SEQ ID NO: 3251062 - RNA, 19 nt, Artificial Sequence
  Description of Artificial Sequence: Synthetic oligonucleotide
ugcuucaacauauucauuu

SEQ ID NO: 3251063 - RNA, 19 nt, Artificial Sequence
  Description of Artificial Sequence: Synthetic oligonucleotide
ugcaucgcuugacuaaugg

SEQ ID NO: 3251064 - RNA, 19 nt, Artificial Sequence
  Description of Artificial Sequence: Synthetic oligonucleotide
agacgaaucagaaucacag

SEQ ID NO: 3251065 - RNA, 19 nt, Artificial Sequence
  Description of Artificial Sequence: Synthetic oligonucleotide
cacagugaguuauuaaacc

SEQ ID NO: 3251066 - RNA, 19 nt, Artificial Sequence
  Description of Artificial Sequence: Synthetic oligonucleotide
uguaacugugaucuagaga

SEQ ID NO: 3251067 - RNA, 19 nt, Artificial Sequence
  Description of Artificial Sequence: Synthetic oligonucleotide
ugauauuccgucagcaggu

SEQ ID NO: 3251068 - RNA, 19 nt, Artificial Sequence
  Description of Artificial Sequence: Synthetic oligonucleotide
aagucuguguccgccaagc

SEQ ID NO: 3251069 - RNA, 19 nt, Artificial Sequence
  Description of Artificial Sequence: Synthetic oligonucleotide
cauacaagaguuuuaagaa

SEQ ID NO: 3251070 - RNA, 19 nt, Artificial Sequence
  Description of Artificial Sequence: Synthetic oligonucleotide
auggauaauaagacgaauc

SEQ ID NO: 3251071 - RNA, 19 nt, Artificial Sequence
  Description of Artificial Sequence: Synthetic oligonucleotide
aacauaccaauaaccgagc

SEQ ID NO: 3251072 - RNA, 19 nt, Artificial Sequence
  Description of Artificial Sequence: Synthetic oligonucleotide
aacccauuucuauauacaa

SEQ ID NO: 3251073 - RNA, 19 nt, Artificial Sequence
  Description of Artificial Sequence: Synthetic oligonucleotide
auauucauuuagauucugc

SEQ ID NO: 3251074 - RNA, 19 nt, Artificial Sequence
  Description of Artificial Sequence: Synthetic oligonucleotide
aaggaauaucauccaaugu

SEQ ID NO: 3251075 - RNA, 19 nt, Artificial Sequence
  Description of Artificial Sequence: Synthetic oligonucleotide
ucacagugaguuauuaaac

SEQ ID NO: 3251076 - RNA, 19 nt, Artificial Sequence
  Description of Artificial Sequence: Synthetic oligonucleotide
agcuuagaaaccacgauuc

SEQ ID NO: 3251077 - RNA, 19 nt, Artificial Sequence
  Description of Artificial Sequence: Synthetic oligonucleotide
uguuuguggugcuaaauuc

SEQ ID NO: 3251078 - RNA, 19 nt, Artificial Sequence
  Description of Artificial Sequence: Synthetic oligonucleotide
agcacuaagggagccaacc

SEQ ID NO: 3251079 - RNA, 19 nt, Artificial Sequence
  Description of Artificial Sequence: Synthetic oligonucleotide
gaaaaucuucuuucagaag

SEQ ID NO: 3251080 - RNA, 19 nt, Artificial Sequence
  Description of Artificial Sequence: Synthetic oligonucleotide
aucgcauuucuucugauau

SEQ ID NO: 3251081 - RNA, 19 nt, Artificial Sequence
  Description of Artificial Sequence: Synthetic oligonucleotide
aagucuccaaguugccgac

SEQ ID NO: 3251082 - RNA, 19 nt, Artificial Sequence
  Description of Artificial Sequence: Synthetic oligonucleotide
gaaguaaguauucuccuaa

SEQ ID NO: 3251083 - RNA, 19 nt, Artificial Sequence
  Description of Artificial Sequence: Synthetic oligonucleotide
ucauccaaugugaaacaca

SEQ ID NO: 3251084 - RNA, 19 nt, Artificial Sequence
  Description of Artificial Sequence: Synthetic oligonucleotide
gaacaagcgagcucuuucc

SEQ ID NO: 3251085 - RNA, 19 nt, Artificial Sequence
  Description of Artificial Sequence: Synthetic oligonucleotide
uucagaaggcuauaacaga

SEQ ID NO: 3251086 - RNA, 19 nt, Artificial Sequence
  Description of Artificial Sequence: Synthetic oligonucleotide
ucuuccaggcagcugacga

SEQ ID NO: 3251087 - RNA, 19 nt, Artificial Sequence
  Description of Artificial Sequence: Synthetic oligonucleotide
gucaaaagaggacucagca

SEQ ID NO: 3251088 - RNA, 19 nt, Artificial Sequence
  Description of Artificial Sequence: Synthetic oligonucleotide
uucagaaccucgccucugg

SEQ ID NO: 3251089 - RNA, 19 nt, Artificial Sequence
  Description of Artificial Sequence: Synthetic oligonucleotide
ucugagagaauagagcgaa

SEQ ID NO: 3251090 - RNA, 19 nt, Artificial Sequence
  Description of Artificial Sequence: Synthetic oligonucleotide
aagaaauaauggauaauaa

SEQ ID NO: 3251091 - RNA, 19 nt, Artificial Sequence
  Description of Artificial Sequence: Synthetic oligonucleotide
uauggucaaaagcagcuua

SEQ ID NO: 3251092 - RNA, 19 nt, Artificial Sequence
  Description of Artificial Sequence: Synthetic oligonucleotide
aaucuuuagcucugagaga

SEQ ID NO: 3251093 - RNA, 19 nt, Artificial Sequence
  Description of Artificial Sequence: Synthetic oligonucleotide
aaaagaggacucagcaauc

SEQ ID NO: 3251094 - RNA, 19 nt, Artificial Sequence
  Description of Artificial Sequence: Synthetic oligonucleotide
auacacgugacuacgaaug

SEQ ID NO: 3251095 - RNA, 19 nt, Artificial Sequence
  Description of Artificial Sequence: Synthetic oligonucleotide
uagauucugcugcagggug

SEQ ID NO: 3251096 - RNA, 19 nt, Artificial Sequence
  Description of Artificial Sequence: Synthetic oligonucleotide
uauauggcuugcuuuauuu

SEQ ID NO: 3251097 - RNA, 19 nt, Artificial Sequence
  Description of Artificial Sequence: Synthetic oligonucleotide
gaccaugaccuucugauga

SEQ ID NO: 3251098 - RNA, 19 nt, Artificial Sequence
  Description of Artificial Sequence: Synthetic oligonucleotide
aaagcagcuuagaaaccac

SEQ ID NO: 3251099 - RNA, 19 nt, Artificial Sequence
  Description of Artificial Sequence: Synthetic oligonucleotide
aaucacagugaguuauuaa

SEQ ID NO: 3251100 - RNA, 19 nt, Artificial Sequence
  Description of Artificial Sequence: Synthetic oligonucleotide
aaaauuccgaaaggaauau

SEQ ID NO: 3251101 - RNA, 19 nt, Artificial Sequence
  Description of Artificial Sequence: Synthetic oligonucleotide
ugaucuagagaugucuucu

SEQ ID NO: 3251102 - RNA, 19 nt, Artificial Sequence
  Description of Artificial Sequence: Synthetic oligonucleotide
gauugcuaggacucaaguc

SEQ ID NO: 3251103 - RNA, 19 nt, Artificial Sequence
  Description of Artificial Sequence: Synthetic oligonucleotide
agguuaucuguauuaauaa

SEQ ID NO: 3251104 - RNA, 19 nt, Artificial Sequence
  Description of Artificial Sequence: Synthetic oligonucleotide
gucaaaagcagcuuagaaa

SEQ ID NO: 3251105 - RNA, 19 nt, Artificial Sequence
  Description of Artificial Sequence: Synthetic oligonucleotide
gcugauauuauguuugcac

SEQ ID NO: 3251106 - RNA, 19 nt, Artificial Sequence
  Description of Artificial Sequence: Synthetic oligonucleotide
gauauuauguuugcacuga

SEQ ID NO: 3251107 - RNA, 19 nt, Artificial Sequence
  Description of Artificial Sequence: Synthetic oligonucleotide
augugaaacacaucauaga

SEQ ID NO: 3251108 - RNA, 19 nt, Artificial Sequence
  Description of Artificial Sequence: Synthetic oligonucleotide
ucuagagaugucuucugaa

SEQ ID NO: 3251109 - RNA, 19 nt, Artificial Sequence
  Description of Artificial Sequence: Synthetic oligonucleotide
uccaaguugccgacaaaug

SEQ ID NO: 3251110 - RNA, 19 nt, Artificial Sequence
  Description of Artificial Sequence: Synthetic oligonucleotide
uaauggcugacugggagag

SEQ ID NO: 3251111 - RNA, 19 nt, Artificial Sequence
  Description of Artificial Sequence: Synthetic oligonucleotide
aaauuccgaaaggaauauc

SEQ ID NO: 3251112 - RNA, 19 nt, Artificial Sequence
  Description of Artificial Sequence: Synthetic oligonucleotide
uugcagauggaauaguguu

SEQ ID NO: 3251113 - RNA, 19 nt, Artificial Sequence
  Description of Artificial Sequence: Synthetic oligonucleotide
aguguauauggcuugcuuu

SEQ ID NO: 3251114 - RNA, 19 nt, Artificial Sequence
  Description of Artificial Sequence: Synthetic oligonucleotide
ugaggucuucaccuaaacu

SEQ ID NO: 3251115 - RNA, 19 nt, Artificial Sequence
  Description of Artificial Sequence: Synthetic oligonucleotide
uuagcucugagagaauaga

SEQ ID NO: 3251116 - RNA, 19 nt, Artificial Sequence
  Description of Artificial Sequence: Synthetic oligonucleotide
auguuggcaaugaauagag

SEQ ID NO: 3251117 - RNA, 19 nt, Artificial Sequence
  Description of Artificial Sequence: Synthetic oligonucleotide
ucagaaaugaaauaaagcu

SEQ ID NO: 3251118 - RNA, 19 nt, Artificial Sequence
  Description of Artificial Sequence: Synthetic oligonucleotide
aaucccauaaaacaccuac

SEQ ID NO: 3251119 - RNA, 19 nt, Artificial Sequence
  Description of Artificial Sequence: Synthetic oligonucleotide
aaguaaauuucucagaaca

SEQ ID NO: 3251120 - RNA, 19 nt, Artificial Sequence
  Description of Artificial Sequence: Synthetic oligonucleotide
acaagaggaaaacugaagc

SEQ ID NO: 3251121 - RNA, 19 nt, Artificial Sequence
  Description of Artificial Sequence: Synthetic oligonucleotide
aauaaguugucccugaagu

SEQ ID NO: 3251122 - RNA, 19 nt, Artificial Sequence
  Description of Artificial Sequence: Synthetic oligonucleotide
agcaucagaacuaagaucc

SEQ ID NO: 3251123 - RNA, 19 nt, Artificial Sequence
  Description of Artificial Sequence: Synthetic oligonucleotide
uuucucagaacacaaaucc

SEQ ID NO: 3251124 - RNA, 19 nt, Artificial Sequence
  Description of Artificial Sequence: Synthetic oligonucleotide
ucucaaaucgcucucagag

SEQ ID NO: 3251125 - RNA, 19 nt, Artificial Sequence
  Description of Artificial Sequence: Synthetic oligonucleotide
aaaacugaagcaucagaac

SEQ ID NO: 3251126 - RNA, 19 nt, Artificial Sequence
  Description of Artificial Sequence: Synthetic oligonucleotide
uuuucauguggcuagaugc

SEQ ID NO: 3251127 - RNA, 19 nt, Artificial Sequence
  Description of Artificial Sequence: Synthetic oligonucleotide
ucaaaucgcucucagaggg

SEQ ID NO: 3251128 - RNA, 19 nt, Artificial Sequence
  Description of Artificial Sequence: Synthetic oligonucleotide
agaacaaaacacuaaaugu

SEQ ID NO: 3251129 - RNA, 19 nt, Artificial Sequence
  Description of Artificial Sequence: Synthetic oligonucleotide
aaugaaauaaagcuuguuu

SEQ ID NO: 3251130 - RNA, 19 nt, Artificial Sequence
  Description of Artificial Sequence: Synthetic oligonucleotide
auaaagcuuguuuaguuac

SEQ ID NO: 3251131 - RNA, 19 nt, Artificial Sequence
  Description of Artificial Sequence: Synthetic oligonucleotide
uguuuaguuacccucacca

SEQ ID NO: 3251132 - RNA, 19 nt, Artificial Sequence
  Description of Artificial Sequence: Synthetic oligonucleotide
aaacugaagcaucagaacu

SEQ ID NO: 3251133 - RNA, 19 nt, Artificial Sequence
  Description of Artificial Sequence: Synthetic oligonucleotide
uauguaaacuacaugauua

SEQ ID NO: 3251134 - RNA, 19 nt, Artificial Sequence
  Description of Artificial Sequence: Synthetic oligonucleotide
uacaaaagcagaaaccuug

SEQ ID NO: 3251135 - RNA, 19 nt, Artificial Sequence
  Description of Artificial Sequence: Synthetic oligonucleotide
ugaaauaaagcuuguuuag

SEQ ID NO: 3251136 - RNA, 19 nt, Artificial Sequence
  Description of Artificial Sequence: Synthetic oligonucleotide
aaaagcauugcucuaauuu

SEQ ID NO: 3251137 - RNA, 19 nt, Artificial Sequence
  Description of Artificial Sequence: Synthetic oligonucleotide
agaacuaagauccaagagu

SEQ ID NO: 3251138 - RNA, 19 nt, Artificial Sequence
  Description of Artificial Sequence: Synthetic oligonucleotide
auugcucuaauuuacaaga

SEQ ID NO: 3251139 - RNA, 19 nt, Artificial Sequence
  Description of Artificial Sequence: Synthetic oligonucleotide
aaugccacacaccucauug

SEQ ID NO: 3251140 - RNA, 19 nt, Artificial Sequence
  Description of Artificial Sequence: Synthetic oligonucleotide
aacacaaaucccauaaaac

SEQ ID NO: 3251141 - RNA, 19 nt, Artificial Sequence
  Description of Artificial Sequence: Synthetic oligonucleotide
aacaaaacacuaaauguuc

SEQ ID NO: 3251142 - RNA, 19 nt, Artificial Sequence
  Description of Artificial Sequence: Synthetic oligonucleotide
aaagcagaaaccuuguaau

SEQ ID NO: 3251143 - RNA, 19 nt, Artificial Sequence
  Description of Artificial Sequence: Synthetic oligonucleotide
agcauacaaaagcagaaac

SEQ ID NO: 3251144 - RNA, 19 nt, Artificial Sequence
  Description of Artificial Sequence: Synthetic oligonucleotide
aaagcuuguuuaguuaccc

SEQ ID NO: 3251145 - RNA, 19 nt, Artificial Sequence
  Description of Artificial Sequence: Synthetic oligonucleotide
aaaagcagaaaccuuguaa

SEQ ID NO: 3251146 - RNA, 19 nt, Artificial Sequence
  Description of Artificial Sequence: Synthetic oligonucleotide
ugaagcaucagaacuaaga

SEQ ID NO: 3251147 - RNA, 19 nt, Artificial Sequence
  Description of Artificial Sequence: Synthetic oligonucleotide
aauuucucagaacacaaau

SEQ ID NO: 3251148 - RNA, 19 nt, Artificial Sequence
  Description of Artificial Sequence: Synthetic oligonucleotide
aacccuggaacaccaagcc

SEQ ID NO: 3251149 - RNA, 19 nt, Artificial Sequence
  Description of Artificial Sequence: Synthetic oligonucleotide
uaguaaaauaaguuguccc

SEQ ID NO: 3251150 - RNA, 19 nt, Artificial Sequence
  Description of Artificial Sequence: Synthetic oligonucleotide
uccuaguaaaauaaguugu

SEQ ID NO: 3251151 - RNA, 19 nt, Artificial Sequence
  Description of Artificial Sequence: Synthetic oligonucleotide
agaaaugaaauaaagcuug

SEQ ID NO: 3251152 - RNA, 19 nt, Artificial Sequence
  Description of Artificial Sequence: Synthetic oligonucleotide
aagcaucagaacuaagauc

SEQ ID NO: 3251153 - RNA, 19 nt, Artificial Sequence
  Description of Artificial Sequence: Synthetic oligonucleotide
uaaaacaccuacuucaaaa

SEQ ID NO: 3251154 - RNA, 19 nt, Artificial Sequence
  Description of Artificial Sequence: Synthetic oligonucleotide
uccuaaguaaauuucucag

SEQ ID NO: 3251155 - RNA, 19 nt, Artificial Sequence
  Description of Artificial Sequence: Synthetic oligonucleotide
aguaaaauaaguugucccu

SEQ ID NO: 3251156 - RNA, 19 nt, Artificial Sequence
  Description of Artificial Sequence: Synthetic oligonucleotide
acacaaaucccauaaaaca

SEQ ID NO: 3251157 - RNA, 19 nt, Artificial Sequence
  Description of Artificial Sequence: Synthetic oligonucleotide
cucagaaaugaaauaaagc

SEQ ID NO: 3251158 - RNA, 19 nt, Artificial Sequence
  Description of Artificial Sequence: Synthetic oligonucleotide
cagagaagcauacaaaagc

SEQ ID NO: 3251159 - RNA, 19 nt, Artificial Sequence
  Description of Artificial Sequence: Synthetic oligonucleotide
aaauaaguugucccugaag

SEQ ID NO: 3251160 - RNA, 19 nt, Artificial Sequence
  Description of Artificial Sequence: Synthetic oligonucleotide
gaugcuuaccauuacacca

SEQ ID NO: 3251161 - RNA, 19 nt, Artificial Sequence
  Description of Artificial Sequence: Synthetic oligonucleotide
uuaguuacccucaccauca

SEQ ID NO: 3251162 - RNA, 19 nt, Artificial Sequence
  Description of Artificial Sequence: Synthetic oligonucleotide
ucaacuguacauccaaacc

SEQ ID NO: 3251163 - RNA, 19 nt, Artificial Sequence
  Description of Artificial Sequence: Synthetic oligonucleotide
uaaauguucuccuaaguaa

SEQ ID NO: 3251164 - RNA, 19 nt, Artificial Sequence
  Description of Artificial Sequence: Synthetic oligonucleotide
aacuauguacguugcagag

SEQ ID NO: 3251165 - RNA, 19 nt, Artificial Sequence
  Description of Artificial Sequence: Synthetic oligonucleotide
uuguaaugagcacagagaa

SEQ ID NO: 3251166 - RNA, 19 nt, Artificial Sequence
  Description of Artificial Sequence: Synthetic oligonucleotide
ugcucuaauuuacaagagg

SEQ ID NO: 3251167 - RNA, 19 nt, Artificial Sequence
  Description of Artificial Sequence: Synthetic oligonucleotide
ggauauguaaacuacauga

SEQ ID NO: 3251168 - RNA, 19 nt, Artificial Sequence
  Description of Artificial Sequence: Synthetic oligonucleotide
ucucagaacacaaauccca

SEQ ID NO: 3251169 - RNA, 19 nt, Artificial Sequence
  Description of Artificial Sequence: Synthetic oligonucleotide
uugccugugauuuccaagg

SEQ ID NO: 3251170 - RNA, 19 nt, Artificial Sequence
  Description of Artificial Sequence: Synthetic oligonucleotide
cuauguacguugcagaggc

SEQ ID NO: 3251171 - RNA, 19 nt, Artificial Sequence
  Description of Artificial Sequence: Synthetic oligonucleotide
agcacagagaacaaaacac

SEQ ID NO: 3251172 - RNA, 19 nt, Artificial Sequence
  Description of Artificial Sequence: Synthetic oligonucleotide
agaugcuuaccauuacacc

SEQ ID NO: 3251173 - RNA, 19 nt, Artificial Sequence
  Description of Artificial Sequence: Synthetic oligonucleotide
caacuguacauccaaaccc

SEQ ID NO: 3251174 - RNA, 19 nt, Artificial Sequence
  Description of Artificial Sequence: Synthetic oligonucleotide
aaagcauugcucuaauuua

SEQ ID NO: 3251175 - RNA, 19 nt, Artificial Sequence
  Description of Artificial Sequence: Synthetic oligonucleotide
auuuacaagaggaaaacug

SEQ ID NO: 3251176 - RNA, 19 nt, Artificial Sequence
  Description of Artificial Sequence: Synthetic oligonucleotide
ucuaauuuacaagaggaaa

SEQ ID NO: 3251177 - RNA, 19 nt, Artificial Sequence
  Description of Artificial Sequence: Synthetic oligonucleotide
aaacacuaaauguucuccu

SEQ ID NO: 3251178 - RNA, 19 nt, Artificial Sequence
  Description of Artificial Sequence: Synthetic oligonucleotide
aagccugcaacuauguacg

SEQ ID NO: 3251179 - RNA, 19 nt, Artificial Sequence
  Description of Artificial Sequence: Synthetic oligonucleotide
uuuaguuacccucaccauc

SEQ ID NO: 3251180 - RNA, 19 nt, Artificial Sequence
  Description of Artificial Sequence: Synthetic oligonucleotide
aaacccuggaacaccaagc

SEQ ID NO: 3251181 - RNA, 19 nt, Artificial Sequence
  Description of Artificial Sequence: Synthetic oligonucleotide
guaaugagcacagagaaca

SEQ ID NO: 3251182 - RNA, 19 nt, Artificial Sequence
  Description of Artificial Sequence: Synthetic oligonucleotide
caccucauugguuaggugg

SEQ ID NO: 3251183 - RNA, 19 nt, Artificial Sequence
  Description of Artificial Sequence: Synthetic oligonucleotide
uuaccauuacaccagcacu

SEQ ID NO: 3251184 - RNA, 19 nt, Artificial Sequence
  Description of Artificial Sequence: Synthetic oligonucleotide
agcuuguuuaguuacccuc

SEQ ID NO: 3251185 - RNA, 19 nt, Artificial Sequence
  Description of Artificial Sequence: Synthetic oligonucleotide
aaaauccuaguaaaauaag

SEQ ID NO: 3251186 - RNA, 19 nt, Artificial Sequence
  Description of Artificial Sequence: Synthetic oligonucleotide
aaauccuaguaaaauaagu

SEQ ID NO: 3251187 - RNA, 19 nt, Artificial Sequence
  Description of Artificial Sequence: Synthetic oligonucleotide
ugauuuccaaggaucuggg

SEQ ID NO: 3251188 - RNA, 19 nt, Artificial Sequence
  Description of Artificial Sequence: Synthetic oligonucleotide
uaaaauaaguugucccuga

SEQ ID NO: 3251189 - RNA, 19 nt, Artificial Sequence
  Description of Artificial Sequence: Synthetic oligonucleotide
uagaugcuuaccauuacac

SEQ ID NO: 3251190 - RNA, 19 nt, Artificial Sequence
  Description of Artificial Sequence: Synthetic oligonucleotide
uguacauccaaacccugga

SEQ ID NO: 3251191 - RNA, 19 nt, Artificial Sequence
  Description of Artificial Sequence: Synthetic oligonucleotide
uaauuuacaagaggaaaac

SEQ ID NO: 3251192 - RNA, 19 nt, Artificial Sequence
  Description of Artificial Sequence: Synthetic oligonucleotide
aagcauugcucuaauuuac

SEQ ID NO: 3251193 - RNA, 19 nt, Artificial Sequence
  Description of Artificial Sequence: Synthetic oligonucleotide
caagccugcaacuauguac

SEQ ID NO: 3251194 - RNA, 19 nt, Artificial Sequence
  Description of Artificial Sequence: Synthetic oligonucleotide
aaaccuuguaaugagcaca

SEQ ID NO: 3251195 - RNA, 19 nt, Artificial Sequence
  Description of Artificial Sequence: Synthetic oligonucleotide
ucagaacuaagauccaaga

SEQ ID NO: 3251196 - RNA, 19 nt, Artificial Sequence
  Description of Artificial Sequence: Synthetic oligonucleotide
aguaaauuucucagaacac

SEQ ID NO: 3251197 - RNA, 19 nt, Artificial Sequence
  Description of Artificial Sequence: Synthetic oligonucleotide
cugacaaaaugccacacac

SEQ ID NO: 3251198 - RNA, 19 nt, Artificial Sequence
  Description of Artificial Sequence: Synthetic oligonucleotide
uuaugcuucaacuguacau

SEQ ID NO: 3251199 - RNA, 19 nt, Artificial Sequence
  Description of Artificial Sequence: Synthetic oligonucleotide
auuuccaaggaucugggau

SEQ ID NO: 3251200 - RNA, 19 nt, Artificial Sequence
  Description of Artificial Sequence: Synthetic oligonucleotide
uucuccuaaguaaauuucu

SEQ ID NO: 3251201 - RNA, 19 nt, Artificial Sequence
  Description of Artificial Sequence: Synthetic oligonucleotide
uucaacuguacauccaaac

SEQ ID NO: 3251202 - RNA, 19 nt, Artificial Sequence
  Description of Artificial Sequence: Synthetic oligonucleotide
aauccuaguaaaauaaguu

SEQ ID NO: 3251203 - RNA, 19 nt, Artificial Sequence
  Description of Artificial Sequence: Synthetic oligonucleotide
gacaaaaugccacacaccu

SEQ ID NO: 3251204 - RNA, 19 nt, Artificial Sequence
  Description of Artificial Sequence: Synthetic oligonucleotide
cauugcucuaauuuacaag

SEQ ID NO: 3251205 - RNA, 19 nt, Artificial Sequence
  Description of Artificial Sequence: Synthetic oligonucleotide
agcacucagaacccaaagg

SEQ ID NO: 3251206 - RNA, 19 nt, Artificial Sequence
  Description of Artificial Sequence: Synthetic oligonucleotide
cuuaccauuacaccagcac

SEQ ID NO: 3251207 - RNA, 19 nt, Artificial Sequence
  Description of Artificial Sequence: Synthetic oligonucleotide
aagaggaaaacugaagcau

SEQ ID NO: 3251208 - RNA, 19 nt, Artificial Sequence
  Description of Artificial Sequence: Synthetic oligonucleotide
aagcagaaaccuuguaaug

SEQ ID NO: 3251209 - RNA, 19 nt, Artificial Sequence
  Description of Artificial Sequence: Synthetic oligonucleotide
cucaccaucaccagagaag

SEQ ID NO: 3251210 - RNA, 19 nt, Artificial Sequence
  Description of Artificial Sequence: Synthetic oligonucleotide
uucucagaacacaaauccc

SEQ ID NO: 3251211 - RNA, 19 nt, Artificial Sequence
  Description of Artificial Sequence: Synthetic oligonucleotide
cuaauuuacaagaggaaaa

SEQ ID NO: 3251212 - RNA, 19 nt, Artificial Sequence
  Description of Artificial Sequence: Synthetic oligonucleotide
uacauccaaacccuggaac

SEQ ID NO: 3251213 - RNA, 19 nt, Artificial Sequence
  Description of Artificial Sequence: Synthetic oligonucleotide
uaaagcuuguuuaguuacc

SEQ ID NO: 3251214 - RNA, 19 nt, Artificial Sequence
  Description of Artificial Sequence: Synthetic oligonucleotide
ucaccagagaagcauacaa

SEQ ID NO: 3251215 - RNA, 19 nt, Artificial Sequence
  Description of Artificial Sequence: Synthetic oligonucleotide
gaaaacugaagcaucagaa

SEQ ID NO: 3251216 - RNA, 19 nt, Artificial Sequence
  Description of Artificial Sequence: Synthetic oligonucleotide
ugcaagcucuggcaggugg

SEQ ID NO: 3251217 - RNA, 19 nt, Artificial Sequence
  Description of Artificial Sequence: Synthetic oligonucleotide
uaccuuaucaggaaccacg

SEQ ID NO: 3251218 - RNA, 19 nt, Artificial Sequence
  Description of Artificial Sequence: Synthetic oligonucleotide
uuugccuuuuaccuuauca

SEQ ID NO: 3251219 - RNA, 19 nt, Artificial Sequence
  Description of Artificial Sequence: Synthetic oligonucleotide
uuuuaccuuaucaggaacc

SEQ ID NO: 3251220 - RNA, 19 nt, Artificial Sequence
  Description of Artificial Sequence: Synthetic oligonucleotide
aacaacugcgauugcgucg

SEQ ID NO: 3251221 - RNA, 19 nt, Artificial Sequence
  Description of Artificial Sequence: Synthetic oligonucleotide
aaagaugggagccuccucu

SEQ ID NO: 3251222 - RNA, 19 nt, Artificial Sequence
  Description of Artificial Sequence: Synthetic oligonucleotide
ugcacauuaugacuugccg

SEQ ID NO: 3251223 - RNA, 19 nt, Artificial Sequence
  Description of Artificial Sequence: Synthetic oligonucleotide
ugccuuuuaccuuaucagg

SEQ ID NO: 3251224 - RNA, 19 nt, Artificial Sequence
  Description of Artificial Sequence: Synthetic oligonucleotide
cacauuaugacuugccgag

SEQ ID NO: 3251225 - RNA, 19 nt, Artificial Sequence
  Description of Artificial Sequence: Synthetic oligonucleotide
uugccuuuuaccuuaucag

SEQ ID NO: 3251226 - RNA, 19 nt, Artificial Sequence
  Description of Artificial Sequence: Synthetic oligonucleotide
auugcgucgaagaaggugg

SEQ ID NO: 3251227 - RNA, 19 nt, Artificial Sequence
  Description of Artificial Sequence: Synthetic oligonucleotide
auuaugacuugccgagacc

SEQ ID NO: 3251228 - RNA, 19 nt, Artificial Sequence
  Description of Artificial Sequence: Synthetic oligonucleotide
aagaagguggaguguggcg

SEQ ID NO: 3251229 - RNA, 19 nt, Artificial Sequence
  Description of Artificial Sequence: Synthetic oligonucleotide
agaagguggaguguggcgc

SEQ ID NO: 3251230 - RNA, 19 nt, Artificial Sequence
  Description of Artificial Sequence: Synthetic oligonucleotide
guugacaggaggcauuucc

SEQ ID NO: 3251231 - RNA, 19 nt, Artificial Sequence
  Description of Artificial Sequence: Synthetic oligonucleotide
acaggaggcauuucccagc

SEQ ID NO: 3251232 - RNA, 19 nt, Artificial Sequence
  Description of Artificial Sequence: Synthetic oligonucleotide
uuaugacuugccgagacca

SEQ ID NO: 3251233 - RNA, 19 nt, Artificial Sequence
  Description of Artificial Sequence: Synthetic oligonucleotide
ugacuugccgagaccaccg

SEQ ID NO: 3251234 - RNA, 19 nt, Artificial Sequence
  Description of Artificial Sequence: Synthetic oligonucleotide
uuaucaggaaccacgcaaa

SEQ ID NO: 3251235 - RNA, 19 nt, Artificial Sequence
  Description of Artificial Sequence: Synthetic oligonucleotide
ugggaucugcacauuauga

SEQ ID NO: 3251236 - RNA, 19 nt, Artificial Sequence
  Description of Artificial Sequence: Synthetic oligonucleotide
ggcgccgugacaaagaugg

SEQ ID NO: 3251237 - RNA, 19 nt, Artificial Sequence
  Description of Artificial Sequence: Synthetic oligonucleotide
uccugccacaacaacugcg

SEQ ID NO: 3251238 - RNA, 19 nt, Artificial Sequence
  Description of Artificial Sequence: Synthetic oligonucleotide
uugacaggaggcauuuccc

SEQ ID NO: 3251239 - RNA, 19 nt, Artificial Sequence
  Description of Artificial Sequence: Synthetic oligonucleotide
acugcgauugcgucgaaga

SEQ ID NO: 3251240 - RNA, 19 nt, Artificial Sequence
  Description of Artificial Sequence: Synthetic oligonucleotide
aagaugggagccuccucuc

SEQ ID NO: 3251241 - RNA, 19 nt, Artificial Sequence
  Description of Artificial Sequence: Synthetic oligonucleotide
uuuaccuuaucaggaacca

SEQ ID NO: 3251242 - RNA, 19 nt, Artificial Sequence
  Description of Artificial Sequence: Synthetic oligonucleotide
uugccgagaccaccgaagg

SEQ ID NO: 3251243 - RNA, 19 nt, Artificial Sequence
  Description of Artificial Sequence: Synthetic oligonucleotide
cauuaugacuugccgagac

SEQ ID NO: 3251244 - RNA, 19 nt, Artificial Sequence
  Description of Artificial Sequence: Synthetic oligonucleotide
cuuaucaggaaccacgcaa

SEQ ID NO: 3251245 - RNA, 19 nt, Artificial Sequence
  Description of Artificial Sequence: Synthetic oligonucleotide
ugcgauugcgucgaagaag

SEQ ID NO: 3251246 - RNA, 19 nt, Artificial Sequence
  Description of Artificial Sequence: Synthetic oligonucleotide
gauugcgucgaagaaggug

SEQ ID NO: 3251247 - RNA, 19 nt, Artificial Sequence
  Description of Artificial Sequence: Synthetic oligonucleotide
gacaggaggcauuucccag

SEQ ID NO: 3251248 - RNA, 19 nt, Artificial Sequence
  Description of Artificial Sequence: Synthetic oligonucleotide
augacuugccgagaccacc

SEQ ID NO: 3251249 - RNA, 19 nt, Artificial Sequence
  Description of Artificial Sequence: Synthetic oligonucleotide
cuuuuaccuuaucaggaac

SEQ ID NO: 3251250 - RNA, 19 nt, Artificial Sequence
  Description of Artificial Sequence: Synthetic oligonucleotide
cuugccgagaccaccgaag

SEQ ID NO: 3251251 - RNA, 19 nt, Artificial Sequence
  Description of Artificial Sequence: Synthetic oligonucleotide
ucgaagaagguggagugug

SEQ ID NO: 3251252 - RNA, 19 nt, Artificial Sequence
  Description of Artificial Sequence: Synthetic oligonucleotide
cacaacaacugcgauugcg

SEQ ID NO: 3251253 - RNA, 19 nt, Artificial Sequence
  Description of Artificial Sequence: Synthetic oligonucleotide
accuuaucaggaaccacgc

SEQ ID NO: 3251254 - RNA, 19 nt, Artificial Sequence
  Description of Artificial Sequence: Synthetic oligonucleotide
ggagccuccucucuggugg

SEQ ID NO: 3251255 - RNA, 19 nt, Artificial Sequence
  Description of Artificial Sequence: Synthetic oligonucleotide
augggaucugcacauuaug

SEQ ID NO: 3251256 - RNA, 19 nt, Artificial Sequence
  Description of Artificial Sequence: Synthetic oligonucleotide
aagggaguccugccacaac

SEQ ID NO: 3251257 - RNA, 19 nt, Artificial Sequence
  Description of Artificial Sequence: Synthetic oligonucleotide
ugacaggaggcauuuccca

SEQ ID NO: 3251258 - RNA, 19 nt, Artificial Sequence
  Description of Artificial Sequence: Synthetic oligonucleotide
agggaguccugccacaaca

SEQ ID NO: 3251259 - RNA, 19 nt, Artificial Sequence
  Description of Artificial Sequence: Synthetic oligonucleotide
aggcugaguugacaggagg

SEQ ID NO: 3251260 - RNA, 19 nt, Artificial Sequence
  Description of Artificial Sequence: Synthetic oligonucleotide
gaagaagguggaguguggc

SEQ ID NO: 3251261 - RNA, 19 nt, Artificial Sequence
  Description of Artificial Sequence: Synthetic oligonucleotide
uucccagccaaugggaucu

SEQ ID NO: 3251262 - RNA, 19 nt, Artificial Sequence
  Description of Artificial Sequence: Synthetic oligonucleotide
gccacaacaacugcgauug

SEQ ID NO: 3251263 - RNA, 19 nt, Artificial Sequence
  Description of Artificial Sequence: Synthetic oligonucleotide
cugcacauuaugacuugcc

SEQ ID NO: 3251264 - RNA, 19 nt, Artificial Sequence
  Description of Artificial Sequence: Synthetic oligonucleotide
gaugggagccuccucucug

SEQ ID NO: 3251265 - RNA, 19 nt, Artificial Sequence
  Description of Artificial Sequence: Synthetic oligonucleotide
gaagguggaguguggcgcc

SEQ ID NO: 3251266 - RNA, 19 nt, Artificial Sequence
  Description of Artificial Sequence: Synthetic oligonucleotide
gcauuucccagccaauggg

SEQ ID NO: 3251267 - RNA, 19 nt, Artificial Sequence
  Description of Artificial Sequence: Synthetic oligonucleotide
aguccugccacaacaacug

SEQ ID NO: 3251268 - RNA, 19 nt, Artificial Sequence
  Description of Artificial Sequence: Synthetic oligonucleotide
uguggcgccgugacaaaga

SEQ ID NO: 3251269 - RNA, 19 nt, Artificial Sequence
  Description of Artificial Sequence: Synthetic oligonucleotide
agccaaugggaucugcaca

SEQ ID NO: 3251270 - RNA, 19 nt, Artificial Sequence
  Description of Artificial Sequence: Synthetic oligonucleotide
ggcauuucccagccaaugg

SEQ ID NO: 3251271 - RNA, 19 nt, Artificial Sequence
  Description of Artificial Sequence: Synthetic oligonucleotide
augggagccuccucucugg

SEQ ID NO: 3251272 - RNA, 19 nt, Artificial Sequence
  Description of Artificial Sequence: Synthetic oligonucleotide
gcgauugcgucgaagaagg

SEQ ID NO: 3251273 - RNA, 19 nt, Artificial Sequence
  Description of Artificial Sequence: Synthetic oligonucleotide
acaacugcgauugcgucga

SEQ ID NO: 3251274 - RNA, 19 nt, Artificial Sequence
  Description of Artificial Sequence: Synthetic oligonucleotide
acaacaacugcgauugcgu

SEQ ID NO: 3251275 - RNA, 19 nt, Artificial Sequence
  Description of Artificial Sequence: Synthetic oligonucleotide
ugccgagaccaccgaaggg

SEQ ID NO: 3251276 - RNA, 19 nt, Artificial Sequence
  Description of Artificial Sequence: Synthetic oligonucleotide
uggaguguggcgccgugac

SEQ ID NO: 3251277 - RNA, 19 nt, Artificial Sequence
  Description of Artificial Sequence: Synthetic oligonucleotide
ugaguugacaggaggcauu

SEQ ID NO: 3251278 - RNA, 19 nt, Artificial Sequence
  Description of Artificial Sequence: Synthetic oligonucleotide
uaugacuugccgagaccac

SEQ ID NO: 3251279 - RNA, 19 nt, Artificial Sequence
  Description of Artificial Sequence: Synthetic oligonucleotide
aaugggaucugcacauuau

SEQ ID NO: 3251280 - RNA, 19 nt, Artificial Sequence
  Description of Artificial Sequence: Synthetic oligonucleotide
uaucaggaaccacgcaaaa

SEQ ID NO: 3251281 - RNA, 19 nt, Artificial Sequence
  Description of Artificial Sequence: Synthetic oligonucleotide
ucugcacauuaugacuugc

SEQ ID NO: 3251282 - RNA, 19 nt, Artificial Sequence
  Description of Artificial Sequence: Synthetic oligonucleotide
acaggcugaguugacagga

SEQ ID NO: 3251283 - RNA, 19 nt, Artificial Sequence
  Description of Artificial Sequence: Synthetic oligonucleotide
aucugcacauuaugacuug

SEQ ID NO: 3251284 - RNA, 19 nt, Artificial Sequence
  Description of Artificial Sequence: Synthetic oligonucleotide
gggaucugcacauuaugac

SEQ ID NO: 3251285 - RNA, 19 nt, Artificial Sequence
  Description of Artificial Sequence: Synthetic oligonucleotide
gagaccaccgaagggaguc

SEQ ID NO: 3251286 - RNA, 19 nt, Artificial Sequence
  Description of Artificial Sequence: Synthetic oligonucleotide
cacaggcugaguugacagg

SEQ ID NO: 3251287 - RNA, 19 nt, Artificial Sequence
  Description of Artificial Sequence: Synthetic oligonucleotide
uuucccagccaaugggauc

SEQ ID NO: 3251288 - RNA, 19 nt, Artificial Sequence
  Description of Artificial Sequence: Synthetic oligonucleotide
cagccaaugggaucugcac

SEQ ID NO: 3251289 - RNA, 19 nt, Artificial Sequence
  Description of Artificial Sequence: Synthetic oligonucleotide
acaaagaugggagccuccu

SEQ ID NO: 3251290 - RNA, 19 nt, Artificial Sequence
  Description of Artificial Sequence: Synthetic oligonucleotide
cauuucccagccaauggga

SEQ ID NO: 3251291 - RNA, 19 nt, Artificial Sequence
  Description of Artificial Sequence: Synthetic oligonucleotide
caggaggcauuucccagcc

SEQ ID NO: 3251292 - RNA, 19 nt, Artificial Sequence
  Description of Artificial Sequence: Synthetic oligonucleotide
caacaacugcgauugcguc

SEQ ID NO: 3251293 - RNA, 19 nt, Artificial Sequence
  Description of Artificial Sequence: Synthetic oligonucleotide
aacugcgauugcgucgaag

SEQ ID NO: 3251294 - RNA, 19 nt, Artificial Sequence
  Description of Artificial Sequence: Synthetic oligonucleotide
uuaccuuaucaggaaccac

SEQ ID NO: 3251295 - RNA, 19 nt, Artificial Sequence
  Description of Artificial Sequence: Synthetic oligonucleotide
ugacaaagaugggagccuc

SEQ ID NO: 3251296 - RNA, 19 nt, Artificial Sequence
  Description of Artificial Sequence: Synthetic oligonucleotide
ugccacaacaacugcgauu

SEQ ID NO: 3251297 - RNA, 19 nt, Artificial Sequence
  Description of Artificial Sequence: Synthetic oligonucleotide
accgaagggaguccugcca

SEQ ID NO: 3251298 - RNA, 19 nt, Artificial Sequence
  Description of Artificial Sequence: Synthetic oligonucleotide
gacaaagaugggagccucc

SEQ ID NO: 3251299 - RNA, 19 nt, Artificial Sequence
  Description of Artificial Sequence: Synthetic oligonucleotide
gcacauuaugacuugccga

SEQ ID NO: 3251300 - RNA, 19 nt, Artificial Sequence
  Description of Artificial Sequence: Synthetic oligonucleotide
gccgugacaaagaugggag

SEQ ID NO: 3251301 - RNA, 19 nt, Artificial Sequence
  Description of Artificial Sequence: Synthetic oligonucleotide
gaguguggcgccgugacaa

SEQ ID NO: 3251302 - RNA, 19 nt, Artificial Sequence
  Description of Artificial Sequence: Synthetic oligonucleotide
aagguggaguguggcgccg

SEQ ID NO: 3251303 - RNA, 19 nt, Artificial Sequence
  Description of Artificial Sequence: Synthetic oligonucleotide
aggcauuucccagccaaug

SEQ ID NO: 3251304 - RNA, 19 nt, Artificial Sequence
  Description of Artificial Sequence: Synthetic oligonucleotide
agaccaccgaagggagucc

SEQ ID NO: 3251305 - RNA, 19 nt, Artificial Sequence
  Description of Artificial Sequence: Synthetic oligonucleotide
agaugggagccuccucucu

SEQ ID NO: 3251306 - RNA, 19 nt, Artificial Sequence
  Description of Artificial Sequence: Synthetic oligonucleotide
uugcgucgaagaaggugga

SEQ ID NO: 3251307 - RNA, 19 nt, Artificial Sequence
  Description of Artificial Sequence: Synthetic oligonucleotide
gaucugcacauuaugacuu

SEQ ID NO: 3251308 - RNA, 19 nt, Artificial Sequence
  Description of Artificial Sequence: Synthetic oligonucleotide
uuuugccuuuuaccuuauc

SEQ ID NO: 3251309 - RNA, 19 nt, Artificial Sequence
  Description of Artificial Sequence: Synthetic oligonucleotide
ggaucugcacauuaugacu

SEQ ID NO: 3251310 - RNA, 19 nt, Artificial Sequence
  Description of Artificial Sequence: Synthetic oligonucleotide
caggcugaguugacaggag

SEQ ID NO: 3251311 - RNA, 19 nt, Artificial Sequence
  Description of Artificial Sequence: Synthetic oligonucleotide
ggaggcauuucccagccaa

SEQ ID NO: 3251312 - RNA, 19 nt, Artificial Sequence
  Description of Artificial Sequence: Synthetic oligonucleotide
cgugacaaagaugggagcc

SEQ ID NO: 3251313 - RNA, 19 nt, Artificial Sequence
  Description of Artificial Sequence: Synthetic oligonucleotide
caaagaugggagccuccuc

SEQ ID NO: 3251314 - RNA, 19 nt, Artificial Sequence
  Description of Artificial Sequence: Synthetic oligonucleotide
ggcugaguugacaggaggc

SEQ ID NO: 3251315 - RNA, 19 nt, Artificial Sequence
  Description of Artificial Sequence: Synthetic oligonucleotide
ugcgucgaagaagguggag

SEQ ID NO: 3251316 - RNA, 19 nt, Artificial Sequence
  Description of Artificial Sequence: Synthetic oligonucleotide
caccgaagggaguccugcc

SEQ ID NO: 3251317 - RNA, 19 nt, Artificial Sequence
  Description of Artificial Sequence: Synthetic oligonucleotide
aauaguacaauaauaaucg

SEQ ID NO: 3251318 - RNA, 19 nt, Artificial Sequence
  Description of Artificial Sequence: Synthetic oligonucleotide
aaaauuaagaauuuuauuu

SEQ ID NO: 3251319 - RNA, 19 nt, Artificial Sequence
  Description of Artificial Sequence: Synthetic oligonucleotide
aaauuaagaauuuuauuuc

SEQ ID NO: 3251320 - RNA, 19 nt, Artificial Sequence
  Description of Artificial Sequence: Synthetic oligonucleotide
cuuuauauaaacauuauug

SEQ ID NO: 3251321 - RNA, 19 nt, Artificial Sequence
  Description of Artificial Sequence: Synthetic oligonucleotide
uaagaaauaauaaauuuug

SEQ ID NO: 3251322 - RNA, 19 nt, Artificial Sequence
  Description of Artificial Sequence: Synthetic oligonucleotide
agugugagcaaauaaaggc

SEQ ID NO: 3251323 - RNA, 19 nt, Artificial Sequence
  Description of Artificial Sequence: Synthetic oligonucleotide
aaauaauaaauuuugacuu

SEQ ID NO: 3251324 - RNA, 19 nt, Artificial Sequence
  Description of Artificial Sequence: Synthetic oligonucleotide
uaugauacaaaacacaggu

SEQ ID NO: 3251325 - RNA, 19 nt, Artificial Sequence
  Description of Artificial Sequence: Synthetic oligonucleotide
agaaauaauaaauuuugac

SEQ ID NO: 3251326 - RNA, 19 nt, Artificial Sequence
  Description of Artificial Sequence: Synthetic oligonucleotide
uccauuaugauacaaaaca

SEQ ID NO: 3251327 - RNA, 19 nt, Artificial Sequence
  Description of Artificial Sequence: Synthetic oligonucleotide
auaaauuuugacuuguuuc

SEQ ID NO: 3251328 - RNA, 19 nt, Artificial Sequence
  Description of Artificial Sequence: Synthetic oligonucleotide
aaauuuacaauacuccuug

SEQ ID NO: 3251329 - RNA, 19 nt, Artificial Sequence
  Description of Artificial Sequence: Synthetic oligonucleotide
aauaagaaauaauaaauuu

SEQ ID NO: 3251330 - RNA, 19 nt, Artificial Sequence
  Description of Artificial Sequence: Synthetic oligonucleotide
uuuuguaugagcuuuauau

SEQ ID NO: 3251331 - RNA, 19 nt, Artificial Sequence
  Description of Artificial Sequence: Synthetic oligonucleotide
uuuauauaaacauuauuga

SEQ ID NO: 3251332 - RNA, 19 nt, Artificial Sequence
  Description of Artificial Sequence: Synthetic oligonucleotide
uuaaaauaagaaauaauaa

SEQ ID NO: 3251333 - RNA, 19 nt, Artificial Sequence
  Description of Artificial Sequence: Synthetic oligonucleotide
aaaaucuuacauuagaaua

SEQ ID NO: 3251334 - RNA, 19 nt, Artificial Sequence
  Description of Artificial Sequence: Synthetic oligonucleotide
uaaaauaagaaauaauaaa

SEQ ID NO: 3251335 - RNA, 19 nt, Artificial Sequence
  Description of Artificial Sequence: Synthetic oligonucleotide
uguguaaacacguuaauca

SEQ ID NO: 3251336 - RNA, 19 nt, Artificial Sequence
  Description of Artificial Sequence: Synthetic oligonucleotide
aaaauaagaaauaauaaau

SEQ ID NO: 3251337 - RNA, 19 nt, Artificial Sequence
  Description of Artificial Sequence: Synthetic oligonucleotide
aauaauaaauuuugacuug

SEQ ID NO: 3251338 - RNA, 19 nt, Artificial Sequence
  Description of Artificial Sequence: Synthetic oligonucleotide
aagaauaguaaguacaaaa

SEQ ID NO: 3251339 - RNA, 19 nt, Artificial Sequence
  Description of Artificial Sequence: Synthetic oligonucleotide
aauuaagaauuuuauuucu

SEQ ID NO: 3251340 - RNA, 19 nt, Artificial Sequence
  Description of Artificial Sequence: Synthetic oligonucleotide
uagaauaguacaauaauaa

SEQ ID NO: 3251341 - RNA, 19 nt, Artificial Sequence
  Description of Artificial Sequence: Synthetic oligonucleotide
aaaucuuacauuagaauag

SEQ ID NO: 3251342 - RNA, 19 nt, Artificial Sequence
  Description of Artificial Sequence: Synthetic oligonucleotide
aauaauaaucgccaguaaa

SEQ ID NO: 3251343 - RNA, 19 nt, Artificial Sequence
  Description of Artificial Sequence: Synthetic oligonucleotide
aguaaaauuuacaauacuc

SEQ ID NO: 3251344 - RNA, 19 nt, Artificial Sequence
  Description of Artificial Sequence: Synthetic oligonucleotide
gaaauaauaaauuuugacu

SEQ ID NO: 3251345 - RNA, 19 nt, Artificial Sequence
  Description of Artificial Sequence: Synthetic oligonucleotide
ugauacaaaacacagguua

SEQ ID NO: 3251346 - RNA, 19 nt, Artificial Sequence
  Description of Artificial Sequence: Synthetic oligonucleotide
ugaaaauuaagaauuuuau

SEQ ID NO: 3251347 - RNA, 19 nt, Artificial Sequence
  Description of Artificial Sequence: Synthetic oligonucleotide
aauaguaaguacaaaauaa

SEQ ID NO: 3251348 - RNA, 19 nt, Artificial Sequence
  Description of Artificial Sequence: Synthetic oligonucleotide
uaaauuuugacuuguuucu

SEQ ID NO: 3251349 - RNA, 19 nt, Artificial Sequence
  Description of Artificial Sequence: Synthetic oligonucleotide
ucuuacauuagaauaguac

SEQ ID NO: 3251350 - RNA, 19 nt, Artificial Sequence
  Description of Artificial Sequence: Synthetic oligonucleotide
uaaaauuuacaauacuccu

SEQ ID NO: 3251351 - RNA, 19 nt, Artificial Sequence
  Description of Artificial Sequence: Synthetic oligonucleotide
agaauuuuauuucugaaaa

SEQ ID NO: 3251352 - RNA, 19 nt, Artificial Sequence
  Description of Artificial Sequence: Synthetic oligonucleotide
uuuacaauacuccuuguaa

SEQ ID NO: 3251353 - RNA, 19 nt, Artificial Sequence
  Description of Artificial Sequence: Synthetic oligonucleotide
uguuucuuguguaaacacg

SEQ ID NO: 3251354 - RNA, 19 nt, Artificial Sequence
  Description of Artificial Sequence: Synthetic oligonucleotide
uuaugauacaaaacacagg

SEQ ID NO: 3251355 - RNA, 19 nt, Artificial Sequence
  Description of Artificial Sequence: Synthetic oligonucleotide
uaguacaauaauaaucgcc

SEQ ID NO: 3251356 - RNA, 19 nt, Artificial Sequence
  Description of Artificial Sequence: Synthetic oligonucleotide
auuaugauacaaaacacag

SEQ ID NO: 3251357 - RNA, 19 nt, Artificial Sequence
  Description of Artificial Sequence: Synthetic oligonucleotide
uuaagaauuuuauuucuga

SEQ ID NO: 3251358 - RNA, 19 nt, Artificial Sequence
  Description of Artificial Sequence: Synthetic oligonucleotide
guaaaauuuacaauacucc

SEQ ID NO: 3251359 - RNA, 19 nt, Artificial Sequence
  Description of Artificial Sequence: Synthetic oligonucleotide
aagaauuuuauuucugaaa

SEQ ID NO: 3251360 - RNA, 19 nt, Artificial Sequence
  Description of Artificial Sequence: Synthetic oligonucleotide
gaauaguacaauaauaauc

SEQ ID NO: 3251361 - RNA, 19 nt, Artificial Sequence
  Description of Artificial Sequence: Synthetic oligonucleotide
uugaaaauuaagaauuuua

SEQ ID NO: 3251362 - RNA, 19 nt, Artificial Sequence
  Description of Artificial Sequence: Synthetic oligonucleotide
uuagaauaguacaauaaua

SEQ ID NO: 3251363 - RNA, 19 nt, Artificial Sequence
  Description of Artificial Sequence: Synthetic oligonucleotide
uaaagaauaguaaguacaa

SEQ ID NO: 3251364 - RNA, 19 nt, Artificial Sequence
  Description of Artificial Sequence: Synthetic oligonucleotide
aauuuugacuuguuucuug

SEQ ID NO: 3251365 - RNA, 19 nt, Artificial Sequence
  Description of Artificial Sequence: Synthetic oligonucleotide
guuaaaauaagaaauaaua

SEQ ID NO: 3251366 - RNA, 19 nt, Artificial Sequence
  Description of Artificial Sequence: Synthetic oligonucleotide
cuuacauuagaauaguaca

SEQ ID NO: 3251367 - RNA, 19 nt, Artificial Sequence
  Description of Artificial Sequence: Synthetic oligonucleotide
aauaaauuuugacuuguuu

SEQ ID NO: 3251368 - RNA, 19 nt, Artificial Sequence
  Description of Artificial Sequence: Synthetic oligonucleotide
uacaauacuccuuguaaag

SEQ ID NO: 3251369 - RNA, 19 nt, Artificial Sequence
  Description of Artificial Sequence: Synthetic oligonucleotide
auuagaauaguacaauaau

SEQ ID NO: 3251370 - RNA, 19 nt, Artificial Sequence
  Description of Artificial Sequence: Synthetic oligonucleotide
uuuuggagcccuuuacugg

SEQ ID NO: 3251371 - RNA, 19 nt, Artificial Sequence
  Description of Artificial Sequence: Synthetic oligonucleotide
uagugugagcaaauaaagg

SEQ ID NO: 3251372 - RNA, 19 nt, Artificial Sequence
  Description of Artificial Sequence: Synthetic oligonucleotide
auaguacaauaauaaucgc

SEQ ID NO: 3251373 - RNA, 19 nt, Artificial Sequence
  Description of Artificial Sequence: Synthetic oligonucleotide
cuagugugagcaaauaaag

SEQ ID NO: 3251374 - RNA, 19 nt, Artificial Sequence
  Description of Artificial Sequence: Synthetic oligonucleotide
uguaaagaauaguaaguac

SEQ ID NO: 3251375 - RNA, 19 nt, Artificial Sequence
  Description of Artificial Sequence: Synthetic oligonucleotide
uuacauuagaauaguacaa

SEQ ID NO: 3251376 - RNA, 19 nt, Artificial Sequence
  Description of Artificial Sequence: Synthetic oligonucleotide
uuugacuuguuucuugugu

SEQ ID NO: 3251377 - RNA, 19 nt, Artificial Sequence
  Description of Artificial Sequence: Synthetic oligonucleotide
aaauaagaaauaauaaauu

SEQ ID NO: 3251378 - RNA, 19 nt, Artificial Sequence
  Description of Artificial Sequence: Synthetic oligonucleotide
aguacaauaauaaucgcca

SEQ ID NO: 3251379 - RNA, 19 nt, Artificial Sequence
  Description of Artificial Sequence: Synthetic oligonucleotide
uuguaugagcuuuauauaa

SEQ ID NO: 3251380 - RNA, 19 nt, Artificial Sequence
  Description of Artificial Sequence: Synthetic oligonucleotide
uaguaaguacaaaauaaaa

SEQ ID NO: 3251381 - RNA, 19 nt, Artificial Sequence
  Description of Artificial Sequence: Synthetic oligonucleotide
ucuuguguaaacacguuaa

SEQ ID NO: 3251382 - RNA, 19 nt, Artificial Sequence
  Description of Artificial Sequence: Synthetic oligonucleotide
augagcuuuauauaaacau

SEQ ID NO: 3251383 - RNA, 19 nt, Artificial Sequence
  Description of Artificial Sequence: Synthetic oligonucleotide
acuuguuucuuguguaaac

SEQ ID NO: 3251384 - RNA, 19 nt, Artificial Sequence
  Description of Artificial Sequence: Synthetic oligonucleotide
acagguuaaaauaagaaau

SEQ ID NO: 3251385 - RNA, 19 nt, Artificial Sequence
  Description of Artificial Sequence: Synthetic oligonucleotide
aaguacgccaaacuagugu

SEQ ID NO: 3251386 - RNA, 19 nt, Artificial Sequence
  Description of Artificial Sequence: Synthetic oligonucleotide
aaaacacagguuaaaauaa

SEQ ID NO: 3251387 - RNA, 19 nt, Artificial Sequence
  Description of Artificial Sequence: Synthetic oligonucleotide
aaacacguuaaucaauuuu

SEQ ID NO: 3251388 - RNA, 19 nt, Artificial Sequence
  Description of Artificial Sequence: Synthetic oligonucleotide
guaaagaauaguaaguaca

SEQ ID NO: 3251389 - RNA, 19 nt, Artificial Sequence
  Description of Artificial Sequence: Synthetic oligonucleotide
aguacgccaaacuagugug

SEQ ID NO: 3251390 - RNA, 19 nt, Artificial Sequence
  Description of Artificial Sequence: Synthetic oligonucleotide
uaugagcuuuauauaaaca

SEQ ID NO: 3251391 - RNA, 19 nt, Artificial Sequence
  Description of Artificial Sequence: Synthetic oligonucleotide
uguccauuaugauacaaaa

SEQ ID NO: 3251392 - RNA, 19 nt, Artificial Sequence
  Description of Artificial Sequence: Synthetic oligonucleotide
aaaaguacgccaaacuagu

SEQ ID NO: 3251393 - RNA, 19 nt, Artificial Sequence
  Description of Artificial Sequence: Synthetic oligonucleotide
uacaauaauaaucgccagu

SEQ ID NO: 3251394 - RNA, 19 nt, Artificial Sequence
  Description of Artificial Sequence: Synthetic oligonucleotide
aauaaucgccaguaaaauu

SEQ ID NO: 3251395 - RNA, 19 nt, Artificial Sequence
  Description of Artificial Sequence: Synthetic oligonucleotide
uaagaauuuuauuucugaa

SEQ ID NO: 3251396 - RNA, 19 nt, Artificial Sequence
  Description of Artificial Sequence: Synthetic oligonucleotide
uacugguuuuguaugagcu

SEQ ID NO: 3251397 - RNA, 19 nt, Artificial Sequence
  Description of Artificial Sequence: Synthetic oligonucleotide
uuccgcauguccauuauga

SEQ ID NO: 3251398 - RNA, 19 nt, Artificial Sequence
  Description of Artificial Sequence: Synthetic oligonucleotide
uacuccuuguaaagaauag

SEQ ID NO: 3251399 - RNA, 19 nt, Artificial Sequence
  Description of Artificial Sequence: Synthetic oligonucleotide
cauuaugauacaaaacaca

SEQ ID NO: 3251400 - RNA, 19 nt, Artificial Sequence
  Description of Artificial Sequence: Synthetic oligonucleotide
uuacaauacuccuuguaaa

SEQ ID NO: 3251401 - RNA, 19 nt, Artificial Sequence
  Description of Artificial Sequence: Synthetic oligonucleotide
gaauaguaaguacaaaaua

SEQ ID NO: 3251402 - RNA, 19 nt, Artificial Sequence
  Description of Artificial Sequence: Synthetic oligonucleotide
caaaacacagguuaaaaua

SEQ ID NO: 3251403 - RNA, 19 nt, Artificial Sequence
  Description of Artificial Sequence: Synthetic oligonucleotide
ugugagcaaauaaaggcau

SEQ ID NO: 3251404 - RNA, 19 nt, Artificial Sequence
  Description of Artificial Sequence: Synthetic oligonucleotide
agaauaguacaauaauaau

SEQ ID NO: 3251405 - RNA, 19 nt, Artificial Sequence
  Description of Artificial Sequence: Synthetic oligonucleotide
ugagcuuuauauaaacauu

SEQ ID NO: 3251406 - RNA, 19 nt, Artificial Sequence
  Description of Artificial Sequence: Synthetic oligonucleotide
uguaaacacguuaaucaau

SEQ ID NO: 3251407 - RNA, 19 nt, Artificial Sequence
  Description of Artificial Sequence: Synthetic oligonucleotide
aagaaauaauaaauuuuga

SEQ ID NO: 3251408 - RNA, 19 nt, Artificial Sequence
  Description of Artificial Sequence: Synthetic oligonucleotide
uguaugagcuuuauauaaa

SEQ ID NO: 3251409 - RNA, 19 nt, Artificial Sequence
  Description of Artificial Sequence: Synthetic oligonucleotide
aacuagugugagcaaauaa

SEQ ID NO: 3251410 - RNA, 19 nt, Artificial Sequence
  Description of Artificial Sequence: Synthetic oligonucleotide
aaucuuacauuagaauagu

SEQ ID NO: 3251411 - RNA, 19 nt, Artificial Sequence
  Description of Artificial Sequence: Synthetic oligonucleotide
auaagaaauaauaaauuuu

SEQ ID NO: 3251412 - RNA, 19 nt, Artificial Sequence
  Description of Artificial Sequence: Synthetic oligonucleotide
auaauaaauuuugacuugu

SEQ ID NO: 3251413 - RNA, 19 nt, Artificial Sequence
  Description of Artificial Sequence: Synthetic oligonucleotide
uuuguaugagcuuuauaua

SEQ ID NO: 3251414 - RNA, 19 nt, Artificial Sequence
  Description of Artificial Sequence: Synthetic oligonucleotide
aaaauuuacaauacuccuu

SEQ ID NO: 3251415 - RNA, 19 nt, Artificial Sequence
  Description of Artificial Sequence: Synthetic oligonucleotide
acaaaacacagguuaaaau

SEQ ID NO: 3251416 - RNA, 19 nt, Artificial Sequence
  Description of Artificial Sequence: Synthetic oligonucleotide
ucgccaguaaaauuuacaa

SEQ ID NO: 3251417 - RNA, 19 nt, Artificial Sequence
  Description of Artificial Sequence: Synthetic oligonucleotide
agugccaccaguuugaagc

SEQ ID NO: 3251418 - RNA, 19 nt, Artificial Sequence
  Description of Artificial Sequence: Synthetic oligonucleotide
ucauguauuuaacuaaucg

SEQ ID NO: 3251419 - RNA, 19 nt, Artificial Sequence
  Description of Artificial Sequence: Synthetic oligonucleotide
acugccaugaaucacauuc

SEQ ID NO: 3251420 - RNA, 19 nt, Artificial Sequence
  Description of Artificial Sequence: Synthetic oligonucleotide
cauguauuuaacuaaucgg

SEQ ID NO: 3251421 - RNA, 19 nt, Artificial Sequence
  Description of Artificial Sequence: Synthetic oligonucleotide
auguauuuaacuaaucggc

SEQ ID NO: 3251422 - RNA, 19 nt, Artificial Sequence
  Description of Artificial Sequence: Synthetic oligonucleotide
gauggugccaggcauagcg

SEQ ID NO: 3251423 - RNA, 19 nt, Artificial Sequence
  Description of Artificial Sequence: Synthetic oligonucleotide
aagagguuggcgaagaugg

SEQ ID NO: 3251424 - RNA, 19 nt, Artificial Sequence
  Description of Artificial Sequence: Synthetic oligonucleotide
aagccuuuccucucaaagc

SEQ ID NO: 3251425 - RNA, 19 nt, Artificial Sequence
  Description of Artificial Sequence: Synthetic oligonucleotide
uucacugccaagaacgugc

SEQ ID NO: 3251426 - RNA, 19 nt, Artificial Sequence
  Description of Artificial Sequence: Synthetic oligonucleotide
ucaguggccccuaugaggg

SEQ ID NO: 3251427 - RNA, 19 nt, Artificial Sequence
  Description of Artificial Sequence: Synthetic oligonucleotide
aaucacauucuugccaacc

SEQ ID NO: 3251428 - RNA, 19 nt, Artificial Sequence
  Description of Artificial Sequence: Synthetic oligonucleotide
uauuuaacuaaucggcugu

SEQ ID NO: 3251429 - RNA, 19 nt, Artificial Sequence
  Description of Artificial Sequence: Synthetic oligonucleotide
acuaaucggcuguagaagg

SEQ ID NO: 3251430 - RNA, 19 nt, Artificial Sequence
  Description of Artificial Sequence: Synthetic oligonucleotide
guuagcaccaggcagauca

SEQ ID NO: 3251431 - RNA, 19 nt, Artificial Sequence
  Description of Artificial Sequence: Synthetic oligonucleotide
ucugugagcacuuuccacc

SEQ ID NO: 3251432 - RNA, 19 nt, Artificial Sequence
  Description of Artificial Sequence: Synthetic oligonucleotide
gaugguuagcaccaggcag

SEQ ID NO: 3251433 - RNA, 19 nt, Artificial Sequence
  Description of Artificial Sequence: Synthetic oligonucleotide
auucuugccaaccuccacg

SEQ ID NO: 3251434 - RNA, 19 nt, Artificial Sequence
  Description of Artificial Sequence: Synthetic oligonucleotide
accaguuugaagccuuucc

SEQ ID NO: 3251435 - RNA, 19 nt, Artificial Sequence
  Description of Artificial Sequence: Synthetic oligonucleotide
agccuuuccucucaaagcg

SEQ ID NO: 3251436 - RNA, 19 nt, Artificial Sequence
  Description of Artificial Sequence: Synthetic oligonucleotide
uuuagugccaccaguuuga

SEQ ID NO: 3251437 - RNA, 19 nt, Artificial Sequence
  Description of Artificial Sequence: Synthetic oligonucleotide
uguagaagggucuuucgug

SEQ ID NO: 3251438 - RNA, 19 nt, Artificial Sequence
  Description of Artificial Sequence: Synthetic oligonucleotide
uuaacuaaucggcuguaga

SEQ ID NO: 3251439 - RNA, 19 nt, Artificial Sequence
  Description of Artificial Sequence: Synthetic oligonucleotide
aaagcgacgcacgaucucg

SEQ ID NO: 3251440 - RNA, 19 nt, Artificial Sequence
  Description of Artificial Sequence: Synthetic oligonucleotide
auaaugcucccgcagcagc

SEQ ID NO: 3251441 - RNA, 19 nt, Artificial Sequence
  Description of Artificial Sequence: Synthetic oligonucleotide
uaggcugcgggaaagaggu

SEQ ID NO: 3251442 - RNA, 19 nt, Artificial Sequence
  Description of Artificial Sequence: Synthetic oligonucleotide
cuucacuagcuuuagugcc

SEQ ID NO: 3251443 - RNA, 19 nt, Artificial Sequence
  Description of Artificial Sequence: Synthetic oligonucleotide
cacaccauggccaccaccg

SEQ ID NO: 3251444 - RNA, 19 nt, Artificial Sequence
  Description of Artificial Sequence: Synthetic oligonucleotide
aacuaaucggcuguagaag

SEQ ID NO: 3251445 - RNA, 19 nt, Artificial Sequence
  Description of Artificial Sequence: Synthetic oligonucleotide
guauuuaacuaaucggcug

SEQ ID NO: 3251446 - RNA, 19 nt, Artificial Sequence
  Description of Artificial Sequence: Synthetic oligonucleotide
aaccuccacgcagaaaucc

SEQ ID NO: 3251447 - RNA, 19 nt, Artificial Sequence
  Description of Artificial Sequence: Synthetic oligonucleotide
ugaaucacauucuugccaa

SEQ ID NO: 3251448 - RNA, 19 nt, Artificial Sequence
  Description of Artificial Sequence: Synthetic oligonucleotide
aaccaaacgccgcaaucuc

SEQ ID NO: 3251449 - RNA, 19 nt, Artificial Sequence
  Description of Artificial Sequence: Synthetic oligonucleotide
uaacuaaucggcuguagaa

SEQ ID NO: 3251450 - RNA, 19 nt, Artificial Sequence
  Description of Artificial Sequence: Synthetic oligonucleotide
cagaaauccccacggaugg

SEQ ID NO: 3251451 - RNA, 19 nt, Artificial Sequence
  Description of Artificial Sequence: Synthetic oligonucleotide
aguuugaagccuuuccucu

SEQ ID NO: 3251452 - RNA, 19 nt, Artificial Sequence
  Description of Artificial Sequence: Synthetic oligonucleotide
augaaucacauucuugcca

SEQ ID NO: 3251453 - RNA, 19 nt, Artificial Sequence
  Description of Artificial Sequence: Synthetic oligonucleotide
aacgugcgcucguucacgc

SEQ ID NO: 3251454 - RNA, 19 nt, Artificial Sequence
  Description of Artificial Sequence: Synthetic oligonucleotide
ccaugaaucacauucuugc

SEQ ID NO: 3251455 - RNA, 19 nt, Artificial Sequence
  Description of Artificial Sequence: Synthetic oligonucleotide
uuuccaccgagucacugcc

SEQ ID NO: 3251456 - RNA, 19 nt, Artificial Sequence
  Description of Artificial Sequence: Synthetic oligonucleotide
aaagagguuggcgaagaug

SEQ ID NO: 3251457 - RNA, 19 nt, Artificial Sequence
  Description of Artificial Sequence: Synthetic oligonucleotide
aauccccacggauggugcc

SEQ ID NO: 3251458 - RNA, 19 nt, Artificial Sequence
  Description of Artificial Sequence: Synthetic oligonucleotide
cacauucuugccaaccucc

SEQ ID NO: 3251459 - RNA, 19 nt, Artificial Sequence
  Description of Artificial Sequence: Synthetic oligonucleotide
aagaacgugcgcucguuca

SEQ ID NO: 3251460 - RNA, 19 nt, Artificial Sequence
  Description of Artificial Sequence: Synthetic oligonucleotide
guagaagggucuuucgugc

SEQ ID NO: 3251461 - RNA, 19 nt, Artificial Sequence
  Description of Artificial Sequence: Synthetic oligonucleotide
cucucugugagcacuuucc

SEQ ID NO: 3251462 - RNA, 19 nt, Artificial Sequence
  Description of Artificial Sequence: Synthetic oligonucleotide
caugaaucacauucuugcc

SEQ ID NO: 3251463 - RNA, 19 nt, Artificial Sequence
  Description of Artificial Sequence: Synthetic oligonucleotide
uuuccucucaaagcgacgc

SEQ ID NO: 3251464 - RNA, 19 nt, Artificial Sequence
  Description of Artificial Sequence: Synthetic oligonucleotide
gucaguggccccuaugagg

SEQ ID NO: 3251465 - RNA, 19 nt, Artificial Sequence
  Description of Artificial Sequence: Synthetic oligonucleotide
cuuuagugccaccaguuug

SEQ ID NO: 3251466 - RNA, 19 nt, Artificial Sequence
  Description of Artificial Sequence: Synthetic oligonucleotide
agagcucauguauuuaacu

SEQ ID NO: 3251467 - RNA, 19 nt, Artificial Sequence
  Description of Artificial Sequence: Synthetic oligonucleotide
uucacuagcuuuagugcca

SEQ ID NO: 3251468 - RNA, 19 nt, Artificial Sequence
  Description of Artificial Sequence: Synthetic oligonucleotide
cuaaucggcuguagaaggg

SEQ ID NO: 3251469 - RNA, 19 nt, Artificial Sequence
  Description of Artificial Sequence: Synthetic oligonucleotide
ggcuucacugccaagaacg

SEQ ID NO: 3251470 - RNA, 19 nt, Artificial Sequence
  Description of Artificial Sequence: Synthetic oligonucleotide
cuugccaaccuccacgcag

SEQ ID NO: 3251471 - RNA, 19 nt, Artificial Sequence
  Description of Artificial Sequence: Synthetic oligonucleotide
aaauccccacggauggugc

SEQ ID NO: 3251472 - RNA, 19 nt, Artificial Sequence
  Description of Artificial Sequence: Synthetic oligonucleotide
ucguucacgccgcuguagg

SEQ ID NO: 3251473 - RNA, 19 nt, Artificial Sequence
  Description of Artificial Sequence: Synthetic oligonucleotide
uuggcgaagaugguuagca

SEQ ID NO: 3251474 - RNA, 19 nt, Artificial Sequence
  Description of Artificial Sequence: Synthetic oligonucleotide
cacgcagaaauccccacgg

SEQ ID NO: 3251475 - RNA, 19 nt, Artificial Sequence
  Description of Artificial Sequence: Synthetic oligonucleotide
uuuaacuaaucggcuguag

SEQ ID NO: 3251476 - RNA, 19 nt, Artificial Sequence
  Description of Artificial Sequence: Synthetic oligonucleotide
agcucauguauuuaacuaa

SEQ ID NO: 3251477 - RNA, 19 nt, Artificial Sequence
  Description of Artificial Sequence: Synthetic oligonucleotide
ugcagcuccgcauaaugcu

SEQ ID NO: 3251478 - RNA, 19 nt, Artificial Sequence
  Description of Artificial Sequence: Synthetic oligonucleotide
ucuucggaggccuucacua

SEQ ID NO: 3251479 - RNA, 19 nt, Artificial Sequence
  Description of Artificial Sequence: Synthetic oligonucleotide
aacgccgcaaucucucugu

SEQ ID NO: 3251480 - RNA, 19 nt, Artificial Sequence
  Description of Artificial Sequence: Synthetic oligonucleotide
agaacgugcgcucguucac

SEQ ID NO: 3251481 - RNA, 19 nt, Artificial Sequence
  Description of Artificial Sequence: Synthetic oligonucleotide
uucuugccaaccuccacgc

SEQ ID NO: 3251482 - RNA, 19 nt, Artificial Sequence
  Description of Artificial Sequence: Synthetic oligonucleotide
aucacauucuugccaaccu

SEQ ID NO: 3251483 - RNA, 19 nt, Artificial Sequence
  Description of Artificial Sequence: Synthetic oligonucleotide
cuuuccaccgagucacugc

SEQ ID NO: 3251484 - RNA, 19 nt, Artificial Sequence
  Description of Artificial Sequence: Synthetic oligonucleotide
ucacugccaagaacgugcg

SEQ ID NO: 3251485 - RNA, 19 nt, Artificial Sequence
  Description of Artificial Sequence: Synthetic oligonucleotide
acugccaagaacgugcgcu

SEQ ID NO: 3251486 - RNA, 19 nt, Artificial Sequence
  Description of Artificial Sequence: Synthetic oligonucleotide
ugaggcacguacgacgucc

SEQ ID NO: 3251487 - RNA, 19 nt, Artificial Sequence
  Description of Artificial Sequence: Synthetic oligonucleotide
ucaaagcgacgcacgaucu

SEQ ID NO: 3251488 - RNA, 19 nt, Artificial Sequence
  Description of Artificial Sequence: Synthetic oligonucleotide
cugugagcacuuuccaccg

SEQ ID NO: 3251489 - RNA, 19 nt, Artificial Sequence
  Description of Artificial Sequence: Synthetic oligonucleotide
ucucugugagcacuuucca

SEQ ID NO: 3251490 - RNA, 19 nt, Artificial Sequence
  Description of Artificial Sequence: Synthetic oligonucleotide
aaacgccgcaaucucucug

SEQ ID NO: 3251491 - RNA, 19 nt, Artificial Sequence
  Description of Artificial Sequence: Synthetic oligonucleotide
gaucucgcccaccagccgc

SEQ ID NO: 3251492 - RNA, 19 nt, Artificial Sequence
  Description of Artificial Sequence: Synthetic oligonucleotide
acuagcuuuagugccacca

SEQ ID NO: 3251493 - RNA, 19 nt, Artificial Sequence
  Description of Artificial Sequence: Synthetic oligonucleotide
uucggaggccuucacuagc

SEQ ID NO: 3251494 - RNA, 19 nt, Artificial Sequence
  Description of Artificial Sequence: Synthetic oligonucleotide
cuaugagggcccgugaggc

SEQ ID NO: 3251495 - RNA, 19 nt, Artificial Sequence
  Description of Artificial Sequence: Synthetic oligonucleotide
cuagcuuuagugccaccag

SEQ ID NO: 3251496 - RNA, 19 nt, Artificial Sequence
  Description of Artificial Sequence: Synthetic oligonucleotide
aaucggcuguagaaggguc

SEQ ID NO: 3251497 - RNA, 19 nt, Artificial Sequence
  Description of Artificial Sequence: Synthetic oligonucleotide
gggucuuucgugcagcucc

SEQ ID NO: 3251498 - RNA, 19 nt, Artificial Sequence
  Description of Artificial Sequence: Synthetic oligonucleotide
gagcucauguauuuaacua

SEQ ID NO: 3251499 - RNA, 19 nt, Artificial Sequence
  Description of Artificial Sequence: Synthetic oligonucleotide
agaagggucuuucgugcag

SEQ ID NO: 3251500 - RNA, 19 nt, Artificial Sequence
  Description of Artificial Sequence: Synthetic oligonucleotide
aguggccccuaugagggcc

SEQ ID NO: 3251501 - RNA, 19 nt, Artificial Sequence
  Description of Artificial Sequence: Synthetic oligonucleotide
ucacauucuugccaaccuc

SEQ ID NO: 3251502 - RNA, 19 nt, Artificial Sequence
  Description of Artificial Sequence: Synthetic oligonucleotide
gccuucacuagcuuuagug

SEQ ID NO: 3251503 - RNA, 19 nt, Artificial Sequence
  Description of Artificial Sequence: Synthetic oligonucleotide
ucuuucgugcagcuccgca

SEQ ID NO: 3251504 - RNA, 19 nt, Artificial Sequence
  Description of Artificial Sequence: Synthetic oligonucleotide
uaaugcucccgcagcagcu

SEQ ID NO: 3251505 - RNA, 19 nt, Artificial Sequence
  Description of Artificial Sequence: Synthetic oligonucleotide
uagcuuuagugccaccagu

SEQ ID NO: 3251506 - RNA, 19 nt, Artificial Sequence
  Description of Artificial Sequence: Synthetic oligonucleotide
caguuugaagccuuuccuc

SEQ ID NO: 3251507 - RNA, 19 nt, Artificial Sequence
  Description of Artificial Sequence: Synthetic oligonucleotide
cuuuccucucaaagcgacg

SEQ ID NO: 3251508 - RNA, 19 nt, Artificial Sequence
  Description of Artificial Sequence: Synthetic oligonucleotide
cacgaucucgcccaccagc

SEQ ID NO: 3251509 - RNA, 19 nt, Artificial Sequence
  Description of Artificial Sequence: Synthetic oligonucleotide
aaugcucccgcagcagcuc

SEQ ID NO: 3251510 - RNA, 19 nt, Artificial Sequence
  Description of Artificial Sequence: Synthetic oligonucleotide
ugcgggaaagagguuggcg

SEQ ID NO: 3251511 - RNA, 19 nt, Artificial Sequence
  Description of Artificial Sequence: Synthetic oligonucleotide
ggcgaagaugguuagcacc

SEQ ID NO: 3251512 - RNA, 19 nt, Artificial Sequence
  Description of Artificial Sequence: Synthetic oligonucleotide
cucauguauuuaacuaauc

SEQ ID NO: 3251513 - RNA, 19 nt, Artificial Sequence
  Description of Artificial Sequence: Synthetic oligonucleotide
gugagcacuuuccaccgag

SEQ ID NO: 3251514 - RNA, 19 nt, Artificial Sequence
  Description of Artificial Sequence: Synthetic oligonucleotide
acgaucucgcccaccagcc

SEQ ID NO: 3251515 - RNA, 19 nt, Artificial Sequence
  Description of Artificial Sequence: Synthetic oligonucleotide
uugccaaccuccacgcaga

SEQ ID NO: 3251516 - RNA, 19 nt, Artificial Sequence
  Description of Artificial Sequence: Synthetic oligonucleotide
acguacgacguccagcccu

SEQ ID NO: 3251517 - RNA, 19 nt, Artificial Sequence
  Description of Artificial Sequence: Synthetic oligonucleotide
aauuuuacgaaguuuaggc

SEQ ID NO: 3251518 - RNA, 19 nt, Artificial Sequence
  Description of Artificial Sequence: Synthetic oligonucleotide
aaauaaauuaaucagagca

SEQ ID NO: 3251519 - RNA, 19 nt, Artificial Sequence
  Description of Artificial Sequence: Synthetic oligonucleotide
uuuguuuccaaaauaaugg

SEQ ID NO: 3251520 - RNA, 19 nt, Artificial Sequence
  Description of Artificial Sequence: Synthetic oligonucleotide
ucauuuaucaauauuacug

SEQ ID NO: 3251521 - RNA, 19 nt, Artificial Sequence
  Description of Artificial Sequence: Synthetic oligonucleotide
aaaauaaauuaaucagagc

SEQ ID NO: 3251522 - RNA, 19 nt, Artificial Sequence
  Description of Artificial Sequence: Synthetic oligonucleotide
aauauuacugcauugugga

SEQ ID NO: 3251523 - RNA, 19 nt, Artificial Sequence
  Description of Artificial Sequence: Synthetic oligonucleotide
aacaaaaccuauaaaauuc

SEQ ID NO: 3251524 - RNA, 19 nt, Artificial Sequence
  Description of Artificial Sequence: Synthetic oligonucleotide
uuuuguuuccaaaauaaug

SEQ ID NO: 3251525 - RNA, 19 nt, Artificial Sequence
  Description of Artificial Sequence: Synthetic oligonucleotide
agugcaauccugcauagcc

SEQ ID NO: 3251526 - RNA, 19 nt, Artificial Sequence
  Description of Artificial Sequence: Synthetic oligonucleotide
auaaaauucuuuuguuucc

SEQ ID NO: 3251527 - RNA, 19 nt, Artificial Sequence
  Description of Artificial Sequence: Synthetic oligonucleotide
gaaugcauagaacaaaacc

SEQ ID NO: 3251528 - RNA, 19 nt, Artificial Sequence
  Description of Artificial Sequence: Synthetic oligonucleotide
uagaacaaaaccuauaaaa

SEQ ID NO: 3251529 - RNA, 19 nt, Artificial Sequence
  Description of Artificial Sequence: Synthetic oligonucleotide
ucuucauuuaucaauauua

SEQ ID NO: 3251530 - RNA, 19 nt, Artificial Sequence
  Description of Artificial Sequence: Synthetic oligonucleotide
uuuaaguaucuacagaacu

SEQ ID NO: 3251531 - RNA, 19 nt, Artificial Sequence
  Description of Artificial Sequence: Synthetic oligonucleotide
aaugcauagaacaaaaccu

SEQ ID NO: 3251532 - RNA, 19 nt, Artificial Sequence
  Description of Artificial Sequence: Synthetic oligonucleotide
uauaaaauucuuuuguuuc

SEQ ID NO: 3251533 - RNA, 19 nt, Artificial Sequence
  Description of Artificial Sequence: Synthetic oligonucleotide
uuuaaacucaguaucuuca

SEQ ID NO: 3251534 - RNA, 19 nt, Artificial Sequence
  Description of Artificial Sequence: Synthetic oligonucleotide
aauaaauuaaucagagcag

SEQ ID NO: 3251535 - RNA, 19 nt, Artificial Sequence
  Description of Artificial Sequence: Synthetic oligonucleotide
ucuuuaaguaucuacagaa

SEQ ID NO: 3251536 - RNA, 19 nt, Artificial Sequence
  Description of Artificial Sequence: Synthetic oligonucleotide
uuaaguaucuacagaacug

SEQ ID NO: 3251537 - RNA, 19 nt, Artificial Sequence
  Description of Artificial Sequence: Synthetic oligonucleotide
auuuuacgaaguuuaggcc

SEQ ID NO: 3251538 - RNA, 19 nt, Artificial Sequence
  Description of Artificial Sequence: Synthetic oligonucleotide
aaaccuauaaaauucuuuu

SEQ ID NO: 3251539 - RNA, 19 nt, Artificial Sequence
  Description of Artificial Sequence: Synthetic oligonucleotide
uuuuacgaaguuuaggcca

SEQ ID NO: 3251540 - RNA, 19 nt, Artificial Sequence
  Description of Artificial Sequence: Synthetic oligonucleotide
uuggagaaugcauagaaca

SEQ ID NO: 3251541 - RNA, 19 nt, Artificial Sequence
  Description of Artificial Sequence: Synthetic oligonucleotide
cauuuaucaauauuacugc

SEQ ID NO: 3251542 - RNA, 19 nt, Artificial Sequence
  Description of Artificial Sequence: Synthetic oligonucleotide
uaccucaacaguaacaggc

SEQ ID NO: 3251543 - RNA, 19 nt, Artificial Sequence
  Description of Artificial Sequence: Synthetic oligonucleotide
aauucuuuuguuuccaaaa

SEQ ID NO: 3251544 - RNA, 19 nt, Artificial Sequence
  Description of Artificial Sequence: Synthetic oligonucleotide
aaauuuuacgaaguuuagg

SEQ ID NO: 3251545 - RNA, 19 nt, Artificial Sequence
  Description of Artificial Sequence: Synthetic oligonucleotide
ucuuuuguuuccaaaauaa

SEQ ID NO: 3251546 - RNA, 19 nt, Artificial Sequence
  Description of Artificial Sequence: Synthetic oligonucleotide
aaucagagcaguguauggc

SEQ ID NO: 3251547 - RNA, 19 nt, Artificial Sequence
  Description of Artificial Sequence: Synthetic oligonucleotide
guaucuacagaacugagac

SEQ ID NO: 3251548 - RNA, 19 nt, Artificial Sequence
  Description of Artificial Sequence: Synthetic oligonucleotide
cagaacugagacuagagcc

SEQ ID NO: 3251549 - RNA, 19 nt, Artificial Sequence
  Description of Artificial Sequence: Synthetic oligonucleotide
cuaguuuuaaacuuggaga

SEQ ID NO: 3251550 - RNA, 19 nt, Artificial Sequence
  Description of Artificial Sequence: Synthetic oligonucleotide
caauauuacugcauugugg

SEQ ID NO: 3251551 - RNA, 19 nt, Artificial Sequence
  Description of Artificial Sequence: Synthetic oligonucleotide
aguaucuucauuuaucaau

SEQ ID NO: 3251552 - RNA, 19 nt, Artificial Sequence
  Description of Artificial Sequence: Synthetic oligonucleotide
ucuggcaaucuccaaaucc

SEQ ID NO: 3251553 - RNA, 19 nt, Artificial Sequence
  Description of Artificial Sequence: Synthetic oligonucleotide
uuaucugcucuauaaaaug

SEQ ID NO: 3251554 - RNA, 19 nt, Artificial Sequence
  Description of Artificial Sequence: Synthetic oligonucleotide
acagaacugagacuagagc

SEQ ID NO: 3251555 - RNA, 19 nt, Artificial Sequence
  Description of Artificial Sequence: Synthetic oligonucleotide
aaacuuggagaaugcauag

SEQ ID NO: 3251556 - RNA, 19 nt, Artificial Sequence
  Description of Artificial Sequence: Synthetic oligonucleotide
aucagagcaguguauggcc

SEQ ID NO: 3251557 - RNA, 19 nt, Artificial Sequence
  Description of Artificial Sequence: Synthetic oligonucleotide
uaguuuuaaacuuggagaa

SEQ ID NO: 3251558 - RNA, 19 nt, Artificial Sequence
  Description of Artificial Sequence: Synthetic oligonucleotide
aaacucaguaucuucauuu

SEQ ID NO: 3251559 - RNA, 19 nt, Artificial Sequence
  Description of Artificial Sequence: Synthetic oligonucleotide
ucaguaucuucauuuauca

SEQ ID NO: 3251560 - RNA, 19 nt, Artificial Sequence
  Description of Artificial Sequence: Synthetic oligonucleotide
guuuccaaaauaauggaag

SEQ ID NO: 3251561 - RNA, 19 nt, Artificial Sequence
  Description of Artificial Sequence: Synthetic oligonucleotide
aaauuaaucagagcagugu

SEQ ID NO: 3251562 - RNA, 19 nt, Artificial Sequence
  Description of Artificial Sequence: Synthetic oligonucleotide
aauuaaucagagcagugua

SEQ ID NO: 3251563 - RNA, 19 nt, Artificial Sequence
  Description of Artificial Sequence: Synthetic oligonucleotide
ucaauauuacugcauugug

SEQ ID NO: 3251564 - RNA, 19 nt, Artificial Sequence
  Description of Artificial Sequence: Synthetic oligonucleotide
aaccuauaaaauucuuuug

SEQ ID NO: 3251565 - RNA, 19 nt, Artificial Sequence
  Description of Artificial Sequence: Synthetic oligonucleotide
accuauaaaauucuuuugu

SEQ ID NO: 3251566 - RNA, 19 nt, Artificial Sequence
  Description of Artificial Sequence: Synthetic oligonucleotide
auggccaucacuuaccuca

SEQ ID NO: 3251567 - RNA, 19 nt, Artificial Sequence
  Description of Artificial Sequence: Synthetic oligonucleotide
uaaacuuggagaaugcaua

SEQ ID NO: 3251568 - RNA, 19 nt, Artificial Sequence
  Description of Artificial Sequence: Synthetic oligonucleotide
uaaauuaaucagagcagug

SEQ ID NO: 3251569 - RNA, 19 nt, Artificial Sequence
  Description of Artificial Sequence: Synthetic oligonucleotide
uuuuaaacuuggagaaugc

SEQ ID NO: 3251570 - RNA, 19 nt, Artificial Sequence
  Description of Artificial Sequence: Synthetic oligonucleotide
uuaaacuuggagaaugcau

SEQ ID NO: 3251571 - RNA, 19 nt, Artificial Sequence
  Description of Artificial Sequence: Synthetic oligonucleotide
uauuacugcauuguggagc

SEQ ID NO: 3251572 - RNA, 19 nt, Artificial Sequence
  Description of Artificial Sequence: Synthetic oligonucleotide
uuuaucaauauuacugcau

SEQ ID NO: 3251573 - RNA, 19 nt, Artificial Sequence
  Description of Artificial Sequence: Synthetic oligonucleotide
uuuccaaaauaauggaaga

SEQ ID NO: 3251574 - RNA, 19 nt, Artificial Sequence
  Description of Artificial Sequence: Synthetic oligonucleotide
aguaacaggcucuuuaagu

SEQ ID NO: 3251575 - RNA, 19 nt, Artificial Sequence
  Description of Artificial Sequence: Synthetic oligonucleotide
aauaauggaagauccuuuu

SEQ ID NO: 3251576 - RNA, 19 nt, Artificial Sequence
  Description of Artificial Sequence: Synthetic oligonucleotide
caacucauugcuuaucugc

SEQ ID NO: 3251577 - RNA, 19 nt, Artificial Sequence
  Description of Artificial Sequence: Synthetic oligonucleotide
aaucuccaaauccaggaga

SEQ ID NO: 3251578 - RNA, 19 nt, Artificial Sequence
  Description of Artificial Sequence: Synthetic oligonucleotide
ugagacuagagccaccucu

SEQ ID NO: 3251579 - RNA, 19 nt, Artificial Sequence
  Description of Artificial Sequence: Synthetic oligonucleotide
cuuaccucaacaguaacag

SEQ ID NO: 3251580 - RNA, 19 nt, Artificial Sequence
  Description of Artificial Sequence: Synthetic oligonucleotide
aaacugacaaggcacaaua

SEQ ID NO: 3251581 - RNA, 19 nt, Artificial Sequence
  Description of Artificial Sequence: Synthetic oligonucleotide
aaaauaauggaagauccuu

SEQ ID NO: 3251582 - RNA, 19 nt, Artificial Sequence
  Description of Artificial Sequence: Synthetic oligonucleotide
uuaucaauauuacugcauu

SEQ ID NO: 3251583 - RNA, 19 nt, Artificial Sequence
  Description of Artificial Sequence: Synthetic oligonucleotide
cuucauuuaucaauauuac

SEQ ID NO: 3251584 - RNA, 19 nt, Artificial Sequence
  Description of Artificial Sequence: Synthetic oligonucleotide
uaucugcucuauaaaauga

SEQ ID NO: 3251585 - RNA, 19 nt, Artificial Sequence
  Description of Artificial Sequence: Synthetic oligonucleotide
ugcauuguggagcuagugc

SEQ ID NO: 3251586 - RNA, 19 nt, Artificial Sequence
  Description of Artificial Sequence: Synthetic oligonucleotide
uacagaacugagacuagag

SEQ ID NO: 3251587 - RNA, 19 nt, Artificial Sequence
  Description of Artificial Sequence: Synthetic oligonucleotide
guuuuaaacuuggagaaug

SEQ ID NO: 3251588 - RNA, 19 nt, Artificial Sequence
  Description of Artificial Sequence: Synthetic oligonucleotide
uaaucagagcaguguaugg

SEQ ID NO: 3251589 - RNA, 19 nt, Artificial Sequence
  Description of Artificial Sequence: Synthetic oligonucleotide
ccaaaauaauggaagaucc

SEQ ID NO: 3251590 - RNA, 19 nt, Artificial Sequence
  Description of Artificial Sequence: Synthetic oligonucleotide
aacaguaacaggcucuuua

SEQ ID NO: 3251591 - RNA, 19 nt, Artificial Sequence
  Description of Artificial Sequence: Synthetic oligonucleotide
uuuaggccaacucauugcu

SEQ ID NO: 3251592 - RNA, 19 nt, Artificial Sequence
  Description of Artificial Sequence: Synthetic oligonucleotide
uucauuuaucaauauuacu

SEQ ID NO: 3251593 - RNA, 19 nt, Artificial Sequence
  Description of Artificial Sequence: Synthetic oligonucleotide
uguauggccaucacuuacc

SEQ ID NO: 3251594 - RNA, 19 nt, Artificial Sequence
  Description of Artificial Sequence: Synthetic oligonucleotide
uuaaucagagcaguguaug

SEQ ID NO: 3251595 - RNA, 19 nt, Artificial Sequence
  Description of Artificial Sequence: Synthetic oligonucleotide
uuuuaaacucaguaucuuc

SEQ ID NO: 3251596 - RNA, 19 nt, Artificial Sequence
  Description of Artificial Sequence: Synthetic oligonucleotide
auaaauuaaucagagcagu

SEQ ID NO: 3251597 - RNA, 19 nt, Artificial Sequence
  Description of Artificial Sequence: Synthetic oligonucleotide
uaaguaucuacagaacuga

SEQ ID NO: 3251598 - RNA, 19 nt, Artificial Sequence
  Description of Artificial Sequence: Synthetic oligonucleotide
uccaaaauaauggaagauc

SEQ ID NO: 3251599 - RNA, 19 nt, Artificial Sequence
  Description of Artificial Sequence: Synthetic oligonucleotide
uaucaauauuacugcauug

SEQ ID NO: 3251600 - RNA, 19 nt, Artificial Sequence
  Description of Artificial Sequence: Synthetic oligonucleotide
uguuuccaaaauaauggaa

SEQ ID NO: 3251601 - RNA, 19 nt, Artificial Sequence
  Description of Artificial Sequence: Synthetic oligonucleotide
auuuaucaauauuacugca

SEQ ID NO: 3251602 - RNA, 19 nt, Artificial Sequence
  Description of Artificial Sequence: Synthetic oligonucleotide
aaauucuuuuguuuccaaa

SEQ ID NO: 3251603 - RNA, 19 nt, Artificial Sequence
  Description of Artificial Sequence: Synthetic oligonucleotide
aggcucuuuaaguaucuac

SEQ ID NO: 3251604 - RNA, 19 nt, Artificial Sequence
  Description of Artificial Sequence: Synthetic oligonucleotide
uuggcaaacugacaaggca

SEQ ID NO: 3251605 - RNA, 19 nt, Artificial Sequence
  Description of Artificial Sequence: Synthetic oligonucleotide
aauccugcauagccuuggc

SEQ ID NO: 3251606 - RNA, 19 nt, Artificial Sequence
  Description of Artificial Sequence: Synthetic oligonucleotide
aguuuaggccaacucauug

SEQ ID NO: 3251607 - RNA, 19 nt, Artificial Sequence
  Description of Artificial Sequence: Synthetic oligonucleotide
auuacugcauuguggagcu

SEQ ID NO: 3251608 - RNA, 19 nt, Artificial Sequence
  Description of Artificial Sequence: Synthetic oligonucleotide
auagccuuggcaaacugac

SEQ ID NO: 3251609 - RNA, 19 nt, Artificial Sequence
  Description of Artificial Sequence: Synthetic oligonucleotide
uuguuuccaaaauaaugga

SEQ ID NO: 3251610 - RNA, 19 nt, Artificial Sequence
  Description of Artificial Sequence: Synthetic oligonucleotide
agaaccuaguuuuaaacuu

SEQ ID NO: 3251611 - RNA, 19 nt, Artificial Sequence
  Description of Artificial Sequence: Synthetic oligonucleotide
uccaggagaaccuaguuuu

SEQ ID NO: 3251612 - RNA, 19 nt, Artificial Sequence
  Description of Artificial Sequence: Synthetic oligonucleotide
uggcaaacugacaaggcac

SEQ ID NO: 3251613 - RNA, 19 nt, Artificial Sequence
  Description of Artificial Sequence: Synthetic oligonucleotide
cuuuaaguaucuacagaac

SEQ ID NO: 3251614 - RNA, 19 nt, Artificial Sequence
  Description of Artificial Sequence: Synthetic oligonucleotide
acuuggagaaugcauagaa

SEQ ID NO: 3251615 - RNA, 19 nt, Artificial Sequence
  Description of Artificial Sequence: Synthetic oligonucleotide
uccaaauccaggagaaccu

SEQ ID NO: 3251616 - RNA, 19 nt, Artificial Sequence
  Description of Artificial Sequence: Synthetic oligonucleotide
uaaaauucuuuuguuucca

SEQ ID NO: 3251617 - RNA, 19 nt, Artificial Sequence
  Description of Artificial Sequence: Synthetic oligonucleotide
aaagucaucaauuacauug

SEQ ID NO: 3251618 - RNA, 19 nt, Artificial Sequence
  Description of Artificial Sequence: Synthetic oligonucleotide
uugugaauaaaacagaggc

SEQ ID NO: 3251619 - RNA, 19 nt, Artificial Sequence
  Description of Artificial Sequence: Synthetic oligonucleotide
aacaacacagacuggaagc

SEQ ID NO: 3251620 - RNA, 19 nt, Artificial Sequence
  Description of Artificial Sequence: Synthetic oligonucleotide
uaaugaagagauaagaggc

SEQ ID NO: 3251621 - RNA, 19 nt, Artificial Sequence
  Description of Artificial Sequence: Synthetic oligonucleotide
auaaugaagagauaagagg

SEQ ID NO: 3251622 - RNA, 19 nt, Artificial Sequence
  Description of Artificial Sequence: Synthetic oligonucleotide
aaugcacauagcuuuaagg

SEQ ID NO: 3251623 - RNA, 19 nt, Artificial Sequence
  Description of Artificial Sequence: Synthetic oligonucleotide
aauaaugaagagauaagag

SEQ ID NO: 3251624 - RNA, 19 nt, Artificial Sequence
  Description of Artificial Sequence: Synthetic oligonucleotide
aauaaaacagaggcuuugc

SEQ ID NO: 3251625 - RNA, 19 nt, Artificial Sequence
  Description of Artificial Sequence: Synthetic oligonucleotide
ucaucaauuacauugucac

SEQ ID NO: 3251626 - RNA, 19 nt, Artificial Sequence
  Description of Artificial Sequence: Synthetic oligonucleotide
aagaggaagaacaacacag

SEQ ID NO: 3251627 - RNA, 19 nt, Artificial Sequence
  Description of Artificial Sequence: Synthetic oligonucleotide
aaugaagagauaagaggcc

SEQ ID NO: 3251628 - RNA, 19 nt, Artificial Sequence
  Description of Artificial Sequence: Synthetic oligonucleotide
ggaagaacaacacagacug

SEQ ID NO: 3251629 - RNA, 19 nt, Artificial Sequence
  Description of Artificial Sequence: Synthetic oligonucleotide
aaaacagaggcuuugcgau

SEQ ID NO: 3251630 - RNA, 19 nt, Artificial Sequence
  Description of Artificial Sequence: Synthetic oligonucleotide
gacauuggaagccaagagg

SEQ ID NO: 3251631 - RNA, 19 nt, Artificial Sequence
  Description of Artificial Sequence: Synthetic oligonucleotide
aacacaauggggaugauga

SEQ ID NO: 3251632 - RNA, 19 nt, Artificial Sequence
  Description of Artificial Sequence: Synthetic oligonucleotide
aaagucaaggaaaaggugu

SEQ ID NO: 3251633 - RNA, 19 nt, Artificial Sequence
  Description of Artificial Sequence: Synthetic oligonucleotide
aagaggccaggauaaacac

SEQ ID NO: 3251634 - RNA, 19 nt, Artificial Sequence
  Description of Artificial Sequence: Synthetic oligonucleotide
aaggaaaaggugucuuugg

SEQ ID NO: 3251635 - RNA, 19 nt, Artificial Sequence
  Description of Artificial Sequence: Synthetic oligonucleotide
gaaaaggugucuuugguga

SEQ ID NO: 3251636 - RNA, 19 nt, Artificial Sequence
  Description of Artificial Sequence: Synthetic oligonucleotide
aucaauuacauugucacug

SEQ ID NO: 3251637 - RNA, 19 nt, Artificial Sequence
  Description of Artificial Sequence: Synthetic oligonucleotide
aacacagacuggaagcugc

SEQ ID NO: 3251638 - RNA, 19 nt, Artificial Sequence
  Description of Artificial Sequence: Synthetic oligonucleotide
uaaaacagaggcuuugcga

SEQ ID NO: 3251639 - RNA, 19 nt, Artificial Sequence
  Description of Artificial Sequence: Synthetic oligonucleotide
uaagaggccaggauaaaca

SEQ ID NO: 3251640 - RNA, 19 nt, Artificial Sequence
  Description of Artificial Sequence: Synthetic oligonucleotide
caggauaaacacaaugggg

SEQ ID NO: 3251641 - RNA, 19 nt, Artificial Sequence
  Description of Artificial Sequence: Synthetic oligonucleotide
auuacauugucacugcaga

SEQ ID NO: 3251642 - RNA, 19 nt, Artificial Sequence
  Description of Artificial Sequence: Synthetic oligonucleotide
cagaaagucaaggaaaagg

SEQ ID NO: 3251643 - RNA, 19 nt, Artificial Sequence
  Description of Artificial Sequence: Synthetic oligonucleotide
auaaaacagaggcuuugcg

SEQ ID NO: 3251644 - RNA, 19 nt, Artificial Sequence
  Description of Artificial Sequence: Synthetic oligonucleotide
ugugaauaaaacagaggcu

SEQ ID NO: 3251645 - RNA, 19 nt, Artificial Sequence
  Description of Artificial Sequence: Synthetic oligonucleotide
aagaacaacacagacugga

SEQ ID NO: 3251646 - RNA, 19 nt, Artificial Sequence
  Description of Artificial Sequence: Synthetic oligonucleotide
auugucacugcagaaaguc

SEQ ID NO: 3251647 - RNA, 19 nt, Artificial Sequence
  Description of Artificial Sequence: Synthetic oligonucleotide
gaugaugacauuggaagcc

SEQ ID NO: 3251648 - RNA, 19 nt, Artificial Sequence
  Description of Artificial Sequence: Synthetic oligonucleotide
augcacauagcuuuaagga

SEQ ID NO: 3251649 - RNA, 19 nt, Artificial Sequence
  Description of Artificial Sequence: Synthetic oligonucleotide
gaagccaagaggaagaaca

SEQ ID NO: 3251650 - RNA, 19 nt, Artificial Sequence
  Description of Artificial Sequence: Synthetic oligonucleotide
gggaugaugacauuggaag

SEQ ID NO: 3251651 - RNA, 19 nt, Artificial Sequence
  Description of Artificial Sequence: Synthetic oligonucleotide
aaaugcacauagcuuuaag

SEQ ID NO: 3251652 - RNA, 19 nt, Artificial Sequence
  Description of Artificial Sequence: Synthetic oligonucleotide
aauuacauugucacugcag

SEQ ID NO: 3251653 - RNA, 19 nt, Artificial Sequence
  Description of Artificial Sequence: Synthetic oligonucleotide
aauggggaugaugacauug

SEQ ID NO: 3251654 - RNA, 19 nt, Artificial Sequence
  Description of Artificial Sequence: Synthetic oligonucleotide
ugacauuggaagccaagag

SEQ ID NO: 3251655 - RNA, 19 nt, Artificial Sequence
  Description of Artificial Sequence: Synthetic oligonucleotide
acauugucacugcagaaag

SEQ ID NO: 3251656 - RNA, 19 nt, Artificial Sequence
  Description of Artificial Sequence: Synthetic oligonucleotide
gaacaacacagacuggaag

SEQ ID NO: 3251657 - RNA, 19 nt, Artificial Sequence
  Description of Artificial Sequence: Synthetic oligonucleotide
ucaauuacauugucacugc

SEQ ID NO: 3251658 - RNA, 19 nt, Artificial Sequence
  Description of Artificial Sequence: Synthetic oligonucleotide
aacagaggcuuugcgaugg

SEQ ID NO: 3251659 - RNA, 19 nt, Artificial Sequence
  Description of Artificial Sequence: Synthetic oligonucleotide
aggauaaacacaaugggga

SEQ ID NO: 3251660 - RNA, 19 nt, Artificial Sequence
  Description of Artificial Sequence: Synthetic oligonucleotide
auaaacacaauggggauga

SEQ ID NO: 3251661 - RNA, 19 nt, Artificial Sequence
  Description of Artificial Sequence: Synthetic oligonucleotide
uuggaagccaagaggaaga

SEQ ID NO: 3251662 - RNA, 19 nt, Artificial Sequence
  Description of Artificial Sequence: Synthetic oligonucleotide
agaaagucaaggaaaaggu

SEQ ID NO: 3251663 - RNA, 19 nt, Artificial Sequence
  Description of Artificial Sequence: Synthetic oligonucleotide
ugaagagauaagaggccag

SEQ ID NO: 3251664 - RNA, 19 nt, Artificial Sequence
  Description of Artificial Sequence: Synthetic oligonucleotide
aagucaaggaaaagguguc

SEQ ID NO: 3251665 - RNA, 19 nt, Artificial Sequence
  Description of Artificial Sequence: Synthetic oligonucleotide
ugucacugcagaaagucaa

SEQ ID NO: 3251666 - RNA, 19 nt, Artificial Sequence
  Description of Artificial Sequence: Synthetic oligonucleotide
gaggaagaacaacacagac

SEQ ID NO: 3251667 - RNA, 19 nt, Artificial Sequence
  Description of Artificial Sequence: Synthetic oligonucleotide
gaagagauaagaggccagg

SEQ ID NO: 3251668 - RNA, 19 nt, Artificial Sequence
  Description of Artificial Sequence: Synthetic oligonucleotide
ugcagaaagucaaggaaaa

SEQ ID NO: 3251669 - RNA, 19 nt, Artificial Sequence
  Description of Artificial Sequence: Synthetic oligonucleotide
acugcagaaagucaaggaa

SEQ ID NO: 3251670 - RNA, 19 nt, Artificial Sequence
  Description of Artificial Sequence: Synthetic oligonucleotide
auaagaggccaggauaaac

SEQ ID NO: 3251671 - RNA, 19 nt, Artificial Sequence
  Description of Artificial Sequence: Synthetic oligonucleotide
gaauaaaacagaggcuuug

SEQ ID NO: 3251672 - RNA, 19 nt, Artificial Sequence
  Description of Artificial Sequence: Synthetic oligonucleotide
auuggaagccaagaggaag

SEQ ID NO: 3251673 - RNA, 19 nt, Artificial Sequence
  Description of Artificial Sequence: Synthetic oligonucleotide
gauaaacacaauggggaug

SEQ ID NO: 3251674 - RNA, 19 nt, Artificial Sequence
  Description of Artificial Sequence: Synthetic oligonucleotide
acauuggaagccaagagga

SEQ ID NO: 3251675 - RNA, 19 nt, Artificial Sequence
  Description of Artificial Sequence: Synthetic oligonucleotide
gaaagucaaggaaaaggug

SEQ ID NO: 3251676 - RNA, 19 nt, Artificial Sequence
  Description of Artificial Sequence: Synthetic oligonucleotide
cuugccacaggccagcuuc

SEQ ID NO: 3251677 - RNA, 19 nt, Artificial Sequence
  Description of Artificial Sequence: Synthetic oligonucleotide
caauaaugaagagauaaga

SEQ ID NO: 3251678 - RNA, 19 nt, Artificial Sequence
  Description of Artificial Sequence: Synthetic oligonucleotide
agucaucaauuacauuguc

SEQ ID NO: 3251679 - RNA, 19 nt, Artificial Sequence
  Description of Artificial Sequence: Synthetic oligonucleotide
gagauaagaggccaggaua

SEQ ID NO: 3251680 - RNA, 19 nt, Artificial Sequence
  Description of Artificial Sequence: Synthetic oligonucleotide
aaacagaggcuuugcgaug

SEQ ID NO: 3251681 - RNA, 19 nt, Artificial Sequence
  Description of Artificial Sequence: Synthetic oligonucleotide
ugcccuucuugccacaggc

SEQ ID NO: 3251682 - RNA, 19 nt, Artificial Sequence
  Description of Artificial Sequence: Synthetic oligonucleotide
ucacugcagaaagucaagg

SEQ ID NO: 3251683 - RNA, 19 nt, Artificial Sequence
  Description of Artificial Sequence: Synthetic oligonucleotide
aagucaucaauuacauugu

SEQ ID NO: 3251684 - RNA, 19 nt, Artificial Sequence
  Description of Artificial Sequence: Synthetic oligonucleotide
aaacacaauggggaugaug

SEQ ID NO: 3251685 - RNA, 19 nt, Artificial Sequence
  Description of Artificial Sequence: Synthetic oligonucleotide
gccaggauaaacacaaugg

SEQ ID NO: 3251686 - RNA, 19 nt, Artificial Sequence
  Description of Artificial Sequence: Synthetic oligonucleotide
uacauugucacugcagaaa

SEQ ID NO: 3251687 - RNA, 19 nt, Artificial Sequence
  Description of Artificial Sequence: Synthetic oligonucleotide
ugaauaaaacagaggcuuu

SEQ ID NO: 3251688 - RNA, 19 nt, Artificial Sequence
  Description of Artificial Sequence: Synthetic oligonucleotide
agagauaagaggccaggau

SEQ ID NO: 3251689 - RNA, 19 nt, Artificial Sequence
  Description of Artificial Sequence: Synthetic oligonucleotide
aagcugcccuucuugccac

SEQ ID NO: 3251690 - RNA, 19 nt, Artificial Sequence
  Description of Artificial Sequence: Synthetic oligonucleotide
ccaggauaaacacaauggg

SEQ ID NO: 3251691 - RNA, 19 nt, Artificial Sequence
  Description of Artificial Sequence: Synthetic oligonucleotide
gaugacauuggaagccaag

SEQ ID NO: 3251692 - RNA, 19 nt, Artificial Sequence
  Description of Artificial Sequence: Synthetic oligonucleotide
aggaaaaggugucuuuggu

SEQ ID NO: 3251693 - RNA, 19 nt, Artificial Sequence
  Description of Artificial Sequence: Synthetic oligonucleotide
aaaagucaucaauuacauu

SEQ ID NO: 3251694 - RNA, 19 nt, Artificial Sequence
  Description of Artificial Sequence: Synthetic oligonucleotide
uugucacugcagaaaguca

SEQ ID NO: 3251695 - RNA, 19 nt, Artificial Sequence
  Description of Artificial Sequence: Synthetic oligonucleotide
acagacuggaagcugcccu

SEQ ID NO: 3251696 - RNA, 19 nt, Artificial Sequence
  Description of Artificial Sequence: Synthetic oligonucleotide
aaaggugucuuuggugaug

SEQ ID NO: 3251697 - RNA, 19 nt, Artificial Sequence
  Description of Artificial Sequence: Synthetic oligonucleotide
aaaaggugucuuuggugau

SEQ ID NO: 3251698 - RNA, 19 nt, Artificial Sequence
  Description of Artificial Sequence: Synthetic oligonucleotide
ggugggauaucacagaaaa

SEQ ID NO: 3251699 - RNA, 19 nt, Artificial Sequence
  Description of Artificial Sequence: Synthetic oligonucleotide
gaagcugcccuucuugcca

SEQ ID NO: 3251700 - RNA, 19 nt, Artificial Sequence
  Description of Artificial Sequence: Synthetic oligonucleotide
ggcaauaaugaagagauaa

SEQ ID NO: 3251701 - RNA, 19 nt, Artificial Sequence
  Description of Artificial Sequence: Synthetic oligonucleotide
augaagagauaagaggcca

SEQ ID NO: 3251702 - RNA, 19 nt, Artificial Sequence
  Description of Artificial Sequence: Synthetic oligonucleotide
acacaauggggaugaugac

SEQ ID NO: 3251703 - RNA, 19 nt, Artificial Sequence
  Description of Artificial Sequence: Synthetic oligonucleotide
ggaaaaggugucuuuggug

SEQ ID NO: 3251704 - RNA, 19 nt, Artificial Sequence
  Description of Artificial Sequence: Synthetic oligonucleotide
caaggaaaaggugucuuug

SEQ ID NO: 3251705 - RNA, 19 nt, Artificial Sequence
  Description of Artificial Sequence: Synthetic oligonucleotide
aagagauaagaggccagga

SEQ ID NO: 3251706 - RNA, 19 nt, Artificial Sequence
  Description of Artificial Sequence: Synthetic oligonucleotide
aaggugucuuuggugauga

SEQ ID NO: 3251707 - RNA, 19 nt, Artificial Sequence
  Description of Artificial Sequence: Synthetic oligonucleotide
caggggugggauaucacag

SEQ ID NO: 3251708 - RNA, 19 nt, Artificial Sequence
  Description of Artificial Sequence: Synthetic oligonucleotide
uuacauugucacugcagaa

SEQ ID NO: 3251709 - RNA, 19 nt, Artificial Sequence
  Description of Artificial Sequence: Synthetic oligonucleotide
uggaagcugcccuucuugc

SEQ ID NO: 3251710 - RNA, 19 nt, Artificial Sequence
  Description of Artificial Sequence: Synthetic oligonucleotide
gaggccaggauaaacacaa

SEQ ID NO: 3251711 - RNA, 19 nt, Artificial Sequence
  Description of Artificial Sequence: Synthetic oligonucleotide
gugucuuuggugaugauaa

SEQ ID NO: 3251712 - RNA, 19 nt, Artificial Sequence
  Description of Artificial Sequence: Synthetic oligonucleotide
guggcaauaaugaagagau

SEQ ID NO: 3251713 - RNA, 19 nt, Artificial Sequence
  Description of Artificial Sequence: Synthetic oligonucleotide
agauaagaggccaggauaa

SEQ ID NO: 3251714 - RNA, 19 nt, Artificial Sequence
  Description of Artificial Sequence: Synthetic oligonucleotide
ggaugaugacauuggaagc

SEQ ID NO: 3251715 - RNA, 19 nt, Artificial Sequence
  Description of Artificial Sequence: Synthetic oligonucleotide
augacauuggaagccaaga

SEQ ID NO: 3251716 - RNA, 19 nt, Artificial Sequence
  Description of Artificial Sequence: Synthetic oligonucleotide
gaggcuuugcgauggcuac

SEQ ID NO: 3251717 - RNA, 19 nt, Artificial Sequence
  Description of Artificial Sequence: Synthetic oligonucleotide
agaucuaggauuuaaaugg

SEQ ID NO: 3251718 - RNA, 19 nt, Artificial Sequence
  Description of Artificial Sequence: Synthetic oligonucleotide
auaucuuugacagagaugg

SEQ ID NO: 3251719 - RNA, 19 nt, Artificial Sequence
  Description of Artificial Sequence: Synthetic oligonucleotide
auaauacuuauuuaaauag

SEQ ID NO: 3251720 - RNA, 19 nt, Artificial Sequence
  Description of Artificial Sequence: Synthetic oligonucleotide
aacucuauuucauuugccc

SEQ ID NO: 3251721 - RNA, 19 nt, Artificial Sequence
  Description of Artificial Sequence: Synthetic oligonucleotide
aauaguuuuccacauaucu

SEQ ID NO: 3251722 - RNA, 19 nt, Artificial Sequence
  Description of Artificial Sequence: Synthetic oligonucleotide
aauaauaacaguggcuacc

SEQ ID NO: 3251723 - RNA, 19 nt, Artificial Sequence
  Description of Artificial Sequence: Synthetic oligonucleotide
aauacuuauuuaaauaguc

SEQ ID NO: 3251724 - RNA, 19 nt, Artificial Sequence
  Description of Artificial Sequence: Synthetic oligonucleotide
aacauaaggagaugugagc

SEQ ID NO: 3251725 - RNA, 19 nt, Artificial Sequence
  Description of Artificial Sequence: Synthetic oligonucleotide
auuucauuugcccagaucu

SEQ ID NO: 3251726 - RNA, 19 nt, Artificial Sequence
  Description of Artificial Sequence: Synthetic oligonucleotide
acuuucuacagugagagcc

SEQ ID NO: 3251727 - RNA, 19 nt, Artificial Sequence
  Description of Artificial Sequence: Synthetic oligonucleotide
aagaccagcaggaaaaugc

SEQ ID NO: 3251728 - RNA, 19 nt, Artificial Sequence
  Description of Artificial Sequence: Synthetic oligonucleotide
agaaucacagucaaaagcc

SEQ ID NO: 3251729 - RNA, 19 nt, Artificial Sequence
  Description of Artificial Sequence: Synthetic oligonucleotide
uauuuaaauagucuccaag

SEQ ID NO: 3251730 - RNA, 19 nt, Artificial Sequence
  Description of Artificial Sequence: Synthetic oligonucleotide
uccaagaaagaccagcagg

SEQ ID NO: 3251731 - RNA, 19 nt, Artificial Sequence
  Description of Artificial Sequence: Synthetic oligonucleotide
ucuuugacagagauggugg

SEQ ID NO: 3251732 - RNA, 19 nt, Artificial Sequence
  Description of Artificial Sequence: Synthetic oligonucleotide
aaaauaauaacaguggcua

SEQ ID NO: 3251733 - RNA, 19 nt, Artificial Sequence
  Description of Artificial Sequence: Synthetic oligonucleotide
uuaaacaaacucuauuuca

SEQ ID NO: 3251734 - RNA, 19 nt, Artificial Sequence
  Description of Artificial Sequence: Synthetic oligonucleotide
uuuucugucuaguugaucu

SEQ ID NO: 3251735 - RNA, 19 nt, Artificial Sequence
  Description of Artificial Sequence: Synthetic oligonucleotide
aauagucuccaagaaagac

SEQ ID NO: 3251736 - RNA, 19 nt, Artificial Sequence
  Description of Artificial Sequence: Synthetic oligonucleotide
aaauaauaacaguggcuac

SEQ ID NO: 3251737 - RNA, 19 nt, Artificial Sequence
  Description of Artificial Sequence: Synthetic oligonucleotide
uuccacauaucuuugacag

SEQ ID NO: 3251738 - RNA, 19 nt, Artificial Sequence
  Description of Artificial Sequence: Synthetic oligonucleotide
uuaacuuccaagcaugagu

SEQ ID NO: 3251739 - RNA, 19 nt, Artificial Sequence
  Description of Artificial Sequence: Synthetic oligonucleotide
aauuccagacuagaauucc

SEQ ID NO: 3251740 - RNA, 19 nt, Artificial Sequence
  Description of Artificial Sequence: Synthetic oligonucleotide
acuuauuuaaauagucucc

SEQ ID NO: 3251741 - RNA, 19 nt, Artificial Sequence
  Description of Artificial Sequence: Synthetic oligonucleotide
uguuuaacuuccaagcaug

SEQ ID NO: 3251742 - RNA, 19 nt, Artificial Sequence
  Description of Artificial Sequence: Synthetic oligonucleotide
acauaaggagaugugagcc

SEQ ID NO: 3251743 - RNA, 19 nt, Artificial Sequence
  Description of Artificial Sequence: Synthetic oligonucleotide
auuuaaacaaacucuauuu

SEQ ID NO: 3251744 - RNA, 19 nt, Artificial Sequence
  Description of Artificial Sequence: Synthetic oligonucleotide
uuuaaacaaacucuauuuc

SEQ ID NO: 3251745 - RNA, 19 nt, Artificial Sequence
  Description of Artificial Sequence: Synthetic oligonucleotide
uaacuuccaagcaugagug

SEQ ID NO: 3251746 - RNA, 19 nt, Artificial Sequence
  Description of Artificial Sequence: Synthetic oligonucleotide
uuuaaauagucuccaagaa

SEQ ID NO: 3251747 - RNA, 19 nt, Artificial Sequence
  Description of Artificial Sequence: Synthetic oligonucleotide
uacuuauuuaaauagucuc

SEQ ID NO: 3251748 - RNA, 19 nt, Artificial Sequence
  Description of Artificial Sequence: Synthetic oligonucleotide
agcaggaaaaugccaagcc

SEQ ID NO: 3251749 - RNA, 19 nt, Artificial Sequence
  Description of Artificial Sequence: Synthetic oligonucleotide
ugacuuucuacagugagag

SEQ ID NO: 3251750 - RNA, 19 nt, Artificial Sequence
  Description of Artificial Sequence: Synthetic oligonucleotide
uaauacuuauuuaaauagu

SEQ ID NO: 3251751 - RNA, 19 nt, Artificial Sequence
  Description of Artificial Sequence: Synthetic oligonucleotide
uuaaauagucuccaagaaa

SEQ ID NO: 3251752 - RNA, 19 nt, Artificial Sequence
  Description of Artificial Sequence: Synthetic oligonucleotide
uagucuccaagaaagacca

SEQ ID NO: 3251753 - RNA, 19 nt, Artificial Sequence
  Description of Artificial Sequence: Synthetic oligonucleotide
aaucacagucaaaagcccc

SEQ ID NO: 3251754 - RNA, 19 nt, Artificial Sequence
  Description of Artificial Sequence: Synthetic oligonucleotide
aaacauaaggagaugugag

SEQ ID NO: 3251755 - RNA, 19 nt, Artificial Sequence
  Description of Artificial Sequence: Synthetic oligonucleotide
uaaauggcuacauaauacu

SEQ ID NO: 3251756 - RNA, 19 nt, Artificial Sequence
  Description of Artificial Sequence: Synthetic oligonucleotide
agugggcacacacagaguc

SEQ ID NO: 3251757 - RNA, 19 nt, Artificial Sequence
  Description of Artificial Sequence: Synthetic oligonucleotide
auagucuccaagaaagacc

SEQ ID NO: 3251758 - RNA, 19 nt, Artificial Sequence
  Description of Artificial Sequence: Synthetic oligonucleotide
aaacccacgagaaucacag

SEQ ID NO: 3251759 - RNA, 19 nt, Artificial Sequence
  Description of Artificial Sequence: Synthetic oligonucleotide
uaaacaaacucuauuucau

SEQ ID NO: 3251760 - RNA, 19 nt, Artificial Sequence
  Description of Artificial Sequence: Synthetic oligonucleotide
aacaaacucuauuucauuu

SEQ ID NO: 3251761 - RNA, 19 nt, Artificial Sequence
  Description of Artificial Sequence: Synthetic oligonucleotide
cuaauccucugccugaugg

SEQ ID NO: 3251762 - RNA, 19 nt, Artificial Sequence
  Description of Artificial Sequence: Synthetic oligonucleotide
ucguccagaaacauaagga

SEQ ID NO: 3251763 - RNA, 19 nt, Artificial Sequence
  Description of Artificial Sequence: Synthetic oligonucleotide
acaagcuuguuuaacuucc

SEQ ID NO: 3251764 - RNA, 19 nt, Artificial Sequence
  Description of Artificial Sequence: Synthetic oligonucleotide
uccagaaacauaaggagau

SEQ ID NO: 3251765 - RNA, 19 nt, Artificial Sequence
  Description of Artificial Sequence: Synthetic oligonucleotide
gugacagucacugagcacg

SEQ ID NO: 3251766 - RNA, 19 nt, Artificial Sequence
  Description of Artificial Sequence: Synthetic oligonucleotide
ucugcuaauccucugccug

SEQ ID NO: 3251767 - RNA, 19 nt, Artificial Sequence
  Description of Artificial Sequence: Synthetic oligonucleotide
aucuccaugugacagucac

SEQ ID NO: 3251768 - RNA, 19 nt, Artificial Sequence
  Description of Artificial Sequence: Synthetic oligonucleotide
ucaaaagccccaaagccac

SEQ ID NO: 3251769 - RNA, 19 nt, Artificial Sequence
  Description of Artificial Sequence: Synthetic oligonucleotide
aauaacaguggcuaccauu

SEQ ID NO: 3251770 - RNA, 19 nt, Artificial Sequence
  Description of Artificial Sequence: Synthetic oligonucleotide
caggaaaaugccaagcccc

SEQ ID NO: 3251771 - RNA, 19 nt, Artificial Sequence
  Description of Artificial Sequence: Synthetic oligonucleotide
agugagagccauuuaaaca

SEQ ID NO: 3251772 - RNA, 19 nt, Artificial Sequence
  Description of Artificial Sequence: Synthetic oligonucleotide
agaauuccagacuagaauu

SEQ ID NO: 3251773 - RNA, 19 nt, Artificial Sequence
  Description of Artificial Sequence: Synthetic oligonucleotide
acacagaguccuuggagcc

SEQ ID NO: 3251774 - RNA, 19 nt, Artificial Sequence
  Description of Artificial Sequence: Synthetic oligonucleotide
uacagugagagccauuuaa

SEQ ID NO: 3251775 - RNA, 19 nt, Artificial Sequence
  Description of Artificial Sequence: Synthetic oligonucleotide
uuuuccacauaucuuugac

SEQ ID NO: 3251776 - RNA, 19 nt, Artificial Sequence
  Description of Artificial Sequence: Synthetic oligonucleotide
uggcacaucaguaaaccca

SEQ ID NO: 3251777 - RNA, 19 nt, Artificial Sequence
  Description of Artificial Sequence: Synthetic oligonucleotide
uuccucgucguccagaaac

SEQ ID NO: 3251778 - RNA, 19 nt, Artificial Sequence
  Description of Artificial Sequence: Synthetic oligonucleotide
cagaucuaggauuuaaaug

SEQ ID NO: 3251779 - RNA, 19 nt, Artificial Sequence
  Description of Artificial Sequence: Synthetic oligonucleotide
aguccuuggagccacagca

SEQ ID NO: 3251780 - RNA, 19 nt, Artificial Sequence
  Description of Artificial Sequence: Synthetic oligonucleotide
uaguugaucuccaugugac

SEQ ID NO: 3251781 - RNA, 19 nt, Artificial Sequence
  Description of Artificial Sequence: Synthetic oligonucleotide
aaacucuauuucauuugcc

SEQ ID NO: 3251782 - RNA, 19 nt, Artificial Sequence
  Description of Artificial Sequence: Synthetic oligonucleotide
cuacauaauacuuauuuaa

SEQ ID NO: 3251783 - RNA, 19 nt, Artificial Sequence
  Description of Artificial Sequence: Synthetic oligonucleotide
acccacgagaaucacaguc

SEQ ID NO: 3251784 - RNA, 19 nt, Artificial Sequence
  Description of Artificial Sequence: Synthetic oligonucleotide
acaaacucuauuucauuug

SEQ ID NO: 3251785 - RNA, 19 nt, Artificial Sequence
  Description of Artificial Sequence: Synthetic oligonucleotide
caaacucuauuucauuugc

SEQ ID NO: 3251786 - RNA, 19 nt, Artificial Sequence
  Description of Artificial Sequence: Synthetic oligonucleotide
ucgucguccagaaacauaa

SEQ ID NO: 3251787 - RNA, 19 nt, Artificial Sequence
  Description of Artificial Sequence: Synthetic oligonucleotide
gagccauuuaaacaaacuc

SEQ ID NO: 3251788 - RNA, 19 nt, Artificial Sequence
  Description of Artificial Sequence: Synthetic oligonucleotide
agcuuguuuaacuuccaag

SEQ ID NO: 3251789 - RNA, 19 nt, Artificial Sequence
  Description of Artificial Sequence: Synthetic oligonucleotide
ucuaggauuuaaauggcua

SEQ ID NO: 3251790 - RNA, 19 nt, Artificial Sequence
  Description of Artificial Sequence: Synthetic oligonucleotide
ucuccaagaaagaccagca

SEQ ID NO: 3251791 - RNA, 19 nt, Artificial Sequence
  Description of Artificial Sequence: Synthetic oligonucleotide
gcuuguuuaacuuccaagc

SEQ ID NO: 3251792 - RNA, 19 nt, Artificial Sequence
  Description of Artificial Sequence: Synthetic oligonucleotide
ucauuugcccagaucuagg

SEQ ID NO: 3251793 - RNA, 19 nt, Artificial Sequence
  Description of Artificial Sequence: Synthetic oligonucleotide
ucauccuuccuuguggagg

SEQ ID NO: 3251794 - RNA, 19 nt, Artificial Sequence
  Description of Artificial Sequence: Synthetic oligonucleotide
cucuauuucauuugcccag

SEQ ID NO: 3251795 - RNA, 19 nt, Artificial Sequence
  Description of Artificial Sequence: Synthetic oligonucleotide
augagugagaacaugaggu

SEQ ID NO: 3251796 - RNA, 19 nt, Artificial Sequence
  Description of Artificial Sequence: Synthetic oligonucleotide
cauaauacuuauuuaaaua

SEQ ID NO: 3251797 - RNA, 19 nt, Artificial Sequence
  Description of Artificial Sequence: Synthetic oligonucleotide
ugcacagaauuccagacua

SEQ ID NO: 3251798 - RNA, 19 nt, Artificial Sequence
  Description of Artificial Sequence: Synthetic oligonucleotide
agaugagggagccagggug

SEQ ID NO: 3251799 - RNA, 19 nt, Artificial Sequence
  Description of Artificial Sequence: Synthetic oligonucleotide
uuguuuaacuuccaagcau

SEQ ID NO: 3251800 - RNA, 19 nt, Artificial Sequence
  Description of Artificial Sequence: Synthetic oligonucleotide
ucucccugcaacuauggca

SEQ ID NO: 3251801 - RNA, 19 nt, Artificial Sequence
  Description of Artificial Sequence: Synthetic oligonucleotide
gucguccagaaacauaagg

SEQ ID NO: 3251802 - RNA, 19 nt, Artificial Sequence
  Description of Artificial Sequence: Synthetic oligonucleotide
acagagaugguggagguag

SEQ ID NO: 3251803 - RNA, 19 nt, Artificial Sequence
  Description of Artificial Sequence: Synthetic oligonucleotide
ugagccuuugucugcacag

SEQ ID NO: 3251804 - RNA, 19 nt, Artificial Sequence
  Description of Artificial Sequence: Synthetic oligonucleotide
auggcauaucacuuccucg

SEQ ID NO: 3251805 - RNA, 19 nt, Artificial Sequence
  Description of Artificial Sequence: Synthetic oligonucleotide
ugagugagaacaugaggug

SEQ ID NO: 3251806 - RNA, 19 nt, Artificial Sequence
  Description of Artificial Sequence: Synthetic oligonucleotide
gaaacauaaggagauguga

SEQ ID NO: 3251807 - RNA, 19 nt, Artificial Sequence
  Description of Artificial Sequence: Synthetic oligonucleotide
agaugugagccuuugucug

SEQ ID NO: 3251808 - RNA, 19 nt, Artificial Sequence
  Description of Artificial Sequence: Synthetic oligonucleotide
guagagaugagggagccag

SEQ ID NO: 3251809 - RNA, 19 nt, Artificial Sequence
  Description of Artificial Sequence: Synthetic oligonucleotide
ucugccugauggcauauca

SEQ ID NO: 3251810 - RNA, 19 nt, Artificial Sequence
  Description of Artificial Sequence: Synthetic oligonucleotide
acagcaugggauccguugg

SEQ ID NO: 3251811 - RNA, 19 nt, Artificial Sequence
  Description of Artificial Sequence: Synthetic oligonucleotide
ugucuaguugaucuccaug

SEQ ID NO: 3251812 - RNA, 19 nt, Artificial Sequence
  Description of Artificial Sequence: Synthetic oligonucleotide
uaccauuccucauccagag

SEQ ID NO: 3251813 - RNA, 19 nt, Artificial Sequence
  Description of Artificial Sequence: Synthetic oligonucleotide
ucugcacagaauuccagac

SEQ ID NO: 3251814 - RNA, 19 nt, Artificial Sequence
  Description of Artificial Sequence: Synthetic oligonucleotide
guugaucuccaugugacag

SEQ ID NO: 3251815 - RNA, 19 nt, Artificial Sequence
  Description of Artificial Sequence: Synthetic oligonucleotide
uuuccacauaucuuugaca

SEQ ID NO: 3251816 - RNA, 19 nt, Artificial Sequence
  Description of Artificial Sequence: Synthetic oligonucleotide
uucauuugcccagaucuag

SEQ ID NO: 3251817 - RNA, 19 nt, Artificial Sequence
  Description of Artificial Sequence: Synthetic oligonucleotide
uuuucaucugauaaggucc

SEQ ID NO: 3251818 - RNA, 19 nt, Artificial Sequence
  Description of Artificial Sequence: Synthetic oligonucleotide
agugauauacuuuucaucu

SEQ ID NO: 3251819 - RNA, 19 nt, Artificial Sequence
  Description of Artificial Sequence: Synthetic oligonucleotide
auagauguuugucacaagg

SEQ ID NO: 3251820 - RNA, 19 nt, Artificial Sequence
  Description of Artificial Sequence: Synthetic oligonucleotide
ucaaucuucucccagagac

SEQ ID NO: 3251821 - RNA, 19 nt, Artificial Sequence
  Description of Artificial Sequence: Synthetic oligonucleotide
aagugauauacuuuucauc

SEQ ID NO: 3251822 - RNA, 19 nt, Artificial Sequence
  Description of Artificial Sequence: Synthetic oligonucleotide
accaaguugauuuuggaag

SEQ ID NO: 3251823 - RNA, 19 nt, Artificial Sequence
  Description of Artificial Sequence: Synthetic oligonucleotide
ugucacaaggaccauauug

SEQ ID NO: 3251824 - RNA, 19 nt, Artificial Sequence
  Description of Artificial Sequence: Synthetic oligonucleotide
gacuuagcauuguagaagg

SEQ ID NO: 3251825 - RNA, 19 nt, Artificial Sequence
  Description of Artificial Sequence: Synthetic oligonucleotide
agauguuugucacaaggac

SEQ ID NO: 3251826 - RNA, 19 nt, Artificial Sequence
  Description of Artificial Sequence: Synthetic oligonucleotide
agaucuaccaaguugauuu

SEQ ID NO: 3251827 - RNA, 19 nt, Artificial Sequence
  Description of Artificial Sequence: Synthetic oligonucleotide
aaucuucucccagagacac

SEQ ID NO: 3251828 - RNA, 19 nt, Artificial Sequence
  Description of Artificial Sequence: Synthetic oligonucleotide
ucuaccaaguugauuuugg

SEQ ID NO: 3251829 - RNA, 19 nt, Artificial Sequence
  Description of Artificial Sequence: Synthetic oligonucleotide
uuagcauuguagaaggaga

SEQ ID NO: 3251830 - RNA, 19 nt, Artificial Sequence
  Description of Artificial Sequence: Synthetic oligonucleotide
uuucaucugauaagguccg

SEQ ID NO: 3251831 - RNA, 19 nt, Artificial Sequence
  Description of Artificial Sequence: Synthetic oligonucleotide
aaggagauggagucaggac

SEQ ID NO: 3251832 - RNA, 19 nt, Artificial Sequence
  Description of Artificial Sequence: Synthetic oligonucleotide
aacgacagcgacuuguuga

SEQ ID NO: 3251833 - RNA, 19 nt, Artificial Sequence
  Description of Artificial Sequence: Synthetic oligonucleotide
uguagaaggagauggaguc

SEQ ID NO: 3251834 - RNA, 19 nt, Artificial Sequence
  Description of Artificial Sequence: Synthetic oligonucleotide
ucuugacuuagcauuguag

SEQ ID NO: 3251835 - RNA, 19 nt, Artificial Sequence
  Description of Artificial Sequence: Synthetic oligonucleotide
ucugucuugacuuagcauu

SEQ ID NO: 3251836 - RNA, 19 nt, Artificial Sequence
  Description of Artificial Sequence: Synthetic oligonucleotide
agaacucuaccuucugacc

SEQ ID NO: 3251837 - RNA, 19 nt, Artificial Sequence
  Description of Artificial Sequence: Synthetic oligonucleotide
acaaggaccauauugcagu

SEQ ID NO: 3251838 - RNA, 19 nt, Artificial Sequence
  Description of Artificial Sequence: Synthetic oligonucleotide
aaaaggacucauuguacca

SEQ ID NO: 3251839 - RNA, 19 nt, Artificial Sequence
  Description of Artificial Sequence: Synthetic oligonucleotide
auacuuuucaucugauaag

SEQ ID NO: 3251840 - RNA, 19 nt, Artificial Sequence
  Description of Artificial Sequence: Synthetic oligonucleotide
accauauugcaguuucccc

SEQ ID NO: 3251841 - RNA, 19 nt, Artificial Sequence
  Description of Artificial Sequence: Synthetic oligonucleotide
caaaaggacucauuguacc

SEQ ID NO: 3251842 - RNA, 19 nt, Artificial Sequence
  Description of Artificial Sequence: Synthetic oligonucleotide
gaacucuaccuucugaccc

SEQ ID NO: 3251843 - RNA, 19 nt, Artificial Sequence
  Description of Artificial Sequence: Synthetic oligonucleotide
ugcuccaggaacgacagcg

SEQ ID NO: 3251844 - RNA, 19 nt, Artificial Sequence
  Description of Artificial Sequence: Synthetic oligonucleotide
aggaccauauugcaguuuc

SEQ ID NO: 3251845 - RNA, 19 nt, Artificial Sequence
  Description of Artificial Sequence: Synthetic oligonucleotide
ucuccauagauguuuguca

SEQ ID NO: 3251846 - RNA, 19 nt, Artificial Sequence
  Description of Artificial Sequence: Synthetic oligonucleotide
cuuuucaucugauaagguc

SEQ ID NO: 3251847 - RNA, 19 nt, Artificial Sequence
  Description of Artificial Sequence: Synthetic oligonucleotide
uuugucacaaggaccauau

SEQ ID NO: 3251848 - RNA, 19 nt, Artificial Sequence
  Description of Artificial Sequence: Synthetic oligonucleotide
gauguuugucacaaggacc

SEQ ID NO: 3251849 - RNA, 19 nt, Artificial Sequence
  Description of Artificial Sequence: Synthetic oligonucleotide
uucuugguacucauuucgg

SEQ ID NO: 3251850 - RNA, 19 nt, Artificial Sequence
  Description of Artificial Sequence: Synthetic oligonucleotide
augagcaggcgauugcggc

SEQ ID NO: 3251851 - RNA, 19 nt, Artificial Sequence
  Description of Artificial Sequence: Synthetic oligonucleotide
uuuuggaagugauauacuu

SEQ ID NO: 3251852 - RNA, 19 nt, Artificial Sequence
  Description of Artificial Sequence: Synthetic oligonucleotide
gacaaaaggacucauugua

SEQ ID NO: 3251853 - RNA, 19 nt, Artificial Sequence
  Description of Artificial Sequence: Synthetic oligonucleotide
cuuagcauuguagaaggag

SEQ ID NO: 3251854 - RNA, 19 nt, Artificial Sequence
  Description of Artificial Sequence: Synthetic oligonucleotide
ugggaugacaaaaggacuc

SEQ ID NO: 3251855 - RNA, 19 nt, Artificial Sequence
  Description of Artificial Sequence: Synthetic oligonucleotide
uucuucaagacaccguuuc

SEQ ID NO: 3251856 - RNA, 19 nt, Artificial Sequence
  Description of Artificial Sequence: Synthetic oligonucleotide
cuugacuuagcauuguaga

SEQ ID NO: 3251857 - RNA, 19 nt, Artificial Sequence
  Description of Artificial Sequence: Synthetic oligonucleotide
ugucugaaucuccucuggg

SEQ ID NO: 3251858 - RNA, 19 nt, Artificial Sequence
  Description of Artificial Sequence: Synthetic oligonucleotide
gacucauuguaccagaugu

SEQ ID NO: 3251859 - RNA, 19 nt, Artificial Sequence
  Description of Artificial Sequence: Synthetic oligonucleotide
gucacaaggaccauauugc

SEQ ID NO: 3251860 - RNA, 19 nt, Artificial Sequence
  Description of Artificial Sequence: Synthetic oligonucleotide
caccguuucuucuaacugg

SEQ ID NO: 3251861 - RNA, 19 nt, Artificial Sequence
  Description of Artificial Sequence: Synthetic oligonucleotide
gauguggucccgcuucugg

SEQ ID NO: 3251862 - RNA, 19 nt, Artificial Sequence
  Description of Artificial Sequence: Synthetic oligonucleotide
uuuagaacucuaccuucug

SEQ ID NO: 3251863 - RNA, 19 nt, Artificial Sequence
  Description of Artificial Sequence: Synthetic oligonucleotide
aauccugcugacaggcacc

SEQ ID NO: 3251864 - RNA, 19 nt, Artificial Sequence
  Description of Artificial Sequence: Synthetic oligonucleotide
ucugaaucuccucugggau

SEQ ID NO: 3251865 - RNA, 19 nt, Artificial Sequence
  Description of Artificial Sequence: Synthetic oligonucleotide
acaaaaggacucauuguac

SEQ ID NO: 3251866 - RNA, 19 nt, Artificial Sequence
  Description of Artificial Sequence: Synthetic oligonucleotide
aguacagucugcugcagcu

SEQ ID NO: 3251867 - RNA, 19 nt, Artificial Sequence
  Description of Artificial Sequence: Synthetic oligonucleotide
uuuggaagugauauacuuu

SEQ ID NO: 3251868 - RNA, 19 nt, Artificial Sequence
  Description of Artificial Sequence: Synthetic oligonucleotide
uagaaggagauggagucag

SEQ ID NO: 3251869 - RNA, 19 nt, Artificial Sequence
  Description of Artificial Sequence: Synthetic oligonucleotide
ugcacugccggaaagggau

SEQ ID NO: 3251870 - RNA, 19 nt, Artificial Sequence
  Description of Artificial Sequence: Synthetic oligonucleotide
aaauuccaugagcaggcga

SEQ ID NO: 3251871 - RNA, 19 nt, Artificial Sequence
  Description of Artificial Sequence: Synthetic oligonucleotide
ugacaaaaggacucauugu

SEQ ID NO: 3251872 - RNA, 19 nt, Artificial Sequence
  Description of Artificial Sequence: Synthetic oligonucleotide
auuucgguacugcuucuuc

SEQ ID NO: 3251873 - RNA, 19 nt, Artificial Sequence
  Description of Artificial Sequence: Synthetic oligonucleotide
cucauuucgguacugcuuc

SEQ ID NO: 3251874 - RNA, 19 nt, Artificial Sequence
  Description of Artificial Sequence: Synthetic oligonucleotide
uugacuuagcauuguagaa

SEQ ID NO: 3251875 - RNA, 19 nt, Artificial Sequence
  Description of Artificial Sequence: Synthetic oligonucleotide
uccuuuagaacucuaccuu

SEQ ID NO: 3251876 - RNA, 19 nt, Artificial Sequence
  Description of Artificial Sequence: Synthetic oligonucleotide
cugacaggcaccaugccug

SEQ ID NO: 3251877 - RNA, 19 nt, Artificial Sequence
  Description of Artificial Sequence: Synthetic oligonucleotide
agccagaucuaccaaguug

SEQ ID NO: 3251878 - RNA, 19 nt, Artificial Sequence
  Description of Artificial Sequence: Synthetic oligonucleotide
aacucuaccuucugacccu

SEQ ID NO: 3251879 - RNA, 19 nt, Artificial Sequence
  Description of Artificial Sequence: Synthetic oligonucleotide
ccuaaggagucuuucaggg

SEQ ID NO: 3251880 - RNA, 19 nt, Artificial Sequence
  Description of Artificial Sequence: Synthetic oligonucleotide
auguuugucacaaggacca

SEQ ID NO: 3251881 - RNA, 19 nt, Artificial Sequence
  Description of Artificial Sequence: Synthetic oligonucleotide
ugcugucugaaucuccucu

SEQ ID NO: 3251882 - RNA, 19 nt, Artificial Sequence
  Description of Artificial Sequence: Synthetic oligonucleotide
ugucugucuugacuuagca

SEQ ID NO: 3251883 - RNA, 19 nt, Artificial Sequence
  Description of Artificial Sequence: Synthetic oligonucleotide
aaggacucauuguaccaga

SEQ ID NO: 3251884 - RNA, 19 nt, Artificial Sequence
  Description of Artificial Sequence: Synthetic oligonucleotide
cucugaaccagccagaucu

SEQ ID NO: 3251885 - RNA, 19 nt, Artificial Sequence
  Description of Artificial Sequence: Synthetic oligonucleotide
uucaagacaccguuucuuc

SEQ ID NO: 3251886 - RNA, 19 nt, Artificial Sequence
  Description of Artificial Sequence: Synthetic oligonucleotide
cuccauagauguuugucac

SEQ ID NO: 3251887 - RNA, 19 nt, Artificial Sequence
  Description of Artificial Sequence: Synthetic oligonucleotide
ucacaaggaccauauugca

SEQ ID NO: 3251888 - RNA, 19 nt, Artificial Sequence
  Description of Artificial Sequence: Synthetic oligonucleotide
gagucuuucagggcguggg

SEQ ID NO: 3251889 - RNA, 19 nt, Artificial Sequence
  Description of Artificial Sequence: Synthetic oligonucleotide
gaccauauugcaguuuccc

SEQ ID NO: 3251890 - RNA, 19 nt, Artificial Sequence
  Description of Artificial Sequence: Synthetic oligonucleotide
uaccaaguugauuuuggaa

SEQ ID NO: 3251891 - RNA, 19 nt, Artificial Sequence
  Description of Artificial Sequence: Synthetic oligonucleotide
uguagguggcuuccuuuag

SEQ ID NO: 3251892 - RNA, 19 nt, Artificial Sequence
  Description of Artificial Sequence: Synthetic oligonucleotide
gcgauugcggcacugaucc

SEQ ID NO: 3251893 - RNA, 19 nt, Artificial Sequence
  Description of Artificial Sequence: Synthetic oligonucleotide
ucaucugauaagguccgag

SEQ ID NO: 3251894 - RNA, 19 nt, Artificial Sequence
  Description of Artificial Sequence: Synthetic oligonucleotide
acaccguuucuucuaacug

SEQ ID NO: 3251895 - RNA, 19 nt, Artificial Sequence
  Description of Artificial Sequence: Synthetic oligonucleotide
cacugauccuaccaggcgc

SEQ ID NO: 3251896 - RNA, 19 nt, Artificial Sequence
  Description of Artificial Sequence: Synthetic oligonucleotide
cacaaggaccauauugcag

SEQ ID NO: 3251897 - RNA, 19 nt, Artificial Sequence
  Description of Artificial Sequence: Synthetic oligonucleotide
uuucgguacugcuucuuca

SEQ ID NO: 3251898 - RNA, 19 nt, Artificial Sequence
  Description of Artificial Sequence: Synthetic oligonucleotide
ucuuucagggcguggguga

SEQ ID NO: 3251899 - RNA, 19 nt, Artificial Sequence
  Description of Artificial Sequence: Synthetic oligonucleotide
uagcauuguagaaggagau

SEQ ID NO: 3251900 - RNA, 19 nt, Artificial Sequence
  Description of Artificial Sequence: Synthetic oligonucleotide
ucuugguacucauuucggu

SEQ ID NO: 3251901 - RNA, 19 nt, Artificial Sequence
  Description of Artificial Sequence: Synthetic oligonucleotide
aaguugauuuuggaaguga

SEQ ID NO: 3251902 - RNA, 19 nt, Artificial Sequence
  Description of Artificial Sequence: Synthetic oligonucleotide
aagggcaaugauggccugc

SEQ ID NO: 3251903 - RNA, 19 nt, Artificial Sequence
  Description of Artificial Sequence: Synthetic oligonucleotide
ucuucaagacaccguuucu

SEQ ID NO: 3251904 - RNA, 19 nt, Artificial Sequence
  Description of Artificial Sequence: Synthetic oligonucleotide
gaggucucgcaguucuugg

SEQ ID NO: 3251905 - RNA, 19 nt, Artificial Sequence
  Description of Artificial Sequence: Synthetic oligonucleotide
cuaaggagucuuucagggc

SEQ ID NO: 3251906 - RNA, 19 nt, Artificial Sequence
  Description of Artificial Sequence: Synthetic oligonucleotide
aagccucucugaaccagcc

SEQ ID NO: 3251907 - RNA, 19 nt, Artificial Sequence
  Description of Artificial Sequence: Synthetic oligonucleotide
cacaauccugcugacaggc

SEQ ID NO: 3251908 - RNA, 19 nt, Artificial Sequence
  Description of Artificial Sequence: Synthetic oligonucleotide
ucaagacaccguuucuucu

SEQ ID NO: 3251909 - RNA, 19 nt, Artificial Sequence
  Description of Artificial Sequence: Synthetic oligonucleotide
gacccugucuucccaagcc

SEQ ID NO: 3251910 - RNA, 19 nt, Artificial Sequence
  Description of Artificial Sequence: Synthetic oligonucleotide
uacucauuucgguacugcu

SEQ ID NO: 3251911 - RNA, 19 nt, Artificial Sequence
  Description of Artificial Sequence: Synthetic oligonucleotide
gauccuaccaggcgcuggc

SEQ ID NO: 3251912 - RNA, 19 nt, Artificial Sequence
  Description of Artificial Sequence: Synthetic oligonucleotide
ggguaguacagucugcugc

SEQ ID NO: 3251913 - RNA, 19 nt, Artificial Sequence
  Description of Artificial Sequence: Synthetic oligonucleotide
uccaugagcaggcgauugc

SEQ ID NO: 3251914 - RNA, 19 nt, Artificial Sequence
  Description of Artificial Sequence: Synthetic oligonucleotide
gugauauacuuuucaucug

SEQ ID NO: 3251915 - RNA, 19 nt, Artificial Sequence
  Description of Artificial Sequence: Synthetic oligonucleotide
cuugcacugccggaaaggg

SEQ ID NO: 3251916 - RNA, 19 nt, Artificial Sequence
  Description of Artificial Sequence: Synthetic oligonucleotide
ugcggcacugauccuacca

SEQ ID NO: 3251917 - RNA, 19 nt, Artificial Sequence
  Description of Artificial Sequence: Synthetic oligonucleotide
aauacaaauacucaauagg

SEQ ID NO: 3251918 - RNA, 19 nt, Artificial Sequence
  Description of Artificial Sequence: Synthetic oligonucleotide
aauuuuaauacaaauacuc

SEQ ID NO: 3251919 - RNA, 19 nt, Artificial Sequence
  Description of Artificial Sequence: Synthetic oligonucleotide
aguaaacuaauuuuaauac

SEQ ID NO: 3251920 - RNA, 19 nt, Artificial Sequence
  Description of Artificial Sequence: Synthetic oligonucleotide
cuaauuuuaauacaaauac

SEQ ID NO: 3251921 - RNA, 19 nt, Artificial Sequence
  Description of Artificial Sequence: Synthetic oligonucleotide
uuuucauccauacaucugg

SEQ ID NO: 3251922 - RNA, 19 nt, Artificial Sequence
  Description of Artificial Sequence: Synthetic oligonucleotide
uaaacuaauuuuaauacaa

SEQ ID NO: 3251923 - RNA, 19 nt, Artificial Sequence
  Description of Artificial Sequence: Synthetic oligonucleotide
gucauaguuauuuucaucc

SEQ ID NO: 3251924 - RNA, 19 nt, Artificial Sequence
  Description of Artificial Sequence: Synthetic oligonucleotide
ucauccauacaucugguag

SEQ ID NO: 3251925 - RNA, 19 nt, Artificial Sequence
  Description of Artificial Sequence: Synthetic oligonucleotide
uuuuaauacaaauacucaa

SEQ ID NO: 3251926 - RNA, 19 nt, Artificial Sequence
  Description of Artificial Sequence: Synthetic oligonucleotide
uaauacaaauacucaauag

SEQ ID NO: 3251927 - RNA, 19 nt, Artificial Sequence
  Description of Artificial Sequence: Synthetic oligonucleotide
cuucuuuggaucaugacag

SEQ ID NO: 3251928 - RNA, 19 nt, Artificial Sequence
  Description of Artificial Sequence: Synthetic oligonucleotide
uuuugcauugcucucaaga

SEQ ID NO: 3251929 - RNA, 19 nt, Artificial Sequence
  Description of Artificial Sequence: Synthetic oligonucleotide
gacuucaagaaguaauugg

SEQ ID NO: 3251930 - RNA, 19 nt, Artificial Sequence
  Description of Artificial Sequence: Synthetic oligonucleotide
ucaagaaguaauuggaaca

SEQ ID NO: 3251931 - RNA, 19 nt, Artificial Sequence
  Description of Artificial Sequence: Synthetic oligonucleotide
uuuaauacaaauacucaau

SEQ ID NO: 3251932 - RNA, 19 nt, Artificial Sequence
  Description of Artificial Sequence: Synthetic oligonucleotide
aaggguuuaugucuggauc

SEQ ID NO: 3251933 - RNA, 19 nt, Artificial Sequence
  Description of Artificial Sequence: Synthetic oligonucleotide
augacagaauuccagaauc

SEQ ID NO: 3251934 - RNA, 19 nt, Artificial Sequence
  Description of Artificial Sequence: Synthetic oligonucleotide
aacuaauuuuaauacaaau

SEQ ID NO: 3251935 - RNA, 19 nt, Artificial Sequence
  Description of Artificial Sequence: Synthetic oligonucleotide
auacaaauacucaauaggg

SEQ ID NO: 3251936 - RNA, 19 nt, Artificial Sequence
  Description of Artificial Sequence: Synthetic oligonucleotide
aaguaauuggaacaucucu

SEQ ID NO: 3251937 - RNA, 19 nt, Artificial Sequence
  Description of Artificial Sequence: Synthetic oligonucleotide
uuauaguaaacuaauuuua

SEQ ID NO: 3251938 - RNA, 19 nt, Artificial Sequence
  Description of Artificial Sequence: Synthetic oligonucleotide
acaaauacucaauagggca

SEQ ID NO: 3251939 - RNA, 19 nt, Artificial Sequence
  Description of Artificial Sequence: Synthetic oligonucleotide
ucagauuccgacagcaagg

SEQ ID NO: 3251940 - RNA, 19 nt, Artificial Sequence
  Description of Artificial Sequence: Synthetic oligonucleotide
uuugacuucaagaaguaau

SEQ ID NO: 3251941 - RNA, 19 nt, Artificial Sequence
  Description of Artificial Sequence: Synthetic oligonucleotide
uaauuuuaauacaaauacu

SEQ ID NO: 3251942 - RNA, 19 nt, Artificial Sequence
  Description of Artificial Sequence: Synthetic oligonucleotide
cagaauuccagaaucgccg

SEQ ID NO: 3251943 - RNA, 19 nt, Artificial Sequence
  Description of Artificial Sequence: Synthetic oligonucleotide
uacaaauacucaauagggc

SEQ ID NO: 3251944 - RNA, 19 nt, Artificial Sequence
  Description of Artificial Sequence: Synthetic oligonucleotide
uauaguaaacuaauuuuaa

SEQ ID NO: 3251945 - RNA, 19 nt, Artificial Sequence
  Description of Artificial Sequence: Synthetic oligonucleotide
uaguaaacuaauuuuaaua

SEQ ID NO: 3251946 - RNA, 19 nt, Artificial Sequence
  Description of Artificial Sequence: Synthetic oligonucleotide
aguuauaguaaacuaauuu

SEQ ID NO: 3251947 - RNA, 19 nt, Artificial Sequence
  Description of Artificial Sequence: Synthetic oligonucleotide
aagauuucaucucuuucug

SEQ ID NO: 3251948 - RNA, 19 nt, Artificial Sequence
  Description of Artificial Sequence: Synthetic oligonucleotide
augucuggaucucucagcc

SEQ ID NO: 3251949 - RNA, 19 nt, Artificial Sequence
  Description of Artificial Sequence: Synthetic oligonucleotide
cugcuguaggcauagaugg

SEQ ID NO: 3251950 - RNA, 19 nt, Artificial Sequence
  Description of Artificial Sequence: Synthetic oligonucleotide
uuaauacaaauacucaaua

SEQ ID NO: 3251951 - RNA, 19 nt, Artificial Sequence
  Description of Artificial Sequence: Synthetic oligonucleotide
aauuggaacaucucucccu

SEQ ID NO: 3251952 - RNA, 19 nt, Artificial Sequence
  Description of Artificial Sequence: Synthetic oligonucleotide
uucaagaaguaauuggaac

SEQ ID NO: 3251953 - RNA, 19 nt, Artificial Sequence
  Description of Artificial Sequence: Synthetic oligonucleotide
uggaucaugacagaauucc

SEQ ID NO: 3251954 - RNA, 19 nt, Artificial Sequence
  Description of Artificial Sequence: Synthetic oligonucleotide
ugacagaauuccagaaucg

SEQ ID NO: 3251955 - RNA, 19 nt, Artificial Sequence
  Description of Artificial Sequence: Synthetic oligonucleotide
agacgcaucagauuccgac

SEQ ID NO: 3251956 - RNA, 19 nt, Artificial Sequence
  Description of Artificial Sequence: Synthetic oligonucleotide
guuauuuucauccauacau

SEQ ID NO: 3251957 - RNA, 19 nt, Artificial Sequence
  Description of Artificial Sequence: Synthetic oligonucleotide
uauuuucauccauacaucu

SEQ ID NO: 3251958 - RNA, 19 nt, Artificial Sequence
  Description of Artificial Sequence: Synthetic oligonucleotide
aguaauuggaacaucucuc

SEQ ID NO: 3251959 - RNA, 19 nt, Artificial Sequence
  Description of Artificial Sequence: Synthetic oligonucleotide
acagcaaggguuuaugucu

SEQ ID NO: 3251960 - RNA, 19 nt, Artificial Sequence
  Description of Artificial Sequence: Synthetic oligonucleotide
uuucaucucuuucugcugc

SEQ ID NO: 3251961 - RNA, 19 nt, Artificial Sequence
  Description of Artificial Sequence: Synthetic oligonucleotide
ugguagacgcaucagauuc

SEQ ID NO: 3251962 - RNA, 19 nt, Artificial Sequence
  Description of Artificial Sequence: Synthetic oligonucleotide
guaauuggaacaucucucc

SEQ ID NO: 3251963 - RNA, 19 nt, Artificial Sequence
  Description of Artificial Sequence: Synthetic oligonucleotide
uuuggaucaugacagaauu

SEQ ID NO: 3251964 - RNA, 19 nt, Artificial Sequence
  Description of Artificial Sequence: Synthetic oligonucleotide
cugaacuccauuuugcuuc

SEQ ID NO: 3251965 - RNA, 19 nt, Artificial Sequence
  Description of Artificial Sequence: Synthetic oligonucleotide
aaauacucaauagggcauc

SEQ ID NO: 3251966 - RNA, 19 nt, Artificial Sequence
  Description of Artificial Sequence: Synthetic oligonucleotide
aucagauuccgacagcaag

SEQ ID NO: 3251967 - RNA, 19 nt, Artificial Sequence
  Description of Artificial Sequence: Synthetic oligonucleotide
agauuucaucucuuucugc

SEQ ID NO: 3251968 - RNA, 19 nt, Artificial Sequence
  Description of Artificial Sequence: Synthetic oligonucleotide
uuaugucuggaucucucag

SEQ ID NO: 3251969 - RNA, 19 nt, Artificial Sequence
  Description of Artificial Sequence: Synthetic oligonucleotide
uuauuuucauccauacauc

SEQ ID NO: 3251970 - RNA, 19 nt, Artificial Sequence
  Description of Artificial Sequence: Synthetic oligonucleotide
ucaauagggcaucuuuugc

SEQ ID NO: 3251971 - RNA, 19 nt, Artificial Sequence
  Description of Artificial Sequence: Synthetic oligonucleotide
aauagggcaucuuuugcau

SEQ ID NO: 3251972 - RNA, 19 nt, Artificial Sequence
  Description of Artificial Sequence: Synthetic oligonucleotide
uccauuuugcuucuuugga

SEQ ID NO: 3251973 - RNA, 19 nt, Artificial Sequence
  Description of Artificial Sequence: Synthetic oligonucleotide
acagaauuccagaaucgcc

SEQ ID NO: 3251974 - RNA, 19 nt, Artificial Sequence
  Description of Artificial Sequence: Synthetic oligonucleotide
ugcauugcucucaagauuu

SEQ ID NO: 3251975 - RNA, 19 nt, Artificial Sequence
  Description of Artificial Sequence: Synthetic oligonucleotide
gaucaugacagaauuccag

SEQ ID NO: 3251976 - RNA, 19 nt, Artificial Sequence
  Description of Artificial Sequence: Synthetic oligonucleotide
guaaacuaauuuuaauaca

SEQ ID NO: 3251977 - RNA, 19 nt, Artificial Sequence
  Description of Artificial Sequence: Synthetic oligonucleotide
ucaagauuucaucucuuuc

SEQ ID NO: 3251978 - RNA, 19 nt, Artificial Sequence
  Description of Artificial Sequence: Synthetic oligonucleotide
agaauuccagaaucgccgg

SEQ ID NO: 3251979 - RNA, 19 nt, Artificial Sequence
  Description of Artificial Sequence: Synthetic oligonucleotide
uaguuauuuucauccauac

SEQ ID NO: 3251980 - RNA, 19 nt, Artificial Sequence
  Description of Artificial Sequence: Synthetic oligonucleotide
auaguaaacuaauuuuaau

SEQ ID NO: 3251981 - RNA, 19 nt, Artificial Sequence
  Description of Artificial Sequence: Synthetic oligonucleotide
auuuuaauacaaauacuca

SEQ ID NO: 3251982 - RNA, 19 nt, Artificial Sequence
  Description of Artificial Sequence: Synthetic oligonucleotide
uuugcauugcucucaagau

SEQ ID NO: 3251983 - RNA, 19 nt, Artificial Sequence
  Description of Artificial Sequence: Synthetic oligonucleotide
auuggaacaucucucccug

SEQ ID NO: 3251984 - RNA, 19 nt, Artificial Sequence
  Description of Artificial Sequence: Synthetic oligonucleotide
uaauuggaacaucucuccc

SEQ ID NO: 3251985 - RNA, 19 nt, Artificial Sequence
  Description of Artificial Sequence: Synthetic oligonucleotide
ugcucucaagauuucaucu

SEQ ID NO: 3251986 - RNA, 19 nt, Artificial Sequence
  Description of Artificial Sequence: Synthetic oligonucleotide
ucugguagacgcaucagau

SEQ ID NO: 3251987 - RNA, 19 nt, Artificial Sequence
  Description of Artificial Sequence: Synthetic oligonucleotide
cauuuugcuucuuuggauc

SEQ ID NO: 3251988 - RNA, 19 nt, Artificial Sequence
  Description of Artificial Sequence: Synthetic oligonucleotide
acuaauuuuaauacaaaua

SEQ ID NO: 3251989 - RNA, 19 nt, Artificial Sequence
  Description of Artificial Sequence: Synthetic oligonucleotide
uugacuucaagaaguaauu

SEQ ID NO: 3251990 - RNA, 19 nt, Artificial Sequence
  Description of Artificial Sequence: Synthetic oligonucleotide
ugugacuaugggcaucuug

SEQ ID NO: 3251991 - RNA, 19 nt, Artificial Sequence
  Description of Artificial Sequence: Synthetic oligonucleotide
uaugucuggaucucucagc

SEQ ID NO: 3251992 - RNA, 19 nt, Artificial Sequence
  Description of Artificial Sequence: Synthetic oligonucleotide
cuccauuuugcuucuuugg

SEQ ID NO: 3251993 - RNA, 19 nt, Artificial Sequence
  Description of Artificial Sequence: Synthetic oligonucleotide
agaaguaauuggaacaucu

SEQ ID NO: 3251994 - RNA, 19 nt, Artificial Sequence
  Description of Artificial Sequence: Synthetic oligonucleotide
aucaugacagaauuccaga

SEQ ID NO: 3251995 - RNA, 19 nt, Artificial Sequence
  Description of Artificial Sequence: Synthetic oligonucleotide
uuuaugucuggaucucuca

SEQ ID NO: 3251996 - RNA, 19 nt, Artificial Sequence
  Description of Artificial Sequence: Synthetic oligonucleotide
aggguuuaugucuggaucu

SEQ ID NO: 3251997 - RNA, 19 nt, Artificial Sequence
  Description of Artificial Sequence: Synthetic oligonucleotide
uagggcaucuuuugcauug

SEQ ID NO: 3251998 - RNA, 19 nt, Artificial Sequence
  Description of Artificial Sequence: Synthetic oligonucleotide
aagaaguaauuggaacauc

SEQ ID NO: 3251999 - RNA, 19 nt, Artificial Sequence
  Description of Artificial Sequence: Synthetic oligonucleotide
guuauaguaaacuaauuuu

SEQ ID NO: 3252000 - RNA, 19 nt, Artificial Sequence
  Description of Artificial Sequence: Synthetic oligonucleotide
cucaauagggcaucuuuug

SEQ ID NO: 3252001 - RNA, 19 nt, Artificial Sequence
  Description of Artificial Sequence: Synthetic oligonucleotide
acuucaagaaguaauugga

SEQ ID NO: 3252002 - RNA, 19 nt, Artificial Sequence
  Description of Artificial Sequence: Synthetic oligonucleotide
ucauaguuauuuucaucca

SEQ ID NO: 3252003 - RNA, 19 nt, Artificial Sequence
  Description of Artificial Sequence: Synthetic oligonucleotide
ccauacaucugguagacgc

SEQ ID NO: 3252004 - RNA, 19 nt, Artificial Sequence
  Description of Artificial Sequence: Synthetic oligonucleotide
gauuucaucucuuucugcu

SEQ ID NO: 3252005 - RNA, 19 nt, Artificial Sequence
  Description of Artificial Sequence: Synthetic oligonucleotide
aauuccagaaucgccggca

SEQ ID NO: 3252006 - RNA, 19 nt, Artificial Sequence
  Description of Artificial Sequence: Synthetic oligonucleotide
gucuggaucucucagccgc

SEQ ID NO: 3252007 - RNA, 19 nt, Artificial Sequence
  Description of Artificial Sequence: Synthetic oligonucleotide
uacucaauagggcaucuuu

SEQ ID NO: 3252008 - RNA, 19 nt, Artificial Sequence
  Description of Artificial Sequence: Synthetic oligonucleotide
aguuauuuucauccauaca

SEQ ID NO: 3252009 - RNA, 19 nt, Artificial Sequence
  Description of Artificial Sequence: Synthetic oligonucleotide
gacagaauuccagaaucgc

SEQ ID NO: 3252010 - RNA, 19 nt, Artificial Sequence
  Description of Artificial Sequence: Synthetic oligonucleotide
ugucauaguuauuuucauc

SEQ ID NO: 3252011 - RNA, 19 nt, Artificial Sequence
  Description of Artificial Sequence: Synthetic oligonucleotide
auuuugcuucuuuggauca

SEQ ID NO: 3252012 - RNA, 19 nt, Artificial Sequence
  Description of Artificial Sequence: Synthetic oligonucleotide
gacagcaaggguuuauguc

SEQ ID NO: 3252013 - RNA, 19 nt, Artificial Sequence
  Description of Artificial Sequence: Synthetic oligonucleotide
ucaugacagaauuccagaa

SEQ ID NO: 3252014 - RNA, 19 nt, Artificial Sequence
  Description of Artificial Sequence: Synthetic oligonucleotide
acuaugggcaucuugucuu

SEQ ID NO: 3252015 - RNA, 19 nt, Artificial Sequence
  Description of Artificial Sequence: Synthetic oligonucleotide
acuccauuuugcuucuuug

SEQ ID NO: 3252016 - RNA, 19 nt, Artificial Sequence
  Description of Artificial Sequence: Synthetic oligonucleotide
auuucaucucuuucugcug

SEQ ID NO: 3252017 - RNA, 19 nt, Artificial Sequence
  Description of Artificial Sequence: Synthetic oligonucleotide
ucagauauuacaaacagug

SEQ ID NO: 3252018 - RNA, 19 nt, Artificial Sequence
  Description of Artificial Sequence: Synthetic oligonucleotide
aauaucuucaacuugcacu

SEQ ID NO: 3252019 - RNA, 19 nt, Artificial Sequence
  Description of Artificial Sequence: Synthetic oligonucleotide
uuuccaaacaaaauaauca

SEQ ID NO: 3252020 - RNA, 19 nt, Artificial Sequence
  Description of Artificial Sequence: Synthetic oligonucleotide
aaaaguggggucuuccucc

SEQ ID NO: 3252021 - RNA, 19 nt, Artificial Sequence
  Description of Artificial Sequence: Synthetic oligonucleotide
aauaaucaaaauuucagau

SEQ ID NO: 3252022 - RNA, 19 nt, Artificial Sequence
  Description of Artificial Sequence: Synthetic oligonucleotide
aaaagucucuuucuuuucc

SEQ ID NO: 3252023 - RNA, 19 nt, Artificial Sequence
  Description of Artificial Sequence: Synthetic oligonucleotide
agauauuacaaacaguguc

SEQ ID NO: 3252024 - RNA, 19 nt, Artificial Sequence
  Description of Artificial Sequence: Synthetic oligonucleotide
aauucuuuggagaaaaguc

SEQ ID NO: 3252025 - RNA, 19 nt, Artificial Sequence
  Description of Artificial Sequence: Synthetic oligonucleotide
acaaacagugucaagaucc

SEQ ID NO: 3252026 - RNA, 19 nt, Artificial Sequence
  Description of Artificial Sequence: Synthetic oligonucleotide
aaauaaucaaaauuucaga

SEQ ID NO: 3252027 - RNA, 19 nt, Artificial Sequence
  Description of Artificial Sequence: Synthetic oligonucleotide
uaaucaaaauuucagauau

SEQ ID NO: 3252028 - RNA, 19 nt, Artificial Sequence
  Description of Artificial Sequence: Synthetic oligonucleotide
uuucagauauuacaaacag

SEQ ID NO: 3252029 - RNA, 19 nt, Artificial Sequence
  Description of Artificial Sequence: Synthetic oligonucleotide
aaggauucuggucaucccc

SEQ ID NO: 3252030 - RNA, 19 nt, Artificial Sequence
  Description of Artificial Sequence: Synthetic oligonucleotide
uuucgaaucaggaagacaa

SEQ ID NO: 3252031 - RNA, 19 nt, Artificial Sequence
  Description of Artificial Sequence: Synthetic oligonucleotide
aaagucucuuucuuuuccc

SEQ ID NO: 3252032 - RNA, 19 nt, Artificial Sequence
  Description of Artificial Sequence: Synthetic oligonucleotide
auaucuucaacuugcacuc

SEQ ID NO: 3252033 - RNA, 19 nt, Artificial Sequence
  Description of Artificial Sequence: Synthetic oligonucleotide
uuuuccuccucaaaagugg

SEQ ID NO: 3252034 - RNA, 19 nt, Artificial Sequence
  Description of Artificial Sequence: Synthetic oligonucleotide
uuaacucuagcaaacuucc

SEQ ID NO: 3252035 - RNA, 19 nt, Artificial Sequence
  Description of Artificial Sequence: Synthetic oligonucleotide
uucaguguaaggauucugg

SEQ ID NO: 3252036 - RNA, 19 nt, Artificial Sequence
  Description of Artificial Sequence: Synthetic oligonucleotide
aaugaacucuaugacaagg

SEQ ID NO: 3252037 - RNA, 19 nt, Artificial Sequence
  Description of Artificial Sequence: Synthetic oligonucleotide
ucaucaaaggcuuuucuag

SEQ ID NO: 3252038 - RNA, 19 nt, Artificial Sequence
  Description of Artificial Sequence: Synthetic oligonucleotide
acccauacaucauacaucg

SEQ ID NO: 3252039 - RNA, 19 nt, Artificial Sequence
  Description of Artificial Sequence: Synthetic oligonucleotide
aguaaguaagucuuuaacu

SEQ ID NO: 3252040 - RNA, 19 nt, Artificial Sequence
  Description of Artificial Sequence: Synthetic oligonucleotide
uucauucauaguaaguaag

SEQ ID NO: 3252041 - RNA, 19 nt, Artificial Sequence
  Description of Artificial Sequence: Synthetic oligonucleotide
aguguaaggauucugguca

SEQ ID NO: 3252042 - RNA, 19 nt, Artificial Sequence
  Description of Artificial Sequence: Synthetic oligonucleotide
uaauguaugguuuccaaac

SEQ ID NO: 3252043 - RNA, 19 nt, Artificial Sequence
  Description of Artificial Sequence: Synthetic oligonucleotide
agucauuucaguaaugaac

SEQ ID NO: 3252044 - RNA, 19 nt, Artificial Sequence
  Description of Artificial Sequence: Synthetic oligonucleotide
uccaauuucuucauuuucc

SEQ ID NO: 3252045 - RNA, 19 nt, Artificial Sequence
  Description of Artificial Sequence: Synthetic oligonucleotide
uuuaacucuagcaaacuuc

SEQ ID NO: 3252046 - RNA, 19 nt, Artificial Sequence
  Description of Artificial Sequence: Synthetic oligonucleotide
uauuacuguagacaaguug

SEQ ID NO: 3252047 - RNA, 19 nt, Artificial Sequence
  Description of Artificial Sequence: Synthetic oligonucleotide
caaaauuucagauauuaca

SEQ ID NO: 3252048 - RNA, 19 nt, Artificial Sequence
  Description of Artificial Sequence: Synthetic oligonucleotide
aagucuuuaacucuagcaa

SEQ ID NO: 3252049 - RNA, 19 nt, Artificial Sequence
  Description of Artificial Sequence: Synthetic oligonucleotide
cuagcuaucaugauauuac

SEQ ID NO: 3252050 - RNA, 19 nt, Artificial Sequence
  Description of Artificial Sequence: Synthetic oligonucleotide
ucuucaagaauauccacug

SEQ ID NO: 3252051 - RNA, 19 nt, Artificial Sequence
  Description of Artificial Sequence: Synthetic oligonucleotide
aucaaaggcuuuucuagcc

SEQ ID NO: 3252052 - RNA, 19 nt, Artificial Sequence
  Description of Artificial Sequence: Synthetic oligonucleotide
auuacaaacagugucaaga

SEQ ID NO: 3252053 - RNA, 19 nt, Artificial Sequence
  Description of Artificial Sequence: Synthetic oligonucleotide
gacaauaucuucaacuugc

SEQ ID NO: 3252054 - RNA, 19 nt, Artificial Sequence
  Description of Artificial Sequence: Synthetic oligonucleotide
gacaaguuguaauguaugg

SEQ ID NO: 3252055 - RNA, 19 nt, Artificial Sequence
  Description of Artificial Sequence: Synthetic oligonucleotide
uaagucuuuaacucuagca

SEQ ID NO: 3252056 - RNA, 19 nt, Artificial Sequence
  Description of Artificial Sequence: Synthetic oligonucleotide
uaucaugauauuacuguag

SEQ ID NO: 3252057 - RNA, 19 nt, Artificial Sequence
  Description of Artificial Sequence: Synthetic oligonucleotide
acaucauacaucguaauuc

SEQ ID NO: 3252058 - RNA, 19 nt, Artificial Sequence
  Description of Artificial Sequence: Synthetic oligonucleotide
aagucucuuucuuuucccc

SEQ ID NO: 3252059 - RNA, 19 nt, Artificial Sequence
  Description of Artificial Sequence: Synthetic oligonucleotide
ugucaagauccauaguugg

SEQ ID NO: 3252060 - RNA, 19 nt, Artificial Sequence
  Description of Artificial Sequence: Synthetic oligonucleotide
aaacccauacaucauacau

SEQ ID NO: 3252061 - RNA, 19 nt, Artificial Sequence
  Description of Artificial Sequence: Synthetic oligonucleotide
aauauccacugauucagug

SEQ ID NO: 3252062 - RNA, 19 nt, Artificial Sequence
  Description of Artificial Sequence: Synthetic oligonucleotide
aagaauauccacugauuca

SEQ ID NO: 3252063 - RNA, 19 nt, Artificial Sequence
  Description of Artificial Sequence: Synthetic oligonucleotide
auucauaguaaguaagucu

SEQ ID NO: 3252064 - RNA, 19 nt, Artificial Sequence
  Description of Artificial Sequence: Synthetic oligonucleotide
uucauaguaaguaagucuu

SEQ ID NO: 3252065 - RNA, 19 nt, Artificial Sequence
  Description of Artificial Sequence: Synthetic oligonucleotide
guaaguaagucuuuaacuc

SEQ ID NO: 3252066 - RNA, 19 nt, Artificial Sequence
  Description of Artificial Sequence: Synthetic oligonucleotide
uucauuuuccuccucaaaa

SEQ ID NO: 3252067 - RNA, 19 nt, Artificial Sequence
  Description of Artificial Sequence: Synthetic oligonucleotide
aguaaugaacucuaugaca

SEQ ID NO: 3252068 - RNA, 19 nt, Artificial Sequence
  Description of Artificial Sequence: Synthetic oligonucleotide
ucauuuuccuccucaaaag

SEQ ID NO: 3252069 - RNA, 19 nt, Artificial Sequence
  Description of Artificial Sequence: Synthetic oligonucleotide
uccauaguuggcuucauca

SEQ ID NO: 3252070 - RNA, 19 nt, Artificial Sequence
  Description of Artificial Sequence: Synthetic oligonucleotide
auucuggucauccccaaac

SEQ ID NO: 3252071 - RNA, 19 nt, Artificial Sequence
  Description of Artificial Sequence: Synthetic oligonucleotide
aagacaauaucuucaacuu

SEQ ID NO: 3252072 - RNA, 19 nt, Artificial Sequence
  Description of Artificial Sequence: Synthetic oligonucleotide
auuacuguagacaaguugu

SEQ ID NO: 3252073 - RNA, 19 nt, Artificial Sequence
  Description of Artificial Sequence: Synthetic oligonucleotide
agaauauccacugauucag

SEQ ID NO: 3252074 - RNA, 19 nt, Artificial Sequence
  Description of Artificial Sequence: Synthetic oligonucleotide
aguuguaauguaugguuuc

SEQ ID NO: 3252075 - RNA, 19 nt, Artificial Sequence
  Description of Artificial Sequence: Synthetic oligonucleotide
aauguaugguuuccaaaca

SEQ ID NO: 3252076 - RNA, 19 nt, Artificial Sequence
  Description of Artificial Sequence: Synthetic oligonucleotide
agugucaagauccauaguu

SEQ ID NO: 3252077 - RNA, 19 nt, Artificial Sequence
  Description of Artificial Sequence: Synthetic oligonucleotide
aaucaggaagacaauaucu

SEQ ID NO: 3252078 - RNA, 19 nt, Artificial Sequence
  Description of Artificial Sequence: Synthetic oligonucleotide
augauauuacuguagacaa

SEQ ID NO: 3252079 - RNA, 19 nt, Artificial Sequence
  Description of Artificial Sequence: Synthetic oligonucleotide
uaguaaguaagucuuuaac

SEQ ID NO: 3252080 - RNA, 19 nt, Artificial Sequence
  Description of Artificial Sequence: Synthetic oligonucleotide
uucaguaaugaacucuaug

SEQ ID NO: 3252081 - RNA, 19 nt, Artificial Sequence
  Description of Artificial Sequence: Synthetic oligonucleotide
aguuggcuucaucaaaggc

SEQ ID NO: 3252082 - RNA, 19 nt, Artificial Sequence
  Description of Artificial Sequence: Synthetic oligonucleotide
ucauucauaguaaguaagu

SEQ ID NO: 3252083 - RNA, 19 nt, Artificial Sequence
  Description of Artificial Sequence: Synthetic oligonucleotide
acagugucaagauccauag

SEQ ID NO: 3252084 - RNA, 19 nt, Artificial Sequence
  Description of Artificial Sequence: Synthetic oligonucleotide
gaauaccucuuucauugcg

SEQ ID NO: 3252085 - RNA, 19 nt, Artificial Sequence
  Description of Artificial Sequence: Synthetic oligonucleotide
uaaguaagucuuuaacucu

SEQ ID NO: 3252086 - RNA, 19 nt, Artificial Sequence
  Description of Artificial Sequence: Synthetic oligonucleotide
guccuuucgaaucaggaag

SEQ ID NO: 3252087 - RNA, 19 nt, Artificial Sequence
  Description of Artificial Sequence: Synthetic oligonucleotide
ugguuuccaaacaaaauaa

SEQ ID NO: 3252088 - RNA, 19 nt, Artificial Sequence
  Description of Artificial Sequence: Synthetic oligonucleotide
uuccaaacaaaauaaucaa

SEQ ID NO: 3252089 - RNA, 19 nt, Artificial Sequence
  Description of Artificial Sequence: Synthetic oligonucleotide
ucuagcaaacuuccuuggg

SEQ ID NO: 3252090 - RNA, 19 nt, Artificial Sequence
  Description of Artificial Sequence: Synthetic oligonucleotide
caaaauaaucaaaauuuca

SEQ ID NO: 3252091 - RNA, 19 nt, Artificial Sequence
  Description of Artificial Sequence: Synthetic oligonucleotide
ugccuugugagucauuuca

SEQ ID NO: 3252092 - RNA, 19 nt, Artificial Sequence
  Description of Artificial Sequence: Synthetic oligonucleotide
ucuucauucauaguaagua

SEQ ID NO: 3252093 - RNA, 19 nt, Artificial Sequence
  Description of Artificial Sequence: Synthetic oligonucleotide
uaccuagcuaucaugauau

SEQ ID NO: 3252094 - RNA, 19 nt, Artificial Sequence
  Description of Artificial Sequence: Synthetic oligonucleotide
uuggagaaaagucucuuuc

SEQ ID NO: 3252095 - RNA, 19 nt, Artificial Sequence
  Description of Artificial Sequence: Synthetic oligonucleotide
caagaauauccacugauuc

SEQ ID NO: 3252096 - RNA, 19 nt, Artificial Sequence
  Description of Artificial Sequence: Synthetic oligonucleotide
accucuuucauugcguacc

SEQ ID NO: 3252097 - RNA, 19 nt, Artificial Sequence
  Description of Artificial Sequence: Synthetic oligonucleotide
augguuuccaaacaaaaua

SEQ ID NO: 3252098 - RNA, 19 nt, Artificial Sequence
  Description of Artificial Sequence: Synthetic oligonucleotide
auaaucaaaauuucagaua

SEQ ID NO: 3252099 - RNA, 19 nt, Artificial Sequence
  Description of Artificial Sequence: Synthetic oligonucleotide
agcaaacuuccuugggucc

SEQ ID NO: 3252100 - RNA, 19 nt, Artificial Sequence
  Description of Artificial Sequence: Synthetic oligonucleotide
aagauccauaguuggcuuc

SEQ ID NO: 3252101 - RNA, 19 nt, Artificial Sequence
  Description of Artificial Sequence: Synthetic oligonucleotide
uuucauugcguaccuagcu

SEQ ID NO: 3252102 - RNA, 19 nt, Artificial Sequence
  Description of Artificial Sequence: Synthetic oligonucleotide
ucauacaucguaauucuuu

SEQ ID NO: 3252103 - RNA, 19 nt, Artificial Sequence
  Description of Artificial Sequence: Synthetic oligonucleotide
aucaugauauuacuguaga

SEQ ID NO: 3252104 - RNA, 19 nt, Artificial Sequence
  Description of Artificial Sequence: Synthetic oligonucleotide
cauacaucguaauucuuug

SEQ ID NO: 3252105 - RNA, 19 nt, Artificial Sequence
  Description of Artificial Sequence: Synthetic oligonucleotide
uuuccuccucaaaaguggg

SEQ ID NO: 3252106 - RNA, 19 nt, Artificial Sequence
  Description of Artificial Sequence: Synthetic oligonucleotide
ugauauuacuguagacaag

SEQ ID NO: 3252107 - RNA, 19 nt, Artificial Sequence
  Description of Artificial Sequence: Synthetic oligonucleotide
uccaaacaaaauaaucaaa

SEQ ID NO: 3252108 - RNA, 19 nt, Artificial Sequence
  Description of Artificial Sequence: Synthetic oligonucleotide
uaugguuuccaaacaaaau

SEQ ID NO: 3252109 - RNA, 19 nt, Artificial Sequence
  Description of Artificial Sequence: Synthetic oligonucleotide
ucuuccaaucgacauugcc

SEQ ID NO: 3252110 - RNA, 19 nt, Artificial Sequence
  Description of Artificial Sequence: Synthetic oligonucleotide
aacccauacaucauacauc

SEQ ID NO: 3252111 - RNA, 19 nt, Artificial Sequence
  Description of Artificial Sequence: Synthetic oligonucleotide
aacucuagcaaacuuccuu

SEQ ID NO: 3252112 - RNA, 19 nt, Artificial Sequence
  Description of Artificial Sequence: Synthetic oligonucleotide
ugagucauuucaguaauga

SEQ ID NO: 3252113 - RNA, 19 nt, Artificial Sequence
  Description of Artificial Sequence: Synthetic oligonucleotide
acucuagcaaacuuccuug

SEQ ID NO: 3252114 - RNA, 19 nt, Artificial Sequence
  Description of Artificial Sequence: Synthetic oligonucleotide
ucaaaggcuuuucuagccc

SEQ ID NO: 3252115 - RNA, 19 nt, Artificial Sequence
  Description of Artificial Sequence: Synthetic oligonucleotide
ugucuuccaaucgacauug

SEQ ID NO: 3252116 - RNA, 19 nt, Artificial Sequence
  Description of Artificial Sequence: Synthetic oligonucleotide
acaucguaauucuuuggag

SEQ ID NO: 3252117 - RNA, 19 nt, Artificial Sequence
  Description of Artificial Sequence: Synthetic oligonucleotide
aaaaugauuacacccaggc

SEQ ID NO: 3252118 - RNA, 19 nt, Artificial Sequence
  Description of Artificial Sequence: Synthetic oligonucleotide
uguaguagcaaguugcugg

SEQ ID NO: 3252119 - RNA, 19 nt, Artificial Sequence
  Description of Artificial Sequence: Synthetic oligonucleotide
aaaccaaccaucaaggagg

SEQ ID NO: 3252120 - RNA, 19 nt, Artificial Sequence
  Description of Artificial Sequence: Synthetic oligonucleotide
ucuucagucauuuuagaag

SEQ ID NO: 3252121 - RNA, 19 nt, Artificial Sequence
  Description of Artificial Sequence: Synthetic oligonucleotide
aaaugauuacacccaggcc

SEQ ID NO: 3252122 - RNA, 19 nt, Artificial Sequence
  Description of Artificial Sequence: Synthetic oligonucleotide
uguauuguaguaaaauaug

SEQ ID NO: 3252123 - RNA, 19 nt, Artificial Sequence
  Description of Artificial Sequence: Synthetic oligonucleotide
aaauauacagggaauaucu

SEQ ID NO: 3252124 - RNA, 19 nt, Artificial Sequence
  Description of Artificial Sequence: Synthetic oligonucleotide
uguacaauaauauuacaau

SEQ ID NO: 3252125 - RNA, 19 nt, Artificial Sequence
  Description of Artificial Sequence: Synthetic oligonucleotide
uauuaucugauguuucagg

SEQ ID NO: 3252126 - RNA, 19 nt, Artificial Sequence
  Description of Artificial Sequence: Synthetic oligonucleotide
uuauaugacacgagaaccc

SEQ ID NO: 3252127 - RNA, 19 nt, Artificial Sequence
  Description of Artificial Sequence: Synthetic oligonucleotide
auaucaacugcauuuucac

SEQ ID NO: 3252128 - RNA, 19 nt, Artificial Sequence
  Description of Artificial Sequence: Synthetic oligonucleotide
cuuaagcucucauacaagg

SEQ ID NO: 3252129 - RNA, 19 nt, Artificial Sequence
  Description of Artificial Sequence: Synthetic oligonucleotide
ucuuguguaguucacugag

SEQ ID NO: 3252130 - RNA, 19 nt, Artificial Sequence
  Description of Artificial Sequence: Synthetic oligonucleotide
uguuauaugacacgagaac

SEQ ID NO: 3252131 - RNA, 19 nt, Artificial Sequence
  Description of Artificial Sequence: Synthetic oligonucleotide
cuucagucauuuuagaagc

SEQ ID NO: 3252132 - RNA, 19 nt, Artificial Sequence
  Description of Artificial Sequence: Synthetic oligonucleotide
auuuaaugauccuucagug

SEQ ID NO: 3252133 - RNA, 19 nt, Artificial Sequence
  Description of Artificial Sequence: Synthetic oligonucleotide
aaucuuguguaguucacug

SEQ ID NO: 3252134 - RNA, 19 nt, Artificial Sequence
  Description of Artificial Sequence: Synthetic oligonucleotide
uccuucuccacucaagggg

SEQ ID NO: 3252135 - RNA, 19 nt, Artificial Sequence
  Description of Artificial Sequence: Synthetic oligonucleotide
aucguagagaaauaguuug

SEQ ID NO: 3252136 - RNA, 19 nt, Artificial Sequence
  Description of Artificial Sequence: Synthetic oligonucleotide
uucuucaucucucauguca

SEQ ID NO: 3252137 - RNA, 19 nt, Artificial Sequence
  Description of Artificial Sequence: Synthetic oligonucleotide
gauccuucaguguuuaaag

SEQ ID NO: 3252138 - RNA, 19 nt, Artificial Sequence
  Description of Artificial Sequence: Synthetic oligonucleotide
cugacauaggaaaagucgg

SEQ ID NO: 3252139 - RNA, 19 nt, Artificial Sequence
  Description of Artificial Sequence: Synthetic oligonucleotide
uaagcucucauacaaggca

SEQ ID NO: 3252140 - RNA, 19 nt, Artificial Sequence
  Description of Artificial Sequence: Synthetic oligonucleotide
ucuacauuuauguauuuau

SEQ ID NO: 3252141 - RNA, 19 nt, Artificial Sequence
  Description of Artificial Sequence: Synthetic oligonucleotide
aacuuaagcucucauacaa

SEQ ID NO: 3252142 - RNA, 19 nt, Artificial Sequence
  Description of Artificial Sequence: Synthetic oligonucleotide
aauuaauuuauuucucauu

SEQ ID NO: 3252143 - RNA, 19 nt, Artificial Sequence
  Description of Artificial Sequence: Synthetic oligonucleotide
guacaauaauauuacaaug

SEQ ID NO: 3252144 - RNA, 19 nt, Artificial Sequence
  Description of Artificial Sequence: Synthetic oligonucleotide
gaauggagcauauugcaug

SEQ ID NO: 3252145 - RNA, 19 nt, Artificial Sequence
  Description of Artificial Sequence: Synthetic oligonucleotide
ucugcgauaucguagagaa

SEQ ID NO: 3252146 - RNA, 19 nt, Artificial Sequence
  Description of Artificial Sequence: Synthetic oligonucleotide
uuguugauacuucuaacca

SEQ ID NO: 3252147 - RNA, 19 nt, Artificial Sequence
  Description of Artificial Sequence: Synthetic oligonucleotide
ugugggucuauaccaagcg

SEQ ID NO: 3252148 - RNA, 19 nt, Artificial Sequence
  Description of Artificial Sequence: Synthetic oligonucleotide
uuaaauuuccugugccggg

SEQ ID NO: 3252149 - RNA, 19 nt, Artificial Sequence
  Description of Artificial Sequence: Synthetic oligonucleotide
uuuguuuccgacuauuauc

SEQ ID NO: 3252150 - RNA, 19 nt, Artificial Sequence
  Description of Artificial Sequence: Synthetic oligonucleotide
guuauaugacacgagaacc

SEQ ID NO: 3252151 - RNA, 19 nt, Artificial Sequence
  Description of Artificial Sequence: Synthetic oligonucleotide
uaugugguuaaaauuaguu

SEQ ID NO: 3252152 - RNA, 19 nt, Artificial Sequence
  Description of Artificial Sequence: Synthetic oligonucleotide
agaagcuaaggccugaaga

SEQ ID NO: 3252153 - RNA, 19 nt, Artificial Sequence
  Description of Artificial Sequence: Synthetic oligonucleotide
ugcgauaucguagagaaau

SEQ ID NO: 3252154 - RNA, 19 nt, Artificial Sequence
  Description of Artificial Sequence: Synthetic oligonucleotide
uucacuuugacuuucucuu

SEQ ID NO: 3252155 - RNA, 19 nt, Artificial Sequence
  Description of Artificial Sequence: Synthetic oligonucleotide
ucuuaucaaaccaaccauc

SEQ ID NO: 3252156 - RNA, 19 nt, Artificial Sequence
  Description of Artificial Sequence: Synthetic oligonucleotide
acacugaucagcaucauag

SEQ ID NO: 3252157 - RNA, 19 nt, Artificial Sequence
  Description of Artificial Sequence: Synthetic oligonucleotide
ugcggaggaauccuuauug

SEQ ID NO: 3252158 - RNA, 19 nt, Artificial Sequence
  Description of Artificial Sequence: Synthetic oligonucleotide
agauaaggugcguuguaac

SEQ ID NO: 3252159 - RNA, 19 nt, Artificial Sequence
  Description of Artificial Sequence: Synthetic oligonucleotide
uuuaaugauccuucagugu

SEQ ID NO: 3252160 - RNA, 19 nt, Artificial Sequence
  Description of Artificial Sequence: Synthetic oligonucleotide
caaaccaaccaucaaggag

SEQ ID NO: 3252161 - RNA, 19 nt, Artificial Sequence
  Description of Artificial Sequence: Synthetic oligonucleotide
uugcguaaacuuaagcucu

SEQ ID NO: 3252162 - RNA, 19 nt, Artificial Sequence
  Description of Artificial Sequence: Synthetic oligonucleotide
uuauaugugcaucaucuuu

SEQ ID NO: 3252163 - RNA, 19 nt, Artificial Sequence
  Description of Artificial Sequence: Synthetic oligonucleotide
uuaagcucucauacaaggc

SEQ ID NO: 3252164 - RNA, 19 nt, Artificial Sequence
  Description of Artificial Sequence: Synthetic oligonucleotide
uuuagucugcucaggagga

SEQ ID NO: 3252165 - RNA, 19 nt, Artificial Sequence
  Description of Artificial Sequence: Synthetic oligonucleotide
uccgacuauuaucugaugu

SEQ ID NO: 3252166 - RNA, 19 nt, Artificial Sequence
  Description of Artificial Sequence: Synthetic oligonucleotide
gucauuuuagaagcuaagg

SEQ ID NO: 3252167 - RNA, 19 nt, Artificial Sequence
  Description of Artificial Sequence: Synthetic oligonucleotide
accccaaugcuguuaaaac

SEQ ID NO: 3252168 - RNA, 19 nt, Artificial Sequence
  Description of Artificial Sequence: Synthetic oligonucleotide
aaaaucuuguguaguucac

SEQ ID NO: 3252169 - RNA, 19 nt, Artificial Sequence
  Description of Artificial Sequence: Synthetic oligonucleotide
acauuuauguauuuauuua

SEQ ID NO: 3252170 - RNA, 19 nt, Artificial Sequence
  Description of Artificial Sequence: Synthetic oligonucleotide
uacucuuuguuggagaucu

SEQ ID NO: 3252171 - RNA, 19 nt, Artificial Sequence
  Description of Artificial Sequence: Synthetic oligonucleotide
acccaugugugcuaugugg

SEQ ID NO: 3252172 - RNA, 19 nt, Artificial Sequence
  Description of Artificial Sequence: Synthetic oligonucleotide
uccguguauaccccaaugc

SEQ ID NO: 3252173 - RNA, 19 nt, Artificial Sequence
  Description of Artificial Sequence: Synthetic oligonucleotide
guagagaaauaguuugaag

SEQ ID NO: 3252174 - RNA, 19 nt, Artificial Sequence
  Description of Artificial Sequence: Synthetic oligonucleotide
acccuaagagauuuaauga

SEQ ID NO: 3252175 - RNA, 19 nt, Artificial Sequence
  Description of Artificial Sequence: Synthetic oligonucleotide
uccucggggacucggaagg

SEQ ID NO: 3252176 - RNA, 19 nt, Artificial Sequence
  Description of Artificial Sequence: Synthetic oligonucleotide
gaacccuacacagagcugc

SEQ ID NO: 3252177 - RNA, 19 nt, Artificial Sequence
  Description of Artificial Sequence: Synthetic oligonucleotide
cacuugacuaaugacagag

SEQ ID NO: 3252178 - RNA, 19 nt, Artificial Sequence
  Description of Artificial Sequence: Synthetic oligonucleotide
uguuguuugaacucauuuu

SEQ ID NO: 3252179 - RNA, 19 nt, Artificial Sequence
  Description of Artificial Sequence: Synthetic oligonucleotide
uuucccguucauauuguug

SEQ ID NO: 3252180 - RNA, 19 nt, Artificial Sequence
  Description of Artificial Sequence: Synthetic oligonucleotide
agugcggacacuacgcugc

SEQ ID NO: 3252181 - RNA, 19 nt, Artificial Sequence
  Description of Artificial Sequence: Synthetic oligonucleotide
uauaugacacgagaacccc

SEQ ID NO: 3252182 - RNA, 19 nt, Artificial Sequence
  Description of Artificial Sequence: Synthetic oligonucleotide
gauaaggugcguuguaaca

SEQ ID NO: 3252183 - RNA, 19 nt, Artificial Sequence
  Description of Artificial Sequence: Synthetic oligonucleotide
auuaaucuaauagucucca

SEQ ID NO: 3252184 - RNA, 19 nt, Artificial Sequence
  Description of Artificial Sequence: Synthetic oligonucleotide
ugucuuuucauagccacac

SEQ ID NO: 3252185 - RNA, 19 nt, Artificial Sequence
  Description of Artificial Sequence: Synthetic oligonucleotide
cauccauuggcugaugugc

SEQ ID NO: 3252186 - RNA, 19 nt, Artificial Sequence
  Description of Artificial Sequence: Synthetic oligonucleotide
uaucguagagaaauaguuu

SEQ ID NO: 3252187 - RNA, 19 nt, Artificial Sequence
  Description of Artificial Sequence: Synthetic oligonucleotide
gauaucaacugcauuuuca

SEQ ID NO: 3252188 - RNA, 19 nt, Artificial Sequence
  Description of Artificial Sequence: Synthetic oligonucleotide
cauuuauguauuuauuuaa

SEQ ID NO: 3252189 - RNA, 19 nt, Artificial Sequence
  Description of Artificial Sequence: Synthetic oligonucleotide
agauaucaacugcauuuuc

SEQ ID NO: 3252190 - RNA, 19 nt, Artificial Sequence
  Description of Artificial Sequence: Synthetic oligonucleotide
caaaaucuuguguaguuca

SEQ ID NO: 3252191 - RNA, 19 nt, Artificial Sequence
  Description of Artificial Sequence: Synthetic oligonucleotide
gacgcugugacccuaaaua

SEQ ID NO: 3252192 - RNA, 19 nt, Artificial Sequence
  Description of Artificial Sequence: Synthetic oligonucleotide
aaaagucggacauggcgau

SEQ ID NO: 3252193 - RNA, 19 nt, Artificial Sequence
  Description of Artificial Sequence: Synthetic oligonucleotide
uucaaaaucuuguguaguu

SEQ ID NO: 3252194 - RNA, 19 nt, Artificial Sequence
  Description of Artificial Sequence: Synthetic oligonucleotide
auuuauuuccuggcaacag

SEQ ID NO: 3252195 - RNA, 19 nt, Artificial Sequence
  Description of Artificial Sequence: Synthetic oligonucleotide
uguugauacuucuaaccau

SEQ ID NO: 3252196 - RNA, 19 nt, Artificial Sequence
  Description of Artificial Sequence: Synthetic oligonucleotide
aucaggauggagcacuugu

SEQ ID NO: 3252197 - RNA, 19 nt, Artificial Sequence
  Description of Artificial Sequence: Synthetic oligonucleotide
uccaucauagucccucgca

SEQ ID NO: 3252198 - RNA, 19 nt, Artificial Sequence
  Description of Artificial Sequence: Synthetic oligonucleotide
auagcagagaaccugucuu

SEQ ID NO: 3252199 - RNA, 19 nt, Artificial Sequence
  Description of Artificial Sequence: Synthetic oligonucleotide
auuuguuuccgacuauuau

SEQ ID NO: 3252200 - RNA, 19 nt, Artificial Sequence
  Description of Artificial Sequence: Synthetic oligonucleotide
cacacacacacacugauca

SEQ ID NO: 3252201 - RNA, 19 nt, Artificial Sequence
  Description of Artificial Sequence: Synthetic oligonucleotide
aaaucuuguguaguucacu

SEQ ID NO: 3252202 - RNA, 19 nt, Artificial Sequence
  Description of Artificial Sequence: Synthetic oligonucleotide
uccuuaacgcuuccaauuc

SEQ ID NO: 3252203 - RNA, 19 nt, Artificial Sequence
  Description of Artificial Sequence: Synthetic oligonucleotide
uuucggggugaaauggggc

SEQ ID NO: 3252204 - RNA, 19 nt, Artificial Sequence
  Description of Artificial Sequence: Synthetic oligonucleotide
uaggaucuguauuccaucu

SEQ ID NO: 3252205 - RNA, 19 nt, Artificial Sequence
  Description of Artificial Sequence: Synthetic oligonucleotide
cagggaauaucuuuccgac

SEQ ID NO: 3252206 - RNA, 19 nt, Artificial Sequence
  Description of Artificial Sequence: Synthetic oligonucleotide
uaagagauuuaaugauccu

SEQ ID NO: 3252207 - RNA, 19 nt, Artificial Sequence
  Description of Artificial Sequence: Synthetic oligonucleotide
uaaugacagagcugggcug

SEQ ID NO: 3252208 - RNA, 19 nt, Artificial Sequence
  Description of Artificial Sequence: Synthetic oligonucleotide
uacacuggauggcacuuug

SEQ ID NO: 3252209 - RNA, 19 nt, Artificial Sequence
  Description of Artificial Sequence: Synthetic oligonucleotide
guaguagcaaguugcuggc

SEQ ID NO: 3252210 - RNA, 19 nt, Artificial Sequence
  Description of Artificial Sequence: Synthetic oligonucleotide
acaacaaauaauccuucuu

SEQ ID NO: 3252211 - RNA, 19 nt, Artificial Sequence
  Description of Artificial Sequence: Synthetic oligonucleotide
ggaucuucggcccuggcag

SEQ ID NO: 3252212 - RNA, 19 nt, Artificial Sequence
  Description of Artificial Sequence: Synthetic oligonucleotide
augacaaagagcccuccga

SEQ ID NO: 3252213 - RNA, 19 nt, Artificial Sequence
  Description of Artificial Sequence: Synthetic oligonucleotide
auacgcuguccccacuccc

SEQ ID NO: 3252214 - RNA, 19 nt, Artificial Sequence
  Description of Artificial Sequence: Synthetic oligonucleotide
caagcggaccuuuagucug

SEQ ID NO: 3252215 - RNA, 19 nt, Artificial Sequence
  Description of Artificial Sequence: Synthetic oligonucleotide
uaaggugcguuguaacaac

SEQ ID NO: 3252216 - RNA, 19 nt, Artificial Sequence
  Description of Artificial Sequence: Synthetic oligonucleotide
ucaaaaucuuguguaguuc

SEQ ID NO: 3252217 - RNA, 19 nt, Artificial Sequence
  Description of Artificial Sequence: Synthetic oligonucleotide
acagaauugaucuugaaag

SEQ ID NO: 3252218 - RNA, 19 nt, Artificial Sequence
  Description of Artificial Sequence: Synthetic oligonucleotide
uuaaugacagaauugaucu

SEQ ID NO: 3252219 - RNA, 19 nt, Artificial Sequence
  Description of Artificial Sequence: Synthetic oligonucleotide
agaauguccaaauagucac

SEQ ID NO: 3252220 - RNA, 19 nt, Artificial Sequence
  Description of Artificial Sequence: Synthetic oligonucleotide
uuugagguuuuccacaugg

SEQ ID NO: 3252221 - RNA, 19 nt, Artificial Sequence
  Description of Artificial Sequence: Synthetic oligonucleotide
caaauagucaccauagucc

SEQ ID NO: 3252222 - RNA, 19 nt, Artificial Sequence
  Description of Artificial Sequence: Synthetic oligonucleotide
aaguugaucuucuccauac

SEQ ID NO: 3252223 - RNA, 19 nt, Artificial Sequence
  Description of Artificial Sequence: Synthetic oligonucleotide
aacuuuacaagcuugccca

SEQ ID NO: 3252224 - RNA, 19 nt, Artificial Sequence
  Description of Artificial Sequence: Synthetic oligonucleotide
gagaacauugacuuccucg

SEQ ID NO: 3252225 - RNA, 19 nt, Artificial Sequence
  Description of Artificial Sequence: Synthetic oligonucleotide
aaagccaccuuguagucuc

SEQ ID NO: 3252226 - RNA, 19 nt, Artificial Sequence
  Description of Artificial Sequence: Synthetic oligonucleotide
agcaagaauguccaaauag

SEQ ID NO: 3252227 - RNA, 19 nt, Artificial Sequence
  Description of Artificial Sequence: Synthetic oligonucleotide
agaauugaucuugaaagcc

SEQ ID NO: 3252228 - RNA, 19 nt, Artificial Sequence
  Description of Artificial Sequence: Synthetic oligonucleotide
aaauagucaccauaguccu

SEQ ID NO: 3252229 - RNA, 19 nt, Artificial Sequence
  Description of Artificial Sequence: Synthetic oligonucleotide
aaugacagaauugaucuug

SEQ ID NO: 3252230 - RNA, 19 nt, Artificial Sequence
  Description of Artificial Sequence: Synthetic oligonucleotide
auuaaugacagaauugauc

SEQ ID NO: 3252231 - RNA, 19 nt, Artificial Sequence
  Description of Artificial Sequence: Synthetic oligonucleotide
gaaaaguugaucuucucca

SEQ ID NO: 3252232 - RNA, 19 nt, Artificial Sequence
  Description of Artificial Sequence: Synthetic oligonucleotide
cuugcagaacuuuacaagc

SEQ ID NO: 3252233 - RNA, 19 nt, Artificial Sequence
  Description of Artificial Sequence: Synthetic oligonucleotide
uugacuuccucguugaagc

SEQ ID NO: 3252234 - RNA, 19 nt, Artificial Sequence
  Description of Artificial Sequence: Synthetic oligonucleotide
ugucacaggagauagcaag

SEQ ID NO: 3252235 - RNA, 19 nt, Artificial Sequence
  Description of Artificial Sequence: Synthetic oligonucleotide
aaacaguccucgcuuggcc

SEQ ID NO: 3252236 - RNA, 19 nt, Artificial Sequence
  Description of Artificial Sequence: Synthetic oligonucleotide
uuucccuugaccucgacca

SEQ ID NO: 3252237 - RNA, 19 nt, Artificial Sequence
  Description of Artificial Sequence: Synthetic oligonucleotide
ucaccauaguccuugaacc

SEQ ID NO: 3252238 - RNA, 19 nt, Artificial Sequence
  Description of Artificial Sequence: Synthetic oligonucleotide
aacauugacuuccucguug

SEQ ID NO: 3252239 - RNA, 19 nt, Artificial Sequence
  Description of Artificial Sequence: Synthetic oligonucleotide
uugaaagccaccuuguagu

SEQ ID NO: 3252240 - RNA, 19 nt, Artificial Sequence
  Description of Artificial Sequence: Synthetic oligonucleotide
uucauucaugucuucaucc

SEQ ID NO: 3252241 - RNA, 19 nt, Artificial Sequence
  Description of Artificial Sequence: Synthetic oligonucleotide
aauugaucuugaaagccac

SEQ ID NO: 3252242 - RNA, 19 nt, Artificial Sequence
  Description of Artificial Sequence: Synthetic oligonucleotide
acuuccucagcuuuugagg

SEQ ID NO: 3252243 - RNA, 19 nt, Artificial Sequence
  Description of Artificial Sequence: Synthetic oligonucleotide
uugaccucgaccaaugaga

SEQ ID NO: 3252244 - RNA, 19 nt, Artificial Sequence
  Description of Artificial Sequence: Synthetic oligonucleotide
ucgaccaaugagaacauug

SEQ ID NO: 3252245 - RNA, 19 nt, Artificial Sequence
  Description of Artificial Sequence: Synthetic oligonucleotide
uuuuguuuuguuuuguuuu

SEQ ID NO: 3252246 - RNA, 19 nt, Artificial Sequence
  Description of Artificial Sequence: Synthetic oligonucleotide
caugucuucauccacguug

SEQ ID NO: 3252247 - RNA, 19 nt, Artificial Sequence
  Description of Artificial Sequence: Synthetic oligonucleotide
uugcucacgaugcucacgg

SEQ ID NO: 3252248 - RNA, 19 nt, Artificial Sequence
  Description of Artificial Sequence: Synthetic oligonucleotide
gaacuuuacaagcuugccc

SEQ ID NO: 3252249 - RNA, 19 nt, Artificial Sequence
  Description of Artificial Sequence: Synthetic oligonucleotide
uuuguuuuguuuuguuuug

SEQ ID NO: 3252250 - RNA, 19 nt, Artificial Sequence
  Description of Artificial Sequence: Synthetic oligonucleotide
ugagcagaaacaguccucg

SEQ ID NO: 3252251 - RNA, 19 nt, Artificial Sequence
  Description of Artificial Sequence: Synthetic oligonucleotide
agaacauugacuuccucgu

SEQ ID NO: 3252252 - RNA, 19 nt, Artificial Sequence
  Description of Artificial Sequence: Synthetic oligonucleotide
uggucuuuucccuugaccu

SEQ ID NO: 3252253 - RNA, 19 nt, Artificial Sequence
  Description of Artificial Sequence: Synthetic oligonucleotide
ugcuugagcagaaacaguc

SEQ ID NO: 3252254 - RNA, 19 nt, Artificial Sequence
  Description of Artificial Sequence: Synthetic oligonucleotide
uaguccuugaaccaccucu

SEQ ID NO: 3252255 - RNA, 19 nt, Artificial Sequence
  Description of Artificial Sequence: Synthetic oligonucleotide
gauguguucauucaugucu

SEQ ID NO: 3252256 - RNA, 19 nt, Artificial Sequence
  Description of Artificial Sequence: Synthetic oligonucleotide
auggucuuuucccuugacc

SEQ ID NO: 3252257 - RNA, 19 nt, Artificial Sequence
  Description of Artificial Sequence: Synthetic oligonucleotide
accuuguagucucugcacc

SEQ ID NO: 3252258 - RNA, 19 nt, Artificial Sequence
  Description of Artificial Sequence: Synthetic oligonucleotide
uccaggggcagcacgaagg

SEQ ID NO: 3252259 - RNA, 19 nt, Artificial Sequence
  Description of Artificial Sequence: Synthetic oligonucleotide
cuugaaagccaccuuguag

SEQ ID NO: 3252260 - RNA, 19 nt, Artificial Sequence
  Description of Artificial Sequence: Synthetic oligonucleotide
uugaagcgauuaaugacag

SEQ ID NO: 3252261 - RNA, 19 nt, Artificial Sequence
  Description of Artificial Sequence: Synthetic oligonucleotide
aagaauguccaaauaguca

SEQ ID NO: 3252262 - RNA, 19 nt, Artificial Sequence
  Description of Artificial Sequence: Synthetic oligonucleotide
gaagcgauuaaugacagaa

SEQ ID NO: 3252263 - RNA, 19 nt, Artificial Sequence
  Description of Artificial Sequence: Synthetic oligonucleotide
ugaucuucuccauaccagc

SEQ ID NO: 3252264 - RNA, 19 nt, Artificial Sequence
  Description of Artificial Sequence: Synthetic oligonucleotide
cuugauguguucauucaug

SEQ ID NO: 3252265 - RNA, 19 nt, Artificial Sequence
  Description of Artificial Sequence: Synthetic oligonucleotide
agaacuuuacaagcuugcc

SEQ ID NO: 3252266 - RNA, 19 nt, Artificial Sequence
  Description of Artificial Sequence: Synthetic oligonucleotide
acaggagauagcaagaaug

SEQ ID NO: 3252267 - RNA, 19 nt, Artificial Sequence
  Description of Artificial Sequence: Synthetic oligonucleotide
uuuacaagcuugcccacgu

SEQ ID NO: 3252268 - RNA, 19 nt, Artificial Sequence
  Description of Artificial Sequence: Synthetic oligonucleotide
ugaaccaccucucacggau

SEQ ID NO: 3252269 - RNA, 19 nt, Artificial Sequence
  Description of Artificial Sequence: Synthetic oligonucleotide
cagaauugaucuugaaagc

SEQ ID NO: 3252270 - RNA, 19 nt, Artificial Sequence
  Description of Artificial Sequence: Synthetic oligonucleotide
aguugaucuucuccauacc

SEQ ID NO: 3252271 - RNA, 19 nt, Artificial Sequence
  Description of Artificial Sequence: Synthetic oligonucleotide
aauguccaaauagucacca

SEQ ID NO: 3252272 - RNA, 19 nt, Artificial Sequence
  Description of Artificial Sequence: Synthetic oligonucleotide
caagaauguccaaauaguc

SEQ ID NO: 3252273 - RNA, 19 nt, Artificial Sequence
  Description of Artificial Sequence: Synthetic oligonucleotide
uugauguguucauucaugu

SEQ ID NO: 3252274 - RNA, 19 nt, Artificial Sequence
  Description of Artificial Sequence: Synthetic oligonucleotide
auagcaagaauguccaaau

SEQ ID NO: 3252275 - RNA, 19 nt, Artificial Sequence
  Description of Artificial Sequence: Synthetic oligonucleotide
cuugaaccaccucucacgg

SEQ ID NO: 3252276 - RNA, 19 nt, Artificial Sequence
  Description of Artificial Sequence: Synthetic oligonucleotide
accucgaccaaugagaaca

SEQ ID NO: 3252277 - RNA, 19 nt, Artificial Sequence
  Description of Artificial Sequence: Synthetic oligonucleotide
aaaaguugaucuucuccau

SEQ ID NO: 3252278 - RNA, 19 nt, Artificial Sequence
  Description of Artificial Sequence: Synthetic oligonucleotide
auaccagccugcuugagca

SEQ ID NO: 3252279 - RNA, 19 nt, Artificial Sequence
  Description of Artificial Sequence: Synthetic oligonucleotide
cacguauucaccccugucc

SEQ ID NO: 3252280 - RNA, 19 nt, Artificial Sequence
  Description of Artificial Sequence: Synthetic oligonucleotide
uguccaaauagucaccaua

SEQ ID NO: 3252281 - RNA, 19 nt, Artificial Sequence
  Description of Artificial Sequence: Synthetic oligonucleotide
cuccauaccagccugcuug

SEQ ID NO: 3252282 - RNA, 19 nt, Artificial Sequence
  Description of Artificial Sequence: Synthetic oligonucleotide
uucuccuccugaaaaguug

SEQ ID NO: 3252283 - RNA, 19 nt, Artificial Sequence
  Description of Artificial Sequence: Synthetic oligonucleotide
ugagguuuuccacaugguc

SEQ ID NO: 3252284 - RNA, 19 nt, Artificial Sequence
  Description of Artificial Sequence: Synthetic oligonucleotide
cucacgaugcucacggagg

SEQ ID NO: 3252285 - RNA, 19 nt, Artificial Sequence
  Description of Artificial Sequence: Synthetic oligonucleotide
ucacgaugcucacggaggg

SEQ ID NO: 3252286 - RNA, 19 nt, Artificial Sequence
  Description of Artificial Sequence: Synthetic oligonucleotide
ucauucaugucuucaucca

SEQ ID NO: 3252287 - RNA, 19 nt, Artificial Sequence
  Description of Artificial Sequence: Synthetic oligonucleotide
agccuugauguguucauuc

SEQ ID NO: 3252288 - RNA, 19 nt, Artificial Sequence
  Description of Artificial Sequence: Synthetic oligonucleotide
uuuucccuugaccucgacc

SEQ ID NO: 3252289 - RNA, 19 nt, Artificial Sequence
  Description of Artificial Sequence: Synthetic oligonucleotide
ggagauagcaagaaugucc

SEQ ID NO: 3252290 - RNA, 19 nt, Artificial Sequence
  Description of Artificial Sequence: Synthetic oligonucleotide
guugaagcgauuaaugaca

SEQ ID NO: 3252291 - RNA, 19 nt, Artificial Sequence
  Description of Artificial Sequence: Synthetic oligonucleotide
ucuucuccauaccagccug

SEQ ID NO: 3252292 - RNA, 19 nt, Artificial Sequence
  Description of Artificial Sequence: Synthetic oligonucleotide
agcgauuaaugacagaauu

SEQ ID NO: 3252293 - RNA, 19 nt, Artificial Sequence
  Description of Artificial Sequence: Synthetic oligonucleotide
cagaacuuuacaagcuugc

SEQ ID NO: 3252294 - RNA, 19 nt, Artificial Sequence
  Description of Artificial Sequence: Synthetic oligonucleotide
gacagaauugaucuugaaa

SEQ ID NO: 3252295 - RNA, 19 nt, Artificial Sequence
  Description of Artificial Sequence: Synthetic oligonucleotide
cuugcccacguauucaccc

SEQ ID NO: 3252296 - RNA, 19 nt, Artificial Sequence
  Description of Artificial Sequence: Synthetic oligonucleotide
auucaugucuucauccacg

SEQ ID NO: 3252297 - RNA, 19 nt, Artificial Sequence
  Description of Artificial Sequence: Synthetic oligonucleotide
guccaaauagucaccauag

SEQ ID NO: 3252298 - RNA, 19 nt, Artificial Sequence
  Description of Artificial Sequence: Synthetic oligonucleotide
gucaccauaguccuugaac

SEQ ID NO: 3252299 - RNA, 19 nt, Artificial Sequence
  Description of Artificial Sequence: Synthetic oligonucleotide
uugaucuugaaagccaccu

SEQ ID NO: 3252300 - RNA, 19 nt, Artificial Sequence
  Description of Artificial Sequence: Synthetic oligonucleotide
aagcugucacaggagauag

SEQ ID NO: 3252301 - RNA, 19 nt, Artificial Sequence
  Description of Artificial Sequence: Synthetic oligonucleotide
cacguugaagcgauuaaug

SEQ ID NO: 3252302 - RNA, 19 nt, Artificial Sequence
  Description of Artificial Sequence: Synthetic oligonucleotide
uccucguugaagcugucac

SEQ ID NO: 3252303 - RNA, 19 nt, Artificial Sequence
  Description of Artificial Sequence: Synthetic oligonucleotide
agaaacaguccucgcuugg

SEQ ID NO: 3252304 - RNA, 19 nt, Artificial Sequence
  Description of Artificial Sequence: Synthetic oligonucleotide
uuuugagcggacaggguuc

SEQ ID NO: 3252305 - RNA, 19 nt, Artificial Sequence
  Description of Artificial Sequence: Synthetic oligonucleotide
ucuccuccugaaaaguuga

SEQ ID NO: 3252306 - RNA, 19 nt, Artificial Sequence
  Description of Artificial Sequence: Synthetic oligonucleotide
acguugaagcgauuaauga

SEQ ID NO: 3252307 - RNA, 19 nt, Artificial Sequence
  Description of Artificial Sequence: Synthetic oligonucleotide
cugccauugcucacgaugc

SEQ ID NO: 3252308 - RNA, 19 nt, Artificial Sequence
  Description of Artificial Sequence: Synthetic oligonucleotide
uguggaagcagaagccaca

SEQ ID NO: 3252309 - RNA, 19 nt, Artificial Sequence
  Description of Artificial Sequence: Synthetic oligonucleotide
uugcagaacuuuacaagcu

SEQ ID NO: 3252310 - RNA, 19 nt, Artificial Sequence
  Description of Artificial Sequence: Synthetic oligonucleotide
uagucucugcaccacuucc

SEQ ID NO: 3252311 - RNA, 19 nt, Artificial Sequence
  Description of Artificial Sequence: Synthetic oligonucleotide
uuggcuguguggaagcaga

SEQ ID NO: 3252312 - RNA, 19 nt, Artificial Sequence
  Description of Artificial Sequence: Synthetic oligonucleotide
uguucauucaugucuucau

SEQ ID NO: 3252313 - RNA, 19 nt, Artificial Sequence
  Description of Artificial Sequence: Synthetic oligonucleotide
agcacgaaggaugucuugg

SEQ ID NO: 3252314 - RNA, 19 nt, Artificial Sequence
  Description of Artificial Sequence: Synthetic oligonucleotide
uuuccacauggucuuuucc

SEQ ID NO: 3252315 - RNA, 19 nt, Artificial Sequence
  Description of Artificial Sequence: Synthetic oligonucleotide
acgaaggaugucuuggcug

SEQ ID NO: 3252316 - RNA, 19 nt, Artificial Sequence
  Description of Artificial Sequence: Synthetic oligonucleotide
uucaccccuguccugcagg

SEQ ID NO: 3252317 - RNA, 19 nt, Artificial Sequence
  Description of Artificial Sequence: Synthetic oligonucleotide
augggugugaacuuccagc

SEQ ID NO: 3252318 - RNA, 19 nt, Artificial Sequence
  Description of Artificial Sequence: Synthetic oligonucleotide
aagucagccguuccagcgc

SEQ ID NO: 3252319 - RNA, 19 nt, Artificial Sequence
  Description of Artificial Sequence: Synthetic oligonucleotide
ugggugugaacuuccagcg

SEQ ID NO: 3252320 - RNA, 19 nt, Artificial Sequence
  Description of Artificial Sequence: Synthetic oligonucleotide
uuccgaguuggucaggccg

SEQ ID NO: 3252321 - RNA, 19 nt, Artificial Sequence
  Description of Artificial Sequence: Synthetic oligonucleotide
ugaacuuccagcgcaaggc

SEQ ID NO: 3252322 - RNA, 19 nt, Artificial Sequence
  Description of Artificial Sequence: Synthetic oligonucleotide
uggacggugcccaacgggg

SEQ ID NO: 3252323 - RNA, 19 nt, Artificial Sequence
  Description of Artificial Sequence: Synthetic oligonucleotide
ugucccaugggugugaacu

SEQ ID NO: 3252324 - RNA, 19 nt, Artificial Sequence
  Description of Artificial Sequence: Synthetic oligonucleotide
agggacauguagucauugc

SEQ ID NO: 3252325 - RNA, 19 nt, Artificial Sequence
  Description of Artificial Sequence: Synthetic oligonucleotide
uguaccaggcaucgcgcgg

SEQ ID NO: 3252326 - RNA, 19 nt, Artificial Sequence
  Description of Artificial Sequence: Synthetic oligonucleotide
uccgaguuggucaggccgg

SEQ ID NO: 3252327 - RNA, 19 nt, Artificial Sequence
  Description of Artificial Sequence: Synthetic oligonucleotide
ugucgagcgaucugggcag

SEQ ID NO: 3252328 - RNA, 19 nt, Artificial Sequence
  Description of Artificial Sequence: Synthetic oligonucleotide
aaggccugcuguauggacg

SEQ ID NO: 3252329 - RNA, 19 nt, Artificial Sequence
  Description of Artificial Sequence: Synthetic oligonucleotide
guauggacggugcccaacg

SEQ ID NO: 3252330 - RNA, 19 nt, Artificial Sequence
  Description of Artificial Sequence: Synthetic oligonucleotide
cugggcagcauguaccagg

SEQ ID NO: 3252331 - RNA, 19 nt, Artificial Sequence
  Description of Artificial Sequence: Synthetic oligonucleotide
gcauguaccaggcaucgcg

SEQ ID NO: 3252332 - RNA, 19 nt, Artificial Sequence
  Description of Artificial Sequence: Synthetic oligonucleotide
gaucugggcagcauguacc

SEQ ID NO: 3252333 - RNA, 19 nt, Artificial Sequence
  Description of Artificial Sequence: Synthetic oligonucleotide
gaacuuccagcgcaaggcc

SEQ ID NO: 3252334 - RNA, 19 nt, Artificial Sequence
  Description of Artificial Sequence: Synthetic oligonucleotide
uccagggacauguagucau

SEQ ID NO: 3252335 - RNA, 19 nt, Artificial Sequence
  Description of Artificial Sequence: Synthetic oligonucleotide
gugaacuuccagcgcaagg

SEQ ID NO: 3252336 - RNA, 19 nt, Artificial Sequence
  Description of Artificial Sequence: Synthetic oligonucleotide
uauggacggugcccaacgg

SEQ ID NO: 3252337 - RNA, 19 nt, Artificial Sequence
  Description of Artificial Sequence: Synthetic oligonucleotide
aggccugcuguauggacgg

SEQ ID NO: 3252338 - RNA, 19 nt, Artificial Sequence
  Description of Artificial Sequence: Synthetic oligonucleotide
cauguaccaggcaucgcgc

SEQ ID NO: 3252339 - RNA, 19 nt, Artificial Sequence
  Description of Artificial Sequence: Synthetic oligonucleotide
auggacggugcccaacggg

SEQ ID NO: 3252340 - RNA, 19 nt, Artificial Sequence
  Description of Artificial Sequence: Synthetic oligonucleotide
agucagccguuccagcgcg

SEQ ID NO: 3252341 - RNA, 19 nt, Artificial Sequence
  Description of Artificial Sequence: Synthetic oligonucleotide
ugggcagcauguaccaggc

SEQ ID NO: 3252342 - RNA, 19 nt, Artificial Sequence
  Description of Artificial Sequence: Synthetic oligonucleotide
auguaccaggcaucgcgcg

SEQ ID NO: 3252343 - RNA, 19 nt, Artificial Sequence
  Description of Artificial Sequence: Synthetic oligonucleotide
uuggucaggccggugagcc

SEQ ID NO: 3252344 - RNA, 19 nt, Artificial Sequence
  Description of Artificial Sequence: Synthetic oligonucleotide
ugcauccugucccaugggu

SEQ ID NO: 3252345 - RNA, 19 nt, Artificial Sequence
  Description of Artificial Sequence: Synthetic oligonucleotide
aguuggucaggccggugag

SEQ ID NO: 3252346 - RNA, 19 nt, Artificial Sequence
  Description of Artificial Sequence: Synthetic oligonucleotide
gcugcauccugucccaugg

SEQ ID NO: 3252347 - RNA, 19 nt, Artificial Sequence
  Description of Artificial Sequence: Synthetic oligonucleotide
ugcuguauggacggugccc

SEQ ID NO: 3252348 - RNA, 19 nt, Artificial Sequence
  Description of Artificial Sequence: Synthetic oligonucleotide
ucgcgaaacgggcugucga

SEQ ID NO: 3252349 - RNA, 19 nt, Artificial Sequence
  Description of Artificial Sequence: Synthetic oligonucleotide
ggugugaacuuccagcgca

SEQ ID NO: 3252350 - RNA, 19 nt, Artificial Sequence
  Description of Artificial Sequence: Synthetic oligonucleotide
gaguuggucaggccgguga

SEQ ID NO: 3252351 - RNA, 19 nt, Artificial Sequence
  Description of Artificial Sequence: Synthetic oligonucleotide
aucugggcagcauguacca

SEQ ID NO: 3252352 - RNA, 19 nt, Artificial Sequence
  Description of Artificial Sequence: Synthetic oligonucleotide
caugggugugaacuuccag

SEQ ID NO: 3252353 - RNA, 19 nt, Artificial Sequence
  Description of Artificial Sequence: Synthetic oligonucleotide
cagcauguaccaggcaucg

SEQ ID NO: 3252354 - RNA, 19 nt, Artificial Sequence
  Description of Artificial Sequence: Synthetic oligonucleotide
cugucgagcgaucugggca

SEQ ID NO: 3252355 - RNA, 19 nt, Artificial Sequence
  Description of Artificial Sequence: Synthetic oligonucleotide
gagcgaucugggcagcaug

SEQ ID NO: 3252356 - RNA, 19 nt, Artificial Sequence
  Description of Artificial Sequence: Synthetic oligonucleotide
ugugaacuuccagcgcaag

SEQ ID NO: 3252357 - RNA, 19 nt, Artificial Sequence
  Description of Artificial Sequence: Synthetic oligonucleotide
aggccggugagccacgccu

SEQ ID NO: 3252358 - RNA, 19 nt, Artificial Sequence
  Description of Artificial Sequence: Synthetic oligonucleotide
guuccagcgcgugagggcc

SEQ ID NO: 3252359 - RNA, 19 nt, Artificial Sequence
  Description of Artificial Sequence: Synthetic oligonucleotide
agggccucgcgaaacgggc

SEQ ID NO: 3252360 - RNA, 19 nt, Artificial Sequence
  Description of Artificial Sequence: Synthetic oligonucleotide
ugagggccucgcgaaacgg

SEQ ID NO: 3252361 - RNA, 19 nt, Artificial Sequence
  Description of Artificial Sequence: Synthetic oligonucleotide
aacuuccagcgcaaggccu

SEQ ID NO: 3252362 - RNA, 19 nt, Artificial Sequence
  Description of Artificial Sequence: Synthetic oligonucleotide
uccagcgcaaggccugcug

SEQ ID NO: 3252363 - RNA, 19 nt, Artificial Sequence
  Description of Artificial Sequence: Synthetic oligonucleotide
gugagggccucgcgaaacg

SEQ ID NO: 3252364 - RNA, 19 nt, Artificial Sequence
  Description of Artificial Sequence: Synthetic oligonucleotide
aaacgggcugucgagcgau

SEQ ID NO: 3252365 - RNA, 19 nt, Artificial Sequence
  Description of Artificial Sequence: Synthetic oligonucleotide
gccagcugcauccuguccc

SEQ ID NO: 3252366 - RNA, 19 nt, Artificial Sequence
  Description of Artificial Sequence: Synthetic oligonucleotide
uguauggacggugcccaac

SEQ ID NO: 3252367 - RNA, 19 nt, Artificial Sequence
  Description of Artificial Sequence: Synthetic oligonucleotide
caaggccugcuguauggac

SEQ ID NO: 3252368 - RNA, 19 nt, Artificial Sequence
  Description of Artificial Sequence: Synthetic oligonucleotide
gagggccucgcgaaacggg

SEQ ID NO: 3252369 - RNA, 19 nt, Artificial Sequence
  Description of Artificial Sequence: Synthetic oligonucleotide
agcauguaccaggcaucgc

SEQ ID NO: 3252370 - RNA, 19 nt, Artificial Sequence
  Description of Artificial Sequence: Synthetic oligonucleotide
agcugcauccugucccaug

SEQ ID NO: 3252371 - RNA, 19 nt, Artificial Sequence
  Description of Artificial Sequence: Synthetic oligonucleotide
acuuccagcgcaaggccug

SEQ ID NO: 3252372 - RNA, 19 nt, Artificial Sequence
  Description of Artificial Sequence: Synthetic oligonucleotide
ccugcuguauggacggugc

SEQ ID NO: 3252373 - RNA, 19 nt, Artificial Sequence
  Description of Artificial Sequence: Synthetic oligonucleotide
agccguuccagcgcgugag

SEQ ID NO: 3252374 - RNA, 19 nt, Artificial Sequence
  Description of Artificial Sequence: Synthetic oligonucleotide
gaaacgggcugucgagcga

SEQ ID NO: 3252375 - RNA, 19 nt, Artificial Sequence
  Description of Artificial Sequence: Synthetic oligonucleotide
acgccuggccagcugcauc

SEQ ID NO: 3252376 - RNA, 19 nt, Artificial Sequence
  Description of Artificial Sequence: Synthetic oligonucleotide
ucgcgcgguuccgaguugg

SEQ ID NO: 3252377 - RNA, 19 nt, Artificial Sequence
  Description of Artificial Sequence: Synthetic oligonucleotide
guuccgaguuggucaggcc

SEQ ID NO: 3252378 - RNA, 19 nt, Artificial Sequence
  Description of Artificial Sequence: Synthetic oligonucleotide
ucagccguuccagcgcgug

SEQ ID NO: 3252379 - RNA, 19 nt, Artificial Sequence
  Description of Artificial Sequence: Synthetic oligonucleotide
ucugggcagcauguaccag

SEQ ID NO: 3252380 - RNA, 19 nt, Artificial Sequence
  Description of Artificial Sequence: Synthetic oligonucleotide
ugagccacgccuggccagc

SEQ ID NO: 3252381 - RNA, 19 nt, Artificial Sequence
  Description of Artificial Sequence: Synthetic oligonucleotide
cagggacauguagucauug

SEQ ID NO: 3252382 - RNA, 19 nt, Artificial Sequence
  Description of Artificial Sequence: Synthetic oligonucleotide
gugagccacgccuggccag

SEQ ID NO: 3252383 - RNA, 19 nt, Artificial Sequence
  Description of Artificial Sequence: Synthetic oligonucleotide
agcgaucugggcagcaugu

SEQ ID NO: 3252384 - RNA, 19 nt, Artificial Sequence
  Description of Artificial Sequence: Synthetic oligonucleotide
cugcuguauggacggugcc

SEQ ID NO: 3252385 - RNA, 19 nt, Artificial Sequence
  Description of Artificial Sequence: Synthetic oligonucleotide
gggcugucgagcgaucugg

SEQ ID NO: 3252386 - RNA, 19 nt, Artificial Sequence
  Description of Artificial Sequence: Synthetic oligonucleotide
agcgcgugagggccucgcg

SEQ ID NO: 3252387 - RNA, 19 nt, Artificial Sequence
  Description of Artificial Sequence: Synthetic oligonucleotide
cgaaacgggcugucgagcg

SEQ ID NO: 3252388 - RNA, 19 nt, Artificial Sequence
  Description of Artificial Sequence: Synthetic oligonucleotide
cucgcgaaacgggcugucg

SEQ ID NO: 3252389 - RNA, 19 nt, Artificial Sequence
  Description of Artificial Sequence: Synthetic oligonucleotide
ucccaugggugugaacuuc

SEQ ID NO: 3252390 - RNA, 19 nt, Artificial Sequence
  Description of Artificial Sequence: Synthetic oligonucleotide
gguuccgaguuggucaggc

SEQ ID NO: 3252391 - RNA, 19 nt, Artificial Sequence
  Description of Artificial Sequence: Synthetic oligonucleotide
cugcauccugucccauggg

SEQ ID NO: 3252392 - RNA, 19 nt, Artificial Sequence
  Description of Artificial Sequence: Synthetic oligonucleotide
cauccugucccaugggugu

SEQ ID NO: 3252393 - RNA, 19 nt, Artificial Sequence
  Description of Artificial Sequence: Synthetic oligonucleotide
ccaggcaucgcgcgguucc

SEQ ID NO: 3252394 - RNA, 19 nt, Artificial Sequence
  Description of Artificial Sequence: Synthetic oligonucleotide
ccuccagggacauguaguc

SEQ ID NO: 3252395 - RNA, 19 nt, Artificial Sequence
  Description of Artificial Sequence: Synthetic oligonucleotide
cccaugggugugaacuucc

SEQ ID NO: 3252396 - RNA, 19 nt, Artificial Sequence
  Description of Artificial Sequence: Synthetic oligonucleotide
guuggucaggccggugagc

SEQ ID NO: 3252397 - RNA, 19 nt, Artificial Sequence
  Description of Artificial Sequence: Synthetic oligonucleotide
ggcagcauguaccaggcau

SEQ ID NO: 3252398 - RNA, 19 nt, Artificial Sequence
  Description of Artificial Sequence: Synthetic oligonucleotide
gcgguuccgaguuggucag

SEQ ID NO: 3252399 - RNA, 19 nt, Artificial Sequence
  Description of Artificial Sequence: Synthetic oligonucleotide
gcuguauggacggugccca

SEQ ID NO: 3252400 - RNA, 19 nt, Artificial Sequence
  Description of Artificial Sequence: Synthetic oligonucleotide
cgcaaggccugcuguaugg

SEQ ID NO: 3252401 - RNA, 19 nt, Artificial Sequence
  Description of Artificial Sequence: Synthetic oligonucleotide
gggugugaacuuccagcgc

SEQ ID NO: 3252402 - RNA, 19 nt, Artificial Sequence
  Description of Artificial Sequence: Synthetic oligonucleotide
aacgggcugucgagcgauc

SEQ ID NO: 3252403 - RNA, 19 nt, Artificial Sequence
  Description of Artificial Sequence: Synthetic oligonucleotide
uggccagcugcauccuguc

SEQ ID NO: 3252404 - RNA, 19 nt, Artificial Sequence
  Description of Artificial Sequence: Synthetic oligonucleotide
gcauccugucccaugggug

SEQ ID NO: 3252405 - RNA, 19 nt, Artificial Sequence
  Description of Artificial Sequence: Synthetic oligonucleotide
uccugucccauggguguga

SEQ ID NO: 3252406 - RNA, 19 nt, Artificial Sequence
  Description of Artificial Sequence: Synthetic oligonucleotide
cuuccagcgcaaggccugc

SEQ ID NO: 3252407 - RNA, 19 nt, Artificial Sequence
  Description of Artificial Sequence: Synthetic oligonucleotide
uggucaggccggugagcca

SEQ ID NO: 3252408 - RNA, 19 nt, Artificial Sequence
  Description of Artificial Sequence: Synthetic oligonucleotide
ggcaucgcgcgguuccgag

SEQ ID NO: 3252409 - RNA, 19 nt, Artificial Sequence
  Description of Artificial Sequence: Synthetic oligonucleotide
gcugucgagcgaucugggc

SEQ ID NO: 3252410 - RNA, 19 nt, Artificial Sequence
  Description of Artificial Sequence: Synthetic oligonucleotide
ggucaggccggugagccac

SEQ ID NO: 3252411 - RNA, 19 nt, Artificial Sequence
  Description of Artificial Sequence: Synthetic oligonucleotide
uuccagcgcgugagggccu

SEQ ID NO: 3252412 - RNA, 19 nt, Artificial Sequence
  Description of Artificial Sequence: Synthetic oligonucleotide
agcgcaaggccugcuguau

SEQ ID NO: 3252413 - RNA, 19 nt, Artificial Sequence
  Description of Artificial Sequence: Synthetic oligonucleotide
gccacgccuggccagcugc

SEQ ID NO: 3252414 - RNA, 19 nt, Artificial Sequence
  Description of Artificial Sequence: Synthetic oligonucleotide
auccugucccaugggugug

SEQ ID NO: 3252415 - RNA, 19 nt, Artificial Sequence
  Description of Artificial Sequence: Synthetic oligonucleotide
ggugagccacgccuggcca

SEQ ID NO: 3252416 - RNA, 19 nt, Artificial Sequence
  Description of Artificial Sequence: Synthetic oligonucleotide
caggcaucgcgcgguuccg

SEQ ID NO: 3252417 - RNA, 19 nt, Artificial Sequence
  Description of Artificial Sequence: Synthetic oligonucleotide
uuuauaaaaucaaacauag

SEQ ID NO: 3252418 - RNA, 19 nt, Artificial Sequence
  Description of Artificial Sequence: Synthetic oligonucleotide
agaauuagggcucugaacc

SEQ ID NO: 3252419 - RNA, 19 nt, Artificial Sequence
  Description of Artificial Sequence: Synthetic oligonucleotide
aaaacacaaacucaggaac

SEQ ID NO: 3252420 - RNA, 19 nt, Artificial Sequence
  Description of Artificial Sequence: Synthetic oligonucleotide
aaaacugacaccaaaauag

SEQ ID NO: 3252421 - RNA, 19 nt, Artificial Sequence
  Description of Artificial Sequence: Synthetic oligonucleotide
uauaaaaucaaacauaguu

SEQ ID NO: 3252422 - RNA, 19 nt, Artificial Sequence
  Description of Artificial Sequence: Synthetic oligonucleotide
ugaaguaagaauuagggcu

SEQ ID NO: 3252423 - RNA, 19 nt, Artificial Sequence
  Description of Artificial Sequence: Synthetic oligonucleotide
acuguaguaaucuuguagc

SEQ ID NO: 3252424 - RNA, 19 nt, Artificial Sequence
  Description of Artificial Sequence: Synthetic oligonucleotide
acaaccuacacaaagaacc

SEQ ID NO: 3252425 - RNA, 19 nt, Artificial Sequence
  Description of Artificial Sequence: Synthetic oligonucleotide
caugaaguaagaauuaggg

SEQ ID NO: 3252426 - RNA, 19 nt, Artificial Sequence
  Description of Artificial Sequence: Synthetic oligonucleotide
aguuacauagucuugguag

SEQ ID NO: 3252427 - RNA, 19 nt, Artificial Sequence
  Description of Artificial Sequence: Synthetic oligonucleotide
uaaaaucaaacauaguuac

SEQ ID NO: 3252428 - RNA, 19 nt, Artificial Sequence
  Description of Artificial Sequence: Synthetic oligonucleotide
uaaucuuguagcaaccugg

SEQ ID NO: 3252429 - RNA, 19 nt, Artificial Sequence
  Description of Artificial Sequence: Synthetic oligonucleotide
aacuguaguaaucuuguag

SEQ ID NO: 3252430 - RNA, 19 nt, Artificial Sequence
  Description of Artificial Sequence: Synthetic oligonucleotide
uacuuuauaaaaucaaaca

SEQ ID NO: 3252431 - RNA, 19 nt, Artificial Sequence
  Description of Artificial Sequence: Synthetic oligonucleotide
uguugaacaaccuacacaa

SEQ ID NO: 3252432 - RNA, 19 nt, Artificial Sequence
  Description of Artificial Sequence: Synthetic oligonucleotide
uucacauccaugaaguaag

SEQ ID NO: 3252433 - RNA, 19 nt, Artificial Sequence
  Description of Artificial Sequence: Synthetic oligonucleotide
uguuguauacuuuauaaaa

SEQ ID NO: 3252434 - RNA, 19 nt, Artificial Sequence
  Description of Artificial Sequence: Synthetic oligonucleotide
aagaauuagggcucugaac

SEQ ID NO: 3252435 - RNA, 19 nt, Artificial Sequence
  Description of Artificial Sequence: Synthetic oligonucleotide
uugaacaaccuacacaaag

SEQ ID NO: 3252436 - RNA, 19 nt, Artificial Sequence
  Description of Artificial Sequence: Synthetic oligonucleotide
aaaugaacagccuucugug

SEQ ID NO: 3252437 - RNA, 19 nt, Artificial Sequence
  Description of Artificial Sequence: Synthetic oligonucleotide
augaaguaagaauuagggc

SEQ ID NO: 3252438 - RNA, 19 nt, Artificial Sequence
  Description of Artificial Sequence: Synthetic oligonucleotide
aucaaacauaguuacauag

SEQ ID NO: 3252439 - RNA, 19 nt, Artificial Sequence
  Description of Artificial Sequence: Synthetic oligonucleotide
uguauacuuuauaaaauca

SEQ ID NO: 3252440 - RNA, 19 nt, Artificial Sequence
  Description of Artificial Sequence: Synthetic oligonucleotide
uucuucuaaaugaacagcc

SEQ ID NO: 3252441 - RNA, 19 nt, Artificial Sequence
  Description of Artificial Sequence: Synthetic oligonucleotide
ucuuguagcaaccuggaca

SEQ ID NO: 3252442 - RNA, 19 nt, Artificial Sequence
  Description of Artificial Sequence: Synthetic oligonucleotide
aauaggagaucauuguugu

SEQ ID NO: 3252443 - RNA, 19 nt, Artificial Sequence
  Description of Artificial Sequence: Synthetic oligonucleotide
uguaauagaucucuagcca

SEQ ID NO: 3252444 - RNA, 19 nt, Artificial Sequence
  Description of Artificial Sequence: Synthetic oligonucleotide
acuuuauaaaaucaaacau

SEQ ID NO: 3252445 - RNA, 19 nt, Artificial Sequence
  Description of Artificial Sequence: Synthetic oligonucleotide
uaaaugaacagccuucugu

SEQ ID NO: 3252446 - RNA, 19 nt, Artificial Sequence
  Description of Artificial Sequence: Synthetic oligonucleotide
aacauaguuacauagucuu

SEQ ID NO: 3252447 - RNA, 19 nt, Artificial Sequence
  Description of Artificial Sequence: Synthetic oligonucleotide
uagaucucuagccagagga

SEQ ID NO: 3252448 - RNA, 19 nt, Artificial Sequence
  Description of Artificial Sequence: Synthetic oligonucleotide
uauacuuuauaaaaucaaa

SEQ ID NO: 3252449 - RNA, 19 nt, Artificial Sequence
  Description of Artificial Sequence: Synthetic oligonucleotide
aacucaggaacauguauag

SEQ ID NO: 3252450 - RNA, 19 nt, Artificial Sequence
  Description of Artificial Sequence: Synthetic oligonucleotide
aaaucaaacauaguuacau

SEQ ID NO: 3252451 - RNA, 19 nt, Artificial Sequence
  Description of Artificial Sequence: Synthetic oligonucleotide
accuggacauuucacaucc

SEQ ID NO: 3252452 - RNA, 19 nt, Artificial Sequence
  Description of Artificial Sequence: Synthetic oligonucleotide
uuuuccucuuccaaggaag

SEQ ID NO: 3252453 - RNA, 19 nt, Artificial Sequence
  Description of Artificial Sequence: Synthetic oligonucleotide
auacuuuauaaaaucaaac

SEQ ID NO: 3252454 - RNA, 19 nt, Artificial Sequence
  Description of Artificial Sequence: Synthetic oligonucleotide
guugcuuucuucuaaauga

SEQ ID NO: 3252455 - RNA, 19 nt, Artificial Sequence
  Description of Artificial Sequence: Synthetic oligonucleotide
cauguauagaugauuagug

SEQ ID NO: 3252456 - RNA, 19 nt, Artificial Sequence
  Description of Artificial Sequence: Synthetic oligonucleotide
cuugauaaggcuuucugug

SEQ ID NO: 3252457 - RNA, 19 nt, Artificial Sequence
  Description of Artificial Sequence: Synthetic oligonucleotide
auuguuguauacuuuauaa

SEQ ID NO: 3252458 - RNA, 19 nt, Artificial Sequence
  Description of Artificial Sequence: Synthetic oligonucleotide
uucuuuuccucuuccaagg

SEQ ID NO: 3252459 - RNA, 19 nt, Artificial Sequence
  Description of Artificial Sequence: Synthetic oligonucleotide
uacacaaagaaccacuguc

SEQ ID NO: 3252460 - RNA, 19 nt, Artificial Sequence
  Description of Artificial Sequence: Synthetic oligonucleotide
auuaguguugcuuucuucu

SEQ ID NO: 3252461 - RNA, 19 nt, Artificial Sequence
  Description of Artificial Sequence: Synthetic oligonucleotide
ugaacaaccuacacaaaga

SEQ ID NO: 3252462 - RNA, 19 nt, Artificial Sequence
  Description of Artificial Sequence: Synthetic oligonucleotide
aacuugauaaggcuuucug

SEQ ID NO: 3252463 - RNA, 19 nt, Artificial Sequence
  Description of Artificial Sequence: Synthetic oligonucleotide
aaauaggagaucauuguug

SEQ ID NO: 3252464 - RNA, 19 nt, Artificial Sequence
  Description of Artificial Sequence: Synthetic oligonucleotide
cuuucuucuaaaugaacag

SEQ ID NO: 3252465 - RNA, 19 nt, Artificial Sequence
  Description of Artificial Sequence: Synthetic oligonucleotide
uuguauacuuuauaaaauc

SEQ ID NO: 3252466 - RNA, 19 nt, Artificial Sequence
  Description of Artificial Sequence: Synthetic oligonucleotide
aaaacuguaguaaucuugu

SEQ ID NO: 3252467 - RNA, 19 nt, Artificial Sequence
  Description of Artificial Sequence: Synthetic oligonucleotide
cauaguuacauagucuugg

SEQ ID NO: 3252468 - RNA, 19 nt, Artificial Sequence
  Description of Artificial Sequence: Synthetic oligonucleotide
aacauguauagaugauuag

SEQ ID NO: 3252469 - RNA, 19 nt, Artificial Sequence
  Description of Artificial Sequence: Synthetic oligonucleotide
uuucuuuuccucuuccaag

SEQ ID NO: 3252470 - RNA, 19 nt, Artificial Sequence
  Description of Artificial Sequence: Synthetic oligonucleotide
uagucacugaacuugauaa

SEQ ID NO: 3252471 - RNA, 19 nt, Artificial Sequence
  Description of Artificial Sequence: Synthetic oligonucleotide
ucaaacauaguuacauagu

SEQ ID NO: 3252472 - RNA, 19 nt, Artificial Sequence
  Description of Artificial Sequence: Synthetic oligonucleotide
guguaauagaucucuagcc

SEQ ID NO: 3252473 - RNA, 19 nt, Artificial Sequence
  Description of Artificial Sequence: Synthetic oligonucleotide
aaaauaggagaucauuguu

SEQ ID NO: 3252474 - RNA, 19 nt, Artificial Sequence
  Description of Artificial Sequence: Synthetic oligonucleotide
uguugcuuucuucuaaaug

SEQ ID NO: 3252475 - RNA, 19 nt, Artificial Sequence
  Description of Artificial Sequence: Synthetic oligonucleotide
gaaaacuguaguaaucuug

SEQ ID NO: 3252476 - RNA, 19 nt, Artificial Sequence
  Description of Artificial Sequence: Synthetic oligonucleotide
acauuucacauccaugaag

SEQ ID NO: 3252477 - RNA, 19 nt, Artificial Sequence
  Description of Artificial Sequence: Synthetic oligonucleotide
guaauagaucucuagccag

SEQ ID NO: 3252478 - RNA, 19 nt, Artificial Sequence
  Description of Artificial Sequence: Synthetic oligonucleotide
ucuugguagucacugaacu

SEQ ID NO: 3252479 - RNA, 19 nt, Artificial Sequence
  Description of Artificial Sequence: Synthetic oligonucleotide
guaguaaucuuguagcaac

SEQ ID NO: 3252480 - RNA, 19 nt, Artificial Sequence
  Description of Artificial Sequence: Synthetic oligonucleotide
caaacauaguuacauaguc

SEQ ID NO: 3252481 - RNA, 19 nt, Artificial Sequence
  Description of Artificial Sequence: Synthetic oligonucleotide
uguauagaugauuaguguu

SEQ ID NO: 3252482 - RNA, 19 nt, Artificial Sequence
  Description of Artificial Sequence: Synthetic oligonucleotide
cuuuauaaaaucaaacaua

SEQ ID NO: 3252483 - RNA, 19 nt, Artificial Sequence
  Description of Artificial Sequence: Synthetic oligonucleotide
ucaggaacauguauagaug

SEQ ID NO: 3252484 - RNA, 19 nt, Artificial Sequence
  Description of Artificial Sequence: Synthetic oligonucleotide
uucuaaaugaacagccuuc

SEQ ID NO: 3252485 - RNA, 19 nt, Artificial Sequence
  Description of Artificial Sequence: Synthetic oligonucleotide
aaacugacaccaaaauagg

SEQ ID NO: 3252486 - RNA, 19 nt, Artificial Sequence
  Description of Artificial Sequence: Synthetic oligonucleotide
aaagaaccacugucugagc

SEQ ID NO: 3252487 - RNA, 19 nt, Artificial Sequence
  Description of Artificial Sequence: Synthetic oligonucleotide
acuguugaacaaccuacac

SEQ ID NO: 3252488 - RNA, 19 nt, Artificial Sequence
  Description of Artificial Sequence: Synthetic oligonucleotide
aagaaccacugucugagca

SEQ ID NO: 3252489 - RNA, 19 nt, Artificial Sequence
  Description of Artificial Sequence: Synthetic oligonucleotide
uggcuuuuccuccuguggg

SEQ ID NO: 3252490 - RNA, 19 nt, Artificial Sequence
  Description of Artificial Sequence: Synthetic oligonucleotide
ucacugaacuugauaaggc

SEQ ID NO: 3252491 - RNA, 19 nt, Artificial Sequence
  Description of Artificial Sequence: Synthetic oligonucleotide
uugguagucacugaacuug

SEQ ID NO: 3252492 - RNA, 19 nt, Artificial Sequence
  Description of Artificial Sequence: Synthetic oligonucleotide
acauccaugaaguaagaau

SEQ ID NO: 3252493 - RNA, 19 nt, Artificial Sequence
  Description of Artificial Sequence: Synthetic oligonucleotide
uuuccucuuccaaggaagg

SEQ ID NO: 3252494 - RNA, 19 nt, Artificial Sequence
  Description of Artificial Sequence: Synthetic oligonucleotide
caaagaaccacugucugag

SEQ ID NO: 3252495 - RNA, 19 nt, Artificial Sequence
  Description of Artificial Sequence: Synthetic oligonucleotide
uuuucuuuuccucuuccaa

SEQ ID NO: 3252496 - RNA, 19 nt, Artificial Sequence
  Description of Artificial Sequence: Synthetic oligonucleotide
aaggguguaauagaucucu

SEQ ID NO: 3252497 - RNA, 19 nt, Artificial Sequence
  Description of Artificial Sequence: Synthetic oligonucleotide
aacaaccuacacaaagaac

SEQ ID NO: 3252498 - RNA, 19 nt, Artificial Sequence
  Description of Artificial Sequence: Synthetic oligonucleotide
uauagaugauuaguguugc

SEQ ID NO: 3252499 - RNA, 19 nt, Artificial Sequence
  Description of Artificial Sequence: Synthetic oligonucleotide
ugagcauggcugaaaacug

SEQ ID NO: 3252500 - RNA, 19 nt, Artificial Sequence
  Description of Artificial Sequence: Synthetic oligonucleotide
gucacugaacuugauaagg

SEQ ID NO: 3252501 - RNA, 19 nt, Artificial Sequence
  Description of Artificial Sequence: Synthetic oligonucleotide
acugacaccaaaauaggag

SEQ ID NO: 3252502 - RNA, 19 nt, Artificial Sequence
  Description of Artificial Sequence: Synthetic oligonucleotide
uuucuucuaaaugaacagc

SEQ ID NO: 3252503 - RNA, 19 nt, Artificial Sequence
  Description of Artificial Sequence: Synthetic oligonucleotide
acauagucuugguagucac

SEQ ID NO: 3252504 - RNA, 19 nt, Artificial Sequence
  Description of Artificial Sequence: Synthetic oligonucleotide
augaacagccuucugugag

SEQ ID NO: 3252505 - RNA, 19 nt, Artificial Sequence
  Description of Artificial Sequence: Synthetic oligonucleotide
aauagaucucuagccagag

SEQ ID NO: 3252506 - RNA, 19 nt, Artificial Sequence
  Description of Artificial Sequence: Synthetic oligonucleotide
auaaaaucaaacauaguua

SEQ ID NO: 3252507 - RNA, 19 nt, Artificial Sequence
  Description of Artificial Sequence: Synthetic oligonucleotide
uaauagaucucuagccaga

SEQ ID NO: 3252508 - RNA, 19 nt, Artificial Sequence
  Description of Artificial Sequence: Synthetic oligonucleotide
aaccuggacauuucacauc

SEQ ID NO: 3252509 - RNA, 19 nt, Artificial Sequence
  Description of Artificial Sequence: Synthetic oligonucleotide
guauagaugauuaguguug

SEQ ID NO: 3252510 - RNA, 19 nt, Artificial Sequence
  Description of Artificial Sequence: Synthetic oligonucleotide
uaagaauuagggcucugaa

SEQ ID NO: 3252511 - RNA, 19 nt, Artificial Sequence
  Description of Artificial Sequence: Synthetic oligonucleotide
auguauagaugauuagugu

SEQ ID NO: 3252512 - RNA, 19 nt, Artificial Sequence
  Description of Artificial Sequence: Synthetic oligonucleotide
uuauaaaaucaaacauagu

SEQ ID NO: 3252513 - RNA, 19 nt, Artificial Sequence
  Description of Artificial Sequence: Synthetic oligonucleotide
gguguaauagaucucuagc

SEQ ID NO: 3252514 - RNA, 19 nt, Artificial Sequence
  Description of Artificial Sequence: Synthetic oligonucleotide
aaacauaguuacauagucu

SEQ ID NO: 3252515 - RNA, 19 nt, Artificial Sequence
  Description of Artificial Sequence: Synthetic oligonucleotide
ucuucuaaaugaacagccu

SEQ ID NO: 3252516 - RNA, 19 nt, Artificial Sequence
  Description of Artificial Sequence: Synthetic oligonucleotide
acuugauaaggcuuucugu

SEQ ID NO: 3252517 - RNA, 19 nt, Artificial Sequence
  Description of Artificial Sequence: Synthetic oligonucleotide
uauguuauaaacuaacugg

SEQ ID NO: 3252518 - RNA, 19 nt, Artificial Sequence
  Description of Artificial Sequence: Synthetic oligonucleotide
aaaaugaugauacuaccac

SEQ ID NO: 3252519 - RNA, 19 nt, Artificial Sequence
  Description of Artificial Sequence: Synthetic oligonucleotide
auugauuucauuuaacucu

SEQ ID NO: 3252520 - RNA, 19 nt, Artificial Sequence
  Description of Artificial Sequence: Synthetic oligonucleotide
aaugcauuuuccuccaugg

SEQ ID NO: 3252521 - RNA, 19 nt, Artificial Sequence
  Description of Artificial Sequence: Synthetic oligonucleotide
uuuaauacuuagaaaagca

SEQ ID NO: 3252522 - RNA, 19 nt, Artificial Sequence
  Description of Artificial Sequence: Synthetic oligonucleotide
aggacuacuauauacacuc

SEQ ID NO: 3252523 - RNA, 19 nt, Artificial Sequence
  Description of Artificial Sequence: Synthetic oligonucleotide
aagagaauaaaucuacuga

SEQ ID NO: 3252524 - RNA, 19 nt, Artificial Sequence
  Description of Artificial Sequence: Synthetic oligonucleotide
uaauacaauauguacaaug

SEQ ID NO: 3252525 - RNA, 19 nt, Artificial Sequence
  Description of Artificial Sequence: Synthetic oligonucleotide
auaguuaauauuuagcagu

SEQ ID NO: 3252526 - RNA, 19 nt, Artificial Sequence
  Description of Artificial Sequence: Synthetic oligonucleotide
uaauacuuagaaaagcagc

SEQ ID NO: 3252527 - RNA, 19 nt, Artificial Sequence
  Description of Artificial Sequence: Synthetic oligonucleotide
auaagugucguuuauuauc

SEQ ID NO: 3252528 - RNA, 19 nt, Artificial Sequence
  Description of Artificial Sequence: Synthetic oligonucleotide
uauaccaagagaauaaauc

SEQ ID NO: 3252529 - RNA, 19 nt, Artificial Sequence
  Description of Artificial Sequence: Synthetic oligonucleotide
aaaucggugaacuggauca

SEQ ID NO: 3252530 - RNA, 19 nt, Artificial Sequence
  Description of Artificial Sequence: Synthetic oligonucleotide
aaggcuuccuuugagaggc

SEQ ID NO: 3252531 - RNA, 19 nt, Artificial Sequence
  Description of Artificial Sequence: Synthetic oligonucleotide
aauuaaguacaauugugca

SEQ ID NO: 3252532 - RNA, 19 nt, Artificial Sequence
  Description of Artificial Sequence: Synthetic oligonucleotide
uauauaaggacuacuauau

SEQ ID NO: 3252533 - RNA, 19 nt, Artificial Sequence
  Description of Artificial Sequence: Synthetic oligonucleotide
ugugcagccagaaagaaac

SEQ ID NO: 3252534 - RNA, 19 nt, Artificial Sequence
  Description of Artificial Sequence: Synthetic oligonucleotide
aaucaaagucacuaaaaca

SEQ ID NO: 3252535 - RNA, 19 nt, Artificial Sequence
  Description of Artificial Sequence: Synthetic oligonucleotide
uauaaggacuacuauauac

SEQ ID NO: 3252536 - RNA, 19 nt, Artificial Sequence
  Description of Artificial Sequence: Synthetic oligonucleotide
uuaaguacaauugugcagc

SEQ ID NO: 3252537 - RNA, 19 nt, Artificial Sequence
  Description of Artificial Sequence: Synthetic oligonucleotide
aacuaacugguauagaaga

SEQ ID NO: 3252538 - RNA, 19 nt, Artificial Sequence
  Description of Artificial Sequence: Synthetic oligonucleotide
auauguuauaaacuaacug

SEQ ID NO: 3252539 - RNA, 19 nt, Artificial Sequence
  Description of Artificial Sequence: Synthetic oligonucleotide
aacgcuuuuauauagcaaa

SEQ ID NO: 3252540 - RNA, 19 nt, Artificial Sequence
  Description of Artificial Sequence: Synthetic oligonucleotide
uaaacuaacugguauagaa

SEQ ID NO: 3252541 - RNA, 19 nt, Artificial Sequence
  Description of Artificial Sequence: Synthetic oligonucleotide
ugaaaguggaucuaaguac

SEQ ID NO: 3252542 - RNA, 19 nt, Artificial Sequence
  Description of Artificial Sequence: Synthetic oligonucleotide
guuuaauaaacauucauaa

SEQ ID NO: 3252543 - RNA, 19 nt, Artificial Sequence
  Description of Artificial Sequence: Synthetic oligonucleotide
aguaacauugauuucauuu

SEQ ID NO: 3252544 - RNA, 19 nt, Artificial Sequence
  Description of Artificial Sequence: Synthetic oligonucleotide
aaagauaaccaguuaaauu

SEQ ID NO: 3252545 - RNA, 19 nt, Artificial Sequence
  Description of Artificial Sequence: Synthetic oligonucleotide
auuaaguacaauugugcag

SEQ ID NO: 3252546 - RNA, 19 nt, Artificial Sequence
  Description of Artificial Sequence: Synthetic oligonucleotide
uacuaacuuugacagaggg

SEQ ID NO: 3252547 - RNA, 19 nt, Artificial Sequence
  Description of Artificial Sequence: Synthetic oligonucleotide
aaaacgcuuuuauauagca

SEQ ID NO: 3252548 - RNA, 19 nt, Artificial Sequence
  Description of Artificial Sequence: Synthetic oligonucleotide
ucauuuaacucuccaaucu

SEQ ID NO: 3252549 - RNA, 19 nt, Artificial Sequence
  Description of Artificial Sequence: Synthetic oligonucleotide
augguuagcaacauuaacg

SEQ ID NO: 3252550 - RNA, 19 nt, Artificial Sequence
  Description of Artificial Sequence: Synthetic oligonucleotide
aauguuucuguuaaaugag

SEQ ID NO: 3252551 - RNA, 19 nt, Artificial Sequence
  Description of Artificial Sequence: Synthetic oligonucleotide
gaaucaaagucacuaaaac

SEQ ID NO: 3252552 - RNA, 19 nt, Artificial Sequence
  Description of Artificial Sequence: Synthetic oligonucleotide
aguauaaaauagcauuaag

SEQ ID NO: 3252553 - RNA, 19 nt, Artificial Sequence
  Description of Artificial Sequence: Synthetic oligonucleotide
augaaauacauccaagggu

SEQ ID NO: 3252554 - RNA, 19 nt, Artificial Sequence
  Description of Artificial Sequence: Synthetic oligonucleotide
ugguuagcaacauuaacgc

SEQ ID NO: 3252555 - RNA, 19 nt, Artificial Sequence
  Description of Artificial Sequence: Synthetic oligonucleotide
cauaguuaauauuuagcag

SEQ ID NO: 3252556 - RNA, 19 nt, Artificial Sequence
  Description of Artificial Sequence: Synthetic oligonucleotide
uguagugaaucaaagucac

SEQ ID NO: 3252557 - RNA, 19 nt, Artificial Sequence
  Description of Artificial Sequence: Synthetic oligonucleotide
uauaaauacgcaugcagaa

SEQ ID NO: 3252558 - RNA, 19 nt, Artificial Sequence
  Description of Artificial Sequence: Synthetic oligonucleotide
uuuaagacggacugguagc

SEQ ID NO: 3252559 - RNA, 19 nt, Artificial Sequence
  Description of Artificial Sequence: Synthetic oligonucleotide
uguacauucaugccuauua

SEQ ID NO: 3252560 - RNA, 19 nt, Artificial Sequence
  Description of Artificial Sequence: Synthetic oligonucleotide
uacaaugcauucaugaaau

SEQ ID NO: 3252561 - RNA, 19 nt, Artificial Sequence
  Description of Artificial Sequence: Synthetic oligonucleotide
agugucguuuauuaucugg

SEQ ID NO: 3252562 - RNA, 19 nt, Artificial Sequence
  Description of Artificial Sequence: Synthetic oligonucleotide
auauuuagcagucacguua

SEQ ID NO: 3252563 - RNA, 19 nt, Artificial Sequence
  Description of Artificial Sequence: Synthetic oligonucleotide
ugaaacaggaacuuuggau

SEQ ID NO: 3252564 - RNA, 19 nt, Artificial Sequence
  Description of Artificial Sequence: Synthetic oligonucleotide
ugaaucaaagucacuaaaa

SEQ ID NO: 3252565 - RNA, 19 nt, Artificial Sequence
  Description of Artificial Sequence: Synthetic oligonucleotide
uaaaccauucuaaaacuuc

SEQ ID NO: 3252566 - RNA, 19 nt, Artificial Sequence
  Description of Artificial Sequence: Synthetic oligonucleotide
uugcuuacaaucuuguuuc

SEQ ID NO: 3252567 - RNA, 19 nt, Artificial Sequence
  Description of Artificial Sequence: Synthetic oligonucleotide
uguaaacauacuuaggguu

SEQ ID NO: 3252568 - RNA, 19 nt, Artificial Sequence
  Description of Artificial Sequence: Synthetic oligonucleotide
auacuuaggguuucaauug

SEQ ID NO: 3252569 - RNA, 19 nt, Artificial Sequence
  Description of Artificial Sequence: Synthetic oligonucleotide
uuauuaucugguauuguaa

SEQ ID NO: 3252570 - RNA, 19 nt, Artificial Sequence
  Description of Artificial Sequence: Synthetic oligonucleotide
aaguacaggauuuguuuug

SEQ ID NO: 3252571 - RNA, 19 nt, Artificial Sequence
  Description of Artificial Sequence: Synthetic oligonucleotide
caagagaauaaaucuacug

SEQ ID NO: 3252572 - RNA, 19 nt, Artificial Sequence
  Description of Artificial Sequence: Synthetic oligonucleotide
aaagugaaaucggugaacu

SEQ ID NO: 3252573 - RNA, 19 nt, Artificial Sequence
  Description of Artificial Sequence: Synthetic oligonucleotide
auuaaguccauugugcucu

SEQ ID NO: 3252574 - RNA, 19 nt, Artificial Sequence
  Description of Artificial Sequence: Synthetic oligonucleotide
uucucuuuagcuccggugu

SEQ ID NO: 3252575 - RNA, 19 nt, Artificial Sequence
  Description of Artificial Sequence: Synthetic oligonucleotide
uugcugauugaacuucugg

SEQ ID NO: 3252576 - RNA, 19 nt, Artificial Sequence
  Description of Artificial Sequence: Synthetic oligonucleotide
uuauuuacuuauauguauu

SEQ ID NO: 3252577 - RNA, 19 nt, Artificial Sequence
  Description of Artificial Sequence: Synthetic oligonucleotide
aggguaccaguauauaaac

SEQ ID NO: 3252578 - RNA, 19 nt, Artificial Sequence
  Description of Artificial Sequence: Synthetic oligonucleotide
ugaugauacuaccacaaau

SEQ ID NO: 3252579 - RNA, 19 nt, Artificial Sequence
  Description of Artificial Sequence: Synthetic oligonucleotide
guuagcaacauuaacgcac

SEQ ID NO: 3252580 - RNA, 19 nt, Artificial Sequence
  Description of Artificial Sequence: Synthetic oligonucleotide
aaacuaacugguauagaag

SEQ ID NO: 3252581 - RNA, 19 nt, Artificial Sequence
  Description of Artificial Sequence: Synthetic oligonucleotide
uaagcugucagcacucucu

SEQ ID NO: 3252582 - RNA, 19 nt, Artificial Sequence
  Description of Artificial Sequence: Synthetic oligonucleotide
aucuuuugcugauugaacu

SEQ ID NO: 3252583 - RNA, 19 nt, Artificial Sequence
  Description of Artificial Sequence: Synthetic oligonucleotide
uauuaucugguauuguaaa

SEQ ID NO: 3252584 - RNA, 19 nt, Artificial Sequence
  Description of Artificial Sequence: Synthetic oligonucleotide
ugauacuaccacaaauaca

SEQ ID NO: 3252585 - RNA, 19 nt, Artificial Sequence
  Description of Artificial Sequence: Synthetic oligonucleotide
ugagagagcaaacauuaau

SEQ ID NO: 3252586 - RNA, 19 nt, Artificial Sequence
  Description of Artificial Sequence: Synthetic oligonucleotide
acacaaaauacaaucauca

SEQ ID NO: 3252587 - RNA, 19 nt, Artificial Sequence
  Description of Artificial Sequence: Synthetic oligonucleotide
aaugaaagacccaucuuca

SEQ ID NO: 3252588 - RNA, 19 nt, Artificial Sequence
  Description of Artificial Sequence: Synthetic oligonucleotide
uaaggacuacuauauacac

SEQ ID NO: 3252589 - RNA, 19 nt, Artificial Sequence
  Description of Artificial Sequence: Synthetic oligonucleotide
aacgcacgcacacuaaaca

SEQ ID NO: 3252590 - RNA, 19 nt, Artificial Sequence
  Description of Artificial Sequence: Synthetic oligonucleotide
ucauaagugucguuuauua

SEQ ID NO: 3252591 - RNA, 19 nt, Artificial Sequence
  Description of Artificial Sequence: Synthetic oligonucleotide
uggauugagugaaagugga

SEQ ID NO: 3252592 - RNA, 19 nt, Artificial Sequence
  Description of Artificial Sequence: Synthetic oligonucleotide
guguucugcauuuugagca

SEQ ID NO: 3252593 - RNA, 19 nt, Artificial Sequence
  Description of Artificial Sequence: Synthetic oligonucleotide
uuguguucugcauuuugag

SEQ ID NO: 3252594 - RNA, 19 nt, Artificial Sequence
  Description of Artificial Sequence: Synthetic oligonucleotide
uguguucugcauuuugagc

SEQ ID NO: 3252595 - RNA, 19 nt, Artificial Sequence
  Description of Artificial Sequence: Synthetic oligonucleotide
acuggaucacuuaacauag

SEQ ID NO: 3252596 - RNA, 19 nt, Artificial Sequence
  Description of Artificial Sequence: Synthetic oligonucleotide
aaugcugugagcauacaaa

SEQ ID NO: 3252597 - RNA, 19 nt, Artificial Sequence
  Description of Artificial Sequence: Synthetic oligonucleotide
uuuugugcuugaaugugcu

SEQ ID NO: 3252598 - RNA, 19 nt, Artificial Sequence
  Description of Artificial Sequence: Synthetic oligonucleotide
uuagcuccgguguaggccc

SEQ ID NO: 3252599 - RNA, 19 nt, Artificial Sequence
  Description of Artificial Sequence: Synthetic oligonucleotide
cuaacuuugacagagggaa

SEQ ID NO: 3252600 - RNA, 19 nt, Artificial Sequence
  Description of Artificial Sequence: Synthetic oligonucleotide
auuccacuaagcugucagc

SEQ ID NO: 3252601 - RNA, 19 nt, Artificial Sequence
  Description of Artificial Sequence: Synthetic oligonucleotide
aacuccugaccaccacucc

SEQ ID NO: 3252602 - RNA, 19 nt, Artificial Sequence
  Description of Artificial Sequence: Synthetic oligonucleotide
ugaacuuccauugcuuuca

SEQ ID NO: 3252603 - RNA, 19 nt, Artificial Sequence
  Description of Artificial Sequence: Synthetic oligonucleotide
aauaucagaugccuuuaua

SEQ ID NO: 3252604 - RNA, 19 nt, Artificial Sequence
  Description of Artificial Sequence: Synthetic oligonucleotide
gaaaaugaugauacuacca

SEQ ID NO: 3252605 - RNA, 19 nt, Artificial Sequence
  Description of Artificial Sequence: Synthetic oligonucleotide
uuuuauaaacauggguaca

SEQ ID NO: 3252606 - RNA, 19 nt, Artificial Sequence
  Description of Artificial Sequence: Synthetic oligonucleotide
agugaaaguggaucuaagu

SEQ ID NO: 3252607 - RNA, 19 nt, Artificial Sequence
  Description of Artificial Sequence: Synthetic oligonucleotide
uggcaugugcaaaucauac

SEQ ID NO: 3252608 - RNA, 19 nt, Artificial Sequence
  Description of Artificial Sequence: Synthetic oligonucleotide
cauacuccucacuuaacag

SEQ ID NO: 3252609 - RNA, 19 nt, Artificial Sequence
  Description of Artificial Sequence: Synthetic oligonucleotide
uccuauucaaggaccgaag

SEQ ID NO: 3252610 - RNA, 19 nt, Artificial Sequence
  Description of Artificial Sequence: Synthetic oligonucleotide
aauacgcaugcagaauuag

SEQ ID NO: 3252611 - RNA, 19 nt, Artificial Sequence
  Description of Artificial Sequence: Synthetic oligonucleotide
gaaggcuuccuuugagagg

SEQ ID NO: 3252612 - RNA, 19 nt, Artificial Sequence
  Description of Artificial Sequence: Synthetic oligonucleotide
agagauauauaaggacuac

SEQ ID NO: 3252613 - RNA, 19 nt, Artificial Sequence
  Description of Artificial Sequence: Synthetic oligonucleotide
aaguggaucuaaguacagg

SEQ ID NO: 3252614 - RNA, 19 nt, Artificial Sequence
  Description of Artificial Sequence: Synthetic oligonucleotide
uucaugccuauuaauguuc

SEQ ID NO: 3252615 - RNA, 19 nt, Artificial Sequence
  Description of Artificial Sequence: Synthetic oligonucleotide
uagcccacaugccagaaac

SEQ ID NO: 3252616 - RNA, 19 nt, Artificial Sequence
  Description of Artificial Sequence: Synthetic oligonucleotide
uauuaauguucucuuucuc

SEQ ID NO: 3252617 - RNA, 19 nt, Artificial Sequence
  Description of Artificial Sequence: Synthetic oligonucleotide
aauuguauggcuuuaaaga

SEQ ID NO: 3252618 - RNA, 19 nt, Artificial Sequence
  Description of Artificial Sequence: Synthetic oligonucleotide
aaaagggagcuccaaauac

SEQ ID NO: 3252619 - RNA, 19 nt, Artificial Sequence
  Description of Artificial Sequence: Synthetic oligonucleotide
aauaccauacaauuguaug

SEQ ID NO: 3252620 - RNA, 19 nt, Artificial Sequence
  Description of Artificial Sequence: Synthetic oligonucleotide
uaagaaaccauauaucucu

SEQ ID NO: 3252621 - RNA, 19 nt, Artificial Sequence
  Description of Artificial Sequence: Synthetic oligonucleotide
aaccauauaucucugugag

SEQ ID NO: 3252622 - RNA, 19 nt, Artificial Sequence
  Description of Artificial Sequence: Synthetic oligonucleotide
gaagauuucaucgccaugg

SEQ ID NO: 3252623 - RNA, 19 nt, Artificial Sequence
  Description of Artificial Sequence: Synthetic oligonucleotide
uacugagaagauuucaucg

SEQ ID NO: 3252624 - RNA, 19 nt, Artificial Sequence
  Description of Artificial Sequence: Synthetic oligonucleotide
auaccauacaauuguaugg

SEQ ID NO: 3252625 - RNA, 19 nt, Artificial Sequence
  Description of Artificial Sequence: Synthetic oligonucleotide
ucaaacucauacauguagg

SEQ ID NO: 3252626 - RNA, 19 nt, Artificial Sequence
  Description of Artificial Sequence: Synthetic oligonucleotide
uuaaagauaagaaaccaua

SEQ ID NO: 3252627 - RNA, 19 nt, Artificial Sequence
  Description of Artificial Sequence: Synthetic oligonucleotide
uggaagaauccccagaugc

SEQ ID NO: 3252628 - RNA, 19 nt, Artificial Sequence
  Description of Artificial Sequence: Synthetic oligonucleotide
acugagaagauuucaucgc

SEQ ID NO: 3252629 - RNA, 19 nt, Artificial Sequence
  Description of Artificial Sequence: Synthetic oligonucleotide
ucuccuaugaucuccuugg

SEQ ID NO: 3252630 - RNA, 19 nt, Artificial Sequence
  Description of Artificial Sequence: Synthetic oligonucleotide
ucugcaaucaaguccauga

SEQ ID NO: 3252631 - RNA, 19 nt, Artificial Sequence
  Description of Artificial Sequence: Synthetic oligonucleotide
uuucuuuccagccaaacuc

SEQ ID NO: 3252632 - RNA, 19 nt, Artificial Sequence
  Description of Artificial Sequence: Synthetic oligonucleotide
aacaggguuucuuuccagc

SEQ ID NO: 3252633 - RNA, 19 nt, Artificial Sequence
  Description of Artificial Sequence: Synthetic oligonucleotide
acaaguugaagcaacaagg

SEQ ID NO: 3252634 - RNA, 19 nt, Artificial Sequence
  Description of Artificial Sequence: Synthetic oligonucleotide
uacaaguugaagcaacaag

SEQ ID NO: 3252635 - RNA, 19 nt, Artificial Sequence
  Description of Artificial Sequence: Synthetic oligonucleotide
uuuuccaaaacaauguuuu

SEQ ID NO: 3252636 - RNA, 19 nt, Artificial Sequence
  Description of Artificial Sequence: Synthetic oligonucleotide
uacucaaacucauacaugu

SEQ ID NO: 3252637 - RNA, 19 nt, Artificial Sequence
  Description of Artificial Sequence: Synthetic oligonucleotide
uacaaaauaccauacaauu

SEQ ID NO: 3252638 - RNA, 19 nt, Artificial Sequence
  Description of Artificial Sequence: Synthetic oligonucleotide
gauuuucuccuucuguugg

SEQ ID NO: 3252639 - RNA, 19 nt, Artificial Sequence
  Description of Artificial Sequence: Synthetic oligonucleotide
gauaagaaaccauauaucu

SEQ ID NO: 3252640 - RNA, 19 nt, Artificial Sequence
  Description of Artificial Sequence: Synthetic oligonucleotide
ucaaacauagcugaaacuc

SEQ ID NO: 3252641 - RNA, 19 nt, Artificial Sequence
  Description of Artificial Sequence: Synthetic oligonucleotide
ucaugcucgauacaaagcu

SEQ ID NO: 3252642 - RNA, 19 nt, Artificial Sequence
  Description of Artificial Sequence: Synthetic oligonucleotide
aguugaagcaacaaggauc

SEQ ID NO: 3252643 - RNA, 19 nt, Artificial Sequence
  Description of Artificial Sequence: Synthetic oligonucleotide
uuuuacaaaauaccauaca

SEQ ID NO: 3252644 - RNA, 19 nt, Artificial Sequence
  Description of Artificial Sequence: Synthetic oligonucleotide
acaaggauccucuuuaaug

SEQ ID NO: 3252645 - RNA, 19 nt, Artificial Sequence
  Description of Artificial Sequence: Synthetic oligonucleotide
ucgauacaaagcuuggccg

SEQ ID NO: 3252646 - RNA, 19 nt, Artificial Sequence
  Description of Artificial Sequence: Synthetic oligonucleotide
uguauggcuuuaaagauaa

SEQ ID NO: 3252647 - RNA, 19 nt, Artificial Sequence
  Description of Artificial Sequence: Synthetic oligonucleotide
uggcauaccucuuauuugg

SEQ ID NO: 3252648 - RNA, 19 nt, Artificial Sequence
  Description of Artificial Sequence: Synthetic oligonucleotide
caaggauccucuuuaaugc

SEQ ID NO: 3252649 - RNA, 19 nt, Artificial Sequence
  Description of Artificial Sequence: Synthetic oligonucleotide
augaacaggguuucuuucc

SEQ ID NO: 3252650 - RNA, 19 nt, Artificial Sequence
  Description of Artificial Sequence: Synthetic oligonucleotide
gaaaccauauaucucugug

SEQ ID NO: 3252651 - RNA, 19 nt, Artificial Sequence
  Description of Artificial Sequence: Synthetic oligonucleotide
uuuuacaaguugaagcaac

SEQ ID NO: 3252652 - RNA, 19 nt, Artificial Sequence
  Description of Artificial Sequence: Synthetic oligonucleotide
uuuaaagauaagaaaccau

SEQ ID NO: 3252653 - RNA, 19 nt, Artificial Sequence
  Description of Artificial Sequence: Synthetic oligonucleotide
auaccucuuauuuggcucc

SEQ ID NO: 3252654 - RNA, 19 nt, Artificial Sequence
  Description of Artificial Sequence: Synthetic oligonucleotide
auugcgagcaaaguuggcc

SEQ ID NO: 3252655 - RNA, 19 nt, Artificial Sequence
  Description of Artificial Sequence: Synthetic oligonucleotide
ucucaaacauagcugaaac

SEQ ID NO: 3252656 - RNA, 19 nt, Artificial Sequence
  Description of Artificial Sequence: Synthetic oligonucleotide
uaaagauaagaaaccauau

SEQ ID NO: 3252657 - RNA, 19 nt, Artificial Sequence
  Description of Artificial Sequence: Synthetic oligonucleotide
auagcugaaacuccugauc

SEQ ID NO: 3252658 - RNA, 19 nt, Artificial Sequence
  Description of Artificial Sequence: Synthetic oligonucleotide
aaucaaguccaugaacagg

SEQ ID NO: 3252659 - RNA, 19 nt, Artificial Sequence
  Description of Artificial Sequence: Synthetic oligonucleotide
uauggcuuuaaagauaaga

SEQ ID NO: 3252660 - RNA, 19 nt, Artificial Sequence
  Description of Artificial Sequence: Synthetic oligonucleotide
aaaccauauaucucuguga

SEQ ID NO: 3252661 - RNA, 19 nt, Artificial Sequence
  Description of Artificial Sequence: Synthetic oligonucleotide
aucaaguccaugaacaggg

SEQ ID NO: 3252662 - RNA, 19 nt, Artificial Sequence
  Description of Artificial Sequence: Synthetic oligonucleotide
uuacaaaauaccauacaau

SEQ ID NO: 3252663 - RNA, 19 nt, Artificial Sequence
  Description of Artificial Sequence: Synthetic oligonucleotide
uuuccagccaaacucuugc

SEQ ID NO: 3252664 - RNA, 19 nt, Artificial Sequence
  Description of Artificial Sequence: Synthetic oligonucleotide
cucaaacucauacauguag

SEQ ID NO: 3252665 - RNA, 19 nt, Artificial Sequence
  Description of Artificial Sequence: Synthetic oligonucleotide
ucuuauuuggcuccaggcu

SEQ ID NO: 3252666 - RNA, 19 nt, Artificial Sequence
  Description of Artificial Sequence: Synthetic oligonucleotide
guugaagcaacaaggaucc

SEQ ID NO: 3252667 - RNA, 19 nt, Artificial Sequence
  Description of Artificial Sequence: Synthetic oligonucleotide
ugaggcaccaaucuucaug

SEQ ID NO: 3252668 - RNA, 19 nt, Artificial Sequence
  Description of Artificial Sequence: Synthetic oligonucleotide
auacugagaagauuucauc

SEQ ID NO: 3252669 - RNA, 19 nt, Artificial Sequence
  Description of Artificial Sequence: Synthetic oligonucleotide
ugugagauuaucuguggca

SEQ ID NO: 3252670 - RNA, 19 nt, Artificial Sequence
  Description of Artificial Sequence: Synthetic oligonucleotide
caauuguauggcuuuaaag

SEQ ID NO: 3252671 - RNA, 19 nt, Artificial Sequence
  Description of Artificial Sequence: Synthetic oligonucleotide
ucucaugcucgauacaaag

SEQ ID NO: 3252672 - RNA, 19 nt, Artificial Sequence
  Description of Artificial Sequence: Synthetic oligonucleotide
uuuacaaguugaagcaaca

SEQ ID NO: 3252673 - RNA, 19 nt, Artificial Sequence
  Description of Artificial Sequence: Synthetic oligonucleotide
acaggguuucuuuccagcc

SEQ ID NO: 3252674 - RNA, 19 nt, Artificial Sequence
  Description of Artificial Sequence: Synthetic oligonucleotide
auuguauggcuuuaaagau

SEQ ID NO: 3252675 - RNA, 19 nt, Artificial Sequence
  Description of Artificial Sequence: Synthetic oligonucleotide
cucgauacaaagcuuggcc

SEQ ID NO: 3252676 - RNA, 19 nt, Artificial Sequence
  Description of Artificial Sequence: Synthetic oligonucleotide
uagcugaaacuccugauca

SEQ ID NO: 3252677 - RNA, 19 nt, Artificial Sequence
  Description of Artificial Sequence: Synthetic oligonucleotide
caaacauagcugaaacucc

SEQ ID NO: 3252678 - RNA, 19 nt, Artificial Sequence
  Description of Artificial Sequence: Synthetic oligonucleotide
agauaagaaaccauauauc

SEQ ID NO: 3252679 - RNA, 19 nt, Artificial Sequence
  Description of Artificial Sequence: Synthetic oligonucleotide
ucugcugccuccuuggccc

SEQ ID NO: 3252680 - RNA, 19 nt, Artificial Sequence
  Description of Artificial Sequence: Synthetic oligonucleotide
uugaucuccucuucugugg

SEQ ID NO: 3252681 - RNA, 19 nt, Artificial Sequence
  Description of Artificial Sequence: Synthetic oligonucleotide
uguggcauaccucuuauuu

SEQ ID NO: 3252682 - RNA, 19 nt, Artificial Sequence
  Description of Artificial Sequence: Synthetic oligonucleotide
ucugugagauuaucugugg

SEQ ID NO: 3252683 - RNA, 19 nt, Artificial Sequence
  Description of Artificial Sequence: Synthetic oligonucleotide
ucagagcucagcauguucu

SEQ ID NO: 3252684 - RNA, 19 nt, Artificial Sequence
  Description of Artificial Sequence: Synthetic oligonucleotide
aucucugugagauuaucug

SEQ ID NO: 3252685 - RNA, 19 nt, Artificial Sequence
  Description of Artificial Sequence: Synthetic oligonucleotide
uccaggcucucaaacauag

SEQ ID NO: 3252686 - RNA, 19 nt, Artificial Sequence
  Description of Artificial Sequence: Synthetic oligonucleotide
auaagaaaccauauaucuc

SEQ ID NO: 3252687 - RNA, 19 nt, Artificial Sequence
  Description of Artificial Sequence: Synthetic oligonucleotide
uuggccgauacucaaacuc

SEQ ID NO: 3252688 - RNA, 19 nt, Artificial Sequence
  Description of Artificial Sequence: Synthetic oligonucleotide
gauacucaaacucauacau

SEQ ID NO: 3252689 - RNA, 19 nt, Artificial Sequence
  Description of Artificial Sequence: Synthetic oligonucleotide
cuuauuuggcuccaggcuc

SEQ ID NO: 3252690 - RNA, 19 nt, Artificial Sequence
  Description of Artificial Sequence: Synthetic oligonucleotide
uaccauacaauuguauggc

SEQ ID NO: 3252691 - RNA, 19 nt, Artificial Sequence
  Description of Artificial Sequence: Synthetic oligonucleotide
uguggcaccaucuuucaaa

SEQ ID NO: 3252692 - RNA, 19 nt, Artificial Sequence
  Description of Artificial Sequence: Synthetic oligonucleotide
caaaauaccauacaauugu

SEQ ID NO: 3252693 - RNA, 19 nt, Artificial Sequence
  Description of Artificial Sequence: Synthetic oligonucleotide
ggcuuuaaagauaagaaac

SEQ ID NO: 3252694 - RNA, 19 nt, Artificial Sequence
  Description of Artificial Sequence: Synthetic oligonucleotide
ucagcauguucucugugug

SEQ ID NO: 3252695 - RNA, 19 nt, Artificial Sequence
  Description of Artificial Sequence: Synthetic oligonucleotide
ugagaagauuucaucgcca

SEQ ID NO: 3252696 - RNA, 19 nt, Artificial Sequence
  Description of Artificial Sequence: Synthetic oligonucleotide
ugcaaucaaguccaugaac

SEQ ID NO: 3252697 - RNA, 19 nt, Artificial Sequence
  Description of Artificial Sequence: Synthetic oligonucleotide
uaucucugugagauuaucu

SEQ ID NO: 3252698 - RNA, 19 nt, Artificial Sequence
  Description of Artificial Sequence: Synthetic oligonucleotide
auuucaucgccauggucuc

SEQ ID NO: 3252699 - RNA, 19 nt, Artificial Sequence
  Description of Artificial Sequence: Synthetic oligonucleotide
uggacugaggcaccaaucu

SEQ ID NO: 3252700 - RNA, 19 nt, Artificial Sequence
  Description of Artificial Sequence: Synthetic oligonucleotide
aaguugaagcaacaaggau

SEQ ID NO: 3252701 - RNA, 19 nt, Artificial Sequence
  Description of Artificial Sequence: Synthetic oligonucleotide
uccaaaacaauguuuuauu

SEQ ID NO: 3252702 - RNA, 19 nt, Artificial Sequence
  Description of Artificial Sequence: Synthetic oligonucleotide
acaaaauaccauacaauug

SEQ ID NO: 3252703 - RNA, 19 nt, Artificial Sequence
  Description of Artificial Sequence: Synthetic oligonucleotide
cugagaagauuucaucgcc

SEQ ID NO: 3252704 - RNA, 19 nt, Artificial Sequence
  Description of Artificial Sequence: Synthetic oligonucleotide
gaaacuccugaucagagcu

SEQ ID NO: 3252705 - RNA, 19 nt, Artificial Sequence
  Description of Artificial Sequence: Synthetic oligonucleotide
uggucacagagccuggaag

SEQ ID NO: 3252706 - RNA, 19 nt, Artificial Sequence
  Description of Artificial Sequence: Synthetic oligonucleotide
uucuuuccagccaaacucu

SEQ ID NO: 3252707 - RNA, 19 nt, Artificial Sequence
  Description of Artificial Sequence: Synthetic oligonucleotide
ugaacaggguuucuuucca

SEQ ID NO: 3252708 - RNA, 19 nt, Artificial Sequence
  Description of Artificial Sequence: Synthetic oligonucleotide
cauaccucuuauuuggcuc

SEQ ID NO: 3252709 - RNA, 19 nt, Artificial Sequence
  Description of Artificial Sequence: Synthetic oligonucleotide
ugcucgauacaaagcuugg

SEQ ID NO: 3252710 - RNA, 19 nt, Artificial Sequence
  Description of Artificial Sequence: Synthetic oligonucleotide
cucugugagauuaucugug

SEQ ID NO: 3252711 - RNA, 19 nt, Artificial Sequence
  Description of Artificial Sequence: Synthetic oligonucleotide
aaacauagcugaaacuccu

SEQ ID NO: 3252712 - RNA, 19 nt, Artificial Sequence
  Description of Artificial Sequence: Synthetic oligonucleotide
ucucugugagauuaucugu

SEQ ID NO: 3252713 - RNA, 19 nt, Artificial Sequence
  Description of Artificial Sequence: Synthetic oligonucleotide
ugaaacuccugaucagagc

SEQ ID NO: 3252714 - RNA, 19 nt, Artificial Sequence
  Description of Artificial Sequence: Synthetic oligonucleotide
uugcgagcaaaguuggccc

SEQ ID NO: 3252715 - RNA, 19 nt, Artificial Sequence
  Description of Artificial Sequence: Synthetic oligonucleotide
gagauuaucuguggcauac

SEQ ID NO: 3252716 - RNA, 19 nt, Artificial Sequence
  Description of Artificial Sequence: Synthetic oligonucleotide
uuauuuggcuccaggcucu

SEQ ID NO: 3252717 - RNA, 19 nt, Artificial Sequence
  Description of Artificial Sequence: Synthetic oligonucleotide
aagaugacgagguugauca

SEQ ID NO: 3252718 - RNA, 19 nt, Artificial Sequence
  Description of Artificial Sequence: Synthetic oligonucleotide
gaaguaguacaccagcggg

SEQ ID NO: 3252719 - RNA, 19 nt, Artificial Sequence
  Description of Artificial Sequence: Synthetic oligonucleotide
ugaaguaguacaccagcgg

SEQ ID NO: 3252720 - RNA, 19 nt, Artificial Sequence
  Description of Artificial Sequence: Synthetic oligonucleotide
acugguggcauccugcccc

SEQ ID NO: 3252721 - RNA, 19 nt, Artificial Sequence
  Description of Artificial Sequence: Synthetic oligonucleotide
aaggguguuucggaaaccc

SEQ ID NO: 3252722 - RNA, 19 nt, Artificial Sequence
  Description of Artificial Sequence: Synthetic oligonucleotide
uuugggugguuuccgaggg

SEQ ID NO: 3252723 - RNA, 19 nt, Artificial Sequence
  Description of Artificial Sequence: Synthetic oligonucleotide
ucaccaucagcacaccgcg

SEQ ID NO: 3252724 - RNA, 19 nt, Artificial Sequence
  Description of Artificial Sequence: Synthetic oligonucleotide
guuucggaaacccucggcg

SEQ ID NO: 3252725 - RNA, 19 nt, Artificial Sequence
  Description of Artificial Sequence: Synthetic oligonucleotide
gacgagguugaucagcagg

SEQ ID NO: 3252726 - RNA, 19 nt, Artificial Sequence
  Description of Artificial Sequence: Synthetic oligonucleotide
agguugaucagcaggaggc

SEQ ID NO: 3252727 - RNA, 19 nt, Artificial Sequence
  Description of Artificial Sequence: Synthetic oligonucleotide
uuuugggugguuuccgagg

SEQ ID NO: 3252728 - RNA, 19 nt, Artificial Sequence
  Description of Artificial Sequence: Synthetic oligonucleotide
aaacccucggcgcugaagu

SEQ ID NO: 3252729 - RNA, 19 nt, Artificial Sequence
  Description of Artificial Sequence: Synthetic oligonucleotide
cugaaguaguacaccagcg

SEQ ID NO: 3252730 - RNA, 19 nt, Artificial Sequence
  Description of Artificial Sequence: Synthetic oligonucleotide
aucaccaucagcacaccgc

SEQ ID NO: 3252731 - RNA, 19 nt, Artificial Sequence
  Description of Artificial Sequence: Synthetic oligonucleotide
gagguugaucagcaggagg

SEQ ID NO: 3252732 - RNA, 19 nt, Artificial Sequence
  Description of Artificial Sequence: Synthetic oligonucleotide
gguguugccagguuggcgg

SEQ ID NO: 3252733 - RNA, 19 nt, Artificial Sequence
  Description of Artificial Sequence: Synthetic oligonucleotide
uuguagggcacgaagcaga

SEQ ID NO: 3252734 - RNA, 19 nt, Artificial Sequence
  Description of Artificial Sequence: Synthetic oligonucleotide
ucagagggcugaauccugg

SEQ ID NO: 3252735 - RNA, 19 nt, Artificial Sequence
  Description of Artificial Sequence: Synthetic oligonucleotide
gagugcggugcccaggucg

SEQ ID NO: 3252736 - RNA, 19 nt, Artificial Sequence
  Description of Artificial Sequence: Synthetic oligonucleotide
accaucaccaucagcacac

SEQ ID NO: 3252737 - RNA, 19 nt, Artificial Sequence
  Description of Artificial Sequence: Synthetic oligonucleotide
aucagcacaccgcgcaccc

SEQ ID NO: 3252738 - RNA, 19 nt, Artificial Sequence
  Description of Artificial Sequence: Synthetic oligonucleotide
aguaguacaccagcggguc

SEQ ID NO: 3252739 - RNA, 19 nt, Artificial Sequence
  Description of Artificial Sequence: Synthetic oligonucleotide
uacaccagcgggucgagca

SEQ ID NO: 3252740 - RNA, 19 nt, Artificial Sequence
  Description of Artificial Sequence: Synthetic oligonucleotide
uuucggaaacccucggcgc

SEQ ID NO: 3252741 - RNA, 19 nt, Artificial Sequence
  Description of Artificial Sequence: Synthetic oligonucleotide
uguagggcacgaagcagag

SEQ ID NO: 3252742 - RNA, 19 nt, Artificial Sequence
  Description of Artificial Sequence: Synthetic oligonucleotide
gaugacgagguugaucagc

SEQ ID NO: 3252743 - RNA, 19 nt, Artificial Sequence
  Description of Artificial Sequence: Synthetic oligonucleotide
uguuucggaaacccucggc

SEQ ID NO: 3252744 - RNA, 19 nt, Artificial Sequence
  Description of Artificial Sequence: Synthetic oligonucleotide
aggcgcacggucuucugcc

SEQ ID NO: 3252745 - RNA, 19 nt, Artificial Sequence
  Description of Artificial Sequence: Synthetic oligonucleotide
aucagcaggaggcgcacgg

SEQ ID NO: 3252746 - RNA, 19 nt, Artificial Sequence
  Description of Artificial Sequence: Synthetic oligonucleotide
ucggugagcaccccucuag

SEQ ID NO: 3252747 - RNA, 19 nt, Artificial Sequence
  Description of Artificial Sequence: Synthetic oligonucleotide
uugaucagcaggaggcgca

SEQ ID NO: 3252748 - RNA, 19 nt, Artificial Sequence
  Description of Artificial Sequence: Synthetic oligonucleotide
cuggacuccaccaggucgg

SEQ ID NO: 3252749 - RNA, 19 nt, Artificial Sequence
  Description of Artificial Sequence: Synthetic oligonucleotide
aagggccugguauggagug

SEQ ID NO: 3252750 - RNA, 19 nt, Artificial Sequence
  Description of Artificial Sequence: Synthetic oligonucleotide
cucugaguggccucgggcc

SEQ ID NO: 3252751 - RNA, 19 nt, Artificial Sequence
  Description of Artificial Sequence: Synthetic oligonucleotide
ugagcaccccucuagcccc

SEQ ID NO: 3252752 - RNA, 19 nt, Artificial Sequence
  Description of Artificial Sequence: Synthetic oligonucleotide
cacgaagcagagcaggaag

SEQ ID NO: 3252753 - RNA, 19 nt, Artificial Sequence
  Description of Artificial Sequence: Synthetic oligonucleotide
aacccguacacggccagcg

SEQ ID NO: 3252754 - RNA, 19 nt, Artificial Sequence
  Description of Artificial Sequence: Synthetic oligonucleotide
ccauugguagccaagggcc

SEQ ID NO: 3252755 - RNA, 19 nt, Artificial Sequence
  Description of Artificial Sequence: Synthetic oligonucleotide
agagggcugaauccugggg

SEQ ID NO: 3252756 - RNA, 19 nt, Artificial Sequence
  Description of Artificial Sequence: Synthetic oligonucleotide
ucgagcacgcaguuggcgc

SEQ ID NO: 3252757 - RNA, 19 nt, Artificial Sequence
  Description of Artificial Sequence: Synthetic oligonucleotide
gggucgagcacgcaguugg

SEQ ID NO: 3252758 - RNA, 19 nt, Artificial Sequence
  Description of Artificial Sequence: Synthetic oligonucleotide
cugacugguggcauccugc

SEQ ID NO: 3252759 - RNA, 19 nt, Artificial Sequence
  Description of Artificial Sequence: Synthetic oligonucleotide
guuuugggugguuuccgag

SEQ ID NO: 3252760 - RNA, 19 nt, Artificial Sequence
  Description of Artificial Sequence: Synthetic oligonucleotide
gcugaaguaguacaccagc

SEQ ID NO: 3252761 - RNA, 19 nt, Artificial Sequence
  Description of Artificial Sequence: Synthetic oligonucleotide
ucggcgcugaaguaguaca

SEQ ID NO: 3252762 - RNA, 19 nt, Artificial Sequence
  Description of Artificial Sequence: Synthetic oligonucleotide
gagcaggaagaugacgagg

SEQ ID NO: 3252763 - RNA, 19 nt, Artificial Sequence
  Description of Artificial Sequence: Synthetic oligonucleotide
agcagcaccaucaccauca

SEQ ID NO: 3252764 - RNA, 19 nt, Artificial Sequence
  Description of Artificial Sequence: Synthetic oligonucleotide
uucggaaacccucggcgcu

SEQ ID NO: 3252765 - RNA, 19 nt, Artificial Sequence
  Description of Artificial Sequence: Synthetic oligonucleotide
cucgccagcguccagaaga

SEQ ID NO: 3252766 - RNA, 19 nt, Artificial Sequence
  Description of Artificial Sequence: Synthetic oligonucleotide
aaguaguacaccagcgggu

SEQ ID NO: 3252767 - RNA, 19 nt, Artificial Sequence
  Description of Artificial Sequence: Synthetic oligonucleotide
gugagcaccccucuagccc

SEQ ID NO: 3252768 - RNA, 19 nt, Artificial Sequence
  Description of Artificial Sequence: Synthetic oligonucleotide
uguuuugggugguuuccga

SEQ ID NO: 3252769 - RNA, 19 nt, Artificial Sequence
  Description of Artificial Sequence: Synthetic oligonucleotide
ucuagccccauugguagcc

SEQ ID NO: 3252770 - RNA, 19 nt, Artificial Sequence
  Description of Artificial Sequence: Synthetic oligonucleotide
guuggcgccggccagcagc

SEQ ID NO: 3252771 - RNA, 19 nt, Artificial Sequence
  Description of Artificial Sequence: Synthetic oligonucleotide
agggcuggacuccaccagg

SEQ ID NO: 3252772 - RNA, 19 nt, Artificial Sequence
  Description of Artificial Sequence: Synthetic oligonucleotide
ugacugguggcauccugcc

SEQ ID NO: 3252773 - RNA, 19 nt, Artificial Sequence
  Description of Artificial Sequence: Synthetic oligonucleotide
gcuggacuccaccaggucg

SEQ ID NO: 3252774 - RNA, 19 nt, Artificial Sequence
  Description of Artificial Sequence: Synthetic oligonucleotide
gacggguguugccagguug

SEQ ID NO: 3252775 - RNA, 19 nt, Artificial Sequence
  Description of Artificial Sequence: Synthetic oligonucleotide
cucgcagcaacccguacac

SEQ ID NO: 3252776 - RNA, 19 nt, Artificial Sequence
  Description of Artificial Sequence: Synthetic oligonucleotide
caggaagaugacgagguug

SEQ ID NO: 3252777 - RNA, 19 nt, Artificial Sequence
  Description of Artificial Sequence: Synthetic oligonucleotide
agcaggaagaugacgaggu

SEQ ID NO: 3252778 - RNA, 19 nt, Artificial Sequence
  Description of Artificial Sequence: Synthetic oligonucleotide
gaagaugacgagguugauc

SEQ ID NO: 3252779 - RNA, 19 nt, Artificial Sequence
  Description of Artificial Sequence: Synthetic oligonucleotide
uacacggccagcguggcgu

SEQ ID NO: 3252780 - RNA, 19 nt, Artificial Sequence
  Description of Artificial Sequence: Synthetic oligonucleotide
aggaagaugacgagguuga

SEQ ID NO: 3252781 - RNA, 19 nt, Artificial Sequence
  Description of Artificial Sequence: Synthetic oligonucleotide
uagccaagggccugguaug

SEQ ID NO: 3252782 - RNA, 19 nt, Artificial Sequence
  Description of Artificial Sequence: Synthetic oligonucleotide
ucagggcuggacuccacca

SEQ ID NO: 3252783 - RNA, 19 nt, Artificial Sequence
  Description of Artificial Sequence: Synthetic oligonucleotide
cugguauggagugcggugc

SEQ ID NO: 3252784 - RNA, 19 nt, Artificial Sequence
  Description of Artificial Sequence: Synthetic oligonucleotide
guccagaagacgcggcccg

SEQ ID NO: 3252785 - RNA, 19 nt, Artificial Sequence
  Description of Artificial Sequence: Synthetic oligonucleotide
ucugaguggccucgggccu

SEQ ID NO: 3252786 - RNA, 19 nt, Artificial Sequence
  Description of Artificial Sequence: Synthetic oligonucleotide
gaagcagagcaggaagaug

SEQ ID NO: 3252787 - RNA, 19 nt, Artificial Sequence
  Description of Artificial Sequence: Synthetic oligonucleotide
ugguauggagugcggugcc

SEQ ID NO: 3252788 - RNA, 19 nt, Artificial Sequence
  Description of Artificial Sequence: Synthetic oligonucleotide
gguguuucggaaacccucg

SEQ ID NO: 3252789 - RNA, 19 nt, Artificial Sequence
  Description of Artificial Sequence: Synthetic oligonucleotide
caucaccaucagcacaccg

SEQ ID NO: 3252790 - RNA, 19 nt, Artificial Sequence
  Description of Artificial Sequence: Synthetic oligonucleotide
guuguagggcacgaagcag

SEQ ID NO: 3252791 - RNA, 19 nt, Artificial Sequence
  Description of Artificial Sequence: Synthetic oligonucleotide
guaguacaccagcgggucg

SEQ ID NO: 3252792 - RNA, 19 nt, Artificial Sequence
  Description of Artificial Sequence: Synthetic oligonucleotide
uggagugcggugcccaggu

SEQ ID NO: 3252793 - RNA, 19 nt, Artificial Sequence
  Description of Artificial Sequence: Synthetic oligonucleotide
agaagacgcggcccgacga

SEQ ID NO: 3252794 - RNA, 19 nt, Artificial Sequence
  Description of Artificial Sequence: Synthetic oligonucleotide
acugggugacggguguugc

SEQ ID NO: 3252795 - RNA, 19 nt, Artificial Sequence
  Description of Artificial Sequence: Synthetic oligonucleotide
uaguacaccagcgggucga

SEQ ID NO: 3252796 - RNA, 19 nt, Artificial Sequence
  Description of Artificial Sequence: Synthetic oligonucleotide
ugggugguuuccgagggug

SEQ ID NO: 3252797 - RNA, 19 nt, Artificial Sequence
  Description of Artificial Sequence: Synthetic oligonucleotide
uugguagccaagggccugg

SEQ ID NO: 3252798 - RNA, 19 nt, Artificial Sequence
  Description of Artificial Sequence: Synthetic oligonucleotide
uauggagugcggugcccag

SEQ ID NO: 3252799 - RNA, 19 nt, Artificial Sequence
  Description of Artificial Sequence: Synthetic oligonucleotide
acaccagcgggucgagcac

SEQ ID NO: 3252800 - RNA, 19 nt, Artificial Sequence
  Description of Artificial Sequence: Synthetic oligonucleotide
gucgcgaaggguguuucgg

SEQ ID NO: 3252801 - RNA, 19 nt, Artificial Sequence
  Description of Artificial Sequence: Synthetic oligonucleotide
agugcggugcccaggucgc

SEQ ID NO: 3252802 - RNA, 19 nt, Artificial Sequence
  Description of Artificial Sequence: Synthetic oligonucleotide
agcguggcguuguagggca

SEQ ID NO: 3252803 - RNA, 19 nt, Artificial Sequence
  Description of Artificial Sequence: Synthetic oligonucleotide
ugccccgguguuuugggug

SEQ ID NO: 3252804 - RNA, 19 nt, Artificial Sequence
  Description of Artificial Sequence: Synthetic oligonucleotide
ucggcucgcagcaacccgu

SEQ ID NO: 3252805 - RNA, 19 nt, Artificial Sequence
  Description of Artificial Sequence: Synthetic oligonucleotide
ggcguuguagggcacgaag

SEQ ID NO: 3252806 - RNA, 19 nt, Artificial Sequence
  Description of Artificial Sequence: Synthetic oligonucleotide
cacaccgcgcacccggucg

SEQ ID NO: 3252807 - RNA, 19 nt, Artificial Sequence
  Description of Artificial Sequence: Synthetic oligonucleotide
guguuuugggugguuuccg

SEQ ID NO: 3252808 - RNA, 19 nt, Artificial Sequence
  Description of Artificial Sequence: Synthetic oligonucleotide
accaggucggcucgcagca

SEQ ID NO: 3252809 - RNA, 19 nt, Artificial Sequence
  Description of Artificial Sequence: Synthetic oligonucleotide
acgagguugaucagcagga

SEQ ID NO: 3252810 - RNA, 19 nt, Artificial Sequence
  Description of Artificial Sequence: Synthetic oligonucleotide
guugaucagcaggaggcgc

SEQ ID NO: 3252811 - RNA, 19 nt, Artificial Sequence
  Description of Artificial Sequence: Synthetic oligonucleotide
augacgagguugaucagca

SEQ ID NO: 3252812 - RNA, 19 nt, Artificial Sequence
  Description of Artificial Sequence: Synthetic oligonucleotide
uccgagggugguucgguga

SEQ ID NO: 3252813 - RNA, 19 nt, Artificial Sequence
  Description of Artificial Sequence: Synthetic oligonucleotide
cagcacaccgcgcacccgg

SEQ ID NO: 3252814 - RNA, 19 nt, Artificial Sequence
  Description of Artificial Sequence: Synthetic oligonucleotide
guguuucggaaacccucgg

SEQ ID NO: 3252815 - RNA, 19 nt, Artificial Sequence
  Description of Artificial Sequence: Synthetic oligonucleotide
ugggugacggguguugcca

SEQ ID NO: 3252816 - RNA, 19 nt, Artificial Sequence
  Description of Artificial Sequence: Synthetic oligonucleotide
accccucuagccccauugg

SEQ ID NO: 3252817 - RNA, 19 nt, Artificial Sequence
  Description of Artificial Sequence: Synthetic oligonucleotide
gauacugaugcccacagcg

SEQ ID NO: 3252818 - RNA, 19 nt, Artificial Sequence
  Description of Artificial Sequence: Synthetic oligonucleotide
aaggugaccauucccagcc

SEQ ID NO: 3252819 - RNA, 19 nt, Artificial Sequence
  Description of Artificial Sequence: Synthetic oligonucleotide
agaaugucaaagcggaucc

SEQ ID NO: 3252820 - RNA, 19 nt, Artificial Sequence
  Description of Artificial Sequence: Synthetic oligonucleotide
caaugcuugaaauaggugc

SEQ ID NO: 3252821 - RNA, 19 nt, Artificial Sequence
  Description of Artificial Sequence: Synthetic oligonucleotide
aaguugaacuugcugaagg

SEQ ID NO: 3252822 - RNA, 19 nt, Artificial Sequence
  Description of Artificial Sequence: Synthetic oligonucleotide
ugacaagaaugucaaagcg

SEQ ID NO: 3252823 - RNA, 19 nt, Artificial Sequence
  Description of Artificial Sequence: Synthetic oligonucleotide
uacaguagcagcaagucac

SEQ ID NO: 3252824 - RNA, 19 nt, Artificial Sequence
  Description of Artificial Sequence: Synthetic oligonucleotide
aagaaugucaaagcggauc

SEQ ID NO: 3252825 - RNA, 19 nt, Artificial Sequence
  Description of Artificial Sequence: Synthetic oligonucleotide
aacacugggcaguacgggc

SEQ ID NO: 3252826 - RNA, 19 nt, Artificial Sequence
  Description of Artificial Sequence: Synthetic oligonucleotide
guagcagcaagucacagag

SEQ ID NO: 3252827 - RNA, 19 nt, Artificial Sequence
  Description of Artificial Sequence: Synthetic oligonucleotide
aaggcauuggucuuggaga

SEQ ID NO: 3252828 - RNA, 19 nt, Artificial Sequence
  Description of Artificial Sequence: Synthetic oligonucleotide
aagcggaucccauagagcu

SEQ ID NO: 3252829 - RNA, 19 nt, Artificial Sequence
  Description of Artificial Sequence: Synthetic oligonucleotide
ucuauccacauacaguagc

SEQ ID NO: 3252830 - RNA, 19 nt, Artificial Sequence
  Description of Artificial Sequence: Synthetic oligonucleotide
agugacaagaaugucaaag

SEQ ID NO: 3252831 - RNA, 19 nt, Artificial Sequence
  Description of Artificial Sequence: Synthetic oligonucleotide
gagaaguugaacuugcuga

SEQ ID NO: 3252832 - RNA, 19 nt, Artificial Sequence
  Description of Artificial Sequence: Synthetic oligonucleotide
uaaggcauuggucuuggag

SEQ ID NO: 3252833 - RNA, 19 nt, Artificial Sequence
  Description of Artificial Sequence: Synthetic oligonucleotide
ucucuauccacauacagua

SEQ ID NO: 3252834 - RNA, 19 nt, Artificial Sequence
  Description of Artificial Sequence: Synthetic oligonucleotide
uugaaauaggugcuguccc

SEQ ID NO: 3252835 - RNA, 19 nt, Artificial Sequence
  Description of Artificial Sequence: Synthetic oligonucleotide
gacaagaaugucaaagcgg

SEQ ID NO: 3252836 - RNA, 19 nt, Artificial Sequence
  Description of Artificial Sequence: Synthetic oligonucleotide
uggaucauagcgacaaugc

SEQ ID NO: 3252837 - RNA, 19 nt, Artificial Sequence
  Description of Artificial Sequence: Synthetic oligonucleotide
ucccaguggauacugaugc

SEQ ID NO: 3252838 - RNA, 19 nt, Artificial Sequence
  Description of Artificial Sequence: Synthetic oligonucleotide
aaugccagguccucaaagu

SEQ ID NO: 3252839 - RNA, 19 nt, Artificial Sequence
  Description of Artificial Sequence: Synthetic oligonucleotide
cuucccagugacaagaaug

SEQ ID NO: 3252840 - RNA, 19 nt, Artificial Sequence
  Description of Artificial Sequence: Synthetic oligonucleotide
uuggucuuggagaaguuga

SEQ ID NO: 3252841 - RNA, 19 nt, Artificial Sequence
  Description of Artificial Sequence: Synthetic oligonucleotide
augagugcaaauuucccug

SEQ ID NO: 3252842 - RNA, 19 nt, Artificial Sequence
  Description of Artificial Sequence: Synthetic oligonucleotide
uucucuauccacauacagu

SEQ ID NO: 3252843 - RNA, 19 nt, Artificial Sequence
  Description of Artificial Sequence: Synthetic oligonucleotide
agcagcaagucacagagga

SEQ ID NO: 3252844 - RNA, 19 nt, Artificial Sequence
  Description of Artificial Sequence: Synthetic oligonucleotide
gaagcuggcuucucuaucc

SEQ ID NO: 3252845 - RNA, 19 nt, Artificial Sequence
  Description of Artificial Sequence: Synthetic oligonucleotide
ugauuggcuguccugaagu

SEQ ID NO: 3252846 - RNA, 19 nt, Artificial Sequence
  Description of Artificial Sequence: Synthetic oligonucleotide
uagagcuugagcaggcucc

SEQ ID NO: 3252847 - RNA, 19 nt, Artificial Sequence
  Description of Artificial Sequence: Synthetic oligonucleotide
gugacaagaaugucaaagc

SEQ ID NO: 3252848 - RNA, 19 nt, Artificial Sequence
  Description of Artificial Sequence: Synthetic oligonucleotide
aaugcuugaaauaggugcu

SEQ ID NO: 3252849 - RNA, 19 nt, Artificial Sequence
  Description of Artificial Sequence: Synthetic oligonucleotide
aaauaggugcugucccagg

SEQ ID NO: 3252850 - RNA, 19 nt, Artificial Sequence
  Description of Artificial Sequence: Synthetic oligonucleotide
aaagcggaucccauagagc

SEQ ID NO: 3252851 - RNA, 19 nt, Artificial Sequence
  Description of Artificial Sequence: Synthetic oligonucleotide
cuugaaauaggugcugucc

SEQ ID NO: 3252852 - RNA, 19 nt, Artificial Sequence
  Description of Artificial Sequence: Synthetic oligonucleotide
aaugcggaacacugggcag

SEQ ID NO: 3252853 - RNA, 19 nt, Artificial Sequence
  Description of Artificial Sequence: Synthetic oligonucleotide
cucaaaguccccaccagcc

SEQ ID NO: 3252854 - RNA, 19 nt, Artificial Sequence
  Description of Artificial Sequence: Synthetic oligonucleotide
uuggagaaguugaacuugc

SEQ ID NO: 3252855 - RNA, 19 nt, Artificial Sequence
  Description of Artificial Sequence: Synthetic oligonucleotide
cacaagguccccaaugcgg

SEQ ID NO: 3252856 - RNA, 19 nt, Artificial Sequence
  Description of Artificial Sequence: Synthetic oligonucleotide
aauaggugcugucccaggu

SEQ ID NO: 3252857 - RNA, 19 nt, Artificial Sequence
  Description of Artificial Sequence: Synthetic oligonucleotide
gaucccauagagcuugagc

SEQ ID NO: 3252858 - RNA, 19 nt, Artificial Sequence
  Description of Artificial Sequence: Synthetic oligonucleotide
aauuucccugccuucccag

SEQ ID NO: 3252859 - RNA, 19 nt, Artificial Sequence
  Description of Artificial Sequence: Synthetic oligonucleotide
uucccagugacaagaaugu

SEQ ID NO: 3252860 - RNA, 19 nt, Artificial Sequence
  Description of Artificial Sequence: Synthetic oligonucleotide
ugucccaggugucuaaggc

SEQ ID NO: 3252861 - RNA, 19 nt, Artificial Sequence
  Description of Artificial Sequence: Synthetic oligonucleotide
acaagaaugucaaagcgga

SEQ ID NO: 3252862 - RNA, 19 nt, Artificial Sequence
  Description of Artificial Sequence: Synthetic oligonucleotide
aucauagcgacaaugcuug

SEQ ID NO: 3252863 - RNA, 19 nt, Artificial Sequence
  Description of Artificial Sequence: Synthetic oligonucleotide
auagagcuugagcaggcuc

SEQ ID NO: 3252864 - RNA, 19 nt, Artificial Sequence
  Description of Artificial Sequence: Synthetic oligonucleotide
uuggcuguccugaaguugu

SEQ ID NO: 3252865 - RNA, 19 nt, Artificial Sequence
  Description of Artificial Sequence: Synthetic oligonucleotide
uggauacugaugcccacag

SEQ ID NO: 3252866 - RNA, 19 nt, Artificial Sequence
  Description of Artificial Sequence: Synthetic oligonucleotide
caaagcggaucccauagag

SEQ ID NO: 3252867 - RNA, 19 nt, Artificial Sequence
  Description of Artificial Sequence: Synthetic oligonucleotide
uacugaugcccacagcgcc

SEQ ID NO: 3252868 - RNA, 19 nt, Artificial Sequence
  Description of Artificial Sequence: Synthetic oligonucleotide
cuucucuauccacauacag

SEQ ID NO: 3252869 - RNA, 19 nt, Artificial Sequence
  Description of Artificial Sequence: Synthetic oligonucleotide
uccccaaugcggaacacug

SEQ ID NO: 3252870 - RNA, 19 nt, Artificial Sequence
  Description of Artificial Sequence: Synthetic oligonucleotide
ucacagaggaaggugacca

SEQ ID NO: 3252871 - RNA, 19 nt, Artificial Sequence
  Description of Artificial Sequence: Synthetic oligonucleotide
aaucccaguggauacugau

SEQ ID NO: 3252872 - RNA, 19 nt, Artificial Sequence
  Description of Artificial Sequence: Synthetic oligonucleotide
ugaaauaggugcuguccca

SEQ ID NO: 3252873 - RNA, 19 nt, Artificial Sequence
  Description of Artificial Sequence: Synthetic oligonucleotide
uccaguagaagcuggcuuc

SEQ ID NO: 3252874 - RNA, 19 nt, Artificial Sequence
  Description of Artificial Sequence: Synthetic oligonucleotide
auagcgacaaugcuugaaa

SEQ ID NO: 3252875 - RNA, 19 nt, Artificial Sequence
  Description of Artificial Sequence: Synthetic oligonucleotide
acaccugaggguucccacc

SEQ ID NO: 3252876 - RNA, 19 nt, Artificial Sequence
  Description of Artificial Sequence: Synthetic oligonucleotide
aaauuucccugccuuccca

SEQ ID NO: 3252877 - RNA, 19 nt, Artificial Sequence
  Description of Artificial Sequence: Synthetic oligonucleotide
cuguccugaaguuguaccc

SEQ ID NO: 3252878 - RNA, 19 nt, Artificial Sequence
  Description of Artificial Sequence: Synthetic oligonucleotide
cagcaagucacagaggaag

SEQ ID NO: 3252879 - RNA, 19 nt, Artificial Sequence
  Description of Artificial Sequence: Synthetic oligonucleotide
agaaguugaacuugcugaa

SEQ ID NO: 3252880 - RNA, 19 nt, Artificial Sequence
  Description of Artificial Sequence: Synthetic oligonucleotide
agcgccacccagcaaugcc

SEQ ID NO: 3252881 - RNA, 19 nt, Artificial Sequence
  Description of Artificial Sequence: Synthetic oligonucleotide
agccauggccacaaggucc

SEQ ID NO: 3252882 - RNA, 19 nt, Artificial Sequence
  Description of Artificial Sequence: Synthetic oligonucleotide
ucuaaggcauuggucuugg

SEQ ID NO: 3252883 - RNA, 19 nt, Artificial Sequence
  Description of Artificial Sequence: Synthetic oligonucleotide
agaagcuggcuucucuauc

SEQ ID NO: 3252884 - RNA, 19 nt, Artificial Sequence
  Description of Artificial Sequence: Synthetic oligonucleotide
gaaauaggugcugucccag

SEQ ID NO: 3252885 - RNA, 19 nt, Artificial Sequence
  Description of Artificial Sequence: Synthetic oligonucleotide
gaguguggaucauagcgac

SEQ ID NO: 3252886 - RNA, 19 nt, Artificial Sequence
  Description of Artificial Sequence: Synthetic oligonucleotide
aguugaacuugcugaaggu

SEQ ID NO: 3252887 - RNA, 19 nt, Artificial Sequence
  Description of Artificial Sequence: Synthetic oligonucleotide
ugagugcaaauuucccugc

SEQ ID NO: 3252888 - RNA, 19 nt, Artificial Sequence
  Description of Artificial Sequence: Synthetic oligonucleotide
aguagaagcuggcuucucu

SEQ ID NO: 3252889 - RNA, 19 nt, Artificial Sequence
  Description of Artificial Sequence: Synthetic oligonucleotide
augccagguccucaaaguc

SEQ ID NO: 3252890 - RNA, 19 nt, Artificial Sequence
  Description of Artificial Sequence: Synthetic oligonucleotide
gaggaaggugaccauuccc

SEQ ID NO: 3252891 - RNA, 19 nt, Artificial Sequence
  Description of Artificial Sequence: Synthetic oligonucleotide
ucaaaguccccaccagcca

SEQ ID NO: 3252892 - RNA, 19 nt, Artificial Sequence
  Description of Artificial Sequence: Synthetic oligonucleotide
ugcuccugugcccagugug

SEQ ID NO: 3252893 - RNA, 19 nt, Artificial Sequence
  Description of Artificial Sequence: Synthetic oligonucleotide
acccagcaaugccaggucc

SEQ ID NO: 3252894 - RNA, 19 nt, Artificial Sequence
  Description of Artificial Sequence: Synthetic oligonucleotide
aguggauacugaugcccac

SEQ ID NO: 3252895 - RNA, 19 nt, Artificial Sequence
  Description of Artificial Sequence: Synthetic oligonucleotide
agccaagcugcuccugugc

SEQ ID NO: 3252896 - RNA, 19 nt, Artificial Sequence
  Description of Artificial Sequence: Synthetic oligonucleotide
aagucacagaggaagguga

SEQ ID NO: 3252897 - RNA, 19 nt, Artificial Sequence
  Description of Artificial Sequence: Synthetic oligonucleotide
gaugagugcaaauuucccu

SEQ ID NO: 3252898 - RNA, 19 nt, Artificial Sequence
  Description of Artificial Sequence: Synthetic oligonucleotide
gugucuaaggcauuggucu

SEQ ID NO: 3252899 - RNA, 19 nt, Artificial Sequence
  Description of Artificial Sequence: Synthetic oligonucleotide
gaaggugaccauucccagc

SEQ ID NO: 3252900 - RNA, 19 nt, Artificial Sequence
  Description of Artificial Sequence: Synthetic oligonucleotide
uagggaugagugcaaauuu

SEQ ID NO: 3252901 - RNA, 19 nt, Artificial Sequence
  Description of Artificial Sequence: Synthetic oligonucleotide
gcgacaaugcuugaaauag

SEQ ID NO: 3252902 - RNA, 19 nt, Artificial Sequence
  Description of Artificial Sequence: Synthetic oligonucleotide
auacugaugcccacagcgc

SEQ ID NO: 3252903 - RNA, 19 nt, Artificial Sequence
  Description of Artificial Sequence: Synthetic oligonucleotide
aguagcagcaagucacaga

SEQ ID NO: 3252904 - RNA, 19 nt, Artificial Sequence
  Description of Artificial Sequence: Synthetic oligonucleotide
cauacaguagcagcaaguc

SEQ ID NO: 3252905 - RNA, 19 nt, Artificial Sequence
  Description of Artificial Sequence: Synthetic oligonucleotide
accagccauggccacaagg

SEQ ID NO: 3252906 - RNA, 19 nt, Artificial Sequence
  Description of Artificial Sequence: Synthetic oligonucleotide
cuuggagaaguugaacuug

SEQ ID NO: 3252907 - RNA, 19 nt, Artificial Sequence
  Description of Artificial Sequence: Synthetic oligonucleotide
auacaguagcagcaaguca

SEQ ID NO: 3252908 - RNA, 19 nt, Artificial Sequence
  Description of Artificial Sequence: Synthetic oligonucleotide
aagguccccaaugcggaac

SEQ ID NO: 3252909 - RNA, 19 nt, Artificial Sequence
  Description of Artificial Sequence: Synthetic oligonucleotide
cuugcugaaggugacggug

SEQ ID NO: 3252910 - RNA, 19 nt, Artificial Sequence
  Description of Artificial Sequence: Synthetic oligonucleotide
ggcuucucuauccacauac

SEQ ID NO: 3252911 - RNA, 19 nt, Artificial Sequence
  Description of Artificial Sequence: Synthetic oligonucleotide
uuucccugccuucccagug

SEQ ID NO: 3252912 - RNA, 19 nt, Artificial Sequence
  Description of Artificial Sequence: Synthetic oligonucleotide
guucccaccagugauuggc

SEQ ID NO: 3252913 - RNA, 19 nt, Artificial Sequence
  Description of Artificial Sequence: Synthetic oligonucleotide
agucagggccccuggaguc

SEQ ID NO: 3252914 - RNA, 19 nt, Artificial Sequence
  Description of Artificial Sequence: Synthetic oligonucleotide
ugcagcuggaaggaguacc

SEQ ID NO: 3252915 - RNA, 19 nt, Artificial Sequence
  Description of Artificial Sequence: Synthetic oligonucleotide
uguccugaaguuguacccc

SEQ ID NO: 3252916 - RNA, 19 nt, Artificial Sequence
  Description of Artificial Sequence: Synthetic oligonucleotide
gaaguugaacuugcugaag

SEQ ID NO: 3252917 - RNA, 19 nt, Artificial Sequence
  Description of Artificial Sequence: Synthetic oligonucleotide
aaaguuauugucaauguuc

SEQ ID NO: 3252918 - RNA, 19 nt, Artificial Sequence
  Description of Artificial Sequence: Synthetic oligonucleotide
aguguggucaccuuggccc

SEQ ID NO: 3252919 - RNA, 19 nt, Artificial Sequence
  Description of Artificial Sequence: Synthetic oligonucleotide
aaguuauugucaauguucc

SEQ ID NO: 3252920 - RNA, 19 nt, Artificial Sequence
  Description of Artificial Sequence: Synthetic oligonucleotide
ucaaaagggagacagaauc

SEQ ID NO: 3252921 - RNA, 19 nt, Artificial Sequence
  Description of Artificial Sequence: Synthetic oligonucleotide
aaaagggagacagaaucgc

SEQ ID NO: 3252922 - RNA, 19 nt, Artificial Sequence
  Description of Artificial Sequence: Synthetic oligonucleotide
aacuccacccucaugaugc

SEQ ID NO: 3252923 - RNA, 19 nt, Artificial Sequence
  Description of Artificial Sequence: Synthetic oligonucleotide
aggaaguagaacuccaccc

SEQ ID NO: 3252924 - RNA, 19 nt, Artificial Sequence
  Description of Artificial Sequence: Synthetic oligonucleotide
uagaacuccacccucauga

SEQ ID NO: 3252925 - RNA, 19 nt, Artificial Sequence
  Description of Artificial Sequence: Synthetic oligonucleotide
uugucaauguuccagacgu

SEQ ID NO: 3252926 - RNA, 19 nt, Artificial Sequence
  Description of Artificial Sequence: Synthetic oligonucleotide
ucaaaaguuauugucaaug

SEQ ID NO: 3252927 - RNA, 19 nt, Artificial Sequence
  Description of Artificial Sequence: Synthetic oligonucleotide
accugcaccacucaaaagg

SEQ ID NO: 3252928 - RNA, 19 nt, Artificial Sequence
  Description of Artificial Sequence: Synthetic oligonucleotide
aagaugauccagcagggca

SEQ ID NO: 3252929 - RNA, 19 nt, Artificial Sequence
  Description of Artificial Sequence: Synthetic oligonucleotide
uguacaugcgcaucagacg

SEQ ID NO: 3252930 - RNA, 19 nt, Artificial Sequence
  Description of Artificial Sequence: Synthetic oligonucleotide
ugggacaggaaguagaacu

SEQ ID NO: 3252931 - RNA, 19 nt, Artificial Sequence
  Description of Artificial Sequence: Synthetic oligonucleotide
guuauugucaauguuccag

SEQ ID NO: 3252932 - RNA, 19 nt, Artificial Sequence
  Description of Artificial Sequence: Synthetic oligonucleotide
agcagugccaacuggcgcc

SEQ ID NO: 3252933 - RNA, 19 nt, Artificial Sequence
  Description of Artificial Sequence: Synthetic oligonucleotide
ugcaccacucaaaagggag

SEQ ID NO: 3252934 - RNA, 19 nt, Artificial Sequence
  Description of Artificial Sequence: Synthetic oligonucleotide
agccucaaaaguuauuguc

SEQ ID NO: 3252935 - RNA, 19 nt, Artificial Sequence
  Description of Artificial Sequence: Synthetic oligonucleotide
auugucaauguuccagacg

SEQ ID NO: 3252936 - RNA, 19 nt, Artificial Sequence
  Description of Artificial Sequence: Synthetic oligonucleotide
uuguacaugcgcaucagac

SEQ ID NO: 3252937 - RNA, 19 nt, Artificial Sequence
  Description of Artificial Sequence: Synthetic oligonucleotide
aaguguggucaccuuggcc

SEQ ID NO: 3252938 - RNA, 19 nt, Artificial Sequence
  Description of Artificial Sequence: Synthetic oligonucleotide
aaaguguggucaccuuggc

SEQ ID NO: 3252939 - RNA, 19 nt, Artificial Sequence
  Description of Artificial Sequence: Synthetic oligonucleotide
caaaagggagacagaaucg

SEQ ID NO: 3252940 - RNA, 19 nt, Artificial Sequence
  Description of Artificial Sequence: Synthetic oligonucleotide
augcgcacguuguacaugc

SEQ ID NO: 3252941 - RNA, 19 nt, Artificial Sequence
  Description of Artificial Sequence: Synthetic oligonucleotide
aaaaguuauugucaauguu

SEQ ID NO: 3252942 - RNA, 19 nt, Artificial Sequence
  Description of Artificial Sequence: Synthetic oligonucleotide
guacaugcgcaucagacgc

SEQ ID NO: 3252943 - RNA, 19 nt, Artificial Sequence
  Description of Artificial Sequence: Synthetic oligonucleotide
gucaccuuggcccaggaag

SEQ ID NO: 3252944 - RNA, 19 nt, Artificial Sequence
  Description of Artificial Sequence: Synthetic oligonucleotide
uuauugucaauguuccaga

SEQ ID NO: 3252945 - RNA, 19 nt, Artificial Sequence
  Description of Artificial Sequence: Synthetic oligonucleotide
caaaguguggucaccuugg

SEQ ID NO: 3252946 - RNA, 19 nt, Artificial Sequence
  Description of Artificial Sequence: Synthetic oligonucleotide
gaagauguggcggaauggg

SEQ ID NO: 3252947 - RNA, 19 nt, Artificial Sequence
  Description of Artificial Sequence: Synthetic oligonucleotide
acgcucaucgcucugcucg

SEQ ID NO: 3252948 - RNA, 19 nt, Artificial Sequence
  Description of Artificial Sequence: Synthetic oligonucleotide
ugagcagugccaacuggcg

SEQ ID NO: 3252949 - RNA, 19 nt, Artificial Sequence
  Description of Artificial Sequence: Synthetic oligonucleotide
ucagguggggcuuggagcc

SEQ ID NO: 3252950 - RNA, 19 nt, Artificial Sequence
  Description of Artificial Sequence: Synthetic oligonucleotide
ucgcguggggcucaggugg

SEQ ID NO: 3252951 - RNA, 19 nt, Artificial Sequence
  Description of Artificial Sequence: Synthetic oligonucleotide
uaaaucuccuuccgcaacu

SEQ ID NO: 3252952 - RNA, 19 nt, Artificial Sequence
  Description of Artificial Sequence: Synthetic oligonucleotide
accuccuuucaccugcacc

SEQ ID NO: 3252953 - RNA, 19 nt, Artificial Sequence
  Description of Artificial Sequence: Synthetic oligonucleotide
gucaauguuccagacgucg

SEQ ID NO: 3252954 - RNA, 19 nt, Artificial Sequence
  Description of Artificial Sequence: Synthetic oligonucleotide
cagcauccgaagaugaucc

SEQ ID NO: 3252955 - RNA, 19 nt, Artificial Sequence
  Description of Artificial Sequence: Synthetic oligonucleotide
aagcggcucuccuggaagc

SEQ ID NO: 3252956 - RNA, 19 nt, Artificial Sequence
  Description of Artificial Sequence: Synthetic oligonucleotide
aaagggagacagaaucgcg

SEQ ID NO: 3252957 - RNA, 19 nt, Artificial Sequence
  Description of Artificial Sequence: Synthetic oligonucleotide
ucaauguuccagacgucgc

SEQ ID NO: 3252958 - RNA, 19 nt, Artificial Sequence
  Description of Artificial Sequence: Synthetic oligonucleotide
cuccuggaagcccagagcc

SEQ ID NO: 3252959 - RNA, 19 nt, Artificial Sequence
  Description of Artificial Sequence: Synthetic oligonucleotide
ccgaagaugauccagcagg

SEQ ID NO: 3252960 - RNA, 19 nt, Artificial Sequence
  Description of Artificial Sequence: Synthetic oligonucleotide
agcuguaaaucuccuuccg

SEQ ID NO: 3252961 - RNA, 19 nt, Artificial Sequence
  Description of Artificial Sequence: Synthetic oligonucleotide
uacugggacaggaaguaga

SEQ ID NO: 3252962 - RNA, 19 nt, Artificial Sequence
  Description of Artificial Sequence: Synthetic oligonucleotide
aaucgcguggggcucaggu

SEQ ID NO: 3252963 - RNA, 19 nt, Artificial Sequence
  Description of Artificial Sequence: Synthetic oligonucleotide
gauguggcggaauggggag

SEQ ID NO: 3252964 - RNA, 19 nt, Artificial Sequence
  Description of Artificial Sequence: Synthetic oligonucleotide
cauccgaagaugauccagc

SEQ ID NO: 3252965 - RNA, 19 nt, Artificial Sequence
  Description of Artificial Sequence: Synthetic oligonucleotide
uccagcagggcacccaaag

SEQ ID NO: 3252966 - RNA, 19 nt, Artificial Sequence
  Description of Artificial Sequence: Synthetic oligonucleotide
aaucuccuuccgcaacuuc

SEQ ID NO: 3252967 - RNA, 19 nt, Artificial Sequence
  Description of Artificial Sequence: Synthetic oligonucleotide
cacauacugggacaggaag

SEQ ID NO: 3252968 - RNA, 19 nt, Artificial Sequence
  Description of Artificial Sequence: Synthetic oligonucleotide
agaugauccagcagggcac

SEQ ID NO: 3252969 - RNA, 19 nt, Artificial Sequence
  Description of Artificial Sequence: Synthetic oligonucleotide
uguaaaucuccuuccgcaa

SEQ ID NO: 3252970 - RNA, 19 nt, Artificial Sequence
  Description of Artificial Sequence: Synthetic oligonucleotide
cagacgucgccacucagcg

SEQ ID NO: 3252971 - RNA, 19 nt, Artificial Sequence
  Description of Artificial Sequence: Synthetic oligonucleotide
gacgucgccacucagcgca

SEQ ID NO: 3252972 - RNA, 19 nt, Artificial Sequence
  Description of Artificial Sequence: Synthetic oligonucleotide
uauugucaauguuccagac

SEQ ID NO: 3252973 - RNA, 19 nt, Artificial Sequence
  Description of Artificial Sequence: Synthetic oligonucleotide
agagccaucggagcgcagc

SEQ ID NO: 3252974 - RNA, 19 nt, Artificial Sequence
  Description of Artificial Sequence: Synthetic oligonucleotide
gagcuguaaaucuccuucc

SEQ ID NO: 3252975 - RNA, 19 nt, Artificial Sequence
  Description of Artificial Sequence: Synthetic oligonucleotide
agacagaaucgcguggggc

SEQ ID NO: 3252976 - RNA, 19 nt, Artificial Sequence
  Description of Artificial Sequence: Synthetic oligonucleotide
caggaaguagaacuccacc

SEQ ID NO: 3252977 - RNA, 19 nt, Artificial Sequence
  Description of Artificial Sequence: Synthetic oligonucleotide
cucagguggggcuuggagc

SEQ ID NO: 3252978 - RNA, 19 nt, Artificial Sequence
  Description of Artificial Sequence: Synthetic oligonucleotide
uccacccucaugaugcgca

SEQ ID NO: 3252979 - RNA, 19 nt, Artificial Sequence
  Description of Artificial Sequence: Synthetic oligonucleotide
cucggagcuguaaaucucc

SEQ ID NO: 3252980 - RNA, 19 nt, Artificial Sequence
  Description of Artificial Sequence: Synthetic oligonucleotide
gaagcggcucuccuggaag

SEQ ID NO: 3252981 - RNA, 19 nt, Artificial Sequence
  Description of Artificial Sequence: Synthetic oligonucleotide
aggaagauguggcggaaug

SEQ ID NO: 3252982 - RNA, 19 nt, Artificial Sequence
  Description of Artificial Sequence: Synthetic oligonucleotide
ucaccugcaccacucaaaa

SEQ ID NO: 3252983 - RNA, 19 nt, Artificial Sequence
  Description of Artificial Sequence: Synthetic oligonucleotide
cuguaaaucuccuuccgca

SEQ ID NO: 3252984 - RNA, 19 nt, Artificial Sequence
  Description of Artificial Sequence: Synthetic oligonucleotide
uccuuccgcaacuucuccg

SEQ ID NO: 3252985 - RNA, 19 nt, Artificial Sequence
  Description of Artificial Sequence: Synthetic oligonucleotide
ucaccuuggcccaggaaga

SEQ ID NO: 3252986 - RNA, 19 nt, Artificial Sequence
  Description of Artificial Sequence: Synthetic oligonucleotide
aagauguggcggaaugggg

SEQ ID NO: 3252987 - RNA, 19 nt, Artificial Sequence
  Description of Artificial Sequence: Synthetic oligonucleotide
ucuccuggaagcccagagc

SEQ ID NO: 3252988 - RNA, 19 nt, Artificial Sequence
  Description of Artificial Sequence: Synthetic oligonucleotide
gaaguagaacuccacccuc

SEQ ID NO: 3252989 - RNA, 19 nt, Artificial Sequence
  Description of Artificial Sequence: Synthetic oligonucleotide
uccgaagaugauccagcag

SEQ ID NO: 3252990 - RNA, 19 nt, Artificial Sequence
  Description of Artificial Sequence: Synthetic oligonucleotide
caauguuccagacgucgcc

SEQ ID NO: 3252991 - RNA, 19 nt, Artificial Sequence
  Description of Artificial Sequence: Synthetic oligonucleotide
aauguuccagacgucgcca

SEQ ID NO: 3252992 - RNA, 19 nt, Artificial Sequence
  Description of Artificial Sequence: Synthetic oligonucleotide
uggcccaggaagauguggc

SEQ ID NO: 3252993 - RNA, 19 nt, Artificial Sequence
  Description of Artificial Sequence: Synthetic oligonucleotide
ugcucggagcuguaaaucu

SEQ ID NO: 3252994 - RNA, 19 nt, Artificial Sequence
  Description of Artificial Sequence: Synthetic oligonucleotide
acucaaaagggagacagaa

SEQ ID NO: 3252995 - RNA, 19 nt, Artificial Sequence
  Description of Artificial Sequence: Synthetic oligonucleotide
ggagcuguaaaucuccuuc

SEQ ID NO: 3252996 - RNA, 19 nt, Artificial Sequence
  Description of Artificial Sequence: Synthetic oligonucleotide
uucuccgccgcccggaugu

SEQ ID NO: 3252997 - RNA, 19 nt, Artificial Sequence
  Description of Artificial Sequence: Synthetic oligonucleotide
uccaccgugagcagugcca

SEQ ID NO: 3252998 - RNA, 19 nt, Artificial Sequence
  Description of Artificial Sequence: Synthetic oligonucleotide
uggaagcccagagccaucg

SEQ ID NO: 3252999 - RNA, 19 nt, Artificial Sequence
  Description of Artificial Sequence: Synthetic oligonucleotide
agcccagagccaucggagc

SEQ ID NO: 3253000 - RNA, 19 nt, Artificial Sequence
  Description of Artificial Sequence: Synthetic oligonucleotide
aagggagacagaaucgcgu

SEQ ID NO: 3253001 - RNA, 19 nt, Artificial Sequence
  Description of Artificial Sequence: Synthetic oligonucleotide
uucaccugcaccacucaaa

SEQ ID NO: 3253002 - RNA, 19 nt, Artificial Sequence
  Description of Artificial Sequence: Synthetic oligonucleotide
agggagacagaaucgcgug

SEQ ID NO: 3253003 - RNA, 19 nt, Artificial Sequence
  Description of Artificial Sequence: Synthetic oligonucleotide
uuccgcaacuucuccgccg

SEQ ID NO: 3253004 - RNA, 19 nt, Artificial Sequence
  Description of Artificial Sequence: Synthetic oligonucleotide
guaaaucuccuuccgcaac

SEQ ID NO: 3253005 - RNA, 19 nt, Artificial Sequence
  Description of Artificial Sequence: Synthetic oligonucleotide
ggagccucaaaaguuauug

SEQ ID NO: 3253006 - RNA, 19 nt, Artificial Sequence
  Description of Artificial Sequence: Synthetic oligonucleotide
ugcaguguccaccgugagc

SEQ ID NO: 3253007 - RNA, 19 nt, Artificial Sequence
  Description of Artificial Sequence: Synthetic oligonucleotide
cagcagggcacccaaagug

SEQ ID NO: 3253008 - RNA, 19 nt, Artificial Sequence
  Description of Artificial Sequence: Synthetic oligonucleotide
uccgcaacuucuccgccgc

SEQ ID NO: 3253009 - RNA, 19 nt, Artificial Sequence
  Description of Artificial Sequence: Synthetic oligonucleotide
gagacagaaucgcgugggg

SEQ ID NO: 3253010 - RNA, 19 nt, Artificial Sequence
  Description of Artificial Sequence: Synthetic oligonucleotide
aagcccagagccaucggag

SEQ ID NO: 3253011 - RNA, 19 nt, Artificial Sequence
  Description of Artificial Sequence: Synthetic oligonucleotide
auguuccagacgucgccac

SEQ ID NO: 3253012 - RNA, 19 nt, Artificial Sequence
  Description of Artificial Sequence: Synthetic oligonucleotide
augaugcgcacguuguaca

SEQ ID NO: 3253013 - RNA, 19 nt, Artificial Sequence
  Description of Artificial Sequence: Synthetic oligonucleotide
acguuguacaugcgcauca

SEQ ID NO: 3253014 - RNA, 19 nt, Artificial Sequence
  Description of Artificial Sequence: Synthetic oligonucleotide
acaggaaguagaacuccac

SEQ ID NO: 3253015 - RNA, 19 nt, Artificial Sequence
  Description of Artificial Sequence: Synthetic oligonucleotide
gacacauacugggacagga

SEQ ID NO: 3253016 - RNA, 19 nt, Artificial Sequence
  Description of Artificial Sequence: Synthetic oligonucleotide
aguuauugucaauguucca

SEQ ID NO: 3253017 - RNA, 19 nt, Artificial Sequence
  Description of Artificial Sequence: Synthetic oligonucleotide
uuuaaugugagccugggag

SEQ ID NO: 3253018 - RNA, 19 nt, Artificial Sequence
  Description of Artificial Sequence: Synthetic oligonucleotide
auuacaauauuauuaaguc

SEQ ID NO: 3253019 - RNA, 19 nt, Artificial Sequence
  Description of Artificial Sequence: Synthetic oligonucleotide
aaccaauacaaagagaacc

SEQ ID NO: 3253020 - RNA, 19 nt, Artificial Sequence
  Description of Artificial Sequence: Synthetic oligonucleotide
uuuaaaacaguacucaaac

SEQ ID NO: 3253021 - RNA, 19 nt, Artificial Sequence
  Description of Artificial Sequence: Synthetic oligonucleotide
uauuguuuaaaacaguacu

SEQ ID NO: 3253022 - RNA, 19 nt, Artificial Sequence
  Description of Artificial Sequence: Synthetic oligonucleotide
uuaaaauauuacauuauca

SEQ ID NO: 3253023 - RNA, 19 nt, Artificial Sequence
  Description of Artificial Sequence: Synthetic oligonucleotide
auuuaaaucauauuguuaa

SEQ ID NO: 3253024 - RNA, 19 nt, Artificial Sequence
  Description of Artificial Sequence: Synthetic oligonucleotide
aaauuagugaaucccagug

SEQ ID NO: 3253025 - RNA, 19 nt, Artificial Sequence
  Description of Artificial Sequence: Synthetic oligonucleotide
ucuguaauauauuaaaccu

SEQ ID NO: 3253026 - RNA, 19 nt, Artificial Sequence
  Description of Artificial Sequence: Synthetic oligonucleotide
uacaauauuauuaagucau

SEQ ID NO: 3253027 - RNA, 19 nt, Artificial Sequence
  Description of Artificial Sequence: Synthetic oligonucleotide
uaaaguaucacuagaagaa

SEQ ID NO: 3253028 - RNA, 19 nt, Artificial Sequence
  Description of Artificial Sequence: Synthetic oligonucleotide
uaguuuauuguuuaaaaca

SEQ ID NO: 3253029 - RNA, 19 nt, Artificial Sequence
  Description of Artificial Sequence: Synthetic oligonucleotide
uccuuuaucaccauguuga

SEQ ID NO: 3253030 - RNA, 19 nt, Artificial Sequence
  Description of Artificial Sequence: Synthetic oligonucleotide
uuccaaauaaacaaaacaa

SEQ ID NO: 3253031 - RNA, 19 nt, Artificial Sequence
  Description of Artificial Sequence: Synthetic oligonucleotide
uacacauuugauauguuag

SEQ ID NO: 3253032 - RNA, 19 nt, Artificial Sequence
  Description of Artificial Sequence: Synthetic oligonucleotide
uauuaagucauuuagcaau

SEQ ID NO: 3253033 - RNA, 19 nt, Artificial Sequence
  Description of Artificial Sequence: Synthetic oligonucleotide
auuagugaaucccagugac

SEQ ID NO: 3253034 - RNA, 19 nt, Artificial Sequence
  Description of Artificial Sequence: Synthetic oligonucleotide
aauuacaauauuauuaagu

SEQ ID NO: 3253035 - RNA, 19 nt, Artificial Sequence
  Description of Artificial Sequence: Synthetic oligonucleotide
uauuauuaagucauuuagc

SEQ ID NO: 3253036 - RNA, 19 nt, Artificial Sequence
  Description of Artificial Sequence: Synthetic oligonucleotide
aaagccuuuccccacaaag

SEQ ID NO: 3253037 - RNA, 19 nt, Artificial Sequence
  Description of Artificial Sequence: Synthetic oligonucleotide
aagggcauggaguaacacc

SEQ ID NO: 3253038 - RNA, 19 nt, Artificial Sequence
  Description of Artificial Sequence: Synthetic oligonucleotide
cucuguaauauauuaaacc

SEQ ID NO: 3253039 - RNA, 19 nt, Artificial Sequence
  Description of Artificial Sequence: Synthetic oligonucleotide
agaguuaacaaauuuaaau

SEQ ID NO: 3253040 - RNA, 19 nt, Artificial Sequence
  Description of Artificial Sequence: Synthetic oligonucleotide
uauguuagggaaaagaguu

SEQ ID NO: 3253041 - RNA, 19 nt, Artificial Sequence
  Description of Artificial Sequence: Synthetic oligonucleotide
aaaccuuuuguucuuuguc

SEQ ID NO: 3253042 - RNA, 19 nt, Artificial Sequence
  Description of Artificial Sequence: Synthetic oligonucleotide
ucaaacugggucauagugg

SEQ ID NO: 3253043 - RNA, 19 nt, Artificial Sequence
  Description of Artificial Sequence: Synthetic oligonucleotide
aaaauauuacauuaucauu

SEQ ID NO: 3253044 - RNA, 19 nt, Artificial Sequence
  Description of Artificial Sequence: Synthetic oligonucleotide
uacaagaugagcugcagag

SEQ ID NO: 3253045 - RNA, 19 nt, Artificial Sequence
  Description of Artificial Sequence: Synthetic oligonucleotide
uauuguuaaaguaucacua

SEQ ID NO: 3253046 - RNA, 19 nt, Artificial Sequence
  Description of Artificial Sequence: Synthetic oligonucleotide
aauauuauuaagucauuua

SEQ ID NO: 3253047 - RNA, 19 nt, Artificial Sequence
  Description of Artificial Sequence: Synthetic oligonucleotide
agagaaaauuagugaaucc

SEQ ID NO: 3253048 - RNA, 19 nt, Artificial Sequence
  Description of Artificial Sequence: Synthetic oligonucleotide
aaagagaaccuacaagaug

SEQ ID NO: 3253049 - RNA, 19 nt, Artificial Sequence
  Description of Artificial Sequence: Synthetic oligonucleotide
uuuagcaauggcaacuugc

SEQ ID NO: 3253050 - RNA, 19 nt, Artificial Sequence
  Description of Artificial Sequence: Synthetic oligonucleotide
uguaauauauuaaaccuuu

SEQ ID NO: 3253051 - RNA, 19 nt, Artificial Sequence
  Description of Artificial Sequence: Synthetic oligonucleotide
gauauguuagggaaaagag

SEQ ID NO: 3253052 - RNA, 19 nt, Artificial Sequence
  Description of Artificial Sequence: Synthetic oligonucleotide
uccaaauaaacaaaacaac

SEQ ID NO: 3253053 - RNA, 19 nt, Artificial Sequence
  Description of Artificial Sequence: Synthetic oligonucleotide
aaauuuaaaucauauuguu

SEQ ID NO: 3253054 - RNA, 19 nt, Artificial Sequence
  Description of Artificial Sequence: Synthetic oligonucleotide
guaauuauuaaaaguaacc

SEQ ID NO: 3253055 - RNA, 19 nt, Artificial Sequence
  Description of Artificial Sequence: Synthetic oligonucleotide
uacaaagagaaccuacaag

SEQ ID NO: 3253056 - RNA, 19 nt, Artificial Sequence
  Description of Artificial Sequence: Synthetic oligonucleotide
gaugccaugccacugcugg

SEQ ID NO: 3253057 - RNA, 19 nt, Artificial Sequence
  Description of Artificial Sequence: Synthetic oligonucleotide
aucacuagaagaaaagugg

SEQ ID NO: 3253058 - RNA, 19 nt, Artificial Sequence
  Description of Artificial Sequence: Synthetic oligonucleotide
uaaagcaacuccuaggagu

SEQ ID NO: 3253059 - RNA, 19 nt, Artificial Sequence
  Description of Artificial Sequence: Synthetic oligonucleotide
aaaucauauuguuaaagua

SEQ ID NO: 3253060 - RNA, 19 nt, Artificial Sequence
  Description of Artificial Sequence: Synthetic oligonucleotide
uuaguuuauuguuuaaaac

SEQ ID NO: 3253061 - RNA, 19 nt, Artificial Sequence
  Description of Artificial Sequence: Synthetic oligonucleotide
aagaaauacacaauuacaa

SEQ ID NO: 3253062 - RNA, 19 nt, Artificial Sequence
  Description of Artificial Sequence: Synthetic oligonucleotide
aaagaaauacacaauuaca

SEQ ID NO: 3253063 - RNA, 19 nt, Artificial Sequence
  Description of Artificial Sequence: Synthetic oligonucleotide
uguuaaaguaucacuagaa

SEQ ID NO: 3253064 - RNA, 19 nt, Artificial Sequence
  Description of Artificial Sequence: Synthetic oligonucleotide
uuagcaauggcaacuugcc

SEQ ID NO: 3253065 - RNA, 19 nt, Artificial Sequence
  Description of Artificial Sequence: Synthetic oligonucleotide
guuaaaguaucacuagaag

SEQ ID NO: 3253066 - RNA, 19 nt, Artificial Sequence
  Description of Artificial Sequence: Synthetic oligonucleotide
ucaccauguugacagaggg

SEQ ID NO: 3253067 - RNA, 19 nt, Artificial Sequence
  Description of Artificial Sequence: Synthetic oligonucleotide
auauuguuaaaguaucacu

SEQ ID NO: 3253068 - RNA, 19 nt, Artificial Sequence
  Description of Artificial Sequence: Synthetic oligonucleotide
gacagaguaaagcaacucc

SEQ ID NO: 3253069 - RNA, 19 nt, Artificial Sequence
  Description of Artificial Sequence: Synthetic oligonucleotide
aaaauuagugaaucccagu

SEQ ID NO: 3253070 - RNA, 19 nt, Artificial Sequence
  Description of Artificial Sequence: Synthetic oligonucleotide
aauuagugaaucccaguga

SEQ ID NO: 3253071 - RNA, 19 nt, Artificial Sequence
  Description of Artificial Sequence: Synthetic oligonucleotide
acaguacucaaacuggguc

SEQ ID NO: 3253072 - RNA, 19 nt, Artificial Sequence
  Description of Artificial Sequence: Synthetic oligonucleotide
uuaauuguuucucuguaau

SEQ ID NO: 3253073 - RNA, 19 nt, Artificial Sequence
  Description of Artificial Sequence: Synthetic oligonucleotide
aaccuuuuguucuuugucu

SEQ ID NO: 3253074 - RNA, 19 nt, Artificial Sequence
  Description of Artificial Sequence: Synthetic oligonucleotide
ucucagagaaaauuaguga

SEQ ID NO: 3253075 - RNA, 19 nt, Artificial Sequence
  Description of Artificial Sequence: Synthetic oligonucleotide
uuagucuccauauucuaca

SEQ ID NO: 3253076 - RNA, 19 nt, Artificial Sequence
  Description of Artificial Sequence: Synthetic oligonucleotide
uucucuguaauauauuaaa

SEQ ID NO: 3253077 - RNA, 19 nt, Artificial Sequence
  Description of Artificial Sequence: Synthetic oligonucleotide
acacauuugauauguuagg

SEQ ID NO: 3253078 - RNA, 19 nt, Artificial Sequence
  Description of Artificial Sequence: Synthetic oligonucleotide
uucucucagagaaaauuag

SEQ ID NO: 3253079 - RNA, 19 nt, Artificial Sequence
  Description of Artificial Sequence: Synthetic oligonucleotide
uuagggaaaagaguuaaca

SEQ ID NO: 3253080 - RNA, 19 nt, Artificial Sequence
  Description of Artificial Sequence: Synthetic oligonucleotide
uaagucaccugacagagua

SEQ ID NO: 3253081 - RNA, 19 nt, Artificial Sequence
  Description of Artificial Sequence: Synthetic oligonucleotide
uuguuuaaaacaguacuca

SEQ ID NO: 3253082 - RNA, 19 nt, Artificial Sequence
  Description of Artificial Sequence: Synthetic oligonucleotide
cucucagagaaaauuagug

SEQ ID NO: 3253083 - RNA, 19 nt, Artificial Sequence
  Description of Artificial Sequence: Synthetic oligonucleotide
agggcauggaguaacaccc

SEQ ID NO: 3253084 - RNA, 19 nt, Artificial Sequence
  Description of Artificial Sequence: Synthetic oligonucleotide
uagaaauuucucaaucaac

SEQ ID NO: 3253085 - RNA, 19 nt, Artificial Sequence
  Description of Artificial Sequence: Synthetic oligonucleotide
uuguuaaaguaucacuaga

SEQ ID NO: 3253086 - RNA, 19 nt, Artificial Sequence
  Description of Artificial Sequence: Synthetic oligonucleotide
aucccagugacuuaaguca

SEQ ID NO: 3253087 - RNA, 19 nt, Artificial Sequence
  Description of Artificial Sequence: Synthetic oligonucleotide
cacaauuacaauauuauua

SEQ ID NO: 3253088 - RNA, 19 nt, Artificial Sequence
  Description of Artificial Sequence: Synthetic oligonucleotide
aucauauuguuaaaguauc

SEQ ID NO: 3253089 - RNA, 19 nt, Artificial Sequence
  Description of Artificial Sequence: Synthetic oligonucleotide
gaaaauuagugaaucccag

SEQ ID NO: 3253090 - RNA, 19 nt, Artificial Sequence
  Description of Artificial Sequence: Synthetic oligonucleotide
auagaaauuucucaaucaa

SEQ ID NO: 3253091 - RNA, 19 nt, Artificial Sequence
  Description of Artificial Sequence: Synthetic oligonucleotide
uauucuacaaaugucuauc

SEQ ID NO: 3253092 - RNA, 19 nt, Artificial Sequence
  Description of Artificial Sequence: Synthetic oligonucleotide
uguaucguaacagucuggc

SEQ ID NO: 3253093 - RNA, 19 nt, Artificial Sequence
  Description of Artificial Sequence: Synthetic oligonucleotide
aaacaguacucaaacuggg

SEQ ID NO: 3253094 - RNA, 19 nt, Artificial Sequence
  Description of Artificial Sequence: Synthetic oligonucleotide
ucuacaaaugucuaucauu

SEQ ID NO: 3253095 - RNA, 19 nt, Artificial Sequence
  Description of Artificial Sequence: Synthetic oligonucleotide
aucauuuucaagaacaaaa

SEQ ID NO: 3253096 - RNA, 19 nt, Artificial Sequence
  Description of Artificial Sequence: Synthetic oligonucleotide
ugucuuuacacauuugaua

SEQ ID NO: 3253097 - RNA, 19 nt, Artificial Sequence
  Description of Artificial Sequence: Synthetic oligonucleotide
ucacuagaagaaaaguggu

SEQ ID NO: 3253098 - RNA, 19 nt, Artificial Sequence
  Description of Artificial Sequence: Synthetic oligonucleotide
ucauauuguuaaaguauca

SEQ ID NO: 3253099 - RNA, 19 nt, Artificial Sequence
  Description of Artificial Sequence: Synthetic oligonucleotide
agaaauacacaauuacaau

SEQ ID NO: 3253100 - RNA, 19 nt, Artificial Sequence
  Description of Artificial Sequence: Synthetic oligonucleotide
uccauauucuacaaauguc

SEQ ID NO: 3253101 - RNA, 19 nt, Artificial Sequence
  Description of Artificial Sequence: Synthetic oligonucleotide
uuucugguuaguuuauugu

SEQ ID NO: 3253102 - RNA, 19 nt, Artificial Sequence
  Description of Artificial Sequence: Synthetic oligonucleotide
agaaccuacaagaugagcu

SEQ ID NO: 3253103 - RNA, 19 nt, Artificial Sequence
  Description of Artificial Sequence: Synthetic oligonucleotide
aucguaacagucuggcagg

SEQ ID NO: 3253104 - RNA, 19 nt, Artificial Sequence
  Description of Artificial Sequence: Synthetic oligonucleotide
uaaaaguaaccaauacaaa

SEQ ID NO: 3253105 - RNA, 19 nt, Artificial Sequence
  Description of Artificial Sequence: Synthetic oligonucleotide
acucucucagucuuucugg

SEQ ID NO: 3253106 - RNA, 19 nt, Artificial Sequence
  Description of Artificial Sequence: Synthetic oligonucleotide
uuucucaaucaacuguucu

SEQ ID NO: 3253107 - RNA, 19 nt, Artificial Sequence
  Description of Artificial Sequence: Synthetic oligonucleotide
uuguuucucuguaauauau

SEQ ID NO: 3253108 - RNA, 19 nt, Artificial Sequence
  Description of Artificial Sequence: Synthetic oligonucleotide
guuaguuuauuguuuaaaa

SEQ ID NO: 3253109 - RNA, 19 nt, Artificial Sequence
  Description of Artificial Sequence: Synthetic oligonucleotide
caagaugagcugcagagac

SEQ ID NO: 3253110 - RNA, 19 nt, Artificial Sequence
  Description of Artificial Sequence: Synthetic oligonucleotide
ucaucuccgagguggauag

SEQ ID NO: 3253111 - RNA, 19 nt, Artificial Sequence
  Description of Artificial Sequence: Synthetic oligonucleotide
uuaaugugagccugggaga

SEQ ID NO: 3253112 - RNA, 19 nt, Artificial Sequence
  Description of Artificial Sequence: Synthetic oligonucleotide
aacaccccugguuuaaugu

SEQ ID NO: 3253113 - RNA, 19 nt, Artificial Sequence
  Description of Artificial Sequence: Synthetic oligonucleotide
uguuuaaaacaguacucaa

SEQ ID NO: 3253114 - RNA, 19 nt, Artificial Sequence
  Description of Artificial Sequence: Synthetic oligonucleotide
ucagagaaaauuagugaau

SEQ ID NO: 3253115 - RNA, 19 nt, Artificial Sequence
  Description of Artificial Sequence: Synthetic oligonucleotide
ucaaucaacuguucucuca

SEQ ID NO: 3253116 - RNA, 19 nt, Artificial Sequence
  Description of Artificial Sequence: Synthetic oligonucleotide
cauggaguaacaccccugg

SEQ ID NO: 3253117 - RNA, 19 nt, Artificial Sequence
  Description of Artificial Sequence: Synthetic oligonucleotide
aaugucugcaggcagaacc

SEQ ID NO: 3253118 - RNA, 19 nt, Artificial Sequence
  Description of Artificial Sequence: Synthetic oligonucleotide
aaaaguaggaguugaauug

SEQ ID NO: 3253119 - RNA, 19 nt, Artificial Sequence
  Description of Artificial Sequence: Synthetic oligonucleotide
uugucaaacauaaaaguag

SEQ ID NO: 3253120 - RNA, 19 nt, Artificial Sequence
  Description of Artificial Sequence: Synthetic oligonucleotide
ugucaaacauaaaaguagg

SEQ ID NO: 3253121 - RNA, 19 nt, Artificial Sequence
  Description of Artificial Sequence: Synthetic oligonucleotide
uuguugucaaacauaaaag

SEQ ID NO: 3253122 - RNA, 19 nt, Artificial Sequence
  Description of Artificial Sequence: Synthetic oligonucleotide
ucaaacauaaaaguaggag

SEQ ID NO: 3253123 - RNA, 19 nt, Artificial Sequence
  Description of Artificial Sequence: Synthetic oligonucleotide
aaaguaggaguugaauugc

SEQ ID NO: 3253124 - RNA, 19 nt, Artificial Sequence
  Description of Artificial Sequence: Synthetic oligonucleotide
ucuugugagcacuacauag

SEQ ID NO: 3253125 - RNA, 19 nt, Artificial Sequence
  Description of Artificial Sequence: Synthetic oligonucleotide
ucggaauccgagcagaggg

SEQ ID NO: 3253126 - RNA, 19 nt, Artificial Sequence
  Description of Artificial Sequence: Synthetic oligonucleotide
uuuuagauggaucuuucac

SEQ ID NO: 3253127 - RNA, 19 nt, Artificial Sequence
  Description of Artificial Sequence: Synthetic oligonucleotide
uuuagauggaucuuucaca

SEQ ID NO: 3253128 - RNA, 19 nt, Artificial Sequence
  Description of Artificial Sequence: Synthetic oligonucleotide
agauggaucuuucacauug

SEQ ID NO: 3253129 - RNA, 19 nt, Artificial Sequence
  Description of Artificial Sequence: Synthetic oligonucleotide
aagccuucagcccaagacg

SEQ ID NO: 3253130 - RNA, 19 nt, Artificial Sequence
  Description of Artificial Sequence: Synthetic oligonucleotide
uguugucaaacauaaaagu

SEQ ID NO: 3253131 - RNA, 19 nt, Artificial Sequence
  Description of Artificial Sequence: Synthetic oligonucleotide
guccacauagcuuagcugg

SEQ ID NO: 3253132 - RNA, 19 nt, Artificial Sequence
  Description of Artificial Sequence: Synthetic oligonucleotide
uuucacauugacuuggcca

SEQ ID NO: 3253133 - RNA, 19 nt, Artificial Sequence
  Description of Artificial Sequence: Synthetic oligonucleotide
gaacguaucccgcaggccg

SEQ ID NO: 3253134 - RNA, 19 nt, Artificial Sequence
  Description of Artificial Sequence: Synthetic oligonucleotide
gugagcacuacauagcccg

SEQ ID NO: 3253135 - RNA, 19 nt, Artificial Sequence
  Description of Artificial Sequence: Synthetic oligonucleotide
guuguugucaaacauaaaa

SEQ ID NO: 3253136 - RNA, 19 nt, Artificial Sequence
  Description of Artificial Sequence: Synthetic oligonucleotide
uaaaaguaggaguugaauu

SEQ ID NO: 3253137 - RNA, 19 nt, Artificial Sequence
  Description of Artificial Sequence: Synthetic oligonucleotide
auggacaaugucugcaggc

SEQ ID NO: 3253138 - RNA, 19 nt, Artificial Sequence
  Description of Artificial Sequence: Synthetic oligonucleotide
cuacauagcccguagcugg

SEQ ID NO: 3253139 - RNA, 19 nt, Artificial Sequence
  Description of Artificial Sequence: Synthetic oligonucleotide
aaacauaaaaguaggaguu

SEQ ID NO: 3253140 - RNA, 19 nt, Artificial Sequence
  Description of Artificial Sequence: Synthetic oligonucleotide
uaaaguuguugucaaacau

SEQ ID NO: 3253141 - RNA, 19 nt, Artificial Sequence
  Description of Artificial Sequence: Synthetic oligonucleotide
cauugacuuggccauaugg

SEQ ID NO: 3253142 - RNA, 19 nt, Artificial Sequence
  Description of Artificial Sequence: Synthetic oligonucleotide
uuagauggaucuuucacau

SEQ ID NO: 3253143 - RNA, 19 nt, Artificial Sequence
  Description of Artificial Sequence: Synthetic oligonucleotide
acagcaggcaccucucugc

SEQ ID NO: 3253144 - RNA, 19 nt, Artificial Sequence
  Description of Artificial Sequence: Synthetic oligonucleotide
acagagguaaaguuguugu

SEQ ID NO: 3253145 - RNA, 19 nt, Artificial Sequence
  Description of Artificial Sequence: Synthetic oligonucleotide
uugugagcacuacauagcc

SEQ ID NO: 3253146 - RNA, 19 nt, Artificial Sequence
  Description of Artificial Sequence: Synthetic oligonucleotide
uuaacucuuggcucgccgg

SEQ ID NO: 3253147 - RNA, 19 nt, Artificial Sequence
  Description of Artificial Sequence: Synthetic oligonucleotide
ucugcaggcagaaccacag

SEQ ID NO: 3253148 - RNA, 19 nt, Artificial Sequence
  Description of Artificial Sequence: Synthetic oligonucleotide
uauggacaaugucugcagg

SEQ ID NO: 3253149 - RNA, 19 nt, Artificial Sequence
  Description of Artificial Sequence: Synthetic oligonucleotide
gaagccuucagcccaagac

SEQ ID NO: 3253150 - RNA, 19 nt, Artificial Sequence
  Description of Artificial Sequence: Synthetic oligonucleotide
cuugugagcacuacauagc

SEQ ID NO: 3253151 - RNA, 19 nt, Artificial Sequence
  Description of Artificial Sequence: Synthetic oligonucleotide
cagaacagagguaaaguug

SEQ ID NO: 3253152 - RNA, 19 nt, Artificial Sequence
  Description of Artificial Sequence: Synthetic oligonucleotide
uucacauugacuuggccau

SEQ ID NO: 3253153 - RNA, 19 nt, Artificial Sequence
  Description of Artificial Sequence: Synthetic oligonucleotide
aagacgguggccucccuag

SEQ ID NO: 3253154 - RNA, 19 nt, Artificial Sequence
  Description of Artificial Sequence: Synthetic oligonucleotide
agcuuagcuggccagccgc

SEQ ID NO: 3253155 - RNA, 19 nt, Artificial Sequence
  Description of Artificial Sequence: Synthetic oligonucleotide
agaggguugagcucagcgg

SEQ ID NO: 3253156 - RNA, 19 nt, Artificial Sequence
  Description of Artificial Sequence: Synthetic oligonucleotide
aacauaaaaguaggaguug

SEQ ID NO: 3253157 - RNA, 19 nt, Artificial Sequence
  Description of Artificial Sequence: Synthetic oligonucleotide
auauggacaaugucugcag

SEQ ID NO: 3253158 - RNA, 19 nt, Artificial Sequence
  Description of Artificial Sequence: Synthetic oligonucleotide
uugacuuggccauauggac

SEQ ID NO: 3253159 - RNA, 19 nt, Artificial Sequence
  Description of Artificial Sequence: Synthetic oligonucleotide
aagugggccagucuuguga

SEQ ID NO: 3253160 - RNA, 19 nt, Artificial Sequence
  Description of Artificial Sequence: Synthetic oligonucleotide
gaggguugagcucagcggc

SEQ ID NO: 3253161 - RNA, 19 nt, Artificial Sequence
  Description of Artificial Sequence: Synthetic oligonucleotide
aaguuguugucaaacauaa

SEQ ID NO: 3253162 - RNA, 19 nt, Artificial Sequence
  Description of Artificial Sequence: Synthetic oligonucleotide
aacagagguaaaguuguug

SEQ ID NO: 3253163 - RNA, 19 nt, Artificial Sequence
  Description of Artificial Sequence: Synthetic oligonucleotide
cugucggaagccuucagcc

SEQ ID NO: 3253164 - RNA, 19 nt, Artificial Sequence
  Description of Artificial Sequence: Synthetic oligonucleotide
ugacuuggccauauggaca

SEQ ID NO: 3253165 - RNA, 19 nt, Artificial Sequence
  Description of Artificial Sequence: Synthetic oligonucleotide
auggaucuuucacauugac

SEQ ID NO: 3253166 - RNA, 19 nt, Artificial Sequence
  Description of Artificial Sequence: Synthetic oligonucleotide
caaacauaaaaguaggagu

SEQ ID NO: 3253167 - RNA, 19 nt, Artificial Sequence
  Description of Artificial Sequence: Synthetic oligonucleotide
agaacagagguaaaguugu

SEQ ID NO: 3253168 - RNA, 19 nt, Artificial Sequence
  Description of Artificial Sequence: Synthetic oligonucleotide
auagcccguagcugggucc

SEQ ID NO: 3253169 - RNA, 19 nt, Artificial Sequence
  Description of Artificial Sequence: Synthetic oligonucleotide
agagguaaaguuguuguca

SEQ ID NO: 3253170 - RNA, 19 nt, Artificial Sequence
  Description of Artificial Sequence: Synthetic oligonucleotide
ugacagaacagagguaaag

SEQ ID NO: 3253171 - RNA, 19 nt, Artificial Sequence
  Description of Artificial Sequence: Synthetic oligonucleotide
auagcuuagcuggccagcc

SEQ ID NO: 3253172 - RNA, 19 nt, Artificial Sequence
  Description of Artificial Sequence: Synthetic oligonucleotide
uggaucuuucacauugacu

SEQ ID NO: 3253173 - RNA, 19 nt, Artificial Sequence
  Description of Artificial Sequence: Synthetic oligonucleotide
guuaacucuuggcucgccg

SEQ ID NO: 3253174 - RNA, 19 nt, Artificial Sequence
  Description of Artificial Sequence: Synthetic oligonucleotide
aaaguuguugucaaacaua

SEQ ID NO: 3253175 - RNA, 19 nt, Artificial Sequence
  Description of Artificial Sequence: Synthetic oligonucleotide
guaaaguuguugucaaaca

SEQ ID NO: 3253176 - RNA, 19 nt, Artificial Sequence
  Description of Artificial Sequence: Synthetic oligonucleotide
ugugagcacuacauagccc

SEQ ID NO: 3253177 - RNA, 19 nt, Artificial Sequence
  Description of Artificial Sequence: Synthetic oligonucleotide
acauaaaaguaggaguuga

SEQ ID NO: 3253178 - RNA, 19 nt, Artificial Sequence
  Description of Artificial Sequence: Synthetic oligonucleotide
uacauagcccguagcuggg

SEQ ID NO: 3253179 - RNA, 19 nt, Artificial Sequence
  Description of Artificial Sequence: Synthetic oligonucleotide
uuggccauauggacaaugu

SEQ ID NO: 3253180 - RNA, 19 nt, Artificial Sequence
  Description of Artificial Sequence: Synthetic oligonucleotide
acagaacagagguaaaguu

SEQ ID NO: 3253181 - RNA, 19 nt, Artificial Sequence
  Description of Artificial Sequence: Synthetic oligonucleotide
auaaaaguaggaguugaau

SEQ ID NO: 3253182 - RNA, 19 nt, Artificial Sequence
  Description of Artificial Sequence: Synthetic oligonucleotide
acgguggccucccuagugc

SEQ ID NO: 3253183 - RNA, 19 nt, Artificial Sequence
  Description of Artificial Sequence: Synthetic oligonucleotide
cagaggguugagcucagcg

SEQ ID NO: 3253184 - RNA, 19 nt, Artificial Sequence
  Description of Artificial Sequence: Synthetic oligonucleotide
agcacuacauagcccguag

SEQ ID NO: 3253185 - RNA, 19 nt, Artificial Sequence
  Description of Artificial Sequence: Synthetic oligonucleotide
uuccccgggagucuggagc

SEQ ID NO: 3253186 - RNA, 19 nt, Artificial Sequence
  Description of Artificial Sequence: Synthetic oligonucleotide
gguaaaguuguugucaaac

SEQ ID NO: 3253187 - RNA, 19 nt, Artificial Sequence
  Description of Artificial Sequence: Synthetic oligonucleotide
aacguaucccgcaggccgc

SEQ ID NO: 3253188 - RNA, 19 nt, Artificial Sequence
  Description of Artificial Sequence: Synthetic oligonucleotide
auugacuuggccauaugga

SEQ ID NO: 3253189 - RNA, 19 nt, Artificial Sequence
  Description of Artificial Sequence: Synthetic oligonucleotide
gaugccucggcucuccuuc

SEQ ID NO: 3253190 - RNA, 19 nt, Artificial Sequence
  Description of Artificial Sequence: Synthetic oligonucleotide
uggccagccgcgcaggcgg

SEQ ID NO: 3253191 - RNA, 19 nt, Artificial Sequence
  Description of Artificial Sequence: Synthetic oligonucleotide
caggcagaaccacagcagg

SEQ ID NO: 3253192 - RNA, 19 nt, Artificial Sequence
  Description of Artificial Sequence: Synthetic oligonucleotide
ugagcucagcggcugucgg

SEQ ID NO: 3253193 - RNA, 19 nt, Artificial Sequence
  Description of Artificial Sequence: Synthetic oligonucleotide
agugggccagucuugugag

SEQ ID NO: 3253194 - RNA, 19 nt, Artificial Sequence
  Description of Artificial Sequence: Synthetic oligonucleotide
guugucaaacauaaaagua

SEQ ID NO: 3253195 - RNA, 19 nt, Artificial Sequence
  Description of Artificial Sequence: Synthetic oligonucleotide
uccacauagcuuagcuggc

SEQ ID NO: 3253196 - RNA, 19 nt, Artificial Sequence
  Description of Artificial Sequence: Synthetic oligonucleotide
cuucagcccaagacggugg

SEQ ID NO: 3253197 - RNA, 19 nt, Artificial Sequence
  Description of Artificial Sequence: Synthetic oligonucleotide
acauagcuuagcuggccag

SEQ ID NO: 3253198 - RNA, 19 nt, Artificial Sequence
  Description of Artificial Sequence: Synthetic oligonucleotide
gacuuggccauauggacaa

SEQ ID NO: 3253199 - RNA, 19 nt, Artificial Sequence
  Description of Artificial Sequence: Synthetic oligonucleotide
acuacauagcccguagcug

SEQ ID NO: 3253200 - RNA, 19 nt, Artificial Sequence
  Description of Artificial Sequence: Synthetic oligonucleotide
uucggaauccgagcagagg

SEQ ID NO: 3253201 - RNA, 19 nt, Artificial Sequence
  Description of Artificial Sequence: Synthetic oligonucleotide
aauccgagcagaggguuga

SEQ ID NO: 3253202 - RNA, 19 nt, Artificial Sequence
  Description of Artificial Sequence: Synthetic oligonucleotide
ugcaagugggccagucuug

SEQ ID NO: 3253203 - RNA, 19 nt, Artificial Sequence
  Description of Artificial Sequence: Synthetic oligonucleotide
uaacucuuggcucgccgga

SEQ ID NO: 3253204 - RNA, 19 nt, Artificial Sequence
  Description of Artificial Sequence: Synthetic oligonucleotide
uggacaaugucugcaggca

SEQ ID NO: 3253205 - RNA, 19 nt, Artificial Sequence
  Description of Artificial Sequence: Synthetic oligonucleotide
gagguaaaguuguugucaa

SEQ ID NO: 3253206 - RNA, 19 nt, Artificial Sequence
  Description of Artificial Sequence: Synthetic oligonucleotide
accucucugcaagugggcc

SEQ ID NO: 3253207 - RNA, 19 nt, Artificial Sequence
  Description of Artificial Sequence: Synthetic oligonucleotide
aguaggaguugaauugcuc

SEQ ID NO: 3253208 - RNA, 19 nt, Artificial Sequence
  Description of Artificial Sequence: Synthetic oligonucleotide
cuggccagcgaacguaucc

SEQ ID NO: 3253209 - RNA, 19 nt, Artificial Sequence
  Description of Artificial Sequence: Synthetic oligonucleotide
ucugcaagugggccagucu

SEQ ID NO: 3253210 - RNA, 19 nt, Artificial Sequence
  Description of Artificial Sequence: Synthetic oligonucleotide
cuuucacauugacuuggcc

SEQ ID NO: 3253211 - RNA, 19 nt, Artificial Sequence
  Description of Artificial Sequence: Synthetic oligonucleotide
gggagucuggagcagagcc

SEQ ID NO: 3253212 - RNA, 19 nt, Artificial Sequence
  Description of Artificial Sequence: Synthetic oligonucleotide
gagucuggagcagagccgc

SEQ ID NO: 3253213 - RNA, 19 nt, Artificial Sequence
  Description of Artificial Sequence: Synthetic oligonucleotide
uccuucggaauccgagcag

SEQ ID NO: 3253214 - RNA, 19 nt, Artificial Sequence
  Description of Artificial Sequence: Synthetic oligonucleotide
gcgguuaacucuuggcucg

SEQ ID NO: 3253215 - RNA, 19 nt, Artificial Sequence
  Description of Artificial Sequence: Synthetic oligonucleotide
guaggaguugaauugcucu

SEQ ID NO: 3253216 - RNA, 19 nt, Artificial Sequence
  Description of Artificial Sequence: Synthetic oligonucleotide
uagcuuagcuggccagccg

SEQ ID NO: 3253217 - RNA, 19 nt, Artificial Sequence
  Description of Artificial Sequence: Synthetic oligonucleotide
aguaaaauuacauauaaac

SEQ ID NO: 3253218 - RNA, 19 nt, Artificial Sequence
  Description of Artificial Sequence: Synthetic oligonucleotide
aauguuaugugcuaucaac

SEQ ID NO: 3253219 - RNA, 19 nt, Artificial Sequence
  Description of Artificial Sequence: Synthetic oligonucleotide
acuaagauaacucaacauc

SEQ ID NO: 3253220 - RNA, 19 nt, Artificial Sequence
  Description of Artificial Sequence: Synthetic oligonucleotide
uuaugugcuaucaacaucc

SEQ ID NO: 3253221 - RNA, 19 nt, Artificial Sequence
  Description of Artificial Sequence: Synthetic oligonucleotide
gauguauuuauccuaaacc

SEQ ID NO: 3253222 - RNA, 19 nt, Artificial Sequence
  Description of Artificial Sequence: Synthetic oligonucleotide
uuagaaaucaucuagucau

SEQ ID NO: 3253223 - RNA, 19 nt, Artificial Sequence
  Description of Artificial Sequence: Synthetic oligonucleotide
uucauuuauacaauuaugu

SEQ ID NO: 3253224 - RNA, 19 nt, Artificial Sequence
  Description of Artificial Sequence: Synthetic oligonucleotide
agaccaaucaaauauaaug

SEQ ID NO: 3253225 - RNA, 19 nt, Artificial Sequence
  Description of Artificial Sequence: Synthetic oligonucleotide
gaaaacuucauuuauacaa

SEQ ID NO: 3253226 - RNA, 19 nt, Artificial Sequence
  Description of Artificial Sequence: Synthetic oligonucleotide
aaaguaaaauuacauauaa

SEQ ID NO: 3253227 - RNA, 19 nt, Artificial Sequence
  Description of Artificial Sequence: Synthetic oligonucleotide
ugugcuaucaacauccacc

SEQ ID NO: 3253228 - RNA, 19 nt, Artificial Sequence
  Description of Artificial Sequence: Synthetic oligonucleotide
uuuguuacauaccagagau

SEQ ID NO: 3253229 - RNA, 19 nt, Artificial Sequence
  Description of Artificial Sequence: Synthetic oligonucleotide
aggaaaacuucauuuauac

SEQ ID NO: 3253230 - RNA, 19 nt, Artificial Sequence
  Description of Artificial Sequence: Synthetic oligonucleotide
aacacauuauuucucuuuc

SEQ ID NO: 3253231 - RNA, 19 nt, Artificial Sequence
  Description of Artificial Sequence: Synthetic oligonucleotide
uuuuaaaucaacauauuuu

SEQ ID NO: 3253232 - RNA, 19 nt, Artificial Sequence
  Description of Artificial Sequence: Synthetic oligonucleotide
ucuaacuuuccucugaugu

SEQ ID NO: 3253233 - RNA, 19 nt, Artificial Sequence
  Description of Artificial Sequence: Synthetic oligonucleotide
ucaaauauaaugucugaug

SEQ ID NO: 3253234 - RNA, 19 nt, Artificial Sequence
  Description of Artificial Sequence: Synthetic oligonucleotide
aacauugucaacuaagaua

SEQ ID NO: 3253235 - RNA, 19 nt, Artificial Sequence
  Description of Artificial Sequence: Synthetic oligonucleotide
auuagaaaaguaaaauuac

SEQ ID NO: 3253236 - RNA, 19 nt, Artificial Sequence
  Description of Artificial Sequence: Synthetic oligonucleotide
ucaacauccaccuucuuug

SEQ ID NO: 3253237 - RNA, 19 nt, Artificial Sequence
  Description of Artificial Sequence: Synthetic oligonucleotide
uauaaugaacacauuaaaa

SEQ ID NO: 3253238 - RNA, 19 nt, Artificial Sequence
  Description of Artificial Sequence: Synthetic oligonucleotide
uuagaaaaguaaaauuaca

SEQ ID NO: 3253239 - RNA, 19 nt, Artificial Sequence
  Description of Artificial Sequence: Synthetic oligonucleotide
uuuagaaaucaucuaguca

SEQ ID NO: 3253240 - RNA, 19 nt, Artificial Sequence
  Description of Artificial Sequence: Synthetic oligonucleotide
auguauuuauccuaaaccu

SEQ ID NO: 3253241 - RNA, 19 nt, Artificial Sequence
  Description of Artificial Sequence: Synthetic oligonucleotide
aaaucaucuagucauuuau

SEQ ID NO: 3253242 - RNA, 19 nt, Artificial Sequence
  Description of Artificial Sequence: Synthetic oligonucleotide
gaaaaguaaaauuacauau

SEQ ID NO: 3253243 - RNA, 19 nt, Artificial Sequence
  Description of Artificial Sequence: Synthetic oligonucleotide
uuugaaaauuucucuacgc

SEQ ID NO: 3253244 - RNA, 19 nt, Artificial Sequence
  Description of Artificial Sequence: Synthetic oligonucleotide
ugccuuuucauuaagcugu

SEQ ID NO: 3253245 - RNA, 19 nt, Artificial Sequence
  Description of Artificial Sequence: Synthetic oligonucleotide
uagaaaaguaaaauuacau

SEQ ID NO: 3253246 - RNA, 19 nt, Artificial Sequence
  Description of Artificial Sequence: Synthetic oligonucleotide
uaaacauugucaacuaaga

SEQ ID NO: 3253247 - RNA, 19 nt, Artificial Sequence
  Description of Artificial Sequence: Synthetic oligonucleotide
uuuucucuaacuuuccucu

SEQ ID NO: 3253248 - RNA, 19 nt, Artificial Sequence
  Description of Artificial Sequence: Synthetic oligonucleotide
ucaauuuucauuuucuauu

SEQ ID NO: 3253249 - RNA, 19 nt, Artificial Sequence
  Description of Artificial Sequence: Synthetic oligonucleotide
uuacauaccagagauauaa

SEQ ID NO: 3253250 - RNA, 19 nt, Artificial Sequence
  Description of Artificial Sequence: Synthetic oligonucleotide
caaucaaauauaaugucug

SEQ ID NO: 3253251 - RNA, 19 nt, Artificial Sequence
  Description of Artificial Sequence: Synthetic oligonucleotide
uugaaaauuucucuacgca

SEQ ID NO: 3253252 - RNA, 19 nt, Artificial Sequence
  Description of Artificial Sequence: Synthetic oligonucleotide
uuuauuguguuucuacuuc

SEQ ID NO: 3253253 - RNA, 19 nt, Artificial Sequence
  Description of Artificial Sequence: Synthetic oligonucleotide
ucaacuaagauaacucaac

SEQ ID NO: 3253254 - RNA, 19 nt, Artificial Sequence
  Description of Artificial Sequence: Synthetic oligonucleotide
agauauaaugaacacauua

SEQ ID NO: 3253255 - RNA, 19 nt, Artificial Sequence
  Description of Artificial Sequence: Synthetic oligonucleotide
gaaaauuucucuacgcaag

SEQ ID NO: 3253256 - RNA, 19 nt, Artificial Sequence
  Description of Artificial Sequence: Synthetic oligonucleotide
ucucuuucaauuuucauuu

SEQ ID NO: 3253257 - RNA, 19 nt, Artificial Sequence
  Description of Artificial Sequence: Synthetic oligonucleotide
aauuucucuacgcaaguau

SEQ ID NO: 3253258 - RNA, 19 nt, Artificial Sequence
  Description of Artificial Sequence: Synthetic oligonucleotide
accaaucaaauauaauguc

SEQ ID NO: 3253259 - RNA, 19 nt, Artificial Sequence
  Description of Artificial Sequence: Synthetic oligonucleotide
uuuuacccaaccuacuuug

SEQ ID NO: 3253260 - RNA, 19 nt, Artificial Sequence
  Description of Artificial Sequence: Synthetic oligonucleotide
uuuuguuacauaccagaga

SEQ ID NO: 3253261 - RNA, 19 nt, Artificial Sequence
  Description of Artificial Sequence: Synthetic oligonucleotide
uaucacaacacauuauuuc

SEQ ID NO: 3253262 - RNA, 19 nt, Artificial Sequence
  Description of Artificial Sequence: Synthetic oligonucleotide
aaucaaauauaaugucuga

SEQ ID NO: 3253263 - RNA, 19 nt, Artificial Sequence
  Description of Artificial Sequence: Synthetic oligonucleotide
uuuucauuaagcugugacu

SEQ ID NO: 3253264 - RNA, 19 nt, Artificial Sequence
  Description of Artificial Sequence: Synthetic oligonucleotide
uguuacauaccagagauau

SEQ ID NO: 3253265 - RNA, 19 nt, Artificial Sequence
  Description of Artificial Sequence: Synthetic oligonucleotide
cauuagaaaaguaaaauua

SEQ ID NO: 3253266 - RNA, 19 nt, Artificial Sequence
  Description of Artificial Sequence: Synthetic oligonucleotide
cuuugaaaauuucucuacg

SEQ ID NO: 3253267 - RNA, 19 nt, Artificial Sequence
  Description of Artificial Sequence: Synthetic oligonucleotide
ucuacuucuggacuccucc

SEQ ID NO: 3253268 - RNA, 19 nt, Artificial Sequence
  Description of Artificial Sequence: Synthetic oligonucleotide
auaaacauugucaacuaag

SEQ ID NO: 3253269 - RNA, 19 nt, Artificial Sequence
  Description of Artificial Sequence: Synthetic oligonucleotide
ugaaaauuucucuacgcaa

SEQ ID NO: 3253270 - RNA, 19 nt, Artificial Sequence
  Description of Artificial Sequence: Synthetic oligonucleotide
aaaauuucucuacgcaagu

SEQ ID NO: 3253271 - RNA, 19 nt, Artificial Sequence
  Description of Artificial Sequence: Synthetic oligonucleotide
aucacaacacauuauuucu

SEQ ID NO: 3253272 - RNA, 19 nt, Artificial Sequence
  Description of Artificial Sequence: Synthetic oligonucleotide
auuuauacaauuauguaau

SEQ ID NO: 3253273 - RNA, 19 nt, Artificial Sequence
  Description of Artificial Sequence: Synthetic oligonucleotide
ucuuugaaaauuucucuac

SEQ ID NO: 3253274 - RNA, 19 nt, Artificial Sequence
  Description of Artificial Sequence: Synthetic oligonucleotide
ugauguauuuauccuaaac

SEQ ID NO: 3253275 - RNA, 19 nt, Artificial Sequence
  Description of Artificial Sequence: Synthetic oligonucleotide
agagauauaaugaacacau

SEQ ID NO: 3253276 - RNA, 19 nt, Artificial Sequence
  Description of Artificial Sequence: Synthetic oligonucleotide
cauuuauacaauuauguaa

SEQ ID NO: 3253277 - RNA, 19 nt, Artificial Sequence
  Description of Artificial Sequence: Synthetic oligonucleotide
uuucauuaagcugugacuc

SEQ ID NO: 3253278 - RNA, 19 nt, Artificial Sequence
  Description of Artificial Sequence: Synthetic oligonucleotide
aacuaagauaacucaacau

SEQ ID NO: 3253279 - RNA, 19 nt, Artificial Sequence
  Description of Artificial Sequence: Synthetic oligonucleotide
agaaaaguaaaauuacaua

SEQ ID NO: 3253280 - RNA, 19 nt, Artificial Sequence
  Description of Artificial Sequence: Synthetic oligonucleotide
uuuuagaaaucaucuaguc

SEQ ID NO: 3253281 - RNA, 19 nt, Artificial Sequence
  Description of Artificial Sequence: Synthetic oligonucleotide
cuucauuuauacaauuaug

SEQ ID NO: 3253282 - RNA, 19 nt, Artificial Sequence
  Description of Artificial Sequence: Synthetic oligonucleotide
cuuuucauuaagcugugac

SEQ ID NO: 3253283 - RNA, 19 nt, Artificial Sequence
  Description of Artificial Sequence: Synthetic oligonucleotide
auauaaugaacacauuaaa

SEQ ID NO: 3253284 - RNA, 19 nt, Artificial Sequence
  Description of Artificial Sequence: Synthetic oligonucleotide
uugucaacuaagauaacuc

SEQ ID NO: 3253285 - RNA, 19 nt, Artificial Sequence
  Description of Artificial Sequence: Synthetic oligonucleotide
guaaaauuacauauaaaca

SEQ ID NO: 3253286 - RNA, 19 nt, Artificial Sequence
  Description of Artificial Sequence: Synthetic oligonucleotide
aaaauguuaugugcuauca

SEQ ID NO: 3253287 - RNA, 19 nt, Artificial Sequence
  Description of Artificial Sequence: Synthetic oligonucleotide
acauaccagagauauaaug

SEQ ID NO: 3253288 - RNA, 19 nt, Artificial Sequence
  Description of Artificial Sequence: Synthetic oligonucleotide
ugucaacuaagauaacuca

SEQ ID NO: 3253289 - RNA, 19 nt, Artificial Sequence
  Description of Artificial Sequence: Synthetic oligonucleotide
auuguguuucuacuucugg

SEQ ID NO: 3253290 - RNA, 19 nt, Artificial Sequence
  Description of Artificial Sequence: Synthetic oligonucleotide
ucgcagaccaaucaaauau

SEQ ID NO: 3253291 - RNA, 19 nt, Artificial Sequence
  Description of Artificial Sequence: Synthetic oligonucleotide
acuucauuuauacaauuau

SEQ ID NO: 3253292 - RNA, 19 nt, Artificial Sequence
  Description of Artificial Sequence: Synthetic oligonucleotide
cauaccagagauauaauga

SEQ ID NO: 3253293 - RNA, 19 nt, Artificial Sequence
  Description of Artificial Sequence: Synthetic oligonucleotide
ucugauguauuuauccuaa

SEQ ID NO: 3253294 - RNA, 19 nt, Artificial Sequence
  Description of Artificial Sequence: Synthetic oligonucleotide
acauugucaacuaagauaa

SEQ ID NO: 3253295 - RNA, 19 nt, Artificial Sequence
  Description of Artificial Sequence: Synthetic oligonucleotide
uuaaggaaaacuucauuua

SEQ ID NO: 3253296 - RNA, 19 nt, Artificial Sequence
  Description of Artificial Sequence: Synthetic oligonucleotide
uaaggaaaacuucauuuau

SEQ ID NO: 3253297 - RNA, 19 nt, Artificial Sequence
  Description of Artificial Sequence: Synthetic oligonucleotide
uguguuucuacuucuggac

SEQ ID NO: 3253298 - RNA, 19 nt, Artificial Sequence
  Description of Artificial Sequence: Synthetic oligonucleotide
aguaucacaacacauuauu

SEQ ID NO: 3253299 - RNA, 19 nt, Artificial Sequence
  Description of Artificial Sequence: Synthetic oligonucleotide
gauauaaugaacacauuaa

SEQ ID NO: 3253300 - RNA, 19 nt, Artificial Sequence
  Description of Artificial Sequence: Synthetic oligonucleotide
uucaauuuucauuuucuau

SEQ ID NO: 3253301 - RNA, 19 nt, Artificial Sequence
  Description of Artificial Sequence: Synthetic oligonucleotide
uucucuuucaauuuucauu

SEQ ID NO: 3253302 - RNA, 19 nt, Artificial Sequence
  Description of Artificial Sequence: Synthetic oligonucleotide
uuucucuacgcaaguauca

SEQ ID NO: 3253303 - RNA, 19 nt, Artificial Sequence
  Description of Artificial Sequence: Synthetic oligonucleotide
ucauuuauacaauuaugua

SEQ ID NO: 3253304 - RNA, 19 nt, Artificial Sequence
  Description of Artificial Sequence: Synthetic oligonucleotide
aaacauugucaacuaagau

SEQ ID NO: 3253305 - RNA, 19 nt, Artificial Sequence
  Description of Artificial Sequence: Synthetic oligonucleotide
ugcauuagaaaaguaaaau

SEQ ID NO: 3253306 - RNA, 19 nt, Artificial Sequence
  Description of Artificial Sequence: Synthetic oligonucleotide
ucuuucaauuuucauuuuc

SEQ ID NO: 3253307 - RNA, 19 nt, Artificial Sequence
  Description of Artificial Sequence: Synthetic oligonucleotide
aaaaguaaaauuacauaua

SEQ ID NO: 3253308 - RNA, 19 nt, Artificial Sequence
  Description of Artificial Sequence: Synthetic oligonucleotide
acugccuuuucauuaagcu

SEQ ID NO: 3253309 - RNA, 19 nt, Artificial Sequence
  Description of Artificial Sequence: Synthetic oligonucleotide
uacgcaaguaucacaacac

SEQ ID NO: 3253310 - RNA, 19 nt, Artificial Sequence
  Description of Artificial Sequence: Synthetic oligonucleotide
uguauuuauccuaaaccuu

SEQ ID NO: 3253311 - RNA, 19 nt, Artificial Sequence
  Description of Artificial Sequence: Synthetic oligonucleotide
auuauuucucuuucaauuu

SEQ ID NO: 3253312 - RNA, 19 nt, Artificial Sequence
  Description of Artificial Sequence: Synthetic oligonucleotide
auugucaacuaagauaacu

SEQ ID NO: 3253313 - RNA, 19 nt, Artificial Sequence
  Description of Artificial Sequence: Synthetic oligonucleotide
uauuucucuuucaauuuuc

SEQ ID NO: 3253314 - RNA, 19 nt, Artificial Sequence
  Description of Artificial Sequence: Synthetic oligonucleotide
uucuuugaaaauuucucua

SEQ ID NO: 3253315 - RNA, 19 nt, Artificial Sequence
  Description of Artificial Sequence: Synthetic oligonucleotide
uuuuauuguguuucuacuu

SEQ ID NO: 3253316 - RNA, 19 nt, Artificial Sequence
  Description of Artificial Sequence: Synthetic oligonucleotide
aaaacuucauuuauacaau

SEQ ID NO: 3253317 - RNA, 19 nt, Artificial Sequence
  Description of Artificial Sequence: Synthetic oligonucleotide
ucaaacaugacaaagaaag

SEQ ID NO: 3253318 - RNA, 19 nt, Artificial Sequence
  Description of Artificial Sequence: Synthetic oligonucleotide
uugauuauaaugaauaacc

SEQ ID NO: 3253319 - RNA, 19 nt, Artificial Sequence
  Description of Artificial Sequence: Synthetic oligonucleotide
uucaaguuaauucacauca

SEQ ID NO: 3253320 - RNA, 19 nt, Artificial Sequence
  Description of Artificial Sequence: Synthetic oligonucleotide
uuaauucacaucauaagag

SEQ ID NO: 3253321 - RNA, 19 nt, Artificial Sequence
  Description of Artificial Sequence: Synthetic oligonucleotide
auuauaaugaauaaccaac

SEQ ID NO: 3253322 - RNA, 19 nt, Artificial Sequence
  Description of Artificial Sequence: Synthetic oligonucleotide
auaaugaauaaccaaccac

SEQ ID NO: 3253323 - RNA, 19 nt, Artificial Sequence
  Description of Artificial Sequence: Synthetic oligonucleotide
uaaugaauaaccaaccacu

SEQ ID NO: 3253324 - RNA, 19 nt, Artificial Sequence
  Description of Artificial Sequence: Synthetic oligonucleotide
aacauucuugauuauaaug

SEQ ID NO: 3253325 - RNA, 19 nt, Artificial Sequence
  Description of Artificial Sequence: Synthetic oligonucleotide
ugaauaaccaaccacuugu

SEQ ID NO: 3253326 - RNA, 19 nt, Artificial Sequence
  Description of Artificial Sequence: Synthetic oligonucleotide
ugugauuucaaguuaauuc

SEQ ID NO: 3253327 - RNA, 19 nt, Artificial Sequence
  Description of Artificial Sequence: Synthetic oligonucleotide
aaaauuuguacacucauua

SEQ ID NO: 3253328 - RNA, 19 nt, Artificial Sequence
  Description of Artificial Sequence: Synthetic oligonucleotide
uuauaaugaauaaccaacc

SEQ ID NO: 3253329 - RNA, 19 nt, Artificial Sequence
  Description of Artificial Sequence: Synthetic oligonucleotide
uuaauucucaaacaugaca

SEQ ID NO: 3253330 - RNA, 19 nt, Artificial Sequence
  Description of Artificial Sequence: Synthetic oligonucleotide
uaauucucaaacaugacaa

SEQ ID NO: 3253331 - RNA, 19 nt, Artificial Sequence
  Description of Artificial Sequence: Synthetic oligonucleotide
aacaugacaaagaaaggac

SEQ ID NO: 3253332 - RNA, 19 nt, Artificial Sequence
  Description of Artificial Sequence: Synthetic oligonucleotide
aauuuguacacucauuaau

SEQ ID NO: 3253333 - RNA, 19 nt, Artificial Sequence
  Description of Artificial Sequence: Synthetic oligonucleotide
aauucacaucauaagagac

SEQ ID NO: 3253334 - RNA, 19 nt, Artificial Sequence
  Description of Artificial Sequence: Synthetic oligonucleotide
uucuugauuauaaugaaua

SEQ ID NO: 3253335 - RNA, 19 nt, Artificial Sequence
  Description of Artificial Sequence: Synthetic oligonucleotide
aguuaauucacaucauaag

SEQ ID NO: 3253336 - RNA, 19 nt, Artificial Sequence
  Description of Artificial Sequence: Synthetic oligonucleotide
aaacaugacaaagaaagga

SEQ ID NO: 3253337 - RNA, 19 nt, Artificial Sequence
  Description of Artificial Sequence: Synthetic oligonucleotide
aaagucaaaagcaauacaa

SEQ ID NO: 3253338 - RNA, 19 nt, Artificial Sequence
  Description of Artificial Sequence: Synthetic oligonucleotide
uauaaugaauaaccaacca

SEQ ID NO: 3253339 - RNA, 19 nt, Artificial Sequence
  Description of Artificial Sequence: Synthetic oligonucleotide
ugacaaagaaaggacaggg

SEQ ID NO: 3253340 - RNA, 19 nt, Artificial Sequence
  Description of Artificial Sequence: Synthetic oligonucleotide
ugauuauaaugaauaacca

SEQ ID NO: 3253341 - RNA, 19 nt, Artificial Sequence
  Description of Artificial Sequence: Synthetic oligonucleotide
uguuuuggcaacauucuug

SEQ ID NO: 3253342 - RNA, 19 nt, Artificial Sequence
  Description of Artificial Sequence: Synthetic oligonucleotide
auaaccaaccacuuguuug

SEQ ID NO: 3253343 - RNA, 19 nt, Artificial Sequence
  Description of Artificial Sequence: Synthetic oligonucleotide
ucauuaauucucaaacaug

SEQ ID NO: 3253344 - RNA, 19 nt, Artificial Sequence
  Description of Artificial Sequence: Synthetic oligonucleotide
guuaauucacaucauaaga

SEQ ID NO: 3253345 - RNA, 19 nt, Artificial Sequence
  Description of Artificial Sequence: Synthetic oligonucleotide
aaaagucaaaagcaauaca

SEQ ID NO: 3253346 - RNA, 19 nt, Artificial Sequence
  Description of Artificial Sequence: Synthetic oligonucleotide
cauuaauucucaaacauga

SEQ ID NO: 3253347 - RNA, 19 nt, Artificial Sequence
  Description of Artificial Sequence: Synthetic oligonucleotide
cauuuagacuucuucaccc

SEQ ID NO: 3253348 - RNA, 19 nt, Artificial Sequence
  Description of Artificial Sequence: Synthetic oligonucleotide
acaaagaaaggacagggga

SEQ ID NO: 3253349 - RNA, 19 nt, Artificial Sequence
  Description of Artificial Sequence: Synthetic oligonucleotide
uaauucacaucauaagaga

SEQ ID NO: 3253350 - RNA, 19 nt, Artificial Sequence
  Description of Artificial Sequence: Synthetic oligonucleotide
cacucauuaauucucaaac

SEQ ID NO: 3253351 - RNA, 19 nt, Artificial Sequence
  Description of Artificial Sequence: Synthetic oligonucleotide
uguacacucauuaauucuc

SEQ ID NO: 3253352 - RNA, 19 nt, Artificial Sequence
  Description of Artificial Sequence: Synthetic oligonucleotide
aggauggcagaccaggccc

SEQ ID NO: 3253353 - RNA, 19 nt, Artificial Sequence
  Description of Artificial Sequence: Synthetic oligonucleotide
caugacaaagaaaggacag

SEQ ID NO: 3253354 - RNA, 19 nt, Artificial Sequence
  Description of Artificial Sequence: Synthetic oligonucleotide
uucucaaacaugacaaaga

SEQ ID NO: 3253355 - RNA, 19 nt, Artificial Sequence
  Description of Artificial Sequence: Synthetic oligonucleotide
aacaggauggcagaccagg

SEQ ID NO: 3253356 - RNA, 19 nt, Artificial Sequence
  Description of Artificial Sequence: Synthetic oligonucleotide
gauuauaaugaauaaccaa

SEQ ID NO: 3253357 - RNA, 19 nt, Artificial Sequence
  Description of Artificial Sequence: Synthetic oligonucleotide
caucauaagagacuuuccc

SEQ ID NO: 3253358 - RNA, 19 nt, Artificial Sequence
  Description of Artificial Sequence: Synthetic oligonucleotide
ucucaaacaugacaaagaa

SEQ ID NO: 3253359 - RNA, 19 nt, Artificial Sequence
  Description of Artificial Sequence: Synthetic oligonucleotide
gugauuucaaguuaauuca

SEQ ID NO: 3253360 - RNA, 19 nt, Artificial Sequence
  Description of Artificial Sequence: Synthetic oligonucleotide
uaaccaaccacuuguuugc

SEQ ID NO: 3253361 - RNA, 19 nt, Artificial Sequence
  Description of Artificial Sequence: Synthetic oligonucleotide
uuggcaacauucuugauua

SEQ ID NO: 3253362 - RNA, 19 nt, Artificial Sequence
  Description of Artificial Sequence: Synthetic oligonucleotide
acauucuugauuauaauga

SEQ ID NO: 3253363 - RNA, 19 nt, Artificial Sequence
  Description of Artificial Sequence: Synthetic oligonucleotide
auaagagacuuucccuccc

SEQ ID NO: 3253364 - RNA, 19 nt, Artificial Sequence
  Description of Artificial Sequence: Synthetic oligonucleotide
agucaaaagcaauacaaaa

SEQ ID NO: 3253365 - RNA, 19 nt, Artificial Sequence
  Description of Artificial Sequence: Synthetic oligonucleotide
uuugccuugugauuucaag

SEQ ID NO: 3253366 - RNA, 19 nt, Artificial Sequence
  Description of Artificial Sequence: Synthetic oligonucleotide
ucauaagagacuuucccuc

SEQ ID NO: 3253367 - RNA, 19 nt, Artificial Sequence
  Description of Artificial Sequence: Synthetic oligonucleotide
uuuggcaacauucuugauu

SEQ ID NO: 3253368 - RNA, 19 nt, Artificial Sequence
  Description of Artificial Sequence: Synthetic oligonucleotide
cuugauuauaaugaauaac

SEQ ID NO: 3253369 - RNA, 19 nt, Artificial Sequence
  Description of Artificial Sequence: Synthetic oligonucleotide
aaauuuguacacucauuaa

SEQ ID NO: 3253370 - RNA, 19 nt, Artificial Sequence
  Description of Artificial Sequence: Synthetic oligonucleotide
caaacaugacaaagaaagg

SEQ ID NO: 3253371 - RNA, 19 nt, Artificial Sequence
  Description of Artificial Sequence: Synthetic oligonucleotide
uuuguacacucauuaauuc

SEQ ID NO: 3253372 - RNA, 19 nt, Artificial Sequence
  Description of Artificial Sequence: Synthetic oligonucleotide
gaaaggacaggggaaacag

SEQ ID NO: 3253373 - RNA, 19 nt, Artificial Sequence
  Description of Artificial Sequence: Synthetic oligonucleotide
aucauaagagacuuucccu

SEQ ID NO: 3253374 - RNA, 19 nt, Artificial Sequence
  Description of Artificial Sequence: Synthetic oligonucleotide
ugauuucaaguuaauucac

SEQ ID NO: 3253375 - RNA, 19 nt, Artificial Sequence
  Description of Artificial Sequence: Synthetic oligonucleotide
auuucaaguuaauucacau

SEQ ID NO: 3253376 - RNA, 19 nt, Artificial Sequence
  Description of Artificial Sequence: Synthetic oligonucleotide
aaguuaauucacaucauaa

SEQ ID NO: 3253377 - RNA, 19 nt, Artificial Sequence
  Description of Artificial Sequence: Synthetic oligonucleotide
ucuugauuauaaugaauaa

SEQ ID NO: 3253378 - RNA, 19 nt, Artificial Sequence
  Description of Artificial Sequence: Synthetic oligonucleotide
auucucaaacaugacaaag

SEQ ID NO: 3253379 - RNA, 19 nt, Artificial Sequence
  Description of Artificial Sequence: Synthetic oligonucleotide
gacaggggaaacaggaugg

SEQ ID NO: 3253380 - RNA, 19 nt, Artificial Sequence
  Description of Artificial Sequence: Synthetic oligonucleotide
gaaacaggauggcagacca

SEQ ID NO: 3253381 - RNA, 19 nt, Artificial Sequence
  Description of Artificial Sequence: Synthetic oligonucleotide
uuguacacucauuaauucu

SEQ ID NO: 3253382 - RNA, 19 nt, Artificial Sequence
  Description of Artificial Sequence: Synthetic oligonucleotide
cauaagagacuuucccucc

SEQ ID NO: 3253383 - RNA, 19 nt, Artificial Sequence
  Description of Artificial Sequence: Synthetic oligonucleotide
acucauuaauucucaaaca

SEQ ID NO: 3253384 - RNA, 19 nt, Artificial Sequence
  Description of Artificial Sequence: Synthetic oligonucleotide
aaagaaaggacaggggaaa

SEQ ID NO: 3253385 - RNA, 19 nt, Artificial Sequence
  Description of Artificial Sequence: Synthetic oligonucleotide
uuucaaguuaauucacauc

SEQ ID NO: 3253386 - RNA, 19 nt, Artificial Sequence
  Description of Artificial Sequence: Synthetic oligonucleotide
aauucucaaacaugacaaa

SEQ ID NO: 3253387 - RNA, 19 nt, Artificial Sequence
  Description of Artificial Sequence: Synthetic oligonucleotide
augaauaaccaaccacuug

SEQ ID NO: 3253388 - RNA, 19 nt, Artificial Sequence
  Description of Artificial Sequence: Synthetic oligonucleotide
gacaaagaaaggacagggg

SEQ ID NO: 3253389 - RNA, 19 nt, Artificial Sequence
  Description of Artificial Sequence: Synthetic oligonucleotide
auuaauucucaaacaugac

SEQ ID NO: 3253390 - RNA, 19 nt, Artificial Sequence
  Description of Artificial Sequence: Synthetic oligonucleotide
aagaaaggacaggggaaac

SEQ ID NO: 3253391 - RNA, 19 nt, Artificial Sequence
  Description of Artificial Sequence: Synthetic oligonucleotide
aaggacaggggaaacagga

SEQ ID NO: 3253392 - RNA, 19 nt, Artificial Sequence
  Description of Artificial Sequence: Synthetic oligonucleotide
ucuucacccauuucuaaaa

SEQ ID NO: 3253393 - RNA, 19 nt, Artificial Sequence
  Description of Artificial Sequence: Synthetic oligonucleotide
guuuuggcaacauucuuga

SEQ ID NO: 3253394 - RNA, 19 nt, Artificial Sequence
  Description of Artificial Sequence: Synthetic oligonucleotide
aauaaccaaccacuuguuu

SEQ ID NO: 3253395 - RNA, 19 nt, Artificial Sequence
  Description of Artificial Sequence: Synthetic oligonucleotide
uugccuugugauuucaagu

SEQ ID NO: 3253396 - RNA, 19 nt, Artificial Sequence
  Description of Artificial Sequence: Synthetic oligonucleotide
uucacaucauaagagacuu

SEQ ID NO: 3253397 - RNA, 19 nt, Artificial Sequence
  Description of Artificial Sequence: Synthetic oligonucleotide
augacaaagaaaggacagg

SEQ ID NO: 3253398 - RNA, 19 nt, Artificial Sequence
  Description of Artificial Sequence: Synthetic oligonucleotide
cacaucauaagagacuuuc

SEQ ID NO: 3253399 - RNA, 19 nt, Artificial Sequence
  Description of Artificial Sequence: Synthetic oligonucleotide
acaucauaagagacuuucc

SEQ ID NO: 3253400 - RNA, 19 nt, Artificial Sequence
  Description of Artificial Sequence: Synthetic oligonucleotide
gacuucuucacccauuucu

SEQ ID NO: 3253401 - RNA, 19 nt, Artificial Sequence
  Description of Artificial Sequence: Synthetic oligonucleotide
uaagagacuuucccucccc

SEQ ID NO: 3253402 - RNA, 19 nt, Artificial Sequence
  Description of Artificial Sequence: Synthetic oligonucleotide
auuuagacuucuucaccca

SEQ ID NO: 3253403 - RNA, 19 nt, Artificial Sequence
  Description of Artificial Sequence: Synthetic oligonucleotide
aagucaaaagcaauacaaa

SEQ ID NO: 3253404 - RNA, 19 nt, Artificial Sequence
  Description of Artificial Sequence: Synthetic oligonucleotide
aaugaauaaccaaccacuu

SEQ ID NO: 3253405 - RNA, 19 nt, Artificial Sequence
  Description of Artificial Sequence: Synthetic oligonucleotide
uuuagacuucuucacccau

SEQ ID NO: 3253406 - RNA, 19 nt, Artificial Sequence
  Description of Artificial Sequence: Synthetic oligonucleotide
aaaggacaggggaaacagg

SEQ ID NO: 3253407 - RNA, 19 nt, Artificial Sequence
  Description of Artificial Sequence: Synthetic oligonucleotide
ucaaguuaauucacaucau

SEQ ID NO: 3253408 - RNA, 19 nt, Artificial Sequence
  Description of Artificial Sequence: Synthetic oligonucleotide
ugccuugugauuucaaguu

SEQ ID NO: 3253409 - RNA, 19 nt, Artificial Sequence
  Description of Artificial Sequence: Synthetic oligonucleotide
gauuucaaguuaauucaca

SEQ ID NO: 3253410 - RNA, 19 nt, Artificial Sequence
  Description of Artificial Sequence: Synthetic oligonucleotide
uucuucacccauuucuaaa

SEQ ID NO: 3253411 - RNA, 19 nt, Artificial Sequence
  Description of Artificial Sequence: Synthetic oligonucleotide
auuuguacacucauuaauu

SEQ ID NO: 3253412 - RNA, 19 nt, Artificial Sequence
  Description of Artificial Sequence: Synthetic oligonucleotide
aaccaaccacuuguuugcc

SEQ ID NO: 3253413 - RNA, 19 nt, Artificial Sequence
  Description of Artificial Sequence: Synthetic oligonucleotide
aggggaaacaggauggcag

SEQ ID NO: 3253414 - RNA, 19 nt, Artificial Sequence
  Description of Artificial Sequence: Synthetic oligonucleotide
auucacaucauaagagacu

SEQ ID NO: 3253415 - RNA, 19 nt, Artificial Sequence
  Description of Artificial Sequence: Synthetic oligonucleotide
uagacuucuucacccauuu

SEQ ID NO: 3253416 - RNA, 19 nt, Artificial Sequence
  Description of Artificial Sequence: Synthetic oligonucleotide
acacucauuaauucucaaa

SEQ ID NO: 3253417 - RNA, 19 nt, Artificial Sequence
  Description of Artificial Sequence: Synthetic oligonucleotide
aauaugacgguguaaaucc

SEQ ID NO: 3253418 - RNA, 19 nt, Artificial Sequence
  Description of Artificial Sequence: Synthetic oligonucleotide
uucacaacgggaaauaggg

SEQ ID NO: 3253419 - RNA, 19 nt, Artificial Sequence
  Description of Artificial Sequence: Synthetic oligonucleotide
aauguugagaaccuguuug

SEQ ID NO: 3253420 - RNA, 19 nt, Artificial Sequence
  Description of Artificial Sequence: Synthetic oligonucleotide
uccaaauugacaaucguag

SEQ ID NO: 3253421 - RNA, 19 nt, Artificial Sequence
  Description of Artificial Sequence: Synthetic oligonucleotide
aaucccaaggaauaagagg

SEQ ID NO: 3253422 - RNA, 19 nt, Artificial Sequence
  Description of Artificial Sequence: Synthetic oligonucleotide
uucuuuaugagccuuccgg

SEQ ID NO: 3253423 - RNA, 19 nt, Artificial Sequence
  Description of Artificial Sequence: Synthetic oligonucleotide
uacaggaugguccaaauug

SEQ ID NO: 3253424 - RNA, 19 nt, Artificial Sequence
  Description of Artificial Sequence: Synthetic oligonucleotide
acaucaugaauuccaagcc

SEQ ID NO: 3253425 - RNA, 19 nt, Artificial Sequence
  Description of Artificial Sequence: Synthetic oligonucleotide
aaauaugacgguguaaauc

SEQ ID NO: 3253426 - RNA, 19 nt, Artificial Sequence
  Description of Artificial Sequence: Synthetic oligonucleotide
gacaucaugaauuccaagc

SEQ ID NO: 3253427 - RNA, 19 nt, Artificial Sequence
  Description of Artificial Sequence: Synthetic oligonucleotide
uggaaugccauuuacaacu

SEQ ID NO: 3253428 - RNA, 19 nt, Artificial Sequence
  Description of Artificial Sequence: Synthetic oligonucleotide
aagucuuuguuucuggcag

SEQ ID NO: 3253429 - RNA, 19 nt, Artificial Sequence
  Description of Artificial Sequence: Synthetic oligonucleotide
ucugccauggacaucauga

SEQ ID NO: 3253430 - RNA, 19 nt, Artificial Sequence
  Description of Artificial Sequence: Synthetic oligonucleotide
uuuguuuuggcacaggaua

SEQ ID NO: 3253431 - RNA, 19 nt, Artificial Sequence
  Description of Artificial Sequence: Synthetic oligonucleotide
aauaagaggauuccccgug

SEQ ID NO: 3253432 - RNA, 19 nt, Artificial Sequence
  Description of Artificial Sequence: Synthetic oligonucleotide
ugugguaucgccuucacaa

SEQ ID NO: 3253433 - RNA, 19 nt, Artificial Sequence
  Description of Artificial Sequence: Synthetic oligonucleotide
uauuucaaacuaaccaucc

SEQ ID NO: 3253434 - RNA, 19 nt, Artificial Sequence
  Description of Artificial Sequence: Synthetic oligonucleotide
ucaauuugcuugcaucugg

SEQ ID NO: 3253435 - RNA, 19 nt, Artificial Sequence
  Description of Artificial Sequence: Synthetic oligonucleotide
cucccagaaaauaugacgg

SEQ ID NO: 3253436 - RNA, 19 nt, Artificial Sequence
  Description of Artificial Sequence: Synthetic oligonucleotide
ucuuauucaauuugcuugc

SEQ ID NO: 3253437 - RNA, 19 nt, Artificial Sequence
  Description of Artificial Sequence: Synthetic oligonucleotide
uuaucaaggacccuccgca

SEQ ID NO: 3253438 - RNA, 19 nt, Artificial Sequence
  Description of Artificial Sequence: Synthetic oligonucleotide
uguaaauccuccauauucu

SEQ ID NO: 3253439 - RNA, 19 nt, Artificial Sequence
  Description of Artificial Sequence: Synthetic oligonucleotide
aaauugacaaucguaggug

SEQ ID NO: 3253440 - RNA, 19 nt, Artificial Sequence
  Description of Artificial Sequence: Synthetic oligonucleotide
ucaaacuaaccauccaucc

SEQ ID NO: 3253441 - RNA, 19 nt, Artificial Sequence
  Description of Artificial Sequence: Synthetic oligonucleotide
uuuaugagccuuccggucc

SEQ ID NO: 3253442 - RNA, 19 nt, Artificial Sequence
  Description of Artificial Sequence: Synthetic oligonucleotide
caacuuuccuuuaucaagg

SEQ ID NO: 3253443 - RNA, 19 nt, Artificial Sequence
  Description of Artificial Sequence: Synthetic oligonucleotide
aaggaauaagaggauuccc

SEQ ID NO: 3253444 - RNA, 19 nt, Artificial Sequence
  Description of Artificial Sequence: Synthetic oligonucleotide
aauaaucccaaggaauaag

SEQ ID NO: 3253445 - RNA, 19 nt, Artificial Sequence
  Description of Artificial Sequence: Synthetic oligonucleotide
uagggcaauaaucccaagg

SEQ ID NO: 3253446 - RNA, 19 nt, Artificial Sequence
  Description of Artificial Sequence: Synthetic oligonucleotide
uuauuucuguauuucaaac

SEQ ID NO: 3253447 - RNA, 19 nt, Artificial Sequence
  Description of Artificial Sequence: Synthetic oligonucleotide
ucuguauuucaaacuaacc

SEQ ID NO: 3253448 - RNA, 19 nt, Artificial Sequence
  Description of Artificial Sequence: Synthetic oligonucleotide
gaaaacauugccuagcugu

SEQ ID NO: 3253449 - RNA, 19 nt, Artificial Sequence
  Description of Artificial Sequence: Synthetic oligonucleotide
aacauugccuagcuguaag

SEQ ID NO: 3253450 - RNA, 19 nt, Artificial Sequence
  Description of Artificial Sequence: Synthetic oligonucleotide
aaacuaaccauccauccua

SEQ ID NO: 3253451 - RNA, 19 nt, Artificial Sequence
  Description of Artificial Sequence: Synthetic oligonucleotide
uuuuguucguguuggaaug

SEQ ID NO: 3253452 - RNA, 19 nt, Artificial Sequence
  Description of Artificial Sequence: Synthetic oligonucleotide
aaugccauuuacaacucuc

SEQ ID NO: 3253453 - RNA, 19 nt, Artificial Sequence
  Description of Artificial Sequence: Synthetic oligonucleotide
uuucaaacuaaccauccau

SEQ ID NO: 3253454 - RNA, 19 nt, Artificial Sequence
  Description of Artificial Sequence: Synthetic oligonucleotide
aauugacaaucguaggugu

SEQ ID NO: 3253455 - RNA, 19 nt, Artificial Sequence
  Description of Artificial Sequence: Synthetic oligonucleotide
aggaauaagaggauucccc

SEQ ID NO: 3253456 - RNA, 19 nt, Artificial Sequence
  Description of Artificial Sequence: Synthetic oligonucleotide
uauucaauuugcuugcauc

SEQ ID NO: 3253457 - RNA, 19 nt, Artificial Sequence
  Description of Artificial Sequence: Synthetic oligonucleotide
uaaucuuucaagucuuugu

SEQ ID NO: 3253458 - RNA, 19 nt, Artificial Sequence
  Description of Artificial Sequence: Synthetic oligonucleotide
auucaauuugcuugcaucu

SEQ ID NO: 3253459 - RNA, 19 nt, Artificial Sequence
  Description of Artificial Sequence: Synthetic oligonucleotide
gaaaauaugacgguguaaa

SEQ ID NO: 3253460 - RNA, 19 nt, Artificial Sequence
  Description of Artificial Sequence: Synthetic oligonucleotide
uuuaucaaggacccuccgc

SEQ ID NO: 3253461 - RNA, 19 nt, Artificial Sequence
  Description of Artificial Sequence: Synthetic oligonucleotide
ggaaauagggcaauaaucc

SEQ ID NO: 3253462 - RNA, 19 nt, Artificial Sequence
  Description of Artificial Sequence: Synthetic oligonucleotide
uacguuuuguucguguugg

SEQ ID NO: 3253463 - RNA, 19 nt, Artificial Sequence
  Description of Artificial Sequence: Synthetic oligonucleotide
uguaagaauccaacuuucc

SEQ ID NO: 3253464 - RNA, 19 nt, Artificial Sequence
  Description of Artificial Sequence: Synthetic oligonucleotide
uaaucccaaggaauaagag

SEQ ID NO: 3253465 - RNA, 19 nt, Artificial Sequence
  Description of Artificial Sequence: Synthetic oligonucleotide
uucuguauuucaaacuaac

SEQ ID NO: 3253466 - RNA, 19 nt, Artificial Sequence
  Description of Artificial Sequence: Synthetic oligonucleotide
gauauuacaggauggucca

SEQ ID NO: 3253467 - RNA, 19 nt, Artificial Sequence
  Description of Artificial Sequence: Synthetic oligonucleotide
cuagcuguaagaauccaac

SEQ ID NO: 3253468 - RNA, 19 nt, Artificial Sequence
  Description of Artificial Sequence: Synthetic oligonucleotide
cuguauuucaaacuaacca

SEQ ID NO: 3253469 - RNA, 19 nt, Artificial Sequence
  Description of Artificial Sequence: Synthetic oligonucleotide
uuuguuucuggcaggaaaa

SEQ ID NO: 3253470 - RNA, 19 nt, Artificial Sequence
  Description of Artificial Sequence: Synthetic oligonucleotide
aagaauccaacuuuccuuu

SEQ ID NO: 3253471 - RNA, 19 nt, Artificial Sequence
  Description of Artificial Sequence: Synthetic oligonucleotide
ugguaucgccuucacaacg

SEQ ID NO: 3253472 - RNA, 19 nt, Artificial Sequence
  Description of Artificial Sequence: Synthetic oligonucleotide
uugccuagcuguaagaauc

SEQ ID NO: 3253473 - RNA, 19 nt, Artificial Sequence
  Description of Artificial Sequence: Synthetic oligonucleotide
augaauuccaagccaagcu

SEQ ID NO: 3253474 - RNA, 19 nt, Artificial Sequence
  Description of Artificial Sequence: Synthetic oligonucleotide
ugguccaaauugacaaucg

SEQ ID NO: 3253475 - RNA, 19 nt, Artificial Sequence
  Description of Artificial Sequence: Synthetic oligonucleotide
uugacaaucguaggugugg

SEQ ID NO: 3253476 - RNA, 19 nt, Artificial Sequence
  Description of Artificial Sequence: Synthetic oligonucleotide
aaauagggcaauaauccca

SEQ ID NO: 3253477 - RNA, 19 nt, Artificial Sequence
  Description of Artificial Sequence: Synthetic oligonucleotide
uguuggaaugccauuuaca

SEQ ID NO: 3253478 - RNA, 19 nt, Artificial Sequence
  Description of Artificial Sequence: Synthetic oligonucleotide
cugggaaauguugagaacc

SEQ ID NO: 3253479 - RNA, 19 nt, Artificial Sequence
  Description of Artificial Sequence: Synthetic oligonucleotide
uaaauccuccauauucuug

SEQ ID NO: 3253480 - RNA, 19 nt, Artificial Sequence
  Description of Artificial Sequence: Synthetic oligonucleotide
uucaagucuuuguuucugg

SEQ ID NO: 3253481 - RNA, 19 nt, Artificial Sequence
  Description of Artificial Sequence: Synthetic oligonucleotide
cuucacaacgggaaauagg

SEQ ID NO: 3253482 - RNA, 19 nt, Artificial Sequence
  Description of Artificial Sequence: Synthetic oligonucleotide
agggcaauaaucccaagga

SEQ ID NO: 3253483 - RNA, 19 nt, Artificial Sequence
  Description of Artificial Sequence: Synthetic oligonucleotide
ggaauaagaggauuccccg

SEQ ID NO: 3253484 - RNA, 19 nt, Artificial Sequence
  Description of Artificial Sequence: Synthetic oligonucleotide
uggcacaggauauuacagg

SEQ ID NO: 3253485 - RNA, 19 nt, Artificial Sequence
  Description of Artificial Sequence: Synthetic oligonucleotide
agaggauuccccguguagc

SEQ ID NO: 3253486 - RNA, 19 nt, Artificial Sequence
  Description of Artificial Sequence: Synthetic oligonucleotide
uccaugggcgucaucauca

SEQ ID NO: 3253487 - RNA, 19 nt, Artificial Sequence
  Description of Artificial Sequence: Synthetic oligonucleotide
ucuggcaggaaaacauugc

SEQ ID NO: 3253488 - RNA, 19 nt, Artificial Sequence
  Description of Artificial Sequence: Synthetic oligonucleotide
aucccaaggaauaagagga

SEQ ID NO: 3253489 - RNA, 19 nt, Artificial Sequence
  Description of Artificial Sequence: Synthetic oligonucleotide
aauucuuauucaauuugcu

SEQ ID NO: 3253490 - RNA, 19 nt, Artificial Sequence
  Description of Artificial Sequence: Synthetic oligonucleotide
aagaggauuccccguguag

SEQ ID NO: 3253491 - RNA, 19 nt, Artificial Sequence
  Description of Artificial Sequence: Synthetic oligonucleotide
ucuuuaugagccuuccggu

SEQ ID NO: 3253492 - RNA, 19 nt, Artificial Sequence
  Description of Artificial Sequence: Synthetic oligonucleotide
aaaauaugacgguguaaau

SEQ ID NO: 3253493 - RNA, 19 nt, Artificial Sequence
  Description of Artificial Sequence: Synthetic oligonucleotide
auccuccauauucuugucc

SEQ ID NO: 3253494 - RNA, 19 nt, Artificial Sequence
  Description of Artificial Sequence: Synthetic oligonucleotide
guuggaaugccauuuacaa

SEQ ID NO: 3253495 - RNA, 19 nt, Artificial Sequence
  Description of Artificial Sequence: Synthetic oligonucleotide
cacaggauauuacaggaug

SEQ ID NO: 3253496 - RNA, 19 nt, Artificial Sequence
  Description of Artificial Sequence: Synthetic oligonucleotide
uucuggcaggaaaacauug

SEQ ID NO: 3253497 - RNA, 19 nt, Artificial Sequence
  Description of Artificial Sequence: Synthetic oligonucleotide
cuucauaaucuuucaaguc

SEQ ID NO: 3253498 - RNA, 19 nt, Artificial Sequence
  Description of Artificial Sequence: Synthetic oligonucleotide
auauguuuauuucuguauu

SEQ ID NO: 3253499 - RNA, 19 nt, Artificial Sequence
  Description of Artificial Sequence: Synthetic oligonucleotide
gucaucaucaggauuccgg

SEQ ID NO: 3253500 - RNA, 19 nt, Artificial Sequence
  Description of Artificial Sequence: Synthetic oligonucleotide
ggauauuacaggauggucc

SEQ ID NO: 3253501 - RNA, 19 nt, Artificial Sequence
  Description of Artificial Sequence: Synthetic oligonucleotide
acaacucucaguuguuuug

SEQ ID NO: 3253502 - RNA, 19 nt, Artificial Sequence
  Description of Artificial Sequence: Synthetic oligonucleotide
ugccauuuacaacucucag

SEQ ID NO: 3253503 - RNA, 19 nt, Artificial Sequence
  Description of Artificial Sequence: Synthetic oligonucleotide
ugaauuccaagccaagcuu

SEQ ID NO: 3253504 - RNA, 19 nt, Artificial Sequence
  Description of Artificial Sequence: Synthetic oligonucleotide
ucaugaauuccaagccaag

SEQ ID NO: 3253505 - RNA, 19 nt, Artificial Sequence
  Description of Artificial Sequence: Synthetic oligonucleotide
aauccuccauauucuuguc

SEQ ID NO: 3253506 - RNA, 19 nt, Artificial Sequence
  Description of Artificial Sequence: Synthetic oligonucleotide
uguugagaaccuguuugcg

SEQ ID NO: 3253507 - RNA, 19 nt, Artificial Sequence
  Description of Artificial Sequence: Synthetic oligonucleotide
uccaagccaagcuucauaa

SEQ ID NO: 3253508 - RNA, 19 nt, Artificial Sequence
  Description of Artificial Sequence: Synthetic oligonucleotide
gcucccagaaaauaugacg

SEQ ID NO: 3253509 - RNA, 19 nt, Artificial Sequence
  Description of Artificial Sequence: Synthetic oligonucleotide
guagcaccaagguccaugg

SEQ ID NO: 3253510 - RNA, 19 nt, Artificial Sequence
  Description of Artificial Sequence: Synthetic oligonucleotide
uuuuguuuuggcacaggau

SEQ ID NO: 3253511 - RNA, 19 nt, Artificial Sequence
  Description of Artificial Sequence: Synthetic oligonucleotide
aauuugcuugcaucuggcu

SEQ ID NO: 3253512 - RNA, 19 nt, Artificial Sequence
  Description of Artificial Sequence: Synthetic oligonucleotide
ucaagucuuuguuucuggc

SEQ ID NO: 3253513 - RNA, 19 nt, Artificial Sequence
  Description of Artificial Sequence: Synthetic oligonucleotide
uuugcguuucuccucgccu

SEQ ID NO: 3253514 - RNA, 19 nt, Artificial Sequence
  Description of Artificial Sequence: Synthetic oligonucleotide
agccuuccgguccauagac

SEQ ID NO: 3253515 - RNA, 19 nt, Artificial Sequence
  Description of Artificial Sequence: Synthetic oligonucleotide
aaauguugagaaccuguuu

SEQ ID NO: 3253516 - RNA, 19 nt, Artificial Sequence
  Description of Artificial Sequence: Synthetic oligonucleotide
ugagccuuccgguccauag

SEQ ID NO: 3253517 - RNA, 19 nt, Artificial Sequence
  Description of Artificial Sequence: Synthetic oligonucleotide
uuauagaugagaaugaucc

SEQ ID NO: 3253518 - RNA, 19 nt, Artificial Sequence
  Description of Artificial Sequence: Synthetic oligonucleotide
aaauccaaagacaagaacc

SEQ ID NO: 3253519 - RNA, 19 nt, Artificial Sequence
  Description of Artificial Sequence: Synthetic oligonucleotide
ugauuugccacucugaagg

SEQ ID NO: 3253520 - RNA, 19 nt, Artificial Sequence
  Description of Artificial Sequence: Synthetic oligonucleotide
aaaaccaauacugaggcag

SEQ ID NO: 3253521 - RNA, 19 nt, Artificial Sequence
  Description of Artificial Sequence: Synthetic oligonucleotide
ucaauuauaggauuacucc

SEQ ID NO: 3253522 - RNA, 19 nt, Artificial Sequence
  Description of Artificial Sequence: Synthetic oligonucleotide
aaaacuuuauucuguauca

SEQ ID NO: 3253523 - RNA, 19 nt, Artificial Sequence
  Description of Artificial Sequence: Synthetic oligonucleotide
uaugaugaaaacuuuauuc

SEQ ID NO: 3253524 - RNA, 19 nt, Artificial Sequence
  Description of Artificial Sequence: Synthetic oligonucleotide
aaaguaacacaugauuugc

SEQ ID NO: 3253525 - RNA, 19 nt, Artificial Sequence
  Description of Artificial Sequence: Synthetic oligonucleotide
uuaagugaaaguaacacau

SEQ ID NO: 3253526 - RNA, 19 nt, Artificial Sequence
  Description of Artificial Sequence: Synthetic oligonucleotide
acaaaacucaauuauagga

SEQ ID NO: 3253527 - RNA, 19 nt, Artificial Sequence
  Description of Artificial Sequence: Synthetic oligonucleotide
aagacaagaaccgaucuac

SEQ ID NO: 3253528 - RNA, 19 nt, Artificial Sequence
  Description of Artificial Sequence: Synthetic oligonucleotide
ucuguaucaagguaccugg

SEQ ID NO: 3253529 - RNA, 19 nt, Artificial Sequence
  Description of Artificial Sequence: Synthetic oligonucleotide
auaggauuacuccuugugc

SEQ ID NO: 3253530 - RNA, 19 nt, Artificial Sequence
  Description of Artificial Sequence: Synthetic oligonucleotide
uuauucuguaucaagguac

SEQ ID NO: 3253531 - RNA, 19 nt, Artificial Sequence
  Description of Artificial Sequence: Synthetic oligonucleotide
cuagaugugagcauggcag

SEQ ID NO: 3253532 - RNA, 19 nt, Artificial Sequence
  Description of Artificial Sequence: Synthetic oligonucleotide
gagaaugauccguacaugg

SEQ ID NO: 3253533 - RNA, 19 nt, Artificial Sequence
  Description of Artificial Sequence: Synthetic oligonucleotide
aauccaaagacaagaaccg

SEQ ID NO: 3253534 - RNA, 19 nt, Artificial Sequence
  Description of Artificial Sequence: Synthetic oligonucleotide
gaaaguaacacaugauuug

SEQ ID NO: 3253535 - RNA, 19 nt, Artificial Sequence
  Description of Artificial Sequence: Synthetic oligonucleotide
aagugaaaguaacacauga

SEQ ID NO: 3253536 - RNA, 19 nt, Artificial Sequence
  Description of Artificial Sequence: Synthetic oligonucleotide
aacuuuauucuguaucaag

SEQ ID NO: 3253537 - RNA, 19 nt, Artificial Sequence
  Description of Artificial Sequence: Synthetic oligonucleotide
gaaaacuuuauucuguauc

SEQ ID NO: 3253538 - RNA, 19 nt, Artificial Sequence
  Description of Artificial Sequence: Synthetic oligonucleotide
agcauggcagaauugagac

SEQ ID NO: 3253539 - RNA, 19 nt, Artificial Sequence
  Description of Artificial Sequence: Synthetic oligonucleotide
uuuaagugaaaguaacaca

SEQ ID NO: 3253540 - RNA, 19 nt, Artificial Sequence
  Description of Artificial Sequence: Synthetic oligonucleotide
augaugaaaacuuuauucu

SEQ ID NO: 3253541 - RNA, 19 nt, Artificial Sequence
  Description of Artificial Sequence: Synthetic oligonucleotide
uacaaaacucaauuauagg

SEQ ID NO: 3253542 - RNA, 19 nt, Artificial Sequence
  Description of Artificial Sequence: Synthetic oligonucleotide
uccucugaaauccaaagac

SEQ ID NO: 3253543 - RNA, 19 nt, Artificial Sequence
  Description of Artificial Sequence: Synthetic oligonucleotide
uauaggauuacuccuugug

SEQ ID NO: 3253544 - RNA, 19 nt, Artificial Sequence
  Description of Artificial Sequence: Synthetic oligonucleotide
ugaaaguaacacaugauuu

SEQ ID NO: 3253545 - RNA, 19 nt, Artificial Sequence
  Description of Artificial Sequence: Synthetic oligonucleotide
aauacugaggcaguguucu

SEQ ID NO: 3253546 - RNA, 19 nt, Artificial Sequence
  Description of Artificial Sequence: Synthetic oligonucleotide
ugaugaaaacuuuauucug

SEQ ID NO: 3253547 - RNA, 19 nt, Artificial Sequence
  Description of Artificial Sequence: Synthetic oligonucleotide
uacauggugaauacaaaac

SEQ ID NO: 3253548 - RNA, 19 nt, Artificial Sequence
  Description of Artificial Sequence: Synthetic oligonucleotide
acuuuauucuguaucaagg

SEQ ID NO: 3253549 - RNA, 19 nt, Artificial Sequence
  Description of Artificial Sequence: Synthetic oligonucleotide
cacguuauagaugagaaug

SEQ ID NO: 3253550 - RNA, 19 nt, Artificial Sequence
  Description of Artificial Sequence: Synthetic oligonucleotide
aauugagaccagcagacau

SEQ ID NO: 3253551 - RNA, 19 nt, Artificial Sequence
  Description of Artificial Sequence: Synthetic oligonucleotide
aacgaagcugcguuugggg

SEQ ID NO: 3253552 - RNA, 19 nt, Artificial Sequence
  Description of Artificial Sequence: Synthetic oligonucleotide
uaggauuacuccuugugcc

SEQ ID NO: 3253553 - RNA, 19 nt, Artificial Sequence
  Description of Artificial Sequence: Synthetic oligonucleotide
aacucaauuauaggauuac

SEQ ID NO: 3253554 - RNA, 19 nt, Artificial Sequence
  Description of Artificial Sequence: Synthetic oligonucleotide
agaauugagaccagcagac

SEQ ID NO: 3253555 - RNA, 19 nt, Artificial Sequence
  Description of Artificial Sequence: Synthetic oligonucleotide
ugaauguagcaccugucag

SEQ ID NO: 3253556 - RNA, 19 nt, Artificial Sequence
  Description of Artificial Sequence: Synthetic oligonucleotide
aaaacucaauuauaggauu

SEQ ID NO: 3253557 - RNA, 19 nt, Artificial Sequence
  Description of Artificial Sequence: Synthetic oligonucleotide
auacaaaacucaauuauag

SEQ ID NO: 3253558 - RNA, 19 nt, Artificial Sequence
  Description of Artificial Sequence: Synthetic oligonucleotide
uauagaugagaaugauccg

SEQ ID NO: 3253559 - RNA, 19 nt, Artificial Sequence
  Description of Artificial Sequence: Synthetic oligonucleotide
uauucuguaucaagguacc

SEQ ID NO: 3253560 - RNA, 19 nt, Artificial Sequence
  Description of Artificial Sequence: Synthetic oligonucleotide
cagacaugaauguagcacc

SEQ ID NO: 3253561 - RNA, 19 nt, Artificial Sequence
  Description of Artificial Sequence: Synthetic oligonucleotide
aaaacgaagcugcguuugg

SEQ ID NO: 3253562 - RNA, 19 nt, Artificial Sequence
  Description of Artificial Sequence: Synthetic oligonucleotide
gaaugauccguacauggug

SEQ ID NO: 3253563 - RNA, 19 nt, Artificial Sequence
  Description of Artificial Sequence: Synthetic oligonucleotide
uguuuaagugaaaguaaca

SEQ ID NO: 3253564 - RNA, 19 nt, Artificial Sequence
  Description of Artificial Sequence: Synthetic oligonucleotide
cucaauuauaggauuacuc

SEQ ID NO: 3253565 - RNA, 19 nt, Artificial Sequence
  Description of Artificial Sequence: Synthetic oligonucleotide
ucugaaauccaaagacaag

SEQ ID NO: 3253566 - RNA, 19 nt, Artificial Sequence
  Description of Artificial Sequence: Synthetic oligonucleotide
acauggugaauacaaaacu

SEQ ID NO: 3253567 - RNA, 19 nt, Artificial Sequence
  Description of Artificial Sequence: Synthetic oligonucleotide
guuuaagugaaaguaacac

SEQ ID NO: 3253568 - RNA, 19 nt, Artificial Sequence
  Description of Artificial Sequence: Synthetic oligonucleotide
uggccuuagacacaucucc

SEQ ID NO: 3253569 - RNA, 19 nt, Artificial Sequence
  Description of Artificial Sequence: Synthetic oligonucleotide
aaguaacacaugauuugcc

SEQ ID NO: 3253570 - RNA, 19 nt, Artificial Sequence
  Description of Artificial Sequence: Synthetic oligonucleotide
aguaacacaugauuugcca

SEQ ID NO: 3253571 - RNA, 19 nt, Artificial Sequence
  Description of Artificial Sequence: Synthetic oligonucleotide
uuuauucuguaucaaggua

SEQ ID NO: 3253572 - RNA, 19 nt, Artificial Sequence
  Description of Artificial Sequence: Synthetic oligonucleotide
uggggcacguuauagauga

SEQ ID NO: 3253573 - RNA, 19 nt, Artificial Sequence
  Description of Artificial Sequence: Synthetic oligonucleotide
aauguuuaagugaaaguaa

SEQ ID NO: 3253574 - RNA, 19 nt, Artificial Sequence
  Description of Artificial Sequence: Synthetic oligonucleotide
auguuuaagugaaaguaac

SEQ ID NO: 3253575 - RNA, 19 nt, Artificial Sequence
  Description of Artificial Sequence: Synthetic oligonucleotide
uggcuuaugaugaaaacuu

SEQ ID NO: 3253576 - RNA, 19 nt, Artificial Sequence
  Description of Artificial Sequence: Synthetic oligonucleotide
ucuccucugaaauccaaag

SEQ ID NO: 3253577 - RNA, 19 nt, Artificial Sequence
  Description of Artificial Sequence: Synthetic oligonucleotide
accuggaaaacgaagcugc

SEQ ID NO: 3253578 - RNA, 19 nt, Artificial Sequence
  Description of Artificial Sequence: Synthetic oligonucleotide
ucaagguaccuggaaaacg

SEQ ID NO: 3253579 - RNA, 19 nt, Artificial Sequence
  Description of Artificial Sequence: Synthetic oligonucleotide
ucuggccuuagacacaucu

SEQ ID NO: 3253580 - RNA, 19 nt, Artificial Sequence
  Description of Artificial Sequence: Synthetic oligonucleotide
ugaauacaaaacucaauua

SEQ ID NO: 3253581 - RNA, 19 nt, Artificial Sequence
  Description of Artificial Sequence: Synthetic oligonucleotide
gaaauccaaagacaagaac

SEQ ID NO: 3253582 - RNA, 19 nt, Artificial Sequence
  Description of Artificial Sequence: Synthetic oligonucleotide
cauggugaauacaaaacuc

SEQ ID NO: 3253583 - RNA, 19 nt, Artificial Sequence
  Description of Artificial Sequence: Synthetic oligonucleotide
aauacaaaacucaauuaua

SEQ ID NO: 3253584 - RNA, 19 nt, Artificial Sequence
  Description of Artificial Sequence: Synthetic oligonucleotide
gaauacaaaacucaauuau

SEQ ID NO: 3253585 - RNA, 19 nt, Artificial Sequence
  Description of Artificial Sequence: Synthetic oligonucleotide
accaccaauguuuaaguga

SEQ ID NO: 3253586 - RNA, 19 nt, Artificial Sequence
  Description of Artificial Sequence: Synthetic oligonucleotide
acugaggcaguguucuggc

SEQ ID NO: 3253587 - RNA, 19 nt, Artificial Sequence
  Description of Artificial Sequence: Synthetic oligonucleotide
ucugaaggcuagaugugag

SEQ ID NO: 3253588 - RNA, 19 nt, Artificial Sequence
  Description of Artificial Sequence: Synthetic oligonucleotide
uaagugaaaguaacacaug

SEQ ID NO: 3253589 - RNA, 19 nt, Artificial Sequence
  Description of Artificial Sequence: Synthetic oligonucleotide
auuauaggauuacuccuug

SEQ ID NO: 3253590 - RNA, 19 nt, Artificial Sequence
  Description of Artificial Sequence: Synthetic oligonucleotide
ugaaauccaaagacaagaa

SEQ ID NO: 3253591 - RNA, 19 nt, Artificial Sequence
  Description of Artificial Sequence: Synthetic oligonucleotide
accaauguuuaagugaaag

SEQ ID NO: 3253592 - RNA, 19 nt, Artificial Sequence
  Description of Artificial Sequence: Synthetic oligonucleotide
uacuccuugugccagguac

SEQ ID NO: 3253593 - RNA, 19 nt, Artificial Sequence
  Description of Artificial Sequence: Synthetic oligonucleotide
augagaaugauccguacau

SEQ ID NO: 3253594 - RNA, 19 nt, Artificial Sequence
  Description of Artificial Sequence: Synthetic oligonucleotide
uaacacaugauuugccacu

SEQ ID NO: 3253595 - RNA, 19 nt, Artificial Sequence
  Description of Artificial Sequence: Synthetic oligonucleotide
uguagcaccugucaguuuu

SEQ ID NO: 3253596 - RNA, 19 nt, Artificial Sequence
  Description of Artificial Sequence: Synthetic oligonucleotide
acgaagcugcguuuggggc

SEQ ID NO: 3253597 - RNA, 19 nt, Artificial Sequence
  Description of Artificial Sequence: Synthetic oligonucleotide
uaucaagguaccuggaaaa

SEQ ID NO: 3253598 - RNA, 19 nt, Artificial Sequence
  Description of Artificial Sequence: Synthetic oligonucleotide
uuagacacaucuccucuga

SEQ ID NO: 3253599 - RNA, 19 nt, Artificial Sequence
  Description of Artificial Sequence: Synthetic oligonucleotide
augaauguagcaccuguca

SEQ ID NO: 3253600 - RNA, 19 nt, Artificial Sequence
  Description of Artificial Sequence: Synthetic oligonucleotide
aacacaugauuugccacuc

SEQ ID NO: 3253601 - RNA, 19 nt, Artificial Sequence
  Description of Artificial Sequence: Synthetic oligonucleotide
uggaaaacgaagcugcguu

SEQ ID NO: 3253602 - RNA, 19 nt, Artificial Sequence
  Description of Artificial Sequence: Synthetic oligonucleotide
uuaugaugaaaacuuuauu

SEQ ID NO: 3253603 - RNA, 19 nt, Artificial Sequence
  Description of Artificial Sequence: Synthetic oligonucleotide
uccaaagacaagaaccgau

SEQ ID NO: 3253604 - RNA, 19 nt, Artificial Sequence
  Description of Artificial Sequence: Synthetic oligonucleotide
auagaugagaaugauccgu

SEQ ID NO: 3253605 - RNA, 19 nt, Artificial Sequence
  Description of Artificial Sequence: Synthetic oligonucleotide
aaagacaagaaccgaucua

SEQ ID NO: 3253606 - RNA, 19 nt, Artificial Sequence
  Description of Artificial Sequence: Synthetic oligonucleotide
ugaaggcuagaugugagca

SEQ ID NO: 3253607 - RNA, 19 nt, Artificial Sequence
  Description of Artificial Sequence: Synthetic oligonucleotide
agaugagaaugauccguac

SEQ ID NO: 3253608 - RNA, 19 nt, Artificial Sequence
  Description of Artificial Sequence: Synthetic oligonucleotide
cacaucuccucugaaaucc

SEQ ID NO: 3253609 - RNA, 19 nt, Artificial Sequence
  Description of Artificial Sequence: Synthetic oligonucleotide
uguaucaagguaccuggaa

SEQ ID NO: 3253610 - RNA, 19 nt, Artificial Sequence
  Description of Artificial Sequence: Synthetic oligonucleotide
ugagcauggcagaauugag

SEQ ID NO: 3253611 - RNA, 19 nt, Artificial Sequence
  Description of Artificial Sequence: Synthetic oligonucleotide
aguguucuggccuuagaca

SEQ ID NO: 3253612 - RNA, 19 nt, Artificial Sequence
  Description of Artificial Sequence: Synthetic oligonucleotide
uucuguaucaagguaccug

SEQ ID NO: 3253613 - RNA, 19 nt, Artificial Sequence
  Description of Artificial Sequence: Synthetic oligonucleotide
aaugauccguacaugguga

SEQ ID NO: 3253614 - RNA, 19 nt, Artificial Sequence
  Description of Artificial Sequence: Synthetic oligonucleotide
aaggcuagaugugagcaug

SEQ ID NO: 3253615 - RNA, 19 nt, Artificial Sequence
  Description of Artificial Sequence: Synthetic oligonucleotide
aauuauaggauuacuccuu

SEQ ID NO: 3253616 - RNA, 19 nt, Artificial Sequence
  Description of Artificial Sequence: Synthetic oligonucleotide
ugaggcaguguucuggccu

SEQ ID NO: 3253617 - RNA, 19 nt, Artificial Sequence
  Description of Artificial Sequence: Synthetic oligonucleotide
uauagaaucaccaagcacc

SEQ ID NO: 3253618 - RNA, 19 nt, Artificial Sequence
  Description of Artificial Sequence: Synthetic oligonucleotide
uaagauaagaggaagaagc

SEQ ID NO: 3253619 - RNA, 19 nt, Artificial Sequence
  Description of Artificial Sequence: Synthetic oligonucleotide
uugagcaaaacuaauaaag

SEQ ID NO: 3253620 - RNA, 19 nt, Artificial Sequence
  Description of Artificial Sequence: Synthetic oligonucleotide
uacgaagauaagaagaucg

SEQ ID NO: 3253621 - RNA, 19 nt, Artificial Sequence
  Description of Artificial Sequence: Synthetic oligonucleotide
uguaggaugaguaaaagcu

SEQ ID NO: 3253622 - RNA, 19 nt, Artificial Sequence
  Description of Artificial Sequence: Synthetic oligonucleotide
uacaacaugcucaucaugg

SEQ ID NO: 3253623 - RNA, 19 nt, Artificial Sequence
  Description of Artificial Sequence: Synthetic oligonucleotide
ucuuaaauguccaacaaga

SEQ ID NO: 3253624 - RNA, 19 nt, Artificial Sequence
  Description of Artificial Sequence: Synthetic oligonucleotide
ucuuauaugugcaauaagu

SEQ ID NO: 3253625 - RNA, 19 nt, Artificial Sequence
  Description of Artificial Sequence: Synthetic oligonucleotide
uguacguaagguaagaaga

SEQ ID NO: 3253626 - RNA, 19 nt, Artificial Sequence
  Description of Artificial Sequence: Synthetic oligonucleotide
ucguaugugaccuagcagg

SEQ ID NO: 3253627 - RNA, 19 nt, Artificial Sequence
  Description of Artificial Sequence: Synthetic oligonucleotide
aaagcaagaacccucgucu

SEQ ID NO: 3253628 - RNA, 19 nt, Artificial Sequence
  Description of Artificial Sequence: Synthetic oligonucleotide
ugugaguucaugaauacga

SEQ ID NO: 3253629 - RNA, 19 nt, Artificial Sequence
  Description of Artificial Sequence: Synthetic oligonucleotide
uuuucaaaugcacauuaag

SEQ ID NO: 3253630 - RNA, 19 nt, Artificial Sequence
  Description of Artificial Sequence: Synthetic oligonucleotide
uucuuuaaguggcagaaag

SEQ ID NO: 3253631 - RNA, 19 nt, Artificial Sequence
  Description of Artificial Sequence: Synthetic oligonucleotide
uguauuuggaguacuaaug

SEQ ID NO: 3253632 - RNA, 19 nt, Artificial Sequence
  Description of Artificial Sequence: Synthetic oligonucleotide
uauguuacacucaaagggc

SEQ ID NO: 3253633 - RNA, 19 nt, Artificial Sequence
  Description of Artificial Sequence: Synthetic oligonucleotide
uugcacauaccuuacaccg

SEQ ID NO: 3253634 - RNA, 19 nt, Artificial Sequence
  Description of Artificial Sequence: Synthetic oligonucleotide
ucuuauguguuuaguaagg

SEQ ID NO: 3253635 - RNA, 19 nt, Artificial Sequence
  Description of Artificial Sequence: Synthetic oligonucleotide
aaaagcaagaacccucguc

SEQ ID NO: 3253636 - RNA, 19 nt, Artificial Sequence
  Description of Artificial Sequence: Synthetic oligonucleotide
uuaaauguccaacaagaga

SEQ ID NO: 3253637 - RNA, 19 nt, Artificial Sequence
  Description of Artificial Sequence: Synthetic oligonucleotide
aguggucacauucaaaggg

SEQ ID NO: 3253638 - RNA, 19 nt, Artificial Sequence
  Description of Artificial Sequence: Synthetic oligonucleotide
guuuauuaaggccugagug

SEQ ID NO: 3253639 - RNA, 19 nt, Artificial Sequence
  Description of Artificial Sequence: Synthetic oligonucleotide
uuguauagaaucaccaagc

SEQ ID NO: 3253640 - RNA, 19 nt, Artificial Sequence
  Description of Artificial Sequence: Synthetic oligonucleotide
aaaacuaauaaagccuuuc

SEQ ID NO: 3253641 - RNA, 19 nt, Artificial Sequence
  Description of Artificial Sequence: Synthetic oligonucleotide
acaguggucacauucaaag

SEQ ID NO: 3253642 - RNA, 19 nt, Artificial Sequence
  Description of Artificial Sequence: Synthetic oligonucleotide
auaccuuacaccgaaaggg

SEQ ID NO: 3253643 - RNA, 19 nt, Artificial Sequence
  Description of Artificial Sequence: Synthetic oligonucleotide
ucguaaauguauaguaagg

SEQ ID NO: 3253644 - RNA, 19 nt, Artificial Sequence
  Description of Artificial Sequence: Synthetic oligonucleotide
ucgcaugugaacucgaagg

SEQ ID NO: 3253645 - RNA, 19 nt, Artificial Sequence
  Description of Artificial Sequence: Synthetic oligonucleotide
uauguguuuaguaaggcau

SEQ ID NO: 3253646 - RNA, 19 nt, Artificial Sequence
  Description of Artificial Sequence: Synthetic oligonucleotide
ugugacuucuuauaugugc

SEQ ID NO: 3253647 - RNA, 19 nt, Artificial Sequence
  Description of Artificial Sequence: Synthetic oligonucleotide
aaggauuuugugcacaccu

SEQ ID NO: 3253648 - RNA, 19 nt, Artificial Sequence
  Description of Artificial Sequence: Synthetic oligonucleotide
ugaauuuucaaaugcacau

SEQ ID NO: 3253649 - RNA, 19 nt, Artificial Sequence
  Description of Artificial Sequence: Synthetic oligonucleotide
uauguguuccacaaggcca

SEQ ID NO: 3253650 - RNA, 19 nt, Artificial Sequence
  Description of Artificial Sequence: Synthetic oligonucleotide
ugaccuagcagguaagagg

SEQ ID NO: 3253651 - RNA, 19 nt, Artificial Sequence
  Description of Artificial Sequence: Synthetic oligonucleotide
aagugaaugguuuuacaca

SEQ ID NO: 3253652 - RNA, 19 nt, Artificial Sequence
  Description of Artificial Sequence: Synthetic oligonucleotide
guuaguugagcaaagcugg

SEQ ID NO: 3253653 - RNA, 19 nt, Artificial Sequence
  Description of Artificial Sequence: Synthetic oligonucleotide
auacuguacacugaaaggg

SEQ ID NO: 3253654 - RNA, 19 nt, Artificial Sequence
  Description of Artificial Sequence: Synthetic oligonucleotide
ugaauacgaagauaagaag

SEQ ID NO: 3253655 - RNA, 19 nt, Artificial Sequence
  Description of Artificial Sequence: Synthetic oligonucleotide
uccaacaagagaugaagag

SEQ ID NO: 3253656 - RNA, 19 nt, Artificial Sequence
  Description of Artificial Sequence: Synthetic oligonucleotide
uuuaguaaggcaugagcgc

SEQ ID NO: 3253657 - RNA, 19 nt, Artificial Sequence
  Description of Artificial Sequence: Synthetic oligonucleotide
uaaggcaugaggaauuucu

SEQ ID NO: 3253658 - RNA, 19 nt, Artificial Sequence
  Description of Artificial Sequence: Synthetic oligonucleotide
ugugaauuuucaaaugcac

SEQ ID NO: 3253659 - RNA, 19 nt, Artificial Sequence
  Description of Artificial Sequence: Synthetic oligonucleotide
caacaagagaugaagagug

SEQ ID NO: 3253660 - RNA, 19 nt, Artificial Sequence
  Description of Artificial Sequence: Synthetic oligonucleotide
aaggcaugagcgcucaggg

SEQ ID NO: 3253661 - RNA, 19 nt, Artificial Sequence
  Description of Artificial Sequence: Synthetic oligonucleotide
gauuaaggaaaguuuuccc

SEQ ID NO: 3253662 - RNA, 19 nt, Artificial Sequence
  Description of Artificial Sequence: Synthetic oligonucleotide
uuccacauauuauacacug

SEQ ID NO: 3253663 - RNA, 19 nt, Artificial Sequence
  Description of Artificial Sequence: Synthetic oligonucleotide
uuauguguuccacaaggcc

SEQ ID NO: 3253664 - RNA, 19 nt, Artificial Sequence
  Description of Artificial Sequence: Synthetic oligonucleotide
agugggaauuacaacaugc

SEQ ID NO: 3253665 - RNA, 19 nt, Artificial Sequence
  Description of Artificial Sequence: Synthetic oligonucleotide
guagaaguuucuuuaagug

SEQ ID NO: 3253666 - RNA, 19 nt, Artificial Sequence
  Description of Artificial Sequence: Synthetic oligonucleotide
aaagcuugcgcacacugcu

SEQ ID NO: 3253667 - RNA, 19 nt, Artificial Sequence
  Description of Artificial Sequence: Synthetic oligonucleotide
ugaacucgaagguaugagg

SEQ ID NO: 3253668 - RNA, 19 nt, Artificial Sequence
  Description of Artificial Sequence: Synthetic oligonucleotide
uccguaaauguuuauuaag

SEQ ID NO: 3253669 - RNA, 19 nt, Artificial Sequence
  Description of Artificial Sequence: Synthetic oligonucleotide
uuagcacaugcuuaguaag

SEQ ID NO: 3253670 - RNA, 19 nt, Artificial Sequence
  Description of Artificial Sequence: Synthetic oligonucleotide
uguauagaaucaccaagca

SEQ ID NO: 3253671 - RNA, 19 nt, Artificial Sequence
  Description of Artificial Sequence: Synthetic oligonucleotide
gaauacgaagauaagaaga

SEQ ID NO: 3253672 - RNA, 19 nt, Artificial Sequence
  Description of Artificial Sequence: Synthetic oligonucleotide
ugauuaaggaaaguuuucc

SEQ ID NO: 3253673 - RNA, 19 nt, Artificial Sequence
  Description of Artificial Sequence: Synthetic oligonucleotide
uaaagguccuugcacauac

SEQ ID NO: 3253674 - RNA, 19 nt, Artificial Sequence
  Description of Artificial Sequence: Synthetic oligonucleotide
uuuugugcacaccuuacac

SEQ ID NO: 3253675 - RNA, 19 nt, Artificial Sequence
  Description of Artificial Sequence: Synthetic oligonucleotide
aaucugagggcaugaaucu

SEQ ID NO: 3253676 - RNA, 19 nt, Artificial Sequence
  Description of Artificial Sequence: Synthetic oligonucleotide
ucucauauguucuguaaga

SEQ ID NO: 3253677 - RNA, 19 nt, Artificial Sequence
  Description of Artificial Sequence: Synthetic oligonucleotide
aauacgaagauaagaagau

SEQ ID NO: 3253678 - RNA, 19 nt, Artificial Sequence
  Description of Artificial Sequence: Synthetic oligonucleotide
aaggauucuuccaaaagug

SEQ ID NO: 3253679 - RNA, 19 nt, Artificial Sequence
  Description of Artificial Sequence: Synthetic oligonucleotide
uguguuuccguaaauguuu

SEQ ID NO: 3253680 - RNA, 19 nt, Artificial Sequence
  Description of Artificial Sequence: Synthetic oligonucleotide
uguccaacaagagaugaag

SEQ ID NO: 3253681 - RNA, 19 nt, Artificial Sequence
  Description of Artificial Sequence: Synthetic oligonucleotide
aaguguuaucuucaguaga

SEQ ID NO: 3253682 - RNA, 19 nt, Artificial Sequence
  Description of Artificial Sequence: Synthetic oligonucleotide
uucuaaagguccuugcaca

SEQ ID NO: 3253683 - RNA, 19 nt, Artificial Sequence
  Description of Artificial Sequence: Synthetic oligonucleotide
caaaaguggacauuuucug

SEQ ID NO: 3253684 - RNA, 19 nt, Artificial Sequence
  Description of Artificial Sequence: Synthetic oligonucleotide
uaugugaccuagcagguaa

SEQ ID NO: 3253685 - RNA, 19 nt, Artificial Sequence
  Description of Artificial Sequence: Synthetic oligonucleotide
agggcaugaaucuucacug

SEQ ID NO: 3253686 - RNA, 19 nt, Artificial Sequence
  Description of Artificial Sequence: Synthetic oligonucleotide
uagcacaugcuuaguaagg

SEQ ID NO: 3253687 - RNA, 19 nt, Artificial Sequence
  Description of Artificial Sequence: Synthetic oligonucleotide
uguauaguaaggccugaac

SEQ ID NO: 3253688 - RNA, 19 nt, Artificial Sequence
  Description of Artificial Sequence: Synthetic oligonucleotide
ugaacgagcagugaagucu

SEQ ID NO: 3253689 - RNA, 19 nt, Artificial Sequence
  Description of Artificial Sequence: Synthetic oligonucleotide
ugaggguugaauaaagguu

SEQ ID NO: 3253690 - RNA, 19 nt, Artificial Sequence
  Description of Artificial Sequence: Synthetic oligonucleotide
uuuccguaaauguuuauua

SEQ ID NO: 3253691 - RNA, 19 nt, Artificial Sequence
  Description of Artificial Sequence: Synthetic oligonucleotide
uauuuggaguacuaaugug

SEQ ID NO: 3253692 - RNA, 19 nt, Artificial Sequence
  Description of Artificial Sequence: Synthetic oligonucleotide
aaguacuaacugauuaagg

SEQ ID NO: 3253693 - RNA, 19 nt, Artificial Sequence
  Description of Artificial Sequence: Synthetic oligonucleotide
gcuuaguaaggccugaacg

SEQ ID NO: 3253694 - RNA, 19 nt, Artificial Sequence
  Description of Artificial Sequence: Synthetic oligonucleotide
aaucaccaagcaccccucc

SEQ ID NO: 3253695 - RNA, 19 nt, Artificial Sequence
  Description of Artificial Sequence: Synthetic oligonucleotide
uuucguaaguguaucguaa

SEQ ID NO: 3253696 - RNA, 19 nt, Artificial Sequence
  Description of Artificial Sequence: Synthetic oligonucleotide
aaaggauuuugugcacacc

SEQ ID NO: 3253697 - RNA, 19 nt, Artificial Sequence
  Description of Artificial Sequence: Synthetic oligonucleotide
acauaccuuacaccgaaag

SEQ ID NO: 3253698 - RNA, 19 nt, Artificial Sequence
  Description of Artificial Sequence: Synthetic oligonucleotide
ugugccugaaguacuaacu

SEQ ID NO: 3253699 - RNA, 19 nt, Artificial Sequence
  Description of Artificial Sequence: Synthetic oligonucleotide
cuaaugugaaucugagggc

SEQ ID NO: 3253700 - RNA, 19 nt, Artificial Sequence
  Description of Artificial Sequence: Synthetic oligonucleotide
auagaaucaccaagcaccc

SEQ ID NO: 3253701 - RNA, 19 nt, Artificial Sequence
  Description of Artificial Sequence: Synthetic oligonucleotide
ugugaauucgaaagugagu

SEQ ID NO: 3253702 - RNA, 19 nt, Artificial Sequence
  Description of Artificial Sequence: Synthetic oligonucleotide
gauaagaagaucguguaaa

SEQ ID NO: 3253703 - RNA, 19 nt, Artificial Sequence
  Description of Artificial Sequence: Synthetic oligonucleotide
aauuagcacaugcuuagua

SEQ ID NO: 3253704 - RNA, 19 nt, Artificial Sequence
  Description of Artificial Sequence: Synthetic oligonucleotide
cauaccuuacaccgaaagg

SEQ ID NO: 3253705 - RNA, 19 nt, Artificial Sequence
  Description of Artificial Sequence: Synthetic oligonucleotide
aguuaguugagcaaagcug

SEQ ID NO: 3253706 - RNA, 19 nt, Artificial Sequence
  Description of Artificial Sequence: Synthetic oligonucleotide
gaaucugagggcaugaauc

SEQ ID NO: 3253707 - RNA, 19 nt, Artificial Sequence
  Description of Artificial Sequence: Synthetic oligonucleotide
uguucuuauguguuuagua

SEQ ID NO: 3253708 - RNA, 19 nt, Artificial Sequence
  Description of Artificial Sequence: Synthetic oligonucleotide
gugaauucgaaagugaguc

SEQ ID NO: 3253709 - RNA, 19 nt, Artificial Sequence
  Description of Artificial Sequence: Synthetic oligonucleotide
uaugcuuucguaaguguau

SEQ ID NO: 3253710 - RNA, 19 nt, Artificial Sequence
  Description of Artificial Sequence: Synthetic oligonucleotide
uucaguuaguugagcaaag

SEQ ID NO: 3253711 - RNA, 19 nt, Artificial Sequence
  Description of Artificial Sequence: Synthetic oligonucleotide
uaaguguaucguaagccac

SEQ ID NO: 3253712 - RNA, 19 nt, Artificial Sequence
  Description of Artificial Sequence: Synthetic oligonucleotide
auuucuaaagguccuugca

SEQ ID NO: 3253713 - RNA, 19 nt, Artificial Sequence
  Description of Artificial Sequence: Synthetic oligonucleotide
uuuuaaggcaugaggaauu

SEQ ID NO: 3253714 - RNA, 19 nt, Artificial Sequence
  Description of Artificial Sequence: Synthetic oligonucleotide
guguacguaagguaagaag

SEQ ID NO: 3253715 - RNA, 19 nt, Artificial Sequence
  Description of Artificial Sequence: Synthetic oligonucleotide
uucaccaugagaagcacua

SEQ ID NO: 3253716 - RNA, 19 nt, Artificial Sequence
  Description of Artificial Sequence: Synthetic oligonucleotide
cucugauuuguggagaucc

SEQ ID NO: 3253717 - RNA, 19 nt, Artificial Sequence
  Description of Artificial Sequence: Synthetic oligonucleotide
ucauuaaacagcuugcuag

SEQ ID NO: 3253718 - RNA, 19 nt, Artificial Sequence
  Description of Artificial Sequence: Synthetic oligonucleotide
uagauauagaaguagagcu

SEQ ID NO: 3253719 - RNA, 19 nt, Artificial Sequence
  Description of Artificial Sequence: Synthetic oligonucleotide
uauugguuuacucaaguca

SEQ ID NO: 3253720 - RNA, 19 nt, Artificial Sequence
  Description of Artificial Sequence: Synthetic oligonucleotide
uuaucuauugguuuacuca

SEQ ID NO: 3253721 - RNA, 19 nt, Artificial Sequence
  Description of Artificial Sequence: Synthetic oligonucleotide
uguagauauagaaguagag

SEQ ID NO: 3253722 - RNA, 19 nt, Artificial Sequence
  Description of Artificial Sequence: Synthetic oligonucleotide
uuuguauauccuuuuaucu

SEQ ID NO: 3253723 - RNA, 19 nt, Artificial Sequence
  Description of Artificial Sequence: Synthetic oligonucleotide
uuccucauuaaacagcuug

SEQ ID NO: 3253724 - RNA, 19 nt, Artificial Sequence
  Description of Artificial Sequence: Synthetic oligonucleotide
agaaguagagcucccggcc

SEQ ID NO: 3253725 - RNA, 19 nt, Artificial Sequence
  Description of Artificial Sequence: Synthetic oligonucleotide
uugaagucaugacagguag

SEQ ID NO: 3253726 - RNA, 19 nt, Artificial Sequence
  Description of Artificial Sequence: Synthetic oligonucleotide
uuugauggggucuaugagc

SEQ ID NO: 3253727 - RNA, 19 nt, Artificial Sequence
  Description of Artificial Sequence: Synthetic oligonucleotide
uauccuuuuaucuauuggu

SEQ ID NO: 3253728 - RNA, 19 nt, Artificial Sequence
  Description of Artificial Sequence: Synthetic oligonucleotide
gauauagaaguagagcucc

SEQ ID NO: 3253729 - RNA, 19 nt, Artificial Sequence
  Description of Artificial Sequence: Synthetic oligonucleotide
guuuacucaagucagcagc

SEQ ID NO: 3253730 - RNA, 19 nt, Artificial Sequence
  Description of Artificial Sequence: Synthetic oligonucleotide
ugcggaaaagcccacuagg

SEQ ID NO: 3253731 - RNA, 19 nt, Artificial Sequence
  Description of Artificial Sequence: Synthetic oligonucleotide
auauccuuuuaucuauugg

SEQ ID NO: 3253732 - RNA, 19 nt, Artificial Sequence
  Description of Artificial Sequence: Synthetic oligonucleotide
uuuacucaagucagcagcc

SEQ ID NO: 3253733 - RNA, 19 nt, Artificial Sequence
  Description of Artificial Sequence: Synthetic oligonucleotide
uaaacagcuugcuaguucu

SEQ ID NO: 3253734 - RNA, 19 nt, Artificial Sequence
  Description of Artificial Sequence: Synthetic oligonucleotide
uguauauccuuuuaucuau

SEQ ID NO: 3253735 - RNA, 19 nt, Artificial Sequence
  Description of Artificial Sequence: Synthetic oligonucleotide
agucaugacagguaggcug

SEQ ID NO: 3253736 - RNA, 19 nt, Artificial Sequence
  Description of Artificial Sequence: Synthetic oligonucleotide
uuguagauauagaaguaga

SEQ ID NO: 3253737 - RNA, 19 nt, Artificial Sequence
  Description of Artificial Sequence: Synthetic oligonucleotide
uuuugauggggucuaugag

SEQ ID NO: 3253738 - RNA, 19 nt, Artificial Sequence
  Description of Artificial Sequence: Synthetic oligonucleotide
auagaaguagagcucccgg

SEQ ID NO: 3253739 - RNA, 19 nt, Artificial Sequence
  Description of Artificial Sequence: Synthetic oligonucleotide
cuuuguauauccuuuuauc

SEQ ID NO: 3253740 - RNA, 19 nt, Artificial Sequence
  Description of Artificial Sequence: Synthetic oligonucleotide
ugcuguggcuguuaggugg

SEQ ID NO: 3253741 - RNA, 19 nt, Artificial Sequence
  Description of Artificial Sequence: Synthetic oligonucleotide
uaucuauugguuuacucaa

SEQ ID NO: 3253742 - RNA, 19 nt, Artificial Sequence
  Description of Artificial Sequence: Synthetic oligonucleotide
ucuauugguuuacucaagu

SEQ ID NO: 3253743 - RNA, 19 nt, Artificial Sequence
  Description of Artificial Sequence: Synthetic oligonucleotide
guagauauagaaguagagc

SEQ ID NO: 3253744 - RNA, 19 nt, Artificial Sequence
  Description of Artificial Sequence: Synthetic oligonucleotide
gaagucaugacagguaggc

SEQ ID NO: 3253745 - RNA, 19 nt, Artificial Sequence
  Description of Artificial Sequence: Synthetic oligonucleotide
uugauggggucuaugagcu

SEQ ID NO: 3253746 - RNA, 19 nt, Artificial Sequence
  Description of Artificial Sequence: Synthetic oligonucleotide
uguguuccuuuguauaucc

SEQ ID NO: 3253747 - RNA, 19 nt, Artificial Sequence
  Description of Artificial Sequence: Synthetic oligonucleotide
gaaaagcccacuaggagag

SEQ ID NO: 3253748 - RNA, 19 nt, Artificial Sequence
  Description of Artificial Sequence: Synthetic oligonucleotide
auugguuuacucaagucag

SEQ ID NO: 3253749 - RNA, 19 nt, Artificial Sequence
  Description of Artificial Sequence: Synthetic oligonucleotide
aagucagcagccuugcgga

SEQ ID NO: 3253750 - RNA, 19 nt, Artificial Sequence
  Description of Artificial Sequence: Synthetic oligonucleotide
uccucauuaaacagcuugc

SEQ ID NO: 3253751 - RNA, 19 nt, Artificial Sequence
  Description of Artificial Sequence: Synthetic oligonucleotide
cuuguagauauagaaguag

SEQ ID NO: 3253752 - RNA, 19 nt, Artificial Sequence
  Description of Artificial Sequence: Synthetic oligonucleotide
gauggggucuaugagcugg

SEQ ID NO: 3253753 - RNA, 19 nt, Artificial Sequence
  Description of Artificial Sequence: Synthetic oligonucleotide
caagucagcagccuugcgg

SEQ ID NO: 3253754 - RNA, 19 nt, Artificial Sequence
  Description of Artificial Sequence: Synthetic oligonucleotide
uuuaucuauugguuuacuc

SEQ ID NO: 3253755 - RNA, 19 nt, Artificial Sequence
  Description of Artificial Sequence: Synthetic oligonucleotide
uuaaacagcuugcuaguuc

SEQ ID NO: 3253756 - RNA, 19 nt, Artificial Sequence
  Description of Artificial Sequence: Synthetic oligonucleotide
uauauccuuuuaucuauug

SEQ ID NO: 3253757 - RNA, 19 nt, Artificial Sequence
  Description of Artificial Sequence: Synthetic oligonucleotide
uauagaaguagagcucccg

SEQ ID NO: 3253758 - RNA, 19 nt, Artificial Sequence
  Description of Artificial Sequence: Synthetic oligonucleotide
uguuaggugguugaaguca

SEQ ID NO: 3253759 - RNA, 19 nt, Artificial Sequence
  Description of Artificial Sequence: Synthetic oligonucleotide
ucugcuguggcuguuaggu

SEQ ID NO: 3253760 - RNA, 19 nt, Artificial Sequence
  Description of Artificial Sequence: Synthetic oligonucleotide
uuguauauccuuuuaucua

SEQ ID NO: 3253761 - RNA, 19 nt, Artificial Sequence
  Description of Artificial Sequence: Synthetic oligonucleotide
uaugagcuggacuuggccu

SEQ ID NO: 3253762 - RNA, 19 nt, Artificial Sequence
  Description of Artificial Sequence: Synthetic oligonucleotide
agacacuuucugcuguggc

SEQ ID NO: 3253763 - RNA, 19 nt, Artificial Sequence
  Description of Artificial Sequence: Synthetic oligonucleotide
ugaagucaugacagguagg

SEQ ID NO: 3253764 - RNA, 19 nt, Artificial Sequence
  Description of Artificial Sequence: Synthetic oligonucleotide
gugguugaagucaugacag

SEQ ID NO: 3253765 - RNA, 19 nt, Artificial Sequence
  Description of Artificial Sequence: Synthetic oligonucleotide
agauauagaaguagagcuc

SEQ ID NO: 3253766 - RNA, 19 nt, Artificial Sequence
  Description of Artificial Sequence: Synthetic oligonucleotide
uagaaguagagcucccggc

SEQ ID NO: 3253767 - RNA, 19 nt, Artificial Sequence
  Description of Artificial Sequence: Synthetic oligonucleotide
aaagcccacuaggagagag

SEQ ID NO: 3253768 - RNA, 19 nt, Artificial Sequence
  Description of Artificial Sequence: Synthetic oligonucleotide
aggagagagacacuuucug

SEQ ID NO: 3253769 - RNA, 19 nt, Artificial Sequence
  Description of Artificial Sequence: Synthetic oligonucleotide
cuaggagagagacacuuuc

SEQ ID NO: 3253770 - RNA, 19 nt, Artificial Sequence
  Description of Artificial Sequence: Synthetic oligonucleotide
gacagguaggcuguguucc

SEQ ID NO: 3253771 - RNA, 19 nt, Artificial Sequence
  Description of Artificial Sequence: Synthetic oligonucleotide
uuggccugcggaaaagccc

SEQ ID NO: 3253772 - RNA, 19 nt, Artificial Sequence
  Description of Artificial Sequence: Synthetic oligonucleotide
aggugguugaagucaugac

SEQ ID NO: 3253773 - RNA, 19 nt, Artificial Sequence
  Description of Artificial Sequence: Synthetic oligonucleotide
uguuccuuuguauauccuu

SEQ ID NO: 3253774 - RNA, 19 nt, Artificial Sequence
  Description of Artificial Sequence: Synthetic oligonucleotide
agagagacacuuucugcug

SEQ ID NO: 3253775 - RNA, 19 nt, Artificial Sequence
  Description of Artificial Sequence: Synthetic oligonucleotide
uugguuuacucaagucagc

SEQ ID NO: 3253776 - RNA, 19 nt, Artificial Sequence
  Description of Artificial Sequence: Synthetic oligonucleotide
accccuuguagauauagaa

SEQ ID NO: 3253777 - RNA, 19 nt, Artificial Sequence
  Description of Artificial Sequence: Synthetic oligonucleotide
ugguuuacucaagucagca

SEQ ID NO: 3253778 - RNA, 19 nt, Artificial Sequence
  Description of Artificial Sequence: Synthetic oligonucleotide
cuaugagcuggacuuggcc

SEQ ID NO: 3253779 - RNA, 19 nt, Artificial Sequence
  Description of Artificial Sequence: Synthetic oligonucleotide
uccuuuuaucuauugguuu

SEQ ID NO: 3253780 - RNA, 19 nt, Artificial Sequence
  Description of Artificial Sequence: Synthetic oligonucleotide
ucagcagccuugcggaccc

SEQ ID NO: 3253781 - RNA, 19 nt, Artificial Sequence
  Description of Artificial Sequence: Synthetic oligonucleotide
cuauugguuuacucaaguc

SEQ ID NO: 3253782 - RNA, 19 nt, Artificial Sequence
  Description of Artificial Sequence: Synthetic oligonucleotide
ugguugaagucaugacagg

SEQ ID NO: 3253783 - RNA, 19 nt, Artificial Sequence
  Description of Artificial Sequence: Synthetic oligonucleotide
uuucugcuguggcuguuag

SEQ ID NO: 3253784 - RNA, 19 nt, Artificial Sequence
  Description of Artificial Sequence: Synthetic oligonucleotide
ggaaaagcccacuaggaga

SEQ ID NO: 3253785 - RNA, 19 nt, Artificial Sequence
  Description of Artificial Sequence: Synthetic oligonucleotide
gagagagacacuuucugcu

SEQ ID NO: 3253786 - RNA, 19 nt, Artificial Sequence
  Description of Artificial Sequence: Synthetic oligonucleotide
ucuaugagcuggacuuggc

SEQ ID NO: 3253787 - RNA, 19 nt, Artificial Sequence
  Description of Artificial Sequence: Synthetic oligonucleotide
uggccugcggaaaagccca

SEQ ID NO: 3253788 - RNA, 19 nt, Artificial Sequence
  Description of Artificial Sequence: Synthetic oligonucleotide
uaggagagagacacuuucu

SEQ ID NO: 3253789 - RNA, 19 nt, Artificial Sequence
  Description of Artificial Sequence: Synthetic oligonucleotide
cuuggccugcggaaaagcc

SEQ ID NO: 3253790 - RNA, 19 nt, Artificial Sequence
  Description of Artificial Sequence: Synthetic oligonucleotide
auauagaaguagagcuccc

SEQ ID NO: 3253791 - RNA, 19 nt, Artificial Sequence
  Description of Artificial Sequence: Synthetic oligonucleotide
agcccacuaggagagagac

SEQ ID NO: 3253792 - RNA, 19 nt, Artificial Sequence
  Description of Artificial Sequence: Synthetic oligonucleotide
augagcuggacuuggccug

SEQ ID NO: 3253793 - RNA, 19 nt, Artificial Sequence
  Description of Artificial Sequence: Synthetic oligonucleotide
uaggugguugaagucauga

SEQ ID NO: 3253794 - RNA, 19 nt, Artificial Sequence
  Description of Artificial Sequence: Synthetic oligonucleotide
ggugguugaagucaugaca

SEQ ID NO: 3253795 - RNA, 19 nt, Artificial Sequence
  Description of Artificial Sequence: Synthetic oligonucleotide
cuuuuaucuauugguuuac

SEQ ID NO: 3253796 - RNA, 19 nt, Artificial Sequence
  Description of Artificial Sequence: Synthetic oligonucleotide
ucaagucagcagccuugcg

SEQ ID NO: 3253797 - RNA, 19 nt, Artificial Sequence
  Description of Artificial Sequence: Synthetic oligonucleotide
acacuuucugcuguggcug

SEQ ID NO: 3253798 - RNA, 19 nt, Artificial Sequence
  Description of Artificial Sequence: Synthetic oligonucleotide
ggagagagacacuuucugc

SEQ ID NO: 3253799 - RNA, 19 nt, Artificial Sequence
  Description of Artificial Sequence: Synthetic oligonucleotide
uuuuaucuauugguuuacu

SEQ ID NO: 3253800 - RNA, 19 nt, Artificial Sequence
  Description of Artificial Sequence: Synthetic oligonucleotide
acuuggccugcggaaaagc

SEQ ID NO: 3253801 - RNA, 19 nt, Artificial Sequence
  Description of Artificial Sequence: Synthetic oligonucleotide
agagacacuuucugcugug

SEQ ID NO: 3253802 - RNA, 19 nt, Artificial Sequence
  Description of Artificial Sequence: Synthetic oligonucleotide
uaggcuguguuccuuugua

SEQ ID NO: 3253803 - RNA, 19 nt, Artificial Sequence
  Description of Artificial Sequence: Synthetic oligonucleotide
uccuuuguauauccuuuua

SEQ ID NO: 3253804 - RNA, 19 nt, Artificial Sequence
  Description of Artificial Sequence: Synthetic oligonucleotide
gucuaugagcuggacuugg

SEQ ID NO: 3253805 - RNA, 19 nt, Artificial Sequence
  Description of Artificial Sequence: Synthetic oligonucleotide
cccacuaggagagagacac

SEQ ID NO: 3253806 - RNA, 19 nt, Artificial Sequence
  Description of Artificial Sequence: Synthetic oligonucleotide
gguuuacucaagucagcag

SEQ ID NO: 3253807 - RNA, 19 nt, Artificial Sequence
  Description of Artificial Sequence: Synthetic oligonucleotide
uucugcuguggcuguuagg

SEQ ID NO: 3253808 - RNA, 19 nt, Artificial Sequence
  Description of Artificial Sequence: Synthetic oligonucleotide
gagacacuuucugcugugg

SEQ ID NO: 3253809 - RNA, 19 nt, Artificial Sequence
  Description of Artificial Sequence: Synthetic oligonucleotide
ugacagguaggcuguguuc

SEQ ID NO: 3253810 - RNA, 19 nt, Artificial Sequence
  Description of Artificial Sequence: Synthetic oligonucleotide
cuugcggaccccuuguaga

SEQ ID NO: 3253811 - RNA, 19 nt, Artificial Sequence
  Description of Artificial Sequence: Synthetic oligonucleotide
uuaggugguugaagucaug

SEQ ID NO: 3253812 - RNA, 19 nt, Artificial Sequence
  Description of Artificial Sequence: Synthetic oligonucleotide
uacucaagucagcagccuu

SEQ ID NO: 3253813 - RNA, 19 nt, Artificial Sequence
  Description of Artificial Sequence: Synthetic oligonucleotide
acucaagucagcagccuug

SEQ ID NO: 3253814 - RNA, 19 nt, Artificial Sequence
  Description of Artificial Sequence: Synthetic oligonucleotide
aagucaugacagguaggcu

SEQ ID NO: 3253815 - RNA, 19 nt, Artificial Sequence
  Description of Artificial Sequence: Synthetic oligonucleotide
aacagcuugcuaguucuuu

SEQ ID NO: 3253816 - RNA, 19 nt, Artificial Sequence
  Description of Artificial Sequence: Synthetic oligonucleotide
uuccuuuguauauccuuuu

SEQ ID NO: 3253817 - RNA, 19 nt, Artificial Sequence
  Description of Artificial Sequence: Synthetic oligonucleotide
uucaaauucauucaaaggg

SEQ ID NO: 3253818 - RNA, 19 nt, Artificial Sequence
  Description of Artificial Sequence: Synthetic oligonucleotide
aauuuugacaaucugcugg

SEQ ID NO: 3253819 - RNA, 19 nt, Artificial Sequence
  Description of Artificial Sequence: Synthetic oligonucleotide
aaagguuuaaaauuuugac

SEQ ID NO: 3253820 - RNA, 19 nt, Artificial Sequence
  Description of Artificial Sequence: Synthetic oligonucleotide
guuguuaagagucacagcg

SEQ ID NO: 3253821 - RNA, 19 nt, Artificial Sequence
  Description of Artificial Sequence: Synthetic oligonucleotide
uaaaauuuugacaaucugc

SEQ ID NO: 3253822 - RNA, 19 nt, Artificial Sequence
  Description of Artificial Sequence: Synthetic oligonucleotide
ucaaauucauucaaagggg

SEQ ID NO: 3253823 - RNA, 19 nt, Artificial Sequence
  Description of Artificial Sequence: Synthetic oligonucleotide
aaucucaggguccaggccc

SEQ ID NO: 3253824 - RNA, 19 nt, Artificial Sequence
  Description of Artificial Sequence: Synthetic oligonucleotide
uucaaguugacuuauguug

SEQ ID NO: 3253825 - RNA, 19 nt, Artificial Sequence
  Description of Artificial Sequence: Synthetic oligonucleotide
auaaaggacacugucaccc

SEQ ID NO: 3253826 - RNA, 19 nt, Artificial Sequence
  Description of Artificial Sequence: Synthetic oligonucleotide
aagguuuaaaauuuugaca

SEQ ID NO: 3253827 - RNA, 19 nt, Artificial Sequence
  Description of Artificial Sequence: Synthetic oligonucleotide
aaaauuuugacaaucugcu

SEQ ID NO: 3253828 - RNA, 19 nt, Artificial Sequence
  Description of Artificial Sequence: Synthetic oligonucleotide
uugaucauauagaagagcu

SEQ ID NO: 3253829 - RNA, 19 nt, Artificial Sequence
  Description of Artificial Sequence: Synthetic oligonucleotide
ucuucaaauucauucaaag

SEQ ID NO: 3253830 - RNA, 19 nt, Artificial Sequence
  Description of Artificial Sequence: Synthetic oligonucleotide
uuuaaaauuuugacaaucu

SEQ ID NO: 3253831 - RNA, 19 nt, Artificial Sequence
  Description of Artificial Sequence: Synthetic oligonucleotide
agguuuaaaauuuugacaa

SEQ ID NO: 3253832 - RNA, 19 nt, Artificial Sequence
  Description of Artificial Sequence: Synthetic oligonucleotide
uaaagguuuaaaauuuuga

SEQ ID NO: 3253833 - RNA, 19 nt, Artificial Sequence
  Description of Artificial Sequence: Synthetic oligonucleotide
uuaaaauuuugacaaucug

SEQ ID NO: 3253834 - RNA, 19 nt, Artificial Sequence
  Description of Artificial Sequence: Synthetic oligonucleotide
uggaucaaagguuccaugg

SEQ ID NO: 3253835 - RNA, 19 nt, Artificial Sequence
  Description of Artificial Sequence: Synthetic oligonucleotide
aguugacuuauguuguacc

SEQ ID NO: 3253836 - RNA, 19 nt, Artificial Sequence
  Description of Artificial Sequence: Synthetic oligonucleotide
acacaugacaguaugaaac

SEQ ID NO: 3253837 - RNA, 19 nt, Artificial Sequence
  Description of Artificial Sequence: Synthetic oligonucleotide
auaaucucaggguccaggc

SEQ ID NO: 3253838 - RNA, 19 nt, Artificial Sequence
  Description of Artificial Sequence: Synthetic oligonucleotide
cuucaaauucauucaaagg

SEQ ID NO: 3253839 - RNA, 19 nt, Artificial Sequence
  Description of Artificial Sequence: Synthetic oligonucleotide
guacacagagagcagaugg

SEQ ID NO: 3253840 - RNA, 19 nt, Artificial Sequence
  Description of Artificial Sequence: Synthetic oligonucleotide
uagaagagcuguuugaaca

SEQ ID NO: 3253841 - RNA, 19 nt, Artificial Sequence
  Description of Artificial Sequence: Synthetic oligonucleotide
agagcaggcaucuuuccgc

SEQ ID NO: 3253842 - RNA, 19 nt, Artificial Sequence
  Description of Artificial Sequence: Synthetic oligonucleotide
auuuugacaaucugcuggg

SEQ ID NO: 3253843 - RNA, 19 nt, Artificial Sequence
  Description of Artificial Sequence: Synthetic oligonucleotide
gagggcaguacacagagag

SEQ ID NO: 3253844 - RNA, 19 nt, Artificial Sequence
  Description of Artificial Sequence: Synthetic oligonucleotide
aacugcuccacucugguga

SEQ ID NO: 3253845 - RNA, 19 nt, Artificial Sequence
  Description of Artificial Sequence: Synthetic oligonucleotide
uguuugaacaccugcagga

SEQ ID NO: 3253846 - RNA, 19 nt, Artificial Sequence
  Description of Artificial Sequence: Synthetic oligonucleotide
agagucacagcguugauca

SEQ ID NO: 3253847 - RNA, 19 nt, Artificial Sequence
  Description of Artificial Sequence: Synthetic oligonucleotide
gacaguaugaaacgaauuc

SEQ ID NO: 3253848 - RNA, 19 nt, Artificial Sequence
  Description of Artificial Sequence: Synthetic oligonucleotide
acuuauguuguaccugagc

SEQ ID NO: 3253849 - RNA, 19 nt, Artificial Sequence
  Description of Artificial Sequence: Synthetic oligonucleotide
aauucauucaaaggggugu

SEQ ID NO: 3253850 - RNA, 19 nt, Artificial Sequence
  Description of Artificial Sequence: Synthetic oligonucleotide
aaaggacacugucacccgc

SEQ ID NO: 3253851 - RNA, 19 nt, Artificial Sequence
  Description of Artificial Sequence: Synthetic oligonucleotide
uauguuguaccugagcugc

SEQ ID NO: 3253852 - RNA, 19 nt, Artificial Sequence
  Description of Artificial Sequence: Synthetic oligonucleotide
gaagccauucuucaaguug

SEQ ID NO: 3253853 - RNA, 19 nt, Artificial Sequence
  Description of Artificial Sequence: Synthetic oligonucleotide
ucaaguugacuuauguugu

SEQ ID NO: 3253854 - RNA, 19 nt, Artificial Sequence
  Description of Artificial Sequence: Synthetic oligonucleotide
aacuggaggagcugggccg

SEQ ID NO: 3253855 - RNA, 19 nt, Artificial Sequence
  Description of Artificial Sequence: Synthetic oligonucleotide
agaagagcuguuugaacac

SEQ ID NO: 3253856 - RNA, 19 nt, Artificial Sequence
  Description of Artificial Sequence: Synthetic oligonucleotide
uugacaaucugcugggugc

SEQ ID NO: 3253857 - RNA, 19 nt, Artificial Sequence
  Description of Artificial Sequence: Synthetic oligonucleotide
aaauuuugacaaucugcug

SEQ ID NO: 3253858 - RNA, 19 nt, Artificial Sequence
  Description of Artificial Sequence: Synthetic oligonucleotide
aagagcaggcaucuuuccg

SEQ ID NO: 3253859 - RNA, 19 nt, Artificial Sequence
  Description of Artificial Sequence: Synthetic oligonucleotide
ucuucaaguugacuuaugu

SEQ ID NO: 3253860 - RNA, 19 nt, Artificial Sequence
  Description of Artificial Sequence: Synthetic oligonucleotide
auucaaagggguguaaagg

SEQ ID NO: 3253861 - RNA, 19 nt, Artificial Sequence
  Description of Artificial Sequence: Synthetic oligonucleotide
auagaagagcuguuugaac

SEQ ID NO: 3253862 - RNA, 19 nt, Artificial Sequence
  Description of Artificial Sequence: Synthetic oligonucleotide
uuugacaaucugcugggug

SEQ ID NO: 3253863 - RNA, 19 nt, Artificial Sequence
  Description of Artificial Sequence: Synthetic oligonucleotide
uucaaagggguguaaaggu

SEQ ID NO: 3253864 - RNA, 19 nt, Artificial Sequence
  Description of Artificial Sequence: Synthetic oligonucleotide
cacaugacaguaugaaacg

SEQ ID NO: 3253865 - RNA, 19 nt, Artificial Sequence
  Description of Artificial Sequence: Synthetic oligonucleotide
ugacuuauguuguaccuga

SEQ ID NO: 3253866 - RNA, 19 nt, Artificial Sequence
  Description of Artificial Sequence: Synthetic oligonucleotide
uuaagagucacagcguuga

SEQ ID NO: 3253867 - RNA, 19 nt, Artificial Sequence
  Description of Artificial Sequence: Synthetic oligonucleotide
aaguugacuuauguuguac

SEQ ID NO: 3253868 - RNA, 19 nt, Artificial Sequence
  Description of Artificial Sequence: Synthetic oligonucleotide
gauaaucucaggguccagg

SEQ ID NO: 3253869 - RNA, 19 nt, Artificial Sequence
  Description of Artificial Sequence: Synthetic oligonucleotide
cacagcguugaucauauag

SEQ ID NO: 3253870 - RNA, 19 nt, Artificial Sequence
  Description of Artificial Sequence: Synthetic oligonucleotide
cauauagaagagcuguuug

SEQ ID NO: 3253871 - RNA, 19 nt, Artificial Sequence
  Description of Artificial Sequence: Synthetic oligonucleotide
auauagaagagcuguuuga

SEQ ID NO: 3253872 - RNA, 19 nt, Artificial Sequence
  Description of Artificial Sequence: Synthetic oligonucleotide
augccugugcuccaagagc

SEQ ID NO: 3253873 - RNA, 19 nt, Artificial Sequence
  Description of Artificial Sequence: Synthetic oligonucleotide
uugaacaccugcaggauaa

SEQ ID NO: 3253874 - RNA, 19 nt, Artificial Sequence
  Description of Artificial Sequence: Synthetic oligonucleotide
uuauguuguaccugagcug

SEQ ID NO: 3253875 - RNA, 19 nt, Artificial Sequence
  Description of Artificial Sequence: Synthetic oligonucleotide
cauucaaagggguguaaag

SEQ ID NO: 3253876 - RNA, 19 nt, Artificial Sequence
  Description of Artificial Sequence: Synthetic oligonucleotide
ugaucauauagaagagcug

SEQ ID NO: 3253877 - RNA, 19 nt, Artificial Sequence
  Description of Artificial Sequence: Synthetic oligonucleotide
aacaccugcaggauaaucu

SEQ ID NO: 3253878 - RNA, 19 nt, Artificial Sequence
  Description of Artificial Sequence: Synthetic oligonucleotide
ugcaggauaaucucagggu

SEQ ID NO: 3253879 - RNA, 19 nt, Artificial Sequence
  Description of Artificial Sequence: Synthetic oligonucleotide
guuuaaaauuuugacaauc

SEQ ID NO: 3253880 - RNA, 19 nt, Artificial Sequence
  Description of Artificial Sequence: Synthetic oligonucleotide
uuucaacuggaggagcugg

SEQ ID NO: 3253881 - RNA, 19 nt, Artificial Sequence
  Description of Artificial Sequence: Synthetic oligonucleotide
acagagagcagauggccuc

SEQ ID NO: 3253882 - RNA, 19 nt, Artificial Sequence
  Description of Artificial Sequence: Synthetic oligonucleotide
acacagagagcagauggcc

SEQ ID NO: 3253883 - RNA, 19 nt, Artificial Sequence
  Description of Artificial Sequence: Synthetic oligonucleotide
aagagucacagcguugauc

SEQ ID NO: 3253884 - RNA, 19 nt, Artificial Sequence
  Description of Artificial Sequence: Synthetic oligonucleotide
gcguugaucauauagaaga

SEQ ID NO: 3253885 - RNA, 19 nt, Artificial Sequence
  Description of Artificial Sequence: Synthetic oligonucleotide
agcagauggccucagcauc

SEQ ID NO: 3253886 - RNA, 19 nt, Artificial Sequence
  Description of Artificial Sequence: Synthetic oligonucleotide
aucugcugggugcugaggg

SEQ ID NO: 3253887 - RNA, 19 nt, Artificial Sequence
  Description of Artificial Sequence: Synthetic oligonucleotide
cugcaggauaaucucaggg

SEQ ID NO: 3253888 - RNA, 19 nt, Artificial Sequence
  Description of Artificial Sequence: Synthetic oligonucleotide
uaaaggacacugucacccg

SEQ ID NO: 3253889 - RNA, 19 nt, Artificial Sequence
  Description of Artificial Sequence: Synthetic oligonucleotide
uguuaagagucacagcguu

SEQ ID NO: 3253890 - RNA, 19 nt, Artificial Sequence
  Description of Artificial Sequence: Synthetic oligonucleotide
uauaaaggacacugucacc

SEQ ID NO: 3253891 - RNA, 19 nt, Artificial Sequence
  Description of Artificial Sequence: Synthetic oligonucleotide
acaccugcaggauaaucuc

SEQ ID NO: 3253892 - RNA, 19 nt, Artificial Sequence
  Description of Artificial Sequence: Synthetic oligonucleotide
aaauucauucaaaggggug

SEQ ID NO: 3253893 - RNA, 19 nt, Artificial Sequence
  Description of Artificial Sequence: Synthetic oligonucleotide
gaucaaagguuccaugguc

SEQ ID NO: 3253894 - RNA, 19 nt, Artificial Sequence
  Description of Artificial Sequence: Synthetic oligonucleotide
uacacagagagcagauggc

SEQ ID NO: 3253895 - RNA, 19 nt, Artificial Sequence
  Description of Artificial Sequence: Synthetic oligonucleotide
agcugcaugccugugcucc

SEQ ID NO: 3253896 - RNA, 19 nt, Artificial Sequence
  Description of Artificial Sequence: Synthetic oligonucleotide
ugccugugcuccaagagca

SEQ ID NO: 3253897 - RNA, 19 nt, Artificial Sequence
  Description of Artificial Sequence: Synthetic oligonucleotide
uauagaagagcuguuugaa

SEQ ID NO: 3253898 - RNA, 19 nt, Artificial Sequence
  Description of Artificial Sequence: Synthetic oligonucleotide
agguuguuaagagucacag

SEQ ID NO: 3253899 - RNA, 19 nt, Artificial Sequence
  Description of Artificial Sequence: Synthetic oligonucleotide
uuguaccugagcugcaugc

SEQ ID NO: 3253900 - RNA, 19 nt, Artificial Sequence
  Description of Artificial Sequence: Synthetic oligonucleotide
cucgaagccauucuucaag

SEQ ID NO: 3253901 - RNA, 19 nt, Artificial Sequence
  Description of Artificial Sequence: Synthetic oligonucleotide
uguaaagguuuaaaauuuu

SEQ ID NO: 3253902 - RNA, 19 nt, Artificial Sequence
  Description of Artificial Sequence: Synthetic oligonucleotide
gaucauauagaagagcugu

SEQ ID NO: 3253903 - RNA, 19 nt, Artificial Sequence
  Description of Artificial Sequence: Synthetic oligonucleotide
aagccauucuucaaguuga

SEQ ID NO: 3253904 - RNA, 19 nt, Artificial Sequence
  Description of Artificial Sequence: Synthetic oligonucleotide
uucaacuggaggagcuggg

SEQ ID NO: 3253905 - RNA, 19 nt, Artificial Sequence
  Description of Artificial Sequence: Synthetic oligonucleotide
guaaagguuuaaaauuuug

SEQ ID NO: 3253906 - RNA, 19 nt, Artificial Sequence
  Description of Artificial Sequence: Synthetic oligonucleotide
uuuuccucgaagccauucu

SEQ ID NO: 3253907 - RNA, 19 nt, Artificial Sequence
  Description of Artificial Sequence: Synthetic oligonucleotide
ucugaacugcuccacucug

SEQ ID NO: 3253908 - RNA, 19 nt, Artificial Sequence
  Description of Artificial Sequence: Synthetic oligonucleotide
cuguuugaacaccugcagg

SEQ ID NO: 3253909 - RNA, 19 nt, Artificial Sequence
  Description of Artificial Sequence: Synthetic oligonucleotide
ugagcugcaugccugugcu

SEQ ID NO: 3253910 - RNA, 19 nt, Artificial Sequence
  Description of Artificial Sequence: Synthetic oligonucleotide
agagcagauggccucagca

SEQ ID NO: 3253911 - RNA, 19 nt, Artificial Sequence
  Description of Artificial Sequence: Synthetic oligonucleotide
aggagcagguuguuaagag

SEQ ID NO: 3253912 - RNA, 19 nt, Artificial Sequence
  Description of Artificial Sequence: Synthetic oligonucleotide
acaguaugaaacgaauuca

SEQ ID NO: 3253913 - RNA, 19 nt, Artificial Sequence
  Description of Artificial Sequence: Synthetic oligonucleotide
caggauaaucucagggucc

SEQ ID NO: 3253914 - RNA, 19 nt, Artificial Sequence
  Description of Artificial Sequence: Synthetic oligonucleotide
cugagggcaguacacagag

SEQ ID NO: 3253915 - RNA, 19 nt, Artificial Sequence
  Description of Artificial Sequence: Synthetic oligonucleotide
uuguuaagagucacagcgu

SEQ ID NO: 3253916 - RNA, 19 nt, Artificial Sequence
  Description of Artificial Sequence: Synthetic oligonucleotide
guugaucauauagaagagc

SEQ ID NO: 3253917 - RNA, 19 nt, Artificial Sequence
  Description of Artificial Sequence: Synthetic oligonucleotide
auggagaaaacccagagcc

SEQ ID NO: 3253918 - RNA, 19 nt, Artificial Sequence
  Description of Artificial Sequence: Synthetic oligonucleotide
uauaaagccauaacaaugg

SEQ ID NO: 3253919 - RNA, 19 nt, Artificial Sequence
  Description of Artificial Sequence: Synthetic oligonucleotide
aaauucauaccuucugucc

SEQ ID NO: 3253920 - RNA, 19 nt, Artificial Sequence
  Description of Artificial Sequence: Synthetic oligonucleotide
auaaauggaucauaggacc

SEQ ID NO: 3253921 - RNA, 19 nt, Artificial Sequence
  Description of Artificial Sequence: Synthetic oligonucleotide
aaaccaugcacccacacac

SEQ ID NO: 3253922 - RNA, 19 nt, Artificial Sequence
  Description of Artificial Sequence: Synthetic oligonucleotide
auuauauauauuuauauau

SEQ ID NO: 3253923 - RNA, 19 nt, Artificial Sequence
  Description of Artificial Sequence: Synthetic oligonucleotide
uauauauauuuauauauca

SEQ ID NO: 3253924 - RNA, 19 nt, Artificial Sequence
  Description of Artificial Sequence: Synthetic oligonucleotide
uuauaaagccauaacaaug

SEQ ID NO: 3253925 - RNA, 19 nt, Artificial Sequence
  Description of Artificial Sequence: Synthetic oligonucleotide
ucuauaaauacacucccag

SEQ ID NO: 3253926 - RNA, 19 nt, Artificial Sequence
  Description of Artificial Sequence: Synthetic oligonucleotide
uacaaugccaccccuaggg

SEQ ID NO: 3253927 - RNA, 19 nt, Artificial Sequence
  Description of Artificial Sequence: Synthetic oligonucleotide
acacuaauaaucuguggcc

SEQ ID NO: 3253928 - RNA, 19 nt, Artificial Sequence
  Description of Artificial Sequence: Synthetic oligonucleotide
uacauucauauccagaaca

SEQ ID NO: 3253929 - RNA, 19 nt, Artificial Sequence
  Description of Artificial Sequence: Synthetic oligonucleotide
aauacaaugccaccccuag

SEQ ID NO: 3253930 - RNA, 19 nt, Artificial Sequence
  Description of Artificial Sequence: Synthetic oligonucleotide
gauuguaagagacuaagca

SEQ ID NO: 3253931 - RNA, 19 nt, Artificial Sequence
  Description of Artificial Sequence: Synthetic oligonucleotide
aaucuuggaagguaggaug

SEQ ID NO: 3253932 - RNA, 19 nt, Artificial Sequence
  Description of Artificial Sequence: Synthetic oligonucleotide
auauagaacagcaaaacag

SEQ ID NO: 3253933 - RNA, 19 nt, Artificial Sequence
  Description of Artificial Sequence: Synthetic oligonucleotide
auauuauauauauuuauau

SEQ ID NO: 3253934 - RNA, 19 nt, Artificial Sequence
  Description of Artificial Sequence: Synthetic oligonucleotide
uuauauauauuuauauauc

SEQ ID NO: 3253935 - RNA, 19 nt, Artificial Sequence
  Description of Artificial Sequence: Synthetic oligonucleotide
gaucagaaaucuuggaagg

SEQ ID NO: 3253936 - RNA, 19 nt, Artificial Sequence
  Description of Artificial Sequence: Synthetic oligonucleotide
auguauauauuauauauau

SEQ ID NO: 3253937 - RNA, 19 nt, Artificial Sequence
  Description of Artificial Sequence: Synthetic oligonucleotide
auaacaauggauuguaaga

SEQ ID NO: 3253938 - RNA, 19 nt, Artificial Sequence
  Description of Artificial Sequence: Synthetic oligonucleotide
uauauuauauauauuuaua

SEQ ID NO: 3253939 - RNA, 19 nt, Artificial Sequence
  Description of Artificial Sequence: Synthetic oligonucleotide
aagccaacuuucuugauug

SEQ ID NO: 3253940 - RNA, 19 nt, Artificial Sequence
  Description of Artificial Sequence: Synthetic oligonucleotide
auauauuauauauauuuau

SEQ ID NO: 3253941 - RNA, 19 nt, Artificial Sequence
  Description of Artificial Sequence: Synthetic oligonucleotide
uuggccuaaauucauaccu

SEQ ID NO: 3253942 - RNA, 19 nt, Artificial Sequence
  Description of Artificial Sequence: Synthetic oligonucleotide
uauauauuauauauauuua

SEQ ID NO: 3253943 - RNA, 19 nt, Artificial Sequence
  Description of Artificial Sequence: Synthetic oligonucleotide
uuuuacucacauuuaggag

SEQ ID NO: 3253944 - RNA, 19 nt, Artificial Sequence
  Description of Artificial Sequence: Synthetic oligonucleotide
uauuauauauauuuauaua

SEQ ID NO: 3253945 - RNA, 19 nt, Artificial Sequence
  Description of Artificial Sequence: Synthetic oligonucleotide
uuuauaaagccauaacaau

SEQ ID NO: 3253946 - RNA, 19 nt, Artificial Sequence
  Description of Artificial Sequence: Synthetic oligonucleotide
uguaggaggaccauguggu

SEQ ID NO: 3253947 - RNA, 19 nt, Artificial Sequence
  Description of Artificial Sequence: Synthetic oligonucleotide
uacugggucacacugaacu

SEQ ID NO: 3253948 - RNA, 19 nt, Artificial Sequence
  Description of Artificial Sequence: Synthetic oligonucleotide
ucucugauaucucaccucc

SEQ ID NO: 3253949 - RNA, 19 nt, Artificial Sequence
  Description of Artificial Sequence: Synthetic oligonucleotide
ucugccacggccuaagugc

SEQ ID NO: 3253950 - RNA, 19 nt, Artificial Sequence
  Description of Artificial Sequence: Synthetic oligonucleotide
aauacuuggaaguguccug

SEQ ID NO: 3253951 - RNA, 19 nt, Artificial Sequence
  Description of Artificial Sequence: Synthetic oligonucleotide
guauauauuauauauauuu

SEQ ID NO: 3253952 - RNA, 19 nt, Artificial Sequence
  Description of Artificial Sequence: Synthetic oligonucleotide
auaucugggaggauaaggc

SEQ ID NO: 3253953 - RNA, 19 nt, Artificial Sequence
  Description of Artificial Sequence: Synthetic oligonucleotide
ugaaugagaaaguggggag

SEQ ID NO: 3253954 - RNA, 19 nt, Artificial Sequence
  Description of Artificial Sequence: Synthetic oligonucleotide
uaaagagagcaaaccaugc

SEQ ID NO: 3253955 - RNA, 19 nt, Artificial Sequence
  Description of Artificial Sequence: Synthetic oligonucleotide
gauaucugggaggauaagg

SEQ ID NO: 3253956 - RNA, 19 nt, Artificial Sequence
  Description of Artificial Sequence: Synthetic oligonucleotide
auacacucccagcagaagg

SEQ ID NO: 3253957 - RNA, 19 nt, Artificial Sequence
  Description of Artificial Sequence: Synthetic oligonucleotide
uuagcuuacagauucuauc

SEQ ID NO: 3253958 - RNA, 19 nt, Artificial Sequence
  Description of Artificial Sequence: Synthetic oligonucleotide
auugcaagcugcuccuugc

SEQ ID NO: 3253959 - RNA, 19 nt, Artificial Sequence
  Description of Artificial Sequence: Synthetic oligonucleotide
aaucuguggcccaucaggc

SEQ ID NO: 3253960 - RNA, 19 nt, Artificial Sequence
  Description of Artificial Sequence: Synthetic oligonucleotide
acaauggauuguaagagac

SEQ ID NO: 3253961 - RNA, 19 nt, Artificial Sequence
  Description of Artificial Sequence: Synthetic oligonucleotide
cauacgagccaaauguggg

SEQ ID NO: 3253962 - RNA, 19 nt, Artificial Sequence
  Description of Artificial Sequence: Synthetic oligonucleotide
uaggacuuugggaagcagg

SEQ ID NO: 3253963 - RNA, 19 nt, Artificial Sequence
  Description of Artificial Sequence: Synthetic oligonucleotide
aaaagucuggaagagugug

SEQ ID NO: 3253964 - RNA, 19 nt, Artificial Sequence
  Description of Artificial Sequence: Synthetic oligonucleotide
uugaaugagaaagugggga

SEQ ID NO: 3253965 - RNA, 19 nt, Artificial Sequence
  Description of Artificial Sequence: Synthetic oligonucleotide
aagugaacaaugguggcag

SEQ ID NO: 3253966 - RNA, 19 nt, Artificial Sequence
  Description of Artificial Sequence: Synthetic oligonucleotide
cacacacacacuuacacac

SEQ ID NO: 3253967 - RNA, 19 nt, Artificial Sequence
  Description of Artificial Sequence: Synthetic oligonucleotide
acacuuagcguacaacagg

SEQ ID NO: 3253968 - RNA, 19 nt, Artificial Sequence
  Description of Artificial Sequence: Synthetic oligonucleotide
aaccaagaacaugaggaac

SEQ ID NO: 3253969 - RNA, 19 nt, Artificial Sequence
  Description of Artificial Sequence: Synthetic oligonucleotide
ggaucagaaaucuuggaag

SEQ ID NO: 3253970 - RNA, 19 nt, Artificial Sequence
  Description of Artificial Sequence: Synthetic oligonucleotide
aagccauaacaauggauug

SEQ ID NO: 3253971 - RNA, 19 nt, Artificial Sequence
  Description of Artificial Sequence: Synthetic oligonucleotide
agacuaagcagcuguacag

SEQ ID NO: 3253972 - RNA, 19 nt, Artificial Sequence
  Description of Artificial Sequence: Synthetic oligonucleotide
auacauucauauccagaac

SEQ ID NO: 3253973 - RNA, 19 nt, Artificial Sequence
  Description of Artificial Sequence: Synthetic oligonucleotide
cauacauucauauccagaa

SEQ ID NO: 3253974 - RNA, 19 nt, Artificial Sequence
  Description of Artificial Sequence: Synthetic oligonucleotide
uaggauggagaaaacccag

SEQ ID NO: 3253975 - RNA, 19 nt, Artificial Sequence
  Description of Artificial Sequence: Synthetic oligonucleotide
ugauaucucaccuccagau

SEQ ID NO: 3253976 - RNA, 19 nt, Artificial Sequence
  Description of Artificial Sequence: Synthetic oligonucleotide
agugcaauggccugcucuc

SEQ ID NO: 3253977 - RNA, 19 nt, Artificial Sequence
  Description of Artificial Sequence: Synthetic oligonucleotide
uggacaaacuucacuuuag

SEQ ID NO: 3253978 - RNA, 19 nt, Artificial Sequence
  Description of Artificial Sequence: Synthetic oligonucleotide
aagagcacauugcaagcug

SEQ ID NO: 3253979 - RNA, 19 nt, Artificial Sequence
  Description of Artificial Sequence: Synthetic oligonucleotide
gagaucuucugccacggcc

SEQ ID NO: 3253980 - RNA, 19 nt, Artificial Sequence
  Description of Artificial Sequence: Synthetic oligonucleotide
auaucucaccuccagauau

SEQ ID NO: 3253981 - RNA, 19 nt, Artificial Sequence
  Description of Artificial Sequence: Synthetic oligonucleotide
ggaaugaagguguggaagg

SEQ ID NO: 3253982 - RNA, 19 nt, Artificial Sequence
  Description of Artificial Sequence: Synthetic oligonucleotide
cucuuuuacucacauuuag

SEQ ID NO: 3253983 - RNA, 19 nt, Artificial Sequence
  Description of Artificial Sequence: Synthetic oligonucleotide
agaggcuauaggcacaaug

SEQ ID NO: 3253984 - RNA, 19 nt, Artificial Sequence
  Description of Artificial Sequence: Synthetic oligonucleotide
ucugcuggggaaacugagg

SEQ ID NO: 3253985 - RNA, 19 nt, Artificial Sequence
  Description of Artificial Sequence: Synthetic oligonucleotide
gagaaggagacugugcugc

SEQ ID NO: 3253986 - RNA, 19 nt, Artificial Sequence
  Description of Artificial Sequence: Synthetic oligonucleotide
uguggguugcacagggagg

SEQ ID NO: 3253987 - RNA, 19 nt, Artificial Sequence
  Description of Artificial Sequence: Synthetic oligonucleotide
cugacauacagucucaaca

SEQ ID NO: 3253988 - RNA, 19 nt, Artificial Sequence
  Description of Artificial Sequence: Synthetic oligonucleotide
cacggaaacaccagucucg

SEQ ID NO: 3253989 - RNA, 19 nt, Artificial Sequence
  Description of Artificial Sequence: Synthetic oligonucleotide
uguauauauuauauauauu

SEQ ID NO: 3253990 - RNA, 19 nt, Artificial Sequence
  Description of Artificial Sequence: Synthetic oligonucleotide
aucugggaggauaaggccc

SEQ ID NO: 3253991 - RNA, 19 nt, Artificial Sequence
  Description of Artificial Sequence: Synthetic oligonucleotide
auccagaacacuuagcgua

SEQ ID NO: 3253992 - RNA, 19 nt, Artificial Sequence
  Description of Artificial Sequence: Synthetic oligonucleotide
uacacucccagcagaaggc

SEQ ID NO: 3253993 - RNA, 19 nt, Artificial Sequence
  Description of Artificial Sequence: Synthetic oligonucleotide
auucauaccuucuguccuc

SEQ ID NO: 3253994 - RNA, 19 nt, Artificial Sequence
  Description of Artificial Sequence: Synthetic oligonucleotide
ugaacacugcccuccauca

SEQ ID NO: 3253995 - RNA, 19 nt, Artificial Sequence
  Description of Artificial Sequence: Synthetic oligonucleotide
uauaggcacaaugauacaa

SEQ ID NO: 3253996 - RNA, 19 nt, Artificial Sequence
  Description of Artificial Sequence: Synthetic oligonucleotide
uaucugggaggauaaggcc

SEQ ID NO: 3253997 - RNA, 19 nt, Artificial Sequence
  Description of Artificial Sequence: Synthetic oligonucleotide
aggauaaggccccaggcca

SEQ ID NO: 3253998 - RNA, 19 nt, Artificial Sequence
  Description of Artificial Sequence: Synthetic oligonucleotide
uccugauccuuuaggagug

SEQ ID NO: 3253999 - RNA, 19 nt, Artificial Sequence
  Description of Artificial Sequence: Synthetic oligonucleotide
ggaaaagucuggaagagug

SEQ ID NO: 3254000 - RNA, 19 nt, Artificial Sequence
  Description of Artificial Sequence: Synthetic oligonucleotide
gaugaugaaggccccuggc

SEQ ID NO: 3254001 - RNA, 19 nt, Artificial Sequence
  Description of Artificial Sequence: Synthetic oligonucleotide
aaaucuuggaagguaggau

SEQ ID NO: 3254002 - RNA, 19 nt, Artificial Sequence
  Description of Artificial Sequence: Synthetic oligonucleotide
agaacacuuagcguacaac

SEQ ID NO: 3254003 - RNA, 19 nt, Artificial Sequence
  Description of Artificial Sequence: Synthetic oligonucleotide
agcaucaguguacauacau

SEQ ID NO: 3254004 - RNA, 19 nt, Artificial Sequence
  Description of Artificial Sequence: Synthetic oligonucleotide
uaaccaagaacaugaggaa

SEQ ID NO: 3254005 - RNA, 19 nt, Artificial Sequence
  Description of Artificial Sequence: Synthetic oligonucleotide
gaagccugaguggugacag

SEQ ID NO: 3254006 - RNA, 19 nt, Artificial Sequence
  Description of Artificial Sequence: Synthetic oligonucleotide
gagacuaagcagcuguaca

SEQ ID NO: 3254007 - RNA, 19 nt, Artificial Sequence
  Description of Artificial Sequence: Synthetic oligonucleotide
uggauggaucuccccaagg

SEQ ID NO: 3254008 - RNA, 19 nt, Artificial Sequence
  Description of Artificial Sequence: Synthetic oligonucleotide
ucucuggcaaggcuggugu

SEQ ID NO: 3254009 - RNA, 19 nt, Artificial Sequence
  Description of Artificial Sequence: Synthetic oligonucleotide
caugcacaccccaacgugc

SEQ ID NO: 3254010 - RNA, 19 nt, Artificial Sequence
  Description of Artificial Sequence: Synthetic oligonucleotide
gaggcuauaggcacaauga

SEQ ID NO: 3254011 - RNA, 19 nt, Artificial Sequence
  Description of Artificial Sequence: Synthetic oligonucleotide
gugaggaggacacuuuccc

SEQ ID NO: 3254012 - RNA, 19 nt, Artificial Sequence
  Description of Artificial Sequence: Synthetic oligonucleotide
auccacagaauugacgaag

SEQ ID NO: 3254013 - RNA, 19 nt, Artificial Sequence
  Description of Artificial Sequence: Synthetic oligonucleotide
aucuuggaagguaggaugg

SEQ ID NO: 3254014 - RNA, 19 nt, Artificial Sequence
  Description of Artificial Sequence: Synthetic oligonucleotide
cugggauaagccaacuuuc

SEQ ID NO: 3254015 - RNA, 19 nt, Artificial Sequence
  Description of Artificial Sequence: Synthetic oligonucleotide
ucucggcuuggaaugacca

SEQ ID NO: 3254016 - RNA, 19 nt, Artificial Sequence
  Description of Artificial Sequence: Synthetic oligonucleotide
ccauaaauggaucauagga

SEQ ID NO: 3254017 - RNA, 19 nt, Artificial Sequence
  Description of Artificial Sequence: Synthetic oligonucleotide
aauuacauucuuuagagag

SEQ ID NO: 3254018 - RNA, 19 nt, Artificial Sequence
  Description of Artificial Sequence: Synthetic oligonucleotide
aauauauauauauauauau

SEQ ID NO: 3254019 - RNA, 19 nt, Artificial Sequence
  Description of Artificial Sequence: Synthetic oligonucleotide
aaaauauauauauauauau

SEQ ID NO: 3254020 - RNA, 19 nt, Artificial Sequence
  Description of Artificial Sequence: Synthetic oligonucleotide
aauucuguggacuguagcc

SEQ ID NO: 3254021 - RNA, 19 nt, Artificial Sequence
  Description of Artificial Sequence: Synthetic oligonucleotide
uauauauauauauauauaa

SEQ ID NO: 3254022 - RNA, 19 nt, Artificial Sequence
  Description of Artificial Sequence: Synthetic oligonucleotide
uuuaauuccaagcaguuac

SEQ ID NO: 3254023 - RNA, 19 nt, Artificial Sequence
  Description of Artificial Sequence: Synthetic oligonucleotide
uauauauauauauauauau

SEQ ID NO: 3254024 - RNA, 19 nt, Artificial Sequence
  Description of Artificial Sequence: Synthetic oligonucleotide
uauauauauauaauuauau

SEQ ID NO: 3254025 - RNA, 19 nt, Artificial Sequence
  Description of Artificial Sequence: Synthetic oligonucleotide
auaaucuacacacacagug

SEQ ID NO: 3254026 - RNA, 19 nt, Artificial Sequence
  Description of Artificial Sequence: Synthetic oligonucleotide
uauauauauauauauaauu

SEQ ID NO: 3254027 - RNA, 19 nt, Artificial Sequence
  Description of Artificial Sequence: Synthetic oligonucleotide
gaaugcauggcaaugaggg

SEQ ID NO: 3254028 - RNA, 19 nt, Artificial Sequence
  Description of Artificial Sequence: Synthetic oligonucleotide
ugagagaugauuccaagug

SEQ ID NO: 3254029 - RNA, 19 nt, Artificial Sequence
  Description of Artificial Sequence: Synthetic oligonucleotide
uauauauauauauaauuau

SEQ ID NO: 3254030 - RNA, 19 nt, Artificial Sequence
  Description of Artificial Sequence: Synthetic oligonucleotide
ugguguugaaguuugagag

SEQ ID NO: 3254031 - RNA, 19 nt, Artificial Sequence
  Description of Artificial Sequence: Synthetic oligonucleotide
auagggauagaucugcagg

SEQ ID NO: 3254032 - RNA, 19 nt, Artificial Sequence
  Description of Artificial Sequence: Synthetic oligonucleotide
ugacaaaugccucucaagc

SEQ ID NO: 3254033 - RNA, 19 nt, Artificial Sequence
  Description of Artificial Sequence: Synthetic oligonucleotide
agugcaauuagguagggca

SEQ ID NO: 3254034 - RNA, 19 nt, Artificial Sequence
  Description of Artificial Sequence: Synthetic oligonucleotide
aaucaucuuucccagguug

SEQ ID NO: 3254035 - RNA, 19 nt, Artificial Sequence
  Description of Artificial Sequence: Synthetic oligonucleotide
aaagacccuagagaagucc

SEQ ID NO: 3254036 - RNA, 19 nt, Artificial Sequence
  Description of Artificial Sequence: Synthetic oligonucleotide
aaguggggcaggcuggucc

SEQ ID NO: 3254037 - RNA, 19 nt, Artificial Sequence
  Description of Artificial Sequence: Synthetic oligonucleotide
uagucagucucuaucuugg

SEQ ID NO: 3254038 - RNA, 19 nt, Artificial Sequence
  Description of Artificial Sequence: Synthetic oligonucleotide
cauaugugaagagacaggg

SEQ ID NO: 3254039 - RNA, 19 nt, Artificial Sequence
  Description of Artificial Sequence: Synthetic oligonucleotide
gaugauuccaaguguccgg

SEQ ID NO: 3254040 - RNA, 19 nt, Artificial Sequence
  Description of Artificial Sequence: Synthetic oligonucleotide
ugauccuugguguugaagu

SEQ ID NO: 3254041 - RNA, 19 nt, Artificial Sequence
  Description of Artificial Sequence: Synthetic oligonucleotide
cuuaguucgccccuugugg

SEQ ID NO: 3254042 - RNA, 19 nt, Artificial Sequence
  Description of Artificial Sequence: Synthetic oligonucleotide
auauauauauauauaauua

SEQ ID NO: 3254043 - RNA, 19 nt, Artificial Sequence
  Description of Artificial Sequence: Synthetic oligonucleotide
ucccugauggcuuuaaucu

SEQ ID NO: 3254044 - RNA, 19 nt, Artificial Sequence
  Description of Artificial Sequence: Synthetic oligonucleotide
auauauauauaauuauaua

SEQ ID NO: 3254045 - RNA, 19 nt, Artificial Sequence
  Description of Artificial Sequence: Synthetic oligonucleotide
ugauguucccgaaugcaag

SEQ ID NO: 3254046 - RNA, 19 nt, Artificial Sequence
  Description of Artificial Sequence: Synthetic oligonucleotide
acuuugauguucccgaaug

SEQ ID NO: 3254047 - RNA, 19 nt, Artificial Sequence
  Description of Artificial Sequence: Synthetic oligonucleotide
uggaaguaaccuuacugag

SEQ ID NO: 3254048 - RNA, 19 nt, Artificial Sequence
  Description of Artificial Sequence: Synthetic oligonucleotide
aaauauauauauauauaua

SEQ ID NO: 3254049 - RNA, 19 nt, Artificial Sequence
  Description of Artificial Sequence: Synthetic oligonucleotide
ggucauuggaaucugggcg

SEQ ID NO: 3254050 - RNA, 19 nt, Artificial Sequence
  Description of Artificial Sequence: Synthetic oligonucleotide
gucagggaaagaaagaaag

SEQ ID NO: 3254051 - RNA, 19 nt, Artificial Sequence
  Description of Artificial Sequence: Synthetic oligonucleotide
gaugggcugaauucugugg

SEQ ID NO: 3254052 - RNA, 19 nt, Artificial Sequence
  Description of Artificial Sequence: Synthetic oligonucleotide
ucagggaaagaaagaaagc

SEQ ID NO: 3254053 - RNA, 19 nt, Artificial Sequence
  Description of Artificial Sequence: Synthetic oligonucleotide
guguuuuccuccuaauggg

SEQ ID NO: 3254054 - RNA, 19 nt, Artificial Sequence
  Description of Artificial Sequence: Synthetic oligonucleotide
gcauaaucuacacacacag

SEQ ID NO: 3254055 - RNA, 19 nt, Artificial Sequence
  Description of Artificial Sequence: Synthetic oligonucleotide
gaaguuugagagaugauuc

SEQ ID NO: 3254056 - RNA, 19 nt, Artificial Sequence
  Description of Artificial Sequence: Synthetic oligonucleotide
gucauuggaaucugggcgg

SEQ ID NO: 3254057 - RNA, 19 nt, Artificial Sequence
  Description of Artificial Sequence: Synthetic oligonucleotide
uccacaacggccagcgacg

SEQ ID NO: 3254058 - RNA, 19 nt, Artificial Sequence
  Description of Artificial Sequence: Synthetic oligonucleotide
aagagggaagccuucuucu

SEQ ID NO: 3254059 - RNA, 19 nt, Artificial Sequence
  Description of Artificial Sequence: Synthetic oligonucleotide
aaguguccggcucucggac

SEQ ID NO: 3254060 - RNA, 19 nt, Artificial Sequence
  Description of Artificial Sequence: Synthetic oligonucleotide
uaaucuccucuucagaguc

SEQ ID NO: 3254061 - RNA, 19 nt, Artificial Sequence
  Description of Artificial Sequence: Synthetic oligonucleotide
auucugucuccacaacggc

SEQ ID NO: 3254062 - RNA, 19 nt, Artificial Sequence
  Description of Artificial Sequence: Synthetic oligonucleotide
uugguguugaaguuugaga

SEQ ID NO: 3254063 - RNA, 19 nt, Artificial Sequence
  Description of Artificial Sequence: Synthetic oligonucleotide
uucauagggauagaucugc

SEQ ID NO: 3254064 - RNA, 19 nt, Artificial Sequence
  Description of Artificial Sequence: Synthetic oligonucleotide
uuucauagggauagaucug

SEQ ID NO: 3254065 - RNA, 19 nt, Artificial Sequence
  Description of Artificial Sequence: Synthetic oligonucleotide
ucuacacacacaguggaca

SEQ ID NO: 3254066 - RNA, 19 nt, Artificial Sequence
  Description of Artificial Sequence: Synthetic oligonucleotide
ugaaguuugagagaugauu

SEQ ID NO: 3254067 - RNA, 19 nt, Artificial Sequence
  Description of Artificial Sequence: Synthetic oligonucleotide
caaaauauauauauauaua

SEQ ID NO: 3254068 - RNA, 19 nt, Artificial Sequence
  Description of Artificial Sequence: Synthetic oligonucleotide
aggacuuugauguucccga

SEQ ID NO: 3254069 - RNA, 19 nt, Artificial Sequence
  Description of Artificial Sequence: Synthetic oligonucleotide
cacauaugugaagagacag

SEQ ID NO: 3254070 - RNA, 19 nt, Artificial Sequence
  Description of Artificial Sequence: Synthetic oligonucleotide
ggggagugcaauuagguag

SEQ ID NO: 3254071 - RNA, 19 nt, Artificial Sequence
  Description of Artificial Sequence: Synthetic oligonucleotide
gaauucuguggacuguagc

SEQ ID NO: 3254072 - RNA, 19 nt, Artificial Sequence
  Description of Artificial Sequence: Synthetic oligonucleotide
uuaaucuccucuucagagu

SEQ ID NO: 3254073 - RNA, 19 nt, Artificial Sequence
  Description of Artificial Sequence: Synthetic oligonucleotide
agagagucguguuuuccuc

SEQ ID NO: 3254074 - RNA, 19 nt, Artificial Sequence
  Description of Artificial Sequence: Synthetic oligonucleotide
auauauauauauauauaau

SEQ ID NO: 3254075 - RNA, 19 nt, Artificial Sequence
  Description of Artificial Sequence: Synthetic oligonucleotide
cauuucauagggauagauc

SEQ ID NO: 3254076 - RNA, 19 nt, Artificial Sequence
  Description of Artificial Sequence: Synthetic oligonucleotide
auauauauauauaauuaua

SEQ ID NO: 3254077 - RNA, 19 nt, Artificial Sequence
  Description of Artificial Sequence: Synthetic oligonucleotide
uagcuugccaaacuccuca

SEQ ID NO: 3254078 - RNA, 19 nt, Artificial Sequence
  Description of Artificial Sequence: Synthetic oligonucleotide
accugggcaaaauauauau

SEQ ID NO: 3254079 - RNA, 19 nt, Artificial Sequence
  Description of Artificial Sequence: Synthetic oligonucleotide
gccccaauaaauuacauuc

SEQ ID NO: 3254080 - RNA, 19 nt, Artificial Sequence
  Description of Artificial Sequence: Synthetic oligonucleotide
uggacucucgagcuggcag

SEQ ID NO: 3254081 - RNA, 19 nt, Artificial Sequence
  Description of Artificial Sequence: Synthetic oligonucleotide
uccuugguguugaaguuug

SEQ ID NO: 3254082 - RNA, 19 nt, Artificial Sequence
  Description of Artificial Sequence: Synthetic oligonucleotide
cauaggaaggaagagagga

SEQ ID NO: 3254083 - RNA, 19 nt, Artificial Sequence
  Description of Artificial Sequence: Synthetic oligonucleotide
augauuccaaguguccggc

SEQ ID NO: 3254084 - RNA, 19 nt, Artificial Sequence
  Description of Artificial Sequence: Synthetic oligonucleotide
aaccuuacugagcuccucu

SEQ ID NO: 3254085 - RNA, 19 nt, Artificial Sequence
  Description of Artificial Sequence: Synthetic oligonucleotide
uguucccgaaugcaaggag

SEQ ID NO: 3254086 - RNA, 19 nt, Artificial Sequence
  Description of Artificial Sequence: Synthetic oligonucleotide
ugaauucuguggacuguag

SEQ ID NO: 3254087 - RNA, 19 nt, Artificial Sequence
  Description of Artificial Sequence: Synthetic oligonucleotide
ucguguuuuccuccuaaug

SEQ ID NO: 3254088 - RNA, 19 nt, Artificial Sequence
  Description of Artificial Sequence: Synthetic oligonucleotide
cagcauuucauagggauag

SEQ ID NO: 3254089 - RNA, 19 nt, Artificial Sequence
  Description of Artificial Sequence: Synthetic oligonucleotide
cagggaugucagaagaggg

SEQ ID NO: 3254090 - RNA, 19 nt, Artificial Sequence
  Description of Artificial Sequence: Synthetic oligonucleotide
uaauuccaagcaguuaccc

SEQ ID NO: 3254091 - RNA, 19 nt, Artificial Sequence
  Description of Artificial Sequence: Synthetic oligonucleotide
acaacggccagcgacgggg

SEQ ID NO: 3254092 - RNA, 19 nt, Artificial Sequence
  Description of Artificial Sequence: Synthetic oligonucleotide
guagucagucucuaucuug

SEQ ID NO: 3254093 - RNA, 19 nt, Artificial Sequence
  Description of Artificial Sequence: Synthetic oligonucleotide
auauauauauauauauaua

SEQ ID NO: 3254094 - RNA, 19 nt, Artificial Sequence
  Description of Artificial Sequence: Synthetic oligonucleotide
cauagggauagaucugcag

SEQ ID NO: 3254095 - RNA, 19 nt, Artificial Sequence
  Description of Artificial Sequence: Synthetic oligonucleotide
cagcauaaucuacacacac

SEQ ID NO: 3254096 - RNA, 19 nt, Artificial Sequence
  Description of Artificial Sequence: Synthetic oligonucleotide
ugggcaaggacuuuuccau

SEQ ID NO: 3254097 - RNA, 19 nt, Artificial Sequence
  Description of Artificial Sequence: Synthetic oligonucleotide
cuuugauguucccgaaugc

SEQ ID NO: 3254098 - RNA, 19 nt, Artificial Sequence
  Description of Artificial Sequence: Synthetic oligonucleotide
gcaaaauauauauauauau

SEQ ID NO: 3254099 - RNA, 19 nt, Artificial Sequence
  Description of Artificial Sequence: Synthetic oligonucleotide
gauagaucugcaggccugg

SEQ ID NO: 3254100 - RNA, 19 nt, Artificial Sequence
  Description of Artificial Sequence: Synthetic oligonucleotide
agucagucucuaucuuggc

SEQ ID NO: 3254101 - RNA, 19 nt, Artificial Sequence
  Description of Artificial Sequence: Synthetic oligonucleotide
uuggaaucugggcggguag

SEQ ID NO: 3254102 - RNA, 19 nt, Artificial Sequence
  Description of Artificial Sequence: Synthetic oligonucleotide
acauaugugaagagacagg

SEQ ID NO: 3254103 - RNA, 19 nt, Artificial Sequence
  Description of Artificial Sequence: Synthetic oligonucleotide
uuaguucgccccuuguggu

SEQ ID NO: 3254104 - RNA, 19 nt, Artificial Sequence
  Description of Artificial Sequence: Synthetic oligonucleotide
gaaagcagcagagggugcc

SEQ ID NO: 3254105 - RNA, 19 nt, Artificial Sequence
  Description of Artificial Sequence: Synthetic oligonucleotide
ugggcaaaauauauauaua

SEQ ID NO: 3254106 - RNA, 19 nt, Artificial Sequence
  Description of Artificial Sequence: Synthetic oligonucleotide
agggauagaucugcaggcc

SEQ ID NO: 3254107 - RNA, 19 nt, Artificial Sequence
  Description of Artificial Sequence: Synthetic oligonucleotide
ugugaagagacaggggagu

SEQ ID NO: 3254108 - RNA, 19 nt, Artificial Sequence
  Description of Artificial Sequence: Synthetic oligonucleotide
uuagguagggcagggaguc

SEQ ID NO: 3254109 - RNA, 19 nt, Artificial Sequence
  Description of Artificial Sequence: Synthetic oligonucleotide
cagggugguggaaaguggg

SEQ ID NO: 3254110 - RNA, 19 nt, Artificial Sequence
  Description of Artificial Sequence: Synthetic oligonucleotide
gacaggggagugcaauuag

SEQ ID NO: 3254111 - RNA, 19 nt, Artificial Sequence
  Description of Artificial Sequence: Synthetic oligonucleotide
guucccgaaugcaaggagg

SEQ ID NO: 3254112 - RNA, 19 nt, Artificial Sequence
  Description of Artificial Sequence: Synthetic oligonucleotide
aaguaaccuuacugagcuc

SEQ ID NO: 3254113 - RNA, 19 nt, Artificial Sequence
  Description of Artificial Sequence: Synthetic oligonucleotide
uucauuccucuuccacagg

SEQ ID NO: 3254114 - RNA, 19 nt, Artificial Sequence
  Description of Artificial Sequence: Synthetic oligonucleotide
cuugguguugaaguuugag

SEQ ID NO: 3254115 - RNA, 19 nt, Artificial Sequence
  Description of Artificial Sequence: Synthetic oligonucleotide
gguagucucaggguggugg

SEQ ID NO: 3254116 - RNA, 19 nt, Artificial Sequence
  Description of Artificial Sequence: Synthetic oligonucleotide
aggcagcuuaguucgcccc

SEQ ID NO: 3254117 - RNA, 19 nt, Artificial Sequence
  Description of Artificial Sequence: Synthetic oligonucleotide
ugaaaucucauucagaauc

SEQ ID NO: 3254118 - RNA, 19 nt, Artificial Sequence
  Description of Artificial Sequence: Synthetic oligonucleotide
ucauucagaaucucuaugg

SEQ ID NO: 3254119 - RNA, 19 nt, Artificial Sequence
  Description of Artificial Sequence: Synthetic oligonucleotide
uucacagacagcuagacuc

SEQ ID NO: 3254120 - RNA, 19 nt, Artificial Sequence
  Description of Artificial Sequence: Synthetic oligonucleotide
ugugaaaucucauucagaa

SEQ ID NO: 3254121 - RNA, 19 nt, Artificial Sequence
  Description of Artificial Sequence: Synthetic oligonucleotide
gaugcucugguucagacug

SEQ ID NO: 3254122 - RNA, 19 nt, Artificial Sequence
  Description of Artificial Sequence: Synthetic oligonucleotide
aaucucuauggcuuucugg

SEQ ID NO: 3254123 - RNA, 19 nt, Artificial Sequence
  Description of Artificial Sequence: Synthetic oligonucleotide
auucuguccugccagacgg

SEQ ID NO: 3254124 - RNA, 19 nt, Artificial Sequence
  Description of Artificial Sequence: Synthetic oligonucleotide
acaguggagucccagaggg

SEQ ID NO: 3254125 - RNA, 19 nt, Artificial Sequence
  Description of Artificial Sequence: Synthetic oligonucleotide
uacaaucccacaauggcca

SEQ ID NO: 3254126 - RNA, 19 nt, Artificial Sequence
  Description of Artificial Sequence: Synthetic oligonucleotide
acaucagaugcucugguuc

SEQ ID NO: 3254127 - RNA, 19 nt, Artificial Sequence
  Description of Artificial Sequence: Synthetic oligonucleotide
acagcuagacuccuugugg

SEQ ID NO: 3254128 - RNA, 19 nt, Artificial Sequence
  Description of Artificial Sequence: Synthetic oligonucleotide
uucagaaucucuauggcuu

SEQ ID NO: 3254129 - RNA, 19 nt, Artificial Sequence
  Description of Artificial Sequence: Synthetic oligonucleotide
cuuucugguucacagacag

SEQ ID NO: 3254130 - RNA, 19 nt, Artificial Sequence
  Description of Artificial Sequence: Synthetic oligonucleotide
aucucuauggcuuucuggu

SEQ ID NO: 3254131 - RNA, 19 nt, Artificial Sequence
  Description of Artificial Sequence: Synthetic oligonucleotide
ucugguucagacugcacag

SEQ ID NO: 3254132 - RNA, 19 nt, Artificial Sequence
  Description of Artificial Sequence: Synthetic oligonucleotide
cuugauucuguccugccag

SEQ ID NO: 3254133 - RNA, 19 nt, Artificial Sequence
  Description of Artificial Sequence: Synthetic oligonucleotide
uucugguucacagacagcu

SEQ ID NO: 3254134 - RNA, 19 nt, Artificial Sequence
  Description of Artificial Sequence: Synthetic oligonucleotide
auggcuuucugguucacag

SEQ ID NO: 3254135 - RNA, 19 nt, Artificial Sequence
  Description of Artificial Sequence: Synthetic oligonucleotide
ugccagacgguucaucagg

SEQ ID NO: 3254136 - RNA, 19 nt, Artificial Sequence
  Description of Artificial Sequence: Synthetic oligonucleotide
gguacaaucccacaauggc

SEQ ID NO: 3254137 - RNA, 19 nt, Artificial Sequence
  Description of Artificial Sequence: Synthetic oligonucleotide
cacacaccacaucagaugc

SEQ ID NO: 3254138 - RNA, 19 nt, Artificial Sequence
  Description of Artificial Sequence: Synthetic oligonucleotide
auucagaaucucuauggcu

SEQ ID NO: 3254139 - RNA, 19 nt, Artificial Sequence
  Description of Artificial Sequence: Synthetic oligonucleotide
ucagguaggacuucccugu

SEQ ID NO: 3254140 - RNA, 19 nt, Artificial Sequence
  Description of Artificial Sequence: Synthetic oligonucleotide
gauucuguccugccagacg

SEQ ID NO: 3254141 - RNA, 19 nt, Artificial Sequence
  Description of Artificial Sequence: Synthetic oligonucleotide
cagagggaagccuugauuc

SEQ ID NO: 3254142 - RNA, 19 nt, Artificial Sequence
  Description of Artificial Sequence: Synthetic oligonucleotide
aauggccacgacuaccacu

SEQ ID NO: 3254143 - RNA, 19 nt, Artificial Sequence
  Description of Artificial Sequence: Synthetic oligonucleotide
cauucagaaucucuauggc

SEQ ID NO: 3254144 - RNA, 19 nt, Artificial Sequence
  Description of Artificial Sequence: Synthetic oligonucleotide
ucacagacagcuagacucc

SEQ ID NO: 3254145 - RNA, 19 nt, Artificial Sequence
  Description of Artificial Sequence: Synthetic oligonucleotide
aaaucucauucagaaucuc

SEQ ID NO: 3254146 - RNA, 19 nt, Artificial Sequence
  Description of Artificial Sequence: Synthetic oligonucleotide
uggcugugaaaucucauuc

SEQ ID NO: 3254147 - RNA, 19 nt, Artificial Sequence
  Description of Artificial Sequence: Synthetic oligonucleotide
gaagccuugauucuguccu

SEQ ID NO: 3254148 - RNA, 19 nt, Artificial Sequence
  Description of Artificial Sequence: Synthetic oligonucleotide
cugguucacagacagcuag

SEQ ID NO: 3254149 - RNA, 19 nt, Artificial Sequence
  Description of Artificial Sequence: Synthetic oligonucleotide
ugguucagacugcacagug

SEQ ID NO: 3254150 - RNA, 19 nt, Artificial Sequence
  Description of Artificial Sequence: Synthetic oligonucleotide
cagacgguucaucagguag

SEQ ID NO: 3254151 - RNA, 19 nt, Artificial Sequence
  Description of Artificial Sequence: Synthetic oligonucleotide
ucagacugcacaguggagu

SEQ ID NO: 3254152 - RNA, 19 nt, Artificial Sequence
  Description of Artificial Sequence: Synthetic oligonucleotide
uguccugccagacgguuca

SEQ ID NO: 3254153 - RNA, 19 nt, Artificial Sequence
  Description of Artificial Sequence: Synthetic oligonucleotide
aaucucauucagaaucucu

SEQ ID NO: 3254154 - RNA, 19 nt, Artificial Sequence
  Description of Artificial Sequence: Synthetic oligonucleotide
gguaggacuucccugugcg

SEQ ID NO: 3254155 - RNA, 19 nt, Artificial Sequence
  Description of Artificial Sequence: Synthetic oligonucleotide
gacagcuagacuccuugug

SEQ ID NO: 3254156 - RNA, 19 nt, Artificial Sequence
  Description of Artificial Sequence: Synthetic oligonucleotide
cucauucagaaucucuaug

SEQ ID NO: 3254157 - RNA, 19 nt, Artificial Sequence
  Description of Artificial Sequence: Synthetic oligonucleotide
aucagguaggacuucccug

SEQ ID NO: 3254158 - RNA, 19 nt, Artificial Sequence
  Description of Artificial Sequence: Synthetic oligonucleotide
agguaggacuucccugugc

SEQ ID NO: 3254159 - RNA, 19 nt, Artificial Sequence
  Description of Artificial Sequence: Synthetic oligonucleotide
ucuauggcuuucugguuca

SEQ ID NO: 3254160 - RNA, 19 nt, Artificial Sequence
  Description of Artificial Sequence: Synthetic oligonucleotide
aaucccacaauggccacga

SEQ ID NO: 3254161 - RNA, 19 nt, Artificial Sequence
  Description of Artificial Sequence: Synthetic oligonucleotide
guacaaucccacaauggcc

SEQ ID NO: 3254162 - RNA, 19 nt, Artificial Sequence
  Description of Artificial Sequence: Synthetic oligonucleotide
guucagacugcacagugga

SEQ ID NO: 3254163 - RNA, 19 nt, Artificial Sequence
  Description of Artificial Sequence: Synthetic oligonucleotide
ucucauucagaaucucuau

SEQ ID NO: 3254164 - RNA, 19 nt, Artificial Sequence
  Description of Artificial Sequence: Synthetic oligonucleotide
cucuauggcuuucugguuc

SEQ ID NO: 3254165 - RNA, 19 nt, Artificial Sequence
  Description of Artificial Sequence: Synthetic oligonucleotide
uucaucagguaggacuucc

SEQ ID NO: 3254166 - RNA, 19 nt, Artificial Sequence
  Description of Artificial Sequence: Synthetic oligonucleotide
ucccugugcgguacaaucc

SEQ ID NO: 3254167 - RNA, 19 nt, Artificial Sequence
  Description of Artificial Sequence: Synthetic oligonucleotide
ucccacaauggccacgacu

SEQ ID NO: 3254168 - RNA, 19 nt, Artificial Sequence
  Description of Artificial Sequence: Synthetic oligonucleotide
gcugugaaaucucauucag

SEQ ID NO: 3254169 - RNA, 19 nt, Artificial Sequence
  Description of Artificial Sequence: Synthetic oligonucleotide
uucccugugcgguacaauc

SEQ ID NO: 3254170 - RNA, 19 nt, Artificial Sequence
  Description of Artificial Sequence: Synthetic oligonucleotide
ucaucagguaggacuuccc

SEQ ID NO: 3254171 - RNA, 19 nt, Artificial Sequence
  Description of Artificial Sequence: Synthetic oligonucleotide
ugcgguacaaucccacaau

SEQ ID NO: 3254172 - RNA, 19 nt, Artificial Sequence
  Description of Artificial Sequence: Synthetic oligonucleotide
gaaucucuauggcuuucug

SEQ ID NO: 3254173 - RNA, 19 nt, Artificial Sequence
  Description of Artificial Sequence: Synthetic oligonucleotide
agacgguucaucagguagg

SEQ ID NO: 3254174 - RNA, 19 nt, Artificial Sequence
  Description of Artificial Sequence: Synthetic oligonucleotide
uucagacugcacaguggag

SEQ ID NO: 3254175 - RNA, 19 nt, Artificial Sequence
  Description of Artificial Sequence: Synthetic oligonucleotide
cagacagcuagacuccuug

SEQ ID NO: 3254176 - RNA, 19 nt, Artificial Sequence
  Description of Artificial Sequence: Synthetic oligonucleotide
accacuggcugugaaaucu

SEQ ID NO: 3254177 - RNA, 19 nt, Artificial Sequence
  Description of Artificial Sequence: Synthetic oligonucleotide
acaaucccacaauggccac

SEQ ID NO: 3254178 - RNA, 19 nt, Artificial Sequence
  Description of Artificial Sequence: Synthetic oligonucleotide
auggccacgacuaccacug

SEQ ID NO: 3254179 - RNA, 19 nt, Artificial Sequence
  Description of Artificial Sequence: Synthetic oligonucleotide
gacugcacaguggaguccc

SEQ ID NO: 3254180 - RNA, 19 nt, Artificial Sequence
  Description of Artificial Sequence: Synthetic oligonucleotide
accacaucagaugcucugg

SEQ ID NO: 3254181 - RNA, 19 nt, Artificial Sequence
  Description of Artificial Sequence: Synthetic oligonucleotide
agagggaagccuugauucu

SEQ ID NO: 3254182 - RNA, 19 nt, Artificial Sequence
  Description of Artificial Sequence: Synthetic oligonucleotide
ugguucacagacagcuaga

SEQ ID NO: 3254183 - RNA, 19 nt, Artificial Sequence
  Description of Artificial Sequence: Synthetic oligonucleotide
agccuugauucuguccugc

SEQ ID NO: 3254184 - RNA, 19 nt, Artificial Sequence
  Description of Artificial Sequence: Synthetic oligonucleotide
cucugguucagacugcaca

SEQ ID NO: 3254185 - RNA, 19 nt, Artificial Sequence
  Description of Artificial Sequence: Synthetic oligonucleotide
ugugcgguacaaucccaca

SEQ ID NO: 3254186 - RNA, 19 nt, Artificial Sequence
  Description of Artificial Sequence: Synthetic oligonucleotide
ggcuuucugguucacagac

SEQ ID NO: 3254187 - RNA, 19 nt, Artificial Sequence
  Description of Artificial Sequence: Synthetic oligonucleotide
uuucugguucacagacagc

SEQ ID NO: 3254188 - RNA, 19 nt, Artificial Sequence
  Description of Artificial Sequence: Synthetic oligonucleotide
aagccuugauucuguccug

SEQ ID NO: 3254189 - RNA, 19 nt, Artificial Sequence
  Description of Artificial Sequence: Synthetic oligonucleotide
cacaguggagucccagagg

SEQ ID NO: 3254190 - RNA, 19 nt, Artificial Sequence
  Description of Artificial Sequence: Synthetic oligonucleotide
uaggacuucccugugcggu

SEQ ID NO: 3254191 - RNA, 19 nt, Artificial Sequence
  Description of Artificial Sequence: Synthetic oligonucleotide
ugcacaguggagucccaga

SEQ ID NO: 3254192 - RNA, 19 nt, Artificial Sequence
  Description of Artificial Sequence: Synthetic oligonucleotide
acaauggccacgacuacca

SEQ ID NO: 3254193 - RNA, 19 nt, Artificial Sequence
  Description of Artificial Sequence: Synthetic oligonucleotide
cacaauggccacgacuacc

SEQ ID NO: 3254194 - RNA, 19 nt, Artificial Sequence
  Description of Artificial Sequence: Synthetic oligonucleotide
uggagucccagagggaagc

SEQ ID NO: 3254195 - RNA, 19 nt, Artificial Sequence
  Description of Artificial Sequence: Synthetic oligonucleotide
caccacaucagaugcucug

SEQ ID NO: 3254196 - RNA, 19 nt, Artificial Sequence
  Description of Artificial Sequence: Synthetic oligonucleotide
acuaccacuggcugugaaa

SEQ ID NO: 3254197 - RNA, 19 nt, Artificial Sequence
  Description of Artificial Sequence: Synthetic oligonucleotide
acgacuaccacuggcugug

SEQ ID NO: 3254198 - RNA, 19 nt, Artificial Sequence
  Description of Artificial Sequence: Synthetic oligonucleotide
uugauucuguccugccaga

SEQ ID NO: 3254199 - RNA, 19 nt, Artificial Sequence
  Description of Artificial Sequence: Synthetic oligonucleotide
agaugcucugguucagacu

SEQ ID NO: 3254200 - RNA, 19 nt, Artificial Sequence
  Description of Artificial Sequence: Synthetic oligonucleotide
caucagaugcucugguuca

SEQ ID NO: 3254201 - RNA, 19 nt, Artificial Sequence
  Description of Artificial Sequence: Synthetic oligonucleotide
aguggagucccagagggaa

SEQ ID NO: 3254202 - RNA, 19 nt, Artificial Sequence
  Description of Artificial Sequence: Synthetic oligonucleotide
gaaaucucauucagaaucu

SEQ ID NO: 3254203 - RNA, 19 nt, Artificial Sequence
  Description of Artificial Sequence: Synthetic oligonucleotide
cagaugcucugguucagac

SEQ ID NO: 3254204 - RNA, 19 nt, Artificial Sequence
  Description of Artificial Sequence: Synthetic oligonucleotide
ucagaaucucuauggcuuu

SEQ ID NO: 3254205 - RNA, 19 nt, Artificial Sequence
  Description of Artificial Sequence: Synthetic oligonucleotide
cagacugcacaguggaguc

SEQ ID NO: 3254206 - RNA, 19 nt, Artificial Sequence
  Description of Artificial Sequence: Synthetic oligonucleotide
gagggaagccuugauucug

SEQ ID NO: 3254207 - RNA, 19 nt, Artificial Sequence
  Description of Artificial Sequence: Synthetic oligonucleotide
agacugcacaguggagucc

SEQ ID NO: 3254208 - RNA, 19 nt, Artificial Sequence
  Description of Artificial Sequence: Synthetic oligonucleotide
aucucauucagaaucucua

SEQ ID NO: 3254209 - RNA, 19 nt, Artificial Sequence
  Description of Artificial Sequence: Synthetic oligonucleotide
gacuccuugugguuuucca

SEQ ID NO: 3254210 - RNA, 19 nt, Artificial Sequence
  Description of Artificial Sequence: Synthetic oligonucleotide
guaggacuucccugugcgg

SEQ ID NO: 3254211 - RNA, 19 nt, Artificial Sequence
  Description of Artificial Sequence: Synthetic oligonucleotide
agacuccuugugguuuucc

SEQ ID NO: 3254212 - RNA, 19 nt, Artificial Sequence
  Description of Artificial Sequence: Synthetic oligonucleotide
agaaucucuauggcuuucu

SEQ ID NO: 3254213 - RNA, 19 nt, Artificial Sequence
  Description of Artificial Sequence: Synthetic oligonucleotide
uauggcuuucugguucaca

SEQ ID NO: 3254214 - RNA, 19 nt, Artificial Sequence
  Description of Artificial Sequence: Synthetic oligonucleotide
cacaccacaucagaugcuc

SEQ ID NO: 3254215 - RNA, 19 nt, Artificial Sequence
  Description of Artificial Sequence: Synthetic oligonucleotide
cugugcgguacaaucccac

SEQ ID NO: 3254216 - RNA, 19 nt, Artificial Sequence
  Description of Artificial Sequence: Synthetic oligonucleotide
cugugaaaucucauucaga

SEQ ID NO: 3254217 - RNA, 19 nt, Artificial Sequence
  Description of Artificial Sequence: Synthetic oligonucleotide
aaucuaacugaacugaauc

SEQ ID NO: 3254218 - RNA, 19 nt, Artificial Sequence
  Description of Artificial Sequence: Synthetic oligonucleotide
uggaaguucacaaacacag

SEQ ID NO: 3254219 - RNA, 19 nt, Artificial Sequence
  Description of Artificial Sequence: Synthetic oligonucleotide
aauacaguucuuaagcugg

SEQ ID NO: 3254220 - RNA, 19 nt, Artificial Sequence
  Description of Artificial Sequence: Synthetic oligonucleotide
auuuuggaaguucacaaac

SEQ ID NO: 3254221 - RNA, 19 nt, Artificial Sequence
  Description of Artificial Sequence: Synthetic oligonucleotide
aguucacaaacacagaguc

SEQ ID NO: 3254222 - RNA, 19 nt, Artificial Sequence
  Description of Artificial Sequence: Synthetic oligonucleotide
aaacacagaguccacauug

SEQ ID NO: 3254223 - RNA, 19 nt, Artificial Sequence
  Description of Artificial Sequence: Synthetic oligonucleotide
aacugaaucuuggugaagc

SEQ ID NO: 3254224 - RNA, 19 nt, Artificial Sequence
  Description of Artificial Sequence: Synthetic oligonucleotide
gaaaguggaaaucuaacug

SEQ ID NO: 3254225 - RNA, 19 nt, Artificial Sequence
  Description of Artificial Sequence: Synthetic oligonucleotide
ucgauggucacacagaaga

SEQ ID NO: 3254226 - RNA, 19 nt, Artificial Sequence
  Description of Artificial Sequence: Synthetic oligonucleotide
aaaguggaaaucuaacuga

SEQ ID NO: 3254227 - RNA, 19 nt, Artificial Sequence
  Description of Artificial Sequence: Synthetic oligonucleotide
gaaguucacaaacacagag

SEQ ID NO: 3254228 - RNA, 19 nt, Artificial Sequence
  Description of Artificial Sequence: Synthetic oligonucleotide
aucuuggugaagcagaggg

SEQ ID NO: 3254229 - RNA, 19 nt, Artificial Sequence
  Description of Artificial Sequence: Synthetic oligonucleotide
cugaauacaguucuuaagc

SEQ ID NO: 3254230 - RNA, 19 nt, Artificial Sequence
  Description of Artificial Sequence: Synthetic oligonucleotide
cuuccgaucauuuuggaag

SEQ ID NO: 3254231 - RNA, 19 nt, Artificial Sequence
  Description of Artificial Sequence: Synthetic oligonucleotide
uucacaaacacagagucca

SEQ ID NO: 3254232 - RNA, 19 nt, Artificial Sequence
  Description of Artificial Sequence: Synthetic oligonucleotide
gaucuaaggccugauaugg

SEQ ID NO: 3254233 - RNA, 19 nt, Artificial Sequence
  Description of Artificial Sequence: Synthetic oligonucleotide
aaaggcucgaagcagggcu

SEQ ID NO: 3254234 - RNA, 19 nt, Artificial Sequence
  Description of Artificial Sequence: Synthetic oligonucleotide
ugaaucuuggugaagcaga

SEQ ID NO: 3254235 - RNA, 19 nt, Artificial Sequence
  Description of Artificial Sequence: Synthetic oligonucleotide
uuuggaaguucacaaacac

SEQ ID NO: 3254236 - RNA, 19 nt, Artificial Sequence
  Description of Artificial Sequence: Synthetic oligonucleotide
acagaguccacauuggucu

SEQ ID NO: 3254237 - RNA, 19 nt, Artificial Sequence
  Description of Artificial Sequence: Synthetic oligonucleotide
ucuuuguuccuuccgauca

SEQ ID NO: 3254238 - RNA, 19 nt, Artificial Sequence
  Description of Artificial Sequence: Synthetic oligonucleotide
auaugggauauccaggaag

SEQ ID NO: 3254239 - RNA, 19 nt, Artificial Sequence
  Description of Artificial Sequence: Synthetic oligonucleotide
ugaaaguggaaaucuaacu

SEQ ID NO: 3254240 - RNA, 19 nt, Artificial Sequence
  Description of Artificial Sequence: Synthetic oligonucleotide
uaugggauauccaggaaga

SEQ ID NO: 3254241 - RNA, 19 nt, Artificial Sequence
  Description of Artificial Sequence: Synthetic oligonucleotide
guugccgugaucuaaggcc

SEQ ID NO: 3254242 - RNA, 19 nt, Artificial Sequence
  Description of Artificial Sequence: Synthetic oligonucleotide
uaacugaacugaaucuugg

SEQ ID NO: 3254243 - RNA, 19 nt, Artificial Sequence
  Description of Artificial Sequence: Synthetic oligonucleotide
uugcugucaaacuuucucg

SEQ ID NO: 3254244 - RNA, 19 nt, Artificial Sequence
  Description of Artificial Sequence: Synthetic oligonucleotide
aagaccaugccaaugagca

SEQ ID NO: 3254245 - RNA, 19 nt, Artificial Sequence
  Description of Artificial Sequence: Synthetic oligonucleotide
gaauacaguucuuaagcug

SEQ ID NO: 3254246 - RNA, 19 nt, Artificial Sequence
  Description of Artificial Sequence: Synthetic oligonucleotide
ucauuuuggaaguucacaa

SEQ ID NO: 3254247 - RNA, 19 nt, Artificial Sequence
  Description of Artificial Sequence: Synthetic oligonucleotide
ugauaugggauauccagga

SEQ ID NO: 3254248 - RNA, 19 nt, Artificial Sequence
  Description of Artificial Sequence: Synthetic oligonucleotide
uggaaaucuaacugaacug

SEQ ID NO: 3254249 - RNA, 19 nt, Artificial Sequence
  Description of Artificial Sequence: Synthetic oligonucleotide
uuuuggaaguucacaaaca

SEQ ID NO: 3254250 - RNA, 19 nt, Artificial Sequence
  Description of Artificial Sequence: Synthetic oligonucleotide
ugaauacaguucuuaagcu

SEQ ID NO: 3254251 - RNA, 19 nt, Artificial Sequence
  Description of Artificial Sequence: Synthetic oligonucleotide
acugaacugaaucuuggug

SEQ ID NO: 3254252 - RNA, 19 nt, Artificial Sequence
  Description of Artificial Sequence: Synthetic oligonucleotide
agggcuaccuucuuuguuc

SEQ ID NO: 3254253 - RNA, 19 nt, Artificial Sequence
  Description of Artificial Sequence: Synthetic oligonucleotide
uuccuuccgaucauuuugg

SEQ ID NO: 3254254 - RNA, 19 nt, Artificial Sequence
  Description of Artificial Sequence: Synthetic oligonucleotide
  modified_base (10)..(10): a, c, u, g, unknown or other
uggucuuucnccugaucag

SEQ ID NO: 3254255 - RNA, 19 nt, Artificial Sequence
  Description of Artificial Sequence: Synthetic oligonucleotide
ucaguugauagcacuguca

SEQ ID NO: 3254256 - RNA, 19 nt, Artificial Sequence
  Description of Artificial Sequence: Synthetic oligonucleotide
agagucgauggucacacag

SEQ ID NO: 3254257 - RNA, 19 nt, Artificial Sequence
  Description of Artificial Sequence: Synthetic oligonucleotide
ugcugucaaacuuucucgg

SEQ ID NO: 3254258 - RNA, 19 nt, Artificial Sequence
  Description of Artificial Sequence: Synthetic oligonucleotide
uucuccuccacauacucca

SEQ ID NO: 3254259 - RNA, 19 nt, Artificial Sequence
  Description of Artificial Sequence: Synthetic oligonucleotide
aaugagcagaggaaugggg

SEQ ID NO: 3254260 - RNA, 19 nt, Artificial Sequence
  Description of Artificial Sequence: Synthetic oligonucleotide
cugauaugggauauccagg

SEQ ID NO: 3254261 - RNA, 19 nt, Artificial Sequence
  Description of Artificial Sequence: Synthetic oligonucleotide
ugaucagugcuucugccca

SEQ ID NO: 3254262 - RNA, 19 nt, Artificial Sequence
  Description of Artificial Sequence: Synthetic oligonucleotide
ucuaaggccugauauggga

SEQ ID NO: 3254263 - RNA, 19 nt, Artificial Sequence
  Description of Artificial Sequence: Synthetic oligonucleotide
ugaucuaaggccugauaug

SEQ ID NO: 3254264 - RNA, 19 nt, Artificial Sequence
  Description of Artificial Sequence: Synthetic oligonucleotide
acuggaggccucuagcgac

SEQ ID NO: 3254265 - RNA, 19 nt, Artificial Sequence
  Description of Artificial Sequence: Synthetic oligonucleotide
ugucaaacuuucucgguug

SEQ ID NO: 3254266 - RNA, 19 nt, Artificial Sequence
  Description of Artificial Sequence: Synthetic oligonucleotide
augaaaguggaaaucuaac

SEQ ID NO: 3254267 - RNA, 19 nt, Artificial Sequence
  Description of Artificial Sequence: Synthetic oligonucleotide
gaagcagagggucaguuga

SEQ ID NO: 3254268 - RNA, 19 nt, Artificial Sequence
  Description of Artificial Sequence: Synthetic oligonucleotide
agcacugucagguucccag

SEQ ID NO: 3254269 - RNA, 19 nt, Artificial Sequence
  Description of Artificial Sequence: Synthetic oligonucleotide
aucuaacugaacugaaucu

SEQ ID NO: 3254270 - RNA, 19 nt, Artificial Sequence
  Description of Artificial Sequence: Synthetic oligonucleotide
cuaacugaacugaaucuug

SEQ ID NO: 3254271 - RNA, 19 nt, Artificial Sequence
  Description of Artificial Sequence: Synthetic oligonucleotide
guuccuuccgaucauuuug

SEQ ID NO: 3254272 - RNA, 19 nt, Artificial Sequence
  Description of Artificial Sequence: Synthetic oligonucleotide
uccacauuggucuucuccu

SEQ ID NO: 3254273 - RNA, 19 nt, Artificial Sequence
  Description of Artificial Sequence: Synthetic oligonucleotide
uuggaaguucacaaacaca

SEQ ID NO: 3254274 - RNA, 19 nt, Artificial Sequence
  Description of Artificial Sequence: Synthetic oligonucleotide
  modified_base (7)..(7): a, c, u, g, unknown or other
ucuuucnccugaucagugc

SEQ ID NO: 3254275 - RNA, 19 nt, Artificial Sequence
  Description of Artificial Sequence: Synthetic oligonucleotide
cugaacugaaucuugguga

SEQ ID NO: 3254276 - RNA, 19 nt, Artificial Sequence
  Description of Artificial Sequence: Synthetic oligonucleotide
ugagcagaggaauggggag

SEQ ID NO: 3254277 - RNA, 19 nt, Artificial Sequence
  Description of Artificial Sequence: Synthetic oligonucleotide
guugcugucaaacuuucuc

SEQ ID NO: 3254278 - RNA, 19 nt, Artificial Sequence
  Description of Artificial Sequence: Synthetic oligonucleotide
caguugauagcacugucag

SEQ ID NO: 3254279 - RNA, 19 nt, Artificial Sequence
  Description of Artificial Sequence: Synthetic oligonucleotide
auccaggaagagucgaugg

SEQ ID NO: 3254280 - RNA, 19 nt, Artificial Sequence
  Description of Artificial Sequence: Synthetic oligonucleotide
ugcuucugcccacuggagg

SEQ ID NO: 3254281 - RNA, 19 nt, Artificial Sequence
  Description of Artificial Sequence: Synthetic oligonucleotide
gauggucacacagaagacc

SEQ ID NO: 3254282 - RNA, 19 nt, Artificial Sequence
  Description of Artificial Sequence: Synthetic oligonucleotide
caaacuuucucgguugccg

SEQ ID NO: 3254283 - RNA, 19 nt, Artificial Sequence
  Description of Artificial Sequence: Synthetic oligonucleotide
  modified_base (17)..(17): a, c, u, g, unknown or other
cuggcuguggucuuucncc

SEQ ID NO: 3254284 - RNA, 19 nt, Artificial Sequence
  Description of Artificial Sequence: Synthetic oligonucleotide
acaguucuuaagcuggcug

SEQ ID NO: 3254285 - RNA, 19 nt, Artificial Sequence
  Description of Artificial Sequence: Synthetic oligonucleotide
aaacuuucucgguugccgu

SEQ ID NO: 3254286 - RNA, 19 nt, Artificial Sequence
  Description of Artificial Sequence: Synthetic oligonucleotide
aacugaacugaaucuuggu

SEQ ID NO: 3254287 - RNA, 19 nt, Artificial Sequence
  Description of Artificial Sequence: Synthetic oligonucleotide
gauagcacugucagguucc

SEQ ID NO: 3254288 - RNA, 19 nt, Artificial Sequence
  Description of Artificial Sequence: Synthetic oligonucleotide
aacacagaguccacauugg

SEQ ID NO: 3254289 - RNA, 19 nt, Artificial Sequence
  Description of Artificial Sequence: Synthetic oligonucleotide
ccugauaugggauauccag

SEQ ID NO: 3254290 - RNA, 19 nt, Artificial Sequence
  Description of Artificial Sequence: Synthetic oligonucleotide
agugcuucugcccacugga

SEQ ID NO: 3254291 - RNA, 19 nt, Artificial Sequence
  Description of Artificial Sequence: Synthetic oligonucleotide
ugaacugaaucuuggugaa

SEQ ID NO: 3254292 - RNA, 19 nt, Artificial Sequence
  Description of Artificial Sequence: Synthetic oligonucleotide
ucacacagaagaccaugcc

SEQ ID NO: 3254293 - RNA, 19 nt, Artificial Sequence
  Description of Artificial Sequence: Synthetic oligonucleotide
ucagguucccagcugaaua

SEQ ID NO: 3254294 - RNA, 19 nt, Artificial Sequence
  Description of Artificial Sequence: Synthetic oligonucleotide
gaagagucgauggucacac

SEQ ID NO: 3254295 - RNA, 19 nt, Artificial Sequence
  Description of Artificial Sequence: Synthetic oligonucleotide
uucucgguugccgugaucu

SEQ ID NO: 3254296 - RNA, 19 nt, Artificial Sequence
  Description of Artificial Sequence: Synthetic oligonucleotide
uccacauacuccaguguug

SEQ ID NO: 3254297 - RNA, 19 nt, Artificial Sequence
  Description of Artificial Sequence: Synthetic oligonucleotide
aguugauagcacugucagg

SEQ ID NO: 3254298 - RNA, 19 nt, Artificial Sequence
  Description of Artificial Sequence: Synthetic oligonucleotide
uccaguguugcugucaaac

SEQ ID NO: 3254299 - RNA, 19 nt, Artificial Sequence
  Description of Artificial Sequence: Synthetic oligonucleotide
acaaacacagaguccacau

SEQ ID NO: 3254300 - RNA, 19 nt, Artificial Sequence
  Description of Artificial Sequence: Synthetic oligonucleotide
guggaaaucuaacugaacu

SEQ ID NO: 3254301 - RNA, 19 nt, Artificial Sequence
  Description of Artificial Sequence: Synthetic oligonucleotide
ugauagcacugucagguuc

SEQ ID NO: 3254302 - RNA, 19 nt, Artificial Sequence
  Description of Artificial Sequence: Synthetic oligonucleotide
cuaaaggcucgaagcaggg

SEQ ID NO: 3254303 - RNA, 19 nt, Artificial Sequence
  Description of Artificial Sequence: Synthetic oligonucleotide
caugccaaugagcagagga

SEQ ID NO: 3254304 - RNA, 19 nt, Artificial Sequence
  Description of Artificial Sequence: Synthetic oligonucleotide
ucuaacugaacugaaucuu

SEQ ID NO: 3254305 - RNA, 19 nt, Artificial Sequence
  Description of Artificial Sequence: Synthetic oligonucleotide
guugauagcacugucaggu

SEQ ID NO: 3254306 - RNA, 19 nt, Artificial Sequence
  Description of Artificial Sequence: Synthetic oligonucleotide
agugggaugaaaguggaaa

SEQ ID NO: 3254307 - RNA, 19 nt, Artificial Sequence
  Description of Artificial Sequence: Synthetic oligonucleotide
aaguucacaaacacagagu

SEQ ID NO: 3254308 - RNA, 19 nt, Artificial Sequence
  Description of Artificial Sequence: Synthetic oligonucleotide
agcagggcuaccuucuuug

SEQ ID NO: 3254309 - RNA, 19 nt, Artificial Sequence
  Description of Artificial Sequence: Synthetic oligonucleotide
aucauuuuggaaguucaca

SEQ ID NO: 3254310 - RNA, 19 nt, Artificial Sequence
  Description of Artificial Sequence: Synthetic oligonucleotide
uucuuaagcuggcuguggu

SEQ ID NO: 3254311 - RNA, 19 nt, Artificial Sequence
  Description of Artificial Sequence: Synthetic oligonucleotide
ucuucuccuccacauacuc

SEQ ID NO: 3254312 - RNA, 19 nt, Artificial Sequence
  Description of Artificial Sequence: Synthetic oligonucleotide
uccuccacauacuccagug

SEQ ID NO: 3254313 - RNA, 19 nt, Artificial Sequence
  Description of Artificial Sequence: Synthetic oligonucleotide
  modified_base (11)..(11): a, c, u, g, unknown or other
guggucuuucnccugauca

SEQ ID NO: 3254314 - RNA, 19 nt, Artificial Sequence
  Description of Artificial Sequence: Synthetic oligonucleotide
ugaagcagagggucaguug

SEQ ID NO: 3254315 - RNA, 19 nt, Artificial Sequence
  Description of Artificial Sequence: Synthetic oligonucleotide
aacuuucucgguugccgug

SEQ ID NO: 3254316 - RNA, 19 nt, Artificial Sequence
  Description of Artificial Sequence: Synthetic oligonucleotide
gaaucuuggugaagcagag

SEQ ID NO: 3254317 - RNA, 19 nt, Artificial Sequence
  Description of Artificial Sequence: Synthetic oligonucleotide
aacagggagacauuuaacc

SEQ ID NO: 3254318 - RNA, 19 nt, Artificial Sequence
  Description of Artificial Sequence: Synthetic oligonucleotide
uuuucugaaaauucuaugg

SEQ ID NO: 3254319 - RNA, 19 nt, Artificial Sequence
  Description of Artificial Sequence: Synthetic oligonucleotide
aaaacagcgguguuugacc

SEQ ID NO: 3254320 - RNA, 19 nt, Artificial Sequence
  Description of Artificial Sequence: Synthetic oligonucleotide
aaaagagaaaauucuggag

SEQ ID NO: 3254321 - RNA, 19 nt, Artificial Sequence
  Description of Artificial Sequence: Synthetic oligonucleotide
auuucaccaaaauaucucc

SEQ ID NO: 3254322 - RNA, 19 nt, Artificial Sequence
  Description of Artificial Sequence: Synthetic oligonucleotide
ugagcauucaucaucagcu

SEQ ID NO: 3254323 - RNA, 19 nt, Artificial Sequence
  Description of Artificial Sequence: Synthetic oligonucleotide
caaaauaaagauaauugac

SEQ ID NO: 3254324 - RNA, 19 nt, Artificial Sequence
  Description of Artificial Sequence: Synthetic oligonucleotide
auauauuggagcuuccugg

SEQ ID NO: 3254325 - RNA, 19 nt, Artificial Sequence
  Description of Artificial Sequence: Synthetic oligonucleotide
aaaauaaagauaauugacu

SEQ ID NO: 3254326 - RNA, 19 nt, Artificial Sequence
  Description of Artificial Sequence: Synthetic oligonucleotide
uuuagaauugucgugagca

SEQ ID NO: 3254327 - RNA, 19 nt, Artificial Sequence
  Description of Artificial Sequence: Synthetic oligonucleotide
guaaauacagggcaaaggc

SEQ ID NO: 3254328 - RNA, 19 nt, Artificial Sequence
  Description of Artificial Sequence: Synthetic oligonucleotide
uguuccuucauuuuguaca

SEQ ID NO: 3254329 - RNA, 19 nt, Artificial Sequence
  Description of Artificial Sequence: Synthetic oligonucleotide
ucuucuguauaucagggug

SEQ ID NO: 3254330 - RNA, 19 nt, Artificial Sequence
  Description of Artificial Sequence: Synthetic oligonucleotide
aauugacugggcuaugauc

SEQ ID NO: 3254331 - RNA, 19 nt, Artificial Sequence
  Description of Artificial Sequence: Synthetic oligonucleotide
ucaucaaucccacugggcc

SEQ ID NO: 3254332 - RNA, 19 nt, Artificial Sequence
  Description of Artificial Sequence: Synthetic oligonucleotide
aaaauaucuccauacugcu

SEQ ID NO: 3254333 - RNA, 19 nt, Artificial Sequence
  Description of Artificial Sequence: Synthetic oligonucleotide
uguguuuccuuacuaaggc

SEQ ID NO: 3254334 - RNA, 19 nt, Artificial Sequence
  Description of Artificial Sequence: Synthetic oligonucleotide
uuacucaucaaucccacug

SEQ ID NO: 3254335 - RNA, 19 nt, Artificial Sequence
  Description of Artificial Sequence: Synthetic oligonucleotide
uucuauggaauccuuuggg

SEQ ID NO: 3254336 - RNA, 19 nt, Artificial Sequence
  Description of Artificial Sequence: Synthetic oligonucleotide
ucagacagagcuuugugag

SEQ ID NO: 3254337 - RNA, 19 nt, Artificial Sequence
  Description of Artificial Sequence: Synthetic oligonucleotide
uuuuccauacuuuuacggc

SEQ ID NO: 3254338 - RNA, 19 nt, Artificial Sequence
  Description of Artificial Sequence: Synthetic oligonucleotide
aucacauccaugcuguagg

SEQ ID NO: 3254339 - RNA, 19 nt, Artificial Sequence
  Description of Artificial Sequence: Synthetic oligonucleotide
acaaauuuucugaaaauuc

SEQ ID NO: 3254340 - RNA, 19 nt, Artificial Sequence
  Description of Artificial Sequence: Synthetic oligonucleotide
gaaaagagaaaauucugga

SEQ ID NO: 3254341 - RNA, 19 nt, Artificial Sequence
  Description of Artificial Sequence: Synthetic oligonucleotide
ugaucuccaugucagacag

SEQ ID NO: 3254342 - RNA, 19 nt, Artificial Sequence
  Description of Artificial Sequence: Synthetic oligonucleotide
uauuucaccaaaauaucuc

SEQ ID NO: 3254343 - RNA, 19 nt, Artificial Sequence
  Description of Artificial Sequence: Synthetic oligonucleotide
ugggcuaugaucuccaugu

SEQ ID NO: 3254344 - RNA, 19 nt, Artificial Sequence
  Description of Artificial Sequence: Synthetic oligonucleotide
ucugaaaauucuauggaau

SEQ ID NO: 3254345 - RNA, 19 nt, Artificial Sequence
  Description of Artificial Sequence: Synthetic oligonucleotide
accucucauauauuggagc

SEQ ID NO: 3254346 - RNA, 19 nt, Artificial Sequence
  Description of Artificial Sequence: Synthetic oligonucleotide
aacacuucuuuugugauga

SEQ ID NO: 3254347 - RNA, 19 nt, Artificial Sequence
  Description of Artificial Sequence: Synthetic oligonucleotide
uugaguuuuccacugguga

SEQ ID NO: 3254348 - RNA, 19 nt, Artificial Sequence
  Description of Artificial Sequence: Synthetic oligonucleotide
auuuucugaaaauucuaug

SEQ ID NO: 3254349 - RNA, 19 nt, Artificial Sequence
  Description of Artificial Sequence: Synthetic oligonucleotide
uugucuuuagaauugucgu

SEQ ID NO: 3254350 - RNA, 19 nt, Artificial Sequence
  Description of Artificial Sequence: Synthetic oligonucleotide
uuuccauacuuuuacggca

SEQ ID NO: 3254351 - RNA, 19 nt, Artificial Sequence
  Description of Artificial Sequence: Synthetic oligonucleotide
uaaauacagggcaaaggca

SEQ ID NO: 3254352 - RNA, 19 nt, Artificial Sequence
  Description of Artificial Sequence: Synthetic oligonucleotide
gacagaauagcauuccuuc

SEQ ID NO: 3254353 - RNA, 19 nt, Artificial Sequence
  Description of Artificial Sequence: Synthetic oligonucleotide
uggcacaaccuuuagaaca

SEQ ID NO: 3254354 - RNA, 19 nt, Artificial Sequence
  Description of Artificial Sequence: Synthetic oligonucleotide
uccuuuggguuguugaggg

SEQ ID NO: 3254355 - RNA, 19 nt, Artificial Sequence
  Description of Artificial Sequence: Synthetic oligonucleotide
uaaugauugcagaccgugg

SEQ ID NO: 3254356 - RNA, 19 nt, Artificial Sequence
  Description of Artificial Sequence: Synthetic oligonucleotide
uauauuggagcuuccuggc

SEQ ID NO: 3254357 - RNA, 19 nt, Artificial Sequence
  Description of Artificial Sequence: Synthetic oligonucleotide
agcugaaggaaauccacuc

SEQ ID NO: 3254358 - RNA, 19 nt, Artificial Sequence
  Description of Artificial Sequence: Synthetic oligonucleotide
uacuaaggcuggaaaagag

SEQ ID NO: 3254359 - RNA, 19 nt, Artificial Sequence
  Description of Artificial Sequence: Synthetic oligonucleotide
acugcuuuacucaucaauc

SEQ ID NO: 3254360 - RNA, 19 nt, Artificial Sequence
  Description of Artificial Sequence: Synthetic oligonucleotide
uaaccucucauauauugga

SEQ ID NO: 3254361 - RNA, 19 nt, Artificial Sequence
  Description of Artificial Sequence: Synthetic oligonucleotide
aagauaauugacugggcua

SEQ ID NO: 3254362 - RNA, 19 nt, Artificial Sequence
  Description of Artificial Sequence: Synthetic oligonucleotide
uauggaauccuuugggaac

SEQ ID NO: 3254363 - RNA, 19 nt, Artificial Sequence
  Description of Artificial Sequence: Synthetic oligonucleotide
uuugugagacucuuugucu

SEQ ID NO: 3254364 - RNA, 19 nt, Artificial Sequence
  Description of Artificial Sequence: Synthetic oligonucleotide
cugaaggaaauccacucgg

SEQ ID NO: 3254365 - RNA, 19 nt, Artificial Sequence
  Description of Artificial Sequence: Synthetic oligonucleotide
ugcuuuacucaucaauccc

SEQ ID NO: 3254366 - RNA, 19 nt, Artificial Sequence
  Description of Artificial Sequence: Synthetic oligonucleotide
aagugggagacagcaaggc

SEQ ID NO: 3254367 - RNA, 19 nt, Artificial Sequence
  Description of Artificial Sequence: Synthetic oligonucleotide
uguauaucagggugaguag

SEQ ID NO: 3254368 - RNA, 19 nt, Artificial Sequence
  Description of Artificial Sequence: Synthetic oligonucleotide
uugucgugagcauucauca

SEQ ID NO: 3254369 - RNA, 19 nt, Artificial Sequence
  Description of Artificial Sequence: Synthetic oligonucleotide
ucucuucucaaguauuuca

SEQ ID NO: 3254370 - RNA, 19 nt, Artificial Sequence
  Description of Artificial Sequence: Synthetic oligonucleotide
uacauucuugaucaucucu

SEQ ID NO: 3254371 - RNA, 19 nt, Artificial Sequence
  Description of Artificial Sequence: Synthetic oligonucleotide
aaacacuucuuuugugaug

SEQ ID NO: 3254372 - RNA, 19 nt, Artificial Sequence
  Description of Artificial Sequence: Synthetic oligonucleotide
ggaaaagagaaaauucugg

SEQ ID NO: 3254373 - RNA, 19 nt, Artificial Sequence
  Description of Artificial Sequence: Synthetic oligonucleotide
cuguguuuccuuacuaagg

SEQ ID NO: 3254374 - RNA, 19 nt, Artificial Sequence
  Description of Artificial Sequence: Synthetic oligonucleotide
auugacugggcuaugaucu

SEQ ID NO: 3254375 - RNA, 19 nt, Artificial Sequence
  Description of Artificial Sequence: Synthetic oligonucleotide
aaccuuuagaacaaugggu

SEQ ID NO: 3254376 - RNA, 19 nt, Artificial Sequence
  Description of Artificial Sequence: Synthetic oligonucleotide
ucuauggaauccuuuggga

SEQ ID NO: 3254377 - RNA, 19 nt, Artificial Sequence
  Description of Artificial Sequence: Synthetic oligonucleotide
acuggugaaagugggagac

SEQ ID NO: 3254378 - RNA, 19 nt, Artificial Sequence
  Description of Artificial Sequence: Synthetic oligonucleotide
cugaaaauucuauggaauc

SEQ ID NO: 3254379 - RNA, 19 nt, Artificial Sequence
  Description of Artificial Sequence: Synthetic oligonucleotide
cacaaaaggguccuuuggg

SEQ ID NO: 3254380 - RNA, 19 nt, Artificial Sequence
  Description of Artificial Sequence: Synthetic oligonucleotide
gaggacuuuagugagagca

SEQ ID NO: 3254381 - RNA, 19 nt, Artificial Sequence
  Description of Artificial Sequence: Synthetic oligonucleotide
auagcauuccuucacuagu

SEQ ID NO: 3254382 - RNA, 19 nt, Artificial Sequence
  Description of Artificial Sequence: Synthetic oligonucleotide
ugggccaaaaucccgccgg

SEQ ID NO: 3254383 - RNA, 19 nt, Artificial Sequence
  Description of Artificial Sequence: Synthetic oligonucleotide
caccaaaauaucuccauac

SEQ ID NO: 3254384 - RNA, 19 nt, Artificial Sequence
  Description of Artificial Sequence: Synthetic oligonucleotide
aauuuucugaaaauucuau

SEQ ID NO: 3254385 - RNA, 19 nt, Artificial Sequence
  Description of Artificial Sequence: Synthetic oligonucleotide
ugucuuuagaauugucgug

SEQ ID NO: 3254386 - RNA, 19 nt, Artificial Sequence
  Description of Artificial Sequence: Synthetic oligonucleotide
agcuuugugagacucuuug

SEQ ID NO: 3254387 - RNA, 19 nt, Artificial Sequence
  Description of Artificial Sequence: Synthetic oligonucleotide
uuugaguuuuccacuggug

SEQ ID NO: 3254388 - RNA, 19 nt, Artificial Sequence
  Description of Artificial Sequence: Synthetic oligonucleotide
ucggcuuaauuucauuggc

SEQ ID NO: 3254389 - RNA, 19 nt, Artificial Sequence
  Description of Artificial Sequence: Synthetic oligonucleotide
ucagcugaaggaaauccac

SEQ ID NO: 3254390 - RNA, 19 nt, Artificial Sequence
  Description of Artificial Sequence: Synthetic oligonucleotide
auauuggagcuuccuggcc

SEQ ID NO: 3254391 - RNA, 19 nt, Artificial Sequence
  Description of Artificial Sequence: Synthetic oligonucleotide
uauuggagcuuccuggccu

SEQ ID NO: 3254392 - RNA, 19 nt, Artificial Sequence
  Description of Artificial Sequence: Synthetic oligonucleotide
auccuuugggaacagggag

SEQ ID NO: 3254393 - RNA, 19 nt, Artificial Sequence
  Description of Artificial Sequence: Synthetic oligonucleotide
uagccagcaaaauaaagau

SEQ ID NO: 3254394 - RNA, 19 nt, Artificial Sequence
  Description of Artificial Sequence: Synthetic oligonucleotide
ucuucucaaguauuucacc

SEQ ID NO: 3254395 - RNA, 19 nt, Artificial Sequence
  Description of Artificial Sequence: Synthetic oligonucleotide
ucuuugaguuuuccacugg

SEQ ID NO: 3254396 - RNA, 19 nt, Artificial Sequence
  Description of Artificial Sequence: Synthetic oligonucleotide
guugaagcauugcuuuucg

SEQ ID NO: 3254397 - RNA, 19 nt, Artificial Sequence
  Description of Artificial Sequence: Synthetic oligonucleotide
ugcuguaggccccaaacac

SEQ ID NO: 3254398 - RNA, 19 nt, Artificial Sequence
  Description of Artificial Sequence: Synthetic oligonucleotide
uucugguugaagcauugcu

SEQ ID NO: 3254399 - RNA, 19 nt, Artificial Sequence
  Description of Artificial Sequence: Synthetic oligonucleotide
uugcuuuucggcuuaauuu

SEQ ID NO: 3254400 - RNA, 19 nt, Artificial Sequence
  Description of Artificial Sequence: Synthetic oligonucleotide
uccuuagauauggagacug

SEQ ID NO: 3254401 - RNA, 19 nt, Artificial Sequence
  Description of Artificial Sequence: Synthetic oligonucleotide
uagauauggagacugcuuu

SEQ ID NO: 3254402 - RNA, 19 nt, Artificial Sequence
  Description of Artificial Sequence: Synthetic oligonucleotide
auaauccaggcgauguucc

SEQ ID NO: 3254403 - RNA, 19 nt, Artificial Sequence
  Description of Artificial Sequence: Synthetic oligonucleotide
cauauauuggagcuuccug

SEQ ID NO: 3254404 - RNA, 19 nt, Artificial Sequence
  Description of Artificial Sequence: Synthetic oligonucleotide
uggggaacaucucuuugag

SEQ ID NO: 3254405 - RNA, 19 nt, Artificial Sequence
  Description of Artificial Sequence: Synthetic oligonucleotide
agccaguaaauacagggca

SEQ ID NO: 3254406 - RNA, 19 nt, Artificial Sequence
  Description of Artificial Sequence: Synthetic oligonucleotide
uuuucugguugaagcauug

SEQ ID NO: 3254407 - RNA, 19 nt, Artificial Sequence
  Description of Artificial Sequence: Synthetic oligonucleotide
ucgugagcauucaucauca

SEQ ID NO: 3254408 - RNA, 19 nt, Artificial Sequence
  Description of Artificial Sequence: Synthetic oligonucleotide
aaacagcgguguuugacca

SEQ ID NO: 3254409 - RNA, 19 nt, Artificial Sequence
  Description of Artificial Sequence: Synthetic oligonucleotide
ucuuuagaauugucgugag

SEQ ID NO: 3254410 - RNA, 19 nt, Artificial Sequence
  Description of Artificial Sequence: Synthetic oligonucleotide
aaauaucuccauacugcuc

SEQ ID NO: 3254411 - RNA, 19 nt, Artificial Sequence
  Description of Artificial Sequence: Synthetic oligonucleotide
cugcuuuacucaucaaucc

SEQ ID NO: 3254412 - RNA, 19 nt, Artificial Sequence
  Description of Artificial Sequence: Synthetic oligonucleotide
ucucaaguauuucaccaaa

SEQ ID NO: 3254413 - RNA, 19 nt, Artificial Sequence
  Description of Artificial Sequence: Synthetic oligonucleotide
uccauacugcucaaugaug

SEQ ID NO: 3254414 - RNA, 19 nt, Artificial Sequence
  Description of Artificial Sequence: Synthetic oligonucleotide
acagggagacauuuaaccu

SEQ ID NO: 3254415 - RNA, 19 nt, Artificial Sequence
  Description of Artificial Sequence: Synthetic oligonucleotide
ucuccauacugcucaauga

SEQ ID NO: 3254416 - RNA, 19 nt, Artificial Sequence
  Description of Artificial Sequence: Synthetic oligonucleotide
ucugguugaagcauugcuu

SEQ ID NO: 3254417 - RNA, 19 nt, Artificial Sequence
  Description of Artificial Sequence: Synthetic oligonucleotide
aaggagacaaugcugaagg

SEQ ID NO: 3254418 - RNA, 19 nt, Artificial Sequence
  Description of Artificial Sequence: Synthetic oligonucleotide
aacuaggccaguuaggagg

SEQ ID NO: 3254419 - RNA, 19 nt, Artificial Sequence
  Description of Artificial Sequence: Synthetic oligonucleotide
uguaccuucuucaucaggg

SEQ ID NO: 3254420 - RNA, 19 nt, Artificial Sequence
  Description of Artificial Sequence: Synthetic oligonucleotide
uugucuaccggcauuaucc

SEQ ID NO: 3254421 - RNA, 19 nt, Artificial Sequence
  Description of Artificial Sequence: Synthetic oligonucleotide
ugaaaacuaggccaguuag

SEQ ID NO: 3254422 - RNA, 19 nt, Artificial Sequence
  Description of Artificial Sequence: Synthetic oligonucleotide
aaguguaccuucuucauca

SEQ ID NO: 3254423 - RNA, 19 nt, Artificial Sequence
  Description of Artificial Sequence: Synthetic oligonucleotide
aguuaggagguacugcucc

SEQ ID NO: 3254424 - RNA, 19 nt, Artificial Sequence
  Description of Artificial Sequence: Synthetic oligonucleotide
aaugcugaaggagagcuuc

SEQ ID NO: 3254425 - RNA, 19 nt, Artificial Sequence
  Description of Artificial Sequence: Synthetic oligonucleotide
ugaaggagagcuuccaccg

SEQ ID NO: 3254426 - RNA, 19 nt, Artificial Sequence
  Description of Artificial Sequence: Synthetic oligonucleotide
aaggagagcuuccaccgcc

SEQ ID NO: 3254427 - RNA, 19 nt, Artificial Sequence
  Description of Artificial Sequence: Synthetic oligonucleotide
aaguucuccagguugacca

SEQ ID NO: 3254428 - RNA, 19 nt, Artificial Sequence
  Description of Artificial Sequence: Synthetic oligonucleotide
ucuaccggcauuauccagg

SEQ ID NO: 3254429 - RNA, 19 nt, Artificial Sequence
  Description of Artificial Sequence: Synthetic oligonucleotide
cuuaaaguucuccagguug

SEQ ID NO: 3254430 - RNA, 19 nt, Artificial Sequence
  Description of Artificial Sequence: Synthetic oligonucleotide
aaaacuaggccaguuagga

SEQ ID NO: 3254431 - RNA, 19 nt, Artificial Sequence
  Description of Artificial Sequence: Synthetic oligonucleotide
uuaaaguucuccagguuga

SEQ ID NO: 3254432 - RNA, 19 nt, Artificial Sequence
  Description of Artificial Sequence: Synthetic oligonucleotide
cuucuuaaaguucuccagg

SEQ ID NO: 3254433 - RNA, 19 nt, Artificial Sequence
  Description of Artificial Sequence: Synthetic oligonucleotide
aagcuuccgaaugaagucc

SEQ ID NO: 3254434 - RNA, 19 nt, Artificial Sequence
  Description of Artificial Sequence: Synthetic oligonucleotide
gaugguaagccguuuccgg

SEQ ID NO: 3254435 - RNA, 19 nt, Artificial Sequence
  Description of Artificial Sequence: Synthetic oligonucleotide
ucuuucacaagaagcuucc

SEQ ID NO: 3254436 - RNA, 19 nt, Artificial Sequence
  Description of Artificial Sequence: Synthetic oligonucleotide
ugcacaaggagacaaugcu

SEQ ID NO: 3254437 - RNA, 19 nt, Artificial Sequence
  Description of Artificial Sequence: Synthetic oligonucleotide
gacauacugcuucuuaaag

SEQ ID NO: 3254438 - RNA, 19 nt, Artificial Sequence
  Description of Artificial Sequence: Synthetic oligonucleotide
aaaguucuccagguugacc

SEQ ID NO: 3254439 - RNA, 19 nt, Artificial Sequence
  Description of Artificial Sequence: Synthetic oligonucleotide
agccacugaaaacuaggcc

SEQ ID NO: 3254440 - RNA, 19 nt, Artificial Sequence
  Description of Artificial Sequence: Synthetic oligonucleotide
uucuucaucagggagcgag

SEQ ID NO: 3254441 - RNA, 19 nt, Artificial Sequence
  Description of Artificial Sequence: Synthetic oligonucleotide
uuucacaagaagcuuccga

SEQ ID NO: 3254442 - RNA, 19 nt, Artificial Sequence
  Description of Artificial Sequence: Synthetic oligonucleotide
uuccgaaugaaguccuugg

SEQ ID NO: 3254443 - RNA, 19 nt, Artificial Sequence
  Description of Artificial Sequence: Synthetic oligonucleotide
uucacaagaagcuuccgaa

SEQ ID NO: 3254444 - RNA, 19 nt, Artificial Sequence
  Description of Artificial Sequence: Synthetic oligonucleotide
uacugcuucuuaaaguucu

SEQ ID NO: 3254445 - RNA, 19 nt, Artificial Sequence
  Description of Artificial Sequence: Synthetic oligonucleotide
augucucagagcuucuugg

SEQ ID NO: 3254446 - RNA, 19 nt, Artificial Sequence
  Description of Artificial Sequence: Synthetic oligonucleotide
uucuuaaaguucuccaggu

SEQ ID NO: 3254447 - RNA, 19 nt, Artificial Sequence
  Description of Artificial Sequence: Synthetic oligonucleotide
cucagagcuucuuggaugg

SEQ ID NO: 3254448 - RNA, 19 nt, Artificial Sequence
  Description of Artificial Sequence: Synthetic oligonucleotide
agguugaccaccgacuccc

SEQ ID NO: 3254449 - RNA, 19 nt, Artificial Sequence
  Description of Artificial Sequence: Synthetic oligonucleotide
ucucagagcuucuuggaug

SEQ ID NO: 3254450 - RNA, 19 nt, Artificial Sequence
  Description of Artificial Sequence: Synthetic oligonucleotide
aaacuaggccaguuaggag

SEQ ID NO: 3254451 - RNA, 19 nt, Artificial Sequence
  Description of Artificial Sequence: Synthetic oligonucleotide
cucugugucacucucgcag

SEQ ID NO: 3254452 - RNA, 19 nt, Artificial Sequence
  Description of Artificial Sequence: Synthetic oligonucleotide
gaagcuuccgaaugaaguc

SEQ ID NO: 3254453 - RNA, 19 nt, Artificial Sequence
  Description of Artificial Sequence: Synthetic oligonucleotide
gaaaacuaggccaguuagg

SEQ ID NO: 3254454 - RNA, 19 nt, Artificial Sequence
  Description of Artificial Sequence: Synthetic oligonucleotide
cugaaggagagcuuccacc

SEQ ID NO: 3254455 - RNA, 19 nt, Artificial Sequence
  Description of Artificial Sequence: Synthetic oligonucleotide
ucaucagggagcgagugag

SEQ ID NO: 3254456 - RNA, 19 nt, Artificial Sequence
  Description of Artificial Sequence: Synthetic oligonucleotide
acauacugcuucuuaaagu

SEQ ID NO: 3254457 - RNA, 19 nt, Artificial Sequence
  Description of Artificial Sequence: Synthetic oligonucleotide
ugaagggcuuuccuccugg

SEQ ID NO: 3254458 - RNA, 19 nt, Artificial Sequence
  Description of Artificial Sequence: Synthetic oligonucleotide
ugcuucuuaaaguucucca

SEQ ID NO: 3254459 - RNA, 19 nt, Artificial Sequence
  Description of Artificial Sequence: Synthetic oligonucleotide
cucgcaguuccucaggucc

SEQ ID NO: 3254460 - RNA, 19 nt, Artificial Sequence
  Description of Artificial Sequence: Synthetic oligonucleotide
augguaagccguuuccggg

SEQ ID NO: 3254461 - RNA, 19 nt, Artificial Sequence
  Description of Artificial Sequence: Synthetic oligonucleotide
uugcacaaggagacaaugc

SEQ ID NO: 3254462 - RNA, 19 nt, Artificial Sequence
  Description of Artificial Sequence: Synthetic oligonucleotide
uaccuucuucaucagggag

SEQ ID NO: 3254463 - RNA, 19 nt, Artificial Sequence
  Description of Artificial Sequence: Synthetic oligonucleotide
accuucuucaucagggagc

SEQ ID NO: 3254464 - RNA, 19 nt, Artificial Sequence
  Description of Artificial Sequence: Synthetic oligonucleotide
gaugucucagagcuucuug

SEQ ID NO: 3254465 - RNA, 19 nt, Artificial Sequence
  Description of Artificial Sequence: Synthetic oligonucleotide
uggaugguaagccguuucc

SEQ ID NO: 3254466 - RNA, 19 nt, Artificial Sequence
  Description of Artificial Sequence: Synthetic oligonucleotide
aagggcuuuccuccuggcg

SEQ ID NO: 3254467 - RNA, 19 nt, Artificial Sequence
  Description of Artificial Sequence: Synthetic oligonucleotide
gaggugguugcacaaggag

SEQ ID NO: 3254468 - RNA, 19 nt, Artificial Sequence
  Description of Artificial Sequence: Synthetic oligonucleotide
gaaugaaguccuuggccag

SEQ ID NO: 3254469 - RNA, 19 nt, Artificial Sequence
  Description of Artificial Sequence: Synthetic oligonucleotide
uucuccagguugaccaccg

SEQ ID NO: 3254470 - RNA, 19 nt, Artificial Sequence
  Description of Artificial Sequence: Synthetic oligonucleotide
acaaugcugaaggagagcu

SEQ ID NO: 3254471 - RNA, 19 nt, Artificial Sequence
  Description of Artificial Sequence: Synthetic oligonucleotide
acaagaagcuuccgaauga

SEQ ID NO: 3254472 - RNA, 19 nt, Artificial Sequence
  Description of Artificial Sequence: Synthetic oligonucleotide
cuucuuggaugguaagccg

SEQ ID NO: 3254473 - RNA, 19 nt, Artificial Sequence
  Description of Artificial Sequence: Synthetic oligonucleotide
cacaagaagcuuccgaaug

SEQ ID NO: 3254474 - RNA, 19 nt, Artificial Sequence
  Description of Artificial Sequence: Synthetic oligonucleotide
uucuuggaugguaagccgu

SEQ ID NO: 3254475 - RNA, 19 nt, Artificial Sequence
  Description of Artificial Sequence: Synthetic oligonucleotide
uugaccaccgacucccugc

SEQ ID NO: 3254476 - RNA, 19 nt, Artificial Sequence
  Description of Artificial Sequence: Synthetic oligonucleotide
uuauccagggaugucucag

SEQ ID NO: 3254477 - RNA, 19 nt, Artificial Sequence
  Description of Artificial Sequence: Synthetic oligonucleotide
agggaugucucagagcuuc

SEQ ID NO: 3254478 - RNA, 19 nt, Artificial Sequence
  Description of Artificial Sequence: Synthetic oligonucleotide
accggcauuauccagggau

SEQ ID NO: 3254479 - RNA, 19 nt, Artificial Sequence
  Description of Artificial Sequence: Synthetic oligonucleotide
agcuucuuggaugguaagc

SEQ ID NO: 3254480 - RNA, 19 nt, Artificial Sequence
  Description of Artificial Sequence: Synthetic oligonucleotide
uccagguugaccaccgacu

SEQ ID NO: 3254481 - RNA, 19 nt, Artificial Sequence
  Description of Artificial Sequence: Synthetic oligonucleotide
uccgaaugaaguccuuggc

SEQ ID NO: 3254482 - RNA, 19 nt, Artificial Sequence
  Description of Artificial Sequence: Synthetic oligonucleotide
gagacaaugcugaaggaga

SEQ ID NO: 3254483 - RNA, 19 nt, Artificial Sequence
  Description of Artificial Sequence: Synthetic oligonucleotide
agaagcuuccgaaugaagu

SEQ ID NO: 3254484 - RNA, 19 nt, Artificial Sequence
  Description of Artificial Sequence: Synthetic oligonucleotide
cucuuucacaagaagcuuc

SEQ ID NO: 3254485 - RNA, 19 nt, Artificial Sequence
  Description of Artificial Sequence: Synthetic oligonucleotide
cacaaggagacaaugcuga

SEQ ID NO: 3254486 - RNA, 19 nt, Artificial Sequence
  Description of Artificial Sequence: Synthetic oligonucleotide
uccucugugucacucucgc

SEQ ID NO: 3254487 - RNA, 19 nt, Artificial Sequence
  Description of Artificial Sequence: Synthetic oligonucleotide
cagggagcgagugaggugg

SEQ ID NO: 3254488 - RNA, 19 nt, Artificial Sequence
  Description of Artificial Sequence: Synthetic oligonucleotide
agagcuuccaccgccugcg

SEQ ID NO: 3254489 - RNA, 19 nt, Artificial Sequence
  Description of Artificial Sequence: Synthetic oligonucleotide
gugaggugguugcacaagg

SEQ ID NO: 3254490 - RNA, 19 nt, Artificial Sequence
  Description of Artificial Sequence: Synthetic oligonucleotide
cucaaguguaccuucuuca

SEQ ID NO: 3254491 - RNA, 19 nt, Artificial Sequence
  Description of Artificial Sequence: Synthetic oligonucleotide
gccacugaaaacuaggcca

SEQ ID NO: 3254492 - RNA, 19 nt, Artificial Sequence
  Description of Artificial Sequence: Synthetic oligonucleotide
ugaccaccgacucccugcg

SEQ ID NO: 3254493 - RNA, 19 nt, Artificial Sequence
  Description of Artificial Sequence: Synthetic oligonucleotide
acuugggccucccuggcag

SEQ ID NO: 3254494 - RNA, 19 nt, Artificial Sequence
  Description of Artificial Sequence: Synthetic oligonucleotide
agggcuuuccuccuggcga

SEQ ID NO: 3254495 - RNA, 19 nt, Artificial Sequence
  Description of Artificial Sequence: Synthetic oligonucleotide
ucaaguguaccuucuucau

SEQ ID NO: 3254496 - RNA, 19 nt, Artificial Sequence
  Description of Artificial Sequence: Synthetic oligonucleotide
uugcugguugucuaccggc

SEQ ID NO: 3254497 - RNA, 19 nt, Artificial Sequence
  Description of Artificial Sequence: Synthetic oligonucleotide
gcuucuuaaaguucuccag

SEQ ID NO: 3254498 - RNA, 19 nt, Artificial Sequence
  Description of Artificial Sequence: Synthetic oligonucleotide
aguucuccagguugaccac

SEQ ID NO: 3254499 - RNA, 19 nt, Artificial Sequence
  Description of Artificial Sequence: Synthetic oligonucleotide
uaggagguacugcuccucc

SEQ ID NO: 3254500 - RNA, 19 nt, Artificial Sequence
  Description of Artificial Sequence: Synthetic oligonucleotide
cuaccggcauuauccaggg

SEQ ID NO: 3254501 - RNA, 19 nt, Artificial Sequence
  Description of Artificial Sequence: Synthetic oligonucleotide
ugucucagagcuucuugga

SEQ ID NO: 3254502 - RNA, 19 nt, Artificial Sequence
  Description of Artificial Sequence: Synthetic oligonucleotide
cuugcugguugucuaccgg

SEQ ID NO: 3254503 - RNA, 19 nt, Artificial Sequence
  Description of Artificial Sequence: Synthetic oligonucleotide
uacugcuccuccuccgggg

SEQ ID NO: 3254504 - RNA, 19 nt, Artificial Sequence
  Description of Artificial Sequence: Synthetic oligonucleotide
ggucucuuucacaagaagc

SEQ ID NO: 3254505 - RNA, 19 nt, Artificial Sequence
  Description of Artificial Sequence: Synthetic oligonucleotide
ugaggugguugcacaagga

SEQ ID NO: 3254506 - RNA, 19 nt, Artificial Sequence
  Description of Artificial Sequence: Synthetic oligonucleotide
uucaucagggagcgaguga

SEQ ID NO: 3254507 - RNA, 19 nt, Artificial Sequence
  Description of Artificial Sequence: Synthetic oligonucleotide
ucuuaaaguucuccagguu

SEQ ID NO: 3254508 - RNA, 19 nt, Artificial Sequence
  Description of Artificial Sequence: Synthetic oligonucleotide
accgccugcggacauacug

SEQ ID NO: 3254509 - RNA, 19 nt, Artificial Sequence
  Description of Artificial Sequence: Synthetic oligonucleotide
auccagggaugucucagag

SEQ ID NO: 3254510 - RNA, 19 nt, Artificial Sequence
  Description of Artificial Sequence: Synthetic oligonucleotide
cagccacugaaaacuaggc

SEQ ID NO: 3254511 - RNA, 19 nt, Artificial Sequence
  Description of Artificial Sequence: Synthetic oligonucleotide
aagaagcuuccgaaugaag

SEQ ID NO: 3254512 - RNA, 19 nt, Artificial Sequence
  Description of Artificial Sequence: Synthetic oligonucleotide
uuccgggucucuuucacaa

SEQ ID NO: 3254513 - RNA, 19 nt, Artificial Sequence
  Description of Artificial Sequence: Synthetic oligonucleotide
uuggaugguaagccguuuc

SEQ ID NO: 3254514 - RNA, 19 nt, Artificial Sequence
  Description of Artificial Sequence: Synthetic oligonucleotide
ucgcuuguccucaagugua

SEQ ID NO: 3254515 - RNA, 19 nt, Artificial Sequence
  Description of Artificial Sequence: Synthetic oligonucleotide
guugcacaaggagacaaug

SEQ ID NO: 3254516 - RNA, 19 nt, Artificial Sequence
  Description of Artificial Sequence: Synthetic oligonucleotide
auguccuccucugugucac

SEQ ID NO: 3254517 - RNA, 19 nt, Artificial Sequence
  Description of Artificial Sequence: Synthetic oligonucleotide
auuucugugaguccgaggc

SEQ ID NO: 3254518 - RNA, 19 nt, Artificial Sequence
  Description of Artificial Sequence: Synthetic oligonucleotide
acaccuuuaaucccaaccc

SEQ ID NO: 3254519 - RNA, 19 nt, Artificial Sequence
  Description of Artificial Sequence: Synthetic oligonucleotide
uuuaaucccaacccuuggg

SEQ ID NO: 3254520 - RNA, 19 nt, Artificial Sequence
  Description of Artificial Sequence: Synthetic oligonucleotide
uagagugaguuccaaaacc

SEQ ID NO: 3254521 - RNA, 19 nt, Artificial Sequence
  Description of Artificial Sequence: Synthetic oligonucleotide
uauagagugaguuccaaaa

SEQ ID NO: 3254522 - RNA, 19 nt, Artificial Sequence
  Description of Artificial Sequence: Synthetic oligonucleotide
auagagugaguuccaaaac

SEQ ID NO: 3254523 - RNA, 19 nt, Artificial Sequence
  Description of Artificial Sequence: Synthetic oligonucleotide
agagugaguuccaaaaccc

SEQ ID NO: 3254524 - RNA, 19 nt, Artificial Sequence
  Description of Artificial Sequence: Synthetic oligonucleotide
uuaaucccaacccuuggga

SEQ ID NO: 3254525 - RNA, 19 nt, Artificial Sequence
  Description of Artificial Sequence: Synthetic oligonucleotide
uugggagacaggcaggcag

SEQ ID NO: 3254526 - RNA, 19 nt, Artificial Sequence
  Description of Artificial Sequence: Synthetic oligonucleotide
cacaccuuuaaucccaacc

SEQ ID NO: 3254527 - RNA, 19 nt, Artificial Sequence
  Description of Artificial Sequence: Synthetic oligonucleotide
uggcucacaccuuuaaucc

SEQ ID NO: 3254528 - RNA, 19 nt, Artificial Sequence
  Description of Artificial Sequence: Synthetic oligonucleotide
aguuccaaaacccugucua

SEQ ID NO: 3254529 - RNA, 19 nt, Artificial Sequence
  Description of Artificial Sequence: Synthetic oligonucleotide
aaucccaacccuugggaga

SEQ ID NO: 3254530 - RNA, 19 nt, Artificial Sequence
  Description of Artificial Sequence: Synthetic oligonucleotide
uaaucccaacccuugggag

SEQ ID NO: 3254531 - RNA, 19 nt, Artificial Sequence
  Description of Artificial Sequence: Synthetic oligonucleotide
cuuuaaucccaacccuugg

SEQ ID NO: 3254532 - RNA, 19 nt, Artificial Sequence
  Description of Artificial Sequence: Synthetic oligonucleotide
uuccaaaacccugucuacg

SEQ ID NO: 3254533 - RNA, 19 nt, Artificial Sequence
  Description of Artificial Sequence: Synthetic oligonucleotide
uccaaaacccugucuacga

SEQ ID NO: 3254534 - RNA, 19 nt, Artificial Sequence
  Description of Artificial Sequence: Synthetic oligonucleotide
uccgaggccagccuggucu

SEQ ID NO: 3254535 - RNA, 19 nt, Artificial Sequence
  Description of Artificial Sequence: Synthetic oligonucleotide
gauuucugugaguccgagg

SEQ ID NO: 3254536 - RNA, 19 nt, Artificial Sequence
  Description of Artificial Sequence: Synthetic oligonucleotide
aggcagauuucugugaguc

SEQ ID NO: 3254537 - RNA, 19 nt, Artificial Sequence
  Description of Artificial Sequence: Synthetic oligonucleotide
acccuugggagacaggcag

SEQ ID NO: 3254538 - RNA, 19 nt, Artificial Sequence
  Description of Artificial Sequence: Synthetic oligonucleotide
ggucuauagagugaguucc

SEQ ID NO: 3254539 - RNA, 19 nt, Artificial Sequence
  Description of Artificial Sequence: Synthetic oligonucleotide
gcagauuucugugaguccg

SEQ ID NO: 3254540 - RNA, 19 nt, Artificial Sequence
  Description of Artificial Sequence: Synthetic oligonucleotide
aaaacccugucuacgaaaa

SEQ ID NO: 3254541 - RNA, 19 nt, Artificial Sequence
  Description of Artificial Sequence: Synthetic oligonucleotide
uggucuauagagugaguuc

SEQ ID NO: 3254542 - RNA, 19 nt, Artificial Sequence
  Description of Artificial Sequence: Synthetic oligonucleotide
caacccuugggagacaggc

SEQ ID NO: 3254543 - RNA, 19 nt, Artificial Sequence
  Description of Artificial Sequence: Synthetic oligonucleotide
uucugugaguccgaggcca

SEQ ID NO: 3254544 - RNA, 19 nt, Artificial Sequence
  Description of Artificial Sequence: Synthetic oligonucleotide
uuucugugaguccgaggcc

SEQ ID NO: 3254545 - RNA, 19 nt, Artificial Sequence
  Description of Artificial Sequence: Synthetic oligonucleotide
agugaguuccaaaacccug

SEQ ID NO: 3254546 - RNA, 19 nt, Artificial Sequence
  Description of Artificial Sequence: Synthetic oligonucleotide
aucccaacccuugggagac

SEQ ID NO: 3254547 - RNA, 19 nt, Artificial Sequence
  Description of Artificial Sequence: Synthetic oligonucleotide
cagccuggucuauagagug

SEQ ID NO: 3254548 - RNA, 19 nt, Artificial Sequence
  Description of Artificial Sequence: Synthetic oligonucleotide
ugaguccgaggccagccug

SEQ ID NO: 3254549 - RNA, 19 nt, Artificial Sequence
  Description of Artificial Sequence: Synthetic oligonucleotide
ugaguuccaaaacccuguc

SEQ ID NO: 3254550 - RNA, 19 nt, Artificial Sequence
  Description of Artificial Sequence: Synthetic oligonucleotide
ugugaguccgaggccagcc

SEQ ID NO: 3254551 - RNA, 19 nt, Artificial Sequence
  Description of Artificial Sequence: Synthetic oligonucleotide
gagacaggcaggcagauuu

SEQ ID NO: 3254552 - RNA, 19 nt, Artificial Sequence
  Description of Artificial Sequence: Synthetic oligonucleotide
guuccaaaacccugucuac

SEQ ID NO: 3254553 - RNA, 19 nt, Artificial Sequence
  Description of Artificial Sequence: Synthetic oligonucleotide
ugggagacaggcaggcaga

SEQ ID NO: 3254554 - RNA, 19 nt, Artificial Sequence
  Description of Artificial Sequence: Synthetic oligonucleotide
ucugugaguccgaggccag

SEQ ID NO: 3254555 - RNA, 19 nt, Artificial Sequence
  Description of Artificial Sequence: Synthetic oligonucleotide
ucuauagagugaguuccaa

SEQ ID NO: 3254556 - RNA, 19 nt, Artificial Sequence
  Description of Artificial Sequence: Synthetic oligonucleotide
gccagccuggucuauagag

SEQ ID NO: 3254557 - RNA, 19 nt, Artificial Sequence
  Description of Artificial Sequence: Synthetic oligonucleotide
aggcaggcagauuucugug

SEQ ID NO: 3254558 - RNA, 19 nt, Artificial Sequence
  Description of Artificial Sequence: Synthetic oligonucleotide
agauuucugugaguccgag

SEQ ID NO: 3254559 - RNA, 19 nt, Artificial Sequence
  Description of Artificial Sequence: Synthetic oligonucleotide
gcaggcagauuucugugag

SEQ ID NO: 3254560 - RNA, 19 nt, Artificial Sequence
  Description of Artificial Sequence: Synthetic oligonucleotide
ccuuuaaucccaacccuug

SEQ ID NO: 3254561 - RNA, 19 nt, Artificial Sequence
  Description of Artificial Sequence: Synthetic oligonucleotide
caaaacccugucuacgaaa

SEQ ID NO: 3254562 - RNA, 19 nt, Artificial Sequence
  Description of Artificial Sequence: Synthetic oligonucleotide
aggccagccuggucuauag

SEQ ID NO: 3254563 - RNA, 19 nt, Artificial Sequence
  Description of Artificial Sequence: Synthetic oligonucleotide
cuauagagugaguuccaaa

SEQ ID NO: 3254564 - RNA, 19 nt, Artificial Sequence
  Description of Artificial Sequence: Synthetic oligonucleotide
gaguccgaggccagccugg

SEQ ID NO: 3254565 - RNA, 19 nt, Artificial Sequence
  Description of Artificial Sequence: Synthetic oligonucleotide
ggcucacaccuuuaauccc

SEQ ID NO: 3254566 - RNA, 19 nt, Artificial Sequence
  Description of Artificial Sequence: Synthetic oligonucleotide
ggcagauuucugugagucc

SEQ ID NO: 3254567 - RNA, 19 nt, Artificial Sequence
  Description of Artificial Sequence: Synthetic oligonucleotide
aacccuugggagacaggca

SEQ ID NO: 3254568 - RNA, 19 nt, Artificial Sequence
  Description of Artificial Sequence: Synthetic oligonucleotide
accuuuaaucccaacccuu

SEQ ID NO: 3254569 - RNA, 19 nt, Artificial Sequence
  Description of Artificial Sequence: Synthetic oligonucleotide
agacaggcaggcagauuuc

SEQ ID NO: 3254570 - RNA, 19 nt, Artificial Sequence
  Description of Artificial Sequence: Synthetic oligonucleotide
gccuggucuauagagugag

SEQ ID NO: 3254571 - RNA, 19 nt, Artificial Sequence
  Description of Artificial Sequence: Synthetic oligonucleotide
ucacaccuuuaaucccaac

SEQ ID NO: 3254572 - RNA, 19 nt, Artificial Sequence
  Description of Artificial Sequence: Synthetic oligonucleotide
gaguuccaaaacccugucu

SEQ ID NO: 3254573 - RNA, 19 nt, Artificial Sequence
  Description of Artificial Sequence: Synthetic oligonucleotide
gugaguuccaaaacccugu

SEQ ID NO: 3254574 - RNA, 19 nt, Artificial Sequence
  Description of Artificial Sequence: Synthetic oligonucleotide
gucuauagagugaguucca

SEQ ID NO: 3254575 - RNA, 19 nt, Artificial Sequence
  Description of Artificial Sequence: Synthetic oligonucleotide
cagauuucugugaguccga

SEQ ID NO: 3254576 - RNA, 19 nt, Artificial Sequence
  Description of Artificial Sequence: Synthetic oligonucleotide
acaggcaggcagauuucug

SEQ ID NO: 3254577 - RNA, 19 nt, Artificial Sequence
  Description of Artificial Sequence: Synthetic oligonucleotide
gagugaguuccaaaacccu

SEQ ID NO: 3254578 - RNA, 19 nt, Artificial Sequence
  Description of Artificial Sequence: Synthetic oligonucleotide
caggcaggcagauuucugu

SEQ ID NO: 3254579 - RNA, 19 nt, Artificial Sequence
  Description of Artificial Sequence: Synthetic oligonucleotide
gcucacaccuuuaauccca

SEQ ID NO: 3254580 - RNA, 19 nt, Artificial Sequence
  Description of Artificial Sequence: Synthetic oligonucleotide
caccuuuaaucccaacccu

SEQ ID NO: 3254581 - RNA, 19 nt, Artificial Sequence
  Description of Artificial Sequence: Synthetic oligonucleotide
ggcaggcagauuucuguga

SEQ ID NO: 3254582 - RNA, 19 nt, Artificial Sequence
  Description of Artificial Sequence: Synthetic oligonucleotide
ccuugggagacaggcaggc

SEQ ID NO: 3254583 - RNA, 19 nt, Artificial Sequence
  Description of Artificial Sequence: Synthetic oligonucleotide
cucacaccuuuaaucccaa

SEQ ID NO: 3254584 - RNA, 19 nt, Artificial Sequence
  Description of Artificial Sequence: Synthetic oligonucleotide
cuggucuauagagugaguu

SEQ ID NO: 3254585 - RNA, 19 nt, Artificial Sequence
  Description of Artificial Sequence: Synthetic oligonucleotide
gacaggcaggcagauuucu

SEQ ID NO: 3254586 - RNA, 19 nt, Artificial Sequence
  Description of Artificial Sequence: Synthetic oligonucleotide
agccuggucuauagaguga

SEQ ID NO: 3254587 - RNA, 19 nt, Artificial Sequence
  Description of Artificial Sequence: Synthetic oligonucleotide
cugugaguccgaggccagc

SEQ ID NO: 3254588 - RNA, 19 nt, Artificial Sequence
  Description of Artificial Sequence: Synthetic oligonucleotide
cccuugggagacaggcagg

SEQ ID NO: 3254589 - RNA, 19 nt, Artificial Sequence
  Description of Artificial Sequence: Synthetic oligonucleotide
aguccgaggccagccuggu

SEQ ID NO: 3254590 - RNA, 19 nt, Artificial Sequence
  Description of Artificial Sequence: Synthetic oligonucleotide
ccaacccuugggagacagg

SEQ ID NO: 3254591 - RNA, 19 nt, Artificial Sequence
  Description of Artificial Sequence: Synthetic oligonucleotide
cuugggagacaggcaggca

SEQ ID NO: 3254592 - RNA, 19 nt, Artificial Sequence
  Description of Artificial Sequence: Synthetic oligonucleotide
cccaacccuugggagacag

SEQ ID NO: 3254593 - RNA, 19 nt, Artificial Sequence
  Description of Artificial Sequence: Synthetic oligonucleotide
gugaguccgaggccagccu

SEQ ID NO: 3254594 - RNA, 19 nt, Artificial Sequence
  Description of Artificial Sequence: Synthetic oligonucleotide
caggcagauuucugugagu

SEQ ID NO: 3254595 - RNA, 19 nt, Artificial Sequence
  Description of Artificial Sequence: Synthetic oligonucleotide
ccaaaacccugucuacgaa

SEQ ID NO: 3254596 - RNA, 19 nt, Artificial Sequence
  Description of Artificial Sequence: Synthetic oligonucleotide
gaggccagccuggucuaua

SEQ ID NO: 3254597 - RNA, 19 nt, Artificial Sequence
  Description of Artificial Sequence: Synthetic oligonucleotide
ucccaacccuugggagaca

SEQ ID NO: 3254598 - RNA, 19 nt, Artificial Sequence
  Description of Artificial Sequence: Synthetic oligonucleotide
ccagccuggucuauagagu

SEQ ID NO: 3254599 - RNA, 19 nt, Artificial Sequence
  Description of Artificial Sequence: Synthetic oligonucleotide
guccgaggccagccugguc

SEQ ID NO: 3254600 - RNA, 19 nt, Artificial Sequence
  Description of Artificial Sequence: Synthetic oligonucleotide
ggccagccuggucuauaga

SEQ ID NO: 3254601 - RNA, 19 nt, Artificial Sequence
  Description of Artificial Sequence: Synthetic oligonucleotide
ccuggucuauagagugagu

SEQ ID NO: 3254602 - RNA, 19 nt, Artificial Sequence
  Description of Artificial Sequence: Synthetic oligonucleotide
gggagacaggcaggcagau

SEQ ID NO: 3254603 - RNA, 19 nt, Artificial Sequence
  Description of Artificial Sequence: Synthetic oligonucleotide
ggagacaggcaggcagauu

SEQ ID NO: 3254604 - RNA, 19 nt, Artificial Sequence
  Description of Artificial Sequence: Synthetic oligonucleotide
ccgaggccagccuggucua

SEQ ID NO: 3254605 - RNA, 19 nt, Artificial Sequence
  Description of Artificial Sequence: Synthetic oligonucleotide
aggacaaaagugcagagcc

SEQ ID NO: 3254606 - RNA, 19 nt, Artificial Sequence
  Description of Artificial Sequence: Synthetic oligonucleotide
aucaugaaaggacagcacc

SEQ ID NO: 3254607 - RNA, 19 nt, Artificial Sequence
  Description of Artificial Sequence: Synthetic oligonucleotide
ugaucagagcucaacaugg

SEQ ID NO: 3254608 - RNA, 19 nt, Artificial Sequence
  Description of Artificial Sequence: Synthetic oligonucleotide
ugucuuucagcuuauaggc

SEQ ID NO: 3254609 - RNA, 19 nt, Artificial Sequence
  Description of Artificial Sequence: Synthetic oligonucleotide
uugucuuucagcuuauagg

SEQ ID NO: 3254610 - RNA, 19 nt, Artificial Sequence
  Description of Artificial Sequence: Synthetic oligonucleotide
aaggucaggacaaaagugc

SEQ ID NO: 3254611 - RNA, 19 nt, Artificial Sequence
  Description of Artificial Sequence: Synthetic oligonucleotide
aauggggcaagccuucccc

SEQ ID NO: 3254612 - RNA, 19 nt, Artificial Sequence
  Description of Artificial Sequence: Synthetic oligonucleotide
ucuaagcucacauacuucc

SEQ ID NO: 3254613 - RNA, 19 nt, Artificial Sequence
  Description of Artificial Sequence: Synthetic oligonucleotide
ucauauucuggccaauggg

SEQ ID NO: 3254614 - RNA, 19 nt, Artificial Sequence
  Description of Artificial Sequence: Synthetic oligonucleotide
ugaaccguguccacuaugg

SEQ ID NO: 3254615 - RNA, 19 nt, Artificial Sequence
  Description of Artificial Sequence: Synthetic oligonucleotide
cauauucuggccaaugggg

SEQ ID NO: 3254616 - RNA, 19 nt, Artificial Sequence
  Description of Artificial Sequence: Synthetic oligonucleotide
aaagugcagagccacauca

SEQ ID NO: 3254617 - RNA, 19 nt, Artificial Sequence
  Description of Artificial Sequence: Synthetic oligonucleotide
uuugccaugaaccgugucc

SEQ ID NO: 3254618 - RNA, 19 nt, Artificial Sequence
  Description of Artificial Sequence: Synthetic oligonucleotide
ucagagcucaacauggucc

SEQ ID NO: 3254619 - RNA, 19 nt, Artificial Sequence
  Description of Artificial Sequence: Synthetic oligonucleotide
uuuugcuacuuccuuagcc

SEQ ID NO: 3254620 - RNA, 19 nt, Artificial Sequence
  Description of Artificial Sequence: Synthetic oligonucleotide
uuugcuacuuccuuagccc

SEQ ID NO: 3254621 - RNA, 19 nt, Artificial Sequence
  Description of Artificial Sequence: Synthetic oligonucleotide
ugggacuccaaucugcagg

SEQ ID NO: 3254622 - RNA, 19 nt, Artificial Sequence
  Description of Artificial Sequence: Synthetic oligonucleotide
acuuccuuagcccugagcu

SEQ ID NO: 3254623 - RNA, 19 nt, Artificial Sequence
  Description of Artificial Sequence: Synthetic oligonucleotide
agugagaaaggucaggaca

SEQ ID NO: 3254624 - RNA, 19 nt, Artificial Sequence
  Description of Artificial Sequence: Synthetic oligonucleotide
aacauggucccucugggug

SEQ ID NO: 3254625 - RNA, 19 nt, Artificial Sequence
  Description of Artificial Sequence: Synthetic oligonucleotide
uguguugggacuccaaucu

SEQ ID NO: 3254626 - RNA, 19 nt, Artificial Sequence
  Description of Artificial Sequence: Synthetic oligonucleotide
uccuucuaagcucacauac

SEQ ID NO: 3254627 - RNA, 19 nt, Artificial Sequence
  Description of Artificial Sequence: Synthetic oligonucleotide
aacuuccuugucuuucagc

SEQ ID NO: 3254628 - RNA, 19 nt, Artificial Sequence
  Description of Artificial Sequence: Synthetic oligonucleotide
ucuuucagcuuauaggcug

SEQ ID NO: 3254629 - RNA, 19 nt, Artificial Sequence
  Description of Artificial Sequence: Synthetic oligonucleotide
aaaggcaacuuccuugucu

SEQ ID NO: 3254630 - RNA, 19 nt, Artificial Sequence
  Description of Artificial Sequence: Synthetic oligonucleotide
caggacuuugccaugaacc

SEQ ID NO: 3254631 - RNA, 19 nt, Artificial Sequence
  Description of Artificial Sequence: Synthetic oligonucleotide
uuucaaaucuggcuggacu

SEQ ID NO: 3254632 - RNA, 19 nt, Artificial Sequence
  Description of Artificial Sequence: Synthetic oligonucleotide
ucaacauggucccucuggg

SEQ ID NO: 3254633 - RNA, 19 nt, Artificial Sequence
  Description of Artificial Sequence: Synthetic oligonucleotide
aauccuucuaagcucacau

SEQ ID NO: 3254634 - RNA, 19 nt, Artificial Sequence
  Description of Artificial Sequence: Synthetic oligonucleotide
aguccaaaaggcaacuucc

SEQ ID NO: 3254635 - RNA, 19 nt, Artificial Sequence
  Description of Artificial Sequence: Synthetic oligonucleotide
ugagcucaguccaaaaggc

SEQ ID NO: 3254636 - RNA, 19 nt, Artificial Sequence
  Description of Artificial Sequence: Synthetic oligonucleotide
acuuccuugucuuucagcu

SEQ ID NO: 3254637 - RNA, 19 nt, Artificial Sequence
  Description of Artificial Sequence: Synthetic oligonucleotide
aggacuuugccaugaaccg

SEQ ID NO: 3254638 - RNA, 19 nt, Artificial Sequence
  Description of Artificial Sequence: Synthetic oligonucleotide
caagcagugagaaagguca

SEQ ID NO: 3254639 - RNA, 19 nt, Artificial Sequence
  Description of Artificial Sequence: Synthetic oligonucleotide
aaaagugcagagccacauc

SEQ ID NO: 3254640 - RNA, 19 nt, Artificial Sequence
  Description of Artificial Sequence: Synthetic oligonucleotide
cugagcucaguccaaaagg

SEQ ID NO: 3254641 - RNA, 19 nt, Artificial Sequence
  Description of Artificial Sequence: Synthetic oligonucleotide
uaagcucacauacuucccc

SEQ ID NO: 3254642 - RNA, 19 nt, Artificial Sequence
  Description of Artificial Sequence: Synthetic oligonucleotide
ucagcuuauaggcugccug

SEQ ID NO: 3254643 - RNA, 19 nt, Artificial Sequence
  Description of Artificial Sequence: Synthetic oligonucleotide
aaaggucaggacaaaagug

SEQ ID NO: 3254644 - RNA, 19 nt, Artificial Sequence
  Description of Artificial Sequence: Synthetic oligonucleotide
gagcaaggaggauaggagg

SEQ ID NO: 3254645 - RNA, 19 nt, Artificial Sequence
  Description of Artificial Sequence: Synthetic oligonucleotide
agagccacaucaugaaagg

SEQ ID NO: 3254646 - RNA, 19 nt, Artificial Sequence
  Description of Artificial Sequence: Synthetic oligonucleotide
ucuggucauauucuggcca

SEQ ID NO: 3254647 - RNA, 19 nt, Artificial Sequence
  Description of Artificial Sequence: Synthetic oligonucleotide
ucaugaaaggacagcaccu

SEQ ID NO: 3254648 - RNA, 19 nt, Artificial Sequence
  Description of Artificial Sequence: Synthetic oligonucleotide
cuucuggucauauucuggc

SEQ ID NO: 3254649 - RNA, 19 nt, Artificial Sequence
  Description of Artificial Sequence: Synthetic oligonucleotide
ugugaauccuucuaagcuc

SEQ ID NO: 3254650 - RNA, 19 nt, Artificial Sequence
  Description of Artificial Sequence: Synthetic oligonucleotide
caggcaagcagugagaaag

SEQ ID NO: 3254651 - RNA, 19 nt, Artificial Sequence
  Description of Artificial Sequence: Synthetic oligonucleotide
gucauauucuggccaaugg

SEQ ID NO: 3254652 - RNA, 19 nt, Artificial Sequence
  Description of Artificial Sequence: Synthetic oligonucleotide
aggcuuucaaaucuggcug

SEQ ID NO: 3254653 - RNA, 19 nt, Artificial Sequence
  Description of Artificial Sequence: Synthetic oligonucleotide
uguugggacuccaaucugc

SEQ ID NO: 3254654 - RNA, 19 nt, Artificial Sequence
  Description of Artificial Sequence: Synthetic oligonucleotide
cuugucuuucagcuuauag

SEQ ID NO: 3254655 - RNA, 19 nt, Artificial Sequence
  Description of Artificial Sequence: Synthetic oligonucleotide
cagagccacaucaugaaag

SEQ ID NO: 3254656 - RNA, 19 nt, Artificial Sequence
  Description of Artificial Sequence: Synthetic oligonucleotide
caagccuuccccauugggg

SEQ ID NO: 3254657 - RNA, 19 nt, Artificial Sequence
  Description of Artificial Sequence: Synthetic oligonucleotide
cuuccuucuggucauauuc

SEQ ID NO: 3254658 - RNA, 19 nt, Artificial Sequence
  Description of Artificial Sequence: Synthetic oligonucleotide
auauucuggccaauggggc

SEQ ID NO: 3254659 - RNA, 19 nt, Artificial Sequence
  Description of Artificial Sequence: Synthetic oligonucleotide
gagucaggcaagcagugag

SEQ ID NO: 3254660 - RNA, 19 nt, Artificial Sequence
  Description of Artificial Sequence: Synthetic oligonucleotide
aaccguguccacuaugggu

SEQ ID NO: 3254661 - RNA, 19 nt, Artificial Sequence
  Description of Artificial Sequence: Synthetic oligonucleotide
aagccuuccccauugggga

SEQ ID NO: 3254662 - RNA, 19 nt, Artificial Sequence
  Description of Artificial Sequence: Synthetic oligonucleotide
cucaacauggucccucugg

SEQ ID NO: 3254663 - RNA, 19 nt, Artificial Sequence
  Description of Artificial Sequence: Synthetic oligonucleotide
gacuccaaucugcagguag

SEQ ID NO: 3254664 - RNA, 19 nt, Artificial Sequence
  Description of Artificial Sequence: Synthetic oligonucleotide
auuggggauucccauuccg

SEQ ID NO: 3254665 - RNA, 19 nt, Artificial Sequence
  Description of Artificial Sequence: Synthetic oligonucleotide
uuccgagcaaggaggauag

SEQ ID NO: 3254666 - RNA, 19 nt, Artificial Sequence
  Description of Artificial Sequence: Synthetic oligonucleotide
uauaggcugccuguguugg

SEQ ID NO: 3254667 - RNA, 19 nt, Artificial Sequence
  Description of Artificial Sequence: Synthetic oligonucleotide
agccacaucaugaaaggac

SEQ ID NO: 3254668 - RNA, 19 nt, Artificial Sequence
  Description of Artificial Sequence: Synthetic oligonucleotide
ucccauuccgagcaaggag

SEQ ID NO: 3254669 - RNA, 19 nt, Artificial Sequence
  Description of Artificial Sequence: Synthetic oligonucleotide
uccugaucagagcucaaca

SEQ ID NO: 3254670 - RNA, 19 nt, Artificial Sequence
  Description of Artificial Sequence: Synthetic oligonucleotide
agaaaggucaggacaaaag

SEQ ID NO: 3254671 - RNA, 19 nt, Artificial Sequence
  Description of Artificial Sequence: Synthetic oligonucleotide
uccacuauggguggugagg

SEQ ID NO: 3254672 - RNA, 19 nt, Artificial Sequence
  Description of Artificial Sequence: Synthetic oligonucleotide
aucagagcucaacaugguc

SEQ ID NO: 3254673 - RNA, 19 nt, Artificial Sequence
  Description of Artificial Sequence: Synthetic oligonucleotide
uuagcccugagcucagucc

SEQ ID NO: 3254674 - RNA, 19 nt, Artificial Sequence
  Description of Artificial Sequence: Synthetic oligonucleotide
uccaggcuuucaaaucugg

SEQ ID NO: 3254675 - RNA, 19 nt, Artificial Sequence
  Description of Artificial Sequence: Synthetic oligonucleotide
uuccuugucuuucagcuua

SEQ ID NO: 3254676 - RNA, 19 nt, Artificial Sequence
  Description of Artificial Sequence: Synthetic oligonucleotide
aaggcaacuuccuugucuu

SEQ ID NO: 3254677 - RNA, 19 nt, Artificial Sequence
  Description of Artificial Sequence: Synthetic oligonucleotide
gacaaaagugcagagccac

SEQ ID NO: 3254678 - RNA, 19 nt, Artificial Sequence
  Description of Artificial Sequence: Synthetic oligonucleotide
acaucaugaaaggacagca

SEQ ID NO: 3254679 - RNA, 19 nt, Artificial Sequence
  Description of Artificial Sequence: Synthetic oligonucleotide
ucaggacaaaagugcagag

SEQ ID NO: 3254680 - RNA, 19 nt, Artificial Sequence
  Description of Artificial Sequence: Synthetic oligonucleotide
aaaaggcaacuuccuuguc

SEQ ID NO: 3254681 - RNA, 19 nt, Artificial Sequence
  Description of Artificial Sequence: Synthetic oligonucleotide
cuggacuuccugaucagag

SEQ ID NO: 3254682 - RNA, 19 nt, Artificial Sequence
  Description of Artificial Sequence: Synthetic oligonucleotide
gaaaggucaggacaaaagu

SEQ ID NO: 3254683 - RNA, 19 nt, Artificial Sequence
  Description of Artificial Sequence: Synthetic oligonucleotide
uuauaggcugccuguguug

SEQ ID NO: 3254684 - RNA, 19 nt, Artificial Sequence
  Description of Artificial Sequence: Synthetic oligonucleotide
cugaucagagcucaacaug

SEQ ID NO: 3254685 - RNA, 19 nt, Artificial Sequence
  Description of Artificial Sequence: Synthetic oligonucleotide
uggggauucccauuccgag

SEQ ID NO: 3254686 - RNA, 19 nt, Artificial Sequence
  Description of Artificial Sequence: Synthetic oligonucleotide
uggcuggacuuccugauca

SEQ ID NO: 3254687 - RNA, 19 nt, Artificial Sequence
  Description of Artificial Sequence: Synthetic oligonucleotide
uucaaaucuggcuggacuu

SEQ ID NO: 3254688 - RNA, 19 nt, Artificial Sequence
  Description of Artificial Sequence: Synthetic oligonucleotide
aagcucacauacuucccca

SEQ ID NO: 3254689 - RNA, 19 nt, Artificial Sequence
  Description of Artificial Sequence: Synthetic oligonucleotide
cuuucagcuuauaggcugc

SEQ ID NO: 3254690 - RNA, 19 nt, Artificial Sequence
  Description of Artificial Sequence: Synthetic oligonucleotide
uauucuggccaauggggca

SEQ ID NO: 3254691 - RNA, 19 nt, Artificial Sequence
  Description of Artificial Sequence: Synthetic oligonucleotide
agugcagagccacaucaug

SEQ ID NO: 3254692 - RNA, 19 nt, Artificial Sequence
  Description of Artificial Sequence: Synthetic oligonucleotide
acauggucccucugggugg

SEQ ID NO: 3254693 - RNA, 19 nt, Artificial Sequence
  Description of Artificial Sequence: Synthetic oligonucleotide
cagagcucaacaugguccc

SEQ ID NO: 3254694 - RNA, 19 nt, Artificial Sequence
  Description of Artificial Sequence: Synthetic oligonucleotide
cuauggguggugagggugg

SEQ ID NO: 3254695 - RNA, 19 nt, Artificial Sequence
  Description of Artificial Sequence: Synthetic oligonucleotide
gacuuugccaugaaccgug

SEQ ID NO: 3254696 - RNA, 19 nt, Artificial Sequence
  Description of Artificial Sequence: Synthetic oligonucleotide
aaucuggcuggacuuccug

SEQ ID NO: 3254697 - RNA, 19 nt, Artificial Sequence
  Description of Artificial Sequence: Synthetic oligonucleotide
acuccaaucugcagguagc

SEQ ID NO: 3254698 - RNA, 19 nt, Artificial Sequence
  Description of Artificial Sequence: Synthetic oligonucleotide
uuccuuagcccugagcuca

SEQ ID NO: 3254699 - RNA, 19 nt, Artificial Sequence
  Description of Artificial Sequence: Synthetic oligonucleotide
cuaagcucacauacuuccc

SEQ ID NO: 3254700 - RNA, 19 nt, Artificial Sequence
  Description of Artificial Sequence: Synthetic oligonucleotide
uuccuucuggucauauucu

SEQ ID NO: 3254701 - RNA, 19 nt, Artificial Sequence
  Description of Artificial Sequence: Synthetic oligonucleotide
uggacuuccugaucagagc

SEQ ID NO: 3254702 - RNA, 19 nt, Artificial Sequence
  Description of Artificial Sequence: Synthetic oligonucleotide
ucacauacuuccccaggac

SEQ ID NO: 3254703 - RNA, 19 nt, Artificial Sequence
  Description of Artificial Sequence: Synthetic oligonucleotide
uagcccugagcucagucca

SEQ ID NO: 3254704 - RNA, 19 nt, Artificial Sequence
  Description of Artificial Sequence: Synthetic oligonucleotide
uucuaagcucacauacuuc

SEQ ID NO: 3254705 - RNA, 19 nt, Artificial Sequence
  Description of Artificial Sequence: Synthetic oligonucleotide
aacauugugaucucaaaac

SEQ ID NO: 3254706 - RNA, 19 nt, Artificial Sequence
  Description of Artificial Sequence: Synthetic oligonucleotide
aaaauagaguuuuaacugg

SEQ ID NO: 3254707 - RNA, 19 nt, Artificial Sequence
  Description of Artificial Sequence: Synthetic oligonucleotide
gaaaauagaguuuuaacug

SEQ ID NO: 3254708 - RNA, 19 nt, Artificial Sequence
  Description of Artificial Sequence: Synthetic oligonucleotide
agaaaauagaguuuuaacu

SEQ ID NO: 3254709 - RNA, 19 nt, Artificial Sequence
  Description of Artificial Sequence: Synthetic oligonucleotide
aggaguuauaaacagguac

SEQ ID NO: 3254710 - RNA, 19 nt, Artificial Sequence
  Description of Artificial Sequence: Synthetic oligonucleotide
uauaagaucaaagacaguc

SEQ ID NO: 3254711 - RNA, 19 nt, Artificial Sequence
  Description of Artificial Sequence: Synthetic oligonucleotide
ucauuauaagaucaaagac

SEQ ID NO: 3254712 - RNA, 19 nt, Artificial Sequence
  Description of Artificial Sequence: Synthetic oligonucleotide
aaaccuaucaugguaagag

SEQ ID NO: 3254713 - RNA, 19 nt, Artificial Sequence
  Description of Artificial Sequence: Synthetic oligonucleotide
aauugcagaaucuacagua

SEQ ID NO: 3254714 - RNA, 19 nt, Artificial Sequence
  Description of Artificial Sequence: Synthetic oligonucleotide
auuauaagaucaaagacag

SEQ ID NO: 3254715 - RNA, 19 nt, Artificial Sequence
  Description of Artificial Sequence: Synthetic oligonucleotide
acauugugaucucaaaacc

SEQ ID NO: 3254716 - RNA, 19 nt, Artificial Sequence
  Description of Artificial Sequence: Synthetic oligonucleotide
aaaugggaauugcagaauc

SEQ ID NO: 3254717 - RNA, 19 nt, Artificial Sequence
  Description of Artificial Sequence: Synthetic oligonucleotide
agucucuaagcucagcucc

SEQ ID NO: 3254718 - RNA, 19 nt, Artificial Sequence
  Description of Artificial Sequence: Synthetic oligonucleotide
guuauaaacagguacuccc

SEQ ID NO: 3254719 - RNA, 19 nt, Artificial Sequence
  Description of Artificial Sequence: Synthetic oligonucleotide
uuuaacuggagauaccacc

SEQ ID NO: 3254720 - RNA, 19 nt, Artificial Sequence
  Description of Artificial Sequence: Synthetic oligonucleotide
aaagacagucucuaagcuc

SEQ ID NO: 3254721 - RNA, 19 nt, Artificial Sequence
  Description of Artificial Sequence: Synthetic oligonucleotide
ucuaagcucagcuccaugg

SEQ ID NO: 3254722 - RNA, 19 nt, Artificial Sequence
  Description of Artificial Sequence: Synthetic oligonucleotide
ugaggaguuauaaacaggu

SEQ ID NO: 3254723 - RNA, 19 nt, Artificial Sequence
  Description of Artificial Sequence: Synthetic oligonucleotide
gaucucaaaaccuaucaug

SEQ ID NO: 3254724 - RNA, 19 nt, Artificial Sequence
  Description of Artificial Sequence: Synthetic oligonucleotide
cauuauaagaucaaagaca

SEQ ID NO: 3254725 - RNA, 19 nt, Artificial Sequence
  Description of Artificial Sequence: Synthetic oligonucleotide
aacuggagauaccaccugc

SEQ ID NO: 3254726 - RNA, 19 nt, Artificial Sequence
  Description of Artificial Sequence: Synthetic oligonucleotide
ucaaagacagucucuaagc

SEQ ID NO: 3254727 - RNA, 19 nt, Artificial Sequence
  Description of Artificial Sequence: Synthetic oligonucleotide
auggaguugccauauuugc

SEQ ID NO: 3254728 - RNA, 19 nt, Artificial Sequence
  Description of Artificial Sequence: Synthetic oligonucleotide
aaccuaucaugguaagagc

SEQ ID NO: 3254729 - RNA, 19 nt, Artificial Sequence
  Description of Artificial Sequence: Synthetic oligonucleotide
aggcugaggaguuauaaac

SEQ ID NO: 3254730 - RNA, 19 nt, Artificial Sequence
  Description of Artificial Sequence: Synthetic oligonucleotide
aggugaaucauggaguugc

SEQ ID NO: 3254731 - RNA, 19 nt, Artificial Sequence
  Description of Artificial Sequence: Synthetic oligonucleotide
uaaacagguacucccaaca

SEQ ID NO: 3254732 - RNA, 19 nt, Artificial Sequence
  Description of Artificial Sequence: Synthetic oligonucleotide
aucaaagacagucucuaag

SEQ ID NO: 3254733 - RNA, 19 nt, Artificial Sequence
  Description of Artificial Sequence: Synthetic oligonucleotide
uagaaaauagaguuuuaac

SEQ ID NO: 3254734 - RNA, 19 nt, Artificial Sequence
  Description of Artificial Sequence: Synthetic oligonucleotide
acaauggauguucaaguuc

SEQ ID NO: 3254735 - RNA, 19 nt, Artificial Sequence
  Description of Artificial Sequence: Synthetic oligonucleotide
uuaacuggagauaccaccu

SEQ ID NO: 3254736 - RNA, 19 nt, Artificial Sequence
  Description of Artificial Sequence: Synthetic oligonucleotide
ucaaaaccuaucaugguaa

SEQ ID NO: 3254737 - RNA, 19 nt, Artificial Sequence
  Description of Artificial Sequence: Synthetic oligonucleotide
aucucaaaaccuaucaugg

SEQ ID NO: 3254738 - RNA, 19 nt, Artificial Sequence
  Description of Artificial Sequence: Synthetic oligonucleotide
ucuucuuccucauuauaag

SEQ ID NO: 3254739 - RNA, 19 nt, Artificial Sequence
  Description of Artificial Sequence: Synthetic oligonucleotide
aguuauaaacagguacucc

SEQ ID NO: 3254740 - RNA, 19 nt, Artificial Sequence
  Description of Artificial Sequence: Synthetic oligonucleotide
cauggauuccccacaaugg

SEQ ID NO: 3254741 - RNA, 19 nt, Artificial Sequence
  Description of Artificial Sequence: Synthetic oligonucleotide
cucauuauaagaucaaaga

SEQ ID NO: 3254742 - RNA, 19 nt, Artificial Sequence
  Description of Artificial Sequence: Synthetic oligonucleotide
uagaguuuuaacuggagau

SEQ ID NO: 3254743 - RNA, 19 nt, Artificial Sequence
  Description of Artificial Sequence: Synthetic oligonucleotide
uuauaaacagguacuccca

SEQ ID NO: 3254744 - RNA, 19 nt, Artificial Sequence
  Description of Artificial Sequence: Synthetic oligonucleotide
uaagaucaaagacagucuc

SEQ ID NO: 3254745 - RNA, 19 nt, Artificial Sequence
  Description of Artificial Sequence: Synthetic oligonucleotide
aagacagucucuaagcuca

SEQ ID NO: 3254746 - RNA, 19 nt, Artificial Sequence
  Description of Artificial Sequence: Synthetic oligonucleotide
cagaaggugaaucauggag

SEQ ID NO: 3254747 - RNA, 19 nt, Artificial Sequence
  Description of Artificial Sequence: Synthetic oligonucleotide
uguagcagaaggugaauca

SEQ ID NO: 3254748 - RNA, 19 nt, Artificial Sequence
  Description of Artificial Sequence: Synthetic oligonucleotide
auaaacagguacucccaac

SEQ ID NO: 3254749 - RNA, 19 nt, Artificial Sequence
  Description of Artificial Sequence: Synthetic oligonucleotide
accuaucaugguaagagcc

SEQ ID NO: 3254750 - RNA, 19 nt, Artificial Sequence
  Description of Artificial Sequence: Synthetic oligonucleotide
aguugccauauuugcaggc

SEQ ID NO: 3254751 - RNA, 19 nt, Artificial Sequence
  Description of Artificial Sequence: Synthetic oligonucleotide
cauauuugcaggcugagga

SEQ ID NO: 3254752 - RNA, 19 nt, Artificial Sequence
  Description of Artificial Sequence: Synthetic oligonucleotide
ugaaucauggaguugccau

SEQ ID NO: 3254753 - RNA, 19 nt, Artificial Sequence
  Description of Artificial Sequence: Synthetic oligonucleotide
acucccaacauugugaucu

SEQ ID NO: 3254754 - RNA, 19 nt, Artificial Sequence
  Description of Artificial Sequence: Synthetic oligonucleotide
ggucauguguagcagaagg

SEQ ID NO: 3254755 - RNA, 19 nt, Artificial Sequence
  Description of Artificial Sequence: Synthetic oligonucleotide
caugguaagagcccaguag

SEQ ID NO: 3254756 - RNA, 19 nt, Artificial Sequence
  Description of Artificial Sequence: Synthetic oligonucleotide
ugcagaaucuacaguacac

SEQ ID NO: 3254757 - RNA, 19 nt, Artificial Sequence
  Description of Artificial Sequence: Synthetic oligonucleotide
uucuuccucauuauaagau

SEQ ID NO: 3254758 - RNA, 19 nt, Artificial Sequence
  Description of Artificial Sequence: Synthetic oligonucleotide
auagaguuuuaacuggaga

SEQ ID NO: 3254759 - RNA, 19 nt, Artificial Sequence
  Description of Artificial Sequence: Synthetic oligonucleotide
augguaagagcccaguaga

SEQ ID NO: 3254760 - RNA, 19 nt, Artificial Sequence
  Description of Artificial Sequence: Synthetic oligonucleotide
aauagaguuuuaacuggag

SEQ ID NO: 3254761 - RNA, 19 nt, Artificial Sequence
  Description of Artificial Sequence: Synthetic oligonucleotide
ucauguguagcagaaggug

SEQ ID NO: 3254762 - RNA, 19 nt, Artificial Sequence
  Description of Artificial Sequence: Synthetic oligonucleotide
gaguuuuaacuggagauac

SEQ ID NO: 3254763 - RNA, 19 nt, Artificial Sequence
  Description of Artificial Sequence: Synthetic oligonucleotide
auauuugcaggcugaggag

SEQ ID NO: 3254764 - RNA, 19 nt, Artificial Sequence
  Description of Artificial Sequence: Synthetic oligonucleotide
uggagauaccaccugcccc

SEQ ID NO: 3254765 - RNA, 19 nt, Artificial Sequence
  Description of Artificial Sequence: Synthetic oligonucleotide
ggaguugccauauuugcag

SEQ ID NO: 3254766 - RNA, 19 nt, Artificial Sequence
  Description of Artificial Sequence: Synthetic oligonucleotide
ggaauugcagaaucuacag

SEQ ID NO: 3254767 - RNA, 19 nt, Artificial Sequence
  Description of Artificial Sequence: Synthetic oligonucleotide
uuuuaacuggagauaccac

SEQ ID NO: 3254768 - RNA, 19 nt, Artificial Sequence
  Description of Artificial Sequence: Synthetic oligonucleotide
aaauagaguuuuaacugga

SEQ ID NO: 3254769 - RNA, 19 nt, Artificial Sequence
  Description of Artificial Sequence: Synthetic oligonucleotide
agcagaaggugaaucaugg

SEQ ID NO: 3254770 - RNA, 19 nt, Artificial Sequence
  Description of Artificial Sequence: Synthetic oligonucleotide
cauggaguugccauauuug

SEQ ID NO: 3254771 - RNA, 19 nt, Artificial Sequence
  Description of Artificial Sequence: Synthetic oligonucleotide
acagucucuaagcucagcu

SEQ ID NO: 3254772 - RNA, 19 nt, Artificial Sequence
  Description of Artificial Sequence: Synthetic oligonucleotide
acagguacucccaacauug

SEQ ID NO: 3254773 - RNA, 19 nt, Artificial Sequence
  Description of Artificial Sequence: Synthetic oligonucleotide
cugaggaguuauaaacagg

SEQ ID NO: 3254774 - RNA, 19 nt, Artificial Sequence
  Description of Artificial Sequence: Synthetic oligonucleotide
ucuuccucauuauaagauc

SEQ ID NO: 3254775 - RNA, 19 nt, Artificial Sequence
  Description of Artificial Sequence: Synthetic oligonucleotide
agcuccauggauuccccac

SEQ ID NO: 3254776 - RNA, 19 nt, Artificial Sequence
  Description of Artificial Sequence: Synthetic oligonucleotide
uauaaacagguacucccaa

SEQ ID NO: 3254777 - RNA, 19 nt, Artificial Sequence
  Description of Artificial Sequence: Synthetic oligonucleotide
ugggaauugcagaaucuac

SEQ ID NO: 3254778 - RNA, 19 nt, Artificial Sequence
  Description of Artificial Sequence: Synthetic oligonucleotide
uugcagaaucuacaguaca

SEQ ID NO: 3254779 - RNA, 19 nt, Artificial Sequence
  Description of Artificial Sequence: Synthetic oligonucleotide
guuuuaacuggagauacca

SEQ ID NO: 3254780 - RNA, 19 nt, Artificial Sequence
  Description of Artificial Sequence: Synthetic oligonucleotide
ugugaucucaaaaccuauc

SEQ ID NO: 3254781 - RNA, 19 nt, Artificial Sequence
  Description of Artificial Sequence: Synthetic oligonucleotide
uggauguucaaguucucaa

SEQ ID NO: 3254782 - RNA, 19 nt, Artificial Sequence
  Description of Artificial Sequence: Synthetic oligonucleotide
auugcagaaucuacaguac

SEQ ID NO: 3254783 - RNA, 19 nt, Artificial Sequence
  Description of Artificial Sequence: Synthetic oligonucleotide
uggaguugccauauuugca

SEQ ID NO: 3254784 - RNA, 19 nt, Artificial Sequence
  Description of Artificial Sequence: Synthetic oligonucleotide
guaagagcccaguagaaaa

SEQ ID NO: 3254785 - RNA, 19 nt, Artificial Sequence
  Description of Artificial Sequence: Synthetic oligonucleotide
ugaucucaaaaccuaucau

SEQ ID NO: 3254786 - RNA, 19 nt, Artificial Sequence
  Description of Artificial Sequence: Synthetic oligonucleotide
cuuccucauuauaagauca

SEQ ID NO: 3254787 - RNA, 19 nt, Artificial Sequence
  Description of Artificial Sequence: Synthetic oligonucleotide
gugaucucaaaaccuauca

SEQ ID NO: 3254788 - RNA, 19 nt, Artificial Sequence
  Description of Artificial Sequence: Synthetic oligonucleotide
gaguugccauauuugcagg

SEQ ID NO: 3254789 - RNA, 19 nt, Artificial Sequence
  Description of Artificial Sequence: Synthetic oligonucleotide
uagcagaaggugaaucaug

SEQ ID NO: 3254790 - RNA, 19 nt, Artificial Sequence
  Description of Artificial Sequence: Synthetic oligonucleotide
agcucagcuccauggauuc

SEQ ID NO: 3254791 - RNA, 19 nt, Artificial Sequence
  Description of Artificial Sequence: Synthetic oligonucleotide
aguuuuaacuggagauacc

SEQ ID NO: 3254792 - RNA, 19 nt, Artificial Sequence
  Description of Artificial Sequence: Synthetic oligonucleotide
agaaggugaaucauggagu

SEQ ID NO: 3254793 - RNA, 19 nt, Artificial Sequence
  Description of Artificial Sequence: Synthetic oligonucleotide
aaacagguacucccaacau

SEQ ID NO: 3254794 - RNA, 19 nt, Artificial Sequence
  Description of Artificial Sequence: Synthetic oligonucleotide
agcccaguagaaaauagag

SEQ ID NO: 3254795 - RNA, 19 nt, Artificial Sequence
  Description of Artificial Sequence: Synthetic oligonucleotide
ucauggaguugccauauuu

SEQ ID NO: 3254796 - RNA, 19 nt, Artificial Sequence
  Description of Artificial Sequence: Synthetic oligonucleotide
aaaaccuaucaugguaaga

SEQ ID NO: 3254797 - RNA, 19 nt, Artificial Sequence
  Description of Artificial Sequence: Synthetic oligonucleotide
aaugggaauugcagaaucu

SEQ ID NO: 3254798 - RNA, 19 nt, Artificial Sequence
  Description of Artificial Sequence: Synthetic oligonucleotide
acuggagauaccaccugcc

SEQ ID NO: 3254799 - RNA, 19 nt, Artificial Sequence
  Description of Artificial Sequence: Synthetic oligonucleotide
auggauuccccacaaugga

SEQ ID NO: 3254800 - RNA, 19 nt, Artificial Sequence
  Description of Artificial Sequence: Synthetic oligonucleotide
ccucauuauaagaucaaag

SEQ ID NO: 3254801 - RNA, 19 nt, Artificial Sequence
  Description of Artificial Sequence: Synthetic oligonucleotide
gcugaggaguuauaaacag

SEQ ID NO: 3254802 - RNA, 19 nt, Artificial Sequence
  Description of Artificial Sequence: Synthetic oligonucleotide
aacagguacucccaacauu

SEQ ID NO: 3254803 - RNA, 19 nt, Artificial Sequence
  Description of Artificial Sequence: Synthetic oligonucleotide
aaucauggaguugccauau

SEQ ID NO: 3254804 - RNA, 19 nt, Artificial Sequence
  Description of Artificial Sequence: Synthetic oligonucleotide
uugccauauuugcaggcug

SEQ ID NO: 3254805 - RNA, 19 nt, Artificial Sequence
  Description of Artificial Sequence: Synthetic oligonucleotide
uuuauuaccuuuaaaauuc

SEQ ID NO: 3254806 - RNA, 19 nt, Artificial Sequence
  Description of Artificial Sequence: Synthetic oligonucleotide
aauugcaaagggaacagcc

SEQ ID NO: 3254807 - RNA, 19 nt, Artificial Sequence
  Description of Artificial Sequence: Synthetic oligonucleotide
uuaaaauuccaucucuuug

SEQ ID NO: 3254808 - RNA, 19 nt, Artificial Sequence
  Description of Artificial Sequence: Synthetic oligonucleotide
aucuuuauuaccuuuaaaa

SEQ ID NO: 3254809 - RNA, 19 nt, Artificial Sequence
  Description of Artificial Sequence: Synthetic oligonucleotide
aaggaucuugucuaaauca

SEQ ID NO: 3254810 - RNA, 19 nt, Artificial Sequence
  Description of Artificial Sequence: Synthetic oligonucleotide
aaagggaacagcccgagga

SEQ ID NO: 3254811 - RNA, 19 nt, Artificial Sequence
  Description of Artificial Sequence: Synthetic oligonucleotide
aucucuuuggcucugaagu

SEQ ID NO: 3254812 - RNA, 19 nt, Artificial Sequence
  Description of Artificial Sequence: Synthetic oligonucleotide
ucuuuauuaccuuuaaaau

SEQ ID NO: 3254813 - RNA, 19 nt, Artificial Sequence
  Description of Artificial Sequence: Synthetic oligonucleotide
aaagauggggaagucgcgc

SEQ ID NO: 3254814 - RNA, 19 nt, Artificial Sequence
  Description of Artificial Sequence: Synthetic oligonucleotide
aagugagcuggcuugaucu

SEQ ID NO: 3254815 - RNA, 19 nt, Artificial Sequence
  Description of Artificial Sequence: Synthetic oligonucleotide
ucaucgugcacgaacagcu

SEQ ID NO: 3254816 - RNA, 19 nt, Artificial Sequence
  Description of Artificial Sequence: Synthetic oligonucleotide
uguggcuugaagcuccggg

SEQ ID NO: 3254817 - RNA, 19 nt, Artificial Sequence
  Description of Artificial Sequence: Synthetic oligonucleotide
gaacucgccgcucaggagg

SEQ ID NO: 3254818 - RNA, 19 nt, Artificial Sequence
  Description of Artificial Sequence: Synthetic oligonucleotide
gaaggcacgaccugugcgg

SEQ ID NO: 3254819 - RNA, 19 nt, Artificial Sequence
  Description of Artificial Sequence: Synthetic oligonucleotide
auauggaaggaucuugucu

SEQ ID NO: 3254820 - RNA, 19 nt, Artificial Sequence
  Description of Artificial Sequence: Synthetic oligonucleotide
uuauuaccuuuaaaauucc

SEQ ID NO: 3254821 - RNA, 19 nt, Artificial Sequence
  Description of Artificial Sequence: Synthetic oligonucleotide
agagcagacgcacccagcg

SEQ ID NO: 3254822 - RNA, 19 nt, Artificial Sequence
  Description of Artificial Sequence: Synthetic oligonucleotide
aaaccgugucaccugcacg

SEQ ID NO: 3254823 - RNA, 19 nt, Artificial Sequence
  Description of Artificial Sequence: Synthetic oligonucleotide
aaccgugucaccugcacga

SEQ ID NO: 3254824 - RNA, 19 nt, Artificial Sequence
  Description of Artificial Sequence: Synthetic oligonucleotide
uugucuaaaucagagcccc

SEQ ID NO: 3254825 - RNA, 19 nt, Artificial Sequence
  Description of Artificial Sequence: Synthetic oligonucleotide
auugcaaagggaacagccc

SEQ ID NO: 3254826 - RNA, 19 nt, Artificial Sequence
  Description of Artificial Sequence: Synthetic oligonucleotide
uuuaaaauuccaucucuuu

SEQ ID NO: 3254827 - RNA, 19 nt, Artificial Sequence
  Description of Artificial Sequence: Synthetic oligonucleotide
aucgugcacgaacagcugc

SEQ ID NO: 3254828 - RNA, 19 nt, Artificial Sequence
  Description of Artificial Sequence: Synthetic oligonucleotide
cacgaaguugcucucaaag

SEQ ID NO: 3254829 - RNA, 19 nt, Artificial Sequence
  Description of Artificial Sequence: Synthetic oligonucleotide
agcugcacgaauugcaaag

SEQ ID NO: 3254830 - RNA, 19 nt, Artificial Sequence
  Description of Artificial Sequence: Synthetic oligonucleotide
ugcacgaacagcugcacga

SEQ ID NO: 3254831 - RNA, 19 nt, Artificial Sequence
  Description of Artificial Sequence: Synthetic oligonucleotide
gaguucugagaccugcggg

SEQ ID NO: 3254832 - RNA, 19 nt, Artificial Sequence
  Description of Artificial Sequence: Synthetic oligonucleotide
uaggcguccacucuccuug

SEQ ID NO: 3254833 - RNA, 19 nt, Artificial Sequence
  Description of Artificial Sequence: Synthetic oligonucleotide
uugaucucugguccuuugg

SEQ ID NO: 3254834 - RNA, 19 nt, Artificial Sequence
  Description of Artificial Sequence: Synthetic oligonucleotide
ugaucucugguccuuuggc

SEQ ID NO: 3254835 - RNA, 19 nt, Artificial Sequence
  Description of Artificial Sequence: Synthetic oligonucleotide
aagagcccgaucuuuauua

SEQ ID NO: 3254836 - RNA, 19 nt, Artificial Sequence
  Description of Artificial Sequence: Synthetic oligonucleotide
aggucuggcagcuccaggg

SEQ ID NO: 3254837 - RNA, 19 nt, Artificial Sequence
  Description of Artificial Sequence: Synthetic oligonucleotide
agaaggcacgaccugugcg

SEQ ID NO: 3254838 - RNA, 19 nt, Artificial Sequence
  Description of Artificial Sequence: Synthetic oligonucleotide
uccucaugcgugaagggca

SEQ ID NO: 3254839 - RNA, 19 nt, Artificial Sequence
  Description of Artificial Sequence: Synthetic oligonucleotide
gaaggaucuugucuaaauc

SEQ ID NO: 3254840 - RNA, 19 nt, Artificial Sequence
  Description of Artificial Sequence: Synthetic oligonucleotide
uccagucuggccucugugg

SEQ ID NO: 3254841 - RNA, 19 nt, Artificial Sequence
  Description of Artificial Sequence: Synthetic oligonucleotide
uuggcgauauggaaggauc

SEQ ID NO: 3254842 - RNA, 19 nt, Artificial Sequence
  Description of Artificial Sequence: Synthetic oligonucleotide
aggaggugacgcuggaggc

SEQ ID NO: 3254843 - RNA, 19 nt, Artificial Sequence
  Description of Artificial Sequence: Synthetic oligonucleotide
ugcgugaagggcacuacgc

SEQ ID NO: 3254844 - RNA, 19 nt, Artificial Sequence
  Description of Artificial Sequence: Synthetic oligonucleotide
gaacuugaccuugagcugc

SEQ ID NO: 3254845 - RNA, 19 nt, Artificial Sequence
  Description of Artificial Sequence: Synthetic oligonucleotide
uuggcgacuucuccaaacc

SEQ ID NO: 3254846 - RNA, 19 nt, Artificial Sequence
  Description of Artificial Sequence: Synthetic oligonucleotide
aguucugagaccugcgggu

SEQ ID NO: 3254847 - RNA, 19 nt, Artificial Sequence
  Description of Artificial Sequence: Synthetic oligonucleotide
aagcgcaggcgguagagca

SEQ ID NO: 3254848 - RNA, 19 nt, Artificial Sequence
  Description of Artificial Sequence: Synthetic oligonucleotide
aagauggggaagucgcgca

SEQ ID NO: 3254849 - RNA, 19 nt, Artificial Sequence
  Description of Artificial Sequence: Synthetic oligonucleotide
uggcucugaagugagcugg

SEQ ID NO: 3254850 - RNA, 19 nt, Artificial Sequence
  Description of Artificial Sequence: Synthetic oligonucleotide
augguaaccuuguuggcga

SEQ ID NO: 3254851 - RNA, 19 nt, Artificial Sequence
  Description of Artificial Sequence: Synthetic oligonucleotide
caggcgguagagcagacgc

SEQ ID NO: 3254852 - RNA, 19 nt, Artificial Sequence
  Description of Artificial Sequence: Synthetic oligonucleotide
ugcggguccagucuggccu

SEQ ID NO: 3254853 - RNA, 19 nt, Artificial Sequence
  Description of Artificial Sequence: Synthetic oligonucleotide
gucaccugcacgaaguugc

SEQ ID NO: 3254854 - RNA, 19 nt, Artificial Sequence
  Description of Artificial Sequence: Synthetic oligonucleotide
uccagggcuggacuagagg

SEQ ID NO: 3254855 - RNA, 19 nt, Artificial Sequence
  Description of Artificial Sequence: Synthetic oligonucleotide
ucucuuuggcucugaagug

SEQ ID NO: 3254856 - RNA, 19 nt, Artificial Sequence
  Description of Artificial Sequence: Synthetic oligonucleotide
auuaccuuuaaaauuccau

SEQ ID NO: 3254857 - RNA, 19 nt, Artificial Sequence
  Description of Artificial Sequence: Synthetic oligonucleotide
cucaaagauggggaagucg

SEQ ID NO: 3254858 - RNA, 19 nt, Artificial Sequence
  Description of Artificial Sequence: Synthetic oligonucleotide
agagcccgaucuuuauuac

SEQ ID NO: 3254859 - RNA, 19 nt, Artificial Sequence
  Description of Artificial Sequence: Synthetic oligonucleotide
acgaauugcaaagggaaca

SEQ ID NO: 3254860 - RNA, 19 nt, Artificial Sequence
  Description of Artificial Sequence: Synthetic oligonucleotide
caaagauggggaagucgcg

SEQ ID NO: 3254861 - RNA, 19 nt, Artificial Sequence
  Description of Artificial Sequence: Synthetic oligonucleotide
ucgaacucgccgcucagga

SEQ ID NO: 3254862 - RNA, 19 nt, Artificial Sequence
  Description of Artificial Sequence: Synthetic oligonucleotide
acgaaguugcucucaaaga

SEQ ID NO: 3254863 - RNA, 19 nt, Artificial Sequence
  Description of Artificial Sequence: Synthetic oligonucleotide
gucagggccagccagcagc

SEQ ID NO: 3254864 - RNA, 19 nt, Artificial Sequence
  Description of Artificial Sequence: Synthetic oligonucleotide
cugcuggcggcucucaucg

SEQ ID NO: 3254865 - RNA, 19 nt, Artificial Sequence
  Description of Artificial Sequence: Synthetic oligonucleotide
cucuguggcuugaagcucc

SEQ ID NO: 3254866 - RNA, 19 nt, Artificial Sequence
  Description of Artificial Sequence: Synthetic oligonucleotide
gauauggaaggaucuuguc

SEQ ID NO: 3254867 - RNA, 19 nt, Artificial Sequence
  Description of Artificial Sequence: Synthetic oligonucleotide
aggaucuugucuaaaucag

SEQ ID NO: 3254868 - RNA, 19 nt, Artificial Sequence
  Description of Artificial Sequence: Synthetic oligonucleotide
ugaagggcacuacgcaggc

SEQ ID NO: 3254869 - RNA, 19 nt, Artificial Sequence
  Description of Artificial Sequence: Synthetic oligonucleotide
gaccuugagcugcuggcgg

SEQ ID NO: 3254870 - RNA, 19 nt, Artificial Sequence
  Description of Artificial Sequence: Synthetic oligonucleotide
uggacuagaggcugccacc

SEQ ID NO: 3254871 - RNA, 19 nt, Artificial Sequence
  Description of Artificial Sequence: Synthetic oligonucleotide
uacgcaggcaggcgagugg

SEQ ID NO: 3254872 - RNA, 19 nt, Artificial Sequence
  Description of Artificial Sequence: Synthetic oligonucleotide
uguccucaugcgugaaggg

SEQ ID NO: 3254873 - RNA, 19 nt, Artificial Sequence
  Description of Artificial Sequence: Synthetic oligonucleotide
gugaagggcacuacgcagg

SEQ ID NO: 3254874 - RNA, 19 nt, Artificial Sequence
  Description of Artificial Sequence: Synthetic oligonucleotide
ucuggcagcuccagggcug

SEQ ID NO: 3254875 - RNA, 19 nt, Artificial Sequence
  Description of Artificial Sequence: Synthetic oligonucleotide
augcgugaagggcacuacg

SEQ ID NO: 3254876 - RNA, 19 nt, Artificial Sequence
  Description of Artificial Sequence: Synthetic oligonucleotide
uggcgauauggaaggaucu

SEQ ID NO: 3254877 - RNA, 19 nt, Artificial Sequence
  Description of Artificial Sequence: Synthetic oligonucleotide
cacgaauugcaaagggaac

SEQ ID NO: 3254878 - RNA, 19 nt, Artificial Sequence
  Description of Artificial Sequence: Synthetic oligonucleotide
gacuucuccaaaccguguc

SEQ ID NO: 3254879 - RNA, 19 nt, Artificial Sequence
  Description of Artificial Sequence: Synthetic oligonucleotide
ucucaucgugcacgaacag

SEQ ID NO: 3254880 - RNA, 19 nt, Artificial Sequence
  Description of Artificial Sequence: Synthetic oligonucleotide
acuucuccaaaccguguca

SEQ ID NO: 3254881 - RNA, 19 nt, Artificial Sequence
  Description of Artificial Sequence: Synthetic oligonucleotide
caucucuuuggcucugaag

SEQ ID NO: 3254882 - RNA, 19 nt, Artificial Sequence
  Description of Artificial Sequence: Synthetic oligonucleotide
cuuguuggcgacuucucca

SEQ ID NO: 3254883 - RNA, 19 nt, Artificial Sequence
  Description of Artificial Sequence: Synthetic oligonucleotide
guagagcagacgcacccag

SEQ ID NO: 3254884 - RNA, 19 nt, Artificial Sequence
  Description of Artificial Sequence: Synthetic oligonucleotide
uagaaggcacgaccugugc

SEQ ID NO: 3254885 - RNA, 19 nt, Artificial Sequence
  Description of Artificial Sequence: Synthetic oligonucleotide
agggaacagcccgaggagc

SEQ ID NO: 3254886 - RNA, 19 nt, Artificial Sequence
  Description of Artificial Sequence: Synthetic oligonucleotide
gaucuuuauuaccuuuaaa

SEQ ID NO: 3254887 - RNA, 19 nt, Artificial Sequence
  Description of Artificial Sequence: Synthetic oligonucleotide
gcagguagaaggcacgacc

SEQ ID NO: 3254888 - RNA, 19 nt, Artificial Sequence
  Description of Artificial Sequence: Synthetic oligonucleotide
ucgugcacgaacagcugca

SEQ ID NO: 3254889 - RNA, 19 nt, Artificial Sequence
  Description of Artificial Sequence: Synthetic oligonucleotide
uuaagagcccgaucuuuau

SEQ ID NO: 3254890 - RNA, 19 nt, Artificial Sequence
  Description of Artificial Sequence: Synthetic oligonucleotide
cagaguucugagaccugcg

SEQ ID NO: 3254891 - RNA, 19 nt, Artificial Sequence
  Description of Artificial Sequence: Synthetic oligonucleotide
gagcccgaucuuuauuacc

SEQ ID NO: 3254892 - RNA, 19 nt, Artificial Sequence
  Description of Artificial Sequence: Synthetic oligonucleotide
guuggcgacuucuccaaac

SEQ ID NO: 3254893 - RNA, 19 nt, Artificial Sequence
  Description of Artificial Sequence: Synthetic oligonucleotide
gaagugagcuggcuugauc

SEQ ID NO: 3254894 - RNA, 19 nt, Artificial Sequence
  Description of Artificial Sequence: Synthetic oligonucleotide
ugcggaacuugaccuugag

SEQ ID NO: 3254895 - RNA, 19 nt, Artificial Sequence
  Description of Artificial Sequence: Synthetic oligonucleotide
ucugcaggcgcgcgcagcu

SEQ ID NO: 3254896 - RNA, 19 nt, Artificial Sequence
  Description of Artificial Sequence: Synthetic oligonucleotide
uuguuggcgacuucuccaa

SEQ ID NO: 3254897 - RNA, 19 nt, Artificial Sequence
  Description of Artificial Sequence: Synthetic oligonucleotide
agauggggaagucgcgcag

SEQ ID NO: 3254898 - RNA, 19 nt, Artificial Sequence
  Description of Artificial Sequence: Synthetic oligonucleotide
uucuccaaaccgugucacc

SEQ ID NO: 3254899 - RNA, 19 nt, Artificial Sequence
  Description of Artificial Sequence: Synthetic oligonucleotide
ccagggcuggacuagaggc

SEQ ID NO: 3254900 - RNA, 19 nt, Artificial Sequence
  Description of Artificial Sequence: Synthetic oligonucleotide
cagcuggucgaacucgccg

SEQ ID NO: 3254901 - RNA, 19 nt, Artificial Sequence
  Description of Artificial Sequence: Synthetic oligonucleotide
ugcucucaaagauggggaa

SEQ ID NO: 3254902 - RNA, 19 nt, Artificial Sequence
  Description of Artificial Sequence: Synthetic oligonucleotide
uuuggcgauauggaaggau

SEQ ID NO: 3254903 - RNA, 19 nt, Artificial Sequence
  Description of Artificial Sequence: Synthetic oligonucleotide
uggucgaacucgccgcuca

SEQ ID NO: 3254904 - RNA, 19 nt, Artificial Sequence
  Description of Artificial Sequence: Synthetic oligonucleotide
agcccgaucuuuauuaccu

SEQ ID NO: 3254905 - RNA, 19 nt, Artificial Sequence
  Description of Artificial Sequence: Synthetic oligonucleotide
aaaguuuaugucuuggccc

SEQ ID NO: 3254906 - RNA, 19 nt, Artificial Sequence
  Description of Artificial Sequence: Synthetic oligonucleotide
uaugucuuggcccauauug

SEQ ID NO: 3254907 - RNA, 19 nt, Artificial Sequence
  Description of Artificial Sequence: Synthetic oligonucleotide
aacaggacaaaguuuaugu

SEQ ID NO: 3254908 - RNA, 19 nt, Artificial Sequence
  Description of Artificial Sequence: Synthetic oligonucleotide
ugugaugaaugcuacaucc

SEQ ID NO: 3254909 - RNA, 19 nt, Artificial Sequence
  Description of Artificial Sequence: Synthetic oligonucleotide
ugaggugacaaguugacag

SEQ ID NO: 3254910 - RNA, 19 nt, Artificial Sequence
  Description of Artificial Sequence: Synthetic oligonucleotide
ucaaacuucagagagaccu

SEQ ID NO: 3254911 - RNA, 19 nt, Artificial Sequence
  Description of Artificial Sequence: Synthetic oligonucleotide
aacaucacugggucgaagg

SEQ ID NO: 3254912 - RNA, 19 nt, Artificial Sequence
  Description of Artificial Sequence: Synthetic oligonucleotide
caaauugaguuugagaucc

SEQ ID NO: 3254913 - RNA, 19 nt, Artificial Sequence
  Description of Artificial Sequence: Synthetic oligonucleotide
acaaaguuuaugucuuggc

SEQ ID NO: 3254914 - RNA, 19 nt, Artificial Sequence
  Description of Artificial Sequence: Synthetic oligonucleotide
augaaugcuacauccugcc

SEQ ID NO: 3254915 - RNA, 19 nt, Artificial Sequence
  Description of Artificial Sequence: Synthetic oligonucleotide
agcagcucaaacuucagag

SEQ ID NO: 3254916 - RNA, 19 nt, Artificial Sequence
  Description of Artificial Sequence: Synthetic oligonucleotide
aguuugagauccuugaacu

SEQ ID NO: 3254917 - RNA, 19 nt, Artificial Sequence
  Description of Artificial Sequence: Synthetic oligonucleotide
gaaugcuacauccugccag

SEQ ID NO: 3254918 - RNA, 19 nt, Artificial Sequence
  Description of Artificial Sequence: Synthetic oligonucleotide
uauugggugggucaagcag

SEQ ID NO: 3254919 - RNA, 19 nt, Artificial Sequence
  Description of Artificial Sequence: Synthetic oligonucleotide
caaguugacagccaacagg

SEQ ID NO: 3254920 - RNA, 19 nt, Artificial Sequence
  Description of Artificial Sequence: Synthetic oligonucleotide
caaaguuuaugucuuggcc

SEQ ID NO: 3254921 - RNA, 19 nt, Artificial Sequence
  Description of Artificial Sequence: Synthetic oligonucleotide
aaguuuaugucuuggccca

SEQ ID NO: 3254922 - RNA, 19 nt, Artificial Sequence
  Description of Artificial Sequence: Synthetic oligonucleotide
ugaugaaugcuacauccug

SEQ ID NO: 3254923 - RNA, 19 nt, Artificial Sequence
  Description of Artificial Sequence: Synthetic oligonucleotide
agacugggcacucaaauug

SEQ ID NO: 3254924 - RNA, 19 nt, Artificial Sequence
  Description of Artificial Sequence: Synthetic oligonucleotide
ucaugcaacagagacuggg

SEQ ID NO: 3254925 - RNA, 19 nt, Artificial Sequence
  Description of Artificial Sequence: Synthetic oligonucleotide
ucaagcagcucaaacuuca

SEQ ID NO: 3254926 - RNA, 19 nt, Artificial Sequence
  Description of Artificial Sequence: Synthetic oligonucleotide
caucaugcaacagagacug

SEQ ID NO: 3254927 - RNA, 19 nt, Artificial Sequence
  Description of Artificial Sequence: Synthetic oligonucleotide
uugaguuugagauccuuga

SEQ ID NO: 3254928 - RNA, 19 nt, Artificial Sequence
  Description of Artificial Sequence: Synthetic oligonucleotide
aaacuucagagagaccugg

SEQ ID NO: 3254929 - RNA, 19 nt, Artificial Sequence
  Description of Artificial Sequence: Synthetic oligonucleotide
aaguugacagccaacagga

SEQ ID NO: 3254930 - RNA, 19 nt, Artificial Sequence
  Description of Artificial Sequence: Synthetic oligonucleotide
cauccugccagaauggggc

SEQ ID NO: 3254931 - RNA, 19 nt, Artificial Sequence
  Description of Artificial Sequence: Synthetic oligonucleotide
uuugagauccuugaacuga

SEQ ID NO: 3254932 - RNA, 19 nt, Artificial Sequence
  Description of Artificial Sequence: Synthetic oligonucleotide
uugacagccaacaggacaa

SEQ ID NO: 3254933 - RNA, 19 nt, Artificial Sequence
  Description of Artificial Sequence: Synthetic oligonucleotide
aaugcuacauccugccaga

SEQ ID NO: 3254934 - RNA, 19 nt, Artificial Sequence
  Description of Artificial Sequence: Synthetic oligonucleotide
uucagagagaccuggacaa

SEQ ID NO: 3254935 - RNA, 19 nt, Artificial Sequence
  Description of Artificial Sequence: Synthetic oligonucleotide
gaagggaagguguauccag

SEQ ID NO: 3254936 - RNA, 19 nt, Artificial Sequence
  Description of Artificial Sequence: Synthetic oligonucleotide
ugucuuggcccauauuggg

SEQ ID NO: 3254937 - RNA, 19 nt, Artificial Sequence
  Description of Artificial Sequence: Synthetic oligonucleotide
acuucagagagaccuggac

SEQ ID NO: 3254938 - RNA, 19 nt, Artificial Sequence
  Description of Artificial Sequence: Synthetic oligonucleotide
gacaaaguuuaugucuugg

SEQ ID NO: 3254939 - RNA, 19 nt, Artificial Sequence
  Description of Artificial Sequence: Synthetic oligonucleotide
gaguuugagauccuugaac

SEQ ID NO: 3254940 - RNA, 19 nt, Artificial Sequence
  Description of Artificial Sequence: Synthetic oligonucleotide
gauccuugaacugagguga

SEQ ID NO: 3254941 - RNA, 19 nt, Artificial Sequence
  Description of Artificial Sequence: Synthetic oligonucleotide
uugagauccuugaacugag

SEQ ID NO: 3254942 - RNA, 19 nt, Artificial Sequence
  Description of Artificial Sequence: Synthetic oligonucleotide
cucaaauugaguuugagau

SEQ ID NO: 3254943 - RNA, 19 nt, Artificial Sequence
  Description of Artificial Sequence: Synthetic oligonucleotide
uguauccaggcuccugugg

SEQ ID NO: 3254944 - RNA, 19 nt, Artificial Sequence
  Description of Artificial Sequence: Synthetic oligonucleotide
acaggacaaaguuuauguc

SEQ ID NO: 3254945 - RNA, 19 nt, Artificial Sequence
  Description of Artificial Sequence: Synthetic oligonucleotide
uggacaacaucacuggguc

SEQ ID NO: 3254946 - RNA, 19 nt, Artificial Sequence
  Description of Artificial Sequence: Synthetic oligonucleotide
auugggugggucaagcagc

SEQ ID NO: 3254947 - RNA, 19 nt, Artificial Sequence
  Description of Artificial Sequence: Synthetic oligonucleotide
acucaaauugaguuugaga

SEQ ID NO: 3254948 - RNA, 19 nt, Artificial Sequence
  Description of Artificial Sequence: Synthetic oligonucleotide
agauccuugaacugaggug

SEQ ID NO: 3254949 - RNA, 19 nt, Artificial Sequence
  Description of Artificial Sequence: Synthetic oligonucleotide
agggaagguguauccaggc

SEQ ID NO: 3254950 - RNA, 19 nt, Artificial Sequence
  Description of Artificial Sequence: Synthetic oligonucleotide
ucaaauugaguuugagauc

SEQ ID NO: 3254951 - RNA, 19 nt, Artificial Sequence
  Description of Artificial Sequence: Synthetic oligonucleotide
cagcucaaacuucagagag

SEQ ID NO: 3254952 - RNA, 19 nt, Artificial Sequence
  Description of Artificial Sequence: Synthetic oligonucleotide
ucuuggcccauauugggug

SEQ ID NO: 3254953 - RNA, 19 nt, Artificial Sequence
  Description of Artificial Sequence: Synthetic oligonucleotide
accuggacaacaucacugg

SEQ ID NO: 3254954 - RNA, 19 nt, Artificial Sequence
  Description of Artificial Sequence: Synthetic oligonucleotide
gaugaaugcuacauccugc

SEQ ID NO: 3254955 - RNA, 19 nt, Artificial Sequence
  Description of Artificial Sequence: Synthetic oligonucleotide
guauccaggcuccuguggg

SEQ ID NO: 3254956 - RNA, 19 nt, Artificial Sequence
  Description of Artificial Sequence: Synthetic oligonucleotide
gcuacauccugccagaaug

SEQ ID NO: 3254957 - RNA, 19 nt, Artificial Sequence
  Description of Artificial Sequence: Synthetic oligonucleotide
gaacgagugugaugaaugc

SEQ ID NO: 3254958 - RNA, 19 nt, Artificial Sequence
  Description of Artificial Sequence: Synthetic oligonucleotide
ugggcacucaaauugaguu

SEQ ID NO: 3254959 - RNA, 19 nt, Artificial Sequence
  Description of Artificial Sequence: Synthetic oligonucleotide
uugaacugaggugacaagu

SEQ ID NO: 3254960 - RNA, 19 nt, Artificial Sequence
  Description of Artificial Sequence: Synthetic oligonucleotide
aggugacaaguugacagcc

SEQ ID NO: 3254961 - RNA, 19 nt, Artificial Sequence
  Description of Artificial Sequence: Synthetic oligonucleotide
gaacugaggugacaaguug

SEQ ID NO: 3254962 - RNA, 19 nt, Artificial Sequence
  Description of Artificial Sequence: Synthetic oligonucleotide
acaucacugggucgaaggg

SEQ ID NO: 3254963 - RNA, 19 nt, Artificial Sequence
  Description of Artificial Sequence: Synthetic oligonucleotide
caugcaacagagacugggc

SEQ ID NO: 3254964 - RNA, 19 nt, Artificial Sequence
  Description of Artificial Sequence: Synthetic oligonucleotide
ucgaagggaagguguaucc

SEQ ID NO: 3254965 - RNA, 19 nt, Artificial Sequence
  Description of Artificial Sequence: Synthetic oligonucleotide
guugacagccaacaggaca

SEQ ID NO: 3254966 - RNA, 19 nt, Artificial Sequence
  Description of Artificial Sequence: Synthetic oligonucleotide
gaggugacaaguugacagc

SEQ ID NO: 3254967 - RNA, 19 nt, Artificial Sequence
  Description of Artificial Sequence: Synthetic oligonucleotide
gacaaguugacagccaaca

SEQ ID NO: 3254968 - RNA, 19 nt, Artificial Sequence
  Description of Artificial Sequence: Synthetic oligonucleotide
acaaguugacagccaacag

SEQ ID NO: 3254969 - RNA, 19 nt, Artificial Sequence
  Description of Artificial Sequence: Synthetic oligonucleotide
cuacauccugccagaaugg

SEQ ID NO: 3254970 - RNA, 19 nt, Artificial Sequence
  Description of Artificial Sequence: Synthetic oligonucleotide
aagggaagguguauccagg

SEQ ID NO: 3254971 - RNA, 19 nt, Artificial Sequence
  Description of Artificial Sequence: Synthetic oligonucleotide
agugugaugaaugcuacau

SEQ ID NO: 3254972 - RNA, 19 nt, Artificial Sequence
  Description of Artificial Sequence: Synthetic oligonucleotide
uguggggauucccaggcac

SEQ ID NO: 3254973 - RNA, 19 nt, Artificial Sequence
  Description of Artificial Sequence: Synthetic oligonucleotide
gaagguguauccaggcucc

SEQ ID NO: 3254974 - RNA, 19 nt, Artificial Sequence
  Description of Artificial Sequence: Synthetic oligonucleotide
ugaacugaggugacaaguu

SEQ ID NO: 3254975 - RNA, 19 nt, Artificial Sequence
  Description of Artificial Sequence: Synthetic oligonucleotide
agagacugggcacucaaau

SEQ ID NO: 3254976 - RNA, 19 nt, Artificial Sequence
  Description of Artificial Sequence: Synthetic oligonucleotide
ugcaacagagacugggcac

SEQ ID NO: 3254977 - RNA, 19 nt, Artificial Sequence
  Description of Artificial Sequence: Synthetic oligonucleotide
gaccuggacaacaucacug

SEQ ID NO: 3254978 - RNA, 19 nt, Artificial Sequence
  Description of Artificial Sequence: Synthetic oligonucleotide
gccaucaugcaacagagac

SEQ ID NO: 3254979 - RNA, 19 nt, Artificial Sequence
  Description of Artificial Sequence: Synthetic oligonucleotide
ugagauccuugaacugagg

SEQ ID NO: 3254980 - RNA, 19 nt, Artificial Sequence
  Description of Artificial Sequence: Synthetic oligonucleotide
ugaguuugagauccuugaa

SEQ ID NO: 3254981 - RNA, 19 nt, Artificial Sequence
  Description of Artificial Sequence: Synthetic oligonucleotide
aagcagcucaaacuucaga

SEQ ID NO: 3254982 - RNA, 19 nt, Artificial Sequence
  Description of Artificial Sequence: Synthetic oligonucleotide
gacaacaucacugggucga

SEQ ID NO: 3254983 - RNA, 19 nt, Artificial Sequence
  Description of Artificial Sequence: Synthetic oligonucleotide
aacugaggugacaaguuga

SEQ ID NO: 3254984 - RNA, 19 nt, Artificial Sequence
  Description of Artificial Sequence: Synthetic oligonucleotide
uuuaugucuuggcccauau

SEQ ID NO: 3254985 - RNA, 19 nt, Artificial Sequence
  Description of Artificial Sequence: Synthetic oligonucleotide
acugaggugacaaguugac

SEQ ID NO: 3254986 - RNA, 19 nt, Artificial Sequence
  Description of Artificial Sequence: Synthetic oligonucleotide
agagaccuggacaacauca

SEQ ID NO: 3254987 - RNA, 19 nt, Artificial Sequence
  Description of Artificial Sequence: Synthetic oligonucleotide
ugggucgaagggaaggugu

SEQ ID NO: 3254988 - RNA, 19 nt, Artificial Sequence
  Description of Artificial Sequence: Synthetic oligonucleotide
ugggucaagcagcucaaac

SEQ ID NO: 3254989 - RNA, 19 nt, Artificial Sequence
  Description of Artificial Sequence: Synthetic oligonucleotide
guuugagauccuugaacug

SEQ ID NO: 3254990 - RNA, 19 nt, Artificial Sequence
  Description of Artificial Sequence: Synthetic oligonucleotide
uauccaggcuccugugggg

SEQ ID NO: 3254991 - RNA, 19 nt, Artificial Sequence
  Description of Artificial Sequence: Synthetic oligonucleotide
cauauugggugggucaagc

SEQ ID NO: 3254992 - RNA, 19 nt, Artificial Sequence
  Description of Artificial Sequence: Synthetic oligonucleotide
auugaguuugagauccuug

SEQ ID NO: 3254993 - RNA, 19 nt, Artificial Sequence
  Description of Artificial Sequence: Synthetic oligonucleotide
aacgagugugaugaaugcu

SEQ ID NO: 3254994 - RNA, 19 nt, Artificial Sequence
  Description of Artificial Sequence: Synthetic oligonucleotide
cuugaacugaggugacaag

SEQ ID NO: 3254995 - RNA, 19 nt, Artificial Sequence
  Description of Artificial Sequence: Synthetic oligonucleotide
ugaaugcuacauccugcca

SEQ ID NO: 3254996 - RNA, 19 nt, Artificial Sequence
  Description of Artificial Sequence: Synthetic oligonucleotide
uacauccugccagaauggg

SEQ ID NO: 3254997 - RNA, 19 nt, Artificial Sequence
  Description of Artificial Sequence: Synthetic oligonucleotide
cuucagagagaccuggaca

SEQ ID NO: 3254998 - RNA, 19 nt, Artificial Sequence
  Description of Artificial Sequence: Synthetic oligonucleotide
augucuuggcccauauugg

SEQ ID NO: 3254999 - RNA, 19 nt, Artificial Sequence
  Description of Artificial Sequence: Synthetic oligonucleotide
caaacuucagagagaccug

SEQ ID NO: 3255000 - RNA, 19 nt, Artificial Sequence
  Description of Artificial Sequence: Synthetic oligonucleotide
uccuguggggauucccagg

SEQ ID NO: 3255001 - RNA, 19 nt, Artificial Sequence
  Description of Artificial Sequence: Synthetic oligonucleotide
augcaacagagacugggca

SEQ ID NO: 3255002 - RNA, 19 nt, Artificial Sequence
  Description of Artificial Sequence: Synthetic oligonucleotide
cuuggcccauauugggugg

SEQ ID NO: 3255003 - RNA, 19 nt, Artificial Sequence
  Description of Artificial Sequence: Synthetic oligonucleotide
ugacaaguugacagccaac

SEQ ID NO: 3255004 - RNA, 19 nt, Artificial Sequence
  Description of Artificial Sequence: Synthetic oligonucleotide
ggaacgagugugaugaaug

SEQ ID NO: 3255005 - RNA, 19 nt, Artificial Sequence
  Description of Artificial Sequence: Synthetic oligonucleotide
aaaagaauuuaacaaaugg

SEQ ID NO: 3255006 - RNA, 19 nt, Artificial Sequence
  Description of Artificial Sequence: Synthetic oligonucleotide
aacaucguacuccucaacc

SEQ ID NO: 3255007 - RNA, 19 nt, Artificial Sequence
  Description of Artificial Sequence: Synthetic oligonucleotide
aauguuguucacuaacacg

SEQ ID NO: 3255008 - RNA, 19 nt, Artificial Sequence
  Description of Artificial Sequence: Synthetic oligonucleotide
aaaucuugugggcaggccc

SEQ ID NO: 3255009 - RNA, 19 nt, Artificial Sequence
  Description of Artificial Sequence: Synthetic oligonucleotide
gaauuuaacaaauggauga

SEQ ID NO: 3255010 - RNA, 19 nt, Artificial Sequence
  Description of Artificial Sequence: Synthetic oligonucleotide
ucgaagaaacccaugacgg

SEQ ID NO: 3255011 - RNA, 19 nt, Artificial Sequence
  Description of Artificial Sequence: Synthetic oligonucleotide
aauuuaacaaauggaugac

SEQ ID NO: 3255012 - RNA, 19 nt, Artificial Sequence
  Description of Artificial Sequence: Synthetic oligonucleotide
uuuaacaaauggaugacuc

SEQ ID NO: 3255013 - RNA, 19 nt, Artificial Sequence
  Description of Artificial Sequence: Synthetic oligonucleotide
uucacuaacacgaucuggc

SEQ ID NO: 3255014 - RNA, 19 nt, Artificial Sequence
  Description of Artificial Sequence: Synthetic oligonucleotide
auuguugauaagaaugucc

SEQ ID NO: 3255015 - RNA, 19 nt, Artificial Sequence
  Description of Artificial Sequence: Synthetic oligonucleotide
aagaauuuaacaaauggau

SEQ ID NO: 3255016 - RNA, 19 nt, Artificial Sequence
  Description of Artificial Sequence: Synthetic oligonucleotide
cucaggauuagcaugguag

SEQ ID NO: 3255017 - RNA, 19 nt, Artificial Sequence
  Description of Artificial Sequence: Synthetic oligonucleotide
aacacgaucuggccugucc

SEQ ID NO: 3255018 - RNA, 19 nt, Artificial Sequence
  Description of Artificial Sequence: Synthetic oligonucleotide
ucaaccucggcucucaggc

SEQ ID NO: 3255019 - RNA, 19 nt, Artificial Sequence
  Description of Artificial Sequence: Synthetic oligonucleotide
uagcaaaagaauuuaacaa

SEQ ID NO: 3255020 - RNA, 19 nt, Artificial Sequence
  Description of Artificial Sequence: Synthetic oligonucleotide
uuguucacuaacacgaucu

SEQ ID NO: 3255021 - RNA, 19 nt, Artificial Sequence
  Description of Artificial Sequence: Synthetic oligonucleotide
aaauggaugacucccaguu

SEQ ID NO: 3255022 - RNA, 19 nt, Artificial Sequence
  Description of Artificial Sequence: Synthetic oligonucleotide
acuuuccucagccaccucc

SEQ ID NO: 3255023 - RNA, 19 nt, Artificial Sequence
  Description of Artificial Sequence: Synthetic oligonucleotide
ucuugaacacagcugaugu

SEQ ID NO: 3255024 - RNA, 19 nt, Artificial Sequence
  Description of Artificial Sequence: Synthetic oligonucleotide
acuuuggugaaggugaugg

SEQ ID NO: 3255025 - RNA, 19 nt, Artificial Sequence
  Description of Artificial Sequence: Synthetic oligonucleotide
augaaagucgggcucacgg

SEQ ID NO: 3255026 - RNA, 19 nt, Artificial Sequence
  Description of Artificial Sequence: Synthetic oligonucleotide
aaguaguuggcauccauga

SEQ ID NO: 3255027 - RNA, 19 nt, Artificial Sequence
  Description of Artificial Sequence: Synthetic oligonucleotide
cuucuggagaucauguugg

SEQ ID NO: 3255028 - RNA, 19 nt, Artificial Sequence
  Description of Artificial Sequence: Synthetic oligonucleotide
uugaauguuguucacuaac

SEQ ID NO: 3255029 - RNA, 19 nt, Artificial Sequence
  Description of Artificial Sequence: Synthetic oligonucleotide
ucaggauuagcaugguagg

SEQ ID NO: 3255030 - RNA, 19 nt, Artificial Sequence
  Description of Artificial Sequence: Synthetic oligonucleotide
ugaauguuguucacuaaca

SEQ ID NO: 3255031 - RNA, 19 nt, Artificial Sequence
  Description of Artificial Sequence: Synthetic oligonucleotide
uuugcucaggauuagcaug

SEQ ID NO: 3255032 - RNA, 19 nt, Artificial Sequence
  Description of Artificial Sequence: Synthetic oligonucleotide
uuaacaaauggaugacucc

SEQ ID NO: 3255033 - RNA, 19 nt, Artificial Sequence
  Description of Artificial Sequence: Synthetic oligonucleotide
uugcucaggauuagcaugg

SEQ ID NO: 3255034 - RNA, 19 nt, Artificial Sequence
  Description of Artificial Sequence: Synthetic oligonucleotide
agcaaaagaauuuaacaaa

SEQ ID NO: 3255035 - RNA, 19 nt, Artificial Sequence
  Description of Artificial Sequence: Synthetic oligonucleotide
uugaacacagcugaugucc

SEQ ID NO: 3255036 - RNA, 19 nt, Artificial Sequence
  Description of Artificial Sequence: Synthetic oligonucleotide
auggaugacucccaguuuc

SEQ ID NO: 3255037 - RNA, 19 nt, Artificial Sequence
  Description of Artificial Sequence: Synthetic oligonucleotide
uuugucaagcuccagggaa

SEQ ID NO: 3255038 - RNA, 19 nt, Artificial Sequence
  Description of Artificial Sequence: Synthetic oligonucleotide
uaacaaauggaugacuccc

SEQ ID NO: 3255039 - RNA, 19 nt, Artificial Sequence
  Description of Artificial Sequence: Synthetic oligonucleotide
uucgcuugaauguuguuca

SEQ ID NO: 3255040 - RNA, 19 nt, Artificial Sequence
  Description of Artificial Sequence: Synthetic oligonucleotide
uugauaagaauguccacac

SEQ ID NO: 3255041 - RNA, 19 nt, Artificial Sequence
  Description of Artificial Sequence: Synthetic oligonucleotide
uuucacacuggcauuguug

SEQ ID NO: 3255042 - RNA, 19 nt, Artificial Sequence
  Description of Artificial Sequence: Synthetic oligonucleotide
uccucagccaccuccaccg

SEQ ID NO: 3255043 - RNA, 19 nt, Artificial Sequence
  Description of Artificial Sequence: Synthetic oligonucleotide
acuaacacgaucuggccug

SEQ ID NO: 3255044 - RNA, 19 nt, Artificial Sequence
  Description of Artificial Sequence: Synthetic oligonucleotide
auaagaauguccacacagc

SEQ ID NO: 3255045 - RNA, 19 nt, Artificial Sequence
  Description of Artificial Sequence: Synthetic oligonucleotide
aacgggaucccaaacuucg

SEQ ID NO: 3255046 - RNA, 19 nt, Artificial Sequence
  Description of Artificial Sequence: Synthetic oligonucleotide
ucuuugcucaggauuagca

SEQ ID NO: 3255047 - RNA, 19 nt, Artificial Sequence
  Description of Artificial Sequence: Synthetic oligonucleotide
uguccacacagccauagca

SEQ ID NO: 3255048 - RNA, 19 nt, Artificial Sequence
  Description of Artificial Sequence: Synthetic oligonucleotide
aaggugauggguccaaagu

SEQ ID NO: 3255049 - RNA, 19 nt, Artificial Sequence
  Description of Artificial Sequence: Synthetic oligonucleotide
aaucuugugggcaggcccc

SEQ ID NO: 3255050 - RNA, 19 nt, Artificial Sequence
  Description of Artificial Sequence: Synthetic oligonucleotide
agaauguccacacagccau

SEQ ID NO: 3255051 - RNA, 19 nt, Artificial Sequence
  Description of Artificial Sequence: Synthetic oligonucleotide
auggguccaaaguaguugg

SEQ ID NO: 3255052 - RNA, 19 nt, Artificial Sequence
  Description of Artificial Sequence: Synthetic oligonucleotide
uaguuggcauccaugaucu

SEQ ID NO: 3255053 - RNA, 19 nt, Artificial Sequence
  Description of Artificial Sequence: Synthetic oligonucleotide
auuagcaugguaggaacgg

SEQ ID NO: 3255054 - RNA, 19 nt, Artificial Sequence
  Description of Artificial Sequence: Synthetic oligonucleotide
agaacuuuggugaagguga

SEQ ID NO: 3255055 - RNA, 19 nt, Artificial Sequence
  Description of Artificial Sequence: Synthetic oligonucleotide
uucacacuggcauuguuga

SEQ ID NO: 3255056 - RNA, 19 nt, Artificial Sequence
  Description of Artificial Sequence: Synthetic oligonucleotide
caaaagaauuuaacaaaug

SEQ ID NO: 3255057 - RNA, 19 nt, Artificial Sequence
  Description of Artificial Sequence: Synthetic oligonucleotide
agaauuuaacaaauggaug

SEQ ID NO: 3255058 - RNA, 19 nt, Artificial Sequence
  Description of Artificial Sequence: Synthetic oligonucleotide
auguuguucacuaacacga

SEQ ID NO: 3255059 - RNA, 19 nt, Artificial Sequence
  Description of Artificial Sequence: Synthetic oligonucleotide
ugaacacagcugauguccg

SEQ ID NO: 3255060 - RNA, 19 nt, Artificial Sequence
  Description of Artificial Sequence: Synthetic oligonucleotide
aauguccacacagccauag

SEQ ID NO: 3255061 - RNA, 19 nt, Artificial Sequence
  Description of Artificial Sequence: Synthetic oligonucleotide
ucaagcuccagggaaaucu

SEQ ID NO: 3255062 - RNA, 19 nt, Artificial Sequence
  Description of Artificial Sequence: Synthetic oligonucleotide
augacggcaugcuuggagg

SEQ ID NO: 3255063 - RNA, 19 nt, Artificial Sequence
  Description of Artificial Sequence: Synthetic oligonucleotide
aacggaugaaagucgggcu

SEQ ID NO: 3255064 - RNA, 19 nt, Artificial Sequence
  Description of Artificial Sequence: Synthetic oligonucleotide
uuggggagcagaacuuugg

SEQ ID NO: 3255065 - RNA, 19 nt, Artificial Sequence
  Description of Artificial Sequence: Synthetic oligonucleotide
aguuucuuugcucaggauu

SEQ ID NO: 3255066 - RNA, 19 nt, Artificial Sequence
  Description of Artificial Sequence: Synthetic oligonucleotide
uccaggaccucuuuggcca

SEQ ID NO: 3255067 - RNA, 19 nt, Artificial Sequence
  Description of Artificial Sequence: Synthetic oligonucleotide
ugguaggaacggaugaaag

SEQ ID NO: 3255068 - RNA, 19 nt, Artificial Sequence
  Description of Artificial Sequence: Synthetic oligonucleotide
uccaaaguaguuggcaucc

SEQ ID NO: 3255069 - RNA, 19 nt, Artificial Sequence
  Description of Artificial Sequence: Synthetic oligonucleotide
ggcauuguugauaagaaug

SEQ ID NO: 3255070 - RNA, 19 nt, Artificial Sequence
  Description of Artificial Sequence: Synthetic oligonucleotide
augacucccaguuucuuug

SEQ ID NO: 3255071 - RNA, 19 nt, Artificial Sequence
  Description of Artificial Sequence: Synthetic oligonucleotide
agccauagcaguccaggac

SEQ ID NO: 3255072 - RNA, 19 nt, Artificial Sequence
  Description of Artificial Sequence: Synthetic oligonucleotide
uaagcugugcggaacggga

SEQ ID NO: 3255073 - RNA, 19 nt, Artificial Sequence
  Description of Artificial Sequence: Synthetic oligonucleotide
guugauaagaauguccaca

SEQ ID NO: 3255074 - RNA, 19 nt, Artificial Sequence
  Description of Artificial Sequence: Synthetic oligonucleotide
aaagucgggcucacggugc

SEQ ID NO: 3255075 - RNA, 19 nt, Artificial Sequence
  Description of Artificial Sequence: Synthetic oligonucleotide
ggugcugaccacaacaucg

SEQ ID NO: 3255076 - RNA, 19 nt, Artificial Sequence
  Description of Artificial Sequence: Synthetic oligonucleotide
aaccucggcucucaggcag

SEQ ID NO: 3255077 - RNA, 19 nt, Artificial Sequence
  Description of Artificial Sequence: Synthetic oligonucleotide
guaguuggcauccaugauc

SEQ ID NO: 3255078 - RNA, 19 nt, Artificial Sequence
  Description of Artificial Sequence: Synthetic oligonucleotide
gaaagucgggcucacggug

SEQ ID NO: 3255079 - RNA, 19 nt, Artificial Sequence
  Description of Artificial Sequence: Synthetic oligonucleotide
aguccaggaccucuuuggc

SEQ ID NO: 3255080 - RNA, 19 nt, Artificial Sequence
  Description of Artificial Sequence: Synthetic oligonucleotide
gauggguccaaaguaguug

SEQ ID NO: 3255081 - RNA, 19 nt, Artificial Sequence
  Description of Artificial Sequence: Synthetic oligonucleotide
gauuagcaugguaggaacg

SEQ ID NO: 3255082 - RNA, 19 nt, Artificial Sequence
  Description of Artificial Sequence: Synthetic oligonucleotide
gaaggugauggguccaaag

SEQ ID NO: 3255083 - RNA, 19 nt, Artificial Sequence
  Description of Artificial Sequence: Synthetic oligonucleotide
gaacggaugaaagucgggc

SEQ ID NO: 3255084 - RNA, 19 nt, Artificial Sequence
  Description of Artificial Sequence: Synthetic oligonucleotide
acaaauggaugacucccag

SEQ ID NO: 3255085 - RNA, 19 nt, Artificial Sequence
  Description of Artificial Sequence: Synthetic oligonucleotide
acggaugaaagucgggcuc

SEQ ID NO: 3255086 - RNA, 19 nt, Artificial Sequence
  Description of Artificial Sequence: Synthetic oligonucleotide
acuggcauuguugauaaga

SEQ ID NO: 3255087 - RNA, 19 nt, Artificial Sequence
  Description of Artificial Sequence: Synthetic oligonucleotide
cuggagaucauguugggga

SEQ ID NO: 3255088 - RNA, 19 nt, Artificial Sequence
  Description of Artificial Sequence: Synthetic oligonucleotide
cacaucuugaacacagcug

SEQ ID NO: 3255089 - RNA, 19 nt, Artificial Sequence
  Description of Artificial Sequence: Synthetic oligonucleotide
uguucacuaacacgaucug

SEQ ID NO: 3255090 - RNA, 19 nt, Artificial Sequence
  Description of Artificial Sequence: Synthetic oligonucleotide
guaggaacggaugaaaguc

SEQ ID NO: 3255091 - RNA, 19 nt, Artificial Sequence
  Description of Artificial Sequence: Synthetic oligonucleotide
gaagaaacccaugacggca

SEQ ID NO: 3255092 - RNA, 19 nt, Artificial Sequence
  Description of Artificial Sequence: Synthetic oligonucleotide
uuggugaaggugauggguc

SEQ ID NO: 3255093 - RNA, 19 nt, Artificial Sequence
  Description of Artificial Sequence: Synthetic oligonucleotide
aacacagcugauguccgag

SEQ ID NO: 3255094 - RNA, 19 nt, Artificial Sequence
  Description of Artificial Sequence: Synthetic oligonucleotide
uggagaucauguuggggag

SEQ ID NO: 3255095 - RNA, 19 nt, Artificial Sequence
  Description of Artificial Sequence: Synthetic oligonucleotide
agggaaaucuugugggcag

SEQ ID NO: 3255096 - RNA, 19 nt, Artificial Sequence
  Description of Artificial Sequence: Synthetic oligonucleotide
gaccacaacaucguacucc

SEQ ID NO: 3255097 - RNA, 19 nt, Artificial Sequence
  Description of Artificial Sequence: Synthetic oligonucleotide
caguccaggaccucuuugg

SEQ ID NO: 3255098 - RNA, 19 nt, Artificial Sequence
  Description of Artificial Sequence: Synthetic oligonucleotide
uuuugucaagcuccaggga

SEQ ID NO: 3255099 - RNA, 19 nt, Artificial Sequence
  Description of Artificial Sequence: Synthetic oligonucleotide
accacaacaucguacuccu

SEQ ID NO: 3255100 - RNA, 19 nt, Artificial Sequence
  Description of Artificial Sequence: Synthetic oligonucleotide
ucuggagaucauguugggg

SEQ ID NO: 3255101 - RNA, 19 nt, Artificial Sequence
  Description of Artificial Sequence: Synthetic oligonucleotide
uguugauaagaauguccac

SEQ ID NO: 3255102 - RNA, 19 nt, Artificial Sequence
  Description of Artificial Sequence: Synthetic oligonucleotide
gcugauguccgagagaucc

SEQ ID NO: 3255103 - RNA, 19 nt, Artificial Sequence
  Description of Artificial Sequence: Synthetic oligonucleotide
acaucguacuccucaaccu

SEQ ID NO: 3255104 - RNA, 19 nt, Artificial Sequence
  Description of Artificial Sequence: Synthetic oligonucleotide
auuuaacaaauggaugacu

SEQ ID NO: 3255105 - RNA, 19 nt, Artificial Sequence
  Description of Artificial Sequence: Synthetic oligonucleotide
aaaacauuuaaacagcuga

SEQ ID NO: 3255106 - RNA, 19 nt, Artificial Sequence
  Description of Artificial Sequence: Synthetic oligonucleotide
gaauauacuuauuuuaugc

SEQ ID NO: 3255107 - RNA, 19 nt, Artificial Sequence
  Description of Artificial Sequence: Synthetic oligonucleotide
aaaacgagaauucuggccu

SEQ ID NO: 3255108 - RNA, 19 nt, Artificial Sequence
  Description of Artificial Sequence: Synthetic oligonucleotide
aacacccucgucuauuucc

SEQ ID NO: 3255109 - RNA, 19 nt, Artificial Sequence
  Description of Artificial Sequence: Synthetic oligonucleotide
auaacuuaggccccuaugg

SEQ ID NO: 3255110 - RNA, 19 nt, Artificial Sequence
  Description of Artificial Sequence: Synthetic oligonucleotide
aacaaaacgagaauucugg

SEQ ID NO: 3255111 - RNA, 19 nt, Artificial Sequence
  Description of Artificial Sequence: Synthetic oligonucleotide
uguacaauaauuacagacu

SEQ ID NO: 3255112 - RNA, 19 nt, Artificial Sequence
  Description of Artificial Sequence: Synthetic oligonucleotide
uauacaagugauuuaggag

SEQ ID NO: 3255113 - RNA, 19 nt, Artificial Sequence
  Description of Artificial Sequence: Synthetic oligonucleotide
uaugguuucuucaagccag

SEQ ID NO: 3255114 - RNA, 19 nt, Artificial Sequence
  Description of Artificial Sequence: Synthetic oligonucleotide
aaaauaugcauacuuccca

SEQ ID NO: 3255115 - RNA, 19 nt, Artificial Sequence
  Description of Artificial Sequence: Synthetic oligonucleotide
ccaaauaugguuuaaauag

SEQ ID NO: 3255116 - RNA, 19 nt, Artificial Sequence
  Description of Artificial Sequence: Synthetic oligonucleotide
auacaagugauuuaggaga

SEQ ID NO: 3255117 - RNA, 19 nt, Artificial Sequence
  Description of Artificial Sequence: Synthetic oligonucleotide
gaggcaguuaaauauaggc

SEQ ID NO: 3255118 - RNA, 19 nt, Artificial Sequence
  Description of Artificial Sequence: Synthetic oligonucleotide
gaagaaagagguuagguca

SEQ ID NO: 3255119 - RNA, 19 nt, Artificial Sequence
  Description of Artificial Sequence: Synthetic oligonucleotide
ucauaggcaguucucauag

SEQ ID NO: 3255120 - RNA, 19 nt, Artificial Sequence
  Description of Artificial Sequence: Synthetic oligonucleotide
agaaagguagauauguacc

SEQ ID NO: 3255121 - RNA, 19 nt, Artificial Sequence
  Description of Artificial Sequence: Synthetic oligonucleotide
aacauuuaaacagcugagg

SEQ ID NO: 3255122 - RNA, 19 nt, Artificial Sequence
  Description of Artificial Sequence: Synthetic oligonucleotide
aguaauaaauaacaaccca

SEQ ID NO: 3255123 - RNA, 19 nt, Artificial Sequence
  Description of Artificial Sequence: Synthetic oligonucleotide
aguuaaauauaggcaaucc

SEQ ID NO: 3255124 - RNA, 19 nt, Artificial Sequence
  Description of Artificial Sequence: Synthetic oligonucleotide
uuuguuacuuucauaggca

SEQ ID NO: 3255125 - RNA, 19 nt, Artificial Sequence
  Description of Artificial Sequence: Synthetic oligonucleotide
aagccuaaauuuguugucc

SEQ ID NO: 3255126 - RNA, 19 nt, Artificial Sequence
  Description of Artificial Sequence: Synthetic oligonucleotide
aaaagagugccacaggcaa

SEQ ID NO: 3255127 - RNA, 19 nt, Artificial Sequence
  Description of Artificial Sequence: Synthetic oligonucleotide
uuuugaggcaacaaacaca

SEQ ID NO: 3255128 - RNA, 19 nt, Artificial Sequence
  Description of Artificial Sequence: Synthetic oligonucleotide
uaaauaugguuucuucaag

SEQ ID NO: 3255129 - RNA, 19 nt, Artificial Sequence
  Description of Artificial Sequence: Synthetic oligonucleotide
aauaacuuaggccccuaug

SEQ ID NO: 3255130 - RNA, 19 nt, Artificial Sequence
  Description of Artificial Sequence: Synthetic oligonucleotide
uuauuuggggauaaaugca

SEQ ID NO: 3255131 - RNA, 19 nt, Artificial Sequence
  Description of Artificial Sequence: Synthetic oligonucleotide
acuuuaaugacacucccca

SEQ ID NO: 3255132 - RNA, 19 nt, Artificial Sequence
  Description of Artificial Sequence: Synthetic oligonucleotide
aaaccuaaggaguuaggcu

SEQ ID NO: 3255133 - RNA, 19 nt, Artificial Sequence
  Description of Artificial Sequence: Synthetic oligonucleotide
aauuucaugccuaaauaug

SEQ ID NO: 3255134 - RNA, 19 nt, Artificial Sequence
  Description of Artificial Sequence: Synthetic oligonucleotide
uccaguaacauuuccgacc

SEQ ID NO: 3255135 - RNA, 19 nt, Artificial Sequence
  Description of Artificial Sequence: Synthetic oligonucleotide
aaaccuaaguagcacuuug

SEQ ID NO: 3255136 - RNA, 19 nt, Artificial Sequence
  Description of Artificial Sequence: Synthetic oligonucleotide
aguaauuucaugccuaaau

SEQ ID NO: 3255137 - RNA, 19 nt, Artificial Sequence
  Description of Artificial Sequence: Synthetic oligonucleotide
gcuauuaaaauauuuguac

SEQ ID NO: 3255138 - RNA, 19 nt, Artificial Sequence
  Description of Artificial Sequence: Synthetic oligonucleotide
aacuggcaaguguaggggc

SEQ ID NO: 3255139 - RNA, 19 nt, Artificial Sequence
  Description of Artificial Sequence: Synthetic oligonucleotide
aauagugcauagcuuaaaa

SEQ ID NO: 3255140 - RNA, 19 nt, Artificial Sequence
  Description of Artificial Sequence: Synthetic oligonucleotide
gauaaaugcacuuggaccu

SEQ ID NO: 3255141 - RNA, 19 nt, Artificial Sequence
  Description of Artificial Sequence: Synthetic oligonucleotide
uagauauguaccuuagcug

SEQ ID NO: 3255142 - RNA, 19 nt, Artificial Sequence
  Description of Artificial Sequence: Synthetic oligonucleotide
acaaaacgagaauucuggc

SEQ ID NO: 3255143 - RNA, 19 nt, Artificial Sequence
  Description of Artificial Sequence: Synthetic oligonucleotide
acacuauuuaauauguaac

SEQ ID NO: 3255144 - RNA, 19 nt, Artificial Sequence
  Description of Artificial Sequence: Synthetic oligonucleotide
uauuuggggauaaaugcac

SEQ ID NO: 3255145 - RNA, 19 nt, Artificial Sequence
  Description of Artificial Sequence: Synthetic oligonucleotide
ucuguccucaacaaggccu

SEQ ID NO: 3255146 - RNA, 19 nt, Artificial Sequence
  Description of Artificial Sequence: Synthetic oligonucleotide
caaaacgagaauucuggcc

SEQ ID NO: 3255147 - RNA, 19 nt, Artificial Sequence
  Description of Artificial Sequence: Synthetic oligonucleotide
uacccaauagugcauagcu

SEQ ID NO: 3255148 - RNA, 19 nt, Artificial Sequence
  Description of Artificial Sequence: Synthetic oligonucleotide
aaacauuuaaacagcugag

SEQ ID NO: 3255149 - RNA, 19 nt, Artificial Sequence
  Description of Artificial Sequence: Synthetic oligonucleotide
uauaugguacacuauuuaa

SEQ ID NO: 3255150 - RNA, 19 nt, Artificial Sequence
  Description of Artificial Sequence: Synthetic oligonucleotide
aacccagaaaagugagccc

SEQ ID NO: 3255151 - RNA, 19 nt, Artificial Sequence
  Description of Artificial Sequence: Synthetic oligonucleotide
uucaaaauaaaaggaauau

SEQ ID NO: 3255152 - RNA, 19 nt, Artificial Sequence
  Description of Artificial Sequence: Synthetic oligonucleotide
uaauuucaugccuaaauau

SEQ ID NO: 3255153 - RNA, 19 nt, Artificial Sequence
  Description of Artificial Sequence: Synthetic oligonucleotide
uacaauaauuacagacuag

SEQ ID NO: 3255154 - RNA, 19 nt, Artificial Sequence
  Description of Artificial Sequence: Synthetic oligonucleotide
aaggaguuaggcuuugcca

SEQ ID NO: 3255155 - RNA, 19 nt, Artificial Sequence
  Description of Artificial Sequence: Synthetic oligonucleotide
agagcaacaagguaaggga

SEQ ID NO: 3255156 - RNA, 19 nt, Artificial Sequence
  Description of Artificial Sequence: Synthetic oligonucleotide
agguuuaggaaccauccag

SEQ ID NO: 3255157 - RNA, 19 nt, Artificial Sequence
  Description of Artificial Sequence: Synthetic oligonucleotide
ucugacuuuaaugacacuc

SEQ ID NO: 3255158 - RNA, 19 nt, Artificial Sequence
  Description of Artificial Sequence: Synthetic oligonucleotide
ggauaaaugcacuuggacc

SEQ ID NO: 3255159 - RNA, 19 nt, Artificial Sequence
  Description of Artificial Sequence: Synthetic oligonucleotide
ugaucauuuuguuucaaaa

SEQ ID NO: 3255160 - RNA, 19 nt, Artificial Sequence
  Description of Artificial Sequence: Synthetic oligonucleotide
augaggaaaaguucuaaca

SEQ ID NO: 3255161 - RNA, 19 nt, Artificial Sequence
  Description of Artificial Sequence: Synthetic oligonucleotide
aaagcugaguaaugauauc

SEQ ID NO: 3255162 - RNA, 19 nt, Artificial Sequence
  Description of Artificial Sequence: Synthetic oligonucleotide
ccaaauguggguuagacac

SEQ ID NO: 3255163 - RNA, 19 nt, Artificial Sequence
  Description of Artificial Sequence: Synthetic oligonucleotide
gaaaguacagaaagggcag

SEQ ID NO: 3255164 - RNA, 19 nt, Artificial Sequence
  Description of Artificial Sequence: Synthetic oligonucleotide
aaauaugcauacuucccau

SEQ ID NO: 3255165 - RNA, 19 nt, Artificial Sequence
  Description of Artificial Sequence: Synthetic oligonucleotide
cuauuaaaauauuuguaca

SEQ ID NO: 3255166 - RNA, 19 nt, Artificial Sequence
  Description of Artificial Sequence: Synthetic oligonucleotide
cugacuuuaaugacacucc

SEQ ID NO: 3255167 - RNA, 19 nt, Artificial Sequence
  Description of Artificial Sequence: Synthetic oligonucleotide
ugcagaaagguagauaugu

SEQ ID NO: 3255168 - RNA, 19 nt, Artificial Sequence
  Description of Artificial Sequence: Synthetic oligonucleotide
ucaccuuuaacaccuggca

SEQ ID NO: 3255169 - RNA, 19 nt, Artificial Sequence
  Description of Artificial Sequence: Synthetic oligonucleotide
aaacaaaacgagaauucug

SEQ ID NO: 3255170 - RNA, 19 nt, Artificial Sequence
  Description of Artificial Sequence: Synthetic oligonucleotide
aauacccaauagugcauag

SEQ ID NO: 3255171 - RNA, 19 nt, Artificial Sequence
  Description of Artificial Sequence: Synthetic oligonucleotide
uuucuucaagccagaaucc

SEQ ID NO: 3255172 - RNA, 19 nt, Artificial Sequence
  Description of Artificial Sequence: Synthetic oligonucleotide
uauggaacuggcaagugua

SEQ ID NO: 3255173 - RNA, 19 nt, Artificial Sequence
  Description of Artificial Sequence: Synthetic oligonucleotide
uuuaggagaaagccuaaau

SEQ ID NO: 3255174 - RNA, 19 nt, Artificial Sequence
  Description of Artificial Sequence: Synthetic oligonucleotide
uuguuacuuucauaggcag

SEQ ID NO: 3255175 - RNA, 19 nt, Artificial Sequence
  Description of Artificial Sequence: Synthetic oligonucleotide
aaucuugagacuugaguuu

SEQ ID NO: 3255176 - RNA, 19 nt, Artificial Sequence
  Description of Artificial Sequence: Synthetic oligonucleotide
uucaccuuuaacaccuggc

SEQ ID NO: 3255177 - RNA, 19 nt, Artificial Sequence
  Description of Artificial Sequence: Synthetic oligonucleotide
acagcugaggcuugaguac

SEQ ID NO: 3255178 - RNA, 19 nt, Artificial Sequence
  Description of Artificial Sequence: Synthetic oligonucleotide
cugauaaacaaaacgagaa

SEQ ID NO: 3255179 - RNA, 19 nt, Artificial Sequence
  Description of Artificial Sequence: Synthetic oligonucleotide
aauccaggcugauaaacaa

SEQ ID NO: 3255180 - RNA, 19 nt, Artificial Sequence
  Description of Artificial Sequence: Synthetic oligonucleotide
agaaagccuaaauuuguug

SEQ ID NO: 3255181 - RNA, 19 nt, Artificial Sequence
  Description of Artificial Sequence: Synthetic oligonucleotide
guagugacggcaccaaggg

SEQ ID NO: 3255182 - RNA, 19 nt, Artificial Sequence
  Description of Artificial Sequence: Synthetic oligonucleotide
aacuaaagcugaguaauga

SEQ ID NO: 3255183 - RNA, 19 nt, Artificial Sequence
  Description of Artificial Sequence: Synthetic oligonucleotide
uauauaugguacacuauuu

SEQ ID NO: 3255184 - RNA, 19 nt, Artificial Sequence
  Description of Artificial Sequence: Synthetic oligonucleotide
acuaccauuccuaacagca

SEQ ID NO: 3255185 - RNA, 19 nt, Artificial Sequence
  Description of Artificial Sequence: Synthetic oligonucleotide
uguagguuuaggaaccauc

SEQ ID NO: 3255186 - RNA, 19 nt, Artificial Sequence
  Description of Artificial Sequence: Synthetic oligonucleotide
aaauaugguuuaaauagaa

SEQ ID NO: 3255187 - RNA, 19 nt, Artificial Sequence
  Description of Artificial Sequence: Synthetic oligonucleotide
gagaauucuggccuccugc

SEQ ID NO: 3255188 - RNA, 19 nt, Artificial Sequence
  Description of Artificial Sequence: Synthetic oligonucleotide
aacucccucaagcauuuug

SEQ ID NO: 3255189 - RNA, 19 nt, Artificial Sequence
  Description of Artificial Sequence: Synthetic oligonucleotide
caacccagaaaagugagcc

SEQ ID NO: 3255190 - RNA, 19 nt, Artificial Sequence
  Description of Artificial Sequence: Synthetic oligonucleotide
acaacuaaagcugaguaau

SEQ ID NO: 3255191 - RNA, 19 nt, Artificial Sequence
  Description of Artificial Sequence: Synthetic oligonucleotide
ugacaacuaaagcugagua

SEQ ID NO: 3255192 - RNA, 19 nt, Artificial Sequence
  Description of Artificial Sequence: Synthetic oligonucleotide
uggggcuaagcugugaagg

SEQ ID NO: 3255193 - RNA, 19 nt, Artificial Sequence
  Description of Artificial Sequence: Synthetic oligonucleotide
cuuagcagacaaaugagga

SEQ ID NO: 3255194 - RNA, 19 nt, Artificial Sequence
  Description of Artificial Sequence: Synthetic oligonucleotide
cacuauuuaauauguaaca

SEQ ID NO: 3255195 - RNA, 19 nt, Artificial Sequence
  Description of Artificial Sequence: Synthetic oligonucleotide
agaaaagugagccccagua

SEQ ID NO: 3255196 - RNA, 19 nt, Artificial Sequence
  Description of Artificial Sequence: Synthetic oligonucleotide
aaacgagaauucuggccuc

SEQ ID NO: 3255197 - RNA, 19 nt, Artificial Sequence
  Description of Artificial Sequence: Synthetic oligonucleotide
aaugacacuccccaccuuu

SEQ ID NO: 3255198 - RNA, 19 nt, Artificial Sequence
  Description of Artificial Sequence: Synthetic oligonucleotide
caagugauuuaggagaaag

SEQ ID NO: 3255199 - RNA, 19 nt, Artificial Sequence
  Description of Artificial Sequence: Synthetic oligonucleotide
ucgucuauuuccacuuucc

SEQ ID NO: 3255200 - RNA, 19 nt, Artificial Sequence
  Description of Artificial Sequence: Synthetic oligonucleotide
guagguuuaggaaccaucc

SEQ ID NO: 3255201 - RNA, 19 nt, Artificial Sequence
  Description of Artificial Sequence: Synthetic oligonucleotide
auguggguuagacacaacu

SEQ ID NO: 3255202 - RNA, 19 nt, Artificial Sequence
  Description of Artificial Sequence: Synthetic oligonucleotide
aaccuugggaaaccuaagu

SEQ ID NO: 3255203 - RNA, 19 nt, Artificial Sequence
  Description of Artificial Sequence: Synthetic oligonucleotide
agcaacaagguaagggacc

SEQ ID NO: 3255204 - RNA, 19 nt, Artificial Sequence
  Description of Artificial Sequence: Synthetic oligonucleotide
aguacagaaagggcaggcc

SEQ ID NO: 3255205 - RNA, 19 nt, Artificial Sequence
  Description of Artificial Sequence: Synthetic oligonucleotide
uuuauuaccaucaagaagu

SEQ ID NO: 3255206 - RNA, 19 nt, Artificial Sequence
  Description of Artificial Sequence: Synthetic oligonucleotide
acaaauagaaaacagacug

SEQ ID NO: 3255207 - RNA, 19 nt, Artificial Sequence
  Description of Artificial Sequence: Synthetic oligonucleotide
auuauucaaauuuauuacc

SEQ ID NO: 3255208 - RNA, 19 nt, Artificial Sequence
  Description of Artificial Sequence: Synthetic oligonucleotide
uuucuuaacaaauagaaaa

SEQ ID NO: 3255209 - RNA, 19 nt, Artificial Sequence
  Description of Artificial Sequence: Synthetic oligonucleotide
aaaagagcaagucuugggg

SEQ ID NO: 3255210 - RNA, 19 nt, Artificial Sequence
  Description of Artificial Sequence: Synthetic oligonucleotide
aagaaguaugcaaugaugc

SEQ ID NO: 3255211 - RNA, 19 nt, Artificial Sequence
  Description of Artificial Sequence: Synthetic oligonucleotide
aaauuuauuaccaucaaga

SEQ ID NO: 3255212 - RNA, 19 nt, Artificial Sequence
  Description of Artificial Sequence: Synthetic oligonucleotide
uaacaaauagaaaacagac

SEQ ID NO: 3255213 - RNA, 19 nt, Artificial Sequence
  Description of Artificial Sequence: Synthetic oligonucleotide
uauuauucaaauuuauuac

SEQ ID NO: 3255214 - RNA, 19 nt, Artificial Sequence
  Description of Artificial Sequence: Synthetic oligonucleotide
uuaacaaauagaaaacaga

SEQ ID NO: 3255215 - RNA, 19 nt, Artificial Sequence
  Description of Artificial Sequence: Synthetic oligonucleotide
aguauaguaccauggauac

SEQ ID NO: 3255216 - RNA, 19 nt, Artificial Sequence
  Description of Artificial Sequence: Synthetic oligonucleotide
gaauguuucauccaacacc

SEQ ID NO: 3255217 - RNA, 19 nt, Artificial Sequence
  Description of Artificial Sequence: Synthetic oligonucleotide
uuauucaaauuuauuacca

SEQ ID NO: 3255218 - RNA, 19 nt, Artificial Sequence
  Description of Artificial Sequence: Synthetic oligonucleotide
cuuaacaaauagaaaacag

SEQ ID NO: 3255219 - RNA, 19 nt, Artificial Sequence
  Description of Artificial Sequence: Synthetic oligonucleotide
aauaagacugaguauagua

SEQ ID NO: 3255220 - RNA, 19 nt, Artificial Sequence
  Description of Artificial Sequence: Synthetic oligonucleotide
agagaagucaucuggcccc

SEQ ID NO: 3255221 - RNA, 19 nt, Artificial Sequence
  Description of Artificial Sequence: Synthetic oligonucleotide
uaugcaaugaugcuguagu

SEQ ID NO: 3255222 - RNA, 19 nt, Artificial Sequence
  Description of Artificial Sequence: Synthetic oligonucleotide
aacagugaacucuacagca

SEQ ID NO: 3255223 - RNA, 19 nt, Artificial Sequence
  Description of Artificial Sequence: Synthetic oligonucleotide
auucaaauuuauuaccauc

SEQ ID NO: 3255224 - RNA, 19 nt, Artificial Sequence
  Description of Artificial Sequence: Synthetic oligonucleotide
uaguuuucuuaacaaauag

SEQ ID NO: 3255225 - RNA, 19 nt, Artificial Sequence
  Description of Artificial Sequence: Synthetic oligonucleotide
cucaacuuagccuagcuag

SEQ ID NO: 3255226 - RNA, 19 nt, Artificial Sequence
  Description of Artificial Sequence: Synthetic oligonucleotide
gagauaauaagacugagua

SEQ ID NO: 3255227 - RNA, 19 nt, Artificial Sequence
  Description of Artificial Sequence: Synthetic oligonucleotide
uucuuaacaaauagaaaac

SEQ ID NO: 3255228 - RNA, 19 nt, Artificial Sequence
  Description of Artificial Sequence: Synthetic oligonucleotide
aauguuucauccaacaccu

SEQ ID NO: 3255229 - RNA, 19 nt, Artificial Sequence
  Description of Artificial Sequence: Synthetic oligonucleotide
uaagacugaguauaguacc

SEQ ID NO: 3255230 - RNA, 19 nt, Artificial Sequence
  Description of Artificial Sequence: Synthetic oligonucleotide
gaaaagagcaagucuuggg

SEQ ID NO: 3255231 - RNA, 19 nt, Artificial Sequence
  Description of Artificial Sequence: Synthetic oligonucleotide
caagcugagauaauaagac

SEQ ID NO: 3255232 - RNA, 19 nt, Artificial Sequence
  Description of Artificial Sequence: Synthetic oligonucleotide
uuaccuaucuagauagugc

SEQ ID NO: 3255233 - RNA, 19 nt, Artificial Sequence
  Description of Artificial Sequence: Synthetic oligonucleotide
aaaugaauguuucauccaa

SEQ ID NO: 3255234 - RNA, 19 nt, Artificial Sequence
  Description of Artificial Sequence: Synthetic oligonucleotide
uauaguaccauggauacaa

SEQ ID NO: 3255235 - RNA, 19 nt, Artificial Sequence
  Description of Artificial Sequence: Synthetic oligonucleotide
gauagugcugcccagagga

SEQ ID NO: 3255236 - RNA, 19 nt, Artificial Sequence
  Description of Artificial Sequence: Synthetic oligonucleotide
guauuauucaaauuuauua

SEQ ID NO: 3255237 - RNA, 19 nt, Artificial Sequence
  Description of Artificial Sequence: Synthetic oligonucleotide
gauaauaagacugaguaua

SEQ ID NO: 3255238 - RNA, 19 nt, Artificial Sequence
  Description of Artificial Sequence: Synthetic oligonucleotide
auuaccaucaagaaguaug

SEQ ID NO: 3255239 - RNA, 19 nt, Artificial Sequence
  Description of Artificial Sequence: Synthetic oligonucleotide
aaaaugaauguuucaucca

SEQ ID NO: 3255240 - RNA, 19 nt, Artificial Sequence
  Description of Artificial Sequence: Synthetic oligonucleotide
agcacuagcauccacuaag

SEQ ID NO: 3255241 - RNA, 19 nt, Artificial Sequence
  Description of Artificial Sequence: Synthetic oligonucleotide
ucauccaacaccuaccaac

SEQ ID NO: 3255242 - RNA, 19 nt, Artificial Sequence
  Description of Artificial Sequence: Synthetic oligonucleotide
uggauuguugaucucaacu

SEQ ID NO: 3255243 - RNA, 19 nt, Artificial Sequence
  Description of Artificial Sequence: Synthetic oligonucleotide
ucuggggacaucugcaucg

SEQ ID NO: 3255244 - RNA, 19 nt, Artificial Sequence
  Description of Artificial Sequence: Synthetic oligonucleotide
acagacaugugcuaccagg

SEQ ID NO: 3255245 - RNA, 19 nt, Artificial Sequence
  Description of Artificial Sequence: Synthetic oligonucleotide
aacagcuaugcacccuucc

SEQ ID NO: 3255246 - RNA, 19 nt, Artificial Sequence
  Description of Artificial Sequence: Synthetic oligonucleotide
aguccaguagucuugccac

SEQ ID NO: 3255247 - RNA, 19 nt, Artificial Sequence
  Description of Artificial Sequence: Synthetic oligonucleotide
cacuuaccuaucuagauag

SEQ ID NO: 3255248 - RNA, 19 nt, Artificial Sequence
  Description of Artificial Sequence: Synthetic oligonucleotide
uguugaucucaacuuagcc

SEQ ID NO: 3255249 - RNA, 19 nt, Artificial Sequence
  Description of Artificial Sequence: Synthetic oligonucleotide
aaaacagacuguguacaac

SEQ ID NO: 3255250 - RNA, 19 nt, Artificial Sequence
  Description of Artificial Sequence: Synthetic oligonucleotide
auggauacaaguccaguag

SEQ ID NO: 3255251 - RNA, 19 nt, Artificial Sequence
  Description of Artificial Sequence: Synthetic oligonucleotide
acuuagccuagcuagaucu

SEQ ID NO: 3255252 - RNA, 19 nt, Artificial Sequence
  Description of Artificial Sequence: Synthetic oligonucleotide
auagaaaacagacugugua

SEQ ID NO: 3255253 - RNA, 19 nt, Artificial Sequence
  Description of Artificial Sequence: Synthetic oligonucleotide
ucuuaacaaauagaaaaca

SEQ ID NO: 3255254 - RNA, 19 nt, Artificial Sequence
  Description of Artificial Sequence: Synthetic oligonucleotide
uuuucuuaacaaauagaaa

SEQ ID NO: 3255255 - RNA, 19 nt, Artificial Sequence
  Description of Artificial Sequence: Synthetic oligonucleotide
cucuacagcacuagcaucc

SEQ ID NO: 3255256 - RNA, 19 nt, Artificial Sequence
  Description of Artificial Sequence: Synthetic oligonucleotide
aaagagcaagucuugggga

SEQ ID NO: 3255257 - RNA, 19 nt, Artificial Sequence
  Description of Artificial Sequence: Synthetic oligonucleotide
aguaccauggauacaaguc

SEQ ID NO: 3255258 - RNA, 19 nt, Artificial Sequence
  Description of Artificial Sequence: Synthetic oligonucleotide
uugaucucaacuuagccua

SEQ ID NO: 3255259 - RNA, 19 nt, Artificial Sequence
  Description of Artificial Sequence: Synthetic oligonucleotide
guuuaugagggcaacuugg

SEQ ID NO: 3255260 - RNA, 19 nt, Artificial Sequence
  Description of Artificial Sequence: Synthetic oligonucleotide
uaggcuaaaacagcuaugc

SEQ ID NO: 3255261 - RNA, 19 nt, Artificial Sequence
  Description of Artificial Sequence: Synthetic oligonucleotide
acagcuaugcacccuuccc

SEQ ID NO: 3255262 - RNA, 19 nt, Artificial Sequence
  Description of Artificial Sequence: Synthetic oligonucleotide
cuagcauccacuaagguaa

SEQ ID NO: 3255263 - RNA, 19 nt, Artificial Sequence
  Description of Artificial Sequence: Synthetic oligonucleotide
aaugaauguuucauccaac

SEQ ID NO: 3255264 - RNA, 19 nt, Artificial Sequence
  Description of Artificial Sequence: Synthetic oligonucleotide
ugagauaauaagacugagu

SEQ ID NO: 3255265 - RNA, 19 nt, Artificial Sequence
  Description of Artificial Sequence: Synthetic oligonucleotide
acuggccuagaccugaagg

SEQ ID NO: 3255266 - RNA, 19 nt, Artificial Sequence
  Description of Artificial Sequence: Synthetic oligonucleotide
caaauuuauuaccaucaag

SEQ ID NO: 3255267 - RNA, 19 nt, Artificial Sequence
  Description of Artificial Sequence: Synthetic oligonucleotide
cagacuguguacaacagug

SEQ ID NO: 3255268 - RNA, 19 nt, Artificial Sequence
  Description of Artificial Sequence: Synthetic oligonucleotide
aacucuacagcacuagcau

SEQ ID NO: 3255269 - RNA, 19 nt, Artificial Sequence
  Description of Artificial Sequence: Synthetic oligonucleotide
ucugaagacagcugcaaac

SEQ ID NO: 3255270 - RNA, 19 nt, Artificial Sequence
  Description of Artificial Sequence: Synthetic oligonucleotide
gaaguaugcaaugaugcug

SEQ ID NO: 3255271 - RNA, 19 nt, Artificial Sequence
  Description of Artificial Sequence: Synthetic oligonucleotide
ugaagggccagccacgccc

SEQ ID NO: 3255272 - RNA, 19 nt, Artificial Sequence
  Description of Artificial Sequence: Synthetic oligonucleotide
guuuucuuaacaaauagaa

SEQ ID NO: 3255273 - RNA, 19 nt, Artificial Sequence
  Description of Artificial Sequence: Synthetic oligonucleotide
guaccauggauacaagucc

SEQ ID NO: 3255274 - RNA, 19 nt, Artificial Sequence
  Description of Artificial Sequence: Synthetic oligonucleotide
uagaaaacagacuguguac

SEQ ID NO: 3255275 - RNA, 19 nt, Artificial Sequence
  Description of Artificial Sequence: Synthetic oligonucleotide
aagucaucuggccccugcc

SEQ ID NO: 3255276 - RNA, 19 nt, Artificial Sequence
  Description of Artificial Sequence: Synthetic oligonucleotide
uuucauccaacaccuacca

SEQ ID NO: 3255277 - RNA, 19 nt, Artificial Sequence
  Description of Artificial Sequence: Synthetic oligonucleotide
caagaaguaugcaaugaug

SEQ ID NO: 3255278 - RNA, 19 nt, Artificial Sequence
  Description of Artificial Sequence: Synthetic oligonucleotide
gaugcuguaguuuucuuaa

SEQ ID NO: 3255279 - RNA, 19 nt, Artificial Sequence
  Description of Artificial Sequence: Synthetic oligonucleotide
uguacaacagugaacucua

SEQ ID NO: 3255280 - RNA, 19 nt, Artificial Sequence
  Description of Artificial Sequence: Synthetic oligonucleotide
aacuuagccuagcuagauc

SEQ ID NO: 3255281 - RNA, 19 nt, Artificial Sequence
  Description of Artificial Sequence: Synthetic oligonucleotide
uuuaugagggcaacuugga

SEQ ID NO: 3255282 - RNA, 19 nt, Artificial Sequence
  Description of Artificial Sequence: Synthetic oligonucleotide
ugcuguaguuuucuuaaca

SEQ ID NO: 3255283 - RNA, 19 nt, Artificial Sequence
  Description of Artificial Sequence: Synthetic oligonucleotide
ugaauguuucauccaacac

SEQ ID NO: 3255284 - RNA, 19 nt, Artificial Sequence
  Description of Artificial Sequence: Synthetic oligonucleotide
aaguccaguagucuugcca

SEQ ID NO: 3255285 - RNA, 19 nt, Artificial Sequence
  Description of Artificial Sequence: Synthetic oligonucleotide
acugaguauaguaccaugg

SEQ ID NO: 3255286 - RNA, 19 nt, Artificial Sequence
  Description of Artificial Sequence: Synthetic oligonucleotide
agaggaagaggcccucucc

SEQ ID NO: 3255287 - RNA, 19 nt, Artificial Sequence
  Description of Artificial Sequence: Synthetic oligonucleotide
uaccuaucuagauagugcu

SEQ ID NO: 3255288 - RNA, 19 nt, Artificial Sequence
  Description of Artificial Sequence: Synthetic oligonucleotide
cuuggagcggaaaagagca

SEQ ID NO: 3255289 - RNA, 19 nt, Artificial Sequence
  Description of Artificial Sequence: Synthetic oligonucleotide
ucaagaaguaugcaaugau

SEQ ID NO: 3255290 - RNA, 19 nt, Artificial Sequence
  Description of Artificial Sequence: Synthetic oligonucleotide
aagacagcugcaaaccagg

SEQ ID NO: 3255291 - RNA, 19 nt, Artificial Sequence
  Description of Artificial Sequence: Synthetic oligonucleotide
agcaagcugagauaauaag

SEQ ID NO: 3255292 - RNA, 19 nt, Artificial Sequence
  Description of Artificial Sequence: Synthetic oligonucleotide
agucuuggggaucugaaga

SEQ ID NO: 3255293 - RNA, 19 nt, Artificial Sequence
  Description of Artificial Sequence: Synthetic oligonucleotide
aaaacagcuaugcacccuu

SEQ ID NO: 3255294 - RNA, 19 nt, Artificial Sequence
  Description of Artificial Sequence: Synthetic oligonucleotide
uacaaguccaguagucuug

SEQ ID NO: 3255295 - RNA, 19 nt, Artificial Sequence
  Description of Artificial Sequence: Synthetic oligonucleotide
gacaugugcuaccaggccc

SEQ ID NO: 3255296 - RNA, 19 nt, Artificial Sequence
  Description of Artificial Sequence: Synthetic oligonucleotide
aaguaugcaaugaugcugu

SEQ ID NO: 3255297 - RNA, 19 nt, Artificial Sequence
  Description of Artificial Sequence: Synthetic oligonucleotide
gccacauugguuuaugagg

SEQ ID NO: 3255298 - RNA, 19 nt, Artificial Sequence
  Description of Artificial Sequence: Synthetic oligonucleotide
uuguauuauucaaauuuau

SEQ ID NO: 3255299 - RNA, 19 nt, Artificial Sequence
  Description of Artificial Sequence: Synthetic oligonucleotide
ucaaauuuauuaccaucaa

SEQ ID NO: 3255300 - RNA, 19 nt, Artificial Sequence
  Description of Artificial Sequence: Synthetic oligonucleotide
aagucuuggggaucugaag

SEQ ID NO: 3255301 - RNA, 19 nt, Artificial Sequence
  Description of Artificial Sequence: Synthetic oligonucleotide
agacaugugcuaccaggcc

SEQ ID NO: 3255302 - RNA, 19 nt, Artificial Sequence
  Description of Artificial Sequence: Synthetic oligonucleotide
aaugaugcuguaguuuucu

SEQ ID NO: 3255303 - RNA, 19 nt, Artificial Sequence
  Description of Artificial Sequence: Synthetic oligonucleotide
gagagaagucaucuggccc

SEQ ID NO: 3255304 - RNA, 19 nt, Artificial Sequence
  Description of Artificial Sequence: Synthetic oligonucleotide
agucuugccacauugguuu

SEQ ID NO: 3255305 - RNA, 19 nt, Artificial Sequence
  Description of Artificial Sequence: Synthetic oligonucleotide
uccaccagcacgaagagcc

SEQ ID NO: 3255306 - RNA, 19 nt, Artificial Sequence
  Description of Artificial Sequence: Synthetic oligonucleotide
agcagguagcccuugaugc

SEQ ID NO: 3255307 - RNA, 19 nt, Artificial Sequence
  Description of Artificial Sequence: Synthetic oligonucleotide
uaugacacgcaaaugaagu

SEQ ID NO: 3255308 - RNA, 19 nt, Artificial Sequence
  Description of Artificial Sequence: Synthetic oligonucleotide
acacugugcacacagugcc

SEQ ID NO: 3255309 - RNA, 19 nt, Artificial Sequence
  Description of Artificial Sequence: Synthetic oligonucleotide
gauagggguggcuugagcc

SEQ ID NO: 3255310 - RNA, 19 nt, Artificial Sequence
  Description of Artificial Sequence: Synthetic oligonucleotide
aaaguggaagucucguuug

SEQ ID NO: 3255311 - RNA, 19 nt, Artificial Sequence
  Description of Artificial Sequence: Synthetic oligonucleotide
agguaugacacgcaaauga

SEQ ID NO: 3255312 - RNA, 19 nt, Artificial Sequence
  Description of Artificial Sequence: Synthetic oligonucleotide
ugccucgucagccagcugg

SEQ ID NO: 3255313 - RNA, 19 nt, Artificial Sequence
  Description of Artificial Sequence: Synthetic oligonucleotide
agcacgaagagccgguagc

SEQ ID NO: 3255314 - RNA, 19 nt, Artificial Sequence
  Description of Artificial Sequence: Synthetic oligonucleotide
aacuucucggcacacugug

SEQ ID NO: 3255315 - RNA, 19 nt, Artificial Sequence
  Description of Artificial Sequence: Synthetic oligonucleotide
accucaaacuucucggcac

SEQ ID NO: 3255316 - RNA, 19 nt, Artificial Sequence
  Description of Artificial Sequence: Synthetic oligonucleotide
aaguggaagucucguuugg

SEQ ID NO: 3255317 - RNA, 19 nt, Artificial Sequence
  Description of Artificial Sequence: Synthetic oligonucleotide
uuugggcucacuccggagc

SEQ ID NO: 3255318 - RNA, 19 nt, Artificial Sequence
  Description of Artificial Sequence: Synthetic oligonucleotide
uacacaaaguggaagucuc

SEQ ID NO: 3255319 - RNA, 19 nt, Artificial Sequence
  Description of Artificial Sequence: Synthetic oligonucleotide
ugacacgcaaaugaagucc

SEQ ID NO: 3255320 - RNA, 19 nt, Artificial Sequence
  Description of Artificial Sequence: Synthetic oligonucleotide
ucgucagccagcuggaagc

SEQ ID NO: 3255321 - RNA, 19 nt, Artificial Sequence
  Description of Artificial Sequence: Synthetic oligonucleotide
augacacgcaaaugaaguc

SEQ ID NO: 3255322 - RNA, 19 nt, Artificial Sequence
  Description of Artificial Sequence: Synthetic oligonucleotide
cucguuugggcucacuccg

SEQ ID NO: 3255323 - RNA, 19 nt, Artificial Sequence
  Description of Artificial Sequence: Synthetic oligonucleotide
ucagccagcuggaagcagc

SEQ ID NO: 3255324 - RNA, 19 nt, Artificial Sequence
  Description of Artificial Sequence: Synthetic oligonucleotide
ucucguuugggcucacucc

SEQ ID NO: 3255325 - RNA, 19 nt, Artificial Sequence
  Description of Artificial Sequence: Synthetic oligonucleotide
gaugcgguguggcagugcc

SEQ ID NO: 3255326 - RNA, 19 nt, Artificial Sequence
  Description of Artificial Sequence: Synthetic oligonucleotide
caaacuucucggcacacug

SEQ ID NO: 3255327 - RNA, 19 nt, Artificial Sequence
  Description of Artificial Sequence: Synthetic oligonucleotide
ucgggauccagguaugaca

SEQ ID NO: 3255328 - RNA, 19 nt, Artificial Sequence
  Description of Artificial Sequence: Synthetic oligonucleotide
agagccgguagccuugggg

SEQ ID NO: 3255329 - RNA, 19 nt, Artificial Sequence
  Description of Artificial Sequence: Synthetic oligonucleotide
uguccgugacugcugcucg

SEQ ID NO: 3255330 - RNA, 19 nt, Artificial Sequence
  Description of Artificial Sequence: Synthetic oligonucleotide
agauagggguggcuugagc

SEQ ID NO: 3255331 - RNA, 19 nt, Artificial Sequence
  Description of Artificial Sequence: Synthetic oligonucleotide
uggaagucucguuugggcu

SEQ ID NO: 3255332 - RNA, 19 nt, Artificial Sequence
  Description of Artificial Sequence: Synthetic oligonucleotide
cuggaagcagcguccaucc

SEQ ID NO: 3255333 - RNA, 19 nt, Artificial Sequence
  Description of Artificial Sequence: Synthetic oligonucleotide
gagccgguagccuuggggc

SEQ ID NO: 3255334 - RNA, 19 nt, Artificial Sequence
  Description of Artificial Sequence: Synthetic oligonucleotide
uguggcagugccucgucag

SEQ ID NO: 3255335 - RNA, 19 nt, Artificial Sequence
  Description of Artificial Sequence: Synthetic oligonucleotide
acuagauagggguggcuug

SEQ ID NO: 3255336 - RNA, 19 nt, Artificial Sequence
  Description of Artificial Sequence: Synthetic oligonucleotide
ugggccaccucaaacuucu

SEQ ID NO: 3255337 - RNA, 19 nt, Artificial Sequence
  Description of Artificial Sequence: Synthetic oligonucleotide
ucccgcaccacuagauagg

SEQ ID NO: 3255338 - RNA, 19 nt, Artificial Sequence
  Description of Artificial Sequence: Synthetic oligonucleotide
guagccuuggggcugggcc

SEQ ID NO: 3255339 - RNA, 19 nt, Artificial Sequence
  Description of Artificial Sequence: Synthetic oligonucleotide
cacacugugcacacagugc

SEQ ID NO: 3255340 - RNA, 19 nt, Artificial Sequence
  Description of Artificial Sequence: Synthetic oligonucleotide
ucgguacacaaaguggaag

SEQ ID NO: 3255341 - RNA, 19 nt, Artificial Sequence
  Description of Artificial Sequence: Synthetic oligonucleotide
cucacuccggagcagguag

SEQ ID NO: 3255342 - RNA, 19 nt, Artificial Sequence
  Description of Artificial Sequence: Synthetic oligonucleotide
guggaagucucguuugggc

SEQ ID NO: 3255343 - RNA, 19 nt, Artificial Sequence
  Description of Artificial Sequence: Synthetic oligonucleotide
ugagccaucccugccacug

SEQ ID NO: 3255344 - RNA, 19 nt, Artificial Sequence
  Description of Artificial Sequence: Synthetic oligonucleotide
caggggucgguacacaaag

SEQ ID NO: 3255345 - RNA, 19 nt, Artificial Sequence
  Description of Artificial Sequence: Synthetic oligonucleotide
guaugacacgcaaaugaag

SEQ ID NO: 3255346 - RNA, 19 nt, Artificial Sequence
  Description of Artificial Sequence: Synthetic oligonucleotide
gagcagguagcccuugaug

SEQ ID NO: 3255347 - RNA, 19 nt, Artificial Sequence
  Description of Artificial Sequence: Synthetic oligonucleotide
gccaccucaaacuucucgg

SEQ ID NO: 3255348 - RNA, 19 nt, Artificial Sequence
  Description of Artificial Sequence: Synthetic oligonucleotide
cucccgcaccacuagauag

SEQ ID NO: 3255349 - RNA, 19 nt, Artificial Sequence
  Description of Artificial Sequence: Synthetic oligonucleotide
gaagcagcguccauccacc

SEQ ID NO: 3255350 - RNA, 19 nt, Artificial Sequence
  Description of Artificial Sequence: Synthetic oligonucleotide
ucugugucugcccgugaug

SEQ ID NO: 3255351 - RNA, 19 nt, Artificial Sequence
  Description of Artificial Sequence: Synthetic oligonucleotide
acgcaaaugaaguccugca

SEQ ID NO: 3255352 - RNA, 19 nt, Artificial Sequence
  Description of Artificial Sequence: Synthetic oligonucleotide
aucccugccacuguccagg

SEQ ID NO: 3255353 - RNA, 19 nt, Artificial Sequence
  Description of Artificial Sequence: Synthetic oligonucleotide
acuguccaggggucgguac

SEQ ID NO: 3255354 - RNA, 19 nt, Artificial Sequence
  Description of Artificial Sequence: Synthetic oligonucleotide
aguggaagucucguuuggg

SEQ ID NO: 3255355 - RNA, 19 nt, Artificial Sequence
  Description of Artificial Sequence: Synthetic oligonucleotide
uugggcucacuccggagca

SEQ ID NO: 3255356 - RNA, 19 nt, Artificial Sequence
  Description of Artificial Sequence: Synthetic oligonucleotide
agugccugggcuucugugu

SEQ ID NO: 3255357 - RNA, 19 nt, Artificial Sequence
  Description of Artificial Sequence: Synthetic oligonucleotide
ugcacacagugccugggcu

SEQ ID NO: 3255358 - RNA, 19 nt, Artificial Sequence
  Description of Artificial Sequence: Synthetic oligonucleotide
auagggguggcuugagcca

SEQ ID NO: 3255359 - RNA, 19 nt, Artificial Sequence
  Description of Artificial Sequence: Synthetic oligonucleotide
cugugucugcccgugaugc

SEQ ID NO: 3255360 - RNA, 19 nt, Artificial Sequence
  Description of Artificial Sequence: Synthetic oligonucleotide
ugugcacacagugccuggg

SEQ ID NO: 3255361 - RNA, 19 nt, Artificial Sequence
  Description of Artificial Sequence: Synthetic oligonucleotide
gcguccauccaccagcacg

SEQ ID NO: 3255362 - RNA, 19 nt, Artificial Sequence
  Description of Artificial Sequence: Synthetic oligonucleotide
ucguuugggcucacuccgg

SEQ ID NO: 3255363 - RNA, 19 nt, Artificial Sequence
  Description of Artificial Sequence: Synthetic oligonucleotide
cacgcaaaugaaguccugc

SEQ ID NO: 3255364 - RNA, 19 nt, Artificial Sequence
  Description of Artificial Sequence: Synthetic oligonucleotide
uccauccaccagcacgaag

SEQ ID NO: 3255365 - RNA, 19 nt, Artificial Sequence
  Description of Artificial Sequence: Synthetic oligonucleotide
accacuagauagggguggc

SEQ ID NO: 3255366 - RNA, 19 nt, Artificial Sequence
  Description of Artificial Sequence: Synthetic oligonucleotide
uagcccuugaugcggugug

SEQ ID NO: 3255367 - RNA, 19 nt, Artificial Sequence
  Description of Artificial Sequence: Synthetic oligonucleotide
augccaguguccgugacug

SEQ ID NO: 3255368 - RNA, 19 nt, Artificial Sequence
  Description of Artificial Sequence: Synthetic oligonucleotide
ugucugcccgugaugccag

SEQ ID NO: 3255369 - RNA, 19 nt, Artificial Sequence
  Description of Artificial Sequence: Synthetic oligonucleotide
aaguugggcucccgcacca

SEQ ID NO: 3255370 - RNA, 19 nt, Artificial Sequence
  Description of Artificial Sequence: Synthetic oligonucleotide
uccagguaugacacgcaaa

SEQ ID NO: 3255371 - RNA, 19 nt, Artificial Sequence
  Description of Artificial Sequence: Synthetic oligonucleotide
uucugugucugcccgugau

SEQ ID NO: 3255372 - RNA, 19 nt, Artificial Sequence
  Description of Artificial Sequence: Synthetic oligonucleotide
cucgucagccagcuggaag

SEQ ID NO: 3255373 - RNA, 19 nt, Artificial Sequence
  Description of Artificial Sequence: Synthetic oligonucleotide
ugggcuucugugucugccc

SEQ ID NO: 3255374 - RNA, 19 nt, Artificial Sequence
  Description of Artificial Sequence: Synthetic oligonucleotide
caccacuagauaggggugg

SEQ ID NO: 3255375 - RNA, 19 nt, Artificial Sequence
  Description of Artificial Sequence: Synthetic oligonucleotide
uuggggcugggccaccuca

SEQ ID NO: 3255376 - RNA, 19 nt, Artificial Sequence
  Description of Artificial Sequence: Synthetic oligonucleotide
cuucucggcacacugugca

SEQ ID NO: 3255377 - RNA, 19 nt, Artificial Sequence
  Description of Artificial Sequence: Synthetic oligonucleotide
ggauccagguaugacacgc

SEQ ID NO: 3255378 - RNA, 19 nt, Artificial Sequence
  Description of Artificial Sequence: Synthetic oligonucleotide
ggggucgguacacaaagug

SEQ ID NO: 3255379 - RNA, 19 nt, Artificial Sequence
  Description of Artificial Sequence: Synthetic oligonucleotide
gcagcguccauccaccagc

SEQ ID NO: 3255380 - RNA, 19 nt, Artificial Sequence
  Description of Artificial Sequence: Synthetic oligonucleotide
ggaagcagcguccauccac

SEQ ID NO: 3255381 - RNA, 19 nt, Artificial Sequence
  Description of Artificial Sequence: Synthetic oligonucleotide
acacaaaguggaagucucg

SEQ ID NO: 3255382 - RNA, 19 nt, Artificial Sequence
  Description of Artificial Sequence: Synthetic oligonucleotide
ugcugcucgggauccaggu

SEQ ID NO: 3255383 - RNA, 19 nt, Artificial Sequence
  Description of Artificial Sequence: Synthetic oligonucleotide
acaaaguggaagucucguu

SEQ ID NO: 3255384 - RNA, 19 nt, Artificial Sequence
  Description of Artificial Sequence: Synthetic oligonucleotide
cagguagcccuugaugcgg

SEQ ID NO: 3255385 - RNA, 19 nt, Artificial Sequence
  Description of Artificial Sequence: Synthetic oligonucleotide
aaacuucucggcacacugu

SEQ ID NO: 3255386 - RNA, 19 nt, Artificial Sequence
  Description of Artificial Sequence: Synthetic oligonucleotide
acugugcacacagugccug

SEQ ID NO: 3255387 - RNA, 19 nt, Artificial Sequence
  Description of Artificial Sequence: Synthetic oligonucleotide
cuugagccaucccugccac

SEQ ID NO: 3255388 - RNA, 19 nt, Artificial Sequence
  Description of Artificial Sequence: Synthetic oligonucleotide
ucaaacuucucggcacacu

SEQ ID NO: 3255389 - RNA, 19 nt, Artificial Sequence
  Description of Artificial Sequence: Synthetic oligonucleotide
acuucucggcacacugugc

SEQ ID NO: 3255390 - RNA, 19 nt, Artificial Sequence
  Description of Artificial Sequence: Synthetic oligonucleotide
ggccaccucaaacuucucg

SEQ ID NO: 3255391 - RNA, 19 nt, Artificial Sequence
  Description of Artificial Sequence: Synthetic oligonucleotide
uccgugacugcugcucggg

SEQ ID NO: 3255392 - RNA, 19 nt, Artificial Sequence
  Description of Artificial Sequence: Synthetic oligonucleotide
ucucggcacacugugcaca

SEQ ID NO: 3255393 - RNA, 19 nt, Artificial Sequence
  Description of Artificial Sequence: Synthetic oligonucleotide
uagccuuggggcugggcca

SEQ ID NO: 3255394 - RNA, 19 nt, Artificial Sequence
  Description of Artificial Sequence: Synthetic oligonucleotide
gggucgguacacaaagugg

SEQ ID NO: 3255395 - RNA, 19 nt, Artificial Sequence
  Description of Artificial Sequence: Synthetic oligonucleotide
ugugucugcccgugaugcc

SEQ ID NO: 3255396 - RNA, 19 nt, Artificial Sequence
  Description of Artificial Sequence: Synthetic oligonucleotide
gucucguuugggcucacuc

SEQ ID NO: 3255397 - RNA, 19 nt, Artificial Sequence
  Description of Artificial Sequence: Synthetic oligonucleotide
cagccagcuggaagcagcg

SEQ ID NO: 3255398 - RNA, 19 nt, Artificial Sequence
  Description of Artificial Sequence: Synthetic oligonucleotide
cauccaccagcacgaagag

SEQ ID NO: 3255399 - RNA, 19 nt, Artificial Sequence
  Description of Artificial Sequence: Synthetic oligonucleotide
agccaucccugccacuguc

SEQ ID NO: 3255400 - RNA, 19 nt, Artificial Sequence
  Description of Artificial Sequence: Synthetic oligonucleotide
ugggcucccgcaccacuag

SEQ ID NO: 3255401 - RNA, 19 nt, Artificial Sequence
  Description of Artificial Sequence: Synthetic oligonucleotide
agcagcguccauccaccag

SEQ ID NO: 3255402 - RNA, 19 nt, Artificial Sequence
  Description of Artificial Sequence: Synthetic oligonucleotide
gcagguagcccuugaugcg

SEQ ID NO: 3255403 - RNA, 19 nt, Artificial Sequence
  Description of Artificial Sequence: Synthetic oligonucleotide
gcacacugugcacacagug

SEQ ID NO: 3255404 - RNA, 19 nt, Artificial Sequence
  Description of Artificial Sequence: Synthetic oligonucleotide
guuugggcucacuccggag

SEQ ID NO: 3255405 - RNA, 19 nt, Artificial Sequence
  Description of Artificial Sequence: Synthetic oligonucleotide
aauaaagcaucucaaugcc

SEQ ID NO: 3255406 - RNA, 19 nt, Artificial Sequence
  Description of Artificial Sequence: Synthetic oligonucleotide
ucuguuuacaauaaagggg

SEQ ID NO: 3255407 - RNA, 19 nt, Artificial Sequence
  Description of Artificial Sequence: Synthetic oligonucleotide
uaaccuaauacucugaagc

SEQ ID NO: 3255408 - RNA, 19 nt, Artificial Sequence
  Description of Artificial Sequence: Synthetic oligonucleotide
auaaaggggauauuuacgg

SEQ ID NO: 3255409 - RNA, 19 nt, Artificial Sequence
  Description of Artificial Sequence: Synthetic oligonucleotide
uuguuuaauaaauuaagug

SEQ ID NO: 3255410 - RNA, 19 nt, Artificial Sequence
  Description of Artificial Sequence: Synthetic oligonucleotide
augacugaaaguuagcagg

SEQ ID NO: 3255411 - RNA, 19 nt, Artificial Sequence
  Description of Artificial Sequence: Synthetic oligonucleotide
auuauugucaagcagacau

SEQ ID NO: 3255412 - RNA, 19 nt, Artificial Sequence
  Description of Artificial Sequence: Synthetic oligonucleotide
agagaauucucuuugaugu

SEQ ID NO: 3255413 - RNA, 19 nt, Artificial Sequence
  Description of Artificial Sequence: Synthetic oligonucleotide
uuuacguauuaacucacgg

SEQ ID NO: 3255414 - RNA, 19 nt, Artificial Sequence
  Description of Artificial Sequence: Synthetic oligonucleotide
uauuuuacguauuaacuca

SEQ ID NO: 3255415 - RNA, 19 nt, Artificial Sequence
  Description of Artificial Sequence: Synthetic oligonucleotide
acggauauuauugucaagc

SEQ ID NO: 3255416 - RNA, 19 nt, Artificial Sequence
  Description of Artificial Sequence: Synthetic oligonucleotide
aagauuucuauaaugaaca

SEQ ID NO: 3255417 - RNA, 19 nt, Artificial Sequence
  Description of Artificial Sequence: Synthetic oligonucleotide
uuucuaagcguucagcuug

SEQ ID NO: 3255418 - RNA, 19 nt, Artificial Sequence
  Description of Artificial Sequence: Synthetic oligonucleotide
aauaaaggggauauuuacg

SEQ ID NO: 3255419 - RNA, 19 nt, Artificial Sequence
  Description of Artificial Sequence: Synthetic oligonucleotide
uucuauaaugaacauauau

SEQ ID NO: 3255420 - RNA, 19 nt, Artificial Sequence
  Description of Artificial Sequence: Synthetic oligonucleotide
uuauacuuuuaaaugguca

SEQ ID NO: 3255421 - RNA, 19 nt, Artificial Sequence
  Description of Artificial Sequence: Synthetic oligonucleotide
aauucauuaugucuucucu

SEQ ID NO: 3255422 - RNA, 19 nt, Artificial Sequence
  Description of Artificial Sequence: Synthetic oligonucleotide
agaguucucuuucucagcc

SEQ ID NO: 3255423 - RNA, 19 nt, Artificial Sequence
  Description of Artificial Sequence: Synthetic oligonucleotide
aauguaugcucauagcgga

SEQ ID NO: 3255424 - RNA, 19 nt, Artificial Sequence
  Description of Artificial Sequence: Synthetic oligonucleotide
ucagcuuguaguuuagccg

SEQ ID NO: 3255425 - RNA, 19 nt, Artificial Sequence
  Description of Artificial Sequence: Synthetic oligonucleotide
aaaagguaaagauuucuau

SEQ ID NO: 3255426 - RNA, 19 nt, Artificial Sequence
  Description of Artificial Sequence: Synthetic oligonucleotide
ucuaauucuucuuucuuug

SEQ ID NO: 3255427 - RNA, 19 nt, Artificial Sequence
  Description of Artificial Sequence: Synthetic oligonucleotide
auauuuacggauauuauug

SEQ ID NO: 3255428 - RNA, 19 nt, Artificial Sequence
  Description of Artificial Sequence: Synthetic oligonucleotide
caauuucugaagcaaaagg

SEQ ID NO: 3255429 - RNA, 19 nt, Artificial Sequence
  Description of Artificial Sequence: Synthetic oligonucleotide
uucgaaauucauuaugucu

SEQ ID NO: 3255430 - RNA, 19 nt, Artificial Sequence
  Description of Artificial Sequence: Synthetic oligonucleotide
uuuugucuauuuaacaccu

SEQ ID NO: 3255431 - RNA, 19 nt, Artificial Sequence
  Description of Artificial Sequence: Synthetic oligonucleotide
aaauuaagugcacagcuuu

SEQ ID NO: 3255432 - RNA, 19 nt, Artificial Sequence
  Description of Artificial Sequence: Synthetic oligonucleotide
aaugccacauguuaaacuu

SEQ ID NO: 3255433 - RNA, 19 nt, Artificial Sequence
  Description of Artificial Sequence: Synthetic oligonucleotide
uaaagcaucucaaugccac

SEQ ID NO: 3255434 - RNA, 19 nt, Artificial Sequence
  Description of Artificial Sequence: Synthetic oligonucleotide
acgaauaaacucuucuuuc

SEQ ID NO: 3255435 - RNA, 19 nt, Artificial Sequence
  Description of Artificial Sequence: Synthetic oligonucleotide
auaacuucuguuuacaaua

SEQ ID NO: 3255436 - RNA, 19 nt, Artificial Sequence
  Description of Artificial Sequence: Synthetic oligonucleotide
uuuaaucucuccaccaugu

SEQ ID NO: 3255437 - RNA, 19 nt, Artificial Sequence
  Description of Artificial Sequence: Synthetic oligonucleotide
ugaauuucggcauucuugu

SEQ ID NO: 3255438 - RNA, 19 nt, Artificial Sequence
  Description of Artificial Sequence: Synthetic oligonucleotide
uugagaauuucauugucug

SEQ ID NO: 3255439 - RNA, 19 nt, Artificial Sequence
  Description of Artificial Sequence: Synthetic oligonucleotide
gaugacugaaaguuagcag

SEQ ID NO: 3255440 - RNA, 19 nt, Artificial Sequence
  Description of Artificial Sequence: Synthetic oligonucleotide
cauaugaggaggaaaggag

SEQ ID NO: 3255441 - RNA, 19 nt, Artificial Sequence
  Description of Artificial Sequence: Synthetic oligonucleotide
uuugaagccuuguauauuc

SEQ ID NO: 3255442 - RNA, 19 nt, Artificial Sequence
  Description of Artificial Sequence: Synthetic oligonucleotide
auuagcuugauuguagcuc

SEQ ID NO: 3255443 - RNA, 19 nt, Artificial Sequence
  Description of Artificial Sequence: Synthetic oligonucleotide
cuucaaauggaacauuuug

SEQ ID NO: 3255444 - RNA, 19 nt, Artificial Sequence
  Description of Artificial Sequence: Synthetic oligonucleotide
aaaguuagcaggauggagu

SEQ ID NO: 3255445 - RNA, 19 nt, Artificial Sequence
  Description of Artificial Sequence: Synthetic oligonucleotide
ucuauuuaacaccugguuu

SEQ ID NO: 3255446 - RNA, 19 nt, Artificial Sequence
  Description of Artificial Sequence: Synthetic oligonucleotide
ucaguucagaauuuucaag

SEQ ID NO: 3255447 - RNA, 19 nt, Artificial Sequence
  Description of Artificial Sequence: Synthetic oligonucleotide
ucuguauucacaauuuguu

SEQ ID NO: 3255448 - RNA, 19 nt, Artificial Sequence
  Description of Artificial Sequence: Synthetic oligonucleotide
auuuacggauauuauuguc

SEQ ID NO: 3255449 - RNA, 19 nt, Artificial Sequence
  Description of Artificial Sequence: Synthetic oligonucleotide
cuguuuacaauaaagggga

SEQ ID NO: 3255450 - RNA, 19 nt, Artificial Sequence
  Description of Artificial Sequence: Synthetic oligonucleotide
uuaacucuucaaaggaagc

SEQ ID NO: 3255451 - RNA, 19 nt, Artificial Sequence
  Description of Artificial Sequence: Synthetic oligonucleotide
ucuugugggaucaacacua

SEQ ID NO: 3255452 - RNA, 19 nt, Artificial Sequence
  Description of Artificial Sequence: Synthetic oligonucleotide
ucagcauuugguuugaauu

SEQ ID NO: 3255453 - RNA, 19 nt, Artificial Sequence
  Description of Artificial Sequence: Synthetic oligonucleotide
guuuuaaccuaauacucug

SEQ ID NO: 3255454 - RNA, 19 nt, Artificial Sequence
  Description of Artificial Sequence: Synthetic oligonucleotide
uugaauuucuggcuuugcc

SEQ ID NO: 3255455 - RNA, 19 nt, Artificial Sequence
  Description of Artificial Sequence: Synthetic oligonucleotide
ugaauuucuggcuuugccu

SEQ ID NO: 3255456 - RNA, 19 nt, Artificial Sequence
  Description of Artificial Sequence: Synthetic oligonucleotide
uuguuuuaaucucuccacc

SEQ ID NO: 3255457 - RNA, 19 nt, Artificial Sequence
  Description of Artificial Sequence: Synthetic oligonucleotide
uuuaaccuaauacucugaa

SEQ ID NO: 3255458 - RNA, 19 nt, Artificial Sequence
  Description of Artificial Sequence: Synthetic oligonucleotide
aauucuuguuguauuuggg

SEQ ID NO: 3255459 - RNA, 19 nt, Artificial Sequence
  Description of Artificial Sequence: Synthetic oligonucleotide
guagagagaauucucuuug

SEQ ID NO: 3255460 - RNA, 19 nt, Artificial Sequence
  Description of Artificial Sequence: Synthetic oligonucleotide
uuaaccuaauacucugaag

SEQ ID NO: 3255461 - RNA, 19 nt, Artificial Sequence
  Description of Artificial Sequence: Synthetic oligonucleotide
gaauaaacucuucuuucug

SEQ ID NO: 3255462 - RNA, 19 nt, Artificial Sequence
  Description of Artificial Sequence: Synthetic oligonucleotide
agcggagcuuauuauauuc

SEQ ID NO: 3255463 - RNA, 19 nt, Artificial Sequence
  Description of Artificial Sequence: Synthetic oligonucleotide
uacuuuuaaauggucaucu

SEQ ID NO: 3255464 - RNA, 19 nt, Artificial Sequence
  Description of Artificial Sequence: Synthetic oligonucleotide
uguaguuuagccgacugcu

SEQ ID NO: 3255465 - RNA, 19 nt, Artificial Sequence
  Description of Artificial Sequence: Synthetic oligonucleotide
uauaacuucuguuuacaau

SEQ ID NO: 3255466 - RNA, 19 nt, Artificial Sequence
  Description of Artificial Sequence: Synthetic oligonucleotide
auucauuaugucuucucug

SEQ ID NO: 3255467 - RNA, 19 nt, Artificial Sequence
  Description of Artificial Sequence: Synthetic oligonucleotide
uucuuugccuccaagacuu

SEQ ID NO: 3255468 - RNA, 19 nt, Artificial Sequence
  Description of Artificial Sequence: Synthetic oligonucleotide
aaauucugacuugagaaau

SEQ ID NO: 3255469 - RNA, 19 nt, Artificial Sequence
  Description of Artificial Sequence: Synthetic oligonucleotide
uucuagcucacgauuaaac

SEQ ID NO: 3255470 - RNA, 19 nt, Artificial Sequence
  Description of Artificial Sequence: Synthetic oligonucleotide
uuacguauuaacucacggu

SEQ ID NO: 3255471 - RNA, 19 nt, Artificial Sequence
  Description of Artificial Sequence: Synthetic oligonucleotide
agucucuucaauuuguuuu

SEQ ID NO: 3255472 - RNA, 19 nt, Artificial Sequence
  Description of Artificial Sequence: Synthetic oligonucleotide
gcuuuauugaauuucuggc

SEQ ID NO: 3255473 - RNA, 19 nt, Artificial Sequence
  Description of Artificial Sequence: Synthetic oligonucleotide
cuuguauauucuucaaaug

SEQ ID NO: 3255474 - RNA, 19 nt, Artificial Sequence
  Description of Artificial Sequence: Synthetic oligonucleotide
uucaacuucuaguugcacu

SEQ ID NO: 3255475 - RNA, 19 nt, Artificial Sequence
  Description of Artificial Sequence: Synthetic oligonucleotide
aaggaauucaaaauguaua

SEQ ID NO: 3255476 - RNA, 19 nt, Artificial Sequence
  Description of Artificial Sequence: Synthetic oligonucleotide
uucucuaagucugauaauc

SEQ ID NO: 3255477 - RNA, 19 nt, Artificial Sequence
  Description of Artificial Sequence: Synthetic oligonucleotide
uuucuuugccuccaagacu

SEQ ID NO: 3255478 - RNA, 19 nt, Artificial Sequence
  Description of Artificial Sequence: Synthetic oligonucleotide
agcucuaauucauauuucu

SEQ ID NO: 3255479 - RNA, 19 nt, Artificial Sequence
  Description of Artificial Sequence: Synthetic oligonucleotide
ugaaucuuauuccuuucuc

SEQ ID NO: 3255480 - RNA, 19 nt, Artificial Sequence
  Description of Artificial Sequence: Synthetic oligonucleotide
gaacuauugcugaugacug

SEQ ID NO: 3255481 - RNA, 19 nt, Artificial Sequence
  Description of Artificial Sequence: Synthetic oligonucleotide
cugacuugagaaauguaug

SEQ ID NO: 3255482 - RNA, 19 nt, Artificial Sequence
  Description of Artificial Sequence: Synthetic oligonucleotide
uugaaucuuauuccuuucu

SEQ ID NO: 3255483 - RNA, 19 nt, Artificial Sequence
  Description of Artificial Sequence: Synthetic oligonucleotide
uuucuggugcucaaauucu

SEQ ID NO: 3255484 - RNA, 19 nt, Artificial Sequence
  Description of Artificial Sequence: Synthetic oligonucleotide
uuagacuucgaaauucauu

SEQ ID NO: 3255485 - RNA, 19 nt, Artificial Sequence
  Description of Artificial Sequence: Synthetic oligonucleotide
ugaugacugaaaguuagca

SEQ ID NO: 3255486 - RNA, 19 nt, Artificial Sequence
  Description of Artificial Sequence: Synthetic oligonucleotide
uugauuguagcuccuuuuc

SEQ ID NO: 3255487 - RNA, 19 nt, Artificial Sequence
  Description of Artificial Sequence: Synthetic oligonucleotide
ucaacuucuaguugcacuu

SEQ ID NO: 3255488 - RNA, 19 nt, Artificial Sequence
  Description of Artificial Sequence: Synthetic oligonucleotide
cugauaaucuguucucaag

SEQ ID NO: 3255489 - RNA, 19 nt, Artificial Sequence
  Description of Artificial Sequence: Synthetic oligonucleotide
gaaaguuagcaggauggag

SEQ ID NO: 3255490 - RNA, 19 nt, Artificial Sequence
  Description of Artificial Sequence: Synthetic oligonucleotide
auuuuacguauuaacucac

SEQ ID NO: 3255491 - RNA, 19 nt, Artificial Sequence
  Description of Artificial Sequence: Synthetic oligonucleotide
uuacggauauuauugucaa

SEQ ID NO: 3255492 - RNA, 19 nt, Artificial Sequence
  Description of Artificial Sequence: Synthetic oligonucleotide
uguauauauuuuaggcaaa

SEQ ID NO: 3255493 - RNA, 19 nt, Artificial Sequence
  Description of Artificial Sequence: Synthetic oligonucleotide
ucuuucuagcucacgauua

SEQ ID NO: 3255494 - RNA, 19 nt, Artificial Sequence
  Description of Artificial Sequence: Synthetic oligonucleotide
uuucgaaguagagagaauu

SEQ ID NO: 3255495 - RNA, 19 nt, Artificial Sequence
  Description of Artificial Sequence: Synthetic oligonucleotide
cauugucugacugcaaucc

SEQ ID NO: 3255496 - RNA, 19 nt, Artificial Sequence
  Description of Artificial Sequence: Synthetic oligonucleotide
gauaaccuucuucuuuggc

SEQ ID NO: 3255497 - RNA, 19 nt, Artificial Sequence
  Description of Artificial Sequence: Synthetic oligonucleotide
cucuaaaccuuucaauuuc

SEQ ID NO: 3255498 - RNA, 19 nt, Artificial Sequence
  Description of Artificial Sequence: Synthetic oligonucleotide
uuagccgacugcuuuucag

SEQ ID NO: 3255499 - RNA, 19 nt, Artificial Sequence
  Description of Artificial Sequence: Synthetic oligonucleotide
uucgaaguagagagaauuc

SEQ ID NO: 3255500 - RNA, 19 nt, Artificial Sequence
  Description of Artificial Sequence: Synthetic oligonucleotide
ucuucaucaaguguccgga

SEQ ID NO: 3255501 - RNA, 19 nt, Artificial Sequence
  Description of Artificial Sequence: Synthetic oligonucleotide
ccuaauacucugaagcucc

SEQ ID NO: 3255502 - RNA, 19 nt, Artificial Sequence
  Description of Artificial Sequence: Synthetic oligonucleotide
acugauuugcuguuucagu

SEQ ID NO: 3255503 - RNA, 19 nt, Artificial Sequence
  Description of Artificial Sequence: Synthetic oligonucleotide
aggagauccaaguuccucu

SEQ ID NO: 3255504 - RNA, 19 nt, Artificial Sequence
  Description of Artificial Sequence: Synthetic oligonucleotide
aucaaguguccggaaacgc

SEQ ID NO: 3255505 - RNA, 19 nt, Artificial Sequence
  Description of Artificial Sequence: Synthetic oligonucleotide
auuucauuaacauauacag

SEQ ID NO: 3255506 - RNA, 19 nt, Artificial Sequence
  Description of Artificial Sequence: Synthetic oligonucleotide
aauaucaacaugcauugac

SEQ ID NO: 3255507 - RNA, 19 nt, Artificial Sequence
  Description of Artificial Sequence: Synthetic oligonucleotide
uucauuaacauauacagug

SEQ ID NO: 3255508 - RNA, 19 nt, Artificial Sequence
  Description of Artificial Sequence: Synthetic oligonucleotide
aaaaugacuauuuacauaa

SEQ ID NO: 3255509 - RNA, 19 nt, Artificial Sequence
  Description of Artificial Sequence: Synthetic oligonucleotide
aacauauacagugucaacc

SEQ ID NO: 3255510 - RNA, 19 nt, Artificial Sequence
  Description of Artificial Sequence: Synthetic oligonucleotide
uuugaugcaauaaauacug

SEQ ID NO: 3255511 - RNA, 19 nt, Artificial Sequence
  Description of Artificial Sequence: Synthetic oligonucleotide
aacauuguuaaaaugcugc

SEQ ID NO: 3255512 - RNA, 19 nt, Artificial Sequence
  Description of Artificial Sequence: Synthetic oligonucleotide
caugguaauaucaacaugc

SEQ ID NO: 3255513 - RNA, 19 nt, Artificial Sequence
  Description of Artificial Sequence: Synthetic oligonucleotide
aaagaaaugaaaucugcug

SEQ ID NO: 3255514 - RNA, 19 nt, Artificial Sequence
  Description of Artificial Sequence: Synthetic oligonucleotide
ucuauaaugguacagaaua

SEQ ID NO: 3255515 - RNA, 19 nt, Artificial Sequence
  Description of Artificial Sequence: Synthetic oligonucleotide
aaaugcugcaaacuauugc

SEQ ID NO: 3255516 - RNA, 19 nt, Artificial Sequence
  Description of Artificial Sequence: Synthetic oligonucleotide
cuauuuacauaauaaauag

SEQ ID NO: 3255517 - RNA, 19 nt, Artificial Sequence
  Description of Artificial Sequence: Synthetic oligonucleotide
ugugguacauauuugaugc

SEQ ID NO: 3255518 - RNA, 19 nt, Artificial Sequence
  Description of Artificial Sequence: Synthetic oligonucleotide
gaugggagaaacuagauac

SEQ ID NO: 3255519 - RNA, 19 nt, Artificial Sequence
  Description of Artificial Sequence: Synthetic oligonucleotide
aaugaaaucugcugaacag

SEQ ID NO: 3255520 - RNA, 19 nt, Artificial Sequence
  Description of Artificial Sequence: Synthetic oligonucleotide
aauacaguauauuaucugu

SEQ ID NO: 3255521 - RNA, 19 nt, Artificial Sequence
  Description of Artificial Sequence: Synthetic oligonucleotide
aaaucugcugaacaguuuc

SEQ ID NO: 3255522 - RNA, 19 nt, Artificial Sequence
  Description of Artificial Sequence: Synthetic oligonucleotide
aauaaauagcauuucauua

SEQ ID NO: 3255523 - RNA, 19 nt, Artificial Sequence
  Description of Artificial Sequence: Synthetic oligonucleotide
aaugcugcaaacuauugcu

SEQ ID NO: 3255524 - RNA, 19 nt, Artificial Sequence
  Description of Artificial Sequence: Synthetic oligonucleotide
uauuugaugcaauaaauac

SEQ ID NO: 3255525 - RNA, 19 nt, Artificial Sequence
  Description of Artificial Sequence: Synthetic oligonucleotide
aagaaaugaaaucugcuga

SEQ ID NO: 3255526 - RNA, 19 nt, Artificial Sequence
  Description of Artificial Sequence: Synthetic oligonucleotide
aaauacugugcuuagguca

SEQ ID NO: 3255527 - RNA, 19 nt, Artificial Sequence
  Description of Artificial Sequence: Synthetic oligonucleotide
aaugguacagaauacagua

SEQ ID NO: 3255528 - RNA, 19 nt, Artificial Sequence
  Description of Artificial Sequence: Synthetic oligonucleotide
auuuacauaauaaauagca

SEQ ID NO: 3255529 - RNA, 19 nt, Artificial Sequence
  Description of Artificial Sequence: Synthetic oligonucleotide
uaugguuucucaugaaugg

SEQ ID NO: 3255530 - RNA, 19 nt, Artificial Sequence
  Description of Artificial Sequence: Synthetic oligonucleotide
aauagcauuucauuaacau

SEQ ID NO: 3255531 - RNA, 19 nt, Artificial Sequence
  Description of Artificial Sequence: Synthetic oligonucleotide
uguaaagaaaugaaaucug

SEQ ID NO: 3255532 - RNA, 19 nt, Artificial Sequence
  Description of Artificial Sequence: Synthetic oligonucleotide
uagcauuucauuaacauau

SEQ ID NO: 3255533 - RNA, 19 nt, Artificial Sequence
  Description of Artificial Sequence: Synthetic oligonucleotide
ugauguaaagaaaugaaau

SEQ ID NO: 3255534 - RNA, 19 nt, Artificial Sequence
  Description of Artificial Sequence: Synthetic oligonucleotide
uauuuguuugcucaaacgu

SEQ ID NO: 3255535 - RNA, 19 nt, Artificial Sequence
  Description of Artificial Sequence: Synthetic oligonucleotide
ucaaacgugcaccacagag

SEQ ID NO: 3255536 - RNA, 19 nt, Artificial Sequence
  Description of Artificial Sequence: Synthetic oligonucleotide
uuauuuguuugcucaaacg

SEQ ID NO: 3255537 - RNA, 19 nt, Artificial Sequence
  Description of Artificial Sequence: Synthetic oligonucleotide
uuuguuugcucaaacgugc

SEQ ID NO: 3255538 - RNA, 19 nt, Artificial Sequence
  Description of Artificial Sequence: Synthetic oligonucleotide
aaaugaaaucugcugaaca

SEQ ID NO: 3255539 - RNA, 19 nt, Artificial Sequence
  Description of Artificial Sequence: Synthetic oligonucleotide
uccacacuaucuauaaugg

SEQ ID NO: 3255540 - RNA, 19 nt, Artificial Sequence
  Description of Artificial Sequence: Synthetic oligonucleotide
ucaugaaugguuuucugag

SEQ ID NO: 3255541 - RNA, 19 nt, Artificial Sequence
  Description of Artificial Sequence: Synthetic oligonucleotide
uacaguauauuaucugugg

SEQ ID NO: 3255542 - RNA, 19 nt, Artificial Sequence
  Description of Artificial Sequence: Synthetic oligonucleotide
auuauuuguuugcucaaac

SEQ ID NO: 3255543 - RNA, 19 nt, Artificial Sequence
  Description of Artificial Sequence: Synthetic oligonucleotide
ugcuuaaugauguaaagaa

SEQ ID NO: 3255544 - RNA, 19 nt, Artificial Sequence
  Description of Artificial Sequence: Synthetic oligonucleotide
guaauaucaacaugcauug

SEQ ID NO: 3255545 - RNA, 19 nt, Artificial Sequence
  Description of Artificial Sequence: Synthetic oligonucleotide
uuaaugauguaaagaaaug

SEQ ID NO: 3255546 - RNA, 19 nt, Artificial Sequence
  Description of Artificial Sequence: Synthetic oligonucleotide
gaugcaauaaauacugugc

SEQ ID NO: 3255547 - RNA, 19 nt, Artificial Sequence
  Description of Artificial Sequence: Synthetic oligonucleotide
uacauaauaaauagcauuu

SEQ ID NO: 3255548 - RNA, 19 nt, Artificial Sequence
  Description of Artificial Sequence: Synthetic oligonucleotide
auaaauacugugcuuaggu

SEQ ID NO: 3255549 - RNA, 19 nt, Artificial Sequence
  Description of Artificial Sequence: Synthetic oligonucleotide
gauguaaagaaaugaaauc

SEQ ID NO: 3255550 - RNA, 19 nt, Artificial Sequence
  Description of Artificial Sequence: Synthetic oligonucleotide
uauuuacauaauaaauagc

SEQ ID NO: 3255551 - RNA, 19 nt, Artificial Sequence
  Description of Artificial Sequence: Synthetic oligonucleotide
aguaaaaugacuauuuaca

SEQ ID NO: 3255552 - RNA, 19 nt, Artificial Sequence
  Description of Artificial Sequence: Synthetic oligonucleotide
agaaacuagauaccgcaac

SEQ ID NO: 3255553 - RNA, 19 nt, Artificial Sequence
  Description of Artificial Sequence: Synthetic oligonucleotide
ucaacaugcauugacagca

SEQ ID NO: 3255554 - RNA, 19 nt, Artificial Sequence
  Description of Artificial Sequence: Synthetic oligonucleotide
uacagugucaaccuugcug

SEQ ID NO: 3255555 - RNA, 19 nt, Artificial Sequence
  Description of Artificial Sequence: Synthetic oligonucleotide
guuuccuugacuuagccac

SEQ ID NO: 3255556 - RNA, 19 nt, Artificial Sequence
  Description of Artificial Sequence: Synthetic oligonucleotide
uuacauaauaaauagcauu

SEQ ID NO: 3255557 - RNA, 19 nt, Artificial Sequence
  Description of Artificial Sequence: Synthetic oligonucleotide
uaaagaaaugaaaucugcu

SEQ ID NO: 3255558 - RNA, 19 nt, Artificial Sequence
  Description of Artificial Sequence: Synthetic oligonucleotide
uugacuuagccacugaccu

SEQ ID NO: 3255559 - RNA, 19 nt, Artificial Sequence
  Description of Artificial Sequence: Synthetic oligonucleotide
auaaauagcauuucauuaa

SEQ ID NO: 3255560 - RNA, 19 nt, Artificial Sequence
  Description of Artificial Sequence: Synthetic oligonucleotide
ugaugcaauaaauacugug

SEQ ID NO: 3255561 - RNA, 19 nt, Artificial Sequence
  Description of Artificial Sequence: Synthetic oligonucleotide
uauauuaucuguggaaagc

SEQ ID NO: 3255562 - RNA, 19 nt, Artificial Sequence
  Description of Artificial Sequence: Synthetic oligonucleotide
aacaugguaauaucaacau

SEQ ID NO: 3255563 - RNA, 19 nt, Artificial Sequence
  Description of Artificial Sequence: Synthetic oligonucleotide
uaucaacaugcauugacag

SEQ ID NO: 3255564 - RNA, 19 nt, Artificial Sequence
  Description of Artificial Sequence: Synthetic oligonucleotide
ccaaacauuguuaaaaugc

SEQ ID NO: 3255565 - RNA, 19 nt, Artificial Sequence
  Description of Artificial Sequence: Synthetic oligonucleotide
auccacacuaucuauaaug

SEQ ID NO: 3255566 - RNA, 19 nt, Artificial Sequence
  Description of Artificial Sequence: Synthetic oligonucleotide
gaauacaguauauuaucug

SEQ ID NO: 3255567 - RNA, 19 nt, Artificial Sequence
  Description of Artificial Sequence: Synthetic oligonucleotide
auguaaagaaaugaaaucu

SEQ ID NO: 3255568 - RNA, 19 nt, Artificial Sequence
  Description of Artificial Sequence: Synthetic oligonucleotide
uuucuugugguacauauuu

SEQ ID NO: 3255569 - RNA, 19 nt, Artificial Sequence
  Description of Artificial Sequence: Synthetic oligonucleotide
gaguaaaaugacuauuuac

SEQ ID NO: 3255570 - RNA, 19 nt, Artificial Sequence
  Description of Artificial Sequence: Synthetic oligonucleotide
auuguuaaaaugcugcaaa

SEQ ID NO: 3255571 - RNA, 19 nt, Artificial Sequence
  Description of Artificial Sequence: Synthetic oligonucleotide
uaaauagcauuucauuaac

SEQ ID NO: 3255572 - RNA, 19 nt, Artificial Sequence
  Description of Artificial Sequence: Synthetic oligonucleotide
uaaugauguaaagaaauga

SEQ ID NO: 3255573 - RNA, 19 nt, Artificial Sequence
  Description of Artificial Sequence: Synthetic oligonucleotide
aauaaauacugugcuuagg

SEQ ID NO: 3255574 - RNA, 19 nt, Artificial Sequence
  Description of Artificial Sequence: Synthetic oligonucleotide
aacaguuuccuugacuuag

SEQ ID NO: 3255575 - RNA, 19 nt, Artificial Sequence
  Description of Artificial Sequence: Synthetic oligonucleotide
uaauaaauagcauuucauu

SEQ ID NO: 3255576 - RNA, 19 nt, Artificial Sequence
  Description of Artificial Sequence: Synthetic oligonucleotide
ugcaccacagaguaaaaug

SEQ ID NO: 3255577 - RNA, 19 nt, Artificial Sequence
  Description of Artificial Sequence: Synthetic oligonucleotide
acuagauaccgcaacaugg

SEQ ID NO: 3255578 - RNA, 19 nt, Artificial Sequence
  Description of Artificial Sequence: Synthetic oligonucleotide
ugugcuuaggucauuauuu

SEQ ID NO: 3255579 - RNA, 19 nt, Artificial Sequence
  Description of Artificial Sequence: Synthetic oligonucleotide
uacagaauacaguauauua

SEQ ID NO: 3255580 - RNA, 19 nt, Artificial Sequence
  Description of Artificial Sequence: Synthetic oligonucleotide
aucaacaugcauugacagc

SEQ ID NO: 3255581 - RNA, 19 nt, Artificial Sequence
  Description of Artificial Sequence: Synthetic oligonucleotide
aaugacuauuuacauaaua

SEQ ID NO: 3255582 - RNA, 19 nt, Artificial Sequence
  Description of Artificial Sequence: Synthetic oligonucleotide
uauugcuuaaugauguaaa

SEQ ID NO: 3255583 - RNA, 19 nt, Artificial Sequence
  Description of Artificial Sequence: Synthetic oligonucleotide
augguuuucugagugaugg

SEQ ID NO: 3255584 - RNA, 19 nt, Artificial Sequence
  Description of Artificial Sequence: Synthetic oligonucleotide
uuuacauaauaaauagcau

SEQ ID NO: 3255585 - RNA, 19 nt, Artificial Sequence
  Description of Artificial Sequence: Synthetic oligonucleotide
aaugauguaaagaaaugaa

SEQ ID NO: 3255586 - RNA, 19 nt, Artificial Sequence
  Description of Artificial Sequence: Synthetic oligonucleotide
aacuauugcuuaaugaugu

SEQ ID NO: 3255587 - RNA, 19 nt, Artificial Sequence
  Description of Artificial Sequence: Synthetic oligonucleotide
ucuugugguacauauuuga

SEQ ID NO: 3255588 - RNA, 19 nt, Artificial Sequence
  Description of Artificial Sequence: Synthetic oligonucleotide
auugacagcauccacacua

SEQ ID NO: 3255589 - RNA, 19 nt, Artificial Sequence
  Description of Artificial Sequence: Synthetic oligonucleotide
uauaaugguacagaauaca

SEQ ID NO: 3255590 - RNA, 19 nt, Artificial Sequence
  Description of Artificial Sequence: Synthetic oligonucleotide
auugcuuaaugauguaaag

SEQ ID NO: 3255591 - RNA, 19 nt, Artificial Sequence
  Description of Artificial Sequence: Synthetic oligonucleotide
uuaaaaugcugcaaacuau

SEQ ID NO: 3255592 - RNA, 19 nt, Artificial Sequence
  Description of Artificial Sequence: Synthetic oligonucleotide
uauacagugucaaccuugc

SEQ ID NO: 3255593 - RNA, 19 nt, Artificial Sequence
  Description of Artificial Sequence: Synthetic oligonucleotide
aaagcuugcacucuacauu

SEQ ID NO: 3255594 - RNA, 19 nt, Artificial Sequence
  Description of Artificial Sequence: Synthetic oligonucleotide
ugacuauuuacauaauaaa

SEQ ID NO: 3255595 - RNA, 19 nt, Artificial Sequence
  Description of Artificial Sequence: Synthetic oligonucleotide
aacuagauaccgcaacaug

SEQ ID NO: 3255596 - RNA, 19 nt, Artificial Sequence
  Description of Artificial Sequence: Synthetic oligonucleotide
augaaugguuuucugagug

SEQ ID NO: 3255597 - RNA, 19 nt, Artificial Sequence
  Description of Artificial Sequence: Synthetic oligonucleotide
ugcauugacagcauccaca

SEQ ID NO: 3255598 - RNA, 19 nt, Artificial Sequence
  Description of Artificial Sequence: Synthetic oligonucleotide
ugaacaguuuccuugacuu

SEQ ID NO: 3255599 - RNA, 19 nt, Artificial Sequence
  Description of Artificial Sequence: Synthetic oligonucleotide
acagugucaaccuugcuga

SEQ ID NO: 3255600 - RNA, 19 nt, Artificial Sequence
  Description of Artificial Sequence: Synthetic oligonucleotide
cagaauacaguauauuauc

SEQ ID NO: 3255601 - RNA, 19 nt, Artificial Sequence
  Description of Artificial Sequence: Synthetic oligonucleotide
aaacuauugcuuaaugaug

SEQ ID NO: 3255602 - RNA, 19 nt, Artificial Sequence
  Description of Artificial Sequence: Synthetic oligonucleotide
uuucauuaacauauacagu

SEQ ID NO: 3255603 - RNA, 19 nt, Artificial Sequence
  Description of Artificial Sequence: Synthetic oligonucleotide
acacuaucuauaaugguac

SEQ ID NO: 3255604 - RNA, 19 nt, Artificial Sequence
  Description of Artificial Sequence: Synthetic oligonucleotide
uuaucuguggaaagcuugc

SEQ ID NO: 3255605 - RNA, 19 nt, Artificial Sequence
  Description of Artificial Sequence: Synthetic oligonucleotide
uucacgauguuuaagaagg

SEQ ID NO: 3255606 - RNA, 19 nt, Artificial Sequence
  Description of Artificial Sequence: Synthetic oligonucleotide
gaugaagaaaugcagaggc

SEQ ID NO: 3255607 - RNA, 19 nt, Artificial Sequence
  Description of Artificial Sequence: Synthetic oligonucleotide
ugugccauaguuaaggacc

SEQ ID NO: 3255608 - RNA, 19 nt, Artificial Sequence
  Description of Artificial Sequence: Synthetic oligonucleotide
aaaaguguaauagugucuc

SEQ ID NO: 3255609 - RNA, 19 nt, Artificial Sequence
  Description of Artificial Sequence: Synthetic oligonucleotide
aacuucuucaccaagggac

SEQ ID NO: 3255610 - RNA, 19 nt, Artificial Sequence
  Description of Artificial Sequence: Synthetic oligonucleotide
agaaagauagcucuugguc

SEQ ID NO: 3255611 - RNA, 19 nt, Artificial Sequence
  Description of Artificial Sequence: Synthetic oligonucleotide
ucaaguuugaaguucacga

SEQ ID NO: 3255612 - RNA, 19 nt, Artificial Sequence
  Description of Artificial Sequence: Synthetic oligonucleotide
uuuaagaaggcaaucccag

SEQ ID NO: 3255613 - RNA, 19 nt, Artificial Sequence
  Description of Artificial Sequence: Synthetic oligonucleotide
aguugguucuguuagaaag

SEQ ID NO: 3255614 - RNA, 19 nt, Artificial Sequence
  Description of Artificial Sequence: Synthetic oligonucleotide
uaugugguccuccugaacc

SEQ ID NO: 3255615 - RNA, 19 nt, Artificial Sequence
  Description of Artificial Sequence: Synthetic oligonucleotide
uugaugaagaaaugcagag

SEQ ID NO: 3255616 - RNA, 19 nt, Artificial Sequence
  Description of Artificial Sequence: Synthetic oligonucleotide
uuagaaagauagcucuugg

SEQ ID NO: 3255617 - RNA, 19 nt, Artificial Sequence
  Description of Artificial Sequence: Synthetic oligonucleotide
uguuuaagaaggcaauccc

SEQ ID NO: 3255618 - RNA, 19 nt, Artificial Sequence
  Description of Artificial Sequence: Synthetic oligonucleotide
aaguuugaaguucacgaug

SEQ ID NO: 3255619 - RNA, 19 nt, Artificial Sequence
  Description of Artificial Sequence: Synthetic oligonucleotide
uuguccaggaggaaggagg

SEQ ID NO: 3255620 - RNA, 19 nt, Artificial Sequence
  Description of Artificial Sequence: Synthetic oligonucleotide
auguuuaagaaggcaaucc

SEQ ID NO: 3255621 - RNA, 19 nt, Artificial Sequence
  Description of Artificial Sequence: Synthetic oligonucleotide
aaguguaauagugucucac

SEQ ID NO: 3255622 - RNA, 19 nt, Artificial Sequence
  Description of Artificial Sequence: Synthetic oligonucleotide
uaguuaaggaccaacaguu

SEQ ID NO: 3255623 - RNA, 19 nt, Artificial Sequence
  Description of Artificial Sequence: Synthetic oligonucleotide
cuugaguugguucuguuag

SEQ ID NO: 3255624 - RNA, 19 nt, Artificial Sequence
  Description of Artificial Sequence: Synthetic oligonucleotide
uguaauagugucucacugc

SEQ ID NO: 3255625 - RNA, 19 nt, Artificial Sequence
  Description of Artificial Sequence: Synthetic oligonucleotide
accaggugguuacugaugc

SEQ ID NO: 3255626 - RNA, 19 nt, Artificial Sequence
  Description of Artificial Sequence: Synthetic oligonucleotide
gaaagauagcucuugguca

SEQ ID NO: 3255627 - RNA, 19 nt, Artificial Sequence
  Description of Artificial Sequence: Synthetic oligonucleotide
auaguuaaggaccaacagu

SEQ ID NO: 3255628 - RNA, 19 nt, Artificial Sequence
  Description of Artificial Sequence: Synthetic oligonucleotide
uugaaguucacgauguuua

SEQ ID NO: 3255629 - RNA, 19 nt, Artificial Sequence
  Description of Artificial Sequence: Synthetic oligonucleotide
ucuguuagaaagauagcuc

SEQ ID NO: 3255630 - RNA, 19 nt, Artificial Sequence
  Description of Artificial Sequence: Synthetic oligonucleotide
uucuguuagaaagauagcu

SEQ ID NO: 3255631 - RNA, 19 nt, Artificial Sequence
  Description of Artificial Sequence: Synthetic oligonucleotide
uucgacaacuucuucacca

SEQ ID NO: 3255632 - RNA, 19 nt, Artificial Sequence
  Description of Artificial Sequence: Synthetic oligonucleotide
guuacugaugccuuucugc

SEQ ID NO: 3255633 - RNA, 19 nt, Artificial Sequence
  Description of Artificial Sequence: Synthetic oligonucleotide
gucuauugccaccaggugg

SEQ ID NO: 3255634 - RNA, 19 nt, Artificial Sequence
  Description of Artificial Sequence: Synthetic oligonucleotide
aagccaggcaguuugucag

SEQ ID NO: 3255635 - RNA, 19 nt, Artificial Sequence
  Description of Artificial Sequence: Synthetic oligonucleotide
uuaaggaccaacaguucug

SEQ ID NO: 3255636 - RNA, 19 nt, Artificial Sequence
  Description of Artificial Sequence: Synthetic oligonucleotide
aggcaaucccagcagaggc

SEQ ID NO: 3255637 - RNA, 19 nt, Artificial Sequence
  Description of Artificial Sequence: Synthetic oligonucleotide
uccgccucaaguuugaagu

SEQ ID NO: 3255638 - RNA, 19 nt, Artificial Sequence
  Description of Artificial Sequence: Synthetic oligonucleotide
aagaaggcaaucccagcag

SEQ ID NO: 3255639 - RNA, 19 nt, Artificial Sequence
  Description of Artificial Sequence: Synthetic oligonucleotide
uuacugaugccuuucugcc

SEQ ID NO: 3255640 - RNA, 19 nt, Artificial Sequence
  Description of Artificial Sequence: Synthetic oligonucleotide
aaagauagcucuuggucaa

SEQ ID NO: 3255641 - RNA, 19 nt, Artificial Sequence
  Description of Artificial Sequence: Synthetic oligonucleotide
agaaaugcagaggcaagcc

SEQ ID NO: 3255642 - RNA, 19 nt, Artificial Sequence
  Description of Artificial Sequence: Synthetic oligonucleotide
ugaugaagaaaugcagagg

SEQ ID NO: 3255643 - RNA, 19 nt, Artificial Sequence
  Description of Artificial Sequence: Synthetic oligonucleotide
cauaguuaaggaccaacag

SEQ ID NO: 3255644 - RNA, 19 nt, Artificial Sequence
  Description of Artificial Sequence: Synthetic oligonucleotide
guagaauggaaccccaccc

SEQ ID NO: 3255645 - RNA, 19 nt, Artificial Sequence
  Description of Artificial Sequence: Synthetic oligonucleotide
uaaggugaugccuggguag

SEQ ID NO: 3255646 - RNA, 19 nt, Artificial Sequence
  Description of Artificial Sequence: Synthetic oligonucleotide
gacaacuucuucaccaagg

SEQ ID NO: 3255647 - RNA, 19 nt, Artificial Sequence
  Description of Artificial Sequence: Synthetic oligonucleotide
uucugggaaguguaguccg

SEQ ID NO: 3255648 - RNA, 19 nt, Artificial Sequence
  Description of Artificial Sequence: Synthetic oligonucleotide
ucuuggucaaagcauucug

SEQ ID NO: 3255649 - RNA, 19 nt, Artificial Sequence
  Description of Artificial Sequence: Synthetic oligonucleotide
uucugauuguccaggagga

SEQ ID NO: 3255650 - RNA, 19 nt, Artificial Sequence
  Description of Artificial Sequence: Synthetic oligonucleotide
acugaugccuuucugccag

SEQ ID NO: 3255651 - RNA, 19 nt, Artificial Sequence
  Description of Artificial Sequence: Synthetic oligonucleotide
ucugccagguuucuaaggu

SEQ ID NO: 3255652 - RNA, 19 nt, Artificial Sequence
  Description of Artificial Sequence: Synthetic oligonucleotide
ucuucgacaacuucuucac

SEQ ID NO: 3255653 - RNA, 19 nt, Artificial Sequence
  Description of Artificial Sequence: Synthetic oligonucleotide
agugucucacugcaguuuc

SEQ ID NO: 3255654 - RNA, 19 nt, Artificial Sequence
  Description of Artificial Sequence: Synthetic oligonucleotide
ugaagaaaugcagaggcaa

SEQ ID NO: 3255655 - RNA, 19 nt, Artificial Sequence
  Description of Artificial Sequence: Synthetic oligonucleotide
auucugggaaguguagucc

SEQ ID NO: 3255656 - RNA, 19 nt, Artificial Sequence
  Description of Artificial Sequence: Synthetic oligonucleotide
aggcuugaugaagaaaugc

SEQ ID NO: 3255657 - RNA, 19 nt, Artificial Sequence
  Description of Artificial Sequence: Synthetic oligonucleotide
ugaugccuggguagaaugg

SEQ ID NO: 3255658 - RNA, 19 nt, Artificial Sequence
  Description of Artificial Sequence: Synthetic oligonucleotide
caacaguucugccagguag

SEQ ID NO: 3255659 - RNA, 19 nt, Artificial Sequence
  Description of Artificial Sequence: Synthetic oligonucleotide
aguuacuguguucuggcug

SEQ ID NO: 3255660 - RNA, 19 nt, Artificial Sequence
  Description of Artificial Sequence: Synthetic oligonucleotide
aaggaccaacaguucugcc

SEQ ID NO: 3255661 - RNA, 19 nt, Artificial Sequence
  Description of Artificial Sequence: Synthetic oligonucleotide
guaauagugucucacugca

SEQ ID NO: 3255662 - RNA, 19 nt, Artificial Sequence
  Description of Artificial Sequence: Synthetic oligonucleotide
aguguaguccgccucaagu

SEQ ID NO: 3255663 - RNA, 19 nt, Artificial Sequence
  Description of Artificial Sequence: Synthetic oligonucleotide
aaagcauucugggaagugu

SEQ ID NO: 3255664 - RNA, 19 nt, Artificial Sequence
  Description of Artificial Sequence: Synthetic oligonucleotide
cagguuucuaaggugaugc

SEQ ID NO: 3255665 - RNA, 19 nt, Artificial Sequence
  Description of Artificial Sequence: Synthetic oligonucleotide
cuugaugaagaaaugcaga

SEQ ID NO: 3255666 - RNA, 19 nt, Artificial Sequence
  Description of Artificial Sequence: Synthetic oligonucleotide
agcagaggcaguuacugug

SEQ ID NO: 3255667 - RNA, 19 nt, Artificial Sequence
  Description of Artificial Sequence: Synthetic oligonucleotide
aggaaggaggaccuuaugu

SEQ ID NO: 3255668 - RNA, 19 nt, Artificial Sequence
  Description of Artificial Sequence: Synthetic oligonucleotide
ucuaaggugaugccugggu

SEQ ID NO: 3255669 - RNA, 19 nt, Artificial Sequence
  Description of Artificial Sequence: Synthetic oligonucleotide
uuaagaaggcaaucccagc

SEQ ID NO: 3255670 - RNA, 19 nt, Artificial Sequence
  Description of Artificial Sequence: Synthetic oligonucleotide
guucuggcuguucugauug

SEQ ID NO: 3255671 - RNA, 19 nt, Artificial Sequence
  Description of Artificial Sequence: Synthetic oligonucleotide
uuucuaaggugaugccugg

SEQ ID NO: 3255672 - RNA, 19 nt, Artificial Sequence
  Description of Artificial Sequence: Synthetic oligonucleotide
uagaauggaaccccaccca

SEQ ID NO: 3255673 - RNA, 19 nt, Artificial Sequence
  Description of Artificial Sequence: Synthetic oligonucleotide
aguguaauagugucucacu

SEQ ID NO: 3255674 - RNA, 19 nt, Artificial Sequence
  Description of Artificial Sequence: Synthetic oligonucleotide
cuagugacuacgugugugc

SEQ ID NO: 3255675 - RNA, 19 nt, Artificial Sequence
  Description of Artificial Sequence: Synthetic oligonucleotide
uccacugucuucgacaacu

SEQ ID NO: 3255676 - RNA, 19 nt, Artificial Sequence
  Description of Artificial Sequence: Synthetic oligonucleotide
ugccagguuucuaagguga

SEQ ID NO: 3255677 - RNA, 19 nt, Artificial Sequence
  Description of Artificial Sequence: Synthetic oligonucleotide
guguaauagugucucacug

SEQ ID NO: 3255678 - RNA, 19 nt, Artificial Sequence
  Description of Artificial Sequence: Synthetic oligonucleotide
uggcaagccaggcaguuug

SEQ ID NO: 3255679 - RNA, 19 nt, Artificial Sequence
  Description of Artificial Sequence: Synthetic oligonucleotide
aaggcaaucccagcagagg

SEQ ID NO: 3255680 - RNA, 19 nt, Artificial Sequence
  Description of Artificial Sequence: Synthetic oligonucleotide
guuucuaaggugaugccug

SEQ ID NO: 3255681 - RNA, 19 nt, Artificial Sequence
  Description of Artificial Sequence: Synthetic oligonucleotide
gaccuggcaagccaggcag

SEQ ID NO: 3255682 - RNA, 19 nt, Artificial Sequence
  Description of Artificial Sequence: Synthetic oligonucleotide
cucacugcaguuuccacug

SEQ ID NO: 3255683 - RNA, 19 nt, Artificial Sequence
  Description of Artificial Sequence: Synthetic oligonucleotide
guuagaaagauagcucuug

SEQ ID NO: 3255684 - RNA, 19 nt, Artificial Sequence
  Description of Artificial Sequence: Synthetic oligonucleotide
aaugcagaggcaagccuuc

SEQ ID NO: 3255685 - RNA, 19 nt, Artificial Sequence
  Description of Artificial Sequence: Synthetic oligonucleotide
gaagaaaugcagaggcaag

SEQ ID NO: 3255686 - RNA, 19 nt, Artificial Sequence
  Description of Artificial Sequence: Synthetic oligonucleotide
aaaguguaauagugucuca

SEQ ID NO: 3255687 - RNA, 19 nt, Artificial Sequence
  Description of Artificial Sequence: Synthetic oligonucleotide
gauagcucuuggucaaagc

SEQ ID NO: 3255688 - RNA, 19 nt, Artificial Sequence
  Description of Artificial Sequence: Synthetic oligonucleotide
ucaccaagggaccuggcaa

SEQ ID NO: 3255689 - RNA, 19 nt, Artificial Sequence
  Description of Artificial Sequence: Synthetic oligonucleotide
uagaaagauagcucuuggu

SEQ ID NO: 3255690 - RNA, 19 nt, Artificial Sequence
  Description of Artificial Sequence: Synthetic oligonucleotide
aggaccaacaguucugcca

SEQ ID NO: 3255691 - RNA, 19 nt, Artificial Sequence
  Description of Artificial Sequence: Synthetic oligonucleotide
uccaggaggaaggaggacc

SEQ ID NO: 3255692 - RNA, 19 nt, Artificial Sequence
  Description of Artificial Sequence: Synthetic oligonucleotide
aagccuucacggucuauug

SEQ ID NO: 3255693 - RNA, 19 nt, Artificial Sequence
  Description of Artificial Sequence: Synthetic oligonucleotide
aaccagugcagccccagca

SEQ ID NO: 3255694 - RNA, 19 nt, Artificial Sequence
  Description of Artificial Sequence: Synthetic oligonucleotide
uucugccagguuucuaagg

SEQ ID NO: 3255695 - RNA, 19 nt, Artificial Sequence
  Description of Artificial Sequence: Synthetic oligonucleotide
uaauagugucucacugcag

SEQ ID NO: 3255696 - RNA, 19 nt, Artificial Sequence
  Description of Artificial Sequence: Synthetic oligonucleotide
auccacacuagugacuacg

SEQ ID NO: 3255697 - RNA, 19 nt, Artificial Sequence
  Description of Artificial Sequence: Synthetic oligonucleotide
cucaaguuugaaguucacg

SEQ ID NO: 3255698 - RNA, 19 nt, Artificial Sequence
  Description of Artificial Sequence: Synthetic oligonucleotide
ggaaggaggaccuuaugug

SEQ ID NO: 3255699 - RNA, 19 nt, Artificial Sequence
  Description of Artificial Sequence: Synthetic oligonucleotide
aguuugaaguucacgaugu

SEQ ID NO: 3255700 - RNA, 19 nt, Artificial Sequence
  Description of Artificial Sequence: Synthetic oligonucleotide
gucaaagcauucugggaag

SEQ ID NO: 3255701 - RNA, 19 nt, Artificial Sequence
  Description of Artificial Sequence: Synthetic oligonucleotide
agccuucacggucuauugc

SEQ ID NO: 3255702 - RNA, 19 nt, Artificial Sequence
  Description of Artificial Sequence: Synthetic oligonucleotide
cagaggcaagccuucacgg

SEQ ID NO: 3255703 - RNA, 19 nt, Artificial Sequence
  Description of Artificial Sequence: Synthetic oligonucleotide
gcaguuuccacugucuucg

SEQ ID NO: 3255704 - RNA, 19 nt, Artificial Sequence
  Description of Artificial Sequence: Synthetic oligonucleotide
acuguguucuggcuguucu

SEQ ID NO: 3255705 - RNA, 19 nt, Artificial Sequence
  Description of Artificial Sequence: Synthetic oligonucleotide
aauuaugacauucaugggg

SEQ ID NO: 3255706 - RNA, 19 nt, Artificial Sequence
  Description of Artificial Sequence: Synthetic oligonucleotide
aagaaaaccagacaguuag

SEQ ID NO: 3255707 - RNA, 19 nt, Artificial Sequence
  Description of Artificial Sequence: Synthetic oligonucleotide
uguuacuuuauuaauacag

SEQ ID NO: 3255708 - RNA, 19 nt, Artificial Sequence
  Description of Artificial Sequence: Synthetic oligonucleotide
uauacaacaauuaugacau

SEQ ID NO: 3255709 - RNA, 19 nt, Artificial Sequence
  Description of Artificial Sequence: Synthetic oligonucleotide
aauucuaccagcugguugg

SEQ ID NO: 3255710 - RNA, 19 nt, Artificial Sequence
  Description of Artificial Sequence: Synthetic oligonucleotide
cauacaaauaaagagaucg

SEQ ID NO: 3255711 - RNA, 19 nt, Artificial Sequence
  Description of Artificial Sequence: Synthetic oligonucleotide
uuuguaaacaagcagcgag

SEQ ID NO: 3255712 - RNA, 19 nt, Artificial Sequence
  Description of Artificial Sequence: Synthetic oligonucleotide
aaggcuguaaaccaugaac

SEQ ID NO: 3255713 - RNA, 19 nt, Artificial Sequence
  Description of Artificial Sequence: Synthetic oligonucleotide
acagguaucacauguaagc

SEQ ID NO: 3255714 - RNA, 19 nt, Artificial Sequence
  Description of Artificial Sequence: Synthetic oligonucleotide
gauccuaacaaacugaagc

SEQ ID NO: 3255715 - RNA, 19 nt, Artificial Sequence
  Description of Artificial Sequence: Synthetic oligonucleotide
aaauguauggagcuacucg

SEQ ID NO: 3255716 - RNA, 19 nt, Artificial Sequence
  Description of Artificial Sequence: Synthetic oligonucleotide
acugcaaacacuuuuauug

SEQ ID NO: 3255717 - RNA, 19 nt, Artificial Sequence
  Description of Artificial Sequence: Synthetic oligonucleotide
auauuuguuauacaguuuc

SEQ ID NO: 3255718 - RNA, 19 nt, Artificial Sequence
  Description of Artificial Sequence: Synthetic oligonucleotide
ugugcuuuaaagaaaacca

SEQ ID NO: 3255719 - RNA, 19 nt, Artificial Sequence
  Description of Artificial Sequence: Synthetic oligonucleotide
uuaaauaaggcuuagcaaa

SEQ ID NO: 3255720 - RNA, 19 nt, Artificial Sequence
  Description of Artificial Sequence: Synthetic oligonucleotide
aggauggucacauucaagc

SEQ ID NO: 3255721 - RNA, 19 nt, Artificial Sequence
  Description of Artificial Sequence: Synthetic oligonucleotide
ucaauauacaacaauuaug

SEQ ID NO: 3255722 - RNA, 19 nt, Artificial Sequence
  Description of Artificial Sequence: Synthetic oligonucleotide
uacaaaauuuaaauaaggc

SEQ ID NO: 3255723 - RNA, 19 nt, Artificial Sequence
  Description of Artificial Sequence: Synthetic oligonucleotide
gacucuacauauuucaugg

SEQ ID NO: 3255724 - RNA, 19 nt, Artificial Sequence
  Description of Artificial Sequence: Synthetic oligonucleotide
ucaagcaccaaauagcucc

SEQ ID NO: 3255725 - RNA, 19 nt, Artificial Sequence
  Description of Artificial Sequence: Synthetic oligonucleotide
auuuaaauaaggcuuagca

SEQ ID NO: 3255726 - RNA, 19 nt, Artificial Sequence
  Description of Artificial Sequence: Synthetic oligonucleotide
aaguauaaauauuuguuca

SEQ ID NO: 3255727 - RNA, 19 nt, Artificial Sequence
  Description of Artificial Sequence: Synthetic oligonucleotide
acaucuuacaaccacacag

SEQ ID NO: 3255728 - RNA, 19 nt, Artificial Sequence
  Description of Artificial Sequence: Synthetic oligonucleotide
acaaaauuuaaauaaggcu

SEQ ID NO: 3255729 - RNA, 19 nt, Artificial Sequence
  Description of Artificial Sequence: Synthetic oligonucleotide
auauacaacaauuaugaca

SEQ ID NO: 3255730 - RNA, 19 nt, Artificial Sequence
  Description of Artificial Sequence: Synthetic oligonucleotide
ucuuuacucauccaaaaug

SEQ ID NO: 3255731 - RNA, 19 nt, Artificial Sequence
  Description of Artificial Sequence: Synthetic oligonucleotide
aaugcuguuacuuuauuaa

SEQ ID NO: 3255732 - RNA, 19 nt, Artificial Sequence
  Description of Artificial Sequence: Synthetic oligonucleotide
ugcauuauaagcuuugaga

SEQ ID NO: 3255733 - RNA, 19 nt, Artificial Sequence
  Description of Artificial Sequence: Synthetic oligonucleotide
aaaacgcgacaacagaaac

SEQ ID NO: 3255734 - RNA, 19 nt, Artificial Sequence
  Description of Artificial Sequence: Synthetic oligonucleotide
uccuuuguaaacaagcagc

SEQ ID NO: 3255735 - RNA, 19 nt, Artificial Sequence
  Description of Artificial Sequence: Synthetic oligonucleotide
gauaauacacuauacaaaa

SEQ ID NO: 3255736 - RNA, 19 nt, Artificial Sequence
  Description of Artificial Sequence: Synthetic oligonucleotide
cuuuacucauccaaaaugc

SEQ ID NO: 3255737 - RNA, 19 nt, Artificial Sequence
  Description of Artificial Sequence: Synthetic oligonucleotide
uacaguuucacaauguagu

SEQ ID NO: 3255738 - RNA, 19 nt, Artificial Sequence
  Description of Artificial Sequence: Synthetic oligonucleotide
guauacaaaauuuaaauaa

SEQ ID NO: 3255739 - RNA, 19 nt, Artificial Sequence
  Description of Artificial Sequence: Synthetic oligonucleotide
agacugaccaaauagaaca

SEQ ID NO: 3255740 - RNA, 19 nt, Artificial Sequence
  Description of Artificial Sequence: Synthetic oligonucleotide
uuucacaauguagugaugg

SEQ ID NO: 3255741 - RNA, 19 nt, Artificial Sequence
  Description of Artificial Sequence: Synthetic oligonucleotide
aauguauggagcuacucga

SEQ ID NO: 3255742 - RNA, 19 nt, Artificial Sequence
  Description of Artificial Sequence: Synthetic oligonucleotide
acagagaaauucuaccagc

SEQ ID NO: 3255743 - RNA, 19 nt, Artificial Sequence
  Description of Artificial Sequence: Synthetic oligonucleotide
cauucaagcaccaaauagc

SEQ ID NO: 3255744 - RNA, 19 nt, Artificial Sequence
  Description of Artificial Sequence: Synthetic oligonucleotide
aauuuaaauaaggcuuagc

SEQ ID NO: 3255745 - RNA, 19 nt, Artificial Sequence
  Description of Artificial Sequence: Synthetic oligonucleotide
uauuagaucugccaaccag

SEQ ID NO: 3255746 - RNA, 19 nt, Artificial Sequence
  Description of Artificial Sequence: Synthetic oligonucleotide
auauccuuuguaaacaagc

SEQ ID NO: 3255747 - RNA, 19 nt, Artificial Sequence
  Description of Artificial Sequence: Synthetic oligonucleotide
uaaguauaaauauuuguuc

SEQ ID NO: 3255748 - RNA, 19 nt, Artificial Sequence
  Description of Artificial Sequence: Synthetic oligonucleotide
agaucugccaaccagauau

SEQ ID NO: 3255749 - RNA, 19 nt, Artificial Sequence
  Description of Artificial Sequence: Synthetic oligonucleotide
uuggcaaaugauaauacac

SEQ ID NO: 3255750 - RNA, 19 nt, Artificial Sequence
  Description of Artificial Sequence: Synthetic oligonucleotide
uguucaauauacaacaauu

SEQ ID NO: 3255751 - RNA, 19 nt, Artificial Sequence
  Description of Artificial Sequence: Synthetic oligonucleotide
ugguauacaaaauuuaaau

SEQ ID NO: 3255752 - RNA, 19 nt, Artificial Sequence
  Description of Artificial Sequence: Synthetic oligonucleotide
uuuaaauaaggcuuagcaa

SEQ ID NO: 3255753 - RNA, 19 nt, Artificial Sequence
  Description of Artificial Sequence: Synthetic oligonucleotide
uucaauauacaacaauuau

SEQ ID NO: 3255754 - RNA, 19 nt, Artificial Sequence
  Description of Artificial Sequence: Synthetic oligonucleotide
gaaaauaagacugcaaaca

SEQ ID NO: 3255755 - RNA, 19 nt, Artificial Sequence
  Description of Artificial Sequence: Synthetic oligonucleotide
auuucugagacccauuuga

SEQ ID NO: 3255756 - RNA, 19 nt, Artificial Sequence
  Description of Artificial Sequence: Synthetic oligonucleotide
cacuaaaaugaucugacag

SEQ ID NO: 3255757 - RNA, 19 nt, Artificial Sequence
  Description of Artificial Sequence: Synthetic oligonucleotide
aauaaggcuuagcaaaagu

SEQ ID NO: 3255758 - RNA, 19 nt, Artificial Sequence
  Description of Artificial Sequence: Synthetic oligonucleotide
uuguuauacaguuucacaa

SEQ ID NO: 3255759 - RNA, 19 nt, Artificial Sequence
  Description of Artificial Sequence: Synthetic oligonucleotide
aaccuuaaguacucuuuac

SEQ ID NO: 3255760 - RNA, 19 nt, Artificial Sequence
  Description of Artificial Sequence: Synthetic oligonucleotide
acaacaaacagguaucaca

SEQ ID NO: 3255761 - RNA, 19 nt, Artificial Sequence
  Description of Artificial Sequence: Synthetic oligonucleotide
uuaugaaauguauggagcu

SEQ ID NO: 3255762 - RNA, 19 nt, Artificial Sequence
  Description of Artificial Sequence: Synthetic oligonucleotide
acugcauaaguauaaauau

SEQ ID NO: 3255763 - RNA, 19 nt, Artificial Sequence
  Description of Artificial Sequence: Synthetic oligonucleotide
aacugaagcugguaaaucu

SEQ ID NO: 3255764 - RNA, 19 nt, Artificial Sequence
  Description of Artificial Sequence: Synthetic oligonucleotide
aaauucuaccagcugguug

SEQ ID NO: 3255765 - RNA, 19 nt, Artificial Sequence
  Description of Artificial Sequence: Synthetic oligonucleotide
uuugagaccauuucugaga

SEQ ID NO: 3255766 - RNA, 19 nt, Artificial Sequence
  Description of Artificial Sequence: Synthetic oligonucleotide
auacaaaauuuaaauaagg

SEQ ID NO: 3255767 - RNA, 19 nt, Artificial Sequence
  Description of Artificial Sequence: Synthetic oligonucleotide
aaaauauuuguuauacagu

SEQ ID NO: 3255768 - RNA, 19 nt, Artificial Sequence
  Description of Artificial Sequence: Synthetic oligonucleotide
gauucuuggagaaaauaag

SEQ ID NO: 3255769 - RNA, 19 nt, Artificial Sequence
  Description of Artificial Sequence: Synthetic oligonucleotide
aaagagaucguguuaugaa

SEQ ID NO: 3255770 - RNA, 19 nt, Artificial Sequence
  Description of Artificial Sequence: Synthetic oligonucleotide
cuguaaaccaugaacuacc

SEQ ID NO: 3255771 - RNA, 19 nt, Artificial Sequence
  Description of Artificial Sequence: Synthetic oligonucleotide
gaagcugguaaaucuacag

SEQ ID NO: 3255772 - RNA, 19 nt, Artificial Sequence
  Description of Artificial Sequence: Synthetic oligonucleotide
auucacaacaacaaacagg

SEQ ID NO: 3255773 - RNA, 19 nt, Artificial Sequence
  Description of Artificial Sequence: Synthetic oligonucleotide
uaugcaacugcauaaguau

SEQ ID NO: 3255774 - RNA, 19 nt, Artificial Sequence
  Description of Artificial Sequence: Synthetic oligonucleotide
uauugcacagauccuaaca

SEQ ID NO: 3255775 - RNA, 19 nt, Artificial Sequence
  Description of Artificial Sequence: Synthetic oligonucleotide
gagaccauuucugagaccc

SEQ ID NO: 3255776 - RNA, 19 nt, Artificial Sequence
  Description of Artificial Sequence: Synthetic oligonucleotide
ucuacauauuucaugguau

SEQ ID NO: 3255777 - RNA, 19 nt, Artificial Sequence
  Description of Artificial Sequence: Synthetic oligonucleotide
aauguagugauggggagug

SEQ ID NO: 3255778 - RNA, 19 nt, Artificial Sequence
  Description of Artificial Sequence: Synthetic oligonucleotide
gacaguuagaaagcaaagg

SEQ ID NO: 3255779 - RNA, 19 nt, Artificial Sequence
  Description of Artificial Sequence: Synthetic oligonucleotide
gauucacaacaacaaacag

SEQ ID NO: 3255780 - RNA, 19 nt, Artificial Sequence
  Description of Artificial Sequence: Synthetic oligonucleotide
ccagauaugcauuauaagc

SEQ ID NO: 3255781 - RNA, 19 nt, Artificial Sequence
  Description of Artificial Sequence: Synthetic oligonucleotide
uauccuuuguaaacaagca

SEQ ID NO: 3255782 - RNA, 19 nt, Artificial Sequence
  Description of Artificial Sequence: Synthetic oligonucleotide
ugaucugacagacucuaca

SEQ ID NO: 3255783 - RNA, 19 nt, Artificial Sequence
  Description of Artificial Sequence: Synthetic oligonucleotide
aguuucacaauguagugau

SEQ ID NO: 3255784 - RNA, 19 nt, Artificial Sequence
  Description of Artificial Sequence: Synthetic oligonucleotide
uauaaauauuuguucaaua

SEQ ID NO: 3255785 - RNA, 19 nt, Artificial Sequence
  Description of Artificial Sequence: Synthetic oligonucleotide
uuucaugguauacaaaauu

SEQ ID NO: 3255786 - RNA, 19 nt, Artificial Sequence
  Description of Artificial Sequence: Synthetic oligonucleotide
accaaauagcuccagucuc

SEQ ID NO: 3255787 - RNA, 19 nt, Artificial Sequence
  Description of Artificial Sequence: Synthetic oligonucleotide
ucugacagacucuacauau

SEQ ID NO: 3255788 - RNA, 19 nt, Artificial Sequence
  Description of Artificial Sequence: Synthetic oligonucleotide
uucaugguauacaaaauuu

SEQ ID NO: 3255789 - RNA, 19 nt, Artificial Sequence
  Description of Artificial Sequence: Synthetic oligonucleotide
uggcaaaugauaauacacu

SEQ ID NO: 3255790 - RNA, 19 nt, Artificial Sequence
  Description of Artificial Sequence: Synthetic oligonucleotide
cauuauaagcuuugagacc

SEQ ID NO: 3255791 - RNA, 19 nt, Artificial Sequence
  Description of Artificial Sequence: Synthetic oligonucleotide
augaaauguauggagcuac

SEQ ID NO: 3255792 - RNA, 19 nt, Artificial Sequence
  Description of Artificial Sequence: Synthetic oligonucleotide
uacucauccaaaaugcaaa

SEQ ID NO: 3255793 - RNA, 19 nt, Artificial Sequence
  Description of Artificial Sequence: Synthetic oligonucleotide
ucacauguaagcaaccuua

SEQ ID NO: 3255794 - RNA, 19 nt, Artificial Sequence
  Description of Artificial Sequence: Synthetic oligonucleotide
guuaugaaauguauggagc

SEQ ID NO: 3255795 - RNA, 19 nt, Artificial Sequence
  Description of Artificial Sequence: Synthetic oligonucleotide
cuaaaaugaucugacagac

SEQ ID NO: 3255796 - RNA, 19 nt, Artificial Sequence
  Description of Artificial Sequence: Synthetic oligonucleotide
uuaaguacucuuuacucau

SEQ ID NO: 3255797 - RNA, 19 nt, Artificial Sequence
  Description of Artificial Sequence: Synthetic oligonucleotide
aacaauuaugacauucaug

SEQ ID NO: 3255798 - RNA, 19 nt, Artificial Sequence
  Description of Artificial Sequence: Synthetic oligonucleotide
ugcacagauccuaacaaac

SEQ ID NO: 3255799 - RNA, 19 nt, Artificial Sequence
  Description of Artificial Sequence: Synthetic oligonucleotide
gagauucacaacaacaaac

SEQ ID NO: 3255800 - RNA, 19 nt, Artificial Sequence
  Description of Artificial Sequence: Synthetic oligonucleotide
uaaauaaggcuuagcaaaa

SEQ ID NO: 3255801 - RNA, 19 nt, Artificial Sequence
  Description of Artificial Sequence: Synthetic oligonucleotide
uuauacaguuucacaaugu

SEQ ID NO: 3255802 - RNA, 19 nt, Artificial Sequence
  Description of Artificial Sequence: Synthetic oligonucleotide
aaacagguaucacauguaa

SEQ ID NO: 3255803 - RNA, 19 nt, Artificial Sequence
  Description of Artificial Sequence: Synthetic oligonucleotide
ugguaaaucuacagcuggg

SEQ ID NO: 3255804 - RNA, 19 nt, Artificial Sequence
  Description of Artificial Sequence: Synthetic oligonucleotide
agaaggaucgggcuauuag

SEQ ID NO: 3255805 - RNA, 19 nt, Artificial Sequence
  Description of Artificial Sequence: Synthetic oligonucleotide
aguucaaucccugagagcc

SEQ ID NO: 3255806 - RNA, 19 nt, Artificial Sequence
  Description of Artificial Sequence: Synthetic oligonucleotide
aacaucauucauuucagag

SEQ ID NO: 3255807 - RNA, 19 nt, Artificial Sequence
  Description of Artificial Sequence: Synthetic oligonucleotide
aauaaugaaggguaacaag

SEQ ID NO: 3255808 - RNA, 19 nt, Artificial Sequence
  Description of Artificial Sequence: Synthetic oligonucleotide
uugaacaucauucauuuca

SEQ ID NO: 3255809 - RNA, 19 nt, Artificial Sequence
  Description of Artificial Sequence: Synthetic oligonucleotide
ucuucuuagaaccuaagca

SEQ ID NO: 3255810 - RNA, 19 nt, Artificial Sequence
  Description of Artificial Sequence: Synthetic oligonucleotide
aaaagcaagauaacggggc

SEQ ID NO: 3255811 - RNA, 19 nt, Artificial Sequence
  Description of Artificial Sequence: Synthetic oligonucleotide
aauguuggugccugggucc

SEQ ID NO: 3255812 - RNA, 19 nt, Artificial Sequence
  Description of Artificial Sequence: Synthetic oligonucleotide
acaaaagcaagauaacggg

SEQ ID NO: 3255813 - RNA, 19 nt, Artificial Sequence
  Description of Artificial Sequence: Synthetic oligonucleotide
aagguuuuaaaggccaucc

SEQ ID NO: 3255814 - RNA, 19 nt, Artificial Sequence
  Description of Artificial Sequence: Synthetic oligonucleotide
uagaaaauaaugaagggua

SEQ ID NO: 3255815 - RNA, 19 nt, Artificial Sequence
  Description of Artificial Sequence: Synthetic oligonucleotide
aaagcuuaaguguguuggc

SEQ ID NO: 3255816 - RNA, 19 nt, Artificial Sequence
  Description of Artificial Sequence: Synthetic oligonucleotide
aaggguaacaaguaucucu

SEQ ID NO: 3255817 - RNA, 19 nt, Artificial Sequence
  Description of Artificial Sequence: Synthetic oligonucleotide
uuacaaaagcaagauaacg

SEQ ID NO: 3255818 - RNA, 19 nt, Artificial Sequence
  Description of Artificial Sequence: Synthetic oligonucleotide
gauuccauaguucaauccc

SEQ ID NO: 3255819 - RNA, 19 nt, Artificial Sequence
  Description of Artificial Sequence: Synthetic oligonucleotide
acuagaaaauaaugaaggg

SEQ ID NO: 3255820 - RNA, 19 nt, Artificial Sequence
  Description of Artificial Sequence: Synthetic oligonucleotide
aaaauaaugaaggguaaca

SEQ ID NO: 3255821 - RNA, 19 nt, Artificial Sequence
  Description of Artificial Sequence: Synthetic oligonucleotide
aucccugagagccacaccc

SEQ ID NO: 3255822 - RNA, 19 nt, Artificial Sequence
  Description of Artificial Sequence: Synthetic oligonucleotide
cucagcaagguuuuaaagg

SEQ ID NO: 3255823 - RNA, 19 nt, Artificial Sequence
  Description of Artificial Sequence: Synthetic oligonucleotide
aacaaguaucucuuccugg

SEQ ID NO: 3255824 - RNA, 19 nt, Artificial Sequence
  Description of Artificial Sequence: Synthetic oligonucleotide
uuugcucucaaccuggaca

SEQ ID NO: 3255825 - RNA, 19 nt, Artificial Sequence
  Description of Artificial Sequence: Synthetic oligonucleotide
aguacuagaaaauaaugaa

SEQ ID NO: 3255826 - RNA, 19 nt, Artificial Sequence
  Description of Artificial Sequence: Synthetic oligonucleotide
aucuucuuagaaccuaagc

SEQ ID NO: 3255827 - RNA, 19 nt, Artificial Sequence
  Description of Artificial Sequence: Synthetic oligonucleotide
ccaaauaucacucagcaag

SEQ ID NO: 3255828 - RNA, 19 nt, Artificial Sequence
  Description of Artificial Sequence: Synthetic oligonucleotide
uuccaaauaucacucagca

SEQ ID NO: 3255829 - RNA, 19 nt, Artificial Sequence
  Description of Artificial Sequence: Synthetic oligonucleotide
ugcuguuuugcucucaacc

SEQ ID NO: 3255830 - RNA, 19 nt, Artificial Sequence
  Description of Artificial Sequence: Synthetic oligonucleotide
uguuuugcucucaaccugg

SEQ ID NO: 3255831 - RNA, 19 nt, Artificial Sequence
  Description of Artificial Sequence: Synthetic oligonucleotide
agauuccauaguucaaucc

SEQ ID NO: 3255832 - RNA, 19 nt, Artificial Sequence
  Description of Artificial Sequence: Synthetic oligonucleotide
aagauaacggggcuggaug

SEQ ID NO: 3255833 - RNA, 19 nt, Artificial Sequence
  Description of Artificial Sequence: Synthetic oligonucleotide
ugaaggguaacaaguaucu

SEQ ID NO: 3255834 - RNA, 19 nt, Artificial Sequence
  Description of Artificial Sequence: Synthetic oligonucleotide
aagauuccauaguucaauc

SEQ ID NO: 3255835 - RNA, 19 nt, Artificial Sequence
  Description of Artificial Sequence: Synthetic oligonucleotide
ugaacaucauucauuucag

SEQ ID NO: 3255836 - RNA, 19 nt, Artificial Sequence
  Description of Artificial Sequence: Synthetic oligonucleotide
auaguucaaucccugagag

SEQ ID NO: 3255837 - RNA, 19 nt, Artificial Sequence
  Description of Artificial Sequence: Synthetic oligonucleotide
caaagcuuaaguguguugg

SEQ ID NO: 3255838 - RNA, 19 nt, Artificial Sequence
  Description of Artificial Sequence: Synthetic oligonucleotide
uuuugaacaucauucauuu

SEQ ID NO: 3255839 - RNA, 19 nt, Artificial Sequence
  Description of Artificial Sequence: Synthetic oligonucleotide
uuucacacaguaacucugg

SEQ ID NO: 3255840 - RNA, 19 nt, Artificial Sequence
  Description of Artificial Sequence: Synthetic oligonucleotide
aaaaguacuagaaaauaau

SEQ ID NO: 3255841 - RNA, 19 nt, Artificial Sequence
  Description of Artificial Sequence: Synthetic oligonucleotide
aguguguuggcacuccugg

SEQ ID NO: 3255842 - RNA, 19 nt, Artificial Sequence
  Description of Artificial Sequence: Synthetic oligonucleotide
cacauagaaguccugacag

SEQ ID NO: 3255843 - RNA, 19 nt, Artificial Sequence
  Description of Artificial Sequence: Synthetic oligonucleotide
agcaccagcauuuacaaaa

SEQ ID NO: 3255844 - RNA, 19 nt, Artificial Sequence
  Description of Artificial Sequence: Synthetic oligonucleotide
caaauaucacucagcaagg

SEQ ID NO: 3255845 - RNA, 19 nt, Artificial Sequence
  Description of Artificial Sequence: Synthetic oligonucleotide
aaugguggagugcaggccu

SEQ ID NO: 3255846 - RNA, 19 nt, Artificial Sequence
  Description of Artificial Sequence: Synthetic oligonucleotide
aaugaaggguaacaaguau

SEQ ID NO: 3255847 - RNA, 19 nt, Artificial Sequence
  Description of Artificial Sequence: Synthetic oligonucleotide
aauggcuugugccccgugg

SEQ ID NO: 3255848 - RNA, 19 nt, Artificial Sequence
  Description of Artificial Sequence: Synthetic oligonucleotide
acugcaaacagaacaacgg

SEQ ID NO: 3255849 - RNA, 19 nt, Artificial Sequence
  Description of Artificial Sequence: Synthetic oligonucleotide
cuucaaauggcuugugccc

SEQ ID NO: 3255850 - RNA, 19 nt, Artificial Sequence
  Description of Artificial Sequence: Synthetic oligonucleotide
uaccauugcaguccuauug

SEQ ID NO: 3255851 - RNA, 19 nt, Artificial Sequence
  Description of Artificial Sequence: Synthetic oligonucleotide
gacuauucaaaaguacuag

SEQ ID NO: 3255852 - RNA, 19 nt, Artificial Sequence
  Description of Artificial Sequence: Synthetic oligonucleotide
accauugcaguccuauugg

SEQ ID NO: 3255853 - RNA, 19 nt, Artificial Sequence
  Description of Artificial Sequence: Synthetic oligonucleotide
cauagaaguccugacaggg

SEQ ID NO: 3255854 - RNA, 19 nt, Artificial Sequence
  Description of Artificial Sequence: Synthetic oligonucleotide
agcuuaaguguguuggcac

SEQ ID NO: 3255855 - RNA, 19 nt, Artificial Sequence
  Description of Artificial Sequence: Synthetic oligonucleotide
aaaugguggagugcaggcc

SEQ ID NO: 3255856 - RNA, 19 nt, Artificial Sequence
  Description of Artificial Sequence: Synthetic oligonucleotide
ucacucucuaccauugcag

SEQ ID NO: 3255857 - RNA, 19 nt, Artificial Sequence
  Description of Artificial Sequence: Synthetic oligonucleotide
ugcaaacagaacaacggac

SEQ ID NO: 3255858 - RNA, 19 nt, Artificial Sequence
  Description of Artificial Sequence: Synthetic oligonucleotide
aaauaaugaaggguaacaa

SEQ ID NO: 3255859 - RNA, 19 nt, Artificial Sequence
  Description of Artificial Sequence: Synthetic oligonucleotide
guacuagaaaauaaugaag

SEQ ID NO: 3255860 - RNA, 19 nt, Artificial Sequence
  Description of Artificial Sequence: Synthetic oligonucleotide
agagagacagcuuaggguu

SEQ ID NO: 3255861 - RNA, 19 nt, Artificial Sequence
  Description of Artificial Sequence: Synthetic oligonucleotide
uccacauccuucaaauggc

SEQ ID NO: 3255862 - RNA, 19 nt, Artificial Sequence
  Description of Artificial Sequence: Synthetic oligonucleotide
aaagcaagauaacggggcu

SEQ ID NO: 3255863 - RNA, 19 nt, Artificial Sequence
  Description of Artificial Sequence: Synthetic oligonucleotide
uaacaaguaucucuuccug

SEQ ID NO: 3255864 - RNA, 19 nt, Artificial Sequence
  Description of Artificial Sequence: Synthetic oligonucleotide
uugcccaccaugaacaaac

SEQ ID NO: 3255865 - RNA, 19 nt, Artificial Sequence
  Description of Artificial Sequence: Synthetic oligonucleotide
uugcagacaaagcuuaagu

SEQ ID NO: 3255866 - RNA, 19 nt, Artificial Sequence
  Description of Artificial Sequence: Synthetic oligonucleotide
uagggugcaggacaaacug

SEQ ID NO: 3255867 - RNA, 19 nt, Artificial Sequence
  Description of Artificial Sequence: Synthetic oligonucleotide
acuauucaaaaguacuaga

SEQ ID NO: 3255868 - RNA, 19 nt, Artificial Sequence
  Description of Artificial Sequence: Synthetic oligonucleotide
uccccucagacacucaggg

SEQ ID NO: 3255869 - RNA, 19 nt, Artificial Sequence
  Description of Artificial Sequence: Synthetic oligonucleotide
ucuuagaaccuaagcacca

SEQ ID NO: 3255870 - RNA, 19 nt, Artificial Sequence
  Description of Artificial Sequence: Synthetic oligonucleotide
ugcuugcccaccaugaaca

SEQ ID NO: 3255871 - RNA, 19 nt, Artificial Sequence
  Description of Artificial Sequence: Synthetic oligonucleotide
cacugcaaacagaacaacg

SEQ ID NO: 3255872 - RNA, 19 nt, Artificial Sequence
  Description of Artificial Sequence: Synthetic oligonucleotide
agguuuuaaaggccauccc

SEQ ID NO: 3255873 - RNA, 19 nt, Artificial Sequence
  Description of Artificial Sequence: Synthetic oligonucleotide
uagaaccuaagcaccagca

SEQ ID NO: 3255874 - RNA, 19 nt, Artificial Sequence
  Description of Artificial Sequence: Synthetic oligonucleotide
aauaucacucagcaagguu

SEQ ID NO: 3255875 - RNA, 19 nt, Artificial Sequence
  Description of Artificial Sequence: Synthetic oligonucleotide
uuagaaccuaagcaccagc

SEQ ID NO: 3255876 - RNA, 19 nt, Artificial Sequence
  Description of Artificial Sequence: Synthetic oligonucleotide
cauuccaaauaucacucag

SEQ ID NO: 3255877 - RNA, 19 nt, Artificial Sequence
  Description of Artificial Sequence: Synthetic oligonucleotide
acaaguaucucuuccugga

SEQ ID NO: 3255878 - RNA, 19 nt, Artificial Sequence
  Description of Artificial Sequence: Synthetic oligonucleotide
cagcauuuacaaaagcaag

SEQ ID NO: 3255879 - RNA, 19 nt, Artificial Sequence
  Description of Artificial Sequence: Synthetic oligonucleotide
acagaguugggcccucacc

SEQ ID NO: 3255880 - RNA, 19 nt, Artificial Sequence
  Description of Artificial Sequence: Synthetic oligonucleotide
acagggugugaccuuaggg

SEQ ID NO: 3255881 - RNA, 19 nt, Artificial Sequence
  Description of Artificial Sequence: Synthetic oligonucleotide
guagcuaaaugguggagug

SEQ ID NO: 3255882 - RNA, 19 nt, Artificial Sequence
  Description of Artificial Sequence: Synthetic oligonucleotide
aaucccugagagccacacc

SEQ ID NO: 3255883 - RNA, 19 nt, Artificial Sequence
  Description of Artificial Sequence: Synthetic oligonucleotide
uucacucucuaccauugca

SEQ ID NO: 3255884 - RNA, 19 nt, Artificial Sequence
  Description of Artificial Sequence: Synthetic oligonucleotide
gguuuuaaaggccaucccc

SEQ ID NO: 3255885 - RNA, 19 nt, Artificial Sequence
  Description of Artificial Sequence: Synthetic oligonucleotide
ucccuuggaauguuggugc

SEQ ID NO: 3255886 - RNA, 19 nt, Artificial Sequence
  Description of Artificial Sequence: Synthetic oligonucleotide
ugggcccucacccagguug

SEQ ID NO: 3255887 - RNA, 19 nt, Artificial Sequence
  Description of Artificial Sequence: Synthetic oligonucleotide
aaggccauccccacucucc

SEQ ID NO: 3255888 - RNA, 19 nt, Artificial Sequence
  Description of Artificial Sequence: Synthetic oligonucleotide
ugucugcugaggaagcugc

SEQ ID NO: 3255889 - RNA, 19 nt, Artificial Sequence
  Description of Artificial Sequence: Synthetic oligonucleotide
acauagaaguccugacagg

SEQ ID NO: 3255890 - RNA, 19 nt, Artificial Sequence
  Description of Artificial Sequence: Synthetic oligonucleotide
cuauucaaaaguacuagaa

SEQ ID NO: 3255891 - RNA, 19 nt, Artificial Sequence
  Description of Artificial Sequence: Synthetic oligonucleotide
uaagcaccagcauuuacaa

SEQ ID NO: 3255892 - RNA, 19 nt, Artificial Sequence
  Description of Artificial Sequence: Synthetic oligonucleotide
uggcccuucacucucuacc

SEQ ID NO: 3255893 - RNA, 19 nt, Artificial Sequence
  Description of Artificial Sequence: Synthetic oligonucleotide
augaaggguaacaaguauc

SEQ ID NO: 3255894 - RNA, 19 nt, Artificial Sequence
  Description of Artificial Sequence: Synthetic oligonucleotide
ucacacaguaacucuggcc

SEQ ID NO: 3255895 - RNA, 19 nt, Artificial Sequence
  Description of Artificial Sequence: Synthetic oligonucleotide
acucagcaagguuuuaaag

SEQ ID NO: 3255896 - RNA, 19 nt, Artificial Sequence
  Description of Artificial Sequence: Synthetic oligonucleotide
cagaguugggcccucaccc

SEQ ID NO: 3255897 - RNA, 19 nt, Artificial Sequence
  Description of Artificial Sequence: Synthetic oligonucleotide
aguaacucuggcccuucac

SEQ ID NO: 3255898 - RNA, 19 nt, Artificial Sequence
  Description of Artificial Sequence: Synthetic oligonucleotide
caaaaguacuagaaaauaa

SEQ ID NO: 3255899 - RNA, 19 nt, Artificial Sequence
  Description of Artificial Sequence: Synthetic oligonucleotide
gaaagugcuguuuugcucu

SEQ ID NO: 3255900 - RNA, 19 nt, Artificial Sequence
  Description of Artificial Sequence: Synthetic oligonucleotide
agcaagauaacggggcugg

SEQ ID NO: 3255901 - RNA, 19 nt, Artificial Sequence
  Description of Artificial Sequence: Synthetic oligonucleotide
uuugcagacaaagcuuaag

SEQ ID NO: 3255902 - RNA, 19 nt, Artificial Sequence
  Description of Artificial Sequence: Synthetic oligonucleotide
aacugggaagcaugacagg

SEQ ID NO: 3255903 - RNA, 19 nt, Artificial Sequence
  Description of Artificial Sequence: Synthetic oligonucleotide
ugggacuauucaaaaguac

SEQ ID NO: 3255904 - RNA, 19 nt, Artificial Sequence
  Description of Artificial Sequence: Synthetic oligonucleotide
augcuugcccaccaugaac

SEQ ID NO: 3255905 - RNA, 19 nt, Artificial Sequence
  Description of Artificial Sequence: Synthetic oligonucleotide
uuuuguaucacauuaaagg

SEQ ID NO: 3255906 - RNA, 19 nt, Artificial Sequence
  Description of Artificial Sequence: Synthetic oligonucleotide
gacaauaugaugcugaaag

SEQ ID NO: 3255907 - RNA, 19 nt, Artificial Sequence
  Description of Artificial Sequence: Synthetic oligonucleotide
uuuuauuauguucagaacu

SEQ ID NO: 3255908 - RNA, 19 nt, Artificial Sequence
  Description of Artificial Sequence: Synthetic oligonucleotide
aauuuuauuauguucagaa

SEQ ID NO: 3255909 - RNA, 19 nt, Artificial Sequence
  Description of Artificial Sequence: Synthetic oligonucleotide
uuuguaucacauuaaaggg

SEQ ID NO: 3255910 - RNA, 19 nt, Artificial Sequence
  Description of Artificial Sequence: Synthetic oligonucleotide
uagaauuuuauuauguuca

SEQ ID NO: 3255911 - RNA, 19 nt, Artificial Sequence
  Description of Artificial Sequence: Synthetic oligonucleotide
gaugcugaaaguuaaacug

SEQ ID NO: 3255912 - RNA, 19 nt, Artificial Sequence
  Description of Artificial Sequence: Synthetic oligonucleotide
gugucuacaagguagaugg

SEQ ID NO: 3255913 - RNA, 19 nt, Artificial Sequence
  Description of Artificial Sequence: Synthetic oligonucleotide
uuaauuuuguaucacauua

SEQ ID NO: 3255914 - RNA, 19 nt, Artificial Sequence
  Description of Artificial Sequence: Synthetic oligonucleotide
auagaauuuuauuauguuc

SEQ ID NO: 3255915 - RNA, 19 nt, Artificial Sequence
  Description of Artificial Sequence: Synthetic oligonucleotide
auagccuuaauuuuguauc

SEQ ID NO: 3255916 - RNA, 19 nt, Artificial Sequence
  Description of Artificial Sequence: Synthetic oligonucleotide
uuuauuauguucagaacug

SEQ ID NO: 3255917 - RNA, 19 nt, Artificial Sequence
  Description of Artificial Sequence: Synthetic oligonucleotide
uuugaaauccaauagaauu

SEQ ID NO: 3255918 - RNA, 19 nt, Artificial Sequence
  Description of Artificial Sequence: Synthetic oligonucleotide
ugucucauuacccucagag

SEQ ID NO: 3255919 - RNA, 19 nt, Artificial Sequence
  Description of Artificial Sequence: Synthetic oligonucleotide
ucaauugauuauuaguucc

SEQ ID NO: 3255920 - RNA, 19 nt, Artificial Sequence
  Description of Artificial Sequence: Synthetic oligonucleotide
ucucauuacccucagagca

SEQ ID NO: 3255921 - RNA, 19 nt, Artificial Sequence
  Description of Artificial Sequence: Synthetic oligonucleotide
ucuggauaggacaauauga

SEQ ID NO: 3255922 - RNA, 19 nt, Artificial Sequence
  Description of Artificial Sequence: Synthetic oligonucleotide
auauuuugcaaaucuuuac

SEQ ID NO: 3255923 - RNA, 19 nt, Artificial Sequence
  Description of Artificial Sequence: Synthetic oligonucleotide
aagucaauugauuauuagu

SEQ ID NO: 3255924 - RNA, 19 nt, Artificial Sequence
  Description of Artificial Sequence: Synthetic oligonucleotide
uuaaacugaauauuuugca

SEQ ID NO: 3255925 - RNA, 19 nt, Artificial Sequence
  Description of Artificial Sequence: Synthetic oligonucleotide
aguuaaacugaauauuuug

SEQ ID NO: 3255926 - RNA, 19 nt, Artificial Sequence
  Description of Artificial Sequence: Synthetic oligonucleotide
uuugcaaaucuuuacugag

SEQ ID NO: 3255927 - RNA, 19 nt, Artificial Sequence
  Description of Artificial Sequence: Synthetic oligonucleotide
uauuuugcaaaucuuuacu

SEQ ID NO: 3255928 - RNA, 19 nt, Artificial Sequence
  Description of Artificial Sequence: Synthetic oligonucleotide
auuuuauuauguucagaac

SEQ ID NO: 3255929 - RNA, 19 nt, Artificial Sequence
  Description of Artificial Sequence: Synthetic oligonucleotide
ugugccuugacuuuugaug

SEQ ID NO: 3255930 - RNA, 19 nt, Artificial Sequence
  Description of Artificial Sequence: Synthetic oligonucleotide
ugaaaguuaaacugaauau

SEQ ID NO: 3255931 - RNA, 19 nt, Artificial Sequence
  Description of Artificial Sequence: Synthetic oligonucleotide
aaacugaauauuuugcaaa

SEQ ID NO: 3255932 - RNA, 19 nt, Artificial Sequence
  Description of Artificial Sequence: Synthetic oligonucleotide
ucuacaagguagaugggag

SEQ ID NO: 3255933 - RNA, 19 nt, Artificial Sequence
  Description of Artificial Sequence: Synthetic oligonucleotide
aauuuuguaucacauuaaa

SEQ ID NO: 3255934 - RNA, 19 nt, Artificial Sequence
  Description of Artificial Sequence: Synthetic oligonucleotide
aaucuuuacugagaacagc

SEQ ID NO: 3255935 - RNA, 19 nt, Artificial Sequence
  Description of Artificial Sequence: Synthetic oligonucleotide
aauagaauuuuauuauguu

SEQ ID NO: 3255936 - RNA, 19 nt, Artificial Sequence
  Description of Artificial Sequence: Synthetic oligonucleotide
aauagccuuaauuuuguau

SEQ ID NO: 3255937 - RNA, 19 nt, Artificial Sequence
  Description of Artificial Sequence: Synthetic oligonucleotide
uccaauagaauuuuauuau

SEQ ID NO: 3255938 - RNA, 19 nt, Artificial Sequence
  Description of Artificial Sequence: Synthetic oligonucleotide
auuuugcaaaucuuuacug

SEQ ID NO: 3255939 - RNA, 19 nt, Artificial Sequence
  Description of Artificial Sequence: Synthetic oligonucleotide
aauccaauagaauuuuauu

SEQ ID NO: 3255940 - RNA, 19 nt, Artificial Sequence
  Description of Artificial Sequence: Synthetic oligonucleotide
uugacuuuugaugaccagg

SEQ ID NO: 3255941 - RNA, 19 nt, Artificial Sequence
  Description of Artificial Sequence: Synthetic oligonucleotide
uuuugcaaaucuuuacuga

SEQ ID NO: 3255942 - RNA, 19 nt, Artificial Sequence
  Description of Artificial Sequence: Synthetic oligonucleotide
ugaccaggugucuacaagg

SEQ ID NO: 3255943 - RNA, 19 nt, Artificial Sequence
  Description of Artificial Sequence: Synthetic oligonucleotide
uuuacugagaacagcgagu

SEQ ID NO: 3255944 - RNA, 19 nt, Artificial Sequence
  Description of Artificial Sequence: Synthetic oligonucleotide
ugucugcuaccucuaaucg

SEQ ID NO: 3255945 - RNA, 19 nt, Artificial Sequence
  Description of Artificial Sequence: Synthetic oligonucleotide
uguaucacauuaaaggguu

SEQ ID NO: 3255946 - RNA, 19 nt, Artificial Sequence
  Description of Artificial Sequence: Synthetic oligonucleotide
uugaaauccaauagaauuu

SEQ ID NO: 3255947 - RNA, 19 nt, Artificial Sequence
  Description of Artificial Sequence: Synthetic oligonucleotide
uaagucaauugauuauuag

SEQ ID NO: 3255948 - RNA, 19 nt, Artificial Sequence
  Description of Artificial Sequence: Synthetic oligonucleotide
agcaccagcauuugucugc

SEQ ID NO: 3255949 - RNA, 19 nt, Artificial Sequence
  Description of Artificial Sequence: Synthetic oligonucleotide
aaggguuguggucuuuugg

SEQ ID NO: 3255950 - RNA, 19 nt, Artificial Sequence
  Description of Artificial Sequence: Synthetic oligonucleotide
caaaucuuuacugagaaca

SEQ ID NO: 3255951 - RNA, 19 nt, Artificial Sequence
  Description of Artificial Sequence: Synthetic oligonucleotide
uuguaucacauuaaagggu

SEQ ID NO: 3255952 - RNA, 19 nt, Artificial Sequence
  Description of Artificial Sequence: Synthetic oligonucleotide
guuaaacugaauauuuugc

SEQ ID NO: 3255953 - RNA, 19 nt, Artificial Sequence
  Description of Artificial Sequence: Synthetic oligonucleotide
acuuuugaugaccaggugu

SEQ ID NO: 3255954 - RNA, 19 nt, Artificial Sequence
  Description of Artificial Sequence: Synthetic oligonucleotide
uuauguucagaacuguaaa

SEQ ID NO: 3255955 - RNA, 19 nt, Artificial Sequence
  Description of Artificial Sequence: Synthetic oligonucleotide
uugaagucuggauaggaca

SEQ ID NO: 3255956 - RNA, 19 nt, Artificial Sequence
  Description of Artificial Sequence: Synthetic oligonucleotide
aucuuuacugagaacagcg

SEQ ID NO: 3255957 - RNA, 19 nt, Artificial Sequence
  Description of Artificial Sequence: Synthetic oligonucleotide
uaaacugaauauuuugcaa

SEQ ID NO: 3255958 - RNA, 19 nt, Artificial Sequence
  Description of Artificial Sequence: Synthetic oligonucleotide
uaaucgucagggaugggag

SEQ ID NO: 3255959 - RNA, 19 nt, Artificial Sequence
  Description of Artificial Sequence: Synthetic oligonucleotide
uaggacaauaugaugcuga

SEQ ID NO: 3255960 - RNA, 19 nt, Artificial Sequence
  Description of Artificial Sequence: Synthetic oligonucleotide
ugcaaaucuuuacugagaa

SEQ ID NO: 3255961 - RNA, 19 nt, Artificial Sequence
  Description of Artificial Sequence: Synthetic oligonucleotide
aaaguuaaacugaauauuu

SEQ ID NO: 3255962 - RNA, 19 nt, Artificial Sequence
  Description of Artificial Sequence: Synthetic oligonucleotide
aaucgucagggaugggagc

SEQ ID NO: 3255963 - RNA, 19 nt, Artificial Sequence
  Description of Artificial Sequence: Synthetic oligonucleotide
ucacauuaaaggguugugg

SEQ ID NO: 3255964 - RNA, 19 nt, Artificial Sequence
  Description of Artificial Sequence: Synthetic oligonucleotide
agaauuuuauuauguucag

SEQ ID NO: 3255965 - RNA, 19 nt, Artificial Sequence
  Description of Artificial Sequence: Synthetic oligonucleotide
aacugaauauuuugcaaau

SEQ ID NO: 3255966 - RNA, 19 nt, Artificial Sequence
  Description of Artificial Sequence: Synthetic oligonucleotide
ucugcuaccucuaaucguc

SEQ ID NO: 3255967 - RNA, 19 nt, Artificial Sequence
  Description of Artificial Sequence: Synthetic oligonucleotide
auccaauagaauuuuauua

SEQ ID NO: 3255968 - RNA, 19 nt, Artificial Sequence
  Description of Artificial Sequence: Synthetic oligonucleotide
ugacuuuugaugaccaggu

SEQ ID NO: 3255969 - RNA, 19 nt, Artificial Sequence
  Description of Artificial Sequence: Synthetic oligonucleotide
uuuuggauuugaagucugg

SEQ ID NO: 3255970 - RNA, 19 nt, Artificial Sequence
  Description of Artificial Sequence: Synthetic oligonucleotide
accagcauuugucugcuac

SEQ ID NO: 3255971 - RNA, 19 nt, Artificial Sequence
  Description of Artificial Sequence: Synthetic oligonucleotide
acauuaaaggguugugguc

SEQ ID NO: 3255972 - RNA, 19 nt, Artificial Sequence
  Description of Artificial Sequence: Synthetic oligonucleotide
ugaugcugaaaguuaaacu

SEQ ID NO: 3255973 - RNA, 19 nt, Artificial Sequence
  Description of Artificial Sequence: Synthetic oligonucleotide
uguguuugcagaacugucu

SEQ ID NO: 3255974 - RNA, 19 nt, Artificial Sequence
  Description of Artificial Sequence: Synthetic oligonucleotide
cucagagcaaccuacucag

SEQ ID NO: 3255975 - RNA, 19 nt, Artificial Sequence
  Description of Artificial Sequence: Synthetic oligonucleotide
uggucuuuuggauuugaag

SEQ ID NO: 3255976 - RNA, 19 nt, Artificial Sequence
  Description of Artificial Sequence: Synthetic oligonucleotide
uggauuugaagucuggaua

SEQ ID NO: 3255977 - RNA, 19 nt, Artificial Sequence
  Description of Artificial Sequence: Synthetic oligonucleotide
cuuuacugagaacagcgag

SEQ ID NO: 3255978 - RNA, 19 nt, Artificial Sequence
  Description of Artificial Sequence: Synthetic oligonucleotide
ggauaggacaauaugaugc

SEQ ID NO: 3255979 - RNA, 19 nt, Artificial Sequence
  Description of Artificial Sequence: Synthetic oligonucleotide
aauguuuccaguguguguu

SEQ ID NO: 3255980 - RNA, 19 nt, Artificial Sequence
  Description of Artificial Sequence: Synthetic oligonucleotide
cuuuugaugaccagguguc

SEQ ID NO: 3255981 - RNA, 19 nt, Artificial Sequence
  Description of Artificial Sequence: Synthetic oligonucleotide
uuugaagucuggauaggac

SEQ ID NO: 3255982 - RNA, 19 nt, Artificial Sequence
  Description of Artificial Sequence: Synthetic oligonucleotide
aaaucuuuacugagaacag

SEQ ID NO: 3255983 - RNA, 19 nt, Artificial Sequence
  Description of Artificial Sequence: Synthetic oligonucleotide
uggaaauguuuccagugug

SEQ ID NO: 3255984 - RNA, 19 nt, Artificial Sequence
  Description of Artificial Sequence: Synthetic oligonucleotide
agaacugucucauuacccu

SEQ ID NO: 3255985 - RNA, 19 nt, Artificial Sequence
  Description of Artificial Sequence: Synthetic oligonucleotide
aaauguuuccagugugugu

SEQ ID NO: 3255986 - RNA, 19 nt, Artificial Sequence
  Description of Artificial Sequence: Synthetic oligonucleotide
aauauuuugcaaaucuuua

SEQ ID NO: 3255987 - RNA, 19 nt, Artificial Sequence
  Description of Artificial Sequence: Synthetic oligonucleotide
uugauuauuaguuccuuuu

SEQ ID NO: 3255988 - RNA, 19 nt, Artificial Sequence
  Description of Artificial Sequence: Synthetic oligonucleotide
uuuugaaauccaauagaau

SEQ ID NO: 3255989 - RNA, 19 nt, Artificial Sequence
  Description of Artificial Sequence: Synthetic oligonucleotide
uaauuuuguaucacauuaa

SEQ ID NO: 3255990 - RNA, 19 nt, Artificial Sequence
  Description of Artificial Sequence: Synthetic oligonucleotide
augaugcugaaaguuaaac

SEQ ID NO: 3255991 - RNA, 19 nt, Artificial Sequence
  Description of Artificial Sequence: Synthetic oligonucleotide
aaaauagccuuaauuuugu

SEQ ID NO: 3255992 - RNA, 19 nt, Artificial Sequence
  Description of Artificial Sequence: Synthetic oligonucleotide
ggauuugaagucuggauag

SEQ ID NO: 3255993 - RNA, 19 nt, Artificial Sequence
  Description of Artificial Sequence: Synthetic oligonucleotide
aaugggcuggaaauguuuc

SEQ ID NO: 3255994 - RNA, 19 nt, Artificial Sequence
  Description of Artificial Sequence: Synthetic oligonucleotide
ugaagucuggauaggacaa

SEQ ID NO: 3255995 - RNA, 19 nt, Artificial Sequence
  Description of Artificial Sequence: Synthetic oligonucleotide
uuacugagaacagcgagug

SEQ ID NO: 3255996 - RNA, 19 nt, Artificial Sequence
  Description of Artificial Sequence: Synthetic oligonucleotide
aauaugaugcugaaaguua

SEQ ID NO: 3255997 - RNA, 19 nt, Artificial Sequence
  Description of Artificial Sequence: Synthetic oligonucleotide
aaauccaauagaauuuuau

SEQ ID NO: 3255998 - RNA, 19 nt, Artificial Sequence
  Description of Artificial Sequence: Synthetic oligonucleotide
ugaauauuuugcaaaucuu

SEQ ID NO: 3255999 - RNA, 19 nt, Artificial Sequence
  Description of Artificial Sequence: Synthetic oligonucleotide
uauguucagaacuguaaaa

SEQ ID NO: 3256000 - RNA, 19 nt, Artificial Sequence
  Description of Artificial Sequence: Synthetic oligonucleotide
cuaccucuaaucgucaggg

SEQ ID NO: 3256001 - RNA, 19 nt, Artificial Sequence
  Description of Artificial Sequence: Synthetic oligonucleotide
acugagaacagcgagugca

SEQ ID NO: 3256002 - RNA, 19 nt, Artificial Sequence
  Description of Artificial Sequence: Synthetic oligonucleotide
auuuuguaucacauuaaag

SEQ ID NO: 3256003 - RNA, 19 nt, Artificial Sequence
  Description of Artificial Sequence: Synthetic oligonucleotide
uguguucuguguuugcaga

SEQ ID NO: 3256004 - RNA, 19 nt, Artificial Sequence
  Description of Artificial Sequence: Synthetic oligonucleotide
augggcuggaaauguuucc

SEQ ID NO: 3256005 - RNA, 19 nt, Artificial Sequence
  Description of Artificial Sequence: Synthetic oligonucleotide
uuaaucauggaaaagacag

SEQ ID NO: 3256006 - RNA, 19 nt, Artificial Sequence
  Description of Artificial Sequence: Synthetic oligonucleotide
aaaguuagcguguaauugc

SEQ ID NO: 3256007 - RNA, 19 nt, Artificial Sequence
  Description of Artificial Sequence: Synthetic oligonucleotide
uaaaaguuugaaaagcugg

SEQ ID NO: 3256008 - RNA, 19 nt, Artificial Sequence
  Description of Artificial Sequence: Synthetic oligonucleotide
aauuaaauaguaaaguuag

SEQ ID NO: 3256009 - RNA, 19 nt, Artificial Sequence
  Description of Artificial Sequence: Synthetic oligonucleotide
uuaaauaguaaaguuagcg

SEQ ID NO: 3256010 - RNA, 19 nt, Artificial Sequence
  Description of Artificial Sequence: Synthetic oligonucleotide
ucaaauauagccuugacuc

SEQ ID NO: 3256011 - RNA, 19 nt, Artificial Sequence
  Description of Artificial Sequence: Synthetic oligonucleotide
aaauaguaaaguuagcgug

SEQ ID NO: 3256012 - RNA, 19 nt, Artificial Sequence
  Description of Artificial Sequence: Synthetic oligonucleotide
aaagaaaacacccugugca

SEQ ID NO: 3256013 - RNA, 19 nt, Artificial Sequence
  Description of Artificial Sequence: Synthetic oligonucleotide
uuuaguaaaauuaaauagu

SEQ ID NO: 3256014 - RNA, 19 nt, Artificial Sequence
  Description of Artificial Sequence: Synthetic oligonucleotide
uguaauugcuacaugaaag

SEQ ID NO: 3256015 - RNA, 19 nt, Artificial Sequence
  Description of Artificial Sequence: Synthetic oligonucleotide
aaugacugaacauccacac

SEQ ID NO: 3256016 - RNA, 19 nt, Artificial Sequence
  Description of Artificial Sequence: Synthetic oligonucleotide
aauuuuaugguuucauaag

SEQ ID NO: 3256017 - RNA, 19 nt, Artificial Sequence
  Description of Artificial Sequence: Synthetic oligonucleotide
auuuauacaauuuuaauuu

SEQ ID NO: 3256018 - RNA, 19 nt, Artificial Sequence
  Description of Artificial Sequence: Synthetic oligonucleotide
aaucuuuucggucagaaau

SEQ ID NO: 3256019 - RNA, 19 nt, Artificial Sequence
  Description of Artificial Sequence: Synthetic oligonucleotide
uuaucuguuauuuauacaa

SEQ ID NO: 3256020 - RNA, 19 nt, Artificial Sequence
  Description of Artificial Sequence: Synthetic oligonucleotide
aaguuugaaaagcuggagg

SEQ ID NO: 3256021 - RNA, 19 nt, Artificial Sequence
  Description of Artificial Sequence: Synthetic oligonucleotide
ugugcagagaauuggaagg

SEQ ID NO: 3256022 - RNA, 19 nt, Artificial Sequence
  Description of Artificial Sequence: Synthetic oligonucleotide
aauuggaaggaucagcuca

SEQ ID NO: 3256023 - RNA, 19 nt, Artificial Sequence
  Description of Artificial Sequence: Synthetic oligonucleotide
uauuuauacaauuuuaauu

SEQ ID NO: 3256024 - RNA, 19 nt, Artificial Sequence
  Description of Artificial Sequence: Synthetic oligonucleotide
ucugauucaacucauuuuc

SEQ ID NO: 3256025 - RNA, 19 nt, Artificial Sequence
  Description of Artificial Sequence: Synthetic oligonucleotide
cuacaugaaaguuaaacac

SEQ ID NO: 3256026 - RNA, 19 nt, Artificial Sequence
  Description of Artificial Sequence: Synthetic oligonucleotide
uguaauguaccauuccucc

SEQ ID NO: 3256027 - RNA, 19 nt, Artificial Sequence
  Description of Artificial Sequence: Synthetic oligonucleotide
guaaaauuaaauaguaaag

SEQ ID NO: 3256028 - RNA, 19 nt, Artificial Sequence
  Description of Artificial Sequence: Synthetic oligonucleotide
aaauuuguccacuccugac

SEQ ID NO: 3256029 - RNA, 19 nt, Artificial Sequence
  Description of Artificial Sequence: Synthetic oligonucleotide
uuuugauuuuguaagugug

SEQ ID NO: 3256030 - RNA, 19 nt, Artificial Sequence
  Description of Artificial Sequence: Synthetic oligonucleotide
uuaguaaaauuaaauagua

SEQ ID NO: 3256031 - RNA, 19 nt, Artificial Sequence
  Description of Artificial Sequence: Synthetic oligonucleotide
aaaucugccagccuuccag

SEQ ID NO: 3256032 - RNA, 19 nt, Artificial Sequence
  Description of Artificial Sequence: Synthetic oligonucleotide
uaaauaguaaaguuagcgu

SEQ ID NO: 3256033 - RNA, 19 nt, Artificial Sequence
  Description of Artificial Sequence: Synthetic oligonucleotide
uuacaaagaaaacacccug

SEQ ID NO: 3256034 - RNA, 19 nt, Artificial Sequence
  Description of Artificial Sequence: Synthetic oligonucleotide
aaaugguuuaaucauggaa

SEQ ID NO: 3256035 - RNA, 19 nt, Artificial Sequence
  Description of Artificial Sequence: Synthetic oligonucleotide
aaggcuaauguuuuaagaa

SEQ ID NO: 3256036 - RNA, 19 nt, Artificial Sequence
  Description of Artificial Sequence: Synthetic oligonucleotide
gaugggguaaucuggaaag

SEQ ID NO: 3256037 - RNA, 19 nt, Artificial Sequence
  Description of Artificial Sequence: Synthetic oligonucleotide
uggaaaggaaaucuguaag

SEQ ID NO: 3256038 - RNA, 19 nt, Artificial Sequence
  Description of Artificial Sequence: Synthetic oligonucleotide
auuuuaauuuuaugguuuc

SEQ ID NO: 3256039 - RNA, 19 nt, Artificial Sequence
  Description of Artificial Sequence: Synthetic oligonucleotide
cuugaguuguaauuguucc

SEQ ID NO: 3256040 - RNA, 19 nt, Artificial Sequence
  Description of Artificial Sequence: Synthetic oligonucleotide
uacagaugggguaaucugg

SEQ ID NO: 3256041 - RNA, 19 nt, Artificial Sequence
  Description of Artificial Sequence: Synthetic oligonucleotide
uaugauuaaaaguuugaaa

SEQ ID NO: 3256042 - RNA, 19 nt, Artificial Sequence
  Description of Artificial Sequence: Synthetic oligonucleotide
ugaagucucagaaaugcug

SEQ ID NO: 3256043 - RNA, 19 nt, Artificial Sequence
  Description of Artificial Sequence: Synthetic oligonucleotide
aagaauguccgggaagugc

SEQ ID NO: 3256044 - RNA, 19 nt, Artificial Sequence
  Description of Artificial Sequence: Synthetic oligonucleotide
ugagauaaucuucagacuu

SEQ ID NO: 3256045 - RNA, 19 nt, Artificial Sequence
  Description of Artificial Sequence: Synthetic oligonucleotide
augcagaugaauccggccc

SEQ ID NO: 3256046 - RNA, 19 nt, Artificial Sequence
  Description of Artificial Sequence: Synthetic oligonucleotide
auaaaauuuguccacuccu

SEQ ID NO: 3256047 - RNA, 19 nt, Artificial Sequence
  Description of Artificial Sequence: Synthetic oligonucleotide
aaucauggaaaagacagca

SEQ ID NO: 3256048 - RNA, 19 nt, Artificial Sequence
  Description of Artificial Sequence: Synthetic oligonucleotide
uuuuaugguuucauaagga

SEQ ID NO: 3256049 - RNA, 19 nt, Artificial Sequence
  Description of Artificial Sequence: Synthetic oligonucleotide
uuuaaucauggaaaagaca

SEQ ID NO: 3256050 - RNA, 19 nt, Artificial Sequence
  Description of Artificial Sequence: Synthetic oligonucleotide
uuuauuguaauguaccauu

SEQ ID NO: 3256051 - RNA, 19 nt, Artificial Sequence
  Description of Artificial Sequence: Synthetic oligonucleotide
gaaaucuguaaguacagca

SEQ ID NO: 3256052 - RNA, 19 nt, Artificial Sequence
  Description of Artificial Sequence: Synthetic oligonucleotide
guuguaauuguucccaugc

SEQ ID NO: 3256053 - RNA, 19 nt, Artificial Sequence
  Description of Artificial Sequence: Synthetic oligonucleotide
aacacguucucugaagaac

SEQ ID NO: 3256054 - RNA, 19 nt, Artificial Sequence
  Description of Artificial Sequence: Synthetic oligonucleotide
uguacgaugagcucugaug

SEQ ID NO: 3256055 - RNA, 19 nt, Artificial Sequence
  Description of Artificial Sequence: Synthetic oligonucleotide
uccagaggaagaauguccg

SEQ ID NO: 3256056 - RNA, 19 nt, Artificial Sequence
  Description of Artificial Sequence: Synthetic oligonucleotide
aaagugacuccugaguuuc

SEQ ID NO: 3256057 - RNA, 19 nt, Artificial Sequence
  Description of Artificial Sequence: Synthetic oligonucleotide
aauuuguccacuccugaca

SEQ ID NO: 3256058 - RNA, 19 nt, Artificial Sequence
  Description of Artificial Sequence: Synthetic oligonucleotide
aaaucuguaaguacagcag

SEQ ID NO: 3256059 - RNA, 19 nt, Artificial Sequence
  Description of Artificial Sequence: Synthetic oligonucleotide
auuguaauguaccauuccu

SEQ ID NO: 3256060 - RNA, 19 nt, Artificial Sequence
  Description of Artificial Sequence: Synthetic oligonucleotide
ucagaaaugcugcugagau

SEQ ID NO: 3256061 - RNA, 19 nt, Artificial Sequence
  Description of Artificial Sequence: Synthetic oligonucleotide
uuauuuauacaauuuuaau

SEQ ID NO: 3256062 - RNA, 19 nt, Artificial Sequence
  Description of Artificial Sequence: Synthetic oligonucleotide
acuccugacaaauauccuc

SEQ ID NO: 3256063 - RNA, 19 nt, Artificial Sequence
  Description of Artificial Sequence: Synthetic oligonucleotide
aaaauuuguccacuccuga

SEQ ID NO: 3256064 - RNA, 19 nt, Artificial Sequence
  Description of Artificial Sequence: Synthetic oligonucleotide
uauuguaauguaccauucc

SEQ ID NO: 3256065 - RNA, 19 nt, Artificial Sequence
  Description of Artificial Sequence: Synthetic oligonucleotide
uaaaguuagcguguaauug

SEQ ID NO: 3256066 - RNA, 19 nt, Artificial Sequence
  Description of Artificial Sequence: Synthetic oligonucleotide
uucaauggaaaggaaaucu

SEQ ID NO: 3256067 - RNA, 19 nt, Artificial Sequence
  Description of Artificial Sequence: Synthetic oligonucleotide
uguaaguacagcagcaauc

SEQ ID NO: 3256068 - RNA, 19 nt, Artificial Sequence
  Description of Artificial Sequence: Synthetic oligonucleotide
uuaucaaauggaugccacg

SEQ ID NO: 3256069 - RNA, 19 nt, Artificial Sequence
  Description of Artificial Sequence: Synthetic oligonucleotide
aauuuuaauuuuaugguuu

SEQ ID NO: 3256070 - RNA, 19 nt, Artificial Sequence
  Description of Artificial Sequence: Synthetic oligonucleotide
acgcaaauaaagugacucc

SEQ ID NO: 3256071 - RNA, 19 nt, Artificial Sequence
  Description of Artificial Sequence: Synthetic oligonucleotide
gacuucauuauaaaauuug

SEQ ID NO: 3256072 - RNA, 19 nt, Artificial Sequence
  Description of Artificial Sequence: Synthetic oligonucleotide
gaaaagacagcauggaaaa

SEQ ID NO: 3256073 - RNA, 19 nt, Artificial Sequence
  Description of Artificial Sequence: Synthetic oligonucleotide
uccacacgcaaauaaagug

SEQ ID NO: 3256074 - RNA, 19 nt, Artificial Sequence
  Description of Artificial Sequence: Synthetic oligonucleotide
aaaguuugaaaagcuggag

SEQ ID NO: 3256075 - RNA, 19 nt, Artificial Sequence
  Description of Artificial Sequence: Synthetic oligonucleotide
uaauguaccauuccuccac

SEQ ID NO: 3256076 - RNA, 19 nt, Artificial Sequence
  Description of Artificial Sequence: Synthetic oligonucleotide
ucuguuauuuauacaauuu

SEQ ID NO: 3256077 - RNA, 19 nt, Artificial Sequence
  Description of Artificial Sequence: Synthetic oligonucleotide
auuccgcugaguuuccacc

SEQ ID NO: 3256078 - RNA, 19 nt, Artificial Sequence
  Description of Artificial Sequence: Synthetic oligonucleotide
uucuuacaaagaaaacacc

SEQ ID NO: 3256079 - RNA, 19 nt, Artificial Sequence
  Description of Artificial Sequence: Synthetic oligonucleotide
ugcuacaugaaaguuaaac

SEQ ID NO: 3256080 - RNA, 19 nt, Artificial Sequence
  Description of Artificial Sequence: Synthetic oligonucleotide
guaccauuccuccacagag

SEQ ID NO: 3256081 - RNA, 19 nt, Artificial Sequence
  Description of Artificial Sequence: Synthetic oligonucleotide
gucagaaaugguuuaauca

SEQ ID NO: 3256082 - RNA, 19 nt, Artificial Sequence
  Description of Artificial Sequence: Synthetic oligonucleotide
agaaaugcugcugagauaa

SEQ ID NO: 3256083 - RNA, 19 nt, Artificial Sequence
  Description of Artificial Sequence: Synthetic oligonucleotide
aaaugcugcugagauaauc

SEQ ID NO: 3256084 - RNA, 19 nt, Artificial Sequence
  Description of Artificial Sequence: Synthetic oligonucleotide
aaauauagccuugacucca

SEQ ID NO: 3256085 - RNA, 19 nt, Artificial Sequence
  Description of Artificial Sequence: Synthetic oligonucleotide
acaaagaaaacacccugug

SEQ ID NO: 3256086 - RNA, 19 nt, Artificial Sequence
  Description of Artificial Sequence: Synthetic oligonucleotide
ugugugugcagagaauugg

SEQ ID NO: 3256087 - RNA, 19 nt, Artificial Sequence
  Description of Artificial Sequence: Synthetic oligonucleotide
agcauggaaaaugacuggc

SEQ ID NO: 3256088 - RNA, 19 nt, Artificial Sequence
  Description of Artificial Sequence: Synthetic oligonucleotide
aaaaguuugaaaagcugga

SEQ ID NO: 3256089 - RNA, 19 nt, Artificial Sequence
  Description of Artificial Sequence: Synthetic oligonucleotide
uacaaagaaaacacccugu

SEQ ID NO: 3256090 - RNA, 19 nt, Artificial Sequence
  Description of Artificial Sequence: Synthetic oligonucleotide
uuuuguaagugugugugug

SEQ ID NO: 3256091 - RNA, 19 nt, Artificial Sequence
  Description of Artificial Sequence: Synthetic oligonucleotide
ucaaauggaugccacgaac

SEQ ID NO: 3256092 - RNA, 19 nt, Artificial Sequence
  Description of Artificial Sequence: Synthetic oligonucleotide
ugugcaaugaagucucaga

SEQ ID NO: 3256093 - RNA, 19 nt, Artificial Sequence
  Description of Artificial Sequence: Synthetic oligonucleotide
ucuuuucggucagaaaugg

SEQ ID NO: 3256094 - RNA, 19 nt, Artificial Sequence
  Description of Artificial Sequence: Synthetic oligonucleotide
ugaguuguaauuguuccca

SEQ ID NO: 3256095 - RNA, 19 nt, Artificial Sequence
  Description of Artificial Sequence: Synthetic oligonucleotide
uaaucauggaaaagacagc

SEQ ID NO: 3256096 - RNA, 19 nt, Artificial Sequence
  Description of Artificial Sequence: Synthetic oligonucleotide
uccaggucaaauauagccu

SEQ ID NO: 3256097 - RNA, 19 nt, Artificial Sequence
  Description of Artificial Sequence: Synthetic oligonucleotide
uaguaaaauuaaauaguaa

SEQ ID NO: 3256098 - RNA, 19 nt, Artificial Sequence
  Description of Artificial Sequence: Synthetic oligonucleotide
uccgucuaugauuaaaagu

SEQ ID NO: 3256099 - RNA, 19 nt, Artificial Sequence
  Description of Artificial Sequence: Synthetic oligonucleotide
uuuaauuuuaugguuucau

SEQ ID NO: 3256100 - RNA, 19 nt, Artificial Sequence
  Description of Artificial Sequence: Synthetic oligonucleotide
acagcauggaaaaugacug

SEQ ID NO: 3256101 - RNA, 19 nt, Artificial Sequence
  Description of Artificial Sequence: Synthetic oligonucleotide
uuauuguaauguaccauuc

SEQ ID NO: 3256102 - RNA, 19 nt, Artificial Sequence
  Description of Artificial Sequence: Synthetic oligonucleotide
gaagucucagaaaugcugc

SEQ ID NO: 3256103 - RNA, 19 nt, Artificial Sequence
  Description of Artificial Sequence: Synthetic oligonucleotide
aaucugccagccuuccagg

SEQ ID NO: 3256104 - RNA, 19 nt, Artificial Sequence
  Description of Artificial Sequence: Synthetic oligonucleotide
gaaaacacccugugcaaug

SEQ ID NO: 3256105 - RNA, 19 nt, Artificial Sequence
  Description of Artificial Sequence: Synthetic oligonucleotide
uuauugaugauuaaaaugu

SEQ ID NO: 3256106 - RNA, 19 nt, Artificial Sequence
  Description of Artificial Sequence: Synthetic oligonucleotide
aaucuuguugugcucaugc

SEQ ID NO: 3256107 - RNA, 19 nt, Artificial Sequence
  Description of Artificial Sequence: Synthetic oligonucleotide
uuuauugaugauuaaaaug

SEQ ID NO: 3256108 - RNA, 19 nt, Artificial Sequence
  Description of Artificial Sequence: Synthetic oligonucleotide
uugaugauuaaaauguccc

SEQ ID NO: 3256109 - RNA, 19 nt, Artificial Sequence
  Description of Artificial Sequence: Synthetic oligonucleotide
acagauagcaccgugaaac

SEQ ID NO: 3256110 - RNA, 19 nt, Artificial Sequence
  Description of Artificial Sequence: Synthetic oligonucleotide
ugaacuacuugccugaggc

SEQ ID NO: 3256111 - RNA, 19 nt, Artificial Sequence
  Description of Artificial Sequence: Synthetic oligonucleotide
uguaccuugagugacauac

SEQ ID NO: 3256112 - RNA, 19 nt, Artificial Sequence
  Description of Artificial Sequence: Synthetic oligonucleotide
gacauacugcguuugaagg

SEQ ID NO: 3256113 - RNA, 19 nt, Artificial Sequence
  Description of Artificial Sequence: Synthetic oligonucleotide
gauuaaaauguccccagcc

SEQ ID NO: 3256114 - RNA, 19 nt, Artificial Sequence
  Description of Artificial Sequence: Synthetic oligonucleotide
ggaaaggaagccuacaucg

SEQ ID NO: 3256115 - RNA, 19 nt, Artificial Sequence
  Description of Artificial Sequence: Synthetic oligonucleotide
aauuucuucucugcguagc

SEQ ID NO: 3256116 - RNA, 19 nt, Artificial Sequence
  Description of Artificial Sequence: Synthetic oligonucleotide
ugugccaugguguaaaacu

SEQ ID NO: 3256117 - RNA, 19 nt, Artificial Sequence
  Description of Artificial Sequence: Synthetic oligonucleotide
cuuguugugcucaugcagg

SEQ ID NO: 3256118 - RNA, 19 nt, Artificial Sequence
  Description of Artificial Sequence: Synthetic oligonucleotide
gaccagagcuucuugaagg

SEQ ID NO: 3256119 - RNA, 19 nt, Artificial Sequence
  Description of Artificial Sequence: Synthetic oligonucleotide
ucuuguugugcucaugcag

SEQ ID NO: 3256120 - RNA, 19 nt, Artificial Sequence
  Description of Artificial Sequence: Synthetic oligonucleotide
agggucaccuauuauugcc

SEQ ID NO: 3256121 - RNA, 19 nt, Artificial Sequence
  Description of Artificial Sequence: Synthetic oligonucleotide
aacuacuugccugaggcuc

SEQ ID NO: 3256122 - RNA, 19 nt, Artificial Sequence
  Description of Artificial Sequence: Synthetic oligonucleotide
cugggaaaugacaacagag

SEQ ID NO: 3256123 - RNA, 19 nt, Artificial Sequence
  Description of Artificial Sequence: Synthetic oligonucleotide
aagcguuucccgcacuggc

SEQ ID NO: 3256124 - RNA, 19 nt, Artificial Sequence
  Description of Artificial Sequence: Synthetic oligonucleotide
aagugcaucguuuauugau

SEQ ID NO: 3256125 - RNA, 19 nt, Artificial Sequence
  Description of Artificial Sequence: Synthetic oligonucleotide
ugaugauuaaaaugucccc

SEQ ID NO: 3256126 - RNA, 19 nt, Artificial Sequence
  Description of Artificial Sequence: Synthetic oligonucleotide
ugggaaaugacaacagaga

SEQ ID NO: 3256127 - RNA, 19 nt, Artificial Sequence
  Description of Artificial Sequence: Synthetic oligonucleotide
augauuaaaauguccccag

SEQ ID NO: 3256128 - RNA, 19 nt, Artificial Sequence
  Description of Artificial Sequence: Synthetic oligonucleotide
ugacauacugcguuugaag

SEQ ID NO: 3256129 - RNA, 19 nt, Artificial Sequence
  Description of Artificial Sequence: Synthetic oligonucleotide
acucaguccuuccuagucc

SEQ ID NO: 3256130 - RNA, 19 nt, Artificial Sequence
  Description of Artificial Sequence: Synthetic oligonucleotide
uguaaaacuucuucucaca

SEQ ID NO: 3256131 - RNA, 19 nt, Artificial Sequence
  Description of Artificial Sequence: Synthetic oligonucleotide
aauaaagugcaucguuuau

SEQ ID NO: 3256132 - RNA, 19 nt, Artificial Sequence
  Description of Artificial Sequence: Synthetic oligonucleotide
guaaaacuucuucucacag

SEQ ID NO: 3256133 - RNA, 19 nt, Artificial Sequence
  Description of Artificial Sequence: Synthetic oligonucleotide
ucacagaucucgcaggaga

SEQ ID NO: 3256134 - RNA, 19 nt, Artificial Sequence
  Description of Artificial Sequence: Synthetic oligonucleotide
gaugauuaaaaugucccca

SEQ ID NO: 3256135 - RNA, 19 nt, Artificial Sequence
  Description of Artificial Sequence: Synthetic oligonucleotide
uaaaauguccccagcccug

SEQ ID NO: 3256136 - RNA, 19 nt, Artificial Sequence
  Description of Artificial Sequence: Synthetic oligonucleotide
aagggcaagcacugggcac

SEQ ID NO: 3256137 - RNA, 19 nt, Artificial Sequence
  Description of Artificial Sequence: Synthetic oligonucleotide
uccuuccuaguccagagga

SEQ ID NO: 3256138 - RNA, 19 nt, Artificial Sequence
  Description of Artificial Sequence: Synthetic oligonucleotide
cagaggacagccaagucag

SEQ ID NO: 3256139 - RNA, 19 nt, Artificial Sequence
  Description of Artificial Sequence: Synthetic oligonucleotide
ugauuaaaauguccccagc

SEQ ID NO: 3256140 - RNA, 19 nt, Artificial Sequence
  Description of Artificial Sequence: Synthetic oligonucleotide
ugcacgugucuccuggugg

SEQ ID NO: 3256141 - RNA, 19 nt, Artificial Sequence
  Description of Artificial Sequence: Synthetic oligonucleotide
uaccuugagugacauacug

SEQ ID NO: 3256142 - RNA, 19 nt, Artificial Sequence
  Description of Artificial Sequence: Synthetic oligonucleotide
cauguccuugguaugggcg

SEQ ID NO: 3256143 - RNA, 19 nt, Artificial Sequence
  Description of Artificial Sequence: Synthetic oligonucleotide
ugcaggaggggccaggagc

SEQ ID NO: 3256144 - RNA, 19 nt, Artificial Sequence
  Description of Artificial Sequence: Synthetic oligonucleotide
gaagggucaccuauuauug

SEQ ID NO: 3256145 - RNA, 19 nt, Artificial Sequence
  Description of Artificial Sequence: Synthetic oligonucleotide
agaugcacgugucuccugg

SEQ ID NO: 3256146 - RNA, 19 nt, Artificial Sequence
  Description of Artificial Sequence: Synthetic oligonucleotide
acaucuguacagaauaaag

SEQ ID NO: 3256147 - RNA, 19 nt, Artificial Sequence
  Description of Artificial Sequence: Synthetic oligonucleotide
uauugccugccucccaagg

SEQ ID NO: 3256148 - RNA, 19 nt, Artificial Sequence
  Description of Artificial Sequence: Synthetic oligonucleotide
acacguuacgcacuggaug

SEQ ID NO: 3256149 - RNA, 19 nt, Artificial Sequence
  Description of Artificial Sequence: Synthetic oligonucleotide
accuauuauugccugccuc

SEQ ID NO: 3256150 - RNA, 19 nt, Artificial Sequence
  Description of Artificial Sequence: Synthetic oligonucleotide
gaacagacacagaugcacg

SEQ ID NO: 3256151 - RNA, 19 nt, Artificial Sequence
  Description of Artificial Sequence: Synthetic oligonucleotide
auugccugccucccaaggg

SEQ ID NO: 3256152 - RNA, 19 nt, Artificial Sequence
  Description of Artificial Sequence: Synthetic oligonucleotide
ggggaacagacacagaugc

SEQ ID NO: 3256153 - RNA, 19 nt, Artificial Sequence
  Description of Artificial Sequence: Synthetic oligonucleotide
aagcacugggcacuggcug

SEQ ID NO: 3256154 - RNA, 19 nt, Artificial Sequence
  Description of Artificial Sequence: Synthetic oligonucleotide
ggagaauuucuucucugcg

SEQ ID NO: 3256155 - RNA, 19 nt, Artificial Sequence
  Description of Artificial Sequence: Synthetic oligonucleotide
ucccacaggggucuaaaca

SEQ ID NO: 3256156 - RNA, 19 nt, Artificial Sequence
  Description of Artificial Sequence: Synthetic oligonucleotide
ucaccuauuauugccugcc

SEQ ID NO: 3256157 - RNA, 19 nt, Artificial Sequence
  Description of Artificial Sequence: Synthetic oligonucleotide
ugcugggaaaugacaacag

SEQ ID NO: 3256158 - RNA, 19 nt, Artificial Sequence
  Description of Artificial Sequence: Synthetic oligonucleotide
gaagccuacaucggggucc

SEQ ID NO: 3256159 - RNA, 19 nt, Artificial Sequence
  Description of Artificial Sequence: Synthetic oligonucleotide
aguccccuugggcacaggc

SEQ ID NO: 3256160 - RNA, 19 nt, Artificial Sequence
  Description of Artificial Sequence: Synthetic oligonucleotide
cuccauggguuucugaggc

SEQ ID NO: 3256161 - RNA, 19 nt, Artificial Sequence
  Description of Artificial Sequence: Synthetic oligonucleotide
ugaaacccugaacuacuug

SEQ ID NO: 3256162 - RNA, 19 nt, Artificial Sequence
  Description of Artificial Sequence: Synthetic oligonucleotide
acaucggggucccugauca

SEQ ID NO: 3256163 - RNA, 19 nt, Artificial Sequence
  Description of Artificial Sequence: Synthetic oligonucleotide
ugggcuguggcacaccaga

SEQ ID NO: 3256164 - RNA, 19 nt, Artificial Sequence
  Description of Artificial Sequence: Synthetic oligonucleotide
uuccuaguccagaggacag

SEQ ID NO: 3256165 - RNA, 19 nt, Artificial Sequence
  Description of Artificial Sequence: Synthetic oligonucleotide
gaauuucuucucugcguag

SEQ ID NO: 3256166 - RNA, 19 nt, Artificial Sequence
  Description of Artificial Sequence: Synthetic oligonucleotide
ugugccaguccccuugggc

SEQ ID NO: 3256167 - RNA, 19 nt, Artificial Sequence
  Description of Artificial Sequence: Synthetic oligonucleotide
gaauaaagugcaucguuua

SEQ ID NO: 3256168 - RNA, 19 nt, Artificial Sequence
  Description of Artificial Sequence: Synthetic oligonucleotide
acauacugcguuugaagga

SEQ ID NO: 3256169 - RNA, 19 nt, Artificial Sequence
  Description of Artificial Sequence: Synthetic oligonucleotide
guugugcucaugcagggac

SEQ ID NO: 3256170 - RNA, 19 nt, Artificial Sequence
  Description of Artificial Sequence: Synthetic oligonucleotide
cuugguaugggcgaccaug

SEQ ID NO: 3256171 - RNA, 19 nt, Artificial Sequence
  Description of Artificial Sequence: Synthetic oligonucleotide
aaagugcaucguuuauuga

SEQ ID NO: 3256172 - RNA, 19 nt, Artificial Sequence
  Description of Artificial Sequence: Synthetic oligonucleotide
ucguuuauugaugauuaaa

SEQ ID NO: 3256173 - RNA, 19 nt, Artificial Sequence
  Description of Artificial Sequence: Synthetic oligonucleotide
cagcgguuguugaagaccc

SEQ ID NO: 3256174 - RNA, 19 nt, Artificial Sequence
  Description of Artificial Sequence: Synthetic oligonucleotide
aacccugaacuacuugccu

SEQ ID NO: 3256175 - RNA, 19 nt, Artificial Sequence
  Description of Artificial Sequence: Synthetic oligonucleotide
uugccugaggcuccuguag

SEQ ID NO: 3256176 - RNA, 19 nt, Artificial Sequence
  Description of Artificial Sequence: Synthetic oligonucleotide
acaacagagaagggucacc

SEQ ID NO: 3256177 - RNA, 19 nt, Artificial Sequence
  Description of Artificial Sequence: Synthetic oligonucleotide
ugccugaggcuccuguagg

SEQ ID NO: 3256178 - RNA, 19 nt, Artificial Sequence
  Description of Artificial Sequence: Synthetic oligonucleotide
gaagaggaggccucaugug

SEQ ID NO: 3256179 - RNA, 19 nt, Artificial Sequence
  Description of Artificial Sequence: Synthetic oligonucleotide
cauacugcguuugaaggac

SEQ ID NO: 3256180 - RNA, 19 nt, Artificial Sequence
  Description of Artificial Sequence: Synthetic oligonucleotide
ugcguagccgugcacaauc

SEQ ID NO: 3256181 - RNA, 19 nt, Artificial Sequence
  Description of Artificial Sequence: Synthetic oligonucleotide
uugguaugggcgaccaugu

SEQ ID NO: 3256182 - RNA, 19 nt, Artificial Sequence
  Description of Artificial Sequence: Synthetic oligonucleotide
ugacucuccaggcugggaa

SEQ ID NO: 3256183 - RNA, 19 nt, Artificial Sequence
  Description of Artificial Sequence: Synthetic oligonucleotide
ccuauuauugccugccucc

SEQ ID NO: 3256184 - RNA, 19 nt, Artificial Sequence
  Description of Artificial Sequence: Synthetic oligonucleotide
ugaucacucaguccuuccu

SEQ ID NO: 3256185 - RNA, 19 nt, Artificial Sequence
  Description of Artificial Sequence: Synthetic oligonucleotide
ugggaaaggaagccuacau

SEQ ID NO: 3256186 - RNA, 19 nt, Artificial Sequence
  Description of Artificial Sequence: Synthetic oligonucleotide
uuacgcacuggauguuccg

SEQ ID NO: 3256187 - RNA, 19 nt, Artificial Sequence
  Description of Artificial Sequence: Synthetic oligonucleotide
caggggucuaaacacacug

SEQ ID NO: 3256188 - RNA, 19 nt, Artificial Sequence
  Description of Artificial Sequence: Synthetic oligonucleotide
agacagugcagagugcagg

SEQ ID NO: 3256189 - RNA, 19 nt, Artificial Sequence
  Description of Artificial Sequence: Synthetic oligonucleotide
agcucauucuccugcagga

SEQ ID NO: 3256190 - RNA, 19 nt, Artificial Sequence
  Description of Artificial Sequence: Synthetic oligonucleotide
aagccuacaucgggguccc

SEQ ID NO: 3256191 - RNA, 19 nt, Artificial Sequence
  Description of Artificial Sequence: Synthetic oligonucleotide
uguacagaauaaagugcau

SEQ ID NO: 3256192 - RNA, 19 nt, Artificial Sequence
  Description of Artificial Sequence: Synthetic oligonucleotide
uguagggcccaccccuggg

SEQ ID NO: 3256193 - RNA, 19 nt, Artificial Sequence
  Description of Artificial Sequence: Synthetic oligonucleotide
gugaagggcauguccuugg

SEQ ID NO: 3256194 - RNA, 19 nt, Artificial Sequence
  Description of Artificial Sequence: Synthetic oligonucleotide
acacagaugcacgugucuc

SEQ ID NO: 3256195 - RNA, 19 nt, Artificial Sequence
  Description of Artificial Sequence: Synthetic oligonucleotide
uagccgugcacaaucuugu

SEQ ID NO: 3256196 - RNA, 19 nt, Artificial Sequence
  Description of Artificial Sequence: Synthetic oligonucleotide
uccgcucgcagucugucug

SEQ ID NO: 3256197 - RNA, 19 nt, Artificial Sequence
  Description of Artificial Sequence: Synthetic oligonucleotide
uucucucccugucugggcu

SEQ ID NO: 3256198 - RNA, 19 nt, Artificial Sequence
  Description of Artificial Sequence: Synthetic oligonucleotide
agugcaucguuuauugaug

SEQ ID NO: 3256199 - RNA, 19 nt, Artificial Sequence
  Description of Artificial Sequence: Synthetic oligonucleotide
ugaggcuccuguagggccc

SEQ ID NO: 3256200 - RNA, 19 nt, Artificial Sequence
  Description of Artificial Sequence: Synthetic oligonucleotide
cagauagcaccgugaaacc

SEQ ID NO: 3256201 - RNA, 19 nt, Artificial Sequence
  Description of Artificial Sequence: Synthetic oligonucleotide
cccaguguggccaugcugg

SEQ ID NO: 3256202 - RNA, 19 nt, Artificial Sequence
  Description of Artificial Sequence: Synthetic oligonucleotide
agaauaaagugcaucguuu

SEQ ID NO: 3256203 - RNA, 19 nt, Artificial Sequence
  Description of Artificial Sequence: Synthetic oligonucleotide
acccugaacuacuugccug

SEQ ID NO: 3256204 - RNA, 19 nt, Artificial Sequence
  Description of Artificial Sequence: Synthetic oligonucleotide
gcuguggcacaccagacag

SEQ ID NO: 3256205 - RNA, 19 nt, Artificial Sequence
  Description of Artificial Sequence: Synthetic oligonucleotide
uagaugguaauucugaagg

SEQ ID NO: 3256206 - RNA, 19 nt, Artificial Sequence
  Description of Artificial Sequence: Synthetic oligonucleotide
aaauaauucucucagagaa

SEQ ID NO: 3256207 - RNA, 19 nt, Artificial Sequence
  Description of Artificial Sequence: Synthetic oligonucleotide
aagauuugaaagcuaaagg

SEQ ID NO: 3256208 - RNA, 19 nt, Artificial Sequence
  Description of Artificial Sequence: Synthetic oligonucleotide
aaaggauugacauugauuu

SEQ ID NO: 3256209 - RNA, 19 nt, Artificial Sequence
  Description of Artificial Sequence: Synthetic oligonucleotide
auuauuucugcucagauca

SEQ ID NO: 3256210 - RNA, 19 nt, Artificial Sequence
  Description of Artificial Sequence: Synthetic oligonucleotide
ugauaugcaccauagaagg

SEQ ID NO: 3256211 - RNA, 19 nt, Artificial Sequence
  Description of Artificial Sequence: Synthetic oligonucleotide
auagaaggauacuaggucc

SEQ ID NO: 3256212 - RNA, 19 nt, Artificial Sequence
  Description of Artificial Sequence: Synthetic oligonucleotide
auuauaacguaguacaauc

SEQ ID NO: 3256213 - RNA, 19 nt, Artificial Sequence
  Description of Artificial Sequence: Synthetic oligonucleotide
uaauuguuuucuaagauga

SEQ ID NO: 3256214 - RNA, 19 nt, Artificial Sequence
  Description of Artificial Sequence: Synthetic oligonucleotide
ucuauuaaaugacagguac

SEQ ID NO: 3256215 - RNA, 19 nt, Artificial Sequence
  Description of Artificial Sequence: Synthetic oligonucleotide
ucuaagaugaagauguucu

SEQ ID NO: 3256216 - RNA, 19 nt, Artificial Sequence
  Description of Artificial Sequence: Synthetic oligonucleotide
aacuugaaggcuuuuggac

SEQ ID NO: 3256217 - RNA, 19 nt, Artificial Sequence
  Description of Artificial Sequence: Synthetic oligonucleotide
agaaauaauucucucagag

SEQ ID NO: 3256218 - RNA, 19 nt, Artificial Sequence
  Description of Artificial Sequence: Synthetic oligonucleotide
uaugauagacucuucaaag

SEQ ID NO: 3256219 - RNA, 19 nt, Artificial Sequence
  Description of Artificial Sequence: Synthetic oligonucleotide
aaggcuuuuggaccuaugc

SEQ ID NO: 3256220 - RNA, 19 nt, Artificial Sequence
  Description of Artificial Sequence: Synthetic oligonucleotide
gauauuccgaaucuuauug

SEQ ID NO: 3256221 - RNA, 19 nt, Artificial Sequence
  Description of Artificial Sequence: Synthetic oligonucleotide
aaucuuauuguuguucagc

SEQ ID NO: 3256222 - RNA, 19 nt, Artificial Sequence
  Description of Artificial Sequence: Synthetic oligonucleotide
agugauauuauuucugcuc

SEQ ID NO: 3256223 - RNA, 19 nt, Artificial Sequence
  Description of Artificial Sequence: Synthetic oligonucleotide
aaggauacuagguccacac

SEQ ID NO: 3256224 - RNA, 19 nt, Artificial Sequence
  Description of Artificial Sequence: Synthetic oligonucleotide
agauauaauuccucgauag

SEQ ID NO: 3256225 - RNA, 19 nt, Artificial Sequence
  Description of Artificial Sequence: Synthetic oligonucleotide
uggauuuuaagucauugug

SEQ ID NO: 3256226 - RNA, 19 nt, Artificial Sequence
  Description of Artificial Sequence: Synthetic oligonucleotide
aucuuauuguuguucagcc

SEQ ID NO: 3256227 - RNA, 19 nt, Artificial Sequence
  Description of Artificial Sequence: Synthetic oligonucleotide
auugaaacaaauuucaguu

SEQ ID NO: 3256228 - RNA, 19 nt, Artificial Sequence
  Description of Artificial Sequence: Synthetic oligonucleotide
agauuugaaagcuaaagga

SEQ ID NO: 3256229 - RNA, 19 nt, Artificial Sequence
  Description of Artificial Sequence: Synthetic oligonucleotide
uuauccaugcuaaaggagc

SEQ ID NO: 3256230 - RNA, 19 nt, Artificial Sequence
  Description of Artificial Sequence: Synthetic oligonucleotide
aaucugauuauuuucuaga

SEQ ID NO: 3256231 - RNA, 19 nt, Artificial Sequence
  Description of Artificial Sequence: Synthetic oligonucleotide
uaccaaauuauuuccaucc

SEQ ID NO: 3256232 - RNA, 19 nt, Artificial Sequence
  Description of Artificial Sequence: Synthetic oligonucleotide
uucuagauauaauuccucg

SEQ ID NO: 3256233 - RNA, 19 nt, Artificial Sequence
  Description of Artificial Sequence: Synthetic oligonucleotide
acguagauaugauagacuc

SEQ ID NO: 3256234 - RNA, 19 nt, Artificial Sequence
  Description of Artificial Sequence: Synthetic oligonucleotide
aaauuauuuccauccaugu

SEQ ID NO: 3256235 - RNA, 19 nt, Artificial Sequence
  Description of Artificial Sequence: Synthetic oligonucleotide
guucuucuaguguagaugg

SEQ ID NO: 3256236 - RNA, 19 nt, Artificial Sequence
  Description of Artificial Sequence: Synthetic oligonucleotide
aauuugguaauccauuaaa

SEQ ID NO: 3256237 - RNA, 19 nt, Artificial Sequence
  Description of Artificial Sequence: Synthetic oligonucleotide
ucagagaaugauaugcacc

SEQ ID NO: 3256238 - RNA, 19 nt, Artificial Sequence
  Description of Artificial Sequence: Synthetic oligonucleotide
aaaugcagugcuuucauau

SEQ ID NO: 3256239 - RNA, 19 nt, Artificial Sequence
  Description of Artificial Sequence: Synthetic oligonucleotide
acguaguacaaucauauug

SEQ ID NO: 3256240 - RNA, 19 nt, Artificial Sequence
  Description of Artificial Sequence: Synthetic oligonucleotide
uucaaucugauuauuuucu

SEQ ID NO: 3256241 - RNA, 19 nt, Artificial Sequence
  Description of Artificial Sequence: Synthetic oligonucleotide
aauuaguacuaggugcagc

SEQ ID NO: 3256242 - RNA, 19 nt, Artificial Sequence
  Description of Artificial Sequence: Synthetic oligonucleotide
uucaagauuuucuugauuu

SEQ ID NO: 3256243 - RNA, 19 nt, Artificial Sequence
  Description of Artificial Sequence: Synthetic oligonucleotide
uuucauaucuuguauucca

SEQ ID NO: 3256244 - RNA, 19 nt, Artificial Sequence
  Description of Artificial Sequence: Synthetic oligonucleotide
aagaugaagauguucuaga

SEQ ID NO: 3256245 - RNA, 19 nt, Artificial Sequence
  Description of Artificial Sequence: Synthetic oligonucleotide
aagcaggaagaccucgugc

SEQ ID NO: 3256246 - RNA, 19 nt, Artificial Sequence
  Description of Artificial Sequence: Synthetic oligonucleotide
ucgauaguaagcaggaaga

SEQ ID NO: 3256247 - RNA, 19 nt, Artificial Sequence
  Description of Artificial Sequence: Synthetic oligonucleotide
ugauuuaagucugauaaac

SEQ ID NO: 3256248 - RNA, 19 nt, Artificial Sequence
  Description of Artificial Sequence: Synthetic oligonucleotide
ugucauuuauuuuaaguuc

SEQ ID NO: 3256249 - RNA, 19 nt, Artificial Sequence
  Description of Artificial Sequence: Synthetic oligonucleotide
uauaauuccucgauaguaa

SEQ ID NO: 3256250 - RNA, 19 nt, Artificial Sequence
  Description of Artificial Sequence: Synthetic oligonucleotide
guaauuguuuucuaagaug

SEQ ID NO: 3256251 - RNA, 19 nt, Artificial Sequence
  Description of Artificial Sequence: Synthetic oligonucleotide
uguaauuguuuucuaagau

SEQ ID NO: 3256252 - RNA, 19 nt, Artificial Sequence
  Description of Artificial Sequence: Synthetic oligonucleotide
ugaagaagugauauuauuu

SEQ ID NO: 3256253 - RNA, 19 nt, Artificial Sequence
  Description of Artificial Sequence: Synthetic oligonucleotide
uaaggugacaagcugauuu

SEQ ID NO: 3256254 - RNA, 19 nt, Artificial Sequence
  Description of Artificial Sequence: Synthetic oligonucleotide
augcguaccaaauuauuuc

SEQ ID NO: 3256255 - RNA, 19 nt, Artificial Sequence
  Description of Artificial Sequence: Synthetic oligonucleotide
ucuauuuuauuauaacgua

SEQ ID NO: 3256256 - RNA, 19 nt, Artificial Sequence
  Description of Artificial Sequence: Synthetic oligonucleotide
auccguucaaucugguucc

SEQ ID NO: 3256257 - RNA, 19 nt, Artificial Sequence
  Description of Artificial Sequence: Synthetic oligonucleotide
uugacauugauuucacuga

SEQ ID NO: 3256258 - RNA, 19 nt, Artificial Sequence
  Description of Artificial Sequence: Synthetic oligonucleotide
gacuuggguagauaggagg

SEQ ID NO: 3256259 - RNA, 19 nt, Artificial Sequence
  Description of Artificial Sequence: Synthetic oligonucleotide
uugucauuuauuuuaaguu

SEQ ID NO: 3256260 - RNA, 19 nt, Artificial Sequence
  Description of Artificial Sequence: Synthetic oligonucleotide
uacaaguacuccaaggccu

SEQ ID NO: 3256261 - RNA, 19 nt, Artificial Sequence
  Description of Artificial Sequence: Synthetic oligonucleotide
gauccguucaaucugguuc

SEQ ID NO: 3256262 - RNA, 19 nt, Artificial Sequence
  Description of Artificial Sequence: Synthetic oligonucleotide
ugauuuauccaugcuaaag

SEQ ID NO: 3256263 - RNA, 19 nt, Artificial Sequence
  Description of Artificial Sequence: Synthetic oligonucleotide
cuuauuguuguucagccuc

SEQ ID NO: 3256264 - RNA, 19 nt, Artificial Sequence
  Description of Artificial Sequence: Synthetic oligonucleotide
uauuaaaugacagguacaa

SEQ ID NO: 3256265 - RNA, 19 nt, Artificial Sequence
  Description of Artificial Sequence: Synthetic oligonucleotide
uucaacauuacagauuugu

SEQ ID NO: 3256266 - RNA, 19 nt, Artificial Sequence
  Description of Artificial Sequence: Synthetic oligonucleotide
ucauaucuuguauuccagg

SEQ ID NO: 3256267 - RNA, 19 nt, Artificial Sequence
  Description of Artificial Sequence: Synthetic oligonucleotide
uuguuguucagccucagaa

SEQ ID NO: 3256268 - RNA, 19 nt, Artificial Sequence
  Description of Artificial Sequence: Synthetic oligonucleotide
aggaaggauauuccgaauc

SEQ ID NO: 3256269 - RNA, 19 nt, Artificial Sequence
  Description of Artificial Sequence: Synthetic oligonucleotide
auuaguacuaggugcagca

SEQ ID NO: 3256270 - RNA, 19 nt, Artificial Sequence
  Description of Artificial Sequence: Synthetic oligonucleotide
uauaacguaguacaaucau

SEQ ID NO: 3256271 - RNA, 19 nt, Artificial Sequence
  Description of Artificial Sequence: Synthetic oligonucleotide
auaguaagcaggaagaccu

SEQ ID NO: 3256272 - RNA, 19 nt, Artificial Sequence
  Description of Artificial Sequence: Synthetic oligonucleotide
ucuugauuuauccaugcua

SEQ ID NO: 3256273 - RNA, 19 nt, Artificial Sequence
  Description of Artificial Sequence: Synthetic oligonucleotide
uuucugguaugauugaaac

SEQ ID NO: 3256274 - RNA, 19 nt, Artificial Sequence
  Description of Artificial Sequence: Synthetic oligonucleotide
auuuaagucugauaaacuu

SEQ ID NO: 3256275 - RNA, 19 nt, Artificial Sequence
  Description of Artificial Sequence: Synthetic oligonucleotide
accauagaaggauacuagg

SEQ ID NO: 3256276 - RNA, 19 nt, Artificial Sequence
  Description of Artificial Sequence: Synthetic oligonucleotide
caagucuauuaaaugacag

SEQ ID NO: 3256277 - RNA, 19 nt, Artificial Sequence
  Description of Artificial Sequence: Synthetic oligonucleotide
uaauccauuaaaugcuuca

SEQ ID NO: 3256278 - RNA, 19 nt, Artificial Sequence
  Description of Artificial Sequence: Synthetic oligonucleotide
ugcccaaacacguagccag

SEQ ID NO: 3256279 - RNA, 19 nt, Artificial Sequence
  Description of Artificial Sequence: Synthetic oligonucleotide
uaagaugaagauguucuag

SEQ ID NO: 3256280 - RNA, 19 nt, Artificial Sequence
  Description of Artificial Sequence: Synthetic oligonucleotide
uuauuuccauccauguuca

SEQ ID NO: 3256281 - RNA, 19 nt, Artificial Sequence
  Description of Artificial Sequence: Synthetic oligonucleotide
auuguuuccuuccaauucu

SEQ ID NO: 3256282 - RNA, 19 nt, Artificial Sequence
  Description of Artificial Sequence: Synthetic oligonucleotide
caacauuacagauuuguuc

SEQ ID NO: 3256283 - RNA, 19 nt, Artificial Sequence
  Description of Artificial Sequence: Synthetic oligonucleotide
cucgauaguaagcaggaag

SEQ ID NO: 3256284 - RNA, 19 nt, Artificial Sequence
  Description of Artificial Sequence: Synthetic oligonucleotide
uucaucgauagccuggaga

SEQ ID NO: 3256285 - RNA, 19 nt, Artificial Sequence
  Description of Artificial Sequence: Synthetic oligonucleotide
aagauuuucuugauuuauc

SEQ ID NO: 3256286 - RNA, 19 nt, Artificial Sequence
  Description of Artificial Sequence: Synthetic oligonucleotide
aaggauugacauugauuuc

SEQ ID NO: 3256287 - RNA, 19 nt, Artificial Sequence
  Description of Artificial Sequence: Synthetic oligonucleotide
uucuaaggugacaagcuga

SEQ ID NO: 3256288 - RNA, 19 nt, Artificial Sequence
  Description of Artificial Sequence: Synthetic oligonucleotide
agagucagaguccucaucu

SEQ ID NO: 3256289 - RNA, 19 nt, Artificial Sequence
  Description of Artificial Sequence: Synthetic oligonucleotide
ucuagauauaauuccucga

SEQ ID NO: 3256290 - RNA, 19 nt, Artificial Sequence
  Description of Artificial Sequence: Synthetic oligonucleotide
uccagaaauaauucucuca

SEQ ID NO: 3256291 - RNA, 19 nt, Artificial Sequence
  Description of Artificial Sequence: Synthetic oligonucleotide
ugcguaccaaauuauuucc

SEQ ID NO: 3256292 - RNA, 19 nt, Artificial Sequence
  Description of Artificial Sequence: Synthetic oligonucleotide
agauaugauagacucuuca

SEQ ID NO: 3256293 - RNA, 19 nt, Artificial Sequence
  Description of Artificial Sequence: Synthetic oligonucleotide
uaauucugaaggaaugcgu

SEQ ID NO: 3256294 - RNA, 19 nt, Artificial Sequence
  Description of Artificial Sequence: Synthetic oligonucleotide
agacguagauaugauagac

SEQ ID NO: 3256295 - RNA, 19 nt, Artificial Sequence
  Description of Artificial Sequence: Synthetic oligonucleotide
agacgcaucaacuucuuca

SEQ ID NO: 3256296 - RNA, 19 nt, Artificial Sequence
  Description of Artificial Sequence: Synthetic oligonucleotide
auuacagauuuguucagga

SEQ ID NO: 3256297 - RNA, 19 nt, Artificial Sequence
  Description of Artificial Sequence: Synthetic oligonucleotide
ucaucgauagccuggagau

SEQ ID NO: 3256298 - RNA, 19 nt, Artificial Sequence
  Description of Artificial Sequence: Synthetic oligonucleotide
uuucuugauuuauccaugc

SEQ ID NO: 3256299 - RNA, 19 nt, Artificial Sequence
  Description of Artificial Sequence: Synthetic oligonucleotide
uccauccauguucagacgc

SEQ ID NO: 3256300 - RNA, 19 nt, Artificial Sequence
  Description of Artificial Sequence: Synthetic oligonucleotide
cauagaaggauacuagguc

SEQ ID NO: 3256301 - RNA, 19 nt, Artificial Sequence
  Description of Artificial Sequence: Synthetic oligonucleotide
acuuucuucuauuuuauua

SEQ ID NO: 3256302 - RNA, 19 nt, Artificial Sequence
  Description of Artificial Sequence: Synthetic oligonucleotide
gcugauuuaagucugauaa

SEQ ID NO: 3256303 - RNA, 19 nt, Artificial Sequence
  Description of Artificial Sequence: Synthetic oligonucleotide
gauaguaagcaggaagacc

SEQ ID NO: 3256304 - RNA, 19 nt, Artificial Sequence
  Description of Artificial Sequence: Synthetic oligonucleotide
aaauuugguaauccauuaa

SEQ ID NO: 3256305 - RNA, 19 nt, Artificial Sequence
  Description of Artificial Sequence: Synthetic oligonucleotide
auucauuacacuuauaagg

SEQ ID NO: 3256306 - RNA, 19 nt, Artificial Sequence
  Description of Artificial Sequence: Synthetic oligonucleotide
aaugauuuaucacacucac

SEQ ID NO: 3256307 - RNA, 19 nt, Artificial Sequence
  Description of Artificial Sequence: Synthetic oligonucleotide
aguucuaagacuuacuuuc

SEQ ID NO: 3256308 - RNA, 19 nt, Artificial Sequence
  Description of Artificial Sequence: Synthetic oligonucleotide
acauucauuacauuuguac

SEQ ID NO: 3256309 - RNA, 19 nt, Artificial Sequence
  Description of Artificial Sequence: Synthetic oligonucleotide
aaagggauuugccacauuc

SEQ ID NO: 3256310 - RNA, 19 nt, Artificial Sequence
  Description of Artificial Sequence: Synthetic oligonucleotide
acuuauaagguuucucucc

SEQ ID NO: 3256311 - RNA, 19 nt, Artificial Sequence
  Description of Artificial Sequence: Synthetic oligonucleotide
cuaagauagaauuuccugg

SEQ ID NO: 3256312 - RNA, 19 nt, Artificial Sequence
  Description of Artificial Sequence: Synthetic oligonucleotide
auuuguaagguuucucucc

SEQ ID NO: 3256313 - RNA, 19 nt, Artificial Sequence
  Description of Artificial Sequence: Synthetic oligonucleotide
auucauuacauuuguacgg

SEQ ID NO: 3256314 - RNA, 19 nt, Artificial Sequence
  Description of Artificial Sequence: Synthetic oligonucleotide
ugauuuaucacacucacua

SEQ ID NO: 3256315 - RNA, 19 nt, Artificial Sequence
  Description of Artificial Sequence: Synthetic oligonucleotide
uguauguauucucugauga

SEQ ID NO: 3256316 - RNA, 19 nt, Artificial Sequence
  Description of Artificial Sequence: Synthetic oligonucleotide
cauauguaaaguuuucucc

SEQ ID NO: 3256317 - RNA, 19 nt, Artificial Sequence
  Description of Artificial Sequence: Synthetic oligonucleotide
aauuuccugguaaaggacc

SEQ ID NO: 3256318 - RNA, 19 nt, Artificial Sequence
  Description of Artificial Sequence: Synthetic oligonucleotide
uaaaugauuuaucacacuc

SEQ ID NO: 3256319 - RNA, 19 nt, Artificial Sequence
  Description of Artificial Sequence: Synthetic oligonucleotide
uaaaggauuucucacauuc

SEQ ID NO: 3256320 - RNA, 19 nt, Artificial Sequence
  Description of Artificial Sequence: Synthetic oligonucleotide
uucauuacacuuauaaggu

SEQ ID NO: 3256321 - RNA, 19 nt, Artificial Sequence
  Description of Artificial Sequence: Synthetic oligonucleotide
ucuuuuaagaccugaaaac

SEQ ID NO: 3256322 - RNA, 19 nt, Artificial Sequence
  Description of Artificial Sequence: Synthetic oligonucleotide
cauucauuacauuuguacg

SEQ ID NO: 3256323 - RNA, 19 nt, Artificial Sequence
  Description of Artificial Sequence: Synthetic oligonucleotide
ucugaugucuuuuaagacc

SEQ ID NO: 3256324 - RNA, 19 nt, Artificial Sequence
  Description of Artificial Sequence: Synthetic oligonucleotide
ucuaagauagaauuuccug

SEQ ID NO: 3256325 - RNA, 19 nt, Artificial Sequence
  Description of Artificial Sequence: Synthetic oligonucleotide
ucuaagacuuacuuucugg

SEQ ID NO: 3256326 - RNA, 19 nt, Artificial Sequence
  Description of Artificial Sequence: Synthetic oligonucleotide
auucauuacauauguaaag

SEQ ID NO: 3256327 - RNA, 19 nt, Artificial Sequence
  Description of Artificial Sequence: Synthetic oligonucleotide
acauauguaaaguuuucuc

SEQ ID NO: 3256328 - RNA, 19 nt, Artificial Sequence
  Description of Artificial Sequence: Synthetic oligonucleotide
uuuaagaccugaaaacgug

SEQ ID NO: 3256329 - RNA, 19 nt, Artificial Sequence
  Description of Artificial Sequence: Synthetic oligonucleotide
acauuuguacgguuugucc

SEQ ID NO: 3256330 - RNA, 19 nt, Artificial Sequence
  Description of Artificial Sequence: Synthetic oligonucleotide
aguucuaagauagaauuuc

SEQ ID NO: 3256331 - RNA, 19 nt, Artificial Sequence
  Description of Artificial Sequence: Synthetic oligonucleotide
auuuguacgguuugucccc

SEQ ID NO: 3256332 - RNA, 19 nt, Artificial Sequence
  Description of Artificial Sequence: Synthetic oligonucleotide
cugaugaguucuaagauag

SEQ ID NO: 3256333 - RNA, 19 nt, Artificial Sequence
  Description of Artificial Sequence: Synthetic oligonucleotide
cuuuuaagaccugaaaacg

SEQ ID NO: 3256334 - RNA, 19 nt, Artificial Sequence
  Description of Artificial Sequence: Synthetic oligonucleotide
acauucauuacacuuauaa

SEQ ID NO: 3256335 - RNA, 19 nt, Artificial Sequence
  Description of Artificial Sequence: Synthetic oligonucleotide
aguaaaugauuuaucacac

SEQ ID NO: 3256336 - RNA, 19 nt, Artificial Sequence
  Description of Artificial Sequence: Synthetic oligonucleotide
uaaaggaccugucacauuc

SEQ ID NO: 3256337 - RNA, 19 nt, Artificial Sequence
  Description of Artificial Sequence: Synthetic oligonucleotide
acauucauuacauauguaa

SEQ ID NO: 3256338 - RNA, 19 nt, Artificial Sequence
  Description of Artificial Sequence: Synthetic oligonucleotide
uuuuaagaccugaaaacgu

SEQ ID NO: 3256339 - RNA, 19 nt, Artificial Sequence
  Description of Artificial Sequence: Synthetic oligonucleotide
ugaguucuaagauagaauu

SEQ ID NO: 3256340 - RNA, 19 nt, Artificial Sequence
  Description of Artificial Sequence: Synthetic oligonucleotide
acucacuacauuuguaagg

SEQ ID NO: 3256341 - RNA, 19 nt, Artificial Sequence
  Description of Artificial Sequence: Synthetic oligonucleotide
cuaagacuuacuuucuggg

SEQ ID NO: 3256342 - RNA, 19 nt, Artificial Sequence
  Description of Artificial Sequence: Synthetic oligonucleotide
aacguguaaagggauuugc

SEQ ID NO: 3256343 - RNA, 19 nt, Artificial Sequence
  Description of Artificial Sequence: Synthetic oligonucleotide
ucucugaugucuuuuaaga

SEQ ID NO: 3256344 - RNA, 19 nt, Artificial Sequence
  Description of Artificial Sequence: Synthetic oligonucleotide
auauguaaaguuuucuccu

SEQ ID NO: 3256345 - RNA, 19 nt, Artificial Sequence
  Description of Artificial Sequence: Synthetic oligonucleotide
uagaauuuccugguaaagg

SEQ ID NO: 3256346 - RNA, 19 nt, Artificial Sequence
  Description of Artificial Sequence: Synthetic oligonucleotide
agaauuuccugguaaagga

SEQ ID NO: 3256347 - RNA, 19 nt, Artificial Sequence
  Description of Artificial Sequence: Synthetic oligonucleotide
uaagauagaauuuccuggu

SEQ ID NO: 3256348 - RNA, 19 nt, Artificial Sequence
  Description of Artificial Sequence: Synthetic oligonucleotide
ucucugaugaguucuaaga

SEQ ID NO: 3256349 - RNA, 19 nt, Artificial Sequence
  Description of Artificial Sequence: Synthetic oligonucleotide
auuuaucacacucacuaca

SEQ ID NO: 3256350 - RNA, 19 nt, Artificial Sequence
  Description of Artificial Sequence: Synthetic oligonucleotide
cauuuguacgguuuguccc

SEQ ID NO: 3256351 - RNA, 19 nt, Artificial Sequence
  Description of Artificial Sequence: Synthetic oligonucleotide
uguguggauucucugaugu

SEQ ID NO: 3256352 - RNA, 19 nt, Artificial Sequence
  Description of Artificial Sequence: Synthetic oligonucleotide
acacuuauaagguuucucu

SEQ ID NO: 3256353 - RNA, 19 nt, Artificial Sequence
  Description of Artificial Sequence: Synthetic oligonucleotide
uuacuuucuggguaaagga

SEQ ID NO: 3256354 - RNA, 19 nt, Artificial Sequence
  Description of Artificial Sequence: Synthetic oligonucleotide
auuacauuuguacgguuug

SEQ ID NO: 3256355 - RNA, 19 nt, Artificial Sequence
  Description of Artificial Sequence: Synthetic oligonucleotide
cuuacuuucuggguaaagg

SEQ ID NO: 3256356 - RNA, 19 nt, Artificial Sequence
  Description of Artificial Sequence: Synthetic oligonucleotide
ucugaugaguucuaagacu

SEQ ID NO: 3256357 - RNA, 19 nt, Artificial Sequence
  Description of Artificial Sequence: Synthetic oligonucleotide
uucauuacauauguaaagu

SEQ ID NO: 3256358 - RNA, 19 nt, Artificial Sequence
  Description of Artificial Sequence: Synthetic oligonucleotide
cauucauuacacuuauaag

SEQ ID NO: 3256359 - RNA, 19 nt, Artificial Sequence
  Description of Artificial Sequence: Synthetic oligonucleotide
uuugccacauucauuacau

SEQ ID NO: 3256360 - RNA, 19 nt, Artificial Sequence
  Description of Artificial Sequence: Synthetic oligonucleotide
acauuuguaagguuucucu

SEQ ID NO: 3256361 - RNA, 19 nt, Artificial Sequence
  Description of Artificial Sequence: Synthetic oligonucleotide
uauaagguuucucuccugu

SEQ ID NO: 3256362 - RNA, 19 nt, Artificial Sequence
  Description of Artificial Sequence: Synthetic oligonucleotide
aagacuuacuuucugggua

SEQ ID NO: 3256363 - RNA, 19 nt, Artificial Sequence
  Description of Artificial Sequence: Synthetic oligonucleotide
aaggauuucucacauucau

SEQ ID NO: 3256364 - RNA, 19 nt, Artificial Sequence
  Description of Artificial Sequence: Synthetic oligonucleotide
auuucucacauucauuaca

SEQ ID NO: 3256365 - RNA, 19 nt, Artificial Sequence
  Description of Artificial Sequence: Synthetic oligonucleotide
cucacauucauuacauuug

SEQ ID NO: 3256366 - RNA, 19 nt, Artificial Sequence
  Description of Artificial Sequence: Synthetic oligonucleotide
ccugaaaacguguaaaggg

SEQ ID NO: 3256367 - RNA, 19 nt, Artificial Sequence
  Description of Artificial Sequence: Synthetic oligonucleotide
uuuguaagguuucucuccu

SEQ ID NO: 3256368 - RNA, 19 nt, Artificial Sequence
  Description of Artificial Sequence: Synthetic oligonucleotide
uuuaucacacucacuacau

SEQ ID NO: 3256369 - RNA, 19 nt, Artificial Sequence
  Description of Artificial Sequence: Synthetic oligonucleotide
ucucacauucauuacauuu

SEQ ID NO: 3256370 - RNA, 19 nt, Artificial Sequence
  Description of Artificial Sequence: Synthetic oligonucleotide
uauguaaaguuuucuccug

SEQ ID NO: 3256371 - RNA, 19 nt, Artificial Sequence
  Description of Artificial Sequence: Synthetic oligonucleotide
uauguauucucugaugagu

SEQ ID NO: 3256372 - RNA, 19 nt, Artificial Sequence
  Description of Artificial Sequence: Synthetic oligonucleotide
aagguuucucuccuguaug

SEQ ID NO: 3256373 - RNA, 19 nt, Artificial Sequence
  Description of Artificial Sequence: Synthetic oligonucleotide
uuucucacauucauuacau

SEQ ID NO: 3256374 - RNA, 19 nt, Artificial Sequence
  Description of Artificial Sequence: Synthetic oligonucleotide
uucuaagauagaauuuccu

SEQ ID NO: 3256375 - RNA, 19 nt, Artificial Sequence
  Description of Artificial Sequence: Synthetic oligonucleotide
uguaagguuucucuccugu

SEQ ID NO: 3256376 - RNA, 19 nt, Artificial Sequence
  Description of Artificial Sequence: Synthetic oligonucleotide
aaaugauuuaucacacuca

SEQ ID NO: 3256377 - RNA, 19 nt, Artificial Sequence
  Description of Artificial Sequence: Synthetic oligonucleotide
uucucugaugucuuuuaag

SEQ ID NO: 3256378 - RNA, 19 nt, Artificial Sequence
  Description of Artificial Sequence: Synthetic oligonucleotide
ucacauucauuacauuugu

SEQ ID NO: 3256379 - RNA, 19 nt, Artificial Sequence
  Description of Artificial Sequence: Synthetic oligonucleotide
uuaagaccugaaaacgugu

SEQ ID NO: 3256380 - RNA, 19 nt, Artificial Sequence
  Description of Artificial Sequence: Synthetic oligonucleotide
uguaaagggauuugccaca

SEQ ID NO: 3256381 - RNA, 19 nt, Artificial Sequence
  Description of Artificial Sequence: Synthetic oligonucleotide
ugaguucuaagacuuacuu

SEQ ID NO: 3256382 - RNA, 19 nt, Artificial Sequence
  Description of Artificial Sequence: Synthetic oligonucleotide
ugucacauucauuacacuu

SEQ ID NO: 3256383 - RNA, 19 nt, Artificial Sequence
  Description of Artificial Sequence: Synthetic oligonucleotide
gaccugaaaacguguaaag

SEQ ID NO: 3256384 - RNA, 19 nt, Artificial Sequence
  Description of Artificial Sequence: Synthetic oligonucleotide
ugucuuuuaagaccugaaa

SEQ ID NO: 3256385 - RNA, 19 nt, Artificial Sequence
  Description of Artificial Sequence: Synthetic oligonucleotide
uaucacacucacuacauuu

SEQ ID NO: 3256386 - RNA, 19 nt, Artificial Sequence
  Description of Artificial Sequence: Synthetic oligonucleotide
uguggauucucugaugucu

SEQ ID NO: 3256387 - RNA, 19 nt, Artificial Sequence
  Description of Artificial Sequence: Synthetic oligonucleotide
uuacauauguaaaguuuuc

SEQ ID NO: 3256388 - RNA, 19 nt, Artificial Sequence
  Description of Artificial Sequence: Synthetic oligonucleotide
ucuccuguauguauucucu

SEQ ID NO: 3256389 - RNA, 19 nt, Artificial Sequence
  Description of Artificial Sequence: Synthetic oligonucleotide
ucugaugaguucuaagaua

SEQ ID NO: 3256390 - RNA, 19 nt, Artificial Sequence
  Description of Artificial Sequence: Synthetic oligonucleotide
uggguaaaggauuucucac

SEQ ID NO: 3256391 - RNA, 19 nt, Artificial Sequence
  Description of Artificial Sequence: Synthetic oligonucleotide
ugccacauucauuacauau

SEQ ID NO: 3256392 - RNA, 19 nt, Artificial Sequence
  Description of Artificial Sequence: Synthetic oligonucleotide
ugaaaacguguaaagggau

SEQ ID NO: 3256393 - RNA, 19 nt, Artificial Sequence
  Description of Artificial Sequence: Synthetic oligonucleotide
agauagaauuuccugguaa

SEQ ID NO: 3256394 - RNA, 19 nt, Artificial Sequence
  Description of Artificial Sequence: Synthetic oligonucleotide
uucuaagacuuacuuucug

SEQ ID NO: 3256395 - RNA, 19 nt, Artificial Sequence
  Description of Artificial Sequence: Synthetic oligonucleotide
gucuuuuaagaccugaaaa

SEQ ID NO: 3256396 - RNA, 19 nt, Artificial Sequence
  Description of Artificial Sequence: Synthetic oligonucleotide
gauuuaucacacucacuac

SEQ ID NO: 3256397 - RNA, 19 nt, Artificial Sequence
  Description of Artificial Sequence: Synthetic oligonucleotide
acuacauuuguaagguuuc

SEQ ID NO: 3256398 - RNA, 19 nt, Artificial Sequence
  Description of Artificial Sequence: Synthetic oligonucleotide
guguaaagggauuugccac

SEQ ID NO: 3256399 - RNA, 19 nt, Artificial Sequence
  Description of Artificial Sequence: Synthetic oligonucleotide
auuacacuuauaagguuuc

SEQ ID NO: 3256400 - RNA, 19 nt, Artificial Sequence
  Description of Artificial Sequence: Synthetic oligonucleotide
uaagacuuacuuucugggu

SEQ ID NO: 3256401 - RNA, 19 nt, Artificial Sequence
  Description of Artificial Sequence: Synthetic oligonucleotide
uaagguuucucuccuguau

SEQ ID NO: 3256402 - RNA, 19 nt, Artificial Sequence
  Description of Artificial Sequence: Synthetic oligonucleotide
gauagaauuuccugguaaa

SEQ ID NO: 3256403 - RNA, 19 nt, Artificial Sequence
  Description of Artificial Sequence: Synthetic oligonucleotide
ucauuacauauguaaaguu

SEQ ID NO: 3256404 - RNA, 19 nt, Artificial Sequence
  Description of Artificial Sequence: Synthetic oligonucleotide
ucacauucauuacacuuau

SEQ ID NO: 3256405 - RNA, 19 nt, Artificial Sequence
  Description of Artificial Sequence: Synthetic oligonucleotide
uuaaguucuuaaaugaagg

SEQ ID NO: 3256406 - RNA, 19 nt, Artificial Sequence
  Description of Artificial Sequence: Synthetic oligonucleotide
uacauauugguagaaaugg

SEQ ID NO: 3256407 - RNA, 19 nt, Artificial Sequence
  Description of Artificial Sequence: Synthetic oligonucleotide
aaugaagggauaucugagg

SEQ ID NO: 3256408 - RNA, 19 nt, Artificial Sequence
  Description of Artificial Sequence: Synthetic oligonucleotide
aauacauauugguagaaau

SEQ ID NO: 3256409 - RNA, 19 nt, Artificial Sequence
  Description of Artificial Sequence: Synthetic oligonucleotide
cuugccaugaaauuccugg

SEQ ID NO: 3256410 - RNA, 19 nt, Artificial Sequence
  Description of Artificial Sequence: Synthetic oligonucleotide
aaugguuaaguucuuaaau

SEQ ID NO: 3256411 - RNA, 19 nt, Artificial Sequence
  Description of Artificial Sequence: Synthetic oligonucleotide
uaaguucuuaaaugaaggg

SEQ ID NO: 3256412 - RNA, 19 nt, Artificial Sequence
  Description of Artificial Sequence: Synthetic oligonucleotide
uaaaugaagggauaucuga

SEQ ID NO: 3256413 - RNA, 19 nt, Artificial Sequence
  Description of Artificial Sequence: Synthetic oligonucleotide
uuggaagugaagcucaugu

SEQ ID NO: 3256414 - RNA, 19 nt, Artificial Sequence
  Description of Artificial Sequence: Synthetic oligonucleotide
ugaaauuccuggugaaggg

SEQ ID NO: 3256415 - RNA, 19 nt, Artificial Sequence
  Description of Artificial Sequence: Synthetic oligonucleotide
uuaaaugaagggauaucug

SEQ ID NO: 3256416 - RNA, 19 nt, Artificial Sequence
  Description of Artificial Sequence: Synthetic oligonucleotide
augguuaaguucuuaaaug

SEQ ID NO: 3256417 - RNA, 19 nt, Artificial Sequence
  Description of Artificial Sequence: Synthetic oligonucleotide
ugguuaaguucuuaaauga

SEQ ID NO: 3256418 - RNA, 19 nt, Artificial Sequence
  Description of Artificial Sequence: Synthetic oligonucleotide
aagaggcagagguagguag

SEQ ID NO: 3256419 - RNA, 19 nt, Artificial Sequence
  Description of Artificial Sequence: Synthetic oligonucleotide
gauaauacauauugguaga

SEQ ID NO: 3256420 - RNA, 19 nt, Artificial Sequence
  Description of Artificial Sequence: Synthetic oligonucleotide
cuggugaagggcuacaugc

SEQ ID NO: 3256421 - RNA, 19 nt, Artificial Sequence
  Description of Artificial Sequence: Synthetic oligonucleotide
gaagugaagcucauguugg

SEQ ID NO: 3256422 - RNA, 19 nt, Artificial Sequence
  Description of Artificial Sequence: Synthetic oligonucleotide
aagggcuacaugcugccgg

SEQ ID NO: 3256423 - RNA, 19 nt, Artificial Sequence
  Description of Artificial Sequence: Synthetic oligonucleotide
uguaggcccaccaagccag

SEQ ID NO: 3256424 - RNA, 19 nt, Artificial Sequence
  Description of Artificial Sequence: Synthetic oligonucleotide
augaaauuccuggugaagg

SEQ ID NO: 3256425 - RNA, 19 nt, Artificial Sequence
  Description of Artificial Sequence: Synthetic oligonucleotide
aaaugaagggauaucugag

SEQ ID NO: 3256426 - RNA, 19 nt, Artificial Sequence
  Description of Artificial Sequence: Synthetic oligonucleotide
aaguucuuaaaugaaggga

SEQ ID NO: 3256427 - RNA, 19 nt, Artificial Sequence
  Description of Artificial Sequence: Synthetic oligonucleotide
guuaaguucuuaaaugaag

SEQ ID NO: 3256428 - RNA, 19 nt, Artificial Sequence
  Description of Artificial Sequence: Synthetic oligonucleotide
guagguagcggcuuggaag

SEQ ID NO: 3256429 - RNA, 19 nt, Artificial Sequence
  Description of Artificial Sequence: Synthetic oligonucleotide
ugaggacuuuccaucacgg

SEQ ID NO: 3256430 - RNA, 19 nt, Artificial Sequence
  Description of Artificial Sequence: Synthetic oligonucleotide
aaggccuucaccagguagc

SEQ ID NO: 3256431 - RNA, 19 nt, Artificial Sequence
  Description of Artificial Sequence: Synthetic oligonucleotide
aaaugguuaaguucuuaaa

SEQ ID NO: 3256432 - RNA, 19 nt, Artificial Sequence
  Description of Artificial Sequence: Synthetic oligonucleotide
aacuguaggcccaccaagc

SEQ ID NO: 3256433 - RNA, 19 nt, Artificial Sequence
  Description of Artificial Sequence: Synthetic oligonucleotide
ucauguugggcucugcaca

SEQ ID NO: 3256434 - RNA, 19 nt, Artificial Sequence
  Description of Artificial Sequence: Synthetic oligonucleotide
cuucccuccagguuguugg

SEQ ID NO: 3256435 - RNA, 19 nt, Artificial Sequence
  Description of Artificial Sequence: Synthetic oligonucleotide
uccaucacggcucccagcc

SEQ ID NO: 3256436 - RNA, 19 nt, Artificial Sequence
  Description of Artificial Sequence: Synthetic oligonucleotide
acuguaggcccaccaagcc

SEQ ID NO: 3256437 - RNA, 19 nt, Artificial Sequence
  Description of Artificial Sequence: Synthetic oligonucleotide
agcggcuuggaagugaagc

SEQ ID NO: 3256438 - RNA, 19 nt, Artificial Sequence
  Description of Artificial Sequence: Synthetic oligonucleotide
gacacuacgcaagaggcag

SEQ ID NO: 3256439 - RNA, 19 nt, Artificial Sequence
  Description of Artificial Sequence: Synthetic oligonucleotide
aagugaagcucauguuggg

SEQ ID NO: 3256440 - RNA, 19 nt, Artificial Sequence
  Description of Artificial Sequence: Synthetic oligonucleotide
aggacuuuccaucacggcu

SEQ ID NO: 3256441 - RNA, 19 nt, Artificial Sequence
  Description of Artificial Sequence: Synthetic oligonucleotide
uauugguagaaaugguuaa

SEQ ID NO: 3256442 - RNA, 19 nt, Artificial Sequence
  Description of Artificial Sequence: Synthetic oligonucleotide
uaucugaggacuuuccauc

SEQ ID NO: 3256443 - RNA, 19 nt, Artificial Sequence
  Description of Artificial Sequence: Synthetic oligonucleotide
augaagggauaucugagga

SEQ ID NO: 3256444 - RNA, 19 nt, Artificial Sequence
  Description of Artificial Sequence: Synthetic oligonucleotide
gaaaugguuaaguucuuaa

SEQ ID NO: 3256445 - RNA, 19 nt, Artificial Sequence
  Description of Artificial Sequence: Synthetic oligonucleotide
caugcugccggacacuacg

SEQ ID NO: 3256446 - RNA, 19 nt, Artificial Sequence
  Description of Artificial Sequence: Synthetic oligonucleotide
ggaagugaagcucauguug

SEQ ID NO: 3256447 - RNA, 19 nt, Artificial Sequence
  Description of Artificial Sequence: Synthetic oligonucleotide
guagaaaugguuaaguucu

SEQ ID NO: 3256448 - RNA, 19 nt, Artificial Sequence
  Description of Artificial Sequence: Synthetic oligonucleotide
aguucuuaaaugaagggau

SEQ ID NO: 3256449 - RNA, 19 nt, Artificial Sequence
  Description of Artificial Sequence: Synthetic oligonucleotide
uguuggggcaacuguaggc

SEQ ID NO: 3256450 - RNA, 19 nt, Artificial Sequence
  Description of Artificial Sequence: Synthetic oligonucleotide
gguagaaaugguuaaguuc

SEQ ID NO: 3256451 - RNA, 19 nt, Artificial Sequence
  Description of Artificial Sequence: Synthetic oligonucleotide
ucacuggugacccgaugcg

SEQ ID NO: 3256452 - RNA, 19 nt, Artificial Sequence
  Description of Artificial Sequence: Synthetic oligonucleotide
caagccagcagacuccucc

SEQ ID NO: 3256453 - RNA, 19 nt, Artificial Sequence
  Description of Artificial Sequence: Synthetic oligonucleotide
agugaagcucauguugggc

SEQ ID NO: 3256454 - RNA, 19 nt, Artificial Sequence
  Description of Artificial Sequence: Synthetic oligonucleotide
ucugcacagcuucucacug

SEQ ID NO: 3256455 - RNA, 19 nt, Artificial Sequence
  Description of Artificial Sequence: Synthetic oligonucleotide
auacauauugguagaaaug

SEQ ID NO: 3256456 - RNA, 19 nt, Artificial Sequence
  Description of Artificial Sequence: Synthetic oligonucleotide
ugagcgcucacccuugcca

SEQ ID NO: 3256457 - RNA, 19 nt, Artificial Sequence
  Description of Artificial Sequence: Synthetic oligonucleotide
acagcuucucacuggugac

SEQ ID NO: 3256458 - RNA, 19 nt, Artificial Sequence
  Description of Artificial Sequence: Synthetic oligonucleotide
cucacuggugacccgaugc

SEQ ID NO: 3256459 - RNA, 19 nt, Artificial Sequence
  Description of Artificial Sequence: Synthetic oligonucleotide
gaaggccuucaccagguag

SEQ ID NO: 3256460 - RNA, 19 nt, Artificial Sequence
  Description of Artificial Sequence: Synthetic oligonucleotide
uuguuggggcaacuguagg

SEQ ID NO: 3256461 - RNA, 19 nt, Artificial Sequence
  Description of Artificial Sequence: Synthetic oligonucleotide
ugccaugaaauuccuggug

SEQ ID NO: 3256462 - RNA, 19 nt, Artificial Sequence
  Description of Artificial Sequence: Synthetic oligonucleotide
ucggaaggccuucaccagg

SEQ ID NO: 3256463 - RNA, 19 nt, Artificial Sequence
  Description of Artificial Sequence: Synthetic oligonucleotide
auaucugaggacuuuccau

SEQ ID NO: 3256464 - RNA, 19 nt, Artificial Sequence
  Description of Artificial Sequence: Synthetic oligonucleotide
uagguagcggcuuggaagu

SEQ ID NO: 3256465 - RNA, 19 nt, Artificial Sequence
  Description of Artificial Sequence: Synthetic oligonucleotide
accagguagcgguaggccg

SEQ ID NO: 3256466 - RNA, 19 nt, Artificial Sequence
  Description of Artificial Sequence: Synthetic oligonucleotide
acccuugccaugaaauucc

SEQ ID NO: 3256467 - RNA, 19 nt, Artificial Sequence
  Description of Artificial Sequence: Synthetic oligonucleotide
gauaucugaggacuuucca

SEQ ID NO: 3256468 - RNA, 19 nt, Artificial Sequence
  Description of Artificial Sequence: Synthetic oligonucleotide
aaauuccuggugaagggcu

SEQ ID NO: 3256469 - RNA, 19 nt, Artificial Sequence
  Description of Artificial Sequence: Synthetic oligonucleotide
auugguagaaaugguuaag

SEQ ID NO: 3256470 - RNA, 19 nt, Artificial Sequence
  Description of Artificial Sequence: Synthetic oligonucleotide
uugguagaaaugguuaagu

SEQ ID NO: 3256471 - RNA, 19 nt, Artificial Sequence
  Description of Artificial Sequence: Synthetic oligonucleotide
gaaauuccuggugaagggc

SEQ ID NO: 3256472 - RNA, 19 nt, Artificial Sequence
  Description of Artificial Sequence: Synthetic oligonucleotide
agcuucucacuggugaccc

SEQ ID NO: 3256473 - RNA, 19 nt, Artificial Sequence
  Description of Artificial Sequence: Synthetic oligonucleotide
cagacuccuccacugagcg

SEQ ID NO: 3256474 - RNA, 19 nt, Artificial Sequence
  Description of Artificial Sequence: Synthetic oligonucleotide
cugaggacuuuccaucacg

SEQ ID NO: 3256475 - RNA, 19 nt, Artificial Sequence
  Description of Artificial Sequence: Synthetic oligonucleotide
ugaagggcuacaugcugcc

SEQ ID NO: 3256476 - RNA, 19 nt, Artificial Sequence
  Description of Artificial Sequence: Synthetic oligonucleotide
uucaccagguagcgguagg

SEQ ID NO: 3256477 - RNA, 19 nt, Artificial Sequence
  Description of Artificial Sequence: Synthetic oligonucleotide
ugaagggauaucugaggac

SEQ ID NO: 3256478 - RNA, 19 nt, Artificial Sequence
  Description of Artificial Sequence: Synthetic oligonucleotide
uucuuaaaugaagggauau

SEQ ID NO: 3256479 - RNA, 19 nt, Artificial Sequence
  Description of Artificial Sequence: Synthetic oligonucleotide
agcccuucccuccagguug

SEQ ID NO: 3256480 - RNA, 19 nt, Artificial Sequence
  Description of Artificial Sequence: Synthetic oligonucleotide
uaauacauauugguagaaa

SEQ ID NO: 3256481 - RNA, 19 nt, Artificial Sequence
  Description of Artificial Sequence: Synthetic oligonucleotide
ugcacagcuucucacuggu

SEQ ID NO: 3256482 - RNA, 19 nt, Artificial Sequence
  Description of Artificial Sequence: Synthetic oligonucleotide
cuuaaaugaagggauaucu

SEQ ID NO: 3256483 - RNA, 19 nt, Artificial Sequence
  Description of Artificial Sequence: Synthetic oligonucleotide
uuuccaucacggcucccag

SEQ ID NO: 3256484 - RNA, 19 nt, Artificial Sequence
  Description of Artificial Sequence: Synthetic oligonucleotide
ucuuaaaugaagggauauc

SEQ ID NO: 3256485 - RNA, 19 nt, Artificial Sequence
  Description of Artificial Sequence: Synthetic oligonucleotide
uugggcucugcacagcuuc

SEQ ID NO: 3256486 - RNA, 19 nt, Artificial Sequence
  Description of Artificial Sequence: Synthetic oligonucleotide
cauguugggcucugcacag

SEQ ID NO: 3256487 - RNA, 19 nt, Artificial Sequence
  Description of Artificial Sequence: Synthetic oligonucleotide
uguugggcucugcacagcu

SEQ ID NO: 3256488 - RNA, 19 nt, Artificial Sequence
  Description of Artificial Sequence: Synthetic oligonucleotide
caacuguaggcccaccaag

SEQ ID NO: 3256489 - RNA, 19 nt, Artificial Sequence
  Description of Artificial Sequence: Synthetic oligonucleotide
acccgaugcgcucggaagg

SEQ ID NO: 3256490 - RNA, 19 nt, Artificial Sequence
  Description of Artificial Sequence: Synthetic oligonucleotide
auauugguagaaaugguua

SEQ ID NO: 3256491 - RNA, 19 nt, Artificial Sequence
  Description of Artificial Sequence: Synthetic oligonucleotide
guuggggcaacuguaggcc

SEQ ID NO: 3256492 - RNA, 19 nt, Artificial Sequence
  Description of Artificial Sequence: Synthetic oligonucleotide
ugguagaaaugguuaaguu

SEQ ID NO: 3256493 - RNA, 19 nt, Artificial Sequence
  Description of Artificial Sequence: Synthetic oligonucleotide
cucauguugggcucugcac

SEQ ID NO: 3256494 - RNA, 19 nt, Artificial Sequence
  Description of Artificial Sequence: Synthetic oligonucleotide
agaggcagagguagguagc

SEQ ID NO: 3256495 - RNA, 19 nt, Artificial Sequence
  Description of Artificial Sequence: Synthetic oligonucleotide
caugaaauuccuggugaag

SEQ ID NO: 3256496 - RNA, 19 nt, Artificial Sequence
  Description of Artificial Sequence: Synthetic oligonucleotide
aucugaggacuuuccauca

SEQ ID NO: 3256497 - RNA, 19 nt, Artificial Sequence
  Description of Artificial Sequence: Synthetic oligonucleotide
guccagguagcgcagcucc

SEQ ID NO: 3256498 - RNA, 19 nt, Artificial Sequence
  Description of Artificial Sequence: Synthetic oligonucleotide
agcagacuccuccacugag

SEQ ID NO: 3256499 - RNA, 19 nt, Artificial Sequence
  Description of Artificial Sequence: Synthetic oligonucleotide
gacccgaugcgcucggaag

SEQ ID NO: 3256500 - RNA, 19 nt, Artificial Sequence
  Description of Artificial Sequence: Synthetic oligonucleotide
gaagggauaucugaggacu

SEQ ID NO: 3256501 - RNA, 19 nt, Artificial Sequence
  Description of Artificial Sequence: Synthetic oligonucleotide
gaggcagagguagguagcg

SEQ ID NO: 3256502 - RNA, 19 nt, Artificial Sequence
  Description of Artificial Sequence: Synthetic oligonucleotide
guuguuggggcaacuguag

SEQ ID NO: 3256503 - RNA, 19 nt, Artificial Sequence
  Description of Artificial Sequence: Synthetic oligonucleotide
uugccaugaaauuccuggu

SEQ ID NO: 3256504 - RNA, 19 nt, Artificial Sequence
  Description of Artificial Sequence: Synthetic oligonucleotide
acgcaagaggcagagguag

SEQ ID NO: 3256505 - RNA, 19 nt, Artificial Sequence
  Description of Artificial Sequence: Synthetic oligonucleotide
aaauauauaaucuggagga

SEQ ID NO: 3256506 - RNA, 19 nt, Artificial Sequence
  Description of Artificial Sequence: Synthetic oligonucleotide
uguauuuucaaauauauaa

SEQ ID NO: 3256507 - RNA, 19 nt, Artificial Sequence
  Description of Artificial Sequence: Synthetic oligonucleotide
ucuauaaucaucuuuauaa

SEQ ID NO: 3256508 - RNA, 19 nt, Artificial Sequence
  Description of Artificial Sequence: Synthetic oligonucleotide
uuauaaaauuauuugauug

SEQ ID NO: 3256509 - RNA, 19 nt, Artificial Sequence
  Description of Artificial Sequence: Synthetic oligonucleotide
uuucaaauauauaaucugg

SEQ ID NO: 3256510 - RNA, 19 nt, Artificial Sequence
  Description of Artificial Sequence: Synthetic oligonucleotide
uauuugauugcuaaaaggc

SEQ ID NO: 3256511 - RNA, 19 nt, Artificial Sequence
  Description of Artificial Sequence: Synthetic oligonucleotide
uauaaaauuauuugauugc

SEQ ID NO: 3256512 - RNA, 19 nt, Artificial Sequence
  Description of Artificial Sequence: Synthetic oligonucleotide
aacauagucauccugaaau

SEQ ID NO: 3256513 - RNA, 19 nt, Artificial Sequence
  Description of Artificial Sequence: Synthetic oligonucleotide
aaagaauuuauguccuugg

SEQ ID NO: 3256514 - RNA, 19 nt, Artificial Sequence
  Description of Artificial Sequence: Synthetic oligonucleotide
uuauuugauugcuaaaagg

SEQ ID NO: 3256515 - RNA, 19 nt, Artificial Sequence
  Description of Artificial Sequence: Synthetic oligonucleotide
aaaauuauuugauugcuaa

SEQ ID NO: 3256516 - RNA, 19 nt, Artificial Sequence
  Description of Artificial Sequence: Synthetic oligonucleotide
caaauauauaaucuggagg

SEQ ID NO: 3256517 - RNA, 19 nt, Artificial Sequence
  Description of Artificial Sequence: Synthetic oligonucleotide
uuuucaaauauauaaucug

SEQ ID NO: 3256518 - RNA, 19 nt, Artificial Sequence
  Description of Artificial Sequence: Synthetic oligonucleotide
ugucucaccauuaaagggg

SEQ ID NO: 3256519 - RNA, 19 nt, Artificial Sequence
  Description of Artificial Sequence: Synthetic oligonucleotide
uucacuauaaaauuugggu

SEQ ID NO: 3256520 - RNA, 19 nt, Artificial Sequence
  Description of Artificial Sequence: Synthetic oligonucleotide
aaggauagcuagcugggcc

SEQ ID NO: 3256521 - RNA, 19 nt, Artificial Sequence
  Description of Artificial Sequence: Synthetic oligonucleotide
ucugaauaucccaagaucu

SEQ ID NO: 3256522 - RNA, 19 nt, Artificial Sequence
  Description of Artificial Sequence: Synthetic oligonucleotide
aacccuuaaagucauuccg

SEQ ID NO: 3256523 - RNA, 19 nt, Artificial Sequence
  Description of Artificial Sequence: Synthetic oligonucleotide
uaaaauuuggguuuucucu

SEQ ID NO: 3256524 - RNA, 19 nt, Artificial Sequence
  Description of Artificial Sequence: Synthetic oligonucleotide
ugcgaaagaauuuaugucc

SEQ ID NO: 3256525 - RNA, 19 nt, Artificial Sequence
  Description of Artificial Sequence: Synthetic oligonucleotide
uauaaucuggaggagaagg

SEQ ID NO: 3256526 - RNA, 19 nt, Artificial Sequence
  Description of Artificial Sequence: Synthetic oligonucleotide
aaacugagcucucauuagc

SEQ ID NO: 3256527 - RNA, 19 nt, Artificial Sequence
  Description of Artificial Sequence: Synthetic oligonucleotide
ucaaauauauaaucuggag

SEQ ID NO: 3256528 - RNA, 19 nt, Artificial Sequence
  Description of Artificial Sequence: Synthetic oligonucleotide
ucuuauaaaauuauuugau

SEQ ID NO: 3256529 - RNA, 19 nt, Artificial Sequence
  Description of Artificial Sequence: Synthetic oligonucleotide
gagaaggauagcuagcugg

SEQ ID NO: 3256530 - RNA, 19 nt, Artificial Sequence
  Description of Artificial Sequence: Synthetic oligonucleotide
uuauaaacuucuuuuggcc

SEQ ID NO: 3256531 - RNA, 19 nt, Artificial Sequence
  Description of Artificial Sequence: Synthetic oligonucleotide
uucacauuucugaauaucc

SEQ ID NO: 3256532 - RNA, 19 nt, Artificial Sequence
  Description of Artificial Sequence: Synthetic oligonucleotide
uuucacuauaaaauuuggg

SEQ ID NO: 3256533 - RNA, 19 nt, Artificial Sequence
  Description of Artificial Sequence: Synthetic oligonucleotide
uuuucacuauaaaauuugg

SEQ ID NO: 3256534 - RNA, 19 nt, Artificial Sequence
  Description of Artificial Sequence: Synthetic oligonucleotide
aagaauuuauguccuuggg

SEQ ID NO: 3256535 - RNA, 19 nt, Artificial Sequence
  Description of Artificial Sequence: Synthetic oligonucleotide
aacacuugaucgcagagca

SEQ ID NO: 3256536 - RNA, 19 nt, Artificial Sequence
  Description of Artificial Sequence: Synthetic oligonucleotide
uuugauugcuaaaaggccu

SEQ ID NO: 3256537 - RNA, 19 nt, Artificial Sequence
  Description of Artificial Sequence: Synthetic oligonucleotide
uaucccaagaucuauaauc

SEQ ID NO: 3256538 - RNA, 19 nt, Artificial Sequence
  Description of Artificial Sequence: Synthetic oligonucleotide
auuauuugauugcuaaaag

SEQ ID NO: 3256539 - RNA, 19 nt, Artificial Sequence
  Description of Artificial Sequence: Synthetic oligonucleotide
uauaaguugggacaguguc

SEQ ID NO: 3256540 - RNA, 19 nt, Artificial Sequence
  Description of Artificial Sequence: Synthetic oligonucleotide
aaaacugagcucucauuag

SEQ ID NO: 3256541 - RNA, 19 nt, Artificial Sequence
  Description of Artificial Sequence: Synthetic oligonucleotide
aaggcuuaaagcuuugcgu

SEQ ID NO: 3256542 - RNA, 19 nt, Artificial Sequence
  Description of Artificial Sequence: Synthetic oligonucleotide
aaggcacaaaaucucgacg

SEQ ID NO: 3256543 - RNA, 19 nt, Artificial Sequence
  Description of Artificial Sequence: Synthetic oligonucleotide
uauaaucaucuuuauaagu

SEQ ID NO: 3256544 - RNA, 19 nt, Artificial Sequence
  Description of Artificial Sequence: Synthetic oligonucleotide
auuugauugcuaaaaggcc

SEQ ID NO: 3256545 - RNA, 19 nt, Artificial Sequence
  Description of Artificial Sequence: Synthetic oligonucleotide
auuaaaggggccuacagaa

SEQ ID NO: 3256546 - RNA, 19 nt, Artificial Sequence
  Description of Artificial Sequence: Synthetic oligonucleotide
uauauaaucuggaggagaa

SEQ ID NO: 3256547 - RNA, 19 nt, Artificial Sequence
  Description of Artificial Sequence: Synthetic oligonucleotide
gaauuuauguccuugggaa

SEQ ID NO: 3256548 - RNA, 19 nt, Artificial Sequence
  Description of Artificial Sequence: Synthetic oligonucleotide
aucuuuauaaguugggaca

SEQ ID NO: 3256549 - RNA, 19 nt, Artificial Sequence
  Description of Artificial Sequence: Synthetic oligonucleotide
aaucaucuuuauaaguugg

SEQ ID NO: 3256550 - RNA, 19 nt, Artificial Sequence
  Description of Artificial Sequence: Synthetic oligonucleotide
cuugucucaccauuaaagg

SEQ ID NO: 3256551 - RNA, 19 nt, Artificial Sequence
  Description of Artificial Sequence: Synthetic oligonucleotide
cuugcucugguuuacacag

SEQ ID NO: 3256552 - RNA, 19 nt, Artificial Sequence
  Description of Artificial Sequence: Synthetic oligonucleotide
uggugaguuccucaaaagg

SEQ ID NO: 3256553 - RNA, 19 nt, Artificial Sequence
  Description of Artificial Sequence: Synthetic oligonucleotide
uugucucaccauuaaaggg

SEQ ID NO: 3256554 - RNA, 19 nt, Artificial Sequence
  Description of Artificial Sequence: Synthetic oligonucleotide
uaaucaucuuuauaaguug

SEQ ID NO: 3256555 - RNA, 19 nt, Artificial Sequence
  Description of Artificial Sequence: Synthetic oligonucleotide
aaaauuuggguuuucucuu

SEQ ID NO: 3256556 - RNA, 19 nt, Artificial Sequence
  Description of Artificial Sequence: Synthetic oligonucleotide
uuccgaauuucacaucugg

SEQ ID NO: 3256557 - RNA, 19 nt, Artificial Sequence
  Description of Artificial Sequence: Synthetic oligonucleotide
cuauaaucaucuuuauaag

SEQ ID NO: 3256558 - RNA, 19 nt, Artificial Sequence
  Description of Artificial Sequence: Synthetic oligonucleotide
aauaucccaagaucuauaa

SEQ ID NO: 3256559 - RNA, 19 nt, Artificial Sequence
  Description of Artificial Sequence: Synthetic oligonucleotide
auuuccgaauuucacaucu

SEQ ID NO: 3256560 - RNA, 19 nt, Artificial Sequence
  Description of Artificial Sequence: Synthetic oligonucleotide
uauaaacuucuuuuggccu

SEQ ID NO: 3256561 - RNA, 19 nt, Artificial Sequence
  Description of Artificial Sequence: Synthetic oligonucleotide
aagaucuauaaucaucuuu

SEQ ID NO: 3256562 - RNA, 19 nt, Artificial Sequence
  Description of Artificial Sequence: Synthetic oligonucleotide
aaagucauuccggugagug

SEQ ID NO: 3256563 - RNA, 19 nt, Artificial Sequence
  Description of Artificial Sequence: Synthetic oligonucleotide
cuucauuucaggaaugauc

SEQ ID NO: 3256564 - RNA, 19 nt, Artificial Sequence
  Description of Artificial Sequence: Synthetic oligonucleotide
aaaaucucgacgaugacuu

SEQ ID NO: 3256565 - RNA, 19 nt, Artificial Sequence
  Description of Artificial Sequence: Synthetic oligonucleotide
aauauauaaucuggaggag

SEQ ID NO: 3256566 - RNA, 19 nt, Artificial Sequence
  Description of Artificial Sequence: Synthetic oligonucleotide
ucuuuauaaguugggacag

SEQ ID NO: 3256567 - RNA, 19 nt, Artificial Sequence
  Description of Artificial Sequence: Synthetic oligonucleotide
ucacauuucugaauauccc

SEQ ID NO: 3256568 - RNA, 19 nt, Artificial Sequence
  Description of Artificial Sequence: Synthetic oligonucleotide
cuuaaagucauuccgguga

SEQ ID NO: 3256569 - RNA, 19 nt, Artificial Sequence
  Description of Artificial Sequence: Synthetic oligonucleotide
ugcuaaaaggccuucauuu

SEQ ID NO: 3256570 - RNA, 19 nt, Artificial Sequence
  Description of Artificial Sequence: Synthetic oligonucleotide
ucacuauaaaauuuggguu

SEQ ID NO: 3256571 - RNA, 19 nt, Artificial Sequence
  Description of Artificial Sequence: Synthetic oligonucleotide
uuaaagucauuccggugag

SEQ ID NO: 3256572 - RNA, 19 nt, Artificial Sequence
  Description of Artificial Sequence: Synthetic oligonucleotide
uccgaauuucacaucuggg

SEQ ID NO: 3256573 - RNA, 19 nt, Artificial Sequence
  Description of Artificial Sequence: Synthetic oligonucleotide
caucuuuauaaguugggac

SEQ ID NO: 3256574 - RNA, 19 nt, Artificial Sequence
  Description of Artificial Sequence: Synthetic oligonucleotide
aaauguaguugaauuuccg

SEQ ID NO: 3256575 - RNA, 19 nt, Artificial Sequence
  Description of Artificial Sequence: Synthetic oligonucleotide
ccuacagaacacuugaucg

SEQ ID NO: 3256576 - RNA, 19 nt, Artificial Sequence
  Description of Artificial Sequence: Synthetic oligonucleotide
uucugaauaucccaagauc

SEQ ID NO: 3256577 - RNA, 19 nt, Artificial Sequence
  Description of Artificial Sequence: Synthetic oligonucleotide
uuuauaaguugggacagug

SEQ ID NO: 3256578 - RNA, 19 nt, Artificial Sequence
  Description of Artificial Sequence: Synthetic oligonucleotide
auaaaauuauuugauugcu

SEQ ID NO: 3256579 - RNA, 19 nt, Artificial Sequence
  Description of Artificial Sequence: Synthetic oligonucleotide
aaauuauuugauugcuaaa

SEQ ID NO: 3256580 - RNA, 19 nt, Artificial Sequence
  Description of Artificial Sequence: Synthetic oligonucleotide
ucuugcgaaagaauuuaug

SEQ ID NO: 3256581 - RNA, 19 nt, Artificial Sequence
  Description of Artificial Sequence: Synthetic oligonucleotide
uaggcuuuaucucccgggg

SEQ ID NO: 3256582 - RNA, 19 nt, Artificial Sequence
  Description of Artificial Sequence: Synthetic oligonucleotide
gaaagaauuuauguccuug

SEQ ID NO: 3256583 - RNA, 19 nt, Artificial Sequence
  Description of Artificial Sequence: Synthetic oligonucleotide
acuugucucaccauuaaag

SEQ ID NO: 3256584 - RNA, 19 nt, Artificial Sequence
  Description of Artificial Sequence: Synthetic oligonucleotide
aagucauuccggugagugg

SEQ ID NO: 3256585 - RNA, 19 nt, Artificial Sequence
  Description of Artificial Sequence: Synthetic oligonucleotide
auaaguugggacagugucc

SEQ ID NO: 3256586 - RNA, 19 nt, Artificial Sequence
  Description of Artificial Sequence: Synthetic oligonucleotide
caaggcuuaaagcuuugcg

SEQ ID NO: 3256587 - RNA, 19 nt, Artificial Sequence
  Description of Artificial Sequence: Synthetic oligonucleotide
uuucugaauaucccaagau

SEQ ID NO: 3256588 - RNA, 19 nt, Artificial Sequence
  Description of Artificial Sequence: Synthetic oligonucleotide
ucgacgaugacuugucuca

SEQ ID NO: 3256589 - RNA, 19 nt, Artificial Sequence
  Description of Artificial Sequence: Synthetic oligonucleotide
uguaguugaauuuccgaau

SEQ ID NO: 3256590 - RNA, 19 nt, Artificial Sequence
  Description of Artificial Sequence: Synthetic oligonucleotide
aaaggccuucauuucagga

SEQ ID NO: 3256591 - RNA, 19 nt, Artificial Sequence
  Description of Artificial Sequence: Synthetic oligonucleotide
uauaaaauuuggguuuucu

SEQ ID NO: 3256592 - RNA, 19 nt, Artificial Sequence
  Description of Artificial Sequence: Synthetic oligonucleotide
uaaaauuauuugauugcua

SEQ ID NO: 3256593 - RNA, 19 nt, Artificial Sequence
  Description of Artificial Sequence: Synthetic oligonucleotide
cagcaaaacccuuaaaguc

SEQ ID NO: 3256594 - RNA, 19 nt, Artificial Sequence
  Description of Artificial Sequence: Synthetic oligonucleotide
cuacagaacacuugaucgc

SEQ ID NO: 3256595 - RNA, 19 nt, Artificial Sequence
  Description of Artificial Sequence: Synthetic oligonucleotide
aauuuauguccuugggaau

SEQ ID NO: 3256596 - RNA, 19 nt, Artificial Sequence
  Description of Artificial Sequence: Synthetic oligonucleotide
uaaagcuuugcguaggcuu

SEQ ID NO: 3256597 - RNA, 19 nt, Artificial Sequence
  Description of Artificial Sequence: Synthetic oligonucleotide
uaaguugggacagugucca

SEQ ID NO: 3256598 - RNA, 19 nt, Artificial Sequence
  Description of Artificial Sequence: Synthetic oligonucleotide
aggcacaaaaucucgacga

SEQ ID NO: 3256599 - RNA, 19 nt, Artificial Sequence
  Description of Artificial Sequence: Synthetic oligonucleotide
auguaguugaauuuccgaa

SEQ ID NO: 3256600 - RNA, 19 nt, Artificial Sequence
  Description of Artificial Sequence: Synthetic oligonucleotide
uuacacaguucacauuucu

SEQ ID NO: 3256601 - RNA, 19 nt, Artificial Sequence
  Description of Artificial Sequence: Synthetic oligonucleotide
auaaucaucuuuauaaguu

SEQ ID NO: 3256602 - RNA, 19 nt, Artificial Sequence
  Description of Artificial Sequence: Synthetic oligonucleotide
uugcgaaagaauuuauguc

SEQ ID NO: 3256603 - RNA, 19 nt, Artificial Sequence
  Description of Artificial Sequence: Synthetic oligonucleotide
aauuucacaucuggggucu

SEQ ID NO: 3256604 - RNA, 19 nt, Artificial Sequence
  Description of Artificial Sequence: Synthetic oligonucleotide
cacaaaaucucgacgauga

SEQ ID NO: 3256605 - RNA, 19 nt, Artificial Sequence
  Description of Artificial Sequence: Synthetic oligonucleotide
aacaagaagaugaugaagc

SEQ ID NO: 3256606 - RNA, 19 nt, Artificial Sequence
  Description of Artificial Sequence: Synthetic oligonucleotide
guuaauuaggagcaguucg

SEQ ID NO: 3256607 - RNA, 19 nt, Artificial Sequence
  Description of Artificial Sequence: Synthetic oligonucleotide
aaaagaccaaaacaagaag

SEQ ID NO: 3256608 - RNA, 19 nt, Artificial Sequence
  Description of Artificial Sequence: Synthetic oligonucleotide
ucuaaugccguccuucugg

SEQ ID NO: 3256609 - RNA, 19 nt, Artificial Sequence
  Description of Artificial Sequence: Synthetic oligonucleotide
uuaauuaggagcaguucgg

SEQ ID NO: 3256610 - RNA, 19 nt, Artificial Sequence
  Description of Artificial Sequence: Synthetic oligonucleotide
aaaauacggugccuguugc

SEQ ID NO: 3256611 - RNA, 19 nt, Artificial Sequence
  Description of Artificial Sequence: Synthetic oligonucleotide
aauuaggagcaguucgggc

SEQ ID NO: 3256612 - RNA, 19 nt, Artificial Sequence
  Description of Artificial Sequence: Synthetic oligonucleotide
cuucguguuaauuaggagc

SEQ ID NO: 3256613 - RNA, 19 nt, Artificial Sequence
  Description of Artificial Sequence: Synthetic oligonucleotide
caaaacaagaagaugauga

SEQ ID NO: 3256614 - RNA, 19 nt, Artificial Sequence
  Description of Artificial Sequence: Synthetic oligonucleotide
cacacugaggaaaauacgg

SEQ ID NO: 3256615 - RNA, 19 nt, Artificial Sequence
  Description of Artificial Sequence: Synthetic oligonucleotide
acaagaagaugaugaagcc

SEQ ID NO: 3256616 - RNA, 19 nt, Artificial Sequence
  Description of Artificial Sequence: Synthetic oligonucleotide
uucguguuaauuaggagca

SEQ ID NO: 3256617 - RNA, 19 nt, Artificial Sequence
  Description of Artificial Sequence: Synthetic oligonucleotide
aaagaccaaaacaagaaga

SEQ ID NO: 3256618 - RNA, 19 nt, Artificial Sequence
  Description of Artificial Sequence: Synthetic oligonucleotide
cuucuggguaaguagaucc

SEQ ID NO: 3256619 - RNA, 19 nt, Artificial Sequence
  Description of Artificial Sequence: Synthetic oligonucleotide
gguaaguagauccagggag

SEQ ID NO: 3256620 - RNA, 19 nt, Artificial Sequence
  Description of Artificial Sequence: Synthetic oligonucleotide
aaaacaagaagaugaugaa

SEQ ID NO: 3256621 - RNA, 19 nt, Artificial Sequence
  Description of Artificial Sequence: Synthetic oligonucleotide
aaacaagaagaugaugaag

SEQ ID NO: 3256622 - RNA, 19 nt, Artificial Sequence
  Description of Artificial Sequence: Synthetic oligonucleotide
gaccaaaacaagaagauga

SEQ ID NO: 3256623 - RNA, 19 nt, Artificial Sequence
  Description of Artificial Sequence: Synthetic oligonucleotide
uggguaaguagauccaggg

SEQ ID NO: 3256624 - RNA, 19 nt, Artificial Sequence
  Description of Artificial Sequence: Synthetic oligonucleotide
gaaaauacggugccuguug

SEQ ID NO: 3256625 - RNA, 19 nt, Artificial Sequence
  Description of Artificial Sequence: Synthetic oligonucleotide
acugaggaaaauacggugc

SEQ ID NO: 3256626 - RNA, 19 nt, Artificial Sequence
  Description of Artificial Sequence: Synthetic oligonucleotide
auuaggagcaguucgggcu

SEQ ID NO: 3256627 - RNA, 19 nt, Artificial Sequence
  Description of Artificial Sequence: Synthetic oligonucleotide
gaggaauguagcuggagag

SEQ ID NO: 3256628 - RNA, 19 nt, Artificial Sequence
  Description of Artificial Sequence: Synthetic oligonucleotide
acaaacggucuccacacac

SEQ ID NO: 3256629 - RNA, 19 nt, Artificial Sequence
  Description of Artificial Sequence: Synthetic oligonucleotide
aauacggugccuguugcuc

SEQ ID NO: 3256630 - RNA, 19 nt, Artificial Sequence
  Description of Artificial Sequence: Synthetic oligonucleotide
uguuucuugcugcacaagu

SEQ ID NO: 3256631 - RNA, 19 nt, Artificial Sequence
  Description of Artificial Sequence: Synthetic oligonucleotide
uuucuugcugcacaagugu

SEQ ID NO: 3256632 - RNA, 19 nt, Artificial Sequence
  Description of Artificial Sequence: Synthetic oligonucleotide
aguagauccagggagagga

SEQ ID NO: 3256633 - RNA, 19 nt, Artificial Sequence
  Description of Artificial Sequence: Synthetic oligonucleotide
ugcacaaguguccucaggu

SEQ ID NO: 3256634 - RNA, 19 nt, Artificial Sequence
  Description of Artificial Sequence: Synthetic oligonucleotide
aagaucaggccccugggcu

SEQ ID NO: 3256635 - RNA, 19 nt, Artificial Sequence
  Description of Artificial Sequence: Synthetic oligonucleotide
cacacacugaggaaaauac

SEQ ID NO: 3256636 - RNA, 19 nt, Artificial Sequence
  Description of Artificial Sequence: Synthetic oligonucleotide
uccagggagaggaauguag

SEQ ID NO: 3256637 - RNA, 19 nt, Artificial Sequence
  Description of Artificial Sequence: Synthetic oligonucleotide
aaacggucuccacacacug

SEQ ID NO: 3256638 - RNA, 19 nt, Artificial Sequence
  Description of Artificial Sequence: Synthetic oligonucleotide
uggacaaacggucuccaca

SEQ ID NO: 3256639 - RNA, 19 nt, Artificial Sequence
  Description of Artificial Sequence: Synthetic oligonucleotide
ucuugcugcacaagugucc

SEQ ID NO: 3256640 - RNA, 19 nt, Artificial Sequence
  Description of Artificial Sequence: Synthetic oligonucleotide
uaauuaggagcaguucggg

SEQ ID NO: 3256641 - RNA, 19 nt, Artificial Sequence
  Description of Artificial Sequence: Synthetic oligonucleotide
uccuucguguuaauuagga

SEQ ID NO: 3256642 - RNA, 19 nt, Artificial Sequence
  Description of Artificial Sequence: Synthetic oligonucleotide
agucucuccugucccagcc

SEQ ID NO: 3256643 - RNA, 19 nt, Artificial Sequence
  Description of Artificial Sequence: Synthetic oligonucleotide
aaugccguccuucugggua

SEQ ID NO: 3256644 - RNA, 19 nt, Artificial Sequence
  Description of Artificial Sequence: Synthetic oligonucleotide
aauguagcuggagaggcga

SEQ ID NO: 3256645 - RNA, 19 nt, Artificial Sequence
  Description of Artificial Sequence: Synthetic oligonucleotide
ugggcugaaucuugcaggg

SEQ ID NO: 3256646 - RNA, 19 nt, Artificial Sequence
  Description of Artificial Sequence: Synthetic oligonucleotide
cugggcugaaucuugcagg

SEQ ID NO: 3256647 - RNA, 19 nt, Artificial Sequence
  Description of Artificial Sequence: Synthetic oligonucleotide
agaggaauguagcuggaga

SEQ ID NO: 3256648 - RNA, 19 nt, Artificial Sequence
  Description of Artificial Sequence: Synthetic oligonucleotide
aagaccaaaacaagaagau

SEQ ID NO: 3256649 - RNA, 19 nt, Artificial Sequence
  Description of Artificial Sequence: Synthetic oligonucleotide
gugccuguugcucaggucc

SEQ ID NO: 3256650 - RNA, 19 nt, Artificial Sequence
  Description of Artificial Sequence: Synthetic oligonucleotide
ucuugcaggggccuccaag

SEQ ID NO: 3256651 - RNA, 19 nt, Artificial Sequence
  Description of Artificial Sequence: Synthetic oligonucleotide
cugaggaaaauacggugcc

SEQ ID NO: 3256652 - RNA, 19 nt, Artificial Sequence
  Description of Artificial Sequence: Synthetic oligonucleotide
uccaagucucuccuguccc

SEQ ID NO: 3256653 - RNA, 19 nt, Artificial Sequence
  Description of Artificial Sequence: Synthetic oligonucleotide
acggucuccacacacugag

SEQ ID NO: 3256654 - RNA, 19 nt, Artificial Sequence
  Description of Artificial Sequence: Synthetic oligonucleotide
gggagaggaauguagcugg

SEQ ID NO: 3256655 - RNA, 19 nt, Artificial Sequence
  Description of Artificial Sequence: Synthetic oligonucleotide
caagaagaugaugaagccc

SEQ ID NO: 3256656 - RNA, 19 nt, Artificial Sequence
  Description of Artificial Sequence: Synthetic oligonucleotide
cacugaggaaaauacggug

SEQ ID NO: 3256657 - RNA, 19 nt, Artificial Sequence
  Description of Artificial Sequence: Synthetic oligonucleotide
aagucucuccugucccagc

SEQ ID NO: 3256658 - RNA, 19 nt, Artificial Sequence
  Description of Artificial Sequence: Synthetic oligonucleotide
gaggaaaauacggugccug

SEQ ID NO: 3256659 - RNA, 19 nt, Artificial Sequence
  Description of Artificial Sequence: Synthetic oligonucleotide
uaaguagauccagggagag

SEQ ID NO: 3256660 - RNA, 19 nt, Artificial Sequence
  Description of Artificial Sequence: Synthetic oligonucleotide
aaauacggugccuguugcu

SEQ ID NO: 3256661 - RNA, 19 nt, Artificial Sequence
  Description of Artificial Sequence: Synthetic oligonucleotide
cuggguaaguagauccagg

SEQ ID NO: 3256662 - RNA, 19 nt, Artificial Sequence
  Description of Artificial Sequence: Synthetic oligonucleotide
cuaaugccguccuucuggg

SEQ ID NO: 3256663 - RNA, 19 nt, Artificial Sequence
  Description of Artificial Sequence: Synthetic oligonucleotide
ucuggguaaguagauccag

SEQ ID NO: 3256664 - RNA, 19 nt, Artificial Sequence
  Description of Artificial Sequence: Synthetic oligonucleotide
uccugucccagccuggaca

SEQ ID NO: 3256665 - RNA, 19 nt, Artificial Sequence
  Description of Artificial Sequence: Synthetic oligonucleotide
aggaauguagcuggagagg

SEQ ID NO: 3256666 - RNA, 19 nt, Artificial Sequence
  Description of Artificial Sequence: Synthetic oligonucleotide
uguuaauuaggagcaguuc

SEQ ID NO: 3256667 - RNA, 19 nt, Artificial Sequence
  Description of Artificial Sequence: Synthetic oligonucleotide
uucuggguaaguagaucca

SEQ ID NO: 3256668 - RNA, 19 nt, Artificial Sequence
  Description of Artificial Sequence: Synthetic oligonucleotide
gaagaucaggccccugggc

SEQ ID NO: 3256669 - RNA, 19 nt, Artificial Sequence
  Description of Artificial Sequence: Synthetic oligonucleotide
aaguagauccagggagagg

SEQ ID NO: 3256670 - RNA, 19 nt, Artificial Sequence
  Description of Artificial Sequence: Synthetic oligonucleotide
acaaguguccucaggucac

SEQ ID NO: 3256671 - RNA, 19 nt, Artificial Sequence
  Description of Artificial Sequence: Synthetic oligonucleotide
ucugccucuaaugccgucc

SEQ ID NO: 3256672 - RNA, 19 nt, Artificial Sequence
  Description of Artificial Sequence: Synthetic oligonucleotide
ucccagccuggacaaacgg

SEQ ID NO: 3256673 - RNA, 19 nt, Artificial Sequence
  Description of Artificial Sequence: Synthetic oligonucleotide
ucucuccugucccagccug

SEQ ID NO: 3256674 - RNA, 19 nt, Artificial Sequence
  Description of Artificial Sequence: Synthetic oligonucleotide
agaccaaaacaagaagaug

SEQ ID NO: 3256675 - RNA, 19 nt, Artificial Sequence
  Description of Artificial Sequence: Synthetic oligonucleotide
gaauguagcuggagaggcg

SEQ ID NO: 3256676 - RNA, 19 nt, Artificial Sequence
  Description of Artificial Sequence: Synthetic oligonucleotide
ucuccacacacugaggaaa

SEQ ID NO: 3256677 - RNA, 19 nt, Artificial Sequence
  Description of Artificial Sequence: Synthetic oligonucleotide
ugcugcacaaguguccuca

SEQ ID NO: 3256678 - RNA, 19 nt, Artificial Sequence
  Description of Artificial Sequence: Synthetic oligonucleotide
acacacugaggaaaauacg

SEQ ID NO: 3256679 - RNA, 19 nt, Artificial Sequence
  Description of Artificial Sequence: Synthetic oligonucleotide
uucuugcugcacaaguguc

SEQ ID NO: 3256680 - RNA, 19 nt, Artificial Sequence
  Description of Artificial Sequence: Synthetic oligonucleotide
guuucuugcugcacaagug

SEQ ID NO: 3256681 - RNA, 19 nt, Artificial Sequence
  Description of Artificial Sequence: Synthetic oligonucleotide
ggcugaaucuugcaggggc

SEQ ID NO: 3256682 - RNA, 19 nt, Artificial Sequence
  Description of Artificial Sequence: Synthetic oligonucleotide
guccucaggucacucaacc

SEQ ID NO: 3256683 - RNA, 19 nt, Artificial Sequence
  Description of Artificial Sequence: Synthetic oligonucleotide
aggaaaauacggugccugu

SEQ ID NO: 3256684 - RNA, 19 nt, Artificial Sequence
  Description of Artificial Sequence: Synthetic oligonucleotide
ggaauguagcuggagaggc

SEQ ID NO: 3256685 - RNA, 19 nt, Artificial Sequence
  Description of Artificial Sequence: Synthetic oligonucleotide
cuccaagucucuccugucc

SEQ ID NO: 3256686 - RNA, 19 nt, Artificial Sequence
  Description of Artificial Sequence: Synthetic oligonucleotide
uguugcucagguccccugu

SEQ ID NO: 3256687 - RNA, 19 nt, Artificial Sequence
  Description of Artificial Sequence: Synthetic oligonucleotide
gcuccuucguguuaauuag

SEQ ID NO: 3256688 - RNA, 19 nt, Artificial Sequence
  Description of Artificial Sequence: Synthetic oligonucleotide
cuccuucguguuaauuagg

SEQ ID NO: 3256689 - RNA, 19 nt, Artificial Sequence
  Description of Artificial Sequence: Synthetic oligonucleotide
ugcaggggccuccaagucu

SEQ ID NO: 3256690 - RNA, 19 nt, Artificial Sequence
  Description of Artificial Sequence: Synthetic oligonucleotide
agggagaggaauguagcug

SEQ ID NO: 3256691 - RNA, 19 nt, Artificial Sequence
  Description of Artificial Sequence: Synthetic oligonucleotide
ggacaaacggucuccacac

SEQ ID NO: 3256692 - RNA, 19 nt, Artificial Sequence
  Description of Artificial Sequence: Synthetic oligonucleotide
uccucaggucacucaaccc

SEQ ID NO: 3256693 - RNA, 19 nt, Artificial Sequence
  Description of Artificial Sequence: Synthetic oligonucleotide
cacaaguguccucagguca

SEQ ID NO: 3256694 - RNA, 19 nt, Artificial Sequence
  Description of Artificial Sequence: Synthetic oligonucleotide
gaaucuugcaggggccucc

SEQ ID NO: 3256695 - RNA, 19 nt, Artificial Sequence
  Description of Artificial Sequence: Synthetic oligonucleotide
agaucaggccccugggcug

SEQ ID NO: 3256696 - RNA, 19 nt, Artificial Sequence
  Description of Artificial Sequence: Synthetic oligonucleotide
guaaguagauccagggaga

SEQ ID NO: 3256697 - RNA, 19 nt, Artificial Sequence
  Description of Artificial Sequence: Synthetic oligonucleotide
ggaagaucaggccccuggg

SEQ ID NO: 3256698 - RNA, 19 nt, Artificial Sequence
  Description of Artificial Sequence: Synthetic oligonucleotide
agccuggacaaacggucuc

SEQ ID NO: 3256699 - RNA, 19 nt, Artificial Sequence
  Description of Artificial Sequence: Synthetic oligonucleotide
ccucaggucacucaacccc

SEQ ID NO: 3256700 - RNA, 19 nt, Artificial Sequence
  Description of Artificial Sequence: Synthetic oligonucleotide
gagaggaauguagcuggag

SEQ ID NO: 3256701 - RNA, 19 nt, Artificial Sequence
  Description of Artificial Sequence: Synthetic oligonucleotide
ucagguccccuguuucuug

SEQ ID NO: 3256702 - RNA, 19 nt, Artificial Sequence
  Description of Artificial Sequence: Synthetic oligonucleotide
aguguccucaggucacuca

SEQ ID NO: 3256703 - RNA, 19 nt, Artificial Sequence
  Description of Artificial Sequence: Synthetic oligonucleotide
ugcucagguccccuguuuc

SEQ ID NO: 3256704 - RNA, 19 nt, Artificial Sequence
  Description of Artificial Sequence: Synthetic oligonucleotide
agauccagggagaggaaug

SEQ ID NO: 3256705 - RNA, 19 nt, Artificial Sequence
  Description of Artificial Sequence: Synthetic oligonucleotide
aacaacuucaggcuuguug

SEQ ID NO: 3256706 - RNA, 19 nt, Artificial Sequence
  Description of Artificial Sequence: Synthetic oligonucleotide
agagcuaucugcuuguguc

SEQ ID NO: 3256707 - RNA, 19 nt, Artificial Sequence
  Description of Artificial Sequence: Synthetic oligonucleotide
aaaccuccaagucuucagc

SEQ ID NO: 3256708 - RNA, 19 nt, Artificial Sequence
  Description of Artificial Sequence: Synthetic oligonucleotide
ugcagguugagacagauuc

SEQ ID NO: 3256709 - RNA, 19 nt, Artificial Sequence
  Description of Artificial Sequence: Synthetic oligonucleotide
aauacuagagcuaucugcu

SEQ ID NO: 3256710 - RNA, 19 nt, Artificial Sequence
  Description of Artificial Sequence: Synthetic oligonucleotide
aaaaccuccaagucuucag

SEQ ID NO: 3256711 - RNA, 19 nt, Artificial Sequence
  Description of Artificial Sequence: Synthetic oligonucleotide
aacaauacuagagcuaucu

SEQ ID NO: 3256712 - RNA, 19 nt, Artificial Sequence
  Description of Artificial Sequence: Synthetic oligonucleotide
uuugcaacagucuccagga

SEQ ID NO: 3256713 - RNA, 19 nt, Artificial Sequence
  Description of Artificial Sequence: Synthetic oligonucleotide
aucugcuugugucucagcc

SEQ ID NO: 3256714 - RNA, 19 nt, Artificial Sequence
  Description of Artificial Sequence: Synthetic oligonucleotide
ugcaacagucuccaggagg

SEQ ID NO: 3256715 - RNA, 19 nt, Artificial Sequence
  Description of Artificial Sequence: Synthetic oligonucleotide
acaacuucaggcuuguugu

SEQ ID NO: 3256716 - RNA, 19 nt, Artificial Sequence
  Description of Artificial Sequence: Synthetic oligonucleotide
uggagagaaguucagguga

SEQ ID NO: 3256717 - RNA, 19 nt, Artificial Sequence
  Description of Artificial Sequence: Synthetic oligonucleotide
ggaaaaggaagcaaaaggg

SEQ ID NO: 3256718 - RNA, 19 nt, Artificial Sequence
  Description of Artificial Sequence: Synthetic oligonucleotide
agaaguucaggugaggauc

SEQ ID NO: 3256719 - RNA, 19 nt, Artificial Sequence
  Description of Artificial Sequence: Synthetic oligonucleotide
acaggcaggagucuucccc

SEQ ID NO: 3256720 - RNA, 19 nt, Artificial Sequence
  Description of Artificial Sequence: Synthetic oligonucleotide
uguugugagguaaugccug

SEQ ID NO: 3256721 - RNA, 19 nt, Artificial Sequence
  Description of Artificial Sequence: Synthetic oligonucleotide
aauuuugcaacagucucca

SEQ ID NO: 3256722 - RNA, 19 nt, Artificial Sequence
  Description of Artificial Sequence: Synthetic oligonucleotide
ucagacuugcccuuccggg

SEQ ID NO: 3256723 - RNA, 19 nt, Artificial Sequence
  Description of Artificial Sequence: Synthetic oligonucleotide
ucaacgaccuuucugccca

SEQ ID NO: 3256724 - RNA, 19 nt, Artificial Sequence
  Description of Artificial Sequence: Synthetic oligonucleotide
agagguagaggucacugag

SEQ ID NO: 3256725 - RNA, 19 nt, Artificial Sequence
  Description of Artificial Sequence: Synthetic oligonucleotide
acagauucaggccgggugg

SEQ ID NO: 3256726 - RNA, 19 nt, Artificial Sequence
  Description of Artificial Sequence: Synthetic oligonucleotide
acccuaucccauuuguacc

SEQ ID NO: 3256727 - RNA, 19 nt, Artificial Sequence
  Description of Artificial Sequence: Synthetic oligonucleotide
gguugagacagauucaggc

SEQ ID NO: 3256728 - RNA, 19 nt, Artificial Sequence
  Description of Artificial Sequence: Synthetic oligonucleotide
ugagguaaugccuggcacc

SEQ ID NO: 3256729 - RNA, 19 nt, Artificial Sequence
  Description of Artificial Sequence: Synthetic oligonucleotide
uacccuaucccauuuguac

SEQ ID NO: 3256730 - RNA, 19 nt, Artificial Sequence
  Description of Artificial Sequence: Synthetic oligonucleotide
aaaggaagcaaaaggggcu

SEQ ID NO: 3256731 - RNA, 19 nt, Artificial Sequence
  Description of Artificial Sequence: Synthetic oligonucleotide
caugcuuugggccucugcc

SEQ ID NO: 3256732 - RNA, 19 nt, Artificial Sequence
  Description of Artificial Sequence: Synthetic oligonucleotide
ugagacagauucaggccgg

SEQ ID NO: 3256733 - RNA, 19 nt, Artificial Sequence
  Description of Artificial Sequence: Synthetic oligonucleotide
ucuccuucacuacuguuga

SEQ ID NO: 3256734 - RNA, 19 nt, Artificial Sequence
  Description of Artificial Sequence: Synthetic oligonucleotide
aggagugcauuucacuggg

SEQ ID NO: 3256735 - RNA, 19 nt, Artificial Sequence
  Description of Artificial Sequence: Synthetic oligonucleotide
acagaguggcagcauggcc

SEQ ID NO: 3256736 - RNA, 19 nt, Artificial Sequence
  Description of Artificial Sequence: Synthetic oligonucleotide
augauaccuaaugugacag

SEQ ID NO: 3256737 - RNA, 19 nt, Artificial Sequence
  Description of Artificial Sequence: Synthetic oligonucleotide
caagucuucagcagcuucc

SEQ ID NO: 3256738 - RNA, 19 nt, Artificial Sequence
  Description of Artificial Sequence: Synthetic oligonucleotide
ucagaaggcgccagagagg

SEQ ID NO: 3256739 - RNA, 19 nt, Artificial Sequence
  Description of Artificial Sequence: Synthetic oligonucleotide
gauucagaggacaaggcca

SEQ ID NO: 3256740 - RNA, 19 nt, Artificial Sequence
  Description of Artificial Sequence: Synthetic oligonucleotide
uucacuacuguugacacua

SEQ ID NO: 3256741 - RNA, 19 nt, Artificial Sequence
  Description of Artificial Sequence: Synthetic oligonucleotide
gacagauucaggccgggug

SEQ ID NO: 3256742 - RNA, 19 nt, Artificial Sequence
  Description of Artificial Sequence: Synthetic oligonucleotide
gacacaugaagaacaauac

SEQ ID NO: 3256743 - RNA, 19 nt, Artificial Sequence
  Description of Artificial Sequence: Synthetic oligonucleotide
cacaugaagaacaauacua

SEQ ID NO: 3256744 - RNA, 19 nt, Artificial Sequence
  Description of Artificial Sequence: Synthetic oligonucleotide
aaggaagcaaaaggggcuc

SEQ ID NO: 3256745 - RNA, 19 nt, Artificial Sequence
  Description of Artificial Sequence: Synthetic oligonucleotide
ugugagguaaugccuggca

SEQ ID NO: 3256746 - RNA, 19 nt, Artificial Sequence
  Description of Artificial Sequence: Synthetic oligonucleotide
gaauucaggagagguagag

SEQ ID NO: 3256747 - RNA, 19 nt, Artificial Sequence
  Description of Artificial Sequence: Synthetic oligonucleotide
uggucaacaggugaggucu

SEQ ID NO: 3256748 - RNA, 19 nt, Artificial Sequence
  Description of Artificial Sequence: Synthetic oligonucleotide
cuacuguugacacuaagga

SEQ ID NO: 3256749 - RNA, 19 nt, Artificial Sequence
  Description of Artificial Sequence: Synthetic oligonucleotide
aguccccuucucuaucucc

SEQ ID NO: 3256750 - RNA, 19 nt, Artificial Sequence
  Description of Artificial Sequence: Synthetic oligonucleotide
uggagcuccagccuggcac

SEQ ID NO: 3256751 - RNA, 19 nt, Artificial Sequence
  Description of Artificial Sequence: Synthetic oligonucleotide
acuaaggaagccaugaaaa

SEQ ID NO: 3256752 - RNA, 19 nt, Artificial Sequence
  Description of Artificial Sequence: Synthetic oligonucleotide
caggauucagaggacaagg

SEQ ID NO: 3256753 - RNA, 19 nt, Artificial Sequence
  Description of Artificial Sequence: Synthetic oligonucleotide
ugauaccuaaugugacagg

SEQ ID NO: 3256754 - RNA, 19 nt, Artificial Sequence
  Description of Artificial Sequence: Synthetic oligonucleotide
gagguaaugccuggcaccg

SEQ ID NO: 3256755 - RNA, 19 nt, Artificial Sequence
  Description of Artificial Sequence: Synthetic oligonucleotide
ugcugggcaggauucagag

SEQ ID NO: 3256756 - RNA, 19 nt, Artificial Sequence
  Description of Artificial Sequence: Synthetic oligonucleotide
cuuucaugucaccuccugg

SEQ ID NO: 3256757 - RNA, 19 nt, Artificial Sequence
  Description of Artificial Sequence: Synthetic oligonucleotide
cauuuguaccuugagugcc

SEQ ID NO: 3256758 - RNA, 19 nt, Artificial Sequence
  Description of Artificial Sequence: Synthetic oligonucleotide
cccauuuguaccuugagug

SEQ ID NO: 3256759 - RNA, 19 nt, Artificial Sequence
  Description of Artificial Sequence: Synthetic oligonucleotide
caaggcucuuguuagcagc

SEQ ID NO: 3256760 - RNA, 19 nt, Artificial Sequence
  Description of Artificial Sequence: Synthetic oligonucleotide
cagucuggaggacagagug

SEQ ID NO: 3256761 - RNA, 19 nt, Artificial Sequence
  Description of Artificial Sequence: Synthetic oligonucleotide
ccagagaggaaccagcugg

SEQ ID NO: 3256762 - RNA, 19 nt, Artificial Sequence
  Description of Artificial Sequence: Synthetic oligonucleotide
caggagugcauuucacugg

SEQ ID NO: 3256763 - RNA, 19 nt, Artificial Sequence
  Description of Artificial Sequence: Synthetic oligonucleotide
uguaccuugagugccugug

SEQ ID NO: 3256764 - RNA, 19 nt, Artificial Sequence
  Description of Artificial Sequence: Synthetic oligonucleotide
gcuaagauggguucagaag

SEQ ID NO: 3256765 - RNA, 19 nt, Artificial Sequence
  Description of Artificial Sequence: Synthetic oligonucleotide
ucgagaggcggcaugggca

SEQ ID NO: 3256766 - RNA, 19 nt, Artificial Sequence
  Description of Artificial Sequence: Synthetic oligonucleotide
gacacuaaggaagccauga

SEQ ID NO: 3256767 - RNA, 19 nt, Artificial Sequence
  Description of Artificial Sequence: Synthetic oligonucleotide
gcuuccaugauaccuaaug

SEQ ID NO: 3256768 - RNA, 19 nt, Artificial Sequence
  Description of Artificial Sequence: Synthetic oligonucleotide
ugcagcugcgccaaggcuc

SEQ ID NO: 3256769 - RNA, 19 nt, Artificial Sequence
  Description of Artificial Sequence: Synthetic oligonucleotide
ucacguggucaacagguga

SEQ ID NO: 3256770 - RNA, 19 nt, Artificial Sequence
  Description of Artificial Sequence: Synthetic oligonucleotide
uccuucacuacuguugaca

SEQ ID NO: 3256771 - RNA, 19 nt, Artificial Sequence
  Description of Artificial Sequence: Synthetic oligonucleotide
agauggguucagaaggcgc

SEQ ID NO: 3256772 - RNA, 19 nt, Artificial Sequence
  Description of Artificial Sequence: Synthetic oligonucleotide
cagccuggcacccagcucc

SEQ ID NO: 3256773 - RNA, 19 nt, Artificial Sequence
  Description of Artificial Sequence: Synthetic oligonucleotide
acuagagcuaucugcuugu

SEQ ID NO: 3256774 - RNA, 19 nt, Artificial Sequence
  Description of Artificial Sequence: Synthetic oligonucleotide
agguguguggacuugcuaa

SEQ ID NO: 3256775 - RNA, 19 nt, Artificial Sequence
  Description of Artificial Sequence: Synthetic oligonucleotide
guugugagguaaugccugg

SEQ ID NO: 3256776 - RNA, 19 nt, Artificial Sequence
  Description of Artificial Sequence: Synthetic oligonucleotide
ucacugggaucucugggug

SEQ ID NO: 3256777 - RNA, 19 nt, Artificial Sequence
  Description of Artificial Sequence: Synthetic oligonucleotide
aggauucagaggacaaggc

SEQ ID NO: 3256778 - RNA, 19 nt, Artificial Sequence
  Description of Artificial Sequence: Synthetic oligonucleotide
uucaugucaccuccuggca

SEQ ID NO: 3256779 - RNA, 19 nt, Artificial Sequence
  Description of Artificial Sequence: Synthetic oligonucleotide
ugcuaagauggguucagaa

SEQ ID NO: 3256780 - RNA, 19 nt, Artificial Sequence
  Description of Artificial Sequence: Synthetic oligonucleotide
gaaggcgccagagaggaac

SEQ ID NO: 3256781 - RNA, 19 nt, Artificial Sequence
  Description of Artificial Sequence: Synthetic oligonucleotide
ucagaggacaaggccaacc

SEQ ID NO: 3256782 - RNA, 19 nt, Artificial Sequence
  Description of Artificial Sequence: Synthetic oligonucleotide
ugcgccaaggcucuuguua

SEQ ID NO: 3256783 - RNA, 19 nt, Artificial Sequence
  Description of Artificial Sequence: Synthetic oligonucleotide
cauggaggacacaugaaga

SEQ ID NO: 3256784 - RNA, 19 nt, Artificial Sequence
  Description of Artificial Sequence: Synthetic oligonucleotide
uucgagaggcggcaugggc

SEQ ID NO: 3256785 - RNA, 19 nt, Artificial Sequence
  Description of Artificial Sequence: Synthetic oligonucleotide
guggagagaaguucaggug

SEQ ID NO: 3256786 - RNA, 19 nt, Artificial Sequence
  Description of Artificial Sequence: Synthetic oligonucleotide
aggugaggucuccugcagc

SEQ ID NO: 3256787 - RNA, 19 nt, Artificial Sequence
  Description of Artificial Sequence: Synthetic oligonucleotide
auggaggacacaugaagaa

SEQ ID NO: 3256788 - RNA, 19 nt, Artificial Sequence
  Description of Artificial Sequence: Synthetic oligonucleotide
cugaguuuccuccucuuuc

SEQ ID NO: 3256789 - RNA, 19 nt, Artificial Sequence
  Description of Artificial Sequence: Synthetic oligonucleotide
ccuaaugugacaggcaggg

SEQ ID NO: 3256790 - RNA, 19 nt, Artificial Sequence
  Description of Artificial Sequence: Synthetic oligonucleotide
agcgaagccaacaacuuca

SEQ ID NO: 3256791 - RNA, 19 nt, Artificial Sequence
  Description of Artificial Sequence: Synthetic oligonucleotide
cagguugagacagauucag

SEQ ID NO: 3256792 - RNA, 19 nt, Artificial Sequence
  Description of Artificial Sequence: Synthetic oligonucleotide
agagaaguucaggugagga

SEQ ID NO: 3256793 - RNA, 19 nt, Artificial Sequence
  Description of Artificial Sequence: Synthetic oligonucleotide
agcagcuuccaugauaccu

SEQ ID NO: 3256794 - RNA, 19 nt, Artificial Sequence
  Description of Artificial Sequence: Synthetic oligonucleotide
caugauaccuaaugugaca

SEQ ID NO: 3256795 - RNA, 19 nt, Artificial Sequence
  Description of Artificial Sequence: Synthetic oligonucleotide
aacucagcucacgugguca

SEQ ID NO: 3256796 - RNA, 19 nt, Artificial Sequence
  Description of Artificial Sequence: Synthetic oligonucleotide
agcucccagcuccaaggcc

SEQ ID NO: 3256797 - RNA, 19 nt, Artificial Sequence
  Description of Artificial Sequence: Synthetic oligonucleotide
gaggacaaggccaacccac

SEQ ID NO: 3256798 - RNA, 19 nt, Artificial Sequence
  Description of Artificial Sequence: Synthetic oligonucleotide
aggcuguugggaauuuugc

SEQ ID NO: 3256799 - RNA, 19 nt, Artificial Sequence
  Description of Artificial Sequence: Synthetic oligonucleotide
agaguggcagcauggccag

SEQ ID NO: 3256800 - RNA, 19 nt, Artificial Sequence
  Description of Artificial Sequence: Synthetic oligonucleotide
uuucugcccaggugugugg

SEQ ID NO: 3256801 - RNA, 19 nt, Artificial Sequence
  Description of Artificial Sequence: Synthetic oligonucleotide
uccucuuucaugucaccuc

SEQ ID NO: 3256802 - RNA, 19 nt, Artificial Sequence
  Description of Artificial Sequence: Synthetic oligonucleotide
gcaacagucuccaggaggg

SEQ ID NO: 3256803 - RNA, 19 nt, Artificial Sequence
  Description of Artificial Sequence: Synthetic oligonucleotide
aaggcgccagagaggaacc

SEQ ID NO: 3256804 - RNA, 19 nt, Artificial Sequence
  Description of Artificial Sequence: Synthetic oligonucleotide
acaaggccaacccaccccu

SEQ ID NO: 3256805 - RNA, 19 nt, Artificial Sequence
  Description of Artificial Sequence: Synthetic oligonucleotide
aauaagaucagaaaguugg

SEQ ID NO: 3256806 - RNA, 19 nt, Artificial Sequence
  Description of Artificial Sequence: Synthetic oligonucleotide
ugcaaauaagaucagaaag

SEQ ID NO: 3256807 - RNA, 19 nt, Artificial Sequence
  Description of Artificial Sequence: Synthetic oligonucleotide
uguaaaauaacucaggauu

SEQ ID NO: 3256808 - RNA, 19 nt, Artificial Sequence
  Description of Artificial Sequence: Synthetic oligonucleotide
acacaagugaaauucagcc

SEQ ID NO: 3256809 - RNA, 19 nt, Artificial Sequence
  Description of Artificial Sequence: Synthetic oligonucleotide
uuaacuaucugcuaauaag

SEQ ID NO: 3256810 - RNA, 19 nt, Artificial Sequence
  Description of Artificial Sequence: Synthetic oligonucleotide
uaacuaucugcuaauaagg

SEQ ID NO: 3256811 - RNA, 19 nt, Artificial Sequence
  Description of Artificial Sequence: Synthetic oligonucleotide
aaauucagcccauagaacu

SEQ ID NO: 3256812 - RNA, 19 nt, Artificial Sequence
  Description of Artificial Sequence: Synthetic oligonucleotide
aauguaaaauaacucagga

SEQ ID NO: 3256813 - RNA, 19 nt, Artificial Sequence
  Description of Artificial Sequence: Synthetic oligonucleotide
uuuggaauguaaaauaacu

SEQ ID NO: 3256814 - RNA, 19 nt, Artificial Sequence
  Description of Artificial Sequence: Synthetic oligonucleotide
ugaaauucagcccauagaa

SEQ ID NO: 3256815 - RNA, 19 nt, Artificial Sequence
  Description of Artificial Sequence: Synthetic oligonucleotide
uaggaugacaagcacaggg

SEQ ID NO: 3256816 - RNA, 19 nt, Artificial Sequence
  Description of Artificial Sequence: Synthetic oligonucleotide
cuaucugcuaauaagguag

SEQ ID NO: 3256817 - RNA, 19 nt, Artificial Sequence
  Description of Artificial Sequence: Synthetic oligonucleotide
uggaauguaaaauaacuca

SEQ ID NO: 3256818 - RNA, 19 nt, Artificial Sequence
  Description of Artificial Sequence: Synthetic oligonucleotide
uaacucaggauuuucaaag

SEQ ID NO: 3256819 - RNA, 19 nt, Artificial Sequence
  Description of Artificial Sequence: Synthetic oligonucleotide
aagaucagaaaguuggcug

SEQ ID NO: 3256820 - RNA, 19 nt, Artificial Sequence
  Description of Artificial Sequence: Synthetic oligonucleotide
aaaaccacuaucccuagga

SEQ ID NO: 3256821 - RNA, 19 nt, Artificial Sequence
  Description of Artificial Sequence: Synthetic oligonucleotide
augaaugcaaauaagauca

SEQ ID NO: 3256822 - RNA, 19 nt, Artificial Sequence
  Description of Artificial Sequence: Synthetic oligonucleotide
agaaaguuggcugugaauc

SEQ ID NO: 3256823 - RNA, 19 nt, Artificial Sequence
  Description of Artificial Sequence: Synthetic oligonucleotide
acuacaagaaucucacaac

SEQ ID NO: 3256824 - RNA, 19 nt, Artificial Sequence
  Description of Artificial Sequence: Synthetic oligonucleotide
gaugaaguggauuccuugg

SEQ ID NO: 3256825 - RNA, 19 nt, Artificial Sequence
  Description of Artificial Sequence: Synthetic oligonucleotide
gaugaaugcaaauaagauc

SEQ ID NO: 3256826 - RNA, 19 nt, Artificial Sequence
  Description of Artificial Sequence: Synthetic oligonucleotide
aauaagguagucccggacu

SEQ ID NO: 3256827 - RNA, 19 nt, Artificial Sequence
  Description of Artificial Sequence: Synthetic oligonucleotide
aaucuuaacuaucugcuaa

SEQ ID NO: 3256828 - RNA, 19 nt, Artificial Sequence
  Description of Artificial Sequence: Synthetic oligonucleotide
uauuggauccaacacaagu

SEQ ID NO: 3256829 - RNA, 19 nt, Artificial Sequence
  Description of Artificial Sequence: Synthetic oligonucleotide
ugggugaugguacacauug

SEQ ID NO: 3256830 - RNA, 19 nt, Artificial Sequence
  Description of Artificial Sequence: Synthetic oligonucleotide
ugaugguacacauugggug

SEQ ID NO: 3256831 - RNA, 19 nt, Artificial Sequence
  Description of Artificial Sequence: Synthetic oligonucleotide
acaagugaaauucagccca

SEQ ID NO: 3256832 - RNA, 19 nt, Artificial Sequence
  Description of Artificial Sequence: Synthetic oligonucleotide
aacacaagugaaauucagc

SEQ ID NO: 3256833 - RNA, 19 nt, Artificial Sequence
  Description of Artificial Sequence: Synthetic oligonucleotide
ugcaaucuuaacuaucugc

SEQ ID NO: 3256834 - RNA, 19 nt, Artificial Sequence
  Description of Artificial Sequence: Synthetic oligonucleotide
uugacuacaagaaucucac

SEQ ID NO: 3256835 - RNA, 19 nt, Artificial Sequence
  Description of Artificial Sequence: Synthetic oligonucleotide
aaaauaacucaggauuuuc

SEQ ID NO: 3256836 - RNA, 19 nt, Artificial Sequence
  Description of Artificial Sequence: Synthetic oligonucleotide
gaauguaaaauaacucagg

SEQ ID NO: 3256837 - RNA, 19 nt, Artificial Sequence
  Description of Artificial Sequence: Synthetic oligonucleotide
aacucaggauuuucaaagg

SEQ ID NO: 3256838 - RNA, 19 nt, Artificial Sequence
  Description of Artificial Sequence: Synthetic oligonucleotide
uuggcugugaaucuagaug

SEQ ID NO: 3256839 - RNA, 19 nt, Artificial Sequence
  Description of Artificial Sequence: Synthetic oligonucleotide
ugugaaucuagauguggcg

SEQ ID NO: 3256840 - RNA, 19 nt, Artificial Sequence
  Description of Artificial Sequence: Synthetic oligonucleotide
uacacauugggugauuugg

SEQ ID NO: 3256841 - RNA, 19 nt, Artificial Sequence
  Description of Artificial Sequence: Synthetic oligonucleotide
aauaacucaggauuuucaa

SEQ ID NO: 3256842 - RNA, 19 nt, Artificial Sequence
  Description of Artificial Sequence: Synthetic oligonucleotide
cucauugacuacaagaauc

SEQ ID NO: 3256843 - RNA, 19 nt, Artificial Sequence
  Description of Artificial Sequence: Synthetic oligonucleotide
ucauugacuacaagaaucu

SEQ ID NO: 3256844 - RNA, 19 nt, Artificial Sequence
  Description of Artificial Sequence: Synthetic oligonucleotide
gaacucauugacuacaaga

SEQ ID NO: 3256845 - RNA, 19 nt, Artificial Sequence
  Description of Artificial Sequence: Synthetic oligonucleotide
cugcuaauaagguaguccc

SEQ ID NO: 3256846 - RNA, 19 nt, Artificial Sequence
  Description of Artificial Sequence: Synthetic oligonucleotide
aaugcaaauaagaucagaa

SEQ ID NO: 3256847 - RNA, 19 nt, Artificial Sequence
  Description of Artificial Sequence: Synthetic oligonucleotide
uuuuggaauguaaaauaac

SEQ ID NO: 3256848 - RNA, 19 nt, Artificial Sequence
  Description of Artificial Sequence: Synthetic oligonucleotide
uuggaauguaaaauaacuc

SEQ ID NO: 3256849 - RNA, 19 nt, Artificial Sequence
  Description of Artificial Sequence: Synthetic oligonucleotide
ugauuuggcauguagguau

SEQ ID NO: 3256850 - RNA, 19 nt, Artificial Sequence
  Description of Artificial Sequence: Synthetic oligonucleotide
uccaacacaagugaaauuc

SEQ ID NO: 3256851 - RNA, 19 nt, Artificial Sequence
  Description of Artificial Sequence: Synthetic oligonucleotide
uacaagaaucucacaacag

SEQ ID NO: 3256852 - RNA, 19 nt, Artificial Sequence
  Description of Artificial Sequence: Synthetic oligonucleotide
uggcugugaaucuagaugu

SEQ ID NO: 3256853 - RNA, 19 nt, Artificial Sequence
  Description of Artificial Sequence: Synthetic oligonucleotide
ucugcuaauaagguagucc

SEQ ID NO: 3256854 - RNA, 19 nt, Artificial Sequence
  Description of Artificial Sequence: Synthetic oligonucleotide
agugaaauucagcccauag

SEQ ID NO: 3256855 - RNA, 19 nt, Artificial Sequence
  Description of Artificial Sequence: Synthetic oligonucleotide
acaagaaucucacaacagu

SEQ ID NO: 3256856 - RNA, 19 nt, Artificial Sequence
  Description of Artificial Sequence: Synthetic oligonucleotide
uuggauccaacacaaguga

SEQ ID NO: 3256857 - RNA, 19 nt, Artificial Sequence
  Description of Artificial Sequence: Synthetic oligonucleotide
uucucgaugaaguggauuc

SEQ ID NO: 3256858 - RNA, 19 nt, Artificial Sequence
  Description of Artificial Sequence: Synthetic oligonucleotide
aaccacuaucccuaggaug

SEQ ID NO: 3256859 - RNA, 19 nt, Artificial Sequence
  Description of Artificial Sequence: Synthetic oligonucleotide
gacuacaagaaucucacaa

SEQ ID NO: 3256860 - RNA, 19 nt, Artificial Sequence
  Description of Artificial Sequence: Synthetic oligonucleotide
ugaaucuagauguggcgcc

SEQ ID NO: 3256861 - RNA, 19 nt, Artificial Sequence
  Description of Artificial Sequence: Synthetic oligonucleotide
uagguauuggauccaacac

SEQ ID NO: 3256862 - RNA, 19 nt, Artificial Sequence
  Description of Artificial Sequence: Synthetic oligonucleotide
aacucauugacuacaagaa

SEQ ID NO: 3256863 - RNA, 19 nt, Artificial Sequence
  Description of Artificial Sequence: Synthetic oligonucleotide
aaauaagaucagaaaguug

SEQ ID NO: 3256864 - RNA, 19 nt, Artificial Sequence
  Description of Artificial Sequence: Synthetic oligonucleotide
ugcuaauaagguagucccg

SEQ ID NO: 3256865 - RNA, 19 nt, Artificial Sequence
  Description of Artificial Sequence: Synthetic oligonucleotide
aauucagcccauagaacuc

SEQ ID NO: 3256866 - RNA, 19 nt, Artificial Sequence
  Description of Artificial Sequence: Synthetic oligonucleotide
uaucccuaggaugacaagc

SEQ ID NO: 3256867 - RNA, 19 nt, Artificial Sequence
  Description of Artificial Sequence: Synthetic oligonucleotide
augaaguggauuccuuggg

SEQ ID NO: 3256868 - RNA, 19 nt, Artificial Sequence
  Description of Artificial Sequence: Synthetic oligonucleotide
gaaguggauuccuugggug

SEQ ID NO: 3256869 - RNA, 19 nt, Artificial Sequence
  Description of Artificial Sequence: Synthetic oligonucleotide
aaauaacucaggauuuuca

SEQ ID NO: 3256870 - RNA, 19 nt, Artificial Sequence
  Description of Artificial Sequence: Synthetic oligonucleotide
cauuaaacccuuuccuggc

SEQ ID NO: 3256871 - RNA, 19 nt, Artificial Sequence
  Description of Artificial Sequence: Synthetic oligonucleotide
uuuggcauguagguauugg

SEQ ID NO: 3256872 - RNA, 19 nt, Artificial Sequence
  Description of Artificial Sequence: Synthetic oligonucleotide
gaugguacacauuggguga

SEQ ID NO: 3256873 - RNA, 19 nt, Artificial Sequence
  Description of Artificial Sequence: Synthetic oligonucleotide
cugugaaucuagauguggc

SEQ ID NO: 3256874 - RNA, 19 nt, Artificial Sequence
  Description of Artificial Sequence: Synthetic oligonucleotide
ggugaugguacacauuggg

SEQ ID NO: 3256875 - RNA, 19 nt, Artificial Sequence
  Description of Artificial Sequence: Synthetic oligonucleotide
cacaagugaaauucagccc

SEQ ID NO: 3256876 - RNA, 19 nt, Artificial Sequence
  Description of Artificial Sequence: Synthetic oligonucleotide
auaagaucagaaaguuggc

SEQ ID NO: 3256877 - RNA, 19 nt, Artificial Sequence
  Description of Artificial Sequence: Synthetic oligonucleotide
agaucagaaaguuggcugu

SEQ ID NO: 3256878 - RNA, 19 nt, Artificial Sequence
  Description of Artificial Sequence: Synthetic oligonucleotide
agguauuggauccaacaca

SEQ ID NO: 3256879 - RNA, 19 nt, Artificial Sequence
  Description of Artificial Sequence: Synthetic oligonucleotide
ugcccauuaaacccuuucc

SEQ ID NO: 3256880 - RNA, 19 nt, Artificial Sequence
  Description of Artificial Sequence: Synthetic oligonucleotide
aaguggauuccuuggguga

SEQ ID NO: 3256881 - RNA, 19 nt, Artificial Sequence
  Description of Artificial Sequence: Synthetic oligonucleotide
ggaauguaaaauaacucag

SEQ ID NO: 3256882 - RNA, 19 nt, Artificial Sequence
  Description of Artificial Sequence: Synthetic oligonucleotide
uuaaacccuuuccuggcug

SEQ ID NO: 3256883 - RNA, 19 nt, Artificial Sequence
  Description of Artificial Sequence: Synthetic oligonucleotide
auuggauccaacacaagug

SEQ ID NO: 3256884 - RNA, 19 nt, Artificial Sequence
  Description of Artificial Sequence: Synthetic oligonucleotide
ugggugauuuggcauguag

SEQ ID NO: 3256885 - RNA, 19 nt, Artificial Sequence
  Description of Artificial Sequence: Synthetic oligonucleotide
guagguauuggauccaaca

SEQ ID NO: 3256886 - RNA, 19 nt, Artificial Sequence
  Description of Artificial Sequence: Synthetic oligonucleotide
uaauaagguagucccggac

SEQ ID NO: 3256887 - RNA, 19 nt, Artificial Sequence
  Description of Artificial Sequence: Synthetic oligonucleotide
auugacuacaagaaucuca

SEQ ID NO: 3256888 - RNA, 19 nt, Artificial Sequence
  Description of Artificial Sequence: Synthetic oligonucleotide
auuccuugggugaugguac

SEQ ID NO: 3256889 - RNA, 19 nt, Artificial Sequence
  Description of Artificial Sequence: Synthetic oligonucleotide
auguaaaauaacucaggau

SEQ ID NO: 3256890 - RNA, 19 nt, Artificial Sequence
  Description of Artificial Sequence: Synthetic oligonucleotide
ugaaguggauuccuugggu

SEQ ID NO: 3256891 - RNA, 19 nt, Artificial Sequence
  Description of Artificial Sequence: Synthetic oligonucleotide
ugaaugcaaauaagaucag

SEQ ID NO: 3256892 - RNA, 19 nt, Artificial Sequence
  Description of Artificial Sequence: Synthetic oligonucleotide
augacaagcacagggauga

SEQ ID NO: 3256893 - RNA, 19 nt, Artificial Sequence
  Description of Artificial Sequence: Synthetic oligonucleotide
caacacaagugaaauucag

SEQ ID NO: 3256894 - RNA, 19 nt, Artificial Sequence
  Description of Artificial Sequence: Synthetic oligonucleotide
acaagcacagggaugaaug

SEQ ID NO: 3256895 - RNA, 19 nt, Artificial Sequence
  Description of Artificial Sequence: Synthetic oligonucleotide
uaagaucagaaaguuggcu

SEQ ID NO: 3256896 - RNA, 19 nt, Artificial Sequence
  Description of Artificial Sequence: Synthetic oligonucleotide
aaucucacaacaguauuuu

SEQ ID NO: 3256897 - RNA, 19 nt, Artificial Sequence
  Description of Artificial Sequence: Synthetic oligonucleotide
auagaacucauugacuaca

SEQ ID NO: 3256898 - RNA, 19 nt, Artificial Sequence
  Description of Artificial Sequence: Synthetic oligonucleotide
aacuaucugcuaauaaggu

SEQ ID NO: 3256899 - RNA, 19 nt, Artificial Sequence
  Description of Artificial Sequence: Synthetic oligonucleotide
auaacucaggauuuucaaa

SEQ ID NO: 3256900 - RNA, 19 nt, Artificial Sequence
  Description of Artificial Sequence: Synthetic oligonucleotide
cauugggugauuuggcaug

SEQ ID NO: 3256901 - RNA, 19 nt, Artificial Sequence
  Description of Artificial Sequence: Synthetic oligonucleotide
cuacaagaaucucacaaca

SEQ ID NO: 3256902 - RNA, 19 nt, Artificial Sequence
  Description of Artificial Sequence: Synthetic oligonucleotide
accacuaucccuaggauga

SEQ ID NO: 3256903 - RNA, 19 nt, Artificial Sequence
  Description of Artificial Sequence: Synthetic oligonucleotide
augcaaauaagaucagaaa

SEQ ID NO: 3256904 - RNA, 19 nt, Artificial Sequence
  Description of Artificial Sequence: Synthetic oligonucleotide
uuggcauguagguauugga

SEQ ID NO: 3256905 - RNA, 19 nt, Artificial Sequence
  Description of Artificial Sequence: Synthetic oligonucleotide
auucauacuccucacuggc

SEQ ID NO: 3256906 - RNA, 19 nt, Artificial Sequence
  Description of Artificial Sequence: Synthetic oligonucleotide
gaugacguagcauucauac

SEQ ID NO: 3256907 - RNA, 19 nt, Artificial Sequence
  Description of Artificial Sequence: Synthetic oligonucleotide
ugacguagcauucauacuc

SEQ ID NO: 3256908 - RNA, 19 nt, Artificial Sequence
  Description of Artificial Sequence: Synthetic oligonucleotide
aagacaucuagucuaggcu

SEQ ID NO: 3256909 - RNA, 19 nt, Artificial Sequence
  Description of Artificial Sequence: Synthetic oligonucleotide
ugacacagaagacaucuag

SEQ ID NO: 3256910 - RNA, 19 nt, Artificial Sequence
  Description of Artificial Sequence: Synthetic oligonucleotide
acacagaagacaucuaguc

SEQ ID NO: 3256911 - RNA, 19 nt, Artificial Sequence
  Description of Artificial Sequence: Synthetic oligonucleotide
agacaucuagucuaggcuc

SEQ ID NO: 3256912 - RNA, 19 nt, Artificial Sequence
  Description of Artificial Sequence: Synthetic oligonucleotide
uucaucuuccuccucuggg

SEQ ID NO: 3256913 - RNA, 19 nt, Artificial Sequence
  Description of Artificial Sequence: Synthetic oligonucleotide
cucuucuucaucuuccucc

SEQ ID NO: 3256914 - RNA, 19 nt, Artificial Sequence
  Description of Artificial Sequence: Synthetic oligonucleotide
uauaccuguaggcuucccg

SEQ ID NO: 3256915 - RNA, 19 nt, Artificial Sequence
  Description of Artificial Sequence: Synthetic oligonucleotide
gaagacaucuagucuaggc

SEQ ID NO: 3256916 - RNA, 19 nt, Artificial Sequence
  Description of Artificial Sequence: Synthetic oligonucleotide
aaggccuugcccuccauag

SEQ ID NO: 3256917 - RNA, 19 nt, Artificial Sequence
  Description of Artificial Sequence: Synthetic oligonucleotide
aaggucuuggcacuggcca

SEQ ID NO: 3256918 - RNA, 19 nt, Artificial Sequence
  Description of Artificial Sequence: Synthetic oligonucleotide
cauguguauaccuguaggc

SEQ ID NO: 3256919 - RNA, 19 nt, Artificial Sequence
  Description of Artificial Sequence: Synthetic oligonucleotide
acagaagacaucuagucua

SEQ ID NO: 3256920 - RNA, 19 nt, Artificial Sequence
  Description of Artificial Sequence: Synthetic oligonucleotide
agugacacagaagacaucu

SEQ ID NO: 3256921 - RNA, 19 nt, Artificial Sequence
  Description of Artificial Sequence: Synthetic oligonucleotide
uuggcacuggccaggaagg

SEQ ID NO: 3256922 - RNA, 19 nt, Artificial Sequence
  Description of Artificial Sequence: Synthetic oligonucleotide
guagcauucauacuccuca

SEQ ID NO: 3256923 - RNA, 19 nt, Artificial Sequence
  Description of Artificial Sequence: Synthetic oligonucleotide
ucugggaugacguagcauu

SEQ ID NO: 3256924 - RNA, 19 nt, Artificial Sequence
  Description of Artificial Sequence: Synthetic oligonucleotide
ucuaggcucuucuucaucu

SEQ ID NO: 3256925 - RNA, 19 nt, Artificial Sequence
  Description of Artificial Sequence: Synthetic oligonucleotide
uucuucaucuuccuccucu

SEQ ID NO: 3256926 - RNA, 19 nt, Artificial Sequence
  Description of Artificial Sequence: Synthetic oligonucleotide
cauucauacuccucacugg

SEQ ID NO: 3256927 - RNA, 19 nt, Artificial Sequence
  Description of Artificial Sequence: Synthetic oligonucleotide
ucauacuccucacuggcac

SEQ ID NO: 3256928 - RNA, 19 nt, Artificial Sequence
  Description of Artificial Sequence: Synthetic oligonucleotide
cuuggcacuggccaggaag

SEQ ID NO: 3256929 - RNA, 19 nt, Artificial Sequence
  Description of Artificial Sequence: Synthetic oligonucleotide
uagucuaggcucuucuuca

SEQ ID NO: 3256930 - RNA, 19 nt, Artificial Sequence
  Description of Artificial Sequence: Synthetic oligonucleotide
uguguauaccuguaggcuu

SEQ ID NO: 3256931 - RNA, 19 nt, Artificial Sequence
  Description of Artificial Sequence: Synthetic oligonucleotide
uucccgaaggucuuggcac

SEQ ID NO: 3256932 - RNA, 19 nt, Artificial Sequence
  Description of Artificial Sequence: Synthetic oligonucleotide
ucaucuuccuccucuggga

SEQ ID NO: 3256933 - RNA, 19 nt, Artificial Sequence
  Description of Artificial Sequence: Synthetic oligonucleotide
ucuucuucaucuuccuccu

SEQ ID NO: 3256934 - RNA, 19 nt, Artificial Sequence
  Description of Artificial Sequence: Synthetic oligonucleotide
auaccuguaggcuucccga

SEQ ID NO: 3256935 - RNA, 19 nt, Artificial Sequence
  Description of Artificial Sequence: Synthetic oligonucleotide
uccuccucagccucagccg

SEQ ID NO: 3256936 - RNA, 19 nt, Artificial Sequence
  Description of Artificial Sequence: Synthetic oligonucleotide
cuagucuaggcucuucuuc

SEQ ID NO: 3256937 - RNA, 19 nt, Artificial Sequence
  Description of Artificial Sequence: Synthetic oligonucleotide
cagaagacaucuagucuag

SEQ ID NO: 3256938 - RNA, 19 nt, Artificial Sequence
  Description of Artificial Sequence: Synthetic oligonucleotide
uccuccucugggaugacgu

SEQ ID NO: 3256939 - RNA, 19 nt, Artificial Sequence
  Description of Artificial Sequence: Synthetic oligonucleotide
gcauucauacuccucacug

SEQ ID NO: 3256940 - RNA, 19 nt, Artificial Sequence
  Description of Artificial Sequence: Synthetic oligonucleotide
acuccucacuggcacggcc

SEQ ID NO: 3256941 - RNA, 19 nt, Artificial Sequence
  Description of Artificial Sequence: Synthetic oligonucleotide
uucauacuccucacuggca

SEQ ID NO: 3256942 - RNA, 19 nt, Artificial Sequence
  Description of Artificial Sequence: Synthetic oligonucleotide
uccucugggaugacguagc

SEQ ID NO: 3256943 - RNA, 19 nt, Artificial Sequence
  Description of Artificial Sequence: Synthetic oligonucleotide
ucuucaucuuccuccucug

SEQ ID NO: 3256944 - RNA, 19 nt, Artificial Sequence
  Description of Artificial Sequence: Synthetic oligonucleotide
ucuuccuccucugggauga

SEQ ID NO: 3256945 - RNA, 19 nt, Artificial Sequence
  Description of Artificial Sequence: Synthetic oligonucleotide
auguguauaccuguaggcu

SEQ ID NO: 3256946 - RNA, 19 nt, Artificial Sequence
  Description of Artificial Sequence: Synthetic oligonucleotide
gacguagcauucauacucc

SEQ ID NO: 3256947 - RNA, 19 nt, Artificial Sequence
  Description of Artificial Sequence: Synthetic oligonucleotide
aucuagucuaggcucuucu

SEQ ID NO: 3256948 - RNA, 19 nt, Artificial Sequence
  Description of Artificial Sequence: Synthetic oligonucleotide
cauacuccucacuggcacg

SEQ ID NO: 3256949 - RNA, 19 nt, Artificial Sequence
  Description of Artificial Sequence: Synthetic oligonucleotide
aggcucuucuucaucuucc

SEQ ID NO: 3256950 - RNA, 19 nt, Artificial Sequence
  Description of Artificial Sequence: Synthetic oligonucleotide
cccuccauagcccaggucc

SEQ ID NO: 3256951 - RNA, 19 nt, Artificial Sequence
  Description of Artificial Sequence: Synthetic oligonucleotide
auacuccucacuggcacgg

SEQ ID NO: 3256952 - RNA, 19 nt, Artificial Sequence
  Description of Artificial Sequence: Synthetic oligonucleotide
guccuccucagccucagcc

SEQ ID NO: 3256953 - RNA, 19 nt, Artificial Sequence
  Description of Artificial Sequence: Synthetic oligonucleotide
ccauguguauaccuguagg

SEQ ID NO: 3256954 - RNA, 19 nt, Artificial Sequence
  Description of Artificial Sequence: Synthetic oligonucleotide
uaggcucuucuucaucuuc

SEQ ID NO: 3256955 - RNA, 19 nt, Artificial Sequence
  Description of Artificial Sequence: Synthetic oligonucleotide
cuucaucuuccuccucugg

SEQ ID NO: 3256956 - RNA, 19 nt, Artificial Sequence
  Description of Artificial Sequence: Synthetic oligonucleotide
agcauucauacuccucacu

SEQ ID NO: 3256957 - RNA, 19 nt, Artificial Sequence
  Description of Artificial Sequence: Synthetic oligonucleotide
augacguagcauucauacu

SEQ ID NO: 3256958 - RNA, 19 nt, Artificial Sequence
  Description of Artificial Sequence: Synthetic oligonucleotide
aggccuugcccuccauagc

SEQ ID NO: 3256959 - RNA, 19 nt, Artificial Sequence
  Description of Artificial Sequence: Synthetic oligonucleotide
accuguaggcuucccgaag

SEQ ID NO: 3256960 - RNA, 19 nt, Artificial Sequence
  Description of Artificial Sequence: Synthetic oligonucleotide
uagcauucauacuccucac

SEQ ID NO: 3256961 - RNA, 19 nt, Artificial Sequence
  Description of Artificial Sequence: Synthetic oligonucleotide
auagcccagguccuccuca

SEQ ID NO: 3256962 - RNA, 19 nt, Artificial Sequence
  Description of Artificial Sequence: Synthetic oligonucleotide
aagugacacagaagacauc

SEQ ID NO: 3256963 - RNA, 19 nt, Artificial Sequence
  Description of Artificial Sequence: Synthetic oligonucleotide
aggucuuggcacuggccag

SEQ ID NO: 3256964 - RNA, 19 nt, Artificial Sequence
  Description of Artificial Sequence: Synthetic oligonucleotide
ucuagucuaggcucuucuu

SEQ ID NO: 3256965 - RNA, 19 nt, Artificial Sequence
  Description of Artificial Sequence: Synthetic oligonucleotide
gaaggucuuggcacuggcc

SEQ ID NO: 3256966 - RNA, 19 nt, Artificial Sequence
  Description of Artificial Sequence: Synthetic oligonucleotide
agaagacaucuagucuagg

SEQ ID NO: 3256967 - RNA, 19 nt, Artificial Sequence
  Description of Artificial Sequence: Synthetic oligonucleotide
ggccuugcccuccauagcc

SEQ ID NO: 3256968 - RNA, 19 nt, Artificial Sequence
  Description of Artificial Sequence: Synthetic oligonucleotide
uguauaccuguaggcuucc

SEQ ID NO: 3256969 - RNA, 19 nt, Artificial Sequence
  Description of Artificial Sequence: Synthetic oligonucleotide
uccauagcccagguccucc

SEQ ID NO: 3256970 - RNA, 19 nt, Artificial Sequence
  Description of Artificial Sequence: Synthetic oligonucleotide
ugggaugacguagcauuca

SEQ ID NO: 3256971 - RNA, 19 nt, Artificial Sequence
  Description of Artificial Sequence: Synthetic oligonucleotide
uugcccuccauagcccagg

SEQ ID NO: 3256972 - RNA, 19 nt, Artificial Sequence
  Description of Artificial Sequence: Synthetic oligonucleotide
aucuuccuccucugggaug

SEQ ID NO: 3256973 - RNA, 19 nt, Artificial Sequence
  Description of Artificial Sequence: Synthetic oligonucleotide
ccuguaggcuucccgaagg

SEQ ID NO: 3256974 - RNA, 19 nt, Artificial Sequence
  Description of Artificial Sequence: Synthetic oligonucleotide
cugggaugacguagcauuc

SEQ ID NO: 3256975 - RNA, 19 nt, Artificial Sequence
  Description of Artificial Sequence: Synthetic oligonucleotide
cuccucugggaugacguag

SEQ ID NO: 3256976 - RNA, 19 nt, Artificial Sequence
  Description of Artificial Sequence: Synthetic oligonucleotide
guguauaccuguaggcuuc

SEQ ID NO: 3256977 - RNA, 19 nt, Artificial Sequence
  Description of Artificial Sequence: Synthetic oligonucleotide
gacacagaagacaucuagu

SEQ ID NO: 3256978 - RNA, 19 nt, Artificial Sequence
  Description of Artificial Sequence: Synthetic oligonucleotide
ucccgaaggucuuggcacu

SEQ ID NO: 3256979 - RNA, 19 nt, Artificial Sequence
  Description of Artificial Sequence: Synthetic oligonucleotide
uagcccagguccuccucag

SEQ ID NO: 3256980 - RNA, 19 nt, Artificial Sequence
  Description of Artificial Sequence: Synthetic oligonucleotide
cuucccgaaggucuuggca

SEQ ID NO: 3256981 - RNA, 19 nt, Artificial Sequence
  Description of Artificial Sequence: Synthetic oligonucleotide
ggcacggccauguguauac

SEQ ID NO: 3256982 - RNA, 19 nt, Artificial Sequence
  Description of Artificial Sequence: Synthetic oligonucleotide
uaccuguaggcuucccgaa

SEQ ID NO: 3256983 - RNA, 19 nt, Artificial Sequence
  Description of Artificial Sequence: Synthetic oligonucleotide
uguaggcuucccgaagguc

SEQ ID NO: 3256984 - RNA, 19 nt, Artificial Sequence
  Description of Artificial Sequence: Synthetic oligonucleotide
uuccuccucugggaugacg

SEQ ID NO: 3256985 - RNA, 19 nt, Artificial Sequence
  Description of Artificial Sequence: Synthetic oligonucleotide
gccauguguauaccuguag

SEQ ID NO: 3256986 - RNA, 19 nt, Artificial Sequence
  Description of Artificial Sequence: Synthetic oligonucleotide
acuggcacggccaugugua

SEQ ID NO: 3256987 - RNA, 19 nt, Artificial Sequence
  Description of Artificial Sequence: Synthetic oligonucleotide
acguagcauucauacuccu

SEQ ID NO: 3256988 - RNA, 19 nt, Artificial Sequence
  Description of Artificial Sequence: Synthetic oligonucleotide
agcccagguccuccucagc

SEQ ID NO: 3256989 - RNA, 19 nt, Artificial Sequence
  Description of Artificial Sequence: Synthetic oligonucleotide
acggccauguguauaccug

SEQ ID NO: 3256990 - RNA, 19 nt, Artificial Sequence
  Description of Artificial Sequence: Synthetic oligonucleotide
uggccaggaaggccuugcc

SEQ ID NO: 3256991 - RNA, 19 nt, Artificial Sequence
  Description of Artificial Sequence: Synthetic oligonucleotide
cuugcccuccauagcccag

SEQ ID NO: 3256992 - RNA, 19 nt, Artificial Sequence
  Description of Artificial Sequence: Synthetic oligonucleotide
cacagaagacaucuagucu

SEQ ID NO: 3256993 - RNA, 19 nt, Artificial Sequence
  Description of Artificial Sequence: Synthetic oligonucleotide
guaggcuucccgaaggucu

SEQ ID NO: 3256994 - RNA, 19 nt, Artificial Sequence
  Description of Artificial Sequence: Synthetic oligonucleotide
agucuaggcucuucuucau

SEQ ID NO: 3256995 - RNA, 19 nt, Artificial Sequence
  Description of Artificial Sequence: Synthetic oligonucleotide
uaggcuucccgaaggucuu

SEQ ID NO: 3256996 - RNA, 19 nt, Artificial Sequence
  Description of Artificial Sequence: Synthetic oligonucleotide
gacaucuagucuaggcucu

SEQ ID NO: 3256997 - RNA, 19 nt, Artificial Sequence
  Description of Artificial Sequence: Synthetic oligonucleotide
ucagccucagccgccucac

SEQ ID NO: 3256998 - RNA, 19 nt, Artificial Sequence
  Description of Artificial Sequence: Synthetic oligonucleotide
uccucacuggcacggccau

SEQ ID NO: 3256999 - RNA, 19 nt, Artificial Sequence
  Description of Artificial Sequence: Synthetic oligonucleotide
gucuaggcucuucuucauc

SEQ ID NO: 3257000 - RNA, 19 nt, Artificial Sequence
  Description of Artificial Sequence: Synthetic oligonucleotide
ggucuuggcacuggccagg

SEQ ID NO: 3257001 - RNA, 19 nt, Artificial Sequence
  Description of Artificial Sequence: Synthetic oligonucleotide
cuggccaggaaggccuugc

SEQ ID NO: 3257002 - RNA, 19 nt, Artificial Sequence
  Description of Artificial Sequence: Synthetic oligonucleotide
gcccagguccuccucagcc

SEQ ID NO: 3257003 - RNA, 19 nt, Artificial Sequence
  Description of Artificial Sequence: Synthetic oligonucleotide
cuccucagccucagccgcc

SEQ ID NO: 3257004 - RNA, 19 nt, Artificial Sequence
  Description of Artificial Sequence: Synthetic oligonucleotide
ucacuggcacggccaugug

SEQ ID NO: 3257005 - RNA, 19 nt, Artificial Sequence
  Description of Artificial Sequence: Synthetic oligonucleotide
aaagccaugaagcuguagc

SEQ ID NO: 3257006 - RNA, 19 nt, Artificial Sequence
  Description of Artificial Sequence: Synthetic oligonucleotide
ugaaaagcauccaugaugg

SEQ ID NO: 3257007 - RNA, 19 nt, Artificial Sequence
  Description of Artificial Sequence: Synthetic oligonucleotide
uuaagaaagaauuuuaaaa

SEQ ID NO: 3257008 - RNA, 19 nt, Artificial Sequence
  Description of Artificial Sequence: Synthetic oligonucleotide
ugugauguggcccaggacg

SEQ ID NO: 3257009 - RNA, 19 nt, Artificial Sequence
  Description of Artificial Sequence: Synthetic oligonucleotide
uaagcaaagccacagagag

SEQ ID NO: 3257010 - RNA, 19 nt, Artificial Sequence
  Description of Artificial Sequence: Synthetic oligonucleotide
aagaaagaauuuuaaaaug

SEQ ID NO: 3257011 - RNA, 19 nt, Artificial Sequence
  Description of Artificial Sequence: Synthetic oligonucleotide
uuuuaaaaugcucugaaaa

SEQ ID NO: 3257012 - RNA, 19 nt, Artificial Sequence
  Description of Artificial Sequence: Synthetic oligonucleotide
uuuaaaaugcucugaaaag

SEQ ID NO: 3257013 - RNA, 19 nt, Artificial Sequence
  Description of Artificial Sequence: Synthetic oligonucleotide
uuguuauucagaaagaauc

SEQ ID NO: 3257014 - RNA, 19 nt, Artificial Sequence
  Description of Artificial Sequence: Synthetic oligonucleotide
aucaguaacacccaggcag

SEQ ID NO: 3257015 - RNA, 19 nt, Artificial Sequence
  Description of Artificial Sequence: Synthetic oligonucleotide
agaaagaauuuuaaaaugc

SEQ ID NO: 3257016 - RNA, 19 nt, Artificial Sequence
  Description of Artificial Sequence: Synthetic oligonucleotide
agcaaagccacagagagcc

SEQ ID NO: 3257017 - RNA, 19 nt, Artificial Sequence
  Description of Artificial Sequence: Synthetic oligonucleotide
ugccuuguuauucagaaag

SEQ ID NO: 3257018 - RNA, 19 nt, Artificial Sequence
  Description of Artificial Sequence: Synthetic oligonucleotide
uaagaaagaauuuuaaaau

SEQ ID NO: 3257019 - RNA, 19 nt, Artificial Sequence
  Description of Artificial Sequence: Synthetic oligonucleotide
aaaaccagcccauaggcug

SEQ ID NO: 3257020 - RNA, 19 nt, Artificial Sequence
  Description of Artificial Sequence: Synthetic oligonucleotide
aaugcucugaaaagcaucc

SEQ ID NO: 3257021 - RNA, 19 nt, Artificial Sequence
  Description of Artificial Sequence: Synthetic oligonucleotide
aguucuuugguuaagaaag

SEQ ID NO: 3257022 - RNA, 19 nt, Artificial Sequence
  Description of Artificial Sequence: Synthetic oligonucleotide
uguuauucagaaagaaucc

SEQ ID NO: 3257023 - RNA, 19 nt, Artificial Sequence
  Description of Artificial Sequence: Synthetic oligonucleotide
aagaauuuuaaaaugcucu

SEQ ID NO: 3257024 - RNA, 19 nt, Artificial Sequence
  Description of Artificial Sequence: Synthetic oligonucleotide
aauuuuaaaaugcucugaa

SEQ ID NO: 3257025 - RNA, 19 nt, Artificial Sequence
  Description of Artificial Sequence: Synthetic oligonucleotide
aaugaacucagugugaugu

SEQ ID NO: 3257026 - RNA, 19 nt, Artificial Sequence
  Description of Artificial Sequence: Synthetic oligonucleotide
auuaagcaaagccacagag

SEQ ID NO: 3257027 - RNA, 19 nt, Artificial Sequence
  Description of Artificial Sequence: Synthetic oligonucleotide
aagccaugaagcuguagcc

SEQ ID NO: 3257028 - RNA, 19 nt, Artificial Sequence
  Description of Artificial Sequence: Synthetic oligonucleotide
uucagaaagaauccaagga

SEQ ID NO: 3257029 - RNA, 19 nt, Artificial Sequence
  Description of Artificial Sequence: Synthetic oligonucleotide
uaaaacgucccauuaagca

SEQ ID NO: 3257030 - RNA, 19 nt, Artificial Sequence
  Description of Artificial Sequence: Synthetic oligonucleotide
uauucagaaagaauccaag

SEQ ID NO: 3257031 - RNA, 19 nt, Artificial Sequence
  Description of Artificial Sequence: Synthetic oligonucleotide
ugcaagggcacuuaaaggc

SEQ ID NO: 3257032 - RNA, 19 nt, Artificial Sequence
  Description of Artificial Sequence: Synthetic oligonucleotide
uuaaaaugcucugaaaagc

SEQ ID NO: 3257033 - RNA, 19 nt, Artificial Sequence
  Description of Artificial Sequence: Synthetic oligonucleotide
gaagagaacguucacuucc

SEQ ID NO: 3257034 - RNA, 19 nt, Artificial Sequence
  Description of Artificial Sequence: Synthetic oligonucleotide
aaagaauuuuaaaaugcuc

SEQ ID NO: 3257035 - RNA, 19 nt, Artificial Sequence
  Description of Artificial Sequence: Synthetic oligonucleotide
uaaaaugcucugaaaagca

SEQ ID NO: 3257036 - RNA, 19 nt, Artificial Sequence
  Description of Artificial Sequence: Synthetic oligonucleotide
aaaagcauccaugauggag

SEQ ID NO: 3257037 - RNA, 19 nt, Artificial Sequence
  Description of Artificial Sequence: Synthetic oligonucleotide
  modified_base (6)..(6): a, c, u, g, unknown or other
uuuccngggguuuauacag

SEQ ID NO: 3257038 - RNA, 19 nt, Artificial Sequence
  Description of Artificial Sequence: Synthetic oligonucleotide
auaggcuguauucucagcg

SEQ ID NO: 3257039 - RNA, 19 nt, Artificial Sequence
  Description of Artificial Sequence: Synthetic oligonucleotide
auucagaaagaauccaagg

SEQ ID NO: 3257040 - RNA, 19 nt, Artificial Sequence
  Description of Artificial Sequence: Synthetic oligonucleotide
agaacguucacuucccacg

SEQ ID NO: 3257041 - RNA, 19 nt, Artificial Sequence
  Description of Artificial Sequence: Synthetic oligonucleotide
ucuugucccacucauagca

SEQ ID NO: 3257042 - RNA, 19 nt, Artificial Sequence
  Description of Artificial Sequence: Synthetic oligonucleotide
uuauacagcagccagugaa

SEQ ID NO: 3257043 - RNA, 19 nt, Artificial Sequence
  Description of Artificial Sequence: Synthetic oligonucleotide
agagccacaucacuggagc

SEQ ID NO: 3257044 - RNA, 19 nt, Artificial Sequence
  Description of Artificial Sequence: Synthetic oligonucleotide
acucauagcacauucauaa

SEQ ID NO: 3257045 - RNA, 19 nt, Artificial Sequence
  Description of Artificial Sequence: Synthetic oligonucleotide
ucagaaagaauccaaggau

SEQ ID NO: 3257046 - RNA, 19 nt, Artificial Sequence
  Description of Artificial Sequence: Synthetic oligonucleotide
auagcacauucauaaaacg

SEQ ID NO: 3257047 - RNA, 19 nt, Artificial Sequence
  Description of Artificial Sequence: Synthetic oligonucleotide
agaauuuuaaaaugcucug

SEQ ID NO: 3257048 - RNA, 19 nt, Artificial Sequence
  Description of Artificial Sequence: Synthetic oligonucleotide
cauaaaacgucccauuaag

SEQ ID NO: 3257049 - RNA, 19 nt, Artificial Sequence
  Description of Artificial Sequence: Synthetic oligonucleotide
gaauccaaggaucaguaac

SEQ ID NO: 3257050 - RNA, 19 nt, Artificial Sequence
  Description of Artificial Sequence: Synthetic oligonucleotide
aauagcaguucuuugguua

SEQ ID NO: 3257051 - RNA, 19 nt, Artificial Sequence
  Description of Artificial Sequence: Synthetic oligonucleotide
aacucagugugauguggcc

SEQ ID NO: 3257052 - RNA, 19 nt, Artificial Sequence
  Description of Artificial Sequence: Synthetic oligonucleotide
aaaacgucccauuaagcaa

SEQ ID NO: 3257053 - RNA, 19 nt, Artificial Sequence
  Description of Artificial Sequence: Synthetic oligonucleotide
cugaaaagcauccaugaug

SEQ ID NO: 3257054 - RNA, 19 nt, Artificial Sequence
  Description of Artificial Sequence: Synthetic oligonucleotide
cauagcacauucauaaaac

SEQ ID NO: 3257055 - RNA, 19 nt, Artificial Sequence
  Description of Artificial Sequence: Synthetic oligonucleotide
  modified_base (8)..(8): a, c, u, g, unknown or other
auuuuccngggguuuauac

SEQ ID NO: 3257056 - RNA, 19 nt, Artificial Sequence
  Description of Artificial Sequence: Synthetic oligonucleotide
aaggccacgagugagaaga

SEQ ID NO: 3257057 - RNA, 19 nt, Artificial Sequence
  Description of Artificial Sequence: Synthetic oligonucleotide
  modified_base (17)..(17): a, c, u, g, unknown or other
cuacggaagauuuuccngg

SEQ ID NO: 3257058 - RNA, 19 nt, Artificial Sequence
  Description of Artificial Sequence: Synthetic oligonucleotide
gaagcuguagccaauagca

SEQ ID NO: 3257059 - RNA, 19 nt, Artificial Sequence
  Description of Artificial Sequence: Synthetic oligonucleotide
ccaaggaucaguaacaccc

SEQ ID NO: 3257060 - RNA, 19 nt, Artificial Sequence
  Description of Artificial Sequence: Synthetic oligonucleotide
ucauagcacauucauaaaa

SEQ ID NO: 3257061 - RNA, 19 nt, Artificial Sequence
  Description of Artificial Sequence: Synthetic oligonucleotide
  modified_base (16)..(16): a, c, u, g, unknown or other
uacggaagauuuuccnggg

SEQ ID NO: 3257062 - RNA, 19 nt, Artificial Sequence
  Description of Artificial Sequence: Synthetic oligonucleotide
uauacagcagccagugaag

SEQ ID NO: 3257063 - RNA, 19 nt, Artificial Sequence
  Description of Artificial Sequence: Synthetic oligonucleotide
aaaugcucugaaaagcauc

SEQ ID NO: 3257064 - RNA, 19 nt, Artificial Sequence
  Description of Artificial Sequence: Synthetic oligonucleotide
ucaguaacacccaggcagg

SEQ ID NO: 3257065 - RNA, 19 nt, Artificial Sequence
  Description of Artificial Sequence: Synthetic oligonucleotide
uuauucagaaagaauccaa

SEQ ID NO: 3257066 - RNA, 19 nt, Artificial Sequence
  Description of Artificial Sequence: Synthetic oligonucleotide
uuaagcaaagccacagaga

SEQ ID NO: 3257067 - RNA, 19 nt, Artificial Sequence
  Description of Artificial Sequence: Synthetic oligonucleotide
agcacauucauaaaacguc

SEQ ID NO: 3257068 - RNA, 19 nt, Artificial Sequence
  Description of Artificial Sequence: Synthetic oligonucleotide
aaagcauccaugauggaga

SEQ ID NO: 3257069 - RNA, 19 nt, Artificial Sequence
  Description of Artificial Sequence: Synthetic oligonucleotide
ugaagcuguagccaauagc

SEQ ID NO: 3257070 - RNA, 19 nt, Artificial Sequence
  Description of Artificial Sequence: Synthetic oligonucleotide
  modified_base (7)..(7): a, c, u, g, unknown or other
uuuuccngggguuuauaca

SEQ ID NO: 3257071 - RNA, 19 nt, Artificial Sequence
  Description of Artificial Sequence: Synthetic oligonucleotide
cuucuugucccacucauag

SEQ ID NO: 3257072 - RNA, 19 nt, Artificial Sequence
  Description of Artificial Sequence: Synthetic oligonucleotide
aaagaauccaaggaucagu

SEQ ID NO: 3257073 - RNA, 19 nt, Artificial Sequence
  Description of Artificial Sequence: Synthetic oligonucleotide
agugaagagucuccaugcc

SEQ ID NO: 3257074 - RNA, 19 nt, Artificial Sequence
  Description of Artificial Sequence: Synthetic oligonucleotide
uagcacauucauaaaacgu

SEQ ID NO: 3257075 - RNA, 19 nt, Artificial Sequence
  Description of Artificial Sequence: Synthetic oligonucleotide
gucagcaaagccaugaagc

SEQ ID NO: 3257076 - RNA, 19 nt, Artificial Sequence
  Description of Artificial Sequence: Synthetic oligonucleotide
cacuuaaaggccacgagug

SEQ ID NO: 3257077 - RNA, 19 nt, Artificial Sequence
  Description of Artificial Sequence: Synthetic oligonucleotide
auaaaacgucccauuaagc

SEQ ID NO: 3257078 - RNA, 19 nt, Artificial Sequence
  Description of Artificial Sequence: Synthetic oligonucleotide
acuggagccaccaaugaac

SEQ ID NO: 3257079 - RNA, 19 nt, Artificial Sequence
  Description of Artificial Sequence: Synthetic oligonucleotide
ucccauuaagcaaagccac

SEQ ID NO: 3257080 - RNA, 19 nt, Artificial Sequence
  Description of Artificial Sequence: Synthetic oligonucleotide
aagagaacguucacuuccc

SEQ ID NO: 3257081 - RNA, 19 nt, Artificial Sequence
  Description of Artificial Sequence: Synthetic oligonucleotide
uuugguuaagaaagaauuu

SEQ ID NO: 3257082 - RNA, 19 nt, Artificial Sequence
  Description of Artificial Sequence: Synthetic oligonucleotide
aggacguagaagaagcggc

SEQ ID NO: 3257083 - RNA, 19 nt, Artificial Sequence
  Description of Artificial Sequence: Synthetic oligonucleotide
aagcauccaugauggagac

SEQ ID NO: 3257084 - RNA, 19 nt, Artificial Sequence
  Description of Artificial Sequence: Synthetic oligonucleotide
ucauaaaacgucccauuaa

SEQ ID NO: 3257085 - RNA, 19 nt, Artificial Sequence
  Description of Artificial Sequence: Synthetic oligonucleotide
ucuuugguuaagaaagaau

SEQ ID NO: 3257086 - RNA, 19 nt, Artificial Sequence
  Description of Artificial Sequence: Synthetic oligonucleotide
aauccaaggaucaguaaca

SEQ ID NO: 3257087 - RNA, 19 nt, Artificial Sequence
  Description of Artificial Sequence: Synthetic oligonucleotide
uagaagaagcggcagcagc

SEQ ID NO: 3257088 - RNA, 19 nt, Artificial Sequence
  Description of Artificial Sequence: Synthetic oligonucleotide
uucauaaaacgucccauua

SEQ ID NO: 3257089 - RNA, 19 nt, Artificial Sequence
  Description of Artificial Sequence: Synthetic oligonucleotide
ugaacucagugugaugugg

SEQ ID NO: 3257090 - RNA, 19 nt, Artificial Sequence
  Description of Artificial Sequence: Synthetic oligonucleotide
gaacguucacuucccacgg

SEQ ID NO: 3257091 - RNA, 19 nt, Artificial Sequence
  Description of Artificial Sequence: Synthetic oligonucleotide
cagaaagaauccaaggauc

SEQ ID NO: 3257092 - RNA, 19 nt, Artificial Sequence
  Description of Artificial Sequence: Synthetic oligonucleotide
uggcccaggacguagaaga

SEQ ID NO: 3257093 - RNA, 19 nt, Artificial Sequence
  Description of Artificial Sequence: Synthetic oligonucleotide
guuaagaaagaauuuuaaa

SEQ ID NO: 3257094 - RNA, 19 nt, Artificial Sequence
  Description of Artificial Sequence: Synthetic oligonucleotide
uuaaaggccacgagugaga

SEQ ID NO: 3257095 - RNA, 19 nt, Artificial Sequence
  Description of Artificial Sequence: Synthetic oligonucleotide
ugguuaagaaagaauuuua

SEQ ID NO: 3257096 - RNA, 19 nt, Artificial Sequence
  Description of Artificial Sequence: Synthetic oligonucleotide
acguagaagaagcggcagc

SEQ ID NO: 3257097 - RNA, 19 nt, Artificial Sequence
  Description of Artificial Sequence: Synthetic oligonucleotide
ucagcaaagccaugaagcu

SEQ ID NO: 3257098 - RNA, 19 nt, Artificial Sequence
  Description of Artificial Sequence: Synthetic oligonucleotide
guuuauacagcagccagug

SEQ ID NO: 3257099 - RNA, 19 nt, Artificial Sequence
  Description of Artificial Sequence: Synthetic oligonucleotide
aaggaucaguaacacccag

SEQ ID NO: 3257100 - RNA, 19 nt, Artificial Sequence
  Description of Artificial Sequence: Synthetic oligonucleotide
uauucucagcgcugcaagg

SEQ ID NO: 3257101 - RNA, 19 nt, Artificial Sequence
  Description of Artificial Sequence: Synthetic oligonucleotide
cacgagugagaagagaacg

SEQ ID NO: 3257102 - RNA, 19 nt, Artificial Sequence
  Description of Artificial Sequence: Synthetic oligonucleotide
  modified_base (2)..(2): a, c, u, g, unknown or other
cngggguuuauacagcagc

SEQ ID NO: 3257103 - RNA, 19 nt, Artificial Sequence
  Description of Artificial Sequence: Synthetic oligonucleotide
cagugaagagucuccaugc

SEQ ID NO: 3257104 - RNA, 19 nt, Artificial Sequence
  Description of Artificial Sequence: Synthetic oligonucleotide
guaacacccaggcaggggc

SEQ ID NO: 3257105 - RNA, 19 nt, Artificial Sequence
  Description of Artificial Sequence: Synthetic oligonucleotide
uugccaaucuugaacagcg

SEQ ID NO: 3257106 - RNA, 19 nt, Artificial Sequence
  Description of Artificial Sequence: Synthetic oligonucleotide
uugaguacgacgcuguaag

SEQ ID NO: 3257107 - RNA, 19 nt, Artificial Sequence
  Description of Artificial Sequence: Synthetic oligonucleotide
aguaccauagcugugagug

SEQ ID NO: 3257108 - RNA, 19 nt, Artificial Sequence
  Description of Artificial Sequence: Synthetic oligonucleotide
ugggcacugacacaggugg

SEQ ID NO: 3257109 - RNA, 19 nt, Artificial Sequence
  Description of Artificial Sequence: Synthetic oligonucleotide
guaagcugagccuauggcg

SEQ ID NO: 3257110 - RNA, 19 nt, Artificial Sequence
  Description of Artificial Sequence: Synthetic oligonucleotide
uaagcugagccuauggcgc

SEQ ID NO: 3257111 - RNA, 19 nt, Artificial Sequence
  Description of Artificial Sequence: Synthetic oligonucleotide
uguaagcugagccuauggc

SEQ ID NO: 3257112 - RNA, 19 nt, Artificial Sequence
  Description of Artificial Sequence: Synthetic oligonucleotide
aaucuugaacagcguggcc

SEQ ID NO: 3257113 - RNA, 19 nt, Artificial Sequence
  Description of Artificial Sequence: Synthetic oligonucleotide
aucuugaacagcguggccg

SEQ ID NO: 3257114 - RNA, 19 nt, Artificial Sequence
  Description of Artificial Sequence: Synthetic oligonucleotide
caaggccaaacauagcucc

SEQ ID NO: 3257115 - RNA, 19 nt, Artificial Sequence
  Description of Artificial Sequence: Synthetic oligonucleotide
aaacauagcuccaauggca

SEQ ID NO: 3257116 - RNA, 19 nt, Artificial Sequence
  Description of Artificial Sequence: Synthetic oligonucleotide
caaacauagcuccaauggc

SEQ ID NO: 3257117 - RNA, 19 nt, Artificial Sequence
  Description of Artificial Sequence: Synthetic oligonucleotide
aaagaggucccagccuucc

SEQ ID NO: 3257118 - RNA, 19 nt, Artificial Sequence
  Description of Artificial Sequence: Synthetic oligonucleotide
uauggcgccgaugaggccg

SEQ ID NO: 3257119 - RNA, 19 nt, Artificial Sequence
  Description of Artificial Sequence: Synthetic oligonucleotide
cuugcggugacacugggug

SEQ ID NO: 3257120 - RNA, 19 nt, Artificial Sequence
  Description of Artificial Sequence: Synthetic oligonucleotide
uccaauggcagcugcagug

SEQ ID NO: 3257121 - RNA, 19 nt, Artificial Sequence
  Description of Artificial Sequence: Synthetic oligonucleotide
ccaaacauagcuccaaugg

SEQ ID NO: 3257122 - RNA, 19 nt, Artificial Sequence
  Description of Artificial Sequence: Synthetic oligonucleotide
ggugauguaggucuugcgg

SEQ ID NO: 3257123 - RNA, 19 nt, Artificial Sequence
  Description of Artificial Sequence: Synthetic oligonucleotide
uaccauagcugugagugcg

SEQ ID NO: 3257124 - RNA, 19 nt, Artificial Sequence
  Description of Artificial Sequence: Synthetic oligonucleotide
agugcgugcucccaggguc

SEQ ID NO: 3257125 - RNA, 19 nt, Artificial Sequence
  Description of Artificial Sequence: Synthetic oligonucleotide
aacauagcuccaauggcag

SEQ ID NO: 3257126 - RNA, 19 nt, Artificial Sequence
  Description of Artificial Sequence: Synthetic oligonucleotide
aagcugagccuauggcgcc

SEQ ID NO: 3257127 - RNA, 19 nt, Artificial Sequence
  Description of Artificial Sequence: Synthetic oligonucleotide
aguacgacgcuguaagcug

SEQ ID NO: 3257128 - RNA, 19 nt, Artificial Sequence
  Description of Artificial Sequence: Synthetic oligonucleotide
aacagcguggccgcagugc

SEQ ID NO: 3257129 - RNA, 19 nt, Artificial Sequence
  Description of Artificial Sequence: Synthetic oligonucleotide
  modified_base (2)..(2): a, c, u, g, unknown or other
gnggguggcaaagaggucc

SEQ ID NO: 3257130 - RNA, 19 nt, Artificial Sequence
  Description of Artificial Sequence: Synthetic oligonucleotide
gacuugggcacugacacag

SEQ ID NO: 3257131 - RNA, 19 nt, Artificial Sequence
  Description of Artificial Sequence: Synthetic oligonucleotide
agcuugccaaucuugaaca

SEQ ID NO: 3257132 - RNA, 19 nt, Artificial Sequence
  Description of Artificial Sequence: Synthetic oligonucleotide
aaucugccggguugaguac

SEQ ID NO: 3257133 - RNA, 19 nt, Artificial Sequence
  Description of Artificial Sequence: Synthetic oligonucleotide
acagcguggccgcagugcc

SEQ ID NO: 3257134 - RNA, 19 nt, Artificial Sequence
  Description of Artificial Sequence: Synthetic oligonucleotide
auggcagcugcagugaacg

SEQ ID NO: 3257135 - RNA, 19 nt, Artificial Sequence
  Description of Artificial Sequence: Synthetic oligonucleotide
  modified_base (5)..(5): a, c, u, g, unknown or other
ucggnggguggcaaagagg

SEQ ID NO: 3257136 - RNA, 19 nt, Artificial Sequence
  Description of Artificial Sequence: Synthetic oligonucleotide
auugcuuccacgugggaau

SEQ ID NO: 3257137 - RNA, 19 nt, Artificial Sequence
  Description of Artificial Sequence: Synthetic oligonucleotide
ucuugaacagcguggccgc

SEQ ID NO: 3257138 - RNA, 19 nt, Artificial Sequence
  Description of Artificial Sequence: Synthetic oligonucleotide
gaaucugccggguugagua

SEQ ID NO: 3257139 - RNA, 19 nt, Artificial Sequence
  Description of Artificial Sequence: Synthetic oligonucleotide
uggcaaagaggucccagcc

SEQ ID NO: 3257140 - RNA, 19 nt, Artificial Sequence
  Description of Artificial Sequence: Synthetic oligonucleotide
aacguguaccggccagccc

SEQ ID NO: 3257141 - RNA, 19 nt, Artificial Sequence
  Description of Artificial Sequence: Synthetic oligonucleotide
guggcaaggccaaacauag

SEQ ID NO: 3257142 - RNA, 19 nt, Artificial Sequence
  Description of Artificial Sequence: Synthetic oligonucleotide
uccgaugaaguaguucagg

SEQ ID NO: 3257143 - RNA, 19 nt, Artificial Sequence
  Description of Artificial Sequence: Synthetic oligonucleotide
uccagcuugccaaucuuga

SEQ ID NO: 3257144 - RNA, 19 nt, Artificial Sequence
  Description of Artificial Sequence: Synthetic oligonucleotide
ugauguaggucuugcggug

SEQ ID NO: 3257145 - RNA, 19 nt, Artificial Sequence
  Description of Artificial Sequence: Synthetic oligonucleotide
acauagcuccaauggcagc

SEQ ID NO: 3257146 - RNA, 19 nt, Artificial Sequence
  Description of Artificial Sequence: Synthetic oligonucleotide
ugcaguaccauagcuguga

SEQ ID NO: 3257147 - RNA, 19 nt, Artificial Sequence
  Description of Artificial Sequence: Synthetic oligonucleotide
ugugagugcgugcucccag

SEQ ID NO: 3257148 - RNA, 19 nt, Artificial Sequence
  Description of Artificial Sequence: Synthetic oligonucleotide
acugacacagguggcaagg

SEQ ID NO: 3257149 - RNA, 19 nt, Artificial Sequence
  Description of Artificial Sequence: Synthetic oligonucleotide
uccacgugggaaucugccg

SEQ ID NO: 3257150 - RNA, 19 nt, Artificial Sequence
  Description of Artificial Sequence: Synthetic oligonucleotide
uuccacgugggaaucugcc

SEQ ID NO: 3257151 - RNA, 19 nt, Artificial Sequence
  Description of Artificial Sequence: Synthetic oligonucleotide
caaucuugaacagcguggc

SEQ ID NO: 3257152 - RNA, 19 nt, Artificial Sequence
  Description of Artificial Sequence: Synthetic oligonucleotide
gagccuauggcgccgauga

SEQ ID NO: 3257153 - RNA, 19 nt, Artificial Sequence
  Description of Artificial Sequence: Synthetic oligonucleotide
ugacacagguggcaaggcc

SEQ ID NO: 3257154 - RNA, 19 nt, Artificial Sequence
  Description of Artificial Sequence: Synthetic oligonucleotide
ccaaucuugaacagcgugg

SEQ ID NO: 3257155 - RNA, 19 nt, Artificial Sequence
  Description of Artificial Sequence: Synthetic oligonucleotide
acguguaccggccagcccu

SEQ ID NO: 3257156 - RNA, 19 nt, Artificial Sequence
  Description of Artificial Sequence: Synthetic oligonucleotide
aauggcagcugcagugaac

SEQ ID NO: 3257157 - RNA, 19 nt, Artificial Sequence
  Description of Artificial Sequence: Synthetic oligonucleotide
auguacacgcagcccacgg

SEQ ID NO: 3257158 - RNA, 19 nt, Artificial Sequence
  Description of Artificial Sequence: Synthetic oligonucleotide
agcugugagugcgugcucc

SEQ ID NO: 3257159 - RNA, 19 nt, Artificial Sequence
  Description of Artificial Sequence: Synthetic oligonucleotide
cacggcugcaguaccauag

SEQ ID NO: 3257160 - RNA, 19 nt, Artificial Sequence
  Description of Artificial Sequence: Synthetic oligonucleotide
cuguaagcugagccuaugg

SEQ ID NO: 3257161 - RNA, 19 nt, Artificial Sequence
  Description of Artificial Sequence: Synthetic oligonucleotide
auagcugugagugcgugcu

SEQ ID NO: 3257162 - RNA, 19 nt, Artificial Sequence
  Description of Artificial Sequence: Synthetic oligonucleotide
ugagugcgugcucccaggg

SEQ ID NO: 3257163 - RNA, 19 nt, Artificial Sequence
  Description of Artificial Sequence: Synthetic oligonucleotide
ugcccauguacacgcagcc

SEQ ID NO: 3257164 - RNA, 19 nt, Artificial Sequence
  Description of Artificial Sequence: Synthetic oligonucleotide
agaggucccagccuuccag

SEQ ID NO: 3257165 - RNA, 19 nt, Artificial Sequence
  Description of Artificial Sequence: Synthetic oligonucleotide
uuccagcuugccaaucuug

SEQ ID NO: 3257166 - RNA, 19 nt, Artificial Sequence
  Description of Artificial Sequence: Synthetic oligonucleotide
cugcagugaacguguaccg

SEQ ID NO: 3257167 - RNA, 19 nt, Artificial Sequence
  Description of Artificial Sequence: Synthetic oligonucleotide
acggcugcaguaccauagc

SEQ ID NO: 3257168 - RNA, 19 nt, Artificial Sequence
  Description of Artificial Sequence: Synthetic oligonucleotide
uguacacgcagcccacggc

SEQ ID NO: 3257169 - RNA, 19 nt, Artificial Sequence
  Description of Artificial Sequence: Synthetic oligonucleotide
ucuggcuucucucggacuu

SEQ ID NO: 3257170 - RNA, 19 nt, Artificial Sequence
  Description of Artificial Sequence: Synthetic oligonucleotide
ugccggguugaguacgacg

SEQ ID NO: 3257171 - RNA, 19 nt, Artificial Sequence
  Description of Artificial Sequence: Synthetic oligonucleotide
uggugauguaggucuugcg

SEQ ID NO: 3257172 - RNA, 19 nt, Artificial Sequence
  Description of Artificial Sequence: Synthetic oligonucleotide
cuugccaaucuugaacagc

SEQ ID NO: 3257173 - RNA, 19 nt, Artificial Sequence
  Description of Artificial Sequence: Synthetic oligonucleotide
cagcuugccaaucuugaac

SEQ ID NO: 3257174 - RNA, 19 nt, Artificial Sequence
  Description of Artificial Sequence: Synthetic oligonucleotide
gaugaggccgccgagggca

SEQ ID NO: 3257175 - RNA, 19 nt, Artificial Sequence
  Description of Artificial Sequence: Synthetic oligonucleotide
cuucucucggacuugggca

SEQ ID NO: 3257176 - RNA, 19 nt, Artificial Sequence
  Description of Artificial Sequence: Synthetic oligonucleotide
gucaucuggcuucucucgg

SEQ ID NO: 3257177 - RNA, 19 nt, Artificial Sequence
  Description of Artificial Sequence: Synthetic oligonucleotide
ugcagugaacguguaccgg

SEQ ID NO: 3257178 - RNA, 19 nt, Artificial Sequence
  Description of Artificial Sequence: Synthetic oligonucleotide
acagguggcaaggccaaac

SEQ ID NO: 3257179 - RNA, 19 nt, Artificial Sequence
  Description of Artificial Sequence: Synthetic oligonucleotide
ugacacugggugccgucgg

SEQ ID NO: 3257180 - RNA, 19 nt, Artificial Sequence
  Description of Artificial Sequence: Synthetic oligonucleotide
ucggacuugggcacugaca

SEQ ID NO: 3257181 - RNA, 19 nt, Artificial Sequence
  Description of Artificial Sequence: Synthetic oligonucleotide
aggucuugcggugacacug

SEQ ID NO: 3257182 - RNA, 19 nt, Artificial Sequence
  Description of Artificial Sequence: Synthetic oligonucleotide
agugcccauguacacgcag

SEQ ID NO: 3257183 - RNA, 19 nt, Artificial Sequence
  Description of Artificial Sequence: Synthetic oligonucleotide
uugggcacugacacaggug

SEQ ID NO: 3257184 - RNA, 19 nt, Artificial Sequence
  Description of Artificial Sequence: Synthetic oligonucleotide
uucucucggacuugggcac

SEQ ID NO: 3257185 - RNA, 19 nt, Artificial Sequence
  Description of Artificial Sequence: Synthetic oligonucleotide
auguaggucuugcggugac

SEQ ID NO: 3257186 - RNA, 19 nt, Artificial Sequence
  Description of Artificial Sequence: Synthetic oligonucleotide
acacgcagcccacggcugc

SEQ ID NO: 3257187 - RNA, 19 nt, Artificial Sequence
  Description of Artificial Sequence: Synthetic oligonucleotide
ggucaucuggcuucucucg

SEQ ID NO: 3257188 - RNA, 19 nt, Artificial Sequence
  Description of Artificial Sequence: Synthetic oligonucleotide
agcugcagugaacguguac

SEQ ID NO: 3257189 - RNA, 19 nt, Artificial Sequence
  Description of Artificial Sequence: Synthetic oligonucleotide
agggcaguggugauguagg

SEQ ID NO: 3257190 - RNA, 19 nt, Artificial Sequence
  Description of Artificial Sequence: Synthetic oligonucleotide
gagggcaguggugauguag

SEQ ID NO: 3257191 - RNA, 19 nt, Artificial Sequence
  Description of Artificial Sequence: Synthetic oligonucleotide
ccgaugaaguaguucaggg

SEQ ID NO: 3257192 - RNA, 19 nt, Artificial Sequence
  Description of Artificial Sequence: Synthetic oligonucleotide
guggcaaagaggucccagc

SEQ ID NO: 3257193 - RNA, 19 nt, Artificial Sequence
  Description of Artificial Sequence: Synthetic oligonucleotide
gacacagguggcaaggcca

SEQ ID NO: 3257194 - RNA, 19 nt, Artificial Sequence
  Description of Artificial Sequence: Synthetic oligonucleotide
gugggaaucugccggguug

SEQ ID NO: 3257195 - RNA, 19 nt, Artificial Sequence
  Description of Artificial Sequence: Synthetic oligonucleotide
ugaguacgacgcuguaagc

SEQ ID NO: 3257196 - RNA, 19 nt, Artificial Sequence
  Description of Artificial Sequence: Synthetic oligonucleotide
gcugcagugaacguguacc

SEQ ID NO: 3257197 - RNA, 19 nt, Artificial Sequence
  Description of Artificial Sequence: Synthetic oligonucleotide
cagugaacguguaccggcc

SEQ ID NO: 3257198 - RNA, 19 nt, Artificial Sequence
  Description of Artificial Sequence: Synthetic oligonucleotide
ucaucuggcuucucucgga

SEQ ID NO: 3257199 - RNA, 19 nt, Artificial Sequence
  Description of Artificial Sequence: Synthetic oligonucleotide
cauagcugugagugcgugc

SEQ ID NO: 3257200 - RNA, 19 nt, Artificial Sequence
  Description of Artificial Sequence: Synthetic oligonucleotide
agcccuggccauugcuucc

SEQ ID NO: 3257201 - RNA, 19 nt, Artificial Sequence
  Description of Artificial Sequence: Synthetic oligonucleotide
ggccauugcuuccacgugg

SEQ ID NO: 3257202 - RNA, 19 nt, Artificial Sequence
  Description of Artificial Sequence: Synthetic oligonucleotide
ugcgcagccuccgaugaag

SEQ ID NO: 3257203 - RNA, 19 nt, Artificial Sequence
  Description of Artificial Sequence: Synthetic oligonucleotide
ugcggugacacugggugcc

SEQ ID NO: 3257204 - RNA, 19 nt, Artificial Sequence
  Description of Artificial Sequence: Synthetic oligonucleotide
ugcucccagggucaggccu

SEQ ID NO: 3257205 - RNA, 19 nt, Artificial Sequence
  Description of Artificial Sequence: Synthetic oligonucleotide
aauacguacacuguaaugc

SEQ ID NO: 3257206 - RNA, 19 nt, Artificial Sequence
  Description of Artificial Sequence: Synthetic oligonucleotide
uauggaaacaaucaaaacc

SEQ ID NO: 3257207 - RNA, 19 nt, Artificial Sequence
  Description of Artificial Sequence: Synthetic oligonucleotide
aaacaaucaaaaccggacc

SEQ ID NO: 3257208 - RNA, 19 nt, Artificial Sequence
  Description of Artificial Sequence: Synthetic oligonucleotide
aaggcaaauacguacacug

SEQ ID NO: 3257209 - RNA, 19 nt, Artificial Sequence
  Description of Artificial Sequence: Synthetic oligonucleotide
aagagguuccccaagaggc

SEQ ID NO: 3257210 - RNA, 19 nt, Artificial Sequence
  Description of Artificial Sequence: Synthetic oligonucleotide
auggaaacaaucaaaaccg

SEQ ID NO: 3257211 - RNA, 19 nt, Artificial Sequence
  Description of Artificial Sequence: Synthetic oligonucleotide
ucuauggaaacaaucaaaa

SEQ ID NO: 3257212 - RNA, 19 nt, Artificial Sequence
  Description of Artificial Sequence: Synthetic oligonucleotide
ucaaaaccggaccugaccc

SEQ ID NO: 3257213 - RNA, 19 nt, Artificial Sequence
  Description of Artificial Sequence: Synthetic oligonucleotide
aacaaucaaaaccggaccu

SEQ ID NO: 3257214 - RNA, 19 nt, Artificial Sequence
  Description of Artificial Sequence: Synthetic oligonucleotide
uguugagaaggcucuaugg

SEQ ID NO: 3257215 - RNA, 19 nt, Artificial Sequence
  Description of Artificial Sequence: Synthetic oligonucleotide
aucaaaaccggaccugacc

SEQ ID NO: 3257216 - RNA, 19 nt, Artificial Sequence
  Description of Artificial Sequence: Synthetic oligonucleotide
auacguacacuguaaugcc

SEQ ID NO: 3257217 - RNA, 19 nt, Artificial Sequence
  Description of Artificial Sequence: Synthetic oligonucleotide
aaauacguacacuguaaug

SEQ ID NO: 3257218 - RNA, 19 nt, Artificial Sequence
  Description of Artificial Sequence: Synthetic oligonucleotide
ugagcugcaagaacguggg

SEQ ID NO: 3257219 - RNA, 19 nt, Artificial Sequence
  Description of Artificial Sequence: Synthetic oligonucleotide
gaaacaaucaaaaccggac

SEQ ID NO: 3257220 - RNA, 19 nt, Artificial Sequence
  Description of Artificial Sequence: Synthetic oligonucleotide
aggacagcgguccacagcg

SEQ ID NO: 3257221 - RNA, 19 nt, Artificial Sequence
  Description of Artificial Sequence: Synthetic oligonucleotide
gaacgugggaucuucgggg

SEQ ID NO: 3257222 - RNA, 19 nt, Artificial Sequence
  Description of Artificial Sequence: Synthetic oligonucleotide
gaagagguuccccaagagg

SEQ ID NO: 3257223 - RNA, 19 nt, Artificial Sequence
  Description of Artificial Sequence: Synthetic oligonucleotide
aagaacgugggaucuucgg

SEQ ID NO: 3257224 - RNA, 19 nt, Artificial Sequence
  Description of Artificial Sequence: Synthetic oligonucleotide
aacgugggaucuucggggc

SEQ ID NO: 3257225 - RNA, 19 nt, Artificial Sequence
  Description of Artificial Sequence: Synthetic oligonucleotide
agaagccgaaggcaaauac

SEQ ID NO: 3257226 - RNA, 19 nt, Artificial Sequence
  Description of Artificial Sequence: Synthetic oligonucleotide
uggaaacaaucaaaaccgg

SEQ ID NO: 3257227 - RNA, 19 nt, Artificial Sequence
  Description of Artificial Sequence: Synthetic oligonucleotide
agaacgugggaucuucggg

SEQ ID NO: 3257228 - RNA, 19 nt, Artificial Sequence
  Description of Artificial Sequence: Synthetic oligonucleotide
cugagcugcaagaacgugg

SEQ ID NO: 3257229 - RNA, 19 nt, Artificial Sequence
  Description of Artificial Sequence: Synthetic oligonucleotide
uugaagaagccgaaggcaa

SEQ ID NO: 3257230 - RNA, 19 nt, Artificial Sequence
  Description of Artificial Sequence: Synthetic oligonucleotide
aaaaccggaccugacccac

SEQ ID NO: 3257231 - RNA, 19 nt, Artificial Sequence
  Description of Artificial Sequence: Synthetic oligonucleotide
acuguaaugccugagugug

SEQ ID NO: 3257232 - RNA, 19 nt, Artificial Sequence
  Description of Artificial Sequence: Synthetic oligonucleotide
uccccaagaggcuugaaga

SEQ ID NO: 3257233 - RNA, 19 nt, Artificial Sequence
  Description of Artificial Sequence: Synthetic oligonucleotide
ugagaaggcucuauggaaa

SEQ ID NO: 3257234 - RNA, 19 nt, Artificial Sequence
  Description of Artificial Sequence: Synthetic oligonucleotide
gaagccgaaggcaaauacg

SEQ ID NO: 3257235 - RNA, 19 nt, Artificial Sequence
  Description of Artificial Sequence: Synthetic oligonucleotide
uacacuguaaugccugagu

SEQ ID NO: 3257236 - RNA, 19 nt, Artificial Sequence
  Description of Artificial Sequence: Synthetic oligonucleotide
acacuguaaugccugagug

SEQ ID NO: 3257237 - RNA, 19 nt, Artificial Sequence
  Description of Artificial Sequence: Synthetic oligonucleotide
cuauggaaacaaucaaaac

SEQ ID NO: 3257238 - RNA, 19 nt, Artificial Sequence
  Description of Artificial Sequence: Synthetic oligonucleotide
uuccccaagaggcuugaag

SEQ ID NO: 3257239 - RNA, 19 nt, Artificial Sequence
  Description of Artificial Sequence: Synthetic oligonucleotide
uugagaaggcucuauggaa

SEQ ID NO: 3257240 - RNA, 19 nt, Artificial Sequence
  Description of Artificial Sequence: Synthetic oligonucleotide
aaugccugaguguguugag

SEQ ID NO: 3257241 - RNA, 19 nt, Artificial Sequence
  Description of Artificial Sequence: Synthetic oligonucleotide
aagccgaaggcaaauacgu

SEQ ID NO: 3257242 - RNA, 19 nt, Artificial Sequence
  Description of Artificial Sequence: Synthetic oligonucleotide
aaucaaaaccggaccugac

SEQ ID NO: 3257243 - RNA, 19 nt, Artificial Sequence
  Description of Artificial Sequence: Synthetic oligonucleotide
guugagaaggcucuaugga

SEQ ID NO: 3257244 - RNA, 19 nt, Artificial Sequence
  Description of Artificial Sequence: Synthetic oligonucleotide
aagaggcuugaagaagccg

SEQ ID NO: 3257245 - RNA, 19 nt, Artificial Sequence
  Description of Artificial Sequence: Synthetic oligonucleotide
ggcuugaagaagccgaagg

SEQ ID NO: 3257246 - RNA, 19 nt, Artificial Sequence
  Description of Artificial Sequence: Synthetic oligonucleotide
aggagagcuggcuaggaca

SEQ ID NO: 3257247 - RNA, 19 nt, Artificial Sequence
  Description of Artificial Sequence: Synthetic oligonucleotide
gaucuucggggccacugcg

SEQ ID NO: 3257248 - RNA, 19 nt, Artificial Sequence
  Description of Artificial Sequence: Synthetic oligonucleotide
acugcgaagagguucccca

SEQ ID NO: 3257249 - RNA, 19 nt, Artificial Sequence
  Description of Artificial Sequence: Synthetic oligonucleotide
agagcuggcuaggacagcg

SEQ ID NO: 3257250 - RNA, 19 nt, Artificial Sequence
  Description of Artificial Sequence: Synthetic oligonucleotide
uaaugccugaguguguuga

SEQ ID NO: 3257251 - RNA, 19 nt, Artificial Sequence
  Description of Artificial Sequence: Synthetic oligonucleotide
agcgcugagcugcaagaac

SEQ ID NO: 3257252 - RNA, 19 nt, Artificial Sequence
  Description of Artificial Sequence: Synthetic oligonucleotide
cugaguguguugagaaggc

SEQ ID NO: 3257253 - RNA, 19 nt, Artificial Sequence
  Description of Artificial Sequence: Synthetic oligonucleotide
auacacggaggagagcugg

SEQ ID NO: 3257254 - RNA, 19 nt, Artificial Sequence
  Description of Artificial Sequence: Synthetic oligonucleotide
cuggcuaggacagcggucc

SEQ ID NO: 3257255 - RNA, 19 nt, Artificial Sequence
  Description of Artificial Sequence: Synthetic oligonucleotide
ugcgaagagguuccccaag

SEQ ID NO: 3257256 - RNA, 19 nt, Artificial Sequence
  Description of Artificial Sequence: Synthetic oligonucleotide
ugacccacuggucgugggg

SEQ ID NO: 3257257 - RNA, 19 nt, Artificial Sequence
  Description of Artificial Sequence: Synthetic oligonucleotide
uacguacacuguaaugccu

SEQ ID NO: 3257258 - RNA, 19 nt, Artificial Sequence
  Description of Artificial Sequence: Synthetic oligonucleotide
gagaaggcucuauggaaac

SEQ ID NO: 3257259 - RNA, 19 nt, Artificial Sequence
  Description of Artificial Sequence: Synthetic oligonucleotide
ggaccugacccacuggucg

SEQ ID NO: 3257260 - RNA, 19 nt, Artificial Sequence
  Description of Artificial Sequence: Synthetic oligonucleotide
ugaagaagccgaaggcaaa

SEQ ID NO: 3257261 - RNA, 19 nt, Artificial Sequence
  Description of Artificial Sequence: Synthetic oligonucleotide
agaggcuugaagaagccga

SEQ ID NO: 3257262 - RNA, 19 nt, Artificial Sequence
  Description of Artificial Sequence: Synthetic oligonucleotide
cucuauggaaacaaucaaa

SEQ ID NO: 3257263 - RNA, 19 nt, Artificial Sequence
  Description of Artificial Sequence: Synthetic oligonucleotide
acaaucaaaaccggaccug

SEQ ID NO: 3257264 - RNA, 19 nt, Artificial Sequence
  Description of Artificial Sequence: Synthetic oligonucleotide
uggucguggggaccgaggc

SEQ ID NO: 3257265 - RNA, 19 nt, Artificial Sequence
  Description of Artificial Sequence: Synthetic oligonucleotide
acggaggagagcuggcuag

SEQ ID NO: 3257266 - RNA, 19 nt, Artificial Sequence
  Description of Artificial Sequence: Synthetic oligonucleotide
ccaagaggcuugaagaagc

SEQ ID NO: 3257267 - RNA, 19 nt, Artificial Sequence
  Description of Artificial Sequence: Synthetic oligonucleotide
caagaggcuugaagaagcc

SEQ ID NO: 3257268 - RNA, 19 nt, Artificial Sequence
  Description of Artificial Sequence: Synthetic oligonucleotide
ugccugaguguguugagaa

SEQ ID NO: 3257269 - RNA, 19 nt, Artificial Sequence
  Description of Artificial Sequence: Synthetic oligonucleotide
aguguguugagaaggcucu

SEQ ID NO: 3257270 - RNA, 19 nt, Artificial Sequence
  Description of Artificial Sequence: Synthetic oligonucleotide
aaccggaccugacccacug

SEQ ID NO: 3257271 - RNA, 19 nt, Artificial Sequence
  Description of Artificial Sequence: Synthetic oligonucleotide
caagaacgugggaucuucg

SEQ ID NO: 3257272 - RNA, 19 nt, Artificial Sequence
  Description of Artificial Sequence: Synthetic oligonucleotide
cuugaagaagccgaaggca

SEQ ID NO: 3257273 - RNA, 19 nt, Artificial Sequence
  Description of Artificial Sequence: Synthetic oligonucleotide
gcuugaagaagccgaaggc

SEQ ID NO: 3257274 - RNA, 19 nt, Artificial Sequence
  Description of Artificial Sequence: Synthetic oligonucleotide
uaggacagcgguccacagc

SEQ ID NO: 3257275 - RNA, 19 nt, Artificial Sequence
  Description of Artificial Sequence: Synthetic oligonucleotide
uguaaugccugaguguguu

SEQ ID NO: 3257276 - RNA, 19 nt, Artificial Sequence
  Description of Artificial Sequence: Synthetic oligonucleotide
uucggggccacugcgaaga

SEQ ID NO: 3257277 - RNA, 19 nt, Artificial Sequence
  Description of Artificial Sequence: Synthetic oligonucleotide
gaguguguugagaaggcuc

SEQ ID NO: 3257278 - RNA, 19 nt, Artificial Sequence
  Description of Artificial Sequence: Synthetic oligonucleotide
aggcucuauggaaacaauc

SEQ ID NO: 3257279 - RNA, 19 nt, Artificial Sequence
  Description of Artificial Sequence: Synthetic oligonucleotide
ccugaguguguugagaagg

SEQ ID NO: 3257280 - RNA, 19 nt, Artificial Sequence
  Description of Artificial Sequence: Synthetic oligonucleotide
guguugagaaggcucuaug

SEQ ID NO: 3257281 - RNA, 19 nt, Artificial Sequence
  Description of Artificial Sequence: Synthetic oligonucleotide
gaaggcucuauggaaacaa

SEQ ID NO: 3257282 - RNA, 19 nt, Artificial Sequence
  Description of Artificial Sequence: Synthetic oligonucleotide
acagcgcugagcugcaaga

SEQ ID NO: 3257283 - RNA, 19 nt, Artificial Sequence
  Description of Artificial Sequence: Synthetic oligonucleotide
gccgaaggcaaauacguac

SEQ ID NO: 3257284 - RNA, 19 nt, Artificial Sequence
  Description of Artificial Sequence: Synthetic oligonucleotide
gucguggggaccgaggcag

SEQ ID NO: 3257285 - RNA, 19 nt, Artificial Sequence
  Description of Artificial Sequence: Synthetic oligonucleotide
guccacagcgcugagcugc

SEQ ID NO: 3257286 - RNA, 19 nt, Artificial Sequence
  Description of Artificial Sequence: Synthetic oligonucleotide
ucuucggggccacugcgaa

SEQ ID NO: 3257287 - RNA, 19 nt, Artificial Sequence
  Description of Artificial Sequence: Synthetic oligonucleotide
agcugcaagaacgugggau

SEQ ID NO: 3257288 - RNA, 19 nt, Artificial Sequence
  Description of Artificial Sequence: Synthetic oligonucleotide
acgugggaucuucggggcc

SEQ ID NO: 3257289 - RNA, 19 nt, Artificial Sequence
  Description of Artificial Sequence: Synthetic oligonucleotide
ggcucuauggaaacaauca

SEQ ID NO: 3257290 - RNA, 19 nt, Artificial Sequence
  Description of Artificial Sequence: Synthetic oligonucleotide
acguacacuguaaugccug

SEQ ID NO: 3257291 - RNA, 19 nt, Artificial Sequence
  Description of Artificial Sequence: Synthetic oligonucleotide
uacacggaggagagcuggc

SEQ ID NO: 3257292 - RNA, 19 nt, Artificial Sequence
  Description of Artificial Sequence: Synthetic oligonucleotide
uggggaccgaggcaguccu

SEQ ID NO: 3257293 - RNA, 19 nt, Artificial Sequence
  Description of Artificial Sequence: Synthetic oligonucleotide
uguguugagaaggcucuau

SEQ ID NO: 3257294 - RNA, 19 nt, Artificial Sequence
  Description of Artificial Sequence: Synthetic oligonucleotide
gaggagagcuggcuaggac

SEQ ID NO: 3257295 - RNA, 19 nt, Artificial Sequence
  Description of Artificial Sequence: Synthetic oligonucleotide
ugaguguguugagaaggcu

SEQ ID NO: 3257296 - RNA, 19 nt, Artificial Sequence
  Description of Artificial Sequence: Synthetic oligonucleotide
agcuggcuaggacagcggu

SEQ ID NO: 3257297 - RNA, 19 nt, Artificial Sequence
  Description of Artificial Sequence: Synthetic oligonucleotide
caaucaaaaccggaccuga

SEQ ID NO: 3257298 - RNA, 19 nt, Artificial Sequence
  Description of Artificial Sequence: Synthetic oligonucleotide
cuggucguggggaccgagg

SEQ ID NO: 3257299 - RNA, 19 nt, Artificial Sequence
  Description of Artificial Sequence: Synthetic oligonucleotide
cacagcgcugagcugcaag

SEQ ID NO: 3257300 - RNA, 19 nt, Artificial Sequence
  Description of Artificial Sequence: Synthetic oligonucleotide
gcgcugagcugcaagaacg

SEQ ID NO: 3257301 - RNA, 19 nt, Artificial Sequence
  Description of Artificial Sequence: Synthetic oligonucleotide
ggaaacaaucaaaaccgga

SEQ ID NO: 3257302 - RNA, 19 nt, Artificial Sequence
  Description of Artificial Sequence: Synthetic oligonucleotide
gcugcaagaacgugggauc

SEQ ID NO: 3257303 - RNA, 19 nt, Artificial Sequence
  Description of Artificial Sequence: Synthetic oligonucleotide
cuaggacagcgguccacag

SEQ ID NO: 3257304 - RNA, 19 nt, Artificial Sequence
  Description of Artificial Sequence: Synthetic oligonucleotide
guacacuguaaugccugag

SEQ ID NO: 3257305 - RNA, 19 nt, Artificial Sequence
  Description of Artificial Sequence: Synthetic oligonucleotide
aacaagacgacuuugauga

SEQ ID NO: 3257306 - RNA, 19 nt, Artificial Sequence
  Description of Artificial Sequence: Synthetic oligonucleotide
augucuuugagguagaagc

SEQ ID NO: 3257307 - RNA, 19 nt, Artificial Sequence
  Description of Artificial Sequence: Synthetic oligonucleotide
uugacuagggcacacaggg

SEQ ID NO: 3257308 - RNA, 19 nt, Artificial Sequence
  Description of Artificial Sequence: Synthetic oligonucleotide
acagcuaacuucuuguagc

SEQ ID NO: 3257309 - RNA, 19 nt, Artificial Sequence
  Description of Artificial Sequence: Synthetic oligonucleotide
uagcaguucaccacgaugg

SEQ ID NO: 3257310 - RNA, 19 nt, Artificial Sequence
  Description of Artificial Sequence: Synthetic oligonucleotide
aaugagguagcaguucacc

SEQ ID NO: 3257311 - RNA, 19 nt, Artificial Sequence
  Description of Artificial Sequence: Synthetic oligonucleotide
aucacuucggaucucaauc

SEQ ID NO: 3257312 - RNA, 19 nt, Artificial Sequence
  Description of Artificial Sequence: Synthetic oligonucleotide
ucggaucucaaucagguug

SEQ ID NO: 3257313 - RNA, 19 nt, Artificial Sequence
  Description of Artificial Sequence: Synthetic oligonucleotide
gauaaggugccucucguag

SEQ ID NO: 3257314 - RNA, 19 nt, Artificial Sequence
  Description of Artificial Sequence: Synthetic oligonucleotide
gacaaacuggaacaagacg

SEQ ID NO: 3257315 - RNA, 19 nt, Artificial Sequence
  Description of Artificial Sequence: Synthetic oligonucleotide
aaaggcagaggagaagagc

SEQ ID NO: 3257316 - RNA, 19 nt, Artificial Sequence
  Description of Artificial Sequence: Synthetic oligonucleotide
augucguugagccacacag

SEQ ID NO: 3257317 - RNA, 19 nt, Artificial Sequence
  Description of Artificial Sequence: Synthetic oligonucleotide
aucucaaucagguuguuga

SEQ ID NO: 3257318 - RNA, 19 nt, Artificial Sequence
  Description of Artificial Sequence: Synthetic oligonucleotide
uacgaguugacaaacugga

SEQ ID NO: 3257319 - RNA, 19 nt, Artificial Sequence
  Description of Artificial Sequence: Synthetic oligonucleotide
gacgacuuugaugauaagg

SEQ ID NO: 3257320 - RNA, 19 nt, Artificial Sequence
  Description of Artificial Sequence: Synthetic oligonucleotide
agccaagugcucuagcacc

SEQ ID NO: 3257321 - RNA, 19 nt, Artificial Sequence
  Description of Artificial Sequence: Synthetic oligonucleotide
uagaagccgauguagaaca

SEQ ID NO: 3257322 - RNA, 19 nt, Artificial Sequence
  Description of Artificial Sequence: Synthetic oligonucleotide
caugcagccucuuucaagc

SEQ ID NO: 3257323 - RNA, 19 nt, Artificial Sequence
  Description of Artificial Sequence: Synthetic oligonucleotide
uuucaagcgguccaugucu

SEQ ID NO: 3257324 - RNA, 19 nt, Artificial Sequence
  Description of Artificial Sequence: Synthetic oligonucleotide
aaucagguuguugacuagg

SEQ ID NO: 3257325 - RNA, 19 nt, Artificial Sequence
  Description of Artificial Sequence: Synthetic oligonucleotide
agacaggccagacacagag

SEQ ID NO: 3257326 - RNA, 19 nt, Artificial Sequence
  Description of Artificial Sequence: Synthetic oligonucleotide
uguugacuagggcacacag

SEQ ID NO: 3257327 - RNA, 19 nt, Artificial Sequence
  Description of Artificial Sequence: Synthetic oligonucleotide
uguagaacagacucaagua

SEQ ID NO: 3257328 - RNA, 19 nt, Artificial Sequence
  Description of Artificial Sequence: Synthetic oligonucleotide
gaacaagacgacuuugaug

SEQ ID NO: 3257329 - RNA, 19 nt, Artificial Sequence
  Description of Artificial Sequence: Synthetic oligonucleotide
ugguacuccaguuuggcca

SEQ ID NO: 3257330 - RNA, 19 nt, Artificial Sequence
  Description of Artificial Sequence: Synthetic oligonucleotide
aguacgaguugacaaacug

SEQ ID NO: 3257331 - RNA, 19 nt, Artificial Sequence
  Description of Artificial Sequence: Synthetic oligonucleotide
gaguugacaaacuggaaca

SEQ ID NO: 3257332 - RNA, 19 nt, Artificial Sequence
  Description of Artificial Sequence: Synthetic oligonucleotide
gagguagcaguucaccacg

SEQ ID NO: 3257333 - RNA, 19 nt, Artificial Sequence
  Description of Artificial Sequence: Synthetic oligonucleotide
aagccgauguagaacagac

SEQ ID NO: 3257334 - RNA, 19 nt, Artificial Sequence
  Description of Artificial Sequence: Synthetic oligonucleotide
aacguguccucauacuucu

SEQ ID NO: 3257335 - RNA, 19 nt, Artificial Sequence
  Description of Artificial Sequence: Synthetic oligonucleotide
ucuuguagcccucugcgcu

SEQ ID NO: 3257336 - RNA, 19 nt, Artificial Sequence
  Description of Artificial Sequence: Synthetic oligonucleotide
guagaacagacucaaguac

SEQ ID NO: 3257337 - RNA, 19 nt, Artificial Sequence
  Description of Artificial Sequence: Synthetic oligonucleotide
gaagcagccgagcaucagg

SEQ ID NO: 3257338 - RNA, 19 nt, Artificial Sequence
  Description of Artificial Sequence: Synthetic oligonucleotide
cuugaaggcaucacuucgg

SEQ ID NO: 3257339 - RNA, 19 nt, Artificial Sequence
  Description of Artificial Sequence: Synthetic oligonucleotide
accaccacagauacgaugg

SEQ ID NO: 3257340 - RNA, 19 nt, Artificial Sequence
  Description of Artificial Sequence: Synthetic oligonucleotide
cacuacguagccaaacugc

SEQ ID NO: 3257341 - RNA, 19 nt, Artificial Sequence
  Description of Artificial Sequence: Synthetic oligonucleotide
ucaaguacgaguugacaaa

SEQ ID NO: 3257342 - RNA, 19 nt, Artificial Sequence
  Description of Artificial Sequence: Synthetic oligonucleotide
ucaaucagguuguugacua

SEQ ID NO: 3257343 - RNA, 19 nt, Artificial Sequence
  Description of Artificial Sequence: Synthetic oligonucleotide
uggaacaagacgacuuuga

SEQ ID NO: 3257344 - RNA, 19 nt, Artificial Sequence
  Description of Artificial Sequence: Synthetic oligonucleotide
auggccagcacgcccaucg

SEQ ID NO: 3257345 - RNA, 19 nt, Artificial Sequence
  Description of Artificial Sequence: Synthetic oligonucleotide
auaaggugccucucguagg

SEQ ID NO: 3257346 - RNA, 19 nt, Artificial Sequence
  Description of Artificial Sequence: Synthetic oligonucleotide
ucuagcaccaccacagaua

SEQ ID NO: 3257347 - RNA, 19 nt, Artificial Sequence
  Description of Artificial Sequence: Synthetic oligonucleotide
gacgaagacacagacaaga

SEQ ID NO: 3257348 - RNA, 19 nt, Artificial Sequence
  Description of Artificial Sequence: Synthetic oligonucleotide
cuagcaccaccacagauac

SEQ ID NO: 3257349 - RNA, 19 nt, Artificial Sequence
  Description of Artificial Sequence: Synthetic oligonucleotide
agacccuucacgcucagga

SEQ ID NO: 3257350 - RNA, 19 nt, Artificial Sequence
  Description of Artificial Sequence: Synthetic oligonucleotide
ugcagccucuuucaagcgg

SEQ ID NO: 3257351 - RNA, 19 nt, Artificial Sequence
  Description of Artificial Sequence: Synthetic oligonucleotide
acgacuuugaugauaaggu

SEQ ID NO: 3257352 - RNA, 19 nt, Artificial Sequence
  Description of Artificial Sequence: Synthetic oligonucleotide
uggaugagguacuugacua

SEQ ID NO: 3257353 - RNA, 19 nt, Artificial Sequence
  Description of Artificial Sequence: Synthetic oligonucleotide
ugagguagcaguucaccac

SEQ ID NO: 3257354 - RNA, 19 nt, Artificial Sequence
  Description of Artificial Sequence: Synthetic oligonucleotide
gacuagcagagccaagugc

SEQ ID NO: 3257355 - RNA, 19 nt, Artificial Sequence
  Description of Artificial Sequence: Synthetic oligonucleotide
uacgauggcugccucuggg

SEQ ID NO: 3257356 - RNA, 19 nt, Artificial Sequence
  Description of Artificial Sequence: Synthetic oligonucleotide
ucugccacuggccaaugcu

SEQ ID NO: 3257357 - RNA, 19 nt, Artificial Sequence
  Description of Artificial Sequence: Synthetic oligonucleotide
gacuagggcacacagggca

SEQ ID NO: 3257358 - RNA, 19 nt, Artificial Sequence
  Description of Artificial Sequence: Synthetic oligonucleotide
ucaugcagccucuuucaag

SEQ ID NO: 3257359 - RNA, 19 nt, Artificial Sequence
  Description of Artificial Sequence: Synthetic oligonucleotide
acacuggccaaugagguag

SEQ ID NO: 3257360 - RNA, 19 nt, Artificial Sequence
  Description of Artificial Sequence: Synthetic oligonucleotide
uugacuagcagagccaagu

SEQ ID NO: 3257361 - RNA, 19 nt, Artificial Sequence
  Description of Artificial Sequence: Synthetic oligonucleotide
uaguagaacuccucagccc

SEQ ID NO: 3257362 - RNA, 19 nt, Artificial Sequence
  Description of Artificial Sequence: Synthetic oligonucleotide
guacgaguugacaaacugg

SEQ ID NO: 3257363 - RNA, 19 nt, Artificial Sequence
  Description of Artificial Sequence: Synthetic oligonucleotide
aagacgacuuugaugauaa

SEQ ID NO: 3257364 - RNA, 19 nt, Artificial Sequence
  Description of Artificial Sequence: Synthetic oligonucleotide
ugagccaggggaagagccg

SEQ ID NO: 3257365 - RNA, 19 nt, Artificial Sequence
  Description of Artificial Sequence: Synthetic oligonucleotide
ugcacgaacaucuccuggu

SEQ ID NO: 3257366 - RNA, 19 nt, Artificial Sequence
  Description of Artificial Sequence: Synthetic oligonucleotide
uagccgguaauucuccaug

SEQ ID NO: 3257367 - RNA, 19 nt, Artificial Sequence
  Description of Artificial Sequence: Synthetic oligonucleotide
auggaugagguacuugacu

SEQ ID NO: 3257368 - RNA, 19 nt, Artificial Sequence
  Description of Artificial Sequence: Synthetic oligonucleotide
ugcagcuggaagcagccga

SEQ ID NO: 3257369 - RNA, 19 nt, Artificial Sequence
  Description of Artificial Sequence: Synthetic oligonucleotide
aacugcacgaacaucuccu

SEQ ID NO: 3257370 - RNA, 19 nt, Artificial Sequence
  Description of Artificial Sequence: Synthetic oligonucleotide
agcaguucaccacgauggc

SEQ ID NO: 3257371 - RNA, 19 nt, Artificial Sequence
  Description of Artificial Sequence: Synthetic oligonucleotide
uuggccaucuccucggcca

SEQ ID NO: 3257372 - RNA, 19 nt, Artificial Sequence
  Description of Artificial Sequence: Synthetic oligonucleotide
uguaggccggugcauagcu

SEQ ID NO: 3257373 - RNA, 19 nt, Artificial Sequence
  Description of Artificial Sequence: Synthetic oligonucleotide
caggcugacgagcagcugg

SEQ ID NO: 3257374 - RNA, 19 nt, Artificial Sequence
  Description of Artificial Sequence: Synthetic oligonucleotide
agguuguugacuagggcac

SEQ ID NO: 3257375 - RNA, 19 nt, Artificial Sequence
  Description of Artificial Sequence: Synthetic oligonucleotide
ugaccuucugccacuggcc

SEQ ID NO: 3257376 - RNA, 19 nt, Artificial Sequence
  Description of Artificial Sequence: Synthetic oligonucleotide
guagcaguucaccacgaug

SEQ ID NO: 3257377 - RNA, 19 nt, Artificial Sequence
  Description of Artificial Sequence: Synthetic oligonucleotide
gauacgauggcugccucug

SEQ ID NO: 3257378 - RNA, 19 nt, Artificial Sequence
  Description of Artificial Sequence: Synthetic oligonucleotide
cagguuguugacuagggca

SEQ ID NO: 3257379 - RNA, 19 nt, Artificial Sequence
  Description of Artificial Sequence: Synthetic oligonucleotide
uugaaggcaucacuucgga

SEQ ID NO: 3257380 - RNA, 19 nt, Artificial Sequence
  Description of Artificial Sequence: Synthetic oligonucleotide
guaggcgcucucuagccgg

SEQ ID NO: 3257381 - RNA, 19 nt, Artificial Sequence
  Description of Artificial Sequence: Synthetic oligonucleotide
acgauggcugccucugggc

SEQ ID NO: 3257382 - RNA, 19 nt, Artificial Sequence
  Description of Artificial Sequence: Synthetic oligonucleotide
ugacuagcagagccaagug

SEQ ID NO: 3257383 - RNA, 19 nt, Artificial Sequence
  Description of Artificial Sequence: Synthetic oligonucleotide
caagacaggccagacacag

SEQ ID NO: 3257384 - RNA, 19 nt, Artificial Sequence
  Description of Artificial Sequence: Synthetic oligonucleotide
uaggccggugcauagcuug

SEQ ID NO: 3257385 - RNA, 19 nt, Artificial Sequence
  Description of Artificial Sequence: Synthetic oligonucleotide
cugagccaggggaagagcc

SEQ ID NO: 3257386 - RNA, 19 nt, Artificial Sequence
  Description of Artificial Sequence: Synthetic oligonucleotide
augagguagcaguucacca

SEQ ID NO: 3257387 - RNA, 19 nt, Artificial Sequence
  Description of Artificial Sequence: Synthetic oligonucleotide
cagcuaacuucuuguagcc

SEQ ID NO: 3257388 - RNA, 19 nt, Artificial Sequence
  Description of Artificial Sequence: Synthetic oligonucleotide
uccacacgcuguccaaagg

SEQ ID NO: 3257389 - RNA, 19 nt, Artificial Sequence
  Description of Artificial Sequence: Synthetic oligonucleotide
caucaggacgaagacacag

SEQ ID NO: 3257390 - RNA, 19 nt, Artificial Sequence
  Description of Artificial Sequence: Synthetic oligonucleotide
ugucguugagccacacagc

SEQ ID NO: 3257391 - RNA, 19 nt, Artificial Sequence
  Description of Artificial Sequence: Synthetic oligonucleotide
uuugagguagaagccgaug

SEQ ID NO: 3257392 - RNA, 19 nt, Artificial Sequence
  Description of Artificial Sequence: Synthetic oligonucleotide
augauaaggugccucucgu

SEQ ID NO: 3257393 - RNA, 19 nt, Artificial Sequence
  Description of Artificial Sequence: Synthetic oligonucleotide
ucucaaucagguuguugac

SEQ ID NO: 3257394 - RNA, 19 nt, Artificial Sequence
  Description of Artificial Sequence: Synthetic oligonucleotide
cacgcuguccaaagggccg

SEQ ID NO: 3257395 - RNA, 19 nt, Artificial Sequence
  Description of Artificial Sequence: Synthetic oligonucleotide
gccgauguagaacagacuc

SEQ ID NO: 3257396 - RNA, 19 nt, Artificial Sequence
  Description of Artificial Sequence: Synthetic oligonucleotide
ugagccacacagcuaacuu

SEQ ID NO: 3257397 - RNA, 19 nt, Artificial Sequence
  Description of Artificial Sequence: Synthetic oligonucleotide
guugacaaacuggaacaag

SEQ ID NO: 3257398 - RNA, 19 nt, Artificial Sequence
  Description of Artificial Sequence: Synthetic oligonucleotide
ucucguaggcgcucucuag

SEQ ID NO: 3257399 - RNA, 19 nt, Artificial Sequence
  Description of Artificial Sequence: Synthetic oligonucleotide
cacacgcuguccaaagggc

SEQ ID NO: 3257400 - RNA, 19 nt, Artificial Sequence
  Description of Artificial Sequence: Synthetic oligonucleotide
gccuccaugaccuucugcc

SEQ ID NO: 3257401 - RNA, 19 nt, Artificial Sequence
  Description of Artificial Sequence: Synthetic oligonucleotide
uucuuguagcccucugcgc

SEQ ID NO: 3257402 - RNA, 19 nt, Artificial Sequence
  Description of Artificial Sequence: Synthetic oligonucleotide
agcagggccagcaugaccu

SEQ ID NO: 3257403 - RNA, 19 nt, Artificial Sequence
  Description of Artificial Sequence: Synthetic oligonucleotide
agcuaacuucuuguagccc

SEQ ID NO: 3257404 - RNA, 19 nt, Artificial Sequence
  Description of Artificial Sequence: Synthetic oligonucleotide
ugcagcuggccacacuggc

SEQ ID NO: 3257405 - RNA, 19 nt, Artificial Sequence
  Description of Artificial Sequence: Synthetic oligonucleotide
auauaauugaauuucauac

SEQ ID NO: 3257406 - RNA, 19 nt, Artificial Sequence
  Description of Artificial Sequence: Synthetic oligonucleotide
aaauuuucaauguacaauc

SEQ ID NO: 3257407 - RNA, 19 nt, Artificial Sequence
  Description of Artificial Sequence: Synthetic oligonucleotide
uuuaacaacauucuaacag

SEQ ID NO: 3257408 - RNA, 19 nt, Artificial Sequence
  Description of Artificial Sequence: Synthetic oligonucleotide
uaaaguagggaaaauaugg

SEQ ID NO: 3257409 - RNA, 19 nt, Artificial Sequence
  Description of Artificial Sequence: Synthetic oligonucleotide
agaaauaauauacaguugg

SEQ ID NO: 3257410 - RNA, 19 nt, Artificial Sequence
  Description of Artificial Sequence: Synthetic oligonucleotide
aaauagagaaauaauauac

SEQ ID NO: 3257411 - RNA, 19 nt, Artificial Sequence
  Description of Artificial Sequence: Synthetic oligonucleotide
aauaugguaugacagaacu

SEQ ID NO: 3257412 - RNA, 19 nt, Artificial Sequence
  Description of Artificial Sequence: Synthetic oligonucleotide
cucaauauguuuuaagugg

SEQ ID NO: 3257413 - RNA, 19 nt, Artificial Sequence
  Description of Artificial Sequence: Synthetic oligonucleotide
auaauugaauuucauacuc

SEQ ID NO: 3257414 - RNA, 19 nt, Artificial Sequence
  Description of Artificial Sequence: Synthetic oligonucleotide
aauaauauacaguugguuu

SEQ ID NO: 3257415 - RNA, 19 nt, Artificial Sequence
  Description of Artificial Sequence: Synthetic oligonucleotide
ucuucuauugaacacuggg

SEQ ID NO: 3257416 - RNA, 19 nt, Artificial Sequence
  Description of Artificial Sequence: Synthetic oligonucleotide
auauuuuaagaacagaacu

SEQ ID NO: 3257417 - RNA, 19 nt, Artificial Sequence
  Description of Artificial Sequence: Synthetic oligonucleotide
ucuaaauguauuuccauag

SEQ ID NO: 3257418 - RNA, 19 nt, Artificial Sequence
  Description of Artificial Sequence: Synthetic oligonucleotide
cacuuauugaaauaguugg

SEQ ID NO: 3257419 - RNA, 19 nt, Artificial Sequence
  Description of Artificial Sequence: Synthetic oligonucleotide
aacagugaaguuaugagcg

SEQ ID NO: 3257420 - RNA, 19 nt, Artificial Sequence
  Description of Artificial Sequence: Synthetic oligonucleotide
auagagaaauaauauacag

SEQ ID NO: 3257421 - RNA, 19 nt, Artificial Sequence
  Description of Artificial Sequence: Synthetic oligonucleotide
ugauauuuuaagaacagaa

SEQ ID NO: 3257422 - RNA, 19 nt, Artificial Sequence
  Description of Artificial Sequence: Synthetic oligonucleotide
agagaaauaauauacaguu

SEQ ID NO: 3257423 - RNA, 19 nt, Artificial Sequence
  Description of Artificial Sequence: Synthetic oligonucleotide
uuuucaauguacaaucuca

SEQ ID NO: 3257424 - RNA, 19 nt, Artificial Sequence
  Description of Artificial Sequence: Synthetic oligonucleotide
auagcauuuaacaacauuc

SEQ ID NO: 3257425 - RNA, 19 nt, Artificial Sequence
  Description of Artificial Sequence: Synthetic oligonucleotide
uaugacagaacucuagcag

SEQ ID NO: 3257426 - RNA, 19 nt, Artificial Sequence
  Description of Artificial Sequence: Synthetic oligonucleotide
aauagcguaaaguagggaa

SEQ ID NO: 3257427 - RNA, 19 nt, Artificial Sequence
  Description of Artificial Sequence: Synthetic oligonucleotide
uugguaucagcaaauagag

SEQ ID NO: 3257428 - RNA, 19 nt, Artificial Sequence
  Description of Artificial Sequence: Synthetic oligonucleotide
uugaauuucauacucaaua

SEQ ID NO: 3257429 - RNA, 19 nt, Artificial Sequence
  Description of Artificial Sequence: Synthetic oligonucleotide
auuuccauagcauuuaaca

SEQ ID NO: 3257430 - RNA, 19 nt, Artificial Sequence
  Description of Artificial Sequence: Synthetic oligonucleotide
aaugaucuucuauugaaca

SEQ ID NO: 3257431 - RNA, 19 nt, Artificial Sequence
  Description of Artificial Sequence: Synthetic oligonucleotide
uuaacaacauucuaacagc

SEQ ID NO: 3257432 - RNA, 19 nt, Artificial Sequence
  Description of Artificial Sequence: Synthetic oligonucleotide
aauuucauacucaauaugu

SEQ ID NO: 3257433 - RNA, 19 nt, Artificial Sequence
  Description of Artificial Sequence: Synthetic oligonucleotide
uuucucuaucacaauagcg

SEQ ID NO: 3257434 - RNA, 19 nt, Artificial Sequence
  Description of Artificial Sequence: Synthetic oligonucleotide
uucucuaucacaauagcgu

SEQ ID NO: 3257435 - RNA, 19 nt, Artificial Sequence
  Description of Artificial Sequence: Synthetic oligonucleotide
cacaauagcguaaaguagg

SEQ ID NO: 3257436 - RNA, 19 nt, Artificial Sequence
  Description of Artificial Sequence: Synthetic oligonucleotide
uauacaguugguuuucuag

SEQ ID NO: 3257437 - RNA, 19 nt, Artificial Sequence
  Description of Artificial Sequence: Synthetic oligonucleotide
aaaugcaggcucuaaaugu

SEQ ID NO: 3257438 - RNA, 19 nt, Artificial Sequence
  Description of Artificial Sequence: Synthetic oligonucleotide
ucaaugauauuuuaagaac

SEQ ID NO: 3257439 - RNA, 19 nt, Artificial Sequence
  Description of Artificial Sequence: Synthetic oligonucleotide
uaaauguauuuccauagca

SEQ ID NO: 3257440 - RNA, 19 nt, Artificial Sequence
  Description of Artificial Sequence: Synthetic oligonucleotide
uucuauugaacacugggca

SEQ ID NO: 3257441 - RNA, 19 nt, Artificial Sequence
  Description of Artificial Sequence: Synthetic oligonucleotide
auacaguugguuuucuagc

SEQ ID NO: 3257442 - RNA, 19 nt, Artificial Sequence
  Description of Artificial Sequence: Synthetic oligonucleotide
uccucaaugauauuuuaag

SEQ ID NO: 3257443 - RNA, 19 nt, Artificial Sequence
  Description of Artificial Sequence: Synthetic oligonucleotide
aacucuagcagauagcaaa

SEQ ID NO: 3257444 - RNA, 19 nt, Artificial Sequence
  Description of Artificial Sequence: Synthetic oligonucleotide
ucaauauguuuuaaguggc

SEQ ID NO: 3257445 - RNA, 19 nt, Artificial Sequence
  Description of Artificial Sequence: Synthetic oligonucleotide
aaaauuuucaauguacaau

SEQ ID NO: 3257446 - RNA, 19 nt, Artificial Sequence
  Description of Artificial Sequence: Synthetic oligonucleotide
uauaauugaauuucauacu

SEQ ID NO: 3257447 - RNA, 19 nt, Artificial Sequence
  Description of Artificial Sequence: Synthetic oligonucleotide
cauuuaacaacauucuaac

SEQ ID NO: 3257448 - RNA, 19 nt, Artificial Sequence
  Description of Artificial Sequence: Synthetic oligonucleotide
ucuaacagcuaaaagugga

SEQ ID NO: 3257449 - RNA, 19 nt, Artificial Sequence
  Description of Artificial Sequence: Synthetic oligonucleotide
aauugaauuucauacucaa

SEQ ID NO: 3257450 - RNA, 19 nt, Artificial Sequence
  Description of Artificial Sequence: Synthetic oligonucleotide
uguucuuaaaugcaggcuc

SEQ ID NO: 3257451 - RNA, 19 nt, Artificial Sequence
  Description of Artificial Sequence: Synthetic oligonucleotide
aaugauauuuuaagaacag

SEQ ID NO: 3257452 - RNA, 19 nt, Artificial Sequence
  Description of Artificial Sequence: Synthetic oligonucleotide
uaugguaugacagaacucu

SEQ ID NO: 3257453 - RNA, 19 nt, Artificial Sequence
  Description of Artificial Sequence: Synthetic oligonucleotide
ucuauauaauugaauuuca

SEQ ID NO: 3257454 - RNA, 19 nt, Artificial Sequence
  Description of Artificial Sequence: Synthetic oligonucleotide
aauaguugguaucagcaaa

SEQ ID NO: 3257455 - RNA, 19 nt, Artificial Sequence
  Description of Artificial Sequence: Synthetic oligonucleotide
ugaacacugggcaacagug

SEQ ID NO: 3257456 - RNA, 19 nt, Artificial Sequence
  Description of Artificial Sequence: Synthetic oligonucleotide
uacucaauauguuuuaagu

SEQ ID NO: 3257457 - RNA, 19 nt, Artificial Sequence
  Description of Artificial Sequence: Synthetic oligonucleotide
uauuuuaagaacagaacuu

SEQ ID NO: 3257458 - RNA, 19 nt, Artificial Sequence
  Description of Artificial Sequence: Synthetic oligonucleotide
uuuaagaacagaacuuuaa

SEQ ID NO: 3257459 - RNA, 19 nt, Artificial Sequence
  Description of Artificial Sequence: Synthetic oligonucleotide
auuuucaauguacaaucuc

SEQ ID NO: 3257460 - RNA, 19 nt, Artificial Sequence
  Description of Artificial Sequence: Synthetic oligonucleotide
aauguauuuccauagcauu

SEQ ID NO: 3257461 - RNA, 19 nt, Artificial Sequence
  Description of Artificial Sequence: Synthetic oligonucleotide
uaaaaguggagauuccuca

SEQ ID NO: 3257462 - RNA, 19 nt, Artificial Sequence
  Description of Artificial Sequence: Synthetic oligonucleotide
uucucuauauaauugaauu

SEQ ID NO: 3257463 - RNA, 19 nt, Artificial Sequence
  Description of Artificial Sequence: Synthetic oligonucleotide
uuuucuagcuccaacuacu

SEQ ID NO: 3257464 - RNA, 19 nt, Artificial Sequence
  Description of Artificial Sequence: Synthetic oligonucleotide
uauauaauugaauuucaua

SEQ ID NO: 3257465 - RNA, 19 nt, Artificial Sequence
  Description of Artificial Sequence: Synthetic oligonucleotide
uccauagcauuuaacaaca

SEQ ID NO: 3257466 - RNA, 19 nt, Artificial Sequence
  Description of Artificial Sequence: Synthetic oligonucleotide
uagagaaauaauauacagu

SEQ ID NO: 3257467 - RNA, 19 nt, Artificial Sequence
  Description of Artificial Sequence: Synthetic oligonucleotide
ucacaauagcguaaaguag

SEQ ID NO: 3257468 - RNA, 19 nt, Artificial Sequence
  Description of Artificial Sequence: Synthetic oligonucleotide
aauagagaaauaauauaca

SEQ ID NO: 3257469 - RNA, 19 nt, Artificial Sequence
  Description of Artificial Sequence: Synthetic oligonucleotide
acucaauauguuuuaagug

SEQ ID NO: 3257470 - RNA, 19 nt, Artificial Sequence
  Description of Artificial Sequence: Synthetic oligonucleotide
ucuagcagauagcaaauga

SEQ ID NO: 3257471 - RNA, 19 nt, Artificial Sequence
  Description of Artificial Sequence: Synthetic oligonucleotide
uaagaacagaacuuuaaaa

SEQ ID NO: 3257472 - RNA, 19 nt, Artificial Sequence
  Description of Artificial Sequence: Synthetic oligonucleotide
gauauuuuaagaacagaac

SEQ ID NO: 3257473 - RNA, 19 nt, Artificial Sequence
  Description of Artificial Sequence: Synthetic oligonucleotide
uuaagaacagaacuuuaaa

SEQ ID NO: 3257474 - RNA, 19 nt, Artificial Sequence
  Description of Artificial Sequence: Synthetic oligonucleotide
aaaugaucuucuauugaac

SEQ ID NO: 3257475 - RNA, 19 nt, Artificial Sequence
  Description of Artificial Sequence: Synthetic oligonucleotide
augaucuucuauugaacac

SEQ ID NO: 3257476 - RNA, 19 nt, Artificial Sequence
  Description of Artificial Sequence: Synthetic oligonucleotide
uaaaugcaggcucuaaaug

SEQ ID NO: 3257477 - RNA, 19 nt, Artificial Sequence
  Description of Artificial Sequence: Synthetic oligonucleotide
uauguuuuaaguggcaucu

SEQ ID NO: 3257478 - RNA, 19 nt, Artificial Sequence
  Description of Artificial Sequence: Synthetic oligonucleotide
aucacaauagcguaaagua

SEQ ID NO: 3257479 - RNA, 19 nt, Artificial Sequence
  Description of Artificial Sequence: Synthetic oligonucleotide
uuccauagcauuuaacaac

SEQ ID NO: 3257480 - RNA, 19 nt, Artificial Sequence
  Description of Artificial Sequence: Synthetic oligonucleotide
auucuaacagcuaaaagug

SEQ ID NO: 3257481 - RNA, 19 nt, Artificial Sequence
  Description of Artificial Sequence: Synthetic oligonucleotide
aggcucuaaauguauuucc

SEQ ID NO: 3257482 - RNA, 19 nt, Artificial Sequence
  Description of Artificial Sequence: Synthetic oligonucleotide
auauguuuuaaguggcauc

SEQ ID NO: 3257483 - RNA, 19 nt, Artificial Sequence
  Description of Artificial Sequence: Synthetic oligonucleotide
uucuguucuuaaaugcagg

SEQ ID NO: 3257484 - RNA, 19 nt, Artificial Sequence
  Description of Artificial Sequence: Synthetic oligonucleotide
acagaacucuagcagauag

SEQ ID NO: 3257485 - RNA, 19 nt, Artificial Sequence
  Description of Artificial Sequence: Synthetic oligonucleotide
uuuuaaguggcaucugucu

SEQ ID NO: 3257486 - RNA, 19 nt, Artificial Sequence
  Description of Artificial Sequence: Synthetic oligonucleotide
ucagcaaauagagaaauaa

SEQ ID NO: 3257487 - RNA, 19 nt, Artificial Sequence
  Description of Artificial Sequence: Synthetic oligonucleotide
uuuucucuaucacaauagc

SEQ ID NO: 3257488 - RNA, 19 nt, Artificial Sequence
  Description of Artificial Sequence: Synthetic oligonucleotide
aaaauaugguaugacagaa

SEQ ID NO: 3257489 - RNA, 19 nt, Artificial Sequence
  Description of Artificial Sequence: Synthetic oligonucleotide
uguucuguucuuaaaugca

SEQ ID NO: 3257490 - RNA, 19 nt, Artificial Sequence
  Description of Artificial Sequence: Synthetic oligonucleotide
gaauuucauacucaauaug

SEQ ID NO: 3257491 - RNA, 19 nt, Artificial Sequence
  Description of Artificial Sequence: Synthetic oligonucleotide
gaaaauaugguaugacaga

SEQ ID NO: 3257492 - RNA, 19 nt, Artificial Sequence
  Description of Artificial Sequence: Synthetic oligonucleotide
ugaaauaguugguaucagc

SEQ ID NO: 3257493 - RNA, 19 nt, Artificial Sequence
  Description of Artificial Sequence: Synthetic oligonucleotide
uucuaacagcuaaaagugg

SEQ ID NO: 3257494 - RNA, 19 nt, Artificial Sequence
  Description of Artificial Sequence: Synthetic oligonucleotide
uaauugaauuucauacuca

SEQ ID NO: 3257495 - RNA, 19 nt, Artificial Sequence
  Description of Artificial Sequence: Synthetic oligonucleotide
uuaaguggcaucugucucc

SEQ ID NO: 3257496 - RNA, 19 nt, Artificial Sequence
  Description of Artificial Sequence: Synthetic oligonucleotide
cucuauauaauugaauuuc

SEQ ID NO: 3257497 - RNA, 19 nt, Artificial Sequence
  Description of Artificial Sequence: Synthetic oligonucleotide
cuucuauugaacacugggc

SEQ ID NO: 3257498 - RNA, 19 nt, Artificial Sequence
  Description of Artificial Sequence: Synthetic oligonucleotide
ugaauuucauacucaauau

SEQ ID NO: 3257499 - RNA, 19 nt, Artificial Sequence
  Description of Artificial Sequence: Synthetic oligonucleotide
aguggcaucugucuccuac

SEQ ID NO: 3257500 - RNA, 19 nt, Artificial Sequence
  Description of Artificial Sequence: Synthetic oligonucleotide
uuaaaugcaggcucuaaau

SEQ ID NO: 3257501 - RNA, 19 nt, Artificial Sequence
  Description of Artificial Sequence: Synthetic oligonucleotide
gaaauaguugguaucagca

SEQ ID NO: 3257502 - RNA, 19 nt, Artificial Sequence
  Description of Artificial Sequence: Synthetic oligonucleotide
acaacauucuaacagcuaa

SEQ ID NO: 3257503 - RNA, 19 nt, Artificial Sequence
  Description of Artificial Sequence: Synthetic oligonucleotide
gguaucagcaaauagagaa

SEQ ID NO: 3257504 - RNA, 19 nt, Artificial Sequence
  Description of Artificial Sequence: Synthetic oligonucleotide
aacagcuaaaaguggagau

SEQ ID NO: 3257505 - RNA, 19 nt, Artificial Sequence
  Description of Artificial Sequence: Synthetic oligonucleotide
aauuauuguaaccagcugc

SEQ ID NO: 3257506 - RNA, 19 nt, Artificial Sequence
  Description of Artificial Sequence: Synthetic oligonucleotide
ucuuaaaugaagcaggaag

SEQ ID NO: 3257507 - RNA, 19 nt, Artificial Sequence
  Description of Artificial Sequence: Synthetic oligonucleotide
uuuguuagaaucaauacac

SEQ ID NO: 3257508 - RNA, 19 nt, Artificial Sequence
  Description of Artificial Sequence: Synthetic oligonucleotide
aguaaauugccacaagucc

SEQ ID NO: 3257509 - RNA, 19 nt, Artificial Sequence
  Description of Artificial Sequence: Synthetic oligonucleotide
uuagagaacagucugagug

SEQ ID NO: 3257510 - RNA, 19 nt, Artificial Sequence
  Description of Artificial Sequence: Synthetic oligonucleotide
uuuauugugacaauucagc

SEQ ID NO: 3257511 - RNA, 19 nt, Artificial Sequence
  Description of Artificial Sequence: Synthetic oligonucleotide
aacaguuuauaguacaaag

SEQ ID NO: 3257512 - RNA, 19 nt, Artificial Sequence
  Description of Artificial Sequence: Synthetic oligonucleotide
uucacuucaaagaaaauca

SEQ ID NO: 3257513 - RNA, 19 nt, Artificial Sequence
  Description of Artificial Sequence: Synthetic oligonucleotide
uuucucuuaacucauagga

SEQ ID NO: 3257514 - RNA, 19 nt, Artificial Sequence
  Description of Artificial Sequence: Synthetic oligonucleotide
uugagagacaaauaaaugc

SEQ ID NO: 3257515 - RNA, 19 nt, Artificial Sequence
  Description of Artificial Sequence: Synthetic oligonucleotide
aguaggaucagcuccaugg

SEQ ID NO: 3257516 - RNA, 19 nt, Artificial Sequence
  Description of Artificial Sequence: Synthetic oligonucleotide
gaaugugccauuuucauug

SEQ ID NO: 3257517 - RNA, 19 nt, Artificial Sequence
  Description of Artificial Sequence: Synthetic oligonucleotide
aagaggaguaaauugccac

SEQ ID NO: 3257518 - RNA, 19 nt, Artificial Sequence
  Description of Artificial Sequence: Synthetic oligonucleotide
agggaaaguaauuucuucc

SEQ ID NO: 3257519 - RNA, 19 nt, Artificial Sequence
  Description of Artificial Sequence: Synthetic oligonucleotide
ucuaucaugaagcaucuga

SEQ ID NO: 3257520 - RNA, 19 nt, Artificial Sequence
  Description of Artificial Sequence: Synthetic oligonucleotide
ucggcuauaauauauaaaa

SEQ ID NO: 3257521 - RNA, 19 nt, Artificial Sequence
  Description of Artificial Sequence: Synthetic oligonucleotide
uuuacguuuaugcugcacc

SEQ ID NO: 3257522 - RNA, 19 nt, Artificial Sequence
  Description of Artificial Sequence: Synthetic oligonucleotide
augaauuuucacuucaaag

SEQ ID NO: 3257523 - RNA, 19 nt, Artificial Sequence
  Description of Artificial Sequence: Synthetic oligonucleotide
ucauaggacaauaaauuug

SEQ ID NO: 3257524 - RNA, 19 nt, Artificial Sequence
  Description of Artificial Sequence: Synthetic oligonucleotide
ucuaucaaggaucaguuaa

SEQ ID NO: 3257525 - RNA, 19 nt, Artificial Sequence
  Description of Artificial Sequence: Synthetic oligonucleotide
aguauuuaggacuuccguc

SEQ ID NO: 3257526 - RNA, 19 nt, Artificial Sequence
  Description of Artificial Sequence: Synthetic oligonucleotide
auagcaugaagguagagca

SEQ ID NO: 3257527 - RNA, 19 nt, Artificial Sequence
  Description of Artificial Sequence: Synthetic oligonucleotide
uuuuccuaaggucacucgg

SEQ ID NO: 3257528 - RNA, 19 nt, Artificial Sequence
  Description of Artificial Sequence: Synthetic oligonucleotide
acuugaacuaacuacugag

SEQ ID NO: 3257529 - RNA, 19 nt, Artificial Sequence
  Description of Artificial Sequence: Synthetic oligonucleotide
uuagcauauggaaauauaa

SEQ ID NO: 3257530 - RNA, 19 nt, Artificial Sequence
  Description of Artificial Sequence: Synthetic oligonucleotide
caacguuuuacguuuaugc

SEQ ID NO: 3257531 - RNA, 19 nt, Artificial Sequence
  Description of Artificial Sequence: Synthetic oligonucleotide
uaacauagcucauaacuag

SEQ ID NO: 3257532 - RNA, 19 nt, Artificial Sequence
  Description of Artificial Sequence: Synthetic oligonucleotide
aucaccucuaaguagaucu

SEQ ID NO: 3257533 - RNA, 19 nt, Artificial Sequence
  Description of Artificial Sequence: Synthetic oligonucleotide
agaugagcaacacauauga

SEQ ID NO: 3257534 - RNA, 19 nt, Artificial Sequence
  Description of Artificial Sequence: Synthetic oligonucleotide
uccucauuuacaaagacuu

SEQ ID NO: 3257535 - RNA, 19 nt, Artificial Sequence
  Description of Artificial Sequence: Synthetic oligonucleotide
cuugacaggaguaggaagc

SEQ ID NO: 3257536 - RNA, 19 nt, Artificial Sequence
  Description of Artificial Sequence: Synthetic oligonucleotide
uuaauguuccaagaaauga

SEQ ID NO: 3257537 - RNA, 19 nt, Artificial Sequence
  Description of Artificial Sequence: Synthetic oligonucleotide
uugaacuaacuacugagga

SEQ ID NO: 3257538 - RNA, 19 nt, Artificial Sequence
  Description of Artificial Sequence: Synthetic oligonucleotide
uagcgcauuaaucacagug

SEQ ID NO: 3257539 - RNA, 19 nt, Artificial Sequence
  Description of Artificial Sequence: Synthetic oligonucleotide
aaauauauuucucuuucua

SEQ ID NO: 3257540 - RNA, 19 nt, Artificial Sequence
  Description of Artificial Sequence: Synthetic oligonucleotide
uguagaaugucgaccuugg

SEQ ID NO: 3257541 - RNA, 19 nt, Artificial Sequence
  Description of Artificial Sequence: Synthetic oligonucleotide
auugaucccaaucucuuuc

SEQ ID NO: 3257542 - RNA, 19 nt, Artificial Sequence
  Description of Artificial Sequence: Synthetic oligonucleotide
aaaauauauuucucuuucu

SEQ ID NO: 3257543 - RNA, 19 nt, Artificial Sequence
  Description of Artificial Sequence: Synthetic oligonucleotide
agaaccagaguuugaggcc

SEQ ID NO: 3257544 - RNA, 19 nt, Artificial Sequence
  Description of Artificial Sequence: Synthetic oligonucleotide
acaguuuauaguacaaagc

SEQ ID NO: 3257545 - RNA, 19 nt, Artificial Sequence
  Description of Artificial Sequence: Synthetic oligonucleotide
acacacuucaacccuauuc

SEQ ID NO: 3257546 - RNA, 19 nt, Artificial Sequence
  Description of Artificial Sequence: Synthetic oligonucleotide
ugagguuuauagcaugaag

SEQ ID NO: 3257547 - RNA, 19 nt, Artificial Sequence
  Description of Artificial Sequence: Synthetic oligonucleotide
aaauuauuguaaccagcug

SEQ ID NO: 3257548 - RNA, 19 nt, Artificial Sequence
  Description of Artificial Sequence: Synthetic oligonucleotide
uuaaucacaguggaaaaca

SEQ ID NO: 3257549 - RNA, 19 nt, Artificial Sequence
  Description of Artificial Sequence: Synthetic oligonucleotide
augccuuucaucaaagccc

SEQ ID NO: 3257550 - RNA, 19 nt, Artificial Sequence
  Description of Artificial Sequence: Synthetic oligonucleotide
ugaguauuuaggacuuccg

SEQ ID NO: 3257551 - RNA, 19 nt, Artificial Sequence
  Description of Artificial Sequence: Synthetic oligonucleotide
cuugaacuaacuacugagg

SEQ ID NO: 3257552 - RNA, 19 nt, Artificial Sequence
  Description of Artificial Sequence: Synthetic oligonucleotide
uauagcaugaagguagagc

SEQ ID NO: 3257553 - RNA, 19 nt, Artificial Sequence
  Description of Artificial Sequence: Synthetic oligonucleotide
cugaggacugauuacauac

SEQ ID NO: 3257554 - RNA, 19 nt, Artificial Sequence
  Description of Artificial Sequence: Synthetic oligonucleotide
uauugggcuaguacaaaag

SEQ ID NO: 3257555 - RNA, 19 nt, Artificial Sequence
  Description of Artificial Sequence: Synthetic oligonucleotide
acacuaucagacucaaaac

SEQ ID NO: 3257556 - RNA, 19 nt, Artificial Sequence
  Description of Artificial Sequence: Synthetic oligonucleotide
uggcaguugacauucaaug

SEQ ID NO: 3257557 - RNA, 19 nt, Artificial Sequence
  Description of Artificial Sequence: Synthetic oligonucleotide
aggagaaugugccauuuuc

SEQ ID NO: 3257558 - RNA, 19 nt, Artificial Sequence
  Description of Artificial Sequence: Synthetic oligonucleotide
caugcuagcgcauuaauca

SEQ ID NO: 3257559 - RNA, 19 nt, Artificial Sequence
  Description of Artificial Sequence: Synthetic oligonucleotide
aaagcccuuauggauaauc

SEQ ID NO: 3257560 - RNA, 19 nt, Artificial Sequence
  Description of Artificial Sequence: Synthetic oligonucleotide
aaguagaucuuggauaucu

SEQ ID NO: 3257561 - RNA, 19 nt, Artificial Sequence
  Description of Artificial Sequence: Synthetic oligonucleotide
cauaggacaauaaauuuga

SEQ ID NO: 3257562 - RNA, 19 nt, Artificial Sequence
  Description of Artificial Sequence: Synthetic oligonucleotide
caaggaucaguuaauugag

SEQ ID NO: 3257563 - RNA, 19 nt, Artificial Sequence
  Description of Artificial Sequence: Synthetic oligonucleotide
uaaacucugauguccauaa

SEQ ID NO: 3257564 - RNA, 19 nt, Artificial Sequence
  Description of Artificial Sequence: Synthetic oligonucleotide
uuaugugagagaaaugcuu

SEQ ID NO: 3257565 - RNA, 19 nt, Artificial Sequence
  Description of Artificial Sequence: Synthetic oligonucleotide
cagagagcuguauaaaagc

SEQ ID NO: 3257566 - RNA, 19 nt, Artificial Sequence
  Description of Artificial Sequence: Synthetic oligonucleotide
uuuggaaacuuaucaagaa

SEQ ID NO: 3257567 - RNA, 19 nt, Artificial Sequence
  Description of Artificial Sequence: Synthetic oligonucleotide
cauucuacuucuaucauga

SEQ ID NO: 3257568 - RNA, 19 nt, Artificial Sequence
  Description of Artificial Sequence: Synthetic oligonucleotide
aagugagacguagggauac

SEQ ID NO: 3257569 - RNA, 19 nt, Artificial Sequence
  Description of Artificial Sequence: Synthetic oligonucleotide
auauaaguauuucaugcaa

SEQ ID NO: 3257570 - RNA, 19 nt, Artificial Sequence
  Description of Artificial Sequence: Synthetic oligonucleotide
uuucuaucaaggaucaguu

SEQ ID NO: 3257571 - RNA, 19 nt, Artificial Sequence
  Description of Artificial Sequence: Synthetic oligonucleotide
ugguauaaacguccaaaca

SEQ ID NO: 3257572 - RNA, 19 nt, Artificial Sequence
  Description of Artificial Sequence: Synthetic oligonucleotide
uuuccuaaggucacucggc

SEQ ID NO: 3257573 - RNA, 19 nt, Artificial Sequence
  Description of Artificial Sequence: Synthetic oligonucleotide
agcccuuauggauaaucgc

SEQ ID NO: 3257574 - RNA, 19 nt, Artificial Sequence
  Description of Artificial Sequence: Synthetic oligonucleotide
ucgagcaacuauauguaca

SEQ ID NO: 3257575 - RNA, 19 nt, Artificial Sequence
  Description of Artificial Sequence: Synthetic oligonucleotide
uuagaaguaugcaaauaua

SEQ ID NO: 3257576 - RNA, 19 nt, Artificial Sequence
  Description of Artificial Sequence: Synthetic oligonucleotide
uuuacucuguuguauccug

SEQ ID NO: 3257577 - RNA, 19 nt, Artificial Sequence
  Description of Artificial Sequence: Synthetic oligonucleotide
auugcagcuucauggagag

SEQ ID NO: 3257578 - RNA, 19 nt, Artificial Sequence
  Description of Artificial Sequence: Synthetic oligonucleotide
gaggaguauuaccaucucg

SEQ ID NO: 3257579 - RNA, 19 nt, Artificial Sequence
  Description of Artificial Sequence: Synthetic oligonucleotide
ugacacacgcauuguacgg

SEQ ID NO: 3257580 - RNA, 19 nt, Artificial Sequence
  Description of Artificial Sequence: Synthetic oligonucleotide
uuagcuugugucgaugucc

SEQ ID NO: 3257581 - RNA, 19 nt, Artificial Sequence
  Description of Artificial Sequence: Synthetic oligonucleotide
agaaucaauacacaacgua

SEQ ID NO: 3257582 - RNA, 19 nt, Artificial Sequence
  Description of Artificial Sequence: Synthetic oligonucleotide
agcggcuucauguaaaggu

SEQ ID NO: 3257583 - RNA, 19 nt, Artificial Sequence
  Description of Artificial Sequence: Synthetic oligonucleotide
aacaacccuucuuggcagc

SEQ ID NO: 3257584 - RNA, 19 nt, Artificial Sequence
  Description of Artificial Sequence: Synthetic oligonucleotide
ugacauucaaugguguaag

SEQ ID NO: 3257585 - RNA, 19 nt, Artificial Sequence
  Description of Artificial Sequence: Synthetic oligonucleotide
ucacucuggcuaaacaacc

SEQ ID NO: 3257586 - RNA, 19 nt, Artificial Sequence
  Description of Artificial Sequence: Synthetic oligonucleotide
uuggaucugccccauaacu

SEQ ID NO: 3257587 - RNA, 19 nt, Artificial Sequence
  Description of Artificial Sequence: Synthetic oligonucleotide
ucccaauuaacauugccau

SEQ ID NO: 3257588 - RNA, 19 nt, Artificial Sequence
  Description of Artificial Sequence: Synthetic oligonucleotide
uccauugcauuuacacagg

SEQ ID NO: 3257589 - RNA, 19 nt, Artificial Sequence
  Description of Artificial Sequence: Synthetic oligonucleotide
uuacauuaucaggagaaga

SEQ ID NO: 3257590 - RNA, 19 nt, Artificial Sequence
  Description of Artificial Sequence: Synthetic oligonucleotide
guauccugcugccaaaugc

SEQ ID NO: 3257591 - RNA, 19 nt, Artificial Sequence
  Description of Artificial Sequence: Synthetic oligonucleotide
accaugauuuuauaugaga

SEQ ID NO: 3257592 - RNA, 19 nt, Artificial Sequence
  Description of Artificial Sequence: Synthetic oligonucleotide
gaggagagaacacacuuca

SEQ ID NO: 3257593 - RNA, 19 nt, Artificial Sequence
  Description of Artificial Sequence: Synthetic oligonucleotide
guuauuaacagagagcugu

SEQ ID NO: 3257594 - RNA, 19 nt, Artificial Sequence
  Description of Artificial Sequence: Synthetic oligonucleotide
uaaauugccacaaguccau

SEQ ID NO: 3257595 - RNA, 19 nt, Artificial Sequence
  Description of Artificial Sequence: Synthetic oligonucleotide
acauucuacuucuaucaug

SEQ ID NO: 3257596 - RNA, 19 nt, Artificial Sequence
  Description of Artificial Sequence: Synthetic oligonucleotide
aagcccuuauggauaaucg

SEQ ID NO: 3257597 - RNA, 19 nt, Artificial Sequence
  Description of Artificial Sequence: Synthetic oligonucleotide
uguucucgcucaaauauau

SEQ ID NO: 3257598 - RNA, 19 nt, Artificial Sequence
  Description of Artificial Sequence: Synthetic oligonucleotide
uacuugaacuaacuacuga

SEQ ID NO: 3257599 - RNA, 19 nt, Artificial Sequence
  Description of Artificial Sequence: Synthetic oligonucleotide
auaagaacaggcauugugu

SEQ ID NO: 3257600 - RNA, 19 nt, Artificial Sequence
  Description of Artificial Sequence: Synthetic oligonucleotide
uuguuagaaucaauacaca

SEQ ID NO: 3257601 - RNA, 19 nt, Artificial Sequence
  Description of Artificial Sequence: Synthetic oligonucleotide
guugcaguaacaguuguac

SEQ ID NO: 3257602 - RNA, 19 nt, Artificial Sequence
  Description of Artificial Sequence: Synthetic oligonucleotide
uggaauugguuucagccau

SEQ ID NO: 3257603 - RNA, 19 nt, Artificial Sequence
  Description of Artificial Sequence: Synthetic oligonucleotide
aaauauugggcuaguacaa

SEQ ID NO: 3257604 - RNA, 19 nt, Artificial Sequence
  Description of Artificial Sequence: Synthetic oligonucleotide
aucucgagcauuugggucu

SEQ ID NO: 3257605 - RNA, 19 nt, Artificial Sequence
  Description of Artificial Sequence: Synthetic oligonucleotide
uggaugauuacuuagagcc

SEQ ID NO: 3257606 - RNA, 19 nt, Artificial Sequence
  Description of Artificial Sequence: Synthetic oligonucleotide
acaauaaaaccacaacugc

SEQ ID NO: 3257607 - RNA, 19 nt, Artificial Sequence
  Description of Artificial Sequence: Synthetic oligonucleotide
uuuccugccaauaacacag

SEQ ID NO: 3257608 - RNA, 19 nt, Artificial Sequence
  Description of Artificial Sequence: Synthetic oligonucleotide
aucaagugagcguauaacc

SEQ ID NO: 3257609 - RNA, 19 nt, Artificial Sequence
  Description of Artificial Sequence: Synthetic oligonucleotide
ugaguuagacacuacagcc

SEQ ID NO: 3257610 - RNA, 19 nt, Artificial Sequence
  Description of Artificial Sequence: Synthetic oligonucleotide
aaagugaccagguauuaug

SEQ ID NO: 3257611 - RNA, 19 nt, Artificial Sequence
  Description of Artificial Sequence: Synthetic oligonucleotide
aaagccgguggcuugggcc

SEQ ID NO: 3257612 - RNA, 19 nt, Artificial Sequence
  Description of Artificial Sequence: Synthetic oligonucleotide
guauuuauaugccugacac

SEQ ID NO: 3257613 - RNA, 19 nt, Artificial Sequence
  Description of Artificial Sequence: Synthetic oligonucleotide
auuacuuagagccuuggca

SEQ ID NO: 3257614 - RNA, 19 nt, Artificial Sequence
  Description of Artificial Sequence: Synthetic oligonucleotide
cacaauaaaaccacaacug

SEQ ID NO: 3257615 - RNA, 19 nt, Artificial Sequence
  Description of Artificial Sequence: Synthetic oligonucleotide
uccuccuuaccucagaugc

SEQ ID NO: 3257616 - RNA, 19 nt, Artificial Sequence
  Description of Artificial Sequence: Synthetic oligonucleotide
acacaauaaaaccacaacu

SEQ ID NO: 3257617 - RNA, 19 nt, Artificial Sequence
  Description of Artificial Sequence: Synthetic oligonucleotide
ucaagugagcguauaaccc

SEQ ID NO: 3257618 - RNA, 19 nt, Artificial Sequence
  Description of Artificial Sequence: Synthetic oligonucleotide
aauaacacagcaccagccu

SEQ ID NO: 3257619 - RNA, 19 nt, Artificial Sequence
  Description of Artificial Sequence: Synthetic oligonucleotide
aaccaggcaaagcacuagc

SEQ ID NO: 3257620 - RNA, 19 nt, Artificial Sequence
  Description of Artificial Sequence: Synthetic oligonucleotide
agcacuagcagcuuccuag

SEQ ID NO: 3257621 - RNA, 19 nt, Artificial Sequence
  Description of Artificial Sequence: Synthetic oligonucleotide
aguagcuggacuuauauuu

SEQ ID NO: 3257622 - RNA, 19 nt, Artificial Sequence
  Description of Artificial Sequence: Synthetic oligonucleotide
aggugcuacaccuaccagc

SEQ ID NO: 3257623 - RNA, 19 nt, Artificial Sequence
  Description of Artificial Sequence: Synthetic oligonucleotide
cugccaauaacacagcacc

SEQ ID NO: 3257624 - RNA, 19 nt, Artificial Sequence
  Description of Artificial Sequence: Synthetic oligonucleotide
uuggacacaauaaaaccac

SEQ ID NO: 3257625 - RNA, 19 nt, Artificial Sequence
  Description of Artificial Sequence: Synthetic oligonucleotide
auuaugagcgcacaguuau

SEQ ID NO: 3257626 - RNA, 19 nt, Artificial Sequence
  Description of Artificial Sequence: Synthetic oligonucleotide
ugaaggugggauaagccgc

SEQ ID NO: 3257627 - RNA, 19 nt, Artificial Sequence
  Description of Artificial Sequence: Synthetic oligonucleotide
uguauuuauaugccugaca

SEQ ID NO: 3257628 - RNA, 19 nt, Artificial Sequence
  Description of Artificial Sequence: Synthetic oligonucleotide
uauuuauauucucucucug

SEQ ID NO: 3257629 - RNA, 19 nt, Artificial Sequence
  Description of Artificial Sequence: Synthetic oligonucleotide
uauaacccacaacuucugg

SEQ ID NO: 3257630 - RNA, 19 nt, Artificial Sequence
  Description of Artificial Sequence: Synthetic oligonucleotide
gacacaauaaaaccacaac

SEQ ID NO: 3257631 - RNA, 19 nt, Artificial Sequence
  Description of Artificial Sequence: Synthetic oligonucleotide
uugaaggcugggaaaagcc

SEQ ID NO: 3257632 - RNA, 19 nt, Artificial Sequence
  Description of Artificial Sequence: Synthetic oligonucleotide
uucacccucuucaaggugc

SEQ ID NO: 3257633 - RNA, 19 nt, Artificial Sequence
  Description of Artificial Sequence: Synthetic oligonucleotide
cuuacccugaccuuucccc

SEQ ID NO: 3257634 - RNA, 19 nt, Artificial Sequence
  Description of Artificial Sequence: Synthetic oligonucleotide
cuagcagcuuccuaggagc

SEQ ID NO: 3257635 - RNA, 19 nt, Artificial Sequence
  Description of Artificial Sequence: Synthetic oligonucleotide
ugugcuaucaagugagcgu

SEQ ID NO: 3257636 - RNA, 19 nt, Artificial Sequence
  Description of Artificial Sequence: Synthetic oligonucleotide
cugaguuagacacuacagc

SEQ ID NO: 3257637 - RNA, 19 nt, Artificial Sequence
  Description of Artificial Sequence: Synthetic oligonucleotide
caauaacacagcaccagcc

SEQ ID NO: 3257638 - RNA, 19 nt, Artificial Sequence
  Description of Artificial Sequence: Synthetic oligonucleotide
uaacccacaacuucuggug

SEQ ID NO: 3257639 - RNA, 19 nt, Artificial Sequence
  Description of Artificial Sequence: Synthetic oligonucleotide
aagccgcuccucuagcccc

SEQ ID NO: 3257640 - RNA, 19 nt, Artificial Sequence
  Description of Artificial Sequence: Synthetic oligonucleotide
ugaugugcacaccuuaccu

SEQ ID NO: 3257641 - RNA, 19 nt, Artificial Sequence
  Description of Artificial Sequence: Synthetic oligonucleotide
uauauucucucucuguauu

SEQ ID NO: 3257642 - RNA, 19 nt, Artificial Sequence
  Description of Artificial Sequence: Synthetic oligonucleotide
agcgcacaguuauaugugc

SEQ ID NO: 3257643 - RNA, 19 nt, Artificial Sequence
  Description of Artificial Sequence: Synthetic oligonucleotide
gagcguauaacccacaacu

SEQ ID NO: 3257644 - RNA, 19 nt, Artificial Sequence
  Description of Artificial Sequence: Synthetic oligonucleotide
uuuaaagccgguggcuugg

SEQ ID NO: 3257645 - RNA, 19 nt, Artificial Sequence
  Description of Artificial Sequence: Synthetic oligonucleotide
uucaaggugcuacaccuac

SEQ ID NO: 3257646 - RNA, 19 nt, Artificial Sequence
  Description of Artificial Sequence: Synthetic oligonucleotide
aagugcccaguccaggguc

SEQ ID NO: 3257647 - RNA, 19 nt, Artificial Sequence
  Description of Artificial Sequence: Synthetic oligonucleotide
ugccugaacagaaccaggc

SEQ ID NO: 3257648 - RNA, 19 nt, Artificial Sequence
  Description of Artificial Sequence: Synthetic oligonucleotide
acuagcagcuuccuaggag

SEQ ID NO: 3257649 - RNA, 19 nt, Artificial Sequence
  Description of Artificial Sequence: Synthetic oligonucleotide
gaugugcacaccuuaccug

SEQ ID NO: 3257650 - RNA, 19 nt, Artificial Sequence
  Description of Artificial Sequence: Synthetic oligonucleotide
gucucuuccaucugccugg

SEQ ID NO: 3257651 - RNA, 19 nt, Artificial Sequence
  Description of Artificial Sequence: Synthetic oligonucleotide
uaccucagaugccugaaca

SEQ ID NO: 3257652 - RNA, 19 nt, Artificial Sequence
  Description of Artificial Sequence: Synthetic oligonucleotide
agcugacaggccuugcagc

SEQ ID NO: 3257653 - RNA, 19 nt, Artificial Sequence
  Description of Artificial Sequence: Synthetic oligonucleotide
gaugccugaacagaaccag

SEQ ID NO: 3257654 - RNA, 19 nt, Artificial Sequence
  Description of Artificial Sequence: Synthetic oligonucleotide
caaagcacuagcagcuucc

SEQ ID NO: 3257655 - RNA, 19 nt, Artificial Sequence
  Description of Artificial Sequence: Synthetic oligonucleotide
gauuacuuagagccuuggc

SEQ ID NO: 3257656 - RNA, 19 nt, Artificial Sequence
  Description of Artificial Sequence: Synthetic oligonucleotide
auaacccacaacuucuggu

SEQ ID NO: 3257657 - RNA, 19 nt, Artificial Sequence
  Description of Artificial Sequence: Synthetic oligonucleotide
auuaauguguuggacacaa

SEQ ID NO: 3257658 - RNA, 19 nt, Artificial Sequence
  Description of Artificial Sequence: Synthetic oligonucleotide
auaugugcugguuuagggu

SEQ ID NO: 3257659 - RNA, 19 nt, Artificial Sequence
  Description of Artificial Sequence: Synthetic oligonucleotide
aguuauaugugcugguuua

SEQ ID NO: 3257660 - RNA, 19 nt, Artificial Sequence
  Description of Artificial Sequence: Synthetic oligonucleotide
ucugaugugcacaccuuac

SEQ ID NO: 3257661 - RNA, 19 nt, Artificial Sequence
  Description of Artificial Sequence: Synthetic oligonucleotide
caaagugcccaguccaggg

SEQ ID NO: 3257662 - RNA, 19 nt, Artificial Sequence
  Description of Artificial Sequence: Synthetic oligonucleotide
uaugccugacaccuuggug

SEQ ID NO: 3257663 - RNA, 19 nt, Artificial Sequence
  Description of Artificial Sequence: Synthetic oligonucleotide
accacaacugcuguuauca

SEQ ID NO: 3257664 - RNA, 19 nt, Artificial Sequence
  Description of Artificial Sequence: Synthetic oligonucleotide
cugguuuaggguuggcucc

SEQ ID NO: 3257665 - RNA, 19 nt, Artificial Sequence
  Description of Artificial Sequence: Synthetic oligonucleotide
agggauuccaacucucuca

SEQ ID NO: 3257666 - RNA, 19 nt, Artificial Sequence
  Description of Artificial Sequence: Synthetic oligonucleotide
cuguuugacuuucucuucc

SEQ ID NO: 3257667 - RNA, 19 nt, Artificial Sequence
  Description of Artificial Sequence: Synthetic oligonucleotide
ugaccuuuccccuggcuug

SEQ ID NO: 3257668 - RNA, 19 nt, Artificial Sequence
  Description of Artificial Sequence: Synthetic oligonucleotide
ugcacucugugcucagugg

SEQ ID NO: 3257669 - RNA, 19 nt, Artificial Sequence
  Description of Artificial Sequence: Synthetic oligonucleotide
aggguuggcuccucguccc

SEQ ID NO: 3257670 - RNA, 19 nt, Artificial Sequence
  Description of Artificial Sequence: Synthetic oligonucleotide
ucuggugcccgccuugagc

SEQ ID NO: 3257671 - RNA, 19 nt, Artificial Sequence
  Description of Artificial Sequence: Synthetic oligonucleotide
cuaucagggauuccaacuc

SEQ ID NO: 3257672 - RNA, 19 nt, Artificial Sequence
  Description of Artificial Sequence: Synthetic oligonucleotide
gagucaggacaucuacagg

SEQ ID NO: 3257673 - RNA, 19 nt, Artificial Sequence
  Description of Artificial Sequence: Synthetic oligonucleotide
uacaggcucaggcucgaag

SEQ ID NO: 3257674 - RNA, 19 nt, Artificial Sequence
  Description of Artificial Sequence: Synthetic oligonucleotide
uuccuaggagcugacaggc

SEQ ID NO: 3257675 - RNA, 19 nt, Artificial Sequence
  Description of Artificial Sequence: Synthetic oligonucleotide
ugggcaaggagagucagga

SEQ ID NO: 3257676 - RNA, 19 nt, Artificial Sequence
  Description of Artificial Sequence: Synthetic oligonucleotide
ucugccuggggcaggaaac

SEQ ID NO: 3257677 - RNA, 19 nt, Artificial Sequence
  Description of Artificial Sequence: Synthetic oligonucleotide
acuacagccaggccaccuc

SEQ ID NO: 3257678 - RNA, 19 nt, Artificial Sequence
  Description of Artificial Sequence: Synthetic oligonucleotide
ugauuacuuagagccuugg

SEQ ID NO: 3257679 - RNA, 19 nt, Artificial Sequence
  Description of Artificial Sequence: Synthetic oligonucleotide
ugggauaagccgcuccucu

SEQ ID NO: 3257680 - RNA, 19 nt, Artificial Sequence
  Description of Artificial Sequence: Synthetic oligonucleotide
auugguugagguagagugg

SEQ ID NO: 3257681 - RNA, 19 nt, Artificial Sequence
  Description of Artificial Sequence: Synthetic oligonucleotide
accugaguuagacacuaca

SEQ ID NO: 3257682 - RNA, 19 nt, Artificial Sequence
  Description of Artificial Sequence: Synthetic oligonucleotide
aaagugcccaguccagggu

SEQ ID NO: 3257683 - RNA, 19 nt, Artificial Sequence
  Description of Artificial Sequence: Synthetic oligonucleotide
ugagcguauaacccacaac

SEQ ID NO: 3257684 - RNA, 19 nt, Artificial Sequence
  Description of Artificial Sequence: Synthetic oligonucleotide
accuaccagcccuggaggc

SEQ ID NO: 3257685 - RNA, 19 nt, Artificial Sequence
  Description of Artificial Sequence: Synthetic oligonucleotide
agguauuaugagcgcacag

SEQ ID NO: 3257686 - RNA, 19 nt, Artificial Sequence
  Description of Artificial Sequence: Synthetic oligonucleotide
uggucuaguagcuggacuu

SEQ ID NO: 3257687 - RNA, 19 nt, Artificial Sequence
  Description of Artificial Sequence: Synthetic oligonucleotide
ucucucaauuuccugccaa

SEQ ID NO: 3257688 - RNA, 19 nt, Artificial Sequence
  Description of Artificial Sequence: Synthetic oligonucleotide
uuggucuaguagcuggacu

SEQ ID NO: 3257689 - RNA, 19 nt, Artificial Sequence
  Description of Artificial Sequence: Synthetic oligonucleotide
aaggugcuacaccuaccag

SEQ ID NO: 3257690 - RNA, 19 nt, Artificial Sequence
  Description of Artificial Sequence: Synthetic oligonucleotide
aagugaccagguauuauga

SEQ ID NO: 3257691 - RNA, 19 nt, Artificial Sequence
  Description of Artificial Sequence: Synthetic oligonucleotide
ucaaggugcuacaccuacc

SEQ ID NO: 3257692 - RNA, 19 nt, Artificial Sequence
  Description of Artificial Sequence: Synthetic oligonucleotide
acaacugcuguuaucaaaa

SEQ ID NO: 3257693 - RNA, 19 nt, Artificial Sequence
  Description of Artificial Sequence: Synthetic oligonucleotide
gauaagccgcuccucuagc

SEQ ID NO: 3257694 - RNA, 19 nt, Artificial Sequence
  Description of Artificial Sequence: Synthetic oligonucleotide
ucagggauuccaacucucu

SEQ ID NO: 3257695 - RNA, 19 nt, Artificial Sequence
  Description of Artificial Sequence: Synthetic oligonucleotide
ugccaauaacacagcacca

SEQ ID NO: 3257696 - RNA, 19 nt, Artificial Sequence
  Description of Artificial Sequence: Synthetic oligonucleotide
aaaagugaccagguauuau

SEQ ID NO: 3257697 - RNA, 19 nt, Artificial Sequence
  Description of Artificial Sequence: Synthetic oligonucleotide
cugaugugcacaccuuacc

SEQ ID NO: 3257698 - RNA, 19 nt, Artificial Sequence
  Description of Artificial Sequence: Synthetic oligonucleotide
uuaggguuggcuccucguc

SEQ ID NO: 3257699 - RNA, 19 nt, Artificial Sequence
  Description of Artificial Sequence: Synthetic oligonucleotide
caagugagcguauaaccca

SEQ ID NO: 3257700 - RNA, 19 nt, Artificial Sequence
  Description of Artificial Sequence: Synthetic oligonucleotide
auuccaacucucucaauuu

SEQ ID NO: 3257701 - RNA, 19 nt, Artificial Sequence
  Description of Artificial Sequence: Synthetic oligonucleotide
cugggaguggcauuuucug

SEQ ID NO: 3257702 - RNA, 19 nt, Artificial Sequence
  Description of Artificial Sequence: Synthetic oligonucleotide
gcuugugcuaucaagugag

SEQ ID NO: 3257703 - RNA, 19 nt, Artificial Sequence
  Description of Artificial Sequence: Synthetic oligonucleotide
aaggggcuggugcccaggg

SEQ ID NO: 3257704 - RNA, 19 nt, Artificial Sequence
  Description of Artificial Sequence: Synthetic oligonucleotide
uucugaugugcacaccuua

SEQ ID NO: 3257705 - RNA, 19 nt, Artificial Sequence
  Description of Artificial Sequence: Synthetic oligonucleotide
uuuguuaaaauccagacag

SEQ ID NO: 3257706 - RNA, 19 nt, Artificial Sequence
  Description of Artificial Sequence: Synthetic oligonucleotide
uuucauaguaauuaaagag

SEQ ID NO: 3257707 - RNA, 19 nt, Artificial Sequence
  Description of Artificial Sequence: Synthetic oligonucleotide
ucauaguaauuaaagagcg

SEQ ID NO: 3257708 - RNA, 19 nt, Artificial Sequence
  Description of Artificial Sequence: Synthetic oligonucleotide
uuaaaauccagacagcggc

SEQ ID NO: 3257709 - RNA, 19 nt, Artificial Sequence
  Description of Artificial Sequence: Synthetic oligonucleotide
uucauaguaauuaaagagc

SEQ ID NO: 3257710 - RNA, 19 nt, Artificial Sequence
  Description of Artificial Sequence: Synthetic oligonucleotide
aacuuuuaaaugcccagcg

SEQ ID NO: 3257711 - RNA, 19 nt, Artificial Sequence
  Description of Artificial Sequence: Synthetic oligonucleotide
auuaaaucccgccugugcc

SEQ ID NO: 3257712 - RNA, 19 nt, Artificial Sequence
  Description of Artificial Sequence: Synthetic oligonucleotide
aauucgugagguuuccacc

SEQ ID NO: 3257713 - RNA, 19 nt, Artificial Sequence
  Description of Artificial Sequence: Synthetic oligonucleotide
auauuuuacaaucucagga

SEQ ID NO: 3257714 - RNA, 19 nt, Artificial Sequence
  Description of Artificial Sequence: Synthetic oligonucleotide
uauuuuacaaucucaggag

SEQ ID NO: 3257715 - RNA, 19 nt, Artificial Sequence
  Description of Artificial Sequence: Synthetic oligonucleotide
uaauuaaagagcgugaaug

SEQ ID NO: 3257716 - RNA, 19 nt, Artificial Sequence
  Description of Artificial Sequence: Synthetic oligonucleotide
aaauucgugagguuuccac

SEQ ID NO: 3257717 - RNA, 19 nt, Artificial Sequence
  Description of Artificial Sequence: Synthetic oligonucleotide
gauuucauaguaauuaaag

SEQ ID NO: 3257718 - RNA, 19 nt, Artificial Sequence
  Description of Artificial Sequence: Synthetic oligonucleotide
uccaucaacuuuuaaaugc

SEQ ID NO: 3257719 - RNA, 19 nt, Artificial Sequence
  Description of Artificial Sequence: Synthetic oligonucleotide
uguuaaaauccagacagcg

SEQ ID NO: 3257720 - RNA, 19 nt, Artificial Sequence
  Description of Artificial Sequence: Synthetic oligonucleotide
gauauuuuacaaucucagg

SEQ ID NO: 3257721 - RNA, 19 nt, Artificial Sequence
  Description of Artificial Sequence: Synthetic oligonucleotide
aauuaaagagcgugaaugu

SEQ ID NO: 3257722 - RNA, 19 nt, Artificial Sequence
  Description of Artificial Sequence: Synthetic oligonucleotide
ggaacauugacauucgugg

SEQ ID NO: 3257723 - RNA, 19 nt, Artificial Sequence
  Description of Artificial Sequence: Synthetic oligonucleotide
aacauugacauucgugguc

SEQ ID NO: 3257724 - RNA, 19 nt, Artificial Sequence
  Description of Artificial Sequence: Synthetic oligonucleotide
aaucucaggaguucuugac

SEQ ID NO: 3257725 - RNA, 19 nt, Artificial Sequence
  Description of Artificial Sequence: Synthetic oligonucleotide
cuuuuaaaugcccagcggc

SEQ ID NO: 3257726 - RNA, 19 nt, Artificial Sequence
  Description of Artificial Sequence: Synthetic oligonucleotide
uuuccaucaacuuuuaaau

SEQ ID NO: 3257727 - RNA, 19 nt, Artificial Sequence
  Description of Artificial Sequence: Synthetic oligonucleotide
uuaaagagcgugaaugugu

SEQ ID NO: 3257728 - RNA, 19 nt, Artificial Sequence
  Description of Artificial Sequence: Synthetic oligonucleotide
ucuuggauauuuuacaauc

SEQ ID NO: 3257729 - RNA, 19 nt, Artificial Sequence
  Description of Artificial Sequence: Synthetic oligonucleotide
aguccaguugauuucauag

SEQ ID NO: 3257730 - RNA, 19 nt, Artificial Sequence
  Description of Artificial Sequence: Synthetic oligonucleotide
aagagcgugaauguguacg

SEQ ID NO: 3257731 - RNA, 19 nt, Artificial Sequence
  Description of Artificial Sequence: Synthetic oligonucleotide
auaguaauuaaagagcgug

SEQ ID NO: 3257732 - RNA, 19 nt, Artificial Sequence
  Description of Artificial Sequence: Synthetic oligonucleotide
gaguucuugacccuggaag

SEQ ID NO: 3257733 - RNA, 19 nt, Artificial Sequence
  Description of Artificial Sequence: Synthetic oligonucleotide
ucauuuguuaaaauccaga

SEQ ID NO: 3257734 - RNA, 19 nt, Artificial Sequence
  Description of Artificial Sequence: Synthetic oligonucleotide
uuuuaaaugcccagcggcc

SEQ ID NO: 3257735 - RNA, 19 nt, Artificial Sequence
  Description of Artificial Sequence: Synthetic oligonucleotide
auuucauaguaauuaaaga

SEQ ID NO: 3257736 - RNA, 19 nt, Artificial Sequence
  Description of Artificial Sequence: Synthetic oligonucleotide
cauuuguuaaaauccagac

SEQ ID NO: 3257737 - RNA, 19 nt, Artificial Sequence
  Description of Artificial Sequence: Synthetic oligonucleotide
ucaacuuuuaaaugcccag

SEQ ID NO: 3257738 - RNA, 19 nt, Artificial Sequence
  Description of Artificial Sequence: Synthetic oligonucleotide
aguucuugacccuggaagg

SEQ ID NO: 3257739 - RNA, 19 nt, Artificial Sequence
  Description of Artificial Sequence: Synthetic oligonucleotide
uggauauuuuacaaucuca

SEQ ID NO: 3257740 - RNA, 19 nt, Artificial Sequence
  Description of Artificial Sequence: Synthetic oligonucleotide
uucaggucaucccaaaaca

SEQ ID NO: 3257741 - RNA, 19 nt, Artificial Sequence
  Description of Artificial Sequence: Synthetic oligonucleotide
ucccaaaacaccucccucg

SEQ ID NO: 3257742 - RNA, 19 nt, Artificial Sequence
  Description of Artificial Sequence: Synthetic oligonucleotide
gauggugcaguucagguca

SEQ ID NO: 3257743 - RNA, 19 nt, Artificial Sequence
  Description of Artificial Sequence: Synthetic oligonucleotide
aucucaggaguucuugacc

SEQ ID NO: 3257744 - RNA, 19 nt, Artificial Sequence
  Description of Artificial Sequence: Synthetic oligonucleotide
auuuguuaaaauccagaca

SEQ ID NO: 3257745 - RNA, 19 nt, Artificial Sequence
  Description of Artificial Sequence: Synthetic oligonucleotide
uggaacauugacauucgug

SEQ ID NO: 3257746 - RNA, 19 nt, Artificial Sequence
  Description of Artificial Sequence: Synthetic oligonucleotide
ucucaggaguucuugaccc

SEQ ID NO: 3257747 - RNA, 19 nt, Artificial Sequence
  Description of Artificial Sequence: Synthetic oligonucleotide
agcgugaauguguacgagc

SEQ ID NO: 3257748 - RNA, 19 nt, Artificial Sequence
  Description of Artificial Sequence: Synthetic oligonucleotide
caaaacaccucccucgccg

SEQ ID NO: 3257749 - RNA, 19 nt, Artificial Sequence
  Description of Artificial Sequence: Synthetic oligonucleotide
guuuccaccauuaaauccc

SEQ ID NO: 3257750 - RNA, 19 nt, Artificial Sequence
  Description of Artificial Sequence: Synthetic oligonucleotide
aaaauccagacagcggcac

SEQ ID NO: 3257751 - RNA, 19 nt, Artificial Sequence
  Description of Artificial Sequence: Synthetic oligonucleotide
acuuuuaaaugcccagcgg

SEQ ID NO: 3257752 - RNA, 19 nt, Artificial Sequence
  Description of Artificial Sequence: Synthetic oligonucleotide
aagaaauucgugagguuuc

SEQ ID NO: 3257753 - RNA, 19 nt, Artificial Sequence
  Description of Artificial Sequence: Synthetic oligonucleotide
uaguaauuaaagagcguga

SEQ ID NO: 3257754 - RNA, 19 nt, Artificial Sequence
  Description of Artificial Sequence: Synthetic oligonucleotide
uuggauauuuuacaaucuc

SEQ ID NO: 3257755 - RNA, 19 nt, Artificial Sequence
  Description of Artificial Sequence: Synthetic oligonucleotide
auuuuacaaucucaggagu

SEQ ID NO: 3257756 - RNA, 19 nt, Artificial Sequence
  Description of Artificial Sequence: Synthetic oligonucleotide
gucaauuuccuuuccauca

SEQ ID NO: 3257757 - RNA, 19 nt, Artificial Sequence
  Description of Artificial Sequence: Synthetic oligonucleotide
uccaccauuaaaucccgcc

SEQ ID NO: 3257758 - RNA, 19 nt, Artificial Sequence
  Description of Artificial Sequence: Synthetic oligonucleotide
uuuccaccauuaaaucccg

SEQ ID NO: 3257759 - RNA, 19 nt, Artificial Sequence
  Description of Artificial Sequence: Synthetic oligonucleotide
ugcaguucaggucauccca

SEQ ID NO: 3257760 - RNA, 19 nt, Artificial Sequence
  Description of Artificial Sequence: Synthetic oligonucleotide
guuaaaauccagacagcgg

SEQ ID NO: 3257761 - RNA, 19 nt, Artificial Sequence
  Description of Artificial Sequence: Synthetic oligonucleotide
guugauuucauaguaauua

SEQ ID NO: 3257762 - RNA, 19 nt, Artificial Sequence
  Description of Artificial Sequence: Synthetic oligonucleotide
ugauuucauaguaauuaaa

SEQ ID NO: 3257763 - RNA, 19 nt, Artificial Sequence
  Description of Artificial Sequence: Synthetic oligonucleotide
uugauuucauaguaauuaa

SEQ ID NO: 3257764 - RNA, 19 nt, Artificial Sequence
  Description of Artificial Sequence: Synthetic oligonucleotide
ugagguuuccaccauuaaa

SEQ ID NO: 3257765 - RNA, 19 nt, Artificial Sequence
  Description of Artificial Sequence: Synthetic oligonucleotide
ugccaucacaccuccaagg

SEQ ID NO: 3257766 - RNA, 19 nt, Artificial Sequence
  Description of Artificial Sequence: Synthetic oligonucleotide
uccaguugauuucauagua

SEQ ID NO: 3257767 - RNA, 19 nt, Artificial Sequence
  Description of Artificial Sequence: Synthetic oligonucleotide
uuuccuuuccaucaacuuu

SEQ ID NO: 3257768 - RNA, 19 nt, Artificial Sequence
  Description of Artificial Sequence: Synthetic oligonucleotide
aaagagcgugaauguguac

SEQ ID NO: 3257769 - RNA, 19 nt, Artificial Sequence
  Description of Artificial Sequence: Synthetic oligonucleotide
cuuuccaucaacuuuuaaa

SEQ ID NO: 3257770 - RNA, 19 nt, Artificial Sequence
  Description of Artificial Sequence: Synthetic oligonucleotide
uuuuacaaucucaggaguu

SEQ ID NO: 3257771 - RNA, 19 nt, Artificial Sequence
  Description of Artificial Sequence: Synthetic oligonucleotide
cauuaaaucccgccugugc

SEQ ID NO: 3257772 - RNA, 19 nt, Artificial Sequence
  Description of Artificial Sequence: Synthetic oligonucleotide
uuccuuuccaucaacuuuu

SEQ ID NO: 3257773 - RNA, 19 nt, Artificial Sequence
  Description of Artificial Sequence: Synthetic oligonucleotide
cucauuuguuaaaauccag

SEQ ID NO: 3257774 - RNA, 19 nt, Artificial Sequence
  Description of Artificial Sequence: Synthetic oligonucleotide
ggauauuuuacaaucucag

SEQ ID NO: 3257775 - RNA, 19 nt, Artificial Sequence
  Description of Artificial Sequence: Synthetic oligonucleotide
agaaauucgugagguuucc

SEQ ID NO: 3257776 - RNA, 19 nt, Artificial Sequence
  Description of Artificial Sequence: Synthetic oligonucleotide
ucucuuggauauuuuacaa

SEQ ID NO: 3257777 - RNA, 19 nt, Artificial Sequence
  Description of Artificial Sequence: Synthetic oligonucleotide
uuguuaaaauccagacagc

SEQ ID NO: 3257778 - RNA, 19 nt, Artificial Sequence
  Description of Artificial Sequence: Synthetic oligonucleotide
uaaaauccagacagcggca

SEQ ID NO: 3257779 - RNA, 19 nt, Artificial Sequence
  Description of Artificial Sequence: Synthetic oligonucleotide
uggaggugcagccauuggc

SEQ ID NO: 3257780 - RNA, 19 nt, Artificial Sequence
  Description of Artificial Sequence: Synthetic oligonucleotide
caggucaucccaaaacacc

SEQ ID NO: 3257781 - RNA, 19 nt, Artificial Sequence
  Description of Artificial Sequence: Synthetic oligonucleotide
uuccaucaacuuuuaaaug

SEQ ID NO: 3257782 - RNA, 19 nt, Artificial Sequence
  Description of Artificial Sequence: Synthetic oligonucleotide
agacagcggcacuugaugg

SEQ ID NO: 3257783 - RNA, 19 nt, Artificial Sequence
  Description of Artificial Sequence: Synthetic oligonucleotide
agguuuccaccauuaaauc

SEQ ID NO: 3257784 - RNA, 19 nt, Artificial Sequence
  Description of Artificial Sequence: Synthetic oligonucleotide
ugugccaucacaccuccaa

SEQ ID NO: 3257785 - RNA, 19 nt, Artificial Sequence
  Description of Artificial Sequence: Synthetic oligonucleotide
aacuguccccuggaggugc

SEQ ID NO: 3257786 - RNA, 19 nt, Artificial Sequence
  Description of Artificial Sequence: Synthetic oligonucleotide
uugauggugcaguucaggu

SEQ ID NO: 3257787 - RNA, 19 nt, Artificial Sequence
  Description of Artificial Sequence: Synthetic oligonucleotide
ucaggucaucccaaaacac

SEQ ID NO: 3257788 - RNA, 19 nt, Artificial Sequence
  Description of Artificial Sequence: Synthetic oligonucleotide
uuaaaucccgccugugcca

SEQ ID NO: 3257789 - RNA, 19 nt, Artificial Sequence
  Description of Artificial Sequence: Synthetic oligonucleotide
aggaacuguccccuggagg

SEQ ID NO: 3257790 - RNA, 19 nt, Artificial Sequence
  Description of Artificial Sequence: Synthetic oligonucleotide
uuuacaaucucaggaguuc

SEQ ID NO: 3257791 - RNA, 19 nt, Artificial Sequence
  Description of Artificial Sequence: Synthetic oligonucleotide
auuaaagagcgugaaugug

SEQ ID NO: 3257792 - RNA, 19 nt, Artificial Sequence
  Description of Artificial Sequence: Synthetic oligonucleotide
aauuuccuuuccaucaacu

SEQ ID NO: 3257793 - RNA, 19 nt, Artificial Sequence
  Description of Artificial Sequence: Synthetic oligonucleotide
aggcugaagaaauucguga

SEQ ID NO: 3257794 - RNA, 19 nt, Artificial Sequence
  Description of Artificial Sequence: Synthetic oligonucleotide
gacauucguggucucuugg

SEQ ID NO: 3257795 - RNA, 19 nt, Artificial Sequence
  Description of Artificial Sequence: Synthetic oligonucleotide
uaaagagcgugaaugugua

SEQ ID NO: 3257796 - RNA, 19 nt, Artificial Sequence
  Description of Artificial Sequence: Synthetic oligonucleotide
auucgugagguuuccacca

SEQ ID NO: 3257797 - RNA, 19 nt, Artificial Sequence
  Description of Artificial Sequence: Synthetic oligonucleotide
guucaggucaucccaaaac

SEQ ID NO: 3257798 - RNA, 19 nt, Artificial Sequence
  Description of Artificial Sequence: Synthetic oligonucleotide
caucaacuuuuaaaugccc

SEQ ID NO: 3257799 - RNA, 19 nt, Artificial Sequence
  Description of Artificial Sequence: Synthetic oligonucleotide
uuaaaugcccagcggccug

SEQ ID NO: 3257800 - RNA, 19 nt, Artificial Sequence
  Description of Artificial Sequence: Synthetic oligonucleotide
cuugcugucccaguagucc

SEQ ID NO: 3257801 - RNA, 19 nt, Artificial Sequence
  Description of Artificial Sequence: Synthetic oligonucleotide
ucaauuuccuuuccaucaa

SEQ ID NO: 3257802 - RNA, 19 nt, Artificial Sequence
  Description of Artificial Sequence: Synthetic oligonucleotide
aguaauuaaagagcgugaa

SEQ ID NO: 3257803 - RNA, 19 nt, Artificial Sequence
  Description of Artificial Sequence: Synthetic oligonucleotide
ugucccaguaguccaguug

SEQ ID NO: 3257804 - RNA, 19 nt, Artificial Sequence
  Description of Artificial Sequence: Synthetic oligonucleotide
gguuuccaccauuaaaucc

SEQ ID NO: 3257805 - RNA, 19 nt, Artificial Sequence
  Description of Artificial Sequence: Synthetic oligonucleotide
uuggcuuugacccaccugg

SEQ ID NO: 3257806 - RNA, 19 nt, Artificial Sequence
  Description of Artificial Sequence: Synthetic oligonucleotide
acugacgacacuuucaggg

SEQ ID NO: 3257807 - RNA, 19 nt, Artificial Sequence
  Description of Artificial Sequence: Synthetic oligonucleotide
ugggaaauagccuuuuggg

SEQ ID NO: 3257808 - RNA, 19 nt, Artificial Sequence
  Description of Artificial Sequence: Synthetic oligonucleotide
uugggaaauagccuuuugg

SEQ ID NO: 3257809 - RNA, 19 nt, Artificial Sequence
  Description of Artificial Sequence: Synthetic oligonucleotide
agagaugucguccugguug

SEQ ID NO: 3257810 - RNA, 19 nt, Artificial Sequence
  Description of Artificial Sequence: Synthetic oligonucleotide
acuuucagggacuucagag

SEQ ID NO: 3257811 - RNA, 19 nt, Artificial Sequence
  Description of Artificial Sequence: Synthetic oligonucleotide
ugaguugugaaggaccugg

SEQ ID NO: 3257812 - RNA, 19 nt, Artificial Sequence
  Description of Artificial Sequence: Synthetic oligonucleotide
uccuccauaucacugacga

SEQ ID NO: 3257813 - RNA, 19 nt, Artificial Sequence
  Description of Artificial Sequence: Synthetic oligonucleotide
gaaauagccuuuugggugc

SEQ ID NO: 3257814 - RNA, 19 nt, Artificial Sequence
  Description of Artificial Sequence: Synthetic oligonucleotide
acagcugcugucuagagga

SEQ ID NO: 3257815 - RNA, 19 nt, Artificial Sequence
  Description of Artificial Sequence: Synthetic oligonucleotide
ucacugacgacacuuucag

SEQ ID NO: 3257816 - RNA, 19 nt, Artificial Sequence
  Description of Artificial Sequence: Synthetic oligonucleotide
guugugaaggaccuggccc

SEQ ID NO: 3257817 - RNA, 19 nt, Artificial Sequence
  Description of Artificial Sequence: Synthetic oligonucleotide
aguugugaaggaccuggcc

SEQ ID NO: 3257818 - RNA, 19 nt, Artificial Sequence
  Description of Artificial Sequence: Synthetic oligonucleotide
ugcaggaaaacuuccugag

SEQ ID NO: 3257819 - RNA, 19 nt, Artificial Sequence
  Description of Artificial Sequence: Synthetic oligonucleotide
agagaugcucucuggggcc

SEQ ID NO: 3257820 - RNA, 19 nt, Artificial Sequence
  Description of Artificial Sequence: Synthetic oligonucleotide
ggaaauagccuuuugggug

SEQ ID NO: 3257821 - RNA, 19 nt, Artificial Sequence
  Description of Artificial Sequence: Synthetic oligonucleotide
aaaacuuccugaguuguga

SEQ ID NO: 3257822 - RNA, 19 nt, Artificial Sequence
  Description of Artificial Sequence: Synthetic oligonucleotide
acuuccugaguugugaagg

SEQ ID NO: 3257823 - RNA, 19 nt, Artificial Sequence
  Description of Artificial Sequence: Synthetic oligonucleotide
augucguccugguuggugc

SEQ ID NO: 3257824 - RNA, 19 nt, Artificial Sequence
  Description of Artificial Sequence: Synthetic oligonucleotide
agggacuucagagaugucg

SEQ ID NO: 3257825 - RNA, 19 nt, Artificial Sequence
  Description of Artificial Sequence: Synthetic oligonucleotide
ucgagagaugcucucuggg

SEQ ID NO: 3257826 - RNA, 19 nt, Artificial Sequence
  Description of Artificial Sequence: Synthetic oligonucleotide
uccugaguugugaaggacc

SEQ ID NO: 3257827 - RNA, 19 nt, Artificial Sequence
  Description of Artificial Sequence: Synthetic oligonucleotide
uuugggugcugcucgagag

SEQ ID NO: 3257828 - RNA, 19 nt, Artificial Sequence
  Description of Artificial Sequence: Synthetic oligonucleotide
uuucagggacuucagagau

SEQ ID NO: 3257829 - RNA, 19 nt, Artificial Sequence
  Description of Artificial Sequence: Synthetic oligonucleotide
gucucuguugcacagcugc

SEQ ID NO: 3257830 - RNA, 19 nt, Artificial Sequence
  Description of Artificial Sequence: Synthetic oligonucleotide
gagagaugcucucuggggc

SEQ ID NO: 3257831 - RNA, 19 nt, Artificial Sequence
  Description of Artificial Sequence: Synthetic oligonucleotide
aacuuccugaguugugaag

SEQ ID NO: 3257832 - RNA, 19 nt, Artificial Sequence
  Description of Artificial Sequence: Synthetic oligonucleotide
ugucuagaggauccuuggg

SEQ ID NO: 3257833 - RNA, 19 nt, Artificial Sequence
  Description of Artificial Sequence: Synthetic oligonucleotide
ucuagaggauccuugggaa

SEQ ID NO: 3257834 - RNA, 19 nt, Artificial Sequence
  Description of Artificial Sequence: Synthetic oligonucleotide
gagaugucguccugguugg

SEQ ID NO: 3257835 - RNA, 19 nt, Artificial Sequence
  Description of Artificial Sequence: Synthetic oligonucleotide
aggaccuggcccuuccucc

SEQ ID NO: 3257836 - RNA, 19 nt, Artificial Sequence
  Description of Artificial Sequence: Synthetic oligonucleotide
uuggugcuggcucucuugg

SEQ ID NO: 3257837 - RNA, 19 nt, Artificial Sequence
  Description of Artificial Sequence: Synthetic oligonucleotide
gcuggcuuggcuuugaccc

SEQ ID NO: 3257838 - RNA, 19 nt, Artificial Sequence
  Description of Artificial Sequence: Synthetic oligonucleotide
uggcccuuccuccauauca

SEQ ID NO: 3257839 - RNA, 19 nt, Artificial Sequence
  Description of Artificial Sequence: Synthetic oligonucleotide
ucagggacuucagagaugu

SEQ ID NO: 3257840 - RNA, 19 nt, Artificial Sequence
  Description of Artificial Sequence: Synthetic oligonucleotide
uccauaucacugacgacac

SEQ ID NO: 3257841 - RNA, 19 nt, Artificial Sequence
  Description of Artificial Sequence: Synthetic oligonucleotide
aaggaccuggcccuuccuc

SEQ ID NO: 3257842 - RNA, 19 nt, Artificial Sequence
  Description of Artificial Sequence: Synthetic oligonucleotide
cucucuuggucucuguugc

SEQ ID NO: 3257843 - RNA, 19 nt, Artificial Sequence
  Description of Artificial Sequence: Synthetic oligonucleotide
gacacuuucagggacuuca

SEQ ID NO: 3257844 - RNA, 19 nt, Artificial Sequence
  Description of Artificial Sequence: Synthetic oligonucleotide
ucuguugcacagcugcugu

SEQ ID NO: 3257845 - RNA, 19 nt, Artificial Sequence
  Description of Artificial Sequence: Synthetic oligonucleotide
gacugugugggcucugucc

SEQ ID NO: 3257846 - RNA, 19 nt, Artificial Sequence
  Description of Artificial Sequence: Synthetic oligonucleotide
uucagagaugucguccugg

SEQ ID NO: 3257847 - RNA, 19 nt, Artificial Sequence
  Description of Artificial Sequence: Synthetic oligonucleotide
auagccuuuugggugcugc

SEQ ID NO: 3257848 - RNA, 19 nt, Artificial Sequence
  Description of Artificial Sequence: Synthetic oligonucleotide
cugucuagaggauccuugg

SEQ ID NO: 3257849 - RNA, 19 nt, Artificial Sequence
  Description of Artificial Sequence: Synthetic oligonucleotide
aggaaaacuuccugaguug

SEQ ID NO: 3257850 - RNA, 19 nt, Artificial Sequence
  Description of Artificial Sequence: Synthetic oligonucleotide
uucuuagugccugggacag

SEQ ID NO: 3257851 - RNA, 19 nt, Artificial Sequence
  Description of Artificial Sequence: Synthetic oligonucleotide
uagugccugggacagacac

SEQ ID NO: 3257852 - RNA, 19 nt, Artificial Sequence
  Description of Artificial Sequence: Synthetic oligonucleotide
uugugaaggaccuggcccu

SEQ ID NO: 3257853 - RNA, 19 nt, Artificial Sequence
  Description of Artificial Sequence: Synthetic oligonucleotide
acuucagagaugucguccu

SEQ ID NO: 3257854 - RNA, 19 nt, Artificial Sequence
  Description of Artificial Sequence: Synthetic oligonucleotide
gacuucagagaugucgucc

SEQ ID NO: 3257855 - RNA, 19 nt, Artificial Sequence
  Description of Artificial Sequence: Synthetic oligonucleotide
ggauccuugggaaauagcc

SEQ ID NO: 3257856 - RNA, 19 nt, Artificial Sequence
  Description of Artificial Sequence: Synthetic oligonucleotide
caugcaggaaaacuuccug

SEQ ID NO: 3257857 - RNA, 19 nt, Artificial Sequence
  Description of Artificial Sequence: Synthetic oligonucleotide
cuccauaucacugacgaca

SEQ ID NO: 3257858 - RNA, 19 nt, Artificial Sequence
  Description of Artificial Sequence: Synthetic oligonucleotide
acugugugggcucuguccu

SEQ ID NO: 3257859 - RNA, 19 nt, Artificial Sequence
  Description of Artificial Sequence: Synthetic oligonucleotide
augcaggaaaacuuccuga

SEQ ID NO: 3257860 - RNA, 19 nt, Artificial Sequence
  Description of Artificial Sequence: Synthetic oligonucleotide
uuuugggugcugcucgaga

SEQ ID NO: 3257861 - RNA, 19 nt, Artificial Sequence
  Description of Artificial Sequence: Synthetic oligonucleotide
cucuguccuucuuagugcc

SEQ ID NO: 3257862 - RNA, 19 nt, Artificial Sequence
  Description of Artificial Sequence: Synthetic oligonucleotide
ugggcucuguccuucuuag

SEQ ID NO: 3257863 - RNA, 19 nt, Artificial Sequence
  Description of Artificial Sequence: Synthetic oligonucleotide
aaacuuccugaguugugaa

SEQ ID NO: 3257864 - RNA, 19 nt, Artificial Sequence
  Description of Artificial Sequence: Synthetic oligonucleotide
cuuggucucuguugcacag

SEQ ID NO: 3257865 - RNA, 19 nt, Artificial Sequence
  Description of Artificial Sequence: Synthetic oligonucleotide
ugacgacacuuucagggac

SEQ ID NO: 3257866 - RNA, 19 nt, Artificial Sequence
  Description of Artificial Sequence: Synthetic oligonucleotide
uggucucuguugcacagcu

SEQ ID NO: 3257867 - RNA, 19 nt, Artificial Sequence
  Description of Artificial Sequence: Synthetic oligonucleotide
uaucacugacgacacuuuc

SEQ ID NO: 3257868 - RNA, 19 nt, Artificial Sequence
  Description of Artificial Sequence: Synthetic oligonucleotide
cuuagugccugggacagac

SEQ ID NO: 3257869 - RNA, 19 nt, Artificial Sequence
  Description of Artificial Sequence: Synthetic oligonucleotide
uuccuccauaucacugacg

SEQ ID NO: 3257870 - RNA, 19 nt, Artificial Sequence
  Description of Artificial Sequence: Synthetic oligonucleotide
cuuugacccaccugggcac

SEQ ID NO: 3257871 - RNA, 19 nt, Artificial Sequence
  Description of Artificial Sequence: Synthetic oligonucleotide
gucuagaggauccuuggga

SEQ ID NO: 3257872 - RNA, 19 nt, Artificial Sequence
  Description of Artificial Sequence: Synthetic oligonucleotide
ugaaggaccuggcccuucc

SEQ ID NO: 3257873 - RNA, 19 nt, Artificial Sequence
  Description of Artificial Sequence: Synthetic oligonucleotide
auccuugggaaauagccuu

SEQ ID NO: 3257874 - RNA, 19 nt, Artificial Sequence
  Description of Artificial Sequence: Synthetic oligonucleotide
gggacagacacagugacug

SEQ ID NO: 3257875 - RNA, 19 nt, Artificial Sequence
  Description of Artificial Sequence: Synthetic oligonucleotide
cucucuggggccuggcugg

SEQ ID NO: 3257876 - RNA, 19 nt, Artificial Sequence
  Description of Artificial Sequence: Synthetic oligonucleotide
ucuuggucucuguugcaca

SEQ ID NO: 3257877 - RNA, 19 nt, Artificial Sequence
  Description of Artificial Sequence: Synthetic oligonucleotide
uguccuucuuagugccugg

SEQ ID NO: 3257878 - RNA, 19 nt, Artificial Sequence
  Description of Artificial Sequence: Synthetic oligonucleotide
cuuucagggacuucagaga

SEQ ID NO: 3257879 - RNA, 19 nt, Artificial Sequence
  Description of Artificial Sequence: Synthetic oligonucleotide
ucagagaugucguccuggu

SEQ ID NO: 3257880 - RNA, 19 nt, Artificial Sequence
  Description of Artificial Sequence: Synthetic oligonucleotide
cucgagagaugcucucugg

SEQ ID NO: 3257881 - RNA, 19 nt, Artificial Sequence
  Description of Artificial Sequence: Synthetic oligonucleotide
ugggcacuugacugugugg

SEQ ID NO: 3257882 - RNA, 19 nt, Artificial Sequence
  Description of Artificial Sequence: Synthetic oligonucleotide
gacagacacagugacugug

SEQ ID NO: 3257883 - RNA, 19 nt, Artificial Sequence
  Description of Artificial Sequence: Synthetic oligonucleotide
cugggacagacacagugac

SEQ ID NO: 3257884 - RNA, 19 nt, Artificial Sequence
  Description of Artificial Sequence: Synthetic oligonucleotide
ggcucuguccuucuuagug

SEQ ID NO: 3257885 - RNA, 19 nt, Artificial Sequence
  Description of Artificial Sequence: Synthetic oligonucleotide
uguugcacagcugcugucu

SEQ ID NO: 3257886 - RNA, 19 nt, Artificial Sequence
  Description of Artificial Sequence: Synthetic oligonucleotide
cacagcugcugucuagagg

SEQ ID NO: 3257887 - RNA, 19 nt, Artificial Sequence
  Description of Artificial Sequence: Synthetic oligonucleotide
gugccugggacagacacag

SEQ ID NO: 3257888 - RNA, 19 nt, Artificial Sequence
  Description of Artificial Sequence: Synthetic oligonucleotide
gaaaacuuccugaguugug

SEQ ID NO: 3257889 - RNA, 19 nt, Artificial Sequence
  Description of Artificial Sequence: Synthetic oligonucleotide
uucagggacuucagagaug

SEQ ID NO: 3257890 - RNA, 19 nt, Artificial Sequence
  Description of Artificial Sequence: Synthetic oligonucleotide
uggcuuugacccaccuggg

SEQ ID NO: 3257891 - RNA, 19 nt, Artificial Sequence
  Description of Artificial Sequence: Synthetic oligonucleotide
cuucuuagugccugggaca

SEQ ID NO: 3257892 - RNA, 19 nt, Artificial Sequence
  Description of Artificial Sequence: Synthetic oligonucleotide
uccugguuggugcuggcuc

SEQ ID NO: 3257893 - RNA, 19 nt, Artificial Sequence
  Description of Artificial Sequence: Synthetic oligonucleotide
uccuucuuagugccuggga

SEQ ID NO: 3257894 - RNA, 19 nt, Artificial Sequence
  Description of Artificial Sequence: Synthetic oligonucleotide
uagaggauccuugggaaau

SEQ ID NO: 3257895 - RNA, 19 nt, Artificial Sequence
  Description of Artificial Sequence: Synthetic oligonucleotide
ggugcugcucgagagaugc

SEQ ID NO: 3257896 - RNA, 19 nt, Artificial Sequence
  Description of Artificial Sequence: Synthetic oligonucleotide
guuggugcuggcucucuug

SEQ ID NO: 3257897 - RNA, 19 nt, Artificial Sequence
  Description of Artificial Sequence: Synthetic oligonucleotide
gaggauccuugggaaauag

SEQ ID NO: 3257898 - RNA, 19 nt, Artificial Sequence
  Description of Artificial Sequence: Synthetic oligonucleotide
gggcacuugacuguguggg

SEQ ID NO: 3257899 - RNA, 19 nt, Artificial Sequence
  Description of Artificial Sequence: Synthetic oligonucleotide
gaugucguccugguuggug

SEQ ID NO: 3257900 - RNA, 19 nt, Artificial Sequence
  Description of Artificial Sequence: Synthetic oligonucleotide
aggauccuugggaaauagc

SEQ ID NO: 3257901 - RNA, 19 nt, Artificial Sequence
  Description of Artificial Sequence: Synthetic oligonucleotide
cuuccuccauaucacugac

SEQ ID NO: 3257902 - RNA, 19 nt, Artificial Sequence
  Description of Artificial Sequence: Synthetic oligonucleotide
gccuuuugggugcugcucg

SEQ ID NO: 3257903 - RNA, 19 nt, Artificial Sequence
  Description of Artificial Sequence: Synthetic oligonucleotide
uugcacagcugcugucuag

SEQ ID NO: 3257904 - RNA, 19 nt, Artificial Sequence
  Description of Artificial Sequence: Synthetic oligonucleotide
uugggugcugcucgagaga

SEQ ID NO: 3257905 - RNA, 19 nt, Artificial Sequence
  Description of Artificial Sequence: Synthetic oligonucleotide
uaguuauacauaaauaccc

SEQ ID NO: 3257906 - RNA, 19 nt, Artificial Sequence
  Description of Artificial Sequence: Synthetic oligonucleotide
aagaaagugacagugagag

SEQ ID NO: 3257907 - RNA, 19 nt, Artificial Sequence
  Description of Artificial Sequence: Synthetic oligonucleotide
aaauccauuuacgaaauac

SEQ ID NO: 3257908 - RNA, 19 nt, Artificial Sequence
  Description of Artificial Sequence: Synthetic oligonucleotide
aauguugcuugcuuugccc

SEQ ID NO: 3257909 - RNA, 19 nt, Artificial Sequence
  Description of Artificial Sequence: Synthetic oligonucleotide
uuacgaaauacacagaagu

SEQ ID NO: 3257910 - RNA, 19 nt, Artificial Sequence
  Description of Artificial Sequence: Synthetic oligonucleotide
agaaccagcagccacauuc

SEQ ID NO: 3257911 - RNA, 19 nt, Artificial Sequence
  Description of Artificial Sequence: Synthetic oligonucleotide
agaagugauaccuaaaugu

SEQ ID NO: 3257912 - RNA, 19 nt, Artificial Sequence
  Description of Artificial Sequence: Synthetic oligonucleotide
acagagaugacaaugauag

SEQ ID NO: 3257913 - RNA, 19 nt, Artificial Sequence
  Description of Artificial Sequence: Synthetic oligonucleotide
agagaugacaaugauaggg

SEQ ID NO: 3257914 - RNA, 19 nt, Artificial Sequence
  Description of Artificial Sequence: Synthetic oligonucleotide
gauaccuaaauguugcuug

SEQ ID NO: 3257915 - RNA, 19 nt, Artificial Sequence
  Description of Artificial Sequence: Synthetic oligonucleotide
cugguaaacacacagcugg

SEQ ID NO: 3257916 - RNA, 19 nt, Artificial Sequence
  Description of Artificial Sequence: Synthetic oligonucleotide
aacaaaauccaagagagaa

SEQ ID NO: 3257917 - RNA, 19 nt, Artificial Sequence
  Description of Artificial Sequence: Synthetic oligonucleotide
aaugauagggugaugcgac

SEQ ID NO: 3257918 - RNA, 19 nt, Artificial Sequence
  Description of Artificial Sequence: Synthetic oligonucleotide
agugauaccuaaauguugc

SEQ ID NO: 3257919 - RNA, 19 nt, Artificial Sequence
  Description of Artificial Sequence: Synthetic oligonucleotide
auaaauacccguuaacgca

SEQ ID NO: 3257920 - RNA, 19 nt, Artificial Sequence
  Description of Artificial Sequence: Synthetic oligonucleotide
acauaaauacccguuaacg

SEQ ID NO: 3257921 - RNA, 19 nt, Artificial Sequence
  Description of Artificial Sequence: Synthetic oligonucleotide
aauacacagaaguuuggcu

SEQ ID NO: 3257922 - RNA, 19 nt, Artificial Sequence
  Description of Artificial Sequence: Synthetic oligonucleotide
uuugcuuugauguugugau

SEQ ID NO: 3257923 - RNA, 19 nt, Artificial Sequence
  Description of Artificial Sequence: Synthetic oligonucleotide
auuuacgaaauacacagaa

SEQ ID NO: 3257924 - RNA, 19 nt, Artificial Sequence
  Description of Artificial Sequence: Synthetic oligonucleotide
uuuacgaaauacacagaag

SEQ ID NO: 3257925 - RNA, 19 nt, Artificial Sequence
  Description of Artificial Sequence: Synthetic oligonucleotide
aaggcaugcguccaaguag

SEQ ID NO: 3257926 - RNA, 19 nt, Artificial Sequence
  Description of Artificial Sequence: Synthetic oligonucleotide
aggcaaacuucacagaagg

SEQ ID NO: 3257927 - RNA, 19 nt, Artificial Sequence
  Description of Artificial Sequence: Synthetic oligonucleotide
ugcuuugauguugugaugg

SEQ ID NO: 3257928 - RNA, 19 nt, Artificial Sequence
  Description of Artificial Sequence: Synthetic oligonucleotide
aauccaagagagaaccagc

SEQ ID NO: 3257929 - RNA, 19 nt, Artificial Sequence
  Description of Artificial Sequence: Synthetic oligonucleotide
uaacgcaaaauccauuuac

SEQ ID NO: 3257930 - RNA, 19 nt, Artificial Sequence
  Description of Artificial Sequence: Synthetic oligonucleotide
agaugagagcagcaguucc

SEQ ID NO: 3257931 - RNA, 19 nt, Artificial Sequence
  Description of Artificial Sequence: Synthetic oligonucleotide
auuccaacaaaauccaaga

SEQ ID NO: 3257932 - RNA, 19 nt, Artificial Sequence
  Description of Artificial Sequence: Synthetic oligonucleotide
aauggggcaggacggaggg

SEQ ID NO: 3257933 - RNA, 19 nt, Artificial Sequence
  Description of Artificial Sequence: Synthetic oligonucleotide
ccauuuacgaaauacacag

SEQ ID NO: 3257934 - RNA, 19 nt, Artificial Sequence
  Description of Artificial Sequence: Synthetic oligonucleotide
auaccuaaauguugcuugc

SEQ ID NO: 3257935 - RNA, 19 nt, Artificial Sequence
  Description of Artificial Sequence: Synthetic oligonucleotide
agggaucccagccuggucc

SEQ ID NO: 3257936 - RNA, 19 nt, Artificial Sequence
  Description of Artificial Sequence: Synthetic oligonucleotide
auaguggacagucugguca

SEQ ID NO: 3257937 - RNA, 19 nt, Artificial Sequence
  Description of Artificial Sequence: Synthetic oligonucleotide
aacgcaaaauccauuuacg

SEQ ID NO: 3257938 - RNA, 19 nt, Artificial Sequence
  Description of Artificial Sequence: Synthetic oligonucleotide
acaaagaguggaucucugc

SEQ ID NO: 3257939 - RNA, 19 nt, Artificial Sequence
  Description of Artificial Sequence: Synthetic oligonucleotide
uccauuuacgaaauacaca

SEQ ID NO: 3257940 - RNA, 19 nt, Artificial Sequence
  Description of Artificial Sequence: Synthetic oligonucleotide
caaagaguggaucucugcg

SEQ ID NO: 3257941 - RNA, 19 nt, Artificial Sequence
  Description of Artificial Sequence: Synthetic oligonucleotide
uagaagugauaccuaaaug

SEQ ID NO: 3257942 - RNA, 19 nt, Artificial Sequence
  Description of Artificial Sequence: Synthetic oligonucleotide
ugcgaugcgacaacgcagg

SEQ ID NO: 3257943 - RNA, 19 nt, Artificial Sequence
  Description of Artificial Sequence: Synthetic oligonucleotide
agagagaaccagcagccac

SEQ ID NO: 3257944 - RNA, 19 nt, Artificial Sequence
  Description of Artificial Sequence: Synthetic oligonucleotide
gacagucuggucaacauag

SEQ ID NO: 3257945 - RNA, 19 nt, Artificial Sequence
  Description of Artificial Sequence: Synthetic oligonucleotide
uuauacauaaauacccguu

SEQ ID NO: 3257946 - RNA, 19 nt, Artificial Sequence
  Description of Artificial Sequence: Synthetic oligonucleotide
aaagaguggaucucugcga

SEQ ID NO: 3257947 - RNA, 19 nt, Artificial Sequence
  Description of Artificial Sequence: Synthetic oligonucleotide
gaaagagcuggccauuugc

SEQ ID NO: 3257948 - RNA, 19 nt, Artificial Sequence
  Description of Artificial Sequence: Synthetic oligonucleotide
uucacagaaggacugggac

SEQ ID NO: 3257949 - RNA, 19 nt, Artificial Sequence
  Description of Artificial Sequence: Synthetic oligonucleotide
cuuccugguaaacacacag

SEQ ID NO: 3257950 - RNA, 19 nt, Artificial Sequence
  Description of Artificial Sequence: Synthetic oligonucleotide
auccauuuacgaaauacac

SEQ ID NO: 3257951 - RNA, 19 nt, Artificial Sequence
  Description of Artificial Sequence: Synthetic oligonucleotide
gacguuggaggauggaagg

SEQ ID NO: 3257952 - RNA, 19 nt, Artificial Sequence
  Description of Artificial Sequence: Synthetic oligonucleotide
aauccauuuacgaaauaca

SEQ ID NO: 3257953 - RNA, 19 nt, Artificial Sequence
  Description of Artificial Sequence: Synthetic oligonucleotide
ucaacauagggccagcaua

SEQ ID NO: 3257954 - RNA, 19 nt, Artificial Sequence
  Description of Artificial Sequence: Synthetic oligonucleotide
agucuggucaacauagggc

SEQ ID NO: 3257955 - RNA, 19 nt, Artificial Sequence
  Description of Artificial Sequence: Synthetic oligonucleotide
auguugcuugcuuugcccc

SEQ ID NO: 3257956 - RNA, 19 nt, Artificial Sequence
  Description of Artificial Sequence: Synthetic oligonucleotide
acaaugauagggugaugcg

SEQ ID NO: 3257957 - RNA, 19 nt, Artificial Sequence
  Description of Artificial Sequence: Synthetic oligonucleotide
aagugacagugagagaugg

SEQ ID NO: 3257958 - RNA, 19 nt, Artificial Sequence
  Description of Artificial Sequence: Synthetic oligonucleotide
uacagccaaaucuaggcca

SEQ ID NO: 3257959 - RNA, 19 nt, Artificial Sequence
  Description of Artificial Sequence: Synthetic oligonucleotide
uaaauacccguuaacgcaa

SEQ ID NO: 3257960 - RNA, 19 nt, Artificial Sequence
  Description of Artificial Sequence: Synthetic oligonucleotide
cauagggccagcauaggag

SEQ ID NO: 3257961 - RNA, 19 nt, Artificial Sequence
  Description of Artificial Sequence: Synthetic oligonucleotide
caacauagggccagcauag

SEQ ID NO: 3257962 - RNA, 19 nt, Artificial Sequence
  Description of Artificial Sequence: Synthetic oligonucleotide
ggcagguuaacacuggagg

SEQ ID NO: 3257963 - RNA, 19 nt, Artificial Sequence
  Description of Artificial Sequence: Synthetic oligonucleotide
uacccguuaacgcaaaauc

SEQ ID NO: 3257964 - RNA, 19 nt, Artificial Sequence
  Description of Artificial Sequence: Synthetic oligonucleotide
acacuugcccuccucuucc

SEQ ID NO: 3257965 - RNA, 19 nt, Artificial Sequence
  Description of Artificial Sequence: Synthetic oligonucleotide
aucagcucucuccucacac

SEQ ID NO: 3257966 - RNA, 19 nt, Artificial Sequence
  Description of Artificial Sequence: Synthetic oligonucleotide
ucugcgaugcgacaacgca

SEQ ID NO: 3257967 - RNA, 19 nt, Artificial Sequence
  Description of Artificial Sequence: Synthetic oligonucleotide
agauggaucuggaaagagc

SEQ ID NO: 3257968 - RNA, 19 nt, Artificial Sequence
  Description of Artificial Sequence: Synthetic oligonucleotide
aagaagcuggaauucucca

SEQ ID NO: 3257969 - RNA, 19 nt, Artificial Sequence
  Description of Artificial Sequence: Synthetic oligonucleotide
gaauucuccaaggacguug

SEQ ID NO: 3257970 - RNA, 19 nt, Artificial Sequence
  Description of Artificial Sequence: Synthetic oligonucleotide
ggaagaaagugacagugag

SEQ ID NO: 3257971 - RNA, 19 nt, Artificial Sequence
  Description of Artificial Sequence: Synthetic oligonucleotide
acccguuaacgcaaaaucc

SEQ ID NO: 3257972 - RNA, 19 nt, Artificial Sequence
  Description of Artificial Sequence: Synthetic oligonucleotide
gagagcagcaguuccacac

SEQ ID NO: 3257973 - RNA, 19 nt, Artificial Sequence
  Description of Artificial Sequence: Synthetic oligonucleotide
acauuccacggacaaagag

SEQ ID NO: 3257974 - RNA, 19 nt, Artificial Sequence
  Description of Artificial Sequence: Synthetic oligonucleotide
aagugauaccuaaauguug

SEQ ID NO: 3257975 - RNA, 19 nt, Artificial Sequence
  Description of Artificial Sequence: Synthetic oligonucleotide
uggaauucuccaaggacgu

SEQ ID NO: 3257976 - RNA, 19 nt, Artificial Sequence
  Description of Artificial Sequence: Synthetic oligonucleotide
uuugugaaggagcggauuu

SEQ ID NO: 3257977 - RNA, 19 nt, Artificial Sequence
  Description of Artificial Sequence: Synthetic oligonucleotide
ucaccuacagccaaaucua

SEQ ID NO: 3257978 - RNA, 19 nt, Artificial Sequence
  Description of Artificial Sequence: Synthetic oligonucleotide
aaggagcggauuuucguga

SEQ ID NO: 3257979 - RNA, 19 nt, Artificial Sequence
  Description of Artificial Sequence: Synthetic oligonucleotide
uccaagagagaaccagcag

SEQ ID NO: 3257980 - RNA, 19 nt, Artificial Sequence
  Description of Artificial Sequence: Synthetic oligonucleotide
aagaguggaucucugcgau

SEQ ID NO: 3257981 - RNA, 19 nt, Artificial Sequence
  Description of Artificial Sequence: Synthetic oligonucleotide
gaagaagcuggaauucucc

SEQ ID NO: 3257982 - RNA, 19 nt, Artificial Sequence
  Description of Artificial Sequence: Synthetic oligonucleotide
uacacagaaguuuggcugu

SEQ ID NO: 3257983 - RNA, 19 nt, Artificial Sequence
  Description of Artificial Sequence: Synthetic oligonucleotide
acagaagaagcuggaauuc

SEQ ID NO: 3257984 - RNA, 19 nt, Artificial Sequence
  Description of Artificial Sequence: Synthetic oligonucleotide
agaugacaaugauagggug

SEQ ID NO: 3257985 - RNA, 19 nt, Artificial Sequence
  Description of Artificial Sequence: Synthetic oligonucleotide
uacgaaauacacagaaguu

SEQ ID NO: 3257986 - RNA, 19 nt, Artificial Sequence
  Description of Artificial Sequence: Synthetic oligonucleotide
cuggcaggaagaaagugac

SEQ ID NO: 3257987 - RNA, 19 nt, Artificial Sequence
  Description of Artificial Sequence: Synthetic oligonucleotide
aaaucuaggccaggccaac

SEQ ID NO: 3257988 - RNA, 19 nt, Artificial Sequence
  Description of Artificial Sequence: Synthetic oligonucleotide
auacauaaauacccguuaa

SEQ ID NO: 3257989 - RNA, 19 nt, Artificial Sequence
  Description of Artificial Sequence: Synthetic oligonucleotide
ggagaauuccaacaaaauc

SEQ ID NO: 3257990 - RNA, 19 nt, Artificial Sequence
  Description of Artificial Sequence: Synthetic oligonucleotide
gacagugagagauggaucu

SEQ ID NO: 3257991 - RNA, 19 nt, Artificial Sequence
  Description of Artificial Sequence: Synthetic oligonucleotide
aacuucacagaaggacugg

SEQ ID NO: 3257992 - RNA, 19 nt, Artificial Sequence
  Description of Artificial Sequence: Synthetic oligonucleotide
gaguggaucucugcgaugc

SEQ ID NO: 3257993 - RNA, 19 nt, Artificial Sequence
  Description of Artificial Sequence: Synthetic oligonucleotide
ugcgacaacgcagggaucc

SEQ ID NO: 3257994 - RNA, 19 nt, Artificial Sequence
  Description of Artificial Sequence: Synthetic oligonucleotide
ucuccucacacagaagaag

SEQ ID NO: 3257995 - RNA, 19 nt, Artificial Sequence
  Description of Artificial Sequence: Synthetic oligonucleotide
acggacaaagaguggaucu

SEQ ID NO: 3257996 - RNA, 19 nt, Artificial Sequence
  Description of Artificial Sequence: Synthetic oligonucleotide
uaaauguugcuugcuuugc

SEQ ID NO: 3257997 - RNA, 19 nt, Artificial Sequence
  Description of Artificial Sequence: Synthetic oligonucleotide
cagucuggucaacauaggg

SEQ ID NO: 3257998 - RNA, 19 nt, Artificial Sequence
  Description of Artificial Sequence: Synthetic oligonucleotide
acgcaaaauccauuuacga

SEQ ID NO: 3257999 - RNA, 19 nt, Artificial Sequence
  Description of Artificial Sequence: Synthetic oligonucleotide
ccuacagccaaaucuaggc

SEQ ID NO: 3258000 - RNA, 19 nt, Artificial Sequence
  Description of Artificial Sequence: Synthetic oligonucleotide
ggcaggaagaaagugacag

SEQ ID NO: 3258001 - RNA, 19 nt, Artificial Sequence
  Description of Artificial Sequence: Synthetic oligonucleotide
uuccugguaaacacacagc

SEQ ID NO: 3258002 - RNA, 19 nt, Artificial Sequence
  Description of Artificial Sequence: Synthetic oligonucleotide
gaugacaaugauaggguga

SEQ ID NO: 3258003 - RNA, 19 nt, Artificial Sequence
  Description of Artificial Sequence: Synthetic oligonucleotide
ugcagguacagagaugaca

SEQ ID NO: 3258004 - RNA, 19 nt, Artificial Sequence
  Description of Artificial Sequence: Synthetic oligonucleotide
uccuggguacccaagccug

SEQ ID NO: 3258005 - RNA, 19 nt, Artificial Sequence
  Description of Artificial Sequence: Synthetic oligonucleotide
cuuaucaagauccacaccg

SEQ ID NO: 3258006 - RNA, 19 nt, Artificial Sequence
  Description of Artificial Sequence: Synthetic oligonucleotide
aaagcacaaacguacuucc

SEQ ID NO: 3258007 - RNA, 19 nt, Artificial Sequence
  Description of Artificial Sequence: Synthetic oligonucleotide
aaucuuuccauccuuguuc

SEQ ID NO: 3258008 - RNA, 19 nt, Artificial Sequence
  Description of Artificial Sequence: Synthetic oligonucleotide
uuuauuuucagcccaagac

SEQ ID NO: 3258009 - RNA, 19 nt, Artificial Sequence
  Description of Artificial Sequence: Synthetic oligonucleotide
aacuuaucaagauccacac

SEQ ID NO: 3258010 - RNA, 19 nt, Artificial Sequence
  Description of Artificial Sequence: Synthetic oligonucleotide
acagcaagagcacagacac

SEQ ID NO: 3258011 - RNA, 19 nt, Artificial Sequence
  Description of Artificial Sequence: Synthetic oligonucleotide
aagaacaaagcacaaacgu

SEQ ID NO: 3258012 - RNA, 19 nt, Artificial Sequence
  Description of Artificial Sequence: Synthetic oligonucleotide
aauccguccacuucugggc

SEQ ID NO: 3258013 - RNA, 19 nt, Artificial Sequence
  Description of Artificial Sequence: Synthetic oligonucleotide
agagcacagacacacaagc

SEQ ID NO: 3258014 - RNA, 19 nt, Artificial Sequence
  Description of Artificial Sequence: Synthetic oligonucleotide
uuauuuucagcccaagaca

SEQ ID NO: 3258015 - RNA, 19 nt, Artificial Sequence
  Description of Artificial Sequence: Synthetic oligonucleotide
agauccacaccgcugaugc

SEQ ID NO: 3258016 - RNA, 19 nt, Artificial Sequence
  Description of Artificial Sequence: Synthetic oligonucleotide
aagaguaccacagucauca

SEQ ID NO: 3258017 - RNA, 19 nt, Artificial Sequence
  Description of Artificial Sequence: Synthetic oligonucleotide
aaauccguccacuucuggg

SEQ ID NO: 3258018 - RNA, 19 nt, Artificial Sequence
  Description of Artificial Sequence: Synthetic oligonucleotide
auucccaugguacaggauc

SEQ ID NO: 3258019 - RNA, 19 nt, Artificial Sequence
  Description of Artificial Sequence: Synthetic oligonucleotide
aaacguacuucccacagca

SEQ ID NO: 3258020 - RNA, 19 nt, Artificial Sequence
  Description of Artificial Sequence: Synthetic oligonucleotide
uauuuucagcccaagacac

SEQ ID NO: 3258021 - RNA, 19 nt, Artificial Sequence
  Description of Artificial Sequence: Synthetic oligonucleotide
uagccuacuacaaagcagc

SEQ ID NO: 3258022 - RNA, 19 nt, Artificial Sequence
  Description of Artificial Sequence: Synthetic oligonucleotide
acaguggcgaagcagaauc

SEQ ID NO: 3258023 - RNA, 19 nt, Artificial Sequence
  Description of Artificial Sequence: Synthetic oligonucleotide
uccaucaugucuuugacaa

SEQ ID NO: 3258024 - RNA, 19 nt, Artificial Sequence
  Description of Artificial Sequence: Synthetic oligonucleotide
agcaagagcacagacacac

SEQ ID NO: 3258025 - RNA, 19 nt, Artificial Sequence
  Description of Artificial Sequence: Synthetic oligonucleotide
caugucuuugacaaauccg

SEQ ID NO: 3258026 - RNA, 19 nt, Artificial Sequence
  Description of Artificial Sequence: Synthetic oligonucleotide
aagguuugcugacuggguc

SEQ ID NO: 3258027 - RNA, 19 nt, Artificial Sequence
  Description of Artificial Sequence: Synthetic oligonucleotide
ucuuugacaaauccgucca

SEQ ID NO: 3258028 - RNA, 19 nt, Artificial Sequence
  Description of Artificial Sequence: Synthetic oligonucleotide
ucaagauccacaccgcuga

SEQ ID NO: 3258029 - RNA, 19 nt, Artificial Sequence
  Description of Artificial Sequence: Synthetic oligonucleotide
agcacagacacacaagcag

SEQ ID NO: 3258030 - RNA, 19 nt, Artificial Sequence
  Description of Artificial Sequence: Synthetic oligonucleotide
gaacaaagcacaaacguac

SEQ ID NO: 3258031 - RNA, 19 nt, Artificial Sequence
  Description of Artificial Sequence: Synthetic oligonucleotide
ucaugucuuugacaaaucc

SEQ ID NO: 3258032 - RNA, 19 nt, Artificial Sequence
  Description of Artificial Sequence: Synthetic oligonucleotide
aguagagaagguuugcuga

SEQ ID NO: 3258033 - RNA, 19 nt, Artificial Sequence
  Description of Artificial Sequence: Synthetic oligonucleotide
cagggguuuauuuucagcc

SEQ ID NO: 3258034 - RNA, 19 nt, Artificial Sequence
  Description of Artificial Sequence: Synthetic oligonucleotide
uuguucacaucacaguggc

SEQ ID NO: 3258035 - RNA, 19 nt, Artificial Sequence
  Description of Artificial Sequence: Synthetic oligonucleotide
caagaacaaagcacaaacg

SEQ ID NO: 3258036 - RNA, 19 nt, Artificial Sequence
  Description of Artificial Sequence: Synthetic oligonucleotide
aaagcagcacccugggguc

SEQ ID NO: 3258037 - RNA, 19 nt, Artificial Sequence
  Description of Artificial Sequence: Synthetic oligonucleotide
acaagcagagagcagagca

SEQ ID NO: 3258038 - RNA, 19 nt, Artificial Sequence
  Description of Artificial Sequence: Synthetic oligonucleotide
aagcagagagcagagcagc

SEQ ID NO: 3258039 - RNA, 19 nt, Artificial Sequence
  Description of Artificial Sequence: Synthetic oligonucleotide
uccccaagaacaaagcaca

SEQ ID NO: 3258040 - RNA, 19 nt, Artificial Sequence
  Description of Artificial Sequence: Synthetic oligonucleotide
acuucugaaucuuuccauc

SEQ ID NO: 3258041 - RNA, 19 nt, Artificial Sequence
  Description of Artificial Sequence: Synthetic oligonucleotide
cuuguucacaucacagugg

SEQ ID NO: 3258042 - RNA, 19 nt, Artificial Sequence
  Description of Artificial Sequence: Synthetic oligonucleotide
aucauggcuagccuacuac

SEQ ID NO: 3258043 - RNA, 19 nt, Artificial Sequence
  Description of Artificial Sequence: Synthetic oligonucleotide
agggguuuauuuucagccc

SEQ ID NO: 3258044 - RNA, 19 nt, Artificial Sequence
  Description of Artificial Sequence: Synthetic oligonucleotide
uuuucagcccaagacacag

SEQ ID NO: 3258045 - RNA, 19 nt, Artificial Sequence
  Description of Artificial Sequence: Synthetic oligonucleotide
uccauccuuguucacauca

SEQ ID NO: 3258046 - RNA, 19 nt, Artificial Sequence
  Description of Artificial Sequence: Synthetic oligonucleotide
ucaucaguagagaagguuu

SEQ ID NO: 3258047 - RNA, 19 nt, Artificial Sequence
  Description of Artificial Sequence: Synthetic oligonucleotide
agguuugcugacugggucc

SEQ ID NO: 3258048 - RNA, 19 nt, Artificial Sequence
  Description of Artificial Sequence: Synthetic oligonucleotide
acuuaucaagauccacacc

SEQ ID NO: 3258049 - RNA, 19 nt, Artificial Sequence
  Description of Artificial Sequence: Synthetic oligonucleotide
uucagcccaagacacagug

SEQ ID NO: 3258050 - RNA, 19 nt, Artificial Sequence
  Description of Artificial Sequence: Synthetic oligonucleotide
uacaaagcagcacccuggg

SEQ ID NO: 3258051 - RNA, 19 nt, Artificial Sequence
  Description of Artificial Sequence: Synthetic oligonucleotide
cagucaucaguagagaagg

SEQ ID NO: 3258052 - RNA, 19 nt, Artificial Sequence
  Description of Artificial Sequence: Synthetic oligonucleotide
ucucccggaacuuaucaag

SEQ ID NO: 3258053 - RNA, 19 nt, Artificial Sequence
  Description of Artificial Sequence: Synthetic oligonucleotide
cuacaaagcagcacccugg

SEQ ID NO: 3258054 - RNA, 19 nt, Artificial Sequence
  Description of Artificial Sequence: Synthetic oligonucleotide
acaaacguacuucccacag

SEQ ID NO: 3258055 - RNA, 19 nt, Artificial Sequence
  Description of Artificial Sequence: Synthetic oligonucleotide
cagacacacaagcagagag

SEQ ID NO: 3258056 - RNA, 19 nt, Artificial Sequence
  Description of Artificial Sequence: Synthetic oligonucleotide
aaucucccggaacuuauca

SEQ ID NO: 3258057 - RNA, 19 nt, Artificial Sequence
  Description of Artificial Sequence: Synthetic oligonucleotide
uggaccagcuccaucaugu

SEQ ID NO: 3258058 - RNA, 19 nt, Artificial Sequence
  Description of Artificial Sequence: Synthetic oligonucleotide
cuucugaaucuuuccaucc

SEQ ID NO: 3258059 - RNA, 19 nt, Artificial Sequence
  Description of Artificial Sequence: Synthetic oligonucleotide
uuaucaagauccacaccgc

SEQ ID NO: 3258060 - RNA, 19 nt, Artificial Sequence
  Description of Artificial Sequence: Synthetic oligonucleotide
aagcagaaucucccggaac

SEQ ID NO: 3258061 - RNA, 19 nt, Artificial Sequence
  Description of Artificial Sequence: Synthetic oligonucleotide
cuagccuacuacaaagcag

SEQ ID NO: 3258062 - RNA, 19 nt, Artificial Sequence
  Description of Artificial Sequence: Synthetic oligonucleotide
ccuacuacaaagcagcacc

SEQ ID NO: 3258063 - RNA, 19 nt, Artificial Sequence
  Description of Artificial Sequence: Synthetic oligonucleotide
agcagaaucucccggaacu

SEQ ID NO: 3258064 - RNA, 19 nt, Artificial Sequence
  Description of Artificial Sequence: Synthetic oligonucleotide
uggcuagccuacuacaaag

SEQ ID NO: 3258065 - RNA, 19 nt, Artificial Sequence
  Description of Artificial Sequence: Synthetic oligonucleotide
gucuuugacaaauccgucc

SEQ ID NO: 3258066 - RNA, 19 nt, Artificial Sequence
  Description of Artificial Sequence: Synthetic oligonucleotide
agaagguuugcugacuggg

SEQ ID NO: 3258067 - RNA, 19 nt, Artificial Sequence
  Description of Artificial Sequence: Synthetic oligonucleotide
aagacacagugccagcuca

SEQ ID NO: 3258068 - RNA, 19 nt, Artificial Sequence
  Description of Artificial Sequence: Synthetic oligonucleotide
gaacuuaucaagauccaca

SEQ ID NO: 3258069 - RNA, 19 nt, Artificial Sequence
  Description of Artificial Sequence: Synthetic oligonucleotide
uacaggaucauggcuagcc

SEQ ID NO: 3258070 - RNA, 19 nt, Artificial Sequence
  Description of Artificial Sequence: Synthetic oligonucleotide
acuacaaagcagcacccug

SEQ ID NO: 3258071 - RNA, 19 nt, Artificial Sequence
  Description of Artificial Sequence: Synthetic oligonucleotide
acguacuucccacagcaag

SEQ ID NO: 3258072 - RNA, 19 nt, Artificial Sequence
  Description of Artificial Sequence: Synthetic oligonucleotide
ugguacaggaucauggcua

SEQ ID NO: 3258073 - RNA, 19 nt, Artificial Sequence
  Description of Artificial Sequence: Synthetic oligonucleotide
uggguccccaagaacaaag

SEQ ID NO: 3258074 - RNA, 19 nt, Artificial Sequence
  Description of Artificial Sequence: Synthetic oligonucleotide
ucagacuucugaaucuuuc

SEQ ID NO: 3258075 - RNA, 19 nt, Artificial Sequence
  Description of Artificial Sequence: Synthetic oligonucleotide
caugguacaggaucauggc

SEQ ID NO: 3258076 - RNA, 19 nt, Artificial Sequence
  Description of Artificial Sequence: Synthetic oligonucleotide
agcacaaacguacuuccca

SEQ ID NO: 3258077 - RNA, 19 nt, Artificial Sequence
  Description of Artificial Sequence: Synthetic oligonucleotide
cagcccaagacacagugcc

SEQ ID NO: 3258078 - RNA, 19 nt, Artificial Sequence
  Description of Artificial Sequence: Synthetic oligonucleotide
agagaagguuugcugacug

SEQ ID NO: 3258079 - RNA, 19 nt, Artificial Sequence
  Description of Artificial Sequence: Synthetic oligonucleotide
ccaagaacaaagcacaaac

SEQ ID NO: 3258080 - RNA, 19 nt, Artificial Sequence
  Description of Artificial Sequence: Synthetic oligonucleotide
aucaguagagaagguuugc

SEQ ID NO: 3258081 - RNA, 19 nt, Artificial Sequence
  Description of Artificial Sequence: Synthetic oligonucleotide
ccggaacuuaucaagaucc

SEQ ID NO: 3258082 - RNA, 19 nt, Artificial Sequence
  Description of Artificial Sequence: Synthetic oligonucleotide
augucuuugacaaauccgu

SEQ ID NO: 3258083 - RNA, 19 nt, Artificial Sequence
  Description of Artificial Sequence: Synthetic oligonucleotide
uaucaagauccacaccgcu

SEQ ID NO: 3258084 - RNA, 19 nt, Artificial Sequence
  Description of Artificial Sequence: Synthetic oligonucleotide
cagacuucugaaucuuucc

SEQ ID NO: 3258085 - RNA, 19 nt, Artificial Sequence
  Description of Artificial Sequence: Synthetic oligonucleotide
accacagucaucaguagag

SEQ ID NO: 3258086 - RNA, 19 nt, Artificial Sequence
  Description of Artificial Sequence: Synthetic oligonucleotide
uucugaaucuuuccauccu

SEQ ID NO: 3258087 - RNA, 19 nt, Artificial Sequence
  Description of Artificial Sequence: Synthetic oligonucleotide
agacacacaagcagagagc

SEQ ID NO: 3258088 - RNA, 19 nt, Artificial Sequence
  Description of Artificial Sequence: Synthetic oligonucleotide
agacuucugaaucuuucca

SEQ ID NO: 3258089 - RNA, 19 nt, Artificial Sequence
  Description of Artificial Sequence: Synthetic oligonucleotide
uggcgaagcagaaucuccc

SEQ ID NO: 3258090 - RNA, 19 nt, Artificial Sequence
  Description of Artificial Sequence: Synthetic oligonucleotide
uuugacaaauccguccacu

SEQ ID NO: 3258091 - RNA, 19 nt, Artificial Sequence
  Description of Artificial Sequence: Synthetic oligonucleotide
ucagggguuuauuuucagc

SEQ ID NO: 3258092 - RNA, 19 nt, Artificial Sequence
  Description of Artificial Sequence: Synthetic oligonucleotide
uuuccauccuuguucacau

SEQ ID NO: 3258093 - RNA, 19 nt, Artificial Sequence
  Description of Artificial Sequence: Synthetic oligonucleotide
ugaaucuuuccauccuugu

SEQ ID NO: 3258094 - RNA, 19 nt, Artificial Sequence
  Description of Artificial Sequence: Synthetic oligonucleotide
guucacaucacaguggcga

SEQ ID NO: 3258095 - RNA, 19 nt, Artificial Sequence
  Description of Artificial Sequence: Synthetic oligonucleotide
ucauggcuagccuacuaca

SEQ ID NO: 3258096 - RNA, 19 nt, Artificial Sequence
  Description of Artificial Sequence: Synthetic oligonucleotide
uucccaugguacaggauca

SEQ ID NO: 3258097 - RNA, 19 nt, Artificial Sequence
  Description of Artificial Sequence: Synthetic oligonucleotide
cuacuacaaagcagcaccc

SEQ ID NO: 3258098 - RNA, 19 nt, Artificial Sequence
  Description of Artificial Sequence: Synthetic oligonucleotide
gagaagguuugcugacugg

SEQ ID NO: 3258099 - RNA, 19 nt, Artificial Sequence
  Description of Artificial Sequence: Synthetic oligonucleotide
acagucaucaguagagaag

SEQ ID NO: 3258100 - RNA, 19 nt, Artificial Sequence
  Description of Artificial Sequence: Synthetic oligonucleotide
acacagugccagcucagac

SEQ ID NO: 3258101 - RNA, 19 nt, Artificial Sequence
  Description of Artificial Sequence: Synthetic oligonucleotide
aagcacaaacguacuuccc

SEQ ID NO: 3258102 - RNA, 19 nt, Artificial Sequence
  Description of Artificial Sequence: Synthetic oligonucleotide
caaagcacaaacguacuuc

SEQ ID NO: 3258103 - RNA, 19 nt, Artificial Sequence
  Description of Artificial Sequence: Synthetic oligonucleotide
auccguccacuucugggcc

SEQ ID NO: 3258104 - RNA, 19 nt, Artificial Sequence
  Description of Artificial Sequence: Synthetic oligonucleotide
caucaguagagaagguuug

SEQ ID NO: 3258105 - RNA, 19 nt, Artificial Sequence
  Description of Artificial Sequence: Synthetic oligonucleotide
aagacgucaaaguagaagg

SEQ ID NO: 3258106 - RNA, 19 nt, Artificial Sequence
  Description of Artificial Sequence: Synthetic oligonucleotide
aaugcuauuagucugagua

SEQ ID NO: 3258107 - RNA, 19 nt, Artificial Sequence
  Description of Artificial Sequence: Synthetic oligonucleotide
aggagaacaaagcagcucc

SEQ ID NO: 3258108 - RNA, 19 nt, Artificial Sequence
  Description of Artificial Sequence: Synthetic oligonucleotide
auaucauccagguagaaug

SEQ ID NO: 3258109 - RNA, 19 nt, Artificial Sequence
  Description of Artificial Sequence: Synthetic oligonucleotide
ugaacuugcccucaaaccc

SEQ ID NO: 3258110 - RNA, 19 nt, Artificial Sequence
  Description of Artificial Sequence: Synthetic oligonucleotide
auagacguggucuccaugc

SEQ ID NO: 3258111 - RNA, 19 nt, Artificial Sequence
  Description of Artificial Sequence: Synthetic oligonucleotide
aagaaauagacguggucuc

SEQ ID NO: 3258112 - RNA, 19 nt, Artificial Sequence
  Description of Artificial Sequence: Synthetic oligonucleotide
uguaagacgucaaaguaga

SEQ ID NO: 3258113 - RNA, 19 nt, Artificial Sequence
  Description of Artificial Sequence: Synthetic oligonucleotide
aucagguaggucuugagag

SEQ ID NO: 3258114 - RNA, 19 nt, Artificial Sequence
  Description of Artificial Sequence: Synthetic oligonucleotide
agaacaaagcagcuccgcc

SEQ ID NO: 3258115 - RNA, 19 nt, Artificial Sequence
  Description of Artificial Sequence: Synthetic oligonucleotide
uagugaagaccccaaagag

SEQ ID NO: 3258116 - RNA, 19 nt, Artificial Sequence
  Description of Artificial Sequence: Synthetic oligonucleotide
ugagaggaggagaacaaag

SEQ ID NO: 3258117 - RNA, 19 nt, Artificial Sequence
  Description of Artificial Sequence: Synthetic oligonucleotide
ucaaaguagaagguagacg

SEQ ID NO: 3258118 - RNA, 19 nt, Artificial Sequence
  Description of Artificial Sequence: Synthetic oligonucleotide
aagguagacguccccaggg

SEQ ID NO: 3258119 - RNA, 19 nt, Artificial Sequence
  Description of Artificial Sequence: Synthetic oligonucleotide
cucggaagaagaaauagac

SEQ ID NO: 3258120 - RNA, 19 nt, Artificial Sequence
  Description of Artificial Sequence: Synthetic oligonucleotide
aggaaggauguccaguggc

SEQ ID NO: 3258121 - RNA, 19 nt, Artificial Sequence
  Description of Artificial Sequence: Synthetic oligonucleotide
ugcuccaaagcauagacaa

SEQ ID NO: 3258122 - RNA, 19 nt, Artificial Sequence
  Description of Artificial Sequence: Synthetic oligonucleotide
ucagcuuaaggaaggaugu

SEQ ID NO: 3258123 - RNA, 19 nt, Artificial Sequence
  Description of Artificial Sequence: Synthetic oligonucleotide
aaacccaugcucaauauca

SEQ ID NO: 3258124 - RNA, 19 nt, Artificial Sequence
  Description of Artificial Sequence: Synthetic oligonucleotide
aguagugaagaccccaaag

SEQ ID NO: 3258125 - RNA, 19 nt, Artificial Sequence
  Description of Artificial Sequence: Synthetic oligonucleotide
agcuuaaggaaggaugucc

SEQ ID NO: 3258126 - RNA, 19 nt, Artificial Sequence
  Description of Artificial Sequence: Synthetic oligonucleotide
aggaggagaacaaagcagc

SEQ ID NO: 3258127 - RNA, 19 nt, Artificial Sequence
  Description of Artificial Sequence: Synthetic oligonucleotide
uaagacgucaaaguagaag

SEQ ID NO: 3258128 - RNA, 19 nt, Artificial Sequence
  Description of Artificial Sequence: Synthetic oligonucleotide
agaagaaauagacgugguc

SEQ ID NO: 3258129 - RNA, 19 nt, Artificial Sequence
  Description of Artificial Sequence: Synthetic oligonucleotide
aaaacugcacccuccccag

SEQ ID NO: 3258130 - RNA, 19 nt, Artificial Sequence
  Description of Artificial Sequence: Synthetic oligonucleotide
uugaacuugcccucaaacc

SEQ ID NO: 3258131 - RNA, 19 nt, Artificial Sequence
  Description of Artificial Sequence: Synthetic oligonucleotide
gucacguuuacacacccgg

SEQ ID NO: 3258132 - RNA, 19 nt, Artificial Sequence
  Description of Artificial Sequence: Synthetic oligonucleotide
aguuaaggccuguaagacg

SEQ ID NO: 3258133 - RNA, 19 nt, Artificial Sequence
  Description of Artificial Sequence: Synthetic oligonucleotide
agagcggccaugcagguuc

SEQ ID NO: 3258134 - RNA, 19 nt, Artificial Sequence
  Description of Artificial Sequence: Synthetic oligonucleotide
gacaucaucagguaggucu

SEQ ID NO: 3258135 - RNA, 19 nt, Artificial Sequence
  Description of Artificial Sequence: Synthetic oligonucleotide
cuguaagacgucaaaguag

SEQ ID NO: 3258136 - RNA, 19 nt, Artificial Sequence
  Description of Artificial Sequence: Synthetic oligonucleotide
gugaagaccccaaagagag

SEQ ID NO: 3258137 - RNA, 19 nt, Artificial Sequence
  Description of Artificial Sequence: Synthetic oligonucleotide
augcgcagacugcagaucc

SEQ ID NO: 3258138 - RNA, 19 nt, Artificial Sequence
  Description of Artificial Sequence: Synthetic oligonucleotide
cucagcuuaaggaaggaug

SEQ ID NO: 3258139 - RNA, 19 nt, Artificial Sequence
  Description of Artificial Sequence: Synthetic oligonucleotide
auccagacuccucugcucc

SEQ ID NO: 3258140 - RNA, 19 nt, Artificial Sequence
  Description of Artificial Sequence: Synthetic oligonucleotide
agacacaggaguccaggcc

SEQ ID NO: 3258141 - RNA, 19 nt, Artificial Sequence
  Description of Artificial Sequence: Synthetic oligonucleotide
gacacaggaguccaggccc

SEQ ID NO: 3258142 - RNA, 19 nt, Artificial Sequence
  Description of Artificial Sequence: Synthetic oligonucleotide
uccaggaaugcuauuaguc

SEQ ID NO: 3258143 - RNA, 19 nt, Artificial Sequence
  Description of Artificial Sequence: Synthetic oligonucleotide
agucugaguagugaagacc

SEQ ID NO: 3258144 - RNA, 19 nt, Artificial Sequence
  Description of Artificial Sequence: Synthetic oligonucleotide
caggacaucaucagguagg

SEQ ID NO: 3258145 - RNA, 19 nt, Artificial Sequence
  Description of Artificial Sequence: Synthetic oligonucleotide
agguagaaugcgcagacug

SEQ ID NO: 3258146 - RNA, 19 nt, Artificial Sequence
  Description of Artificial Sequence: Synthetic oligonucleotide
uugagccucagcuuaagga

SEQ ID NO: 3258147 - RNA, 19 nt, Artificial Sequence
  Description of Artificial Sequence: Synthetic oligonucleotide
uuagucugaguagugaaga

SEQ ID NO: 3258148 - RNA, 19 nt, Artificial Sequence
  Description of Artificial Sequence: Synthetic oligonucleotide
uauuagucugaguagugaa

SEQ ID NO: 3258149 - RNA, 19 nt, Artificial Sequence
  Description of Artificial Sequence: Synthetic oligonucleotide
caaaguagaagguagacgu

SEQ ID NO: 3258150 - RNA, 19 nt, Artificial Sequence
  Description of Artificial Sequence: Synthetic oligonucleotide
aacugcacccuccccaguc

SEQ ID NO: 3258151 - RNA, 19 nt, Artificial Sequence
  Description of Artificial Sequence: Synthetic oligonucleotide
aaggaaggauguccagugg

SEQ ID NO: 3258152 - RNA, 19 nt, Artificial Sequence
  Description of Artificial Sequence: Synthetic oligonucleotide
ugcucaauaucauccaggu

SEQ ID NO: 3258153 - RNA, 19 nt, Artificial Sequence
  Description of Artificial Sequence: Synthetic oligonucleotide
agaggaggagaacaaagca

SEQ ID NO: 3258154 - RNA, 19 nt, Artificial Sequence
  Description of Artificial Sequence: Synthetic oligonucleotide
uaucauccagguagaaugc

SEQ ID NO: 3258155 - RNA, 19 nt, Artificial Sequence
  Description of Artificial Sequence: Synthetic oligonucleotide
ucuugagaggaggagaaca

SEQ ID NO: 3258156 - RNA, 19 nt, Artificial Sequence
  Description of Artificial Sequence: Synthetic oligonucleotide
agaaauagacguggucucc

SEQ ID NO: 3258157 - RNA, 19 nt, Artificial Sequence
  Description of Artificial Sequence: Synthetic oligonucleotide
cuccaaagcauagacaaag

SEQ ID NO: 3258158 - RNA, 19 nt, Artificial Sequence
  Description of Artificial Sequence: Synthetic oligonucleotide
gauccaggaaugcuauuag

SEQ ID NO: 3258159 - RNA, 19 nt, Artificial Sequence
  Description of Artificial Sequence: Synthetic oligonucleotide
ugagccucagcuuaaggaa

SEQ ID NO: 3258160 - RNA, 19 nt, Artificial Sequence
  Description of Artificial Sequence: Synthetic oligonucleotide
gaagaaauagacguggucu

SEQ ID NO: 3258161 - RNA, 19 nt, Artificial Sequence
  Description of Artificial Sequence: Synthetic oligonucleotide
uucacaggcccaguuaagg

SEQ ID NO: 3258162 - RNA, 19 nt, Artificial Sequence
  Description of Artificial Sequence: Synthetic oligonucleotide
caugcuccaaagcauagac

SEQ ID NO: 3258163 - RNA, 19 nt, Artificial Sequence
  Description of Artificial Sequence: Synthetic oligonucleotide
augucacguuuacacaccc

SEQ ID NO: 3258164 - RNA, 19 nt, Artificial Sequence
  Description of Artificial Sequence: Synthetic oligonucleotide
agagcaggacaucaucagg

SEQ ID NO: 3258165 - RNA, 19 nt, Artificial Sequence
  Description of Artificial Sequence: Synthetic oligonucleotide
gaggaggagaacaaagcag

SEQ ID NO: 3258166 - RNA, 19 nt, Artificial Sequence
  Description of Artificial Sequence: Synthetic oligonucleotide
guagugaagaccccaaaga

SEQ ID NO: 3258167 - RNA, 19 nt, Artificial Sequence
  Description of Artificial Sequence: Synthetic oligonucleotide
gucugaguagugaagaccc

SEQ ID NO: 3258168 - RNA, 19 nt, Artificial Sequence
  Description of Artificial Sequence: Synthetic oligonucleotide
aaagagagcagagcggcca

SEQ ID NO: 3258169 - RNA, 19 nt, Artificial Sequence
  Description of Artificial Sequence: Synthetic oligonucleotide
ucacguuuacacacccggg

SEQ ID NO: 3258170 - RNA, 19 nt, Artificial Sequence
  Description of Artificial Sequence: Synthetic oligonucleotide
aauagacguggucuccaug

SEQ ID NO: 3258171 - RNA, 19 nt, Artificial Sequence
  Description of Artificial Sequence: Synthetic oligonucleotide
ugaagagcaggacaucauc

SEQ ID NO: 3258172 - RNA, 19 nt, Artificial Sequence
  Description of Artificial Sequence: Synthetic oligonucleotide
ucagacacaggaguccagg

SEQ ID NO: 3258173 - RNA, 19 nt, Artificial Sequence
  Description of Artificial Sequence: Synthetic oligonucleotide
acugagaccucucggaaga

SEQ ID NO: 3258174 - RNA, 19 nt, Artificial Sequence
  Description of Artificial Sequence: Synthetic oligonucleotide
ucgguccucagacacagga

SEQ ID NO: 3258175 - RNA, 19 nt, Artificial Sequence
  Description of Artificial Sequence: Synthetic oligonucleotide
uguccaguggcgauccaag

SEQ ID NO: 3258176 - RNA, 19 nt, Artificial Sequence
  Description of Artificial Sequence: Synthetic oligonucleotide
cuugcccucaaacccaugc

SEQ ID NO: 3258177 - RNA, 19 nt, Artificial Sequence
  Description of Artificial Sequence: Synthetic oligonucleotide
uccaguggcgauccaaggc

SEQ ID NO: 3258178 - RNA, 19 nt, Artificial Sequence
  Description of Artificial Sequence: Synthetic oligonucleotide
aggaguccaggccccaucc

SEQ ID NO: 3258179 - RNA, 19 nt, Artificial Sequence
  Description of Artificial Sequence: Synthetic oligonucleotide
gaagaccccaaagagagca

SEQ ID NO: 3258180 - RNA, 19 nt, Artificial Sequence
  Description of Artificial Sequence: Synthetic oligonucleotide
aaaguagaagguagacguc

SEQ ID NO: 3258181 - RNA, 19 nt, Artificial Sequence
  Description of Artificial Sequence: Synthetic oligonucleotide
aggugagccacccauguca

SEQ ID NO: 3258182 - RNA, 19 nt, Artificial Sequence
  Description of Artificial Sequence: Synthetic oligonucleotide
cuugaugaagagcaggaca

SEQ ID NO: 3258183 - RNA, 19 nt, Artificial Sequence
  Description of Artificial Sequence: Synthetic oligonucleotide
augcuauuagucugaguag

SEQ ID NO: 3258184 - RNA, 19 nt, Artificial Sequence
  Description of Artificial Sequence: Synthetic oligonucleotide
caggaaugcuauuagucug

SEQ ID NO: 3258185 - RNA, 19 nt, Artificial Sequence
  Description of Artificial Sequence: Synthetic oligonucleotide
ucgggcauccuccacugag

SEQ ID NO: 3258186 - RNA, 19 nt, Artificial Sequence
  Description of Artificial Sequence: Synthetic oligonucleotide
acccgggaaaacugcaccc

SEQ ID NO: 3258187 - RNA, 19 nt, Artificial Sequence
  Description of Artificial Sequence: Synthetic oligonucleotide
gaagguagacguccccagg

SEQ ID NO: 3258188 - RNA, 19 nt, Artificial Sequence
  Description of Artificial Sequence: Synthetic oligonucleotide
uccacugagaccucucgga

SEQ ID NO: 3258189 - RNA, 19 nt, Artificial Sequence
  Description of Artificial Sequence: Synthetic oligonucleotide
agagcaguugagccucagc

SEQ ID NO: 3258190 - RNA, 19 nt, Artificial Sequence
  Description of Artificial Sequence: Synthetic oligonucleotide
caugcagguucacaggccc

SEQ ID NO: 3258191 - RNA, 19 nt, Artificial Sequence
  Description of Artificial Sequence: Synthetic oligonucleotide
ugcuauuagucugaguagu

SEQ ID NO: 3258192 - RNA, 19 nt, Artificial Sequence
  Description of Artificial Sequence: Synthetic oligonucleotide
agaagguagacguccccag

SEQ ID NO: 3258193 - RNA, 19 nt, Artificial Sequence
  Description of Artificial Sequence: Synthetic oligonucleotide
gagaggaggagaacaaagc

SEQ ID NO: 3258194 - RNA, 19 nt, Artificial Sequence
  Description of Artificial Sequence: Synthetic oligonucleotide
gucuccaugcuccaaagca

SEQ ID NO: 3258195 - RNA, 19 nt, Artificial Sequence
  Description of Artificial Sequence: Synthetic oligonucleotide
ugucacguuuacacacccg

SEQ ID NO: 3258196 - RNA, 19 nt, Artificial Sequence
  Description of Artificial Sequence: Synthetic oligonucleotide
cacguuuacacacccgggc

SEQ ID NO: 3258197 - RNA, 19 nt, Artificial Sequence
  Description of Artificial Sequence: Synthetic oligonucleotide
uacccgggaaaacugcacc

SEQ ID NO: 3258198 - RNA, 19 nt, Artificial Sequence
  Description of Artificial Sequence: Synthetic oligonucleotide
caugucacguuuacacacc

SEQ ID NO: 3258199 - RNA, 19 nt, Artificial Sequence
  Description of Artificial Sequence: Synthetic oligonucleotide
agggacagagcaguugagc

SEQ ID NO: 3258200 - RNA, 19 nt, Artificial Sequence
  Description of Artificial Sequence: Synthetic oligonucleotide
cuuaaggaaggauguccag

SEQ ID NO: 3258201 - RNA, 19 nt, Artificial Sequence
  Description of Artificial Sequence: Synthetic oligonucleotide
aaugcgcagacugcagauc

SEQ ID NO: 3258202 - RNA, 19 nt, Artificial Sequence
  Description of Artificial Sequence: Synthetic oligonucleotide
acgucaaaguagaagguag

SEQ ID NO: 3258203 - RNA, 19 nt, Artificial Sequence
  Description of Artificial Sequence: Synthetic oligonucleotide
auuagucugaguagugaag

SEQ ID NO: 3258204 - RNA, 19 nt, Artificial Sequence
  Description of Artificial Sequence: Synthetic oligonucleotide
ucacaggcccaguuaaggc

SEQ ID NO: 3258205 - RNA, 19 nt, Artificial Sequence
  Description of Artificial Sequence: Synthetic oligonucleotide
ugaaauuucagaaacuugg

SEQ ID NO: 3258206 - RNA, 19 nt, Artificial Sequence
  Description of Artificial Sequence: Synthetic oligonucleotide
ucauuucugauucuaaugg

SEQ ID NO: 3258207 - RNA, 19 nt, Artificial Sequence
  Description of Artificial Sequence: Synthetic oligonucleotide
aaagucuauguuuauauca

SEQ ID NO: 3258208 - RNA, 19 nt, Artificial Sequence
  Description of Artificial Sequence: Synthetic oligonucleotide
uuuguauucuuuaucauca

SEQ ID NO: 3258209 - RNA, 19 nt, Artificial Sequence
  Description of Artificial Sequence: Synthetic oligonucleotide
uucuuuaucaucaagcuuc

SEQ ID NO: 3258210 - RNA, 19 nt, Artificial Sequence
  Description of Artificial Sequence: Synthetic oligonucleotide
aauuucagaaacuugguau

SEQ ID NO: 3258211 - RNA, 19 nt, Artificial Sequence
  Description of Artificial Sequence: Synthetic oligonucleotide
uuuaucaucaagcuucagc

SEQ ID NO: 3258212 - RNA, 19 nt, Artificial Sequence
  Description of Artificial Sequence: Synthetic oligonucleotide
uucacuuacuucacgaacg

SEQ ID NO: 3258213 - RNA, 19 nt, Artificial Sequence
  Description of Artificial Sequence: Synthetic oligonucleotide
uuaaaucagccucagauac

SEQ ID NO: 3258214 - RNA, 19 nt, Artificial Sequence
  Description of Artificial Sequence: Synthetic oligonucleotide
ucuguaauuaguagaauca

SEQ ID NO: 3258215 - RNA, 19 nt, Artificial Sequence
  Description of Artificial Sequence: Synthetic oligonucleotide
uuaucaucaagcuucagcu

SEQ ID NO: 3258216 - RNA, 19 nt, Artificial Sequence
  Description of Artificial Sequence: Synthetic oligonucleotide
agaaacuugguauuucugg

SEQ ID NO: 3258217 - RNA, 19 nt, Artificial Sequence
  Description of Artificial Sequence: Synthetic oligonucleotide
uucuaauggacucuuuggg

SEQ ID NO: 3258218 - RNA, 19 nt, Artificial Sequence
  Description of Artificial Sequence: Synthetic oligonucleotide
aauuaguagaaucaucaau

SEQ ID NO: 3258219 - RNA, 19 nt, Artificial Sequence
  Description of Artificial Sequence: Synthetic oligonucleotide
aucuguaauuaguagaauc

SEQ ID NO: 3258220 - RNA, 19 nt, Artificial Sequence
  Description of Artificial Sequence: Synthetic oligonucleotide
ucaucaauugaaauuucag

SEQ ID NO: 3258221 - RNA, 19 nt, Artificial Sequence
  Description of Artificial Sequence: Synthetic oligonucleotide
aucaauugaaauuucagaa

SEQ ID NO: 3258222 - RNA, 19 nt, Artificial Sequence
  Description of Artificial Sequence: Synthetic oligonucleotide
uucucuuucauuuuccuga

SEQ ID NO: 3258223 - RNA, 19 nt, Artificial Sequence
  Description of Artificial Sequence: Synthetic oligonucleotide
ucuuucauuuuccugaggu

SEQ ID NO: 3258224 - RNA, 19 nt, Artificial Sequence
  Description of Artificial Sequence: Synthetic oligonucleotide
aucaucaagcuucagcugg

SEQ ID NO: 3258225 - RNA, 19 nt, Artificial Sequence
  Description of Artificial Sequence: Synthetic oligonucleotide
gaaaugaguccuuaaauca

SEQ ID NO: 3258226 - RNA, 19 nt, Artificial Sequence
  Description of Artificial Sequence: Synthetic oligonucleotide
aaugaguccuuaaaucagc

SEQ ID NO: 3258227 - RNA, 19 nt, Artificial Sequence
  Description of Artificial Sequence: Synthetic oligonucleotide
aagaccaccaacauguauc

SEQ ID NO: 3258228 - RNA, 19 nt, Artificial Sequence
  Description of Artificial Sequence: Synthetic oligonucleotide
caauugaaauuucagaaac

SEQ ID NO: 3258229 - RNA, 19 nt, Artificial Sequence
  Description of Artificial Sequence: Synthetic oligonucleotide
auucuaauggacucuuugg

SEQ ID NO: 3258230 - RNA, 19 nt, Artificial Sequence
  Description of Artificial Sequence: Synthetic oligonucleotide
aaaagccuuuacuucuucg

SEQ ID NO: 3258231 - RNA, 19 nt, Artificial Sequence
  Description of Artificial Sequence: Synthetic oligonucleotide
aagucaacuccagucagcc

SEQ ID NO: 3258232 - RNA, 19 nt, Artificial Sequence
  Description of Artificial Sequence: Synthetic oligonucleotide
uauucuuuaucaucaagcu

SEQ ID NO: 3258233 - RNA, 19 nt, Artificial Sequence
  Description of Artificial Sequence: Synthetic oligonucleotide
uacagaggggcaaagacca

SEQ ID NO: 3258234 - RNA, 19 nt, Artificial Sequence
  Description of Artificial Sequence: Synthetic oligonucleotide
uuucauuuuccugaggucc

SEQ ID NO: 3258235 - RNA, 19 nt, Artificial Sequence
  Description of Artificial Sequence: Synthetic oligonucleotide
aaaucagccucagauacag

SEQ ID NO: 3258236 - RNA, 19 nt, Artificial Sequence
  Description of Artificial Sequence: Synthetic oligonucleotide
uucauuucugauucuaaug

SEQ ID NO: 3258237 - RNA, 19 nt, Artificial Sequence
  Description of Artificial Sequence: Synthetic oligonucleotide
uguauucuuuaucaucaag

SEQ ID NO: 3258238 - RNA, 19 nt, Artificial Sequence
  Description of Artificial Sequence: Synthetic oligonucleotide
uuuuguauucuuuaucauc

SEQ ID NO: 3258239 - RNA, 19 nt, Artificial Sequence
  Description of Artificial Sequence: Synthetic oligonucleotide
uuuacuucuucgaagcagu

SEQ ID NO: 3258240 - RNA, 19 nt, Artificial Sequence
  Description of Artificial Sequence: Synthetic oligonucleotide
gauucuaauggacucuuug

SEQ ID NO: 3258241 - RNA, 19 nt, Artificial Sequence
  Description of Artificial Sequence: Synthetic oligonucleotide
uuaguagaaucaucaauug

SEQ ID NO: 3258242 - RNA, 19 nt, Artificial Sequence
  Description of Artificial Sequence: Synthetic oligonucleotide
acuucuucgaagcaguuca

SEQ ID NO: 3258243 - RNA, 19 nt, Artificial Sequence
  Description of Artificial Sequence: Synthetic oligonucleotide
cauucuucauuucugauuc

SEQ ID NO: 3258244 - RNA, 19 nt, Artificial Sequence
  Description of Artificial Sequence: Synthetic oligonucleotide
agaaucaucaauugaaauu

SEQ ID NO: 3258245 - RNA, 19 nt, Artificial Sequence
  Description of Artificial Sequence: Synthetic oligonucleotide
guaauuaguagaaucauca

SEQ ID NO: 3258246 - RNA, 19 nt, Artificial Sequence
  Description of Artificial Sequence: Synthetic oligonucleotide
gauacagaggggcaaagac

SEQ ID NO: 3258247 - RNA, 19 nt, Artificial Sequence
  Description of Artificial Sequence: Synthetic oligonucleotide
aucagccucagauacagag

SEQ ID NO: 3258248 - RNA, 19 nt, Artificial Sequence
  Description of Artificial Sequence: Synthetic oligonucleotide
aaagccuuuacuucuucga

SEQ ID NO: 3258249 - RNA, 19 nt, Artificial Sequence
  Description of Artificial Sequence: Synthetic oligonucleotide
guauucuuuaucaucaagc

SEQ ID NO: 3258250 - RNA, 19 nt, Artificial Sequence
  Description of Artificial Sequence: Synthetic oligonucleotide
uugaaauuucagaaacuug

SEQ ID NO: 3258251 - RNA, 19 nt, Artificial Sequence
  Description of Artificial Sequence: Synthetic oligonucleotide
ucaauugaaauuucagaaa

SEQ ID NO: 3258252 - RNA, 19 nt, Artificial Sequence
  Description of Artificial Sequence: Synthetic oligonucleotide
uguaauuaguagaaucauc

SEQ ID NO: 3258253 - RNA, 19 nt, Artificial Sequence
  Description of Artificial Sequence: Synthetic oligonucleotide
uucaccauucuucauuucu

SEQ ID NO: 3258254 - RNA, 19 nt, Artificial Sequence
  Description of Artificial Sequence: Synthetic oligonucleotide
gaugcauaucuguaauuag

SEQ ID NO: 3258255 - RNA, 19 nt, Artificial Sequence
  Description of Artificial Sequence: Synthetic oligonucleotide
uuucugauucuaauggacu

SEQ ID NO: 3258256 - RNA, 19 nt, Artificial Sequence
  Description of Artificial Sequence: Synthetic oligonucleotide
aaaugaguccuuaaaucag

SEQ ID NO: 3258257 - RNA, 19 nt, Artificial Sequence
  Description of Artificial Sequence: Synthetic oligonucleotide
aagucuauguuuauaucag

SEQ ID NO: 3258258 - RNA, 19 nt, Artificial Sequence
  Description of Artificial Sequence: Synthetic oligonucleotide
uauuucuggaaaugagucc

SEQ ID NO: 3258259 - RNA, 19 nt, Artificial Sequence
  Description of Artificial Sequence: Synthetic oligonucleotide
ucuauguuuauaucaguaa

SEQ ID NO: 3258260 - RNA, 19 nt, Artificial Sequence
  Description of Artificial Sequence: Synthetic oligonucleotide
aagcaguucaccauucuuc

SEQ ID NO: 3258261 - RNA, 19 nt, Artificial Sequence
  Description of Artificial Sequence: Synthetic oligonucleotide
uauguuuauaucaguaauu

SEQ ID NO: 3258262 - RNA, 19 nt, Artificial Sequence
  Description of Artificial Sequence: Synthetic oligonucleotide
ugguauuucuggaaaugag

SEQ ID NO: 3258263 - RNA, 19 nt, Artificial Sequence
  Description of Artificial Sequence: Synthetic oligonucleotide
auuucugauucuaauggac

SEQ ID NO: 3258264 - RNA, 19 nt, Artificial Sequence
  Description of Artificial Sequence: Synthetic oligonucleotide
aguagaaucaucaauugaa

SEQ ID NO: 3258265 - RNA, 19 nt, Artificial Sequence
  Description of Artificial Sequence: Synthetic oligonucleotide
uucacgaacgcuuuuguau

SEQ ID NO: 3258266 - RNA, 19 nt, Artificial Sequence
  Description of Artificial Sequence: Synthetic oligonucleotide
aaauuucagaaacuuggua

SEQ ID NO: 3258267 - RNA, 19 nt, Artificial Sequence
  Description of Artificial Sequence: Synthetic oligonucleotide
cauaucuguaauuaguaga

SEQ ID NO: 3258268 - RNA, 19 nt, Artificial Sequence
  Description of Artificial Sequence: Synthetic oligonucleotide
auuaguagaaucaucaauu

SEQ ID NO: 3258269 - RNA, 19 nt, Artificial Sequence
  Description of Artificial Sequence: Synthetic oligonucleotide
gaguccuuaaaucagccuc

SEQ ID NO: 3258270 - RNA, 19 nt, Artificial Sequence
  Description of Artificial Sequence: Synthetic oligonucleotide
acuccagucagccucuccg

SEQ ID NO: 3258271 - RNA, 19 nt, Artificial Sequence
  Description of Artificial Sequence: Synthetic oligonucleotide
ucuaauggacucuuugggu

SEQ ID NO: 3258272 - RNA, 19 nt, Artificial Sequence
  Description of Artificial Sequence: Synthetic oligonucleotide
uggaaaugaguccuuaaau

SEQ ID NO: 3258273 - RNA, 19 nt, Artificial Sequence
  Description of Artificial Sequence: Synthetic oligonucleotide
ucagccucagauacagagg

SEQ ID NO: 3258274 - RNA, 19 nt, Artificial Sequence
  Description of Artificial Sequence: Synthetic oligonucleotide
aagagaugcauaucuguaa

SEQ ID NO: 3258275 - RNA, 19 nt, Artificial Sequence
  Description of Artificial Sequence: Synthetic oligonucleotide
ucaagcuucagcuggguaa

SEQ ID NO: 3258276 - RNA, 19 nt, Artificial Sequence
  Description of Artificial Sequence: Synthetic oligonucleotide
ucuucgaagcaguucacca

SEQ ID NO: 3258277 - RNA, 19 nt, Artificial Sequence
  Description of Artificial Sequence: Synthetic oligonucleotide
ucuccguugcgucaaacca

SEQ ID NO: 3258278 - RNA, 19 nt, Artificial Sequence
  Description of Artificial Sequence: Synthetic oligonucleotide
aauggacucuuuggguucc

SEQ ID NO: 3258279 - RNA, 19 nt, Artificial Sequence
  Description of Artificial Sequence: Synthetic oligonucleotide
auacagaggggcaaagacc

SEQ ID NO: 3258280 - RNA, 19 nt, Artificial Sequence
  Description of Artificial Sequence: Synthetic oligonucleotide
uaguagaaucaucaauuga

SEQ ID NO: 3258281 - RNA, 19 nt, Artificial Sequence
  Description of Artificial Sequence: Synthetic oligonucleotide
aacgcuuuuguauucuuua

SEQ ID NO: 3258282 - RNA, 19 nt, Artificial Sequence
  Description of Artificial Sequence: Synthetic oligonucleotide
ugcauaucuguaauuagua

SEQ ID NO: 3258283 - RNA, 19 nt, Artificial Sequence
  Description of Artificial Sequence: Synthetic oligonucleotide
gacucuuuggguuccauuc

SEQ ID NO: 3258284 - RNA, 19 nt, Artificial Sequence
  Description of Artificial Sequence: Synthetic oligonucleotide
auuucuggaaaugaguccu

SEQ ID NO: 3258285 - RNA, 19 nt, Artificial Sequence
  Description of Artificial Sequence: Synthetic oligonucleotide
gaaacuugguauuucugga

SEQ ID NO: 3258286 - RNA, 19 nt, Artificial Sequence
  Description of Artificial Sequence: Synthetic oligonucleotide
ucagaaacuugguauuucu

SEQ ID NO: 3258287 - RNA, 19 nt, Artificial Sequence
  Description of Artificial Sequence: Synthetic oligonucleotide
aacuugguauuucuggaaa

SEQ ID NO: 3258288 - RNA, 19 nt, Artificial Sequence
  Description of Artificial Sequence: Synthetic oligonucleotide
uucauuuuccugagguccc

SEQ ID NO: 3258289 - RNA, 19 nt, Artificial Sequence
  Description of Artificial Sequence: Synthetic oligonucleotide
cagccucagauacagaggg

SEQ ID NO: 3258290 - RNA, 19 nt, Artificial Sequence
  Description of Artificial Sequence: Synthetic oligonucleotide
ucaccauucuucauuucug

SEQ ID NO: 3258291 - RNA, 19 nt, Artificial Sequence
  Description of Artificial Sequence: Synthetic oligonucleotide
ucaucaagcuucagcuggg

SEQ ID NO: 3258292 - RNA, 19 nt, Artificial Sequence
  Description of Artificial Sequence: Synthetic oligonucleotide
agaagucaacuccagucag

SEQ ID NO: 3258293 - RNA, 19 nt, Artificial Sequence
  Description of Artificial Sequence: Synthetic oligonucleotide
aauugaaauuucagaaacu

SEQ ID NO: 3258294 - RNA, 19 nt, Artificial Sequence
  Description of Artificial Sequence: Synthetic oligonucleotide
uuuccugaggucccgagaa

SEQ ID NO: 3258295 - RNA, 19 nt, Artificial Sequence
  Description of Artificial Sequence: Synthetic oligonucleotide
caucaauugaaauuucaga

SEQ ID NO: 3258296 - RNA, 19 nt, Artificial Sequence
  Description of Artificial Sequence: Synthetic oligonucleotide
uggguaaagucuauguuua

SEQ ID NO: 3258297 - RNA, 19 nt, Artificial Sequence
  Description of Artificial Sequence: Synthetic oligonucleotide
auugaaauuucagaaacuu

SEQ ID NO: 3258298 - RNA, 19 nt, Artificial Sequence
  Description of Artificial Sequence: Synthetic oligonucleotide
aaacuugguauuucuggaa

SEQ ID NO: 3258299 - RNA, 19 nt, Artificial Sequence
  Description of Artificial Sequence: Synthetic oligonucleotide
aggggcaaagaccaccaac

SEQ ID NO: 3258300 - RNA, 19 nt, Artificial Sequence
  Description of Artificial Sequence: Synthetic oligonucleotide
ucacuuacuucacgaacgc

SEQ ID NO: 3258301 - RNA, 19 nt, Artificial Sequence
  Description of Artificial Sequence: Synthetic oligonucleotide
uagaaucaucaauugaaau

SEQ ID NO: 3258302 - RNA, 19 nt, Artificial Sequence
  Description of Artificial Sequence: Synthetic oligonucleotide
aaucaucaauugaaauuuc

SEQ ID NO: 3258303 - RNA, 19 nt, Artificial Sequence
  Description of Artificial Sequence: Synthetic oligonucleotide
ucuuuaucaucaagcuuca

SEQ ID NO: 3258304 - RNA, 19 nt, Artificial Sequence
  Description of Artificial Sequence: Synthetic oligonucleotide
uucugauucuaauggacuc

SEQ ID NO: 3258305 - RNA, 19 nt, Artificial Sequence
  Description of Artificial Sequence: Synthetic oligonucleotide
ugauaaauaaauaaaauac

SEQ ID NO: 3258306 - RNA, 19 nt, Artificial Sequence
  Description of Artificial Sequence: Synthetic oligonucleotide
aaauaaauaaaauacuuua

SEQ ID NO: 3258307 - RNA, 19 nt, Artificial Sequence
  Description of Artificial Sequence: Synthetic oligonucleotide
cucaaaaccaccuugaaug

SEQ ID NO: 3258308 - RNA, 19 nt, Artificial Sequence
  Description of Artificial Sequence: Synthetic oligonucleotide
accaauuguacuuacagag

SEQ ID NO: 3258309 - RNA, 19 nt, Artificial Sequence
  Description of Artificial Sequence: Synthetic oligonucleotide
auucccagcaaccacaugg

SEQ ID NO: 3258310 - RNA, 19 nt, Artificial Sequence
  Description of Artificial Sequence: Synthetic oligonucleotide
uaaauaaaauacuuuaaaa

SEQ ID NO: 3258311 - RNA, 19 nt, Artificial Sequence
  Description of Artificial Sequence: Synthetic oligonucleotide
ucuucugacaggaaggcag

SEQ ID NO: 3258312 - RNA, 19 nt, Artificial Sequence
  Description of Artificial Sequence: Synthetic oligonucleotide
auuguacuuacagaggucc

SEQ ID NO: 3258313 - RNA, 19 nt, Artificial Sequence
  Description of Artificial Sequence: Synthetic oligonucleotide
uacaugauaaauaaauaaa

SEQ ID NO: 3258314 - RNA, 19 nt, Artificial Sequence
  Description of Artificial Sequence: Synthetic oligonucleotide
acaggugugggcuagagag

SEQ ID NO: 3258315 - RNA, 19 nt, Artificial Sequence
  Description of Artificial Sequence: Synthetic oligonucleotide
auaaauaaaauacuuuaaa

SEQ ID NO: 3258316 - RNA, 19 nt, Artificial Sequence
  Description of Artificial Sequence: Synthetic oligonucleotide
uagacuguauacaugauaa

SEQ ID NO: 3258317 - RNA, 19 nt, Artificial Sequence
  Description of Artificial Sequence: Synthetic oligonucleotide
uuuuagagugaacaggugu

SEQ ID NO: 3258318 - RNA, 19 nt, Artificial Sequence
  Description of Artificial Sequence: Synthetic oligonucleotide
uaaauaaauaaaauacuuu

SEQ ID NO: 3258319 - RNA, 19 nt, Artificial Sequence
  Description of Artificial Sequence: Synthetic oligonucleotide
uuuagagugaacaggugug

SEQ ID NO: 3258320 - RNA, 19 nt, Artificial Sequence
  Description of Artificial Sequence: Synthetic oligonucleotide
augauaaauaaauaaaaua

SEQ ID NO: 3258321 - RNA, 19 nt, Artificial Sequence
  Description of Artificial Sequence: Synthetic oligonucleotide
auacaugauaaauaaauaa

SEQ ID NO: 3258322 - RNA, 19 nt, Artificial Sequence
  Description of Artificial Sequence: Synthetic oligonucleotide
cuugaaugagaucuggugc

SEQ ID NO: 3258323 - RNA, 19 nt, Artificial Sequence
  Description of Artificial Sequence: Synthetic oligonucleotide
cagaagacuguauagacug

SEQ ID NO: 3258324 - RNA, 19 nt, Artificial Sequence
  Description of Artificial Sequence: Synthetic oligonucleotide
aaggcagaagacuguauag

SEQ ID NO: 3258325 - RNA, 19 nt, Artificial Sequence
  Description of Artificial Sequence: Synthetic oligonucleotide
aauaaauaaaauacuuuaa

SEQ ID NO: 3258326 - RNA, 19 nt, Artificial Sequence
  Description of Artificial Sequence: Synthetic oligonucleotide
cacaugguagcucaaaacc

SEQ ID NO: 3258327 - RNA, 19 nt, Artificial Sequence
  Description of Artificial Sequence: Synthetic oligonucleotide
uugaaugagaucuggugcc

SEQ ID NO: 3258328 - RNA, 19 nt, Artificial Sequence
  Description of Artificial Sequence: Synthetic oligonucleotide
agagagauggcucaguggu

SEQ ID NO: 3258329 - RNA, 19 nt, Artificial Sequence
  Description of Artificial Sequence: Synthetic oligonucleotide
gacuguauagacuguauac

SEQ ID NO: 3258330 - RNA, 19 nt, Artificial Sequence
  Description of Artificial Sequence: Synthetic oligonucleotide
uauacaugauaaauaaaua

SEQ ID NO: 3258331 - RNA, 19 nt, Artificial Sequence
  Description of Artificial Sequence: Synthetic oligonucleotide
guauagacuguauacauga

SEQ ID NO: 3258332 - RNA, 19 nt, Artificial Sequence
  Description of Artificial Sequence: Synthetic oligonucleotide
accaccuugaaugagaucu

SEQ ID NO: 3258333 - RNA, 19 nt, Artificial Sequence
  Description of Artificial Sequence: Synthetic oligonucleotide
uguauagacuguauacaug

SEQ ID NO: 3258334 - RNA, 19 nt, Artificial Sequence
  Description of Artificial Sequence: Synthetic oligonucleotide
ucaauucccagcaaccaca

SEQ ID NO: 3258335 - RNA, 19 nt, Artificial Sequence
  Description of Artificial Sequence: Synthetic oligonucleotide
uuaagagcaccaauuguac

SEQ ID NO: 3258336 - RNA, 19 nt, Artificial Sequence
  Description of Artificial Sequence: Synthetic oligonucleotide
agagugaacaggugugggc

SEQ ID NO: 3258337 - RNA, 19 nt, Artificial Sequence
  Description of Artificial Sequence: Synthetic oligonucleotide
auaaauaaauaaaauacuu

SEQ ID NO: 3258338 - RNA, 19 nt, Artificial Sequence
  Description of Artificial Sequence: Synthetic oligonucleotide
agguccugaguucaauucc

SEQ ID NO: 3258339 - RNA, 19 nt, Artificial Sequence
  Description of Artificial Sequence: Synthetic oligonucleotide
aguucaauucccagcaacc

SEQ ID NO: 3258340 - RNA, 19 nt, Artificial Sequence
  Description of Artificial Sequence: Synthetic oligonucleotide
gauaaauaaauaaaauacu

SEQ ID NO: 3258341 - RNA, 19 nt, Artificial Sequence
  Description of Artificial Sequence: Synthetic oligonucleotide
aaugagaucuggugcccuc

SEQ ID NO: 3258342 - RNA, 19 nt, Artificial Sequence
  Description of Artificial Sequence: Synthetic oligonucleotide
ugguuaagagcaccaauug

SEQ ID NO: 3258343 - RNA, 19 nt, Artificial Sequence
  Description of Artificial Sequence: Synthetic oligonucleotide
aagagcaccaauuguacuu

SEQ ID NO: 3258344 - RNA, 19 nt, Artificial Sequence
  Description of Artificial Sequence: Synthetic oligonucleotide
uguauacaugauaaauaaa

SEQ ID NO: 3258345 - RNA, 19 nt, Artificial Sequence
  Description of Artificial Sequence: Synthetic oligonucleotide
uuagagugaacaggugugg

SEQ ID NO: 3258346 - RNA, 19 nt, Artificial Sequence
  Description of Artificial Sequence: Synthetic oligonucleotide
acaugauaaauaaauaaaa

SEQ ID NO: 3258347 - RNA, 19 nt, Artificial Sequence
  Description of Artificial Sequence: Synthetic oligonucleotide
aauuguacuuacagagguc

SEQ ID NO: 3258348 - RNA, 19 nt, Artificial Sequence
  Description of Artificial Sequence: Synthetic oligonucleotide
aaaaccaccuugaaugaga

SEQ ID NO: 3258349 - RNA, 19 nt, Artificial Sequence
  Description of Artificial Sequence: Synthetic oligonucleotide
cuguauacaugauaaauaa

SEQ ID NO: 3258350 - RNA, 19 nt, Artificial Sequence
  Description of Artificial Sequence: Synthetic oligonucleotide
guagcucaaaaccaccuug

SEQ ID NO: 3258351 - RNA, 19 nt, Artificial Sequence
  Description of Artificial Sequence: Synthetic oligonucleotide
uagagagauggcucagugg

SEQ ID NO: 3258352 - RNA, 19 nt, Artificial Sequence
  Description of Artificial Sequence: Synthetic oligonucleotide
uucaauucccagcaaccac

SEQ ID NO: 3258353 - RNA, 19 nt, Artificial Sequence
  Description of Artificial Sequence: Synthetic oligonucleotide
ucaaaaccaccuugaauga

SEQ ID NO: 3258354 - RNA, 19 nt, Artificial Sequence
  Description of Artificial Sequence: Synthetic oligonucleotide
caugguagcucaaaaccac

SEQ ID NO: 3258355 - RNA, 19 nt, Artificial Sequence
  Description of Artificial Sequence: Synthetic oligonucleotide
ucagugguuaagagcacca

SEQ ID NO: 3258356 - RNA, 19 nt, Artificial Sequence
  Description of Artificial Sequence: Synthetic oligonucleotide
guauacaugauaaauaaau

SEQ ID NO: 3258357 - RNA, 19 nt, Artificial Sequence
  Description of Artificial Sequence: Synthetic oligonucleotide
gaguucaauucccagcaac

SEQ ID NO: 3258358 - RNA, 19 nt, Artificial Sequence
  Description of Artificial Sequence: Synthetic oligonucleotide
gugugggcuagagagaugg

SEQ ID NO: 3258359 - RNA, 19 nt, Artificial Sequence
  Description of Artificial Sequence: Synthetic oligonucleotide
acuguauagacuguauaca

SEQ ID NO: 3258360 - RNA, 19 nt, Artificial Sequence
  Description of Artificial Sequence: Synthetic oligonucleotide
uagcucaaaaccaccuuga

SEQ ID NO: 3258361 - RNA, 19 nt, Artificial Sequence
  Description of Artificial Sequence: Synthetic oligonucleotide
auagacuguauacaugaua

SEQ ID NO: 3258362 - RNA, 19 nt, Artificial Sequence
  Description of Artificial Sequence: Synthetic oligonucleotide
uguacuuacagagguccug

SEQ ID NO: 3258363 - RNA, 19 nt, Artificial Sequence
  Description of Artificial Sequence: Synthetic oligonucleotide
gcaccaauuguacuuacag

SEQ ID NO: 3258364 - RNA, 19 nt, Artificial Sequence
  Description of Artificial Sequence: Synthetic oligonucleotide
ugguagcucaaaaccaccu

SEQ ID NO: 3258365 - RNA, 19 nt, Artificial Sequence
  Description of Artificial Sequence: Synthetic oligonucleotide
cugaguucaauucccagca

SEQ ID NO: 3258366 - RNA, 19 nt, Artificial Sequence
  Description of Artificial Sequence: Synthetic oligonucleotide
uagagugaacagguguggg

SEQ ID NO: 3258367 - RNA, 19 nt, Artificial Sequence
  Description of Artificial Sequence: Synthetic oligonucleotide
ugggcuagagagauggcuc

SEQ ID NO: 3258368 - RNA, 19 nt, Artificial Sequence
  Description of Artificial Sequence: Synthetic oligonucleotide
guuaagagcaccaauugua

SEQ ID NO: 3258369 - RNA, 19 nt, Artificial Sequence
  Description of Artificial Sequence: Synthetic oligonucleotide
caugauaaauaaauaaaau

SEQ ID NO: 3258370 - RNA, 19 nt, Artificial Sequence
  Description of Artificial Sequence: Synthetic oligonucleotide
cugacaggaaggcagaaga

SEQ ID NO: 3258371 - RNA, 19 nt, Artificial Sequence
  Description of Artificial Sequence: Synthetic oligonucleotide
cuagagagauggcucagug

SEQ ID NO: 3258372 - RNA, 19 nt, Artificial Sequence
  Description of Artificial Sequence: Synthetic oligonucleotide
uaagagcaccaauuguacu

SEQ ID NO: 3258373 - RNA, 19 nt, Artificial Sequence
  Description of Artificial Sequence: Synthetic oligonucleotide
acuguauacaugauaaaua

SEQ ID NO: 3258374 - RNA, 19 nt, Artificial Sequence
  Description of Artificial Sequence: Synthetic oligonucleotide
acaggaaggcagaagacug

SEQ ID NO: 3258375 - RNA, 19 nt, Artificial Sequence
  Description of Artificial Sequence: Synthetic oligonucleotide
agaucuggugcccucuucu

SEQ ID NO: 3258376 - RNA, 19 nt, Artificial Sequence
  Description of Artificial Sequence: Synthetic oligonucleotide
uggcucagugguuaagagc

SEQ ID NO: 3258377 - RNA, 19 nt, Artificial Sequence
  Description of Artificial Sequence: Synthetic oligonucleotide
gaaggcagaagacuguaua

SEQ ID NO: 3258378 - RNA, 19 nt, Artificial Sequence
  Description of Artificial Sequence: Synthetic oligonucleotide
agugguuaagagcaccaau

SEQ ID NO: 3258379 - RNA, 19 nt, Artificial Sequence
  Description of Artificial Sequence: Synthetic oligonucleotide
uccugaguucaauucccag

SEQ ID NO: 3258380 - RNA, 19 nt, Artificial Sequence
  Description of Artificial Sequence: Synthetic oligonucleotide
ucuggugcccucuucugac

SEQ ID NO: 3258381 - RNA, 19 nt, Artificial Sequence
  Description of Artificial Sequence: Synthetic oligonucleotide
gagguccugaguucaauuc

SEQ ID NO: 3258382 - RNA, 19 nt, Artificial Sequence
  Description of Artificial Sequence: Synthetic oligonucleotide
augguagcucaaaaccacc

SEQ ID NO: 3258383 - RNA, 19 nt, Artificial Sequence
  Description of Artificial Sequence: Synthetic oligonucleotide
ucugacaggaaggcagaag

SEQ ID NO: 3258384 - RNA, 19 nt, Artificial Sequence
  Description of Artificial Sequence: Synthetic oligonucleotide
ugacaggaaggcagaagac

SEQ ID NO: 3258385 - RNA, 19 nt, Artificial Sequence
  Description of Artificial Sequence: Synthetic oligonucleotide
auggcucagugguuaagag

SEQ ID NO: 3258386 - RNA, 19 nt, Artificial Sequence
  Description of Artificial Sequence: Synthetic oligonucleotide
acuuacagagguccugagu

SEQ ID NO: 3258387 - RNA, 19 nt, Artificial Sequence
  Description of Artificial Sequence: Synthetic oligonucleotide
aaccaccuugaaugagauc

SEQ ID NO: 3258388 - RNA, 19 nt, Artificial Sequence
  Description of Artificial Sequence: Synthetic oligonucleotide
ccaauuguacuuacagagg

SEQ ID NO: 3258389 - RNA, 19 nt, Artificial Sequence
  Description of Artificial Sequence: Synthetic oligonucleotide
uauagacuguauacaugau

SEQ ID NO: 3258390 - RNA, 19 nt, Artificial Sequence
  Description of Artificial Sequence: Synthetic oligonucleotide
uacagagguccugaguuca

SEQ ID NO: 3258391 - RNA, 19 nt, Artificial Sequence
  Description of Artificial Sequence: Synthetic oligonucleotide
aacaggugugggcuagaga

SEQ ID NO: 3258392 - RNA, 19 nt, Artificial Sequence
  Description of Artificial Sequence: Synthetic oligonucleotide
ugaaugagaucuggugccc

SEQ ID NO: 3258393 - RNA, 19 nt, Artificial Sequence
  Description of Artificial Sequence: Synthetic oligonucleotide
ggcagaagacuguauagac

SEQ ID NO: 3258394 - RNA, 19 nt, Artificial Sequence
  Description of Artificial Sequence: Synthetic oligonucleotide
acaugguagcucaaaacca

SEQ ID NO: 3258395 - RNA, 19 nt, Artificial Sequence
  Description of Artificial Sequence: Synthetic oligonucleotide
caauuguacuuacagaggu

SEQ ID NO: 3258396 - RNA, 19 nt, Artificial Sequence
  Description of Artificial Sequence: Synthetic oligonucleotide
uggugcccucuucugacag

SEQ ID NO: 3258397 - RNA, 19 nt, Artificial Sequence
  Description of Artificial Sequence: Synthetic oligonucleotide
uucccagcaaccacauggu

SEQ ID NO: 3258398 - RNA, 19 nt, Artificial Sequence
  Description of Artificial Sequence: Synthetic oligonucleotide
ccagcaaccacaugguagc

SEQ ID NO: 3258399 - RNA, 19 nt, Artificial Sequence
  Description of Artificial Sequence: Synthetic oligonucleotide
uuguacuuacagagguccu

SEQ ID NO: 3258400 - RNA, 19 nt, Artificial Sequence
  Description of Artificial Sequence: Synthetic oligonucleotide
ggcucagugguuaagagca

SEQ ID NO: 3258401 - RNA, 19 nt, Artificial Sequence
  Description of Artificial Sequence: Synthetic oligonucleotide
ccuugaaugagaucuggug

SEQ ID NO: 3258402 - RNA, 19 nt, Artificial Sequence
  Description of Artificial Sequence: Synthetic oligonucleotide
ccugaguucaauucccagc

SEQ ID NO: 3258403 - RNA, 19 nt, Artificial Sequence
  Description of Artificial Sequence: Synthetic oligonucleotide
agacuguauagacuguaua

SEQ ID NO: 3258404 - RNA, 19 nt, Artificial Sequence
  Description of Artificial Sequence: Synthetic oligonucleotide
uacuuacagagguccugag

SEQ ID NO: 3258405 - RNA, 19 nt, Artificial Sequence
  Description of Artificial Sequence: Synthetic oligonucleotide
ucuaauaucaauuagaauu

SEQ ID NO: 3258406 - RNA, 19 nt, Artificial Sequence
  Description of Artificial Sequence: Synthetic oligonucleotide
aauccaaauauacaacagc

SEQ ID NO: 3258407 - RNA, 19 nt, Artificial Sequence
  Description of Artificial Sequence: Synthetic oligonucleotide
uuugauauggcucagauuu

SEQ ID NO: 3258408 - RNA, 19 nt, Artificial Sequence
  Description of Artificial Sequence: Synthetic oligonucleotide
agaauuuuccuuuaaaguc

SEQ ID NO: 3258409 - RNA, 19 nt, Artificial Sequence
  Description of Artificial Sequence: Synthetic oligonucleotide
gaaaacaacauuuagaaaa

SEQ ID NO: 3258410 - RNA, 19 nt, Artificial Sequence
  Description of Artificial Sequence: Synthetic oligonucleotide
aacaguacagauuugauau

SEQ ID NO: 3258411 - RNA, 19 nt, Artificial Sequence
  Description of Artificial Sequence: Synthetic oligonucleotide
aauaaaguugacauuaguc

SEQ ID NO: 3258412 - RNA, 19 nt, Artificial Sequence
  Description of Artificial Sequence: Synthetic oligonucleotide
cauuuagaaaacaaaagcc

SEQ ID NO: 3258413 - RNA, 19 nt, Artificial Sequence
  Description of Artificial Sequence: Synthetic oligonucleotide
aagaaaugccuuuucuucc

SEQ ID NO: 3258414 - RNA, 19 nt, Artificial Sequence
  Description of Artificial Sequence: Synthetic oligonucleotide
uuagaauuuuccuuuaaag

SEQ ID NO: 3258415 - RNA, 19 nt, Artificial Sequence
  Description of Artificial Sequence: Synthetic oligonucleotide
uuucauuucaccuucugag

SEQ ID NO: 3258416 - RNA, 19 nt, Artificial Sequence
  Description of Artificial Sequence: Synthetic oligonucleotide
auaaaguugacauuagucu

SEQ ID NO: 3258417 - RNA, 19 nt, Artificial Sequence
  Description of Artificial Sequence: Synthetic oligonucleotide
uuuaaagucccgaacacug

SEQ ID NO: 3258418 - RNA, 19 nt, Artificial Sequence
  Description of Artificial Sequence: Synthetic oligonucleotide
aacauguuaucaucucugc

SEQ ID NO: 3258419 - RNA, 19 nt, Artificial Sequence
  Description of Artificial Sequence: Synthetic oligonucleotide
agaacauuuaauaaugcac

SEQ ID NO: 3258420 - RNA, 19 nt, Artificial Sequence
  Description of Artificial Sequence: Synthetic oligonucleotide
uguucugcaauccaaauau

SEQ ID NO: 3258421 - RNA, 19 nt, Artificial Sequence
  Description of Artificial Sequence: Synthetic oligonucleotide
uuuucaaccucacugucag

SEQ ID NO: 3258422 - RNA, 19 nt, Artificial Sequence
  Description of Artificial Sequence: Synthetic oligonucleotide
uaugucagagaucuguucc

SEQ ID NO: 3258423 - RNA, 19 nt, Artificial Sequence
  Description of Artificial Sequence: Synthetic oligonucleotide
uauacaacagcuuggaaaa

SEQ ID NO: 3258424 - RNA, 19 nt, Artificial Sequence
  Description of Artificial Sequence: Synthetic oligonucleotide
ucaucuaugucagagaucu

SEQ ID NO: 3258425 - RNA, 19 nt, Artificial Sequence
  Description of Artificial Sequence: Synthetic oligonucleotide
uacugcaucaucuauguca

SEQ ID NO: 3258426 - RNA, 19 nt, Artificial Sequence
  Description of Artificial Sequence: Synthetic oligonucleotide
uucucuaauaucaauuaga

SEQ ID NO: 3258427 - RNA, 19 nt, Artificial Sequence
  Description of Artificial Sequence: Synthetic oligonucleotide
aaguauucaccuuacaaau

SEQ ID NO: 3258428 - RNA, 19 nt, Artificial Sequence
  Description of Artificial Sequence: Synthetic oligonucleotide
uauggcucagauuuuacag

SEQ ID NO: 3258429 - RNA, 19 nt, Artificial Sequence
  Description of Artificial Sequence: Synthetic oligonucleotide
aaaacaaaagccaauguaa

SEQ ID NO: 3258430 - RNA, 19 nt, Artificial Sequence
  Description of Artificial Sequence: Synthetic oligonucleotide
uuggaaaacaacauuuaga

SEQ ID NO: 3258431 - RNA, 19 nt, Artificial Sequence
  Description of Artificial Sequence: Synthetic oligonucleotide
uagaauuuuccuuuaaagu

SEQ ID NO: 3258432 - RNA, 19 nt, Artificial Sequence
  Description of Artificial Sequence: Synthetic oligonucleotide
aaacaaguuccuuugauuu

SEQ ID NO: 3258433 - RNA, 19 nt, Artificial Sequence
  Description of Artificial Sequence: Synthetic oligonucleotide
agcuugaagaaacaaguuc

SEQ ID NO: 3258434 - RNA, 19 nt, Artificial Sequence
  Description of Artificial Sequence: Synthetic oligonucleotide
caaauauacaacagcuugg

SEQ ID NO: 3258435 - RNA, 19 nt, Artificial Sequence
  Description of Artificial Sequence: Synthetic oligonucleotide
auauacaacagcuuggaaa

SEQ ID NO: 3258436 - RNA, 19 nt, Artificial Sequence
  Description of Artificial Sequence: Synthetic oligonucleotide
aagacaacuacaacaguac

SEQ ID NO: 3258437 - RNA, 19 nt, Artificial Sequence
  Description of Artificial Sequence: Synthetic oligonucleotide
uccauguuuaaagaaaugc

SEQ ID NO: 3258438 - RNA, 19 nt, Artificial Sequence
  Description of Artificial Sequence: Synthetic oligonucleotide
aauuuuccuuuaaaguccc

SEQ ID NO: 3258439 - RNA, 19 nt, Artificial Sequence
  Description of Artificial Sequence: Synthetic oligonucleotide
aauaucaauuagaauuuuc

SEQ ID NO: 3258440 - RNA, 19 nt, Artificial Sequence
  Description of Artificial Sequence: Synthetic oligonucleotide
ucucuaauaucaauuagaa

SEQ ID NO: 3258441 - RNA, 19 nt, Artificial Sequence
  Description of Artificial Sequence: Synthetic oligonucleotide
ucaccuuacaaauuguucu

SEQ ID NO: 3258442 - RNA, 19 nt, Artificial Sequence
  Description of Artificial Sequence: Synthetic oligonucleotide
uuaaagaaaugccuuuucu

SEQ ID NO: 3258443 - RNA, 19 nt, Artificial Sequence
  Description of Artificial Sequence: Synthetic oligonucleotide
gaauuuuccuuuaaagucc

SEQ ID NO: 3258444 - RNA, 19 nt, Artificial Sequence
  Description of Artificial Sequence: Synthetic oligonucleotide
uugacauuagucuucacuc

SEQ ID NO: 3258445 - RNA, 19 nt, Artificial Sequence
  Description of Artificial Sequence: Synthetic oligonucleotide
cucacugucagaaucacug

SEQ ID NO: 3258446 - RNA, 19 nt, Artificial Sequence
  Description of Artificial Sequence: Synthetic oligonucleotide
uuaauaaaguugacauuag

SEQ ID NO: 3258447 - RNA, 19 nt, Artificial Sequence
  Description of Artificial Sequence: Synthetic oligonucleotide
cauguuaucaucucugcug

SEQ ID NO: 3258448 - RNA, 19 nt, Artificial Sequence
  Description of Artificial Sequence: Synthetic oligonucleotide
uccaacagucuccagcucg

SEQ ID NO: 3258449 - RNA, 19 nt, Artificial Sequence
  Description of Artificial Sequence: Synthetic oligonucleotide
uucccaaucugaaacaugu

SEQ ID NO: 3258450 - RNA, 19 nt, Artificial Sequence
  Description of Artificial Sequence: Synthetic oligonucleotide
guauucaccuuacaaauug

SEQ ID NO: 3258451 - RNA, 19 nt, Artificial Sequence
  Description of Artificial Sequence: Synthetic oligonucleotide
uacucugcuuagaagaugc

SEQ ID NO: 3258452 - RNA, 19 nt, Artificial Sequence
  Description of Artificial Sequence: Synthetic oligonucleotide
uaucaauuagaauuuuccu

SEQ ID NO: 3258453 - RNA, 19 nt, Artificial Sequence
  Description of Artificial Sequence: Synthetic oligonucleotide
agucucaccaggcuuuugc

SEQ ID NO: 3258454 - RNA, 19 nt, Artificial Sequence
  Description of Artificial Sequence: Synthetic oligonucleotide
gaugccaaugcucuagaag

SEQ ID NO: 3258455 - RNA, 19 nt, Artificial Sequence
  Description of Artificial Sequence: Synthetic oligonucleotide
uuacaaauuguucugcaau

SEQ ID NO: 3258456 - RNA, 19 nt, Artificial Sequence
  Description of Artificial Sequence: Synthetic oligonucleotide
ucuuacugcaucaucuaug

SEQ ID NO: 3258457 - RNA, 19 nt, Artificial Sequence
  Description of Artificial Sequence: Synthetic oligonucleotide
acagcuuucuuacugcauc

SEQ ID NO: 3258458 - RNA, 19 nt, Artificial Sequence
  Description of Artificial Sequence: Synthetic oligonucleotide
uuuacagcuuucuuacugc

SEQ ID NO: 3258459 - RNA, 19 nt, Artificial Sequence
  Description of Artificial Sequence: Synthetic oligonucleotide
ugccugaagagcuugaaga

SEQ ID NO: 3258460 - RNA, 19 nt, Artificial Sequence
  Description of Artificial Sequence: Synthetic oligonucleotide
uacagauuugauauggcuc

SEQ ID NO: 3258461 - RNA, 19 nt, Artificial Sequence
  Description of Artificial Sequence: Synthetic oligonucleotide
aaauauacaacagcuugga

SEQ ID NO: 3258462 - RNA, 19 nt, Artificial Sequence
  Description of Artificial Sequence: Synthetic oligonucleotide
gaacauuuaauaaugcaca

SEQ ID NO: 3258463 - RNA, 19 nt, Artificial Sequence
  Description of Artificial Sequence: Synthetic oligonucleotide
uuaggcauugcuccgcucc

SEQ ID NO: 3258464 - RNA, 19 nt, Artificial Sequence
  Description of Artificial Sequence: Synthetic oligonucleotide
uagaaaacaaaagccaaug

SEQ ID NO: 3258465 - RNA, 19 nt, Artificial Sequence
  Description of Artificial Sequence: Synthetic oligonucleotide
aauccucuuaauaaaguug

SEQ ID NO: 3258466 - RNA, 19 nt, Artificial Sequence
  Description of Artificial Sequence: Synthetic oligonucleotide
aacagcuuggaaaacaaca

SEQ ID NO: 3258467 - RNA, 19 nt, Artificial Sequence
  Description of Artificial Sequence: Synthetic oligonucleotide
uguuccuucagcuggcucc

SEQ ID NO: 3258468 - RNA, 19 nt, Artificial Sequence
  Description of Artificial Sequence: Synthetic oligonucleotide
augccaaugcucuagaagu

SEQ ID NO: 3258469 - RNA, 19 nt, Artificial Sequence
  Description of Artificial Sequence: Synthetic oligonucleotide
uucugcaauccaaauauac

SEQ ID NO: 3258470 - RNA, 19 nt, Artificial Sequence
  Description of Artificial Sequence: Synthetic oligonucleotide
aaucugaaacauguuauca

SEQ ID NO: 3258471 - RNA, 19 nt, Artificial Sequence
  Description of Artificial Sequence: Synthetic oligonucleotide
cauuuaauaaugcacauua

SEQ ID NO: 3258472 - RNA, 19 nt, Artificial Sequence
  Description of Artificial Sequence: Synthetic oligonucleotide
aaaugccuuuucuuccugg

SEQ ID NO: 3258473 - RNA, 19 nt, Artificial Sequence
  Description of Artificial Sequence: Synthetic oligonucleotide
cuuggaaaacaacauuuag

SEQ ID NO: 3258474 - RNA, 19 nt, Artificial Sequence
  Description of Artificial Sequence: Synthetic oligonucleotide
aaacauguuaucaucucug

SEQ ID NO: 3258475 - RNA, 19 nt, Artificial Sequence
  Description of Artificial Sequence: Synthetic oligonucleotide
uccaauauucucuaauauc

SEQ ID NO: 3258476 - RNA, 19 nt, Artificial Sequence
  Description of Artificial Sequence: Synthetic oligonucleotide
uauucucuaauaucaauua

SEQ ID NO: 3258477 - RNA, 19 nt, Artificial Sequence
  Description of Artificial Sequence: Synthetic oligonucleotide
uaucucaucuucccaaucu

SEQ ID NO: 3258478 - RNA, 19 nt, Artificial Sequence
  Description of Artificial Sequence: Synthetic oligonucleotide
agagaucuguuccuucagc

SEQ ID NO: 3258479 - RNA, 19 nt, Artificial Sequence
  Description of Artificial Sequence: Synthetic oligonucleotide
aaugcucuagaagucucac

SEQ ID NO: 3258480 - RNA, 19 nt, Artificial Sequence
  Description of Artificial Sequence: Synthetic oligonucleotide
ucuagaagucucaccaggc

SEQ ID NO: 3258481 - RNA, 19 nt, Artificial Sequence
  Description of Artificial Sequence: Synthetic oligonucleotide
uuagaaaacaaaagccaau

SEQ ID NO: 3258482 - RNA, 19 nt, Artificial Sequence
  Description of Artificial Sequence: Synthetic oligonucleotide
aucaauuagaauuuuccuu

SEQ ID NO: 3258483 - RNA, 19 nt, Artificial Sequence
  Description of Artificial Sequence: Synthetic oligonucleotide
cugaagagcuugaagaaac

SEQ ID NO: 3258484 - RNA, 19 nt, Artificial Sequence
  Description of Artificial Sequence: Synthetic oligonucleotide
ugaagaaacaaguuccuuu

SEQ ID NO: 3258485 - RNA, 19 nt, Artificial Sequence
  Description of Artificial Sequence: Synthetic oligonucleotide
cuuaauaaaguugacauua

SEQ ID NO: 3258486 - RNA, 19 nt, Artificial Sequence
  Description of Artificial Sequence: Synthetic oligonucleotide
uuugcuucuucacagguuu

SEQ ID NO: 3258487 - RNA, 19 nt, Artificial Sequence
  Description of Artificial Sequence: Synthetic oligonucleotide
uaauaaaguugacauuagu

SEQ ID NO: 3258488 - RNA, 19 nt, Artificial Sequence
  Description of Artificial Sequence: Synthetic oligonucleotide
gacaacuacaacaguacag

SEQ ID NO: 3258489 - RNA, 19 nt, Artificial Sequence
  Description of Artificial Sequence: Synthetic oligonucleotide
aaagacaacuacaacagua

SEQ ID NO: 3258490 - RNA, 19 nt, Artificial Sequence
  Description of Artificial Sequence: Synthetic oligonucleotide
uuuucuggaacaacuugcu

SEQ ID NO: 3258491 - RNA, 19 nt, Artificial Sequence
  Description of Artificial Sequence: Synthetic oligonucleotide
ugacauaucucaucuuccc

SEQ ID NO: 3258492 - RNA, 19 nt, Artificial Sequence
  Description of Artificial Sequence: Synthetic oligonucleotide
aguuccuuugauuuaggca

SEQ ID NO: 3258493 - RNA, 19 nt, Artificial Sequence
  Description of Artificial Sequence: Synthetic oligonucleotide
caauccaaauauacaacag

SEQ ID NO: 3258494 - RNA, 19 nt, Artificial Sequence
  Description of Artificial Sequence: Synthetic oligonucleotide
ucacucagaacauuuaaua

SEQ ID NO: 3258495 - RNA, 19 nt, Artificial Sequence
  Description of Artificial Sequence: Synthetic oligonucleotide
uuaucaucucugcugcugc

SEQ ID NO: 3258496 - RNA, 19 nt, Artificial Sequence
  Description of Artificial Sequence: Synthetic oligonucleotide
caucuucccaaucugaaac

SEQ ID NO: 3258497 - RNA, 19 nt, Artificial Sequence
  Description of Artificial Sequence: Synthetic oligonucleotide
ugcaauccaaauauacaac

SEQ ID NO: 3258498 - RNA, 19 nt, Artificial Sequence
  Description of Artificial Sequence: Synthetic oligonucleotide
uaaaguugacauuagucuu

SEQ ID NO: 3258499 - RNA, 19 nt, Artificial Sequence
  Description of Artificial Sequence: Synthetic oligonucleotide
ucauuucaccuucugaguc

SEQ ID NO: 3258500 - RNA, 19 nt, Artificial Sequence
  Description of Artificial Sequence: Synthetic oligonucleotide
auuagaauuuuccuuuaaa

SEQ ID NO: 3258501 - RNA, 19 nt, Artificial Sequence
  Description of Artificial Sequence: Synthetic oligonucleotide
uaaagaaaugccuuuucuu

SEQ ID NO: 3258502 - RNA, 19 nt, Artificial Sequence
  Description of Artificial Sequence: Synthetic oligonucleotide
aaaagacaacuacaacagu

SEQ ID NO: 3258503 - RNA, 19 nt, Artificial Sequence
  Description of Artificial Sequence: Synthetic oligonucleotide
uucaccuuacaaauuguuc

SEQ ID NO: 3258504 - RNA, 19 nt, Artificial Sequence
  Description of Artificial Sequence: Synthetic oligonucleotide
uacaaauuguucugcaauc

SEQ ID NO: 3258505 - RNA, 19 nt, Artificial Sequence
  Description of Artificial Sequence: Synthetic oligonucleotide
uuaucaauguccuggaugg

SEQ ID NO: 3258506 - RNA, 19 nt, Artificial Sequence
  Description of Artificial Sequence: Synthetic oligonucleotide
aaucaaaccagccucugac

SEQ ID NO: 3258507 - RNA, 19 nt, Artificial Sequence
  Description of Artificial Sequence: Synthetic oligonucleotide
agaaaagguggcuaguucc

SEQ ID NO: 3258508 - RNA, 19 nt, Artificial Sequence
  Description of Artificial Sequence: Synthetic oligonucleotide
aauaguggcgaugucagac

SEQ ID NO: 3258509 - RNA, 19 nt, Artificial Sequence
  Description of Artificial Sequence: Synthetic oligonucleotide
uuggugauaaucaaaccag

SEQ ID NO: 3258510 - RNA, 19 nt, Artificial Sequence
  Description of Artificial Sequence: Synthetic oligonucleotide
ucagcgaugaaguugaacu

SEQ ID NO: 3258511 - RNA, 19 nt, Artificial Sequence
  Description of Artificial Sequence: Synthetic oligonucleotide
aaagggacugccaauggcc

SEQ ID NO: 3258512 - RNA, 19 nt, Artificial Sequence
  Description of Artificial Sequence: Synthetic oligonucleotide
aaagguggaacccugggcu

SEQ ID NO: 3258513 - RNA, 19 nt, Artificial Sequence
  Description of Artificial Sequence: Synthetic oligonucleotide
ugauaaucaaaccagccuc

SEQ ID NO: 3258514 - RNA, 19 nt, Artificial Sequence
  Description of Artificial Sequence: Synthetic oligonucleotide
gucaucuucacacagggcc

SEQ ID NO: 3258515 - RNA, 19 nt, Artificial Sequence
  Description of Artificial Sequence: Synthetic oligonucleotide
accuugaguguguugaugc

SEQ ID NO: 3258516 - RNA, 19 nt, Artificial Sequence
  Description of Artificial Sequence: Synthetic oligonucleotide
acuuggaacagaacgaggc

SEQ ID NO: 3258517 - RNA, 19 nt, Artificial Sequence
  Description of Artificial Sequence: Synthetic oligonucleotide
ucaauugcaguucuucaug

SEQ ID NO: 3258518 - RNA, 19 nt, Artificial Sequence
  Description of Artificial Sequence: Synthetic oligonucleotide
ucuauauggaccacagcug

SEQ ID NO: 3258519 - RNA, 19 nt, Artificial Sequence
  Description of Artificial Sequence: Synthetic oligonucleotide
ugacccagaagcaacauaa

SEQ ID NO: 3258520 - RNA, 19 nt, Artificial Sequence
  Description of Artificial Sequence: Synthetic oligonucleotide
aacagaacgaggcuccuca

SEQ ID NO: 3258521 - RNA, 19 nt, Artificial Sequence
  Description of Artificial Sequence: Synthetic oligonucleotide
cuauauggaccacagcugg

SEQ ID NO: 3258522 - RNA, 19 nt, Artificial Sequence
  Description of Artificial Sequence: Synthetic oligonucleotide
cuagcugagagaaaaggug

SEQ ID NO: 3258523 - RNA, 19 nt, Artificial Sequence
  Description of Artificial Sequence: Synthetic oligonucleotide
augucugagucucggaggc

SEQ ID NO: 3258524 - RNA, 19 nt, Artificial Sequence
  Description of Artificial Sequence: Synthetic oligonucleotide
agacuucuuaucaaugucc

SEQ ID NO: 3258525 - RNA, 19 nt, Artificial Sequence
  Description of Artificial Sequence: Synthetic oligonucleotide
aagcgugugaugcgagucc

SEQ ID NO: 3258526 - RNA, 19 nt, Artificial Sequence
  Description of Artificial Sequence: Synthetic oligonucleotide
ugagagaaaagguggcuag

SEQ ID NO: 3258527 - RNA, 19 nt, Artificial Sequence
  Description of Artificial Sequence: Synthetic oligonucleotide
aaagguggcuaguucccac

SEQ ID NO: 3258528 - RNA, 19 nt, Artificial Sequence
  Description of Artificial Sequence: Synthetic oligonucleotide
auuacaauaguggcgaugu

SEQ ID NO: 3258529 - RNA, 19 nt, Artificial Sequence
  Description of Artificial Sequence: Synthetic oligonucleotide
aguguguugaugccgauga

SEQ ID NO: 3258530 - RNA, 19 nt, Artificial Sequence
  Description of Artificial Sequence: Synthetic oligonucleotide
uauaguccaugucugaguc

SEQ ID NO: 3258531 - RNA, 19 nt, Artificial Sequence
  Description of Artificial Sequence: Synthetic oligonucleotide
uugggguggauuacaauag

SEQ ID NO: 3258532 - RNA, 19 nt, Artificial Sequence
  Description of Artificial Sequence: Synthetic oligonucleotide
uaccaauggagcaaaggug

SEQ ID NO: 3258533 - RNA, 19 nt, Artificial Sequence
  Description of Artificial Sequence: Synthetic oligonucleotide
accaauggagcaaaggugg

SEQ ID NO: 3258534 - RNA, 19 nt, Artificial Sequence
  Description of Artificial Sequence: Synthetic oligonucleotide
uuuuggaacucggagagga

SEQ ID NO: 3258535 - RNA, 19 nt, Artificial Sequence
  Description of Artificial Sequence: Synthetic oligonucleotide
gauauaguccaugucugag

SEQ ID NO: 3258536 - RNA, 19 nt, Artificial Sequence
  Description of Artificial Sequence: Synthetic oligonucleotide
caauugcaguucuucaugg

SEQ ID NO: 3258537 - RNA, 19 nt, Artificial Sequence
  Description of Artificial Sequence: Synthetic oligonucleotide
cuaguucugagcuuccuac

SEQ ID NO: 3258538 - RNA, 19 nt, Artificial Sequence
  Description of Artificial Sequence: Synthetic oligonucleotide
ugggcguuggugauaauca

SEQ ID NO: 3258539 - RNA, 19 nt, Artificial Sequence
  Description of Artificial Sequence: Synthetic oligonucleotide
uagagaaaggggccaaggc

SEQ ID NO: 3258540 - RNA, 19 nt, Artificial Sequence
  Description of Artificial Sequence: Synthetic oligonucleotide
acaacggcacauuccggcc

SEQ ID NO: 3258541 - RNA, 19 nt, Artificial Sequence
  Description of Artificial Sequence: Synthetic oligonucleotide
auugcaguucuucauggga

SEQ ID NO: 3258542 - RNA, 19 nt, Artificial Sequence
  Description of Artificial Sequence: Synthetic oligonucleotide
uggugauaaucaaaccagc

SEQ ID NO: 3258543 - RNA, 19 nt, Artificial Sequence
  Description of Artificial Sequence: Synthetic oligonucleotide
cucauaggcaucuccauuc

SEQ ID NO: 3258544 - RNA, 19 nt, Artificial Sequence
  Description of Artificial Sequence: Synthetic oligonucleotide
ucuguaguugcaccuucag

SEQ ID NO: 3258545 - RNA, 19 nt, Artificial Sequence
  Description of Artificial Sequence: Synthetic oligonucleotide
gaagcaacauaagggaagc

SEQ ID NO: 3258546 - RNA, 19 nt, Artificial Sequence
  Description of Artificial Sequence: Synthetic oligonucleotide
caugucugagucucggagg

SEQ ID NO: 3258547 - RNA, 19 nt, Artificial Sequence
  Description of Artificial Sequence: Synthetic oligonucleotide
gguggauuacaauaguggc

SEQ ID NO: 3258548 - RNA, 19 nt, Artificial Sequence
  Description of Artificial Sequence: Synthetic oligonucleotide
agaagcaacauaagggaag

SEQ ID NO: 3258549 - RNA, 19 nt, Artificial Sequence
  Description of Artificial Sequence: Synthetic oligonucleotide
aaugcccguugucacagug

SEQ ID NO: 3258550 - RNA, 19 nt, Artificial Sequence
  Description of Artificial Sequence: Synthetic oligonucleotide
guggauuacaauaguggcg

SEQ ID NO: 3258551 - RNA, 19 nt, Artificial Sequence
  Description of Artificial Sequence: Synthetic oligonucleotide
acaauaguggcgaugucag

SEQ ID NO: 3258552 - RNA, 19 nt, Artificial Sequence
  Description of Artificial Sequence: Synthetic oligonucleotide
auauggaccacagcuggcg

SEQ ID NO: 3258553 - RNA, 19 nt, Artificial Sequence
  Description of Artificial Sequence: Synthetic oligonucleotide
ccagcugcaaccuugagug

SEQ ID NO: 3258554 - RNA, 19 nt, Artificial Sequence
  Description of Artificial Sequence: Synthetic oligonucleotide
aauggccaccacaaacucg

SEQ ID NO: 3258555 - RNA, 19 nt, Artificial Sequence
  Description of Artificial Sequence: Synthetic oligonucleotide
uccauucuguaguugcacc

SEQ ID NO: 3258556 - RNA, 19 nt, Artificial Sequence
  Description of Artificial Sequence: Synthetic oligonucleotide
uccugucaucuucacacag

SEQ ID NO: 3258557 - RNA, 19 nt, Artificial Sequence
  Description of Artificial Sequence: Synthetic oligonucleotide
cucuauauggaccacagcu

SEQ ID NO: 3258558 - RNA, 19 nt, Artificial Sequence
  Description of Artificial Sequence: Synthetic oligonucleotide
cuugaguguguugaugccg

SEQ ID NO: 3258559 - RNA, 19 nt, Artificial Sequence
  Description of Artificial Sequence: Synthetic oligonucleotide
aaagcuccggucacuagag

SEQ ID NO: 3258560 - RNA, 19 nt, Artificial Sequence
  Description of Artificial Sequence: Synthetic oligonucleotide
caugugcuuguuuuggaac

SEQ ID NO: 3258561 - RNA, 19 nt, Artificial Sequence
  Description of Artificial Sequence: Synthetic oligonucleotide
gaaaagguggcuaguuccc

SEQ ID NO: 3258562 - RNA, 19 nt, Artificial Sequence
  Description of Artificial Sequence: Synthetic oligonucleotide
agagcaaagggacugccaa

SEQ ID NO: 3258563 - RNA, 19 nt, Artificial Sequence
  Description of Artificial Sequence: Synthetic oligonucleotide
uauauggaccacagcuggc

SEQ ID NO: 3258564 - RNA, 19 nt, Artificial Sequence
  Description of Artificial Sequence: Synthetic oligonucleotide
acuggacaacggcacauuc

SEQ ID NO: 3258565 - RNA, 19 nt, Artificial Sequence
  Description of Artificial Sequence: Synthetic oligonucleotide
uucugagcuuccuacuagc

SEQ ID NO: 3258566 - RNA, 19 nt, Artificial Sequence
  Description of Artificial Sequence: Synthetic oligonucleotide
gauuacaauaguggcgaug

SEQ ID NO: 3258567 - RNA, 19 nt, Artificial Sequence
  Description of Artificial Sequence: Synthetic oligonucleotide
gaugaagccggaaccacug

SEQ ID NO: 3258568 - RNA, 19 nt, Artificial Sequence
  Description of Artificial Sequence: Synthetic oligonucleotide
gcuccugucaucuucacac

SEQ ID NO: 3258569 - RNA, 19 nt, Artificial Sequence
  Description of Artificial Sequence: Synthetic oligonucleotide
ugccucauaggcaucucca

SEQ ID NO: 3258570 - RNA, 19 nt, Artificial Sequence
  Description of Artificial Sequence: Synthetic oligonucleotide
uaguugcaccuucagcugc

SEQ ID NO: 3258571 - RNA, 19 nt, Artificial Sequence
  Description of Artificial Sequence: Synthetic oligonucleotide
ugaugaagccggaaccacu

SEQ ID NO: 3258572 - RNA, 19 nt, Artificial Sequence
  Description of Artificial Sequence: Synthetic oligonucleotide
gaugccagcugcaaccuug

SEQ ID NO: 3258573 - RNA, 19 nt, Artificial Sequence
  Description of Artificial Sequence: Synthetic oligonucleotide
acaucagcgaugaaguuga

SEQ ID NO: 3258574 - RNA, 19 nt, Artificial Sequence
  Description of Artificial Sequence: Synthetic oligonucleotide
uuccuacuagcugagagaa

SEQ ID NO: 3258575 - RNA, 19 nt, Artificial Sequence
  Description of Artificial Sequence: Synthetic oligonucleotide
ggguggauuacaauagugg

SEQ ID NO: 3258576 - RNA, 19 nt, Artificial Sequence
  Description of Artificial Sequence: Synthetic oligonucleotide
ugccuugguuucuugggag

SEQ ID NO: 3258577 - RNA, 19 nt, Artificial Sequence
  Description of Artificial Sequence: Synthetic oligonucleotide
cuaguucccacuguucacc

SEQ ID NO: 3258578 - RNA, 19 nt, Artificial Sequence
  Description of Artificial Sequence: Synthetic oligonucleotide
gagaaaagguggcuaguuc

SEQ ID NO: 3258579 - RNA, 19 nt, Artificial Sequence
  Description of Artificial Sequence: Synthetic oligonucleotide
cuagagaaaggggccaagg

SEQ ID NO: 3258580 - RNA, 19 nt, Artificial Sequence
  Description of Artificial Sequence: Synthetic oligonucleotide
cuugggguggauuacaaua

SEQ ID NO: 3258581 - RNA, 19 nt, Artificial Sequence
  Description of Artificial Sequence: Synthetic oligonucleotide
guucugagcuuccuacuag

SEQ ID NO: 3258582 - RNA, 19 nt, Artificial Sequence
  Description of Artificial Sequence: Synthetic oligonucleotide
ugggcagugcugacaaugc

SEQ ID NO: 3258583 - RNA, 19 nt, Artificial Sequence
  Description of Artificial Sequence: Synthetic oligonucleotide
gucucggaggcccagcucc

SEQ ID NO: 3258584 - RNA, 19 nt, Artificial Sequence
  Description of Artificial Sequence: Synthetic oligonucleotide
ggagcuggugaccacgugg

SEQ ID NO: 3258585 - RNA, 19 nt, Artificial Sequence
  Description of Artificial Sequence: Synthetic oligonucleotide
gucacuagagaaaggggcc

SEQ ID NO: 3258586 - RNA, 19 nt, Artificial Sequence
  Description of Artificial Sequence: Synthetic oligonucleotide
agcgaugaaguugaacuug

SEQ ID NO: 3258587 - RNA, 19 nt, Artificial Sequence
  Description of Artificial Sequence: Synthetic oligonucleotide
uauggaccacagcuggcgc

SEQ ID NO: 3258588 - RNA, 19 nt, Artificial Sequence
  Description of Artificial Sequence: Synthetic oligonucleotide
gaggaugucucaggaagag

SEQ ID NO: 3258589 - RNA, 19 nt, Artificial Sequence
  Description of Artificial Sequence: Synthetic oligonucleotide
ugacaaugcccguugucac

SEQ ID NO: 3258590 - RNA, 19 nt, Artificial Sequence
  Description of Artificial Sequence: Synthetic oligonucleotide
cacuuggaacagaacgagg

SEQ ID NO: 3258591 - RNA, 19 nt, Artificial Sequence
  Description of Artificial Sequence: Synthetic oligonucleotide
ggugccuugguuucuuggg

SEQ ID NO: 3258592 - RNA, 19 nt, Artificial Sequence
  Description of Artificial Sequence: Synthetic oligonucleotide
uugccucauaggcaucucc

SEQ ID NO: 3258593 - RNA, 19 nt, Artificial Sequence
  Description of Artificial Sequence: Synthetic oligonucleotide
cagucuuggcuguacuggg

SEQ ID NO: 3258594 - RNA, 19 nt, Artificial Sequence
  Description of Artificial Sequence: Synthetic oligonucleotide
auaguggcgaugucagacu

SEQ ID NO: 3258595 - RNA, 19 nt, Artificial Sequence
  Description of Artificial Sequence: Synthetic oligonucleotide
augaccucaccauccaggu

SEQ ID NO: 3258596 - RNA, 19 nt, Artificial Sequence
  Description of Artificial Sequence: Synthetic oligonucleotide
ugcgaguccgaggggaugg

SEQ ID NO: 3258597 - RNA, 19 nt, Artificial Sequence
  Description of Artificial Sequence: Synthetic oligonucleotide
uuggaacagaacgaggcuc

SEQ ID NO: 3258598 - RNA, 19 nt, Artificial Sequence
  Description of Artificial Sequence: Synthetic oligonucleotide
guugaugccgaugaccuca

SEQ ID NO: 3258599 - RNA, 19 nt, Artificial Sequence
  Description of Artificial Sequence: Synthetic oligonucleotide
aaggcuaccaauggagcaa

SEQ ID NO: 3258600 - RNA, 19 nt, Artificial Sequence
  Description of Artificial Sequence: Synthetic oligonucleotide
cagacuucuuaucaauguc

SEQ ID NO: 3258601 - RNA, 19 nt, Artificial Sequence
  Description of Artificial Sequence: Synthetic oligonucleotide
cacaguguucugcagagca

SEQ ID NO: 3258602 - RNA, 19 nt, Artificial Sequence
  Description of Artificial Sequence: Synthetic oligonucleotide
agggacaggcucugccugc

SEQ ID NO: 3258603 - RNA, 19 nt, Artificial Sequence
  Description of Artificial Sequence: Synthetic oligonucleotide
gugauaaucaaaccagccu

SEQ ID NO: 3258604 - RNA, 19 nt, Artificial Sequence
  Description of Artificial Sequence: Synthetic oligonucleotide
acaaugcccguugucacag

SEQ ID NO: 3258605 - RNA, 19 nt, Artificial Sequence
  Description of Artificial Sequence: Synthetic oligonucleotide
uguguugaaaacuuuaucc

SEQ ID NO: 3258606 - RNA, 19 nt, Artificial Sequence
  Description of Artificial Sequence: Synthetic oligonucleotide
uaaauaacaguucaauugc

SEQ ID NO: 3258607 - RNA, 19 nt, Artificial Sequence
  Description of Artificial Sequence: Synthetic oligonucleotide
guaaauaacaguucaauug

SEQ ID NO: 3258608 - RNA, 19 nt, Artificial Sequence
  Description of Artificial Sequence: Synthetic oligonucleotide
aaucaguucaacuagguaa

SEQ ID NO: 3258609 - RNA, 19 nt, Artificial Sequence
  Description of Artificial Sequence: Synthetic oligonucleotide
auaaaauugucucauuuuc

SEQ ID NO: 3258610 - RNA, 19 nt, Artificial Sequence
  Description of Artificial Sequence: Synthetic oligonucleotide
uaauuuauaaaauugucuc

SEQ ID NO: 3258611 - RNA, 19 nt, Artificial Sequence
  Description of Artificial Sequence: Synthetic oligonucleotide
aaaacuuuaucccacuucu

SEQ ID NO: 3258612 - RNA, 19 nt, Artificial Sequence
  Description of Artificial Sequence: Synthetic oligonucleotide
uucacuaugggucucagcc

SEQ ID NO: 3258613 - RNA, 19 nt, Artificial Sequence
  Description of Artificial Sequence: Synthetic oligonucleotide
acuuauaaccuucuucucc

SEQ ID NO: 3258614 - RNA, 19 nt, Artificial Sequence
  Description of Artificial Sequence: Synthetic oligonucleotide
acuaauaugcauuucuuag

SEQ ID NO: 3258615 - RNA, 19 nt, Artificial Sequence
  Description of Artificial Sequence: Synthetic oligonucleotide
cuaauguucacuuuggcac

SEQ ID NO: 3258616 - RNA, 19 nt, Artificial Sequence
  Description of Artificial Sequence: Synthetic oligonucleotide
ucauaauuuauaaaauugu

SEQ ID NO: 3258617 - RNA, 19 nt, Artificial Sequence
  Description of Artificial Sequence: Synthetic oligonucleotide
auuacuucagaguauuuuc

SEQ ID NO: 3258618 - RNA, 19 nt, Artificial Sequence
  Description of Artificial Sequence: Synthetic oligonucleotide
aauuuauaaaauugucuca

SEQ ID NO: 3258619 - RNA, 19 nt, Artificial Sequence
  Description of Artificial Sequence: Synthetic oligonucleotide
cucauaauuuauaaaauug

SEQ ID NO: 3258620 - RNA, 19 nt, Artificial Sequence
  Description of Artificial Sequence: Synthetic oligonucleotide
aaaauugucucauuuuccu

SEQ ID NO: 3258621 - RNA, 19 nt, Artificial Sequence
  Description of Artificial Sequence: Synthetic oligonucleotide
uaauaugcauuucuuaggc

SEQ ID NO: 3258622 - RNA, 19 nt, Artificial Sequence
  Description of Artificial Sequence: Synthetic oligonucleotide
ucacuauguacuuauaacc

SEQ ID NO: 3258623 - RNA, 19 nt, Artificial Sequence
  Description of Artificial Sequence: Synthetic oligonucleotide
auuacuaauaugcauuucu

SEQ ID NO: 3258624 - RNA, 19 nt, Artificial Sequence
  Description of Artificial Sequence: Synthetic oligonucleotide
uuuugauuacuucagagua

SEQ ID NO: 3258625 - RNA, 19 nt, Artificial Sequence
  Description of Artificial Sequence: Synthetic oligonucleotide
ugugcuaauguucacuuug

SEQ ID NO: 3258626 - RNA, 19 nt, Artificial Sequence
  Description of Artificial Sequence: Synthetic oligonucleotide
uagaguguaaauaacaguu

SEQ ID NO: 3258627 - RNA, 19 nt, Artificial Sequence
  Description of Artificial Sequence: Synthetic oligonucleotide
auaaccuucuucuccauuc

SEQ ID NO: 3258628 - RNA, 19 nt, Artificial Sequence
  Description of Artificial Sequence: Synthetic oligonucleotide
uaaaauugucucauuuucc

SEQ ID NO: 3258629 - RNA, 19 nt, Artificial Sequence
  Description of Artificial Sequence: Synthetic oligonucleotide
uugauagcaaaucauucug

SEQ ID NO: 3258630 - RNA, 19 nt, Artificial Sequence
  Description of Artificial Sequence: Synthetic oligonucleotide
aguucaacuagguaaagga

SEQ ID NO: 3258631 - RNA, 19 nt, Artificial Sequence
  Description of Artificial Sequence: Synthetic oligonucleotide
uucuuaggcaaucaguuca

SEQ ID NO: 3258632 - RNA, 19 nt, Artificial Sequence
  Description of Artificial Sequence: Synthetic oligonucleotide
aauaacaguucaauugcac

SEQ ID NO: 3258633 - RNA, 19 nt, Artificial Sequence
  Description of Artificial Sequence: Synthetic oligonucleotide
aacuuuaucccacuucuca

SEQ ID NO: 3258634 - RNA, 19 nt, Artificial Sequence
  Description of Artificial Sequence: Synthetic oligonucleotide
uguacuuauaaccuucuuc

SEQ ID NO: 3258635 - RNA, 19 nt, Artificial Sequence
  Description of Artificial Sequence: Synthetic oligonucleotide
cuaauaugcauuucuuagg

SEQ ID NO: 3258636 - RNA, 19 nt, Artificial Sequence
  Description of Artificial Sequence: Synthetic oligonucleotide
ucuccauucacuauggguc

SEQ ID NO: 3258637 - RNA, 19 nt, Artificial Sequence
  Description of Artificial Sequence: Synthetic oligonucleotide
uagcaaaucauucuguggu

SEQ ID NO: 3258638 - RNA, 19 nt, Artificial Sequence
  Description of Artificial Sequence: Synthetic oligonucleotide
gugucuauggaacaggucc

SEQ ID NO: 3258639 - RNA, 19 nt, Artificial Sequence
  Description of Artificial Sequence: Synthetic oligonucleotide
cauaauuuauaaaauuguc

SEQ ID NO: 3258640 - RNA, 19 nt, Artificial Sequence
  Description of Artificial Sequence: Synthetic oligonucleotide
ucaacuagguaaaggagug

SEQ ID NO: 3258641 - RNA, 19 nt, Artificial Sequence
  Description of Artificial Sequence: Synthetic oligonucleotide
uucaacuagguaaaggagu

SEQ ID NO: 3258642 - RNA, 19 nt, Artificial Sequence
  Description of Artificial Sequence: Synthetic oligonucleotide
aguucaauugcacuggacu

SEQ ID NO: 3258643 - RNA, 19 nt, Artificial Sequence
  Description of Artificial Sequence: Synthetic oligonucleotide
guggucauuacuaauaugc

SEQ ID NO: 3258644 - RNA, 19 nt, Artificial Sequence
  Description of Artificial Sequence: Synthetic oligonucleotide
uuauaaaauugucucauuu

SEQ ID NO: 3258645 - RNA, 19 nt, Artificial Sequence
  Description of Artificial Sequence: Synthetic oligonucleotide
uaacaguucaauugcacug

SEQ ID NO: 3258646 - RNA, 19 nt, Artificial Sequence
  Description of Artificial Sequence: Synthetic oligonucleotide
cuagccaccaacuugccag

SEQ ID NO: 3258647 - RNA, 19 nt, Artificial Sequence
  Description of Artificial Sequence: Synthetic oligonucleotide
cuucagaguauuuuccugg

SEQ ID NO: 3258648 - RNA, 19 nt, Artificial Sequence
  Description of Artificial Sequence: Synthetic oligonucleotide
cuucucauaauuuauaaaa

SEQ ID NO: 3258649 - RNA, 19 nt, Artificial Sequence
  Description of Artificial Sequence: Synthetic oligonucleotide
auagcaaaucauucugugg

SEQ ID NO: 3258650 - RNA, 19 nt, Artificial Sequence
  Description of Artificial Sequence: Synthetic oligonucleotide
uguugaaaacuuuauccca

SEQ ID NO: 3258651 - RNA, 19 nt, Artificial Sequence
  Description of Artificial Sequence: Synthetic oligonucleotide
auaauuuauaaaauugucu

SEQ ID NO: 3258652 - RNA, 19 nt, Artificial Sequence
  Description of Artificial Sequence: Synthetic oligonucleotide
gauagcaaaucauucugug

SEQ ID NO: 3258653 - RNA, 19 nt, Artificial Sequence
  Description of Artificial Sequence: Synthetic oligonucleotide
aauugucucauuuuccuuu

SEQ ID NO: 3258654 - RNA, 19 nt, Artificial Sequence
  Description of Artificial Sequence: Synthetic oligonucleotide
aacaguucaauugcacugg

SEQ ID NO: 3258655 - RNA, 19 nt, Artificial Sequence
  Description of Artificial Sequence: Synthetic oligonucleotide
auuuuccuuucccuuaugg

SEQ ID NO: 3258656 - RNA, 19 nt, Artificial Sequence
  Description of Artificial Sequence: Synthetic oligonucleotide
uuacuucagaguauuuucc

SEQ ID NO: 3258657 - RNA, 19 nt, Artificial Sequence
  Description of Artificial Sequence: Synthetic oligonucleotide
uucuucuccauucacuaug

SEQ ID NO: 3258658 - RNA, 19 nt, Artificial Sequence
  Description of Artificial Sequence: Synthetic oligonucleotide
uuuggcaccucgaggaggg

SEQ ID NO: 3258659 - RNA, 19 nt, Artificial Sequence
  Description of Artificial Sequence: Synthetic oligonucleotide
uggauguccacucacuaug

SEQ ID NO: 3258660 - RNA, 19 nt, Artificial Sequence
  Description of Artificial Sequence: Synthetic oligonucleotide
uguugauagcaaaucauuc

SEQ ID NO: 3258661 - RNA, 19 nt, Artificial Sequence
  Description of Artificial Sequence: Synthetic oligonucleotide
ucuucuccauucacuaugg

SEQ ID NO: 3258662 - RNA, 19 nt, Artificial Sequence
  Description of Artificial Sequence: Synthetic oligonucleotide
guguugaaaacuuuauccc

SEQ ID NO: 3258663 - RNA, 19 nt, Artificial Sequence
  Description of Artificial Sequence: Synthetic oligonucleotide
uauaaaauugucucauuuu

SEQ ID NO: 3258664 - RNA, 19 nt, Artificial Sequence
  Description of Artificial Sequence: Synthetic oligonucleotide
auguccacucacuauguac

SEQ ID NO: 3258665 - RNA, 19 nt, Artificial Sequence
  Description of Artificial Sequence: Synthetic oligonucleotide
auaacaguucaauugcacu

SEQ ID NO: 3258666 - RNA, 19 nt, Artificial Sequence
  Description of Artificial Sequence: Synthetic oligonucleotide
cucacuauguacuuauaac

SEQ ID NO: 3258667 - RNA, 19 nt, Artificial Sequence
  Description of Artificial Sequence: Synthetic oligonucleotide
uauggaucuagccaccaac

SEQ ID NO: 3258668 - RNA, 19 nt, Artificial Sequence
  Description of Artificial Sequence: Synthetic oligonucleotide
auaugcauuucuuaggcaa

SEQ ID NO: 3258669 - RNA, 19 nt, Artificial Sequence
  Description of Artificial Sequence: Synthetic oligonucleotide
uucacuuuggcaccucgag

SEQ ID NO: 3258670 - RNA, 19 nt, Artificial Sequence
  Description of Artificial Sequence: Synthetic oligonucleotide
ucucauaauuuauaaaauu

SEQ ID NO: 3258671 - RNA, 19 nt, Artificial Sequence
  Description of Artificial Sequence: Synthetic oligonucleotide
augggucucagccaugugg

SEQ ID NO: 3258672 - RNA, 19 nt, Artificial Sequence
  Description of Artificial Sequence: Synthetic oligonucleotide
uuuccuuucccuuauggau

SEQ ID NO: 3258673 - RNA, 19 nt, Artificial Sequence
  Description of Artificial Sequence: Synthetic oligonucleotide
uucucauaauuuauaaaau

SEQ ID NO: 3258674 - RNA, 19 nt, Artificial Sequence
  Description of Artificial Sequence: Synthetic oligonucleotide
uguaaauaacaguucaauu

SEQ ID NO: 3258675 - RNA, 19 nt, Artificial Sequence
  Description of Artificial Sequence: Synthetic oligonucleotide
gaucuagccaccaacuugc

SEQ ID NO: 3258676 - RNA, 19 nt, Artificial Sequence
  Description of Artificial Sequence: Synthetic oligonucleotide
uguccacucacuauguacu

SEQ ID NO: 3258677 - RNA, 19 nt, Artificial Sequence
  Description of Artificial Sequence: Synthetic oligonucleotide
gaguguaaauaacaguuca

SEQ ID NO: 3258678 - RNA, 19 nt, Artificial Sequence
  Description of Artificial Sequence: Synthetic oligonucleotide
uucagaguauuuuccuggg

SEQ ID NO: 3258679 - RNA, 19 nt, Artificial Sequence
  Description of Artificial Sequence: Synthetic oligonucleotide
ucccuuauggaucuagcca

SEQ ID NO: 3258680 - RNA, 19 nt, Artificial Sequence
  Description of Artificial Sequence: Synthetic oligonucleotide
aauaugcauuucuuaggca

SEQ ID NO: 3258681 - RNA, 19 nt, Artificial Sequence
  Description of Artificial Sequence: Synthetic oligonucleotide
uaggcaaucaguucaacua

SEQ ID NO: 3258682 - RNA, 19 nt, Artificial Sequence
  Description of Artificial Sequence: Synthetic oligonucleotide
auuuauaaaauugucucau

SEQ ID NO: 3258683 - RNA, 19 nt, Artificial Sequence
  Description of Artificial Sequence: Synthetic oligonucleotide
gaaaacuuuaucccacuuc

SEQ ID NO: 3258684 - RNA, 19 nt, Artificial Sequence
  Description of Artificial Sequence: Synthetic oligonucleotide
ucuguggucauuacuaaua

SEQ ID NO: 3258685 - RNA, 19 nt, Artificial Sequence
  Description of Artificial Sequence: Synthetic oligonucleotide
cuauguacuuauaaccuuc

SEQ ID NO: 3258686 - RNA, 19 nt, Artificial Sequence
  Description of Artificial Sequence: Synthetic oligonucleotide
aacuagguaaaggagugcu

SEQ ID NO: 3258687 - RNA, 19 nt, Artificial Sequence
  Description of Artificial Sequence: Synthetic oligonucleotide
uuuuccuuucccuuaugga

SEQ ID NO: 3258688 - RNA, 19 nt, Artificial Sequence
  Description of Artificial Sequence: Synthetic oligonucleotide
uuuaucccacuucucauaa

SEQ ID NO: 3258689 - RNA, 19 nt, Artificial Sequence
  Description of Artificial Sequence: Synthetic oligonucleotide
uccuguugauagcaaauca

SEQ ID NO: 3258690 - RNA, 19 nt, Artificial Sequence
  Description of Artificial Sequence: Synthetic oligonucleotide
uaauguucacuuuggcacc

SEQ ID NO: 3258691 - RNA, 19 nt, Artificial Sequence
  Description of Artificial Sequence: Synthetic oligonucleotide
ucacuuuggcaccucgagg

SEQ ID NO: 3258692 - RNA, 19 nt, Artificial Sequence
  Description of Artificial Sequence: Synthetic oligonucleotide
guacuuauaaccuucuucu

SEQ ID NO: 3258693 - RNA, 19 nt, Artificial Sequence
  Description of Artificial Sequence: Synthetic oligonucleotide
ucucuugaguauuggaugu

SEQ ID NO: 3258694 - RNA, 19 nt, Artificial Sequence
  Description of Artificial Sequence: Synthetic oligonucleotide
ugucucauuuuccuuuccc

SEQ ID NO: 3258695 - RNA, 19 nt, Artificial Sequence
  Description of Artificial Sequence: Synthetic oligonucleotide
ugauagcaaaucauucugu

SEQ ID NO: 3258696 - RNA, 19 nt, Artificial Sequence
  Description of Artificial Sequence: Synthetic oligonucleotide
auugucucauuuuccuuuc

SEQ ID NO: 3258697 - RNA, 19 nt, Artificial Sequence
  Description of Artificial Sequence: Synthetic oligonucleotide
aaccuucuucuccauucac

SEQ ID NO: 3258698 - RNA, 19 nt, Artificial Sequence
  Description of Artificial Sequence: Synthetic oligonucleotide
gucucagccauguggaccg

SEQ ID NO: 3258699 - RNA, 19 nt, Artificial Sequence
  Description of Artificial Sequence: Synthetic oligonucleotide
uuaggcaaucaguucaacu

SEQ ID NO: 3258700 - RNA, 19 nt, Artificial Sequence
  Description of Artificial Sequence: Synthetic oligonucleotide
cuuauaaccuucuucucca

SEQ ID NO: 3258701 - RNA, 19 nt, Artificial Sequence
  Description of Artificial Sequence: Synthetic oligonucleotide
uucuccauucacuaugggu

SEQ ID NO: 3258702 - RNA, 19 nt, Artificial Sequence
  Description of Artificial Sequence: Synthetic oligonucleotide
uuugauuacuucagaguau

SEQ ID NO: 3258703 - RNA, 19 nt, Artificial Sequence
  Description of Artificial Sequence: Synthetic oligonucleotide
ugggcugugucuauggaac

SEQ ID NO: 3258704 - RNA, 19 nt, Artificial Sequence
  Description of Artificial Sequence: Synthetic oligonucleotide
cucucuugaguauuggaug

SEQ ID NO: 3258705 - RNA, 19 nt, Artificial Sequence
  Description of Artificial Sequence: Synthetic oligonucleotide
aauaauuuaagaaaagacc

SEQ ID NO: 3258706 - RNA, 19 nt, Artificial Sequence
  Description of Artificial Sequence: Synthetic oligonucleotide
uauguaaacucuuugauag

SEQ ID NO: 3258707 - RNA, 19 nt, Artificial Sequence
  Description of Artificial Sequence: Synthetic oligonucleotide
aauuggaauauguaaacuc

SEQ ID NO: 3258708 - RNA, 19 nt, Artificial Sequence
  Description of Artificial Sequence: Synthetic oligonucleotide
ucuuucauaauuaugaacu

SEQ ID NO: 3258709 - RNA, 19 nt, Artificial Sequence
  Description of Artificial Sequence: Synthetic oligonucleotide
aaugacaauaauuuaagaa

SEQ ID NO: 3258710 - RNA, 19 nt, Artificial Sequence
  Description of Artificial Sequence: Synthetic oligonucleotide
caaucauaaauuuucaugc

SEQ ID NO: 3258711 - RNA, 19 nt, Artificial Sequence
  Description of Artificial Sequence: Synthetic oligonucleotide
uuaauauugaaugaaaacu

SEQ ID NO: 3258712 - RNA, 19 nt, Artificial Sequence
  Description of Artificial Sequence: Synthetic oligonucleotide
ucaaucauaaauuuucaug

SEQ ID NO: 3258713 - RNA, 19 nt, Artificial Sequence
  Description of Artificial Sequence: Synthetic oligonucleotide
uauauuucaaucauaaauu

SEQ ID NO: 3258714 - RNA, 19 nt, Artificial Sequence
  Description of Artificial Sequence: Synthetic oligonucleotide
uuuaauauugaaugaaaac

SEQ ID NO: 3258715 - RNA, 19 nt, Artificial Sequence
  Description of Artificial Sequence: Synthetic oligonucleotide
ugcuaauucaugaagaggu

SEQ ID NO: 3258716 - RNA, 19 nt, Artificial Sequence
  Description of Artificial Sequence: Synthetic oligonucleotide
aaaacuauauuucaaucau

SEQ ID NO: 3258717 - RNA, 19 nt, Artificial Sequence
  Description of Artificial Sequence: Synthetic oligonucleotide
ucauaaauuuucaugcucc

SEQ ID NO: 3258718 - RNA, 19 nt, Artificial Sequence
  Description of Artificial Sequence: Synthetic oligonucleotide
auuucaaucauaaauuuuc

SEQ ID NO: 3258719 - RNA, 19 nt, Artificial Sequence
  Description of Artificial Sequence: Synthetic oligonucleotide
caauaauuuaagaaaagac

SEQ ID NO: 3258720 - RNA, 19 nt, Artificial Sequence
  Description of Artificial Sequence: Synthetic oligonucleotide
uuuccaaugacaauaauuu

SEQ ID NO: 3258721 - RNA, 19 nt, Artificial Sequence
  Description of Artificial Sequence: Synthetic oligonucleotide
uugaaugaaaacuauauuu

SEQ ID NO: 3258722 - RNA, 19 nt, Artificial Sequence
  Description of Artificial Sequence: Synthetic oligonucleotide
uauugaaugaaaacuauau

SEQ ID NO: 3258723 - RNA, 19 nt, Artificial Sequence
  Description of Artificial Sequence: Synthetic oligonucleotide
aauauguaaacucuuugau

SEQ ID NO: 3258724 - RNA, 19 nt, Artificial Sequence
  Description of Artificial Sequence: Synthetic oligonucleotide
ugaaugaaaacuauauuuc

SEQ ID NO: 3258725 - RNA, 19 nt, Artificial Sequence
  Description of Artificial Sequence: Synthetic oligonucleotide
aaauuuucaugcuccauug

SEQ ID NO: 3258726 - RNA, 19 nt, Artificial Sequence
  Description of Artificial Sequence: Synthetic oligonucleotide
auaauuuaagaaaagacca

SEQ ID NO: 3258727 - RNA, 19 nt, Artificial Sequence
  Description of Artificial Sequence: Synthetic oligonucleotide
augacaauaauuuaagaaa

SEQ ID NO: 3258728 - RNA, 19 nt, Artificial Sequence
  Description of Artificial Sequence: Synthetic oligonucleotide
uuuuauuuccccaagcuua

SEQ ID NO: 3258729 - RNA, 19 nt, Artificial Sequence
  Description of Artificial Sequence: Synthetic oligonucleotide
ucuuugauaggccugaaaa

SEQ ID NO: 3258730 - RNA, 19 nt, Artificial Sequence
  Description of Artificial Sequence: Synthetic oligonucleotide
gaaaaugucauacuggaaa

SEQ ID NO: 3258731 - RNA, 19 nt, Artificial Sequence
  Description of Artificial Sequence: Synthetic oligonucleotide
gaaaacuauauuucaauca

SEQ ID NO: 3258732 - RNA, 19 nt, Artificial Sequence
  Description of Artificial Sequence: Synthetic oligonucleotide
uaauauugaaugaaaacua

SEQ ID NO: 3258733 - RNA, 19 nt, Artificial Sequence
  Description of Artificial Sequence: Synthetic oligonucleotide
aaaacagcaaggaaaaugu

SEQ ID NO: 3258734 - RNA, 19 nt, Artificial Sequence
  Description of Artificial Sequence: Synthetic oligonucleotide
aauuuucaugcuccauugc

SEQ ID NO: 3258735 - RNA, 19 nt, Artificial Sequence
  Description of Artificial Sequence: Synthetic oligonucleotide
uuuuaauauugaaugaaaa

SEQ ID NO: 3258736 - RNA, 19 nt, Artificial Sequence
  Description of Artificial Sequence: Synthetic oligonucleotide
auuucuuucauaauuauga

SEQ ID NO: 3258737 - RNA, 19 nt, Artificial Sequence
  Description of Artificial Sequence: Synthetic oligonucleotide
uucauaauuaugaacuuaa

SEQ ID NO: 3258738 - RNA, 19 nt, Artificial Sequence
  Description of Artificial Sequence: Synthetic oligonucleotide
aagcuuaauauacauauuu

SEQ ID NO: 3258739 - RNA, 19 nt, Artificial Sequence
  Description of Artificial Sequence: Synthetic oligonucleotide
ugacaauaauuuaagaaaa

SEQ ID NO: 3258740 - RNA, 19 nt, Artificial Sequence
  Description of Artificial Sequence: Synthetic oligonucleotide
ugugaauuggaauauguaa

SEQ ID NO: 3258741 - RNA, 19 nt, Artificial Sequence
  Description of Artificial Sequence: Synthetic oligonucleotide
uccaaugacaauaauuuaa

SEQ ID NO: 3258742 - RNA, 19 nt, Artificial Sequence
  Description of Artificial Sequence: Synthetic oligonucleotide
uuaauauacauauuucuuu

SEQ ID NO: 3258743 - RNA, 19 nt, Artificial Sequence
  Description of Artificial Sequence: Synthetic oligonucleotide
aucauaaauuuucaugcuc

SEQ ID NO: 3258744 - RNA, 19 nt, Artificial Sequence
  Description of Artificial Sequence: Synthetic oligonucleotide
auacauauuucuuucauaa

SEQ ID NO: 3258745 - RNA, 19 nt, Artificial Sequence
  Description of Artificial Sequence: Synthetic oligonucleotide
aauauacauauuucuuuca

SEQ ID NO: 3258746 - RNA, 19 nt, Artificial Sequence
  Description of Artificial Sequence: Synthetic oligonucleotide
uaauauacauauuucuuuc

SEQ ID NO: 3258747 - RNA, 19 nt, Artificial Sequence
  Description of Artificial Sequence: Synthetic oligonucleotide
aaucauaaauuuucaugcu

SEQ ID NO: 3258748 - RNA, 19 nt, Artificial Sequence
  Description of Artificial Sequence: Synthetic oligonucleotide
agcaaggaaaaugucauac

SEQ ID NO: 3258749 - RNA, 19 nt, Artificial Sequence
  Description of Artificial Sequence: Synthetic oligonucleotide
uauuucuuucauaauuaug

SEQ ID NO: 3258750 - RNA, 19 nt, Artificial Sequence
  Description of Artificial Sequence: Synthetic oligonucleotide
aaaaugucauacuggaaaa

SEQ ID NO: 3258751 - RNA, 19 nt, Artificial Sequence
  Description of Artificial Sequence: Synthetic oligonucleotide
auugcuaauucaugaagag

SEQ ID NO: 3258752 - RNA, 19 nt, Artificial Sequence
  Description of Artificial Sequence: Synthetic oligonucleotide
aaggaaaaugucauacugg

SEQ ID NO: 3258753 - RNA, 19 nt, Artificial Sequence
  Description of Artificial Sequence: Synthetic oligonucleotide
ugaauuggaauauguaaac

SEQ ID NO: 3258754 - RNA, 19 nt, Artificial Sequence
  Description of Artificial Sequence: Synthetic oligonucleotide
gaauauguaaacucuuuga

SEQ ID NO: 3258755 - RNA, 19 nt, Artificial Sequence
  Description of Artificial Sequence: Synthetic oligonucleotide
uguaaacucuuugauaggc

SEQ ID NO: 3258756 - RNA, 19 nt, Artificial Sequence
  Description of Artificial Sequence: Synthetic oligonucleotide
uaauucaugaagagguugu

SEQ ID NO: 3258757 - RNA, 19 nt, Artificial Sequence
  Description of Artificial Sequence: Synthetic oligonucleotide
ugaaaacuauauuucaauc

SEQ ID NO: 3258758 - RNA, 19 nt, Artificial Sequence
  Description of Artificial Sequence: Synthetic oligonucleotide
uaaauuuucaugcuccauu

SEQ ID NO: 3258759 - RNA, 19 nt, Artificial Sequence
  Description of Artificial Sequence: Synthetic oligonucleotide
aacuauauuucaaucauaa

SEQ ID NO: 3258760 - RNA, 19 nt, Artificial Sequence
  Description of Artificial Sequence: Synthetic oligonucleotide
gaaugaaaacuauauuuca

SEQ ID NO: 3258761 - RNA, 19 nt, Artificial Sequence
  Description of Artificial Sequence: Synthetic oligonucleotide
acauauuucuuucauaauu

SEQ ID NO: 3258762 - RNA, 19 nt, Artificial Sequence
  Description of Artificial Sequence: Synthetic oligonucleotide
uuucaaucauaaauuuuca

SEQ ID NO: 3258763 - RNA, 19 nt, Artificial Sequence
  Description of Artificial Sequence: Synthetic oligonucleotide
aggaaaaugucauacugga

SEQ ID NO: 3258764 - RNA, 19 nt, Artificial Sequence
  Description of Artificial Sequence: Synthetic oligonucleotide
uguguuuccaaugacaaua

SEQ ID NO: 3258765 - RNA, 19 nt, Artificial Sequence
  Description of Artificial Sequence: Synthetic oligonucleotide
acaauaauuuaagaaaaga

SEQ ID NO: 3258766 - RNA, 19 nt, Artificial Sequence
  Description of Artificial Sequence: Synthetic oligonucleotide
caaggaaaaugucauacug

SEQ ID NO: 3258767 - RNA, 19 nt, Artificial Sequence
  Description of Artificial Sequence: Synthetic oligonucleotide
uaaacucuuugauaggccu

SEQ ID NO: 3258768 - RNA, 19 nt, Artificial Sequence
  Description of Artificial Sequence: Synthetic oligonucleotide
uuuaagaaaagaccauuuu

SEQ ID NO: 3258769 - RNA, 19 nt, Artificial Sequence
  Description of Artificial Sequence: Synthetic oligonucleotide
auuuucaugcuccauugcu

SEQ ID NO: 3258770 - RNA, 19 nt, Artificial Sequence
  Description of Artificial Sequence: Synthetic oligonucleotide
uuccccaagcuuaauauac

SEQ ID NO: 3258771 - RNA, 19 nt, Artificial Sequence
  Description of Artificial Sequence: Synthetic oligonucleotide
aaugugaauuggaauaugu

SEQ ID NO: 3258772 - RNA, 19 nt, Artificial Sequence
  Description of Artificial Sequence: Synthetic oligonucleotide
uaauuuaagaaaagaccau

SEQ ID NO: 3258773 - RNA, 19 nt, Artificial Sequence
  Description of Artificial Sequence: Synthetic oligonucleotide
augaaaacuauauuucaau

SEQ ID NO: 3258774 - RNA, 19 nt, Artificial Sequence
  Description of Artificial Sequence: Synthetic oligonucleotide
aauuuaagaaaagaccauu

SEQ ID NO: 3258775 - RNA, 19 nt, Artificial Sequence
  Description of Artificial Sequence: Synthetic oligonucleotide
uucuuucauaauuaugaac

SEQ ID NO: 3258776 - RNA, 19 nt, Artificial Sequence
  Description of Artificial Sequence: Synthetic oligonucleotide
aacagcaaggaaaauguca

SEQ ID NO: 3258777 - RNA, 19 nt, Artificial Sequence
  Description of Artificial Sequence: Synthetic oligonucleotide
cuauauuucaaucauaaau

SEQ ID NO: 3258778 - RNA, 19 nt, Artificial Sequence
  Description of Artificial Sequence: Synthetic oligonucleotide
gacaauaauuuaagaaaag

SEQ ID NO: 3258779 - RNA, 19 nt, Artificial Sequence
  Description of Artificial Sequence: Synthetic oligonucleotide
aauauugaaugaaaacuau

SEQ ID NO: 3258780 - RNA, 19 nt, Artificial Sequence
  Description of Artificial Sequence: Synthetic oligonucleotide
aaaaugugaauuggaauau

SEQ ID NO: 3258781 - RNA, 19 nt, Artificial Sequence
  Description of Artificial Sequence: Synthetic oligonucleotide
aaugaaaacuauauuucaa

SEQ ID NO: 3258782 - RNA, 19 nt, Artificial Sequence
  Description of Artificial Sequence: Synthetic oligonucleotide
auauuucaaucauaaauuu

SEQ ID NO: 3258783 - RNA, 19 nt, Artificial Sequence
  Description of Artificial Sequence: Synthetic oligonucleotide
uauuucaaucauaaauuuu

SEQ ID NO: 3258784 - RNA, 19 nt, Artificial Sequence
  Description of Artificial Sequence: Synthetic oligonucleotide
uugcuaauucaugaagagg

SEQ ID NO: 3258785 - RNA, 19 nt, Artificial Sequence
  Description of Artificial Sequence: Synthetic oligonucleotide
cauaauuaugaacuuaaaa

SEQ ID NO: 3258786 - RNA, 19 nt, Artificial Sequence
  Description of Artificial Sequence: Synthetic oligonucleotide
auauacauauuucuuucau

SEQ ID NO: 3258787 - RNA, 19 nt, Artificial Sequence
  Description of Artificial Sequence: Synthetic oligonucleotide
auuggaauauguaaacucu

SEQ ID NO: 3258788 - RNA, 19 nt, Artificial Sequence
  Description of Artificial Sequence: Synthetic oligonucleotide
uuuauuuccccaagcuuaa

SEQ ID NO: 3258789 - RNA, 19 nt, Artificial Sequence
  Description of Artificial Sequence: Synthetic oligonucleotide
auuuccccaagcuuaauau

SEQ ID NO: 3258790 - RNA, 19 nt, Artificial Sequence
  Description of Artificial Sequence: Synthetic oligonucleotide
agcuuaauauacauauuuc

SEQ ID NO: 3258791 - RNA, 19 nt, Artificial Sequence
  Description of Artificial Sequence: Synthetic oligonucleotide
auugaaugaaaacuauauu

SEQ ID NO: 3258792 - RNA, 19 nt, Artificial Sequence
  Description of Artificial Sequence: Synthetic oligonucleotide
uucaugaagagguuguguu

SEQ ID NO: 3258793 - RNA, 19 nt, Artificial Sequence
  Description of Artificial Sequence: Synthetic oligonucleotide
uauacauauuucuuucaua

SEQ ID NO: 3258794 - RNA, 19 nt, Artificial Sequence
  Description of Artificial Sequence: Synthetic oligonucleotide
augaagagguuguguuucc

SEQ ID NO: 3258795 - RNA, 19 nt, Artificial Sequence
  Description of Artificial Sequence: Synthetic oligonucleotide
auauguaaacucuuugaua

SEQ ID NO: 3258796 - RNA, 19 nt, Artificial Sequence
  Description of Artificial Sequence: Synthetic oligonucleotide
uuucuuucauaauuaugaa

SEQ ID NO: 3258797 - RNA, 19 nt, Artificial Sequence
  Description of Artificial Sequence: Synthetic oligonucleotide
agagguuguguuuccaaug

SEQ ID NO: 3258798 - RNA, 19 nt, Artificial Sequence
  Description of Artificial Sequence: Synthetic oligonucleotide
uuucaugcuccauugcuaa

SEQ ID NO: 3258799 - RNA, 19 nt, Artificial Sequence
  Description of Artificial Sequence: Synthetic oligonucleotide
auguaaacucuuugauagg

SEQ ID NO: 3258800 - RNA, 19 nt, Artificial Sequence
  Description of Artificial Sequence: Synthetic oligonucleotide
cauugcuaauucaugaaga

SEQ ID NO: 3258801 - RNA, 19 nt, Artificial Sequence
  Description of Artificial Sequence: Synthetic oligonucleotide
uuuucaugcuccauugcua

SEQ ID NO: 3258802 - RNA, 19 nt, Artificial Sequence
  Description of Artificial Sequence: Synthetic oligonucleotide
cauauuucuuucauaauua

SEQ ID NO: 3258803 - RNA, 19 nt, Artificial Sequence
  Description of Artificial Sequence: Synthetic oligonucleotide
uucaaucauaaauuuucau

SEQ ID NO: 3258804 - RNA, 19 nt, Artificial Sequence
  Description of Artificial Sequence: Synthetic oligonucleotide
ugcuccauugcuaauucau

SEQ ID NO: 3258805 - RNA, 19 nt, Artificial Sequence
  Description of Artificial Sequence: Synthetic oligonucleotide
agaaacauuacccagauuc

SEQ ID NO: 3258806 - RNA, 19 nt, Artificial Sequence
  Description of Artificial Sequence: Synthetic oligonucleotide
uuagagaugauaaacacag

SEQ ID NO: 3258807 - RNA, 19 nt, Artificial Sequence
  Description of Artificial Sequence: Synthetic oligonucleotide
aauaaaucaggacacuuac

SEQ ID NO: 3258808 - RNA, 19 nt, Artificial Sequence
  Description of Artificial Sequence: Synthetic oligonucleotide
uugucuaucuucuagaaag

SEQ ID NO: 3258809 - RNA, 19 nt, Artificial Sequence
  Description of Artificial Sequence: Synthetic oligonucleotide
ucuaguagaauauucaaug

SEQ ID NO: 3258810 - RNA, 19 nt, Artificial Sequence
  Description of Artificial Sequence: Synthetic oligonucleotide
acuaguauuuuauauacag

SEQ ID NO: 3258811 - RNA, 19 nt, Artificial Sequence
  Description of Artificial Sequence: Synthetic oligonucleotide
aacacauuaaucuuuggcu

SEQ ID NO: 3258812 - RNA, 19 nt, Artificial Sequence
  Description of Artificial Sequence: Synthetic oligonucleotide
gaauuguaggcguagaagg

SEQ ID NO: 3258813 - RNA, 19 nt, Artificial Sequence
  Description of Artificial Sequence: Synthetic oligonucleotide
auaacuggugauuuaagac

SEQ ID NO: 3258814 - RNA, 19 nt, Artificial Sequence
  Description of Artificial Sequence: Synthetic oligonucleotide
auuuagagaugauaaacac

SEQ ID NO: 3258815 - RNA, 19 nt, Artificial Sequence
  Description of Artificial Sequence: Synthetic oligonucleotide
uauuaauaaaucaggacac

SEQ ID NO: 3258816 - RNA, 19 nt, Artificial Sequence
  Description of Artificial Sequence: Synthetic oligonucleotide
aauucucucacugcaaggc

SEQ ID NO: 3258817 - RNA, 19 nt, Artificial Sequence
  Description of Artificial Sequence: Synthetic oligonucleotide
gauuaugcagaaaauaucc

SEQ ID NO: 3258818 - RNA, 19 nt, Artificial Sequence
  Description of Artificial Sequence: Synthetic oligonucleotide
aguauauuaauaaaucagg

SEQ ID NO: 3258819 - RNA, 19 nt, Artificial Sequence
  Description of Artificial Sequence: Synthetic oligonucleotide
ucauuuaaaucaaagcucu

SEQ ID NO: 3258820 - RNA, 19 nt, Artificial Sequence
  Description of Artificial Sequence: Synthetic oligonucleotide
aguauaguaaauaacaaug

SEQ ID NO: 3258821 - RNA, 19 nt, Artificial Sequence
  Description of Artificial Sequence: Synthetic oligonucleotide
uguacuguccauccgaucc

SEQ ID NO: 3258822 - RNA, 19 nt, Artificial Sequence
  Description of Artificial Sequence: Synthetic oligonucleotide
aacacacacgcacacacac

SEQ ID NO: 3258823 - RNA, 19 nt, Artificial Sequence
  Description of Artificial Sequence: Synthetic oligonucleotide
uaaacuuaguccuaaugag

SEQ ID NO: 3258824 - RNA, 19 nt, Artificial Sequence
  Description of Artificial Sequence: Synthetic oligonucleotide
gauucuagcaugcaauuag

SEQ ID NO: 3258825 - RNA, 19 nt, Artificial Sequence
  Description of Artificial Sequence: Synthetic oligonucleotide
aaggcaguuagcaaugucc

SEQ ID NO: 3258826 - RNA, 19 nt, Artificial Sequence
  Description of Artificial Sequence: Synthetic oligonucleotide
acuuaaaggaacugucacc

SEQ ID NO: 3258827 - RNA, 19 nt, Artificial Sequence
  Description of Artificial Sequence: Synthetic oligonucleotide
ugaguugaagauuaugcag

SEQ ID NO: 3258828 - RNA, 19 nt, Artificial Sequence
  Description of Artificial Sequence: Synthetic oligonucleotide
guauuuacgaauaugggcc

SEQ ID NO: 3258829 - RNA, 19 nt, Artificial Sequence
  Description of Artificial Sequence: Synthetic oligonucleotide
uguaaaacuggaagcagag

SEQ ID NO: 3258830 - RNA, 19 nt, Artificial Sequence
  Description of Artificial Sequence: Synthetic oligonucleotide
uuucaccuaauauaacugg

SEQ ID NO: 3258831 - RNA, 19 nt, Artificial Sequence
  Description of Artificial Sequence: Synthetic oligonucleotide
aauacuuaaagaacaacca

SEQ ID NO: 3258832 - RNA, 19 nt, Artificial Sequence
  Description of Artificial Sequence: Synthetic oligonucleotide
cuaaguuuugaagaaaugc

SEQ ID NO: 3258833 - RNA, 19 nt, Artificial Sequence
  Description of Artificial Sequence: Synthetic oligonucleotide
acagcaacaucuuaaacug

SEQ ID NO: 3258834 - RNA, 19 nt, Artificial Sequence
  Description of Artificial Sequence: Synthetic oligonucleotide
uuugccuaucuaauuauag

SEQ ID NO: 3258835 - RNA, 19 nt, Artificial Sequence
  Description of Artificial Sequence: Synthetic oligonucleotide
uuccauaacuucauaaccc

SEQ ID NO: 3258836 - RNA, 19 nt, Artificial Sequence
  Description of Artificial Sequence: Synthetic oligonucleotide
uacaauaaguaucuugaca

SEQ ID NO: 3258837 - RNA, 19 nt, Artificial Sequence
  Description of Artificial Sequence: Synthetic oligonucleotide
aaauccuggaaacaucucu

SEQ ID NO: 3258838 - RNA, 19 nt, Artificial Sequence
  Description of Artificial Sequence: Synthetic oligonucleotide
uuagcucucauucuguucu

SEQ ID NO: 3258839 - RNA, 19 nt, Artificial Sequence
  Description of Artificial Sequence: Synthetic oligonucleotide
aguauguuagucaucuucc

SEQ ID NO: 3258840 - RNA, 19 nt, Artificial Sequence
  Description of Artificial Sequence: Synthetic oligonucleotide
auuuaaaccuaugucauag

SEQ ID NO: 3258841 - RNA, 19 nt, Artificial Sequence
  Description of Artificial Sequence: Synthetic oligonucleotide
uuuagagaugauaaacaca

SEQ ID NO: 3258842 - RNA, 19 nt, Artificial Sequence
  Description of Artificial Sequence: Synthetic oligonucleotide
ucaucuuccacauuauaug

SEQ ID NO: 3258843 - RNA, 19 nt, Artificial Sequence
  Description of Artificial Sequence: Synthetic oligonucleotide
ugguggaucauccagacaa

SEQ ID NO: 3258844 - RNA, 19 nt, Artificial Sequence
  Description of Artificial Sequence: Synthetic oligonucleotide
uaaaacuggaagcagaguu

SEQ ID NO: 3258845 - RNA, 19 nt, Artificial Sequence
  Description of Artificial Sequence: Synthetic oligonucleotide
aguaucuugacauuaacua

SEQ ID NO: 3258846 - RNA, 19 nt, Artificial Sequence
  Description of Artificial Sequence: Synthetic oligonucleotide
agcacacacaaacacacac

SEQ ID NO: 3258847 - RNA, 19 nt, Artificial Sequence
  Description of Artificial Sequence: Synthetic oligonucleotide
uuuacuaguauuuuauaua

SEQ ID NO: 3258848 - RNA, 19 nt, Artificial Sequence
  Description of Artificial Sequence: Synthetic oligonucleotide
aauauucaauggaugaauc

SEQ ID NO: 3258849 - RNA, 19 nt, Artificial Sequence
  Description of Artificial Sequence: Synthetic oligonucleotide
gaacacauuaaucuuuggc

SEQ ID NO: 3258850 - RNA, 19 nt, Artificial Sequence
  Description of Artificial Sequence: Synthetic oligonucleotide
ugauaacaaaucuaacuug

SEQ ID NO: 3258851 - RNA, 19 nt, Artificial Sequence
  Description of Artificial Sequence: Synthetic oligonucleotide
agacagaugauguacuguc

SEQ ID NO: 3258852 - RNA, 19 nt, Artificial Sequence
  Description of Artificial Sequence: Synthetic oligonucleotide
ucauagaaacauuacccag

SEQ ID NO: 3258853 - RNA, 19 nt, Artificial Sequence
  Description of Artificial Sequence: Synthetic oligonucleotide
aacuuaguccuaaugagag

SEQ ID NO: 3258854 - RNA, 19 nt, Artificial Sequence
  Description of Artificial Sequence: Synthetic oligonucleotide
acuuacaauaaguaucuug

SEQ ID NO: 3258855 - RNA, 19 nt, Artificial Sequence
  Description of Artificial Sequence: Synthetic oligonucleotide
uaacuggugauuuaagaca

SEQ ID NO: 3258856 - RNA, 19 nt, Artificial Sequence
  Description of Artificial Sequence: Synthetic oligonucleotide
auccuaauugucuaucuuc

SEQ ID NO: 3258857 - RNA, 19 nt, Artificial Sequence
  Description of Artificial Sequence: Synthetic oligonucleotide
acgaauaacuuaaaggaac

SEQ ID NO: 3258858 - RNA, 19 nt, Artificial Sequence
  Description of Artificial Sequence: Synthetic oligonucleotide
uauaacuggugauuuaaga

SEQ ID NO: 3258859 - RNA, 19 nt, Artificial Sequence
  Description of Artificial Sequence: Synthetic oligonucleotide
cauuauaugccaacugugc

SEQ ID NO: 3258860 - RNA, 19 nt, Artificial Sequence
  Description of Artificial Sequence: Synthetic oligonucleotide
agcagaguuuccuauuggc

SEQ ID NO: 3258861 - RNA, 19 nt, Artificial Sequence
  Description of Artificial Sequence: Synthetic oligonucleotide
auuaguuuucaccuaauau

SEQ ID NO: 3258862 - RNA, 19 nt, Artificial Sequence
  Description of Artificial Sequence: Synthetic oligonucleotide
uugucauuaagccuagaga

SEQ ID NO: 3258863 - RNA, 19 nt, Artificial Sequence
  Description of Artificial Sequence: Synthetic oligonucleotide
acuauuagcucucauucug

SEQ ID NO: 3258864 - RNA, 19 nt, Artificial Sequence
  Description of Artificial Sequence: Synthetic oligonucleotide
cuaauugucuaucuucuag

SEQ ID NO: 3258865 - RNA, 19 nt, Artificial Sequence
  Description of Artificial Sequence: Synthetic oligonucleotide
ugauuuaaaccuaugucau

SEQ ID NO: 3258866 - RNA, 19 nt, Artificial Sequence
  Description of Artificial Sequence: Synthetic oligonucleotide
gacacuuacaauaaguauc

SEQ ID NO: 3258867 - RNA, 19 nt, Artificial Sequence
  Description of Artificial Sequence: Synthetic oligonucleotide
aguuuggagcaauauacag

SEQ ID NO: 3258868 - RNA, 19 nt, Artificial Sequence
  Description of Artificial Sequence: Synthetic oligonucleotide
agaagaacuccuuugauuu

SEQ ID NO: 3258869 - RNA, 19 nt, Artificial Sequence
  Description of Artificial Sequence: Synthetic oligonucleotide
acauuacccagauucuagc

SEQ ID NO: 3258870 - RNA, 19 nt, Artificial Sequence
  Description of Artificial Sequence: Synthetic oligonucleotide
auaguaaauaacaaugcug

SEQ ID NO: 3258871 - RNA, 19 nt, Artificial Sequence
  Description of Artificial Sequence: Synthetic oligonucleotide
uuaaaccuaugucauagaa

SEQ ID NO: 3258872 - RNA, 19 nt, Artificial Sequence
  Description of Artificial Sequence: Synthetic oligonucleotide
agcuacuaaguuuugaaga

SEQ ID NO: 3258873 - RNA, 19 nt, Artificial Sequence
  Description of Artificial Sequence: Synthetic oligonucleotide
ugugucuaugugaagcugc

SEQ ID NO: 3258874 - RNA, 19 nt, Artificial Sequence
  Description of Artificial Sequence: Synthetic oligonucleotide
aaagucagcauuguaauua

SEQ ID NO: 3258875 - RNA, 19 nt, Artificial Sequence
  Description of Artificial Sequence: Synthetic oligonucleotide
acacauuaaucuuuggcug

SEQ ID NO: 3258876 - RNA, 19 nt, Artificial Sequence
  Description of Artificial Sequence: Synthetic oligonucleotide
uaguuagucucuucuagag

SEQ ID NO: 3258877 - RNA, 19 nt, Artificial Sequence
  Description of Artificial Sequence: Synthetic oligonucleotide
uugaguugaagauuaugca

SEQ ID NO: 3258878 - RNA, 19 nt, Artificial Sequence
  Description of Artificial Sequence: Synthetic oligonucleotide
uuggagggagugcuaaucg

SEQ ID NO: 3258879 - RNA, 19 nt, Artificial Sequence
  Description of Artificial Sequence: Synthetic oligonucleotide
ugucucuuggucuaguaga

SEQ ID NO: 3258880 - RNA, 19 nt, Artificial Sequence
  Description of Artificial Sequence: Synthetic oligonucleotide
aaauggaccugguggauca

SEQ ID NO: 3258881 - RNA, 19 nt, Artificial Sequence
  Description of Artificial Sequence: Synthetic oligonucleotide
acuaaccuuccaaauaagc

SEQ ID NO: 3258882 - RNA, 19 nt, Artificial Sequence
  Description of Artificial Sequence: Synthetic oligonucleotide
uguaaaugguaguuagucu

SEQ ID NO: 3258883 - RNA, 19 nt, Artificial Sequence
  Description of Artificial Sequence: Synthetic oligonucleotide
auuauaugccaacugugca

SEQ ID NO: 3258884 - RNA, 19 nt, Artificial Sequence
  Description of Artificial Sequence: Synthetic oligonucleotide
ucaccuaauauaacuggug

SEQ ID NO: 3258885 - RNA, 19 nt, Artificial Sequence
  Description of Artificial Sequence: Synthetic oligonucleotide
aauugucuaucuucuagaa

SEQ ID NO: 3258886 - RNA, 19 nt, Artificial Sequence
  Description of Artificial Sequence: Synthetic oligonucleotide
uccuaauugucuaucuucu

SEQ ID NO: 3258887 - RNA, 19 nt, Artificial Sequence
  Description of Artificial Sequence: Synthetic oligonucleotide
cacacacaaacacacacgc

SEQ ID NO: 3258888 - RNA, 19 nt, Artificial Sequence
  Description of Artificial Sequence: Synthetic oligonucleotide
cuuaagagucuucuaacug

SEQ ID NO: 3258889 - RNA, 19 nt, Artificial Sequence
  Description of Artificial Sequence: Synthetic oligonucleotide
uuaaaagacagcagugaau

SEQ ID NO: 3258890 - RNA, 19 nt, Artificial Sequence
  Description of Artificial Sequence: Synthetic oligonucleotide
aacauuacccagauucuag

SEQ ID NO: 3258891 - RNA, 19 nt, Artificial Sequence
  Description of Artificial Sequence: Synthetic oligonucleotide
ggugauuuaagacaagcac

SEQ ID NO: 3258892 - RNA, 19 nt, Artificial Sequence
  Description of Artificial Sequence: Synthetic oligonucleotide
auguuagucaucuuccaca

SEQ ID NO: 3258893 - RNA, 19 nt, Artificial Sequence
  Description of Artificial Sequence: Synthetic oligonucleotide
uaacaaaucuaacuuguuu

SEQ ID NO: 3258894 - RNA, 19 nt, Artificial Sequence
  Description of Artificial Sequence: Synthetic oligonucleotide
caucauuuaaaucaaagcu

SEQ ID NO: 3258895 - RNA, 19 nt, Artificial Sequence
  Description of Artificial Sequence: Synthetic oligonucleotide
uccauaacuucauaaccca

SEQ ID NO: 3258896 - RNA, 19 nt, Artificial Sequence
  Description of Artificial Sequence: Synthetic oligonucleotide
uucuucuaggcuaucaaau

SEQ ID NO: 3258897 - RNA, 19 nt, Artificial Sequence
  Description of Artificial Sequence: Synthetic oligonucleotide
agaaagucagcauuguaau

SEQ ID NO: 3258898 - RNA, 19 nt, Artificial Sequence
  Description of Artificial Sequence: Synthetic oligonucleotide
ucccaauucacugugucag

SEQ ID NO: 3258899 - RNA, 19 nt, Artificial Sequence
  Description of Artificial Sequence: Synthetic oligonucleotide
ggaacugggacguaagggg

SEQ ID NO: 3258900 - RNA, 19 nt, Artificial Sequence
  Description of Artificial Sequence: Synthetic oligonucleotide
aauuaguuuucaccuaaua

SEQ ID NO: 3258901 - RNA, 19 nt, Artificial Sequence
  Description of Artificial Sequence: Synthetic oligonucleotide
uauguuagucaucuuccac

SEQ ID NO: 3258902 - RNA, 19 nt, Artificial Sequence
  Description of Artificial Sequence: Synthetic oligonucleotide
aagcagaguuuccuauugg

SEQ ID NO: 3258903 - RNA, 19 nt, Artificial Sequence
  Description of Artificial Sequence: Synthetic oligonucleotide
uucaccuaauauaacuggu

SEQ ID NO: 3258904 - RNA, 19 nt, Artificial Sequence
  Description of Artificial Sequence: Synthetic oligonucleotide
uuaaaccagcguuuuggag

SEQ ID NO: 3258905 - RNA, 19 nt, Artificial Sequence
  Description of Artificial Sequence: Synthetic oligonucleotide
cauaaaaccaucaaagucg

SEQ ID NO: 3258906 - RNA, 19 nt, Artificial Sequence
  Description of Artificial Sequence: Synthetic oligonucleotide
aaaccaucaaagucgaugc

SEQ ID NO: 3258907 - RNA, 19 nt, Artificial Sequence
  Description of Artificial Sequence: Synthetic oligonucleotide
aacugauugauuuccuucc

SEQ ID NO: 3258908 - RNA, 19 nt, Artificial Sequence
  Description of Artificial Sequence: Synthetic oligonucleotide
ucaaacagcacauagcucc

SEQ ID NO: 3258909 - RNA, 19 nt, Artificial Sequence
  Description of Artificial Sequence: Synthetic oligonucleotide
cauaagauugcaaagagac

SEQ ID NO: 3258910 - RNA, 19 nt, Artificial Sequence
  Description of Artificial Sequence: Synthetic oligonucleotide
auugcaaagagacaagcgg

SEQ ID NO: 3258911 - RNA, 19 nt, Artificial Sequence
  Description of Artificial Sequence: Synthetic oligonucleotide
aaaacaccagcucagacca

SEQ ID NO: 3258912 - RNA, 19 nt, Artificial Sequence
  Description of Artificial Sequence: Synthetic oligonucleotide
uuguccaaaagccugaaca

SEQ ID NO: 3258913 - RNA, 19 nt, Artificial Sequence
  Description of Artificial Sequence: Synthetic oligonucleotide
aacaauacaacaaucagaa

SEQ ID NO: 3258914 - RNA, 19 nt, Artificial Sequence
  Description of Artificial Sequence: Synthetic oligonucleotide
aaaaccaucaaagucgaug

SEQ ID NO: 3258915 - RNA, 19 nt, Artificial Sequence
  Description of Artificial Sequence: Synthetic oligonucleotide
uucauaagauugcaaagag

SEQ ID NO: 3258916 - RNA, 19 nt, Artificial Sequence
  Description of Artificial Sequence: Synthetic oligonucleotide
aaaaugucacuugaggauc

SEQ ID NO: 3258917 - RNA, 19 nt, Artificial Sequence
  Description of Artificial Sequence: Synthetic oligonucleotide
aaagagacaagcggaagac

SEQ ID NO: 3258918 - RNA, 19 nt, Artificial Sequence
  Description of Artificial Sequence: Synthetic oligonucleotide
acaacaaucagaaaauguc

SEQ ID NO: 3258919 - RNA, 19 nt, Artificial Sequence
  Description of Artificial Sequence: Synthetic oligonucleotide
cuauugauguccaaaacac

SEQ ID NO: 3258920 - RNA, 19 nt, Artificial Sequence
  Description of Artificial Sequence: Synthetic oligonucleotide
aggaacagugauuagcugg

SEQ ID NO: 3258921 - RNA, 19 nt, Artificial Sequence
  Description of Artificial Sequence: Synthetic oligonucleotide
aacaaucagaaaaugucac

SEQ ID NO: 3258922 - RNA, 19 nt, Artificial Sequence
  Description of Artificial Sequence: Synthetic oligonucleotide
uggaacaauacaacaauca

SEQ ID NO: 3258923 - RNA, 19 nt, Artificial Sequence
  Description of Artificial Sequence: Synthetic oligonucleotide
uaagauugcaaagagacaa

SEQ ID NO: 3258924 - RNA, 19 nt, Artificial Sequence
  Description of Artificial Sequence: Synthetic oligonucleotide
aaagucgaugccaaguucg

SEQ ID NO: 3258925 - RNA, 19 nt, Artificial Sequence
  Description of Artificial Sequence: Synthetic oligonucleotide
uguucauaagauugcaaag

SEQ ID NO: 3258926 - RNA, 19 nt, Artificial Sequence
  Description of Artificial Sequence: Synthetic oligonucleotide
aacagugauuagcuggaac

SEQ ID NO: 3258927 - RNA, 19 nt, Artificial Sequence
  Description of Artificial Sequence: Synthetic oligonucleotide
ucacacaagccauaaaacc

SEQ ID NO: 3258928 - RNA, 19 nt, Artificial Sequence
  Description of Artificial Sequence: Synthetic oligonucleotide
agaaaaugucacuugagga

SEQ ID NO: 3258929 - RNA, 19 nt, Artificial Sequence
  Description of Artificial Sequence: Synthetic oligonucleotide
gaacauuuugaacagguuc

SEQ ID NO: 3258930 - RNA, 19 nt, Artificial Sequence
  Description of Artificial Sequence: Synthetic oligonucleotide
uugauuuccuuccucuggg

SEQ ID NO: 3258931 - RNA, 19 nt, Artificial Sequence
  Description of Artificial Sequence: Synthetic oligonucleotide
aauacaacaaucagaaaau

SEQ ID NO: 3258932 - RNA, 19 nt, Artificial Sequence
  Description of Artificial Sequence: Synthetic oligonucleotide
ugguucuuguccaaaagcc

SEQ ID NO: 3258933 - RNA, 19 nt, Artificial Sequence
  Description of Artificial Sequence: Synthetic oligonucleotide
auugauuuccuuccucugg

SEQ ID NO: 3258934 - RNA, 19 nt, Artificial Sequence
  Description of Artificial Sequence: Synthetic oligonucleotide
aaucagaaaaugucacuug

SEQ ID NO: 3258935 - RNA, 19 nt, Artificial Sequence
  Description of Artificial Sequence: Synthetic oligonucleotide
aacuucaacugauugauuu

SEQ ID NO: 3258936 - RNA, 19 nt, Artificial Sequence
  Description of Artificial Sequence: Synthetic oligonucleotide
caauacaacaaucagaaaa

SEQ ID NO: 3258937 - RNA, 19 nt, Artificial Sequence
  Description of Artificial Sequence: Synthetic oligonucleotide
auuuccuuccucugggccc

SEQ ID NO: 3258938 - RNA, 19 nt, Artificial Sequence
  Description of Artificial Sequence: Synthetic oligonucleotide
agccugaacauuuugaaca

SEQ ID NO: 3258939 - RNA, 19 nt, Artificial Sequence
  Description of Artificial Sequence: Synthetic oligonucleotide
aagccugaacauuuugaac

SEQ ID NO: 3258940 - RNA, 19 nt, Artificial Sequence
  Description of Artificial Sequence: Synthetic oligonucleotide
uacaacaaucagaaaaugu

SEQ ID NO: 3258941 - RNA, 19 nt, Artificial Sequence
  Description of Artificial Sequence: Synthetic oligonucleotide
agaccagugucucaggaac

SEQ ID NO: 3258942 - RNA, 19 nt, Artificial Sequence
  Description of Artificial Sequence: Synthetic oligonucleotide
aaguucgcugcuugcauac

SEQ ID NO: 3258943 - RNA, 19 nt, Artificial Sequence
  Description of Artificial Sequence: Synthetic oligonucleotide
caaaacaccagcucagacc

SEQ ID NO: 3258944 - RNA, 19 nt, Artificial Sequence
  Description of Artificial Sequence: Synthetic oligonucleotide
aacauuuugaacagguucu

SEQ ID NO: 3258945 - RNA, 19 nt, Artificial Sequence
  Description of Artificial Sequence: Synthetic oligonucleotide
cagaaaaugucacuugagg

SEQ ID NO: 3258946 - RNA, 19 nt, Artificial Sequence
  Description of Artificial Sequence: Synthetic oligonucleotide
uguccaaaacaccagcuca

SEQ ID NO: 3258947 - RNA, 19 nt, Artificial Sequence
  Description of Artificial Sequence: Synthetic oligonucleotide
uuugaacagguucuccagg

SEQ ID NO: 3258948 - RNA, 19 nt, Artificial Sequence
  Description of Artificial Sequence: Synthetic oligonucleotide
ucaggaacagugauuagcu

SEQ ID NO: 3258949 - RNA, 19 nt, Artificial Sequence
  Description of Artificial Sequence: Synthetic oligonucleotide
agcacagccacucagccag

SEQ ID NO: 3258950 - RNA, 19 nt, Artificial Sequence
  Description of Artificial Sequence: Synthetic oligonucleotide
acagugauuagcuggaaca

SEQ ID NO: 3258951 - RNA, 19 nt, Artificial Sequence
  Description of Artificial Sequence: Synthetic oligonucleotide
cugagaucagcucaaacag

SEQ ID NO: 3258952 - RNA, 19 nt, Artificial Sequence
  Description of Artificial Sequence: Synthetic oligonucleotide
uuagcuggaacaauacaac

SEQ ID NO: 3258953 - RNA, 19 nt, Artificial Sequence
  Description of Artificial Sequence: Synthetic oligonucleotide
accagcacacagcacagcc

SEQ ID NO: 3258954 - RNA, 19 nt, Artificial Sequence
  Description of Artificial Sequence: Synthetic oligonucleotide
aaagccugaacauuuugaa

SEQ ID NO: 3258955 - RNA, 19 nt, Artificial Sequence
  Description of Artificial Sequence: Synthetic oligonucleotide
ucagaaaaugucacuugag

SEQ ID NO: 3258956 - RNA, 19 nt, Artificial Sequence
  Description of Artificial Sequence: Synthetic oligonucleotide
gaucacacaagccauaaaa

SEQ ID NO: 3258957 - RNA, 19 nt, Artificial Sequence
  Description of Artificial Sequence: Synthetic oligonucleotide
aagcggaagacagggaagc

SEQ ID NO: 3258958 - RNA, 19 nt, Artificial Sequence
  Description of Artificial Sequence: Synthetic oligonucleotide
agccauaaaaccaucaaag

SEQ ID NO: 3258959 - RNA, 19 nt, Artificial Sequence
  Description of Artificial Sequence: Synthetic oligonucleotide
uuuugaacagguucuccag

SEQ ID NO: 3258960 - RNA, 19 nt, Artificial Sequence
  Description of Artificial Sequence: Synthetic oligonucleotide
ugacccacaacuucaacug

SEQ ID NO: 3258961 - RNA, 19 nt, Artificial Sequence
  Description of Artificial Sequence: Synthetic oligonucleotide
agggaagcuauugaugucc

SEQ ID NO: 3258962 - RNA, 19 nt, Artificial Sequence
  Description of Artificial Sequence: Synthetic oligonucleotide
agauugcaaagagacaagc

SEQ ID NO: 3258963 - RNA, 19 nt, Artificial Sequence
  Description of Artificial Sequence: Synthetic oligonucleotide
aaaugucacuugaggaucc

SEQ ID NO: 3258964 - RNA, 19 nt, Artificial Sequence
  Description of Artificial Sequence: Synthetic oligonucleotide
aacaccagcucagaccagc

SEQ ID NO: 3258965 - RNA, 19 nt, Artificial Sequence
  Description of Artificial Sequence: Synthetic oligonucleotide
uugcaaagagacaagcgga

SEQ ID NO: 3258966 - RNA, 19 nt, Artificial Sequence
  Description of Artificial Sequence: Synthetic oligonucleotide
acagggaagcuauugaugu

SEQ ID NO: 3258967 - RNA, 19 nt, Artificial Sequence
  Description of Artificial Sequence: Synthetic oligonucleotide
aaccaucaaagucgaugcc

SEQ ID NO: 3258968 - RNA, 19 nt, Artificial Sequence
  Description of Artificial Sequence: Synthetic oligonucleotide
gacaaugccguucugguuc

SEQ ID NO: 3258969 - RNA, 19 nt, Artificial Sequence
  Description of Artificial Sequence: Synthetic oligonucleotide
auuuugaacagguucucca

SEQ ID NO: 3258970 - RNA, 19 nt, Artificial Sequence
  Description of Artificial Sequence: Synthetic oligonucleotide
gauugcaaagagacaagcg

SEQ ID NO: 3258971 - RNA, 19 nt, Artificial Sequence
  Description of Artificial Sequence: Synthetic oligonucleotide
uauugauguccaaaacacc

SEQ ID NO: 3258972 - RNA, 19 nt, Artificial Sequence
  Description of Artificial Sequence: Synthetic oligonucleotide
gaacagguucuccaggcgg

SEQ ID NO: 3258973 - RNA, 19 nt, Artificial Sequence
  Description of Artificial Sequence: Synthetic oligonucleotide
ugauugauuuccuuccucu

SEQ ID NO: 3258974 - RNA, 19 nt, Artificial Sequence
  Description of Artificial Sequence: Synthetic oligonucleotide
ucauaagauugcaaagaga

SEQ ID NO: 3258975 - RNA, 19 nt, Artificial Sequence
  Description of Artificial Sequence: Synthetic oligonucleotide
acuucaacugauugauuuc

SEQ ID NO: 3258976 - RNA, 19 nt, Artificial Sequence
  Description of Artificial Sequence: Synthetic oligonucleotide
auugauguccaaaacacca

SEQ ID NO: 3258977 - RNA, 19 nt, Artificial Sequence
  Description of Artificial Sequence: Synthetic oligonucleotide
ugauguccaaaacaccagc

SEQ ID NO: 3258978 - RNA, 19 nt, Artificial Sequence
  Description of Artificial Sequence: Synthetic oligonucleotide
uugauguccaaaacaccag

SEQ ID NO: 3258979 - RNA, 19 nt, Artificial Sequence
  Description of Artificial Sequence: Synthetic oligonucleotide
acagcacagccacucagcc

SEQ ID NO: 3258980 - RNA, 19 nt, Artificial Sequence
  Description of Artificial Sequence: Synthetic oligonucleotide
aucagaaaaugucacuuga

SEQ ID NO: 3258981 - RNA, 19 nt, Artificial Sequence
  Description of Artificial Sequence: Synthetic oligonucleotide
aagacagggaagcuauuga

SEQ ID NO: 3258982 - RNA, 19 nt, Artificial Sequence
  Description of Artificial Sequence: Synthetic oligonucleotide
aagccauaaaaccaucaaa

SEQ ID NO: 3258983 - RNA, 19 nt, Artificial Sequence
  Description of Artificial Sequence: Synthetic oligonucleotide
ggaacaauacaacaaucag

SEQ ID NO: 3258984 - RNA, 19 nt, Artificial Sequence
  Description of Artificial Sequence: Synthetic oligonucleotide
ucugguucuuguccaaaag

SEQ ID NO: 3258985 - RNA, 19 nt, Artificial Sequence
  Description of Artificial Sequence: Synthetic oligonucleotide
agcuauugauguccaaaac

SEQ ID NO: 3258986 - RNA, 19 nt, Artificial Sequence
  Description of Artificial Sequence: Synthetic oligonucleotide
aagcuauugauguccaaaa

SEQ ID NO: 3258987 - RNA, 19 nt, Artificial Sequence
  Description of Artificial Sequence: Synthetic oligonucleotide
uugaacagguucuccaggc

SEQ ID NO: 3258988 - RNA, 19 nt, Artificial Sequence
  Description of Artificial Sequence: Synthetic oligonucleotide
ugaggauccguguucauaa

SEQ ID NO: 3258989 - RNA, 19 nt, Artificial Sequence
  Description of Artificial Sequence: Synthetic oligonucleotide
ugauuagcuggaacaauac

SEQ ID NO: 3258990 - RNA, 19 nt, Artificial Sequence
  Description of Artificial Sequence: Synthetic oligonucleotide
aacagcacauagcuccgag

SEQ ID NO: 3258991 - RNA, 19 nt, Artificial Sequence
  Description of Artificial Sequence: Synthetic oligonucleotide
ugaacagguucuccaggcg

SEQ ID NO: 3258992 - RNA, 19 nt, Artificial Sequence
  Description of Artificial Sequence: Synthetic oligonucleotide
ugucacuugaggauccgug

SEQ ID NO: 3258993 - RNA, 19 nt, Artificial Sequence
  Description of Artificial Sequence: Synthetic oligonucleotide
gaacaauacaacaaucaga

SEQ ID NO: 3258994 - RNA, 19 nt, Artificial Sequence
  Description of Artificial Sequence: Synthetic oligonucleotide
auguccaaaacaccagcuc

SEQ ID NO: 3258995 - RNA, 19 nt, Artificial Sequence
  Description of Artificial Sequence: Synthetic oligonucleotide
uccaaaagccugaacauuu

SEQ ID NO: 3258996 - RNA, 19 nt, Artificial Sequence
  Description of Artificial Sequence: Synthetic oligonucleotide
aaaagccugaacauuuuga

SEQ ID NO: 3258997 - RNA, 19 nt, Artificial Sequence
  Description of Artificial Sequence: Synthetic oligonucleotide
aucacacaagccauaaaac

SEQ ID NO: 3258998 - RNA, 19 nt, Artificial Sequence
  Description of Artificial Sequence: Synthetic oligonucleotide
agacaagcggaagacaggg

SEQ ID NO: 3258999 - RNA, 19 nt, Artificial Sequence
  Description of Artificial Sequence: Synthetic oligonucleotide
auuagcuggaacaauacaa

SEQ ID NO: 3259000 - RNA, 19 nt, Artificial Sequence
  Description of Artificial Sequence: Synthetic oligonucleotide
cuucaacugauugauuucc

SEQ ID NO: 3259001 - RNA, 19 nt, Artificial Sequence
  Description of Artificial Sequence: Synthetic oligonucleotide
ugagaucagcucaaacagc

SEQ ID NO: 3259002 - RNA, 19 nt, Artificial Sequence
  Description of Artificial Sequence: Synthetic oligonucleotide
agagacaagcggaagacag

SEQ ID NO: 3259003 - RNA, 19 nt, Artificial Sequence
  Description of Artificial Sequence: Synthetic oligonucleotide
uccguguucauaagauugc

SEQ ID NO: 3259004 - RNA, 19 nt, Artificial Sequence
  Description of Artificial Sequence: Synthetic oligonucleotide
gauuuccuuccucugggcc

SEQ ID NO: 3259005 - RNA, 19 nt, Artificial Sequence
  Description of Artificial Sequence: Synthetic oligonucleotide
aaugaauugaacugcaaca

SEQ ID NO: 3259006 - RNA, 19 nt, Artificial Sequence
  Description of Artificial Sequence: Synthetic oligonucleotide
uaauauaaugcuuaggagu

SEQ ID NO: 3259007 - RNA, 19 nt, Artificial Sequence
  Description of Artificial Sequence: Synthetic oligonucleotide
ugauaagugcaucaggagg

SEQ ID NO: 3259008 - RNA, 19 nt, Artificial Sequence
  Description of Artificial Sequence: Synthetic oligonucleotide
auaauuaugguccgcauag

SEQ ID NO: 3259009 - RNA, 19 nt, Artificial Sequence
  Description of Artificial Sequence: Synthetic oligonucleotide
agcaccauaauuauggucc

SEQ ID NO: 3259010 - RNA, 19 nt, Artificial Sequence
  Description of Artificial Sequence: Synthetic oligonucleotide
uguaguuaugcgcagaggc

SEQ ID NO: 3259011 - RNA, 19 nt, Artificial Sequence
  Description of Artificial Sequence: Synthetic oligonucleotide
aauaaaaucugguuccuga

SEQ ID NO: 3259012 - RNA, 19 nt, Artificial Sequence
  Description of Artificial Sequence: Synthetic oligonucleotide
uauacaaaguuucauguac

SEQ ID NO: 3259013 - RNA, 19 nt, Artificial Sequence
  Description of Artificial Sequence: Synthetic oligonucleotide
gauacugauagucucagug

SEQ ID NO: 3259014 - RNA, 19 nt, Artificial Sequence
  Description of Artificial Sequence: Synthetic oligonucleotide
aaucuagcaacugauaaag

SEQ ID NO: 3259015 - RNA, 19 nt, Artificial Sequence
  Description of Artificial Sequence: Synthetic oligonucleotide
uuaacuguagggcuucugg

SEQ ID NO: 3259016 - RNA, 19 nt, Artificial Sequence
  Description of Artificial Sequence: Synthetic oligonucleotide
auugugauuuauuaacagg

SEQ ID NO: 3259017 - RNA, 19 nt, Artificial Sequence
  Description of Artificial Sequence: Synthetic oligonucleotide
  modified_base (16)..(16): a, c, u, g, unknown or other
acgucagugccguagnucc

SEQ ID NO: 3259018 - RNA, 19 nt, Artificial Sequence
  Description of Artificial Sequence: Synthetic oligonucleotide
aaugcauauguauaaaaua

SEQ ID NO: 3259019 - RNA, 19 nt, Artificial Sequence
  Description of Artificial Sequence: Synthetic oligonucleotide
aauuccugggcugacagcg

SEQ ID NO: 3259020 - RNA, 19 nt, Artificial Sequence
  Description of Artificial Sequence: Synthetic oligonucleotide
uuugggauacucuguaugg

SEQ ID NO: 3259021 - RNA, 19 nt, Artificial Sequence
  Description of Artificial Sequence: Synthetic oligonucleotide
aauguuuagaguccaauuu

SEQ ID NO: 3259022 - RNA, 19 nt, Artificial Sequence
  Description of Artificial Sequence: Synthetic oligonucleotide
cauuggguguacaagagcg

SEQ ID NO: 3259023 - RNA, 19 nt, Artificial Sequence
  Description of Artificial Sequence: Synthetic oligonucleotide
aauccaaaguaauauucug

SEQ ID NO: 3259024 - RNA, 19 nt, Artificial Sequence
  Description of Artificial Sequence: Synthetic oligonucleotide
uaugcaaaagaaaugcagu

SEQ ID NO: 3259025 - RNA, 19 nt, Artificial Sequence
  Description of Artificial Sequence: Synthetic oligonucleotide
aacccuuaacucuugauga

SEQ ID NO: 3259026 - RNA, 19 nt, Artificial Sequence
  Description of Artificial Sequence: Synthetic oligonucleotide
uuuaaagaaauauccauuu

SEQ ID NO: 3259027 - RNA, 19 nt, Artificial Sequence
  Description of Artificial Sequence: Synthetic oligonucleotide
cucaaauuggaguugacug

SEQ ID NO: 3259028 - RNA, 19 nt, Artificial Sequence
  Description of Artificial Sequence: Synthetic oligonucleotide
aacuguuggauuucucaac

SEQ ID NO: 3259029 - RNA, 19 nt, Artificial Sequence
  Description of Artificial Sequence: Synthetic oligonucleotide
uuuguugucguucccacug

SEQ ID NO: 3259030 - RNA, 19 nt, Artificial Sequence
  Description of Artificial Sequence: Synthetic oligonucleotide
ucugauuuuauccguggag

SEQ ID NO: 3259031 - RNA, 19 nt, Artificial Sequence
  Description of Artificial Sequence: Synthetic oligonucleotide
aaagcaaaguuuucugucu

SEQ ID NO: 3259032 - RNA, 19 nt, Artificial Sequence
  Description of Artificial Sequence: Synthetic oligonucleotide
ucagaugugcugaugguag

SEQ ID NO: 3259033 - RNA, 19 nt, Artificial Sequence
  Description of Artificial Sequence: Synthetic oligonucleotide
gaguagaguauacaugggg

SEQ ID NO: 3259034 - RNA, 19 nt, Artificial Sequence
  Description of Artificial Sequence: Synthetic oligonucleotide
uuuugggauacucuguaug

SEQ ID NO: 3259035 - RNA, 19 nt, Artificial Sequence
  Description of Artificial Sequence: Synthetic oligonucleotide
guaguuacuaaagaaaaug

SEQ ID NO: 3259036 - RNA, 19 nt, Artificial Sequence
  Description of Artificial Sequence: Synthetic oligonucleotide
aagaauaacagugcaccuc

SEQ ID NO: 3259037 - RNA, 19 nt, Artificial Sequence
  Description of Artificial Sequence: Synthetic oligonucleotide
uaauuauuucugcugcugc

SEQ ID NO: 3259038 - RNA, 19 nt, Artificial Sequence
  Description of Artificial Sequence: Synthetic oligonucleotide
caaaugauaggaaggacug

SEQ ID NO: 3259039 - RNA, 19 nt, Artificial Sequence
  Description of Artificial Sequence: Synthetic oligonucleotide
cucacuuaaccauucauug

SEQ ID NO: 3259040 - RNA, 19 nt, Artificial Sequence
  Description of Artificial Sequence: Synthetic oligonucleotide
aagaugcacucucagaacu

SEQ ID NO: 3259041 - RNA, 19 nt, Artificial Sequence
  Description of Artificial Sequence: Synthetic oligonucleotide
ugggacauuuauuaagugc

SEQ ID NO: 3259042 - RNA, 19 nt, Artificial Sequence
  Description of Artificial Sequence: Synthetic oligonucleotide
ugacucaugccuaucaaga

SEQ ID NO: 3259043 - RNA, 19 nt, Artificial Sequence
  Description of Artificial Sequence: Synthetic oligonucleotide
gaacccuuaacucuugaug

SEQ ID NO: 3259044 - RNA, 19 nt, Artificial Sequence
  Description of Artificial Sequence: Synthetic oligonucleotide
auucucaaagugcauagug

SEQ ID NO: 3259045 - RNA, 19 nt, Artificial Sequence
  Description of Artificial Sequence: Synthetic oligonucleotide
aauauaaugcuuaggagua

SEQ ID NO: 3259046 - RNA, 19 nt, Artificial Sequence
  Description of Artificial Sequence: Synthetic oligonucleotide
uucgccucugguaaauucg

SEQ ID NO: 3259047 - RNA, 19 nt, Artificial Sequence
  Description of Artificial Sequence: Synthetic oligonucleotide
ugauguugaaugaugccca

SEQ ID NO: 3259048 - RNA, 19 nt, Artificial Sequence
  Description of Artificial Sequence: Synthetic oligonucleotide
aaggguauggccuuuuaaa

SEQ ID NO: 3259049 - RNA, 19 nt, Artificial Sequence
  Description of Artificial Sequence: Synthetic oligonucleotide
uauaugcaaaagaaaugca

SEQ ID NO: 3259050 - RNA, 19 nt, Artificial Sequence
  Description of Artificial Sequence: Synthetic oligonucleotide
acgagcaccauaauuaugg

SEQ ID NO: 3259051 - RNA, 19 nt, Artificial Sequence
  Description of Artificial Sequence: Synthetic oligonucleotide
caauaguaaucucaguccc

SEQ ID NO: 3259052 - RNA, 19 nt, Artificial Sequence
  Description of Artificial Sequence: Synthetic oligonucleotide
cuugugagggauacggugg

SEQ ID NO: 3259053 - RNA, 19 nt, Artificial Sequence
  Description of Artificial Sequence: Synthetic oligonucleotide
ucaaauuggaguugacuga

SEQ ID NO: 3259054 - RNA, 19 nt, Artificial Sequence
  Description of Artificial Sequence: Synthetic oligonucleotide
uagugguguaguuaaaucu

SEQ ID NO: 3259055 - RNA, 19 nt, Artificial Sequence
  Description of Artificial Sequence: Synthetic oligonucleotide
cugaacuacuuucacagag

SEQ ID NO: 3259056 - RNA, 19 nt, Artificial Sequence
  Description of Artificial Sequence: Synthetic oligonucleotide
aagagcgccugaugaaucg

SEQ ID NO: 3259057 - RNA, 19 nt, Artificial Sequence
  Description of Artificial Sequence: Synthetic oligonucleotide
cuaagugcauccacaaacc

SEQ ID NO: 3259058 - RNA, 19 nt, Artificial Sequence
  Description of Artificial Sequence: Synthetic oligonucleotide
aaauuccugggcugacagc

SEQ ID NO: 3259059 - RNA, 19 nt, Artificial Sequence
  Description of Artificial Sequence: Synthetic oligonucleotide
auaugcaaaagaaaugcag

SEQ ID NO: 3259060 - RNA, 19 nt, Artificial Sequence
  Description of Artificial Sequence: Synthetic oligonucleotide
uaagcagaccucaaucuca

SEQ ID NO: 3259061 - RNA, 19 nt, Artificial Sequence
  Description of Artificial Sequence: Synthetic oligonucleotide
ucagauuccauuucuacuu

SEQ ID NO: 3259062 - RNA, 19 nt, Artificial Sequence
  Description of Artificial Sequence: Synthetic oligonucleotide
aaagcuuugcaaaauugcu

SEQ ID NO: 3259063 - RNA, 19 nt, Artificial Sequence
  Description of Artificial Sequence: Synthetic oligonucleotide
cuuaccucugcauugggug

SEQ ID NO: 3259064 - RNA, 19 nt, Artificial Sequence
  Description of Artificial Sequence: Synthetic oligonucleotide
cacuuaaccauucauugac

SEQ ID NO: 3259065 - RNA, 19 nt, Artificial Sequence
  Description of Artificial Sequence: Synthetic oligonucleotide
ucucccauacaaaauuuga

SEQ ID NO: 3259066 - RNA, 19 nt, Artificial Sequence
  Description of Artificial Sequence: Synthetic oligonucleotide
ugaaucgagccucauuccc

SEQ ID NO: 3259067 - RNA, 19 nt, Artificial Sequence
  Description of Artificial Sequence: Synthetic oligonucleotide
aaugaugcccagaaaacca

SEQ ID NO: 3259068 - RNA, 19 nt, Artificial Sequence
  Description of Artificial Sequence: Synthetic oligonucleotide
agagauguaugguuccuuc

SEQ ID NO: 3259069 - RNA, 19 nt, Artificial Sequence
  Description of Artificial Sequence: Synthetic oligonucleotide
aucaaagcaaaguuuucug

SEQ ID NO: 3259070 - RNA, 19 nt, Artificial Sequence
  Description of Artificial Sequence: Synthetic oligonucleotide
cugauuuuauccguggagg

SEQ ID NO: 3259071 - RNA, 19 nt, Artificial Sequence
  Description of Artificial Sequence: Synthetic oligonucleotide
aucgucaugugugaaaccg

SEQ ID NO: 3259072 - RNA, 19 nt, Artificial Sequence
  Description of Artificial Sequence: Synthetic oligonucleotide
uuuugggguacuugguggg

SEQ ID NO: 3259073 - RNA, 19 nt, Artificial Sequence
  Description of Artificial Sequence: Synthetic oligonucleotide
aaaacagcuggaauguuca

SEQ ID NO: 3259074 - RNA, 19 nt, Artificial Sequence
  Description of Artificial Sequence: Synthetic oligonucleotide
uucucaaagugcauagugu

SEQ ID NO: 3259075 - RNA, 19 nt, Artificial Sequence
  Description of Artificial Sequence: Synthetic oligonucleotide
cugauguugaaugaugccc

SEQ ID NO: 3259076 - RNA, 19 nt, Artificial Sequence
  Description of Artificial Sequence: Synthetic oligonucleotide
ucuguauggaguaaacgua

SEQ ID NO: 3259077 - RNA, 19 nt, Artificial Sequence
  Description of Artificial Sequence: Synthetic oligonucleotide
uggaguaugcugaaaugca

SEQ ID NO: 3259078 - RNA, 19 nt, Artificial Sequence
  Description of Artificial Sequence: Synthetic oligonucleotide
uuggcuauuuaauuaccug

SEQ ID NO: 3259079 - RNA, 19 nt, Artificial Sequence
  Description of Artificial Sequence: Synthetic oligonucleotide
aucgcuucuuugcaugagc

SEQ ID NO: 3259080 - RNA, 19 nt, Artificial Sequence
  Description of Artificial Sequence: Synthetic oligonucleotide
augaaucgagccucauucc

SEQ ID NO: 3259081 - RNA, 19 nt, Artificial Sequence
  Description of Artificial Sequence: Synthetic oligonucleotide
uuuaauuaccugugacuca

SEQ ID NO: 3259082 - RNA, 19 nt, Artificial Sequence
  Description of Artificial Sequence: Synthetic oligonucleotide
cuguauggaguaaacguag

SEQ ID NO: 3259083 - RNA, 19 nt, Artificial Sequence
  Description of Artificial Sequence: Synthetic oligonucleotide
gguauucuaauagagaaac

SEQ ID NO: 3259084 - RNA, 19 nt, Artificial Sequence
  Description of Artificial Sequence: Synthetic oligonucleotide
aaacacaccuacuucguuu

SEQ ID NO: 3259085 - RNA, 19 nt, Artificial Sequence
  Description of Artificial Sequence: Synthetic oligonucleotide
aacaguaguggacuuuuau

SEQ ID NO: 3259086 - RNA, 19 nt, Artificial Sequence
  Description of Artificial Sequence: Synthetic oligonucleotide
aguguuuccggggugugcc

SEQ ID NO: 3259087 - RNA, 19 nt, Artificial Sequence
  Description of Artificial Sequence: Synthetic oligonucleotide
cucauaaccacuguugaug

SEQ ID NO: 3259088 - RNA, 19 nt, Artificial Sequence
  Description of Artificial Sequence: Synthetic oligonucleotide
aagugcuucuuuguuuugg

SEQ ID NO: 3259089 - RNA, 19 nt, Artificial Sequence
  Description of Artificial Sequence: Synthetic oligonucleotide
ucauaaccacuguugaugu

SEQ ID NO: 3259090 - RNA, 19 nt, Artificial Sequence
  Description of Artificial Sequence: Synthetic oligonucleotide
uaagugcauccacaaaccc

SEQ ID NO: 3259091 - RNA, 19 nt, Artificial Sequence
  Description of Artificial Sequence: Synthetic oligonucleotide
uccugauuauuugauacug

SEQ ID NO: 3259092 - RNA, 19 nt, Artificial Sequence
  Description of Artificial Sequence: Synthetic oligonucleotide
ugauuuuauccguggagga

SEQ ID NO: 3259093 - RNA, 19 nt, Artificial Sequence
  Description of Artificial Sequence: Synthetic oligonucleotide
caauugagguaguaguuac

SEQ ID NO: 3259094 - RNA, 19 nt, Artificial Sequence
  Description of Artificial Sequence: Synthetic oligonucleotide
ucucacuuaaccauucauu

SEQ ID NO: 3259095 - RNA, 19 nt, Artificial Sequence
  Description of Artificial Sequence: Synthetic oligonucleotide
cuucaaacuguucucucag

SEQ ID NO: 3259096 - RNA, 19 nt, Artificial Sequence
  Description of Artificial Sequence: Synthetic oligonucleotide
aaacagcuggaauguucac

SEQ ID NO: 3259097 - RNA, 19 nt, Artificial Sequence
  Description of Artificial Sequence: Synthetic oligonucleotide
uacuauggaguccuaugca

SEQ ID NO: 3259098 - RNA, 19 nt, Artificial Sequence
  Description of Artificial Sequence: Synthetic oligonucleotide
ugaaccgugguaauuguuu

SEQ ID NO: 3259099 - RNA, 19 nt, Artificial Sequence
  Description of Artificial Sequence: Synthetic oligonucleotide
cccauacaaaauuugaacc

SEQ ID NO: 3259100 - RNA, 19 nt, Artificial Sequence
  Description of Artificial Sequence: Synthetic oligonucleotide
uuguugguacucaauucug

SEQ ID NO: 3259101 - RNA, 19 nt, Artificial Sequence
  Description of Artificial Sequence: Synthetic oligonucleotide
uguagcuaacaccucugga

SEQ ID NO: 3259102 - RNA, 19 nt, Artificial Sequence
  Description of Artificial Sequence: Synthetic oligonucleotide
uugugagggauacgguggg

SEQ ID NO: 3259103 - RNA, 19 nt, Artificial Sequence
  Description of Artificial Sequence: Synthetic oligonucleotide
caucugauuuuauccgugg

SEQ ID NO: 3259104 - RNA, 19 nt, Artificial Sequence
  Description of Artificial Sequence: Synthetic oligonucleotide
ucacuuaaccauucauuga

SEQ ID NO: 3259105 - RNA, 19 nt, Artificial Sequence
  Description of Artificial Sequence: Synthetic oligonucleotide
uaugcaaacaacaaaugag

SEQ ID NO: 3259106 - RNA, 19 nt, Artificial Sequence
  Description of Artificial Sequence: Synthetic oligonucleotide
uauauuucaucuaagaaaa

SEQ ID NO: 3259107 - RNA, 19 nt, Artificial Sequence
  Description of Artificial Sequence: Synthetic oligonucleotide
ucaucaaagagcaagagaa

SEQ ID NO: 3259108 - RNA, 19 nt, Artificial Sequence
  Description of Artificial Sequence: Synthetic oligonucleotide
uuauauuucaucuaagaaa

SEQ ID NO: 3259109 - RNA, 19 nt, Artificial Sequence
  Description of Artificial Sequence: Synthetic oligonucleotide
aacauuaucaccuauuaua

SEQ ID NO: 3259110 - RNA, 19 nt, Artificial Sequence
  Description of Artificial Sequence: Synthetic oligonucleotide
acuaacuuccaccaguagc

SEQ ID NO: 3259111 - RNA, 19 nt, Artificial Sequence
  Description of Artificial Sequence: Synthetic oligonucleotide
uccauuuaagccuacaucu

SEQ ID NO: 3259112 - RNA, 19 nt, Artificial Sequence
  Description of Artificial Sequence: Synthetic oligonucleotide
aagccuacaucugauagcc

SEQ ID NO: 3259113 - RNA, 19 nt, Artificial Sequence
  Description of Artificial Sequence: Synthetic oligonucleotide
uauuauauuucaucuaaga

SEQ ID NO: 3259114 - RNA, 19 nt, Artificial Sequence
  Description of Artificial Sequence: Synthetic oligonucleotide
uuaagccuacaucugauag

SEQ ID NO: 3259115 - RNA, 19 nt, Artificial Sequence
  Description of Artificial Sequence: Synthetic oligonucleotide
agcaagagaacccuuuggc

SEQ ID NO: 3259116 - RNA, 19 nt, Artificial Sequence
  Description of Artificial Sequence: Synthetic oligonucleotide
aucaaagagcaagagaacc

SEQ ID NO: 3259117 - RNA, 19 nt, Artificial Sequence
  Description of Artificial Sequence: Synthetic oligonucleotide
ugauagccaagcaagcugg

SEQ ID NO: 3259118 - RNA, 19 nt, Artificial Sequence
  Description of Artificial Sequence: Synthetic oligonucleotide
aaggucaucaaagagcaag

SEQ ID NO: 3259119 - RNA, 19 nt, Artificial Sequence
  Description of Artificial Sequence: Synthetic oligonucleotide
auuaucaccuauuauauuu

SEQ ID NO: 3259120 - RNA, 19 nt, Artificial Sequence
  Description of Artificial Sequence: Synthetic oligonucleotide
aaaaggucaucaaagagca

SEQ ID NO: 3259121 - RNA, 19 nt, Artificial Sequence
  Description of Artificial Sequence: Synthetic oligonucleotide
aaaacauuaucaccuauua

SEQ ID NO: 3259122 - RNA, 19 nt, Artificial Sequence
  Description of Artificial Sequence: Synthetic oligonucleotide
uuuucuuggguuuggagca

SEQ ID NO: 3259123 - RNA, 19 nt, Artificial Sequence
  Description of Artificial Sequence: Synthetic oligonucleotide
ucaaagagcaagagaaccc

SEQ ID NO: 3259124 - RNA, 19 nt, Artificial Sequence
  Description of Artificial Sequence: Synthetic oligonucleotide
acagcuuccauuuaagccu

SEQ ID NO: 3259125 - RNA, 19 nt, Artificial Sequence
  Description of Artificial Sequence: Synthetic oligonucleotide
auuauauuucaucuaagaa

SEQ ID NO: 3259126 - RNA, 19 nt, Artificial Sequence
  Description of Artificial Sequence: Synthetic oligonucleotide
aagagaacccuuuggcagg

SEQ ID NO: 3259127 - RNA, 19 nt, Artificial Sequence
  Description of Artificial Sequence: Synthetic oligonucleotide
aagacuaacuuccaccagu

SEQ ID NO: 3259128 - RNA, 19 nt, Artificial Sequence
  Description of Artificial Sequence: Synthetic oligonucleotide
caucugauagccaagcaag

SEQ ID NO: 3259129 - RNA, 19 nt, Artificial Sequence
  Description of Artificial Sequence: Synthetic oligonucleotide
aacuaugcaaacaacaaau

SEQ ID NO: 3259130 - RNA, 19 nt, Artificial Sequence
  Description of Artificial Sequence: Synthetic oligonucleotide
uuagguuuggggaacuaug

SEQ ID NO: 3259131 - RNA, 19 nt, Artificial Sequence
  Description of Artificial Sequence: Synthetic oligonucleotide
uggaagacuaacuuccacc

SEQ ID NO: 3259132 - RNA, 19 nt, Artificial Sequence
  Description of Artificial Sequence: Synthetic oligonucleotide
guuuggaagacuaacuucc

SEQ ID NO: 3259133 - RNA, 19 nt, Artificial Sequence
  Description of Artificial Sequence: Synthetic oligonucleotide
caagagaacccuuuggcag

SEQ ID NO: 3259134 - RNA, 19 nt, Artificial Sequence
  Description of Artificial Sequence: Synthetic oligonucleotide
uuggguuuggagcaggccc

SEQ ID NO: 3259135 - RNA, 19 nt, Artificial Sequence
  Description of Artificial Sequence: Synthetic oligonucleotide
cacagcuuccauuuaagcc

SEQ ID NO: 3259136 - RNA, 19 nt, Artificial Sequence
  Description of Artificial Sequence: Synthetic oligonucleotide
ucaccuauuauauuucauc

SEQ ID NO: 3259137 - RNA, 19 nt, Artificial Sequence
  Description of Artificial Sequence: Synthetic oligonucleotide
cuaacuuccaccaguagca

SEQ ID NO: 3259138 - RNA, 19 nt, Artificial Sequence
  Description of Artificial Sequence: Synthetic oligonucleotide
uuccauuuaagccuacauc

SEQ ID NO: 3259139 - RNA, 19 nt, Artificial Sequence
  Description of Artificial Sequence: Synthetic oligonucleotide
uagguuuggggaacuaugc

SEQ ID NO: 3259140 - RNA, 19 nt, Artificial Sequence
  Description of Artificial Sequence: Synthetic oligonucleotide
cuauuauauuucaucuaag

SEQ ID NO: 3259141 - RNA, 19 nt, Artificial Sequence
  Description of Artificial Sequence: Synthetic oligonucleotide
caagcuggggucuauuuag

SEQ ID NO: 3259142 - RNA, 19 nt, Artificial Sequence
  Description of Artificial Sequence: Synthetic oligonucleotide
aaacauuaucaccuauuau

SEQ ID NO: 3259143 - RNA, 19 nt, Artificial Sequence
  Description of Artificial Sequence: Synthetic oligonucleotide
uggggaacuaugcaaacaa

SEQ ID NO: 3259144 - RNA, 19 nt, Artificial Sequence
  Description of Artificial Sequence: Synthetic oligonucleotide
uuaucaccuauuauauuuc

SEQ ID NO: 3259145 - RNA, 19 nt, Artificial Sequence
  Description of Artificial Sequence: Synthetic oligonucleotide
uaagccuacaucugauagc

SEQ ID NO: 3259146 - RNA, 19 nt, Artificial Sequence
  Description of Artificial Sequence: Synthetic oligonucleotide
gagcaagagaacccuuugg

SEQ ID NO: 3259147 - RNA, 19 nt, Artificial Sequence
  Description of Artificial Sequence: Synthetic oligonucleotide
cuaugcaaacaacaaauga

SEQ ID NO: 3259148 - RNA, 19 nt, Artificial Sequence
  Description of Artificial Sequence: Synthetic oligonucleotide
uaucaccuauuauauuuca

SEQ ID NO: 3259149 - RNA, 19 nt, Artificial Sequence
  Description of Artificial Sequence: Synthetic oligonucleotide
acaucugauagccaagcaa

SEQ ID NO: 3259150 - RNA, 19 nt, Artificial Sequence
  Description of Artificial Sequence: Synthetic oligonucleotide
uagccaagcaagcuggggu

SEQ ID NO: 3259151 - RNA, 19 nt, Artificial Sequence
  Description of Artificial Sequence: Synthetic oligonucleotide
uuuggaagacuaacuucca

SEQ ID NO: 3259152 - RNA, 19 nt, Artificial Sequence
  Description of Artificial Sequence: Synthetic oligonucleotide
aacccuuuggcagggcugg

SEQ ID NO: 3259153 - RNA, 19 nt, Artificial Sequence
  Description of Artificial Sequence: Synthetic oligonucleotide
uuucccacagcuuccauuu

SEQ ID NO: 3259154 - RNA, 19 nt, Artificial Sequence
  Description of Artificial Sequence: Synthetic oligonucleotide
cugauagccaagcaagcug

SEQ ID NO: 3259155 - RNA, 19 nt, Artificial Sequence
  Description of Artificial Sequence: Synthetic oligonucleotide
augcaaacaacaaaugaga

SEQ ID NO: 3259156 - RNA, 19 nt, Artificial Sequence
  Description of Artificial Sequence: Synthetic oligonucleotide
uuuggagcaggcccuggcc

SEQ ID NO: 3259157 - RNA, 19 nt, Artificial Sequence
  Description of Artificial Sequence: Synthetic oligonucleotide
gaacuaugcaaacaacaaa

SEQ ID NO: 3259158 - RNA, 19 nt, Artificial Sequence
  Description of Artificial Sequence: Synthetic oligonucleotide
uucaggguuuggaagacua

SEQ ID NO: 3259159 - RNA, 19 nt, Artificial Sequence
  Description of Artificial Sequence: Synthetic oligonucleotide
gaagacuaacuuccaccag

SEQ ID NO: 3259160 - RNA, 19 nt, Artificial Sequence
  Description of Artificial Sequence: Synthetic oligonucleotide
agagcaagagaacccuuug

SEQ ID NO: 3259161 - RNA, 19 nt, Artificial Sequence
  Description of Artificial Sequence: Synthetic oligonucleotide
uggccuuucccacagcuuc

SEQ ID NO: 3259162 - RNA, 19 nt, Artificial Sequence
  Description of Artificial Sequence: Synthetic oligonucleotide
acauuaucaccuauuauau

SEQ ID NO: 3259163 - RNA, 19 nt, Artificial Sequence
  Description of Artificial Sequence: Synthetic oligonucleotide
agccaagcaagcugggguc

SEQ ID NO: 3259164 - RNA, 19 nt, Artificial Sequence
  Description of Artificial Sequence: Synthetic oligonucleotide
ucugauagccaagcaagcu

SEQ ID NO: 3259165 - RNA, 19 nt, Artificial Sequence
  Description of Artificial Sequence: Synthetic oligonucleotide
uuggaagacuaacuuccac

SEQ ID NO: 3259166 - RNA, 19 nt, Artificial Sequence
  Description of Artificial Sequence: Synthetic oligonucleotide
uggcuucaggguuuggaag

SEQ ID NO: 3259167 - RNA, 19 nt, Artificial Sequence
  Description of Artificial Sequence: Synthetic oligonucleotide
aucugauagccaagcaagc

SEQ ID NO: 3259168 - RNA, 19 nt, Artificial Sequence
  Description of Artificial Sequence: Synthetic oligonucleotide
uacaucugauagccaagca

SEQ ID NO: 3259169 - RNA, 19 nt, Artificial Sequence
  Description of Artificial Sequence: Synthetic oligonucleotide
caucaaagagcaagagaac

SEQ ID NO: 3259170 - RNA, 19 nt, Artificial Sequence
  Description of Artificial Sequence: Synthetic oligonucleotide
gucaucaaagagcaagaga

SEQ ID NO: 3259171 - RNA, 19 nt, Artificial Sequence
  Description of Artificial Sequence: Synthetic oligonucleotide
aacuuccaccaguagcaca

SEQ ID NO: 3259172 - RNA, 19 nt, Artificial Sequence
  Description of Artificial Sequence: Synthetic oligonucleotide
uuuggggaacuaugcaaac

SEQ ID NO: 3259173 - RNA, 19 nt, Artificial Sequence
  Description of Artificial Sequence: Synthetic oligonucleotide
cuacaucugauagccaagc

SEQ ID NO: 3259174 - RNA, 19 nt, Artificial Sequence
  Description of Artificial Sequence: Synthetic oligonucleotide
cauuuaagccuacaucuga

SEQ ID NO: 3259175 - RNA, 19 nt, Artificial Sequence
  Description of Artificial Sequence: Synthetic oligonucleotide
acuaugcaaacaacaaaug

SEQ ID NO: 3259176 - RNA, 19 nt, Artificial Sequence
  Description of Artificial Sequence: Synthetic oligonucleotide
uuuaagccuacaucugaua

SEQ ID NO: 3259177 - RNA, 19 nt, Artificial Sequence
  Description of Artificial Sequence: Synthetic oligonucleotide
ggaagacuaacuuccacca

SEQ ID NO: 3259178 - RNA, 19 nt, Artificial Sequence
  Description of Artificial Sequence: Synthetic oligonucleotide
uggguuuggagcaggcccu

SEQ ID NO: 3259179 - RNA, 19 nt, Artificial Sequence
  Description of Artificial Sequence: Synthetic oligonucleotide
uuuagguuuggggaacuau

SEQ ID NO: 3259180 - RNA, 19 nt, Artificial Sequence
  Description of Artificial Sequence: Synthetic oligonucleotide
ucuuggguuuggagcaggc

SEQ ID NO: 3259181 - RNA, 19 nt, Artificial Sequence
  Description of Artificial Sequence: Synthetic oligonucleotide
uuggagcaggcccuggccu

SEQ ID NO: 3259182 - RNA, 19 nt, Artificial Sequence
  Description of Artificial Sequence: Synthetic oligonucleotide
accuauuauauuucaucua

SEQ ID NO: 3259183 - RNA, 19 nt, Artificial Sequence
  Description of Artificial Sequence: Synthetic oligonucleotide
gacuaacuuccaccaguag

SEQ ID NO: 3259184 - RNA, 19 nt, Artificial Sequence
  Description of Artificial Sequence: Synthetic oligonucleotide
gguuuggaagacuaacuuc

SEQ ID NO: 3259185 - RNA, 19 nt, Artificial Sequence
  Description of Artificial Sequence: Synthetic oligonucleotide
auagccaagcaagcugggg

SEQ ID NO: 3259186 - RNA, 19 nt, Artificial Sequence
  Description of Artificial Sequence: Synthetic oligonucleotide
ucccacagcuuccauuuaa

SEQ ID NO: 3259187 - RNA, 19 nt, Artificial Sequence
  Description of Artificial Sequence: Synthetic oligonucleotide
agaacccuuuggcagggcu

SEQ ID NO: 3259188 - RNA, 19 nt, Artificial Sequence
  Description of Artificial Sequence: Synthetic oligonucleotide
agguuuggggaacuaugca

SEQ ID NO: 3259189 - RNA, 19 nt, Artificial Sequence
  Description of Artificial Sequence: Synthetic oligonucleotide
caccuauuauauuucaucu

SEQ ID NO: 3259190 - RNA, 19 nt, Artificial Sequence
  Description of Artificial Sequence: Synthetic oligonucleotide
uuggggaacuaugcaaaca

SEQ ID NO: 3259191 - RNA, 19 nt, Artificial Sequence
  Description of Artificial Sequence: Synthetic oligonucleotide
ccuauuauauuucaucuaa

SEQ ID NO: 3259192 - RNA, 19 nt, Artificial Sequence
  Description of Artificial Sequence: Synthetic oligonucleotide
uggggucuauuuaggacuc

SEQ ID NO: 3259193 - RNA, 19 nt, Artificial Sequence
  Description of Artificial Sequence: Synthetic oligonucleotide
gauagccaagcaagcuggg

SEQ ID NO: 3259194 - RNA, 19 nt, Artificial Sequence
  Description of Artificial Sequence: Synthetic oligonucleotide
ggcagggcuggcuucaggg

SEQ ID NO: 3259195 - RNA, 19 nt, Artificial Sequence
  Description of Artificial Sequence: Synthetic oligonucleotide
aagcuggggucuauuuagg

SEQ ID NO: 3259196 - RNA, 19 nt, Artificial Sequence
  Description of Artificial Sequence: Synthetic oligonucleotide
uucuuggguuuggagcagg

SEQ ID NO: 3259197 - RNA, 19 nt, Artificial Sequence
  Description of Artificial Sequence: Synthetic oligonucleotide
caggguuuggaagacuaac

SEQ ID NO: 3259198 - RNA, 19 nt, Artificial Sequence
  Description of Artificial Sequence: Synthetic oligonucleotide
acuuccaccaguagcacau

SEQ ID NO: 3259199 - RNA, 19 nt, Artificial Sequence
  Description of Artificial Sequence: Synthetic oligonucleotide
uccaccaguagcacauuuu

SEQ ID NO: 3259200 - RNA, 19 nt, Artificial Sequence
  Description of Artificial Sequence: Synthetic oligonucleotide
aagagcaagagaacccuuu

SEQ ID NO: 3259201 - RNA, 19 nt, Artificial Sequence
  Description of Artificial Sequence: Synthetic oligonucleotide
ucaggguuuggaagacuaa

SEQ ID NO: 3259202 - RNA, 19 nt, Artificial Sequence
  Description of Artificial Sequence: Synthetic oligonucleotide
auuuaagccuacaucugau

SEQ ID NO: 3259203 - RNA, 19 nt, Artificial Sequence
  Description of Artificial Sequence: Synthetic oligonucleotide
guuuggagcaggcccuggc

SEQ ID NO: 3259204 - RNA, 19 nt, Artificial Sequence
  Description of Artificial Sequence: Synthetic oligonucleotide
agagaacccuuuggcaggg

SEQ ID NO: 3259205 - RNA, 19 nt, Artificial Sequence
  Description of Artificial Sequence: Synthetic oligonucleotide
uuucaaguccugaaggugg

SEQ ID NO: 3259206 - RNA, 19 nt, Artificial Sequence
  Description of Artificial Sequence: Synthetic oligonucleotide
cucagugucagccagaggc

SEQ ID NO: 3259207 - RNA, 19 nt, Artificial Sequence
  Description of Artificial Sequence: Synthetic oligonucleotide
auuggcggagagcagaugc

SEQ ID NO: 3259208 - RNA, 19 nt, Artificial Sequence
  Description of Artificial Sequence: Synthetic oligonucleotide
cucacagagaaucugacug

SEQ ID NO: 3259209 - RNA, 19 nt, Artificial Sequence
  Description of Artificial Sequence: Synthetic oligonucleotide
aucucuguggcacucugcc

SEQ ID NO: 3259210 - RNA, 19 nt, Artificial Sequence
  Description of Artificial Sequence: Synthetic oligonucleotide
ugagcuugcaucuucucca

SEQ ID NO: 3259211 - RNA, 19 nt, Artificial Sequence
  Description of Artificial Sequence: Synthetic oligonucleotide
ucuaaagccgggaugggac

SEQ ID NO: 3259212 - RNA, 19 nt, Artificial Sequence
  Description of Artificial Sequence: Synthetic oligonucleotide
ucagccagaggcagcaugg

SEQ ID NO: 3259213 - RNA, 19 nt, Artificial Sequence
  Description of Artificial Sequence: Synthetic oligonucleotide
agcucuucgucuuucucgc

SEQ ID NO: 3259214 - RNA, 19 nt, Artificial Sequence
  Description of Artificial Sequence: Synthetic oligonucleotide
gaaucaacuucucaguguc

SEQ ID NO: 3259215 - RNA, 19 nt, Artificial Sequence
  Description of Artificial Sequence: Synthetic oligonucleotide
agagaaucugacugcugcc

SEQ ID NO: 3259216 - RNA, 19 nt, Artificial Sequence
  Description of Artificial Sequence: Synthetic oligonucleotide
ucgcgaaucaacuucucag

SEQ ID NO: 3259217 - RNA, 19 nt, Artificial Sequence
  Description of Artificial Sequence: Synthetic oligonucleotide
ucuguaggcagcgagcccg

SEQ ID NO: 3259218 - RNA, 19 nt, Artificial Sequence
  Description of Artificial Sequence: Synthetic oligonucleotide
cucuuucaaguccugaagg

SEQ ID NO: 3259219 - RNA, 19 nt, Artificial Sequence
  Description of Artificial Sequence: Synthetic oligonucleotide
agcagaugcagguuaggcg

SEQ ID NO: 3259220 - RNA, 19 nt, Artificial Sequence
  Description of Artificial Sequence: Synthetic oligonucleotide
cugacugcugcccugagcc

SEQ ID NO: 3259221 - RNA, 19 nt, Artificial Sequence
  Description of Artificial Sequence: Synthetic oligonucleotide
uaggcagcgagcccggucg

SEQ ID NO: 3259222 - RNA, 19 nt, Artificial Sequence
  Description of Artificial Sequence: Synthetic oligonucleotide
auucuguaggcagcgagcc

SEQ ID NO: 3259223 - RNA, 19 nt, Artificial Sequence
  Description of Artificial Sequence: Synthetic oligonucleotide
ucguagagcagcucguggg

SEQ ID NO: 3259224 - RNA, 19 nt, Artificial Sequence
  Description of Artificial Sequence: Synthetic oligonucleotide
ucgagccagauucuguagg

SEQ ID NO: 3259225 - RNA, 19 nt, Artificial Sequence
  Description of Artificial Sequence: Synthetic oligonucleotide
cagagaaucugacugcugc

SEQ ID NO: 3259226 - RNA, 19 nt, Artificial Sequence
  Description of Artificial Sequence: Synthetic oligonucleotide
uuucucgcgaaucaacuuc

SEQ ID NO: 3259227 - RNA, 19 nt, Artificial Sequence
  Description of Artificial Sequence: Synthetic oligonucleotide
ucuuucucgcgaaucaacu

SEQ ID NO: 3259228 - RNA, 19 nt, Artificial Sequence
  Description of Artificial Sequence: Synthetic oligonucleotide
uccagcauuucuugcaugc

SEQ ID NO: 3259229 - RNA, 19 nt, Artificial Sequence
  Description of Artificial Sequence: Synthetic oligonucleotide
uucaaguccugaagguggg

SEQ ID NO: 3259230 - RNA, 19 nt, Artificial Sequence
  Description of Artificial Sequence: Synthetic oligonucleotide
gcagaugcagguuaggcgg

SEQ ID NO: 3259231 - RNA, 19 nt, Artificial Sequence
  Description of Artificial Sequence: Synthetic oligonucleotide
gaggaucucacagagaauc

SEQ ID NO: 3259232 - RNA, 19 nt, Artificial Sequence
  Description of Artificial Sequence: Synthetic oligonucleotide
ugccgugaaagcuugcugc

SEQ ID NO: 3259233 - RNA, 19 nt, Artificial Sequence
  Description of Artificial Sequence: Synthetic oligonucleotide
agauucuguaggcagcgag

SEQ ID NO: 3259234 - RNA, 19 nt, Artificial Sequence
  Description of Artificial Sequence: Synthetic oligonucleotide
ucuuucaaguccugaaggu

SEQ ID NO: 3259235 - RNA, 19 nt, Artificial Sequence
  Description of Artificial Sequence: Synthetic oligonucleotide
ucuucuccagcauuucuug

SEQ ID NO: 3259236 - RNA, 19 nt, Artificial Sequence
  Description of Artificial Sequence: Synthetic oligonucleotide
cugaaggugggucuguacc

SEQ ID NO: 3259237 - RNA, 19 nt, Artificial Sequence
  Description of Artificial Sequence: Synthetic oligonucleotide
cagucuaaagccgggaugg

SEQ ID NO: 3259238 - RNA, 19 nt, Artificial Sequence
  Description of Artificial Sequence: Synthetic oligonucleotide
ugggucaccucuuucaagu

SEQ ID NO: 3259239 - RNA, 19 nt, Artificial Sequence
  Description of Artificial Sequence: Synthetic oligonucleotide
ucugcugcaucugagcuug

SEQ ID NO: 3259240 - RNA, 19 nt, Artificial Sequence
  Description of Artificial Sequence: Synthetic oligonucleotide
agcauuucuugcaugcggc

SEQ ID NO: 3259241 - RNA, 19 nt, Artificial Sequence
  Description of Artificial Sequence: Synthetic oligonucleotide
gaucccgggccccaggucg

SEQ ID NO: 3259242 - RNA, 19 nt, Artificial Sequence
  Description of Artificial Sequence: Synthetic oligonucleotide
ucacagagaaucugacugc

SEQ ID NO: 3259243 - RNA, 19 nt, Artificial Sequence
  Description of Artificial Sequence: Synthetic oligonucleotide
gaaagcuugcugcggcugg

SEQ ID NO: 3259244 - RNA, 19 nt, Artificial Sequence
  Description of Artificial Sequence: Synthetic oligonucleotide
gugaggaucucacagagaa

SEQ ID NO: 3259245 - RNA, 19 nt, Artificial Sequence
  Description of Artificial Sequence: Synthetic oligonucleotide
uucuccagcauuucuugca

SEQ ID NO: 3259246 - RNA, 19 nt, Artificial Sequence
  Description of Artificial Sequence: Synthetic oligonucleotide
cagcucuucgucuuucucg

SEQ ID NO: 3259247 - RNA, 19 nt, Artificial Sequence
  Description of Artificial Sequence: Synthetic oligonucleotide
caacuucucagugucagcc

SEQ ID NO: 3259248 - RNA, 19 nt, Artificial Sequence
  Description of Artificial Sequence: Synthetic oligonucleotide
ugcaucugagcuugcaucu

SEQ ID NO: 3259249 - RNA, 19 nt, Artificial Sequence
  Description of Artificial Sequence: Synthetic oligonucleotide
acuucucagugucagccag

SEQ ID NO: 3259250 - RNA, 19 nt, Artificial Sequence
  Description of Artificial Sequence: Synthetic oligonucleotide
aucaacuucucagugucag

SEQ ID NO: 3259251 - RNA, 19 nt, Artificial Sequence
  Description of Artificial Sequence: Synthetic oligonucleotide
aaguccugaaggugggucu

SEQ ID NO: 3259252 - RNA, 19 nt, Artificial Sequence
  Description of Artificial Sequence: Synthetic oligonucleotide
ugaaggugggucuguacca

SEQ ID NO: 3259253 - RNA, 19 nt, Artificial Sequence
  Description of Artificial Sequence: Synthetic oligonucleotide
agccagauucuguaggcag

SEQ ID NO: 3259254 - RNA, 19 nt, Artificial Sequence
  Description of Artificial Sequence: Synthetic oligonucleotide
ucgucuuucucgcgaauca

SEQ ID NO: 3259255 - RNA, 19 nt, Artificial Sequence
  Description of Artificial Sequence: Synthetic oligonucleotide
aaagcuugcugcggcuggc

SEQ ID NO: 3259256 - RNA, 19 nt, Artificial Sequence
  Description of Artificial Sequence: Synthetic oligonucleotide
auuucuugcaugcggcgca

SEQ ID NO: 3259257 - RNA, 19 nt, Artificial Sequence
  Description of Artificial Sequence: Synthetic oligonucleotide
ugggaccggagauuggcgg

SEQ ID NO: 3259258 - RNA, 19 nt, Artificial Sequence
  Description of Artificial Sequence: Synthetic oligonucleotide
uugcaugcggcgcagcucu

SEQ ID NO: 3259259 - RNA, 19 nt, Artificial Sequence
  Description of Artificial Sequence: Synthetic oligonucleotide
cugagcuugcaucuucucc

SEQ ID NO: 3259260 - RNA, 19 nt, Artificial Sequence
  Description of Artificial Sequence: Synthetic oligonucleotide
cagcauuucuugcaugcgg

SEQ ID NO: 3259261 - RNA, 19 nt, Artificial Sequence
  Description of Artificial Sequence: Synthetic oligonucleotide
gauucuguaggcagcgagc

SEQ ID NO: 3259262 - RNA, 19 nt, Artificial Sequence
  Description of Artificial Sequence: Synthetic oligonucleotide
uucucgcgaaucaacuucu

SEQ ID NO: 3259263 - RNA, 19 nt, Artificial Sequence
  Description of Artificial Sequence: Synthetic oligonucleotide
agcgggaucucuguggcac

SEQ ID NO: 3259264 - RNA, 19 nt, Artificial Sequence
  Description of Artificial Sequence: Synthetic oligonucleotide
gaugggaccggagauuggc

SEQ ID NO: 3259265 - RNA, 19 nt, Artificial Sequence
  Description of Artificial Sequence: Synthetic oligonucleotide
ucagugucagccagaggca

SEQ ID NO: 3259266 - RNA, 19 nt, Artificial Sequence
  Description of Artificial Sequence: Synthetic oligonucleotide
gagaaucugacugcugccc

SEQ ID NO: 3259267 - RNA, 19 nt, Artificial Sequence
  Description of Artificial Sequence: Synthetic oligonucleotide
aacuucucagugucagcca

SEQ ID NO: 3259268 - RNA, 19 nt, Artificial Sequence
  Description of Artificial Sequence: Synthetic oligonucleotide
ucucacagagaaucugacu

SEQ ID NO: 3259269 - RNA, 19 nt, Artificial Sequence
  Description of Artificial Sequence: Synthetic oligonucleotide
agccagaggcagcaugggc

SEQ ID NO: 3259270 - RNA, 19 nt, Artificial Sequence
  Description of Artificial Sequence: Synthetic oligonucleotide
ugcaucuucuccagcauuu

SEQ ID NO: 3259271 - RNA, 19 nt, Artificial Sequence
  Description of Artificial Sequence: Synthetic oligonucleotide
uucucagugucagccagag

SEQ ID NO: 3259272 - RNA, 19 nt, Artificial Sequence
  Description of Artificial Sequence: Synthetic oligonucleotide
cuuucaaguccugaaggug

SEQ ID NO: 3259273 - RNA, 19 nt, Artificial Sequence
  Description of Artificial Sequence: Synthetic oligonucleotide
ucgugggucaccucuuuca

SEQ ID NO: 3259274 - RNA, 19 nt, Artificial Sequence
  Description of Artificial Sequence: Synthetic oligonucleotide
uaaagccgggaugggaccg

SEQ ID NO: 3259275 - RNA, 19 nt, Artificial Sequence
  Description of Artificial Sequence: Synthetic oligonucleotide
uggcacucugccgugaaag

SEQ ID NO: 3259276 - RNA, 19 nt, Artificial Sequence
  Description of Artificial Sequence: Synthetic oligonucleotide
cugggcagucuaaagccgg

SEQ ID NO: 3259277 - RNA, 19 nt, Artificial Sequence
  Description of Artificial Sequence: Synthetic oligonucleotide
cuaaagccgggaugggacc

SEQ ID NO: 3259278 - RNA, 19 nt, Artificial Sequence
  Description of Artificial Sequence: Synthetic oligonucleotide
ugggcagucuaaagccggg

SEQ ID NO: 3259279 - RNA, 19 nt, Artificial Sequence
  Description of Artificial Sequence: Synthetic oligonucleotide
ucaacuucucagugucagc

SEQ ID NO: 3259280 - RNA, 19 nt, Artificial Sequence
  Description of Artificial Sequence: Synthetic oligonucleotide
ugguucugcugcaucugag

SEQ ID NO: 3259281 - RNA, 19 nt, Artificial Sequence
  Description of Artificial Sequence: Synthetic oligonucleotide
ucucuguggcacucugccg

SEQ ID NO: 3259282 - RNA, 19 nt, Artificial Sequence
  Description of Artificial Sequence: Synthetic oligonucleotide
agaaucugacugcugcccu

SEQ ID NO: 3259283 - RNA, 19 nt, Artificial Sequence
  Description of Artificial Sequence: Synthetic oligonucleotide
cugagccugguucugcugc

SEQ ID NO: 3259284 - RNA, 19 nt, Artificial Sequence
  Description of Artificial Sequence: Synthetic oligonucleotide
ucuugcaugcggcgcagcu

SEQ ID NO: 3259285 - RNA, 19 nt, Artificial Sequence
  Description of Artificial Sequence: Synthetic oligonucleotide
gaucucacagagaaucuga

SEQ ID NO: 3259286 - RNA, 19 nt, Artificial Sequence
  Description of Artificial Sequence: Synthetic oligonucleotide
cugcaucugagcuugcauc

SEQ ID NO: 3259287 - RNA, 19 nt, Artificial Sequence
  Description of Artificial Sequence: Synthetic oligonucleotide
gaaucugacugcugcccug

SEQ ID NO: 3259288 - RNA, 19 nt, Artificial Sequence
  Description of Artificial Sequence: Synthetic oligonucleotide
ucugacugcugcccugagc

SEQ ID NO: 3259289 - RNA, 19 nt, Artificial Sequence
  Description of Artificial Sequence: Synthetic oligonucleotide
aucucacagagaaucugac

SEQ ID NO: 3259290 - RNA, 19 nt, Artificial Sequence
  Description of Artificial Sequence: Synthetic oligonucleotide
agaggcagcaugggcagcg

SEQ ID NO: 3259291 - RNA, 19 nt, Artificial Sequence
  Description of Artificial Sequence: Synthetic oligonucleotide
cucguagagcagcucgugg

SEQ ID NO: 3259292 - RNA, 19 nt, Artificial Sequence
  Description of Artificial Sequence: Synthetic oligonucleotide
ucuccagcauuucuugcau

SEQ ID NO: 3259293 - RNA, 19 nt, Artificial Sequence
  Description of Artificial Sequence: Synthetic oligonucleotide
cauuucuugcaugcggcgc

SEQ ID NO: 3259294 - RNA, 19 nt, Artificial Sequence
  Description of Artificial Sequence: Synthetic oligonucleotide
uagagcagcucguggguca

SEQ ID NO: 3259295 - RNA, 19 nt, Artificial Sequence
  Description of Artificial Sequence: Synthetic oligonucleotide
gagcagaugcagguuaggc

SEQ ID NO: 3259296 - RNA, 19 nt, Artificial Sequence
  Description of Artificial Sequence: Synthetic oligonucleotide
cuucuccagcauuucuugc

SEQ ID NO: 3259297 - RNA, 19 nt, Artificial Sequence
  Description of Artificial Sequence: Synthetic oligonucleotide
uaggcggccgugaggaucu

SEQ ID NO: 3259298 - RNA, 19 nt, Artificial Sequence
  Description of Artificial Sequence: Synthetic oligonucleotide
accucuuucaaguccugaa

SEQ ID NO: 3259299 - RNA, 19 nt, Artificial Sequence
  Description of Artificial Sequence: Synthetic oligonucleotide
agcccggucgcccucguag

SEQ ID NO: 3259300 - RNA, 19 nt, Artificial Sequence
  Description of Artificial Sequence: Synthetic oligonucleotide
ugaaagcuugcugcggcug

SEQ ID NO: 3259301 - RNA, 19 nt, Artificial Sequence
  Description of Artificial Sequence: Synthetic oligonucleotide
aaucugacugcugcccuga

SEQ ID NO: 3259302 - RNA, 19 nt, Artificial Sequence
  Description of Artificial Sequence: Synthetic oligonucleotide
gagcuugcaucuucuccag

SEQ ID NO: 3259303 - RNA, 19 nt, Artificial Sequence
  Description of Artificial Sequence: Synthetic oligonucleotide
agcuugcaucuucuccagc

SEQ ID NO: 3259304 - RNA, 19 nt, Artificial Sequence
  Description of Artificial Sequence: Synthetic oligonucleotide
uuggcggagagcagaugca

SEQ ID NO: 3259305 - RNA, 19 nt, Artificial Sequence
  Description of Artificial Sequence: Synthetic oligonucleotide
aaauaaauaaaauaaauaa

SEQ ID NO: 3259306 - RNA, 19 nt, Artificial Sequence
  Description of Artificial Sequence: Synthetic oligonucleotide
uuuuaaauaaauaaaauaa

SEQ ID NO: 3259307 - RNA, 19 nt, Artificial Sequence
  Description of Artificial Sequence: Synthetic oligonucleotide
aauaauuuaaguuuuaaau

SEQ ID NO: 3259308 - RNA, 19 nt, Artificial Sequence
  Description of Artificial Sequence: Synthetic oligonucleotide
aauaaaauaaauaaaauaa

SEQ ID NO: 3259309 - RNA, 19 nt, Artificial Sequence
  Description of Artificial Sequence: Synthetic oligonucleotide
uuaaguuuuaaauaaauaa

SEQ ID NO: 3259310 - RNA, 19 nt, Artificial Sequence
  Description of Artificial Sequence: Synthetic oligonucleotide
aaauaaaauaaauaaaaua

SEQ ID NO: 3259311 - RNA, 19 nt, Artificial Sequence
  Description of Artificial Sequence: Synthetic oligonucleotide
uaaaauaaauaaaauaaaa

SEQ ID NO: 3259312 - RNA, 19 nt, Artificial Sequence
  Description of Artificial Sequence: Synthetic oligonucleotide
uuaaauaaauaaaauaaau

SEQ ID NO: 3259313 - RNA, 19 nt, Artificial Sequence
  Description of Artificial Sequence: Synthetic oligonucleotide
aaggccuuggagcagacgc

SEQ ID NO: 3259314 - RNA, 19 nt, Artificial Sequence
  Description of Artificial Sequence: Synthetic oligonucleotide
uuuaaauaaauaaaauaaa

SEQ ID NO: 3259315 - RNA, 19 nt, Artificial Sequence
  Description of Artificial Sequence: Synthetic oligonucleotide
uaaauaaauaaaauaaaua

SEQ ID NO: 3259316 - RNA, 19 nt, Artificial Sequence
  Description of Artificial Sequence: Synthetic oligonucleotide
uaauuuaaguuuuaaauaa

SEQ ID NO: 3259317 - RNA, 19 nt, Artificial Sequence
  Description of Artificial Sequence: Synthetic oligonucleotide
uaaguuuuaaauaaauaaa

SEQ ID NO: 3259318 - RNA, 19 nt, Artificial Sequence
  Description of Artificial Sequence: Synthetic oligonucleotide
aaaccuauggguuccccgc

SEQ ID NO: 3259319 - RNA, 19 nt, Artificial Sequence
  Description of Artificial Sequence: Synthetic oligonucleotide
auaaauaaaauaaauaaaa

SEQ ID NO: 3259320 - RNA, 19 nt, Artificial Sequence
  Description of Artificial Sequence: Synthetic oligonucleotide
uaaauaaaauaaauaaaau

SEQ ID NO: 3259321 - RNA, 19 nt, Artificial Sequence
  Description of Artificial Sequence: Synthetic oligonucleotide
aauaaauaaaauaaauaaa

SEQ ID NO: 3259322 - RNA, 19 nt, Artificial Sequence
  Description of Artificial Sequence: Synthetic oligonucleotide
auaauuuaaguuuuaaaua

SEQ ID NO: 3259323 - RNA, 19 nt, Artificial Sequence
  Description of Artificial Sequence: Synthetic oligonucleotide
uuuuaauaauuuaaguuuu

SEQ ID NO: 3259324 - RNA, 19 nt, Artificial Sequence
  Description of Artificial Sequence: Synthetic oligonucleotide
aaaaccuauggguuccccg

SEQ ID NO: 3259325 - RNA, 19 nt, Artificial Sequence
  Description of Artificial Sequence: Synthetic oligonucleotide
uuuaaguuuuaaauaaaua

SEQ ID NO: 3259326 - RNA, 19 nt, Artificial Sequence
  Description of Artificial Sequence: Synthetic oligonucleotide
aaguuuuaaauaaauaaaa

SEQ ID NO: 3259327 - RNA, 19 nt, Artificial Sequence
  Description of Artificial Sequence: Synthetic oligonucleotide
guuuuaaauaaauaaaaua

SEQ ID NO: 3259328 - RNA, 19 nt, Artificial Sequence
  Description of Artificial Sequence: Synthetic oligonucleotide
acuugaacggcuucucccc

SEQ ID NO: 3259329 - RNA, 19 nt, Artificial Sequence
  Description of Artificial Sequence: Synthetic oligonucleotide
uaauaauuuaaguuuuaaa

SEQ ID NO: 3259330 - RNA, 19 nt, Artificial Sequence
  Description of Artificial Sequence: Synthetic oligonucleotide
acuccuuccgcacugcucg

SEQ ID NO: 3259331 - RNA, 19 nt, Artificial Sequence
  Description of Artificial Sequence: Synthetic oligonucleotide
auaaaauaaauaaaauaaa

SEQ ID NO: 3259332 - RNA, 19 nt, Artificial Sequence
  Description of Artificial Sequence: Synthetic oligonucleotide
acugcuggcacguguaggg

SEQ ID NO: 3259333 - RNA, 19 nt, Artificial Sequence
  Description of Artificial Sequence: Synthetic oligonucleotide
uuuaauaauuuaaguuuua

SEQ ID NO: 3259334 - RNA, 19 nt, Artificial Sequence
  Description of Artificial Sequence: Synthetic oligonucleotide
uuaauaauuuaaguuuuaa

SEQ ID NO: 3259335 - RNA, 19 nt, Artificial Sequence
  Description of Artificial Sequence: Synthetic oligonucleotide
acugcucgcacuugaacgg

SEQ ID NO: 3259336 - RNA, 19 nt, Artificial Sequence
  Description of Artificial Sequence: Synthetic oligonucleotide
cacugcucgcacuugaacg

SEQ ID NO: 3259337 - RNA, 19 nt, Artificial Sequence
  Description of Artificial Sequence: Synthetic oligonucleotide
uccagcugaacuccuuccg

SEQ ID NO: 3259338 - RNA, 19 nt, Artificial Sequence
  Description of Artificial Sequence: Synthetic oligonucleotide
aguuuuaaauaaauaaaau

SEQ ID NO: 3259339 - RNA, 19 nt, Artificial Sequence
  Description of Artificial Sequence: Synthetic oligonucleotide
aauuuaaguuuuaaauaaa

SEQ ID NO: 3259340 - RNA, 19 nt, Artificial Sequence
  Description of Artificial Sequence: Synthetic oligonucleotide
uggugcguguugaagugcg

SEQ ID NO: 3259341 - RNA, 19 nt, Artificial Sequence
  Description of Artificial Sequence: Synthetic oligonucleotide
acguguagggcuucucccc

SEQ ID NO: 3259342 - RNA, 19 nt, Artificial Sequence
  Description of Artificial Sequence: Synthetic oligonucleotide
auuuaaguuuuaaauaaau

SEQ ID NO: 3259343 - RNA, 19 nt, Artificial Sequence
  Description of Artificial Sequence: Synthetic oligonucleotide
uuggagcagacgcugcagg

SEQ ID NO: 3259344 - RNA, 19 nt, Artificial Sequence
  Description of Artificial Sequence: Synthetic oligonucleotide
uggcugaaggccuuggagc

SEQ ID NO: 3259345 - RNA, 19 nt, Artificial Sequence
  Description of Artificial Sequence: Synthetic oligonucleotide
agguguagggccucucccc

SEQ ID NO: 3259346 - RNA, 19 nt, Artificial Sequence
  Description of Artificial Sequence: Synthetic oligonucleotide
cuggugguaggccaggugc

SEQ ID NO: 3259347 - RNA, 19 nt, Artificial Sequence
  Description of Artificial Sequence: Synthetic oligonucleotide
ugcgaccucuggcugaagg

SEQ ID NO: 3259348 - RNA, 19 nt, Artificial Sequence
  Description of Artificial Sequence: Synthetic oligonucleotide
aaccuauggguuccccgcg

SEQ ID NO: 3259349 - RNA, 19 nt, Artificial Sequence
  Description of Artificial Sequence: Synthetic oligonucleotide
ugcguguugaagugcgagg

SEQ ID NO: 3259350 - RNA, 19 nt, Artificial Sequence
  Description of Artificial Sequence: Synthetic oligonucleotide
cacuugaacggcuucuccc

SEQ ID NO: 3259351 - RNA, 19 nt, Artificial Sequence
  Description of Artificial Sequence: Synthetic oligonucleotide
aacggcuucuccccggugu

SEQ ID NO: 3259352 - RNA, 19 nt, Artificial Sequence
  Description of Artificial Sequence: Synthetic oligonucleotide
uggugguaggccaggugcg

SEQ ID NO: 3259353 - RNA, 19 nt, Artificial Sequence
  Description of Artificial Sequence: Synthetic oligonucleotide
ugaagugcgaggccuggcu

SEQ ID NO: 3259354 - RNA, 19 nt, Artificial Sequence
  Description of Artificial Sequence: Synthetic oligonucleotide
agcugaacuccuuccgcac

SEQ ID NO: 3259355 - RNA, 19 nt, Artificial Sequence
  Description of Artificial Sequence: Synthetic oligonucleotide
ugcgaggccuggcugaagc

SEQ ID NO: 3259356 - RNA, 19 nt, Artificial Sequence
  Description of Artificial Sequence: Synthetic oligonucleotide
uguugaagugcgaggccug

SEQ ID NO: 3259357 - RNA, 19 nt, Artificial Sequence
  Description of Artificial Sequence: Synthetic oligonucleotide
agacgcugcagguguaggg

SEQ ID NO: 3259358 - RNA, 19 nt, Artificial Sequence
  Description of Artificial Sequence: Synthetic oligonucleotide
cuggcugaagcgcuugccg

SEQ ID NO: 3259359 - RNA, 19 nt, Artificial Sequence
  Description of Artificial Sequence: Synthetic oligonucleotide
uugaacggcuucuccccgg

SEQ ID NO: 3259360 - RNA, 19 nt, Artificial Sequence
  Description of Artificial Sequence: Synthetic oligonucleotide
aagugcgaggccuggcuga

SEQ ID NO: 3259361 - RNA, 19 nt, Artificial Sequence
  Description of Artificial Sequence: Synthetic oligonucleotide
acgcugcagguguagggcc

SEQ ID NO: 3259362 - RNA, 19 nt, Artificial Sequence
  Description of Artificial Sequence: Synthetic oligonucleotide
cacguguagggcuucuccc

SEQ ID NO: 3259363 - RNA, 19 nt, Artificial Sequence
  Description of Artificial Sequence: Synthetic oligonucleotide
cuggcugaaggccuuggag

SEQ ID NO: 3259364 - RNA, 19 nt, Artificial Sequence
  Description of Artificial Sequence: Synthetic oligonucleotide
uagggcuucuccccggugu

SEQ ID NO: 3259365 - RNA, 19 nt, Artificial Sequence
  Description of Artificial Sequence: Synthetic oligonucleotide
cuugaacggcuucuccccg

SEQ ID NO: 3259366 - RNA, 19 nt, Artificial Sequence
  Description of Artificial Sequence: Synthetic oligonucleotide
gaagugcgaggccuggcug

SEQ ID NO: 3259367 - RNA, 19 nt, Artificial Sequence
  Description of Artificial Sequence: Synthetic oligonucleotide
uggcugaagcgcuugccgc

SEQ ID NO: 3259368 - RNA, 19 nt, Artificial Sequence
  Description of Artificial Sequence: Synthetic oligonucleotide
aacuccuuccgcacugcuc

SEQ ID NO: 3259369 - RNA, 19 nt, Artificial Sequence
  Description of Artificial Sequence: Synthetic oligonucleotide
ugaagcgcuugccgcacug

SEQ ID NO: 3259370 - RNA, 19 nt, Artificial Sequence
  Description of Artificial Sequence: Synthetic oligonucleotide
gacgcugcagguguagggc

SEQ ID NO: 3259371 - RNA, 19 nt, Artificial Sequence
  Description of Artificial Sequence: Synthetic oligonucleotide
gguguggacccgcuggugg

SEQ ID NO: 3259372 - RNA, 19 nt, Artificial Sequence
  Description of Artificial Sequence: Synthetic oligonucleotide
aagcgcuugccgcacugcu

SEQ ID NO: 3259373 - RNA, 19 nt, Artificial Sequence
  Description of Artificial Sequence: Synthetic oligonucleotide
uauggguuccccgcggugu

SEQ ID NO: 3259374 - RNA, 19 nt, Artificial Sequence
  Description of Artificial Sequence: Synthetic oligonucleotide
cuccagcugaacuccuucc

SEQ ID NO: 3259375 - RNA, 19 nt, Artificial Sequence
  Description of Artificial Sequence: Synthetic oligonucleotide
ucuggcugaaggccuugga

SEQ ID NO: 3259376 - RNA, 19 nt, Artificial Sequence
  Description of Artificial Sequence: Synthetic oligonucleotide
accuauggguuccccgcgg

SEQ ID NO: 3259377 - RNA, 19 nt, Artificial Sequence
  Description of Artificial Sequence: Synthetic oligonucleotide
cugaacuccuuccgcacug

SEQ ID NO: 3259378 - RNA, 19 nt, Artificial Sequence
  Description of Artificial Sequence: Synthetic oligonucleotide
gugugcacccgcuggugcg

SEQ ID NO: 3259379 - RNA, 19 nt, Artificial Sequence
  Description of Artificial Sequence: Synthetic oligonucleotide
uguagggccucuccccggu

SEQ ID NO: 3259380 - RNA, 19 nt, Artificial Sequence
  Description of Artificial Sequence: Synthetic oligonucleotide
uggagcagacgcugcaggu

SEQ ID NO: 3259381 - RNA, 19 nt, Artificial Sequence
  Description of Artificial Sequence: Synthetic oligonucleotide
cagguguagggccucuccc

SEQ ID NO: 3259382 - RNA, 19 nt, Artificial Sequence
  Description of Artificial Sequence: Synthetic oligonucleotide
gguguagggccucuccccg

SEQ ID NO: 3259383 - RNA, 19 nt, Artificial Sequence
  Description of Artificial Sequence: Synthetic oligonucleotide
guugaagugcgaggccugg

SEQ ID NO: 3259384 - RNA, 19 nt, Artificial Sequence
  Description of Artificial Sequence: Synthetic oligonucleotide
ugguaggccaggugcgacc

SEQ ID NO: 3259385 - RNA, 19 nt, Artificial Sequence
  Description of Artificial Sequence: Synthetic oligonucleotide
uucuccccgguguggauga

SEQ ID NO: 3259386 - RNA, 19 nt, Artificial Sequence
  Description of Artificial Sequence: Synthetic oligonucleotide
uuccccgcgguguggaccc

SEQ ID NO: 3259387 - RNA, 19 nt, Artificial Sequence
  Description of Artificial Sequence: Synthetic oligonucleotide
ugcuggcacguguagggcu

SEQ ID NO: 3259388 - RNA, 19 nt, Artificial Sequence
  Description of Artificial Sequence: Synthetic oligonucleotide
cuugccgcacugcuggcac

SEQ ID NO: 3259389 - RNA, 19 nt, Artificial Sequence
  Description of Artificial Sequence: Synthetic oligonucleotide
ugaacggcuucuccccggu

SEQ ID NO: 3259390 - RNA, 19 nt, Artificial Sequence
  Description of Artificial Sequence: Synthetic oligonucleotide
uguagggcuucuccccggu

SEQ ID NO: 3259391 - RNA, 19 nt, Artificial Sequence
  Description of Artificial Sequence: Synthetic oligonucleotide
cuuggagcagacgcugcag

SEQ ID NO: 3259392 - RNA, 19 nt, Artificial Sequence
  Description of Artificial Sequence: Synthetic oligonucleotide
gugcguguugaagugcgag

SEQ ID NO: 3259393 - RNA, 19 nt, Artificial Sequence
  Description of Artificial Sequence: Synthetic oligonucleotide
gcgcuugccgcacugcugg

SEQ ID NO: 3259394 - RNA, 19 nt, Artificial Sequence
  Description of Artificial Sequence: Synthetic oligonucleotide
ugaacuccuuccgcacugc

SEQ ID NO: 3259395 - RNA, 19 nt, Artificial Sequence
  Description of Artificial Sequence: Synthetic oligonucleotide
ugcucgcacuugaacggcu

SEQ ID NO: 3259396 - RNA, 19 nt, Artificial Sequence
  Description of Artificial Sequence: Synthetic oligonucleotide
gaaggccuuggagcagacg

SEQ ID NO: 3259397 - RNA, 19 nt, Artificial Sequence
  Description of Artificial Sequence: Synthetic oligonucleotide
uucuccccggugugcaccc

SEQ ID NO: 3259398 - RNA, 19 nt, Artificial Sequence
  Description of Artificial Sequence: Synthetic oligonucleotide
guguagggcuucuccccgg

SEQ ID NO: 3259399 - RNA, 19 nt, Artificial Sequence
  Description of Artificial Sequence: Synthetic oligonucleotide
uaggccaggugcgaccucu

SEQ ID NO: 3259400 - RNA, 19 nt, Artificial Sequence
  Description of Artificial Sequence: Synthetic oligonucleotide
ugcgcgcugagccccgcgc

SEQ ID NO: 3259401 - RNA, 19 nt, Artificial Sequence
  Description of Artificial Sequence: Synthetic oligonucleotide
agggcuucuccccggugug

SEQ ID NO: 3259402 - RNA, 19 nt, Artificial Sequence
  Description of Artificial Sequence: Synthetic oligonucleotide
uagggccucuccccggugu

SEQ ID NO: 3259403 - RNA, 19 nt, Artificial Sequence
  Description of Artificial Sequence: Synthetic oligonucleotide
ucgcacuugaacggcuucu

SEQ ID NO: 3259404 - RNA, 19 nt, Artificial Sequence
  Description of Artificial Sequence: Synthetic oligonucleotide
gcuggugcguguugaagug

SEQ ID NO: 3259405 - RNA, 19 nt, Artificial Sequence
  Description of Artificial Sequence: Synthetic oligonucleotide
aaugauaugacacagaaaa

SEQ ID NO: 3259406 - RNA, 19 nt, Artificial Sequence
  Description of Artificial Sequence: Synthetic oligonucleotide
auaauagaaaacuaaugcc

SEQ ID NO: 3259407 - RNA, 19 nt, Artificial Sequence
  Description of Artificial Sequence: Synthetic oligonucleotide
aauauuaucuggcacacug

SEQ ID NO: 3259408 - RNA, 19 nt, Artificial Sequence
  Description of Artificial Sequence: Synthetic oligonucleotide
aauaauauuaucuggcaca

SEQ ID NO: 3259409 - RNA, 19 nt, Artificial Sequence
  Description of Artificial Sequence: Synthetic oligonucleotide
auaaaauaaaguuuucaac

SEQ ID NO: 3259410 - RNA, 19 nt, Artificial Sequence
  Description of Artificial Sequence: Synthetic oligonucleotide
cauaauagaaaacuaaugc

SEQ ID NO: 3259411 - RNA, 19 nt, Artificial Sequence
  Description of Artificial Sequence: Synthetic oligonucleotide
uugauuuucacccagcaag

SEQ ID NO: 3259412 - RNA, 19 nt, Artificial Sequence
  Description of Artificial Sequence: Synthetic oligonucleotide
aauuauucuacccagcaca

SEQ ID NO: 3259413 - RNA, 19 nt, Artificial Sequence
  Description of Artificial Sequence: Synthetic oligonucleotide
ucacauagcagcuugauag

SEQ ID NO: 3259414 - RNA, 19 nt, Artificial Sequence
  Description of Artificial Sequence: Synthetic oligonucleotide
uucaacacuauuuauaaca

SEQ ID NO: 3259415 - RNA, 19 nt, Artificial Sequence
  Description of Artificial Sequence: Synthetic oligonucleotide
uuaugaguaaguuuggaag

SEQ ID NO: 3259416 - RNA, 19 nt, Artificial Sequence
  Description of Artificial Sequence: Synthetic oligonucleotide
acugauacuaauuacaagu

SEQ ID NO: 3259417 - RNA, 19 nt, Artificial Sequence
  Description of Artificial Sequence: Synthetic oligonucleotide
auuucuacauuauaugaac

SEQ ID NO: 3259418 - RNA, 19 nt, Artificial Sequence
  Description of Artificial Sequence: Synthetic oligonucleotide
guuguaaucucauacaaag

SEQ ID NO: 3259419 - RNA, 19 nt, Artificial Sequence
  Description of Artificial Sequence: Synthetic oligonucleotide
aauuauagauaauggucac

SEQ ID NO: 3259420 - RNA, 19 nt, Artificial Sequence
  Description of Artificial Sequence: Synthetic oligonucleotide
uuaauaaaaucaaauacau

SEQ ID NO: 3259421 - RNA, 19 nt, Artificial Sequence
  Description of Artificial Sequence: Synthetic oligonucleotide
acuaauaauauuaucuggc

SEQ ID NO: 3259422 - RNA, 19 nt, Artificial Sequence
  Description of Artificial Sequence: Synthetic oligonucleotide
auaauauuuaauaaaauca

SEQ ID NO: 3259423 - RNA, 19 nt, Artificial Sequence
  Description of Artificial Sequence: Synthetic oligonucleotide
agcuugauagccuuguucc

SEQ ID NO: 3259424 - RNA, 19 nt, Artificial Sequence
  Description of Artificial Sequence: Synthetic oligonucleotide
uauaucagugucaucaugc

SEQ ID NO: 3259425 - RNA, 19 nt, Artificial Sequence
  Description of Artificial Sequence: Synthetic oligonucleotide
acuuggaugaccugcaagc

SEQ ID NO: 3259426 - RNA, 19 nt, Artificial Sequence
  Description of Artificial Sequence: Synthetic oligonucleotide
uuagacauaauuucauucc

SEQ ID NO: 3259427 - RNA, 19 nt, Artificial Sequence
  Description of Artificial Sequence: Synthetic oligonucleotide
gauaaugugugcuuuaaac

SEQ ID NO: 3259428 - RNA, 19 nt, Artificial Sequence
  Description of Artificial Sequence: Synthetic oligonucleotide
acuaaugccagucaaaggu

SEQ ID NO: 3259429 - RNA, 19 nt, Artificial Sequence
  Description of Artificial Sequence: Synthetic oligonucleotide
uuugauaaaucauaccaug

SEQ ID NO: 3259430 - RNA, 19 nt, Artificial Sequence
  Description of Artificial Sequence: Synthetic oligonucleotide
uugauuuggauucaaauau

SEQ ID NO: 3259431 - RNA, 19 nt, Artificial Sequence
  Description of Artificial Sequence: Synthetic oligonucleotide
uagaaaauuauucuaccca

SEQ ID NO: 3259432 - RNA, 19 nt, Artificial Sequence
  Description of Artificial Sequence: Synthetic oligonucleotide
uuuucacccagcaagacca

SEQ ID NO: 3259433 - RNA, 19 nt, Artificial Sequence
  Description of Artificial Sequence: Synthetic oligonucleotide
auuaccaguauucagaaaa

SEQ ID NO: 3259434 - RNA, 19 nt, Artificial Sequence
  Description of Artificial Sequence: Synthetic oligonucleotide
aagaaagcaacauuugagu

SEQ ID NO: 3259435 - RNA, 19 nt, Artificial Sequence
  Description of Artificial Sequence: Synthetic oligonucleotide
cuaaagagaaauaacagca

SEQ ID NO: 3259436 - RNA, 19 nt, Artificial Sequence
  Description of Artificial Sequence: Synthetic oligonucleotide
uuccaaaacaugaacuagg

SEQ ID NO: 3259437 - RNA, 19 nt, Artificial Sequence
  Description of Artificial Sequence: Synthetic oligonucleotide
aaucauguuagacauaauu

SEQ ID NO: 3259438 - RNA, 19 nt, Artificial Sequence
  Description of Artificial Sequence: Synthetic oligonucleotide
caugcuuagaaaauuauuc

SEQ ID NO: 3259439 - RNA, 19 nt, Artificial Sequence
  Description of Artificial Sequence: Synthetic oligonucleotide
uuagaaaauuauucuaccc

SEQ ID NO: 3259440 - RNA, 19 nt, Artificial Sequence
  Description of Artificial Sequence: Synthetic oligonucleotide
aauacauaaaauaaaguuu

SEQ ID NO: 3259441 - RNA, 19 nt, Artificial Sequence
  Description of Artificial Sequence: Synthetic oligonucleotide
ugauaugacacagaaaaca

SEQ ID NO: 3259442 - RNA, 19 nt, Artificial Sequence
  Description of Artificial Sequence: Synthetic oligonucleotide
uguauaaagugcauacuug

SEQ ID NO: 3259443 - RNA, 19 nt, Artificial Sequence
  Description of Artificial Sequence: Synthetic oligonucleotide
aauuacaaguuaaauaaca

SEQ ID NO: 3259444 - RNA, 19 nt, Artificial Sequence
  Description of Artificial Sequence: Synthetic oligonucleotide
aauagaaaacuaaugccag

SEQ ID NO: 3259445 - RNA, 19 nt, Artificial Sequence
  Description of Artificial Sequence: Synthetic oligonucleotide
cuugccauuguauaaagug

SEQ ID NO: 3259446 - RNA, 19 nt, Artificial Sequence
  Description of Artificial Sequence: Synthetic oligonucleotide
uaaguuuggaagauggcug

SEQ ID NO: 3259447 - RNA, 19 nt, Artificial Sequence
  Description of Artificial Sequence: Synthetic oligonucleotide
uuauaugaacaacuuuuag

SEQ ID NO: 3259448 - RNA, 19 nt, Artificial Sequence
  Description of Artificial Sequence: Synthetic oligonucleotide
uuguaacucauaaauacac

SEQ ID NO: 3259449 - RNA, 19 nt, Artificial Sequence
  Description of Artificial Sequence: Synthetic oligonucleotide
auuuucacccagcaagacc

SEQ ID NO: 3259450 - RNA, 19 nt, Artificial Sequence
  Description of Artificial Sequence: Synthetic oligonucleotide
gaagguuguaaucucauac

SEQ ID NO: 3259451 - RNA, 19 nt, Artificial Sequence
  Description of Artificial Sequence: Synthetic oligonucleotide
uuuacuuuuaaccccugga

SEQ ID NO: 3259452 - RNA, 19 nt, Artificial Sequence
  Description of Artificial Sequence: Synthetic oligonucleotide
aacuagguuugauaaauca

SEQ ID NO: 3259453 - RNA, 19 nt, Artificial Sequence
  Description of Artificial Sequence: Synthetic oligonucleotide
uacaauauaccuauuucgu

SEQ ID NO: 3259454 - RNA, 19 nt, Artificial Sequence
  Description of Artificial Sequence: Synthetic oligonucleotide
uugaaauucauuucuacau

SEQ ID NO: 3259455 - RNA, 19 nt, Artificial Sequence
  Description of Artificial Sequence: Synthetic oligonucleotide
uuuaggagucuaaagagaa

SEQ ID NO: 3259456 - RNA, 19 nt, Artificial Sequence
  Description of Artificial Sequence: Synthetic oligonucleotide
aaacuaaugccagucaaag

SEQ ID NO: 3259457 - RNA, 19 nt, Artificial Sequence
  Description of Artificial Sequence: Synthetic oligonucleotide
uugauaaaucauaccaugc

SEQ ID NO: 3259458 - RNA, 19 nt, Artificial Sequence
  Description of Artificial Sequence: Synthetic oligonucleotide
ugauaaaucauaccaugcu

SEQ ID NO: 3259459 - RNA, 19 nt, Artificial Sequence
  Description of Artificial Sequence: Synthetic oligonucleotide
guaacucauaaauacacug

SEQ ID NO: 3259460 - RNA, 19 nt, Artificial Sequence
  Description of Artificial Sequence: Synthetic oligonucleotide
aaguacauaucugucaaag

SEQ ID NO: 3259461 - RNA, 19 nt, Artificial Sequence
  Description of Artificial Sequence: Synthetic oligonucleotide
acauuuacaauauaccuau

SEQ ID NO: 3259462 - RNA, 19 nt, Artificial Sequence
  Description of Artificial Sequence: Synthetic oligonucleotide
auuguauaauauuuaauaa

SEQ ID NO: 3259463 - RNA, 19 nt, Artificial Sequence
  Description of Artificial Sequence: Synthetic oligonucleotide
uaauaauauuaucuggcac

SEQ ID NO: 3259464 - RNA, 19 nt, Artificial Sequence
  Description of Artificial Sequence: Synthetic oligonucleotide
auaucugucaaagaaagca

SEQ ID NO: 3259465 - RNA, 19 nt, Artificial Sequence
  Description of Artificial Sequence: Synthetic oligonucleotide
uaugaguaaguuuggaaga

SEQ ID NO: 3259466 - RNA, 19 nt, Artificial Sequence
  Description of Artificial Sequence: Synthetic oligonucleotide
aaagcaacauuugaguucu

SEQ ID NO: 3259467 - RNA, 19 nt, Artificial Sequence
  Description of Artificial Sequence: Synthetic oligonucleotide
uggauucaaauauuuauac

SEQ ID NO: 3259468 - RNA, 19 nt, Artificial Sequence
  Description of Artificial Sequence: Synthetic oligonucleotide
cacuaauaauauuaucugg

SEQ ID NO: 3259469 - RNA, 19 nt, Artificial Sequence
  Description of Artificial Sequence: Synthetic oligonucleotide
aagggaaaguguccugacc

SEQ ID NO: 3259470 - RNA, 19 nt, Artificial Sequence
  Description of Artificial Sequence: Synthetic oligonucleotide
aacauuugaguucucugcu

SEQ ID NO: 3259471 - RNA, 19 nt, Artificial Sequence
  Description of Artificial Sequence: Synthetic oligonucleotide
ucuuucuuaacauaaucau

SEQ ID NO: 3259472 - RNA, 19 nt, Artificial Sequence
  Description of Artificial Sequence: Synthetic oligonucleotide
aaugacucgcuuguaacuc

SEQ ID NO: 3259473 - RNA, 19 nt, Artificial Sequence
  Description of Artificial Sequence: Synthetic oligonucleotide
gaguaaguuuggaagaugg

SEQ ID NO: 3259474 - RNA, 19 nt, Artificial Sequence
  Description of Artificial Sequence: Synthetic oligonucleotide
aacucauaaauacacugau

SEQ ID NO: 3259475 - RNA, 19 nt, Artificial Sequence
  Description of Artificial Sequence: Synthetic oligonucleotide
acaauauaccuauuucguc

SEQ ID NO: 3259476 - RNA, 19 nt, Artificial Sequence
  Description of Artificial Sequence: Synthetic oligonucleotide
aacuaaugccagucaaagg

SEQ ID NO: 3259477 - RNA, 19 nt, Artificial Sequence
  Description of Artificial Sequence: Synthetic oligonucleotide
uuuuaggagucuaaagaga

SEQ ID NO: 3259478 - RNA, 19 nt, Artificial Sequence
  Description of Artificial Sequence: Synthetic oligonucleotide
uaacucauaaauacacuga

SEQ ID NO: 3259479 - RNA, 19 nt, Artificial Sequence
  Description of Artificial Sequence: Synthetic oligonucleotide
aaagggaaaguguccugac

SEQ ID NO: 3259480 - RNA, 19 nt, Artificial Sequence
  Description of Artificial Sequence: Synthetic oligonucleotide
agcaauuauagauaauggu

SEQ ID NO: 3259481 - RNA, 19 nt, Artificial Sequence
  Description of Artificial Sequence: Synthetic oligonucleotide
auaauauuaucuggcacac

SEQ ID NO: 3259482 - RNA, 19 nt, Artificial Sequence
  Description of Artificial Sequence: Synthetic oligonucleotide
auuccuucaucuuuguuug

SEQ ID NO: 3259483 - RNA, 19 nt, Artificial Sequence
  Description of Artificial Sequence: Synthetic oligonucleotide
cauaccaugcuuaaccuug

SEQ ID NO: 3259484 - RNA, 19 nt, Artificial Sequence
  Description of Artificial Sequence: Synthetic oligonucleotide
ucccuuuuccaaaacauga

SEQ ID NO: 3259485 - RNA, 19 nt, Artificial Sequence
  Description of Artificial Sequence: Synthetic oligonucleotide
auacacugauacuaauuac

SEQ ID NO: 3259486 - RNA, 19 nt, Artificial Sequence
  Description of Artificial Sequence: Synthetic oligonucleotide
uuuaaacacucauuaccag

SEQ ID NO: 3259487 - RNA, 19 nt, Artificial Sequence
  Description of Artificial Sequence: Synthetic oligonucleotide
uucaaauauuuauacauuu

SEQ ID NO: 3259488 - RNA, 19 nt, Artificial Sequence
  Description of Artificial Sequence: Synthetic oligonucleotide
agugucaucaugcuuagaa

SEQ ID NO: 3259489 - RNA, 19 nt, Artificial Sequence
  Description of Artificial Sequence: Synthetic oligonucleotide
ucgcuuguaacucauaaau

SEQ ID NO: 3259490 - RNA, 19 nt, Artificial Sequence
  Description of Artificial Sequence: Synthetic oligonucleotide
uuuaugaguaaguuuggaa

SEQ ID NO: 3259491 - RNA, 19 nt, Artificial Sequence
  Description of Artificial Sequence: Synthetic oligonucleotide
aaaugacucgcuuguaacu

SEQ ID NO: 3259492 - RNA, 19 nt, Artificial Sequence
  Description of Artificial Sequence: Synthetic oligonucleotide
uuuguuugaaauucauuuc

SEQ ID NO: 3259493 - RNA, 19 nt, Artificial Sequence
  Description of Artificial Sequence: Synthetic oligonucleotide
uuaaugauugcugccaaug

SEQ ID NO: 3259494 - RNA, 19 nt, Artificial Sequence
  Description of Artificial Sequence: Synthetic oligonucleotide
auauuuaauaaaaucaaau

SEQ ID NO: 3259495 - RNA, 19 nt, Artificial Sequence
  Description of Artificial Sequence: Synthetic oligonucleotide
caacauuugaguucucugc

SEQ ID NO: 3259496 - RNA, 19 nt, Artificial Sequence
  Description of Artificial Sequence: Synthetic oligonucleotide
gaaagcaacauuugaguuc

SEQ ID NO: 3259497 - RNA, 19 nt, Artificial Sequence
  Description of Artificial Sequence: Synthetic oligonucleotide
uuuuccaaaacaugaacua

SEQ ID NO: 3259498 - RNA, 19 nt, Artificial Sequence
  Description of Artificial Sequence: Synthetic oligonucleotide
agaauuugacaaccauccc

SEQ ID NO: 3259499 - RNA, 19 nt, Artificial Sequence
  Description of Artificial Sequence: Synthetic oligonucleotide
auuacaaguuaaauaacag

SEQ ID NO: 3259500 - RNA, 19 nt, Artificial Sequence
  Description of Artificial Sequence: Synthetic oligonucleotide
cuuucuuaacauaaucaug

SEQ ID NO: 3259501 - RNA, 19 nt, Artificial Sequence
  Description of Artificial Sequence: Synthetic oligonucleotide
guuagacauaauuucauuc

SEQ ID NO: 3259502 - RNA, 19 nt, Artificial Sequence
  Description of Artificial Sequence: Synthetic oligonucleotide
gcuuuaaacacucauuacc

SEQ ID NO: 3259503 - RNA, 19 nt, Artificial Sequence
  Description of Artificial Sequence: Synthetic oligonucleotide
uaaacacucauuaccagua

SEQ ID NO: 3259504 - RNA, 19 nt, Artificial Sequence
  Description of Artificial Sequence: Synthetic oligonucleotide
aaugauugcugccaaugau

SEQ ID NO: 3259505 - RNA, 19 nt, Artificial Sequence
  Description of Artificial Sequence: Synthetic oligonucleotide
auugauuacacucauaggg

SEQ ID NO: 3259506 - RNA, 19 nt, Artificial Sequence
  Description of Artificial Sequence: Synthetic oligonucleotide
uucaugauauugaagaugg

SEQ ID NO: 3259507 - RNA, 19 nt, Artificial Sequence
  Description of Artificial Sequence: Synthetic oligonucleotide
auugacuacauucauagcg

SEQ ID NO: 3259508 - RNA, 19 nt, Artificial Sequence
  Description of Artificial Sequence: Synthetic oligonucleotide
ucuuucaugauauugaaga

SEQ ID NO: 3259509 - RNA, 19 nt, Artificial Sequence
  Description of Artificial Sequence: Synthetic oligonucleotide
auugguugcauucauaggg

SEQ ID NO: 3259510 - RNA, 19 nt, Artificial Sequence
  Description of Artificial Sequence: Synthetic oligonucleotide
aaagguuuuaucauauugc

SEQ ID NO: 3259511 - RNA, 19 nt, Artificial Sequence
  Description of Artificial Sequence: Synthetic oligonucleotide
aguaugaguucuuucaugc

SEQ ID NO: 3259512 - RNA, 19 nt, Artificial Sequence
  Description of Artificial Sequence: Synthetic oligonucleotide
aaaacugggacuugcaaag

SEQ ID NO: 3259513 - RNA, 19 nt, Artificial Sequence
  Description of Artificial Sequence: Synthetic oligonucleotide
agcuuuaucacauugguug

SEQ ID NO: 3259514 - RNA, 19 nt, Artificial Sequence
  Description of Artificial Sequence: Synthetic oligonucleotide
acauugauuacacucauag

SEQ ID NO: 3259515 - RNA, 19 nt, Artificial Sequence
  Description of Artificial Sequence: Synthetic oligonucleotide
ucuuucaugacugagaaga

SEQ ID NO: 3259516 - RNA, 19 nt, Artificial Sequence
  Description of Artificial Sequence: Synthetic oligonucleotide
agagugacuucuuucaugc

SEQ ID NO: 3259517 - RNA, 19 nt, Artificial Sequence
  Description of Artificial Sequence: Synthetic oligonucleotide
acauugacuacauucauag

SEQ ID NO: 3259518 - RNA, 19 nt, Artificial Sequence
  Description of Artificial Sequence: Synthetic oligonucleotide
uuuaucauauugcugauau

SEQ ID NO: 3259519 - RNA, 19 nt, Artificial Sequence
  Description of Artificial Sequence: Synthetic oligonucleotide
ucuuucaugccuuugaaga

SEQ ID NO: 3259520 - RNA, 19 nt, Artificial Sequence
  Description of Artificial Sequence: Synthetic oligonucleotide
uauucuuucaugauauuga

SEQ ID NO: 3259521 - RNA, 19 nt, Artificial Sequence
  Description of Artificial Sequence: Synthetic oligonucleotide
uugaagauggcucuuacga

SEQ ID NO: 3259522 - RNA, 19 nt, Artificial Sequence
  Description of Artificial Sequence: Synthetic oligonucleotide
aaggcuuuaccacauugac

SEQ ID NO: 3259523 - RNA, 19 nt, Artificial Sequence
  Description of Artificial Sequence: Synthetic oligonucleotide
aaagcuuuaucacauuggu

SEQ ID NO: 3259524 - RNA, 19 nt, Artificial Sequence
  Description of Artificial Sequence: Synthetic oligonucleotide
uuguuuucacuacagaaug

SEQ ID NO: 3259525 - RNA, 19 nt, Artificial Sequence
  Description of Artificial Sequence: Synthetic oligonucleotide
aaaaggcuauaccacauug

SEQ ID NO: 3259526 - RNA, 19 nt, Artificial Sequence
  Description of Artificial Sequence: Synthetic oligonucleotide
auuaugacuucuuucauga

SEQ ID NO: 3259527 - RNA, 19 nt, Artificial Sequence
  Description of Artificial Sequence: Synthetic oligonucleotide
auucauaggguuucucucc

SEQ ID NO: 3259528 - RNA, 19 nt, Artificial Sequence
  Description of Artificial Sequence: Synthetic oligonucleotide
uccauuaugacuucuuuca

SEQ ID NO: 3259529 - RNA, 19 nt, Artificial Sequence
  Description of Artificial Sequence: Synthetic oligonucleotide
agaugaaaaggcuauacca

SEQ ID NO: 3259530 - RNA, 19 nt, Artificial Sequence
  Description of Artificial Sequence: Synthetic oligonucleotide
auuacugcgagaugaaaag

SEQ ID NO: 3259531 - RNA, 19 nt, Artificial Sequence
  Description of Artificial Sequence: Synthetic oligonucleotide
aagguuuuaucauauugcu

SEQ ID NO: 3259532 - RNA, 19 nt, Artificial Sequence
  Description of Artificial Sequence: Synthetic oligonucleotide
uaucauauugcugauauuc

SEQ ID NO: 3259533 - RNA, 19 nt, Artificial Sequence
  Description of Artificial Sequence: Synthetic oligonucleotide
auauugcugauauucauug

SEQ ID NO: 3259534 - RNA, 19 nt, Artificial Sequence
  Description of Artificial Sequence: Synthetic oligonucleotide
aaaagcuuuaucacauugg

SEQ ID NO: 3259535 - RNA, 19 nt, Artificial Sequence
  Description of Artificial Sequence: Synthetic oligonucleotide
acauugguugcauucauag

SEQ ID NO: 3259536 - RNA, 19 nt, Artificial Sequence
  Description of Artificial Sequence: Synthetic oligonucleotide
uaugacuucuuucaugacu

SEQ ID NO: 3259537 - RNA, 19 nt, Artificial Sequence
  Description of Artificial Sequence: Synthetic oligonucleotide
acuugcaaagguuuuauca

SEQ ID NO: 3259538 - RNA, 19 nt, Artificial Sequence
  Description of Artificial Sequence: Synthetic oligonucleotide
uauaccacauugauuacac

SEQ ID NO: 3259539 - RNA, 19 nt, Artificial Sequence
  Description of Artificial Sequence: Synthetic oligonucleotide
ugccuuugaagaaaacugg

SEQ ID NO: 3259540 - RNA, 19 nt, Artificial Sequence
  Description of Artificial Sequence: Synthetic oligonucleotide
uuugaagaaaacugggacu

SEQ ID NO: 3259541 - RNA, 19 nt, Artificial Sequence
  Description of Artificial Sequence: Synthetic oligonucleotide
uuucacuacagaaugaguu

SEQ ID NO: 3259542 - RNA, 19 nt, Artificial Sequence
  Description of Artificial Sequence: Synthetic oligonucleotide
cuuugaagaaaacugggac

SEQ ID NO: 3259543 - RNA, 19 nt, Artificial Sequence
  Description of Artificial Sequence: Synthetic oligonucleotide
acgagcaaaagcuuuauca

SEQ ID NO: 3259544 - RNA, 19 nt, Artificial Sequence
  Description of Artificial Sequence: Synthetic oligonucleotide
uaugaguucuuucaugccu

SEQ ID NO: 3259545 - RNA, 19 nt, Artificial Sequence
  Description of Artificial Sequence: Synthetic oligonucleotide
gacugagaagauuacugcg

SEQ ID NO: 3259546 - RNA, 19 nt, Artificial Sequence
  Description of Artificial Sequence: Synthetic oligonucleotide
uucauuguuuucacuacag

SEQ ID NO: 3259547 - RNA, 19 nt, Artificial Sequence
  Description of Artificial Sequence: Synthetic oligonucleotide
uuucucuccauuaugacuu

SEQ ID NO: 3259548 - RNA, 19 nt, Artificial Sequence
  Description of Artificial Sequence: Synthetic oligonucleotide
gguuuuaucauauugcuga

SEQ ID NO: 3259549 - RNA, 19 nt, Artificial Sequence
  Description of Artificial Sequence: Synthetic oligonucleotide
uucaugacugagaagauua

SEQ ID NO: 3259550 - RNA, 19 nt, Artificial Sequence
  Description of Artificial Sequence: Synthetic oligonucleotide
gaagauggcucuuacgagc

SEQ ID NO: 3259551 - RNA, 19 nt, Artificial Sequence
  Description of Artificial Sequence: Synthetic oligonucleotide
uccaguaugaguucuuuca

SEQ ID NO: 3259552 - RNA, 19 nt, Artificial Sequence
  Description of Artificial Sequence: Synthetic oligonucleotide
acucauagggucucucucc

SEQ ID NO: 3259553 - RNA, 19 nt, Artificial Sequence
  Description of Artificial Sequence: Synthetic oligonucleotide
uucaugccuuugaagaugg

SEQ ID NO: 3259554 - RNA, 19 nt, Artificial Sequence
  Description of Artificial Sequence: Synthetic oligonucleotide
caaagguuuuaucauauug

SEQ ID NO: 3259555 - RNA, 19 nt, Artificial Sequence
  Description of Artificial Sequence: Synthetic oligonucleotide
uugauuacacucauagggu

SEQ ID NO: 3259556 - RNA, 19 nt, Artificial Sequence
  Description of Artificial Sequence: Synthetic oligonucleotide
augauauugaagauggcuc

SEQ ID NO: 3259557 - RNA, 19 nt, Artificial Sequence
  Description of Artificial Sequence: Synthetic oligonucleotide
uacugcgagaugaaaaggc

SEQ ID NO: 3259558 - RNA, 19 nt, Artificial Sequence
  Description of Artificial Sequence: Synthetic oligonucleotide
auauucauuguuuucacua

SEQ ID NO: 3259559 - RNA, 19 nt, Artificial Sequence
  Description of Artificial Sequence: Synthetic oligonucleotide
gaagauuacugcgagauga

SEQ ID NO: 3259560 - RNA, 19 nt, Artificial Sequence
  Description of Artificial Sequence: Synthetic oligonucleotide
ugugcaaaggcuuuaccac

SEQ ID NO: 3259561 - RNA, 19 nt, Artificial Sequence
  Description of Artificial Sequence: Synthetic oligonucleotide
uaccacauugacuacauuc

SEQ ID NO: 3259562 - RNA, 19 nt, Artificial Sequence
  Description of Artificial Sequence: Synthetic oligonucleotide
uuucaugauauugaagaug

SEQ ID NO: 3259563 - RNA, 19 nt, Artificial Sequence
  Description of Artificial Sequence: Synthetic oligonucleotide
uugacuacauucauagcgu

SEQ ID NO: 3259564 - RNA, 19 nt, Artificial Sequence
  Description of Artificial Sequence: Synthetic oligonucleotide
ugauauugaagauggcucu

SEQ ID NO: 3259565 - RNA, 19 nt, Artificial Sequence
  Description of Artificial Sequence: Synthetic oligonucleotide
aaggcuauaccacauugau

SEQ ID NO: 3259566 - RNA, 19 nt, Artificial Sequence
  Description of Artificial Sequence: Synthetic oligonucleotide
uguguauucuuucaugaua

SEQ ID NO: 3259567 - RNA, 19 nt, Artificial Sequence
  Description of Artificial Sequence: Synthetic oligonucleotide
aguguguauucuuucauga

SEQ ID NO: 3259568 - RNA, 19 nt, Artificial Sequence
  Description of Artificial Sequence: Synthetic oligonucleotide
uaccacauugauuacacuc

SEQ ID NO: 3259569 - RNA, 19 nt, Artificial Sequence
  Description of Artificial Sequence: Synthetic oligonucleotide
gagaugaaaaggcuauacc

SEQ ID NO: 3259570 - RNA, 19 nt, Artificial Sequence
  Description of Artificial Sequence: Synthetic oligonucleotide
gaugaaaaggcuauaccac

SEQ ID NO: 3259571 - RNA, 19 nt, Artificial Sequence
  Description of Artificial Sequence: Synthetic oligonucleotide
ugacugagaagauuacugc

SEQ ID NO: 3259572 - RNA, 19 nt, Artificial Sequence
  Description of Artificial Sequence: Synthetic oligonucleotide
ucucucuccaguaugaguu

SEQ ID NO: 3259573 - RNA, 19 nt, Artificial Sequence
  Description of Artificial Sequence: Synthetic oligonucleotide
auugaagauggcucuuacg

SEQ ID NO: 3259574 - RNA, 19 nt, Artificial Sequence
  Description of Artificial Sequence: Synthetic oligonucleotide
ucuaguguguauucuuuca

SEQ ID NO: 3259575 - RNA, 19 nt, Artificial Sequence
  Description of Artificial Sequence: Synthetic oligonucleotide
agugacuucuuucaugccu

SEQ ID NO: 3259576 - RNA, 19 nt, Artificial Sequence
  Description of Artificial Sequence: Synthetic oligonucleotide
uauucauuguuuucacuac

SEQ ID NO: 3259577 - RNA, 19 nt, Artificial Sequence
  Description of Artificial Sequence: Synthetic oligonucleotide
uucuuucaugauauugaag

SEQ ID NO: 3259578 - RNA, 19 nt, Artificial Sequence
  Description of Artificial Sequence: Synthetic oligonucleotide
uccagagugacuucuuuca

SEQ ID NO: 3259579 - RNA, 19 nt, Artificial Sequence
  Description of Artificial Sequence: Synthetic oligonucleotide
ugaagauggcucuuacgag

SEQ ID NO: 3259580 - RNA, 19 nt, Artificial Sequence
  Description of Artificial Sequence: Synthetic oligonucleotide
uugaagauggcuguugugu

SEQ ID NO: 3259581 - RNA, 19 nt, Artificial Sequence
  Description of Artificial Sequence: Synthetic oligonucleotide
caaaagcuuuaucacauug

SEQ ID NO: 3259582 - RNA, 19 nt, Artificial Sequence
  Description of Artificial Sequence: Synthetic oligonucleotide
guuuucacuacagaaugag

SEQ ID NO: 3259583 - RNA, 19 nt, Artificial Sequence
  Description of Artificial Sequence: Synthetic oligonucleotide
uaucacauugguugcauuc

SEQ ID NO: 3259584 - RNA, 19 nt, Artificial Sequence
  Description of Artificial Sequence: Synthetic oligonucleotide
cauugauuacacucauagg

SEQ ID NO: 3259585 - RNA, 19 nt, Artificial Sequence
  Description of Artificial Sequence: Synthetic oligonucleotide
augaaaaggcuauaccaca

SEQ ID NO: 3259586 - RNA, 19 nt, Artificial Sequence
  Description of Artificial Sequence: Synthetic oligonucleotide
cauuaugacuucuuucaug

SEQ ID NO: 3259587 - RNA, 19 nt, Artificial Sequence
  Description of Artificial Sequence: Synthetic oligonucleotide
uucacuacagaaugaguuc

SEQ ID NO: 3259588 - RNA, 19 nt, Artificial Sequence
  Description of Artificial Sequence: Synthetic oligonucleotide
guauucuuucaugauauug

SEQ ID NO: 3259589 - RNA, 19 nt, Artificial Sequence
  Description of Artificial Sequence: Synthetic oligonucleotide
aguucuuucaugccuuuga

SEQ ID NO: 3259590 - RNA, 19 nt, Artificial Sequence
  Description of Artificial Sequence: Synthetic oligonucleotide
auugcugauauucauuguu

SEQ ID NO: 3259591 - RNA, 19 nt, Artificial Sequence
  Description of Artificial Sequence: Synthetic oligonucleotide
ggcuauaccacauugauua

SEQ ID NO: 3259592 - RNA, 19 nt, Artificial Sequence
  Description of Artificial Sequence: Synthetic oligonucleotide
ugauauucauuguuuucac

SEQ ID NO: 3259593 - RNA, 19 nt, Artificial Sequence
  Description of Artificial Sequence: Synthetic oligonucleotide
uucuuucaugccuuugaag

SEQ ID NO: 3259594 - RNA, 19 nt, Artificial Sequence
  Description of Artificial Sequence: Synthetic oligonucleotide
gaaaacugggacuugcaaa

SEQ ID NO: 3259595 - RNA, 19 nt, Artificial Sequence
  Description of Artificial Sequence: Synthetic oligonucleotide
ugcaaagguuuuaucauau

SEQ ID NO: 3259596 - RNA, 19 nt, Artificial Sequence
  Description of Artificial Sequence: Synthetic oligonucleotide
uuuaccacauugacuacau

SEQ ID NO: 3259597 - RNA, 19 nt, Artificial Sequence
  Description of Artificial Sequence: Synthetic oligonucleotide
gaagaaaacugggacuugc

SEQ ID NO: 3259598 - RNA, 19 nt, Artificial Sequence
  Description of Artificial Sequence: Synthetic oligonucleotide
uguuuucacuacagaauga

SEQ ID NO: 3259599 - RNA, 19 nt, Artificial Sequence
  Description of Artificial Sequence: Synthetic oligonucleotide
acuucuuucaugccuuuga

SEQ ID NO: 3259600 - RNA, 19 nt, Artificial Sequence
  Description of Artificial Sequence: Synthetic oligonucleotide
ugaagauggcuguugugug

SEQ ID NO: 3259601 - RNA, 19 nt, Artificial Sequence
  Description of Artificial Sequence: Synthetic oligonucleotide
uuuucacuacagaaugagu

SEQ ID NO: 3259602 - RNA, 19 nt, Artificial Sequence
  Description of Artificial Sequence: Synthetic oligonucleotide
ucauuguuuucacuacaga

SEQ ID NO: 3259603 - RNA, 19 nt, Artificial Sequence
  Description of Artificial Sequence: Synthetic oligonucleotide
augacugagaagauuacug

SEQ ID NO: 3259604 - RNA, 19 nt, Artificial Sequence
  Description of Artificial Sequence: Synthetic oligonucleotide
uaguguguauucuuucaug

SEQ ID NO: 3259605 - RNA, 19 nt, Artificial Sequence
  Description of Artificial Sequence: Synthetic oligonucleotide
aacucaagaauguaaaggc

SEQ ID NO: 3259606 - RNA, 19 nt, Artificial Sequence
  Description of Artificial Sequence: Synthetic oligonucleotide
aacacguagaauuaugcac

SEQ ID NO: 3259607 - RNA, 19 nt, Artificial Sequence
  Description of Artificial Sequence: Synthetic oligonucleotide
agagucuucauccaguucc

SEQ ID NO: 3259608 - RNA, 19 nt, Artificial Sequence
  Description of Artificial Sequence: Synthetic oligonucleotide
aaaugucuaauuaagcugc

SEQ ID NO: 3259609 - RNA, 19 nt, Artificial Sequence
  Description of Artificial Sequence: Synthetic oligonucleotide
aucaucauaaaacaaagug

SEQ ID NO: 3259610 - RNA, 19 nt, Artificial Sequence
  Description of Artificial Sequence: Synthetic oligonucleotide
aacacugacaauuucccuc

SEQ ID NO: 3259611 - RNA, 19 nt, Artificial Sequence
  Description of Artificial Sequence: Synthetic oligonucleotide
aaaugguacaagugaaucg

SEQ ID NO: 3259612 - RNA, 19 nt, Artificial Sequence
  Description of Artificial Sequence: Synthetic oligonucleotide
ucuuaaaugguacaaguga

SEQ ID NO: 3259613 - RNA, 19 nt, Artificial Sequence
  Description of Artificial Sequence: Synthetic oligonucleotide
ucuuucaucacauuacucc

SEQ ID NO: 3259614 - RNA, 19 nt, Artificial Sequence
  Description of Artificial Sequence: Synthetic oligonucleotide
acugaggcaaaccagaguc

SEQ ID NO: 3259615 - RNA, 19 nt, Artificial Sequence
  Description of Artificial Sequence: Synthetic oligonucleotide
aaugauccagcaaagaguc

SEQ ID NO: 3259616 - RNA, 19 nt, Artificial Sequence
  Description of Artificial Sequence: Synthetic oligonucleotide
auuauguaguguuugagug

SEQ ID NO: 3259617 - RNA, 19 nt, Artificial Sequence
  Description of Artificial Sequence: Synthetic oligonucleotide
uuaaaugugguuaaauguc

SEQ ID NO: 3259618 - RNA, 19 nt, Artificial Sequence
  Description of Artificial Sequence: Synthetic oligonucleotide
ucaaacacugacaauuucc

SEQ ID NO: 3259619 - RNA, 19 nt, Artificial Sequence
  Description of Artificial Sequence: Synthetic oligonucleotide
aauuauguaguguuugagu

SEQ ID NO: 3259620 - RNA, 19 nt, Artificial Sequence
  Description of Artificial Sequence: Synthetic oligonucleotide
uuguuauucuuuauacugg

SEQ ID NO: 3259621 - RNA, 19 nt, Artificial Sequence
  Description of Artificial Sequence: Synthetic oligonucleotide
caagcagcaucuuaaaugg

SEQ ID NO: 3259622 - RNA, 19 nt, Artificial Sequence
  Description of Artificial Sequence: Synthetic oligonucleotide
cauaacaaagacaagcaug

SEQ ID NO: 3259623 - RNA, 19 nt, Artificial Sequence
  Description of Artificial Sequence: Synthetic oligonucleotide
aaaccagagucccacacuc

SEQ ID NO: 3259624 - RNA, 19 nt, Artificial Sequence
  Description of Artificial Sequence: Synthetic oligonucleotide
uauacuggucgcaauacag

SEQ ID NO: 3259625 - RNA, 19 nt, Artificial Sequence
  Description of Artificial Sequence: Synthetic oligonucleotide
aagacaagcauguaacacu

SEQ ID NO: 3259626 - RNA, 19 nt, Artificial Sequence
  Description of Artificial Sequence: Synthetic oligonucleotide
uauuuaucgauguauuucu

SEQ ID NO: 3259627 - RNA, 19 nt, Artificial Sequence
  Description of Artificial Sequence: Synthetic oligonucleotide
ucauaaaacaaaguguggc

SEQ ID NO: 3259628 - RNA, 19 nt, Artificial Sequence
  Description of Artificial Sequence: Synthetic oligonucleotide
uuuucgucaucaaacacug

SEQ ID NO: 3259629 - RNA, 19 nt, Artificial Sequence
  Description of Artificial Sequence: Synthetic oligonucleotide
auauuuaucgauguauuuc

SEQ ID NO: 3259630 - RNA, 19 nt, Artificial Sequence
  Description of Artificial Sequence: Synthetic oligonucleotide
aaaacgaaagcagauuuug

SEQ ID NO: 3259631 - RNA, 19 nt, Artificial Sequence
  Description of Artificial Sequence: Synthetic oligonucleotide
uaaaugucuaagaaacuca

SEQ ID NO: 3259632 - RNA, 19 nt, Artificial Sequence
  Description of Artificial Sequence: Synthetic oligonucleotide
aaaauuauguaguguuuga

SEQ ID NO: 3259633 - RNA, 19 nt, Artificial Sequence
  Description of Artificial Sequence: Synthetic oligonucleotide
ucugaaggagguaugcccg

SEQ ID NO: 3259634 - RNA, 19 nt, Artificial Sequence
  Description of Artificial Sequence: Synthetic oligonucleotide
agaauggacauacacaccu

SEQ ID NO: 3259635 - RNA, 19 nt, Artificial Sequence
  Description of Artificial Sequence: Synthetic oligonucleotide
uugcaaaugucuaauuaag

SEQ ID NO: 3259636 - RNA, 19 nt, Artificial Sequence
  Description of Artificial Sequence: Synthetic oligonucleotide
gaugguagucacuaacacg

SEQ ID NO: 3259637 - RNA, 19 nt, Artificial Sequence
  Description of Artificial Sequence: Synthetic oligonucleotide
aagcauguaacacuguagu

SEQ ID NO: 3259638 - RNA, 19 nt, Artificial Sequence
  Description of Artificial Sequence: Synthetic oligonucleotide
augucuaagaaacucaaga

SEQ ID NO: 3259639 - RNA, 19 nt, Artificial Sequence
  Description of Artificial Sequence: Synthetic oligonucleotide
uaaaauuauguaguguuug

SEQ ID NO: 3259640 - RNA, 19 nt, Artificial Sequence
  Description of Artificial Sequence: Synthetic oligonucleotide
ucggauaagggcuuccucg

SEQ ID NO: 3259641 - RNA, 19 nt, Artificial Sequence
  Description of Artificial Sequence: Synthetic oligonucleotide
caaaugucuaauuaagcug

SEQ ID NO: 3259642 - RNA, 19 nt, Artificial Sequence
  Description of Artificial Sequence: Synthetic oligonucleotide
ucuaaaccaaaacgaaagc

SEQ ID NO: 3259643 - RNA, 19 nt, Artificial Sequence
  Description of Artificial Sequence: Synthetic oligonucleotide
gguaguaaauggcaaagcg

SEQ ID NO: 3259644 - RNA, 19 nt, Artificial Sequence
  Description of Artificial Sequence: Synthetic oligonucleotide
acagagauugguuaucuug

SEQ ID NO: 3259645 - RNA, 19 nt, Artificial Sequence
  Description of Artificial Sequence: Synthetic oligonucleotide
uagaauuaugcacaguauc

SEQ ID NO: 3259646 - RNA, 19 nt, Artificial Sequence
  Description of Artificial Sequence: Synthetic oligonucleotide
cuaacacguagaauuaugc

SEQ ID NO: 3259647 - RNA, 19 nt, Artificial Sequence
  Description of Artificial Sequence: Synthetic oligonucleotide
aacgaaagcagauuuugaa

SEQ ID NO: 3259648 - RNA, 19 nt, Artificial Sequence
  Description of Artificial Sequence: Synthetic oligonucleotide
aaauuauguaguguuugag

SEQ ID NO: 3259649 - RNA, 19 nt, Artificial Sequence
  Description of Artificial Sequence: Synthetic oligonucleotide
uaaaugugguuaaaugucu

SEQ ID NO: 3259650 - RNA, 19 nt, Artificial Sequence
  Description of Artificial Sequence: Synthetic oligonucleotide
gaaagcagauuuugaaugc

SEQ ID NO: 3259651 - RNA, 19 nt, Artificial Sequence
  Description of Artificial Sequence: Synthetic oligonucleotide
aucuaaaccaaaacgaaag

SEQ ID NO: 3259652 - RNA, 19 nt, Artificial Sequence
  Description of Artificial Sequence: Synthetic oligonucleotide
auugaagguacuugggcuc

SEQ ID NO: 3259653 - RNA, 19 nt, Artificial Sequence
  Description of Artificial Sequence: Synthetic oligonucleotide
gcagaucuaaaccaaaacg

SEQ ID NO: 3259654 - RNA, 19 nt, Artificial Sequence
  Description of Artificial Sequence: Synthetic oligonucleotide
ugugguuaaaugucuaaga

SEQ ID NO: 3259655 - RNA, 19 nt, Artificial Sequence
  Description of Artificial Sequence: Synthetic oligonucleotide
ugcaaaugucuaauuaagc

SEQ ID NO: 3259656 - RNA, 19 nt, Artificial Sequence
  Description of Artificial Sequence: Synthetic oligonucleotide
uuuaucgauguauuucuca

SEQ ID NO: 3259657 - RNA, 19 nt, Artificial Sequence
  Description of Artificial Sequence: Synthetic oligonucleotide
caaacacugacaauuuccc

SEQ ID NO: 3259658 - RNA, 19 nt, Artificial Sequence
  Description of Artificial Sequence: Synthetic oligonucleotide
aacauaacaaagacaagca

SEQ ID NO: 3259659 - RNA, 19 nt, Artificial Sequence
  Description of Artificial Sequence: Synthetic oligonucleotide
uauucaagaagugaucugu

SEQ ID NO: 3259660 - RNA, 19 nt, Artificial Sequence
  Description of Artificial Sequence: Synthetic oligonucleotide
gacaauuucccuccagucc

SEQ ID NO: 3259661 - RNA, 19 nt, Artificial Sequence
  Description of Artificial Sequence: Synthetic oligonucleotide
ugccauugaagguacuugg

SEQ ID NO: 3259662 - RNA, 19 nt, Artificial Sequence
  Description of Artificial Sequence: Synthetic oligonucleotide
agagauugguuaucuugcc

SEQ ID NO: 3259663 - RNA, 19 nt, Artificial Sequence
  Description of Artificial Sequence: Synthetic oligonucleotide
aagaauguaaaggcagauc

SEQ ID NO: 3259664 - RNA, 19 nt, Artificial Sequence
  Description of Artificial Sequence: Synthetic oligonucleotide
uuaucgauguauuucucac

SEQ ID NO: 3259665 - RNA, 19 nt, Artificial Sequence
  Description of Artificial Sequence: Synthetic oligonucleotide
aguucugguauucugauuu

SEQ ID NO: 3259666 - RNA, 19 nt, Artificial Sequence
  Description of Artificial Sequence: Synthetic oligonucleotide
ugguauucugauuucauuc

SEQ ID NO: 3259667 - RNA, 19 nt, Artificial Sequence
  Description of Artificial Sequence: Synthetic oligonucleotide
ucuaugguggguaaugcaa

SEQ ID NO: 3259668 - RNA, 19 nt, Artificial Sequence
  Description of Artificial Sequence: Synthetic oligonucleotide
auucacauauucaagaagu

SEQ ID NO: 3259669 - RNA, 19 nt, Artificial Sequence
  Description of Artificial Sequence: Synthetic oligonucleotide
ugagugauucacauauuca

SEQ ID NO: 3259670 - RNA, 19 nt, Artificial Sequence
  Description of Artificial Sequence: Synthetic oligonucleotide
aaaacaaaguguggcugac

SEQ ID NO: 3259671 - RNA, 19 nt, Artificial Sequence
  Description of Artificial Sequence: Synthetic oligonucleotide
cagagauugguuaucuugc

SEQ ID NO: 3259672 - RNA, 19 nt, Artificial Sequence
  Description of Artificial Sequence: Synthetic oligonucleotide
ucaaaaucuaggaaaucau

SEQ ID NO: 3259673 - RNA, 19 nt, Artificial Sequence
  Description of Artificial Sequence: Synthetic oligonucleotide
ucgauuauaucaaaaucua

SEQ ID NO: 3259674 - RNA, 19 nt, Artificial Sequence
  Description of Artificial Sequence: Synthetic oligonucleotide
ucaagaauguaaaggcaga

SEQ ID NO: 3259675 - RNA, 19 nt, Artificial Sequence
  Description of Artificial Sequence: Synthetic oligonucleotide
uguuauucuuuauacuggu

SEQ ID NO: 3259676 - RNA, 19 nt, Artificial Sequence
  Description of Artificial Sequence: Synthetic oligonucleotide
uuuuggcuaugucaguugc

SEQ ID NO: 3259677 - RNA, 19 nt, Artificial Sequence
  Description of Artificial Sequence: Synthetic oligonucleotide
aacaaaguguggcugacuu

SEQ ID NO: 3259678 - RNA, 19 nt, Artificial Sequence
  Description of Artificial Sequence: Synthetic oligonucleotide
guggguaaugcaaugaucc

SEQ ID NO: 3259679 - RNA, 19 nt, Artificial Sequence
  Description of Artificial Sequence: Synthetic oligonucleotide
cagaucuaaaccaaaacga

SEQ ID NO: 3259680 - RNA, 19 nt, Artificial Sequence
  Description of Artificial Sequence: Synthetic oligonucleotide
ugucuaauuaagcugccau

SEQ ID NO: 3259681 - RNA, 19 nt, Artificial Sequence
  Description of Artificial Sequence: Synthetic oligonucleotide
guuaaaugugguuaaaugu

SEQ ID NO: 3259682 - RNA, 19 nt, Artificial Sequence
  Description of Artificial Sequence: Synthetic oligonucleotide
aauacaggaucugcagaac

SEQ ID NO: 3259683 - RNA, 19 nt, Artificial Sequence
  Description of Artificial Sequence: Synthetic oligonucleotide
uaauuaagcugccauugaa

SEQ ID NO: 3259684 - RNA, 19 nt, Artificial Sequence
  Description of Artificial Sequence: Synthetic oligonucleotide
gguuaaaugugguuaaaug

SEQ ID NO: 3259685 - RNA, 19 nt, Artificial Sequence
  Description of Artificial Sequence: Synthetic oligonucleotide
uugggcucucauuagguag

SEQ ID NO: 3259686 - RNA, 19 nt, Artificial Sequence
  Description of Artificial Sequence: Synthetic oligonucleotide
ugguacaagugaaucgucc

SEQ ID NO: 3259687 - RNA, 19 nt, Artificial Sequence
  Description of Artificial Sequence: Synthetic oligonucleotide
caaaguguggcugacuugc

SEQ ID NO: 3259688 - RNA, 19 nt, Artificial Sequence
  Description of Artificial Sequence: Synthetic oligonucleotide
uuauguaguguuugaguga

SEQ ID NO: 3259689 - RNA, 19 nt, Artificial Sequence
  Description of Artificial Sequence: Synthetic oligonucleotide
uaaaugguacaagugaauc

SEQ ID NO: 3259690 - RNA, 19 nt, Artificial Sequence
  Description of Artificial Sequence: Synthetic oligonucleotide
uggcaaagcgggcagaaca

SEQ ID NO: 3259691 - RNA, 19 nt, Artificial Sequence
  Description of Artificial Sequence: Synthetic oligonucleotide
uuaaaugguacaagugaau

SEQ ID NO: 3259692 - RNA, 19 nt, Artificial Sequence
  Description of Artificial Sequence: Synthetic oligonucleotide
aagaagugaucugucuaac

SEQ ID NO: 3259693 - RNA, 19 nt, Artificial Sequence
  Description of Artificial Sequence: Synthetic oligonucleotide
agaauuaugcacaguauca

SEQ ID NO: 3259694 - RNA, 19 nt, Artificial Sequence
  Description of Artificial Sequence: Synthetic oligonucleotide
ucaagaagugaucugucua

SEQ ID NO: 3259695 - RNA, 19 nt, Artificial Sequence
  Description of Artificial Sequence: Synthetic oligonucleotide
gauugguuaucuugccuag

SEQ ID NO: 3259696 - RNA, 19 nt, Artificial Sequence
  Description of Artificial Sequence: Synthetic oligonucleotide
uagguaguaaauggcaaag

SEQ ID NO: 3259697 - RNA, 19 nt, Artificial Sequence
  Description of Artificial Sequence: Synthetic oligonucleotide
ugcacaguaucaccaaugu

SEQ ID NO: 3259698 - RNA, 19 nt, Artificial Sequence
  Description of Artificial Sequence: Synthetic oligonucleotide
ugucacugaggcaaaccag

SEQ ID NO: 3259699 - RNA, 19 nt, Artificial Sequence
  Description of Artificial Sequence: Synthetic oligonucleotide
uuagguaguaaauggcaaa

SEQ ID NO: 3259700 - RNA, 19 nt, Artificial Sequence
  Description of Artificial Sequence: Synthetic oligonucleotide
caguggcccauauuuaucg

SEQ ID NO: 3259701 - RNA, 19 nt, Artificial Sequence
  Description of Artificial Sequence: Synthetic oligonucleotide
aucaaacacugacaauuuc

SEQ ID NO: 3259702 - RNA, 19 nt, Artificial Sequence
  Description of Artificial Sequence: Synthetic oligonucleotide
gucacuaacacguagaauu

SEQ ID NO: 3259703 - RNA, 19 nt, Artificial Sequence
  Description of Artificial Sequence: Synthetic oligonucleotide
caugaugguagucacuaac

SEQ ID NO: 3259704 - RNA, 19 nt, Artificial Sequence
  Description of Artificial Sequence: Synthetic oligonucleotide
gugauucacauauucaaga

SEQ ID NO: 3259705 - RNA, 19 nt, Artificial Sequence
  Description of Artificial Sequence: Synthetic oligonucleotide
agguaaaccuccuugggcc

SEQ ID NO: 3259706 - RNA, 19 nt, Artificial Sequence
  Description of Artificial Sequence: Synthetic oligonucleotide
aguucuuugucuuccagcg

SEQ ID NO: 3259707 - RNA, 19 nt, Artificial Sequence
  Description of Artificial Sequence: Synthetic oligonucleotide
uuccaaaauuaccagagcc

SEQ ID NO: 3259708 - RNA, 19 nt, Artificial Sequence
  Description of Artificial Sequence: Synthetic oligonucleotide
uuuucauuugguaguagcc

SEQ ID NO: 3259709 - RNA, 19 nt, Artificial Sequence
  Description of Artificial Sequence: Synthetic oligonucleotide
uccaaaauuaccagagccc

SEQ ID NO: 3259710 - RNA, 19 nt, Artificial Sequence
  Description of Artificial Sequence: Synthetic oligonucleotide
auuaccagagcccaguucu

SEQ ID NO: 3259711 - RNA, 19 nt, Artificial Sequence
  Description of Artificial Sequence: Synthetic oligonucleotide
uuucgguucagguaaaccu

SEQ ID NO: 3259712 - RNA, 19 nt, Artificial Sequence
  Description of Artificial Sequence: Synthetic oligonucleotide
uucagguaaaccuccuugg

SEQ ID NO: 3259713 - RNA, 19 nt, Artificial Sequence
  Description of Artificial Sequence: Synthetic oligonucleotide
aauuaccagagcccaguuc

SEQ ID NO: 3259714 - RNA, 19 nt, Artificial Sequence
  Description of Artificial Sequence: Synthetic oligonucleotide
ucagguaaaccuccuuggg

SEQ ID NO: 3259715 - RNA, 19 nt, Artificial Sequence
  Description of Artificial Sequence: Synthetic oligonucleotide
uuucauuugguaguagccc

SEQ ID NO: 3259716 - RNA, 19 nt, Artificial Sequence
  Description of Artificial Sequence: Synthetic oligonucleotide
aaaauuaccagagcccagu

SEQ ID NO: 3259717 - RNA, 19 nt, Artificial Sequence
  Description of Artificial Sequence: Synthetic oligonucleotide
aguuccaaaauuaccagag

SEQ ID NO: 3259718 - RNA, 19 nt, Artificial Sequence
  Description of Artificial Sequence: Synthetic oligonucleotide
uucacaguuccaaaauuac

SEQ ID NO: 3259719 - RNA, 19 nt, Artificial Sequence
  Description of Artificial Sequence: Synthetic oligonucleotide
uuucacaguuccaaaauua

SEQ ID NO: 3259720 - RNA, 19 nt, Artificial Sequence
  Description of Artificial Sequence: Synthetic oligonucleotide
ucacaguuccaaaauuacc

SEQ ID NO: 3259721 - RNA, 19 nt, Artificial Sequence
  Description of Artificial Sequence: Synthetic oligonucleotide
cacaguuccaaaauuacca

SEQ ID NO: 3259722 - RNA, 19 nt, Artificial Sequence
  Description of Artificial Sequence: Synthetic oligonucleotide
uucuuugucuuccagcguc

SEQ ID NO: 3259723 - RNA, 19 nt, Artificial Sequence
  Description of Artificial Sequence: Synthetic oligonucleotide
uacaccucuguguccaugg

SEQ ID NO: 3259724 - RNA, 19 nt, Artificial Sequence
  Description of Artificial Sequence: Synthetic oligonucleotide
acaguuccaaaauuaccag

SEQ ID NO: 3259725 - RNA, 19 nt, Artificial Sequence
  Description of Artificial Sequence: Synthetic oligonucleotide
uugucuuccagcgucagca

SEQ ID NO: 3259726 - RNA, 19 nt, Artificial Sequence
  Description of Artificial Sequence: Synthetic oligonucleotide
uucauuugguaguagcccu

SEQ ID NO: 3259727 - RNA, 19 nt, Artificial Sequence
  Description of Artificial Sequence: Synthetic oligonucleotide
accuccuugggccugaucu

SEQ ID NO: 3259728 - RNA, 19 nt, Artificial Sequence
  Description of Artificial Sequence: Synthetic oligonucleotide
guucagguaaaccuccuug

SEQ ID NO: 3259729 - RNA, 19 nt, Artificial Sequence
  Description of Artificial Sequence: Synthetic oligonucleotide
ucucguacaccucuguguc

SEQ ID NO: 3259730 - RNA, 19 nt, Artificial Sequence
  Description of Artificial Sequence: Synthetic oligonucleotide
ucuuccagcgucagcagcu

SEQ ID NO: 3259731 - RNA, 19 nt, Artificial Sequence
  Description of Artificial Sequence: Synthetic oligonucleotide
uuuucacaguuccaaaauu

SEQ ID NO: 3259732 - RNA, 19 nt, Artificial Sequence
  Description of Artificial Sequence: Synthetic oligonucleotide
ucuguguccauggguaggg

SEQ ID NO: 3259733 - RNA, 19 nt, Artificial Sequence
  Description of Artificial Sequence: Synthetic oligonucleotide
uucgguucagguaaaccuc

SEQ ID NO: 3259734 - RNA, 19 nt, Artificial Sequence
  Description of Artificial Sequence: Synthetic oligonucleotide
ucgguucagguaaaccucc

SEQ ID NO: 3259735 - RNA, 19 nt, Artificial Sequence
  Description of Artificial Sequence: Synthetic oligonucleotide
caguucuuugucuuccagc

SEQ ID NO: 3259736 - RNA, 19 nt, Artificial Sequence
  Description of Artificial Sequence: Synthetic oligonucleotide
cagguaaaccuccuugggc

SEQ ID NO: 3259737 - RNA, 19 nt, Artificial Sequence
  Description of Artificial Sequence: Synthetic oligonucleotide
caaaauuaccagagcccag

SEQ ID NO: 3259738 - RNA, 19 nt, Artificial Sequence
  Description of Artificial Sequence: Synthetic oligonucleotide
agcgucagcagcuuucggu

SEQ ID NO: 3259739 - RNA, 19 nt, Artificial Sequence
  Description of Artificial Sequence: Synthetic oligonucleotide
guuccaaaauuaccagagc

SEQ ID NO: 3259740 - RNA, 19 nt, Artificial Sequence
  Description of Artificial Sequence: Synthetic oligonucleotide
ucuuugucuuccagcguca

SEQ ID NO: 3259741 - RNA, 19 nt, Artificial Sequence
  Description of Artificial Sequence: Synthetic oligonucleotide
uuugucuuccagcgucagc

SEQ ID NO: 3259742 - RNA, 19 nt, Artificial Sequence
  Description of Artificial Sequence: Synthetic oligonucleotide
ucgggguccgcguaggggc

SEQ ID NO: 3259743 - RNA, 19 nt, Artificial Sequence
  Description of Artificial Sequence: Synthetic oligonucleotide
auggguagggcuucucucu

SEQ ID NO: 3259744 - RNA, 19 nt, Artificial Sequence
  Description of Artificial Sequence: Synthetic oligonucleotide
aaauuaccagagcccaguu

SEQ ID NO: 3259745 - RNA, 19 nt, Artificial Sequence
  Description of Artificial Sequence: Synthetic oligonucleotide
uguguccauggguagggcu

SEQ ID NO: 3259746 - RNA, 19 nt, Artificial Sequence
  Description of Artificial Sequence: Synthetic oligonucleotide
cuuucgguucagguaaacc

SEQ ID NO: 3259747 - RNA, 19 nt, Artificial Sequence
  Description of Artificial Sequence: Synthetic oligonucleotide
uugggccugaucuccucgg

SEQ ID NO: 3259748 - RNA, 19 nt, Artificial Sequence
  Description of Artificial Sequence: Synthetic oligonucleotide
agcagcuuucgguucaggu

SEQ ID NO: 3259749 - RNA, 19 nt, Artificial Sequence
  Description of Artificial Sequence: Synthetic oligonucleotide
ucguacaccucugugucca

SEQ ID NO: 3259750 - RNA, 19 nt, Artificial Sequence
  Description of Artificial Sequence: Synthetic oligonucleotide
cuugggccugaucuccucg

SEQ ID NO: 3259751 - RNA, 19 nt, Artificial Sequence
  Description of Artificial Sequence: Synthetic oligonucleotide
cauggguagggcuucucuc

SEQ ID NO: 3259752 - RNA, 19 nt, Artificial Sequence
  Description of Artificial Sequence: Synthetic oligonucleotide
uccagcgucagcagcuuuc

SEQ ID NO: 3259753 - RNA, 19 nt, Artificial Sequence
  Description of Artificial Sequence: Synthetic oligonucleotide
agagcccaguucuuugucu

SEQ ID NO: 3259754 - RNA, 19 nt, Artificial Sequence
  Description of Artificial Sequence: Synthetic oligonucleotide
accagagcccaguucuuug

SEQ ID NO: 3259755 - RNA, 19 nt, Artificial Sequence
  Description of Artificial Sequence: Synthetic oligonucleotide
uaggggcucucguacaccu

SEQ ID NO: 3259756 - RNA, 19 nt, Artificial Sequence
  Description of Artificial Sequence: Synthetic oligonucleotide
ugucuuccagcgucagcag

SEQ ID NO: 3259757 - RNA, 19 nt, Artificial Sequence
  Description of Artificial Sequence: Synthetic oligonucleotide
uggguagggcuucucucug

SEQ ID NO: 3259758 - RNA, 19 nt, Artificial Sequence
  Description of Artificial Sequence: Synthetic oligonucleotide
ugggccugaucuccucggg

SEQ ID NO: 3259759 - RNA, 19 nt, Artificial Sequence
  Description of Artificial Sequence: Synthetic oligonucleotide
gguagggcuucucucuggg

SEQ ID NO: 3259760 - RNA, 19 nt, Artificial Sequence
  Description of Artificial Sequence: Synthetic oligonucleotide
ucauuugguaguagcccuu

SEQ ID NO: 3259761 - RNA, 19 nt, Artificial Sequence
  Description of Artificial Sequence: Synthetic oligonucleotide
cagcuuucgguucagguaa

SEQ ID NO: 3259762 - RNA, 19 nt, Artificial Sequence
  Description of Artificial Sequence: Synthetic oligonucleotide
acaccucuguguccauggg

SEQ ID NO: 3259763 - RNA, 19 nt, Artificial Sequence
  Description of Artificial Sequence: Synthetic oligonucleotide
caguuccaaaauuaccaga

SEQ ID NO: 3259764 - RNA, 19 nt, Artificial Sequence
  Description of Artificial Sequence: Synthetic oligonucleotide
agcccaguucuuugucuuc

SEQ ID NO: 3259765 - RNA, 19 nt, Artificial Sequence
  Description of Artificial Sequence: Synthetic oligonucleotide
cucuguguccauggguagg

SEQ ID NO: 3259766 - RNA, 19 nt, Artificial Sequence
  Description of Artificial Sequence: Synthetic oligonucleotide
guagggcuucucucugggg

SEQ ID NO: 3259767 - RNA, 19 nt, Artificial Sequence
  Description of Artificial Sequence: Synthetic oligonucleotide
cucguacaccucugugucc

SEQ ID NO: 3259768 - RNA, 19 nt, Artificial Sequence
  Description of Artificial Sequence: Synthetic oligonucleotide
gucuuccagcgucagcagc

SEQ ID NO: 3259769 - RNA, 19 nt, Artificial Sequence
  Description of Artificial Sequence: Synthetic oligonucleotide
aaccuccuugggccugauc

SEQ ID NO: 3259770 - RNA, 19 nt, Artificial Sequence
  Description of Artificial Sequence: Synthetic oligonucleotide
cuccuugggccugaucucc

SEQ ID NO: 3259771 - RNA, 19 nt, Artificial Sequence
  Description of Artificial Sequence: Synthetic oligonucleotide
gucagcagcuuucgguuca

SEQ ID NO: 3259772 - RNA, 19 nt, Artificial Sequence
  Description of Artificial Sequence: Synthetic oligonucleotide
gaucuccucgggguccgcg

SEQ ID NO: 3259773 - RNA, 19 nt, Artificial Sequence
  Description of Artificial Sequence: Synthetic oligonucleotide
uccgcguaggggcucucgu

SEQ ID NO: 3259774 - RNA, 19 nt, Artificial Sequence
  Description of Artificial Sequence: Synthetic oligonucleotide
uaaaccuccuugggccuga

SEQ ID NO: 3259775 - RNA, 19 nt, Artificial Sequence
  Description of Artificial Sequence: Synthetic oligonucleotide
accucuguguccaugggua

SEQ ID NO: 3259776 - RNA, 19 nt, Artificial Sequence
  Description of Artificial Sequence: Synthetic oligonucleotide
ccaaaauuaccagagccca

SEQ ID NO: 3259777 - RNA, 19 nt, Artificial Sequence
  Description of Artificial Sequence: Synthetic oligonucleotide
cuuugucuuccagcgucag

SEQ ID NO: 3259778 - RNA, 19 nt, Artificial Sequence
  Description of Artificial Sequence: Synthetic oligonucleotide
ucagcagcuuucgguucag

SEQ ID NO: 3259779 - RNA, 19 nt, Artificial Sequence
  Description of Artificial Sequence: Synthetic oligonucleotide
cucucguacaccucugugu

SEQ ID NO: 3259780 - RNA, 19 nt, Artificial Sequence
  Description of Artificial Sequence: Synthetic oligonucleotide
uccuugggccugaucuccu

SEQ ID NO: 3259781 - RNA, 19 nt, Artificial Sequence
  Description of Artificial Sequence: Synthetic oligonucleotide
uuaccagagcccaguucuu

SEQ ID NO: 3259782 - RNA, 19 nt, Artificial Sequence
  Description of Artificial Sequence: Synthetic oligonucleotide
auuugguaguagcccuuuu

SEQ ID NO: 3259783 - RNA, 19 nt, Artificial Sequence
  Description of Artificial Sequence: Synthetic oligonucleotide
cucgggguccgcguagggg

SEQ ID NO: 3259784 - RNA, 19 nt, Artificial Sequence
  Description of Artificial Sequence: Synthetic oligonucleotide
cugaucuccucgggguccg

SEQ ID NO: 3259785 - RNA, 19 nt, Artificial Sequence
  Description of Artificial Sequence: Synthetic oligonucleotide
uguccauggguagggcuuc

SEQ ID NO: 3259786 - RNA, 19 nt, Artificial Sequence
  Description of Artificial Sequence: Synthetic oligonucleotide
guaaaccuccuugggccug

SEQ ID NO: 3259787 - RNA, 19 nt, Artificial Sequence
  Description of Artificial Sequence: Synthetic oligonucleotide
aucuccucgggguccgcgu

SEQ ID NO: 3259788 - RNA, 19 nt, Artificial Sequence
  Description of Artificial Sequence: Synthetic oligonucleotide
uccucgggguccgcguagg

SEQ ID NO: 3259789 - RNA, 19 nt, Artificial Sequence
  Description of Artificial Sequence: Synthetic oligonucleotide
ggguagggcuucucucugg

SEQ ID NO: 3259790 - RNA, 19 nt, Artificial Sequence
  Description of Artificial Sequence: Synthetic oligonucleotide
cagagcccaguucuuuguc

SEQ ID NO: 3259791 - RNA, 19 nt, Artificial Sequence
  Description of Artificial Sequence: Synthetic oligonucleotide
gggccugaucuccucgggg

SEQ ID NO: 3259792 - RNA, 19 nt, Artificial Sequence
  Description of Artificial Sequence: Synthetic oligonucleotide
gcagcuuucgguucaggua

SEQ ID NO: 3259793 - RNA, 19 nt, Artificial Sequence
  Description of Artificial Sequence: Synthetic oligonucleotide
gcucucguacaccucugug

SEQ ID NO: 3259794 - RNA, 19 nt, Artificial Sequence
  Description of Artificial Sequence: Synthetic oligonucleotide
guaggggcucucguacacc

SEQ ID NO: 3259795 - RNA, 19 nt, Artificial Sequence
  Description of Artificial Sequence: Synthetic oligonucleotide
ucuccucgggguccgcgua

SEQ ID NO: 3259796 - RNA, 19 nt, Artificial Sequence
  Description of Artificial Sequence: Synthetic oligonucleotide
guacaccucuguguccaug

SEQ ID NO: 3259797 - RNA, 19 nt, Artificial Sequence
  Description of Artificial Sequence: Synthetic oligonucleotide
ccaguucuuugucuuccag

SEQ ID NO: 3259798 - RNA, 19 nt, Artificial Sequence
  Description of Artificial Sequence: Synthetic oligonucleotide
uaccagagcccaguucuuu

SEQ ID NO: 3259799 - RNA, 19 nt, Artificial Sequence
  Description of Artificial Sequence: Synthetic oligonucleotide
cuccucgggguccgcguag

SEQ ID NO: 3259800 - RNA, 19 nt, Artificial Sequence
  Description of Artificial Sequence: Synthetic oligonucleotide
cagcgucagcagcuuucgg

SEQ ID NO: 3259801 - RNA, 19 nt, Artificial Sequence
  Description of Artificial Sequence: Synthetic oligonucleotide
gcccaguucuuugucuucc

SEQ ID NO: 3259802 - RNA, 19 nt, Artificial Sequence
  Description of Artificial Sequence: Synthetic oligonucleotide
cuguguccauggguagggc

SEQ ID NO: 3259803 - RNA, 19 nt, Artificial Sequence
  Description of Artificial Sequence: Synthetic oligonucleotide
guucuuugucuuccagcgu

SEQ ID NO: 3259804 - RNA, 19 nt, Artificial Sequence
  Description of Artificial Sequence: Synthetic oligonucleotide
uuccagcgucagcagcuuu

SEQ ID NO: 3259805 - RNA, 19 nt, Artificial Sequence
  Description of Artificial Sequence: Synthetic oligonucleotide
aagaggaugacacggaagg

SEQ ID NO: 3259806 - RNA, 19 nt, Artificial Sequence
  Description of Artificial Sequence: Synthetic oligonucleotide
augugaaugaccuuguaac

SEQ ID NO: 3259807 - RNA, 19 nt, Artificial Sequence
  Description of Artificial Sequence: Synthetic oligonucleotide
cuugacaucaccucggccg

SEQ ID NO: 3259808 - RNA, 19 nt, Artificial Sequence
  Description of Artificial Sequence: Synthetic oligonucleotide
aauaccuccgagugguccc

SEQ ID NO: 3259809 - RNA, 19 nt, Artificial Sequence
  Description of Artificial Sequence: Synthetic oligonucleotide
gauggcaccgggcagaggg

SEQ ID NO: 3259810 - RNA, 19 nt, Artificial Sequence
  Description of Artificial Sequence: Synthetic oligonucleotide
uggauguagucaaagacgc

SEQ ID NO: 3259811 - RNA, 19 nt, Artificial Sequence
  Description of Artificial Sequence: Synthetic oligonucleotide
uguuaugugaaugaccuug

SEQ ID NO: 3259812 - RNA, 19 nt, Artificial Sequence
  Description of Artificial Sequence: Synthetic oligonucleotide
gauggauguagucaaagac

SEQ ID NO: 3259813 - RNA, 19 nt, Artificial Sequence
  Description of Artificial Sequence: Synthetic oligonucleotide
cugucgaagacucagagac

SEQ ID NO: 3259814 - RNA, 19 nt, Artificial Sequence
  Description of Artificial Sequence: Synthetic oligonucleotide
uaaccugaggcuuugacgu

SEQ ID NO: 3259815 - RNA, 19 nt, Artificial Sequence
  Description of Artificial Sequence: Synthetic oligonucleotide
uugaccauuaacccgggca

SEQ ID NO: 3259816 - RNA, 19 nt, Artificial Sequence
  Description of Artificial Sequence: Synthetic oligonucleotide
agagaccagagccacaggg

SEQ ID NO: 3259817 - RNA, 19 nt, Artificial Sequence
  Description of Artificial Sequence: Synthetic oligonucleotide
agauuuuccuucccgcgcc

SEQ ID NO: 3259818 - RNA, 19 nt, Artificial Sequence
  Description of Artificial Sequence: Synthetic oligonucleotide
ugaccauuaacccgggcag

SEQ ID NO: 3259819 - RNA, 19 nt, Artificial Sequence
  Description of Artificial Sequence: Synthetic oligonucleotide
guaaccugaggcuuugacg

SEQ ID NO: 3259820 - RNA, 19 nt, Artificial Sequence
  Description of Artificial Sequence: Synthetic oligonucleotide
caagcuaggauggugaggc

SEQ ID NO: 3259821 - RNA, 19 nt, Artificial Sequence
  Description of Artificial Sequence: Synthetic oligonucleotide
cauguguccgugcagaggc

SEQ ID NO: 3259822 - RNA, 19 nt, Artificial Sequence
  Description of Artificial Sequence: Synthetic oligonucleotide
ucugcucucacaagcuagg

SEQ ID NO: 3259823 - RNA, 19 nt, Artificial Sequence
  Description of Artificial Sequence: Synthetic oligonucleotide
uccaagugccacaaggccc

SEQ ID NO: 3259824 - RNA, 19 nt, Artificial Sequence
  Description of Artificial Sequence: Synthetic oligonucleotide
ugaaugaccuuguaaccug

SEQ ID NO: 3259825 - RNA, 19 nt, Artificial Sequence
  Description of Artificial Sequence: Synthetic oligonucleotide
ugacucugcucucacaagc

SEQ ID NO: 3259826 - RNA, 19 nt, Artificial Sequence
  Description of Artificial Sequence: Synthetic oligonucleotide
gaagaaggagcgcuccugg

SEQ ID NO: 3259827 - RNA, 19 nt, Artificial Sequence
  Description of Artificial Sequence: Synthetic oligonucleotide
acagacgcacgauggacgc

SEQ ID NO: 3259828 - RNA, 19 nt, Artificial Sequence
  Description of Artificial Sequence: Synthetic oligonucleotide
uagauuuuccuucccgcgc

SEQ ID NO: 3259829 - RNA, 19 nt, Artificial Sequence
  Description of Artificial Sequence: Synthetic oligonucleotide
uuggccagcucgaagaacu

SEQ ID NO: 3259830 - RNA, 19 nt, Artificial Sequence
  Description of Artificial Sequence: Synthetic oligonucleotide
ggagguaagugacagacgc

SEQ ID NO: 3259831 - RNA, 19 nt, Artificial Sequence
  Description of Artificial Sequence: Synthetic oligonucleotide
aaucccaggggacgcuggc

SEQ ID NO: 3259832 - RNA, 19 nt, Artificial Sequence
  Description of Artificial Sequence: Synthetic oligonucleotide
uccaauaccuccgaguggu

SEQ ID NO: 3259833 - RNA, 19 nt, Artificial Sequence
  Description of Artificial Sequence: Synthetic oligonucleotide
aagugacagacgcacgaug

SEQ ID NO: 3259834 - RNA, 19 nt, Artificial Sequence
  Description of Artificial Sequence: Synthetic oligonucleotide
agucaaagacgcugcugcc

SEQ ID NO: 3259835 - RNA, 19 nt, Artificial Sequence
  Description of Artificial Sequence: Synthetic oligonucleotide
gaagacgaccauguguccg

SEQ ID NO: 3259836 - RNA, 19 nt, Artificial Sequence
  Description of Artificial Sequence: Synthetic oligonucleotide
agugacagacgcacgaugg

SEQ ID NO: 3259837 - RNA, 19 nt, Artificial Sequence
  Description of Artificial Sequence: Synthetic oligonucleotide
cucuagauuuuccuucccg

SEQ ID NO: 3259838 - RNA, 19 nt, Artificial Sequence
  Description of Artificial Sequence: Synthetic oligonucleotide
uguaaccugaggcuuugac

SEQ ID NO: 3259839 - RNA, 19 nt, Artificial Sequence
  Description of Artificial Sequence: Synthetic oligonucleotide
augcggacgaagaaggagc

SEQ ID NO: 3259840 - RNA, 19 nt, Artificial Sequence
  Description of Artificial Sequence: Synthetic oligonucleotide
gaggguggacuucaugcgg

SEQ ID NO: 3259841 - RNA, 19 nt, Artificial Sequence
  Description of Artificial Sequence: Synthetic oligonucleotide
agcuaggauggugaggccc

SEQ ID NO: 3259842 - RNA, 19 nt, Artificial Sequence
  Description of Artificial Sequence: Synthetic oligonucleotide
gacagacgcacgauggacg

SEQ ID NO: 3259843 - RNA, 19 nt, Artificial Sequence
  Description of Artificial Sequence: Synthetic oligonucleotide
gaagacucagagaccagag

SEQ ID NO: 3259844 - RNA, 19 nt, Artificial Sequence
  Description of Artificial Sequence: Synthetic oligonucleotide
agcgaagcgucgcaggcgg

SEQ ID NO: 3259845 - RNA, 19 nt, Artificial Sequence
  Description of Artificial Sequence: Synthetic oligonucleotide
uugacaucaccucggccgc

SEQ ID NO: 3259846 - RNA, 19 nt, Artificial Sequence
  Description of Artificial Sequence: Synthetic oligonucleotide
agcuccaccugucgaagac

SEQ ID NO: 3259847 - RNA, 19 nt, Artificial Sequence
  Description of Artificial Sequence: Synthetic oligonucleotide
gaugacacggaaggcggcg

SEQ ID NO: 3259848 - RNA, 19 nt, Artificial Sequence
  Description of Artificial Sequence: Synthetic oligonucleotide
cagcguguguccaagugcc

SEQ ID NO: 3259849 - RNA, 19 nt, Artificial Sequence
  Description of Artificial Sequence: Synthetic oligonucleotide
gaagaacucuagauuuucc

SEQ ID NO: 3259850 - RNA, 19 nt, Artificial Sequence
  Description of Artificial Sequence: Synthetic oligonucleotide
aagcuaggauggugaggcc

SEQ ID NO: 3259851 - RNA, 19 nt, Artificial Sequence
  Description of Artificial Sequence: Synthetic oligonucleotide
aggaaaucccaggggacgc

SEQ ID NO: 3259852 - RNA, 19 nt, Artificial Sequence
  Description of Artificial Sequence: Synthetic oligonucleotide
gacaccaggcuccacucgc

SEQ ID NO: 3259853 - RNA, 19 nt, Artificial Sequence
  Description of Artificial Sequence: Synthetic oligonucleotide
aacccgggcaggaaauccc

SEQ ID NO: 3259854 - RNA, 19 nt, Artificial Sequence
  Description of Artificial Sequence: Synthetic oligonucleotide
ugcuccaauaccuccgagu

SEQ ID NO: 3259855 - RNA, 19 nt, Artificial Sequence
  Description of Artificial Sequence: Synthetic oligonucleotide
aguugcuccaauaccuccg

SEQ ID NO: 3259856 - RNA, 19 nt, Artificial Sequence
  Description of Artificial Sequence: Synthetic oligonucleotide
acucagagaccagagccac

SEQ ID NO: 3259857 - RNA, 19 nt, Artificial Sequence
  Description of Artificial Sequence: Synthetic oligonucleotide
gauuuuccuucccgcgccg

SEQ ID NO: 3259858 - RNA, 19 nt, Artificial Sequence
  Description of Artificial Sequence: Synthetic oligonucleotide
guuggcuggagauggcacc

SEQ ID NO: 3259859 - RNA, 19 nt, Artificial Sequence
  Description of Artificial Sequence: Synthetic oligonucleotide
agccacagggccucggcgg

SEQ ID NO: 3259860 - RNA, 19 nt, Artificial Sequence
  Description of Artificial Sequence: Synthetic oligonucleotide
ggggccuugaccauuaacc

SEQ ID NO: 3259861 - RNA, 19 nt, Artificial Sequence
  Description of Artificial Sequence: Synthetic oligonucleotide
caggaaaucccaggggacg

SEQ ID NO: 3259862 - RNA, 19 nt, Artificial Sequence
  Description of Artificial Sequence: Synthetic oligonucleotide
  modified_base (16)..(16): a, c, u, g, unknown or other
aggcccgacggcccgnaac

SEQ ID NO: 3259863 - RNA, 19 nt, Artificial Sequence
  Description of Artificial Sequence: Synthetic oligonucleotide
gcuccaauaccuccgagug

SEQ ID NO: 3259864 - RNA, 19 nt, Artificial Sequence
  Description of Artificial Sequence: Synthetic oligonucleotide
aagaaggagcgcuccugga

SEQ ID NO: 3259865 - RNA, 19 nt, Artificial Sequence
  Description of Artificial Sequence: Synthetic oligonucleotide
aaugaccuuguaaccugag

SEQ ID NO: 3259866 - RNA, 19 nt, Artificial Sequence
  Description of Artificial Sequence: Synthetic oligonucleotide
gucgaagacucagagacca

SEQ ID NO: 3259867 - RNA, 19 nt, Artificial Sequence
  Description of Artificial Sequence: Synthetic oligonucleotide
cacgauggacgccuugucc

SEQ ID NO: 3259868 - RNA, 19 nt, Artificial Sequence
  Description of Artificial Sequence: Synthetic oligonucleotide
caugcggacgaagaaggag

SEQ ID NO: 3259869 - RNA, 19 nt, Artificial Sequence
  Description of Artificial Sequence: Synthetic oligonucleotide
caguugcuccaauaccucc

SEQ ID NO: 3259870 - RNA, 19 nt, Artificial Sequence
  Description of Artificial Sequence: Synthetic oligonucleotide
acaagcuaggauggugagg

SEQ ID NO: 3259871 - RNA, 19 nt, Artificial Sequence
  Description of Artificial Sequence: Synthetic oligonucleotide
guggacuucaugcggacga

SEQ ID NO: 3259872 - RNA, 19 nt, Artificial Sequence
  Description of Artificial Sequence: Synthetic oligonucleotide
ugacguucaggccucuuuu

SEQ ID NO: 3259873 - RNA, 19 nt, Artificial Sequence
  Description of Artificial Sequence: Synthetic oligonucleotide
acgaccauguguccgugca

SEQ ID NO: 3259874 - RNA, 19 nt, Artificial Sequence
  Description of Artificial Sequence: Synthetic oligonucleotide
gccuugaccauuaacccgg

SEQ ID NO: 3259875 - RNA, 19 nt, Artificial Sequence
  Description of Artificial Sequence: Synthetic oligonucleotide
aguuggcuggagauggcac

SEQ ID NO: 3259876 - RNA, 19 nt, Artificial Sequence
  Description of Artificial Sequence: Synthetic oligonucleotide
aaaucccaggggacgcugg

SEQ ID NO: 3259877 - RNA, 19 nt, Artificial Sequence
  Description of Artificial Sequence: Synthetic oligonucleotide
uguccaccagcgaggagga

SEQ ID NO: 3259878 - RNA, 19 nt, Artificial Sequence
  Description of Artificial Sequence: Synthetic oligonucleotide
gacgaagaaggagcgcucc

SEQ ID NO: 3259879 - RNA, 19 nt, Artificial Sequence
  Description of Artificial Sequence: Synthetic oligonucleotide
ggccuugaccauuaacccg

SEQ ID NO: 3259880 - RNA, 19 nt, Artificial Sequence
  Description of Artificial Sequence: Synthetic oligonucleotide
gcagaggcagcucagccag

SEQ ID NO: 3259881 - RNA, 19 nt, Artificial Sequence
  Description of Artificial Sequence: Synthetic oligonucleotide
ugcucucacaagcuaggau

SEQ ID NO: 3259882 - RNA, 19 nt, Artificial Sequence
  Description of Artificial Sequence: Synthetic oligonucleotide
uaacccgggcaggaaaucc

SEQ ID NO: 3259883 - RNA, 19 nt, Artificial Sequence
  Description of Artificial Sequence: Synthetic oligonucleotide
gacgcuggcuccacggccg

SEQ ID NO: 3259884 - RNA, 19 nt, Artificial Sequence
  Description of Artificial Sequence: Synthetic oligonucleotide
uguguccgugcagaggcag

SEQ ID NO: 3259885 - RNA, 19 nt, Artificial Sequence
  Description of Artificial Sequence: Synthetic oligonucleotide
cacaagcuaggauggugag

SEQ ID NO: 3259886 - RNA, 19 nt, Artificial Sequence
  Description of Artificial Sequence: Synthetic oligonucleotide
cuccaauaccuccgagugg

SEQ ID NO: 3259887 - RNA, 19 nt, Artificial Sequence
  Description of Artificial Sequence: Synthetic oligonucleotide
ucgaagacucagagaccag

SEQ ID NO: 3259888 - RNA, 19 nt, Artificial Sequence
  Description of Artificial Sequence: Synthetic oligonucleotide
ucaugcggacgaagaagga

SEQ ID NO: 3259889 - RNA, 19 nt, Artificial Sequence
  Description of Artificial Sequence: Synthetic oligonucleotide
cucacaagcuaggauggug

SEQ ID NO: 3259890 - RNA, 19 nt, Artificial Sequence
  Description of Artificial Sequence: Synthetic oligonucleotide
gucaaagacgcugcugccc

SEQ ID NO: 3259891 - RNA, 19 nt, Artificial Sequence
  Description of Artificial Sequence: Synthetic oligonucleotide
guugcgggacuucuccuug

SEQ ID NO: 3259892 - RNA, 19 nt, Artificial Sequence
  Description of Artificial Sequence: Synthetic oligonucleotide
gccuuguccaguuggcugg

SEQ ID NO: 3259893 - RNA, 19 nt, Artificial Sequence
  Description of Artificial Sequence: Synthetic oligonucleotide
auuuuccuucccgcgccgc

SEQ ID NO: 3259894 - RNA, 19 nt, Artificial Sequence
  Description of Artificial Sequence: Synthetic oligonucleotide
ccucuuuuggugagggugg

SEQ ID NO: 3259895 - RNA, 19 nt, Artificial Sequence
  Description of Artificial Sequence: Synthetic oligonucleotide
gacuucaugcggacgaaga

SEQ ID NO: 3259896 - RNA, 19 nt, Artificial Sequence
  Description of Artificial Sequence: Synthetic oligonucleotide
cucgaagaacucuagauuu

SEQ ID NO: 3259897 - RNA, 19 nt, Artificial Sequence
  Description of Artificial Sequence: Synthetic oligonucleotide
gagacaccaggcuccacuc

SEQ ID NO: 3259898 - RNA, 19 nt, Artificial Sequence
  Description of Artificial Sequence: Synthetic oligonucleotide
gacaucaccucggccgccg

SEQ ID NO: 3259899 - RNA, 19 nt, Artificial Sequence
  Description of Artificial Sequence: Synthetic oligonucleotide
ucaggcgcccuguuaugug

SEQ ID NO: 3259900 - RNA, 19 nt, Artificial Sequence
  Description of Artificial Sequence: Synthetic oligonucleotide
cuccaccugucgaagacuc

SEQ ID NO: 3259901 - RNA, 19 nt, Artificial Sequence
  Description of Artificial Sequence: Synthetic oligonucleotide
cugacucugcucucacaag

SEQ ID NO: 3259902 - RNA, 19 nt, Artificial Sequence
  Description of Artificial Sequence: Synthetic oligonucleotide
ggcaggaaaucccagggga

SEQ ID NO: 3259903 - RNA, 19 nt, Artificial Sequence
  Description of Artificial Sequence: Synthetic oligonucleotide
auaccuccgaguggucccc

SEQ ID NO: 3259904 - RNA, 19 nt, Artificial Sequence
  Description of Artificial Sequence: Synthetic oligonucleotide
cuggagauggcaccgggca

SEQ ID NO: 3259905 - RNA, 19 nt, Artificial Sequence
  Description of Artificial Sequence: Synthetic oligonucleotide
acuuauaugacauauauac

SEQ ID NO: 3259906 - RNA, 19 nt, Artificial Sequence
  Description of Artificial Sequence: Synthetic oligonucleotide
aauaaauauauauauauau

SEQ ID NO: 3259907 - RNA, 19 nt, Artificial Sequence
  Description of Artificial Sequence: Synthetic oligonucleotide
aacguuaaaucuuauauuc

SEQ ID NO: 3259908 - RNA, 19 nt, Artificial Sequence
  Description of Artificial Sequence: Synthetic oligonucleotide
auauguuuuaaccauacac

SEQ ID NO: 3259909 - RNA, 19 nt, Artificial Sequence
  Description of Artificial Sequence: Synthetic oligonucleotide
aaaauuuacucuuaguucu

SEQ ID NO: 3259910 - RNA, 19 nt, Artificial Sequence
  Description of Artificial Sequence: Synthetic oligonucleotide
aauauauauauauauuugu

SEQ ID NO: 3259911 - RNA, 19 nt, Artificial Sequence
  Description of Artificial Sequence: Synthetic oligonucleotide
aaaauaacauuucuaguag

SEQ ID NO: 3259912 - RNA, 19 nt, Artificial Sequence
  Description of Artificial Sequence: Synthetic oligonucleotide
agagcaaacgauuaaacac

SEQ ID NO: 3259913 - RNA, 19 nt, Artificial Sequence
  Description of Artificial Sequence: Synthetic oligonucleotide
auaacuaaugagcacaugg

SEQ ID NO: 3259914 - RNA, 19 nt, Artificial Sequence
  Description of Artificial Sequence: Synthetic oligonucleotide
aauaguaguaguuuaccag

SEQ ID NO: 3259915 - RNA, 19 nt, Artificial Sequence
  Description of Artificial Sequence: Synthetic oligonucleotide
auaauaaauauauauauau

SEQ ID NO: 3259916 - RNA, 19 nt, Artificial Sequence
  Description of Artificial Sequence: Synthetic oligonucleotide
uuuaacaugguuuauuaca

SEQ ID NO: 3259917 - RNA, 19 nt, Artificial Sequence
  Description of Artificial Sequence: Synthetic oligonucleotide
uauguuuuaaccauacaca

SEQ ID NO: 3259918 - RNA, 19 nt, Artificial Sequence
  Description of Artificial Sequence: Synthetic oligonucleotide
auauauauauauuuguaug

SEQ ID NO: 3259919 - RNA, 19 nt, Artificial Sequence
  Description of Artificial Sequence: Synthetic oligonucleotide
uaaagauaggucuacacug

SEQ ID NO: 3259920 - RNA, 19 nt, Artificial Sequence
  Description of Artificial Sequence: Synthetic oligonucleotide
augcauuuaaaauuuacuc

SEQ ID NO: 3259921 - RNA, 19 nt, Artificial Sequence
  Description of Artificial Sequence: Synthetic oligonucleotide
uaaauauauauauauauuu

SEQ ID NO: 3259922 - RNA, 19 nt, Artificial Sequence
  Description of Artificial Sequence: Synthetic oligonucleotide
uauuacauuuccagaaacg

SEQ ID NO: 3259923 - RNA, 19 nt, Artificial Sequence
  Description of Artificial Sequence: Synthetic oligonucleotide
aaauaacauuucuaguagg

SEQ ID NO: 3259924 - RNA, 19 nt, Artificial Sequence
  Description of Artificial Sequence: Synthetic oligonucleotide
aaauauauauauauauuug

SEQ ID NO: 3259925 - RNA, 19 nt, Artificial Sequence
  Description of Artificial Sequence: Synthetic oligonucleotide
uaaguauaaaccuagcaaa

SEQ ID NO: 3259926 - RNA, 19 nt, Artificial Sequence
  Description of Artificial Sequence: Synthetic oligonucleotide
uuuucuuacacauaauaaa

SEQ ID NO: 3259927 - RNA, 19 nt, Artificial Sequence
  Description of Artificial Sequence: Synthetic oligonucleotide
uauauauauauauuuguau

SEQ ID NO: 3259928 - RNA, 19 nt, Artificial Sequence
  Description of Artificial Sequence: Synthetic oligonucleotide
uaaaauuuacucuuaguuc

SEQ ID NO: 3259929 - RNA, 19 nt, Artificial Sequence
  Description of Artificial Sequence: Synthetic oligonucleotide
uguuuguucaccaaauacu

SEQ ID NO: 3259930 - RNA, 19 nt, Artificial Sequence
  Description of Artificial Sequence: Synthetic oligonucleotide
caaacuaaggccuugcuug

SEQ ID NO: 3259931 - RNA, 19 nt, Artificial Sequence
  Description of Artificial Sequence: Synthetic oligonucleotide
ucuaauaccugucuauggc

SEQ ID NO: 3259932 - RNA, 19 nt, Artificial Sequence
  Description of Artificial Sequence: Synthetic oligonucleotide
aaauauguuuuaaccauac

SEQ ID NO: 3259933 - RNA, 19 nt, Artificial Sequence
  Description of Artificial Sequence: Synthetic oligonucleotide
uugaauauccgguacaaac

SEQ ID NO: 3259934 - RNA, 19 nt, Artificial Sequence
  Description of Artificial Sequence: Synthetic oligonucleotide
uaccauuaaagauaggucu

SEQ ID NO: 3259935 - RNA, 19 nt, Artificial Sequence
  Description of Artificial Sequence: Synthetic oligonucleotide
uauauuuguauguuacuug

SEQ ID NO: 3259936 - RNA, 19 nt, Artificial Sequence
  Description of Artificial Sequence: Synthetic oligonucleotide
ugaacuaguacaaaacuau

SEQ ID NO: 3259937 - RNA, 19 nt, Artificial Sequence
  Description of Artificial Sequence: Synthetic oligonucleotide
uauacuugaacuaguacaa

SEQ ID NO: 3259938 - RNA, 19 nt, Artificial Sequence
  Description of Artificial Sequence: Synthetic oligonucleotide
ucuacacugucucuuaugc

SEQ ID NO: 3259939 - RNA, 19 nt, Artificial Sequence
  Description of Artificial Sequence: Synthetic oligonucleotide
aaauaguaguaguuuacca

SEQ ID NO: 3259940 - RNA, 19 nt, Artificial Sequence
  Description of Artificial Sequence: Synthetic oligonucleotide
ugcaaauauguuuuaacca

SEQ ID NO: 3259941 - RNA, 19 nt, Artificial Sequence
  Description of Artificial Sequence: Synthetic oligonucleotide
uuaaauaguaguaguuuac

SEQ ID NO: 3259942 - RNA, 19 nt, Artificial Sequence
  Description of Artificial Sequence: Synthetic oligonucleotide
ugcacauaacuaaugagca

SEQ ID NO: 3259943 - RNA, 19 nt, Artificial Sequence
  Description of Artificial Sequence: Synthetic oligonucleotide
caugucuucucuuagcugc

SEQ ID NO: 3259944 - RNA, 19 nt, Artificial Sequence
  Description of Artificial Sequence: Synthetic oligonucleotide
augcacauaacuaaugagc

SEQ ID NO: 3259945 - RNA, 19 nt, Artificial Sequence
  Description of Artificial Sequence: Synthetic oligonucleotide
uuauauucaguuuucugcu

SEQ ID NO: 3259946 - RNA, 19 nt, Artificial Sequence
  Description of Artificial Sequence: Synthetic oligonucleotide
uacauaaaauaucacguaa

SEQ ID NO: 3259947 - RNA, 19 nt, Artificial Sequence
  Description of Artificial Sequence: Synthetic oligonucleotide
aauuaaguauaaaccuagc

SEQ ID NO: 3259948 - RNA, 19 nt, Artificial Sequence
  Description of Artificial Sequence: Synthetic oligonucleotide
uucucuaccauuaaagaua

SEQ ID NO: 3259949 - RNA, 19 nt, Artificial Sequence
  Description of Artificial Sequence: Synthetic oligonucleotide
ucucuaccauuaaagauag

SEQ ID NO: 3259950 - RNA, 19 nt, Artificial Sequence
  Description of Artificial Sequence: Synthetic oligonucleotide
ucuaguaggaagcaauuaa

SEQ ID NO: 3259951 - RNA, 19 nt, Artificial Sequence
  Description of Artificial Sequence: Synthetic oligonucleotide
aaaaccagggaauauuuua

SEQ ID NO: 3259952 - RNA, 19 nt, Artificial Sequence
  Description of Artificial Sequence: Synthetic oligonucleotide
uaauaaauauauauauaua

SEQ ID NO: 3259953 - RNA, 19 nt, Artificial Sequence
  Description of Artificial Sequence: Synthetic oligonucleotide
ucuuagcugcucauuaggg

SEQ ID NO: 3259954 - RNA, 19 nt, Artificial Sequence
  Description of Artificial Sequence: Synthetic oligonucleotide
uaacuaaugagcacauggc

SEQ ID NO: 3259955 - RNA, 19 nt, Artificial Sequence
  Description of Artificial Sequence: Synthetic oligonucleotide
gaauugcuauuauucauag

SEQ ID NO: 3259956 - RNA, 19 nt, Artificial Sequence
  Description of Artificial Sequence: Synthetic oligonucleotide
uugaccaugacuccagagc

SEQ ID NO: 3259957 - RNA, 19 nt, Artificial Sequence
  Description of Artificial Sequence: Synthetic oligonucleotide
ucuaauguacucugcagca

SEQ ID NO: 3259958 - RNA, 19 nt, Artificial Sequence
  Description of Artificial Sequence: Synthetic oligonucleotide
auauuuguauguuacuuga

SEQ ID NO: 3259959 - RNA, 19 nt, Artificial Sequence
  Description of Artificial Sequence: Synthetic oligonucleotide
uuaacaugguuuauuacau

SEQ ID NO: 3259960 - RNA, 19 nt, Artificial Sequence
  Description of Artificial Sequence: Synthetic oligonucleotide
uuauuacauuuccagaaac

SEQ ID NO: 3259961 - RNA, 19 nt, Artificial Sequence
  Description of Artificial Sequence: Synthetic oligonucleotide
aacacccuguugaauaucc

SEQ ID NO: 3259962 - RNA, 19 nt, Artificial Sequence
  Description of Artificial Sequence: Synthetic oligonucleotide
uuguauguuacuugagugc

SEQ ID NO: 3259963 - RNA, 19 nt, Artificial Sequence
  Description of Artificial Sequence: Synthetic oligonucleotide
acaaccaccguccacagca

SEQ ID NO: 3259964 - RNA, 19 nt, Artificial Sequence
  Description of Artificial Sequence: Synthetic oligonucleotide
cuuaguucuuaaauaguag

SEQ ID NO: 3259965 - RNA, 19 nt, Artificial Sequence
  Description of Artificial Sequence: Synthetic oligonucleotide
aaaugaaugaauugcuauu

SEQ ID NO: 3259966 - RNA, 19 nt, Artificial Sequence
  Description of Artificial Sequence: Synthetic oligonucleotide
uacugcucaaacuaaggcc

SEQ ID NO: 3259967 - RNA, 19 nt, Artificial Sequence
  Description of Artificial Sequence: Synthetic oligonucleotide
ucacguaagggucacuucc

SEQ ID NO: 3259968 - RNA, 19 nt, Artificial Sequence
  Description of Artificial Sequence: Synthetic oligonucleotide
gaaacguuaaaucuuauau

SEQ ID NO: 3259969 - RNA, 19 nt, Artificial Sequence
  Description of Artificial Sequence: Synthetic oligonucleotide
cuuccauucacacugcuug

SEQ ID NO: 3259970 - RNA, 19 nt, Artificial Sequence
  Description of Artificial Sequence: Synthetic oligonucleotide
ucccgaaucacagaaacag

SEQ ID NO: 3259971 - RNA, 19 nt, Artificial Sequence
  Description of Artificial Sequence: Synthetic oligonucleotide
aaacguuaaaucuuauauu

SEQ ID NO: 3259972 - RNA, 19 nt, Artificial Sequence
  Description of Artificial Sequence: Synthetic oligonucleotide
caaacgauuaaacacccug

SEQ ID NO: 3259973 - RNA, 19 nt, Artificial Sequence
  Description of Artificial Sequence: Synthetic oligonucleotide
uuccagaaacguuaaaucu

SEQ ID NO: 3259974 - RNA, 19 nt, Artificial Sequence
  Description of Artificial Sequence: Synthetic oligonucleotide
aagggucacuuccuuaagg

SEQ ID NO: 3259975 - RNA, 19 nt, Artificial Sequence
  Description of Artificial Sequence: Synthetic oligonucleotide
ugcauauuuguguaaacaa

SEQ ID NO: 3259976 - RNA, 19 nt, Artificial Sequence
  Description of Artificial Sequence: Synthetic oligonucleotide
cacagaaacagcuccacag

SEQ ID NO: 3259977 - RNA, 19 nt, Artificial Sequence
  Description of Artificial Sequence: Synthetic oligonucleotide
uuacucuuaguucuuaaau

SEQ ID NO: 3259978 - RNA, 19 nt, Artificial Sequence
  Description of Artificial Sequence: Synthetic oligonucleotide
acacuuauaugacauauau

SEQ ID NO: 3259979 - RNA, 19 nt, Artificial Sequence
  Description of Artificial Sequence: Synthetic oligonucleotide
aaauccuacugcucaaacu

SEQ ID NO: 3259980 - RNA, 19 nt, Artificial Sequence
  Description of Artificial Sequence: Synthetic oligonucleotide
aauaucacguaagggucac

SEQ ID NO: 3259981 - RNA, 19 nt, Artificial Sequence
  Description of Artificial Sequence: Synthetic oligonucleotide
aaucuuauauucaguuuuc

SEQ ID NO: 3259982 - RNA, 19 nt, Artificial Sequence
  Description of Artificial Sequence: Synthetic oligonucleotide
acuugaacuaguacaaaac

SEQ ID NO: 3259983 - RNA, 19 nt, Artificial Sequence
  Description of Artificial Sequence: Synthetic oligonucleotide
cuugcaaagcuccaccacg

SEQ ID NO: 3259984 - RNA, 19 nt, Artificial Sequence
  Description of Artificial Sequence: Synthetic oligonucleotide
aaccauacacauaagaaau

SEQ ID NO: 3259985 - RNA, 19 nt, Artificial Sequence
  Description of Artificial Sequence: Synthetic oligonucleotide
ugaauugcuauuauucaua

SEQ ID NO: 3259986 - RNA, 19 nt, Artificial Sequence
  Description of Artificial Sequence: Synthetic oligonucleotide
uccgguacaaacuuaguuc

SEQ ID NO: 3259987 - RNA, 19 nt, Artificial Sequence
  Description of Artificial Sequence: Synthetic oligonucleotide
uguauguuacuugagugca

SEQ ID NO: 3259988 - RNA, 19 nt, Artificial Sequence
  Description of Artificial Sequence: Synthetic oligonucleotide
uaguaguuuaccaggguga

SEQ ID NO: 3259989 - RNA, 19 nt, Artificial Sequence
  Description of Artificial Sequence: Synthetic oligonucleotide
ugcuauuauucauagccca

SEQ ID NO: 3259990 - RNA, 19 nt, Artificial Sequence
  Description of Artificial Sequence: Synthetic oligonucleotide
cuaauaccugucuauggcc

SEQ ID NO: 3259991 - RNA, 19 nt, Artificial Sequence
  Description of Artificial Sequence: Synthetic oligonucleotide
aauauguuuuaaccauaca

SEQ ID NO: 3259992 - RNA, 19 nt, Artificial Sequence
  Description of Artificial Sequence: Synthetic oligonucleotide
uugaacuaguacaaaacua

SEQ ID NO: 3259993 - RNA, 19 nt, Artificial Sequence
  Description of Artificial Sequence: Synthetic oligonucleotide
aaugaaugaauugcuauua

SEQ ID NO: 3259994 - RNA, 19 nt, Artificial Sequence
  Description of Artificial Sequence: Synthetic oligonucleotide
uauuuguauguuacuugag

SEQ ID NO: 3259995 - RNA, 19 nt, Artificial Sequence
  Description of Artificial Sequence: Synthetic oligonucleotide
uaguaggaagcaauuaagu

SEQ ID NO: 3259996 - RNA, 19 nt, Artificial Sequence
  Description of Artificial Sequence: Synthetic oligonucleotide
gagcaaacgauuaaacacc

SEQ ID NO: 3259997 - RNA, 19 nt, Artificial Sequence
  Description of Artificial Sequence: Synthetic oligonucleotide
aauaccugucuauggccuc

SEQ ID NO: 3259998 - RNA, 19 nt, Artificial Sequence
  Description of Artificial Sequence: Synthetic oligonucleotide
aguacaaaacuauccuuug

SEQ ID NO: 3259999 - RNA, 19 nt, Artificial Sequence
  Description of Artificial Sequence: Synthetic oligonucleotide
gcaaauucuacacauuugc

SEQ ID NO: 3260000 - RNA, 19 nt, Artificial Sequence
  Description of Artificial Sequence: Synthetic oligonucleotide
auguauuccacacacuuau

SEQ ID NO: 3260001 - RNA, 19 nt, Artificial Sequence
  Description of Artificial Sequence: Synthetic oligonucleotide
gauaggucuacacugucuc

SEQ ID NO: 3260002 - RNA, 19 nt, Artificial Sequence
  Description of Artificial Sequence: Synthetic oligonucleotide
gagaauuucuaauguacuc

SEQ ID NO: 3260003 - RNA, 19 nt, Artificial Sequence
  Description of Artificial Sequence: Synthetic oligonucleotide
auguuuuaaccauacacau

SEQ ID NO: 3260004 - RNA, 19 nt, Artificial Sequence
  Description of Artificial Sequence: Synthetic oligonucleotide
gaucccgaaucacagaaac

SEQ ID NO: 3260005 - RNA, 19 nt, Artificial Sequence
  Description of Artificial Sequence: Synthetic oligonucleotide
aagaugauaucagagaagc

SEQ ID NO: 3260006 - RNA, 19 nt, Artificial Sequence
  Description of Artificial Sequence: Synthetic oligonucleotide
uuuacaaaccccuaggcug

SEQ ID NO: 3260007 - RNA, 19 nt, Artificial Sequence
  Description of Artificial Sequence: Synthetic oligonucleotide
auuucagccagguagguac

SEQ ID NO: 3260008 - RNA, 19 nt, Artificial Sequence
  Description of Artificial Sequence: Synthetic oligonucleotide
gaugauaucagagaagcgc

SEQ ID NO: 3260009 - RNA, 19 nt, Artificial Sequence
  Description of Artificial Sequence: Synthetic oligonucleotide
cucaaguccucauagaagg

SEQ ID NO: 3260010 - RNA, 19 nt, Artificial Sequence
  Description of Artificial Sequence: Synthetic oligonucleotide
agacuuauuggccuucucc

SEQ ID NO: 3260011 - RNA, 19 nt, Artificial Sequence
  Description of Artificial Sequence: Synthetic oligonucleotide
uuagcucagacucuaaaug

SEQ ID NO: 3260012 - RNA, 19 nt, Artificial Sequence
  Description of Artificial Sequence: Synthetic oligonucleotide
uguaggugaaaaccgcugg

SEQ ID NO: 3260013 - RNA, 19 nt, Artificial Sequence
  Description of Artificial Sequence: Synthetic oligonucleotide
aaguugaagaccucguuca

SEQ ID NO: 3260014 - RNA, 19 nt, Artificial Sequence
  Description of Artificial Sequence: Synthetic oligonucleotide
ugaguuggugaacagcagg

SEQ ID NO: 3260015 - RNA, 19 nt, Artificial Sequence
  Description of Artificial Sequence: Synthetic oligonucleotide
cucuaaauggcgaaaguag

SEQ ID NO: 3260016 - RNA, 19 nt, Artificial Sequence
  Description of Artificial Sequence: Synthetic oligonucleotide
guaaucaugguauggcacg

SEQ ID NO: 3260017 - RNA, 19 nt, Artificial Sequence
  Description of Artificial Sequence: Synthetic oligonucleotide
gugcauuucagccagguag

SEQ ID NO: 3260018 - RNA, 19 nt, Artificial Sequence
  Description of Artificial Sequence: Synthetic oligonucleotide
uguagaaguaaucauggua

SEQ ID NO: 3260019 - RNA, 19 nt, Artificial Sequence
  Description of Artificial Sequence: Synthetic oligonucleotide
aggguaaugguguagagga

SEQ ID NO: 3260020 - RNA, 19 nt, Artificial Sequence
  Description of Artificial Sequence: Synthetic oligonucleotide
uagcucagacucuaaaugg

SEQ ID NO: 3260021 - RNA, 19 nt, Artificial Sequence
  Description of Artificial Sequence: Synthetic oligonucleotide
acgugcuugauccuguggc

SEQ ID NO: 3260022 - RNA, 19 nt, Artificial Sequence
  Description of Artificial Sequence: Synthetic oligonucleotide
ugcauuucagccagguagg

SEQ ID NO: 3260023 - RNA, 19 nt, Artificial Sequence
  Description of Artificial Sequence: Synthetic oligonucleotide
uuuuggguaggccagggga

SEQ ID NO: 3260024 - RNA, 19 nt, Artificial Sequence
  Description of Artificial Sequence: Synthetic oligonucleotide
aguuuguccacgcugaagu

SEQ ID NO: 3260025 - RNA, 19 nt, Artificial Sequence
  Description of Artificial Sequence: Synthetic oligonucleotide
gaagaccucguucacauac

SEQ ID NO: 3260026 - RNA, 19 nt, Artificial Sequence
  Description of Artificial Sequence: Synthetic oligonucleotide
uugguaaggguaauggugu

SEQ ID NO: 3260027 - RNA, 19 nt, Artificial Sequence
  Description of Artificial Sequence: Synthetic oligonucleotide
agagaagcgccgcugcucc

SEQ ID NO: 3260028 - RNA, 19 nt, Artificial Sequence
  Description of Artificial Sequence: Synthetic oligonucleotide
guuaaggaugaccagcagc

SEQ ID NO: 3260029 - RNA, 19 nt, Artificial Sequence
  Description of Artificial Sequence: Synthetic oligonucleotide
uucucaaugaaaguuuuac

SEQ ID NO: 3260030 - RNA, 19 nt, Artificial Sequence
  Description of Artificial Sequence: Synthetic oligonucleotide
cuuggacacacucuguagg

SEQ ID NO: 3260031 - RNA, 19 nt, Artificial Sequence
  Description of Artificial Sequence: Synthetic oligonucleotide
aaggguaaugguguagagg

SEQ ID NO: 3260032 - RNA, 19 nt, Artificial Sequence
  Description of Artificial Sequence: Synthetic oligonucleotide
uccaauccacuccagaagu

SEQ ID NO: 3260033 - RNA, 19 nt, Artificial Sequence
  Description of Artificial Sequence: Synthetic oligonucleotide
aucaugguauggcacgucg

SEQ ID NO: 3260034 - RNA, 19 nt, Artificial Sequence
  Description of Artificial Sequence: Synthetic oligonucleotide
guagcauucacucuccuga

SEQ ID NO: 3260035 - RNA, 19 nt, Artificial Sequence
  Description of Artificial Sequence: Synthetic oligonucleotide
agaaguaaucaugguaugg

SEQ ID NO: 3260036 - RNA, 19 nt, Artificial Sequence
  Description of Artificial Sequence: Synthetic oligonucleotide
aggacuucagcaucuauca

SEQ ID NO: 3260037 - RNA, 19 nt, Artificial Sequence
  Description of Artificial Sequence: Synthetic oligonucleotide
gaaguugaagaccucguuc

SEQ ID NO: 3260038 - RNA, 19 nt, Artificial Sequence
  Description of Artificial Sequence: Synthetic oligonucleotide
aaauggcgaaaguaguccu

SEQ ID NO: 3260039 - RNA, 19 nt, Artificial Sequence
  Description of Artificial Sequence: Synthetic oligonucleotide
aucauguuaaggaugacca

SEQ ID NO: 3260040 - RNA, 19 nt, Artificial Sequence
  Description of Artificial Sequence: Synthetic oligonucleotide
uuuggguaggccaggggag

SEQ ID NO: 3260041 - RNA, 19 nt, Artificial Sequence
  Description of Artificial Sequence: Synthetic oligonucleotide
uccacgcugaaguugaaga

SEQ ID NO: 3260042 - RNA, 19 nt, Artificial Sequence
  Description of Artificial Sequence: Synthetic oligonucleotide
guugguaaggguaauggug

SEQ ID NO: 3260043 - RNA, 19 nt, Artificial Sequence
  Description of Artificial Sequence: Synthetic oligonucleotide
uuggccuucuccuugggug

SEQ ID NO: 3260044 - RNA, 19 nt, Artificial Sequence
  Description of Artificial Sequence: Synthetic oligonucleotide
aaguaguccuccaauccac

SEQ ID NO: 3260045 - RNA, 19 nt, Artificial Sequence
  Description of Artificial Sequence: Synthetic oligonucleotide
uguagaggaucacacggcu

SEQ ID NO: 3260046 - RNA, 19 nt, Artificial Sequence
  Description of Artificial Sequence: Synthetic oligonucleotide
cacucuguaggugaaaacc

SEQ ID NO: 3260047 - RNA, 19 nt, Artificial Sequence
  Description of Artificial Sequence: Synthetic oligonucleotide
gaagaugauaucagagaag

SEQ ID NO: 3260048 - RNA, 19 nt, Artificial Sequence
  Description of Artificial Sequence: Synthetic oligonucleotide
ugguauggcacgucguggg

SEQ ID NO: 3260049 - RNA, 19 nt, Artificial Sequence
  Description of Artificial Sequence: Synthetic oligonucleotide
cuuguuccuagccacgcgg

SEQ ID NO: 3260050 - RNA, 19 nt, Artificial Sequence
  Description of Artificial Sequence: Synthetic oligonucleotide
uuacaaaccccuaggcugu

SEQ ID NO: 3260051 - RNA, 19 nt, Artificial Sequence
  Description of Artificial Sequence: Synthetic oligonucleotide
ucugcguggaaccugccac

SEQ ID NO: 3260052 - RNA, 19 nt, Artificial Sequence
  Description of Artificial Sequence: Synthetic oligonucleotide
cacagcuuguaaaagagca

SEQ ID NO: 3260053 - RNA, 19 nt, Artificial Sequence
  Description of Artificial Sequence: Synthetic oligonucleotide
ucucccucgacaguggcgg

SEQ ID NO: 3260054 - RNA, 19 nt, Artificial Sequence
  Description of Artificial Sequence: Synthetic oligonucleotide
uucacauacugucuuccac

SEQ ID NO: 3260055 - RNA, 19 nt, Artificial Sequence
  Description of Artificial Sequence: Synthetic oligonucleotide
aguguccucggggauaugc

SEQ ID NO: 3260056 - RNA, 19 nt, Artificial Sequence
  Description of Artificial Sequence: Synthetic oligonucleotide
acucgcuuuguacaugguc

SEQ ID NO: 3260057 - RNA, 19 nt, Artificial Sequence
  Description of Artificial Sequence: Synthetic oligonucleotide
caucauguuaaggaugacc

SEQ ID NO: 3260058 - RNA, 19 nt, Artificial Sequence
  Description of Artificial Sequence: Synthetic oligonucleotide
ucuguaggugaaaaccgcu

SEQ ID NO: 3260059 - RNA, 19 nt, Artificial Sequence
  Description of Artificial Sequence: Synthetic oligonucleotide
uaguccuccaauccacucc

SEQ ID NO: 3260060 - RNA, 19 nt, Artificial Sequence
  Description of Artificial Sequence: Synthetic oligonucleotide
auggcgaaaguaguccucc

SEQ ID NO: 3260061 - RNA, 19 nt, Artificial Sequence
  Description of Artificial Sequence: Synthetic oligonucleotide
ucauguuaaggaugaccag

SEQ ID NO: 3260062 - RNA, 19 nt, Artificial Sequence
  Description of Artificial Sequence: Synthetic oligonucleotide
guaggugaaaaccgcuggg

SEQ ID NO: 3260063 - RNA, 19 nt, Artificial Sequence
  Description of Artificial Sequence: Synthetic oligonucleotide
aaccccuaggcuguuuucg

SEQ ID NO: 3260064 - RNA, 19 nt, Artificial Sequence
  Description of Artificial Sequence: Synthetic oligonucleotide
aaaaccgcugggagugucc

SEQ ID NO: 3260065 - RNA, 19 nt, Artificial Sequence
  Description of Artificial Sequence: Synthetic oligonucleotide
ucuuguuccuagccacgcg

SEQ ID NO: 3260066 - RNA, 19 nt, Artificial Sequence
  Description of Artificial Sequence: Synthetic oligonucleotide
gauaaccagcagcagcuug

SEQ ID NO: 3260067 - RNA, 19 nt, Artificial Sequence
  Description of Artificial Sequence: Synthetic oligonucleotide
gacucuuguuccuagccac

SEQ ID NO: 3260068 - RNA, 19 nt, Artificial Sequence
  Description of Artificial Sequence: Synthetic oligonucleotide
auaaccagcagcagcuugg

SEQ ID NO: 3260069 - RNA, 19 nt, Artificial Sequence
  Description of Artificial Sequence: Synthetic oligonucleotide
uagaaguaaucaugguaug

SEQ ID NO: 3260070 - RNA, 19 nt, Artificial Sequence
  Description of Artificial Sequence: Synthetic oligonucleotide
aagacuuauuggccuucuc

SEQ ID NO: 3260071 - RNA, 19 nt, Artificial Sequence
  Description of Artificial Sequence: Synthetic oligonucleotide
gugagguacccgcaggugg

SEQ ID NO: 3260072 - RNA, 19 nt, Artificial Sequence
  Description of Artificial Sequence: Synthetic oligonucleotide
uuuguacauggucuguguc

SEQ ID NO: 3260073 - RNA, 19 nt, Artificial Sequence
  Description of Artificial Sequence: Synthetic oligonucleotide
aggugaaaaccgcugggag

SEQ ID NO: 3260074 - RNA, 19 nt, Artificial Sequence
  Description of Artificial Sequence: Synthetic oligonucleotide
uggguggaagaugauauca

SEQ ID NO: 3260075 - RNA, 19 nt, Artificial Sequence
  Description of Artificial Sequence: Synthetic oligonucleotide
acggcucugguuuccauuc

SEQ ID NO: 3260076 - RNA, 19 nt, Artificial Sequence
  Description of Artificial Sequence: Synthetic oligonucleotide
gugaaaaccgcugggagug

SEQ ID NO: 3260077 - RNA, 19 nt, Artificial Sequence
  Description of Artificial Sequence: Synthetic oligonucleotide
gauagcggagcucugugga

SEQ ID NO: 3260078 - RNA, 19 nt, Artificial Sequence
  Description of Artificial Sequence: Synthetic oligonucleotide
uuugguuagcucagacucu

SEQ ID NO: 3260079 - RNA, 19 nt, Artificial Sequence
  Description of Artificial Sequence: Synthetic oligonucleotide
uaaggguaaugguguagag

SEQ ID NO: 3260080 - RNA, 19 nt, Artificial Sequence
  Description of Artificial Sequence: Synthetic oligonucleotide
uccugacucgcuuuguaca

SEQ ID NO: 3260081 - RNA, 19 nt, Artificial Sequence
  Description of Artificial Sequence: Synthetic oligonucleotide
aauggcgaaaguaguccuc

SEQ ID NO: 3260082 - RNA, 19 nt, Artificial Sequence
  Description of Artificial Sequence: Synthetic oligonucleotide
aaaccccuaggcuguuuuc

SEQ ID NO: 3260083 - RNA, 19 nt, Artificial Sequence
  Description of Artificial Sequence: Synthetic oligonucleotide
ucgacaguggcgguuuugg

SEQ ID NO: 3260084 - RNA, 19 nt, Artificial Sequence
  Description of Artificial Sequence: Synthetic oligonucleotide
ucaaguccucauagaaggc

SEQ ID NO: 3260085 - RNA, 19 nt, Artificial Sequence
  Description of Artificial Sequence: Synthetic oligonucleotide
uacucucuguuuugguuag

SEQ ID NO: 3260086 - RNA, 19 nt, Artificial Sequence
  Description of Artificial Sequence: Synthetic oligonucleotide
acacucuguaggugaaaac

SEQ ID NO: 3260087 - RNA, 19 nt, Artificial Sequence
  Description of Artificial Sequence: Synthetic oligonucleotide
uuccaggugagguacccgc

SEQ ID NO: 3260088 - RNA, 19 nt, Artificial Sequence
  Description of Artificial Sequence: Synthetic oligonucleotide
aguggguguggugacaggg

SEQ ID NO: 3260089 - RNA, 19 nt, Artificial Sequence
  Description of Artificial Sequence: Synthetic oligonucleotide
caugaagucccggaggaag

SEQ ID NO: 3260090 - RNA, 19 nt, Artificial Sequence
  Description of Artificial Sequence: Synthetic oligonucleotide
guaaaagagcaucauguua

SEQ ID NO: 3260091 - RNA, 19 nt, Artificial Sequence
  Description of Artificial Sequence: Synthetic oligonucleotide
ugucuuccacucaaguccu

SEQ ID NO: 3260092 - RNA, 19 nt, Artificial Sequence
  Description of Artificial Sequence: Synthetic oligonucleotide
aguugguaaggguaauggu

SEQ ID NO: 3260093 - RNA, 19 nt, Artificial Sequence
  Description of Artificial Sequence: Synthetic oligonucleotide
uuggacacacucuguaggu

SEQ ID NO: 3260094 - RNA, 19 nt, Artificial Sequence
  Description of Artificial Sequence: Synthetic oligonucleotide
ugacugucugugcauuuca

SEQ ID NO: 3260095 - RNA, 19 nt, Artificial Sequence
  Description of Artificial Sequence: Synthetic oligonucleotide
aagggugaguuggugaaca

SEQ ID NO: 3260096 - RNA, 19 nt, Artificial Sequence
  Description of Artificial Sequence: Synthetic oligonucleotide
cuagccacgcgggugagcg

SEQ ID NO: 3260097 - RNA, 19 nt, Artificial Sequence
  Description of Artificial Sequence: Synthetic oligonucleotide
uccuccuccggacugcuga

SEQ ID NO: 3260098 - RNA, 19 nt, Artificial Sequence
  Description of Artificial Sequence: Synthetic oligonucleotide
uuggugaacagcaggucau

SEQ ID NO: 3260099 - RNA, 19 nt, Artificial Sequence
  Description of Artificial Sequence: Synthetic oligonucleotide
uauggcacgucguggguga

SEQ ID NO: 3260100 - RNA, 19 nt, Artificial Sequence
  Description of Artificial Sequence: Synthetic oligonucleotide
guagaaguaaucaugguau

SEQ ID NO: 3260101 - RNA, 19 nt, Artificial Sequence
  Description of Artificial Sequence: Synthetic oligonucleotide
cuguuuucgauagcggagc

SEQ ID NO: 3260102 - RNA, 19 nt, Artificial Sequence
  Description of Artificial Sequence: Synthetic oligonucleotide
agcaucauguuaaggauga

SEQ ID NO: 3260103 - RNA, 19 nt, Artificial Sequence
  Description of Artificial Sequence: Synthetic oligonucleotide
uguacauggucugugucuc

SEQ ID NO: 3260104 - RNA, 19 nt, Artificial Sequence
  Description of Artificial Sequence: Synthetic oligonucleotide
ucgauagcggagcucugug

SEQ ID NO: 3260105 - RNA, 19 nt, Artificial Sequence
  Description of Artificial Sequence: Synthetic oligonucleotide
aaacaagaaacccagacac

SEQ ID NO: 3260106 - RNA, 19 nt, Artificial Sequence
  Description of Artificial Sequence: Synthetic oligonucleotide
aauacauuaauauugaaau

SEQ ID NO: 3260107 - RNA, 19 nt, Artificial Sequence
  Description of Artificial Sequence: Synthetic oligonucleotide
aauaauugugagcacaugg

SEQ ID NO: 3260108 - RNA, 19 nt, Artificial Sequence
  Description of Artificial Sequence: Synthetic oligonucleotide
uuauuaauaaaauauauuc

SEQ ID NO: 3260109 - RNA, 19 nt, Artificial Sequence
  Description of Artificial Sequence: Synthetic oligonucleotide
aauaaaauauauucuauca

SEQ ID NO: 3260110 - RNA, 19 nt, Artificial Sequence
  Description of Artificial Sequence: Synthetic oligonucleotide
uauucuaucaucuauauuc

SEQ ID NO: 3260111 - RNA, 19 nt, Artificial Sequence
  Description of Artificial Sequence: Synthetic oligonucleotide
ugaauaaucacucuuuucc

SEQ ID NO: 3260112 - RNA, 19 nt, Artificial Sequence
  Description of Artificial Sequence: Synthetic oligonucleotide
aauuuuauuaauaaaauau

SEQ ID NO: 3260113 - RNA, 19 nt, Artificial Sequence
  Description of Artificial Sequence: Synthetic oligonucleotide
uaauauugaaaugagagag

SEQ ID NO: 3260114 - RNA, 19 nt, Artificial Sequence
  Description of Artificial Sequence: Synthetic oligonucleotide
auuaauauugaaaugagag

SEQ ID NO: 3260115 - RNA, 19 nt, Artificial Sequence
  Description of Artificial Sequence: Synthetic oligonucleotide
ucuauauucuuucuguggg

SEQ ID NO: 3260116 - RNA, 19 nt, Artificial Sequence
  Description of Artificial Sequence: Synthetic oligonucleotide
uauuaauaaaauauauucu

SEQ ID NO: 3260117 - RNA, 19 nt, Artificial Sequence
  Description of Artificial Sequence: Synthetic oligonucleotide
ucaguuaucaaacugcugu

SEQ ID NO: 3260118 - RNA, 19 nt, Artificial Sequence
  Description of Artificial Sequence: Synthetic oligonucleotide
uuuucaguuaucaaacugc

SEQ ID NO: 3260119 - RNA, 19 nt, Artificial Sequence
  Description of Artificial Sequence: Synthetic oligonucleotide
aaaugagagagugaggugg

SEQ ID NO: 3260120 - RNA, 19 nt, Artificial Sequence
  Description of Artificial Sequence: Synthetic oligonucleotide
uuuuauuaauaaaauauau

SEQ ID NO: 3260121 - RNA, 19 nt, Artificial Sequence
  Description of Artificial Sequence: Synthetic oligonucleotide
acaauaauaauugugagca

SEQ ID NO: 3260122 - RNA, 19 nt, Artificial Sequence
  Description of Artificial Sequence: Synthetic oligonucleotide
auugugagcacauggaaac

SEQ ID NO: 3260123 - RNA, 19 nt, Artificial Sequence
  Description of Artificial Sequence: Synthetic oligonucleotide
auauaauacauuaauauug

SEQ ID NO: 3260124 - RNA, 19 nt, Artificial Sequence
  Description of Artificial Sequence: Synthetic oligonucleotide
aauauauucuaucaucuau

SEQ ID NO: 3260125 - RNA, 19 nt, Artificial Sequence
  Description of Artificial Sequence: Synthetic oligonucleotide
acaaacaagaaacccagac

SEQ ID NO: 3260126 - RNA, 19 nt, Artificial Sequence
  Description of Artificial Sequence: Synthetic oligonucleotide
uauaauacauuaauauuga

SEQ ID NO: 3260127 - RNA, 19 nt, Artificial Sequence
  Description of Artificial Sequence: Synthetic oligonucleotide
uacauuaauauugaaauga

SEQ ID NO: 3260128 - RNA, 19 nt, Artificial Sequence
  Description of Artificial Sequence: Synthetic oligonucleotide
uuaauuuuauuaauaaaau

SEQ ID NO: 3260129 - RNA, 19 nt, Artificial Sequence
  Description of Artificial Sequence: Synthetic oligonucleotide
acauauaauacauuaauau

SEQ ID NO: 3260130 - RNA, 19 nt, Artificial Sequence
  Description of Artificial Sequence: Synthetic oligonucleotide
auuaauaaaauauauucua

SEQ ID NO: 3260131 - RNA, 19 nt, Artificial Sequence
  Description of Artificial Sequence: Synthetic oligonucleotide
uaaaauauauucuaucauc

SEQ ID NO: 3260132 - RNA, 19 nt, Artificial Sequence
  Description of Artificial Sequence: Synthetic oligonucleotide
auuaauuuuauuaauaaaa

SEQ ID NO: 3260133 - RNA, 19 nt, Artificial Sequence
  Description of Artificial Sequence: Synthetic oligonucleotide
auugaaaugagagagugag

SEQ ID NO: 3260134 - RNA, 19 nt, Artificial Sequence
  Description of Artificial Sequence: Synthetic oligonucleotide
uaauacauuaauauugaaa

SEQ ID NO: 3260135 - RNA, 19 nt, Artificial Sequence
  Description of Artificial Sequence: Synthetic oligonucleotide
uuacauauaauacauuaau

SEQ ID NO: 3260136 - RNA, 19 nt, Artificial Sequence
  Description of Artificial Sequence: Synthetic oligonucleotide
aguaguuacauauaauaca

SEQ ID NO: 3260137 - RNA, 19 nt, Artificial Sequence
  Description of Artificial Sequence: Synthetic oligonucleotide
aaguaguuacauauaauac

SEQ ID NO: 3260138 - RNA, 19 nt, Artificial Sequence
  Description of Artificial Sequence: Synthetic oligonucleotide
aauuaauuuuauuaauaaa

SEQ ID NO: 3260139 - RNA, 19 nt, Artificial Sequence
  Description of Artificial Sequence: Synthetic oligonucleotide
aauaauaauugugagcaca

SEQ ID NO: 3260140 - RNA, 19 nt, Artificial Sequence
  Description of Artificial Sequence: Synthetic oligonucleotide
aaaauauauucuaucaucu

SEQ ID NO: 3260141 - RNA, 19 nt, Artificial Sequence
  Description of Artificial Sequence: Synthetic oligonucleotide
uuuauuaauaaaauauauu

SEQ ID NO: 3260142 - RNA, 19 nt, Artificial Sequence
  Description of Artificial Sequence: Synthetic oligonucleotide
uuaauauugaaaugagaga

SEQ ID NO: 3260143 - RNA, 19 nt, Artificial Sequence
  Description of Artificial Sequence: Synthetic oligonucleotide
ugaagcauuugaauaauca

SEQ ID NO: 3260144 - RNA, 19 nt, Artificial Sequence
  Description of Artificial Sequence: Synthetic oligonucleotide
ucuaaaaccaacacacaca

SEQ ID NO: 3260145 - RNA, 19 nt, Artificial Sequence
  Description of Artificial Sequence: Synthetic oligonucleotide
uuaauaaaauauauucuau

SEQ ID NO: 3260146 - RNA, 19 nt, Artificial Sequence
  Description of Artificial Sequence: Synthetic oligonucleotide
uuuccaaguaguuacauau

SEQ ID NO: 3260147 - RNA, 19 nt, Artificial Sequence
  Description of Artificial Sequence: Synthetic oligonucleotide
uaauaaaauauauucuauc

SEQ ID NO: 3260148 - RNA, 19 nt, Artificial Sequence
  Description of Artificial Sequence: Synthetic oligonucleotide
ugaaaugagagagugaggu

SEQ ID NO: 3260149 - RNA, 19 nt, Artificial Sequence
  Description of Artificial Sequence: Synthetic oligonucleotide
uucuaaaaccaacacacac

SEQ ID NO: 3260150 - RNA, 19 nt, Artificial Sequence
  Description of Artificial Sequence: Synthetic oligonucleotide
aguuacauauaauacauua

SEQ ID NO: 3260151 - RNA, 19 nt, Artificial Sequence
  Description of Artificial Sequence: Synthetic oligonucleotide
aucuauauucuuucugugg

SEQ ID NO: 3260152 - RNA, 19 nt, Artificial Sequence
  Description of Artificial Sequence: Synthetic oligonucleotide
uuuaucaaggcccuucuaa

SEQ ID NO: 3260153 - RNA, 19 nt, Artificial Sequence
  Description of Artificial Sequence: Synthetic oligonucleotide
ucaucuauauucuuucugu

SEQ ID NO: 3260154 - RNA, 19 nt, Artificial Sequence
  Description of Artificial Sequence: Synthetic oligonucleotide
ugugggaugaagcauuuga

SEQ ID NO: 3260155 - RNA, 19 nt, Artificial Sequence
  Description of Artificial Sequence: Synthetic oligonucleotide
cacaauaauaauugugagc

SEQ ID NO: 3260156 - RNA, 19 nt, Artificial Sequence
  Description of Artificial Sequence: Synthetic oligonucleotide
uaauuuuauuaauaaaaua

SEQ ID NO: 3260157 - RNA, 19 nt, Artificial Sequence
  Description of Artificial Sequence: Synthetic oligonucleotide
cucuuuuccaaguaguuac

SEQ ID NO: 3260158 - RNA, 19 nt, Artificial Sequence
  Description of Artificial Sequence: Synthetic oligonucleotide
gacacaauaauaauuguga

SEQ ID NO: 3260159 - RNA, 19 nt, Artificial Sequence
  Description of Artificial Sequence: Synthetic oligonucleotide
auaaaauauauucuaucau

SEQ ID NO: 3260160 - RNA, 19 nt, Artificial Sequence
  Description of Artificial Sequence: Synthetic oligonucleotide
gaagcauuugaauaaucac

SEQ ID NO: 3260161 - RNA, 19 nt, Artificial Sequence
  Description of Artificial Sequence: Synthetic oligonucleotide
aucaaggcccuucuaaaac

SEQ ID NO: 3260162 - RNA, 19 nt, Artificial Sequence
  Description of Artificial Sequence: Synthetic oligonucleotide
ugauacaaacaagaaaccc

SEQ ID NO: 3260163 - RNA, 19 nt, Artificial Sequence
  Description of Artificial Sequence: Synthetic oligonucleotide
agcauuugaauaaucacuc

SEQ ID NO: 3260164 - RNA, 19 nt, Artificial Sequence
  Description of Artificial Sequence: Synthetic oligonucleotide
gauacaaacaagaaaccca

SEQ ID NO: 3260165 - RNA, 19 nt, Artificial Sequence
  Description of Artificial Sequence: Synthetic oligonucleotide
uugauacaaacaagaaacc

SEQ ID NO: 3260166 - RNA, 19 nt, Artificial Sequence
  Description of Artificial Sequence: Synthetic oligonucleotide
aauaaucacucuuuuccaa

SEQ ID NO: 3260167 - RNA, 19 nt, Artificial Sequence
  Description of Artificial Sequence: Synthetic oligonucleotide
auaaucacucuuuuccaag

SEQ ID NO: 3260168 - RNA, 19 nt, Artificial Sequence
  Description of Artificial Sequence: Synthetic oligonucleotide
ccuucuaaaaccaacacac

SEQ ID NO: 3260169 - RNA, 19 nt, Artificial Sequence
  Description of Artificial Sequence: Synthetic oligonucleotide
aagcauuugaauaaucacu

SEQ ID NO: 3260170 - RNA, 19 nt, Artificial Sequence
  Description of Artificial Sequence: Synthetic oligonucleotide
uacauauaauacauuaaua

SEQ ID NO: 3260171 - RNA, 19 nt, Artificial Sequence
  Description of Artificial Sequence: Synthetic oligonucleotide
auauugaaaugagagagug

SEQ ID NO: 3260172 - RNA, 19 nt, Artificial Sequence
  Description of Artificial Sequence: Synthetic oligonucleotide
ucuuucugugggaugaagc

SEQ ID NO: 3260173 - RNA, 19 nt, Artificial Sequence
  Description of Artificial Sequence: Synthetic oligonucleotide
acacaauaauaauugugag

SEQ ID NO: 3260174 - RNA, 19 nt, Artificial Sequence
  Description of Artificial Sequence: Synthetic oligonucleotide
uuucaguuaucaaacugcu

SEQ ID NO: 3260175 - RNA, 19 nt, Artificial Sequence
  Description of Artificial Sequence: Synthetic oligonucleotide
uccaaguaguuacauauaa

SEQ ID NO: 3260176 - RNA, 19 nt, Artificial Sequence
  Description of Artificial Sequence: Synthetic oligonucleotide
ucuaucaucuauauucuuu

SEQ ID NO: 3260177 - RNA, 19 nt, Artificial Sequence
  Description of Artificial Sequence: Synthetic oligonucleotide
aagaaacccagacacaaua

SEQ ID NO: 3260178 - RNA, 19 nt, Artificial Sequence
  Description of Artificial Sequence: Synthetic oligonucleotide
auacauuaauauugaaaug

SEQ ID NO: 3260179 - RNA, 19 nt, Artificial Sequence
  Description of Artificial Sequence: Synthetic oligonucleotide
cacauggaaacucugcuag

SEQ ID NO: 3260180 - RNA, 19 nt, Artificial Sequence
  Description of Artificial Sequence: Synthetic oligonucleotide
uauauucuaucaucuauau

SEQ ID NO: 3260181 - RNA, 19 nt, Artificial Sequence
  Description of Artificial Sequence: Synthetic oligonucleotide
uauucuuucugugggauga

SEQ ID NO: 3260182 - RNA, 19 nt, Artificial Sequence
  Description of Artificial Sequence: Synthetic oligonucleotide
cuaucaucuauauucuuuc

SEQ ID NO: 3260183 - RNA, 19 nt, Artificial Sequence
  Description of Artificial Sequence: Synthetic oligonucleotide
auacaaacaagaaacccag

SEQ ID NO: 3260184 - RNA, 19 nt, Artificial Sequence
  Description of Artificial Sequence: Synthetic oligonucleotide
aaauauauucuaucaucua

SEQ ID NO: 3260185 - RNA, 19 nt, Artificial Sequence
  Description of Artificial Sequence: Synthetic oligonucleotide
caauuaauuuuauuaauaa

SEQ ID NO: 3260186 - RNA, 19 nt, Artificial Sequence
  Description of Artificial Sequence: Synthetic oligonucleotide
aucaucuauauucuuucug

SEQ ID NO: 3260187 - RNA, 19 nt, Artificial Sequence
  Description of Artificial Sequence: Synthetic oligonucleotide
uccaauuaauuuuauuaau

SEQ ID NO: 3260188 - RNA, 19 nt, Artificial Sequence
  Description of Artificial Sequence: Synthetic oligonucleotide
gagagagugaggugggccg

SEQ ID NO: 3260189 - RNA, 19 nt, Artificial Sequence
  Description of Artificial Sequence: Synthetic oligonucleotide
uugaaaugagagagugagg

SEQ ID NO: 3260190 - RNA, 19 nt, Artificial Sequence
  Description of Artificial Sequence: Synthetic oligonucleotide
ucaaggcccuucuaaaacc

SEQ ID NO: 3260191 - RNA, 19 nt, Artificial Sequence
  Description of Artificial Sequence: Synthetic oligonucleotide
uaauugugagcacauggaa

SEQ ID NO: 3260192 - RNA, 19 nt, Artificial Sequence
  Description of Artificial Sequence: Synthetic oligonucleotide
caaguaguuacauauaaua

SEQ ID NO: 3260193 - RNA, 19 nt, Artificial Sequence
  Description of Artificial Sequence: Synthetic oligonucleotide
uuugaauaaucacucuuuu

SEQ ID NO: 3260194 - RNA, 19 nt, Artificial Sequence
  Description of Artificial Sequence: Synthetic oligonucleotide
aauauugaaaugagagagu

SEQ ID NO: 3260195 - RNA, 19 nt, Artificial Sequence
  Description of Artificial Sequence: Synthetic oligonucleotide
gaauaaucacucuuuucca

SEQ ID NO: 3260196 - RNA, 19 nt, Artificial Sequence
  Description of Artificial Sequence: Synthetic oligonucleotide
aucacucuuuuccaaguag

SEQ ID NO: 3260197 - RNA, 19 nt, Artificial Sequence
  Description of Artificial Sequence: Synthetic oligonucleotide
ucugcuaggcuccaauuaa

SEQ ID NO: 3260198 - RNA, 19 nt, Artificial Sequence
  Description of Artificial Sequence: Synthetic oligonucleotide
auuuuauuaauaaaauaua

SEQ ID NO: 3260199 - RNA, 19 nt, Artificial Sequence
  Description of Artificial Sequence: Synthetic oligonucleotide
uauugaaaugagagaguga

SEQ ID NO: 3260200 - RNA, 19 nt, Artificial Sequence
  Description of Artificial Sequence: Synthetic oligonucleotide
ccagacacaauaauaauug

SEQ ID NO: 3260201 - RNA, 19 nt, Artificial Sequence
  Description of Artificial Sequence: Synthetic oligonucleotide
ucacucuuuuccaaguagu

SEQ ID NO: 3260202 - RNA, 19 nt, Artificial Sequence
  Description of Artificial Sequence: Synthetic oligonucleotide
aaugagagagugagguggg

SEQ ID NO: 3260203 - RNA, 19 nt, Artificial Sequence
  Description of Artificial Sequence: Synthetic oligonucleotide
acauuaauauugaaaugag

SEQ ID NO: 3260204 - RNA, 19 nt, Artificial Sequence
  Description of Artificial Sequence: Synthetic oligonucleotide
aacccagacacaauaauaa

SEQ ID NO: 3260205 - RNA, 19 nt, Artificial Sequence
  Description of Artificial Sequence: Synthetic oligonucleotide
aauucuuugaaaucaaggg

SEQ ID NO: 3260206 - RNA, 19 nt, Artificial Sequence
  Description of Artificial Sequence: Synthetic oligonucleotide
ugugagaagaaacucauug

SEQ ID NO: 3260207 - RNA, 19 nt, Artificial Sequence
  Description of Artificial Sequence: Synthetic oligonucleotide
gaugaugaagaacacaucc

SEQ ID NO: 3260208 - RNA, 19 nt, Artificial Sequence
  Description of Artificial Sequence: Synthetic oligonucleotide
acagcauaaucauuuaacc

SEQ ID NO: 3260209 - RNA, 19 nt, Artificial Sequence
  Description of Artificial Sequence: Synthetic oligonucleotide
uuauugucauccaugaucc

SEQ ID NO: 3260210 - RNA, 19 nt, Artificial Sequence
  Description of Artificial Sequence: Synthetic oligonucleotide
uucaauaggaucaguagcc

SEQ ID NO: 3260211 - RNA, 19 nt, Artificial Sequence
  Description of Artificial Sequence: Synthetic oligonucleotide
uuuggcauuauaaacuuca

SEQ ID NO: 3260212 - RNA, 19 nt, Artificial Sequence
  Description of Artificial Sequence: Synthetic oligonucleotide
aaauucuuugaaaucaagg

SEQ ID NO: 3260213 - RNA, 19 nt, Artificial Sequence
  Description of Artificial Sequence: Synthetic oligonucleotide
aaauuuccgaaagacuugc

SEQ ID NO: 3260214 - RNA, 19 nt, Artificial Sequence
  Description of Artificial Sequence: Synthetic oligonucleotide
aagacuugcuccucugucc

SEQ ID NO: 3260215 - RNA, 19 nt, Artificial Sequence
  Description of Artificial Sequence: Synthetic oligonucleotide
agaagaaacucauugaagu

SEQ ID NO: 3260216 - RNA, 19 nt, Artificial Sequence
  Description of Artificial Sequence: Synthetic oligonucleotide
agcauaaucauuuaacccu

SEQ ID NO: 3260217 - RNA, 19 nt, Artificial Sequence
  Description of Artificial Sequence: Synthetic oligonucleotide
aaaagcuuucaugauuacc

SEQ ID NO: 3260218 - RNA, 19 nt, Artificial Sequence
  Description of Artificial Sequence: Synthetic oligonucleotide
uugucuaacuuccuaaaag

SEQ ID NO: 3260219 - RNA, 19 nt, Artificial Sequence
  Description of Artificial Sequence: Synthetic oligonucleotide
aaguuguccagaaauuucc

SEQ ID NO: 3260220 - RNA, 19 nt, Artificial Sequence
  Description of Artificial Sequence: Synthetic oligonucleotide
aaagcuuucaugauuaccu

SEQ ID NO: 3260221 - RNA, 19 nt, Artificial Sequence
  Description of Artificial Sequence: Synthetic oligonucleotide
ucuuaaugugagaagaaac

SEQ ID NO: 3260222 - RNA, 19 nt, Artificial Sequence
  Description of Artificial Sequence: Synthetic oligonucleotide
ugucuaacuuccuaaaagc

SEQ ID NO: 3260223 - RNA, 19 nt, Artificial Sequence
  Description of Artificial Sequence: Synthetic oligonucleotide
aagucuauggucccauuuc

SEQ ID NO: 3260224 - RNA, 19 nt, Artificial Sequence
  Description of Artificial Sequence: Synthetic oligonucleotide
aaagacuugcuccucuguc

SEQ ID NO: 3260225 - RNA, 19 nt, Artificial Sequence
  Description of Artificial Sequence: Synthetic oligonucleotide
gaaaucaaggguucgguug

SEQ ID NO: 3260226 - RNA, 19 nt, Artificial Sequence
  Description of Artificial Sequence: Synthetic oligonucleotide
uuuccgaaagacuugcucc

SEQ ID NO: 3260227 - RNA, 19 nt, Artificial Sequence
  Description of Artificial Sequence: Synthetic oligonucleotide
uuggauugccaucucacgg

SEQ ID NO: 3260228 - RNA, 19 nt, Artificial Sequence
  Description of Artificial Sequence: Synthetic oligonucleotide
uucaugauuaccucuuucc

SEQ ID NO: 3260229 - RNA, 19 nt, Artificial Sequence
  Description of Artificial Sequence: Synthetic oligonucleotide
uaaugugagaagaaacuca

SEQ ID NO: 3260230 - RNA, 19 nt, Artificial Sequence
  Description of Artificial Sequence: Synthetic oligonucleotide
aaucgaagucuuucaauag

SEQ ID NO: 3260231 - RNA, 19 nt, Artificial Sequence
  Description of Artificial Sequence: Synthetic oligonucleotide
gaucaguagccguagagag

SEQ ID NO: 3260232 - RNA, 19 nt, Artificial Sequence
  Description of Artificial Sequence: Synthetic oligonucleotide
ucauccaugauccgaaaca

SEQ ID NO: 3260233 - RNA, 19 nt, Artificial Sequence
  Description of Artificial Sequence: Synthetic oligonucleotide
ugagaagaaacucauugaa

SEQ ID NO: 3260234 - RNA, 19 nt, Artificial Sequence
  Description of Artificial Sequence: Synthetic oligonucleotide
aucaaaguuguccagaaau

SEQ ID NO: 3260235 - RNA, 19 nt, Artificial Sequence
  Description of Artificial Sequence: Synthetic oligonucleotide
uauaacaccaucuccaguu

SEQ ID NO: 3260236 - RNA, 19 nt, Artificial Sequence
  Description of Artificial Sequence: Synthetic oligonucleotide
cauuuugguacuuuggaug

SEQ ID NO: 3260237 - RNA, 19 nt, Artificial Sequence
  Description of Artificial Sequence: Synthetic oligonucleotide
cuuucaauaggaucaguag

SEQ ID NO: 3260238 - RNA, 19 nt, Artificial Sequence
  Description of Artificial Sequence: Synthetic oligonucleotide
aaugguuauaacaccaucu

SEQ ID NO: 3260239 - RNA, 19 nt, Artificial Sequence
  Description of Artificial Sequence: Synthetic oligonucleotide
  modified_base (5)..(5): a, c, u, g, unknown or other
agagnuuccaggcaguugu

SEQ ID NO: 3260240 - RNA, 19 nt, Artificial Sequence
  Description of Artificial Sequence: Synthetic oligonucleotide
ugaugaagaacacauccgu

SEQ ID NO: 3260241 - RNA, 19 nt, Artificial Sequence
  Description of Artificial Sequence: Synthetic oligonucleotide
uucuuugaaaucaaggguu

SEQ ID NO: 3260242 - RNA, 19 nt, Artificial Sequence
  Description of Artificial Sequence: Synthetic oligonucleotide
ugcauaguaguucaugaac

SEQ ID NO: 3260243 - RNA, 19 nt, Artificial Sequence
  Description of Artificial Sequence: Synthetic oligonucleotide
uggcauuauaaacuucacg

SEQ ID NO: 3260244 - RNA, 19 nt, Artificial Sequence
  Description of Artificial Sequence: Synthetic oligonucleotide
augguuauaacaccaucuc

SEQ ID NO: 3260245 - RNA, 19 nt, Artificial Sequence
  Description of Artificial Sequence: Synthetic oligonucleotide
cuagacauugcaaucgaag

SEQ ID NO: 3260246 - RNA, 19 nt, Artificial Sequence
  Description of Artificial Sequence: Synthetic oligonucleotide
aagaaacucauugaagucu

SEQ ID NO: 3260247 - RNA, 19 nt, Artificial Sequence
  Description of Artificial Sequence: Synthetic oligonucleotide
ucacguaggucuucaaugg

SEQ ID NO: 3260248 - RNA, 19 nt, Artificial Sequence
  Description of Artificial Sequence: Synthetic oligonucleotide
aucgaagucuuucaauagg

SEQ ID NO: 3260249 - RNA, 19 nt, Artificial Sequence
  Description of Artificial Sequence: Synthetic oligonucleotide
auuuccgaaagacuugcuc

SEQ ID NO: 3260250 - RNA, 19 nt, Artificial Sequence
  Description of Artificial Sequence: Synthetic oligonucleotide
aaaucaaggguucgguugu

SEQ ID NO: 3260251 - RNA, 19 nt, Artificial Sequence
  Description of Artificial Sequence: Synthetic oligonucleotide
uuugaaaucaaggguucgg

SEQ ID NO: 3260252 - RNA, 19 nt, Artificial Sequence
  Description of Artificial Sequence: Synthetic oligonucleotide
cuuccuaaaagcuuucaug

SEQ ID NO: 3260253 - RNA, 19 nt, Artificial Sequence
  Description of Artificial Sequence: Synthetic oligonucleotide
auaguaguucaugaacucc

SEQ ID NO: 3260254 - RNA, 19 nt, Artificial Sequence
  Description of Artificial Sequence: Synthetic oligonucleotide
auugcaaucgaagucuuuc

SEQ ID NO: 3260255 - RNA, 19 nt, Artificial Sequence
  Description of Artificial Sequence: Synthetic oligonucleotide
auuauaaacuucacguagg

SEQ ID NO: 3260256 - RNA, 19 nt, Artificial Sequence
  Description of Artificial Sequence: Synthetic oligonucleotide
auuaccucuuuccuggcuc

SEQ ID NO: 3260257 - RNA, 19 nt, Artificial Sequence
  Description of Artificial Sequence: Synthetic oligonucleotide
ucgguuguuauugucaucc

SEQ ID NO: 3260258 - RNA, 19 nt, Artificial Sequence
  Description of Artificial Sequence: Synthetic oligonucleotide
guucaugaacuccucaggg

SEQ ID NO: 3260259 - RNA, 19 nt, Artificial Sequence
  Description of Artificial Sequence: Synthetic oligonucleotide
auaaucauuuaacccuuuc

SEQ ID NO: 3260260 - RNA, 19 nt, Artificial Sequence
  Description of Artificial Sequence: Synthetic oligonucleotide
aguucaugaacuccucagg

SEQ ID NO: 3260261 - RNA, 19 nt, Artificial Sequence
  Description of Artificial Sequence: Synthetic oligonucleotide
ugauccgaaacacucugcc

SEQ ID NO: 3260262 - RNA, 19 nt, Artificial Sequence
  Description of Artificial Sequence: Synthetic oligonucleotide
uuauaaacuucacguaggu

SEQ ID NO: 3260263 - RNA, 19 nt, Artificial Sequence
  Description of Artificial Sequence: Synthetic oligonucleotide
uuuuccaugaccacagcau

SEQ ID NO: 3260264 - RNA, 19 nt, Artificial Sequence
  Description of Artificial Sequence: Synthetic oligonucleotide
cacagcauaaucauuuaac

SEQ ID NO: 3260265 - RNA, 19 nt, Artificial Sequence
  Description of Artificial Sequence: Synthetic oligonucleotide
uccaugauccgaaacacuc

SEQ ID NO: 3260266 - RNA, 19 nt, Artificial Sequence
  Description of Artificial Sequence: Synthetic oligonucleotide
ucaauggaugcacucacac

SEQ ID NO: 3260267 - RNA, 19 nt, Artificial Sequence
  Description of Artificial Sequence: Synthetic oligonucleotide
auuuugguacuuuggauga

SEQ ID NO: 3260268 - RNA, 19 nt, Artificial Sequence
  Description of Artificial Sequence: Synthetic oligonucleotide
ucgaagucuuucaauagga

SEQ ID NO: 3260269 - RNA, 19 nt, Artificial Sequence
  Description of Artificial Sequence: Synthetic oligonucleotide
cuuugaugccugcagagcc

SEQ ID NO: 3260270 - RNA, 19 nt, Artificial Sequence
  Description of Artificial Sequence: Synthetic oligonucleotide
augaagaacacauccgugu

SEQ ID NO: 3260271 - RNA, 19 nt, Artificial Sequence
  Description of Artificial Sequence: Synthetic oligonucleotide
uaguaguucaugaacuccu

SEQ ID NO: 3260272 - RNA, 19 nt, Artificial Sequence
  Description of Artificial Sequence: Synthetic oligonucleotide
gaagucuuucaauaggauc

SEQ ID NO: 3260273 - RNA, 19 nt, Artificial Sequence
  Description of Artificial Sequence: Synthetic oligonucleotide
ugcacucacaccugcauag

SEQ ID NO: 3260274 - RNA, 19 nt, Artificial Sequence
  Description of Artificial Sequence: Synthetic oligonucleotide
aaggguucgguuguuauug

SEQ ID NO: 3260275 - RNA, 19 nt, Artificial Sequence
  Description of Artificial Sequence: Synthetic oligonucleotide
ugguuauaacaccaucucc

SEQ ID NO: 3260276 - RNA, 19 nt, Artificial Sequence
  Description of Artificial Sequence: Synthetic oligonucleotide
uuugucauacggugaauca

SEQ ID NO: 3260277 - RNA, 19 nt, Artificial Sequence
  Description of Artificial Sequence: Synthetic oligonucleotide
aaaauucuuugaaaucaag

SEQ ID NO: 3260278 - RNA, 19 nt, Artificial Sequence
  Description of Artificial Sequence: Synthetic oligonucleotide
auuggauugccaucucacg

SEQ ID NO: 3260279 - RNA, 19 nt, Artificial Sequence
  Description of Artificial Sequence: Synthetic oligonucleotide
cugccaaggccuuugaugc

SEQ ID NO: 3260280 - RNA, 19 nt, Artificial Sequence
  Description of Artificial Sequence: Synthetic oligonucleotide
ucuaacuuccuaaaagcuu

SEQ ID NO: 3260281 - RNA, 19 nt, Artificial Sequence
  Description of Artificial Sequence: Synthetic oligonucleotide
guuauaacaccaucuccag

SEQ ID NO: 3260282 - RNA, 19 nt, Artificial Sequence
  Description of Artificial Sequence: Synthetic oligonucleotide
uacggugaaucaaaguugu

SEQ ID NO: 3260283 - RNA, 19 nt, Artificial Sequence
  Description of Artificial Sequence: Synthetic oligonucleotide
agaaauuuccgaaagacuu

SEQ ID NO: 3260284 - RNA, 19 nt, Artificial Sequence
  Description of Artificial Sequence: Synthetic oligonucleotide
ucaugauuaccucuuuccu

SEQ ID NO: 3260285 - RNA, 19 nt, Artificial Sequence
  Description of Artificial Sequence: Synthetic oligonucleotide
uuaaugugagaagaaacuc

SEQ ID NO: 3260286 - RNA, 19 nt, Artificial Sequence
  Description of Artificial Sequence: Synthetic oligonucleotide
ucaauaggaucaguagccg

SEQ ID NO: 3260287 - RNA, 19 nt, Artificial Sequence
  Description of Artificial Sequence: Synthetic oligonucleotide
ucaggggucaccaacccgu

SEQ ID NO: 3260288 - RNA, 19 nt, Artificial Sequence
  Description of Artificial Sequence: Synthetic oligonucleotide
gagaagaaacucauugaag

SEQ ID NO: 3260289 - RNA, 19 nt, Artificial Sequence
  Description of Artificial Sequence: Synthetic oligonucleotide
guuguuauugucauccaug

SEQ ID NO: 3260290 - RNA, 19 nt, Artificial Sequence
  Description of Artificial Sequence: Synthetic oligonucleotide
ugucauacggugaaucaaa

SEQ ID NO: 3260291 - RNA, 19 nt, Artificial Sequence
  Description of Artificial Sequence: Synthetic oligonucleotide
aaugugagaagaaacucau

SEQ ID NO: 3260292 - RNA, 19 nt, Artificial Sequence
  Description of Artificial Sequence: Synthetic oligonucleotide
caugauuaccucuuuccug

SEQ ID NO: 3260293 - RNA, 19 nt, Artificial Sequence
  Description of Artificial Sequence: Synthetic oligonucleotide
cuuuggaugauguuuggca

SEQ ID NO: 3260294 - RNA, 19 nt, Artificial Sequence
  Description of Artificial Sequence: Synthetic oligonucleotide
uggcuagacauugcaaucg

SEQ ID NO: 3260295 - RNA, 19 nt, Artificial Sequence
  Description of Artificial Sequence: Synthetic oligonucleotide
augaugaugaagaacacau

SEQ ID NO: 3260296 - RNA, 19 nt, Artificial Sequence
  Description of Artificial Sequence: Synthetic oligonucleotide
aaacacucugccaaggccu

SEQ ID NO: 3260297 - RNA, 19 nt, Artificial Sequence
  Description of Artificial Sequence: Synthetic oligonucleotide
uuuucuuggauuggauugc

SEQ ID NO: 3260298 - RNA, 19 nt, Artificial Sequence
  Description of Artificial Sequence: Synthetic oligonucleotide
uuuggaugauguuuggcau

SEQ ID NO: 3260299 - RNA, 19 nt, Artificial Sequence
  Description of Artificial Sequence: Synthetic oligonucleotide
gaaauuuccgaaagacuug

SEQ ID NO: 3260300 - RNA, 19 nt, Artificial Sequence
  Description of Artificial Sequence: Synthetic oligonucleotide
uuuugucuaacuuccuaaa

SEQ ID NO: 3260301 - RNA, 19 nt, Artificial Sequence
  Description of Artificial Sequence: Synthetic oligonucleotide
uuugaugccugcagagccc

SEQ ID NO: 3260302 - RNA, 19 nt, Artificial Sequence
  Description of Artificial Sequence: Synthetic oligonucleotide
ucuuggauuggauugccau

SEQ ID NO: 3260303 - RNA, 19 nt, Artificial Sequence
  Description of Artificial Sequence: Synthetic oligonucleotide
augaugaagaacacauccg

SEQ ID NO: 3260304 - RNA, 19 nt, Artificial Sequence
  Description of Artificial Sequence: Synthetic oligonucleotide
uuggauuggauugccaucu

SEQ ID NO: 3260305 - RNA, 19 nt, Artificial Sequence
  Description of Artificial Sequence: Synthetic oligonucleotide
aagacaagggccuccaccc

SEQ ID NO: 3260306 - RNA, 19 nt, Artificial Sequence
  Description of Artificial Sequence: Synthetic oligonucleotide
ucauagauggcaaacagga

SEQ ID NO: 3260307 - RNA, 19 nt, Artificial Sequence
  Description of Artificial Sequence: Synthetic oligonucleotide
agaucagagauguaguggg

SEQ ID NO: 3260308 - RNA, 19 nt, Artificial Sequence
  Description of Artificial Sequence: Synthetic oligonucleotide
uuugaguucaaagaggaug

SEQ ID NO: 3260309 - RNA, 19 nt, Artificial Sequence
  Description of Artificial Sequence: Synthetic oligonucleotide
uugaguucaaagaggaugc

SEQ ID NO: 3260310 - RNA, 19 nt, Artificial Sequence
  Description of Artificial Sequence: Synthetic oligonucleotide
aauggggcuguucaggguc

SEQ ID NO: 3260311 - RNA, 19 nt, Artificial Sequence
  Description of Artificial Sequence: Synthetic oligonucleotide
ugccucagcacccaaaagg

SEQ ID NO: 3260312 - RNA, 19 nt, Artificial Sequence
  Description of Artificial Sequence: Synthetic oligonucleotide
aaaaggguggacaacuugg

SEQ ID NO: 3260313 - RNA, 19 nt, Artificial Sequence
  Description of Artificial Sequence: Synthetic oligonucleotide
gauccuuggauuuccagcc

SEQ ID NO: 3260314 - RNA, 19 nt, Artificial Sequence
  Description of Artificial Sequence: Synthetic oligonucleotide
ugcuuugaguucaaagagg

SEQ ID NO: 3260315 - RNA, 19 nt, Artificial Sequence
  Description of Artificial Sequence: Synthetic oligonucleotide
cuuuauccgagucaggaag

SEQ ID NO: 3260316 - RNA, 19 nt, Artificial Sequence
  Description of Artificial Sequence: Synthetic oligonucleotide
aagaggaugcuguugagaa

SEQ ID NO: 3260317 - RNA, 19 nt, Artificial Sequence
  Description of Artificial Sequence: Synthetic oligonucleotide
auagauggcaaacaggaau

SEQ ID NO: 3260318 - RNA, 19 nt, Artificial Sequence
  Description of Artificial Sequence: Synthetic oligonucleotide
aaggguggacaacuuggcc

SEQ ID NO: 3260319 - RNA, 19 nt, Artificial Sequence
  Description of Artificial Sequence: Synthetic oligonucleotide
uagauggcaaacaggaaug

SEQ ID NO: 3260320 - RNA, 19 nt, Artificial Sequence
  Description of Artificial Sequence: Synthetic oligonucleotide
gaguaccgcucauagaugg

SEQ ID NO: 3260321 - RNA, 19 nt, Artificial Sequence
  Description of Artificial Sequence: Synthetic oligonucleotide
aaaagugcagggcaccuga

SEQ ID NO: 3260322 - RNA, 19 nt, Artificial Sequence
  Description of Artificial Sequence: Synthetic oligonucleotide
uucagggucacauccagug

SEQ ID NO: 3260323 - RNA, 19 nt, Artificial Sequence
  Description of Artificial Sequence: Synthetic oligonucleotide
ucuagaucagagauguagu

SEQ ID NO: 3260324 - RNA, 19 nt, Artificial Sequence
  Description of Artificial Sequence: Synthetic oligonucleotide
ucaugcuggaagacaaggg

SEQ ID NO: 3260325 - RNA, 19 nt, Artificial Sequence
  Description of Artificial Sequence: Synthetic oligonucleotide
agauccugcagguuguagg

SEQ ID NO: 3260326 - RNA, 19 nt, Artificial Sequence
  Description of Artificial Sequence: Synthetic oligonucleotide
uagaucagagauguagugg

SEQ ID NO: 3260327 - RNA, 19 nt, Artificial Sequence
  Description of Artificial Sequence: Synthetic oligonucleotide
ucagcacccaaaagggugg

SEQ ID NO: 3260328 - RNA, 19 nt, Artificial Sequence
  Description of Artificial Sequence: Synthetic oligonucleotide
uggcaaacaggaauggggc

SEQ ID NO: 3260329 - RNA, 19 nt, Artificial Sequence
  Description of Artificial Sequence: Synthetic oligonucleotide
gucuagaucagagauguag

SEQ ID NO: 3260330 - RNA, 19 nt, Artificial Sequence
  Description of Artificial Sequence: Synthetic oligonucleotide
caugcuggaagacaagggc

SEQ ID NO: 3260331 - RNA, 19 nt, Artificial Sequence
  Description of Artificial Sequence: Synthetic oligonucleotide
gaagacaagggccuccacc

SEQ ID NO: 3260332 - RNA, 19 nt, Artificial Sequence
  Description of Artificial Sequence: Synthetic oligonucleotide
aaaggguggacaacuuggc

SEQ ID NO: 3260333 - RNA, 19 nt, Artificial Sequence
  Description of Artificial Sequence: Synthetic oligonucleotide
acugaucuugcccagauuu

SEQ ID NO: 3260334 - RNA, 19 nt, Artificial Sequence
  Description of Artificial Sequence: Synthetic oligonucleotide
uucuuuauccgagucagga

SEQ ID NO: 3260335 - RNA, 19 nt, Artificial Sequence
  Description of Artificial Sequence: Synthetic oligonucleotide
aggguuacccacucugccc

SEQ ID NO: 3260336 - RNA, 19 nt, Artificial Sequence
  Description of Artificial Sequence: Synthetic oligonucleotide
auggcaaacaggaaugggg

SEQ ID NO: 3260337 - RNA, 19 nt, Artificial Sequence
  Description of Artificial Sequence: Synthetic oligonucleotide
aucagagauguaguggggc

SEQ ID NO: 3260338 - RNA, 19 nt, Artificial Sequence
  Description of Artificial Sequence: Synthetic oligonucleotide
cugcuuugaguucaaagag

SEQ ID NO: 3260339 - RNA, 19 nt, Artificial Sequence
  Description of Artificial Sequence: Synthetic oligonucleotide
uguucagggucacauccag

SEQ ID NO: 3260340 - RNA, 19 nt, Artificial Sequence
  Description of Artificial Sequence: Synthetic oligonucleotide
gagucaggaagucaugcug

SEQ ID NO: 3260341 - RNA, 19 nt, Artificial Sequence
  Description of Artificial Sequence: Synthetic oligonucleotide
acaggaauggggcuguuca

SEQ ID NO: 3260342 - RNA, 19 nt, Artificial Sequence
  Description of Artificial Sequence: Synthetic oligonucleotide
uccuuggauuuccagccgg

SEQ ID NO: 3260343 - RNA, 19 nt, Artificial Sequence
  Description of Artificial Sequence: Synthetic oligonucleotide
cuagaucagagauguagug

SEQ ID NO: 3260344 - RNA, 19 nt, Artificial Sequence
  Description of Artificial Sequence: Synthetic oligonucleotide
uuuauccgagucaggaagu

SEQ ID NO: 3260345 - RNA, 19 nt, Artificial Sequence
  Description of Artificial Sequence: Synthetic oligonucleotide
cucagcacccaaaagggug

SEQ ID NO: 3260346 - RNA, 19 nt, Artificial Sequence
  Description of Artificial Sequence: Synthetic oligonucleotide
agcagacucgguuggcugc

SEQ ID NO: 3260347 - RNA, 19 nt, Artificial Sequence
  Description of Artificial Sequence: Synthetic oligonucleotide
aguucaaagaggaugcugu

SEQ ID NO: 3260348 - RNA, 19 nt, Artificial Sequence
  Description of Artificial Sequence: Synthetic oligonucleotide
ugagccagacugcuuagca

SEQ ID NO: 3260349 - RNA, 19 nt, Artificial Sequence
  Description of Artificial Sequence: Synthetic oligonucleotide
gauguaguggggcuggauc

SEQ ID NO: 3260350 - RNA, 19 nt, Artificial Sequence
  Description of Artificial Sequence: Synthetic oligonucleotide
uuugccucagcacccaaaa

SEQ ID NO: 3260351 - RNA, 19 nt, Artificial Sequence
  Description of Artificial Sequence: Synthetic oligonucleotide
uugagaaccucucccacuc

SEQ ID NO: 3260352 - RNA, 19 nt, Artificial Sequence
  Description of Artificial Sequence: Synthetic oligonucleotide
ugcuuagcagacucgguug

SEQ ID NO: 3260353 - RNA, 19 nt, Artificial Sequence
  Description of Artificial Sequence: Synthetic oligonucleotide
accugcuuugaguucaaag

SEQ ID NO: 3260354 - RNA, 19 nt, Artificial Sequence
  Description of Artificial Sequence: Synthetic oligonucleotide
gguagggucaggcggaugg

SEQ ID NO: 3260355 - RNA, 19 nt, Artificial Sequence
  Description of Artificial Sequence: Synthetic oligonucleotide
aggguggacaacuuggccu

SEQ ID NO: 3260356 - RNA, 19 nt, Artificial Sequence
  Description of Artificial Sequence: Synthetic oligonucleotide
accugaguaccgcucauag

SEQ ID NO: 3260357 - RNA, 19 nt, Artificial Sequence
  Description of Artificial Sequence: Synthetic oligonucleotide
ugaucuugcccagauuugc

SEQ ID NO: 3260358 - RNA, 19 nt, Artificial Sequence
  Description of Artificial Sequence: Synthetic oligonucleotide
aaagaggaugcuguugaga

SEQ ID NO: 3260359 - RNA, 19 nt, Artificial Sequence
  Description of Artificial Sequence: Synthetic oligonucleotide
gauggcaaacaggaauggg

SEQ ID NO: 3260360 - RNA, 19 nt, Artificial Sequence
  Description of Artificial Sequence: Synthetic oligonucleotide
gacaacuuggccugggcca

SEQ ID NO: 3260361 - RNA, 19 nt, Artificial Sequence
  Description of Artificial Sequence: Synthetic oligonucleotide
gacugcuuagcagacucgg

SEQ ID NO: 3260362 - RNA, 19 nt, Artificial Sequence
  Description of Artificial Sequence: Synthetic oligonucleotide
agucaggaagucaugcugg

SEQ ID NO: 3260363 - RNA, 19 nt, Artificial Sequence
  Description of Artificial Sequence: Synthetic oligonucleotide
ugcuggaagacaagggccu

SEQ ID NO: 3260364 - RNA, 19 nt, Artificial Sequence
  Description of Artificial Sequence: Synthetic oligonucleotide
aaccucucccacucugggg

SEQ ID NO: 3260365 - RNA, 19 nt, Artificial Sequence
  Description of Artificial Sequence: Synthetic oligonucleotide
uguugagaaccucucccac

SEQ ID NO: 3260366 - RNA, 19 nt, Artificial Sequence
  Description of Artificial Sequence: Synthetic oligonucleotide
agaggaugcuguugagaac

SEQ ID NO: 3260367 - RNA, 19 nt, Artificial Sequence
  Description of Artificial Sequence: Synthetic oligonucleotide
gaaccucucccacucuggg

SEQ ID NO: 3260368 - RNA, 19 nt, Artificial Sequence
  Description of Artificial Sequence: Synthetic oligonucleotide
gucaugcuggaagacaagg

SEQ ID NO: 3260369 - RNA, 19 nt, Artificial Sequence
  Description of Artificial Sequence: Synthetic oligonucleotide
ugaggguuacccacucugc

SEQ ID NO: 3260370 - RNA, 19 nt, Artificial Sequence
  Description of Artificial Sequence: Synthetic oligonucleotide
uucaaagaggaugcuguug

SEQ ID NO: 3260371 - RNA, 19 nt, Artificial Sequence
  Description of Artificial Sequence: Synthetic oligonucleotide
cagggucacauccagugcc

SEQ ID NO: 3260372 - RNA, 19 nt, Artificial Sequence
  Description of Artificial Sequence: Synthetic oligonucleotide
agccagacugcuuagcaga

SEQ ID NO: 3260373 - RNA, 19 nt, Artificial Sequence
  Description of Artificial Sequence: Synthetic oligonucleotide
auguaguggggcuggauca

SEQ ID NO: 3260374 - RNA, 19 nt, Artificial Sequence
  Description of Artificial Sequence: Synthetic oligonucleotide
cagauuugccucagcaccc

SEQ ID NO: 3260375 - RNA, 19 nt, Artificial Sequence
  Description of Artificial Sequence: Synthetic oligonucleotide
ggagguggguucuuuaucc

SEQ ID NO: 3260376 - RNA, 19 nt, Artificial Sequence
  Description of Artificial Sequence: Synthetic oligonucleotide
uuggauuuccagccggggu

SEQ ID NO: 3260377 - RNA, 19 nt, Artificial Sequence
  Description of Artificial Sequence: Synthetic oligonucleotide
ccagauuugccucagcacc

SEQ ID NO: 3260378 - RNA, 19 nt, Artificial Sequence
  Description of Artificial Sequence: Synthetic oligonucleotide
uauggcaccaggccucaca

SEQ ID NO: 3260379 - RNA, 19 nt, Artificial Sequence
  Description of Artificial Sequence: Synthetic oligonucleotide
gagguggguucuuuauccg

SEQ ID NO: 3260380 - RNA, 19 nt, Artificial Sequence
  Description of Artificial Sequence: Synthetic oligonucleotide
gaggguuacccacucugcc

SEQ ID NO: 3260381 - RNA, 19 nt, Artificial Sequence
  Description of Artificial Sequence: Synthetic oligonucleotide
acauccagugccucgggug

SEQ ID NO: 3260382 - RNA, 19 nt, Artificial Sequence
  Description of Artificial Sequence: Synthetic oligonucleotide
ugaguaccgcucauagaug

SEQ ID NO: 3260383 - RNA, 19 nt, Artificial Sequence
  Description of Artificial Sequence: Synthetic oligonucleotide
aggaagucaugcuggaaga

SEQ ID NO: 3260384 - RNA, 19 nt, Artificial Sequence
  Description of Artificial Sequence: Synthetic oligonucleotide
gauccugcagguuguagga

SEQ ID NO: 3260385 - RNA, 19 nt, Artificial Sequence
  Description of Artificial Sequence: Synthetic oligonucleotide
agagauguaguggggcugg

SEQ ID NO: 3260386 - RNA, 19 nt, Artificial Sequence
  Description of Artificial Sequence: Synthetic oligonucleotide
aggagguggguucuuuauc

SEQ ID NO: 3260387 - RNA, 19 nt, Artificial Sequence
  Description of Artificial Sequence: Synthetic oligonucleotide
ugcuguugagaaccucucc

SEQ ID NO: 3260388 - RNA, 19 nt, Artificial Sequence
  Description of Artificial Sequence: Synthetic oligonucleotide
cugaggguuacccacucug

SEQ ID NO: 3260389 - RNA, 19 nt, Artificial Sequence
  Description of Artificial Sequence: Synthetic oligonucleotide
cacccugucuagaucagag

SEQ ID NO: 3260390 - RNA, 19 nt, Artificial Sequence
  Description of Artificial Sequence: Synthetic oligonucleotide
ggauccuuggauuuccagc

SEQ ID NO: 3260391 - RNA, 19 nt, Artificial Sequence
  Description of Artificial Sequence: Synthetic oligonucleotide
caaaaggguggacaacuug

SEQ ID NO: 3260392 - RNA, 19 nt, Artificial Sequence
  Description of Artificial Sequence: Synthetic oligonucleotide
cacucugaggguuacccac

SEQ ID NO: 3260393 - RNA, 19 nt, Artificial Sequence
  Description of Artificial Sequence: Synthetic oligonucleotide
ucuuuauccgagucaggaa

SEQ ID NO: 3260394 - RNA, 19 nt, Artificial Sequence
  Description of Artificial Sequence: Synthetic oligonucleotide
gcuguucagggucacaucc

SEQ ID NO: 3260395 - RNA, 19 nt, Artificial Sequence
  Description of Artificial Sequence: Synthetic oligonucleotide
aggaauggggcuguucagg

SEQ ID NO: 3260396 - RNA, 19 nt, Artificial Sequence
  Description of Artificial Sequence: Synthetic oligonucleotide
ucagggucacauccagugc

SEQ ID NO: 3260397 - RNA, 19 nt, Artificial Sequence
  Description of Artificial Sequence: Synthetic oligonucleotide
aagucaugcuggaagacaa

SEQ ID NO: 3260398 - RNA, 19 nt, Artificial Sequence
  Description of Artificial Sequence: Synthetic oligonucleotide
accucucccacucuggggu

SEQ ID NO: 3260399 - RNA, 19 nt, Artificial Sequence
  Description of Artificial Sequence: Synthetic oligonucleotide
cacacucugaggguuaccc

SEQ ID NO: 3260400 - RNA, 19 nt, Artificial Sequence
  Description of Artificial Sequence: Synthetic oligonucleotide
cagacugcuuagcagacuc

SEQ ID NO: 3260401 - RNA, 19 nt, Artificial Sequence
  Description of Artificial Sequence: Synthetic oligonucleotide
gcuguugagaaccucuccc

SEQ ID NO: 3260402 - RNA, 19 nt, Artificial Sequence
  Description of Artificial Sequence: Synthetic oligonucleotide
gagaaccucucccacucug

SEQ ID NO: 3260403 - RNA, 19 nt, Artificial Sequence
  Description of Artificial Sequence: Synthetic oligonucleotide
auggcaccaggccucacag

SEQ ID NO: 3260404 - RNA, 19 nt, Artificial Sequence
  Description of Artificial Sequence: Synthetic oligonucleotide
gaucagagauguagugggg

SEQ ID NO: 3260405 - RNA, 19 nt, Artificial Sequence
  Description of Artificial Sequence: Synthetic oligonucleotide
uauugagugacccacaggu

SEQ ID NO: 3260406 - RNA, 19 nt, Artificial Sequence
  Description of Artificial Sequence: Synthetic oligonucleotide
aauggugcuauugagugac

SEQ ID NO: 3260407 - RNA, 19 nt, Artificial Sequence
  Description of Artificial Sequence: Synthetic oligonucleotide
uauccuagugcauugaugu

SEQ ID NO: 3260408 - RNA, 19 nt, Artificial Sequence
  Description of Artificial Sequence: Synthetic oligonucleotide
auaucguacggccucaugg

SEQ ID NO: 3260409 - RNA, 19 nt, Artificial Sequence
  Description of Artificial Sequence: Synthetic oligonucleotide
gucuuagucaucaacaccg

SEQ ID NO: 3260410 - RNA, 19 nt, Artificial Sequence
  Description of Artificial Sequence: Synthetic oligonucleotide
cuuuguggugcccauaucg

SEQ ID NO: 3260411 - RNA, 19 nt, Artificial Sequence
  Description of Artificial Sequence: Synthetic oligonucleotide
uuagucaucaacaccgggu

SEQ ID NO: 3260412 - RNA, 19 nt, Artificial Sequence
  Description of Artificial Sequence: Synthetic oligonucleotide
ugcacuggugucauggagg

SEQ ID NO: 3260413 - RNA, 19 nt, Artificial Sequence
  Description of Artificial Sequence: Synthetic oligonucleotide
uugagugacccacaggucu

SEQ ID NO: 3260414 - RNA, 19 nt, Artificial Sequence
  Description of Artificial Sequence: Synthetic oligonucleotide
agcagcaguagcuucgugg

SEQ ID NO: 3260415 - RNA, 19 nt, Artificial Sequence
  Description of Artificial Sequence: Synthetic oligonucleotide
uguggaauggugcuauuga

SEQ ID NO: 3260416 - RNA, 19 nt, Artificial Sequence
  Description of Artificial Sequence: Synthetic oligonucleotide
gaggccacauucuucaugc

SEQ ID NO: 3260417 - RNA, 19 nt, Artificial Sequence
  Description of Artificial Sequence: Synthetic oligonucleotide
acaggucuuagucaucaac

SEQ ID NO: 3260418 - RNA, 19 nt, Artificial Sequence
  Description of Artificial Sequence: Synthetic oligonucleotide
uagagcagcaguagcuucg

SEQ ID NO: 3260419 - RNA, 19 nt, Artificial Sequence
  Description of Artificial Sequence: Synthetic oligonucleotide
uccuagugcauugaugugg

SEQ ID NO: 3260420 - RNA, 19 nt, Artificial Sequence
  Description of Artificial Sequence: Synthetic oligonucleotide
ugucauggaggccacauuc

SEQ ID NO: 3260421 - RNA, 19 nt, Artificial Sequence
  Description of Artificial Sequence: Synthetic oligonucleotide
aggucuuagucaucaacac

SEQ ID NO: 3260422 - RNA, 19 nt, Artificial Sequence
  Description of Artificial Sequence: Synthetic oligonucleotide
uuauccuagugcauugaug

SEQ ID NO: 3260423 - RNA, 19 nt, Artificial Sequence
  Description of Artificial Sequence: Synthetic oligonucleotide
uguagugcuucccggauac

SEQ ID NO: 3260424 - RNA, 19 nt, Artificial Sequence
  Description of Artificial Sequence: Synthetic oligonucleotide
acgggagugccccacaugg

SEQ ID NO: 3260425 - RNA, 19 nt, Artificial Sequence
  Description of Artificial Sequence: Synthetic oligonucleotide
uucuucaugcccagcuugg

SEQ ID NO: 3260426 - RNA, 19 nt, Artificial Sequence
  Description of Artificial Sequence: Synthetic oligonucleotide
ucuuagucaucaacaccgg

SEQ ID NO: 3260427 - RNA, 19 nt, Artificial Sequence
  Description of Artificial Sequence: Synthetic oligonucleotide
ggaauggugcuauugagug

SEQ ID NO: 3260428 - RNA, 19 nt, Artificial Sequence
  Description of Artificial Sequence: Synthetic oligonucleotide
uguggugcccauaucguac

SEQ ID NO: 3260429 - RNA, 19 nt, Artificial Sequence
  Description of Artificial Sequence: Synthetic oligonucleotide
uccauagagcagcaguagc

SEQ ID NO: 3260430 - RNA, 19 nt, Artificial Sequence
  Description of Artificial Sequence: Synthetic oligonucleotide
acauucuucaugcccagcu

SEQ ID NO: 3260431 - RNA, 19 nt, Artificial Sequence
  Description of Artificial Sequence: Synthetic oligonucleotide
ugacccacaggucuuaguc

SEQ ID NO: 3260432 - RNA, 19 nt, Artificial Sequence
  Description of Artificial Sequence: Synthetic oligonucleotide
uggaauggugcuauugagu

SEQ ID NO: 3260433 - RNA, 19 nt, Artificial Sequence
  Description of Artificial Sequence: Synthetic oligonucleotide
auucuucaugcccagcuug

SEQ ID NO: 3260434 - RNA, 19 nt, Artificial Sequence
  Description of Artificial Sequence: Synthetic oligonucleotide
aucaacaccggguacggga

SEQ ID NO: 3260435 - RNA, 19 nt, Artificial Sequence
  Description of Artificial Sequence: Synthetic oligonucleotide
uuuguggugcccauaucgu

SEQ ID NO: 3260436 - RNA, 19 nt, Artificial Sequence
  Description of Artificial Sequence: Synthetic oligonucleotide
ucaacaccggguacgggag

SEQ ID NO: 3260437 - RNA, 19 nt, Artificial Sequence
  Description of Artificial Sequence: Synthetic oligonucleotide
auagagcagcaguagcuuc

SEQ ID NO: 3260438 - RNA, 19 nt, Artificial Sequence
  Description of Artificial Sequence: Synthetic oligonucleotide
cuuggcuccauagagcagc

SEQ ID NO: 3260439 - RNA, 19 nt, Artificial Sequence
  Description of Artificial Sequence: Synthetic oligonucleotide
uucuuauccuagugcauug

SEQ ID NO: 3260440 - RNA, 19 nt, Artificial Sequence
  Description of Artificial Sequence: Synthetic oligonucleotide
auggaggccacauucuuca

SEQ ID NO: 3260441 - RNA, 19 nt, Artificial Sequence
  Description of Artificial Sequence: Synthetic oligonucleotide
gucaucaacaccggguacg

SEQ ID NO: 3260442 - RNA, 19 nt, Artificial Sequence
  Description of Artificial Sequence: Synthetic oligonucleotide
agcuuggcuccauagagca

SEQ ID NO: 3260443 - RNA, 19 nt, Artificial Sequence
  Description of Artificial Sequence: Synthetic oligonucleotide
uaucguacggccucaugga

SEQ ID NO: 3260444 - RNA, 19 nt, Artificial Sequence
  Description of Artificial Sequence: Synthetic oligonucleotide
agcuucguggcuuuguggu

SEQ ID NO: 3260445 - RNA, 19 nt, Artificial Sequence
  Description of Artificial Sequence: Synthetic oligonucleotide
cuuagucaucaacaccggg

SEQ ID NO: 3260446 - RNA, 19 nt, Artificial Sequence
  Description of Artificial Sequence: Synthetic oligonucleotide
acuggugucauggaggcca

SEQ ID NO: 3260447 - RNA, 19 nt, Artificial Sequence
  Description of Artificial Sequence: Synthetic oligonucleotide
uagucaucaacaccgggua

SEQ ID NO: 3260448 - RNA, 19 nt, Artificial Sequence
  Description of Artificial Sequence: Synthetic oligonucleotide
ucaucaacaccggguacgg

SEQ ID NO: 3260449 - RNA, 19 nt, Artificial Sequence
  Description of Artificial Sequence: Synthetic oligonucleotide
agucaucaacaccggguac

SEQ ID NO: 3260450 - RNA, 19 nt, Artificial Sequence
  Description of Artificial Sequence: Synthetic oligonucleotide
uucaugcccagcuuggcuc

SEQ ID NO: 3260451 - RNA, 19 nt, Artificial Sequence
  Description of Artificial Sequence: Synthetic oligonucleotide
guggaauggugcuauugag

SEQ ID NO: 3260452 - RNA, 19 nt, Artificial Sequence
  Description of Artificial Sequence: Synthetic oligonucleotide
agcugcacuggugucaugg

SEQ ID NO: 3260453 - RNA, 19 nt, Artificial Sequence
  Description of Artificial Sequence: Synthetic oligonucleotide
caggucuuagucaucaaca

SEQ ID NO: 3260454 - RNA, 19 nt, Artificial Sequence
  Description of Artificial Sequence: Synthetic oligonucleotide
cuauugagugacccacagg

SEQ ID NO: 3260455 - RNA, 19 nt, Artificial Sequence
  Description of Artificial Sequence: Synthetic oligonucleotide
agugcuucccggauacccc

SEQ ID NO: 3260456 - RNA, 19 nt, Artificial Sequence
  Description of Artificial Sequence: Synthetic oligonucleotide
auaccccgcugccaguccc

SEQ ID NO: 3260457 - RNA, 19 nt, Artificial Sequence
  Description of Artificial Sequence: Synthetic oligonucleotide
uagcuucguggcuuugugg

SEQ ID NO: 3260458 - RNA, 19 nt, Artificial Sequence
  Description of Artificial Sequence: Synthetic oligonucleotide
uagugcuucccggauaccc

SEQ ID NO: 3260459 - RNA, 19 nt, Artificial Sequence
  Description of Artificial Sequence: Synthetic oligonucleotide
ucauggagugccguguccc

SEQ ID NO: 3260460 - RNA, 19 nt, Artificial Sequence
  Description of Artificial Sequence: Synthetic oligonucleotide
uccccuucuuauccuagug

SEQ ID NO: 3260461 - RNA, 19 nt, Artificial Sequence
  Description of Artificial Sequence: Synthetic oligonucleotide
gugcccauaucguacggcc

SEQ ID NO: 3260462 - RNA, 19 nt, Artificial Sequence
  Description of Artificial Sequence: Synthetic oligonucleotide
uucccggauaccccgcugc

SEQ ID NO: 3260463 - RNA, 19 nt, Artificial Sequence
  Description of Artificial Sequence: Synthetic oligonucleotide
uguccccuucuuauccuag

SEQ ID NO: 3260464 - RNA, 19 nt, Artificial Sequence
  Description of Artificial Sequence: Synthetic oligonucleotide
uggugcuauugagugaccc

SEQ ID NO: 3260465 - RNA, 19 nt, Artificial Sequence
  Description of Artificial Sequence: Synthetic oligonucleotide
cuucguggcuuuguggugc

SEQ ID NO: 3260466 - RNA, 19 nt, Artificial Sequence
  Description of Artificial Sequence: Synthetic oligonucleotide
ugcuauugagugacccaca

SEQ ID NO: 3260467 - RNA, 19 nt, Artificial Sequence
  Description of Artificial Sequence: Synthetic oligonucleotide
guggugcccauaucguacg

SEQ ID NO: 3260468 - RNA, 19 nt, Artificial Sequence
  Description of Artificial Sequence: Synthetic oligonucleotide
ggucuuagucaucaacacc

SEQ ID NO: 3260469 - RNA, 19 nt, Artificial Sequence
  Description of Artificial Sequence: Synthetic oligonucleotide
aucguacggccucauggag

SEQ ID NO: 3260470 - RNA, 19 nt, Artificial Sequence
  Description of Artificial Sequence: Synthetic oligonucleotide
ucguacggccucauggagu

SEQ ID NO: 3260471 - RNA, 19 nt, Artificial Sequence
  Description of Artificial Sequence: Synthetic oligonucleotide
ucaugcccagcuuggcucc

SEQ ID NO: 3260472 - RNA, 19 nt, Artificial Sequence
  Description of Artificial Sequence: Synthetic oligonucleotide
ucccgugccagcugcacug

SEQ ID NO: 3260473 - RNA, 19 nt, Artificial Sequence
  Description of Artificial Sequence: Synthetic oligonucleotide
guagcuucguggcuuugug

SEQ ID NO: 3260474 - RNA, 19 nt, Artificial Sequence
  Description of Artificial Sequence: Synthetic oligonucleotide
ccuagugcauugauguggg

SEQ ID NO: 3260475 - RNA, 19 nt, Artificial Sequence
  Description of Artificial Sequence: Synthetic oligonucleotide
gcuauugagugacccacag

SEQ ID NO: 3260476 - RNA, 19 nt, Artificial Sequence
  Description of Artificial Sequence: Synthetic oligonucleotide
aacaccggguacgggagug

SEQ ID NO: 3260477 - RNA, 19 nt, Artificial Sequence
  Description of Artificial Sequence: Synthetic oligonucleotide
gcagcaguagcuucguggc

SEQ ID NO: 3260478 - RNA, 19 nt, Artificial Sequence
  Description of Artificial Sequence: Synthetic oligonucleotide
ucuuauccuagugcauuga

SEQ ID NO: 3260479 - RNA, 19 nt, Artificial Sequence
  Description of Artificial Sequence: Synthetic oligonucleotide
gaauggugcuauugaguga

SEQ ID NO: 3260480 - RNA, 19 nt, Artificial Sequence
  Description of Artificial Sequence: Synthetic oligonucleotide
cauggaggccacauucuuc

SEQ ID NO: 3260481 - RNA, 19 nt, Artificial Sequence
  Description of Artificial Sequence: Synthetic oligonucleotide
cagcuuggcuccauagagc

SEQ ID NO: 3260482 - RNA, 19 nt, Artificial Sequence
  Description of Artificial Sequence: Synthetic oligonucleotide
ucauggaggccacauucuu

SEQ ID NO: 3260483 - RNA, 19 nt, Artificial Sequence
  Description of Artificial Sequence: Synthetic oligonucleotide
uacggccucauggagugcc

SEQ ID NO: 3260484 - RNA, 19 nt, Artificial Sequence
  Description of Artificial Sequence: Synthetic oligonucleotide
auugagugacccacagguc

SEQ ID NO: 3260485 - RNA, 19 nt, Artificial Sequence
  Description of Artificial Sequence: Synthetic oligonucleotide
acccacaggucuuagucau

SEQ ID NO: 3260486 - RNA, 19 nt, Artificial Sequence
  Description of Artificial Sequence: Synthetic oligonucleotide
gugcuucccggauaccccg

SEQ ID NO: 3260487 - RNA, 19 nt, Artificial Sequence
  Description of Artificial Sequence: Synthetic oligonucleotide
gugcuauugagugacccac

SEQ ID NO: 3260488 - RNA, 19 nt, Artificial Sequence
  Description of Artificial Sequence: Synthetic oligonucleotide
ccagcuuggcuccauagag

SEQ ID NO: 3260489 - RNA, 19 nt, Artificial Sequence
  Description of Artificial Sequence: Synthetic oligonucleotide
uggugcccauaucguacgg

SEQ ID NO: 3260490 - RNA, 19 nt, Artificial Sequence
  Description of Artificial Sequence: Synthetic oligonucleotide
gacccacaggucuuaguca

SEQ ID NO: 3260491 - RNA, 19 nt, Artificial Sequence
  Description of Artificial Sequence: Synthetic oligonucleotide
auccuagugcauugaugug

SEQ ID NO: 3260492 - RNA, 19 nt, Artificial Sequence
  Description of Artificial Sequence: Synthetic oligonucleotide
ugagugacccacaggucuu

SEQ ID NO: 3260493 - RNA, 19 nt, Artificial Sequence
  Description of Artificial Sequence: Synthetic oligonucleotide
cuccauagagcagcaguag

SEQ ID NO: 3260494 - RNA, 19 nt, Artificial Sequence
  Description of Artificial Sequence: Synthetic oligonucleotide
ggccacauucuucaugccc

SEQ ID NO: 3260495 - RNA, 19 nt, Artificial Sequence
  Description of Artificial Sequence: Synthetic oligonucleotide
ugccguguccccuucuuau

SEQ ID NO: 3260496 - RNA, 19 nt, Artificial Sequence
  Description of Artificial Sequence: Synthetic oligonucleotide
aggccacauucuucaugcc

SEQ ID NO: 3260497 - RNA, 19 nt, Artificial Sequence
  Description of Artificial Sequence: Synthetic oligonucleotide
cugcacuggugucauggag

SEQ ID NO: 3260498 - RNA, 19 nt, Artificial Sequence
  Description of Artificial Sequence: Synthetic oligonucleotide
cauggagugccgugucccc

SEQ ID NO: 3260499 - RNA, 19 nt, Artificial Sequence
  Description of Artificial Sequence: Synthetic oligonucleotide
uuggcuccauagagcagca

SEQ ID NO: 3260500 - RNA, 19 nt, Artificial Sequence
  Description of Artificial Sequence: Synthetic oligonucleotide
cucauggagugccgugucc

SEQ ID NO: 3260501 - RNA, 19 nt, Artificial Sequence
  Description of Artificial Sequence: Synthetic oligonucleotide
uacgggagugccccacaug

SEQ ID NO: 3260502 - RNA, 19 nt, Artificial Sequence
  Description of Artificial Sequence: Synthetic oligonucleotide
ugcccauaucguacggccu

SEQ ID NO: 3260503 - RNA, 19 nt, Artificial Sequence
  Description of Artificial Sequence: Synthetic oligonucleotide
ucuucaugcccagcuuggc

SEQ ID NO: 3260504 - RNA, 19 nt, Artificial Sequence
  Description of Artificial Sequence: Synthetic oligonucleotide
uuguggugcccauaucgua

SEQ ID NO: 3260505 - RNA, 19 nt, Artificial Sequence
  Description of Artificial Sequence: Synthetic oligonucleotide
gauccuaaaguucacagug

SEQ ID NO: 3260506 - RNA, 19 nt, Artificial Sequence
  Description of Artificial Sequence: Synthetic oligonucleotide
gaugauagcgucuucauga

SEQ ID NO: 3260507 - RNA, 19 nt, Artificial Sequence
  Description of Artificial Sequence: Synthetic oligonucleotide
agggauauguuacaggcac

SEQ ID NO: 3260508 - RNA, 19 nt, Artificial Sequence
  Description of Artificial Sequence: Synthetic oligonucleotide
ucagagauccuaaaguuca

SEQ ID NO: 3260509 - RNA, 19 nt, Artificial Sequence
  Description of Artificial Sequence: Synthetic oligonucleotide
ucuucaugagacauguuag

SEQ ID NO: 3260510 - RNA, 19 nt, Artificial Sequence
  Description of Artificial Sequence: Synthetic oligonucleotide
ucagggauauguuacaggc

SEQ ID NO: 3260511 - RNA, 19 nt, Artificial Sequence
  Description of Artificial Sequence: Synthetic oligonucleotide
uguggugaaagccaggugu

SEQ ID NO: 3260512 - RNA, 19 nt, Artificial Sequence
  Description of Artificial Sequence: Synthetic oligonucleotide
caagauguacugaugauag

SEQ ID NO: 3260513 - RNA, 19 nt, Artificial Sequence
  Description of Artificial Sequence: Synthetic oligonucleotide
uacaaauauaggaaagcgc

SEQ ID NO: 3260514 - RNA, 19 nt, Artificial Sequence
  Description of Artificial Sequence: Synthetic oligonucleotide
ucuacggagcacaucaggg

SEQ ID NO: 3260515 - RNA, 19 nt, Artificial Sequence
  Description of Artificial Sequence: Synthetic oligonucleotide
agauguacugaugauagcg

SEQ ID NO: 3260516 - RNA, 19 nt, Artificial Sequence
  Description of Artificial Sequence: Synthetic oligonucleotide
auauguuacaggcaccuuc

SEQ ID NO: 3260517 - RNA, 19 nt, Artificial Sequence
  Description of Artificial Sequence: Synthetic oligonucleotide
uauguuacaggcaccuucc

SEQ ID NO: 3260518 - RNA, 19 nt, Artificial Sequence
  Description of Artificial Sequence: Synthetic oligonucleotide
acaaauauaggaaagcgcu

SEQ ID NO: 3260519 - RNA, 19 nt, Artificial Sequence
  Description of Artificial Sequence: Synthetic oligonucleotide
aaauauaggaaagcgcucu

SEQ ID NO: 3260520 - RNA, 19 nt, Artificial Sequence
  Description of Artificial Sequence: Synthetic oligonucleotide
cuacaaauauaggaaagcg

SEQ ID NO: 3260521 - RNA, 19 nt, Artificial Sequence
  Description of Artificial Sequence: Synthetic oligonucleotide
aagauguacugaugauagc

SEQ ID NO: 3260522 - RNA, 19 nt, Artificial Sequence
  Description of Artificial Sequence: Synthetic oligonucleotide
uucaugagacauguuagcg

SEQ ID NO: 3260523 - RNA, 19 nt, Artificial Sequence
  Description of Artificial Sequence: Synthetic oligonucleotide
gagauccuaaaguucacag

SEQ ID NO: 3260524 - RNA, 19 nt, Artificial Sequence
  Description of Artificial Sequence: Synthetic oligonucleotide
gauagcgucuucaugagac

SEQ ID NO: 3260525 - RNA, 19 nt, Artificial Sequence
  Description of Artificial Sequence: Synthetic oligonucleotide
uccucagagauccuaaagu

SEQ ID NO: 3260526 - RNA, 19 nt, Artificial Sequence
  Description of Artificial Sequence: Synthetic oligonucleotide
ucaugagacauguuagcgc

SEQ ID NO: 3260527 - RNA, 19 nt, Artificial Sequence
  Description of Artificial Sequence: Synthetic oligonucleotide
aaagcgcucugucaccagg

SEQ ID NO: 3260528 - RNA, 19 nt, Artificial Sequence
  Description of Artificial Sequence: Synthetic oligonucleotide
aauauaggaaagcgcucug

SEQ ID NO: 3260529 - RNA, 19 nt, Artificial Sequence
  Description of Artificial Sequence: Synthetic oligonucleotide
uggcccuacaaauauagga

SEQ ID NO: 3260530 - RNA, 19 nt, Artificial Sequence
  Description of Artificial Sequence: Synthetic oligonucleotide
uaggaaagcgcucugucac

SEQ ID NO: 3260531 - RNA, 19 nt, Artificial Sequence
  Description of Artificial Sequence: Synthetic oligonucleotide
guguaggucacauccaugc

SEQ ID NO: 3260532 - RNA, 19 nt, Artificial Sequence
  Description of Artificial Sequence: Synthetic oligonucleotide
cacaucagggauauguuac

SEQ ID NO: 3260533 - RNA, 19 nt, Artificial Sequence
  Description of Artificial Sequence: Synthetic oligonucleotide
uguacugaugauagcgucu

SEQ ID NO: 3260534 - RNA, 19 nt, Artificial Sequence
  Description of Artificial Sequence: Synthetic oligonucleotide
guuacaggcaccuuccuca

SEQ ID NO: 3260535 - RNA, 19 nt, Artificial Sequence
  Description of Artificial Sequence: Synthetic oligonucleotide
auguacugaugauagcguc

SEQ ID NO: 3260536 - RNA, 19 nt, Artificial Sequence
  Description of Artificial Sequence: Synthetic oligonucleotide
acaggcaccuuccucagag

SEQ ID NO: 3260537 - RNA, 19 nt, Artificial Sequence
  Description of Artificial Sequence: Synthetic oligonucleotide
uguccuguggugaaagcca

SEQ ID NO: 3260538 - RNA, 19 nt, Artificial Sequence
  Description of Artificial Sequence: Synthetic oligonucleotide
agacauguuagcgcugucc

SEQ ID NO: 3260539 - RNA, 19 nt, Artificial Sequence
  Description of Artificial Sequence: Synthetic oligonucleotide
uauaggaaagcgcucuguc

SEQ ID NO: 3260540 - RNA, 19 nt, Artificial Sequence
  Description of Artificial Sequence: Synthetic oligonucleotide
aucagggauauguuacagg

SEQ ID NO: 3260541 - RNA, 19 nt, Artificial Sequence
  Description of Artificial Sequence: Synthetic oligonucleotide
cuucaugagacauguuagc

SEQ ID NO: 3260542 - RNA, 19 nt, Artificial Sequence
  Description of Artificial Sequence: Synthetic oligonucleotide
uuccucagagauccuaaag

SEQ ID NO: 3260543 - RNA, 19 nt, Artificial Sequence
  Description of Artificial Sequence: Synthetic oligonucleotide
uaggucacauccaugccug

SEQ ID NO: 3260544 - RNA, 19 nt, Artificial Sequence
  Description of Artificial Sequence: Synthetic oligonucleotide
ugaugauagcgucuucaug

SEQ ID NO: 3260545 - RNA, 19 nt, Artificial Sequence
  Description of Artificial Sequence: Synthetic oligonucleotide
gaaagccagguguagguca

SEQ ID NO: 3260546 - RNA, 19 nt, Artificial Sequence
  Description of Artificial Sequence: Synthetic oligonucleotide
aggaaagcgcucugucacc

SEQ ID NO: 3260547 - RNA, 19 nt, Artificial Sequence
  Description of Artificial Sequence: Synthetic oligonucleotide
auaggaaagcgcucuguca

SEQ ID NO: 3260548 - RNA, 19 nt, Artificial Sequence
  Description of Artificial Sequence: Synthetic oligonucleotide
uguaggucacauccaugcc

SEQ ID NO: 3260549 - RNA, 19 nt, Artificial Sequence
  Description of Artificial Sequence: Synthetic oligonucleotide
aaagccagguguaggucac

SEQ ID NO: 3260550 - RNA, 19 nt, Artificial Sequence
  Description of Artificial Sequence: Synthetic oligonucleotide
cucucuacggagcacauca

SEQ ID NO: 3260551 - RNA, 19 nt, Artificial Sequence
  Description of Artificial Sequence: Synthetic oligonucleotide
ccagguguaggucacaucc

SEQ ID NO: 3260552 - RNA, 19 nt, Artificial Sequence
  Description of Artificial Sequence: Synthetic oligonucleotide
agauccuaaaguucacagu

SEQ ID NO: 3260553 - RNA, 19 nt, Artificial Sequence
  Description of Artificial Sequence: Synthetic oligonucleotide
augauagcgucuucaugag

SEQ ID NO: 3260554 - RNA, 19 nt, Artificial Sequence
  Description of Artificial Sequence: Synthetic oligonucleotide
cucagagauccuaaaguuc

SEQ ID NO: 3260555 - RNA, 19 nt, Artificial Sequence
  Description of Artificial Sequence: Synthetic oligonucleotide
caaauauaggaaagcgcuc

SEQ ID NO: 3260556 - RNA, 19 nt, Artificial Sequence
  Description of Artificial Sequence: Synthetic oligonucleotide
gucuucaugagacauguua

SEQ ID NO: 3260557 - RNA, 19 nt, Artificial Sequence
  Description of Artificial Sequence: Synthetic oligonucleotide
caugccugcucucucuacg

SEQ ID NO: 3260558 - RNA, 19 nt, Artificial Sequence
  Description of Artificial Sequence: Synthetic oligonucleotide
uguuacaggcaccuuccuc

SEQ ID NO: 3260559 - RNA, 19 nt, Artificial Sequence
  Description of Artificial Sequence: Synthetic oligonucleotide
uacggagcacaucagggau

SEQ ID NO: 3260560 - RNA, 19 nt, Artificial Sequence
  Description of Artificial Sequence: Synthetic oligonucleotide
cucuacggagcacaucagg

SEQ ID NO: 3260561 - RNA, 19 nt, Artificial Sequence
  Description of Artificial Sequence: Synthetic oligonucleotide
acugaugauagcgucuuca

SEQ ID NO: 3260562 - RNA, 19 nt, Artificial Sequence
  Description of Artificial Sequence: Synthetic oligonucleotide
aagcgcucugucaccaggc

SEQ ID NO: 3260563 - RNA, 19 nt, Artificial Sequence
  Description of Artificial Sequence: Synthetic oligonucleotide
ucaccaggccuccaagaug

SEQ ID NO: 3260564 - RNA, 19 nt, Artificial Sequence
  Description of Artificial Sequence: Synthetic oligonucleotide
uguuagcgcuguccugugg

SEQ ID NO: 3260565 - RNA, 19 nt, Artificial Sequence
  Description of Artificial Sequence: Synthetic oligonucleotide
ucacauccaugccugcucu

SEQ ID NO: 3260566 - RNA, 19 nt, Artificial Sequence
  Description of Artificial Sequence: Synthetic oligonucleotide
ugagacauguuagcgcugu

SEQ ID NO: 3260567 - RNA, 19 nt, Artificial Sequence
  Description of Artificial Sequence: Synthetic oligonucleotide
augccugcucucucuacgg

SEQ ID NO: 3260568 - RNA, 19 nt, Artificial Sequence
  Description of Artificial Sequence: Synthetic oligonucleotide
acaucagggauauguuaca

SEQ ID NO: 3260569 - RNA, 19 nt, Artificial Sequence
  Description of Artificial Sequence: Synthetic oligonucleotide
agcgcucugucaccaggcc

SEQ ID NO: 3260570 - RNA, 19 nt, Artificial Sequence
  Description of Artificial Sequence: Synthetic oligonucleotide
cuccaagauguacugauga

SEQ ID NO: 3260571 - RNA, 19 nt, Artificial Sequence
  Description of Artificial Sequence: Synthetic oligonucleotide
uuacaggcaccuuccucag

SEQ ID NO: 3260572 - RNA, 19 nt, Artificial Sequence
  Description of Artificial Sequence: Synthetic oligonucleotide
ugauagcgucuucaugaga

SEQ ID NO: 3260573 - RNA, 19 nt, Artificial Sequence
  Description of Artificial Sequence: Synthetic oligonucleotide
uccaagauguacugaugau

SEQ ID NO: 3260574 - RNA, 19 nt, Artificial Sequence
  Description of Artificial Sequence: Synthetic oligonucleotide
caugagacauguuagcgcu

SEQ ID NO: 3260575 - RNA, 19 nt, Artificial Sequence
  Description of Artificial Sequence: Synthetic oligonucleotide
ucugucaccaggccuccaa

SEQ ID NO: 3260576 - RNA, 19 nt, Artificial Sequence
  Description of Artificial Sequence: Synthetic oligonucleotide
cuguccuguggugaaagcc

SEQ ID NO: 3260577 - RNA, 19 nt, Artificial Sequence
  Description of Artificial Sequence: Synthetic oligonucleotide
ccuacaaauauaggaaagc

SEQ ID NO: 3260578 - RNA, 19 nt, Artificial Sequence
  Description of Artificial Sequence: Synthetic oligonucleotide
ucucuacggagcacaucag

SEQ ID NO: 3260579 - RNA, 19 nt, Artificial Sequence
  Description of Artificial Sequence: Synthetic oligonucleotide
gcaccuuccucagagaucc

SEQ ID NO: 3260580 - RNA, 19 nt, Artificial Sequence
  Description of Artificial Sequence: Synthetic oligonucleotide
gacauguuagcgcuguccu

SEQ ID NO: 3260581 - RNA, 19 nt, Artificial Sequence
  Description of Artificial Sequence: Synthetic oligonucleotide
ugucaccaggccuccaaga

SEQ ID NO: 3260582 - RNA, 19 nt, Artificial Sequence
  Description of Artificial Sequence: Synthetic oligonucleotide
uccuguggugaaagccagg

SEQ ID NO: 3260583 - RNA, 19 nt, Artificial Sequence
  Description of Artificial Sequence: Synthetic oligonucleotide
gagcacaucagggauaugu

SEQ ID NO: 3260584 - RNA, 19 nt, Artificial Sequence
  Description of Artificial Sequence: Synthetic oligonucleotide
caucagggauauguuacag

SEQ ID NO: 3260585 - RNA, 19 nt, Artificial Sequence
  Description of Artificial Sequence: Synthetic oligonucleotide
auauaggaaagcgcucugu

SEQ ID NO: 3260586 - RNA, 19 nt, Artificial Sequence
  Description of Artificial Sequence: Synthetic oligonucleotide
cuggcccuacaaauauagg

SEQ ID NO: 3260587 - RNA, 19 nt, Artificial Sequence
  Description of Artificial Sequence: Synthetic oligonucleotide
ggugaaagccagguguagg

SEQ ID NO: 3260588 - RNA, 19 nt, Artificial Sequence
  Description of Artificial Sequence: Synthetic oligonucleotide
auagcgucuucaugagaca

SEQ ID NO: 3260589 - RNA, 19 nt, Artificial Sequence
  Description of Artificial Sequence: Synthetic oligonucleotide
acauguuagcgcuguccug

SEQ ID NO: 3260590 - RNA, 19 nt, Artificial Sequence
  Description of Artificial Sequence: Synthetic oligonucleotide
cccuacaaauauaggaaag

SEQ ID NO: 3260591 - RNA, 19 nt, Artificial Sequence
  Description of Artificial Sequence: Synthetic oligonucleotide
uuagcgcuguccuguggug

SEQ ID NO: 3260592 - RNA, 19 nt, Artificial Sequence
  Description of Artificial Sequence: Synthetic oligonucleotide
agguguaggucacauccau

SEQ ID NO: 3260593 - RNA, 19 nt, Artificial Sequence
  Description of Artificial Sequence: Synthetic oligonucleotide
agagauccuaaaguucaca

SEQ ID NO: 3260594 - RNA, 19 nt, Artificial Sequence
  Description of Artificial Sequence: Synthetic oligonucleotide
gaaagcgcucugucaccag

SEQ ID NO: 3260595 - RNA, 19 nt, Artificial Sequence
  Description of Artificial Sequence: Synthetic oligonucleotide
uggugaaagccagguguag

SEQ ID NO: 3260596 - RNA, 19 nt, Artificial Sequence
  Description of Artificial Sequence: Synthetic oligonucleotide
guaggucacauccaugccu

SEQ ID NO: 3260597 - RNA, 19 nt, Artificial Sequence
  Description of Artificial Sequence: Synthetic oligonucleotide
gucacauccaugccugcuc

SEQ ID NO: 3260598 - RNA, 19 nt, Artificial Sequence
  Description of Artificial Sequence: Synthetic oligonucleotide
gcuggcccuacaaauauag

SEQ ID NO: 3260599 - RNA, 19 nt, Artificial Sequence
  Description of Artificial Sequence: Synthetic oligonucleotide
aggucacauccaugccugc

SEQ ID NO: 3260600 - RNA, 19 nt, Artificial Sequence
  Description of Artificial Sequence: Synthetic oligonucleotide
aggccuccaagauguacug

SEQ ID NO: 3260601 - RNA, 19 nt, Artificial Sequence
  Description of Artificial Sequence: Synthetic oligonucleotide
ugaaagccagguguagguc

SEQ ID NO: 3260602 - RNA, 19 nt, Artificial Sequence
  Description of Artificial Sequence: Synthetic oligonucleotide
cuacggagcacaucaggga

SEQ ID NO: 3260603 - RNA, 19 nt, Artificial Sequence
  Description of Artificial Sequence: Synthetic oligonucleotide
aggcaccuuccucagagau

SEQ ID NO: 3260604 - RNA, 19 nt, Artificial Sequence
  Description of Artificial Sequence: Synthetic oligonucleotide
gauguacugaugauagcgu

SEQ ID NO: 3260605 - RNA, 19 nt, Artificial Sequence
  Description of Artificial Sequence: Synthetic oligonucleotide
auuaaaauuuuauuuggcc

SEQ ID NO: 3260606 - RNA, 19 nt, Artificial Sequence
  Description of Artificial Sequence: Synthetic oligonucleotide
uuaauuaaaauuuuauuug

SEQ ID NO: 3260607 - RNA, 19 nt, Artificial Sequence
  Description of Artificial Sequence: Synthetic oligonucleotide
uuuaauuaaaauuuuauuu

SEQ ID NO: 3260608 - RNA, 19 nt, Artificial Sequence
  Description of Artificial Sequence: Synthetic oligonucleotide
uaauuaaaauuuuauuugg

SEQ ID NO: 3260609 - RNA, 19 nt, Artificial Sequence
  Description of Artificial Sequence: Synthetic oligonucleotide
aacagaaacuacucggccc

SEQ ID NO: 3260610 - RNA, 19 nt, Artificial Sequence
  Description of Artificial Sequence: Synthetic oligonucleotide
aauuaaaauuuuauuuggc

SEQ ID NO: 3260611 - RNA, 19 nt, Artificial Sequence
  Description of Artificial Sequence: Synthetic oligonucleotide
uuaaaauuuuauuuggccu

SEQ ID NO: 3260612 - RNA, 19 nt, Artificial Sequence
  Description of Artificial Sequence: Synthetic oligonucleotide
uaaaauuuuauuuggccug

SEQ ID NO: 3260613 - RNA, 19 nt, Artificial Sequence
  Description of Artificial Sequence: Synthetic oligonucleotide
aaagguacaucugacacuc

SEQ ID NO: 3260614 - RNA, 19 nt, Artificial Sequence
  Description of Artificial Sequence: Synthetic oligonucleotide
aacacaauaggccuuuucu

SEQ ID NO: 3260615 - RNA, 19 nt, Artificial Sequence
  Description of Artificial Sequence: Synthetic oligonucleotide
ugagcgaacacaauaggcc

SEQ ID NO: 3260616 - RNA, 19 nt, Artificial Sequence
  Description of Artificial Sequence: Synthetic oligonucleotide
ucaugcaaaagguacaucu

SEQ ID NO: 3260617 - RNA, 19 nt, Artificial Sequence
  Description of Artificial Sequence: Synthetic oligonucleotide
auuuuauuuggccuggcag

SEQ ID NO: 3260618 - RNA, 19 nt, Artificial Sequence
  Description of Artificial Sequence: Synthetic oligonucleotide
agugguaaggcacggaagg

SEQ ID NO: 3260619 - RNA, 19 nt, Artificial Sequence
  Description of Artificial Sequence: Synthetic oligonucleotide
uuuuaauuaaaauuuuauu

SEQ ID NO: 3260620 - RNA, 19 nt, Artificial Sequence
  Description of Artificial Sequence: Synthetic oligonucleotide
aaaauuuuauuuggccugg

SEQ ID NO: 3260621 - RNA, 19 nt, Artificial Sequence
  Description of Artificial Sequence: Synthetic oligonucleotide
aauaggccuuuucuuggcc

SEQ ID NO: 3260622 - RNA, 19 nt, Artificial Sequence
  Description of Artificial Sequence: Synthetic oligonucleotide
ucaguaaugaagcgauggg

SEQ ID NO: 3260623 - RNA, 19 nt, Artificial Sequence
  Description of Artificial Sequence: Synthetic oligonucleotide
cuuuucuuggcccagcggg

SEQ ID NO: 3260624 - RNA, 19 nt, Artificial Sequence
  Description of Artificial Sequence: Synthetic oligonucleotide
acaucugacacucauccag

SEQ ID NO: 3260625 - RNA, 19 nt, Artificial Sequence
  Description of Artificial Sequence: Synthetic oligonucleotide
uuuuauuuggccuggcaga

SEQ ID NO: 3260626 - RNA, 19 nt, Artificial Sequence
  Description of Artificial Sequence: Synthetic oligonucleotide
guacaucugacacucaucc

SEQ ID NO: 3260627 - RNA, 19 nt, Artificial Sequence
  Description of Artificial Sequence: Synthetic oligonucleotide
caaaagguacaucugacac

SEQ ID NO: 3260628 - RNA, 19 nt, Artificial Sequence
  Description of Artificial Sequence: Synthetic oligonucleotide
aaaagguacaucugacacu

SEQ ID NO: 3260629 - RNA, 19 nt, Artificial Sequence
  Description of Artificial Sequence: Synthetic oligonucleotide
uauuuggccuggcagaagc

SEQ ID NO: 3260630 - RNA, 19 nt, Artificial Sequence
  Description of Artificial Sequence: Synthetic oligonucleotide
auagcugucacugaccauc

SEQ ID NO: 3260631 - RNA, 19 nt, Artificial Sequence
  Description of Artificial Sequence: Synthetic oligonucleotide
aacuacucggcccuccagg

SEQ ID NO: 3260632 - RNA, 19 nt, Artificial Sequence
  Description of Artificial Sequence: Synthetic oligonucleotide
gagaacacagccuucucag

SEQ ID NO: 3260633 - RNA, 19 nt, Artificial Sequence
  Description of Artificial Sequence: Synthetic oligonucleotide
acaauaggccuuuucuugg

SEQ ID NO: 3260634 - RNA, 19 nt, Artificial Sequence
  Description of Artificial Sequence: Synthetic oligonucleotide
aauuuuauuuggccuggca

SEQ ID NO: 3260635 - RNA, 19 nt, Artificial Sequence
  Description of Artificial Sequence: Synthetic oligonucleotide
acugcaauagcugucacug

SEQ ID NO: 3260636 - RNA, 19 nt, Artificial Sequence
  Description of Artificial Sequence: Synthetic oligonucleotide
uucucaguaaugaagcgau

SEQ ID NO: 3260637 - RNA, 19 nt, Artificial Sequence
  Description of Artificial Sequence: Synthetic oligonucleotide
auaggccuuuucuuggccc

SEQ ID NO: 3260638 - RNA, 19 nt, Artificial Sequence
  Description of Artificial Sequence: Synthetic oligonucleotide
cugacacucauccagccgg

SEQ ID NO: 3260639 - RNA, 19 nt, Artificial Sequence
  Description of Artificial Sequence: Synthetic oligonucleotide
ucuucucacugcaauagcu

SEQ ID NO: 3260640 - RNA, 19 nt, Artificial Sequence
  Description of Artificial Sequence: Synthetic oligonucleotide
aaugaagcgaugggcacuc

SEQ ID NO: 3260641 - RNA, 19 nt, Artificial Sequence
  Description of Artificial Sequence: Synthetic oligonucleotide
cucaguaaugaagcgaugg

SEQ ID NO: 3260642 - RNA, 19 nt, Artificial Sequence
  Description of Artificial Sequence: Synthetic oligonucleotide
ugcaauagcugucacugac

SEQ ID NO: 3260643 - RNA, 19 nt, Artificial Sequence
  Description of Artificial Sequence: Synthetic oligonucleotide
ggcaacagaaacuacucgg

SEQ ID NO: 3260644 - RNA, 19 nt, Artificial Sequence
  Description of Artificial Sequence: Synthetic oligonucleotide
aagccugguggccacuggc

SEQ ID NO: 3260645 - RNA, 19 nt, Artificial Sequence
  Description of Artificial Sequence: Synthetic oligonucleotide
ucugacacucauccagccg

SEQ ID NO: 3260646 - RNA, 19 nt, Artificial Sequence
  Description of Artificial Sequence: Synthetic oligonucleotide
aaauuuuauuuggccuggc

SEQ ID NO: 3260647 - RNA, 19 nt, Artificial Sequence
  Description of Artificial Sequence: Synthetic oligonucleotide
cacaauaggccuuuucuug

SEQ ID NO: 3260648 - RNA, 19 nt, Artificial Sequence
  Description of Artificial Sequence: Synthetic oligonucleotide
gaaguagugguaaggcacg

SEQ ID NO: 3260649 - RNA, 19 nt, Artificial Sequence
  Description of Artificial Sequence: Synthetic oligonucleotide
ugcaaaagguacaucugac

SEQ ID NO: 3260650 - RNA, 19 nt, Artificial Sequence
  Description of Artificial Sequence: Synthetic oligonucleotide
uggcaacagaaacuacucg

SEQ ID NO: 3260651 - RNA, 19 nt, Artificial Sequence
  Description of Artificial Sequence: Synthetic oligonucleotide
ugaagcgaugggcacuccg

SEQ ID NO: 3260652 - RNA, 19 nt, Artificial Sequence
  Description of Artificial Sequence: Synthetic oligonucleotide
acagaaacuacucggcccu

SEQ ID NO: 3260653 - RNA, 19 nt, Artificial Sequence
  Description of Artificial Sequence: Synthetic oligonucleotide
aguaaugaagcgaugggca

SEQ ID NO: 3260654 - RNA, 19 nt, Artificial Sequence
  Description of Artificial Sequence: Synthetic oligonucleotide
aucugacacucauccagcc

SEQ ID NO: 3260655 - RNA, 19 nt, Artificial Sequence
  Description of Artificial Sequence: Synthetic oligonucleotide
cugaccaucccguagacca

SEQ ID NO: 3260656 - RNA, 19 nt, Artificial Sequence
  Description of Artificial Sequence: Synthetic oligonucleotide
cugcucaugcaaaagguac

SEQ ID NO: 3260657 - RNA, 19 nt, Artificial Sequence
  Description of Artificial Sequence: Synthetic oligonucleotide
augcaaaagguacaucuga

SEQ ID NO: 3260658 - RNA, 19 nt, Artificial Sequence
  Description of Artificial Sequence: Synthetic oligonucleotide
ucacugaccaucccguaga

SEQ ID NO: 3260659 - RNA, 19 nt, Artificial Sequence
  Description of Artificial Sequence: Synthetic oligonucleotide
ucucgaaguagugguaagg

SEQ ID NO: 3260660 - RNA, 19 nt, Artificial Sequence
  Description of Artificial Sequence: Synthetic oligonucleotide
acacucauccagccggccc

SEQ ID NO: 3260661 - RNA, 19 nt, Artificial Sequence
  Description of Artificial Sequence: Synthetic oligonucleotide
acgaucuccucacacagcu

SEQ ID NO: 3260662 - RNA, 19 nt, Artificial Sequence
  Description of Artificial Sequence: Synthetic oligonucleotide
ugcucaugcaaaagguaca

SEQ ID NO: 3260663 - RNA, 19 nt, Artificial Sequence
  Description of Artificial Sequence: Synthetic oligonucleotide
caugcaaaagguacaucug

SEQ ID NO: 3260664 - RNA, 19 nt, Artificial Sequence
  Description of Artificial Sequence: Synthetic oligonucleotide
uucucacugcaauagcugu

SEQ ID NO: 3260665 - RNA, 19 nt, Artificial Sequence
  Description of Artificial Sequence: Synthetic oligonucleotide
uagugguaaggcacggaag

SEQ ID NO: 3260666 - RNA, 19 nt, Artificial Sequence
  Description of Artificial Sequence: Synthetic oligonucleotide
aacacagccuucucaguaa

SEQ ID NO: 3260667 - RNA, 19 nt, Artificial Sequence
  Description of Artificial Sequence: Synthetic oligonucleotide
uagaccacgaucuccucac

SEQ ID NO: 3260668 - RNA, 19 nt, Artificial Sequence
  Description of Artificial Sequence: Synthetic oligonucleotide
cuucucacugcaauagcug

SEQ ID NO: 3260669 - RNA, 19 nt, Artificial Sequence
  Description of Artificial Sequence: Synthetic oligonucleotide
caacagaaacuacucggcc

SEQ ID NO: 3260670 - RNA, 19 nt, Artificial Sequence
  Description of Artificial Sequence: Synthetic oligonucleotide
ugggugagcgaacacaaua

SEQ ID NO: 3260671 - RNA, 19 nt, Artificial Sequence
  Description of Artificial Sequence: Synthetic oligonucleotide
ucgaaguagugguaaggca

SEQ ID NO: 3260672 - RNA, 19 nt, Artificial Sequence
  Description of Artificial Sequence: Synthetic oligonucleotide
caguaaugaagcgaugggc

SEQ ID NO: 3260673 - RNA, 19 nt, Artificial Sequence
  Description of Artificial Sequence: Synthetic oligonucleotide
uacucggcccuccaggaug

SEQ ID NO: 3260674 - RNA, 19 nt, Artificial Sequence
  Description of Artificial Sequence: Synthetic oligonucleotide
uuuucuuggcccagcggga

SEQ ID NO: 3260675 - RNA, 19 nt, Artificial Sequence
  Description of Artificial Sequence: Synthetic oligonucleotide
cucgaaguagugguaaggc

SEQ ID NO: 3260676 - RNA, 19 nt, Artificial Sequence
  Description of Artificial Sequence: Synthetic oligonucleotide
aaacuacucggcccuccag

SEQ ID NO: 3260677 - RNA, 19 nt, Artificial Sequence
  Description of Artificial Sequence: Synthetic oligonucleotide
cuggcaacagaaacuacuc

SEQ ID NO: 3260678 - RNA, 19 nt, Artificial Sequence
  Description of Artificial Sequence: Synthetic oligonucleotide
caucugacacucauccagc

SEQ ID NO: 3260679 - RNA, 19 nt, Artificial Sequence
  Description of Artificial Sequence: Synthetic oligonucleotide
ugguaaggcacggaaggag

SEQ ID NO: 3260680 - RNA, 19 nt, Artificial Sequence
  Description of Artificial Sequence: Synthetic oligonucleotide
uuuauuuggccuggcagaa

SEQ ID NO: 3260681 - RNA, 19 nt, Artificial Sequence
  Description of Artificial Sequence: Synthetic oligonucleotide
guaaugaagcgaugggcac

SEQ ID NO: 3260682 - RNA, 19 nt, Artificial Sequence
  Description of Artificial Sequence: Synthetic oligonucleotide
acuggcaacagaaacuacu

SEQ ID NO: 3260683 - RNA, 19 nt, Artificial Sequence
  Description of Artificial Sequence: Synthetic oligonucleotide
agaaacuacucggcccucc

SEQ ID NO: 3260684 - RNA, 19 nt, Artificial Sequence
  Description of Artificial Sequence: Synthetic oligonucleotide
acagccuucucaguaauga

SEQ ID NO: 3260685 - RNA, 19 nt, Artificial Sequence
  Description of Artificial Sequence: Synthetic oligonucleotide
uucucgaaguagugguaag

SEQ ID NO: 3260686 - RNA, 19 nt, Artificial Sequence
  Description of Artificial Sequence: Synthetic oligonucleotide
aaguagugguaaggcacgg

SEQ ID NO: 3260687 - RNA, 19 nt, Artificial Sequence
  Description of Artificial Sequence: Synthetic oligonucleotide
aagcgaugggcacuccgug

SEQ ID NO: 3260688 - RNA, 19 nt, Artificial Sequence
  Description of Artificial Sequence: Synthetic oligonucleotide
uccaggaugggugagcgaa

SEQ ID NO: 3260689 - RNA, 19 nt, Artificial Sequence
  Description of Artificial Sequence: Synthetic oligonucleotide
gugagcgaacacaauaggc

SEQ ID NO: 3260690 - RNA, 19 nt, Artificial Sequence
  Description of Artificial Sequence: Synthetic oligonucleotide
caauaggccuuuucuuggc

SEQ ID NO: 3260691 - RNA, 19 nt, Artificial Sequence
  Description of Artificial Sequence: Synthetic oligonucleotide
gcugucacugaccaucccg

SEQ ID NO: 3260692 - RNA, 19 nt, Artificial Sequence
  Description of Artificial Sequence: Synthetic oligonucleotide
gucacugaccaucccguag

SEQ ID NO: 3260693 - RNA, 19 nt, Artificial Sequence
  Description of Artificial Sequence: Synthetic oligonucleotide
ggugagcgaacacaauagg

SEQ ID NO: 3260694 - RNA, 19 nt, Artificial Sequence
  Description of Artificial Sequence: Synthetic oligonucleotide
ccuggcagaagccuggugg

SEQ ID NO: 3260695 - RNA, 19 nt, Artificial Sequence
  Description of Artificial Sequence: Synthetic oligonucleotide
agcgaugggcacuccgugg

SEQ ID NO: 3260696 - RNA, 19 nt, Artificial Sequence
  Description of Artificial Sequence: Synthetic oligonucleotide
agccuucucaguaaugaag

SEQ ID NO: 3260697 - RNA, 19 nt, Artificial Sequence
  Description of Artificial Sequence: Synthetic oligonucleotide
acacaauaggccuuuucuu

SEQ ID NO: 3260698 - RNA, 19 nt, Artificial Sequence
  Description of Artificial Sequence: Synthetic oligonucleotide
uaaugaagcgaugggcacu

SEQ ID NO: 3260699 - RNA, 19 nt, Artificial Sequence
  Description of Artificial Sequence: Synthetic oligonucleotide
caauagcugucacugacca

SEQ ID NO: 3260700 - RNA, 19 nt, Artificial Sequence
  Description of Artificial Sequence: Synthetic oligonucleotide
accacgaucuccucacaca

SEQ ID NO: 3260701 - RNA, 19 nt, Artificial Sequence
  Description of Artificial Sequence: Synthetic oligonucleotide
gaacacagccuucucagua

SEQ ID NO: 3260702 - RNA, 19 nt, Artificial Sequence
  Description of Artificial Sequence: Synthetic oligonucleotide
guaaggcacggaaggaggg

SEQ ID NO: 3260703 - RNA, 19 nt, Artificial Sequence
  Description of Artificial Sequence: Synthetic oligonucleotide
ucucaguaaugaagcgaug

SEQ ID NO: 3260704 - RNA, 19 nt, Artificial Sequence
  Description of Artificial Sequence: Synthetic oligonucleotide
gaaggagggcucuucucac

SEQ ID NO: 3260705 - RNA, 19 nt, Artificial Sequence
  Description of Artificial Sequence: Synthetic oligonucleotide
aaaaucaaguaacagacac

SEQ ID NO: 3260706 - RNA, 19 nt, Artificial Sequence
  Description of Artificial Sequence: Synthetic oligonucleotide
aaauacugauuccagaagc

SEQ ID NO: 3260707 - RNA, 19 nt, Artificial Sequence
  Description of Artificial Sequence: Synthetic oligonucleotide
aaaucauauacucauauug

SEQ ID NO: 3260708 - RNA, 19 nt, Artificial Sequence
  Description of Artificial Sequence: Synthetic oligonucleotide
uuggaaaucaccaagacac

SEQ ID NO: 3260709 - RNA, 19 nt, Artificial Sequence
  Description of Artificial Sequence: Synthetic oligonucleotide
auuuaaaacauauuuauca

SEQ ID NO: 3260710 - RNA, 19 nt, Artificial Sequence
  Description of Artificial Sequence: Synthetic oligonucleotide
uuuuauuugcuuuauuuag

SEQ ID NO: 3260711 - RNA, 19 nt, Artificial Sequence
  Description of Artificial Sequence: Synthetic oligonucleotide
auauuuaucaguuuugugu

SEQ ID NO: 3260712 - RNA, 19 nt, Artificial Sequence
  Description of Artificial Sequence: Synthetic oligonucleotide
uguaaaaucaaguaacaga

SEQ ID NO: 3260713 - RNA, 19 nt, Artificial Sequence
  Description of Artificial Sequence: Synthetic oligonucleotide
uguuaaggaaaucauauac

SEQ ID NO: 3260714 - RNA, 19 nt, Artificial Sequence
  Description of Artificial Sequence: Synthetic oligonucleotide
aaucauauacucauauugc

SEQ ID NO: 3260715 - RNA, 19 nt, Artificial Sequence
  Description of Artificial Sequence: Synthetic oligonucleotide
ucuccauucauuuaaaaca

SEQ ID NO: 3260716 - RNA, 19 nt, Artificial Sequence
  Description of Artificial Sequence: Synthetic oligonucleotide
uuuaaaacauauuuaucag

SEQ ID NO: 3260717 - RNA, 19 nt, Artificial Sequence
  Description of Artificial Sequence: Synthetic oligonucleotide
ucaguuuuguguaaaauca

SEQ ID NO: 3260718 - RNA, 19 nt, Artificial Sequence
  Description of Artificial Sequence: Synthetic oligonucleotide
uaaagugaaaacaaaauuu

SEQ ID NO: 3260719 - RNA, 19 nt, Artificial Sequence
  Description of Artificial Sequence: Synthetic oligonucleotide
ucaucuucaacuuuguuca

SEQ ID NO: 3260720 - RNA, 19 nt, Artificial Sequence
  Description of Artificial Sequence: Synthetic oligonucleotide
agcggacuaaaucagaggc

SEQ ID NO: 3260721 - RNA, 19 nt, Artificial Sequence
  Description of Artificial Sequence: Synthetic oligonucleotide
uuuauuuaguguaucuugc

SEQ ID NO: 3260722 - RNA, 19 nt, Artificial Sequence
  Description of Artificial Sequence: Synthetic oligonucleotide
uuguguaaaaucaaguaac

SEQ ID NO: 3260723 - RNA, 19 nt, Artificial Sequence
  Description of Artificial Sequence: Synthetic oligonucleotide
aaggaaaucauauacucau

SEQ ID NO: 3260724 - RNA, 19 nt, Artificial Sequence
  Description of Artificial Sequence: Synthetic oligonucleotide
ucauuuaaaacauauuuau

SEQ ID NO: 3260725 - RNA, 19 nt, Artificial Sequence
  Description of Artificial Sequence: Synthetic oligonucleotide
auucauuuaaaacauauuu

SEQ ID NO: 3260726 - RNA, 19 nt, Artificial Sequence
  Description of Artificial Sequence: Synthetic oligonucleotide
aucaguuuuguguaaaauc

SEQ ID NO: 3260727 - RNA, 19 nt, Artificial Sequence
  Description of Artificial Sequence: Synthetic oligonucleotide
aaaauacugauuccagaag

SEQ ID NO: 3260728 - RNA, 19 nt, Artificial Sequence
  Description of Artificial Sequence: Synthetic oligonucleotide
uuuguguaaaaucaaguaa

SEQ ID NO: 3260729 - RNA, 19 nt, Artificial Sequence
  Description of Artificial Sequence: Synthetic oligonucleotide
ucaaguaacagacacuuuc

SEQ ID NO: 3260730 - RNA, 19 nt, Artificial Sequence
  Description of Artificial Sequence: Synthetic oligonucleotide
uuaagcaugguguuaagga

SEQ ID NO: 3260731 - RNA, 19 nt, Artificial Sequence
  Description of Artificial Sequence: Synthetic oligonucleotide
uaaaacauauuuaucaguu

SEQ ID NO: 3260732 - RNA, 19 nt, Artificial Sequence
  Description of Artificial Sequence: Synthetic oligonucleotide
aucauauacucauauugcg

SEQ ID NO: 3260733 - RNA, 19 nt, Artificial Sequence
  Description of Artificial Sequence: Synthetic oligonucleotide
guaaaaucaaguaacagac

SEQ ID NO: 3260734 - RNA, 19 nt, Artificial Sequence
  Description of Artificial Sequence: Synthetic oligonucleotide
aaacauauuuaucaguuuu

SEQ ID NO: 3260735 - RNA, 19 nt, Artificial Sequence
  Description of Artificial Sequence: Synthetic oligonucleotide
uuaaggaaaucauauacuc

SEQ ID NO: 3260736 - RNA, 19 nt, Artificial Sequence
  Description of Artificial Sequence: Synthetic oligonucleotide
ucauaaagugaaaacaaaa

SEQ ID NO: 3260737 - RNA, 19 nt, Artificial Sequence
  Description of Artificial Sequence: Synthetic oligonucleotide
cuuuauuuaguguaucuug

SEQ ID NO: 3260738 - RNA, 19 nt, Artificial Sequence
  Description of Artificial Sequence: Synthetic oligonucleotide
uugcauuucauucugcgca

SEQ ID NO: 3260739 - RNA, 19 nt, Artificial Sequence
  Description of Artificial Sequence: Synthetic oligonucleotide
uuauuugcuuuauuuagug

SEQ ID NO: 3260740 - RNA, 19 nt, Artificial Sequence
  Description of Artificial Sequence: Synthetic oligonucleotide
uucauuuaaaacauauuua

SEQ ID NO: 3260741 - RNA, 19 nt, Artificial Sequence
  Description of Artificial Sequence: Synthetic oligonucleotide
uuucucaucuucaacuuug

SEQ ID NO: 3260742 - RNA, 19 nt, Artificial Sequence
  Description of Artificial Sequence: Synthetic oligonucleotide
uuaaaacauauuuaucagu

SEQ ID NO: 3260743 - RNA, 19 nt, Artificial Sequence
  Description of Artificial Sequence: Synthetic oligonucleotide
aauacugauuccagaagcg

SEQ ID NO: 3260744 - RNA, 19 nt, Artificial Sequence
  Description of Artificial Sequence: Synthetic oligonucleotide
auaaagugaaaacaaaauu

SEQ ID NO: 3260745 - RNA, 19 nt, Artificial Sequence
  Description of Artificial Sequence: Synthetic oligonucleotide
uucaacuuuguucauauuu

SEQ ID NO: 3260746 - RNA, 19 nt, Artificial Sequence
  Description of Artificial Sequence: Synthetic oligonucleotide
uuuauuugcuuuauuuagu

SEQ ID NO: 3260747 - RNA, 19 nt, Artificial Sequence
  Description of Artificial Sequence: Synthetic oligonucleotide
cauauacucauauugcgug

SEQ ID NO: 3260748 - RNA, 19 nt, Artificial Sequence
  Description of Artificial Sequence: Synthetic oligonucleotide
auuguuuucucuguauucg

SEQ ID NO: 3260749 - RNA, 19 nt, Artificial Sequence
  Description of Artificial Sequence: Synthetic oligonucleotide
uuuuguguaaaaucaagua

SEQ ID NO: 3260750 - RNA, 19 nt, Artificial Sequence
  Description of Artificial Sequence: Synthetic oligonucleotide
cuaaaucagaggcauauug

SEQ ID NO: 3260751 - RNA, 19 nt, Artificial Sequence
  Description of Artificial Sequence: Synthetic oligonucleotide
uguguaaaaucaaguaaca

SEQ ID NO: 3260752 - RNA, 19 nt, Artificial Sequence
  Description of Artificial Sequence: Synthetic oligonucleotide
ucauauuucuguuuucugu

SEQ ID NO: 3260753 - RNA, 19 nt, Artificial Sequence
  Description of Artificial Sequence: Synthetic oligonucleotide
caagacaccuuuuauuugc

SEQ ID NO: 3260754 - RNA, 19 nt, Artificial Sequence
  Description of Artificial Sequence: Synthetic oligonucleotide
aaguaacagacacuuucuc

SEQ ID NO: 3260755 - RNA, 19 nt, Artificial Sequence
  Description of Artificial Sequence: Synthetic oligonucleotide
acuuuguucauauuucugu

SEQ ID NO: 3260756 - RNA, 19 nt, Artificial Sequence
  Description of Artificial Sequence: Synthetic oligonucleotide
ucaacuuuguucauauuuc

SEQ ID NO: 3260757 - RNA, 19 nt, Artificial Sequence
  Description of Artificial Sequence: Synthetic oligonucleotide
ugugaguugcauuucauuc

SEQ ID NO: 3260758 - RNA, 19 nt, Artificial Sequence
  Description of Artificial Sequence: Synthetic oligonucleotide
aguugcauuucauucugcg

SEQ ID NO: 3260759 - RNA, 19 nt, Artificial Sequence
  Description of Artificial Sequence: Synthetic oligonucleotide
uaaaucagaggcauauugu

SEQ ID NO: 3260760 - RNA, 19 nt, Artificial Sequence
  Description of Artificial Sequence: Synthetic oligonucleotide
aaucaaguaacagacacuu

SEQ ID NO: 3260761 - RNA, 19 nt, Artificial Sequence
  Description of Artificial Sequence: Synthetic oligonucleotide
cucaucuucaacuuuguuc

SEQ ID NO: 3260762 - RNA, 19 nt, Artificial Sequence
  Description of Artificial Sequence: Synthetic oligonucleotide
aggucuguacuucauaaag

SEQ ID NO: 3260763 - RNA, 19 nt, Artificial Sequence
  Description of Artificial Sequence: Synthetic oligonucleotide
uauuuaucaguuuugugua

SEQ ID NO: 3260764 - RNA, 19 nt, Artificial Sequence
  Description of Artificial Sequence: Synthetic oligonucleotide
uaaggaaaucauauacuca

SEQ ID NO: 3260765 - RNA, 19 nt, Artificial Sequence
  Description of Artificial Sequence: Synthetic oligonucleotide
acuucauaaagugaaaaca

SEQ ID NO: 3260766 - RNA, 19 nt, Artificial Sequence
  Description of Artificial Sequence: Synthetic oligonucleotide
ucauauacucauauugcgu

SEQ ID NO: 3260767 - RNA, 19 nt, Artificial Sequence
  Description of Artificial Sequence: Synthetic oligonucleotide
auuugcuuuauuuagugua

SEQ ID NO: 3260768 - RNA, 19 nt, Artificial Sequence
  Description of Artificial Sequence: Synthetic oligonucleotide
uucuccauucauuuaaaac

SEQ ID NO: 3260769 - RNA, 19 nt, Artificial Sequence
  Description of Artificial Sequence: Synthetic oligonucleotide
aaagugaaaacaaaauuuu

SEQ ID NO: 3260770 - RNA, 19 nt, Artificial Sequence
  Description of Artificial Sequence: Synthetic oligonucleotide
aaagagcuuggaaaucacc

SEQ ID NO: 3260771 - RNA, 19 nt, Artificial Sequence
  Description of Artificial Sequence: Synthetic oligonucleotide
aaaucagaggcauauuguu

SEQ ID NO: 3260772 - RNA, 19 nt, Artificial Sequence
  Description of Artificial Sequence: Synthetic oligonucleotide
uuuaagcaugguguuaagg

SEQ ID NO: 3260773 - RNA, 19 nt, Artificial Sequence
  Description of Artificial Sequence: Synthetic oligonucleotide
aacagacacuuucucaucu

SEQ ID NO: 3260774 - RNA, 19 nt, Artificial Sequence
  Description of Artificial Sequence: Synthetic oligonucleotide
auauacucauauugcgugg

SEQ ID NO: 3260775 - RNA, 19 nt, Artificial Sequence
  Description of Artificial Sequence: Synthetic oligonucleotide
uuuucucuguauucgaccu

SEQ ID NO: 3260776 - RNA, 19 nt, Artificial Sequence
  Description of Artificial Sequence: Synthetic oligonucleotide
uacuucauaaagugaaaac

SEQ ID NO: 3260777 - RNA, 19 nt, Artificial Sequence
  Description of Artificial Sequence: Synthetic oligonucleotide
uucauaaagugaaaacaaa

SEQ ID NO: 3260778 - RNA, 19 nt, Artificial Sequence
  Description of Artificial Sequence: Synthetic oligonucleotide
gucuguacuucauaaagug

SEQ ID NO: 3260779 - RNA, 19 nt, Artificial Sequence
  Description of Artificial Sequence: Synthetic oligonucleotide
ugaguugcauuucauucug

SEQ ID NO: 3260780 - RNA, 19 nt, Artificial Sequence
  Description of Artificial Sequence: Synthetic oligonucleotide
aguaacagacacuuucuca

SEQ ID NO: 3260781 - RNA, 19 nt, Artificial Sequence
  Description of Artificial Sequence: Synthetic oligonucleotide
aagcggacuaaaucagagg

SEQ ID NO: 3260782 - RNA, 19 nt, Artificial Sequence
  Description of Artificial Sequence: Synthetic oligonucleotide
aacauauuuaucaguuuug

SEQ ID NO: 3260783 - RNA, 19 nt, Artificial Sequence
  Description of Artificial Sequence: Synthetic oligonucleotide
uauacucauauugcguggg

SEQ ID NO: 3260784 - RNA, 19 nt, Artificial Sequence
  Description of Artificial Sequence: Synthetic oligonucleotide
uaaaaucaaguaacagaca

SEQ ID NO: 3260785 - RNA, 19 nt, Artificial Sequence
  Description of Artificial Sequence: Synthetic oligonucleotide
cauuuaaaacauauuuauc

SEQ ID NO: 3260786 - RNA, 19 nt, Artificial Sequence
  Description of Artificial Sequence: Synthetic oligonucleotide
aggguaaagagcuuggaaa

SEQ ID NO: 3260787 - RNA, 19 nt, Artificial Sequence
  Description of Artificial Sequence: Synthetic oligonucleotide
ucuguacuucauaaaguga

SEQ ID NO: 3260788 - RNA, 19 nt, Artificial Sequence
  Description of Artificial Sequence: Synthetic oligonucleotide
uauuguuuucucuguauuc

SEQ ID NO: 3260789 - RNA, 19 nt, Artificial Sequence
  Description of Artificial Sequence: Synthetic oligonucleotide
aagagcuuggaaaucacca

SEQ ID NO: 3260790 - RNA, 19 nt, Artificial Sequence
  Description of Artificial Sequence: Synthetic oligonucleotide
ucuucaacuuuguucauau

SEQ ID NO: 3260791 - RNA, 19 nt, Artificial Sequence
  Description of Artificial Sequence: Synthetic oligonucleotide
aaaacauauuuaucaguuu

SEQ ID NO: 3260792 - RNA, 19 nt, Artificial Sequence
  Description of Artificial Sequence: Synthetic oligonucleotide
uuugcuuuauuuaguguau

SEQ ID NO: 3260793 - RNA, 19 nt, Artificial Sequence
  Description of Artificial Sequence: Synthetic oligonucleotide
auuuaguguaucuugcuuu

SEQ ID NO: 3260794 - RNA, 19 nt, Artificial Sequence
  Description of Artificial Sequence: Synthetic oligonucleotide
uuauuuaguguaucuugcu

SEQ ID NO: 3260795 - RNA, 19 nt, Artificial Sequence
  Description of Artificial Sequence: Synthetic oligonucleotide
acucauauugcgugggcag

SEQ ID NO: 3260796 - RNA, 19 nt, Artificial Sequence
  Description of Artificial Sequence: Synthetic oligonucleotide
cuucauaaagugaaaacaa

SEQ ID NO: 3260797 - RNA, 19 nt, Artificial Sequence
  Description of Artificial Sequence: Synthetic oligonucleotide
uucuuugugaguugcauuu

SEQ ID NO: 3260798 - RNA, 19 nt, Artificial Sequence
  Description of Artificial Sequence: Synthetic oligonucleotide
uccagaagcggacuaaauc

SEQ ID NO: 3260799 - RNA, 19 nt, Artificial Sequence
  Description of Artificial Sequence: Synthetic oligonucleotide
agaggcauauuguuuucuc

SEQ ID NO: 3260800 - RNA, 19 nt, Artificial Sequence
  Description of Artificial Sequence: Synthetic oligonucleotide
guuuucucuguauucgacc

SEQ ID NO: 3260801 - RNA, 19 nt, Artificial Sequence
  Description of Artificial Sequence: Synthetic oligonucleotide
uuucauucugcgcagggua

SEQ ID NO: 3260802 - RNA, 19 nt, Artificial Sequence
  Description of Artificial Sequence: Synthetic oligonucleotide
uacugauuccagaagcgga

SEQ ID NO: 3260803 - RNA, 19 nt, Artificial Sequence
  Description of Artificial Sequence: Synthetic oligonucleotide
uucauauuucuguuuucug

SEQ ID NO: 3260804 - RNA, 19 nt, Artificial Sequence
  Description of Artificial Sequence: Synthetic oligonucleotide
gagcuuggaaaucaccaag

SEQ ID NO: 3260805 - RNA, 19 nt, Artificial Sequence
  Description of Artificial Sequence: Synthetic oligonucleotide
aaaguagucaccuagaaag

SEQ ID NO: 3260806 - RNA, 19 nt, Artificial Sequence
  Description of Artificial Sequence: Synthetic oligonucleotide
uaucuaagcacauugaagg

SEQ ID NO: 3260807 - RNA, 19 nt, Artificial Sequence
  Description of Artificial Sequence: Synthetic oligonucleotide
aauguggucacucuggccu

SEQ ID NO: 3260808 - RNA, 19 nt, Artificial Sequence
  Description of Artificial Sequence: Synthetic oligonucleotide
aauacgaugccccacccag

SEQ ID NO: 3260809 - RNA, 19 nt, Artificial Sequence
  Description of Artificial Sequence: Synthetic oligonucleotide
uuaucuaagcacauugaag

SEQ ID NO: 3260810 - RNA, 19 nt, Artificial Sequence
  Description of Artificial Sequence: Synthetic oligonucleotide
agaagcaggaugcugcugc

SEQ ID NO: 3260811 - RNA, 19 nt, Artificial Sequence
  Description of Artificial Sequence: Synthetic oligonucleotide
acaaauacgaugccccacc

SEQ ID NO: 3260812 - RNA, 19 nt, Artificial Sequence
  Description of Artificial Sequence: Synthetic oligonucleotide
agaaaggucccagugaacc

SEQ ID NO: 3260813 - RNA, 19 nt, Artificial Sequence
  Description of Artificial Sequence: Synthetic oligonucleotide
agcuggacagcacaaauac

SEQ ID NO: 3260814 - RNA, 19 nt, Artificial Sequence
  Description of Artificial Sequence: Synthetic oligonucleotide
aaccccagugcaaagaagc

SEQ ID NO: 3260815 - RNA, 19 nt, Artificial Sequence
  Description of Artificial Sequence: Synthetic oligonucleotide
uucagaagcaggaugcugc

SEQ ID NO: 3260816 - RNA, 19 nt, Artificial Sequence
  Description of Artificial Sequence: Synthetic oligonucleotide
aaauguggucacucuggcc

SEQ ID NO: 3260817 - RNA, 19 nt, Artificial Sequence
  Description of Artificial Sequence: Synthetic oligonucleotide
gacagcacaaauacgaugc

SEQ ID NO: 3260818 - RNA, 19 nt, Artificial Sequence
  Description of Artificial Sequence: Synthetic oligonucleotide
aaagaagcuggacagcaca

SEQ ID NO: 3260819 - RNA, 19 nt, Artificial Sequence
  Description of Artificial Sequence: Synthetic oligonucleotide
aaaggucccagugaacccc

SEQ ID NO: 3260820 - RNA, 19 nt, Artificial Sequence
  Description of Artificial Sequence: Synthetic oligonucleotide
agugcaaagaagcuggaca

SEQ ID NO: 3260821 - RNA, 19 nt, Artificial Sequence
  Description of Artificial Sequence: Synthetic oligonucleotide
agcacaaauacgaugcccc

SEQ ID NO: 3260822 - RNA, 19 nt, Artificial Sequence
  Description of Artificial Sequence: Synthetic oligonucleotide
uugaggaucccaaaguagu

SEQ ID NO: 3260823 - RNA, 19 nt, Artificial Sequence
  Description of Artificial Sequence: Synthetic oligonucleotide
ggaauagcaggcuagguag

SEQ ID NO: 3260824 - RNA, 19 nt, Artificial Sequence
  Description of Artificial Sequence: Synthetic oligonucleotide
ucccaaaguagucaccuag

SEQ ID NO: 3260825 - RNA, 19 nt, Artificial Sequence
  Description of Artificial Sequence: Synthetic oligonucleotide
auugaagggaaaugugguc

SEQ ID NO: 3260826 - RNA, 19 nt, Artificial Sequence
  Description of Artificial Sequence: Synthetic oligonucleotide
ugcucaacuucacagcugc

SEQ ID NO: 3260827 - RNA, 19 nt, Artificial Sequence
  Description of Artificial Sequence: Synthetic oligonucleotide
uagucaccuagaaaggucc

SEQ ID NO: 3260828 - RNA, 19 nt, Artificial Sequence
  Description of Artificial Sequence: Synthetic oligonucleotide
gagugcaaggcccaggaag

SEQ ID NO: 3260829 - RNA, 19 nt, Artificial Sequence
  Description of Artificial Sequence: Synthetic oligonucleotide
acaagcugggcucuguggg

SEQ ID NO: 3260830 - RNA, 19 nt, Artificial Sequence
  Description of Artificial Sequence: Synthetic oligonucleotide
acauugaagggaaaugugg

SEQ ID NO: 3260831 - RNA, 19 nt, Artificial Sequence
  Description of Artificial Sequence: Synthetic oligonucleotide
aucuaagcacauugaaggg

SEQ ID NO: 3260832 - RNA, 19 nt, Artificial Sequence
  Description of Artificial Sequence: Synthetic oligonucleotide
aucauggccugugugaagc

SEQ ID NO: 3260833 - RNA, 19 nt, Artificial Sequence
  Description of Artificial Sequence: Synthetic oligonucleotide
uugggcuggcucaucaugg

SEQ ID NO: 3260834 - RNA, 19 nt, Artificial Sequence
  Description of Artificial Sequence: Synthetic oligonucleotide
aggcccaggaaguaggugg

SEQ ID NO: 3260835 - RNA, 19 nt, Artificial Sequence
  Description of Artificial Sequence: Synthetic oligonucleotide
ucugcucaacuucacagcu

SEQ ID NO: 3260836 - RNA, 19 nt, Artificial Sequence
  Description of Artificial Sequence: Synthetic oligonucleotide
aauagcaggcuagguaggg

SEQ ID NO: 3260837 - RNA, 19 nt, Artificial Sequence
  Description of Artificial Sequence: Synthetic oligonucleotide
caugggguuaucuaagcac

SEQ ID NO: 3260838 - RNA, 19 nt, Artificial Sequence
  Description of Artificial Sequence: Synthetic oligonucleotide
aguacaugggguuaucuaa

SEQ ID NO: 3260839 - RNA, 19 nt, Artificial Sequence
  Description of Artificial Sequence: Synthetic oligonucleotide
uugaagggaaaugugguca

SEQ ID NO: 3260840 - RNA, 19 nt, Artificial Sequence
  Description of Artificial Sequence: Synthetic oligonucleotide
aggaucccaaaguagucac

SEQ ID NO: 3260841 - RNA, 19 nt, Artificial Sequence
  Description of Artificial Sequence: Synthetic oligonucleotide
acguucagaagcaggaugc

SEQ ID NO: 3260842 - RNA, 19 nt, Artificial Sequence
  Description of Artificial Sequence: Synthetic oligonucleotide
cuugaggaucccaaaguag

SEQ ID NO: 3260843 - RNA, 19 nt, Artificial Sequence
  Description of Artificial Sequence: Synthetic oligonucleotide
aagggaaauguggucacuc

SEQ ID NO: 3260844 - RNA, 19 nt, Artificial Sequence
  Description of Artificial Sequence: Synthetic oligonucleotide
gugcaaagaagcuggacag

SEQ ID NO: 3260845 - RNA, 19 nt, Artificial Sequence
  Description of Artificial Sequence: Synthetic oligonucleotide
ucaacuucacagcugccac

SEQ ID NO: 3260846 - RNA, 19 nt, Artificial Sequence
  Description of Artificial Sequence: Synthetic oligonucleotide
cuucacagcugccacaagc

SEQ ID NO: 3260847 - RNA, 19 nt, Artificial Sequence
  Description of Artificial Sequence: Synthetic oligonucleotide
cuggacagcacaaauacga

SEQ ID NO: 3260848 - RNA, 19 nt, Artificial Sequence
  Description of Artificial Sequence: Synthetic oligonucleotide
uuauccaggcccuccaucu

SEQ ID NO: 3260849 - RNA, 19 nt, Artificial Sequence
  Description of Artificial Sequence: Synthetic oligonucleotide
gaaauguggucacucuggc

SEQ ID NO: 3260850 - RNA, 19 nt, Artificial Sequence
  Description of Artificial Sequence: Synthetic oligonucleotide
ucuaagcacauugaaggga

SEQ ID NO: 3260851 - RNA, 19 nt, Artificial Sequence
  Description of Artificial Sequence: Synthetic oligonucleotide
uucacagcugccacaagcu

SEQ ID NO: 3260852 - RNA, 19 nt, Artificial Sequence
  Description of Artificial Sequence: Synthetic oligonucleotide
gacguucagaagcaggaug

SEQ ID NO: 3260853 - RNA, 19 nt, Artificial Sequence
  Description of Artificial Sequence: Synthetic oligonucleotide
aaguagucaccuagaaagg

SEQ ID NO: 3260854 - RNA, 19 nt, Artificial Sequence
  Description of Artificial Sequence: Synthetic oligonucleotide
acagcacaaauacgaugcc

SEQ ID NO: 3260855 - RNA, 19 nt, Artificial Sequence
  Description of Artificial Sequence: Synthetic oligonucleotide
auuauccaggcccuccauc

SEQ ID NO: 3260856 - RNA, 19 nt, Artificial Sequence
  Description of Artificial Sequence: Synthetic oligonucleotide
uccuugaggaucccaaagu

SEQ ID NO: 3260857 - RNA, 19 nt, Artificial Sequence
  Description of Artificial Sequence: Synthetic oligonucleotide
cacagcugccacaagcugg

SEQ ID NO: 3260858 - RNA, 19 nt, Artificial Sequence
  Description of Artificial Sequence: Synthetic oligonucleotide
ggcgugauuauccaggccc

SEQ ID NO: 3260859 - RNA, 19 nt, Artificial Sequence
  Description of Artificial Sequence: Synthetic oligonucleotide
gaugcugcugcccagggaa

SEQ ID NO: 3260860 - RNA, 19 nt, Artificial Sequence
  Description of Artificial Sequence: Synthetic oligonucleotide
gugugaagcagugggagcg

SEQ ID NO: 3260861 - RNA, 19 nt, Artificial Sequence
  Description of Artificial Sequence: Synthetic oligonucleotide
gaaaggucccagugaaccc

SEQ ID NO: 3260862 - RNA, 19 nt, Artificial Sequence
  Description of Artificial Sequence: Synthetic oligonucleotide
guuaucuaagcacauugaa

SEQ ID NO: 3260863 - RNA, 19 nt, Artificial Sequence
  Description of Artificial Sequence: Synthetic oligonucleotide
aaauacgaugccccaccca

SEQ ID NO: 3260864 - RNA, 19 nt, Artificial Sequence
  Description of Artificial Sequence: Synthetic oligonucleotide
uaacgugcccagccuaggg

SEQ ID NO: 3260865 - RNA, 19 nt, Artificial Sequence
  Description of Artificial Sequence: Synthetic oligonucleotide
gaagcagugggagcggagg

SEQ ID NO: 3260866 - RNA, 19 nt, Artificial Sequence
  Description of Artificial Sequence: Synthetic oligonucleotide
cugcccagggaauagcagg

SEQ ID NO: 3260867 - RNA, 19 nt, Artificial Sequence
  Description of Artificial Sequence: Synthetic oligonucleotide
accuagaaaggucccagug

SEQ ID NO: 3260868 - RNA, 19 nt, Artificial Sequence
  Description of Artificial Sequence: Synthetic oligonucleotide
acucuggccuccuugagga

SEQ ID NO: 3260869 - RNA, 19 nt, Artificial Sequence
  Description of Artificial Sequence: Synthetic oligonucleotide
cacauugaagggaaaugug

SEQ ID NO: 3260870 - RNA, 19 nt, Artificial Sequence
  Description of Artificial Sequence: Synthetic oligonucleotide
ugauuauccaggcccucca

SEQ ID NO: 3260871 - RNA, 19 nt, Artificial Sequence
  Description of Artificial Sequence: Synthetic oligonucleotide
aggguaguuggcuguacuc

SEQ ID NO: 3260872 - RNA, 19 nt, Artificial Sequence
  Description of Artificial Sequence: Synthetic oligonucleotide
uccaucuugggcuggcuca

SEQ ID NO: 3260873 - RNA, 19 nt, Artificial Sequence
  Description of Artificial Sequence: Synthetic oligonucleotide
ugaaccccagugcaaagaa

SEQ ID NO: 3260874 - RNA, 19 nt, Artificial Sequence
  Description of Artificial Sequence: Synthetic oligonucleotide
ggguuaucuaagcacauug

SEQ ID NO: 3260875 - RNA, 19 nt, Artificial Sequence
  Description of Artificial Sequence: Synthetic oligonucleotide
uacaugggguuaucuaagc

SEQ ID NO: 3260876 - RNA, 19 nt, Artificial Sequence
  Description of Artificial Sequence: Synthetic oligonucleotide
guagguggcgugauuaucc

SEQ ID NO: 3260877 - RNA, 19 nt, Artificial Sequence
  Description of Artificial Sequence: Synthetic oligonucleotide
gaaggcucugcucaacuuc

SEQ ID NO: 3260878 - RNA, 19 nt, Artificial Sequence
  Description of Artificial Sequence: Synthetic oligonucleotide
ugugugaagcagugggagc

SEQ ID NO: 3260879 - RNA, 19 nt, Artificial Sequence
  Description of Artificial Sequence: Synthetic oligonucleotide
ggaaauguggucacucugg

SEQ ID NO: 3260880 - RNA, 19 nt, Artificial Sequence
  Description of Artificial Sequence: Synthetic oligonucleotide
ugaagggaaauguggucac

SEQ ID NO: 3260881 - RNA, 19 nt, Artificial Sequence
  Description of Artificial Sequence: Synthetic oligonucleotide
ucaccuagaaaggucccag

SEQ ID NO: 3260882 - RNA, 19 nt, Artificial Sequence
  Description of Artificial Sequence: Synthetic oligonucleotide
cauaacgugcccagccuag

SEQ ID NO: 3260883 - RNA, 19 nt, Artificial Sequence
  Description of Artificial Sequence: Synthetic oligonucleotide
uacgaugccccacccagga

SEQ ID NO: 3260884 - RNA, 19 nt, Artificial Sequence
  Description of Artificial Sequence: Synthetic oligonucleotide
cucugcucaacuucacagc

SEQ ID NO: 3260885 - RNA, 19 nt, Artificial Sequence
  Description of Artificial Sequence: Synthetic oligonucleotide
cccagugcaaagaagcugg

SEQ ID NO: 3260886 - RNA, 19 nt, Artificial Sequence
  Description of Artificial Sequence: Synthetic oligonucleotide
ugcccagggaauagcaggc

SEQ ID NO: 3260887 - RNA, 19 nt, Artificial Sequence
  Description of Artificial Sequence: Synthetic oligonucleotide
ugaggaucccaaaguaguc

SEQ ID NO: 3260888 - RNA, 19 nt, Artificial Sequence
  Description of Artificial Sequence: Synthetic oligonucleotide
aggcccuccaucuugggcu

SEQ ID NO: 3260889 - RNA, 19 nt, Artificial Sequence
  Description of Artificial Sequence: Synthetic oligonucleotide
cuaagcacauugaagggaa

SEQ ID NO: 3260890 - RNA, 19 nt, Artificial Sequence
  Description of Artificial Sequence: Synthetic oligonucleotide
gccugugugaagcaguggg

SEQ ID NO: 3260891 - RNA, 19 nt, Artificial Sequence
  Description of Artificial Sequence: Synthetic oligonucleotide
aacgugcccagccuagggu

SEQ ID NO: 3260892 - RNA, 19 nt, Artificial Sequence
  Description of Artificial Sequence: Synthetic oligonucleotide
gaggacguucagaagcagg

SEQ ID NO: 3260893 - RNA, 19 nt, Artificial Sequence
  Description of Artificial Sequence: Synthetic oligonucleotide
agcacauugaagggaaaug

SEQ ID NO: 3260894 - RNA, 19 nt, Artificial Sequence
  Description of Artificial Sequence: Synthetic oligonucleotide
ugcauaacgugcccagccu

SEQ ID NO: 3260895 - RNA, 19 nt, Artificial Sequence
  Description of Artificial Sequence: Synthetic oligonucleotide
gaauagcaggcuagguagg

SEQ ID NO: 3260896 - RNA, 19 nt, Artificial Sequence
  Description of Artificial Sequence: Synthetic oligonucleotide
cuagaaaggucccagugaa

SEQ ID NO: 3260897 - RNA, 19 nt, Artificial Sequence
  Description of Artificial Sequence: Synthetic oligonucleotide
gacccgaaggcucugcuca

SEQ ID NO: 3260898 - RNA, 19 nt, Artificial Sequence
  Description of Artificial Sequence: Synthetic oligonucleotide
ucccagugaaccccagugc

SEQ ID NO: 3260899 - RNA, 19 nt, Artificial Sequence
  Description of Artificial Sequence: Synthetic oligonucleotide
uccaggcccuccaucuugg

SEQ ID NO: 3260900 - RNA, 19 nt, Artificial Sequence
  Description of Artificial Sequence: Synthetic oligonucleotide
aacuucacagcugccacaa

SEQ ID NO: 3260901 - RNA, 19 nt, Artificial Sequence
  Description of Artificial Sequence: Synthetic oligonucleotide
gucccagugaaccccagug

SEQ ID NO: 3260902 - RNA, 19 nt, Artificial Sequence
  Description of Artificial Sequence: Synthetic oligonucleotide
aguagucaccuagaaaggu

SEQ ID NO: 3260903 - RNA, 19 nt, Artificial Sequence
  Description of Artificial Sequence: Synthetic oligonucleotide
aagcaggaugcugcugccc

SEQ ID NO: 3260904 - RNA, 19 nt, Artificial Sequence
  Description of Artificial Sequence: Synthetic oligonucleotide
cacaagcugggcucugugg

SEQ ID NO: 3260905 - RNA, 19 nt, Artificial Sequence
  Description of Artificial Sequence: Synthetic oligonucleotide
uguagugacgccaagagcu

SEQ ID NO: 3260906 - RNA, 19 nt, Artificial Sequence
  Description of Artificial Sequence: Synthetic oligonucleotide
aauguagugacgccaagag

SEQ ID NO: 3260907 - RNA, 19 nt, Artificial Sequence
  Description of Artificial Sequence: Synthetic oligonucleotide
uguuuguuuguuuugcccg

SEQ ID NO: 3260908 - RNA, 19 nt, Artificial Sequence
  Description of Artificial Sequence: Synthetic oligonucleotide
aacucggucaugugggagc

SEQ ID NO: 3260909 - RNA, 19 nt, Artificial Sequence
  Description of Artificial Sequence: Synthetic oligonucleotide
augauggcaauguagugac

SEQ ID NO: 3260910 - RNA, 19 nt, Artificial Sequence
  Description of Artificial Sequence: Synthetic oligonucleotide
cagguaagaacacuggugg

SEQ ID NO: 3260911 - RNA, 19 nt, Artificial Sequence
  Description of Artificial Sequence: Synthetic oligonucleotide
gucaccaccagucugcagg

SEQ ID NO: 3260912 - RNA, 19 nt, Artificial Sequence
  Description of Artificial Sequence: Synthetic oligonucleotide
uguuuguuuugcccggugg

SEQ ID NO: 3260913 - RNA, 19 nt, Artificial Sequence
  Description of Artificial Sequence: Synthetic oligonucleotide
uuuuguuuguuuguuuugc

SEQ ID NO: 3260914 - RNA, 19 nt, Artificial Sequence
  Description of Artificial Sequence: Synthetic oligonucleotide
gauggcaauguagugacgc

SEQ ID NO: 3260915 - RNA, 19 nt, Artificial Sequence
  Description of Artificial Sequence: Synthetic oligonucleotide
uuguuuguuuguuuugccc

SEQ ID NO: 3260916 - RNA, 19 nt, Artificial Sequence
  Description of Artificial Sequence: Synthetic oligonucleotide
acugguggcgggcagcugc

SEQ ID NO: 3260917 - RNA, 19 nt, Artificial Sequence
  Description of Artificial Sequence: Synthetic oligonucleotide
ugccaugauggcaauguag

SEQ ID NO: 3260918 - RNA, 19 nt, Artificial Sequence
  Description of Artificial Sequence: Synthetic oligonucleotide
uuuguuuguuuguuuugcc

SEQ ID NO: 3260919 - RNA, 19 nt, Artificial Sequence
  Description of Artificial Sequence: Synthetic oligonucleotide
auguagugacgccaagagc

SEQ ID NO: 3260920 - RNA, 19 nt, Artificial Sequence
  Description of Artificial Sequence: Synthetic oligonucleotide
guuuguuuguuuugcccgg

SEQ ID NO: 3260921 - RNA, 19 nt, Artificial Sequence
  Description of Artificial Sequence: Synthetic oligonucleotide
aagaacacugguggcgggc

SEQ ID NO: 3260922 - RNA, 19 nt, Artificial Sequence
  Description of Artificial Sequence: Synthetic oligonucleotide
agguaagaacacugguggc

SEQ ID NO: 3260923 - RNA, 19 nt, Artificial Sequence
  Description of Artificial Sequence: Synthetic oligonucleotide
auggcaauguagugacgcc

SEQ ID NO: 3260924 - RNA, 19 nt, Artificial Sequence
  Description of Artificial Sequence: Synthetic oligonucleotide
guaagaacacugguggcgg

SEQ ID NO: 3260925 - RNA, 19 nt, Artificial Sequence
  Description of Artificial Sequence: Synthetic oligonucleotide
uguuuugcccgguggaggc

SEQ ID NO: 3260926 - RNA, 19 nt, Artificial Sequence
  Description of Artificial Sequence: Synthetic oligonucleotide
caggaacucggucaugugg

SEQ ID NO: 3260927 - RNA, 19 nt, Artificial Sequence
  Description of Artificial Sequence: Synthetic oligonucleotide
accaccagucugcaggaac

SEQ ID NO: 3260928 - RNA, 19 nt, Artificial Sequence
  Description of Artificial Sequence: Synthetic oligonucleotide
uuuguuuugcccgguggag

SEQ ID NO: 3260929 - RNA, 19 nt, Artificial Sequence
  Description of Artificial Sequence: Synthetic oligonucleotide
gguaagaacacugguggcg

SEQ ID NO: 3260930 - RNA, 19 nt, Artificial Sequence
  Description of Artificial Sequence: Synthetic oligonucleotide
aggaacucggucauguggg

SEQ ID NO: 3260931 - RNA, 19 nt, Artificial Sequence
  Description of Artificial Sequence: Synthetic oligonucleotide
ucaugugggagcccaccag

SEQ ID NO: 3260932 - RNA, 19 nt, Artificial Sequence
  Description of Artificial Sequence: Synthetic oligonucleotide
uuguuuugcccgguggagg

SEQ ID NO: 3260933 - RNA, 19 nt, Artificial Sequence
  Description of Artificial Sequence: Synthetic oligonucleotide
aacacugguggcgggcagc

SEQ ID NO: 3260934 - RNA, 19 nt, Artificial Sequence
  Description of Artificial Sequence: Synthetic oligonucleotide
caugugggagcccaccagg

SEQ ID NO: 3260935 - RNA, 19 nt, Artificial Sequence
  Description of Artificial Sequence: Synthetic oligonucleotide
aggcccagcagccacuccg

SEQ ID NO: 3260936 - RNA, 19 nt, Artificial Sequence
  Description of Artificial Sequence: Synthetic oligonucleotide
gagcccaccagguaagaac

SEQ ID NO: 3260937 - RNA, 19 nt, Artificial Sequence
  Description of Artificial Sequence: Synthetic oligonucleotide
ucugcaggaacucggucau

SEQ ID NO: 3260938 - RNA, 19 nt, Artificial Sequence
  Description of Artificial Sequence: Synthetic oligonucleotide
caccagguaagaacacugg

SEQ ID NO: 3260939 - RNA, 19 nt, Artificial Sequence
  Description of Artificial Sequence: Synthetic oligonucleotide
uaagaacacugguggcggg

SEQ ID NO: 3260940 - RNA, 19 nt, Artificial Sequence
  Description of Artificial Sequence: Synthetic oligonucleotide
accagguaagaacacuggu

SEQ ID NO: 3260941 - RNA, 19 nt, Artificial Sequence
  Description of Artificial Sequence: Synthetic oligonucleotide
caugauggcaauguaguga

SEQ ID NO: 3260942 - RNA, 19 nt, Artificial Sequence
  Description of Artificial Sequence: Synthetic oligonucleotide
guuuguuuugcccggugga

SEQ ID NO: 3260943 - RNA, 19 nt, Artificial Sequence
  Description of Artificial Sequence: Synthetic oligonucleotide
ugauggcaauguagugacg

SEQ ID NO: 3260944 - RNA, 19 nt, Artificial Sequence
  Description of Artificial Sequence: Synthetic oligonucleotide
gucugcaggaacucgguca

SEQ ID NO: 3260945 - RNA, 19 nt, Artificial Sequence
  Description of Artificial Sequence: Synthetic oligonucleotide
ugcaggaacucggucaugu

SEQ ID NO: 3260946 - RNA, 19 nt, Artificial Sequence
  Description of Artificial Sequence: Synthetic oligonucleotide
acucggucaugugggagcc

SEQ ID NO: 3260947 - RNA, 19 nt, Artificial Sequence
  Description of Artificial Sequence: Synthetic oligonucleotide
uuguuuguuuugcccggug

SEQ ID NO: 3260948 - RNA, 19 nt, Artificial Sequence
  Description of Artificial Sequence: Synthetic oligonucleotide
agucugcaggaacucgguc

SEQ ID NO: 3260949 - RNA, 19 nt, Artificial Sequence
  Description of Artificial Sequence: Synthetic oligonucleotide
ugggagcccaccagguaag

SEQ ID NO: 3260950 - RNA, 19 nt, Artificial Sequence
  Description of Artificial Sequence: Synthetic oligonucleotide
uggcaauguagugacgcca

SEQ ID NO: 3260951 - RNA, 19 nt, Artificial Sequence
  Description of Artificial Sequence: Synthetic oligonucleotide
uagugacgccaagagcugg

SEQ ID NO: 3260952 - RNA, 19 nt, Artificial Sequence
  Description of Artificial Sequence: Synthetic oligonucleotide
ccagguaagaacacuggug

SEQ ID NO: 3260953 - RNA, 19 nt, Artificial Sequence
  Description of Artificial Sequence: Synthetic oligonucleotide
uuuugcccgguggaggccc

SEQ ID NO: 3260954 - RNA, 19 nt, Artificial Sequence
  Description of Artificial Sequence: Synthetic oligonucleotide
ucaccaccagucugcagga

SEQ ID NO: 3260955 - RNA, 19 nt, Artificial Sequence
  Description of Artificial Sequence: Synthetic oligonucleotide
cuccgggucaccaccaguc

SEQ ID NO: 3260956 - RNA, 19 nt, Artificial Sequence
  Description of Artificial Sequence: Synthetic oligonucleotide
gaacucggucaugugggag

SEQ ID NO: 3260957 - RNA, 19 nt, Artificial Sequence
  Description of Artificial Sequence: Synthetic oligonucleotide
ucggucaugugggagccca

SEQ ID NO: 3260958 - RNA, 19 nt, Artificial Sequence
  Description of Artificial Sequence: Synthetic oligonucleotide
uuuguuuguuuugcccggu

SEQ ID NO: 3260959 - RNA, 19 nt, Artificial Sequence
  Description of Artificial Sequence: Synthetic oligonucleotide
accagucugcaggaacucg

SEQ ID NO: 3260960 - RNA, 19 nt, Artificial Sequence
  Description of Artificial Sequence: Synthetic oligonucleotide
ccagucugcaggaacucgg

SEQ ID NO: 3260961 - RNA, 19 nt, Artificial Sequence
  Description of Artificial Sequence: Synthetic oligonucleotide
cgggcagcugccaugaugg

SEQ ID NO: 3260962 - RNA, 19 nt, Artificial Sequence
  Description of Artificial Sequence: Synthetic oligonucleotide
agcccaccagguaagaaca

SEQ ID NO: 3260963 - RNA, 19 nt, Artificial Sequence
  Description of Artificial Sequence: Synthetic oligonucleotide
gaacacugguggcgggcag

SEQ ID NO: 3260964 - RNA, 19 nt, Artificial Sequence
  Description of Artificial Sequence: Synthetic oligonucleotide
caauguagugacgccaaga

SEQ ID NO: 3260965 - RNA, 19 nt, Artificial Sequence
  Description of Artificial Sequence: Synthetic oligonucleotide
agccacuccgggucaccac

SEQ ID NO: 3260966 - RNA, 19 nt, Artificial Sequence
  Description of Artificial Sequence: Synthetic oligonucleotide
uccgggucaccaccagucu

SEQ ID NO: 3260967 - RNA, 19 nt, Artificial Sequence
  Description of Artificial Sequence: Synthetic oligonucleotide
ccaccagguaagaacacug

SEQ ID NO: 3260968 - RNA, 19 nt, Artificial Sequence
  Description of Artificial Sequence: Synthetic oligonucleotide
gugggagcccaccagguaa

SEQ ID NO: 3260969 - RNA, 19 nt, Artificial Sequence
  Description of Artificial Sequence: Synthetic oligonucleotide
ugugggagcccaccaggua

SEQ ID NO: 3260970 - RNA, 19 nt, Artificial Sequence
  Description of Artificial Sequence: Synthetic oligonucleotide
guagugacgccaagagcug

SEQ ID NO: 3260971 - RNA, 19 nt, Artificial Sequence
  Description of Artificial Sequence: Synthetic oligonucleotide
agaacacugguggcgggca

SEQ ID NO: 3260972 - RNA, 19 nt, Artificial Sequence
  Description of Artificial Sequence: Synthetic oligonucleotide
gucaugugggagcccacca

SEQ ID NO: 3260973 - RNA, 19 nt, Artificial Sequence
  Description of Artificial Sequence: Synthetic oligonucleotide
guggaggcccagcagccac

SEQ ID NO: 3260974 - RNA, 19 nt, Artificial Sequence
  Description of Artificial Sequence: Synthetic oligonucleotide
cugguggcgggcagcugcc

SEQ ID NO: 3260975 - RNA, 19 nt, Artificial Sequence
  Description of Artificial Sequence: Synthetic oligonucleotide
uggaggcccagcagccacu

SEQ ID NO: 3260976 - RNA, 19 nt, Artificial Sequence
  Description of Artificial Sequence: Synthetic oligonucleotide
acuccgggucaccaccagu

SEQ ID NO: 3260977 - RNA, 19 nt, Artificial Sequence
  Description of Artificial Sequence: Synthetic oligonucleotide
ccaugauggcaauguagug

SEQ ID NO: 3260978 - RNA, 19 nt, Artificial Sequence
  Description of Artificial Sequence: Synthetic oligonucleotide
ccagcagccacuccggguc

SEQ ID NO: 3260979 - RNA, 19 nt, Artificial Sequence
  Description of Artificial Sequence: Synthetic oligonucleotide
gcaauguagugacgccaag

SEQ ID NO: 3260980 - RNA, 19 nt, Artificial Sequence
  Description of Artificial Sequence: Synthetic oligonucleotide
gccacuccgggucaccacc

SEQ ID NO: 3260981 - RNA, 19 nt, Artificial Sequence
  Description of Artificial Sequence: Synthetic oligonucleotide
uggcgggcagcugccauga

SEQ ID NO: 3260982 - RNA, 19 nt, Artificial Sequence
  Description of Artificial Sequence: Synthetic oligonucleotide
uuugcccgguggaggccca

SEQ ID NO: 3260983 - RNA, 19 nt, Artificial Sequence
  Description of Artificial Sequence: Synthetic oligonucleotide
guggcgggcagcugccaug

SEQ ID NO: 3260984 - RNA, 19 nt, Artificial Sequence
  Description of Artificial Sequence: Synthetic oligonucleotide
gcagcugccaugauggcaa

SEQ ID NO: 3260985 - RNA, 19 nt, Artificial Sequence
  Description of Artificial Sequence: Synthetic oligonucleotide
ccgguggaggcccagcagc

SEQ ID NO: 3260986 - RNA, 19 nt, Artificial Sequence
  Description of Artificial Sequence: Synthetic oligonucleotide
gccaugauggcaauguagu

SEQ ID NO: 3260987 - RNA, 19 nt, Artificial Sequence
  Description of Artificial Sequence: Synthetic oligonucleotide
guuuugcccgguggaggcc

SEQ ID NO: 3260988 - RNA, 19 nt, Artificial Sequence
  Description of Artificial Sequence: Synthetic oligonucleotide
acacugguggcgggcagcu

SEQ ID NO: 3260989 - RNA, 19 nt, Artificial Sequence
  Description of Artificial Sequence: Synthetic oligonucleotide
ggucaugugggagcccacc

SEQ ID NO: 3260990 - RNA, 19 nt, Artificial Sequence
  Description of Artificial Sequence: Synthetic oligonucleotide
augugggagcccaccaggu

SEQ ID NO: 3260991 - RNA, 19 nt, Artificial Sequence
  Description of Artificial Sequence: Synthetic oligonucleotide
agcagccacuccgggucac

SEQ ID NO: 3260992 - RNA, 19 nt, Artificial Sequence
  Description of Artificial Sequence: Synthetic oligonucleotide
cgggucaccaccagucugc

SEQ ID NO: 3260993 - RNA, 19 nt, Artificial Sequence
  Description of Artificial Sequence: Synthetic oligonucleotide
gcgggcagcugccaugaug

SEQ ID NO: 3260994 - RNA, 19 nt, Artificial Sequence
  Description of Artificial Sequence: Synthetic oligonucleotide
cacuccgggucaccaccag

SEQ ID NO: 3260995 - RNA, 19 nt, Artificial Sequence
  Description of Artificial Sequence: Synthetic oligonucleotide
ggcaauguagugacgccaa

SEQ ID NO: 3260996 - RNA, 19 nt, Artificial Sequence
  Description of Artificial Sequence: Synthetic oligonucleotide
gcugccaugauggcaaugu

SEQ ID NO: 3260997 - RNA, 19 nt, Artificial Sequence
  Description of Artificial Sequence: Synthetic oligonucleotide
gcaggaacucggucaugug

SEQ ID NO: 3260998 - RNA, 19 nt, Artificial Sequence
  Description of Artificial Sequence: Synthetic oligonucleotide
ggaacucggucauguggga

SEQ ID NO: 3260999 - RNA, 19 nt, Artificial Sequence
  Description of Artificial Sequence: Synthetic oligonucleotide
gaggcccagcagccacucc

SEQ ID NO: 3261000 - RNA, 19 nt, Artificial Sequence
  Description of Artificial Sequence: Synthetic oligonucleotide
caccagucugcaggaacuc

SEQ ID NO: 3261001 - RNA, 19 nt, Artificial Sequence
  Description of Artificial Sequence: Synthetic oligonucleotide
agcugccaugauggcaaug

SEQ ID NO: 3261002 - RNA, 19 nt, Artificial Sequence
  Description of Artificial Sequence: Synthetic oligonucleotide
ggcagcugccaugauggca

SEQ ID NO: 3261003 - RNA, 19 nt, Artificial Sequence
  Description of Artificial Sequence: Synthetic oligonucleotide
ggucaccaccagucugcag

SEQ ID NO: 3261004 - RNA, 19 nt, Artificial Sequence
  Description of Artificial Sequence: Synthetic oligonucleotide
ggcccagcagccacuccgg

SEQ ID NO: 3261005 - RNA, 19 nt, Artificial Sequence
  Description of Artificial Sequence: Synthetic oligonucleotide
guucauggaacccaggccg

SEQ ID NO: 3261006 - RNA, 19 nt, Artificial Sequence
  Description of Artificial Sequence: Synthetic oligonucleotide
cuguucauggaguucaugg

SEQ ID NO: 3261007 - RNA, 19 nt, Artificial Sequence
  Description of Artificial Sequence: Synthetic oligonucleotide
aguucauggaacccaggcc

SEQ ID NO: 3261008 - RNA, 19 nt, Artificial Sequence
  Description of Artificial Sequence: Synthetic oligonucleotide
aagccggugucauauugcc

SEQ ID NO: 3261009 - RNA, 19 nt, Artificial Sequence
  Description of Artificial Sequence: Synthetic oligonucleotide
uaggacauguugaaggaag

SEQ ID NO: 3261010 - RNA, 19 nt, Artificial Sequence
  Description of Artificial Sequence: Synthetic oligonucleotide
uucauggucauguagcugu

SEQ ID NO: 3261011 - RNA, 19 nt, Artificial Sequence
  Description of Artificial Sequence: Synthetic oligonucleotide
guggucaugguguucaugg

SEQ ID NO: 3261012 - RNA, 19 nt, Artificial Sequence
  Description of Artificial Sequence: Synthetic oligonucleotide
agaggaguaggccuccugc

SEQ ID NO: 3261013 - RNA, 19 nt, Artificial Sequence
  Description of Artificial Sequence: Synthetic oligonucleotide
gaguucauguugcugacag

SEQ ID NO: 3261014 - RNA, 19 nt, Artificial Sequence
  Description of Artificial Sequence: Synthetic oligonucleotide
guucauguugcugacaggg

SEQ ID NO: 3261015 - RNA, 19 nt, Artificial Sequence
  Description of Artificial Sequence: Synthetic oligonucleotide
gacauguugaaggaagccg

SEQ ID NO: 3261016 - RNA, 19 nt, Artificial Sequence
  Description of Artificial Sequence: Synthetic oligonucleotide
gucauguagcuguucaugg

SEQ ID NO: 3261017 - RNA, 19 nt, Artificial Sequence
  Description of Artificial Sequence: Synthetic oligonucleotide
uguugaaggaagccggugu

SEQ ID NO: 3261018 - RNA, 19 nt, Artificial Sequence
  Description of Artificial Sequence: Synthetic oligonucleotide
ucauguugcugacagggac

SEQ ID NO: 3261019 - RNA, 19 nt, Artificial Sequence
  Description of Artificial Sequence: Synthetic oligonucleotide
gaguucauggaacccaggc

SEQ ID NO: 3261020 - RNA, 19 nt, Artificial Sequence
  Description of Artificial Sequence: Synthetic oligonucleotide
gucauauugccgcucgugg

SEQ ID NO: 3261021 - RNA, 19 nt, Artificial Sequence
  Description of Artificial Sequence: Synthetic oligonucleotide
uucauggaguucauggaac

SEQ ID NO: 3261022 - RNA, 19 nt, Artificial Sequence
  Description of Artificial Sequence: Synthetic oligonucleotide
guugcugacagggacagag

SEQ ID NO: 3261023 - RNA, 19 nt, Artificial Sequence
  Description of Artificial Sequence: Synthetic oligonucleotide
uuggcguaggacauguuga

SEQ ID NO: 3261024 - RNA, 19 nt, Artificial Sequence
  Description of Artificial Sequence: Synthetic oligonucleotide
agucgcugcucucaugccc

SEQ ID NO: 3261025 - RNA, 19 nt, Artificial Sequence
  Description of Artificial Sequence: Synthetic oligonucleotide
cauguagcuguucauggag

SEQ ID NO: 3261026 - RNA, 19 nt, Artificial Sequence
  Description of Artificial Sequence: Synthetic oligonucleotide
acauguugaaggaagccgg

SEQ ID NO: 3261027 - RNA, 19 nt, Artificial Sequence
  Description of Artificial Sequence: Synthetic oligonucleotide
ucauggaguucauggaacc

SEQ ID NO: 3261028 - RNA, 19 nt, Artificial Sequence
  Description of Artificial Sequence: Synthetic oligonucleotide
uguucauggaguucaugga

SEQ ID NO: 3261029 - RNA, 19 nt, Artificial Sequence
  Description of Artificial Sequence: Synthetic oligonucleotide
guaguagcuguuccagucg

SEQ ID NO: 3261030 - RNA, 19 nt, Artificial Sequence
  Description of Artificial Sequence: Synthetic oligonucleotide
guuggcguaggacauguug

SEQ ID NO: 3261031 - RNA, 19 nt, Artificial Sequence
  Description of Artificial Sequence: Synthetic oligonucleotide
ugcugacagggacagagga

SEQ ID NO: 3261032 - RNA, 19 nt, Artificial Sequence
  Description of Artificial Sequence: Synthetic oligonucleotide
uucauggaacccaggccgg

SEQ ID NO: 3261033 - RNA, 19 nt, Artificial Sequence
  Description of Artificial Sequence: Synthetic oligonucleotide
uguucauggucauguagcu

SEQ ID NO: 3261034 - RNA, 19 nt, Artificial Sequence
  Description of Artificial Sequence: Synthetic oligonucleotide
uggaguucauggaacccag

SEQ ID NO: 3261035 - RNA, 19 nt, Artificial Sequence
  Description of Artificial Sequence: Synthetic oligonucleotide
agagccuccgggcaugccg

SEQ ID NO: 3261036 - RNA, 19 nt, Artificial Sequence
  Description of Artificial Sequence: Synthetic oligonucleotide
gcguaggacauguugaagg

SEQ ID NO: 3261037 - RNA, 19 nt, Artificial Sequence
  Description of Artificial Sequence: Synthetic oligonucleotide
gaggaguaggccuccugcg

SEQ ID NO: 3261038 - RNA, 19 nt, Artificial Sequence
  Description of Artificial Sequence: Synthetic oligonucleotide
ugcgugucggcguaguagc

SEQ ID NO: 3261039 - RNA, 19 nt, Artificial Sequence
  Description of Artificial Sequence: Synthetic oligonucleotide
uaguagcuguuccagucgc

SEQ ID NO: 3261040 - RNA, 19 nt, Artificial Sequence
  Description of Artificial Sequence: Synthetic oligonucleotide
guguucauggucauguagc

SEQ ID NO: 3261041 - RNA, 19 nt, Artificial Sequence
  Description of Artificial Sequence: Synthetic oligonucleotide
auggucauguagcuguuca

SEQ ID NO: 3261042 - RNA, 19 nt, Artificial Sequence
  Description of Artificial Sequence: Synthetic oligonucleotide
aaggaagccggugucauau

SEQ ID NO: 3261043 - RNA, 19 nt, Artificial Sequence
  Description of Artificial Sequence: Synthetic oligonucleotide
uagcuguucauggaguuca

SEQ ID NO: 3261044 - RNA, 19 nt, Artificial Sequence
  Description of Artificial Sequence: Synthetic oligonucleotide
acagggacagaggaguagg

SEQ ID NO: 3261045 - RNA, 19 nt, Artificial Sequence
  Description of Artificial Sequence: Synthetic oligonucleotide
ucauguagcuguucaugga

SEQ ID NO: 3261046 - RNA, 19 nt, Artificial Sequence
  Description of Artificial Sequence: Synthetic oligonucleotide
ucauauugccgcucguggu

SEQ ID NO: 3261047 - RNA, 19 nt, Artificial Sequence
  Description of Artificial Sequence: Synthetic oligonucleotide
augguguucauggucaugu

SEQ ID NO: 3261048 - RNA, 19 nt, Artificial Sequence
  Description of Artificial Sequence: Synthetic oligonucleotide
acggccggcucguagggcc

SEQ ID NO: 3261049 - RNA, 19 nt, Artificial Sequence
  Description of Artificial Sequence: Synthetic oligonucleotide
agggacagaggaguaggcc

SEQ ID NO: 3261050 - RNA, 19 nt, Artificial Sequence
  Description of Artificial Sequence: Synthetic oligonucleotide
aggacauguugaaggaagc

SEQ ID NO: 3261051 - RNA, 19 nt, Artificial Sequence
  Description of Artificial Sequence: Synthetic oligonucleotide
ugucauauugccgcucgug

SEQ ID NO: 3261052 - RNA, 19 nt, Artificial Sequence
  Description of Artificial Sequence: Synthetic oligonucleotide
acagcacccggacucgacg

SEQ ID NO: 3261053 - RNA, 19 nt, Artificial Sequence
  Description of Artificial Sequence: Synthetic oligonucleotide
aguucauguugcugacagg

SEQ ID NO: 3261054 - RNA, 19 nt, Artificial Sequence
  Description of Artificial Sequence: Synthetic oligonucleotide
ucggcguaguagcuguucc

SEQ ID NO: 3261055 - RNA, 19 nt, Artificial Sequence
  Description of Artificial Sequence: Synthetic oligonucleotide
ggugucauauugccgcucg

SEQ ID NO: 3261056 - RNA, 19 nt, Artificial Sequence
  Description of Artificial Sequence: Synthetic oligonucleotide
ucgacggccggcucguagg

SEQ ID NO: 3261057 - RNA, 19 nt, Artificial Sequence
  Description of Artificial Sequence: Synthetic oligonucleotide
uugcugacagggacagagg

SEQ ID NO: 3261058 - RNA, 19 nt, Artificial Sequence
  Description of Artificial Sequence: Synthetic oligonucleotide
uucauguugcugacaggga

SEQ ID NO: 3261059 - RNA, 19 nt, Artificial Sequence
  Description of Artificial Sequence: Synthetic oligonucleotide
cauauugccgcucgugguc

SEQ ID NO: 3261060 - RNA, 19 nt, Artificial Sequence
  Description of Artificial Sequence: Synthetic oligonucleotide
gguguucauggucauguag

SEQ ID NO: 3261061 - RNA, 19 nt, Artificial Sequence
  Description of Artificial Sequence: Synthetic oligonucleotide
guucauggaguucauggaa

SEQ ID NO: 3261062 - RNA, 19 nt, Artificial Sequence
  Description of Artificial Sequence: Synthetic oligonucleotide
uguagcuguucauggaguu

SEQ ID NO: 3261063 - RNA, 19 nt, Artificial Sequence
  Description of Artificial Sequence: Synthetic oligonucleotide
gaagccggugucauauugc

SEQ ID NO: 3261064 - RNA, 19 nt, Artificial Sequence
  Description of Artificial Sequence: Synthetic oligonucleotide
gccggugucauauugccgc

SEQ ID NO: 3261065 - RNA, 19 nt, Artificial Sequence
  Description of Artificial Sequence: Synthetic oligonucleotide
guugaaggaagccgguguc

SEQ ID NO: 3261066 - RNA, 19 nt, Artificial Sequence
  Description of Artificial Sequence: Synthetic oligonucleotide
auggaguucauggaaccca

SEQ ID NO: 3261067 - RNA, 19 nt, Artificial Sequence
  Description of Artificial Sequence: Synthetic oligonucleotide
gucaugguguucaugguca

SEQ ID NO: 3261068 - RNA, 19 nt, Artificial Sequence
  Description of Artificial Sequence: Synthetic oligonucleotide
auguugcugacagggacag

SEQ ID NO: 3261069 - RNA, 19 nt, Artificial Sequence
  Description of Artificial Sequence: Synthetic oligonucleotide
uaggccuccugcgugucgg

SEQ ID NO: 3261070 - RNA, 19 nt, Artificial Sequence
  Description of Artificial Sequence: Synthetic oligonucleotide
agcacccggacucgacggc

SEQ ID NO: 3261071 - RNA, 19 nt, Artificial Sequence
  Description of Artificial Sequence: Synthetic oligonucleotide
cauggaguucauggaaccc

SEQ ID NO: 3261072 - RNA, 19 nt, Artificial Sequence
  Description of Artificial Sequence: Synthetic oligonucleotide
cauguugcugacagggaca

SEQ ID NO: 3261073 - RNA, 19 nt, Artificial Sequence
  Description of Artificial Sequence: Synthetic oligonucleotide
agcuguuccagucgcugcu

SEQ ID NO: 3261074 - RNA, 19 nt, Artificial Sequence
  Description of Artificial Sequence: Synthetic oligonucleotide
uugaaggaagccgguguca

SEQ ID NO: 3261075 - RNA, 19 nt, Artificial Sequence
  Description of Artificial Sequence: Synthetic oligonucleotide
uagcuguuccagucgcugc

SEQ ID NO: 3261076 - RNA, 19 nt, Artificial Sequence
  Description of Artificial Sequence: Synthetic oligonucleotide
gacagggacagaggaguag

SEQ ID NO: 3261077 - RNA, 19 nt, Artificial Sequence
  Description of Artificial Sequence: Synthetic oligonucleotide
uugccgcucguggucaugg

SEQ ID NO: 3261078 - RNA, 19 nt, Artificial Sequence
  Description of Artificial Sequence: Synthetic oligonucleotide
aggccggaguucauguugc

SEQ ID NO: 3261079 - RNA, 19 nt, Artificial Sequence
  Description of Artificial Sequence: Synthetic oligonucleotide
caugccggccacagcaccc

SEQ ID NO: 3261080 - RNA, 19 nt, Artificial Sequence
  Description of Artificial Sequence: Synthetic oligonucleotide
caggccggaguucauguug

SEQ ID NO: 3261081 - RNA, 19 nt, Artificial Sequence
  Description of Artificial Sequence: Synthetic oligonucleotide
guagcuguuccagucgcug

SEQ ID NO: 3261082 - RNA, 19 nt, Artificial Sequence
  Description of Artificial Sequence: Synthetic oligonucleotide
aggaguaggccuccugcgu

SEQ ID NO: 3261083 - RNA, 19 nt, Artificial Sequence
  Description of Artificial Sequence: Synthetic oligonucleotide
ugaaggaagccggugucau

SEQ ID NO: 3261084 - RNA, 19 nt, Artificial Sequence
  Description of Artificial Sequence: Synthetic oligonucleotide
uggcguaggacauguugaa

SEQ ID NO: 3261085 - RNA, 19 nt, Artificial Sequence
  Description of Artificial Sequence: Synthetic oligonucleotide
ccagucgcugcucucaugc

SEQ ID NO: 3261086 - RNA, 19 nt, Artificial Sequence
  Description of Artificial Sequence: Synthetic oligonucleotide
cagcacccggacucgacgg

SEQ ID NO: 3261087 - RNA, 19 nt, Artificial Sequence
  Description of Artificial Sequence: Synthetic oligonucleotide
ggucauguagcuguucaug

SEQ ID NO: 3261088 - RNA, 19 nt, Artificial Sequence
  Description of Artificial Sequence: Synthetic oligonucleotide
ggaagccggugucauauug

SEQ ID NO: 3261089 - RNA, 19 nt, Artificial Sequence
  Description of Artificial Sequence: Synthetic oligonucleotide
cagggacagaggaguaggc

SEQ ID NO: 3261090 - RNA, 19 nt, Artificial Sequence
  Description of Artificial Sequence: Synthetic oligonucleotide
cugcgugucggcguaguag

SEQ ID NO: 3261091 - RNA, 19 nt, Artificial Sequence
  Description of Artificial Sequence: Synthetic oligonucleotide
ggucaugguguucaugguc

SEQ ID NO: 3261092 - RNA, 19 nt, Artificial Sequence
  Description of Artificial Sequence: Synthetic oligonucleotide
uggucaugguguucauggu

SEQ ID NO: 3261093 - RNA, 19 nt, Artificial Sequence
  Description of Artificial Sequence: Synthetic oligonucleotide
auguugaaggaagccggug

SEQ ID NO: 3261094 - RNA, 19 nt, Artificial Sequence
  Description of Artificial Sequence: Synthetic oligonucleotide
gagccuccgggcaugccgg

SEQ ID NO: 3261095 - RNA, 19 nt, Artificial Sequence
  Description of Artificial Sequence: Synthetic oligonucleotide
auauugccgcucgugguca

SEQ ID NO: 3261096 - RNA, 19 nt, Artificial Sequence
  Description of Artificial Sequence: Synthetic oligonucleotide
guucauggucauguagcug

SEQ ID NO: 3261097 - RNA, 19 nt, Artificial Sequence
  Description of Artificial Sequence: Synthetic oligonucleotide
auggaacccaggccggagu

SEQ ID NO: 3261098 - RNA, 19 nt, Artificial Sequence
  Description of Artificial Sequence: Synthetic oligonucleotide
ggaguaggccuccugcgug

SEQ ID NO: 3261099 - RNA, 19 nt, Artificial Sequence
  Description of Artificial Sequence: Synthetic oligonucleotide
uggucauguagcuguucau

SEQ ID NO: 3261100 - RNA, 19 nt, Artificial Sequence
  Description of Artificial Sequence: Synthetic oligonucleotide
cucguggucaugguguuca

SEQ ID NO: 3261101 - RNA, 19 nt, Artificial Sequence
  Description of Artificial Sequence: Synthetic oligonucleotide
gaacccaggccggaguuca

SEQ ID NO: 3261102 - RNA, 19 nt, Artificial Sequence
  Description of Artificial Sequence: Synthetic oligonucleotide
ggacauguugaaggaagcc

SEQ ID NO: 3261103 - RNA, 19 nt, Artificial Sequence
  Description of Artificial Sequence: Synthetic oligonucleotide
gacagaggaguaggccucc

SEQ ID NO: 3261104 - RNA, 19 nt, Artificial Sequence
  Description of Artificial Sequence: Synthetic oligonucleotide
auguagcuguucauggagu

SEQ ID NO: 3261105 - RNA, 19 nt, Artificial Sequence
  Description of Artificial Sequence: Synthetic oligonucleotide
uuugaaauauuucaguucg

SEQ ID NO: 3261106 - RNA, 19 nt, Artificial Sequence
  Description of Artificial Sequence: Synthetic oligonucleotide
uguuucaaaacaaucagag

SEQ ID NO: 3261107 - RNA, 19 nt, Artificial Sequence
  Description of Artificial Sequence: Synthetic oligonucleotide
uaaaguugaauauucauug

SEQ ID NO: 3261108 - RNA, 19 nt, Artificial Sequence
  Description of Artificial Sequence: Synthetic oligonucleotide
ugaguaaucaaacuggaca

SEQ ID NO: 3261109 - RNA, 19 nt, Artificial Sequence
  Description of Artificial Sequence: Synthetic oligonucleotide
aaaaugcuugacaaaaucc

SEQ ID NO: 3261110 - RNA, 19 nt, Artificial Sequence
  Description of Artificial Sequence: Synthetic oligonucleotide
aauccuuuaaaguugaaua

SEQ ID NO: 3261111 - RNA, 19 nt, Artificial Sequence
  Description of Artificial Sequence: Synthetic oligonucleotide
gauguuucaaaacaaucag

SEQ ID NO: 3261112 - RNA, 19 nt, Artificial Sequence
  Description of Artificial Sequence: Synthetic oligonucleotide
auugcugucccuuagcagg

SEQ ID NO: 3261113 - RNA, 19 nt, Artificial Sequence
  Description of Artificial Sequence: Synthetic oligonucleotide
gagucuuuggcucucacgg

SEQ ID NO: 3261114 - RNA, 19 nt, Artificial Sequence
  Description of Artificial Sequence: Synthetic oligonucleotide
acaugaaaguguuugacag

SEQ ID NO: 3261115 - RNA, 19 nt, Artificial Sequence
  Description of Artificial Sequence: Synthetic oligonucleotide
aaaacaaucagagucccug

SEQ ID NO: 3261116 - RNA, 19 nt, Artificial Sequence
  Description of Artificial Sequence: Synthetic oligonucleotide
uuuaaaugaguacccagug

SEQ ID NO: 3261117 - RNA, 19 nt, Artificial Sequence
  Description of Artificial Sequence: Synthetic oligonucleotide
gaguaaucaaacuggacag

SEQ ID NO: 3261118 - RNA, 19 nt, Artificial Sequence
  Description of Artificial Sequence: Synthetic oligonucleotide
caaauuuaaaugaguaccc

SEQ ID NO: 3261119 - RNA, 19 nt, Artificial Sequence
  Description of Artificial Sequence: Synthetic oligonucleotide
ugagagguugccaugauac

SEQ ID NO: 3261120 - RNA, 19 nt, Artificial Sequence
  Description of Artificial Sequence: Synthetic oligonucleotide
uggucuuugaaauauuuca

SEQ ID NO: 3261121 - RNA, 19 nt, Artificial Sequence
  Description of Artificial Sequence: Synthetic oligonucleotide
auuggagaggagaagagcc

SEQ ID NO: 3261122 - RNA, 19 nt, Artificial Sequence
  Description of Artificial Sequence: Synthetic oligonucleotide
auugaagccaaauuuaaau

SEQ ID NO: 3261123 - RNA, 19 nt, Artificial Sequence
  Description of Artificial Sequence: Synthetic oligonucleotide
aaucaaacuggacagcaga

SEQ ID NO: 3261124 - RNA, 19 nt, Artificial Sequence
  Description of Artificial Sequence: Synthetic oligonucleotide
agagcacucugucaggucc

SEQ ID NO: 3261125 - RNA, 19 nt, Artificial Sequence
  Description of Artificial Sequence: Synthetic oligonucleotide
acggagagcgaauagaguc

SEQ ID NO: 3261126 - RNA, 19 nt, Artificial Sequence
  Description of Artificial Sequence: Synthetic oligonucleotide
cugugaguaaucaaacugg

SEQ ID NO: 3261127 - RNA, 19 nt, Artificial Sequence
  Description of Artificial Sequence: Synthetic oligonucleotide
gaaaguguuugacagaguc

SEQ ID NO: 3261128 - RNA, 19 nt, Artificial Sequence
  Description of Artificial Sequence: Synthetic oligonucleotide
aagugaaccaucuuguuuu

SEQ ID NO: 3261129 - RNA, 19 nt, Artificial Sequence
  Description of Artificial Sequence: Synthetic oligonucleotide
aacaugaaaguguuugaca

SEQ ID NO: 3261130 - RNA, 19 nt, Artificial Sequence
  Description of Artificial Sequence: Synthetic oligonucleotide
auagggauguuucaaaaca

SEQ ID NO: 3261131 - RNA, 19 nt, Artificial Sequence
  Description of Artificial Sequence: Synthetic oligonucleotide
uugaagccaaauuuaaaug

SEQ ID NO: 3261132 - RNA, 19 nt, Artificial Sequence
  Description of Artificial Sequence: Synthetic oligonucleotide
aauagaguccagucugcuc

SEQ ID NO: 3261133 - RNA, 19 nt, Artificial Sequence
  Description of Artificial Sequence: Synthetic oligonucleotide
agauggaaggcucuucuac

SEQ ID NO: 3261134 - RNA, 19 nt, Artificial Sequence
  Description of Artificial Sequence: Synthetic oligonucleotide
uuuccugugaguaaucaaa

SEQ ID NO: 3261135 - RNA, 19 nt, Artificial Sequence
  Description of Artificial Sequence: Synthetic oligonucleotide
auucauugaagccaaauuu

SEQ ID NO: 3261136 - RNA, 19 nt, Artificial Sequence
  Description of Artificial Sequence: Synthetic oligonucleotide
aaguugaauauucauugaa

SEQ ID NO: 3261137 - RNA, 19 nt, Artificial Sequence
  Description of Artificial Sequence: Synthetic oligonucleotide
auagaguccagucugcuca

SEQ ID NO: 3261138 - RNA, 19 nt, Artificial Sequence
  Description of Artificial Sequence: Synthetic oligonucleotide
ugacaaaauccuuuaaagu

SEQ ID NO: 3261139 - RNA, 19 nt, Artificial Sequence
  Description of Artificial Sequence: Synthetic oligonucleotide
uuggcucucacggagagcg

SEQ ID NO: 3261140 - RNA, 19 nt, Artificial Sequence
  Description of Artificial Sequence: Synthetic oligonucleotide
aaaugcuugacaaaauccu

SEQ ID NO: 3261141 - RNA, 19 nt, Artificial Sequence
  Description of Artificial Sequence: Synthetic oligonucleotide
aacaguucacucuuuccug

SEQ ID NO: 3261142 - RNA, 19 nt, Artificial Sequence
  Description of Artificial Sequence: Synthetic oligonucleotide
caugauaccaccccaaguc

SEQ ID NO: 3261143 - RNA, 19 nt, Artificial Sequence
  Description of Artificial Sequence: Synthetic oligonucleotide
augauaccaccccaagucc

SEQ ID NO: 3261144 - RNA, 19 nt, Artificial Sequence
  Description of Artificial Sequence: Synthetic oligonucleotide
uuugcaaaagugaaccauc

SEQ ID NO: 3261145 - RNA, 19 nt, Artificial Sequence
  Description of Artificial Sequence: Synthetic oligonucleotide
aaccaucuuguuuuccagg

SEQ ID NO: 3261146 - RNA, 19 nt, Artificial Sequence
  Description of Artificial Sequence: Synthetic oligonucleotide
cagaaugcgaauugguucc

SEQ ID NO: 3261147 - RNA, 19 nt, Artificial Sequence
  Description of Artificial Sequence: Synthetic oligonucleotide
uuuuccaggucuuuaccag

SEQ ID NO: 3261148 - RNA, 19 nt, Artificial Sequence
  Description of Artificial Sequence: Synthetic oligonucleotide
cuuugaaauauuucaguuc

SEQ ID NO: 3261149 - RNA, 19 nt, Artificial Sequence
  Description of Artificial Sequence: Synthetic oligonucleotide
uauucaacaugaaaguguu

SEQ ID NO: 3261150 - RNA, 19 nt, Artificial Sequence
  Description of Artificial Sequence: Synthetic oligonucleotide
augaaaguguuugacagag

SEQ ID NO: 3261151 - RNA, 19 nt, Artificial Sequence
  Description of Artificial Sequence: Synthetic oligonucleotide
agaaacaguucacucuuuc

SEQ ID NO: 3261152 - RNA, 19 nt, Artificial Sequence
  Description of Artificial Sequence: Synthetic oligonucleotide
ucacggagagcgaauagag

SEQ ID NO: 3261153 - RNA, 19 nt, Artificial Sequence
  Description of Artificial Sequence: Synthetic oligonucleotide
ugugaguaaucaaacugga

SEQ ID NO: 3261154 - RNA, 19 nt, Artificial Sequence
  Description of Artificial Sequence: Synthetic oligonucleotide
aaggcugauuugcaaaaug

SEQ ID NO: 3261155 - RNA, 19 nt, Artificial Sequence
  Description of Artificial Sequence: Synthetic oligonucleotide
ucuuugaaauauuucaguu

SEQ ID NO: 3261156 - RNA, 19 nt, Artificial Sequence
  Description of Artificial Sequence: Synthetic oligonucleotide
ccaaauuuaaaugaguacc

SEQ ID NO: 3261157 - RNA, 19 nt, Artificial Sequence
  Description of Artificial Sequence: Synthetic oligonucleotide
ucucacuuccgaucaaagg

SEQ ID NO: 3261158 - RNA, 19 nt, Artificial Sequence
  Description of Artificial Sequence: Synthetic oligonucleotide
uauucauugaagccaaauu

SEQ ID NO: 3261159 - RNA, 19 nt, Artificial Sequence
  Description of Artificial Sequence: Synthetic oligonucleotide
aaauuuaaaugaguaccca

SEQ ID NO: 3261160 - RNA, 19 nt, Artificial Sequence
  Description of Artificial Sequence: Synthetic oligonucleotide
ugaaccaucuuguuuucca

SEQ ID NO: 3261161 - RNA, 19 nt, Artificial Sequence
  Description of Artificial Sequence: Synthetic oligonucleotide
ucuuggauagggauguuuc

SEQ ID NO: 3261162 - RNA, 19 nt, Artificial Sequence
  Description of Artificial Sequence: Synthetic oligonucleotide
ugcgaauugguuccgguga

SEQ ID NO: 3261163 - RNA, 19 nt, Artificial Sequence
  Description of Artificial Sequence: Synthetic oligonucleotide
augaguacccaguguauuc

SEQ ID NO: 3261164 - RNA, 19 nt, Artificial Sequence
  Description of Artificial Sequence: Synthetic oligonucleotide
ucugucagguccagaaugc

SEQ ID NO: 3261165 - RNA, 19 nt, Artificial Sequence
  Description of Artificial Sequence: Synthetic oligonucleotide
gcaaaagugaaccaucuug

SEQ ID NO: 3261166 - RNA, 19 nt, Artificial Sequence
  Description of Artificial Sequence: Synthetic oligonucleotide
ugauuugcaaaaugcuuga

SEQ ID NO: 3261167 - RNA, 19 nt, Artificial Sequence
  Description of Artificial Sequence: Synthetic oligonucleotide
auugguuccggugacaucu

SEQ ID NO: 3261168 - RNA, 19 nt, Artificial Sequence
  Description of Artificial Sequence: Synthetic oligonucleotide
caaaaugcuugacaaaauc

SEQ ID NO: 3261169 - RNA, 19 nt, Artificial Sequence
  Description of Artificial Sequence: Synthetic oligonucleotide
uaaucaaacuggacagcag

SEQ ID NO: 3261170 - RNA, 19 nt, Artificial Sequence
  Description of Artificial Sequence: Synthetic oligonucleotide
aguaaucaaacuggacagc

SEQ ID NO: 3261171 - RNA, 19 nt, Artificial Sequence
  Description of Artificial Sequence: Synthetic oligonucleotide
aggcugauuugcaaaaugc

SEQ ID NO: 3261172 - RNA, 19 nt, Artificial Sequence
  Description of Artificial Sequence: Synthetic oligonucleotide
uuuccaggucuuuaccagg

SEQ ID NO: 3261173 - RNA, 19 nt, Artificial Sequence
  Description of Artificial Sequence: Synthetic oligonucleotide
ucuucuacuuuucuuggau

SEQ ID NO: 3261174 - RNA, 19 nt, Artificial Sequence
  Description of Artificial Sequence: Synthetic oligonucleotide
aaauccuuuaaaguugaau

SEQ ID NO: 3261175 - RNA, 19 nt, Artificial Sequence
  Description of Artificial Sequence: Synthetic oligonucleotide
ucccuuagcagguagcuac

SEQ ID NO: 3261176 - RNA, 19 nt, Artificial Sequence
  Description of Artificial Sequence: Synthetic oligonucleotide
aguccagucugcucauugc

SEQ ID NO: 3261177 - RNA, 19 nt, Artificial Sequence
  Description of Artificial Sequence: Synthetic oligonucleotide
aaguguuugacagagucuu

SEQ ID NO: 3261178 - RNA, 19 nt, Artificial Sequence
  Description of Artificial Sequence: Synthetic oligonucleotide
ucacuuccgaucaaaggcu

SEQ ID NO: 3261179 - RNA, 19 nt, Artificial Sequence
  Description of Artificial Sequence: Synthetic oligonucleotide
auagauggaaggcucuucu

SEQ ID NO: 3261180 - RNA, 19 nt, Artificial Sequence
  Description of Artificial Sequence: Synthetic oligonucleotide
uugacagagucuuuggcuc

SEQ ID NO: 3261181 - RNA, 19 nt, Artificial Sequence
  Description of Artificial Sequence: Synthetic oligonucleotide
ucauugcugucccuuagca

SEQ ID NO: 3261182 - RNA, 19 nt, Artificial Sequence
  Description of Artificial Sequence: Synthetic oligonucleotide
agguagccuucuuuggugc

SEQ ID NO: 3261183 - RNA, 19 nt, Artificial Sequence
  Description of Artificial Sequence: Synthetic oligonucleotide
ucaaaacaaucagaguccc

SEQ ID NO: 3261184 - RNA, 19 nt, Artificial Sequence
  Description of Artificial Sequence: Synthetic oligonucleotide
uugcaaaagugaaccaucu

SEQ ID NO: 3261185 - RNA, 19 nt, Artificial Sequence
  Description of Artificial Sequence: Synthetic oligonucleotide
aaugcgaauugguuccggu

SEQ ID NO: 3261186 - RNA, 19 nt, Artificial Sequence
  Description of Artificial Sequence: Synthetic oligonucleotide
guugccaugauaccacccc

SEQ ID NO: 3261187 - RNA, 19 nt, Artificial Sequence
  Description of Artificial Sequence: Synthetic oligonucleotide
agagucuuuggcucucacg

SEQ ID NO: 3261188 - RNA, 19 nt, Artificial Sequence
  Description of Artificial Sequence: Synthetic oligonucleotide
uagcagguagcuaccauca

SEQ ID NO: 3261189 - RNA, 19 nt, Artificial Sequence
  Description of Artificial Sequence: Synthetic oligonucleotide
auccuuuaaaguugaauau

SEQ ID NO: 3261190 - RNA, 19 nt, Artificial Sequence
  Description of Artificial Sequence: Synthetic oligonucleotide
uuagcagguagcuaccauc

SEQ ID NO: 3261191 - RNA, 19 nt, Artificial Sequence
  Description of Artificial Sequence: Synthetic oligonucleotide
aauugguuccggugacauc

SEQ ID NO: 3261192 - RNA, 19 nt, Artificial Sequence
  Description of Artificial Sequence: Synthetic oligonucleotide
ugcauugcuguguggaccc

SEQ ID NO: 3261193 - RNA, 19 nt, Artificial Sequence
  Description of Artificial Sequence: Synthetic oligonucleotide
ucuacuuuucuuggauagg

SEQ ID NO: 3261194 - RNA, 19 nt, Artificial Sequence
  Description of Artificial Sequence: Synthetic oligonucleotide
uguggacccggacugauuc

SEQ ID NO: 3261195 - RNA, 19 nt, Artificial Sequence
  Description of Artificial Sequence: Synthetic oligonucleotide
accaucacgaccauuggag

SEQ ID NO: 3261196 - RNA, 19 nt, Artificial Sequence
  Description of Artificial Sequence: Synthetic oligonucleotide
gaaccaucuuguuuuccag

SEQ ID NO: 3261197 - RNA, 19 nt, Artificial Sequence
  Description of Artificial Sequence: Synthetic oligonucleotide
uuccugugaguaaucaaac

SEQ ID NO: 3261198 - RNA, 19 nt, Artificial Sequence
  Description of Artificial Sequence: Synthetic oligonucleotide
aacuggacagcagagcacu

SEQ ID NO: 3261199 - RNA, 19 nt, Artificial Sequence
  Description of Artificial Sequence: Synthetic oligonucleotide
ucuggucuuugaaauauuu

SEQ ID NO: 3261200 - RNA, 19 nt, Artificial Sequence
  Description of Artificial Sequence: Synthetic oligonucleotide
uguucuuccugucugcauu

SEQ ID NO: 3261201 - RNA, 19 nt, Artificial Sequence
  Description of Artificial Sequence: Synthetic oligonucleotide
agcgaauagaguccagucu

SEQ ID NO: 3261202 - RNA, 19 nt, Artificial Sequence
  Description of Artificial Sequence: Synthetic oligonucleotide
aaacuggacagcagagcac

SEQ ID NO: 3261203 - RNA, 19 nt, Artificial Sequence
  Description of Artificial Sequence: Synthetic oligonucleotide
acaaucagagucccugucu

SEQ ID NO: 3261204 - RNA, 19 nt, Artificial Sequence
  Description of Artificial Sequence: Synthetic oligonucleotide
auuucaguucguuccuuug

SEQ ID NO: 3261205 - RNA, 19 nt, Artificial Sequence
  Description of Artificial Sequence: Synthetic oligonucleotide
ucuagagacauccaggagg

SEQ ID NO: 3261206 - RNA, 19 nt, Artificial Sequence
  Description of Artificial Sequence: Synthetic oligonucleotide
augaagaccacagagagcc

SEQ ID NO: 3261207 - RNA, 19 nt, Artificial Sequence
  Description of Artificial Sequence: Synthetic oligonucleotide
aacaguacgaugaagacca

SEQ ID NO: 3261208 - RNA, 19 nt, Artificial Sequence
  Description of Artificial Sequence: Synthetic oligonucleotide
uacgaugaagaccacagag

SEQ ID NO: 3261209 - RNA, 19 nt, Artificial Sequence
  Description of Artificial Sequence: Synthetic oligonucleotide
uguucuagagacauccagg

SEQ ID NO: 3261210 - RNA, 19 nt, Artificial Sequence
  Description of Artificial Sequence: Synthetic oligonucleotide
aaacaguacgaugaagacc

SEQ ID NO: 3261211 - RNA, 19 nt, Artificial Sequence
  Description of Artificial Sequence: Synthetic oligonucleotide
ugugaggaaacucaucagc

SEQ ID NO: 3261212 - RNA, 19 nt, Artificial Sequence
  Description of Artificial Sequence: Synthetic oligonucleotide
uaacacguguucuagagac

SEQ ID NO: 3261213 - RNA, 19 nt, Artificial Sequence
  Description of Artificial Sequence: Synthetic oligonucleotide
accacagagagccagagca

SEQ ID NO: 3261214 - RNA, 19 nt, Artificial Sequence
  Description of Artificial Sequence: Synthetic oligonucleotide
acguguucuagagacaucc

SEQ ID NO: 3261215 - RNA, 19 nt, Artificial Sequence
  Description of Artificial Sequence: Synthetic oligonucleotide
agccagagcaccuuguugg

SEQ ID NO: 3261216 - RNA, 19 nt, Artificial Sequence
  Description of Artificial Sequence: Synthetic oligonucleotide
cauaacacguguucuagag

SEQ ID NO: 3261217 - RNA, 19 nt, Artificial Sequence
  Description of Artificial Sequence: Synthetic oligonucleotide
ucugcaggacaccuggagg

SEQ ID NO: 3261218 - RNA, 19 nt, Artificial Sequence
  Description of Artificial Sequence: Synthetic oligonucleotide
accuuguuggcccuucugc

SEQ ID NO: 3261219 - RNA, 19 nt, Artificial Sequence
  Description of Artificial Sequence: Synthetic oligonucleotide
ucaucagcgcugcaaacag

SEQ ID NO: 3261220 - RNA, 19 nt, Artificial Sequence
  Description of Artificial Sequence: Synthetic oligonucleotide
aguacgaugaagaccacag

SEQ ID NO: 3261221 - RNA, 19 nt, Artificial Sequence
  Description of Artificial Sequence: Synthetic oligonucleotide
acauccaggagguuccuuc

SEQ ID NO: 3261222 - RNA, 19 nt, Artificial Sequence
  Description of Artificial Sequence: Synthetic oligonucleotide
gaagaacuggccugugagg

SEQ ID NO: 3261223 - RNA, 19 nt, Artificial Sequence
  Description of Artificial Sequence: Synthetic oligonucleotide
agagacauccaggagguuc

SEQ ID NO: 3261224 - RNA, 19 nt, Artificial Sequence
  Description of Artificial Sequence: Synthetic oligonucleotide
uuguuggcccuucugcagg

SEQ ID NO: 3261225 - RNA, 19 nt, Artificial Sequence
  Description of Artificial Sequence: Synthetic oligonucleotide
gugaggaaacucaucagcg

SEQ ID NO: 3261226 - RNA, 19 nt, Artificial Sequence
  Description of Artificial Sequence: Synthetic oligonucleotide
ugguaaggggccauaacac

SEQ ID NO: 3261227 - RNA, 19 nt, Artificial Sequence
  Description of Artificial Sequence: Synthetic oligonucleotide
aagaacuggccugugagga

SEQ ID NO: 3261228 - RNA, 19 nt, Artificial Sequence
  Description of Artificial Sequence: Synthetic oligonucleotide
ugaggaaacucaucagcgc

SEQ ID NO: 3261229 - RNA, 19 nt, Artificial Sequence
  Description of Artificial Sequence: Synthetic oligonucleotide
caaacaguacgaugaagac

SEQ ID NO: 3261230 - RNA, 19 nt, Artificial Sequence
  Description of Artificial Sequence: Synthetic oligonucleotide
uucugcaggacaccuggag

SEQ ID NO: 3261231 - RNA, 19 nt, Artificial Sequence
  Description of Artificial Sequence: Synthetic oligonucleotide
uccacagccgucuggaaga

SEQ ID NO: 3261232 - RNA, 19 nt, Artificial Sequence
  Description of Artificial Sequence: Synthetic oligonucleotide
aacucaucagcgcugcaaa

SEQ ID NO: 3261233 - RNA, 19 nt, Artificial Sequence
  Description of Artificial Sequence: Synthetic oligonucleotide
uggccugugaggaaacuca

SEQ ID NO: 3261234 - RNA, 19 nt, Artificial Sequence
  Description of Artificial Sequence: Synthetic oligonucleotide
guguucuagagacauccag

SEQ ID NO: 3261235 - RNA, 19 nt, Artificial Sequence
  Description of Artificial Sequence: Synthetic oligonucleotide
uucuagagacauccaggag

SEQ ID NO: 3261236 - RNA, 19 nt, Artificial Sequence
  Description of Artificial Sequence: Synthetic oligonucleotide
ggaagaacuggccugugag

SEQ ID NO: 3261237 - RNA, 19 nt, Artificial Sequence
  Description of Artificial Sequence: Synthetic oligonucleotide
guucuagagacauccagga

SEQ ID NO: 3261238 - RNA, 19 nt, Artificial Sequence
  Description of Artificial Sequence: Synthetic oligonucleotide
ugugggugcagccuccaca

SEQ ID NO: 3261239 - RNA, 19 nt, Artificial Sequence
  Description of Artificial Sequence: Synthetic oligonucleotide
ugugccugagucugguaag

SEQ ID NO: 3261240 - RNA, 19 nt, Artificial Sequence
  Description of Artificial Sequence: Synthetic oligonucleotide
gaagaccacagagagccag

SEQ ID NO: 3261241 - RNA, 19 nt, Artificial Sequence
  Description of Artificial Sequence: Synthetic oligonucleotide
uugugccugagucugguaa

SEQ ID NO: 3261242 - RNA, 19 nt, Artificial Sequence
  Description of Artificial Sequence: Synthetic oligonucleotide
uaaggggccauaacacgug

SEQ ID NO: 3261243 - RNA, 19 nt, Artificial Sequence
  Description of Artificial Sequence: Synthetic oligonucleotide
cagagcaccuuguuggccc

SEQ ID NO: 3261244 - RNA, 19 nt, Artificial Sequence
  Description of Artificial Sequence: Synthetic oligonucleotide
gguaaggggccauaacacg

SEQ ID NO: 3261245 - RNA, 19 nt, Artificial Sequence
  Description of Artificial Sequence: Synthetic oligonucleotide
gagacauccaggagguucc

SEQ ID NO: 3261246 - RNA, 19 nt, Artificial Sequence
  Description of Artificial Sequence: Synthetic oligonucleotide
cagcgcugcaaacaguacg

SEQ ID NO: 3261247 - RNA, 19 nt, Artificial Sequence
  Description of Artificial Sequence: Synthetic oligonucleotide
cuuguuggcccuucugcag

SEQ ID NO: 3261248 - RNA, 19 nt, Artificial Sequence
  Description of Artificial Sequence: Synthetic oligonucleotide
auaacacguguucuagaga

SEQ ID NO: 3261249 - RNA, 19 nt, Artificial Sequence
  Description of Artificial Sequence: Synthetic oligonucleotide
cugguaaggggccauaaca

SEQ ID NO: 3261250 - RNA, 19 nt, Artificial Sequence
  Description of Artificial Sequence: Synthetic oligonucleotide
acucaucagcgcugcaaac

SEQ ID NO: 3261251 - RNA, 19 nt, Artificial Sequence
  Description of Artificial Sequence: Synthetic oligonucleotide
aaacucaucagcgcugcaa

SEQ ID NO: 3261252 - RNA, 19 nt, Artificial Sequence
  Description of Artificial Sequence: Synthetic oligonucleotide
ucugguaaggggccauaac

SEQ ID NO: 3261253 - RNA, 19 nt, Artificial Sequence
  Description of Artificial Sequence: Synthetic oligonucleotide
ugcaaacaguacgaugaag

SEQ ID NO: 3261254 - RNA, 19 nt, Artificial Sequence
  Description of Artificial Sequence: Synthetic oligonucleotide
gucuggaagaacuggccug

SEQ ID NO: 3261255 - RNA, 19 nt, Artificial Sequence
  Description of Artificial Sequence: Synthetic oligonucleotide
cugagucugguaaggggcc

SEQ ID NO: 3261256 - RNA, 19 nt, Artificial Sequence
  Description of Artificial Sequence: Synthetic oligonucleotide
gcugcaaacaguacgauga

SEQ ID NO: 3261257 - RNA, 19 nt, Artificial Sequence
  Description of Artificial Sequence: Synthetic oligonucleotide
gugggugcagccuccacag

SEQ ID NO: 3261258 - RNA, 19 nt, Artificial Sequence
  Description of Artificial Sequence: Synthetic oligonucleotide
gaugaagaccacagagagc

SEQ ID NO: 3261259 - RNA, 19 nt, Artificial Sequence
  Description of Artificial Sequence: Synthetic oligonucleotide
uccaggagguuccuuccug

SEQ ID NO: 3261260 - RNA, 19 nt, Artificial Sequence
  Description of Artificial Sequence: Synthetic oligonucleotide
uggaagaacuggccuguga

SEQ ID NO: 3261261 - RNA, 19 nt, Artificial Sequence
  Description of Artificial Sequence: Synthetic oligonucleotide
ucuggaagaacuggccugu

SEQ ID NO: 3261262 - RNA, 19 nt, Artificial Sequence
  Description of Artificial Sequence: Synthetic oligonucleotide
ccugagucugguaaggggc

SEQ ID NO: 3261263 - RNA, 19 nt, Artificial Sequence
  Description of Artificial Sequence: Synthetic oligonucleotide
cugugaggaaacucaucag

SEQ ID NO: 3261264 - RNA, 19 nt, Artificial Sequence
  Description of Artificial Sequence: Synthetic oligonucleotide
gaggaaacucaucagcgcu

SEQ ID NO: 3261265 - RNA, 19 nt, Artificial Sequence
  Description of Artificial Sequence: Synthetic oligonucleotide
gcaaacaguacgaugaaga

SEQ ID NO: 3261266 - RNA, 19 nt, Artificial Sequence
  Description of Artificial Sequence: Synthetic oligonucleotide
acagccgucuggaagaacu

SEQ ID NO: 3261267 - RNA, 19 nt, Artificial Sequence
  Description of Artificial Sequence: Synthetic oligonucleotide
cauccaggagguuccuucc

SEQ ID NO: 3261268 - RNA, 19 nt, Artificial Sequence
  Description of Artificial Sequence: Synthetic oligonucleotide
gagguuccuuccugugugg

SEQ ID NO: 3261269 - RNA, 19 nt, Artificial Sequence
  Description of Artificial Sequence: Synthetic oligonucleotide
aaggggccauaacacgugu

SEQ ID NO: 3261270 - RNA, 19 nt, Artificial Sequence
  Description of Artificial Sequence: Synthetic oligonucleotide
guuccuuccugugugggug

SEQ ID NO: 3261271 - RNA, 19 nt, Artificial Sequence
  Description of Artificial Sequence: Synthetic oligonucleotide
cacagagagccagagcacc

SEQ ID NO: 3261272 - RNA, 19 nt, Artificial Sequence
  Description of Artificial Sequence: Synthetic oligonucleotide
gagccagagcaccuuguug

SEQ ID NO: 3261273 - RNA, 19 nt, Artificial Sequence
  Description of Artificial Sequence: Synthetic oligonucleotide
ggagguuccuuccugugug

SEQ ID NO: 3261274 - RNA, 19 nt, Artificial Sequence
  Description of Artificial Sequence: Synthetic oligonucleotide
cgaugaagaccacagagag

SEQ ID NO: 3261275 - RNA, 19 nt, Artificial Sequence
  Description of Artificial Sequence: Synthetic oligonucleotide
cuccacagccgucuggaag

SEQ ID NO: 3261276 - RNA, 19 nt, Artificial Sequence
  Description of Artificial Sequence: Synthetic oligonucleotide
agagagccagagcaccuug

SEQ ID NO: 3261277 - RNA, 19 nt, Artificial Sequence
  Description of Artificial Sequence: Synthetic oligonucleotide
ccuucugcaggacaccugg

SEQ ID NO: 3261278 - RNA, 19 nt, Artificial Sequence
  Description of Artificial Sequence: Synthetic oligonucleotide
uggcccuucugcaggacac

SEQ ID NO: 3261279 - RNA, 19 nt, Artificial Sequence
  Description of Artificial Sequence: Synthetic oligonucleotide
acgaugaagaccacagaga

SEQ ID NO: 3261280 - RNA, 19 nt, Artificial Sequence
  Description of Artificial Sequence: Synthetic oligonucleotide
aggagguuccuuccugugu

SEQ ID NO: 3261281 - RNA, 19 nt, Artificial Sequence
  Description of Artificial Sequence: Synthetic oligonucleotide
acacguguucuagagacau

SEQ ID NO: 3261282 - RNA, 19 nt, Artificial Sequence
  Description of Artificial Sequence: Synthetic oligonucleotide
cuagagacauccaggaggu

SEQ ID NO: 3261283 - RNA, 19 nt, Artificial Sequence
  Description of Artificial Sequence: Synthetic oligonucleotide
uuggcccuucugcaggaca

SEQ ID NO: 3261284 - RNA, 19 nt, Artificial Sequence
  Description of Artificial Sequence: Synthetic oligonucleotide
ccugugaggaaacucauca

SEQ ID NO: 3261285 - RNA, 19 nt, Artificial Sequence
  Description of Artificial Sequence: Synthetic oligonucleotide
aacuggccugugaggaaac

SEQ ID NO: 3261286 - RNA, 19 nt, Artificial Sequence
  Description of Artificial Sequence: Synthetic oligonucleotide
ugccugagucugguaaggg

SEQ ID NO: 3261287 - RNA, 19 nt, Artificial Sequence
  Description of Artificial Sequence: Synthetic oligonucleotide
cuuccugugugggugcagc

SEQ ID NO: 3261288 - RNA, 19 nt, Artificial Sequence
  Description of Artificial Sequence: Synthetic oligonucleotide
ucagcgcugcaaacaguac

SEQ ID NO: 3261289 - RNA, 19 nt, Artificial Sequence
  Description of Artificial Sequence: Synthetic oligonucleotide
agcgcugcaaacaguacga

SEQ ID NO: 3261290 - RNA, 19 nt, Artificial Sequence
  Description of Artificial Sequence: Synthetic oligonucleotide
uguuggcccuucugcagga

SEQ ID NO: 3261291 - RNA, 19 nt, Artificial Sequence
  Description of Artificial Sequence: Synthetic oligonucleotide
gaccacagagagccagagc

SEQ ID NO: 3261292 - RNA, 19 nt, Artificial Sequence
  Description of Artificial Sequence: Synthetic oligonucleotide
agccgucuggaagaacugg

SEQ ID NO: 3261293 - RNA, 19 nt, Artificial Sequence
  Description of Artificial Sequence: Synthetic oligonucleotide
gggugcagccuccacagcc

SEQ ID NO: 3261294 - RNA, 19 nt, Artificial Sequence
  Description of Artificial Sequence: Synthetic oligonucleotide
gccugagucugguaagggg

SEQ ID NO: 3261295 - RNA, 19 nt, Artificial Sequence
  Description of Artificial Sequence: Synthetic oligonucleotide
aggaaacucaucagcgcug

SEQ ID NO: 3261296 - RNA, 19 nt, Artificial Sequence
  Description of Artificial Sequence: Synthetic oligonucleotide
agaccacagagagccagag

SEQ ID NO: 3261297 - RNA, 19 nt, Artificial Sequence
  Description of Artificial Sequence: Synthetic oligonucleotide
aacacguguucuagagaca

SEQ ID NO: 3261298 - RNA, 19 nt, Artificial Sequence
  Description of Artificial Sequence: Synthetic oligonucleotide
ugaagaccacagagagcca

SEQ ID NO: 3261299 - RNA, 19 nt, Artificial Sequence
  Description of Artificial Sequence: Synthetic oligonucleotide
uuccugugugggugcagcc

SEQ ID NO: 3261300 - RNA, 19 nt, Artificial Sequence
  Description of Artificial Sequence: Synthetic oligonucleotide
uuccuuccugugugggugc

SEQ ID NO: 3261301 - RNA, 19 nt, Artificial Sequence
  Description of Artificial Sequence: Synthetic oligonucleotide
aagaccacagagagccaga

SEQ ID NO: 3261302 - RNA, 19 nt, Artificial Sequence
  Description of Artificial Sequence: Synthetic oligonucleotide
cucaucagcgcugcaaaca

SEQ ID NO: 3261303 - RNA, 19 nt, Artificial Sequence
  Description of Artificial Sequence: Synthetic oligonucleotide
aucagcgcugcaaacagua

SEQ ID NO: 3261304 - RNA, 19 nt, Artificial Sequence
  Description of Artificial Sequence: Synthetic oligonucleotide
ggcccauugugccugaguc

SEQ ID NO: 3261305 - RNA, 19 nt, Artificial Sequence
  Description of Artificial Sequence: Synthetic oligonucleotide
uuuuauagggaaaagaugu

SEQ ID NO: 3261306 - RNA, 19 nt, Artificial Sequence
  Description of Artificial Sequence: Synthetic oligonucleotide
auauuuaacucuguuaugc

SEQ ID NO: 3261307 - RNA, 19 nt, Artificial Sequence
  Description of Artificial Sequence: Synthetic oligonucleotide
ugagauagcagcaucauga

SEQ ID NO: 3261308 - RNA, 19 nt, Artificial Sequence
  Description of Artificial Sequence: Synthetic oligonucleotide
acuagauacaccuuguuag

SEQ ID NO: 3261309 - RNA, 19 nt, Artificial Sequence
  Description of Artificial Sequence: Synthetic oligonucleotide
acaaucaccucacaggacc

SEQ ID NO: 3261310 - RNA, 19 nt, Artificial Sequence
  Description of Artificial Sequence: Synthetic oligonucleotide
aucugguugagauagcagc

SEQ ID NO: 3261311 - RNA, 19 nt, Artificial Sequence
  Description of Artificial Sequence: Synthetic oligonucleotide
aaguaaaauccacuuuuac

SEQ ID NO: 3261312 - RNA, 19 nt, Artificial Sequence
  Description of Artificial Sequence: Synthetic oligonucleotide
uugaggauagcuuauaggu

SEQ ID NO: 3261313 - RNA, 19 nt, Artificial Sequence
  Description of Artificial Sequence: Synthetic oligonucleotide
uugauaauuauguacagau

SEQ ID NO: 3261314 - RNA, 19 nt, Artificial Sequence
  Description of Artificial Sequence: Synthetic oligonucleotide
agaauuuucuucuaauaug

SEQ ID NO: 3261315 - RNA, 19 nt, Artificial Sequence
  Description of Artificial Sequence: Synthetic oligonucleotide
uguaguauuucucgaaccc

SEQ ID NO: 3261316 - RNA, 19 nt, Artificial Sequence
  Description of Artificial Sequence: Synthetic oligonucleotide
ucuaugauuucuuccacag

SEQ ID NO: 3261317 - RNA, 19 nt, Artificial Sequence
  Description of Artificial Sequence: Synthetic oligonucleotide
uagguuauugauaauuaug

SEQ ID NO: 3261318 - RNA, 19 nt, Artificial Sequence
  Description of Artificial Sequence: Synthetic oligonucleotide
gucaucauuacauugagga

SEQ ID NO: 3261319 - RNA, 19 nt, Artificial Sequence
  Description of Artificial Sequence: Synthetic oligonucleotide
uaugauuucuuccacaguu

SEQ ID NO: 3261320 - RNA, 19 nt, Artificial Sequence
  Description of Artificial Sequence: Synthetic oligonucleotide
uaguguacagugcugauug

SEQ ID NO: 3261321 - RNA, 19 nt, Artificial Sequence
  Description of Artificial Sequence: Synthetic oligonucleotide
uccagauggacccuuaagc

SEQ ID NO: 3261322 - RNA, 19 nt, Artificial Sequence
  Description of Artificial Sequence: Synthetic oligonucleotide
uugcuguuaacuaugcuug

SEQ ID NO: 3261323 - RNA, 19 nt, Artificial Sequence
  Description of Artificial Sequence: Synthetic oligonucleotide
uguugaaacagguaucaca

SEQ ID NO: 3261324 - RNA, 19 nt, Artificial Sequence
  Description of Artificial Sequence: Synthetic oligonucleotide
auauaaaccgagguguagc

SEQ ID NO: 3261325 - RNA, 19 nt, Artificial Sequence
  Description of Artificial Sequence: Synthetic oligonucleotide
guaguaucccuuuaguucc

SEQ ID NO: 3261326 - RNA, 19 nt, Artificial Sequence
  Description of Artificial Sequence: Synthetic oligonucleotide
auagucugggcuuacauga

SEQ ID NO: 3261327 - RNA, 19 nt, Artificial Sequence
  Description of Artificial Sequence: Synthetic oligonucleotide
aaaguaguaucccuuuagu

SEQ ID NO: 3261328 - RNA, 19 nt, Artificial Sequence
  Description of Artificial Sequence: Synthetic oligonucleotide
guaacugauguguuguccg

SEQ ID NO: 3261329 - RNA, 19 nt, Artificial Sequence
  Description of Artificial Sequence: Synthetic oligonucleotide
acuuuugcaaacaugucac

SEQ ID NO: 3261330 - RNA, 19 nt, Artificial Sequence
  Description of Artificial Sequence: Synthetic oligonucleotide
gauguuucuucucugggug

SEQ ID NO: 3261331 - RNA, 19 nt, Artificial Sequence
  Description of Artificial Sequence: Synthetic oligonucleotide
cuuuguacuauacacguuc

SEQ ID NO: 3261332 - RNA, 19 nt, Artificial Sequence
  Description of Artificial Sequence: Synthetic oligonucleotide
uuuccuucuucaugcaugg

SEQ ID NO: 3261333 - RNA, 19 nt, Artificial Sequence
  Description of Artificial Sequence: Synthetic oligonucleotide
uuauaucuggauaucgagu

SEQ ID NO: 3261334 - RNA, 19 nt, Artificial Sequence
  Description of Artificial Sequence: Synthetic oligonucleotide
ucaugagucuacaaucacc

SEQ ID NO: 3261335 - RNA, 19 nt, Artificial Sequence
  Description of Artificial Sequence: Synthetic oligonucleotide
uguaugguuuugcuuuugg

SEQ ID NO: 3261336 - RNA, 19 nt, Artificial Sequence
  Description of Artificial Sequence: Synthetic oligonucleotide
aagcacauaagauaaccau

SEQ ID NO: 3261337 - RNA, 19 nt, Artificial Sequence
  Description of Artificial Sequence: Synthetic oligonucleotide
cagacuuauauaaaccgag

SEQ ID NO: 3261338 - RNA, 19 nt, Artificial Sequence
  Description of Artificial Sequence: Synthetic oligonucleotide
cuuuaguuccagauggacc

SEQ ID NO: 3261339 - RNA, 19 nt, Artificial Sequence
  Description of Artificial Sequence: Synthetic oligonucleotide
uuuaacaaauauauuuauu

SEQ ID NO: 3261340 - RNA, 19 nt, Artificial Sequence
  Description of Artificial Sequence: Synthetic oligonucleotide
uauagguuauugauaauua

SEQ ID NO: 3261341 - RNA, 19 nt, Artificial Sequence
  Description of Artificial Sequence: Synthetic oligonucleotide
gcuuguaugaagaauauag

SEQ ID NO: 3261342 - RNA, 19 nt, Artificial Sequence
  Description of Artificial Sequence: Synthetic oligonucleotide
gacgaucaaccacacagcg

SEQ ID NO: 3261343 - RNA, 19 nt, Artificial Sequence
  Description of Artificial Sequence: Synthetic oligonucleotide
ucuucuaauauguaugguu

SEQ ID NO: 3261344 - RNA, 19 nt, Artificial Sequence
  Description of Artificial Sequence: Synthetic oligonucleotide
aauucuuuccagaacaaaa

SEQ ID NO: 3261345 - RNA, 19 nt, Artificial Sequence
  Description of Artificial Sequence: Synthetic oligonucleotide
aaccaucugaaaguauccc

SEQ ID NO: 3261346 - RNA, 19 nt, Artificial Sequence
  Description of Artificial Sequence: Synthetic oligonucleotide
ucuguuucaugccaauucu

SEQ ID NO: 3261347 - RNA, 19 nt, Artificial Sequence
  Description of Artificial Sequence: Synthetic oligonucleotide
uaaagucagaauuuucuuc

SEQ ID NO: 3261348 - RNA, 19 nt, Artificial Sequence
  Description of Artificial Sequence: Synthetic oligonucleotide
gaaaguaucccuucuuuga

SEQ ID NO: 3261349 - RNA, 19 nt, Artificial Sequence
  Description of Artificial Sequence: Synthetic oligonucleotide
ugcuuuguacuauacacgu

SEQ ID NO: 3261350 - RNA, 19 nt, Artificial Sequence
  Description of Artificial Sequence: Synthetic oligonucleotide
uaugaagaauauagcaacu

SEQ ID NO: 3261351 - RNA, 19 nt, Artificial Sequence
  Description of Artificial Sequence: Synthetic oligonucleotide
uugcaaacaugucacauuc

SEQ ID NO: 3261352 - RNA, 19 nt, Artificial Sequence
  Description of Artificial Sequence: Synthetic oligonucleotide
uccccuacuagauacaccu

SEQ ID NO: 3261353 - RNA, 19 nt, Artificial Sequence
  Description of Artificial Sequence: Synthetic oligonucleotide
cauaagauaaccaucugaa

SEQ ID NO: 3261354 - RNA, 19 nt, Artificial Sequence
  Description of Artificial Sequence: Synthetic oligonucleotide
uuugcuucuaacccuucug

SEQ ID NO: 3261355 - RNA, 19 nt, Artificial Sequence
  Description of Artificial Sequence: Synthetic oligonucleotide
ugaaaguaucccuucuuug

SEQ ID NO: 3261356 - RNA, 19 nt, Artificial Sequence
  Description of Artificial Sequence: Synthetic oligonucleotide
uucggaauguuguuuagac

SEQ ID NO: 3261357 - RNA, 19 nt, Artificial Sequence
  Description of Artificial Sequence: Synthetic oligonucleotide
auugauaccgauuucuguu

SEQ ID NO: 3261358 - RNA, 19 nt, Artificial Sequence
  Description of Artificial Sequence: Synthetic oligonucleotide
acuucaaucccacacagua

SEQ ID NO: 3261359 - RNA, 19 nt, Artificial Sequence
  Description of Artificial Sequence: Synthetic oligonucleotide
uggacaugaagagagacac

SEQ ID NO: 3261360 - RNA, 19 nt, Artificial Sequence
  Description of Artificial Sequence: Synthetic oligonucleotide
uguuaacuaugcuuguaug

SEQ ID NO: 3261361 - RNA, 19 nt, Artificial Sequence
  Description of Artificial Sequence: Synthetic oligonucleotide
uaaaccgagguguagcaga

SEQ ID NO: 3261362 - RNA, 19 nt, Artificial Sequence
  Description of Artificial Sequence: Synthetic oligonucleotide
uuuguuuccgcugcucugg

SEQ ID NO: 3261363 - RNA, 19 nt, Artificial Sequence
  Description of Artificial Sequence: Synthetic oligonucleotide
uuauagguuauugauaauu

SEQ ID NO: 3261364 - RNA, 19 nt, Artificial Sequence
  Description of Artificial Sequence: Synthetic oligonucleotide
aauuauguacagauuuucu

SEQ ID NO: 3261365 - RNA, 19 nt, Artificial Sequence
  Description of Artificial Sequence: Synthetic oligonucleotide
ucuaauauguaugguuuug

SEQ ID NO: 3261366 - RNA, 19 nt, Artificial Sequence
  Description of Artificial Sequence: Synthetic oligonucleotide
uuacauugaggauagcuua

SEQ ID NO: 3261367 - RNA, 19 nt, Artificial Sequence
  Description of Artificial Sequence: Synthetic oligonucleotide
uuuuguacacuuauuuaua

SEQ ID NO: 3261368 - RNA, 19 nt, Artificial Sequence
  Description of Artificial Sequence: Synthetic oligonucleotide
guauauuuaacucuguuau

SEQ ID NO: 3261369 - RNA, 19 nt, Artificial Sequence
  Description of Artificial Sequence: Synthetic oligonucleotide
augacaaacauccauugua

SEQ ID NO: 3261370 - RNA, 19 nt, Artificial Sequence
  Description of Artificial Sequence: Synthetic oligonucleotide
ucuuugaacguuuggcucu

SEQ ID NO: 3261371 - RNA, 19 nt, Artificial Sequence
  Description of Artificial Sequence: Synthetic oligonucleotide
ucugguugagauagcagca

SEQ ID NO: 3261372 - RNA, 19 nt, Artificial Sequence
  Description of Artificial Sequence: Synthetic oligonucleotide
auacugacgcauuccauag

SEQ ID NO: 3261373 - RNA, 19 nt, Artificial Sequence
  Description of Artificial Sequence: Synthetic oligonucleotide
uauaaaccgagguguagca

SEQ ID NO: 3261374 - RNA, 19 nt, Artificial Sequence
  Description of Artificial Sequence: Synthetic oligonucleotide
uauugugguggcuuucucc

SEQ ID NO: 3261375 - RNA, 19 nt, Artificial Sequence
  Description of Artificial Sequence: Synthetic oligonucleotide
guuaugcacacucaguuuc

SEQ ID NO: 3261376 - RNA, 19 nt, Artificial Sequence
  Description of Artificial Sequence: Synthetic oligonucleotide
guaaucacaacccuuccca

SEQ ID NO: 3261377 - RNA, 19 nt, Artificial Sequence
  Description of Artificial Sequence: Synthetic oligonucleotide
ugcugauugauaccgauuu

SEQ ID NO: 3261378 - RNA, 19 nt, Artificial Sequence
  Description of Artificial Sequence: Synthetic oligonucleotide
gcuaagauagauuggagac

SEQ ID NO: 3261379 - RNA, 19 nt, Artificial Sequence
  Description of Artificial Sequence: Synthetic oligonucleotide
ugggcuuacaugacaaaca

SEQ ID NO: 3261380 - RNA, 19 nt, Artificial Sequence
  Description of Artificial Sequence: Synthetic oligonucleotide
guuaacuaugcuuguauga

SEQ ID NO: 3261381 - RNA, 19 nt, Artificial Sequence
  Description of Artificial Sequence: Synthetic oligonucleotide
gacgcauuccauaguaugg

SEQ ID NO: 3261382 - RNA, 19 nt, Artificial Sequence
  Description of Artificial Sequence: Synthetic oligonucleotide
cugcuuuguacuauacacg

SEQ ID NO: 3261383 - RNA, 19 nt, Artificial Sequence
  Description of Artificial Sequence: Synthetic oligonucleotide
acaugacaaacauccauug

SEQ ID NO: 3261384 - RNA, 19 nt, Artificial Sequence
  Description of Artificial Sequence: Synthetic oligonucleotide
aauggcuagaacaccuguc

SEQ ID NO: 3261385 - RNA, 19 nt, Artificial Sequence
  Description of Artificial Sequence: Synthetic oligonucleotide
ggaagaaaguuacagguac

SEQ ID NO: 3261386 - RNA, 19 nt, Artificial Sequence
  Description of Artificial Sequence: Synthetic oligonucleotide
acgaucuccaguucuauga

SEQ ID NO: 3261387 - RNA, 19 nt, Artificial Sequence
  Description of Artificial Sequence: Synthetic oligonucleotide
gguuguuugcuucuaaccc

SEQ ID NO: 3261388 - RNA, 19 nt, Artificial Sequence
  Description of Artificial Sequence: Synthetic oligonucleotide
acuauacacguucuugucu

SEQ ID NO: 3261389 - RNA, 19 nt, Artificial Sequence
  Description of Artificial Sequence: Synthetic oligonucleotide
cuauacacguucuugucuc

SEQ ID NO: 3261390 - RNA, 19 nt, Artificial Sequence
  Description of Artificial Sequence: Synthetic oligonucleotide
uuuugaagccuacacguuu

SEQ ID NO: 3261391 - RNA, 19 nt, Artificial Sequence
  Description of Artificial Sequence: Synthetic oligonucleotide
uuuguacuauacacguucu

SEQ ID NO: 3261392 - RNA, 19 nt, Artificial Sequence
  Description of Artificial Sequence: Synthetic oligonucleotide
uggacuccaaccuuugcug

SEQ ID NO: 3261393 - RNA, 19 nt, Artificial Sequence
  Description of Artificial Sequence: Synthetic oligonucleotide
uuuuacauuuugugcagaa

SEQ ID NO: 3261394 - RNA, 19 nt, Artificial Sequence
  Description of Artificial Sequence: Synthetic oligonucleotide
aaacauccauuguaaucug

SEQ ID NO: 3261395 - RNA, 19 nt, Artificial Sequence
  Description of Artificial Sequence: Synthetic oligonucleotide
aaucacaacccuucccagu

SEQ ID NO: 3261396 - RNA, 19 nt, Artificial Sequence
  Description of Artificial Sequence: Synthetic oligonucleotide
agguaaucacaacccuucc

SEQ ID NO: 3261397 - RNA, 19 nt, Artificial Sequence
  Description of Artificial Sequence: Synthetic oligonucleotide
uacuagauacaccuuguua

SEQ ID NO: 3261398 - RNA, 19 nt, Artificial Sequence
  Description of Artificial Sequence: Synthetic oligonucleotide
gaggauagcuuauagguua

SEQ ID NO: 3261399 - RNA, 19 nt, Artificial Sequence
  Description of Artificial Sequence: Synthetic oligonucleotide
uuugugguccuaauggcua

SEQ ID NO: 3261400 - RNA, 19 nt, Artificial Sequence
  Description of Artificial Sequence: Synthetic oligonucleotide
uguagcagacgaucaacca

SEQ ID NO: 3261401 - RNA, 19 nt, Artificial Sequence
  Description of Artificial Sequence: Synthetic oligonucleotide
gagauagcagcaucaugag

SEQ ID NO: 3261402 - RNA, 19 nt, Artificial Sequence
  Description of Artificial Sequence: Synthetic oligonucleotide
uucuuugaacguuuggcuc

SEQ ID NO: 3261403 - RNA, 19 nt, Artificial Sequence
  Description of Artificial Sequence: Synthetic oligonucleotide
cuuauauaaaccgaggugu

SEQ ID NO: 3261404 - RNA, 19 nt, Artificial Sequence
  Description of Artificial Sequence: Synthetic oligonucleotide
agauggacccuuaagcagg

SEQ ID NO: 3261405 - RNA, 19 nt, Artificial Sequence
  Description of Artificial Sequence: Synthetic oligonucleotide
gaaaccacagauuauaugg

SEQ ID NO: 3261406 - RNA, 19 nt, Artificial Sequence
  Description of Artificial Sequence: Synthetic oligonucleotide
aaagaggagaacuagagga

SEQ ID NO: 3261407 - RNA, 19 nt, Artificial Sequence
  Description of Artificial Sequence: Synthetic oligonucleotide
uuuaacuuauccauuaacc

SEQ ID NO: 3261408 - RNA, 19 nt, Artificial Sequence
  Description of Artificial Sequence: Synthetic oligonucleotide
uguaguaaugacaucagag

SEQ ID NO: 3261409 - RNA, 19 nt, Artificial Sequence
  Description of Artificial Sequence: Synthetic oligonucleotide
uugaauuuaucgaagagcu

SEQ ID NO: 3261410 - RNA, 19 nt, Artificial Sequence
  Description of Artificial Sequence: Synthetic oligonucleotide
gauuuaaaguauuuuguag

SEQ ID NO: 3261411 - RNA, 19 nt, Artificial Sequence
  Description of Artificial Sequence: Synthetic oligonucleotide
aacuauuuaacuuauccau

SEQ ID NO: 3261412 - RNA, 19 nt, Artificial Sequence
  Description of Artificial Sequence: Synthetic oligonucleotide
aaauaucuaaacaaggcag

SEQ ID NO: 3261413 - RNA, 19 nt, Artificial Sequence
  Description of Artificial Sequence: Synthetic oligonucleotide
aacuuauccauuaaccacc

SEQ ID NO: 3261414 - RNA, 19 nt, Artificial Sequence
  Description of Artificial Sequence: Synthetic oligonucleotide
caaacuauuuaacuuaucc

SEQ ID NO: 3261415 - RNA, 19 nt, Artificial Sequence
  Description of Artificial Sequence: Synthetic oligonucleotide
ugaacuaacucccugcucc

SEQ ID NO: 3261416 - RNA, 19 nt, Artificial Sequence
  Description of Artificial Sequence: Synthetic oligonucleotide
aguauuuuguaguaaugac

SEQ ID NO: 3261417 - RNA, 19 nt, Artificial Sequence
  Description of Artificial Sequence: Synthetic oligonucleotide
uauuuuguaguaaugacau

SEQ ID NO: 3261418 - RNA, 19 nt, Artificial Sequence
  Description of Artificial Sequence: Synthetic oligonucleotide
aaaagaggagaacuagagg

SEQ ID NO: 3261419 - RNA, 19 nt, Artificial Sequence
  Description of Artificial Sequence: Synthetic oligonucleotide
ucugaauuggauuuaaagu

SEQ ID NO: 3261420 - RNA, 19 nt, Artificial Sequence
  Description of Artificial Sequence: Synthetic oligonucleotide
uuuuguaguaaugacauca

SEQ ID NO: 3261421 - RNA, 19 nt, Artificial Sequence
  Description of Artificial Sequence: Synthetic oligonucleotide
auuuaaaguauuuuguagu

SEQ ID NO: 3261422 - RNA, 19 nt, Artificial Sequence
  Description of Artificial Sequence: Synthetic oligonucleotide
gaauuuaucgaagagcugc

SEQ ID NO: 3261423 - RNA, 19 nt, Artificial Sequence
  Description of Artificial Sequence: Synthetic oligonucleotide
guaguaaugacaucagagg

SEQ ID NO: 3261424 - RNA, 19 nt, Artificial Sequence
  Description of Artificial Sequence: Synthetic oligonucleotide
aaacuauuuaacuuaucca

SEQ ID NO: 3261425 - RNA, 19 nt, Artificial Sequence
  Description of Artificial Sequence: Synthetic oligonucleotide
uuggauuuaaaguauuuug

SEQ ID NO: 3261426 - RNA, 19 nt, Artificial Sequence
  Description of Artificial Sequence: Synthetic oligonucleotide
aaccacagauuauaugggc

SEQ ID NO: 3261427 - RNA, 19 nt, Artificial Sequence
  Description of Artificial Sequence: Synthetic oligonucleotide
aauggcaaacuauuuaacu

SEQ ID NO: 3261428 - RNA, 19 nt, Artificial Sequence
  Description of Artificial Sequence: Synthetic oligonucleotide
uuaacuuauccauuaacca

SEQ ID NO: 3261429 - RNA, 19 nt, Artificial Sequence
  Description of Artificial Sequence: Synthetic oligonucleotide
auuuaacuuauccauuaac

SEQ ID NO: 3261430 - RNA, 19 nt, Artificial Sequence
  Description of Artificial Sequence: Synthetic oligonucleotide
uucugaauuggauuuaaag

SEQ ID NO: 3261431 - RNA, 19 nt, Artificial Sequence
  Description of Artificial Sequence: Synthetic oligonucleotide
uaguaaugacaucagaggc

SEQ ID NO: 3261432 - RNA, 19 nt, Artificial Sequence
  Description of Artificial Sequence: Synthetic oligonucleotide
aacagguugaauuuaucga

SEQ ID NO: 3261433 - RNA, 19 nt, Artificial Sequence
  Description of Artificial Sequence: Synthetic oligonucleotide
uggauuuaaaguauuuugu

SEQ ID NO: 3261434 - RNA, 19 nt, Artificial Sequence
  Description of Artificial Sequence: Synthetic oligonucleotide
aagacugucaguggaaagg

SEQ ID NO: 3261435 - RNA, 19 nt, Artificial Sequence
  Description of Artificial Sequence: Synthetic oligonucleotide
uguacaagucugcagaaac

SEQ ID NO: 3261436 - RNA, 19 nt, Artificial Sequence
  Description of Artificial Sequence: Synthetic oligonucleotide
caacagguugaauuuaucg

SEQ ID NO: 3261437 - RNA, 19 nt, Artificial Sequence
  Description of Artificial Sequence: Synthetic oligonucleotide
uuauccauuaaccacccaa

SEQ ID NO: 3261438 - RNA, 19 nt, Artificial Sequence
  Description of Artificial Sequence: Synthetic oligonucleotide
caaaagaggagaacuagag

SEQ ID NO: 3261439 - RNA, 19 nt, Artificial Sequence
  Description of Artificial Sequence: Synthetic oligonucleotide
aauuuaucgaagagcugcc

SEQ ID NO: 3261440 - RNA, 19 nt, Artificial Sequence
  Description of Artificial Sequence: Synthetic oligonucleotide
aagugcugaacuaacuccc

SEQ ID NO: 3261441 - RNA, 19 nt, Artificial Sequence
  Description of Artificial Sequence: Synthetic oligonucleotide
uaacuuauccauuaaccac

SEQ ID NO: 3261442 - RNA, 19 nt, Artificial Sequence
  Description of Artificial Sequence: Synthetic oligonucleotide
uuuguaguaaugacaucag

SEQ ID NO: 3261443 - RNA, 19 nt, Artificial Sequence
  Description of Artificial Sequence: Synthetic oligonucleotide
aucuaaacaaggcagugug

SEQ ID NO: 3261444 - RNA, 19 nt, Artificial Sequence
  Description of Artificial Sequence: Synthetic oligonucleotide
aaguauuuuguaguaauga

SEQ ID NO: 3261445 - RNA, 19 nt, Artificial Sequence
  Description of Artificial Sequence: Synthetic oligonucleotide
uaaaguauuuuguaguaau

SEQ ID NO: 3261446 - RNA, 19 nt, Artificial Sequence
  Description of Artificial Sequence: Synthetic oligonucleotide
agauuauaugggcagacug

SEQ ID NO: 3261447 - RNA, 19 nt, Artificial Sequence
  Description of Artificial Sequence: Synthetic oligonucleotide
uaugccaacagguugaauu

SEQ ID NO: 3261448 - RNA, 19 nt, Artificial Sequence
  Description of Artificial Sequence: Synthetic oligonucleotide
aguggaaaggucaaaagag

SEQ ID NO: 3261449 - RNA, 19 nt, Artificial Sequence
  Description of Artificial Sequence: Synthetic oligonucleotide
uuuaaaguauuuuguagua

SEQ ID NO: 3261450 - RNA, 19 nt, Artificial Sequence
  Description of Artificial Sequence: Synthetic oligonucleotide
guugaauuuaucgaagagc

SEQ ID NO: 3261451 - RNA, 19 nt, Artificial Sequence
  Description of Artificial Sequence: Synthetic oligonucleotide
uggaaaggucaaaagagga

SEQ ID NO: 3261452 - RNA, 19 nt, Artificial Sequence
  Description of Artificial Sequence: Synthetic oligonucleotide
ucaaaagaggagaacuaga

SEQ ID NO: 3261453 - RNA, 19 nt, Artificial Sequence
  Description of Artificial Sequence: Synthetic oligonucleotide
agaggcugaauucugaagu

SEQ ID NO: 3261454 - RNA, 19 nt, Artificial Sequence
  Description of Artificial Sequence: Synthetic oligonucleotide
ugaauuggauuuaaaguau

SEQ ID NO: 3261455 - RNA, 19 nt, Artificial Sequence
  Description of Artificial Sequence: Synthetic oligonucleotide
uauaugggcagacugcuuc

SEQ ID NO: 3261456 - RNA, 19 nt, Artificial Sequence
  Description of Artificial Sequence: Synthetic oligonucleotide
aaaagaauggcaaacuauu

SEQ ID NO: 3261457 - RNA, 19 nt, Artificial Sequence
  Description of Artificial Sequence: Synthetic oligonucleotide
aagaauggcaaacuauuua

SEQ ID NO: 3261458 - RNA, 19 nt, Artificial Sequence
  Description of Artificial Sequence: Synthetic oligonucleotide
agaauggcaaacuauuuaa

SEQ ID NO: 3261459 - RNA, 19 nt, Artificial Sequence
  Description of Artificial Sequence: Synthetic oligonucleotide
aaagacugucaguggaaag

SEQ ID NO: 3261460 - RNA, 19 nt, Artificial Sequence
  Description of Artificial Sequence: Synthetic oligonucleotide
caagugcugaacuaacucc

SEQ ID NO: 3261461 - RNA, 19 nt, Artificial Sequence
  Description of Artificial Sequence: Synthetic oligonucleotide
aauaucuaaacaaggcagu

SEQ ID NO: 3261462 - RNA, 19 nt, Artificial Sequence
  Description of Artificial Sequence: Synthetic oligonucleotide
gauuauaugggcagacugc

SEQ ID NO: 3261463 - RNA, 19 nt, Artificial Sequence
  Description of Artificial Sequence: Synthetic oligonucleotide
cugaauuggauuuaaagua

SEQ ID NO: 3261464 - RNA, 19 nt, Artificial Sequence
  Description of Artificial Sequence: Synthetic oligonucleotide
ucgaagagcugccaaagac

SEQ ID NO: 3261465 - RNA, 19 nt, Artificial Sequence
  Description of Artificial Sequence: Synthetic oligonucleotide
aaaccacagauuauauggg

SEQ ID NO: 3261466 - RNA, 19 nt, Artificial Sequence
  Description of Artificial Sequence: Synthetic oligonucleotide
ucaguggaaaggucaaaag

SEQ ID NO: 3261467 - RNA, 19 nt, Artificial Sequence
  Description of Artificial Sequence: Synthetic oligonucleotide
caaauaucuaaacaaggca

SEQ ID NO: 3261468 - RNA, 19 nt, Artificial Sequence
  Description of Artificial Sequence: Synthetic oligonucleotide
aaaguauuuuguaguaaug

SEQ ID NO: 3261469 - RNA, 19 nt, Artificial Sequence
  Description of Artificial Sequence: Synthetic oligonucleotide
gaaaggucaaaagaggaga

SEQ ID NO: 3261470 - RNA, 19 nt, Artificial Sequence
  Description of Artificial Sequence: Synthetic oligonucleotide
ccaaauaucuaaacaaggc

SEQ ID NO: 3261471 - RNA, 19 nt, Artificial Sequence
  Description of Artificial Sequence: Synthetic oligonucleotide
acagguugaauuuaucgaa

SEQ ID NO: 3261472 - RNA, 19 nt, Artificial Sequence
  Description of Artificial Sequence: Synthetic oligonucleotide
accacccaaauaucuaaac

SEQ ID NO: 3261473 - RNA, 19 nt, Artificial Sequence
  Description of Artificial Sequence: Synthetic oligonucleotide
uuuaucgaagagcugccaa

SEQ ID NO: 3261474 - RNA, 19 nt, Artificial Sequence
  Description of Artificial Sequence: Synthetic oligonucleotide
agaaaccacagauuauaug

SEQ ID NO: 3261475 - RNA, 19 nt, Artificial Sequence
  Description of Artificial Sequence: Synthetic oligonucleotide
uccccuuaugccaacaggu

SEQ ID NO: 3261476 - RNA, 19 nt, Artificial Sequence
  Description of Artificial Sequence: Synthetic oligonucleotide
uauccauuaaccacccaaa

SEQ ID NO: 3261477 - RNA, 19 nt, Artificial Sequence
  Description of Artificial Sequence: Synthetic oligonucleotide
aaacaaggcaguguguaca

SEQ ID NO: 3261478 - RNA, 19 nt, Artificial Sequence
  Description of Artificial Sequence: Synthetic oligonucleotide
aaggucaaaagaggagaac

SEQ ID NO: 3261479 - RNA, 19 nt, Artificial Sequence
  Description of Artificial Sequence: Synthetic oligonucleotide
uacaagucugcagaaacca

SEQ ID NO: 3261480 - RNA, 19 nt, Artificial Sequence
  Description of Artificial Sequence: Synthetic oligonucleotide
gaagagcugccaaagacug

SEQ ID NO: 3261481 - RNA, 19 nt, Artificial Sequence
  Description of Artificial Sequence: Synthetic oligonucleotide
ugaauucugaagucaaaua

SEQ ID NO: 3261482 - RNA, 19 nt, Artificial Sequence
  Description of Artificial Sequence: Synthetic oligonucleotide
aguguguacaagucugcag

SEQ ID NO: 3261483 - RNA, 19 nt, Artificial Sequence
  Description of Artificial Sequence: Synthetic oligonucleotide
uauuuaacuuauccauuaa

SEQ ID NO: 3261484 - RNA, 19 nt, Artificial Sequence
  Description of Artificial Sequence: Synthetic oligonucleotide
guaaugacaucagaggcug

SEQ ID NO: 3261485 - RNA, 19 nt, Artificial Sequence
  Description of Artificial Sequence: Synthetic oligonucleotide
acagauuauaugggcagac

SEQ ID NO: 3261486 - RNA, 19 nt, Artificial Sequence
  Description of Artificial Sequence: Synthetic oligonucleotide
uggcaaacuauuuaacuua

SEQ ID NO: 3261487 - RNA, 19 nt, Artificial Sequence
  Description of Artificial Sequence: Synthetic oligonucleotide
agagcugccaaagacuguc

SEQ ID NO: 3261488 - RNA, 19 nt, Artificial Sequence
  Description of Artificial Sequence: Synthetic oligonucleotide
uuaaccacccaaauaucua

SEQ ID NO: 3261489 - RNA, 19 nt, Artificial Sequence
  Description of Artificial Sequence: Synthetic oligonucleotide
ugaauuuaucgaagagcug

SEQ ID NO: 3261490 - RNA, 19 nt, Artificial Sequence
  Description of Artificial Sequence: Synthetic oligonucleotide
auggcaaacuauuuaacuu

SEQ ID NO: 3261491 - RNA, 19 nt, Artificial Sequence
  Description of Artificial Sequence: Synthetic oligonucleotide
ugcugaacuaacucccugc

SEQ ID NO: 3261492 - RNA, 19 nt, Artificial Sequence
  Description of Artificial Sequence: Synthetic oligonucleotide
uccauuaaccacccaaaua

SEQ ID NO: 3261493 - RNA, 19 nt, Artificial Sequence
  Description of Artificial Sequence: Synthetic oligonucleotide
guauuuuguaguaaugaca

SEQ ID NO: 3261494 - RNA, 19 nt, Artificial Sequence
  Description of Artificial Sequence: Synthetic oligonucleotide
gucaaaagaggagaacuag

SEQ ID NO: 3261495 - RNA, 19 nt, Artificial Sequence
  Description of Artificial Sequence: Synthetic oligonucleotide
aaggcaguguguacaaguc

SEQ ID NO: 3261496 - RNA, 19 nt, Artificial Sequence
  Description of Artificial Sequence: Synthetic oligonucleotide
auuuuguaguaaugacauc

SEQ ID NO: 3261497 - RNA, 19 nt, Artificial Sequence
  Description of Artificial Sequence: Synthetic oligonucleotide
guggaaaggucaaaagagg

SEQ ID NO: 3261498 - RNA, 19 nt, Artificial Sequence
  Description of Artificial Sequence: Synthetic oligonucleotide
uaucgaagagcugccaaag

SEQ ID NO: 3261499 - RNA, 19 nt, Artificial Sequence
  Description of Artificial Sequence: Synthetic oligonucleotide
uuguaguaaugacaucaga

SEQ ID NO: 3261500 - RNA, 19 nt, Artificial Sequence
  Description of Artificial Sequence: Synthetic oligonucleotide
aagucugcagaaaccacag

SEQ ID NO: 3261501 - RNA, 19 nt, Artificial Sequence
  Description of Artificial Sequence: Synthetic oligonucleotide
aggucaaaagaggagaacu

SEQ ID NO: 3261502 - RNA, 19 nt, Artificial Sequence
  Description of Artificial Sequence: Synthetic oligonucleotide
auuaaccacccaaauaucu

SEQ ID NO: 3261503 - RNA, 19 nt, Artificial Sequence
  Description of Artificial Sequence: Synthetic oligonucleotide
auuauaugggcagacugcu

SEQ ID NO: 3261504 - RNA, 19 nt, Artificial Sequence
  Description of Artificial Sequence: Synthetic oligonucleotide
gacaucagaggcugaauuc

SEQ ID NO: 3261505 - RNA, 19 nt, Artificial Sequence
  Description of Artificial Sequence: Synthetic oligonucleotide
aagucuguaguucaacucc

SEQ ID NO: 3261506 - RNA, 19 nt, Artificial Sequence
  Description of Artificial Sequence: Synthetic oligonucleotide
uuuucuacuguucucaugu

SEQ ID NO: 3261507 - RNA, 19 nt, Artificial Sequence
  Description of Artificial Sequence: Synthetic oligonucleotide
uguaguucaacuccuguag

SEQ ID NO: 3261508 - RNA, 19 nt, Artificial Sequence
  Description of Artificial Sequence: Synthetic oligonucleotide
auuagcaacacauucuuug

SEQ ID NO: 3261509 - RNA, 19 nt, Artificial Sequence
  Description of Artificial Sequence: Synthetic oligonucleotide
agucauuccuacuugcugc

SEQ ID NO: 3261510 - RNA, 19 nt, Artificial Sequence
  Description of Artificial Sequence: Synthetic oligonucleotide
aacagcuucuccaagaguc

SEQ ID NO: 3261511 - RNA, 19 nt, Artificial Sequence
  Description of Artificial Sequence: Synthetic oligonucleotide
uuugucagcuucuucacag

SEQ ID NO: 3261512 - RNA, 19 nt, Artificial Sequence
  Description of Artificial Sequence: Synthetic oligonucleotide
ugugauuagcaacacauuc

SEQ ID NO: 3261513 - RNA, 19 nt, Artificial Sequence
  Description of Artificial Sequence: Synthetic oligonucleotide
ugaucuuuccuucucagcu

SEQ ID NO: 3261514 - RNA, 19 nt, Artificial Sequence
  Description of Artificial Sequence: Synthetic oligonucleotide
ucucaugugauuagcaaca

SEQ ID NO: 3261515 - RNA, 19 nt, Artificial Sequence
  Description of Artificial Sequence: Synthetic oligonucleotide
uguaccucaagucuguagu

SEQ ID NO: 3261516 - RNA, 19 nt, Artificial Sequence
  Description of Artificial Sequence: Synthetic oligonucleotide
caugcuacaaccucuggcc

SEQ ID NO: 3261517 - RNA, 19 nt, Artificial Sequence
  Description of Artificial Sequence: Synthetic oligonucleotide
cauucuuugucuuuggcug

SEQ ID NO: 3261518 - RNA, 19 nt, Artificial Sequence
  Description of Artificial Sequence: Synthetic oligonucleotide
ugagcugacgaagagauug

SEQ ID NO: 3261519 - RNA, 19 nt, Artificial Sequence
  Description of Artificial Sequence: Synthetic oligonucleotide
agagauugaucuuuccuuc

SEQ ID NO: 3261520 - RNA, 19 nt, Artificial Sequence
  Description of Artificial Sequence: Synthetic oligonucleotide
uuaacagcuucuccaagag

SEQ ID NO: 3261521 - RNA, 19 nt, Artificial Sequence
  Description of Artificial Sequence: Synthetic oligonucleotide
ugaagcauguuuucuacug

SEQ ID NO: 3261522 - RNA, 19 nt, Artificial Sequence
  Description of Artificial Sequence: Synthetic oligonucleotide
aucucugaccuuaugaagc

SEQ ID NO: 3261523 - RNA, 19 nt, Artificial Sequence
  Description of Artificial Sequence: Synthetic oligonucleotide
aagagauugaucuuuccuu

SEQ ID NO: 3261524 - RNA, 19 nt, Artificial Sequence
  Description of Artificial Sequence: Synthetic oligonucleotide
aucuuuccuucucagcucc

SEQ ID NO: 3261525 - RNA, 19 nt, Artificial Sequence
  Description of Artificial Sequence: Synthetic oligonucleotide
auugcaaaggucuccaggu

SEQ ID NO: 3261526 - RNA, 19 nt, Artificial Sequence
  Description of Artificial Sequence: Synthetic oligonucleotide
augucuauugagcugacga

SEQ ID NO: 3261527 - RNA, 19 nt, Artificial Sequence
  Description of Artificial Sequence: Synthetic oligonucleotide
uuggcugccaugcggaggg

SEQ ID NO: 3261528 - RNA, 19 nt, Artificial Sequence
  Description of Artificial Sequence: Synthetic oligonucleotide
aagucauuccuacuugcug

SEQ ID NO: 3261529 - RNA, 19 nt, Artificial Sequence
  Description of Artificial Sequence: Synthetic oligonucleotide
aagaugucuauugagcuga

SEQ ID NO: 3261530 - RNA, 19 nt, Artificial Sequence
  Description of Artificial Sequence: Synthetic oligonucleotide
ucuauugagcugacgaaga

SEQ ID NO: 3261531 - RNA, 19 nt, Artificial Sequence
  Description of Artificial Sequence: Synthetic oligonucleotide
acucuuaacagcuucucca

SEQ ID NO: 3261532 - RNA, 19 nt, Artificial Sequence
  Description of Artificial Sequence: Synthetic oligonucleotide
agagacucuuaacagcuuc

SEQ ID NO: 3261533 - RNA, 19 nt, Artificial Sequence
  Description of Artificial Sequence: Synthetic oligonucleotide
auucuuugucuuuggcugc

SEQ ID NO: 3261534 - RNA, 19 nt, Artificial Sequence
  Description of Artificial Sequence: Synthetic oligonucleotide
uccuacuugcugcaguccg

SEQ ID NO: 3261535 - RNA, 19 nt, Artificial Sequence
  Description of Artificial Sequence: Synthetic oligonucleotide
ucagcuucuucacaggagu

SEQ ID NO: 3261536 - RNA, 19 nt, Artificial Sequence
  Description of Artificial Sequence: Synthetic oligonucleotide
aacacauucuuugucuuug

SEQ ID NO: 3261537 - RNA, 19 nt, Artificial Sequence
  Description of Artificial Sequence: Synthetic oligonucleotide
uaugaagcauguuuucuac

SEQ ID NO: 3261538 - RNA, 19 nt, Artificial Sequence
  Description of Artificial Sequence: Synthetic oligonucleotide
ugcaaaggucuccaggugc

SEQ ID NO: 3261539 - RNA, 19 nt, Artificial Sequence
  Description of Artificial Sequence: Synthetic oligonucleotide
ucugaccuuaugaagcaug

SEQ ID NO: 3261540 - RNA, 19 nt, Artificial Sequence
  Description of Artificial Sequence: Synthetic oligonucleotide
uucuccaagagucugguuu

SEQ ID NO: 3261541 - RNA, 19 nt, Artificial Sequence
  Description of Artificial Sequence: Synthetic oligonucleotide
gaucucugaccuuaugaag

SEQ ID NO: 3261542 - RNA, 19 nt, Artificial Sequence
  Description of Artificial Sequence: Synthetic oligonucleotide
ucuacuguucucaugugau

SEQ ID NO: 3261543 - RNA, 19 nt, Artificial Sequence
  Description of Artificial Sequence: Synthetic oligonucleotide
uaagaugucuauugagcug

SEQ ID NO: 3261544 - RNA, 19 nt, Artificial Sequence
  Description of Artificial Sequence: Synthetic oligonucleotide
uucucaugugauuagcaac

SEQ ID NO: 3261545 - RNA, 19 nt, Artificial Sequence
  Description of Artificial Sequence: Synthetic oligonucleotide
ucggagagacucuuaacag

SEQ ID NO: 3261546 - RNA, 19 nt, Artificial Sequence
  Description of Artificial Sequence: Synthetic oligonucleotide
aucguggauguucuccucc

SEQ ID NO: 3261547 - RNA, 19 nt, Artificial Sequence
  Description of Artificial Sequence: Synthetic oligonucleotide
agcaacacauucuuugucu

SEQ ID NO: 3261548 - RNA, 19 nt, Artificial Sequence
  Description of Artificial Sequence: Synthetic oligonucleotide
cuggguaagaugucuauug

SEQ ID NO: 3261549 - RNA, 19 nt, Artificial Sequence
  Description of Artificial Sequence: Synthetic oligonucleotide
auugaucuuuccuucucag

SEQ ID NO: 3261550 - RNA, 19 nt, Artificial Sequence
  Description of Artificial Sequence: Synthetic oligonucleotide
ugauuagcaacacauucuu

SEQ ID NO: 3261551 - RNA, 19 nt, Artificial Sequence
  Description of Artificial Sequence: Synthetic oligonucleotide
ugaagucauuccuacuugc

SEQ ID NO: 3261552 - RNA, 19 nt, Artificial Sequence
  Description of Artificial Sequence: Synthetic oligonucleotide
auuccuacuugcugcaguc

SEQ ID NO: 3261553 - RNA, 19 nt, Artificial Sequence
  Description of Artificial Sequence: Synthetic oligonucleotide
agggugaagucauuccuac

SEQ ID NO: 3261554 - RNA, 19 nt, Artificial Sequence
  Description of Artificial Sequence: Synthetic oligonucleotide
aguuuggguagcugcaggg

SEQ ID NO: 3261555 - RNA, 19 nt, Artificial Sequence
  Description of Artificial Sequence: Synthetic oligonucleotide
aucuuugccucggagagac

SEQ ID NO: 3261556 - RNA, 19 nt, Artificial Sequence
  Description of Artificial Sequence: Synthetic oligonucleotide
uguucucaugugauuagca

SEQ ID NO: 3261557 - RNA, 19 nt, Artificial Sequence
  Description of Artificial Sequence: Synthetic oligonucleotide
acauucuuugucuuuggcu

SEQ ID NO: 3261558 - RNA, 19 nt, Artificial Sequence
  Description of Artificial Sequence: Synthetic oligonucleotide
uuuggguagcugcagggug

SEQ ID NO: 3261559 - RNA, 19 nt, Artificial Sequence
  Description of Artificial Sequence: Synthetic oligonucleotide
ugaucucugaccuuaugaa

SEQ ID NO: 3261560 - RNA, 19 nt, Artificial Sequence
  Description of Artificial Sequence: Synthetic oligonucleotide
cauugcaaaggucuccagg

SEQ ID NO: 3261561 - RNA, 19 nt, Artificial Sequence
  Description of Artificial Sequence: Synthetic oligonucleotide
uugucuuuggcugccaugc

SEQ ID NO: 3261562 - RNA, 19 nt, Artificial Sequence
  Description of Artificial Sequence: Synthetic oligonucleotide
uuagcaacacauucuuugu

SEQ ID NO: 3261563 - RNA, 19 nt, Artificial Sequence
  Description of Artificial Sequence: Synthetic oligonucleotide
agauugaucuuuccuucuc

SEQ ID NO: 3261564 - RNA, 19 nt, Artificial Sequence
  Description of Artificial Sequence: Synthetic oligonucleotide
aggaguguaccucaagucu

SEQ ID NO: 3261565 - RNA, 19 nt, Artificial Sequence
  Description of Artificial Sequence: Synthetic oligonucleotide
ucaagucuguaguucaacu

SEQ ID NO: 3261566 - RNA, 19 nt, Artificial Sequence
  Description of Artificial Sequence: Synthetic oligonucleotide
uuaugaagcauguuuucua

SEQ ID NO: 3261567 - RNA, 19 nt, Artificial Sequence
  Description of Artificial Sequence: Synthetic oligonucleotide
acuugcugcaguccgugac

SEQ ID NO: 3261568 - RNA, 19 nt, Artificial Sequence
  Description of Artificial Sequence: Synthetic oligonucleotide
uucuacuguucucauguga

SEQ ID NO: 3261569 - RNA, 19 nt, Artificial Sequence
  Description of Artificial Sequence: Synthetic oligonucleotide
cugacgaagagauugaucu

SEQ ID NO: 3261570 - RNA, 19 nt, Artificial Sequence
  Description of Artificial Sequence: Synthetic oligonucleotide
aacuccuguagcugcuggg

SEQ ID NO: 3261571 - RNA, 19 nt, Artificial Sequence
  Description of Artificial Sequence: Synthetic oligonucleotide
uucacaggaguguaccuca

SEQ ID NO: 3261572 - RNA, 19 nt, Artificial Sequence
  Description of Artificial Sequence: Synthetic oligonucleotide
ucuuuggcugccaugcgga

SEQ ID NO: 3261573 - RNA, 19 nt, Artificial Sequence
  Description of Artificial Sequence: Synthetic oligonucleotide
ucuuaacagcuucuccaag

SEQ ID NO: 3261574 - RNA, 19 nt, Artificial Sequence
  Description of Artificial Sequence: Synthetic oligonucleotide
ugacagcgagaucugaucu

SEQ ID NO: 3261575 - RNA, 19 nt, Artificial Sequence
  Description of Artificial Sequence: Synthetic oligonucleotide
ucuguaguucaacuccugu

SEQ ID NO: 3261576 - RNA, 19 nt, Artificial Sequence
  Description of Artificial Sequence: Synthetic oligonucleotide
acaggaguguaccucaagu

SEQ ID NO: 3261577 - RNA, 19 nt, Artificial Sequence
  Description of Artificial Sequence: Synthetic oligonucleotide
augcuacaaccucuggccc

SEQ ID NO: 3261578 - RNA, 19 nt, Artificial Sequence
  Description of Artificial Sequence: Synthetic oligonucleotide
uccaucuuugccucggaga

SEQ ID NO: 3261579 - RNA, 19 nt, Artificial Sequence
  Description of Artificial Sequence: Synthetic oligonucleotide
cuuguccugcuccagcugg

SEQ ID NO: 3261580 - RNA, 19 nt, Artificial Sequence
  Description of Artificial Sequence: Synthetic oligonucleotide
gguaagaugucuauugagc

SEQ ID NO: 3261581 - RNA, 19 nt, Artificial Sequence
  Description of Artificial Sequence: Synthetic oligonucleotide
uuccuucucagcuccaucu

SEQ ID NO: 3261582 - RNA, 19 nt, Artificial Sequence
  Description of Artificial Sequence: Synthetic oligonucleotide
ucuggcccacccuugagcc

SEQ ID NO: 3261583 - RNA, 19 nt, Artificial Sequence
  Description of Artificial Sequence: Synthetic oligonucleotide
gacucuuaacagcuucucc

SEQ ID NO: 3261584 - RNA, 19 nt, Artificial Sequence
  Description of Artificial Sequence: Synthetic oligonucleotide
uggguaagaugucuauuga

SEQ ID NO: 3261585 - RNA, 19 nt, Artificial Sequence
  Description of Artificial Sequence: Synthetic oligonucleotide
acuguucucaugugauuag

SEQ ID NO: 3261586 - RNA, 19 nt, Artificial Sequence
  Description of Artificial Sequence: Synthetic oligonucleotide
uaguucaacuccuguagcu

SEQ ID NO: 3261587 - RNA, 19 nt, Artificial Sequence
  Description of Artificial Sequence: Synthetic oligonucleotide
uucuucacaggaguguacc

SEQ ID NO: 3261588 - RNA, 19 nt, Artificial Sequence
  Description of Artificial Sequence: Synthetic oligonucleotide
gauguucuccuccagucga

SEQ ID NO: 3261589 - RNA, 19 nt, Artificial Sequence
  Description of Artificial Sequence: Synthetic oligonucleotide
ugucagcuucuucacagga

SEQ ID NO: 3261590 - RNA, 19 nt, Artificial Sequence
  Description of Artificial Sequence: Synthetic oligonucleotide
uuuugucagcuucuucaca

SEQ ID NO: 3261591 - RNA, 19 nt, Artificial Sequence
  Description of Artificial Sequence: Synthetic oligonucleotide
auugagcugacgaagagau

SEQ ID NO: 3261592 - RNA, 19 nt, Artificial Sequence
  Description of Artificial Sequence: Synthetic oligonucleotide
cuuaacagcuucuccaaga

SEQ ID NO: 3261593 - RNA, 19 nt, Artificial Sequence
  Description of Artificial Sequence: Synthetic oligonucleotide
ucucugaccuuaugaagca

SEQ ID NO: 3261594 - RNA, 19 nt, Artificial Sequence
  Description of Artificial Sequence: Synthetic oligonucleotide
uugaucuuuccuucucagc

SEQ ID NO: 3261595 - RNA, 19 nt, Artificial Sequence
  Description of Artificial Sequence: Synthetic oligonucleotide
ugcaguuuggguagcugca

SEQ ID NO: 3261596 - RNA, 19 nt, Artificial Sequence
  Description of Artificial Sequence: Synthetic oligonucleotide
ucaugugauuagcaacaca

SEQ ID NO: 3261597 - RNA, 19 nt, Artificial Sequence
  Description of Artificial Sequence: Synthetic oligonucleotide
gauugaucuuuccuucuca

SEQ ID NO: 3261598 - RNA, 19 nt, Artificial Sequence
  Description of Artificial Sequence: Synthetic oligonucleotide
gucuauugagcugacgaag

SEQ ID NO: 3261599 - RNA, 19 nt, Artificial Sequence
  Description of Artificial Sequence: Synthetic oligonucleotide
uuugucuuuggcugccaug

SEQ ID NO: 3261600 - RNA, 19 nt, Artificial Sequence
  Description of Artificial Sequence: Synthetic oligonucleotide
aagcauguuuucuacuguu

SEQ ID NO: 3261601 - RNA, 19 nt, Artificial Sequence
  Description of Artificial Sequence: Synthetic oligonucleotide
ugcagggugaagucauucc

SEQ ID NO: 3261602 - RNA, 19 nt, Artificial Sequence
  Description of Artificial Sequence: Synthetic oligonucleotide
guucaacuccuguagcugc

SEQ ID NO: 3261603 - RNA, 19 nt, Artificial Sequence
  Description of Artificial Sequence: Synthetic oligonucleotide
uccaggugcaguuugggua

SEQ ID NO: 3261604 - RNA, 19 nt, Artificial Sequence
  Description of Artificial Sequence: Synthetic oligonucleotide
caugugauuagcaacacau

SEQ ID NO: 3261605 - RNA, 19 nt, Artificial Sequence
  Description of Artificial Sequence: Synthetic oligonucleotide
aaugcauucuauuaauucg

SEQ ID NO: 3261606 - RNA, 19 nt, Artificial Sequence
  Description of Artificial Sequence: Synthetic oligonucleotide
uauaaaaucccuauguucc

SEQ ID NO: 3261607 - RNA, 19 nt, Artificial Sequence
  Description of Artificial Sequence: Synthetic oligonucleotide
uuuacacauauacaaagcg

SEQ ID NO: 3261608 - RNA, 19 nt, Artificial Sequence
  Description of Artificial Sequence: Synthetic oligonucleotide
aauccaguccuauaaaauc

SEQ ID NO: 3261609 - RNA, 19 nt, Artificial Sequence
  Description of Artificial Sequence: Synthetic oligonucleotide
uuuggguuuacacauauac

SEQ ID NO: 3261610 - RNA, 19 nt, Artificial Sequence
  Description of Artificial Sequence: Synthetic oligonucleotide
uacacauauacaaagcgga

SEQ ID NO: 3261611 - RNA, 19 nt, Artificial Sequence
  Description of Artificial Sequence: Synthetic oligonucleotide
uuucuauuaaucugugcgg

SEQ ID NO: 3261612 - RNA, 19 nt, Artificial Sequence
  Description of Artificial Sequence: Synthetic oligonucleotide
aguguugucaauuucagau

SEQ ID NO: 3261613 - RNA, 19 nt, Artificial Sequence
  Description of Artificial Sequence: Synthetic oligonucleotide
uauuaauucggucucuucu

SEQ ID NO: 3261614 - RNA, 19 nt, Artificial Sequence
  Description of Artificial Sequence: Synthetic oligonucleotide
uaauuuguagguauccuug

SEQ ID NO: 3261615 - RNA, 19 nt, Artificial Sequence
  Description of Artificial Sequence: Synthetic oligonucleotide
auacaaagcggaauaaucc

SEQ ID NO: 3261616 - RNA, 19 nt, Artificial Sequence
  Description of Artificial Sequence: Synthetic oligonucleotide
uccuauaaaaucccuaugu

SEQ ID NO: 3261617 - RNA, 19 nt, Artificial Sequence
  Description of Artificial Sequence: Synthetic oligonucleotide
uauacaaagcggaauaauc

SEQ ID NO: 3261618 - RNA, 19 nt, Artificial Sequence
  Description of Artificial Sequence: Synthetic oligonucleotide
auuucagauguucaggcag

SEQ ID NO: 3261619 - RNA, 19 nt, Artificial Sequence
  Description of Artificial Sequence: Synthetic oligonucleotide
aagcggaauaauccagucc

SEQ ID NO: 3261620 - RNA, 19 nt, Artificial Sequence
  Description of Artificial Sequence: Synthetic oligonucleotide
uggguuuacacauauacaa

SEQ ID NO: 3261621 - RNA, 19 nt, Artificial Sequence
  Description of Artificial Sequence: Synthetic oligonucleotide
auuaauucggucucuucuc

SEQ ID NO: 3261622 - RNA, 19 nt, Artificial Sequence
  Description of Artificial Sequence: Synthetic oligonucleotide
aucccuauguuccaguaac

SEQ ID NO: 3261623 - RNA, 19 nt, Artificial Sequence
  Description of Artificial Sequence: Synthetic oligonucleotide
aaagcggaauaauccaguc

SEQ ID NO: 3261624 - RNA, 19 nt, Artificial Sequence
  Description of Artificial Sequence: Synthetic oligonucleotide
uguugucaauuucagaugu

SEQ ID NO: 3261625 - RNA, 19 nt, Artificial Sequence
  Description of Artificial Sequence: Synthetic oligonucleotide
aaaucuuucagcugagcaa

SEQ ID NO: 3261626 - RNA, 19 nt, Artificial Sequence
  Description of Artificial Sequence: Synthetic oligonucleotide
uuuguagguauccuuggug

SEQ ID NO: 3261627 - RNA, 19 nt, Artificial Sequence
  Description of Artificial Sequence: Synthetic oligonucleotide
cuauaaaaucccuauguuc

SEQ ID NO: 3261628 - RNA, 19 nt, Artificial Sequence
  Description of Artificial Sequence: Synthetic oligonucleotide
agcggaauaauccaguccu

SEQ ID NO: 3261629 - RNA, 19 nt, Artificial Sequence
  Description of Artificial Sequence: Synthetic oligonucleotide
aaugagggauuccuucguc

SEQ ID NO: 3261630 - RNA, 19 nt, Artificial Sequence
  Description of Artificial Sequence: Synthetic oligonucleotide
gaauaauccaguccuauaa

SEQ ID NO: 3261631 - RNA, 19 nt, Artificial Sequence
  Description of Artificial Sequence: Synthetic oligonucleotide
gguuuacacauauacaaag

SEQ ID NO: 3261632 - RNA, 19 nt, Artificial Sequence
  Description of Artificial Sequence: Synthetic oligonucleotide
cuauguuccaguaacuguc

SEQ ID NO: 3261633 - RNA, 19 nt, Artificial Sequence
  Description of Artificial Sequence: Synthetic oligonucleotide
uacaaagcggaauaaucca

SEQ ID NO: 3261634 - RNA, 19 nt, Artificial Sequence
  Description of Artificial Sequence: Synthetic oligonucleotide
auccaguccuauaaaaucc

SEQ ID NO: 3261635 - RNA, 19 nt, Artificial Sequence
  Description of Artificial Sequence: Synthetic oligonucleotide
augagggauuccuucgucc

SEQ ID NO: 3261636 - RNA, 19 nt, Artificial Sequence
  Description of Artificial Sequence: Synthetic oligonucleotide
gucaauuucagauguucag

SEQ ID NO: 3261637 - RNA, 19 nt, Artificial Sequence
  Description of Artificial Sequence: Synthetic oligonucleotide
ugugcgguaauuuguaggu

SEQ ID NO: 3261638 - RNA, 19 nt, Artificial Sequence
  Description of Artificial Sequence: Synthetic oligonucleotide
uaaucugugcgguaauuug

SEQ ID NO: 3261639 - RNA, 19 nt, Artificial Sequence
  Description of Artificial Sequence: Synthetic oligonucleotide
ugucaauuucagauguuca

SEQ ID NO: 3261640 - RNA, 19 nt, Artificial Sequence
  Description of Artificial Sequence: Synthetic oligonucleotide
uuguagguauccuuggugu

SEQ ID NO: 3261641 - RNA, 19 nt, Artificial Sequence
  Description of Artificial Sequence: Synthetic oligonucleotide
uccagcuuuggccucuugg

SEQ ID NO: 3261642 - RNA, 19 nt, Artificial Sequence
  Description of Artificial Sequence: Synthetic oligonucleotide
aaucuuucagcugagcaau

SEQ ID NO: 3261643 - RNA, 19 nt, Artificial Sequence
  Description of Artificial Sequence: Synthetic oligonucleotide
aguccuauaaaaucccuau

SEQ ID NO: 3261644 - RNA, 19 nt, Artificial Sequence
  Description of Artificial Sequence: Synthetic oligonucleotide
uccaguccuauaaaauccc

SEQ ID NO: 3261645 - RNA, 19 nt, Artificial Sequence
  Description of Artificial Sequence: Synthetic oligonucleotide
aaaaucccuauguuccagu

SEQ ID NO: 3261646 - RNA, 19 nt, Artificial Sequence
  Description of Artificial Sequence: Synthetic oligonucleotide
cauucuauuaauucggucu

SEQ ID NO: 3261647 - RNA, 19 nt, Artificial Sequence
  Description of Artificial Sequence: Synthetic oligonucleotide
augaccggcacgcagcggg

SEQ ID NO: 3261648 - RNA, 19 nt, Artificial Sequence
  Description of Artificial Sequence: Synthetic oligonucleotide
aaaugagggauuccuucgu

SEQ ID NO: 3261649 - RNA, 19 nt, Artificial Sequence
  Description of Artificial Sequence: Synthetic oligonucleotide
ucguccauguucaauggcu

SEQ ID NO: 3261650 - RNA, 19 nt, Artificial Sequence
  Description of Artificial Sequence: Synthetic oligonucleotide
ugucucuccugcaaaugag

SEQ ID NO: 3261651 - RNA, 19 nt, Artificial Sequence
  Description of Artificial Sequence: Synthetic oligonucleotide
ucaggcagcaaaucuuuca

SEQ ID NO: 3261652 - RNA, 19 nt, Artificial Sequence
  Description of Artificial Sequence: Synthetic oligonucleotide
cugugcgguaauuuguagg

SEQ ID NO: 3261653 - RNA, 19 nt, Artificial Sequence
  Description of Artificial Sequence: Synthetic oligonucleotide
accguguggcgucaggagc

SEQ ID NO: 3261654 - RNA, 19 nt, Artificial Sequence
  Description of Artificial Sequence: Synthetic oligonucleotide
ugaguccgcuggaugaccg

SEQ ID NO: 3261655 - RNA, 19 nt, Artificial Sequence
  Description of Artificial Sequence: Synthetic oligonucleotide
uucuauuaaucugugcggu

SEQ ID NO: 3261656 - RNA, 19 nt, Artificial Sequence
  Description of Artificial Sequence: Synthetic oligonucleotide
uguucaggcagcaaaucuu

SEQ ID NO: 3261657 - RNA, 19 nt, Artificial Sequence
  Description of Artificial Sequence: Synthetic oligonucleotide
auaaaaucccuauguucca

SEQ ID NO: 3261658 - RNA, 19 nt, Artificial Sequence
  Description of Artificial Sequence: Synthetic oligonucleotide
cuuggugucgucucgcuuc

SEQ ID NO: 3261659 - RNA, 19 nt, Artificial Sequence
  Description of Artificial Sequence: Synthetic oligonucleotide
ucuccugcaaaugagggau

SEQ ID NO: 3261660 - RNA, 19 nt, Artificial Sequence
  Description of Artificial Sequence: Synthetic oligonucleotide
uaaaaucccuauguuccag

SEQ ID NO: 3261661 - RNA, 19 nt, Artificial Sequence
  Description of Artificial Sequence: Synthetic oligonucleotide
ugcgguaauuuguagguau

SEQ ID NO: 3261662 - RNA, 19 nt, Artificial Sequence
  Description of Artificial Sequence: Synthetic oligonucleotide
aauucggucucuucucuuu

SEQ ID NO: 3261663 - RNA, 19 nt, Artificial Sequence
  Description of Artificial Sequence: Synthetic oligonucleotide
guagguauccuuggugucg

SEQ ID NO: 3261664 - RNA, 19 nt, Artificial Sequence
  Description of Artificial Sequence: Synthetic oligonucleotide
aaucugugcgguaauuugu

SEQ ID NO: 3261665 - RNA, 19 nt, Artificial Sequence
  Description of Artificial Sequence: Synthetic oligonucleotide
ugagggauuccuucgucca

SEQ ID NO: 3261666 - RNA, 19 nt, Artificial Sequence
  Description of Artificial Sequence: Synthetic oligonucleotide
accaggggcagccgcagcc

SEQ ID NO: 3261667 - RNA, 19 nt, Artificial Sequence
  Description of Artificial Sequence: Synthetic oligonucleotide
ugcauucuauuaauucggu

SEQ ID NO: 3261668 - RNA, 19 nt, Artificial Sequence
  Description of Artificial Sequence: Synthetic oligonucleotide
ugucgucucgcuucaagcu

SEQ ID NO: 3261669 - RNA, 19 nt, Artificial Sequence
  Description of Artificial Sequence: Synthetic oligonucleotide
cuucguccauguucaaugg

SEQ ID NO: 3261670 - RNA, 19 nt, Artificial Sequence
  Description of Artificial Sequence: Synthetic oligonucleotide
ucgucucgcuucaagcucc

SEQ ID NO: 3261671 - RNA, 19 nt, Artificial Sequence
  Description of Artificial Sequence: Synthetic oligonucleotide
caggcagcaaaucuuucag

SEQ ID NO: 3261672 - RNA, 19 nt, Artificial Sequence
  Description of Artificial Sequence: Synthetic oligonucleotide
aaucccuauguuccaguaa

SEQ ID NO: 3261673 - RNA, 19 nt, Artificial Sequence
  Description of Artificial Sequence: Synthetic oligonucleotide
guguugucaauuucagaug

SEQ ID NO: 3261674 - RNA, 19 nt, Artificial Sequence
  Description of Artificial Sequence: Synthetic oligonucleotide
uucaauggcuguccguuuc

SEQ ID NO: 3261675 - RNA, 19 nt, Artificial Sequence
  Description of Artificial Sequence: Synthetic oligonucleotide
auuuguagguauccuuggu

SEQ ID NO: 3261676 - RNA, 19 nt, Artificial Sequence
  Description of Artificial Sequence: Synthetic oligonucleotide
ucagcugagcaaugcauuc

SEQ ID NO: 3261677 - RNA, 19 nt, Artificial Sequence
  Description of Artificial Sequence: Synthetic oligonucleotide
ucugugcgguaauuuguag

SEQ ID NO: 3261678 - RNA, 19 nt, Artificial Sequence
  Description of Artificial Sequence: Synthetic oligonucleotide
aaaucccuauguuccagua

SEQ ID NO: 3261679 - RNA, 19 nt, Artificial Sequence
  Description of Artificial Sequence: Synthetic oligonucleotide
uguucaauggcuguccguu

SEQ ID NO: 3261680 - RNA, 19 nt, Artificial Sequence
  Description of Artificial Sequence: Synthetic oligonucleotide
cauguucaauggcuguccg

SEQ ID NO: 3261681 - RNA, 19 nt, Artificial Sequence
  Description of Artificial Sequence: Synthetic oligonucleotide
uucguccauguucaauggc

SEQ ID NO: 3261682 - RNA, 19 nt, Artificial Sequence
  Description of Artificial Sequence: Synthetic oligonucleotide
uauuaaucugugcgguaau

SEQ ID NO: 3261683 - RNA, 19 nt, Artificial Sequence
  Description of Artificial Sequence: Synthetic oligonucleotide
gugacagcagguagaaggg

SEQ ID NO: 3261684 - RNA, 19 nt, Artificial Sequence
  Description of Artificial Sequence: Synthetic oligonucleotide
ggcggcuccugcuugaugg

SEQ ID NO: 3261685 - RNA, 19 nt, Artificial Sequence
  Description of Artificial Sequence: Synthetic oligonucleotide
acaaagcggaauaauccag

SEQ ID NO: 3261686 - RNA, 19 nt, Artificial Sequence
  Description of Artificial Sequence: Synthetic oligonucleotide
uucagcugagcaaugcauu

SEQ ID NO: 3261687 - RNA, 19 nt, Artificial Sequence
  Description of Artificial Sequence: Synthetic oligonucleotide
cuauuaauucggucucuuc

SEQ ID NO: 3261688 - RNA, 19 nt, Artificial Sequence
  Description of Artificial Sequence: Synthetic oligonucleotide
agcagcgcgggcucugggc

SEQ ID NO: 3261689 - RNA, 19 nt, Artificial Sequence
  Description of Artificial Sequence: Synthetic oligonucleotide
uguggcgucaggagcgccc

SEQ ID NO: 3261690 - RNA, 19 nt, Artificial Sequence
  Description of Artificial Sequence: Synthetic oligonucleotide
uuaaucugugcgguaauuu

SEQ ID NO: 3261691 - RNA, 19 nt, Artificial Sequence
  Description of Artificial Sequence: Synthetic oligonucleotide
cagguagaagggcaggcag

SEQ ID NO: 3261692 - RNA, 19 nt, Artificial Sequence
  Description of Artificial Sequence: Synthetic oligonucleotide
ucuauuaaucugugcggua

SEQ ID NO: 3261693 - RNA, 19 nt, Artificial Sequence
  Description of Artificial Sequence: Synthetic oligonucleotide
auauacaaagcggaauaau

SEQ ID NO: 3261694 - RNA, 19 nt, Artificial Sequence
  Description of Artificial Sequence: Synthetic oligonucleotide
aucgggaccaggggcagcc

SEQ ID NO: 3261695 - RNA, 19 nt, Artificial Sequence
  Description of Artificial Sequence: Synthetic oligonucleotide
uguagguauccuugguguc

SEQ ID NO: 3261696 - RNA, 19 nt, Artificial Sequence
  Description of Artificial Sequence: Synthetic oligonucleotide
guccuauaaaaucccuaug

SEQ ID NO: 3261697 - RNA, 19 nt, Artificial Sequence
  Description of Artificial Sequence: Synthetic oligonucleotide
ucucgcuucaagcuccuuu

SEQ ID NO: 3261698 - RNA, 19 nt, Artificial Sequence
  Description of Artificial Sequence: Synthetic oligonucleotide
gugucgucucgcuucaagc

SEQ ID NO: 3261699 - RNA, 19 nt, Artificial Sequence
  Description of Artificial Sequence: Synthetic oligonucleotide
cuccuuuuggguuuacaca

SEQ ID NO: 3261700 - RNA, 19 nt, Artificial Sequence
  Description of Artificial Sequence: Synthetic oligonucleotide
ugcgcgaagggcgagcccc

SEQ ID NO: 3261701 - RNA, 19 nt, Artificial Sequence
  Description of Artificial Sequence: Synthetic oligonucleotide
ccuucguccauguucaaug

SEQ ID NO: 3261702 - RNA, 19 nt, Artificial Sequence
  Description of Artificial Sequence: Synthetic oligonucleotide
ucaggagcgccccaguguu

SEQ ID NO: 3261703 - RNA, 19 nt, Artificial Sequence
  Description of Artificial Sequence: Synthetic oligonucleotide
gucucuccugcaaaugagg

SEQ ID NO: 3261704 - RNA, 19 nt, Artificial Sequence
  Description of Artificial Sequence: Synthetic oligonucleotide
aguaacugucucuccugca

SEQ ID NO: 3261705 - RNA, 19 nt, Artificial Sequence
  Description of Artificial Sequence: Synthetic oligonucleotide
ucuuauguuacauugaaag

SEQ ID NO: 3261706 - RNA, 19 nt, Artificial Sequence
  Description of Artificial Sequence: Synthetic oligonucleotide
uuguguuuuauuaaaauag

SEQ ID NO: 3261707 - RNA, 19 nt, Artificial Sequence
  Description of Artificial Sequence: Synthetic oligonucleotide
aaaugauaagcauauauga

SEQ ID NO: 3261708 - RNA, 19 nt, Artificial Sequence
  Description of Artificial Sequence: Synthetic oligonucleotide
aauuagauaaucauaaucu

SEQ ID NO: 3261709 - RNA, 19 nt, Artificial Sequence
  Description of Artificial Sequence: Synthetic oligonucleotide
aaagucuuauguuacauug

SEQ ID NO: 3261710 - RNA, 19 nt, Artificial Sequence
  Description of Artificial Sequence: Synthetic oligonucleotide
acaauuacuauguuagccc

SEQ ID NO: 3261711 - RNA, 19 nt, Artificial Sequence
  Description of Artificial Sequence: Synthetic oligonucleotide
aacacuauugacuauugug

SEQ ID NO: 3261712 - RNA, 19 nt, Artificial Sequence
  Description of Artificial Sequence: Synthetic oligonucleotide
agaaaaucuacuuuuagca

SEQ ID NO: 3261713 - RNA, 19 nt, Artificial Sequence
  Description of Artificial Sequence: Synthetic oligonucleotide
aauaguuugggaugggaag

SEQ ID NO: 3261714 - RNA, 19 nt, Artificial Sequence
  Description of Artificial Sequence: Synthetic oligonucleotide
uguacauggauuuuaacca

SEQ ID NO: 3261715 - RNA, 19 nt, Artificial Sequence
  Description of Artificial Sequence: Synthetic oligonucleotide
uuuuagcacauaaaguagg

SEQ ID NO: 3261716 - RNA, 19 nt, Artificial Sequence
  Description of Artificial Sequence: Synthetic oligonucleotide
gauacuauaaagcacuuca

SEQ ID NO: 3261717 - RNA, 19 nt, Artificial Sequence
  Description of Artificial Sequence: Synthetic oligonucleotide
aacuuuuagacauaaaauu

SEQ ID NO: 3261718 - RNA, 19 nt, Artificial Sequence
  Description of Artificial Sequence: Synthetic oligonucleotide
uuguacauggauuuuaacc

SEQ ID NO: 3261719 - RNA, 19 nt, Artificial Sequence
  Description of Artificial Sequence: Synthetic oligonucleotide
uuugcauuauuucaggaca

SEQ ID NO: 3261720 - RNA, 19 nt, Artificial Sequence
  Description of Artificial Sequence: Synthetic oligonucleotide
aaugauaagcauauaugac

SEQ ID NO: 3261721 - RNA, 19 nt, Artificial Sequence
  Description of Artificial Sequence: Synthetic oligonucleotide
aaucacuaaguauaguucu

SEQ ID NO: 3261722 - RNA, 19 nt, Artificial Sequence
  Description of Artificial Sequence: Synthetic oligonucleotide
uaauuagauaaucauaauc

SEQ ID NO: 3261723 - RNA, 19 nt, Artificial Sequence
  Description of Artificial Sequence: Synthetic oligonucleotide
uauaucuggguuuucacag

SEQ ID NO: 3261724 - RNA, 19 nt, Artificial Sequence
  Description of Artificial Sequence: Synthetic oligonucleotide
uuugacaugaggacaacag

SEQ ID NO: 3261725 - RNA, 19 nt, Artificial Sequence
  Description of Artificial Sequence: Synthetic oligonucleotide
ucaaaguuuguuaagcucu

SEQ ID NO: 3261726 - RNA, 19 nt, Artificial Sequence
  Description of Artificial Sequence: Synthetic oligonucleotide
uuauguuacauugaaagca

SEQ ID NO: 3261727 - RNA, 19 nt, Artificial Sequence
  Description of Artificial Sequence: Synthetic oligonucleotide
cuacauugaaucuaauugg

SEQ ID NO: 3261728 - RNA, 19 nt, Artificial Sequence
  Description of Artificial Sequence: Synthetic oligonucleotide
aaaaugauaagcauauaug

SEQ ID NO: 3261729 - RNA, 19 nt, Artificial Sequence
  Description of Artificial Sequence: Synthetic oligonucleotide
aaccacauggaacaaaaug

SEQ ID NO: 3261730 - RNA, 19 nt, Artificial Sequence
  Description of Artificial Sequence: Synthetic oligonucleotide
uauagaguuugacaugagg

SEQ ID NO: 3261731 - RNA, 19 nt, Artificial Sequence
  Description of Artificial Sequence: Synthetic oligonucleotide
aguaagauacauuauacau

SEQ ID NO: 3261732 - RNA, 19 nt, Artificial Sequence
  Description of Artificial Sequence: Synthetic oligonucleotide
aagaugacacauuaguuga

SEQ ID NO: 3261733 - RNA, 19 nt, Artificial Sequence
  Description of Artificial Sequence: Synthetic oligonucleotide
aucuccaucagucauagug

SEQ ID NO: 3261734 - RNA, 19 nt, Artificial Sequence
  Description of Artificial Sequence: Synthetic oligonucleotide
uuaggauugaauuuauugu

SEQ ID NO: 3261735 - RNA, 19 nt, Artificial Sequence
  Description of Artificial Sequence: Synthetic oligonucleotide
auagugguggucuuggugg

SEQ ID NO: 3261736 - RNA, 19 nt, Artificial Sequence
  Description of Artificial Sequence: Synthetic oligonucleotide
aaugcuuucccugaagauc

SEQ ID NO: 3261737 - RNA, 19 nt, Artificial Sequence
  Description of Artificial Sequence: Synthetic oligonucleotide
acuuuuagcacauaaagua

SEQ ID NO: 3261738 - RNA, 19 nt, Artificial Sequence
  Description of Artificial Sequence: Synthetic oligonucleotide
cuacuuuuagcacauaaag

SEQ ID NO: 3261739 - RNA, 19 nt, Artificial Sequence
  Description of Artificial Sequence: Synthetic oligonucleotide
uggauuuuaaccaacuuau

SEQ ID NO: 3261740 - RNA, 19 nt, Artificial Sequence
  Description of Artificial Sequence: Synthetic oligonucleotide
acaagaaccacauggaaca

SEQ ID NO: 3261741 - RNA, 19 nt, Artificial Sequence
  Description of Artificial Sequence: Synthetic oligonucleotide
aaaacugagaucaguauug

SEQ ID NO: 3261742 - RNA, 19 nt, Artificial Sequence
  Description of Artificial Sequence: Synthetic oligonucleotide
uaaacagggagccauucag

SEQ ID NO: 3261743 - RNA, 19 nt, Artificial Sequence
  Description of Artificial Sequence: Synthetic oligonucleotide
uguagugaugaauuuagga

SEQ ID NO: 3261744 - RNA, 19 nt, Artificial Sequence
  Description of Artificial Sequence: Synthetic oligonucleotide
caaguuagaagcaaauuug

SEQ ID NO: 3261745 - RNA, 19 nt, Artificial Sequence
  Description of Artificial Sequence: Synthetic oligonucleotide
uguaucuauaaagaaaugu

SEQ ID NO: 3261746 - RNA, 19 nt, Artificial Sequence
  Description of Artificial Sequence: Synthetic oligonucleotide
uuuguuaagcucuguauga

SEQ ID NO: 3261747 - RNA, 19 nt, Artificial Sequence
  Description of Artificial Sequence: Synthetic oligonucleotide
uuggaaccuaacuugaacc

SEQ ID NO: 3261748 - RNA, 19 nt, Artificial Sequence
  Description of Artificial Sequence: Synthetic oligonucleotide
aacaaaaugauaagcauau

SEQ ID NO: 3261749 - RNA, 19 nt, Artificial Sequence
  Description of Artificial Sequence: Synthetic oligonucleotide
uuggugagauacuauaaag

SEQ ID NO: 3261750 - RNA, 19 nt, Artificial Sequence
  Description of Artificial Sequence: Synthetic oligonucleotide
uggugagauacuauaaagc

SEQ ID NO: 3261751 - RNA, 19 nt, Artificial Sequence
  Description of Artificial Sequence: Synthetic oligonucleotide
uauaacagacucuccauca

SEQ ID NO: 3261752 - RNA, 19 nt, Artificial Sequence
  Description of Artificial Sequence: Synthetic oligonucleotide
auuuccaccauugacagug

SEQ ID NO: 3261753 - RNA, 19 nt, Artificial Sequence
  Description of Artificial Sequence: Synthetic oligonucleotide
aaucuauucccacuguagu

SEQ ID NO: 3261754 - RNA, 19 nt, Artificial Sequence
  Description of Artificial Sequence: Synthetic oligonucleotide
cuuauguuacauugaaagc

SEQ ID NO: 3261755 - RNA, 19 nt, Artificial Sequence
  Description of Artificial Sequence: Synthetic oligonucleotide
uuaaagagauagauaauau

SEQ ID NO: 3261756 - RNA, 19 nt, Artificial Sequence
  Description of Artificial Sequence: Synthetic oligonucleotide
uuagacauaaaauuuuauu

SEQ ID NO: 3261757 - RNA, 19 nt, Artificial Sequence
  Description of Artificial Sequence: Synthetic oligonucleotide
cagaaaaucuacuuuuagc

SEQ ID NO: 3261758 - RNA, 19 nt, Artificial Sequence
  Description of Artificial Sequence: Synthetic oligonucleotide
uuugggagcacaauaagua

SEQ ID NO: 3261759 - RNA, 19 nt, Artificial Sequence
  Description of Artificial Sequence: Synthetic oligonucleotide
uaugaaaggggucaauuuc

SEQ ID NO: 3261760 - RNA, 19 nt, Artificial Sequence
  Description of Artificial Sequence: Synthetic oligonucleotide
cuuuuagcacauaaaguag

SEQ ID NO: 3261761 - RNA, 19 nt, Artificial Sequence
  Description of Artificial Sequence: Synthetic oligonucleotide
auuacuauguuagcccugc

SEQ ID NO: 3261762 - RNA, 19 nt, Artificial Sequence
  Description of Artificial Sequence: Synthetic oligonucleotide
uauuucaggacauaguauu

SEQ ID NO: 3261763 - RNA, 19 nt, Artificial Sequence
  Description of Artificial Sequence: Synthetic oligonucleotide
acaguaagcguuugcuugc

SEQ ID NO: 3261764 - RNA, 19 nt, Artificial Sequence
  Description of Artificial Sequence: Synthetic oligonucleotide
ucuguaugagaaaagccac

SEQ ID NO: 3261765 - RNA, 19 nt, Artificial Sequence
  Description of Artificial Sequence: Synthetic oligonucleotide
aguuggcucauccaguuuc

SEQ ID NO: 3261766 - RNA, 19 nt, Artificial Sequence
  Description of Artificial Sequence: Synthetic oligonucleotide
auugcucaugaacuacucc

SEQ ID NO: 3261767 - RNA, 19 nt, Artificial Sequence
  Description of Artificial Sequence: Synthetic oligonucleotide
uaauuggucuccuugaaau

SEQ ID NO: 3261768 - RNA, 19 nt, Artificial Sequence
  Description of Artificial Sequence: Synthetic oligonucleotide
uacuauaaagcacuucagu

SEQ ID NO: 3261769 - RNA, 19 nt, Artificial Sequence
  Description of Artificial Sequence: Synthetic oligonucleotide
uuaaccaacuuauaauauc

SEQ ID NO: 3261770 - RNA, 19 nt, Artificial Sequence
  Description of Artificial Sequence: Synthetic oligonucleotide
uuuagcacauaaaguagga

SEQ ID NO: 3261771 - RNA, 19 nt, Artificial Sequence
  Description of Artificial Sequence: Synthetic oligonucleotide
ucuauaaagaaauguuguc

SEQ ID NO: 3261772 - RNA, 19 nt, Artificial Sequence
  Description of Artificial Sequence: Synthetic oligonucleotide
guuuguuaagcucuguaug

SEQ ID NO: 3261773 - RNA, 19 nt, Artificial Sequence
  Description of Artificial Sequence: Synthetic oligonucleotide
uacauugaaucuaauuggu

SEQ ID NO: 3261774 - RNA, 19 nt, Artificial Sequence
  Description of Artificial Sequence: Synthetic oligonucleotide
auauuacuggaacagaaau

SEQ ID NO: 3261775 - RNA, 19 nt, Artificial Sequence
  Description of Artificial Sequence: Synthetic oligonucleotide
uaggauugaauuuauuguc

SEQ ID NO: 3261776 - RNA, 19 nt, Artificial Sequence
  Description of Artificial Sequence: Synthetic oligonucleotide
uucucaacaguacuacuca

SEQ ID NO: 3261777 - RNA, 19 nt, Artificial Sequence
  Description of Artificial Sequence: Synthetic oligonucleotide
aaccuguggcucucgaucg

SEQ ID NO: 3261778 - RNA, 19 nt, Artificial Sequence
  Description of Artificial Sequence: Synthetic oligonucleotide
uugcucaugaacuacucca

SEQ ID NO: 3261779 - RNA, 19 nt, Artificial Sequence
  Description of Artificial Sequence: Synthetic oligonucleotide
cuaacuugaaccccgugag

SEQ ID NO: 3261780 - RNA, 19 nt, Artificial Sequence
  Description of Artificial Sequence: Synthetic oligonucleotide
cuuucuauaacagacucuc

SEQ ID NO: 3261781 - RNA, 19 nt, Artificial Sequence
  Description of Artificial Sequence: Synthetic oligonucleotide
cauuuugucccgaugcugc

SEQ ID NO: 3261782 - RNA, 19 nt, Artificial Sequence
  Description of Artificial Sequence: Synthetic oligonucleotide
cuuuugugucuuuauuugg

SEQ ID NO: 3261783 - RNA, 19 nt, Artificial Sequence
  Description of Artificial Sequence: Synthetic oligonucleotide
ucaggacauaguauuuggg

SEQ ID NO: 3261784 - RNA, 19 nt, Artificial Sequence
  Description of Artificial Sequence: Synthetic oligonucleotide
uucaaaguaugguaugcca

SEQ ID NO: 3261785 - RNA, 19 nt, Artificial Sequence
  Description of Artificial Sequence: Synthetic oligonucleotide
uuaacacuauugacuauug

SEQ ID NO: 3261786 - RNA, 19 nt, Artificial Sequence
  Description of Artificial Sequence: Synthetic oligonucleotide
aggacauaguauuugggug

SEQ ID NO: 3261787 - RNA, 19 nt, Artificial Sequence
  Description of Artificial Sequence: Synthetic oligonucleotide
aggucaaacauuaacagga

SEQ ID NO: 3261788 - RNA, 19 nt, Artificial Sequence
  Description of Artificial Sequence: Synthetic oligonucleotide
uguuucaaaguaugguaug

SEQ ID NO: 3261789 - RNA, 19 nt, Artificial Sequence
  Description of Artificial Sequence: Synthetic oligonucleotide
aaccuuaaaugcuuucccu

SEQ ID NO: 3261790 - RNA, 19 nt, Artificial Sequence
  Description of Artificial Sequence: Synthetic oligonucleotide
caucuuaccaugacaagug

SEQ ID NO: 3261791 - RNA, 19 nt, Artificial Sequence
  Description of Artificial Sequence: Synthetic oligonucleotide
uguuguaaaccacacguuu

SEQ ID NO: 3261792 - RNA, 19 nt, Artificial Sequence
  Description of Artificial Sequence: Synthetic oligonucleotide
agcacuucaguguugucag

SEQ ID NO: 3261793 - RNA, 19 nt, Artificial Sequence
  Description of Artificial Sequence: Synthetic oligonucleotide
auagaguuugacaugagga

SEQ ID NO: 3261794 - RNA, 19 nt, Artificial Sequence
  Description of Artificial Sequence: Synthetic oligonucleotide
aauacuauaucuggguuuu

SEQ ID NO: 3261795 - RNA, 19 nt, Artificial Sequence
  Description of Artificial Sequence: Synthetic oligonucleotide
uggaaccuaacuugaaccc

SEQ ID NO: 3261796 - RNA, 19 nt, Artificial Sequence
  Description of Artificial Sequence: Synthetic oligonucleotide
guuacauugaaagcauuag

SEQ ID NO: 3261797 - RNA, 19 nt, Artificial Sequence
  Description of Artificial Sequence: Synthetic oligonucleotide
ucaaucaaaugcagugacc

SEQ ID NO: 3261798 - RNA, 19 nt, Artificial Sequence
  Description of Artificial Sequence: Synthetic oligonucleotide
uuaauacuauaucuggguu

SEQ ID NO: 3261799 - RNA, 19 nt, Artificial Sequence
  Description of Artificial Sequence: Synthetic oligonucleotide
agaaagacaugccauugcu

SEQ ID NO: 3261800 - RNA, 19 nt, Artificial Sequence
  Description of Artificial Sequence: Synthetic oligonucleotide
acauggaacaaaaugauaa

SEQ ID NO: 3261801 - RNA, 19 nt, Artificial Sequence
  Description of Artificial Sequence: Synthetic oligonucleotide
uaaagagauagauaauauu

SEQ ID NO: 3261802 - RNA, 19 nt, Artificial Sequence
  Description of Artificial Sequence: Synthetic oligonucleotide
aacuuauaauauccuacau

SEQ ID NO: 3261803 - RNA, 19 nt, Artificial Sequence
  Description of Artificial Sequence: Synthetic oligonucleotide
acuguagugaugaauuuag

SEQ ID NO: 3261804 - RNA, 19 nt, Artificial Sequence
  Description of Artificial Sequence: Synthetic oligonucleotide
ucuauucccacuguaguga

SEQ ID NO: 3261805 - RNA, 19 nt, Artificial Sequence
  Description of Artificial Sequence: Synthetic oligonucleotide
aaguucuuugcguagcacc

SEQ ID NO: 3261806 - RNA, 19 nt, Artificial Sequence
  Description of Artificial Sequence: Synthetic oligonucleotide
uauuucugggcaaauuucg

SEQ ID NO: 3261807 - RNA, 19 nt, Artificial Sequence
  Description of Artificial Sequence: Synthetic oligonucleotide
cugagcaugaacaagggcc

SEQ ID NO: 3261808 - RNA, 19 nt, Artificial Sequence
  Description of Artificial Sequence: Synthetic oligonucleotide
ucaugaauugccacugucg

SEQ ID NO: 3261809 - RNA, 19 nt, Artificial Sequence
  Description of Artificial Sequence: Synthetic oligonucleotide
auagacagaauccccacac

SEQ ID NO: 3261810 - RNA, 19 nt, Artificial Sequence
  Description of Artificial Sequence: Synthetic oligonucleotide
uggguuuacaccaucacug

SEQ ID NO: 3261811 - RNA, 19 nt, Artificial Sequence
  Description of Artificial Sequence: Synthetic oligonucleotide
uugaccauagccaaauccc

SEQ ID NO: 3261812 - RNA, 19 nt, Artificial Sequence
  Description of Artificial Sequence: Synthetic oligonucleotide
auagccaaaucccuugggc

SEQ ID NO: 3261813 - RNA, 19 nt, Artificial Sequence
  Description of Artificial Sequence: Synthetic oligonucleotide
uuuacaccaucacugagca

SEQ ID NO: 3261814 - RNA, 19 nt, Artificial Sequence
  Description of Artificial Sequence: Synthetic oligonucleotide
ucugguuugaugcccagcc

SEQ ID NO: 3261815 - RNA, 19 nt, Artificial Sequence
  Description of Artificial Sequence: Synthetic oligonucleotide
ugaauugccacugucgugc

SEQ ID NO: 3261816 - RNA, 19 nt, Artificial Sequence
  Description of Artificial Sequence: Synthetic oligonucleotide
aaaccaugcacagaaagca

SEQ ID NO: 3261817 - RNA, 19 nt, Artificial Sequence
  Description of Artificial Sequence: Synthetic oligonucleotide
ucauucuggguuuacacca

SEQ ID NO: 3261818 - RNA, 19 nt, Artificial Sequence
  Description of Artificial Sequence: Synthetic oligonucleotide
cucgucaucaugaauugcc

SEQ ID NO: 3261819 - RNA, 19 nt, Artificial Sequence
  Description of Artificial Sequence: Synthetic oligonucleotide
cuugaccauagccaaaucc

SEQ ID NO: 3261820 - RNA, 19 nt, Artificial Sequence
  Description of Artificial Sequence: Synthetic oligonucleotide
guagugacgauucugugug

SEQ ID NO: 3261821 - RNA, 19 nt, Artificial Sequence
  Description of Artificial Sequence: Synthetic oligonucleotide
acagaauccccacaccugg

SEQ ID NO: 3261822 - RNA, 19 nt, Artificial Sequence
  Description of Artificial Sequence: Synthetic oligonucleotide
uguuguaggccugugaggc

SEQ ID NO: 3261823 - RNA, 19 nt, Artificial Sequence
  Description of Artificial Sequence: Synthetic oligonucleotide
caaauuucgaaguguucgg

SEQ ID NO: 3261824 - RNA, 19 nt, Artificial Sequence
  Description of Artificial Sequence: Synthetic oligonucleotide
uacuucuuuccguagcagg

SEQ ID NO: 3261825 - RNA, 19 nt, Artificial Sequence
  Description of Artificial Sequence: Synthetic oligonucleotide
caaaccaugcacagaaagc

SEQ ID NO: 3261826 - RNA, 19 nt, Artificial Sequence
  Description of Artificial Sequence: Synthetic oligonucleotide
uucugggcaaauuucgaag

SEQ ID NO: 3261827 - RNA, 19 nt, Artificial Sequence
  Description of Artificial Sequence: Synthetic oligonucleotide
uguagauucaagacucuuc

SEQ ID NO: 3261828 - RNA, 19 nt, Artificial Sequence
  Description of Artificial Sequence: Synthetic oligonucleotide
uuuccaccgccccagacag

SEQ ID NO: 3261829 - RNA, 19 nt, Artificial Sequence
  Description of Artificial Sequence: Synthetic oligonucleotide
uucauucuggguuuacacc

SEQ ID NO: 3261830 - RNA, 19 nt, Artificial Sequence
  Description of Artificial Sequence: Synthetic oligonucleotide
uucucagucagaguuguag

SEQ ID NO: 3261831 - RNA, 19 nt, Artificial Sequence
  Description of Artificial Sequence: Synthetic oligonucleotide
aguucuuugcguagcaccc

SEQ ID NO: 3261832 - RNA, 19 nt, Artificial Sequence
  Description of Artificial Sequence: Synthetic oligonucleotide
agacucuucccacacuugg

SEQ ID NO: 3261833 - RNA, 19 nt, Artificial Sequence
  Description of Artificial Sequence: Synthetic oligonucleotide
acugagcaugaacaagggc

SEQ ID NO: 3261834 - RNA, 19 nt, Artificial Sequence
  Description of Artificial Sequence: Synthetic oligonucleotide
gauuucaccuucuuucuca

SEQ ID NO: 3261835 - RNA, 19 nt, Artificial Sequence
  Description of Artificial Sequence: Synthetic oligonucleotide
accaucacugagcaugaac

SEQ ID NO: 3261836 - RNA, 19 nt, Artificial Sequence
  Description of Artificial Sequence: Synthetic oligonucleotide
aucaugaauugccacuguc

SEQ ID NO: 3261837 - RNA, 19 nt, Artificial Sequence
  Description of Artificial Sequence: Synthetic oligonucleotide
aauuucgaaguguucggau

SEQ ID NO: 3261838 - RNA, 19 nt, Artificial Sequence
  Description of Artificial Sequence: Synthetic oligonucleotide
ucggauuuguuguaggccu

SEQ ID NO: 3261839 - RNA, 19 nt, Artificial Sequence
  Description of Artificial Sequence: Synthetic oligonucleotide
uguugagcgugccagcacc

SEQ ID NO: 3261840 - RNA, 19 nt, Artificial Sequence
  Description of Artificial Sequence: Synthetic oligonucleotide
aaucccuugggcccaaagu

SEQ ID NO: 3261841 - RNA, 19 nt, Artificial Sequence
  Description of Artificial Sequence: Synthetic oligonucleotide
gauucaagacucuucccac

SEQ ID NO: 3261842 - RNA, 19 nt, Artificial Sequence
  Description of Artificial Sequence: Synthetic oligonucleotide
uguucggauuuguuguagg

SEQ ID NO: 3261843 - RNA, 19 nt, Artificial Sequence
  Description of Artificial Sequence: Synthetic oligonucleotide
cuucauucuggguuuacac

SEQ ID NO: 3261844 - RNA, 19 nt, Artificial Sequence
  Description of Artificial Sequence: Synthetic oligonucleotide
aaaguucuuugcguagcac

SEQ ID NO: 3261845 - RNA, 19 nt, Artificial Sequence
  Description of Artificial Sequence: Synthetic oligonucleotide
uugcguagcacccuuuaca

SEQ ID NO: 3261846 - RNA, 19 nt, Artificial Sequence
  Description of Artificial Sequence: Synthetic oligonucleotide
uuuuccugcaaaccaugca

SEQ ID NO: 3261847 - RNA, 19 nt, Artificial Sequence
  Description of Artificial Sequence: Synthetic oligonucleotide
auauuucugggcaaauuuc

SEQ ID NO: 3261848 - RNA, 19 nt, Artificial Sequence
  Description of Artificial Sequence: Synthetic oligonucleotide
ucaucaugaauugccacug

SEQ ID NO: 3261849 - RNA, 19 nt, Artificial Sequence
  Description of Artificial Sequence: Synthetic oligonucleotide
auucugugugcguugcuuc

SEQ ID NO: 3261850 - RNA, 19 nt, Artificial Sequence
  Description of Artificial Sequence: Synthetic oligonucleotide
ucugggcaaauuucgaagu

SEQ ID NO: 3261851 - RNA, 19 nt, Artificial Sequence
  Description of Artificial Sequence: Synthetic oligonucleotide
agacagaauccccacaccu

SEQ ID NO: 3261852 - RNA, 19 nt, Artificial Sequence
  Description of Artificial Sequence: Synthetic oligonucleotide
uuuccagcuccgauuaucu

SEQ ID NO: 3261853 - RNA, 19 nt, Artificial Sequence
  Description of Artificial Sequence: Synthetic oligonucleotide
uucaagacucuucccacac

SEQ ID NO: 3261854 - RNA, 19 nt, Artificial Sequence
  Description of Artificial Sequence: Synthetic oligonucleotide
guuuacaccaucacugagc

SEQ ID NO: 3261855 - RNA, 19 nt, Artificial Sequence
  Description of Artificial Sequence: Synthetic oligonucleotide
agcuccgauuaucuucucc

SEQ ID NO: 3261856 - RNA, 19 nt, Artificial Sequence
  Description of Artificial Sequence: Synthetic oligonucleotide
ugcguugcuucauucuggg

SEQ ID NO: 3261857 - RNA, 19 nt, Artificial Sequence
  Description of Artificial Sequence: Synthetic oligonucleotide
uccguagcaggauuugcag

SEQ ID NO: 3261858 - RNA, 19 nt, Artificial Sequence
  Description of Artificial Sequence: Synthetic oligonucleotide
aggccccgcacuuauuucc

SEQ ID NO: 3261859 - RNA, 19 nt, Artificial Sequence
  Description of Artificial Sequence: Synthetic oligonucleotide
accaugcacagaaagcagc

SEQ ID NO: 3261860 - RNA, 19 nt, Artificial Sequence
  Description of Artificial Sequence: Synthetic oligonucleotide
cagacaggcauuccgagug

SEQ ID NO: 3261861 - RNA, 19 nt, Artificial Sequence
  Description of Artificial Sequence: Synthetic oligonucleotide
agcgguggaagcuccgccc

SEQ ID NO: 3261862 - RNA, 19 nt, Artificial Sequence
  Description of Artificial Sequence: Synthetic oligonucleotide
ucucagucagaguuguaga

SEQ ID NO: 3261863 - RNA, 19 nt, Artificial Sequence
  Description of Artificial Sequence: Synthetic oligonucleotide
gaacaagggccccugcucc

SEQ ID NO: 3261864 - RNA, 19 nt, Artificial Sequence
  Description of Artificial Sequence: Synthetic oligonucleotide
cuuauuuccaccgccccag

SEQ ID NO: 3261865 - RNA, 19 nt, Artificial Sequence
  Description of Artificial Sequence: Synthetic oligonucleotide
uaaccauagccuuuugguc

SEQ ID NO: 3261866 - RNA, 19 nt, Artificial Sequence
  Description of Artificial Sequence: Synthetic oligonucleotide
accauagccaaaucccuug

SEQ ID NO: 3261867 - RNA, 19 nt, Artificial Sequence
  Description of Artificial Sequence: Synthetic oligonucleotide
agauuucaccuucuuucuc

SEQ ID NO: 3261868 - RNA, 19 nt, Artificial Sequence
  Description of Artificial Sequence: Synthetic oligonucleotide
aaaucccuugggcccaaag

SEQ ID NO: 3261869 - RNA, 19 nt, Artificial Sequence
  Description of Artificial Sequence: Synthetic oligonucleotide
uucggauuuguuguaggcc

SEQ ID NO: 3261870 - RNA, 19 nt, Artificial Sequence
  Description of Artificial Sequence: Synthetic oligonucleotide
uuaucuucuccgcagcaua

SEQ ID NO: 3261871 - RNA, 19 nt, Artificial Sequence
  Description of Artificial Sequence: Synthetic oligonucleotide
uccagcuccgauuaucuuc

SEQ ID NO: 3261872 - RNA, 19 nt, Artificial Sequence
  Description of Artificial Sequence: Synthetic oligonucleotide
aaauuucgaaguguucgga

SEQ ID NO: 3261873 - RNA, 19 nt, Artificial Sequence
  Description of Artificial Sequence: Synthetic oligonucleotide
ucuucuccgcagcauagac

SEQ ID NO: 3261874 - RNA, 19 nt, Artificial Sequence
  Description of Artificial Sequence: Synthetic oligonucleotide
auuucaccuucuuucucag

SEQ ID NO: 3261875 - RNA, 19 nt, Artificial Sequence
  Description of Artificial Sequence: Synthetic oligonucleotide
uccgauuaucuucuccgca

SEQ ID NO: 3261876 - RNA, 19 nt, Artificial Sequence
  Description of Artificial Sequence: Synthetic oligonucleotide
ugucgugcugucuaaaauu

SEQ ID NO: 3261877 - RNA, 19 nt, Artificial Sequence
  Description of Artificial Sequence: Synthetic oligonucleotide
uuacaauagauuucaccuu

SEQ ID NO: 3261878 - RNA, 19 nt, Artificial Sequence
  Description of Artificial Sequence: Synthetic oligonucleotide
agugacgauucugugugcg

SEQ ID NO: 3261879 - RNA, 19 nt, Artificial Sequence
  Description of Artificial Sequence: Synthetic oligonucleotide
uuucugggcaaauuucgaa

SEQ ID NO: 3261880 - RNA, 19 nt, Artificial Sequence
  Description of Artificial Sequence: Synthetic oligonucleotide
ucgucaucaugaauugcca

SEQ ID NO: 3261881 - RNA, 19 nt, Artificial Sequence
  Description of Artificial Sequence: Synthetic oligonucleotide
aucucgucaucaugaauug

SEQ ID NO: 3261882 - RNA, 19 nt, Artificial Sequence
  Description of Artificial Sequence: Synthetic oligonucleotide
uuugaugcccagccucuca

SEQ ID NO: 3261883 - RNA, 19 nt, Artificial Sequence
  Description of Artificial Sequence: Synthetic oligonucleotide
gaggcugagcacucucugg

SEQ ID NO: 3261884 - RNA, 19 nt, Artificial Sequence
  Description of Artificial Sequence: Synthetic oligonucleotide
ugaggcugagcacucucug

SEQ ID NO: 3261885 - RNA, 19 nt, Artificial Sequence
  Description of Artificial Sequence: Synthetic oligonucleotide
ggauuugcaguagaucucg

SEQ ID NO: 3261886 - RNA, 19 nt, Artificial Sequence
  Description of Artificial Sequence: Synthetic oligonucleotide
acucucugguuugaugccc

SEQ ID NO: 3261887 - RNA, 19 nt, Artificial Sequence
  Description of Artificial Sequence: Synthetic oligonucleotide
uccggggacagaagaaagc

SEQ ID NO: 3261888 - RNA, 19 nt, Artificial Sequence
  Description of Artificial Sequence: Synthetic oligonucleotide
cauuccgagugggagacgg

SEQ ID NO: 3261889 - RNA, 19 nt, Artificial Sequence
  Description of Artificial Sequence: Synthetic oligonucleotide
auuuguuguaggccuguga

SEQ ID NO: 3261890 - RNA, 19 nt, Artificial Sequence
  Description of Artificial Sequence: Synthetic oligonucleotide
accacgguccauguugagc

SEQ ID NO: 3261891 - RNA, 19 nt, Artificial Sequence
  Description of Artificial Sequence: Synthetic oligonucleotide
caggauuugcaguagaucu

SEQ ID NO: 3261892 - RNA, 19 nt, Artificial Sequence
  Description of Artificial Sequence: Synthetic oligonucleotide
uuugguccauacuucuuuc

SEQ ID NO: 3261893 - RNA, 19 nt, Artificial Sequence
  Description of Artificial Sequence: Synthetic oligonucleotide
auuucgaaguguucggauu

SEQ ID NO: 3261894 - RNA, 19 nt, Artificial Sequence
  Description of Artificial Sequence: Synthetic oligonucleotide
cagaaagcagcagcggugg

SEQ ID NO: 3261895 - RNA, 19 nt, Artificial Sequence
  Description of Artificial Sequence: Synthetic oligonucleotide
uccucggcgugguacacag

SEQ ID NO: 3261896 - RNA, 19 nt, Artificial Sequence
  Description of Artificial Sequence: Synthetic oligonucleotide
ucaccuucuuucucaguca

SEQ ID NO: 3261897 - RNA, 19 nt, Artificial Sequence
  Description of Artificial Sequence: Synthetic oligonucleotide
acuuauuuccaccgcccca

SEQ ID NO: 3261898 - RNA, 19 nt, Artificial Sequence
  Description of Artificial Sequence: Synthetic oligonucleotide
cgugccagcacccugaccg

SEQ ID NO: 3261899 - RNA, 19 nt, Artificial Sequence
  Description of Artificial Sequence: Synthetic oligonucleotide
gauuaucuucuccgcagca

SEQ ID NO: 3261900 - RNA, 19 nt, Artificial Sequence
  Description of Artificial Sequence: Synthetic oligonucleotide
auugccacugucgugcugu

SEQ ID NO: 3261901 - RNA, 19 nt, Artificial Sequence
  Description of Artificial Sequence: Synthetic oligonucleotide
ccacgguccauguugagcg

SEQ ID NO: 3261902 - RNA, 19 nt, Artificial Sequence
  Description of Artificial Sequence: Synthetic oligonucleotide
gacgauucugugugcguug

SEQ ID NO: 3261903 - RNA, 19 nt, Artificial Sequence
  Description of Artificial Sequence: Synthetic oligonucleotide
cagcauagacagaaucccc

SEQ ID NO: 3261904 - RNA, 19 nt, Artificial Sequence
  Description of Artificial Sequence: Synthetic oligonucleotide
gacgggcggagcuagcgag

SEQ ID NO: 3261905 - RNA, 19 nt, Artificial Sequence
  Description of Artificial Sequence: Synthetic oligonucleotide
aaaauggagaaacaguagc

SEQ ID NO: 3261906 - RNA, 19 nt, Artificial Sequence
  Description of Artificial Sequence: Synthetic oligonucleotide
uuuauuauagcacagagaa

SEQ ID NO: 3261907 - RNA, 19 nt, Artificial Sequence
  Description of Artificial Sequence: Synthetic oligonucleotide
auaaacuauacuuaauagc

SEQ ID NO: 3261908 - RNA, 19 nt, Artificial Sequence
  Description of Artificial Sequence: Synthetic oligonucleotide
uauauguugguccucaagg

SEQ ID NO: 3261909 - RNA, 19 nt, Artificial Sequence
  Description of Artificial Sequence: Synthetic oligonucleotide
auagcauauauguuggucc

SEQ ID NO: 3261910 - RNA, 19 nt, Artificial Sequence
  Description of Artificial Sequence: Synthetic oligonucleotide
aacucaaauucucacuucc

SEQ ID NO: 3261911 - RNA, 19 nt, Artificial Sequence
  Description of Artificial Sequence: Synthetic oligonucleotide
uuuuguauaguuuugggca

SEQ ID NO: 3261912 - RNA, 19 nt, Artificial Sequence
  Description of Artificial Sequence: Synthetic oligonucleotide
uguaguauacucaauuuag

SEQ ID NO: 3261913 - RNA, 19 nt, Artificial Sequence
  Description of Artificial Sequence: Synthetic oligonucleotide
uaagagguaaccaagagaa

SEQ ID NO: 3261914 - RNA, 19 nt, Artificial Sequence
  Description of Artificial Sequence: Synthetic oligonucleotide
auuuuguauaguuuugggc

SEQ ID NO: 3261915 - RNA, 19 nt, Artificial Sequence
  Description of Artificial Sequence: Synthetic oligonucleotide
uccacagucauuaagaagu

SEQ ID NO: 3261916 - RNA, 19 nt, Artificial Sequence
  Description of Artificial Sequence: Synthetic oligonucleotide
aguggaaucacuaaaggcc

SEQ ID NO: 3261917 - RNA, 19 nt, Artificial Sequence
  Description of Artificial Sequence: Synthetic oligonucleotide
aacaaacucaaauucucac

SEQ ID NO: 3261918 - RNA, 19 nt, Artificial Sequence
  Description of Artificial Sequence: Synthetic oligonucleotide
acucucaaagaucagaaac

SEQ ID NO: 3261919 - RNA, 19 nt, Artificial Sequence
  Description of Artificial Sequence: Synthetic oligonucleotide
acugagaagacuuacuggg

SEQ ID NO: 3261920 - RNA, 19 nt, Artificial Sequence
  Description of Artificial Sequence: Synthetic oligonucleotide
aagauacuggccuaugugg

SEQ ID NO: 3261921 - RNA, 19 nt, Artificial Sequence
  Description of Artificial Sequence: Synthetic oligonucleotide
aaauaaucucauaauuucc

SEQ ID NO: 3261922 - RNA, 19 nt, Artificial Sequence
  Description of Artificial Sequence: Synthetic oligonucleotide
uuuuauaauaaacuauacu

SEQ ID NO: 3261923 - RNA, 19 nt, Artificial Sequence
  Description of Artificial Sequence: Synthetic oligonucleotide
uucuccuuaaguaugaaga

SEQ ID NO: 3261924 - RNA, 19 nt, Artificial Sequence
  Description of Artificial Sequence: Synthetic oligonucleotide
uugaaaggcaacaaagucc

SEQ ID NO: 3261925 - RNA, 19 nt, Artificial Sequence
  Description of Artificial Sequence: Synthetic oligonucleotide
uccuuaaguaugaagacag

SEQ ID NO: 3261926 - RNA, 19 nt, Artificial Sequence
  Description of Artificial Sequence: Synthetic oligonucleotide
uaguauacucaauuuaggg

SEQ ID NO: 3261927 - RNA, 19 nt, Artificial Sequence
  Description of Artificial Sequence: Synthetic oligonucleotide
aauuguaaauauaggcugc

SEQ ID NO: 3261928 - RNA, 19 nt, Artificial Sequence
  Description of Artificial Sequence: Synthetic oligonucleotide
acuaaaggccacuuaaugg

SEQ ID NO: 3261929 - RNA, 19 nt, Artificial Sequence
  Description of Artificial Sequence: Synthetic oligonucleotide
aauaagagguaaccaagag

SEQ ID NO: 3261930 - RNA, 19 nt, Artificial Sequence
  Description of Artificial Sequence: Synthetic oligonucleotide
aagauaucagucucaauug

SEQ ID NO: 3261931 - RNA, 19 nt, Artificial Sequence
  Description of Artificial Sequence: Synthetic oligonucleotide
uaaacaauguaguauacuc

SEQ ID NO: 3261932 - RNA, 19 nt, Artificial Sequence
  Description of Artificial Sequence: Synthetic oligonucleotide
uauuaggcaagcaaguuga

SEQ ID NO: 3261933 - RNA, 19 nt, Artificial Sequence
  Description of Artificial Sequence: Synthetic oligonucleotide
uaggcaagcaaguugaaag

SEQ ID NO: 3261934 - RNA, 19 nt, Artificial Sequence
  Description of Artificial Sequence: Synthetic oligonucleotide
acagaaauaagagguaacc

SEQ ID NO: 3261935 - RNA, 19 nt, Artificial Sequence
  Description of Artificial Sequence: Synthetic oligonucleotide
uauuaaacaauguaguaua

SEQ ID NO: 3261936 - RNA, 19 nt, Artificial Sequence
  Description of Artificial Sequence: Synthetic oligonucleotide
ucaaagaucagaaacccaa

SEQ ID NO: 3261937 - RNA, 19 nt, Artificial Sequence
  Description of Artificial Sequence: Synthetic oligonucleotide
gugaaaucccauuagaagc

SEQ ID NO: 3261938 - RNA, 19 nt, Artificial Sequence
  Description of Artificial Sequence: Synthetic oligonucleotide
ucauuaagaaguuaacaga

SEQ ID NO: 3261939 - RNA, 19 nt, Artificial Sequence
  Description of Artificial Sequence: Synthetic oligonucleotide
aaggcaagauaucagucuc

SEQ ID NO: 3261940 - RNA, 19 nt, Artificial Sequence
  Description of Artificial Sequence: Synthetic oligonucleotide
uuaagaaguuaacagaaau

SEQ ID NO: 3261941 - RNA, 19 nt, Artificial Sequence
  Description of Artificial Sequence: Synthetic oligonucleotide
aaguuaacagaaauaagag

SEQ ID NO: 3261942 - RNA, 19 nt, Artificial Sequence
  Description of Artificial Sequence: Synthetic oligonucleotide
ucucaucucaagcaagugg

SEQ ID NO: 3261943 - RNA, 19 nt, Artificial Sequence
  Description of Artificial Sequence: Synthetic oligonucleotide
uagaacuuuuauaauaaac

SEQ ID NO: 3261944 - RNA, 19 nt, Artificial Sequence
  Description of Artificial Sequence: Synthetic oligonucleotide
aaacccaaauaacuuauca

SEQ ID NO: 3261945 - RNA, 19 nt, Artificial Sequence
  Description of Artificial Sequence: Synthetic oligonucleotide
aacaauguaguauacucaa

SEQ ID NO: 3261946 - RNA, 19 nt, Artificial Sequence
  Description of Artificial Sequence: Synthetic oligonucleotide
caauuguaaauauaggcug

SEQ ID NO: 3261947 - RNA, 19 nt, Artificial Sequence
  Description of Artificial Sequence: Synthetic oligonucleotide
uaacucauaaugauguaca

SEQ ID NO: 3261948 - RNA, 19 nt, Artificial Sequence
  Description of Artificial Sequence: Synthetic oligonucleotide
uuauuaggcaagcaaguug

SEQ ID NO: 3261949 - RNA, 19 nt, Artificial Sequence
  Description of Artificial Sequence: Synthetic oligonucleotide
uguaaauauaggcugcgcu

SEQ ID NO: 3261950 - RNA, 19 nt, Artificial Sequence
  Description of Artificial Sequence: Synthetic oligonucleotide
aaaucguaacaccccauag

SEQ ID NO: 3261951 - RNA, 19 nt, Artificial Sequence
  Description of Artificial Sequence: Synthetic oligonucleotide
ugugaugccacaaauuuau

SEQ ID NO: 3261952 - RNA, 19 nt, Artificial Sequence
  Description of Artificial Sequence: Synthetic oligonucleotide
uguaaagaugucaaaugcu

SEQ ID NO: 3261953 - RNA, 19 nt, Artificial Sequence
  Description of Artificial Sequence: Synthetic oligonucleotide
agaacuuuuauaauaaacu

SEQ ID NO: 3261954 - RNA, 19 nt, Artificial Sequence
  Description of Artificial Sequence: Synthetic oligonucleotide
uccucaaggacucauagaa

SEQ ID NO: 3261955 - RNA, 19 nt, Artificial Sequence
  Description of Artificial Sequence: Synthetic oligonucleotide
aaguugaaaggcaacaaag

SEQ ID NO: 3261956 - RNA, 19 nt, Artificial Sequence
  Description of Artificial Sequence: Synthetic oligonucleotide
aguauacucaauuuagggu

SEQ ID NO: 3261957 - RNA, 19 nt, Artificial Sequence
  Description of Artificial Sequence: Synthetic oligonucleotide
auaacucauaaugauguac

SEQ ID NO: 3261958 - RNA, 19 nt, Artificial Sequence
  Description of Artificial Sequence: Synthetic oligonucleotide
aguaugucuugauuguacg

SEQ ID NO: 3261959 - RNA, 19 nt, Artificial Sequence
  Description of Artificial Sequence: Synthetic oligonucleotide
cuguaaagaugucaaaugc

SEQ ID NO: 3261960 - RNA, 19 nt, Artificial Sequence
  Description of Artificial Sequence: Synthetic oligonucleotide
aucucaagcaaguggaauc

SEQ ID NO: 3261961 - RNA, 19 nt, Artificial Sequence
  Description of Artificial Sequence: Synthetic oligonucleotide
aauguaguauacucaauuu

SEQ ID NO: 3261962 - RNA, 19 nt, Artificial Sequence
  Description of Artificial Sequence: Synthetic oligonucleotide
ucugcuucucaucucaagc

SEQ ID NO: 3261963 - RNA, 19 nt, Artificial Sequence
  Description of Artificial Sequence: Synthetic oligonucleotide
cauaaauacuucugguagg

SEQ ID NO: 3261964 - RNA, 19 nt, Artificial Sequence
  Description of Artificial Sequence: Synthetic oligonucleotide
aaacucaaauucucacuuc

SEQ ID NO: 3261965 - RNA, 19 nt, Artificial Sequence
  Description of Artificial Sequence: Synthetic oligonucleotide
uccauaacucauaaugaug

SEQ ID NO: 3261966 - RNA, 19 nt, Artificial Sequence
  Description of Artificial Sequence: Synthetic oligonucleotide
ugaaaucccauuagaagcu

SEQ ID NO: 3261967 - RNA, 19 nt, Artificial Sequence
  Description of Artificial Sequence: Synthetic oligonucleotide
uauucucugcuucucaucu

SEQ ID NO: 3261968 - RNA, 19 nt, Artificial Sequence
  Description of Artificial Sequence: Synthetic oligonucleotide
aaucucauaauuucccaaa

SEQ ID NO: 3261969 - RNA, 19 nt, Artificial Sequence
  Description of Artificial Sequence: Synthetic oligonucleotide
aguccugaaaaguagguga

SEQ ID NO: 3261970 - RNA, 19 nt, Artificial Sequence
  Description of Artificial Sequence: Synthetic oligonucleotide
uaugucuugauuguacgag

SEQ ID NO: 3261971 - RNA, 19 nt, Artificial Sequence
  Description of Artificial Sequence: Synthetic oligonucleotide
gcauccauaacucauaaug

SEQ ID NO: 3261972 - RNA, 19 nt, Artificial Sequence
  Description of Artificial Sequence: Synthetic oligonucleotide
gaaaacuggguacugauaa

SEQ ID NO: 3261973 - RNA, 19 nt, Artificial Sequence
  Description of Artificial Sequence: Synthetic oligonucleotide
aaguaugucuugauuguac

SEQ ID NO: 3261974 - RNA, 19 nt, Artificial Sequence
  Description of Artificial Sequence: Synthetic oligonucleotide
aauacaagcucuugguuuu

SEQ ID NO: 3261975 - RNA, 19 nt, Artificial Sequence
  Description of Artificial Sequence: Synthetic oligonucleotide
ucuugauuguacgaggaag

SEQ ID NO: 3261976 - RNA, 19 nt, Artificial Sequence
  Description of Artificial Sequence: Synthetic oligonucleotide
uccaccauaaauacuucug

SEQ ID NO: 3261977 - RNA, 19 nt, Artificial Sequence
  Description of Artificial Sequence: Synthetic oligonucleotide
aaauuuauuauagcacaga

SEQ ID NO: 3261978 - RNA, 19 nt, Artificial Sequence
  Description of Artificial Sequence: Synthetic oligonucleotide
gaagauacuggccuaugug

SEQ ID NO: 3261979 - RNA, 19 nt, Artificial Sequence
  Description of Artificial Sequence: Synthetic oligonucleotide
uuuaggguucuccuuaagu

SEQ ID NO: 3261980 - RNA, 19 nt, Artificial Sequence
  Description of Artificial Sequence: Synthetic oligonucleotide
caaauuuauuauagcacag

SEQ ID NO: 3261981 - RNA, 19 nt, Artificial Sequence
  Description of Artificial Sequence: Synthetic oligonucleotide
uacgaggaaggcaagauau

SEQ ID NO: 3261982 - RNA, 19 nt, Artificial Sequence
  Description of Artificial Sequence: Synthetic oligonucleotide
aaagaucagaaacccaaau

SEQ ID NO: 3261983 - RNA, 19 nt, Artificial Sequence
  Description of Artificial Sequence: Synthetic oligonucleotide
aucucauaauuucccaaac

SEQ ID NO: 3261984 - RNA, 19 nt, Artificial Sequence
  Description of Artificial Sequence: Synthetic oligonucleotide
aaucccauuagaagcuccc

SEQ ID NO: 3261985 - RNA, 19 nt, Artificial Sequence
  Description of Artificial Sequence: Synthetic oligonucleotide
auaauugcaguccuccaug

SEQ ID NO: 3261986 - RNA, 19 nt, Artificial Sequence
  Description of Artificial Sequence: Synthetic oligonucleotide
agagaaauaaucucauaau

SEQ ID NO: 3261987 - RNA, 19 nt, Artificial Sequence
  Description of Artificial Sequence: Synthetic oligonucleotide
auaagagguaaccaagaga

SEQ ID NO: 3261988 - RNA, 19 nt, Artificial Sequence
  Description of Artificial Sequence: Synthetic oligonucleotide
uggacaagcuguaaagaug

SEQ ID NO: 3261989 - RNA, 19 nt, Artificial Sequence
  Description of Artificial Sequence: Synthetic oligonucleotide
ucaaauucucacuuccaca

SEQ ID NO: 3261990 - RNA, 19 nt, Artificial Sequence
  Description of Artificial Sequence: Synthetic oligonucleotide
caaaguccugaaaaguagg

SEQ ID NO: 3261991 - RNA, 19 nt, Artificial Sequence
  Description of Artificial Sequence: Synthetic oligonucleotide
ucucaaagaucagaaaccc

SEQ ID NO: 3261992 - RNA, 19 nt, Artificial Sequence
  Description of Artificial Sequence: Synthetic oligonucleotide
acuucugguaggccggucc

SEQ ID NO: 3261993 - RNA, 19 nt, Artificial Sequence
  Description of Artificial Sequence: Synthetic oligonucleotide
aagaucagaaacccaaaua

SEQ ID NO: 3261994 - RNA, 19 nt, Artificial Sequence
  Description of Artificial Sequence: Synthetic oligonucleotide
ucagaaacccaaauaacuu

SEQ ID NO: 3261995 - RNA, 19 nt, Artificial Sequence
  Description of Artificial Sequence: Synthetic oligonucleotide
uuuguuuuacaauuuccau

SEQ ID NO: 3261996 - RNA, 19 nt, Artificial Sequence
  Description of Artificial Sequence: Synthetic oligonucleotide
aacccaaauaacuuaucau

SEQ ID NO: 3261997 - RNA, 19 nt, Artificial Sequence
  Description of Artificial Sequence: Synthetic oligonucleotide
cauuaagaaguuaacagaa

SEQ ID NO: 3261998 - RNA, 19 nt, Artificial Sequence
  Description of Artificial Sequence: Synthetic oligonucleotide
cuuuguuuuacaauuucca

SEQ ID NO: 3261999 - RNA, 19 nt, Artificial Sequence
  Description of Artificial Sequence: Synthetic oligonucleotide
gaaaaguaggugaaauccc

SEQ ID NO: 3262000 - RNA, 19 nt, Artificial Sequence
  Description of Artificial Sequence: Synthetic oligonucleotide
uauuauucucugcuucuca

SEQ ID NO: 3262001 - RNA, 19 nt, Artificial Sequence
  Description of Artificial Sequence: Synthetic oligonucleotide
aaaaguaggugaaauccca

SEQ ID NO: 3262002 - RNA, 19 nt, Artificial Sequence
  Description of Artificial Sequence: Synthetic oligonucleotide
acaaacucaaauucucacu

SEQ ID NO: 3262003 - RNA, 19 nt, Artificial Sequence
  Description of Artificial Sequence: Synthetic oligonucleotide
aaauggagaaacaguagca

SEQ ID NO: 3262004 - RNA, 19 nt, Artificial Sequence
  Description of Artificial Sequence: Synthetic oligonucleotide
aaaucccauuagaagcucc

SEQ ID NO: 3262005 - RNA, 19 nt, Artificial Sequence
  Description of Artificial Sequence: Synthetic oligonucleotide
aucauucucaucuucaucc

SEQ ID NO: 3262006 - RNA, 19 nt, Artificial Sequence
  Description of Artificial Sequence: Synthetic oligonucleotide
aaacucaucauucucaucu

SEQ ID NO: 3262007 - RNA, 19 nt, Artificial Sequence
  Description of Artificial Sequence: Synthetic oligonucleotide
augguuuaucaucugaucc

SEQ ID NO: 3262008 - RNA, 19 nt, Artificial Sequence
  Description of Artificial Sequence: Synthetic oligonucleotide
aaugguuuaucaucugauc

SEQ ID NO: 3262009 - RNA, 19 nt, Artificial Sequence
  Description of Artificial Sequence: Synthetic oligonucleotide
aaaaccaucgaaguccaac

SEQ ID NO: 3262010 - RNA, 19 nt, Artificial Sequence
  Description of Artificial Sequence: Synthetic oligonucleotide
uaucaucugauccuuggcg

SEQ ID NO: 3262011 - RNA, 19 nt, Artificial Sequence
  Description of Artificial Sequence: Synthetic oligonucleotide
uuuaucaucugauccuugg

SEQ ID NO: 3262012 - RNA, 19 nt, Artificial Sequence
  Description of Artificial Sequence: Synthetic oligonucleotide
uccacuguggggaagacag

SEQ ID NO: 3262013 - RNA, 19 nt, Artificial Sequence
  Description of Artificial Sequence: Synthetic oligonucleotide
uguuguuuuccacuguggg

SEQ ID NO: 3262014 - RNA, 19 nt, Artificial Sequence
  Description of Artificial Sequence: Synthetic oligonucleotide
aauccaguacaucucgccg

SEQ ID NO: 3262015 - RNA, 19 nt, Artificial Sequence
  Description of Artificial Sequence: Synthetic oligonucleotide
uagugaaggagccugcacg

SEQ ID NO: 3262016 - RNA, 19 nt, Artificial Sequence
  Description of Artificial Sequence: Synthetic oligonucleotide
uuccagaaaaccaucgaag

SEQ ID NO: 3262017 - RNA, 19 nt, Artificial Sequence
  Description of Artificial Sequence: Synthetic oligonucleotide
aucuucauccucaucaucc

SEQ ID NO: 3262018 - RNA, 19 nt, Artificial Sequence
  Description of Artificial Sequence: Synthetic oligonucleotide
ucgacaauccaguacaucu

SEQ ID NO: 3262019 - RNA, 19 nt, Artificial Sequence
  Description of Artificial Sequence: Synthetic oligonucleotide
gagguugagacacaggccc

SEQ ID NO: 3262020 - RNA, 19 nt, Artificial Sequence
  Description of Artificial Sequence: Synthetic oligonucleotide
gaaucgacaauccaguaca

SEQ ID NO: 3262021 - RNA, 19 nt, Artificial Sequence
  Description of Artificial Sequence: Synthetic oligonucleotide
  modified_base (16)..(16): a, c, u, g, unknown or other
ucuugucauccucugnucc

SEQ ID NO: 3262022 - RNA, 19 nt, Artificial Sequence
  Description of Artificial Sequence: Synthetic oligonucleotide
cagaaaaccaucgaagucc

SEQ ID NO: 3262023 - RNA, 19 nt, Artificial Sequence
  Description of Artificial Sequence: Synthetic oligonucleotide
gacaauccaguacaucucg

SEQ ID NO: 3262024 - RNA, 19 nt, Artificial Sequence
  Description of Artificial Sequence: Synthetic oligonucleotide
aaaccaucgaaguccaaca

SEQ ID NO: 3262025 - RNA, 19 nt, Artificial Sequence
  Description of Artificial Sequence: Synthetic oligonucleotide
gagaauguaccccauccag

SEQ ID NO: 3262026 - RNA, 19 nt, Artificial Sequence
  Description of Artificial Sequence: Synthetic oligonucleotide
ucauuccgaaccaugcggg

SEQ ID NO: 3262027 - RNA, 19 nt, Artificial Sequence
  Description of Artificial Sequence: Synthetic oligonucleotide
uuuguagugaaggagccug

SEQ ID NO: 3262028 - RNA, 19 nt, Artificial Sequence
  Description of Artificial Sequence: Synthetic oligonucleotide
uaugaaggcuuucuuguca

SEQ ID NO: 3262029 - RNA, 19 nt, Artificial Sequence
  Description of Artificial Sequence: Synthetic oligonucleotide
gaaggagucagcgucagcc

SEQ ID NO: 3262030 - RNA, 19 nt, Artificial Sequence
  Description of Artificial Sequence: Synthetic oligonucleotide
  modified_base (18)..(18): a, c, u, g, unknown or other
uuucuugucauccucugnu

SEQ ID NO: 3262031 - RNA, 19 nt, Artificial Sequence
  Description of Artificial Sequence: Synthetic oligonucleotide
agauuccggagguugagac

SEQ ID NO: 3262032 - RNA, 19 nt, Artificial Sequence
  Description of Artificial Sequence: Synthetic oligonucleotide
aauuccagaaaaccaucga

SEQ ID NO: 3262033 - RNA, 19 nt, Artificial Sequence
  Description of Artificial Sequence: Synthetic oligonucleotide
accaucgaaguccaacagc

SEQ ID NO: 3262034 - RNA, 19 nt, Artificial Sequence
  Description of Artificial Sequence: Synthetic oligonucleotide
caaaccauggaagauuccg

SEQ ID NO: 3262035 - RNA, 19 nt, Artificial Sequence
  Description of Artificial Sequence: Synthetic oligonucleotide
ucgaauuccagaaaaccau

SEQ ID NO: 3262036 - RNA, 19 nt, Artificial Sequence
  Description of Artificial Sequence: Synthetic oligonucleotide
uuguuuuccacugugggga

SEQ ID NO: 3262037 - RNA, 19 nt, Artificial Sequence
  Description of Artificial Sequence: Synthetic oligonucleotide
ucucauuccgaaccaugcg

SEQ ID NO: 3262038 - RNA, 19 nt, Artificial Sequence
  Description of Artificial Sequence: Synthetic oligonucleotide
accuuuguagugaaggagc

SEQ ID NO: 3262039 - RNA, 19 nt, Artificial Sequence
  Description of Artificial Sequence: Synthetic oligonucleotide
cucaucuucauccucauca

SEQ ID NO: 3262040 - RNA, 19 nt, Artificial Sequence
  Description of Artificial Sequence: Synthetic oligonucleotide
agugaaggagccugcacgg

SEQ ID NO: 3262041 - RNA, 19 nt, Artificial Sequence
  Description of Artificial Sequence: Synthetic oligonucleotide
gaauuccagaaaaccaucg

SEQ ID NO: 3262042 - RNA, 19 nt, Artificial Sequence
  Description of Artificial Sequence: Synthetic oligonucleotide
guuguuuuccacugugggg

SEQ ID NO: 3262043 - RNA, 19 nt, Artificial Sequence
  Description of Artificial Sequence: Synthetic oligonucleotide
auuccggagguugagacac

SEQ ID NO: 3262044 - RNA, 19 nt, Artificial Sequence
  Description of Artificial Sequence: Synthetic oligonucleotide
uccagaaaaccaucgaagu

SEQ ID NO: 3262045 - RNA, 19 nt, Artificial Sequence
  Description of Artificial Sequence: Synthetic oligonucleotide
auccaggucaucgaauucc

SEQ ID NO: 3262046 - RNA, 19 nt, Artificial Sequence
  Description of Artificial Sequence: Synthetic oligonucleotide
auaaugguuuaucaucuga

SEQ ID NO: 3262047 - RNA, 19 nt, Artificial Sequence
  Description of Artificial Sequence: Synthetic oligonucleotide
gaccccuuaccuaugaagg

SEQ ID NO: 3262048 - RNA, 19 nt, Artificial Sequence
  Description of Artificial Sequence: Synthetic oligonucleotide
uaaugguuuaucaucugau

SEQ ID NO: 3262049 - RNA, 19 nt, Artificial Sequence
  Description of Artificial Sequence: Synthetic oligonucleotide
cucauuccgaaccaugcgg

SEQ ID NO: 3262050 - RNA, 19 nt, Artificial Sequence
  Description of Artificial Sequence: Synthetic oligonucleotide
ugguuuaucaucugauccu

SEQ ID NO: 3262051 - RNA, 19 nt, Artificial Sequence
  Description of Artificial Sequence: Synthetic oligonucleotide
cagagaauguaccccaucc

SEQ ID NO: 3262052 - RNA, 19 nt, Artificial Sequence
  Description of Artificial Sequence: Synthetic oligonucleotide
aaguccaacagcuguggcu

SEQ ID NO: 3262053 - RNA, 19 nt, Artificial Sequence
  Description of Artificial Sequence: Synthetic oligonucleotide
uuaucaucugauccuuggc

SEQ ID NO: 3262054 - RNA, 19 nt, Artificial Sequence
  Description of Artificial Sequence: Synthetic oligonucleotide
aaaccauggaagauuccgg

SEQ ID NO: 3262055 - RNA, 19 nt, Artificial Sequence
  Description of Artificial Sequence: Synthetic oligonucleotide
aaccauggaagauuccgga

SEQ ID NO: 3262056 - RNA, 19 nt, Artificial Sequence
  Description of Artificial Sequence: Synthetic oligonucleotide
  modified_base (11)..(11): a, c, u, g, unknown or other
ucauccucugnucccaggc

SEQ ID NO: 3262057 - RNA, 19 nt, Artificial Sequence
  Description of Artificial Sequence: Synthetic oligonucleotide
aaccaucgaaguccaacag

SEQ ID NO: 3262058 - RNA, 19 nt, Artificial Sequence
  Description of Artificial Sequence: Synthetic oligonucleotide
ugggaagaaggagucagcg

SEQ ID NO: 3262059 - RNA, 19 nt, Artificial Sequence
  Description of Artificial Sequence: Synthetic oligonucleotide
gaggggaccaggcaugggg

SEQ ID NO: 3262060 - RNA, 19 nt, Artificial Sequence
  Description of Artificial Sequence: Synthetic oligonucleotide
uagcaucgugggaagaagg

SEQ ID NO: 3262061 - RNA, 19 nt, Artificial Sequence
  Description of Artificial Sequence: Synthetic oligonucleotide
caucgaauuccagaaaacc

SEQ ID NO: 3262062 - RNA, 19 nt, Artificial Sequence
  Description of Artificial Sequence: Synthetic oligonucleotide
aucgaaguccaacagcugu

SEQ ID NO: 3262063 - RNA, 19 nt, Artificial Sequence
  Description of Artificial Sequence: Synthetic oligonucleotide
gaaggcuuucuugucaucc

SEQ ID NO: 3262064 - RNA, 19 nt, Artificial Sequence
  Description of Artificial Sequence: Synthetic oligonucleotide
aauguaccccauccagguc

SEQ ID NO: 3262065 - RNA, 19 nt, Artificial Sequence
  Description of Artificial Sequence: Synthetic oligonucleotide
aguccaacagcuguggcuc

SEQ ID NO: 3262066 - RNA, 19 nt, Artificial Sequence
  Description of Artificial Sequence: Synthetic oligonucleotide
aagacagcaugaggggacc

SEQ ID NO: 3262067 - RNA, 19 nt, Artificial Sequence
  Description of Artificial Sequence: Synthetic oligonucleotide
auuccagaaaaccaucgaa

SEQ ID NO: 3262068 - RNA, 19 nt, Artificial Sequence
  Description of Artificial Sequence: Synthetic oligonucleotide
uggggaagacagcaugagg

SEQ ID NO: 3262069 - RNA, 19 nt, Artificial Sequence
  Description of Artificial Sequence: Synthetic oligonucleotide
accuaugaaggcuuucuug

SEQ ID NO: 3262070 - RNA, 19 nt, Artificial Sequence
  Description of Artificial Sequence: Synthetic oligonucleotide
agaccccuuaccuaugaag

SEQ ID NO: 3262071 - RNA, 19 nt, Artificial Sequence
  Description of Artificial Sequence: Synthetic oligonucleotide
accccuuaccuaugaaggc

SEQ ID NO: 3262072 - RNA, 19 nt, Artificial Sequence
  Description of Artificial Sequence: Synthetic oligonucleotide
ucaucgaauuccagaaaac

SEQ ID NO: 3262073 - RNA, 19 nt, Artificial Sequence
  Description of Artificial Sequence: Synthetic oligonucleotide
  modified_base (15)..(15): a, c, u, g, unknown or other
cuugucauccucugnuccc

SEQ ID NO: 3262074 - RNA, 19 nt, Artificial Sequence
  Description of Artificial Sequence: Synthetic oligonucleotide
ggggaagacagcaugaggg

SEQ ID NO: 3262075 - RNA, 19 nt, Artificial Sequence
  Description of Artificial Sequence: Synthetic oligonucleotide
ugaaggagccugcacgggc

SEQ ID NO: 3262076 - RNA, 19 nt, Artificial Sequence
  Description of Artificial Sequence: Synthetic oligonucleotide
caggcgauagcaucguggg

SEQ ID NO: 3262077 - RNA, 19 nt, Artificial Sequence
  Description of Artificial Sequence: Synthetic oligonucleotide
ugauccuuggcgaggaauc

SEQ ID NO: 3262078 - RNA, 19 nt, Artificial Sequence
  Description of Artificial Sequence: Synthetic oligonucleotide
ucagccucgucaaaccaug

SEQ ID NO: 3262079 - RNA, 19 nt, Artificial Sequence
  Description of Artificial Sequence: Synthetic oligonucleotide
auguaccccauccagguca

SEQ ID NO: 3262080 - RNA, 19 nt, Artificial Sequence
  Description of Artificial Sequence: Synthetic oligonucleotide
caauccaguacaucucgcc

SEQ ID NO: 3262081 - RNA, 19 nt, Artificial Sequence
  Description of Artificial Sequence: Synthetic oligonucleotide
aguacaucucgccgagugg

SEQ ID NO: 3262082 - RNA, 19 nt, Artificial Sequence
  Description of Artificial Sequence: Synthetic oligonucleotide
aucaucugauccuuggcga

SEQ ID NO: 3262083 - RNA, 19 nt, Artificial Sequence
  Description of Artificial Sequence: Synthetic oligonucleotide
uggaagauuccggagguug

SEQ ID NO: 3262084 - RNA, 19 nt, Artificial Sequence
  Description of Artificial Sequence: Synthetic oligonucleotide
uguggggaagacagcauga

SEQ ID NO: 3262085 - RNA, 19 nt, Artificial Sequence
  Description of Artificial Sequence: Synthetic oligonucleotide
ucaucugauccuuggcgag

SEQ ID NO: 3262086 - RNA, 19 nt, Artificial Sequence
  Description of Artificial Sequence: Synthetic oligonucleotide
ggcauaaugguuuaucauc

SEQ ID NO: 3262087 - RNA, 19 nt, Artificial Sequence
  Description of Artificial Sequence: Synthetic oligonucleotide
acucaucauucucaucuuc

SEQ ID NO: 3262088 - RNA, 19 nt, Artificial Sequence
  Description of Artificial Sequence: Synthetic oligonucleotide
uaccccauccaggucaucg

SEQ ID NO: 3262089 - RNA, 19 nt, Artificial Sequence
  Description of Artificial Sequence: Synthetic oligonucleotide
ggaagaaggagucagcguc

SEQ ID NO: 3262090 - RNA, 19 nt, Artificial Sequence
  Description of Artificial Sequence: Synthetic oligonucleotide
ucgaaguccaacagcugug

SEQ ID NO: 3262091 - RNA, 19 nt, Artificial Sequence
  Description of Artificial Sequence: Synthetic oligonucleotide
uccaguacaucucgccgag

SEQ ID NO: 3262092 - RNA, 19 nt, Artificial Sequence
  Description of Artificial Sequence: Synthetic oligonucleotide
aggucaucgaauuccagaa

SEQ ID NO: 3262093 - RNA, 19 nt, Artificial Sequence
  Description of Artificial Sequence: Synthetic oligonucleotide
agugguccagaugagguag

SEQ ID NO: 3262094 - RNA, 19 nt, Artificial Sequence
  Description of Artificial Sequence: Synthetic oligonucleotide
agaauguaccccauccagg

SEQ ID NO: 3262095 - RNA, 19 nt, Artificial Sequence
  Description of Artificial Sequence: Synthetic oligonucleotide
ugcacgggcauaaugguuu

SEQ ID NO: 3262096 - RNA, 19 nt, Artificial Sequence
  Description of Artificial Sequence: Synthetic oligonucleotide
uuaccuaugaaggcuuucu

SEQ ID NO: 3262097 - RNA, 19 nt, Artificial Sequence
  Description of Artificial Sequence: Synthetic oligonucleotide
aaggcuuucuugucauccu

SEQ ID NO: 3262098 - RNA, 19 nt, Artificial Sequence
  Description of Artificial Sequence: Synthetic oligonucleotide
auuccgaaccaugcggggc

SEQ ID NO: 3262099 - RNA, 19 nt, Artificial Sequence
  Description of Artificial Sequence: Synthetic oligonucleotide
aucgaauuccagaaaacca

SEQ ID NO: 3262100 - RNA, 19 nt, Artificial Sequence
  Description of Artificial Sequence: Synthetic oligonucleotide
cuguuguuuuccacugugg

SEQ ID NO: 3262101 - RNA, 19 nt, Artificial Sequence
  Description of Artificial Sequence: Synthetic oligonucleotide
  modified_base (10)..(10): a, c, u, g, unknown or other
cauccucugnucccaggcg

SEQ ID NO: 3262102 - RNA, 19 nt, Artificial Sequence
  Description of Artificial Sequence: Synthetic oligonucleotide
gucaucgaauuccagaaaa

SEQ ID NO: 3262103 - RNA, 19 nt, Artificial Sequence
  Description of Artificial Sequence: Synthetic oligonucleotide
agagaauguaccccaucca

SEQ ID NO: 3262104 - RNA, 19 nt, Artificial Sequence
  Description of Artificial Sequence: Synthetic oligonucleotide
cacaggcccaccuuuguag

SEQ ID NO: 3262105 - RNA, 19 nt, Artificial Sequence
  Description of Artificial Sequence: Synthetic oligonucleotide
aagaugauggcuuugaggc

SEQ ID NO: 3262106 - RNA, 19 nt, Artificial Sequence
  Description of Artificial Sequence: Synthetic oligonucleotide
aacaccauggaucucuugg

SEQ ID NO: 3262107 - RNA, 19 nt, Artificial Sequence
  Description of Artificial Sequence: Synthetic oligonucleotide
auugucaucuaucugcagc

SEQ ID NO: 3262108 - RNA, 19 nt, Artificial Sequence
  Description of Artificial Sequence: Synthetic oligonucleotide
cucauugucaucuaucugc

SEQ ID NO: 3262109 - RNA, 19 nt, Artificial Sequence
  Description of Artificial Sequence: Synthetic oligonucleotide
ucugggucgaagaagauga

SEQ ID NO: 3262110 - RNA, 19 nt, Artificial Sequence
  Description of Artificial Sequence: Synthetic oligonucleotide
ucaucaaggaugcgaaugg

SEQ ID NO: 3262111 - RNA, 19 nt, Artificial Sequence
  Description of Artificial Sequence: Synthetic oligonucleotide
gaagaugauggcuuugagg

SEQ ID NO: 3262112 - RNA, 19 nt, Artificial Sequence
  Description of Artificial Sequence: Synthetic oligonucleotide
guagucauugccuaggagc

SEQ ID NO: 3262113 - RNA, 19 nt, Artificial Sequence
  Description of Artificial Sequence: Synthetic oligonucleotide
agucgcuugaucuugcccg

SEQ ID NO: 3262114 - RNA, 19 nt, Artificial Sequence
  Description of Artificial Sequence: Synthetic oligonucleotide
guugauguaguccuccagg

SEQ ID NO: 3262115 - RNA, 19 nt, Artificial Sequence
  Description of Artificial Sequence: Synthetic oligonucleotide
ucaaggaugcgaauggaca

SEQ ID NO: 3262116 - RNA, 19 nt, Artificial Sequence
  Description of Artificial Sequence: Synthetic oligonucleotide
caccuggucauccagaagg

SEQ ID NO: 3262117 - RNA, 19 nt, Artificial Sequence
  Description of Artificial Sequence: Synthetic oligonucleotide
caggaguucaccaaaccgg

SEQ ID NO: 3262118 - RNA, 19 nt, Artificial Sequence
  Description of Artificial Sequence: Synthetic oligonucleotide
gaugcgaauggacacucgg

SEQ ID NO: 3262119 - RNA, 19 nt, Artificial Sequence
  Description of Artificial Sequence: Synthetic oligonucleotide
guaccugugaccucagucg

SEQ ID NO: 3262120 - RNA, 19 nt, Artificial Sequence
  Description of Artificial Sequence: Synthetic oligonucleotide
uccuugaacaccauggauc

SEQ ID NO: 3262121 - RNA, 19 nt, Artificial Sequence
  Description of Artificial Sequence: Synthetic oligonucleotide
ugcaggguggguaacagca

SEQ ID NO: 3262122 - RNA, 19 nt, Artificial Sequence
  Description of Artificial Sequence: Synthetic oligonucleotide
agcagcacauccuugaaca

SEQ ID NO: 3262123 - RNA, 19 nt, Artificial Sequence
  Description of Artificial Sequence: Synthetic oligonucleotide
acauccuugaacaccaugg

SEQ ID NO: 3262124 - RNA, 19 nt, Artificial Sequence
  Description of Artificial Sequence: Synthetic oligonucleotide
uagucauugccuaggagca

SEQ ID NO: 3262125 - RNA, 19 nt, Artificial Sequence
  Description of Artificial Sequence: Synthetic oligonucleotide
aucucugcuagcucugggc

SEQ ID NO: 3262126 - RNA, 19 nt, Artificial Sequence
  Description of Artificial Sequence: Synthetic oligonucleotide
gauguagucauugccuagg

SEQ ID NO: 3262127 - RNA, 19 nt, Artificial Sequence
  Description of Artificial Sequence: Synthetic oligonucleotide
gaggcaggcauacucauug

SEQ ID NO: 3262128 - RNA, 19 nt, Artificial Sequence
  Description of Artificial Sequence: Synthetic oligonucleotide
uuugaggcaggcauacuca

SEQ ID NO: 3262129 - RNA, 19 nt, Artificial Sequence
  Description of Artificial Sequence: Synthetic oligonucleotide
uacucauugucaucuaucu

SEQ ID NO: 3262130 - RNA, 19 nt, Artificial Sequence
  Description of Artificial Sequence: Synthetic oligonucleotide
gauguaguccuccaggcuc

SEQ ID NO: 3262131 - RNA, 19 nt, Artificial Sequence
  Description of Artificial Sequence: Synthetic oligonucleotide
gaugauggcuuugaggcag

SEQ ID NO: 3262132 - RNA, 19 nt, Artificial Sequence
  Description of Artificial Sequence: Synthetic oligonucleotide
accagcaugggcucugagc

SEQ ID NO: 3262133 - RNA, 19 nt, Artificial Sequence
  Description of Artificial Sequence: Synthetic oligonucleotide
aguucaccaaaccggcccc

SEQ ID NO: 3262134 - RNA, 19 nt, Artificial Sequence
  Description of Artificial Sequence: Synthetic oligonucleotide
accauggaucucuuggugg

SEQ ID NO: 3262135 - RNA, 19 nt, Artificial Sequence
  Description of Artificial Sequence: Synthetic oligonucleotide
uguaccugugaccucaguc

SEQ ID NO: 3262136 - RNA, 19 nt, Artificial Sequence
  Description of Artificial Sequence: Synthetic oligonucleotide
gaguucaccaaaccggccc

SEQ ID NO: 3262137 - RNA, 19 nt, Artificial Sequence
  Description of Artificial Sequence: Synthetic oligonucleotide
uugauguaguccuccaggc

SEQ ID NO: 3262138 - RNA, 19 nt, Artificial Sequence
  Description of Artificial Sequence: Synthetic oligonucleotide
ucauugucaucuaucugca

SEQ ID NO: 3262139 - RNA, 19 nt, Artificial Sequence
  Description of Artificial Sequence: Synthetic oligonucleotide
agcaggaguucaccaaacc

SEQ ID NO: 3262140 - RNA, 19 nt, Artificial Sequence
  Description of Artificial Sequence: Synthetic oligonucleotide
augggcucugagcagggcc

SEQ ID NO: 3262141 - RNA, 19 nt, Artificial Sequence
  Description of Artificial Sequence: Synthetic oligonucleotide
uugucaucuaucugcagcu

SEQ ID NO: 3262142 - RNA, 19 nt, Artificial Sequence
  Description of Artificial Sequence: Synthetic oligonucleotide
ucgaagaagaugauggcuu

SEQ ID NO: 3262143 - RNA, 19 nt, Artificial Sequence
  Description of Artificial Sequence: Synthetic oligonucleotide
ugcgaauggacacucggcu

SEQ ID NO: 3262144 - RNA, 19 nt, Artificial Sequence
  Description of Artificial Sequence: Synthetic oligonucleotide
aucugcagcuccuggaagg

SEQ ID NO: 3262145 - RNA, 19 nt, Artificial Sequence
  Description of Artificial Sequence: Synthetic oligonucleotide
ucugagcagggccaccugg

SEQ ID NO: 3262146 - RNA, 19 nt, Artificial Sequence
  Description of Artificial Sequence: Synthetic oligonucleotide
uugaacaccauggaucucu

SEQ ID NO: 3262147 - RNA, 19 nt, Artificial Sequence
  Description of Artificial Sequence: Synthetic oligonucleotide
cuugaucuugcccgggucg

SEQ ID NO: 3262148 - RNA, 19 nt, Artificial Sequence
  Description of Artificial Sequence: Synthetic oligonucleotide
uguagucauugccuaggag

SEQ ID NO: 3262149 - RNA, 19 nt, Artificial Sequence
  Description of Artificial Sequence: Synthetic oligonucleotide
auggcuuugaggcaggcau

SEQ ID NO: 3262150 - RNA, 19 nt, Artificial Sequence
  Description of Artificial Sequence: Synthetic oligonucleotide
gggucgaagaagaugaugg

SEQ ID NO: 3262151 - RNA, 19 nt, Artificial Sequence
  Description of Artificial Sequence: Synthetic oligonucleotide
auugccuaggagcagcaca

SEQ ID NO: 3262152 - RNA, 19 nt, Artificial Sequence
  Description of Artificial Sequence: Synthetic oligonucleotide
ucuaucugcagcuccugga

SEQ ID NO: 3262153 - RNA, 19 nt, Artificial Sequence
  Description of Artificial Sequence: Synthetic oligonucleotide
aagaagaugauggcuuuga

SEQ ID NO: 3262154 - RNA, 19 nt, Artificial Sequence
  Description of Artificial Sequence: Synthetic oligonucleotide
uaguccuccaggcucaccu

SEQ ID NO: 3262155 - RNA, 19 nt, Artificial Sequence
  Description of Artificial Sequence: Synthetic oligonucleotide
cuuugaggcaggcauacuc

SEQ ID NO: 3262156 - RNA, 19 nt, Artificial Sequence
  Description of Artificial Sequence: Synthetic oligonucleotide
ucaccuguaccugugaccu

SEQ ID NO: 3262157 - RNA, 19 nt, Artificial Sequence
  Description of Artificial Sequence: Synthetic oligonucleotide
ucaucuaucugcagcuccu

SEQ ID NO: 3262158 - RNA, 19 nt, Artificial Sequence
  Description of Artificial Sequence: Synthetic oligonucleotide
aggaguucaccaaaccggc

SEQ ID NO: 3262159 - RNA, 19 nt, Artificial Sequence
  Description of Artificial Sequence: Synthetic oligonucleotide
ucucugcuagcucugggca

SEQ ID NO: 3262160 - RNA, 19 nt, Artificial Sequence
  Description of Artificial Sequence: Synthetic oligonucleotide
caaggaugcgaauggacac

SEQ ID NO: 3262161 - RNA, 19 nt, Artificial Sequence
  Description of Artificial Sequence: Synthetic oligonucleotide
auacucauugucaucuauc

SEQ ID NO: 3262162 - RNA, 19 nt, Artificial Sequence
  Description of Artificial Sequence: Synthetic oligonucleotide
accagcucaucaaggaugc

SEQ ID NO: 3262163 - RNA, 19 nt, Artificial Sequence
  Description of Artificial Sequence: Synthetic oligonucleotide
uccuggaagggcaggacca

SEQ ID NO: 3262164 - RNA, 19 nt, Artificial Sequence
  Description of Artificial Sequence: Synthetic oligonucleotide
agaagaugauggcuuugag

SEQ ID NO: 3262165 - RNA, 19 nt, Artificial Sequence
  Description of Artificial Sequence: Synthetic oligonucleotide
cucaucaaggaugcgaaug

SEQ ID NO: 3262166 - RNA, 19 nt, Artificial Sequence
  Description of Artificial Sequence: Synthetic oligonucleotide
aucaaggaugcgaauggac

SEQ ID NO: 3262167 - RNA, 19 nt, Artificial Sequence
  Description of Artificial Sequence: Synthetic oligonucleotide
ugucgagggacgauguagu

SEQ ID NO: 3262168 - RNA, 19 nt, Artificial Sequence
  Description of Artificial Sequence: Synthetic oligonucleotide
cuagcucugggcagugucg

SEQ ID NO: 3262169 - RNA, 19 nt, Artificial Sequence
  Description of Artificial Sequence: Synthetic oligonucleotide
accaaaccggccccgagag

SEQ ID NO: 3262170 - RNA, 19 nt, Artificial Sequence
  Description of Artificial Sequence: Synthetic oligonucleotide
caggugcucaccagcaugg

SEQ ID NO: 3262171 - RNA, 19 nt, Artificial Sequence
  Description of Artificial Sequence: Synthetic oligonucleotide
gcaggaguucaccaaaccg

SEQ ID NO: 3262172 - RNA, 19 nt, Artificial Sequence
  Description of Artificial Sequence: Synthetic oligonucleotide
acagcagcaggaguucacc

SEQ ID NO: 3262173 - RNA, 19 nt, Artificial Sequence
  Description of Artificial Sequence: Synthetic oligonucleotide
ugcagcuccuggaagggca

SEQ ID NO: 3262174 - RNA, 19 nt, Artificial Sequence
  Description of Artificial Sequence: Synthetic oligonucleotide
uaucugcagcuccuggaag

SEQ ID NO: 3262175 - RNA, 19 nt, Artificial Sequence
  Description of Artificial Sequence: Synthetic oligonucleotide
uaccugugaccucagucgc

SEQ ID NO: 3262176 - RNA, 19 nt, Artificial Sequence
  Description of Artificial Sequence: Synthetic oligonucleotide
aucuaucugcagcuccugg

SEQ ID NO: 3262177 - RNA, 19 nt, Artificial Sequence
  Description of Artificial Sequence: Synthetic oligonucleotide
gucaucuaucugcagcucc

SEQ ID NO: 3262178 - RNA, 19 nt, Artificial Sequence
  Description of Artificial Sequence: Synthetic oligonucleotide
gaccagcucaucaaggaug

SEQ ID NO: 3262179 - RNA, 19 nt, Artificial Sequence
  Description of Artificial Sequence: Synthetic oligonucleotide
ugggcagugucgagggacg

SEQ ID NO: 3262180 - RNA, 19 nt, Artificial Sequence
  Description of Artificial Sequence: Synthetic oligonucleotide
ugauguaguccuccaggcu

SEQ ID NO: 3262181 - RNA, 19 nt, Artificial Sequence
  Description of Artificial Sequence: Synthetic oligonucleotide
cucaccuguaccugugacc

SEQ ID NO: 3262182 - RNA, 19 nt, Artificial Sequence
  Description of Artificial Sequence: Synthetic oligonucleotide
aacagcagcaggaguucac

SEQ ID NO: 3262183 - RNA, 19 nt, Artificial Sequence
  Description of Artificial Sequence: Synthetic oligonucleotide
ugugaccucagucgcuuga

SEQ ID NO: 3262184 - RNA, 19 nt, Artificial Sequence
  Description of Artificial Sequence: Synthetic oligonucleotide
uugccuaggagcagcacau

SEQ ID NO: 3262185 - RNA, 19 nt, Artificial Sequence
  Description of Artificial Sequence: Synthetic oligonucleotide
cucugggcagugucgaggg

SEQ ID NO: 3262186 - RNA, 19 nt, Artificial Sequence
  Description of Artificial Sequence: Synthetic oligonucleotide
acucauugucaucuaucug

SEQ ID NO: 3262187 - RNA, 19 nt, Artificial Sequence
  Description of Artificial Sequence: Synthetic oligonucleotide
aggagcagcacauccuuga

SEQ ID NO: 3262188 - RNA, 19 nt, Artificial Sequence
  Description of Artificial Sequence: Synthetic oligonucleotide
uggaagggcaggaccagcu

SEQ ID NO: 3262189 - RNA, 19 nt, Artificial Sequence
  Description of Artificial Sequence: Synthetic oligonucleotide
uccaggcucaccuguaccu

SEQ ID NO: 3262190 - RNA, 19 nt, Artificial Sequence
  Description of Artificial Sequence: Synthetic oligonucleotide
aggaccagcucaucaagga

SEQ ID NO: 3262191 - RNA, 19 nt, Artificial Sequence
  Description of Artificial Sequence: Synthetic oligonucleotide
ucugcagcuccuggaaggg

SEQ ID NO: 3262192 - RNA, 19 nt, Artificial Sequence
  Description of Artificial Sequence: Synthetic oligonucleotide
auggacacucggcucaucu

SEQ ID NO: 3262193 - RNA, 19 nt, Artificial Sequence
  Description of Artificial Sequence: Synthetic oligonucleotide
augcgaauggacacucggc

SEQ ID NO: 3262194 - RNA, 19 nt, Artificial Sequence
  Description of Artificial Sequence: Synthetic oligonucleotide
cucggcucaucucugcuag

SEQ ID NO: 3262195 - RNA, 19 nt, Artificial Sequence
  Description of Artificial Sequence: Synthetic oligonucleotide
acacucggcucaucucugc

SEQ ID NO: 3262196 - RNA, 19 nt, Artificial Sequence
  Description of Artificial Sequence: Synthetic oligonucleotide
caggaccagcucaucaagg

SEQ ID NO: 3262197 - RNA, 19 nt, Artificial Sequence
  Description of Artificial Sequence: Synthetic oligonucleotide
aaggaugcgaauggacacu

SEQ ID NO: 3262198 - RNA, 19 nt, Artificial Sequence
  Description of Artificial Sequence: Synthetic oligonucleotide
cuugguggcuccgagcagc

SEQ ID NO: 3262199 - RNA, 19 nt, Artificial Sequence
  Description of Artificial Sequence: Synthetic oligonucleotide
gaagggcaggaccagcuca

SEQ ID NO: 3262200 - RNA, 19 nt, Artificial Sequence
  Description of Artificial Sequence: Synthetic oligonucleotide
agcaugggcucugagcagg

SEQ ID NO: 3262201 - RNA, 19 nt, Artificial Sequence
  Description of Artificial Sequence: Synthetic oligonucleotide
ugggcucugagcagggcca

SEQ ID NO: 3262202 - RNA, 19 nt, Artificial Sequence
  Description of Artificial Sequence: Synthetic oligonucleotide
uggguaacagcagcaggag

SEQ ID NO: 3262203 - RNA, 19 nt, Artificial Sequence
  Description of Artificial Sequence: Synthetic oligonucleotide
agcacauccuugaacacca

SEQ ID NO: 3262204 - RNA, 19 nt, Artificial Sequence
  Description of Artificial Sequence: Synthetic oligonucleotide
uuggcgucugggucgaaga

SEQ ID NO: 3262205 - RNA, 19 nt, Artificial Sequence
  Description of Artificial Sequence: Synthetic oligonucleotide
uuugauaucucccacaucu

SEQ ID NO: 3262206 - RNA, 19 nt, Artificial Sequence
  Description of Artificial Sequence: Synthetic oligonucleotide
aauacuguguauuucaugu

SEQ ID NO: 3262207 - RNA, 19 nt, Artificial Sequence
  Description of Artificial Sequence: Synthetic oligonucleotide
aacuucuugccccagauac

SEQ ID NO: 3262208 - RNA, 19 nt, Artificial Sequence
  Description of Artificial Sequence: Synthetic oligonucleotide
auauucacuauauucgucc

SEQ ID NO: 3262209 - RNA, 19 nt, Artificial Sequence
  Description of Artificial Sequence: Synthetic oligonucleotide
acuauauucguccucaaac

SEQ ID NO: 3262210 - RNA, 19 nt, Artificial Sequence
  Description of Artificial Sequence: Synthetic oligonucleotide
aagacuucuauuuugauau

SEQ ID NO: 3262211 - RNA, 19 nt, Artificial Sequence
  Description of Artificial Sequence: Synthetic oligonucleotide
guuccuaugaaauacacag

SEQ ID NO: 3262212 - RNA, 19 nt, Artificial Sequence
  Description of Artificial Sequence: Synthetic oligonucleotide
auuacuggcgcaaagagcc

SEQ ID NO: 3262213 - RNA, 19 nt, Artificial Sequence
  Description of Artificial Sequence: Synthetic oligonucleotide
ugaugaagaacugagaucc

SEQ ID NO: 3262214 - RNA, 19 nt, Artificial Sequence
  Description of Artificial Sequence: Synthetic oligonucleotide
agauacaacaccucuaacg

SEQ ID NO: 3262215 - RNA, 19 nt, Artificial Sequence
  Description of Artificial Sequence: Synthetic oligonucleotide
cauuauuagccauagauac

SEQ ID NO: 3262216 - RNA, 19 nt, Artificial Sequence
  Description of Artificial Sequence: Synthetic oligonucleotide
cagauauucacuauauucg

SEQ ID NO: 3262217 - RNA, 19 nt, Artificial Sequence
  Description of Artificial Sequence: Synthetic oligonucleotide
uccuaugaaauacacagcc

SEQ ID NO: 3262218 - RNA, 19 nt, Artificial Sequence
  Description of Artificial Sequence: Synthetic oligonucleotide
ugcaaugucacagacaucc

SEQ ID NO: 3262219 - RNA, 19 nt, Artificial Sequence
  Description of Artificial Sequence: Synthetic oligonucleotide
aaugucacagacauccucc

SEQ ID NO: 3262220 - RNA, 19 nt, Artificial Sequence
  Description of Artificial Sequence: Synthetic oligonucleotide
ucagauauucacuauauuc

SEQ ID NO: 3262221 - RNA, 19 nt, Artificial Sequence
  Description of Artificial Sequence: Synthetic oligonucleotide
aauucucacauguuuuggg

SEQ ID NO: 3262222 - RNA, 19 nt, Artificial Sequence
  Description of Artificial Sequence: Synthetic oligonucleotide
ugugcaaugucacagacau

SEQ ID NO: 3262223 - RNA, 19 nt, Artificial Sequence
  Description of Artificial Sequence: Synthetic oligonucleotide
aacguugugcuucagauau

SEQ ID NO: 3262224 - RNA, 19 nt, Artificial Sequence
  Description of Artificial Sequence: Synthetic oligonucleotide
cauuguaguaauuacuggc

SEQ ID NO: 3262225 - RNA, 19 nt, Artificial Sequence
  Description of Artificial Sequence: Synthetic oligonucleotide
aaauacacagccauuguag

SEQ ID NO: 3262226 - RNA, 19 nt, Artificial Sequence
  Description of Artificial Sequence: Synthetic oligonucleotide
aacaccucuaacguugugc

SEQ ID NO: 3262227 - RNA, 19 nt, Artificial Sequence
  Description of Artificial Sequence: Synthetic oligonucleotide
agagccaagaaauucucac

SEQ ID NO: 3262228 - RNA, 19 nt, Artificial Sequence
  Description of Artificial Sequence: Synthetic oligonucleotide
acauccucccucuugaugg

SEQ ID NO: 3262229 - RNA, 19 nt, Artificial Sequence
  Description of Artificial Sequence: Synthetic oligonucleotide
ucuauuuugauaucuccca

SEQ ID NO: 3262230 - RNA, 19 nt, Artificial Sequence
  Description of Artificial Sequence: Synthetic oligonucleotide
uacaacaccucuaacguug

SEQ ID NO: 3262231 - RNA, 19 nt, Artificial Sequence
  Description of Artificial Sequence: Synthetic oligonucleotide
uaauuacuggcgcaaagag

SEQ ID NO: 3262232 - RNA, 19 nt, Artificial Sequence
  Description of Artificial Sequence: Synthetic oligonucleotide
uucuauuuugauaucuccc

SEQ ID NO: 3262233 - RNA, 19 nt, Artificial Sequence
  Description of Artificial Sequence: Synthetic oligonucleotide
uuagccauagauacaacac

SEQ ID NO: 3262234 - RNA, 19 nt, Artificial Sequence
  Description of Artificial Sequence: Synthetic oligonucleotide
uaggugaugaagaacugag

SEQ ID NO: 3262235 - RNA, 19 nt, Artificial Sequence
  Description of Artificial Sequence: Synthetic oligonucleotide
aaccaugaaacccuugaug

SEQ ID NO: 3262236 - RNA, 19 nt, Artificial Sequence
  Description of Artificial Sequence: Synthetic oligonucleotide
auccauugguauuuggccc

SEQ ID NO: 3262237 - RNA, 19 nt, Artificial Sequence
  Description of Artificial Sequence: Synthetic oligonucleotide
aagaaauucucacauguuu

SEQ ID NO: 3262238 - RNA, 19 nt, Artificial Sequence
  Description of Artificial Sequence: Synthetic oligonucleotide
aauuacuggcgcaaagagc

SEQ ID NO: 3262239 - RNA, 19 nt, Artificial Sequence
  Description of Artificial Sequence: Synthetic oligonucleotide
uacuguguauuucaugucc

SEQ ID NO: 3262240 - RNA, 19 nt, Artificial Sequence
  Description of Artificial Sequence: Synthetic oligonucleotide
gauccauugguauuuggcc

SEQ ID NO: 3262241 - RNA, 19 nt, Artificial Sequence
  Description of Artificial Sequence: Synthetic oligonucleotide
ugaaccaugaaacccuuga

SEQ ID NO: 3262242 - RNA, 19 nt, Artificial Sequence
  Description of Artificial Sequence: Synthetic oligonucleotide
ucuugaugguuccaggaag

SEQ ID NO: 3262243 - RNA, 19 nt, Artificial Sequence
  Description of Artificial Sequence: Synthetic oligonucleotide
aagaacugagauccauugg

SEQ ID NO: 3262244 - RNA, 19 nt, Artificial Sequence
  Description of Artificial Sequence: Synthetic oligonucleotide
gaagaacugagauccauug

SEQ ID NO: 3262245 - RNA, 19 nt, Artificial Sequence
  Description of Artificial Sequence: Synthetic oligonucleotide
accaugaaacccuugaugu

SEQ ID NO: 3262246 - RNA, 19 nt, Artificial Sequence
  Description of Artificial Sequence: Synthetic oligonucleotide
aaauacuguguauuucaug

SEQ ID NO: 3262247 - RNA, 19 nt, Artificial Sequence
  Description of Artificial Sequence: Synthetic oligonucleotide
agaacugagauccauuggu

SEQ ID NO: 3262248 - RNA, 19 nt, Artificial Sequence
  Description of Artificial Sequence: Synthetic oligonucleotide
gaaauucucacauguuuug

SEQ ID NO: 3262249 - RNA, 19 nt, Artificial Sequence
  Description of Artificial Sequence: Synthetic oligonucleotide
auuguaguaauuacuggcg

SEQ ID NO: 3262250 - RNA, 19 nt, Artificial Sequence
  Description of Artificial Sequence: Synthetic oligonucleotide
aauacacagccauuguagu

SEQ ID NO: 3262251 - RNA, 19 nt, Artificial Sequence
  Description of Artificial Sequence: Synthetic oligonucleotide
uggaucucccguuugaacc

SEQ ID NO: 3262252 - RNA, 19 nt, Artificial Sequence
  Description of Artificial Sequence: Synthetic oligonucleotide
aaauucucacauguuuugg

SEQ ID NO: 3262253 - RNA, 19 nt, Artificial Sequence
  Description of Artificial Sequence: Synthetic oligonucleotide
auuuggcccauuauuagcc

SEQ ID NO: 3262254 - RNA, 19 nt, Artificial Sequence
  Description of Artificial Sequence: Synthetic oligonucleotide
uuauuagccauagauacaa

SEQ ID NO: 3262255 - RNA, 19 nt, Artificial Sequence
  Description of Artificial Sequence: Synthetic oligonucleotide
uuucauguccagauguggc

SEQ ID NO: 3262256 - RNA, 19 nt, Artificial Sequence
  Description of Artificial Sequence: Synthetic oligonucleotide
ugugcuucagauauucacu

SEQ ID NO: 3262257 - RNA, 19 nt, Artificial Sequence
  Description of Artificial Sequence: Synthetic oligonucleotide
auuagccauagauacaaca

SEQ ID NO: 3262258 - RNA, 19 nt, Artificial Sequence
  Description of Artificial Sequence: Synthetic oligonucleotide
cuucuauuuugauaucucc

SEQ ID NO: 3262259 - RNA, 19 nt, Artificial Sequence
  Description of Artificial Sequence: Synthetic oligonucleotide
ucugugugcaaugucacag

SEQ ID NO: 3262260 - RNA, 19 nt, Artificial Sequence
  Description of Artificial Sequence: Synthetic oligonucleotide
uagccauagauacaacacc

SEQ ID NO: 3262261 - RNA, 19 nt, Artificial Sequence
  Description of Artificial Sequence: Synthetic oligonucleotide
uguauuucauguccagaug

SEQ ID NO: 3262262 - RNA, 19 nt, Artificial Sequence
  Description of Artificial Sequence: Synthetic oligonucleotide
uauuuugauaucucccaca

SEQ ID NO: 3262263 - RNA, 19 nt, Artificial Sequence
  Description of Artificial Sequence: Synthetic oligonucleotide
ugauguuccuaugaaauac

SEQ ID NO: 3262264 - RNA, 19 nt, Artificial Sequence
  Description of Artificial Sequence: Synthetic oligonucleotide
acagaagacuucuauuuug

SEQ ID NO: 3262265 - RNA, 19 nt, Artificial Sequence
  Description of Artificial Sequence: Synthetic oligonucleotide
uauucguccucaaacuucu

SEQ ID NO: 3262266 - RNA, 19 nt, Artificial Sequence
  Description of Artificial Sequence: Synthetic oligonucleotide
uuguaguaauuacuggcgc

SEQ ID NO: 3262267 - RNA, 19 nt, Artificial Sequence
  Description of Artificial Sequence: Synthetic oligonucleotide
uauuuggcccauuauuagc

SEQ ID NO: 3262268 - RNA, 19 nt, Artificial Sequence
  Description of Artificial Sequence: Synthetic oligonucleotide
agauccauugguauuuggc

SEQ ID NO: 3262269 - RNA, 19 nt, Artificial Sequence
  Description of Artificial Sequence: Synthetic oligonucleotide
uccucaaacuucuugcccc

SEQ ID NO: 3262270 - RNA, 19 nt, Artificial Sequence
  Description of Artificial Sequence: Synthetic oligonucleotide
uccaguaccuguuggaucu

SEQ ID NO: 3262271 - RNA, 19 nt, Artificial Sequence
  Description of Artificial Sequence: Synthetic oligonucleotide
auagauacaacaccucuaa

SEQ ID NO: 3262272 - RNA, 19 nt, Artificial Sequence
  Description of Artificial Sequence: Synthetic oligonucleotide
uuuggguguccucucacag

SEQ ID NO: 3262273 - RNA, 19 nt, Artificial Sequence
  Description of Artificial Sequence: Synthetic oligonucleotide
agauauucacuauauucgu

SEQ ID NO: 3262274 - RNA, 19 nt, Artificial Sequence
  Description of Artificial Sequence: Synthetic oligonucleotide
aaacccuugauguuccuau

SEQ ID NO: 3262275 - RNA, 19 nt, Artificial Sequence
  Description of Artificial Sequence: Synthetic oligonucleotide
aguaauuacuggcgcaaag

SEQ ID NO: 3262276 - RNA, 19 nt, Artificial Sequence
  Description of Artificial Sequence: Synthetic oligonucleotide
uguaguaauuacuggcgca

SEQ ID NO: 3262277 - RNA, 19 nt, Artificial Sequence
  Description of Artificial Sequence: Synthetic oligonucleotide
gauacaacaccucuaacgu

SEQ ID NO: 3262278 - RNA, 19 nt, Artificial Sequence
  Description of Artificial Sequence: Synthetic oligonucleotide
uugugcuucagauauucac

SEQ ID NO: 3262279 - RNA, 19 nt, Artificial Sequence
  Description of Artificial Sequence: Synthetic oligonucleotide
augaaauacacagccauug

SEQ ID NO: 3262280 - RNA, 19 nt, Artificial Sequence
  Description of Artificial Sequence: Synthetic oligonucleotide
uauuucauguccagaugug

SEQ ID NO: 3262281 - RNA, 19 nt, Artificial Sequence
  Description of Artificial Sequence: Synthetic oligonucleotide
uugccauaggugaugaaga

SEQ ID NO: 3262282 - RNA, 19 nt, Artificial Sequence
  Description of Artificial Sequence: Synthetic oligonucleotide
uucacuauauucguccuca

SEQ ID NO: 3262283 - RNA, 19 nt, Artificial Sequence
  Description of Artificial Sequence: Synthetic oligonucleotide
aaagagccaagaaauucuc

SEQ ID NO: 3262284 - RNA, 19 nt, Artificial Sequence
  Description of Artificial Sequence: Synthetic oligonucleotide
ucacagaagacuucuauuu

SEQ ID NO: 3262285 - RNA, 19 nt, Artificial Sequence
  Description of Artificial Sequence: Synthetic oligonucleotide
ucguccucaaacuucuugc

SEQ ID NO: 3262286 - RNA, 19 nt, Artificial Sequence
  Description of Artificial Sequence: Synthetic oligonucleotide
cuugaugguuccaggaagc

SEQ ID NO: 3262287 - RNA, 19 nt, Artificial Sequence
  Description of Artificial Sequence: Synthetic oligonucleotide
auuuugauaucucccacau

SEQ ID NO: 3262288 - RNA, 19 nt, Artificial Sequence
  Description of Artificial Sequence: Synthetic oligonucleotide
uguuccuaugaaauacaca

SEQ ID NO: 3262289 - RNA, 19 nt, Artificial Sequence
  Description of Artificial Sequence: Synthetic oligonucleotide
ugauaucucccacaucugu

SEQ ID NO: 3262290 - RNA, 19 nt, Artificial Sequence
  Description of Artificial Sequence: Synthetic oligonucleotide
cuugccauaggugaugaag

SEQ ID NO: 3262291 - RNA, 19 nt, Artificial Sequence
  Description of Artificial Sequence: Synthetic oligonucleotide
guauuuggcccauuauuag

SEQ ID NO: 3262292 - RNA, 19 nt, Artificial Sequence
  Description of Artificial Sequence: Synthetic oligonucleotide
ugaaauacacagccauugu

SEQ ID NO: 3262293 - RNA, 19 nt, Artificial Sequence
  Description of Artificial Sequence: Synthetic oligonucleotide
ucccguuugaaccaugaaa

SEQ ID NO: 3262294 - RNA, 19 nt, Artificial Sequence
  Description of Artificial Sequence: Synthetic oligonucleotide
aacugagauccauugguau

SEQ ID NO: 3262295 - RNA, 19 nt, Artificial Sequence
  Description of Artificial Sequence: Synthetic oligonucleotide
accucuaacguugugcuuc

SEQ ID NO: 3262296 - RNA, 19 nt, Artificial Sequence
  Description of Artificial Sequence: Synthetic oligonucleotide
auuucauguccagaugugg

SEQ ID NO: 3262297 - RNA, 19 nt, Artificial Sequence
  Description of Artificial Sequence: Synthetic oligonucleotide
ucuaacguugugcuucaga

SEQ ID NO: 3262298 - RNA, 19 nt, Artificial Sequence
  Description of Artificial Sequence: Synthetic oligonucleotide
ucucacauguuuugggugu

SEQ ID NO: 3262299 - RNA, 19 nt, Artificial Sequence
  Description of Artificial Sequence: Synthetic oligonucleotide
uucguccucaaacuucuug

SEQ ID NO: 3262300 - RNA, 19 nt, Artificial Sequence
  Description of Artificial Sequence: Synthetic oligonucleotide
augucacagacauccuccc

SEQ ID NO: 3262301 - RNA, 19 nt, Artificial Sequence
  Description of Artificial Sequence: Synthetic oligonucleotide
ugguauuuggcccauuauu

SEQ ID NO: 3262302 - RNA, 19 nt, Artificial Sequence
  Description of Artificial Sequence: Synthetic oligonucleotide
uucucacauguuuugggug

SEQ ID NO: 3262303 - RNA, 19 nt, Artificial Sequence
  Description of Artificial Sequence: Synthetic oligonucleotide
uauauucguccucaaacuu

SEQ ID NO: 3262304 - RNA, 19 nt, Artificial Sequence
  Description of Artificial Sequence: Synthetic oligonucleotide
uuccuaugaaauacacagc

SEQ ID NO: 3262305 - RNA, 19 nt, Artificial Sequence
  Description of Artificial Sequence: Synthetic oligonucleotide
acaaauaagacacaaacuc

SEQ ID NO: 3262306 - RNA, 19 nt, Artificial Sequence
  Description of Artificial Sequence: Synthetic oligonucleotide
uguuucuucauuauuaugc

SEQ ID NO: 3262307 - RNA, 19 nt, Artificial Sequence
  Description of Artificial Sequence: Synthetic oligonucleotide
ugacaaauaagacacaaac

SEQ ID NO: 3262308 - RNA, 19 nt, Artificial Sequence
  Description of Artificial Sequence: Synthetic oligonucleotide
uuauuauuuuccuacauga

SEQ ID NO: 3262309 - RNA, 19 nt, Artificial Sequence
  Description of Artificial Sequence: Synthetic oligonucleotide
uuuggauuggaaacaaacg

SEQ ID NO: 3262310 - RNA, 19 nt, Artificial Sequence
  Description of Artificial Sequence: Synthetic oligonucleotide
aacguuuccagauaguucu

SEQ ID NO: 3262311 - RNA, 19 nt, Artificial Sequence
  Description of Artificial Sequence: Synthetic oligonucleotide
uuuguagugaagaacaccu

SEQ ID NO: 3262312 - RNA, 19 nt, Artificial Sequence
  Description of Artificial Sequence: Synthetic oligonucleotide
uaugcaaaauaucugguug

SEQ ID NO: 3262313 - RNA, 19 nt, Artificial Sequence
  Description of Artificial Sequence: Synthetic oligonucleotide
gauucaguuucuuacgacg

SEQ ID NO: 3262314 - RNA, 19 nt, Artificial Sequence
  Description of Artificial Sequence: Synthetic oligonucleotide
auuggaaacaaacguuucc

SEQ ID NO: 3262315 - RNA, 19 nt, Artificial Sequence
  Description of Artificial Sequence: Synthetic oligonucleotide
aaugaguauaccauuuucg

SEQ ID NO: 3262316 - RNA, 19 nt, Artificial Sequence
  Description of Artificial Sequence: Synthetic oligonucleotide
aaauaagacacaaacucuc

SEQ ID NO: 3262317 - RNA, 19 nt, Artificial Sequence
  Description of Artificial Sequence: Synthetic oligonucleotide
uuuuggauuggaaacaaac

SEQ ID NO: 3262318 - RNA, 19 nt, Artificial Sequence
  Description of Artificial Sequence: Synthetic oligonucleotide
uuugaugucacccauuuua

SEQ ID NO: 3262319 - RNA, 19 nt, Artificial Sequence
  Description of Artificial Sequence: Synthetic oligonucleotide
aacaaacguuuccagauag

SEQ ID NO: 3262320 - RNA, 19 nt, Artificial Sequence
  Description of Artificial Sequence: Synthetic oligonucleotide
aguauguagauuuacgaca

SEQ ID NO: 3262321 - RNA, 19 nt, Artificial Sequence
  Description of Artificial Sequence: Synthetic oligonucleotide
aaaucaagaacagucaccu

SEQ ID NO: 3262322 - RNA, 19 nt, Artificial Sequence
  Description of Artificial Sequence: Synthetic oligonucleotide
accacuguugccaugaucc

SEQ ID NO: 3262323 - RNA, 19 nt, Artificial Sequence
  Description of Artificial Sequence: Synthetic oligonucleotide
auuauuuuccuacaugaca

SEQ ID NO: 3262324 - RNA, 19 nt, Artificial Sequence
  Description of Artificial Sequence: Synthetic oligonucleotide
uuauuuuccuacaugacau

SEQ ID NO: 3262325 - RNA, 19 nt, Artificial Sequence
  Description of Artificial Sequence: Synthetic oligonucleotide
agauaguucuguuugaugu

SEQ ID NO: 3262326 - RNA, 19 nt, Artificial Sequence
  Description of Artificial Sequence: Synthetic oligonucleotide
uguagauuuacgacaagca

SEQ ID NO: 3262327 - RNA, 19 nt, Artificial Sequence
  Description of Artificial Sequence: Synthetic oligonucleotide
ugcaguuguagucaucugg

SEQ ID NO: 3262328 - RNA, 19 nt, Artificial Sequence
  Description of Artificial Sequence: Synthetic oligonucleotide
uuggauuggaaacaaacgu

SEQ ID NO: 3262329 - RNA, 19 nt, Artificial Sequence
  Description of Artificial Sequence: Synthetic oligonucleotide
acaagcacuagauaaagcu

SEQ ID NO: 3262330 - RNA, 19 nt, Artificial Sequence
  Description of Artificial Sequence: Synthetic oligonucleotide
uagauuuacgacaagcacu

SEQ ID NO: 3262331 - RNA, 19 nt, Artificial Sequence
  Description of Artificial Sequence: Synthetic oligonucleotide
ucagcugacaaauaagaca

SEQ ID NO: 3262332 - RNA, 19 nt, Artificial Sequence
  Description of Artificial Sequence: Synthetic oligonucleotide
uguagugaagaacaccuug

SEQ ID NO: 3262333 - RNA, 19 nt, Artificial Sequence
  Description of Artificial Sequence: Synthetic oligonucleotide
uuugggaggauucaguuuc

SEQ ID NO: 3262334 - RNA, 19 nt, Artificial Sequence
  Description of Artificial Sequence: Synthetic oligonucleotide
accauuuucguuucucagc

SEQ ID NO: 3262335 - RNA, 19 nt, Artificial Sequence
  Description of Artificial Sequence: Synthetic oligonucleotide
uacaugacaucuuaaugag

SEQ ID NO: 3262336 - RNA, 19 nt, Artificial Sequence
  Description of Artificial Sequence: Synthetic oligonucleotide
uuuuauuccuaauuuggcu

SEQ ID NO: 3262337 - RNA, 19 nt, Artificial Sequence
  Description of Artificial Sequence: Synthetic oligonucleotide
uagauaaagcuccauuuug

SEQ ID NO: 3262338 - RNA, 19 nt, Artificial Sequence
  Description of Artificial Sequence: Synthetic oligonucleotide
uccauuuuggauuggaaac

SEQ ID NO: 3262339 - RNA, 19 nt, Artificial Sequence
  Description of Artificial Sequence: Synthetic oligonucleotide
cacaaacucuccuugaugc

SEQ ID NO: 3262340 - RNA, 19 nt, Artificial Sequence
  Description of Artificial Sequence: Synthetic oligonucleotide
uucuucauuauuaugcaaa

SEQ ID NO: 3262341 - RNA, 19 nt, Artificial Sequence
  Description of Artificial Sequence: Synthetic oligonucleotide
uacgacaagcacuagauaa

SEQ ID NO: 3262342 - RNA, 19 nt, Artificial Sequence
  Description of Artificial Sequence: Synthetic oligonucleotide
uuccagauaguucuguuug

SEQ ID NO: 3262343 - RNA, 19 nt, Artificial Sequence
  Description of Artificial Sequence: Synthetic oligonucleotide
auguagauuuacgacaagc

SEQ ID NO: 3262344 - RNA, 19 nt, Artificial Sequence
  Description of Artificial Sequence: Synthetic oligonucleotide
aucaagaacagucaccugu

SEQ ID NO: 3262345 - RNA, 19 nt, Artificial Sequence
  Description of Artificial Sequence: Synthetic oligonucleotide
aaagcuccauuuuggauug

SEQ ID NO: 3262346 - RNA, 19 nt, Artificial Sequence
  Description of Artificial Sequence: Synthetic oligonucleotide
cagcugacaaauaagacac

SEQ ID NO: 3262347 - RNA, 19 nt, Artificial Sequence
  Description of Artificial Sequence: Synthetic oligonucleotide
ucucagcugacaaauaaga

SEQ ID NO: 3262348 - RNA, 19 nt, Artificial Sequence
  Description of Artificial Sequence: Synthetic oligonucleotide
uaaagcuccauuuuggauu

SEQ ID NO: 3262349 - RNA, 19 nt, Artificial Sequence
  Description of Artificial Sequence: Synthetic oligonucleotide
cuacaugacaucuuaauga

SEQ ID NO: 3262350 - RNA, 19 nt, Artificial Sequence
  Description of Artificial Sequence: Synthetic oligonucleotide
gaugucacccauuuuacca

SEQ ID NO: 3262351 - RNA, 19 nt, Artificial Sequence
  Description of Artificial Sequence: Synthetic oligonucleotide
uaauuuggcuuucagcacu

SEQ ID NO: 3262352 - RNA, 19 nt, Artificial Sequence
  Description of Artificial Sequence: Synthetic oligonucleotide
uccuugcucaaguuggucg

SEQ ID NO: 3262353 - RNA, 19 nt, Artificial Sequence
  Description of Artificial Sequence: Synthetic oligonucleotide
caaaucaagaacagucacc

SEQ ID NO: 3262354 - RNA, 19 nt, Artificial Sequence
  Description of Artificial Sequence: Synthetic oligonucleotide
gugaagaacaccuugcuga

SEQ ID NO: 3262355 - RNA, 19 nt, Artificial Sequence
  Description of Artificial Sequence: Synthetic oligonucleotide
uuucuuacgacgucuguga

SEQ ID NO: 3262356 - RNA, 19 nt, Artificial Sequence
  Description of Artificial Sequence: Synthetic oligonucleotide
uuuauuccuaauuuggcuu

SEQ ID NO: 3262357 - RNA, 19 nt, Artificial Sequence
  Description of Artificial Sequence: Synthetic oligonucleotide
guagucaucuggaagagag

SEQ ID NO: 3262358 - RNA, 19 nt, Artificial Sequence
  Description of Artificial Sequence: Synthetic oligonucleotide
aucugguugagggauaggc

SEQ ID NO: 3262359 - RNA, 19 nt, Artificial Sequence
  Description of Artificial Sequence: Synthetic oligonucleotide
cuuacgacgucugugauac

SEQ ID NO: 3262360 - RNA, 19 nt, Artificial Sequence
  Description of Artificial Sequence: Synthetic oligonucleotide
gaguauguagauuuacgac

SEQ ID NO: 3262361 - RNA, 19 nt, Artificial Sequence
  Description of Artificial Sequence: Synthetic oligonucleotide
uauuauuuuccuacaugac

SEQ ID NO: 3262362 - RNA, 19 nt, Artificial Sequence
  Description of Artificial Sequence: Synthetic oligonucleotide
uaaugaguauaccauuuuc

SEQ ID NO: 3262363 - RNA, 19 nt, Artificial Sequence
  Description of Artificial Sequence: Synthetic oligonucleotide
auuuucguuucucagcuga

SEQ ID NO: 3262364 - RNA, 19 nt, Artificial Sequence
  Description of Artificial Sequence: Synthetic oligonucleotide
uucucagcugacaaauaag

SEQ ID NO: 3262365 - RNA, 19 nt, Artificial Sequence
  Description of Artificial Sequence: Synthetic oligonucleotide
acuagauaaagcuccauuu

SEQ ID NO: 3262366 - RNA, 19 nt, Artificial Sequence
  Description of Artificial Sequence: Synthetic oligonucleotide
gauaggcuugguauguucg

SEQ ID NO: 3262367 - RNA, 19 nt, Artificial Sequence
  Description of Artificial Sequence: Synthetic oligonucleotide
augaguauaccauuuucgu

SEQ ID NO: 3262368 - RNA, 19 nt, Artificial Sequence
  Description of Artificial Sequence: Synthetic oligonucleotide
aaagcgagcucuaccuugc

SEQ ID NO: 3262369 - RNA, 19 nt, Artificial Sequence
  Description of Artificial Sequence: Synthetic oligonucleotide
agauaaagcuccauuuugg

SEQ ID NO: 3262370 - RNA, 19 nt, Artificial Sequence
  Description of Artificial Sequence: Synthetic oligonucleotide
aguucuguuugaugucacc

SEQ ID NO: 3262371 - RNA, 19 nt, Artificial Sequence
  Description of Artificial Sequence: Synthetic oligonucleotide
aaacguuuccagauaguuc

SEQ ID NO: 3262372 - RNA, 19 nt, Artificial Sequence
  Description of Artificial Sequence: Synthetic oligonucleotide
uaucauggguccuugcuca

SEQ ID NO: 3262373 - RNA, 19 nt, Artificial Sequence
  Description of Artificial Sequence: Synthetic oligonucleotide
uccuaauuuggcuuucagc

SEQ ID NO: 3262374 - RNA, 19 nt, Artificial Sequence
  Description of Artificial Sequence: Synthetic oligonucleotide
ugguagcacacuauugucc

SEQ ID NO: 3262375 - RNA, 19 nt, Artificial Sequence
  Description of Artificial Sequence: Synthetic oligonucleotide
guagauuuacgacaagcac

SEQ ID NO: 3262376 - RNA, 19 nt, Artificial Sequence
  Description of Artificial Sequence: Synthetic oligonucleotide
augucacccauuuuaccac

SEQ ID NO: 3262377 - RNA, 19 nt, Artificial Sequence
  Description of Artificial Sequence: Synthetic oligonucleotide
auuuacgacaagcacuaga

SEQ ID NO: 3262378 - RNA, 19 nt, Artificial Sequence
  Description of Artificial Sequence: Synthetic oligonucleotide
caucggaugucaaagcgag

SEQ ID NO: 3262379 - RNA, 19 nt, Artificial Sequence
  Description of Artificial Sequence: Synthetic oligonucleotide
uuuaccacuguugccauga

SEQ ID NO: 3262380 - RNA, 19 nt, Artificial Sequence
  Description of Artificial Sequence: Synthetic oligonucleotide
acagucaccugucuuuggg

SEQ ID NO: 3262381 - RNA, 19 nt, Artificial Sequence
  Description of Artificial Sequence: Synthetic oligonucleotide
caucuuaaugaguauacca

SEQ ID NO: 3262382 - RNA, 19 nt, Artificial Sequence
  Description of Artificial Sequence: Synthetic oligonucleotide
acgggauguccacagaagg

SEQ ID NO: 3262383 - RNA, 19 nt, Artificial Sequence
  Description of Artificial Sequence: Synthetic oligonucleotide
ugucaaagcgagcucuacc

SEQ ID NO: 3262384 - RNA, 19 nt, Artificial Sequence
  Description of Artificial Sequence: Synthetic oligonucleotide
gauaaagcuccauuuugga

SEQ ID NO: 3262385 - RNA, 19 nt, Artificial Sequence
  Description of Artificial Sequence: Synthetic oligonucleotide
caugacaucuuaaugagua

SEQ ID NO: 3262386 - RNA, 19 nt, Artificial Sequence
  Description of Artificial Sequence: Synthetic oligonucleotide
ugcuccgcaaaucaagaac

SEQ ID NO: 3262387 - RNA, 19 nt, Artificial Sequence
  Description of Artificial Sequence: Synthetic oligonucleotide
cuugguauguucguacggg

SEQ ID NO: 3262388 - RNA, 19 nt, Artificial Sequence
  Description of Artificial Sequence: Synthetic oligonucleotide
ugagcuguucuaucauggg

SEQ ID NO: 3262389 - RNA, 19 nt, Artificial Sequence
  Description of Artificial Sequence: Synthetic oligonucleotide
uugaugucacccauuuuac

SEQ ID NO: 3262390 - RNA, 19 nt, Artificial Sequence
  Description of Artificial Sequence: Synthetic oligonucleotide
gaaacaaacguuuccagau

SEQ ID NO: 3262391 - RNA, 19 nt, Artificial Sequence
  Description of Artificial Sequence: Synthetic oligonucleotide
gacaucuuaaugaguauac

SEQ ID NO: 3262392 - RNA, 19 nt, Artificial Sequence
  Description of Artificial Sequence: Synthetic oligonucleotide
uaccauuuucguuucucag

SEQ ID NO: 3262393 - RNA, 19 nt, Artificial Sequence
  Description of Artificial Sequence: Synthetic oligonucleotide
ucaucuggaagagaggagu

SEQ ID NO: 3262394 - RNA, 19 nt, Artificial Sequence
  Description of Artificial Sequence: Synthetic oligonucleotide
ugccaugauccucaucagg

SEQ ID NO: 3262395 - RNA, 19 nt, Artificial Sequence
  Description of Artificial Sequence: Synthetic oligonucleotide
uguucguacgggaugucca

SEQ ID NO: 3262396 - RNA, 19 nt, Artificial Sequence
  Description of Artificial Sequence: Synthetic oligonucleotide
auaagacacaaacucuccu

SEQ ID NO: 3262397 - RNA, 19 nt, Artificial Sequence
  Description of Artificial Sequence: Synthetic oligonucleotide
ccuaauuuggcuuucagca

SEQ ID NO: 3262398 - RNA, 19 nt, Artificial Sequence
  Description of Artificial Sequence: Synthetic oligonucleotide
ucggaugucaaagcgagcu

SEQ ID NO: 3262399 - RNA, 19 nt, Artificial Sequence
  Description of Artificial Sequence: Synthetic oligonucleotide
ucuuaaugaguauaccauu

SEQ ID NO: 3262400 - RNA, 19 nt, Artificial Sequence
  Description of Artificial Sequence: Synthetic oligonucleotide
uggauuggaaacaaacguu

SEQ ID NO: 3262401 - RNA, 19 nt, Artificial Sequence
  Description of Artificial Sequence: Synthetic oligonucleotide
uguguuucuucauuauuau

SEQ ID NO: 3262402 - RNA, 19 nt, Artificial Sequence
  Description of Artificial Sequence: Synthetic oligonucleotide
agcuguucuaucauggguc

SEQ ID NO: 3262403 - RNA, 19 nt, Artificial Sequence
  Description of Artificial Sequence: Synthetic oligonucleotide
augcaaaauaucugguuga

SEQ ID NO: 3262404 - RNA, 19 nt, Artificial Sequence
  Description of Artificial Sequence: Synthetic oligonucleotide
uuaaugaguauaccauuuu

SEQ ID NO: 3262405 - RNA, 19 nt, Artificial Sequence
  Description of Artificial Sequence: Synthetic oligonucleotide
aauauaaucaucuaaguuc

SEQ ID NO: 3262406 - RNA, 19 nt, Artificial Sequence
  Description of Artificial Sequence: Synthetic oligonucleotide
ucuuauagcgcugugaccg

SEQ ID NO: 3262407 - RNA, 19 nt, Artificial Sequence
  Description of Artificial Sequence: Synthetic oligonucleotide
caucuuuagacucauaccg

SEQ ID NO: 3262408 - RNA, 19 nt, Artificial Sequence
  Description of Artificial Sequence: Synthetic oligonucleotide
aucaucuaaguucagaguc

SEQ ID NO: 3262409 - RNA, 19 nt, Artificial Sequence
  Description of Artificial Sequence: Synthetic oligonucleotide
aguucuuuauugcugcucc

SEQ ID NO: 3262410 - RNA, 19 nt, Artificial Sequence
  Description of Artificial Sequence: Synthetic oligonucleotide
uaaucaucuaaguucagag

SEQ ID NO: 3262411 - RNA, 19 nt, Artificial Sequence
  Description of Artificial Sequence: Synthetic oligonucleotide
cuggauuagguccagaugg

SEQ ID NO: 3262412 - RNA, 19 nt, Artificial Sequence
  Description of Artificial Sequence: Synthetic oligonucleotide
ucuuugacacccaaagggg

SEQ ID NO: 3262413 - RNA, 19 nt, Artificial Sequence
  Description of Artificial Sequence: Synthetic oligonucleotide
acauugaugaucauggcac

SEQ ID NO: 3262414 - RNA, 19 nt, Artificial Sequence
  Description of Artificial Sequence: Synthetic oligonucleotide
uggaagaccggcaacauga

SEQ ID NO: 3262415 - RNA, 19 nt, Artificial Sequence
  Description of Artificial Sequence: Synthetic oligonucleotide
uauaaccccagcaagccug

SEQ ID NO: 3262416 - RNA, 19 nt, Artificial Sequence
  Description of Artificial Sequence: Synthetic oligonucleotide
uaaguucagagucaagucu

SEQ ID NO: 3262417 - RNA, 19 nt, Artificial Sequence
  Description of Artificial Sequence: Synthetic oligonucleotide
agucaagucugccaccugc

SEQ ID NO: 3262418 - RNA, 19 nt, Artificial Sequence
  Description of Artificial Sequence: Synthetic oligonucleotide
cacaagaacaggaacacug

SEQ ID NO: 3262419 - RNA, 19 nt, Artificial Sequence
  Description of Artificial Sequence: Synthetic oligonucleotide
acaugaauucuguauugac

SEQ ID NO: 3262420 - RNA, 19 nt, Artificial Sequence
  Description of Artificial Sequence: Synthetic oligonucleotide
ucaccguucuuauaggucc

SEQ ID NO: 3262421 - RNA, 19 nt, Artificial Sequence
  Description of Artificial Sequence: Synthetic oligonucleotide
caugccaccucuuugacac

SEQ ID NO: 3262422 - RNA, 19 nt, Artificial Sequence
  Description of Artificial Sequence: Synthetic oligonucleotide
ugacauuugguucuuaaua

SEQ ID NO: 3262423 - RNA, 19 nt, Artificial Sequence
  Description of Artificial Sequence: Synthetic oligonucleotide
ugaggaugggucaauaagu

SEQ ID NO: 3262424 - RNA, 19 nt, Artificial Sequence
  Description of Artificial Sequence: Synthetic oligonucleotide
ucuguauugacauuugguu

SEQ ID NO: 3262425 - RNA, 19 nt, Artificial Sequence
  Description of Artificial Sequence: Synthetic oligonucleotide
aaucaucuaaguucagagu

SEQ ID NO: 3262426 - RNA, 19 nt, Artificial Sequence
  Description of Artificial Sequence: Synthetic oligonucleotide
agguacaugucaucguagc

SEQ ID NO: 3262427 - RNA, 19 nt, Artificial Sequence
  Description of Artificial Sequence: Synthetic oligonucleotide
auaguagccguuugucacc

SEQ ID NO: 3262428 - RNA, 19 nt, Artificial Sequence
  Description of Artificial Sequence: Synthetic oligonucleotide
ucugauccgagaccgaagc

SEQ ID NO: 3262429 - RNA, 19 nt, Artificial Sequence
  Description of Artificial Sequence: Synthetic oligonucleotide
uucuuauagguccugugga

SEQ ID NO: 3262430 - RNA, 19 nt, Artificial Sequence
  Description of Artificial Sequence: Synthetic oligonucleotide
ucugcaucaauauaaucau

SEQ ID NO: 3262431 - RNA, 19 nt, Artificial Sequence
  Description of Artificial Sequence: Synthetic oligonucleotide
uucuguauugacauuuggu

SEQ ID NO: 3262432 - RNA, 19 nt, Artificial Sequence
  Description of Artificial Sequence: Synthetic oligonucleotide
cuuaucacuggaaucuggc

SEQ ID NO: 3262433 - RNA, 19 nt, Artificial Sequence
  Description of Artificial Sequence: Synthetic oligonucleotide
ucauggauaggugugauaa

SEQ ID NO: 3262434 - RNA, 19 nt, Artificial Sequence
  Description of Artificial Sequence: Synthetic oligonucleotide
auauaaucaucuaaguuca

SEQ ID NO: 3262435 - RNA, 19 nt, Artificial Sequence
  Description of Artificial Sequence: Synthetic oligonucleotide
cauaguagccguuugucac

SEQ ID NO: 3262436 - RNA, 19 nt, Artificial Sequence
  Description of Artificial Sequence: Synthetic oligonucleotide
ucacagguacaugucaucg

SEQ ID NO: 3262437 - RNA, 19 nt, Artificial Sequence
  Description of Artificial Sequence: Synthetic oligonucleotide
aaaggggucaaagcgagcu

SEQ ID NO: 3262438 - RNA, 19 nt, Artificial Sequence
  Description of Artificial Sequence: Synthetic oligonucleotide
agcaaaugggcucagggga

SEQ ID NO: 3262439 - RNA, 19 nt, Artificial Sequence
  Description of Artificial Sequence: Synthetic oligonucleotide
gacugcaucggguggaggg

SEQ ID NO: 3262440 - RNA, 19 nt, Artificial Sequence
  Description of Artificial Sequence: Synthetic oligonucleotide
ucuuuagacucauaccgga

SEQ ID NO: 3262441 - RNA, 19 nt, Artificial Sequence
  Description of Artificial Sequence: Synthetic oligonucleotide
ucaucuaaguucagaguca

SEQ ID NO: 3262442 - RNA, 19 nt, Artificial Sequence
  Description of Artificial Sequence: Synthetic oligonucleotide
aggaugggucaauaagugc

SEQ ID NO: 3262443 - RNA, 19 nt, Artificial Sequence
  Description of Artificial Sequence: Synthetic oligonucleotide
gucaauaagugcucuuggg

SEQ ID NO: 3262444 - RNA, 19 nt, Artificial Sequence
  Description of Artificial Sequence: Synthetic oligonucleotide
auaagugcucuugggaagc

SEQ ID NO: 3262445 - RNA, 19 nt, Artificial Sequence
  Description of Artificial Sequence: Synthetic oligonucleotide
uguuacauucuugaggccu

SEQ ID NO: 3262446 - RNA, 19 nt, Artificial Sequence
  Description of Artificial Sequence: Synthetic oligonucleotide
auucuguauugacauuugg

SEQ ID NO: 3262447 - RNA, 19 nt, Artificial Sequence
  Description of Artificial Sequence: Synthetic oligonucleotide
uuauugcugcuccacuuag

SEQ ID NO: 3262448 - RNA, 19 nt, Artificial Sequence
  Description of Artificial Sequence: Synthetic oligonucleotide
ucgcuuugggcucuguccg

SEQ ID NO: 3262449 - RNA, 19 nt, Artificial Sequence
  Description of Artificial Sequence: Synthetic oligonucleotide
guucuuauagcgcugugac

SEQ ID NO: 3262450 - RNA, 19 nt, Artificial Sequence
  Description of Artificial Sequence: Synthetic oligonucleotide
uguggggaaggaaggaaag

SEQ ID NO: 3262451 - RNA, 19 nt, Artificial Sequence
  Description of Artificial Sequence: Synthetic oligonucleotide
cauaccggaggacauacag

SEQ ID NO: 3262452 - RNA, 19 nt, Artificial Sequence
  Description of Artificial Sequence: Synthetic oligonucleotide
gugcccaagacauaguagc

SEQ ID NO: 3262453 - RNA, 19 nt, Artificial Sequence
  Description of Artificial Sequence: Synthetic oligonucleotide
auaggugugauaauuccag

SEQ ID NO: 3262454 - RNA, 19 nt, Artificial Sequence
  Description of Artificial Sequence: Synthetic oligonucleotide
ugugcccaagacauaguag

SEQ ID NO: 3262455 - RNA, 19 nt, Artificial Sequence
  Description of Artificial Sequence: Synthetic oligonucleotide
aaggaaaggagcuggcaaa

SEQ ID NO: 3262456 - RNA, 19 nt, Artificial Sequence
  Description of Artificial Sequence: Synthetic oligonucleotide
gaagccagaucucagggga

SEQ ID NO: 3262457 - RNA, 19 nt, Artificial Sequence
  Description of Artificial Sequence: Synthetic oligonucleotide
cugaggaugggucaauaag

SEQ ID NO: 3262458 - RNA, 19 nt, Artificial Sequence
  Description of Artificial Sequence: Synthetic oligonucleotide
acuguucauggauaggugu

SEQ ID NO: 3262459 - RNA, 19 nt, Artificial Sequence
  Description of Artificial Sequence: Synthetic oligonucleotide
gaugggcuggucccaaugg

SEQ ID NO: 3262460 - RNA, 19 nt, Artificial Sequence
  Description of Artificial Sequence: Synthetic oligonucleotide
gagauguuacauucuugag

SEQ ID NO: 3262461 - RNA, 19 nt, Artificial Sequence
  Description of Artificial Sequence: Synthetic oligonucleotide
guuuugugcauuaacauaa

SEQ ID NO: 3262462 - RNA, 19 nt, Artificial Sequence
  Description of Artificial Sequence: Synthetic oligonucleotide
ucuucaccguucuuauagg

SEQ ID NO: 3262463 - RNA, 19 nt, Artificial Sequence
  Description of Artificial Sequence: Synthetic oligonucleotide
uggggauauaaccccagca

SEQ ID NO: 3262464 - RNA, 19 nt, Artificial Sequence
  Description of Artificial Sequence: Synthetic oligonucleotide
agccugcaaacacaugggc

SEQ ID NO: 3262465 - RNA, 19 nt, Artificial Sequence
  Description of Artificial Sequence: Synthetic oligonucleotide
guacaugucaucguagccc

SEQ ID NO: 3262466 - RNA, 19 nt, Artificial Sequence
  Description of Artificial Sequence: Synthetic oligonucleotide
cuuacacgagccuucuccc

SEQ ID NO: 3262467 - RNA, 19 nt, Artificial Sequence
  Description of Artificial Sequence: Synthetic oligonucleotide
ugauaauuccagaucugau

SEQ ID NO: 3262468 - RNA, 19 nt, Artificial Sequence
  Description of Artificial Sequence: Synthetic oligonucleotide
uuuauugcugcuccacuua

SEQ ID NO: 3262469 - RNA, 19 nt, Artificial Sequence
  Description of Artificial Sequence: Synthetic oligonucleotide
ucuccuugggaccuauaug

SEQ ID NO: 3262470 - RNA, 19 nt, Artificial Sequence
  Description of Artificial Sequence: Synthetic oligonucleotide
aagagcaagccgcgccgcc

SEQ ID NO: 3262471 - RNA, 19 nt, Artificial Sequence
  Description of Artificial Sequence: Synthetic oligonucleotide
ugugaccgggacugcaucg

SEQ ID NO: 3262472 - RNA, 19 nt, Artificial Sequence
  Description of Artificial Sequence: Synthetic oligonucleotide
uuggaaguggggaggagcu

SEQ ID NO: 3262473 - RNA, 19 nt, Artificial Sequence
  Description of Artificial Sequence: Synthetic oligonucleotide
uuugacacccaaagggguc

SEQ ID NO: 3262474 - RNA, 19 nt, Artificial Sequence
  Description of Artificial Sequence: Synthetic oligonucleotide
uauaaucaucuaaguucag

SEQ ID NO: 3262475 - RNA, 19 nt, Artificial Sequence
  Description of Artificial Sequence: Synthetic oligonucleotide
aggggucaaagcgagcucc

SEQ ID NO: 3262476 - RNA, 19 nt, Artificial Sequence
  Description of Artificial Sequence: Synthetic oligonucleotide
aacacaugggcagaauccu

SEQ ID NO: 3262477 - RNA, 19 nt, Artificial Sequence
  Description of Artificial Sequence: Synthetic oligonucleotide
aauucuguauugacauuug

SEQ ID NO: 3262478 - RNA, 19 nt, Artificial Sequence
  Description of Artificial Sequence: Synthetic oligonucleotide
agaauccucugcccugagc

SEQ ID NO: 3262479 - RNA, 19 nt, Artificial Sequence
  Description of Artificial Sequence: Synthetic oligonucleotide
caaagagcaagccgcgccg

SEQ ID NO: 3262480 - RNA, 19 nt, Artificial Sequence
  Description of Artificial Sequence: Synthetic oligonucleotide
auaaucaucuaaguucaga

SEQ ID NO: 3262481 - RNA, 19 nt, Artificial Sequence
  Description of Artificial Sequence: Synthetic oligonucleotide
cauggcacucuccacagac

SEQ ID NO: 3262482 - RNA, 19 nt, Artificial Sequence
  Description of Artificial Sequence: Synthetic oligonucleotide
uguucuuauagcgcuguga

SEQ ID NO: 3262483 - RNA, 19 nt, Artificial Sequence
  Description of Artificial Sequence: Synthetic oligonucleotide
cagcaaaugggcucagggg

SEQ ID NO: 3262484 - RNA, 19 nt, Artificial Sequence
  Description of Artificial Sequence: Synthetic oligonucleotide
auugacauuugguucuuaa

SEQ ID NO: 3262485 - RNA, 19 nt, Artificial Sequence
  Description of Artificial Sequence: Synthetic oligonucleotide
gaaggaaaggagcuggcaa

SEQ ID NO: 3262486 - RNA, 19 nt, Artificial Sequence
  Description of Artificial Sequence: Synthetic oligonucleotide
acauaguagccguuuguca

SEQ ID NO: 3262487 - RNA, 19 nt, Artificial Sequence
  Description of Artificial Sequence: Synthetic oligonucleotide
aaggggucaaagcgagcuc

SEQ ID NO: 3262488 - RNA, 19 nt, Artificial Sequence
  Description of Artificial Sequence: Synthetic oligonucleotide
gagagugcaagggaggcug

SEQ ID NO: 3262489 - RNA, 19 nt, Artificial Sequence
  Description of Artificial Sequence: Synthetic oligonucleotide
aggagagugcaagggaggc

SEQ ID NO: 3262490 - RNA, 19 nt, Artificial Sequence
  Description of Artificial Sequence: Synthetic oligonucleotide
ucgguucugacaagggcug

SEQ ID NO: 3262491 - RNA, 19 nt, Artificial Sequence
  Description of Artificial Sequence: Synthetic oligonucleotide
uccaggagagugcaaggga

SEQ ID NO: 3262492 - RNA, 19 nt, Artificial Sequence
  Description of Artificial Sequence: Synthetic oligonucleotide
gaggaugggucaauaagug

SEQ ID NO: 3262493 - RNA, 19 nt, Artificial Sequence
  Description of Artificial Sequence: Synthetic oligonucleotide
cuauaugcagcuggguggg

SEQ ID NO: 3262494 - RNA, 19 nt, Artificial Sequence
  Description of Artificial Sequence: Synthetic oligonucleotide
uucaccguucuuauagguc

SEQ ID NO: 3262495 - RNA, 19 nt, Artificial Sequence
  Description of Artificial Sequence: Synthetic oligonucleotide
uauguugccggagucuccc

SEQ ID NO: 3262496 - RNA, 19 nt, Artificial Sequence
  Description of Artificial Sequence: Synthetic oligonucleotide
aucuuuagacucauaccgg

SEQ ID NO: 3262497 - RNA, 19 nt, Artificial Sequence
  Description of Artificial Sequence: Synthetic oligonucleotide
aagccugcaaacacauggg

SEQ ID NO: 3262498 - RNA, 19 nt, Artificial Sequence
  Description of Artificial Sequence: Synthetic oligonucleotide
aaugcguucuguucuuaua

SEQ ID NO: 3262499 - RNA, 19 nt, Artificial Sequence
  Description of Artificial Sequence: Synthetic oligonucleotide
uggcaaagagcaagccgcg

SEQ ID NO: 3262500 - RNA, 19 nt, Artificial Sequence
  Description of Artificial Sequence: Synthetic oligonucleotide
aaaugcguucuguucuuau

SEQ ID NO: 3262501 - RNA, 19 nt, Artificial Sequence
  Description of Artificial Sequence: Synthetic oligonucleotide
cuguucauggauaggugug

SEQ ID NO: 3262502 - RNA, 19 nt, Artificial Sequence
  Description of Artificial Sequence: Synthetic oligonucleotide
ugagggaauccggaguggg

SEQ ID NO: 3262503 - RNA, 19 nt, Artificial Sequence
  Description of Artificial Sequence: Synthetic oligonucleotide
gcuuacacgagccuucucc

SEQ ID NO: 3262504 - RNA, 19 nt, Artificial Sequence
  Description of Artificial Sequence: Synthetic oligonucleotide
ugcccaagacauaguagcc

SEQ ID NO: 3262505 - RNA, 19 nt, Artificial Sequence
  Description of Artificial Sequence: Synthetic oligonucleotide
aaaaucaacguuuugcagc

SEQ ID NO: 3262506 - RNA, 19 nt, Artificial Sequence
  Description of Artificial Sequence: Synthetic oligonucleotide
uaucauacaaaauauauac

SEQ ID NO: 3262507 - RNA, 19 nt, Artificial Sequence
  Description of Artificial Sequence: Synthetic oligonucleotide
aauacuuuaggauccagca

SEQ ID NO: 3262508 - RNA, 19 nt, Artificial Sequence
  Description of Artificial Sequence: Synthetic oligonucleotide
acaaguaaagcuucgaauc

SEQ ID NO: 3262509 - RNA, 19 nt, Artificial Sequence
  Description of Artificial Sequence: Synthetic oligonucleotide
uauacaacaacauuaacuu

SEQ ID NO: 3262510 - RNA, 19 nt, Artificial Sequence
  Description of Artificial Sequence: Synthetic oligonucleotide
agcaaaaucaacguuuugc

SEQ ID NO: 3262511 - RNA, 19 nt, Artificial Sequence
  Description of Artificial Sequence: Synthetic oligonucleotide
ugucaaaugacuaauggaa

SEQ ID NO: 3262512 - RNA, 19 nt, Artificial Sequence
  Description of Artificial Sequence: Synthetic oligonucleotide
ugaagaaauucucugcuag

SEQ ID NO: 3262513 - RNA, 19 nt, Artificial Sequence
  Description of Artificial Sequence: Synthetic oligonucleotide
uuaagcacaaauuuaucug

SEQ ID NO: 3262514 - RNA, 19 nt, Artificial Sequence
  Description of Artificial Sequence: Synthetic oligonucleotide
gaaauucucugcuagaaac

SEQ ID NO: 3262515 - RNA, 19 nt, Artificial Sequence
  Description of Artificial Sequence: Synthetic oligonucleotide
uuuaaugaggguaucgcug

SEQ ID NO: 3262516 - RNA, 19 nt, Artificial Sequence
  Description of Artificial Sequence: Synthetic oligonucleotide
uauagaaaggugcucuggg

SEQ ID NO: 3262517 - RNA, 19 nt, Artificial Sequence
  Description of Artificial Sequence: Synthetic oligonucleotide
aucuuuaaaacauacugcu

SEQ ID NO: 3262518 - RNA, 19 nt, Artificial Sequence
  Description of Artificial Sequence: Synthetic oligonucleotide
ucaacaucccaaaacuggg

SEQ ID NO: 3262519 - RNA, 19 nt, Artificial Sequence
  Description of Artificial Sequence: Synthetic oligonucleotide
ucguauuugaacuuuuacc

SEQ ID NO: 3262520 - RNA, 19 nt, Artificial Sequence
  Description of Artificial Sequence: Synthetic oligonucleotide
uuaaugaggguaucgcugg

SEQ ID NO: 3262521 - RNA, 19 nt, Artificial Sequence
  Description of Artificial Sequence: Synthetic oligonucleotide
guaauauagaucaagccag

SEQ ID NO: 3262522 - RNA, 19 nt, Artificial Sequence
  Description of Artificial Sequence: Synthetic oligonucleotide
uugacuuucaguguccugg

SEQ ID NO: 3262523 - RNA, 19 nt, Artificial Sequence
  Description of Artificial Sequence: Synthetic oligonucleotide
uuuuaccagguucuguugg

SEQ ID NO: 3262524 - RNA, 19 nt, Artificial Sequence
  Description of Artificial Sequence: Synthetic oligonucleotide
aaaucaacguuuugcagca

SEQ ID NO: 3262525 - RNA, 19 nt, Artificial Sequence
  Description of Artificial Sequence: Synthetic oligonucleotide
aggucauuuacacaaaaug

SEQ ID NO: 3262526 - RNA, 19 nt, Artificial Sequence
  Description of Artificial Sequence: Synthetic oligonucleotide
cucaacaucccaaaacugg

SEQ ID NO: 3262527 - RNA, 19 nt, Artificial Sequence
  Description of Artificial Sequence: Synthetic oligonucleotide
gaucaagccaguccaaggg

SEQ ID NO: 3262528 - RNA, 19 nt, Artificial Sequence
  Description of Artificial Sequence: Synthetic oligonucleotide
auauacaacaacauuaacu

SEQ ID NO: 3262529 - RNA, 19 nt, Artificial Sequence
  Description of Artificial Sequence: Synthetic oligonucleotide
uuaggauccagcaaaacuu

SEQ ID NO: 3262530 - RNA, 19 nt, Artificial Sequence
  Description of Artificial Sequence: Synthetic oligonucleotide
uuguauauuaaaguaauau

SEQ ID NO: 3262531 - RNA, 19 nt, Artificial Sequence
  Description of Artificial Sequence: Synthetic oligonucleotide
aaagaaguauacacuuagc

SEQ ID NO: 3262532 - RNA, 19 nt, Artificial Sequence
  Description of Artificial Sequence: Synthetic oligonucleotide
auacaugauagucagggcu

SEQ ID NO: 3262533 - RNA, 19 nt, Artificial Sequence
  Description of Artificial Sequence: Synthetic oligonucleotide
ucuaucucugggcagaaac

SEQ ID NO: 3262534 - RNA, 19 nt, Artificial Sequence
  Description of Artificial Sequence: Synthetic oligonucleotide
aacuaagucauucacuguu

SEQ ID NO: 3262535 - RNA, 19 nt, Artificial Sequence
  Description of Artificial Sequence: Synthetic oligonucleotide
aauguauucugguuaacuu

SEQ ID NO: 3262536 - RNA, 19 nt, Artificial Sequence
  Description of Artificial Sequence: Synthetic oligonucleotide
aacuuuacuuucuuugcca

SEQ ID NO: 3262537 - RNA, 19 nt, Artificial Sequence
  Description of Artificial Sequence: Synthetic oligonucleotide
ucucugaaguuuuaccagg

SEQ ID NO: 3262538 - RNA, 19 nt, Artificial Sequence
  Description of Artificial Sequence: Synthetic oligonucleotide
uuaucauacaaaauauaua

SEQ ID NO: 3262539 - RNA, 19 nt, Artificial Sequence
  Description of Artificial Sequence: Synthetic oligonucleotide
aggguaauuuuacgcaugc

SEQ ID NO: 3262540 - RNA, 19 nt, Artificial Sequence
  Description of Artificial Sequence: Synthetic oligonucleotide
ucuguacauguuaacacug

SEQ ID NO: 3262541 - RNA, 19 nt, Artificial Sequence
  Description of Artificial Sequence: Synthetic oligonucleotide
aaacggaaucucugaauuc

SEQ ID NO: 3262542 - RNA, 19 nt, Artificial Sequence
  Description of Artificial Sequence: Synthetic oligonucleotide
cacauugaauuuaucauac

SEQ ID NO: 3262543 - RNA, 19 nt, Artificial Sequence
  Description of Artificial Sequence: Synthetic oligonucleotide
uaacuuuacuuucuuugcc

SEQ ID NO: 3262544 - RNA, 19 nt, Artificial Sequence
  Description of Artificial Sequence: Synthetic oligonucleotide
uaaaacauacugcuuuaac

SEQ ID NO: 3262545 - RNA, 19 nt, Artificial Sequence
  Description of Artificial Sequence: Synthetic oligonucleotide
acuaauggaaggcucaggu

SEQ ID NO: 3262546 - RNA, 19 nt, Artificial Sequence
  Description of Artificial Sequence: Synthetic oligonucleotide
ucucugggcagaaacauga

SEQ ID NO: 3262547 - RNA, 19 nt, Artificial Sequence
  Description of Artificial Sequence: Synthetic oligonucleotide
cugaaugcuguguagguag

SEQ ID NO: 3262548 - RNA, 19 nt, Artificial Sequence
  Description of Artificial Sequence: Synthetic oligonucleotide
uuuacuuucuuugccagga

SEQ ID NO: 3262549 - RNA, 19 nt, Artificial Sequence
  Description of Artificial Sequence: Synthetic oligonucleotide
cuugccuucaucugucugg

SEQ ID NO: 3262550 - RNA, 19 nt, Artificial Sequence
  Description of Artificial Sequence: Synthetic oligonucleotide
ucaucaacucccuugacau

SEQ ID NO: 3262551 - RNA, 19 nt, Artificial Sequence
  Description of Artificial Sequence: Synthetic oligonucleotide
uucucugaaguuuuaccag

SEQ ID NO: 3262552 - RNA, 19 nt, Artificial Sequence
  Description of Artificial Sequence: Synthetic oligonucleotide
ucauauagaaaggugcucu

SEQ ID NO: 3262553 - RNA, 19 nt, Artificial Sequence
  Description of Artificial Sequence: Synthetic oligonucleotide
auguagacguccuuugggg

SEQ ID NO: 3262554 - RNA, 19 nt, Artificial Sequence
  Description of Artificial Sequence: Synthetic oligonucleotide
ucaugugaggcucuuuagc

SEQ ID NO: 3262555 - RNA, 19 nt, Artificial Sequence
  Description of Artificial Sequence: Synthetic oligonucleotide
uacuagcacuggaagaagg

SEQ ID NO: 3262556 - RNA, 19 nt, Artificial Sequence
  Description of Artificial Sequence: Synthetic oligonucleotide
aaaagaugacaggugccac

SEQ ID NO: 3262557 - RNA, 19 nt, Artificial Sequence
  Description of Artificial Sequence: Synthetic oligonucleotide
uccaauuacugaaagggua

SEQ ID NO: 3262558 - RNA, 19 nt, Artificial Sequence
  Description of Artificial Sequence: Synthetic oligonucleotide
uguauucugguuaacuuuu

SEQ ID NO: 3262559 - RNA, 19 nt, Artificial Sequence
  Description of Artificial Sequence: Synthetic oligonucleotide
aacggaaucucugaauucu

SEQ ID NO: 3262560 - RNA, 19 nt, Artificial Sequence
  Description of Artificial Sequence: Synthetic oligonucleotide
uaaaagagcugaaugucau

SEQ ID NO: 3262561 - RNA, 19 nt, Artificial Sequence
  Description of Artificial Sequence: Synthetic oligonucleotide
caauacuuuaggauccagc

SEQ ID NO: 3262562 - RNA, 19 nt, Artificial Sequence
  Description of Artificial Sequence: Synthetic oligonucleotide
ugaauucuccaauuacuga

SEQ ID NO: 3262563 - RNA, 19 nt, Artificial Sequence
  Description of Artificial Sequence: Synthetic oligonucleotide
caaaacugggaguaauccc

SEQ ID NO: 3262564 - RNA, 19 nt, Artificial Sequence
  Description of Artificial Sequence: Synthetic oligonucleotide
agaucaagccaguccaagg

SEQ ID NO: 3262565 - RNA, 19 nt, Artificial Sequence
  Description of Artificial Sequence: Synthetic oligonucleotide
uuuugcuucuaauuucaac

SEQ ID NO: 3262566 - RNA, 19 nt, Artificial Sequence
  Description of Artificial Sequence: Synthetic oligonucleotide
aacguuuugcagcacacua

SEQ ID NO: 3262567 - RNA, 19 nt, Artificial Sequence
  Description of Artificial Sequence: Synthetic oligonucleotide
ugauggauuguauauuaaa

SEQ ID NO: 3262568 - RNA, 19 nt, Artificial Sequence
  Description of Artificial Sequence: Synthetic oligonucleotide
uuuaaaacauacugcuuua

SEQ ID NO: 3262569 - RNA, 19 nt, Artificial Sequence
  Description of Artificial Sequence: Synthetic oligonucleotide
acuuuacuuucuuugccag

SEQ ID NO: 3262570 - RNA, 19 nt, Artificial Sequence
  Description of Artificial Sequence: Synthetic oligonucleotide
aaggugguuuugcuauugg

SEQ ID NO: 3262571 - RNA, 19 nt, Artificial Sequence
  Description of Artificial Sequence: Synthetic oligonucleotide
caaaaucaacguuuugcag

SEQ ID NO: 3262572 - RNA, 19 nt, Artificial Sequence
  Description of Artificial Sequence: Synthetic oligonucleotide
uuuauacacauugaauuua

SEQ ID NO: 3262573 - RNA, 19 nt, Artificial Sequence
  Description of Artificial Sequence: Synthetic oligonucleotide
uaucacaguguaauauaga

SEQ ID NO: 3262574 - RNA, 19 nt, Artificial Sequence
  Description of Artificial Sequence: Synthetic oligonucleotide
gauacaugauagucagggc

SEQ ID NO: 3262575 - RNA, 19 nt, Artificial Sequence
  Description of Artificial Sequence: Synthetic oligonucleotide
uacgcaugcuuccauaaaa

SEQ ID NO: 3262576 - RNA, 19 nt, Artificial Sequence
  Description of Artificial Sequence: Synthetic oligonucleotide
cugaaguuuuaccagguuc

SEQ ID NO: 3262577 - RNA, 19 nt, Artificial Sequence
  Description of Artificial Sequence: Synthetic oligonucleotide
aguuuuaccagguucuguu

SEQ ID NO: 3262578 - RNA, 19 nt, Artificial Sequence
  Description of Artificial Sequence: Synthetic oligonucleotide
augaggguaucgcuggagg

SEQ ID NO: 3262579 - RNA, 19 nt, Artificial Sequence
  Description of Artificial Sequence: Synthetic oligonucleotide
aguagcucauccugaaaug

SEQ ID NO: 3262580 - RNA, 19 nt, Artificial Sequence
  Description of Artificial Sequence: Synthetic oligonucleotide
cauugaauuuaucauacaa

SEQ ID NO: 3262581 - RNA, 19 nt, Artificial Sequence
  Description of Artificial Sequence: Synthetic oligonucleotide
ucuggaucacaaguaaagc

SEQ ID NO: 3262582 - RNA, 19 nt, Artificial Sequence
  Description of Artificial Sequence: Synthetic oligonucleotide
acacauugaauuuaucaua

SEQ ID NO: 3262583 - RNA, 19 nt, Artificial Sequence
  Description of Artificial Sequence: Synthetic oligonucleotide
auauagaaaggugcucugg

SEQ ID NO: 3262584 - RNA, 19 nt, Artificial Sequence
  Description of Artificial Sequence: Synthetic oligonucleotide
auuacugaaaggguaauuu

SEQ ID NO: 3262585 - RNA, 19 nt, Artificial Sequence
  Description of Artificial Sequence: Synthetic oligonucleotide
ugagucuucagagucauuu

SEQ ID NO: 3262586 - RNA, 19 nt, Artificial Sequence
  Description of Artificial Sequence: Synthetic oligonucleotide
auugaauuuaucauacaaa

SEQ ID NO: 3262587 - RNA, 19 nt, Artificial Sequence
  Description of Artificial Sequence: Synthetic oligonucleotide
auuauuucgcaaauugacu

SEQ ID NO: 3262588 - RNA, 19 nt, Artificial Sequence
  Description of Artificial Sequence: Synthetic oligonucleotide
cuuuacuuucuuugccagg

SEQ ID NO: 3262589 - RNA, 19 nt, Artificial Sequence
  Description of Artificial Sequence: Synthetic oligonucleotide
aauuuuacgcaugcuucca

SEQ ID NO: 3262590 - RNA, 19 nt, Artificial Sequence
  Description of Artificial Sequence: Synthetic oligonucleotide
ucaacguuuugcagcacac

SEQ ID NO: 3262591 - RNA, 19 nt, Artificial Sequence
  Description of Artificial Sequence: Synthetic oligonucleotide
cuuaagcacaaauuuaucu

SEQ ID NO: 3262592 - RNA, 19 nt, Artificial Sequence
  Description of Artificial Sequence: Synthetic oligonucleotide
gaguauuuggaauguuuca

SEQ ID NO: 3262593 - RNA, 19 nt, Artificial Sequence
  Description of Artificial Sequence: Synthetic oligonucleotide
cauuaggccgcugaggaag

SEQ ID NO: 3262594 - RNA, 19 nt, Artificial Sequence
  Description of Artificial Sequence: Synthetic oligonucleotide
gaugacaggugccacuuca

SEQ ID NO: 3262595 - RNA, 19 nt, Artificial Sequence
  Description of Artificial Sequence: Synthetic oligonucleotide
ucgcaaauugacuuucagu

SEQ ID NO: 3262596 - RNA, 19 nt, Artificial Sequence
  Description of Artificial Sequence: Synthetic oligonucleotide
aauuagccgaacagcaaug

SEQ ID NO: 3262597 - RNA, 19 nt, Artificial Sequence
  Description of Artificial Sequence: Synthetic oligonucleotide
aaaugggugaacaucugaa

SEQ ID NO: 3262598 - RNA, 19 nt, Artificial Sequence
  Description of Artificial Sequence: Synthetic oligonucleotide
auuuucuucucuccguuau

SEQ ID NO: 3262599 - RNA, 19 nt, Artificial Sequence
  Description of Artificial Sequence: Synthetic oligonucleotide
ucugauugauggauuguau

SEQ ID NO: 3262600 - RNA, 19 nt, Artificial Sequence
  Description of Artificial Sequence: Synthetic oligonucleotide
ugcaacagugcucuucggu

SEQ ID NO: 3262601 - RNA, 19 nt, Artificial Sequence
  Description of Artificial Sequence: Synthetic oligonucleotide
uacaugauagucagggcuu

SEQ ID NO: 3262602 - RNA, 19 nt, Artificial Sequence
  Description of Artificial Sequence: Synthetic oligonucleotide
cucguauuugaacuuuuac

SEQ ID NO: 3262603 - RNA, 19 nt, Artificial Sequence
  Description of Artificial Sequence: Synthetic oligonucleotide
agucaagcugcccagguau

SEQ ID NO: 3262604 - RNA, 19 nt, Artificial Sequence
  Description of Artificial Sequence: Synthetic oligonucleotide
gaaggcucagguccugggg

SEQ ID NO: 3262605 - RNA, 19 nt, Artificial Sequence
  Description of Artificial Sequence: Synthetic oligonucleotide
aaguauuccauauaccugg

SEQ ID NO: 3262606 - RNA, 19 nt, Artificial Sequence
  Description of Artificial Sequence: Synthetic oligonucleotide
uaaacaaauuugaagacag

SEQ ID NO: 3262607 - RNA, 19 nt, Artificial Sequence
  Description of Artificial Sequence: Synthetic oligonucleotide
aauucuauacgccacagga

SEQ ID NO: 3262608 - RNA, 19 nt, Artificial Sequence
  Description of Artificial Sequence: Synthetic oligonucleotide
aaauucuacuuccggagcc

SEQ ID NO: 3262609 - RNA, 19 nt, Artificial Sequence
  Description of Artificial Sequence: Synthetic oligonucleotide
aagaacucauucuugauug

SEQ ID NO: 3262610 - RNA, 19 nt, Artificial Sequence
  Description of Artificial Sequence: Synthetic oligonucleotide
ucuucuuuaaccuccacag

SEQ ID NO: 3262611 - RNA, 19 nt, Artificial Sequence
  Description of Artificial Sequence: Synthetic oligonucleotide
ucuuucuugguccuaaggg

SEQ ID NO: 3262612 - RNA, 19 nt, Artificial Sequence
  Description of Artificial Sequence: Synthetic oligonucleotide
uaacacauaaucaaugcgc

SEQ ID NO: 3262613 - RNA, 19 nt, Artificial Sequence
  Description of Artificial Sequence: Synthetic oligonucleotide
ucuauuaacacccauugaa

SEQ ID NO: 3262614 - RNA, 19 nt, Artificial Sequence
  Description of Artificial Sequence: Synthetic oligonucleotide
gaguaaacaaauuugaaga

SEQ ID NO: 3262615 - RNA, 19 nt, Artificial Sequence
  Description of Artificial Sequence: Synthetic oligonucleotide
uaagaaacauuccaauggg

SEQ ID NO: 3262616 - RNA, 19 nt, Artificial Sequence
  Description of Artificial Sequence: Synthetic oligonucleotide
gaaauuuguaauuaggauc

SEQ ID NO: 3262617 - RNA, 19 nt, Artificial Sequence
  Description of Artificial Sequence: Synthetic oligonucleotide
uuuaguaucuucuuucuug

SEQ ID NO: 3262618 - RNA, 19 nt, Artificial Sequence
  Description of Artificial Sequence: Synthetic oligonucleotide
uugguuuacucuuaagucg

SEQ ID NO: 3262619 - RNA, 19 nt, Artificial Sequence
  Description of Artificial Sequence: Synthetic oligonucleotide
auugguucaauucuauacg

SEQ ID NO: 3262620 - RNA, 19 nt, Artificial Sequence
  Description of Artificial Sequence: Synthetic oligonucleotide
aacuugacaaaacuaaagu

SEQ ID NO: 3262621 - RNA, 19 nt, Artificial Sequence
  Description of Artificial Sequence: Synthetic oligonucleotide
gacaguaaagaacucagag

SEQ ID NO: 3262622 - RNA, 19 nt, Artificial Sequence
  Description of Artificial Sequence: Synthetic oligonucleotide
uaaaggcugaucaaggaag

SEQ ID NO: 3262623 - RNA, 19 nt, Artificial Sequence
  Description of Artificial Sequence: Synthetic oligonucleotide
aagucguuaacaauucugc

SEQ ID NO: 3262624 - RNA, 19 nt, Artificial Sequence
  Description of Artificial Sequence: Synthetic oligonucleotide
aacaagaguaaacaaauuu

SEQ ID NO: 3262625 - RNA, 19 nt, Artificial Sequence
  Description of Artificial Sequence: Synthetic oligonucleotide
uguaacacauaaucaaugc

SEQ ID NO: 3262626 - RNA, 19 nt, Artificial Sequence
  Description of Artificial Sequence: Synthetic oligonucleotide
uuaguaucuucuuucuugg

SEQ ID NO: 3262627 - RNA, 19 nt, Artificial Sequence
  Description of Artificial Sequence: Synthetic oligonucleotide
ucauugaaacucucaaugg

SEQ ID NO: 3262628 - RNA, 19 nt, Artificial Sequence
  Description of Artificial Sequence: Synthetic oligonucleotide
aaagcaaauaaguauucau

SEQ ID NO: 3262629 - RNA, 19 nt, Artificial Sequence
  Description of Artificial Sequence: Synthetic oligonucleotide
uaaugaacccuuuucacug

SEQ ID NO: 3262630 - RNA, 19 nt, Artificial Sequence
  Description of Artificial Sequence: Synthetic oligonucleotide
uauuaagcagccacagacg

SEQ ID NO: 3262631 - RNA, 19 nt, Artificial Sequence
  Description of Artificial Sequence: Synthetic oligonucleotide
aacuuucucuuucucaaag

SEQ ID NO: 3262632 - RNA, 19 nt, Artificial Sequence
  Description of Artificial Sequence: Synthetic oligonucleotide
uaagucguuaacaauucug

SEQ ID NO: 3262633 - RNA, 19 nt, Artificial Sequence
  Description of Artificial Sequence: Synthetic oligonucleotide
caacaguucuuaaugaacc

SEQ ID NO: 3262634 - RNA, 19 nt, Artificial Sequence
  Description of Artificial Sequence: Synthetic oligonucleotide
uaccucuugaagcagaugu

SEQ ID NO: 3262635 - RNA, 19 nt, Artificial Sequence
  Description of Artificial Sequence: Synthetic oligonucleotide
cucaaagacaguaaagaac

SEQ ID NO: 3262636 - RNA, 19 nt, Artificial Sequence
  Description of Artificial Sequence: Synthetic oligonucleotide
ucaaauucuucuuaauccu

SEQ ID NO: 3262637 - RNA, 19 nt, Artificial Sequence
  Description of Artificial Sequence: Synthetic oligonucleotide
guaacacauaaucaaugcg

SEQ ID NO: 3262638 - RNA, 19 nt, Artificial Sequence
  Description of Artificial Sequence: Synthetic oligonucleotide
ugcaggacgagacauagcu

SEQ ID NO: 3262639 - RNA, 19 nt, Artificial Sequence
  Description of Artificial Sequence: Synthetic oligonucleotide
agagcugcagcaauaagcc

SEQ ID NO: 3262640 - RNA, 19 nt, Artificial Sequence
  Description of Artificial Sequence: Synthetic oligonucleotide
ucguuaacaauucugcuaa

SEQ ID NO: 3262641 - RNA, 19 nt, Artificial Sequence
  Description of Artificial Sequence: Synthetic oligonucleotide
cauugaaacucucaauggg

SEQ ID NO: 3262642 - RNA, 19 nt, Artificial Sequence
  Description of Artificial Sequence: Synthetic oligonucleotide
uuaaugaacccuuuucacu

SEQ ID NO: 3262643 - RNA, 19 nt, Artificial Sequence
  Description of Artificial Sequence: Synthetic oligonucleotide
gacaaaacuaaaguauucc

SEQ ID NO: 3262644 - RNA, 19 nt, Artificial Sequence
  Description of Artificial Sequence: Synthetic oligonucleotide
caggacgagacauagcugg

SEQ ID NO: 3262645 - RNA, 19 nt, Artificial Sequence
  Description of Artificial Sequence: Synthetic oligonucleotide
uucuucuuaauccucggac

SEQ ID NO: 3262646 - RNA, 19 nt, Artificial Sequence
  Description of Artificial Sequence: Synthetic oligonucleotide
uguacuuugguuuacucuu

SEQ ID NO: 3262647 - RNA, 19 nt, Artificial Sequence
  Description of Artificial Sequence: Synthetic oligonucleotide
caaugggagauccaaaggc

SEQ ID NO: 3262648 - RNA, 19 nt, Artificial Sequence
  Description of Artificial Sequence: Synthetic oligonucleotide
cacauaaucaaugcgcugg

SEQ ID NO: 3262649 - RNA, 19 nt, Artificial Sequence
  Description of Artificial Sequence: Synthetic oligonucleotide
uucuauacgccacaggauc

SEQ ID NO: 3262650 - RNA, 19 nt, Artificial Sequence
  Description of Artificial Sequence: Synthetic oligonucleotide
uccaaugggagauccaaag

SEQ ID NO: 3262651 - RNA, 19 nt, Artificial Sequence
  Description of Artificial Sequence: Synthetic oligonucleotide
aagccuguggguuucagga

SEQ ID NO: 3262652 - RNA, 19 nt, Artificial Sequence
  Description of Artificial Sequence: Synthetic oligonucleotide
uguaaggcaggguauggag

SEQ ID NO: 3262653 - RNA, 19 nt, Artificial Sequence
  Description of Artificial Sequence: Synthetic oligonucleotide
uuuuacagacaccugccca

SEQ ID NO: 3262654 - RNA, 19 nt, Artificial Sequence
  Description of Artificial Sequence: Synthetic oligonucleotide
ugucucugaagcuuguaag

SEQ ID NO: 3262655 - RNA, 19 nt, Artificial Sequence
  Description of Artificial Sequence: Synthetic oligonucleotide
acaaaacuaaaguauucca

SEQ ID NO: 3262656 - RNA, 19 nt, Artificial Sequence
  Description of Artificial Sequence: Synthetic oligonucleotide
acaagaguaaacaaauuug

SEQ ID NO: 3262657 - RNA, 19 nt, Artificial Sequence
  Description of Artificial Sequence: Synthetic oligonucleotide
caaguuguucuucaagucc

SEQ ID NO: 3262658 - RNA, 19 nt, Artificial Sequence
  Description of Artificial Sequence: Synthetic oligonucleotide
acauaaucaaugcgcuggc

SEQ ID NO: 3262659 - RNA, 19 nt, Artificial Sequence
  Description of Artificial Sequence: Synthetic oligonucleotide
caacuugacaaaacuaaag

SEQ ID NO: 3262660 - RNA, 19 nt, Artificial Sequence
  Description of Artificial Sequence: Synthetic oligonucleotide
ugguuuguaguugagccgg

SEQ ID NO: 3262661 - RNA, 19 nt, Artificial Sequence
  Description of Artificial Sequence: Synthetic oligonucleotide
gcagcaauaagccuguggg

SEQ ID NO: 3262662 - RNA, 19 nt, Artificial Sequence
  Description of Artificial Sequence: Synthetic oligonucleotide
auugauuggaagcucuucu

SEQ ID NO: 3262663 - RNA, 19 nt, Artificial Sequence
  Description of Artificial Sequence: Synthetic oligonucleotide
gaucaaggaagauacccug

SEQ ID NO: 3262664 - RNA, 19 nt, Artificial Sequence
  Description of Artificial Sequence: Synthetic oligonucleotide
cuucuucuaauguugguac

SEQ ID NO: 3262665 - RNA, 19 nt, Artificial Sequence
  Description of Artificial Sequence: Synthetic oligonucleotide
ucaacauucccacauugau

SEQ ID NO: 3262666 - RNA, 19 nt, Artificial Sequence
  Description of Artificial Sequence: Synthetic oligonucleotide
aaacauuccaaugggagau

SEQ ID NO: 3262667 - RNA, 19 nt, Artificial Sequence
  Description of Artificial Sequence: Synthetic oligonucleotide
ugaucaaggaagauacccu

SEQ ID NO: 3262668 - RNA, 19 nt, Artificial Sequence
  Description of Artificial Sequence: Synthetic oligonucleotide
agcaaguuguucuucaagu

SEQ ID NO: 3262669 - RNA, 19 nt, Artificial Sequence
  Description of Artificial Sequence: Synthetic oligonucleotide
uugacaaaacuaaaguauu

SEQ ID NO: 3262670 - RNA, 19 nt, Artificial Sequence
  Description of Artificial Sequence: Synthetic oligonucleotide
guagaucucuuugagaacc

SEQ ID NO: 3262671 - RNA, 19 nt, Artificial Sequence
  Description of Artificial Sequence: Synthetic oligonucleotide
ggaacuucucaguagauug

SEQ ID NO: 3262672 - RNA, 19 nt, Artificial Sequence
  Description of Artificial Sequence: Synthetic oligonucleotide
uuacaagaacucauucuug

SEQ ID NO: 3262673 - RNA, 19 nt, Artificial Sequence
  Description of Artificial Sequence: Synthetic oligonucleotide
uuuucacugucaauauccc

SEQ ID NO: 3262674 - RNA, 19 nt, Artificial Sequence
  Description of Artificial Sequence: Synthetic oligonucleotide
ccuauuuuacuguaaaggc

SEQ ID NO: 3262675 - RNA, 19 nt, Artificial Sequence
  Description of Artificial Sequence: Synthetic oligonucleotide
auacucauccugguaaagc

SEQ ID NO: 3262676 - RNA, 19 nt, Artificial Sequence
  Description of Artificial Sequence: Synthetic oligonucleotide
ugcagcaauaagccugugg

SEQ ID NO: 3262677 - RNA, 19 nt, Artificial Sequence
  Description of Artificial Sequence: Synthetic oligonucleotide
aguguccauauuaagcagc

SEQ ID NO: 3262678 - RNA, 19 nt, Artificial Sequence
  Description of Artificial Sequence: Synthetic oligonucleotide
aaauuugaagacagcaacu

SEQ ID NO: 3262679 - RNA, 19 nt, Artificial Sequence
  Description of Artificial Sequence: Synthetic oligonucleotide
cuuuguaaagcaaauaagu

SEQ ID NO: 3262680 - RNA, 19 nt, Artificial Sequence
  Description of Artificial Sequence: Synthetic oligonucleotide
ucucaaagacaguaaagaa

SEQ ID NO: 3262681 - RNA, 19 nt, Artificial Sequence
  Description of Artificial Sequence: Synthetic oligonucleotide
acuguaaaggcugaucaag

SEQ ID NO: 3262682 - RNA, 19 nt, Artificial Sequence
  Description of Artificial Sequence: Synthetic oligonucleotide
uaagcagccacagacgggc

SEQ ID NO: 3262683 - RNA, 19 nt, Artificial Sequence
  Description of Artificial Sequence: Synthetic oligonucleotide
ucaguagauugcucgggcg

SEQ ID NO: 3262684 - RNA, 19 nt, Artificial Sequence
  Description of Artificial Sequence: Synthetic oligonucleotide
uguaaaggcugaucaagga

SEQ ID NO: 3262685 - RNA, 19 nt, Artificial Sequence
  Description of Artificial Sequence: Synthetic oligonucleotide
uggaagcucuucuuuaacc

SEQ ID NO: 3262686 - RNA, 19 nt, Artificial Sequence
  Description of Artificial Sequence: Synthetic oligonucleotide
uucaauucuauacgccaca

SEQ ID NO: 3262687 - RNA, 19 nt, Artificial Sequence
  Description of Artificial Sequence: Synthetic oligonucleotide
cuguaacacauaaucaaug

SEQ ID NO: 3262688 - RNA, 19 nt, Artificial Sequence
  Description of Artificial Sequence: Synthetic oligonucleotide
uuuacucuuaagucguuaa

SEQ ID NO: 3262689 - RNA, 19 nt, Artificial Sequence
  Description of Artificial Sequence: Synthetic oligonucleotide
ucucucaguucuaagugca

SEQ ID NO: 3262690 - RNA, 19 nt, Artificial Sequence
  Description of Artificial Sequence: Synthetic oligonucleotide
aacacauaaucaaugcgcu

SEQ ID NO: 3262691 - RNA, 19 nt, Artificial Sequence
  Description of Artificial Sequence: Synthetic oligonucleotide
ugacaaaacuaaaguauuc

SEQ ID NO: 3262692 - RNA, 19 nt, Artificial Sequence
  Description of Artificial Sequence: Synthetic oligonucleotide
gaaacauuccaaugggaga

SEQ ID NO: 3262693 - RNA, 19 nt, Artificial Sequence
  Description of Artificial Sequence: Synthetic oligonucleotide
aaaccuuugcaugugggga

SEQ ID NO: 3262694 - RNA, 19 nt, Artificial Sequence
  Description of Artificial Sequence: Synthetic oligonucleotide
aauuugaagacagcaacuu

SEQ ID NO: 3262695 - RNA, 19 nt, Artificial Sequence
  Description of Artificial Sequence: Synthetic oligonucleotide
agcuguuuaccucuugaag

SEQ ID NO: 3262696 - RNA, 19 nt, Artificial Sequence
  Description of Artificial Sequence: Synthetic oligonucleotide
acuugacaaaacuaaagua

SEQ ID NO: 3262697 - RNA, 19 nt, Artificial Sequence
  Description of Artificial Sequence: Synthetic oligonucleotide
uacgccacaggaucaaaag

SEQ ID NO: 3262698 - RNA, 19 nt, Artificial Sequence
  Description of Artificial Sequence: Synthetic oligonucleotide
uuguacuuugguuuacucu

SEQ ID NO: 3262699 - RNA, 19 nt, Artificial Sequence
  Description of Artificial Sequence: Synthetic oligonucleotide
auucaacauucccacauug

SEQ ID NO: 3262700 - RNA, 19 nt, Artificial Sequence
  Description of Artificial Sequence: Synthetic oligonucleotide
uucuugauuguacuuuggu

SEQ ID NO: 3262701 - RNA, 19 nt, Artificial Sequence
  Description of Artificial Sequence: Synthetic oligonucleotide
uucaacauucccacauuga

SEQ ID NO: 3262702 - RNA, 19 nt, Artificial Sequence
  Description of Artificial Sequence: Synthetic oligonucleotide
ucucugaacccgauucagg

SEQ ID NO: 3262703 - RNA, 19 nt, Artificial Sequence
  Description of Artificial Sequence: Synthetic oligonucleotide
gauugcucgggcguggugg

SEQ ID NO: 3262704 - RNA, 19 nt, Artificial Sequence
  Description of Artificial Sequence: Synthetic oligonucleotide
uuuacagacaccugcccaa

SEQ ID NO: 3262705 - RNA, 19 nt, Artificial Sequence
  Description of Artificial Sequence: Synthetic oligonucleotide
agucaugcugacuucaucc

SEQ ID NO: 3262706 - RNA, 19 nt, Artificial Sequence
  Description of Artificial Sequence: Synthetic oligonucleotide
augaagacgauccagaaga

SEQ ID NO: 3262707 - RNA, 19 nt, Artificial Sequence
  Description of Artificial Sequence: Synthetic oligonucleotide
guaguaaccagugacauag

SEQ ID NO: 3262708 - RNA, 19 nt, Artificial Sequence
  Description of Artificial Sequence: Synthetic oligonucleotide
auuuauuugcacuugugca

SEQ ID NO: 3262709 - RNA, 19 nt, Artificial Sequence
  Description of Artificial Sequence: Synthetic oligonucleotide
aguaaccagugacauagcc

SEQ ID NO: 3262710 - RNA, 19 nt, Artificial Sequence
  Description of Artificial Sequence: Synthetic oligonucleotide
aaugggacagcauuuauuu

SEQ ID NO: 3262711 - RNA, 19 nt, Artificial Sequence
  Description of Artificial Sequence: Synthetic oligonucleotide
aagacgauccagaagagag

SEQ ID NO: 3262712 - RNA, 19 nt, Artificial Sequence
  Description of Artificial Sequence: Synthetic oligonucleotide
uaaccagugacauagccca

SEQ ID NO: 3262713 - RNA, 19 nt, Artificial Sequence
  Description of Artificial Sequence: Synthetic oligonucleotide
agugacauagcccaagaug

SEQ ID NO: 3262714 - RNA, 19 nt, Artificial Sequence
  Description of Artificial Sequence: Synthetic oligonucleotide
uuuauuugcacuugugcac

SEQ ID NO: 3262715 - RNA, 19 nt, Artificial Sequence
  Description of Artificial Sequence: Synthetic oligonucleotide
ugggacagcauuuauuugc

SEQ ID NO: 3262716 - RNA, 19 nt, Artificial Sequence
  Description of Artificial Sequence: Synthetic oligonucleotide
cauuuauuugcacuugugc

SEQ ID NO: 3262717 - RNA, 19 nt, Artificial Sequence
  Description of Artificial Sequence: Synthetic oligonucleotide
agccacuccacccagcacc

SEQ ID NO: 3262718 - RNA, 19 nt, Artificial Sequence
  Description of Artificial Sequence: Synthetic oligonucleotide
uagcccaagaugaagacga

SEQ ID NO: 3262719 - RNA, 19 nt, Artificial Sequence
  Description of Artificial Sequence: Synthetic oligonucleotide
agcaccuucauggcgaucc

SEQ ID NO: 3262720 - RNA, 19 nt, Artificial Sequence
  Description of Artificial Sequence: Synthetic oligonucleotide
uuauuugcacuugugcacg

SEQ ID NO: 3262721 - RNA, 19 nt, Artificial Sequence
  Description of Artificial Sequence: Synthetic oligonucleotide
agaagagagccacuccacc

SEQ ID NO: 3262722 - RNA, 19 nt, Artificial Sequence
  Description of Artificial Sequence: Synthetic oligonucleotide
auagcaugaggccuccucg

SEQ ID NO: 3262723 - RNA, 19 nt, Artificial Sequence
  Description of Artificial Sequence: Synthetic oligonucleotide
uuugcacuugugcacguag

SEQ ID NO: 3262724 - RNA, 19 nt, Artificial Sequence
  Description of Artificial Sequence: Synthetic oligonucleotide
gaugaagacgauccagaag

SEQ ID NO: 3262725 - RNA, 19 nt, Artificial Sequence
  Description of Artificial Sequence: Synthetic oligonucleotide
ucaugcugacuucaucccg

SEQ ID NO: 3262726 - RNA, 19 nt, Artificial Sequence
  Description of Artificial Sequence: Synthetic oligonucleotide
gaagagagccacuccaccc

SEQ ID NO: 3262727 - RNA, 19 nt, Artificial Sequence
  Description of Artificial Sequence: Synthetic oligonucleotide
uucauggcgauccccagcu

SEQ ID NO: 3262728 - RNA, 19 nt, Artificial Sequence
  Description of Artificial Sequence: Synthetic oligonucleotide
cuggacauggcagucaugc

SEQ ID NO: 3262729 - RNA, 19 nt, Artificial Sequence
  Description of Artificial Sequence: Synthetic oligonucleotide
caugcugacuucaucccgg

SEQ ID NO: 3262730 - RNA, 19 nt, Artificial Sequence
  Description of Artificial Sequence: Synthetic oligonucleotide
cacaguuucugggagagcc

SEQ ID NO: 3262731 - RNA, 19 nt, Artificial Sequence
  Description of Artificial Sequence: Synthetic oligonucleotide
gacgauccagaagagagcc

SEQ ID NO: 3262732 - RNA, 19 nt, Artificial Sequence
  Description of Artificial Sequence: Synthetic oligonucleotide
aagagagccacuccaccca

SEQ ID NO: 3262733 - RNA, 19 nt, Artificial Sequence
  Description of Artificial Sequence: Synthetic oligonucleotide
aagaugaagacgauccaga

SEQ ID NO: 3262734 - RNA, 19 nt, Artificial Sequence
  Description of Artificial Sequence: Synthetic oligonucleotide
guggacaccgcucuccugg

SEQ ID NO: 3262735 - RNA, 19 nt, Artificial Sequence
  Description of Artificial Sequence: Synthetic oligonucleotide
cccaagaugaagacgaucc

SEQ ID NO: 3262736 - RNA, 19 nt, Artificial Sequence
  Description of Artificial Sequence: Synthetic oligonucleotide
gugacauagcccaagauga

SEQ ID NO: 3262737 - RNA, 19 nt, Artificial Sequence
  Description of Artificial Sequence: Synthetic oligonucleotide
acagcauuuauuugcacuu

SEQ ID NO: 3262738 - RNA, 19 nt, Artificial Sequence
  Description of Artificial Sequence: Synthetic oligonucleotide
auggcagucaugcugacuu

SEQ ID NO: 3262739 - RNA, 19 nt, Artificial Sequence
  Description of Artificial Sequence: Synthetic oligonucleotide
ugcuguggaccugaggugg

SEQ ID NO: 3262740 - RNA, 19 nt, Artificial Sequence
  Description of Artificial Sequence: Synthetic oligonucleotide
cacuugugcacguaguaac

SEQ ID NO: 3262741 - RNA, 19 nt, Artificial Sequence
  Description of Artificial Sequence: Synthetic oligonucleotide
ugaagacgauccagaagag

SEQ ID NO: 3262742 - RNA, 19 nt, Artificial Sequence
  Description of Artificial Sequence: Synthetic oligonucleotide
acuugugcacguaguaacc

SEQ ID NO: 3262743 - RNA, 19 nt, Artificial Sequence
  Description of Artificial Sequence: Synthetic oligonucleotide
caagaugaagacgauccag

SEQ ID NO: 3262744 - RNA, 19 nt, Artificial Sequence
  Description of Artificial Sequence: Synthetic oligonucleotide
uugugcacguaguaaccag

SEQ ID NO: 3262745 - RNA, 19 nt, Artificial Sequence
  Description of Artificial Sequence: Synthetic oligonucleotide
ccacccagcaccuucaugg

SEQ ID NO: 3262746 - RNA, 19 nt, Artificial Sequence
  Description of Artificial Sequence: Synthetic oligonucleotide
guaaccagugacauagccc

SEQ ID NO: 3262747 - RNA, 19 nt, Artificial Sequence
  Description of Artificial Sequence: Synthetic oligonucleotide
caugaggccuccucggugc

SEQ ID NO: 3262748 - RNA, 19 nt, Artificial Sequence
  Description of Artificial Sequence: Synthetic oligonucleotide
gacauagcccaagaugaag

SEQ ID NO: 3262749 - RNA, 19 nt, Artificial Sequence
  Description of Artificial Sequence: Synthetic oligonucleotide
ugugcacguaguaaccagu

SEQ ID NO: 3262750 - RNA, 19 nt, Artificial Sequence
  Description of Artificial Sequence: Synthetic oligonucleotide
agcauuuauuugcacuugu

SEQ ID NO: 3262751 - RNA, 19 nt, Artificial Sequence
  Description of Artificial Sequence: Synthetic oligonucleotide
ucggugcuggacauggcag

SEQ ID NO: 3262752 - RNA, 19 nt, Artificial Sequence
  Description of Artificial Sequence: Synthetic oligonucleotide
gauagcaugaggccuccuc

SEQ ID NO: 3262753 - RNA, 19 nt, Artificial Sequence
  Description of Artificial Sequence: Synthetic oligonucleotide
ugggacugcaugcugugga

SEQ ID NO: 3262754 - RNA, 19 nt, Artificial Sequence
  Description of Artificial Sequence: Synthetic oligonucleotide
auagcccaagaugaagacg

SEQ ID NO: 3262755 - RNA, 19 nt, Artificial Sequence
  Description of Artificial Sequence: Synthetic oligonucleotide
uagcaugaggccuccucgg

SEQ ID NO: 3262756 - RNA, 19 nt, Artificial Sequence
  Description of Artificial Sequence: Synthetic oligonucleotide
uccagaagagagccacucc

SEQ ID NO: 3262757 - RNA, 19 nt, Artificial Sequence
  Description of Artificial Sequence: Synthetic oligonucleotide
ugcuguaguggacaccgcu

SEQ ID NO: 3262758 - RNA, 19 nt, Artificial Sequence
  Description of Artificial Sequence: Synthetic oligonucleotide
uccucggugcuggacaugg

SEQ ID NO: 3262759 - RNA, 19 nt, Artificial Sequence
  Description of Artificial Sequence: Synthetic oligonucleotide
cauagcccaagaugaagac

SEQ ID NO: 3262760 - RNA, 19 nt, Artificial Sequence
  Description of Artificial Sequence: Synthetic oligonucleotide
gacagcauuuauuugcacu

SEQ ID NO: 3262761 - RNA, 19 nt, Artificial Sequence
  Description of Artificial Sequence: Synthetic oligonucleotide
ugucccaccugcuguagug

SEQ ID NO: 3262762 - RNA, 19 nt, Artificial Sequence
  Description of Artificial Sequence: Synthetic oligonucleotide
agacgauccagaagagagc

SEQ ID NO: 3262763 - RNA, 19 nt, Artificial Sequence
  Description of Artificial Sequence: Synthetic oligonucleotide
cugacuucaucccggcugc

SEQ ID NO: 3262764 - RNA, 19 nt, Artificial Sequence
  Description of Artificial Sequence: Synthetic oligonucleotide
ugcgauagcaugaggccuc

SEQ ID NO: 3262765 - RNA, 19 nt, Artificial Sequence
  Description of Artificial Sequence: Synthetic oligonucleotide
uucugggagagccugcgau

SEQ ID NO: 3262766 - RNA, 19 nt, Artificial Sequence
  Description of Artificial Sequence: Synthetic oligonucleotide
caugcuguggaccugaggu

SEQ ID NO: 3262767 - RNA, 19 nt, Artificial Sequence
  Description of Artificial Sequence: Synthetic oligonucleotide
gucaugcugacuucauccc

SEQ ID NO: 3262768 - RNA, 19 nt, Artificial Sequence
  Description of Artificial Sequence: Synthetic oligonucleotide
cucuccugggacugcaugc

SEQ ID NO: 3262769 - RNA, 19 nt, Artificial Sequence
  Description of Artificial Sequence: Synthetic oligonucleotide
agaugaagacgauccagaa

SEQ ID NO: 3262770 - RNA, 19 nt, Artificial Sequence
  Description of Artificial Sequence: Synthetic oligonucleotide
auccagaagagagccacuc

SEQ ID NO: 3262771 - RNA, 19 nt, Artificial Sequence
  Description of Artificial Sequence: Synthetic oligonucleotide
agcacaguuucugggagag

SEQ ID NO: 3262772 - RNA, 19 nt, Artificial Sequence
  Description of Artificial Sequence: Synthetic oligonucleotide
acuucaucccggcugcugu

SEQ ID NO: 3262773 - RNA, 19 nt, Artificial Sequence
  Description of Artificial Sequence: Synthetic oligonucleotide
augcugacuucaucccggc

SEQ ID NO: 3262774 - RNA, 19 nt, Artificial Sequence
  Description of Artificial Sequence: Synthetic oligonucleotide
ugcacguaguaaccaguga

SEQ ID NO: 3262775 - RNA, 19 nt, Artificial Sequence
  Description of Artificial Sequence: Synthetic oligonucleotide
ggacauggcagucaugcug

SEQ ID NO: 3262776 - RNA, 19 nt, Artificial Sequence
  Description of Artificial Sequence: Synthetic oligonucleotide
gagagccugcgauagcaug

SEQ ID NO: 3262777 - RNA, 19 nt, Artificial Sequence
  Description of Artificial Sequence: Synthetic oligonucleotide
gacauggcagucaugcuga

SEQ ID NO: 3262778 - RNA, 19 nt, Artificial Sequence
  Description of Artificial Sequence: Synthetic oligonucleotide
acauagcccaagaugaaga

SEQ ID NO: 3262779 - RNA, 19 nt, Artificial Sequence
  Description of Artificial Sequence: Synthetic oligonucleotide
ugcacuugugcacguagua

SEQ ID NO: 3262780 - RNA, 19 nt, Artificial Sequence
  Description of Artificial Sequence: Synthetic oligonucleotide
gcugacuucaucccggcug

SEQ ID NO: 3262781 - RNA, 19 nt, Artificial Sequence
  Description of Artificial Sequence: Synthetic oligonucleotide
cugcuguugucccaccugc

SEQ ID NO: 3262782 - RNA, 19 nt, Artificial Sequence
  Description of Artificial Sequence: Synthetic oligonucleotide
guuucugggagagccugcg

SEQ ID NO: 3262783 - RNA, 19 nt, Artificial Sequence
  Description of Artificial Sequence: Synthetic oligonucleotide
agagccacuccacccagca

SEQ ID NO: 3262784 - RNA, 19 nt, Artificial Sequence
  Description of Artificial Sequence: Synthetic oligonucleotide
cauggcgauccccagcuug

SEQ ID NO: 3262785 - RNA, 19 nt, Artificial Sequence
  Description of Artificial Sequence: Synthetic oligonucleotide
gacaccgcucuccugggac

SEQ ID NO: 3262786 - RNA, 19 nt, Artificial Sequence
  Description of Artificial Sequence: Synthetic oligonucleotide
auggcgauccccagcuugc

SEQ ID NO: 3262787 - RNA, 19 nt, Artificial Sequence
  Description of Artificial Sequence: Synthetic oligonucleotide
ugacauagcccaagaugaa

SEQ ID NO: 3262788 - RNA, 19 nt, Artificial Sequence
  Description of Artificial Sequence: Synthetic oligonucleotide
gcacguaguaaccagugac

SEQ ID NO: 3262789 - RNA, 19 nt, Artificial Sequence
  Description of Artificial Sequence: Synthetic oligonucleotide
uccugggacugcaugcugu

SEQ ID NO: 3262790 - RNA, 19 nt, Artificial Sequence
  Description of Artificial Sequence: Synthetic oligonucleotide
cagaagagagccacuccac

SEQ ID NO: 3262791 - RNA, 19 nt, Artificial Sequence
  Description of Artificial Sequence: Synthetic oligonucleotide
aucccggcugcuguugucc

SEQ ID NO: 3262792 - RNA, 19 nt, Artificial Sequence
  Description of Artificial Sequence: Synthetic oligonucleotide
cuucauggcgauccccagc

SEQ ID NO: 3262793 - RNA, 19 nt, Artificial Sequence
  Description of Artificial Sequence: Synthetic oligonucleotide
cacguaguaaccagugaca

SEQ ID NO: 3262794 - RNA, 19 nt, Artificial Sequence
  Description of Artificial Sequence: Synthetic oligonucleotide
uugcacuugugcacguagu

SEQ ID NO: 3262795 - RNA, 19 nt, Artificial Sequence
  Description of Artificial Sequence: Synthetic oligonucleotide
augggacagcauuuauuug

SEQ ID NO: 3262796 - RNA, 19 nt, Artificial Sequence
  Description of Artificial Sequence: Synthetic oligonucleotide
ccugcuguaguggacaccg

SEQ ID NO: 3262797 - RNA, 19 nt, Artificial Sequence
  Description of Artificial Sequence: Synthetic oligonucleotide
agagagccacuccacccag

SEQ ID NO: 3262798 - RNA, 19 nt, Artificial Sequence
  Description of Artificial Sequence: Synthetic oligonucleotide
cuugcccgagcacaguuuc

SEQ ID NO: 3262799 - RNA, 19 nt, Artificial Sequence
  Description of Artificial Sequence: Synthetic oligonucleotide
guaguggacaccgcucucc

SEQ ID NO: 3262800 - RNA, 19 nt, Artificial Sequence
  Description of Artificial Sequence: Synthetic oligonucleotide
aguuucugggagagccugc

SEQ ID NO: 3262801 - RNA, 19 nt, Artificial Sequence
  Description of Artificial Sequence: Synthetic oligonucleotide
acccagcaccuucauggcg

SEQ ID NO: 3262802 - RNA, 19 nt, Artificial Sequence
  Description of Artificial Sequence: Synthetic oligonucleotide
uaguaaccagugacauagc

SEQ ID NO: 3262803 - RNA, 19 nt, Artificial Sequence
  Description of Artificial Sequence: Synthetic oligonucleotide
ugcuggacauggcagucau

SEQ ID NO: 3262804 - RNA, 19 nt, Artificial Sequence
  Description of Artificial Sequence: Synthetic oligonucleotide
gaggccuccucggugcugg

SEQ ID NO: 3262805 - RNA, 19 nt, Artificial Sequence
  Description of Artificial Sequence: Synthetic oligonucleotide
aaugguguagcccucacca

SEQ ID NO: 3262806 - RNA, 19 nt, Artificial Sequence
  Description of Artificial Sequence: Synthetic oligonucleotide
ugaucucucccucaggucg

SEQ ID NO: 3262807 - RNA, 19 nt, Artificial Sequence
  Description of Artificial Sequence: Synthetic oligonucleotide
ugagagauuuuguagagcu

SEQ ID NO: 3262808 - RNA, 19 nt, Artificial Sequence
  Description of Artificial Sequence: Synthetic oligonucleotide
acugcagucacuuugggga

SEQ ID NO: 3262809 - RNA, 19 nt, Artificial Sequence
  Description of Artificial Sequence: Synthetic oligonucleotide
cuuugugacccucagaaag

SEQ ID NO: 3262810 - RNA, 19 nt, Artificial Sequence
  Description of Artificial Sequence: Synthetic oligonucleotide
aaaugguguagcccucacc

SEQ ID NO: 3262811 - RNA, 19 nt, Artificial Sequence
  Description of Artificial Sequence: Synthetic oligonucleotide
ucuguugucacuucucagc

SEQ ID NO: 3262812 - RNA, 19 nt, Artificial Sequence
  Description of Artificial Sequence: Synthetic oligonucleotide
agaaaguccugucugcuuc

SEQ ID NO: 3262813 - RNA, 19 nt, Artificial Sequence
  Description of Artificial Sequence: Synthetic oligonucleotide
gaugcucuuguguagcagg

SEQ ID NO: 3262814 - RNA, 19 nt, Artificial Sequence
  Description of Artificial Sequence: Synthetic oligonucleotide
cuugcaaugguccaccuug

SEQ ID NO: 3262815 - RNA, 19 nt, Artificial Sequence
  Description of Artificial Sequence: Synthetic oligonucleotide
uccuucaaugcauugaagu

SEQ ID NO: 3262816 - RNA, 19 nt, Artificial Sequence
  Description of Artificial Sequence: Synthetic oligonucleotide
auugaagucaugccucagg

SEQ ID NO: 3262817 - RNA, 19 nt, Artificial Sequence
  Description of Artificial Sequence: Synthetic oligonucleotide
ucugagagauuuuguagag

SEQ ID NO: 3262818 - RNA, 19 nt, Artificial Sequence
  Description of Artificial Sequence: Synthetic oligonucleotide
auguacuugucauacagga

SEQ ID NO: 3262819 - RNA, 19 nt, Artificial Sequence
  Description of Artificial Sequence: Synthetic oligonucleotide
aggacugugccauugaggu

SEQ ID NO: 3262820 - RNA, 19 nt, Artificial Sequence
  Description of Artificial Sequence: Synthetic oligonucleotide
ucugcuucaaugcccuggg

SEQ ID NO: 3262821 - RNA, 19 nt, Artificial Sequence
  Description of Artificial Sequence: Synthetic oligonucleotide
ugccauagcagucugucug

SEQ ID NO: 3262822 - RNA, 19 nt, Artificial Sequence
  Description of Artificial Sequence: Synthetic oligonucleotide
uguuuuguguuguuguugu

SEQ ID NO: 3262823 - RNA, 19 nt, Artificial Sequence
  Description of Artificial Sequence: Synthetic oligonucleotide
uuuguguuguuguuguugu

SEQ ID NO: 3262824 - RNA, 19 nt, Artificial Sequence
  Description of Artificial Sequence: Synthetic oligonucleotide
cuggcuucgacaaauggug

SEQ ID NO: 3262825 - RNA, 19 nt, Artificial Sequence
  Description of Artificial Sequence: Synthetic oligonucleotide
ucuagucuggcuucgacaa

SEQ ID NO: 3262826 - RNA, 19 nt, Artificial Sequence
  Description of Artificial Sequence: Synthetic oligonucleotide
ugcaggaucucuagucugg

SEQ ID NO: 3262827 - RNA, 19 nt, Artificial Sequence
  Description of Artificial Sequence: Synthetic oligonucleotide
uguguuguuguuguuguug

SEQ ID NO: 3262828 - RNA, 19 nt, Artificial Sequence
  Description of Artificial Sequence: Synthetic oligonucleotide
caaugcauugaagucaugc

SEQ ID NO: 3262829 - RNA, 19 nt, Artificial Sequence
  Description of Artificial Sequence: Synthetic oligonucleotide
auaauccgugaucucuccc

SEQ ID NO: 3262830 - RNA, 19 nt, Artificial Sequence
  Description of Artificial Sequence: Synthetic oligonucleotide
aauccgugaucucucccuc

SEQ ID NO: 3262831 - RNA, 19 nt, Artificial Sequence
  Description of Artificial Sequence: Synthetic oligonucleotide
uguggaugugucauagaug

SEQ ID NO: 3262832 - RNA, 19 nt, Artificial Sequence
  Description of Artificial Sequence: Synthetic oligonucleotide
ugcauugaagucaugccuc

SEQ ID NO: 3262833 - RNA, 19 nt, Artificial Sequence
  Description of Artificial Sequence: Synthetic oligonucleotide
agcugcaggaucucuaguc

SEQ ID NO: 3262834 - RNA, 19 nt, Artificial Sequence
  Description of Artificial Sequence: Synthetic oligonucleotide
gccacuuacccuuagaggc

SEQ ID NO: 3262835 - RNA, 19 nt, Artificial Sequence
  Description of Artificial Sequence: Synthetic oligonucleotide
uugucauacaggacugugc

SEQ ID NO: 3262836 - RNA, 19 nt, Artificial Sequence
  Description of Artificial Sequence: Synthetic oligonucleotide
uuugugacccucagaaagu

SEQ ID NO: 3262837 - RNA, 19 nt, Artificial Sequence
  Description of Artificial Sequence: Synthetic oligonucleotide
guugucacuucucagcuac

SEQ ID NO: 3262838 - RNA, 19 nt, Artificial Sequence
  Description of Artificial Sequence: Synthetic oligonucleotide
cucauguccuccuucaaug

SEQ ID NO: 3262839 - RNA, 19 nt, Artificial Sequence
  Description of Artificial Sequence: Synthetic oligonucleotide
uuggccucaugccauagca

SEQ ID NO: 3262840 - RNA, 19 nt, Artificial Sequence
  Description of Artificial Sequence: Synthetic oligonucleotide
uucaaugcauugaagucau

SEQ ID NO: 3262841 - RNA, 19 nt, Artificial Sequence
  Description of Artificial Sequence: Synthetic oligonucleotide
ucgcucagcacucgcaggg

SEQ ID NO: 3262842 - RNA, 19 nt, Artificial Sequence
  Description of Artificial Sequence: Synthetic oligonucleotide
aaugguccaccuuggccuc

SEQ ID NO: 3262843 - RNA, 19 nt, Artificial Sequence
  Description of Artificial Sequence: Synthetic oligonucleotide
gauguacuugucauacagg

SEQ ID NO: 3262844 - RNA, 19 nt, Artificial Sequence
  Description of Artificial Sequence: Synthetic oligonucleotide
caugccucaggucauggcc

SEQ ID NO: 3262845 - RNA, 19 nt, Artificial Sequence
  Description of Artificial Sequence: Synthetic oligonucleotide
cagcuugccuuucagaagc

SEQ ID NO: 3262846 - RNA, 19 nt, Artificial Sequence
  Description of Artificial Sequence: Synthetic oligonucleotide
uagaugguguaguugcuca

SEQ ID NO: 3262847 - RNA, 19 nt, Artificial Sequence
  Description of Artificial Sequence: Synthetic oligonucleotide
ucggguucuauaauccgug

SEQ ID NO: 3262848 - RNA, 19 nt, Artificial Sequence
  Description of Artificial Sequence: Synthetic oligonucleotide
uguagagcuccguuguggc

SEQ ID NO: 3262849 - RNA, 19 nt, Artificial Sequence
  Description of Artificial Sequence: Synthetic oligonucleotide
ucucuguugucacuucuca

SEQ ID NO: 3262850 - RNA, 19 nt, Artificial Sequence
  Description of Artificial Sequence: Synthetic oligonucleotide
ucacuuuggggaagugacg

SEQ ID NO: 3262851 - RNA, 19 nt, Artificial Sequence
  Description of Artificial Sequence: Synthetic oligonucleotide
uuguuguuguuguuguucu

SEQ ID NO: 3262852 - RNA, 19 nt, Artificial Sequence
  Description of Artificial Sequence: Synthetic oligonucleotide
ugugccauugagguucacg

SEQ ID NO: 3262853 - RNA, 19 nt, Artificial Sequence
  Description of Artificial Sequence: Synthetic oligonucleotide
uaauccgugaucucucccu

SEQ ID NO: 3262854 - RNA, 19 nt, Artificial Sequence
  Description of Artificial Sequence: Synthetic oligonucleotide
uucugagucucugagagau

SEQ ID NO: 3262855 - RNA, 19 nt, Artificial Sequence
  Description of Artificial Sequence: Synthetic oligonucleotide
uuguuguuguuguuguugu

SEQ ID NO: 3262856 - RNA, 19 nt, Artificial Sequence
  Description of Artificial Sequence: Synthetic oligonucleotide
guuguuguuguuguuguug

SEQ ID NO: 3262857 - RNA, 19 nt, Artificial Sequence
  Description of Artificial Sequence: Synthetic oligonucleotide
uucgacaaaugguguagcc

SEQ ID NO: 3262858 - RNA, 19 nt, Artificial Sequence
  Description of Artificial Sequence: Synthetic oligonucleotide
ugguguagcccucaccaug

SEQ ID NO: 3262859 - RNA, 19 nt, Artificial Sequence
  Description of Artificial Sequence: Synthetic oligonucleotide
ugccauguuucuuugugac

SEQ ID NO: 3262860 - RNA, 19 nt, Artificial Sequence
  Description of Artificial Sequence: Synthetic oligonucleotide
cacacgcuugcaauggucc

SEQ ID NO: 3262861 - RNA, 19 nt, Artificial Sequence
  Description of Artificial Sequence: Synthetic oligonucleotide
cucaccaugugcugaggcg

SEQ ID NO: 3262862 - RNA, 19 nt, Artificial Sequence
  Description of Artificial Sequence: Synthetic oligonucleotide
caggucauggcccaccacc

SEQ ID NO: 3262863 - RNA, 19 nt, Artificial Sequence
  Description of Artificial Sequence: Synthetic oligonucleotide
ucgacaaaugguguagccc

SEQ ID NO: 3262864 - RNA, 19 nt, Artificial Sequence
  Description of Artificial Sequence: Synthetic oligonucleotide
uccguuguggcccuggcau

SEQ ID NO: 3262865 - RNA, 19 nt, Artificial Sequence
  Description of Artificial Sequence: Synthetic oligonucleotide
aggccacuuacccuuagag

SEQ ID NO: 3262866 - RNA, 19 nt, Artificial Sequence
  Description of Artificial Sequence: Synthetic oligonucleotide
acucggguucuauaauccg

SEQ ID NO: 3262867 - RNA, 19 nt, Artificial Sequence
  Description of Artificial Sequence: Synthetic oligonucleotide
ucucccucaggucggaugu

SEQ ID NO: 3262868 - RNA, 19 nt, Artificial Sequence
  Description of Artificial Sequence: Synthetic oligonucleotide
uguuucuuugugacccuca

SEQ ID NO: 3262869 - RNA, 19 nt, Artificial Sequence
  Description of Artificial Sequence: Synthetic oligonucleotide
uccaccuuggccucaugcc

SEQ ID NO: 3262870 - RNA, 19 nt, Artificial Sequence
  Description of Artificial Sequence: Synthetic oligonucleotide
uugccuuucagaagcugca

SEQ ID NO: 3262871 - RNA, 19 nt, Artificial Sequence
  Description of Artificial Sequence: Synthetic oligonucleotide
ugaggcgugaucccacuga

SEQ ID NO: 3262872 - RNA, 19 nt, Artificial Sequence
  Description of Artificial Sequence: Synthetic oligonucleotide
ucauguccuccuucaaugc

SEQ ID NO: 3262873 - RNA, 19 nt, Artificial Sequence
  Description of Artificial Sequence: Synthetic oligonucleotide
accagcuugccuuucagaa

SEQ ID NO: 3262874 - RNA, 19 nt, Artificial Sequence
  Description of Artificial Sequence: Synthetic oligonucleotide
cucugagagauuuuguaga

SEQ ID NO: 3262875 - RNA, 19 nt, Artificial Sequence
  Description of Artificial Sequence: Synthetic oligonucleotide
auagaugguguaguugcuc

SEQ ID NO: 3262876 - RNA, 19 nt, Artificial Sequence
  Description of Artificial Sequence: Synthetic oligonucleotide
uagagcuccguuguggccc

SEQ ID NO: 3262877 - RNA, 19 nt, Artificial Sequence
  Description of Artificial Sequence: Synthetic oligonucleotide
uuguucuggaugcucuugu

SEQ ID NO: 3262878 - RNA, 19 nt, Artificial Sequence
  Description of Artificial Sequence: Synthetic oligonucleotide
uguagcaggcgcucgcuca

SEQ ID NO: 3262879 - RNA, 19 nt, Artificial Sequence
  Description of Artificial Sequence: Synthetic oligonucleotide
aucccacugacucggguuc

SEQ ID NO: 3262880 - RNA, 19 nt, Artificial Sequence
  Description of Artificial Sequence: Synthetic oligonucleotide
uccgugaucucucccucag

SEQ ID NO: 3262881 - RNA, 19 nt, Artificial Sequence
  Description of Artificial Sequence: Synthetic oligonucleotide
gucacuuuggggaagugac

SEQ ID NO: 3262882 - RNA, 19 nt, Artificial Sequence
  Description of Artificial Sequence: Synthetic oligonucleotide
uccugucugcuucaaugcc

SEQ ID NO: 3262883 - RNA, 19 nt, Artificial Sequence
  Description of Artificial Sequence: Synthetic oligonucleotide
aagugacgucaucucuaac

SEQ ID NO: 3262884 - RNA, 19 nt, Artificial Sequence
  Description of Artificial Sequence: Synthetic oligonucleotide
caggacugugccauugagg

SEQ ID NO: 3262885 - RNA, 19 nt, Artificial Sequence
  Description of Artificial Sequence: Synthetic oligonucleotide
gaugcugcagcgggcaagg

SEQ ID NO: 3262886 - RNA, 19 nt, Artificial Sequence
  Description of Artificial Sequence: Synthetic oligonucleotide
gagauuuuguagagcuccg

SEQ ID NO: 3262887 - RNA, 19 nt, Artificial Sequence
  Description of Artificial Sequence: Synthetic oligonucleotide
gguucuauaauccgugauc

SEQ ID NO: 3262888 - RNA, 19 nt, Artificial Sequence
  Description of Artificial Sequence: Synthetic oligonucleotide
ugcuucaaugcccuggguu

SEQ ID NO: 3262889 - RNA, 19 nt, Artificial Sequence
  Description of Artificial Sequence: Synthetic oligonucleotide
ugugacccucagaaagucc

SEQ ID NO: 3262890 - RNA, 19 nt, Artificial Sequence
  Description of Artificial Sequence: Synthetic oligonucleotide
ugacucggguucuauaauc

SEQ ID NO: 3262891 - RNA, 19 nt, Artificial Sequence
  Description of Artificial Sequence: Synthetic oligonucleotide
uguuguucugagucucuga

SEQ ID NO: 3262892 - RNA, 19 nt, Artificial Sequence
  Description of Artificial Sequence: Synthetic oligonucleotide
gacucggguucuauaaucc

SEQ ID NO: 3262893 - RNA, 19 nt, Artificial Sequence
  Description of Artificial Sequence: Synthetic oligonucleotide
guuguuguuguuguuguuc

SEQ ID NO: 3262894 - RNA, 19 nt, Artificial Sequence
  Description of Artificial Sequence: Synthetic oligonucleotide
ucauggcccaccaccagcu

SEQ ID NO: 3262895 - RNA, 19 nt, Artificial Sequence
  Description of Artificial Sequence: Synthetic oligonucleotide
agcacucgcagggacacac

SEQ ID NO: 3262896 - RNA, 19 nt, Artificial Sequence
  Description of Artificial Sequence: Synthetic oligonucleotide
ucagcuacugcagucacuu

SEQ ID NO: 3262897 - RNA, 19 nt, Artificial Sequence
  Description of Artificial Sequence: Synthetic oligonucleotide
ggaugugucauagauggug

SEQ ID NO: 3262898 - RNA, 19 nt, Artificial Sequence
  Description of Artificial Sequence: Synthetic oligonucleotide
uuguuguuguucugagucu

SEQ ID NO: 3262899 - RNA, 19 nt, Artificial Sequence
  Description of Artificial Sequence: Synthetic oligonucleotide
augguguaguugcucaugu

SEQ ID NO: 3262900 - RNA, 19 nt, Artificial Sequence
  Description of Artificial Sequence: Synthetic oligonucleotide
gucuggcuucgacaaaugg

SEQ ID NO: 3262901 - RNA, 19 nt, Artificial Sequence
  Description of Artificial Sequence: Synthetic oligonucleotide
gugccauugagguucacga

SEQ ID NO: 3262902 - RNA, 19 nt, Artificial Sequence
  Description of Artificial Sequence: Synthetic oligonucleotide
aggaucucuagucuggcuu

SEQ ID NO: 3262903 - RNA, 19 nt, Artificial Sequence
  Description of Artificial Sequence: Synthetic oligonucleotide
ugcugcagcgggcaaggcc

SEQ ID NO: 3262904 - RNA, 19 nt, Artificial Sequence
  Description of Artificial Sequence: Synthetic oligonucleotide
acaggacugugccauugag

SEQ ID NO: 3262905 - RNA, 19 nt, Artificial Sequence
  Description of Artificial Sequence: Synthetic oligonucleotide
uuuauuacugucuagguag

SEQ ID NO: 3262906 - RNA, 19 nt, Artificial Sequence
  Description of Artificial Sequence: Synthetic oligonucleotide
ugaucuuggaguaagauag

SEQ ID NO: 3262907 - RNA, 19 nt, Artificial Sequence
  Description of Artificial Sequence: Synthetic oligonucleotide
auauauuaaauguaguuuc

SEQ ID NO: 3262908 - RNA, 19 nt, Artificial Sequence
  Description of Artificial Sequence: Synthetic oligonucleotide
aagcuuagcaauuugauug

SEQ ID NO: 3262909 - RNA, 19 nt, Artificial Sequence
  Description of Artificial Sequence: Synthetic oligonucleotide
cuuauuauaggagagaucc

SEQ ID NO: 3262910 - RNA, 19 nt, Artificial Sequence
  Description of Artificial Sequence: Synthetic oligonucleotide
aaacuuuucgaguucauug

SEQ ID NO: 3262911 - RNA, 19 nt, Artificial Sequence
  Description of Artificial Sequence: Synthetic oligonucleotide
uuagcaauuugauugaagc

SEQ ID NO: 3262912 - RNA, 19 nt, Artificial Sequence
  Description of Artificial Sequence: Synthetic oligonucleotide
aaggaugauauauuaaaug

SEQ ID NO: 3262913 - RNA, 19 nt, Artificial Sequence
  Description of Artificial Sequence: Synthetic oligonucleotide
aaaugcuugaucuuggagu

SEQ ID NO: 3262914 - RNA, 19 nt, Artificial Sequence
  Description of Artificial Sequence: Synthetic oligonucleotide
acuugaaauacucaucugg

SEQ ID NO: 3262915 - RNA, 19 nt, Artificial Sequence
  Description of Artificial Sequence: Synthetic oligonucleotide
auuaaauguaguuuccagg

SEQ ID NO: 3262916 - RNA, 19 nt, Artificial Sequence
  Description of Artificial Sequence: Synthetic oligonucleotide
gaugauauauuaaauguag

SEQ ID NO: 3262917 - RNA, 19 nt, Artificial Sequence
  Description of Artificial Sequence: Synthetic oligonucleotide
cuugacaucaaacuuuucg

SEQ ID NO: 3262918 - RNA, 19 nt, Artificial Sequence
  Description of Artificial Sequence: Synthetic oligonucleotide
agagaguuagaagagaggc

SEQ ID NO: 3262919 - RNA, 19 nt, Artificial Sequence
  Description of Artificial Sequence: Synthetic oligonucleotide
uccaauucgagcaaggaug

SEQ ID NO: 3262920 - RNA, 19 nt, Artificial Sequence
  Description of Artificial Sequence: Synthetic oligonucleotide
uugauugugggauaaacgc

SEQ ID NO: 3262921 - RNA, 19 nt, Artificial Sequence
  Description of Artificial Sequence: Synthetic oligonucleotide
uugauugaagcucagguca

SEQ ID NO: 3262922 - RNA, 19 nt, Artificial Sequence
  Description of Artificial Sequence: Synthetic oligonucleotide
uuuaagcuuauuauaggag

SEQ ID NO: 3262923 - RNA, 19 nt, Artificial Sequence
  Description of Artificial Sequence: Synthetic oligonucleotide
uuaaauguaguuuccaggu

SEQ ID NO: 3262924 - RNA, 19 nt, Artificial Sequence
  Description of Artificial Sequence: Synthetic oligonucleotide
uagguagagaguuagaaga

SEQ ID NO: 3262925 - RNA, 19 nt, Artificial Sequence
  Description of Artificial Sequence: Synthetic oligonucleotide
auaggagagauccaauucg

SEQ ID NO: 3262926 - RNA, 19 nt, Artificial Sequence
  Description of Artificial Sequence: Synthetic oligonucleotide
uuuuaagcuuauuauagga

SEQ ID NO: 3262927 - RNA, 19 nt, Artificial Sequence
  Description of Artificial Sequence: Synthetic oligonucleotide
uucauugaccuccagguag

SEQ ID NO: 3262928 - RNA, 19 nt, Artificial Sequence
  Description of Artificial Sequence: Synthetic oligonucleotide
uuaucaagccaguugauug

SEQ ID NO: 3262929 - RNA, 19 nt, Artificial Sequence
  Description of Artificial Sequence: Synthetic oligonucleotide
uuaagcuuauuauaggaga

SEQ ID NO: 3262930 - RNA, 19 nt, Artificial Sequence
  Description of Artificial Sequence: Synthetic oligonucleotide
aaacucuugacaucaaacu

SEQ ID NO: 3262931 - RNA, 19 nt, Artificial Sequence
  Description of Artificial Sequence: Synthetic oligonucleotide
uauauuaaauguaguuucc

SEQ ID NO: 3262932 - RNA, 19 nt, Artificial Sequence
  Description of Artificial Sequence: Synthetic oligonucleotide
uuagaagagaggcugggag

SEQ ID NO: 3262933 - RNA, 19 nt, Artificial Sequence
  Description of Artificial Sequence: Synthetic oligonucleotide
cuugaaauacucaucuggg

SEQ ID NO: 3262934 - RNA, 19 nt, Artificial Sequence
  Description of Artificial Sequence: Synthetic oligonucleotide
uuacugucuagguagagag

SEQ ID NO: 3262935 - RNA, 19 nt, Artificial Sequence
  Description of Artificial Sequence: Synthetic oligonucleotide
aggaugauauauuaaaugu

SEQ ID NO: 3262936 - RNA, 19 nt, Artificial Sequence
  Description of Artificial Sequence: Synthetic oligonucleotide
uuucaggccuuucagagag

SEQ ID NO: 3262937 - RNA, 19 nt, Artificial Sequence
  Description of Artificial Sequence: Synthetic oligonucleotide
uauuaaauguaguuuccag

SEQ ID NO: 3262938 - RNA, 19 nt, Artificial Sequence
  Description of Artificial Sequence: Synthetic oligonucleotide
aaacgcagauacuguagcc

SEQ ID NO: 3262939 - RNA, 19 nt, Artificial Sequence
  Description of Artificial Sequence: Synthetic oligonucleotide
gauuucaggccuuucagag

SEQ ID NO: 3262940 - RNA, 19 nt, Artificial Sequence
  Description of Artificial Sequence: Synthetic oligonucleotide
uaagcuuauuauaggagag

SEQ ID NO: 3262941 - RNA, 19 nt, Artificial Sequence
  Description of Artificial Sequence: Synthetic oligonucleotide
acucuagugauuucaggcc

SEQ ID NO: 3262942 - RNA, 19 nt, Artificial Sequence
  Description of Artificial Sequence: Synthetic oligonucleotide
ucaagguuuucauuaacag

SEQ ID NO: 3262943 - RNA, 19 nt, Artificial Sequence
  Description of Artificial Sequence: Synthetic oligonucleotide
uucauuaacaguucgguau

SEQ ID NO: 3262944 - RNA, 19 nt, Artificial Sequence
  Description of Artificial Sequence: Synthetic oligonucleotide
auuugauugaagcucaggu

SEQ ID NO: 3262945 - RNA, 19 nt, Artificial Sequence
  Description of Artificial Sequence: Synthetic oligonucleotide
ucuuggaguaagauagugg

SEQ ID NO: 3262946 - RNA, 19 nt, Artificial Sequence
  Description of Artificial Sequence: Synthetic oligonucleotide
uacucuagugauuucaggc

SEQ ID NO: 3262947 - RNA, 19 nt, Artificial Sequence
  Description of Artificial Sequence: Synthetic oligonucleotide
agcaauuugauugaagcuc

SEQ ID NO: 3262948 - RNA, 19 nt, Artificial Sequence
  Description of Artificial Sequence: Synthetic oligonucleotide
aacgcagauacuguagccc

SEQ ID NO: 3262949 - RNA, 19 nt, Artificial Sequence
  Description of Artificial Sequence: Synthetic oligonucleotide
aguucauugaccuccaggu

SEQ ID NO: 3262950 - RNA, 19 nt, Artificial Sequence
  Description of Artificial Sequence: Synthetic oligonucleotide
cagguaguaguuuucaagg

SEQ ID NO: 3262951 - RNA, 19 nt, Artificial Sequence
  Description of Artificial Sequence: Synthetic oligonucleotide
uucgguaugcuuuuaagcu

SEQ ID NO: 3262952 - RNA, 19 nt, Artificial Sequence
  Description of Artificial Sequence: Synthetic oligonucleotide
uggaguaagauaguggucc

SEQ ID NO: 3262953 - RNA, 19 nt, Artificial Sequence
  Description of Artificial Sequence: Synthetic oligonucleotide
ugauauauuaaauguaguu

SEQ ID NO: 3262954 - RNA, 19 nt, Artificial Sequence
  Description of Artificial Sequence: Synthetic oligonucleotide
aagguuuucauuaacaguu

SEQ ID NO: 3262955 - RNA, 19 nt, Artificial Sequence
  Description of Artificial Sequence: Synthetic oligonucleotide
cuuuuaagcuuauuauagg

SEQ ID NO: 3262956 - RNA, 19 nt, Artificial Sequence
  Description of Artificial Sequence: Synthetic oligonucleotide
ugaaauacucaucugggau

SEQ ID NO: 3262957 - RNA, 19 nt, Artificial Sequence
  Description of Artificial Sequence: Synthetic oligonucleotide
acuguagcccaguaaagcg

SEQ ID NO: 3262958 - RNA, 19 nt, Artificial Sequence
  Description of Artificial Sequence: Synthetic oligonucleotide
uuuucgaguucauugaccu

SEQ ID NO: 3262959 - RNA, 19 nt, Artificial Sequence
  Description of Artificial Sequence: Synthetic oligonucleotide
aucuuuauuacugucuagg

SEQ ID NO: 3262960 - RNA, 19 nt, Artificial Sequence
  Description of Artificial Sequence: Synthetic oligonucleotide
aaagcgacuugaaauacuc

SEQ ID NO: 3262961 - RNA, 19 nt, Artificial Sequence
  Description of Artificial Sequence: Synthetic oligonucleotide
uugacaucaaacuuuucga

SEQ ID NO: 3262962 - RNA, 19 nt, Artificial Sequence
  Description of Artificial Sequence: Synthetic oligonucleotide
gaaauacucaucugggaug

SEQ ID NO: 3262963 - RNA, 19 nt, Artificial Sequence
  Description of Artificial Sequence: Synthetic oligonucleotide
aaauguaguuuccagguua

SEQ ID NO: 3262964 - RNA, 19 nt, Artificial Sequence
  Description of Artificial Sequence: Synthetic oligonucleotide
gauacuguagcccaguaaa

SEQ ID NO: 3262965 - RNA, 19 nt, Artificial Sequence
  Description of Artificial Sequence: Synthetic oligonucleotide
uucaagguuuucauuaaca

SEQ ID NO: 3262966 - RNA, 19 nt, Artificial Sequence
  Description of Artificial Sequence: Synthetic oligonucleotide
cuuucagagaggcagacac

SEQ ID NO: 3262967 - RNA, 19 nt, Artificial Sequence
  Description of Artificial Sequence: Synthetic oligonucleotide
ucugggauguugcugaucu

SEQ ID NO: 3262968 - RNA, 19 nt, Artificial Sequence
  Description of Artificial Sequence: Synthetic oligonucleotide
gagagauccaauucgagca

SEQ ID NO: 3262969 - RNA, 19 nt, Artificial Sequence
  Description of Artificial Sequence: Synthetic oligonucleotide
aagcgcaaaugcuugaucu

SEQ ID NO: 3262970 - RNA, 19 nt, Artificial Sequence
  Description of Artificial Sequence: Synthetic oligonucleotide
aacuuuucgaguucauuga

SEQ ID NO: 3262971 - RNA, 19 nt, Artificial Sequence
  Description of Artificial Sequence: Synthetic oligonucleotide
uaaacgcagauacuguagc

SEQ ID NO: 3262972 - RNA, 19 nt, Artificial Sequence
  Description of Artificial Sequence: Synthetic oligonucleotide
uugcugaucuuuauuacug

SEQ ID NO: 3262973 - RNA, 19 nt, Artificial Sequence
  Description of Artificial Sequence: Synthetic oligonucleotide
uaagauaguggucccagga

SEQ ID NO: 3262974 - RNA, 19 nt, Artificial Sequence
  Description of Artificial Sequence: Synthetic oligonucleotide
uauaggagagauccaauuc

SEQ ID NO: 3262975 - RNA, 19 nt, Artificial Sequence
  Description of Artificial Sequence: Synthetic oligonucleotide
uuacagaaacucuugacau

SEQ ID NO: 3262976 - RNA, 19 nt, Artificial Sequence
  Description of Artificial Sequence: Synthetic oligonucleotide
ugacaucaaacuuuucgag

SEQ ID NO: 3262977 - RNA, 19 nt, Artificial Sequence
  Description of Artificial Sequence: Synthetic oligonucleotide
uuuucauuaacaguucggu

SEQ ID NO: 3262978 - RNA, 19 nt, Artificial Sequence
  Description of Artificial Sequence: Synthetic oligonucleotide
guaguuuccagguuacucc

SEQ ID NO: 3262979 - RNA, 19 nt, Artificial Sequence
  Description of Artificial Sequence: Synthetic oligonucleotide
aaugcuugaucuuggagua

SEQ ID NO: 3262980 - RNA, 19 nt, Artificial Sequence
  Description of Artificial Sequence: Synthetic oligonucleotide
aauguaguuuccagguuac

SEQ ID NO: 3262981 - RNA, 19 nt, Artificial Sequence
  Description of Artificial Sequence: Synthetic oligonucleotide
gugggauaaacgcagauac

SEQ ID NO: 3262982 - RNA, 19 nt, Artificial Sequence
  Description of Artificial Sequence: Synthetic oligonucleotide
ucauuaacaguucgguaug

SEQ ID NO: 3262983 - RNA, 19 nt, Artificial Sequence
  Description of Artificial Sequence: Synthetic oligonucleotide
uucgaguucauugaccucc

SEQ ID NO: 3262984 - RNA, 19 nt, Artificial Sequence
  Description of Artificial Sequence: Synthetic oligonucleotide
uagagaguuagaagagagg

SEQ ID NO: 3262985 - RNA, 19 nt, Artificial Sequence
  Description of Artificial Sequence: Synthetic oligonucleotide
gauugugggauaaacgcag

SEQ ID NO: 3262986 - RNA, 19 nt, Artificial Sequence
  Description of Artificial Sequence: Synthetic oligonucleotide
aauuugauugaagcucagg

SEQ ID NO: 3262987 - RNA, 19 nt, Artificial Sequence
  Description of Artificial Sequence: Synthetic oligonucleotide
agauaguggucccaggauc

SEQ ID NO: 3262988 - RNA, 19 nt, Artificial Sequence
  Description of Artificial Sequence: Synthetic oligonucleotide
agaguuagaagagaggcug

SEQ ID NO: 3262989 - RNA, 19 nt, Artificial Sequence
  Description of Artificial Sequence: Synthetic oligonucleotide
agaagagaggcugggaggc

SEQ ID NO: 3262990 - RNA, 19 nt, Artificial Sequence
  Description of Artificial Sequence: Synthetic oligonucleotide
uagaagagaggcugggagg

SEQ ID NO: 3262991 - RNA, 19 nt, Artificial Sequence
  Description of Artificial Sequence: Synthetic oligonucleotide
gaguucauugaccuccagg

SEQ ID NO: 3262992 - RNA, 19 nt, Artificial Sequence
  Description of Artificial Sequence: Synthetic oligonucleotide
gguuacuccacuuaucaag

SEQ ID NO: 3262993 - RNA, 19 nt, Artificial Sequence
  Description of Artificial Sequence: Synthetic oligonucleotide
ucaucugggauguugcuga

SEQ ID NO: 3262994 - RNA, 19 nt, Artificial Sequence
  Description of Artificial Sequence: Synthetic oligonucleotide
uuugauugaagcucagguc

SEQ ID NO: 3262995 - RNA, 19 nt, Artificial Sequence
  Description of Artificial Sequence: Synthetic oligonucleotide
acuuuucgaguucauugac

SEQ ID NO: 3262996 - RNA, 19 nt, Artificial Sequence
  Description of Artificial Sequence: Synthetic oligonucleotide
aguugauugugggauaaac

SEQ ID NO: 3262997 - RNA, 19 nt, Artificial Sequence
  Description of Artificial Sequence: Synthetic oligonucleotide
uucagagaggcagacacag

SEQ ID NO: 3262998 - RNA, 19 nt, Artificial Sequence
  Description of Artificial Sequence: Synthetic oligonucleotide
aguaaagcgacuugaaaua

SEQ ID NO: 3262999 - RNA, 19 nt, Artificial Sequence
  Description of Artificial Sequence: Synthetic oligonucleotide
aggggauugccauccaagc

SEQ ID NO: 3263000 - RNA, 19 nt, Artificial Sequence
  Description of Artificial Sequence: Synthetic oligonucleotide
cuuacagaaacucuugaca

SEQ ID NO: 3263001 - RNA, 19 nt, Artificial Sequence
  Description of Artificial Sequence: Synthetic oligonucleotide
ugauugugggauaaacgca

SEQ ID NO: 3263002 - RNA, 19 nt, Artificial Sequence
  Description of Artificial Sequence: Synthetic oligonucleotide
aacucuugacaucaaacuu

SEQ ID NO: 3263003 - RNA, 19 nt, Artificial Sequence
  Description of Artificial Sequence: Synthetic oligonucleotide
guugauugugggauaaacg

SEQ ID NO: 3263004 - RNA, 19 nt, Artificial Sequence
  Description of Artificial Sequence: Synthetic oligonucleotide
uauuauaggagagauccaa

SEQ ID NO: 3263005 - RNA, 19 nt, Artificial Sequence
  Description of Artificial Sequence: Synthetic oligonucleotide
acacacaucagacucaccc

SEQ ID NO: 3263006 - RNA, 19 nt, Artificial Sequence
  Description of Artificial Sequence: Synthetic oligonucleotide
uuauggaagugaaauaagg

SEQ ID NO: 3263007 - RNA, 19 nt, Artificial Sequence
  Description of Artificial Sequence: Synthetic oligonucleotide
uaguauaugacacacuggc

SEQ ID NO: 3263008 - RNA, 19 nt, Artificial Sequence
  Description of Artificial Sequence: Synthetic oligonucleotide
uugaacaugguacauauac

SEQ ID NO: 3263009 - RNA, 19 nt, Artificial Sequence
  Description of Artificial Sequence: Synthetic oligonucleotide
ucuacauacagaaugacau

SEQ ID NO: 3263010 - RNA, 19 nt, Artificial Sequence
  Description of Artificial Sequence: Synthetic oligonucleotide
uucauccugaaucaaaugc

SEQ ID NO: 3263011 - RNA, 19 nt, Artificial Sequence
  Description of Artificial Sequence: Synthetic oligonucleotide
uauugauuugaccuagcgg

SEQ ID NO: 3263012 - RNA, 19 nt, Artificial Sequence
  Description of Artificial Sequence: Synthetic oligonucleotide
ucugaauucacagaggggc

SEQ ID NO: 3263013 - RNA, 19 nt, Artificial Sequence
  Description of Artificial Sequence: Synthetic oligonucleotide
uauggaagugaaauaaggc

SEQ ID NO: 3263014 - RNA, 19 nt, Artificial Sequence
  Description of Artificial Sequence: Synthetic oligonucleotide
cauauucagaucuucacag

SEQ ID NO: 3263015 - RNA, 19 nt, Artificial Sequence
  Description of Artificial Sequence: Synthetic oligonucleotide
uguauuaacacauggcagu

SEQ ID NO: 3263016 - RNA, 19 nt, Artificial Sequence
  Description of Artificial Sequence: Synthetic oligonucleotide
uacagaaugacaucaaccu

SEQ ID NO: 3263017 - RNA, 19 nt, Artificial Sequence
  Description of Artificial Sequence: Synthetic oligonucleotide
aaacgaauguguaaccgcc

SEQ ID NO: 3263018 - RNA, 19 nt, Artificial Sequence
  Description of Artificial Sequence: Synthetic oligonucleotide
uucaggaugaugaagccca

SEQ ID NO: 3263019 - RNA, 19 nt, Artificial Sequence
  Description of Artificial Sequence: Synthetic oligonucleotide
ugcuuuauuaaaacgguac

SEQ ID NO: 3263020 - RNA, 19 nt, Artificial Sequence
  Description of Artificial Sequence: Synthetic oligonucleotide
uuaaacgaauguguaaccg

SEQ ID NO: 3263021 - RNA, 19 nt, Artificial Sequence
  Description of Artificial Sequence: Synthetic oligonucleotide
uggaagugaaauaaggcac

SEQ ID NO: 3263022 - RNA, 19 nt, Artificial Sequence
  Description of Artificial Sequence: Synthetic oligonucleotide
aguucaauccuguuuacug

SEQ ID NO: 3263023 - RNA, 19 nt, Artificial Sequence
  Description of Artificial Sequence: Synthetic oligonucleotide
aaacgguacucguauuuac

SEQ ID NO: 3263024 - RNA, 19 nt, Artificial Sequence
  Description of Artificial Sequence: Synthetic oligonucleotide
ucagacuccuaaaauuagg

SEQ ID NO: 3263025 - RNA, 19 nt, Artificial Sequence
  Description of Artificial Sequence: Synthetic oligonucleotide
ucugccuacauaaucauau

SEQ ID NO: 3263026 - RNA, 19 nt, Artificial Sequence
  Description of Artificial Sequence: Synthetic oligonucleotide
uacagcaucgcagaaagag

SEQ ID NO: 3263027 - RNA, 19 nt, Artificial Sequence
  Description of Artificial Sequence: Synthetic oligonucleotide
uuuagaguccaacucgagc

SEQ ID NO: 3263028 - RNA, 19 nt, Artificial Sequence
  Description of Artificial Sequence: Synthetic oligonucleotide
ucauauucagaucuucaca

SEQ ID NO: 3263029 - RNA, 19 nt, Artificial Sequence
  Description of Artificial Sequence: Synthetic oligonucleotide
auuaaaacgguacucguau

SEQ ID NO: 3263030 - RNA, 19 nt, Artificial Sequence
  Description of Artificial Sequence: Synthetic oligonucleotide
uguacaugcuuuauuaaaa

SEQ ID NO: 3263031 - RNA, 19 nt, Artificial Sequence
  Description of Artificial Sequence: Synthetic oligonucleotide
auggaagugaaauaaggca

SEQ ID NO: 3263032 - RNA, 19 nt, Artificial Sequence
  Description of Artificial Sequence: Synthetic oligonucleotide
caaagaucccauaugggcc

SEQ ID NO: 3263033 - RNA, 19 nt, Artificial Sequence
  Description of Artificial Sequence: Synthetic oligonucleotide
cuuauuugguuuauuguac

SEQ ID NO: 3263034 - RNA, 19 nt, Artificial Sequence
  Description of Artificial Sequence: Synthetic oligonucleotide
aaugccucauauucagauc

SEQ ID NO: 3263035 - RNA, 19 nt, Artificial Sequence
  Description of Artificial Sequence: Synthetic oligonucleotide
cuuuacguccccaucaccc

SEQ ID NO: 3263036 - RNA, 19 nt, Artificial Sequence
  Description of Artificial Sequence: Synthetic oligonucleotide
uacauuuagaguccaacuc

SEQ ID NO: 3263037 - RNA, 19 nt, Artificial Sequence
  Description of Artificial Sequence: Synthetic oligonucleotide
acacuugaguagcaaauac

SEQ ID NO: 3263038 - RNA, 19 nt, Artificial Sequence
  Description of Artificial Sequence: Synthetic oligonucleotide
ugggaauucaccuuuaauu

SEQ ID NO: 3263039 - RNA, 19 nt, Artificial Sequence
  Description of Artificial Sequence: Synthetic oligonucleotide
ucauccugaaucaaaugca

SEQ ID NO: 3263040 - RNA, 19 nt, Artificial Sequence
  Description of Artificial Sequence: Synthetic oligonucleotide
ucaaguuuauggaagugaa

SEQ ID NO: 3263041 - RNA, 19 nt, Artificial Sequence
  Description of Artificial Sequence: Synthetic oligonucleotide
uuaguaguauaugacacac

SEQ ID NO: 3263042 - RNA, 19 nt, Artificial Sequence
  Description of Artificial Sequence: Synthetic oligonucleotide
uuacauuuagaguccaacu

SEQ ID NO: 3263043 - RNA, 19 nt, Artificial Sequence
  Description of Artificial Sequence: Synthetic oligonucleotide
uccaacucgagcuuauuug

SEQ ID NO: 3263044 - RNA, 19 nt, Artificial Sequence
  Description of Artificial Sequence: Synthetic oligonucleotide
cugauuuucauuuccaaga

SEQ ID NO: 3263045 - RNA, 19 nt, Artificial Sequence
  Description of Artificial Sequence: Synthetic oligonucleotide
uugaccgcgagcaggaugc

SEQ ID NO: 3263046 - RNA, 19 nt, Artificial Sequence
  Description of Artificial Sequence: Synthetic oligonucleotide
cagcaaagaucccauaugg

SEQ ID NO: 3263047 - RNA, 19 nt, Artificial Sequence
  Description of Artificial Sequence: Synthetic oligonucleotide
aauugcugacuucaagcca

SEQ ID NO: 3263048 - RNA, 19 nt, Artificial Sequence
  Description of Artificial Sequence: Synthetic oligonucleotide
agaucuguacacuugagua

SEQ ID NO: 3263049 - RNA, 19 nt, Artificial Sequence
  Description of Artificial Sequence: Synthetic oligonucleotide
uuauuugguuuauuguaca

SEQ ID NO: 3263050 - RNA, 19 nt, Artificial Sequence
  Description of Artificial Sequence: Synthetic oligonucleotide
ugaacaugguacauauaca

SEQ ID NO: 3263051 - RNA, 19 nt, Artificial Sequence
  Description of Artificial Sequence: Synthetic oligonucleotide
uggcaguuaacacugagua

SEQ ID NO: 3263052 - RNA, 19 nt, Artificial Sequence
  Description of Artificial Sequence: Synthetic oligonucleotide
acugcaacagauccauccg

SEQ ID NO: 3263053 - RNA, 19 nt, Artificial Sequence
  Description of Artificial Sequence: Synthetic oligonucleotide
uauacagcuuggcuaacca

SEQ ID NO: 3263054 - RNA, 19 nt, Artificial Sequence
  Description of Artificial Sequence: Synthetic oligonucleotide
aaugcuagcuauguuugug

SEQ ID NO: 3263055 - RNA, 19 nt, Artificial Sequence
  Description of Artificial Sequence: Synthetic oligonucleotide
ugugaaacaggaucccuug

SEQ ID NO: 3263056 - RNA, 19 nt, Artificial Sequence
  Description of Artificial Sequence: Synthetic oligonucleotide
uccugaaucaaaugcaguc

SEQ ID NO: 3263057 - RNA, 19 nt, Artificial Sequence
  Description of Artificial Sequence: Synthetic oligonucleotide
uuuacguccccaucacccg

SEQ ID NO: 3263058 - RNA, 19 nt, Artificial Sequence
  Description of Artificial Sequence: Synthetic oligonucleotide
acagaaugacaucaaccuc

SEQ ID NO: 3263059 - RNA, 19 nt, Artificial Sequence
  Description of Artificial Sequence: Synthetic oligonucleotide
guuaagaaggcccugucuc

SEQ ID NO: 3263060 - RNA, 19 nt, Artificial Sequence
  Description of Artificial Sequence: Synthetic oligonucleotide
aagcacaucauaguguaca

SEQ ID NO: 3263061 - RNA, 19 nt, Artificial Sequence
  Description of Artificial Sequence: Synthetic oligonucleotide
augccucauauucagaucu

SEQ ID NO: 3263062 - RNA, 19 nt, Artificial Sequence
  Description of Artificial Sequence: Synthetic oligonucleotide
ucgaacacucuccauuugc

SEQ ID NO: 3263063 - RNA, 19 nt, Artificial Sequence
  Description of Artificial Sequence: Synthetic oligonucleotide
uaggagucugccuacauaa

SEQ ID NO: 3263064 - RNA, 19 nt, Artificial Sequence
  Description of Artificial Sequence: Synthetic oligonucleotide
uuaagaaggcccugucucc

SEQ ID NO: 3263065 - RNA, 19 nt, Artificial Sequence
  Description of Artificial Sequence: Synthetic oligonucleotide
aucugagaggucaucauac

SEQ ID NO: 3263066 - RNA, 19 nt, Artificial Sequence
  Description of Artificial Sequence: Synthetic oligonucleotide
cagaaugacaucaaccuca

SEQ ID NO: 3263067 - RNA, 19 nt, Artificial Sequence
  Description of Artificial Sequence: Synthetic oligonucleotide
ugcaccacacccaaagacu

SEQ ID NO: 3263068 - RNA, 19 nt, Artificial Sequence
  Description of Artificial Sequence: Synthetic oligonucleotide
uucacagaggggcuuuucc

SEQ ID NO: 3263069 - RNA, 19 nt, Artificial Sequence
  Description of Artificial Sequence: Synthetic oligonucleotide
aguugcaguucugaaggcc

SEQ ID NO: 3263070 - RNA, 19 nt, Artificial Sequence
  Description of Artificial Sequence: Synthetic oligonucleotide
gcaaagaucccauaugggc

SEQ ID NO: 3263071 - RNA, 19 nt, Artificial Sequence
  Description of Artificial Sequence: Synthetic oligonucleotide
ucguauuuacagcaucgca

SEQ ID NO: 3263072 - RNA, 19 nt, Artificial Sequence
  Description of Artificial Sequence: Synthetic oligonucleotide
cuuuaaacugcauuuccca

SEQ ID NO: 3263073 - RNA, 19 nt, Artificial Sequence
  Description of Artificial Sequence: Synthetic oligonucleotide
acgguacucguauuuacag

SEQ ID NO: 3263074 - RNA, 19 nt, Artificial Sequence
  Description of Artificial Sequence: Synthetic oligonucleotide
gaucuuagcugggaaauug

SEQ ID NO: 3263075 - RNA, 19 nt, Artificial Sequence
  Description of Artificial Sequence: Synthetic oligonucleotide
aggaugaugaagcccacca

SEQ ID NO: 3263076 - RNA, 19 nt, Artificial Sequence
  Description of Artificial Sequence: Synthetic oligonucleotide
uguuuacugugauccuugg

SEQ ID NO: 3263077 - RNA, 19 nt, Artificial Sequence
  Description of Artificial Sequence: Synthetic oligonucleotide
guacaugcuuuauuaaaac

SEQ ID NO: 3263078 - RNA, 19 nt, Artificial Sequence
  Description of Artificial Sequence: Synthetic oligonucleotide
ugaguagcaaauaccuauc

SEQ ID NO: 3263079 - RNA, 19 nt, Artificial Sequence
  Description of Artificial Sequence: Synthetic oligonucleotide
cagacauucauaccacggc

SEQ ID NO: 3263080 - RNA, 19 nt, Artificial Sequence
  Description of Artificial Sequence: Synthetic oligonucleotide
auacucaucucuaagugca

SEQ ID NO: 3263081 - RNA, 19 nt, Artificial Sequence
  Description of Artificial Sequence: Synthetic oligonucleotide
ugcucucacacacaucaga

SEQ ID NO: 3263082 - RNA, 19 nt, Artificial Sequence
  Description of Artificial Sequence: Synthetic oligonucleotide
guguauuaacacauggcag

SEQ ID NO: 3263083 - RNA, 19 nt, Artificial Sequence
  Description of Artificial Sequence: Synthetic oligonucleotide
ucccguuucuucaugcgug

SEQ ID NO: 3263084 - RNA, 19 nt, Artificial Sequence
  Description of Artificial Sequence: Synthetic oligonucleotide
uuucauuuccaagaguuuu

SEQ ID NO: 3263085 - RNA, 19 nt, Artificial Sequence
  Description of Artificial Sequence: Synthetic oligonucleotide
aguuaacacugaguauucc

SEQ ID NO: 3263086 - RNA, 19 nt, Artificial Sequence
  Description of Artificial Sequence: Synthetic oligonucleotide
ucacccgccgccaucacug

SEQ ID NO: 3263087 - RNA, 19 nt, Artificial Sequence
  Description of Artificial Sequence: Synthetic oligonucleotide
agagagaggaaggagguga

SEQ ID NO: 3263088 - RNA, 19 nt, Artificial Sequence
  Description of Artificial Sequence: Synthetic oligonucleotide
aguuaagaaggcccugucu

SEQ ID NO: 3263089 - RNA, 19 nt, Artificial Sequence
  Description of Artificial Sequence: Synthetic oligonucleotide
aauaccuaucugguugucu

SEQ ID NO: 3263090 - RNA, 19 nt, Artificial Sequence
  Description of Artificial Sequence: Synthetic oligonucleotide
gauauugaaggggugggga

SEQ ID NO: 3263091 - RNA, 19 nt, Artificial Sequence
  Description of Artificial Sequence: Synthetic oligonucleotide
aagcauaggggaugcauuu

SEQ ID NO: 3263092 - RNA, 19 nt, Artificial Sequence
  Description of Artificial Sequence: Synthetic oligonucleotide
ugcagucuuaguaguauau

SEQ ID NO: 3263093 - RNA, 19 nt, Artificial Sequence
  Description of Artificial Sequence: Synthetic oligonucleotide
guaaccgccaauccccugc

SEQ ID NO: 3263094 - RNA, 19 nt, Artificial Sequence
  Description of Artificial Sequence: Synthetic oligonucleotide
uauuugguuuauuguacau

SEQ ID NO: 3263095 - RNA, 19 nt, Artificial Sequence
  Description of Artificial Sequence: Synthetic oligonucleotide
uugcuguuuccagagaucu

SEQ ID NO: 3263096 - RNA, 19 nt, Artificial Sequence
  Description of Artificial Sequence: Synthetic oligonucleotide
acaaugcuagcuauguuug

SEQ ID NO: 3263097 - RNA, 19 nt, Artificial Sequence
  Description of Artificial Sequence: Synthetic oligonucleotide
ugccuacauaaucauauuu

SEQ ID NO: 3263098 - RNA, 19 nt, Artificial Sequence
  Description of Artificial Sequence: Synthetic oligonucleotide
aacucgagcuuauuugguu

SEQ ID NO: 3263099 - RNA, 19 nt, Artificial Sequence
  Description of Artificial Sequence: Synthetic oligonucleotide
cuaauuuccaaaucuuucu

SEQ ID NO: 3263100 - RNA, 19 nt, Artificial Sequence
  Description of Artificial Sequence: Synthetic oligonucleotide
cuucaugcgugguagcgug

SEQ ID NO: 3263101 - RNA, 19 nt, Artificial Sequence
  Description of Artificial Sequence: Synthetic oligonucleotide
ugauuugaccuagcggaag

SEQ ID NO: 3263102 - RNA, 19 nt, Artificial Sequence
  Description of Artificial Sequence: Synthetic oligonucleotide
ugacaucaaccucagucuc

SEQ ID NO: 3263103 - RNA, 19 nt, Artificial Sequence
  Description of Artificial Sequence: Synthetic oligonucleotide
auacagcuuggcuaaccag

SEQ ID NO: 3263104 - RNA, 19 nt, Artificial Sequence
  Description of Artificial Sequence: Synthetic oligonucleotide
cugacuucaagccacugga

SEQ ID NO: 3263105 - RNA, 19 nt, Artificial Sequence
  Description of Artificial Sequence: Synthetic oligonucleotide
aauauuuaaaauuuucuuc

SEQ ID NO: 3263106 - RNA, 19 nt, Artificial Sequence
  Description of Artificial Sequence: Synthetic oligonucleotide
uaaaauaaagaaaagagca

SEQ ID NO: 3263107 - RNA, 19 nt, Artificial Sequence
  Description of Artificial Sequence: Synthetic oligonucleotide
aacauuaaauauuaguuac

SEQ ID NO: 3263108 - RNA, 19 nt, Artificial Sequence
  Description of Artificial Sequence: Synthetic oligonucleotide
aguuacuuaacuuaagagc

SEQ ID NO: 3263109 - RNA, 19 nt, Artificial Sequence
  Description of Artificial Sequence: Synthetic oligonucleotide
ucuucaacagguaauaugg

SEQ ID NO: 3263110 - RNA, 19 nt, Artificial Sequence
  Description of Artificial Sequence: Synthetic oligonucleotide
uuaaaauaaagaaaagagc

SEQ ID NO: 3263111 - RNA, 19 nt, Artificial Sequence
  Description of Artificial Sequence: Synthetic oligonucleotide
auggauuuaaaccugaccg

SEQ ID NO: 3263112 - RNA, 19 nt, Artificial Sequence
  Description of Artificial Sequence: Synthetic oligonucleotide
auuaaaauaaagaaaagag

SEQ ID NO: 3263113 - RNA, 19 nt, Artificial Sequence
  Description of Artificial Sequence: Synthetic oligonucleotide
gauauuuauuuccaaaagg

SEQ ID NO: 3263114 - RNA, 19 nt, Artificial Sequence
  Description of Artificial Sequence: Synthetic oligonucleotide
uggaauuuuaauuuuacag

SEQ ID NO: 3263115 - RNA, 19 nt, Artificial Sequence
  Description of Artificial Sequence: Synthetic oligonucleotide
uuaaauauuaguuacuuaa

SEQ ID NO: 3263116 - RNA, 19 nt, Artificial Sequence
  Description of Artificial Sequence: Synthetic oligonucleotide
uuuaaaauuuucuucaaca

SEQ ID NO: 3263117 - RNA, 19 nt, Artificial Sequence
  Description of Artificial Sequence: Synthetic oligonucleotide
uaaaauuuucuucaacagg

SEQ ID NO: 3263118 - RNA, 19 nt, Artificial Sequence
  Description of Artificial Sequence: Synthetic oligonucleotide
aaggacaagaaauaaaaca

SEQ ID NO: 3263119 - RNA, 19 nt, Artificial Sequence
  Description of Artificial Sequence: Synthetic oligonucleotide
uaacuuaagagcauuaggc

SEQ ID NO: 3263120 - RNA, 19 nt, Artificial Sequence
  Description of Artificial Sequence: Synthetic oligonucleotide
auauaaauaugaaugauac

SEQ ID NO: 3263121 - RNA, 19 nt, Artificial Sequence
  Description of Artificial Sequence: Synthetic oligonucleotide
aaagauauuucucaaucug

SEQ ID NO: 3263122 - RNA, 19 nt, Artificial Sequence
  Description of Artificial Sequence: Synthetic oligonucleotide
auaugaaugauacaaaaga

SEQ ID NO: 3263123 - RNA, 19 nt, Artificial Sequence
  Description of Artificial Sequence: Synthetic oligonucleotide
uuaacuuaagagcauuagg

SEQ ID NO: 3263124 - RNA, 19 nt, Artificial Sequence
  Description of Artificial Sequence: Synthetic oligonucleotide
ugaaugauacaaaagauau

SEQ ID NO: 3263125 - RNA, 19 nt, Artificial Sequence
  Description of Artificial Sequence: Synthetic oligonucleotide
gguaauauggauuuaaacc

SEQ ID NO: 3263126 - RNA, 19 nt, Artificial Sequence
  Description of Artificial Sequence: Synthetic oligonucleotide
auauuuaaaauuuucuuca

SEQ ID NO: 3263127 - RNA, 19 nt, Artificial Sequence
  Description of Artificial Sequence: Synthetic oligonucleotide
agaaauaaaacauuaaaua

SEQ ID NO: 3263128 - RNA, 19 nt, Artificial Sequence
  Description of Artificial Sequence: Synthetic oligonucleotide
aaauauuaguuacuuaacu

SEQ ID NO: 3263129 - RNA, 19 nt, Artificial Sequence
  Description of Artificial Sequence: Synthetic oligonucleotide
uaaaacauuaaauauuagu

SEQ ID NO: 3263130 - RNA, 19 nt, Artificial Sequence
  Description of Artificial Sequence: Synthetic oligonucleotide
uuuguuauuauaaaauaaa

SEQ ID NO: 3263131 - RNA, 19 nt, Artificial Sequence
  Description of Artificial Sequence: Synthetic oligonucleotide
uaaagaaaagagcacacug

SEQ ID NO: 3263132 - RNA, 19 nt, Artificial Sequence
  Description of Artificial Sequence: Synthetic oligonucleotide
cugcauauaaauaugaaug

SEQ ID NO: 3263133 - RNA, 19 nt, Artificial Sequence
  Description of Artificial Sequence: Synthetic oligonucleotide
uuaaaauuuucuucaacag

SEQ ID NO: 3263134 - RNA, 19 nt, Artificial Sequence
  Description of Artificial Sequence: Synthetic oligonucleotide
aaugauacaaaagauauuu

SEQ ID NO: 3263135 - RNA, 19 nt, Artificial Sequence
  Description of Artificial Sequence: Synthetic oligonucleotide
aaagaaaagagcacacugc

SEQ ID NO: 3263136 - RNA, 19 nt, Artificial Sequence
  Description of Artificial Sequence: Synthetic oligonucleotide
aaaauuuucuucaacaggu

SEQ ID NO: 3263137 - RNA, 19 nt, Artificial Sequence
  Description of Artificial Sequence: Synthetic oligonucleotide
uuuauuuccaaaaggacaa

SEQ ID NO: 3263138 - RNA, 19 nt, Artificial Sequence
  Description of Artificial Sequence: Synthetic oligonucleotide
auaaauaugaaugauacaa

SEQ ID NO: 3263139 - RNA, 19 nt, Artificial Sequence
  Description of Artificial Sequence: Synthetic oligonucleotide
aaauauuuaaaauuuucuu

SEQ ID NO: 3263140 - RNA, 19 nt, Artificial Sequence
  Description of Artificial Sequence: Synthetic oligonucleotide
uauuaaaauaaagaaaaga

SEQ ID NO: 3263141 - RNA, 19 nt, Artificial Sequence
  Description of Artificial Sequence: Synthetic oligonucleotide
aaaauaaagaaaagagcac

SEQ ID NO: 3263142 - RNA, 19 nt, Artificial Sequence
  Description of Artificial Sequence: Synthetic oligonucleotide
ucaaucugcaugaaaacag

SEQ ID NO: 3263143 - RNA, 19 nt, Artificial Sequence
  Description of Artificial Sequence: Synthetic oligonucleotide
uuuaauuuuacagauauuu

SEQ ID NO: 3263144 - RNA, 19 nt, Artificial Sequence
  Description of Artificial Sequence: Synthetic oligonucleotide
auuuuaauuuuacagauau

SEQ ID NO: 3263145 - RNA, 19 nt, Artificial Sequence
  Description of Artificial Sequence: Synthetic oligonucleotide
aaaacauuaaauauuaguu

SEQ ID NO: 3263146 - RNA, 19 nt, Artificial Sequence
  Description of Artificial Sequence: Synthetic oligonucleotide
aauaaagaaaagagcacac

SEQ ID NO: 3263147 - RNA, 19 nt, Artificial Sequence
  Description of Artificial Sequence: Synthetic oligonucleotide
aaauaugaaugauacaaaa

SEQ ID NO: 3263148 - RNA, 19 nt, Artificial Sequence
  Description of Artificial Sequence: Synthetic oligonucleotide
aaauaaagaaaagagcaca

SEQ ID NO: 3263149 - RNA, 19 nt, Artificial Sequence
  Description of Artificial Sequence: Synthetic oligonucleotide
ugauauuuauuuccaaaag

SEQ ID NO: 3263150 - RNA, 19 nt, Artificial Sequence
  Description of Artificial Sequence: Synthetic oligonucleotide
ucaaauauuuaaaauuuuc

SEQ ID NO: 3263151 - RNA, 19 nt, Artificial Sequence
  Description of Artificial Sequence: Synthetic oligonucleotide
aauauuaguuacuuaacuu

SEQ ID NO: 3263152 - RNA, 19 nt, Artificial Sequence
  Description of Artificial Sequence: Synthetic oligonucleotide
aagauauuucucaaucugc

SEQ ID NO: 3263153 - RNA, 19 nt, Artificial Sequence
  Description of Artificial Sequence: Synthetic oligonucleotide
ugauacaaaagauauuucu

SEQ ID NO: 3263154 - RNA, 19 nt, Artificial Sequence
  Description of Artificial Sequence: Synthetic oligonucleotide
uuuuguuauuauaaaauaa

SEQ ID NO: 3263155 - RNA, 19 nt, Artificial Sequence
  Description of Artificial Sequence: Synthetic oligonucleotide
auuuaaaauuuucuucaac

SEQ ID NO: 3263156 - RNA, 19 nt, Artificial Sequence
  Description of Artificial Sequence: Synthetic oligonucleotide
aauaaaacauuaaauauua

SEQ ID NO: 3263157 - RNA, 19 nt, Artificial Sequence
  Description of Artificial Sequence: Synthetic oligonucleotide
aaacauuaaauauuaguua

SEQ ID NO: 3263158 - RNA, 19 nt, Artificial Sequence
  Description of Artificial Sequence: Synthetic oligonucleotide
aaaagauauuucucaaucu

SEQ ID NO: 3263159 - RNA, 19 nt, Artificial Sequence
  Description of Artificial Sequence: Synthetic oligonucleotide
aagauugggagagaaaauc

SEQ ID NO: 3263160 - RNA, 19 nt, Artificial Sequence
  Description of Artificial Sequence: Synthetic oligonucleotide
uuaguuacuuaacuuaaga

SEQ ID NO: 3263161 - RNA, 19 nt, Artificial Sequence
  Description of Artificial Sequence: Synthetic oligonucleotide
aauaugaaugauacaaaag

SEQ ID NO: 3263162 - RNA, 19 nt, Artificial Sequence
  Description of Artificial Sequence: Synthetic oligonucleotide
augaaaacaggacugcuuc

SEQ ID NO: 3263163 - RNA, 19 nt, Artificial Sequence
  Description of Artificial Sequence: Synthetic oligonucleotide
ucugcaugaaaacaggacu

SEQ ID NO: 3263164 - RNA, 19 nt, Artificial Sequence
  Description of Artificial Sequence: Synthetic oligonucleotide
agugcuuugauauuuauuu

SEQ ID NO: 3263165 - RNA, 19 nt, Artificial Sequence
  Description of Artificial Sequence: Synthetic oligonucleotide
aagaaaagagcacacugca

SEQ ID NO: 3263166 - RNA, 19 nt, Artificial Sequence
  Description of Artificial Sequence: Synthetic oligonucleotide
aaaaggacaagaaauaaaa

SEQ ID NO: 3263167 - RNA, 19 nt, Artificial Sequence
  Description of Artificial Sequence: Synthetic oligonucleotide
auacaaaagauauuucuca

SEQ ID NO: 3263168 - RNA, 19 nt, Artificial Sequence
  Description of Artificial Sequence: Synthetic oligonucleotide
ugcuuugauauuuauuucc

SEQ ID NO: 3263169 - RNA, 19 nt, Artificial Sequence
  Description of Artificial Sequence: Synthetic oligonucleotide
agguaauauggauuuaaac

SEQ ID NO: 3263170 - RNA, 19 nt, Artificial Sequence
  Description of Artificial Sequence: Synthetic oligonucleotide
aagaaauaaaacauuaaau

SEQ ID NO: 3263171 - RNA, 19 nt, Artificial Sequence
  Description of Artificial Sequence: Synthetic oligonucleotide
uuccaaaaggacaagaaau

SEQ ID NO: 3263172 - RNA, 19 nt, Artificial Sequence
  Description of Artificial Sequence: Synthetic oligonucleotide
uauuuauuuccaaaaggac

SEQ ID NO: 3263173 - RNA, 19 nt, Artificial Sequence
  Description of Artificial Sequence: Synthetic oligonucleotide
uucucaaucugcaugaaaa

SEQ ID NO: 3263174 - RNA, 19 nt, Artificial Sequence
  Description of Artificial Sequence: Synthetic oligonucleotide
aacuuaagagcauuaggca

SEQ ID NO: 3263175 - RNA, 19 nt, Artificial Sequence
  Description of Artificial Sequence: Synthetic oligonucleotide
caaaccugacauaacaagg

SEQ ID NO: 3263176 - RNA, 19 nt, Artificial Sequence
  Description of Artificial Sequence: Synthetic oligonucleotide
uaguuacuuaacuuaagag

SEQ ID NO: 3263177 - RNA, 19 nt, Artificial Sequence
  Description of Artificial Sequence: Synthetic oligonucleotide
aaauaaaacauuaaauauu

SEQ ID NO: 3263178 - RNA, 19 nt, Artificial Sequence
  Description of Artificial Sequence: Synthetic oligonucleotide
ugcauauaaauaugaauga

SEQ ID NO: 3263179 - RNA, 19 nt, Artificial Sequence
  Description of Artificial Sequence: Synthetic oligonucleotide
uuguuauuauaaaauaaaa

SEQ ID NO: 3263180 - RNA, 19 nt, Artificial Sequence
  Description of Artificial Sequence: Synthetic oligonucleotide
uaugaaugauacaaaagau

SEQ ID NO: 3263181 - RNA, 19 nt, Artificial Sequence
  Description of Artificial Sequence: Synthetic oligonucleotide
uuacacuugagcaaaccug

SEQ ID NO: 3263182 - RNA, 19 nt, Artificial Sequence
  Description of Artificial Sequence: Synthetic oligonucleotide
uaaauauuaguuacuuaac

SEQ ID NO: 3263183 - RNA, 19 nt, Artificial Sequence
  Description of Artificial Sequence: Synthetic oligonucleotide
auauuucucaaucugcaug

SEQ ID NO: 3263184 - RNA, 19 nt, Artificial Sequence
  Description of Artificial Sequence: Synthetic oligonucleotide
uauuucucaaucugcauga

SEQ ID NO: 3263185 - RNA, 19 nt, Artificial Sequence
  Description of Artificial Sequence: Synthetic oligonucleotide
gaaauaaaacauuaaauau

SEQ ID NO: 3263186 - RNA, 19 nt, Artificial Sequence
  Description of Artificial Sequence: Synthetic oligonucleotide
uugauauuuauuuccaaaa

SEQ ID NO: 3263187 - RNA, 19 nt, Artificial Sequence
  Description of Artificial Sequence: Synthetic oligonucleotide
uauggauuuaaaccugacc

SEQ ID NO: 3263188 - RNA, 19 nt, Artificial Sequence
  Description of Artificial Sequence: Synthetic oligonucleotide
agagcauuaggcaagauug

SEQ ID NO: 3263189 - RNA, 19 nt, Artificial Sequence
  Description of Artificial Sequence: Synthetic oligonucleotide
uuugauauuuauuuccaaa

SEQ ID NO: 3263190 - RNA, 19 nt, Artificial Sequence
  Description of Artificial Sequence: Synthetic oligonucleotide
caaaagauauuucucaauc

SEQ ID NO: 3263191 - RNA, 19 nt, Artificial Sequence
  Description of Artificial Sequence: Synthetic oligonucleotide
aaaggacaagaaauaaaac

SEQ ID NO: 3263192 - RNA, 19 nt, Artificial Sequence
  Description of Artificial Sequence: Synthetic oligonucleotide
guuacuuaacuuaagagca

SEQ ID NO: 3263193 - RNA, 19 nt, Artificial Sequence
  Description of Artificial Sequence: Synthetic oligonucleotide
uauuaguuacuuaacuuaa

SEQ ID NO: 3263194 - RNA, 19 nt, Artificial Sequence
  Description of Artificial Sequence: Synthetic oligonucleotide
cuuaagagcauuaggcaag

SEQ ID NO: 3263195 - RNA, 19 nt, Artificial Sequence
  Description of Artificial Sequence: Synthetic oligonucleotide
auauuuauuuccaaaagga

SEQ ID NO: 3263196 - RNA, 19 nt, Artificial Sequence
  Description of Artificial Sequence: Synthetic oligonucleotide
cauuaggcaagauugggag

SEQ ID NO: 3263197 - RNA, 19 nt, Artificial Sequence
  Description of Artificial Sequence: Synthetic oligonucleotide
uaauauggauuuaaaccug

SEQ ID NO: 3263198 - RNA, 19 nt, Artificial Sequence
  Description of Artificial Sequence: Synthetic oligonucleotide
aauuuucuucaacagguaa

SEQ ID NO: 3263199 - RNA, 19 nt, Artificial Sequence
  Description of Artificial Sequence: Synthetic oligonucleotide
auauuaguuacuuaacuua

SEQ ID NO: 3263200 - RNA, 19 nt, Artificial Sequence
  Description of Artificial Sequence: Synthetic oligonucleotide
gguauuaaaauaaagaaaa

SEQ ID NO: 3263201 - RNA, 19 nt, Artificial Sequence
  Description of Artificial Sequence: Synthetic oligonucleotide
uuaaaccugaccgaagugc

SEQ ID NO: 3263202 - RNA, 19 nt, Artificial Sequence
  Description of Artificial Sequence: Synthetic oligonucleotide
guaauauggauuuaaaccu

SEQ ID NO: 3263203 - RNA, 19 nt, Artificial Sequence
  Description of Artificial Sequence: Synthetic oligonucleotide
uacacuugagcaaaccuga

SEQ ID NO: 3263204 - RNA, 19 nt, Artificial Sequence
  Description of Artificial Sequence: Synthetic oligonucleotide
uuaggcaagauugggagag

SEQ ID NO: 3263205 - RNA, 19 nt, Artificial Sequence
  Description of Artificial Sequence: Synthetic oligonucleotide
aaugagauuguauuuaggg

SEQ ID NO: 3263206 - RNA, 19 nt, Artificial Sequence
  Description of Artificial Sequence: Synthetic oligonucleotide
guuacuaaaacccagacag

SEQ ID NO: 3263207 - RNA, 19 nt, Artificial Sequence
  Description of Artificial Sequence: Synthetic oligonucleotide
ucagaauuuaugaaaaggg

SEQ ID NO: 3263208 - RNA, 19 nt, Artificial Sequence
  Description of Artificial Sequence: Synthetic oligonucleotide
aaaagcacaucacagagag

SEQ ID NO: 3263209 - RNA, 19 nt, Artificial Sequence
  Description of Artificial Sequence: Synthetic oligonucleotide
ucuaagguuacuaaaaccc

SEQ ID NO: 3263210 - RNA, 19 nt, Artificial Sequence
  Description of Artificial Sequence: Synthetic oligonucleotide
uuuaugaaaagggauaugg

SEQ ID NO: 3263211 - RNA, 19 nt, Artificial Sequence
  Description of Artificial Sequence: Synthetic oligonucleotide
aagaguacagagaagaucg

SEQ ID NO: 3263212 - RNA, 19 nt, Artificial Sequence
  Description of Artificial Sequence: Synthetic oligonucleotide
aagcacaucacagagaggg

SEQ ID NO: 3263213 - RNA, 19 nt, Artificial Sequence
  Description of Artificial Sequence: Synthetic oligonucleotide
aaccacuaagcgcagaggc

SEQ ID NO: 3263214 - RNA, 19 nt, Artificial Sequence
  Description of Artificial Sequence: Synthetic oligonucleotide
uuuaggaagacuaccaucu

SEQ ID NO: 3263215 - RNA, 19 nt, Artificial Sequence
  Description of Artificial Sequence: Synthetic oligonucleotide
caaacuguaaaugagauug

SEQ ID NO: 3263216 - RNA, 19 nt, Artificial Sequence
  Description of Artificial Sequence: Synthetic oligonucleotide
agcaaagucaggcacaaac

SEQ ID NO: 3263217 - RNA, 19 nt, Artificial Sequence
  Description of Artificial Sequence: Synthetic oligonucleotide
aagacuaccaucuuguaau

SEQ ID NO: 3263218 - RNA, 19 nt, Artificial Sequence
  Description of Artificial Sequence: Synthetic oligonucleotide
aacccagacagcuaaagag

SEQ ID NO: 3263219 - RNA, 19 nt, Artificial Sequence
  Description of Artificial Sequence: Synthetic oligonucleotide
uuaugaaaagggauauggg

SEQ ID NO: 3263220 - RNA, 19 nt, Artificial Sequence
  Description of Artificial Sequence: Synthetic oligonucleotide
ugugguaggguguaaagag

SEQ ID NO: 3263221 - RNA, 19 nt, Artificial Sequence
  Description of Artificial Sequence: Synthetic oligonucleotide
agcuaaagagauuaaaaug

SEQ ID NO: 3263222 - RNA, 19 nt, Artificial Sequence
  Description of Artificial Sequence: Synthetic oligonucleotide
uaugaaaagggauaugggu

SEQ ID NO: 3263223 - RNA, 19 nt, Artificial Sequence
  Description of Artificial Sequence: Synthetic oligonucleotide
aaagaguacagagaagauc

SEQ ID NO: 3263224 - RNA, 19 nt, Artificial Sequence
  Description of Artificial Sequence: Synthetic oligonucleotide
agauuaaaauggcaaacuc

SEQ ID NO: 3263225 - RNA, 19 nt, Artificial Sequence
  Description of Artificial Sequence: Synthetic oligonucleotide
gcuaaagagauuaaaaugg

SEQ ID NO: 3263226 - RNA, 19 nt, Artificial Sequence
  Description of Artificial Sequence: Synthetic oligonucleotide
ugaaaagggauauggguag

SEQ ID NO: 3263227 - RNA, 19 nt, Artificial Sequence
  Description of Artificial Sequence: Synthetic oligonucleotide
auggguaggacuucuaagg

SEQ ID NO: 3263228 - RNA, 19 nt, Artificial Sequence
  Description of Artificial Sequence: Synthetic oligonucleotide
gauuaaaauggcaaacucc

SEQ ID NO: 3263229 - RNA, 19 nt, Artificial Sequence
  Description of Artificial Sequence: Synthetic oligonucleotide
uaaaugagauuguauuuag

SEQ ID NO: 3263230 - RNA, 19 nt, Artificial Sequence
  Description of Artificial Sequence: Synthetic oligonucleotide
aaaauggcaaacuccuucu

SEQ ID NO: 3263231 - RNA, 19 nt, Artificial Sequence
  Description of Artificial Sequence: Synthetic oligonucleotide
uaaaauggcaaacuccuuc

SEQ ID NO: 3263232 - RNA, 19 nt, Artificial Sequence
  Description of Artificial Sequence: Synthetic oligonucleotide
aaagagauuaaaauggcaa

SEQ ID NO: 3263233 - RNA, 19 nt, Artificial Sequence
  Description of Artificial Sequence: Synthetic oligonucleotide
uaagguuacuaaaacccag

SEQ ID NO: 3263234 - RNA, 19 nt, Artificial Sequence
  Description of Artificial Sequence: Synthetic oligonucleotide
agagcagucaccugcugcc

SEQ ID NO: 3263235 - RNA, 19 nt, Artificial Sequence
  Description of Artificial Sequence: Synthetic oligonucleotide
agagauuaaaauggcaaac

SEQ ID NO: 3263236 - RNA, 19 nt, Artificial Sequence
  Description of Artificial Sequence: Synthetic oligonucleotide
cuaaagagauuaaaauggc

SEQ ID NO: 3263237 - RNA, 19 nt, Artificial Sequence
  Description of Artificial Sequence: Synthetic oligonucleotide
auuaaaauggcaaacuccu

SEQ ID NO: 3263238 - RNA, 19 nt, Artificial Sequence
  Description of Artificial Sequence: Synthetic oligonucleotide
aagcccagcaaagucaggc

SEQ ID NO: 3263239 - RNA, 19 nt, Artificial Sequence
  Description of Artificial Sequence: Synthetic oligonucleotide
acuugcauagucuuugcag

SEQ ID NO: 3263240 - RNA, 19 nt, Artificial Sequence
  Description of Artificial Sequence: Synthetic oligonucleotide
ugagauuguauuuaggguu

SEQ ID NO: 3263241 - RNA, 19 nt, Artificial Sequence
  Description of Artificial Sequence: Synthetic oligonucleotide
uuguauuuaggguucccgg

SEQ ID NO: 3263242 - RNA, 19 nt, Artificial Sequence
  Description of Artificial Sequence: Synthetic oligonucleotide
uaaagagauuaaaauggca

SEQ ID NO: 3263243 - RNA, 19 nt, Artificial Sequence
  Description of Artificial Sequence: Synthetic oligonucleotide
gucagaauuuaugaaaagg

SEQ ID NO: 3263244 - RNA, 19 nt, Artificial Sequence
  Description of Artificial Sequence: Synthetic oligonucleotide
uucuaagguuacuaaaacc

SEQ ID NO: 3263245 - RNA, 19 nt, Artificial Sequence
  Description of Artificial Sequence: Synthetic oligonucleotide
ugauuggucagaauuuaug

SEQ ID NO: 3263246 - RNA, 19 nt, Artificial Sequence
  Description of Artificial Sequence: Synthetic oligonucleotide
aaugaggaagcccagcaaa

SEQ ID NO: 3263247 - RNA, 19 nt, Artificial Sequence
  Description of Artificial Sequence: Synthetic oligonucleotide
aagagauuaaaauggcaaa

SEQ ID NO: 3263248 - RNA, 19 nt, Artificial Sequence
  Description of Artificial Sequence: Synthetic oligonucleotide
aauuuaugaaaagggauau

SEQ ID NO: 3263249 - RNA, 19 nt, Artificial Sequence
  Description of Artificial Sequence: Synthetic oligonucleotide
gauuggucagaauuuauga

SEQ ID NO: 3263250 - RNA, 19 nt, Artificial Sequence
  Description of Artificial Sequence: Synthetic oligonucleotide
agagaagaucgccacugcc

SEQ ID NO: 3263251 - RNA, 19 nt, Artificial Sequence
  Description of Artificial Sequence: Synthetic oligonucleotide
guaaagaguacagagaaga

SEQ ID NO: 3263252 - RNA, 19 nt, Artificial Sequence
  Description of Artificial Sequence: Synthetic oligonucleotide
acugccagaaccacuaagc

SEQ ID NO: 3263253 - RNA, 19 nt, Artificial Sequence
  Description of Artificial Sequence: Synthetic oligonucleotide
accaucuuguaauagaaaa

SEQ ID NO: 3263254 - RNA, 19 nt, Artificial Sequence
  Description of Artificial Sequence: Synthetic oligonucleotide
uguaaagaguacagagaag

SEQ ID NO: 3263255 - RNA, 19 nt, Artificial Sequence
  Description of Artificial Sequence: Synthetic oligonucleotide
uuggucagaauuuaugaaa

SEQ ID NO: 3263256 - RNA, 19 nt, Artificial Sequence
  Description of Artificial Sequence: Synthetic oligonucleotide
uauggguaggacuucuaag

SEQ ID NO: 3263257 - RNA, 19 nt, Artificial Sequence
  Description of Artificial Sequence: Synthetic oligonucleotide
uaggguguaaagaguacag

SEQ ID NO: 3263258 - RNA, 19 nt, Artificial Sequence
  Description of Artificial Sequence: Synthetic oligonucleotide
uguaaaugagauuguauuu

SEQ ID NO: 3263259 - RNA, 19 nt, Artificial Sequence
  Description of Artificial Sequence: Synthetic oligonucleotide
aagggauauggguaggacu

SEQ ID NO: 3263260 - RNA, 19 nt, Artificial Sequence
  Description of Artificial Sequence: Synthetic oligonucleotide
aaagggauauggguaggac

SEQ ID NO: 3263261 - RNA, 19 nt, Artificial Sequence
  Description of Artificial Sequence: Synthetic oligonucleotide
agguuacuaaaacccagac

SEQ ID NO: 3263262 - RNA, 19 nt, Artificial Sequence
  Description of Artificial Sequence: Synthetic oligonucleotide
uguauuuaggguucccgga

SEQ ID NO: 3263263 - RNA, 19 nt, Artificial Sequence
  Description of Artificial Sequence: Synthetic oligonucleotide
uacuaaaacccagacagcu

SEQ ID NO: 3263264 - RNA, 19 nt, Artificial Sequence
  Description of Artificial Sequence: Synthetic oligonucleotide
auuguauuuaggguucccg

SEQ ID NO: 3263265 - RNA, 19 nt, Artificial Sequence
  Description of Artificial Sequence: Synthetic oligonucleotide
uggucagaauuuaugaaaa

SEQ ID NO: 3263266 - RNA, 19 nt, Artificial Sequence
  Description of Artificial Sequence: Synthetic oligonucleotide
agaaccacuaagcgcagag

SEQ ID NO: 3263267 - RNA, 19 nt, Artificial Sequence
  Description of Artificial Sequence: Synthetic oligonucleotide
acuaccaucuuguaauaga

SEQ ID NO: 3263268 - RNA, 19 nt, Artificial Sequence
  Description of Artificial Sequence: Synthetic oligonucleotide
aaaugagauuguauuuagg

SEQ ID NO: 3263269 - RNA, 19 nt, Artificial Sequence
  Description of Artificial Sequence: Synthetic oligonucleotide
aaaacccagacagcuaaag

SEQ ID NO: 3263270 - RNA, 19 nt, Artificial Sequence
  Description of Artificial Sequence: Synthetic oligonucleotide
augagauuguauuuagggu

SEQ ID NO: 3263271 - RNA, 19 nt, Artificial Sequence
  Description of Artificial Sequence: Synthetic oligonucleotide
uagucuuugcagauggugu

SEQ ID NO: 3263272 - RNA, 19 nt, Artificial Sequence
  Description of Artificial Sequence: Synthetic oligonucleotide
agaagaucgccacugccag

SEQ ID NO: 3263273 - RNA, 19 nt, Artificial Sequence
  Description of Artificial Sequence: Synthetic oligonucleotide
uaggaagacuaccaucuug

SEQ ID NO: 3263274 - RNA, 19 nt, Artificial Sequence
  Description of Artificial Sequence: Synthetic oligonucleotide
agucuuugcagaugguguc

SEQ ID NO: 3263275 - RNA, 19 nt, Artificial Sequence
  Description of Artificial Sequence: Synthetic oligonucleotide
gaugugguaggguguaaag

SEQ ID NO: 3263276 - RNA, 19 nt, Artificial Sequence
  Description of Artificial Sequence: Synthetic oligonucleotide
uucuuuugcagaauguguu

SEQ ID NO: 3263277 - RNA, 19 nt, Artificial Sequence
  Description of Artificial Sequence: Synthetic oligonucleotide
guguaaagaguacagagaa

SEQ ID NO: 3263278 - RNA, 19 nt, Artificial Sequence
  Description of Artificial Sequence: Synthetic oligonucleotide
caaagucaggcacaaacug

SEQ ID NO: 3263279 - RNA, 19 nt, Artificial Sequence
  Description of Artificial Sequence: Synthetic oligonucleotide
cuucuaagguuacuaaaac

SEQ ID NO: 3263280 - RNA, 19 nt, Artificial Sequence
  Description of Artificial Sequence: Synthetic oligonucleotide
agaauuuaugaaaagggau

SEQ ID NO: 3263281 - RNA, 19 nt, Artificial Sequence
  Description of Artificial Sequence: Synthetic oligonucleotide
aaacccagacagcuaaaga

SEQ ID NO: 3263282 - RNA, 19 nt, Artificial Sequence
  Description of Artificial Sequence: Synthetic oligonucleotide
uggcagagcagucaccugc

SEQ ID NO: 3263283 - RNA, 19 nt, Artificial Sequence
  Description of Artificial Sequence: Synthetic oligonucleotide
ggguguaaagaguacagag

SEQ ID NO: 3263284 - RNA, 19 nt, Artificial Sequence
  Description of Artificial Sequence: Synthetic oligonucleotide
agagaggggaaugaggaag

SEQ ID NO: 3263285 - RNA, 19 nt, Artificial Sequence
  Description of Artificial Sequence: Synthetic oligonucleotide
gaauuuaugaaaagggaua

SEQ ID NO: 3263286 - RNA, 19 nt, Artificial Sequence
  Description of Artificial Sequence: Synthetic oligonucleotide
cuuuaggaagacuaccauc

SEQ ID NO: 3263287 - RNA, 19 nt, Artificial Sequence
  Description of Artificial Sequence: Synthetic oligonucleotide
ucaggcacaaacuguaaau

SEQ ID NO: 3263288 - RNA, 19 nt, Artificial Sequence
  Description of Artificial Sequence: Synthetic oligonucleotide
uuacuaaaacccagacagc

SEQ ID NO: 3263289 - RNA, 19 nt, Artificial Sequence
  Description of Artificial Sequence: Synthetic oligonucleotide
aauggcaaacuccuucuuu

SEQ ID NO: 3263290 - RNA, 19 nt, Artificial Sequence
  Description of Artificial Sequence: Synthetic oligonucleotide
ugccugauuggucagaauu

SEQ ID NO: 3263291 - RNA, 19 nt, Artificial Sequence
  Description of Artificial Sequence: Synthetic oligonucleotide
aacuccuucuuuugcagaa

SEQ ID NO: 3263292 - RNA, 19 nt, Artificial Sequence
  Description of Artificial Sequence: Synthetic oligonucleotide
uggugucuuugccugauug

SEQ ID NO: 3263293 - RNA, 19 nt, Artificial Sequence
  Description of Artificial Sequence: Synthetic oligonucleotide
uugcgcaugaugugguagg

SEQ ID NO: 3263294 - RNA, 19 nt, Artificial Sequence
  Description of Artificial Sequence: Synthetic oligonucleotide
cagaauuuaugaaaaggga

SEQ ID NO: 3263295 - RNA, 19 nt, Artificial Sequence
  Description of Artificial Sequence: Synthetic oligonucleotide
aaagucaggcacaaacugu

SEQ ID NO: 3263296 - RNA, 19 nt, Artificial Sequence
  Description of Artificial Sequence: Synthetic oligonucleotide
guucccggaacuugcauag

SEQ ID NO: 3263297 - RNA, 19 nt, Artificial Sequence
  Description of Artificial Sequence: Synthetic oligonucleotide
gcauagucuuugcagaugg

SEQ ID NO: 3263298 - RNA, 19 nt, Artificial Sequence
  Description of Artificial Sequence: Synthetic oligonucleotide
auuggucagaauuuaugaa

SEQ ID NO: 3263299 - RNA, 19 nt, Artificial Sequence
  Description of Artificial Sequence: Synthetic oligonucleotide
cacagagaggggaaugagg

SEQ ID NO: 3263300 - RNA, 19 nt, Artificial Sequence
  Description of Artificial Sequence: Synthetic oligonucleotide
ucuuuaggaagacuaccau

SEQ ID NO: 3263301 - RNA, 19 nt, Artificial Sequence
  Description of Artificial Sequence: Synthetic oligonucleotide
uaagcgcagaggcuugucc

SEQ ID NO: 3263302 - RNA, 19 nt, Artificial Sequence
  Description of Artificial Sequence: Synthetic oligonucleotide
cuugcauagucuuugcaga

SEQ ID NO: 3263303 - RNA, 19 nt, Artificial Sequence
  Description of Artificial Sequence: Synthetic oligonucleotide
ugccagaaccacuaagcgc

SEQ ID NO: 3263304 - RNA, 19 nt, Artificial Sequence
  Description of Artificial Sequence: Synthetic oligonucleotide
uaaagaguacagagaagau

SEQ ID NO: 3263305 - RNA, 19 nt, Artificial Sequence
  Description of Artificial Sequence: Synthetic oligonucleotide
aaagugaagaaguugaugg

SEQ ID NO: 3263306 - RNA, 19 nt, Artificial Sequence
  Description of Artificial Sequence: Synthetic oligonucleotide
ucuacuauaacuauuuucu

SEQ ID NO: 3263307 - RNA, 19 nt, Artificial Sequence
  Description of Artificial Sequence: Synthetic oligonucleotide
acuauaacuauuuucuugg

SEQ ID NO: 3263308 - RNA, 19 nt, Artificial Sequence
  Description of Artificial Sequence: Synthetic oligonucleotide
aaguugauggcaaagaacg

SEQ ID NO: 3263309 - RNA, 19 nt, Artificial Sequence
  Description of Artificial Sequence: Synthetic oligonucleotide
ugugcuacaauuaaccuug

SEQ ID NO: 3263310 - RNA, 19 nt, Artificial Sequence
  Description of Artificial Sequence: Synthetic oligonucleotide
agacgaagaggucagaggc

SEQ ID NO: 3263311 - RNA, 19 nt, Artificial Sequence
  Description of Artificial Sequence: Synthetic oligonucleotide
auaacuauuuucuuggacu

SEQ ID NO: 3263312 - RNA, 19 nt, Artificial Sequence
  Description of Artificial Sequence: Synthetic oligonucleotide
uauuccguggguuaucucg

SEQ ID NO: 3263313 - RNA, 19 nt, Artificial Sequence
  Description of Artificial Sequence: Synthetic oligonucleotide
aagugaagaaguugauggc

SEQ ID NO: 3263314 - RNA, 19 nt, Artificial Sequence
  Description of Artificial Sequence: Synthetic oligonucleotide
cuacaauuaaccuugggug

SEQ ID NO: 3263315 - RNA, 19 nt, Artificial Sequence
  Description of Artificial Sequence: Synthetic oligonucleotide
uggaaagugaagaaguuga

SEQ ID NO: 3263316 - RNA, 19 nt, Artificial Sequence
  Description of Artificial Sequence: Synthetic oligonucleotide
ucuucuuguaucuuuagcu

SEQ ID NO: 3263317 - RNA, 19 nt, Artificial Sequence
  Description of Artificial Sequence: Synthetic oligonucleotide
uucugugcuacaauuaacc

SEQ ID NO: 3263318 - RNA, 19 nt, Artificial Sequence
  Description of Artificial Sequence: Synthetic oligonucleotide
uacuauaacuauuuucuug

SEQ ID NO: 3263319 - RNA, 19 nt, Artificial Sequence
  Description of Artificial Sequence: Synthetic oligonucleotide
aagacgaagaggucagagg

SEQ ID NO: 3263320 - RNA, 19 nt, Artificial Sequence
  Description of Artificial Sequence: Synthetic oligonucleotide
uuuucagaugcucucgcag

SEQ ID NO: 3263321 - RNA, 19 nt, Artificial Sequence
  Description of Artificial Sequence: Synthetic oligonucleotide
acuggaagagcugagcugc

SEQ ID NO: 3263322 - RNA, 19 nt, Artificial Sequence
  Description of Artificial Sequence: Synthetic oligonucleotide
ucuucuagcucucugugca

SEQ ID NO: 3263323 - RNA, 19 nt, Artificial Sequence
  Description of Artificial Sequence: Synthetic oligonucleotide
ugaggaaucggacuccgag

SEQ ID NO: 3263324 - RNA, 19 nt, Artificial Sequence
  Description of Artificial Sequence: Synthetic oligonucleotide
uauaacuauuuucuuggac

SEQ ID NO: 3263325 - RNA, 19 nt, Artificial Sequence
  Description of Artificial Sequence: Synthetic oligonucleotide
auuuucuuggacuucuuca

SEQ ID NO: 3263326 - RNA, 19 nt, Artificial Sequence
  Description of Artificial Sequence: Synthetic oligonucleotide
gaugcugaagacgaagagg

SEQ ID NO: 3263327 - RNA, 19 nt, Artificial Sequence
  Description of Artificial Sequence: Synthetic oligonucleotide
uggacuucuucacuucugg

SEQ ID NO: 3263328 - RNA, 19 nt, Artificial Sequence
  Description of Artificial Sequence: Synthetic oligonucleotide
uccgagaggaugcugaaga

SEQ ID NO: 3263329 - RNA, 19 nt, Artificial Sequence
  Description of Artificial Sequence: Synthetic oligonucleotide
uuuucuuggacuucuucac

SEQ ID NO: 3263330 - RNA, 19 nt, Artificial Sequence
  Description of Artificial Sequence: Synthetic oligonucleotide
uccaaagaccuauggaaag

SEQ ID NO: 3263331 - RNA, 19 nt, Artificial Sequence
  Description of Artificial Sequence: Synthetic oligonucleotide
aagaacggguauuccgugg

SEQ ID NO: 3263332 - RNA, 19 nt, Artificial Sequence
  Description of Artificial Sequence: Synthetic oligonucleotide
auccguuaaaccuccaaag

SEQ ID NO: 3263333 - RNA, 19 nt, Artificial Sequence
  Description of Artificial Sequence: Synthetic oligonucleotide
acucugaggaaucggacuc

SEQ ID NO: 3263334 - RNA, 19 nt, Artificial Sequence
  Description of Artificial Sequence: Synthetic oligonucleotide
uacaauuaaccuugggugu

SEQ ID NO: 3263335 - RNA, 19 nt, Artificial Sequence
  Description of Artificial Sequence: Synthetic oligonucleotide
guugauggcaaagaacggg

SEQ ID NO: 3263336 - RNA, 19 nt, Artificial Sequence
  Description of Artificial Sequence: Synthetic oligonucleotide
uucuucuuguaucuuuagc

SEQ ID NO: 3263337 - RNA, 19 nt, Artificial Sequence
  Description of Artificial Sequence: Synthetic oligonucleotide
aaccuccaaagaccuaugg

SEQ ID NO: 3263338 - RNA, 19 nt, Artificial Sequence
  Description of Artificial Sequence: Synthetic oligonucleotide
ucuuuugcucgccuucggg

SEQ ID NO: 3263339 - RNA, 19 nt, Artificial Sequence
  Description of Artificial Sequence: Synthetic oligonucleotide
aggaaucggacuccgagag

SEQ ID NO: 3263340 - RNA, 19 nt, Artificial Sequence
  Description of Artificial Sequence: Synthetic oligonucleotide
augcucucgcaguucaucc

SEQ ID NO: 3263341 - RNA, 19 nt, Artificial Sequence
  Description of Artificial Sequence: Synthetic oligonucleotide
uccguuaaaccuccaaaga

SEQ ID NO: 3263342 - RNA, 19 nt, Artificial Sequence
  Description of Artificial Sequence: Synthetic oligonucleotide
ucagagucggacucugagg

SEQ ID NO: 3263343 - RNA, 19 nt, Artificial Sequence
  Description of Artificial Sequence: Synthetic oligonucleotide
aaagaacggguauuccgug

SEQ ID NO: 3263344 - RNA, 19 nt, Artificial Sequence
  Description of Artificial Sequence: Synthetic oligonucleotide
gaggcgguucuuuugcucg

SEQ ID NO: 3263345 - RNA, 19 nt, Artificial Sequence
  Description of Artificial Sequence: Synthetic oligonucleotide
cucuacuauaacuauuuuc

SEQ ID NO: 3263346 - RNA, 19 nt, Artificial Sequence
  Description of Artificial Sequence: Synthetic oligonucleotide
uugauggcaaagaacgggu

SEQ ID NO: 3263347 - RNA, 19 nt, Artificial Sequence
  Description of Artificial Sequence: Synthetic oligonucleotide
gaggcagagucucugacug

SEQ ID NO: 3263348 - RNA, 19 nt, Artificial Sequence
  Description of Artificial Sequence: Synthetic oligonucleotide
ucagaggcgguucuuuugc

SEQ ID NO: 3263349 - RNA, 19 nt, Artificial Sequence
  Description of Artificial Sequence: Synthetic oligonucleotide
cuuuugcucgccuucgggg

SEQ ID NO: 3263350 - RNA, 19 nt, Artificial Sequence
  Description of Artificial Sequence: Synthetic oligonucleotide
cuuuagcugaggcagaguc

SEQ ID NO: 3263351 - RNA, 19 nt, Artificial Sequence
  Description of Artificial Sequence: Synthetic oligonucleotide
agaacggguauuccguggg

SEQ ID NO: 3263352 - RNA, 19 nt, Artificial Sequence
  Description of Artificial Sequence: Synthetic oligonucleotide
gaaagugaagaaguugaug

SEQ ID NO: 3263353 - RNA, 19 nt, Artificial Sequence
  Description of Artificial Sequence: Synthetic oligonucleotide
aguucauccguuaaaccuc

SEQ ID NO: 3263354 - RNA, 19 nt, Artificial Sequence
  Description of Artificial Sequence: Synthetic oligonucleotide
aagaaguugauggcaaaga

SEQ ID NO: 3263355 - RNA, 19 nt, Artificial Sequence
  Description of Artificial Sequence: Synthetic oligonucleotide
uuggucucgaccauuccca

SEQ ID NO: 3263356 - RNA, 19 nt, Artificial Sequence
  Description of Artificial Sequence: Synthetic oligonucleotide
gaagaaguugauggcaaag

SEQ ID NO: 3263357 - RNA, 19 nt, Artificial Sequence
  Description of Artificial Sequence: Synthetic oligonucleotide
aggaugaggagucgcuccc

SEQ ID NO: 3263358 - RNA, 19 nt, Artificial Sequence
  Description of Artificial Sequence: Synthetic oligonucleotide
ucacuggaagagcugagcu

SEQ ID NO: 3263359 - RNA, 19 nt, Artificial Sequence
  Description of Artificial Sequence: Synthetic oligonucleotide
aacucuacuauaacuauuu

SEQ ID NO: 3263360 - RNA, 19 nt, Artificial Sequence
  Description of Artificial Sequence: Synthetic oligonucleotide
uaaaccuccaaagaccuau

SEQ ID NO: 3263361 - RNA, 19 nt, Artificial Sequence
  Description of Artificial Sequence: Synthetic oligonucleotide
gcaaagaacggguauuccg

SEQ ID NO: 3263362 - RNA, 19 nt, Artificial Sequence
  Description of Artificial Sequence: Synthetic oligonucleotide
gaaguugauggcaaagaac

SEQ ID NO: 3263363 - RNA, 19 nt, Artificial Sequence
  Description of Artificial Sequence: Synthetic oligonucleotide
ucugugcuacaauuaaccu

SEQ ID NO: 3263364 - RNA, 19 nt, Artificial Sequence
  Description of Artificial Sequence: Synthetic oligonucleotide
agagcugagcugcucucgc

SEQ ID NO: 3263365 - RNA, 19 nt, Artificial Sequence
  Description of Artificial Sequence: Synthetic oligonucleotide
cuuggucucgaccauuccc

SEQ ID NO: 3263366 - RNA, 19 nt, Artificial Sequence
  Description of Artificial Sequence: Synthetic oligonucleotide
uauuuucuuggacuucuuc

SEQ ID NO: 3263367 - RNA, 19 nt, Artificial Sequence
  Description of Artificial Sequence: Synthetic oligonucleotide
gaagacgaagaggucagag

SEQ ID NO: 3263368 - RNA, 19 nt, Artificial Sequence
  Description of Artificial Sequence: Synthetic oligonucleotide
agaaguugauggcaaagaa

SEQ ID NO: 3263369 - RNA, 19 nt, Artificial Sequence
  Description of Artificial Sequence: Synthetic oligonucleotide
aacuauuuucuuggacuuc

SEQ ID NO: 3263370 - RNA, 19 nt, Artificial Sequence
  Description of Artificial Sequence: Synthetic oligonucleotide
uuucugugcuacaauuaac

SEQ ID NO: 3263371 - RNA, 19 nt, Artificial Sequence
  Description of Artificial Sequence: Synthetic oligonucleotide
uuucagaugcucucgcagu

SEQ ID NO: 3263372 - RNA, 19 nt, Artificial Sequence
  Description of Artificial Sequence: Synthetic oligonucleotide
caugucuuggucucgacca

SEQ ID NO: 3263373 - RNA, 19 nt, Artificial Sequence
  Description of Artificial Sequence: Synthetic oligonucleotide
ugaggagucgcucccuuca

SEQ ID NO: 3263374 - RNA, 19 nt, Artificial Sequence
  Description of Artificial Sequence: Synthetic oligonucleotide
ugcuacaauuaaccuuggg

SEQ ID NO: 3263375 - RNA, 19 nt, Artificial Sequence
  Description of Artificial Sequence: Synthetic oligonucleotide
acuauuuucuuggacuucu

SEQ ID NO: 3263376 - RNA, 19 nt, Artificial Sequence
  Description of Artificial Sequence: Synthetic oligonucleotide
uuuagcugaggcagagucu

SEQ ID NO: 3263377 - RNA, 19 nt, Artificial Sequence
  Description of Artificial Sequence: Synthetic oligonucleotide
agugaagaaguugauggca

SEQ ID NO: 3263378 - RNA, 19 nt, Artificial Sequence
  Description of Artificial Sequence: Synthetic oligonucleotide
uaacuauuuucuuggacuu

SEQ ID NO: 3263379 - RNA, 19 nt, Artificial Sequence
  Description of Artificial Sequence: Synthetic oligonucleotide
cugaagacgaagaggucag

SEQ ID NO: 3263380 - RNA, 19 nt, Artificial Sequence
  Description of Artificial Sequence: Synthetic oligonucleotide
ucccaacucuacuauaacu

SEQ ID NO: 3263381 - RNA, 19 nt, Artificial Sequence
  Description of Artificial Sequence: Synthetic oligonucleotide
ucggacuccgagaggaugc

SEQ ID NO: 3263382 - RNA, 19 nt, Artificial Sequence
  Description of Artificial Sequence: Synthetic oligonucleotide
ucuucuucuuguaucuuua

SEQ ID NO: 3263383 - RNA, 19 nt, Artificial Sequence
  Description of Artificial Sequence: Synthetic oligonucleotide
ucugugcaugucuuggucu

SEQ ID NO: 3263384 - RNA, 19 nt, Artificial Sequence
  Description of Artificial Sequence: Synthetic oligonucleotide
gaggaugaggagucgcucc

SEQ ID NO: 3263385 - RNA, 19 nt, Artificial Sequence
  Description of Artificial Sequence: Synthetic oligonucleotide
augcugaagacgaagaggu

SEQ ID NO: 3263386 - RNA, 19 nt, Artificial Sequence
  Description of Artificial Sequence: Synthetic oligonucleotide
uuucuuggacuucuucacu

SEQ ID NO: 3263387 - RNA, 19 nt, Artificial Sequence
  Description of Artificial Sequence: Synthetic oligonucleotide
ucucgcugcugucagaguc

SEQ ID NO: 3263388 - RNA, 19 nt, Artificial Sequence
  Description of Artificial Sequence: Synthetic oligonucleotide
uuagcugaggcagagucuc

SEQ ID NO: 3263389 - RNA, 19 nt, Artificial Sequence
  Description of Artificial Sequence: Synthetic oligonucleotide
gagaggaugcugaagacga

SEQ ID NO: 3263390 - RNA, 19 nt, Artificial Sequence
  Description of Artificial Sequence: Synthetic oligonucleotide
uauggaaagugaagaaguu

SEQ ID NO: 3263391 - RNA, 19 nt, Artificial Sequence
  Description of Artificial Sequence: Synthetic oligonucleotide
ucugacugcuggaggauga

SEQ ID NO: 3263392 - RNA, 19 nt, Artificial Sequence
  Description of Artificial Sequence: Synthetic oligonucleotide
acgaagaggucagaggcgg

SEQ ID NO: 3263393 - RNA, 19 nt, Artificial Sequence
  Description of Artificial Sequence: Synthetic oligonucleotide
gaaucggacuccgagagga

SEQ ID NO: 3263394 - RNA, 19 nt, Artificial Sequence
  Description of Artificial Sequence: Synthetic oligonucleotide
gucagagucggacucugag

SEQ ID NO: 3263395 - RNA, 19 nt, Artificial Sequence
  Description of Artificial Sequence: Synthetic oligonucleotide
uuuugcucgccuucggggu

SEQ ID NO: 3263396 - RNA, 19 nt, Artificial Sequence
  Description of Artificial Sequence: Synthetic oligonucleotide
ucguucuucuucuuguauc

SEQ ID NO: 3263397 - RNA, 19 nt, Artificial Sequence
  Description of Artificial Sequence: Synthetic oligonucleotide
aagagcugagcugcucucg

SEQ ID NO: 3263398 - RNA, 19 nt, Artificial Sequence
  Description of Artificial Sequence: Synthetic oligonucleotide
cuauggaaagugaagaagu

SEQ ID NO: 3263399 - RNA, 19 nt, Artificial Sequence
  Description of Artificial Sequence: Synthetic oligonucleotide
uucuuuugcucgccuucgg

SEQ ID NO: 3263400 - RNA, 19 nt, Artificial Sequence
  Description of Artificial Sequence: Synthetic oligonucleotide
auggaaagugaagaaguug

SEQ ID NO: 3263401 - RNA, 19 nt, Artificial Sequence
  Description of Artificial Sequence: Synthetic oligonucleotide
gaccuauggaaagugaaga

SEQ ID NO: 3263402 - RNA, 19 nt, Artificial Sequence
  Description of Artificial Sequence: Synthetic oligonucleotide
agucucugacugcuggagg

SEQ ID NO: 3263403 - RNA, 19 nt, Artificial Sequence
  Description of Artificial Sequence: Synthetic oligonucleotide
uggguuaucucgagguaac

SEQ ID NO: 3263404 - RNA, 19 nt, Artificial Sequence
  Description of Artificial Sequence: Synthetic oligonucleotide
ucugaggaaucggacuccg

SEQ ID NO: 3263405 - RNA, 19 nt, Artificial Sequence
  Description of Artificial Sequence: Synthetic oligonucleotide
aauagauccuguuugguuc

SEQ ID NO: 3263406 - RNA, 19 nt, Artificial Sequence
  Description of Artificial Sequence: Synthetic oligonucleotide
uccagaauaucucucacgg

SEQ ID NO: 3263407 - RNA, 19 nt, Artificial Sequence
  Description of Artificial Sequence: Synthetic oligonucleotide
aaaucaugcuuauauacug

SEQ ID NO: 3263408 - RNA, 19 nt, Artificial Sequence
  Description of Artificial Sequence: Synthetic oligonucleotide
aaugaguugucuuugcucu

SEQ ID NO: 3263409 - RNA, 19 nt, Artificial Sequence
  Description of Artificial Sequence: Synthetic oligonucleotide
aaugccacauccuuagcgg

SEQ ID NO: 3263410 - RNA, 19 nt, Artificial Sequence
  Description of Artificial Sequence: Synthetic oligonucleotide
aaaugaguugucuuugcuc

SEQ ID NO: 3263411 - RNA, 19 nt, Artificial Sequence
  Description of Artificial Sequence: Synthetic oligonucleotide
aucaaauugggcugcaggc

SEQ ID NO: 3263412 - RNA, 19 nt, Artificial Sequence
  Description of Artificial Sequence: Synthetic oligonucleotide
gaaccugaggccuucaagg

SEQ ID NO: 3263413 - RNA, 19 nt, Artificial Sequence
  Description of Artificial Sequence: Synthetic oligonucleotide
aucaugcuuauauacugcc

SEQ ID NO: 3263414 - RNA, 19 nt, Artificial Sequence
  Description of Artificial Sequence: Synthetic oligonucleotide
cagaauaucucucacggcc

SEQ ID NO: 3263415 - RNA, 19 nt, Artificial Sequence
  Description of Artificial Sequence: Synthetic oligonucleotide
uuugguucgcucuuggaag

SEQ ID NO: 3263416 - RNA, 19 nt, Artificial Sequence
  Description of Artificial Sequence: Synthetic oligonucleotide
aaucaugcuuauauacugc

SEQ ID NO: 3263417 - RNA, 19 nt, Artificial Sequence
  Description of Artificial Sequence: Synthetic oligonucleotide
uucaauagauccuguuugg

SEQ ID NO: 3263418 - RNA, 19 nt, Artificial Sequence
  Description of Artificial Sequence: Synthetic oligonucleotide
aaugacuccagaauaucuc

SEQ ID NO: 3263419 - RNA, 19 nt, Artificial Sequence
  Description of Artificial Sequence: Synthetic oligonucleotide
aaccugaggccuucaaggc

SEQ ID NO: 3263420 - RNA, 19 nt, Artificial Sequence
  Description of Artificial Sequence: Synthetic oligonucleotide
ugcaagaugccauuggucu

SEQ ID NO: 3263421 - RNA, 19 nt, Artificial Sequence
  Description of Artificial Sequence: Synthetic oligonucleotide
agaaaugaguugucuuugc

SEQ ID NO: 3263422 - RNA, 19 nt, Artificial Sequence
  Description of Artificial Sequence: Synthetic oligonucleotide
cuuauauacugccaggcac

SEQ ID NO: 3263423 - RNA, 19 nt, Artificial Sequence
  Description of Artificial Sequence: Synthetic oligonucleotide
cuucaauagauccuguuug

SEQ ID NO: 3263424 - RNA, 19 nt, Artificial Sequence
  Description of Artificial Sequence: Synthetic oligonucleotide
caaggacuucaauagaucc

SEQ ID NO: 3263425 - RNA, 19 nt, Artificial Sequence
  Description of Artificial Sequence: Synthetic oligonucleotide
uauacugccaggcacuccu

SEQ ID NO: 3263426 - RNA, 19 nt, Artificial Sequence
  Description of Artificial Sequence: Synthetic oligonucleotide
caugcuuauauacugccag

SEQ ID NO: 3263427 - RNA, 19 nt, Artificial Sequence
  Description of Artificial Sequence: Synthetic oligonucleotide
uuauauacugccaggcacu

SEQ ID NO: 3263428 - RNA, 19 nt, Artificial Sequence
  Description of Artificial Sequence: Synthetic oligonucleotide
ucuugcaagaugccauugg

SEQ ID NO: 3263429 - RNA, 19 nt, Artificial Sequence
  Description of Artificial Sequence: Synthetic oligonucleotide
ugucuuugcucucugcucc

SEQ ID NO: 3263430 - RNA, 19 nt, Artificial Sequence
  Description of Artificial Sequence: Synthetic oligonucleotide
uccaaugccacauccuuag

SEQ ID NO: 3263431 - RNA, 19 nt, Artificial Sequence
  Description of Artificial Sequence: Synthetic oligonucleotide
uuccugggcaucaaauugg

SEQ ID NO: 3263432 - RNA, 19 nt, Artificial Sequence
  Description of Artificial Sequence: Synthetic oligonucleotide
gaugccauuggucucaguc

SEQ ID NO: 3263433 - RNA, 19 nt, Artificial Sequence
  Description of Artificial Sequence: Synthetic oligonucleotide
augccauuggucucagucc

SEQ ID NO: 3263434 - RNA, 19 nt, Artificial Sequence
  Description of Artificial Sequence: Synthetic oligonucleotide
gauuuccaaugccacaucc

SEQ ID NO: 3263435 - RNA, 19 nt, Artificial Sequence
  Description of Artificial Sequence: Synthetic oligonucleotide
cuugcucagggccagaagc

SEQ ID NO: 3263436 - RNA, 19 nt, Artificial Sequence
  Description of Artificial Sequence: Synthetic oligonucleotide
ccugauaucuuccugagcc

SEQ ID NO: 3263437 - RNA, 19 nt, Artificial Sequence
  Description of Artificial Sequence: Synthetic oligonucleotide
acuccugcagucugggugc

SEQ ID NO: 3263438 - RNA, 19 nt, Artificial Sequence
  Description of Artificial Sequence: Synthetic oligonucleotide
auuccugggcaucaaauug

SEQ ID NO: 3263439 - RNA, 19 nt, Artificial Sequence
  Description of Artificial Sequence: Synthetic oligonucleotide
agcaggucuugcaagaugc

SEQ ID NO: 3263440 - RNA, 19 nt, Artificial Sequence
  Description of Artificial Sequence: Synthetic oligonucleotide
ucuccagguugccagagag

SEQ ID NO: 3263441 - RNA, 19 nt, Artificial Sequence
  Description of Artificial Sequence: Synthetic oligonucleotide
uuggucucaguccugauau

SEQ ID NO: 3263442 - RNA, 19 nt, Artificial Sequence
  Description of Artificial Sequence: Synthetic oligonucleotide
ggaaaucaugcuuauauac

SEQ ID NO: 3263443 - RNA, 19 nt, Artificial Sequence
  Description of Artificial Sequence: Synthetic oligonucleotide
auagauccuguuugguucg

SEQ ID NO: 3263444 - RNA, 19 nt, Artificial Sequence
  Description of Artificial Sequence: Synthetic oligonucleotide
caucaaauugggcugcagg

SEQ ID NO: 3263445 - RNA, 19 nt, Artificial Sequence
  Description of Artificial Sequence: Synthetic oligonucleotide
caaugccacauccuuagcg

SEQ ID NO: 3263446 - RNA, 19 nt, Artificial Sequence
  Description of Artificial Sequence: Synthetic oligonucleotide
agccaccacaauuuucucc

SEQ ID NO: 3263447 - RNA, 19 nt, Artificial Sequence
  Description of Artificial Sequence: Synthetic oligonucleotide
gaaguaccuggacaucucg

SEQ ID NO: 3263448 - RNA, 19 nt, Artificial Sequence
  Description of Artificial Sequence: Synthetic oligonucleotide
gagagugcugccugcaagg

SEQ ID NO: 3263449 - RNA, 19 nt, Artificial Sequence
  Description of Artificial Sequence: Synthetic oligonucleotide
uagucaaugacuccagaau

SEQ ID NO: 3263450 - RNA, 19 nt, Artificial Sequence
  Description of Artificial Sequence: Synthetic oligonucleotide
aagcuguagucaaugacuc

SEQ ID NO: 3263451 - RNA, 19 nt, Artificial Sequence
  Description of Artificial Sequence: Synthetic oligonucleotide
ugcaaggacuucaauagau

SEQ ID NO: 3263452 - RNA, 19 nt, Artificial Sequence
  Description of Artificial Sequence: Synthetic oligonucleotide
aucuuccugagccuccacc

SEQ ID NO: 3263453 - RNA, 19 nt, Artificial Sequence
  Description of Artificial Sequence: Synthetic oligonucleotide
ugaccugccauacuggauc

SEQ ID NO: 3263454 - RNA, 19 nt, Artificial Sequence
  Description of Artificial Sequence: Synthetic oligonucleotide
ucucguucuuccaagcugu

SEQ ID NO: 3263455 - RNA, 19 nt, Artificial Sequence
  Description of Artificial Sequence: Synthetic oligonucleotide
agaauaucucucacggccc

SEQ ID NO: 3263456 - RNA, 19 nt, Artificial Sequence
  Description of Artificial Sequence: Synthetic oligonucleotide
guggcaaggauuuccaaug

SEQ ID NO: 3263457 - RNA, 19 nt, Artificial Sequence
  Description of Artificial Sequence: Synthetic oligonucleotide
uguaggagagccaccacaa

SEQ ID NO: 3263458 - RNA, 19 nt, Artificial Sequence
  Description of Artificial Sequence: Synthetic oligonucleotide
aauuccugggcaucaaauu

SEQ ID NO: 3263459 - RNA, 19 nt, Artificial Sequence
  Description of Artificial Sequence: Synthetic oligonucleotide
ugagccuccaccuggaaau

SEQ ID NO: 3263460 - RNA, 19 nt, Artificial Sequence
  Description of Artificial Sequence: Synthetic oligonucleotide
acaucucguucuuccaagc

SEQ ID NO: 3263461 - RNA, 19 nt, Artificial Sequence
  Description of Artificial Sequence: Synthetic oligonucleotide
ugggcaucaaauugggcug

SEQ ID NO: 3263462 - RNA, 19 nt, Artificial Sequence
  Description of Artificial Sequence: Synthetic oligonucleotide
gacaucucguucuuccaag

SEQ ID NO: 3263463 - RNA, 19 nt, Artificial Sequence
  Description of Artificial Sequence: Synthetic oligonucleotide
uugggcugcaggcuguagg

SEQ ID NO: 3263464 - RNA, 19 nt, Artificial Sequence
  Description of Artificial Sequence: Synthetic oligonucleotide
accacaauuuucuccaggu

SEQ ID NO: 3263465 - RNA, 19 nt, Artificial Sequence
  Description of Artificial Sequence: Synthetic oligonucleotide
uccagguugccagagagug

SEQ ID NO: 3263466 - RNA, 19 nt, Artificial Sequence
  Description of Artificial Sequence: Synthetic oligonucleotide
aaggauuuccaaugccaca

SEQ ID NO: 3263467 - RNA, 19 nt, Artificial Sequence
  Description of Artificial Sequence: Synthetic oligonucleotide
uugguucgcucuuggaagg

SEQ ID NO: 3263468 - RNA, 19 nt, Artificial Sequence
  Description of Artificial Sequence: Synthetic oligonucleotide
uuccugagccuccaccugg

SEQ ID NO: 3263469 - RNA, 19 nt, Artificial Sequence
  Description of Artificial Sequence: Synthetic oligonucleotide
ugcuuauauacugccaggc

SEQ ID NO: 3263470 - RNA, 19 nt, Artificial Sequence
  Description of Artificial Sequence: Synthetic oligonucleotide
acuccagaauaucucucac

SEQ ID NO: 3263471 - RNA, 19 nt, Artificial Sequence
  Description of Artificial Sequence: Synthetic oligonucleotide
augcuuauauacugccagg

SEQ ID NO: 3263472 - RNA, 19 nt, Artificial Sequence
  Description of Artificial Sequence: Synthetic oligonucleotide
cuuagcggaaccugaggcc

SEQ ID NO: 3263473 - RNA, 19 nt, Artificial Sequence
  Description of Artificial Sequence: Synthetic oligonucleotide
aguugucuuugcucucugc

SEQ ID NO: 3263474 - RNA, 19 nt, Artificial Sequence
  Description of Artificial Sequence: Synthetic oligonucleotide
agucaaugacuccagaaua

SEQ ID NO: 3263475 - RNA, 19 nt, Artificial Sequence
  Description of Artificial Sequence: Synthetic oligonucleotide
caaggauuuccaaugccac

SEQ ID NO: 3263476 - RNA, 19 nt, Artificial Sequence
  Description of Artificial Sequence: Synthetic oligonucleotide
uuuccaaugccacauccuu

SEQ ID NO: 3263477 - RNA, 19 nt, Artificial Sequence
  Description of Artificial Sequence: Synthetic oligonucleotide
uccugggcaucaaauuggg

SEQ ID NO: 3263478 - RNA, 19 nt, Artificial Sequence
  Description of Artificial Sequence: Synthetic oligonucleotide
acuucaauagauccuguuu

SEQ ID NO: 3263479 - RNA, 19 nt, Artificial Sequence
  Description of Artificial Sequence: Synthetic oligonucleotide
ccugcaaggacuucaauag

SEQ ID NO: 3263480 - RNA, 19 nt, Artificial Sequence
  Description of Artificial Sequence: Synthetic oligonucleotide
ucuuccaagcuguagucaa

SEQ ID NO: 3263481 - RNA, 19 nt, Artificial Sequence
  Description of Artificial Sequence: Synthetic oligonucleotide
ucaugcuuauauacugcca

SEQ ID NO: 3263482 - RNA, 19 nt, Artificial Sequence
  Description of Artificial Sequence: Synthetic oligonucleotide
augacuccagaauaucucu

SEQ ID NO: 3263483 - RNA, 19 nt, Artificial Sequence
  Description of Artificial Sequence: Synthetic oligonucleotide
cugggugcugcucuggugg

SEQ ID NO: 3263484 - RNA, 19 nt, Artificial Sequence
  Description of Artificial Sequence: Synthetic oligonucleotide
aucucguucuuccaagcug

SEQ ID NO: 3263485 - RNA, 19 nt, Artificial Sequence
  Description of Artificial Sequence: Synthetic oligonucleotide
ucugguggcaaggauuucc

SEQ ID NO: 3263486 - RNA, 19 nt, Artificial Sequence
  Description of Artificial Sequence: Synthetic oligonucleotide
gagaaaugaguugucuuug

SEQ ID NO: 3263487 - RNA, 19 nt, Artificial Sequence
  Description of Artificial Sequence: Synthetic oligonucleotide
uucgcucuuggaaggcucg

SEQ ID NO: 3263488 - RNA, 19 nt, Artificial Sequence
  Description of Artificial Sequence: Synthetic oligonucleotide
cuccagaauaucucucacg

SEQ ID NO: 3263489 - RNA, 19 nt, Artificial Sequence
  Description of Artificial Sequence: Synthetic oligonucleotide
ugcugaaguaccuggacau

SEQ ID NO: 3263490 - RNA, 19 nt, Artificial Sequence
  Description of Artificial Sequence: Synthetic oligonucleotide
uccuuagcggaaccugagg

SEQ ID NO: 3263491 - RNA, 19 nt, Artificial Sequence
  Description of Artificial Sequence: Synthetic oligonucleotide
ucuuccugagccuccaccu

SEQ ID NO: 3263492 - RNA, 19 nt, Artificial Sequence
  Description of Artificial Sequence: Synthetic oligonucleotide
aggacuucaauagauccug

SEQ ID NO: 3263493 - RNA, 19 nt, Artificial Sequence
  Description of Artificial Sequence: Synthetic oligonucleotide
ucugcugaaguaccuggac

SEQ ID NO: 3263494 - RNA, 19 nt, Artificial Sequence
  Description of Artificial Sequence: Synthetic oligonucleotide
ugccauuggucucaguccu

SEQ ID NO: 3263495 - RNA, 19 nt, Artificial Sequence
  Description of Artificial Sequence: Synthetic oligonucleotide
aagcaggucuugcaagaug

SEQ ID NO: 3263496 - RNA, 19 nt, Artificial Sequence
  Description of Artificial Sequence: Synthetic oligonucleotide
cauugaccugccauacugg

SEQ ID NO: 3263497 - RNA, 19 nt, Artificial Sequence
  Description of Artificial Sequence: Synthetic oligonucleotide
agagccaccacaauuuucu

SEQ ID NO: 3263498 - RNA, 19 nt, Artificial Sequence
  Description of Artificial Sequence: Synthetic oligonucleotide
agagagugcugccugcaag

SEQ ID NO: 3263499 - RNA, 19 nt, Artificial Sequence
  Description of Artificial Sequence: Synthetic oligonucleotide
gaauaucucucacggcccc

SEQ ID NO: 3263500 - RNA, 19 nt, Artificial Sequence
  Description of Artificial Sequence: Synthetic oligonucleotide
agaagcaggucuugcaaga

SEQ ID NO: 3263501 - RNA, 19 nt, Artificial Sequence
  Description of Artificial Sequence: Synthetic oligonucleotide
ugccauacuggauccuccg

SEQ ID NO: 3263502 - RNA, 19 nt, Artificial Sequence
  Description of Artificial Sequence: Synthetic oligonucleotide
uucaaggcuguccucaauu

SEQ ID NO: 3263503 - RNA, 19 nt, Artificial Sequence
  Description of Artificial Sequence: Synthetic oligonucleotide
uguccucaauuccugggca

SEQ ID NO: 3263504 - RNA, 19 nt, Artificial Sequence
  Description of Artificial Sequence: Synthetic oligonucleotide
cuccaccuggaaaucaugc

SEQ ID NO: 3263505 - RNA, 19 nt, Artificial Sequence
  Description of Artificial Sequence: Synthetic oligonucleotide
uauauauauauauaaaagc

SEQ ID NO: 3263506 - RNA, 19 nt, Artificial Sequence
  Description of Artificial Sequence: Synthetic oligonucleotide
uuaucuaaagaauacauga

SEQ ID NO: 3263507 - RNA, 19 nt, Artificial Sequence
  Description of Artificial Sequence: Synthetic oligonucleotide
uguauauauauauauaugu

SEQ ID NO: 3263508 - RNA, 19 nt, Artificial Sequence
  Description of Artificial Sequence: Synthetic oligonucleotide
uauauauauauauauauaa

SEQ ID NO: 3263509 - RNA, 19 nt, Artificial Sequence
  Description of Artificial Sequence: Synthetic oligonucleotide
aauuaacucagauucaucu

SEQ ID NO: 3263510 - RNA, 19 nt, Artificial Sequence
  Description of Artificial Sequence: Synthetic oligonucleotide
uauauauguauauauaugu

SEQ ID NO: 3263511 - RNA, 19 nt, Artificial Sequence
  Description of Artificial Sequence: Synthetic oligonucleotide
ugaauugcaauuaaguucu

SEQ ID NO: 3263512 - RNA, 19 nt, Artificial Sequence
  Description of Artificial Sequence: Synthetic oligonucleotide
uauauauauauauauaaaa

SEQ ID NO: 3263513 - RNA, 19 nt, Artificial Sequence
  Description of Artificial Sequence: Synthetic oligonucleotide
aguauuucaucagugaucc

SEQ ID NO: 3263514 - RNA, 19 nt, Artificial Sequence
  Description of Artificial Sequence: Synthetic oligonucleotide
uguauauauauauauauau

SEQ ID NO: 3263515 - RNA, 19 nt, Artificial Sequence
  Description of Artificial Sequence: Synthetic oligonucleotide
aaaguccucauguauugcc

SEQ ID NO: 3263516 - RNA, 19 nt, Artificial Sequence
  Description of Artificial Sequence: Synthetic oligonucleotide
aaacacauguaacauguuc

SEQ ID NO: 3263517 - RNA, 19 nt, Artificial Sequence
  Description of Artificial Sequence: Synthetic oligonucleotide
uacaugaaaagccacaucu

SEQ ID NO: 3263518 - RNA, 19 nt, Artificial Sequence
  Description of Artificial Sequence: Synthetic oligonucleotide
uauauauauauguauauau

SEQ ID NO: 3263519 - RNA, 19 nt, Artificial Sequence
  Description of Artificial Sequence: Synthetic oligonucleotide
uauguauauauauauauau

SEQ ID NO: 3263520 - RNA, 19 nt, Artificial Sequence
  Description of Artificial Sequence: Synthetic oligonucleotide
ugcuacuuagauuuaaggg

SEQ ID NO: 3263521 - RNA, 19 nt, Artificial Sequence
  Description of Artificial Sequence: Synthetic oligonucleotide
uauauauauguauauauau

SEQ ID NO: 3263522 - RNA, 19 nt, Artificial Sequence
  Description of Artificial Sequence: Synthetic oligonucleotide
guuucaaugauucuuauuc

SEQ ID NO: 3263523 - RNA, 19 nt, Artificial Sequence
  Description of Artificial Sequence: Synthetic oligonucleotide
uauauauauauauauguau

SEQ ID NO: 3263524 - RNA, 19 nt, Artificial Sequence
  Description of Artificial Sequence: Synthetic oligonucleotide
aauuugcucauucaggacu

SEQ ID NO: 3263525 - RNA, 19 nt, Artificial Sequence
  Description of Artificial Sequence: Synthetic oligonucleotide
uguauguauauauauauau

SEQ ID NO: 3263526 - RNA, 19 nt, Artificial Sequence
  Description of Artificial Sequence: Synthetic oligonucleotide
auauauauauauauaaaag

SEQ ID NO: 3263527 - RNA, 19 nt, Artificial Sequence
  Description of Artificial Sequence: Synthetic oligonucleotide
uguguauauauauauauau

SEQ ID NO: 3263528 - RNA, 19 nt, Artificial Sequence
  Description of Artificial Sequence: Synthetic oligonucleotide
auguucuuauccuugaggg

SEQ ID NO: 3263529 - RNA, 19 nt, Artificial Sequence
  Description of Artificial Sequence: Synthetic oligonucleotide
uucgauguagggaagaaug

SEQ ID NO: 3263530 - RNA, 19 nt, Artificial Sequence
  Description of Artificial Sequence: Synthetic oligonucleotide
gacaaauuaaaauacugca

SEQ ID NO: 3263531 - RNA, 19 nt, Artificial Sequence
  Description of Artificial Sequence: Synthetic oligonucleotide
ggugaauuaacucagauuc

SEQ ID NO: 3263532 - RNA, 19 nt, Artificial Sequence
  Description of Artificial Sequence: Synthetic oligonucleotide
auuagaaauaacuuaaauu

SEQ ID NO: 3263533 - RNA, 19 nt, Artificial Sequence
  Description of Artificial Sequence: Synthetic oligonucleotide
auauauauauauaaaagcu

SEQ ID NO: 3263534 - RNA, 19 nt, Artificial Sequence
  Description of Artificial Sequence: Synthetic oligonucleotide
gaagaaugggauucaaggg

SEQ ID NO: 3263535 - RNA, 19 nt, Artificial Sequence
  Description of Artificial Sequence: Synthetic oligonucleotide
ugaaugguauguauaauca

SEQ ID NO: 3263536 - RNA, 19 nt, Artificial Sequence
  Description of Artificial Sequence: Synthetic oligonucleotide
auugggaauggucaggaac

SEQ ID NO: 3263537 - RNA, 19 nt, Artificial Sequence
  Description of Artificial Sequence: Synthetic oligonucleotide
aaauaacuuaaauuuugcu

SEQ ID NO: 3263538 - RNA, 19 nt, Artificial Sequence
  Description of Artificial Sequence: Synthetic oligonucleotide
auggucaguaaacagaaag

SEQ ID NO: 3263539 - RNA, 19 nt, Artificial Sequence
  Description of Artificial Sequence: Synthetic oligonucleotide
auaagggugaauuaacuca

SEQ ID NO: 3263540 - RNA, 19 nt, Artificial Sequence
  Description of Artificial Sequence: Synthetic oligonucleotide
uauauauauauaaaagcuu

SEQ ID NO: 3263541 - RNA, 19 nt, Artificial Sequence
  Description of Artificial Sequence: Synthetic oligonucleotide
ggaagaaugggauucaagg

SEQ ID NO: 3263542 - RNA, 19 nt, Artificial Sequence
  Description of Artificial Sequence: Synthetic oligonucleotide
uccauuuacagaaaacaca

SEQ ID NO: 3263543 - RNA, 19 nt, Artificial Sequence
  Description of Artificial Sequence: Synthetic oligonucleotide
gauauugccaaauugggaa

SEQ ID NO: 3263544 - RNA, 19 nt, Artificial Sequence
  Description of Artificial Sequence: Synthetic oligonucleotide
uguguguauauauauauau

SEQ ID NO: 3263545 - RNA, 19 nt, Artificial Sequence
  Description of Artificial Sequence: Synthetic oligonucleotide
ugaucuaagcaaaaccaag

SEQ ID NO: 3263546 - RNA, 19 nt, Artificial Sequence
  Description of Artificial Sequence: Synthetic oligonucleotide
uauauauauauauguauau

SEQ ID NO: 3263547 - RNA, 19 nt, Artificial Sequence
  Description of Artificial Sequence: Synthetic oligonucleotide
gauucaucuacucucagca

SEQ ID NO: 3263548 - RNA, 19 nt, Artificial Sequence
  Description of Artificial Sequence: Synthetic oligonucleotide
ucagcaaucguaguagucg

SEQ ID NO: 3263549 - RNA, 19 nt, Artificial Sequence
  Description of Artificial Sequence: Synthetic oligonucleotide
acaaauucgauguagggaa

SEQ ID NO: 3263550 - RNA, 19 nt, Artificial Sequence
  Description of Artificial Sequence: Synthetic oligonucleotide
uguaauggucaguaaacag

SEQ ID NO: 3263551 - RNA, 19 nt, Artificial Sequence
  Description of Artificial Sequence: Synthetic oligonucleotide
acagggaacucucacaagg

SEQ ID NO: 3263552 - RNA, 19 nt, Artificial Sequence
  Description of Artificial Sequence: Synthetic oligonucleotide
aagauauugccaaauuggg

SEQ ID NO: 3263553 - RNA, 19 nt, Artificial Sequence
  Description of Artificial Sequence: Synthetic oligonucleotide
aaugguauaagggugaauu

SEQ ID NO: 3263554 - RNA, 19 nt, Artificial Sequence
  Description of Artificial Sequence: Synthetic oligonucleotide
ucgaguucagugcugaugc

SEQ ID NO: 3263555 - RNA, 19 nt, Artificial Sequence
  Description of Artificial Sequence: Synthetic oligonucleotide
acaagguggucuuaaaguc

SEQ ID NO: 3263556 - RNA, 19 nt, Artificial Sequence
  Description of Artificial Sequence: Synthetic oligonucleotide
uagauuuaagggaauuugc

SEQ ID NO: 3263557 - RNA, 19 nt, Artificial Sequence
  Description of Artificial Sequence: Synthetic oligonucleotide
uauuagaaauaacuuaaau

SEQ ID NO: 3263558 - RNA, 19 nt, Artificial Sequence
  Description of Artificial Sequence: Synthetic oligonucleotide
gauugcacgagucacagga

SEQ ID NO: 3263559 - RNA, 19 nt, Artificial Sequence
  Description of Artificial Sequence: Synthetic oligonucleotide
uucaaugauucuuauuccc

SEQ ID NO: 3263560 - RNA, 19 nt, Artificial Sequence
  Description of Artificial Sequence: Synthetic oligonucleotide
aaugguauguauaaucaca

SEQ ID NO: 3263561 - RNA, 19 nt, Artificial Sequence
  Description of Artificial Sequence: Synthetic oligonucleotide
uguauaaucacagugccau

SEQ ID NO: 3263562 - RNA, 19 nt, Artificial Sequence
  Description of Artificial Sequence: Synthetic oligonucleotide
uuaaaguccucauguauug

SEQ ID NO: 3263563 - RNA, 19 nt, Artificial Sequence
  Description of Artificial Sequence: Synthetic oligonucleotide
caucccuugacccugauac

SEQ ID NO: 3263564 - RNA, 19 nt, Artificial Sequence
  Description of Artificial Sequence: Synthetic oligonucleotide
agauucaucuacucucagc

SEQ ID NO: 3263565 - RNA, 19 nt, Artificial Sequence
  Description of Artificial Sequence: Synthetic oligonucleotide
uuuaauguaauggucagua

SEQ ID NO: 3263566 - RNA, 19 nt, Artificial Sequence
  Description of Artificial Sequence: Synthetic oligonucleotide
aagcggugaaagaaaaugc

SEQ ID NO: 3263567 - RNA, 19 nt, Artificial Sequence
  Description of Artificial Sequence: Synthetic oligonucleotide
uccugaucuaagcaaaacc

SEQ ID NO: 3263568 - RNA, 19 nt, Artificial Sequence
  Description of Artificial Sequence: Synthetic oligonucleotide
uugcuacuuagauuuaagg

SEQ ID NO: 3263569 - RNA, 19 nt, Artificial Sequence
  Description of Artificial Sequence: Synthetic oligonucleotide
acucucaaaacugaguuuc

SEQ ID NO: 3263570 - RNA, 19 nt, Artificial Sequence
  Description of Artificial Sequence: Synthetic oligonucleotide
uauaaucacagugccaucc

SEQ ID NO: 3263571 - RNA, 19 nt, Artificial Sequence
  Description of Artificial Sequence: Synthetic oligonucleotide
ucaaggguuucaaugauuc

SEQ ID NO: 3263572 - RNA, 19 nt, Artificial Sequence
  Description of Artificial Sequence: Synthetic oligonucleotide
aaaauacugcagugcacuc

SEQ ID NO: 3263573 - RNA, 19 nt, Artificial Sequence
  Description of Artificial Sequence: Synthetic oligonucleotide
cauucacacauguuguucg

SEQ ID NO: 3263574 - RNA, 19 nt, Artificial Sequence
  Description of Artificial Sequence: Synthetic oligonucleotide
gguauguauaaucacagug

SEQ ID NO: 3263575 - RNA, 19 nt, Artificial Sequence
  Description of Artificial Sequence: Synthetic oligonucleotide
uugggaauggucaggaaca

SEQ ID NO: 3263576 - RNA, 19 nt, Artificial Sequence
  Description of Artificial Sequence: Synthetic oligonucleotide
acaggaaugguauaagggu

SEQ ID NO: 3263577 - RNA, 19 nt, Artificial Sequence
  Description of Artificial Sequence: Synthetic oligonucleotide
aaugauucuuauucccaug

SEQ ID NO: 3263578 - RNA, 19 nt, Artificial Sequence
  Description of Artificial Sequence: Synthetic oligonucleotide
uuucaaugauucuuauucc

SEQ ID NO: 3263579 - RNA, 19 nt, Artificial Sequence
  Description of Artificial Sequence: Synthetic oligonucleotide
aacacuacuuuauuagaaa

SEQ ID NO: 3263580 - RNA, 19 nt, Artificial Sequence
  Description of Artificial Sequence: Synthetic oligonucleotide
uuccauuuacagaaaacac

SEQ ID NO: 3263581 - RNA, 19 nt, Artificial Sequence
  Description of Artificial Sequence: Synthetic oligonucleotide
gauuuaagggaauuugcuc

SEQ ID NO: 3263582 - RNA, 19 nt, Artificial Sequence
  Description of Artificial Sequence: Synthetic oligonucleotide
gacuugagaccccagauac

SEQ ID NO: 3263583 - RNA, 19 nt, Artificial Sequence
  Description of Artificial Sequence: Synthetic oligonucleotide
aacacauguaacauguucu

SEQ ID NO: 3263584 - RNA, 19 nt, Artificial Sequence
  Description of Artificial Sequence: Synthetic oligonucleotide
uguuuauuaaugucaacua

SEQ ID NO: 3263585 - RNA, 19 nt, Artificial Sequence
  Description of Artificial Sequence: Synthetic oligonucleotide
acaaauuaaaauacugcag

SEQ ID NO: 3263586 - RNA, 19 nt, Artificial Sequence
  Description of Artificial Sequence: Synthetic oligonucleotide
auauauaugugugugugug

SEQ ID NO: 3263587 - RNA, 19 nt, Artificial Sequence
  Description of Artificial Sequence: Synthetic oligonucleotide
agaaaacacauguaacaug

SEQ ID NO: 3263588 - RNA, 19 nt, Artificial Sequence
  Description of Artificial Sequence: Synthetic oligonucleotide
uccaagcuggaacagacga

SEQ ID NO: 3263589 - RNA, 19 nt, Artificial Sequence
  Description of Artificial Sequence: Synthetic oligonucleotide
cauguucuuauccuugagg

SEQ ID NO: 3263590 - RNA, 19 nt, Artificial Sequence
  Description of Artificial Sequence: Synthetic oligonucleotide
auauauauguauauauaug

SEQ ID NO: 3263591 - RNA, 19 nt, Artificial Sequence
  Description of Artificial Sequence: Synthetic oligonucleotide
cucauucaggacuugagac

SEQ ID NO: 3263592 - RNA, 19 nt, Artificial Sequence
  Description of Artificial Sequence: Synthetic oligonucleotide
gaaagugauuaucuaaaga

SEQ ID NO: 3263593 - RNA, 19 nt, Artificial Sequence
  Description of Artificial Sequence: Synthetic oligonucleotide
aucuaaagaauacaugaaa

SEQ ID NO: 3263594 - RNA, 19 nt, Artificial Sequence
  Description of Artificial Sequence: Synthetic oligonucleotide
uaucuaaagaauacaugaa

SEQ ID NO: 3263595 - RNA, 19 nt, Artificial Sequence
  Description of Artificial Sequence: Synthetic oligonucleotide
ucucaacucuccuuuauca

SEQ ID NO: 3263596 - RNA, 19 nt, Artificial Sequence
  Description of Artificial Sequence: Synthetic oligonucleotide
ucacaagguggucuuaaag

SEQ ID NO: 3263597 - RNA, 19 nt, Artificial Sequence
  Description of Artificial Sequence: Synthetic oligonucleotide
agaaauuccugccauacua

SEQ ID NO: 3263598 - RNA, 19 nt, Artificial Sequence
  Description of Artificial Sequence: Synthetic oligonucleotide
aauacaugaaaagccacau

SEQ ID NO: 3263599 - RNA, 19 nt, Artificial Sequence
  Description of Artificial Sequence: Synthetic oligonucleotide
agggaauuugcucauucag

SEQ ID NO: 3263600 - RNA, 19 nt, Artificial Sequence
  Description of Artificial Sequence: Synthetic oligonucleotide
ucuacucucagcaaucgua

SEQ ID NO: 3263601 - RNA, 19 nt, Artificial Sequence
  Description of Artificial Sequence: Synthetic oligonucleotide
uguuguucggcucuguuua

SEQ ID NO: 3263602 - RNA, 19 nt, Artificial Sequence
  Description of Artificial Sequence: Synthetic oligonucleotide
acgacaauguguccuuccc

SEQ ID NO: 3263603 - RNA, 19 nt, Artificial Sequence
  Description of Artificial Sequence: Synthetic oligonucleotide
aacucuccuuuaucaacac

SEQ ID NO: 3263604 - RNA, 19 nt, Artificial Sequence
  Description of Artificial Sequence: Synthetic oligonucleotide
uauuaaugucaacuaauuu

SEQ ID NO: 3263605 - RNA, 19 nt, Artificial Sequence
  Description of Artificial Sequence: Synthetic oligonucleotide
caucuuauuucccagaagg

SEQ ID NO: 3263606 - RNA, 19 nt, Artificial Sequence
  Description of Artificial Sequence: Synthetic oligonucleotide
uguaaagccccuauauugg

SEQ ID NO: 3263607 - RNA, 19 nt, Artificial Sequence
  Description of Artificial Sequence: Synthetic oligonucleotide
gauguugugacccaggaca

SEQ ID NO: 3263608 - RNA, 19 nt, Artificial Sequence
  Description of Artificial Sequence: Synthetic oligonucleotide
gaugacaugguagagguag

SEQ ID NO: 3263609 - RNA, 19 nt, Artificial Sequence
  Description of Artificial Sequence: Synthetic oligonucleotide
ucuuaagugaccgagccag

SEQ ID NO: 3263610 - RNA, 19 nt, Artificial Sequence
  Description of Artificial Sequence: Synthetic oligonucleotide
aguggggacagccugaagg

SEQ ID NO: 3263611 - RNA, 19 nt, Artificial Sequence
  Description of Artificial Sequence: Synthetic oligonucleotide
uuugacacgaaaauccacu

SEQ ID NO: 3263612 - RNA, 19 nt, Artificial Sequence
  Description of Artificial Sequence: Synthetic oligonucleotide
ugugguaccucucuugucc

SEQ ID NO: 3263613 - RNA, 19 nt, Artificial Sequence
  Description of Artificial Sequence: Synthetic oligonucleotide
aaacagcucaggcaguggg

SEQ ID NO: 3263614 - RNA, 19 nt, Artificial Sequence
  Description of Artificial Sequence: Synthetic oligonucleotide
aagugaccgagccagguuc

SEQ ID NO: 3263615 - RNA, 19 nt, Artificial Sequence
  Description of Artificial Sequence: Synthetic oligonucleotide
uuucccagaaggaccaugg

SEQ ID NO: 3263616 - RNA, 19 nt, Artificial Sequence
  Description of Artificial Sequence: Synthetic oligonucleotide
aaagcuguucagaagcugg

SEQ ID NO: 3263617 - RNA, 19 nt, Artificial Sequence
  Description of Artificial Sequence: Synthetic oligonucleotide
aucuuugacacugggaggc

SEQ ID NO: 3263618 - RNA, 19 nt, Artificial Sequence
  Description of Artificial Sequence: Synthetic oligonucleotide
ucauacaugagcaccacuc

SEQ ID NO: 3263619 - RNA, 19 nt, Artificial Sequence
  Description of Artificial Sequence: Synthetic oligonucleotide
agaaaugaggucuugccca

SEQ ID NO: 3263620 - RNA, 19 nt, Artificial Sequence
  Description of Artificial Sequence: Synthetic oligonucleotide
uuggaaauggagaucugcc

SEQ ID NO: 3263621 - RNA, 19 nt, Artificial Sequence
  Description of Artificial Sequence: Synthetic oligonucleotide
cuguaaagccccuauauug

SEQ ID NO: 3263622 - RNA, 19 nt, Artificial Sequence
  Description of Artificial Sequence: Synthetic oligonucleotide
aucaugaugcaacaggugu

SEQ ID NO: 3263623 - RNA, 19 nt, Artificial Sequence
  Description of Artificial Sequence: Synthetic oligonucleotide
ugaggucuugcccacauug

SEQ ID NO: 3263624 - RNA, 19 nt, Artificial Sequence
  Description of Artificial Sequence: Synthetic oligonucleotide
uagaaaugaggucuugccc

SEQ ID NO: 3263625 - RNA, 19 nt, Artificial Sequence
  Description of Artificial Sequence: Synthetic oligonucleotide
acuugguucuuccucuacc

SEQ ID NO: 3263626 - RNA, 19 nt, Artificial Sequence
  Description of Artificial Sequence: Synthetic oligonucleotide
agugcgaagguuuuguugu

SEQ ID NO: 3263627 - RNA, 19 nt, Artificial Sequence
  Description of Artificial Sequence: Synthetic oligonucleotide
auuccuaucuuugacacug

SEQ ID NO: 3263628 - RNA, 19 nt, Artificial Sequence
  Description of Artificial Sequence: Synthetic oligonucleotide
aacagguguagaaaugagg

SEQ ID NO: 3263629 - RNA, 19 nt, Artificial Sequence
  Description of Artificial Sequence: Synthetic oligonucleotide
auauuggaaauggagaucu

SEQ ID NO: 3263630 - RNA, 19 nt, Artificial Sequence
  Description of Artificial Sequence: Synthetic oligonucleotide
guagaaaugaggucuugcc

SEQ ID NO: 3263631 - RNA, 19 nt, Artificial Sequence
  Description of Artificial Sequence: Synthetic oligonucleotide
gucacuuccaccaucgagg

SEQ ID NO: 3263632 - RNA, 19 nt, Artificial Sequence
  Description of Artificial Sequence: Synthetic oligonucleotide
acgaaaauccacuccuacg

SEQ ID NO: 3263633 - RNA, 19 nt, Artificial Sequence
  Description of Artificial Sequence: Synthetic oligonucleotide
gacaucauacaugagcacc

SEQ ID NO: 3263634 - RNA, 19 nt, Artificial Sequence
  Description of Artificial Sequence: Synthetic oligonucleotide
aagguuuuguugucuacca

SEQ ID NO: 3263635 - RNA, 19 nt, Artificial Sequence
  Description of Artificial Sequence: Synthetic oligonucleotide
uccucuaccugccaggaca

SEQ ID NO: 3263636 - RNA, 19 nt, Artificial Sequence
  Description of Artificial Sequence: Synthetic oligonucleotide
ucagccaaggugaggagcc

SEQ ID NO: 3263637 - RNA, 19 nt, Artificial Sequence
  Description of Artificial Sequence: Synthetic oligonucleotide
ucuuauuuucucuggggac

SEQ ID NO: 3263638 - RNA, 19 nt, Artificial Sequence
  Description of Artificial Sequence: Synthetic oligonucleotide
ucuaccaucaggguuuuga

SEQ ID NO: 3263639 - RNA, 19 nt, Artificial Sequence
  Description of Artificial Sequence: Synthetic oligonucleotide
augagcaccacucccuccg

SEQ ID NO: 3263640 - RNA, 19 nt, Artificial Sequence
  Description of Artificial Sequence: Synthetic oligonucleotide
ucgggaagugacaucauac

SEQ ID NO: 3263641 - RNA, 19 nt, Artificial Sequence
  Description of Artificial Sequence: Synthetic oligonucleotide
uuccgguucagccaaggug

SEQ ID NO: 3263642 - RNA, 19 nt, Artificial Sequence
  Description of Artificial Sequence: Synthetic oligonucleotide
uccugagccagucuucucc

SEQ ID NO: 3263643 - RNA, 19 nt, Artificial Sequence
  Description of Artificial Sequence: Synthetic oligonucleotide
agguguagaaaugaggucu

SEQ ID NO: 3263644 - RNA, 19 nt, Artificial Sequence
  Description of Artificial Sequence: Synthetic oligonucleotide
uugucuaccaucaggguuu

SEQ ID NO: 3263645 - RNA, 19 nt, Artificial Sequence
  Description of Artificial Sequence: Synthetic oligonucleotide
ugcaccugcauccugcaga

SEQ ID NO: 3263646 - RNA, 19 nt, Artificial Sequence
  Description of Artificial Sequence: Synthetic oligonucleotide
agcagugagguccccaagg

SEQ ID NO: 3263647 - RNA, 19 nt, Artificial Sequence
  Description of Artificial Sequence: Synthetic oligonucleotide
gacacugggaggcacccgg

SEQ ID NO: 3263648 - RNA, 19 nt, Artificial Sequence
  Description of Artificial Sequence: Synthetic oligonucleotide
ugacacgaaaauccacucc

SEQ ID NO: 3263649 - RNA, 19 nt, Artificial Sequence
  Description of Artificial Sequence: Synthetic oligonucleotide
gaagguuuuguugucuacc

SEQ ID NO: 3263650 - RNA, 19 nt, Artificial Sequence
  Description of Artificial Sequence: Synthetic oligonucleotide
uccauuccuaucuuugaca

SEQ ID NO: 3263651 - RNA, 19 nt, Artificial Sequence
  Description of Artificial Sequence: Synthetic oligonucleotide
ugguucuuccucuaccugc

SEQ ID NO: 3263652 - RNA, 19 nt, Artificial Sequence
  Description of Artificial Sequence: Synthetic oligonucleotide
ggcaaaggcaucaugaugc

SEQ ID NO: 3263653 - RNA, 19 nt, Artificial Sequence
  Description of Artificial Sequence: Synthetic oligonucleotide
ugaggcuggcuccugagca

SEQ ID NO: 3263654 - RNA, 19 nt, Artificial Sequence
  Description of Artificial Sequence: Synthetic oligonucleotide
gucggggucagccugaggc

SEQ ID NO: 3263655 - RNA, 19 nt, Artificial Sequence
  Description of Artificial Sequence: Synthetic oligonucleotide
augggugaagcucucucgg

SEQ ID NO: 3263656 - RNA, 19 nt, Artificial Sequence
  Description of Artificial Sequence: Synthetic oligonucleotide
ucagccugaggcuugccag

SEQ ID NO: 3263657 - RNA, 19 nt, Artificial Sequence
  Description of Artificial Sequence: Synthetic oligonucleotide
uccuaucuuugacacuggg

SEQ ID NO: 3263658 - RNA, 19 nt, Artificial Sequence
  Description of Artificial Sequence: Synthetic oligonucleotide
aagucaguucagccucccc

SEQ ID NO: 3263659 - RNA, 19 nt, Artificial Sequence
  Description of Artificial Sequence: Synthetic oligonucleotide
uuucguagcagcugucgug

SEQ ID NO: 3263660 - RNA, 19 nt, Artificial Sequence
  Description of Artificial Sequence: Synthetic oligonucleotide
ugagccagucuucucccgg

SEQ ID NO: 3263661 - RNA, 19 nt, Artificial Sequence
  Description of Artificial Sequence: Synthetic oligonucleotide
ucgucauuguccccaaaca

SEQ ID NO: 3263662 - RNA, 19 nt, Artificial Sequence
  Description of Artificial Sequence: Synthetic oligonucleotide
cauacaugagcaccacucc

SEQ ID NO: 3263663 - RNA, 19 nt, Artificial Sequence
  Description of Artificial Sequence: Synthetic oligonucleotide
uccaccugaacaggcaugg

SEQ ID NO: 3263664 - RNA, 19 nt, Artificial Sequence
  Description of Artificial Sequence: Synthetic oligonucleotide
uuugacacugggaggcacc

SEQ ID NO: 3263665 - RNA, 19 nt, Artificial Sequence
  Description of Artificial Sequence: Synthetic oligonucleotide
gagcaaacuguaaagcccc

SEQ ID NO: 3263666 - RNA, 19 nt, Artificial Sequence
  Description of Artificial Sequence: Synthetic oligonucleotide
caugggugaagcucucucg

SEQ ID NO: 3263667 - RNA, 19 nt, Artificial Sequence
  Description of Artificial Sequence: Synthetic oligonucleotide
uggcaaaggcaucaugaug

SEQ ID NO: 3263668 - RNA, 19 nt, Artificial Sequence
  Description of Artificial Sequence: Synthetic oligonucleotide
caugguagagguagucggg

SEQ ID NO: 3263669 - RNA, 19 nt, Artificial Sequence
  Description of Artificial Sequence: Synthetic oligonucleotide
aauggagaucugccuaaca

SEQ ID NO: 3263670 - RNA, 19 nt, Artificial Sequence
  Description of Artificial Sequence: Synthetic oligonucleotide
aggguuuugacacgaaaau

SEQ ID NO: 3263671 - RNA, 19 nt, Artificial Sequence
  Description of Artificial Sequence: Synthetic oligonucleotide
aaugaggucuugcccacau

SEQ ID NO: 3263672 - RNA, 19 nt, Artificial Sequence
  Description of Artificial Sequence: Synthetic oligonucleotide
auggagaucugccuaacaa

SEQ ID NO: 3263673 - RNA, 19 nt, Artificial Sequence
  Description of Artificial Sequence: Synthetic oligonucleotide
cuucaggcgauccuccugc

SEQ ID NO: 3263674 - RNA, 19 nt, Artificial Sequence
  Description of Artificial Sequence: Synthetic oligonucleotide
uguuccuggguccuccggc

SEQ ID NO: 3263675 - RNA, 19 nt, Artificial Sequence
  Description of Artificial Sequence: Synthetic oligonucleotide
gacacgaaaauccacuccu

SEQ ID NO: 3263676 - RNA, 19 nt, Artificial Sequence
  Description of Artificial Sequence: Synthetic oligonucleotide
agggaagucaguucagccu

SEQ ID NO: 3263677 - RNA, 19 nt, Artificial Sequence
  Description of Artificial Sequence: Synthetic oligonucleotide
uauauuggaaauggagauc

SEQ ID NO: 3263678 - RNA, 19 nt, Artificial Sequence
  Description of Artificial Sequence: Synthetic oligonucleotide
ugguuccaugggcugaggg

SEQ ID NO: 3263679 - RNA, 19 nt, Artificial Sequence
  Description of Artificial Sequence: Synthetic oligonucleotide
uccccaaacagcucaggca

SEQ ID NO: 3263680 - RNA, 19 nt, Artificial Sequence
  Description of Artificial Sequence: Synthetic oligonucleotide
caugaugcaacagguguag

SEQ ID NO: 3263681 - RNA, 19 nt, Artificial Sequence
  Description of Artificial Sequence: Synthetic oligonucleotide
ucacuuccaccaucgaggc

SEQ ID NO: 3263682 - RNA, 19 nt, Artificial Sequence
  Description of Artificial Sequence: Synthetic oligonucleotide
ucaugaugcaacaggugua

SEQ ID NO: 3263683 - RNA, 19 nt, Artificial Sequence
  Description of Artificial Sequence: Synthetic oligonucleotide
ucagaagcuggucccaguc

SEQ ID NO: 3263684 - RNA, 19 nt, Artificial Sequence
  Description of Artificial Sequence: Synthetic oligonucleotide
uacuagucgggguuggggu

SEQ ID NO: 3263685 - RNA, 19 nt, Artificial Sequence
  Description of Artificial Sequence: Synthetic oligonucleotide
gaaauggagaucugccuaa

SEQ ID NO: 3263686 - RNA, 19 nt, Artificial Sequence
  Description of Artificial Sequence: Synthetic oligonucleotide
uggagaucugccuaacaau

SEQ ID NO: 3263687 - RNA, 19 nt, Artificial Sequence
  Description of Artificial Sequence: Synthetic oligonucleotide
uacgguggcugucagccca

SEQ ID NO: 3263688 - RNA, 19 nt, Artificial Sequence
  Description of Artificial Sequence: Synthetic oligonucleotide
uccugcaucuuaagugacc

SEQ ID NO: 3263689 - RNA, 19 nt, Artificial Sequence
  Description of Artificial Sequence: Synthetic oligonucleotide
uugacacgaaaauccacuc

SEQ ID NO: 3263690 - RNA, 19 nt, Artificial Sequence
  Description of Artificial Sequence: Synthetic oligonucleotide
gaccgagccagguucauca

SEQ ID NO: 3263691 - RNA, 19 nt, Artificial Sequence
  Description of Artificial Sequence: Synthetic oligonucleotide
ucaggguuuugacacgaaa

SEQ ID NO: 3263692 - RNA, 19 nt, Artificial Sequence
  Description of Artificial Sequence: Synthetic oligonucleotide
gugaucaucggcagcagcc

SEQ ID NO: 3263693 - RNA, 19 nt, Artificial Sequence
  Description of Artificial Sequence: Synthetic oligonucleotide
gaucaucggcagcagccgg

SEQ ID NO: 3263694 - RNA, 19 nt, Artificial Sequence
  Description of Artificial Sequence: Synthetic oligonucleotide
guuuuguugucuaccauca

SEQ ID NO: 3263695 - RNA, 19 nt, Artificial Sequence
  Description of Artificial Sequence: Synthetic oligonucleotide
caacagguguagaaaugag

SEQ ID NO: 3263696 - RNA, 19 nt, Artificial Sequence
  Description of Artificial Sequence: Synthetic oligonucleotide
cuauauuggaaauggagau

SEQ ID NO: 3263697 - RNA, 19 nt, Artificial Sequence
  Description of Artificial Sequence: Synthetic oligonucleotide
ugggugaagcucucucggg

SEQ ID NO: 3263698 - RNA, 19 nt, Artificial Sequence
  Description of Artificial Sequence: Synthetic oligonucleotide
aggacagcgcugcacucac

SEQ ID NO: 3263699 - RNA, 19 nt, Artificial Sequence
  Description of Artificial Sequence: Synthetic oligonucleotide
gguuuuguugucuaccauc

SEQ ID NO: 3263700 - RNA, 19 nt, Artificial Sequence
  Description of Artificial Sequence: Synthetic oligonucleotide
uaccaucaggguuuugaca

SEQ ID NO: 3263701 - RNA, 19 nt, Artificial Sequence
  Description of Artificial Sequence: Synthetic oligonucleotide
ggaagugacaucauacaug

SEQ ID NO: 3263702 - RNA, 19 nt, Artificial Sequence
  Description of Artificial Sequence: Synthetic oligonucleotide
ccuauauuggaaauggaga

SEQ ID NO: 3263703 - RNA, 19 nt, Artificial Sequence
  Description of Artificial Sequence: Synthetic oligonucleotide
acuguaaagccccuauauu

SEQ ID NO: 3263704 - RNA, 19 nt, Artificial Sequence
  Description of Artificial Sequence: Synthetic oligonucleotide
gaugcaacagguguagaaa

SEQ ID NO: 3263705 - RNA, 19 nt, Artificial Sequence
  Description of Artificial Sequence: Synthetic oligonucleotide
auuguuuuggaauuaaguc

SEQ ID NO: 3263706 - RNA, 19 nt, Artificial Sequence
  Description of Artificial Sequence: Synthetic oligonucleotide
uuuaacauuaugaucauaa

SEQ ID NO: 3263707 - RNA, 19 nt, Artificial Sequence
  Description of Artificial Sequence: Synthetic oligonucleotide
auauaguugugcuaggagc

SEQ ID NO: 3263708 - RNA, 19 nt, Artificial Sequence
  Description of Artificial Sequence: Synthetic oligonucleotide
aagaauauaguugugcuag

SEQ ID NO: 3263709 - RNA, 19 nt, Artificial Sequence
  Description of Artificial Sequence: Synthetic oligonucleotide
ucaccaaugaucacaaggg

SEQ ID NO: 3263710 - RNA, 19 nt, Artificial Sequence
  Description of Artificial Sequence: Synthetic oligonucleotide
cauuaugaucauaagaugc

SEQ ID NO: 3263711 - RNA, 19 nt, Artificial Sequence
  Description of Artificial Sequence: Synthetic oligonucleotide
aagggcuucuuucagggcc

SEQ ID NO: 3263712 - RNA, 19 nt, Artificial Sequence
  Description of Artificial Sequence: Synthetic oligonucleotide
aacauuaugaucauaagau

SEQ ID NO: 3263713 - RNA, 19 nt, Artificial Sequence
  Description of Artificial Sequence: Synthetic oligonucleotide
aauauaguugugcuaggag

SEQ ID NO: 3263714 - RNA, 19 nt, Artificial Sequence
  Description of Artificial Sequence: Synthetic oligonucleotide
uaacauuaugaucauaaga

SEQ ID NO: 3263715 - RNA, 19 nt, Artificial Sequence
  Description of Artificial Sequence: Synthetic oligonucleotide
uauuguuuuggaauuaagu

SEQ ID NO: 3263716 - RNA, 19 nt, Artificial Sequence
  Description of Artificial Sequence: Synthetic oligonucleotide
aagucuuuaacauuaugau

SEQ ID NO: 3263717 - RNA, 19 nt, Artificial Sequence
  Description of Artificial Sequence: Synthetic oligonucleotide
uuguuuuggaauuaagucu

SEQ ID NO: 3263718 - RNA, 19 nt, Artificial Sequence
  Description of Artificial Sequence: Synthetic oligonucleotide
uugaugucaccaaugauca

SEQ ID NO: 3263719 - RNA, 19 nt, Artificial Sequence
  Description of Artificial Sequence: Synthetic oligonucleotide
uguuuuggaauuaagucuc

SEQ ID NO: 3263720 - RNA, 19 nt, Artificial Sequence
  Description of Artificial Sequence: Synthetic oligonucleotide
gucaccaaugaucacaagg

SEQ ID NO: 3263721 - RNA, 19 nt, Artificial Sequence
  Description of Artificial Sequence: Synthetic oligonucleotide
gucuuuaacauuaugauca

SEQ ID NO: 3263722 - RNA, 19 nt, Artificial Sequence
  Description of Artificial Sequence: Synthetic oligonucleotide
uguuuugguccucagaaga

SEQ ID NO: 3263723 - RNA, 19 nt, Artificial Sequence
  Description of Artificial Sequence: Synthetic oligonucleotide
aguugaugaagucuuuaac

SEQ ID NO: 3263724 - RNA, 19 nt, Artificial Sequence
  Description of Artificial Sequence: Synthetic oligonucleotide
agucuuuaacauuaugauc

SEQ ID NO: 3263725 - RNA, 19 nt, Artificial Sequence
  Description of Artificial Sequence: Synthetic oligonucleotide
uauaguugugcuaggagcu

SEQ ID NO: 3263726 - RNA, 19 nt, Artificial Sequence
  Description of Artificial Sequence: Synthetic oligonucleotide
ugcauuauuguuuuggaau

SEQ ID NO: 3263727 - RNA, 19 nt, Artificial Sequence
  Description of Artificial Sequence: Synthetic oligonucleotide
uuaacauuaugaucauaag

SEQ ID NO: 3263728 - RNA, 19 nt, Artificial Sequence
  Description of Artificial Sequence: Synthetic oligonucleotide
agaagaauauaguugugcu

SEQ ID NO: 3263729 - RNA, 19 nt, Artificial Sequence
  Description of Artificial Sequence: Synthetic oligonucleotide
gaagucuuuaacauuauga

SEQ ID NO: 3263730 - RNA, 19 nt, Artificial Sequence
  Description of Artificial Sequence: Synthetic oligonucleotide
guugaugaagucuuuaaca

SEQ ID NO: 3263731 - RNA, 19 nt, Artificial Sequence
  Description of Artificial Sequence: Synthetic oligonucleotide
agacucuuccaucagagug

SEQ ID NO: 3263732 - RNA, 19 nt, Artificial Sequence
  Description of Artificial Sequence: Synthetic oligonucleotide
aguguuuugguccucagaa

SEQ ID NO: 3263733 - RNA, 19 nt, Artificial Sequence
  Description of Artificial Sequence: Synthetic oligonucleotide
caucagaguguuuuggucc

SEQ ID NO: 3263734 - RNA, 19 nt, Artificial Sequence
  Description of Artificial Sequence: Synthetic oligonucleotide
uuggaauuaagucucggau

SEQ ID NO: 3263735 - RNA, 19 nt, Artificial Sequence
  Description of Artificial Sequence: Synthetic oligonucleotide
uggaauuaagucucggaug

SEQ ID NO: 3263736 - RNA, 19 nt, Artificial Sequence
  Description of Artificial Sequence: Synthetic oligonucleotide
agaugcauuauuguuuugg

SEQ ID NO: 3263737 - RNA, 19 nt, Artificial Sequence
  Description of Artificial Sequence: Synthetic oligonucleotide
acaagggcuucuuucaggg

SEQ ID NO: 3263738 - RNA, 19 nt, Artificial Sequence
  Description of Artificial Sequence: Synthetic oligonucleotide
aaugcuggagccaggaguc

SEQ ID NO: 3263739 - RNA, 19 nt, Artificial Sequence
  Description of Artificial Sequence: Synthetic oligonucleotide
uuauuguuuuggaauuaag

SEQ ID NO: 3263740 - RNA, 19 nt, Artificial Sequence
  Description of Artificial Sequence: Synthetic oligonucleotide
auucggagcaucucauccc

SEQ ID NO: 3263741 - RNA, 19 nt, Artificial Sequence
  Description of Artificial Sequence: Synthetic oligonucleotide
uugaugaagucuuuaacau

SEQ ID NO: 3263742 - RNA, 19 nt, Artificial Sequence
  Description of Artificial Sequence: Synthetic oligonucleotide
uguguugaugucaccaaug

SEQ ID NO: 3263743 - RNA, 19 nt, Artificial Sequence
  Description of Artificial Sequence: Synthetic oligonucleotide
ggaauuaagucucggaugc

SEQ ID NO: 3263744 - RNA, 19 nt, Artificial Sequence
  Description of Artificial Sequence: Synthetic oligonucleotide
uuuggaauuaagucucgga

SEQ ID NO: 3263745 - RNA, 19 nt, Artificial Sequence
  Description of Artificial Sequence: Synthetic oligonucleotide
acauuaugaucauaagaug

SEQ ID NO: 3263746 - RNA, 19 nt, Artificial Sequence
  Description of Artificial Sequence: Synthetic oligonucleotide
guugaugucaccaaugauc

SEQ ID NO: 3263747 - RNA, 19 nt, Artificial Sequence
  Description of Artificial Sequence: Synthetic oligonucleotide
ucauaagaugcauuauugu

SEQ ID NO: 3263748 - RNA, 19 nt, Artificial Sequence
  Description of Artificial Sequence: Synthetic oligonucleotide
ucagaguugaugaagucuu

SEQ ID NO: 3263749 - RNA, 19 nt, Artificial Sequence
  Description of Artificial Sequence: Synthetic oligonucleotide
uucggagcaucucaucccg

SEQ ID NO: 3263750 - RNA, 19 nt, Artificial Sequence
  Description of Artificial Sequence: Synthetic oligonucleotide
augaucauaagaugcauua

SEQ ID NO: 3263751 - RNA, 19 nt, Artificial Sequence
  Description of Artificial Sequence: Synthetic oligonucleotide
ucagcagacucuuccauca

SEQ ID NO: 3263752 - RNA, 19 nt, Artificial Sequence
  Description of Artificial Sequence: Synthetic oligonucleotide
gaugaagucuuuaacauua

SEQ ID NO: 3263753 - RNA, 19 nt, Artificial Sequence
  Description of Artificial Sequence: Synthetic oligonucleotide
cauucggagcaucucaucc

SEQ ID NO: 3263754 - RNA, 19 nt, Artificial Sequence
  Description of Artificial Sequence: Synthetic oligonucleotide
ugaagucuuuaacauuaug

SEQ ID NO: 3263755 - RNA, 19 nt, Artificial Sequence
  Description of Artificial Sequence: Synthetic oligonucleotide
uugugcuaggagcucagag

SEQ ID NO: 3263756 - RNA, 19 nt, Artificial Sequence
  Description of Artificial Sequence: Synthetic oligonucleotide
cugggguugacacaguggc

SEQ ID NO: 3263757 - RNA, 19 nt, Artificial Sequence
  Description of Artificial Sequence: Synthetic oligonucleotide
aucauaagaugcauuauug

SEQ ID NO: 3263758 - RNA, 19 nt, Artificial Sequence
  Description of Artificial Sequence: Synthetic oligonucleotide
ugugcuaggagcucagagu

SEQ ID NO: 3263759 - RNA, 19 nt, Artificial Sequence
  Description of Artificial Sequence: Synthetic oligonucleotide
uaagaugcauuauuguuuu

SEQ ID NO: 3263760 - RNA, 19 nt, Artificial Sequence
  Description of Artificial Sequence: Synthetic oligonucleotide
ucucggaugcuauuuguug

SEQ ID NO: 3263761 - RNA, 19 nt, Artificial Sequence
  Description of Artificial Sequence: Synthetic oligonucleotide
gaugucaccaaugaucaca

SEQ ID NO: 3263762 - RNA, 19 nt, Artificial Sequence
  Description of Artificial Sequence: Synthetic oligonucleotide
aggagcucagaguugauga

SEQ ID NO: 3263763 - RNA, 19 nt, Artificial Sequence
  Description of Artificial Sequence: Synthetic oligonucleotide
cagaagaauauaguugugc

SEQ ID NO: 3263764 - RNA, 19 nt, Artificial Sequence
  Description of Artificial Sequence: Synthetic oligonucleotide
ugaccuccgggaaugcugg

SEQ ID NO: 3263765 - RNA, 19 nt, Artificial Sequence
  Description of Artificial Sequence: Synthetic oligonucleotide
agaauauaguugugcuagg

SEQ ID NO: 3263766 - RNA, 19 nt, Artificial Sequence
  Description of Artificial Sequence: Synthetic oligonucleotide
gaucacaagggcuucuuuc

SEQ ID NO: 3263767 - RNA, 19 nt, Artificial Sequence
  Description of Artificial Sequence: Synthetic oligonucleotide
gaugcauuauuguuuugga

SEQ ID NO: 3263768 - RNA, 19 nt, Artificial Sequence
  Description of Artificial Sequence: Synthetic oligonucleotide
uuuuggaauuaagucucgg

SEQ ID NO: 3263769 - RNA, 19 nt, Artificial Sequence
  Description of Artificial Sequence: Synthetic oligonucleotide
auuaugaucauaagaugca

SEQ ID NO: 3263770 - RNA, 19 nt, Artificial Sequence
  Description of Artificial Sequence: Synthetic oligonucleotide
uccucagaagaauauaguu

SEQ ID NO: 3263771 - RNA, 19 nt, Artificial Sequence
  Description of Artificial Sequence: Synthetic oligonucleotide
aucacaagggcuucuuuca

SEQ ID NO: 3263772 - RNA, 19 nt, Artificial Sequence
  Description of Artificial Sequence: Synthetic oligonucleotide
acaguggcuguguugaugu

SEQ ID NO: 3263773 - RNA, 19 nt, Artificial Sequence
  Description of Artificial Sequence: Synthetic oligonucleotide
uucuuucagggccugguac

SEQ ID NO: 3263774 - RNA, 19 nt, Artificial Sequence
  Description of Artificial Sequence: Synthetic oligonucleotide
ucuuccaucagaguguuuu

SEQ ID NO: 3263775 - RNA, 19 nt, Artificial Sequence
  Description of Artificial Sequence: Synthetic oligonucleotide
ucagaagaauauaguugug

SEQ ID NO: 3263776 - RNA, 19 nt, Artificial Sequence
  Description of Artificial Sequence: Synthetic oligonucleotide
ucuuucagggccugguaca

SEQ ID NO: 3263777 - RNA, 19 nt, Artificial Sequence
  Description of Artificial Sequence: Synthetic oligonucleotide
uaugaucauaagaugcauu

SEQ ID NO: 3263778 - RNA, 19 nt, Artificial Sequence
  Description of Artificial Sequence: Synthetic oligonucleotide
cucagaagaauauaguugu

SEQ ID NO: 3263779 - RNA, 19 nt, Artificial Sequence
  Description of Artificial Sequence: Synthetic oligonucleotide
aagucucggaugcuauuug

SEQ ID NO: 3263780 - RNA, 19 nt, Artificial Sequence
  Description of Artificial Sequence: Synthetic oligonucleotide
uuccaucagaguguuuugg

SEQ ID NO: 3263781 - RNA, 19 nt, Artificial Sequence
  Description of Artificial Sequence: Synthetic oligonucleotide
auaagaugcauuauuguuu

SEQ ID NO: 3263782 - RNA, 19 nt, Artificial Sequence
  Description of Artificial Sequence: Synthetic oligonucleotide
aauuaagucucggaugcua

SEQ ID NO: 3263783 - RNA, 19 nt, Artificial Sequence
  Description of Artificial Sequence: Synthetic oligonucleotide
uuugguccucagaagaaua

SEQ ID NO: 3263784 - RNA, 19 nt, Artificial Sequence
  Description of Artificial Sequence: Synthetic oligonucleotide
ucacaagggcuucuuucag

SEQ ID NO: 3263785 - RNA, 19 nt, Artificial Sequence
  Description of Artificial Sequence: Synthetic oligonucleotide
aucuacuggagguggagcu

SEQ ID NO: 3263786 - RNA, 19 nt, Artificial Sequence
  Description of Artificial Sequence: Synthetic oligonucleotide
gacacaguggcuguguuga

SEQ ID NO: 3263787 - RNA, 19 nt, Artificial Sequence
  Description of Artificial Sequence: Synthetic oligonucleotide
agucaucuacuggaggugg

SEQ ID NO: 3263788 - RNA, 19 nt, Artificial Sequence
  Description of Artificial Sequence: Synthetic oligonucleotide
aggagucaucuacuggagg

SEQ ID NO: 3263789 - RNA, 19 nt, Artificial Sequence
  Description of Artificial Sequence: Synthetic oligonucleotide
cacaagggcuucuuucagg

SEQ ID NO: 3263790 - RNA, 19 nt, Artificial Sequence
  Description of Artificial Sequence: Synthetic oligonucleotide
gaagaauauaguugugcua

SEQ ID NO: 3263791 - RNA, 19 nt, Artificial Sequence
  Description of Artificial Sequence: Synthetic oligonucleotide
uccaucagaguguuuuggu

SEQ ID NO: 3263792 - RNA, 19 nt, Artificial Sequence
  Description of Artificial Sequence: Synthetic oligonucleotide
uucagggccugguacauuc

SEQ ID NO: 3263793 - RNA, 19 nt, Artificial Sequence
  Description of Artificial Sequence: Synthetic oligonucleotide
ccucagaagaauauaguug

SEQ ID NO: 3263794 - RNA, 19 nt, Artificial Sequence
  Description of Artificial Sequence: Synthetic oligonucleotide
gagcaucucaucccggcgc

SEQ ID NO: 3263795 - RNA, 19 nt, Artificial Sequence
  Description of Artificial Sequence: Synthetic oligonucleotide
aucagaguguuuugguccu

SEQ ID NO: 3263796 - RNA, 19 nt, Artificial Sequence
  Description of Artificial Sequence: Synthetic oligonucleotide
ugaugaagucuuuaacauu

SEQ ID NO: 3263797 - RNA, 19 nt, Artificial Sequence
  Description of Artificial Sequence: Synthetic oligonucleotide
ucuuuaacauuaugaucau

SEQ ID NO: 3263798 - RNA, 19 nt, Artificial Sequence
  Description of Artificial Sequence: Synthetic oligonucleotide
uguugaugucaccaaugau

SEQ ID NO: 3263799 - RNA, 19 nt, Artificial Sequence
  Description of Artificial Sequence: Synthetic oligonucleotide
uuaugaucauaagaugcau

SEQ ID NO: 3263800 - RNA, 19 nt, Artificial Sequence
  Description of Artificial Sequence: Synthetic oligonucleotide
gaauauaguugugcuagga

SEQ ID NO: 3263801 - RNA, 19 nt, Artificial Sequence
  Description of Artificial Sequence: Synthetic oligonucleotide
gaaugcuggagccaggagu

SEQ ID NO: 3263802 - RNA, 19 nt, Artificial Sequence
  Description of Artificial Sequence: Synthetic oligonucleotide
cugcucagcagacucuucc

SEQ ID NO: 3263803 - RNA, 19 nt, Artificial Sequence
  Description of Artificial Sequence: Synthetic oligonucleotide
guacauucggagcaucuca

SEQ ID NO: 3263804 - RNA, 19 nt, Artificial Sequence
  Description of Artificial Sequence: Synthetic oligonucleotide
auuauuguuuuggaauuaa

SEQ ID NO: 3263805 - RNA, 19 nt, Artificial Sequence
  Description of Artificial Sequence: Synthetic oligonucleotide
ucagauuucauuauagaug

SEQ ID NO: 3263806 - RNA, 19 nt, Artificial Sequence
  Description of Artificial Sequence: Synthetic oligonucleotide
cagauuucauuauagaugg

SEQ ID NO: 3263807 - RNA, 19 nt, Artificial Sequence
  Description of Artificial Sequence: Synthetic oligonucleotide
uguaugaauacucuuguca

SEQ ID NO: 3263808 - RNA, 19 nt, Artificial Sequence
  Description of Artificial Sequence: Synthetic oligonucleotide
uuauagaugguugugagcc

SEQ ID NO: 3263809 - RNA, 19 nt, Artificial Sequence
  Description of Artificial Sequence: Synthetic oligonucleotide
ugcucuuaacaacugaucc

SEQ ID NO: 3263810 - RNA, 19 nt, Artificial Sequence
  Description of Artificial Sequence: Synthetic oligonucleotide
aacugauccaucuuuccag

SEQ ID NO: 3263811 - RNA, 19 nt, Artificial Sequence
  Description of Artificial Sequence: Synthetic oligonucleotide
auuauagaugguugugagc

SEQ ID NO: 3263812 - RNA, 19 nt, Artificial Sequence
  Description of Artificial Sequence: Synthetic oligonucleotide
uggaaaagcagccagugcu

SEQ ID NO: 3263813 - RNA, 19 nt, Artificial Sequence
  Description of Artificial Sequence: Synthetic oligonucleotide
cauacagagauccaccugc

SEQ ID NO: 3263814 - RNA, 19 nt, Artificial Sequence
  Description of Artificial Sequence: Synthetic oligonucleotide
uggccuugaacauacagag

SEQ ID NO: 3263815 - RNA, 19 nt, Artificial Sequence
  Description of Artificial Sequence: Synthetic oligonucleotide
guaugaauacucuugucag

SEQ ID NO: 3263816 - RNA, 19 nt, Artificial Sequence
  Description of Artificial Sequence: Synthetic oligonucleotide
cuugaacauacagagaucc

SEQ ID NO: 3263817 - RNA, 19 nt, Artificial Sequence
  Description of Artificial Sequence: Synthetic oligonucleotide
gaaccuauggaaaagcagc

SEQ ID NO: 3263818 - RNA, 19 nt, Artificial Sequence
  Description of Artificial Sequence: Synthetic oligonucleotide
gagaucucagaaccuaugg

SEQ ID NO: 3263819 - RNA, 19 nt, Artificial Sequence
  Description of Artificial Sequence: Synthetic oligonucleotide
ucuguaugaauacucuugu

SEQ ID NO: 3263820 - RNA, 19 nt, Artificial Sequence
  Description of Artificial Sequence: Synthetic oligonucleotide
acaacugauccaucuuucc

SEQ ID NO: 3263821 - RNA, 19 nt, Artificial Sequence
  Description of Artificial Sequence: Synthetic oligonucleotide
aaccuauggaaaagcagcc

SEQ ID NO: 3263822 - RNA, 19 nt, Artificial Sequence
  Description of Artificial Sequence: Synthetic oligonucleotide
aacauacagagauccaccu

SEQ ID NO: 3263823 - RNA, 19 nt, Artificial Sequence
  Description of Artificial Sequence: Synthetic oligonucleotide
aucagauuucauuauagau

SEQ ID NO: 3263824 - RNA, 19 nt, Artificial Sequence
  Description of Artificial Sequence: Synthetic oligonucleotide
acagagauccaccugccuc

SEQ ID NO: 3263825 - RNA, 19 nt, Artificial Sequence
  Description of Artificial Sequence: Synthetic oligonucleotide
cauuauagaugguugugag

SEQ ID NO: 3263826 - RNA, 19 nt, Artificial Sequence
  Description of Artificial Sequence: Synthetic oligonucleotide
acugauccaucuuuccagc

SEQ ID NO: 3263827 - RNA, 19 nt, Artificial Sequence
  Description of Artificial Sequence: Synthetic oligonucleotide
uuucauuauagaugguugu

SEQ ID NO: 3263828 - RNA, 19 nt, Artificial Sequence
  Description of Artificial Sequence: Synthetic oligonucleotide
guugugagccaccaugugg

SEQ ID NO: 3263829 - RNA, 19 nt, Artificial Sequence
  Description of Artificial Sequence: Synthetic oligonucleotide
cucuguaugaauacucuug

SEQ ID NO: 3263830 - RNA, 19 nt, Artificial Sequence
  Description of Artificial Sequence: Synthetic oligonucleotide
gaauacucuugucagcaug

SEQ ID NO: 3263831 - RNA, 19 nt, Artificial Sequence
  Description of Artificial Sequence: Synthetic oligonucleotide
uaugaauacucuugucagc

SEQ ID NO: 3263832 - RNA, 19 nt, Artificial Sequence
  Description of Artificial Sequence: Synthetic oligonucleotide
ugaacauacagagauccac

SEQ ID NO: 3263833 - RNA, 19 nt, Artificial Sequence
  Description of Artificial Sequence: Synthetic oligonucleotide
uugugagccaccauguggu

SEQ ID NO: 3263834 - RNA, 19 nt, Artificial Sequence
  Description of Artificial Sequence: Synthetic oligonucleotide
augguugugagccaccaug

SEQ ID NO: 3263835 - RNA, 19 nt, Artificial Sequence
  Description of Artificial Sequence: Synthetic oligonucleotide
gaucucagaaccuauggaa

SEQ ID NO: 3263836 - RNA, 19 nt, Artificial Sequence
  Description of Artificial Sequence: Synthetic oligonucleotide
ugauccaucuuuccagccc

SEQ ID NO: 3263837 - RNA, 19 nt, Artificial Sequence
  Description of Artificial Sequence: Synthetic oligonucleotide
agcaugugugccugcaagc

SEQ ID NO: 3263838 - RNA, 19 nt, Artificial Sequence
  Description of Artificial Sequence: Synthetic oligonucleotide
aauggguggguuccccacg

SEQ ID NO: 3263839 - RNA, 19 nt, Artificial Sequence
  Description of Artificial Sequence: Synthetic oligonucleotide
aacaacugauccaucuuuc

SEQ ID NO: 3263840 - RNA, 19 nt, Artificial Sequence
  Description of Artificial Sequence: Synthetic oligonucleotide
auuucauuauagaugguug

SEQ ID NO: 3263841 - RNA, 19 nt, Artificial Sequence
  Description of Artificial Sequence: Synthetic oligonucleotide
uauggaaaagcagccagug

SEQ ID NO: 3263842 - RNA, 19 nt, Artificial Sequence
  Description of Artificial Sequence: Synthetic oligonucleotide
auggaaaagcagccagugc

SEQ ID NO: 3263843 - RNA, 19 nt, Artificial Sequence
  Description of Artificial Sequence: Synthetic oligonucleotide
ucauuauagaugguuguga

SEQ ID NO: 3263844 - RNA, 19 nt, Artificial Sequence
  Description of Artificial Sequence: Synthetic oligonucleotide
ugagccaccaugugguugc

SEQ ID NO: 3263845 - RNA, 19 nt, Artificial Sequence
  Description of Artificial Sequence: Synthetic oligonucleotide
gauccaucuuuccagcccc

SEQ ID NO: 3263846 - RNA, 19 nt, Artificial Sequence
  Description of Artificial Sequence: Synthetic oligonucleotide
agaagagggcaucagauuu

SEQ ID NO: 3263847 - RNA, 19 nt, Artificial Sequence
  Description of Artificial Sequence: Synthetic oligonucleotide
ucuguguagcccuggcugg

SEQ ID NO: 3263848 - RNA, 19 nt, Artificial Sequence
  Description of Artificial Sequence: Synthetic oligonucleotide
uucauuauagaugguugug

SEQ ID NO: 3263849 - RNA, 19 nt, Artificial Sequence
  Description of Artificial Sequence: Synthetic oligonucleotide
aauacucuugucagcaugu

SEQ ID NO: 3263850 - RNA, 19 nt, Artificial Sequence
  Description of Artificial Sequence: Synthetic oligonucleotide
gaacauacagagauccacc

SEQ ID NO: 3263851 - RNA, 19 nt, Artificial Sequence
  Description of Artificial Sequence: Synthetic oligonucleotide
augaauacucuugucagca

SEQ ID NO: 3263852 - RNA, 19 nt, Artificial Sequence
  Description of Artificial Sequence: Synthetic oligonucleotide
auagaugguugugagccac

SEQ ID NO: 3263853 - RNA, 19 nt, Artificial Sequence
  Description of Artificial Sequence: Synthetic oligonucleotide
uaacaacugauccaucuuu

SEQ ID NO: 3263854 - RNA, 19 nt, Artificial Sequence
  Description of Artificial Sequence: Synthetic oligonucleotide
ucagaaccuauggaaaagc

SEQ ID NO: 3263855 - RNA, 19 nt, Artificial Sequence
  Description of Artificial Sequence: Synthetic oligonucleotide
acucuugucagcaugugug

SEQ ID NO: 3263856 - RNA, 19 nt, Artificial Sequence
  Description of Artificial Sequence: Synthetic oligonucleotide
ugugguugcugggagaucu

SEQ ID NO: 3263857 - RNA, 19 nt, Artificial Sequence
  Description of Artificial Sequence: Synthetic oligonucleotide
uuaacaacugauccaucuu

SEQ ID NO: 3263858 - RNA, 19 nt, Artificial Sequence
  Description of Artificial Sequence: Synthetic oligonucleotide
ucucagaaccuauggaaaa

SEQ ID NO: 3263859 - RNA, 19 nt, Artificial Sequence
  Description of Artificial Sequence: Synthetic oligonucleotide
agggcaucagauuucauua

SEQ ID NO: 3263860 - RNA, 19 nt, Artificial Sequence
  Description of Artificial Sequence: Synthetic oligonucleotide
cucuguguagcccuggcug

SEQ ID NO: 3263861 - RNA, 19 nt, Artificial Sequence
  Description of Artificial Sequence: Synthetic oligonucleotide
agaucucagaaccuaugga

SEQ ID NO: 3263862 - RNA, 19 nt, Artificial Sequence
  Description of Artificial Sequence: Synthetic oligonucleotide
ugugccugcaagccagaag

SEQ ID NO: 3263863 - RNA, 19 nt, Artificial Sequence
  Description of Artificial Sequence: Synthetic oligonucleotide
agccagugcucuuaacaac

SEQ ID NO: 3263864 - RNA, 19 nt, Artificial Sequence
  Description of Artificial Sequence: Synthetic oligonucleotide
agaaccuauggaaaagcag

SEQ ID NO: 3263865 - RNA, 19 nt, Artificial Sequence
  Description of Artificial Sequence: Synthetic oligonucleotide
ccugcaagccagaagaggg

SEQ ID NO: 3263866 - RNA, 19 nt, Artificial Sequence
  Description of Artificial Sequence: Synthetic oligonucleotide
gcugggagaucucagaacc

SEQ ID NO: 3263867 - RNA, 19 nt, Artificial Sequence
  Description of Artificial Sequence: Synthetic oligonucleotide
gugccugcaagccagaaga

SEQ ID NO: 3263868 - RNA, 19 nt, Artificial Sequence
  Description of Artificial Sequence: Synthetic oligonucleotide
uugaacauacagagaucca

SEQ ID NO: 3263869 - RNA, 19 nt, Artificial Sequence
  Description of Artificial Sequence: Synthetic oligonucleotide
auggguggguuccccacgc

SEQ ID NO: 3263870 - RNA, 19 nt, Artificial Sequence
  Description of Artificial Sequence: Synthetic oligonucleotide
gacagggucucucucugug

SEQ ID NO: 3263871 - RNA, 19 nt, Artificial Sequence
  Description of Artificial Sequence: Synthetic oligonucleotide
ugguugugagccaccaugu

SEQ ID NO: 3263872 - RNA, 19 nt, Artificial Sequence
  Description of Artificial Sequence: Synthetic oligonucleotide
uacucuugucagcaugugu

SEQ ID NO: 3263873 - RNA, 19 nt, Artificial Sequence
  Description of Artificial Sequence: Synthetic oligonucleotide
ucucucucuguguagcccu

SEQ ID NO: 3263874 - RNA, 19 nt, Artificial Sequence
  Description of Artificial Sequence: Synthetic oligonucleotide
acauacagagauccaccug

SEQ ID NO: 3263875 - RNA, 19 nt, Artificial Sequence
  Description of Artificial Sequence: Synthetic oligonucleotide
ugccucuguaugaauacuc

SEQ ID NO: 3263876 - RNA, 19 nt, Artificial Sequence
  Description of Artificial Sequence: Synthetic oligonucleotide
cuuaacaacugauccaucu

SEQ ID NO: 3263877 - RNA, 19 nt, Artificial Sequence
  Description of Artificial Sequence: Synthetic oligonucleotide
uauagaugguugugagcca

SEQ ID NO: 3263878 - RNA, 19 nt, Artificial Sequence
  Description of Artificial Sequence: Synthetic oligonucleotide
cucuugucagcaugugugc

SEQ ID NO: 3263879 - RNA, 19 nt, Artificial Sequence
  Description of Artificial Sequence: Synthetic oligonucleotide
auacagagauccaccugcc

SEQ ID NO: 3263880 - RNA, 19 nt, Artificial Sequence
  Description of Artificial Sequence: Synthetic oligonucleotide
aagagggcaucagauuuca

SEQ ID NO: 3263881 - RNA, 19 nt, Artificial Sequence
  Description of Artificial Sequence: Synthetic oligonucleotide
accaugugguugcugggag

SEQ ID NO: 3263882 - RNA, 19 nt, Artificial Sequence
  Description of Artificial Sequence: Synthetic oligonucleotide
cucagaaccuauggaaaag

SEQ ID NO: 3263883 - RNA, 19 nt, Artificial Sequence
  Description of Artificial Sequence: Synthetic oligonucleotide
uugcugggagaucucagaa

SEQ ID NO: 3263884 - RNA, 19 nt, Artificial Sequence
  Description of Artificial Sequence: Synthetic oligonucleotide
uccaccugccucuguauga

SEQ ID NO: 3263885 - RNA, 19 nt, Artificial Sequence
  Description of Artificial Sequence: Synthetic oligonucleotide
caucagauuucauuauaga

SEQ ID NO: 3263886 - RNA, 19 nt, Artificial Sequence
  Description of Artificial Sequence: Synthetic oligonucleotide
ucuugucagcaugugugcc

SEQ ID NO: 3263887 - RNA, 19 nt, Artificial Sequence
  Description of Artificial Sequence: Synthetic oligonucleotide
gccaccaugugguugcugg

SEQ ID NO: 3263888 - RNA, 19 nt, Artificial Sequence
  Description of Artificial Sequence: Synthetic oligonucleotide
ccuauggaaaagcagccag

SEQ ID NO: 3263889 - RNA, 19 nt, Artificial Sequence
  Description of Artificial Sequence: Synthetic oligonucleotide
gauuucauuauagaugguu

SEQ ID NO: 3263890 - RNA, 19 nt, Artificial Sequence
  Description of Artificial Sequence: Synthetic oligonucleotide
cuggccuugaacauacaga

SEQ ID NO: 3263891 - RNA, 19 nt, Artificial Sequence
  Description of Artificial Sequence: Synthetic oligonucleotide
uggcuggccuugaacauac

SEQ ID NO: 3263892 - RNA, 19 nt, Artificial Sequence
  Description of Artificial Sequence: Synthetic oligonucleotide
ugcaagccagaagagggca

SEQ ID NO: 3263893 - RNA, 19 nt, Artificial Sequence
  Description of Artificial Sequence: Synthetic oligonucleotide
cagcaugugugccugcaag

SEQ ID NO: 3263894 - RNA, 19 nt, Artificial Sequence
  Description of Artificial Sequence: Synthetic oligonucleotide
uagaugguugugagccacc

SEQ ID NO: 3263895 - RNA, 19 nt, Artificial Sequence
  Description of Artificial Sequence: Synthetic oligonucleotide
gcaucagauuucauuauag

SEQ ID NO: 3263896 - RNA, 19 nt, Artificial Sequence
  Description of Artificial Sequence: Synthetic oligonucleotide
ugcugggagaucucagaac

SEQ ID NO: 3263897 - RNA, 19 nt, Artificial Sequence
  Description of Artificial Sequence: Synthetic oligonucleotide
ucuuaacaacugauccauc

SEQ ID NO: 3263898 - RNA, 19 nt, Artificial Sequence
  Description of Artificial Sequence: Synthetic oligonucleotide
aaagcagccagugcucuua

SEQ ID NO: 3263899 - RNA, 19 nt, Artificial Sequence
  Description of Artificial Sequence: Synthetic oligonucleotide
cugauccaucuuuccagcc

SEQ ID NO: 3263900 - RNA, 19 nt, Artificial Sequence
  Description of Artificial Sequence: Synthetic oligonucleotide
ucucuguguagcccuggcu

SEQ ID NO: 3263901 - RNA, 19 nt, Artificial Sequence
  Description of Artificial Sequence: Synthetic oligonucleotide
agugcucuuaacaacugau

SEQ ID NO: 3263902 - RNA, 19 nt, Artificial Sequence
  Description of Artificial Sequence: Synthetic oligonucleotide
cugcaagccagaagagggc

SEQ ID NO: 3263903 - RNA, 19 nt, Artificial Sequence
  Description of Artificial Sequence: Synthetic oligonucleotide
uugucagcaugugugccug

SEQ ID NO: 3263904 - RNA, 19 nt, Artificial Sequence
  Description of Artificial Sequence: Synthetic oligonucleotide
augugugccugcaagccag

SEQ ID NO: 3263905 - RNA, 19 nt, Artificial Sequence
  Description of Artificial Sequence: Synthetic oligonucleotide
gacaaauccacucuugagg

SEQ ID NO: 3263906 - RNA, 19 nt, Artificial Sequence
  Description of Artificial Sequence: Synthetic oligonucleotide
uauacuuccagcaggaaac

SEQ ID NO: 3263907 - RNA, 19 nt, Artificial Sequence
  Description of Artificial Sequence: Synthetic oligonucleotide
aacacagucaagucagggg

SEQ ID NO: 3263908 - RNA, 19 nt, Artificial Sequence
  Description of Artificial Sequence: Synthetic oligonucleotide
acaaauccacucuugaggg

SEQ ID NO: 3263909 - RNA, 19 nt, Artificial Sequence
  Description of Artificial Sequence: Synthetic oligonucleotide
gaggguguugguuagaugc

SEQ ID NO: 3263910 - RNA, 19 nt, Artificial Sequence
  Description of Artificial Sequence: Synthetic oligonucleotide
uggauauacuuccagcagg

SEQ ID NO: 3263911 - RNA, 19 nt, Artificial Sequence
  Description of Artificial Sequence: Synthetic oligonucleotide
gaguccuggacucugaggg

SEQ ID NO: 3263912 - RNA, 19 nt, Artificial Sequence
  Description of Artificial Sequence: Synthetic oligonucleotide
uuucucucaguugugaggg

SEQ ID NO: 3263913 - RNA, 19 nt, Artificial Sequence
  Description of Artificial Sequence: Synthetic oligonucleotide
ugugaacacagucaaguca

SEQ ID NO: 3263914 - RNA, 19 nt, Artificial Sequence
  Description of Artificial Sequence: Synthetic oligonucleotide
uccugcaucguguagcugg

SEQ ID NO: 3263915 - RNA, 19 nt, Artificial Sequence
  Description of Artificial Sequence: Synthetic oligonucleotide
gacauggggaccuugcccg

SEQ ID NO: 3263916 - RNA, 19 nt, Artificial Sequence
  Description of Artificial Sequence: Synthetic oligonucleotide
aggagcacugcacagacag

SEQ ID NO: 3263917 - RNA, 19 nt, Artificial Sequence
  Description of Artificial Sequence: Synthetic oligonucleotide
accaguaucuuccggaguc

SEQ ID NO: 3263918 - RNA, 19 nt, Artificial Sequence
  Description of Artificial Sequence: Synthetic oligonucleotide
uuggcaucauccugcaucg

SEQ ID NO: 3263919 - RNA, 19 nt, Artificial Sequence
  Description of Artificial Sequence: Synthetic oligonucleotide
aagccuugcccucugugcg

SEQ ID NO: 3263920 - RNA, 19 nt, Artificial Sequence
  Description of Artificial Sequence: Synthetic oligonucleotide
aagggguagagauucccag

SEQ ID NO: 3263921 - RNA, 19 nt, Artificial Sequence
  Description of Artificial Sequence: Synthetic oligonucleotide
auguggaccacuuuggccu

SEQ ID NO: 3263922 - RNA, 19 nt, Artificial Sequence
  Description of Artificial Sequence: Synthetic oligonucleotide
uuuggccuuggcaucaucc

SEQ ID NO: 3263923 - RNA, 19 nt, Artificial Sequence
  Description of Artificial Sequence: Synthetic oligonucleotide
aaauccacucuugagggug

SEQ ID NO: 3263924 - RNA, 19 nt, Artificial Sequence
  Description of Artificial Sequence: Synthetic oligonucleotide
uccgcauacaccaguaucu

SEQ ID NO: 3263925 - RNA, 19 nt, Artificial Sequence
  Description of Artificial Sequence: Synthetic oligonucleotide
acugcacagacagagacuc

SEQ ID NO: 3263926 - RNA, 19 nt, Artificial Sequence
  Description of Artificial Sequence: Synthetic oligonucleotide
cuuggcaucauccugcauc

SEQ ID NO: 3263927 - RNA, 19 nt, Artificial Sequence
  Description of Artificial Sequence: Synthetic oligonucleotide
guuucucucaguugugagg

SEQ ID NO: 3263928 - RNA, 19 nt, Artificial Sequence
  Description of Artificial Sequence: Synthetic oligonucleotide
ugacaaauccacucuugag

SEQ ID NO: 3263929 - RNA, 19 nt, Artificial Sequence
  Description of Artificial Sequence: Synthetic oligonucleotide
acucugagggccuccaugg

SEQ ID NO: 3263930 - RNA, 19 nt, Artificial Sequence
  Description of Artificial Sequence: Synthetic oligonucleotide
ugugacaaauccacucuug

SEQ ID NO: 3263931 - RNA, 19 nt, Artificial Sequence
  Description of Artificial Sequence: Synthetic oligonucleotide
acacagucaagucaggggu

SEQ ID NO: 3263932 - RNA, 19 nt, Artificial Sequence
  Description of Artificial Sequence: Synthetic oligonucleotide
agcuguguuccgcauacac

SEQ ID NO: 3263933 - RNA, 19 nt, Artificial Sequence
  Description of Artificial Sequence: Synthetic oligonucleotide
gauguggaccacuuuggcc

SEQ ID NO: 3263934 - RNA, 19 nt, Artificial Sequence
  Description of Artificial Sequence: Synthetic oligonucleotide
gaauguuucucucaguugu

SEQ ID NO: 3263935 - RNA, 19 nt, Artificial Sequence
  Description of Artificial Sequence: Synthetic oligonucleotide
ucuuguaggagcacugcac

SEQ ID NO: 3263936 - RNA, 19 nt, Artificial Sequence
  Description of Artificial Sequence: Synthetic oligonucleotide
accacuuuggccuuggcau

SEQ ID NO: 3263937 - RNA, 19 nt, Artificial Sequence
  Description of Artificial Sequence: Synthetic oligonucleotide
ugcccguugugacaaaucc

SEQ ID NO: 3263938 - RNA, 19 nt, Artificial Sequence
  Description of Artificial Sequence: Synthetic oligonucleotide
gagggcuggauauacuucc

SEQ ID NO: 3263939 - RNA, 19 nt, Artificial Sequence
  Description of Artificial Sequence: Synthetic oligonucleotide
agagacuccccuucacgcc

SEQ ID NO: 3263940 - RNA, 19 nt, Artificial Sequence
  Description of Artificial Sequence: Synthetic oligonucleotide
uacaccaguaucuuccgga

SEQ ID NO: 3263941 - RNA, 19 nt, Artificial Sequence
  Description of Artificial Sequence: Synthetic oligonucleotide
gugaacacagucaagucag

SEQ ID NO: 3263942 - RNA, 19 nt, Artificial Sequence
  Description of Artificial Sequence: Synthetic oligonucleotide
uccauggugauguggacca

SEQ ID NO: 3263943 - RNA, 19 nt, Artificial Sequence
  Description of Artificial Sequence: Synthetic oligonucleotide
uguugguuagaugcgugcg

SEQ ID NO: 3263944 - RNA, 19 nt, Artificial Sequence
  Description of Artificial Sequence: Synthetic oligonucleotide
agggguagagauucccagc

SEQ ID NO: 3263945 - RNA, 19 nt, Artificial Sequence
  Description of Artificial Sequence: Synthetic oligonucleotide
caggaaacccaccaagggg

SEQ ID NO: 3263946 - RNA, 19 nt, Artificial Sequence
  Description of Artificial Sequence: Synthetic oligonucleotide
uguuucucucaguugugag

SEQ ID NO: 3263947 - RNA, 19 nt, Artificial Sequence
  Description of Artificial Sequence: Synthetic oligonucleotide
acagagacuccccuucacg

SEQ ID NO: 3263948 - RNA, 19 nt, Artificial Sequence
  Description of Artificial Sequence: Synthetic oligonucleotide
ugaccuugcaccaagccuu

SEQ ID NO: 3263949 - RNA, 19 nt, Artificial Sequence
  Description of Artificial Sequence: Synthetic oligonucleotide
auauacuuccagcaggaaa

SEQ ID NO: 3263950 - RNA, 19 nt, Artificial Sequence
  Description of Artificial Sequence: Synthetic oligonucleotide
uccagcaggaaacccacca

SEQ ID NO: 3263951 - RNA, 19 nt, Artificial Sequence
  Description of Artificial Sequence: Synthetic oligonucleotide
ugacauggggaccuugccc

SEQ ID NO: 3263952 - RNA, 19 nt, Artificial Sequence
  Description of Artificial Sequence: Synthetic oligonucleotide
augugaacacagucaaguc

SEQ ID NO: 3263953 - RNA, 19 nt, Artificial Sequence
  Description of Artificial Sequence: Synthetic oligonucleotide
ugcaucguguagcugggcc

SEQ ID NO: 3263954 - RNA, 19 nt, Artificial Sequence
  Description of Artificial Sequence: Synthetic oligonucleotide
guuccugcgguucuuguag

SEQ ID NO: 3263955 - RNA, 19 nt, Artificial Sequence
  Description of Artificial Sequence: Synthetic oligonucleotide
ucaagucaggggugaaggg

SEQ ID NO: 3263956 - RNA, 19 nt, Artificial Sequence
  Description of Artificial Sequence: Synthetic oligonucleotide
agauucccagcuguguucc

SEQ ID NO: 3263957 - RNA, 19 nt, Artificial Sequence
  Description of Artificial Sequence: Synthetic oligonucleotide
gagacuccccuucacgccg

SEQ ID NO: 3263958 - RNA, 19 nt, Artificial Sequence
  Description of Artificial Sequence: Synthetic oligonucleotide
gucaagucaggggugaagg

SEQ ID NO: 3263959 - RNA, 19 nt, Artificial Sequence
  Description of Artificial Sequence: Synthetic oligonucleotide
ucuuccggaguccuggacu

SEQ ID NO: 3263960 - RNA, 19 nt, Artificial Sequence
  Description of Artificial Sequence: Synthetic oligonucleotide
ggugauguggaccacuuug

SEQ ID NO: 3263961 - RNA, 19 nt, Artificial Sequence
  Description of Artificial Sequence: Synthetic oligonucleotide
aguugugagggcuggauau

SEQ ID NO: 3263962 - RNA, 19 nt, Artificial Sequence
  Description of Artificial Sequence: Synthetic oligonucleotide
ucauccugcaucguguagc

SEQ ID NO: 3263963 - RNA, 19 nt, Artificial Sequence
  Description of Artificial Sequence: Synthetic oligonucleotide
gaacacagucaagucaggg

SEQ ID NO: 3263964 - RNA, 19 nt, Artificial Sequence
  Description of Artificial Sequence: Synthetic oligonucleotide
ucacacuucuuccuccuga

SEQ ID NO: 3263965 - RNA, 19 nt, Artificial Sequence
  Description of Artificial Sequence: Synthetic oligonucleotide
ugaagcuggggucacacuu

SEQ ID NO: 3263966 - RNA, 19 nt, Artificial Sequence
  Description of Artificial Sequence: Synthetic oligonucleotide
uuccuccugaccuugcacc

SEQ ID NO: 3263967 - RNA, 19 nt, Artificial Sequence
  Description of Artificial Sequence: Synthetic oligonucleotide
gagcacugcacagacagag

SEQ ID NO: 3263968 - RNA, 19 nt, Artificial Sequence
  Description of Artificial Sequence: Synthetic oligonucleotide
cuguguuccgcauacacca

SEQ ID NO: 3263969 - RNA, 19 nt, Artificial Sequence
  Description of Artificial Sequence: Synthetic oligonucleotide
ugcacagacagagacuccc

SEQ ID NO: 3263970 - RNA, 19 nt, Artificial Sequence
  Description of Artificial Sequence: Synthetic oligonucleotide
ugauguggaccacuuuggc

SEQ ID NO: 3263971 - RNA, 19 nt, Artificial Sequence
  Description of Artificial Sequence: Synthetic oligonucleotide
aggaauguuucucucaguu

SEQ ID NO: 3263972 - RNA, 19 nt, Artificial Sequence
  Description of Artificial Sequence: Synthetic oligonucleotide
uucuuguaggagcacugca

SEQ ID NO: 3263973 - RNA, 19 nt, Artificial Sequence
  Description of Artificial Sequence: Synthetic oligonucleotide
gaugugaacacagucaagu

SEQ ID NO: 3263974 - RNA, 19 nt, Artificial Sequence
  Description of Artificial Sequence: Synthetic oligonucleotide
guaucuuccggaguccugg

SEQ ID NO: 3263975 - RNA, 19 nt, Artificial Sequence
  Description of Artificial Sequence: Synthetic oligonucleotide
cuugcaccaagccuugccc

SEQ ID NO: 3263976 - RNA, 19 nt, Artificial Sequence
  Description of Artificial Sequence: Synthetic oligonucleotide
ucugagggccuccauggug

SEQ ID NO: 3263977 - RNA, 19 nt, Artificial Sequence
  Description of Artificial Sequence: Synthetic oligonucleotide
cuggauauacuuccagcag

SEQ ID NO: 3263978 - RNA, 19 nt, Artificial Sequence
  Description of Artificial Sequence: Synthetic oligonucleotide
cauacaccaguaucuuccg

SEQ ID NO: 3263979 - RNA, 19 nt, Artificial Sequence
  Description of Artificial Sequence: Synthetic oligonucleotide
ugaacacagucaagucagg

SEQ ID NO: 3263980 - RNA, 19 nt, Artificial Sequence
  Description of Artificial Sequence: Synthetic oligonucleotide
uugguuagaugcgugcgag

SEQ ID NO: 3263981 - RNA, 19 nt, Artificial Sequence
  Description of Artificial Sequence: Synthetic oligonucleotide
cagagacuccccuucacgc

SEQ ID NO: 3263982 - RNA, 19 nt, Artificial Sequence
  Description of Artificial Sequence: Synthetic oligonucleotide
uuccgcauacaccaguauc

SEQ ID NO: 3263983 - RNA, 19 nt, Artificial Sequence
  Description of Artificial Sequence: Synthetic oligonucleotide
caagucaggggugaagggg

SEQ ID NO: 3263984 - RNA, 19 nt, Artificial Sequence
  Description of Artificial Sequence: Synthetic oligonucleotide
ucuugaggguguugguuag

SEQ ID NO: 3263985 - RNA, 19 nt, Artificial Sequence
  Description of Artificial Sequence: Synthetic oligonucleotide
ugcgguucuuguaggagca

SEQ ID NO: 3263986 - RNA, 19 nt, Artificial Sequence
  Description of Artificial Sequence: Synthetic oligonucleotide
caagccuugcccucugugc

SEQ ID NO: 3263987 - RNA, 19 nt, Artificial Sequence
  Description of Artificial Sequence: Synthetic oligonucleotide
uuguaggagcacugcacag

SEQ ID NO: 3263988 - RNA, 19 nt, Artificial Sequence
  Description of Artificial Sequence: Synthetic oligonucleotide
aguccuggacucugagggc

SEQ ID NO: 3263989 - RNA, 19 nt, Artificial Sequence
  Description of Artificial Sequence: Synthetic oligonucleotide
uuagaugcgugcgaggaau

SEQ ID NO: 3263990 - RNA, 19 nt, Artificial Sequence
  Description of Artificial Sequence: Synthetic oligonucleotide
acaccaguaucuuccggag

SEQ ID NO: 3263991 - RNA, 19 nt, Artificial Sequence
  Description of Artificial Sequence: Synthetic oligonucleotide
acacuucuuccuccugacc

SEQ ID NO: 3263992 - RNA, 19 nt, Artificial Sequence
  Description of Artificial Sequence: Synthetic oligonucleotide
auacuuccagcaggaaacc

SEQ ID NO: 3263993 - RNA, 19 nt, Artificial Sequence
  Description of Artificial Sequence: Synthetic oligonucleotide
uguaggagcacugcacaga

SEQ ID NO: 3263994 - RNA, 19 nt, Artificial Sequence
  Description of Artificial Sequence: Synthetic oligonucleotide
gugauguggaccacuuugg

SEQ ID NO: 3263995 - RNA, 19 nt, Artificial Sequence
  Description of Artificial Sequence: Synthetic oligonucleotide
aggaaacccaccaaggggu

SEQ ID NO: 3263996 - RNA, 19 nt, Artificial Sequence
  Description of Artificial Sequence: Synthetic oligonucleotide
gacucugagggccuccaug

SEQ ID NO: 3263997 - RNA, 19 nt, Artificial Sequence
  Description of Artificial Sequence: Synthetic oligonucleotide
gcauacaccaguaucuucc

SEQ ID NO: 3263998 - RNA, 19 nt, Artificial Sequence
  Description of Artificial Sequence: Synthetic oligonucleotide
aauguuucucucaguugug

SEQ ID NO: 3263999 - RNA, 19 nt, Artificial Sequence
  Description of Artificial Sequence: Synthetic oligonucleotide
guaggagcacugcacagac

SEQ ID NO: 3264000 - RNA, 19 nt, Artificial Sequence
  Description of Artificial Sequence: Synthetic oligonucleotide
cugcgguucuuguaggagc

SEQ ID NO: 3264001 - RNA, 19 nt, Artificial Sequence
  Description of Artificial Sequence: Synthetic oligonucleotide
agcaggaaacccaccaagg

SEQ ID NO: 3264002 - RNA, 19 nt, Artificial Sequence
  Description of Artificial Sequence: Synthetic oligonucleotide
auacaccaguaucuuccgg

SEQ ID NO: 3264003 - RNA, 19 nt, Artificial Sequence
  Description of Artificial Sequence: Synthetic oligonucleotide
auucccagcuguguuccgc

SEQ ID NO: 3264004 - RNA, 19 nt, Artificial Sequence
  Description of Artificial Sequence: Synthetic oligonucleotide
uguguuccgcauacaccag

SEQ ID NO: 3264005 - RNA, 19 nt, Artificial Sequence
  Description of Artificial Sequence: Synthetic oligonucleotide
uaaaguacucaucagaagg

SEQ ID NO: 3264006 - RNA, 19 nt, Artificial Sequence
  Description of Artificial Sequence: Synthetic oligonucleotide
cuuaauucaaaguagauug

SEQ ID NO: 3264007 - RNA, 19 nt, Artificial Sequence
  Description of Artificial Sequence: Synthetic oligonucleotide
aauuuaauucuuuauagca

SEQ ID NO: 3264008 - RNA, 19 nt, Artificial Sequence
  Description of Artificial Sequence: Synthetic oligonucleotide
ugguuaauaaucaaaaugc

SEQ ID NO: 3264009 - RNA, 19 nt, Artificial Sequence
  Description of Artificial Sequence: Synthetic oligonucleotide
aaugucauccaugagagac

SEQ ID NO: 3264010 - RNA, 19 nt, Artificial Sequence
  Description of Artificial Sequence: Synthetic oligonucleotide
ucaauuuaauucuuuauag

SEQ ID NO: 3264011 - RNA, 19 nt, Artificial Sequence
  Description of Artificial Sequence: Synthetic oligonucleotide
uuaaucuuaauucaaagua

SEQ ID NO: 3264012 - RNA, 19 nt, Artificial Sequence
  Description of Artificial Sequence: Synthetic oligonucleotide
uuuacuacuuccuucaacc

SEQ ID NO: 3264013 - RNA, 19 nt, Artificial Sequence
  Description of Artificial Sequence: Synthetic oligonucleotide
aaucacuagaacuauccuc

SEQ ID NO: 3264014 - RNA, 19 nt, Artificial Sequence
  Description of Artificial Sequence: Synthetic oligonucleotide
aguaaggucucuuggaacc

SEQ ID NO: 3264015 - RNA, 19 nt, Artificial Sequence
  Description of Artificial Sequence: Synthetic oligonucleotide
gauuggaaguccuaggugg

SEQ ID NO: 3264016 - RNA, 19 nt, Artificial Sequence
  Description of Artificial Sequence: Synthetic oligonucleotide
uacuuuuggaaucugauga

SEQ ID NO: 3264017 - RNA, 19 nt, Artificial Sequence
  Description of Artificial Sequence: Synthetic oligonucleotide
aaccuuugaaaacugugac

SEQ ID NO: 3264018 - RNA, 19 nt, Artificial Sequence
  Description of Artificial Sequence: Synthetic oligonucleotide
agcuauaugccccuggacc

SEQ ID NO: 3264019 - RNA, 19 nt, Artificial Sequence
  Description of Artificial Sequence: Synthetic oligonucleotide
uuuaacucaacauugcuuc

SEQ ID NO: 3264020 - RNA, 19 nt, Artificial Sequence
  Description of Artificial Sequence: Synthetic oligonucleotide
aaugcauucuuuuaaguaa
